United States Patent Application Publication US 2004/0265849 A1 - sequence listing, part 13

SEQ ID NO: 28695 - DNA, 201 bp, Homo sapiens
aactgtccagagctggccccggagctttctggctggaccacatactgatctgtcctgggccactttctctgagcccagctggggactcagcatagtccctytccctacagacgcccagaagtgtgagctgatctgccagtcggcggacacgggggacgtggtgttcatgaaccaggtggttcacgatgggacacgctgcag

SEQ ID NO: 28696 - DNA, 201 bp, Homo sapiens
ggacaagagcctgactggggcacatctctgcccataccccccttcctagagcatgggccagggcttgtggaatagggattaacccagcagacgagaccatkaggagttctgtccatggtgccctcagcactggctggtggcagggttaccttggatgggctttgttcctggtgtcaccctcaccagctggggggctcctgg

SEQ ID NO: 28697 - DNA, 201 bp, Homo sapiens
agaatcgcttgaacctgggaggcagaggttgcagtgagcagagatcgtgccactgcactccagcctggggacagagtgagaccctgttaaaaaaaaaaaamaaaaaaaaaacaaagaaaaaaacaaaacttcaagcttttgatgatctgagcagctctgttctccaaggtgctggaggacagccagtcatcaccttcatca

SEQ ID NO: 28698 - DNA, 201 bp, Homo sapiens
aatcgcttgaacctgggaggcagaggttgcagtgagcagagatcgtgccactgcactccagcctggggacagagtgagaccctgttaaaaaaaaaaaaaaraaaaaaaacaaagaaaaaaacaaaacttcaagcttttgatgatctgagcagctctgttctccaaggtgctggaggacagccagtcatcaccttcatcatc

SEQ ID NO: 28699 - DNA, 201 bp, Homo sapiens
ggagccctgctccccagctggcttcactgccagccttggctaacatccattcatttgttcagagctgggtgctgtgctacctctgtgggccctctgtgggrtgaggtattgggtggggtggggtgggggtcagggttcttgtggttgcaggtgacagatccagctcacactagctgaagccaaagaggggtgtattggcag

SEQ ID NO: 28700 - DNA, 201 bp, Homo sapiens; identical to SEQ ID NO: 3437

SEQ ID NO: 28701 - DNA, 201 bp, Homo sapiens
agaaacaaaacctgggggcttatattcttagcttaatagggagagaaaggggaagggagaaaggtttctttaggaaagacaagtgggtttttaggagaacwaacgggagatgaagtttgtgataatgcttacttaagcagggtcaagtggtatttctgtctttatgaccgtgaaattcccttaaggggatttctgacaacc

SEQ ID NO: 28702 - DNA, 201 bp, Homo sapiens
cagatgctgctgcttttaaggaaagctgagaaggcttctttctgcatctgttggctttcagatgtcttcagcttacactgatctgtatcctaatgctgggkttccaaatgggccctcacacaggctgggaacaggaccccaggagagggagtgcttgtatgcatgtatgtcctggaggggccatgacctgtgccagctcct

SEQ ID NO: 28703 - DNA, 201 bp, Homo sapiens
cagccttggagagaagattggtcctccccactacgtggttggaaaactgaggccaggaagagcgatctgagctccgggtcaggtcagggtctcctgctgcyggcctgcctgcctgcctgccttcccggggcaggctcctgggatgtatcaggactcctctgtcttccccattccaggctcggcatggagcatgacggtcag

SEQ ID NO: 28704 - DNA, 201 bp, Homo sapiens
gccctcaaccatgaggatggcttctcctcagccttcgtgatagctcatgagaccggccacgtgtaagtggcagcagcacggtgggtgggactggcagctgygccgtgagctccagggaattctgtggctgtgggaggatttgcccagcttggcctggtcccagtgtcctgggaggtgtcagaggagctggcctgccactgc

SEQ ID NO: 28705 - DNA, 201 bp, Homo sapiens
caaaatacctgctcagtgctgctcaagacttttgatgactcagtgctggtcatcaaaaaccagaaggtgggagaacctgtcacagagaagaaacagagcasaggggctaaggagacaggaagtttaaatggaatgtggcaccctggatgggaccaggacatttgggggaaattagagaaatctgaataaaatgtagacttt

SEQ ID NO: 28706 - DNA, 201 bp, Homo sapiens
ccctcaaccatgaggatggcttctcctcagccttcgtgatagctcatgagaccggccacgtgtaagtggcagcagcacggtgggtgggactggcagctgtsccgtgagctccagggaattctgtggctgtgggaggatttgcccagcttggcctggtcccagtgtcctgggaggtgtcagaggagctggcctgccactgcg

SEQ ID NO: 28707 - DNA, 201 bp, Homo sapiens
gaaggttgagcgttagacagtcagggtagcgaaggggagatagcagtagcgctgcttagttatttgggtgctctgtggctcagaccctggaggccaccttsgggaaactgccttgacgaaattgtcttgggttttcttttaaatactcatttgatgtgaacattgagaacatcatgccaagtaaaacaagccaagctggat

SEQ ID NO: 28708 - DNA, 201 bp, Homo sapiens
tttaaatactcatttgatgtgaacattgagaacatcatgccaagtaaaacaagccaagctggatgcagtggctcatgcctggaatcccaacactttgggasgctgaggtgggcagatctttgggaggctgatgtgggtggattgcttgagcccaggaattcgagaccagcctgggcaacagagcaagacctcgcctctaca

SEQ ID NO: 28709 - DNA, 201 bp, Homo sapiens
tggtgacattgggagcaaaagagatgggggaggtgccacacactttaagcaactagattttgtgtgaactgagtgagaactcacttaccaccaaggagatmgtgctaaaccattcatgagggatctgcccccatgatccaatcacctcccaccattccccgcctctaacactggacatcacatttcaacatgagatttgga

SEQ ID NO: 28710 - DNA, 201 bp, Homo sapiens
attgagaacatcatgccaagtaaaacaagccaagctggatgcagtggctcatgcctggaatcccaacactttgggaggctgaggtgggcagatctttgggrggctgatgtgggtggattgcttgagcccaggaattcgagaccagcctgggcaacagagcaagacctcgcctctacaaaaaatgtaaaaagttagctgggc

SEQ ID NO: 28711 - DNA, 201 bp, Homo sapiens
ggaatcccaacactttgggaggctgaggtgggcagatctttgggaggctgatgtgggtggattgcttgagcccaggaattcgagaccagcctgggcaacakagcaagacctcgcctctacaaaaaatgtaaaaagttagctgggcgtggtggtgtgtgcttgtaatcccagctgctctggaggctagggtaggaagattgc

SEQ ID NO: 28712 - DNA, 201 bp, Homo sapiens
aaagggctgcattctttgatgagctgtgcagggcactggcccacagtcctgggcctgtgagaaaaaggaattatctagagcagtgctcttcaaacttgccyatgcctgccagtcagctggggatcttgttcaattgcagatccttattcaggaggcctggggtggggcccaagactctgcatttctcacaagctcccaggt

SEQ ID NO: 28713 - DNA, 201 bp, Homo sapiens
tggtgtgtgcttgtaatcccagctgctctggaggctagggtaggaagattgcttgagcccacgaggtcaaggctccagtgagctatgaccataccatgccrctgcactccagcctgagtgacagagcaagagcttgtctcacaaaaaaaaaaaaaaaagaaaagaaataagccagacatccagacatgtaaggacaaacac

SEQ ID NO: 28714 - DNA, 201 bp, Homo sapiens
gcgtttcacaaataggttgtgggggataaatgctgagcattgtgggcttgtgagagggactcttttgggctgggtgggtccatccctgtgcaccctggtgycactctgcacatgcagcctgggcatgaggtgggctgagcagctggatccctggagcaccacccagaccagcctgtaggctccaggagctccagagacagt

SEQ ID NO: 28715 - DNA, 201 bp, Homo sapiens
aagaccctccatgggcttcaagatgcttctctccacactgtgtccttctgtcctcattgcagactgtgggacacctaagatggggcttgtgtgggctgcaraacaggaagtctgtgctctgcctccagctccacaccttgccaacccagtggtccaagatctcttcatctccctgggtcctcccaattgtggaatggggaa

SEQ ID NO: 28716 - DNA, 201 bp, Homo sapiens
ccactccaaaacttagtggcttcaaacaagaataattcttagctcacggtcctatgggtcatcagtttgggctgggctctgtggggtggttcttctacttrtcttcttggaccaagtcatgcagatgccctcagctggtaggtctctgggagctggttggtctaggatggcctcgctcacatgtctggtggttggtactgg

SEQ ID NO: 28717 - DNA, 201 bp, Homo sapiens
tcacaaaaaaaaaaaaaaaagaaaagaaataagccagacatccagacatgtaaggacaaacactccatgagggcactttgctggtgatttccaggggctgstggagggtgaatgaggggttagtgtttaataggcgaggagtttcagttgggaaagaagaaaatgttctggaaacagatggtggtaatgattgtacaacaa

SEQ ID NO: 28718 - DNA, 201 bp, Homo sapiens
tcccttggaccttgggactattggtgggtgggaggcatcagacagatctaaaggtgtagccaagactggactgataattttcttttcctctctccttcctyatttttttttaaacctgcggcactttctgctttgaattcctggtatctttgagttccttgactttcctctctacctccaatctgaccagacttgctgtgg

SEQ ID NO: 28719 - DNA, 201 bp, Homo sapiens
agtgtttaataggcgaggagtttcagttgggaaagaagaaaatgttctggaaacagatggtggtaatgattgtacaacaatgggaatgtgcttaatgccaytgaaccatagacttaaaaatagttaagatgggctgggcgcggtggctcacgcctgtaatcccaccactttgggaagccaaggcaggcagattgcctgggg

SEQ ID NO: 28720 - DNA, 201 bp, Homo sapiens
cccctcgtgagtgtgcttggctagggtggggagggcagggagtccctccccagggcggaggggcttggaggggaaggcactggggagacagtgcaggagaraagggcccctgtgggtggttgtgtatgctaacgcatgaggacacaaacttgttggtggaggcagatcactcctacctgcatccactaagaactctcaggt

SEQ ID NO: 28721 - DNA, 201 bp, Homo sapiens
gtccattctcccttctcatcccctctatagggaccttctccccaactccatggttttgggatatctgagccctagttctccatctccatctccaagcagargcagcctgtttagaacagcaccacgggagatggggactggccaaggccagctgcatggcttggttggctctaggaatgcaggagttctgaacccccacaa

SEQ ID NO: 28722 - DNA, 201 bp, Homo sapiens
ggggggtctgggctggaaagcagcagtccccttaattctccccatgtgcacagggctcagggcaggggcactgtgaacccagacctccccagagcctcacrccctagtcccagctcagtgacaaatggcctctgtaaagcgggggagggaggccttggagagagaacgacaagagcatgggccatggctaggctctttctc

SEQ ID NO: 28723 - DNA, 201 bp, Homo sapiens
gtggggtgcacagcaggggcgaaggcgcggaggcccatgggaactgtggctctggtacagaacgggtcctgtgtggctccattgtggggatttttgttgcyggtaattctaaaagggaaaccaacacagcataataagaataaccagcactggggtggtgtgagccacctcctgtctctcccagatgatgacattcgcctt

SEQ ID NO: 28724 - DNA, 201 bp, Homo sapiens
ctttgcccagagagctttgtgcatttttttcatgctaccctgtaggaaaagggaagggagttgcctctagttgagccctcccttattgcctggccctgtgytaaggcctgtatagatatgagagcagtcccacctaacaggtgggtaaactgaggctcagcaagctaaagtagccacacgtagctagtattgctgagctgg

SEQ ID NO: 28725 - DNA, 201 bp, Homo sapiens
cagggagcctgctctctttaaggcagtcttggaaatggagcctggagggaggttgggcagggctgggtcatcctggcataatcccacatctgtgtgcatcrtagcatggctggcaagggagtccaggagcagcttcctcgggcctttaatgcagctgatccaggagctccagcctcctgaaaaggggacaagagcctgact

SEQ ID NO: 28726 - DNA, 201 bp, Homo sapiens
agcgggcccctgcctgaagccattgccatcctggtgagccccactctgtgcggtggcaacccctgcccaccccacttgtccccttagctcgctacatctgytgccaagccagcgtgacaccattctggtgtctttaggagcctgggcaagggcaaggcaccttccatcctgggattagctcctcatttgtgcttaaaagcc

SEQ ID NO: 28727 - DNA, 201 bp, Homo sapiens
cacacctgccccatgcttggcagagccctgccgcagtgacagccaggtgcccagagtctagcctatcagccccgactggcttccagagcctttgccctggkctgccaagcttcctcaacccatagccaggggccagcacacctgtcattttggaggaagccccctgaagttccagcatctccttgcccttggggtcagtag

SEQ ID NO: 28728 - DNA, 201 bp, Homo sapiens
cccaggctggagtgcagtggtgcgatcatggctcactgtagcctcgacctcctgggctcaagtgatcctcctgcctcagcctcccaagtagctgggactayaggcatggctgactgtgcccagctaatttttatttttttttttaaaaaatagacaaggtctcactacgttgctcagactggtcttgaattcctgagctca

SEQ ID NO: 28729 - DNA, 201 bp, Homo sapiens
gtttggatagtcttggtcctaccttccttctccccacaatctgccagaaagtgggtgagcagagaggagagtaatgatcttcccagaggttctgcaaggcyggtaaaagtaggttcttttgttcactgtggggttgccctgtgtgtgggaacagaaagggcttgcgatgggtgagggcccagctagccagagcttccctga

SEQ ID NO: 28730 - DNA, 201 bp, Homo sapiens
cccaggagagggagtgcttgtatgcatgtatgtcctggaggggccatgacctgtgccagctcctacagtctctgcttggtgaggggctccacatgcatggyttctgggcactgtgtgccctcagcgaggccccttccagacccactgagtggcctggtctgagcccctgataagggctctaagagggtcagctcaaatgat

SEQ ID NO: 28731 - DNA, 201 bp, Homo sapiens
atgcatgtatgtcctggaggggccatgacctgtgccagctcctacagtctctgcttggtgaggggctccacatgcatggtttctgggcactgtgtgccctsagcgaggccccttccagacccactgagtggcctggtctgagcccctgataagggctctaagagggtcagctcaaatgatgggggtgagggtggaggggat

SEQ ID NO: 28732 - DNA, 201 bp, Homo sapiens
gggagagtagatgggagcttgttccccaagcagaatttgggagcttcccttggaaaccagaagaggtcttttgatgggctataagtgagatgtttctttcyattgggcaaagtgtacttttgaaacttggcattccagggctggcctggcctgaaacgtgatgcattcagaagggggtaggaagccctccaatctggagtt

SEQ ID NO: 28733 - DNA, 201 bp, Homo sapiens
gtcaaacttcccagcaagggaaggagagcagatggggaccgacagtctgcctccctggggaccagcagctcatcctgtccattgtgtggaagcttttattyggctgggatgcttgacgctcgaattgccttaggggatttccatggggccagtaataacagcttgcctttgcattccccttggaacacctgtctgctgtga

SEQ ID NO: 28734 - DNA, 201 bp, Homo sapiens
aaatattgcattatgaatatttgtaaagaaccaaaaatccacacacaactcatgcattttatatgtctccataatatatagcttcatttgttttgatataraacagattgctggtcttcaaaggaccccacagataaaagtaacagagagatggcagatagtggaagatactggccctgtcgcaataagcaaaatatagag

SEQ ID NO: 28735 - DNA, 201 bp, Homo sapiens
gggggagagggcaatttggagaggggagggcatgtgggccagggcggcagacagcacagcaaggttgtgggggtagggttgaggaaggagacccaagtgtrtggcaacaggtgacagaagcctgcagagacctccctggcatctaggtgtggcgggatggctggcaaggcagcagtatggactgtggcgtaaagaagaggc

SEQ ID NO: 28736 - DNA, 201 bp, Homo sapiens
gcagacagcacagcaaggttgtgggggtagggttgaggaaggagacccaagtgtgtggcaacaggtgacagaagcctgcagagacctccctggcatctagktgtggcgggatggctggcaaggcagcagtatggactgtggcgtaaagaagaggcatgagaacagctccccgtggtggcatccaaggtggatctgcaggtt

SEQ ID NO: 28737 - DNA, 201 bp, Homo sapiens
gggttgaggaaggagacccaagtgtgtggcaacaggtgacagaagcctgcagagacctccctggcatctaggtgtggcgggatggctggcaaggcagcagyatggactgtggcgtaaagaagaggcatgagaacagctccccgtggtggcatccaaggtggatctgcaggttcccagggtcctctcctggcccaggggtga

SEQ ID NO: 28738 - DNA, 201 bp, Homo sapiens
ggtggatctgcaggttcccagggtcctctcctggcccaggggtgatggaccagttctctggggcgaggacctctttggacatggggatattggggaacctyctagggcctggaactggagcacagggagggtgagaagagagacagagaggccctttcatcatttccttccagccaggttgcagccagaagcttccagtct

SEQ ID NO: 28739 - DNA, 201 bp, Homo sapiens
caggagagaagggcccctgtgggtggttgtgtatgctaacgcatgaggacacaaacttgttggtggaggcagatcactcctacctgcatccactaagaacyctcaggtctgccttctgtgcgtttgtctgaaccagtggttctcaagctcatgcgcagaagattccccagagtctgggtggccctacttcttcatgcgtgt

SEQ ID NO: 28740 - DNA, 201 bp, Homo sapiens
gatggtggtaatgattgtacaacaatgggaatgtgcttaatgccactgaaccatagacttaaaaatagttaagatgggctgggcgcggtggctcacgcctrtaatcccaccactttgggaagccaaggcaggcagattgcctggggtcaggagttcaagaccagtctggccaacatggtgaaaccccgtctctactaaaaa

SEQ ID NO: 28741 - DNA, 201 bp, Homo sapiens
tcgcctgtcggctgtactgtgtgttcatgcctcttatttctctctttcccgctgcttgccgtccctggttcaggcgggcctcatccgcacagacagcaccracttcttcattgagcctctggagcggggccagcaggagaaggaggccagcgggaggacacatgtggtgtaccgccgggaggccgtccagcaggagtgggc

SEQ ID NO: 28742 - DNA, 201 bp, Homo sapiens
gcagtgagccaagatcacgccattgtattccagcctgggcgacaagagcgaaactttgtctcaaaaaaagaaaaaattagttaagatggcaaactttatgktatatagatattaccccaatttaaaaaacctcatttgatcacaatgatgtttattgcaacagcaaaacattaggacgtatctcaaatgtttatctataga

SEQ ID NO: 28743 - DNA, 201 bp, Homo sapiens
tgcattcacagatgctcgcctgtcggctgtactgtgtgttcatgcctcttatttctctctttcccgctgcttgccgtccctggttcaggcgggcctcatcygcacagacagcaccgacttcttcattgagcctctggagcggggccagcaggagaaggaggccagcgggaggacacatgtggtgtaccgccgggaggccgt

SEQ ID NO: 28744 - DNA, 201 bp, Homo sapiens
aagatcacgccattgtattccagcctgggcgacaagagcgaaactttgtctcaaaaaaagaaaaaattagttaagatggcaaactttatgttatatagatrttaccccaatttaaaaaacctcatttgatcacaatgatgtttattgcaacagcaaaacattaggacgtatctcaaatgtttatctatagaagattggaca

SEQ ID NO: 28745 - DNA, 201 bp, Homo sapiens
ccagtctgggtaccctcgcctttggctgcaaatggagcccttccagatatagtcactggtgggagtgaggtcctgagtgaggggctgctcaaggcagcccrtcctccctggaagagacagcgctgggaacagaatagcgggtgcaaattcttgcaggccttgctcatgaaaaccccagcccctgggaagggaaagcctggg

SEQ ID NO: 28746 - DNA, 201 bp, Homo sapiens
cctgacgcttctcagcacccaggacagtgcttgcgccagtgggccctcaaatatgtatgcggctttgaagtaatcgtgatgtgaagatggggtaactgagrcttagaaggctaatagcttgctcgaggacatgcagggtgctaggatttaaatacacatcatgcctgtttttcagacgagacacagcaggagagaagagtg

SEQ ID NO: 28747 - DNA, 201 bp, Homo sapiens
gttaggtacctaccccagtacctggcatgcagtaggcttgtaatgaatgtttccttcccttaaactgtattttcttcttgcaggtagatgagatttaccaygatgagtccctgggggttcatataaatattgccctcgtccgcttgatcatggttggctaccgacaggtaaaccaccttgtcagcaggcagggtttgcggg

SEQ ID NO: 28748 - DNA, 201 bp, Homo sapiens
tgtctcgtagttctgtgtggccccatgacccttgtgtctcagtggtcacatgctccagtgtgggaagtggggtcctgcaaattcctctccttccagctagrtaaggctgtggtcagcatctaaaaggtgacccagtcacactgggcaacgctgctttcctggagtccctgcccctccattgaggacctccacattccctgt

SEQ ID NO: 28749 - DNA, 201 bp, Homo sapiens
ctctggagtgtttcccggtcacttctgtccttaagctgtccatgtctggcctcagtcttcttatctgtaaaatgggactgggccacatagacctgctgtaytggcagagaaaccccattgcgttctagaagctgctgtaattggctggagctaggggccagaggagtcacttgtgtcctgaactgtggtccctgggactcc

SEQ ID NO: 28750 - DNA, 201 bp, Homo sapiens
gtcagcatctaaaaggtgacccagtcacactgggcaacgctgctttcctggagtccctgcccctccattgaggacctccacattccctgtttgtcagagtwagagtgggtcaggtccaggggacgatgtgtgtggccaccccctgcaaacggtggtcctcggtcctctggtgcctcctgctccttgtacccgcaccctgct

SEQ ID NO: 28751 - DNA, 201 bp, Homo sapiens
tttggtaaatcaagtcacaagattattgactatcagagctagtcagaggagggtccatggagaccctgtcgcccagctctctgtttacagagtaagacacygaaccaggggtggggggtagcagaagccacaatccaggcccctatatcctgttaataggatatcatcacatcaatccacctgcccaggtcacaccatgta

SEQ ID NO: 28752 - DNA, 201 bp, Homo sapiens
tgagccagagattaaccgtttagattgtggaaaggcccatggagttctaggctcagggcaatggctcttcaccattggtatcaggactatttggcaacagrtacagtgtcccactgaggctccttagaagcagtccttgcatgtccctctggtcaagtgaagacttggtgctctcctttgtaccctttctgtccccgggca

SEQ ID NO: 28753 - DNA, 201 bp, Homo sapiens
agggcatccagcagcggcaggtggtgtgcaggaccaacgccaacagcctcgggcattgcgagggggataggccagacactgtccaggtctgcagcctgccygcctgtggaggtgagccagaggggatggggaggccaggtccagtcccttgggccaaagtcccaaatactagaattgcttcttcctgctcacaggaaatca

SEQ ID NO: 28754 - DNA, 201 bp, Homo sapiens
atggtgccacctgagggctccactggcatccttggattttcatacaagctacggacagcatcctgtggatttgatgctggagccagattgattttactggraggtgtcaatgggaggttttcagacaacacccaggattcacattcctgcctctgatagtttgttacctgaaatgacgaaggctgtggttgtgaagccacc

SEQ ID NO: 28755 - DNA, 201 bp, Homo sapiens
gggacgccagaggggcagtgggtgccacaatctgaacccctacatcccattaacaagatatcatcaagtaagtacagtctatggaccctaccctgctcccyagacctttcagtggccctggtgttgcagcatgggccactcagtggagcaaacccagcttgtagctgtctgtgtgaccttcacctccctgagcctcagata

SEQ ID NO: 28756 - DNA, 201 bp, Homo sapiens
aatccttcactttgttaaaagataattttcaggaaaaggtaaactcatgactctcatagagaaataaaaatgaacatatgttaaagatttgactccacatkaatgagggaaccaggcagatgttataactcgttcaaaagagaacccaaggacagaaacattatagattaggaattttataatgaatgtgcaaaaggagac

SEQ ID NO: 28757 - DNA, 201 bp, Homo sapiens
caaactagtgtaatgagcacttatctttgccaggtgctttaaagatgttgtttgcaatgttattattcactggtaagggtcaacatcagccccattttatrggtgaagcaactgaggcttggagggtttaagtgacttgccaaaggcctcacacttttaagtggtagagcctggatttgaactgaaatctgcttgattcca

SEQ ID NO: 28758 - DNA, 201 bp, Homo sapiens
tgggatttgagaggctcagtgctcacaggagtatcccggagttcctcagatgccctatggaggccacagtagccccatgacttttctcctttatggagatrttgccaactttgatttttacagcaaccttgtgggttagagataaagggtggttcatcttcatgttataagagagacaatggaggccagagaagcgaggga

SEQ ID NO: 28759 - DNA, 201 bp, Homo sapiens
tttatgaactcttctcgttgtcctgagagcctcagtcgtggggcgcggggatttctatcatcctcctggggcagcagcagccctgcgaactgggtacaatkatcattcccattctacagatggtgaaactgaggcagcacagtggggctgagtagtttcctcaccatcaatccgactccagagtctgtactctcagcctct

SEQ ID NO: 28760 - DNA, 201 bp, Homo sapiens
ccaccctctgctgtctccagaaatctagttcttcgatccccagggaagaactagtcttctgtggaggtcatggcagaggctgctagcatccggggcaggcygagtgcgggcttgcttgcctgtttgtcgggtgagttccctgaaaggttagagttttccggggagcctggtggggagagcgaagcaggggcggcccaggag

SEQ ID NO: 28761 - DNA, 201 bp, Homo sapiens
ggagcacagggagggtgagaagagagacagagaggccctttcatcatttccttccagccaggttgcagccagaagcttccagtctgtttcctctagaaacyctcttggcagccagcctgtctggatgataggtgcctggtccacctccactccccaccctgccccacctggctgacaatacatagatgttggggtggttgc

SEQ ID NO: 28762 - DNA, 201 bp, Homo sapiens
ctcttggcagccagcctgtctggatgataggtgcctggtccacctccactccccaccctgccccacctggctgacaatacatagatgttggggtggttgcygggacaacactggctagcacctctgccaattgtagggtcctaccagctctgacctgcctcagagcccctttctgagcctggggcctgctcagatggcctg

SEQ ID NO: 28763 - DNA, 201 bp, Homo sapiens
ccccacctggctgacaatacatagatgttggggtggttgccgggacaacactggctagcacctctgccaattgtagggtcctaccagctctgacctgcctyagagcccctttctgagcctggggcctgctcagatggcctgtatagaagagcttggtgcctgttttagacctgggaggttttggcgcagttggctgtcaga

SEQ ID NO: 28764 - DNA, 201 bp, Homo sapiens
agtcaccttgtgccttgtgagaagggccagggttgcacaccaaggggctggtccagggcctgagactccatgttgctgtcgtctccctaggactgagaaargacaggaggggtcattgtggccattcctctgtcttcaagcaatgttgcccacatctgtccaggttcagaggcagtaagtgatcagggaaggtgtatgagc

SEQ ID NO: 28765 - DNA, 201 bp, Homo sapiens
gggttgcacaccaaggggctggtccagggcctgagactccatgttgctgtcgtctccctaggactgagaaaggacaggaggggtcattgtggccattcctstgtcttcaagcaatgttgcccacatctgtccaggttcagaggcagtaagtgatcagggaaggtgtatgagcaggtcaggttttccaaggcctgggcttgt

SEQ ID NO: 28766 - DNA, 201 bp, Homo sapiens
gtaatgaagtgttaaaaaacataccccaaatccccaaaccatgggggtgtgtttacaggacacaggacccaactcaaagagctctcaaccaccaaagctgygacaatttgagcaacaaaacaaatcacagagaattatagcccaaggtataaaatagataaaagtccatactgataacataaatgatagaataaataaacg

SEQ ID NO: 28767 - DNA, 201 bp, Homo sapiens
tggtatcatgcacccttgacatggcctgatgaggaagcaccttacccctgtgggcttcctccccaatagcccccatctaaccatgagaaaaccatcagacktaccctaattgaaggacacaaaatacctgctcagtgctgctcaagacttttgatgactcagtgctggtcatcaaaaaccagaaggtgggagaacctgtca

SEQ ID NO: 28768 - DNA, 201 bp, Homo sapiens
tacagggagtgccacaaggtacccgaacacccttcatccaagtgtaggaatcctggagctcaggaagcaatggatggaaaatgggtgaactcaggctaagrggcccacctaagggtgacactgagagttcctatccctccctgcccgcgtgggatttctgacttccccttacctctgaaccgactgcattgaagtgactct

SEQ ID NO: 28769 - DNA, 201 bp, Homo sapiens
gaaaaccatcagacgtaccctaattgaaggacacaaaatacctgctcagtgctgctcaagacttttgatgactcagtgctggtcatcaaaaaccagaaggygggagaacctgtcacagagaagaaacagagcagaggggctaaggagacaggaagtttaaatggaatgtggcaccctggatgggaccaggacatttggggg

SEQ ID NO: 28770 - DNA, 201 bp, Homo sapiens
tattcctgcagcttcagatgatgcgaccgggctccccgctcagccttgtcgcacacgctgctgggcgctgtctttttctgtgcctgtttgcacatctataytgggtcatcttccttaagacttcttcaaatctcaggactagagaaccatttgagcactttgaagcataaaggggtagttgttttcagcatttagtgagta

SEQ ID NO: 28771 - DNA, 201 bp, Homo sapiens
ccctgaggccccaccagggcaatggggggcctggctggactaggcccacggcagcctgcccaccccatagggatccagttcaccaaatacggctgccggcrcagacgagaccaccacatggtgcagcgacacctgtgtgaccacaagaagaggcccaagcccatccgccggcgctgcaaccagcacccgtgctctcagcct

SEQ ID NO: 28772 - DNA, 201 bp, Homo sapiens
tctgctgatttcgtggctgcctctgtctaggccagtgctttccaccttttatcatgatgtacccctaaatgttttagacatttcctcccaatcatcagtcyaccccacgatgaggtttttttttttttttagaggtggattttcactatgttgcccaggctggagtgcagtggctattcacaggcacaaacacagggcact

SEQ ID NO: 28773 - DNA, 201 bp, Homo sapiens
cccattgacaagtagtgactgaccactaggtgccacagggaccagggagggccctgaaggaccctgagctagcactcctgaagcacgatcacatggctacrtggtgtagcatatatggtgacaagtcttcatgctctggttttgggggctggcggatggtggaggtggggctgttcagtgggcctggggctggggattcct

SEQ ID NO: 28774 - DNA, 201 bp, Homo sapiens
tcctgtgccagctccccatctcccctcaggctctccccccaactgagggtggcccccgcagcagcctggcctacaagtacgtcatccatgaggacctgctkccccttatcgggagcaacaatgtgctcctggaggagatggacacctatgagtgggcgctcaagagctgggccccctgcagcaaggcctgtggaggaggta

SEQ ID NO: 28775 - DNA, 201 bp, Homo sapiens
aggttctgctccgaccctaaggccttctcttcggcccctcccctcccagtgcatgccgcccttgcttctttctctggtcctgtgccagctccccatctccyctcaggctctccccccaactgagggtggcccccgcagcagcctggcctacaagtacgtcatccatgaggacctgctgccccttatcgggagcaacaatgt

SEQ ID NO: 28776 - DNA, 201 bp, Homo sapiens; identical to SEQ ID NO: 3446

SEQ ID NO: 28777 - DNA, 201 bp, Homo sapiens; identical to SEQ ID NO: 3448

SEQ ID NO: 28778 - DNA, 201 bp, Homo sapiens
ccagtgtgtgggtgaaggagacaggcacccccaaggattccagtgtgcagcagggctgagggcgaatggcgaagggccagggttctcagatgcgcccacaygtggagtcccctggagggcttgtgaaagcacagcgctgagccccagcctgagtttctgatgcaatagggctgggtggtgctggaggatgtgcattgccag

SEQ ID NO: 28779 - DNA, 201 bp, Homo sapiens
tgagccccagcctgagtttctgatgcaatagggctgggtggtgctggaggatgtgcattgccagcaagcttccaggtgacgctgctgctgcgtgtggggayatcactttgagatctgctgctctaggggattttacttcctcttccatgtagtcagggctgactctcccgtcaggtggctctgtagcccccaccctgagaa

SEQ ID NO: 28780 - DNA, 201 bp, Homo sapiens
cttctttctgcatctgttggctttcagatgtcttcagcttacactgatctgtatcctaatgctggggttccaaatgggccctcacacaggctgggaacagraccccaggagagggagtgcttgtatgcatgtatgtcctggaggggccatgacctgtgccagctcctacagtctctgcttggtgaggggctccacatgcat

SEQ ID NO: 28781 - DNA, 201 bp, Homo sapiens
ccagcaagcttccaggtgacgctgctgctgcgtgtggggacatcactttgagatctgctgctctaggggattttacttcctcttccatgtagtcagggctsactctcccgtcaggtggctctgtagcccccaccctgagaaaaagctttatagtgggtccagcaggggcaggggtggagggcgggcagtcagtgggtaagt

SEQ ID NO: 28782 - DNA, 201 bp, Homo sapiens
tagagaaatctgaataaaatgtagactttagttaataacagcatgtcagtattggttcgttaactgtgacaaccataccatagtaatggaagatgttaacwtttggaataaactgggtatggggagtttctgtaatatccttgcaacttttagctgaacctaaagttattttaaaataaagtttatttttagaataatagg

SEQ ID NO: 28783 - DNA, 201 bp, Homo sapiens; identical to SEQ ID NO: 3450

SEQ ID NO: 28784 - DNA, 201 bp, Homo sapiens
gcaacttttagctgaacctaaagttattttaaaataaagtttatttttagaataataggaattccaggccattcgccgcgaggattcagtgaagcaatgcraggaggcgcttgtgggctgtgccagccattagtggcaatgagtgttctgcttctgtttgagcgcgggtgggcttaatacccccagggtcttgctttttca

SEQ ID NO: 28785 - DNA, 201 bp, Homo sapiens; identical to SEQ ID NO: 3451

SEQ ID NO: 28786 - DNA, 201 bp, Homo sapiens
caacttttagctgaacctaaagttattttaaaataaagtttatttttagaataataggaattccaggccattcgccgcgaggattcagtgaagcaatgcarggaggcgcttgtgggctgtgccagccattagtggcaatgagtgttctgcttctgtttgagcgcgggtgggcttaatacccccagggtcttgctttttcag

SEQ ID NO: 28787 - DNA, 201 bp, Homo sapiens; identical to SEQ ID NO: 3452

SEQ ID NO: 28788 - DNA, 201 bp, Homo sapiens
tagctccctggcctcacctctggtgtttgggaggcagccatggagggccaaggcagacagggccaggtcctgggtgcacagccaggctggagtctgtcagygagctacctgtgcatgttccagagcagctgaggtcctggccatggtgccatgtgtcacacggcctctgcagttctaccagacatggcagccctgtccagc

SEQ ID NO: 28789 - DNA, 201 bp, Homo sapiens; identical to SEQ ID NO: 3453

SEQ ID NO: 28790 - DNA, 201 bp, Homo sapiens
aacagcaaaacattaggacgtatctcaaatgtttatctatagaagattggacaaaaatcatggtctgttcatacaatacagtactatacaacaagaaaaaygaacaggcctgaactgtacttaccaaaatagataaacttctgttatagagaatacatttaggtgagaaaaagtacttcagtatgaagtaaaaaagcactt

SEQ ID NO: 28791 - DNA, 201 bp, Homo sapiens
tgtgtatgtgcttttattaactccatccatttgcagatgaggaaactgagtcataggcggagatacgaagataatacagatagcttccattagtacaggaytttatagtttacaaagctcttttgcttccttcaatcttctgaagtgtgtatgcagatattgttattactcctgctttgcagagagtcaggtccctgtcct

SEQ ID NO: 28792 - DNA, 201 bp, Homo sapiens
ctcggtgcttagatggtgctaatacagtgttttccgtttggtgagtgatctgtattctctttgacggaggtgtgcttacagggaagtccataagagactgmggtcactgtccgtccccagaaagggagcagacatgctcagtgaaactgccagcaggagacttaaggccagcagaggacgtggaagggaaggctgaacagg

SEQ ID NO: 28793 - DNA, 201 bp, Homo sapiens; identical to SEQ ID NO: 3454

SEQ ID NO: 28794 - DNA, 201 bp, Homo sapiens
tcatttgatcacaatgatgtttattgcaacagcaaaacattaggacgtatctcaaatgtttatctatagaagattggacaaaaatcatggtctgttcatayaatacagtactatacaacaagaaaaatgaacaggcctgaactgtacttaccaaaatagataaacttctgttatagagaatacatttaggtgagaaaaagt

SEQ ID NO: 28795 - DNA, 201 bp, Homo sapiens
cagtgaaactgccagcaggagacttaaggccagcagaggacgtggaagggaaggctgaacaggtctcatgccccagggaactttccaatgatgaaaaactycccactattcagtgcatgtgagtactggctgggaagaaattccctgtcagatggagggggatggcttagcctgtttgggctgctgtaacaaaatatcctg

SEQ ID NO: 28796 - DNA, 201 bp, Homo sapiens; identical to SEQ ID NO: 3455

SEQ ID NO: 28797 - DNA, 201 bp, Homo sapiens
gcgaaactttgtctcaaaaaaagaaaaaattagttaagatggcaaactttatgttatatagatattaccccaatttaaaaaacctcatttgatcacaatgmtgtttattgcaacagcaaaacattaggacgtatctcaaatgtttatctatagaagattggacaaaaatcatggtctgttcatacaatacagtactataca

SEQ ID NO: 28798 - DNA, 201 bp, Homo sapiens
tccccactattcagtgcatgtgagtactggctgggaagaaattccctgtcagatggagggggatggcttagcctgtttgggctgctgtaacaaaatatccwgtgagtagcatagaaacaacagaaatttatttctcacagttctggaggctgggaagtccaagatcagggcaccagcagatttggtgactggtgagagccc

SEQ ID NO: 28799 - DNA, 201 bp, Homo sapiens; identical to SEQ ID NO: 3456

SEQ ID NO: 28800 - DNA, 201 bp, Homo sapiens
catcagaactgaggtctatgaaagggaagagcattcctaggtgcagtggctgcccttgggcctggcacacagcaggtatccagcctgagtttgtcctatgrcagctggtctgaatccaaccccctaccataccccagccatgctgggcacaacctcatcctagctttcacaggttctgctccgaccctaaggccttctctt

SEQ ID NO: 28801 - DNA, 201 bp, Homo sapiens
cactgctggcatcacatccctgatggcggcagtggcatttttttgtagagacagggtctcactatgttgcccaggctggtttcaaaatcttggcctcggcygggcgcggtggctcacgcctgtaatcccagcactttgggaggctgaggcgggtggatcatgaggtcaggagatcgagaccatcctggctaacacggtgaa

SEQ ID NO: 28802 - DNA, 201 bp, Homo sapiens
tccctgatggcggcagtggcatttttttgtagagacagggtctcactatgttgcccaggctggtttcaaaatcttggcctcggccgggcgcggtggctcaygcctgtaatcccagcactttgggaggctgaggcgggtggatcatgaggtcaggagatcgagaccatcctggctaacacggtgaaaccccgtctctactaa

SEQ ID NO: 28803 - DNA, 201 bp, Homo sapiens
tattattaagtctgactaatagtagtgtcggtgatttcattttctttttttgtagttttcagtttttatttctagtgaggtgttttgtattcataaacaargttatttaaaacaaaaaagctggagtatccaatgggaccactcaggaaatgggtgtccccaggagagggtgaactccctttcctttagggtggacaagca

SEQ ID NO: 28804 - DNA, 201 bp, Homo sapiens
tggggccctctagctccctcttcattttccagtagaggaagccgaggctcaagttggggaggagatccagggtcatggaatagcaggtgagtgtcaggtgycagggcacgcaaggaccaaggttcctgactcccaggcaatgttcctctcgcagttccaggcagcctctcctgtcagtggaaaggccaagcgtatgtgaac

SEQ ID NO: 28805 - DNA, 201 bp, Homo sapiens; identical to SEQ ID NO: 3459

SEQ ID NO: 28806 - DNA, 201 bp, Homo sapiens; identical to SEQ ID NO: 3463

SEQ ID NO: 28807 - DNA, 201 bp, Homo sapiens; identical to SEQ ID NO: 3465

SEQ ID NO: 28808 - DNA, 201 bp, Homo sapiens
cagtggccacacgtttttccagctcttaagtctagggctttgttcctttgcactatagcaccactcagcaaagaggagataaaaacaaatggtgacaccamgccctgtgtgttccctgttacctgtcctcagatccccattacctgagcacccgtgtgggtagcagcgtagaggcggctcgggtctctgcagaggttccca

SEQ ID NO: 28809 - DNA, 201 bp, Homo sapiens
cctgtagtcccagctacttgagaggctgaggcaggattgcttgagcctgggaggtcaaggctgcagtgagcccagtttgcgccattgcacttgagcctagrcgacagagcaagaccctgtctcaaaaacaaaagtaaatgctgtgaaaatagttgttttactgtttttttttttttttttttttgagacggagtcttgctc

SEQ ID NO: 28810 - DNA, 201 bp, Homo sapiens
tgagatggtgataaatggcagtgaaatgccagtgtggtgtaaagtagtcacagaaaaacaggaggcagctttattaacagagcccacgttgtgttttgttstatatggaaaagccctccctggttcaggaacctgtgtgatgtatttgggtgggcgcctttctgttgtggtgcacatggggtatgggttcctgcaggtggg

SEQ ID NO: 28811 - DNA, 201 bp, Homo sapiens
tgagcctggccttcccaaatctcagttcacttttctccactgtcatgtcatccggcttccttcccttgggttttctctcccctcttcctccctcatgaccmcttattagtatataaaaaatgagactcttgtctcagagcttcccaaattttcatcttattcaggatcttagtgaaatgcagattgaagggaattgagatt

SEQ ID NO: 28812 - DNA, 201 bp, Homo sapiens
aatatgtgcccaggggtttgtctaagcagttccaggctatggcctttactccatctggtccccatccctcttatctctctcatgtgtggctgcacctggasgcttggaccatagctgtcacagccccctggggaggaacccactccttggccatgtcagcctgtgcaatgcaaggctcttgtttgatctgtgtgctgacag

SEQ ID NO: 28813 - DNA, 201 bp, Homo sapiens
tttttttttttttttttaattaaagtttttttttttcttttttgttggaaaccacaggttcacatgccacggtgtctgattttgcagtgtttctggtggcscctggatttggcgtttgggttaatgagggaatgggtcagggatgtgcatggacagttctggctctaaggggtgagtcagagagagccgagcccctccttc

SEQ ID NO: 28814 - DNA, 201 bp, Homo sapiens
ggtttttttttttttttttaattaaagtttttttttttcttttttgttggaaaccacaggttcacatgccacggtgtctgattttgcagtgtttctggtgrcccctggatttggcgtttgggttaatgagggaatgggtcagggatgtgcatggacagttctggctctaaggggtgagtcagagagagccgagcccctcct

SEQ ID NO: 28815 - DNA, 201 bp, Homo sapiens
tgcctttgtgcagggtcaggccacatggtttgagcctggccttcccaaatctcagttcacttttctccactgtcatgtcatccggcttccttcccttgggktttctctcccctcttcctccctcatgaccccttattagtatataaaaaatgagactcttgtctcagagcttcccaaattttcatcttattcaggatctta

SEQ ID NO: 28816 - DNA, 201 bp, Homo sapiens
ttcctccaagaaggaccacaaactctatgtttcagttacttgaagccagttattttgtagtatctcccttaatttaagtttgtttgttgtttcctcatggytagctgcaagttttgcagttttgtaaggaatactgcggaaatggtgagttctaggtgcatccccttgggaggcacatgatgtgggtctgagtcattaccg

SEQ ID NO: 28817 - DNA, 201 bp, Homo sapiens; identical to SEQ ID NO: 3470

SEQ ID NO: 28818 - DNA, 201 bp, Homo sapiens
ggagaccccatctccctatgtagctgggactgcaggtgtgcactgaggtaggaggatcacttgagcccaggaggtcaaggctgcagtgagctgtgacggtrccactgcactccagcctgggtcacagagtgaggccctgtctcaaaaacgtaaaagtgaaaatctccaatggggcccaaggcctgaatgttttgtttgctt

SEQ ID NO: 28819 - DNA, 201 bp, Homo sapiens
cactcccagtgttcaggcgctgagtgtggcccctggagttcactgatgagtagtcttaccttggacctcgccttggcttttcttggaaatggcacattacwtttgtttattagtgtagcccctctgttgtgaagtggaatccagggagagggaagtaaagcttttaattttacctcttgccaaagtgaggccaagctctta

SEQ ID NO: 28820 - DNA, 201 bp, Homo sapiens; identical to SEQ ID NO: 3484

SEQ ID NO: 28821 - DNA, 201 bp, Homo sapiens
tccttgctccagagcgctggccttcctgccaactgcatccccatgaagtgttccctgtagcctttccatgttctgtacactttatgggtgtgagctgcagragaccagggaccgtcaggttgagattccctgtgttgccacaggacagtcattttgcaaaggccccgggcaggggagcagaggtgagccaccaacactgtg

SEQ ID NO: 28822 - DNA, 201 bp, Homo sapiens; identical to SEQ ID NO: 3471

SEQ ID NO: 28823 - DNA, 201 bp, Homo sapiens; identical to SEQ ID NO: 3473

SEQ ID NO: 28824 - DNA, 201 bp, Homo sapiens
gtttaaaaaaattttttttaaatgacattctgccattggctttctcagtgacttgggtctgtttgagcctacccttgtaaaatgtgtgaattcacctctgygcagcctgtttctgagtgagatgagagccatggacatctgtgctctgtgaccagcatggcttgaggcctattccttcaaagtcacagatgcctcctgtga

SEQ ID NO: 28825 - DNA, 201 bp, Homo sapiens; identical to SEQ ID NO: 3475

SEQ ID NO: 28826 - DNA, 201 bp, Homo sapiens
gatctgtgtgctgacagaaagcccagcttccttaagaacttttcatgtggaacactttggttttgagaagaaaataaatcagaaaccattaaaaatctatrattcactctcattattaaccaaaacttgttcacctttatttcatgtattatgggatccagcaaaacccatttatgggaccaaagaccctgcctgtattgt

SEQ ID NO: 28827 - DNA, 201 bp, Homo sapiens
ggtcaggctggtcttgaacttctgacctcaggtgatccacctgcctcccaaagtgttgggattacaggtgtgaaccgctgcgcccagcctttcctgaatayttttgatcctggttgcttgaatctgaggatgtggaacctgtggatatatggaagactgacagtatattctagctgactgtgcaattttgtataaaaagat

SEQ ID NO: 28828 - DNA, 201 bp, Homo sapiens
acccccttctcagatggtaggaatgtctaggccccaggtgctactagaggtgcagcagaaactccgccttccttgggggatgtggctgcccttccttgggrtgggcctgtgatcaggtcagaggccagttctgggagcctcaaaggccaggtggtgttgaaggattggcttcggagaatgagagggaaggagagatagtaa

SEQ ID NO: 28829 - DNA, 201 bp, Homo sapiens
ctgggcatgggtctgctggcatgtcagtatcaccgtgggggcgggggtgggggacttgtcggaaatgcagattcaaggctccaacgcagaccttcttaccrgaaccttgtgttgggggctgggatctgtatttaaaataagtgattctgatgctgccagccaggaccctcatgccagtgacattggagcaggtcactaaaa

SEQ ID NO: 28830 - DNA, 201 bp, Homo sapiens
tcatcttctgggtaagtggatgagagctgccacattcccttgtttagtccttcattcagtaaattatggttttccacacactcttgatttgccagacactrtgtaaggctctgggataaggtggtgggcagggtcagtgacccctaccctcacagaaccagttgcagctgtggggatgggggaaggccaaaggccgaggtg

SEQ ID NO: 28831 - DNA, 201 bp, Homo sapiens
gtttaacatttttatttacaaaaatgtatacatgatgaaaaacacataacaaagatacacggtgaaaactcctatttctatccctgaccccttcagttctkctcccctgaggccgctgtcaccagatgttcagtgcctagtcaagcatgactgtattcctctcttgtttattaccccagtggtatactaattatgctgttt

SEQ ID NO: 28832 - DNA, 201 bp, Homo sapiens
aagtaaaaagagctggtgctcatcgtgaaaggcattgaaacacccccactttggtggggggtggggtatgttaacagaaaaaccaaagtctctaaaatatyttaaagaggtttattccaatccagtgagtgtctgcgtcctgggaaaagcacggtctcaagaggtgtggggaaagggtgcttgaggccgttggattacggt

SEQ ID NO: 28833 - DNA, 201 bp, Homo sapiens
ggatgtgttcatagcactaggacctcgagctccactgatgactgagtggggagggctcagagaagggtccctgtggatgcccgggatgcctgggtttcagycccgtctcctgcatcgcctacattgcctgaatcttagggtcttacagatttatcatgaagtgggcttggcagcagatggtctggtttcttttgtgccttt

SEQ ID NO: 28834 - DNA, 201 bp, Homo sapiens
ccgccctggtggcctagggcgtaggaatggggtgggatgggatgggatggggtggggtggggtggaggagttattctacatagatagagttctgtttatgmagcactccctgccatacacatctctcactcaaatggtctggccagtcctggttctaatggtcattgtgtcattcccctcagcagcaggaaaggctggaat

SEQ ID NO: 28835 - DNA, 201 bp, Homo sapiens
ctttgcaacacaattctcataactggcaaaggtgtgcatgtaaaatttgtgactgtagtctgaggttttttttccctgtacaattccgccttcccccctgyaagcctgtaccaggagaggtctcagctgccttggaggcggtgagacacgtgggtgctcactgtggccctcaagggtgaggctggcactggggcatctggg

SEQ ID NO: 28836 - DNA, 201 bp, Homo sapiens
tggacttcattttccctcctccaatctgttccctgacaacaagcatttcttgtgcagtgtcaaggtgtataattgtcaatctttacagacacagctcttgygtactctgcccacatgatagtattggctgctggaggtatgggctgggctggttgggttttgagccctgtggatgtggagagctcagctcttgtatgcagc

SEQ ID NO: 28837 - DNA, 201 bp, Homo sapiens
caggaaatcgcatggacctgggtccttgtttccctacagcccaccaattttgctgcttttttctgccccctgaagctgagctcctgctgcaatttgtgttycctgctctccctgtcctgggcaaaccagtctgacaactttgtggttctcgctcccgcctccatcagcctggggattgactgtcccatttgtctgagctgg

SEQ ID NO: 28838 - DNA, 201 bp, Homo sapiens
aaaccttggtccttttcagcatctgctggccccttgtcccttggctcccttgctcttggcctgctggatttcccctctgcacccaggaaatcgcatggacytgggtccttgtttccctacagcccaccaattttgctgcttttttctgccccctgaagctgagctcctgctgcaatttgtgttccctgctctccctgtcct

SEQ ID NO: 28839 - DNA, 201 bp, Homo sapiens
ccctggcaggggggcagtgtccagtgccgctctcaattaaacgtgaagatgtgaagatgaataacactgtccagcttgcagagtggacggtggtgaggcargctttcaagttgcacctactttctagttgagtgacctacacaagtctttgattttttttttttttcttcctggaaaaaaaaagttgtctacttttctcat

SEQ ID NO: 28840 - DNA, 201 bp, Homo sapiens
cagaaaggggaagaagcagcacagcctgatgtctgtgacccatagtctctccagggtggagtccgctctgagatcttttcctcttccttccctggggcatrgggtcatctgaggttgaaggagtttgtccagatattcaggaaggtaggttcaggttatctgtcatctgcggggcctgaggggccatgtgggatgtgagct

SEQ ID NO: 28841 - DNA, 201 bp, Homo sapiens
gtggtctgctctccaggggatcttcctcccttccgagagggagttgctcttgggctagtgagagagtggcctgccaaatcctcaaaagtagccttcccctygccccttgaccttgaagtccagaagcagttagtgcctgctgagtgctccggccacccttctctatttgtgaagggaaacctggggacaggccatcggagc

SEQ ID NO: 28842 - DNA, 201 bp, Homo sapiens
tctgcccggcttgggtttgggacggccggagtttgagtaggcggtgacccagcttctccgcgttagtcgtgtggggttgtgtttgggagcaaagcctgacycctgacctagccggagttctggtagagtgaggtttgtggctgcggactgtgcttgtcccgggccgctgctgcttctcctccacccccaggggtggggtgc

SEQ ID NO: 28843 - DNA, 201 bp, Homo sapiens
tcttcagacattattagcacagccaaaattggggatggccttggttttattatggaatcgacgtttacaggaaacattcaagatttattattttgggaatsagaaccagtcagcgtgaccctgttatttttggtttaacccagggacaggcgtgtcctgccccatggcttgtgacatacttaatcatgttggaggcaggac

SEQ ID NO: 28844 - DNA, 201 bp, Homo sapiens; identical to SEQ ID NO: 3476

SEQ ID NO: 28845 - DNA, 201 bp, Homo sapiens
caccccaccggggttagcagtggagggagctggttggctggcgactgttgcctgctggctctgtctcctggagctgagcttactggtgggatgcccgctcmgagaagcacccttcttctcttcttaggagactctggacccccttctccaggtttctctccctttagaggcacattttcctccaagccttcaagccccttc

SEQ ID NO: 28846 - DNA, 201 bp, Homo sapiens
gaccggttccgggagttcttcgagagcaacatcaagtcctaccgggacgatatcgatctgcaaaacctcatcgactcccttcagaaagctgtaagcacctycccagcgggcccccgatagagcatgcacctccctgtgctgcctggagctgagtctagcaggggcatcaggccttctctgtgggttgtctgcctgcagctt

SEQ ID NO: 28847 - DNA, 201 bp, Homo sapiens
ctcctccagtgctctaggatacttctctgtcatggaggtctgaggagcaggtgtgctttctccacaccctcctcaaggctgcctcagctctgaaatccgayatgtgtacattctaggaacactgcttgcatgacccaccctggccttggtgttctgggtgaggcaggagaaaaacagtattatttctacctggagggctgt

SEQ ID NO: 28848 - DNA, 201 bp, Homo sapiens
tggtctcgatctcctgacctcgtgatcctcccacctcggccttgcaaagtgctgggattacaggcgtgagccactgcgctcagcctacatgcagacagttytaagagatatttgggtgtaaacatcaagagtcagctagaagttggaagtgtcacctagaaagggaaaacctgacttaagggctgggatctgctgttttct

SEQ ID NO: 28849 - DNA, 201 bp, Homo sapiens
ttctctgtcatggaggtctgaggagcaggtgtgctttctccacaccctcctcaaggctgcctcagctctgaaatccgatatgtgtacattctaggaacackgcttgcatgacccaccctggccttggtgttctgggtgaggcaggagaaaaacagtattatttctacctggagggctgtcacttgcagctggccaagagct

SEQ ID NO: 28850 - DNA, 201 bp, Homo sapiens
ctatattccagtagtggagtgcatgaatccagcatggtagcaagtctgcttggtggttgaagggtgctgcagtgtttttgggcttttgcagatttggcaatgtgtgttgaaagttaatcatttttcagttagtgtgccttggggcagaacaggaaggaacaaacaggaacagtcaggaagaccaaacatgagagagcttgg

SEQ ID NO: 28851 - DNA, 201 bp, Homo sapiens
actgggttcctggtagtgatgtgcagtcttcatttgcaatggagctggcaaatggggtgaggcctgagatgggcgcacagacctctgggaagctcacggtrtagcaggagggtgccgggctggctctgggcacccagggcctccctgagctgagtgacctggctaagcctcagtgttttccttgtgatgtagcactctcag

SEQ ID NO: 28852 - DNA, 201 bp, Homo sapiens
tagcaagtctgcttggtggttgaagggtgctgcagtgtttttgggcttttgcagatttggcaatgtgtgttgaaagttaatcatttttcagttagtgtgcmttggggcagaacaggaaggaacaaacaggaacagtcaggaagaccaaacatgagagagcttggttgggaaataagagtgggaggccaagtgccttgccta

SEQ ID NO: 28853 - DNA, 201 bp, Homo sapiens
ccagtagtggagtgcatgaatccagcatggtagcaagtctgcttggtggttgaagggtgctgcagtgtttttgggcttttgcagatttggcaatgtgtgtygaaagttaatcatttttcagttagtgtgccttggggcagaacaggaaggaacaaacaggaacagtcaggaagaccaaacatgagagagcttggttgggaa

SEQ ID NO: 28854 - DNA, 201 bp, Homo sapiens
cacacccagctaattttttgtatttttattagaggtggggtttcgctatgttggccaggctggtcttgaactcctgacctcatgacctgcccaccttggcytcccaaagtgctgggattacaggcgtgagccactgtgcctggcctatctgatccattcttacagcaacatggagtggcttgagagagcctcagagacacg

SEQ ID NO: 28855 - DNA, 201 bp, Homo sapiens
gagtccatgctccatcctcatgatgtatggcttctcagagcagcattgttccctgtctggagagccctctggccttacctggtgttcccctccaccatccygcacccccaggcaagtatatggtggaggttcgctgggctaggcaggcagtctgtcacttgtgcacttggacacccagttgctcctctctgtgggtgtgct

SEQ ID NO: 28856 - DNA, 201 bp, Homo sapiens
ttagtagagacggggtttcaccgtgttagccaggatggtctccatctcctgaccttgtgatcctctcgcctcggcctcccaaagtgctgggattacaggcktgaaccaccgcgcccggccgtgtgtatgctttttcttactttgaaagattactccaaattggccggttgtggcaagctgcttagtgtcttatatggccag

SEQ ID NO: 28857 - DNA, 201 bp, Homo sapiens
caccaacatctgcatcattgtccctggaatagggcattgctggatatttgatgtggtgcctctgggtccctcttaatgcgggagtccatgctccatcctcwtgatgtatggcttctcagagcagcattgttccctgtctggagagccctctggccttacctggtgttcccctccaccatcccgcacccccaggcaagtata

SEQ ID NO: 28858 - DNA, 201 bp, Homo sapiens
gactggcctaaacaatgaggggaggttttggctcttgaaactggaaagtcccaaggtggggtgagtttcaggtttgggttgatccaagtggctcagtgacrtcaacaggatcttgtttccatttctctgccttccacagcctccccttcatctatggtggagggaaggagtctaccacagacaaaccccgagcctccccct

SEQ ID NO: 28859 - DNA, 201 bp, Homo sapiens; identical to SEQ ID NO: 3490

SEQ ID NO: 28860 - DNA, 201 bp, Homo sapiens
aaagttgggctttaaatctctggagacctgaaaggaaacagccagggagcctttggtcagacaggtggtgcgatggcacagtgcccagcgaggggcagagkctgagaggagctgacgagcatctcctggagagtcctccttgcctgcctcctggatccctcgttcccaccctgctttgccctgctccttaccagagctcac

SEQ ID NO: 28861 - DNA, 201 bp, Homo sapiens
tcccaatccaaggccaacgtccttgggttccagaagctgggttcttggggtgaactgtgaaggagctctgaattttgcctgaactgagcctgagtagaacygggccagttgccagctctcggtgcagttatgcaaagcctggtcctgggttacaggctttgagaaggcagagcatcaccactattatatgggcaagttctg

SEQ ID NO: 28862 - DNA, 201 bp, Homo sapiens
gtctgaggaggctggaaggaggcgtctcctttgaggaggctgggaagaagagcaagctccctgctaaggagggccagggctgggtatgttgtgcctggcartggggccagagggctccactgagccagccatgtgggttggacagaggaggcaccgtggcccggagataccttcactgccatttcctttttgttattattt

SEQ ID NO: 28863 - DNA, 201 bp, Homo sapiens
gcagcggtgccagctacagccgagagaagtgcggggtccccttctcctgctgcgtgccagatcctgcggtgagttggcttgtgctggggcacagggagccygcccttcctgaagcccagaagctttcctgactcctccagtgctctaggatacttctctgtcatggaggtctgaggagcaggtgtgctttctccacaccct

SEQ ID NO: 28864 - DNA, 201 bp, Homo sapiens
gcttctactgcagatttggcatctcctatggggactggaactcttgaaaacaaggcagacttactaagccttctcagccttgcaagcttgattttacagcytcatctcctggtgatttatcttagtatgtttggggattttctgtcctagagaaataaggtgggattcaatggcttggtcttttagcccacatcttttcct

SEQ ID NO: 28865 - DNA, 201 bp, Homo sapiens
aggggcagaggctgagaggagctgacgagcatctcctggagagtcctccttgcctgcctcctggatccctcgttcccaccctgctttgccctgctccttascagagctcactaggggatcaggtggggacatcgtgtgtgccaaaggctcagacccctgtggtgttttcctgcagctgaagagcaagtgggatgagtccat

SEQ ID NO: 28866 - DNA, 201 bp, Homo sapiens
gctgtgaccaatgaggtcagataccatgaggaaaagtcttggcctccagctttggcaagagggaggcaggtccctgggggccttgaataagatgggtggggatggagcctgcaggattcggcaggtggtgaccagtcaccttcaggttgctcagcatgccagtgtaagacacctggggagggaaaggaagcggtcatgcat

SEQ ID NO: 28867 - DNA, 201 bp, Homo sapiens
gaggttgggtcgaggaagaaaacccactcccaagttggctgagagcgagtggcctgtggtaaagggaagaccaggagattgtgtattgtagaagcctttamagtagaaaggcacagtcaaccatggtgcagggaggtgaagaaggatgaggacaggacattggtaatggcttagacaaagtggaggttgttgatgttgacg

SEQ ID NO: 28868 - DNA, 201 bp, Homo sapiens
aagcagtcctcccacctcggcctccctggtagctgggaatacaggcatttttttttttacagctaatttttttagaaaaccttttttttttttttttttttaagagatgggggtcttgctatgttgcccaggctggtcttgaacgcctgggctcaagcaatcctcctgcctcagcctcccaaattgctgtgagccactgtt

SEQ ID NO: 28869 - DNA, 201 bp, Homo sapiens
aatgctccagatagacagaatggcagctgcaaagggcctgaggcaggaatgagctttgtgtgtgcaaaggacaaacagaaggccatgtggctggagctgartaagtgggagaagggacacaggtggggacagaggcatgcaggattcaggtcacaaaggatcatacaggtctcaataaatagttggaattactttctactg

SEQ ID NO: 28870 - DNA, 201 bp, Homo sapiens
tctaacgccaaggtcagctgctggtacaagtacctccttttcagctacaacatcatcttctgggtaagtggatgagagctgccacattcccttgtttagtycttcattcagtaaattatggttttccacacactcttgatttgccagacactatgtaaggctctgggataaggtggtgggcagggtcagtgacccctaccc

SEQ ID NO: 28871 - DNA, 201 bp, Homo sapiens
tgtatttcttactatgggttgtgataagatttgaaaacccttgtttagtggtttctcattgtcagttcacttttcttttccttttttttttttttttttttgagacggagtttcgctcttgttgcccaggctggagtgcaatggcacgatctcggctcactgcaacccccgcctctctggttcaagtgattctcctgcctc

SEQ ID NO: 28872 - DNA, 201 bp, Homo sapiens
cctgctttccaacccgctggccaacacagcagagagggacagattgagaggtgccttccctccctgtcccgaggttaggtgggtggcaggggtgggaaagsggggagcggagaaggaaaactgaaatgtttcttttcaacagtttattgcaatagtttcctcttctgtgggttgaggatgggggaaaaagtgtcactggga

SEQ ID NO: 28873 - DNA, 201 bp, Homo sapiens
ctataggattggcaggtggccttttttcatttgagattgggcccttaacatagagtgcatgggtccagtttgggtatggtattaaggaagcttgcagaagwaaaaaagggattcaactggatgtccaaggctgagagagtgtatgcgtgtaagtgtattggggaggagaatggtggcttccataaacgctacctatagggg

SEQ ID NO: 28874 - DNA, 201 bp, Homo sapiens
tcctggagagtcctccttgcctgcctcctggatccctcgttcccaccctgctttgccctgctccttaccagagctcactaggggatcaggtggggacatcktgtgtgccaaaggctcagacccctgtggtgttttcctgcagctgaagagcaagtgggatgagtccatcttcacgaaaggctgcatccaggcgctggaaag

SEQ ID NO: 28875 - DNA, 201 bp, Homo sapiens
ggtctataaatcatgctgctataaagacacatgcacacgtatgtttattacggcactattcacaatagcaaagactcggaaccaacccaaatgtccaacartgatagactggattaagaaaatgtggcacatatacaccatggaatactatgcagccataaaaaatgatgagttcatgtcctttgtagggacatggatgaa

SEQ ID NO: 28876 - DNA, 201 bp, Homo sapiens
ttttattatggaatcgacgtttacaggaaacattcaagatttattattttgggaatcagaaccagtcagcgtgaccctgttatttttggtttaacccaggracaggcgtgtcctgccccatggcttgtgacatacttaatcatgttggaggcaggacagagtgtctgttttgcttgtggtgcctgtggtttgcctcttcta

SEQ ID NO: 28877 - DNA, 201 bp, Homo sapiens
tctctgtttgtctgttattggcgtctaagaatgcttgtgatttttgtacattgattttgtatcctgagactttgctgaagttgcttatcagcttaaggagmttttgggctgagacaatggggttttctagatatacaatcatgtcatctgcaaacagggacaatttgacttcctcttttcctaattgaataccctttattt

SEQ ID NO: 28878 - DNA, 201 bp, Homo sapiens
ggtggactcccactggggatgggattgagtgtggggctagatccctggtctgtagaagggagtaggaaccctgttagttaaattttccccctcaggccacsttagtaggattttgaagagtcagccacactgtggctcttgattttgtgcctggtcacctgcttggtctctggtgatttccctcggggccagcagacactg

SEQ ID NO: 28879 - DNA, 201 bp, Homo sapiens
cctcccctgaagggaaaaaaaagaacaatttaaaaagtcaaaccattggctgggtgtggtggctcatgcaggtaatctcagcaatttgggaggccctggcrggaggattgcttaaggccaggagtttgagactagcctgggcaacataacatagtgagactcctatctctacctacacaaaaaattaacaaaccaacccag

SEQ ID NO: 28880 - DNA, 201 bp, Homo sapiens
ccctgcctgtattgttattactaatgtgtattagtctgtgaaagtcaccaaatccccgccatgttttgatgcctctcctttcttttctgttcagtgccacygtccttttttcattttcacgtagccttggcttgcctggtctcagcatgctaggttgcggttcatccctgcattgccttaaaaacatagttttctgcattg

SEQ ID NO: 28881 - DNA, 201 bp, Homo sapiens
agatctttccaatcctgcccaatagccataccagctgcaatcctccttaggcgctgcataccgtaaggcacagcttcttccccccggctcatgactcaccrtctgacgctattcctatccccttcctccccgggaccttttccccttcctccctgggaccttttccccttcctgtttaagaagccagggctgcctggagga

SEQ ID NO: 28882 - DNA, 201 bp, Homo sapiens
tgaaaaaggccagggagggaagaggggaggggagggaagcagtaaggtggagcaggcctggccagaaagagccaggaataaagcttcctctagtgtcttgrgcctaggccttcttccttcagtggaacctccctttgcttccagcaggaggaggcaggagaacctaggtctacaggctttcctgccatggtcttagggact

SEQ ID NO: 28883 - DNA, 201 bp, Homo sapiens; identical to SEQ ID NO: 3489

SEQ ID NO: 28884 - DNA, 201 bp, Homo sapiens; identical to SEQ ID NO: 3491

SEQ ID NO: 28885 - DNA, 201 bp, Homo sapiens
ggtaggttcaggttatctgtcatctgcggggcctgaggggccatgtgggatgtgagctaggagcatgccctacctggcagtgtggactttgctctgtgaarcatgttcacagtgctggtttccaacctaacttccttctctctttcctctgccccgcttagttggctggagttgtcttccttggagtcgggctgtgggcat

SEQ ID NO: 28886 - DNA, 201 bp, Homo sapiens; identical to SEQ ID NO: 3478

SEQ ID NO: 28887 - DNA, 201 bp, Homo sapiens; identical to SEQ ID NO: 3477

SEQ ID NO: 28888 - DNA, 201 bp, Homo sapiens
agctaaaagcccagcctttcctgagcatagatgcgccccctgctcattgtagttaacagtagggaggaggctcagccctggccagtgaatggcctgggccrctggatagctgcttatctgtgcctggagtctatctccagggctggagagctggggtgtgtggcagagatgctgggctgtttccccctgtcctcaccctgt

SEQ ID NO: 28889 - DNA, 201 bp, Homo sapiens; identical to SEQ ID NO: 3468

SEQ ID NO: 28890 - DNA, 201 bp, Homo sapiens; identical to SEQ ID NO: 3479

SEQ ID NO: 28891 - DNA, 201 bp, Homo sapiens
cgggatgtactccgtgaatatttgttgaatgaatgagtgaggagtgaatgaatgaactgagacttgtgattcagcccttctccccactgcctgacattttrgtcttggccctccctgggccccagtgctctgcttttgtaaaatggagggattggttcttggtgggggttctttacttagtgttcacagaccattgtggga

SEQ ID NO: 28892 - DNA, 201 bp, Homo sapiens
ctctatcatttggttagagtagcttttacagctgagaaatgggaataaaaataatctgtgaggatccattgggatgcaacaaaatcccaaacaaatcccaraattaaagcattcctccagggaagctgattgcatccttgtaaatcaggaacaataaagatgggtggctttcttcccatgacttgctttaatggttgtttt

SEQ ID NO: 28893 - DNA, 201 bp, Homo sapiens; identical to SEQ ID NO: 3481

SEQ ID NO: 28894 - DNA, 201 bp, Homo sapiens
caaaagagaaagaaggcaccaagcctggggtctgggttttctctcttacacttgctgggtggacggtggtgccactgaatgagacggagaagagttggggkgagctcggttggggttgggggaccaaggctgcgtagtggggcacagtaagagtaaaatatcgttagctgtcttaggaggacaagtaaagtagacattagg

SEQ ID NO: 28895 - DNA, 201 bp, Homo sapiens
ttcctgggcggggctcagtgggggtcaactctgttatctggcaacacagagacagctgtggaagctgcccctggagccctctgcacagtccttccccacaytggggccctcacatgggtttgctggctctgctgggagggcacatgtgttgccttttctcagaaccacccttccggcaggaggaaaagctggggtgtgata

SEQ ID NO: 28896 - DNA, 201 bp, Homo sapiens
ctgatggaaaattgcccttatttgagctgaactctgctcctttgatatcagaccccaaggcctgatccctagatcttcagacaaatgatttcttcatttcyatctcagtaatgcagtcaaaagggaaaagtctagtgttttaataatgtatatagtgtatttttgttttcactgctgggaagatgtccctttttctcttca

SEQ ID NO: 28897 - DNA, 201 bp, Homo sapiens
gtggtgttttcctgcagctgaagagcaagtgggatgagtccatcttcacgaaaggctgcatccaggcgctggaaagctggctcccgcggaacatttacatygtggctggcgtcttcatcgccatctcgctgttgcaggtgtgtcccaggagcctataggattggcaggtggccttttttcatttgagattgggcccttaac

SEQ ID NO: 28898 - DNA, 201 bp, Homo sapiens
cttgtagtatagtttgaagtcaggtagcgtgatgcctccagctttgttcttttggcttaggattgacttggcgatgcgggctcttttttggttccatatgractttaaagtggttttttccaattctgtgaagaaagtcattggtagcttgatggggatggcattgaatctataaattaccttgggcagtatggccatttt

SEQ ID NO: 28899 - DNA, 201 bp, Homo sapiens
ctgacctcgtgatctgcccgcctcggcctcccaaagtgctgggattacaggagttttactgtattttttacttgtatcattttttgttttgttttgttttkttttatatttttcaaatatttttcattcccagttggctgaatccatggatacagaactgtggttgcagaaggctgactgtattaaatctcacaatttctg

SEQ ID NO: 28900 - DNA, 201 bp, Homo sapiens; identical to SEQ ID NO: 3472

SEQ ID NO: 28901 - DNA, 201 bp, Homo sapiens
tcactaagatcagggtttttacaggatgccaggcactgagaccctcagaccctttggagagcctggtggagctcagagctggggcccagcctctcctgcasctgcatgtggaggccatccagggctggcggtcaggggcttgatggccttggaagctgggggcccaccttccccacactgtgccagggcagtgtttgtcac

SEQ ID NO: 28902 - DNA, 201 bp, Homo sapiens
agatgtcaatatgcttggaagaaggggatgatgctacaagttacacagagaaagaaacaggtcaaatacagagatcagaaatctgagtggtttcgggcttytcaatacatctgaatataggaggtgggggagtgatgccttcatcatgctcaatgaaatggatccccagcttagaactctgcacacagccaaactcattca

SEQ ID NO: 28903 - DNA, 201 bp, Homo sapiens; identical to SEQ ID NO: 3474

SEQ ID NO: 28904 - DNA, 201 bp, Homo sapiens
tatgtaagtattatataatttaaagcatttgtaatttttttttctttttgagacagagtcttgctctgttgcccaggctggagagcaatggtgcgttctcwgctcactgaaatctccgcctcccagattcaagcaattctcctgtctcagcctcctgagtagctgagactacaggtgtgcgccaccaggcctgctaatttt

SEQ ID NO: 28905 - DNA, 201 bp, Homo sapiens
gcctccgtttttctgccagtggattgagaggtggtggtggtctccagcagtggtctcactcttggcaggctatcagagtacccagggagctgcgtagaatkaagttttgagagtctttggtctaggtgaatgccagcgtttcagtttgcttatcttccattatagtagtgtcctctgtaactgtgaatcagggaggttatt

SEQ ID NO: 28906 - DNA, 201 bp, Homo sapiens
aatcacatccccagaacgactgccccaattcataggaagttgactgtcttttggcactgtgtgtgtgtgtgtgtgtgtgtgtgtgtgtgtgtgtgtgtgtrtacatgtgtgtatttcatcatttaggcttgccaaggcagagggcagggattgcttaatcagaaactccactagaacttaaggagtggcctgtggtgctga

SEQ ID NO: 28907 - DNA, 201 bp, Homo sapiens
gtctgaaactttttccttttaatatggtttacattctatctccagagaaaacacacttaacagaagacagaaaacatttaacaaatccaaagcaattaaamatagccacaaaaaaagagaataacctagactgacagctcacagagcaaggaggtggcagagacctgcccaggtgagcttggctgttgcccccagctcaat

SEQ ID NO: 28908 - DNA, 201 bp, Homo sapiens
ctcttccctgagcagtgtgaagaaccttcgcaggcaagctgcttttataccttcccagcagctatcaatcactgtcacgagggccaaaaatagcctgctcsgaaggctgtcttaggaaaacagcttggtgggcggggcctggcccagctgccagcttggaggtgtttttctgcctgtaggaggctggggaatgtttacgct

SEQ ID NO: 28909 - DNA, 201 bp, Homo sapiens
ttctggggaaagctgcccgtggcagaagctgcctgggcagaaggtctagcaagggtccctctgctgagctttggtttctcggatttcaagcaagaggaggktgggagaggacaggttccttgcaacttgcgtgtgtgttactgggggtgtagttactgtcaggggaccctctcagttctctcccatctccaagcaccgtga

SEQ ID NO: 28910 - DNA, 201 bp, Homo sapiens
cagcgtggggtcgctgggaggaggacagtgcactgagtctcacagtccaccgtagcaggctcttccctgagcagtgtgaagaaccttcgcaggcaagctgyttttataccttcccagcagctatcaatcactgtcacgagggccaaaaatagcctgctcggaaggctgtcttaggaaaacagcttggtgggcggggcctgg

SEQ ID NO: 28911 - DNA, 201 bp, Homo sapiens
catggtgcctgtgggtgtgtaatttagcatctcagagagttgcctggttaatgagcgtatagtgaggtcctagaagaaacctaggtcgaatccagcaccaygttggtttcagttggtcttagccagcttggcccacactctgatttttttagagtcttatgacccctagcttcttatgacccttattttaacagtttcctt

SEQ ID NO: 28912 - DNA, 201 bp, Homo sapiens
agaagctgcctgggcagaaggtctagcaagggtccctctgctgagctttggtttctcggatttcaagcaagaggaggttgggagaggacaggttccttgcracttgcgtgtgtgttactgggggtgtagttactgtcaggggaccctctcagttctctcccatctccaagcaccgtgatctgacttcctgtgactgcctgt

SEQ ID NO: 28913 - DNA, 201 bp, Homo sapiens
gtctgggggtaagtacctgccccacttctggatcgtaaaagcaaaaggtctctacctgttcagcaagccccctccccaccaaccactgactgtactccctyccagatgggctccgtgctggcttgcctagtgggctagggcacactgtgcctcccagcatgaacatttctcccccacccaaacccaggcacactatggaag

SEQ ID NO: 28914 - DNA, 201 bp, Homo sapiens
ggaaagacggcccatgcctagcagctctaaagccctcggcggcctttgtccctcagtagtgacagcagactgtctctctctgcacggctggcagagcagcwgctgaagtggaaagggagaacaactcactgcttgttcactgggacaggtagccatggctggcatgccgcctagggggcctcctctggggtacagacagcc

SEQ ID NO: 28915 - DNA, 201 bp, Homo sapiens
aaatgtgtgcctctctcaaaggagagactctctttgtgtggagccaaggttcccaccctgtaaggctcaggacccagcccagcaagctggaaaaacctccytttgctgcagtgggccctgagccacctcccttagctttgctcgctgacccccctgccctcccctgggatggtgtgccccgttctctgccccagctgttta

SEQ ID NO: 28916 - DNA, 201 bp, Homo sapiens
tgcatcacaggctcatgcagggctgatgctagcacggagggcaggtttgtcacatttgtgggtgtcaagcaaggggggagagagcaaactggactggtccragtgagtgcctgaggagatgggcattctgcagggatgggctctgaggacattaataaatacgacagcaggtggagctgagcttgagccccccgccccccg

SEQ ID NO: 28917 - DNA, 201 bp, Homo sapiens
cttcctccaacattagccagggctgtggctttcccttcgggaagggagacagcgttgagggaaagtggcttactgcagacttcagggccttactcacaggrccatcaccttccactgcgcctttggaaagtcagggtggggaagaagcaggcacccctcagggtggcccgcagcagccacagcaggccttgtaggaagtga

SEQ ID NO: 28918 - DNA, 201 bp, Homo sapiens
tgctgaacaaatttagggtaagcctggtcaggagcagccttgccccaggatgccagtggtctgctattctgttgggggtggggttctggggaaagctgccmgtggcagaagctgcctgggcagaaggtctagcaagggtccctctgctgagctttggtttctcggatttcaagcaagaggaggttgggagaggacaggttc

SEQ ID NO: 28919 - DNA, 201 bp, Homo sapiens
gctgccgagaacaggtccgtcctcagcccatcacaccattcagcggacaagaggagtcagtccctctctgttccctgctggtcccgccacatatctgcagrgtctcacctgtggcccctggtccccagtactctcatttgtaaagtggggtgtggggctacacaggggcttataggctcagatgctcacagcaggcagcgc

SEQ ID NO: 28920 - DNA, 201 bp, Homo sapiens
agatcaaaccatccctactgtgcaggaccgtgggcctggtgcagccagaccctttctgatttttcagaagaggatagattatctggaatttcatgaggaakttcccaaatcttgaaacatcatgtgggctaaatacatgtctgatgccaaacacagcccttgggcactggctggactctgcagggcctaggcttgggggac

SEQ ID NO: 28921 - DNA, 201 bp, Homo sapiens
ggcccctggaggaggcagaggaggccccccagctgatgcggaccaagagcgacgccagttgcatgagccagaggaggcccaagtgccgcgcccccggtgasgcccagcgcatccggcgacaccggttctctatcaacggccacttctacaatcataaggtgatgccccagcctggcctctcccctgggcgcatggggagcc

SEQ ID NO: 28922 - DNA, 201 bp, Homo sapiens
ttctcatgcagggcccctggaggaggcagaggaggccccccagctgatgcggaccaagagcgacgccagttgcatgagccagaggaggcccaagtgccgcrcccccggtgaggcccagcgcatccggcgacaccggttctctatcaacggccacttctacaatcataaggtgatgccccagcctggcctctcccctgggcg

SEQ ID NO: 28923 - DNA, 201 bp, Homo sapiens
cattcacatcctctgatgtttcatgcgggaatcttggttgggctttgtggccctatcttggtctaattcaacatatttgtaccgcctaatggcaagtcttwtcgtggtaaggctgttttttggggggttctgcagttgagattgggttggctcccggactttctctcctcactagtcttggctcactagtcctagtcctcc

SEQ ID NO: 28924 - DNA, 201 bp, Homo sapiens
ctgtcagcatcacccaccctgccattctctcacccatttctcatgcagggcccctggaggaggcagaggaggccccccagctgatgcggaccaagagcgaygccagttgcatgagccagaggaggcccaagtgccgcgcccccggtgaggcccagcgcatccggcgacaccggttctctatcaacggccacttctacaatc

SEQ ID NO: 28925 - DNA, 201 bp, Homo sapiens
tcctctgatgtttcatgcgggaatcttggttgggctttgtggccctatcttggtctaattcaacatatttgtaccgcctaatggcaagtcttatcgtggtraggctgttttttggggggttctgcagttgagattgggttggctcccggactttctctcctcactagtcttggctcactagtcctagtcctccctcttcag

SEQ ID NO: 28926 - DNA, 201 bp, Homo sapiens
aacctgtattctactgggagggagcgccttccaaaggtgccattaacctctttcacacagctgggtattagtgaggaagcccggggatggtctcctcaaastgccagacctccccagatgcagcgaggtggcttctgagcataggggagtctgctgacctcatcctagttgccggactctccctctgaccccgtttcatga

SEQ ID NO: 28927 - DNA, 201 bp, Homo sapiens
agggggtcggtctcactgtgaactgcccaagcaggggcctctgcagaaaagcatttccctttcagagacctgccaggggcagtgaccaccatggaggagaygagaggagatgcagacccagcatgctctctacagaagcctttactggggaggggtcagagttcatggatcaccgggaggtgcgagtagagtgttctgagg

SEQ ID NO: 28928 - DNA, 201 bp, Homo sapiens
caagggttttagaagtccgttcctgtaggcagcggtgcagactacggattagagggactgagaccagaagggaacaagctgggaagctgatatggtgtgaycagtgcctctactaggcactgctgggagaatgaagaggaggagacagattgggtaactttcagccttagaatcaacagacaactggtgacttaatcaata

SEQ ID NO: 28929 - DNA, 201 bp, Homo sapiens
tcatcaggaagcccactccctcaaatccttccccttctccaggccaactgtatttccctgcctcttgcatcacaggctcatgcagggctgatgctagcacrgagggcaggtttgtcacatttgtgggtgtcaagcaaggggggagagagcaaactggactggtccgagtgagtgcctgaggagatgggcattctgcaggga

SEQ ID NO: 28930 - DNA, 201 bp, Homo sapiens
ttgactgacatgtggccatgtgggtctgggccagaccctttcagccgcagccaccttgtgccaaggcggtgtgatgccaaggccgacggtgtctgtgccarggctgcgggtgttgggtgctgcactggccggcactcctctggctcacctgtctgtccacccttccttgtcttcccagcaagtaacttctaggtctgcaga

SEQ ID NO: 28931 - DNA, 201 bp, Homo sapiens
gccgcagccaccttgtgccaaggcggtgtgatgccaaggccgacggtgtctgtgccagggctgcgggtgttgggtgctgcactggccggcactcctctggmtcacctgtctgtccacccttccttgtcttcccagcaagtaacttctaggtctgcagacaagaggaagagaagatgaaggaagactgtctgccgagttctc

SEQ ID NO: 28932 - DNA, 201 bp, Homo sapiens
tctggctcacctgtctgtccacccttccttgtcttcccagcaagtaacttctaggtctgcagacaagaggaagagaagatgaaggaagactgtctgccgarttctcacgtgcccatcagtgacagcaagtccattcagaagtaagccttggtgtgcaggttgggcgggggagtcttcacatttgccatccccctcatcctg

SEQ ID NO: 28933 - DNA, 201 bp, Homo sapiens
ctcctcctcagcccgacccccatgccccccaccagggccatgtgcagaaccatccgggtgcattgcgatggcagtctggtctcctctggttatgcctggcyggcgagaagggtgctgtcacactcctgttacaaatgaggaaacagaggccagggaagccaaaggccagaagctgaggccctgccacaccctaggagtaca

SEQ ID NO: 28934 - DNA, 201 bp, Homo sapiens
agccacacttagggtgccctggactttggaatgtctactttggaattctgctgggcaagctgaagggaccctgctttaatctcaggatctcccttccaccycctgctaggcttgtggtgagtgaatgaatgacaatagggttgcctttgctaaatctggaaaaatccaggactattccaaagtagagtctcctgagagagt

SEQ ID NO: 28935 - DNA, 201 bp, Homo sapiens
gggagtctgctgacctcatcctagttgccggactctccctctgaccccgtttcatgatgctttgcagaaggggctgtagtgaggctgggcccagcaagccyggacctcaacccctctgccttggtgggtgggccctctggatctctcccgaggatgatgattggctaaaggctgccccggctaaaggctgccccacacgtt

SEQ ID NO: 28936 - DNA, 201 bp, Homo sapiens
gtgcggtgatgtctcgcagggacacagcagggcggcccttccggcaggcctgggctggcctgtggggtggcctgggttggccctgggccgtggccttgtcyagcacagaggtgggctgtgccagtcgagatatagacctcacgtagtcatccaggctaggagagggtgggggctcctgtccaggacccccaagcagcatct

SEQ ID NO: 28937 - DNA, 201 bp, Homo sapiens
aggctgtcttaggaaaacagcttggtgggcggggcctggcccagctgccagcttggaggtgtttttctgcctgtaggaggctggggaatgtttacgctgcmgggcaggaaaggggtgggttcactgctggtcaagtaggggcactgggagagggaggggttccactgggccctcacaggtagccccagggccacccctgcc

SEQ ID NO: 28938 - DNA, 201 bp, Homo sapiens
gatgaatgggtgctgtgattcaggcaacagcaagaactgcctgaaggaaagcagcgcagtggcatgctgtggtgggctgccgccacaggtacagtggtcakgggtgtcttccctaagagcagatattggagcagaaacctgaaaaaaatgggaaaatgcacattccaggtggcaggggcagcacgtgcaaagcccctgtgg

SEQ ID NO: 28939 - DNA, 201 bp, Homo sapiens
ggatgtttgaacctagaaaccccatttctaagttaccatgaaatccacattgtgcagggtcttcctgagtgctgccagggatacaaagaagtttccatggygtccctgttctcacagggcttttagtgccaacgaggagagagaaatgggatttgtgaatctaaaatatgggtcagaaatactgcatgattcccttatata

SEQ ID NO: 28940 - DNA, 201 bp, Homo sapiens
gctcagggccaggctctcagaggaaggggagctgtatcagggaggcctggatgctggactggactcagagagacctgtcagtgagaggccagaaccgcagyggggagtaaaggtgagctgggcctgtgtggtcagtccagggcaaggcgggagtggaggtggaggggagctctgtgcccgcctctcctggactcccctggt

SEQ ID NO: 28941 - DNA, 201 bp, Homo sapiens
ctctgatcatcgaggggctcctcaacattgcctgggggctgaggcggcccatccggctgcagatgcaggatgaccgggagcaggtgcacctcccctccacytcatggatgcccagacggcctagctgccctctgtgagtacccggtggcttctgtgacacctgctcagcctgagctcccgggttggggatatcccgagcct

SEQ ID NO: 28942 - DNA, 201 bp, Homo sapiens
ttgtgctggaacagtggcttttctgcttacttgctggtaatcttgggcaaagtgcttaagctcttgtccctgtcttctcatctgtaaaatgggaatatggygatactcacctcacaatatcgttgtagggactggaggagataactcagagaagatgccaaccatttacagcacatagggaacacagtgccgactaaccca

SEQ ID NO: 28943 - DNA, 201 bp, Homo sapiens
atggccctcacgtccccatctgccccagtgcacgtgaccacagggctctagggtgccagatctcccgacagcaggcagttgctctgtcagcatcacccacsctgccattctctcacccatttctcatgcagggcccctggaggaggcagaggaggccccccagctgatgcggaccaagagcgacgccagttgcatgagcca

SEQ ID NO: 28944 - DNA, 201 bp, Homo sapiens
ggggctcctcaacattgcctgggggctgaggcggcccatccggctgcagatgcaggatgaccgggagcaggtgcacctcccctccacctcatggatgcccrgacggcctagctgccctctgtgagtacccggtggcttctgtgacacctgctcagcctgagctcccgggttggggatatcccgagcctcagggtgggagcc

SEQ ID NO: 28945 - DNA, 201 bp, Homo sapiens
tcttctcttccccaggtcccctgggctacagggctgtgccccatcatacccactccttctccagcccagcactagctaccctggcctggggctcatcctgmcaagaggcctggaggttgggcccttctaggtggcccctgcctgacaccccactaggccttcgggaagcccagcgagcctgtttggcacacagctgctggc

SEQ ID NO: 28946 - DNA, 201 bp, Homo sapiens
agaggggcttggctcacaaccacaatctccgaaggacagctttgtgccccagccaacgaggggcttcacctgctggacccctacccaggtgcctgcctgtraggtgctctgccctcattctcgctcctttttatggaaaagtgagcagaggcttgggaggtgacagtgacagtgtgggggtggcctgagtcccccgccctg

SEQ ID NO: 28947 - DNA, 201 bp, Homo sapiens
ctccacctggacagtgcagagtcttctggggcagggaggagtgagttgagccagagggatgatggcgggagtggagaggaggggtctggtgattggaactrggcagcaggaggggacagcagtgtggaaggaggtgggagcagcagctgctgagtcgccgcctgccatctacaaccagacagccggctctcaccacaaaaa

SEQ ID NO: 28948 - DNA, 201 bp, Homo sapiens
cctgtgaggtgctctgccctcattctcgctcctttttatggaaaagtgagcagaggcttgggaggtgacagtgacagtgtgggggtggcctgagtcccccrccctgtgtgtgctatgggaaacaggagcatccacagaaggcactgcgctctcctggcccctcacctccctctgcgacctcgtcctcaccctctgtacctg

SEQ ID NO: 28949 - DNA, 201 bp, Homo sapiens
tgtgtgtgtgtgcatgtgagcatgtgtgtatgtgttaagtgtgagtgtgtgtgttgagtgtgaatgtatgtgtgtgtgcatgtgattgtgtatgcgtgtgtttttgtgtgtgtgtgtgtgtgtgtatgtatgtgtgtgtgaagctttacctccctgcctagcatgtaggaggccttgataagagtccttggccacattgac

SEQ ID NO: 28950 - DNA, 201 bp, Homo sapiens
gtgtgtgcatgtgagcatgtgtgtatgtgttaagtgtgagtgtgtgtgttgagtgtgaatgtatgtgtgtgtgcatgtgattgtgtatgcgtgtgtttttktgtgtgtgtgtgtgtgtgtatgtatgtgtgtgtgaagctttacctccctgcctagcatgtaggaggccttgataagagtccttggccacattgacatggg

SEQ ID NO: 28951 - DNA, 201 bp, Homo sapiens
tgatataggaatgattattttccaggcaaagagatggaggctcccagagtttaagtctctagtccaaggtcacattgcagtaaatgaaaggtgctggccayggccccaagctcacagccacttacaaaacagcaataccgtttccattaggctttggaggtctccacccagtatcagtgaacaggtctcagggacacaggg

SEQ ID NO: 28952 - DNA, 201 bp, Homo sapiens
aattcccctgggcctctctgcaggagcttgggacactgccagaagccccaaccacaaacctgtattctactgggagggagcgccttccaaaggtgccattracctctttcacacagctgggtattagtgaggaagcccggggatggtctcctcaaagtgccagacctccccagatgcagcgaggtggcttctgagcatagg

SEQ ID NO: 28953 - DNA, 201 bp, Homo sapiens
gaagactgtctgccgagttctcacgtgcccatcagtgacagcaagtccattcagaagtaagccttggtgtgcaggttgggcgggggagtcttcacatttgycatccccctcatcctgggcagcctttaggtggaggggttctgagcacttgttcagagatctgatggggtgccctgggggacagtgatggggtgcttcttt

SEQ ID NO: 28954 - DNA, 201 bp, Homo sapiens
gcaggttgggcgggggagtcttcacatttgccatccccctcatcctgggcagcctttaggtggaggggttctgagcacttgttcagagatctgatggggtrccctgggggacagtgatggggtgcttctttttgagcctgtccaataggggatccccaagctacacatgaccatggctgggaggcatgggcaatagaaaag

SEQ ID NO: 28955 - DNA, 201 bp, Homo sapiens
attgcatctccttctgtgtccaagcccgagcccctcgtggccagggctgtgtctgctccatcttcctctgcctggcgtccagggtggggctggagggcagygggtctccatgagtgagccatccccacaagctctctccactgagaggcacccgagaccaagaggcaagaacagaaccccccatagacctttgaactccat

SEQ ID NO: 28956 - DNA, 201 bp, Homo sapiens
ctcacctgtctgtccacccttccttgtcttcccagcaagtaacttctaggtctgcagacaagaggaagagaagatgaaggaagactgtctgccgagttctyacgtgcccatcagtgacagcaagtccattcagaagtaagccttggtgtgcaggttgggcgggggagtcttcacatttgccatccccctcatcctgggcag

SEQ ID NO: 28957 - DNA, 201 bp, Homo sapiens
aagaggaagagaagatgaaggaagactgtctgccgagttctcacgtgcccatcagtgacagcaagtccattcagaagtaagccttggtgtgcaggttgggygggggagtcttcacatttgccatccccctcatcctgggcagcctttaggtggaggggttctgagcacttgttcagagatctgatggggtgccctggggga

SEQ ID NO: 28958 - DNA, 201 bp, Homo sapiens
cctggtttgactgcacctcatgaggcgcaggccacagccttccccctccttggcagaggagagatgaggctgctgcagggatctcctgagctggccatctrcaggtcccttgctctgctgcccacctccctgccctgtctggcctcagtgagtcctcttggcgatgtctccctccaggttccaagccctgcgtctgacgat

SEQ ID NO: 28959 - DNA, 201 bp, Homo sapiens
ggtgacagtgacagtgtgggggtggcctgagtcccccgccctgtgtgtgctatgggaaacaggagcatccacagaaggcactgcgctctcctggcccctcrcctccctctgcgacctcgtcctcaccctctgtacctgctcactcatcctttttattccccttcctttagccctcagtgaagggcctgtttcagagcaggg

SEQ ID NO: 28960 - DNA, 201 bp, Homo sapiens
tgcctgatacctgttgtttcagggtaatgatgaagaccatccccttcactctcagcagtgacctagtttggacaataagttatatggtcactctcatcacwcacctctgaccctgagccagggaccaggttaccagcagccaggtcatctcccttgcagagggtcagtgcatcccttccagagttcccagtggcagaaatc

SEQ ID NO: 28961 - DNA, 201 bp, Homo sapiens
caggactattccaaagtagagtctcctgagagagtaaaggggacccaggattgaagttaggcagagattaacaaaggtgtagattagcccaaggacacatracatgacttgagtattctttaaatcttgttccaaaaggggtttagtgtgtaatgtgttgggtacccattgttagcattcaaataaatgttgatatgctag

SEQ ID NO: 28962 - DNA, 201 bp, Homo sapiens
tgcctgggcagaaggtctagcaagggtccctctgctgagctttggtttctcggatttcaagcaagaggaggttgggagaggacaggttccttgcaacttgygtgtgtgttactgggggtgtagttactgtcaggggaccctctcagttctctcccatctccaagcaccgtgatctgacttcctgtgactgcctgtgcaggt

SEQ ID NO: 28963 - DNA, 201 bp, Homo sapiens
tgcccctcacccgcagcaccggcagccttagcagtacggtttggggtgccttctcctccactgtctcatcccacttctccgaaggtgggcagggccacgcyctggggccagcgtcacgccctgggaccagcggctccttgtgagccttctccccgcttccgaggggctagaggagggacgccatctctggaggctgaggcg

SEQ ID NO: 28964 - DNA, 201 bp, Homo sapiens
ctctgctctaccgccctgtccactccagtgtgctgttgtctgtattagagtctgcaatagaaatgacaacactctgctctgatgctctgtgcagtccacarcctggtttgactgcacctcatgaggcgcaggccacagccttccccctccttggcagaggagagatgaggctgctgcagggatctcctgagctggccatct

SEQ ID NO: 28965 - DNA, 201 bp, Homo sapiens
gcttgtctgaaactttttccttttaatatggtttacattctatctccagagaaaacacacttaacagaagacagaaaacatttaacaaatccaaagcaatyaaaaatagccacaaaaaaagagaataacctagactgacagctcacagagcaaggaggtggcagagacctgcccaggtgagcttggctgttgcccccagct

SEQ ID NO: 28966 - DNA, 201 bp, Homo sapiens
ctcagatcttgtttctcttcaagctgcacctttgctgaatgacactgtaggggaggaaaattatcttctctttctacccatttaggttcactggctggggccctgtatttagattaacaaaagacagattaaggagaagaacaaacagaagtttgttaacacttgcatcatgcatgccctttggaatatccagggatgaat

SEQ ID NO: 28967 - DNA, 201 bp, Homo sapiens
caatgagagaatgatattcaaagttaattgtgggaagactagtgtcagagcacattaggagtgtgtagtttcgagactgcggctctgggtagagggcagcygaggttgctggcaagtattctggcaaatgactcagcttggccaggcttacacacagagtgaccgggattggcacagaggcctggggtggtctcgcagaga

SEQ ID NO: 28968 - DNA, 201 bp, Homo sapiens
aaaagagggagggaggcggagaattcgctgctggctgacggggctttccctccattcagatgcggccaagctgggggagggtgaacagtgggcggctatgytgggggcacacacatcacctgtgtaggcatgtctggcctgagtcatggagagccagcctgtccccagtacagccaagcccccgaccttgtccaggcaggt

SEQ ID NO: 28969 - DNA, 201 bp, Homo sapiens
agagcccagggaaactgttatgtcaccctggtgctatgtttacttctcctatcaggagtgattaaattcttaggatctcatgctcagaggttgacagttayattgaattttacccacttttaaaaaacctttggaagcacccgattatttgtctcagctttgatgagggctgtggaagagcaaatgtgtcatgacaagtca

SEQ ID NO: 28970 - DNA, 201 bp, Homo sapiens
ccaaggttcccaccctgtaaggctcaggacccagcccagcaagctggaaaaacctccttttgctgcagtgggccctgagccacctcccttagctttgctcrctgacccccctgccctcccctgggatggtgtgccccgttctctgccccagctgtttaccctacaagcccaccttgccctttatcccttcactttgccatc

SEQ ID NO: 28971 - DNA, 201 bp, Homo sapiens
ctaaaatggccatgagaccctaaaaatattaggaaacgcacactgaatgaaactaaaatgatttatgttaggggtgggagagaacaggtccagaggtcagrgctgggaatcgtgaggtaaagcagaaattgcaaatgttttccatcaaccccatcccccaccttgacacccccacaccccagaaacactgaactgttccca

SEQ ID NO: 28972 - DNA, 201 bp, Homo sapiens
gggtgtgcgtgttcccccttgcagtttgctgctgccacagctgtctttcagacaccccttaggtactcatgcagtttcctgtagatgtgatgtcaaaacgattaaattcatcaaaatgaatgaaagtctggtaaaggggatagggcgcaagcacagtgttgagatctgcagtggaattctgtgagtgatcctggagctcag

SEQ ID NO: 28973 - DNA, 201 bp, Homo sapiens
gcggcacctttggccgtgccgggcgagaggcggggagcggggcggggcgaggggcgaggggcggggcgaggggcgggcctggccccgagcagctgaagccyggggtcagcaggcgctgcgggcgcagctccggtgcaagcgaggacacgacacatgcagtggcttctggactgcgcgatgactggacggtgagtgatgaac

SEQ ID NO: 28974 - DNA, 201 bp, Homo sapiens
cagactctctcctcattcatggccactcctgcaggcaggcctcacattcccatctctggggctccacagtctctccagagcccccaactcccagtgtcaayaagaatagtaatgggagcctcttttcattatgggtgagcccaacacaaggcccatcttacaggtctcctcattcgtcttcacagaagtcatcgaggatta

SEQ ID NO: 28975 - DNA, 201 bp, Homo sapiens
cttttgtctcacagggcccttatgtccccagcagtgacatgtggcacacaggcctggggcagtggacagcacaggtgagggcagccgtagagagcctccaragcagccctgcagcagcaggcacccagaggggtctgcccctctgcattgcactcccagccccaggcaatcgggatattggacagtgcccattttgagcac

SEQ ID NO: 28976 - DNA, 201 bp, Homo sapiens
atcttctcttccataggctagaggtgagcctggttggtggggaagttgaggagtggttcagggggttccaggagcagagaatgtatgtttaaggtgtaagkggggagcaggaggactggaaatggttttcttgtcccaaattgctttgccttgaaacaagggcagaagccagaagtcttgcccactgggaaggctggtctg

SEQ ID NO: 28977 - DNA, 201 bp, Homo sapiens
ctcagagagacctgtcagtgagaggccagaaccgcagcggggagtaaaggtgagctgggcctgtgtggtcagtccagggcaaggcgggagtggaggtggargggagctctgtgcccgcctctcctggactcccctggtctccatcacctccacctggacagtgcagagtcttctggggcagggaggagtgagttgagccag

SEQ ID NO: 28978 - DNA, 201 bp, Homo sapiens
gaatgccgtcagcgtggcctgcacctgctctgtggcctgcacttgctgtcctccaccagcgggagcagctcaggctcccagctgtgccccacacacttgtyctcctttcttttgcttcccaggtcactttcgttatgacctatttgatttaaatcacgctgaaataagaaaataaaaatcacaatttcaggaaatgtgaaa

SEQ ID NO: 28979 - DNA, 201 bp, Homo sapiens
agaagggtgctgtcacactcctgttacaaatgaggaaacagaggccagggaagccaaaggccagaagctgaggccctgccacaccctaggagtacatgtgygtctttccctttttaggtcggagctcttaggcctgctgaaaacctacaactgctaccatgagggcaagagcttccagctgagacaccgtgaggtgagcct

SEQ ID NO: 28980 - DNA, 201 bp, Homo sapiens
ccaggccaactgtatttccctgcctcttgcatcacaggctcatgcagggctgatgctagcacggagggcaggtttgtcacatttgtgggtgtcaagcaagsggggagagagcaaactggactggtccgagtgagtgcctgaggagatgggcattctgcagggatgggctctgaggacattaataaatacgacagcaggtgg

SEQ ID NO: 28981 - DNA, 201 bp, Homo sapiens; identical to SEQ ID NO: 3528

SEQ ID NO: 28982 - DNA, 201 bp, Homo sapiens
tcctaatattcagtttaatatttcctcccagggataacagttgcctttgagatagtaataggctcccgtcctggcatctgtacacaacacagcagtgtggrggtggggtgggaaaagcggcagctccttctgtggatacaagatgttggctggatgggccactatggaagccttgaggaaaagaaaacatacttttggctt

SEQ ID NO: 28983 - DNA, 201 bp, Homo sapiens
cttcctgatggaagctgacttgggcgtggaagtcccccatgaagtgagtgggggccaaggctggggaggcctgctctagggtgaggggttcttgggtgacrgggcctcccaaggactcctggccagagccctgtcagttgatgtctccaggagctccacactctcccaaagggctcccagcctagcacagggaggcgccag

SEQ ID NO: 28984 - DNA, 201 bp, Homo sapiens
ctgttagcgaggtctgtgttcttagggttccctgcgcccctagacgcacattttctatcagttcctaatctggaacagacagaggtgatcctaatctcccrtgatttttgtaaaccaccttctttttcagagcggacaaaattaaaagactgcgagtacccgctgatttccagaatcctgcatgggccatgtgagaagatc

SEQ ID NO: 28985 - DNA, 201 bp, Homo sapiens
cctctgatcagtcccagcctgattcccgttccctgatgcctcaccttcttgctgccagatgcctctaggaactagggtccttcagactccagatgccctgdcctgggccttaggacatcttgacttccccagtggacagctggacagtgccctgctctcacccacagctgggaccctgaccatgccatgaggcccctgtgt

SEQ ID NO: 28986 - DNA, 201 bp, Homo sapiens
gaccctttgtcagccctggcaagtggacgctgctgctgttggaaggcaccgggagaagggtgaggctgagacacagctaggacagagagtgcccacttctsctctggtgggtgtgggaccctgccgggcctggtggccataggacctggtggcgcaggaccccctcccaggtgcagtgtgggcagagaggtcccctgcttg

SEQ ID NO: 28987 - DNA, 201 bp, Homo sapiens
tgaaatccaggcctcacctcagcctgccttgcttcccgcctgtgtcctaccccaggggctgctggtctcttctccttggcctgagctccctttctctgccrgcagccatctcagccctgcagttgtctgttttcagaaaggagccatcgccccagaacgggaacatcacagcccaggggccaagcattcagccagtgcaca

SEQ ID NO: 28988 - DNA, 201 bp, Homo sapiens
gtggggctggagggcagtgggtctccatgagtgagccatccccacaagctctctccactgagaggcacccgagaccaagaggcaagaacagaaccccccakagacctttgaactccatagatccatgctggcctctccttcataggaagctcagtgacacatctgtgcttgtagagcaccagtgagtatcaaaaacagctc

SEQ ID NO: 28989 - DNA, 201 bp, Homo sapiens
gggccacctgctcagctttcctccctgtcccccttcactcgtcttccagggtgcagtgcacaagcacctcctccaagaagctccattgcatctccttctgygtccaagcccgagcccctcgtggccagggctgtgtctgctccatcttcctctgcctggcgtccagggtggggctggagggcagtgggtctccatgagtga

SEQ ID NO: 28990 - DNA, 201 bp, Homo sapiens
aggagttgaagaccagcctgggcaacatagcaggaccctgtctcttcaaaaaataagaaaattagccagatgtggtggtacattactgtagtcccaggtattgtggaggctgaggcaggaggatcgcttgagtccaggaaatcaaagctgcagtgagctgtgattgcatcactgcgctccaacctgggtgacagaggggga

SEQ ID NO: 28991 - DNA, 201 bp, Homo sapiens
aaagctgcagtgagctgtgattgcatcactgcgctccaacctgggtgacagagggggaccctgtctcaaaattttttttagataaaaataagaaatagaattttttttttttttttttttggacaaaggtcgtgggttctttcttttacattttctttcttggagctcttacttatattaaagcttcagttacctccttca

SEQ ID NO: 28992 - DNA, 201 bp, Homo sapiens
agttaaaaggtatatttcgagtcttggtctcattcttacttttctacttccattctttctgacctgttaggtaatcattttctggcttatccttcttctgttttttttttttttgaataagcgcatatgcttctgtatatatttttaaggctaggtttattgaggtataatttatgtacagtagaaatcacttgttttagt

SEQ ID NO: 28993 - DNA, 201 bp, Homo sapiens
ttggctcactgcaacctctgtctcctgagttgaagcaattctcctgcctcagcctcctgaatagctgggattacaggcgcacgccaccacacctggcttattttttttttttttttctttttttttgagacggagtttcgctcttgttgcccaggctggagtgcaatggtgcgctcactgcaacctccgcctcctgggttc

SEQ ID NO: 28994 - DNA, 201 bp, Homo sapiens
gggaggttgaggtgggtggatcacttgagcccgagagttcgagatcagcctgggcaacatagtaagacccctgtatctacaagaaatagaagaaaaattasctgaataccctgtagtcccagctactcaggaggctgatgcaggaagattgcttgagcccaggaagttggtggctgcagtgagctgtggttgcgccactgc

SEQ ID NO: 28995 - DNA, 201 bp, Homo sapiens
aatagaagaaaaattagctgaataccctgtagtcccagctactcaggaggctgatgcaggaagattgcttgagcccaggaagttggtggctgcagtgagcygtggttgcgccactgcactctagtctgggtgacagagatctcatctcaaaaaggaaaaaaaaaaaatcaagtaaaataaaacgtagaactgaaagaaaaa

SEQ ID NO: 28996 - DNA, 201 bp, Homo sapiens
tcctgcctcagcctcctgagtagctgggactacaggcgcctgccaccgcgcccggctaattttttgtatttttagtagagacggggtttcactgttagccrggatggtgtcgatctgctgacttcatgatccgcctgccttggcctcccaaagtgctgggattacaagcgtgagccactgcgcctggccctattttagaag

SEQ ID NO: 28997 - DNA, 201 bp, Homo sapiens
tcccaaagtgctgggattacaagcgtgagccactgcgcctggccctattttagaagtcttttacttgcccccaagggcacagaaatactctcctattgtctttttttttttttttttagaagttttataattttatctgtgcatttaaatctgattcatcttgagacagtgttggtgtgtgggatgaggtaagacttgagg

SEQ ID NO: 28998 - DNA, 201 bp, Homo sapiens
ctgaccttttctgctattttcaataggctgttaatctcattcagtgaattttaatttttttatactgtctagatctagagttctcattttctatagttttmttttttcttattttttttttttcgagacggagtcacccaggctgaagtgcagtggcgcgatctcagctcactgcaacctctgcctcccgggttcaagcga

SEQ ID NO: 28999 - DNA, 201 bp, Homo sapiens
gcctgggcaacagagggagactgtgtctcaaaaaaaaattattttgttggagttattgaacatcgttagaaaaaattttagaagctgttagtattagtaartgttctttataatttatagacttaagttatagtttgaattatgtgacttttctaggtcagctggttaagatgctgctttatacagaggtaactcgctatc

SEQ ID NO: 29000 - DNA, 201 bp, Homo sapiens
gtgtccttatagtagcatgatttataatcctttgggtatatacccagtaatgggattgctgggtcagatggtatttctggttctagatccttgaggaatcrccacactgtcttccacagtggttgaactaatttacactcccaccaacagcgtaaaagtattcctatttctccacatcctctccagcatctgctgtttcct

SEQ ID NO: 29001 - DNA, 201 bp, Homo sapiens
aatattaataaattttggctctattcccttccaagtctaaattgctctgtaatcggggttggggagtgggcattaatttttcagcataccattgttactgsccgtggaaacaccatgtaggtgtaacaattcatatatagaaatttcattcagcctcttcaggtgctttgtctaatatatttgggtgttgtccaaatgagt

SEQ ID NO: 29002 - DNA, 201 bp, Homo sapiens
ctgggtgtgaatccagagaaatggcagatttgcctctgatgtggatagtcccgcgactgcacaaggccattttagaacacacacacaaggaaaaacaggakaatagacagtgtggggttttgggaaagagccgattttagttgaagaagcagagtaaaacccagacatcgcatggctttaggctttagcctcaccacactc

SEQ ID NO: 29003 - DNA, 201 bp, Homo sapiens
actccctggttcaagcgattctcctgcctcagcctcccgagtagctgggattacaggcatgcgccaccatgcccagctaagttttgtatttttagtagagrtggggtttcaccatgttggccaggatggtctcaatctcctgaccttgtgatccacccgcctcggcctctcaaagtgcttggattacaggtgtgagcagct

SEQ ID NO: 29004 - DNA, 201 bp, Homo sapiens
attttagaacacacacacaaggaaaaacaggagaatagacagtgtggggttttgggaaagagccgattttagttgaagaagcagagtaaaacccagacatsgcatggctttaggctttagcctcaccacactcacgagcctcctgtccaggagggccattagtgtctcaggtctgctcagtgtggaccccgaagagccatc

SEQ ID NO: 29005 - DNA, 201 bp, Homo sapiens
ggttacaggcacatgccaccatgcctggctatgcacaagatttttaaaattttcatgaaatcctgttttcatgaattctttcctttgttgcctgtgtcttyggttttagatacaaggaattactgccaactccaatgtcatgaagcttttgcactgttttctcctaagagttttatagttttagataccacatttaggtct

SEQ ID NO: 29006 - DNA, 201 bp, Homo sapiens; identical to SEQ ID NO: 3555

SEQ ID NO: 29007 - DNA, 201 bp, Homo sapiens
tactttctttctctatgattttaactactatattttatataaacggaataatatagtatttgccttcttgtgactagtttatttcacttagcatgatgtcyatggttcatctgtgttgtagcatgtgtcagaatttcctttttaaggctgaataatattccaatgtatggaaagatagaccatagtttgcttatccattca

SEQ ID NO: 29008 - DNA, 201 bp, Homo sapiens
ccagaggtttttttcttcccattttttgttctacacagtaagaatttatgaatagaaatatatactttagtgatgtataccagatgattctcagcatcatrtgtttaaaaacttgctttacatcccagatacttttcctcatttctctttatcagaattttgtgatttcagattcagagaaggttttatacttgattttaa

SEQ ID NO: 29009 - DNA, 201 bp, Homo sapiens
tttattgaaaagctttagggcaggaatgaaaggaaggaaagaaagtacacttggaggagggccgagtgggcagctcgaaagacaagtgcctggttagtgattttttttgacttcgtatttataactgattatgtttgtgtttttgactctgttttcttgctttaatcacttctaagctgacatctttctagaaggaaattg

SEQ ID NO: 29010 - DNA, 201 bp, Homo sapiens
tgaattaattcttctgccatttgacactgttactatctgcaacagttcttgcagtagaggatgcacttcaaagtgcactgctttactgtctcactggaatwctaaaaatctaagctttatctttttaacattaagctgtgtgggaatgtagcaacctcctgggtggtggggtggggggcatcttcaattatttaggtctca

SEQ ID NO: 29011 - DNA, 201 bp, Homo sapiens
atagagataaatggtgtgtttttttttttcttctcagtcaccaggctggagtgcagtggcacgatcttggttactgcaacttctgccttccgggttcaagygattctcctgcctcagcctcccaagtagctgggactacaggcatgtgccaccatgcccagctaatttttgtatttttagtagagatggggtttcaccatg

SEQ ID NO: 29012 - DNA, 201 bp, Homo sapiens
aaaggatatgggcaggtttcactggaagacatccctccatggtcttaagtcttcgtaatttttgttttcagatctttatttcccgcacatatgatgccacyactcattttgagacaacgtgtgatgacattaaaaacatctataagaggatgacaggatcagagtttgactttgaggaaatgaagcgcaagaagaatgaca

SEQ ID NO: 29013 - DNA, 201 bp, Homo sapiens; identical to SEQ ID NO: 3554

SEQ ID NO: 29014 - DNA, 201 bp, Homo sapiens
cccaccaccacacccagctaatttttgtatttttagtagagatggggtttcaccaggttggccaggctggtctcaaactcctgacctcaggtgatctgccygcctcggcctcccaaagtgctgggattacaggcgtcagccactgcgcccggccagaatttaccatcttaaccattgttaagtgtacagttcagtggtatt

SEQ ID NO: 29015 - DNA, 201 bp, Homo sapiens
agagaaggtatcttttgacagtttttttttttgtttttttttgagatggagtctcactctgttgcccaggctggagtacagtgatgtgatctcggctcacygcaacctctgcttcccaggttcaagcagttctcctgtctcagcctcccgggtagctgggattacaggtgcctgccaccatgcccagctaatatttgtatt

SEQ ID NO: 29016 - DNA, 201 bp, Homo sapiens
aaaaaaaaaaaaaaaaacttttggttaatataattaatgtacttttatataacaggacctggttttttattttaaaaaatctgtggaacttcctcgtgtgrggggtagggggagaaaaggtgttgggttccaaattaagaaaagatttgaagctttggaaatagatgcctccatcgggggtggtggttaaagtactgaaaa

SEQ ID NO: 29017 - DNA, 201 bp, Homo sapiens
gttacataaaaagtgttcttaccaatagctactcctaaatggagctgctattttttctatgttttctataaagttatttacatctgtaacaaggattccaytattttcaaagacttctctggggatagtaggcttgtctgttaaaaaaaaaaaaaaaaaaaacttttggttaatataattaatgtacttttatataacagg

SEQ ID NO: 29018 - DNA, 201 bp, Homo sapiens
tagaaattatcgtttggcagttttattttctctgattttttcagatatataaaacatttacagagcttgaaagttaaaaggtatatttcgagtcttggtckcattcttacttttctacttccattctttctgacctgttaggtaatcattttctggcttatccttcttctgttttttttttttttgaataagcgcatatgc

SEQ ID NO: 29019 - DNA, 201 bp, Homo sapiens
aggcctttgattgtggctccatggtgggacgaatgtgagggcaaggcaggtagctgctggctgctctgtgggattcatctgtacctctcagttgacctcaggcagagccatggtcaggtgtgggaccagctcacctgactgaattctctctccctccagatttgttagcatcagtgacctcctggtaccaaaagacttggg

SEQ ID NO: 29020 - DNA, 201 bp, Homo sapiens
accatttaggaaaaaatgttttatgtagtgttgtttgtgtaacagcaaataaaaccatttaagattatagtttttacaagggtggtaaaacctttaaaacagagcataatgtgcatcgtatgcctttctgacattagcatgcaaaaacaaagctatttgttaaaatagacttatttttgctccaactaagtaaacatgtaa

SEQ ID NO: 29021 - DNA, 201 bp, Homo sapiens; identical to SEQ ID NO: 3556

SEQ ID NO: 29022 - DNA, 201 bp, Homo sapiens
tgtttgaaaaacgtcgcttcaggaaattcctagtgtatgttgccaacttcgatgaaaaagatccaagaacttttgaaggcattgatcctaagaagaccacratgcgagatgtgtataagaaatttgatttgggtcaagacgttatagattttactggtcatgctcttgcactttacagaactgatgagtaagtattttggt

SEQ ID NO: 29023 - DNA, 201 bp, Homo sapiens
atggcaagaaagttcttcatatggatcgaaacccttactacggaggagagagtgcatctataacaccattggaagatgtaagtgttagtcaaatttcataygcctctcacactttgtgagtatttcacttgtgaatctctaccttattccttagagatggtcttaattttgttttgttaaatggaatatctggagcactgt

SEQ ID NO: 29024 - DNA, 201 bp, Homo sapiens
agagtgcggtggcacaattttggctcactgcaacctctgtctcctgagttgaagcaattctcctgcctcagcctcctgaatagctgggattacaggcgcaygccaccacacctggcttattttttttttttttttctttttttttgagacggagtttcgctcttgttgcccaggctggagtgcaatggtgcgctcactgca

SEQ ID NO: 29025 - DNA, 201 bp, Homo sapiens
gtactatgctttttctataggaatgtatcctgtcaggtataatgtcagtgaatggcaagaaagttcttcatatggatcgaaacccttactacggaggagaragtgcatctataacaccattggaagatgtaagtgttagtcaaatttcatacgcctctcacactttgtgagtatttcacttgtgaatctctaccttattcc

SEQ ID NO: 29026 - DNA, 201 bp, Homo sapiens
aatctctagtaggttaaaagaaattcctattgttaaatatctgtgtactttacatccaactctgtcaccatttagaacttaagtgtagaagatcttgcctrttgagagtaattttaactcacacctcatgacatatgggtgatacctgagtatgttgggtcccagatggagacacttgaggcagtgagctggtatcatttg

SEQ ID NO: 29027 - DNA, 201 bp, Homo sapiens
ctccccggttcaagtaattctcctgcctcaggctcccaagtggttggaattacaggtgctcaccaccacgcccggctaatttttttgtatgtttagtagcratggggtttcaccatgttggccaggctggttttgaactcctgacctcaggtgatctgcctgcctcagcctcccaaagtgctgggattacaggcgagagcc

SEQ ID NO: 29028 - DNA, 201 bp, Homo sapiens
aaacccttactacggaggagagagtgcatctataacaccattggaagatgtaagtgttagtcaaatttcatacgcctctcacactttgtgagtatttcacytgtgaatctctaccttattccttagagatggtcttaattttgttttgttaaatggaatatctggagcactgtttttcaggagcttctggtttgaagctca

SEQ ID NO: 29029 - DNA, 201 bp, Homo sapiens
tggaatatctggagcactgtttttcaggagcttctggtttgaagctcatagaaatttacattttgacttttgttgctatgtggagcagttatctcttagcrttaacagagaatagtctaggaagggagggtagaggatcgtctgatgtgccagcgcaagtccagtgctttcctcatggctttatttattttctcagtccct

SEQ ID NO: 29030 - DNA, 201 bp, Homo sapiens
ttgttgttgttgtttgtttttaagagacagggccttgccctgttgcccaggctgaagtgcagcagtgcgatcgtagcttgctgtagccttgaactcctggrctcaaacgatcctcctgtatcagcctcctaagtagcggggctaaagatgcataccacctgcctggcttattttattttttgtagagatggggtctctctg

SEQ ID NO: 29031 - DNA, 201 bp, Homo sapiens
ttgggccaggcgcggtgcctcgtgcctataatcccagcacttgggaggccaaggtgggtggattgtttgagcttaggagtttgagaccagcctgggcaacrtggcaaaaccctgtctctacaaaacaatacaaaaaaaaattagccaggcatagtagtgccaggtactcaggagcgtcaggctggaagcttgcatgagccc

SEQ ID NO: 29032 - DNA, 201 bp, Homo sapiens
actgtgctatgttcacacctgggaatagtcactgcacctctagcctggacgatatatccttatatagcaagaccctatctcttaaaaaaaaaatcatttgkccggctactgtggctcatggctgtaatcctagcactttgggaggttgaggtgggtggatcacttgagcccgagagttcgagatcagcctgggcaacatag

SEQ ID NO: 29033 - DNA, 201 bp, Homo sapiens
gtaacagcaactcaggtttctattaaataaacaaaagttgggagatactccaaaataactgttagtaatagctttaagttctgacaggctgtgccgaccgraatatgatacctaagttttaagtgcattgaaatagtgattcatgtttccttttgcctgtcttatacccagctcttacaactacacttgtgtcttaagtat

SEQ ID NO: 29034 - DNA, 201 bp, Homo sapiens
gatcccagcactttgggaggccaagttgggtggatcatttgaggtcaggagttcaagaccagcctggccaacatggtgaaaccccctctctactaaaaatrcaaaaattagttgggcggtagtggtgcgtccctgtaattccagccacttgggaggctgaggcagaagaatcacttgagcctgggaggtggaagttgtggg

SEQ ID NO: 29035 - DNA, 201 bp, Homo sapiens
tggctcacgcctgtgatcccagcactttgggaggccaagttgggtggatcatttgaggtcaggagttcaagaccagcctggccaacatggtgaaacccccyctctactaaaaatgcaaaaattagttgggcggtagtggtgcgtccctgtaattccagccacttgggaggctgaggcagaagaatcacttgagcctgggag

SEQ ID NO: 29036 - DNA, 201 bp, Homo sapiens
ttttcctggttatctgtttctaagggaactttaggtaatctgtagataacgcaggcaggttctgtagtttgtactttttctgttctttttttttttttttwaaatgttcatcttgcaaaagaattcactttggagaaaaccattttaactatcaatttttggggaaatttgaaattctaactttgggctgcttgatcataa

SEQ ID NO: 29037 - DNA, 201 bp, Homo sapiens
aacatcccaaaataacacttttagatgtctctaggcaagagaaaaccttcgaacttttatttggctaattttttaggaaaggtttgtgaagaattagaatsgtgtttttctggtctgtcatttttctgtttatagttatatgcaattattagagaatattcattctgaatacttcgttatgtttgaccaatccaggaataa

SEQ ID NO: 29038 - DNA, 201 bp, Homo sapiens
gaacttttatttggctaattttttaggaaaggtttgtgaagaattagaatcgtgtttttctggtctgtcatttttctgtttatagttatatgcaattattrgagaatattcattctgaatacttcgttatgtttgaccaatccaggaataatcctgtgtctgtctttgaaaagctggaagactgttggatgcctaaatgaa

SEQ ID NO: 29039 - DNA, 201 bp, Homo sapiens
gttagacatagtagattaaaacaataagagtaactagttccacagctgtttgtgcttcccagaggtttttttcttcccattttttgttctacacagtaagratttatgaatagaaatatatactttagtgatgtataccagatgattctcagcatcatatgtttaaaaacttgctttacatcccagatacttttcctcatt

SEQ ID NO: 29040 - DNA, 201 bp, Homo sapiens
ggaaaaatattaaaattttaggatcattaatatatactgtgcccagatatgactgataaattctatcaattaatgacttcacccatgttttaaaacaaagyttattatgtttgtgctattatatattcttttagcagtgtggaagcagtcttttataatagttgggtatagaggaactagtgggcctgcagattttttatt

SEQ ID NO: 29041 - DNA, 201 bp, Homo sapiens
ttaagagatctcattccaaacttcagcagttcgctaccacttcaattcttaatctctagtaggttaaaagaaattcctattgttaaatatctgtgtacttyacatccaactctgtcaccatttagaacttaagtgtagaagatcttgcctattgagagtaattttaactcacacctcatgacatatgggtgatacctgagt

SEQ ID NO: 29042 - DNA, 201 bp, Homo sapiens
gtttattgaaaagctttagggcaggaatgaaaggaaggaaagaaagtacacttggaggagggccgagtgggcagctcgaaagacaagtgcctggttagtgrttttttttgacttcgtatttataactgattatgtttgtgtttttgactctgttttcttgctttaatcacttctaagctgacatctttctagaaggaaatt

SEQ ID NO: 29043 - DNA, 201 bp, Homo sapiens
ggaacatggaggggactgcagggaagcgcgatgcagccgcagggactgtggcccctctctgcgttcaagagccagcagcggggcgcagagggagcaacaamctcaccacttcctcctccagcactgctccacgggcctgccacctgcgctgctgctgctgccacgcacggtgccatgacgtcacacgcgcaagtggcctct

SEQ ID NO: 29044 - DNA, 201 bp, Homo sapiens
tcgataaaatagtcttcacctaaaacatggttaacataattcagttgacatgcttaaatttctcttcaagagccagaggctgatggcaattgtgaaaaaarctctttattgttattgctaataaaaaaaaaagggccaatagtcaggtgtggtggcctgtacctcttgtccctgctactggggagactgaggtgggaggat

SEQ ID NO: 29045 - DNA, 201 bp, Homo sapiens
atcatggtatattgattttcctggttatctgtttctaagggaactttaggtaatctgtagataacgcaggcaggttctgtagtttgtactttttctgttcttttttttttttttttaaatgttcatcttgcaaaagaattcactttggagaaaaccattttaactatcaatttttggggaaatttgaaattctaactttgg

SEQ ID NO: 29046 - DNA, 201 bp, Homo sapiens
gcaggaggattgcttgagcaaaccttgctttgcaaggccaaggctgggctacatagtgatatcctgttgctacaaaaaattaaaaaatttggcaggcgtgktggcacatgtctgtagttccagcttctcaggaggctgaggttagaggatctcttgagcctggaggttgaggctgcagtgagccatgatcacaccactgca

SEQ ID NO: 29047 - DNA, 201 bp, Homo sapiens
caggagaatcgcttgaacccaggaggcagaggttgtggtgagctgagatcgtgccattgcactccagcctgggcaacaagagagaaactctgtctttaataaaaaaaaaaaaaagctccagatagtaaatattttaggttatgtagacgttctggtctctgtcacagctgcccaactctgctgtggtactaggaaaacagc

SEQ ID NO: 29048 - DNA, 201 bp, Homo sapiens
agaagtactcattctgatgatgctcatcttctaattggtcttgttagtaattcccaatatctttgattttaggaactcctggtgagttttatatatatatatatatatatatatatatatatatatattttttttttttttttttcttttaaagacagagtctcgctctgtcacccaggctggagtgtgatggcgcgatct

SEQ ID NO: 29049 - DNA, 201 bp, Homo sapiens
aagtactcattctgatgatgctcatcttctaattggtcttgttagtaattcccaatatctttgattttaggaactcctggtgagttttatatatatatatatatatatatatatatatatatatattttttttttttttttttcttttaaagacagagtctcgctctgtcacccaggctggagtgtgatggcgcgatctca

SEQ ID NO: 29050 - DNA, 201 bp, Homo sapiens
caagatatggcaaaagcccatacctttatccactctatggccttggagaactgccccaaggatttgcaaggtaagagcctgtgtttaaaacctcagtgatycaaaacctcatcttcaacataatgtgtatatgagatatagtttaaataatgagatgagatcagtctatgagtaataagatgctttttatttttattgaaa

SEQ ID NO: 29051 - DNA, 201 bp, Homo sapiens
gtactcattctgatgatgctcatcttctaattggtcttgttagtaattcccaatatctttgattttaggaactcctggtgagttttatatatatatatatatatatatatatatatatatatattttttttttttttttttcttttaaagacagagtctcgctctgtcacccaggctggagtgtgatggcgcgatctcaga

SEQ ID NO: 29052 - DNA, 201 bp, Homo sapiens
ggtggctcacgcctgtgatcccagcactttgggaggccaagttgggtggatcatttgaggtcaggagttcaagaccagcctggccaacatggtgaaacccyctctctactaaaaatgcaaaaattagttgggcggtagtggtgcgtccctgtaattccagccacttgggaggctgaggcagaagaatcacttgagcctggg

SEQ ID NO: 29053 - DNA, 201 bp, Homo sapiens
aacctcagtgattcaaaacctcatcttcaacataatgtgtatatgagatatagtttaaataatgagatgagatcagtctatgagtaataagatgctttttrtttttattgaaataaaattaacatataatgatatgcacggatcttcagttaaaaaaaatccagttttatacaactgtagctgatgtgctcttgtaagtgc

SEQ ID NO: 29054 - DNA, 201 bp, Homo sapiens
acgcctgagagacctggagacagatcacatcacaggactctttgcagacactctccagtaccagcttagagcctgattatctccactgggcggctagatcragaagagaaataacaatcactgcagtttggctctcaggaagccccatccctaggggaaaggggagagcaccacatcaagggagcatccctgtgggacaaa

SEQ ID NO: 29055 - DNA, 201 bp, Homo sapiens
ctaattggtcttgttagtaattcccaatatctttgattttaggaactcctggtgagttttatatatatatatatatatatatatatatatatatatatttwttttttttttttttcttttaaagacagagtctcgctctgtcacccaggctggagtgtgatggcgcgatctcagaggctcactgcaacctctacctcccag

SEQ ID NO: 29056 - DNA, 201 bp, Homo sapiens
gtggtgcagtctcagctcactgcaacctccaccccctgggttccagtgattctcctgcctcagcctcccaaggagctgggattacaggcatgcaccaccayatccggctaattttttatatttagtagtgatggggtttcaccatgttggtcagtctggtcttgaactcctgacctcaagtgatccacccaccttggcctc

SEQ ID NO: 29057 - DNA, 201 bp, Homo sapiens
gatagtcttgaggtgatcattagtagtgcaaagtgtggcacacacgtatagtttcatctagaaaggtgtgtctcttacacaacttatttaaacaaaatgcrcattaacaaaatgcatatagtcaatgcatgaaagaaagcatgtttcaattacaaggcagcccctcgggccaccatattatttaagttttgcatgatcatt

SEQ ID NO: 29058 - DNA, 201 bp, Homo sapiens
atcattagtagtgcaaagtgtggcacacacgtatagtttcatctagaaaggtgtgtctcttacacaacttatttaaacaaaatgcacattaacaaaatgcrtatagtcaatgcatgaaagaaagcatgtttcaattacaaggcagcccctcgggccaccatattatttaagttttgcatgatcatttatggcattatagat

SEQ ID NO: 29059 - DNA, 201 bp, Homo sapiens
catttttttattgactgttcatcttgcatttgtggagactggattttacaccttgttaaagtgggtccttttagtttttccttttgttgtttgctgatttkttttaaatcacaatttattgatttcttacaatcaaatactgccaactagcattacttccactcatgcatcattaaaagcaaaggatatttcctccttggt

SEQ ID NO: 29060 - DNA, 201 bp, Homo sapiens
tgtctcactggaattctaaaaatctaagctttatctttttaacattaagctgtgtgggaatgtagcaacctcctgggtggtggggtggggggcatcttcarttatttaggtctcactggaaagtttgagatcagagtttggtaggtggtgtaaggggacaatgagtaagggagagaaaatacaggactgacttggggcaaa

SEQ ID NO: 29061 - DNA, 201 bp, Homo sapiens
tcccctttccttcgcgcccaagagcgcctcccagcctcgtagggtggtcacggagcccctgcgccttttccttgctcgggtcctgcgtccgcgcctgcccygccatgaatgaggagtacgacgtgatcgtgctgggcaccggcctgacggtgggcgccagggctgaggggccggggctgagcagccggggcgggcgcaccc

SEQ ID NO: 29062 - DNA, 201 bp, Homo sapiens
atcctgatgtccagcatgtgcattttgctagatcacctggatggagaagtaggtggtccactaggggtcactgagctttttctggggattttaagtccagygttgaaaggctgtttcttaacagaacaagaaagtagctttgacaagttgtctagatttatcattgtgacatttcctttctgtagagaagcaggtcaagtt

SEQ ID NO: 29063 - DNA, 201 bp, Homo sapiens
cagggtttcaccatgttggccaggctggtcttgaactcctgacctcaggtgatccacccatctcagcctcccaaagtgccatgattacaggcgtgagccaycgcactcggctgccaacaagtattcttaaacctcagccacaagttatttgttatttatttacttcttacctaattgggctgaattttttttttggagacg

SEQ ID NO: 29064 - DNA, 201 bp, Homo sapiens
  misc_feature (1)...(201): n = A,T,C or G, or insertion/deletion polymorphism (see Tables 1-2)
tttctcccccgatgagtccaatccatgactgcctttaactctgtggcttccttcccctagaggaaagccagaaattgtgggaagcaatttagacacactgntgagcatagggctggatgagaagtttccacaggactacaggctggcccagcaggtgtgccatgccattgccaacatctcggacaggagaaaggtatgtgg

SEQ ID NO: 29065 - DNA, 201 bp, Homo sapiens
gaaggagctaaatggacgctaaataaagagagtgtttcaaaaacaaaagagaggtcaactgcagattaactactggatttattgatgtcatagtcactggyaaccttgacaaagctgtttcaggagatggtgggggcaaaagcctgctaggaataggtttttaagaaaatggaatgacagagattagagatgatgaattta

SEQ ID NO: 29066 - DNA, 201 bp, Homo sapiens
tatcccgccactcccaggagcttccagctatcctggatgatacaactttgagtggatcagatagaaacgcccatctaaatgccctcaaaatgaactgttaygctctgatacgtctcctggaatcctttgagaccatggccagccagacaaaccttgtggacctggaccttggtgggaaggtaatttggagttttgggctca

SEQ ID NO: 29067 - DNA, 201 bp, Homo sapiens
taaatatccaggaatgttgacagctgttggattcccctgtatccccttgaacgaaaccatcctgtacttctctaactccttaggcccagcagcttccacayaagaaaagaatccccgggagtctacaggaaacatggtcacaggacagactgtctgtaaaaataaacccaatatgtcggatcctgaggaatccaggggaaa

SEQ ID NO: 29068 - DNA, 201 bp, Homo sapiens
agaaggggctctgcaggctccttcctgtctcacccccacactttctttccctcatagtcactttcgaagtatagatcctggcctcaaagaagatactctgsaattcctgataaaaggtgtttatgggtcagggggtaggggatggaaggtgtttgttatcgtttgtttgtttgtctgtttgtttgtttttcctacattttg

SEQ ID NO: 29069 - DNA, 201 bp, Homo sapiens
gtttatgggtcagggggtaggggatggaaggtgtttgttatcgtttgtttgtttgtctgtttgtttgtttttcctacattttgtcagccacatgatgataycaaggctgttgtgattcagttggtttggctaagcccagggacctttggcctgttaaaggtctgtaatcttggtgggcgatacagagttatgtgtgttcac

SEQ ID NO: 29070 - DNA, 201 bp, Homo sapiens
tgaagcaatttggcttttcttgtaatgtcatgactcttttctgcttcttgggaacacttccagcatcactagtggcacttcattatgggtcccatggtgtyatgtaaggtttatgatactgctttagacacatgaaaaatacctgaggaaccacaggagatcacttcttgctgccatatgcaatttttgttttgagacaga

SEQ ID NO: 29071 - DNA, 201 bp, Homo sapiens
tccccttccggcaatctctgctcctctgctattacatgaagcgaagagtttctgcctctctgtggctactaccgtaggaaaggttcgtgtgaacaatgacraaactgtcagtgatcacccaggaaggaaagatttaggtaaatgcagagtgtggagttagagacctcagcataaaacagaggctttgtgtctgaggcaggg

SEQ ID NO: 29072 - DNA, 201 bp, Homo sapiens
gtgagcatagggctggatgagaagtttccacaggactacaggctggcccagcaggtgtgccatgccattgccaacatctcggacaggagaaaggtatgtgrgggtggttccaaactaaggagagtggagattctcgtgtccaccctgtacacacacccacgttgtcttgctctccacagccttctctgggcaaacgtcacc

SEQ ID NO: 29073 - DNA, 201 bp, Homo sapiens; identical to SEQ ID NO: 15266

SEQ ID NO: 29074 - DNA, 201 bp, Homo sapiens
gcttaggaatcagacacacctgtatttgaattccacctcggctactctttagctgtacagccttcggcaataacttagcctctctttgtgcctatttcctyttcttttgaggctgatgatacttaacccttagttcttgaaaatattaaatacgataaagttcctaacatggtggcagacatacagtagcactcactccct

SEQ ID NO: 29075 - DNA, 201 bp, Homo sapiens; identical to SEQ ID NO: 15268

SEQ ID NO: 29076 - DNA, 201 bp, Homo sapiens
tcacttgaacctgggagccggaggttgtagtgagccgagatcgtgccactgcacttcagcctgggtgacagagcgagactccatctattttttttttttttaaaaaaagatggtgaaaccccgtctctactaaaaaatagaaaaattagctaggtgtggtggcaggcacctgtaatcccagctactcgggaggctgaggca

SEQ ID NO: 29077 - DNA, 201 bp, Homo sapiens; identical to SEQ ID NO: 15270

SEQ ID NO: 29078 - DNA, 201 bp, Homo sapiens
agtagagcttttacaggaatgctgatggattggattggattatagggttagtaaaggaatctgagatgagaatgattacaaggctttttttttttttttttgacagtcttgctctgttggctctgtcacccaggttggcgtgcagtggcgtgatcttggctcgctgcaacctctgcctcccaggttcaagcaattctcatg

SEQ ID NO: 29079 - DNA, 201 bp, Homo sapiens
cgtggcagagaacatcagagaagacgagtgctgggggagggtccagggttggtcttagtggatggcagagctggccctgggccatcgaacatcctcatctycccttcctgcagacagctcctctcctacatcaccaaggacaagcagacagagagcctggtggaaaagctgtgtcagcggttccgcacatcccggtatgct

SEQ ID NO: 29080 - DNA, 201 bp, Homo sapiens; identical to SEQ ID NO: 15271

SEQ ID NO: 29081 - DNA, 201 bp, Homo sapiens
agcttcactcttgtcgcccaggctggagcgcagtggttcaatctcggctcactgcagcctctacctcctgggttcaagcaattttcctgcctcagcctccygagtagctgggattacaggtgcccgccaccacaagctgatttttgtatttttaatagagacgggttttgccatgttggccaggctggtcttgaactccta

SEQ ID NO: 29082 - DNA, 201 bp, Homo sapiens
agagacgggttttgccatgttggccaggctggtcttgaactcctaacctcaggtgatctccctgctttggccccccaaagtgctgggattacaggtgtgarccaccacgcccagccagaagtctatttttaaaataagtaaaataagtttgatggaagaaggttgtgattttaaatcagctactctaggcccggtgcggtg

SEQ ID NO: 29083 - DNA, 201 bp, Homo sapiens
cacaagctgatttttgtatttttaatagagacgggttttgccatgttggccaggctggtcttgaactcctaacctcaggtgatctccctgctttggccccscaaagtgctgggattacaggtgtgagccaccacgcccagccagaagtctatttttaaaataagtaaaataagtttgatggaagaaggttgtgattttaaa

SEQ ID NO: 29084 - DNA, 201 bp, Homo sapiens
ccccacactttctttccctcatagtcactttcgaagtatagatcctggcctcaaagaagatactctggaattcctgataaaaggtgtttatgggtcagggrgtaggggatggaaggtgtttgttatcgtttgtttgtttgtctgtttgtttgtttttcctacattttgtcagccacatgatgatatcaaggctgttgtgat

SEQ ID NO: 29085 - DNA, 201 bp, Homo sapiens
aaagcaaagcaacttgttatagaaagtaatggctagaataaagaaaaccctgactttgggagcagtagggatagaatgaatgaggcagggctctgatacarttggatccagacagctgctttcatcatctcaaactcttcctttctcagtttggttactggctgttgctaccgccttctggagaatcccaccattaatcac

SEQ ID NO: 29086 - DNA, 201 bp, Homo sapiens
ctaccaggctcaagcagtcctcccacctcagcctcccaagtagctgggaccacagacatgtaccaaagtgctgggattgtaggcatgaggcaccatgctcrgccagacttttttgttaaaaactaaaacacctacacacattagcctaggcctacacagggtcaaggtcaccaagaagtcactagacgatgggaatttttc

SEQ ID NO: 29087 - DNA, 201 bp, Homo sapiens
tgtatatactatggttttttccctctacctgcctacctatggtaatgtttaatttacaaattagatacagtaagagattaacaacaattctttttttttttgagacggagtcttgctctgtcaccgggctggagtgcagtgctgtgatctcagctcactgcaacctccgcctcccaggttcaagagattcccctgcctcag

SEQ ID NO: 29088 - DNA, 201 bp, Homo sapiens
agccgcctgtcagaccccgagctgggggtggaggaagagcctttccacaccatcatgaagtattgctccccgggccctggggcacattttccacatagcaygggcttaggaatcagacacacctgtatttgaattccacctcggctactctttagctgtacagccttcggcaataacttagcctctctttgtgcctatttc

SEQ ID NO: 29089 - DNA, 201 bp, Homo sapiens
cagctactcagaaggctggggcaggaggatcgcttgaacccagaagtttgaggctgcagtaagctatgatcctgcactgcacttcggcctgcgcaacacarcaaaccctgtctcaaaaaaaattgtttacaaaggtgtttttgttgttgttgttgttgttgttgctttttttttgagacggagtctcactctgtcacccag

SEQ ID NO: 29090 - DNA, 201 bp, Homo sapiens
tttttttttgtggggggacagagcttcactcttgtcgcccaggctggagcgcagtggttcaatctcggctcactgcagcctctacctcctgggttcaagcrattttcctgcctcagcctcccgagtagctgggattacaggtgcccgccaccacaagctgatttttgtatttttaatagagacgggttttgccatgttggc

SEQ ID NO: 29091 - DNA, 201 bp, Homo sapiens
acgttgaatatatagatctggagttcaggagagaggtctgagctagagataacacatttgggaatataatagtattcagagccgtgagactgaatgaaatyaccaaatcagtaagtgtagctaaaagagcaggaatccaaggactggtaccctagggcactccagcattaagagtgaggatgccgggtgcatggctcacgc

SEQ ID NO: 29092 - DNA, 201 bp, Homo sapiens; identical to SEQ ID NO: 3580

SEQ ID NO: 29093 - DNA, 201 bp, Homo sapiens; identical to SEQ ID NO: 3581

SEQ ID NO: 29094 - DNA, 201 bp, Homo sapiens
tgcctctggatattgatatctctgatgagcatgtacccagcttgccaccgtatttattcagttgaacaatttcacgtgtatttttaaacattcgattccaygggttagatctgatctgttagaaggggctctgcaggctccttcctgtctcacccccacactttctttccctcatagtcactttcgaagtatagatcctgg

SEQ ID NO: 29095 - DNA, 201 bp, Homo sapiens
catagtctctaaaattaattatacaaagcttaaaaataaataatataaagaagaagatagtaggacctgtcatttcatgttggatcatcagagaaggcttkctgttacgtcacgtttgagcagagaccttaagaaagtaaggaaataaactatgcagattgttagggaagagcattccaagcaaacagaaaagcctatgca

SEQ ID NO: 29096 - DNA, 201 bp, Homo sapiens
ttgcagtaagtgaaacacccaactggtactttaaaaagaactggtgactgtttgtcctaactgtgcatgttagtcctgaaattccaagttataggttcacygataaatgcctctggatattgatatctctgatgagcatgtacccagcttgccaccgtatttattcagttgaacaatttcacgtgtatttttaaacattcg

SEQ ID NO: 29097 - DNA, 201 bp, Homo sapiens
gtaagtagacttggtccaccaaaagagaaggaattaaatggaaacagggatgaaattatgtcatttactgaccctgctattcattttacctgatagcttastgatgctgaccttgccggaccactgcagaaggagacccagaaattacaagagatgagggcccagaggcgaactgcagcagcttgtaagtagttactgcct

SEQ ID NO: 29098 - DNA, 201 bp, Homo sapiens
gtctagtaagagcaactcagctttgattttttttttttcttggaggtaggatctggctctgtcacccatgctggagcatgatcatagctcattgcagcctygatctcctgggctcaagcaatcctcccacctcagcctcccaagtagctgggacttcaggcacatactaccatgcctggctaatttttttagtttttgtag

SEQ ID NO: 29099 - DNA, 201 bp, Homo sapiens
gaaaagtggaggggtgaatcagtatgttgtgcaagaggtactgtccatcaaacatcttccaccacagcttagaggtaagagtccatagctgtcactgtacytagctctttcaaaggaccatctcacatggaattgctacattgtcatttctgttccactacaccaggaagcatcataagagcaagaaacatgtttttccta

SEQ ID NO: 29100 - DNA, 201 bp, Homo sapiens
aaatatctgccccaaagaggtctagaattcacatttttattatcagtagtaaaagtcttcctctaccaaggacgaggatatctggctccctttaaggactstaatgtgtcttaccactacaaggagtactcctaatctatattctgtagaaagggtttttagagtgagtgggtagctcagtttagagtatacttaaagatc

SEQ ID NO: 29101 - DNA, 201 bp, Homo sapiens
gttgaaaagtggaggggtgaatcagtatgttgtgcaagaggtactgtccatcaaacatcttccaccacagcttagaggtaagagtccatagctgtcactgkacttagctctttcaaaggaccatctcacatggaattgctacattgtcatttctgttccactacaccaggaagcatcataagagcaagaaacatgtttttc

SEQ ID NO: 29102 - DNA, 201 bp, Homo sapiens; identical to SEQ ID NO: 15269

SEQ ID NO: 29103 - DNA, 201 bp, Homo sapiens; identical to SEQ ID NO: 15267

SEQ ID NO: 29104 - DNA, 201 bp, Homo sapiens
aacctcctcagttcaagcaattctcctgcctcagcctcctgagcagctgggattacaggcgcatgccaccacacctggcttttttttttttttttttttgkatttttattagagacggggtttcaccatgttggtcaggctggtctcgaactcctgacctgatgatccacctgcctcagcctacaaagtgttgggattaca

SEQ ID NO: 29105 - DNA, 201 bp, Homo sapiens
cacttgaacctgggagccggaggttgtagtgagccgagatcgtgccactgcacttcagcctgggtgacagagcgagactccatctattttttttttttttwaaaaaagatggtgaaaccccgtctctactaaaaaatagaaaaattagctaggtgtggtggcaggcacctgtaatcccagctactcgggaggctgaggcac

SEQ ID NO: 29106 - DNA, 201 bp, Homo sapiens
aatccaggggaaatgatgaactagtgaagcaggagatgctggtacagtatctgcaggatgcctacagcttctcccggaagattacagaggccattggcatmatcagcaagatgatgtatgaaaacacaactacaggtatgccagagtccctttctataaggacagccttggggttcttttggattttttaattttttaaat

SEQ ID NO: 29107 - DNA, 201 bp, Homo sapiens
tctactaaaaaatagaaaaattagctaggtgtggtggcaggcacctgtaatcccagctactcgggaggctgaggcactgaattgcttgaacccaggaggcrgaggttgcagtgagctaacatcatgccactgcactccagcctgggcgacagagcgagactccgtctcaaaaatatgtatatatatttgtgagggtggagc

SEQ ID NO: 29108 - DNA, 201 bp, Homo sapiens
aaagaaaaaattccagtatatttactgaaaaaaattagcatattagtggacctacacaattcaaatcgtattgttcgaagattaattgtagacatacatakgtgccttacttttctccagtgagagggcctaaaggcagtaatactctaatagaaatgagtgcaagtaatgcctagaatttggcttctacataccattatt

SEQ ID NO: 29109 - DNA, 201 bp, Homo sapiens
acgtcacccccccttccggctgcctcaggaacacaggttgtttgagcgactgcgggagacagtcacaaaaggtgagctctcagggaaggccttgggcagawttgggccctttgttgcagtaaacaacttctccctcctcctctgcaggctttgtccacccagacccactctggatcccattcaaagaggtggcagtgaccc

SEQ ID NO: 29110 - DNA, 201 bp, Homo sapiens
gccttacttttctccagtgagagggcctaaaggcagtaatactctaatagaaatgagtgcaagtaatgcctagaatttggcttctacataccattattccrtaatagccaggattccaccaagaatggttgattacaggactgggccagggaaaatacaagatgagcccagaacatcttttattttatttatttatttatt

SEQ ID NO: 29111 - DNA, 201 bp, Homo sapiens; identical to SEQ ID NO: 15273

SEQ ID NO: 29112 - DNA, 201 bp, Homo sapiens
tttgagaccatggccagccagacaaaccttgtggacctggaccttggtgggaaggtaatttggagttttgggctcacgttatatggggtctggggagatasgggaatagatggaaaagaagggaatccaatgatccacaaatcctttctgtcctcattgagaatttaggagaaagaactcaaaagtgtcacacgttttctt

SEQ ID NO: 29113 - DNA, 201 bp, Homo sapiens; identical to SEQ ID NO: 3576

SEQ ID NO: 29114 - DNA, 201 bp, Homo sapiens
aggccagagagctgacagctgagagcaggtacgagggttaggccgtgaggccatgggagcagtggggagccagaccgcaggttcttgtgggccatcatggkgactttggcatttcctcagaatgaagtggagccactggggagccacaagcagggaggtgaggtgacctgacttgtacttcaacagggccatcctagctgt

SEQ ID NO: 29115 - DNA, 201 bp, Homo sapiens
tacgagcaatagcaaggaggccagagagctgacagctgagagcaggtacgagggttaggccgtgaggccatgggagcagtggggagccagaccgcaggttyttgtgggccatcatggtgactttggcatttcctcagaatgaagtggagccactggggagccacaagcagggaggtgaggtgacctgacttgtacttcaac

SEQ ID NO: 29116 - DNA, 201 bp, Homo sapiens
ttttccttaaggtagagcttacaggatttgctaacagactgggtgtgaggtgggagggagagttcagtcaaggatgactctcccgggttttggtctgagcrtttggaagactggagttaatggtaactgagatagggagaaggctgtgaataggtgttttgggaggaagatcagatgttctgttttggacatacaaagttt

SEQ ID NO: 29117 - DNA, 201 bp, Homo sapiens; identical to SEQ ID NO: 15278

SEQ ID NO: 29118 - DNA, 201 bp, Homo sapiens
ggagtcttgctctgtcaccgggctggagtgcagtgctgtgatctcagctcactgcaacctccgcctcccaggttcaagagattcccctgcctcagcctccygagtagccggaactacaggcgtgagccaccgcacccagctaattttttgtattttagtagagacgggtttcaccatgttggccaggatggtctcgatctc

SEQ ID NO: 29119 - DNA, 201 bp, Homo sapiens
tacagcgtgctaagtgttgttctgactggtttgcatggactatctcattcagttttgacatatatatatacatatatatatatatatatatatatacacayatatatataccattggtccttgaacaacgtgggggttagggatgacaacccctgtgcagtcaaaaatctgcatatgtaagttttgactgccccaaaactt

SEQ ID NO: 29120 - DNA, 201 bp, Homo sapiens
tctgtttgcttcctctagccacttacagcttatacattttaatgcatatagtatttcatgataaggcatcataggaggagtcgacattctcagggaaaatrcggaaggcctccatttgcatcttgctacattcagaaaggttctgtcgttaggtattgggggagttttgtgaagtagataggtgacatttgtacatgttct

SEQ ID NO: 29121 - DNA, 201 bp, Homo sapiens
catacagcgtgctaagtgttgttctgactggtttgcatggactatctcattcagttttgacatatatatatacatatatatatatatatatatatatacayacatatatataccattggtccttgaacaacgtgggggttagggatgacaacccctgtgcagtcaaaaatctgcatatgtaagttttgactgccccaaaac

SEQ ID NO: 29122 - DNA, 201 bp, Homo sapiens
accatacagcgtgctaagtgttgttctgactggtttgcatggactatctcattcagttttgacatatatatatacatatatatatatatatatatatatayacacatatatataccattggtccttgaacaacgtgggggttagggatgacaacccctgtgcagtcaaaaatctgcatatgtaagttttgactgccccaaa

SEQ ID NO: 29123 - DNA, 201 bp, Homo sapiens
gcacattcaaaccatacagcgtgctaagtgttgttctgactggtttgcatggactatctcattcagttttgacatatatatatacatatatatatatatakatatatatacacacatatatataccattggtccttgaacaacgtgggggttagggatgacaacccctgtgcagtcaaaaatctgcatatgtaagttttga

SEQ ID NO: 29124 - DNA, 201 bp, Homo sapiens
acctaaacacctcccattagactccaccttccaacactgtcatgttggggattatatttccaacacatgaattatgaggggcacattcaaaccatacagcrtgctaagtgttgttctgactggtttgcatggactatctcattcagttttgacatatatatatacatatatatatatatatatatatatacacacatatat

SEQ ID NO: 29125 - DNA, 201 bp, Homo sapiens
aaaaattagccgggtgtggtgacgcgtgcctgtaatcccagctactcaggaggctgaggcgggagaatcacttgaacctgggagccggaggttgtagtgasccgagatcgtgccactgcacttcagcctgggtgacagagcgagactccatctattttttttttttttaaaaaaagatggtgaaaccccgtctctactaaa

SEQ ID NO: 29126 - DNA, 201 bp, Homo sapiens
gtagtcatgagtttaacgtaagactagtcagcttgtttctgtgtttttctcaggccatttttatttgtgtggtcacatgaatggagtaaccagaaagttgrtttaacctagatttgccaggggagtatgtgttgttgttgttgttaattagtggaataagttacaagtatcacagtatctaacaataggggaatagtaaat

SEQ ID NO: 29127 - DNA, 201 bp, Homo sapiens
tatgttgggggtggggaactaacaaaaccagatgatgttactagcttgctataaaactaaaagccattatatatgttggggatgggaaagtaatagaaccrgatacgaagacaggtcttgaatatagaccctgactttttcactgtttggtttctagccctgtgagcctgtaggagtagaatggctccccaaatgtatgag

SEQ ID NO: 29128 - DNA, 201 bp, Homo sapiens
agcaacttgttatagaaagtaatggctagaataaagaaaaccctgactttgggagcagtagggatagaatgaatgaggcagggctctgatacagttggatycagacagctgctttcatcatctcaaactcttcctttctcagtttggttactggctgttgctaccgccttctggagaatcccaccattaatcaccagaaga

SEQ ID NO: 29129 - DNA, 201 bp, Homo sapiens
tcaagaccaagtgccaaagtcactactagaattagtttctagtccagggtcaatctcagatcccgtaagataatgttactagcttgctataaaactaaaarccattatatatgttgggggtggggaactaacaaaaccagatgatgttactagcttgctataaaactaaaagccattatatatgttggggatgggaaagta

SEQ ID NO: 29130 - DNA, 201 bp, Homo sapiens
agtgtgacccagtcttgggcaaaatacaataggcctagtaggtatatccctggggcgcgatgtgtgagaaactgtaagtctgacagatccgcaacggaagwtgttaagcaaatcgcttaacagatccgcaacggaagatgttaagcaaatcgcttaactttcttacttcaatttccgctctgtaaactcatttgtattatt

SEQ ID NO: 29131 - DNA, 201 bp, Homo sapiens
agcggggccctgcaggggagaaaggcccatccctcaccccttcaatgcccccactgtggcatccctgggactggggaggctgatggggaaggttgagcctytactagctggatctcccagttcctcacaaagcccttcctatctgcagaactgagcggcagcagcgagacctggcctactgtgtgtcacagctgcccctca

SEQ ID NO: 29132 - DNA, 201 bp, Homo sapiens
catccaaacacccagcagcgagcttccaaaaagaaacccaaagttgtcttctcaagtgatgagtccagtgaggaaggtatgatgctcccgcctgttcccgrccgagaaggcacacagctagggtgcagagggctggtttccataggacctgctgcgggggcctgagtgtagatgctctgccccactgccgcagaagggcct

SEQ ID NO: 29133 - DNA, 201 bp, Homo sapiens
caattctcgtgcctcagcctcccaagtagctgggaccacaggcgcgcaccaccacaccgcactaatttttttatttttagtagagacagggtttcaccatrttggccaggctggtcttgaactcctgacctcaggtgatccacccatctcagcctcccaaagtgccatgattacaggcgtgagccaccgcactcggctgcc

SEQ ID NO: 29134 - DNA, 201 bp, Homo sapiens
gccgcctccagctgaatgcgcgagtcccggcgcggggtggggcaggggcgggcacggtcttcagtaactgcctagcgattggttgggaggcaccacaaatkcctaacaaactgctgaagcgccctccgaagggacagacctcatctccaccccgccccgtccctccgccagactggagcgcaaactatggtcgcattgatc

SEQ ID NO: 29135 - DNA, 201 bp, Homo sapiens
cctccttgacaactctcgccccaagctcccgattctgcgggacggaaaatggcgcaatgcagcagctgcagcaacgcggggaactaccaccgcgcgccgcytccggaccgggccacccccagggaggggggccagcaccccattctcgcaccagccacagctagcaccccacgggcggggcaggggcgcaggggtcccaca

SEQ ID NO: 29136 - DNA, 201 bp, Homo sapiens
aaggagcgtgagggtgttagcagtgtgagatctttggacacccatggaatcctttcctccacaccacccgtgcacttgccaaagacagggatgaggcaagwggttcttcctggggcccggccgatcctcaggatgcagagaagtcatgtagacccaccagccccaccttggggggaggcgtgccagcctgtgtcaggtgtg

SEQ ID NO: 29137 - DNA, 201 bp, Homo sapiens
agtctccagcagtcttcaacatcacccccttcgcatgatcttgagggaaaactacggctaaacaaacgaagtacttctctgtcaagacctcaatatgtctratacagatttttctttctgattactaccctggcctggtcctagatgtatttatgttgcttctctaagtgacaaaaaagggaaagatttacttgtgttaca

SEQ ID NO: 29138 - DNA, 201 bp, Homo sapiens
tccagatagtatctacgtgggatgaacagaaggcaacagaaaaatcgtggtggctagcggggcatcacgaggtctctgaccttaatcttgtcattggtgcyaccatcctggactgcttccaacactggctgctacctactcattgaattttctgccttaagtcgagagctagattgcttagctagctcagtggcaggacaa

SEQ ID NO: 29139 - DNA, 201 bp, Homo sapiens
aaaggccctgagaggcaaagcaccctttagagttgcacagggccagacttgtgattctctggttgttgtcctttcctctgtctctggcaggaagcttagcwgctttgtttctgtgccctcctcaggtggtggacatcatacgtgtgaacgtggacaaggtcctggagagggaccagaagctgtcagagctggatgaccgag

SEQ ID NO: 29140 - DNA, 201 bp, Homo sapiens
tgggatctgctcagcctatcttcggggcaattgctgagcttcaggatgggctattaatgtgggataagcccaggtgcaaggggaggagggcaggctgggarcagagcggagaatgcccatggccctttattccttcttccctcggtccacgaacaggaagaggctgaggccatgctgggcagggtctggatgcccactttc

SEQ ID NO: 29141 - DNA, 201 bp, Homo sapiens
acgtggacaaggtcctggagagggaccagaagctgtcagagctggatgaccgagctgatgccttgcaggcaggagcatcacaatttgagagcagtgctgcmaagctaaagaggaagtattggtggaaaaactgcaaggtgaattttcttgtcccctcctccatcttttcctgggcttccactggtagaaggcaagaaaacc

SEQ ID NO: 29142 - DNA, 201 bp, Homo sapiens; identical to SEQ ID NO: 3618

SEQ ID NO: 29143 - DNA, 201 bp, Homo sapiens
gcgcggcagctgcagtaagttccagcgcagctagaccgcggggtagtcggcgcgaggcggagcttggcagttccgtccacttcagccgcagcgtccctcgycgggtgtctcgccgcagcctccggagaggaacagaccctcactctctctgtcagaaaaatgtgagttgactctggtgtgggggctcggcacctccttgac

SEQ ID NO: 29144 - DNA, 201 bp, Homo sapiens
cactgtgtgtctgtcatcacctctttgtctttttttcctaaccctgatctcatacttgtatagagtaataacaacagttgtacttccaccaaaggcatgtkgcatatttaccaatgtcatgtattctgaacaaaggcaaaaaatacaaattcctaccattaaactggcttggttgttgtttgggttggagtagctgtgggg

SEQ ID NO: 29145 - DNA, 201 bp, Homo sapiens
aggagttattctctatctttttagactaaaagaaattcacttaatcaaggagaatgagcttctgggtattagttctattgtaattagtcaaataatttccwtttaggtgactttgtggtttcatttttgttgcatttactcttggactgctcctgtgaagtatgtttggtgagattctgcttctgtttgaggagttcttac

SEQ ID NO: 29146 - DNA, 201 bp, Homo sapiens; identical to SEQ ID NO: 3627

SEQ ID NO: 29147 - DNA, 201 bp, Homo sapiens; identical to SEQ ID NO: 3628

SEQ ID NO: 29148 - DNA, 201 bp, Homo sapiens; identical to SEQ ID NO: 3617

SEQ ID NO: 29149 - DNA, 201 bp, Homo sapiens
gtcctgttcctctcttcctgttgatgaaggagcgtgagggtgttagcagtgtgagatctttggacacccatggaatcctttcctccacaccacccgtgcasttgccaaagacagggatgaggcaagtggttcttcctggggcccggccgatcctcaggatgcagagaagtcatgtagacccaccagccccaccttgggggg

SEQ ID NO: 29150 - DNA, 201 bp, Homo sapiens
ggtgttagcagtgtgagatctttggacacccatggaatcctttcctccacaccacccgtgcacttgccaaagacagggatgaggcaagtggttcttcctgrggcccggccgatcctcaggatgcagagaagtcatgtagacccaccagccccaccttggggggaggcgtgccagcctgtgtcaggtgtgcttgtgtattgc

SEQ ID NO: 29151 - DNA, 201 bp, Homo sapiens; identical to SEQ ID NO: 3609

SEQ ID NO: 29152 - DNA, 201 bp, Homo sapiens; identical to SEQ ID NO: 3626

SEQ ID NO: 29153 - DNA, 201 bp, Homo sapiens; identical to SEQ ID NO: 3608

SEQ ID NO: 29154 - DNA, 201 bp, Homo sapiens
caacaagtagtaagtgaaattggccttgcaaatacttcatagccatttcactttttctttttgatttctatggttttaaccagatatgagtgttctatgcrttttgggcaagccgtagaattccagttgttttcattttggggagggggcttccagatagtatctacgtgggatgaacagaaggcaacagaaaaatcgtgg

SEQ ID NO: 29155 - DNA, 201 bp, Homo sapiens
ggtccacgaacaggaagaggctgaggccatgctgggcagggtctggatgcccactttccatgcagcagcatttcattgctcaaaaccatccttcctttccyttcgcccttgtttcccacattcccttcgtcctgcccaagggcgggactgaagagctggaagaaagcagtcagtaccctcccaacggcccccctcgaaggt

SEQ ID NO: 29156 - DNA, 201 bp, Homo sapiens; identical to SEQ ID NO: 3629

SEQ ID NO: 29157 - DNA, 201 bp, Homo sapiens
ggcgcggcagctgcagtaagttccagcgcagctagaccgcggggtagtcggcgcgaggcggagcttggcagttccgtccacttcagccgcagcgtccctcrccgggtgtctcgccgcagcctccggagaggaacagaccctcactctctctgtcagaaaaatgtgagttgactctggtgtgggggctcggcacctccttga

SEQ ID NO: 29158 - DNA, 201 bp, Homo sapiens
gagtctgtatctctattggaatgccttctaaagccccaagacaccaggaactaagcaaaaaggagctcaatgcaggtcctgtgatgaatctgaaaagctamagacatactgtggttatgatcccctgggaagcagaagggtagggcctctctaagaggcctgcaggtctcctgggtgatgggtggttttttccattgtccc

SEQ ID NO: 29159 - DNA, 201 bp, Homo sapiens; identical to SEQ ID NO: 3641

SEQ ID NO: 29160 - DNA, 201 bp, Homo sapiens
tcttgcaatttatccagctaaataaggcaagtgatctcctttagtatcttccaactacaaaacaaaaatgagtccattttgtttgtttgttgcaacaaattcattctgtctgggaatctggcctgtgtggtggggagactacttcagtcagactcaagctgagcctccgtgggtctgtttgtaagtggtggaaaagatgaa

SEQ ID NO: 29161 - DNA, 201 bp, Homo sapiens
gtttgcttagagatgaaatatgcatttatctaattcaagcataaatctgccttaccaattcatgcatttttatttctgtagctctttgtgatgtatagagwtaggcagccaaaggacacagggaaatgggagctgggagctgggaagggacggggcatattgagagatcctagagagcccatgctcagatgctttcaggta

SEQ ID NO: 29162 - DNA, 201 bp, Homo sapiens; identical to SEQ ID NO: 3642

SEQ ID NO: 29163 - DNA, 201 bp, Homo sapiens
ctcctaacaaaactgaaagcacctggcgggcagagaaggttgggataatctctatttttcttagtatccataatatctaataaagtgacaaaaagaggtascccaataaagagtcatgggatagctaaacaaaccttacccagaatgtacaaggaatgagaactgacttggtattttttaatttttattcttacttttatt

SEQ ID NO: 29164 - DNA, 201 bp, Homo sapiens
aggtggtttccggtttcgttgaggcaaatacatccaacaatacatccaacatcacctgtcatcctgcaggtccactggatactctctattaattactagagtgttcagctatttttttcaggcacccatatgtacctacaaatctgcagatacattctattgatctgagactcacactttctccttttaaccttcctaatt

SEQ ID NO: 29165 - DNA, 201 bp, Homo sapiens
cagaaaaagaccaatgtcctagctcaagcagtcggtcagagggagaattctcccttcctctgcctttttgttctattaaggccctcaacagaatggataaygcccacccatactggggagagcaatctgctctactcagtccaccaattcacatgttcatgtcttccagaaacaacctcacatacatacccagaaataatg

SEQ ID NO: 29166 - DNA, 201 bp, Homo sapiens
aaggtggtttccggtttcgttgaggcaaatacatccaacaatacatccaacatcacctgtcatcctgcaggtccactggatactctctattaattactagagtgttcagctatttttttcaggcacccatatgtacctacaaatctgcagatacattctattgatctgagactcacactttctccttttaaccttcctaat

SEQ ID NO: 29167 - DNA, 201 bp, Homo sapiens
gaacatctatatataaagagatttattatgaggaattggctcacctgattatggagactggcaagtcccataatctgttgtctgcaagctggagaccaagraaagttgatggtgtagtcccagtccaagtctaaaagtctgagaaccaggtaagccaatggtgaaagttctagtccaagtctagtctaagggcagaaaaag

SEQ ID NO: 29168 - DNA, 201 bp, Homo sapiens
acatttaccaaaactcatcagactatacactgaaaatgggtgcatcttattgtatataaagcataatctcagtaaacttgatttttaaatttatatattgwcctcctggagttcttcaggggatagcatgttagggagaactaagagaaaaggatgcctttcccaccaagcatctctaggaaaggagtgaggaggtgattg

SEQ ID NO: 29169 - DNA, 201 bp, Homo sapiens; identical to SEQ ID NO: 3644

SEQ ID NO: 29170 - DNA, 201 bp, Homo sapiens; identical to SEQ ID NO: 3648

SEQ ID NO: 29171 - DNA, 201 bp, Homo sapiens; identical to SEQ ID NO: 3640

SEQ ID NO: 29172 - DNA, 201 bp, Homo sapiens; identical to SEQ ID NO: 3643

SEQ ID NO: 29173 - DNA, 201 bp, Homo sapiens
tgccctactctcccacccctttatatagttccttcagtatttacttgaggcagacaggaagacttctgaagaacaaatcagcctggtcaccagcttttcgsaacagcagagacacagagggcagtcatgaggtcagtgaaataagaatgcataatcatgcttgtttttgagtgcaaattgtaagttgagtttcttactgtg

SEQ ID NO: 29174 - DNA, 201 bp, Homo sapiens
gaactaagcaaagaggtcactgaaatccaggtgtcctgtggttttcttcccttcactcaagatgcctgataatgctgcttaattcaccacattagctccayaaataaaggggaaaactgctttttaaaatacctctatgacagcacttctcaaaatgtggtacaggaactcctgcactgaatttccaaggcacttgtgaaa

SEQ ID NO: 29175 - DNA, 201 bp, Homo sapiens; identical to SEQ ID NO: 3645

SEQ ID NO: 29176 - DNA, 201 bp, Homo sapiens
ggtacaggaactcctgcactgaatttccaaggcacttgtgaaaacacaggtttctaagctcacatcagattcactgcaccagaatctctgggagtaggacygcatagtcagtactgtcaatatacaataatcagaaggctcaggatccagttaaaagagtttattcaacaaaaagttgagggcagcagtcccaggagtaga

SEQ ID NO: 29177 - DNA, 201 bp, Homo sapiens
atgtatagagttaggcagccaaaggacacagggaaatgggagctgggagctgggaagggacggggcatattgagagatcctagagagcccatgctcagatsctttcaggtaaaatcgggccagtgaaagctggggcctggagggaagttactggaggttctggttcgtcttttgtttcttatatttagaaagcctaagtca

SEQ ID NO: 29178 - DNA, 201 bp, Homo sapiens
gacggggcatattgagagatcctagagagcccatgctcagatgctttcaggtaaaatcgggccagtgaaagctggggcctggagggaagttactggaggtyctggttcgtcttttgtttcttatatttagaaagcctaagtcagaggtttgtggttttgttgtgactgtggttatttttaaaccatgcttgcttctcagca

SEQ ID NO: 29179 - DNA, 201 bp, Homo sapiens
tgtttttgagacagagtctcactctgtcacccaggctggagtgcagtggcccgatcatggctcactgcagcctcagactcctgggctcaagggattctccyacccagcctcccaagtagctgggactataggagcacgccactatgcctggttaatttttttgtattttagtagcaatggggttttgccatgttggtcagg

SEQ ID NO: 29180 - DNA, 201 bp, Homo sapiens; identical to SEQ ID NO: 3646

SEQ ID NO: 29181 - DNA, 201 bp, Homo sapiens; identical to SEQ ID NO: 3647

SEQ ID NO: 29182 - DNA, 201 bp, Homo sapiens
caaacaggctttgtgtgagcaacaaggctgtttatttcacctgggtgcaggtgggctgagtccgaaaagaaagtcagggaagggagataggggtggggccrttttataagatttgggtaggtaaaggaaaattactgtcaaaggggggttgttctctggtgggcaggtgtgggggtcacaaggtgctcagtaggggagctt

SEQ ID NO: 29183 - DNA, 201 bp, Homo sapiens
agagggagaatcttgagctataagtgcttaaaatttagtttggtaagatccctggtgcattgatatgtcaaagccttctgccctccaaaaaaaaaaaaaaragagagagagatagtgtcatcagacttgcaaggtggtttccggtttcgttgaggcaaatacatccaacaatacatccaacatcacctgtcatcctgcagg

SEQ ID NO: 29184 - DNA, 201 bp, Homo sapiens
aggtttgtggttttgttgtgactgtggttatttttaaaccatgcttgcttctcagcaaatgtgtcaataattaattcagcactgcaaaattccaatttatrttgaggtcacttttaccttgaaatgcactttttcataattgggggatatgtctacttgagttgtcctctagcaggtctagtgacctgctaagcctcccac

SEQ ID NO: 29185 - DNA, 201 bp, Homo sapiens
ttttccaaatctgtctggaacatgttcctggcgtgagtgagctcagttctcacagattctgtttcagtttcccctcaagagggatcttgatagggttccawcagtttcactttcctttcccctttcataaaagcacagacctaacagcaccctgggtggaaacctcttcagcatttgcttggaatcagtaagctaaaaaca

SEQ ID NO: 29186 - DNA, 201 bp, Homo sapiens
attttctttttacagtgcctttttacaactttcaaaccacagttttccaaatctgtctggaacatgttcctggcgtgagtgagctcagttctcacagattstgtttcagtttcccctcaagagggatcttgatagggttccatcagtttcactttcctttcccctttcataaaagcacagacctaacagcaccctgggtgg

SEQ ID NO: 29187 - DNA, 201 bp, Homo sapiens
tgtttatagattcaatatgtctttatcagtctgagcatttgtaagatgtttgaggggtttttccctgtggctttttttggtgtacacacaggcttcttaartttctggaatggttccctacggaactacatggggggaggcagggtggggaatgcatcagctcatgtttcctccctgtgtgcagctatttcctgcaatgag

SEQ ID NO: 29188 - DNA, 201 bp, Homo sapiens
tagtttcactttccagtttcctcttccttcccctaaaagcaattactcaaaaacggagaaaacatcagctgatgcgtgccctactctcccacccctttatrtagttccttcagtatttacttgaggcagacaggaagacttctgaagaacaaatcagcctggtcaccagcttttcggaacagcagagacacagagggcagt

SEQ ID NO: 29189 - DNA, 201 bp, Homo sapiens
ctcaggagttggagaccagcctgggcaacatagtgagaccccgtctgtactaaaaatacaaaaatcagccaggcgtggtggcacgtgcctatagtctcatygactggagaggctgagatgggaggatcgcttgagcctgggaggcagaggttgcagtaagctgagatcgtgctactgcactccagcctggatgacagagtg

SEQ ID NO: 29190 - DNA, 201 bp, Homo sapiens
gagggcagatgcttgagctcaggagttggagaccagcctgggcaacatagtgagaccccgtctgtactaaaaatacaaaaatcagccaggcgtggtggcaygtgcctatagtctcattgactggagaggctgagatgggaggatcgcttgagcctgggaggcagaggttgcagtaagctgagatcgtgctactgcactcca

SEQ ID NO: 29191 - DNA, 201 bp, Homo sapiens
tcttttgtaaagaggtaacatggctggccgcagtggctcacacccataagcccaacactttgggaggccgaggagggcagatgcttgagctcaggagttgragaccagcctgggcaacatagtgagaccccgtctgtactaaaaatacaaaaatcagccaggcgtggtggcacgtgcctatagtctcattgactggagagg

SEQ ID NO: 29192 - DNA, 201 bp, Homo sapiens
agcatttgtaagatgtttgaggggtttttccctgtggctttttttggtgtacacacaggcttcttaagtttctggaatggttccctacggaactacatggsgggaggcagggtggggaatgcatcagctcatgtttcctccctgtgtgcagctatttcctgcaatgagaggaaggcttggcaggagcggtgtatttcactc

SEQ ID NO: 29193 - DNA, 201 bp, Homo sapiens
ccttaccaattcatgcatttttatttctgtagctctttgtgatgtatagagttaggcagccaaaggacacagggaaatgggagctgggagctgggaagggwcggggcatattgagagatcctagagagcccatgctcagatgctttcaggtaaaatcgggccagtgaaagctggggcctggagggaagttactggaggttc

SEQ ID NO: 29194 - DNA, 201 bp, Homo sapiens; identical to SEQ ID NO: 3649

SEQ ID NO: 29195 - DNA, 201 bp, Homo sapiens
tctcacagattctgtttcagtttcccctcaagagggatcttgatagggttccatcagtttcactttcctttcccctttcataaaagcacagacctaacagyaccctgggtggaaacctcttcagcatttgcttggaatcagtaagctaaaaacaaaatcaaccgggaccccagcttttcagaactgcagggaaacagccat

SEQ ID NO: 29196 - DNA, 201 bp, Homo sapiens
catgaggtaaatagtccctgcttctctgataggaaacagaatttcttatgtacaacttcctgacttatgctatttcagtgtttgcttagagatgaaatatrcatttatctaattcaagcataaatctgccttaccaattcatgcatttttatttctgtagctctttgtgatgtatagagttaggcagccaaaggacacagg

SEQ ID NO: 29197 - DNA, 201 bp, Homo sapiens
cagtgcctgtgtcatagaagcgtcagtgttgtaaaggaagtcttgaataattgcaattgccacccttctcctgaattgtctaatatcagtttgttttctarcactgcatctcccatgtcttctttcccatcgtctggtgctgttttagaagcactcgtctccatcaaatcatcttctgttaattcctctggtgtgtctatt

SEQ ID NO: 29198 - DNA, 201 bp, Homo sapiens
gcgcccggccaaaaaacaactctttaaaaatgtaccttagagcaacatgcaaagcttccctgctcagcaatcccaggttggggccccctgtcttcctatcstcctacccgtcacaaccaccactgcaggcttctgatgctctgttttcctcctctgtctcagttcagttgctctgagttagagaggagctctctgggactg

SEQ ID NO: 29199 - DNA, 201 bp, Homo sapiens
ttcatcttttccaccacttacaaacagacccacggaggctcagcttgagtctgactgaagtagtctccccaccacacaggccagattcccagacagaatgaatttgttgcaacaaacaaacaaaatggactcatttttgttttgtagttggaagatactaaaggagatcacttgccttatttagctggataaattgcaaga

SEQ ID NO: 29200 - DNA, 201 bp, Homo sapiens; identical to SEQ ID NO: 3664

SEQ ID NO: 29201 - DNA, 201 bp, Homo sapiens
tctcataacatttggctgcttgcagcagatctccattctgcttatgaattaatccttgaagataccaataatttggtgcattttgtggaagcagattttcrgatacattctgtggttggtctttgatctcttccttgtcagttgattttttgcttatggacaaaccctctaaaccatgttgcacagcagtgtcttcagact

SEQ ID NO: 29202 - DNA, 201 bp, Homo sapiens
aataaaagtaagaataaaaattaaaaaataccaagtcagttctcattccttgtacattctgggtaaggtttgtttagctatcccatgactctttattgggstacctctttttgtcactttattagatattatggatactaagaaaaatagagattatcccaaccttctctgcccgccaggtgctttcagttttgttaggag

SEQ ID NO: 29203 - DNA, 201 bp, Homo sapiens
aattaggaaggttaaaaggagaaagtgtgagtctcagatcaatagaatgtatctgcagatttgtaggtacatatgggtgcctgaaaaaaatagctgaacactctagtaattaatagagagtatccagtggacctgcaggatgacaggtgatgttggatgtattgttggatgtatttgcctcaacgaaaccggaaaccacct

SEQ ID NO: 29204 - DNA, 201 bp, Homo sapiens
cattatttctgggtatgtatgtgaggttgtttctggaagacatgaacatgtgaattggtggactgagtagagcagattgctctccccagtatgggtgggcrttatccattctgttgagggccttaatagaacaaaaaggcagaggaagggagaattctccctctgaccgactgcttgagctaggacattggtctttttctg

SEQ ID NO: 29205 - DNA, 201 bp, Homo sapiens
attaggaaggttaaaaggagaaagtgtgagtctcagatcaatagaatgtatctgcagatttgtaggtacatatgggtgcctgaaaaaaatagctgaacactctagtaattaatagagagtatccagtggacctgcaggatgacaggtgatgttggatgtattgttggatgtatttgcctcaacgaaaccggaaaccacctt

SEQ ID NO: 29206 - DNA, 201 bp, Homo sapiens
agatgatggaattcctgttttctgtcctttgttctcacaggttttatagcattttcacagatccctgagctggctaaaaggattaaaatgttttttgcccygggtcctgtggcttccgtcgccttctgtactagccctatggccaaattaggacgattaccagatcatctcattaaggtacttggacccctcccatccctc

SEQ ID NO: 29207 - DNA, 201 bp, Homo sapiens
ctttttctgcccttagactagacttggactagaactttcaccattggcttacctggttctcagacttttagacttggactgggactacaccatcaactttycttggtctccagcttgcagacaacagattatgggacttgccagtctccataatcaggtgagccaattcctcataataaatctctttatatatagatgttc

SEQ ID NO: 29208 - DNA, 201 bp, Homo sapiens; identical to SEQ ID NO: 3692

SEQ ID NO: 29209 - DNA, 201 bp, Homo sapiens
ccgcaccccggcccctgagagctggcactgcgactcgagacagcggcccggcaggacagctccaggtgagagtgccggcgccgcggcgctgccaggtgcgrgtgcggcgtggaagctggtgccttcagcaaggggagggtcgcgccccgaggctctgccggccggcaagaccctctgcgtttggacccagcgagtcttgcc

SEQ ID NO: 29210 - DNA, 201 bp, Homo sapiens
ttgccagcatttgttattgcctgtcttttggataaaagcaattttaaccagggtaagatcatatctcattgtaggtttttttttaacttatattttatgtkcaggtatacacgtacaggtttgttatttaggtaaattgcatgtcatgaggctttagtgtacagattatttagtcaccccactcataagcatagtacatga

SEQ ID NO: 29211 - DNA, 201 bp, Homo sapiens
gccactggtgttatttccggtgtttaaaggcaaatagataaaaagaatggagaaggcctttcacacccaaagtgaaacgcgtcctcttctcatgcatcccrcttcccctcctgacttcctcctctattattaatagcaccagcatcctcctaatgacctagcctggaatctgcagaatcattcttgaccacgggtcctctc

SEQ ID NO: 29212 - DNA, 201 bp, Homo sapiens
tgtcttcatcatgaaatctttgctggtttctatgttgagaatcgtatttcctaggttatcttccagggttttaatatttttaggttttacatttcatccakcttgagttgatttccatatatgatgtaaggaaggggtccaatttcagtcttctatatatggctagccagttatcccagcaccctttattgaacagggaat

SEQ ID NO: 29213 - DNA, 201 bp, Homo sapiens
tttggttactatagccttgtagtatagttcaaagtcaggtaacatgggctctctattctgttctattggtctatgtgtctgtttttgtaccagtaccatgstattttggttactgtagccttatagtatagttcaaagtcaggtaacatgatgcctccagctttgttctttttgcttaggattgctttgggtatttgagca

SEQ ID NO: 29214 - DNA, 201 bp, Homo sapiens
tagactaggcagtcccatgttttccgtgttaactacagaggcacagattggaacaagtgccaaggaattaggccacctaccgagccttcctcttgcctctstctgactctccatcctgagggaagacgattgcagtcgtttttgttggaaatgacctgacctgtgggagcagcccgttcctggcctttcaaagtcaagtcg

SEQ ID NO: 29215 - DNA, 201 bp, Homo sapiens
aggagagagacgggtcaaatttttcctttctgtttcttttgaaagctctattttctttcatttcacttttttcccatgaatgacaaatttaaatgctgacrtataatttggggcaagaacagaagtggttagataagtaggaggaagagctaatagtggttagataagtaggaggaagagctaatagtggctgaacttaaa

SEQ ID NO: 29216 - DNA, 201 bp, Homo sapiens
ttcagaaggagagagacgggtcaaatttttcctttctgtttcttttgaaagctctattttctttcatttcacttttttcccatgaatgacaaatttaaatrctgacgtataatttggggcaagaacagaagtggttagataagtaggaggaagagctaatagtggttagataagtaggaggaagagctaatagtggctgaa

SEQ ID NO: 29217 - DNA, 201 bp, Homo sapiens
ggcatgacatgcaaggacaagattacatacatccatctttagcacacacaggtaccaagggtcctctctcaaggtcggcatacctgtccattttaaccttycactcagaatacgtgtggtgttccttcccaggcaccagatgtagtcctaatttactcagatcaaggtgagctagatcttcccctgaaacatacacttgtc

SEQ ID NO: 29218 - DNA, 201 bp, Homo sapiens
aaaatacctggttttatttcaaatctgccttcttgctgtaaatgacctacagctcaggaatatctcaatgaatacccacacatgttatctgtctttacatyggctaaaacctttgactagattatgagtactgtcctgtcagttgtgattcttctttccctagcaggctcctcacagctccccaattcacaatatttttct

SEQ ID NO: 29219 - DNA, 201 bp, Homo sapiens
ccttcctcacagtcaagttcagaatactcaatactgtatggatttgaaaatttcttgcaggtttgtttcaccttatctacataaatctgagcatctgagartctgcccaagtgatagtagacccaggcgtagtttccccaagtgactagacttctgatttctgcttggtcagcatgttcttgctggattaactcttcagct

SEQ ID NO: 29220 - DNA, 201 bp, Homo sapiens
tcttgccaaggtgtctagaatgcttgctatttcctgcttacttggtctaaatcagcaaatactgtcagtatcacattggaccacatgatgtattgtgaaayggagaagtgataagttttggcaggtaaaaatctttgcagttctggagaattacatatccctaaaatgggacaatgaaggtggatttctggccctgactgg

SEQ ID NO: 29221 - DNA, 201 bp, Homo sapiens
tcagaaatcttcctcttctgccaccaataaatgctgaagagacctatatatacaagtggcctctggttcctttttgtttgtttcccttcagctgacgttayaaaagggaaagtgaaactagaaagtgaaattggcaggactctttttctttttttctttttattatactttagaggactctttttcctccggagctgagtt

SEQ ID NO: 29222 - DNA, 201 bp, Homo sapiens
aaaagtgattgtcaactgagaggaatcctagacaagagtccactgagatttctgaggaaatgtgaggaaagagtttggaattgttttgatgaaatttactwcaaatatgaaaaatacgtttaatatatagaattagaatcttgtaaagagtgcttctcaaacattcctcatgtgagtcaccctgcgatctgataaatttgc

SEQ ID NO: 29223 - DNA, 201 bp, Homo sapiens; identical to SEQ ID NO: 3701

SEQ ID NO: 29224 - DNA, 201 bp, Homo sapiens
ttcctgcaacatggcttgctggcagattctagtaactgggtcacaaaccttgccaacagcagcctgggcttcattcttgctgatgctggttttgacgtgtrgatgggcaacagcagaggaaatacctggtctcggaaacataagacactctcagtttctcaggatgaattctgggctttcaggtatatatgaattgataat

SEQ ID NO: 29225 - DNA, 201 bp, Homo sapiens
aaaacagcaactttaaaatagatgttgcagtgacccagctgaagaatcaggcaagcttagggactcgcagagaaattcacagtgagccaggagagtatgayctgataacagggtcttaaagttaagttttacttcttagctcaaagcttttcttttgcctcccaatttttccaacttttaaaataattttttaaataagaa

SEQ ID NO: 29226 - DNA, 201 bp, Homo sapiens
caacaacaacaacgaggctttctctggttccttttcattgtagagttatcctcccacatacaatgtgaaggacatgcttgtgccgactgcagtctggagcrggggtcacgactggcttgcagatgtctacgacgtcaatatcttactgactcagatcaccaacttggtgttccatgagagcattccggaatgggagcatct

SEQ ID NO: 29227 - DNA, 201 bp, Homo sapiens
ccctattttgttcaacttttcttccatcccaccttgacattctatgtaattattttagtccattgataaaaacaagttaatattttttatactttattggycagcaggggatctctcaaaacaaagaaagtgttttatacattgacagttctagctgggatatttagaaaagaaagaaatgagcatttatttgtgcccggt

SEQ ID NO: 29228 - DNA, 201 bp, Homo sapiens
ggccagcaggggatctctcaaaacaaagaaagtgttttatacattgacagttctagctgggatatttagaaaagaaagaaatgagcatttatttgtgcccrgtaggcaggatggaaacaaagaggcccaagatgtggtaaagttaggcaaatttggtataaaacatgctagaatgatgaaactgaagtttaaccagacacc

SEQ ID NO: 29229 - DNA, 201 bp, Homo sapiens
gttaggcaaatttggtataaaacatgctagaatgatgaaactgaagtttaaccagacaccggtaggtggaacacaagcgtgaaacaagggaggatttactsttgtgatgagaagttggctactagatttagcagactaaaatttcaatgacaaatgctttcttaaagcctggagaacatagtttatctgctcctttgcttg

SEQ ID NO: 29230 - DNA, 201 bp, Homo sapiens
tgaattcacataatctaaaaatcagagaattagaagacatacagtgaaatgcctcccttctctctcactccctacttcctgcttttttgtgtatctttttraaataacttcattttaaaatctttttatttccaaaaatctcattagaaacaaatacacacacagattcttatttttcccttgcctccatttgaatgcaaa

SEQ ID NO: 29231 - DNA, 201 bp, Homo sapiens
atctttttgaaataacttcattttaaaatctttttatttccaaaaatctcattagaaacaaatacacacacagattcttatttttcccttgcctccatttkaatgcaaaagatggcactattttgttctttgaattttttacttaatatcttggagatctttccatacaatacataaagcacatcttccagaagtgcatga

SEQ ID NO: 29232 - DNA, 201 bp, Homo sapiens
taatgcatatttgtgctatttcagtcttctgttaacaaatattgctgctgtaaataagcttttgtgtgtgcaagtttatttacatgatacatgtccagaartagaatttttggatcacaggatatatgcatttgtgattttgatatatattgccaagctgattttcatgtgcatgtgtcctgataattactatcactatga

SEQ ID NO: 29233 - DNA, 201 bp, Homo sapiens
ctttgaagcaattgtgaatgggagttcactcatgatttggctctctgtttgtctgttattggtgtataggaatgcttgtgatttttgcacattgattttgkatcctgagactttgctgaagttgcttatcagcttaaggagcttttgggctgagactatggggttttctaaatatacaatcatgtcatctgcacacaggga

SEQ ID NO: 29234 - DNA, 201 bp, Homo sapiens
taagctcagcagctgagagagtcttgagccatttccattttcaaggctcctcgtatactaacagaaagaaagaatttcaagacaggattatggaaattcastttgcttatatagtttaagaaattaatgcttttaatacacacaaaaatactgctatacattcatactatttacaagtaattacaaaatgtattaaaacat

SEQ ID NO: 29235 - DNA, 201 bp, Homo sapiens
atcccagtgatgaagctaacttgatcatggtggataagctttttgatgtgctgctggattcagtttgccagtattttattgaggatatttgcattgcatcratgttcatcaggggtattggcctgatattctctttttttgttgtgtttctgccaggctttggtatcaggatgatgctggccacatcaaatgagttaggga

SEQ ID NO: 29236 - DNA, 201 bp, Homo sapiens
cacagtaagaaactcaacttacaatttgcactcaaaaacaagcatgattatgcattcttatttcactgacctcatgactgccctctgtgtctctgctgttscgaaaagctggtgaccaggctgatttgttcttcagaagtcttcctgtctgcctcaagtaaatactgaaggaactatataaaggggtgggagagtagggca

SEQ ID NO: 29237 - DNA, 201 bp, Homo sapiens
ggttgatttctagatttttctttccttatagaaaaatccttcacttctaaagaaactattttttgaatcactgcagtgctctaacgggctacacataggcsttggtaatctgggatgtaattcctcacccctggtggtgccgaacagacatggtttcattaatcaatgcctgagcttggtgacttgggctgagctcaggct

SEQ ID NO: 29238 - DNA, 201 bp, Homo sapiens
ctctgatcttagttatttcttgccttctgctagcttttgaatgtgtttgctcttgcttctctagttcttttaattgtaatattaggtgtcaattttagatmtttcctgctttctcttgtgggcatttagtgctataaatttccctctatacactgctttaaatatgtcccagagattctggtgtgttgtgtctttgttctc

SEQ ID NO: 29239 - DNA, 201 bp, Homo sapiens
aaagttatgggaatcattttatactcttggcctggggtcctgctattttaacaacacgagggtatagcacccccaggttgtacaactccagggagtaccaygtatattttcatgtatgtgagcagtgccttccggagtagtctacggaagctaccttgcagcagaactgtcatttaaaaacaatttgctagttatcaaatc

SEQ ID NO: 29240 - DNA, 201 bp, Homo sapiens
ggctactgaaggttgtgcatgcgtcatatagttctcatgccatggttttcagctccatcacatcatttaaggtcttctctacgctctttattctagttagycattcgtcgaatcttttttcaaggttattagcttctttgccatgggttcaaacatcctcccttagctcgaagaaatttgttattaccgattgtctgcagc

SEQ ID NO: 29241 - DNA, 201 bp, Homo sapiens
tgatgctttacagaagcctaggtaaattgggttccagtgctcctggtctcctgagctcctgctacattgacactgtgtttatgccacttgtgttgatccasatgtgatattaacttcccagtacccccaaaacagtcacacatagtgccacaaatgcttcctctggctcatccagcaacccctacctctgactccatttcc

SEQ ID NO: 29242 - DNA, 201 bp, Homo sapiens
ctgaaggttgtgcatgcgtcatatagttctcatgccatggttttcagctccatcacatcatttaaggtcttctctacgctctttattctagttagccattygtcgaatcttttttcaaggttattagcttctttgccatgggttcaaacatcctcccttagctcgaagaaatttgttattaccgattgtctgcagccttct

SEQ ID NO: 29243 - DNA, 201 bp, Homo sapiens
ggactacaggcgcccgtcaccgcgcccagctaactttttgtatttttagtagagacagggtttcactgtgttagtcaggatggtctcaatctcctggcctygtgatccacccgcctcagcatcccaaagtgctgggaagcatttttaaataaagtacatcattcaaatgatttaaagtaaatcattgtaactccagatgac

SEQ ID NO: 29244 - DNA, 201 bp, Homo sapiens
cttttttcatttccctagaaatgtttctatagaatagcaattcttccatcatttgctttagtttcagtgcctgtgtcatagaagcgtcagtgttgtaaagraagtcttgaataattgcaattgccacccttctcctgaattgtctaatatcagtttgttttctagcactgcatctcccatgtcttctttcccatcgtctgg

SEQ ID NO: 29245 - DNA, 201 bp, Homo sapiens
agctgtaaaatgggcaaaagtaatacacatattattgtttaatggatggattatatatttatgctttgagctctgaaggagttgatactaccctgagaggttttttttttcttttcatttttataatacttcccaaccatgatgtaaatattcataaaaacctagggagtatagttgtcatgactaatttgataatgaagg

SEQ ID NO: 29246 - DNA, 201 bp, Homo sapiens
atttactagaaggaggattagcaatgtagtggtcagagaaccagaaatctaaaaatgaccacaggactagggtggattccggagaactgttgtcatcactmgctaatattaatagtgacatcagtagctaatgttaaaagaaaaaccttagacaaattaaatttagtagagtttaattgagcaaagaattattcaccaatc

SEQ ID NO: 29247 - DNA, 201 bp, Homo sapiens
gagctagatcttcccctgaaacatacacttgtccattttgatccaatgaaatgagtttacctttgcagttggtgtgatttgtgttttccattagaggcctmttgaaaaataatagagattttgggccttcttgtctcttcctattctttacttaatagggaagactctttaacatgcatttggattgcgtccaggatgggg

SEQ ID NO: 29248 - DNA, 201 bp, Homo sapiens
ctggaaagattttccattccctttagtgttggtcctcaaaataaataaataaaccaaaatcaaccaaaccaaaaaacaaaacaaaacaacaacaaaaaaamcccgaaaaaacccagagaacagacaaatgagcaaaagcctgtatttcgaattactttggagataaatagtattctatgccccaaattatttctcaacact

SEQ ID NO: 29249 - DNA, 201 bp, Homo sapiens
attctaagataagaccatgctaaaattctaagaaataagaaaagggttctatagattctgggtgactacaaaaaaaagaaatctgtaaatatctcaaatcttttttttttttttttgaaatcaggcagaacatttagactagcaggaaataatatcgtttcaagaagagaaatcaggaacctcacagacagaaggcaaggt

SEQ ID NO: 29250 - DNA, 201 bp, Homo sapiens
aaatgaggtcttaagggtggggcccctaatctggtaacccctaatctggtaacactgacgtcttcatacaaacaagaagaaaaagaagagacctcagatayctctctctctctctctctctctctctctctctctctctctctctcgtctcacacagaggaaaggccatgtgaagataaagaaaaggctgccatctccagg

SEQ ID NO: 29251 - DNA, 201 bp, Homo sapiens
gtgggaggcttagcaggtcactagacctgctagaggacaactcaagtagacatatcccccaattatgaaaaagtgcatttcaaggtaaaagtgacctcaayataaattggaattttgcagtgctgaattaattattgacacatttgctgagaagcaagcatggtttaaaaataaccacagtcacaacaaaaccacaaacct

SEQ ID NO: 29252 - DNA, 201 bp, Homo sapiens
tatttttgtgtagtaaaattcaagcaaataataatagactgttttattatacagaatgaaaatgcggttcttggggttggtggtctgtttggttctctggmccctgcattctgaggggtctggagggaaactgacagctgtggatcctgaaacaaacatgaatgtggtaagtttctcaaagttatgtacttttaaaatgca

SEQ ID NO: 29253 - DNA, 201 bp, Homo sapiens
tgtttttagcttactgattccaagcaaatgctgaagaggtttccacccagggtgctgttaggtctgtgcttttatgaaaggggaaaggaaagtgaaactgwtggaaccctatcaagatccctcttgaggggaaactgaaacagaatctgtgagaactgagctcactcacgccaggaacatgttccagacagatttggaaaa

SEQ ID NO: 29254 - DNA, 201 bp, Homo sapiens
ccacccagggtgctgttaggtctgtgcttttatgaaaggggaaaggaaagtgaaactgatggaaccctatcaagatccctcttgaggggaaactgaaacasaatctgtgagaactgagctcactcacgccaggaacatgttccagacagatttggaaaactgtggtttgaaagttgtaaaaaggcactgtaaaaagaaaat

SEQ ID NO: 29255 - DNA, 201 bp, Homo sapiens
gtgtgtatcacactgttgcaggggaaggtgcagtgccctggaatatgaagaaagtgagcatgagtcttgatatgctcccaggtaatagaaaggagacttakgggaccttggtgctacacctgggtttgcccctgacttcttgtgtgctttgttttttcttttttttttttaacctctgtgggatatattatatatacttta

SEQ ID NO: 29256 - DNA, 201 bp, Homo sapiens
ctcattgcaggaaatagctgcacacagggaggaaacatgagctgatgcattccccaccctgcctccccccatgtagttccgtagggaaccattccagaaayttaagaagcctgtgtgtacaccaaaaaaagccacagggaaaaacccctcaaacatcttacaaatgctcagactgataaagacatattgaatctataaaca

SEQ ID NO: 29257 - DNA, 201 bp, Homo sapiens
actgccctctgtgtctctgctgttccgaaaagctggtgaccaggctgatttgttcttcagaagtcttcctgtctgcctcaagtaaatactgaaggaactayataaaggggtgggagagtagggcacgcatcagctgatgttttctccgtttttgagtaattgcttttaggggaaggaagaggaaactggaaagtgaaacta

SEQ ID NO: 29258 - DNA, 201 bp, Homo sapiens
ggtttgcatttccacattctaaaacagagcatggacagaggctctttactgtccttcactcctattcaagagcaaggttgttgccactggtgttatttccrgtgtttaaaggcaaatagataaaaagaatggagaaggcctttcacacccaaagtgaaacgcgtcctcttctcatgcatcccacttcccctcctgacttcc

SEQ ID NO: 29259 - DNA, 201 bp, Homo sapiens
cactctgtcatccaggctggagtgcagtagcacgatctcagcttactgcaacctctgcctcccaggctcaagcgatcctcccatctcagcctctccagtcratgagactataggcacgtgccaccacgcctggctgatttttgtatttttagtacagacggggtctcactatgttgcccaggctggtctccaactcctgag

SEQ ID NO: 29260 - DNA, 201 bp, Homo sapiens
aaagaatggagaaggcctttcacacccaaagtgaaacgcgtcctcttctcatgcatcccacttcccctcctgacttcctcctctattattaatagcaccarcatcctcctaatgacctagcctggaatctgcagaatcattcttgaccacgggtcctctctaggccacccacgttaaattgcttcagttcatctttttctt

SEQ ID NO: 29261 - DNA, 201 bp, Homo sapiens
tggagtgcagtagcacgatctcagcttactgcaacctctgcctcccaggctcaagcgatcctcccatctcagcctctccagtcaatgagactataggcacrtgccaccacgcctggctgatttttgtatttttagtacagacggggtctcactatgttgcccaggctggtctccaactcctgagctcaagcatctgccctc

SEQ ID NO: 29262 - DNA, 201 bp, Homo sapiens
cctctccagtcaatgagactataggcacgtgccaccacgcctggctgatttttgtatttttagtacagacggggtctcactatgttgcccaggctggtctycaactcctgagctcaagcatctgccctcctcggcctcccaaagtgttgggcttatgggtgtgagccactgcggccagccatgttacctctttacaaaaga

SEQ ID NO: 29263 - DNA, 201 bp, Homo sapiens
tttcacctccattctgcacagtagtagcccttggctactcgtgcagtatgtgcatgctgtttcccaccattaagcaaccttcttaggaagtgttgagcaaygctttgctcctgaagggaattgaaattcagaaattacacttcatagggaagtggctctgttttcatctgctcagccttatttcagaaagtcatggggagt

SEQ ID NO: 29264 - DNA, 201 bp, Homo sapiens
tgatgccatgataggcacaatatatattttatatatatatacacacaccaagagtggcacatttgtatctgaaagttatgcatctgattgccgagtgggtraagtggcactctagactgtgaaagcctggaatgactgccttcagcatgcagaaacaggcttttcaactgtggcctcagcaaagattccccaggggttgtc

SEQ ID NO: 29265 - DNA, 201 bp, Homo sapiens
agcaactcagagagctgttaggtgacttatctgagataatgcgtgtaaagtgcttaagtgcttagcatggtgcctgtcacattgtcaacacttagtatgcrcttgctgttactatgattatattacctgggccaaagaatgccacttcactctatccttcttcatagtggttatgttctaataatattttattacatttac

SEQ ID NO: 29266 - DNA, 201 bp, Homo sapiens
gaatcactgcagtgctctaacgggctacacataggcgttggtaatctgggatgtaattcctcacccctggtggtgccgaacagacatggtttcattaatcratgcctgagcttggtgacttgggctgagctcaggctcatgtagcactctgatggcgcattgggtaggggattgcattcagaacctttgcctaatggagca

SEQ ID NO: 29267 - DNA, 201 bp, Homo sapiens
tctactatttaactggctgtgtgaccttggcaattttctttacctcttgaagttttgacttattcaattattaaacaggaagaataatactggctacttcrtaggctgttgtgaaaatttgataaggcctgtgaaatatatgcagtatagtaagtgcaggtgatacaatttcttttacaacatttatttatttaaaatatt

SEQ ID NO: 29268 - DNA, 201 bp, Homo sapiens
tttacagatgaggaaaccaaggtttatagggttaattaacttgcccaagataaagcagctgatgggtagtgaaggcaggagtcacacagcccgtgactgtytctgcccacttggccctcttctcaggctagagaacagctatgatgtccctgataaagtcacactgtggaaagtggaaagtatctgacttagatgtcctgc

SEQ ID NO: 29269 - DNA, 201 bp, Homo sapiens
gccaattaacaaatattttatatgttatatgtattatattccatatatacaataagtaagctagagaaaagaaaatgttataaggaaatcataaggaaaakaggatgtatttactattcattaagtggaagtggatcatcataaaggtcttcattcttatgttggaacaggctaaggaagaggaggaagaggaggagttgg

SEQ ID NO: 29270 - DNA, 201 bp, Homo sapiens
caattaacaaatattttatatgttatatgtattatattccatatatacaataagtaagctagagaaaagaaaatgttataaggaaatcataaggaaaagargatgtatttactattcattaagtggaagtggatcatcataaaggtcttcattcttatgttggaacaggctaaggaagaggaggaagaggaggagttggtc

SEQ ID NO: 29271 - DNA, 201 bp, Homo sapiens
ccctctactgtaagagttacctaaagcatctgtgatggtccaggaggcttctcaggtgatcgggcagtgtcagtcttcagccactaagcccagaagatctkggaagaagtcaatcagagagccttgggccagagttccaggggctctgggagtggctgccaggtgagctggacagtctgattttcagtggggtcccacaca

SEQ ID NO: 29272 - DNA, 201 bp, Homo sapiens
aattaacaaatattttatatgttatatgtattatattccatatatacaataagtaagctagagaaaagaaaatgttataaggaaatcataaggaaaagagratgtatttactattcattaagtggaagtggatcatcataaaggtcttcattcttatgttggaacaggctaaggaagaggaggaagaggaggagttggtct

SEQ ID NO: 29273 - DNA, 201 bp, Homo sapiens
ttccatcatttgctttagtttcagtgcctgtgtcatagaagcgtcagtgttgtaaaggaagtcttgaataattgcaattgccacccttctcctgaattgtytaatatcagtttgttttctagcactgcatctcccatgtcttctttcccatcgtctggtgctgttttagaagcactcgtctccatcaaatcatcttctgtt

SEQ ID NO: 29274 - DNA, 201 bp, Homo sapiens
tcccatacaccctctgcccccacactcccctgttatgaacatccctcacagagtggaattgtaattgttacagctgatgaacctacattcacacaaagtcygtagtttacattagggttcccttttttttttttttttgagactgagtctccctctgtcccctaggctggagtgcagcagtgcaatctcggctcactgcaa

SEQ ID NO: 29275 - DNA, 201 bp, Homo sapiens
tctggtaacactgacgtcttcatacaaacaagaagaaaaagaagagacctcagatatctctctctctctctctctctctctctctctctctctctctctctcgtctcacacagaggaaaggccatgtgaagataaagaaaaggctgccatctccaggtcaggaagagaggtctcaccagaaaccaacttggacttctagca

SEQ ID NO: 29276 - DNA, 201 bp, Homo sapiens
catcctcttcagcagttggtgttttcagcgtttttggatgttgctcattctgatacgtgtatagtgatgtctcattatgtgtgatctttttctttcctttkgtttattttgttaggaattattgtgagaaatgcaattacgaaagcaaattgtaaaaacattttataagaaaaaaattgtaaaaacattttataatttctt

SEQ ID NO: 29277 - DNA, 201 bp, Homo sapiens
ctggtaacactgacgtcttcatacaaacaagaagaaaaagaagagacctcagatatctctctctctctctctctctctctctctctctctctctctctctcgtctcacacagaggaaaggccatgtgaagataaagaaaaggctgccatctccaggtcaggaagagaggtctcaccagaaaccaacttggacttctagcat

SEQ ID NO: 29278 - DNA, 201 bp, Homo sapiens
ctgctaccttgccagtgctgttttaaaaaaattctttactaacattatatgtgagtacatcactatgtcaatctttcaatttatttctagttcattatttscttatggatcttttacgaatgttctatttagcaagatatcatatttgttttgaagcttggtgctactgcctcctaaacaatgaatgtttttcaggtccca

SEQ ID NO: 29279 - DNA, 201 bp, Homo sapiens
gtttttaggctctatctttgagttttttttattgttgtcatataccaggccagattgatttaggtaaaaacagcactcttcatgtgaaaatatacagagtccccccccccctttttttttagcagtgagtaagtcaaggcctcagcgattttgtaggaaagagaaatgcaaagccagcaattgtttgttaaagaaggatta

SEQ ID NO: 29280 - DNA, 201 bp, Homo sapiens
atgctttaatcctttttaaagcgtgctgtgggatgggatattggcattgagtggtgtaagggtgattaggttttaatgggatggtaaggggtgcatgatcrgtcaccaaggagggagtagaggtatcttatacttgtgggttaaggtggggggatatgaaaggaagacatgaaggaggctttgggttgggaagaagggtgg

SEQ ID NO: 29281 - DNA, 201 bp, Homo sapiens
ggacactcagctcatcctctcatcttcctcctataatgagggacaatatgttctactctgactctagaaaatgtatcaagttaatttcttttacaaaaaamaaagagaaaaatagaaaggaattccttatgcttccctcccctccaccaaaagaggaattctgatgttaactgtttagtcttcatttctaagacagggcac

SEQ ID NO: 29282 - DNA, 201 bp, Homo sapiens
ctgcctcagcctcccaaagtgctgggattagaggtgtgagccaccgtgcctggccctaagtatttttaaataaagtaaatcatttaaagtatttttatactttttttttttttgagacagagtctgtctctgtcgcccagactggagtgcagtggtgctatcttggctcactgcaagctccgcctcccaggttcacaccat

SEQ ID NO: 29283 - DNA, 201 bp, Homo sapiens
tgtttgtgtacactgaaccatcatcagaaagtaaaggtgtcactatctcagccacacatgtggatagtctgtggttgtttggcatcaccatcattcttgaytgaatttatatgctaccaatacacagtcattttcttacattaattcacacataagaattttacataaaaaaagacatatcattaatacagtaagaaagaa

SEQ ID NO: 29284 - DNA, 201 bp, Homo sapiens
taagacatttatttcatcttgtaatcaagagccagcattctctctgtttttcaagagaagccaggattatatatttttatgtgagctcttctgattttttwaattttaattttaattaattaatttatttttttgagacagagtctcgctctgtcaccccggctggagtgcaatggcacgatctgggctcactgcaacctc

SEQ ID NO: 29285 - DNA, 201 bp, Homo sapiens
tgtgcaggtttgttacataggtatacatgtgccatgttggttcatatgtttattgcggcactatttgcaatagcaaagacttggaaccaacccaatagacygggtaaagaaaatgtggcacatatgcaccatggaatacaatgcatccataaaaaaggatgagttgtgtcctttgcagggacatggatgaagctggaaacc

SEQ ID NO: 29286 - DNA, 201 bp, Homo sapiens
ctgtttactttactagttctcgaattttccaggggccatatcattgagccagaatttcctttttgcctcacactaaacatacgaagccaggccctggaggratctgtgagctgtttagctttccaagctctggataataatttagtttacccagctgtaaaatgggcaaaagtaatacacatattattgtttaatggatgg

SEQ ID NO: 29287 - DNA, 201 bp, Homo sapiens
ttgcgctaggtgcagatttgaacttcaattccaaattaagcaagcaaaactctttgtcaaattgtcttagcattactgaaaataatacttcacattttgtrttgtgccttacggggtttcaaagccttttcataaagctttaatatttgcaataatccctttgacaggtgaggcgagcatttgtttctctacaggcaaggg

SEQ ID NO: 29288 - DNA, 201 bp, Homo sapiens
agaggttttttttttcttttcatttttataatacttcccaaccatgatgtaaatattcataaaaacctagggagtatagttgtcatgactaatttgataaygaaggaattgttagctagaagcgtttcctccatcctgtagctgcacaaagcagagactcttgtgtagcaaaattaacatgacatatggtgtttccaacaa

SEQ ID NO: 29289 - DNA, 201 bp, Homo sapiens
accatgatgtaaatattcataaaaacctagggagtatagttgtcatgactaatttgataatgaaggaattgttagctagaagcgtttcctccatcctgtakctgcacaaagcagagactcttgtgtagcaaaattaacatgacatatggtgtttccaacaacagagtctcatgagatacttcgagttcagaggttgttata

SEQ ID NO: 29290 - DNA, 201 bp, Homo sapiens
cctaccgagccttcctcttgcctctctctgactctccatcctgagggaagacgattgcagtcgtttttgttggaaatgacctgacctgtgggagcagcccrttcctggcctttcaaagtcaagtcgccttactcatggcctagctcctgatcactcctggtgggtgaaaagtgcctcaacatacctaaagagctgtgacat

SEQ ID NO: 29291 - DNA, 201 bp, Homo sapiens
attgtgtagaatactcaaggttgatgatagactgggaaggaggaggaaggaggcagagataagcgatgggggatactgagccctatttagactttggtccsccagcttttggatgaacttagcacattactggctatgcaggactaacctctatgggatgcaaaatgactccaagtatggaacaacattgcaaaaatggac

SEQ ID NO: 29292 - DNA, 201 bp, Homo sapiens
ctctgactctccatcctgagggaagacgattgcagtcgtttttgttggaaatgacctgacctgtgggagcagcccgttcctggcctttcaaagtcaagtcrccttactcatggcctagctcctgatcactcctggtgggtgaaaagtgcctcaacatacctaaagagctgtgacatgagcaggaaagcccctctttctaga

SEQ ID NO: 29293 - DNA, 201 bp, Homo sapiens
atgcaaaatgactccaagtatggaacaacattgcaaaaatggacttcaatattacatgaaggatttggctgctttatataaatatagaaacaagcccagtrgattactccactaaaggtgactaagcaaatgttacagttcaaattgcactcaagaagtcaatcgagaaataattctatcaccaagcccgtggacctaccc

SEQ ID NO: 29294 - DNA, 201 bp, Homo sapiens
ctaggtgatagaatgagaccttttctctcttaaaaaaaaaaaaagttatgggaatcattttatactcttggcctggggtcctgctattttaacaacacgarggtatagcacccccaggttgtacaactccagggagtaccatgtatattttcatgtatgtgagcagtgccttccggagtagtctacggaagctaccttgca

SEQ ID NO: 29295 - DNA, 201 bp, Homo sapiens
tcatttggtacagctgaaagttgccataccgcagatggagcagttgtttcgctacaggagtaagctctttactgaattccttttggaagtaatactctgcktcttcatactgatctgctagagcatggaggctggcaagaatggaacagacacggaagagattatcattggcctcatcagctttcttcagatgagccacag

SEQ ID NO: 29296 - DNA, 201 bp, Homo sapiens
ggtaggcattgtttggtatgtattctaaagcctttttaagcagttcaatcgctttgtctggctcatcttttcttcgataaaacttggctgcactgcgaagwacatctgttacacctggggctttctccaaggcttcttcaactaacttctctccttcaccttcctcttcaccttcttcacgcatcttatgaagcttcagag

SEQ ID NO: 29297 - DNA, 201 bp, Homo sapiens
tcccctgcgttttgatatcagtggagcagtgggcttttctttttccgtttacccctccttccagacccaggggtggccggggacgcctgtcgtttcctgcrcactggtgccacgtgtactcatggttagcatgcgtcagtacagctctgcccacctcacagggagagcaaggagagtctgggagaaaataatttaagcatt

SEQ ID NO: 29298 - DNA, 201 bp, Homo sapiens
ccctaaaccaagacactgtaggtgtcttgaatagtaatttccaaacacctggcagtcactgcttgcatcagaatcaccaaattgctttaaaaagtacactrtttaataaatcattgcattaaaaaagtaatgagagttggaattatagtggaattcttggattggctaccatccaggcttataaaacaaatactcctgtgt

SEQ ID NO: 29299 - DNA, 201 bp, Homo sapiens
agtatctaaggctgttaactacctccttgcctgtgctcaggtgtcacttcataagagtcctttcctgattaccatatacatatcatcctccttatccctgtttttttttttttttttgggatggagtctcactctgttgtccatgctggagtgcagtggcatgatctccgctcactgcaacctccacctacctggttcaag

SEQ ID NO: 29300 - DNA, 201 bp, Homo sapiens
tgcctggggtgcctgcgggtgctttttctgcgggcgttggctcaaggcatctgccaatcaaccagggcaacttcagagagcaacttcagagagaagcccactctcttccctgggcgctgtccactttcctggacaggcgcggtctccggtcagtgaagctgcccagtgctcctggaccgcgaggacagcagggatgtctga

SEQ ID NO: 29301 - DNA, 201 bp, Homo sapiens
gcctggggtgcctgcgggtgctttttctgcgggcgttggctcaaggcatctgccaatcaaccagggcaacttcagagagcaacttcagagagaagcccactctcttccctgggcgctgtccactttcctggacaggcgcggtctccggtcagtgaagctgcccagtgctcctggaccgcgaggacagcagggatgtctgat

SEQ ID NO: 29302 - DNA, 201 bp, Homo sapiens
tgacttaggctttctaaatataagaaacaaaagacgaaccagaacctccagtaacttccctccaggccccagctttcactggcccgattttacctgaaagsatctgagcatgggctctctaggatctctcaatatgccccgtcccttcccagctcccagctcccatttccctgtgtcctttggctgcctaactctatacat

SEQ ID NO: 29303 - DNA, 201 bp, Homo sapiens
ggagcttgcagtgagccaagattgcgccactgcactccagcctgggcgacagagcgagactcagcctcaaaataaataaataaataaataaataaataaataaataaataaataataataataataataataattcctttgggaggcggaggcgggcaggtcacgaagtcatctgagaccagccttgccaatatagtgaaa

SEQ ID NO: 29304 - DNA, 201 bp, Homo sapiens
tgctgagaagcaagcatggtttaaaaataaccacagtcacaacaaaaccacaaacctctgacttaggctttctaaatataagaaacaaaagacgaaccagracctccagtaacttccctccaggccccagctttcactggcccgattttacctgaaagcatctgagcatgggctctctaggatctctcaatatgccccgtc

SEQ ID NO: 29305 - DNA, 201 bp, Homo sapiens
agcttgcagtgagccaagattgcgccactgcactccagcctgggcgacagagcgagactcagcctcaaaataaataaataaataaataaataaataaataaataaataaataataataataataataataattcctttgggaggcggaggcgggcaggtcacgaagtcatctgagaccagccttgccaatatagtgaaacc

SEQ ID NO: 29306 - DNA, 201 bp, Homo sapiens
gcttgcagtgagccaagattgcgccactgcactccagcctgggcgacagagcgagactcagcctcaaaataaataaataaataaataaataaataaataaataaataaataataataataataataataattcctttgggaggcggaggcgggcaggtcacgaagtcatctgagaccagccttgccaatatagtgaaaccc

SEQ ID NO: 29307 - DNA, 201 bp, Homo sapiens
gtatatttggtttcatttttttccacttagtattatttatgagattatctgtaagccattttctgtttgtattttatttatatttatgacagtggcatacyccttgtgtatatttatgtaacatatttacccaaatatctattatttgaaatggtaagttttggccacaaggtggcgcccggtaaaaagaaatgcccagac

SEQ ID NO: 29308 - DNA, 201 bp, Homo sapiens
gcagtgagccaagattgcgccactgcactccagcctgggcgacagagcgagactcagcctcaaaataaataaataaataaataaataaataaataaataaataaataataataataataataataattcctttgggaggcggaggcgggcaggtcacgaagtcatctgagaccagccttgccaatatagtgaaaccctgtc

SEQ ID NO: 29309 - DNA, 201 bp, Homo sapiens
tgatatgattatcacagaagtataaccttagtgtatatttggtttcatttttttccacttagtattatttatgagattatctgtaagccattttctgtttstattttatttatatttatgacagtggcataccccttgtgtatatttatgtaacatatttacccaaatatctattatttgaaatggtaagttttggccaca

SEQ ID NO: 29310 - DNA, 201 bp, Homo sapiens
catcagtagagaactgtttctctgggtgattatccagatggtacatcgcaattgccagtccagaggagaattctgggttgttgggcttttcttccagagcyttctcaaaacacaccttcgccctttcatttcttccacacttcagttgtgtccacccttcctcacagtcaagttcagaatactcaatactgtatggatttg

SEQ ID NO: 29311 - DNA, 201 bp, Homo sapiens
tgagccaagattgcgccactgcactccagcctgggcgacagagcgagactcagcctcaaaataaataaataaataaataaataaataaataaataaataaataataataataataataataattcctttgggaggcggaggcgggcaggtcacgaagtcatctgagaccagccttgccaatatagtgaaaccctgtctcta

SEQ ID NO: 29312 - DNA, 201 bp, Homo sapiens
gcagtgatagttgttttgcagtcataaatcatctgtccttatatgttagagtgttttcttaggatgatacatttatagcagtagacttagtaagggagagkgtaggcatagctttaagacttctaatacatattgtactttagaaaagttgaacccgtttacatttttattaccattcaagacctaaatataatttttaaa

SEQ ID NO: 29313 - DNA, 201 bp, Homo sapiens
aagctcccctactgagcaccttgtgacccccacacctgcccaccagagaacaacccccctttgacagtaattttcctttacctacccaaatcttataaaayggccccacccctatctcccttccctgactttcttttcggactcagcccacctgcacccaggtgaaataaacagccttgttgctcacacaaagcctgtttg

SEQ ID NO: 29314 - DNA, 201 bp, Homo sapiens
gtcacaaaccttgccaacagcagcctgggcttcattcttgctgatgctggttttgacgtgtggatgggcaacagcagaggaaatacctggtctcggaaacvtaagacactctcagtttctcaggatgaattctgggctttcaggtatatatgaattgataatggcatggatgtatttccttagtactcttaaagcagacaa

SEQ ID NO: 29315 - DNA, 201 bp, Homo sapiens
tgactttgtgcgaaggagatagcttagaagtgagcggtatggccatagcctggctgctcgcaggaggatgaggatgtggtttctatcttggcagccatgtrcttagggaaagctttagggattctgttactgaaaggaagaaggcaagaatgggaatgggtggcagtctctgccataattaaaaatgcctttccgggtcag

SEQ ID NO: 29316 - DNA, 201 bp, Homo sapiens
agggtttttatggttttaggtctaacatttaaatctttaatccatcttgaattaatttttgtataaggtgtaaggaagggatccagtttcagctttctacmtatggctagccagttttcccagcaccatttattaaatagggaatcctttccccattgcttgtttttgtcaggtttgtcaaagatcagatggttgtagatg

SEQ ID NO: 29317 - DNA, 201 bp, Homo sapiens
cctgcaggatgacaggtgatgttggatgtattgttggatgtatttgcctcaacgaaaccggaaaccaccttgcaagtctgatgacactatctctctctctyttttttttttttttggagggcagaaggctttgacatatcaatgcaccagggatcttaccaaactaaattttaagcacttatagctcaagattctccctct

SEQ ID NO: 29318 - DNA, 201 bp, Homo sapiens
caagattgcgccactgcactccagcctgggcgacagagcgagactcagcctcaaaataaataaataaataaataaataaataaataaataaataaataatwataataataataataattcctttgggaggcggaggcgggcaggtcacgaagtcatctgagaccagccttgccaatatagtgaaaccctgtctctactaaa

SEQ ID NO: 29319 - DNA, 201 bp, Homo sapiens
gagacggagtttcgctcttgttacccaggctggagtgcaatggcacgatctcggctcaccgcaacctctgcctcctgggttcaagcgattctcctgcctcrgcctcctgagtagctgggattataggcatgcaccaccatgcccggctaatttttttgtatttttagcagagacggggtttctccatgttggtcaggctgg

SEQ ID NO: 29320 - DNA, 201 bp, Homo sapiens
ggcccttgggaatgttgaaaccaaggctgtcctaggccaactctattttatattacagacctgtgttgcttcacccttctgtgtcttgggcctccactggkcatggggtttgcagtagagacattggatcggctatcatctaggctactggtcttgttccagccctcttatccagcagcttgccagggtcaaaggctgcag

SEQ ID NO: 29321 - DNA, 201 bp, Homo sapiens
attttggtttcctccacactttaaccgtgtccacccttcctcacagtcaagctctggactctcaattctatagggactggaaaacttctcacagacatgtytcaccttgtctacataaatctgaacgtctgagagtcggcccatgtgatagtagacccaggcatagtttccccaggtgaccagacttctgatttctgcctg

SEQ ID NO: 29322 - DNA, 201 bp, Homo sapiens
ggttaaagtacagctcaggccatggcttcacagggtacagtccctaagccttggcagtttccatgtggtgttgagcctgtgggtgcacagaagtcaagaaytgaggtttgggaacctccacctgtatttcagaggatgtgtggaaaagcctgaatgtccaggcagaagtttgctgcaggggtggggccctcaaggagagcc

SEQ ID NO: 29323 - DNA, 201 bp, Homo sapiens
cctatcatgaagaagtacaaagttgtaagtagaagcagtggccttgctttgccaatgcacactgaaggggataacgtttgctcctgttcagagttcacggycgggcgcggtggctcacgcctgtaatcctagcacttttggaggccgaggccggcggatcacgaggtcaggagatcgagaccatcctggctaacacggtga

SEQ ID NO: 29324 - DNA, 201 bp, Homo sapiens
ggcagatcctgagctttcccaccagcttagtgactgccagcagcccacacacagtacacgccaggcctcagcaaagtacaaatggccaccagacctgggaygtcagaggcccttgggaatgttgaaaccaaggctgtcctaggccaactctattttatattacagacctgtgttgcttcacccttctgtgtcttgggcctc

SEQ ID NO: 29325 - DNA, 201 bp, Homo sapiens
gtctgagagtcggcccatgtgatagtagacccaggcatagtttccccaggtgaccagacttctgatttctgcctggtcagcatgctcttgctggattaackcttcagctttacgtaagcattccagggctgcctcgttttgccctttgaggtgctttagataggccagtaggttgcacattgtggctttgaattcacgatt

SEQ ID NO: 29326 - DNA, 201 bp, Homo sapiens
ggtggccagaggcattttcctatatcaaaagaactttgaaaggcagtcccttactggcaaagcacttcctgacttcaggaaaaaagcatcaatggaaccartctggaaaaatagttctcattgtccagtccttcttattgtacagccaaaagactgacagctgatgtctatattttccctttaaggctcagggattagcag

SEQ ID NO: 29327 - DNA, 201 bp, Homo sapiens
cacagaacagtagagttagcctatcccttcttgccttaaatcctggtgcttgtttctcttccttactaataaacgtcctttgtgggatatatatatatatwtttttttgttagaatggaacactttcatctgcattaaaaacctgttcaggcagatacattttcctctaggaatttatatgcagcctcttggttggcagga

SEQ ID NO: 29328 - DNA, 201 bp, Homo sapiens
tcacacaaagtccgtagtttacattagggttcccttttttttttttttttgagactgagtctccctctgtcccctaggctggagtgcagcagtgcaatctyggctcactgcaacctctgcctcccgggttcaagcaattctcctgcctcagcttcctgaatagctgggattacaggtgtggggcaccacacccagctacct

SEQ ID NO: 29329 - DNA, 201 bp, Homo sapiens
acatttgtcaattcacttatagtcttatcatctggacaaatcattcttctcatttttccttggtattttacactcctctttggtgtacattaattttgcayagctgtaatttagagtagtctataattttgtattttgcttttttttcctttgcaaggtataagcttttctatgctgtcactgtccttgtcatggttgatg

SEQ ID NO: 29330 - DNA, 201 bp, Homo sapiens
ctcaaatcttttttttttttttttgaaatcaggcagaacatttagactagcaggaaataatatcgtttcaagaagagaaatcaggaacctcacagacagarggcaaggtgtctcataggaagtaagcacaggggttggtaacacgggattccagagctcccaggatgagggttaggcaaccaggtccggccaccccacctt

SEQ ID NO: 29331 - DNA, 201 bp, Homo sapiens
ctcgggtacaggtgagtagaaaataaattctcacaggcagacacagacacatatatttatgaatttgtgtgtgtgagcctttttatctatttaacttttaytcagctttaaaaatttttattaaattttattttttaaagcagttttaagttcatagcaaaattgagtggaaggtacagagatttcccatacaccctctgc

SEQ ID NO: 29332 - DNA, 201 bp, Homo sapiens
atttacattcctaccaacagtgtataagagttccctttcccctgcatccttgccagcatttgttatttttttttttaataatagccatactaactggggtkagatgatatctcattgtgatttttatttgcatttccttggggttgagtgatgttgagtattttttcatatgcctgttggtcacatataccagagctcctt

SEQ ID NO: 29333 - DNA, 201 bp, Homo sapiens
ttgatgtccactggttgccattctctcctgaggccattcgtggagacattgggtacttgtctctgcttctgaggtgagtcacggagacttatgcaccagartgaaatgctgagatgttcttgggtttctttttattttgtaggacttatttggagacaaagaatttcttccccagagtgcgtttttgaagtggctgggtac

SEQ ID NO: 29334 - DNA, 201 bp, Homo sapiens
cacatataccagagctcctttataggtgatgagatgcttttcctttgctgtctttaaaattttctttttgtcactgactttagatagtttgactataatgygccatggagaagaacgtttttcactgtatctgattggggattgctgggcctcctgtatctggatgtctaaatctcttactagacttgggaagttctcatc

SEQ ID NO: 29335 - DNA, 201 bp, Homo sapiens
ctgagattgcaccactgcactccagcctgggtgacagagcaagactccatctcaacataaataaataaataaataaataaataaataaataaaataaaaawaaataaataaaatttaaaaattccttattctcctttcagatatggctggagtcatttgtttcatattttcctttcaccttttacttgccctaaatctggt

SEQ ID NO: 29336 - DNA, 201 bp, Homo sapiens
tgggcctcctgtatctggatgtctaaatctcttactagacttgggaagttctcatctattatttcattacataggttttcaaaccctttcagtttcccttygcctttggagatactgataattcatatatttggtcaccttatggtgtcccatagatcgtgaagactttgttcatactttttaattctttttttttcttta

SEQ ID NO: 29337 - DNA, 201 bp, Homo sapiens
tgccagtccagaggtgaattctgggttctttggcttcttttccagagccttctcaaagcacaccttcgctctttcattttggtttcctccacactttaacsgtgtccacccttcctcacagtcaagctctggactctcaattctatagggactggaaaacttctcacagacatgtttcaccttgtctacataaatctgaac

SEQ ID NO: 29338 - DNA, 201 bp, Homo sapiens
agaagggagtcagttcacttttgcaatctcctgagaatcaatttcttaagacttgtggaatattcagtttaaacacaaaactaaaaacaaacagctgtatwggagtattattgacatacaatagcatggcatatttcaattgtacaattgtataagtttttgcatgtgtacacacctgtgaaaccatcagtacattcaata

SEQ ID NO: 29339 - DNA, 201 bp, Homo sapiens
tactagacttgggaagttctcatctattatttcattacataggttttcaaaccctttcagtttcccttcgcctttggagatactgataattcatatatttkgtcaccttatggtgtcccatagatcgtgaagactttgttcatactttttaattctttttttttctttattttcgtcttattggattatttcaaaagacct

SEQ ID NO: 29340 - DNA, 201 bp, Homo sapiens
tgcaggtcacaggggatatgttggcttagcttgggctcagaggcctgacattcctgtcttcttatattaataagaaaaatagcataaaatagtattgaagygttggcagcaaaaattttgggggtggcatggagagataatgggcgatgtttctcagggctgcttctagagtgggagagattaagctgaagaaagattttg

SEQ ID NO: 29341 - DNA, 201 bp, Homo sapiens
gagtgaaatacaccgctcctgccaagccttcctctcattgcaggaaatagctgcacacagggaggaaacatgagctgatgcattccccaccctgcctcccsccatgtagttccgtagggaaccattccagaaacttaagaagcctgtgtgtacaccaaaaaaagccacagggaaaaacccctcaaacatcttacaaatgct

SEQ ID NO: 29342 - DNA, 201 bp, Homo sapiens; identical to SEQ ID NO: 3682

SEQ ID NO: 29343 - DNA, 201 bp, Homo sapiens
gacaaacactttcatttctcttgagtaaatacttaagagtagaatagctgggccatatggtagatatacttataatcttttatctaaagtgattgtaccaktttacattcccatcagcgatgaaagagtttcccagctgcttcacatccttgccaacactttttaattttagccatcctggtgggtagaatagtgttatct

SEQ ID NO: 29344 - DNA, 201 bp, Homo sapiens
ttttgaagcttggtgctactgcctcctaaacaatgaatgtttttcaggtcccaaaccagttgtcttcctgcaacatggcttgctggcagattctagtaacwgggtcacaaaccttgccaacagcagcctgggcttcattcttgctgatgctggttttgacgtgtggatgggcaacagcagaggaaatacctggtctcggaa

SEQ ID NO: 29345 - DNA, 201 bp, Homo sapiens
gtttcaagcctttgactggggaagcagtgccaagaattattttcattacaaccaggtaaagtttttagtcttttcattaaagggggccctgaaaactcatyaagaaagccagcctggcctatcaggattctggccaggctcaggtgctgtgggaaatgtttgcaggagttgactagtgtttgttttccatcagtccattca

SEQ ID NO: 29346 - DNA, 201 bp, Homo sapiens
cggatgacaacctggatttagtttgcctgggttgcattttgggctacatcactttttacttttgtgaaattgtgctaagccctctacatacagtgtctcasttaatcctcaagactaccttcatacacccattttacaagtgaagacgctgaggcttagaaagggtaactatattgcccaatgtctgacacacagaaatgc

SEQ ID NO: 29347 - DNA, 201 bp, Homo sapiens
agcagcccacacacagtacacgccaggcctcagcaaagtacaaatggccaccagacctgggatgtcagaggcccttgggaatgttgaaaccaaggctgtcytaggccaactctattttatattacagacctgtgttgcttcacccttctgtgtcttgggcctccactgggcatggggtttgcagtagagacattggatcgg

SEQ ID NO: 29348 - DNA, 201 bp, Homo sapiens
ttaaaatgcatctatttccccgatccagttatgtgagctacatgaagccatacccatacattcatctctttataactcctttgcttttcaatttctctgawtttttttttttttttttttttttttgaggcagagtcttactctgtcacctgcccgcccaggctggagtgcagtggtgtgatctcggctcattgcgacctc

SEQ ID NO: 29349 - DNA, 201 bp, Homo sapiens
cctacatttttgaggatgcctaggacctcttacctaatggacattttcctaaaaggcccaatgtctgtcacctcatcagttattgcacccccagagatgayggagggtgactgagctggctggaggcagatcctgagctttcccaccagcttagtgactgccagcagcccacacacagtacacgccaggcctcagcaaagt

SEQ ID NO: 29350 - DNA, 201 bp, Homo sapiens
ttctagacagactgattgaaattattaagcagttatcagaagaaggatctaatctttattcaattatctctccagatgtagcttatttatttatttatttwtttgagacggattttcggtcttgttgcccaggctggaatgcaatggtgcaatcttggctcactgcaacctccgcctcccaggttcaagtaagatgtagct

SEQ ID NO: 29351 - DNA, 201 bp, Homo sapiens
tattctcctttcagatatggctggagtcatttgtttcatattttcctttcaccttttacttgccctaaatctggttcagaactttttgtgggagcattaakttaccagaatatttttgtgtagtaaaattcaagcaaataataatagactgttttattatacagaatgaaaatgcggttcttggggttggtggtctgtttg

SEQ ID NO: 29352 - DNA, 201 bp, Homo sapiens
catgagtcttgatatgctcccaggtaatagaaaggagacttatgggaccttggtgctacacctgggtttgcccctgacttcttgtgtgctttgttttttcttttttttttttaacctctgtgggatatattatatatactttattttatttttggcaagagggttggggattgggagagtggagagtctaggtctttagaa

SEQ ID NO: 29353 - DNA, 201 bp, Homo sapiens
agattccccaggggttgtccattgagctattagagtcatagctgaaaattcacagcgtggcttgtgagttaagtctttagaaggagaccatcagcttgtattttgctttgattgtttattttagaattctggttgatttctagatttttctttccttatagaaaaatccttcacttctaaagaaactattttttgaatcac

SEQ ID NO: 29354 - DNA, 201 bp, Homo sapiens
tggaattcctgttttctgtcctttgttctcacaggttttatagcattttcacagatccctgagctggctaaaaggattaaaatgttttttgccctgggtcytgtggcttccgtcgccttctgtactagccctatggccaaattaggacgattaccagatcatctcattaaggtacttggacccctcccatccctctcctct

SEQ ID NO: 29355 - DNA, 201 bp, Homo sapiens
tctttccagccactattgccttgagtctactacctatggagtacaacaccttccttgccggggattaaacattcattttggtgcccagcctacggcagcarctccacagctagtggcgattataattagcattctctcatttggggttagatttctttttttgtgccggtaatggcaacttgaaaagatactcaaagagat

SEQ ID NO: 29356 - DNA, 201 bp, Homo sapiens
attaacaagaaacaagtattctctaagatatgttaaatatttaagcagatgcccaaatccagcacctaagaaaatctaccttgaggttttcaaaggcacasaacataatttcaagggataaatgcaagaaaaaatcctttacctcatggtcgcaggctgggcgctgcactggtgtcctgcagtgttctggcaaaggctgat

SEQ ID NO: 29357 - DNA, 201 bp, Homo sapiens
gaggtgggaggatcacttgagtccaggagtttgaggctgcagtgagcagtcatgccactgcactccagtctaggtgatagaatgagaccttttctctcttaaaaaaaaaaaaagttatgggaatcattttatactcttggcctggggtcctgctattttaacaacacgagggtatagcacccccaggttgtacaactccag

SEQ ID NO: 29358 - DNA, 201 bp, Homo sapiens
cactgtagaagtccgctgaaaacttatttgattttctgcctccttctcttcatttggagaatttaaatacacctctgtagtgtgtgatttttgctttggtaaacttgtgcaaaagcatcctgatttgatgtccactggttgccattctctcctgaggccattcgtggagacattgggtacttgtctctgcttctgaggtga

SEQ ID NO: 29359 - DNA, 201 bp, Homo sapiens
cttggctgaatccacagatacaaaactggatatggagggccaattgtatattataattattttatctatatatatccatctctctctctctctctctattwtatatatatatatgtatatatatatgtagctacctatctgtctacctttatttcccaagtaaaatgactaactctttgaaaaagcttaggatgcaaattt

SEQ ID NO: 29360 - DNA, 201 bp, Homo sapiens
tttcaagactattacaatgagagagacagactattgcaatatgggagaaagactaaactcaacactgaatacaacaagtgtggatttgtagtcaacaggcyggatgaaggagtggatggaaaattactaaaaagaacttgcttagatatcaaggcctgggaaagaagtacttaattgtatatcagggtgggggggcattct

SEQ ID NO: 29361 - DNA, 201 bp, Homo sapiens
tgagagagacagactattgcaatatgggagaaagactaaactcaacactgaatacaacaagtgtggatttgtagtcaacaggccggatgaaggagtggatrgaaaattactaaaaagaacttgcttagatatcaaggcctgggaaagaagtacttaattgtatatcagggtgggggggcattcttgataaagtggctcagc

SEQ ID NO: 29362 - DNA, 201 bp, Homo sapiens
tattcagccatgaattccaaaattggccattgaaaccaacttcagaaatgataccattaaaaaacactggagcagcttagtcagaaatttctactttggartaataacgaggaagaaggcatcagataaaacatcctcacacattctatctttagtgaaaccagatggtgaagaaaacttcagacttccaaccgacacata

SEQ ID NO: 29363 - DNA, 201 bp, Homo sapiens
actctgcaggtagttcaagtgctgaccacacatttgcaagacgtgagagtgagtgtcttcttaatgtgcattaagtgccttgcttaccttacctatctagwcccagccctatccagagcctaccttttacaactctaccttttaaagcttaacatcctctacaaaattatactatggagtagaaaggttgtactgtgaact

SEQ ID NO: 29364 - DNA, 201 bp, Homo sapiens
agtgtcttcttaatgtgcattaagtgccttgcttaccttacctatctagtcccagccctatccagagcctaccttttacaactctaccttttaaagcttarcatcctctacaaaattatactatggagtagaaaggttgtactgtgaactgagctggcattattctcacacaagctatgtacttgagcatcaaagatagta

SEQ ID NO: 29365 - DNA, 201 bp, Homo sapiens
taccttttaaagcttaacatcctctacaaaattatactatggagtagaaaggttgtactgtgaactgagctggcattattctcacacaagctatgtacttsagcatcaaagatagtattaaaatagatgcaatcataacataatctccatacactgcagttagaaagttatttatgaagcatctggtatatctggacatac

SEQ ID NO: 29366 - DNA, 201 bp, Homo sapiens
ctgaaggaggattcaggggaagttggagtagttgcaggtctggtacaccaaggagttaacccaggagatgggccatagtattctgtggttcacaaacacamctgcttgaacgttccaagcataaaaaggctaaatagttgcttcttttccaccctctaaatcacatgcaaaaatgtctactgactcatcctgactgaaaac

SEQ ID NO: 29367 - DNA, 201 bp, Homo sapiens
atcaacaaattaattcattctgcatctttgtgtgttataggaggaagaaaactccaataaagtctgtctcaacagaggtcacctcccacccatcagacacrgaaattccagtacctgctgggagttctggtggccatccttatccctagtctcttgtcattgttcaaggattagggaaaattcctctcaacctgctagatt

SEQ ID NO: 29368 - DNA, 201 bp, Homo sapiens
actgctggattttgcttggatttggcctccctaaactacagcctggaaaatctgtccaggcaattatctgaggcattgcagggatcatttcatttgttttycttttctcaaggattgctctttcttttgcactatttgttgtccaatgtctgaaattatcgtttcatactttttccaacttagctgtttaaagtaggagag

SEQ ID NO: 29369 - DNA, 201 bp, Homo sapiens
cagacttcccattatatttctgaaggttgcagtagcgctgatgggattgttgcttttcagcatcagggacttccttattgaatggtgtctgataacattcygtctccaggaactcagcgagatcggagtatgcattcagaggattcagtcccttctcaagagctttattcgaatagtccatagcatattgctttagtgctt

SEQ ID NO: 29370 - DNA, 201 bp, Homo sapiens
cagaatactcaatactgtatggatttgaaaatttcttgcaggtttgtttcaccttatctacataaatctgagcatctgagagtctgcccaagtgatagtaracccaggcgtagtttccccaagtgactagacttctgatttctgcttggtcagcatgttcttgctggattaactcttcagcttgccgtaagcattccaggg

SEQ ID NO: 29371 - DNA, 201 bp, Homo sapiens; identical to SEQ ID NO: 3681

SEQ ID NO: 29372 - DNA, 201 bp, Homo sapiens
tcagacagtcctatgtctgttatctggtagctatggggccttggccagattacattgcttaagcctcttccctgcactaataaaattagcatttttgagcrtgctaaatgcactgaagtgtgaggcactttgctctgttttttaaatttaattcccagagcatctctgtgatgtaaacgtgattatctctgacttaaacat

SEQ ID NO: 29373 - DNA, 201 bp, Homo sapiens
gttgtggtacacacctgtaatcccagttcttcaggggcctgaggtgggaggatcacttgagtccaggagtttgaggctgcagtgagcagtcatgccactgyactccagtctaggtgatagaatgagaccttttctctcttaaaaaaaaaaaaagttatgggaatcattttatactcttggcctggggtcctgctattttaa

SEQ ID NO: 29374 - DNA, 201 bp, Homo sapiens
tctctgggtgattatccagatggtacatcgcaattgccagtccagaggagaattctgggttgttgggcttttcttccagagccttctcaaaacacaccttygccctttcatttcttccacacttcagttgtgtccacccttcctcacagtcaagttcagaatactcaatactgtatggatttgaaaatttcttgcaggttt

SEQ ID NO: 29375 - DNA, 201 bp, Homo sapiens
tttttttccaggaactcctatatttttaactttcaaatgtatgtgtatggtccattttgagttaatttttctatgacttaagggtctaggttcattgtttygcatatagctattcaagtgttctagcaccattgttaaaaagattattctttccccattgaattgtcatggaaccttggtaaaaatcaattgggggtctac

SEQ ID NO: 29376 - DNA, 201 bp, Homo sapiens
gtttatctgctcctttgcttgttaatgtgggagactgtttcagattctgtccacccaatttccatcgtcctttttctctacagagtgaaattatctcttastggggattccctagtgaggaatacctagttgagacagaagatggatatattctgtgccttaaccgaattcctcatgggaggaagaaccattctgacaaag

SEQ ID NO: 29377 - DNA, 201 bp, Homo sapiens
atccctctcctctccccgcagatttcctcctgagatctgaagaaatggcaaggggagggataatctgtgccttcctcccctgcgttttgatatcagtggarcagtgggcttttctttttccgtttacccctccttccagacccaggggtggccggggacgcctgtcgtttcctgcacactggtgccacgtgtactcatggt

SEQ ID NO: 29378 - DNA, 201 bp, Homo sapiens
tagtttgtgataactcatcaaactgcatactcagtatgtgtgtgctctattttatgtactatttcaatgaaagagttcctttcttggattacagttatgawgagatggcaaaatatgacctaccagcttccattaacttcattctgaataaaactggccaagaacaagtgtattatgtgggtcattctcaaggcaccacta

SEQ ID NO: 29379 - DNA, 201 bp, Homo sapiens
actagacaatgtttaatggagattgcgcttattgtgattttgaaaattaaaacaacaacaacaacgaggctttctctggttccttttcattgtagagttawcctcccacatacaatgtgaaggacatgcttgtgccgactgcagtctggagcgggggtcacgactggcttgcagatgtctacgacgtcaatatcttactga

SEQ ID NO: 29380 - DNA, 201 bp, Homo sapiens
cctcccacccatcagacacggaaattccagtacctgctgggagttctggtggccatccttatccctagtctcttgtcattgttcaaggattagggaaaatwcctctcaacctgctagatttcagcagcaataaacgggattgtttatagggtcagtgagcccaggatactaagggacagacatcagtcaaaagcattttcc

SEQ ID NO: 29381 - DNA, 201 bp, Homo sapiens
atggccaaattaggacgattaccagatcatctcattaaggtacttggacccctcccatccctctcctctccccgcagatttcctcctgagatctgaagaamtggcaaggggagggataatctgtgccttcctcccctgcgttttgatatcagtggagcagtgggcttttctttttccgtttacccctccttccagacccag

SEQ ID NO: 29382 - DNA, 201 bp, Homo sapiens
tgttcaaggattagggaaaattcctctcaacctgctagatttcagcagcaataaacgggattgtttatagggtcagtgagcccaggatactaagggacagrcatcagtcaaaagcattttccaaaaaaatcctttatattttaatcaaatcactataaagacatgatgtgtcctagtttctcagatgttcaacccaacagt

SEQ ID NO: 29383 - DNA, 201 bp, Homo sapiens
gtctcaggcctccgcgagagggcgtcgcgagtgacggcctttgtgttttctgagaaggaaatcccagatgatggaattcctgttttctgtcctttgttctyacaggttttatagcattttcacagatccctgagctggctaaaaggattaaaatgttttttgccctgggtcctgtggcttccgtcgccttctgtactagcc

SEQ ID NO: 29384 - DNA, 201 bp, Homo sapiens
acagctcaggaatatctcaatgaatacccacacatgttatctgtctttacattggctaaaacctttgactagattatgagtactgtcctgtcagttgtgaytcttctttccctagcaggctcctcacagctccccaattcacaatatttttctcagcacaacactttccagggtgtcaaaatgttcttaaccatcagctct

SEQ ID NO: 29385 - DNA, 201 bp, Homo sapiens
ttacaaaaaacaaagagaaaaatagaaaggaattccttatgcttccctcccctccaccaaaagaggaattctgatgttaactgtttagtcttcatttctawgacagggcacaaggttgtagctagtgtttataacttctttcttttacctatcttcagagtgaccagacaacctacagaatgggagaaactttttgcaatc

SEQ ID NO: 29386 - DNA, 201 bp, Homo sapiens
tattctaagcacttaacacatattatcttatccaaaatttgagatgtccctagacaatattaattctattttacagaagagaactctaactcaagaagaasttaaaaatcttacactagtttgcacagccagcaaattgtagattttgccttgaatgtgggcagcctgacccctgagtctgcactcctaactacaatcctg

SEQ ID NO: 29387 - DNA, 201 bp, Homo sapiens
taactaaacagcaccgtagcatcactggaatatctgcgtcagctgttaaatgacagcaacaacaaacaacagcaggctttcagtctccacctacgatgctrtgttttgattaaaaagttactgtacaaggtattttttatgtgagaatctgaggatagaaaacatatatcatatgtagaaaacatacatcacagctgaagg

SEQ ID NO: 29388 - DNA, 201 bp, Homo sapiens
gatggcagcaggaagcagataggcccctgggcagaaaggggcagtcccagtgaagcaccaccttgaagccagggagggcctgaagcctgggggccaacctrtcagttccaggtggtgtccacagcccagagtgagaacttatggtgctttttctgggcccacccatggccgcccatggaccaatcagcatacacttcctcc

SEQ ID NO: 29389 - DNA, 201 bp, Homo sapiens
aggtgatagaaggattatagggtgggggagcggaggctaagggagaattggaactggctcggcctggctaggagcagcctggggaggaggggagaggtcakatgggtccgtagaaaaggaagattggaaagacttagtgacacttggggttggaactgaggggacaggcaggagggaaagaaggaagatttgggatgagtt

SEQ ID NO: 29390 - DNA, 201 bp, Homo sapiens
atggctgtttccctgcagttctgaaaagctggggtcccggttgattttgtttttagcttactgattccaagcaaatgctgaagaggtttccacccagggtrctgttaggtctgtgcttttatgaaaggggaaaggaaagtgaaactgatggaaccctatcaagatccctcttgaggggaaactgaaacagaatctgtgaga

SEQ ID NO: 29391 - DNA, 201 bp, Homo sapiens
cctgtgtcctttggctgcctaactctatacatcacaaagagctacagaaataaaaatgcatgaattggtaaggcagatttatgcttgaattagataaatgyatatttcatctctaagcaaacactgaaatagcataagtcaggaagttgtacataagaaattctgtttcctatcagagaagcagggactatttacctcatg

SEQ ID NO: 29392 - DNA, 201 bp, Homo sapiens
tacctgaaagcatctgagcatgggctctctaggatctctcaatatgccccgtcccttcccagctcccagctcccatttccctgtgtcctttggctgcctawctctatacatcacaaagagctacagaaataaaaatgcatgaattggtaaggcagatttatgcttgaattagataaatgcatatttcatctctaagcaaac

SEQ ID NO: 29393 - DNA, 201 bp, Homo sapiens
gccgaggtgggtggatcgcttgagtccaggagtttgagaccagcctgggaacatggtgaaacactgtctctacaaaaaacacaaaaattagctgggtgtgktggtgcacgcctgaaatcccaactactcaggaggttgagatggaaggatcacttgagcccagaaggtggaggttgctgtgagcagagatcacgccactgc

SEQ ID NO: 29394 - DNA, 201 bp, Homo sapiens
tttgatggtggtctctgatattgacttcttcaggattaagccctccatgacagggatgtattctaaactgtgtggacaggaggaagatgcatttgtttacratggacagaagtaagaaaagtaagaaatgtcatagaactatgtctgggggtcaggtgacaagcactgtgtcatttctagccctgtgtcccctgcaggtgc

SEQ ID NO: 29395 - DNA, 201 bp, Homo sapiens
gagatcttggctctctgcaacctctgcctaccgggttcaagcagttctcgtgcctcaccctcccaagtagctggctacttggcccagctaccaggcccagmtgatttttgtatttttagtagagatggggtattgccatgttggccagtctggtcatgaacttctggccttaagggatctgcccgccttgggaagcactcc

SEQ ID NO: 29396 - DNA, 201 bp, Homo sapiens
gtatcacattggaccacatgatgtattgtgaaatggagaagtgataagttttggcaggtaaaaatctttgcagttctggagaattacatatccctaaaatrggacaatgaaggtggatttctggccctgactggtggaagcaaactgcttcagctgatctttaccaacacaaatagacaatataacatttgtcaaatatat

SEQ ID NO: 29397 - DNA, 201 bp, Homo sapiens
tgtcagtgattagtctaaattgttatcacaagcccagtctgaccaatgaatgtgagtgaggggccattttgattgtcagctcctgattctgcagaaaacaygaaactgagctgtacaaagatgctgatgaggggctgcagcatgcaattcacttcaccagcagtcactaaggtctgatctcttttctaaccatacctggaa

SEQ ID NO: 29398 - DNA, 201 bp, Homo sapiens
cttttctttttccgtttacccctccttccagacccaggggtggccggggacgcctgtcgtttcctgcacactggtgccacgtgtactcatggttagcatgygtcagtacagctctgcccacctcacagggagagcaaggagagtctgggagaaaataatttaagcatttgtggagttgccctttatcccatgaggtgagcc

SEQ ID NO: 29399 - DNA, 201 bp, Homo sapiens
caatcacctcctcactcctttcctagagatgcttggtgggaaaggcatccttttctcttagttctccctaacatgctatcccctgaagaactccaggaggwcaatatataaatttaaaaatcaagtttactgagattatgctttatatacaataagatgcacccattttcagtgtatagtctgatgagttttggtaaatgt

SEQ ID NO: 29400 - DNA, 201 bp, Homo sapiens
atcattggcctcatcagctttcttcagatgagccacagcgtgtcctattagttccagtaactttcttttcccatacattccattctctcttagattcattrcttggaagacttttgccctatagcagcacccaatttggcaatgcaggtaggcattgtttggtatgtattctaaagcctttttaagcagttcaatcgcttt

SEQ ID NO: 29401 - DNA, 201 bp, Homo sapiens
atcgagagaaggtggggagctgagtcctggtcccatgtgctggccaacatctccccttccagcctctgtcctggcctggctgccacatatcaccctccttytcctctctcaattatccttgccccagggccctctttggtttcaaaccattcctgcctttctctggacactctcccctgaggagtagactaggcagtccca

SEQ ID NO: 29402 - DNA, 201 bp, Homo sapiens
ggttttgtgttagtaaccaagttcagatttaacttaaaaacattgaaatgggattatttttagacgaaagcactaactgtgttgaggtttgcaaggcaaaraaaaataattttcttttaaagaagtaaggacaagagtcatctaattttttgttcaaaggccagattcatttgaggatatgctaaaatctctgaggctttg

SEQ ID NO: 29403 - DNA, 201 bp, Homo sapiens
catacatgcagacaacaatcaagtgaaaaaagctcaacattactgttcattagagaaatgcaaattaaaaccacaatgaaatatcatctcacgccagtcayaatggctgttaataaaacgtccaaaaataatagatgctggcgaggttgtagagagaaaggaacacttttacactgttggtgggagtgtaaattagttcag

SEQ ID NO: 29404 - DNA, 201 bp, Homo sapiens
gataggagctacccactccaggtctgctctccactgagctgcacactcattgggacaatctgcttgaagataggagctacccactgggggtctcctctccwctgagggctgatcacttgttgggacaacctgcctgtggaaaggagctacccactttgggtctcctgagagctgtactgttgctcaataaaggacttcttc

SEQ ID NO: 29405 - DNA, 201 bp, Homo sapiens
gtgggacaagaactcaggaccccctgaatggtgggactgaaagagctgtaacacaaatagggctgaaacatgcccctaccaccccccctgcttgccatgtygccagcaatgagaaggagagaagggcagcagagaagagcagaggcccttccaggagcccaaacctagaggctccccaagccagggctgtgccaccctctt

SEQ ID NO: 29406 - DNA, 201 bp, Homo sapiens
agctgcccaccccaccagagcagctggcttgctgactctccacagtggctggaccccacactcacttgcttatgcacctctcaccactctacacctggctkgaccttggaggcgtgggatctggttggttagcatgagccaagcacagcctgccaggccaagtgggcaaaacaagcccagcaggcctgagtaaagctcagg

SEQ ID NO: 29407 - DNA, 201 bp, Homo sapiens
gctggacttcatcttaagcaggcctgaagtaaaagagggagagaaacttttaattgaaaagcgagattggaattggattggttacggcaaaaaaatcaacygggctgttcagggatagggaggggagctcaggaatagcacattgcagggcagcaatagagagacagaatttcttaatgaatctgagcaagttcagcccat

SEQ ID NO: 29408 - DNA, 201 bp, Homo sapiens
aggcgaaactaatttctggtgtgaaaaatgaggacaatagttacttttgggagacacaactggaagagagcccaagggggcttctgcagtcctgctggtgktgtttcctggactcactgctggttttcccagctgtgtttagtttgtgataactcatcaaactgcatactcagtatgtgtgtgctctattttatgtactat

SEQ ID NO: 29409 - DNA, 201 bp, Homo sapiens
tagtaactattagtatttttttaaataggcttatcgaagtatgacagatgaagattaaactgcacatatttaaattgtacattttgatgagttttcacatrtgtatatacctgtgaaaccatcactacagtgaagataacaaatatatttattccctccaagtttccccatgcctctctgtcatccagcctcctctcctcc

SEQ ID NO: 29410 - DNA, 201 bp, Homo sapiens
tattccattgtatgaacatatcaaattttatttattcatgtcttcatcagttgatgaacatatggttgtttccactttttggctatattgagtgatgctcytatgaacattcatgtacaagtttttatgtaaacatcagttcttatttctactgggtatatacttgaaagtgcagttgatgggtcatatgataactctatg

SEQ ID NO: 29411 - DNA, 201 bp, Homo sapiens
atattttaattagattatatctgtataaacacactggggccaatttccagatctctagaagggtttcaggaatttctaggttcagggcagaatttactatrtatttttacattttactcagaaataacacaaactatgactcattatgtttccaaaacaagtgagacataaaccaaggctctggggtctatttgtatcgtt

SEQ ID NO: 29412 - DNA, 201 bp, Homo sapiens
acttgttattacctgtattttttattatagctatcctagtgggtatgaagtggtatctcatcatggttataaaacgtcttttttttagaaaaaaaagttaytttactttgaaggggtccaatttgttgatattttttcttttataggttgtgctttttgtgttgtatttaaacaatctttgacaaaactcaaatttcttaa

SEQ ID NO: 29413 - DNA, 201 bp, Homo sapiens
atactaagtatgtagtgttgtgttggaaggaaaacttaactgggtgagattttcagctgagtagctttagctgttactctcatggaccttcctctgggcgrttgatacaggttctgtaggaaaaccgctgaatgaaagcagctcctgcagatgctattctgttttcaattgtggtaattcctttaattttttccctttcaa

SEQ ID NO: 29414 - DNA, 201 bp, Homo sapiens
tttaggggaaggaagaggaaactggaaagtgaaactaatttaaaatcgttgggaggaggaaaatgaaacctaacggcttgagacctgcaatggctgagccrgagtacgttattcaaaactgtgactaaaatttgtttgagagaatgtggaagcattcctaatgtaaaccaaaaaattaaattctaaggccatactcaccaa

SEQ ID NO: 29415 - DNA, 201 bp, Homo sapiens
ggcccaataggcttgcagttcatttaagaaagttcactgagggagtcttggaggcggtgaagggcaattaggaggaagagaagtgaaagtcaaagccaaaytggccctgataccctatatctattttgtatgtgaagagaagttctaggaagaaagaggtaaggaattcatgaagacttgatggaatctctagttgcctct

SEQ ID NO: 29416 - DNA, 201 bp, Homo sapiens
ctgaatgaaagcagctcctgcagatgctattctgttttcaattgtggtaattcctttaattttttccctttcaatttactccttattctctagtaataatrgacttttgggaggttgcatttatgataaaaaatagcctggggctgtacaatccttcctatcatgaagaagtacaaagttgtaagtagaagcagtggcctt

SEQ ID NO: 29417 - DNA, 201 bp, Homo sapiens
catcacatgctttccttacaatatattcctagaaggagccttactatatgaaaggtatgaatgttttgaagggtctcaaaacatgtggttatattgccagraaaaaaatggagttaggcatttttctttatttatatttcttctttcatgacttgcctgcttgggacctttgccccactgcttcctaaagtgacattctgg

SEQ ID NO: 29418 - DNA, 201 bp, Homo sapiens
aattgcccataattctagtcagcaagagtttttgtaattagggactaggaacctgtcctataatttatttaattctcccttttaatgtttactatgactarcaccttagtgttcccatcacatgctttccttacaatatattcctagaaggagccttactatatgaaaggtatgaatgttttgaagggtctcaaaacatgt

SEQ ID NO: 29419 - DNA, 201 bp, Homo sapiens
ctgcttatgaattaatccttgaagataccaataatttggtgcattttgtggaagcagattttcagatacattctgtggttggtctttgatctcttccttgycagttgattttttgcttatggacaaaccctctaaaccatgttgcacagcagtgtcttcagacttcccattatatttctgaaggttgcagtagcgctgatg

SEQ ID NO: 29420 - DNA, 201 bp, Homo sapiens
tatatagtagaataagaatgaacaacttacaattatatgcagcaaaaaatggattaagccagatacaggagaatacacattgtataattctacttacagaratatttaaaaacaggcgaaactaatttctggtgtgaaaaatgaggacaatagttacttttgggagacacaactggaagagagcccaagggggcttctgca

SEQ ID NO: 29421 - DNA, 201 bp, Homo sapiens
catcccttagcaggcggcccagttccttctcataacatttggctgcttgcagcagatctccattctgcttatgaattaatccttgaagataccaataattyggtgcattttgtggaagcagattttcagatacattctgtggttggtctttgatctcttccttgtcagttgattttttgcttatggacaaaccctctaaac

SEQ ID NO: 29422 - DNA, 201 bp, Homo sapiens
tttttatttccaaaaatctcattagaaacaaatacacacacagattcttatttttcccttgcctccatttgaatgcaaaagatggcactattttgttcttygaattttttacttaatatcttggagatctttccatacaatacataaagcacatcttccagaagtgcatgatatttcactatatgactgtatcattattta

SEQ ID NO: 29423 - DNA, 201 bp, Homo sapiens
gacatcttacataagcctcctgtgtctcggtttccttatttgtaaaatggagcgtaataaacacctacctcataaggtcactgggggcttaaaggagaggrtgcagagaaggaacctccacagaacctggcaccttgtatgaactggctaggggttggctcttctcctgccagtggcaacatgcgcatgcatatacccata

SEQ ID NO: 29424 - DNA, 201 bp, Homo sapiens
tttctccataaatatgtaatccagatgttcacttttcttctttccagaaattatcctttcctccctcttccttctggctccaccagttaattgctgtatgmcattggacatcttacataagcctcctgtgtctcggtttccttatttgtaaaatggagcgtaataaacacctacctcataaggtcactgggggcttaaagg

SEQ ID NO: 29425 - DNA, 201 bp, Homo sapiens
attcagctttactatgtattaactacttcgtcattctcactttagaaaaggacacctatacttcagagagagttgagcaaatcctacaaagttttgtagcyagtaagaactgaggtctgcttcatgctaacgccctggtgtctgaccacctccttgttctctgttttggttctgccctggccctcagctgatttctcacat

SEQ ID NO: 29426 - DNA, 201 bp, Homo sapiens
cttagtaagaattgcttggcttagtatgttgagaaaaacatactaagtatgtagtgttgtgttggaaggaaaacttaactgggtgagattttcagctgagkagctttagctgttactctcatggaccttcctctgggcggttgatacaggttctgtaggaaaaccgctgaatgaaagcagctcctgcagatgctattctgt

SEQ ID NO: 29427 - DNA, 201 bp, Homo sapiens
aagcaaataataatagactgttttattatacagaatgaaaatgcggttcttggggttggtggtctgtttggttctctggaccctgcattctgaggggtctrgagggaaactgacagctgtggatcctgaaacaaacatgaatgtggtaagtttctcaaagttatgtacttttaaaatgcatctatttccccgatccagtta

SEQ ID NO: 29428 - DNA, 201 bp, Homo sapiens
ggaagaaagaaggggaggtccagctatttctagctcctctctttcttggccatgagtagtgtctctgacagagactgttgctcaacttctggtctatggtrtgacacttccttcatccaataatgccccagctctttccactgttgctaataatttctgtggtgccacccaaaccctgtttgtcttctcagcaatgtcatt

SEQ ID NO: 29429 - DNA, 201 bp, Homo sapiens
tttcacaagtgccttggaaattcagtgcaggagttcctgtaccacattttgagaagtgctgtcatagaggtattttaaaaagcagttttcccctttatttrtggagctaatgtggtgaattaagcagcattatcaggcatcttgagtgaagggaagaaaaccacaggacacctggatttcagtgacctctttgcttagttc

SEQ ID NO: 29430 - DNA, 201 bp, Homo sapiens
tctactcctgggactgctgccctcaactttttgttgaataaactcttttaactggatcctgagccttctgattattgtatattgacagtactgactatgcrgtcctactcccagagattctggtgcagtgaatctgatgtgagcttagaaacctgtgttttcacaagtgccttggaaattcagtgcaggagttcctgtacc

SEQ ID NO: 29431 - DNA, 201 bp, Homo sapiens
aagaatggaacagacacggaagagattatcattggcctcatcagctttcttcagatgagccacagcgtgtcctattagttccagtaactttcttttcccayacattccattctctcttagattcattacttggaagacttttgccctatagcagcacccaatttggcaatgcaggtaggcattgtttggtatgtattctaa

SEQ ID NO: 29432 - DNA, 201 bp, Homo sapiens
cctgaccaacatggcaaaaccccattgctactaaaatacaaaaaaattaaccaggcatagtggcgtgctcctatagtcccagctacttgggaggctgggtrggagaatcccttgagcccaggagtctgaggctgcagtgagccatgatcgggccactgcactccagcctgggtgacagagtgagactctgtctcaaaaaca

SEQ ID NO: 29433 - DNA, 201 bp, Homo sapiens
tatgtacagaaaaactgtcagggtgaacttaaaatatgcaaggaggcagctttaagtgaaacttaattcaacactaatattgattgagaatttttgctcakggctttataggacttacctaatttactccattttacactcatgtgaaatatggccatttaacagatgagtaagagaagattcagagaacttaagtgatat

SEQ ID NO: 29434 - DNA, 201 bp, Homo sapiens
cttcttcacgcatcttatgaagcttcagagccaggaggactttaaggtactggttgtcaggattcagccgaatggcttgcctcagagggtcaatggcgttmtgagatggtggccagttgtccagacggtagcttgctattgccagtccagaggtgaattctgggttctttggcttcttttccagagccttctcaaagcaca

SEQ ID NO: 29435 - DNA, 201 bp, Homo sapiens
aagaataaaaacagatctgtttggacatgagcttttcaacgggaatgcatctgccattaggatgcctgataccaagccaagcactctccggggctcccgcrcctggggttagttacatcaagggacttagacaacctggctctttgctaagacctatttggagctttgaatggaaggcgggtccttcctataaactcctgc

SEQ ID NO: 29436 - DNA, 201 bp, Homo sapiens
gcaaaccacttagaataacactttgcagccactaaatattaaataactggcatatgttattattattagatggatcctaccctcaaatgccttacagtttsgtagacagaaaaataagtctcttccaacgatactgttaaactaatcagaaacttggttaaggtcatttgatcatctaaggctctacaacagtacagtttt

SEQ ID NO: 29437 - DNA, 201 bp, Homo sapiens
gttaaactaatcagaaacttggttaaggtcatttgatcatctaaggctctacaacagtacagttttacagctcttattttaaaatgttcccctctaatccrtaaagatatctcaagatagggcaatgccattacttggtgtattatagttaaccaatactgtatgtggaacataatgtggtgtgatacttttgaatttgtg

SEQ ID NO: 29438 - DNA, 201 bp, Homo sapiens
tcaactgtgctgtaaaagtagtgtaaaagcagtcatagacaatacaaattccaataaaactttatttacaaaaacaggtggcagactggtttcagcccacragctgtagtgtgttaacctttgctctctggccctatgaattcttcatgttcacagagcatcttgaagaaatgaggcccaataaaatacctggttttattt

SEQ ID NO: 29439 - DNA, 201 bp, Homo sapiens
gagcctgggctaggtcagtgcagaagggaaatgtgggattggaggcctcacacagagtccccaatggggcactgcctagtgcagctgtgagaagagagccrctgtcctccagaccccagaatggtagatccaccgatagcttgcactgtgcacctgggaaagctacagacactcaacaccagcctgtgaaaggagccagga

SEQ ID NO: 29440 - DNA, 201 bp, Homo sapiens
aaatattttaattagattatatctgtataaacacactggggccaatttccagatctctagaagggtttcaggaatttctaggttcagggcagaatttactrtatatttttacattttactcagaaataacacaaactatgactcattatgtttccaaaacaagtgagacataaaccaaggctctggggtctatttgtatcg

SEQ ID NO: 29441 - DNA, 201 bp, Homo sapiens
tccttggcctcccaaagtgctgggattttaggcttgagccaccacgcccagccaggtttgagtttttaaatgtagtgcttgatgacaaattagtaagtttmatttaaaaatgagaaaggaaaatgtgtgctcagtggttttatatcacagtgcctttgctctgtaatatctgtgaatcaaaagcagaacataaataggctc

SEQ ID NO: 29442 - DNA, 201 bp, Homo sapiens
gaacctccagtaacttccctccaggccccagctttcactggcccgattttacctgaaagcatctgagcatgggctctctaggatctctcaatatgccccgwcccttcccagctcccagctcccatttccctgtgtcctttggctgcctaactctatacatcacaaagagctacagaaataaaaatgcatgaattggtaagg

SEQ ID NO: 29443 - DNA, 201 bp, Homo sapiens
ggtacatcgcaattgccagtccagaggagaattctgggttgttgggcttttcttccagagccttctcaaaacacaccttcgccctttcatttcttccacayttcagttgtgtccacccttcctcacagtcaagttcagaatactcaatactgtatggatttgaaaatttcttgcaggtttgtttcaccttatctacataaa

SEQ ID NO: 29444 - DNA, 201 bp, Homo sapiens
agcaggaggatgggggaggttatttctgctctcagcaaaagtcttagaaccagggtctcctcgtttgtaaggaagcaagtaggtccctggacctgggctgsgatatgatttgtgatcagccaggcaagagttaagagtggaagtctgtgctctctgcccatcttataatatcttaagggtgatcatctgtggtattcttga

SEQ ID NO: 29445 - DNA, 201 bp, Homo sapiens
gtctgttggctgcataaatgtcttcttttgagaagtgtccattcatagcctttgcccactttttgatggggttgtttgatttttttcttgtaaatttgttkaagttttttgtagattctggatattagtcctttgtcagatgggtagattgtaaaaattttctcccactctgtaggttgcctgtccactctgatggtagtt

SEQ ID NO: 29446 - DNA, 201 bp, Homo sapiens
ttgagctgtggtgggctccacccagtttgagcttcctagccactttgtttacctactcaagcctcagcaatggtgggcgcccctcccccagcctcactgcygccttgcagttccatctcagactgctgtgccagcagtgagcaaggctccctgggcatgggaccctctgagccaggagcaggatataatctcctggtgttc

SEQ ID NO: 29447 - DNA, 201 bp, Homo sapiens
ccctagcaggtctggatctttgagtttggaaatggtccaaggtgcatatactatgtctgtgaataccagagggcaactctttatgggttcctggtgtaggktctatattctaaattctgagagatgaactcctttagggccacagtctttctgccacttatgaacctacaagcaagtttccaggtgttaaatcagctaggg

SEQ ID NO: 29448 - DNA, 201 bp, Homo sapiens
acccaccaccatacccacctaatttttgtatttttagtagagatggggtttcaccatgttggccaggatggtctcgatctctaaacctcgtgatccacccrccttggcctcccaaagtgttgggattagaggcgtaagccactgcgctcgggcataaattcacattattcttaaacttgtacacatgcagatttgaactta

SEQ ID NO: 29449 - DNA, 201 bp, Homo sapiens
caacatacaacccctgaccttacagtgctgaatgactagtggggagtcagataagaaacaagaaagcaaacaggtaaatataaattagcaaacatggtacytgctgtgagggaagatggaagagtgcaatggtggggaatcagtgtggggtaggagaagagcttaggtggtgtgggaagatctgtctgagaaggtgacatt

SEQ ID NO: 29450 - DNA, 201 bp, Homo sapiens
agaacggtacgggggaaactgcactcatgattcaattatctcctacaaggtccctcccacagcatgtgggaattatgggagctacaatgcaagatgagatwtgggggggtacacagaaaaaccatatcaattatgttaaaagtaattataggcccaggtgcagtggctcacacctgcaatcctagcattttgggaggctga

SEQ ID NO: 29451 - DNA, 201 bp, Homo sapiens
ccagggcactccctcaaagccatacgactgaagttcctctcgaaagtgacagtcattctttcttattgaatttagaagggctttgtaaacagtcaggtgasgattgtaatgtgttaatattacaaacgtcaccccgtaaaattatgttggctcaacaggttatttggaaagcaaatttaaatatgtctaaagctggcctga

SEQ ID NO: 29452 - DNA, 201 bp, Homo sapiens
taatttacctttggaatgtaatataggtgttcttcacaaaatgattttttgaacctgtagaaatataagtaatactaaccataattatgttttttaaaaawaattaaacaggatggatcatttcttattcggaaaagctctggccatgattccaaacaaccatatacactagttgtattctttaataagcgagtatataat

SEQ ID NO: 29453 - DNA, 201 bp, Homo sapiens
tctcagctcactgcaacctctgcctgcctcccaagttcaagtgattctcatgcctcagcctcccaagcagctgggattacatgtgtgtgcccccaagcccrgctaatttttgtatttttagtagagacggggttttaccatgttggccaggctgctctcgaactcctgacctcagttgatctgcctggcggccttggcctc

SEQ ID NO: 29454 - DNA, 201 bp, Homo sapiens
actgacatatctgatttcagggtggacctccctcctgattgtcccctcacactcacctgtctgcctgctgatccacccacccaggccctctcctttccctytatttctgcgtggggaaaagggaggtagcatccatctattattcatccttttgcctaacccacacacttgggatcaaccttgatgcctccttttccctca

SEQ ID NO: 29455 - DNA, 201 bp, Homo sapiens
cctcctgaacctggggagtctttaggatcttggaaactgtagtgtgtggaggccagagcccaccagacctcctgagcctgggaggccaatcacgtgccctrtggagcacttgatccaccaaaggctcctgaaatgctccagccattttccccccacacattggatttatgtcctctttccagttctggaaacaaatggctt

SEQ ID NO: 29456 - DNA, 201 bp, Homo sapiens
ctgggatcactgcagatgccccattggttaccccacaagtccttgaggagtcagaactgaacagagcccctctcttgcactcttgggctctgatgtccagsgctctgatggggtggcatccctgggaggtccacgtgtgactcctctggctctgctatcatgcagggaggagatcagagcaaatatagggtggaggggtgg

SEQ ID NO: 29457 - DNA, 201 bp, Homo sapiens
cagtggagatgtagtttttttatccatccatccacccacctatttattggtcacttattaaacatcttccatgtgccaggcacacacagatctgaggcagraatacagtgctaaaagttaaagatagactatacatttgaggaatttatagtccagaagggaaaatagattattgtattagtctgttttcacactgctgat

SEQ ID NO: 29458 - DNA, 201 bp, Homo sapiens
acagagcccctctcttgcactcttgggctctgatgtccagggctctgatggggtggcatccctgggaggtccacgtgtgactcctctggctctgctatcaygcagggaggagatcagagcaaatatagggtggaggggtggcaaactcacttacatggaaaaaataaaaatccagagcaaagaaggcacttggacagggat

SEQ ID NO: 29459 - DNA, 201 bp, Homo sapiens
agcttcaagacccacctgaattcccaagccacccattaccacaaaagaacaaatacacattccctccttaccaacccctctttaaaaaaacaaaaaagaamagaaaaaaacccatgaaatcccagagcaatggtgtgtattgcatctggtaggggaggtggagctattaattgggcccctccagtaaggggttcaatacac

SEQ ID NO: 29460 - DNA, 201 bp, Homo sapiens
gggctcaagtgatcctcctgcttcagcctcctgagtagctgggaccacaggcatgtgccaccatgcctggctaattttctaaaatcttttttgtagagacwatgtctcactatgttgtccagggtgttctcaaattcccggcctccagtgatcctcctgccctggcctcccaaagtgctgggattacaggtgtgagcccac

SEQ ID NO: 29461 - DNA, 201 bp, Homo sapiens
atgttgtccagggtgttctcaaattcccggcctccagtgatcctcctgccctggcctcccaaagtgctgggattacaggtgtgagcccaccatgcctggcytaagatgttaagtatttagactcagaacacctctctcagccagcctgaatctgggtcttgtcctcagttccccacattaaatcatgtccctttctcctct

SEQ ID NO: 29462 - DNA, 201 bp, Homo sapiens
ctttctgttccttttcggtgtctgtccccaccaccacaactggcccaccctccctctttccttccttctgtgtcctgctgcggtcttcccactggctcccygcatgccaccacctgctctgttgggggagagatgggcagggtctggcggccgggtagcctccagagcaggatcagggctgcagctgaggcagaatgtcag

SEQ ID NO: 29463 - DNA, 201 bp, Homo sapiens
aggtgtggggacatttctcagaaaactacatggccctgagttgtcctcagtctcatgtggtcattcttctggcccttagtctttatttgtattatgaagtrtggcttggtgagaagaccttggactctgaggtcctttaggcctgggatggaatcctggctttgctccctaagcactgtgtgaacttggaacagttttgta

SEQ ID NO: 29464 - DNA, 201 bp, Homo sapiens
cagtctcatgtggtcattcttctggcccttagtctttatttgtattatgaagtgtggcttggtgagaagaccttggactctgaggtcctttaggcctgggwtggaatcctggctttgctccctaagcactgtgtgaacttggaacagttttgtaatttgagtgagcctccaatttctgacctggggataagaatacctatc

SEQ ID NO: 29465 - DNA, 201 bp, Homo sapiens
ccagtgcccatcactgcctgacccctgcccaggagccctaaacgaaccaacaactaaagaataagtgtctggcacatcagggggcctccaggaccaaggtmtagaaagtttcagtcacttgcagttccacaattcagacccaggccctcagatctcaggaccaggctctttgccaccaaggtgcttgctgtgatcaagaga

SEQ ID NO: 29466 - DNA, 201 bp, Homo sapiens
tgaagcttgaacttctcccccaaattttactcactacaatagaggctttcttggatccatgcctttgtggtagccatagtgtgtgattgacgtgggagtamattagaatcagtggtgttttgagtgttaattgaggcattctttgcaatgctcaagatgacggtaacattactaaagcattactgtgtgccaggctttgct

SEQ ID NO: 29467 - DNA, 201 bp, Homo sapiens
cggggcaggagggagctgggaccctctgtggtgctgtcatggagccactctgccacatgggcctgtgtctgcttgattcctacacagcagagtgaatcccrtttaacctctaaggtcagtttatgtgataggctagatgctaagtttctcatactctaaatgtgttttggagggaaaggggtcaaatattcgcctgggctg

SEQ ID NO: 29468 - DNA, 201 bp, Homo sapiens
gaaataatagatattgagagcctatgagaaaaagaaaaccagaatttctatgtaaatatacatattgttatttttgcaaattacaattttggtttgtaaaytgtttttgtgtgcattttttaatcaaacacaaatttctatgctttttttttcaaaacatgaaagtttgtatataatagcagttatactgcttctatagaa

SEQ ID NO: 29469 - DNA, 201 bp, Homo sapiens
gctaccctgaacggaggaagcacgcttgaacacgctggttccctaacacaagactgtgacagagttttcactggtctatggccgcatgagaaaataaggascatgaagtgttgggggttgtgcacagcagccagctacagagcaaagttcaactacgccttttattcctagtgttgagtggccaacagtcctttagtgagt

SEQ ID NO: 29470 - DNA, 201 bp, Homo sapiens
gacatggcagtgagaaggaagagggaaagagagggcagaaagacatggcaaagaaactaactaggcaccttcctctgaatgaacaggaggattccaaatgtttttttttttttgttttcagacatattccataatgtagaactatacagaaatgcattctctttcagggaatccaggtgggaatttaagtaaaggtgctag

SEQ ID NO: 29471 - DNA, 201 bp, Homo sapiens
aatcccagcactttgggaggctgaggcaggaggattgtttggagccagaagttcaagaccagccgggtcaacataatgagacacccatctctacaaaaatwaataaataaataaataaataaataaataaataaataaataagtctggtgtggtggcatgcgtctgcagtcccagctacttaggaggctgaaatgggagga

SEQ ID NO: 29472 - DNA, 201 bp, Homo sapiens
ccctgtgctttgttccaaaaagaaaagagccctccccacaagcccctcctcctccttatttcaccaccttttcctacctgtcctgccttcacctcccttcygaaagggagtccaccagaagctacacctgaagccttattttttaacctaatgttttcacaacccttttgcagcactgtggtctaggcctccaaacagacc

SEQ ID NO: 29473 - DNA, 201 bp, Homo sapiens
accaccttttcctacctgtcctgccttcacctcccttctgaaagggagtccaccagaagctacacctgaagccttattttttaacctaatgttttcacaacccttttgcagcactgtggtctaggcctccaaacagaccatttccctcagcccagcatggctatttcaatgcttatttcaaaagcaagacaaagaagccag

SEQ ID NO: 29474 - DNA, 201 bp, Homo sapiens
ttgcctcttaatgcgcatgcttgagcccacttgcccaactcctgagatcttatcggaaactgctcatcaccagtttcaggttttttctatctattgggagmctgcttttccctggcgctggctgtaaccaattattattttagagagacaattaacagccacctgacaatcacctgatggtctcctgacattcctggggca

SEQ ID NO: 29475 - DNA, 201 bp, Homo sapiens
ggaaccattgccttaaggattttttttggtggatgtgtccctggcagcacctagtacagtgttaggggataggcatagaaagagttcaagaaatatgaagrttaattgaaggacttttctgatccctttcaggatttacagaagggggaaacccaactgtggatgggcccctacccagcttttcatctaattccactattt

SEQ ID NO: 29476 - DNA, 201 bp, Homo sapiens
agttttacatttaacggtaaataaaaagcaatatactataatattttatcataactcagtgaagtaatctctctaagtagctatgctaattgaggctgtcrgtgtgtttttcttcgtacttaatacagcaaagtccaaggtctgccaccttgaaggttacagcctttgttaaactagatttttttgtgcagaatgtcagct

SEQ ID NO: 29477 - DNA, 201 bp, Homo sapiens
ttaattgaggcattctttgcaatgctcaagatgacggtaacattactaaagcattactgtgtgccaggctttgctaagagcttcagatgtattttattatytgattctcacaaaaatatgatacaggcactgttcttatccttgctttacaggtgaggaaatgaagctttaaacaatattaaattattggtccaagaccaa

SEQ ID NO: 29478 - DNA, 201 bp, Homo sapiens
gcattactgtgtgccaggctttgctaagagcttcagatgtattttattatctgattctcacaaaaatatgatacaggcactgttcttatccttgctttacrggtgaggaaatgaagctttaaacaatattaaattattggtccaagaccaagcagcttgtaaaggtcagagccaggatttgaacctagaaagcctggctct

SEQ ID NO: 29479 - DNA, 201 bp, Homo sapiens
gatttgaacctagaaagcctggctctaaactaccacctgtgcactttgggaagctccctgagatactggaaaactgactactgttttggacctaatacctyggactcccatgctttttagtcttggcaattgcctgcaagactgtaactttatgaatatgatgctgtgagttgcacttgggacctgaagtagatagtctag

SEQ ID NO: 29480 - DNA, 201 bp, Homo sapiens
gttctcaataacatgaagcctctgcataaaatgtctctctattccatagccagtcatatttacagcagctgtggagctcaagttttttataacagcctctrtttcatacattctgcccattggatgaccaaagcacttttacatgacaaaccatgtttcttctcagcctggaaattatggccaccatagtcattaccccgg

SEQ ID NO: 29481 - DNA, 201 bp, Homo sapiens
taactttatgaatatgatgctgtgagttgcacttgggacctgaagtagatagtctagctaggaatcgatggggcaccaacaaacaacctctatcccatacygtatgatgcttttctctcttttctgtctccatgtgccaagatgtctggattgggtcattctcgtttcaccaaagttttatctaagtgctcagcagagggc

SEQ ID NO: 29482 - DNA, 201 bp, Homo sapiens
caccaacaaacaacctctatcccatactgtatgatgcttttctctcttttctgtctccatgtgccaagatgtctggattgggtcattctcgtttcaccaargttttatctaagtgctcagcagagggctaagtggctcagatgagatttcagctgcaggagccaacacagcctggcttccaacccagctcccaaactcact

SEQ ID NO: 29483 - DNA, 201 bp, Homo sapiens
aggaacggcacgagcagagcagagaatcagcaaagtgcacaacgggaggaggaagctgtctggtgttactgttagtgagcgtgggagcctgccgcaagaartcggtggtgggacagaaggcggaggcattggaatgtgttgccacagaacctctacttgattccatagggagtcactgatgactcttaaggaaaggaacag

SEQ ID NO: 29484 - DNA, 201 bp, Homo sapiens
taggattcttcactgctgcctcattttgctcctcaacctggttaagcattaacttagcctaaagatactccattcagttacagtcagcttacaacgagctrccctctgccctccatatgaaattattgaatttccttgcaatcaatccacttcaacctctctctctctctctctttctctcttcctctctctctctctctc

SEQ ID NO: 29485 - DNA, 201 bp, Homo sapiens
gttactgttagtgagcgtgggagcctgccgcaagaaatcggtggtgggacagaaggcggaggcattggaatgtgttgccacagaacctctacttgattccrtagggagtcactgatgactcttaaggaaaggaacagcataatccaaactttattttaataaaataactacaaacggtaggatggatggattggagaagaa

SEQ ID NO: 29486 - DNA, 201 bp, Homo sapiens
ttctgagcatattccagaccccagagggccgctaccgcattccctcctgcctcccacgtgccttaccccctctccttcccatttcccctgccatctgtccyttcctctttttactctccctcttcctcccaaagtctgaaacaggcccttaagagctgacgctcccctctagcaaaatgtctaaccttggggaccaatagc

SEQ ID NO: 29487 - DNA, 201 bp, Homo sapiens
tagtgagcgtgggagcctgccgcaagaaatcggtggtgggacagaaggcggaggcattggaatgtgttgccacagaacctctacttgattccatagggagycactgatgactcttaaggaaaggaacagcataatccaaactttattttaataaaataactacaaacggtaggatggatggattggagaagaaagataatg

SEQ ID NO: 29488 - DNA, 201 bp, Homo sapiens
ctacttctgagcatattccagaccccagagggccgctaccgcattccctcctgcctcccacgtgccttaccccctctccttcccatttcccctgccatctrtcccttcctctttttactctccctcttcctcccaaagtctgaaacaggcccttaagagctgacgctcccctctagcaaaatgtctaaccttggggaccaa

SEQ ID NO: 29489 - DNA, 201 bp, Homo sapiens
ataatccaaactttattttaataaaataactacaaacggtaggatggatggattggagaagaaagataatggagacagggacactagttagatggctaatrcactactttcaccagtgactgatcataaaataggcccccactcactgagaaagggtggagcaaatgcagttatccaggcagggaagtgggtttcataaat

SEQ ID NO: 29490 - DNA, 201 bp, Homo sapiens
agctcagccgttcagacatgccaaagactaccacaaaatatttgcagatctcagtaggaaaaaaaagaaacaagcaaaaaaaaaaaaaaaaaaaaaaaaarggtagggtgtgaactgtttggagaaacttataaattactttatacggttaataagtggagagtaagaaacagccctggcagcaagatgcttgtgtgtaag

SEQ ID NO: 29491 - DNA, 201 bp, Homo sapiens
gattatggtggcgtccttccagctgctctgttcagccaccctacttctgagcatattccagaccccagagggccgctaccgcattccctcctgcctcccaygtgccttaccccctctccttcccatttcccctgccatctgtcccttcctctttttactctccctcttcctcccaaagtctgaaacaggcccttaagagct

SEQ ID NO: 29492 - DNA, 201 bp, Homo sapiens
ttccttctctgcgttcatctaagtgactaataatgttaagcatgacagaaccctgctgtgggtgtctgggtcttcctggtaggggtctcactgagaccttwtctaatggattctgagacatgccttctcttctcagggtttggagttttcaactggagtttttacttccttgatttttctggttcagttcttcagaaacaa

SEQ ID NO: 29493 - DNA, 201 bp, Homo sapiens
tattctgagatatgcaagaaaaggaagcatagtagaaaagccaggaggaaggtctgacaaagataatatagtggccaaaggagcccttaacatttcagaaragggaaaacccctgggatgaaattcagacttagaccttctttctacttccttatttttcatacaagattttgttccacttccctgagatcttccatcaaa

SEQ ID NO: 29494 - DNA, 201 bp, Homo sapiens
gcctaaagatactccattcagttacagtcagcttacaacgagctgccctctgccctccatatgaaattattgaatttccttgcaatcaatccacttcaacctctctctctctctctctttctctcttcctctctctctctctctctctccccctctctctctgtctgtctctcaatctctctccccactgccagacccctt

SEQ ID NO: 29495 - DNA, 201 bp, Homo sapiens
cctaaagatactccattcagttacagtcagcttacaacgagctgccctctgccctccatatgaaattattgaatttccttgcaatcaatccacttcaacctctctctctctctctctttctctcttcctctctctctctctctctctccccctctctctctgtctgtctctcaatctctctccccactgccagacccctta

SEQ ID NO: 29496 - DNA, 201 bp, Homo sapiens
ctaaagatactccattcagttacagtcagcttacaacgagctgccctctgccctccatatgaaattattgaatttccttgcaatcaatccacttcaacctctctctctctctctctttctctcttcctctctctctctctctctctccccctctctctctgtctgtctctcaatctctctccccactgccagaccccttat

SEQ ID NO: 29497 - DNA, 201 bp, Homo sapiens
taaagatactccattcagttacagtcagcttacaacgagctgccctctgccctccatatgaaattattgaatttccttgcaatcaatccacttcaacctctctctctctctctctttctctcttcctctctctctctctctctctccccctctctctctgtctgtctctcaatctctctccccactgccagaccccttatt

SEQ ID NO: 29498 - DNA, 201 bp, Homo sapiens
aaggagagagatctccccaaaatctgcagcctaagttcccaatttacgtttgagcaatctcccttttcccaattccctatcctgtaaatttcactccactccctaagggctagagggcctgccctcaatagagcagacccagcagagcaccagcatggctgcattgtttagctttaaattaacacttggtagaggacaccc

SEQ ID NO: 29499 - DNA, 201 bp, Homo sapiens
tcttcctctgaaaaaatggcacctatgcctaggggtatcatgagtagataccatgagaattaagtgactcaatatagatgacttgcactcataaaatgctagtgctttgttattattattgttattattcagaatcccttgttcaacctgccttgatccatgaccattctggcagatattatcagggaacaatattgtttc

SEQ ID NO: 29500 - DNA, 201 bp, Homo sapiens
cacacacacacacattcatacacacacactctcttctctcacagagctgaacacaagtcattgagaggctgagctctgcttccagagacaggctccttcayagaaaatgaaagaacagtcgagtattttaaaaatcttttcctggactcatttcttgtgaaattattcactttcttcacaagttctggttttacttaacct

SEQ ID NO: 29501 - DNA, 201 bp, Homo sapiens
gcactactttcaccagtgactgatcataaaataggcccccactcactgagaaagggtggagcaaatgcagttatccaggcagggaagtgggtttcataaakgcattttataagggtttctatttaaatggttgttacaaaaactcttgccatcttaagtgttgatcttcagtgatccccagacttaaggtattagaaacac

SEQ ID NO: 29502 - DNA, 201 bp, Homo sapiens
cctgctgaacgccaccgagggtcaagtcacagacaagaagctgtgcagtcaccagtgtttcctcctgcccagaagtaagaatcctttcctttaaagatcastttcctcttgttgctgcaggaattaacatgtgcattgtttcactgcacagtgacactgacttgcagtgctaggtaaaaatccaacatttcattgttttgc

SEQ ID NO: 29503 - DNA, 201 bp, Homo sapiens
cttcagtgatccccagacttaaggtattagaaacacattgaccagatgcagtggcttatgcctgtaatcccagcacttttgaaggcagaggcaggtgagtyatttgaacccaggagttcaagaccagcctgggcaacatggcaaaaccccatctctacaaaaaatacaaaagttagctgggcatggtggcacgtgccagtt

SEQ ID NO: 29504 - DNA, 201 bp, Homo sapiens
cttgttgctgcaggaattaacatgtgcattgtttcactgcacagtgacactgacttgcagtgctaggtaaaaatccaacatttcattgttttgcagttacrtgttaaaaggtgttgagcaactttaaaataactgtgtagagttgcagagacctactaattgggttaattattgaacttgactaaaatacaatactttagt

SEQ ID NO: 29505 - DNA, 201 bp, Homo sapiens
cctgggcaacatggcaaaaccccatctctacaaaaaatacaaaagttagctgggcatggtggcacgtgccagttactcaggaggctgaggtagcaggatcrcttgcaccaaggaggttgaggctgcagtaagccatgattgtgccactgcactcccacctgggcaacagagtgagactctgtctcaaaaaaaaaaaaaaga

SEQ ID NO: 29506 - DNA, 201 bp, Homo sapiens
ccagttactcaggaggctgaggtagcaggatcgcttgcaccaaggaggttgaggctgcagtaagccatgattgtgccactgcactcccacctgggcaacasagtgagactctgtctcaaaaaaaaaaaaaagactagaaaagaaaaagaaacatactcccccattgtgccaggtaatcatattgggaagaggatttattca

SEQ ID NO: 29507 - DNA, 201 bp, Homo sapiens
cctcttgttgctgcaggaattaacatgtgcattgtttcactgcacagtgacactgacttgcagtgctaggtaaaaatccaacatttcattgttttgcagtyacatgttaaaaggtgttgagcaactttaaaataactgtgtagagttgcagagacctactaattgggttaattattgaacttgactaaaatacaatacttt

SEQ ID NO: 29508 - DNA, 201 bp, Homo sapiens
tttaggaacatccactgggtcctctgtggcagtggctgctcagctgggaatagcaaaaacataaaaataaaactagaaaaggttctgttgaggttctgggraatttaggaacatccactggatcctctgtggcagtggctgctcagcggggcaggagggagctgggaccctctgtggtgctgtcatggagccactctgcca

SEQ ID NO: 29509 - DNA, 201 bp, Homo sapiens
aagggaaggcaggtgcgaaatgtgtgtggatgggctggggctggccagctgaggctcacacttgtgccttctgcttctcccctgctgttgcagagagcccygctgacgaagaggagcagtggtccgatgactttgtaagtatttgctcctgggaccaggagggcatcagggtcccatgggaggccttttgaagatcttatt

SEQ ID NO: 29510 - DNA, 201 bp, Homo sapiens
tcttgcactccactttgtcagaatatatagcatttacatactgttcttcctcacccttgttttagtcctagctctacaagtaaatatattagtgtgttccstcagtcctttggtggacttccaccattgtctctttcctttgatgaagtgtacctgtagtagattctgaggaaaaatcgtgtttacattattccctgagtt

SEQ ID NO: 29511 - DNA, 201 bp, Homo sapiens
attcatttgtaggagctaaaaattaaaacacttgaactcataaagacagacagtagaatgatgtttaccagaggctgggaagggtggtcgagggggcagcrggtggggggagggaaacagggacagttaatgggtgcaaaaatatagttaggatgaataagacctagtgtttgacaacagggtaactacagtcaacaataa

SEQ ID NO: 29512 - DNA, 201 bp, Homo sapiens
aaaaataactaaaagaatataattggaatgtttataacacacacaaaaaatgaatgcttgagtgatggataccccatttacccagatgttattactacacrttgtatgcctgtttcaaaatatctcatataccccatatatatatatacctactatgtacccctacaattctttttttttaaagaccaacaggaaaaaaaa

SEQ ID NO: 29513 - DNA, 201 bp, Homo sapiens
tcaggaggctgaggtgggaggatcactgaggtcaaggctgcagtgagatgtgatcatgctactgcaatccagccagggcaacagagtgagaccctgtctcaaaaaaaaaaaaagaaagaaaagaaaagtaattacaattcagtgataggggaagcacaaagttctgtggaattccacagcagcactaatgaatctaatctg

SEQ ID NO: 29514 - DNA, 201 bp, Homo sapiens
ctaaaagaatataattggaatgtttataacacacacaaaaaatgaatgcttgagtgatggataccccatttacccagatgttattactacacgttgtatgyctgtttcaaaatatctcatataccccatatatatatatacctactatgtacccctacaattctttttttttaaagaccaacaggaaaaaaaatcctgcta

SEQ ID NO: 29515 - DNA, 201 bp, Homo sapiens
ctgttatcccagcactttgggaggccaagatgggaggattgcttgaggccaggagtttaagaccagcttggtcaatatagcgagatcccatctcttaaaayataagaaaaaaatattaagaaaaataaaaatagagttgtcctgtgcaacttcaaaggagagaattaagaagttaggccatctgagtggtttcttctctgg

SEQ ID NO: 29516 - DNA, 201 bp, Homo sapiens
tcccagcactttgggaggccaagatgggaggattgcttgaggccaggagtttaagaccagcttggtcaatatagcgagatcccatctcttaaaatataagaaaaaaatattaagaaaaataaaaatagagttgtcctgtgcaacttcaaaggagagaattaagaagttaggccatctgagtggtttcttctctgggataaa

SEQ ID NO: 29517 - DNA, 201 bp, Homo sapiens
aacggcacgagcagagcagagaatcagcaaagtgcacaacgggaggaggaagctgtctggtgttactgttagtgagcgtgggagcctgccgcaagaaatcggtggtgggacagaaggcggaggcattggaatgtgttgccacagaacctctacttgattccatagggagtcactgatgactcttaaggaaaggaacagcat

SEQ ID NO: 29518 - DNA, 201 bp, Homo sapiens
ctcctgggctcaagcaaccctcctgccttggcctctcaaagtgctgggactacagtgctgggattacaggcataagccccaacgcccagcccctcacagcrtctttgagagggctaaaagacggcaaagctctgataatattgcctggcacatactaagacattggataatttttttttaacaagaaaagtcaaagttaga

SEQ ID NO: 29519 - DNA, 201 bp, Homo sapiens
taaatcccattttctctcctggttgtttccacaccttccttcaagtgtcatttcttaaatcttcatttgaagctctcgtcccttggacatcttataatttkttctttgttgagataggcttgtctttttcttcagtttgtttcctgagtttgatcaactcttgttgcatttcattctgctttttgtccatcttttgttcgt

SEQ ID NO: 29520 - DNA, 201 bp, Homo sapiens
ttaacaaagcccacacatggatcagacgcacattgctctgcccagtgggacttctctctatgctttgagaattaatattttttaaaaagtcaaaagcaagtgaacatatgattgtagtaactaacccaaggtcaagtatatggcaccagaaagcccaaagggaagggaaggcaggtgcgaaatgtgtgtggatgggctggg

SEQ ID NO: 29521 - DNA, 201 bp, Homo sapiens
gatttcaaaatgtcaagagtgatcttagttgtgtaaaatctgtacatcttatgcatgggtagtaaaaattggaaggctattcaatgggaatccttctagargattcctctattcaacctgcagcacagggaccaacaaccaggaggccccgggaagacaggaaacatcacagtaccaagcctgaggcctgcctgccacatc

SEQ ID NO: 29522 - DNA, 201 bp, Homo sapiens
ggacagttaatgggtgcaaaaatatagttaggatgaataagacctagtgtttgacaacagggtaactacagtcaacaataatttattgtgcatttaaaaayaactaaaagaatataattggaatgtttataacacacacaaaaaatgaatgcttgagtgatggataccccatttacccagatgttattactacacgttgta

SEQ ID NO: 29523 - DNA, 201 bp, Homo sapiens
aacacacacaaaaaatgaatgcttgagtgatggataccccatttacccagatgttattactacacgttgtatgcctgtttcaaaatatctcatataccccwtatatatatatacctactatgtacccctacaattctttttttttaaagaccaacaggaaaaaaaatcctgctatataaaattgcttatgaaaggcgacag

SEQ ID NO: 29524 - DNA, 201 bp, Homo sapiens
gcgctttgggaggccgaggctggcagatcacctgaggtcaggagtttgagaccagcctggccaacatggtgaaaccccagctttactaaaaatacaaaaaytagctgggcgtggtggtgcaatttgtaatcccagctactccagagactgagacaggagaataacttgaacccaggaagtagaggttgcagtgagctgaga

SEQ ID NO: 29525 - DNA, 201 bp, Homo sapiens
caggagaatcgctggaacccaggaggcagaggctgcagtgagctgagattgcgccactgcactccagtctgggcaacagagtgagactccatctcaaaaamaggaaaaaaaaaaaagaaaaaaaagagagcaaaccctgagtccatttgaagccttgaccctgcagcttaccaattctgcttgaaatttttaaaaaatctc

SEQ ID NO: 29526 - DNA, 201 bp, Homo sapiens
ggcagatagagagccaatataagaaagaggtgtaaaaacaaataaacaaacaaacagaagccaacattaagatatggctgaaccattagttgggaaaagargaagtcaagtacaagcataaataaaagtgtttaaccctgctctgcaggttataggcaaaatacagagatacaggctaaacagagagctggaggtggggca

SEQ ID NO: 29527 - DNA, 201 bp, Homo sapiens
ttctgctacagatagaatctcattctttatgagacagtccttgttacaatcactagcaattctaattgccagttttacagttcaccagttctcaataacaygaagcctctgcataaaatgtttctctattccatggcccccagttgccagttttacaatacaccagttctcaataacatgaagcctctgcataaaatgtct

SEQ ID NO: 29528 - DNA, 201 bp, Homo sapiens
agggtgtctcccattctttgcaaattctctggtctggtcatcatttttccctgagtgtgaattttcctcaatggcatgtatctgtaatggttttatgtatrtatatatatatatatacacacacatttctgtgtttaagctcccatggtgaatagatcaaccaagccaaattcctcaacgcccgcctctcctccaggaaca

SEQ ID NO: 29529 - DNA, 201 bp, Homo sapiens
atgtgaattgcgtctcaataatgctttttaaaaaaatcactccctcccatacagtcaactatgaatgtacagcattcttctcattcagttttgtatttctsttaggctgattatgtggtccccgtggaagataatgatgaaaactatattcatcccacagaaagcagttcacctccacctgaaaaaggtaagagtttgtcg

SEQ ID NO: 29530 - DNA, 201 bp, Homo sapiens
ataatgatgaaaactatattcatcccacagaaagcagttcacctccacctgaaaaaggtaagagtttgtcgccttaagcacctgaaaatttttagcagttratcaggatgtataagagtatttggtagtaagcactaagaggctcagaaatgacagtgcccaggactttctcccctgggccacagtgtgtgcttctttggc

SEQ ID NO: 29531 - DNA, 201 bp, Homo sapiens
atcttttaaaaatatgttttattatctcctcttgttatttgttgtggatctacagagtgtcagctcccattagcgttaagtagttcctgtgtcccccaagkacagtgcagtggtggagacgataaactttggaggcagaaaggcctgcttcaaaccccagctttgcctcttatcggctgcctagccttttgaagtcaacct

SEQ ID NO: 29532 - DNA, 201 bp, Homo sapiens
tgcataccagctgacttgactggcactcagtgtgcgcctggctaagagctttccacacataacctcatttaaacctttgaggtaggtgttcttatgcccarcttcagtgctggtgttcagagtactcaccagcacatccaaaacaggtgtaaaaatgtttaaatgtttccatatcagttagcaaatgcctctgccctaaac

SEQ ID NO: 29533 - DNA, 201 bp, Homo sapiens
actcagtagtgtgcctcttatcagtaacacactgcttataccacgtcttatgactaatcaagacccaccagggtgttgtctccacctgtgtggaggccacmtggcaagtagagggtgagttgtttagagggtggctaaaatgttctcatcttctggcttccacctatactcacacacttaaagtttcagggcccgtgggtt

SEQ ID NO: 29534 - DNA, 201 bp, Homo sapiens
cagctttgcctcttatcggctgcctagccttttgaagtcaacctctccaagccttgtctcctgtcactgctctggcctcccaaggcaggaatggtcctgayggccaggcagcacagacggggatgctgagcacagtgtctgcatctgcacttgcaggacagcgactatgaaaatccagatgagcactcggactcagagatg

SEQ ID NO: 29535 - DNA, 201 bp, Homo sapiens
ccctgcccttcgccagaggcgagtatataggtgaggtcccccgcagacctgggcactcggccttccaggcccatggggaggtgggggtgtccaagattgcrgggtggggacaaacctggctgctgcttgagggcctctgccagccgcccgctcccgccacctccaagcaggggatctgggctccgaggtaaaggatcccaa

SEQ ID NO: 29536 - DNA, 201 bp, Homo sapiens
gtcaatttaattaaatacaatataattcatcctatttggaggttgttttggtagagttttttccccttttttgtattcgagaagagtaggagacttttttwaaaaagtcagactggttattaatatcttatgtttaattttgttttttacaggcagcttcaaaagatggtccatgatattaaaaacaatgaaggtggaata

SEQ ID NO: 29537 - DNA, 201 bp, Homo sapiens
tgatctttttcaatcatcacagcaaccctggggaggaaagggctactgcaattcagggtggttaagtggctcactcaagaacacactcttggccaagcgcrgtggctcacacctgtaatcccagcactttgggaggccacagtggatggatcacctgacgtcaggagttcaagaccagcctggccaacatggcagaacccc

SEQ ID NO: 29538 - DNA, 201 bp, Homo sapiens
tgaataaccagccccaaagagcacagctagtgagtggcagagcaagggacagaactcagatccagttggccttagagcctgactccttttctgatacctgmtgagaaggacagtcctggaccaaagggatcccacagattccctgtgaatggagcgaaatcactgagggaaggagcatggaagttgatccacgtgagtaat

SEQ ID NO: 29539 - DNA, 201 bp, Homo sapiens
tgaccctgcagcttaccaattctgcttgaaatttttaaaaaatctcatctgaaagatatctagctggccctgtgtgtctcctcaccctcttcgtattaaacctattttctcttcagtgatcagcattcataatagataaaacccattggttattctattttattgggccattttcctatcttttaaaaatatgttttatta

SEQ ID NO: 29540 - DNA, 201 bp, Homo sapiens
ctgtgcatcaccagatgcgtggacagttgacataatgagctaacagcatcacagcaaatcttggttttgggtcactatgtcttcccagatcacagaagttyggcagttgtaacaaagcagtctatagacatcagaatttgtgtgaacgagatacagagagagaagaaaactttaaaatataaaaagtgtaatttatctagg

SEQ ID NO: 29541 - DNA, 201 bp, Homo sapiens
ggggatctgggctccgaggtaaaggatcccaagctgtagggctttcccattccaggggaagaggcgtctttcctagattgggaacattgaaagcaggcataaacaaacaaacaaacaaacaaacaaacaacaaacccagcataccctgatggttgtgctccctcccaacactccaagggaaagcaaccctgagattagtcc

SEQ ID NO: 29542 - DNA, 201 bp, Homo sapiens
gggatctgggctccgaggtaaaggatcccaagctgtagggctttcccattccaggggaagaggcgtctttcctagattgggaacattgaaagcaggcataaacaaacaaacaaacaaacaaacaaacaacaaacccagcataccctgatggttgtgctccctcccaacactccaagggaaagcaaccctgagattagtccc

SEQ ID NO: 29543 - DNA, 201 bp, Homo sapiens
cccagcctgggtgacagagtgagaccctgtctcaaaaaaaaaaaaagatattgcttcaaaatttttatttaaatgtattattgacaaacatttgtagatgyttttaatgaattacaatgcttcctttcacccctacccctacatacaagacattcccaatatctttgttttctcagagctaagaagaatttaactgggtca

SEQ ID NO: 29544 - DNA, 201 bp, Homo sapiens
ggatctgggctccgaggtaaaggatcccaagctgtagggctttcccattccaggggaagaggcgtctttcctagattgggaacattgaaagcaggcataaacaaacaaacaaacaaacaaacaaacaacaaacccagcataccctgatggttgtgctccctcccaacactccaagggaaagcaaccctgagattagtccca

SEQ ID NO: 29545 - DNA, 201 bp, Homo sapiens
gatctgggctccgaggtaaaggatcccaagctgtagggctttcccattccaggggaagaggcgtctttcctagattgggaacattgaaagcaggcataaacaaacaaacaaacaaacaaacaaacaacaaacccagcataccctgatggttgtgctccctcccaacactccaagggaaagcaaccctgagattagtcccac

SEQ ID NO: 29546 - DNA, 201 bp, Homo sapiens
ttaccaggggatacaggtgctcaggagccccaagcctggaataagcctcatgggttaaatggacacagcttgggtctgtttttttttttgttttgttttgtttttttgcgacagagtctcactctgtcacccaggctggagtgcagtggcatgaactcgcttcactgcaacctctgcctcctgggtccagcctcctgcctc

SEQ ID NO: 29547 - DNA, 201 bp, Homo sapiens
ggaaggtactagaatgtggtggataaaagtatgggtgctaaattattgaactgcttgagttcaaatcctggatctaccactttttttttttttttttggaracaaggtctcattctgttgccaagcgcaatcacaactcactgcagcctcagcttcctgggctcaagcaaccttcccacctcagcctctggagtagctggg

SEQ ID NO: 29548 - DNA, 201 bp, Homo sapiens
ataagggtgtctcccattctttgcaaattctctggtctggtcatcatttttccctgagtgtgaattttcctcaatggcatgtatctgtaatggttttatgtatatatatatatatatatacacacacatttctgtgtttaagctcccatggtgaatagatcaaccaagccaaattcctcaacgcccgcctctcctccagga

SEQ ID NO: 29549 - DNA, 201 bp, Homo sapiens
taagggtgtctcccattctttgcaaattctctggtctggtcatcatttttccctgagtgtgaattttcctcaatggcatgtatctgtaatggttttatgtatatatatatatatatatacacacacatttctgtgtttaagctcccatggtgaatagatcaaccaagccaaattcctcaacgcccgcctctcctccaggaa

SEQ ID NO: 29550 - DNA, 201 bp, Homo sapiens
tcctcccagcctttttccctctggctcttcactggcactggctgagaaaaccaggcacgggcctgtccatccgcaagctcctgccactttggcccgcatgygtgggaaagctactgggtctgtgattgctgcaggatgcatccctgtcccaaccctgagaaagggggccagcacaagaaaggaaaggagggtgaatggttt

SEQ ID NO: 29551 - DNA, 201 bp, Homo sapiens
gttataaattctgagagggcagaggcctatgtctgcttcttcacctcttcctcggcccctaacacagtgccttcatgtgctttacatgtaccaagtcctcrataatccttggtaatggattattatttcaatgtgtgcttatctgtgctctatctcataaactaagaaagtacagactgagggcagcaggtccagcctgta

SEQ ID NO: 29552 - DNA, 201 bp, Homo sapiens
aagttgatccacgtgagtaatcaccacctggatacactttagcataacctggggaacttttccaacctgtaatgccaggctcctcccgaggagttcaaacrttgccaggctggggtggagcctaggccttggcatttttaaaagccaggagcacctcacccccaccctgtgccctccagtgctgcttccatcccctctgtg

SEQ ID NO: 29553 - DNA, 201 bp, Homo sapiens
atatttatttttaaacgtattgcccgcatcggggggtaggaaaaagcacaaaaatgccatttttatataatggttctataagtagaaaaagcttatccatwactttatgcaaataagcagaaagtctccaagagaggttcagatggacttgattactctgcttttccttgagcccaggaagttcccagttatagcatgcac

SEQ ID NO: 29554 - DNA, 201 bp, Homo sapiens
tttatctcaggactctcaggaaatatttcttgatatatttagaaggaccatgccattggggcccaacagggctgattctaatggccagttactagctgaarccattcagtttctctacacctcagttttcccagctgccaaacaaagctagagatgccttcctcacaggcttgtgtgaagaccaagtgagacaacatggac

SEQ ID NO: 29555 - DNA, 201 bp, Homo sapiens
aggaccatgccattggggcccaacagggctgattctaatggccagttactagctgaagccattcagtttctctacacctcagttttcccagctgccaaacraagctagagatgccttcctcacaggcttgtgtgaagaccaagtgagacaacatggactgaagttcccagaagagtatttgccacttagtcagtataccaa

SEQ ID NO: 29556 - DNA, 201 bp, Homo sapiens
ctatatgtgcttaactgaaagcaacacagtatgtgcaaatatttctgagcctgccagagaggccagcctcagtgtgagcatcagcccccggctcaggactyggggactgagtagtgtatatgtttgtgcaggtcgaaacagtggggcctgggaaaccaagtcacctccaccagctgcaccatccccgttgccacgggccgg

SEQ ID NO: 29557 - DNA, 201 bp, Homo sapiens
gagagccctgctgacgaagaggagcagtggtccgatgactttgtaagtatttgctcctgggaccaggagggcatcagggtcccatgggaggccttttgaaratcttatttctgaattacatgctggtggtcagccgcacgtcccaagagggaagacttggaaaggtcacctacaggcaaggcatactgcataccagctgac

SEQ ID NO: 29558 - DNA, 201 bp, Homo sapiens
ttggctattgggttaggcaatttcaattcaattcagtgaggcattcgactggccaggtactggaaacacaaacacagagaaggagaaggccctgcccttcrggagttcatagtttgacactgtggggccagagacgaagcagagatgaggaccaggttccctgtgccacagaggagcaagtgcccacctctgaatggcaga

SEQ ID NO: 29559 - DNA, 201 bp, Homo sapiens
gatacctgatgagaaggacagtcctggaccaaagggatcccacagattccctgtgaatggagcgaaatcactgagggaaggagcatggaagttgatccacrtgagtaatcaccacctggatacactttagcataacctggggaacttttccaacctgtaatgccaggctcctcccgaggagttcaaacgttgccaggctgg

SEQ ID NO: 29560 - DNA, 201 bp, Homo sapiens
ccactgcactctagcctgggcgacaaagcaagactcggtttcaaaaaaaaattagccaggcacggtggtgcatgcctgtaatcccagctacttgggagacyagggcaggagaatcgctggaacccaggaggcagaggctgcagtgagctgagattgcgccactgcactccagtctgggcaacagagtgagactccatctca

SEQ ID NO: 29561 - DNA, 201 bp, Homo sapiens
tgtggatgggctggggctggccagctgaggctcacacttgtgccttctgcttctcccctgctgttgcagagagccctgctgacgaagaggagcagtggtcygatgactttgtaagtatttgctcctgggaccaggagggcatcagggtcccatgggaggccttttgaagatcttatttctgaattacatgctggtggtcag

SEQ ID NO: 29562 - DNA, 201 bp, Homo sapiens
gctgcttccatcccctctgtgtggccaagtgttgggttgttggttctcctgaacctctgggtgtccatcactgccccggaaggatgtttttaatgaggacrttcttccagtttttgtcgtttaagtcaataagcagttgaaattttgggcctaacatttcactttactctttcaaggaatgccccgtggatcatttgtggc

SEQ ID NO: 29563 - DNA, 201 bp, Homo sapiens
ttgtctcatggttgttatttccaggctaaaagtcaaagcacctccaagtgttcctcgaagggactacgcttcaggtaaggtatttctcagatactttaackgactcttgactaatttaatgttcatatttacatttaggcttatggaaagggaaatacgctatcctcatttgaaaacaaaaggtatcttttctaatttcaa

SEQ ID NO: 29564 - DNA, 201 bp, Homo sapiens
aaacctcaagtcccacccaaacccaaaggcctccttgaggatgaggtaaagtaaatctgtgccaaaggcttcccaggacacagaggggggtggggcaagcraccaggacagcctgcccgctggctgtcctccttctttacaacctgctattgactgccccctctaactctccactattataccaaagggacttggttttct

SEQ ID NO: 29565 - DNA, 201 bp, Homo sapiens
ttagttgtctatctattctgtctatatcagcttctagcatcggctttgaccatcattgttctgctcactgaccttttgtctcatggttgttatttccaggytaaaagtcaaagcacctccaagtgttcctcgaagggactacgcttcaggtaaggtatttctcagatactttaactgactcttgactaatttaatgttcat

SEQ ID NO: 29566 - DNA, 201 bp, Homo sapiens
ccctggcgctggctgtaaccaattattattttagagagacaattaacagccacctgacaatcacctgatggtctcctgacattcctggggcaggggagccstctcctgccctgctcatgcctgactagctattatacccactgtaacactgtcgccaccttgctttctttcctccaccttcttttctctctgctcctccac

SEQ ID NO: 29567 - DNA, 201 bp, Homo sapiens
aaagacttttttccagctctattaagcatttctatgtctccccgcccccctccaaaataactctttaaattggtttcgattgaatctggatctcaggaaaygctttgtgtgattgttctgcatattaggaatgatgagaggaggtctatgtgaaggacccagggtcctgtgctcagaagagcgctgtctcttgtaatgtca

SEQ ID NO: 29568 - DNA, 201 bp, Homo sapiens
atggtctcctgacattcctggggcaggggagccctctcctgccctgctcatgcctgactagctattatacccactgtaacactgtcgccaccttgctttckttcctccaccttcttttctctctgctcctccacttccctcttctcagatgcagagggtgacatgggccaggatgtacaatggagatagctagtctgtaag

SEQ ID NO: 29569 - DNA, 201 bp, Homo sapiens
cctcctcaatcttccctgtctcagcacctagccctttgtgttgttttccctatgaaatagctcctatttgaaaatgaataggtaaactcatccaagctgtygtagtaactgataaagcctaatgtgttatggctcccagaggtccctgcattttaaataaggacagagaccagcctgcagcttctctaagaaataacttgc

SEQ ID NO: 29570 - DNA, 201 bp, Homo sapiens
aattcaataaaataatgtatggaaagcttttaaatgcttatatgagtggtaatgaggatgcagcccatgtgggcatttaatagctaatcaaaatgactcckgctaagtaatagggtatgagccgatgggaaagtgaaaataagataaattcacgctactcctatttttcaaatctgtagtcctagggggaggcaaacatgt

SEQ ID NO: 29571 - DNA, 201 bp, Homo sapiens
gttaaggagcagaaagtttaatagacagaagaaaggagagaggagagcatctctctctctcttgcaagacagtggaatctgaagggaaaaccaagcctgakgtggaccacagcagattttagaggcaggcttcaggaggtgatatctgatttatacagggtccacagattggtttgatcaggagtgacatttacatggtgc

SEQ ID NO: 29572 - DNA, 201 bp, Homo sapiens
tgagtccaggagtttgaagcctccagtaagctgtgatctccccactgcactccagcctgggtgacagaacaagaccctgtctcaaaaaaaaaaaaaaaaamaaaaacggaattgtggacttgtatgtgtagtaagttcttaagaaaacatttattcagttcagttaagttaatgaagagcctcatgaagagaccccttggt

SEQ ID NO: 29573 - DNA, 201 bp, Homo sapiens
ccaggttccctgccctctccacaggaagcgtctgtgtccactccccaccacagctaatggtagaccattgtgtatcaggcacacataggcctcactaaacycagattctggccagaacatggtgaacctgggccacaacactacataagggagcccacctggacctagtccctactgtgaagcctgacatttacaatcatt

SEQ ID NO: 29574 - DNA, 201 bp, Homo sapiens
cttggccagtgccatcttgtctgctccttactgtacaggtggctggcaaagagaggggaagacagagccaccattttgatcatgcctagtcacaggtagcrttttcctattggcacaactgccagcattcacccatgcaagcttccagcttgcttgtctatatcagcagcttgattttacaggctactctttgttagaaaa

SEQ ID NO: 29575 - DNA, 201 bp, Homo sapiens
gagccctgctaacatcaaatgagccaggcatggtggctcaggcctgtcatcccagcactttgggaggccaaggcgggcagctcacttgaagccaggagttsaagaccagcctggccaacatggcgaaaccccgtctctactaaaaatacaaaaattagccaggcgtggtggcacacacctgtaatcccagctacttgggag

SEQ ID NO: 29576 - DNA, 201 bp, Homo sapiens
atatcaaattatgaatctgtcattgatattcccattctaaagatgtttcttctaagaagacttcttttattggtttgtgtgtctaataagggtgtctcccrttctttgcaaattctctggtctggtcatcatttttccctgagtgtgaattttcctcaatggcatgtatctgtaatggttttatgtatatatatatatata

SEQ ID NO: 29577 - DNA, 201 bp, Homo sapiens
atcacttgaacctctgcaggttgcagtgagctgagatcacagcactgcactccagcctgggcaacagagcaagactccatctcaaataaataaataaatgwataaataaataaataaataaataaatctagaagtatttcctcctgtgaagttttagttaagtcttgagttcactaacttacagtgttccacaagacaccc

SEQ ID NO: 29578 - DNA, 201 bp, Homo sapiens
agtagtgtgcctcttatcagtaacacactgcttataccacgtcttatgactaatcaagacccaccagggtgttgtctccacctgtgtggaggccacatggyaagtagagggtgagttgtttagagggtggctaaaatgttctcatcttctggcttccacctatactcacacacttaaagtttcagggcccgtgggttcagt

SEQ ID NO: 29579 - DNA, 201 bp, Homo sapiens
aaacacagtctctcattttcatcatgttagactaaatacagtaaaaagaagaaagaccagtggctgtaaaaagaaaaagcagaagtgtaacctttgcctcyggtctttttctctggggaaatatgaagttgtcagccaggtgttgagcaaagttgttggtggagagaaaagtcaagtgacttatggggtgcattttacaat

SEQ ID NO: 29580 - DNA, 201 bp, Homo sapiens
catgagctgggagagtttctggagcaggattcaccctgtcttgtctggtctccctgtggccagtgtgtatatatttttttgaaaccgatgggtaggctttmagggttcaatctttttcattaaagacttttttccagctctattaagcatttctatgtctccccgcccccctccaaaataactctttaaattggtttcgat

SEQ ID NO: 29581 - DNA, 201 bp, Homo sapiens
cagggtcctgtgctcagaagagcgctgtctcttgtaatgtcagatgctcaaggctcttgggtaatcctgcccccaggcttgcagggctgtggtgctcttgyccactgtagacagagcctcactaaggaggccttttaagtccacctaaccaagactccgtctctgcagattggaggtcagagaggtaccgctactgcctcc

SEQ ID NO: 29582 - DNA, 201 bp, Homo sapiens
acaatttcgaccaaggggccctgcattttcattttacattgggccccagaaattatgcagccagtgctggtcgggggttccatgaggactcgggccttgcytgcttctacaatgtgcagagacacaggcttccatggagaagcacagagattcgccttgcgaggactgaaaggacacctctccagcccctttattccacag

SEQ ID NO: 29583 - DNA, 201 bp, Homo sapiens
gagtttgagaccagcctggccaacatggtgaaaccccagctttactaaaaatacaaaaattagctgggcgtggtggtgcaatttgtaatcccagctactcsagagactgagacaggagaataacttgaacccaggaagtagaggttgcagtgagctgagatcctgccactgcactctagcctgggcgacaaagcaagactc

SEQ ID NO: 29584 - DNA, 201 bp, Homo sapiens
ggggtgacttttctgcccatctcttggtcatggagctcctcctggggcccagcagccgcagctccctgagatgcactgcagctgcgccccctgctggctgygcacgcgcgtgcacacacgaacacacacacacacacacacacacacacacacacagccacatgtaaagcaaagaaattgcttggtccacatgcagaggta

SEQ ID NO: 29585 - DNA, 201 bp, Homo sapiens
ggcacatgcctgtagttccagctactcaggaggctgaggtgggaggatcacttgagccagggaggttgaggctttagtgagccgagataacgccactataycccagcctgggtgacagagtgagaccctgtctcaaaaaaaaaaaaagatattgcttcaaaatttttatttaaatgtattattgacaaacatttgtagatg

SEQ ID NO: 29586 - DNA, 201 bp, Homo sapiens
cctcttagtgttcttccaaacccaagagtctgtgtcatctatgaacacaggagtctcccttaacttttttggtttttgcaatctgcttttatgtagttttrtgaggaagttttcctttattcaagacctctgccaggtgggtggtgagagcagagtccagcaagcattccaatgtgctaaaggaaagagaagtgttgtatt

SEQ ID NO: 29587 - DNA, 201 bp, Homo sapiens
tattgaactggatacttaaaaatggttaagatggtaaattttttgttatgtgttttttatcataatataaacatggggataataggacctccctcacaggstagttgtgagggttaatgagataatgcacacaaagtacctagcacgtagtacatgctcaataaatgctggcttttaccgttattgattttccaagtctga

SEQ ID NO: 29588 - DNA, 201 bp, Homo sapiens
cccccatctccttggcctaacaggtcccttgactatctgtctctgctcccagcggtctcatccttgtcttgtaaacatcctctcaacacctactttcctgmcactctcagctgctcactggacccgaaacatctcagacagtttcacctctgagcctttgcacttgctgttcctgatacctggctgctgttcctgatacct

SEQ ID NO: 29589 - DNA, 201 bp, Homo sapiens
aatatactatattagtagcatcttaaaaagaaacccagagtcaattacattaaacacctaaaaaaggaggaagtcaactagagaatcagcagacctaatgwtgaacattaatttttttatttttaaattaaatgcatttaaatgtatttaaattttaagtttaaaaaagtgtttttaaaaatccattcatagtaaaaagta

SEQ ID NO: 29590 - DNA, 201 bp, Homo sapiens
gtatttaataaaaattattggaaaagtgtttttgtcaaatatgtaatttcttggacacctctggtgatctggccgaaatatctgcatgcagctgccctccycgtgccctcttggccctggaagagctcgctgtccttaaactccatccttcctgaacttgtttatccttctatgtgcctggggctgttctcagtctgcaga

SEQ ID NO: 29591 - DNA, 201 bp, Homo sapiens
ttagcaagatctccaggggatctgaatgtaaatcatatttaagaaaccctgctataaaccaccatctctgtccctattgcctttcctgaactgaaagacamgtagattttattccctcaatccctgacccctgcaaatccattgatgttccagggtctcggaaatgcatcttattgctttgccagatgactggggccttgc

SEQ ID NO: 29592 - DNA, 201 bp, Homo sapiens
gagaatcagcaaagtgcacaacgggaggaggaagctgtctggtgttactgttagtgagcgtgggagcctgccgcaagaaatcggtggtgggacagaaggcrgaggcattggaatgtgttgccacagaacctctacttgattccatagggagtcactgatgactcttaaggaaaggaacagcataatccaaactttatttta

SEQ ID NO: 29593 - DNA, 201 bp, Homo sapiens
tctagaaggtcaagtaccagttaaacgctgccattttgcctcttaatgcgcatgcttgagcccacttgcccaactcctgagatcttatcggaaactgctcrtcaccagtttcaggttttttctatctattgggagactgcttttccctggcgctggctgtaaccaattattattttagagagacaattaacagccacctga

SEQ ID NO: 29594 - DNA, 201 bp, Homo sapiens
agagttttttccccttttttgtattcgagaagagtaggagacttttttaaaaaagtcagactggttattaatatcttatgtttaattttgttttttacagrcagcttcaaaagatggtccatgatattaaaaacaatgaaggtggaataatgaataaaatcaaaaagtaagttcgcctctatttaaatacttaattatata

SEQ ID NO: 29595 - DNA, 201 bp, Homo sapiens
ggtcaatttaattaaatacaatataattcatcctatttggaggttgttttggtagagttttttccccttttttgtattcgagaagagtaggagactttttwaaaaaagtcagactggttattaatatcttatgtttaattttgttttttacaggcagcttcaaaagatggtccatgatattaaaaacaatgaaggtggaat

SEQ ID NO: 29596 - DNA, 201 bp, Homo sapiens
gaacccttgagaccagaggcttaccatgctgctccctaggagggccaggaactgctgacgtgaccactggacagttattcgtgtctcttacaattaccaarcagaatggacaagcttaataaaataaccgtccccgccagtcagaagttgaggtaagattttccccacccaatacccttcttcatctcctttttttccccc

SEQ ID NO: 29597 - DNA, 201 bp, Homo sapiens
cttagaagagggccaagcggacgacttgagagatccagtgcgctgtttgacctttgagttggggttttatacactagcacacttccggggtcttttgtccyttctcccctgattcttcctttgtgtgggctgtccgcttgtgcagtgccctgctagcatttgggaggtgagcatgcgcagtgtgcttaccggagttgtacg

SEQ ID NO: 29598 - DNA, 201 bp, Homo sapiens
aaactggagccctcatacattgctggcaggaatgaaaaatggtgcagcctctttggaaaacagtttggcagtttctccgactgttaaacttagagctaccrtatgactcaacaatttcacttctaggatattcccaagagaaatgcatgtctacacaaaaacttgtacatgaatagtcatgacaccattattcattacagc

SEQ ID NO: 29599 - DNA, 201 bp, Homo sapiens
ccgagggtgatatagtaaatctggtgcagtgacagcccctgccgtccccgctgtgcttgagaagccagtagaatggatttagccgactccaaagccagagrtttaggtcctggctctgacatttgctaggtgccggactttgaacaagtgaagtcatctctgtttcttagtttcttcctctgaaaaaatggcacctatgcc

SEQ ID NO: 29600 - DNA, 201 bp, Homo sapiens
ttgtttatccttctatgtgcctggggctgttctcagtctgcagatacccttctgtggattctcactatggattcctctccttgtgctctcttggccagacraacttccctggggtatgtacaaagttctcctatcctgagaacactgtcagtggttcttaaccttggctgcacattggatcccctgagagtcaatgactct

SEQ ID NO: 29601 - DNA, 201 bp, Homo sapiens
gctgagctgtacacagtcagctcctcgggttagagtccctgctctgacaccaggctgcctgggaagagaaggcaggcaggctggaagcatcactgtgcccracttgtattaatctgagtccaggtaaaggtgaatgcctggccattggcaaccacagccgattccttctgctgtcttccccttgttgaaagcagacatcat

SEQ ID NO: 29602 - DNA, 201 bp, Homo sapiens
cagtcccttttccattgtcacgcaaggagaggggcatgttctgcctgcagtcacttcatctccattctacagttttgcaaactgtggctcaagaagaaagyacatgactataaaataaattaaaatatataagcagaggttagtctgaattcatacagagaaaagtcaacagtcctgcaaagaagctacagactgaaaagc

SEQ ID NO: 29603 - DNA, 201 bp, Homo sapiens
aaattagcccggcatggtggcaggtgcctgtattctcagctactcgggaggctgaggcaggagaatcgcttgaatctgggaggcagaggttgcagtgagcygagatcacgccattgcaccccagcctgggcaacaagagtgagactccgtctcaaaataataataataataaaaataaaaacataaatgcagattttctga

SEQ ID NO: 29604 - DNA, 201 bp, Homo sapiens
ttcaggaccacacatcagtggttttcaaacttgttttggtttcggatctctctgaaagaaagcctgcacagaagacagtggagaatagtccctagagacarggaggaagctggagtgggcaagtgcagctgcaacctcacctgctggaccaccctcttacctctaccctctgtcctggacagtaacccccacagggagctg

SEQ ID NO: 29605 - DNA, 201 bp, Homo sapiens
atccctcaggtttgtctgcgctcttcagcactctagcgcctaacagccattagccctagaaggagagagatctccccaaaatctgcagcctaagttcccawtttacgtttgagcaatctcccttttcccaattccctatcctgtaaatttcactccactccctaagggctagagggcctgccctcaatagagcagacccag

SEQ ID NO: 29606 - DNA, 201 bp, Homo sapiens
aaccttaatttgcctgcaactcaatgtgggaaaaaaaggaagaaaaaaactctgctttacatagataatttgggatatattccaaaataataaagcttaartccatttaaataaacagtaattgtccacatgcaaaatttttatgcattttttttactaaacataaattggctttttaaatttttaataatattcatctta

SEQ ID NO: 29607 - DNA, 201 bp, Homo sapiens
tttggctgtcactgggcacacctttctctgaactttccccgctcctggcaatgattccaggtgtggggacatttctcagaaaactacatggccctgagttktcctcagtctcatgtggtcattcttctggcccttagtctttatttgtattatgaagtgtggcttggtgagaagaccttggactctgaggtcctttaggcc

SEQ ID NO: 29608 - DNA, 201 bp, Homo sapiens
caaacaaaaacaatttagggaaaagagtggcattagtttacattttgtaaatctctttaatgtatgttactgcaacataacagagactgctggattctcayctctgtttctacatttcatctgttgcaatgtttttctggtggaactacatgaagaaaattgggtttcatagtgataggtaattcaaaaagaaaagacctc

SEQ ID NO: 29609 - DNA, 201 bp, Homo sapiens
tttttttcatagacaactggtggctatggttcccagttcaagagagtcctctagatttgatcttaatgtgtcccttcacatatttctaaattttataaacrtaaaaccttatttagcacattaaaaagctagcatttagctgggcatggtggtgcatgccagtagtcccaggtactcaggaggctgaggtgggaggatcgc

SEQ ID NO: 29610 - DNA, 201 bp, Homo sapiens
agtggagggtcttgactatgagtcttccaggttcttggccttttgaacacagaattggacaaaatgcacaaagtaacagaagaatgaaacaatgaaagcayagatttactgaaatgaaagtacactccacagagtaggaatgggcttgaccaagtggctcaagagcactggttacagaattttccttctaggggtttccca

SEQ ID NO: 29611 - DNA, 201 bp, Homo sapiens
tccttctaggggtttcccattggttacttggttacatcctatgtaaatgaaggagtggcccacgaccagtctgattggttgcagaaggtgatcaatcagaygctgaagttaaggtacaaagttacacaggaagacttggcctgggaccagtctgattggttacaggaggggatcaatcagaggcactttccatttctcatc

SEQ ID NO: 29612 - DNA, 201 bp, Homo sapiens
ccccaacgacaaatttgagggagagtaaagtattaaaataatgtgtgatcacatttattaatggttcagcagtagagttcactatgggcttcaacataaakttcttacacttcaggtttatgctcatttcccaccctttcctcttctgctcaggaaaacactgaaatgcaagtgagatttacattattatagggataacct

SEQ ID NO: 29613 - DNA, 201 bp, Homo sapiens
ttgctgtttgaatccagaacaacccctcctggaacagaccagttgtgcattcttttgctatggcatgtgctataagttgtaataaggagcaaaaagcactycaaaatgaaatggccaatactagagagcagcagagctgtgcatcaccagatgcgtggacagttgacataatgagctaacagcatcacagcaaatcttggt

SEQ ID NO: 29614 - DNA, 201 bp, Homo sapiens
ttagcccaacctacaaccaaaacgcttattgtagctgattttttcctgttaaacatttgtaagtcattaaaatatagtccatcttatcttaccttcttatsaacacttaccttaccaaccaatcaacatttatcttccttgaacctctgaactcagtgcttattactatcatattctgacctctctgagcccttctccacc

SEQ ID NO: 29615 - DNA, 201 bp, Homo sapiens
caggtaaaccacaccataggaaaggctttaactgacaagagggcccgcccaggatctcagcttcctggcagagaccatggaatcacacaaacaaaatcaawccacctggcccacatgaagcttgaacttctcccccaaattttactcactacaatagaggctttcttggatccatgcctttgtggtagccatagtgtgtga

SEQ ID NO: 29616 - DNA, 201 bp, Homo sapiens
cctggagcgaggcagcaccatgtgggggctcagcgcatgcccgtggaaggcaacctgtagggttcaactcctggctctgccatttattacactatctgacmttgggcatgtgacttatctgctctaggcctcagtttcctcacaaggtttaggtgattttttttttttttttttttgagacagggtcttactctgtcatcc

SEQ ID NO: 29617 - DNA, 201 bp, Homo sapiens
catcacagcaaatcttggttttgggtcactatgtcttcccagatcacagaagtttggcagttgtaacaaagcagtctatagacatcagaatttgtgtgaaygagatacagagagagaagaaaactttaaaatataaaaagtgtaatttatctagggtgactatagttaactataatttattgtatatttcaaaatagctag

SEQ ID NO: 29618 - DNA, 201 bp, Homo sapiens
agctacgagccgcctccagtagagcaggaaaccaggccggttcacccagccctgcccttcgccagaggcgagtatataggtgaggtcccccgcagacctgsgcactcggccttccaggcccatggggaggtgggggtgtccaagattgcggggtggggacaaacctggctgctgcttgagggcctctgccagccgcccgct

SEQ ID NO: 29619 - DNA, 201 bp, Homo sapiens
caaacagaatggacaagcttaataaaataaccgtccccgccagtcagaagttgaggtaagattttccccacccaatacccttcttcatctcctttttttcmccccagtgctcttatggcatctcagaaatactgaaatcctggaatgctttgctagtttccagtgggtggcacttactatagggaagtggactgagctttt

SEQ ID NO: 29620 - DNA, 201 bp, Homo sapiens
tattttcctggactattttcttagaaaataagaagacaagcgctaatcaataataaaaataatgtagctaaataatttacctttggaatgtaatataggtsttcttcacaaaatgattttttgaacctgtagaaatataagtaatactaaccataattatgttttttaaaaaaaattaaacaggatggatcatttcttatt

SEQ ID NO: 29621 - DNA, 201 bp, Homo sapiens
ggtaaataaaaagcaatatactataatattttatcataactcagtgaagtaatctctctaagtagctatgctaattgaggctgtcagtgtgtttttcttcrtacttaatacagcaaagtccaaggtctgccaccttgaaggttacagcctttgttaaactagatttttttgtgcagaatgtcagctggggtgtaataactt

SEQ ID NO: 29622 - DNA, 201 bp, Homo sapiens
acatgaagaaaattgggtttcatagtgataggtaattcaaaaagaaaagacctcttgaaccacctgaaaggattttcgagatttccaggggtccttggacmacacttttggaaccattgccttaaggattttttttggtggatgtgtccctggcagcacctagtacagtgttaggggataggcatagaaagagttcaagaa

SEQ ID NO: 29623 - DNA, 201 bp, Homo sapiens
ttttgattcccaacctctgttttcttcttatagtacttatgaatggaatttgtttgatacattttttttcatagacaactggtggctatggttcccagttyaagagagtcctctagatttgatcttaatgtgtcccttcacatatttctaaattttataaacataaaaccttatttagcacattaaaaagctagcatttag

SEQ ID NO: 29624 - DNA, 201 bp, Homo sapiens
aaacgcttattgtagctgattttttcctgttaaacatttgtaagtcattaaaatatagtccatcttatcttaccttcttatcaacacttaccttaccaacmaatcaacatttatcttccttgaacctctgaactcagtgcttattactatcatattctgacctctctgagcccttctccacctgacttcacctttgccaag

SEQ ID NO: 29625 - DNA, 201 bp, Homo sapiens
cgggttgaatttaaatgggtagaatgtaagttggagggatggagaaggagaaaaatgggaagaacaatctatgcagagaaaatagcataaacaaaattcamggtaagaaatatttactttcaagattccttcagaaaaaggtacaccattccaaacccagcacctgctagaaaatatttgaattgttggaaaatgtcatga

SEQ ID NO: 29626 - DNA, 201 bp, Homo sapiens
atcttccatgtgccaggcacacacagatctgaggcaggaatacagtgctaaaagttaaagatagactatacatttgaggaatttatagtccagaagggaaratagattattgtattagtctgttttcacactgctgataaagatatacctgagactgggtaatttataaagaaaaagaggtttaatggactcacagttcca

SEQ ID NO: 29627 - DNA, 201 bp, Homo sapiens
aacagaaaaaaaggagagtgaggggaagctgtaactatgttatgcccaattcttttttaaattaaatcacaaatattcttcaacttcattccctacttcaratgtttcaactcagctcaactccctactgcacacacttcaatccccgaacaccacaacaaggcaatactcacaaatattcagggactagagggacggaat

SEQ ID NO: 29628 - DNA, 201 bp, Homo sapiens
attacatcaattcttgtatctgagacttgtgcaaagtaagagatgatctatgttttgtaaagaatgtagaaaaatgcgttgtatgatagttttacatttamcggtaaataaaaagcaatatactataatattttatcataactcagtgaagtaatctctctaagtagctatgctaattgaggctgtcagtgtgtttttctt

SEQ ID NO: 29629 - DNA, 201 bp, Homo sapiens
tcggccactgatcaagatagcaataagtcagatagtgcagttcctcctaagggaatcttatcacactgagaaatgctgaccaacctgcccaagtctggttrcaggcctgttggaccactcactaattcacagagtagttattggcatcaccctgccaatcagtcagcaagtttagacagttggtcaggggatgccagtaca

SEQ ID NO: 29630 - DNA, 201 bp, Homo sapiens
agggaatcttatcacactgagaaatgctgaccaacctgcccaagtctggttacaggcctgttggaccactcactaattcacagagtagttattggcatcaycctgccaatcagtcagcaagtttagacagttggtcaggggatgccagtacagtctggcactaaaagagggaccctgttctgggctttaatatctacctaa

SEQ ID NO: 29631 - DNA, 201 bp, Homo sapiens
tgacctgctcaccatttttaaataccaaaatgccatactgcttaaaattacaatacttatatattttaaaacatgtattagataagctttgttcttcattytattttgttacatgagcatggctctctctctatgactttagaagattaggacattgtgaccttattatccatctccccaccatggaaggatatctctgaa

SEQ ID NO: 29632 - DNA, 201 bp, Homo sapiens
cagggcttaacccctatcccaccaccattcacctccacacacaaggcccagcttctgcttggacactttctgtgatggtttcccatggtctagcaagggayaggcagccctggctggatatagatacaatcaatttccttgtgacttcctatgtctatcctgatggccacacagttcaagcctttaaatatgaagaaaagt

SEQ ID NO: 29633 - DNA, 201 bp, Homo sapiens
agggcttaacccctatcccaccaccattcacctccacacacaaggcccagcttctgcttggacactttctgtgatggtttcccatggtctagcaagggacrggcagccctggctggatatagatacaatcaatttccttgtgacttcctatgtctatcctgatggccacacagttcaagcctttaaatatgaagaaaagta

SEQ ID NO: 29634 - DNA, 201 bp, Homo sapiens
tttcttcctctagtactttggaagtgttgctgaaatcatcaggaatcatcaacatagtcctttggttcttattgacagtcagaataacacaaaagattccmccagactgaagtatgcagttaaagtttcataaagggggaaaaaaaagatcaataccattgcttcagacactttcccaaagtttctccttttgagaaaaag

SEQ ID NO: 29635 - DNA, 201 bp, Homo sapiens
gttttcaaaataataagatcaagtaaaacaacatatgggaagcaccagctatagtgtttggttctaaacaaataataccgatttaaattaagtcaaaatayattttaaagatcacaaaatatgtctacaaaaggtaccttaaaaagaagatacggcaaatatctggataatttttccaaggcaaacatcaccctaaaaata

SEQ ID NO: 29636 - DNA, 201 bp, Homo sapiens
tcctctcgaaagtgacagtcattctttcttattgaatttagaagggctttgtaaacagtcaggtgaggattgtaatgtgttaatattacaaacgtcacccygtaaaattatgttggctcaacaggttatttggaaagcaaatttaaatatgtctaaagctggcctgaatggctctaatcttatttctgtctctgtgtaaac

SEQ ID NO: 29637 - DNA, 201 bp, Homo sapiens
aaaaagggagtttcctccttttctcttgggctctcagccagacagccactggcaaaacgttggaaaggcctaaatttgtcctggatgcacttccctgatcytagtcccaccaagcccagcccccacggccttaagcccctatggctccctcccaagattccaaacgtaagaaaagaacacacaccacagtccaaaggcttc

SEQ ID NO: 29638 - DNA, 201 bp, Homo sapiens
ttttccactcccagcacagtccagccctggctcagcaggagcctgcagcttccaatgtgcaaacagtcctaagcaccccctgaaataactagacctgcctstgtcaaggtgaccctagcacgtaggagggactgcatgacccccacctccacctcttcagccacagttcaggattgggtcccctgggaggctgggtttcct

SEQ ID NO: 29639 - DNA, 201 bp, Homo sapiens; identical to SEQ ID NO: 3719

SEQ ID NO: 29640 - DNA, 201 bp, Homo sapiens
gatccttccgtccgggctgggaagcagccacaaattgagcccaggttagccagccgatcttagagagaggaggcaggaggcactggctgctgctggcagaratggggcctcctgggggtcccccggttcaagggcccaacagtggaaggggggtttacataactacttgggagaagctgctgagagctagatactgggcca

SEQ ID NO: 29641 - DNA, 201 bp, Homo sapiens; identical to SEQ ID NO: 3720

SEQ ID NO: 29642 - DNA, 201 bp, Homo sapiens
tttttttccggagagcaggcttcatctgggaggatggcagcggggcttagccgcccaggacagctagcttttcattttcgttctctcccggctgggtgtcmtaccccgggcccagccctgttatcttgggcacgaacaatgcaccggtaggctggtgatcggtggcgggaagactactcccgggacattgggtactaagtg

SEQ ID NO: 29643 - DNA, 201 bp, Homo sapiens
cccctggcttcctgcttctgttccaggcagcagcacagccagggaaactgcttctgcagcttcttaccagactctggggccacggcagaagtggtgtggargctggtgtccagaggaagaacagttgcttgggtctaggcctcaggaagggccctccctagaggggtcccagtgcccccaacctaagttttctctggcctg

SEQ ID NO: 29644 - DNA, 201 bp, Homo sapiens
tgcttctgttccaggcagcagcacagccagggaaactgcttctgcagcttcttaccagactctggggccacggcagaagtggtgtggaggctggtgtccaraggaagaacagttgcttgggtctaggcctcaggaagggccctccctagaggggtcccagtgcccccaacctaagttttctctggcctggggcagcagggc

SEQ ID NO: 29645 - DNA, 201 bp, Homo sapiens
cttctgttccaggcagcagcacagccagggaaactgcttctgcagcttcttaccagactctggggccacggcagaagtggtgtggaggctggtgtccagargaagaacagttgcttgggtctaggcctcaggaagggccctccctagaggggtcccagtgcccccaacctaagttttctctggcctggggcagcagggcct

SEQ ID NO: 29646 - DNA, 201 bp, Homo sapiens
gcccgtggtgctgcggggccagtgggggctctgagccccggtaaatcagcagaaccagtggcctttttttttttttccggagagcaggcttcatctgggargatggcagcggggcttagccgcccaggacagctagcttttcattttcgttctctcccggctgggtgtcctaccccgggcccagccctgttatcttgggca

SEQ ID NO: 29647 - DNA, 201 bp, Homo sapiens
ccaggccagtcttgaagggccctgctggaaacccagccgggagtccactaatcctgggcctctggtgaaaggtactcggtttagggcctaccgcggggccytaatactgtgtcaggcatgaaggcggtttcagcgagtgtatggctgtggccttgttttgctctgtgtcctgtgtgcttgtcccgtgcctgtgcttgtctg

SEQ ID NO: 29648 - DNA, 201 bp, Homo sapiens
ttcttaccagactctggggccacggcagaagtggtgtggaggctggtgtccagaggaagaacagttgcttgggtctaggcctcaggaagggccctccctaraggggtcccagtgcccccaacctaagttttctctggcctggggcagcagggcctggtgcccatcccattccccacccaggccaggccagtcttgaagggc

SEQ ID NO: 29649 - DNA, 201 bp, Homo sapiens; identical to SEQ ID NO: 3728

SEQ ID NO: 29650 - DNA, 201 bp, Homo sapiens
gcggcctcagaccttggaacgctaaagagggagccagggctagctcgggggttggggggactccggtttccaaggcctactgagggctgctggcctagggraggagaggcagcctggcaggcctcccagagagaggggcacagagaaagaaagaggcaggcaaagagagaaactgaaacacaaccagtttcagaggtggag

SEQ ID NO: 29651 - DNA, 201 bp, Homo sapiens
cccaacctaagttttctctggcctggggcagcagggcctggtgcccatcccattccccacccaggccaggccagtcttgaagggccctgctggaaacccarccgggagtccactaatcctgggcctctggtgaaaggtactcggtttagggcctaccgcggggccctaatactgtgtcaggcatgaaggcggtttcagcga

SEQ ID NO: 29652 - DNA, 201 bp, Homo sapiens
ggcaggaggaggccgtttcccgccgtgggcttgtcgctgagggctaacgggaggatctcggccctgctcgtgggggttcagctgctgcgctcgctgactckcggggtgttgggcctgggacgcttcctgacgctctgctgcttgcctctgccgtctgtctgtctcccgctccagtggccctctcacccttcactgtaacac

SEQ ID NO: 29653 - DNA, 201 bp, Homo sapiens
tgggcctgggacgcttcctgacgctctgctgcttgcctctgccgtctgtctgtctcccgctccagtggccctctcacccttcactgtaacacgccgtatargtcacccctatcagaaccggacgccccccaagaagaagaagccgcgcacgtccttcacacgcctgcagatctgcgagctggagaagcgcttccaccgcca

SEQ ID NO: 29654 - DNA, 201 bp, Homo sapiens
tagcgcgggagagtctgggcgaagtcggcggcgccgagacgggcgggccttggggcaggaggaaggaattggagtttcctctttttctgaacgaaggcgargaatctgcctgggattccgcctacggggccacaaaggaagccatggccccacgattctaccacaacatttctgacgctgggaaaggagtgggggatgcgg

SEQ ID NO: 29655 - DNA, 201 bp, Homo sapiens
cggttcattggcctctcgtggggcgcacatactttttccgctcgcggtttctgatcctttcggaggagcgagctcccgctaggcttgcggggagctggaakcaaccgaggccgatagctgggatggggctgaagagccctggctctgttttaccggaggcttcagggctttctggttggcacactctctgccggtgtagac

SEQ ID NO: 29656 - DNA, 201 bp, Homo sapiens
tgcctgggattccgcctacggggccacaaaggaagccatggccccacgattctaccacaacatttctgacgctgggaaaggagtgggggatgcggcctcasaccttggaacgctaaagagggagccagggctagctcgggggttggggggactccggtttccaaggcctactgagggctgctggcctaggggaggagaggc

SEQ ID NO: 29657 - DNA, 201 bp, Homo sapiens
tggcctctcgtggggcgcacatactttttccgctcgcggtttctgatcctttcggaggagcgagctcccgctaggcttgcggggagctggaagcaaccgakgccgatagctgggatggggctgaagagccctggctctgttttaccggaggcttcagggctttctggttggcacactctctgccggtgtagacgcggcagg

SEQ ID NO: 29658 - DNA, 201 bp, Homo sapiens
tcagaaattaaggccagaatcctctctggtgctgtaagtgggacctaccagttcccagcactagcctggcctaggagagatctaaagaattgactttctgrgaacctccaggagccctccagaccacccttgccagacctgcagccacagtacacatgcacacaggcataacagccagtccccagcctattcgaattatcc

SEQ ID NO: 29659 - DNA, 201 bp, Homo sapiens
gggactcccattaggtctgtccaccttagagacagacgtttgatctcagttgacagggtggaggggcggcagtaaatggaataagtgagtcatcgcctccytgaactgcctcagaggaagccagtgggtccagcaggagccccggtagggcacagggctccacacagaaggcccaagtcctagaagacattcgcagagaga

SEQ ID NO: 29660 - DNA, 201 bp, Homo sapiens; identical to SEQ ID NO: 3718

SEQ ID NO: 29661 - DNA, 201 bp, Homo sapiens
gcttccttctttggcttcagaaccgacggcaatcaccaaattcctgcggccagcgagccctgcccctcagatctggccctctggttgagtgggtggcggcmtgaggggccccaggaacccaggcagggatggggtcctagaggccctgtgcagtgcggtgggtggcacacagagaatctggctcaacctgttaactataat

SEQ ID NO: 29662 - DNA, 201 bp, Homo sapiens; identical to SEQ ID NO: 3726

SEQ ID NO: 29663 - DNA, 201 bp, Homo sapiens
cacagggctccacacagaaggcccaagtcctagaagacattcgcagagagagggaggaaagagacgtcccgcagagcagatcgtacccgctggtccttgcytctctgccctggacttgtgggtagggtgagggccctctggcttggaatggcacctggtctccctcagggccggggagggggaggcgagatgccatcctac

SEQ ID NO: 29664 - DNA, 201 bp, Homo sapiens
cagggctccacacagaaggcccaagtcctagaagacattcgcagagagagggaggaaagagacgtcccgcagagcagatcgtacccgctggtccttgcctytctgccctggacttgtgggtagggtgagggccctctggcttggaatggcacctggtctccctcagggccggggagggggaggcgagatgccatcctaccc

SEQ ID NO: 29665 - DNA, 201 bp, Homo sapiens; identical to SEQ ID NO: 3721

SEQ ID NO: 29666 - DNA, 201 bp, Homo sapiens
cagacagccactggcaaaacgttggaaaggcctaaatttgtcctggatgcacttccctgatcctagtcccaccaagcccagcccccacggccttaagcccytatggctccctcccaagattccaaacgtaagaaaagaacacacaccacagtccaaaggcttcttgtctggaatagccaaccctggggtaattgttaggtg

SEQ ID NO: 29667 - DNA, 201 bp, Homo sapiens; identical to SEQ ID NO: 3722

SEQ ID NO: 29668 - DNA, 201 bp, Homo sapiens
ttttccgctcgcggtttctgatcctttcggaggagcgagctcccgctaggcttgcggggagctggaagcaaccgaggccgatagctgggatggggctgaaragccctggctctgttttaccggaggcttcagggctttctggttggcacactctctgccggtgtagacgcggcaggtctattccgccgcttgggcaaacag

SEQ ID NO: 29669 - DNA, 201 bp, Homo sapiens
cctccttttctcttgggctctcagccagacagccactggcaaaacgttggaaaggcctaaatttgtcctggatgcacttccctgatcctagtcccaccaakcccagcccccacggccttaagcccctatggctccctcccaagattccaaacgtaagaaaagaacacacaccacagtccaaaggcttcttgtctggaatag

SEQ ID NO: 29670 - DNA, 201 bp, Homo sapiens; identical to SEQ ID NO: 3723

SEQ ID NO: 29671 - DNA, 201 bp, Homo sapiens
ttccgctcgcggtttctgatcctttcggaggagcgagctcccgctaggcttgcggggagctggaagcaaccgaggccgatagctgggatggggctgaagarccctggctctgttttaccggaggcttcagggctttctggttggcacactctctgccggtgtagacgcggcaggtctattccgccgcttgggcaaacaggc

SEQ ID NO: 29672 - DNA, 201 bp, Homo sapiens
acatcctagcatctttccagatagagacagggcctacccaaaagtctaatctgaaactgaactgaaatagaacagaaatagatcccaagtgatggaacctstgcctttcccaaagcttggcttctaaaaggtagcaaacattttctactggagaggggaaagacaggaagaagaaaaagggagtttcctccttttctcttg

SEQ ID NO: 29673 - DNA, 201 bp, Homo sapiens; identical to SEQ ID NO: 3724

SEQ ID NO: 29674 - DNA, 201 bp, Homo sapiens
cccgccgtgggcttgtcgctgagggctaacgggaggatctcggccctgctcgtgggggttcagctgctgcgctcgctgactcgcggggtgttgggcctggracgcttcctgacgctctgctgcttgcctctgccgtctgtctgtctcccgctccagtggccctctcacccttcactgtaacacgccgtataggtcacccct

SEQ ID NO: 29675 - DNA, 201 bp, Homo sapiens
ttgggctctcagccagacagccactggcaaaacgttggaaaggcctaaatttgtcctggatgcacttccctgatcctagtcccaccaagcccagcccccasggccttaagcccctatggctccctcccaagattccaaacgtaagaaaagaacacacaccacagtccaaaggcttcttgtctggaatagccaaccctgggg

SEQ ID NO: 29676 - DNA, 201 bp, Homo sapiens
ctccttgggaaggggtagagtacctggattgggtaagtgggaagaagagaactggcgagggagcggagccctctcatgtttctgcttagtgttttttttttgtttgtttgttttttgagatggagtcttgcactgttgcccaggctggagtgcagtggcgcgatctcagctcactgcaagctctgcctcctgggttcacgc

SEQ ID NO: 29677 - DNA, 201 bp, Homo sapiens; identical to SEQ ID NO: 3727

SEQ ID NO: 29678 - DNA, 201 bp, Homo sapiens
ctgccctggacttgtgggtagggtgagggccctctggcttggaatggcacctggtctccctcagggccggggagggggaggcgagatgccatcctaccccrgctgccccttgtgaggcctccggggtgtgggcgctgcgcgtggatgcgagtcccagctgtttgggcctcgcagactttcccatcgctcctcctctgggat

SEQ ID NO: 29679 - DNA, 201 bp, Homo sapiens
ctggcaaaacgttggaaaggcctaaatttgtcctggatgcacttccctgatcctagtcccaccaagcccagcccccacggccttaagcccctatggctccytcccaagattccaaacgtaagaaaagaacacacaccacagtccaaaggcttcttgtctggaatagccaaccctggggtaattgttaggtggaatgcaatc

SEQ ID NO: 29680 - DNA, 201 bp, Homo sapiens
ctgttttactgtgcacaggcaaagtgagggatctgcacacctgtagaggtcctttctgcagaccgcaaagggagctggccaaccccaggaaggaataggawggttcttagaaagcagcggggccctcagaggcctggtcccacagcaggctggtgctctcttggcttcttctccgtcccctacaccttagtgcagggcttg

SEQ ID NO: 29681 - DNA, 201 bp, Homo sapiens; identical to SEQ ID NO: 3731

SEQ ID NO: 29682 - DNA, 201 bp, Homo sapiens; identical to SEQ ID NO: 3730

SEQ ID NO: 29683 - DNA, 201 bp, Homo sapiens; identical to SEQ ID NO: 3729

SEQ ID NO: 29684 - DNA, 201 bp, Homo sapiens
gagccgtggcccacccccagcccctggccaccggcttgcccaccgtgccctctgtgcctgccatgccgggcgtcaacaacctcactggcctcaccttcccytggatggagagtaaccgcagatacacaaaggacaggttcacaggtgagtccggcccgcgcgctccccgcctggccgcggcccgggctccgtgctacccct

SEQ ID NO: 29685 - DNA, 201 bp, Homo sapiens
tttgcgcaaactcttgcttatggaatcctgctctgtcctggagactggatgcagaacagcccgcaccttgttgcagcgctccagccgggctcccggcagarggtctgtggccccagaccgcggccctgctgacggtctcctcccccagacacccggcctttgcgcagccggtccctaccctggaaggagaaaatcaatccg

SEQ ID NO: 29686 - DNA, 201 bp, Homo sapiens
cgggctcccggcagagggtctgtggccccagaccgcggccctgctgacggtctcctcccccagacacccggcctttgcgcagccggtccctaccctggaargagaaaatcaatccgcgccggctgcggcggggtttcgcgggtcccactggaaggggaatcaattaggagcagatgggtgtgtgtgagaaagagaattttc

SEQ ID NO: 29687 - DNA, 201 bp, Homo sapiens
gacattcgcagagagagggaggaaagagacgtcccgcagagcagatcgtacccgctggtccttgcctctctgccctggacttgtgggtagggtgagggccytctggcttggaatggcacctggtctccctcagggccggggagggggaggcgagatgccatcctaccccggctgccccttgtgaggcctccggggtgtggg

SEQ ID NO: 29688 - DNA, 201 bp, Homo sapiens
caccctcccgcacatctggcccttgcccgccggagtttctcccctagctcaggccccatggggtagcgcgggagagtctgggcgaagtcggcggcgccgaracgggcgggccttggggcaggaggaaggaattggagtttcctctttttctgaacgaaggcgaggaatctgcctgggattccgcctacggggccacaaagg

SEQ ID NO: 29689 - DNA, 201 bp, Homo sapiens; identical to SEQ ID NO: 3734

SEQ ID NO: 29690 - DNA, 201 bp, Homo sapiens
ccatgattcagcagccacccagaagtgggagctggacctgggacttggtcacagaaacccagaacgagtgagttctgggcgccctctaggggccgcgcgtrgcaaggcacttcgagccgaggctctgggagcttgtattctccgtggcaccctcggaaatgcaggggtggctgttactgactaggttggaaaatacgaatg

SEQ ID NO: 29691 - DNA, 201 bp, Homo sapiens; identical to SEQ ID NO: 3725

SEQ ID NO: 29692 - DNA, 201 bp, Homo sapiens
tgcggccttggggctgccctgagggcccttcagctcaggtgccagaggagacctcctccctcatgctttactccttctgctgccctcatgcccactttcayacttatgtgtcactcccacacagccccccagtcctgctccctaccagggcccccagaccctccagatcagctcagagtttgaagttccacagccaggctg

SEQ ID NO: 29693 - DNA, 201 bp, Homo sapiens
attactgctgatttacagtgctcctgttcacccaagagctctgatggagatatacaaggagattcatgttgatttcatgcctgctaacacaacatcccttytgcagcccatagctcaagaagtcattttgactttcaagtctcattatttaagaaatacattttgtaaggctatggctgcccgaagatgtaactgaatcac

SEQ ID NO: 29694 - DNA, 201 bp, Homo sapiens
gcggtggctcatgcctataatcccagcattttgagaggccaaggtgggcagatcacaaggtcaggagttcaagaccagcctggccaacatggtgaaacccmagctctactaataatacaaaaattagccgggcatggtggcacacgcccatagtgccagctactcatgaggctgaggtaggagaattgcttgaacccagga

SEQ ID NO: 29695 - DNA, 201 bp, Homo sapiens
gccctgtgatggaatggcgtcctgtccagggctggttccctctttgtgccctgagctactgaaacaggcttcagctacacatgacccagaactggaataaktaagtaataattatctttttattcatctttcttaaatgtatgtatagctcacatttatttcaatgtttaatattagaatactttggcctttagaagctta

SEQ ID NO: 29696 - DNA, 201 bp, Homo sapiens
gcggtggtgcacgcctttaatcccagcactttgggaggcggagtcgaaggctgcagtgagccgagatcgcgccactgcactccagcttgggcgacagacayagcaagacccagccccatccccccggaaaaaaagtcatgtcaaaaagtctagtaattatgtagtaacgaaacctatcttagtgatcacctaatatacagt

SEQ ID NO: 29697 - DNA, 201 bp, Homo sapiens
atttagagcggaacgttgagcttggccttcaggagcatgactgtgataaaaggccagctgtgaaacctgtaggagaaatgatgacccagatagtgctgagyagccggctggcagcgttcttggggtccctgtggggatgcagagtggtacaactgcagatggggaagcagcatcattattaacctgtgtttatatgacatt

SEQ ID NO: 29698 - DNA, 201 bp, Homo sapiens
taaacatagaaaaggtgatgtgttgtgctccgatgttacaatggctacaacatcattagcaataggaatatgtcagttctgttataattttatggaaccastgtagtatatgcagtctgtagtgtaccgaaacaccatcatgtgacacatgtatgtatacagtggatatacacaggtgatctgcaaatattatgccatttt

SEQ ID NO: 29699 - DNA, 201 bp, Homo sapiens; identical to SEQ ID NO: 3735

SEQ ID NO: 29700 - DNA, 201 bp, Homo sapiens
ctgagacgggacaattgcctgaacccgggcggcggaggttgctgtgagcggagactgcaccattgcactcaagcctgggcaacaagaatgaaactgtctcaaaaaaaaaaaatttagaacgtagtcatgtacctcgaaagcgaacactcccaacatagcgtggaacaccccacacccccggcgactttgctccgccttggt

SEQ ID NO: 29701 - DNA, 201 bp, Homo sapiens
ataaaggagaagaaaaaagggaataaaaaacttcaaggtcagactatgtaaaggtgccctgaaggatacaaagattagaaagcttagacgctgctggatayagatatgtaaaagtgtgagtcagaatactgaaagtaccctaataagtgctttacgttgtaatcacatgggagggataaatgggggttcagaaaattaatg

SEQ ID NO: 29702 - DNA, 201 bp, Homo sapiens
ttttaaaatccttaaaataattactgatagcccattataactgattttaaaatccttaaaaatcatttcatttttcagttacttataaaactttttcttgrtctttcagacctactttgaagaaaagttgatctgtctctgtattaccattttccaggttgttttacgaatacgtgttgtagtcatccattaagcaatcca

SEQ ID NO: 29703 - DNA, 201 bp, Homo sapiens
atccttaaaataattactgatagcccattataaccaattttaaaatccttaaaataattactgatagcccattataactgattttaaaatccttaaaaatmatttcatttttcagttacttataaaactttttcttgatctttcagacctactttgaagaaaagttgatctgtctctgtattaccattttccaggttgttt

SEQ ID NO: 29704 - DNA, 201 bp, Homo sapiens
ttctggattcatagaagagggactagccctgacatacagcagcagcctagcctctaatatttctagagagtggagagaggcgggcaccatgcagggaagcrtgtgccttcaccactttccgagaactgaatgtccttgatagggaacttgactgccggaaaggggccaccagcatcaccatttccttcactcgacggccaa

SEQ ID NO: 29705 - DNA, 201 bp, Homo sapiens
gattggcctgtggcaatcttgagcaactatgcagagacaggcagtgggaaaaacaattcaggatggcaatgggagcacattctagagattacagaagctgrtgtagaaaagcaggatgaaaagttaggttggggccaaaaaccagagaagaaaagtacactggaaaaaggattgagtatcaagtgctgcagaggatctcag

SEQ ID NO: 29706 - DNA, 201 bp, Homo sapiens
gcatgggcagcaaagcaagaccctgactcaaaaaaaaaaaaaaatcaggcaattaatagccctaaaatggctactgtttcataaaagaatgagttgcacayctcttactttaaatcaaaactagaaatgattaatgattaagcatggtgaggaaggcatgttgaaacagctaagtcgtgaatgcaaaggaaaagttcttga

SEQ ID NO: 29707 - DNA, 201 bp, Homo sapiens
aagaattgtcaatcaacgtgacaaatttcattattgtcttattttaagaaactgcaacagccaccccaactttcaagcaccaccttgatcaacagccatcracattgaggcaaaaccctccaccagcaaaaagattatgactcattgaaggctcagctgatggttagcagtaaaaaatattaactttaatcatctcgacca

SEQ ID NO: 29708 - DNA, 201 bp, Homo sapiens
aaaataattactgatagcccattataactgattttaaaatccttaaaaatcatttcatttttcagttacttataaaactttttcttgatctttcagacctmctttgaagaaaagttgatctgtctctgtattaccattttccaggttgttttacgaatacgtgttgtagtcatccattaagcaatccagccgagcttgagg

SEQ ID NO: 29709 - DNA, 201 bp, Homo sapiens
tagaaaagcaggatgaaaagttaggttggggccaaaaaccagagaagaaaagtacactggaaaaaggattgagtatcaagtgctgcagaggatctcagagrtcaagaatttagagcggaacgttgagcttggccttcaggagcatgactgtgataaaaggccagctgtgaaacctgtaggagaaatgatgacccagatagt

SEQ ID NO: 29710 - DNA, 201 bp, Homo sapiens
cccggtcgcagacaccgcagaaaggccatcgttctagacatacgagaactccccgtgcagccaaacgctgtagtcccagcggcggaactcggggggggggrggggggggagtgcccaaccagccagtcagcagtgacgtcccgcctttcctccgtttccattggtccagccatgcggaggtcgctcccatgggacgccgag

SEQ ID NO: 29711 - DNA, 201 bp, Homo sapiens
tcatacaaataatttttctgataacccaggagcttgggttgagaaaaactggattaagtcttactgtgacattggtagaaaggttattgaatgtctggcasgagttgtgccttgaaaaaatggatttcaaccaagattggcctgtggcaatcttgagcaactatgcagagacaggcagtgggaaaaacaattcaggatggc

SEQ ID NO: 29712 - DNA, 201 bp, Homo sapiens
gcactaaggtaggaatgggccaactatggcctataggccaaatctggcctgctgcctgttgttacgtcctgtgagctgagtgtttttctcatatttaaacrgatggagaagaatcaaaatattttgtgacacatgaaaattaaatgtaattcagtgtccataaatattggcatgcacccacactcagtttacatactgccc

SEQ ID NO: 29713 - DNA, 201 bp, Homo sapiens
cacttgaaactaatgatgtaatcatttttccatatataatattaagatttccatataccattgataggagattaatgctttaaccaagttctaatcctaaractatactgctgttcgagatatcgctgtaatacagtgagctaattttagattttttttgttacggtggccgatgttttaattacttttttttttttaatg

SEQ ID NO: 29714 - DNA, 201 bp, Homo sapiens
cagtgcgtccctgtgggaactgccctccacctgctccctggggacaagtccaggtcgtacccgcagtgcgtccctgtgggacctgccctccacctgctccmtggggacaagtccaggtcgtacccgcagtgcgtccctgtgggaactgccctccacctgctccctggggacacgtccaggtcgtacccgcagtgcgtccct

SEQ ID NO: 29715 - DNA, 201 bp, Homo sapiens
ccgcatatacatagtaagatatcctagggatgggacccaaggctaaactcaaagttcatttatgtttcatgtatacctcatgcacgtagcctgaaggtaattttttttttttttttgagatgacgtctccactgttgcccaggctggagtgcagtggtgttaacctcggttcactgcaacctccatctcccaggttcaagc

SEQ ID NO: 29716 - DNA, 201 bp, Homo sapiens
cctgtgggaactgccctccacctgctccctggggacaagtccaggtcgtacccgcagtgcgtccctgtgggacctgccctccacctgctccatggggacamgtccaggtcgtacccgcagtgcgtccctgtgggaactgccctccacctgctccctggggacacgtccaggtcgtacccgcagtgcgtccctgtgggaact

SEQ ID NO: 29717 - DNA, 201 bp, Homo sapiens
tttttccatatataatattaagatttccatataccattgataggagattaatgctttaaccaagttctaatcctaaaactatactgctgttcgagatatcsctgtaatacagtgagctaattttagattttttttgttacggtggccgatgttttaattacttttttttttttaatgtcttaggttcctccagaagaaatt

SEQ ID NO: 29718 - DNA, 201 bp, Homo sapiens
atattcgttgttactttgagaaacaaggtgtttcccagatttttatgcactgccctataagtaggtgatacagtgtgggttcagggcttgcctcgctcacrctcacggagctctttgctacatgtccagtctctatcccagggacgcccctgcagaacatctgcagtggttacatcagccttggtgtctgcacaatcggat

SEQ ID NO: 29719 - DNA, 201 bp, Homo sapiens; identical to SEQ ID NO: 3736

SEQ ID NO: 29720 - DNA, 201 bp, Homo sapiens
cattgataggagattaatgctttaaccaagttctaatcctaaaactatactgctgttcgagatatcgctgtaatacagtgagctaattttagatttttttkgttacggtggccgatgttttaattacttttttttttttaatgtcttaggttcctccagaagaaattaattatttaacacgaattcactacaaagctcagt

SEQ ID NO: 29721 - DNA, 201 bp, Homo sapiens
atctgatcgggaaaaaaacgcaaacacttgaaactaatgatgtaatcatttttccatatataatattaagatttccatataccattgataggagattaatsctttaaccaagttctaatcctaaaactatactgctgttcgagatatcgctgtaatacagtgagctaattttagattttttttgttacggtggccgatgtt

SEQ ID NO: 29722 - DNA, 201 bp, Homo sapiens
gaaactaatgatgtaatcatttttccatatataatattaagatttccatataccattgataggagattaatgctttaaccaagttctaatcctaaaactakactgctgttcgagatatcgctgtaatacagtgagctaattttagattttttttgttacggtggccgatgttttaattacttttttttttttaatgtctta

SEQ ID NO: 29723 - DNA, 201 bp, Homo sapiens
ttacctttccaggttagtacacttttaatgtacaatattgtgtttgtacattaatttgactttttatcattctgaattcttggagccaaggtcacaaaggraaatcctgtgaatggcataattttatattctgcataaagtgagtttacacaatgagtgcaacctaatacaacagcaagaaaaaataagaactagtaagca

SEQ ID NO: 29724 - DNA, 201 bp, Homo sapiens
aaacgcaaacacttgaaactaatgatgtaatcatttttccatatataatattaagatttccatataccattgataggagattaatgctttaaccaagttckaatcctaaaactatactgctgttcgagatatcgctgtaatacagtgagctaattttagattttttttgttacggtggccgatgttttaattacttttttt

SEQ ID NO: 29725 - DNA, 201 bp, Homo sapiens
acagcaagaaaaaataagaactagtaagcaattgggcaatatgtataatttacatatttatctttaatctgtattatctacactttgatcttttttggttraagaagtattaataaggaacctacctacaaatgtagtctgtttcacaacataattactgatagcccattataaccaattttaaaatccttaaaataatta

SEQ ID NO: 29726 - DNA, 201 bp, Homo sapiens
ttcagtaaaatctatgtatttgaaatagagtcacatagaaagtagagcacatgggatcttcaaaatatattgggtagaaaaatcagaaaacaaaaattatwattcattcagaaataaaggagaagaaaaaagggaataaaaaacttcaaggtcagactatgtaaaggtgccctgaaggatacaaagattagaaagcttaga

SEQ ID NO: 29727 - DNA, 201 bp, Homo sapiens
aggccaaagcaggcagatctcctgaggttaggagttcgagatcagcatggccagcatggcaagacttcgtctctactaaaaatacaaaaattagcctggcrtggtggtgcacgcctgtagtcccagctacttgggaggtcaaagcaggagaatcacttgaacccaggaggtgggggttgtagtgagctgagattgcaccat

SEQ ID NO: 29728 - DNA, 201 bp, Homo sapiens
gccgctgggttctccggaagccgccccacacctccgccccacacccggcggcgccggaagtcacgccccggcttccgccccgcagccccgaggggtctggkcgcgctgaagaccccttcggctgctgggccaacgcccccacccttggtcacctactcctgccgccgagcggttcgcgggaggtggcctcgggggtcgtag

SEQ ID NO: 29729 - DNA, 201 bp, Homo sapiens
ctgaagctgaggtggggaactcaccccttttgggggcccctccaggggccctgctcttgctgggggctccccaggatcagccagaagggctctgagaccayccaggaggatgtccctgtggggtgtccttggtgtggttgggggagaggctgcctgtctcctcgggtcctggagaaggtgccctctttggatcaccagaaa

SEQ ID NO: 29730 - DNA, 201 bp, Homo sapiens
aaaccaccctgaaggagcaaatgcgggagctcagggaggaatgggaaaggggcctgagtgctctgtaagggtggcctccttcccagctgccacattgactcaggaccctccaacctgggcaattgttcctggactcatagccacacaagctgcctggtggggactgcagagatgggagtgccagcacatcacaaagagaga

SEQ ID NO: 29731 - DNA, 201 bp, Homo sapiens
cggctaatttgtttatttttagtagagacaaggtttcaacatgttggcccttgacaacaagctggtcttgaactcatgatctcaggtgatccacccacctyggcctcccaaagtgctgggattacaggcatgagccaccgtgtccggccccttacagccatattttctaaatttttcatcacccatcatacttctttttgt

SEQ ID NO: 29732 - DNA, 201 bp, Homo sapiens
agctcattccctccttgattcagtcactggcgtgagcactcatacagtggaggtgctgtcctggtccctggagcagcccccgcctagggacatgtatcatyggctctggccagcaccatagtacataaacttgtcctcttccagagcaccattccaactgtccgccccattctctatgtgtgtctatgtccagagtgcaag

SEQ ID NO: 29733 - DNA, 201 bp, Homo sapiens
gggaactcaccccttttgggggcccctccaggggccctgctcttgctgggggctccccaggatcagccagaagggctctgagaccacccaggaggatgtcyctgtggggtgtccttggtgtggttgggggagaggctgcctgtctcctcgggtcctggagaaggtgccctctttggatcaccagaaactccgaggagacac

SEQ ID NO: 29734 - DNA, 201 bp, Homo sapiens
agggaaccacccgtgagccccagggcttgggaagcctgaggcgggcctctgcctctccctgcccccagcacaattggcagagatgaggcgggtggtggacrgctgggctgtcgtggcagggtctgcacagggccatgtcctggctgtaacccaggcagtgggaggtctgcagcctggtcatggcctccacagcaggtccct

SEQ ID NO: 29735 - DNA, 201 bp, Homo sapiens
ccctgtggggtgtccttggtgtggttgggggagaggctgcctgtctcctcgggtcctggagaaggtgccctctttggatcaccagaaactccgaggagacrcacgccagaagctgcccatggacttgctggtgctggaggatgagaagcaccacggggctcagagtgcagccctgcagaaggtgaaggtaagcctgggagg

SEQ ID NO: 29736 - DNA, 201 bp, Homo sapiens
tgcttgaacctaggaagtggaggttacagcaagccgagatcacaccaccgcactccagcctgggtgacagagtgggactcggtctcaaaaaaaaaaaaaaatacacaagctggccctctggatgctccctgaggagcccagccagagtcccacatgcagcagtagctgcagccccaggttatctttcattcttggaagaag

SEQ ID NO: 29737 - DNA, 201 bp, Homo sapiens
gtcctggggaggacaccgcgagggggcggagggggagcccgggaggcttcggattgctgggacggcccgtgactgctgcgtccacatctgcagactggccytgtggatgaggagaccttcctgaaagctgcggtggaggggaaaatgaaggtcattgagaagttcctggctgacggggggtcagccgacacgtgcgaccag

SEQ ID NO: 29738 - DNA, 201 bp, Homo sapiens
tcccaggctggtctggatagagcataagggagctggcagaacacagaaaacatgggggccaagcacaggggtgagaatcaagctggggggaaggcctgggmctcagcttgggtgggagatgggctcaggcctggagccagaggccaggccctgacagcctctctggggacagttccgtcggacagcactgcaccgagcttc

SEQ ID NO: 29739 - DNA, 201 bp, Homo sapiens
gggggcacctagggagggtgcagcagggggcctgcctgtcagacatccttggggagcctgccctttcaagcatgaatcataccaccagagatcacccagcktgctcttagctctgcctgcctggtgtagggtcctggagaccttcttggagctcatccagcagccatcatgcaaggtggtgctggggactgccctcttgct

SEQ ID NO: 29740 - DNA, 201 bp, Homo sapiens
agggcaaaacaggcatgcttggcagaggaaaccacctgtagagaggcatggcttgatgtgcctggggggcagtgagaaggtcgggttccctggggcagagrgctcccaggctggtctggatagagcataagggagctggcagaacacagaaaacatgggggccaagcacaggggtgagaatcaagctggggggaaggcctg

SEQ ID NO: 29741 - DNA, 201 bp, Homo sapiens
tcggcctcccaaagtgcttggattataggcgtgagccactgtacctggcctatttattttttgaggcagggtcattctctctctctctcactgtcactcargctggagtgcagtggcatgtccttggctcactgcaacctccccttcctgggctcaagtaatcctcccacctcagtctcccaagtagctggcactacaaca

SEQ ID NO: 29742 - DNA, 201 bp, Homo sapiens
tgctcagggtctgaagcagctgctgtctccctcctctgcccccatcccctggctctcccctgggcacagtgccactcccttggaagggagggaaccacccrtgagccccagggcttgggaagcctgaggcgggcctctgcctctccctgcccccagcacaattggcagagatgaggcgggtggtggacggctgggctgtcg

SEQ ID NO: 29743 - DNA, 201 bp, Homo sapiens
gtgcccaagggggtctgaggagatccagttctgctgtcaaggggagggagatcctgtctgctacacctgtggtggggaggggggcagatgtccccaggggyccagttgggcctcattcctgtcccagggtattactggcagggggtattgctggcagcagaagactgaggcttcagccttcaaaattaagtcagtgagatg

SEQ ID NO: 29744 - DNA, 201 bp, Homo sapiens
ctcctctgcccccatcccctggctctcccctgggcacagtgccactcccttggaagggagggaaccacccgtgagccccagggcttgggaagcctgaggcrggcctctgcctctccctgcccccagcacaattggcagagatgaggcgggtggtggacggctgggctgtcgtggcagggtctgcacagggccatgtcctgg

SEQ ID NO: 29745 - DNA, 201 bp, Homo sapiens
cgggctcaagaaaggctaaagggataatgagaaaagcaggaaaatatggagaaggtataaatgaggggttttcaccctcagcattattgacatttagggcygggtgattgtttgttgtaggggaccatcctatgccttgtaggatatttaagcaacattcttggcctctgcccactagatgccagtagtacccatccccta

SEQ ID NO: 29746 - DNA, 201 bp, Homo sapiens
gtccttggaaggggaaggtgcccagggaacaccttggactagggaacacttagtccaagttcttctttggggcccagagcattcacaaaaggaggccatgrgagagtccctcgggctcaagaaaggctaaagggataatgagaaaagcaggaaaatatggagaaggtataaatgaggggttttcaccctcagcattattga

SEQ ID NO: 29747 - DNA, 201 bp, Homo sapiens
tgggaaaacatgtgtaaatgaattatttattcaacataaggcaaatgtcttgtaagcttttgccatgtccattacatagtcatctctcaataaatgacatmtattatgattattaaaagaagggtagaagagtgagcagctgggtgagaggagaatcacagaaggcttcccagaggaagtggcatttaaggctttagagtt

SEQ ID NO: 29748 - DNA, 201 bp, Homo sapiens
gccatgcattgggcctgccgcgggggccacttagaggtggtgaaacttctgcaaagccatggagcagacaccaatgtgagggataaggtgaggcaaaaacrctcagaagcaacagatattggggtggctgtggggagaaaggcaggggtccaagggcaggaaagcctagggggcaggaaggtagtgagctagtctggtttc

SEQ ID NO: 29749 - DNA, 201 bp, Homo sapiens
cttgctgggggctccccaggatcagccagaagggctctgagaccacccaggaggatgtccctgtggggtgtccttggtgtggttgggggagaggctgcctrtctcctcgggtcctggagaaggtgccctctttggatcaccagaaactccgaggagacacacgccagaagctgcccatggacttgctggtgctggaggatg

SEQ ID NO: 29750 - DNA, 201 bp, Homo sapiens
tctccaagctttatgacttcccatctctcccattctctaggagacatattaggctctgccatgcaaaacacacaaaatcttctccagatgccctatggctrtggagagcagaatatggtcctctttgctcctaacatctatgtactggattatctaaatgaaacacagcagcttactccagagatcaagtccaaggccatt

SEQ ID NO: 29751 - DNA, 201 bp, Homo sapiens
acccaaatctgtcttaattttttttctttccaatgtcacagatcttggaaatgcttgaagaccacaaggctgaaaagtgctttgctggagtcctgttctcwgagctccacagaagacacgtgtttttgtatctttaaagacttgatgaataaacactttttctggtcaatgtctttccctgtttcctgttcattcaataaa

SEQ ID NO: 29752 - DNA, 201 bp, Homo sapiens
cagtccagtgaaatcacaagaaccataaccaaactctcatttgtgaaagtggactcacactttcgacagggaattcccttctttgggcaggtggagtattytccagttcactcatcaacccatgtactgttacctaattagcacaatagttatggtttgtgctaaaaccatgcctggttaatgttatcatttaatataacc

SEQ ID NO: 29753 - DNA, 201 bp, Homo sapiens
gtctgagaagggaagaaaatcctgtcacatgctacagcatgaatgatccttgaggacgttatggtaagtgaaataagctagtcacaaaaagaccaatactrtatgattcacgtacatggggtttctaaagtagtcaaagtcatagaaacagaaaacaggatggtggttgccaagggctagggaaagagagaaatggggaat

SEQ ID NO: 29754 - DNA, 201 bp, Homo sapiens
aaggaattaactaaaacctctgtgcttcatttccttatctgtaaaatgattgcaatactaacacctgactcttggggtggttgtgaagattaagtgaaatmatacatgttgaatcacttagtaagccccctttaactgttagatacttttactataaaagccaattctaacataattagcatttagttttaaatatatata

SEQ ID NO: 29755 - DNA, 201 bp, Homo sapiens
ttaggattgattactactaaattagtgtatgttatgtatatatttatttagcatctatctctttcactagacagtaagctctgtgatggaagaaacttcgtttttttttcactgctgtgtcctcagtgcctggaaccatgttcaacatagaggaggcactaaaaaatgtgataaatgaatatgtttggtgcctattagtta

SEQ ID NO: 29756 - DNA, 201 bp, Homo sapiens
tcaaaaagtgtcttgaatgctttccacgtgccagcactgtgctagtcttgacaatgaaattattatttctacctgttccctgtttggggtgatcatatatrtgttgtcaccaaaatatacattaagatatgaacaaaatgttttgctcaaggattcactagtgctattgggagctggggatgaaggtagaggaagcctgaa

SEQ ID NO: 29757 - DNA, 201 bp, Homo sapiens
gagcattaaaaatagtcagcctaggccaggcacggtagctcacgcctgtaatcccagcactttgggaggctgaggtgggtggattgcgtgaggccaggagwtcgagacgagcctaggcaacgtggtgaaaccctgtctctacaaaatatacaaaaaattagctgggtggggtggcatgcacctgtagtcctagcaactcag

SEQ ID NO: 29758 - DNA, 201 bp, Homo sapiens
gccaagattgtgccactgtactccagcatgggcgccagagcaaaaccctgtctcaaaaaaataataataatagcaatcagcctaagatagcccagaagagstagacttcagctaattcatcagctcagctcttaaaccaatgctttctaccaatgtcttctcagacccctaaggttacaatattttatttattcataatac

SEQ ID NO: 29759 - DNA, 201 bp, Homo sapiens
aaggatgcctccttttatgctcttaagaaatataaatctcaatcccaggaggctctgcagtgtaaagtcacaaagcatgcctacatttgaagcagagaaasaaaatcaggggtccttctcccacttttcattgtggaacaaaagatttctagctactagttaaggtaggacagtaaacttacgtagttttgtgagaacatt

SEQ ID NO: 29760 - DNA, 201 bp, Homo sapiens
gaaacgttgggaaatatgtaagcaagtttttaagactactaaggagccaaaagaaaaatgcaagagcacctagacccatgcatgtcccaccacaattaatragcaccttgccgtgtatcaaagataaaaatggcatttcatgactagtaatttataagaataattagaaataattctactggctcaagtgattcttgagaa

SEQ ID NO: 29761 - DNA, 201 bp, Homo sapiens
tttgttttcctatacctggcttatttcacataacataatctcctccagatttaatcatgctgccataaatagcagaatgttcttgttttttaaaatggaayggaattctatgtgtatataccaaattttctttatctgttcatctgttgatgacacttatgattccataactagacagacatcagtaatttgttagggatt

SEQ ID NO: 29762 - DNA, 201 bp, Homo sapiens
acaaagtgatgttatgatttatgaataaaatgtgaaataattaaatcaagctaacctgaaatacttatgttttgtggtgggaacatttgaaattctctaascaagtttgaaacataaaatacactattattaactatattcaccatgctgtgcaatagatcccaaaaagaaaaaaatgtattccttctgtctgagactttg

SEQ ID NO: 29763 - DNA, 201 bp, Homo sapiens
agagtccataggattgcttatgggtaatgatttggaatagatttggtttcccactgtactgattaggtttccttgggcactatgctacccagaactaaggsaaagaatactctctgctcatggagacccaaatctgtcttaattttttttctttccaatgtcacagatcttggaaatgcttgaagaccacaaggctgaaaa

SEQ ID NO: 29764 - DNA, 201 bp, Homo sapiens
aattctatgacccatcttaatgattacatctgaacatatttacttatagttacataagtgtttatttctcaacctgtaaaattgcatagcaaaggattgawcttcactaggatgctataagcacttaagacatgttaatccatttttagtaaatggcactttacatgtatatttgttgctgaaggcctagtaagttcttaa

SEQ ID NO: 29765 - DNA, 201 bp, Homo sapiens
gacctacctcaagtaaaatgttcactgccatggcatgtgagggaaaagggaaataattcttatgcatggccttcaacggccaaatttcatgctcatcagtrcatcttctcttggtgtagaactgatgatgataattatgatgatggaaaaaagtgctgttgatagcaatgcctctcttccttcactttcctctaactgaac

SEQ ID NO: 29766 - DNA, 201 bp, Homo sapiens
ttgggcaggtgaggacaggacagatgaggacagcagctgttctctctgagaagtcctaactcagaaaacaatgggacagatcagagaaagggttagggacrtggacaggaattctgggaaagggcaaaaaactgattttgtctttgatgttctatagacatccttgaaatacaatattctcccagaaaaggaagagttccc

SEQ ID NO: 29767 - DNA, 201 bp, Homo sapiens
ttaatgatgtatgtatccccagcataagacaatactaatatcaaaatactattaaagtcaatctctatcaaagccttatcctttttccagctcagaaatayaatcacatgtgtttgtatgaatgctgaccatgtgcagagcactgcgctaggacccatgactacaagaaaaagattgtcagcaggttcctgcttttcaatt

SEQ ID NO: 29768 - DNA, 201 bp, Homo sapiens
gaaaaatgactggataagtaggataagatcaattaaaattatatttatctaggaattaattgctttgagctctcttgtgggctttcattggtaaggaattwtatatatatatatatataactactcacttctgcagttaaaaaaataaacaaaatacaatatattgaatcaaataaaagaatttttaaaaggacaaaatgt

SEQ ID NO: 29769 - DNA, 201 bp, Homo sapiens
aggaaaaatgactggataagtaggataagatcaattaaaattatatttatctaggaattaattgctttgagctctcttgtgggctttcattggtaaggaattttatatatatatatatataactactcacttctgcagttaaaaaaataaacaaaatacaatatattgaatcaaataaaagaatttttaaaaggacaaaat

SEQ ID NO: 29770 - DNA, 201 bp, Homo sapiens
ctgaggcaggagaatcacttgaacccaggaggcagaggttgagtgagccgagatcgtgccactgcactccagcctgggcaatagagcaagacttggtgtcaaaaaaaaaaaaaaaaaaagaattacatcagttgaaataattgctgtcccaagctacacataatttctgagggaacatatgtattatctctgaggaacaaa

SEQ ID NO: 29771 - DNA, 201 bp, Homo sapiens
caattgtaataacctcttactgaagctttttctactaccataatttaacaaagagaaatttatatttttattttcctgaaatagaaacttataaaaaaatrtttcttacttgtttgtccttctaatgggattttaactgaaaatattagaatacttctaaaggaagcatcaagtacatttcaacagtaggatctcaagagg

SEQ ID NO: 29772 - DNA, 201 bp, Homo sapiens; identical to SEQ ID NO: 3753

SEQ ID NO: 29773 - DNA, 201 bp, Homo sapiens
taatgggattttaactgaaaatattagaatacttctaaaggaagcatcaagtacatttcaacagtaggatctcaagaggatatgtgggaaaataatatacrtgttttatacttttataatataattttataattctcaaagaatttttcaaattataacaaccctgatgggtagataaggcagacagtcctatttattaat

SEQ ID NO: 29774 - DNA, 201 bp, Homo sapiens
gacagtaaacttacgtagttttgtgagaacattaatctttatgacgtataatctaaaaataatataatttttctaattcattaggtcaattacaaggatcrtagtccctgttacggctaccagtgggtgtcagaagaacacgaagaggcacatcacactgcttatcttgtgttctccccaagcaagagctttgtccacctt

SEQ ID NO: 29775 - DNA, 201 bp, Homo sapiens
agtgtaagggctaatcatcaaatagttttactaaatttcattttaattaccaacataatcaaatgtgcctacctaattttacaaaaatatattcttctttaaaaaaaaaaacagaacatcacattaaaggttaatgtcacccccctgaacatttttcagtactttgccatccatttatctttagaaataatgtgtgtagat

SEQ ID NO: 29776 - DNA, 201 bp, Homo sapiens
ccattagctcacattgttacctatttttgtgtgcatagcaagcacacctaaaatctatcctcttagccaagtttcagtatccaatacagtattatcaactrcagtcctcatgctgtactttagatttctaaatttattcatcctacgtaacttcaactttgtaccctttgacctgcttcttcccatccctgcaaccccaac

SEQ ID NO: 29777 - DNA, 201 bp, Homo sapiens
tctccatactgttttccataatggctgtggcaatgtacatttgcaccaaggggagtgaacaaattccttccagagagacactggaaacagagttttatccstgaaacaagccagtggggcaggtggagagaaagagccggaatggccatatactccctttcaggctcctggagtcttgtttacttctccctttcactccca

SEQ ID NO: 29778 - DNA, 201 bp, Homo sapiens
gtagccatcaagtaaattaaaagttgcattcctaggaatactgcaaactcttgtatgcaaaatatgcttactagatattcatgattgtaaaagttacaggttttgagatctccaaataccaaattgcaccataaagcaagtttctagcccttataacccttcaaagttagtatttgtgtggtatgaagaattctgacaggg

SEQ ID NO: 29779 - DNA, 201 bp, Homo sapiens
aataaaacaaaagtttacagagcattgaacatttctaaatcttgagtttggaggcatggaggaaggggaagatgctattcatttctactggcctttttttwcaggaaatgtgaatttcactgtgagcgcagaggcactagagtctcaagagctgtgtgggactgaggtgccttcagttcctgaacacggaaggaaagacac

SEQ ID NO: 29780 - DNA, 201 bp, Homo sapiens
tcaaaaaagaatcttaaagatgtatcttttgaatgtgagaataacagataaaaataatattatatctattgataagaatgaggaatcgttggaaaaatgcrtttgaaaaacttctgtgctgtgatccgtgtatttgcctgggaatgctaatatgcctgtttacatagcttagttcccttcttgttctgccttcacagcacc

SEQ ID NO: 29781 - DNA, 201 bp, Homo sapiens
attcatctgttgccaagatgtaacacataaaatgtaccctaaaaacataacttccttgtcatttagccttatttctacatttaagtgaactgattacctaycattcaatccttttatcatgacttctccgtttctgagttactcattttgatgtatctcttaagtgtaagggctaatcatcaaatagttttactaaatttc

SEQ ID NO: 29782 - DNA, 201 bp, Homo sapiens
ttttctcttttttcagtggtggaattgactggaaggcagtccagtgaaatcacaagaaccataaccaaactctcatttgtgaaagtggactcacactttcracagggaattcccttctttgggcaggtggagtattttccagttcactcatcaacccatgtactgttacctaattagcacaatagttatggtttgtgctaa

SEQ ID NO: 29783 - DNA, 201 bp, Homo sapiens
cagaatgcccagggcggtttctcctccacccaggttggtgatttgccaaaaccttttatttcaccttcaggtagcaaaagatttgaatgaaaaagaaacaracacatccaagaagaaaaaaatacagatgacagtaacttgaaatgaggaaaagttttcagtatccaaggataatggaaataaaagcaaatcaaagtcaaa

SEQ ID NO: 29784 - DNA, 201 bp, Homo sapiens
atccttgtcttgttccagatcttaaaggaaagtctttcaattttccactgttaaatatgtaagctataggtttatcatacatgccctttattgtgttgagraacattgcttgtatatctaatttggtgagagttttatcataaaagagcattgaattctgtcaaatactttttctccatctaacaagatgatggtatggtt

SEQ ID NO: 29785 - DNA, 201 bp, Homo sapiens
ctgtctttattcatccaacctcctaaatctagctatataaccatgtatctgaacaattcattgatatgtacacagcagaaagttttatcttcagagaattyggatgtttgcttatataccctaaaacggaaaaaatgtgacaaaatggcattccatcctatttccattgtattaatcttttatcatatgaatgaaaaaaac

SEQ ID NO: 29786 - DNA, 201 bp, Homo sapiens
ttctgtaaatgtaatgtatcacatttattgatatgcatatgttgaacaatttttgcatctcagggataaatcccacttgactaggtagatgatccttttamtgtattgttggatttagtctgctagtttatttcgtgtggttggttggttggtttagttttttaagtgatgagcttttgctgtgttccccaggctggactt

SEQ ID NO: 29787 - DNA, 201 bp, Homo sapiens
tgctagtttatttcgtgtggttggttggttggtttagttttttaagtgatgagcttttgctgtgttccccaggctggacttgaactcctgagttcaagcartcctaccacctcagccacccacaggtgtatgccaccatgcttagctgctatgctagtattttattgaggatttttgcatctatattcatcaagaatattg

SEQ ID NO: 29788 - DNA, 201 bp, Homo sapiens
cccacagacgcctcagtctctggaaaaccgtgagttccacacagagagcgtgaagcatgaacctagagtccttcatttattgcagatttttctttatatcmttcctttttctttcctatgatactgtcatcttcttatctctaagattccttccagattttacaaatctagtttactcattacttgcttacttttaatcat

SEQ ID NO: 29789 - DNA, 201 bp, Homo sapiens
aatttctctttcatttctgattttatatatttaaggcctccctcttttttcttagctaacctagctaaaagtttttgtctgtctttttaaaaaaacaattyagtttcattgatcttttgtattctttttctagtctctatttgatttatttctgctctaatctttattattttcctttcttctgccaattttgagcttact

SEQ ID NO: 29790 - DNA, 201 bp, Homo sapiens
gaacaagcgcctcactgcatctgtgcaaacgggcggcaaactgtgtcctgggcagtaaccccaaagtcattaggtgagcaaaaaactgctagagataattstctactcaaagattgtatatggcagtgggaaccttatattgagtgctacttccttcaggaaaagaccactagatgctgcgatttttttcctttgcctttt

SEQ ID NO: 29791 - DNA, 201 bp, Homo sapiens
atttctctttcatttctgattttatatatttaaggcctccctcttttttcttagctaacctagctaaaagtttttgtctgtctttttaaaaaaacaattcrgtttcattgatcttttgtattctttttctagtctctatttgatttatttctgctctaatctttattattttcctttcttctgccaattttgagcttactt

SEQ ID NO: 29792 - DNA, 201 bp, Homo sapiens
ctcaatcccaggaggctctgcagtgtaaagtcacaaagcatgcctacatttgaagcagagaaacaaaatcaggggtccttctcccacttttcattgtggawcaaaagatttctagctactagttaaggtaggacagtaaacttacgtagttttgtgagaacattaatctttatgacgtataatctaaaaataatataattt

SEQ ID NO: 29793 - DNA, 201 bp, Homo sapiens
atttggagtctttccatttcccatgggtgacattgggcttggagtagaattaattacacctaagtccaatgaggacatcagtgatctgtgaataggacttmacatagcttcgttattttctgtagcaatatttaataccaacccccaaaattaaaacattcttgttttaatggagttttccataattaattaagcacacag

SEQ ID NO: 29794 - DNA, 201 bp, Homo sapiens
tcagtttcattgatcttttgtattctttttctagtctctatttgatttatttctgctctaatctttattattttcctttcttctgccaattttgagcttastttgttcttcttttcctacttctctgaggaatatcattagtatctttattggaaatttttcttcttttttggtgtttattgttataagctttcctcttag

SEQ ID NO: 29795 - DNA, 201 bp, Homo sapiens
tagggaacaaaaagcttcaggattgacacaatgccaaccctccacgaagtcaagcagagtggttatacattgtacatgaggaacactctgcaaatgcgagygaatgcatgggtaaacctggaaatttgcttttctgaccttttgttccaatttcacaggtggatttgagcttcagcccatcacaaagtctcccagcctcac

SEQ ID NO: 29796 - DNA, 201 bp, Homo sapiens
tcttcctttgtggtctgatgttctgtagtggtatgatttgaatcttttaaaatttttgttctgtgcttctattaaagatttttgccttgctgttactatgrggtttacagtcaatttcaagctgataacaacttaactttgcattctttcactcccccacacacattttatgtcgttgatgtcagaatttacatattttgt

SEQ ID NO: 29797 - DNA, 201 bp, Homo sapiens
ctttgctggatgaagaattcttgattccatgttgtttttatttttgttttccttcagtactttgaatatattattccactctccctcagcctgccgggttmctgctaaaaatccatggatagttgtattggaattcctttgtatgtgatatgtttctttatcaccttctgcttttcagaatttttttttgtctttgatttt

SEQ ID NO: 29798 - DNA, 201 bp, Homo sapiens
acagttggaagaaaaggacttatattcccatctcaatccttgattatactctccattattggtatttctattgagtgtttttaagtcatggcagtagaatmattcctagggattctctccctagaaaggatgtatttaactgcttactttctgttcttcacttacactcctctccagctcagcaggtgtggctgaggtagg

SEQ ID NO: 29799 - DNA, 201 bp, Homo sapiens
tatttagtctagcctataattctggaaagatcagttggtgacaaccttgagcaggcagagttttcatgggttccctagttggctgggccactgcctttgcycttatgtttggtagggccactggttgggccttgctctctggcaagatcactgttttgtctctgctatctggtggagctgctggctgggtactacaatggc

SEQ ID NO: 29800 - DNA, 201 bp, Homo sapiens
agagggaagtacagacagggaatatactgtagctaaaggggagatataaatagctagaaaatggggaggttcggtgtctgctctgattcctttgggaatgbtctcatgacagatacacatatgggaagcctgtccctggacatgtgactgtgagcatttgcagaaagtatagtgacgcttccgactgccacggtgaagatt

SEQ ID NO: 29801 - DNA, 201 bp, Homo sapiens
agaaaaacacatttattggagagggccgctgactctgtcaaacctcagagagtccataggattgcttatgggtaatgatttggaatagatttggtttcccwctgtactgattaggtttccttgggcactatgctacccagaactaagggaaagaatactctctgctcatggagacccaaatctgtcttaattttttttctt

SEQ ID NO: 29802 - DNA, 201 bp, Homo sapiens
agcaagtaaaaaccaaggtcttccagctgaagaggaaggagtatgaaatgaaacttcacactgaggcccagatccaagaagaaggaacaggtttgtgtacwacatgggtataagagaaaacacaacaggcattgattttcttagccaaataatgaattgtaagttggggggaggtgatagaattttagagacatcattctt

SEQ ID NO: 29803 - DNA, 201 bp, Homo sapiens
atctagctatataaccatgtatctgaacaattcattgatatgtacacagcagaaagttttatcttcagagaattcggatgtttgcttatataccctaaaayggaaaaaatgtgacaaaatggcattccatcctatttccattgtattaatcttttatcatatgaatgaaaaaaactaagtaattttgttaaaggttatcat

SEQ ID NO: 29804 - DNA, 201 bp, Homo sapiens
aaaaagggaaagccaaataaaaatgtcattaaatccagaagataattataatactcatcttttatttcttttggagaaactgaagcatgactctgctcatkgctgcaaagaaccttgggttctctccaggacactgacctcagcaactgagcaaagtttaatatgggagagagccagactgaactttgcttgagtggtggc

SEQ ID NO: 29805 - DNA, 201 bp, Homo sapiens
tgttcttctctcctttatttatatttcaccagggattacaggtagaaatggcttattatgatcttgggatatgaatattcctaaaatcccataagcaagaratcttgacaaaatgtgtttattatgttgacaagttttttggatacccagtaatataaggaagtagcccttgtgattagtcaattattagttaattatcaa

SEQ ID NO: 29806 - DNA, 201 bp, Homo sapiens
gttttaacattaattttatgagaaagggaagataactgctacatttttcatttgtatataattcaccaatactaaaattgtagtaaatgtatgttcatcartagcagttattttattttcagtgagtcaagcattttattttgcttagccatttgtcctttaactatgcttatggcttttttttaagaaacattttaatat

SEQ ID NO: 29807 - DNA, 201 bp, Homo sapiens
ttgcttagccatttgtcctttaactatgcttatggcttttttttaagaaacattttaatatgaattttatgaggaagggattcagtatgaaaataaatacyatacttctctcattttcatttcatataatttaccaagattaaaatggaagtaaatgtatgttcatgagtagtaattattttattttcaatgcatcaaata

SEQ ID NO: 29808 - DNA, 201 bp, Homo sapiens
tttgttgttggtgttttctccatacaactgttgagtaaggaagttggtggtgggaactaaatagatcatcttgtgataaccgtcttgtgtcagccatcagwtgacagcaactgaatcacaacatcaccaggctcttacaatttgttgtcttatttggcatgcgattctacataaattactgaaaagatcattgaagaagaa

SEQ ID NO: 29809 - DNA, 201 bp, Homo sapiens
ttgttgttggtgttttctccatacaactgttgagtaaggaagttggtggtgggaactaaatagatcatcttgtgataaccgtcttgtgtcagccatcagawgacagcaactgaatcacaacatcaccaggctcttacaatttgttgtcttatttggcatgcgattctacataaattactgaaaagatcattgaagaagaaa

SEQ ID NO: 29810 - DNA, 201 bp, Homo sapiens
agaccgatggtttgttatactagataaatccaccaagattagcaaggtaatcagaagaaaacctgatatccaaatacatgttatgttaggcttgtttccaraatggatcctattaataatgtaccaaggttttctttctgaaatggctattctttctaaagtagctaccataaccatgagttttaaaatgatattgccagt

SEQ ID NO: 29811 - DNA, 201 bp, Homo sapiens
aaccagaaataccatttgacctagtaatcccattactgggtatatacccaaaggaatataaatcattctactataatgacacatgcacatgtatgtttatygcggcactatttacaataacaaagtcatggaactaacccaaatgctcatcaatgacagactggataaagaaaatgtggtacatatacatcatggaatact

SEQ ID NO: 29812 - DNA, 201 bp, Homo sapiens
gggacaggaacaacacacaccagggcctgttgggaggtgtggggtgacgggagggaactaagcggatgggtcaataggtgcaagaaaccaccatggcacaygtatacttatgtaacaaacctgcacgttctgcacatgtatctcggaactaaaataaaattaaatatactaagactccctgtggcaaagagagagttagca

SEQ ID NO: 29813 - DNA, 201 bp, Homo sapiens
ctgttgggaggtgtggggtgacgggagggaactaagcggatgggtcaataggtgcaagaaaccaccatggcacacgtatacttatgtaacaaacctgcacrttctgcacatgtatctcggaactaaaataaaattaaatatactaagactccctgtggcaaagagagagttagcaaggaaatactacatctagcagattaa

SEQ ID NO: 29814 - DNA, 201 bp, Homo sapiens
tcaataggtgcaagaaaccaccatggcacacgtatacttatgtaacaaacctgcacgttctgcacatgtatctcggaactaaaataaaattaaatatactwagactccctgtggcaaagagagagttagcaaggaaatactacatctagcagattaatcaggcagactaaagattaatcaaggagataagctctctaagta

SEQ ID NO: 29815 - DNA, 201 bp, Homo sapiens
tctccattattggtatttctattgagtgtttttaagtcatggcagtagaatcattcctagggattctctccctagaaaggatgtatttaactgcttacttwctgttcttcacttacactcctctccagctcagcaggtgtggctgaggtaggagtaacagtccctgacaccatcaccgagtggaaggcaggggccttctgc

SEQ ID NO: 29816 - DNA, 201 bp, Homo sapiens
agatgctttacttcaaacccattctccctctgttctccttccctctctactccctttcttatgtgtggtttcaggtcagtgtgcagctggaagcctctccygccttcctagctgtcccagtggagaaggaacaagcgcctcactgcatctgtgcaaacgggcggcaaactgtgtcctgggcagtaaccccaaagtcattag

SEQ ID NO: 29817 - DNA, 201 bp, Homo sapiens
ctttagaaataatgtgtgtagatgtatatgtttgtggatgtgtgatttacatataataaactgtataagtttcattctataaatcactgtttgtttttcamtcagcatcctgtcttggagatttacctatgttaaattgtagatctaggtctttccttggaattgcttttaagcctataatataaatacatcacaattctg

SEQ ID NO: 29818 - DNA, 201 bp, Homo sapiens
ccagatgccctatggctgtggagagcagaatatggtcctctttgctcctaacatctatgtactggattatctaaatgaaacacagcagcttactccagagrtcaagtccaaggccattggctatctcaacactggtgagtgattacttgagtaagggaaaacttgaatgttatttcaactggatttcccagtaggtttcag

SEQ ID NO: 29819 - DNA, 201 bp, Homo sapiens
tccttccctctctactccctttcttatgtgtggtttcaggtcagtgtgcagctggaagcctctcccgccttcctagctgtcccagtggagaaggaacaagygcctcactgcatctgtgcaaacgggcggcaaactgtgtcctgggcagtaaccccaaagtcattaggtgagcaaaaaactgctagagataattgtctactc

SEQ ID NO: 29820 - DNA, 201 bp, Homo sapiens
taaatatactaagactccctgtggcaaagagagagttagcaaggaaatactacatctagcagattaatcaggcagactaaagattaatcaaggagataagmtctctaagtacacaagaattttgttagctaactcacatcatatgaagcctgttgctgtgaagtggttataaaaccattttgacaacataaacatcatgat

SEQ ID NO: 29821 - DNA, 201 bp, Homo sapiens
caggttggtgatttgccaaaaccttttatttcaccttcaggtagcaaaagatttgaatgaaaaagaaacaaacacatccaagaagaaaaaaatacagatgwcagtaacttgaaatgaggaaaagttttcagtatccaaggataatggaaataaaagcaaatcaaagtcaaagagggccaaaaggaaatgctcagaatcccg

SEQ ID NO: 29822 - DNA, 201 bp, Homo sapiens
actgtgtcctgggcagtaaccccaaagtcattaggtgagcaaaaaactgctagagataattgtctactcaaagattgtatatggcagtgggaaccttataktgagtgctacttccttcaggaaaagaccactagatgctgcgatttttttcctttgccttttattctaagatgcctacaaggatatcctcaacatctccac

SEQ ID NO: 29823 - DNA, 201 bp, Homo sapiens
tgataatgtgaaaaattctaagggaaagcctcagaggaaaataaaacctggatggcaccaaaaaagaggggatagaacaaaagttgattgtgatactttgycctatagggatggatatgggtaaggatgaattccatgacacagcagaatagaaagaactaatcaatagcattctcagaagttgaattattcagatctctc

SEQ ID NO: 29824 - DNA, 201 bp, Homo sapiens
ctgtgatccctgtctcctctcttcttttctatatatcatatatattttgtccatattgcatcttataaaatctaggatttcttaatcaaatcagaaatcaraagacaagaggccgtgcagatgcttctcaattacgatggggttatatcctgacaaactcattgtaaagtctaaaaaatcttaagtgggaccattgtaagt

SEQ ID NO: 29825 - DNA, 201 bp, Homo sapiens
ctcctctcttcttttctatatatcatatatattttgtccatattgcatcttataaaatctaggatttcttaatcaaatcagaaatcagaagacaagaggcygtgcagatgcttctcaattacgatggggttatatcctgacaaactcattgtaaagtctaaaaaatcttaagtgggaccattgtaagtcagggaccatctc

SEQ ID NO: 29826 - DNA, 201 bp, Homo sapiens
ggatttccttatatttttgctgcatatgtatccctaactaatatttagaatcttcacatgtgtttcatcttgagagaaacaagatttttatttctctcttrttcaagaaacaagagaaacatttttgaatatttcagcagcttagttttttgtttgtctgctttttattttctaagttcaacactatgttgatgaagaccc

SEQ ID NO: 29827 - DNA, 201 bp, Homo sapiens
tacctcacagagctgttgtaataaatgaattggtacacgtaaaacacttagtagagtacatgtcacatagcaaatcctataaaagtactagttattacaaytaacatatcagttctcaatatatgcccaacccttacctggtacattatataaccttaaacataagaaaataatcatggaagtaactccttgaatgaattc

SEQ ID NO: 29828 - DNA, 201 bp, Homo sapiens
attgagaaatattttataatagatatacaaaagggcataagctataactagaaaacactgtacaactctctcatagattaagaaatagaaaattaccgacrtgggaaaaataaatcccttgtgtatcactaccacctccagaggcaatcattatcctgaatttgtcgttacaattccatggatttccttatatttttgctg

SEQ ID NO: 29829 - DNA, 201 bp, Homo sapiens
agtctggttcttctcctcttggtcctcctgcccacagacgcctcagtctctggaaaaccgtgagttccacacagagagcgtgaagcatgaacctagagtcyttcatttattgcagatttttctttatatcattcctttttctttcctatgatactgtcatcttcttatctctaagattccttccagattttacaaatctag

SEQ ID NO: 29830 - DNA, 201 bp, Homo sapiens
tccagaggcaatcattatcctgaatttgtcgttacaattccatggatttccttatatttttgctgcatatgtatccctaactaatatttagaatcttcacrtgtgtttcatcttgagagaaacaagatttttatttctctcttattcaagaaacaagagaaacatttttgaatatttcagcagcttagttttttgtttgtc

SEQ ID NO: 29831 - DNA, 201 bp, Homo sapiens
gctcattaattttcactgctgcataatatattacagtctataaattagtcataatttacacatcgagtttctcctcatggattttttttatgttttgctaytaaaaaaaatgctgcaatgaatactcatgtgcctgttttcttgtgcatctgtgtttctccaaattatgctttgagaagcataatgactgattagtgggct

SEQ ID NO: 29832 - DNA, 201 bp, Homo sapiens
aattttcactgctgcataatatattacagtctataaattagtcataatttacacatcgagtttctcctcatggattttttttatgttttgctattaaaaamaatgctgcaatgaatactcatgtgcctgttttcttgtgcatctgtgtttctccaaattatgctttgagaagcataatgactgattagtgggctaagcaca

SEQ ID NO: 29833 - DNA, 201 bp, Homo sapiens
cataaaatcttcaacatgtaaaactagaagttactattgttatcatttgttttacacatgtgaacattagggccaaaagggttaaacaaattccccagagwcattcagcaaggtagtggcagagtcacactaagaagcagaatcacttgattccttatacaaaactctcaaacttctcctagcagtgcctcttaccaatta

SEQ ID NO: 29834 - DNA, 201 bp, Homo sapiens
aaaagaccatacagtacccaaagtccttaaaatcccagagctccatgcaaccagtaataggagttgtcaaactagtttcaacatttcaaaaagcctaacaraagtgatacatatacctgcactgaggctatacaggctaaatgaaatatcagatttccgtttttataagaattatggctgggcctggtggctcacgcctgt

SEQ ID NO: 29835 - DNA, 201 bp, Homo sapiens
atagctcagtcagaaggaaatgtttaatatttataaatttatggttacattctatttaaaagaggagttaaagttaaatttacctacccacatatgttacatatatatgtatttatgtatatgtattcatatatgtatatatgtgaacataagtatacatacgtatatgtatagatgcttgacaataaagaagtaagaata

SEQ ID NO: 29836 - DNA, 201 bp, Homo sapiens
tagctcagtcagaaggaaatgtttaatatttataaatttatggttacattctatttaaaagaggagttaaagttaaatttacctacccacatatgttacatatatatgtatttatgtatatgtattcatatatgtatatatgtgaacataagtatacatacgtatatgtatagatgcttgacaataaagaagtaagaataa

SEQ ID NO: 29837 - DNA, 201 bp, Homo sapiens
agtcagaaggaaatgtttaatatttataaatttatggttacattctatttaaaagaggagttaaagttaaatttacctacccacatatgttacatatatatgtatttatgtatatgtattcatatatgtatatatgtgaacataagtatacatacgtatatgtatagatgcttgacaataaagaagtaagaataattcaca

SEQ ID NO: 29838 - DNA, 201 bp, Homo sapiens
atgacagtaacttgaaatgaggaaaagttttcagtatccaaggataatggaaataaaagcaaatcaaagtcaaagagggccaaaaggaaatgctcagaatyccggcaccccatcgctgtgttattatccatctcctatttcccataacaacactgccttcctcaagcagcagtggagcaccagcagaatgaaggagatgtc

SEQ ID NO: 29839 - DNA, 201 bp, Homo sapiens
tatttatatattactgttgtattaaaggcggacaacttttcaggaggagtttaggtataaggcatagtcctagcttctgggtcatagagctgtttagaaasatataatgcagaaataattttcatatgtctgatttgcttatttctctaggtggtgaggtttctgaagaattatccctgaaactgccaccaaatgtggtag

SEQ ID NO: 29840 - DNA, 201 bp, Homo sapiens
atagggatggatatgggtaaggatgaattccatgacacagcagaatagaaagaactaatcaatagcattctcagaagttgaattattcagatctctctctygtattcacagggaggagtagaagatgaagtgaccctctccgcctatatcaccatcgcccttctggagattcctctcacagtcactgtaggtaccacccca

SEQ ID NO: 29841 - DNA, 201 bp, Homo sapiens
taaaaagggaaagccaaataaaaatgtcattaaatccagaagataattataatactcatcttttatttcttttggagaaactgaagcatgactctgctcatggctgcaaagaaccttgggttctctccaggacactgacctcagcaactgagcaaagtttaatatgggagagagccagactgaactttgcttgagtggtgg

SEQ ID NO: 29842 - DNA, 201 bp, Homo sapiens
gagtcagcctggaagacagcacaagaaggggaccatggcagccatgtatataccaaagcactgctggcctatgcttttgccctggcaggtaaccaggacargaggaaggaagtactcaagtcacttaatgaggaagctgtgaagaaaggtgagagcacacctgagatccttctcctggcccatcctctgtatcaagaactg

SEQ ID NO: 29843 - DNA, 201 bp, Homo sapiens
tttcaggtacttgatcttcatttatatcatctttaatgtgaggcaacctgaaatctaaccaattcctcaagatgctttacttcaaacccattctccctctsttctccttccctctctactccctttcttatgtgtggtttcaggtcagtgtgcagctggaagcctctcccgccttcctagctgtcccagtggagaaggaac

SEQ ID NO: 29844 - DNA, 201 bp, Homo sapiens
ggaggccaaggcgggcagattaccttaggtcgggagttcaagaccagcctgaccaacatggagaaaccccgtctgtactaaaaatacaaaattagtcggamgtggtggtgcatgcctgtaatcccagctactcgggaggctgaggcaggagaatcacttgaacccaggaggcggaggttgcggtgagccgaaatcatgcca

SEQ ID NO: 29845 - DNA, 201 bp, Homo sapiens
atactattaaagtcaatctctatcaaagccttatcctttttccagctcagaaatataatcacatgtgtttgtatgaatgctgaccatgtgcagagcactgygctaggacccatgactacaagaaaaagattgtcagcaggttcctgcttttcaatttcttcttagcttagaattttgctaagaagataaaagatatgaaca

SEQ ID NO: 29846 - DNA, 201 bp, Homo sapiens
ccggacagaagtcagcagcaaccatgtcttgatttaccttgataaggtaagagaacttccagtctatttgcaaaaaaacgtagataataatcctctaaggraacatctgggaaggtaaatgcattttagaaacatcacttccatgctagaaatttgagaattctaatgttaactctaaaagaatgttcttctctcctttat

SEQ ID NO: 29847 - DNA, 201 bp, Homo sapiens
tctctcctttatttatatttcaccagggattacaggtagaaatggcttattatgatcttgggatatgaatattcctaaaatcccataagcaagaaatcttsacaaaatgtgtttattatgttgacaagttttttggatacccagtaatataaggaagtagcccttgtgattagtcaattattagttaattatcaacatact

SEQ ID NO: 29848 - DNA, 201 bp, Homo sapiens; identical to SEQ ID NO: 3763

SEQ ID NO: 29849 - DNA, 201 bp, Homo sapiens; identical to SEQ ID NO: 3764

SEQ ID NO: 29850 - DNA, 201 bp, Homo sapiens
gtcagaaggaaatgtttaatatttataaatttatggttacattctatttaaaagaggagttaaagttaaatttacctacccacatatgttacatatatatgtatttatgtatatgtattcatatatgtatatatgtgaacataagtatacatacgtatatgtatagatgcttgacaataaagaagtaagaataattcacaa

SEQ ID NO: 29851 - DNA, 201 bp, Homo sapiens
aaggagcaatgcatgactctccagccatgggagacaaatatttacaggcaaactaaaagtcagcttaataatcacatagaaaccctattagccagaaaggaaaaaaaaaaaaagaaaatgtgacttcttaaaattaagatggaaaaaatattaataaagcaaactagaccaaggctcaacatgagccacccgtggtggact

SEQ ID NO: 29852 - DNA, 201 bp, Homo sapiens
gccaggcatggtggccagcgcctgtagtcccagctacttgggaagctgaggcaggagaatggcatgaacccaggaggtggaggttgcagtgagccaagatygcaccactgcactccagcctgggcgacagagcgagactccatctcaaaaataaaataaaataaaataaaataaaataaacaagtgaaactcgatatagag

SEQ ID NO: 29853 - DNA, 201 bp, Homo sapiens
aaaatgactggataagtaggataagatcaattaaaattatatttatctaggaattaattgctttgagctctcttgtgggctttcattggtaaggaattttatatatatatatatataactactcacttctgcagttaaaaaaataaacaaaatacaatatattgaatcaaataaaagaatttttaaaaggacaaaatgtga

SEQ ID NO: 29854 - DNA, 201 bp, Homo sapiens
gccttcgctgtgagtgtggctgtttgacttaatatacttggttcttttagtcagggtcatagggatctagtattctgtcagatgaggctttgggaggttgstaagaactgcaggaaggaatccaaatgtagcaaactaagtatagaaattaaggagcaatgcatgactctccagccatgggagacaaatatttacaggcaa

SEQ ID NO: 29855 - DNA, 201 bp, Homo sapiens
ggctaaatgaaatatcagatttccgtttttataagaattatggctgggcctggtggctcacgcctgtaatcccaacactgggaggccaaggcaggcagatmacttgagatcaggagtttgagaccagtctggccaatataatgaaaccccgtatctactaaaaatacaaaaattagtcagacgtggtggcgggcgcctgtc

SEQ ID NO: 29856 - DNA, 201 bp, Homo sapiens
gaaatatcagatttccgtttttataagaattatggctgggcctggtggctcacgcctgtaatcccaacactgggaggccaaggcaggcagataacttgagrtcaggagtttgagaccagtctggccaatataatgaaaccccgtatctactaaaaatacaaaaattagtcagacgtggtggcgggcgcctgtcatcccagc

SEQ ID NO: 29857 - DNA, 201 bp, Homo sapiens
gtagtcccagctactcgggaggctgaggcaggagaatggcgtgaacccgggaagcggagcttgcagtgagccgagattgcgccactgcagtccgcggtccrgcctgggcgacagagcgagactccgtctcaaaaaaaaaaaaaaaaaaaaaaaaaaaagtcacaaataagtttgcctttttgtctttcgtatttgtacagg

SEQ ID NO: 29858 - DNA, 201 bp, Homo sapiens
ggtattcattctttttaaatgataagtagaacctagcagtgaagccaacagttattaggcttttctttaatggaaaactttttattactgattcaatctcyttactcattatttgtcagttcagattttctatttcttcatgattcagtcttggtagtatgtatatgtctaggaatgcattcatttcttctagatcatcca

SEQ ID NO: 29859 - DNA, 201 bp, Homo sapiens
tcaaaatccaacaacctctcctcgcaaatctctccattcttaggtcccctttaataggcttttctcaaaactacacattttgtgcttcccctattcaccttttttttttttttttttttaagacagagtcttgctctgtcacctaggctggaatgcagtggtgcaatctcggctcactgcaacctccatctcccaggttca

SEQ ID NO: 29860 - DNA, 201 bp, Homo sapiens
ctgtcttaattttttttctttccaatgtcacagatcttggaaatgcttgaagaccacaaggctgaaaagtgctttgctggagtcctgttctcagagctccmcagaagacacgtgtttttgtatctttaaagacttgatgaataaacactttttctggtcaatgtctttccctgtttcctgttcattcaataaatatcattg

SEQ ID NO: 29861 - DNA, 201 bp, Homo sapiens
tcttagcacttatagctacacaaaacaaaaatagtaacagaattaatgttgtttaattcttgcaatccatggatgcataaattcactgggggaaaaaacarctcatcattctcattaaagatgtgcttcaaaagtattttaattttatatctaatatgtatgaatcatactttgtatttattttgttttgatcagttatat

SEQ ID NO: 29862 - DNA, 201 bp, Homo sapiens
cctacaagttttaatctgtttaagacctacctcaagtaaaatgttcactgccatggcatgtgagggaaaagggaaataattcttatgcatggccttcaacrgccaaatttcatgctcatcagtacatcttctcttggtgtagaactgatgatgataattatgatgatggaaaaaagtgctgttgatagcaatgcctctctt

SEQ ID NO: 29863 - DNA, 201 bp, Homo sapiens
acagtctgttccaaccttgaaaagtcttgtttcctggatcttatgttcccatccatggtggcacacagtagcagtagcaggaagagcaggtatagtcctgyccaaagatcacacatgtaatacacctactattcagctaggcccctgctccagttctgtctcacagtgatggccaagttcctggttcctcataactggtgt

SEQ ID NO: 29864 - DNA, 201 bp, Homo sapiens
aatgaattctggtattttaagcccatttcataagaccaataatgttgaccaatctactcatattcacacagtacttctacatataccatggtctatatgarcggttgaagaaatagaaaataaaatgcaaatcacaagatgtccattaaaacagtctacctttttcctttgacagccattaattcttcttaaaatgtattg

SEQ ID NO: 29865 - DNA, 201 bp, Homo sapiens
tcctgatcacagaaattcaggtttaggagatgtgttggggttatttattacattaagtaattacattatcacttcattttgtctccatcaagtctgatgcycctctttttgtctcttatacatacattatagaaacaacctacattataaatttatcaactactaatacaaaacacctgtgggatatttagttcccttttc

SEQ ID NO: 29866 - DNA, 201 bp, Homo sapiens
acattaatctttatgacgtataatctaaaaataatataatttttctaattcattaggtcaattacaaggatcgtagtccctgttacggctaccagtgggtrtcagaagaacacgaagaggcacatcacactgcttatcttgtgttctccccaagcaagagctttgtccaccttgagcccatgtctcatgaactaccctgtg

SEQ ID NO: 29867 - DNA, 201 bp, Homo sapiens
tgaattctggtattttaagcccatttcataagaccaataatgttgaccaatctactcatattcacacagtacttctacatataccatggtctatatgagcrgttgaagaaatagaaaataaaatgcaaatcacaagatgtccattaaaacagtctacctttttcctttgacagccattaattcttcttaaaatgtattgag

SEQ ID NO: 29868 - DNA, 201 bp, Homo sapiens
tgtggagcaagtaatcatgaagctctttagatgtcattacttcaacttcttatccatgttccttttgaaagtttgatttctcttgaggtgaattattgccrgcagggactcaataaaacaagtatattgaagtgagactgaagcgtgttctctctggcacatttaatttctttttatttccttttttgcagataatggcaa

SEQ ID NO: 29869 - DNA, 201 bp, Homo sapiens
ctgccacttcctaatagcttagctcctacttctgagtgagaagatatgatgtttggttttccattcctgagctgggaatatcaggaatactttcaagtaaygagagaccatttccatctaatattaattaaaagaaagttgagggagggaaaacaataatggtttttttctcaccctttatcaaatatgtgttgtcttttt

SEQ ID NO: 29870 - DNA, 201 bp, Homo sapiens
agtgatggttaagaacgaggacagtctggtctttgtccagacagacaaatcaatctacaaaccagggcagacaggtatgaagaagcctacagacaggacamcttcaaaaaggaaagatcttcttcccctggatgttccccaggcaaagttcctataatcttggttccttaatagcttgtcttaccagcctacaggcctact

SEQ ID NO: 29871 - DNA, 201 bp, Homo sapiens
tagtagcttcttatcaatgtttattcatttttaaaagtaatatttattaaactaaatttattaatgaaatatgtccattcctcctcattcttagaactacrtaagaattctatgacccatcttaatgattacatctgaacatatttacttatagttacataagtgtttatttctcaacctgtaaaattgcatagcaaagga

SEQ ID NO: 29872 - DNA, 201 bp, Homo sapiens
ttttcctttgacagccattaattcttcttaaaatgtattgagaaatattttataatagatatacaaaagggcataagctataactagaaaacactgtacarctctctcatagattaagaaatagaaaattaccgacgtgggaaaaataaatcccttgtgtatcactaccacctccagaggcaatcattatcctgaatttgt

SEQ ID NO: 29873 - DNA, 201 bp, Homo sapiens
gattttttaaactttttattgtttttaatttttgtggaaacatagcaggtatatatatttatgggttacatgagatattttgatacaggcatgcagtgcaygataatgattatggatgataatcattatcattatccatatcattatccaatcatggataatgattattatcatgcattgcatgcctgtatcaataaatgg

SEQ ID NO: 29874 - DNA, 201 bp, Homo sapiens
ctctctcatagattaagaaatagaaaattaccgacgtgggaaaaataaatcccttgtgtatcactaccacctccagaggcaatcattatcctgaatttgtygttacaattccatggatttccttatatttttgctgcatatgtatccctaactaatatttagaatcttcacatgtgtttcatcttgagagaaacaagattt

SEQ ID NO: 29875 - DNA, 201 bp, Homo sapiens
tctcagaaacttgtcattaaaggagaagccttcaaactcccatagagctagatggctataactcatctcctctactcaccctttactactaccccatttgmcctttttgtagataacttagggtttccatagatatcttttattagctccaatgctccaggtgcttttgtaagttataattaatttactcatataggatcc

SEQ ID NO: 29876 - DNA, 201 bp, Homo sapiens
aaacaagagaaacatttttgaatatttcagcagcttagttttttgtttgtctgctttttattttctaagttcaacactatgttgatgaagacccctatacmagtatgtgcagagtcagctcattaattttcactgctgcataatatattacagtctataaattagtcataatttacacatcgagtttctcctcatggattt

SEQ ID NO: 29877 - DNA, 201 bp, Homo sapiens
agtattctgtcagatgaggctttgggaggttggtaagaactgcaggaaggaatccaaatgtagcaaactaagtatagaaattaaggagcaatgcatgactmtccagccatgggagacaaatatttacaggcaaactaaaagtcagcttaataatcacatagaaaccctattagccagaaaggaaaaaaaaaaaaagaaaat

SEQ ID NO: 29878 - DNA, 201 bp, Homo sapiens
gttggctattgtaatttttcaaaaaaaatcatgaacttagcacaatgggaattatttatttctcgtaattgcccattgtgagtgtttcagaacgatagacrctgagccatctaaagcctccatgggcattcacttctacaaaggaaggaaaaaaccatacacctcttaattgccttagctggccaggccatcagttctgct

SEQ ID NO: 29879 - DNA, 201 bp, Homo sapiens
atgtactgtgtatttcaaaatagcaagtggacaggacttgaactatttccaacacatagaaatgatacatacttgagttggtaggcaccctaaatcccgcratgtgatcattacacattctctgcatgtaacaaaatatctcgtgtaccccataaatatgtataaatattatgcatcctttgtacaaaaaaaattactcct

SEQ ID NO: 29880 - DNA, 201 bp, Homo sapiens
caggacatgggcttaaaggcattcaccaactcaaagattcgtaaacccaaaatgtgtccacagcttcaacagtatgaaatgcatggacctgaaggtctacrtgtaggtttttatggtaaacaaaaaattaataaatatatattgcctaatatattcaccaaattttaaattttttaaaagatacaatgtgacaaaaattaa

SEQ ID NO: 29881 - DNA, 201 bp, Homo sapiens
tatcgcaatatatctagggaatttcagataccaaggaatacatctgtcaattatacatgagatattgttgtgaaatttaatatttagttgctagagaatattttattgtgtcctcgtcatagaaaatgcctacatgatgttgtccccccacaaaaatcacaccggttatctgaccactgatctatttagtataatatgcat

SEQ ID NO: 29882 - DNA, 201 bp, Homo sapiens
caaaatccaacaacctctcctcgcaaatctctccattcttaggtcccctttaataggcttttctcaaaactacacattttgtgcttcccctattcaccttttttttttttttttttttaagacagagtcttgctctgtcacctaggctggaatgcagtggtgcaatctcggctcactgcaacctccatctcccaggttcaa

SEQ ID NO: 29883 - DNA, 201 bp, Homo sapiens
aaaatccaacaacctctcctcgcaaatctctccattcttaggtcccctttaataggcttttctcaaaactacacattttgtgcttcccctattcaccttttttttttttttttttttaagacagagtcttgctctgtcacctaggctggaatgcagtggtgcaatctcggctcactgcaacctccatctcccaggttcaag

SEQ ID NO: 29884 - DNA, 201 bp, Homo sapiens
ataaagtaatctgtacaccaaacccccatgacacgagtttacctatataacaaacctgcatgtgtacgcctgaacctaaaagttaagtatatatatatatwtttttttcatttaatttggtgtatatatatgccaaaaaataaattaagcagtccaaatttcggatgcaaactctcggggacaagacgctaggtgtttcta

SEQ ID NO: 29885 - DNA, 201 bp, Homo sapiens
ctaaaagttaagtatatatatatatatttttttcatttaatttggtgtatatatatgccaaaaaataaattaagcagtccaaatttcggatgcaaactctrggggacaagacgctaggtgtttctaagtgttttgttgaaagccagtgtttaagtaaacattataaattattgttgtttttgtaaataatgtagactgaaa

SEQ ID NO: 29886 - DNA, 201 bp, Homo sapiens
taaaagttaagtatatatatatatatttttttcatttaatttggtgtatatatatgccaaaaaataaattaagcagtccaaatttcggatgcaaactctcrgggacaagacgctaggtgtttctaagtgttttgttgaaagccagtgtttaagtaaacattataaattattgttgtttttgtaaataatgtagactgaaat

SEQ ID NO: 29887 - DNA, 201 bp, Homo sapiens
taaataaaataactggcatagattagaggtcacaaacagcctgtgcatcacttgtagagctttcttaaaatgcagatcctcagccgggcgtggtggctcaygcctgtaatctcagcactttgggaggccaaggcgggcagattaccttaggtcgggagttcaagaccagcctgaccaacatggagaaaccccgtctgtact

SEQ ID NO: 29888 - DNA, 201 bp, Homo sapiens
ttcttaaaatgcagatcctcagccgggcgtggtggctcacgcctgtaatctcagcactttgggaggccaaggcgggcagattaccttaggtcgggagttcragaccagcctgaccaacatggagaaaccccgtctgtactaaaaatacaaaattagtcggacgtggtggtgcatgcctgtaatcccagctactcgggaggc

SEQ ID NO: 29889 - DNA, 201 bp, Homo sapiens
cttcagggacattttccagcaaattccaagtggacaacaacaaccgcctgttactgcagcaggtctcattgccagagctgcctggggaatacagcatgaargtgacaggagaaggatgtgtctacctccaggtgagactcttgggcaggtgaggacaggacagatgaggacagcagctgttctctctgagaagtcctaact

SEQ ID NO: 29890 - DNA, 201 bp, Homo sapiens
tagatatgtgtggtaggagagtttgttcatgcataagttgatgggaattatagtttacaaattttatgaaacttaagcctgggaagatcaaccttttagahcctctttgagtctacgcaagtattcctgcaagacagagaagtcaaactataccaaatctctggatattaaaaaatgaacacagttagtcatccaataaaa

SEQ ID NO: 29891 - DNA, 201 bp, Homo sapiens
tccactgcctctctccgagccttccagcccttctttgtggagctcacaatgccttactctgtgattcgtggagaggccttcacactcaaggccacggtccwaaactaccttcccaaatgcatccgggtaaggatctctttcctaaattaaatacaaggtagccatcaagtaaattaaaagttgcattcctaggaatactgc

SEQ ID NO: 29892 - DNA, 201 bp, Homo sapiens
gtgaatacttaaactaattcaaagagagaagaaagcttcctgaaaggtcatttaattgacttttgctttccaggtgtcaaatcagacactgagcttgttcytcacggttctgcaagatgtcccagtaagagatctgaaaccagccatagtgaaagtctatgattactacgagacgggtgagtgagagtgattttcacgtag

SEQ ID NO: 29893 - DNA, 201 bp, Homo sapiens
tcaatattgtgtgagcccagcagagagcagagggaagtacagacagggaatatactgtagctaaaggggagatataaatagctagaaaatggggaggttcrgtgtctgctctgattcctttgggaatgttctcatgacagatacacatatgggaagcctgtccctggacatgtgactgtgagcatttgcagaaagtatagt

SEQ ID NO: 29894 - DNA, 201 bp, Homo sapiens
tactttgccctatagggatggatatgggtaaggatgaattccatgacacagcagaatagaaagaactaatcaatagcattctcagaagttgaattattcaratctctctctcgtattcacagggaggagtagaagatgaagtgaccctctccgcctatatcaccatcgcccttctggagattcctctcacagtcactgtag

SEQ ID NO: 29895 - DNA, 201 bp, Homo sapiens
gagacccaaatctgtcttaattttttttctttccaatgtcacagatcttggaaatgcttgaagaccacaaggctgaaaagtgctttgctggagtcctgttytcagagctccacagaagacacgtgtttttgtatctttaaagacttgatgaataaacactttttctggtcaatgtctttccctgtttcctgttcattcaat

SEQ ID NO: 29896 - DNA, 201 bp, Homo sapiens
aaataagtttgcctttttgtctttcgtatttgtacaggtttacaacctgctaccagaaaaggacctcactggcttccctgggcctttgaatgaccaggacratgaagactgcatcaatcgtcataatgtctatattaatggaatcacatatactccagtatcaagtacaaatgaaaaggatatgtacagcttcctagaggt

SEQ ID NO: 29897 - DNA, 201 bp, Homo sapiens
acatgaagtagccttggaaacaaggttgcaacctaagggtgagaaaatttccaaactgtgtctagttctatggagagaaaaaaactagcaattagaaaccrattgaaggttaacttttttaaagtttatgaaaagaaggcagtatattgtgattaaaagtgcgggttagactttagcagtgttgctgggaacgtaaaatgg

SEQ ID NO: 29898 - DNA, 201 bp, Homo sapiens
ctattcacaatagctgagagatcgaggctacccaaatgtccatcaagggatgaacaggtaaacaaaatgtggtatataaatacaacagaatattatgcagyctgagaagggaagaaaatcctgtcacatgctacagcatgaatgatccttgaggacgttatggtaagtgaaataagctagtcacaaaaagaccaatactat

SEQ ID NO: 29899 - DNA, 201 bp, Homo sapiens
aggctggagtgcagtggcgccgtctcggcctcggcctctcaaagtgctgggattacaggcatgagccaccgcgcccggcctctcctggcttgttaagtcawccaacatatttcctcctcaaagaagctttccttgatgacccaagcgccctctcctccttcctctctatttcatcagacgatttgttttttgttttttttt

SEQ ID NO: 29900 - DNA, 201 bp, Homo sapiens
tcccagatgcaggctgtttagaagcccaacccttaggagacagccagaaatgggagattttgcctgttctctctgtattgagccaaggggtggtgggggcrggtagccactggcattgctcaaaggcctatttaaaaccacctctgtgttcactgtggtctagggagactcctgattgcagagctccatctactcctggag

SEQ ID NO: 29901 - DNA, 201 bp, Homo sapiens
cctgtaagtctgtcgtttccctgctccttctgcttcccagtgcaggctagttagaagcccaacactcagtcagcaactgataaagtgggtagacgaagccsttccagggagaaactgggagctgttagctaatttttcagtactgaagtacttctttcaaacgcattgctaatttcaggagatgtttaacataaatacatc

SEQ ID NO: 29902 - DNA, 201 bp, Homo sapiens
gcccactatacacaatagtagtagaatttaaaattataaagcagccctcagtgaaatagcattttagagaagagaacttaagaacaatctcaaactgcatrttaaatttataactatattgtctgtaaaagattatgctacaattctgatatactacaattaaaaacagttggaagaaaaggacttatattcccatctcaa

SEQ ID NO: 29903 - DNA, 201 bp, Homo sapiens
ttatgatcttgggatatgaatattcctaaaatcccataagcaagaaatcttgacaaaatgtgtttattatgttgacaagttttttggatacccagtaatayaaggaagtagcccttgtgattagtcaattattagttaattatcaacatactcaacaacaatatgaaagggaaaaaaaactgtcagtctccacaaggactt

SEQ ID NO: 29904 - DNA, 201 bp, Homo sapiens
accttttagagcctctttgagtctacgcaagtattcctgcaagacagagaagtcaaactataccaaatctctggatattaaaaaatgaacacagttagtcrtccaataaaaagtatatatcatttacccccatgaacagagctatgtattggcattgacagaggtatatgcgttatgttagttatttaagaaataatctgg

SEQ ID NO: 29905 - DNA, 201 bp, Homo sapiens
acatcacattaaaggttaatgtcacccccctgaacatttttcagtactttgccatccatttatctttagaaataatgtgtgtagatgtatatgtttgtggwtgtgtgatttacatataataaactgtataagtttcattctataaatcactgtttgtttttcactcagcatcctgtcttggagatttacctatgttaaatt

SEQ ID NO: 29906 - DNA, 201 bp, Homo sapiens
tggatattaaaaaatgaacacagttagtcatccaataaaaagtatatatcatttacccccatgaacagagctatgtattggcattgacagaggtatatgcrttatgttagttatttaagaaataatctggagaatttatcatcccctctgagagatttctgcacaatttaattaaggaccctatagtgtgctgtaggataa

SEQ ID NO: 29907 - DNA, 201 bp, Homo sapiens
cgtagttttgtgagaacattaatctttatgacgtataatctaaaaataatataatttttctaattcattaggtcaattacaaggatcgtagtccctgttayggctaccagtgggtgtcagaagaacacgaagaggcacatcacactgcttatcttgtgttctccccaagcaagagctttgtccaccttgagcccatgtctc

SEQ ID NO: 29908 - DNA, 201 bp, Homo sapiens
attatgctttgagaagcataatgactgattagtgggctaagcacatcttccccattgctgaatattgccaaagagcagttggcttcccacagcagtgtatwttggttcccattgtttcacatccatgtcagcctttggtatttcaaggattactgtattttttttttcaatttaatgagtacaaactctactatttcatgt

SEQ ID NO: 29909 - DNA, 201 bp, Homo sapiens
gtggagatgacatcctatgtgctcctcgcttatctcacggcccagccagccccaacctcggaggacctgacctctgcaaccaacatcgtgaagtggatcaygaagcagcagaatgcccagggcggtttctcctccacccaggttggtgatttgccaaaaccttttatttcaccttcaggtagcaaaagatttgaatgaaaa

SEQ ID NO: 29910 - DNA, 201 bp, Homo sapiens
catccaagaagaaaaaaatacagatgacagtaacttgaaatgaggaaaagttttcagtatccaaggataatggaaataaaagcaaatcaaagtcaaagagrgccaaaaggaaatgctcagaatcccggcaccccatcgctgtgttattatccatctcctatttcccataacaacactgccttcctcaagcagcagtggagc

SEQ ID NO: 29911 - DNA, 201 bp, Homo sapiens
ttcaacggccaaatttcatgctcatcagtacatcttctcttggtgtagaactgatgatgataattatgatgatggaaaaaagtgctgttgatagcaatgcstctcttccttcactttcctctaactgaaccgtctcattcccaggcagtatatggttctggtcccctccctgctccacactgagaccactgagaagggctg

SEQ ID NO: 29912 - DNA, 201 bp, Homo sapiens
atgaaggtatatagtagccagctctttcagcatcagatggatttgacttaaatacatagaatgaaaatgaatttatctcattaaaatataattaattggtraaacctgtggagtgtttattttgcattcctagaatttatgatctgtttcttggtctaatactcccaggctgtacaatgccaggaagagaaatgtgcaact

SEQ ID NO: 29913 - DNA, 201 bp, Homo sapiens
aatcttttaatatctaaaaacctatctgtgtcatcctttggaagcatcaaaaattatcttgatttagcttatgctttctttctgcctctttgtgtgtgttgtgtgtgtgtgtgtgtgtgtgtgtgtgtgtgtgtgtgtagtaataaaatatatcatgaaaatttactcatttcccatggatatcccccatgtatacctgag

SEQ ID NO: 29914 - DNA, 201 bp, Homo sapiens
gaatctgggtgacaggatcaacagaagtccaaacctcggcattttgcagtatagtaacaagcctgcatatgtaccctttcaatctaaaataaaaatggaatttttttttttaaaggaaaagatttggtggctgggtacggtggctcatgcctgtaattccagcattttggaagccaaggtaggctgatcacctgaagtcag

SEQ ID NO: 29915 - DNA, 201 bp, Homo sapiens
tcctgggttcatgccattttcctgcctcagcctcccgagtagctgggactacaggtgcccaccaccatgcctgtctaattttttgtatttttagtagagayggggtttcaccgtgttagctaggatggtctcaatctcctgacctcgtgatccacccgccttgtcctcccaaagtgctgggatttacaggctcagtgagcc

SEQ ID NO: 29916 - DNA, 201 bp, Homo sapiens
tagaagtgcttagtacaatgcctagatttattattcatcaataaacgtaattgataactgactataaagatgtgagaaaagtagagtatctatagaatatkctcagaagaaaggaacttgaaaaacttcaggaaatttcgtctgtccaaatatatgtagagccaaggctcttactatgggttggtgtatgggttagatatc

SEQ ID NO: 29917 - DNA, 201 bp, Homo sapiens
ctgtctaattttttgtatttttagtagagacggggtttcaccgtgttagctaggatggtctcaatctcctgacctcgtgatccacccgccttgtcctcccraagtgctgggatttacaggctcagtgagccaccgcacctggccagtattgtcccatttttctatttttgtttttttgcctacggttttgaaaatagccat

SEQ ID NO: 29918 - DNA, 201 bp, Homo sapiens
gttcagtgacatattttggatgttattcttctcactgttgagaagagtaatggtttactgcaagtagtatcttattttggtacaaagagcttttgaaacartgatatgccatgatatatagttagtgataatttagtgataagtattttgttcctagtaaaacagttcagcatatttctccctgtttcacattattacatt

SEQ ID NO: 29919 - DNA, 201 bp, Homo sapiens
gtatttctatttcctttagtcattttcaaatatgtgtgtatatgtatttatatgtgtatatattttaaaaaccaactatatatgcatcttggaaagtgtcraggatttttaaaccatatatgtgtatcttggggtagtggtagtgtttttggtccattggataaagtgatgttcttaattcagctccacttgtctgcagca

SEQ ID NO: 29920 - DNA, 201 bp, Homo sapiens
gggtggggacacagagccaaaccatatcactgcactgggtctacctcatagtatggccctatctttgcatcatttcctgagcttcccaggtggaacttacwgttctcttttgtgcccttactgtcctttattcacctcggttgtagaactagtgaattatacttttctgttcttacttggttttatttatctctacccgca

SEQ ID NO: 29921 - DNA, 201 bp, Homo sapiens
ccagcattctttctctttaggtatctgagtgcctgtaaagatttttaagggcttgctagtttaaggcaggacctctatagggaaaataattggattttatwacttttaatgttttaatatttctggggtgagtagtcccaataacagcatatacatatgtgttttgacttttgcccatctagctttcaaacatttcacaca

SEQ ID NO: 29922 - DNA, 201 bp, Homo sapiens
gacagttgttgcaaatgacttgatttgggaaccttgtttcgcagcagagtccagtgttttcagtccagtgctctgatggccatgtaagttatgtattactyattccaggaggtgctgtttgcattgtggtcattgcccactgagtagagcagagagaaagtaatctataattgtttaaagtactgtcggcttagtggaatt

SEQ ID NO: 29923 - DNA, 201 bp, Homo sapiens
gcccccactgctcactcagtcagctccagcgcggggggagttagggcttccccgtggcctggattgccgggcttcccagtggaagtgtgttccagggaccrtctctcccgttcacactctagaggctcacgattttctacctggttcatcgtgtacactgctgcccgcctgttctttcacagggtctctggtttctttaag

SEQ ID NO: 29924 - DNA, 201 bp, Homo sapiens
gttataactacatgtaatgtaacaaaaaagcaccattcaaatcaaatattatttcttataatttctatggctttagatattatagagtggactgccccgtrttagtgggaatcattgagaatttgctctatagtgtatccccagctgtgtacacatagtctgtcaccttgttttaatgaatagttgttcactaggaatatt

SEQ ID NO: 29925 - DNA, 201 bp, Homo sapiens
gacactgaatgttaatttgctcaaggtcacacagctggtaactggtggagctgggattcccacccggccattcccgcttctgtgtggatacggcctctcartttcatgaatatctagttgtcacctaacatgtcatcatgttaatttttataatcactggcattgccatggtcattcacatctataaatatttaaacttat

SEQ ID NO: 29926 - DNA, 201 bp, Homo sapiens
gcttgctagtttaaggcaggacctctatagggaaaataattggattttataacttttaatgttttaatatttctggggtgagtagtcccaataacagcatrtacatatgtgttttgacttttgcccatctagctttcaaacatttcacacatttcaggggactccttatactgttttagggtgaagggaagcaatgaggcc

SEQ ID NO: 29927 - DNA, 201 bp, Homo sapiens
tctccctttatttattcatatgcccctgaaattcattctctccacagtatttagggtgatctgtctccaatgcaaataggaccttgagtccctcttgaaarcataaatgttcaaacatcttaagattacatataaggctttcatcatctgacttctgcctaactctccatctttagccctttcccctttctgcccttttct

SEQ ID NO: 29928 - DNA, 201 bp, Homo sapiens
tttttataatcactggcattgccatggtcattcacatctataaatatttaaacttatagttcatgtggtggtgcttggaatgcaaaaatataaatgcttaycgtaaggtaatttcctatctttctacattttaccaagtttgtaaatttgagtatttatctgataaaatatagtttgaaaacaagagtaatatgttttagt

SEQ ID NO: 29929 - DNA, 201 bp, Homo sapiens
gtggatcacttaagtccaggaattcaagaccatcctggccaacgtagtgaaacccttctgtagtaaaaatacaaatattagccaggtgtggtggtacacayctgtagtctcaggtacttgggagactgaggcaggcagtagaatagcgtgcacctgggaggcggagggtacagtgagctgagattgcaccactgcaatcca

SEQ ID NO: 29930 - DNA, 201 bp, Homo sapiens
ggtcattcacatctataaatatttaaacttatagttcatgtggtggtgcttggaatgcaaaaatataaatgcttatcgtaaggtaatttcctatctttctmcattttaccaagtttgtaaatttgagtatttatctgataaaatatagtttgaaaacaagagtaatatgttttagttctagaacgcaggttgataaacttt

SEQ ID NO: 29931 - DNA, 201 bp, Homo sapiens
ctagctactcgtggggctgaggcaggaggattgcttgagcccaggagttccaggcggcagtggattatgaccatgccactgcactccatcttgggtgataraataccttgtctctaaataaaagtagagttttgttttccacgtcagttggaatgatgaacatgaagattaagcaccgttctaacaaagatctgctggttc

SEQ ID NO: 29932 - DNA, 201 bp, Homo sapiens
gggagccgtagataccacctgctgcaacagatcagctctacagtcacagcacaaaagtagccataaacaatatgcatattgaaggggtatgactgtgttcygataaggtttagttacaaaaacaggtaatggacagatgtgtactagattattagtaaagtgggttttttttattctttgttttagttgcaagaagcacag

SEQ ID NO: 29933 - DNA, 201 bp, Homo sapiens
agagttttgttttccacgtcagttggaatgatgaacatgaagattaagcaccgttctaacaaagatctgctggttcagagtttgaggaggtagagaagcaraagtcgttgtctaaaccaggccttaacatctgttagttttctgcccttgctgtgatcagttagttcagtaataagggacaattatgttatctaatttaat

SEQ ID NO: 29934 - DNA, 201 bp, Homo sapiens
ggagccgtagataccacctgctgcaacagatcagctctacagtcacagcacaaaagtagccataaacaatatgcatattgaaggggtatgactgtgttccrataaggtttagttacaaaaacaggtaatggacagatgtgtactagattattagtaaagtgggttttttttattctttgttttagttgcaagaagcacagg

SEQ ID NO: 29935 - DNA, 201 bp, Homo sapiens
gagtttgagaccagcctggccaacatggcaaaaccctgtctctactgtaaatacaaaaattagccaggcgtgatggcaggcccctgtaatcctactactcrggaggctgaagtaggagaattgcttgaacccagaaggtggaggttacagtgagacgagattgtgctattgggtgacagagtgagactccatctcaaaaaa

SEQ ID NO: 29936 - DNA, 201 bp, Homo sapiens
taatccacaataccaatttattgatgtaccaatttagtgattatttattgatgttctgcttgatgtttaacaagcagaacaggattctctggtcattcacrctttcctgtgtagaaatgaagatcagaaggttgcattgtaaatactaaagtggagcaatgaggttgatgcttctactaatgagtttctttaagtcacaac

SEQ ID NO: 29937 - DNA, 201 bp, Homo sapiens
ttattattactgactttattcagcctaagttgaaatagaatgagatacatttacttcgttagaacaagatgtgttcttctggccaggtgcggtggctcacrcctgtaatcccagcactttgggaggccgaggcgggtggattatgaggtcaggagttcgagaccagcctggccaacatggtgaaaccccgtctctactaaa

SEQ ID NO: 29938 - DNA, 201 bp, Homo sapiens
agttgaaatagaatgagatacatttacttcgttagaacaagatgtgttcttctggccaggtgcggtggctcacgcctgtaatcccagcactttgggaggcygaggcgggtggattatgaggtcaggagttcgagaccagcctggccaacatggtgaaaccccgtctctactaaaaatacaaaaattagctgggcgtggtgg

SEQ ID NO: 29939 - DNA, 201 bp, Homo sapiens
tatttaaatatttataccacagaaataactgatttagtgaaagaacactataaatagagtcagaagacccagggaaaatcatacagctgcttttttttttwaacttttccttttcaaaactgtgatactaaatgagttcattgatatatgtagaagtgcttagtacaatgcctagatttattattcatcaataaacgtaat

SEQ ID NO: 29940 - DNA, 201 bp, Homo sapiens
taagaaattacacagtattttaaaaatttatctgtgagaataattattttaaaatatacatttcaggcttgaaaaagataatgccaagttaaaagttacartcaaaaagcaaatggacaaaattgaggagcttcagaaaaacctgttaaatgcaaatttggtaagtcagccacttaatttctgtcgtactgaaaaggaatt

SEQ ID NO: 29941 - DNA, 201 bp, Homo sapiens
gccacagtgcccggccacttttatgaatattttaaaaataattttatgcatgaaacagagttttgactgtgttttcactgtgacatgtcacatgaggtcargtgtggaattttccacttgtgacatcctgtccacactcaagagtttcagattttggaacattttggatttcaaattttcagatgttcctccacttatgat

SEQ ID NO: 29942 - DNA, 201 bp, Homo sapiens
tttaagggtccacatttgaagaatcttttatggttcaggtgacattttattgcaactgaatttatttcaaaatttgttcttggttttatgttaggctattytcaggctacttccttcattattacactatattattgtcttcattcagattgatgatcttacagcagaactggagactgcaggttcaaaatgtctacatct

SEQ ID NO: 29943 - DNA, 201 bp, Homo sapiens
tttgtaaacccatgtttttggccatgtgatctgttagctaaagaggtttcttatcagttttattagttttataaaatgcggactttaacttttagtttacttttttttttttttacatggagtctcccccgtcactcaggctagagtgcagtggcgcaatctcagctcactgcaacctccacctcccgggttcaagcgatt

SEQ ID NO: 29944 - DNA, 201 bp, Homo sapiens
caaacttctggtttcaaatgatctgcctgcctcaccctcccgaagtgctggggttacaggtgtgagccaccatgcccagcctcaaatttctgatataattmttgtttttaatttggtgaaataccgagttgtttaattgacttatgcttgataagtaaaggtcataattatctgtgctaataaagtgaggaaacagaaatt

SEQ ID NO: 29945 - DNA, 201 bp, Homo sapiens
tttcaccgtgttagccaggatggtctcgatctcctgacctcatgatccgcccgcctcggcctcccaaagtgctgggattacaggtatgagccacagtgccyggccacttttatgaatattttaaaaataattttatgcatgaaacagagttttgactgtgttttcactgtgacatgtcacatgaggtcaggtgtggaattt

SEQ ID NO: 29946 - DNA, 201 bp, Homo sapiens
gatgaagggaagtatattttataaagtggttaaaaataacaccttggtcagcctgagggagtgtgtggaaaacaggtcaggccccacctctgatgccttgrggacaatgttaggagctaactgcctttgagactctttagttctttttgatcaccaactcagctatcttcttttcccctacaattttttgctctgaattat

SEQ ID NO: 29947 - DNA, 201 bp, Homo sapiens
ccttaggagttaagaggaaagaaaggccagagtggagtgcattcattcaggtcaaggcaattgcaggtgaaaacagctgtgggaacagaattgtccctgcragagtcagcgttcaaagaaaggccacatcagatattcaaaatcatctcacaacagttatcagccagataagaaccaccctcttcagtttttgttttgttt

SEQ ID NO: 29948 - DNA, 201 bp, Homo sapiens
ttttaatttggtgaaataccgagttgtttaattgacttatgcttgataagtaaaggtcataattatctgtgctaataaagtgaggaaacagaaattttagttttttttttttttagtccctagagctctcattttcaagaggtaccatttgttaactttattcaataaatgtaactgaactgtcacattttaaatttcttt

SEQ ID NO: 29949 - DNA, 201 bp, Homo sapiens
taggaggctgaggcaggagaatcgcttcagactaggaatcaagaccagcctgggcagcatagcaaaactctgtctctaaaaaatatgaaataaattagccratgtggtggtgcatgcctgttatcctagctactgaggaggctgaggtgggaggattgcttgagccctggagttcaaggctgcagtgaactatgattgcac

SEQ ID NO: 29950 - DNA, 201 bp, Homo sapiens
aaaataactttttaaaaaggaattttcattaacacttagtattttatatgtaaaaacttctatttttaacaaattttggtaatttaaattccagaaaagaratatgagctgttttaagaaaagtcattttttcaaatccgttcttattgccattaggtttataaactgcattttatatgcctaaacatatgttactcatga

SEQ ID NO: 29951 - DNA, 201 bp, Homo sapiens
cattcattaattgatttaatataattttactttgttcaaaactagatataaattcatttaatatctactttttcttaatgaaattattctcttttaaaatkgttttagaaagttgcagcacaatctgaaacttttggaatgcctaaatattacacttattctttaatgattttgaaagcagtaacaatgcctttggcatat

SEQ ID NO: 29952 - DNA, 201 bp, Homo sapiens; identical to SEQ ID NO: 3778

SEQ ID NO: 29953 - DNA, 201 bp, Homo sapiens
caatcatgtttctactatccagatttaaaaatggaatgttacccattgccttggaagcccctaacatggctgcttttctgtttatttgctgagtacttacrtttgttctgattctaattactatttttctctcattgtctttctctaacgtggtttggcatcccttttactttgttaacgttgtgctagtaaagatttctg

SEQ ID NO: 29954 - DNA, 201 bp, Homo sapiens
ggaatctctctgttgcccaagctggagtgtggtggtgcagtctcggcccactgcaacctccacctcctgggttcaagccattctcctggctccgcctcccractcagcctcctgaatagctgggattacagacatgcaccaccacgcctggctaatttttgtatttttagtagagacagggtttcaccatgttggccaggc

SEQ ID NO: 29955 - DNA, 201 bp, Homo sapiens; identical to SEQ ID NO: 3780

SEQ ID NO: 29956 - DNA, 201 bp, Homo sapiens
ctttatctgccatatatgtcatataatttttcttcacattatttacctaagattataatttcattagagtgttttcaaactatgtcagattgaaataaacragagaatcatgattcatttgtttttcttacatgctaaaacataatatctgtttaaataattattaaatgtttgcctttttaaaacttgagttactcattt

SEQ ID NO: 29957 - DNA, 201 bp, Homo sapiens
ctcatactagccagaatggctattattaaaaagtcaaaaaaataacaaactattcatctgacaagggactaatatccagaatatacaaggaactcaactcracagcaaaaagaatattctaattcaaaagtaggcaaaaaatctgaaacagacatttctcataagaagacatacgaatgaccaaaaggtatacggaaaaaa

SEQ ID NO: 29958 - DNA, 201 bp, Homo sapiens
atctgcattcccatgtttattgcagtactattcacaatagctaagatgtggaatcaacctaaatgtccatagacaatggaaaagaaaatatggtgtatacmgatacataaaggtgaaaacaacagacgctgaggtttccaagaatgcaggatctgtgccaagaaatgtgttcagaatctgggtgacaggatcaacagaagt

SEQ ID NO: 29959 - DNA, 201 bp, Homo sapiens
ttagtagagacagggtttcgccatgttggccagggtggtctcaaactcctgacctcaagcgatccacccaccttggcctcccaaagtgctgggattgcagscgtgagccaccatgcccagccccccactacattttgtagttccctaaatgtgtctttcatttccagaagttctgattggtttttctttaaaatatctttc

SEQ ID NO: 29960 - DNA, 201 bp, Homo sapiens
cccaagccatagagctagtcaggctcaggatcacactccacattcctttacttgtagtccaggtgattccataaccttatgctccagcaggtagaattacygtaagagatccaacaccttgggcttttttctcagcatgtattgatgcgcacagcatttatccctaagaagctctaagttcctgtatcttacatacagatg

SEQ ID NO: 29961 - DNA, 201 bp, Homo sapiens; identical to SEQ ID NO: 3784

SEQ ID NO: 29962 - DNA, 201 bp, Homo sapiens
gcagtgagccaagattgcaccattgcactccagcctgggtgacaagagtgaaactctgtctcaaaaaaaagaaagatgtggtgtatatacaggatggaatrttattcagccaaaagaatgaaatcatgtcagtaacattatgttaagtgaaataggtcaggcaaggaagataaatatctaaggttctcactcgtatgcaag

SEQ ID NO: 29963 - DNA, 201 bp, Homo sapiens; identical to SEQ ID NO: 3788

SEQ ID NO: 29964 - DNA, 201 bp, Homo sapiens
cctcatgatccacgcacctcggcctcccaaagtgctgggattacaggcgtgagccactgcgcccggccaatattcttctttaaaagtaaaagcagacgagrcttcccacaccctgctatggcattaaattactttgccagtgtcacacttaattcatctgattaatttgatgaatttatctggtaatttatctgattcagc

SEQ ID NO: 29965 - DNA, 201 bp, Homo sapiens
agtagagatggggtttcaccatgttggccaggctggtcttaaactcctgacctcatgatccacgcacctcggcctcccaaagtgctgggattacaggcgtragccactgcgcccggccaatattcttctttaaaagtaaaagcagacgagacttcccacaccctgctatggcattaaattactttgccagtgtcacactta

SEQ ID NO: 29966 - DNA, 201 bp, Homo sapiens
cctcttatctctttgaccaatgcctgctggcacagagatctttctctttttggagtttgggttaaaaacaaaacagcccttagacaccgagtaggtgaccrtggtcttactcaggttatatatttttaaaacatatgcttttaatttgttttaggcacaagcagcatctcaagaaaacttagagcagttaagagagaataa

SEQ ID NO: 29967 - DNA, 201 bp, Homo sapiens
aagactccttaagcaggtagtattttacagatttttaaaaatatatttaaaggaatacagagaaaagaaactgttgagtgccctactctgggtagacaccrtattatgtgcttctccatatagtcgtcccaacagctttgcaaagtatctgtgctatattacaacccaactgtgtggttcagagaggttgattaattggcc

SEQ ID NO: 29968 - DNA, 201 bp, Homo sapiens
ttacagatttttaaaaatatatttaaaggaatacagagaaaagaaactgttgagtgccctactctgggtagacaccatattatgtgcttctccatatagtygtcccaacagctttgcaaagtatctgtgctatattacaacccaactgtgtggttcagagaggttgattaattggcccatgacctcacagtgagcaagcag

SEQ ID NO: 29969 - DNA, 201 bp, Homo sapiens
tatttatgatagtcttacaaagctctgcatgttagctcttagagacatggaatgagaataggaagaaatcttagtgataagccagtgtagtttcccatttkacagatgaagagacctagggaaaggttaaacagcagggcccaagccatagagctagtcaggctcaggatcacactccacattcctttacttgtagtccag

SEQ ID NO: 29970 - DNA, 201 bp, Homo sapiens
aggttgattaattggcccatgacctcacagtgagcaagcagctgacccatgatttgaccatcagcctgcttggctcccaaatcccttctcttgcccctcarcatagattgatagagacctgtgcggcgctggatcaaggtacaggtccaaatcagatcaattcagagacctacatttagttctatgttaactctcagagtt

SEQ ID NO: 29971 - DNA, 201 bp, Homo sapiens
tggagcaacccaaatcatggagttgggtagttgttaacatgcctgtgctgctggcagatgacagagactccatttagcttgttttccaggagcagagatayagagagcttctactcttgggcatttgagaccatcctttcaggaatttgtgccttcataggctgaagacttaaaggttggagatgctatggagccctgcag

SEQ ID NO: 29972 - DNA, 201 bp, Homo sapiens
acataagcagaccacacaagtcctataaaggaattattttactgtaagtgaaaactatttacctatagaccatattgtgttaattatatttagcatccagytagaggatatttctggtttatttctctacctactgacttcccagtttggttttccctttaggctagtactctagctccatctgagttgctggaaaggata

SEQ ID NO: 29973 - DNA, 201 bp, Homo sapiens
tcagaatattggggtttttgacaagttcgataatgataaattactggaatgaaggatacaggatgtttggaattatctagaaaggcatattaaaatagggrgttcaggggagtcctgaacaggttgttgcttttttatataattggaggaactgacaaactctcaaggtttctactgaaaaatgttaaaataatttgagcc

SEQ ID NO: 29974 - DNA, 201 bp, Homo sapiens
gctagtttaaggcaggacctctatagggaaaataattggattttataacttttaatgttttaatatttctggggtgagtagtcccaataacagcatatacrtatgtgttttgacttttgcccatctagctttcaaacatttcacacatttcaggggactccttatactgttttagggtgaagggaagcaatgaggccttaa

SEQ ID NO: 29975 - DNA, 201 bp, Homo sapiens
cgtgcccagcctatttatttatttttatttttttgagacagtgtcttgctgtgtcacccaggctggagtgcagtggcatgatctcggctcactgcaatctytgcctcccgggttcaagcaattctcttgccccagcctccttagtagctgggattacaggcacatgccaccacgcctggttaatttttgtattttagtaga

SEQ ID NO: 29976 - DNA, 201 bp, Homo sapiens
agccaggcgtggtggcacatgcctgtagtcccagttactcgggagactgaggcaggagaactgcttgaatctgggaggcggaggttgcagtgaggcaagawggtgagagctagactccgtctcaaatacaaaacaaaacaaacaaattaggctgggcatggtagctcacacctgtaatcctagcactttgagggctgaggc

SEQ ID NO: 29977 - DNA, 201 bp, Homo sapiens
gagggtgcaaactggtagaaaggatgtgaaaattaacagagaaatttcaactgggccacttgaaaatatgtagccgttgtgagagtagaaagtcttcactmctcattctcagctctttcccttccctcaggctagtgagagataggagtcttggaacacaatctacaaggccaaggtggtaacaatccatgataacacaga

SEQ ID NO: 29978 - DNA, 201 bp, Homo sapiens
ctcaataatttaacaaatttgttttagttgggataaagagcgattgagaactgcgtgggacccctgtgcttatgagagaggatggagggtgcaaactggtrgaaaggatgtgaaaattaacagagaaatttcaactgggccacttgaaaatatgtagccgttgtgagagtagaaagtcttcactcctcattctcagctctt

SEQ ID NO: 29979 - DNA, 201 bp, Homo sapiens
ctaaaatatttttcaaaaacaagatcaaattttaattagatcaagaaacatcatttaatatgcagacagttgacctttcaccaggtttttgtttttttggwgggggcatccagattgaaaattgtaagctggtttttgttttgtttttaaagaaatgaattcactcatttttctatatttttgttctaaaggctttctggc

SEQ ID NO: 29980 - DNA, 201 bp, Homo sapiens
cgcggtggctcgcgcctgtaatcacagcacttcgggaggctgaggcgggaggattgcttgaggccaggagttcaaggccagcctgggcattatagcgagacccccccccccaactctaatagtctcagctacttggaaggctgaggcaggagcatcacttgagcccaggagttctaggctgcagtgaggtatgtcagtgac

SEQ ID NO: 29981 - DNA, 201 bp, Homo sapiens
tttttaaagaaatgaattcactcatttttctatatttttgttctaaaggctttctggcaaaccgggtgttgatgattcatggcctacctcagatgacgaaracctcaattttgatactaaggtaaagtgctctctcatgaacttaattttcttactctgaatctagtttcgtatagtattctcttaaaattttgcagtggt

SEQ ID NO: 29982 - DNA, 201 bp, Homo sapiens
cccatcgttagacatctgggttgccagtcagcctttattgttttgattacttcatcaaggatgaaaatgcttctctagtagaaactcactttcatttcttyggaagtatttggattcccttttcaattagaaccctgggatgtcctcttatctctttgaccaatgcctgctggcacagagatctttctctttttggagttt

SEQ ID NO: 29983 - DNA, 201 bp, Homo sapiens
tgggattacaggcgtgagccactgcacccaacccctctttataaacaaaagtgtttctgaaggtagaaaattataagaaataacctttaattacccttttraaaatttatgtcttaaacacgaatattagtcattggaaatatctgcatatattctataaatctaaatattgaataaaatgagccaacctattcatttgaa

SEQ ID NO: 29984 - DNA, 201 bp, Homo sapiens
ctttcatttctttggaagtatttggattcccttttcaattagaaccctgggatgtcctcttatctctttgaccaatgcctgctggcacagagatctttctmtttttggagtttgggttaaaaacaaaacagcccttagacaccgagtaggtgaccatggtcttactcaggttatatatttttaaaacatatgcttttaatt

SEQ ID NO: 29985 - DNA, 201 bp, Homo sapiens
agtaggtgaccatggtcttactcaggttatatatttttaaaacatatgcttttaatttgttttaggcacaagcagcatctcaagaaaacttagagcagttwagagagaataattttgcttcaatgaaaagtcagatggaactcagaattaaagatctggaatctgaactctccaaaataaaaacttctcaagaagacttta

SEQ ID NO: 29986 - DNA, 201 bp, Homo sapiens
taattacccttttgaaaatttatgtcttaaacacgaatattagtcattggaaatatctgcatatattctataaatctaaatattgaataaaatgagccaamctattcatttgaatcctgagtttcttttgtgttgaagtttcttgaaaacacaataagaattactttgttttaaaaatctgtttttcaattttaaaaatgc

SEQ ID NO: 29987 - DNA, 201 bp, Homo sapiens
cagggtgccatgagacaaactaccctgtatagtttttctactacttaaaggcatgctagtgaaatagggaatgattaacgtagggatgaagggaagtatawtttataaagtggttaaaaataacaccttggtcagcctgagggagtgtgtggaaaacaggtcaggccccacctctgatgccttgaggacaatgttaggagc

SEQ ID NO: 29988 - DNA, 201 bp, Homo sapiens
tatctgcatatattctataaatctaaatattgaataaaatgagccaacctattcatttgaatcctgagtttcttttgtgttgaagtttcttgaaaacacartaagaattactttgttttaaaaatctgtttttcaattttaaaaatgcttccaattatagttgtaataaatcatgaattacaagtggcattccaatgtcag

SEQ ID NO: 29989 - DNA, 201 bp, Homo sapiens
cataatgagtaagtgacagcttaaagtaggattcaaccccaagttgaactgaatctaaaggtcaagccttttctattcagataggttgctctttcattaatgtggtgagtagtaagagctaataaatattgtactgttttcagaagaaaattaaatacttgttttgaaggcggaggattaacatgtgtattagtctgttct

SEQ ID NO: 29990 - DNA, 201 bp, Homo sapiens
aaatcatttcccactttcttttttttctttttttggtggattgctatcgtctgacaacttttatccttttcagaagtaaaggggatcttggctgggcacckgtggctcatgactgtaatcccagcactttgggaggcccaggcaggaggattgcttgacccaggagttcgaaactagcctgggcaacatagcaagaccctg

SEQ ID NO: 29991 - DNA, 201 bp, Homo sapiens
gttaggagctaactgcctttgagactctttagttctttttgatcaccaactcagctatcttcttttcccctacaattttttgctctgaattattccttggkgccagatgcctaatatttttccagataatgggtgaaataaatgtaaaagggtggtgaaagcaaatgcttgcacatgtcttgaggaattttttaatctcta

SEQ ID NO: 29992 - DNA, 201 bp, Homo sapiens
ataatgagtaagtgacagcttaaagtaggattcaaccccaagttgaactgaatctaaaggtcaagccttttctattcagataggttgctctttcattaatgtggtgagtagtaagagctaataaatattgtactgttttcagaagaaaattaaatacttgttttgaaggcggaggattaacatgtgtattagtctgttctc

SEQ ID NO: 29993 - DNA, 201 bp, Homo sapiens
cgggaggccgaggcgggcggatcacgaggtcaggagatcgagaccatcctggctaacacagtgaaaccccgtttctactaaaaatacaaaaaaatcagccrggcatggtggcgggcgcctgtagtcccagctactccggaggctgaggcaggagaatggcgtgaacccgggaggcggagcttgcagtgagcggagatcacg

SEQ ID NO: 29994 - DNA, 201 bp, Homo sapiens
gcaaggagaagtgccaagcaaaagagggaaaagccccttaagaaaccatcagatattgtgagaactcactatcacaagagcagcagcacgggggaaccatcctcgtgattcagttacctcccactgagtccccctcaccacacgtagggatcatgggaactacaatttgggatttggttggggacacagccaagatgagat

SEQ ID NO: 29995 - DNA, 201 bp, Homo sapiens
aacttttagtttacttttttttttttttacatggagtctcccccgtcactcaggctagagtgcagtggcgcaatctcagctcactgcaacctccacctccygggttcaagcgattctcctgcctcagccccctgagtagctgggattactggtgcacaccaccacacctgactaatttttgtatttttagtagagatgggg

SEQ ID NO: 29996 - DNA, 201 bp, Homo sapiens
ctgaagactccttaagcaggtagtattttacagatttttaaaaatatatttaaaggaatacagagaaaagaaactgttgagtgccctactctgggtagacrccatattatgtgcttctccatatagtcgtcccaacagctttgcaaagtatctgtgctatattacaacccaactgtgtggttcagagaggttgattaattg

SEQ ID NO: 29997 - DNA, 201 bp, Homo sapiens
agattatcaggtttgtgctggttcaggtaacgaaagttatatcagccattaattggattttcagttcagccttcgggacaatttgtgaagacaaagtattsccaggttctgccattatcttggctgtcactattagttatagaactaaggttgagtctttatcgaatattttatagtttcggagaggtagaggcagcaatt

SEQ ID NO: 29998 - DNA, 201 bp, Homo sapiens
agttcagccttcgggacaatttgtgaagacaaagtattcccaggttctgccattatcttggctgtcactattagttatagaactaaggttgagtctttatygaatattttatagtttcggagaggtagaggcagcaattggtaactaaaatatttttcaaaaacaagatcaaattttaattagatcaagaaacatcattta

SEQ ID NO: 29999 - DNA, 201 bp, Homo sapiens
taatatgcagacagttgacctttcaccaggtttttgtttttttggagggggcatccagattgaaaattgtaagctggtttttgttttgtttttaaagaaakgaattcactcatttttctatatttttgttctaaaggctttctggcaaaccgggtgttgatgattcatggcctacctcagatgacgaagacctcaattttg

SEQ ID NO: 30000 - DNA, 201 bp, Homo sapiens
acttttataatactctacctaggaaaaaattttcattttaggctactgtggttaagaaaataatcgaacagatatcatagtatttatataataatcaattaggggtaaggggagtaacctttggaggatatctgtatcatctctcataatccttaccccatgagaagatgtagcaaagggcagaactgaggtttaaatcta

SEQ ID NO: 30001 - DNA, 201 bp, Homo sapiens
aaaaaaaccaaacaaacaaaaaacaaactttttgtttcattgatcttttatattgtgtttttggttataaatacatttagctctgctctgatctttgttayttcatttcttctgctagctttgggtttggtttgtccttgtttctctaatttcctgaggtgtgatgttagtactgatttgctgtaagaggttttgataatt

SEQ ID NO: 30002 - DNA, 201 bp, Homo sapiens
actgttatttatttcaaaacattttaaaatttccttcttgattttattattaactccgaaatcaggagcagatcattaagttaaatgggaattaccatatrtttgtataattttgagggttccttttggaattgatttctatgtattctgctgtggtctgagaagatacttcatatgatttcagttttttaaaatttatta

SEQ ID NO: 30003 - DNA, 201 bp, Homo sapiens
gtttgtataattttgagggttccttttggaattgatttctatgtattctgctgtggtctgagaagatacttcatatgatttcagttttttaaaatttattragacttgttttgtggcctatcatatggtctatcttggagaatgttccatatgcctattaaaagcatgtatattctgcagttctcaggtagaatgtttggt

SEQ ID NO: 30004 - DNA, 201 bp, Homo sapiens
tgcttgttcttgaggggcaacagtgattcgttggtgtttctcactcaagtcagaaatattaatttaataagaaggttaacataattatggggatatagtgmcaaatagcaacacaaatcagttaggaagaaaagcagttgcttggattgggcaatataaaagaagactatacagtaggattcatcttctcttataatattg

SEQ ID NO: 30005 - DNA, 201 bp, Homo sapiens
ggtctgagaagatacttcatatgatttcagttttttaaaatttattaagacttgttttgtggcctatcatatggtctatcttggagaatgttccatatgcytattaaaagcatgtatattctgcagttctcaggtagaatgtttggtaaatatctgttagattcatttgttcttgagtgcagtttaagtccaatgtttctt

SEQ ID NO: 30006 - DNA, 201 bp, Homo sapiens
agtattgacagattccctcagcatttgcttgttcaagaaagactttatttttccttcatttatgaaacttagttttgcttgatacagaattcttggctgaygatttttttcctatttaaggagactatagataggactccagtccctcctggcttgttaaggtttctgctgagaagtctgctgttagtctgataggttttc

SEQ ID NO: 30007 - DNA, 201 bp, Homo sapiens
tttgctctgaattattccttggggccagatgcctaatatttttccagataatgggtgaaataaatgtaaaagggtggtgaaagcaaatgcttgcacatgtyttgaggaattttttaatctctaaactggtttactaaatacaagtatttttagctgggctttttcctttgttattagttttattaattgtatgtatcaaaa

SEQ ID NO: 30008 - DNA, 201 bp, Homo sapiens
aatattattgcctattgcctgatagcaaaaggtatacgttgagatactttggctttccttctaatggatttgagtttggctgtggttgatagcactttgayagttttctggcaccatctcaagtgttccacccttaatcataagtgaatgaatgattggcatccaaacacttaaccacatatggaaatttattacttaaag

SEQ ID NO: 30009 - DNA, 201 bp, Homo sapiens
ggttgtatttaaataagattatatagcatttgattcagtgcctagcccacgcttatcagcatcattggctgaaactactgtgactcctattattacctttwttattattattattattatttgagacagggtctggctctgtcacgggctggagtgcaatggtgtgatgttggctccctgcaacctctgtctcttgggctc

SEQ ID NO: 30010 - DNA, 201 bp, Homo sapiens
gtgtttagtaagtatgatcaaacaattattttcttcctacccagaatttcatgttaagcttcacagggtcctcatctcccctggatcctagctttacagtwacaaggtcctagctagccaatattatgttcatattgttagcttagttttgtcttgctcttctagaacaatagaaaacccattgaagaggaaccttgcaat

SEQ ID NO: 30011 - DNA, 201 bp, Homo sapiens
taaattggtaaagtatatcaaattatctgtgcacataaccttattaaagttcctggggtgaaattacctcttattttatttttatttatttattttttgakatggagtcttgctctgttgcccaggctggagtgcagtggcacagtcggctcactgcaacctctacctcccgggtttaagcattttctggctaatttttgt

SEQ ID NO: 30012 - DNA, 201 bp, Homo sapiens
tatattttcatttactctttattttgtttttactgtagtagaagcaacatatggcactgtgagaacaggaaatagaactttgtttgaggatagagattcckatagtcaagatgaagttgtggttgaaagccttcctacaacatcaatcaaagtccagtgcttttctcatcctacctatcaatcacctgaccttcttccaaa

SEQ ID NO: 30013 - DNA, 201 bp, Homo sapiens
gtcttatttttctgacaatgagatgatcagggtctaaatgcttcagagtcatgaaattttcctactgggtacaaaaagaaaatgaatgtcaaatacttgtrtaggccgggtgcaatggttcatgcctataatcccaacactttgggaggccgaagcaggaagatcacctgagctcaggagttcaagaccaggctgggaaac

SEQ ID NO: 30014 - DNA, 201 bp, Homo sapiens
taccagaaaactcaggtaacaacattttataagatgatgaaagaatatgtagatacgcaatgtaagggaagatttttgaggaaatgtttttccttaattgrtttttttggggagcaaggaggtgtttatttttagtatttctagataagctgaaaaatattccattggtatacatggtttctttgtggggcactggtttgc

SEQ ID NO: 30015 - DNA, 201 bp, Homo sapiens
tcaagggttggccaggcatggtggctcctgcctgtaatcccagcactttgggaggcccaggtgggcggatcacgaggtcaggagtttgagaccagcctgtscaatatggtgaaaccccgtctctactaaaaaatacaaaaattagctgggcgtggtgttgcgcgcctgtagtcccagctactcaggaggctgaggcaggag

SEQ ID NO: 30016 - DNA, 201 bp, Homo sapiens
ttacatgtagatatttatgatgccaaatggtactatctgaaaaaaattcatttacttaattatcatccctaaattcctatatgaaatttttgtataaataraaaaggtgtttaagttagtatgttatgtgtttcctttataattacattataatgaactagacttgttataaaaaatggatcttctatttaatttttataa

SEQ ID NO: 30017 - DNA, 201 bp, Homo sapiens
ggcaaaagggaagcaggcaccttcttcacaaggccgtaggaggtgaattaatgcatgaggaactaccaaacacttgtaaaaccatcagatctcatgagaaytcactcactatcatgagaacagcatgggggaaaccaccgcatgatccagttatctcctctggtgtctcccttgacacatgaggattacaattcaagatga

SEQ ID NO: 30018 - DNA, 201 bp, Homo sapiens
gtacatattatggaagtatttgtaaatagagtataaagaaataataaaatttattacacgtaggaagtaaatatttaggagaagtgagaaactacattacmttagtagttccttaatacaagtcatgtaaaaatgtatattttacgtcatgtttattaatgaatagcaatataagattcgttcaataaagacttctccttt

SEQ ID NO: 30019 - DNA, 201 bp, Homo sapiens
gactggtgatccctgtgcagctgaaaatctgcactaactttcaagtcccccaaaacttaactactaattgcctactgttgactgcaagccttatgataatataaatagtcaattaacatgtattatgtatatgtattatataatgtattgtagtaaagtaagctacaagaaagaaattatgattaagaaaatcattaaaga

SEQ ID NO: 30020 - DNA, 201 bp, Homo sapiens
tataatagcatcactttcttcatgtatatattgatgattctgtaccaaaaaatagcatagaacatactttaaaattttaattctctaaaagtagacaatgraaagtggtttttttgtttgtttttttgagacggagtctcgctctgtcatccaggctggagtgcagtggtgcaatctcggctcactgcaacctccacctcc

SEQ ID NO: 30021 - DNA, 201 bp, Homo sapiens
tttttggggtccatctgtgttgtagcacatatcagtacttcatttctttttattgtctaataatattctattgtatggctataccagttatccattcatcwgcggatgggcctctagattgtttctactttttggctactgtaaataatgctgcgatgaacattcatttataagacatatgtttttattctcctgccactg

SEQ ID NO: 30022 - DNA, 201 bp, Homo sapiens
actggtgatccctgtgcagctgaaaatctgcactaactttcaagtcccccaaaacttaactactaattgcctactgttgactgcaagccttatgataatataaatagtcaattaacatgtattatgtatatgtattatataatgtattgtagtaaagtaagctacaagaaagaaattatgattaagaaaatcattaaagaa

SEQ ID NO: 30023 - DNA, 201 bp, Homo sapiens; identical to SEQ ID NO: 3787

SEQ ID NO: 30024 - DNA, 201 bp, Homo sapiens
ctggtgatccctgtgcagctgaaaatctgcactaactttcaagtcccccaaaacttaactactaattgcctactgttgactgcaagccttatgataatataaatagtcaattaacatgtattatgtatatgtattatataatgtattgtagtaaagtaagctacaagaaagaaattatgattaagaaaatcattaaagaag

SEQ ID NO: 30025 - DNA, 201 bp, Homo sapiens
tggtgatccctgtgcagctgaaaatctgcactaactttcaagtcccccaaaacttaactactaattgcctactgttgactgcaagccttatgataatataaatagtcaattaacatgtattatgtatatgtattatataatgtattgtagtaaagtaagctacaagaaagaaattatgattaagaaaatcattaaagaaga

SEQ ID NO: 30026 - DNA, 201 bp, Homo sapiens
catttgtgttttttcaatgaaagtattttaattgatttctataattgtttacttagcaaataactgtcaagtatcttttagatactaagcatttttctaaygttacagaatgcaaacattttatttcttttttctttttttttttttttttgagatgtagttttgctcttgttgcccaggctggagtgcagtggtgtgatc

SEQ ID NO: 30027 - DNA, 201 bp, Homo sapiens
tatattcctgtttttttctccagtatacttctgtcatgttgctgtcctaaccaaaataaaaaacatcccaaaaattaacataatcattttcaaaccaagcrtgatgattctggtcatactaacactgcatgaatttatgattgactttgtcatatttatgtataattgattatatgtcccttttggtttttagagtctcct

SEQ ID NO: 30028 - DNA, 201 bp, Homo sapiens
ctatattcctgtttttttctccagtatacttctgtcatgttgctgtcctaaccaaaataaaaaacatcccaaaaattaacataatcattttcaaaccaagygtgatgattctggtcatactaacactgcatgaatttatgattgactttgtcatatttatgtataattgattatatgtcccttttggtttttagagtctcc

SEQ ID NO: 30029 - DNA, 201 bp, Homo sapiens
tgctcctctaattaaagattacttttctccacatcgaccagcatgctcacattggtatatgtgcacttttctattttagttatagtcacttggaacataaycttacattcaaatcataactgcatgttttattaaacctatattcctgtttttttctccagtatacttctgtcatgttgctgtcctaaccaaaataaaaaa

SEQ ID NO: 30030 - DNA, 201 bp, Homo sapiens
ccccctcgagacagagtctctctgtcacccaggctggagtagtgtgatctcagctcactgcaacctccaccccctgggttcaagcacttctcctgcttcarcccccctagtagctaggattacaggtatacgctaccatgtccagctaatttttgtatttttagtagagacagggtttcgccatgttggccagggtggtct

SEQ ID NO: 30031 - DNA, 201 bp, Homo sapiens; identical to SEQ ID NO: 3769

SEQ ID NO: 30032 - DNA, 201 bp, Homo sapiens
ttgtgcttgcagacgttgtgatgggctgtgcttgttgagttttagccaggaggtggcgcttgcaaaagagcgccagttgcagtggtagtggtgggatttgwttgccttaggttacccaagggaaatactctggagtctcagacaatggttggggccatggatctcccaaaagtccctgtccattgtgttatgctaccatgg

SEQ ID NO: 30033 - DNA, 201 bp, Homo sapiens; identical to SEQ ID NO: 3770

SEQ ID NO: 30034 - DNA, 201 bp, Homo sapiens
cactttcaagccatgcccctcctgatccgcctgtggaacaaggggcatccagctcctgcagcctgggcacacttcttgttcaccctgtggttctggccgayggggttatccccactcaagatgatatggcagctctcatttgggagcttctctccacctgtgatggcagcctgggtcagctggctgacttccggcaggacg

SEQ ID NO: 30035 - DNA, 201 bp, Homo sapiens
atgctcaacatcactaatcatcagggaagtgcacatcaaaaccaccaagtgatatgatcttattccagttagaatcgctactatcaaaagacaaaaaatarcaaatgccagcaaggctgcagagaacagggaactcttagacattgttggtgggaatgtaaagtagtacagccattataaaaaacaatgtggagtttcttc

SEQ ID NO: 30036 - DNA, 201 bp, Homo sapiens; identical to SEQ ID NO: 3771

SEQ ID NO: 30037 - DNA, 201 bp, Homo sapiens
gactctgtctcaaaaaaaaaaaaaaaaaaaaaaaatgaatgtagcaattgtttatttctgcaatattctgatttatcttgtgctaataattaatatctgtrtgtaatggacacatacgcatacaccaaatgaaagcggtcaaaatttattattgttttctaaaataaactacctattatagaatcataaggaaggaaagat

SEQ ID NO: 30038 - DNA, 201 bp, Homo sapiens
atttgccctgttactggtaatgttagcattgatcactaacagtggtatctgctgaatttctcctctgtaatgttattttttcaccttgtggttaattagtrttttacagggaggtaatttgagactatgtacatatctctactccccatcgaaccctcaatttattcatttgcttgtatcaaataaaccatggattcatgg

SEQ ID NO: 30039 - DNA, 201 bp, Homo sapiens
gattttttacttttaaaagtacctccagcaatgaggacattttatattctcgtcaggaagctttgttaactttagtattcatagttgttaaaccttgctcmtaaattcattcatctctaaaactcagaatcctgttgacttgattttttagtccttttctgtgtgtgaatactggtcttgcttgataatcatagatatatt

SEQ ID NO: 30040 - DNA, 201 bp, Homo sapiens
ggactacaagtgtgtactaccaaacatggctaatttttgtatttttagtagagatggggttttgctatgttggctggtcttgaacacctggcctcaagtgrtccgcccacctcagcctcccaaagtgctgggattacaggcatgagccaccacgcctggcctttttttttttttttttttttaaatacagagtctctgtta

SEQ ID NO: 30041 - DNA, 201 bp, Homo sapiens
atttctcctctgtaatgttattttttcaccttgtggttaattagtattttacagggaggtaatttgagactatgtacatatctctactccccatcgaaccytcaatttattcatttgcttgtatcaaataaaccatggattcatggtttattttattcagtgagttataattcattaatattgttattaaaaatttgtttt

SEQ ID NO: 30042 - DNA, 201 bp, Homo sapiens
gtgaattatacttttctgttcttacttggttttatttatctctacccgcacttgatgaatataggacagaatctgtcttctgtttatatttttagtttttmccaggatagtgcctatgatgtgatagacacataagtgcttattgtcttactgactggtatagtttggaagtgtgtcctgccccaaatctcatattgaaat

SEQ ID NO: 30043 - DNA, 201 bp, Homo sapiens
tagccacctctccctcagggaaatcttccctggacccagtatagatcaaattctcttttgtggtcatagaactctgtttccttacagcatctatctgaatkcataattgtcactttttttgtattttgtcactttttttgtcttcactatactttaagctaagcaagtgcagaggtcttgcctgttttatcttcagagctt

SEQ ID NO: 30044 - DNA, 201 bp, Homo sapiens
tgggattataggcatgaggcaccatacctggccagtttatttattttaaaatgttggtctttttcttcatgttataacttttttattagttttgcttaaattttttttttcatttaagaaataacattaagagtgcatgggttttttttccttgtgaaagctatcagttaagagtgcatgtttaactaggaaatataaaca

SEQ ID NO: 30045 - DNA, 201 bp, Homo sapiens
atttctctacctactgacttcccagtttggttttccctttaggctagtactctagctccatctgagttgctggaaaggatatgattttgtttctctctctccctttttttttttttttttttttttttaaataactgcatagggctgggcgtggtggctcacaactgtaatcccagcactttgggaggccaaggtgggcat

SEQ ID NO: 30046 - DNA, 201 bp, Homo sapiens
ctcttaaaattttgcagtggtctacttatcattgttttctgtttgtaatggaaaggtggtcaggggaagccattttatagaaatatggccagttgaattcttttttttttttttttttttactttggtaaataacaaaggattgataagtactttgagggagtggggattgcaaaaaaaagaatatactggaaaatacata

SEQ ID NO: 30047 - DNA, 201 bp, Homo sapiens
accttttgaattctttatctggtatttcaaagatttcatcttgttttgtatccattgctggagagttagtgtgatcttttagggggattatagaatgctgttttttcatattaccagaattatttttctggttccttctaatttgggtggactatttcttgtaattatttttgaatttatttttgatttgactgggttttt

SEQ ID NO: 30048 - DNA, 201 bp, Homo sapiens
ttcatattaccagaattatttttctggttccttctaatttgggtggactatttcttgtaattatttttgaatttatttttgatttgactgggttttttttwatttatttttccccccttgaggatgtgacttgaatgtctatagtttattgtcacctagcttcagctctgggtgctttcagtagtgaagaccttgtagtag

SEQ ID NO: 30049 - DNA, 201 bp, Homo sapiens
ttgctatgttggctggtcttgaacacctggcctcaagtgatccgcccacctcagcctcccaaagtgctgggattacaggcatgagccaccacgcctggcctttttttttttttttttttttaaatacagagtctctgttacccaggctggagtgcagtggcatgatcaaggctcactgaagcttaaatcttctgggtctgg

SEQ ID NO: 30050 - DNA, 201 bp, Homo sapiens
tttctctacctactgacttcccagtttggttttccctttaggctagtactctagctccatctgagttgctggaaaggatatgattttgtttctctctctccctttttttttttttttttttttttttaaataactgcatagggctgggcgtggtggctcacaactgtaatcccagcactttgggaggccaaggtgggcata

SEQ ID NO: 30051 - DNA, 201 bp, Homo sapiens
attttagtcaaccattttcctatcagtaaaagttgtatcaaaaagtatttagatttttctaagccattgtttacttaaatgaagcagcttctgcagtgttstatttatacttaacagggcatactccagagtttcttatcatgccacatatcttaacactaaatatttctataattagaaatattttaaatgtttaacgct

SEQ ID NO: 30052 - DNA, 201 bp, Homo sapiens
cttaacagggcatactccagagtttcttatcatgccacatatcttaacactaaatatttctataattagaaatattttaaatgtttaacgctgtactatarcaagtgtattctattttttaaaatacacttttttttccctcttaatcaggcatcccccgaaccggaataagttcagagaagctcccctcttatttttggt

SEQ ID NO: 30053 - DNA, 201 bp, Homo sapiens
ttttcttttttcttatgtaactgtcatttcccatggattttttaaagtagtggtcctgccttgcaaatgaaggaagtaaagagcactgaaaaagaaaaacrgacctcgaaagaatctgtgaattcaccagtgtttgggaaggccagtttactaactggtggcctgctacaagtggatgatgacagcagtttaagtgaaata

SEQ ID NO: 30054 - DNA, 201 bp, Homo sapiens
cccgaaccggaataagttcagagaagctcccctcttatttttggtggggaatacaaagtagagttaggtcttttgatattagttccttgttgaactgtgcrcgtaagttaatattttgtctgttaatatgtgtccttgggacttccatgtttggtttgcagagtcaatagccatctgaagatgaaaagataagcttaatct

SEQ ID NO: 30055 - DNA, 201 bp, Homo sapiens
cttggctcactgtaaccttctcctcccaggttcaagcaattctcgtgcctcagcctcccaaacagctgggattccaggcacccaccaccatgcctggctawtttttttgtatttttagtagagacggggtttcaccacgttggccaagttggtctcgaactcctgacctcaggtgatctgcctgcctcagcctcccaaagt

SEQ ID NO: 30056 - DNA, 201 bp, Homo sapiens
cccaaacagctgggattccaggcacccaccaccatgcctggctattttttttgtatttttagtagagacggggtttcaccacgttggccaagttggtctcraactcctgacctcaggtgatctgcctgcctcagcctcccaaagtgctgggattacaggcatgagccactgcaccaggccagagttgatatctttgaagtg

SEQ ID NO: 30057 - DNA, 201 bp, Homo sapiens
aagagggtaatccaaagtggatctgtggattccttaggagctaagaggaaagaaaggccagagtggagtgcattcattcaggtcaaggcaattgcaggtgraaacatagtctactatctctcaggacctttccatcttcaaaacctttatgtttgcatacctgcccagcctgagcaagttgagagatttaaaattagacta

SEQ ID NO: 30058 - DNA, 201 bp, Homo sapiens
agcaggccccaaatcatttcttttctaacaaggagcagcctgaaaaatcgagctgctgacatagataagcaagctgaaaccttgcatgggtgaatgccggmaattgtgccaatagaaaagggctacctcagggctggggatgttcaacatggaggcttcatcttccctattctttgtacagtaaaggaacaggcaacatgg

SEQ ID NO: 30059 - DNA, 201 bp, Homo sapiens
tggagtgcagcagcacgatcttggctctccgcaacctccgcctcccgggttcaagtgattttcctgactcagcctcccgagtagctgggatcacaggcacmcaccaccacgcccagctcatttttatatttttagtagacagggcatttcatcatgttggccaggctggtctggaactcctggcctcaagtgatccaccca

SEQ ID NO: 30060 - DNA, 201 bp, Homo sapiens
gtccggctactttttgtatttttagcagagatggggttttaccatgttggtcaggctgatcttgaattcctgacctcaagtgatctgcctgccttggcttyccaaagtgttgggattacaggcgtgagccactgcacccaacccctctttataaacaaaagtgtttctgaaggtagaaaattataagaaataacctttaat

SEQ ID NO: 30061 - DNA, 201 bp, Homo sapiens
catgttggccaggctggtctggaactcctggcctcaagtgatccacccacctcgacctcccaaagtgctgggattacagatgtgagccaccgtacccggtyttatttacattctttaaacctcagtgtttagaacttagcaggaactcagtaaataattatcgagtaaaatagataaagactgtttatacaaagataactt

SEQ ID NO: 30062 - DNA, 201 bp, Homo sapiens
aagcattgagtgatgttaaaacataaagagatgctttgacttgacttttttacctctgcatacatccataaggaactactttcttatatttttcagttcataattaataaagtatgtgctaagtatattactgctgcatagtataattctgctaatttgcaggattcatttaagaatccagtgaaggatagtgcaaaaaaa

SEQ ID NO: 30063 - DNA, 201 bp, Homo sapiens
agcattgagtgatgttaaaacataaagagatgctttgacttgacttttttacctctgcatacatccataaggaactactttcttatatttttcagttcataattaataaagtatgtgctaagtatattactgctgcatagtataattctgctaatttgcaggattcatttaagaatccagtgaaggatagtgcaaaaaaaa

SEQ ID NO: 30064 - DNA, 201 bp, Homo sapiens
gcattgagtgatgttaaaacataaagagatgctttgacttgacttttttacctctgcatacatccataaggaactactttcttatatttttcagttcataattaataaagtatgtgctaagtatattactgctgcatagtataattctgctaatttgcaggattcatttaagaatccagtgaaggatagtgcaaaaaaaaa

SEQ ID NO: 30065 - DNA, 201 bp, Homo sapiens
cattgagtgatgttaaaacataaagagatgctttgacttgacttttttacctctgcatacatccataaggaactactttcttatatttttcagttcataattaataaagtatgtgctaagtatattactgctgcatagtataattctgctaatttgcaggattcatttaagaatccagtgaaggatagtgcaaaaaaaaaa

SEQ ID NO: 30066 - DNA, 201 bp, Homo sapiens
ggcagtagtgtcaagaaaagaaagggaaagttggaacaggaatgtggatttctaatttggggtataagtttcagtagacagttactggagatatcctatargaatatagtgaattgacgcttgagaccttcccaatgagattttaaatgtttgaacttgaataaatttctgtttattgagtaccaaccatgtgctaggctg

SEQ ID NO: 30067 - DNA, 201 bp, Homo sapiens
tggcgtgatctcggctcactgcaacctccgcctcccaggttcaagtgattctcctgcctcagcctcctgaaaaatagctgggattacaggtgtgcatcacyacgcctggcaaatttttgtattttaagtagagatggggtttcaccatgttggccagactggtctcaaactcctgatctcgggtgatccacccgcctcggc

SEQ ID NO: 30068 - DNA, 201 bp, Homo sapiens
atcccggctaacacggtgaaaccccatctttaccaaaaatacaaaaaattagccaggcgtggtggcaggctcccgtagtcccagctactcaggaggctgasgcaggagaatggcatgaacccgggaggtggagtttgcagtgagccaagattgcaccactgcactccagtgtgggtgacagagcgagacaacgtctgaaaa

SEQ ID NO: 30069 - DNA, 201 bp, Homo sapiens
aaatgaaaaggcagaaagagaagtaagtatcaagaaagataaatatttttcaaacctcctgaaagaaaatttaaaataatatatagttatgtagttaactrtaaaaataaatagataagcttatttactctatcagtttagaaacatcccttgttttcagcaaataaaagagctgagagatgctttactttgagtaaagat

SEQ ID NO: 30070 - DNA, 201 bp, Homo sapiens
tgaggcaggagaatggcatgaacccgggaggtggagtttgcagtgagccaagattgcaccactgcactccagtgtgggtgacagagcgagacaacgtctgaaaaaaaaaacaaaaaaacaaaaaacaaacaaacaaaaaaacataaaaatcactgtgggctgggcgcggtgcctcacgcctataatccttgcactttggga

SEQ ID NO: 30071 - DNA, 201 bp, Homo sapiens
gcgtgatgtacaatgataaagatgtaaaaagtagcagtaattttggaattcattaataatgaaaaacactctttgtgccttgttaaaaagatactgttatrgagaacattatacaatgttactttatatattcctactgtatcataaaattttgttttgtttctgacagtttagcttatttatgttgggtgaatgaatttg

SEQ ID NO: 30072 - DNA, 201 bp, Homo sapiens
tctcctgagagatatcttcacttgaaggtaataagttttatatttttatcttgaattattaagtgcatattgtataaagtatacattatttattaatcatkttgtttcaaaacccattcagcctaccattgaaatgaaagattctgttccaaataaagcaggaggaatgaaggatgtacaaacatccaaagcaggtaaatg

SEQ ID NO: 30073 - DNA, 201 bp, Homo sapiens
taggaaattcatattatatttgaaagtgattagaaaatctttagcaattcattctttttgtaaaattgaaactcattattgatactaattttaacagagtrtctctgagaattttccacagaagtatgttgatcctttagctggggctgcagacggaaaagaaaaaaatataggaaatgaacaagcagaaggtaagagcta

SEQ ID NO: 30074 - DNA, 201 bp, Homo sapiens
agtttttacttcttagttacaatccagtgatttgggagtaactaaacatagactaagtttaacagttgaattttaattatttcctaatttttctttgtccrtacttgattactcaaggataaagttattttaaaaacatgcaccctgacagaaaagacatctgaaaaacaaaacaagcaaattaatcgtccactttcatgt

SEQ ID NO: 30075 - DNA, 201 bp, Homo sapiens
agcccaaatctaattgctacttccatgtctaaagaccattgtttgtaggcaatgagctccagccttttactgtcacattcaagtttagtgtagcattcacytgtctctagtttctttctctttttctttcaagttcctaggaaacatctagatgccgtgtgcctaatctgtgctcaccttctattctctaagtagaatggt

SEQ ID NO: 30076 - DNA, 201 bp, Homo sapiens
tctttttctttcaagttcctaggaaacatctagatgccgtgtgcctaatctgtgctcaccttctattctctaagtagaatggttttctcccattttttgtmtcatgaactcctctattttgtctcttctgttttaaagctgtccttgtgttcagatatatcttttcatatatcaaccttacatatcacattttatcataat

SEQ ID NO: 30077 - DNA, 201 bp, Homo sapiens
ggctcactgcaacctccgccttctgggttcaagcgattctcctgcctcagcctcctgagtagctgggatcacaggtgcgtgctaccatgcctggctacttyttgtacttttagtagagacggggtttctccatgttgctcaggctggtcttgaactcctggcctcatgttctgcccgcctcagcctcccaaagtgctggga

SEQ ID NO: 30078 - DNA, 201 bp, Homo sapiens
cagatatatcttttcatatatcaaccttacatatcacattttatcataatggtatgataaaattatggtttttgaagcagggaatatacattttctcttawgttgttggtaattcgtgttttttgaattagtgaatgaattgagatgggggaaatgttggaattttataaaaaattatttttattctttgttagaattact

SEQ ID NO: 30079 - DNA, 201 bp, Homo sapiens
tttattttaaaatgcaagcttttagagtttatttgcatgcttttgggagtgacccagtagagaaggaaatgcttatgaaatttagttttgtttgcatgtcwaagcctcagaaagcttgatccattatcttttaaagatttataataaactaattgtccttagaacttctattaatgtagttttttgctaagaggttgttca

SEQ ID NO: 30080 - DNA, 201 bp, Homo sapiens
agtaactctcctggtggacagaaaatgccagctcaatgtctgtgacaacgaaaacaggacagctctgatgaaggtatatagtagccagctctttcagcatsagatggatttgacttaaatacatagaatgaaaatgaatttatctcattaaaatataattaattggtgaaacctgtggagtgtttattttgcattcctaga

SEQ ID NO: 30081 - DNA, 201 bp, Homo sapiens
gtttcaaaaatggagtattgtaatataattgaatgtgtcaatgatgatcttaaagttaaactatcatatatggattttaaaaaattatctaataataaacmtgcaaacatataggccatactgaattgaatttaaacatttcttgataattgaagatatcagagtacttttgacagtagcatcatgaacagctatgatttt

SEQ ID NO: 30082 - DNA, 201 bp, Homo sapiens
ttagggtaataaaccaacatacaaagcggcatatcacacaatgaactttttattttgtaacaatacagattttaagataagcatatttaactgcagatttwgcttaaaccaagaagaagagaagagaagaaatgctgatacgttgtatgaaaaaattagggaacagttaagaagaaaagaagagcaatataggaaagaagt

SEQ ID NO: 30083 - DNA, 201 bp, Homo sapiens
acagctctgatgaaggtatatagtagccagctctttcagcatcagatggatttgacttaaatacatagaatgaaaatgaatttatctcattaaaatataaytaattggtgaaacctgtggagtgtttattttgcattcctagaatttatgatctgtttcttggtctaatactcccaggctgtacaatgccaggaagagaaa

SEQ ID NO: 30084 - DNA, 201 bp, Homo sapiens
aggaagcttgatctaaatttgtttgttatgatattgttagtatatttttcttgtcccttacttttactttttctgtatatagtttaataccccttgtagaragttattatcttttatattacctgtaaaaaagattcctgtaaactttatgaatagggtaaataaattacaaatgcagagcttttatttaaaaaaacaata

SEQ ID NO: 30085 - DNA, 201 bp, Homo sapiens
acgctcagaggcaactttctcgagaacagaatgccagaatgttacaagatggaattctgaccaatcacctttccaaacaaaaggagattgaaatggctcaraagaaaatgaattctgaggtatttctatttcctttagtcattttcaaatatgtgtgtatatgtatttatatgtgtatatattttaaaaaccaactatata

SEQ ID NO: 30086 - DNA, 201 bp, Homo sapiens
gaggacatatcagtagcaacaaagctgcttttgtatgatgcaaatattgaagcaaaaaacaaggtatagatcaaccaactttatttttacagtatttgaartgcgtttgtttcaacagtgacatatgtaagggttagttttctgtatttggaagcgcaagcattccctgactgaaagtattttaaaataacttaattgtct

SEQ ID NO: 30087 - DNA, 201 bp, Homo sapiens
acatatcagtagcaacaaagctgcttttgtatgatgcaaatattgaagcaaaaaacaaggtatagatcaaccaactttatttttacagtatttgaagtgcrtttgtttcaacagtgacatatgtaagggttagttttctgtatttggaagcgcaagcattccctgactgaaagtattttaaaataacttaattgtctaaga

SEQ ID NO: 30088 - DNA, 201 bp, Homo sapiens
aggaaccgaaggggttccttaagtccaaggaagacagtcctcttttataaatcaggaggggacaaaggacattctaatcattcttttgttaccagtgattytgttgctgcattgttgccactgagactggtcctgcagtctggaaatgattgacctttgctacaaggatgctcttactgattgagatccctcagccttcat

SEQ ID NO: 30089 - DNA, 201 bp, Homo sapiens
gtcttgcctgttttatcttcagagcttagtttaatgtcttccacattgtaggccctcaatatgtaattggtcagtgtcttaatgagtgaatgttatagtgyacagtgtgttatatggaaaaatgctcatatatttctatcttgttttcttcctgatacagattctgttagcctattgaaaatccaggatgcagctctttca

SEQ ID NO: 30090 - DNA, 201 bp, Homo sapiens
ttctgaggtatttctatttcctttagtcattttcaaatatgtgtgtatatgtatttatatgtgtatatattttaaaaaccaactatatatgcatcttggamagtgtcgaggatttttaaaccatatatgtgtatcttggggtagtggtagtgtttttggtccattggataaagtgatgttcttaattcagctccacttgtc

SEQ ID NO: 30091 - DNA, 201 bp, Homo sapiens
tcttacaggatgacctcacaccacttttacttgcagtaagtggaaaaaagcagcaaatggtggaatttttaataaagaaaaaagcaaatgtaaatgcagtrgataagttggaaaggtacagtagctggttttgttttggatttttaaacttgtatgtttaaaagtttttttagatctgtgttttgcatgttacaggttttt

SEQ ID NO: 30092 - DNA, 201 bp, Homo sapiens
agtcattttcaaatatgtgtgtatatgtatttatatgtgtatatattttaaaaaccaactatatatgcatcttggaaagtgtcgaggatttttaaaccatrtatgtgtatcttggggtagtggtagtgtttttggtccattggataaagtgatgttcttaattcagctccacttgtctgcagcagtcaagtaatgacattc

SEQ ID NO: 30093 - DNA, 201 bp, Homo sapiens
ggcgcaatctcagctcactgcaacctccacctcccgggttcaagcgattctcctgcctcagccccctgagtagctgggattactggtgcacaccaccacayctgactaatttttgtatttttagtagagatggggtttcatcatgttggtcaggctggtcttgaactcctgacctcgtgatccacccgccttggccttcca

SEQ ID NO: 30094 - DNA, 201 bp, Homo sapiens
ttttagtagagatggggtttcatcatgttggtcaggctggtcttgaactcctgacctcgtgatccacccgccttggccttccaaagtactgggattacagrcattaagccactgcgcccggccactttttaactcaatattgaacttcttcacccttttatggtattgttctaacctctgcttatgtacttttccttcaga

SEQ ID NO: 30095 - DNA, 201 bp, Homo sapiens
ttagtagagatggggtttcatcatgttggtcaggctggtcttgaactcctgacctcgtgatccacccgccttggccttccaaagtactgggattacaggcrttaagccactgcgcccggccactttttaactcaatattgaacttcttcacccttttatggtattgttctaacctctgcttatgtacttttccttcagaaa

SEQ ID NO: 30096 - DNA, 201 bp, Homo sapiens
tcaagaacatagaaattgtattagggtaataaaccaacatacaaagcggcatatcacacaatgaactttttattttgtaacaatacagattttaagataarcatatttaactgcagatttagcttaaaccaagaagaagagaagagaagaaatgctgatacgttgtatgaaaaaattagggaacagttaagaagaaaagaa

SEQ ID NO: 30097 - DNA, 201 bp, Homo sapiens
acctcccgggttcaagcgattcttgtgtctcagcctcctgagtagctgatatgataggcgtgtgccaccacacccagctttttttttttttttttttttgkatttttttgtttgttttttgtgtttgtttgtttgtttgttttttgagatggagtctcgctctgtcgtccaggctggagtgcagtggcgcgatctccgctc

SEQ ID NO: 30098 - DNA, 201 bp, Homo sapiens
ttcaagcgattcttgtgtctcagcctcctgagtagctgatatgataggcgtgtgccaccacacccagctttttttttttttttttttttgtatttttttgkttgttttttgtgtttgtttgtttgtttgttttttgagatggagtctcgctctgtcgtccaggctggagtgcagtggcgcgatctccgctcactgcaaggt

SEQ ID NO: 30099 - DNA, 201 bp, Homo sapiens
agcgattcttgtgtctcagcctcctgagtagctgatatgataggcgtgtgccaccacacccagctttttttttttttttttttttgtatttttttgtttgktttttgtgtttgtttgtttgtttgttttttgagatggagtctcgctctgtcgtccaggctggagtgcagtggcgcgatctccgctcactgcaaggtctgc

SEQ ID NO: 30100 - DNA, 201 bp, Homo sapiens
tttctattggatttataaacattttagtaaactaacttctttttagttagtttaatgatctttcctaattgaggagtaattatgactaattaaaaaaagatttttttttttttttgagatggaatctcactctgtcgcccaggctggagtgcagtggcacaatctcggctcactgcaacatccgcctcccgggttcaagcg

SEQ ID NO: 30101 - DNA, 201 bp, Homo sapiens
gtccttaactgaattcagtaataaacagcaatgtgtacatatgaggacaagaaggtgaatcaatgtatgtggtaatattttttaagttgtatatgtcatarttaaatattattaacataatttattttttaacataacttaataataaggtgatttataaaatcagtaacaaaatgtcttatcaggttgttgtgagacaac

SEQ ID NO: 30102 - DNA, 201 bp, Homo sapiens
gttaatctataactggttaaatatatagtgttttatcatactaatttagtgggtagccttcttttgtgttttcattataattaatttaaattttattatctttttttttttttgagatggagtctcgttctattgcccaggctggagtgcagtggcacagtggcgcgatctcggctcaatgcaagccccacctcccgggct

SEQ ID NO: 30103 - DNA, 201 bp, Homo sapiens
ttgtatttttagtagagacagggtttcaccatgttggccaggctggtcttgaactcctgagctcaagtgatccgcctggctcggtctcccaaagtgctggrattttaggcatgagccactggtccagcctaagtatgattttcctcttcaccttggactctgatctctggtttatagctaatatttgataataagttaatg

SEQ ID NO: 30104 - DNA, 201 bp, Homo sapiens; identical to SEQ ID NO: 3768

SEQ ID NO: 30105 - DNA, 201 bp, Homo sapiens
agtataaaagaagacaagtgatgaagaagtagatctctagatgagaccgtgtattaaaaaatattagagcctgatgagcacagtggctgacacctgtaatyccagtgctttaggaggctgaggcaggagaatcgcttcagactaggaatcaagaccagcctgggcagcatagcaaaactctgtctctaaaaaatatgaaat

SEQ ID NO: 30106 - DNA, 201 bp, Homo sapiens
tttataatcactggcattgccatggtcattcacatctataaatatttaaacttatagttcatgtggtggtgcttggaatgcaaaaatataaatgcttatcrtaaggtaatttcctatctttctacattttaccaagtttgtaaatttgagtatttatctgataaaatatagtttgaaaacaagagtaatatgttttagttc

SEQ ID NO: 30107 - DNA, 201 bp, Homo sapiens
gtacaattcagtgtctcttagattatttacagagttgtgtaaccatcaccacagtcaattttagaacattgttatcaccctgaaaagaaaccccacatccyttagccatcaccaccatccctgtccatgtccctccaccttctccaatcctaggcaaccaccatctactttttgtctccttaaatttgcctgttctgaaca

SEQ ID NO: 30108 - DNA, 201 bp, Homo sapiens
caagtaatgacattcagaatggcctcatccaaaggagaagcttttaataatatcttccgtaagaattgatggtctttccacaatctcaaaacccttgctaytaacaatagatgcttgagattttggaagtgatttcatcaccttgatatattaatggagaggttagtttattgcttctacccataggaaaggaggaaaagt

SEQ ID NO: 30109 - DNA, 201 bp, Homo sapiens
cttagtacaatgcctagatttattattcatcaataaacgtaattgataactgactataaagatgtgagaaaagtagagtatctatagaatattctcagaaraaaggaacttgaaaaacttcaggaaatttcgtctgtccaaatatatgtagagccaaggctcttactatgggttggtgtatgggttagatatcagagtata

SEQ ID NO: 30110 - DNA, 201 bp, Homo sapiens
ccatgaaacagataaatggaaatgcttatacctgaaatgaggattttgaagttaaggttcaattaagtgtgttattttgacagttaattccagatttccasataaactgaagtatattgctatatctcttaatacttttctgtcagtagctttttatatatttcagttgatgtgattttatttttattcttgtcaatttga

SEQ ID NO: 30111 - DNA, 201 bp, Homo sapiens
ggcaaagggaagaaagacagcttttattggataaacttttcctttattgaagacaagccatagatgggtgataaagagaaaagaggctttaaattcacacragactggatttaattccttgctttcccacttgttaagtgtgtaagcttggggaccttacttatcaccaaatatgttttctgatataaaaagggggatact

SEQ ID NO: 30112 - DNA, 201 bp, Homo sapiens
gcccacgcttatcagcatcattggctgaaactactgtgactcctattattacctttattattattattattattatttgagacagggtctggctctgtcacgggctggagtgcaatggtgtgatgttggctccctgcaacctctgtctcttgggctcaagcaatccccctgcctcagcctcctgagtagctgggactacag

SEQ ID NO: 30113 - DNA, 201 bp, Homo sapiens
gggctcactccattctcctgcctcagcctcccgagtagctgggactacaggcacctaccgccacacctggctaattttttgtgtttttttttagtagagaygaggtttcaccgtgttagccaggatggtctaaattttattgtctttataatacacttgcttctttatttatttgttttttttttgagacagagtctcact

SEQ ID NO: 30114 - DNA, 201 bp, Homo sapiens
gctgggtacggtggctcatgcctgtaattccagcattttggaagccaaggtaggctgatcacctgaagtcaggagttccgagaccagccttgacaaaatgkcaaaaccccgtctccaccaaaaatacaaaaaaattagctggacatagcggcacacgcctgtagtcccagctactctggaggctgaggcaggagaattgct

SEQ ID NO: 30115 - DNA, 201 bp, Homo sapiens
caattctcctgcctcagcctcctgagtagctgggattacaggtacccaccaccatgcccagctaatttttgtatttttagtagagatggggttttgccatrttggccaggcgggcctcgaactcctgacctcaggtgatccacccgcctcagcctctcaaagtgctgatattacaggtgggagccactgtgctcagcctag

SEQ ID NO: 30116 - DNA, 201 bp, Homo sapiens
gagtgcaatggtgtgatgttggctccctgcaacctctgtctcttgggctcaagcaatccccctgcctcagcctcctgagtagctgggactacaggcatgtrccaccacatccagctaatttttgcattttttgtagagatgggatttccccatattacccaggctggcctcaaactcctggactgtagtgatccacccatc

SEQ ID NO: 30117 - DNA, 201 bp, Homo sapiens
gctgcgatgaacattcatttataagacatatgtttttattctcctgccactggattttatcttcagagttaatcaggctgctttcaccatctctctgcttkactcctgctgttcttcctgcctttgcagtttctgttcatctagcctcattcattcagacctggcacacaattccccctcctttcggaagctttctctgac

SEQ ID NO: 30118 - DNA, 201 bp, Homo sapiens
tttacaaagatgagcacttgagcacccaagatgcttatgtctattagtagatgtaaatagttaattctacacagacaggcaagatactaaattggtaaagyatatcaaattatctgtgcacataaccttattaaagttcctggggtgaaattacctcttattttatttttatttatttattttttgagatggagtcttgct

SEQ ID NO: 30119 - DNA, 201 bp, Homo sapiens
attctcctgccactggattttatcttcagagttaatcaggctgctttcaccatctctctgcttgactcctgctgttcttcctgcctttgcagtttctgttyatctagcctcattcattcagacctggcacacaattccccctcctttcggaagctttctctgactgttctggatctcattgacctcacattttagcactct

SEQ ID NO: 30120 - DNA, 201 bp, Homo sapiens
gaggtatttctatttcctttagtcattttcaaatatgtgtgtatatgtatttatatgtgtatatattttaaaaaccaactatatatgcatcttggaaagtrtcgaggatttttaaaccatatatgtgtatcttggggtagtggtagtgtttttggtccattggataaagtgatgttcttaattcagctccacttgtctgca

SEQ ID NO: 30121 - DNA, 201 bp, Homo sapiens; identical to SEQ ID NO: 3779

SEQ ID NO: 30122 - DNA, 201 bp, Homo sapiens
ttaagtaattaaatataagtagaaaccacttaatctagtaaaggaaagttattcaatcaaatgctcatgtttttcaccctgaaaagaaatctacatttccrtttctttattacgtagccagagctgggatccgtagattcataccgctttcccacccaaagagctccagcttttctcctacgccgtacgacataaccttag

SEQ ID NO: 30123 - DNA, 201 bp, Homo sapiens
atggagtcttgctctgttgcccaggctggagtgcagtggcacagtcggctcactgcaacctctacctcccgggtttaagcattttctggctaatttttgtrtttttagtagagatggggtttcactgtgttggccaggctggtctcgaactcctgacttcaagtgatccacccgctttggcctcccaaagtgctaggatca

SEQ ID NO: 30124 - DNA, 201 bp, Homo sapiens
agaaatctacatttccatttctttattacgtagccagagctgggatccgtagattcataccgctttcccacccaaagagctccagcttttctcctacgccrtacgacataaccttagccttaagcccaccagagtgctcgctaaagcagctcagcatagacagttgttgcaaatgacttgatttgggaaccttgtttcgca

SEQ ID NO: 30125 - DNA, 201 bp, Homo sapiens
tcaggcttgaaaaagataatgccaagttaaaagttacagtcaaaaagcaaatggacaaaattgaggagcttcagaaaaacctgttaaatgcaaatttggtragtcagccacttaatttctgtcgtactgaaaaggaattttattgctttagtaggacaagttgagtatcccttatttaaaatgcttgagaccagaagtgtt

SEQ ID NO: 30126 - DNA, 201 bp, Homo sapiens
ctttggcctcccaaagtgctaggatcacaggcatgagccaccatggctggccatatctctcttattttagaacacccctcatgcccactatattttatgartcatcaagtatagtcaggctttttgttcagcagagttttgatgttttttcttaatatgtctagggatggactacagaaaaatatgctgttgttagtggtt

SEQ ID NO: 30127 - DNA, 201 bp, Homo sapiens
gctggaattataggcatgagccactgtgtccaaccgggtatagaatttttttatctcaggacttttacgaacttaatccataggggtcccaatatcattcrtttcattccaattataacccctatgcatgggataaaaaatactatcacatgtttaatttttctagttggttatttgagtcttgaaatgtccagtttggca

SEQ ID NO: 30128 - DNA, 201 bp, Homo sapiens
agaatctgggtgacaggatcaacagaagtccaaacctcggcattttgcagtatagtaacaagcctgcatatgtaccctttcaatctaaaataaaaatggawtttttttttttaaaggaaaagatttggtggctgggtacggtggctcatgcctgtaattccagcattttggaagccaaggtaggctgatcacctgaagtca

SEQ ID NO: 30129 - DNA, 201 bp, Homo sapiens
agtatccatgtataaaagtcgggttttgtgcttgcttcagcagcacatatactaaaatttgaacaatgtagagaagatcagcatggcccctgtataaagawgacacacacattcttgaagcgttccatattttgcacagtccctggaaggccattttactatttgctaacagtgtgagtcaaagcaaaagggtggcaccca

SEQ ID NO: 30130 - DNA, 201 bp, Homo sapiens
gagcacacttgaccactgggccttcgtgcgcacgcgcgtggaccttgccatctgaggtgcgcatgcgcacttgtgtctagcgggatcgcttgcttggtaasccggagggagagattggaaaccgcggagtttcctttgggaggctgcggccagccggggctgacttgttatgttgggctccagaggccgttaagagccgag

SEQ ID NO: 30131 - DNA, 201 bp, Homo sapiens
tgcaagccccacctcccgggctcactccattctcctgcctcagcctcccgagtagctgggactacaggcacctaccgccacacctggctaattttttgtgkttttttttagtagagatgaggtttcaccgtgttagccaggatggtctaaattttattgtctttataatacacttgcttctttatttatttgttttttttt

SEQ ID NO: 30132 - DNA, 201 bp, Homo sapiens; identical to SEQ ID NO: 3789

SEQ ID NO: 30133 - DNA, 201 bp, Homo sapiens
cctccccggttcaagcgattcttttgcctcagcctcctgagtagctggcattataggtgtgtgccagcatgcccagctaatttttgttttttgttttttgtttttttttgagacagagtctcgctctgtagcccaggctggcgtgcagtggcataattttggctcactgcaacctccgcctcctgggttcaagcaattctc

SEQ ID NO: 30134 - DNA, 201 bp, Homo sapiens
cataatgagatatcttggagacaggacccaagcctaacatgaaattcattgatttttcatatataccttatatatgtagcctgaagttacttttatgtaattttttttttttttttttttgagatggagtctcactctgtcgcccaggctggagtgcagtggtgcgatctcagctctgcctcccgggttcacgccattctc

SEQ ID NO: 30135 - DNA, 201 bp, Homo sapiens
aataggtggtttcctgcccttagtggtatcaacccctgaacactccatttggagatggactctataagtcagactgctcaaattagctggctagtgttcargcttcctctttgctttaagctgggctttcattggcattgatcctcaaatgcatgtctaagttaaagacggagagaagttaccactctggcagagcagatc

SEQ ID NO: 30136 - DNA, 201 bp, Homo sapiens
caatgtacaacttagcaagtaataggtgagccaagccttgaagacagacattttggctctggagccagggcgcttaaccactatggtatactgtcactaargaaataggtggtttcctgcccttagtggtatcaacccctgaacactccatttggagatggactctataagtcagactgctcaaattagctggctagtgtt

SEQ ID NO: 30137 - DNA, 201 bp, Homo sapiens
ctaattctatttctcttactttttccaccacatctgctgttacttcctccactgaagtcttaaagccctcaaagtcatccatgagggttggaattcacttsttccaaactcctgttgatattttcacctcctcccatgaatcacgaatgttcttattagcatctagaatggcgattctttttcagaagtttttcaatttat

SEQ ID NO: 30138 - DNA, 201 bp, Homo sapiens
cgtgtgtcaggctttgttctaggtgctggggttagaaagaggaagagtgtcacatgaggagaagacacatgtcacaggtcattctaaaagggaaacccaamtgagaatgaagagtgtctcagggcagaaaaaggaaggagcaaagacatccaccttggcactagacaatttgggtcctgatttgacagtctttagtaatta

SEQ ID NO: 30139 - DNA, 201 bp, Homo sapiens
gagatggcaccattgcattccagcctgggtgacagagcaagactctgtctaaaacaaaataaaataaaccaacaaacaaataaataaagtaaaagaagccygagagagacccctcgtcccttctgtcatgtgaggacactgcgagaaagtcctcaccagagactgaacatgccagcgccttgaccttgaactttccgttct

SEQ ID NO: 30140 - DNA, 201 bp, Homo sapiens
aggagaccacctaaggcctaatccagccttctgtgtctgatacaggctcagacagacccgtgtggcctgatattcttgaacattgtgctcaaggtcttagygactagataccatgttgttaaagaagggtagaacactgaattgtaagtattgcactttgcgaggactagtatttaatttgcttgtttaaatttatttgct

SEQ ID NO: 30141 - DNA, 201 bp, Homo sapiens
gttctgccagggtggctacagcctggcctgagagttttgtcagtgtggctccagggatggccgtcaagtgggagatggggagagggtggtgggcagtggtrtctcgggggtgatgatcattatcagaagagtggaagccctgttgaaggatgtgttaaggcaggagccaggatttgctctgcaaagcctcaggaagtatca

SEQ ID NO: 30142 - DNA, 201 bp, Homo sapiens
tcagtcctgagacctagagttttcctctaaaatcatcctagttttcctctaaaatcatcaagcacccgtggcccaattctccctacttagtggggtggtgscttgtaaggatagctacatctttcctcatttgtaaagtcctggggagcacagactttgtctctaaatagctaggtcaagagttcttaatttgggggcctt

SEQ ID NO: 30143 - DNA, 201 bp, Homo sapiens
ctctacaagatttttaattagaagttagaaatccatatttgtatggacaatcttcagacttaaagattgtcccacatgtgaaatcctgtgtatcagcaggktggtgccaagctcagcacactggggacagtagttggtcctcaggctgtcagcctgcagccccctggttatgtcacataatcccaaagcatctccgaaatt

SEQ ID NO: 30144 - DNA, 201 bp, Homo sapiens
aatactacctcacttacaagattaactatgagatttatatcaaaagcctagtacctggcacctgttagtttctttcttttttttttttttgagacagagtytctctctgttgcccaggctacagtgcagtggtgcgatctcggctcactgcaagctctgcctccagggttcacgccattctcctgtctcagcctcccaagt

SEQ ID NO: 30145 - DNA, 201 bp, Homo sapiens
ataataatgataatactacctcacttacaagattaactatgagatttatatcaaaagcctagtacctggcacctgttagtttctttcttttttttttttttgagacagagtttctctctgttgcccaggctacagtgcagtggtgcgatctcggctcactgcaagctctgcctccagggttcacgccattctcctgtctca

SEQ ID NO: 30146 - DNA, 201 bp, Homo sapiens
ataatacttgcagagcatttcacacagtgcctaacacatggtgcatgggaaacagtgtaagccattgtcgtccttcctcctcccgttaaatgacttggacrggttaccagcatctcgaggcttgatatcctgtagctctctaggctagagaatgggaccagtggcttagagggcagaaggctagcagtcctgagacccctg

SEQ ID NO: 30147 - DNA, 201 bp, Homo sapiens
gcctggccaacatggtgaaaccctctctactaaaaatacaaaaattagccgagcatggtggccgcgcgcctgtaattctagctactagggaggctgaggcrtgagaattgcttgcacctggtgggtggaggttgcagagagccgagattgcgccactgcactccagcctgggtgacagagtgagacttcatctcaaaaaat

SEQ ID NO: 30148 - DNA, 201 bp, Homo sapiens
ggggtgcagaccccaaagtctggggaagtgtcctggagacagcctggtggggctttaaaggccatgctaaagaattttggggccaggcgtggtggcttacrcctgtaatcccagcactttgggaggctcaggtgggtggatcacgaggtccggagatcgagaccatcctggctaacacagtgaaaccccatctctactaaa

SEQ ID NO: 30149 - DNA, 201 bp, Homo sapiens
cctgaactcctatgtttatcacaacactactcacaatagcaaagctatggaatcaacccaagggtccatcagtggatgattaaataaagaaaaaaaaaatmcacacacacacacacacatacacacatatatacacacacatgcatatatatcacattatatatgtatatatattacatttatatatatacaaacacacac

SEQ ID NO: 30150 - DNA, 201 bp, Homo sapiens
gtgccctatggaggttgtgacatttcccatcagtatcctctacttttctttctcagtggtgcctggtggcaaattcacacacacttctctctctctctgtytctgtctctgtctctcacccccctcatctatgccccagcttttattatattttaggcaaatctatgtaaaattcttacatcattggccaatgccttgtgt

SEQ ID NO: 30151 - DNA, 201 bp, Homo sapiens
aacaacaacaacaaaaacaacattcctttctaagccctgtggtctaaagggtaaagtgaatttattaagcatgtctgtgaagcaaaagctctggaggcatsgctgctgtgctgattctctgggaaagtggtgatatggagtcatatttgtcactagacgaaatgaaccaggagggcacttcaagaacagaggatctgaaag

SEQ ID NO: 30152 - DNA, 201 bp, Homo sapiens
caaccctcagttggctccagagtgaggaagagcctcctggtccagggacagcccacttgatcctggccactcatctctggctcccaggccctcagggctcygatggcaagtgctggcatggctgttttccctctcctctgaagtttccaggtgcatgtgggtgcctgctttggccttccatcccattgtctgtctgcccat

SEQ ID NO: 30153 - DNA, 201 bp, Homo sapiens
gacatacaaaacatgtctaagtgaaagtctctgctgtgttttcccttcttgatcaagtgtcccttaacctgcaatgcattcaaaatctcaacaatgacagktgatgctaaggaaactctgggagggaggccctgggcttcctacctcttcctccaataacagacaacactaaaaggggtaggtaagacaagatgcatctat

SEQ ID NO: 30154 - DNA, 201 bp, Homo sapiens
aaatatttagaacagtgcctctgacatggttagtgcttgataagcatggttattattatttttgttattgtgtgtgtgagcccggtcaccatgtcatggargaaatgggctggtatggagacagacgggtcagggggtgaagaacaaatccttttctggggcaggggtagaagaacagcccttgagcctccccaaacccag

SEQ ID NO: 30155 - DNA, 201 bp, Homo sapiens
tgtgtgtgtgagcccggtcaccatgtcatggaggaaatgggctggtatggagacagacgggtcagggggtgaagaacaaatccttttctggggcaggggtagaagaacagcccttgagcctccccaaacccagacatcttccaagagtgctgagcagctctgggcagggccatctgaaaggctctgaatgccccaggcaag

SEQ ID NO: 30156 - DNA, 201 bp, Homo sapiens
ccagtgactggcatgaaggaggctggagaggagggcaagagcatgtgggctttgtgtgccagagaaagtattttacatttttgcataggcaccatggaagygttttaagcaaggaagtaatgtaattctatttactaggactagatgaagttgaattgaataaaaggttactaagggtgcaaatgccatttttatgggaag

SEQ ID NO: 30157 - DNA, 201 bp, Homo sapiens
gtgtgtgtgagcccggtcaccatgtcatggaggaaatgggctggtatggagacagacgggtcagggggtgaagaacaaatccttttctggggcaggggtagaagaacagcccttgagcctccccaaacccagacatcttccaagagtgctgagcagctctgggcagggccatctgaaaggctctgaatgccccaggcaagc

SEQ ID NO: 30158 - DNA, 201 bp, Homo sapiens
tgtgtgtgagcccggtcaccatgtcatggaggaaatgggctggtatggagacagacgggtcagggggtgaagaacaaatccttttctggggcaggggtagaagaacagcccttgagcctccccaaacccagacatcttccaagagtgctgagcagctctgggcagggccatctgaaaggctctgaatgccccaggcaagcc

SEQ ID NO: 30159 - DNA, 201 bp, Homo sapiens
gcagactgactcgtgcctacgggccccaaacagcccaatttggtgcactaaaagcctcatttttagactctgggtccagagtgaggctttttccagaaaaaaacaaacaaacaaacaaacaaacaaacaaacaaaaaacctacttcagggaaatgacaacaacagaaagccaccatttgccctaaaatttttattgtaaaa

SEQ ID NO: 30160 - DNA, 201 bp, Homo sapiens
tgagatgagaggatcacttgagcctgagaggtggaggctgcagtgagttgtgattgtgccactgcactccagtctgggtgacagagtgagaccctgtctcaaaaaaaaaaaaaaaaatggtgctgggataactagataggcacatgcaaaataataaaattggactcttcacatcaattaactcaaaatagatcaaagatc

SEQ ID NO: 30161 - DNA, 201 bp, Homo sapiens
gttctgtggtcctttataactaaggatatccagcatgttcttgatttttattacatagggatctgtgttttatatgatttgcattgtaactccagagggasagctatggtgtttgtcaggattggggtcatgagtcttttagtggaagcattcatgtccttcctgaacggcactgtctttgtgttcaaagatggggagcgg

SEQ ID NO: 30162 - DNA, 201 bp, Homo sapiens
gaatagagttcagggaaagacaaaagcaaggaaaatatttgggaggcagttttcttaggtctcaactgagaggatgctgccttgggagaggtccgaggccrttggggtgtgagcacatgctggaggcgtcacagacagagcagctgtttagttgaaaatggagaggaatcaagagtgactcttaggttgttgaccataaca

SEQ ID NO: 30163 - DNA, 201 bp, Homo sapiens
gcccagatccctgggcttgaccaggaaggctatgactatctccacacagagatatataacctttgctatgcagagcacacagccctgctcctggcgtgccycactctttcttcccaaggagccctacttaacctggcaaggttcacatttcagactgtggagaatgcccaccaggggttaaccttgcatcttttgcttgta

SEQ ID NO: 30164 - DNA, 201 bp, Homo sapiens
ctctctcttactgtccactccaggggctcaggctgccggggcacactcagtgggcacagctgcaggactgtgaggcctcctctaaagagaagactgagggkcctccagcattattgtaagtgttcaaagcgtggtcagaattcatctggatagaagaacaagcacaaacgggtaaacatcctggcaagactgagtttggcc

SEQ ID NO: 30165 - DNA, 201 bp, Homo sapiens
gaaatatgttgaaagtcagttaccaatatcacaggatttcatccctagagattttagtttgcatttctgaaaataaagacatttcttttttttttttttttgagatggagtctccctctgttgtccaggctggagtgcagtggcgccatctcggctcactgcaagctccacctcctgggttcacaccattcttctgcctca

SEQ ID NO: 30166 - DNA, 201 bp, Homo sapiens
cttgggcttcatgtaacagagagaaaagcagtttttcctacaagtagaagtctagatgtaggggtttctggcactagtgctgctgctacatcatgtcaagrtagtgtctgtaggatgtcaggattcccttggcttttcactcatggctgcaagagagatggagagcttcagactttgggtccatttcaaggtagaaagaaa

SEQ ID NO: 30167 - DNA, 201 bp, Homo sapiens
cattcctccgtccttccctccctccttcccaacccatgaaagctggcgccccctggaggcatttcaggaaatgaaatgtctgtatttgcggctactgagtygggctgggagacttttcttacccaggttttcccccaaggccttcagagggtgctgatggcttagcactccgtttttgtcagaaaaatatccttagagcct

SEQ ID NO: 30168 - DNA, 201 bp, Homo sapiens
cagatctctgactcattgggctgtttgattccttgcgtgaaccagtaccaccaagacttcacttttgtcttcacttcgtccatgacctctaccagatccargcacaccctccttgaaactgtgctatctgcaaccgtgcggtgtaaagaagtcatctgtggttagaggacagtgccccacaattgaggaaggaaaaaaggc

SEQ ID NO: 30169 - DNA, 201 bp, Homo sapiens
tggctgggttaatgtcatctgaaaagccaatacactgtgtgtcacaacatggtctgagcaaaaactacaaccactatgaatggcttccaaattaaaattctttttttttttttctgagatggaaacttgctctgtcacccagagctggagtgcaatggcatgatctcagcgcactgcaacccctgcctcccgggttcaagc

SEQ ID NO: 30170 - DNA, 201 bp, Homo sapiens
ccaaaaaaaaaaatagagaaagcatttcttgagtttccaagagaggcaagcaggatgagccaccaaaaataagtacggttaaataaagattgattctgggmccaaataagcttcaagataattatttctcatggtagtgaatcagtatgtctcacaaatgcattcatcttttcatgttttcagtacccaaggtccttgatg

SEQ ID NO: 30171 - DNA, 201 bp, Homo sapiens
tttattgagcaccaactgtgtcccaggcattgttcaaggttcaagcacaaagccgtgttcaatgggttcaggtagaaacatgcacagttacatcacaacaragtaaaccatgggaactgcatggtgcagagtagggggtatttgcatggcagttgaagacctgtgtcggacgctgatgcttctataataacccaacttggt

SEQ ID NO: 30172 - DNA, 201 bp, Homo sapiens
aatgtataaaacaggctccctaggtctgctggaccagctatgtctcgaggcaggccagctccagttgtgcaagtggacaagcaggctaggtagttattttrcttctgtccattagcaatacagctcagagaaaggtcatcattggtggtttatgatctttttaaccttttaaagctctttttactatccagaggtgatgga

SEQ ID NO: 30173 - DNA, 201 bp, Homo sapiens
tttgtgtagctgcaagtgattactatctggctaagacagattgtcctcagagctcctggaattgaaaaccaaagataattacgttaaaccttactaaaatkatgctttatcatcccagcagtagactctctagaaacacccaagcagaggaagatgcctctggactgagtctttggtcagacatcatgttagtgccttaac

SEQ ID NO: 30174 - DNA, 201 bp, Homo sapiens
gaagagagggcaagtcgttggagggaactaacattcactgattatgtactgtctgtgagctacagagctaggcactttaccaaaaatagcacatgcaacckcattgaattcccctaacaacttcttaggataggtattactattcccacttacagatgaggaggctgaagctgcaggcatagcccaagctatgtagctagt

SEQ ID NO: 30175 - DNA, 201 bp, Homo sapiens
atcccctttagtgtaccccatcctgcagcatgatgagatgggcagcctgtgacatggaaaaggaagctcaccagcctactctgtaaccagttcctttatgraatacagcctttctaggtagtgttctggaaaattagctccagctgtctgccttcatgcccttttttgagaagtcacggcatgcatttaacctttgttgaa

SEQ ID NO: 30176 - DNA, 201 bp, Homo sapiens
actccccccagttttctccatccctcactgacatttttattgccaggctttggtttggaaaattatgggtagggaaagttcaagggcaggatgttcagaamggcactgcacatctgtgaagggaacacaacaggagagccagcagctgttgaaagaatggaatgtcagatggtagaggagccgagcccactcagggatggt

SEQ ID NO: 30177 - DNA, 201 bp, Homo sapiens
ttgccttctcttcctcccgcttctctcacccttccttcccacttctcctcttccccccttcttcttcatagttttattgaaatatgttttatataccataraattcactcatttaaagtggtttctagtatagtcacagatttgtgcaactatcgctgcaatctaattccagaaaattttcaacacccccgaaagaaaccc

SEQ ID NO: 30178 - DNA, 201 bp, Homo sapiens
cgttgctgtttgtttgggatgtctgggcattcacaccatgccttctaaattcctctgattcaaatgctatagtggaacttttttattttttatttttttttggtaaaagctaaagctcaaaggaatgatataccaccattgaacagggctggggctgcatgatgatctgaacaacagactagctaggacactaaaagaaca

SEQ ID NO: 30179 - DNA, 201 bp, Homo sapiens
aatgccgtgaacccgggaggcagaggttacagtgagccgagatcacgccactgcactctgcctgggtgacagagcgagactctgtctcaaaaaaaaaaaaagtgttgagaattgggtatcaaacagagcctggtgtctgtcctggctttggcttttagcagcctggaatcaaatagccacttacatgaaatttctaacact

SEQ ID NO: 30180 - DNA, 201 bp, Homo sapiens
ggtggatcactaggtcaggagatcgagaccatcctggctaacacggtgaaaccccatctctactaaaaatacaaaaaattaaacaggcgtggtggcgggcrcctgtagtcccagctactgaggctgaggcaggagaatgccgtgaacccgggaggcagaggttacagtgagccgagatcacgccactgcactctgcctggg

SEQ ID NO: 30181 - DNA, 201 bp, Homo sapiens
gcactcttgtgtttcaaggttcgtcatgaagactagcatagattccactgttcaattaaagcaacgtttaccatgatattcctattttccatgatgcaggrtcctgggaagcatctctttcaggaagggagtatgtattcaaggtcagtcagtatatgaatgtgtctgagacttggatggctcaaggggatagagctaggt

SEQ ID NO: 30182 - DNA, 201 bp, Homo sapiens
tcatattaaatatttgtctttatgctagaaacctttgaattattctcttctagctactttgaaatatataatattttctaaactatagtcaccctactgayctatcaaactctaggtcttatttctgcagaagatatttttattttcattttagcattcagtatttctttatcacaaatctatccaaagattgtctccttt

SEQ ID NO: 30183 - DNA, 201 bp, Homo sapiens
ctgataaataataaatgtacatatgtacatgtgatatttaatatagtcatataatttgtaaaggtcaaatcagggttattgggatatctatcatattaaayatttgtctttatgctagaaacctttgaattattctcttctagctactttgaaatatataatattttctaaactatagtcaccctactgatctatcaaact

SEQ ID NO: 30184 - DNA, 201 bp, Homo sapiens
tcaaaactgtggacgcacttcagcctaagggacaaaaacaaaacaaatgacccaaggtaccagctgcaagatgctggaataggagggagggagggaaggcsagtgagagggcaagattattaatatgcttttcttactaaattggctttcagaatcaaggggaagaaccaaggtgggttgttaagggagtactgatttaga

SEQ ID NO: 30185 - DNA, 201 bp, Homo sapiens
gaggttaagaacagccaatatttatagagcttgtgctctcagccacaatttcaaagtgttctgtgtgcattacttcattgaatctttagaacaaccctggraagtggggtataattggctccattttaaagaaaacaatacctcagctatgcagtttgagtaatggtcccgagatcactccaaaaggaaaagtgtagcacc

SEQ ID NO: 30186 - DNA, 201 bp, Homo sapiens
actcacacgcactcgctcagttgggcttgcattctcactgccatcctgcctccaactcacgcttgacgcctcacagttctggacttctcttctaccacacrgcagtgcctgccctggctggccagtactacattcctgacctttgggttttgggtccctgggggcagcttgctgccatccgaaccaccaggccctggccct

SEQ ID NO: 30187 - DNA, 201 bp, Homo sapiens
ccattaagacatttaaattatacatatttttacaaggggcaggaagtccagccatatataaaggaaaaataagataacaaaacaagaacaagtaaggcatygctaagcaatatatcaatgactaatatgagcattgcacacagtaagtgctgaaggttgaggagttgaaaagatagctggatgctataacatgttttggct

SEQ ID NO: 30188 - DNA, 201 bp, Homo sapiens
tgcaggcaactctaggagggtgatgagctttgcaaatctgcccagtgcctaaaactgaaccacacacataattcactcacacgcactcgctcagttgggcktgcattctcactgccatcctgcctccaactcacgcttgacgcctcacagttctggacttctcttctaccacacagcagtgcctgccctggctggccagta

SEQ ID NO: 30189 - DNA, 201 bp, Homo sapiens
acacagtaagtgctgaaggttgaggagttgaaaagatagctggatgctataacatgttttggctgtaggggagattttgagttgaatagacagaaaactcwgtctgccctcaactctaggagtccacaagagaagactctcattatggcctgtactcgggctttgtgattttcagtatacgctaaagtcaagcaaaacctt

SEQ ID NO: 30190 - DNA, 201 bp, Homo sapiens
tgaatcctggctctactgttcaccaactgtgcctgcgttcatgtcccagctcttccattgactaagcctggatcaagaaataatccctgagttctaatctrtcattcaggtaattgcgttcttatgtttccttttgtcatttggccttccaacttagttgggatgatggtggctgtcactttatctctttggcctcaattg

SEQ ID NO: 30191 - DNA, 201 bp, Homo sapiens
gcatttgcctccagctccgtgctgtgatttccatggactctaggtacgttggctttgttgagccaattcttccataagaatattaaatattatattttgcrgctgcattggtataagaatgaatataatccaggctggatttattattgttgttattattactattatttttagagacacggtctcactctgtcacccagg

SEQ ID NO: 30192 - DNA, 201 bp, Homo sapiens
ggttattgtcttttgagtgtttgattctatcccctttatatgactcatcagcccccagaaagcaaaggccctgtcttgttcagcctggcacaggggcagcygaaattcccacagggctcacctccttcgcctctgcctgagatgtcttatcagcgtcactctcattctgcaggggaggaaaccaagactccagggtggagt

SEQ ID NO: 30193 - DNA, 201 bp, Homo sapiens
gggtctcactctgtttcccagactggagtgcagtggtgcaatcatggctcacaacaacctctgcctccagggctcaagtaatcttcctgccttagctttcmgagtagctgggactacagctgggcaccatcatgcccagctaattaaaaaaaattattgtagagatgggggggtctcactgtgttgcccagactggtttta

SEQ ID NO: 30194 - DNA, 201 bp, Homo sapiens
tgtcctaagtacctattcagccctggcctgaagcaaaggaggcactgggtaatgaggactgggaccccattgctcatggtccaattggcgaaatgccagaytaagcacagatcacttttcaaagtcaaaggcaacgtggtgagtttctttggcattaaaagtcctctcccatggttatcccattctgagtagccagttgtg

SEQ ID NO: 30195 - DNA, 201 bp, Homo sapiens
tgagatttttaagagctctgagactgatacagttttcagaaattttgcagtttctgaatattcttaaaacaaggtaagatgttcttcgtcatatttttttmattccagtcccctatgccaagttgcaaatatcaggtgtgcttgctttcatcacaatgacattattaatagttatattattcacagaaagagtgatctaac

SEQ ID NO: 30196 - DNA, 201 bp, Homo sapiens
gtggatgctattagatgactgtacctagcatgtgcttttcctctagcagtgggaggaagtggcacaggagtgcattaaggagtttgccctcttcataatarcatgagtagaaataataaggcaaggcctttaaagaacagcattaataattgaaaggtgctccaggcagccatgtggtcttccagtgcctttgagtacaat

SEQ ID NO: 30197 - DNA, 201 bp, Homo sapiens
ctttggcagtctggtgaagactatgacccctttctcagaaaaatattatttataaaggcataatataaaaacattggattataagaaaatagattatgttraaatcagttatcagattataaaaaacaaattatgataaagtctgcttgcttcttgattagggcatttttatgaagatccagcaataattctaatatacca

SEQ ID NO: 30198 - DNA, 201 bp, Homo sapiens
tgtcattaatactgttctaatttattgtagaacacctgattctgtcactgttcggggtgccacttgtaacctgccatgatccctggtggactgaacaaagkggggctaactggggaataaaagtcaaagacaagagagtatatttggaagaaggggttgggggcacctcgcctctagtggacaagggccctgagctgtttc

SEQ ID NO: 30199 - DNA, 201 bp, Homo sapiens
cacacatctcgtgtggagagtggtgtgcagtagcaagtggccttcgagagtgccgagcttccgcgtttattgcatgtatacacttcaatagcatgtttttsttttttctcccctgtcccatttgctttaggtggagaattcaggggacccatgggaaaatttccaaaacaaccaggctctcacctactgggaatgtgtcta

SEQ ID NO: 30200 - DNA, 201 bp, Homo sapiens
cctctagtggacaagggccctgagctgtttcggtcctccgaatttattaggtaaaagagataacgagaaaggggcaggtggttgtcggccagcagtttgawtcacagcaggcttgcaagactgcattcttcaaacaataggcactagatttcccagtagataactttaaggagcccagcaaacctcctggcccttagcaaa

SEQ ID NO: 30201 - DNA, 201 bp, Homo sapiens
aatcatagagttaataggaaaccgcaagaaatacgggggctcctatagtgcggttagtggaagaaagtaagtatgccaagaggttttgctgcctctgctgyggtagaatcctctctgcatgccatttttttttttttggctcttgtttctttgtttcatgcatgtaggcaatgtttgcccgctacgtgcccgaaattgctg

SEQ ID NO: 30202 - DNA, 201 bp, Homo sapiens
ttgacaaatatactgtatggcaagtcataaaggtcttagaacaggacttgacccatttgagagatttaaacccctcttcctggtgactgtaacattcaaaragggcaaaaccacaagccatattttaaaataagagtgcaaccattctctacaaagaaaaagaaagagtgggggaaatgactttcaaaatggaaggtgtgg

SEQ ID NO: 30203 - DNA, 201 bp, Homo sapiens
gaacggctaacaataacagttgcaaacagtccctgagagccactggtttgtcactgtgtttcctcctgaactcatatcaaggaggaggtttacatcacccrttctgatctgtttgcctctgaacaaatagtttcaaaagttatttcatccccatcatccctccccttatccttaaagacggtatatttataagaactttct

SEQ ID NO: 30204 - DNA, 201 bp, Homo sapiens
gcagttcatttgttatctgggaatgctacttcttagggaagttggccactacagggggaagagcgagagtgagaggaagcatgtgcgtgggcatacgagaragagagagagagagagagagagacagacagacagagagacactactggggcaccacgcatatgtgtgaagatgccatcatggaagtggatcctccaaccc

SEQ ID NO: 30205 - DNA, 201 bp, Homo sapiens
acgcaacactttttcaaaaataaaatgaaatccttcaagtgcaaaaacgcagggtgaatttgtgctgggagaggctttagcgtgatccatttcctaaattygtacgttgcagcttttcagataaagctgctccctggctgccttctctccatttctgcactaaaaggggtgaagtggggagcgctgctgggtgggaagttt

SEQ ID NO: 30206 - DNA, 201 bp, Homo sapiens
ctcatcttgctgggaatgccgccttcctgggaagccttctctacctaccctagtcagctttctctgcctctcccttccctgatgcgtcctctctgtttgtscttccatcctgggtggggagcagccgtctgatgctgcagccctattttctatacaggcatcctgtctcctctgcagacagctccttgtggacagggctgg

SEQ ID NO: 30207 - DNA, 201 bp, Homo sapiens
tattgcttatgtaaaatcttatgagaacgtagggacaattgttattgttcgtggacctaatttaaatgcaagcaatcattagcacatcaaactcatggtcycctctaaggaataaacccctgtgggctcgtgtttggataagtcagtaggtatattttgagttcaactgtaacacattatttcatacatagatttgttgtc

SEQ ID NO: 30208 - DNA, 201 bp, Homo sapiens
agtaggacagattgcagacctgagccagcataagaattcttatgctcatagagtccagttaatcttgatattatccagacataactcaagttattgcttaygtaaaatcttatgagaacgtagggacaattgttattgttcgtggacctaatttaaatgcaagcaatcattagcacatcaaactcatggtcccctctaagg

SEQ ID NO: 30209 - DNA, 201 bp, Homo sapiens
tctgaaactgtgttagtaaaagaatgggaattctgtgaaagagaaataaatatatccaaattccaggtctgttaaaatttagcgcacttggatgttggtgygacagagaatttaatctgcacactcagaagaaggtagtggttaactcattcagtggttatgaatcttccttgccttagaaagatcaattccttgtgcctc

SEQ ID NO: 30210 - DNA, 201 bp, Homo sapiens
ggcatgcaccatcatgcctggctaattttttgtatttttggtggagatggagtttcgccatgttgcccaggctggtctctaactcttgagctcaagtggtycacctgcctcggcccccaaagtgctggaattacaggcgtgagccactgtgcccagcagaaaaacactatttttggtattaacacttacactgtacacaga

SEQ ID NO: 30211 - DNA, 201 bp, Homo sapiens
agcttgatttttctctttttttttcatagataatctgatatcttctgtttggatgctgataattcttcaccatgaaattaaaatatatgtatgtatgtgtrtatatatatgtgtgtgtgtgtgtgtgtgtatgtgtgtgtgtgtatatatatatatatatatacatgcctactgagcattttgactttcagacttgggtct

SEQ ID NO: 30212 - DNA, 201 bp, Homo sapiens
gggtcatttttctgagtgtcaacagtcttccatgaagttttggagaaaaacactatttttctctaaaacctccacctcctgggctcaagcaatctcccacstcagcctcctgagtagctgggacttgcaggcatgtgactacaggcatgcaccatcatgcctggctaattttttgtatttttggtggagatggagtttcgc

SEQ ID NO: 30213 - DNA, 201 bp, Homo sapiens
ctggggggtatgtggaggcacagaatcaatattgggtcatttttctgagtgtcaacagtcttccatgaagttttggagaaaaacactatttttctctaaarcctccacctcctgggctcaagcaatctcccacctcagcctcctgagtagctgggacttgcaggcatgtgactacaggcatgcaccatcatgcctggctaa

SEQ ID NO: 30214 - DNA, 201 bp, Homo sapiens
gggtatagtcatgggtgttgcggcttatctgcacctgcttgcgttcaggcagaagcagggtagcgtggcatggtgaggaccatggattcagttccagctcrgctgctgatagctgcatgaccttggggaagttgcacatcctccataagtcctagttttctataacatgggcatccctgatgtagagcatttgtgcagttg

SEQ ID NO: 30215 - DNA, 201 bp, Homo sapiens
gcaaactggtcgagagaataagatattctctctggcttcatagagtttacatggtcagagagcgaggacaataaacacaaaaacatatcgtcatgcatatkgacaagtccattttaaaaagaacagggaactataggagagaagggggcaggagtgggaataaattgtactgggaagcagtcaggggagtttttcttgagg

SEQ ID NO: 30216 - DNA, 201 bp, Homo sapiens
aagtgccagagatctccatgagaggtgtgatgagtggcctgaaccatcacagagcacaaagcacaggaaatcggttctcagaactcatttgggaagtcagyggcaagttcacacaccaaggtgaaagcggcactataaaaggatggatggaggtacagtaaagaggaagaggaagaaaagaggaaacaaaacgtggccata

SEQ ID NO: 30217 - DNA, 201 bp, Homo sapiens
tagtgaaggatcaaggaggaagatggtttctaagtagggcccaccaaagtgccagagatctccatgagaggtgtgatgagtggcctgaaccatcacagagsacaaagcacaggaaatcggttctcagaactcatttgggaagtcagcggcaagttcacacaccaaggtgaaagcggcactataaaaggatggatggaggta

SEQ ID NO: 30218 - DNA, 201 bp, Homo sapiens
cctcagtgcctgacttactaaacagaaaatgcccagtgaaaacttaggtaagatgtcgcacagtgtttggcacttgataccttgttgctaatatggtgggraccccttccagcactgaaaaatcccgcagcacttgtggcagctcaaacagagaatgtaccagtcactggctcccctgagtttcttcagaaattgtttaag

SEQ ID NO: 30219 - DNA, 201 bp, Homo sapiens
aagattatagaacttgttagtgaaggatcaaggaggaagatggtttctaagtagggcccaccaaagtgccagagatctccatgagaggtgtgatgagtggsctgaaccatcacagagcacaaagcacaggaaatcggttctcagaactcatttgggaagtcagcggcaagttcacacaccaaggtgaaagcggcactataa

SEQ ID NO: 30220 - DNA, 201 bp, Homo sapiens
gagataccactttacacccatttggatggctatacttgaaaagacagatcataacaagtgttgacaaggatatggataaattgcaacccttgtggctgctsgtggggatgatgtagaatggtgctgtagctttggaaaacagcctggcaattcctgaaaaactgaaagacagagctaccatgacatgtacattccactcct

SEQ ID NO: 30221 - DNA, 201 bp, Homo sapiens
tttattttgccacaataaaaagagcataaaagtcaaagcaggctgagtggggggactcgcgcctctaatcctggaactttgggaggccgaggcaggcagaytgcttgagcctaggagtttgaaaccaccctgggtaacatgatgaaaccccatctctacaaaaattacaaaaaaaaaaaaaaaatagccaggcatggtgat

SEQ ID NO: 30222 - DNA, 201 bp, Homo sapiens
tatattattgtctttggatttcctacatttgtgtggggatctaggctggaattcttctgcccatcttgcaggtagtataactgagaccctgggaggttaarattatagaacttgttagtgaaggatcaaggaggaagatggtttctaagtagggcccaccaaagtgccagagatctccatgagaggtgtgatgagtggcct

SEQ ID NO: 30223 - DNA, 201 bp, Homo sapiens
gtgttgttaattggcgttatgccaaaaaggtgttcagtggtcaatatgtttcagaaacataggtttctccttttttatttttctaaagaagcagggccttkcttgttgctcaggctggagtgcagtggcgctgtcatagctcgctgcagccttgaattcctgggctcaagtgatcctcctgcctcaggctcccaagtagct

SEQ ID NO: 30224 - DNA, 201 bp, Homo sapiens
gtggctcacgcctgtaatcccagcactttgggaggccgaggcaagtggatcacctgaggtcaggagttcgaaaccagcctggccaacatggtgaaaccccrtctctacgaaaaatataaaaattagccaggcgtggtggcacgtgcctgtaatcccagctactcaggaggctgaagcaggagaatcacttgaaccctggag

SEQ ID NO: 30225 - DNA, 201 bp, Homo sapiens
cctcaatttatcaaacatccaggctgacagaggaatgcaagttaagctccctgctgccttggcattatcaatcagcccaagttccattctctaaaatctgmagcaagcttttgtcttctggaagttagcttctctcaggctaacttgcccattgtctctcaggcaacatatttccccactttctctaataaatctgccttt

SEQ ID NO: 30226 - DNA, 201 bp, Homo sapiens
tgggaggccgaggcaagtggatcacctgaggtcaggagttcgaaaccagcctggccaacatggtgaaaccccgtctctacgaaaaatataaaaattagccrggcgtggtggcacgtgcctgtaatcccagctactcaggaggctgaagcaggagaatcacttgaaccctggaggtggaggttccagtgagccaagattgcg

SEQ ID NO: 30227 - DNA, 201 bp, Homo sapiens
gctggcaggggccgtttttcagggctttgttggccatggtgaggagcttggatttccttctcagtattaggtgacatattggaggaatttaggcagccacrcgtgtgatctggttaacactggtgaagttcactcttgtaacagtaaggccagggagtaagggcaggagtggaagcagaagggcccctcaggccactgcac

SEQ ID NO: 30228 - DNA, 201 bp, Homo sapiens
aggacgtctcccagtgaagacagaaagagacaggaatgtcgtctcgttaatgtgcatttggtcagctcctttcaactgctgctaaaaatcaacaagtgagrcccaaaatattccagatccaagaaaaataggtaggctaaagggatgtatacatctcttagttctgattattacattgttttcatgttggttataaataga

SEQ ID NO: 30229 - DNA, 201 bp, Homo sapiens
cgcatacccagtaatacagggtccctttggcttgtgggagtcacatgtggccattttcagtaggtgggaagcctgggggccagctgggagttgtcactgcrttgggaatctgcctcctgggcctttttattaaggcgtggagttgtgtgctgttctcttacctctggtccctgcttggaggaagaggctgaacttgtacca

SEQ ID NO: 30230 - DNA, 201 bp, Homo sapiens
tattaatatggtgaaatgtctgagatggttctctctccgcatacccagtaatacagggtccctttggcttgtgggagtcacatgtggccattttcagtagktgggaagcctgggggccagctgggagttgtcactgcattgggaatctgcctcctgggcctttttattaaggcgtggagttgtgtgctgttctcttacctc

SEQ ID NO: 30231 - DNA, 201 bp, Homo sapiens
ggggtagggtggagggatgaggcagcacagcctggagttaggcttcatttgcccatgatgtctcccctatctttactgaagtcagtctctttgagacattsagtaaaggaggaagtgggaaggtgggagttggattagtcttattttttggcagtgggggattgagcctcaagggaagcgctgggaaacagtaaccctgaa

SEQ ID NO: 30232 - DNA, 201 bp, Homo sapiens
ttcattcaagtaattctgcaaatccattttaagaaatgtaacacttgatttttaaaacctgtatggttttaaatggtttaaatggtttaaatggtttaaayggcctgtatgggtggccattttgtaacctttggctatggaagaccagggagctagtgacgttgtaatttgcaaggaggccatgggagtcatttggaaatg

SEQ ID NO: 30233 - DNA, 201 bp, Homo sapiens
ctcctctctgtactttttctagtactcctagcacgattctctaagcctgcaggcctcatacatatgttctaatgggctaattgttaaggcgacatttgtarattaatctctgacttgagctaagtggtttctcctaatggctttaattcagtgactcccattgtcagattcactggaggagcttgttaaaaagaggtgccc

SEQ ID NO: 30234 - DNA, 201 bp, Homo sapiens
ccgtgaagcctcacacacccgctgaaagcatatgggcctaattgcagcaactccagtccaggttctagaacaggaaatatttctaagagccagctttcccractcaatcacctctatactcacatcactgaatctgcctttttcctgaagtgctccatcacctgagggggaatagtctatgcttggctgtgctattgtcca

SEQ ID NO: 30235 - DNA, 201 bp, Homo sapiens
ttttttttttttttgagatggagtctcactctgttgcccaggctggagtgcaatggcaccatctcggctaactgcaacctctgcctcccaagttcaagagwttcttctgcctcatcctcctgagtagctgggaatacaggtgagcgccaccatgcctggctaactttttatatttttagtagagacagggtttcaccatat

SEQ ID NO: 30236 - DNA, 201 bp, Homo sapiens
tttttttttttgtatttttagtagagatggggttttaccgtgttggccaggctggtcttgaactcctgatctcaagtactccacctgcctcggcctcccaragtgctgggattacaggtgtgagccactgcacccagctgttccaagtacttcttacaaaataaactaaaaagttagacaatagtgattgccaccgtagta

SEQ ID NO: 30237 - DNA, 201 bp, Homo sapiens
acttaaaaatggttgagatggtacttttttttttggcagagtctcgctctgtcgcccaggctggagtgcagtggcatgatctcggctcactgcaagctccrcctcccaggttcaagccattctcctgcctcagcctccggagtagctgggactacaggcgcccaccaccacgcccagctaactttttgtatttttagtaga

SEQ ID NO: 30238 - DNA, 201 bp, Homo sapiens
atctgtttgaattcctgttttcaattcttatatgcataggagtggaattgcagggtcatttaggaattcaatgtttagctttttgatgaatcactaaactrttttccacaatggctgtaccattttacatttccaccaacaacatgcgggggttgcaatttgtccacatcctcgccaacttattttgtttttgtttgtttg

SEQ ID NO: 30239 - DNA, 201 bp, Homo sapiens
tcaaaggctgagcacagagcgcccacaggtgcaaggagaaagtacagggccagggccagagatttcctttctcttgttcctcagcttattcttaccctatyccacccaccctgccactgccaggtgctcagcgagtctttattgaaagagagattattaatatggtgaaatgtctgagatggttctctctccgcataccca

SEQ ID NO: 30240 - DNA, 201 bp, Homo sapiens
tggcccaggccaggcgggctgaagccagtgtgtcttacagctctgtggagcagacgtggtgtgtggcttgaatggaaaggtcataaaggcctgggacaagkgagtggacggagccaatggcactgtctggtaacactatatggaagatgaaattgtagtgtggagctgagaggtgcagggctggggaaagagacctcagca

SEQ ID NO: 30241 - DNA, 201 bp, Homo sapiens
cctggtattttcatttctcctctagaaacaggtttctagggctgtcgagaatttggaactcataccacacataccaccatgctgaggtttctaaattcagkctgcggtttctgcatgtttttgagagtgtcagaaacttcaaaacatttgaagagtcccagaggagaagggaatattcttcttcttattattctgagagag

SEQ ID NO: 30242 - DNA, 201 bp, Homo sapiens
tataatggctgaaataaaaataccaacaataccaagtagtgatgaggatggggggcaactggaactctcagacattactaatgggaatgcaaaacaatgtygctattcaggaaaacagtttagaagttttcttataaaattaagcatatacttagcatattaccagaaattcaatgtctagatatttaccctagggaaatg

SEQ ID NO: 30243 - DNA, 201 bp, Homo sapiens
cttgggacttagaatcaggcacacccaagtttgaagccccgcgtggtgctttctggctgcgtcaccttgaacgcttgcttccccaagtctcggtttttctraaatggtaggaaacagctttgtttggcctaagaggtttgctggtggagactaagtgagctactgctgtgttttgccacacctcaatgctggtgggatgca

SEQ ID NO: 30244 - DNA, 201 bp, Homo sapiens
gagtctcacttcgttgtccaggctggagtgtagtggcatactcttggctcactgcaacctctgcctccagggttcaagtgattctcctgtttcaacttccyaagtagctgggactacaggtgtgcaccaccacaactgctaatttttgcattttttggtagagccagggtttcactgtgttggacaggctggtctagaact

SEQ ID NO: 30245 - DNA, 201 bp, Homo sapiens
gatatttggatggcaaataagctcagaaaaagaacatcagcatctttagccattagggaaatgcaagtgtaagcaatgatgagatgtgaacacacctattrtaatggctgaaataaaaataccaacaataccaagtagtgatgaggatggggggcaactggaactctcagacattactaatgggaatgcaaaacaatgttg

SEQ ID NO: 30246 - DNA, 201 bp, Homo sapiens
tttgtaggtgtggttgtagatataggttgtagattatgggttataggttgtaggtatatatggtatagattgcagttgtaggttgcagggtataagttggrggtacagggtgtaggttttagtttgtagttatatgctgtaggttatagctgtaaatggtaggtatgggttgtaggctgtgggttgtaggtatagattgta

SEQ ID NO: 30247 - DNA, 201 bp, Homo sapiens
gagccagggtttcactgtgttggacaggctggtctagaactcctggcctcaagtgatccacctgtcatggcctcccaaagtgctgggattacaggcatgakccactgcaccctgcccttaaaaaaaaatacaccgtgtatgtgtgttcctggcattcttttgtgcaaacacatgtcttgtttgatcttggagttttgaaaa

SEQ ID NO: 30248 - DNA, 201 bp, Homo sapiens
tgaatctccacgacccttatagcatccctgtagtttgtaggtgtggttgtagatataggttgtagattatgggttataggttgtaggtatatatggtatarattgcagttgtaggttgcagggtataagttggaggtacagggtgtaggttttagtttgtagttatatgctgtaggttatagctgtaaatggtaggtatgg

SEQ ID NO: 30249 - DNA, 201 bp, Homo sapiens
tagagttctcagacaatggggatttgttagagagatagagaaagagagagactaaactgacacttctaaggtggctttgctaggggcctagagaagacaaktctctgatggggattctattttcatggccacatccaaagtattgatgtgttttctgcagcacctggatctgggctgacaatgtgatcaagcctgacacga

SEQ ID NO: 30250 - DNA, 201 bp, Homo sapiens
attccaccttcatccctgaagagtgaggctgacctttgcctgccttagtcttctctcagtctctgcttgtacagaagcagcattaaaaatgaaatcgggcraatctgctttgatctgaaaaaaggaaagtgccattcagctccctgatttctctgtaagagcagagaaccatctagcattgggagattcaggtcaagggaa

SEQ ID NO: 30251 - DNA, 201 bp, Homo sapiens
aaaggtcctgctgtggcctgtcatgcctcgtatcatgccttctttttacttttttccttttctttttttttttttttgagatggagttttgctcttgttgmccaggctggagtgcaatggcgcaatcttggctcaccacaacctccacctcccagattcaagcaattctcctgcctcagcccctcgagtagctgggattac

SEQ ID NO: 30252 - DNA, 201 bp, Homo sapiens
catacatgttctctgctccccaggacccaatcaaataaatgcccagaaagaaattagaatgtatacatagttaagggatttgtttacttgtgcatattttrttcagaaatgatttctctaacaatatattaacttgtcagagaactcaaggtaactcatgatctaaagctacagagacataaaactttgaaattcaaagat

SEQ ID NO: 30253 - DNA, 201 bp, Homo sapiens
tgcaaaggcactgcggccactgggaacccagttctcctcttcatccaggaggcaccgatcttatcctcaaagggactcattactcagctgaaattccttcygggcaagaaatagtatatttctggtagtttagggtactacatgctattcctgccaaatcttttgtttggcttcccaaatgtgaatgctttcttctcggga

SEQ ID NO: 30254 - DNA, 201 bp, Homo sapiens
cacacatgtgtctgtgtgtgtttagtttcactagcatgtccccctcttgcctatttttcttcagcaagaagaactagatatcaccttatttattcctgtckcctttgtatttttctcgactgtgatttttttttgttctttagttgtcaaggtggccaatgtttgtttgtcttgtgtatttctgggagcttgctctcttcg

SEQ ID NO: 30255 - DNA, 201 bp, Homo sapiens
ctgtcctgaccttcatcccagcagcttcctccaccttccagaattcccttataatggagaaatggttgggagttagatgtggcagcctctcctgctaagcrggtgctgttaccctgtaaggcagccccagcagggccttcccttggtaacgtggggattttgcttgttgtctcttgcacagtaattccatcaagctggtga

SEQ ID NO: 30256 - DNA, 201 bp, Homo sapiens
agaagtgcggccagtttacacaaagcaagcgaacttgctgagcagttataatctgcattccagattctcagcccagagccatcattcctggcttgctcttytaaacagaaatgtcaatgcaaagattaaagtggattgtagtgaggtagaaagttgtcagcagggactaacatcagagtcttacaaaggcattttacctag

SEQ ID NO: 30257 - DNA, 201 bp, Homo sapiens
agggggctggggttggtaatgagagaagatgctgaaaacaatgggacaaagaagcagggggtgggccaaggagctctaatgagtgtctcctcccatcttcmtctggatagcccagaatccctcttcttcctcagtcctgtatgtaggattagcagaggatttgcgtatttgggttatgttagtggtgggaggtggccacga

SEQ ID NO: 30258 - DNA, 201 bp, Homo sapiens
tcaattgaccagaggccagaggccagacagaaccttgatactgtcatctcacctgtgaagtaaattatcaacctcacccatgtgaatgaggccttactctrtagtattttcaaggctctttctcttgtgatattaagctctgctttggaaaaaccaggttttcctattctgggcttgctgatagagtaaggatggtagatt

SEQ ID NO: 30259 - DNA, 201 bp, Homo sapiens
ctatttttaattttttatagaaacttcatactgtcttctatagggctgtaccaatttacattcccaccagcagtgtacaagggttcacttttctctccaayctcaccaacacttgttatcacttgtcttttcaataatagcaatcttaacaggtatgaggtgatatcttattgtgatttgcatttttctgatgattagtga

SEQ ID NO: 30260 - DNA, 201 bp, Homo sapiens
attaatattaggcttaattattcaaatttattatattagagtcttattgcttaatttaaaaaattgaatggattattagctttttaataaacagtgacatwtactgtctactaatgagggctcaaatcatgtaatttattgctgcatctctattttgttcatgaaatgaaacagaaattactacctacttgaaactggact

SEQ ID NO: 30261 - DNA, 201 bp, Homo sapiens
gtgatgtgtgtttagtatgtatgctctctgtgtgtgtgtgatgtgtgtgtgacgtgcatagtgtgcctaggtgtgctatgtgtatgtgtctgtgtctgtgmtgtttgtatagtgtgtgtgtagtatgtgtgtgtggtgtgtgtatgtgtatatgtgatgtgtgtttagtatgtacgctctctgtgtgtgtgtgatgtgtgt

SEQ ID NO: 30262 - DNA, 201 bp, Homo sapiens
cttggttaccaaaaaacactggaaagtgtttttaggtcatgatcctaaagctatgccaaaggactggccagcacagtctattggtcctccagtggcctgcygtggagcaagcctgcttgaacttattgctctccaggtctcagacacttaaacagtgacacaggaacagtccattgagtcccactgccccccttacccaaa

SEQ ID NO: 30263 - DNA, 201 bp, Homo sapiens
gggtaccagtgaaattcttagatattaggtcttgttctatggtaggcacagaagaacaaggggtgtgtgtgtgtgtgtgtgtgtgtgtgtgtgtgtgtggtatgtgagagagagagagagaagagaggaaggatgggggagagaagaagggaaggagggagaaagggaaggaggaaaggagggaaggagagcaagagagag

SEQ ID NO: 30264 - DNA, 201 bp, Homo sapiens
tgggtaccagtgaaattcttagatattaggtcttgttctatggtaggcacagaagaacaaggggtgtgtgtgtgtgtgtgtgtgtgtgtgtgtgtgtgtggtatgtgagagagagagagagaagagaggaaggatgggggagagaagaagggaaggagggagaaagggaaggaggaaaggagggaaggagagcaagagaga

SEQ ID NO: 30265 - DNA, 201 bp, Homo sapiens
ctgggtaccagtgaaattcttagatattaggtcttgttctatggtaggcacagaagaacaaggggtgtgtgtgtgtgtgtgtgtgtgtgtgtgtgtgtgtkgtatgtgagagagagagagagaagagaggaaggatgggggagagaagaagggaaggagggagaaagggaaggaggaaaggagggaaggagagcaagagag

SEQ ID NO: 30266 - DNA, 201 bp, Homo sapiens
aacagggattagttacactggataaagtagtccaaggaagcgacacctcagaggaggagatgctaactaacgcttgttcaatgaccttgacccagcttgcwttacccactaagctgggggagctaacactcttgcttttaaaatccaggttatgcaagccccacttgcaaacataggtcttcagttctacctccactagag

SEQ ID NO: 30267 - DNA, 201 bp, Homo sapiens
tgccctatattaacccttttagtcttccctacatccctgaaatgtgtttatgcacttcttgttcctgttttcatatgaggaagcagacccagaggatgaartaatcttatcgaggtcacacagctgggaaatggagaaattaagattcaaaccagacaggcatcctccagagctaatggtttaatccaggcactgagttgc

SEQ ID NO: 30268 - DNA, 201 bp, Homo sapiens
actgcgcctggctaacctttttggattcttaaatgtgttcatgggctgcatcaggaagccaggccaccgctggtccctaggtctggggtgttcacaagaaragaagatcataaacatcatgtcaaaggcaggaaaaacaaaactctgccctctgtggtattaagtcccagtacttgaaattccaaatgtccaaaggggagc

SEQ ID NO: 30269 - DNA, 201 bp, Homo sapiens
ggagtgcaataatccttgtgtttactggaaggggaggctggcattgaacccatgtcaagataggtttggagaaaacccaaagatgccaaggccttgccttycatcccctgtgatctactacttaatcaaatagccaaggatgtgttaagagggagaaatgtgtaaatgtttagagagcagtgagttgtgagctgtaaatgg

SEQ ID NO: 30270 - DNA, 201 bp, Homo sapiens
tggttcatctgggttcctttctgattttgtgatgccctaagcctcctgtccccacagcccttctttcctttttgtagattctcttgcaaacttacaaagcrtctgtaacctttggccctgggacccagcatgagcagcttactggagtcaggacagatgcacgtgggtgctgagcagagccctgtggagcctcggcctctg

SEQ ID NO: 30271 - DNA, 201 bp, Homo sapiens
cacttaaacagtgacacaggaacagtccattgagtcccactgccccccttacccaaagatccatctacagcttattccatgcttttgtttccttctcaatkacttcagtatttctaaaccagtagcctggtctccctctggcttcaatgcctgtgtgtggtcttcagagctaattcttattttatgctttttctagtgaac

SEQ ID NO: 30272 - DNA, 201 bp, Homo sapiens
ctgataggcatttggctttatttaggcatccataatatattacagtttaaaacaaatagattaaatgtacatttctggccataaaaatgtcagtcttaggragggatagcttttatttccaggaaagttagcagtactaggaatttctttaaaatggaatgtagtccctttgaaacctagtttaggattctgatgtgggta

SEQ ID NO: 30273 - DNA, 201 bp, Homo sapiens
ggaccaccatctgtcccctgtgggtccagacatcaggcaggaggaaaagttggggccatgtgtcagcgtcccagctggggctcaccatgggaagtgggatwagggaggattattccagttctcttctttgagttcaggtttttatctacgggaagaagagggagattggacgaggttagattcacttgtctccaatgtcct

SEQ ID NO: 30274 - DNA, 201 bp, Homo sapiens
ctcttcttttctcctttgctctgacttggtcctggtggtgaaggaccagatgtgagcatcactgcctggcttgggagaatctcttgggtggctgggctggkggtgcgtgcacaatgctgaatcttactccatttgttttcaacttattcttgctcccttcttagcatcctgctcttctaaaaaggaaactgtgatttccct

SEQ ID NO: 30275 - DNA, 201 bp, Homo sapiens
ttttctcctttgctctgacttggtcctggtggtgaaggaccagatgtgagcatcactgcctggcttgggagaatctcttgggtggctgggctgggggtgcrtgcacaatgctgaatcttactccatttgttttcaacttattcttgctcccttcttagcatcctgctcttctaaaaaggaaactgtgatttccctgaataa

SEQ ID NO: 30276 - DNA, 201 bp, Homo sapiens
cacagaatttaagagtctttctcagaaggtgatcagccttggacagactttggtcttcagaccccagagccaaacttttgaactgacagcagctgtggccraaaatggtgtttgtcagacctgcaggaagaaaatctgcaatgaagagttggagtggtaggaaaagaggaaaaagagggaacttgttttgccttcagacat

SEQ ID NO: 30277 - DNA, 201 bp, Homo sapiens
tccccaggcccatctgctaaacatcccgagctggaattggaaagaaggtgatgacgcaatctgcctcgcagagttgaagttgggcttcatagcccagagckgcctggctcaaggcctctccaccatgcttgccaacctcttctccatgaggtcattcataaaggtaacgtctcgtcttattagagcacattagctcgggat

SEQ ID NO: 30278 - DNA, 201 bp, Homo sapiens
agggtgctttgggttttgattttgttgttgttgttgttttcctttctttctttttttatacacacaataagttagcacatgtttatttgaaacaagcaacmaaacagcaatgaaaacatattgattgtttccagtctctgggccgaagtattgcgaagcatttgaaaagctttcacgatttgtgtagatgattatgaagga

SEQ ID NO: 30279 - DNA, 201 bp, Homo sapiens
tgatcttctaaatagagacagcaaaagtgctgctcagcagaggggtggatagagaggtgggagcacctgccttcacatgactcacaaatgaaatgaacacyccattttcttggcccaaaaatatatttcaaaataagggagcaggctttcaacacagtaatcttgcttgcgagatgtctagaaaccaaggaataaattgtc

SEQ ID NO: 30280 - DNA, 201 bp, Homo sapiens
aggactgtgatcttgatggttgggtattgactgggttagggggtcaggcagtgacagcggcttagcctgctggtgctgagggaggccggggatcatatccrtgcaggtgatccatgacagccctcgaccccagtgtttagaggaagtggatgggctcatattatttcctcctcttccctcccgcataaccctctgagtagt

SEQ ID NO: 30281 - DNA, 201 bp, Homo sapiens
gagagcatagtttgcacattcttggcttcttcagcatttggatgctggagctctgttggtctgaggctgaagagcaaactctgccaaagcttctcttaccrtggggatggaaagttttctgtgtctgttttattacttaggcattccacgttctccttcgacatctcacatactcctgctgctttcctttgtgagtggaga

SEQ ID NO: 30282 - DNA, 201 bp, Homo sapiens
ttttagaatatgaaacaggctaaggggatagtgatgtgagtgcaatggggaacctgttttatgtagttggccagggagggtctttctaaggaagtggccartgagtggaacaagatcaacttgcctggaaaaggaaactatgggggatctttgagggaacagtacttcaggtgtgtggaacagcagctgtgaagcctctgg

SEQ ID NO: 30283 - DNA, 201 bp, Homo sapiens
ttagccacagtccacactactctctattgtatcccaccaggcctgcttcattcatgtcccttccctgcttggttcatcccactgtcctggccttaccagcytcctgcgttttgcttctaatcttatgtgtctgcattgcaatgtctgtggtcagacagcatccttggccttccggtcacttgcttgtcctctgagttagga

SEQ ID NO: 30284 - DNA, 201 bp, Homo sapiens
ttcattacataaataaaatgtgtttattttagaaaatttagcaattatagaaaccaaaaagaaaatgcacattccctgtaattttactgctcagacataaraaagttgacatatttgtcttatttccatagatataaatacttttaccctcaaaaaaatggatcatacatgtcagtatgttacctgtggtttttcacaaac

SEQ ID NO: 30285 - DNA, 201 bp, Homo sapiens
agagagagagagcctccacccttgtactccgcttaccttttggggcagcccgaggctgcggctcagtgagggcagctatggatatgcacagtgagggtcawtctggattctccggcaccctctatgtgccaaggactgtctgaagccctgggaaactgcaacagaaagggctgggttgggtttcagtgtgtgtggtggggg

SEQ ID NO: 30286 - DNA, 201 bp, Homo sapiens
agctggtacaacagtggctcttgccagactgtttccctgtggttcaaaaagatgagaactgagtctgatcttggaagaaagggtgagcagagggaggcaakgtccgctctctgagctgcttcagttcatacctgaaaagagggagcatgccatggcatttcccattctgctttcatattgttttgaaatgatgatcttgta

SEQ ID NO: 30287 - DNA, 201 bp, Homo sapiens
cagctggtacaacagtggctcttgccagactgtttccctgtggttcaaaaagatgagaactgagtctgatcttggaagaaagggtgagcagagggaggcartgtccgctctctgagctgcttcagttcatacctgaaaagagggagcatgccatggcatttcccattctgctttcatattgttttgaaatgatgatcttgt

SEQ ID NO: 30288 - DNA, 201 bp, Homo sapiens
tactgggagcagatctgatgtgtaccttccacagattccactgaaggtgtcctcagagcaccggacactcaggggcccgcagcccagacacagaaagtccrctctgctgagaaatgctcaccaagcagaatccctcacactctctagctttgttttctttgatctctctgagcttaggaggaaaggctcctgttccctccc

SEQ ID NO: 30289 - DNA, 201 bp, Homo sapiens
tgggccggaggctggagctgaggaaatgccccaaggattacattttcttagggtgtttttgactcacaggtgtgcaccaccatggaatgactattgtgtgyggagggaagatggttccctggagttgggcatcaggcacttggttgggatgctcatgacccagggatccacgctcatcttgatcctcagttctgggtgtgt

SEQ ID NO: 30290 - DNA, 201 bp, Homo sapiens
ttcttcctaccttccagaaacctgactcctgtgcagctctgtgttcaatggatgtcacatctatcttttgctcttttgccaaaattaattgccagcattayccaagggagtctcaaaccaatcaggtcttgcagctagaggatcatcaatataatacatgctctattgcctcagtgactttcagtctctgccctggcaggg

SEQ ID NO: 30291 - DNA, 201 bp, Homo sapiens
cttccagggccttggttgttccattgtcccctctccctgtaccaggatcatcgtgatccaatggatttgatggagttgctacacccagcttggcgtgcagrggtgtttggcacatccctgcctgtggaattctacgctctaagggagatgctgccagggtattacctgattcacgaggcatgtcctaccatctgtgttata

SEQ ID NO: 30292 - DNA, 201 bp, Homo sapiens
acaaaacaatagtgagtaacatttacccaagactttattttgtaaatgcctctcttccatcactactgcctcacttggggcacctgggagtatccaggttraagatgcgggctcaacccaggagtcaagcaaacaatttctagtttttgggatgccttaaacaaaaccgtgaatctctaagctcctcaggctggaaatggc

SEQ ID NO: 30293 - DNA, 201 bp, Homo sapiens
ctaccctggagaagtagcttcacagggttcggcagccagactcagggaggtgggaaaacagactgcaggaaacccagggaagtttagaggctgtgaggagsgggtgatccttccctcttggagatgaggaagatgcccagaggaacaactgctagcagtgagattttgtgctgagagctcctgccctctgaaaaaaaacct

SEQ ID NO: 30294 - DNA, 201 bp, Homo sapiens
  misc_feature (1)...(201): n = A,T,C or G, or insertion/deletion polymorphism (see Tables 1-2)
tgagccagtcactcatactcccagcgtagccctggagcttcactgcaactgctatgttacaggaagttgtaccagcagctctacactaaggtgtatagtcngtgaccactttaaagaaagactcattagaaagaggcattgtttggggaggccaacaggccagctgttggggaccatgccagaggtactgtgtcaaggtac

SEQ ID NO: 30295 - DNA, 201 bp, Homo sapiens
cctcacttggggcacctgggagtatccaggttgaagatgcgggctcaacccaggagtcaagcaaacaatttctagtttttgggatgccttaaacaaaaccrtgaatctctaagctcctcaggctggaaatggctcactgctggtggaatcattaagagtgccagccagatctgattgctgcattcagaggtttattaatat

SEQ ID NO: 30296 - DNA, 201 bp, Homo sapiens
atgcaacctcagttgggttgctatagaaaccaaatctcatggcctgctgggggcctgtttagttctttatgtcctgcctctgtctggggagataatgtggrtggtgacactgttgttcactgctcaagtggagaattccctctatcacccaacaaggcttttcaaggacccaaccacagaagggactcggtaactcttggg

SEQ ID NO: 30297 - DNA, 201 bp, Homo sapiens
tcagcctcagtcctggacgtatgccccattgccctaaggttgtcccaaagaggccaccattagacctcaccttttatggacaggtgggagatgtctgaacrcaaccacatgttgcccggtgacaggggctgggctgaccaggacacggagagtgacttgccttctggggctgagccagtcactcatactcccagcgtagcc

SEQ ID NO: 30298 - DNA, 201 bp, Homo sapiens
gctggaaatggctcactgctggtggaatcattaagagtgccagccagatctgattgctgcattcagaggtttattaatatcacctcgaatttatcttcccygatgaggaaattttgccagcatctgacaaaaatgaaatgtacagcggccttgtgccaacaagcatcctctccctgccatcggctgttagcagaaagccag

SEQ ID NO: 30299 - DNA, 201 bp, Homo sapiens
tcaacatgggagacaagagaggcatatggcatggcattatagcattttacagctcatggaccagctgataggatagtgaatataattgccatgtgacaaaytaaagtggctacaagtgagctaacaggtgtcgtttcattattaatttcaatcaaagtcattagttgctatttagggatctggctgcttggccacctacac

SEQ ID NO: 30300 - DNA, 201 bp, Homo sapiens
  misc_feature (1)...(201): n = A,T,C or G, or insertion/deletion polymorphism (see Tables 1-2)
cctgtagagacaggaagcctgcctaaagagcagaagcatctgctcagaaagatctagttgtttgctggagcctcagcttgaagaaggctccaagtttattntaaagtcccagccacacagtttgcttgagactttataaagagagaatgagatgtagaggctgggcccaaacccactaccaggctgtgggaatgggggatg

SEQ ID NO: 30301 - DNA, 201 bp, Homo sapiens
agctcaagtttgagttggtctaaactacttaagctggtaaatcttctgtattttacaacgagtcttccttttcatgctttgtaaaccaaattgctgacttyccaaacctgaggacatttccaaggtcatcgttacctctcagcagcccattttcaggtggcctcttttaactgtgggattctttaggaagactgagattgg

SEQ ID NO: 30302 - DNA, 201 bp, Homo sapiens
cccagggaagtttagaggctgtgaggagggggtgatccttccctcttggagatgaggaagatgcccagaggaacaactgctagcagtgagattttgtgctkagagctcctgccctctgaaaaaaaacctgggtagccctcacttgccttgtgctctgaaaagataagttcttaagtcagtctttgggaaggtctgttggat

SEQ ID NO: 30303 - DNA, 201 bp, Homo sapiens
ccaaagattaagttattgagggcagtgaatccagggagaagttcttgttctactataaaacacaagagtgaaatttgattgacttgtccccagaacttcartattgactttgatgacatatttaagaattacaatctagggacacaggccccattggaaataccatcaaacctgtcatttaaaaaaaaagtctcagaaata

SEQ ID NO: 30304 - DNA, 201 bp, Homo sapiens
tcaaaaaggaaaattatttgtccctgatgtggcctctgagggcagtgaaaatcactggatgaatggttagattcatcagtggcttttggccttaagacacygtacacccaatagacacacactcatgccctgcaagtacaagcctaattttcctgtactcacctttactacatgtgatgtactttgatagtttctattctg

SEQ ID NO: 30305 - DNA, 201 bp, Homo sapiens
ctcaggttaagcaaagccctatacaccagatccctgactagccttcctgctgagaacagcttattcctggagccttcaaattcccacattccctctctccrtccttctcctccacctcccccaacagtctcgggaattttgttccccggtttactgagattcagcgactgtctttaggggaaagatagctcatagttgtgt

SEQ ID NO: 30306 - DNA, 201 bp, Homo sapiens
tgcctgagaaaacaacacgttttctctgtcaggctcgtgactaatataaatatcagatcccattacagcttggtaattacccagggtctggtctgacgcaktcaatcagggctggagcttcagtgccgtggagctcttgattccagattggcccttgtgcctcatctcatcctgtcctggggattggctgcaccagatgac

SEQ ID NO: 30307 - DNA, 201 bp, Homo sapiens
caggctatggataacattcctaaattcttttgcagttggaattttgtatcacaatgggtgtttttgtaagtatttcaatgaggattgtgaatccagccccrctagtaactatcatcttaattcagaagtcctcatggaattatgtgaatataaatttggttttaatgaccactgttattttacagacgagaaaaatcaaag

SEQ ID NO: 30308 - DNA, 201 bp, Homo sapiens
tttagctattcctggtgcagacgcccaccggcactgaggctggcgacaccttcgatgtatggttgctaggctcactgcctggtctgtagtcgtgtccctaragatgtcttcccttccccacagccactggctggagtgggggacccgacactgatagaaaactgcagaataaaaaagaaagaactggaaaaaagagagtga

SEQ ID NO: 30309 - DNA, 201 bp, Homo sapiens
gtagaagcttgggcttgatcaaggatggtctgcgtgtaatgaattatcgagatgttgtctccatggctgtgcctgagaaaacaacacgttttctctgtcargctcgtgactaatataaatatcagatcccattacagcttggtaattacccagggtctggtctgacgcattcaatcagggctggagcttcagtgccgtgga

SEQ ID NO: 30310 - DNA, 201 bp, Homo sapiens
ctgtagttctgagttgctgcttcttcatgcatacaatggaaacaagtacacccccaccaggctcatgtggagggctcagtgactaacctggccctcagctrtcccctgctactcccataaaagctagcactgggcatgtggcttgtacttccaacaatgagtactcccttttctcccctaaatccagccctggaagcattg

SEQ ID NO: 30311 - DNA, 201 bp, Homo sapiens
tggagggctcagtgactaacctggccctcagctatcccctgctactcccataaaagctagcactgggcatgtggcttgtacttccaacaatgagtactccsttttctcccctaaatccagccctggaagcattgccgtgtttttatgcctcttggcattctttattttttgagacagaatctcgctctgttgcccagactg

SEQ ID NO: 30312 - DNA, 201 bp, Homo sapiens
gaggcagatccactccagccttgcggaatgtcatgctcctgcagagggctgcaagaagaggtgaacccattcccaatcactggccaggttagacaaatcaytggattctgggacatcagagctgaaatagctttattggatcatctctggcccagctcgcttgctctctctctcaatctcttgatcttttttatttattta

SEQ ID NO: 30313 - DNA, 201 bp, Homo sapiens
accctcccttgttatgaccactgtgaggtccttctcaactatgtctgcaaaaagtgcctgctttgtctgttctcctggggaacagaaatgctgatgtttcmctaggcgttgttcctaggtgagtattctggatggtggtggtggagcctataaaccaaaacatgtctgaaagagttctcaatcagtttagaggttcatttt

SEQ ID NO: 30314 - DNA, 201 bp, Homo sapiens
gaaatgctgatgtttccctaggcgttgttcctaggtgagtattctggatggtggtggtggagcctataaaccaaaacatgtctgaaagagttctcaatcartttagaggttcattttgccaaggttgaggatgagcccaggaaaaagagataaaggctacagtagactctgtggcctgtgctttttccaaagagggttttg

SEQ ID NO: 30315 - DNA, 201 bp, Homo sapiens
ttatggttccgggcaggttcttggcagagaaaggaactgtgtttctctgtccttgatggaactgccctccataggcacagggccctggaagaagggtcgtkatggtacaagcagtacccagaagtggcatgaattgagtgctcttcatgttaataaacctttcgtgggcactttgcagcagccaataatccttgcacatgc

SEQ ID NO: 30316 - DNA, 201 bp, Homo sapiens
agtatctgtatctgggtgctgtgccaagtcatctccacatctcagctaacaccctctgtggtgcatattgatagtgcccccttccaggggagggcactgargctcacagaggttaagaacccgtccaataacatctgagttagtaactagcagaggtgagatttgagctcagttctatcatactctaaagcaagcctcttc

SEQ ID NO: 30317 - DNA, 201 bp, Homo sapiens
tgtctgcccaagaataaaaattataccccttatatttccaaaaggagaggcatataatttatgactaaaactggggtactctgactgaaaatatctactgsttagccgtttctatgtcgattagagaaggtgtttatagctcagaactagaggagaagaaaccatttctttgtcactgagaaactccttgccagggtctct

SEQ ID NO: 30318 - DNA, 201 bp, Homo sapiens
ccctagccatcagcattagcgtcagctgagaaacatgtaaggcatgtaaattcttatgctccaacctaagcctactgaattggaaactctgggctggggtrgtttcttattttaataagccttcctggtgactctgctgcacactaaagtttgagacccattcctctaaattctgccgtctctcctcactgcatcactttt

SEQ ID NO: 30319 - DNA, 201 bp, Homo sapiens
cacatatattaagttgtttatgcctcataataaccctgatgcaggcatcattatttctgttttacagaggaagaaacaaagatatgaagaggttaaataasttgccaaggccaatcagctagcgagcatcagagctaggattcaagcccaggcagaccagctccagagcctgagctagactcaatgtcagtgatgatgtcg

SEQ ID NO: 30320 - DNA, 201 bp, Homo sapiens
gtggaagccatgtgttgggagcagggtctgagaacatcaggttggggacagcccacgagggaccttcattagcagtgtggattttcacctgcactctgtcrgcaagcactgaaggttgtcattagcacactggctgtcacagaccagaggggcttcccattcagtcaaatcttgctgcccatccccagtgaacggagcagt

SEQ ID NO: 30321 - DNA, 201 bp, Homo sapiens
tggaggaagacactggcctgttgctcttactaatctctctctagccccttgtaatgattatttggggagatcttttctctgaatgatttaagcaaaacagkcccctccagaaatgtccctggaaagtccaaggcagcattggacaggggtcagcaaactttttctgtaataagtcatataatgaaaaatttaggtttttca

SEQ ID NO: 30322 - DNA, 201 bp, Homo sapiens
ataattcttcaccatgaaattaaaatatatgtatgtatgtgtatatatatatgtgtgtgtgtgtgtgtgtgtatgtgtgtgtgtgtatatatatatatatrtatacatgcctactgagcattttgactttcagacttgggtctgtcttctgtgttaagaaacttttttttgttttcgtcttttcagttaggtttattctga

SEQ ID NO: 30323 - DNA, 201 bp, Homo sapiens
ccactaccagtgagaaaaagacagaaaaaggagagccaaggataataagcacgaatcgatgtgatcatagtttttcatgtattagttttaaagcctgttcrtctgagtctccattttctcccatcttcccatgcttgccgtgctgatgtgagtgcgctctctctctctctctgtgtcaatatccatcacacatgtgcacac

SEQ ID NO: 30324 - DNA, 201 bp, Homo sapiens
taatctgatatcttctgtttggatgctgataattcttcaccatgaaattaaaatatatgtatgtatgtgtatatatatatgtgtgtgtgtgtgtgtgtgtrtgtgtgtgtgtgtatatatatatatatatatacatgcctactgagcattttgactttcagacttgggtctgtcttctgtgttaagaaacttttttttgtt

SEQ ID NO: 30325 - DNA, 201 bp, Homo sapiens
ggggctgctactggtcctgctgttgggccctaatggggactcagggaccaccactgtatttgccaggggagaaagctggaggagcagcagacatcccctarcatgagttgtgcaggcttggtaatgtggagtgggcatgcattgtggtgattcttcttgcttttttaaaccaatttctcctctgctggagactcttcacag

SEQ ID NO: 30326 - DNA, 201 bp, Homo sapiens
tagtgcacgctgtctaaattatcatccctagtggttccttcaaagacgctaagcacattcctgactccacttctttgtttatgccactcatgtccccccaygccttcaatgcctttacaaatcctcccaacccatgaaaatccaactcaaattctgcctcatacatgatgcaattcagcaccaaacccataaatctcatgc

SEQ ID NO: 30327 - DNA, 201 bp, Homo sapiens
atgctttaacactttctgctagttctgtctcattctttacccattggagagtaccagtgggttttcagataacttccttaaagaccagaaagaaagatttwaaaaaaattccagctccttccttttggctcgggtcttccaggtctttatcttgatgaaaactggaggcaaagatgttatctctggattgtagtcagagaa

SEQ ID NO: 30328 - DNA, 201 bp, Homo sapiens
atctggagagcgtacttcaggctgggaggctttgaagtagatggttgtgggctcgtgtgtacatgtatgtctatgatcccctttgctggctgcaaattctrtcatcacatcatggaaaaattcttcttaaggaaagttgcaggtgcaaagatgctgatgttggatcaaccgaggaaatacagttttggtcacaaaagtggt

SEQ ID NO: 30329 - DNA, 201 bp, Homo sapiens
aaattcttcttaaggaaagttgcaggtgcaaagatgctgatgttggatcaaccgaggaaatacagttttggtcacaaaagtggtatttatgcactctgccrgcacgtggttggcccagatggcgaaaatactgttgagatggccgggctcctttgggtaagggaaatacagggctttaagagcagtagggaacagtgaagg

SEQ ID NO: 30330 - DNA, 201 bp, Homo sapiens
taagggaaatacagggctttaagagcagtagggaacagtgaaggatagagaagcttgatgctttggagctcacaggatcagagttcaaatcctgacttggmggccattttagctgtgtggccttaagcaattctccagcaccttgagcatgctttatgggtaggggctcagtgttaatttgggattctttctcatgaggat

SEQ ID NO: 30331 - DNA, 201 bp, Homo sapiens
ataaaattccgctggaatacaaccacactcctttgtttatatattgtctaaggccacttttgccccccagcaacagagctgaatagttgcaacagagaccrtatgctaaagcctaaaatatttcctatctggccctttacagaaacaatttgcccacctctagtctagtgaagcaaagaggccctgaacaagtacttgcaa

SEQ ID NO: 30332 - DNA, 201 bp, Homo sapiens
atgggtacttgaagtacagcttcttctgaatacccattgcttttggagtattgtaaactcaaaaaatcataagttgagccattgtaagttggggactgtgyctgcatgtacagggatgatataaatgcccttggagcttggaagagggagaaatttctgaaggccagaagagactggctttggatgagctatgtaaaacca

SEQ ID NO: 30333 - DNA, 201 bp, Homo sapiens
aaataatactacagaagagtaaacatgagaagacatgcatttaaatgtatgcagagcacttattgctttggatagaattcacatgttatccatgcgttgaytacaagatacatgcacatctctaaacacactcataactgaattcagcttaataggatagtaattgaatgatggaacctagtgtgcctgacttttctcaga

SEQ ID NO: 30334 - DNA, 201 bp, Homo sapiens
cagtagtagagcttgggttaaattaaaggaaagggattctacctcatgtgttcttttgcaagttgagagtgtcaactggtctggggatgacttgagctgcrtgtgctatgttgcactggtgaggtggtcacttgacctcgtaccaatactggcttctgagtggcttccaggtattgaccttggctaatgagattggattca

SEQ ID NO: 30335 - DNA, 201 bp, Homo sapiens
tagtatagacagaaaagtctataaaatgaaaaattacaaaatagcaaattattatagaaaatttgtgtcactaccactgagttcaaaaaataaaatactgwcggtatccccagaagcttccctgaccatcccttctccttggctggcgtctcacctttgacgtctcaagttcaagaaatctgagtaacaactctttctgcc

SEQ ID NO: 30336 - DNA, 201 bp, Homo sapiens
agagcttgggttaaattaaaggaaagggattctacctcatgtgttcttttgcaagttgagagtgtcaactggtctggggatgacttgagctgcgtgtgctrtgttgcactggtgaggtggtcacttgacctcgtaccaatactggcttctgagtggcttccaggtattgaccttggctaatgagattggattcaaagcatt

SEQ ID NO: 30337 - DNA, 201 bp, Homo sapiens
aaccgacacttccagacactcggtgagctctgtctgggtggaaaacctcatcagaagccagattgaatcacaccagtttctaagacattcctcaaccatgytaggcaaaagagtcccccactgacaagctggggtagaaggaaacctgatataattttggaaaaaaaccttacttgagaaagaaggttctcacagctgccg

SEQ ID NO: 30338 - DNA, 201 bp, Homo sapiens
gcgggaacatgttcagttggtgaggtctataggcacagactggattaggtcctaaatcatggtggaaattttcctggcacgggacaaatccttttgtaaamaagaacattcatctttcttttgactgacatgcctggtagggcatgtgcctctcagaagctccatgtcatctgatctcatttgggatttagtgtttttatt

SEQ ID NO: 30339 - DNA, 201 bp, Homo sapiens
ttgacttctatgcttagggcattgtggacttggcaggatttttgagattccagaagatatgagcgaagagtgaaaacaaagcaggacagaacaaaaaacakaatttcttcatttattatttcagtgcactgtgaaatgctcaccgtgtgctaggtgctgttcaggctttgaggatgtggagtgggcaaatcaggcagactc

SEQ ID NO: 30340 - DNA, 201 bp, Homo sapiens
tgacttacattgctctcgggttactcatctttttactccaaattgcttggagtcctctgttgactctgaagggaatattcaaccataaacaattcatcctrtctgctatctgtggttgaattctttcttcccagttgccccttgggtggtggcttggggccacggtaacacttgtagtatttcccgggaggttgttatagt

SEQ ID NO: 30341 - DNA, 201 bp, Homo sapiens
tagttctgtgcatttcctgcagtagtggtagtgaaggcattagatgccaggaactcaggcggttggtatggccctgagctctgaaaatgcttgccttcccstttcccctattgtgtgggccagcagcttgcagagctcctccagccctgagagaccatgcctccatccctcagaccctacctttcctggccccaaggctgc

SEQ ID NO: 30342 - DNA, 201 bp, Homo sapiens
gcctccatccctcagaccctacctttcctggccccaaggctgcctctggctagtgtgacagacacaccctgggcccctgaagtctgaaagccacatttttygaggggaacctggccactatgagtgtggaatattggggccttaaatttcctgcctgtagaatgaggcatttgggctaggggagtggttcctagacttttt

SEQ ID NO: 30343 - DNA, 201 bp, Homo sapiens
ttatcataatgaaaactttttcaatgattgaaaataagttgtggtgtttttgtgaacctggggtcctaaacacagcttccaaagtctttttatgttagggrgtacataaatgcaattgcagtgtctgtaatgaaatgctaatcccatcgcacacacaaaggatctcctaaatgatgagcaagcataacttctgtcagttta

SEQ ID NO: 30344 - DNA, 201 bp, Homo sapiens
gagtcagactgagacatgggcttatggctcttggctgttgcaaggctggaaagttagggcagggcagcagaggtaggcttcacggatggggtcctggcagratggttacagttttgatggtggggtatcagtggacgaacatcgacagtatgggggaccaggagctgctgggctggcagaagggaaacactgtggcatttg

SEQ ID NO: 30345 - DNA, 201 bp, Homo sapiens
ggttacagttttgatggtggggtatcagtggacgaacatcgacagtatgggggaccaggagctgctgggctggcagaagggaaacactgtggcatttggtrggcaggtatggttgtccagcattgtacccttgaggagggacaaattccatccctgttatcccaagtccagaactcatagacctgtctcccaagtgatgtc

SEQ ID NO: 30346 - DNA, 201 bp, Homo sapiens
atagcatttcctaggaggacactgagaacctatggcctccctttgggagccttgggctagccctgcttctaggtgcccaggaaacttgaccaaacatacawcaggaggaaaagaagagctgcctgccccctgctgtttggcctgggggataaagcattccaatggtaagtccaaatggaccttctctttgcctcacagcta

SEQ ID NO: 30347 - DNA, 201 bp, Homo sapiens
ggttccagtgaaagggctgtttgtgctgtgatgccaggccctgggccgtgtggggaacactgggtcccttggagacatccctggggatcagacagggccaygcctttctgtgcacagtcagggagcagaccaaggatgtctcttttagaactgcttcttgggtgggtggaaccccacgcattaggcacctagaaaaggaaa

SEQ ID NO: 30348 - DNA, 201 bp, Homo sapiens
agtgggactagttgtggtcagacctgcataagactgaccaggaagaagcccaacctgggagtccaaggagcagaagcaaggttcaggaccagggaagagcrggcagagctacaagggccaggctctgagcagtaagagattggcaagagcagccctgctgatgagcctgtcacagaggtaccatgataatcctggaccagt

SEQ ID NO: 30349 - DNA, 201 bp, Homo sapiens
agagaactgggtagaatccagctctactccttggcttgtgatctagagccaattttcattgttgttgttacttttttcaaccttcgtttctttctctatargttgagacccatgccctcaacctcaaagggtgattataaagataaagaagaggaaataggaaaagcatttggtactcaaaatgagttatagttcataaaa

SEQ ID NO: 30350 - DNA, 201 bp, Homo sapiens
gaggactttctccagtcactgaagcttgcttgtgggcctgtctacaggtcgtaagtgctagggacttaatgcctcctcaaccagtgaccaacaggaggtgwtggatcaatgccccagccccctcaccccttggtcgcaaggctcttctgtttacacataaagccatgtgtagatcctggctgccagagtaccccagtggga

SEQ ID NO: 30351 - DNA, 201 bp, Homo sapiens
tttctgatgggcttcatagtgggactagttgtggtcagacctgcataagactgaccaggaagaagcccaacctgggagtccaaggagcagaagcaaggttyaggaccagggaagagcgggcagagctacaagggccaggctctgagcagtaagagattggcaagagcagccctgctgatgagcctgtcacagaggtaccat

SEQ ID NO: 30352 - DNA, 201 bp, Homo sapiens
gtgttgctcctgcctaggagatgcattccccagaaccaagcaaacaagaagaaggtcctccttcagtgggctgtcatcgatcattccccgttccatggccwcaggactgactgctgatgaaatctaaaagaccagcttgcagaaggcatggaaatcctggggttaggggcccctctgctatggaggtatgactcacagtgg

SEQ ID NO: 30353 - DNA, 201 bp, Homo sapiens
tttcccactgatgctgtttttcttttccaggatccagtccagggtcccacattgcatgtacccaccatgtctccttagtgtgcttttgtgactcgtctttycttacctttcatgactttgacattggtgaagagtgctggttagttattttcataggcggtctgtatattttggtgtgtctgatgttttctaatggttaaa

SEQ ID NO: 30354 - DNA, 201 bp, Homo sapiens
gatgaaatctaaaagaccagcttgcagaaggcatggaaatcctggggttaggggcccctctgctatggaggtatgactcacagtgggtcagggaacctgartgggatcatccctggaactcagaatctctaagacacacttattggctctctataagcaataacagatggcaagataatattattcttctaatcttttgct

SEQ ID NO: 30355 - DNA, 201 bp, Homo sapiens
caatgagcgtcttgcaatgagtctgttctcaatttcattgctgataaagagaaacagtgtagtgtggtggcgaagagcacagaccctgaagcaagaatccwtgggctcaaattctgagtctttaagtctgtggcccaagaattcacatttctaactgacttcctgggtatgctgatgctgctggtctgcaggtcacactca

SEQ ID NO: 30356 - DNA, 201 bp, Homo sapiens
ggctgaggactctactaatccaattcaaagtctctatggctctgatagtggactctggactgtcacttatattttccaattttattaagctaattgaaagrgaaggagattgttattttacaaatatggcacattggccaggatgtatgtattagccctgaaagtttggaggttgccttactaattttaggcagcatatgt

SEQ ID NO: 30357 - DNA, 201 bp, Homo sapiens
aaagtctctatggctctgatagtggactctggactgtcacttatattttccaattttattaagctaattgaaagggaaggagattgttattttacaaatayggcacattggccaggatgtatgtattagccctgaaagtttggaggttgccttactaattttaggcagcatatgtggccatttgagaacatatctaatgtc

SEQ ID NO: 30358 - DNA, 201 bp, Homo sapiens
cccaggggtgctggtagagactatgctgcaaaattacccaggaagaagtgagtctttaacattgcagccattactatgcatgaaatggtaattaaaagacyatattttcttaactcaaatacgttgatgagaaagatgcaccattgatttaatacctgctgttttggaggatgcggtgggagaaaactctattaagtatgt

SEQ ID NO: 30359 - DNA, 201 bp, Homo sapiens
attgcatcactgcactccatcctgggcgacagagtgagactctgtctcaaaagaaaaagaaaaaagaaaaaaagaaaaaacattcctatcttgcaggcttsttgtgaagattaagttggtgtaaaatcaccaaggacagaacacagtagatgtaagaggggatcagtgatctcctgagcaccagttgacccccttggtcct

SEQ ID NO: 30360 - DNA, 201 bp, Homo sapiens
tttcattttgggttcacattcattggggatgattatgaatggatacctgtctcccccattaactgacattgttaagttccctgaaagcagctactatctgktttttgtctcagttctatcccagcacaggatgagcactccattaagtatctgcagtatacataagtggacagaagtgtttgtaaacacccacgttctgcc

SEQ ID NO: 30361 - DNA, 201 bp, Homo sapiens
caagatggtaaggacttgttaaaggtcacctggcctttttctaccatgaagacttccaaagagtagttgttcacacccagcgcaggggtgcttctaagagygagaatctggacagggcacccagaaagcaatggctaaaaatgcctcaatggtggagcactgtaggtccagctgagacaaccagtaaactcacagggcttt

SEQ ID NO: 30362 - DNA, 201 bp, Homo sapiens
gattttcatagttcttcctgccacaccacagacctgagagtcccagtatactgggtctaattcagcaaggatgagagacggagacagccaaatctgagggwtggggctgtggggtcctaggattagcacaagcttgctctcctgtgctagaccagagcagctgtcgtggctggggaaggctgggccctttgaagacaagca

SEQ ID NO: 30363 - DNA, 201 bp, Homo sapiens
ctaggattagcacaagcttgctctcctgtgctagaccagagcagctgtcgtggctggggaaggctgggccctttgaagacaagcaggattagcccttgtcrtgaccctcacacctgaacccagtaccaggctaggtggagccttctgccagtcctaggaacaccctgaactccaggttccaggctggggcagcagagtgac

SEQ ID NO: 30364 - DNA, 201 bp, Homo sapiens
gaagggagaggccaggagagagctgggggtgaagatccatgtctcatttcagcagtcaccgagccatactagggtagtcaggagctgtggtccccaaagtrggcttccaagcccagcagcatcagaagtgcctgacatcttggttcgaatgtaggttctgggatgggcccagcacactgtgtttcaacaagccctctggtg

SEQ ID NO: 30365 - DNA, 201 bp, Homo sapiens
tgtaggttctgggatgggcccagcacactgtgtttcaacaagccctctggtgtgcttatgatgcccgctcattgtgataaccattgctttatggtgtcagkggcacgagaagaagcaaggggtgctgggataattgcttgaacctgtgttttgtgctattggacactgtttaatcctgacaatgcctgaggggctggcagt

SEQ ID NO: 30366 - DNA, 201 bp, Homo sapiens
ggataattgcttgaacctgtgttttgtgctattggacactgtttaatcctgacaatgcctgaggggctggcagtactgtccccatcttattgaggtcccayagcggtgggagagctggattttcccccgaatctacaccttcagttaccatggttgaccctgtatcagggcctccccatcctcctaaataccctcctgttc

SEQ ID NO: 30367 - DNA, 201 bp, Homo sapiens
acctaacaggtcctatctgaggctggcctgggaggcttgggcagcaggtcccacacatgtcagcaggcagcccccagatacatctgcccagtggcctcccyctcctgggcctcctcttggatcattgtagctctgtggggcttaacacatttggaaagaaaatattagcgtccagggctgcaggtcccacttttctcttcc

SEQ ID NO: 30368 - DNA, 201 bp, Homo sapiens
aaccccacgcattaggcacctagaaaaggaaacccagggaccctcggaggcaagggtgtcctagcactttggacagaaaacctggggaatgttcagtgggratatcacatctttatctccaaggactggagagtgtctctaggcctgggcttctcaaactttttttttttttttttttttttgggacagggtctcactctg

SEQ ID NO: 30369 - DNA, 201 bp, Homo sapiens
tggggaatgttcagtgggaatatcacatctttatctccaaggactggagagtgtctctaggcctgggcttctcaaactttttttttttttttttttttttkggacagggtctcactctgttgcccaggctggagtacagtggcatgatcactgctcactgcagcttcaacctcccaggctcaagtgatcctcttgcctcag

SEQ ID NO: 30370 - DNA, 201 bp, Homo sapiens
tgaagtttgccttctgaggtctcttcggtcttgtcagcagctgtgactggaggcttttgactgttgctgggccataaattcacctccttatcaatgtcacrtgccttgtatctccaaggtttagcccccttctcagtttcacgtgggggttgtaatttgggggccctgccaagaatttggatgtagggtacagagcctttg

SEQ ID NO: 30371 - DNA, 201 bp, Homo sapiens
aggttcaagccattctcctgcctcagcctccggagtagctgggactacaggcgcccaccaccacgcccagctaactttttgtatttttagtagagacgggktttcaccatggtctggatctcctgatctcgtgatccgcccgcctcagcctcccaaagtgctgggattacaggcgtgagccactgtgcccagcctaagatg

SEQ ID NO: 30372 - DNA, 201 bp, Homo sapiens
tcctcaggtcttgcatttattttcagacttattggtacttttgttttgggaagtctttctgtgggaattggagttactattttcttaggggaaaaaaaatyagaacaaacttgtttgagtggcttctatgcattaagcattgttttaagctccttatgtttattctgttatttaatcctcaaaacaatcctgtgatgtagt

SEQ ID NO: 30373 - DNA, 201 bp, Homo sapiens
aacaaacttgtttgagtggcttctatgcattaagcattgttttaagctccttatgtttattctgttatttaatcctcaaaacaatcctgtgatgtagtccycttttaaattcccattttacaggttagaaaatggatgcatagagaatgagaatgtttttctttttttggataacaaactttgagtgattactgtgtgtct

SEQ ID NO: 30374 - DNA, 201 bp, Homo sapiens
cattctttttccttttcttttcttttcttctcttttcttttcttctctttcttttcttttcttttctttctttctttctttctttctctctttcttttttyttttttttttttttggtagacatgggtctctctatgttgcacaggctggtctcaaactcctgggttcaatcctcccaaagtactggacttacaggcatgt

SEQ ID NO: 30375 - DNA, 201 bp, Homo sapiens
ttctggtatgcattatgaagggttttttgatgattttagagtcagggtataagaggtggggaagcccaatgactaaaaatatagatatatattgaccgggygcagtggctcacacctgtaattccagcactttgggaggccgaggcagggggatcacaaggtcaggagatcgagaccatcctggttaacatggtgaaaccc

SEQ ID NO: 30376 - DNA, 201 bp, Homo sapiens
caaaccatatcaagacacctggtaggccaccaactgggaaataaggtctggattttattcttaaaatcatcacacccttgctgtgtgacgtttgggcttgscatttatctccctgcttctgtgagacaggaaaataagtgttatttgtaaagtgtgttgaggttccctgatgaaagttaccagttaaccacaaagtagtgt

SEQ ID NO: 30377 - DNA, 201 bp, Homo sapiens
attaatggaaagatacaagcctttagttgtttggatggaaagaaaacatctctagcattcttttttctttgaactcttagaaactgaaaagtcccaacagyccatgtccaaaggcgtaactgcagacttcccaggcagctttggagatcatccttctccaattgtggtacttggggtcaagtgtagaagcagggagaccac

SEQ ID NO: 30378 - DNA, 201 bp, Homo sapiens
gccatcaccataatttttttacctggctgtctgctactatatcattaggatatagaattattgtgaagcccttttgcgtatgtatgtcacattttccatayacattcactcagatacacatttatgtaacatacacatacacatactcagataactacttggggtttttcctttttcttttttgttttctttttttctttt

SEQ ID NO: 30379 - DNA, 201 bp, Homo sapiens
ccctctctctcttcatatttcaaagctctctctctctctctctctctccctctctgtctctctccctctctaacacacacacacacacacacacacacacwctctctctctctctctctctctctaggaacatctctctttccctctctccatgtttcaaaactctgtctctctctaactctctctctctctttctctctc

SEQ ID NO: 30380 - DNA, 201 bp, Homo sapiens
tccctctctctcttcatatttcaaagctctctctctctctctctctctccctctctgtctctctccctctctaacacacacacacacacacacacacacactctctctctctctctctctctctctaggaacatctctctttccctctctccatgtttcaaaactctgtctctctctaactctctctctctctttctctct

SEQ ID NO: 30381 - DNA, 201 bp, Homo sapiens
ttccctctctctcttcatatttcaaagctctctctctctctctctctctccctctctgtctctctccctctctaacacacacacacacacacacacacacactctctctctctctctctctctctctaggaacatctctctttccctctctccatgtttcaaaactctgtctctctctaactctctctctctctttctctc

SEQ ID NO: 30382 - DNA, 201 bp, Homo sapiens
tttccctctctctcttcatatttcaaagctctctctctctctctctctctccctctctgtctctctccctctctaacacacacacacacacacacacacacactctctctctctctctctctctctctaggaacatctctctttccctctctccatgtttcaaaactctgtctctctctaactctctctctctctttctct

SEQ ID NO: 30383 - DNA, 201 bp, Homo sapiens
tacttatactaaaaagttatttgttgtttatctgaaatttaaattttactgggtatcctgtattttatctggcaacactaaacccagcctttgtagctaaygaggggctgatactcatagccctttctagtcattcattcatggttattgagccaactctgtcccagacactctattaggcaccaaggctgcagcagtggg

SEQ ID NO: 30384 - DNA, 201 bp, Homo sapiens
tggaagaggcatttggacctatcgataatttttttttcaggggctacagtgcgagttgtggctcattttctgtccttacatttgaccatgggagcgtggtyttgcctgtcttgggtggtacttttttattcttacccagcagagatcataagaatagttttctaggcagattttcttttctcaactgctttctgataggca

SEQ ID NO: 30385 - DNA, 201 bp, Homo sapiens
ttgagcaaagacttaagggagcaggccataagtctctgtgggagaagagtattccaggcagaacactcactgtatgcaaaggtttacagtttcggcccctrtgtggggctcagttatctgatgaaatcagccttgtttcctcaagcacattttaagccagaaggggaatgtattgtctcctgtaactggaaaggtctggtg

SEQ ID NO: 30386 - DNA, 201 bp, Homo sapiens
gatacactgtctcatttgtgtctccttagctattttcttctgtgtacgtattttttaaaaaagatatagttagaagttttagtgtgtgtaagtaaataaayatactagatatcatcaataataatagattaatgtcattgtcaacatcatcatttcaccagtaatttaaaataatagtaacactatatgtactctgtgtgt

SEQ ID NO: 30387 - DNA, 201 bp, Homo sapiens
  misc_feature (1)...(201): n = A,T,C or G, or insertion/deletion polymorphism (see Tables 1-2)
atcagccttgtttcctcaagcacattttaagccagaaggggaatgtattgtctcctgtaactggaaaggtctggtgtagatttcaggcacagctggatccnggtgttcaaatgatgacatcagtagtctattacttttacttttctctgcagtggcttcattctcagggaaggatgacttttcctattctttcctgcaaat

SEQ ID NO: 30388 - DNA, 201 bp, Homo sapiens
  misc_feature (1)...(201): n = A,T,C or G, or insertion/deletion polymorphism (see Tables 1-2)
tattacttttacttttctctgcagtggcttcattctcagggaaggatgacttttcctattctttcctgcaaatgttccacgcttgagtcttattggcttgncatggatcatgtgattattaatggcccaattgctgttggcagggggtagaaaggactccaatgttggagccaatgtgaggccatctgtcccctttgaact

SEQ ID NO: 30389 - DNA, 201 bp, Homo sapiens
gagaatttcacttctcagaatccttcttggggagaactcaatgttatgtctgggatcaatatcacacacacttttgtgggaaggagtgagagaatgaacgyggtgcttgagtaatcaaaggtgctggccacacagccttcaagaaagacaggttctgttcaccgagggatctgccgtgagctgtgtgctgaagggtctggt

SEQ ID NO: 30390 - DNA, 201 bp, Homo sapiens
gtgggaaggagtgagagaatgaacgcggtgcttgagtaatcaaaggtgctggccacacagccttcaagaaagacaggttctgttcaccgagggatctgccrtgagctgtgtgctgaagggtctggttatgaaaccatggctgatgtcaattgatggcaaaatggaaagaggggacatttaaagttggagttttggaggagg

SEQ ID NO: 30391 - DNA, 201 bp, Homo sapiens
tggggccaggcgtggtggcttacgcctgtaatcccagcactttgggaggctcaggtgggtggatcacgaggtccggagatcgagaccatcctggctaacayagtgaaaccccatctctactaaaaatacaaaaaattagccagtgtggtggcgggtgcctgtagtcccagctactcgagaggctgaggcaggataatggca

SEQ ID NO: 30392 - DNA, 201 bp, Homo sapiens
cagctttccaaggtctccagagaaagtatgccacatggggacaaaagccagtgcaaagtccctggggtgggaatgagcagaggaagaagaatccatgcctrtgtggccaaagacgaatcctgcctcacagtctttgactcttttgacttcccctgtcgtgcctcctgcagactcttcttgcttccctgggagaatgggtgg

SEQ ID NO: 30393 - DNA, 201 bp, Homo sapiens
cacaaagataaatgtttgaggtgatggttttctgttaccctgatctaatcattatacatgtaccaaaatatcacatgcatcccccaaaatatgtacactaktatatgtcaatacaacgttttaaaaaaagaaacaggtggtgggccagatttgtttcacacaccatagtttgctgactcagtctaatttatccccttgttt

SEQ ID NO: 30394 - DNA, 201 bp, Homo sapiens
ccactgtctagcagtgatgacaaagggatcagacagctgacatcgtggcttcctccttcagagttcatgtggacacctaccaagaataaggccttggccakagctttatctgtccttggactagaatgtttcttagtgatgccataacaacggggttgacttaaaacaatgttaatttattgtctcacagttcagaaggct

SEQ ID NO: 30395 - DNA, 201 bp, Homo sapiens
ttgctctcacaattaatttggaccagcagcccactggagacattgctgggaaccccaaggaatgtagggatttaaaaaaaaagtcattgaaacttagaccwcaatcactgggtcccaacaggctctagtgttaattcaaattgctatctattgggtagagaaagagaatttcagtgccagaagctaccatagagatacctt

SEQ ID NO: 30396 - DNA, 201 bp, Homo sapiens
gggtcatgtaagacatcatttcctctctggcaataccggtaaccacattgcatgattccagggcgccactcacatcctggtcatgaatgaagccctctggwgttgtgcagtgcacagcctgcatgcccatatacattgtcttttctaggcatctagctgtgtttgtgtaaaacccttacacaacaaattaaaaacacagtg

SEQ ID NO: 30397 - DNA, 201 bp, Homo sapiens
ctggcggccaggcccggcggccaggcccagcctctgaggctggcaggctgtggtgaggatggttgcataactggcctttctgccgctggttctgggtgagrtcgagccagagaaaacagttctgcagtcgacagcccctcctgggcactggtgcaacagacaggcttgtgggcctggtgctgacccctcacggtcaggagc

SEQ ID NO: 30398 - DNA, 201 bp, Homo sapiens
tctgcagacagctccttgtggacagggctggtcctggtttctttctggatctgtgcctggcaggtggtcctagagggcagtgaccaggggtcgctcaatgyggtggctggtcatcaaagcaggccctcagtgaaccacgactcctcacgttcatcctcttgggttgtaccctttggggcagagctagcccctgtaatccat

SEQ ID NO: 30399 - DNA, 201 bp, Homo sapiens
tctccccttccacttagctgactcctgtttatccagggatgtgctggtaagtgattaacaacgggatttctagagaagaaagtccctatgtacggtgttcrtcaattcctatggtataaatattcctgccctggctggtttgaagataccagtgtgatgtcacagaacatagggtattgttatccatgattggcagttgtg

SEQ ID NO: 30400 - DNA, 201 bp, Homo sapiens
tgattaacaacgggatttctagagaagaaagtccctatgtacggtgttcgtcaattcctatggtataaatattcctgccctggctggtttgaagataccartgtgatgtcacagaacatagggtattgttatccatgattggcagttgtggaaactgaagcccagagcagttcagtcacttttctgggtagatcccaggca

SEQ ID NO: 30401 - DNA, 201 bp, Homo sapiens
tgagtccatcttgaggtttgataaactgtgtattagtcagctaggccacctctgtaacaagaggtcaacatgtcaatgacttaatacagcagaagtttacrtattgctcatacaaagtaccattgatggtgtgtgtggagggtgcagtgaagacacacttcagacagtcattaaagaccccggctcctttcacttgtggac

SEQ ID NO: 30402 - DNA, 201 bp, Homo sapiens
aatgacttaatacagcagaagtttacatattgctcatacaaagtaccattgatggtgtgtgtggagggtgcagtgaagacacacttcagacagtcattaargaccccggctcctttcacttgtggacctgaaatcttctaggggcccctgaaggtctctgctggaccctctgcatctgtccggatgataggggatgagaag

SEQ ID NO: 30403 - DNA, 201 bp, Homo sapiens
cacagttcattggccagaacttgatcacatggtattttaactgcaagggatcctgggaaatgtagcactgcacccaggagattgaaatagatttggagaayacctggactgctgaaggggctcccgagtcccacactgagggcttctgctgtccatagctggctctgccagaaccattatcatgacccaatgagaaaactg

SEQ ID NO: 30404 - DNA, 201 bp, Homo sapiens
actgagggcttctgctgtccatagctggctctgccagaaccattatcatgacccaatgagaaaactgaatgtttactgggtatttgctaggtgtcagacayggtgtcaagcactttatatgcattatctcaatcctctaaatcagcctatgatgtagatactatctgtatttttcccattttacagatgtacaaaaactgg

SEQ ID NO: 30405 - DNA, 201 bp, Homo sapiens
ctttccctctctctcttcatatttcaaagctctctctctctctctctctctccctctctgtctctctccctctctaacacacacacacacacacacacacacactctctctctctctctctctctctctaggaacatctctctttccctctctccatgtttcaaaactctgtctctctctaactctctctctctctttctc

SEQ ID NO: 30406 - DNA, 201 bp, Homo sapiens
tctttccctctctctcttcatatttcaaagctctctctctctctctctctctccctctctgtctctctccctctctaacacacacacacacacacacacacacactctctctctctctctctctctctctaggaacatctctctttccctctctccatgtttcaaaactctgtctctctctaactctctctctctctttct

SEQ ID NO: 30407 - DNA, 201 bp, Homo sapiens
aacaaacacacacacacacactctctctctctctctctcggaacatctctctttccctctctctcttcatatttcaaagctctctctctctctctctctcyccctctctgtctctctccctctctaacacacacacacacacacacacacacactctctctctctctctctctctctctaggaacatctctctttccctct

SEQ ID NO: 30408 - DNA, 201 bp, Homo sapiens
aacatctttctctctctttcttcatatttcaaagctctctctctctctctctctccctctctaacaaacacacacacacacactctctctctctctctctyggaacatctctctttccctctctctcttcatatttcaaagctctctctctctctctctctctccctctctgtctctctccctctctaacacacacacaca

SEQ ID NO: 30409 - DNA, 201 bp, Homo sapiens
ggcattatcaatcagcccaagttccattctctaaaatctgcagcaagcttttgtcttctggaagttagcttctctcaggctaacttgcccattgtctctcrggcaacatatttccccactttctctaataaatctgcctttcttgacctatgattttcttggtaaattcttttacccctgtgccatcagcctgcattcgcc

SEQ ID NO: 30410 - DNA, 201 bp, Homo sapiens
tgaaaagaaaaagagaatccaatggcactgaagtctttaaaagtatgtcctcctgccttttactgttcattatcctgagataagaatttatcagtcctctrtttattagcaataatgtaatattattcacatacagtgaatattgtatttcttcatgtttttctgattgccaataaccttgatttctgccttttaattatt

SEQ ID NO: 30411 - DNA, 201 bp, Homo sapiens
gtcttttactctctctcttcatatttcaaagctctctctctctccctctctaacacacacacacacacacacacacacactctctctctctctctctctttctctctctctcggaacatctttctctctctttcttcatatttcaaagctctctctctctctctctctccctctctaacaaacacacacacacacactctc

SEQ ID NO: 30412 - DNA, 201 bp, Homo sapiens
tctgtcttttactctctctcttcatatttcaaagctctctctctctccctctctaacacacacacacacacacacacacacactctctctctctctctctctttctctctctctcggaacatctttctctctctttcttcatatttcaaagctctctctctctctctctctccctctctaacaaacacacacacacacact

SEQ ID NO: 30413 - DNA, 201 bp, Homo sapiens
agggcttcataggaacatctgtcttttactctctctcttcatatttcaaagctctctctctctccctctctaacacacacacacacacacacacacacachctctctctctctctctctttctctctctctcggaacatctttctctctctttcttcatatttcaaagctctctctctctctctctctccctctctaacaa

SEQ ID NO: 30414 - DNA, 201 bp, Homo sapiens
attcggtcctcaggtcatttcaagggaacacattggaaagtcatctccacgttgctcttctccattgtacgcaatacaacattttaaggaacaaacaaacagtaccttcttcctcatgaacattattctgtttaacagggagccaaacgaagttgcaagagtcctcattttcccatggtgttccatagagctgtttgtatt

SEQ ID NO: 30415 - DNA, 201 bp, Homo sapiens
gcagaaagtaagtcagttgcatcagaaaagatgtggttgagtgactttcaggagtccctgtggaggtgccatctgaattctgcccctccccaaccccaccrggtgcttctgtgagggaaggcccagtttctgcatggggtgtgatgtcagaggtgacccgaggacgttgccacgcttggaccaactcccattcacaaattc

SEQ ID NO: 30416 - DNA, 201 bp, Homo sapiens
tttcttgactttcattccaggtgattttttttttttaatgaaataattttcctagtcaaatgtgggtgagctggtgggtgggctggaggccggcagctttyggtgccagctgacccagatggggctctcagcccggcactcactcactgcccccagtccgatccggtcatctttcaccctggcagttccactcaaactttc

SEQ ID NO: 30417 - DNA, 201 bp, Homo sapiens
tcagattttacattcaagtctttaatccatttgatttttgtatatgctgtaagagaagtgttcagatttattcttttgcatgtaaatattgttttctgaacatcattattcattgaatagactgtcctttacctattgtgtgttcttgacatccttgtcaaagattagttgcccttaaatgggtggatttaattctgaact

SEQ ID NO: 30418 - DNA, 201 bp, Homo sapiens
ctgccttggaagcctggctgcactgtgtagggagggtacccagcagagggctgggaggtctccaggcccctttgagcactgacagcccatcatctgacctstccaggaacccacgagaaagcatgagatgaacagacagacttggcttgaagctcacttcctagttgtgttactcctcagggcctcagttttgccgcctaa

SEQ ID NO: 30419 - DNA, 201 bp, Homo sapiens
cagattttacattcaagtctttaatccatttgatttttgtatatgctgtaagagaagtgttcagatttattcttttgcatgtaaatattgttttctgaacatcattattcattgaatagactgtcctttacctattgtgtgttcttgacatccttgtcaaagattagttgcccttaaatgggtggatttaattctgaacta

SEQ ID NO: 30420 - DNA, 201 bp, Homo sapiens
agattttacattcaagtctttaatccatttgatttttgtatatgctgtaagagaagtgttcagatttattcttttgcatgtaaatattgttttctgaacatcattattcattgaatagactgtcctttacctattgtgtgttcttgacatccttgtcaaagattagttgcccttaaatgggtggatttaattctgaactag

SEQ ID NO: 30421 - DNA, 201 bp, Homo sapiens
aaggaacagaaggggtggaaagtgctggagggcatggaatggtttctcccagaaggctgagggtctgaaaagaggcttagaagcctggtagccagagcagracggacctggtggacccatctggtgatcctggggctgctctggggcctggtgaatggtgaatggaccagaggcaccttttgggctctgaacaaagaagaa

SEQ ID NO: 30422 - DNA, 201 bp, Homo sapiens
gttccaatgtggggaagattctattaggaagcatggaggcaggaagtctcttccctggaatatatttcttctctctttaggtctaaatatgtgtgtgtatgtgtgtgtgtgtgtgtgtgtgtgcgcgcgcgtgttcgtgtgtgtgtgtgtgtgtgtgtatttttctgaataaataattctggtgcttatttaagtcccgta

SEQ ID NO: 30423 - DNA, 201 bp, Homo sapiens
ttccaatgtggggaagattctattaggaagcatggaggcaggaagtctcttccctggaatatatttcttctctctttaggtctaaatatgtgtgtgtatgtgtgtgtgtgtgtgtgtgtgtgcgcgcgcgtgttcgtgtgtgtgtgtgtgtgtgtgtatttttctgaataaataattctggtgcttatttaagtcccgtag

SEQ ID NO: 30424 - DNA, 201 bp, Homo sapiens
aggcaggaagtctcttccctggaatatatttcttctctctttaggtctaaatatgtgtgtgtatgtgtgtgtgtgtgtgtgtgtgtgcgcgcgcgtgttcktgtgtgtgtgtgtgtgtgtgtatttttctgaataaataattctggtgcttatttaagtcccgtagcatttcaaaaagaaaattttatatctcctttcttc

SEQ ID NO: 30425 - DNA, 201 bp, Homo sapiens
gcccatgtgtgctttatgtaaatggcctctgctctgagattgagtagctcttacaagatggtgggaggctgaaataacagagaactaggaagcctgaaaactctctctgggccctgttcttttaaagcccctttgctttgtaaccttggcctgatcacttccatctcagaacttcagtctccttaactgccaaatcaagtg

SEQ ID NO: 30426 - DNA, 201 bp, Homo sapiens
ggtcatcagggacatgccctctggagccagcctactcaggcttaaatcatagttgtgttgcttgctgacctttggatcttgggcaagccacttcacctctscatgcctcagttcactcacttggaaagtgggaataaaataatactgaaaacgccctcaaacagttcctagtatcaaattggcttttttttttttttgaga

SEQ ID NO: 30427 - DNA, 201 bp, Homo sapiens
cctgtgttaaggttgcttaacatctggtatttgtctccagactcttttctctatcagggattatgtgttctgaggcacccaaaacatctttctgtacaccragttccttcatgaagacttccgggtcttctttccacttcacactcccttttatctcaagcttattctgccacaggcatttggttaagcaaatatgttgct

SEQ ID NO: 30428 - DNA, 201 bp, Homo sapiens
agaggcacagagcacccagagctgaagctggtcagtcctggtcggccacagtttatggggctcctgggaggttttaaactctgtgctgcaactggggaagkttgtgggggaaggttgggtccagggagctactatttattgagggcttacaatatatcacattctgagctggccactttacatcttagctggtaaaattct

SEQ ID NO: 30429 - DNA, 201 bp, Homo sapiens
ccttggggaacagcagagaagcttggaaaaaaaaatgataataagtcacacttaatggagaactcgctatgtgccgggctgggtatgagggactttacgtmgctgaatcagtgataagcttttgattgcatgtagcagaaatgctcacttcaatgggcttaacattaaagggactccattgactcatatagttggaaaggt

SEQ ID NO: 30430 - DNA, 201 bp, Homo sapiens
gattcggtcctcaggtcatttcaagggaacacattggaaagtcatctccacgttgctcttctccattgtacgcaatacaacattttaaggaacaaacaaacagtaccttcttcctcatgaacattattctgtttaacagggagccaaacgaagttgcaagagtcctcattttcccatggtgttccatagagctgtttgtat

SEQ ID NO: 30431 - DNA, 201 bp, Homo sapiens
tgattcggtcctcaggtcatttcaagggaacacattggaaagtcatctccacgttgctcttctccattgtacgcaatacaacattttaaggaacaaacaaacagtaccttcttcctcatgaacattattctgtttaacagggagccaaacgaagttgcaagagtcctcattttcccatggtgttccatagagctgtttgta

SEQ ID NO: 30432 - DNA, 201 bp, Homo sapiens
cctttgttccttcctgagagcgcacactattccctcctgcctggctgtcttgtatcaacgtggaattccactccatttcctccaccacactcatgtcttgwccaccagggttctagactgatttctaaaggatttggaattttaaattgtctagtgtgccagagcatggatcatttatttacaaagactcatttaatctat

SEQ ID NO: 30433 - DNA, 201 bp, Homo sapiens
aggccgaggcaggcagactgcttgagcctaggagtttgaaaccaccctgggtaacatgatgaaaccccatctctacaaaaattacaaaaaaaaaaaaaaaatagccaggcatggtgatgcgtatctgtagtcccagctacttaggaggttgaggtgggaggattgcttgagcccagggggttgcggttcagtgagctgaga

SEQ ID NO: 30434 - DNA, 201 bp, Homo sapiens
agagagatggagaaacagagaaaggagaaggaaagagctacagagataaggaaatgagaaaacactgagaaataattgggaaatgagacagacaagctcayagaaggacttagacccagaaagggaaagtggaaaattatcttgacagctaacacgtattgagaagacagtatgtgccaggcactgagattagtgtgtgat

SEQ ID NO: 30435 - DNA, 201 bp, Homo sapiens
ctcactaggagggagaatgcatttccttcctttgtgattagcaaagtactagatgtgtccatggataggaaattatcttattgctgaacctcctttttttwaaaaaaattattttaacaggaaatggtgatagtcagggtttggggttgtgggactgatacacactctcatttgctttgtttttatttttctttatgtgta

SEQ ID NO: 30436 - DNA, 201 bp, Homo sapiens
cccatgtgtgctttatgtaaatggcctctgctctgagattgagtagctcttacaagatggtgggaggctgaaataacagagaactaggaagcctgaaaactctctctgggccctgttcttttaaagcccctttgctttgtaaccttggcctgatcacttccatctcagaacttcagtctccttaactgccaaatcaagtgg

SEQ ID NO: 30437 - DNA, 201 bp, Homo sapiens
tagctttgtctttttcttccttcctccccttaaccaacccttctgagaaacatcttacacagtaagctctttaagcgaattctttttttcttttttttttyttttttgagacggagtctcgctttgttgcccaggctggagtgcagtggtgcaatctcagctcactgcaagctctgcctcccgggttcaggccattttcct

SEQ ID NO: 30438 - DNA, 201 bp, Homo sapiens
agtctcgctttgttgcccaggctggagtgcagtggtgcaatctcagctcactgcaagctctgcctcccgggttcaggccattttcctgcctcagcctcccraatagctgggactacatctttaagttaattctaaggaaagagactgtctgcttggagagacaagtcctgtaaatatatttgtttcatgtgtgtgagactt

SEQ ID NO: 30439 - DNA, 201 bp, Homo sapiens
ttcctagatgtatgtcctggggcaagttgcttaccttctctgtgcttcagtttcctcctctgaaaaatagtagtatatacataggatggttctgagaaccraagttattacgtgagcaaaattcagtacatagtaagcactcagtaagtgttggctattttttttctttgggttctagttcagccttccccctctcttctt

SEQ ID NO: 30440 - DNA, 201 bp, Homo sapiens
tacagtgtcctggaacccttttccagccattacttgtgtatatcttgtctgagccatagtccttctttccttatgatcacataaggaatattgtgtatatwtatatatatatatatatatatatatatatatatatatatacacacacacacacacacacacacacacacacaatgctcattgccttctcattagtattct

SEQ ID NO: 30441 - DNA, 201 bp, Homo sapiens
cctgagttacatcacttagaataatagtctccagtctcatccaggtcactgcaaatgctgttaattaattcctttgtatggctgtgtagtattcactcacatatatatgtgtgtgtgtgtgtgtgtgtgtgtgtgtgtgtgatgtgatatatatatgtgtgtgtgtatatatatatatatctcacagtttctttatcctct

SEQ ID NO: 30442 - DNA, 201 bp, Homo sapiens
ctgagttacatcacttagaataatagtctccagtctcatccaggtcactgcaaatgctgttaattaattcctttgtatggctgtgtagtattcactcacatatatatgtgtgtgtgtgtgtgtgtgtgtgtgtgtgtgtgatgtgatatatatatgtgtgtgtgtatatatatatatatctcacagtttctttatcctctc

SEQ ID NO: 30443 - DNA, 201 bp, Homo sapiens
tacatcacttagaataatagtctccagtctcatccaggtcactgcaaatgctgttaattaattcctttgtatggctgtgtagtattcactcacatatatakgtgtgtgtgtgtgtgtgtgtgtgtgtgtgtgtgatgtgatatatatatgtgtgtgtgtatatatatatatatctcacagtttctttatcctctcattgat

SEQ ID NO: 30444 - DNA, 201 bp, Homo sapiens
aattcctttgtatggctgtgtagtattcactcacatatatatgtgtgtgtgtgtgtgtgtgtgtgtgtgtgtgtgatgtgatatatatatgtgtgtgtgtrtatatatatatatctcacagtttctttatcctctcattgattaatgggcatttgggttagttccatggttttgcaattgtgaattgtgctgctataaaca

SEQ ID NO: 30445 - DNA, 201 bp, Homo sapiens
atgcaagtaaactccttctccatttagcttaaacagaaagaaaaaaatgtgaacatcttattatattgtgtgtatgtatatgtataaatacatttgtgtatgtgtgtgtgtgtgtgtgtgtgtgtgtgtttatgtgtataaaatctcacatagggagaaatcctgaggtgggatggctccaggctgcttgccccaggaact

SEQ ID NO: 30446 - DNA, 201 bp, Homo sapiens
gaagcttggaaaaaaaaatgataataagtcacacttaatggagaactcgctatgtgccgggctgggtatgagggactttacgtagctgaatcagtgataarcttttgattgcatgtagcagaaatgctcacttcaatgggcttaacattaaagggactccattgactcatatagttggaaaggtggatgacttcagatgag

SEQ ID NO: 30447 - DNA, 201 bp, Homo sapiens
gagataaaattccttcttttaaagtgtacatacagttcggtagttttttagcttattcgcaaagttgtgtaaccatcattattatctacattttcatcacyccaaaaggaagtcctgtaccattaagcagtcactccctattccctctgctcccagtccctggctggtctactctgtgtgggctctctggatgtgcctgat

SEQ ID NO: 30448 - DNA, 201 bp, Homo sapiens
tgctactaccactggacaaatgagtaaatctgggggcaatgtgaagcactgtgcttagcctgtctctgtgaacagtatgactgttggagtctttcttttcygtttttcttgtgaatatagatgggacttcggagctgtaaggaagagagtggaatatttgagacctagctgttactttctttgtgaagacacttaaataac

SEQ ID NO: 30449 - DNA, 201 bp, Homo sapiens
tcattattatctacattttcatcaccccaaaaggaagtcctgtaccattaagcagtcactccctattccctctgctcccagtccctggctggtctactctktgtgggctctctggatgtgcctgatctggacacttcatataagtggaatcacacaatatgtggccttttgtgtctggcttctctcacttagccaatggga

SEQ ID NO: 30450 - DNA, 201 bp, Homo sapiens
cacttagccaatgggagtttctgactaggatctactgtgtctgacctcaaggaatctccattcctatctttcccagcagaaaagagacagcaccgctggcygactctggaagaaagagattctgtgctagagagagagagagcctccacccttgtactccgcttaccttttggggcagcccgaggctgcggctcagtgagg

SEQ ID NO: 30451 - DNA, 201 bp, Homo sapiens
gttcaagcaattctcctgcctcagcctcccacgtaactgggattacagacatgcaccatcatgaacagctaattttttttttttgtatttttagtagagayggggttttaccgtgttggccaggctggtcttgaactcctgatctcaagtactccacctgcctcggcctcccaaagtgctgggattacaggtgtgagccac

SEQ ID NO: 30452 - DNA, 201 bp, Homo sapiens
tgtcgattagagaaggtgtttatagctcagaactagaggagaagaaaccatttctttgtcactgagaaactccttgccagggtctctcagtgagaaacagsacatgtggagcccaagatagggcaaagccaagtctccttatcttatttagtgacatttttttaagagtaaaaaataatcacatgctttttgccaaatcca

SEQ ID NO: 30453 - DNA, 201 bp, Homo sapiens
ggtggggggtgcagataatcaacacttcagtaaatcaatgaatgagataatttacagtggcaccatgagaccactgaacaggggatgggattgtgtgtgtyagaggggctgctttggtgggtagccagagaagcctctttcgaggaggagatggtcatatggcagaggcaggactgaggagaaagtgagggccacacagga

SEQ ID NO: 30454 - DNA, 201 bp, Homo sapiens
aggcatggatccaacaaaacatcacattaattagataatctaatttccaaaaacagaccccagcgcagacacccactgtctagcagtgatgacaaagggawcagacagctgacatcgtggcttcctccttcagagttcatgtggacacctaccaagaataaggccttggccagagctttatctgtccttggactagaatgt

SEQ ID NO: 30455 - DNA, 201 bp, Homo sapiens
tatggcagaggcaggactgaggagaaagtgagggccacacaggatttgggccagaaagccgcaggcagaggagcagctggtgcagggtgggaacagggtgrcctggcctttgggcgaattggggatggtgggtgactggccgccttgtttctgttttcatcgccttgttactgctttttctaaatggttcctcccacacag

SEQ ID NO: 30456 - DNA, 201 bp, Homo sapiens
gacaaccaaggtccctgccctcagaggtctgagcaattccatcatcagtgactagattgaacagataatcccctcttacacacgtatatgcacacttcagyctggagtgtgatgagagactatggactataatgcgtgtgtgtgtgggggtgcatcctctccttggccggggctcagggaaggcttccctgcagaaatgag

SEQ ID NO: 30457 - DNA, 201 bp, Homo sapiens
gcatcttccgtgtttctgctggtggctggcagtctttgacttgcagccaccactccagtctctgcttctttggtcatggggcgttctccctatgtgtgtcyctttcctcctctcctagggacaccagtcatattggattaggagctcaccctactccagtatgacctcattttaacttgattacatctgcaaagaccttct

SEQ ID NO: 30458 - DNA, 201 bp, Homo sapiens
ttacacacgtatatgcacacttcagcctggagtgtgatgagagactatggactataatgcgtgtgtgtgtgggggtgcatcctctccttggccggggctcrgggaaggcttccctgcagaaatgagacctacaggcccggcatggtgactcatgactgtaaccccagcactttcagaggtcaaggcgggtggatcgcttga

SEQ ID NO: 30459 - DNA, 201 bp, Homo sapiens
gagtgccttcttcccctctccccctgtgactgcctgcaggacagcgcaattcctctgccattgtgtaagcagcccccacagatgatactccatgctagggmattaactacttgttgaaaagcacttgtgtgttcccctggctgaggctgaaagtgggggatccctggggaagggggtggcctggctatggatggggagaag

SEQ ID NO: 30460 - DNA, 201 bp, Homo sapiens
acacactcacacgtgcacacaaacgcacacacacatgcacacactctcacacgtgcacacacatgcacacactctcacacatgcacacacacatgtgtgakcacacgcactcagtgatttcctgactgacatcgggctgcccctactgggaagtgcttcctgtgtaaggacagggtcctctgcagtgggaggtggaaggtt

SEQ ID NO: 30461 - DNA, 201 bp, Homo sapiens
gagagactatggactataatgcgtgtgtgtgtgggggtgcatcctctccttggccggggctcagggaaggcttccctgcagaaatgagacctacaggcccrgcatggtgactcatgactgtaaccccagcactttcagaggtcaaggcgggtggatcgcttgagcccaggagtttgagaccagcctgggcaacatggcaaa

SEQ ID NO: 30462 - DNA, 201 bp, Homo sapiens
tatgaatgcaggaaatcaaaacgatatttgcaaacccatcttcataacagcattattcacaataaccaagaggtagggccgggcatggtggctcacgcctrtaatccgagaactttgagaggctgagtcaggcagatcactgaggtcacgagttcgagactagcctggtcaacatggtcaaaccccgtctctactaaaaag

SEQ ID NO: 30463 - DNA, 201 bp, Homo sapiens
tttctcagtggtgcctggtggcaaattcacacacacttctctctctctctgtctctgtctctgtctctcacccccctcatctatgccccagcttttattayattttaggcaaatctatgtaaaattcttacatcattggccaatgccttgtgtagcagaaagactagaggtttcacaggactgtacttttagtaagaatgt

SEQ ID NO: 30464 - DNA, 201 bp, Homo sapiens
cttcatcttgtaaacatggccactgtttccaccaggggaatactgatcgctgtcctttacagaggcactgtgctaagtaagtacttttcacacatctcatytaatcatctgaacaacccatgaggtatgcataataacaaacctcttcctttaaagatgaggaagctggaacttagagatagtaactggcttttccaaaaa

SEQ ID NO: 30465 - DNA, 201 bp, Homo sapiens
acattcaggttgaaaatttaaaaaaatattctctatagcttcataaatattttagcattgacagggcttgtgtgcttttatcatctcacagtggtatagtragctgggtgggagaggtgtcatgctaggtgaagaagctaagacctaggctcttggatgtttataatgtaccaggcttggtactgggtactttaatggcat

SEQ ID NO: 30466 - DNA, 201 bp, Homo sapiens
aaatttaaaaaaatattctctatagcttcataaatattttagcattgacagggcttgtgtgcttttatcatctcacagtggtatagtgagctgggtgggaraggtgtcatgctaggtgaagaagctaagacctaggctcttggatgtttataatgtaccaggcttggtactgggtactttaatggcatgacatcatgtaat

SEQ ID NO: 30467 - DNA, 201 bp, Homo sapiens
attcatcaatatttccatggggacaagcaggcctattaggatggacaaagaaggggtgaggctttggcagcacttgatcctttgggaacaattagcatttytggaagccaaggtaaagtgttagctcaccctctcccttcccctaggccggtcgtgtctgttttttggtgcggcagaacccctgttaaaataagagaaaca

SEQ ID NO: 30468 - DNA, 201 bp, Homo sapiens
tgcaagtaaactccttctccatttagcttaaacagaaagaaaaaaatgtgaacatcttattatattgtgtgtatgtatatgtataaatacatttgtgtatgtgtgtgtgtgtgtgtgtgtgtgtgtgtttatgtgtataaaatctcacatagggagaaatcctgaggtgggatggctccaggctgcttgccccaggaactc

SEQ ID NO: 30469 - DNA, 201 bp, Homo sapiens
aaacaagatgatgtcattttaaaatactaattccatgcctagcctttcatgctagtatcatttattctgcttcatacagtaaacaaaagtttttttttttwaaaaaagaagagttatcaagaaagttgcttaaaaattaaaacaatcactctagaaaaaagaattagctgttgatacatttagaaaggaatcagggaaagg

SEQ ID NO: 30470 - DNA, 201 bp, Homo sapiens
gctagtatcatttattctgcttcatacagtaaacaaaagttttttttttttaaaaaagaagagttatcaagaaagttgcttaaaaattaaaacaatcactstagaaaaaagaattagctgttgatacatttagaaaggaatcagggaaaggaaacctcatctgttctcttcctaaaatcacaataattatttcagaaattt

SEQ ID NO: 30471 - DNA, 201 bp, Homo sapiens
cctgtcccgaatgtcccaggggagggaggagccaagatctcaaacccaagacatatgtccactgccttttttccatattttatgctttatagacacacagmcacacacacacacacaaacacacacacacatacgcacacacacacacagctttcctcccgccctctttgacctgaagctatagttacactaaatgaacat

SEQ ID NO: 30472 - DNA, 201 bp, Homo sapiens
caaacccaagacatatgtccactgccttttttccatattttatgctttatagacacacagacacacacacacacacaaacacacacacacatacgcacacwcacacacagctttcctcccgccctctttgacctgaagctatagttacactaaatgaacatccacgtataagcggacaccctcctttctccacatttcaac

SEQ ID NO: 30473 - DNA, 201 bp, Homo sapiens
atttttccctctggaagtccccaaatcagagcattatgtactttttgtaatactttatggtagaaataaatgagtgaccataataataaacaggatatcattttctgataactttccattaaacattgaagatttatatttaaaaaataattcaaaaagtaataagtgcatgatttgttatattatgaaacagtgtacatt

SEQ ID NO: 30474 - DNA, 201 bp, Homo sapiens
gttatacagcttatactttgttatatgtattgagatttgatggttttggccattgatttttttttttgtaatcgttgttacaaagtttagtaaaaatacastaaatcaacctgattatatcctcaattttcttatcttttgatctatttggcctgtaaaagctaaaaacagtgatagtgggaatatttcacgtattaccct

SEQ ID NO: 30475 - DNA, 201 bp, Homo sapiens
ggaacaagggagataaccttaaagtctggctgcctgtgggctgggtggaacagagccatgtttctcttattactgaaaacaggtaagagaaatattgctgwattctttccccagtaaggaatattaataattaacaaccctgggaaaagaatgcattcccaggaggagcctctaaaatggctgctctgggggtgtctgcct

SEQ ID NO: 30476 - DNA, 201 bp, Homo sapiens
caagtactccacctgcctcggcctcccaaagtgctgggattacaggtgtgagccactgcacccagctgttccaagtacttcttacaaaataaactaaaaakttagacaatagtgattgccaccgtagtactgaatacttgatttatgaccatggactagatatggcagaggtttttaaaactctgtgaaccttttcatttt

SEQ ID NO: 30477 - DNA, 201 bp, Homo sapiens
gttttttctgaaacagtgctgcatactttccccatattttagtttgatcatggactgggacctatgttagactaggctttttttgaaagggaattttcatrgctagtggctctttatacctatcatttacttattgatgcacttgattaggataaagactttagataatggtaagatttggtcccatcagtgttctttggt

SEQ ID NO: 30478 - DNA, 201 bp, Homo sapiens
cccaaactctagctactaggataacatctgttggtacctaatatagagatattttacattgctagtgtttaagataagtttttttgtttttttgttttttktttgtttgttttttgagatggagtgttgctctgttgcccaggctggagtgcagtggcacaatcttggctcactgcaacctctgcctcctgggttccagtg

SEQ ID NO: 30479 - DNA, 201 bp, Homo sapiens
cctctgtcaggccagccaccagctatcgtgagaggagccaagttcctcattgccctgtgctgaaccgaactgcagcaagttggatagaggaggcagttttrgcttgaacgcaaacatcctgtcggagaacagagtgattatagttttagctgcacacggggaaataacagcacagaggtgaatcatggcatctgtttactg

SEQ ID NO: 30480 - DNA, 201 bp, Homo sapiens; identical to SEQ ID NO: 3795

SEQ ID NO: 30481 - DNA, 201 bp, Homo sapiens
gcctgccttaatgtgtttatctgcctgggccttgctcgctgcctgctggcaccatatgaggtgttgctgttgagctccgtggctctatttctgttttctcrcctggcaccagcacagcagggcagatgaggtgtgtggccacccttggtttcttcctggctccaggttcttcttgaggtgggcatttggtcaggaagaaca

SEQ ID NO: 30482 - DNA, 201 bp, Homo sapiens
atgtcagggcagaggctcacttctggtctgtctagttgggtgagtctgaacttgaggccccagggcttattggaggcaaactgagtcatggagagggagartacagtaaggccactaccaagggctggctgcagagggtgcaagggttgcacgggttttggggttgttggcttccccagaggggttctttgtatggtgtca

SEQ ID NO: 30483 - DNA, 201 bp, Homo sapiens
tctgcacctgcttgcgttcaggcagaagcagggtagcgtggcatggtgaggaccatggattcagttccagctcggctgctgatagctgcatgaccttgggsaagttgcacatcctccataagtcctagttttctataacatgggcatccctgatgtagagcatttgtgcagttgtgtgtaaaggatgtggcagttaggaag

SEQ ID NO: 30484 - DNA, 201 bp, Homo sapiens
caggaaagatgaagcatctcttttagaggccctcagggctgcaggcaccatgccagctctttcctgtgttacctccttaaccctcttcaaggagggcatcygggacagtccctggcaactagcaagcacccaacacagggcccttcttaccaggtggcctctgaggacctttcagccatgtgcccctgggctgcggctggg

SEQ ID NO: 30485 - DNA, 201 bp, Homo sapiens
caggctcacagcaccagcagcctaagagtttacaccagactttcaagtcagagtcctcctccctcgttgggggctgcaggcttccctcagacccttctctrgagggcatttgatccctaccacaggacttaactggaagcccctttttgagatctgtgagatgtctgggattttccggccaagaaggacttcagagatagg

SEQ ID NO: 30486 - DNA, 201 bp, Homo sapiens
ctgacaaggaaggggtgggggagggtggaggcagggaggccaggacctgcatttccaggtgagcctgagacctcagacggatgtgttgtttttctagttgyctacttaggtctactaatctttaggaaggaatgatagcctggtttatgggatatgacataagtttttctaaaagggacctgagatgaagaattaggcaac

SEQ ID NO: 30487 - DNA, 201 bp, Homo sapiens
aagaaggacttcagagataggcctgtcttcatctcaagaagcaaagctgaaacccagagcagttgagtcccttggccaccgggctgatcagcggcacagcygggaccagagttctggttttctgacccttagagcatgagatcactcatcttcttctgatttaattgggggatctcaggacagatcagccactagaattgg

SEQ ID NO: 30488 - DNA, 201 bp, Homo sapiens
ctcggggccaggacaagttggcatcctgctgcacacagggcaacctggagaatcaagagaaggctgccagcctcagatgccagtggctccctaggaaagayagtgttagttggtccccagtaatatctggcctttatcacacacctttatgtgtcaggcaccgttgtgagcaattcacattagtcctggaggcaggaaatg

SEQ ID NO: 30489 - DNA, 201 bp, Homo sapiens
tcttttttaaataaaggctttaaaaaaatcaaaggcataatttaccccttctgctttactcctatacctttaagctagtttccatctcagctggggacccsttctggctctggttctttatgggtagagcatgttatttaaatccattgttccctatgtcttaactcttgctctctctgttgccaggaggcccagaagatt

SEQ ID NO: 30490 - DNA, 201 bp, Homo sapiens
ctctgggggagctgccccctcaccttgactttgaccattgtccctttcttttcactttcatgggacactagcgttgaaaaattggggcctttttcttcacwctcccatttctctttatttaattattttaaaacatctgatgctgcagtgagatcagctgtgatacatcatctgttctattttgagctgcagggagacaaa

SEQ ID NO: 30491 - DNA, 201 bp, Homo sapiens
atctgctccctccgagcaaggattctcattggtctcgttcacttgtgtgcaggaacatctgtgtgtgcctcgcacccatgctcagtcaatatttgctgggygaacgaatgagactgaactcccaggcattagtggagcatctgacctgacctgagagaaacgtggagaagctgggtcctggcagagccttgatgggcagtt

SEQ ID NO: 30492 - DNA, 201 bp, Homo sapiens
ctatgcatgaaatggtaattaaaagaccatattttcttaactcaaatacgttgatgagaaagatgcaccattgatttaatacctgctgttttggaggatgyggtgggagaaaactctattaagtatgtattaacatatggactgattataagatctcagtttcacaaatcattttatgttggaaaatgtgcttcttgaaac

SEQ ID NO: 30493 - DNA, 201 bp, Homo sapiens
ccggacacagtaggatgtacacacactttgtgcgtgtgtgtgtgtgtgttcagccttccaggatcatttaggaatttttattccttaattgacattcaaawcttgatggtagaggtgaggagaggcccagggagcttgggagaggccacgttgtttgtgcagttggaagactctgggcaggaaaggagcaccacatccaag

SEQ ID NO: 30494 - DNA, 201 bp, Homo sapiens
cagggctttctgacagctcggggtaatcggttaggtcccagcttctttataagttcctgttgcctgaatctgtggacagtgtgtcccttccctaaaggtayagcccacagttagcaaacacagtaactgctaggtgaattaatcagtgcaaatgtcttaagccctgctggtgcagagtctccggggtgcagagcaggagaa

SEQ ID NO: 30495 - DNA, 201 bp, Homo sapiens
aggaggtgaaagaggttgctgggtggatgtcctctttggcatgggaggggggacacggaagacccagccccagcattcggggctggtgaaaacctgaggcraaggagaggagagcagcccgcggggagggaccagcagccccagggcttcctaaggtattgaggttcagacacttctggatcttaggccaaactgtgccac

SEQ ID NO: 30496 - DNA, 201 bp, Homo sapiens
gggtatgcgcttgattgccagttcccccaacccccaatctccggatgttatggagcaggatcgtgtaaactttggggtagacttttcatctgtttagtagmcaaatgtatttgtgtgatttgtactgttggacatttaggccatgtcccatctgttgcacttcaaacaatgaataatcttgtgtatgagtctttttatgca

SEQ ID NO: 30497 - DNA, 201 bp, Homo sapiens
acttgtctaaggccacacatgtagcaagtggcagaggcaggatttgaatcaggcagcccaatgccagtgtctgcacttagaatcactgagagccatattgsctttctgagggctgttcttgatctgagagactagagtcctctgtcaagagctagtactgggcagccctgggggctgggttgtggggtgtgggctgtggaa

SEQ ID NO: 30498 - DNA, 201 bp, Homo sapiens
ttgggtgagtctgaacttgaggccccagggcttattggaggcaaactgagtcatggagagggagagtacagtaaggccactaccaagggctggctgcagarggtgcaagggttgcacgggttttggggttgttggcttccccagaggggttctttgtatggtgtcaaggtgcctgtgggcattaggtgactaaaaggactg

SEQ ID NO: 30499 - DNA, 201 bp, Homo sapiens
ggtttatggaaagagcaaatggtggggatgtactgtgggttcgaagggaggcatgtgttagtctgttttcttgctgctgataaagatataactgagactgrgaaatttataaagaaaaagaggtttaacagactcacagttccatgtggctggggaggcctcacaatcatgacagaaagcaaaaggcaagtcttatatggc

SEQ ID NO: 30500 - DNA, 201 bp, Homo sapiens
tctttctgtccttttcccttcctatctgataaatccttgtgagtagttgacaaaagagtgcctgaagatgtcagggcagaggctcacttctggtctgtctrgttgggtgagtctgaacttgaggccccagggcttattggaggcaaactgagtcatggagagggagagtacagtaaggccactaccaagggctggctgcag

SEQ ID NO: 30501 - DNA, 201 bp, Homo sapiens
tagcacagtgtgtttggctcaagaggaccacagtgatatcagttactcccctgcccacagggagcttgctctctagttagggagaccaggcgaagtgaggsagagtgggtgtggagagtccatgctaggcactgaggatcgaggagtgagggcagccaggcttcagaggggcagagaggtctgggccaggaagaggtggat

SEQ ID NO: 30502 - DNA, 201 bp, Homo sapiens
tcggtctagtccgtcagctggcactggccaggctccactgtccattatcctcctcacctgccctaatctttcctttattgctcctaagtgataccacgtarcttcttcagtctcaaatcatcctactcagacccttttctgacattcagagccttccttatcccacagttctttctgtccttttcccttcctatctgataa

SEQ ID NO: 30503 - DNA, 201 bp, Homo sapiens
tgatatcagttactcccctgcccacagggagcttgctctctagttagggagaccaggcgaagtgagggagagtgggtgtggagagtccatgctaggcactsaggatcgaggagtgagggcagccaggcttcagaggggcagagaggtctgggccaggaagaggtggatgcagccctgggcctcatggtctatttttgcctt

SEQ ID NO: 30504 - DNA, 201 bp, Homo sapiens
atccaggctaatctcttcatctcaaggtccttaattaaattatgtctgtagagtcccttgtgccagttaaggtcgcagtcacagattccagggatgaggaygtggacatcttctagggccatgattcagcccacctcagcatatagatgaatgccatttttatgggaatcagtgaggcatgctaagcaggaagcaatgcct

SEQ ID NO: 30505 - DNA, 201 bp, Homo sapiens
aaggtcccttctcaagctttggtctttgatcttgtgattcagcgggaaatgcccaaacgcatcagatgaggtttgtatcttgagcaccaggtgatggggtscagtcaggcccttggccccaggtgacataggaagggtgagcccctctgcggccatgtcaacaaaaagtcatcgtggggaacaccactaaagggaatgggg

SEQ ID NO: 30506 - DNA, 201 bp, Homo sapiens
catttggctgatttagagaaacttaggggcacctgtaacatgacactgagatcaatttaggcagccatctgccatcttgaagaatggcatgcaataaaacrtttgaactgagtgtaatttttgtggtttttatcattaactgccacatgtatttcatggtaacgagtgatgcagtcccagtgattagggtttcatgttcgg

SEQ ID NO: 30507 - DNA, 201 bp, Homo sapiens
agtcaagagtcatttggctcatagatggaaggagtagggacatcctgaggcctgcgaggctcaaagaccaggcagggacactggaaaacagtcattatctstgagtctcacagcaaaaactcagtgaagaggtgactgtagatggagggaggtggtgagaatttcacttctcagaatccttcttggggagaactcaatgtt

SEQ ID NO: 30508 - DNA, 201 bp, Homo sapiens
gcagcgtagtattcaaaccagtattgtggtggggaataattgtatacatgtaaattatcaagccctatgagtggaagaattttttcaaattatttttgtcyctctatatattgatttatattatgtataactatctctttatataaactatatataattatatatatataactatataattatatatatataactatatat

SEQ ID NO: 30509 - DNA, 201 bp, Homo sapiens
atggtggacagctcatagcatagctggtcttgataggtgacatctgccaatggcagtggcaattgctctaccagcatctctctgcagttgttttccagagtttatcttgtcccactagccccctcccagccacagactgaaatgactcttctttcctaactccacgaactcctgacatgtcacacattgtactcagagcac

SEQ ID NO: 30510 - DNA, 201 bp, Homo sapiens
ggctttaagtgtgtgtattataagcaaagccaagaaaaggctgggaggtggtgattctgtgtaagattctggatcactcgctctgcagcaagggtgatggwgcccttccgttccactcaaatcaatggatgcacacatctctcctcaggcacaatgtctgtacccaatggctgatatatgcaacatcccctccccaccaaa

SEQ ID NO: 30511 - DNA, 201 bp, Homo sapiens
ggagggggcagggggatgtcaccagcacaacctggaaaccagactgtcagagttcaaattctggcttcaccaccaactagctgggagaccctagttacccwagctctttgtcctttagttttcccatctgcacaatggaaatctagatatttacaaagaaggctgttgtgaggatggaatgagtgtatgtttttatctata

SEQ ID NO: 30512 - DNA, 201 bp, Homo sapiens
agctactctggaggctgaggcaggagaattgcttgaacctgggaggcaggggttgcagtgagccgagattgcgccagtgcactccagcctggcaacagagygagacttagtctcaaaacaaaaacaaaaacatttatggaacaacttaaatgtaccacattctgtggctataaagacaaataagggcttcccacaagtctt

SEQ ID NO: 30513 - DNA, 201 bp, Homo sapiens
tcagtactcttaataatttcctatgtctgtctttaatctcttaatcccatcatctttgtaagctgaggatgtatgtcgcctcaggaccctgtgatgattcygttaactgcacaaattttttctaaagcatgtgtgtttgaacaatatgaaatctgggcaccttaagaacaggataacagcaattttcagggaacaagggag

SEQ ID NO: 30514 - DNA, 201 bp, Homo sapiens
tcttctcagccctgggaaaatatgtatattggaacctcagagctacaccctgagggtatgtctcctggtttgctgaatttttaaaaagaggttttactctrtggccagctttcttgccaggagatcagagaccgatgacagctggcagaatcggcctctgttccagctgtctcctacccttcctaaaactcagatgctctt

SEQ ID NO: 30515 - DNA, 201 bp, Homo sapiens
agggtatgtctcctggtttgctgaatttttaaaaagaggttttactctatggccagctttcttgccaggagatcagagaccgatgacagctggcagaatcsgcctctgttccagctgtctcctacccttcctaaaactcagatgctctttgaagctgtcttcctccattgaggagcatgtgcttcttcagtgacagccgga

SEQ ID NO: 30516 - DNA, 201 bp, Homo sapiens
cgccactgcactctgcctgggtgacagagcgagactctgtctcaaaaaaaaaaaaagtgttgagaattgggtatcaaacagagcctggtgtctgtcctggytttggcttttagcagcctggaatcaaatagccacttacatgaaatttctaacactgtcatggatggcaggcaggtgctggagtcctactgcctgcattac

SEQ ID NO: 30517 - DNA, 201 bp, Homo sapiens
atggaaatcactttctaggggagcttctgtgactcatttcctttgctgggatcccttctgtcttccacctaaaccatcacaagggcctcctgagggtctcycagcctctggaataacaccttcactggtccgttctttactggccaccagagaggcctcttgaagacgtaacccagatcttgtctttctttttcttaaaac

SEQ ID NO: 30518 - DNA, 201 bp, Homo sapiens
acatattggaaaacttccctgctgattaaaatagacattgccctaagtgctgtgagtgtccctgttaccttatcccttctctgaaaccctctgggtttccycttgaagcagcccctaaaatggctcagtttccagcatagcaggaggtctccagcctagccaatggtgccccttgtgaaggtcatggacctgccttaccca

SEQ ID NO: 30519 - DNA, 201 bp, Homo sapiens
gctgcccactttcaatctctgaaccaaatgtctttttgatgaggcctaaaatccactctgagaaactgcagaggggaatttctgaaatcgcttctaacttsctgtgaaaatattctctaactgacaagagattgtccagataacaatgaatacacaataaagctggcgcttctgcctttgctaccaggctcacaaataacc

SEQ ID NO: 30520 - DNA, 201 bp, Homo sapiens
cgtatgccccattgccctaaggttgtcccaaagaggccaccattagacctcaccttttatggacaggtgggagatgtctgaacgcaaccacatgttgcccrgtgacaggggctgggctgaccaggacacggagagtgacttgccttctggggctgagccagtcactcatactcccagcgtagccctggagcttcactgcaa

SEQ ID NO: 30521 - DNA, 201 bp, Homo sapiens
agcaccagcacctttttcaccaatgcgcccttccccacattcacacacgcatgttcacatgcatgcacatgtatgcaggccggcttcccctcaccttttgktttttttttttttgtaaaaaacacacatccctatgtccacaaacaccctcaccctcacttcctccctcatccacagacacctgttccccagtgatgcaca

SEQ ID NO: 30522 - DNA, 201 bp, Homo sapiens
aagcaccagcacctttttcaccaatgcgcccttccccacattcacacacgcatgttcacatgcatgcacatgtatgcaggccggcttcccctcaccttttkttttttttttttttgtaaaaaacacacatccctatgtccacaaacaccctcaccctcacttcctccctcatccacagacacctgttccccagtgatgcac

SEQ ID NO: 30523 - DNA, 201 bp, Homo sapiens
ccaggcttgtcttgaactcctgggttcaagtgatcttcccatcttggtctcccaaagtgctcccacagtggtgtgagccactgtgcctggcttagtcaaamtttaatatgctcaggaatcaccgagagctgttaaaatgcaggctgtgattcagaagatccagtgtgggacctgagattatgctggtctggcgagacacag

SEQ ID NO: 30524 - DNA, 201 bp, Homo sapiens
ggaggaactcttcctggagtgccaagggtagggtctgcctagtcccagtctctccagcctgagtttgcatcagggagaaaaagcaccagcacctttttcaycaatgcgcccttccccacattcacacacgcatgttcacatgcatgcacatgtatgcaggccggcttcccctcaccttttgttttttttttttttgtaaaa

SEQ ID NO: 30525 - DNA, 201 bp, Homo sapiens
agataggttcgatttcttggctattgtgaataatgctgctgtgaacattggaatgcagacatctctttgacgtactgatttcatttcctttggatatatamccagtagtgagattgctggatcatatggtagttctatttttgatttttctgaggaacctccatactgttttccataatgactttatcaatttacagtccc

SEQ ID NO: 30526 - DNA, 201 bp, Homo sapiens
ctttgagaactataataccatttttaaaggtgaagacacaggctcagagagattgggtaatttgcccatggttcctctgatggtaactggcagaaaggggwactgaccggaaatccaagcccaagctatttctctctgtccacaccatatgtcagctgtgtcgattcttatgccatcctctttgaaaagaactcagagtgc

SEQ ID NO: 30527 - DNA, 201 bp, Homo sapiens
aacacattgcgagctatatgtgtatcccagttatatttacttttaacctttaggaaattctcttatcggttaatcaccgattaatcagatatttaatgaawtgggatatgtgcaccattgtgccaagcttggtgccacttctagaggaaactgctactagatttgatcaaatatatgtgcatgaaaagattaatagcaata

SEQ ID NO: 30528 - DNA, 201 bp, Homo sapiens
ccaggaaaccgagtggttggcttaccccctaattcatctctggctgagagttttctaaaagatattttaaattaggccgggtgtggtggctcacgcctgtratcccagcactttgggaggccgaggcaagtggatcacctgaggtcaggagttcgaaaccagcctggccaacatggtgaaaccccgtctctacgaaaaata

SEQ ID NO: 30529 - DNA, 201 bp, Homo sapiens
cagctagctcatggggtccctgaagcgcatctatggattatttaggcctagggcagtccttggatcccaggttaagctaattagggtcttgggaagattcrttaaatttttttagagaaaaagcttgagtgattagaaggtcatttccagaaatttccttttggctcttcaggaataaagagactgggtgaggagagagga

SEQ ID NO: 30530 - DNA, 201 bp, Homo sapiens
gaacagtgcctggtatgtgtagtgggctagaagggcacccttcatgaattttagttattattattatttaagctctctaagtttcaaggtctccacttgtrgaatggagctgataatggggattttatgaggataatgagaagatacacttaagttcttagaaaacaatgccactgggcagagcatgactgctcagccagt

SEQ ID NO: 30531 - DNA, 201 bp, Homo sapiens
aggagcctttgctgaggagagtgaggctccttgggggctggatcctcctcctggtctacaggatggcaatgggctccctccggtaaaagttaacttggcaygaagatttctgcattcttttatgaacatgagggtttgggatttcctgtgtgtttggttatccatatcccagtctgccctgatgagaaacaaatgtaattt

SEQ ID NO: 30532 - DNA, 201 bp, Homo sapiens
aagcaagagggagtcagctctgtcagatttctcttgttgtcataattttgcaaaggtgatttcacttgaatgtagaaaaattggagaaaaatgaagcaatygctaaactttgtaacttttacctcctaagacatgctgatatgaatatgagaaagcaattaggagaaaagatgaaggtagagtcatgttttcatttaactt

SEQ ID NO: 30533 - DNA, 201 bp, Homo sapiens
ccagtcttcagttctacagtagtgatgttatttacaagagtaattgaggaagttacaaatctgtgacctccagaacaatggctggttatcatttaactgcrcttatgtgttagcagaattcaggcacctcttataaccctaaccttatggcctttcgttagttttacaaggacaatttagttttgggaagggctattactg

SEQ ID NO: 30534 - DNA, 201 bp, Homo sapiens
ccccagggcttcctaaggtattgaggttcagacacttctggatcttaggccaaactgtgccacaggatgtcatagttattgtcatgaaacaaagcattttktaaaaagctaacatggggccgggcgaggtggctcactcctgtaaatcctagcactttgggaggctgaggcaggtggatcacttgaggtcagaagtttgag

SEQ ID NO: 30535 - DNA, 201 bp, Homo sapiens
ttgggggtaaaaccacaagcgtatggaaaacagtccactcgtgttgagtcctctgggtggggaccacaggactggctgagtcatgagtcttgggtccaggkggggtcagtcactcgccagaaatgccagaagtctgaaaaacatctcccagggccagtcttcagttctacagtagtgatgttatttacaagagtaattgag

SEQ ID NO: 30536 - DNA, 201 bp, Homo sapiens
tgtatcttgagcaccaggtgatggggtgcagtcaggcccttggccccaggtgacataggaagggtgagcccctctgcggccatgtcaacaaaaagtcatcrtggggaacaccactaaagggaatggggagaaggcatagaaaggggtgagggtgtaaggctgggcacagccccgtgagaggttgcctggtagggtgggtgt

SEQ ID NO: 30537 - DNA, 201 bp, Homo sapiens
agcctcatgatccatggacgcatctcattcagtcctgggctccttgctggcccctggtgctgcagaaatccatggctgagggggtggagatgggtgggggsgaccgaaggaagctgtgcaagcctgactctgcaggaagtcctgcgaacgctggcattaaaaacaccattgcctgttgctttatttttagtggtacaagga

SEQ ID NO: 30538 - DNA, 201 bp, Homo sapiens
cttgaacctgtgttttgtgctattggacactgtttaatcctgacaatgcctgaggggctggcagtactgtccccatcttattgaggtcccatagcggtggsagagctggattttcccccgaatctacaccttcagttaccatggttgaccctgtatcagggcctccccatcctcctaaataccctcctgttcagagtctca

SEQ ID NO: 30539 - DNA, 201 bp, Homo sapiens
cgtccagggctgcaggtcccacttttctcttccccagcttccctgagccacaggcagccagagggagagaagcaggaatcgggaccagcttcctgcctgcygtggccaagtccccaagaggatgactcaccagtgcaccctccccacctgcctcccacgtgcctggcctccctctgccccgccccctttgtcactgcagac

SEQ ID NO: 30540 - DNA, 201 bp, Homo sapiens
caaagttctgtcccagagaaagtgcagccttggcttttgtagggttttggacttttgagcgattctcctgtgactcttccatactctgctgctttcatagmggtccttccagaagggtgggttgggggacccatgtaatcgtctttagggagattttgtctggctctctttggcggtgaattcctgccaatctgtggcatt

SEQ ID NO: 30541 - DNA, 201 bp, Homo sapiens
ttctaggcattaatttccaaagcctatttttgctattccacttaaagaatatttccatctttccttgcctatcactgctgcctgatcttgtttgtgcagtrggtgaatagaagagaaataagaggagagaaaaacatgaagattttaggggagagaatattccgtggaggcacagcaactgcctttgcatttctgatggtc

SEQ ID NO: 30542 - DNA, 201 bp, Homo sapiens
accttggccgtgatattaatactctttacagtcttccctcaattatccaggctaatggaaagagaaccagtgcccgcaaataatcataaaacaaaaaaaaatcaattatcttctcagtggagtgttgactgacacgtgggtcctacgccttttatgaggctggccttcaaacacagctgcatctttggtgatatttcagaa

SEQ ID NO: 30543 - DNA, 201 bp, Homo sapiens
agttaatttgcctgtctaatgctttaacactttctgctagttctgtctcattctttacccattggagagtaccagtgggttttcagataacttccttaaasaccagaaagaaagatttaaaaaaaattccagctccttccttttggctcgggtcttccaggtctttatcttgatgaaaactggaggcaaagatgttatctc

SEQ ID NO: 30544 - DNA, 201 bp, Homo sapiens
atgtgaatgagggagatgaaccactgaggacagagtcttgaatgagcagaacattgtagtggaggagccgtcagctcaacagcacagattcctggaggtgsacaatgacgtaggttccagggataaaagatttggatttgttcaggacaggccgtgagtgcctgccttggtgtgttataaagatcctatgtggttggtttc

SEQ ID NO: 30545 - DNA, 201 bp, Homo sapiens
agccagatgagtccagctctcaggacatgacaaattgcagaatgccgagctgggaggcttgagtacatcatatccttcttattctactgatgagaaaactkgggcctggggatgcccaggaatttgcttacatttcttctcctaatgaattaattctttcatttgttcaacagtgatgccctgagtgtctcccgtgtgtca

SEQ ID NO: 30546 - DNA, 201 bp, Homo sapiens
ctcacactgcacaccctcacactgcatactccagacctcacactgcacaccctcacactgcacaccctcacactgcataccccagccctcacactgcataygccagacctcacactgcacaccctcacactgcataccccagacctcacactgcataccctcacgctgcatactgcacacctcacactgcataccctcaca

SEQ ID NO: 30547 - DNA, 201 bp, Homo sapiens
tacccacggtttagtagtaactcatacatgtgatgagagacagaaatgtttaaaagccctaccaatgagataaatcatgtaaagaaaactggcctatgttrtaaataggctaggagcaagatgaagcaagtgaccctgaaagcgagggcctcagctgggtgcagcagctcatgcctgtaatcccagcaatttgggaagctg

SEQ ID NO: 30548 - DNA, 201 bp, Homo sapiens
aggagttagccactctggcctactgcctgtttttgtaaataaagttttcttggaacatagccatgttcattcgttcacatattgtttatggcaatgacatraagaagataggacccaaaaaagccttaaaaaattattatctttctttttagagaaagtttgctgatccctggtctagatttgcagctatgttatatattc

SEQ ID NO: 30549 - DNA, 201 bp, Homo sapiens
gaatgtgtgtttttaataagtttccatttgaggtaaagcccagggaccacactagtctgtgctgtactgactcatcatcccgtctcagtttccaacctccraaaccagagggttgagctttctaccagttctctccagttgaccagttaacgcagaaattccagccttctaatcacccataattatgtttagttttggaca

SEQ ID NO: 30550 - DNA, 201 bp, Homo sapiens
tcttctccagccctgtttgcatttttgtgaatttctcccattttcactctagccagcctacttaccaaccactcctacccaatctcagatatgttccatckccatggttttggtagtttcttgtctagcagctgctttcttgtcttctctgcttacctgcactcaaccagttattatcctgttacttgcctcttccaaaac

SEQ ID NO: 30551 - DNA, 201 bp, Homo sapiens
tttggggtgttccatccccagagtttcagattcagtacacctgggatggggcctgaggatctgcatggctaacacattcccaagtgatgctgctgctgctratctgggggccacactttgagatctgctggtccagcccacggtgaggctgaacttgaattctagttgtagctgctatgcaagtttccaggattctggtat

SEQ ID NO: 30552 - DNA, 201 bp, Homo sapiens
ccttccttcccttccctcccttcctttccctcccttcccttccctctctccctcccttctttccctctctcccttccttccttcctccccactgccccctyccacctcccccactcctccctcctccctccctctcttcctccctccctcccttccttcctcgcctcattccattcctccgtccttccctccctccttccc

SEQ ID NO: 30553 - DNA, 201 bp, Homo sapiens
catgctgatggtggatgcatcagtagcccacctgaggctgcctggcccgtgtacctagagctcgcttgtgtgcccttttctgatgagattgtctcctaagsccacctgcaaccagggctgattctgccccttctctgtatgtttccaacatctctctgatctgcttatatgaagcttggcttcactggctggcctcatgag

SEQ ID NO: 30554 - DNA, 201 bp, Homo sapiens
gggggacaagtggagactgaatgggtgaggctagagcttggaggctataggacaagttagggcagtaagctactgctttagtgatggcatgggagcagatycctgatgtggtcctggtggggcacggtctgcactgacaccaagcagaagatgcaggtagcccatgtgggtgatatcatggaaatggaactcattgggccc

SEQ ID NO: 30555 - DNA, 201 bp, Homo sapiens
tggcaatcacactgttgaacgcctcttgtgatccaggcactgtgctaaccttatatgttatgatcagtttgaaggggaaggacaatgtcgtatttcttccrtatctccttattgctgttgtgttgtaggggttcattacaagaaaacaggccaatcttatcagtgaattcatctctgttttacagttgagaaaatcaagat

SEQ ID NO: 30556 - DNA, 201 bp, Homo sapiens
caccgtgcaggcactgtgagcctgtgtccacatgatctcatcttgtcctcagggccatgccaagaggaggcactattcttcttcttctcagtttatggatratgataatggaggcatagagaggttaagcaacttgtttgatgtcacccaacaatgctgaaatggggcaggatttggccctggccctccagagcctatggg

SEQ ID NO: 30557 - DNA, 201 bp, Homo sapiens
ccaggctagtacctgccagctccctgtctcccagtctggtgctccttttgtgtcattacttcccagtcgaagataatgccttttcttttctaagccactgmcagctgtcactttggctgtgacattttgacattaccatcttttagccaatttggtcctgaggatgcttggcctgcttgttaaacatttgcatgtagaagc

SEQ ID NO: 30558 - DNA, 201 bp, Homo sapiens
ccaggtgggaaaattgaggctcggagagttgtaagtggcttgcctgatgacaaagggtgggtgagtggtagaggcaaatttgaactcagtgaagaaagagktcaggctttgctgtcagatggactgaagttcttctcttggtgtccatgggggtgccagagatgtgggggttcttctttctccttccaaatcagacgcaac

SEQ ID NO: 30559 - DNA, 201 bp, Homo sapiens
tcaggagcttggcctcctcatctgggcctctatctcacctgtctaattgtcacaggtgtgaatctcgaagctgggacatcatgagtaaggtccagctgggsaagaatttgccaatacaacctcagaatatctgtaggatctcccagacgagcacatccgttattcactaagtgtttactgctcatctgtacctggcactgt

SEQ ID NO: 30560 - DNA, 201 bp, Homo sapiens
ccacatgttctcatgaataagtgggagctaaatagtgtgtacacatggacagagagtggaatagtagtcaatggagactcagaatggtggaagggtgggakgtggcgatgagtgatgagaaattacttaatggttgcaatgcacgctatttggatgacggttacactaaaagcccagacttcaccactgtgcaaaatatcc

SEQ ID NO: 30561 - DNA, 201 bp, Homo sapiens
ctcttccatactctgctgctttcatagcggtccttccagaagggtgggttgggggacccatgtaatcgtctttagggagattttgtctggctctctttggyggtgaattcctgccaatctgtggcattaggcagggatggaggctttgcaatgcaatttgaaataatgatttggagttgctgtttcatttccagtactttg

SEQ ID NO: 30562 - DNA, 201 bp, Homo sapiens
tactaatgtcaacaaaatccctgttgaaaacgaagcgatttattccttcccttggctcctctgcatacccgggctgaataacctgttagccagtaaggggraaatgaggcacaggaaagaggaaaggggtcagcctggatgtatgcttgccatgtgggtgagtgaccttgggcataatggacctttggttagatctcattt

SEQ ID NO: 30563 - DNA, 201 bp, Homo sapiens
caaagtccatgttacttgatatgatactatgctgtctctcaagctacaagttaacacatttttaataacttaccagcctccaaactacttttttcccccakgttcaccagtcccctcttctgagcttcttgacccattctatacaagtagccaaataaataaaaacaatccatgtttttaccattagtccatgttgaaata

SEQ ID NO: 30564 - DNA, 201 bp, Homo sapiens
tgtcactttgaggacatgagaaaggggctctctgatgtagcagagaaagagctggaaagcagaggcatggaaactttcagctttctggcaggccaaggggmaggttggaggttctgatacagtgtctgcaactcccagggtccagagataaaagtctagacggtccagtggatcaccttggaatgcaaggctatgtggatg

SEQ ID NO: 30565 - DNA, 201 bp, Homo sapiens
ccatggctgtgcctgagaaaacaacacgttttctctgtcaggctcgtgactaatataaatatcagatcccattacagcttggtaattacccagggtctggyctgacgcattcaatcagggctggagcttcagtgccgtggagctcttgattccagattggcccttgtgcctcatctcatcctgtcctggggattggctgca

SEQ ID NO: 30566 - DNA, 201 bp, Homo sapiens
ataagtgggaagtatcggagacatttcagaaggacaaatagtaaaaagtaaataaaagtcagcctctgcagagcgagactctgtctaaaaaaaaaaaaaaagaaaaaagaaaaaagtcaccctctgatgttgaaatatagaatttcaaaaggtaaaatcactttacaatttatggaatgtgacccgatgtatattttctgt

SEQ ID NO: 30567 - DNA, 201 bp, Homo sapiens
gagtctcgctctgttgcccaggctggaatgtagtggcgtgatctcggctcactgcaagctccacctcctgggttcaccccattctcctgcctcagcctccygagtagagtagctgggactacaggcacccaccaccatgcctggctaatttttttgtatttttaatagagatggggtttcaccgtgttagccaggatggac

SEQ ID NO: 30568 - DNA, 201 bp, Homo sapiens
tactggctattagtggatcaacactgcaacatgctgagattcctcttcatttctcatggttcagatcaaatgctaatttttttttttttttttttttttttgagacagagtctcgctctgttgcccaggctggaatgtagtggcgtgatctcggctcactgcaagctccacctcctgggttcaccccattctcctgcctca

SEQ ID NO: 30569 - DNA, 201 bp, Homo sapiens
atgtaccagtcactggctcccctgagtttcttcagaaattgtttaaggagtgctggatccatgagggcagaggcttgtcccagtcactacactgtctctamctgctggaacaggtgcttagtatgtacgcctgctctgtgctgggcccatgactgcacaaggacagctgacttcagaggattgctcaggatcactgagaaa

SEQ ID NO: 30570 - DNA, 201 bp, Homo sapiens
ctactggctattagtggatcaacactgcaacatgctgagattcctcttcatttctcatggttcagatcaaatgctaatttttttttttttttttttttttttgagacagagtctcgctctgttgcccaggctggaatgtagtggcgtgatctcggctcactgcaagctccacctcctgggttcaccccattctcctgcctc

SEQ ID NO: 30571 - DNA, 201 bp, Homo sapiens
tttttttttagacagggtctggccctgttgctgggctggagtgcagtagtgtgatctcggctcactggcagcctcaacctcctgggttcaagtgattctcrtgcctcagcctcctgagtacctgggactgcaggcgtgcaccatctgcctggctaatttttatattttttgtagagatggggttttaccatgttgcctagg

SEQ ID NO: 30572 - DNA, 201 bp, Homo sapiens
gtacacatggacagagagtggaatagtagtcaatggagactcagaatggtggaagggtgggaggtggcgatgagtgatgagaaattacttaatggttgcartgcacgctatttggatgacggttacactaaaagcccagacttcaccactgtgcaaaatatccatgtgacaaaactgcactcatactccttacatttatac

SEQ ID NO: 30573 - DNA, 201 bp, Homo sapiens
ttcttcttttttttttagacagggtctggccctgttgctgggctggagtgcagtagtgtgatctcggctcactggcagcctcaacctcctgggttcaagtrattctcgtgcctcagcctcctgagtacctgggactgcaggcgtgcaccatctgcctggctaatttttatattttttgtagagatggggttttaccatgtt

SEQ ID NO: 30574 - DNA, 201 bp, Homo sapiens
gtaaaaaaaaaaaaaaaaaaaaaaaaaaaacaaaaccataatatctgcaaagtgcaatacagcaaagttgaataacatgaggtatgcctatgttcttcttcttttttttttagacagggtctggccctgttgctgggctggagtgcagtagtgtgatctcggctcactggcagcctcaacctcctgggttcaagtgattct

SEQ ID NO: 30575 - DNA, 201 bp, Homo sapiens
tgcgacaatttcttaaaataagacaacaatgaagattgctgcatcgactgactcttcctttgacaaaagatttctctgtagcatgtgatgctgttggatakcattttacccagagtagaacttctttcaaaattggagtcaatcctttcatactctgctgctgcttcatcaactaagtttatgtactattctaaatccttt

SEQ ID NO: 30576 - DNA, 201 bp, Homo sapiens
tgcttcatctgtaaaatgggaataatgataacacctgtttcatagacttgttagttaatacatgtaaagtgcttagaatgtgtctagcacatagcaggagytgaacaaggatcacctctcattaggggctgcagggggactggtggctgctgctgaagccttcagaacctcccttcacatgctcaccacagctcctccagc

SEQ ID NO: 30577 - DNA, 201 bp, Homo sapiens
ttcccagagggaattaccattattagtgtaatggctatttttcctgtgctttccttccaaatttacatacatttatatatatgtaattttattttgtgggkttttttttttacataaatgaaactatacttttttttaactgctgtagaactttttttttcacttccccctctatcttaggcttctaaaccaatgcctgca

SEQ ID NO: 30578 - DNA, 201 bp, Homo sapiens
actggtggctgctgctgaagccttcagaacctcccttcacatgctcaccacagctcctccagcaggcagaaggcttactcggtggtgcagagaaattaccycaaaggaagcttttcatcagaggtggctgatgagtgcctgatggatgccttttcctccctagatggtcccaagatgactcttcctagatgaagggcctcc

SEQ ID NO: 30579 - DNA, 201 bp, Homo sapiens
ttatgtcattaaggaaacaattactaagagtaacacaccctttactcctgtagtcataaatctgtagtctacttttaaaatctactgataagcttccaaarttatgggttcctttaagaaagtttctctttagttctaattttattattgttgtttgtttgattgttttcttttctgcctacatatgtctgattttctctt

SEQ ID NO: 30580 - DNA, 201 bp, Homo sapiens
tgtaggggccatggaatgaggattttaatttgaatcagaggatggggtgaagagcagtcatttacaatattacacaagtcatcttacaatgaataataatyctatcttgaaattccacccttcctgccatgtgattataaatttgtttataattgggtaagtcccaccagtcctgtgagattgcaccatgctttatgtttg

SEQ ID NO: 30581 - DNA, 201 bp, Homo sapiens
gagtgtggctgggcatagagttatttccattctcagtttgagctgttggccttgtagaagcttgggcttgatcaaggatggtctgcgtgtaatgaattatygagatgttgtctccatggctgtgcctgagaaaacaacacgttttctctgtcaggctcgtgactaatataaatatcagatcccattacagcttggtaatta

SEQ ID NO: 30582 - DNA, 201 bp, Homo sapiens
aaatatttgggccttgggagtcttttgatgtagcaccttgtgacaactgcttgcaaagtgagctcagactagcttaaattagctcaggcccacatgttcgkgaagggaggctggagtagattcccgccatggttgtttgcagctctcccttctaagagttcaggactctggtagtcagagcgcccaggcttggccagatca

SEQ ID NO: 30583 - DNA, 201 bp, Homo sapiens
ttgcttgagcccaggagttcattgcatcatagtgcaatgagctatgattgcactactgcagtccagcatgggcaacagagtgagaccctgtctctaaaaawataacaaaaataaaaagataaaatttaaaatatatataaagaaactgtctgcttgtggaaggcttgcttcaaattctaatccagactccctgaggtagga

SEQ ID NO: 30584 - DNA, 201 bp, Homo sapiens
acatggatgaccagacaggtgaaaagaagaatggaaggaaacatgagtggaaggacaaacatagtgtctcctcgttaaaaaaaatactgtttcagctttcytaacctcacctgtaatagagctaggaacaatagccccatctcattatgtgagaattaaaatacttagccccaggtatgaagcactgtcccattattgttg

SEQ ID NO: 30585 - DNA, 201 bp, Homo sapiens
cccaagctgctcctctcttcctcttccatctctctgctgcatgcagggagcctggtgccttgcttccattttctcattggaaaaatgagggccataatacytgccttctccaccagactaattatgtccagttatgacttggggaaccaggcaagcgcatggaagaagatcacacaatcctggatccggaagaccttggca

SEQ ID NO: 30586 - DNA, 201 bp, Homo sapiens
tccaaggagccacagaaaaagacatagaaaaccttcgattgcatttagagattagaagaggatttttctcctaaatatggagctgtttccttgactcagcrggtatgtgagatggatatgaaagcaaaagatgttcccttgccatgaagcaagtatttttgagtcatagatcttattgatcagactcattcaattggacat

SEQ ID NO: 30587 - DNA, 201 bp, Homo sapiens
cactttgctctcttggaatgctatctcatgtctaaagcagccaagatcattaagtaaatataggatctgtgcttttattttcactgctattagcaaagttygcaggaggaaagagacattgaatggggagtttcatcaaagccaggggtgttccacaggaaaatacttgttaggcctagtttcctgtggtgaaagtcttat

SEQ ID NO: 30588 - DNA, 201 bp, Homo sapiens
ggccagctctgacccaatttccacccagtgcagcagtgatgggggagggaattgccttctggctctctgctctggcccaggggctggtcatttctcaggtytgggccttctgtgtgagtcaggtttgatggaagtgtccttgaaggtgattcatggggaagagaggaggggaaccgggagtagtggcctcaagccctgcct

SEQ ID NO: 30589 - DNA, 201 bp, Homo sapiens
gcaggatggttacagttttgatggtggggtatcagtggacgaacatcgacagtatgggggaccaggagctgctgggctggcagaagggaaacactgtggcmtttggtgggcaggtatggttgtccagcattgtacccttgaggagggacaaattccatccctgttatcccaagtccagaactcatagacctgtctcccaag

SEQ ID NO: 30590 - DNA, 201 bp, Homo sapiens
taggaccctgaggacttagaaaagccttctctgttgccaactgtgctatttttacctccctcccacagctcctgctttccccaggtatttgtcagcagagygtcttgcacctgcatggaaagtggcagttggggcccaggatggccttgtgctgtgcaggccacagcagtctccttaccaggcctggcggccaggcccggc

SEQ ID NO: 30591 - DNA, 201 bp, Homo sapiens
aggaaaatagatacagggtgtgttggagattagggaaggagaggggcggagggaggtcccaggccaaatttctaactcatccctagagtctcacctccgaygttctcccagggatggagcctcacctctgaccttctcccagggatggagcctcacctctgaccttctcccagggatggagcctcacctccgaccttctcc

SEQ ID NO: 30592 - DNA, 201 bp, Homo sapiens
cagcatctggaaccacaaggggtggtggaagcagtgactctgtgcatgtgtgtgggtgaatgaatgaatgaatgaatgggcgacaatcccagtctgaatawcaactgatgttgagcatctatcagaacaggaaccaggactgggttaaggtagggagccaggattggcaacatggtgaaactgtgtcactaaaaaaataga

SEQ ID NO: 30593 - DNA, 201 bp, Homo sapiens
gagctgctgggctggcagaagggaaacactgtggcatttggtgggcaggtatggttgtccagcattgtacccttgaggagggacaaattccatccctgttrtcccaagtccagaactcatagacctgtctcccaagtgatgtcacggtctcttggccaggacactcactgtctacccagaccagcttttccaagacacccc

SEQ ID NO: 30594 - DNA, 201 bp, Homo sapiens
agacggtccagtggatcaccttggaatgcaaggctatgtggatgtgcatcagtcctttcaccaggaaccttccagaatggttaagaaaggaacccacaatkcccctgagagtcagggctgtcatgcacatgaatggttacctcttctgtaccatggcctcagaacatggtagagctgatatcaagggaaccaccgtttctc

SEQ ID NO: 30595 - DNA, 201 bp, Homo sapiens
tctgcctgccatgctcttctcctggcctttcaaaggtagatccattgcgttcttcagatctcagcagagatatccccttaccagctgatatagctctccayccccaaatcctgccacctcgatgctaatttccttcataatcctaacatgatcaggaactgttcttattcatgtatttgaatgcttacttgcttattgtat

SEQ ID NO: 30596 - DNA, 201 bp, Homo sapiens
tttccattcatcttattagagcagtgcaaaccctgatgcatgaatgaactgggtttgtggctgaatgagtttggatttgctgagcaggctgattcaggaarttgtccttgattcccctgctgtttcccatgtatacacacccttcctaagtgaatgtggcatttgtattggatgaaggccatagctcagtatgaaacgtga

SEQ ID NO: 30597 - DNA, 201 bp, Homo sapiens
ctcatgcctgtaatacctagtgatttgggaggctgaggcaggagaattgcttgagcccaggagttcattgcatcatagtgcaatgagctatgattgcactrctgcagtccagcatgggcaacagagtgagaccctgtctctaaaaatataacaaaaataaaaagataaaatttaaaatatatataaagaaactgtctgctt

SEQ ID NO: 30598 - DNA, 201 bp, Homo sapiens
tattgataaaagcaacaacttggatgaatctcaacaacattttgctcaattaaaaaagccagcgttaataggttacatattatatcaatttcatttatgtkacttccttggataggtaaaactgtagtgacagaggacagattagtggttattagtgggtaggggtgataggtgtgatcataaaggataatgcaagatagt

SEQ ID NO: 30599 - DNA, 201 bp, Homo sapiens
acattcgtagaactttacaccaaaaataaaaaattaaatttactgtatagtaatttagaaaatgaaacttttgaaaagtgcagattcttattcaagaggtytagcaatggggcctgggactctgcatttcttataagctcctgagtgatgctggggctcttgggaacacaagtggagggggttaggctctacagaggaaac

SEQ ID NO: 30600 - DNA, 201 bp, Homo sapiens
tttggttgatgagatttctccaatgggtaggtggtatggagtaaacacctgggttctcacactgaatcctcacatggaatccaaaaagtctgtgcacttcrgctgcctgcttttaatctttttctcagattagctcccatccagcaaatatttagcgagagcctactgtgtgcaagttgtcatggaagttctttaaggaat

SEQ ID NO: 30601 - DNA, 201 bp, Homo sapiens
atcctcttaggaactatggggaaaataatgaaggacattcattgatttccaagaacagaagatgccagggaaggaaaacagcttcctccacaatctgtgckgcccactccatgcaggagatagggttcatccacatttgtaaagaacatgtgtgtgtagagtggacttgtaatgtaagcatcacttccatcaccaccacca

SEQ ID NO: 30602 - DNA, 201 bp, Homo sapiens
ccagtgtgtgtaatttccattatatccaagagaaatcttaattagagggatttctcagctgtgcaatttaatccaaccattgatggagaccagggagaagmaaaccttggggtgggattgtcccattctctaagaaacattctgtgagtggcatgttgtccctcccttgcctccaaaatcagcccccaccagggaacacgt

SEQ ID NO: 30603 - DNA, 201 bp, Homo sapiens
ctgctcactgcagcttcaacctcccaggctcaagtgatcctcttgcctcagctccccaagtagccaagacttatgggtgtgtgccaccacacctggctagkttttaaattttttacagagatggggtctccctatgttgcccaggcttgtcttgaactcctgggttcaagtgatcttcccatcttggtctcccaaagtgct

SEQ ID NO: 30604 - DNA, 201 bp, Homo sapiens
gaagagatgacatttgagctgtgtcttgtcgggagttttgattcagatgggggataaagaaggaagaggacattctaagtggtagggaatctggaggctgygccacctggtaccatagggagctctctcaacacctaggtctccgagattttccagttacagcaaattgctttcctctttagatgagacaaagagatgcat

SEQ ID NO: 30605 - DNA, 201 bp, Homo sapiens
ccaagggaacagagaattgggccacatttgtctgggctgggtcagaaatggcagttcctgagcccatatcaccagctcccatttgcaaggctgaggaggtkcctgggcttgctgtgtgctgccttgctttcgttcccgctttttaaggcacatatcagcctgggcagctcttgacccacaaggtggactcttctgggccag

SEQ ID NO: 30606 - DNA, 201 bp, Homo sapiens
ttattttgtttattttgcagaggaaatagtgcttccttggactgaaagctctgaggactaagagctgaatggaaagggggcgtttggattaaatgaatggsctggccagctctgacccaatttccacccagtgcagcagtgatgggggagggaattgccttctggctctctgctctggcccaggggctggtcatttctcag

SEQ ID NO: 30607 - DNA, 201 bp, Homo sapiens
cagcccagcacagttagtgacctgcctcactgtccattcctgtggcccctctccatcggttcattcactcactcggcaggcaggcattctctgtgttatgyatcaggcatgatgctgggttttgttgggtgctcagggttcattggcgaacaaactaccctcggaacctgtcctcctggagtttacagtctcaaggaggtt

SEQ ID NO: 30608 - DNA, 201 bp, Homo sapiens
agagggagctcaggggatgcagagaaaaacaggaaggcagtctggtcccttcagatcttggagctgggtcatagcttgggcatgttgtctcttgggcagtraatgggcacctcgttagagcactgggacagggctgattggcactctggccacccaggagcgtggagcctgcctgcaggaaagaacagtcagttcatggat

SEQ ID NO: 30609 - DNA, 201 bp, Homo sapiens
accctgtcctgccaggccgcagaaaggccctgggccactcccaactggagccagtgctcctggagagagcagtgacctggaccagcagacctatggatccyctcttgctcctgcactcgcctgctccttgcagtgactcggcagtgggagtgggaggtgtcagagcaattaggcggaaactcctttcgtgcacctctaatt

SEQ ID NO: 30610 - DNA, 201 bp, Homo sapiens
atcaaagagcatgggcttaatttattttgtttattttgcagaggaaatagtgcttccttggactgaaagctctgaggactaagagctgaatggaaaggggrcgtttggattaaatgaatgggctggccagctctgacccaatttccacccagtgcagcagtgatgggggagggaattgccttctggctctctgctctggcc

SEQ ID NO: 30611 - DNA, 201 bp, Homo sapiens
ctgctcggtgcacccctctatggaggtgtggcccattactgtggatcggttgagtcatgtgctattatgatagttgtcttctgttgaactcaggaggagayggaaggccagactgtgttgaccaaaagaacttcagaggggaaggactagtttaggaaagacaaaaatcaaaataaaaggtgtcagaaaagtaaggcaaat

SEQ ID NO: 30612 - DNA, 201 bp, Homo sapiens
cgcgcctctaatcctggaactttgggaggccgaggcaggcagactgcttgagcctaggagtttgaaaccaccctgggtaacatgatgaaaccccatctctrcaaaaattacaaaaaaaaaaaaaaaatagccaggcatggtgatgcgtatctgtagtcccagctacttaggaggttgaggtgggaggattgcttgagccca

SEQ ID NO: 30613 - DNA, 201 bp, Homo sapiens
aactctttcttcttctctgaaggaatcagagactgaaacaaggatggcttcatcagtttggccatagcctggaaagactgggaaacccagcagctctctgscccctgggctcacagacgacatagttcttggaagctgtcatccctgcctgtgatgactgacctgcctcttgccaggcttccatccttgcttcaaggcctg

SEQ ID NO: 30614 - DNA, 201 bp, Homo sapiens
tccttgtcagcacagtgcctggcaggtggctggaagctacagctgaatttttgcagtgtctttgagatgccaggaggatggcagatcatttctgttcaatycatcagccacacaaaagccctgagatcaaagagcatgggcttaatttattttgtttattttgcagaggaaatagtgcttccttggactgaaagctctgag

SEQ ID NO: 30615 - DNA, 201 bp, Homo sapiens
ttggcatgattctcctgccatcttgctcctggatgttgaaaggccacacggtgtctaatttaccaacacagacctgatctagaaggcaaagacaagttctrtgcccacacttttccaactgtagagttaagaagttatttctatcctccaggcttaatttttggctatcaatattgagctaaagactattgaagatttaca

SEQ ID NO: 30616 - DNA, 201 bp, Homo sapiens
gaattgctatcttttcccccagccatcagccggaagatccattaacaaattaaaattccctctagagtcagaatggctttggtttctgggttctaaatgaccttgattttaattaccatgccatacaggtttggaagaagacaccatcactgaatccctggctccttgctgaggcagcagagagctggggtattcagtttg

SEQ ID NO: 30617 - DNA, 201 bp, Homo sapiens
ggtcctgtgcaagctgacatgagaaggatgagaaggagccagctttccaaggtctccagagaaagtatgccacatggggacaaaagccagtgcaaagtccytggggtgggaatgagcagaggaagaagaatccatgcctatgtggccaaagacgaatcctgcctcacagtctttgactcttttgacttcccctgtcgtgcc

SEQ ID NO: 30618 - DNA, 201 bp, Homo sapiens
tccctgatctcaagcacacagacctgcttccacagtgcacttctgcagcctggggaaaccacaccatggatgtggatcctggtctagatgcgccacatagkgctcgatgcaggcagagctggcactggaaagagggcccagtctcctccatgcagcctccctccttcagcaaacatttgccttgcacctgccatatgccag

SEQ ID NO: 30619 - DNA, 201 bp, Homo sapiens
actcttggtctagggtcctactggatgttgtccttcaactgtcctggaagatccagcctgttaggagagtcccctgtctgttccctgcctctccagaatcractgtgtcccatcttcttggtcagctttccctgatctcaagcacacagacctgcttccacagtgcacttctgcagcctggggaaaccacaccatggatgt

SEQ ID NO: 30620 - DNA, 201 bp, Homo sapiens
cattactacttcaattttatttgccaaaattactatattatactttccttaatagagtgaagagtcccctccattgttttctatttgactccaaacttccmcttcctctttcagtagaacatctgcttacttaggaagtaggcatacaagtttcttattattatatctcttcctgttcactgcctcccgcaaaaaaaaaaa

SEQ ID NO: 30621 - DNA, 201 bp, Homo sapiens
ctttaaaccaggagggttattaatggcaaaagcattggtcttctttatgcttgatcagtatgactcaaattaaaagtgttctgctgtgtatatcaactcartagcccacacccagttatctgggagctgatggttcagtcactgtattacccaaatctttcctgccagctgcctttcagacatttgttaaatcccaaccag

SEQ ID NO: 30622 - DNA, 201 bp, Homo sapiens
gaatggaaaatagcaaattggaaaaccctggcaggctttctggtatgggcttggatgtgtttgctgttgtgttttctgtcttgtcctctcccgagacctcmcatgtatgaatctccagagtcttttctctctggggatcacaggaaccctgaagcagtgaatgagttatcatttacctgtttatccctcaatttctgtcag

SEQ ID NO: 30623 - DNA, 201 bp, Homo sapiens
tccctgcccaccctggtaccttgctccaagtccgaaagcattttcctatcaagaaacccagcttccttcacttcccccattgccaccccccaatcccagtmcccccatcggtctgttcacatctctgtgttcatcttggcaagacctactcaatcaagtgatgatgccagttgataaacttccctggaaaacatttacagc

SEQ ID NO: 30624 - DNA, 201 bp, Homo sapiens
taattaacttgaaggaaggtcctcaggatgaagctgctgagccgccattctggtttggggaatagttgtcatggactaacccgtctcttgctccaattcargaaagctgcctgtgaaacttaaatgctgtggcttctcttggaacatttgcctatagagacaggagtgccacacacttcctgaaatgagaatgtgaatcag

SEQ ID NO: 30625 - DNA, 201 bp, Homo sapiens
aattttaaattgtctagtgtgccagagcatggatcatttatttacaaagactcatttaatctatggccccatagcctaccctaccttaaaggaattaacaygagtcacgccttcatgtccatccattccacatgtgtttactgagggcttgctaccaggcactggggacagatgcatttctacacatccataaaaatctcc

SEQ ID NO: 30626 - DNA, 201 bp, Homo sapiens
atcctgccacatgctacaacatgggtgaacacaccttgaggacattatgctaagtggaataagccagtcgcaaaaagacaaaacacaatactgtgtgattycacttatatgagatacctggagtaggcaaattcacagagacaaaaagcgaatggtggtggccagaggctggaggtggagggaatagggagatgtttttgg

SEQ ID NO: 30627 - DNA, 201 bp, Homo sapiens
tgtgatgtagtccccttttaaattcccattttacaggttagaaaatggatgcatagagaatgagaatgtttttctttttttggataacaaactttgagtgattactgtgtgtctggttgtttttaaactatatgtattatataatcctcacaacaacccagtgaattcggtggtattattatcctcacttatggattagaa

SEQ ID NO: 30628 - DNA, 201 bp, Homo sapiens
cttccacttggattctcttcatgtggttaagagagtcctgagttccaatcctaagttcactcatctctacctccttgcctttgtgcaggttacttaacttktctgaccatcagtcttctctgttgtaacatagggatggtaacacccatttcttatgcatgcagtgatgcttaatgacataatgtaggtggggttcatgca

SEQ ID NO: 30629 - DNA, 201 bp, Homo sapiens
cagattgcatcctgggcaagtcacttttacttgctgtgggatgccaggcatatatgacttaaggaaagagtttcagagaggttacctgaaaagactcaggmagtgagaacacagggttgttgaaggattaggtgggattgcataggccacagaatactttatattggttacatcctaatttacagataccatatggcactt

SEQ ID NO: 30630 - DNA, 201 bp, Homo sapiens
acactatttttctctaaaacctccacctcctgggctcaagcaatctcccacctcagcctcctgagtagctgggacttgcaggcatgtgactacaggcatgyaccatcatgcctggctaattttttgtatttttggtggagatggagtttcgccatgttgcccaggctggtctctaactcttgagctcaagtggtccacctg

SEQ ID NO: 30631 - DNA, 201 bp, Homo sapiens
ttaaggtgcttggggcgaagtggtcggggagggtggtggggattgtgaagtgtgtgacttgtctgcagaatttactgttctctgctttcattataagcctyttttctcacacagaagagtaagatgaagcatgcagagaccaggttgggttaagactctgtactaatcacaagtagtgcaagaaacatttgctggacacct

SEQ ID NO: 30632 - DNA, 201 bp, Homo sapiens
tctgaggactaagagctgaatggaaagggggcgtttggattaaatgaatgggctggccagctctgacccaatttccacccagtgcagcagtgatgggggagggaattgccttctggctctctgctctggcccaggggctggtcatttctcaggtctgggccttctgtgtgagtcaggtttgatggaagtgtccttgaaggt

SEQ ID NO: 30633 - DNA, 201 bp, Homo sapiens
tagatagctcaatgtggctggtgccttccatgttggacagggtggttctgccccatctcccagaggtctccagtggcattgagccttggttgtctgcagcrgtgtcctgaccattaacaaaccctgccctctcactttcccattttatttccccactccccagctggttctcccctgggatcactacccaaataaactatt

SEQ ID NO: 30634 - DNA, 201 bp, Homo sapiens
gatgaaatgctctggcttacttagcatgactcagacccgctgcttccccattagcaagaggctgctttataattttttttttttaatggagagatatcaargcttaaaatgacattaagaagtcttcttcctgactgcagtgtgtccttcaaggatcatctccccatctacctctctgtgtactaatgactccaagaaagc

SEQ ID NO: 30635 - DNA, 201 bp, Homo sapiens
ctcccccatctggggtctcacatgaggacatgaggtatgggacatgaccaggaggcatggccagtcttactgtctggattgccctgggggtcatggcaggygaaaagatcagagaatgagaaattccttcctccttccagaggccaggtgggagggcgggggaaagggcagggtcttgttgaattttgttaaaaagcactt

SEQ ID NO: 30636 - DNA, 201 bp, Homo sapiens
gtaaggtcacatattcatgggttcttgggattaagatactggcatctttgagggtcattattttatctaccacaacttccagtcagtgatttctcggtttwtttaccagagcctcagggagcactgcattttgcccttttacaaaattacttttaaagagattatgtacttgtaaaaataaaaaaaagttaatttgtttga

SEQ ID NO: 30637 - DNA, 201 bp, Homo sapiens
tacatcttccagggaaagctcccatgtctgtctgtaaaggtaaaagctaaaaacatcacacagtgtgtaagtgcatgtgtgagggtgtgtgtgtttatccrtgtgtgcataggtatataagggtctctgtgagcacatgagcatctatagatgtgtgtatgtttacgtgtatgtatgtttacatgtctgtgtgtatgcatg

SEQ ID NO: 30638 - DNA, 201 bp, Homo sapiens
cattcatccgtccattgaggaaacgtgagcactagttgtgttcaagacaccaggcagatgctgtgggtgggcgggactctctcccgggggagagcccaggrcacagtccctttcccagggaccttacatcttccagggaaagctcccatgtctgtctgtaaaggtaaaagctaaaaacatcacacagtgtgtaagtgcatg

SEQ ID NO: 30639 - DNA, 201 bp, Homo sapiens
aattgtctagtgtgccagagcatggatcatttatttacaaagactcatttaatctatggccccatagcctaccctaccttaaaggaattaacatgagtcaygccttcatgtccatccattccacatgtgtttactgagggcttgctaccaggcactggggacagatgcatttctacacatccataaaaatctccaactata

SEQ ID NO: 30640 - DNA, 201 bp, Homo sapiens
tctgaaacagcaaaaacgccactctgagtggagtttagggcatgaggtggtgatggtgggggtgggggaaatgctgggtagggggaggctggcaggggccrtttttcagggctttgttggccatggtgaggagcttggatttccttctcagtattaggtgacatattggaggaatttaggcagccacgcgtgtgatctggt

SEQ ID NO: 30641 - DNA, 201 bp, Homo sapiens
acagacagcagaaggaaattgatattctctctgccgcgaaaggtcaaaatgccaactttgaattgaactgtaaagactaaattccgaacaattattctctkcagcagttgtaaaaatttcagcaaattgcagctgtcttaggtctttcacccaaaagacctactcatttccatcagctgagttcactcttccaacctggca

SEQ ID NO: 30642 - DNA, 201 bp, Homo sapiens
aagaggctgaacttgtaccacctgggcaagccagtttgctgtgaccacacatggattaggtgccagatgaccacctggggaatgtgccagtcaggcagccrggatgcaaagtgattcgcttcccccttgccagtattttctagggcgtggtgtttgcccgcatcttctggtgaggcctggctatctctgaggggcagacca

SEQ ID NO: 30643 - DNA, 201 bp, Homo sapiens
gactgcagtgtgtccttcaaggatcatctccccatctacctctctgtgtactaatgactccaagaaagcggaagggggcagcctggtagaaaatggaaacrtttttctgtaaaggccctcccatgcttccgaggcctgcagatgaagggtctgacttgagcctctcagaacccaggagaaagaaacaagcctcactcatcc

SEQ ID NO: 30644 - DNA, 201 bp, Homo sapiens
aagcggaagggggcagcctggtagaaaatggaaacgtttttctgtaaaggccctcccatgcttccgaggcctgcagatgaagggtctgacttgagcctctsagaacccaggagaaagaaacaagcctcactcatcctgtagcccagaggaagaaattctagcacccagagaggtcaagcaagtcctgcaaaaccacacagc

SEQ ID NO: 30645 - DNA, 201 bp, Homo sapiens
aggccaatgactagcagggcggcccaagagcctttaagtgagaggctgtcatcctggggctgtgaatgaacttcggaggggtccttgcccttctaggaagygcaggcatattttgtctctatgtaagcacatgcatttctccagaaagaaagttgatatcttcagattctcaagttggtctgtgccaccaaaagattcaac

SEQ ID NO: 30646 - DNA, 201 bp, Homo sapiens
caaccatgacattttgagtatgctccactaattaaaaattaaattgttaatccccaagtaaagaaggaaaatgtgagggcatctgaagaagagagcatgtycgtgtatcgtgatcgctgatcaactctaggtttaacagacagaactttatgaatgaggaatgaggagtcatctaacttagggtagagtgaaagggggtca

SEQ ID NO: 30647 - DNA, 201 bp, Homo sapiens
gggaagagaggggagagagtttgtagagcctcttgttgatgttcatgcttcatttcttctcagtgtgtttttggtcaacagaaagattaaaaatagcattaaaaaattctgttctctggatataaccctgcgagggggtggggggactttggatcatatttacttgcttccctgatgacgcagagtgccaaattctaaagt

SEQ ID NO: 30648 - DNA, 201 bp, Homo sapiens
tgttgttcactgctcaagtggagaattccctctatcacccaacaaggcttttcaaggacccaaccacagaagggactcggtaactcttgggtgtgtttttmctcttgctcggtgggggaatccaccttcaaagaggctgcccagctgctccctgggactcagcaggttcactggggctggtggtcctcaagtctttttgaa

SEQ ID NO: 30649 - DNA, 201 bp, Homo sapiens
aatggcaccagcaaggtgtacagcaggggtttccaaagagttcctgattccctcctcaaagtgatgggagccacacttcctggcttatcagttggtccttkccctctggctggtgctgtgtgtctgagaggcagcctaggaagacctctctggggagaagcagagaaagatagcgacctctgaacgtgctccccagaattc

SEQ ID NO: 30650 - DNA, 201 bp, Homo sapiens
ggagtgtcctggaagcctgccgggaccactgagaaaagctttccattgggaaaacatatgtaggcccctgggagggacagcctttccccctcttttgggarccagtctggcccctcgtgggatgatggtggcccccatgggctttttctttcacttgatttccctgtctatgtgtgtgtacccagccaccctggatcgtgg

SEQ ID NO: 30651 - DNA, 201 bp, Homo sapiens
tgggtgtcaccatggtatcctgtctctgagcaaacacatgagcgaaaaaacaaacaagcattaggaaggagggctctcccccacaccttggccacctatgyggagtgagggaccctgagccaggtaggaggagggaaggtgatggagattaaacagcaggtgtcagacagtcagggaaatgcgtttggattcacactggat

SEQ ID NO: 30652 - DNA, 201 bp, Homo sapiens
tccagtggatcaccttggaatgcaaggctatgtggatgtgcatcagtcctttcaccaggaaccttccagaatggttaagaaaggaacccacaattcccctkagagtcagggctgtcatgcacatgaatggttacctcttctgtaccatggcctcagaacatggtagagctgatatcaagggaaccaccgtttctccctcag

SEQ ID NO: 30653 - DNA, 201 bp, Homo sapiens
ctcttgtacaagcttggcagggtttgagtggttctttaaaagagaagttggtgatagggagggaacttcatttctgtcccagatgctgacaccttgtgggyccttggtaacttccgctgctgtccatttccctcatgtaagggcagatggcatttgcatacctggagggacgccggctggagttacagatgcctgctgatg

SEQ ID NO: 30654 - DNA, 201 bp, Homo sapiens
catatatttacagaagaatgacactggcatttagctcaatattttcagcttaacagagtctcgttgggcgcggtggttcacacctgtaatcctagcacttygggaggccaaggtgggaggatcacctgaggtcaggagttcacgaccagcctggccaatgtggtgaaaccccatctctactaaaaatacaaaaattagctg

SEQ ID NO: 30655 - DNA, 201 bp, Homo sapiens
gcctgtaatcccggctacttgggaggttgaggcaagagaatcgcttgaacctgggaggtggaggttgcagtgagtcgagatcgtgccactgcactccagcytgggcaacatagagagacaccatcttgagcaataataataataataataacaacaacagagtctcccctgaaagagggattataaaaccagggcaagcct

SEQ ID NO: 30656 - DNA, 201 bp, Homo sapiens
gaaagcagctactatctggtttttgtctcagttctatcccagcacaggatgagcactccattaagtatctgcagtatacataagtggacagaagtgtttgyaaacacccacgttctgccattcttccctcaatgccaaaggatccaactctaccacctcatcaaattcagagacagcttctgattttgagccataggggtg

SEQ ID NO: 30657 - DNA, 201 bp, Homo sapiens
aatgaggaggaaacaatagactaatttttaaaatccatggagatttgaagaatacaaataggacttccagaaataaaaaatagaataactgaaattgaagrtcttcagcaattggcacacatttgtgtaagttatttttatgagcaacattaagatagcaattctcataaagatatatcaaagaaagtatttttttttttt

SEQ ID NO: 30658 - DNA, 201 bp, Homo sapiens
aaacagacttcatctaaaaagaactcagtcagcaggcacctgcactttggaatcagggaggagaaagatggagactaggaactgacagaagggttttcctygtgtgaagggcagcaccaggccatgaggtgacccagggcaggccacagccgtggagggttagggtacagcaccctggtgggtggccccgctgggaagtgc

SEQ ID NO: 30659 - DNA, 201 bp, Homo sapiens
attaataattcaccctggaatggtagatcccatgagggcagagctcatgacagtcactggcccttacccatagcttcctaaccctccttccccaacccagycttcccctttcacttccacccctagctcctcattcactttcattcagtaaccttcaacatttcacgtcatctcatccggagaaatatcaggtgcggacat

SEQ ID NO: 30660 - DNA, 201 bp, Homo sapiens
gcctatggtgaaaacagacttcatctaaaaagaactcagtcagcaggcacctgcactttggaatcagggaggagaaagatggagactaggaactgacagargggttttcctcgtgtgaagggcagcaccaggccatgaggtgacccagggcaggccacagccgtggagggttagggtacagcaccctggtgggtggccccg

SEQ ID NO: 30661 - DNA, 201 bp, Homo sapiens
caatacaagtgtctgaacctctaacttactcaaggaataggatgcccttttactcaacaagatgtggccattgaggaggagcttttaaggccagcattgarctttgggtctttattcatgtttgtaaggctctactgaaaaggagacccaatctgtggaacagttcagtccaatggctctggaatttggagaagatgtttc

SEQ ID NO: 30662 - DNA, 201 bp, Homo sapiens
gagcagtaactgagctgcatcttcaccagccactttccaacaggtttctggtctcatgatcatggcctttgagaatagaggaaaagttgtccaagaacacktctgagaagcctttttgttttaaacactcaagagtaaacaaatagttttgatgatgtccattagggaaatacttctattttgtctctgtaaatagtacta

SEQ ID NO: 30663 - DNA, 201 bp, Homo sapiens
gttccaaggaataaaatcggtttgagcactggagaacttcttttcaacacagccaaaggggcatatggtagccacagggtggaggtgggggcccatctggrtttgagttgcacaagcatctatatcatcagtaggtagtcagttcttggaaattcaaatgagaattcaaagtgaattgatttgaaatttttaaacaagcca

SEQ ID NO: 30664 - DNA, 201 bp, Homo sapiens
cgactgtcttgttctggactttcttaatgattttttccccacacagcatcagtaaacctttgatcacacccatctgacctggcagttgtttccaaagcatmtttgctctaattcattttctctggcctgagccttttttccccacttttttttgtcaccccgctctcccgccttctcccttctactcctcttccaacatac

SEQ ID NO: 30665 - DNA, 201 bp, Homo sapiens
gttggccacattaacttgctgaatgcttttgatctgcatcctagattcatttcccagctcaggacaggttatttttatttgtttgtttgcttgttttacaygcttgcattttgtttacaactttgatttgtaaatacttactgtttatcacttgacctttgttgtctttttctcaatatcaaccagcactcttattaaaca

SEQ ID NO: 30666 - DNA, 201 bp, Homo sapiens
tggcaatttaactatatgtagaatttttggaacaaatgtgtcctgtcaaaattcctttgacattcctcttacattttctagagaagcttcagcctagcctyattttatacttgtatttcttacagcattgttttaggtcatttttattctccatttaatattttgaattcaaatattcaccgagtacaggtctaggagttg

SEQ ID NO: 30667 - DNA, 201 bp, Homo sapiens
aaaaaaaaaaaaaaaaaacaaaaccataatatctgcaaagtgcaatacagcaaagttgaataacatgaggtatgcctatgttcttcttcttttttttttaracagggtctggccctgttgctgggctggagtgcagtagtgtgatctcggctcactggcagcctcaacctcctgggttcaagtgattctcgtgcctcagcc

SEQ ID NO: 30668 - DNA, 201 bp, Homo sapiens
agatttgaggctccccacctgcccctgagttctgaagaataattgtttcatgcatcacatttttactgcattgggagaaaaagagggaaaaagaaaataawttgggagaagaaaagatgataggacttcttgactagttcagccagtttcgtgaccatgacctagaatgtgcctgggtctttggccatgtccgtgaaatgt

SEQ ID NO: 30669 - DNA, 201 bp, Homo sapiens
attaaaggaattgttccatatttcttctttttttaaattttgttggttcataagctgtagatcatattctgttctcctagtgattactcttttttttttttgagaggaagtcttgctctattgcccaagctggagtgcagtggtgcgatcttggctcactgcgatctctgcctcctgggttcaagcgattctcctgcctca

SEQ ID NO: 30670 - DNA, 201 bp, Homo sapiens
atggagaggcctgagttctctatcagtccaagctaacctaatgccatgtgattttagttacataaacaatttattgctccataaccctatttcttacactycactcaagagcctccatttcaactgctcacacggagacagagggcacatggccgtcccgaggcagaggagctagcagtggtgtcagtcgggtacatggag

SEQ ID NO: 30671 - DNA, 201 bp, Homo sapiens
tcctttagcttgcactgttgcatttcttaaatcatgtcactagtcaaatatatactttactgttttgtggaccttgatcttgccttgctgattagattatraactcctctttggacttatgatcagagtgccttgtccttccctgatgtgctgtcccctgcgtacctagtcttgtctgagcacacagtacctcgccccatg

SEQ ID NO: 30672 - DNA, 201 bp, Homo sapiens
aggccctgccctcattgggttaggtctagtagtggagacagaccacagacaggacaaatagggaaacaggagaagccaggtggccataagtgcacaagcayaaatgaaacagggaatgggaaaaaatagtgctatggagggtgcatggagagaaagctctttgttaaggggagtttggagcagatttcaggaaagggccat

SEQ ID NO: 30673 - DNA, 201 bp, Homo sapiens
catcagggagaaaaagcaccagcacctttttcaccaatgcgcccttccccacattcacacacgcatgttcacatgcatgcacatgtatgcaggccggcttyccctcaccttttgttttttttttttttgtaaaaaacacacatccctatgtccacaaacaccctcaccctcacttcctccctcatccacagacacctgttc

SEQ ID NO: 30674 - DNA, 201 bp, Homo sapiens
  misc_feature (1)...(201): n = A,T,C or G, or insertion/deletion polymorphism (see Tables 1-2)
tgactcctgtggccacctggtcattcctcttgggtgtgaaggaggaggaggggagcgtggagaaaccaacaacttagcaaatgtgtgctgagtcccatgcntataggtgatgggagttggactcagagaaaagctgccagtaacaccccttagcaagcacttgctgtgtgccaggctctagatgacaacctttacctgctc

SEQ ID NO: 30675 - DNA, 201 bp, Homo sapiens
cgttttttttttagaaaacaagatttaatgaagctttaggtttgcagggcctacctaatctggaaaaataaagaaaaagcatattataacagtgttaagaraaagagcagagaaaagcagaggccccttttgctagtgtacgatacatctgagaagcgtgaatgccagcctatggagagacccatgcgcaggatcccccag

SEQ ID NO: 30676 - DNA, 201 bp, Homo sapiens
agtgagactctgtctcaaaataaaaataaaaataaatagtttctcttgacaaataaacaacaaatttttaaaaatgaaatcacctttgttttgaaaaattraaacttacctcatgaccattgcctgattcctgagtcctgctcctctctgaatatgaagttgcggagtctttttaaattcatgaacagatatccgtgatct

SEQ ID NO: 30677 - DNA, 201 bp, Homo sapiens
aatttgcccaaggtcttatcctgattagtgatggatttaggactggaatcagaggttaggattgaaatctcagagccttgctcctactaaatattttctgycatgtctttgcaataaatgagggaatagaagaattaaattattttcaggataggacattcgtgttgttcaatttcttattatccagaccaacagagggga

SEQ ID NO: 30678 - DNA, 201 bp, Homo sapiens
cttcatctcattctccttctacctacctattgcttcaataagctctactcacccccttccagtggtcagctgagctttgctccatagtgagaagaaaaccmtcatttagtgcatgttctcagggctggatagcatgggaattggtccagtcagctttggagtaaaataagctgtgaaactccagagggggtttgacagagg

SEQ ID NO: 30679 - DNA, 201 bp, Homo sapiens
gcatcatttcatccttactggctctacctactcaaaacaggaatggttgtttatggaagtggatatgtttaatggaaattcatatgtttcactgacccatkgttgccatcatgccatatatcataaagcacttttgtataaattaaatataaggataagcaagttattgctcagattagatactgtattcctcatgctcag

SEQ ID NO: 30680 - DNA, 201 bp, Homo sapiens
agagttgcataaaacagcaaacatcagaccgcagcaagggaaaagaagggcaagactggatggccctgagtggttgggcaatgctgcatttcccagaagaratgttaaacaattgaacatttaacagagcaaggtctcatacctgcttttctttccccaggcccatctgctaaacatcccgagctggaattggaaagaagg

SEQ ID NO: 30681 - DNA, 201 bp, Homo sapiens
aaagggcacaggcctcttgtgctgttctaggcactgtgatttcaaatagtgcttgaatgatcttatttttcttatccagaatatctttgacacagctaatrcactgtggaatcacctatggacattcaagtcagattaggggattttctttttgagtgcttcatctcattctccttctacctacctattgcttcaataagc

SEQ ID NO: 30682 - DNA, 201 bp, Homo sapiens
attacaggtgtgagccactgtgcctggcccattgtcatatttattaagtaaatatgaggacttaagtggtatttgaatattgatatttataaaataccctycactgccttcctcttcagcatcatttcatccttactggctctacctactcaaaacaggaatggttgtttatggaagtggatatgtttaatggaaattcat

SEQ ID NO: 30683 - DNA, 201 bp, Homo sapiens
ttcctctcctccactctgcaatttctgcaccccagcccagcagttctcaggtctagttacacattagaatcacctaggagcctttaaaaaaggtgcaaacrtccctaggcctcactctagaccaattaaatcagaatctgggagtgtatacttgtggcatctttacttttaaaattttctctaggtgagtctgatggatgc

SEQ ID NO: 30684 - DNA, 201 bp, Homo sapiens
tctgatggtctctgcatcagtacttatattatgcttggtaaatatttgtcttcccatctaaagtcaaaacattagggacaagatcctgttgaatgagggarctacaaatacttattgaggatccactcactgtataccaggcacagtgctaggtacacagagcaaactcccagtcctacaaggtggtggatctaatgacgt

SEQ ID NO: 30685 - DNA, 201 bp, Homo sapiens
cttgatacctccttgttgaatggggaaatgaacaaatgcatggactcagcaagcaaggcagacggtgggaggagatgtgaccaggaagatgggcaggagtyggagggggagaggctgagaacacgggcccttcagtgtctgtgtccttgtctcactgctgctgggaggggctggcagaaactggccttcttgccccatgag

SEQ ID NO: 30686 - DNA, 201 bp, Homo sapiens
tttcatactcatccctgcagacctgcacatttctggcaccagacccatatatctatatatctatatattcatttaccacagcccagcattcctggcagccygagagctggtggctagttgagaagaacatttagtctccctttcctgggtctcgtttccacccctagtggccaagctggggcagctcgctttgctctgtgg

SEQ ID NO: 30687 - DNA, 201 bp, Homo sapiens
tgttcagttctgcggtccagcaactcctccaatgcctgcctcctggggatagctgtaattctgggttgagatgaaagttggccagttgaagtcaactggcstttggttgagggcctatggtgaaaacagacttcatctaaaaagaactcagtcagcaggcacctgcactttggaatcagggaggagaaagatggagactag

SEQ ID NO: 30688 - DNA, 201 bp, Homo sapiens
ccactagatgtcctcatagatctactttgtattaccattgacatcctggggaaaaccttgtctgagaattgggatttgggaagggaacaatgggtgactaygtaagaaagaaaattagcaaacaccaaaggagagaggatgctttgtgtggccagggagtagataagaaacttacttctgtttgaaataaatcctgaaatt

SEQ ID NO: 30689 - DNA, 201 bp, Homo sapiens
gcctctgacccgctcaggacctggggttagagctgcatggaccctgaagagagggatccctgtgctaaggccttcggacagtggccctgaccgagcagcasagggaagagggcttagggagcgggaagcaccaatgctgggcttgcaaagggcagagcagcaggagagaggctggcataggagggaggagggctcacagga

SEQ ID NO: 30690 - DNA, 201 bp, Homo sapiens
gcatttgattaaaaaaattgtttttcaaaatgatttatctacggtgaagcaaaaaaatcatccttgtttccctcttctgtgtaaataacaaatcaatattwccagtaaaagaaataagaaagagaaaacaagggaatgtctgcagattgtatgccagatccggatgcatttaagataaatttatgttcatgtctttaattg

SEQ ID NO: 30691 - DNA, 201 bp, Homo sapiens
atttgttttattttcccccaaatatattactgtgcatttttctttataatgccgagatcctagaatatgtgcgatttagtgttctgcttttcttcttaacrttacgttatcagcatttccaagtgacactgggactctataaacatattttaaatgactatatcttatatggatgctcactccttttccttatatttgctc

SEQ ID NO: 30692 - DNA, 201 bp, Homo sapiens
tattgctcatcttttggataaggtaaggatggaacctttgtgaagaggaagactggacacctcctgccccctcccactgtggtttgagtggattttatccmgcatctgttgtttgcctggcattggatggccctccacaccagagagctaatgcctgccttcatcactagtgtctctgtctctttgtttcatcagcttctt

SEQ ID NO: 30693 - DNA, 201 bp, Homo sapiens
ctatatatctatatattcatttaccacagcccagcattcctggcagcctgagagctggtggctagttgagaagaacatttagtctccctttcctgggtctygtttccacccctagtggccaagctggggcagctcgctttgctctgtggtctgacaaacttggatttcaaaacccactgcctgccaggagcagttcccgca

SEQ ID NO: 30694 - DNA, 201 bp, Homo sapiens
atatttgttctgtcaagagtaaatttaaattcctgtagccatcatataaactcactctcgggaagttcagcaaaggcatccttagatactgtattaacacrtaatcgtttcacatctaatttgatgaaagcttgtcccagcctctgcctaatgcccagaaatggatggaaattagaaagcctacatattagatatttttgc

SEQ ID NO: 30695 - DNA, 201 bp, Homo sapiens
gctctgcgggtaaaggctgagcctagccttgtattgctcatcttttggataaggtaaggatggaacctttgtgaagaggaagactggacacctcctgcccyctcccactgtggtttgagtggattttatcccgcatctgttgtttgcctggcattggatggccctccacaccagagagctaatgcctgccttcatcactag

SEQ ID NO: 30696 - DNA, 201 bp, Homo sapiens
gtgtatagcacattgcctgacgaaggggaaaaacctcactgtgatagttaatttattgtcattggctgcaggggccagagagtctttggggaggctctgckggtaaaggctgagcctagccttgtattgctcatcttttggataaggtaaggatggaacctttgtgaagaggaagactggacacctcctgccccctcccac

SEQ ID NO: 30697 - DNA, 201 bp, Homo sapiens
gatgctcacattagcttgtgggtgacaagaggcaggctagacagagcagaggttctcaaagtggagttttcatatcagcagtaagagcctcacttgggaasttgttggcgatgcagattcttaggcttgctttcagccccactgacttagcgactctttgggtggggcccagcatgtcttgtttggaccatttgtccaggt

SEQ ID NO: 30698 - DNA, 201 bp, Homo sapiens
accaaaaaaaaatgtattacctacagaaaagaagttcatatcaaagaagtgaatgcctaatggtggaatttcagggccaagtctgtgtgggggtttactcwtctagattctactatatgtgttgagttctagggctgagctggatggagagaaagttaggcaggacggtacctttcctggttcctaccatcaacatcgctg

SEQ ID NO: 30699 - DNA, 201 bp, Homo sapiens
ctttctgtgtattgcaccaaaagtatatactttttgaagaagtatacacttctttttgtgtattacacttctgtgtggcttgttttccccagttgacttgygagatttctaaggggagaggctgaggtgaatcttggtcttcttcatttaagtgtgttccagttgacataccaggcaaccaaaaaaaaatgtattacctac

SEQ ID NO: 30700 - DNA, 201 bp, Homo sapiens
gagcccacagggtaaatttctaggcattaatttccaaagcctatttttgctattccacttaaagaatatttccatctttccttgcctatcactgctgcctratcttgtttgtgcagtgggtgaatagaagagaaataagaggagagaaaaacatgaagattttaggggagagaatattccgtggaggcacagcaactgcct

SEQ ID NO: 30701 - DNA, 201 bp, Homo sapiens
gggctgtggggaggtgcattcatgtggggatctcagggggatggggtgggaggctcacatttgacacctcctgtgggatagctgcagtgctagggtttgcrtctccagatgttagaggcagtaactgctagcctggtgcccatcacagataccagttactaaccacttatcttgtgccaagtactaagcactgcaccagat

SEQ ID NO: 30702 - DNA, 201 bp, Homo sapiens
catggtgaaactgtgtcactaaaaaaatagaaaaaattagctgggcatggtggctggctacttggggggctgaggcgggaggatcacttgagcccaggagrtcgaggctgtagtgagctgtgatcgtgccactgcactccagcatgggtgacaaagtaagaccctgtctcaaaaaatttttttaaaaaagtagggagcaaa

SEQ ID NO: 30703 - DNA, 201 bp, Homo sapiens
cagactgactcgtgcctacgggccccaaacagcccaatttggtgcactaaaagcctcatttttagactctgggtccagagtgaggctttttccagaaaaaaacaaacaaacaaacaaacaaacaaacaaacaaaaaacctacttcagggaaatgacaacaacagaaagccaccatttgccctaaaatttttattgtaaaaa

SEQ ID NO: 30704 - DNA, 201 bp, Homo sapiens
agactgactcgtgcctacgggccccaaacagcccaatttggtgcactaaaagcctcatttttagactctgggtccagagtgaggctttttccagaaaaaaacaaacaaacaaacaaacaaacaaacaaacaaaaaacctacttcagggaaatgacaacaacagaaagccaccatttgccctaaaatttttattgtaaaaac

SEQ ID NO: 30705 - DNA, 201 bp, Homo sapiens
gactgactcgtgcctacgggccccaaacagcccaatttggtgcactaaaagcctcatttttagactctgggtccagagtgaggctttttccagaaaaaaacaaacaaacaaacaaacaaacaaacaaacaaaaaacctacttcagggaaatgacaacaacagaaagccaccatttgccctaaaatttttattgtaaaaact

SEQ ID NO: 30706 - DNA, 201 bp, Homo sapiens
gtcgttttttttttagaaaacaagatttaatgaagctttaggtttgcagggcctacctaatctggaaaaataaagaaaaagcatattataacagtgttaaragaaagagcagagaaaagcagaggccccttttgctagtgtacgatacatctgagaagcgtgaatgccagcctatggagagacccatgcgcaggatccccc

SEQ ID NO: 30707 - DNA, 201 bp, Homo sapiens
gagcatgctggcaggcacctgtagtctcagctacttgggaggctgaggcaggagaatcacttgaacctgggagtgagaggttgcagtgagccgagatcacrctactggactccaacctgggtgacagagcaagattccatctaaaaagaaaagaaaagaaaagaaaagaaagaaaagaaaagaaaagaaaagagaaaagaa

SEQ ID NO: 30708 - DNA, 201 bp, Homo sapiens
gaaggacctctatttgaggaaagaaaaaacataaagctttttaagactaatttgggttattctgtatgcctgaacattgtccaactgcaagcatatcttakttaaaaatcagaattttggatttaaaaatgactgtgaaatgacattcgtctgaattaaggttaactgggcttcatgccatgccatggctttccaagccaa

SEQ ID NO: 30709 - DNA, 201 bp, Homo sapiens
ccacagctccatgccttttctgtgaccttcaccactttctctgcccttggggcttcctcttcctcttgacttttctcagcacttaggtgttggccataackgtttttggatgactgcattgggtaagtcccaccagtcctgtgagattgcaccttcccaaaaggcaaggaagttgtatggaaactggtttaggccttgtgt

SEQ ID NO: 30710 - DNA, 201 bp, Homo sapiens
gttcctctcaggatgcatacagaacatagtttgagattggggttgagggcctatggcatgggtagcatgggcacatctaatttacccaattggattctagwggatccattaggcccgcagtattttgtagagaacactgcattccatgtcatgtggattctgttcatatatttatatagtattttttttctctctcctatg

SEQ ID NO: 30711 - DNA, 201 bp, Homo sapiens
tattgggaacttttcagggcccagcattgtgagagactcagtgatatgtgaactccaacagaggagcttataagcctagctgggggagtagaacacattasaattgaacacaaattataataatgcaaggcatgagatcagaagtgccaggggattttttaaagaaaggagagaattgatcttgtcataatcatctgggaa

SEQ ID NO: 30712 - DNA, 201 bp, Homo sapiens
tcttcttcattttggagttctcaaattctcaatttgtgaaaatgcagacataggctgaacaaaaacttgacctttggagaatccatgataaagagcttttytgaacacattaaaaccataaacagaactcagagtttttacacacgtatatttcttaaagtgctgaaagttattctcctgaatgtgctaaacaactgatat

SEQ ID NO: 30713 - DNA, 201 bp, Homo sapiens
agcatttcactggctgatgtggactcatggaaaatgtcagcgtgctggcccaggccaggcgggctgaagccagtgtgtcttacagctctgtggagcagacrtggtgtgtggcttgaatggaaaggtcataaaggcctgggacaagggagtggacggagccaatggcactgtctggtaacactatatggaagatgaaattgt

SEQ ID NO: 30714 - DNA, 201 bp, Homo sapiens
actccagcctgggtgacagagaaagactctgtctaaaacaaaacaaacaaaacaaaaagaaacagacaaaaactctttccctcatgcagcttgcagacagyacacaatgatgaagtaaaggaagcaggtggcagacacactccggagaagacagcacagacagggagaggtcgggatgaggtggagagctcatggacaaag

SEQ ID NO: 30715 - DNA, 201 bp, Homo sapiens
tgcttcatacagtaaacaaaagttttttttttttaaaaaagaagagttatcaagaaagttgcttaaaaattaaaacaatcactctagaaaaaagaattagstgttgatacatttagaaaggaatcagggaaaggaaacctcatctgttctcttcctaaaatcacaataattatttcagaaattttgagtgcccccttctcc

SEQ ID NO: 30716 - DNA, 201 bp, Homo sapiens
tagtaaaagccatagtaattcagcctttgggttggaatggcagcaggagccagctgagtgaccttggccgtgatattaatactctttacagtcttccctcrattatccaggctaatggaaagagaaccagtgcccgcaaataatcataaaacaaaaaaaaatcaattatcttctcagtggagtgttgactgacacgtgggt

SEQ ID NO: 30717 - DNA, 201 bp, Homo sapiens
tgatttggaagagacacaagagaggaaatataagagacaagtgataagaggctcagctgagatgggcatggaagagcctgccttttttttttcctttattrcatacctatggagcttttctaagcattaaaaaaacacttccttaccccctccccatgagattttaataccacagatacactgtatatctgtgtgtgtact

SEQ ID NO: 30718 - DNA, 201 bp, Homo sapiens
ttcttccttgtgttcagagaatctttcaggtgctcacaccacccttgtcttctgccttgaaacctatttctctagccactataccaccctcctcagaccayttcacctcccacatcccccacaaatacttcttatttatctacatgttctgagatgtgttctgcattatgccaggccagtataatgaattttaagagacac

SEQ ID NO: 30719 - DNA, 201 bp, Homo sapiens
gagacccactgctgttgcaccaggaactagggaccactgggtacccaaacagatgcaaaagctgccacttctgtacaaggccgtatttctcaccctccatyggagaggaagaggtgagtgtagagagtcgccagggatctctatgggctcatccaatcagtcttcagaccagtttgacagaaaacagaagaggagcttcag

SEQ ID NO: 30720 - DNA, 201 bp, Homo sapiens
gggtggcacacaggaggacggaccatcaggggctcaggctggcggctgaggtgggagtggtgtcattatcttccgggtcccaggccttgttcctcctgacsctgaaaggcagtattgggtagaggcatccccttgtttcgcagacctctattaaaacaaaggagaacaatcatgtaatgatctctctaattgctgaaatga

SEQ ID NO: 30721 - DNA, 201 bp, Homo sapiens
aggtctggactttggtctctgcccttggctgctatggcttgggactctgacctcttttgcaaagcacagatggctcttctgcaggagcaagaggcccctcrtcacatgcacaggccacatggatccagagacacctacctcctagaagtgtgtgtgggatcctggggcaggctgaccctgccctgcatttcccaagtcatg

SEQ ID NO: 30722 - DNA, 201 bp, Homo sapiens
gagctgatggtgacgcacaaatctttcataaacatacagcatgctgctgtcccttggggatgcccatgagctggctgagcacgcacaagcctgagaaactytaaacctgggcagtccaacaccggtggtcagtgagcatctgaaatatgaattgctgtgtgctgtaaagctgggagtagtagtgcacacctgtagtcccaa

SEQ ID NO: 30723 - DNA, 201 bp, Homo sapiens
gacaccatctagggtcctgcggtgaatcgcaaactgccccagagagctgatggtgacgcacaaatctttcataaacatacagcatgctgctgtcccttggrgatgcccatgagctggctgagcacgcacaagcctgagaaactttaaacctgggcagtccaacaccggtggtcagtgagcatctgaaatatgaattgctgt

SEQ ID NO: 30724 - DNA, 201 bp, Homo sapiens
agaaatatatgtgaaagcacattgtcatatttttattcaataatcaataattcaataatcttattgagtatctggagagaccaggctctctgttgggtaaytgttgatcaaaatggaatgagatataaatcatgtataaacacattgagtatgactgtgtagaagacaagtggcaaacattattcttctcttgtccccatg

SEQ ID NO: 30725 - DNA, 201 bp, Homo sapiens
ctctgaccctagagcacatttcgaggcatgccccatcagacactgcagcttctatgccagaccagcctggcacccaaagccctgctgggcattcagagagygtttctccagggaagagggatgagtcctcaaaatatctccacctgatcatgccgacctggacttttcaccttctaagtattaaaccagaacttaaaaccc

SEQ ID NO: 30726 - DNA, 201 bp, Homo sapiens
tctttgctcctttctagagaagaagcaaagcctataggtagaagcatgtagatgggcctgaggcactgggcagggggaaggatgccgtgggaggagggggscatattccaaagggccagctcaatgagaaggagttggcttcttttgaatcatttcagccatggagctctcttttggaaccttcctcagttggaagcctct

SEQ ID NO: 30727 - DNA, 201 bp, Homo sapiens
cccagctggagctcttgttcacgcctttccctgaggctggaaggtctcttggatgtcacaggctgcctctttaaaatggagacagtggtggactttcctcyctgttgaggatgggaatgaggatgagggagcaggcttggggtgagcctaccatccaggggcagtgaactttatatggcgtgggatgaccagtggcctccc

SEQ ID NO: 30728 - DNA, 201 bp, Homo sapiens
ttaaacctgtttgcaccacgtccctgggagagcaaacttctgggccttccttgtttactggaggttggttaattcggaaggtagatggactgggcatattrgttccccactggcaggagcagcccaggattcagcaggttaacgcaaaggatcgagaaactatcaccttcctagaactgttcccagacttttagcaaacag

SEQ ID NO: 30729 - DNA, 201 bp, Homo sapiens
acccatattgcagaaggtgtctgatgataaaggctgaatgaagtcattggttctcaaacttgagtgggcattagcatcacctggatggccttgttaaaacrcacagtaccagcccaacctggggactcctgactttgtagttctggggtagggacaactttgcatttcttacacatccccaggtgatgttgcaggtccagg

SEQ ID NO: 30730 - DNA, 201 bp, Homo sapiens
caaagataggtgctggggaggaagagcagaggagggcctgaggtggcatgaattggtcacatctctttgactgatggtggtgaaagtaaccacaagccccygggttactcttctgcctaatgcacaacttctgttctcaaataatcatgaggctctaaaaccttagcctagactcagtggagaaaagaaaggagccactct

SEQ ID NO: 30731 - DNA, 201 bp, Homo sapiens
gcagagagtgtggaagccatgtgttgggagcagggtctgagaacatcaggttggggacagcccacgagggaccttcattagcagtgtggattttcacctgsactctgtcggcaagcactgaaggttgtcattagcacactggctgtcacagaccagaggggcttcccattcagtcaaatcttgctgcccatccccagtgaa

SEQ ID NO: 30732 - DNA, 201 bp, Homo sapiens
gaactcaggaggagatggaaggccagactgtgttgaccaaaagaacttcagaggggaaggactagtttaggaaagacaaaaatcaaaataaaaggtgtcakaaaagtaaggcaaattgtgaccgataaggattcatcacaaaaggattttatttctggcaagactgaaatgttcaatatggtaggctagaatcagtgcata

SEQ ID NO: 30733 - DNA, 201 bp, Homo sapiens
ttttttttttttttttgagatgaagtcttgctctgtcacccaggctggagtgtagtggcaccatctccgctcactgcaacctccacctcctgggttcaagygattctcctgcttcagcctccccagtagctgggactacaggtgcaggccaccacgcctggctaatttttgtattttttagaagagacgaagttttgccat

SEQ ID NO: 30734 - DNA, 201 bp, Homo sapiens
actaataggttgcaacctgtgattttaaaaataccagattgggttatattcaaattccctttaacccccaaatcctgtgagtccaatgtaaattgctactmcagtattagggtacaaaattctgtgcacagcaggctcacagataaagtttttgacaaactgaaaaccatgtgttattaattcacttactcattgattcac

SEQ ID NO: 30735 - DNA, 201 bp, Homo sapiens
caccaacctttcaatttactaattgtttaaacctgcacaattacatgcagccttttgcaaactactgtagctaattttaaattacacatgacttttatttygggtataaatataatacaagaaggcattcaactccgatggttaagctgagagaagtccaatatgattaggttgaagggagacgtaccaaaatcagtttag

SEQ ID NO: 30736 - DNA, 201 bp, Homo sapiens
atattctgtgtgaaaggcattttaaaacacacgtagatcaatttattgtcacagcccctgagaggcataattctcatcttttttctttctttctttctttyttttttttttttttttttttttttgagatgaagtcttgctctgtcacccaggctggagtgtagtggcaccatctccgctcactgcaacctccacctcctg

SEQ ID NO: 30737 - DNA, 201 bp, Homo sapiens
agatttattagaatatcattgtggataatttttttctttttttattggatcagccagaactttattttgtttgttttcttgttgccattgtttgctcccayaaaattctacagatttttaaaattttttttcatatttattggttttctggttatttagtcataaacactaaactaaaaaatcagctttctcctattgtca

SEQ ID NO: 30738 - DNA, 201 bp, Homo sapiens
ataaatataatacaagaaggcattcaactccgatggttaagctgagagaagtccaatatgattaggttgaagggagacgtaccaaaatcagtttagtgtartatcgagtcttgtcagataataaacaaaaatcagcttatcctgagtagcctttggtttgtgcagacagagaattaacattgtcaatagaactaaagtcac

SEQ ID NO: 30739 - DNA, 201 bp, Homo sapiens
cgtggtggcttatgcctgtagtcctaactacttgggaagctgaggcaggaggatcgcttgaggcaaagaggttgaggctgctcagagccataatcatgccrctgtaccccagcctgggtgacaaacacagagaccctgtctcttaaacaaaactcactaggatataccagtgagtccatatgaagaatcctacccatcctt

SEQ ID NO: 30740 - DNA, 201 bp, Homo sapiens
atgtgcacaccaaacactaccagagcctttgggttgtcccctggctctttagttaccctggcccatgcgtcttgatttgaccctttgtacttcattgcagraagtaaaaacagagtggcagatcggcctaggcagccactgggtcatcccctgtgactaagacctagtgatgggcctggaaggggcttcttaagacactct

SEQ ID NO: 30741 - DNA, 201 bp, Homo sapiens
accaccacgcccagctaatttttgtatttttagtagagatggggtttcaccatgttggacaggctggtcttgaacacctgacctcaagtgatctgcccacytcggtctcccaaagtactgggatacaggtgtgagccactgtgcctggcccatttttcataagacacactatatcactcgaaataaatgccaaacactagt

SEQ ID NO: 30742 - DNA, 201 bp, Homo sapiens
ccctggctctttagttaccctggcccatgcgtcttgatttgaccctttgtacttcattgcaggaagtaaaaacagagtggcagatcggcctaggcagccaytgggtcatcccctgtgactaagacctagtgatgggcctggaaggggcttcttaagacactcttattggtagcaggtgaggctacagaagccactgcctct

SEQ ID NO: 30743 - DNA, 201 bp, Homo sapiens
cacctctgaccttctcccagggatggagcctcacctctgaccttctcccagggatggagcctcacctccgaccttctcccagggatggagcctcacctccraccttctcccagggatacagtatctcagcccgctcctcgagggaagggctctcttagggtccagcctctctccaatagcagggtgacttatttgaacaaa

SEQ ID NO: 30744 - DNA, 201 bp, Homo sapiens
cctcctttctcaggaagtcagcatgtctccttacatcgatggggggaaaataataaagtgcttcacatcccattcactgaaaatccactgtagttttcaamcacttaaccttctcgagtggaaatacaaaacacatttcctgtgaagtactgccacacagagtcctaaagaagtcatgtggcatttctaagtatcatgcac

SEQ ID NO: 30745 - DNA, 201 bp, Homo sapiens
tctcaggaagtcagcatgtctccttacatcgatggggggaaaataataaagtgcttcacatcccattcactgaaaatccactgtagttttcaaccacttawccttctcgagtggaaatacaaaacacatttcctgtgaagtactgccacacagagtcctaaagaagtcatgtggcatttctaagtatcatgcacaattttc

SEQ ID NO: 30746 - DNA, 201 bp, Homo sapiens
ttcaccgtattagccaggatggtctcgatctcctgatcttgtgatccacccgccttggcctcccaaagtgctgggattacaggcgtgagccactgcgcccmgcctctcttcactcggttgattctttcttttgttgggccaagctttttagtttgatgtaatcctctttgtccatttttgcttttattgcctgtgttttag

SEQ ID NO: 30747 - DNA, 201 bp, Homo sapiens
gctgtgcatgctgagaatgccaacttctggaagtgcaatgtggcaaaatgcaccaagccaaccagctgtgtgttgtccttctctctctggggctttctccmaaaccagcttgttgaattacctggatagtcaggggaccctccatcgccacatctgcttacaggggttctgcttccccagctgacctttttcccaaaggga

SEQ ID NO: 30748 - DNA, 201 bp, Homo sapiens
gcccaccaccacacccggctaattttttatatttttagtagagacggggtttcaccgtattagccaggatggtctcgatctcctgatcttgtgatccaccygccttggcctcccaaagtgctgggattacaggcgtgagccactgcgccccgcctctcttcactcggttgattctttcttttgttgggccaagctttttag

SEQ ID NO: 30749 - DNA, 201 bp, Homo sapiens
taaagcctacttggtttgtggtgaattaactttttgatgtgccactggatttgatttgccagtattttattgaggatttttgcatctatgttcatcagggmtattggcctaatgtttttctttttttgttgtgtctctgccatcttctggtataaagatgatgctggcttcatagaatgcatcagggaggagcccttcctc

SEQ ID NO: 30750 - DNA, 201 bp, Homo sapiens
ttagtagacgagaaaaggaaaagcttggtgccccaaacctaaggcaacaattctggtatttgattagcatcattgactctcctgaagcctttgtcccacascagatttcttccttgtgttcagagaatctttcaggtgctcacaccacccttgtcttctgccttgaaacctatttctctagccactataccaccctcctca

SEQ ID NO: 30751 - DNA, 201 bp, Homo sapiens
tgtatgtgtgtgtgtgtgtgtgtgtgtgtgtgtttatgtgtataaaatctcacatagggagaaatcctgaggtgggatggctccaggctgcttgccccagraactccaggacagctcttcctgtcattcacttgagccaatatcactaagttagttatgccctcagctggtgcctcagttcctggcactacaggcacataa

SEQ ID NO: 30752 - DNA, 201 bp, Homo sapiens
cccgtggaagacactcacaccaccttttacctatcaggacactctcaggaagaaatagtaggtagggctccaggacctctgatggtggaatctactagaakgcagttgtccttaacaaggatacctatctcatgttgctcatcacacccatgcagagacctgccaccttgtaatttgagagctggaatttccatacacccg

SEQ ID NO: 30753 - DNA, 201 bp, Homo sapiens
atacttagtgatgttatatacaaatggccaacaaacatatggaagtcatttttagcacaaaacttgcctcccatggccatgatcaacaaagtgctatgggkacatggctaaagaatcaggagcccatctggtgatagctttggctgtggatgatttaaacttcagtcttttcctgattgaggacttctcattccatgtctc

SEQ ID NO: 30754 - DNA, 201 bp, Homo sapiens
tggctgtagtagtttacattgccgccagcagtgtagaggtgttctctgttcaccgcatccatgccaacatctactgtttcttgatattttgattatggccrttcttgcaggaataaggtggtatcacattgtgttttgatttgcattttcctgatacttagtgatgttatatacaaatggccaacaaacatatggaagtca

SEQ ID NO: 30755 - DNA, 201 bp, Homo sapiens
agtttaacgtagcatatggatttctaaccatcatttatatgcacacaataaaagataatttggcccaccatttgaaccaattcctttatgttaagtctatsggggtgggagaagcacttaccttcatttctccatctattctaggggagatgattgataagaatttccatctccctctctccctggaaaggctcagggatt

SEQ ID NO: 30756 - DNA, 201 bp, Homo sapiens
tgttggaaaccagctctgactgctcctcccttcccctatgtgcatggggcattgtgggtttcttgggctcttcactgcccatgtgtgctttatgtaaatgkcctctgctctgagattgagtagctcttacaagatggtgggaggctgaaataacagagaactaggaagcctgaaaactctctctgggccctgttcttttaa

SEQ ID NO: 30757 - DNA, 201 bp, Homo sapiens
cagctgggggaaagcacatctcaggccccattgcaggaccccttccccagtggagtcatagagtcccctactctgccccaaggtgttggagatggctcatrgctcatgggaatgtgcaggaagtcccctgagtcttatttatttatttatttatttatttatttatttatttattttgagatggagtcttgctctgtcacc

SEQ ID NO: 30758 - DNA, 201 bp, Homo sapiens
ggaacgactttgacacacatacttaaggatacagggcttggaacatttcagtgtattccttgtgcagagtgtgagccatttcattcaatacacctgctgtraagatagcacacatgcctcaagctggcagataaatctagccagctattcagtgcatttttgtcttcacctattctctataggcaatagctcatgtgcagt

SEQ ID NO: 30759 - DNA, 201 bp, Homo sapiens
attctgaattgtagtttctaatcctacactcattttcaacttttggcccacatcatgtgtgtatagggtaaaatatacctcttatgttgacatcctgtgaygaagaatgacccagaaagatacggagacagagagaaatgtctctacagtctttgtagattctttccccatccactctgctctgttctaatatttcccact

SEQ ID NO: 30760 - DNA, 201 bp, Homo sapiens
atagcatccctgtgaaattggcatgattatcacccccatttacagacaaggaagcagaggcacagagaggccaagtaatttggctcagttcacatagctcmtggcttaagccaggaattgagcctggacagttggactccagagctttgctctgctaaccactccatggcatttttcaataagtgcttttttgttttttta

SEQ ID NO: 30761 - DNA, 201 bp, Homo sapiens
tgtctccatagtctatgctgtcatagaagtaatggggtctacaggcaaaagggacagaaacataaaataagttgtatggaacgactttgacacacatactkaaggatacagggcttggaacatttcagtgtattccttgtgcagagtgtgagccatttcattcaatacacctgctgtgaagatagcacacatgcctcaagc

SEQ ID NO: 30762 - DNA, 201 bp, Homo sapiens
ttcccttccctctctccctcccttctttccctctctcccttccttccttcctccccactgccccctcccacctcccccactcctccctcctccctccctcycttcctccctccctcccttccttcctcgcctcattccattcctccgtccttccctccctccttcccaacccatgaaagctggcgccccctggaggcattt

SEQ ID NO: 30763 - DNA, 201 bp, Homo sapiens
ccacaccccaggccctgctggcagctcagagtctaagccttacccccaagaggacccctgatcagggcctgcaggccaggcacctcagctcgcagcagctkctggtctgcaggcctcgagccatgtgctgggctctccggcacgccctgtaaagagcagctgttaattttactagctggtgtgttggctcctctgccctcc

SEQ ID NO: 30764 - DNA, 201 bp, Homo sapiens
aatgagataatttacagtggcaccatgagaccactgaacaggggatgggattgtgtgtgttagaggggctgctttggtgggtagccagagaagcctctttygaggaggagatggtcatatggcagaggcaggactgaggagaaagtgagggccacacaggatttgggccagaaagccgcaggcagaggagcagctggtgca

SEQ ID NO: 30765 - DNA, 201 bp, Homo sapiens
tctgctgctaacccactgctaggagggggaatgccaattgtagtgctgctggagtagattttaaaacagaaaacatttgtgtgttgaagtgaggactggcrttctgttggttggatgacataagtcccaatttcttccatttccccatggtgtgcttgcattttggggcccaggtatactggggagggatgacccatatgg

SEQ ID NO: 30766 - DNA, 201 bp, Homo sapiens
aaaggccagaagcaggctcagagctaggtcccacaactctgcttccctgtatccggcccccctgccagctcactcaagcaagccctgtttctgggcagcarcagctgtgaggtgtgggtgaggggctgttgctaggagcagggatccagcttgccttttctgacacgtgtgtttaaattagcatctttaaatgctgttccc

SEQ ID NO: 30767 - DNA, 201 bp, Homo sapiens
gagtagccccttccttccttgcagagaaacctgcatgaaagtttgggggacttcactttcttcttgaagacatcttatgtccaaattaatgctactatttyctgtgtctccactgttttgacacttacctttttcatgcacttcccagagcatatttcttttgtgccagacactctttccccagaattctttccccagaat

SEQ ID NO: 30768 - DNA, 201 bp, Homo sapiens
cctgcacattgcccagttgggcaaatttctctcccaggtagaggttaccaggcttgcattccctatgttttagcttctgtcttggtctttctgtgtgtttktatacctccatttgaagcaaacccaacacatgaaaagctatatttaccaatgggaccaactattggggcagtgtctacttactatacatatttttaaaaa

SEQ ID NO: 30769 - DNA, 201 bp, Homo sapiens
ctggctatgcatcttgagtctgatcttgagcctcacgtttaacctctctaagcctctattttcaactctgtaaattggcgatcacagtgcttaattgatarcttgttgtgcaaatgaaaagtgaaaatgcaggtaaaatcctaagctcagtcacatagaaagcacttagtgtcagtcaatattgcaatatgatgatgccaa

SEQ ID NO: 30770 - DNA, 201 bp, Homo sapiens
tgcaatatgatgatgccaatattgttaatgataacctttctaagttggagtgacctcacctaaaaatagtacctccatcactgagcctatggtaattacaygagatagtatgagacacttagcactttctgggtacaaaacaatagtgagtaacatttacccaagactttattttgtaaatgcctctcttccatcactact

SEQ ID NO: 30771 - DNA, 201 bp, Homo sapiens
ccgcaagatgagtcccaccaaatgttcctagagctgcagagaaaaccctatgcaaatagaaaatggaatcttttgaggcagatctgcattagggatgatcractgcactgagagacttataaatgaagtgagaaagactccagccctagagctggcactgcaccagctgtatcgacagtgcatagatgggcatctgcacac

SEQ ID NO: 30772 - DNA, 201 bp, Homo sapiens
gtgaggaaaggagtctgttgtagctagagaggtgtcagcatctgcaggtgggcacatcaacctgcccaaatgtagagcaacattcgaggccttttatggckgtcagggtaatttgactctgactcgaggtaggcagcttgaatgcaacagcagcacccaaatgattcctcccgcgtggaggtatccaaaagctgaatgtct

SEQ ID NO: 30773 - DNA, 201 bp, Homo sapiens
tagagcaacattcgaggccttttatggcggtcagggtaatttgactctgactcgaggtaggcagcttgaatgcaacagcagcacccaaatgattcctcccrcgtggaggtatccaaaagctgaatgtctcatagctattacctattaggagccattattctgtttgttctgctcaagccaaggaagagttttcctgattgt

SEQ ID NO: 30774 - DNA, 201 bp, Homo sapiens
attcccctcactgtgcagtgaactgagagatcttgttggcaattacagcctgaaattctaggaaacgtcagagcaggcagatacaagggtgagatctgtgmattttctggaaactttggaagtaagtcctggtgaagtcatgctttgacatgttcaccaagtagatgctcatggctataataagagtaatgtcttatgtgt

SEQ ID NO: 30775 - DNA, 201 bp, Homo sapiens
agtgaatatatataaagattgcctggtatatgttgaattattatttttatcatccttcattaacatatgaaattaacaaagaaacagagatgaacttgacsaagatcacatagcggatgagtggactgctagatcagaagcttgccatctcccatagtattgatggaaataataatgataagccactttaaccataactag

SEQ ID NO: 30776 - DNA, 201 bp, Homo sapiens
accggccaaacaaaccgaatcttatgtggatcctttaatgcctgtaaatcaaaacctagaccttgtaatttctgagagtggacccagtcacgttccctcaygtcctccctgtgacggaagtggccagcgtctcccttctgattccatgtatctgcctagtgtaggcactgtgacagaagtgtgctgtctttgcccttattc

SEQ ID NO: 30777 - DNA, 201 bp, Homo sapiens
aactgtgacttcaggtctcatcattcctcatccccctgaaaccccttctttatggcttgtccatccctaaaataggtctggagatcgtcagcaaattcaawgtgtttttgggagagggagggaaagttggaacacaaaaagaggagaacagatggggaaagaagacattcctgtcctttcaaattccatcaaaatttcttt

SEQ ID NO: 30778 - DNA, 201 bp, Homo sapiens
gtaacatagtcactcccattcatttgctcagtgtccatggctgctttcaggctacaactgcaaagctgagtaattgtaacaaaaagggtatggcccagaargctcaaaatatttactatctggccttttagggaaaaagttggccaacctctgctgtgaaggtacagctcaagtactgccatctctgtgaagccttcttaa

SEQ ID NO: 30779 - DNA, 201 bp, Homo sapiens
ttactatctggccttttagggaaaaagttggccaacctctgctgtgaaggtacagctcaagtactgccatctctgtgaagccttcttaactagcccacccrgaaaccaaattagaaaaagtgaatctcttttctgtaagcctgtaacatttcatgtaaaccccattagacagtttttatgttgaggtttttgtagaagtca

SEQ ID NO: 30780 - DNA, 201 bp, Homo sapiens
cagtctgcataacagcatggccaaaaccgagggcagctcaggcaacctgagcacaaacaccaggctcaacctctctgaaaatcatctttacacataaaccsctggaaaaagtcgtagtgtgaaattgtttcagcggcctggcaaagcttttaaaacatgataaccatcacactttactcctctctgaaaggttagtttaat

SEQ ID NO: 30781 - DNA, 201 bp, Homo sapiens
atgaggttagtgcccctgttgtctccatagtctatgctgtcatagaagtaatggggtctacaggcaaaagggacagaaacataaaataagttgtatggaaygactttgacacacatacttaaggatacagggcttggaacatttcagtgtattccttgtgcagagtgtgagccatttcattcaatacacctgctgtgaaga

SEQ ID NO: 30782 - DNA, 201 bp, Homo sapiens
tactcatttccatcagctgagttcactcttccaacctggcatgtccaacctagcactaaatccctttgcaaagtcagtctgcataacagcatggccaaaascgagggcagctcaggcaacctgagcacaaacaccaggctcaacctctctgaaaatcatctttacacataaacccctggaaaaagtcgtagtgtgaaattg

SEQ ID NO: 30783 - DNA, 201 bp, Homo sapiens
gagaaagcagagattcaggggaattaggtacctttcccatagccttatagctagtcaagggcacatggagttgatctccaaacatctgatttcaaagtctrtgcttttctcggcacatcagcctgtctcttaaaaggcaagtgttatcctgatgagaatgggcctgaagctatacatgtactttcaagggtcatgggggca

SEQ ID NO: 30784 - DNA, 201 bp, Homo sapiens
tctttattcaaagccgctggcacaaaaattctgcttgaatttaattttaggatagatttgatctctgaattggctttataggttttctcagttcacaatartcataacctagttgtttctctcttgccataggtgacaggcaatgcagagccaatttcagaagtgagctcagtagtaaactcatggcaggtgcaggatgag

SEQ ID NO: 30785 - DNA, 201 bp, Homo sapiens
ttatagcattatacttatggcatttttaatgcttgaagaaacattgatctgtgccaccttctgtttttaactaaataaatgcaaataacagagttctttayttctgctgtacagaaggccaactccttctgcagctcagccccaacccctgttcatttagaagtccagcaacgtgttcatggttgtgtttgtgtgtgtgtc

SEQ ID NO: 30786 - DNA, 201 bp, Homo sapiens
tattttttgttgcacatgcgagcatgctcattgacttaattattgtttcttttgttaccttggtgaattagagagggggagatatggagagggaggatggraagttggagagggggaagagagagagagagagaggagaaggaaacccatgtctactgttattttgctgaaatctatctcagcgagtaggcagattgagaa

SEQ ID NO: 30787 - DNA, 201 bp, Homo sapiens
atcccatggcactgacaacccacagagccaacagagaagctcaattatcacagtgcagcctgtttcttcctctgctggtggcagctcagtcagcccagctmtggggcccttccctgcaagagcccattcctccagggtgacctgcagccctgtggctggaggaggttttgacccttattttaaaccctgtgatctcagtga

SEQ ID NO: 30788 - DNA, 201 bp, Homo sapiens
cagcagtattatctgttacctagagagaggctgatgcaggggtgtctgggaggctggagggctgcaccaagggtggatggcagagcctgagccatgggtcyaggccgcagcactgccatgcggctgggaagatggtagtgtgtgggtatagtcatgggtgttgcggcttatctgcacctgcttgcgttcaggcagaagcag

SEQ ID NO: 30789 - DNA, 201 bp, Homo sapiens
gcccacagagaacccacagtctagaatgattatgtggtgatgggatcctccactggggaaaatgcagtggcttttacttgatgcagtttatgatgtttggytaatagaatgtcacataaaaacaaatcccctgattatcccactgccaatgggtggcactgcattctaataaaggcagcacttctttggtggtgtggggga

SEQ ID NO: 30790 - DNA, 201 bp, Homo sapiens
tgaattattcacctcactgcagtctgagttttattcttttctccaagcccttatatattattgtctttggatttcctacatttgtgtggggatctaggctsgaattcttctgcccatcttgcaggtagtataactgagaccctgggaggttaagattatagaacttgttagtgaaggatcaaggaggaagatggtttctaa

SEQ ID NO: 30791 - DNA, 201 bp, Homo sapiens; identical to SEQ ID NO: 3808

SEQ ID NO: 30792 - DNA, 201 bp, Homo sapiens
taacagtgctttatagactggttggctgtctcctggtggcacccaggcacttgcacttccgtgcggcccagataactaactccaggtcttctgcaggaagkggggatatgtgatgtgagctccccagtgggtcttccttggtcacagtttctaaggcatttcttacagcttatgtctccggtttccctggactattgcaga

SEQ ID NO: 30793 - DNA, 201 bp, Homo sapiens
tcaatgagcttgcctggggggcaataagagacaggcaggaaactgtgaccattcctttgtgagtccccaaaacagcctggctgcagctcactaagccattrtcttcctttacacacaaccaaacgtaggcacatggctaaataaacataatgaaaagaaatgggcttggtgtgaaattcttcccagatgcccttccctgcc

SEQ ID NO: 30794 - DNA, 201 bp, Homo sapiens
aagtctgggcttttagtgcacccatcacccaaatagtgtacattgtatccaataggtaatttttttttttcttgagacagagtttcactcttgttacccakgctggagtgcaatggtgtgatcttggcttactgcaacctctgcctcccgtgttcaagtaattctcctgcctcagcctcccaaggagctgggattacagtg

SEQ ID NO: 30795 - DNA, 201 bp, Homo sapiens
ctttgactagggactttatcttaatcattactgtagcctccattccatgctcagaataggggattcttattgattgctttactgattcaattggttgcttyactgattcaataaaccaaagttagaattccaggtaccatgctggtcagagagggtaatgtctttgttccgggaggtttttgatgttcctcaggtcagtct

SEQ ID NO: 30796 - DNA, 201 bp, Homo sapiens
tgtaatcccagcactttgggaggctgaggtgggcggatcacctaaggtcaggagtttgagaccagcctggtcaacaaggtgaaaccctgtctctaataaaratacaaaaattagctgggcatggtggcaggcacctgtaatctcaactactccaggggctgagacaggagaattacttgaacctgggaggcggaggtggca

SEQ ID NO: 30797 - DNA, 201 bp, Homo sapiens
ttgccacaaggtactgtaactattgaactattggtgtatatatatttttttcctgctatcttgtggacctctctttgactagggactttatcttaatcatyactgtagcctccattccatgctcagaataggggattcttattgattgctttactgattcaattggttgctttactgattcaataaaccaaagttagaatt

SEQ ID NO: 30798 - DNA, 201 bp, Homo sapiens
tcacagaatttaagagtctttctcagaaggtgatcagccttggacagactttggtcttcagaccccagagccaaacttttgaactgacagcagctgtggcsaaaaatggtgtttgtcagacctgcaggaagaaaatctgcaatgaagagttggagtggtaggaaaagaggaaaaagagggaacttgttttgccttcagaca

SEQ ID NO: 30799 - DNA, 201 bp, Homo sapiens
gttagttcacttaggataacggcctccagttccctctgtgttgctgcaaaagacatgatttcattttttttctaaggctgagtaatattccatggtgtgcktgtgtgtgtgtgtgtgtgtgtgtgcacgtgtgtaccacattttctttatccagccatccattgatggacacttaggttgattccacgactttgctaatgt

SEQ ID NO: 30800 - DNA, 201 bp, Homo sapiens
ctggatcatttcattccactattgattggaagaggaacagtaaagctgtggtgttagctggagtaaactggagttgagaaactcactgtgtatttttcagaaaaaaaaaataataataattcttaacaatctcaaactactctcaatattgtaagtcaccttgacagcacgaggacttgaatggtttgcctggagggctaa

SEQ ID NO: 30801 - DNA, 201 bp, Homo sapiens
ctgggggctgggttgtggggtgtgggctgtggaaggagtaagggaggtgctttctgctgtgtaatggggcaggtggttgggtgtgaactcgcctgacttayggccccagctgtttcctcttctaactcctcctcccagacgcctgccaggatgccagaggttagagggaggtgtgtccaatcatggactggatctgaggtc

SEQ ID NO: 30802 - DNA, 201 bp, Homo sapiens
aaacagtcatggtagctgtgagatctgcaccggagtagtcagggtgtctcctacagtgggcctggacccgagcaatgcttgtagggggaattggcagctgsaagtctgtggcccacagagtgaccaagaaaaactgcatcatcaggactggccacaggacaccattaattaagtgcttaaggagcagtatgggggtgggca

SEQ ID NO: 30803 - DNA, 201 bp, Homo sapiens
aggaggatgcaaaagtggaaacccctgataaaaccatcagatctcatgagatttattcgctaccacgagaacagtatgggggaaaccaccccgtgattcarattatctcccacggaatccctcccacaatacgtgggaattatgggaatacaattcaagatgagatttgggtggggacacagagccaaaccatatcaaatg

SEQ ID NO: 30804 - DNA, 201 bp, Homo sapiens
aagggaggtgctttctgctgtgtaatggggcaggtggttgggtgtgaactcgcctgacttatggccccagctgtttcctcttctaactcctcctcccagaygcctgccaggatgccagaggttagagggaggtgtgtccaatcatggactggatctgaggtccctctccttccctgcttatgacacaaatgctcagaccct

SEQ ID NO: 30805 - DNA, 201 bp, Homo sapiens
tccccgattgtccacagtgatgatctcttacagactgtcctgcctgccctgcacacaatgggagccagtctggaggaaggtttggtggccatcactctggygggcactggaaagaactctgctggatgccgagggccatttctctctggacttgctggtgttcagtgtggaagtgggagggaaatcaaatgaggggacctt

SEQ ID NO: 30806 - DNA, 201 bp, Homo sapiens
gctgaagaaaagactgagtggttggagacaggcaggcaggcctgagtttcaaatccttaccctgtcactttcagcactttgggatgctgaggcaggcagawcacgaggtcaagagatcgagaccatcgtgccatcatggccaacatggtgaaaccctgtctctactaaaaatacaaaaattagctgggtgtggtggcacgc

SEQ ID NO: 30807 - DNA, 201 bp, Homo sapiens
aggaatgggagagcaaacatagcttggctggagaaggaggtggttttgatcttttcttctccccttcctttcataggtagaggtcgtctcctttataccakctgtcttggggagtagtcacattaattatgcgtgtatttagagctttacaagccttgccaccagacgtgtgtagtgccttacagtttaccaaataggttc

SEQ ID NO: 30808 - DNA, 201 bp, Homo sapiens
gtgagcaattcctgtcccttttaagggctcacaactctaagggggtgcgtgtgagagggttgtgatcgattgagcaagcagggggtacgtgactaggggckgcatgcaccggtaattagattggaacaaaaaaggatagggattttcacagtgcttttctatacaatgtctgtaatctatagataacataaccgattaagt

SEQ ID NO: 30809 - DNA, 201 bp, Homo sapiens
ccaagattgcaccactgcattccagcctgggagcctgggtgacagagcgagactccgtctcaaaaaaaaaaaagtaaataataatactaataaaagagttrctttagaatccaagtcatccaaagaatattgcctttctctcggggccagaactacattttgacaaacaggatcagagtttctgttaagttttgttctgtt

SEQ ID NO: 30810 - DNA, 201 bp, Homo sapiens
tgacctgggagagggaaaattaggcaaattgctgtgtttctccactgtaaacctgaatgggaatgagggaggagggagaaaaagccagacaaaaatggagmcacatgcagagagatggagaaacagagaaaggagaaggaaagagctacagagataaggaaatgagaaaacactgagaaataattgggaaatgagacagac

SEQ ID NO: 30811 - DNA, 201 bp, Homo sapiens
gccaagggcctccctgctttatttccatgcatgaatgtgtgtttcttaccttggaaaggaaagtgggctgagcgagctaggcagtttctgatagacttttscaagatgcaaagcccacccactatcctctttgaacttcagtatttaaatcagaagaaaaatagctttcccagaggcttcagattattactaaatattgtg

SEQ ID NO: 30812 - DNA, 201 bp, Homo sapiens
tgcacttaggtcttgctttccatttgggacagtaagcatctgagagaagagtttgtccctgactataccaaattccaagttctgccaaggaatcctggggyaggccagaaagggaggcaggaatggagccagtggtggacccagcgtttccttccaaagcttttagactcagctgctaaagccagtcatgaagtggacgtg

SEQ ID NO: 30813 - DNA, 201 bp, Homo sapiens
tggtggcctgtcctcctgaagctggggtagctggaggctgcagccagtggggtttctctcccttacacacacagacacacacacgcatgtgtgagcacacrcacagatgcacacacacatgcacacattctcagacatgcacacacacgtacacactcacacgtgcacacaaacgcacacacacatgcacacactctcaca

SEQ ID NO: 30814 - DNA, 201 bp, Homo sapiens
aaaaatagctttcccagaggcttcagattattactaaatattgtgcaaattctatcatttggaatgtaaacgcttacactctctgccctttatacctccarctgtgccctcaaacacattttcctgctctagccaaattgactttcttacagtttatacagtttagtattttccaaccaccttgccttggttcaaactgtg

SEQ ID NO: 30815 - DNA, 201 bp, Homo sapiens
tttgggtattaccaataatgctgctataaacatctgtgtacacgttttcatatggacatatatttttatttatcttgggtatatactgtaagagtggaatktctgggtcatatagcaacacaatgttcaaacatatgaggaactgcctagctgttttccaaagtgactgtgtagcaggacgagctgcagacaaaactcctc

SEQ ID NO: 30816 - DNA, 201 bp, Homo sapiens
cattaaagtgaacaccaggctgtcaagagtactgcttccttttatttttttcttaactaaacaaatgtttattttctgattataaaagtaatatatgtttsctttttttaaaaaaattgaaatgtgctggaagacgtgctgataaattccactgtgggatttggagtcggctcatgcggagggaaatttggatatagcagt

SEQ ID NO: 30817 - DNA, 201 bp, Homo sapiens
tttctacaaagttcaaaataaataaattccaggtatctgagcttaagatggctgggaagaaggactccatttgaggcaggttttctcatttcccagcttaraattgccttcaaggtctttttctttatctcagaacaacaaagacactgcctgaggaagaacctctgctttattatggtgttctgcaacctaagtcagtga

SEQ ID NO: 30818 - DNA, 201 bp, Homo sapiens
caggtgaaaggaagacatggtgggagagcctggtgaaggagtcactgcctctctaccccgccatgcctctgccccttcttctgtctcccatgtgtctgcayacgccgatcaatcccatgacctcccagcagaaattcaagggaaagaaaagaggccctcacaatcagacggcgtgaatttcctgtaatttagaggaaacag

SEQ ID NO: 30819 - DNA, 201 bp, Homo sapiens
ctatgacgcaaaagagggtgaggccagagcatccccaagccgcttccagcccttctgttgcactccacaccttgttctccaatgcattgaccagaaaggcycaccatacactagcattataaaatattgcacaggatgtgtccgaggataaattatgatagcatacagataaagattttatagttcaagaacatctataga

SEQ ID NO: 30820 - DNA, 201 bp, Homo sapiens
tctcgcagggtggactggcagcacacgctgacagcttcgaggaattgctcacggtagatgtggttcgccttgctttccaaagtactgggtggatgaatctracttagcttgagttggaaaatgtgaaactcacctgactcatgacctcaaacacgagcggaccagcagggctaatagcaggttgggtggtagggacagtag

SEQ ID NO: 30821 - DNA, 201 bp, Homo sapiens
ttgggaagaacattgttctttgtggagactggaaagcaagggaaatgtgagaagattaaactactgcaggggtcagcaaactttctctgtcaaaggtcagygagttaatatcttagtctttgcaacccatatggtctctatggcaagtcctcaactttgtcgttagagatggaagcagccagggatggctggtaaaccaac

SEQ ID NO: 30822 - DNA, 201 bp, Homo sapiens
attctgttcatatatttatatagtattttttttctctctcctatggaggagctgaattctttcattactctgtgttgatggactcaaacttacacaattcrggtttcctaggcagtgaatagagccagaaatacaccctgtgattaacttctacataacctattgttccttaaagtctccctccccattttcctattagct

SEQ ID NO: 30823 - DNA, 201 bp, Homo sapiens
tatattccagagatattatttgctcttaaaaaggctcaagaaataggcctaactacatctgaaagtttttctaaatcaagggttggcaattttttttttttaatttgtaaaaggccagataatagagattttaggcttttctgggccatgctgttgcagccactcaactatgcctttgtagcatgaaatcagccacagaca

SEQ ID NO: 30824 - DNA, 201 bp, Homo sapiens
cggtaattgcttttgttctggtacaaataatttgtatctctatgaaataagcatactttgctcacagagaggagaggaggtagtatgtgtgggtggggacrgaggaggcatcagggtttgctgggcagaggaagtgtgccaggctgcctatcacaagcgcgggacaggaaaccacacagcattacccttgaaggtcgaagc

SEQ ID NO: 30825 - DNA, 201 bp, Homo sapiens
cattacctctggtttgggaggctgagcctggtttaggaggaggtcttattgaacctagttccataccatgaggagaatgctcaactaataatattacttgyctaggtttaccgagactggatgcctgtaactcactgagtcctaactacaactctataagtagttattactcttgcccccattttacaggtgagtatgttg

SEQ ID NO: 30826 - DNA, 201 bp, Homo sapiens
aaacttccagtcactttcttttgcatattccttagaccctggccataggccagtgctcactacagaaggagcagtgtttgttttgttaacacacacacacaaacacacacacacacacacacacacacaccctgtactgcaagatcctaaattttagacttagttcactgttttatatggtagccactagacacgagtggt

SEQ ID NO: 30827 - DNA, 201 bp, Homo sapiens
tgctatagaccagtgggttctcaaaatttagccatcatgagactcacctgcagagcttgttcaaccacagattgctggaccccatcctcagcacttccaawtcagtaggtctgggtgggattgcttaagaacttgcatttcctagttcctaggtgatgctgacctgtgtggcctaaggaccacacttggtgaccactgctc

SEQ ID NO: 30828 - DNA, 201 bp, Homo sapiens
atagtcactttgaagtgacctgatttgaaaatggacagagacaaactgctggggggcatgcaggtggttaataaatactgatagagacccccaggtggttrataaatactgacagagacccggtctttctgattagaggaatcacagtttgtctctgtgccccttgcagcgtgtttgtgtgcatacaaatacacacaaata

SEQ ID NO: 30829 - DNA, 201 bp, Homo sapiens
ggactctgcactaatggtcttttccttccctttgttcttgtatcaggcttaccctagtgtttaagtgtcacttaactctgcacgatcattaggtgaacagscttgttttgtatatctggatcctgaggtagtatgtttttgagtcacctcaacagaaaacaaccctcatgtccagatagagctgaatggcgagtgtctggg

SEQ ID NO: 30830 - DNA, 201 bp, Homo sapiens
aacttccagtcactttcttttgcatattccttagaccctggccataggccagtgctcactacagaaggagcagtgtttgttttgttaacacacacacacamacacacacacacacacacacacacacaccctgtactgcaagatcctaaattttagacttagttcactgttttatatggtagccactagacacgagtggtt

SEQ ID NO: 30831 - DNA, 201 bp, Homo sapiens
gcttgcatagtagaatcacctggggagcttttaaaaaatattctgattactctaacttaactggtctggaaggaagaaaacatcatatatatattttaaawtatgtaaacattttatatataataaccagggattatagtgtatagccagaattgagaacaattgctatagaccagtgggttctcaaaatttagccatcat

SEQ ID NO: 30832 - DNA, 201 bp, Homo sapiens
ccctcaaacaaggcccttttctgactgtcacttgcaccaaacagaatgcagaagttttctaacttgaacctttgaaaattttttctgttctgtgtttcacraagggatgtgttaattgttgaggtaattgcagagttccctggctttataatcactcatgttatttattgttcttgttattattagtaaaagccatagtaa

SEQ ID NO: 30833 - DNA, 201 bp, Homo sapiens
cttccagtcactttcttttgcatattccttagaccctggccataggccagtgctcactacagaaggagcagtgtttgttttgttaacacacacacacaaacacacacacacacacacacacacacaccctgtactgcaagatcctaaattttagacttagttcactgttttatatggtagccactagacacgagtggttgt

SEQ ID NO: 30834 - DNA, 201 bp, Homo sapiens
ctttttattgtgttcctttgctatcgcgtttgtgtgatcttttcctgaaaaatgacaggtagtgtttctctgctcactgtatcagtgacatattttccacracttctctattgctattttaaaaatataacattttatagatgtaatcttagttgtttgtaactaggttttgttataggagcaaatttcctaaatggcatg

SEQ ID NO: 30835 - DNA, 201 bp, Homo sapiens
ggtgggagggtgctggggtggcaggggctgcactcctggcagagggaatagcacaggaaaggcccagaggtgagctgggaaaccacaggcagagtggtgcrgggggaaaaagaggggagggcaggaacacagtgggggaacttagtgcataacaacaatgccctcaacccttttgcctggctcttcaccacgtgagaggac

SEQ ID NO: 30836 - DNA, 201 bp, Homo sapiens
atgaagggccgggtgtttctgtgttcacggatgacactgctgatcccatgtgctcttgtcattgttttccttggagggctgagggatgtgtgctgagtcaygcacatgcacagccggagtcccttgtgactaagctgtgcatttgcaggagcgctggcagggtcggtggtacagcctctgaactgggacagcttgaaccca

SEQ ID NO: 30837 - DNA, 201 bp, Homo sapiens
ggtgaaaccccatctctattaaaaatacaaaaattagccgggtgtggtggcaggcgcctgtagtcccagctactcgggaggctgaagcaggagaatcgctygagcctgggaggcagaggttgcggtgagccaagccgagatcgtaccactatactccaggctgggtgacagagcgagactctgtctcaaaaaataaaagaa

SEQ ID NO: 30838 - DNA, 201 bp, Homo sapiens
agtcaaaattggtctttgaattcttagcatattgcacacagtaaccaagacacacagtgtgaattcaataaatggctgattaacatgtaaactctgttgasaatatgtttccatagtttattaagcatgtatctcaaggaaaaaggtctttcatgagaagctgaaccagaggcaaaaaaaaaaaaaaaagtctcaaggcta

SEQ ID NO: 30839 - DNA, 201 bp, Homo sapiens
catcgtgctggaatgcatggccagccccttctttctccaagcacagttcagtgcattttccccccagttgctgcttctcgtaggagattatttctgattcrtattgagttgttactggaaaacacttcagagagataatgagctgggtagttttcctcttcatttttctttgttgttgttgaattcatatgggtaactggg

SEQ ID NO: 30840 - DNA, 201 bp, Homo sapiens
cgcttgagcctgggaggcagaggttgcggtgagccaagccgagatcgtaccactatactccaggctgggtgacagagcgagactctgtctcaaaaaataaragaagaaatgggcatataaatagatctacataagactcactggaagtttagagctctttaaaaaaatggacaacaaaaagtttttccaaataaatgttga

SEQ ID NO: 30841 - DNA, 201 bp, Homo sapiens
gggacaatgtgtccagaaagtggaatcccagctccttctcaccccggctattgatttttggccttgcaattactgcagaggtgctgcctctgtgaacactrttagtgctagttagaaagcttgagcttttgaagcttagctgtttgagctacctacgggtttggaaaaaaaaagaatcttaccatgtgtttctttagcctg

SEQ ID NO: 30842 - DNA, 201 bp, Homo sapiens
ggttggttccaagtccgtgctattgtgattagtgccacaataaacatacatgtgcatgtgtcttaatagcagcataatttataatcctttgggtatatatmcagtaatgggatggctgggtcaaatggtatttctagttctagatgcttgaagaattgccacactgtcttccacaatggttgaactagtttacagtcccac

SEQ ID NO: 30843 - DNA, 201 bp, Homo sapiens
tataacagggaattccttttatggtattcttggcaggtgatctcctgtgtcaacttaaatgtccccagggactgaaagctcagtgccacatgcagcagccrttctattgttggatgattgtcacattagattgggactcattagaagacttttctgatatgagattggaaaatatgctaataatatgtacagtgatgcagg

SEQ ID NO: 30844 - DNA, 201 bp, Homo sapiens
cttgggacagttacatatctttatttccatcttctgctcgtcttccagcatgtggtctacttctctttaaataactggggaaactgaggccaacttcctgwtggagctgtggtttgttgaggggcctgagtgtggctgggcatagagttatttccattctcagtttgagctgttggccttgtagaagcttgggcttgatca

SEQ ID NO: 30845 - DNA, 201 bp, Homo sapiens
tgtgtcttaatagcagcataatttataatcctttgggtatatatacagtaatgggatggctgggtcaaatggtatttctagttctagatgcttgaagaatygccacactgtcttccacaatggttgaactagtttacagtcccaccaacagtgtaaaagtgttcctatttctccacatcctctccagcacctgttgtttcc

SEQ ID NO: 30846 - DNA, 201 bp, Homo sapiens
gccagggtcttctagactcactaagtcagaagcatctcctcctgatctttggtttaatttttcttttgaaggtactcagtccatgatttcagattagggaggcaccacctggcaaagggggagcctgacaatgcagggcagttctaagtaccaggcttgggaccgattctatggagatatggtagatgggactaccctcaa

SEQ ID NO: 30847 - DNA, 201 bp, Homo sapiens
tcacagtagagcagtccccatcatctccagcaatttattaatcatgttcaatgccagacaaggccttaaaaaaacaacacttactcatcagcagaccactrgcagcatggaaatgctactggcttctctcggagaatctcctatactctgcgaacagcatgagtgtctgtgtgtgtgtgttttagtgtgtgtgtgcctgtg

SEQ ID NO: 30848 - DNA, 201 bp, Homo sapiens
gaaaatcaaggacttgtgacattcacattcagttttattaatttcagcaaacctgattattttggtgtgagtcagggcagcataaaaccaatgcattgggyagggctcatgtgaggaaaggagtctgttgtagctagagaggtgtcagcatctgcaggtgggcacatcaacctgcccaaatgtagagcaacattcgaggcc

SEQ ID NO: 30849 - DNA, 201 bp, Homo sapiens
ccagtgaaatgtgatacaacttgagacgcggtgctcctctcatggagggacctgatagaggcatttccctgcgggactgagccccgctagccaattgcacrtagatgtgttttatgtctaggaacccatatttctctttgaagttttgctttcaatgttgaaatcaattgccccaactttgcaagtggcaggctgtttaca

SEQ ID NO: 30850 - DNA, 201 bp, Homo sapiens
tttgcattatggctaattttccatatgtttaaaataagcacaacaccaaggaactgcatggaaacagattcacaccttgtcgaacattggattgtgttccygtagcatcttaaggataatgcttccccatagcatcccttcttgtgcgcatgtaaatcctggtacaacctctgtgggtatgcgcttgattgccagttcccc

SEQ ID NO: 30851 - DNA, 201 bp, Homo sapiens
gaagagctgaaaggaacctgagaattccaattaggcttaaactaatgagctggaaactttggggaaaccactgcagcaatgagggaagagcgtgatcatcytcgatttaattagcgctggaaaaacttggggtccagctggtagcacgaggacggacgctgttcagggggcgcaaagtttctgaaagtgtcagaaggggga

SEQ ID NO: 30852 - DNA, 201 bp, Homo sapiens
tataatcctttgggtatatatacagtaatgggatggctgggtcaaatggtatttctagttctagatgcttgaagaattgccacactgtcttccacaatggwtgaactagtttacagtcccaccaacagtgtaaaagtgttcctatttctccacatcctctccagcacctgttgtttcctgacttttgaatgatcaccattc

SEQ ID NO: 30853 - DNA, 201 bp, Homo sapiens
tgagtggcattttcagtgtatccctgtggaggaaatctccgaaagaaggtagctgagtctgtgaccaaagagaggcttgagtcctgtttccttttcactcycaagagccttcaggctcactcaccccttcccttacagatactttgctggagctcctcctgacatgattgtattagtaaagagaggcgccaataacaaatg

SEQ ID NO: 30854 - DNA, 201 bp, Homo sapiens
ctggacattgagaagcactagtcattctgttttgtagtacagatgtgtttataaagagactccagggaagtcagatgggtaaggattatgcctgtcactcttttttttttttttggcattttttaaattatactttaagttctagggtacatgtgcacaacatgcaggtttgttacatatgtatacatgtgccgtgttggt

SEQ ID NO: 30855 - DNA, 201 bp, Homo sapiens
taatgtagctttgagaggactttgggttatttgccaggccattctttttccttttcttttcttttcttctcttttcttttcttctctttcttttcttttcttttctttctttctttctttctttctctctttcttttttcttttttttttttttggtagacatgggtctctctatgttgcacaggctggtctcaaactcct

SEQ ID NO: 30856 - DNA, 201 bp, Homo sapiens
ccccttgtctcagaaaaagaaaatattagccacgatctttcaaaaaatagatttatagttgatttttatgaagaatactgcagtgcttatcaaacttcttrgtgatatgtgctattcaaggttgtcaggcaagaaactctcattccaaggacatcacccactttaactcccctgcaccctgatactgcccactactctctg

SEQ ID NO: 30857 - DNA, 201 bp, Homo sapiens
gcagttcgagacagacagcaaaagtttatcaccaaggattgatgactcggaatataatgattattcagtagaatttgttttagcagacttcaggaaagaaygggtctgatcctgctgctaaactgagttttcggtgtctgtacatgttgtggggtgacggggaactcagtatatttttggaaattataccaagaagattgt

SEQ ID NO: 30858 - DNA, 201 bp, Homo sapiens
ggtgacggggaactcagtatatttttggaaattataccaagaagattgtcttctgaatttccagaagtattatccctactgatacagatgacaataagacrgcaaaaagaattgcaggaagtcatcagggtaaaagaaagggaaaaaaatggcaattcagctgtgagggagaaacttccagtttgattcaaagctattcaa

SEQ ID NO: 30859 - DNA, 201 bp, Homo sapiens
agattgtcttctgaatttccagaagtattatccctactgatacagatgacaataagacggcaaaaagaattgcaggaagtcatcagggtaaaagaaagggraaaaaatggcaattcagctgtgagggagaaacttccagtttgattcaaagctattcaatgttaaaattgtttggaacttttctaaaagaaatttcactat

SEQ ID NO: 30860 - DNA, 201 bp, Homo sapiens
cccttgagctggctaacaggtattaacttgcaactctcccatctgaagatcagtgtagcaacaaggtgtaaagataatggccacttaaccaaagaggattmtttgttataggcccaatgcaaaaagggaagccaatgctcagcaaaataatcccacaggcatgctagggaggatgacttctgttcaggtcttaactcatct

SEQ ID NO: 30861 - DNA, 201 bp, Homo sapiens
gaggacacaggttttccgtggaagactcaccctgcccaactccttttccatatcaccatctattcctgttaaatgtttccttaaaagttctctgccttccrcttcacccagccttccttgggtttggctgatttgcatgcttgtttacagtttatgaggaggaataaaatgtgccaactgccaagcttttcgtttttatga

SEQ ID NO: 30862 - DNA, 201 bp, Homo sapiens
gttggctcttgggtaccaagatgacaggtcttctgtatgaggtggaggcttttttaagtcgtagccttcagcaaaacatcaaattaccaaatccagggtarcatacttctacacaaatgcctttcctgtagatatattataccatatatattaaatactttagtgttacacgctacattttatgtgcaatagaaagtgatg

SEQ ID NO: 30863 - DNA, 201 bp, Homo sapiens
gggatgtcttatcccaccagcccaccatggtctcccttcgcagcccagctggaatgggccatcccatgacaagtgagaaagtcttagacactcctcccttrccacgtctttctatgtcccaggtgctccacattctccatctgacctgggagcaaagatggacccctcctgagccctctctccatatcccttgacttccag

SEQ ID NO: 30864 - DNA, 201 bp, Homo sapiens
ctccctgtggcttttccagttgcccccgcctcttccgacacctgctttctactctccagtaaatgggactttcaggtcctattcctcatgacctgaaaaayccataaaggaagctaatgacttatttgaagtggatttttcgacatgagtttgtgacttgcagtttgagcagaatcaatcattctgaatgcgggcaggttt

SEQ ID NO: 30865 - DNA, 201 bp, Homo sapiens
acactcagtcaagaaaggacccaggggctgccttccctccctccaaggtcaaaaatgtagcatgctgacatccttggctgggcttcctatattggcaagartacttgaataggaaatggcctgaaggattccagttcagtaaatatttcatgagtaaaagaatgaataaatgaagggcttcccaacccttaaaggaattgg

SEQ ID NO: 30866 - DNA, 201 bp, Homo sapiens
tttgtataggggagatggggctcctccataactgagtcaactgaagactcctccagggtcactcaagtggggacattgaagaccaggtagctgcccacttygccagtgcagagacctgagtcccaggcagcccagatccctggagatagtcacatgttccatttgctctgctgtgttagcattaagatcccacccattggc

SEQ ID NO: 30867 - DNA, 201 bp, Homo sapiens
aaccttctaacctaaatcagctctagaaaaggaaacagtcactgagaaatggaaacaaaacaccagtggttctgaatatccatgattcactgtaacaaaaytgaagggttaggaagccagagagagttgagagagatgaggggtggtaatttccaaattaggaggtccatgacttaactttgatataatttaattttacaa

SEQ ID NO: 30868 - DNA, 201 bp, Homo sapiens
taaattgaatggtccttcagaattggagagaaaatgtggtgtcaatcaaccaacaactctagtgccaaatacttctgccttcctcagccacaatacagtcrttaggggcagaatcaactagctcagtgtgctctgtgctgctgacattaactagctttttctttctcctctgtttttggaaaaccacctggaagacctttc

SEQ ID NO: 30869 - DNA, 201 bp, Homo sapiens
ggcagaccgatgtcttgctgtaacccatgttacctgtgttcaactaacccttattttacttaataacggccccaaagcgcaagtatagtgatgctggtacmtattgtcataattgttctattttattattgccattgttaatcccttcctgtgctaatttataagttaaattttaccgtaggtgtgtgtatataatgcata

SEQ ID NO: 30870 - DNA, 201 bp, Homo sapiens
aaaccagtaatgtagtttctggtgcttcagcgccaagagcatctttatgtatctagatttctttctttcattatttcaaggactggatccattctttagawtcccacccagaaggctgccttagccttagcttagtatctgcaaatggttctgccttacaccccacatggggatgatttaaaccccctcacccctgttcac

SEQ ID NO: 30871 - DNA, 201 bp, Homo sapiens
gagattttaataccacagatacactgtatatctgtgtgtgtactctgtatgtatctgtgtttatacataaaggttgttttttcacttttcaatgtctgccktcctggaggagactttgcccccattgagaatacatgcatgagacacatctctagagacgcatctgggcttactgtgggaggagaagagctggtcccactt

SEQ ID NO: 30872 - DNA, 201 bp, Homo sapiens
tcgctgagagctgagagagatggaggcagagccatcccgggcaaagagaaaaagccccaccctggcatgtttattcctcagtctctggttgtgatgtagtattgagccagggatccaacccagctatacttagcaccatttccagaaggcatgagggcgggagatgggtatataaaaggcaggagtctggggctcctcact

SEQ ID NO: 30873 - DNA, 201 bp, Homo sapiens
gggacatatgccacttctgctgatgtttcattggccagtgtaggacccatggcttagcctaacttcagagggtgcagggtaatgtaatcctgctgcatgcytaggatgtgaagagcaggaaatatttgtcaacagcattaaacatgaccacagtgattataataaatgatttttcaatatccagttgaaatgatttttctg

SEQ ID NO: 30874 - DNA, 201 bp, Homo sapiens
gttaagcggagaggactgtggtactcatgttgactcagcttagggaattaagatgccctgtgaatgtggagaggtggggcaagggcaaggaaggggggacmccgtttgaggaaggttcagaggcataaagaacttgacatgggacagggctggtgaggattccctctgggacatttcccccatcttcctagtgaagaccca

SEQ ID NO: 30875 - DNA, 201 bp, Homo sapiens
ttagtcataaacactaaactaaaaaatcagctttctcctattgtcaagactacttttcccccaaaatcttaagctgaatgctttgttttataaataatctyttattgtattattgatttaacttctagttagccagtatgttctttaaaattgatttaaatagactggtagtgtgcttagagggtagattactggttttaa

SEQ ID NO: 30876 - DNA, 201 bp, Homo sapiens
tgaaatgatttttctgtttcttttctttttttgacacagagtctcactctgtcacccaggctggagtgcagtggtgcaatcttggctcactacaacctccrcctctcgggctcaagcgagtctcctgcctcaacctcccgagtagctgggatttcaggtgtgcagcaccacacccagctaatttttgtattttttagtaga

SEQ ID NO: 30877 - DNA, 201 bp, Homo sapiens
cagcctggttaagcggagaggactgtggtactcatgttgactcagcttagggaattaagatgccctgtgaatgtggagaggtggggcaagggcaaggaagkggggacaccgtttgaggaaggttcagaggcataaagaacttgacatgggacagggctggtgaggattccctctgggacatttcccccatcttcctagtga

SEQ ID NO: 30878 - DNA, 201 bp, Homo sapiens
ttgttttcttgttgccattgtttgctcccataaaattctacagatttttaaaattttttttcatatttattggttttctggttatttagtcataaacactraactaaaaaatcagctttctcctattgtcaagactacttttcccccaaaatcttaagctgaatgctttgttttataaataatctcttattgtattattga

SEQ ID NO: 30879 - DNA, 201 bp, Homo sapiens
attagcagcagttcaatccagtgcacgaaatatttgttgccttttgggatgcaatactacaactcatttacacttcacacatttatcacttttcttacttytgatagattatcttcccagccattctagccaaactgatcatctgcttctgaattcccaaggtgtttaatatctttcctactgatatttccatttaaccat

SEQ ID NO: 30880 - DNA, 201 bp, Homo sapiens
tgtacttcaaagctgcaattaccttgcacaatttcatttgatacattactgattatgcagtgttagaactggaaagcatcttgaggattaactaatccaamtgtatcgctttatagatggtgacctggcgcctggaagggagagacttatttgaggtccctagaactcaggactgtgggctgtcattcctagggagtaggc

SEQ ID NO: 30881 - DNA, 201 bp, Homo sapiens
gagtcttattgcttaatttaaaaaattgaatggattattagctttttaataaacagtgacatttactgtctactaatgagggctcaaatcatgtaatttawtgctgcatctctattttgttcatgaaatgaaacagaaattactacctacttgaaactggacttgttttctgcgctcctatgaaactgaacagtggagggt

SEQ ID NO: 30882 - DNA, 201 bp, Homo sapiens
aatgaaaactctctaggaagtctttctaggaaaaaataaaaagtacacttgatccccttttaccacagttgaagcaggttaatggattcctgaaatctccwttcaggatccctggttacaatcacattcagtttattccagagccacctccacatagttgcacgtacaaatgctttttggttgatgagatttctccaatgg

SEQ ID NO: 30883 - DNA, 201 bp, Homo sapiens
gaaagaattacagttttttaaaaaataattagtggtaaaagaattaatgcaactgggtcactgatttgggttgggtataagtgaaagcttctcagaggggwtggtatttgagcagagattgagatgaagggaaataatccatcaggcagggatcagataggaagaagagatgggctgggaagaagttcattgtggataggg

SEQ ID NO: 30884 - DNA, 201 bp, Homo sapiens
atcttaagatccaagaaggtactttaggatttttcatcgcaagtgatgccaaagaagttaaaaggtaagagtttattttcaactggctttctttctggccyggctgtagacaccttgacccacggaagtaggcaggcttccataaccccaaaactccttaacatgtctatggccatcaactggtgtaagaaaaacttccac

SEQ ID NO: 30885 - DNA, 201 bp, Homo sapiens
ttctttcattatttcaaggactggatccattctttagattcccacccagaaggctgccttagccttagcttagtatctgcaaatggttctgccttacaccycacatggggatgatttaaaccccctcacccctgttcacagggaataagagggcatcctggaatccacatgatctgtgaggtaattagagatgctttcgat

SEQ ID NO: 30886 - DNA, 201 bp, Homo sapiens
tcctattagaaggtcaataacgaattctaaagatagtaggcaaaagggggagaaggttatcactatccagaatccttgtctttttatattttgaagaagayggggattagcattttatttaaactttctagatttggaatgtgtatagaagacttaatgtcgaaaatattaaaaacaaaaacaaaaaccagtaatgtagtt

SEQ ID NO: 30887 - DNA, 201 bp, Homo sapiens
ggaacaaatactattaaagttgaacaggaggatgcttctctccagccctttgtgtctgtttctgtattgtcctgacgtgtcttgatgtccattgcactctrgtgccattttgtctacataccacttccacattcccagtgacctcctcctccctgtgtcgagtttcttgtctatagagcagaattcctgtccttttatcca

SEQ ID NO: 30888 - DNA, 201 bp, Homo sapiens
gagggagagaaggagagagagagaatataacaaattggcatttcataattaaaagtagtatacatacagtacttttaaaaatatatatttttaatttcagyttttattttagatacagggggtacatatgcaggtttgttatgtgaatatattgcacccaggtagcgagcatagtacccaataggtagtttttcaacccac

SEQ ID NO: 30889 - DNA, 201 bp, Homo sapiens
aagattgctttaaatttggagccgatggaatcacaaggctgtgacctctccatgcaggagacagtgtttctagcagcttgaggggctgcagctgccccacygagcttcaacgggtgtcctggtgcaaggttgtcctactttttgagtagcaaggtcttttcacccctttatgagaatgggcacactctggatatctatttc

SEQ ID NO: 30890 - DNA, 201 bp, Homo sapiens
tttgttctctgaaatgacacccacagtctattcctctatagttcatatttttgatcctgcagatgcccaaatgtagagtgcagatcccctccaacaaacamcttaataactgagcagagtacaggggaagactagacgtttccttttatcatcatttaaggagttttccttatctgggtgaataacccaatacagccagac

SEQ ID NO: 30891 - DNA, 201 bp, Homo sapiens
gttcttgtcaatagttttggaagaaagagagctcattgagaaatgctcaagcttttgttctctgaaatgacacccacagtctattcctctatagttcatayttttgatcctgcagatgcccaaatgtagagtgcagatcccctccaacaaacaccttaataactgagcagagtacaggggaagactagacgtttcctttta

SEQ ID NO: 30892 - DNA, 201 bp, Homo sapiens
ggagagtggagctcagaggcaggagctctctttatttatttattttacacttaattatgtgcaaatcagactgatgagggactgggtctggttgaaatagrtaacatcccagtcaatatgtgagttcacactggaggtgggaagcatcgtgctaacaagaaattttgctgatggagtactgtacaccttacagataaaata

SEQ ID NO: 30893 - DNA, 201 bp, Homo sapiens
gtgtagtctgttaaacatgttgacttcttccactgccgtcccttggcacatggaccctccaacttgggagacaccaaaacaagctttgatgaaaagacccrtttccctgctgtcccttgattttcaggcaaataaaaaggatgtttctctctgttcttttgctgtctcccaggatggtggttgttatggtgatctgttctg

SEQ ID NO: 30894 - DNA, 201 bp, Homo sapiens
cataatcaccattttgcagagaagggttcatctcctcagctgagcatacatctgagaccatcaagctttacactttgacttaaagtgagggagaagcatartctccttagagctttcaaaccccactgcgacaggtggaaaactggagagacaccagaggaaaaccccattgttacctgatccctaaaaatcacacatatt

SEQ ID NO: 30895 - DNA, 201 bp, Homo sapiens
tgcaaccagtgaagccaggagaattgtgacaataatttgactcttgttgctttgaagggatttatttcttcacattgatgttataaaatttatccacaatrtgcttggatttaggtctttgaaaatgtaatctgctggccgtggggcggagcttgcagtgagccgagatcgcgccactgcactccagcctgggcaacagtg

SEQ ID NO: 30896 - DNA, 201 bp, Homo sapiens
cctcttatctatggttttgcttcctgaggtttcagttatccccaggcaaccgtagtctgaaaatattaaataggaaattctagaaataaacaattcataakgtttaagttgcatgctgtcctgcttggttccatctgggacaagaatcctccctttgtccagcacatccgtgccatctgcactccctggccattagtctct

SEQ ID NO: 30897 - DNA, 201 bp, Homo sapiens
tggttcaaattaatctgtcctgagaattgtaaagatatccttcttttgttttcttgcaaccagtgaagccaggagaattgtgacaataatttgactcttgytgctttgaagggatttatttcttcacattgatgttataaaatttatccacaatatgcttggatttaggtctttgaaaatgtaatctgctggccgtggggc

SEQ ID NO: 30898 - DNA, 201 bp, Homo sapiens
ctcttatctatggttttgcttcctgaggtttcagttatccccaggcaaccgtagtctgaaaatattaaataggaaattctagaaataaacaattcataagktttaagttgcatgctgtcctgcttggttccatctgggacaagaatcctccctttgtccagcacatccgtgccatctgcactccctggccattagtctctc

SEQ ID NO: 30899 - DNA, 201 bp, Homo sapiens
atacctatattttcctcaatttttctgtcccttattatctatatttaatttttaattcatctcaaacttatttccattatggtatgaggtccatcattgcrtgatgcctgtcttccttttgatttgtgatgacctctttattgtctgtaaaattcttctgataaaatagagtctatttctctactgcttagtcattgttgc

SEQ ID NO: 30900 - DNA, 201 bp, Homo sapiens
atataagtattatttagcatagaaggagaatgttttcaaaaaaagtcttctgttcatgatggttaatccttttcagatgagaaattatttttttgagccartccttttctccctctttccttgtacagattttcccccaccccatgaactttaagttaattttcccttattacctaaacagctccacgttgcgtgcagtta

SEQ ID NO: 30901 - DNA, 201 bp, Homo sapiens
tttaagttaattttcccttattacctaaacagctccacgttgcgtgcagttagtgtactcctcattcaagtagaaggtagtaaggattccttcccaccackgtgccctaggctgccctttactggctcacgggcgtgggagaacaaagccccacccacgggcgtggagttgtctgtcaactcagtgcactggagggcttcg

SEQ ID NO: 30902 - DNA, 201 bp, Homo sapiens
cgttgtcatggggctctttctcaatactttcttctagtagtttcacagttttggatcttaagtcattaattcattgtgagttggtttttgtatatggtgcrcattttttttatttgaaccaagttaagataaaatagtttcatttaattaatttatttaatgattattcactagttatattatctacttcatgatgtagct

SEQ ID NO: 30903 - DNA, 201 bp, Homo sapiens
tccccactttatagtagaggaaactgagagagcatttaagtggcttacctaagatcgcacagactatacatagagaagccaggtttgtctgtcttgaaactttttttttttgcagtgggctatttactatttatttcccagatggctctttacaccattgtgggcagtcctaccttacagtggggtctggtttctcacctt

SEQ ID NO: 30904 - DNA, 201 bp, Homo sapiens
aggctggatttcggagaccaccttgtttttttccaaatgcaggagagaggaaagtagtattagcagcagttcaatccagtgcacgaaatatttgttgcctkttgggatgcaatactacaactcatttacacttcacacatttatcacttttcttacttttgatagattatcttcccagccattctagccaaactgatcatc

SEQ ID NO: 30905 - DNA, 201 bp, Homo sapiens
cttttgttgggccaagctttttagtttgatgtaatcctctttgtccatttttgcttttattgcctgtgttttaggggtcatttccaaaaaattattgcccwgaccgttgtcatggggctctttctcaatactttcttctagtagtttcacagttttggatcttaagtcattaattcattgtgagttggtttttgtatatgg

SEQ ID NO: 30906 - DNA, 201 bp, Homo sapiens
tctcaaacaacaacaacaacaataacaacaaaaacagcagcaaagatatggtgctcagtctcctcttctgcttgggattcaagcttgtctagacaagaagrtggtgaagctcttgatgacagggatggcgggtgaacttgtcttaggtgtgcaagtgtggacccagaagcaaaaatgggtatgctgtgcagaagggttaat

SEQ ID NO: 30907 - DNA, 201 bp, Homo sapiens
gtgcagtgtgttaggatacacacccaacatctcctttaactcatctgttgccgcagactagtcaatgggagcaccaaaaactaggtaaaggctggtagttraactaagtctgtttggctccaaagcttatgttggcaccacaacttcttcctaagacgaaggttggccttcactggtctgactcaaaagtagagaacattt

SEQ ID NO: 30908 - DNA, 201 bp, Homo sapiens
gaatgctagtaccatattgcactgtactttatggccttattattggacatttaggttgttttctatttttctactccatataaataacacttactctgaamatctttaagcataaacattttactgcaccttttgttattttcttagacttgaaacccagtaagtggaaaccatttgtttgtttagcttctctgtatcggt

SEQ ID NO: 30909 - DNA, 201 bp, Homo sapiens
aaatacagtgcttacttatttttgtttaatttgcatttcttttaattttttaaagcatttttcaagaatactatatggttattaactatagtcaccatgtwatacagtagatatcttaaacttatttctcttatttaactgaaattttgtatcctttgaccaacatctacccaaccacccttccctccaaccgccccagcc

SEQ ID NO: 30910 - DNA, 201 bp, Homo sapiens
ttttgtttatgtgagcttttattctgtaagtatgtaagtgtataggttcatctaactgtattgtgccatttacatattcatgtatttttatatatttgttstatttacatgttcatgtctttttatatgatattatttattgatcttatatcttgaaatattctttgaaaagccatttagaatgctagtaccatattgcac

SEQ ID NO: 30911 - DNA, 201 bp, Homo sapiens
gttatattttcttaggctatattcccagaaatggaattactttgattaataatgctgaattactttctgaaaaggttttatcagtttataattccacaatsgaattataagactatttcattgtagagtcatctccactaggtgaagctcaaatatgttgctattaagtagaataaatacagtgcttacttatttttgttt

SEQ ID NO: 30912 - DNA, 201 bp, Homo sapiens
aagcccaggtcattagattctgctggcaggaatcagaaaacctgcaaatcaccaggagatcccagatatgcctggatagaagtggtcctttgacatctgastgtctgctgaaggcagtgctgtggaccacaacctcacatgtaggaatgagcaattggtttcactccctggagagcatgaggccttcagcagcactttcct

SEQ ID NO: 30913 - DNA, 201 bp, Homo sapiens
tttaaatgcacacagcttgtaaatctcttcttgttctgtctgctggatgacttgggacaaagcaagctgagaattaattgattaataacaagctgtgacckgtgtgtgtggttttactgacaatatcctcaggacttgggcttcttggagccatgcttctgtcagtgggaaaagtgctttcatctttagagaatgttacca

SEQ ID NO: 30914 - DNA, 201 bp, Homo sapiens
cagagtcccaaagtggactggtcattgctcataggatattagcaaattaacctttgcacgatccatactaagtttaagatcagccttctccctgatgtttwtgtatttagctactatttacattagaaagtggttacttaatttggtaatttggttcaataaacattgcataagctatcttattttttaaaaaaacaattt

SEQ ID NO: 30915 - DNA, 201 bp, Homo sapiens
tttaaaaaattgaatggattattagctttttaataaacagtgacatttactgtctactaatgagggctcaaatcatgtaatttattgctgcatctctattwtgttcatgaaatgaaacagaaattactacctacttgaaactggacttgttttctgcgctcctatgaaactgaacagtggagggttgctcgtgaaggatct

SEQ ID NO: 30916 - DNA, 201 bp, Homo sapiens
atatctggcttctctgaccagcagtctttcccccagaccatatccctactttcctttatgtggttaactttaattaagctctttctacctaccaagcacacccctaagcagtgggtgtcctcctttgaccttcataacaatctcgtgagaaagatcctcttggtgctttggtttgacacttgcatcttggggatgggaaag

SEQ ID NO: 30917 - DNA, 201 bp, Homo sapiens
agaatgtgtctgcctgttgggcttgtgactgccacttcatttcctctcttctgatgagaagcatctgtgcagcacattgcgtcaaagactcgatttccacytttggctttttacataaaagtcaattgaccttgacctagttgctctcctctgtttgggctcagtttgttatctgcataggaagggcaagatcagccaatc

SEQ ID NO: 30918 - DNA, 201 bp, Homo sapiens
agaggactgtgcagggagtgcatgctccagtgtcccttggccaggtgtgtgggcttcccatagggagctggaggtgatgctggaacagcgtgctgtggaarccttaagtgcagccgagtgctgggttctctgtgagacttcttagggtctggaagactgggtcagacctcagcctcctaggtgatgtcagacagccaggcc

SEQ ID NO: 30919 - DNA, 201 bp, Homo sapiens
taaggtaaataagacacagcccctgttctcaaagagctcttggttacagggacactgattaggtttcctggggttgccaggatcctagcatctgctttccstgagtttccttggaaggaaggtcccatgcatgacacatcctgttcgctgttcttgggtgacgtatgtagccctaaagtcttggcccagtagcagagaatt

SEQ ID NO: 30920 - DNA, 201 bp, Homo sapiens
gtttttgtaactgagctaagaactgaagaaatcaacaaattgccaccaaatcagatccttagtaatacgtgataaagcatgacatatgaaagaggacacakaatttaatcatcttaccccataaatccagccccctgcaatctgtctcttgtgtgaataagacttcaatttacagaaatggaaagttccttttttatctac

SEQ ID NO: 30921 - DNA, 201 bp, Homo sapiens
gaactgagtccgttcctcttatgggtaacttgaagggtcaggactgctccccctacaggctctaactgggatagtcactaggtatgtttgactcacgtagrtatcaactagttgctgatatttccaaatagtagtatgtcacgtaaaaactagatttctggattctttagaaaatctaatgtgacaatgcaagacctgcat

SEQ ID NO: 30922 - DNA, 201 bp, Homo sapiens
gggcgacagtgtcaagacagcaaataaattgcctcctccccttcaatgtctcagtgctgtttttgcagcatgaatggttccagtgtggagataatccttgmtcatcttttcaccaggttcttgaatgtggaaaatgggcaaacagttctccctcaccacacactcctgttatttccagtgtcccgtggccatacacccatc

SEQ ID NO: 30923 - DNA, 201 bp, Homo sapiens
agtgggctgatccaaatgagaggtcagcttgagcagaggggaggatgtgggaaggcagagagtgtggaagccatgtgttgggagcagggtctgagaacatsaggttggggacagcccacgagggaccttcattagcagtgtggattttcacctgcactctgtcggcaagcactgaaggttgtcattagcacactggctgtc

SEQ ID NO: 30924 - DNA, 201 bp, Homo sapiens
gcaaaatgatttgtgtaaactgtctgcctagcattaaaggtaaagcaaacttagaaaccccaaaatgttatattttcatctaatattttcctcttggtttwatagctgtaatcacatatggattcttttatatgggtcttggcatggactgaacaaagagaaaggcagcacagaaagattacataacatatacacagagtc

SEQ ID NO: 30925 - DNA, 201 bp, Homo sapiens
gctagagctgagcatcaggtccatctaatgcaggcattagactgaattagggaaggctgggagttgcaatcattgccccatttcactccaaggaccataaagaggcttggtaaaccctgacacagtgtttgcagtctggcgcggctgataaaggaagatatttctttttttaaaaatctagtgaaatatgtaatcattttg

SEQ ID NO: 30926 - DNA, 201 bp, Homo sapiens
ctgcaaaactgataatttccaaagccaagatgggaatggaaattaatttgtcatttaatttttaataagttaaagacatctgagtgacacaactaatcagyctgcacgtacatgcgggaggagtccttgaggaatcctcagatggaaatgaaatacagcatccaatgctgcatctgcttgaatgcaagcatataaaagatt

SEQ ID NO: 30927 - DNA, 201 bp, Homo sapiens
gactgggtatttcagaacggtatacaaggtattcactggaccctggctggtctcttggagcgcttttcctatgaccccagatgtctagctcactggcaatygggagtcccctccccctacttggagtcacttcacctccatatctggtaccaacccttccccatcttcctgataagaggtaacagatgctgtgcttttcgg

SEQ ID NO: 30928 - DNA, 201 bp, Homo sapiens
tatctggctctagtgtttaaggattagaagagatcaagtctagcaatggtgaactttcatcatctttcatcagctttcatcttctgggttcattctgattkatcagtagcagctacagagaatatttggccaaagatttaaggttcagcagcaaacagtcataatggctctgctctaaagaattccgagggctgggtgcag

SEQ ID NO: 30929 - DNA, 201 bp, Homo sapiens
gtggacagtgcttagaggagaagctcacatgctgagaagcttgggcacagggtcaaagagaggagaaagtaggaactaaagtggtttgctggcaagaaaargagaccagggcaattccagaacaaagaaggtggaggtgctcctggtctcaaccttggtctttattggaccccactgcctttgtgcgctctctcttactgt

SEQ ID NO: 30930 - DNA, 201 bp, Homo sapiens
gttaaataactttccaaggtcacacagcttctgagaggtgaagtcagcattaaacccctcagcccagctctggatccctggatcccataacctctccagamacatatcctactttaagtatcctttttctgcttctgtgcctaagggcatatcttaactctgagcataaatttcctttagggtctggcaggctatggataa

SEQ ID NO: 30931 - DNA, 201 bp, Homo sapiens
gcatgcaccggtaattagattggaacaaaaaaggatagggattttcacagtgcttttctatacaatgtctgtaatctatagataacataaccgattaagtscgggtcagtctttaactaccaggcccagggtgtggcaccgggctatctgcttgtgggtttcatttctgccttttaatgtttactttttctttctttggag

SEQ ID NO: 30932 - DNA, 201 bp, Homo sapiens
ctgtgtggggccagtgggccgttgaagcactctagtcaatgccacacagcctgggagcagtaccagaacccagggtgggaaaatgttggcagggcttccaraaactacttgtagggcctgtcattttcattcaataaatgtattgatcaaccattgagtctccaaccctgcactttctgggtggttatgagaaagagtaaa

SEQ ID NO: 30933 - DNA, 201 bp, Homo sapiens
accttttgttgcccttgaagcatgtgatctctgtgacccacaccctattcatacactccctcccctttgaaaattgctaataaaaacttgctggttttgcrgctcagggggcatcatggaacccgccgacatgtgatgtctcccccagacacccagctttaaaatttctcccttttgtactctttccctttatttctcaga

SEQ ID NO: 30934 - DNA, 201 bp, Homo sapiens
gacacctccatattttgtgatttgtaattaatatatctgtagttttgaggattagattcagcatcattttcctggtaacacaggctgggacctagcttccygaatgaacctgacacagccaacaaattcaacctatgattggctttactccttgggtgttagtgttttttttgcttgtttattttattttgctttaattcc

SEQ ID NO: 30935 - DNA, 201 bp, Homo sapiens
gagaaaagaaaaccaaggtaggacttagttaaggatgtctataatgagattacacatgacatgcaatcttatctggctctagtgtttaaggattagaagakatcaagtctagcaatggtgaactttcatcatctttcatcagctttcatcttctgggttcattctgattgatcagtagcagctacagagaatatttggcca

SEQ ID NO: 30936 - DNA, 201 bp, Homo sapiens
tgccctcagtttgatccctctgagctgcaaggccagataacaatgaccttgtcagacaccacaaaaataattgctcttcaggatttgcgtggggctgcagrgattggaaacgacagacgtttattggaacctttcagctttttggatttaaagattaaggagtgaaagggaatggaaaatagcaaattggaaaaccctggc

SEQ ID NO: 30937 - DNA, 201 bp, Homo sapiens
cctctgaaatgttccctagatagagtgatctgggtgaactttttaacagcttgctttctttcaggcagggggcaatttttatcataatgaaaactttttcmatgattgaaaataagttgtggtgtttttgtgaacctggggtcctaaacacagcttccaaagtctttttatgttagggagtacataaatgcaattgcagtg

SEQ ID NO: 30938 - DNA, 201 bp, Homo sapiens
gggaggatcacttgagcccaggaggtcgaggctgtagtgagctgtgatcgtgccactgcactccagcatgggtgacaaagtaagaccctgtctcaaaaaawttttttaaaaaagtagggagcaaaacaacctgaacaattaccaaaggaaaggatggtgaaaaggtcagacaagcaagaactgtttatagaacacacattc

SEQ ID NO: 30939 - DNA, 201 bp, Homo sapiens
gaaatgggcacctctcagtggagacattagcatttctgccttagccacatggatggagctagtcattgggctgggatatcctgatgtgatgccatccccgmagagattcttaacagaaatacttaagtagggagctatgtaggatgatcaagtctagaggtctaatgtacaacatgaggactattgctaataaaattgtat

SEQ ID NO: 30940 - DNA, 201 bp, Homo sapiens
aaagagggattataaaaccagggcaagcctgtcaaagagaaatttgatttggttctgctgttttacattttaatatgcctgtatgatgacctagcccattraaatttttttctttaaattatcaataggctgtctcaacctctgttcaattgaattttactctactctcccagggaacaaaatgacagagcattttgttct

SEQ ID NO: 30941 - DNA, 201 bp, Homo sapiens
ttttctctttctatccccctaaaccatgtccaaaggagcttacatggttatttccagcgtgaagctgattgatcagctcgcaggacatcgtggatcagagygcttcccccgcccctcttaaccgcctttctgatgtggctgcgtgcatccagtgcccagagcatgccggggttcttgcaagagggactggagggtgaggga

SEQ ID NO: 30942 - DNA, 201 bp, Homo sapiens
actaagagggggctggggttggtaatgagagaagatgctgaaaacaatgggacaaagaagcagggggtgggccaaggagctctaatgagtgtctcctcccrtcttcctctggatagcccagaatccctcttcttcctcagtcctgtatgtaggattagcagaggatttgcgtatttgggttatgttagtggtgggaggtgg

SEQ ID NO: 30943 - DNA, 201 bp, Homo sapiens
ggctgtagggtttccctggcctaactggtgtttgtatctaacaagagtgctccctccccaacccccaggcccttcttgcttttccacccttctcttactcygctcttgggaactgagtccgttcctcttatgggtaacttgaagggtcaggactgctccccctacaggctctaactgggatagtcactaggtatgtttgac

SEQ ID NO: 30944 - DNA, 201 bp, Homo sapiens
gcagagagggagaaagagcaaactctctggtctctcttcttataatggcactaatctcatcatgagggccctatcctcatgatcttgtctaaacctaatcrctccctaaagtacctcatctccaaataccatcacattggggtttgggcttcaacctacgactttggcagggatgggggtccataatgtagcctgtaacag

SEQ ID NO: 30945 - DNA, 201 bp, Homo sapiens
ttcggaaggagttattttctgaaaatggatgccctattgtgactcccatgtgtgcctttctttgagagctatttctcttcctgccactgagaggagttaascattcagaggcattgggtcctggaacactgaggctgtcccaggggatctccccctccctggagcttggtctgcctaggatacaaagccccgggggaaagc

SEQ ID NO: 30946 - DNA, 201 bp, Homo sapiens
tactctagaggctggggtagaaggattgcttgagcccaggaggttgaggctgcccaggaggttgattacgcaactgcattccagcctggatagcagtgatkgtatctctaaaataataataataaaaaatctcagatgttgagtttaagatgaacggggtctttgtgccctctgaaaacacaaactccctgaggttggtga

SEQ ID NO: 30947 - DNA, 201 bp, Homo sapiens
actataaatgccaccaaggctggacttgtgcattgttcctgttaatcagcaaatacccagtacccagcaaaacgcttggcacataatagatgctcaatacrtcatggtcaggtgaatgaactaatccacattgagaagaaatgttatgctttgaaaattctaccaataattttagccttgctagaggtctgaaaaaatagg

SEQ ID NO: 30948 - DNA, 201 bp, Homo sapiens
cttagaatcctcatgtctgcaatcccaccacttttagaagctgaggtgagaggatcacttgaggctaggcattcaagactagcctgggcaacacagtgagrctttatctctacaaaaaataaggaaaattagccgagtgtggtggcacacacgtatggtcctagctactctagaggctggggtagaaggattgcttgagcc

SEQ ID NO: 30949 - DNA, 201 bp, Homo sapiens
atgttataataataacaagtcttagcttctctttccactggctcagcaggatggatcaaagccacccgccatggccactgcaggtagaatagatggtcacytatgggggatgacctcaagagctccaggtgtctgccgtgaggcatgacagtgcctcagattcctcacttagaatcctcatgtctgcaatcccaccacttt

SEQ ID NO: 30950 - DNA, 201 bp, Homo sapiens
tccattttagtaaccagcccaaacattcatcaacttagagcccatcaattctgatttcatgtttagtattgtaggcaaggacttgacacattttgtggggytttcttggggggtgtggggtcatgataaatacgttttaatggcatctaagatatgccagtcagttcatatgactgcattctgtttcagacaatcttatta

SEQ ID NO: 30951 - DNA, 201 bp, Homo sapiens
tttggcacagagaagaaatacattctgaaaaggtgcaaatcactattctcttctgctttcttcctttggcttcaacttgatcactagttaactccaccccrgaaagctgtgcagtgaggcattctctgtgctggcaccatttggacctcagctaacaagactcaaacatttcattttgtttattctatgaattgcttttag

SEQ ID NO: 30952 - DNA, 201 bp, Homo sapiens
ggccaaatacatgatcatcacctccttttgagatgagactctcctggtatgacatccagtactcagagatgccatatgccttctggacttgtgtccctatrtgagaaatattcaaccatgctctatcaagtctctatttgtcaggacctggattccagcagccatttgtgcccccgtccatctttctgtgaaactgggcca

SEQ ID NO: 30953 - DNA, 201 bp, Homo sapiens
cagaaataaacctggttgggataatggagtgagggaaaataccatgtattctggtacttttacatgtggtgtagtcttttaatcgccctctgaacacctcrtgtgggttgattctttttcataatgcctgatggaagaaatctcatttgatagtctgcagcccactggtctgggagtaagagatttggctcaagtccattc

SEQ ID NO: 30954 - DNA, 201 bp, Homo sapiens
gtaggggccaccacagaatcccctccccattctcctttgtttcagataacacctgctattaagttttgtcaagttctttctgtgaagtattagttgagaayaattctgcttttctgaagcaggggaaattatgggaagtcagatttttaagacagagtggtgccatgttgtggaccagcacaattccaagtgtggtccatg

SEQ ID NO: 30955 - DNA, 201 bp, Homo sapiens
tttgctaggatgagaggctgttatccaaattcaaatttggcattcaattcaattgctgttcatggaagaaacatccggggacacctgcctcactgccccartgggtcagatggaaatcactttctaggggagcttctgtgactcatttcctttgctgggatcccttctgtcttccacctaaaccatcacaagggcctcctg

SEQ ID NO: 30956 - DNA, 201 bp, Homo sapiens
taacatccaaatcaagaaacatagctgctttacactttcttgaaataagcacttacctggagatgcaaaggcacttgcgtgctctttcagtagcatttctyttctccagcatcttcccttgacatcagccttgcctgcacattgcccagttgggcaaatttctctcccaggtagaggttaccaggcttgcattccctatgt

SEQ ID NO: 30957 - DNA, 201 bp, Homo sapiens
gaagcctttgtcccacaccagatttcttccttgtgttcagagaatctttcaggtgctcacaccacccttgtcttctgccttgaaacctatttctctagccrctataccaccctcctcagaccacttcacctcccacatcccccacaaatacttcttatttatctacatgttctgagatgtgttctgcattatgccaggcca

SEQ ID NO: 30958 - DNA, 201 bp, Homo sapiens
atttctctctgtccacaccatatgtcagctgtgtcgattcttatgccatcctctttgaaaagaactcagagtgcttttgaaaacccacattttgcaattgytgctttatagagtgtcaatgtttgtctaagttaattctcaggtagtgacgatcaaagatgtaacagttcatccagggtttacctagttaattccagcaca

SEQ ID NO: 30959 - DNA, 201 bp, Homo sapiens
tcacatgactcacaaatgaaatgaacactccattttcttggcccaaaaatatatttcaaaataagggagcaggctttcaacacagtaatcttgcttgcgasatgtctagaaaccaaggaataaattgtccaccactcagcagtgcattattgtaggtatagctatttatcaggacaaattcactcaggtcagggagtatca

SEQ ID NO: 30960 - DNA, 201 bp, Homo sapiens
tctagtcagaccggttctctgctcttgaaccctgttaagatgattatcaatgacaacgcctgcacagcaggacatggaagttccttaataattctagtttygccctgaccttgtgatctcgccctgaccttttgccttgtgaccttttgttgcccttgaagcatgtgatctctgtgacccacaccctattcatacactccc

SEQ ID NO: 30961 - DNA, 201 bp, Homo sapiens
catatgtcagctgtgtcgattcttatgccatcctctttgaaaagaactcagagtgcttttgaaaacccacattttgcaattgctgctttatagagtgtcartgtttgtctaagttaattctcaggtagtgacgatcaaagatgtaacagttcatccagggtttacctagttaattccagcacagaaccagaaacaagattt

SEQ ID NO: 30962 - DNA, 201 bp, Homo sapiens
tgtttttatttcaccggctgtaacagaaaggctaccccatggcactgctttgaatgtgttttatttgtggctctggttggaatcgactgtcttgttctggmctttcttaatgattttttccccacacagcatcagtaaacctttgatcacacccatctgacctggcagttgtttccaaagcatctttgctctaattcattt

SEQ ID NO: 30963 - DNA, 201 bp, Homo sapiens
cccaccatgtctccttagtgtgcttttgtgactcgtctttccttacctttcatgactttgacattggtgaagagtgctggttagttattttcataggcggkctgtatattttggtgtgtctgatgttttctaatggttaaagcatatgggtttttttttgttttatttatttattgctattgattgggtctctcctgccac

SEQ ID NO: 30964 - DNA, 201 bp, Homo sapiens
tgggctaatgtgtaataacttgacatttaacgtatcgtagttgaatatctcagccaaaagccattttcagcaaatgccattctggcccccaaaatgatggrgttttgagggccatgttggttggacaatagaatctaacttctaacctggccatggcactccctgttaccattagtgagtgtgcaaaactgtagagtggcc

SEQ ID NO: 30965 - DNA, 201 bp, Homo sapiens
tatacagaaaatttgcaaattagtacagagaattcctgtctacctgttagccagtttcccgtaattgttcacatcttacatcactatagaatagaacaagkttcatgttggtctaaaactgcatgtcaaactttaagccttcctcaaatatcatcacttttcccactgatgctgtttttcttttccaggatccagtccagg

SEQ ID NO: 30966 - DNA, 201 bp, Homo sapiens
tcaaaatattatacagaaaatttgcaaattagtacagagaattcctgtctacctgttagccagtttcccgtaattgttcacatcttacatcactatagaawagaacaaggttcatgttggtctaaaactgcatgtcaaactttaagccttcctcaaatatcatcacttttcccactgatgctgtttttcttttccaggatc

SEQ ID NO: 30967 - DNA, 201 bp, Homo sapiens
ttacatcacttagaataatagtctccagtctcatccaggtcactgcaaatgctgttaattaattcctttgtatggctgtgtagtattcactcacatatatrtgtgtgtgtgtgtgtgtgtgtgtgtgtgtgtgtgatgtgatatatatatgtgtgtgtgtatatatatatatatctcacagtttctttatcctctcattga

SEQ ID NO: 30968 - DNA, 201 bp, Homo sapiens
aggtgtgcaccaccatgcctggctaatttttgtatttttagtggagacagggtttcaccatgttggccaggctggtcttcaactcctggcctcaagtgatyggcctgcctcagcctcccaaagtgctgagattacaggcgtgagccactgcgcctggctaacctttttggattcttaaatgtgttcatgggctgcatcagg

SEQ ID NO: 30969 - DNA, 201 bp, Homo sapiens
tatagagcagatactctgcccacattctgctggccagaacttgatcttccagtccatctaactggagggaggctgggaaaggccagccatacgccattgtyatcagtcctgaccaggtgcttggtgaaccatggtctcttagtgccctgtgggacttgtaagtttttgaagtgtcttctcaagtgtgatctcactccatcc

SEQ ID NO: 30970 - DNA, 201 bp, Homo sapiens
gagggctagggcccatgtactgcttgggttgtggggggaaatgtataaaaatagccccccacctggacaacctcagagtcttattttcacactgcttctakcatctgccttcatggacctaacaattatgtcaacatcctaccttgaaaatgctccacttctgaagatgtgcttcgagggagtacacacaatccttgccac

SEQ ID NO: 30971 - DNA, 201 bp, Homo sapiens
ctgactggcagggtacccaagtcctgctcactgcgtttttgtaactgagctaagaactgaagaaatcaacaaattgccaccaaatcagatccttagtaatrcgtgataaagcatgacatatgaaagaggacacataatttaatcatcttaccccataaatccagccccctgcaatctgtctcttgtgtgaataagacttca

SEQ ID NO: 30972 - DNA, 201 bp, Homo sapiens
  misc_feature (1)...(201): n = A,T,C or G, or insertion/deletion polymorphism (see Tables 1-2)
atccttttctggggcaggggtagaagaacagcccttgagcctccccaaacccagacatcttccaagagtgctgagcagctctgggcagggccatctgaaangctctgaatgccccaggcaagccctggtttggatccatccagatgatgatgtttgctctgtgcacacacttaattcaggcttgtccaggctgcgtcctct

SEQ ID NO: 30973 - DNA, 201 bp, Homo sapiens
ccaaaacacccaccagcctaaaataattaccatctgtccctgtaaagaaacaattgccactccctgtatgcctgtcaatattcctcttcaagtggcctacrggacttgctccataagttacctatggcataggtaatagataagatataacatctgtccccttctcatggggacgtgtctacattcacttccccaagctca

SEQ ID NO: 30974 - DNA, 201 bp, Homo sapiens
acagccatgctcactcatttacgtatcgtctgtggctgcttctgtaagaagctacaaaggcagagttgagtagtatccggagtccaaaacacccaccagcstaaaataattaccatctgtccctgtaaagaaacaattgccactccctgtatgcctgtcaatattcctcttcaagtggcctacaggacttgctccataagt

SEQ ID NO: 30975 - DNA, 201 bp, Homo sapiens
ccatggcctcaggtggaattgcaatgtggtggctgtttggtccaagtactaagtgctgtaaagacgataacctgctctggaaaaggaaatcgctagtgccktgagagaacagttcatgcattctcctcctcttgtgcttcccagcctctgccaccactgcttaattctggggcttacctttagtgaggtcatttgccctgt

SEQ ID NO: 30976 - DNA, 201 bp, Homo sapiens
tattattcctaatactttaaaattatcctcttagtgtttgtaggacctgtagttctgtctatcatttccagacaactttaggtgttggagagttagtttcycaccaatttctttttaaacacattgagtttctttcaagtcaggaccaggccatctacttccctcttcaagatattcgtcatgctgttccctcggcctaaa

SEQ ID NO: 30977 - DNA, 201 bp, Homo sapiens
tttgttcatttcatcagggtgtcaagttttggagacataatattattcctaatactttaaaattatcctcttagtgtttgtaggacctgtagttctgtctrtcatttccagacaactttaggtgttggagagttagtttctcaccaatttctttttaaacacattgagtttctttcaagtcaggaccaggccatctacttc

SEQ ID NO: 30978 - DNA, 201 bp, Homo sapiens
ggtttttgatatttgtatatattgttgtatatattaataatttcttccattttattgctgctaatattccattatgggatataccacaatttgtttatcaraccaccctgttgatggccattaggttgtttccaactttggcttattttgaataaagctgttatgaacatccttgtacaaatgattttgtggacatatatt

SEQ ID NO: 30979 - DNA, 201 bp, Homo sapiens
acacatggagcacttactaagtaccaggtactgttctagacattctgtactgatcatctcattcagcccacatggcctcctgagagatgtgtgcagttacyattcccattaaggcagggacagcacagcacattggtgaaatgaggaaaggcctcagagaggaggtagtttatgacttgaaagttacaggaagcactggat

SEQ ID NO: 30980 - DNA, 201 bp, Homo sapiens
aaataacccatttggcttcccaatcactctgatacctaaaactagcagaatttatgcttgcggctggaatggctctgttcagccagaaagctaaagtttaygactgaaccctttgctctgaaatgaaatctagtctctttggcgcgactttattaggccatattgtatggcgataggagacataagtacccagaatctgct

SEQ ID NO: 30981 - DNA, 201 bp, Homo sapiens
ccaaatgtctttttgatgaggcctaaaatccactctgagaaactgcagaggggaatttctgaaatcgcttctaacttcctgtgaaaatattctctaactgrcaagagattgtccagataacaatgaatacacaataaagctggcgcttctgcctttgctaccaggctcacaaataacccatttggcttcccaatcactctg

SEQ ID NO: 30982 - DNA, 201 bp, Homo sapiens
gtgggaggagtgcaaaatgaggatacagtttatgacagttttttttggaatagacacatgtccagagaaatgggcccacattcacttgtatgtgtgcataygtttgcatagaattctcttttaaatatttcaaatttataagaaatcctttcttgtgatgaacagatttatcttgaaaagtgtttcccattttaaaagtca

SEQ ID NO: 30983 - DNA, 201 bp, Homo sapiens
gatttgctgactattctttcccatatgttaatgaaaacccatccagcaagtgcagctttgcccagggagagctctgcactggtgttgactgcaaggagaasagctgtgtgctgcaatgagttacctcagtggatagacatgtattattgacttgaacttgctcatgggacaggtgagcatggggacagggaggggtctctt

SEQ ID NO: 30984 - DNA, 201 bp, Homo sapiens
ttggccaggctggtcttgaactcttggcttcaggtgatccactcgccttggcttcccaaatactggaattacagacacgaggcactgcgcccggcctgatyggcttgattttaggctacaggttcttatggggcttctatgggttgtgacttcaatgttagttgagttttcaaagcgttggcagtgctatttggatctgtc

SEQ ID NO: 30985 - DNA, 201 bp, Homo sapiens
atataaagtttgctgatctttgttaaataatcggctttggttttattatttcctgtattttttgtttgtttgtttcctttctgcttgctttagatttactktgctcctcttctctagtttcttcttaagatgaagcttagattttggatttgagactcttcttttttggtgtaaacattttgtgctatatatttcttcctg

SEQ ID NO: 30986 - DNA, 201 bp, Homo sapiens
aggggaggaaactgacgtgggaggctggctcagttcccttagtgatggcagtctgatggaggtgctgacccaagtggacaccaaatgttttgtattgaaamataatacagtgcagcattatggggcagggatggggagctgctggcccatgagctggatatagtcttgatgtgattttatgtcattaaggaaacaattact

SEQ ID NO: 30987 - DNA, 201 bp, Homo sapiens
tttccttgcattttctagcttctggaggctgaccacattccttggctcttgtccctgtcatcgcatcactccaacattgtgcttccattgtcacatctccyatttcttcttctttagccaaacctcctctaaaaagacaatagagattacatttagagcccacttagataaccttcctatcacaagatcgttaatcacttc

SEQ ID NO: 30988 - DNA, 201 bp, Homo sapiens
agtgattctgctgcctcagtctcccaagtagctgggactgcaggcacgagccaccacacccggctaatttttgtatttttagtagagacggggtttcaccrtgttgcccaggctggtctcaaactcctgacctcaagtgatgtgcccacctcagcctcccaaagtgctgggattacagcatgagccaccgtgcctggctga

SEQ ID NO: 30989 - DNA, 201 bp, Homo sapiens
atgtgagaagttattcaaggcagacgtcctggaagaggtaaagaaacgacaggagctgggttgggagggaagagggggaacagcgtttctgaagtgggtarggctggtgggagcagggatgggcatcagcaggtgccactttccctctgtgttggaaaccagctctgactgctcctcccttcccctatgtgcatggggcat

SEQ ID NO: 30990 - DNA, 201 bp, Homo sapiens
tgattaatgcttgcaaaaggggagaaaaaaattgatgtaatggaaacaaaatggtatatagtcttggcagcatgaggggggatgtctgtgtgttttattartatccccttgatatcattgtcttgtaatgtatatatctgccttttccctggcatagtaagcctctagtttactggaaatgtgatccatcatgaaagagga

SEQ ID NO: 30991 - DNA, 201 bp, Homo sapiens
aatgagctcttcacgtttctttgattaatgcttgcaaaaggggagaaaaaaattgatgtaatggaaacaaaatggtatatagtcttggcagcatgaggggrgatgtctgtgtgttttattagtatccccttgatatcattgtcttgtaatgtatatatctgccttttccctggcatagtaagcctctagtttactggaaat

SEQ ID NO: 30992 - DNA, 201 bp, Homo sapiens
tgttgggagatgactcataggttttgatcccatctccatctctgcattatcttggacaagcaacctgacttaggtgcttgcttgtctttaaaatgcagaaygttagtacctatcatgctagctcattgggaagttgggaatggcaaataagagaatggccttgcaggctcttgagggaacagaaaagagaaaagtgggttc

SEQ ID NO: 30993 - DNA, 201 bp, Homo sapiens
ttttaaagaaccatcaactgtttggaaccttggtgctatcttgggccaggcgtcttgtctctagaaccattcagagatagctggctgaaagttgttgatgygattctgctttcctgaatttcatggcaaggccttggatcacttggcaaacccatcttttacagctacttaattttctgtgtgcttaagatatggatgtta

SEQ ID NO: 30994 - DNA, 201 bp, Homo sapiens
agttccatttaaagaataagataccattctactccctgacaacacaccaagcattggccagtgttgggggcggggtctgagttccaatgtggggaagattytattaggaagcatggaggcaggaagtctcttccctggaatatatttcttctctctttaggtctaaatatgtgtgtgtatgtgtgtgtgtgtgtgtgtgtg

SEQ ID NO: 30995 - DNA, 201 bp, Homo sapiens
gtcacagaaggaggggaaggaattggaggagggcagattgggtagggccttgtgagccttgtatatggcttttcagttgtttaatgaaaatgggatcttaytacattcttgtcccctgcctcttgcttttctttttaaatttcaatttattattatttattgatacataatattttacctatttatggggtatgtgtgata

SEQ ID NO: 30996 - DNA, 201 bp, Homo sapiens
gaaaatcaatcaggccatgggcctaaaggcaagcaaggaaggtaaataataataacatcagggttgaggtttcacacttaatctataaaactacttttaayaggcccctaggtgattataaattcgtggtggctttctctttattgggattatatgggtctattccatatttccaaaggaagcccttcctattatgcaggt

SEQ ID NO: 30997 - DNA, 201 bp, Homo sapiens
cagtgaaccgagatcgcgccactgcactccagcctgggtggcaaagtgagactcagtctcaataaaaatgaaaacaaaacaaaacaaaaatatcttacagwgaagtgaatgcagccaatgataagtgctatggagaaaaataaaacaggataaagttcctccctgttttgtaattttaaaggagggatcagggtagaattc

SEQ ID NO: 30998 - DNA, 201 bp, Homo sapiens
gttatttgcattatggctaattttccatatgtttaaaataagcacaacaccaaggaactgcatggaaacagattcacaccttgtcgaacattggattgtgytcctgtagcatcttaaggataatgcttccccatagcatcccttcttgtgcgcatgtaaatcctggtacaacctctgtgggtatgcgcttgattgccagtt

SEQ ID NO: 30999 - DNA, 201 bp, Homo sapiens
cttgggtttgaagcccagatctgccacttactaggcctgggaaaattactttacctctttttatctcaattttctcactaagaatactaaatgcacctggyttatcaaatgactatgagaattcaatgagatacaggactttctattgtccatacagtacctttaagtaagccagaaaaagtcactcttttctcaagacac

SEQ ID NO: 31000 - DNA, 201 bp, Homo sapiens
cctcaaatgacataaagcagccaaatacctgtattaaaaacctacactttccctccaggatttagtctcccttcatttgacaactgggcactggacaaggkttacagagatcaaagatgttgcacttgtctggaggagcctttatcagatggccaggttgtctctaatataaactgtactattcccttaacctttactaat

SEQ ID NO: 31001 - DNA, 201 bp, Homo sapiens
gcattatgtagccaactgatagttaacattgctccacataaaggaacaaattgctttggagctccttcaatcactttagcaacactgatagcaagggataycttgatttaaaaaatcctcctatgctcattatgcagccaaaggtctcagctcagcagaactctgagctcagatccagcttacaaataaagatgttgcatt

SEQ ID NO: 31002 - DNA, 201 bp, Homo sapiens
ctcatcagggagggcactgtcatctctccctggagtacccacttttggcttaggatgcacaagattgtcacagaagcggattttgcaagaaggaatttcayaagaatagtatttttgaaagcagagtgtggaacccttggacttgctctttgttttcacaatggagtcttccatccttctagttcaactattgtatattgt

SEQ ID NO: 31003 - DNA, 201 bp, Homo sapiens
ggcacagaaccctgagataaggaacaaactcaacttttctatataatcacatggccaagtgtcaaggtggacagtgagaaagaaagctcaaaatatgcctrcagaactcaaaccagacagggccatgggggacccaaggatgaaatgcctcagccttataccttagatagcacatgcggataggagagactttctctgaaa

SEQ ID NO: 31004 - DNA, 201 bp, Homo sapiens
ggccctgcatcttctgatttgagtgtaaatggctcaaagctcttcaaggaaagattggtttataacttcttggaaaagtatcactcctgatgatttacctstcagtggattttttatttttcccaaagactctagtgaaagaggcctttatctctggaagccaagtcccatgagcccagtgcagatagaggcaagttcttt

SEQ ID NO: 31005 - DNA, 201 bp, Homo sapiens
ctgattcggtcctcaggtcatttcaagggaacacattggaaagtcatctccacgttgctcttctccattgtacgcaatacaacattttaaggaacaaacaaacagtaccttcttcctcatgaacattattctgtttaacagggagccaaacgaagttgcaagagtcctcattttcccatggtgttccatagagctgtttgt

SEQ ID NO: 31006 - DNA, 201 bp, Homo sapiens
tactttctctccatgtaaaactggccctgagtttgtcatcatcataattgtagacatgtgtgtcatattttatggttttaaaagagctttgacatccattrtcttctttagtactcgttggaccatctgtgcattttagcatcccagggtaacttcagagcagggcatctaagctctgtatagacagcgcagctctgctgg

SEQ ID NO: 31007 - DNA, 201 bp, Homo sapiens
ataatactgatgtcataaaaataatcagatttcagagctaaacatggactgttttagcaacaatgattaaatgttctgcatatggcaagagctccctaacrcactactaatatcactgtaaccatcatttagagtttagtaatcaccatatttaggtcatttttccaaagcaccaaggagactcagactctaaataggttt

SEQ ID NO: 31008 - DNA, 201 bp, Homo sapiens
tagaaagaagacaaaagtcagagtctatgctgtttccctgtgattacttctcagtaaaccagagtccagtgtctcattcaaaggcagtgctccttctctcrgccagtcaataaacttccaaaaaaacagctttaggggagggaaggtggcacctttctccatttgatgcagtaccagttatgtccttaatgaaacctagaa

SEQ ID NO: 31009 - DNA, 201 bp, Homo sapiens
cagccactgttgagaggcctggcacagtggtggttcttaaaccagaggaacatacctgaatacctgagaaacttcaacacacacacacacacacacacacrcacacacacacacgcacacacacacacgcacacgtactttccgaaatctattctgtgaggctctttgggtcgtggtaaggacaattgctttggaacaagc

SEQ ID NO: 31010 - DNA, 201 bp, Homo sapiens
cgtctcttttctaaataggtactccatgaaaatatgttgttgaataaatgtactattactttgtacagggttgagggaattagatatgacttcactgaagrggtcaatttcgtctgagttcatttcttggtcaatatttttaaatgaatgaatggattccagtgtcctttttctctgaccacttctgtctcagaaaaacaa

SEQ ID NO: 31011 - DNA, 201 bp, Homo sapiens
tagtttggttgtgctgtatagaatcataagccaaagtcaacagtggtagtcaaattcagggttggtaagtttttccataaaaggccagatagtaaatattstaggcttgcagaccatgtgggctccacgactcaactctgccacagtagtttgaaagcagccacaaacagccttggtgtgactttgttccagtaaactttc

SEQ ID NO: 31012 - DNA, 201 bp, Homo sapiens
catttgtatccccaatatggttagcccagtatctggctcctagtaataattatagcaagcactgactgaacatttcctatgtgccaaggacaattttaacygttatagatattaattcattcctcacaataaccccatgaggtaggttactattactgttcccattttatagttggggaaactgagatactttgagttgaa

SEQ ID NO: 31013 - DNA, 201 bp, Homo sapiens
caacctatctgcctgccttggcctcccaaagtgctgggattacaggcatgagccaccgcgcccagcttctcatctttattttttacatgcagtcatagacwttcaggtttcatataagcagccagggtctctcagtgcatcaggagcagagccagggtcaaaacttacatccatttgaacccaaggcacagttttttctta

SEQ ID NO: 31014 - DNA, 201 bp, Homo sapiens
atgaaataaacagcccaagtaaagcaccagcacatatgaggcacttgaaaatgttcactccttttcccccagacgctgggaaatagttcagatgccccctrtcccaggacccatgaagcagctcaccgcagcctctctatgttgatttttagatttccttctgttgattattctccacggaaggcgactggagcaaaagag

SEQ ID NO: 31015 - DNA, 201 bp, Homo sapiens
aatttatctaacatactggagcctccactggtctgtaaggcagaattaagaacaccttgaaagaacatgaaaaaatgaaataaacagcccaagtaaagcamcagcacatatgaggcacttgaaaatgttcactccttttcccccagacgctgggaaatagttcagatgccccctatcccaggacccatgaagcagctcacc

SEQ ID NO: 31016 - DNA, 201 bp, Homo sapiens
cctgtgcaaatgacacaggcttctagttcccaaacttaataagagtaagtgcgtgaagaagagacctgcagacacttaattcaaacagtctagaattctgrgaataagttatagtacaagttatatgtggctggttatagattcagccttgatgtttatgttccctgtttcaagtcacacacatcagattactcacttgtc

SEQ ID NO: 31017 - DNA, 201 bp, Homo sapiens
ctagatatttacaaagaaggctgttgtgaggatggaatgagtgtatgtttttatctatacataagttacgtatgtgtgtatatatgtgtatacacatgtartttagagttgcctggtgtattaagtgcaattatattgcttgatgttatttattaccatatgaaatggcctgaggacgggaccatcttgcatagaaacctg

SEQ ID NO: 31018 - DNA, 201 bp, Homo sapiens
agctctttcagagataattggcctttaattaattgcatgcattcctgagtccacctgggtatccacagactgggtctactctgcctccccactcttccaamtttttgactttggttttttgagtgccatccactgttagtgattgttacatgaaaatcgcaaagtcctatgtaagccataaggaataaaatatcagatttc

SEQ ID NO: 31019 - DNA, 201 bp, Homo sapiens
gattcttttatatgggtcttggcatggactgaacaaagagaaaggcagcacagaaagattacataacatatacacagagtccggtgcccagcgaggatggrgcccgagaagcggcaatggtcaggacttaatgcgaaaatccagtagaagctgacactcaccctggcccttctcggctggcaggatatagtcactgatgtg

SEQ ID NO: 31020 - DNA, 201 bp, Homo sapiens
gtcaatggtataagtctagatctgaaggcaggaggagactgatgtcccagcttaagactgaccatcaggcagagggaggaaattctcccttactcctcctytttattctattcaggccttcagtgggttagatgaagcccacccacatgggttgggttgagggttgttgggggagcaatctgctttactcactccacaaat

SEQ ID NO: 31021 - DNA, 201 bp, Homo sapiens
tcccattaccacattctaggcactgtgtcaagtcttactgaagttactaaaaggaaccctcaatgaatgttttgtgaatttagacatgaatgaatgaacaraagaaaagggacaagggctggtgagctcattcatgggggagaaggaagtaagtaaagaattccagtgtgttgcattgaatatggcaggagagtgctgggg

SEQ ID NO: 31022 - DNA, 201 bp, Homo sapiens
agctgaagggctggggatgacttaggtaggtgcttctgggacaaagtaagtatattagggttctctacagaaacagagcaatggtgtctctctgtgtgtgygtgcacacacatgcgtgagagagagagagagagatgttgattataaagaattggcccacagggttatagtggctgggaaatcccaagctctataaactgg

SEQ ID NO: 31023 - DNA, 201 bp, Homo sapiens
ggagaattcatcaatatttccatggggacaagcaggcctattaggatggacaaagaaggggtgaggctttggcagcacttgatcctttgggaacaattagsatttctggaagccaaggtaaagtgttagctcaccctctcccttcccctaggccggtcgtgtctgttttttggtgcggcagaacccctgttaaaataagag

SEQ ID NO: 31024 - DNA, 201 bp, Homo sapiens
cgtctcctttaggtcatggtgaacaccataatggcaccctccttggcatgttttatgtattatctcccattccagggatcacaaagccctcacttactttygttgggggtggggggtaggtggaaaagtaaacctacaaatggattattgtttacagaaattgcttccttctccaatgacctccgtatcctatgacggaga

SEQ ID NO: 31025 - DNA, 201 bp, Homo sapiens
agatgcattggtgctcaccttgggcacctatgagtgatattatttagagcaggagtttttctaagtccttatccttcgtacctgccaaatcggcattatgyagccaactgatagttaacattgctccacataaaggaacaaattgctttggagctccttcaatcactttagcaacactgatagcaagggataccttgattt

SEQ ID NO: 31026 - DNA, 201 bp, Homo sapiens
aattacatccttagaaagttcatgagtcagcacgaggtccataaaggaggctggaagctctgcaatcaaaggtatgagacctcctgccttttgctgtcatrtggctacctaattgactgccaagttccttgatggttttgaggaaatggcctaggttgcaataagagggatgggtgggaagcatgaggatacagatgcatt

SEQ ID NO: 31027 - DNA, 201 bp, Homo sapiens
gcccagccactagcaagggggcttctggagcctgggataacagtcactccagtcctcatccttagactgttcttagattaggcagtcaaggtgacaaaccygtgtgtaaaacgggtctagcttgagcctttctgttatggcatgggaggcagttagctctggatctgggcttacatcttgcctcttactatgtaaggagca

SEQ ID NO: 31028 - DNA, 201 bp, Homo sapiens
tattgatttactcttggatcccatccatacttaagttacaacaacttttatttgtatgtgctgcagtcatttatttattcagtaaatatttattgaatacrtactgtgtgattagcactctccctgacacccacaggaatatcagtgaaggagaagccctattttgtgtcctcggggatttagcagttaaggtgtagaatg

SEQ ID NO: 31029 - DNA, 201 bp, Homo sapiens
tgtctattggaacccgaggttcagaactattgatttactcttggatcccatccatacttaagttacaacaacttttatttgtatgtgctgcagtcatttayttattcagtaaatatttattgaatacgtactgtgtgattagcactctccctgacacccacaggaatatcagtgaaggagaagccctattttgtgtcctcg

SEQ ID NO: 31030 - DNA, 201 bp, Homo sapiens
cactggaaggatgctccttcatgtactgattcattcattcgggaagtgtctattggaacccgaggttcagaactattgatttactcttggatcccatccayacttaagttacaacaacttttatttgtatgtgctgcagtcatttatttattcagtaaatatttattgaatacgtactgtgtgattagcactctccctgac

SEQ ID NO: 31031 - DNA, 201 bp, Homo sapiens
gtgtttggatttgggttagcatctactctgtagtgtctttcatgagccacagcctgaccttcccaggacgcttgctgcactggatgcggggcagggatggsttcttctgagggaggagagagccaggcggttgtttggcgtggcctgggtccctctctctttgcgttgtctcccctcccctccacactgctcctctgagtc

SEQ ID NO: 31032 - DNA, 201 bp, Homo sapiens
cagaccttactttctccaccatttgtcttgttctgccagcttttcgttgtctgcctctagtaccagctgagctgggtgggagggagagtctgggagtgttyggatttgggttagcatctactctgtagtgtctttcatgagccacagcctgaccttcccaggacgcttgctgcactggatgcggggcagggatgggttctt

SEQ ID NO: 31033 - DNA, 201 bp, Homo sapiens
tacatcccatctccaatgcattccaaggggccctcaaatttttcatgcccaggacacagactgtggctgttttgtgattttgttttcacactagcaagagrtatggtggtgggaatactgtttaacctggcccagtgtctgcaacccctcaggatagccctggctgctggtcctgatgcaggataggtgagccccaaaatg

SEQ ID NO: 31034 - DNA, 201 bp, Homo sapiens
ccccctggaccaaccctcattcctttttgctgctttctacccaccccaccttcttcagaccttactttctccaccatttgtcttgttctgccagcttttcrttgtctgcctctagtaccagctgagctgggtgggagggagagtctgggagtgtttggatttgggttagcatctactctgtagtgtctttcatgagccaca

SEQ ID NO: 31035 - DNA, 201 bp, Homo sapiens
tcagaacgtgcaaatttatttgaagtattttgtccatgtaaatgtacatgtgccacaagaaacattttaaaatatatgataaaatgcatatcatccaaatrttcaatctatattgtgtattctgatacactgtgtgtcacactgtcttagcctcatactactcaccatatactaatgagggggttagtcatatgggctttg

SEQ ID NO: 31036 - DNA, 201 bp, Homo sapiens
tatcaagtgagataactactataccatccagggagataatgtgtgtgaagcccatagcacaatgcttgacaaatagttttcagggaatgttagcttctatytaagcaggtcccattggaaaaaaaaaaagttgtatttttatatagttctagttagtttctcatctgtgatctatgctatttttaattgaaaaaaaaaaag

SEQ ID NO: 31037 - DNA, 201 bp, Homo sapiens
ataagcaactggcgaatttatggtgaccctcaatagtgttcataatcatcaaacttcttctcatgaagtcattcttacccctccaatgccgtgacccaccrcactgcccttttcagttaaaccagcccatatttatggagccctgacccagcaccaggcactacttgctcacactggatgaataattcctctccagaaagt

SEQ ID NO: 31038 - DNA, 201 bp, Homo sapiens
tcaacttgggcatgcaggctttcctggcccatcactgagaagagagtagaaggattgagaagaatttgtgggatttcattctggaggcagcgatgcttaartggcaggagaagcacacccatgtatatttagtgaagatatgcacatgaaataagcaactggcgaatttatggtgaccctcaatagtgttcataatcatca

SEQ ID NO: 31039 - DNA, 201 bp, Homo sapiens
ttgtttgttttctggatttattaaggatagcattttatggaaagttagctggatatgtgtggggagggaaagtgattagtattaatctggtttgctaggaygagaggctgttatccaaattcaaatttggcattcaattcaattgctgttcatggaagaaacatccggggacacctgcctcactgccccagtgggtcagat

SEQ ID NO: 31040 - DNA, 201 bp, Homo sapiens
ttgctgtccccaggtttagtcagcaacttttgctgttgctcctgggtctactgtgtgcactcctttgagggccagttatcacacaggtctccctttgggtytccatcttggaatccaggcaggagaaattaaccaggaaattaaagacatcttcccttctccactcctgtcatgtttagatcttgggagtaaggagaggaa

SEQ ID NO: 31041 - DNA, 201 bp, Homo sapiens
aagtttgagtcctccaaatgtattctttttcaaaattgctttggctattctagtgtccttgtctttccatatatactttaaaatcagcttgcctatacctaaaaaaaattcctcctgtgttttgattggaattgtattaaacctatagaccaatttgggggagcactgacatctttactatgtcgtatcttccagtccatc

SEQ ID NO: 31042 - DNA, 201 bp, Homo sapiens
tgggggtgggcagcaacccagggatgcaaaaaagagaggattctcaaccaatagctcctggagctcagagaagcagcccctttcccaggtctggatccatrgattgggagcaagttactccaccatttggtggaaggaagcttggaaatcagagggaccagggctaagtcctaggtctgctgtttactatctttgtgacct

SEQ ID NO: 31043 - DNA, 201 bp, Homo sapiens
ttctttcttcatccccagcaaatttgcaatcctccagaatccttttgggaattccaaggcaaacggccttaaacaagaacataattgtctgagagattttktttgcttatcggaactgtttggtccacagcattatctgcatgggggcataattcccttagctgcagtcagttttacaggtctttgctcataggattacag

SEQ ID NO: 31044 - DNA, 201 bp, Homo sapiens
aacccaactgagaatgaagagtgtctcagggcagaaaaaggaaggagcaaagacatccaccttggcactagacaatttgggtcctgatttgacagtctttrgtaattagcataaccatcagtacatcatggaagcttaccccatgtaccatttcttagctctcctcactgttgtgattgcaaaggtgcttggaaggttact

SEQ ID NO: 31045 - DNA, 201 bp, Homo sapiens
cttcatctcagcaaagtggaaaaaacatattttagatgggaaaaaatgggaagaaactgaaagagggaaaatatccctaatacaaggagaaacacaactcyagattccctattgccatatggaacatttaggatttcccaggaggaaacacgttcaaccagttgcttctgttacctccggactaagagggatcctgatagt

SEQ ID NO: 31046 - DNA, 201 bp, Homo sapiens
attttgttgttgttgttctttcatatctctcttctagagaaagaagaaaacgtccactcatcattgtttgtctttcattccttgtagaattgcaaatggamattcttcaccttgcttcacagttttgctgtgtttcctgagatgtttcctactctttcaatacattttcttcctcttccctttcaacattttttttctgcc

SEQ ID NO: 31047 - DNA, 201 bp, Homo sapiens
cctctgattaacccccacctcttcacctatacccacccttccccaattggtttttacactgttgcctttttttgcatactcacagaccaatcagtatccaycccctttctgagcccataaaaaccctggactcagccacactgggacacagagactacctgactttgggtggtagacaattctcacgtcccctctctgctg

SEQ ID NO: 31048 - DNA, 201 bp, Homo sapiens
aaactgacagggcacactgctgggcttgtccagtgaaaagttgcttctgccccatccctgtttcagctagtcttcaattttgtctggtatctgagccctgmctctggaatcaagtcctgcctcctacctcagtcccatgggtaccccatttggagacagtaaaattgatctttttgtcagacaccatgcataaggcagacc

SEQ ID NO: 31049 - DNA, 201 bp, Homo sapiens
ttataaagataaagaagaggaaataggaaaagcatttggtactcaaaatgagttatagttcataaaatgactatgacgattgctgttttaaggtaagctgrtagagtgggaacacagtggaaactaggagtcagggcacctggtcccaaccctgtcactgatgtgctgggtgattttggacatactagttagcctctctgg

SEQ ID NO: 31050 - DNA, 201 bp, Homo sapiens
ggccttctttgttcctcatggtggcttccccaaattgtatgtagtgagagatggaactgggactggaattcatccatgcattacaacttgctttcaggaarggacctggtatgtgcctgtaaagttatgtcactatgaacatattccaagagatagttgatttcataattggacaacgggcttgaaatatgaagcatttca

SEQ ID NO: 31051 - DNA, 201 bp, Homo sapiens
tgattaggcttaggaggtgggcctttctgtggaattccattctttagccttccttgtcacagaaggaaatgtacaatgtcacttctgacagacttggtaakgacaaaaaccataacttacacgtggagagaacttttaatgatttcaaagcattttcacatctggtctcccatttgctgctcataccaagcctgtgaagta

SEQ ID NO: 31052 - DNA, 201 bp, Homo sapiens
ccctctggcacagtccgcataaaatgaaccatcccactagtggcgcagcccagcttccatatttataagataggaattccattcataccgaagagaagacrtttgtcctgaggtcttggccttcctaaagcccatgaacctctttcttttaccatggtactggtttggttttcagttgggctggggttttacttctcttga

SEQ ID NO: 31053 - DNA, 201 bp, Homo sapiens
atttggcaaattcaaagtctgaaatcttattcagaacgtgcaaatttatttgaagtattttgtccatgtaaatgtacatgtgccacaagaaacattttaaratatatgataaaatgcatatcatccaaatgttcaatctatattgtgtattctgatacactgtgtgtcacactgtcttagcctcatactactcaccatata

SEQ ID NO: 31054 - DNA, 201 bp, Homo sapiens
aggcagcgatgcttaaatggcaggagaagcacacccatgtatatttagtgaagatatgcacatgaaataagcaactggcgaatttatggtgaccctcaatrgtgttcataatcatcaaacttcttctcatgaagtcattcttacccctccaatgccgtgacccaccgcactgcccttttcagttaaaccagcccatattta

SEQ ID NO: 31055 - DNA, 201 bp, Homo sapiens
aaggctccgtgtggggcggggttttgcattatccagtgaggcatccacgctgctgattctctttctaatgatatttgtacagcatgataaagcagtatcgyatacatccagcccactggggcaaggcagatacctttattttgacttttagggaggaagaaccagaggctcagaggttagagcacccttgcccaagctgac

SEQ ID NO: 31056 - DNA, 201 bp, Homo sapiens
aaaaccaatagagacataagtcttggaaaggaagagatgaaggcatcattattttctggtgcagccatcatctggctggaggaaatcgtagactccgaatstataaattattagaagcaacagagttgagccaggtggccaaaggtcagatattaaaatgcatattaaatgcatttttgatagaccaacagcaaataattg

SEQ ID NO: 31057 - DNA, 201 bp, Homo sapiens
ttgccccttctcttctctccatccttgctgcttccttggctagacatcactgactcatccttgaagaaatccccttctccaagaaggcttcctgacctccsctctttccctttcatcctgtttggtttagtggctccctccctgtttggacaggaaaaacagaagcccaacgactccgggaggttggcagctgggcgctca

SEQ ID NO: 31058 - DNA, 201 bp, Homo sapiens
gcagttccactcaaactttcaggtgctgatgacttcagatcacagacttcctgccactctgttctggctctgtaatcttttatcaccgcttttagcctggktttctctctctctctctctttctcttttttttcttctccgtttatgaaaatgcactttgcttttaatgttctttttgggtccccactgttcctgaccctg

SEQ ID NO: 31059 - DNA, 201 bp, Homo sapiens
tgtgttacctccttaaccctcttcaaggagggcatccgggacagtccctggcaactagcaagcacccaacacagggcccttcttaccaggtggcctctgakgacctttcagccatgtgcccctgggctgcggctgggcgcggtccttgggagggatgtccctctgtggttcctggaaagcccggcagctggctgctttgtt

SEQ ID NO: 31060 - DNA, 201 bp, Homo sapiens
ctggcggctgaggtgggagtggtgtcattatcttccgggtcccaggccttgttcctcctgaccctgaaaggcagtattgggtagaggcatccccttgtttygcagacctctattaaaacaaaggagaacaatcatgtaatgatctctctaattgctgaaatgacattcaatatgatccagtaggtgcttcatgatcacaca

SEQ ID NO: 31061 - DNA, 201 bp, Homo sapiens
acctggatcttggaaggaggctgagtctcggtctctcccggtccttgatgaggcaagttaagtgcctcatctttaggcagttaaggcaagttaactgcttyaactacatggcagttaagagagtgtgagccgggcgtggtggctcacgcctgcaatcccagcactttgggaggccgaggcgagtggatcacaaggtcagga

SEQ ID NO: 31062 - DNA, 201 bp, Homo sapiens
agtcattttattacctaaaatttatcttgctggaaattaacttcacctcggttgtagacaggaagatgggaagcaaccacacaattgtctgggtttccaamctttttaccccaaactagttccaaatggtgagtaatgtttgcactattaacctgcatttttcagttcattgctcattggtattgtcatgggggctttggt

SEQ ID NO: 31063 - DNA, 201 bp, Homo sapiens
ccgggcatggtggtgggcgcctgtaatcccagccactcgggaggctgaggcagagaattgcttgaacccgggaggcagaggttgcagtgagccgaggaaaraaaaaaaaagagagtgtgtaggctcgtcaacatggggtcagttactgctgttacctcctgtttggcatgctacttcacatctgtaattctccattcttct

SEQ ID NO: 31064 - DNA, 201 bp, Homo sapiens
gaaggaaaattaaagtgcatgggatgaaatgggcaaatcacaattatgtgaccagcatcagggccctttcccaaactgcaagcccatagggggcctagaayactccatagcctgaaacggccaattaaaggggagacaaggagactccctctcactatctgaggttttggcagtttctcagttgccctgcaaactggagat

SEQ ID NO: 31065 - DNA, 201 bp, Homo sapiens
agaaagagaggctaagaggtagaggtggggacaggatacctgggtgcctttctgggagaggaagtctttttctttgtcctgtggctcagagcaagtctctsagagtggaggtttcaaggaggcagatctctgttagggaagggcgagttgcctggccctagacctgcttgaagtgggaagaatgtagatttggcagtcagg

SEQ ID NO: 31066 - DNA, 201 bp, Homo sapiens
gaatgcaccatgaatacttctgttaactgcgttatgatctggaaaacacaactggaccaggaggaaaagcccccagaggatccctttcctgatgacctgcyggcttgcagagctggcctgaaaccaaggctgtcttgatgaataaactaataaaagaggttagacgtgctctaatggagaataagtacaggccataaattt

SEQ ID NO: 31067 - DNA, 201 bp, Homo sapiens
tttaacgagacttctttttgattttcagtctgggatgattttaatacagaatgcctggattcagtaacaccagaaaaaacaatccacaggatgtttgtgtkaaaaagattcagaggcagtcatctagcacagtaaatcctaaattttttagaccacatcccacagttaaagcacacattgtgtgtgcaaagcatacattgt

SEQ ID NO: 31068 - DNA, 201 bp, Homo sapiens
gaagggatgagaagcagaaggtttgctctgccagatcgttgggtggagaaaactcctttcagaccagggtagctgtggttcgggctgggctcttatttgcraaaactgatggtccaggtgcctgctcctaaggaacccatcagcgttgtggatttagggttgggttgtggtggccagagcagtgtttacagggtgtggtct

SEQ ID NO: 31069 - DNA, 201 bp, Homo sapiens
aggagaatatcaaaattttaagataagaaacctaagatggcactttccctccagctgtttatttttctttattctgactttatttgccttttttttttttyccccctactagggcatttctcagaagctctggttctgaagccataaaaacacctggtccctaggagaactttttttactaaaggcagatttcaagaaggg

SEQ ID NO: 31070 - DNA, 201 bp, Homo sapiens
gccatgtgggctatgctctcagcacttttaaactatccatagtccatagttggttctgataaatgattatttatttgctgtttttcagttttgcttttatktttggtgattgtttgtacttctttaaagcagggactgtgtcttacagtccctttctggccctaacagctcccagaaaagaacttaccatgtaatagggat

SEQ ID NO: 31071 - DNA, 201 bp, Homo sapiens
agggtgtgacttcccgaagtccaggagggcaacccagccaaactacctccttgcaaaattaaaggctggtggtgtcaccagggctgcactgcggtgatgcyccaggctggctggggaccactccctctggagtgtttgaagtcagtgggcattaagactgccagcctgattttctgtaggggcctgggtgggccttcccaa

SEQ ID NO: 31072 - DNA, 201 bp, Homo sapiens
tggcatttagcagaagtcagtttattcaagctcacctttgagtctatcttacacaaagcactggttaggtgagggatggcgatgagccccggagaattccrcatgcttcccttctttagctttccagctagattgtaagctcctaactggatccttcaggatttggcacactctggtctgtgggccactgagacaggacat

SEQ ID NO: 31073 - DNA, 201 bp, Homo sapiens
gattcccgagggtttcagatatagttccaatggaataggtaatgtattttaaatgtttgaaacaaatgaggaggaaacaatagactaatttttaaaatccrtggagatttgaagaatacaaataggacttccagaaataaaaaatagaataactgaaattgaaggtcttcagcaattggcacacatttgtgtaagttattt

SEQ ID NO: 31074 - DNA, 201 bp, Homo sapiens
tcgtgtgggttgattctttttcataatgcctgatggaagaaatctcatttgatagtctgcagcccactggtctgggagtaagagatttggctcaagtccaytccgaaattaatatttggagttgtttatttatttgttcatggctgaagcaaccagttttctggcattccatcaaatccccccaaaattgttttaattgac

SEQ ID NO: 31075 - DNA, 201 bp, Homo sapiens
tttataaatttccccctattttaaattatccccattccctactaattgtatctttcattttttctttataaaccttataattctctaatatactatatatrctttatttattttacttatcatctatcttcccctgtctccactaaaatccaaactaactccataaaagcagggctttttgtctgggtcactcctgtatgg

SEQ ID NO: 31076 - DNA, 201 bp, Homo sapiens
aacaaaggtgtatttcttgcttgtccttcatgttctgtataggttgtactgaaacccctgcttctggagccattttcccccaagattcttcattttaacaygtccttccatttgccatactgcaggaagaaaacatggagaactgcacagctcctaaagtttctgccaaaatgggacatatgccacttctgctgatgtttc

SEQ ID NO: 31077 - DNA, 201 bp, Homo sapiens
cttactcccttcccctcattgacaactttcattctgtttctaaggagtagggctcttaccaaaatgtcaatgtgacccacctccagtccactcttttcttygcagagcgtaagaactagttctgtctggcactcctggaatagtcataggacagagaaaagagaggaaacttttgagttctgataaacacatctgcagcac

SEQ ID NO: 31078 - DNA, 201 bp, Homo sapiens
gatggcttctgcggcagtgaggtttaccatccaatagaaagaaaacccatggcagttggctaaccgaccaaacttactccatttcctctgacaatcgatarttattaatcacctacattctccagaaggctgtaaaccgccctcccttctgtgtctctgggatgacaaatggagtcggggttagccagcccggctttgtgg

SEQ ID NO: 31079 - DNA, 201 bp, Homo sapiens
gtctgtgctttattgggcaataaattaacagtgagcactgccaaggaaatagataaatggatagggtggcaagcacatttttaacaaggaaaatggcttcrtttctcagtagcatcatttaaatgattagctcagttgtgtagtttccttgattaggggatggggaggagatcttaaataaacatgtctgtaggaagaaca

SEQ ID NO: 31080 - DNA, 201 bp, Homo sapiens
agctgaggttctgactgtctgcatgcgataagatgcaaagttttggcccaggtgggacatcccggtattccccactggggctgccagttgtctgtcctctraccttggggctctgctttagaggtgcctttgctgcactgttgggatctatttgctcagacttctgccccatttagggaaacagcagcacagcctgccaca

SEQ ID NO: 31081 - DNA, 201 bp, Homo sapiens
tctttggaaggtttagggaaggagaggggatttgtttaggaccctaggtctgggagagtcttgcattttagtcatgtgtgatacatgactaattctgcctrtgggttaagcctataaatagtgtgtgattctggctggccatatctggaggctataatcaggatagtcatacttgaaagagttaggagaaatcttttatgg

SEQ ID NO: 31082 - DNA, 201 bp, Homo sapiens
ctaggtctgggagagtcttgcattttagtcatgtgtgatacatgactaattctgcctgtgggttaagcctataaatagtgtgtgattctggctggccatayctggaggctataatcaggatagtcatacttgaaagagttaggagaaatcttttatggcttgtcatgatccttaactgcatccccatggtaaacagtggca

SEQ ID NO: 31083 - DNA, 201 bp, Homo sapiens
ggaggctataatcaggatagtcatacttgaaagagttaggagaaatcttttatggcttgtcatgatccttaactgcatccccatggtaaacagtggcaagrgggaagagagggaactctttgtttgcaaggcaaatctccacaaagctaagaggaatgctagccatcagtacaaaggaaaaccttccaggctcaagagaag

SEQ ID NO: 31084 - DNA, 201 bp, Homo sapiens
tgagggccaaatcctgcacctggtcccagaggtgcccaaaagcaggaggtgagagggctgtgcttgcttgagggaccccacagagccagggaacagcctgycaaagcaactcaggctactgaaatccaagtggcagcaaatggccaatcattgtctgggtctggctctgtcccagcctctacttacctgtatctcctcaga

SEQ ID NO: 31085 - DNA, 201 bp, Homo sapiens
gagaatacttttcggggaaagggggtcttctagaagcccctgaaatgaagacaaggagtgaccaccaactccttgagccagaactggggcagttcttcacytggggactctgcccttgtgcagtgggaaagcagcttatatcaaggcttggccaggcctcctttggtcccaggctggggactgctgggacttctgccacaa

SEQ ID NO: 31086 - DNA, 201 bp, Homo sapiens
ctcctggagactgcttttgttcagtcactactgaggcgtgtattcattaaatcactgtgcgcactaaggtagcagtgcagagacaccctctctgtcaaaaytgagccagcccatcctgcatggtcttaagttttcctgagaaaagtagccataagcgatgggctcccactactccctgctttattacttgaggtacagaga

SEQ ID NO: 31087 - DNA, 201 bp, Homo sapiens
gcacatacctaaacagtttaaaatgtttttatacccatgttcaaagaaaaagaatatcttgaaagaataaactttttatcttttataaataaggttaaaarcagtaattctcaaaatgtggtctctgaaccagcagcatcagcatcacctgaaacttattagaaatgcacattctggcagggtgcagtggctcacgcctgt

SEQ ID NO: 31088 - DNA, 201 bp, Homo sapiens
aaacaacagagatgtgtctgagtacagccctgtgcaaccacataggctgaacacccatgaaaccagccctggttccaaggaataaaatcggtttgagcacyggagaacttcttttcaacacagccaaaggggcatatggtagccacagggtggaggtgggggcccatctggatttgagttgcacaagcatctatatcatca

SEQ ID NO: 31089 - DNA, 201 bp, Homo sapiens
gtcagaagtagacaggttagggctttctctttggagacctggatttcaacccactgaaagtcttaacaaagaggcatgctagtatcattcttagcaagccyagtccattgttatggtcagattcgattctgcagaggagaaaatggagtgtgacatgtttggtgccaggaatgtgagcatgcacctgcacagccgatgttg

SEQ ID NO: 31090 - DNA, 201 bp, Homo sapiens
ttaggacttgtagcttctggtcctggctcaccggcagcccttgcacattttttctactgttaaatgggaatgatgttactccttatgactttctgctaatyggagaatggcaaaggcatataaaaatctttcacagagcagatacgtatttcttaagatcacatgtaattacaaagaagcagatttttttggtatatatgc

SEQ ID NO: 31091 - DNA, 201 bp, Homo sapiens
taatcggagaatggcaaaggcatataaaaatctttcacagagcagatacgtatttcttaagatcacatgtaattacaaagaagcagatttttttggtatayatgcatgtacatatatgtatatatatttatgtgtttgtgtgcacttatcctctctctttctctctttcatgaacacacatcttaaataatatttgggagc

SEQ ID NO: 31092 - DNA, 201 bp, Homo sapiens
cggctcggtggcacctgaggctgcagtgacccccagtgctgcttcaggtgaatgagcacacagagcattttcagaactatggcttactctctcagtgtatrgcagtttaagtgctagggacttctctgaactcattgaaagaaataaagcccctctgtctttgtatccctagaattggaagctcatgtatttgtgatgctg

SEQ ID NO: 31093 - DNA, 201 bp, Homo sapiens
atgagtgctgggatgggctgacatgggcctttattccatcactcccatcactcagaggaggtgggctgcccctgaagggcatgacctctggccaggtagcyctctgcaactgagcaagccctgaagaagctgctgacaaccctctcacgagctgagcagcaagtccttcttgaagggggtctgtgcctgtcacaggatttt

SEQ ID NO: 31094 - DNA, 201 bp, Homo sapiens
gatcaaggaaacttaagattctcaatcagccattgacatatgccaagaccaatcaatctttttcatctcatctcccattatccacccttcccacagccatraccacccactggtcactgtgcatgtctccctcctttgtcttctggtgtccctgccatggttccttcaggcaaagatgcttcttcaacctatccctaaata

SEQ ID NO: 31095 - DNA, 201 bp, Homo sapiens
gcttcatcagggcagctgtaaccactgtgtgcccgggactgtgccaagcttcagcttccccaccaccttaatgaggcggcatgtttgtccccatcttacayggaagaggctgagactcaagggttgatgggccacagccatcagcttggaagttctggagcaggtacaagcccaggtgggctctctgcttccagcctgagc

SEQ ID NO: 31096 - DNA, 201 bp, Homo sapiens
caagagtctttccagatgaagggagcagctgcctcacagctctggccagctgtggacatttggccagtttgtaatttgtcaaaagaagtcagaaatctgcmttgttgtgaaatctccagattttttacatgttgtcaatttaattaaaatattaaaatcagcccaggggtcaagactgctgacccatgcatggggcctggg

SEQ ID NO: 31097 - DNA, 201 bp, Homo sapiens
agggactttacgtagctgaatcagtgataagcttttgattgcatgtagcagaaatgctcacttcaatgggcttaacattaaagggactccattgactcatrtagttggaaaggtggatgacttcagatgagccttgatccggtggctcaacgatgtctccatggacccagtttctttctgtcactctaatctgctctcctt

SEQ ID NO: 31098 - DNA, 201 bp, Homo sapiens
acaaatagaagggaaacaaaataaaggaaagggagccagcgtgtctcgttcagtgttgggtaagtagtatgaatttggtttgttttcctggctgtctttaragaacgctgggcggtgctagcctgtatttctgatgagaggaaggggatttaacctgtggttcaagtgcacttatttggatagctcagagtcttcatatgg

SEQ ID NO: 31099 - DNA, 201 bp, Homo sapiens
tccatggcatttttcaataagtgcttttttgtttttttaattgagataaaattccttcttttaaagtgtacatacagttcggtagttttttagcttattckcaaagttgtgtaaccatcattattatctacattttcatcaccccaaaaggaagtcctgtaccattaagcagtcactccctattccctctgctcccagtcc

SEQ ID NO: 31100 - DNA, 201 bp, Homo sapiens
gagtcatagatcttattgatcagactcattcaattggacatttctcttgtgtgcacacatgttccctctctcctctgtctcctcctgcctcagtaacttgyagagagacttccaaaaagagagcaggtttttagagttgagagttaaaacttctggaatgttgttctagctcctggggttgggcagggaaaggtaatcctc

SEQ ID NO: 31101 - DNA, 201 bp, Homo sapiens
ctatccacccattccctggaggatgagtgaccccttagtcactggccagcttgaaaggcaccttcccagggaagccatccccgaccctgccagtccctgayacacccgtgcggaatgagggtgcaccttctaatgcagtatgcatgctattttgctctcatgttctttcacttttcagatgtttctctccctaggaacaca

SEQ ID NO: 31102 - DNA, 201 bp, Homo sapiens
tgtgtccctggtgagagcgttagggctgtggggaggtgcattcatgtggggatctcagggggatggggtgggaggctcacatttgacacctcctgtgggayagctgcagtgctagggtttgcgtctccagatgttagaggcagtaactgctagcctggtgcccatcacagataccagttactaaccacttatcttgtgcca

SEQ ID NO: 31103 - DNA, 201 bp, Homo sapiens
ggccagcttgaaaggcaccttcccagggaagccatccccgaccctgccagtccctgacacacccgtgcggaatgagggtgcaccttctaatgcagtatgcrtgctattttgctctcatgttctttcacttttcagatgtttctctccctaggaacacaggcttttcaaagacaagatctatgtcttgtaggcccggtgacc

SEQ ID NO: 31104 - DNA, 201 bp, Homo sapiens
actgaatctaagcaactaattggaataggcaaaggaggaagtgatgaaagtgaagctgcagtttctgcaaaggtggctttattgtataaggtgcaggttaktaccccaaatgatcaattactaaagttctggattgggcagtgacaagtgtctagagggaatgctgggccgagggaattgcattgtcatgtgagaataagg

SEQ ID NO: 31105 - DNA, 201 bp, Homo sapiens
tcagattctagcccggttcctatttatttatagcccaaattatttcaacaactgctgtccagtaaaaactctgtttaatcagaggcaggtaaacgtgccartttcatctcattgcctaagtagtctcctctgctgtggaggaggaggatgccactctgggtcttgtcccaggtgctgtggggctggggaccaaggcagttc

SEQ ID NO: 31106 - DNA, 201 bp, Homo sapiens
aggtggctttattgtataaggtgcaggttagtaccccaaatgatcaattactaaagttctggattgggcagtgacaagtgtctagagggaatgctgggcckagggaattgcattgtcatgtgagaataaggctggggccacctttacattttcattaaaaaaagatctggacagtacttgactgtggtagtagactttgta

SEQ ID NO: 31107 - DNA, 201 bp, Homo sapiens
gggaagcagagagactgcccacccacccttcatcattgtgactgctctaaggaccggccctgggtgaggcggaggaggagcgcacctgttcagaacgcagygaggctgagcggggagctagctggcagtccttctagggagtgtagctgattaaaataattatattaactggccctcaaagagacttatttatagccatgg

SEQ ID NO: 31108 - DNA, 201 bp, Homo sapiens
cctgcttcagcctcccaaagtgctgggattacaggtgtgagccaccatgcctggccataacctgcagttttaaacatatcgggctgaatatagttgagggygcttaaatgctatgatgctgtgattcagctgggccaggaatatagagaacagtggcaccctactctgtgttgggccagagattgctgaaatgtctagcat

SEQ ID NO: 31109 - DNA, 201 bp, Homo sapiens
caagcctggctttcctgacccccaggctgctcactgtttcttgcagacgcacctatacatgtatcctcacacacatttcccctccttgaagtcagagaagmattttttcagctgctcccatataacatttcattaccacaatattctctctcaattctgaaatggtgataggggagaagccatttctctttatacccacta

SEQ ID NO: 31110 - DNA, 201 bp, Homo sapiens
ctcattggtaaaatgaggctgttgaattctatatggctcaagagttctttccagccccgaaacatgcaaaaattcagtttcgactaagagctttagcactstcttatcttggctgtttgcagtggccaaaattgataacatattggaaaacttccctgctgattaaaatagacattgccctaagtgctgtgagtgtccctg

SEQ ID NO: 31111 - DNA, 201 bp, Homo sapiens
ggcgtgtcaggctttaagccaggattgaaagcatggcctttagaatacccagggagccagacctgggacccttgccaggtggggagttggaaatgagattyctgtctgaagctttcccctacaggagaaatatatccctaggggacagacaggtggtccagcagacatctgcaggggggcaaagggagaagacaggggccc

SEQ ID NO: 31112 - DNA, 201 bp, Homo sapiens
gggaccagcagccccagggcttcctaaggtattgaggttcagacacttctggatcttaggccaaactgtgccacaggatgtcatagttattgtcatgaaayaaagcattttttaaaaagctaacatggggccgggcgaggtggctcactcctgtaaatcctagcactttgggaggctgaggcaggtggatcacttgaggtc

SEQ ID NO: 31113 - DNA, 201 bp, Homo sapiens
agaaaccaggcagacccaattgttatatgatagatttctttagcctggctgcaaaaatgagcattttaagtgaatttatggagaggctcagatctctctctttttttttttttttttttgagatggagtctcactctgtagcccaagctcgagtgcagtggtgtgatcttagctcacggcaaccttgtcctctggggctca

SEQ ID NO: 31114 - DNA, 201 bp, Homo sapiens
gagggataagtgcttcacagctgcactcccttttagcatgtggaatgtggtgccaatgtggccctatctgattttgcaaggaaagctgaaaagccagtttytatgtgaattcacttgttggcatctatttacagttttttaaaaaacactgtacttaccaaacagaatgtgtctgcctgttgggcttgtgactgccacttc

SEQ ID NO: 31115 - DNA, 201 bp, Homo sapiens
acagagtatggcttcatagtattgcacttttggaagcaccagatcctaatgcctgtaaaatcatagagatttttactaggtttccttacatgtgaacaaaycagttttactcttatctggcaatcccatgcattttattttaatgctataatcccaaataccaactacaaagcccctctttcttcttcctttctttcatct

SEQ ID NO: 31116 - DNA, 201 bp, Homo sapiens
tattagaaagataaactcttaggtacacagctctgataagataagtaaaatggcagcatgaagaaaaccaaaagaatacaaagctttcagcttggatcccrtcaggttcagggcagtcttggggtgttgtcccaagttcaggagaaaatgttctatataaatattattgctttctcaatgatgaattcatatcatgtcatt

SEQ ID NO: 31117 - DNA, 201 bp, Homo sapiens
accgtattggccaggctggtcttgagctcctgatctcaagtaatccacccgcctcagcctcccaaagtgttgggattataggcatgagccaccgcacctgrcctatatcttcttctattgagaaccattcatgacttaggaatgacaagaacatatcaactatacttgctaaacagtaaagagaaaaaaatcattttcttt

SEQ ID NO: 31118 - DNA, 201 bp, Homo sapiens
ttgctaaacagtaaagagaaaaaaatcattttctttttcccttaggaaaacactgagactcagtctgagcttctggaaggctaaagcctgcaaaaacatgrgcttttcaaagctcacagaggcaaggagagggaggcgatgggtcagaccaccactcaattttctgtagtgatggcagagctgagacccagactcaggaga

SEQ ID NO: 31119 - DNA, 201 bp, Homo sapiens
gatttttttggtatatatgcatgtacatatatgtatatatatttatgtgtttgtgtgcacttatcctctctctttctctctttcatgaacacacatcttarataatatttgggagcttagtgggtagatgagttggggtacccagaagatatgattccatgttctcatctttaatatcagagagctggcctgtttgccaga

SEQ ID NO: 31120 - DNA, 201 bp, Homo sapiens
cctgcgagggactccctgaatgtctgtaagagtggaggtcttggggaatggcactggggatggggccagagttgggtaagccatgatcccttttggcctcrttggagaagatattgcagaaccaatggaaagggaagcaacacactggttcaatgatgagagcagagtctgcctctgtggaggcgattctgggaccacatc

SEQ ID NO: 31121 - DNA, 201 bp, Homo sapiens
ggcttgacagcattaactgtgaaacataagctccggtaattatactttaaaaaaataaaaagaggaggatgcttgggcgggttacacttgcaggcacagcrgggcgtgggccaagcgggctagatggcgctgtgggctcaggtttccctgttacagtgccttggtccctcccctggcatttcatggtttcctcagtgtcct

SEQ ID NO: 31122 - DNA, 201 bp, Homo sapiens
tttaaaaaaataaaaagaggaggatgcttgggcgggttacacttgcaggcacagcggggcgtgggccaagcgggctagatggcgctgtgggctcaggtttycctgttacagtgccttggtccctcccctggcatttcatggtttcctcagtgtccttttacaggacctgagaatcatcaaactttagaggccaagcgggcc

SEQ ID NO: 31123 - DNA, 201 bp, Homo sapiens
ttgaagttgggcttcatagcccagagctgcctggctcaaggcctctccaccatgcttgccaacctcttctccatgaggtcattcataaaggtaacgtctcrtcttattagagcacattagctcgggattccatttgtcgtggggttgagtagagagcacagcttaaactcaaaacagatcgacgggctctaaccacttggg

SEQ ID NO: 31124 - DNA, 201 bp, Homo sapiens
agggaactgaaggcagactggcagcaattctagtgtcctacaaggctgtggcttgtcctgtgagctggacggcggggtctgaggcaggacgtcaggcaggkccatgctgagagcatttcacatttattgaaagcctgctgtcctctgggcactgtgttttcctcttgccattccatttatccctcccagtcatgctccgct

SEQ ID NO: 31125 - DNA, 201 bp, Homo sapiens
tgctggcggtgatgatgagaccccaggccagtggcacagaggcctcctgggaggaagtccctgtttgggcgcccagcactgttcagggcctcctctagtcytgttctactttaggccttaccttctcatttctgttgctggagcaaaaggctctgaattcagagttgggaattctcaggcctggtctgagatttgtctgcc

SEQ ID NO: 31126 - DNA, 201 bp, Homo sapiens
caaaagagtgcctgaagatgtcagggcagaggctcacttctggtctgtctagttgggtgagtctgaacttgaggccccagggcttattggaggcaaactgrgtcatggagagggagagtacagtaaggccactaccaagggctggctgcagagggtgcaagggttgcacgggttttggggttgttggcttccccagagggg

SEQ ID NO: 31127 - DNA, 201 bp, Homo sapiens
tgactcagggtgaagcttgatccactggctcaacagtgtcacccccagagctcccatctccgtgggcactcaccctgtgggttaactgggtctttggggcrccatttcctggacatgcctcaagacttccctgaatgagtggttcatctggtaatgaatgaggccacacaggctcccttatacttgtccctggcgtgggag

SEQ ID NO: 31128 - DNA, 201 bp, Homo sapiens
aggcctgaagcacttgctggacagtgaggacacctctgggttgaggggacagggttaaatggggtagaacaggaagaatattcctcctcctgggtgtgaaygagtctcctttgatctctgcaggaagtgccttacccaggccctgttacctttaggagcaagaacttgaggaaatggtgtgggcacatgcacaaaacatgg

SEQ ID NO: 31129 - DNA, 201 bp, Homo sapiens
ttaattttttaaataaatcacatattccaatgaagcagaaagctttgctagatacacagtgaagatgtttgctttaaaaattgttctttattcagctagaraggaaccaggggaatacaggaagataaaaagtgctgaatggaatatacaagacaaggttttgaaatcaaggctaaattaatcatctctccctttcagtgg

SEQ ID NO: 31130 - DNA, 201 bp, Homo sapiens
tcttgctgtcactggttcactcatttctttttccatctcttacctctgctttcttctgtgttggttttatacttgggcagccttcttttatgtggatttcygtaacagaatcaaatgcatatcatattggcttcttacctttggctttcaatagaaagatagattctcttttatatatagacatacagtagttccagcaaa

SEQ ID NO: 31131 - DNA, 201 bp, Homo sapiens
ggttggttggcatgttgcttctgaaccaatcaccacagccaggaagataggtctcatagtcttactgagcaaacctgggtggatatcactcctggagatgraaggtggaggtgggcgcattcttaaaacagagggattgagagtggggaatagggcataccagaaggggcaatgaatgctagtcaggtaaagataatagct

SEQ ID NO: 31132 - DNA, 201 bp, Homo sapiens
agggattgagagtggggaatagggcataccagaaggggcaatgaatgctagtcaggtaaagataatagctatccactatgatatggtttggttgggtagayttgagggaccagacctggggtgacccatgtttgcccagctgatcccattgggtgatttcttcctgtttgatttcctgcaaggtacctcagttgttggcat

SEQ ID NO: 31133 - DNA, 201 bp, Homo sapiens
tcttcctgggagaggcccttcatcagttgtcttccactgacacacacagtgcgctgtactgaggcttttcattccgtaccacatcaggggcagcactgccytgtggccatgcaggacccatgggaacagagcacctgtgagctacctgcaggagcctttgctgaggagagtgaggctccttgggggctggatcctcctcct

SEQ ID NO: 31134 - DNA, 201 bp, Homo sapiens
tggttctggatactaaatagtttctcccttaggaagggtccatagtttctcgtttaattaaatcagctcctgagatgaacaaagggactgtgttcataacygccggtagttcctccaggggctaggatttgctcaagagttacacacgcttatctggaagcccatggaggaggctggcggctaaaaggtaggctgccagcc

SEQ ID NO: 31135 - DNA, 201 bp, Homo sapiens
tttgacaagcaaaaacataaaaaaagaaactgtcaaatgccagctctgccaccattgtcatttcattaaaaggacatgttaatacccaacaaaggagtaaygatataatgtcaaagaaaaggacagttcttcctgggagaggcccttcatcagttgtcttccactgacacacacagtgcgctgtactgaggcttttcattc

SEQ ID NO: 31136 - DNA, 201 bp, Homo sapiens
accttttgagattggcttttttcatttagcatagttcccttgacatccatccaggttgttgcatgtatcagtattccatcctttctgttgatgaatagtakgacatcttatatgcaggtaccagtttgtttatccattcatccattggacaccatttagttttcctccagttggggcgatcatgaatacagtcgatataaa

SEQ ID NO: 31137 - DNA, 201 bp, Homo sapiens
tgatcttgctcccccctcatttcctgacctaatcactgtcacgcttgactttgctcactcagctgcagtcttactgaatttattgctgatcctcaaacacycagagctcttccctgcctcagggcctctgtgcttgctgtttctacttcctagaaagctctttccccatatcttctcatcatgctgttgtgctccctgcat

SEQ ID NO: 31138 - DNA, 201 bp, Homo sapiens
ggactctgtttaaagctgtgagaagctctttttgtttttctaagtcggctgaactagtaaaacagttttacaactgtgttttcaagttctgttcagaaagrcaagcttgaaaaaataggtgatgctgaagtgtcattttagtaaattttttttccctgttagaagagaggttggctcttccttgattctaatctttaggtt

SEQ ID NO: 31139 - DNA, 201 bp, Homo sapiens
gtgccttcgtgggtctgtccttccctactgtttgtgagtaagtgacctttaactggatgctctttggctttcagggatattgaatgtgccccttgcaaggragcctcccacctctgctgggtacagttggagcacttgacaattgccgagggtatcccgtgtgctcggccccatgtgatgaataggagggtgggtcattac

SEQ ID NO: 31140 - DNA, 201 bp, Homo sapiens
gaaacaagatttctggcctctctagcactaacctctccagatgccttccatgaggcatatgtgtgtgctagaggcatggaggagctaagtttgggtctctrtactgttcccttctcatctgtttaacctccaaagtattgtaccatgttctctgtgtccagtggaaaatgatgtttttacattgcatcatctgtcattctt

SEQ ID NO: 31141 - DNA, 201 bp, Homo sapiens
ttattgaaggctttatatgggtgcagaggccgtgttcctgattgctgaaaaggtcaccattatctaaccagtgcattcatttgtttgcctaagagtgtaamtcaggtttcccttttacagcccaccgtcatattttaaactctccgcatgtgttcctttcctttagattgaggaagacacatggcagaaatactacttgga

SEQ ID NO: 31142 - DNA, 201 bp, Homo sapiens
aaatctttggggaaagctttagactagtgggccccctataaacacaacagtatggtgtagccttcaaggttttattcagaacatgacctcacaaatgtatyttctctgtttgtttttgttcactgagcagtatattaattaatcctggaaaccatcttaagatccaagaaggtactttaggatttttcatcgcaagtgatg

SEQ ID NO: 31143 - DNA, 201 bp, Homo sapiens
gttgcattgctagttgatggttctttttataaactcccattttttgagtatgctttgtctatcagaagtttcacaaatcctctcatttaactctaatctayaaatttttgttttgttttgttttttcatctctgttatatggatgaggaattcaaggcagagaaaagttaggcaactttttcattgttgtgcctattggat

SEQ ID NO: 31144 - DNA, 201 bp, Homo sapiens
tcttaagatccaagaaggtactttaggatttttcatcgcaagtgatgccaaagaagttaaaaggtaagagtttattttcaactggctttctttctggcccrgctgtagacaccttgacccacggaagtaggcaggcttccataaccccaaaactccttaacatgtctatggccatcaactggtgtaagaaaaacttccacg

SEQ ID NO: 31145 - DNA, 201 bp, Homo sapiens
ccttacaacagccctatgcagtcttctctctgactcttacccacttctccctgttgtagactcgaagtgaagctgccatgaccgtcctgagtggccatgtygtggtctgcatctttggcgacgtcagctcagccctgatcggcctccggaacctggtgatgccgctccgtgccagcaactttcattaccatgagctcaagc

SEQ ID NO: 31146 - DNA, 201 bp, Homo sapiens
gcccttgagctgtatgtaattgctctgtgtttatagttacataaaagaatgagtaatatgcctctatggaagtaaaacagaaggaagtgattaattttacrtaaatgtagtctaggagacagaagggacattagagatgggtcttgatgagtgagtaggagtttcccacgtggatattgtgtacagggggtcgttttttca

SEQ ID NO: 31147 - DNA, 201 bp, Homo sapiens
gaagtgagttacgattatttataatggtttcctaccctgtccttctaaagaattaatcatcagagtttatcccgggaatactaattgttgacctgtgaatwatgcataagctacatttttggggttgtatgtatatagtgtactctgattatttccaaattttctacttctctgatttttcttcctcctctgtttccttcc

SEQ ID NO: 31148 - DNA, 201 bp, Homo sapiens
ggaatccctcccacaatacgtgggaattatgggaatacaattcaagatgagatttgggtggggacacagagccaaaccatatcaaatgctcagaaggcatrtgttttggtaaggcatcaaagaaatgtttaccagagcactgaagtttccatagtctctcttttttgggcagtaaaggttctatatagctccaagacataa

SEQ ID NO: 31149 - DNA, 201 bp, Homo sapiens
tccatccttgagtatgtttggggctttattttcagtctgtgtttttgaaacttgagccctgacttcctcttgttcctgacgcaggcctgagagtgccaatyggctgtatttttttttttaaaatgaacacttattattaaaattttctctggataaataaaaattgtacttgtttattgtatacaacatgttgttttgaaa

SEQ ID NO: 31150 - DNA, 201 bp, Homo sapiens
ttgtggatctcttggggaccctccagacctagttttgagaatgactcatataaacaatttgcagagtctaattcatatactcagactagggttctgaattsttttccccctgggaggaaggaaaaacagaggataacattggttatctggggtaataagaaagcaaggggcagactacagctgccctaagatctgagatct

SEQ ID NO: 31151 - DNA, 201 bp, Homo sapiens
ggcagctatggatatgcacagtgagggtcattctggattctccggcaccctctatgtgccaaggactgtctgaagccctgggaaactgcaacagaaagggstgggttgggtttcagtgtgtgtggtggggggtgcagataatcaacacttcagtaaatcaatgaatgagataatttacagtggcaccatgagaccactgaa

SEQ ID NO: 31152 - DNA, 201 bp, Homo sapiens
cctctggggatgggagctgggcttttatggaggcggagggaggagatgaatgcttcccctgcagctgcctggcttctgctgtcttgccagggggtgggatscagggtcctgtcgtggtgcctggcctgatctaactggcctctcctgttcaggcacattgtggtctgcggacacatcactctggagagtgtttccaacttc

SEQ ID NO: 31153 - DNA, 201 bp, Homo sapiens
cttttaaagtgtacatacagttcggtagttttttagcttattcgcaaagttgtgtaaccatcattattatctacattttcatcaccccaaaaggaagtccygtaccattaagcagtcactccctattccctctgctcccagtccctggctggtctactctgtgtgggctctctggatgtgcctgatctggacacttcatat

SEQ ID NO: 31154 - DNA, 201 bp, Homo sapiens
ggttgcggtgagccaagccgagatcgtaccactatactccaggctgggtgacagagcgagactctgtctcaaaaaataaaagaagaaatgggcatataaayagatctacataagactcactggaagtttagagctctttaaaaaaatggacaacaaaaagtttttccaaataaatgttgattctgggcctggaaagtttga

SEQ ID NO: 31155 - DNA, 201 bp, Homo sapiens
ttactcacccagtgggttgggagccacttgctgggtctgagtttccataatcaccatagaaatggaagtaatattatccttttgcccagtcgatgggaggwtggaggaatgtcttagtctgtttggcctgctgtaacaagataccataaacttggggggctgataagcacatttatttctcacagttctggaggctggaaa

SEQ ID NO: 31156 - DNA, 201 bp, Homo sapiens
acagacacgaacctcatctcagcgttggtaggaggcaccttccacttggattctcttcatgtggttaagagagtcctgagttccaatcctaagttcactcrtctctacctccttgcctttgtgcaggttacttaacttttctgaccatcagtcttctctgttgtaacatagggatggtaacacccatttcttatgcatgca

SEQ ID NO: 31157 - DNA, 201 bp, Homo sapiens
aattccatcttgggtctggtaattctgccacagatggtggcccattgatatgtgcatgcttggctggggtgagagtctgtgccaatgtcacaggacacagmaaccccaatgagtctgtttacttatttaacagtcaaggtgaccagaagagacactttccaacaggacacaatgaggaggtacccagcaagtcttctagct

SEQ ID NO: 31158 - DNA, 201 bp, Homo sapiens
gtgtttttatttgaaaatgtagctgccctgaggaacagcagttaggagccaacccccagtttaagcttcaagtcatggaaactggcctggtttacccagaygtcagtgatgcctgggaaagctcttgcttttccagtgcccactgagcagagatttaatttactcaatcggtacgtgtctgttaagcacattgctgtatgc

SEQ ID NO: 31159 - DNA, 201 bp, Homo sapiens
gttggaaaggtggatgacttcagatgagccttgatccggtggctcaacgatgtctccatggacccagtttctttctgtcactctaatctgctctccttacrgttggccttgtcctgaggctggtttgcctctgggttcacacatggctgctgcagctctggagggcacatgctgatctgctcaaccttgtcaggaaataaa

SEQ ID NO: 31160 - DNA, 201 bp, Homo sapiens
tggccttggggaacagcagagaagcttggaaaaaaaaatgataataagtcacacttaatggagaactcgctatgtgccgggctgggtatgagggactttaygtagctgaatcagtgataagcttttgattgcatgtagcagaaatgctcacttcaatgggcttaacattaaagggactccattgactcatatagttggaaa

SEQ ID NO: 31161 - DNA, 201 bp, Homo sapiens
actttagggtgtttgcttaaaggacttttccctcactttctctccttccccagacgtacttcaatgacaatatcctcaccctgatacggaccctggtgacyggaggagccacgccggagctggaggctctgattgctgaggaaaacgcccttagaggtggctacagcaccccgcagacactggccaatagggaccgctgcc

SEQ ID NO: 31162 - DNA, 201 bp, Homo sapiens
ttgctgtctgggccaaggtggctttgcttatgagacgtgatattccccagggtcttctgcaggaggctggctattgggaggtgggggtgagcagcaagtgytcccgcgtggtcatggaggagaggctcggttccttgtgtacagtggtttgtggagggattttcaaggagtgggatttgcagtggagaagggttgttggga

SEQ ID NO: 31163 - DNA, 201 bp, Homo sapiens
gggtagagcatgttatttaaatccattgttccctatgtcttaactcttgctctctctgttgccaggaggcccagaagattaacaatggctcaagccaggcrgatggcactctcaaaccagtggatgaaaaagaggaggcagtggccgccgaggtcggctggatgacctccgtgaaggactgggcgggggtgatgatatccg

SEQ ID NO: 31164 - DNA, 201 bp, Homo sapiens
cctgggtagcccagcctgttccttgctgcagttgaagactgaccgaggagctatcagcggcttcccggccactgtggtgccatttttggcctcaaacccaytgtgaattgctatcttttcccccagccatcagccggaagatccattaacaaattaaaattccctctagagtcagaatggctttggtttctgggttctaaa

SEQ ID NO: 31165 - DNA, 201 bp, Homo sapiens
attataagcctcttttctcacacagaagagtaagatgaagcatgcagagaccaggttgggttaagactctgtactaatcacaagtagtgcaagaaacattkgctggacacctactgagtgctgggaactgggtactcaacacatctctgtgaggaagggactattatcatttctattttcttgatgaggaaagggaggcac

SEQ ID NO: 31166 - DNA, 201 bp, Homo sapiens
cataggattggatctagataaaccagtagaacagtttctgtatctagacatctgggtgaacactggccttggggaacagcagagaagcttggaaaaaaaaatgataataagtcacacttaatggagaactcgctatgtgccgggctgggtatgagggactttacgtagctgaatcagtgataagcttttgattgcatgtag

SEQ ID NO: 31167 - DNA, 201 bp, Homo sapiens
atcctcttgatagccctctgacactggcattgttattatccccattttgcagatgagaaagctgtggttcagtatgtttaaatggctcacccaaggcagayacagctagtgagtggcagcatccagaatcaaactcaggctgttctaactccaaaactctgagtatttctgtaataccagaattccttttaagacctggga

SEQ ID NO: 31168 - DNA, 201 bp, Homo sapiens
ggaactcagggattttgactcctaatcttgtgcttctcaaactttagtgtgcacaggaaatctgaggatcttgtggcaatgtatattcgggaggtctaggrtggggtctgagattctgtttttctgatgagagccctggtgatgcagatgccgctggtctctggagcttacttggaatagcaaggggctccagaaagctgg

SEQ ID NO: 31169 - DNA, 201 bp, Homo sapiens
aggggtcatggggaaccctaccagctttcccattaaacccagctggtaaaatggactcatgtctgtttgtttttggggtttgtattccctcctacctaaakaaactgcaagagaagggatagaaaagaccaaggcatcagcaagtctgtgcccaggagtgcaataatccttgtgtttactggaaggggaggctggcattga

SEQ ID NO: 31170 - DNA, 201 bp, Homo sapiens
cctcctacctaaagaaactgcaagagaagggatagaaaagaccaaggcatcagcaagtctgtgcccaggagtgcaataatccttgtgtttactggaagggsaggctggcattgaacccatgtcaagataggtttggagaaaacccaaagatgccaaggccttgccttccatcccctgtgatctactacttaatcaaatagc

SEQ ID NO: 31171 - DNA, 201 bp, Homo sapiens
tcctcagggaggaggacctgcccatacccctggccttggtgcctgccctatctttagaatggttggaaggaacaagggagctcatagatagggctatttgwtaaaagaagccagcacagtgaggagggaaggtgccctcctgcatgggtggggccattctggggcacagtgccctggctgcattatccctgggtggaggat

SEQ ID NO: 31172 - DNA, 201 bp, Homo sapiens
tggctctctgctctggcccaggggctggtcatttctcaggtctgggccttctgtgtgagtcaggtttgatggaagtgtccttgaaggtgattcatggggargagaggaggggaaccgggagtagtggcctcaagccctgcctgagttcatccttggatccctcagcctttcttgacactagctcatcaccttagcaatgag

SEQ ID NO: 31173 - DNA, 201 bp, Homo sapiens
agagaggaaggtacccccacattggaaatatgccttgaggaccagaaggaattgaccagtcttttgactttcattttttaaaattgaagtctaacatacaygtagggcatgcacagacataaggtgtacaggttggtacaatgtatgcgcctgtgcagccgcctgttcttggaggcaagagccctatgagttgcatgtggt

SEQ ID NO: 31174 - DNA, 201 bp, Homo sapiens
agcatctattgcatgcctgtgctcagtgggggtggggggagtagggagagagaatccagaaaggagtcagctccagctttgtcttccataagcaaatggcktagaggggattgttcattttcactgttttgttttggggcaaggaggtgtgtcagggaggtgaggaggtagagtagagaatcatcctccaccgtgaagtga

SEQ ID NO: 31175 - DNA, 201 bp, Homo sapiens
aactgattcaggtcctccctgtagtcaacagagataaaagtctcaataatcaaacctgtgggtacttcagtgaccagggaccaccatctgtcccctgtggrtccagacatcaggcaggaggaaaagttggggccatgtgtcagcgtcccagctggggctcaccatgggaagtgggattagggaggattattccagttctct

SEQ ID NO: 31176 - DNA, 201 bp, Homo sapiens
aggttctctgtgatgcttggcctccctcctgccaggccctttgtgttctctgacaacctaaagaaccttccttcctggttactgggtctgtgctcttggamcctgatatattaataaatattgattgtttgttgcacacctgctacaaatccaccaggcccagtgctagatgctatgaaatataagaattaataagccctg

SEQ ID NO: 31177 - DNA, 201 bp, Homo sapiens
cacttggccaaacagttgggcttttaataggattttgtgcagcatcaggtgagaagccatatggcttttctgtctaggagtctcagcacctgctagcaccrctgctttgcctcactgccctctggggatgggagctgggcttttatggaggcggagggaggagatgaatgcttcccctgcagctgcctggcttctgctgtc

SEQ ID NO: 31178 - DNA, 201 bp, Homo sapiens
gtgaagaaggttgttacaggaaaaggaaacctaggacatgcagatccctgaattagaaaagaggagtgctcattgaaggaatgcaagaatgtccagtattrctgtggattaagggaggtgaggccaagagtatttcagtatgtggccagatgcctggcaaaggccagatgtgccagagcatcttcgacggccatgctgagg

SEQ ID NO: 31179 - DNA, 201 bp, Homo sapiens
actgttaatgattctggatcctatttgtattgaactgaagatcctctaaagcccctggtcttatttctccaatctctctccaggggtgttcttacatgtcrtggggtgcagaccctgccaacttccatgctgagactcaggaaagaggtttgggcttgaagcttgtatgtcccagagaaagaaaaccctaatgtggaggtg

SEQ ID NO: 31180 - DNA, 201 bp, Homo sapiens
tcaaatttttcatgcccaggacacagactgtggctgttttgtgattttgttttcacactagcaagaggtatggtggtgggaatactgtttaacctggcccrgtgtctgcaacccctcaggatagccctggctgctggtcctgatgcaggataggtgagccccaaaatggggcttagcccatgaaggtttttagcttccccc

SEQ ID NO: 31181 - DNA, 201 bp, Homo sapiens
gtttatgtcacaaatgcctgtcacagaaggggcattaaaaataaccgaatggctaataccatttctcaaaataactacttgcaaagtgctttgctggggcraatggctactaaaattagactccctggtggtatatgtagggtgtgtgtgtgtgtgtgtgtgtgtgtatgacttctaaacccatttccccccagggtgagg

SEQ ID NO: 31182 - DNA, 201 bp, Homo sapiens
cagcatcggtgcacttgtaatatacttcatagattcatcaaagtgagtattcaaatatactttcttgccctcgtttcataaacaatcatgagcctttacaytgatccatttatttaccttgacaccaacctttgcaagaccttctgagtgcagaagattttggaggaagctagtgctgtactgtactgattttctaaatgg

SEQ ID NO: 31183 - DNA, 201 bp, Homo sapiens
agtggatcacctgatgtcaggagctcgagaccagcctggccaacatggtgaaatcccatctttactaaaaatacaaaaattagccgggcgtggtggccctrtgaaaactcaaaacttaccctttgacaaaagagtgtacattggatgccagcaccatgcttctcatgttttttctctttcttatttcttctttcccccagt

SEQ ID NO: 31184 - DNA, 201 bp, Homo sapiens
agctggtttatcttctgcaagaacttcccatcccttcgacccttgggaactgtaaatcaaatggcagactgtgaacattaaaatcacacattgaaaataakgcatctctatttcattcttttttccaggtttgagatttttaagagctctgagactgatacagttttcagaaattttgcagtttctgaatattcttaaaac

SEQ ID NO: 31185 - DNA, 201 bp, Homo sapiens
tcaggtgaagctcacctacatttcataggagcctatcaaatgtgagtggactcggagaaggaaatcactgagcctcacatggcaaaggagcactcaaagtrgggaattctgaggaagcctagaatgggctgggcagggagggcagggtacagtcccactcatcatcgtgaccaggctggacctgtgattgcagtgaatgag

SEQ ID NO: 31186 - DNA, 201 bp, Homo sapiens
ggactcggagaaggaaatcactgagcctcacatggcaaaggagcactcaaagtagggaattctgaggaagcctagaatgggctgggcagggagggcagggkacagtcccactcatcatcgtgaccaggctggacctgtgattgcagtgaatgagacttggccaggagaggcttgggtctaggagtcctgggttcgagttcc

SEQ ID NO: 31187 - DNA, 201 bp, Homo sapiens
tgcatgtttaggtcgggtagccagggaaagtcacgctgatcaagggacattgagtaagaacccaaaggaggtgagggagtatgccatgtgggcatctggcraacagcattccaggcagagaggctgcatgtgcagaggccctggggcagtagcatacctgtgtgttcaagtgtcactgaagacatctgccagatcagcgga

SEQ ID NO: 31188 - DNA, 201 bp, Homo sapiens
actgagcctcacatggcaaaggagcactcaaagtagggaattctgaggaagcctagaatgggctgggcagggagggcagggtacagtcccactcatcatcrtgaccaggctggacctgtgattgcagtgaatgagacttggccaggagaggcttgggtctaggagtcctgggttcgagttccattaattatttgaccctga

SEQ ID NO: 31189 - DNA, 201 bp, Homo sapiens
ccggctgcctgtttttgtaaataaagttttattggaacaaagccatatctattcctgtacatgatgtccaaaagctgctctgaagccacagtgacagagttgagtatttgtgacaatgtctatatggcctgtaaagcctaaaatatttactctctgtccttgtttcctgacagttggatttaagccacctaacagccaaat

SEQ ID NO: 31190 - DNA, 201 bp, Homo sapiens
ctggctgtctttaaagaacgctgggcggtgctagcctgtatttctgatgagaggaaggggatttaacctgtggttcaagtgcacttatttggatagctcaragtcttcatatggtgttgttgtgcaaagagcactggactagaagttgggagacctggattacaggaatgactggtgttagctgagtgccccactgtgtat

SEQ ID NO: 31191 - DNA, 201 bp, Homo sapiens
gggtagctgcctgtgcttgggcttggtgtgagagcccggttctgaagattggaaagtattgccaagcacatggtaggtactcagtaaatatctgtttactkaaatgaaagaatgcatgaataactgaaagagatcaaagctgatatattcttctagaactttatgactacagggaatgaagattaatatggcaaggatagg

SEQ ID NO: 31192 - DNA, 201 bp, Homo sapiens
cggctgcctgtttttgtaaataaagttttattggaacaaagccatatctattcctgtacatgatgtccaaaagctgctctgaagccacagtgacagagttgagtatttgtgacaatgtctatatggcctgtaaagcctaaaatatttactctctgtccttgtttcctgacagttggatttaagccacctaacagccaaatg

SEQ ID NO: 31193 - DNA, 201 bp, Homo sapiens
acgtttcctttaccatgacttaacctaaggtgcatgataatgagtgttaactgggtaccaggcttgcctttacaccaggttctgtccttatagcaaccccrtcagctaggtacccccatccctgttttccagatgagattaaggaactttcccaaatttagggtctgaattcacatctgctcacccttaaatgagatgccg

SEQ ID NO: 31194 - DNA, 201 bp, Homo sapiens
acatccaggcatccaggtccttagaaatataggtgccctgataggactgtagctggcagacttgcccataaaacaggtgaggcaggtgcttgaacatgtgrttcacatgttgcatagactgcctactcctgggcaggggcacacttggcctgtatttgaatacacctagacttcaaactcagtttgtgaatcacctccttt

SEQ ID NO: 31195 - DNA, 201 bp, Homo sapiens
acagtgaggtagtgctaaagatggaggcagaaagtagggttggaggaaaatggggtgagaaatgctcccttccctctgcctctcatcacccacggcacacycctataccactataggaaggacgagggagaggggaatggagagagaggaaaggaagaattttgcagtacgagatgtcaggcattgaaagggttaactcag

SEQ ID NO: 31196 - DNA, 201 bp, Homo sapiens
acctcctttggaagctgtccttgcaccctaggctggaagcgagctttcgtcctctgaacttcaattgccctgtattcatacctctgtagttcgggctctgstcactttctacctgggatttgagttggtacatgccttctcacctactcgcctggactggactctcctttgaagacagggtcgaggttgaagtcatctttg

SEQ ID NO: 31197 - DNA, 201 bp, Homo sapiens
ccttgcaaagctcactttcttcattggtaaactgtgaatactaaaaataccagccacgtaaaggttttgtgagtataatagcatttagcatcttgtaagtsctcaataaatggccctgttatgatgaagttggcctttattttagatccctctcctttgtcaatataaccaggattgtgctgaactgagggacaggagacc

SEQ ID NO: 31198 - DNA, 201 bp, Homo sapiens
catctttgtgacccctgcagggcattgcacatagcagatgtgacctctcgctggtggtcagatcaacttcaggggcacagggttcctctttttatctgccygatggcctttgtctagtgtattgctcaggatgacaataagaggaagattctccccctgtttaattccgggatgtcactggtcaggctcctcttgtatctc

SEQ ID NO: 31199 - DNA, 201 bp, Homo sapiens
ccctaccccacccaccctaatcctggaaacctctctccaaagatgtctactctttctaaattcctttgtatgcctgtgggtcctgggagggatgcatataycagcatttacatgtgtgaatacttagtttatttattgattcttaaacctagaaacatgtaatgagcatttccccttgtggttgctgacatttcaaaacta

SEQ ID NO: 31200 - DNA, 201 bp, Homo sapiens
ggcattatagcattttacagctcatggaccagctgataggatagtgaatataattgccatgtgacaaactaaagtggctacaagtgagctaacaggtgtcrtttcattattaatttcaatcaaagtcattagttgctatttagggatctggctgcttggccacctacaccgtacttcatctggctgctacagcttttgaag

SEQ ID NO: 31201 - DNA, 201 bp, Homo sapiens
tactgttactttcatttggtcatctttgggagactgtgacattttcccctaatgtgggcattgacaataacctcctaggtcattggtcactctgtttctgrtaagtctccactctagtccatccaggttggattgcacgtctgtggaatgtccaccccctgctggaatgtagcatctctgaagcctaggactctgtgcctt

SEQ ID NO: 31202 - DNA, 201 bp, Homo sapiens
taaactgctcatacccagcagcactgcctagctaatgtctaacctgtgggagtaggctggaagcagctcaaactaatgaggttaacctacataatctaatygcccagactgagctaaaagcagacaaagagcacagagccagggagccttcagtttatttctaaattttttctggcttttgtatgctggagtgtcaccaag

SEQ ID NO: 31203 - DNA, 201 bp, Homo sapiens
cctcccgagtagctgggattacaggtgcgcaccaccatgtccggctaatttctgtatttttagtagagacggggtttcaccatgttggccaggctggtctygaactcctgatctcaagtgatccacccgcctcagcctcccaaagtgctgggattacaggcatgtgccactgcacccggtcttcaaattgactttcaaatg

SEQ ID NO: 31204 - DNA, 201 bp, Homo sapiens
atatgactgtgtgaagaaggttgttacaggaaaaggaaacctaggacatgcagatccctgaattagaaaagaggagtgctcattgaaggaatgcaagaatktccagtattgctgtggattaagggaggtgaggccaagagtatttcagtatgtggccagatgcctggcaaaggccagatgtgccagagcatcttcgacggc

SEQ ID NO: 31205 - DNA, 201 bp, Homo sapiens
aacaatttgcccacctctagtctagtgaagcaaagaggccctgaacaagtacttgcaaatgccttgagtgttatgaaggagcagtgcaaagaccacatgaytggaaggttttattgactgatagcaatggtggtggtggagtggaggtggagggtgagttaggaaaggcttcctggggagagatcttaaatatgagtagga

SEQ ID NO: 31206 - DNA, 201 bp, Homo sapiens
actttcagtcctcaaatggtgaaaaaaaggggagcctccccagatgtctcacactgataagaggaagaaatatccaaagccattagccagtggtgacaaasagtgtgtgaattgtaacggacgcagggtggctgaagaaaagactgagtggttggagacaggcaggcaggcctgagtttcaaatccttaccctgtcacttt

SEQ ID NO: 31207 - DNA, 201 bp, Homo sapiens
ttgagcaagttacttaattattctctgtgcctccatttcttcatttgtaacatgggaataatcaaaaagaataaatgaagattgttatgaagactaacacrtgattgttattattatctttttgttcatttatttagctgtgtccttagtctgttgcttgattggtgtggtgttggggatgtggccaacggagacaggaaa

SEQ ID NO: 31208 - DNA, 201 bp, Homo sapiens
ggctgcctgtttttgtaaataaagttttattggaacaaagccatatctattcctgtacatgatgtccaaaagctgctctgaagccacagtgacagagttgagtatttgtgacaatgtctatatggcctgtaaagcctaaaatatttactctctgtccttgtttcctgacagttggatttaagccacctaacagccaaatgc

SEQ ID NO: 31209 - DNA, 201 bp, Homo sapiens
gctgcctgtttttgtaaataaagttttattggaacaaagccatatctattcctgtacatgatgtccaaaagctgctctgaagccacagtgacagagttgagtatttgtgacaatgtctatatggcctgtaaagcctaaaatatttactctctgtccttgtttcctgacagttggatttaagccacctaacagccaaatgca

SEQ ID NO: 31210 - DNA, 201 bp, Homo sapiens
gattatgctgtgcaatgcccttcttcttaggagttgggtgctaaagtatttagggcttgtgccatgatgtctctgatttattggtaaatggtttagcaaawatatatatatatatatgtacatggcaagaagaagagaagaaaaaagggcgggggggataagagaaaaagcatgtagggagataaagcacccgtggtaaaa

SEQ ID NO: 31211 - DNA, 201 bp, Homo sapiens
caagaaatacgggggctcctatagtgcggttagtggaagaaagtaagtatgccaagaggttttgctgcctctgctgcggtagaatcctctctgcatgccatttttttttttttggctcttgtttctttgtttcatgcatgtaggcaatgtttgcccgctacgtgcccgaaattgctgctctcatcctgagtcggaataaat

SEQ ID NO: 31212 - DNA, 201 bp, Homo sapiens
gtctccgccagcatttcccaatcactgccccaagaagtcaataaaatcaattgccctgaaggctaagttgaaaatatttcttgactttcattccaggtgattttttttttttaatgaaataattttcctagtcaaatgtgggtgagctggtgggtgggctggaggccggcagcttttggtgccagctgacccagatggggc

SEQ ID NO: 31213 - DNA, 201 bp, Homo sapiens
ataggggtttgggtgtccacaaccaagggttcagtgagtagctgaggcaggtaatctctctgagttggagggattagagctctctgggctcttgggctgayaccctaaatcttattcataagggagccctcctgcagcccagcctgcctcccaaggccactgcctcctcctcctttcctttgtgtaaggtcaaagctgctt

SEQ ID NO: 31214 - DNA, 201 bp, Homo sapiens
agggaccctctctttgtttgcaagaccaaaaaaagaagaaaaaaaaaagatctcaggctattgtccaatgcttctatttatagctgccaaataattaagcrgatcagcccttccaggatcagaaggggccatctagctggtggaccatatggtgagtctgcagggtcgcagagtggttaacaggagggaagagaggggaga

SEQ ID NO: 31215 - DNA, 201 bp, Homo sapiens
agaaaccaaagtaaaggtaaacaagtctaccagttaggattctctggttgcaggcaacagaaacttatttttttgctgacttaagaagaaaagttttttgttttttttttttaaaggttagggtaccttagagattccaatgaaaaactgaagagcaagatcccagaaaggacagaaaagaaccagagatgcagctctgac

SEQ ID NO: 31216 - DNA, 201 bp, Homo sapiens
cgttttgtggtggtcacctgtgcaggcttctgaaactgttgcccatgtttcacccttgctctgcctcttacttaaccctgtggccttaggaaagttttaayttctctcctcctgagttttctcacctatagaatgtggataaaagtcacacccaccttgtagagttgatgtcagtattaaaaacgtgcaaagcgcttagac

SEQ ID NO: 31217 - DNA, 201 bp, Homo sapiens
actctggaggctgtggtgggaggatgacttgatcctgagaggcagaggttgcagtgagtcaagatggcaccactgcactccagtccctgtctccaaaaaamaaaacaaaacaaaacaaaacaaaacaaaaactggctgctcatgcttccattgctaggattcacctttgtatccctaacatccatcaatgtcatacttata

SEQ ID NO: 31218 - DNA, 201 bp, Homo sapiens
tagaatgtggataaaagtcacacccaccttgtagagttgatgtcagtattaaaaacgtgcaaagcgcttagaccagggctctgaggtatctgctgagctcyttagtatgcctctttcccctccacccagcatctggcccactgtcttgaacataggagatggccagaatttgcttgttttttttcctttggtgtggcgtca

SEQ ID NO: 31219 - DNA, 201 bp, Homo sapiens
tgcattacaacttgctttcaggaaaggacctggtatgtgcctgtaaagttatgtcactatgaacatattccaagagatagttgatttcataattggacaaygggcttgaaatatgaagcatttcaatcccctatgatctagtaatagtaatgttctagggcctagaggttatagggaacctcctgggtgttgccatggcaa

SEQ ID NO: 31220 - DNA, 201 bp, Homo sapiens
aatgctgcagtatcacaacaaggtaggagtgcgagagcccgctccaggtctgaagacccatccacaggtccagcctcttcttcctcattatacaggctcacacacacacacacacacacacacacacacacacacacactctcacatgcccacatgtgcgcaactcaaagacctgggtaaagaggtgtgattgttaaaaat

SEQ ID NO: 31221 - DNA, 201 bp, Homo sapiens
ttacgtctaatttggaacaacaacaataataataacaataaaactaattataatattaacatttatccttactggggttgtacaatgtggcaagcactttytaagctattcgggtgcattatctcatttaatttttataataaccttatgaactaagtattatttttgttatcatttttatagatgaataaactgagggac

SEQ ID NO: 31222 - DNA, 201 bp, Homo sapiens
aatattgaacattcttccaaggagcaaggcaatggagatactaaccttggtgatctgcacagcttgtgtgagccccgtgggctcctctaaaattgacagawtgatgaggaagtgagtaggagtggccccaagcatggctgggtaagggagtggagagtggctctgttgtgatgtggactgagggtgtataagctctctgca

SEQ ID NO: 31223 - DNA, 201 bp, Homo sapiens
tcccggactcaagggatcttcacatctcagcatcccaagcagctggaaccacaggcatgcaccaccatacccagctgattttttttttttttttaaaggtwttgtagagacaggcccatgctggtcttgaactcctgggctcaagtgatcttcctgccttggccttccaaagttctgggattacaggtgtgagccactgtg

SEQ ID NO: 31224 - DNA, 201 bp, Homo sapiens
agatgttataaccagttgaggacaggcaggacatggtggctcacacctgtaatcccagcactttgggatgccaaggtgaaaggatcacttgagcccaggarttcgagaccagcctgggcaacatagtaagactctgcctatacctgaaaaaaaaaaaaaaaagccaggcatggtgatgcctgtctgtagtcccagctactc

SEQ ID NO: 31225 - DNA, 201 bp, Homo sapiens
tgggaatcagccaagtttaagcctatcagaggtccttcagcccaccccacatgcgaggctgggctgccctcacccatctcagatggagagtcctttaaackctgtcaggagacaagattccacatgctccctccatcagctctcccgagccaagaaagagaagagcttgtttaagtttggaagactcccattggcatgtca

SEQ ID NO: 31226 - DNA, 201 bp, Homo sapiens
aagtaaaatatttagaatagtgcctggcacaaaatatgtaccatattttgtttgctattaatattttatagtattattcatttataatatgataggttatrtagtgtgtttggctattataaatatattgtgtgattagtatattctcaagccaggcccagtccccagcctttagaaacccactccctggggatctggttc

SEQ ID NO: 31227 - DNA, 201 bp, Homo sapiens
gggctgggccttggctggggctgggcctcccttgccatccttttctcctggttctcaggtcctgtgctcctctcatctacctctctacctcctgctgagcrgtgatggtggagcagggcaacctgctcacaacttcctgcaggagtggatgatgtgcatgtgttttgtggggtctgttgtagtcttatgtcttttgcctgt

SEQ ID NO: 31228 - DNA, 201 bp, Homo sapiens
ttttatgcctctccatctcactttcttatgacatctgttttcacagattcctagtcctgattcaaatctgaattctctgcttcttcacgtaatgctccctrtatctgccacctcagttgaatctgtttttcctagagacatagttgtttccctcactcctctctctggaggttgctgtttctgtttttgtttgttttttgt

SEQ ID NO: 31229 - DNA, 201 bp, Homo sapiens
atgctgcagtatcacaacaaggtaggagtgcgagagcccgctccaggtctgaagacccatccacaggtccagcctcttcttcctcattatacaggctcacacacacacacacacacacacacacacacacacacacactctcacatgcccacatgtgcgcaactcaaagacctgggtaaagaggtgtgattgttaaaaatc

SEQ ID NO: 31230 - DNA, 201 bp, Homo sapiens
tgctgcagtatcacaacaaggtaggagtgcgagagcccgctccaggtctgaagacccatccacaggtccagcctcttcttcctcattatacaggctcacacacacacacacacacacacacacacacacacacacactctcacatgcccacatgtgcgcaactcaaagacctgggtaaagaggtgtgattgttaaaaatct

SEQ ID NO: 31231 - DNA, 201 bp, Homo sapiens
gctgcagtatcacaacaaggtaggagtgcgagagcccgctccaggtctgaagacccatccacaggtccagcctcttcttcctcattatacaggctcacacacacacacacacacacacacacacacacacacacactctcacatgcccacatgtgcgcaactcaaagacctgggtaaagaggtgtgattgttaaaaatctt

SEQ ID NO: 31232 - DNA, 201 bp, Homo sapiens
tattttcaccctggtagggatgcaccagtgtgtgcttctcagcctcagtcctggacgtatgccccattgccctaaggttgtcccaaagaggccaccattasacctcaccttttatggacaggtgggagatgtctgaacgcaaccacatgttgcccggtgacaggggctgggctgaccaggacacggagagtgacttgcctt

SEQ ID NO: 31233 - DNA, 201 bp, Homo sapiens
ctgcagtatcacaacaaggtaggagtgcgagagcccgctccaggtctgaagacccatccacaggtccagcctcttcttcctcattatacaggctcacacamacacacacacacacacacacacacacacacacactctcacatgcccacatgtgcgcaactcaaagacctgggtaaagaggtgtgattgttaaaaatcttc

SEQ ID NO: 31234 - DNA, 201 bp, Homo sapiens
cacacactctcacatgcccacatgtgcgcaactcaaagacctgggtaaagaggtgtgattgttaaaaatcttcctgggacatttctttctttctttctttytttttgggatggagtcttgctcttgttgcccaggctggagtgcaatggcatgatcttgactccccacaacctccacctcccaagttcaagcaattctcct

SEQ ID NO: 31235 - DNA, 201 bp, Homo sapiens
gttcatttgagctgctgtaacaaaaatacctagactgtgtggttgacacaaaaacactttttacagttctgaaaactgggcaatccaagatcaaggtgctractgatgccatgcctggtgatggcctgctttctggttcatagatggcagtcctctgactgtgtcctcacctggcagaagaaacaagagggccctctggaa

SEQ ID NO: 31236 - DNA, 201 bp, Homo sapiens
gtgtttcctgagatgtttcctactctttcaatacattttcttcctcttccctttcaacattttttttctgcctttcttggcactttttgctgcactcatcytagatgcttagagatctccatgcattacaatttgctttcaggaaaggacctggtatgtgcctgtaaagtcatgtcactatgaacatattccaagagatag

SEQ ID NO: 31237 - DNA, 201 bp, Homo sapiens
gccctgttgtcagcagcagaagtcctgccacctggacaaggctgggaaggcagcccacattgccgcaccagggagaccccaagaccaatgcctctggggtygatgtgggatgattggtggttgactgatggcaataaatgaggacaaggagaaggcagggcccctcagctgcatgccatgggcaggtttcaaccgagtgtg

SEQ ID NO: 31238 - DNA, 201 bp, Homo sapiens
cacagactatacatagagaagccaggtttgtctgtcttgaaactttttttttttgcagtgggctatttactatttatttcccagatggctctttacaccaytgtgggcagtcctaccttacagtggggtctggtttctcaccttataggaggatgtggttgatacttgataagatttgatactggtcaggcgaggtggctc

SEQ ID NO: 31239 - DNA, 201 bp, Homo sapiens
cttaaatttagctttgtgtgttttgttttcttttatttctctcctgcctgctgccaagctaggtcttctcattttgaatttatatagttgattttttttarcctaaatgctgtacttgacatgaaagccttgtaaatctttttagtttggtcttttgccgatttttccaactctggagaaccttttgaactttgattcttt

SEQ ID NO: 31240 - DNA, 201 bp, Homo sapiens
aactttttaggaatcttttttatattttatatacccccatatctttgggggtaatgaatttcttaactttgctaactactgctaaatattttttttctggmtatttgtccttaatttactccatttaaacttcaaggcatgccctctacagcttctgcagtgctaggatttaacaaatcttatgctaattttatatctaat

SEQ ID NO: 31241 - DNA, 201 bp, Homo sapiens
ccttgaaccaagattggtggagtggaaatggagggcaaggttgatgaagaggagggacaaggggtgatatgaagtgaggagcatgggtcttggagtcagamctgaccgggcttgagtttcttcctttcccagttgctaactgtgtgaccctggaaaagttgcttaacctcctagagccttggttttctcacttgcaaaatg

SEQ ID NO: 31242 - DNA, 201 bp, Homo sapiens
gttccccctctcacctctcttatcttggtctcctctcttagcctgaagtcgctgtctgtagtcttctgggctctttctgggtatagccagagtggtcattsgttaaggcttttccctgatgaggctactttctacttcccaagagtgcagccctgacctctctcaggggaccccgcagggcttctggcttttccctttagt

SEQ ID NO: 31243 - DNA, 201 bp, Homo sapiens
cctgagatgtcttatcagcgtcactctcattctgcaggggaggaaaccaagactccagggtggagtgattggctgtatgtttcacctgcagccacgcgaggcccagaagtcttccagtgctttggaggttcacaagaaatatggtgactcaactggaaccacattagaggtcagcatttaacaggtcccctcaattttccc

SEQ ID NO: 31244 - DNA, 201 bp, Homo sapiens
gctggacctgccgaattcaatcttcccatcactcagctcccaatgccatcagtcaagtgttatcaaattggtggagcttaaaaatgacagccatttgaaaytgagtagaatttggtattattaaaatagcattctaaattttaatcttgtgcatcgactttttaatagcttctactttcactaaaaattgtgggccatgct

SEQ ID NO: 31245 - DNA, 201 bp, Homo sapiens
taggcaacatatagtctcagaattctgaatgtggattatctaacctttaactccgccgtctaattatttctcaaaactttgattcactcattcagttcaarcaaggatttattgagccttcaccttatgccagacactatgttcaatgctggaaatatagccctgaacaaaacagacatcagctcctcccctcatagagct

SEQ ID NO: 31246 - DNA, 201 bp, Homo sapiens
aagatgttaggtcaaacaaaacaattaaatagtgttcttcttattgcagaactttttagggcctttaatagactactatggggaatttccaaaagagggtrcaatatgcagtgattctcaaacttagttgaccatagaatacttgtgttggggagaagcttatgaaattaatattccttggaattctactttgggaattgt

SEQ ID NO: 31247 - DNA, 201 bp, Homo sapiens
agctctccagtgcctgctttccctgtagccaattgcaaggctgacatcccaggaaaggcagcagattagatgagcacaggagcagagaggctgggaaggcrgtggaggagggagaaatgtgggtttggcagaattttctaaaatatcactttattgatttggaagagacacaagagaggaaatataagagacaagtgataa

SEQ ID NO: 31248 - DNA, 201 bp, Homo sapiens
atctgctatgtctggaaaaccaagactggagtctctcagctctccagtgcctgctttccctgtagccaattgcaaggctgacatcccaggaaaggcagcarattagatgagcacaggagcagagaggctgggaaggcggtggaggagggagaaatgtgggtttggcagaattttctaaaatatcactttattgatttggaa

SEQ ID NO: 31249 - DNA, 201 bp, Homo sapiens
gggcttcatgtaacagagagaaaagcagtttttcctacaagtagaagtctagatgtaggggtttctggcactagtgctgctgctacatcatgtcaagataktgtctgtaggatgtcaggattcccttggcttttcactcatggctgcaagagagatggagagcttcagactttgggtccatttcaaggtagaaagaaaagg

SEQ ID NO: 31250 - DNA, 201 bp, Homo sapiens
ttatttgtacatttatatgggatttgtgtctcctcgctagaatataactcttatctatttatactccactgtatcctcagtgcctacagcagtatctggtygaaaggggtgcctgataaaaatgtgaatgaaatgaatgccaacagccaggaaggcacctcatccccctcccctctgccaccccctttatcagggctgggc

SEQ ID NO: 31251 - DNA, 201 bp, Homo sapiens
cctctccatctcactttcttatgacatctgttttcacagattcctagtcctgattcaaatctgaattctctgcttcttcacgtaatgctccctatatctgycacctcagttgaatctgtttttcctagagacatagttgtttccctcactcctctctctggaggttgctgtttctgtttttgtttgttttttgtttgtttg

SEQ ID NO: 31252 - DNA, 201 bp, Homo sapiens
aggttgctgtttctgtttttgtttgttttttgtttgtttgtttgttttttgagatggagtctcgctctgttgcccaggctggagtacagtggtatgatctyagctcactgcaacctccaccactggggttcaagcaattttcatgcctcagcctccccagtagctgggaatagaggtgcacagcaccacgcccaactaatt

SEQ ID NO: 31253 - DNA, 201 bp, Homo sapiens
tcagctcactgcaacctccaccactggggttcaagcaattttcatgcctcagcctccccagtagctgggaatagaggtgcacagcaccacgcccaactaakttttgtacttttagtagagatgggttttcaccatgttgcccaggctggtcttgaactcctgacctcaggtgacccacctgcctccacctcccaaagtact

SEQ ID NO: 31254 - DNA, 201 bp, Homo sapiens
gtgtgatcttggttcacttcaatctttgcctcccaggttcaagtgattcttctgtctcagcctccagagtagttgggattacaggcatgtgccacctgtamaaaaaatacctggctaatttttgtatttttagtagagatggggtttcaccatattgcccaggctggtcttgaactcctgacctcaagtgatctgtccgcc

SEQ ID NO: 31255 - DNA, 201 bp, Homo sapiens
ttttatggatgtcaattttactgtttctgacaacagcttgcgaggaagtatacatttgtgcaacagaccgctttggatgttaattctaaatttagaagccrccttcaatgggtgtggaaatcagttacacaaaattcaggtgcttactaaaaaaaatctgaatatccatgaagcttgtatggtccctggtggaactttgag

SEQ ID NO: 31256 - DNA, 201 bp, Homo sapiens
gttttttgtgttatcaaaagcaagctccccattcctatgtggattcaaatgttctttctaactcccttcctcttctcccagttttttttttgtttttttgkttttttattttttttttttagaaaagatcaagttgttttggcctcaattttagaatttaggaataatgaacttgccaaatatcaccttccctgggctcag

SEQ ID NO: 31257 - DNA, 201 bp, Homo sapiens
agatttcagggtgggaagtcaggagaggaagtttttagattagcatttcccatcttcttaagctgctccttgaaataaaggattctgtgactaaatatcaygttctggccgggcgcggtggctcacgtctgtaatctcagcactttgggaggccgaggcgggtggatctccaggtcaggagatcgagaccatcttggctaa

SEQ ID NO: 31258 - DNA, 201 bp, Homo sapiens
tctttaaaaaaggctcttaagtgtaaacaccttttctatattggagagaaaattgaggatagggtggcaaaaccttctatgtgttaaaaaaaaaaaaaaaagaccagtttcctgccacatatgtaacactttaaaaaataatttctcaattattattttaaaaagttctcatatcactcttgctgtttacccttcctttac

SEQ ID NO: 31259 - DNA, 201 bp, Homo sapiens
gattctcctgctcttatgttatacataagggttttaaaaatctttttaattgtgataaaatacacatacaaaatttactatcttaatcatttttaagcatrtagttcagtggaacattcacatgactgtgtgaccatcactaccatccacttccggaactctttttatcttgcaaaacggacactgtctcagttaaacgat

SEQ ID NO: 31260 - DNA, 201 bp, Homo sapiens
gtggtgcacacctgcaattccagctactcaggaggctgaggcaatagaatctcttgaacccagggggcagagattgcagtgagctgagatcccaccactgyactccagcctgggtgacagagcaagactgtctcaaaaaaacaaaaaagaagattcactacattgtgaaatcctttcagagatgcctagcatgaagagggt

SEQ ID NO: 31261 - DNA, 201 bp, Homo sapiens
gcactccctgaagatgaaacttttcttggataggcccttcaattgagtcacaattctgagatgttttcaacaaagccatatttgtagatatagtttttagwatatatatatatatatatattttttttttcttcagaaaagggcaaaaaggacttgtttggctttgtttgggctttctttgtgcagttgccagctttaatt

SEQ ID NO: 31262 - DNA, 201 bp, Homo sapiens
aacctcttaacacatgaattattcagtcttggctaggccttctcctaaacagttgtctctggttcttaaagttaccttttcctcctctctaaaataacttmcttaccttttcctgccacggacactatgacctcttggttttattttcttgattgtatttggcattctctgaaattgtcttatttgtacatttatatggga

SEQ ID NO: 31263 - DNA, 201 bp, Homo sapiens
ttttcttggataggcccttcaattgagtcacaattctgagatgttttcaacaaagccatatttgtagatatagtttttagtatatatatatatatatatattttttttttcttcagaaaagggcaaaaaggacttgtttggctttgtttgggctttctttgtgcagttgccagctttaattctcaaatgtggcttggtctc

SEQ ID NO: 31264 - DNA, 201 bp, Homo sapiens
acaggctatagagccagactggctgagtttgacctttgttctgccatgtactagtgtgaccctgagccagtgacagaagacaatcgtagtacttacctcayagggttattatgcagattacatgacctaatatttataaagtacttagtacagtagctggggcagactaagtgttgtatacattgttaataaaacatagta

SEQ ID NO: 31265 - DNA, 201 bp, Homo sapiens
cttttgaggttgagggagttccttcccatttctattttggtgagagttttatttttttcaatcatgaatggaggttgaattttgctaaatgctttcctgcmtcaatgtataggatcatgtagtttttcttctttagactgttaatatggtaaattacattgaatgattatacaatattgaaccagccaccatacattcctg

SEQ ID NO: 31266 - DNA, 201 bp, Homo sapiens
tggtgtgggggtctcttccctgtcctctgctcatcatgaggctggctttcctcttttgcccaccccttgggctgggaccagagcacagccagtcaccagtrtggtggcccagcacggcaggctgtgcctgtctgtgtacacgccagctccatgaggtggaagctttggcaatgggctcccagggagcttccccgcaggctt

SEQ ID NO: 31267 - DNA, 201 bp, Homo sapiens
cttccccttccagcataatgggaattggaatagaaagccctattaactgtaaggcctaggctgtgatttataggacattataacaaacgggactatggttygttgtacttggctatcttttgcatttgaggtggccaggattctttgtcaggattagattttgcccccttggcctcagtaaatggctgcatgcaactagga

SEQ ID NO: 31268 - DNA, 201 bp, Homo sapiens
ttcctcttccccttccagcataatgggaattggaatagaaagccctattaactgtaaggcctaggctgtgatttataggacattataacaaacgggactayggttcgttgtacttggctatcttttgcatttgaggtggccaggattctttgtcaggattagattttgcccccttggcctcagtaaatggctgcatgcaac

SEQ ID NO: 31269 - DNA, 201 bp, Homo sapiens
  misc_feature (1)...(201): n = A,T,C or G, or insertion/deletion polymorphism (see Tables 1-2)
ccagtgctcgacaccggcacttggacgtattcatctatttcacccgtattgatggagcacctgttcctcagcagctgtgttctgggttcgggggtcctgtngtgagagatgccatgtgcagcattgaatatcttcatacaaaagaatgtatgtcaatccataatggtccaagacatgcatcacgctaataggggagcctct

SEQ ID NO: 31270 - DNA, 201 bp, Homo sapiens
caagtcatattcttgggccgtaactcactctcagactcctcattcgttcctcaattcttcctcttccccttccagcataatgggaattggaatagaaagcsctattaactgtaaggcctaggctgtgatttataggacattataacaaacgggactatggttcgttgtacttggctatcttttgcatttgaggtggccagg

SEQ ID NO: 31271 - DNA, 201 bp, Homo sapiens
aaaaaaaaaaaaatcacttcctgggcagtctgaatttcttaacctgccccagagagcttaaaaactttagaaaatgtggaggatccactttttaaaaaaawatatatatcctctgttcatttctggaagccctaaggaggatgagagttacattctctgtcactgcccaagattctctcatgaactgtataaacagtgttg

SEQ ID NO: 31272 - DNA, 201 bp, Homo sapiens
tggagtgcagtggtgtgatctcggcttaccacaacctctgcctaccaggctcaagcaattctcctgcctcagcctcccgagtaactaggattacaggcacrtgctactatgcctggctagtttttgtattttcagcagagatggggtttcaccatgttggccaggctggtctcgaactcctaaactcaaatgatccacctg

SEQ ID NO: 31273 - DNA, 201 bp, Homo sapiens
  misc_feature (1)...(201): n = A,T,C or G, or insertion/deletion polymorphism (see Tables 1-2)
gacggactttccatcatcaaaaaatgcaaccaacagagagcttgattaaagtgtagttatttggtgtgaaacatgtcctgccaacagtgtggcagtacagncatgaattaagatgaaaactgacacagtcactgagtctcagcctctgagaagcagctgcaatgtaagagtttttttaaaaaccggtgaatctataaggcc

SEQ ID NO: 31274 - DNA, 201 bp, Homo sapiens
cctgccaacagtgtggcagtacagccatgaattaagatgaaaactgacacagtcactgagtctcagcctctgagaagcagctgcaatgtaagagttttttwaaaaaccggtgaatctataaggccaagagccaggagaggtgatggtgcacatcaaatggaggtggcaatggctttatgacatggtgcccttcacagtctg

SEQ ID NO: 31275 - DNA, 201 bp, Homo sapiens
acagtgtggcagtacagccatgaattaagatgaaaactgacacagtcactgagtctcagcctctgagaagcagctgcaatgtaagagtttttttaaaaacyggtgaatctataaggccaagagccaggagaggtgatggtgcacatcaaatggaggtggcaatggctttatgacatggtgcccttcacagtctggcctaga

SEQ ID NO: 31276 - DNA, 201 bp, Homo sapiens
cctggccacatggagagcagtgcctcagattggaggtggaaagagcatcaactgtggggcacagggatttgggatccagtctgtttctgctcttctttctrtaggtctgagttttctcatcagtaaaatgaagccattagaaagttggagcttttgagatttttgctgggtatacatttgtccagaagtatcttcccacca

SEQ ID NO: 31277 - DNA, 201 bp, Homo sapiens
atcaaatggaggtggcaatggctttatgacatggtgcccttcacagtctggcctagaagtcaccttaagatcacaggctaggctctgcgttcctctagctrgatttttcctagcacaggggtctggctttcttttttcttttctctactttttctttttttccttctcctcttccttttcctctcctcccctttcccccct

SEQ ID NO: 31278 - DNA, 201 bp, Homo sapiens
gtacgcaatacaacattttaaggaacaaacaaacagtaccttcttcctcatgaacattattctgtttaacagggagccaaacgaagttgcaagagtcctcrttttcccatggtgttccatagagctgtttgtatttttaataaaaaactaataattcagaggctgcaaagcatttgtttttaaatttaaaaatgttttata

SEQ ID NO: 31279 - DNA, 201 bp, Homo sapiens
ggagcttgaagtggggggtaggagtggggagaaaggagcaacactcatggaaggagaaccaggcctccaagcagcagcagtgggattgtgctaattgggtkatgatatcagccccataaggttgtagggtcttgcactccacttgccatagagttggtgtttgacaactaatgatccccagaatttagctgtgccttgctg

SEQ ID NO: 31280 - DNA, 201 bp, Homo sapiens
attacaatttaacatatatgtaatatgtagtatttgtttgtgtacttgattggcctttgtctctcactagagaataagctctttgaggacaggaatccttyctgcctatttcactattgcactccagagctcatgcagtaggttctcaatgcatgtttgttgaaagactgagtgagcatcgtttgggctctctaaccatcc

SEQ ID NO: 31281 - DNA, 201 bp, Homo sapiens
ccaggaaggtgacattgcttatcttatcactgagcaactgtggagctgcgattgtaccccaggactgtgtgaatccccaaatctcttttctttcctttctrtactcctgtcatcgcttggagcttgaagtggggggtaggagtggggagaaaggagcaacactcatggaaggagaaccaggcctccaagcagcagcagtgg

SEQ ID NO: 31282 - DNA, 201 bp, Homo sapiens
atcacccacacctctgtgtgctccttctgcagttgtcccactctgtcctccagggcttctcccttctaggctcatgatctgaggctgccccttgctacccmggggcaaaattgttagtcctggaaggctctttaaaggtcattgtgggccaggtgtttcagttaactgatgataggatgggggccaacataattgaatagt

SEQ ID NO: 31283 - DNA, 201 bp, Homo sapiens
gtgaaggactcttggctcccagctcttcttgttctctgtggactttcaagcttctgcagggagacagtgaactgggaggaatatgtagtgactgtgaaggwtacatgtggctggaaggggcaggcaaaaggtcccaaatggccctgtggtgctttagttggcagagagatggacaagttgatcctgcccttatgccgtctc

SEQ ID NO: 31284 - DNA, 201 bp, Homo sapiens
gctgcagtgcagtggcgcaatcttggctcactgcaagctttgcctcccgggttcacgccattctcctgcctcagtctcccaagtagatgggactacaggcrcccgccaccacacctggctaatttttttgtatttttagtagagacggggtttcaccatgttagccagtatggtctcgatctcctgaccttgtgatatgcc

SEQ ID NO: 31285 - DNA, 201 bp, Homo sapiens
ttttttttttttttttttttttttttgagacagtgtctcgctctgtcacccaggctgcagtgcagtggcgcaatcttggctcactgcaagctttgcctccygggttcacgccattctcctgcctcagtctcccaagtagatgggactacaggcgcccgccaccacacctggctaatttttttgtatttttagtagagacgg

SEQ ID NO: 31286 - DNA, 201 bp, Homo sapiens
atgccgtgggaggagggggccatattccaaagggccagctcaatgagaaggagttggcttcttttgaatcatttcagccatggagctctcttttggaaccytcctcagttggaagcctctaaggggatgttgttcctagttggtatcaaacgtggtgaccccactagccccaaatttgactggaagagcctcctttccaat

SEQ ID NO: 31287 - DNA, 201 bp, Homo sapiens
gacctttttcccatttttctttttaatcctccctccccacatgttttgtggcttttggtgaaatggctgtcctaagggaaacaggacagttcattgaaaargagagagaaagtaaagacccctttcccacaccaccttccctcagatgcagcctttgcttacactaaaaatagcttgaaacagaggctgaatcacaaaaaa

SEQ ID NO: 31288 - DNA, 201 bp, Homo sapiens
agccaggggagaaatcagagctggttgggatgtgtgttgtgatgatgtgtgcagatgttcctggatcaacactctccttcctgcctgcccccttcccaccyccatactccccagccacaaagggaatgggatgagtgggtttcagaagaggccaaattatttctaattcagaaatggcaacatctgggctccacctctaac

SEQ ID NO: 31289 - DNA, 201 bp, Homo sapiens
ccatcctcctaattttgcttctgtccataacacacaatagggcgttggacaagtcaattcctctctgggtcccagttttctcctctaaaatacaggcttaygactaggtgatcttgcttccttctcaaagtaacattcaatgacttttttgaacccaatctttggaacccctcttggtgttctgttcttttggctttgaga

SEQ ID NO: 31290 - DNA, 201 bp, Homo sapiens
cactggagcaggtgaaagggctccgaagataggtaccgctgcccttttccgagtactgcctctcctgctgtcccctggccactttcagagagcccatgggytgacttagccttcagggtttagggagatattttggggtggtgagcttttcccaaatacccatctctccctgctttgagccaggggagaaatcagagctgg

SEQ ID NO: 31291 - DNA, 201 bp, Homo sapiens
atgtgccaggcactgttttgagtgttttacaaacatattaacttactcaatccttacacctctttgtggtagatgctcatcttcggctcctctgtcagagrcaggaactgagccttgagagttacctgctctaggccacatctctgggaggtgttctagttatgctgttctagcccttaactcttgtgcttcttttttgtg

SEQ ID NO: 31292 - DNA, 201 bp, Homo sapiens
ctgcaccagtatttggggaggtgggtttgatgtacattttgacaggtagtgaccacacattcattgaaaggagatgggaaagcgtgtgaggtcaccagaasataaagacccagattctactgcacatgcgaggcagctcctctgagctattcctccatcccttcatccattccttcaaacattctggagcacctgctcggg

SEQ ID NO: 31293 - DNA, 201 bp, Homo sapiens
cttgcagtttgacctgcctgcctgagattttagtgtggttggtgccaagatttaaaggaagtgataagcacttacttgttcttcagcatcattaaatgatratgataacatgggtgatgacaattacatatttattgagtgcttactgtgcgccaagtactgttttgcatgtattgttttgtttaattcccaacaacaaat

SEQ ID NO: 31294 - DNA, 201 bp, Homo sapiens
tatttgtgtgctttgtgaatattattatactcaaagcctatttcctggggttgtgttgacataaaaatccccactttatagtagaggaaactgagagagcwtttaagtggcttacctaagatcgcacagactatacatagagaagccaggtttgtctgtcttgaaactttttttttttgcagtgggctatttactatttat

SEQ ID NO: 31295 - DNA, 201 bp, Homo sapiens
atatatatttttttgagacagagtctcgctctgttgcccaggctgcagtgcagtggcgttatctcggcttgctgaaacctccgtttcctgggttcaagcarttctcctgcctcagcctcctgagtagctgggattacaggtgtgtgccaccacacccagctaatttctgtatttttagtagagatggggtttcaccgtatt

SEQ ID NO: 31296 - DNA, 201 bp, Homo sapiens
tattatactcaaagcctatttcctggggttgtgttgacataaaaatccccactttatagtagaggaaactgagagagcatttaagtggcttacctaagatygcacagactatacatagagaagccaggtttgtctgtcttgaaactttttttttttgcagtgggctatttactatttatttcccagatggctctttacacc

SEQ ID NO: 31297 - DNA, 201 bp, Homo sapiens
gggattcaagcttgtctagacaagaaggtggtgaagctcttgatgacagggatggcgggtgaacttgtcttaggtgtgcaagtgtggacccagaagcaaaratgggtatgctgtgcagaagggttaataatcacccccagtctggatcattttgctgtaacatctgctgctaacccactgctaggagggggaatgccaatt

SEQ ID NO: 31298 - DNA, 201 bp, Homo sapiens
aatgcttccaatgaggagtggcagggttactaccacatatagagcatttgctctggaaaatcaaggacttgtgacattcacattcagttttattaatttcrgcaaacctgattattttggtgtgagtcagggcagcataaaaccaatgcattgggcagggctcatgtgaggaaaggagtctgttgtagctagagaggtgtc

SEQ ID NO: 31299 - DNA, 201 bp, Homo sapiens
attggtttccaatgagtgccaattataaatcaagtcctgtgaaaacataaaaaggaacctaagaatcaaatggtcaagaattgtgtttatttctgcagccstggtcaagaaaaggccatgttcatagctggcattcagtttcctgttgggagtggtaaaggcaacaagccagggattttgttagttcttggatccagaagg

SEQ ID NO: 31300 - DNA, 201 bp, Homo sapiens
ggtaaaagctaaagctcaaaggaatgatataccaccattgaacagggctggggctgcatgatgatctgaacaacagactagctaggacactaaaagaacaygtcactaaaaatgtgagccaagtttacaagaatggagttgctgctgaagagatctctcattcatctcccccagtgcctgttcttcacaatcataacgtta

SEQ ID NO: 31301 - DNA, 201 bp, Homo sapiens
tcaatagtttttaactgtttctgtcttgtctttgagcctctcattgatcgttcttgctgattttgtgtgtgtgtgtgtgtgtgtgtgtgtgtgtgtgtgtkgtggcacttgtttgtcttttgagatttctattttgcatttggtgtgagtgtaaaaatgattgggaaggaatgacaagtaatagcatgttttcttttttat

SEQ ID NO: 31302 - DNA, 201 bp, Homo sapiens
ctcggctcactgcaaccttcacctcctgggttcaagcgattctcctgcctcagtctcctgagtagctgggtttacaggcatgcaccaccatgcctggctaytttttttgtattttcagtagagacagggtttcaccatgttggccaggatggttgcaaactcctgacctcaggtgatccacccacctcggcctcccaaagt

SEQ ID NO: 31303 - DNA, 201 bp, Homo sapiens
attgctaaggtttatttgaaatccaacttgcctgatgcagtgcttacttgaagcaagtccaagttaaatacatgttactgtttttaaaaggtaactacacmatactggattcagcactgagattggattgcctatgctatctgattattgttatgtggcaagttcccattttaatctaatatctatttacacaaattaatc

SEQ ID NO: 31304 - DNA, 201 bp, Homo sapiens
ttgtttgtttgttttgagtccaagtttcactcttgctgcccaggctggagtgcaatggcacgatctcggctcactgcaaccttcacctcctgggttcaagygattctcctgcctcagtctcctgagtagctgggtttacaggcatgcaccaccatgcctggctactttttttgtattttcagtagagacagggtttcacca

SEQ ID NO: 31305 - DNA, 201 bp, Homo sapiens
ttggttcatctgggttcctttctgattttgtgatgccctaagcctcctgtccccacagcccttctttcctttttgtagattctcttgcaaacttacaaagygtctgtaacctttggccctgggacccagcatgagcagcttactggagtcaggacagatgcacgtgggtgctgagcagagccctgtggagcctcggcctct

SEQ ID NO: 31306 - DNA, 201 bp, Homo sapiens
cttttttgtttgtttgtttttgtttgtttgtttgttttgagtccaagtttcactcttgctgcccaggctggagtgcaatggcacgatctcggctcactgcraccttcacctcctgggttcaagcgattctcctgcctcagtctcctgagtagctgggtttacaggcatgcaccaccatgcctggctactttttttgtattt

SEQ ID NO: 31307 - DNA, 201 bp, Homo sapiens
tgtagattctcttgcaaacttacaaagcgtctgtaacctttggccctgggacccagcatgagcagcttactggagtcaggacagatgcacgtgggtgctgrgcagagccctgtggagcctcggcctctggcctccttggccagctgctgccctgtcccagggacagtgtggcttcccagggagcacttcactccaatctct

SEQ ID NO: 31308 - DNA, 201 bp, Homo sapiens
tattgagcttggattcctctcctaaaggaaacacatatgccacatatatattcccatgttgtgatacatatatatatatatatatatatacacacacacamaatatgtaccatgatgtatcagagtatatgtacattcttatatgtaaaaattcatatttttacatataagagtagagatattccatagagtgatgtattt

SEQ ID NO: 31309 - DNA, 201 bp, Homo sapiens
aaacttacaaagcgtctgtaacctttggccctgggacccagcatgagcagcttactggagtcaggacagatgcacgtgggtgctgagcagagccctgtggrgcctcggcctctggcctccttggccagctgctgccctgtcccagggacagtgtggcttcccagggagcacttcactccaatctctgagccataaaaaatt

SEQ ID NO: 31310 - DNA, 201 bp, Homo sapiens
ctccccatccactctagcaaactaagccatactggctacagaagcttttgggaaaaagaaaacatgggctgttggaaggaaaaagaattcttaaactgagygctctaataacttaaatttatttctgcaaattggggaaagattgccatgattgagttgtgggggaaaaatacctccctactcagttcacagaatctcccg

SEQ ID NO: 31311 - DNA, 201 bp, Homo sapiens
cccaaagtcaaacagctattaagtggtagtgttggaatttggacccaaattctgattgcagagccagggcatgtaaaaactgccttgcaggaaaggaggtwaaaaaaatgtgcaaaatttataatcctgcctttctaaaacatcatactgaattggctttgaaagataaattcatctaaactgtatgagctctaacacttc

SEQ ID NO: 31312 - DNA, 201 bp, Homo sapiens
gctcaagagtacgggcctccgtctcctcgtcttcctaagcatatttaactgtgaatgaagcaagacaagaggtgtatttctccatgtaagggaaatgctaygaagaaaaggcatttctggtgtcagaatcacgattgtcagtgggagtgtcaggaagaaacttcgtgactttttctctcttcccaggcgcccccagctgtt

SEQ ID NO: 31313 - DNA, 201 bp, Homo sapiens
gttcatttatttattaattcaaggatgttgggtccatttttcagttagactctggaaagataagtgattggtcctatcccttaagggaaatatgctttcaytggagaaataacatgtacacgctgtgtgtatgtgtgtgtgtgcacgcgtgtgtatgtgcatacacatgtgtatcttttttttttttttgagatggagtct

SEQ ID NO: 31314 - DNA, 201 bp, Homo sapiens
acagcaagtcagggtcgcagggctagagctagaatgcatatctggcttctctgaccagcagtctttcccccagaccatatccctactttcctttatgtggktaactttaattaagctctttctacctaccaagcacacccctaagcagtgggtgtcctcctttgaccttcataacaatctcgtgagaaagatcctcttggt

SEQ ID NO: 31315 - DNA, 201 bp, Homo sapiens
gcccccagctgttaggtttcatggcaacccaatgtggtagaaggcagtttcttttccattcttgctgttagatttttatgttgtgtgaccttggggctgcmttagggcctctctgtccttcatgggtctcacctggcagaggagggggatacacagggtgatttccatagggacttacagctctaaaatgctcgagtgtat

SEQ ID NO: 31316 - DNA, 201 bp, Homo sapiens
gagggattataaaaccagggcaagcctgtcaaagagaaatttgatttggttctgctgttttacattttaatatgcctgtatgatgacctagcccattaaawtttttttctttaaattatcaataggctgtctcaacctctgttcaattgaattttactctactctcccagggaacaaaatgacagagcattttgttctagg

SEQ ID NO: 31317 - DNA, 201 bp, Homo sapiens
gaatgggatgagtgggtttcagaagaggccaaattatttctaattcagaaatggcaacatctgggctccacctctaacgtactttctaggttgcttttcaratggaaccaaaggagacaatctttggatagatttgtgatagagcaatacagtaaaatttaatgtttatggtataatctaggtgatgggatacaggtattg

SEQ ID NO: 31318 - DNA, 201 bp, Homo sapiens
aactagaactcaataaagccattagcaaataatgactgtgatgtggagaatagagttcagggaaagacaaaagcaaggaaaatatttgggaggcagttttyttaggtctcaactgagaggatgctgccttgggagaggtccgaggccgttggggtgtgagcacatgctggaggcgtcacagacagagcagctgtttagttg

SEQ ID NO: 31319 - DNA, 201 bp, Homo sapiens
cttgaagattgccaccactctgcaggactccaggaggaccattcacattgcattctgtgggcatggtatccccttgaggtgtacgaagaggccccaggtgkgaaacctccctgacaaccctcccatcccacgaatgcagctaaaagacacaggaggtatcagggccacagagtgagaataaaatcccactggagcaggtga

SEQ ID NO: 31320 - DNA, 201 bp, Homo sapiens
aaatgggtatgctgtgcagaagggttaataatcacccccagtctggatcattttgctgtaacatctgctgctaacccactgctaggagggggaatgccaaytgtagtgctgctggagtagattttaaaacagaaaacatttgtgtgttgaagtgaggactggcgttctgttggttggatgacataagtcccaatttcttcc

SEQ ID NO: 31321 - DNA, 201 bp, Homo sapiens
tgaattccttgattttatgaccctcctactaatctctctctctccctccccactgtctccctctcttttttgtactgtttcagcatggagttggggatggrtaagagttaagagttcagctccactgtggaagggtaacacagggctgaacgcattgaagagctgaacacattgttttggcctgtttggaatttgttatgc

SEQ ID NO: 31322 - DNA, 201 bp, Homo sapiens
tcttttttgtactgtttcagcatggagttggggatgggtaagagttaagagttcagctccactgtggaagggtaacacagggctgaacgcattgaagagcygaacacattgttttggcctgtttggaatttgttatgcataacttttgaggacattttgcccaattgctcacttgtttcccctgtggaaacactatctgat

SEQ ID NO: 31323 - DNA, 201 bp, Homo sapiens
gggttgcatggacaggtctggagagtgggcacagtgttcagttggtgccatgctgtctgctctccatctactccagtagcccacagtggcttgcaatgaarccagatgttctggagaaggaggaaacactcttttgcttctgtgcccatccttaccaccagaatccccacagaagatataacttcttaccctcttcttttt

SEQ ID NO: 31324 - DNA, 201 bp, Homo sapiens
ctgggcaccatcatgcccagctaattaaaaaaaattattgtagagatgggggggtctcactgtgttgcccagactggttttaagctcctgtgctctagcartcctcccacctcagcttcccaaagtgttggcattgcaggcgtgagccactgtgcccagcctggattcgttgttattattcgtcatttattattatattta

SEQ ID NO: 31325 - DNA, 201 bp, Homo sapiens
cagaatgttctgtctagaaattgcctccaggcaggatttacctatgacagccttggccagtggatggttctatatctttatgcccagttcaaactctggarcactgtcatccctgaatccctccccatctcccaggtccctccctctatggcaggaaaaagatccaacaggcctgacatggaacttgactgctagggttta

SEQ ID NO: 31326 - DNA, 201 bp, Homo sapiens
atatacctattttttgtggtgagaacactgaaaatctcttttcttagcagttttcaagaatacaatacattgttattaattgttatcaccatgatgtacartaatagatgtcttgaatttattcctcctgtttaactgaaagtttgtactctttgaccagcattcctctcccatcccagcccctggtaaccactgttctgc

SEQ ID NO: 31327 - DNA, 201 bp, Homo sapiens
cttccatcagatgtggatgggagccctgtattctgctgagctaatagaatgcctgtgtccctactggaaggtgacagggaagtatgcatccagcaatctaygggaatatcaaggccacattcccttttttaaaatgaggatggcagtgtgttagaatagaaagagttgacatgaggaacagctgtgaggttatgaattctg

SEQ ID NO: 31328 - DNA, 201 bp, Homo sapiens
ggtcccagtcaattacgtggtcttagttcccatttaaatgctgaataagtcaatcctcaggggtaaattctttcaaaatgctcataaattgtgaaatcctrgtgttggtggggaccttggatattcctttagtgcaatgactgcaaaatatgactgtgcattggattgcccagggatgcttgctaatatgtcaatagccag

SEQ ID NO: 31329 - DNA, 201 bp, Homo sapiens
atttaataaccatcaaatacttgtggactctcccatgcttccaaggccccttgttgttgagtggattgtgcacagaaataatatatgtccctcctagtccragtcagtaaaatgcctctacctgcttctccatgctctcccttggcctttcatggtgattgcagaggccatgcattgagattgtagaccacaagatacaat

SEQ ID NO: 31330 - DNA, 201 bp, Homo sapiens
catcaaattaagatacattttcaacagaaataggaccatttctcttgcccataaattctttttgatgatttgaagatttaaaaagtaatacaagaaaatayactattgataaaaatttcaaataatacagaagtacacggagggagaagaaaaaggggccctttctgaacctcccttctcacatctgaaagaaccctggaa

SEQ ID NO: 31331 - DNA, 201 bp, Homo sapiens
atcatatttagttcaatgtgtctgctgttctcaagtgtggtggtgctggcaggtaacaacgaggaagaagtgaggcagggctcaaattggggaatacatayctgtgtgcatcctggcccagggagtgggctgaaaggagggcaggagtggactggcctgctcaggctcccacacctgtgtggcaagaagggtttgacccag

SEQ ID NO: 31332 - DNA, 201 bp, Homo sapiens
tgaccttggctggctgagatgaagtccctctgaggcctggacgtggcctgcgctgcacagcctgccttaatgtgtttatctgcctgggccttgctcgctgyctgctggcaccatatgaggtgttgctgttgagctccgtggctctatttctgttttctcgcctggcaccagcacagcagggcagatgaggtgtgtggccac

SEQ ID NO: 31333 - DNA, 201 bp, Homo sapiens
gtcttggcaggaggcagtggtgaactgctctggctaagagcttccatccagaagtgtcacgcatcatgtggctcatgttacattggctagagcaaaccacycagcactcagccacacttaactttaggaaactagaaagtgcaatcctacaattgcccagaaagaggacgtaataggagtatttgtgaatatccttaatga

SEQ ID NO: 31334 - DNA, 201 bp, Homo sapiens
catccatggccagactaaattactctatctttcctttgggctgcaaagtcgttttatttataacacacctctcttgttttataagtagccatgaaggggtytgttttacccactagattagggattggtacattacaggtcgaatccggcccactgcatgttttgtaaataaagttttattggaacacagatatgctcatt

SEQ ID NO: 31335 - DNA, 201 bp, Homo sapiens
cagagtccttcacgtatgtcctacagtctggtgaagtgggactcatatgctcattttacagatgaggaatgaatatttaaagagagtccaagccaggcccygattattctggctgtgtagtctgtactcttgaatcagacgacacagtccctctttggcctgccatctgtgttgtactggggtctggagatggttggtgtc

SEQ ID NO: 31336 - DNA, 201 bp, Homo sapiens
gggaacagtgaattctagaccagcagcctccaaagtgggatgcacaaaactatcctttggaataggggaagaaaatgttaagacatctatttctatttacrtttatcactctttaaaatgattacatctgtgtgcactttattgcgtatgtaatatgagcaccatatggtgcatgatgggcatacaaatacacacgtggga

SEQ ID NO: 31337 - DNA, 201 bp, Homo sapiens
tgttaataacttaattggagtgtcctctagaaagaacagtaagtttataggaatttagaggaggaacagatggaggaaagttggccatcccagcccaaagwagatttcaggtatctaaaatataaacatgtttctcctagagcaggactactcgaggtgcggtctgcaagccagcacatggcctgggagcttaatagaaat

SEQ ID NO: 31338 - DNA, 201 bp, Homo sapiens
tgaccatgctgttctctgagcctcagtttcctcatcaatgatagagtggagttagctagatcaggggctttcaaaagctttttcccctgaaacccagaatragaaataccttttctttctcaacccaatacttatgttcatgtatgtaattaaacaaaagttccatgcagcaacccttttaatatgcagtactctgttttc

SEQ ID NO: 31339 - DNA, 201 bp, Homo sapiens
gacctgctgatgggtcataacctgcagggtttttgttttattttgttttgtttttgttgacagagtctcgcactgtcacccaggctggagtgcagtagcgygatcttggctcactgcagcctccacctccagggttcaagtaattctcctgcctcagcctcctgagtagctgagattacaggcacccgccaccacgcctgg

SEQ ID NO: 31340 - DNA, 201 bp, Homo sapiens
gtgtgagccactgcaccttgcctgtgtgtatgtttttgttgagggtgatcttgtaggatttaaagaagggagtaggaggaaagtaatgatgcactcaccasccagttttctagcccatttttattacctactgtgtgctcagcactgggatgagaggaacacatgccgggccaccctgtatcctactggtactgtgatttc

SEQ ID NO: 31341 - DNA, 201 bp, Homo sapiens
ttattggaacctttcagctttttggatttaaagattaaggagtgaaagggaatggaaaatagcaaattggaaaaccctggcaggctttctggtatgggctkggatgtgtttgctgttgtgttttctgtcttgtcctctcccgagacctcacatgtatgaatctccagagtcttttctctctggggatcacaggaaccctga

SEQ ID NO: 31342 - DNA, 201 bp, Homo sapiens
tgttagtgttttgatataaagcttcctaaattctttttatggctttacaaacattcagataactataggccatctaaaaaaataggatcagattatgtacrctattttataatgtgcctttttacagaatttctgtatgaacaggtatacattttcattataatttttaattgcttcttagtattccattgtatgtgtgcc

SEQ ID NO: 31343 - DNA, 201 bp, Homo sapiens
tggtggtctgagcacatagcagagctgccagcgcctgcgggagtcttatgttggtgagggtgtcagcaggggctccgtcaagcccccttccttggctgtarggtttccctggcctaactggtgtttgtatctaacaagagtgctccctccccaacccccaggcccttcttgcttttccacccttctcttactctgctcttg

SEQ ID NO: 31344 - DNA, 201 bp, Homo sapiens
tcatcgaggtttctcccacctctggcagaggcatggatcagcaacactccaccaagaggccagcaagatgctggctgtttcccaagctgggatggggtgaragagtatggcttggaaactcagaggtgatagaggcagcaccggcttcctgagccaagctctccccatggacccaaggcccaggcatgagacgacttcatt

SEQ ID NO: 31345 - DNA, 201 bp, Homo sapiens
aaattaccatgctgcatgttcaccacctgcccaagtctcagagcgcagctagagactcagatgctgtcactatgagcctggggggcacagggacaggagtygagcctcttgctacatacagtctcttcactagaagccagtggttttatctccacagtcagtccctggctttttgtcttgtggctgactcttgcatcaaat

SEQ ID NO: 31346 - DNA, 201 bp, Homo sapiens
tgttgttccattttggaatagcttcatgtgaatcttagcatgtgccaaggtggatgtggagtctttgcatcagaatcctgaactgctcatcctgaaaaaaygatgcgatcagcctgcttcccacagcgtatgctcagggtgacttcttgtgacatggagatggttggcagtgagctttctcttgtgacttcacacagggac

SEQ ID NO: 31347 - DNA, 201 bp, Homo sapiens
tttcctgagacctcccttatccttgcttccccatggactttgctgttttcctgatacggttcataagtgaagttcctgaaagctccagtttgagaccctgrgactgtgggtcttggtccaagtgcagaaaaggctgtggttccactggaggactttacttgaagtataactataactttgttttcatgttttggtagcata

SEQ ID NO: 31348 - DNA, 201 bp, Homo sapiens
aacactcaaggggatgaaagtgctcaaggtgtgccagcctcacttctaaactggtccttgcacctaaggggctgaagtttgttttcaacggttcttgtctytgtgaatccccattttttgagccccttgaccctagctgttccaacaatgagagatactaggattctgttggcttcagtctttcttgctactaccactgga

SEQ ID NO: 31349 - DNA, 201 bp, Homo sapiens
gcctctgccaccactgcttaattctggggcttacctttagtgaggtcatttgccctgtattcagggagctgatgctgtcagcactgtcctagcattggaayggtggggctgttggggagctggccggctcgttctgggcactggtggaggcaagaatgaggtttagagaaatatttacccaaagtaatccctttgctatgc

SEQ ID NO: 31350 - DNA, 201 bp, Homo sapiens
cagaaagtggaatcccagctccttctcaccccggctattgatttttggccttgcaattactgcagaggtgctgcctctgtgaacactgttagtgctagttrgaaagcttgagcttttgaagcttagctgtttgagctacctacgggtttggaaaaaaaaagaatcttaccatgtgtttctttagcctgggcatgaatcaaa

SEQ ID NO: 31351 - DNA, 201 bp, Homo sapiens
aaggagagttaatttaataagctacatttaaaaatcaacagcctataattatctcattccttttatgtgcagttttaggtgacttcctcaaattccccaawcctaaattctatttgcttattttacttctgggccctaaaatcaattactcccctctttccaccaccactaccagtgagaaaaagacagaaaaaggagagc

SEQ ID NO: 31352 - DNA, 201 bp, Homo sapiens
ctcctgtctgcccttgcaggtctcttttatgtctgaccttgctggagtcctttgacctcggccaacaggagtgactgtctcatttgccacttaggcactgycttaggttttaaatttttaatctttgtggctgcttgttaaaaatacagggacccaggcttcattcccatggaattagaatctccaaagatgtgatccagg

SEQ ID NO: 31353 - DNA, 201 bp, Homo sapiens
tagatttggagaatacctggactgctgaaggggctcccgagtcccacactgagggcttctgctgtccatagctggctctgccagaaccattatcatgaccyaatgagaaaactgaatgtttactgggtatttgctaggtgtcagacatggtgtcaagcactttatatgcattatctcaatcctctaaatcagcctatgatg

SEQ ID NO: 31354 - DNA, 201 bp, Homo sapiens
ggcaggagaattgcttgaacgtgggaggtggaggttgcagcagtgagccgagatcatgccactgcactccagcctgggtgacagagcgagactccatctcwataaataaataaataaataaataaataaataaataaataaataaatggatgctcaggattggatgacttattgggcaaaagcctgggcccttgcttaatt

SEQ ID NO: 31355 - DNA, 201 bp, Homo sapiens
gtagaatagatggtcacctatgggggatgacctcaagagctccaggtgtctgccgtgaggcatgacagtgcctcagattcctcacttagaatcctcatgtytgcaatcccaccacttttagaagctgaggtgagaggatcacttgaggctaggcattcaagactagcctgggcaacacagtgagactttatctctacaaaa

SEQ ID NO: 31356 - DNA, 201 bp, Homo sapiens
cctgcccaatcctagtacgagcccaccatgaatgtcagacagcatagagtaagtgcacctggagcccatcctgagcccttgagctaatgtcttcactcctstgatctctgggttccacctgcctcctttgttgtttgaagggtggaacggactgatgcctatgaataaacacaagctccagcgctctccacagatgtcaca

SEQ ID NO: 31357 - DNA, 201 bp, Homo sapiens
atcagggaggagaaagatggagactaggaactgacagaagggttttcctcgtgtgaagggcagcaccaggccatgaggtgacccagggcaggccacagccrtggagggttagggtacagcaccctggtgggtggccccgctgggaagtgcacatttgggttttggtttgccaaactcaccctgcccaatcctagtacgagc

SEQ ID NO: 31358 - DNA, 201 bp, Homo sapiens
tttgtaaaggttattatggttacagctttgtttgcttgagatcctctatttttatagttcaatattattaaggtatgaagaaactgttttatggatgtcarttttactgtttctgacaacagcttgcgaggaagtatacatttgtgcaacagaccgctttggatgttaattctaaatttagaagccgccttcaatgggtgt

SEQ ID NO: 31359 - DNA, 201 bp, Homo sapiens
ctactcgaggtgcggtctgcaagccagcacatggcctgggagcttaatagaaataaaaatgttggagttcaaccctaaacctggagaatctctgaaaggtrgggctgaggaatctgttttaacaaattctcctggtgattcttctatgggctaaatgatcttggcagtatgttagaatcacccaggaactctgacacgtcc

SEQ ID NO: 31360 - DNA, 201 bp, Homo sapiens
gtcctggacatgatttagaaccctatccacagagaacatgccaaattttatgcacctcagggcctttgcacatgctgttttctttggctggaatcactgtkctccctgctttgtgtgttatggttctttctcatctgtcacacttagtttaaagctgcctcctgcagaggctgacacgtcgtagcagttgctccatgaaag

SEQ ID NO: 31361 - DNA, 201 bp, Homo sapiens
gctggagtctaactcattttctgttgtggcgtgaacttggcaactctggtgacaatggccttgagcttgttgcctttattgtccactgtgtgagtgttttsaactttaaactctatccctggcatggttggctactagactttgatactaggaaacctgcttggtgtgcctgttggctcagactctggtgtgcctgaattc

SEQ ID NO: 31362 - DNA, 201 bp, Homo sapiens
gacgttaggaaggagcaggaaatggcagcacaaattttgtagagcatctcatccaagggcacaattgccaaggcaacagtggggttacgattggaaaatgrcctctccccagtcttttaaaatgttacttttgcatccactcacccatttattcattttgtattcatttattagtttgtaacatcttcaaatgtgataatg

SEQ ID NO: 31363 - DNA, 201 bp, Homo sapiens
agtaaatgagaggtgtaggcaagctagttcattggctcagtcccctgttctcactgatgatcccgtgtgtatttgatgaataaggacccacagagcatcayctgctcatctttgctaggcgctcttctaaaacagctggggtttgatgtgacagccaaaggataaattgctgcctcaggaaatgctctgcctttgactgat

SEQ ID NO: 31364 - DNA, 201 bp, Homo sapiens
caattatactgaagaacgaagaggctaagaaggggtagagaaggagataaccacatgccctttgataaaaactggggcaagtttgttgacattggaacatrgagggaaatagaggaggagagaatctgacaagtcccatgatgaagtcttcttaataccttgctggccttaacatcgtacttttcagcaagaaatgagaaa

SEQ ID NO: 31365 - DNA, 201 bp, Homo sapiens
aagtactaatgaagtactaatatccataatataaatatttctgggaactggtgggagctacccatctacaaaggtggttctgttttatttggttcccaggragtatagcattgatgtcataatttgcatctggcagtaccttctgagtcactggttaatgccaaaacatgagaatgatggagccctgaaattcattagctt

SEQ ID NO: 31366 - DNA, 201 bp, Homo sapiens
tttggatttgtaccttgcattggatttgtcttttcatttttttgtaattcttatttatttatttatttatttatttatttatttatttatttattgtctcwtcatgttgtccagacaggtctagtactcctgggctcaaacgatcctcctgccttggcctctcaaattgctgggattacaggcgtgagccagtgcctggcc

SEQ ID NO: 31367 - DNA, 201 bp, Homo sapiens
gggaagcatcagtgtcatctgcgagcttgttagaaatgcagactcatagacttgaccccacctcaggactaaggcatgagaaactggattttgccaagacmcttgggtgacatacgtgcatatcaaagtatagatagcactggactccatatttcaaaggacttttactaagtaagccctcagacacatccactggtgaga

SEQ ID NO: 31368 - DNA, 201 bp, Homo sapiens
ctcctcaaaggaaaactgctaagcccagctaaatacctcagcaatttataggctgcccactttcaatctctgaaccaaatgtctttttgatgaggcctaamatccactctgagaaactgcagaggggaatttctgaaatcgcttctaacttcctgtgaaaatattctctaactgacaagagattgtccagataacaatgaa

SEQ ID NO: 31369 - DNA, 201 bp, Homo sapiens
gagtatgcaaaattgggctcaagattgaattactagggtcagtagctgaagactctgaccagggatcattcctctctctatcaccccatctactgctctgyctgtcctccaaatacaagctggacaagtatttttaaaaagaatattttgaataagtacccttttttttttttttgcacactcatcctgtggaccaaggat

SEQ ID NO: 31370 - DNA, 201 bp, Homo sapiens
gcatacattatttggaaagagaactctgtgctccagtaagtttgggaaatcctcatttaattaaagagtttcttaaccataagaatcctcagagccttccrtatgctaatgtgcattgtcagtttccaaggctaggaagtggcatttctctggatctataaggtctcaagatgcccttgagactgtattctacctgatgca

SEQ ID NO: 31371 - DNA, 201 bp, Homo sapiens
catcctgtgagaggagcttgactcatttgctctcctgctcaaagtcgctggaggaggccagcaccgtgcggcctggaggaagtatccaggtttgggggtasgggtggaacttctttctgcaacccaatacagataacccagaagacccttctctttgtggttgtggtttgtgttgaagaggaagattttgaagtcaaattg

SEQ ID NO: 31372 - DNA, 201 bp, Homo sapiens
ctccagtaagtttgggaaatcctcatttaattaaagagtttcttaaccataagaatcctcagagccttccgtatgctaatgtgcattgtcagtttccaagkctaggaagtggcatttctctggatctataaggtctcaagatgcccttgagactgtattctacctgatgcatggctccaggggccttagtggggagcgcca

SEQ ID NO: 31373 - DNA, 201 bp, Homo sapiens
ttcctctttaggcaatgattccaggatgcaaacaatctccagccaaaatcattccacccgagacccactgctgttgcaccaggaactagggaccactgggkacccaaacagatgcaaaagctgccacttctgtacaaggccgtatttctcaccctccattggagaggaagaggtgagtgtagagagtcgccagggatctct

SEQ ID NO: 31374 - DNA, 201 bp, Homo sapiens
gtgaggggaaccgcaacagacaggcctgagagcgctgccttcgggtagaaggtcacagagctttgcttgaaaagaatgctggctgaagaggaaacattgcsaactccctcctctttgagcccactgggccagaattgtatattcatatttgtcatctgtgccctttccactctggggcaaaaaggtctgctgggcagctct

SEQ ID NO: 31375 - DNA, 201 bp, Homo sapiens
ggcaatgtagtgaggccctggaaaatgttttaaagattagctggtcatggtggtatgtgcctatagtctcagctactcaagagcctgaggtgggagcatgrcttcagcacaggagtttgaggcagaagtgagccctggttgcaccactgtgttccagcctgagtgacagagtgagaccctgtctttaaaaaaacaattttg

SEQ ID NO: 31376 - DNA, 201 bp, Homo sapiens
actgtggaatttgctaaaaagcgtttaagaaacactagcttttagtgtagaagccagcatacttgctggttgcagtaatccagggaactttaaggaaggayggcaggctagagttgggtcccaaggcatgggtagaatttggatgctgcagaagaggggcatggggtgagcagtccccaagaccatcctccctctgacatc

SEQ ID NO: 31377 - DNA, 201 bp, Homo sapiens
attacagggaaaagatacagattaaaatcaaccaaaggacaaagtacataggccagagtctgggaaagatccaaatatggtgctttcattatctcctccaygtggagtcatggatcgtgttacctcccagcatcaatgtgtgactacacgcaaggagtactgtcaatcgagaaagttcgcccgggcctcggagttcaaagt

SEQ ID NO: 31378 - DNA, 201 bp, Homo sapiens
aaaagatacagattaaaatcaaccaaaggacaaagtacataggccagagtctgggaaagatccaaatatggtgctttcattatctcctccatgtggagtcrtggatcgtgttacctcccagcatcaatgtgtgactacacgcaaggagtactgtcaatcgagaaagttcgcccgggcctcggagttcaaagtttttactgg

SEQ ID NO: 31379 - DNA, 201 bp, Homo sapiens
aattaacctctctgaggcttagttcccttaactgtaagtatggttaatgatattcttggttgttagtatggagaatagtgaatgagatactgtgcatcaarcacttaatacagcacataggacatgctggcatttattaaatctaatgatgatgatggcataaatgtaaaataattttcagtatggattacatgtcactaa

SEQ ID NO: 31380 - DNA, 201 bp, Homo sapiens
aactggtgggagctacccatctacaaaggtggttctgttttatttggttcccagggagtatagcattgatgtcataatttgcatctggcagtaccttctgwgtcactggttaatgccaaaacatgagaatgatggagccctgaaattcattagcttcttctggggcttggtgaacctcaaaaccagaacctgggtttaatc

SEQ ID NO: 31381 - DNA, 201 bp, Homo sapiens
tgggagtgaggcaaccttgccatgagaaatagaaatgcaaaggtggggtcctcttggcctgcgttctgttggcctgttctctggaatcaggaatctagccsatacaacaggagcagattaatcgacttcaggatgtttttgaagtcattgatgctgttctggaagtcccaacagccaaaggatctagaagcctctaattga

SEQ ID NO: 31382 - DNA, 201 bp, Homo sapiens
aattccaattaggcttaaactaatgagctggaaactttggggaaaccactgcagcaatgagggaagagcgtgatcatcttcgatttaattagcgctggaaraacttggggtccagctggtagcacgaggacggacgctgttcagggggcgcaaagtttctgaaagtgtcagaagggggattcccctggtggtgtacggaga

SEQ ID NO: 31383 - DNA, 201 bp, Homo sapiens
gaaatagaaaagtgtgcttcccagaactcttctcaggaggcagaaagtttgagattactttgaatactttaataaggtatttgggggaatactttgatackgtttttcggctaggagggatgagtctcctcctcccaaatggcatgttcaagtaatgacagatattttataacttgctttctaaaaagcatgggtctgctt

SEQ ID NO: 31384 - DNA, 201 bp, Homo sapiens
atttacctgctgtaaaaaaaatggaagagcttatggtatttttgaaagattatccgtatatgaaagcacctacccctcagtctataaattctctccttcarctttcttaagagatggaggtaggtgctgtttggctttctatttgtgatgagatttgagactgggtcagaactggatcactgatgggagaagatagaggaa

SEQ ID NO: 31385 - DNA, 201 bp, Homo sapiens
cactactagatggcttggtgttggggcacaggaggagagaaaaagaaaggaagaaaggaaagaagaaagagaggaaggaagagagggaggaaggaatggakggagggagggagggagggaaaaacagtgatttcctccattttttctaagagttacctcgcattagttagttctactatgaggcttctcctggaggttttt

SEQ ID NO: 31386 - DNA, 201 bp, Homo sapiens
tagggacattttggtggatatagaattcagggttcaacattttaaaagtgttgttctactttcttcttgcctccattgtttctgatgagaaatccatagtsatttgaattgtggttacctataagtaatgagtcatttttctccgattgccttctagattttctctttgtctttagttttctgttgtttgcttacaatgtg

SEQ ID NO: 31387 - DNA, 201 bp, Homo sapiens
tggactcttagaatgctcggtcttctggtatgcagatcaccagggtaggatttaatgcccatgcctgtgagggaataagggtggagaactcaggctggctkcagctgcctgggaagcctcaacccatcccacaggaaaaagtatcccaaattgaggcaaggcagctgacctttgtccctacatcagccagcatttgtgtgt

SEQ ID NO: 31388 - DNA, 201 bp, Homo sapiens
agaagttgaaactcctttccccatcttcttcccttctccctccttcccccaacatgattagaaagtcatttcatgtgtcttatatgtttggtgaatcaaargcaaatgtacatgattgatggtgacagggaacacatttaactcattattctttactttgcagcaaaatgatttgtgtaaactgtctgcctagcattaaag

SEQ ID NO: 31389 - DNA, 201 bp, Homo sapiens
cagaaaacttctttctttgctactgtatatgattcccttgccaaattaaagagctttgattcaatgtagaaacatgaaatgcaaagctctttaatccttgrcaaggattgtgcagaggctggttagatttggttataaagctcttcaactgccagaaaatccagtcagtgtgttgtttaagttcacaaatcaaaataaaca

SEQ ID NO: 31390 - DNA, 201 bp, Homo sapiens
ttttagagaggtgtatatgtttgagatattatgatcgttggggttgcttttaaggggcagcatctttcttcttttcctaatctgtggattaatgttagccrtgatgtcagaggttgcagtgaactaagataacaccactgcacaccagcctgggcaacaaagaccccttgtctcagaaaaagaaaatattagccacgatct

SEQ ID NO: 31391 - DNA, 201 bp, Homo sapiens
accaagtggagctgaagggctggggatgacttaggtaggtgcttctgggacaaagtaagtatattagggttctctacagaaacagagcaatggtgtctctstgtgtgtgtgtgcacacacatgcgtgagagagagagagagagatgttgattataaagaattggcccacagggttatagtggctgggaaatcccaagctct

SEQ ID NO: 31392 - DNA, 201 bp, Homo sapiens
gaagagatatacttccagtacgacaatgcccctcaattgctaaggtttatttgaaatccaacttgcctgatgcagtgcttacttgaagcaagtccaagttraatacatgttactgtttttaaaaggtaactacacaatactggattcagcactgagattggattgcctatgctatctgattattgttatgtggcaagttcc

SEQ ID NO: 31393 - DNA, 201 bp, Homo sapiens
acacccagcgcaggggtgcttctaagagcgagaatctggacagggcacccagaaagcaatggctaaaaatgcctcaatggtggagcactgtaggtccagcygagacaaccagtaaactcacagggctttctgacagctcggggtaatcggttaggtcccagcttctttataagttcctgttgcctgaatctgtggacagtg

SEQ ID NO: 31394 - DNA, 201 bp, Homo sapiens
caggtgtcctgccttcagatgccagttctcttgctggttttcgtttttgtttttctaaaaatgttttcacctgtcaagtatgtgctactatgaattctggragggtagggtcgtgtcttatttatttctgtgtttttgactgcttttcctctccaatctcaagtgctgtgactaacacataggaagtactcaagaaaatat

SEQ ID NO: 31395 - DNA, 201 bp, Homo sapiens
gcgcaggggtgcttctaagagcgagaatctggacagggcacccagaaagcaatggctaaaaatgcctcaatggtggagcactgtaggtccagctgagacamccagtaaactcacagggctttctgacagctcggggtaatcggttaggtcccagcttctttataagttcctgttgcctgaatctgtggacagtgtgtccct

SEQ ID NO: 31396 - DNA, 201 bp, Homo sapiens
cagaaacagttggactctaattcttaagagcctttgttcaggaacatctgggttgaaactactgtagttaacagatgatgttggcagtaaaaaaaaaaaargggggttgggctttgtataatgtcgttgtcaaatttggtagacctttacctaataattatcaagaaagcaatctaacttgttattataacagttttattg

SEQ ID NO: 31397 - DNA, 201 bp, Homo sapiens
ctctccctcctctccttttccttctacctttatctttctcattgaatataatagaagcacttagaaagaaagaaacacattgcgagctatatgtgtatccmagttatatttacttttaacctttaggaaattctcttatcggttaatcaccgattaatcagatatttaatgaattgggatatgtgcaccattgtgccaagc

SEQ ID NO: 31398 - DNA, 201 bp, Homo sapiens
ctagttgctgatatttccaaatagtagtatgtcacgtaaaaactagatttctggattctttagaaaatctaatgtgacaatgcaagacctgcatttcctcrgaatgctaactggctccagtttgatgtagcaaaggggttagtatagtcatgtagttactcctccctgatatcttaaaccaggccagatttgcacataaat

SEQ ID NO: 31399 - DNA, 201 bp, Homo sapiens
ccactggttgatgaaagtggtgcagcttcagtggattactcttagaggccccagccccatcagcgggtgcttcatcagggcagctgtaaccactgtgtgcycgggactgtgccaagcttcagcttccccaccaccttaatgaggcggcatgtttgtccccatcttacacggaagaggctgagactcaagggttgatgggcc

SEQ ID NO: 31400 - DNA, 201 bp, Homo sapiens
ttggccatctggatgctgcgaaatcattgccattgcaggggtcttagattttgagttccttacagaatgatgtagatgccatttgcaagggcttctttccwgtccttttctgcaacagtggctttgggtggcataggcctatatagccagctctgacagatgctcagcattcacagatacacacacagggagccaaatgga

SEQ ID NO: 31401 - DNA, 201 bp, Homo sapiens
attcctctaagccatatcttcagtccctttcaaacttgaagctctatttaaagagacttggaagcatattaaatcaatttcctgataatactgatagaatraagctcccctcctttcctgctgtcactcttcccttccacacacttagcaaaatgttccagctattgttctgaaaacaagaatagaaatgtaggtgggaga

SEQ ID NO: 31402 - DNA, 201 bp, Homo sapiens
gaaggggatgacaatccattctttgaaagagactcttctccccttaggttaaatagatcgtcaagtccttgcatgtcaaaagcagagatgtgaatcactgyccttcagaaagggaagaaaacactttaagcaagtgcaaagttcccagctgtgctaggcacgatggattatacccaaagaagttggacagagaccttgacc

SEQ ID NO: 31403 - DNA, 201 bp, Homo sapiens
acgtggtgctgaggggtagatacccaaagcgcttgtcattagatgccatgtcttctgatgtgatgtgctaggtatcccttcctgatgagaggggtcttggygggcgtgggacatgggcacttctttcttggcatctgttttggattcctctaagccatatcttcagtccctttcaaacttgaagctctatttaaagagact

SEQ ID NO: 31404 - DNA, 201 bp, Homo sapiens
ctaatggagccctcccctcaatattatcttaacagccctggatgaggttagaaccaagctgttctgatttctgggccattggttggatccaaaaggccaartaagtccaaagattcccagtggtcatgtatcccatgccaagaggaaaacagcatctcaattcattttgccttgaaggtgtggacaggtctccataaagca

SEQ ID NO: 31405 - DNA, 201 bp, Homo sapiens
ggatttggcactatctgaggtttcaggcatccactgggaggtcttggaatgtatccctcaaggaacatggaagagtgttgttatctttcatagtttcagtrctaactgccagtcgccttctactccacgtttctacatttgtcgttttagctcagcaatatgcgacagtgatactggtatgagataacagtctaggttggg

SEQ ID NO: 31406 - DNA, 201 bp, Homo sapiens
agtctctcagggcacttcagtgggcagaccgatgtcttgctgtaacccatgttacctgtgttcaactaacccttattttacttaataacggccccaaagcrcaagtatagtgatgctggtacctattgtcataattgttctattttattattgccattgttaatcccttcctgtgctaatttataagttaaattttaccgt

SEQ ID NO: 31407 - DNA, 201 bp, Homo sapiens
cactccctgaagatgaaacttttcttggataggcccttcaattgagtcacaattctgagatgttttcaacaaagccatatttgtagatatagtttttagtatatatatatatatatatattttttttttcttcagaaaagggcaaaaaggacttgtttggctttgtttgggctttctttgtgcagttgccagctttaattc

SEQ ID NO: 31408 - DNA, 201 bp, Homo sapiens
ggggaaggaattggaggagggcagattgggtagggccttgtgagccttgtatatggcttttcagttgtttaatgaaaatgggatcttactacattcttgtmccctgcctcttgcttttctttttaaatttcaatttattattatttattgatacataatattttacctatttatggggtatgtgtgatatttgttacatgt

SEQ ID NO: 31409 - DNA, 201 bp, Homo sapiens
gaaggaggtggttttgatcttttcttctccccttcctttcataggtagaggtcgtctcctttataccagctgtcttggggagtagtcacattaattatgcrtgtatttagagctttacaagccttgccaccagacgtgtgtagtgccttacagtttaccaaataggttcacatactaatctcttttgacttagtgagatga

SEQ ID NO: 31410 - DNA, 201 bp, Homo sapiens
cactagttgggggttaagtcaaggatgataagtacacccattgggtgagccactgcaaacctgggcccagagttgaagccaggacaaacatgttcactagwaaggctattcattaaacatcatattccaagctattctgtcaaattctagggacacagcactatgtcttcttgaaaacctctgatttcttttgtctgtcca

SEQ ID NO: 31411 - DNA, 201 bp, Homo sapiens
tttggcggcacttgaggagcccttcagaccgctgctgcactgtgggagcccctttctggggtggccaaggccggagccggctccctcagcttgcggggagrtgtggagggagaggcgcgggcgggaacaggggctgccagcggtgcttgcgggccagcgcgagttccgggtgggtgtgggctcagcgggcttagcacttgg

SEQ ID NO: 31412 - DNA, 201 bp, Homo sapiens
agtggagttgggtgtgttggcctctcctgttgagtcaggactgaggctaggcctgaaaggtaggtgacaaggttgaagccccaaaccactaagaatcaacacccacttcctcttcatctgctctgccccaggccagggaggcaaccctgagacccaggagtaagctcaatcctgctttacttgcctggaaagtcaagtcac

SEQ ID NO: 31413 - DNA, 201 bp, Homo sapiens
ataagtggcagagccgggaccagggactggagtcttgccgtgggtgtgctacgcggccccacagaaggatggatgcatggagtcccattttgtggactccyccctgggcctgcaatgtgtagggatgtgttaggggaggatgagagggcaagagggggatctgtggctagaattccggaggttcgttggaaccagggaggt

SEQ ID NO: 31414 - DNA, 201 bp, Homo sapiens
  misc_feature (1)...(201): n = A,T,C or G, or insertion/deletion polymorphism (see Tables 1-2)
gacgtattcatctatttcacccgtattgatggagcacctgttcctcagcagctgtgttctgggttcgggggtcctgtagtgagagatgccatgtgcagcantgaatatcttcatacaaaagaatgtatgtcaatccataatggtccaagacatgcatcacgctaataggggagcctctcgcttaggagagggttgagctgg

SEQ ID NO: 31415 - DNA, 201 bp, Homo sapiens
actttcctgggtttctgtctgaattgctaatatgacattaggtgaaaggcatcttgtcaagaatgctgcatgtctggtggacttcctgaatatcaaatctscgagccttctttccaactgcccctcctggccagcctcatgagacactgatgagaaaaatgccacagctttcaaaacagttaacctctcctttggcaattc

SEQ ID NO: 31416 - DNA, 201 bp, Homo sapiens
tatgggtctgtgcacgtgaataattgggtaatgggattaaagtgcttgaagatacaacccttcctcaggtgccccttttcacacataaggaaagtggagtrcgaagggcactggctcacgggaaggagtggtggggaccccaggccttcagtccctcatttaacaaggttgtaaagtctgatctgacttcttactgcaagc

SEQ ID NO: 31417 - DNA, 201 bp, Homo sapiens
cactccattaagtatctgcagtatacataagtggacagaagtgtttgtaaacacccacgttctgccattcttccctcaatgccaaaggatccaactctacmacctcatcaaattcagagacagcttctgattttgagccataggggtgtcaacagcacaagtgcctgaagggcccacagaattcctggcatgtgctgtact

SEQ ID NO: 31418 - DNA, 201 bp, Homo sapiens
gataatggcacggacccaggaggcggaacttgcagtgagcggctctgctgagatcgccccactgcattccagcctgggtgacagagcaagactccgtctcaaaaaaaaaaaaatgaatttttgaagtttgtagaacaaggagattttgaggcagggggtgttgtacagagagagctgggggacaagtggagactgaatggg

SEQ ID NO: 31419 - DNA, 201 bp, Homo sapiens
aagggcccacagaattcctggcatgtgctgtactttatcaagaatctgacagggaatgcggctgtccctatcaagctgttgtgcctgacaggcaccatctyggttagctgtgggaccactggtgtttctcctgaagctgcaggacagccagctgcaatgggctgactgatcttgaaatgaaaccctgcctccttctccctc

SEQ ID NO: 31420 - DNA, 201 bp, Homo sapiens
agctaatgtcttcactcctctgatctctgggttccacctgcctcctttgttgtttgaagggtggaacggactgatgcctatgaataaacacaagctccagygctctccacagatgtcacagatgaaagactaaaagctgcttctgcacgcacagatatttatattgtagtgccaaacaacaacagaataaaaagaaataat

SEQ ID NO: 31421 - DNA, 201 bp, Homo sapiens
ttcttggcatacccacccaacgcagatgtgctgggtgaggcagaaatctcgtccttcctttttagatgaatttaactggcctctagtgctcctgaatgttwttgagctattaaagaatatatttcagaaatgtgggagaaagtttggcaaacgatgtaatagcttgcttcctatttattaaatggcaataattttcagtga

SEQ ID NO: 31422 - DNA, 201 bp, Homo sapiens
gtagtcaacagagataaaagtctcaataatcaaacctgtgggtacttcagtgaccagggaccaccatctgtcccctgtgggtccagacatcaggcaggagraaaagttggggccatgtgtcagcgtcccagctggggctcaccatgggaagtgggattagggaggattattccagttctcttctttgagttcaggttttta

SEQ ID NO: 31423 - DNA, 201 bp, Homo sapiens
ttttctcactccaatggccgcattgagcacttgcaatagagattgtgcagcttacaaagcccaaaatatttatgatctggccctttacagaaaaaaattgscaacccctgatttagattatccaggttgatcctggtgctaatttagagcttcagaataaaacacagctgaggtgtgcctggtagcaaattaatccccccc

SEQ ID NO: 31424 - DNA, 201 bp, Homo sapiens
ttttttttgaactgtttttcagtgttgttttttgttcagtccacctagtttgtgaatgcaaataaaggttactcttaatgcttgtctggagatttttccaygtgatttgggagatgatatagggcatgtttgacttgtagcagagatgaagaatggataaatccagtgcatggaacatgatcggagattcccacagactaa

SEQ ID NO: 31425 - DNA, 201 bp, Homo sapiens
gctaattgtctatgttgcgttgagagtctggtgggatgtttagacaggacgttactgaaaatgtggagacagaaaaaaggaaatgaatggaggctgacagagctagataactgccctgtagggcatagctcatcttagctcacagaccctgccagagtcctcatttttttggccttcttcatgggctgggttcgctcttct

SEQ ID NO: 31426 - DNA, 201 bp, Homo sapiens
tagctttgagaggactttgggttatttgccaggccattctttttccttttcttttcttttcttctcttttcttttcttctctttcttttcttttcttttctttctttctttctttctttctctctttcttttttcttttttttttttttggtagacatgggtctctctatgttgcacaggctggtctcaaactcctgggtt

SEQ ID NO: 31427 - DNA, 201 bp, Homo sapiens
actttgggttatttgccaggccattctttttccttttcttttcttttcttctcttttcttttcttctctttcttttcttttcttttctttctttctttctytctttctctctttcttttttcttttttttttttttggtagacatgggtctctctatgttgcacaggctggtctcaaactcctgggttcaatcctcccaaa

SEQ ID NO: 31428 - DNA, 201 bp, Homo sapiens
cttacagtgtgttgggtgcaccattcaaagtatgacctcatgtgatcctcacgaccattctatgagctaggagtcgtcatttctccaattttatgtgagcrgttgctcttcagaggtctgtgatggtcagcctctgcatttcagaaataaggaactaaaggctcagagattagataaatgccctagtggtcataatgagtg

SEQ ID NO: 31429 - DNA, 201 bp, Homo sapiens
ttgggttatttgccaggccattctttttccttttcttttcttttcttctcttttcttttcttctctttcttttcttttcttttctttctttctttctttctttctctctttcttttttcttttttttttttttggtagacatgggtctctctatgttgcacaggctggtctcaaactcctgggttcaatcctcccaaagta

SEQ ID NO: 31430 - DNA, 201 bp, Homo sapiens
aggagtcgtcatttctccaattttatgtgagcagttgctcttcagaggtctgtgatggtcagcctctgcatttcagaaataaggaactaaaggctcagagrttagataaatgccctagtggtcataatgagtgagtggcagagaccttagaagtcaggtcccagtggctaaagtacatcctgaaaaagagagaatttaacg

SEQ ID NO: 31431 - DNA, 201 bp, Homo sapiens
tgggttatttgccaggccattctttttccttttcttttcttttcttctcttttcttttcttctctttcttttcttttcttttctttctttctttctttctttctctctttcttttttcttttttttttttttggtagacatgggtctctctatgttgcacaggctggtctcaaactcctgggttcaatcctcccaaagtac

SEQ ID NO: 31432 - DNA, 201 bp, Homo sapiens
ctgggagattgtattggtgaaagctctatgtaaaatgcagaccactaagcgtgtgtaaggatcttaatttcacttctagcctttgggagatgcaagttacratttctcccctgcctccttcagcacgaaaccacaatcctaaagcatctttaggactgtatagtaatgtggcacctaggtttgtggtggggagaagacagg

SEQ ID NO: 31433 - DNA, 201 bp, Homo sapiens
cgtgttgcagtccgaacggcccactgtgatgatttgggtgacgatggggccagcggtgccaccgagactctgatggctccttaggagttgttatagtcacrataatagattgttctctgtttctcaatgctaggtccattctttaaaatttttttttcttcctttagaggcagaggaggagatggagagttggtgagatta

SEQ ID NO: 31434 - DNA, 201 bp, Homo sapiens
ggttatttgccaggccattctttttccttttcttttcttttcttctcttttcttttcttctctttcttttcttttcttttctttctttctttctttctttctctctttcttttttcttttttttttttttggtagacatgggtctctctatgttgcacaggctggtctcaaactcctgggttcaatcctcccaaagtactg

SEQ ID NO: 31435 - DNA, 201 bp, Homo sapiens
tgtgtgtgtgtttagagtatgtgtagagtgtgtatgtgaatgtagagtatgtgggtgtgtgtgagtgtgtgtagagtatgtgaatgtgagagtatgtggaygtgtgtgagtgtgtgtgtagagtatgtgaatatgagagtgtgtgtgagagtacgtgtagagtatacgaatgtgagagtatgtgagtgtgtgtgtatgtgc

SEQ ID NO: 31436 - DNA, 201 bp, Homo sapiens
ttatttgccaggccattctttttccttttcttttcttttcttctcttttcttttcttctctttcttttcttttcttttctttctttctttctttctttctytctttcttttttcttttttttttttttggtagacatgggtctctctatgttgcacaggctggtctcaaactcctgggttcaatcctcccaaagtactgga

SEQ ID NO: 31437 - DNA, 201 bp, Homo sapiens
gaggccaaatgcaactgtactgagggccacccctgcccagcctgcccctgctgttacacctgaggctttgttaagagtcttcctgggtcatgtctgacctmtcctgtggttttatgcctacacatccccaccgcccatgcacacactacacatcatggctcccggggaggcccactgggctctctctggccatcaactgtt

SEQ ID NO: 31438 - DNA, 201 bp, Homo sapiens
tggtttcttcatctgtaaaatgggaataataatacctgggagattgtattggtgaaagctctatgtaaaatgcagaccactaagcgtgtgtaaggatcttmatttcacttctagcctttgggagatgcaagttacgatttctcccctgcctccttcagcacgaaaccacaatcctaaagcatctttaggactgtatagtaa

SEQ ID NO: 31439 - DNA, 201 bp, Homo sapiens
ctccttcacttattggtttttgtttttttgttttgctttgtctgattatgtattgggacactctgccatctttctccaaaagcctccctgcgtatcttttwaaaaaatacaatttcctaggctcaacacagagctatagaattagattcccttaggggagggccacagaaatttatatttttataaaacttccaaggcgtt

SEQ ID NO: 31440 - DNA, 201 bp, Homo sapiens
tatttgccaggccattctttttccttttcttttcttttcttctcttttcttttcttctctttcttttcttttcttttctttctttctttctttctttctctctttcttttttcttttttttttttttggtagacatgggtctctctatgttgcacaggctggtctcaaactcctgggttcaatcctcccaaagtactggac

SEQ ID NO: 31441 - DNA, 201 bp, Homo sapiens
agcagagcaactaagccagtacagactctttgccacatcctgacatgctaagagagaggtcccctttaaaacgcaagcagggtaaatattagaaaaatggyaagaattcatagagcataaagctcataataaactcagagaatgcattgtcctgagaagtggtaaaggaaggaagtggaatagacttcaacaaaatggcat

SEQ ID NO: 31442 - DNA, 201 bp, Homo sapiens
atttgccaggccattctttttccttttcttttcttttcttctcttttcttttcttctctttcttttcttttcttttctttctttctttctttctttctctctttcttttttcttttttttttttttggtagacatgggtctctctatgttgcacaggctggtctcaaactcctgggttcaatcctcccaaagtactggact

SEQ ID NO: 31443 - DNA, 201 bp, Homo sapiens
gggcacattgtaaattatctgcaaaaaacagcagagtgcaaagaagcagaaataaaacctcccataatcacaacagaaacatctactactgttcatgattygttttattttcccccaaatatattactgtgcatttttctttataatgccgagatcctagaatatgtgcgatttagtgttctgcttttcttcttaacgtta

SEQ ID NO: 31444 - DNA, 201 bp, Homo sapiens
ccaggccattctttttccttttcttttcttttcttctcttttcttttcttctctttcttttcttttcttttctttctttctttctttctttctctctttcttttttcttttttttttttttggtagacatgggtctctctatgttgcacaggctggtctcaaactcctgggttcaatcctcccaaagtactggacttacag

SEQ ID NO: 31445 - DNA, 201 bp, Homo sapiens
acaccttggccacctgggtttacctgtgtgagtcctggtctctatatccctcagatgggcacagtaagacctgcctcagagacatggggaggatttaatgrgacaatgtgtatagcacattgcctgacgaaggggaaaaacctcactgtgatagttaatttattgtcattggctgcaggggccagagagtctttggggagg

SEQ ID NO: 31446 - DNA, 201 bp, Homo sapiens
caggccattctttttccttttcttttcttttcttctcttttcttttcttctctttcttttcttttcttttctttctttctttctttctttctctctttcttttttcttttttttttttttggtagacatgggtctctctatgttgcacaggctggtctcaaactcctgggttcaatcctcccaaagtactggacttacagg

SEQ ID NO: 31447 - DNA, 201 bp, Homo sapiens
gacaagacccgtgggaaacaattcaggaaatgtcaccaggcagcatcttcttagtgctgcaaagatctggaggaacgaatgaccagccggggcacaggggygagggcttaggcttctggggtccggttacaaactgtgacaccttggccacctgggtttacctgtgtgagtcctggtctctatatccctcagatgggcaca

SEQ ID NO: 31448 - DNA, 201 bp, Homo sapiens
tatgtagctagtaagcagtagagccaggattagattccagcatggctcattctaaagccatctctcttctaagtgtcaagaagtaaatttccagattgtgkaagtaactgatggggtttaatgagatgttgcaagaatgggaagttgcatcacctcatcctgccaatgcactggtcttgttttctcttttgttctcccttt

SEQ ID NO: 31449 - DNA, 201 bp, Homo sapiens
tgtataccagctttcactatcccctttagtgtaccccatcctgcagcatgatgagatgggcagcctgtgacatggaaaaggaagctcaccagcctactctstaaccagttcctttatggaatacagcctttctaggtagtgttctggaaaattagctccagctgtctgccttcatgcccttttttgagaagtcacggcatg

SEQ ID NO: 31450 - DNA, 201 bp, Homo sapiens
cctgtgacatggaaaaggaagctcaccagcctactctgtaaccagttcctttatggaatacagcctttctaggtagtgttctggaaaattagctccagctstctgccttcatgcccttttttgagaagtcacggcatgcatttaacctttgttgaagaagtcaacacaaatcactgtgtgcaaagcacctccctgtttttt

SEQ ID NO: 31451 - DNA, 201 bp, Homo sapiens
gaaaagagagagagagaaagaaagaaagaaactgcagatttatgagaatgattgttatttttcctactttggctatttttaaagttatatttctttgttaytgagtgacctccagaggcagagagccacattataattatagaaatttgatctgaatgggatattaagggttatctattaccaacactcccagtcccttct

SEQ ID NO: 31452 - DNA, 201 bp, Homo sapiens
tccatataggtagattttggggacaggatctgttctttggttgtcaaacagattggtttcatttacgtcaaagttcagagcattagcacccttcctccttytcccttccacattggtgaggaaatcttgtcttccttgcttatttgtcattgcacaagtggtacctaggcatcgtaggcaatggcatctagaagcattaag

SEQ ID NO: 31453 - DNA, 201 bp, Homo sapiens
attctttccctttgctcacataaatttcctgggtttgaaatttatgcctgtttatttcttctgttggcccctcatgttgtcagtgaaatggctacaagaayggcatttgatggaagaagaaggaagacagggatggcctatttcattctctaattggataatcagtccagaataatgatggtttgattttatttgcaaacc

SEQ ID NO: 31454 - DNA, 201 bp, Homo sapiens
tgatgcatatgtctttgttcatagaatttgggagaaaagagagagagggagagaaagactctgtgtgtgtgtgtgtgtgtgtgtgtgtgtgtgtgtgtgtktaggaaacaattatgtcctgcctaaaaattaagtggagaagaagagcatgggggaattggccaccaggctcatcacagtagcagagatgaggctgagagc

SEQ ID NO: 31455 - DNA, 201 bp, Homo sapiens
cagctgctcaagatgaccccatgtttcctttgaggaaagcagtgctatagagcacccatgtgccactctggatggccacgaaagtgcccagtgagtgctcyttggaacttgtttctgatgtgaaagttttggtgggaaactcggggagacatattacatcctggtaggaggcacgtcctatggatttgcccttgatgcttc

SEQ ID NO: 31456 - DNA, 201 bp, Homo sapiens
tgcagtttgagtaatggtcccgagatcactccaaaaggaaaagtgtagcaccagatttggaatcaaacaggaagactccagagcctaagttcattctctgyggtcctgctctacttggtggtggggaaggggagggaggagatgaggtgaggttgaggaaagaatacttcagtgtgtgcttaatctgcctcctcctgcacc

SEQ ID NO: 31457 - DNA, 201 bp, Homo sapiens
ctgccctgccccattccctccgcctcccaatccatggtccaggctgttgctcccaggtgtcaggatgccatcccccttccccagagcagcttcctgctagraaatctcatcctcacagctcctcctaaagggcagtcagctggccacagccacaacttggtggcctttcttcctgttggctcagaacagcctttgagggtc

SEQ ID NO: 31458 - DNA, 201 bp, Homo sapiens
tctgcacttctactggtttccagagaacatggctgccctggctgaggagcacttggacatggtaccttccagggctgaggtgctgtctcctcgtcaccccygggctctgggcctgccccaggggccagagttgggcggttgttcctaatacagggggaaatgatgggcagggctgtgcacccacagagctgctgctgagcc

SEQ ID NO: 31459 - DNA, 201 bp, Homo sapiens
aggccattctttttccttttcttttcttttcttctcttttcttttcttctctttcttttcttttcttttctttctttctttctttctttctctctttcttttttcttttttttttttttggtagacatgggtctctctatgttgcacaggctggtctcaaactcctgggttcaatcctcccaaagtactggacttacaggc

SEQ ID NO: 31460 - DNA, 201 bp, Homo sapiens
tttccttttcttttcttttcttctcttttcttttcttctctttcttttcttttcttttctttctttctttctttctttctctctttcttttttcttttttytttttttggtagacatgggtctctctatgttgcacaggctggtctcaaactcctgggttcaatcctcccaaagtactggacttacaggcatgtgccaggc

SEQ ID NO: 31461 - DNA, 201 bp, Homo sapiens
tagctccctgcagcctcgacctcccggactcaagggatcttcacatctcagcatcccaagcagctggaaccacaggcatgcaccaccatacccagctgattttttttttttttttaaaggttttgtagagacaggcccatgctggtcttgaactcctgggctcaagtgatcttcctgccttggccttccaaagttctggga

SEQ ID NO: 31462 - DNA, 201 bp, Homo sapiens
ttcattctttctgattttttttgcacccacccccacaattttgcatataatttcagctagctcatggggtccctgaagcgcatctatggattatttaggcstagggcagtccttggatcccaggttaagctaattagggtcttgggaagattcattaaatttttttagagaaaaagcttgagtgattagaaggtcatttcc

SEQ ID NO: 31463 - DNA, 201 bp, Homo sapiens
ctgctgccagtgtcagaggcctgagagtatgccagctggggtgggtcaggccagcgtgggatttaaaagttctctagataagccacatgtgatgattgagctctctctctgctgttcaggcatgtggctggcaggtacatggggggcagggagaaagacactggacttagactggagccagtgtgttttatggcctcctta

SEQ ID NO: 31464 - DNA, 201 bp, Homo sapiens
tttgcacccacccccacaattttgcatataatttcagctagctcatggggtccctgaagcgcatctatggattatttaggcctagggcagtccttggatcycaggttaagctaattagggtcttgggaagattcattaaatttttttagagaaaaagcttgagtgattagaaggtcatttccagaaatttccttttggctc

SEQ ID NO: 31465 - DNA, 201 bp, Homo sapiens
tgctgccagtgtcagaggcctgagagtatgccagctggggtgggtcaggccagcgtgggatttaaaagttctctagataagccacatgtgatgattgagctctctctctgctgttcaggcatgtggctggcaggtacatggggggcagggagaaagacactggacttagactggagccagtgtgttttatggcctccttag

SEQ ID NO: 31466 - DNA, 201 bp, Homo sapiens
tttgacagaagaagaaagtgagtcccagagacatgatatgactcttctaaggttgcatcaggagttagccacagagctggggcaagaccctgagtctcctyagtcctgatgcagtgctccatccccagtgtgctgttagatctatcaagagttgtgcctgctggtaggttggaagcagggaataaaccctgagctgccacc

SEQ ID NO: 31467 - DNA, 201 bp, Homo sapiens
gtttgaaatttatgcctgtttatttcttctgttggcccctcatgttgtcagtgaaatggctacaagaacggcatttgatggaagaagaaggaagacagggmtggcctatttcattctctaattggataatcagtccagaataatgatggtttgattttatttgcaaacctacacctcaggcagtgggtgaagaacaacagc

SEQ ID NO: 31468 - DNA, 201 bp, Homo sapiens
gctgccagtgtcagaggcctgagagtatgccagctggggtgggtcaggccagcgtgggatttaaaagttctctagataagccacatgtgatgattgagctctctctctgctgttcaggcatgtggctggcaggtacatggggggcagggagaaagacactggacttagactggagccagtgtgttttatggcctccttagt

SEQ ID NO: 31469 - DNA, 201 bp, Homo sapiens
taatagctctccactgagtacaaactgtgtataaggcattttgctaggtactggggaattttgagtacttatgtataatgctagatcttttccattaagayatttaaattatacatatttttacaaggggcaggaagtccagccatatataaaggaaaaataagataacaaaacaagaacaagtaaggcatcgctaagcaa

SEQ ID NO: 31470 - DNA, 201 bp, Homo sapiens
ctgccagtgtcagaggcctgagagtatgccagctggggtgggtcaggccagcgtgggatttaaaagttctctagataagccacatgtgatgattgagctctctctctgctgttcaggcatgtggctggcaggtacatggggggcagggagaaagacactggacttagactggagccagtgtgttttatggcctccttagtt

SEQ ID NO: 31471 - DNA, 201 bp, Homo sapiens
taccagctaggatcctcaggaaagttccctgaacttcattaagggcttagaatgatgcctggtgcatcctcagtacagagtaaatgcagtggcttcaatargaaatacaagtacacaggtggccaacaattcaagctattagatgcagaaggccaaggaggtgatccagctctttcattatggggaatcagagcatgcaga

SEQ ID NO: 31472 - DNA, 201 bp, Homo sapiens
tgtcaagaccactataagcagtggccctttccctcaaagaaggaattgacattctgggtcttgcaatataaaacagagatatcatcatcattatcactgtcaccaccaccaccaccaccaccacgctcgtcctcaccatcagacaaatctattttcagcacttactgtgtgccagattctgtgctatgtgctttatttata

SEQ ID NO: 31473 - DNA, 201 bp, Homo sapiens
tgctatagagcacccatgtgccactctggatggccacgaaagtgcccagtgagtgctccttggaacttgtttctgatgtgaaagttttggtgggaaactcrgggagacatattacatcctggtaggaggcacgtcctatggatttgcccttgatgcttctttttccattgtcctggcttaagccctgtgaccccttccttc

SEQ ID NO: 31474 - DNA, 201 bp, Homo sapiens
cgaggcaaatactgtatgccacaccaataaatcatctacagcttactgtaagccccagagctacatatcactaactctacatcatctctgaaaataacgtygttagaagctcataaacatacactctgtttgtttaagaactgcaagagcttttaaaacatggttgctaagtcacagggcatattttccaggacataaatg

SEQ ID NO: 31475 - DNA, 201 bp, Homo sapiens
gtcaagaccactataagcagtggccctttccctcaaagaaggaattgacattctgggtcttgcaatataaaacagagatatcatcatcattatcactgtcaccaccaccaccaccaccaccacgctcgtcctcaccatcagacaaatctattttcagcacttactgtgtgccagattctgtgctatgtgctttatttatat

SEQ ID NO: 31476 - DNA, 201 bp, Homo sapiens
cgtggttctcaaccaggcatgattttgcctcccatgagacattggcaaattggggtgggtgctgctggcatccggtgcgtagcggccagggacactgctcrtcttataatacacaggataaccctcctcaataaagagtaatctggaccaaaatgtcaacagtgccggggttgagaaactctgtcctaacctgaagatgag

SEQ ID NO: 31477 - DNA, 201 bp, Homo sapiens
ttaaattgtcagattctttttttataagaagagaggcccaaatctgtctgttctgccaggatattaacttgaccaaagaagagttgattatactaagtgtrtaagtgttagtaattattggaaactatcctctgacttacttagctaaatgggcacattgtatgaaacttgatttagtttctagcatatgtaggtataagg

SEQ ID NO: 31478 - DNA, 201 bp, Homo sapiens
tcaagaccactataagcagtggccctttccctcaaagaaggaattgacattctgggtcttgcaatataaaacagagatatcatcatcattatcactgtcaccaccaccaccaccaccaccacgctcgtcctcaccatcagacaaatctattttcagcacttactgtgtgccagattctgtgctatgtgctttatttatatt

SEQ ID NO: 31479 - DNA, 201 bp, Homo sapiens
gtacaggttgacatggataaatcctggctttagttttcatgaaccctaaagttcacaatttgctgaactttgtatttaatatttactgatgaaattcttayggtgtcgtcccttccaaaacaaaatcggaggcatacttagacttttcccctgagacatggtcccaagtctaggctacaacttcatcactgaccctttttc

SEQ ID NO: 31480 - DNA, 201 bp, Homo sapiens
ctcaggaagaaatagtaggtagggctccaggacctctgatggtggaatctactagaatgcagttgtccttaacaaggatacctatctcatgttgctcatcrcacccatgcagagacctgccaccttgtaatttgagagctggaatttccatacacccgctaccctcactccatgccagaaaatgcagaaaatgaacccatg

SEQ ID NO: 31481 - DNA, 201 bp, Homo sapiens
acgtggatgctattagatgactgtacctagcatgtgcttttcctctagcagtgggaggaagtggcacaggagtgcattaaggagtttgccctcttcataakagcatgagtagaaataataaggcaaggcctttaaagaacagcattaataattgaaaggtgctccaggcagccatgtggtcttccagtgcctttgagtaca

SEQ ID NO: 31482 - DNA, 201 bp, Homo sapiens
tacctgatagtagtgtgtggaaacaattagacactgcatggaaaggctcttagtacagtgcccagcttgaacatgaccaaaaaaagtattagatattattrgtattgttctttttgaggtctgttttgaaacttttaatcaggtcttgagagagatgagatataaacacagtgaagttaagaaacaaaataagatgtattg

SEQ ID NO: 31483 - DNA, 201 bp, Homo sapiens
ctatggcctctccagtgcctgcttttggcaagagagaccatcaagagactgaatgaccagtcactgcatgttttctacctagaatgataggaaactggtcycttgatgtactgtcttcaggagggacattgggctggctgatctgagctggaaattgatcttttatctttctgaactggcgcaagtgaagagatgacagta

SEQ ID NO: 31484 - DNA, 201 bp, Homo sapiens
ggttatcagaataatggacgagacctgtgcttctgaaaactgcaatctcaactcattcatggtttgtgaaaggaaaaacaagcatttaaaaaagatgacayagctgggcatggtggcttgtacctataatcccagctactcaggaggctgagtcaagagtatggcttgaggccaagagtttgagatcagcctgggaaacag

SEQ ID NO: 31485 - DNA, 201 bp, Homo sapiens
ttgaccaagctggtcttgaatacctgacctcaggtgatccacccaccttggcctcccaaagtgctgggattacaggcatgagccactgtgcccggcctcattttttttttttaatgaattaaaaaaaaaaaaacttatgtggcagttgataaaataattattttgaaattagccacttatcttctagaaaaaaaaatgttt

SEQ ID NO: 31486 - DNA, 201 bp, Homo sapiens
tgggaattgtaagggtagaccagcgatgttcaaatggtggcgattttgccctcgaggggacgtttggccatgttgggagacattttagttgtcacaattarggatgggggtggaatggaggagaatagctactggatagatgccagggatgctgccaaacctcctgcaatatacaggacagcctcccacaacaaaaagttt

SEQ ID NO: 31487 - DNA, 201 bp, Homo sapiens
gagacctgtgcttctgaaaactgcaatctcaactcattcatggtttgtgaaaggaaaaacaagcatttaaaaaagatgacacagctgggcatggtggcttktacctataatcccagctactcaggaggctgagtcaagagtatggcttgaggccaagagtttgagatcagcctgggaaacagagtgggaccttgtctctaa

SEQ ID NO: 31488 - DNA, 201 bp, Homo sapiens
attttgcttctgtccataacacacaatagggcgttggacaagtcaattcctctctgggtcccagttttctcctctaaaatacaggcttacgactaggtgaycttgcttccttctcaaagtaacattcaatgacttttttgaacccaatctttggaacccctcttggtgttctgttcttttggctttgagaaggcttcctcc

SEQ ID NO: 31489 - DNA, 201 bp, Homo sapiens
tgaagggggtctgtgcctgtcacaggattttctcaatggctgaggcactgtgttgaaacatggcagatcaagttggaaaggcttggtctctgtccatgaastgcttgcagtgctgttgccctgactgcagtgcggtggatgctattatggaggactcttgtggtggctgcttggtagccccaggcaggcaccaggtcatta

SEQ ID NO: 31490 - DNA, 201 bp, Homo sapiens
ctctaacacttgggggattaggtggtttggtgacccttccgaacttggcataccagttcaccctcaggcatctttggctcttgaactgtatattattctcyagaaggcaggagaggtgaggcctttcatactcatccctgcagacctgcacatttctggcaccagacccatatatctatatatctatatattcatttacca

SEQ ID NO: 31491 - DNA, 201 bp, Homo sapiens
tcaaggtaaaagcaaggtcaagatacatttacaagccagtgtgttgtctgtacgtggcagccctataaggactggggttctgtgtggtcctagagatttcsgtcctggagatgaaagactgtgagtatttacctggaatggaggcccagggaggaatgaatttccctactcctgtgagagctgtatgtaaatagactgttt

SEQ ID NO: 31492 - DNA, 201 bp, Homo sapiens
aggcaacataggcagtgatgagcaggggctctgtcaccccagctctgcactgacagtaactttgggggaaccttggagaagccacattgggacctcctggytttgtcttcccacctgtagagaggggcattgtccttgatctagagatatcagctgtgattgaatgagtgtaattcacggagcagactttattggccactg

SEQ ID NO: 31493 - DNA, 201 bp, Homo sapiens
acagtgcctgtcatgtgccagacatctgtaaagggatcatataagcattaactcatttaatctttacaggaactcagggaaagactgaggcacagactgasgaacttgtccatggttccaaggtgcagaaccagggttagacctagaccgtgaggctcttgcatctgtagtcttgcttagagcactacttgcaaagaagcc

SEQ ID NO: 31494 - DNA, 201 bp, Homo sapiens
ccaagcactgtggacaaacatgaaggagaaggcagggctgctgcccacatggggagtctcatctatttggggagataccagtgctcagaagcctaaattcragtgctgcaggaatccagggagggggcatttagggaaactggggtggttgtgtaaaacttcccccaaaagagaaaattcaggtgagggtaaccaagattt

SEQ ID NO: 31495 - DNA, 201 bp, Homo sapiens
gagctacaaccaagcttgaccttgaggtttagtcttagggaccagatgccctctgtgtgtttcattatcttccagaggaaattgttgagtgtttgtaaagyggttataggatgaagggaacactcttttaaagttcctaattatatcttggactttagctacagttaccgaaagacaaaataaggtctctaaaaaaatcat

SEQ ID NO: 31496 - DNA, 201 bp, Homo sapiens
ggcacctagtcagttcaaaataaaaaatcaatctcactttctttctctgacacacacacacacacacacacacacacacacacacagagagagagagagasagagagagagagagagagagagagagagagtctagagctatactgagtgtccagaagttcctctctccagctccttccttgatactcttaaaattgtagt

SEQ ID NO: 31497 - DNA, 201 bp, Homo sapiens
gcatggtggcacccagctactctggaggctaaggttggagaattatgggagtttgagtccagtctgggcagcatagtgataccctgtctctatacagaagaaaaaaatcagacattcaggttgaaaatttaaaaaaatattctctatagcttcataaatattttagcattgacagggcttgtgtgcttttatcatctcaca

SEQ ID NO: 31498 - DNA, 201 bp, Homo sapiens
tgggagtttgagtccagtctgggcagcatagtgataccctgtctctatacagaagaaaaaaatcagacattcaggttgaaaatttaaaaaaatattctctdtagcttcataaatattttagcattgacagggcttgtgtgcttttatcatctcacagtggtatagtgagctgggtgggagaggtgtcatgctaggtgaaga

SEQ ID NO: 31499 - DNA, 201 bp, Homo sapiens
tgaacccaggaggcggaggttgcattgagctgagatcatgccattgcattccactctagcctgggtgacaagaacgaaattccatgcaaaaaaaaaaaaaaaaaatcacttcctgggcagtctgaatttcttaacctgccccagagagcttaaaaactttagaaaatgtggaggatccactttttaaaaaaatatatatat

SEQ ID NO: 31500 - DNA, 201 bp, Homo sapiens
ccacagagtgtagattgtgttacctggagaatcttttgtttggtgagtgcccaccttggtttagtgtgaaagtctgactgtaggtcagagcaaagcagaawtgttctgcttcgaagagggcagtatcagtcaagtgaggccatgctctgctacagtaacagacagcccccacagtggcataacacaagaaaggtttatttc

SEQ ID NO: 31501 - DNA, 201 bp, Homo sapiens
aagcagccaaagctattttccaaatgaggacaaaagaagtgcggccagtttacacaaagcaagcgaacttgctgagcagttataatctgcattccagattytcagcccagagccatcattcctggcttgctcttctaaacagaaatgtcaatgcaaagattaaagtggattgtagtgaggtagaaagttgtcagcagggac

SEQ ID NO: 31502 - DNA, 201 bp, Homo sapiens
tgtaaccacaaaagaatatcaatgagaggcatgagtggagctggctacaaatgaaacgtgaacaaaatcttggtggagtgcaatagggtttcagcaagaargatcccaggttgcacttcccaggtggaagtgggttccttagactacattcggtgagtcaggtggtcacctgtggccaagtggaaagacccttcaaggcca

SEQ ID NO: 31503 - DNA, 201 bp, Homo sapiens
ttgttaattacagttatgatatattgtttcactctctgattatactataaatgccaccaaggctggacttgtgcattgttcctgttaatcagcaaataccyagtacccagcaaaacgcttggcacataatagatgctcaatacatcatggtcaggtgaatgaactaatccacattgagaagaaatgttatgctttgaaaat

SEQ ID NO: 31504 - DNA, 201 bp, Homo sapiens
gctccctaacgcactactaatatcactgtaaccatcatttagagtttagtaatcaccatatttaggtcatttttccaaagcaccaaggagactcagactcyaaataggtttaatatctcaagaggactctacatggttgttggtgggacactgctgtgttcaggtcccaagaatccaggagtatgtaagtgaagccacttg

SEQ ID NO: 31505 - DNA, 201 bp, Homo sapiens
ctcccttttctcccctaaatccagccctggaagcattgccgtgtttttatgcctcttggcattctttattttttgagacagaatctcgctctgttgcccaractggagtgcagtgtcacgatttcagctcactacaatctccgtctcccaagttcaagcagtcctcctctctcagcctcccaagtagctgggattacaaat

SEQ ID NO: 31506 - DNA, 201 bp, Homo sapiens
taggccagagtctgggaaagatccaaatatggtgctttcattatctcctccatgtggagtcatggatcgtgttacctcccagcatcaatgtgtgactacaygcaaggagtactgtcaatcgagaaagttcgcccgggcctcggagttcaaagtttttactgggactggatcatgtaaacttgaatgactgccctcatggcc

SEQ ID NO: 31507 - DNA, 201 bp, Homo sapiens
ctcattggtattgtcatgggggctttggtagattttccttctgtctgcaataactatagtaagccacaagatggcagtgcttcctaagcaaacacctggaraaggtctggggacaaggttggaagttggacccacacctcctagtaaacaacaaattcagatccctcaatttctttccacttccgccttacgaaaagccac

SEQ ID NO: 31508 - DNA, 201 bp, Homo sapiens
ggggtttcaccatgttggccaggctggtctcgaactcctgacctcaggtgatccgcctgccttggcctcccaaagtgctgggattacgggcatgagccacygcggccggccatctcctggaattctttgtccacttttctgtccttcctctcttcccttctctcatgctacactcctctttccacttttggtcaatcagcc

SEQ ID NO: 31509 - DNA, 201 bp, Homo sapiens
gtgggcttctccttccactctgtgttgccagtggcctacatctgagctgcccatcgtagccacagtatcatctgttggaaccttaaaaaaaaaaaaagtcratccctgctcaagacctacaaaactggaatatccaggagtggaatatcaaatctgtgttattgaacccagatccacagggagttctgatgctcttctagg

SEQ ID NO: 31510 - DNA, 201 bp, Homo sapiens
atccaaatatggtgctttcattatctcctccatgtggagtcatggatcgtgttacctcccagcatcaatgtgtgactacacgcaaggagtactgtcaatcragaaagttcgcccgggcctcggagttcaaagtttttactgggactggatcatgtaaacttgaatgactgccctcatggccagcctcagtcccctgctccc

SEQ ID NO: 31511 - DNA, 201 bp, Homo sapiens
aatcattggattctgggacatcagagctgaaatagctttattggatcatctctggcccagctcgcttgctctctctctcaatctcttgatcttttttattyatttatttttttaaatgataaaaacaaagttcagagctggggcataacttgtccaaggtcactgagagctgtaaccatcaacatgtggggcagcagctgc

SEQ ID NO: 31512 - DNA, 201 bp, Homo sapiens
tcagcttgctttgaagagcttgtgtcgcccagtgaggaaccctgtgggcttctccttccactctgtgttgccagtggcctacatctgagctgcccatcgtrgccacagtatcatctgttggaaccttaaaaaaaaaaaaagtcgatccctgctcaagacctacaaaactggaatatccaggagtggaatatcaaatctgtg

SEQ ID NO: 31513 - DNA, 201 bp, Homo sapiens
gcctcccagaagctcaggacaaggccaggcctctctttgggcaaagttaatgtctttacaaaaatagtcagtgaagggactttgttggctggaggagaggyctctcttgaggaaggctggaagtgggtcctttgatcacttgcatgaatagcagaggagaggaaaatgctactccatgaagtggatgcttccagattctac

SEQ ID NO: 31514 - DNA, 201 bp, Homo sapiens
cccagctacttgggaggctgaggcaggagaatggcctgaacctgggaggtggagcttgcagtgagccaagatcgcgccactgcactccagcctgggtgacrgaacgagactccatctactgaacatcatggcttagcctagccttaaaccttaaatgtgctcagaacacttacattagctcatagttgggcaaaattatct

SEQ ID NO: 31515 - DNA, 201 bp, Homo sapiens
ggcagagccaacaggagcaggaccattgtgggtgttcagcagtgtcccctctcctacccttgctcatacccagttttagctctgtgcctggactctagctrtcccccgccaatggtgccacagctccatgccttttctgtgaccttcaccactttctctgcccttggggcttcctcttcctcttgacttttctcagcactt

SEQ ID NO: 31516 - DNA, 201 bp, Homo sapiens
tgctagtattaattatgcttcttccaaaattcatcttctcgtaggaggcaacctgatagcacccagttctgctaaggggttttcctgctgtggctcataargagaacagtggaaagaacattttattggaaatctctgctgaactctgcgttctgggccacatttcttaacttcacaggatcttagctttctcagttgaac

SEQ ID NO: 31517 - DNA, 201 bp, Homo sapiens
ctcgtaggaggcaacctgatagcacccagttctgctaaggggttttcctgctgtggctcataaggagaacagtggaaagaacattttattggaaatctctrctgaactctgcgttctgggccacatttcttaacttcacaggatcttagctttctcagttgaacaggaagaaaattcctcctctcttagaagtgttttatt

SEQ ID NO: 31518 - DNA, 201 bp, Homo sapiens
acagctggcaagtggtagaatggggatttgaactcagtgatacagcaggaggtagacaaatccctaggcaaacacaggtgagtccccagtgaaaccccccsctgcaaaccaaagccagtttaaagtctgaaagccaagctacaagtcttggataaatccacagactggattgagaacctctcttcccatttggcatgcttt

SEQ ID NO: 31519 - DNA, 201 bp, Homo sapiens
ctcctctcttagaagtgttttattgtagttaaaaatcaatactctgaaggcaggtaggcttggttgcaaatcccaactctgtcatttgttagctatgtgamcttgagtgagaaattaacctctctgaggcttagttcccttaactgtaagtatggttaatgatattcttggttgttagtatggagaatagtgaatgagata

SEQ ID NO: 31520 - DNA, 201 bp, Homo sapiens
gctggaggagcagcagacatcccctaacatgagttgtgcaggcttggtaatgtggagtgggcatgcattgtggtgattcttcttgcttttttaaaccaatktctcctctgctggagactcttcacagaatttaagagtctttctcagaaggtgatcagccttggacagactttggtcttcagaccccagagccaaactttt

SEQ ID NO: 31521 - DNA, 201 bp, Homo sapiens
tgagaaagaattatttctctcaatattgttcttcttttcctccagagccccagtgtgagcctgggtgcaagctctgataaattaattgacagagggttgayttctaaccccaacttcaccggcaaactttagctatgtaattccgcactggacagactgacagctcattttcctcatccacaaagaatgcagtgcaataga

SEQ ID NO: 31522 - DNA, 201 bp, Homo sapiens
ttcttcagaacctgggggactagggaggaagggaaacccctccatgacttgcctgcttggggctaggagctggaaatggagacagaggaagctgcttcttrttatgcacagggccaggagaaacccttgggctttgcccggggccagggctggcttccctgtgactttctctccacacaccctctcatcctccctggcttc

SEQ ID NO: 31523 - DNA, 201 bp, Homo sapiens
gtaaggcatgtaaattcttatgctccaacctaagcctactgaattggaaactctgggctggggtggtttcttattttaataagccttcctggtgactctgmtgcacactaaagtttgagacccattcctctaaattctgccgtctctcctcactgcatcacttttcagtggggctgcccttggacactggcagatattttg

SEQ ID NO: 31524 - DNA, 201 bp, Homo sapiens
ttatagaaagttttttttttttttttttttgccatgggcttctctgcaaaatcatgcctgattaaattaatacccaaattgcaatatgtttattctttagmccagtttatggggttaagggagatggatctgcatggtaaattgggaagatttactgagctaaccattgaactagagattcccaggtggatgacccacctt

SEQ ID NO: 31525 - DNA, 201 bp, Homo sapiens
aggcatgtaaattcttatgctccaacctaagcctactgaattggaaactctgggctggggtggtttcttattttaataagccttcctggtgactctgctgyacactaaagtttgagacccattcctctaaattctgccgtctctcctcactgcatcacttttcagtggggctgcccttggacactggcagatattttgggt

SEQ ID NO: 31526 - DNA, 201 bp, Homo sapiens
cccaggtggatgacccacctttgtttgcttttccatcgtgtccatatttcagggtggacttgaagtagtcattgttcctcaagttccttcaagaacatggmcttcttattcatcctagaaaacaaaaacctcttggccacaaactgctttgttagttttgtatacactgtgttacttgtgatggaagcacacattccctat

SEQ ID NO: 31527 - DNA, 201 bp, Homo sapiens
tattggcaaagggatagacacatagatcaatggagtagactagagtccaaaaatagacctacaacaaatatggtcaattgctttgatagaggtacaaagamaattcaatggagaaggagtcttttctacaatggtcttggaacaattggacatccaagggcaaatgaaacaaaacaaaacaaaaagctcaacctaaacttc

SEQ ID NO: 31528 - DNA, 201 bp, Homo sapiens
caaaaattttaaatgaagaatatttcatgaaacatgaaatggtatgaaattctgatttcaatgtctctaaataaaattccgctggaatacaaccacactcmtttgtttatatattgtctaaggccacttttgccccccagcaacagagctgaatagttgcaacagagaccatatgctaaagcctaaaatatttcctatctg

SEQ ID NO: 31529 - DNA, 201 bp, Homo sapiens
gtgtttacactcagtgccccagttagctcagagcatggtaggccaagaagacacttgggcaggctcataattttatgtgccttcaaattgatatttgttaygtaagtattcaatatttatttagcagagaaactaacctttgtgttggggaagcggaggaggaagaaaactgttgtagaggtggctcagggaccctggcaa

SEQ ID NO: 31530 - DNA, 201 bp, Homo sapiens
aaggaaacctaggacatgcagatccctgaattagaaaagaggagtgctcattgaaggaatgcaagaatgtccagtattgctgtggattaagggaggtgagsccaagagtatttcagtatgtggccagatgcctggcaaaggccagatgtgccagagcatcttcgacggccatgctgagggccttaacttttgcctaagagc

SEQ ID NO: 31531 - DNA, 201 bp, Homo sapiens
tcccctcaattttcccacaagggccagtcttgtgtcctcggctatgaccatgagccactggggaaagagatgctctcttccctgcagctgcacggctcccygtgctgggttggccacacactccccacccagtgcacctccgttgattgattgacgtggtgttaaacatgtggccttttgcaggcaactctaggagggtga

SEQ ID NO: 31532 - DNA, 201 bp, Homo sapiens
aaccttacttgagaaagaaggttctcacagctgccgagtctctctcgacgtccagggttggaggggtcccaggccatggagagaagattgatgggtctagsggagccaagtagagagttgaggctttgcagggccaggcgcttgccatccttaactcccattagggatcgagaaggaaaaggagaaggagttctctgaatc

SEQ ID NO: 31533 - DNA, 201 bp, Homo sapiens
tgaggctttgcagggccaggcgcttgccatccttaactcccattagggatcgagaaggaaaaggagaaggagttctctgaatccaatggaaaaagaagtcytgtctcctttccctgggctgttgaattgtttttatttcacattagcaactgctctggactctcttgtgtttggctgctgtgttggagacctagatccaaa

SEQ ID NO: 31534 - DNA, 201 bp, Homo sapiens
tacaaaaaattagcaaggcctggtggcacgcccctgtagtcccagctacttgggaggctaaggcaggagaatcatttgaacccaggaggcggagcttgcaktgagccaaaatcatgccactgcactccagcctgggcgacagagcaagactccatctcaaaaaaaaaaaaaaaaaaaaaaaaaaaagaagaggtggcatct

SEQ ID NO: 31535 - DNA, 201 bp, Homo sapiens
gtgaaagccatgggcttagggtcagacaaagcttggtttgaatcctgtccctaccactgaactgacttgattgtcacctagactagaggagcaactcctascattcacttcctcggggccaggacaagttggcatcctgctgcacacagggcaacctggagaatcaagagaaggctgccagcctcagatgccagtggctcc

SEQ ID NO: 31536 - DNA, 201 bp, Homo sapiens
ctccctcctttgtcttctggtgtccctgccatggttccttcaggcaaagatgcttcttcaacctatccctaaataattctgcttgaaccttcagggtcaarctgaaagtggtacctttttcacagtcttcctgggcccaccaactggaagcaatcactgcctctactaaagtccacatcaattaaatagtcaattagatag

SEQ ID NO: 31537 - DNA, 201 bp, Homo sapiens
ttatctgtgagattgttcctgttgtgtatgagctgttttgcagagatcaagaatccctgctcaagtgtgatccatcttcatcagtgaagtcatatgctgcraggacttctgagatactgtctgctgccacatgaccactaagcagatggttttgtgcctcttgcatgggttctatgaaaagatggagatttcagtgtccat

SEQ ID NO: 31538 - DNA, 201 bp, Homo sapiens
actggattgccaatttctcagagaattaaacatttagtgcccaatcagatatttttctatctgcatacatgtggaaatgtatgcttacccacctccggggmgtcaattgaagtgcagttgaagccaactcactaattctccagtgcatggtagaatcttcgtggttggtgaaatgagtcatgtgtatgatttgatggactg

SEQ ID NO: 31539 - DNA, 201 bp, Homo sapiens
agattagctgagcgtggtggtgaatgcctgtagcccagctactcgggacgctgaggcaggagaatcgcttgagcccaggaggtggaggttgcagtgagccragatcacaccactgcactccagcctgggcgttgagagtgaacctctgtctcaaaataaataaataaataaaataagctccccaggtatttctgaaggttc

SEQ ID NO: 31540 - DNA, 201 bp, Homo sapiens
aaataaaaaaaagttaatttgtttgaaatcatatactttaaaatatctcttcatccccagtttctaatgccccatttttccttcccagagctgaaaactgttttttttttttttttttttttttttttttgagacggagtctcgctctgtcgcccaggccggactgtggactgcagtggcgcaatctcggctcactgcaag

SEQ ID NO: 31541 - DNA, 201 bp, Homo sapiens
tgaaaatcattgtcttgtctgaatttttagttgtttcaggtgggaggagagatctagtccatgctacttctttggagaatctttgaatggtgagataagattatttatttatttatttatttatttatatttatttattttttacctctagcattctggaacttcttgtgcttgttagaatttctcagtgggtgtcagaag

SEQ ID NO: 31542 - DNA, 201 bp, Homo sapiens
atatttgggtcaaaggcatttatggacagagatggaaggtatgatctatcagcttagaaactcaacctcaagagagaggagggtgtataaatgaggatgcrtaaagtaagaatggaaccccccccccgcacacacacacacaccgtccctagtcaaatttgcaaagacttacggatatgctaataagattgctgctggcta

SEQ ID NO: 31543 - DNA, 201 bp, Homo sapiens
cagagatggaaggtatgatctatcagcttagaaactcaacctcaagagagaggagggtgtataaatgaggatgcataaagtaagaatggaacccccccccygcacacacacacacaccgtccctagtcaaatttgcaaagacttacggatatgctaataagattgctgctggctaggggaattcacaggtctgcaaattct

SEQ ID NO: 31544 - DNA, 201 bp, Homo sapiens
ggggacagaatttacagggctgtggtgtcagacacgtggttctaggtcttaaacccctgaaaggttttggaaagagaatgacaggtagcctatggagcagytggggcttagggctctttcctctagctttcctcctggacatagttttaaaatatttgttcactgttttatcatcttaattttaccctagtcttcaggcct

SEQ ID NO: 31545 - DNA, 201 bp, Homo sapiens
gagatggaaggtatgatctatcagcttagaaactcaacctcaagagagaggagggtgtataaatgaggatgcataaagtaagaatggaaccccccccccgcacacacacacacaccgtccctagtcaaatttgcaaagacttacggatatgctaataagattgctgctggctaggggaattcacaggtctgcaaattctat

SEQ ID NO: 31546 - DNA, 201 bp, Homo sapiens
agatggaaggtatgatctatcagcttagaaactcaacctcaagagagaggagggtgtataaatgaggatgcataaagtaagaatggaaccccccccccgcacacacacacacaccgtccctagtcaaatttgcaaagacttacggatatgctaataagattgctgctggctaggggaattcacaggtctgcaaattctatg

SEQ ID NO: 31547 - DNA, 201 bp, Homo sapiens
aaaagccataaattagcaaatcatcaacatatcaccaggaaggatcatctggtagcgattctagtcagaaggaaacacaggccccaataaccgatctttayaaagatatgaagaactgtagacagacagatacagtaaataagaagacaaatagataattcaagttgacagaacatcttggactgattaggcattctgctt

SEQ ID NO: 31548 - DNA, 201 bp, Homo sapiens
gctatccccttcacctgccttgtgtaatgttgccccctttccctaagacccccaggagggcctagtttgagaaaatgggccgtaatggttgactgtgcccragagatcaggctcttccatgtgcggaggagtctttggagatggcaccgtttccaggaacaggaaggccttggaaagtttgtgggctccttgggcagaggc

SEQ ID NO: 31549 - DNA, 201 bp, Homo sapiens
cctctgcctgagatgtcttatcagcgtcactctcattctgcaggggaggaaaccaagactccagggtggagtgattggctgtatgtttcacctgcagccamgcgaggcccagaagtcttccagtgctttggaggttcacaagaaatatggtgactcaactggaaccacattagaggtcagcatttaacaggtcccctcaat

SEQ ID NO: 31550 - DNA, 201 bp, Homo sapiens
ttttctccatcagtcctcttgtgagttctaacatctcttgctgttcccatctgtgtttctaactttgaggttgagcatttctgagattgaattggtattamaaattaattttcacaaaagaagaaaatcatgactttcagatatcaaaatgaatatgtgttaaagattttattctactcctattcaatgaggggaccaggc

SEQ ID NO: 31551 - DNA, 201 bp, Homo sapiens
ggtagcagaagggagacaggccaagtcagggcagccggcaaggggcccatcacagagcagtgcaggcgggaggccacaaaggcctgggctggggtaacgtsggggctggaaccgggaagctccttcacacattgagcctacttcttgggactctgttccagtatattagtaatgttaggaatttcagtttggctttttaaa

SEQ ID NO: 31552 - DNA, 201 bp, Homo sapiens
agaaaaagaggtttaacagactcacagttccatgtggctggggaggcctcacaatcatgacagaaagcaaaaggcaagtcttatatggcagcaggcaagaragaacttgtgcagggaaacccctccttataaaaccatcagatctcatgagacttattccttatcatgagaacagcatgggaaagacctgccccatgattt

SEQ ID NO: 31553 - DNA, 201 bp, Homo sapiens
ttgatataagcaagcggtccgtgaagagatttatcagaggcccttgtgatggatacatgtcttcttataagctgatagtccaggggagactcctaaacaasaaagggaactgaaggcagactggcagcaattctagtgtcctacaaggctgtggcttgtcctgtgagctggacggcggggtctgaggcaggacgtcaggca

SEQ ID NO: 31554 - DNA, 201 bp, Homo sapiens
cttgcagtactcttccagctggtctcgtgactctgtcatttctgattagtcatacatcttactacccacttaaactttctaaatgttagctaattacttcvctttcctccacaaatactctttcatggctcctcattaaccaaaggaaaacaaaaagtccaaacttctcttcttggtgctcaaagatctccatcattcctc

SEQ ID NO: 31555 - DNA, 201 bp, Homo sapiens
tttatggcatacctttcttaaatcttttgtcaaagaaggtagcaatgtgtatggctatacatttggacagatttattacaaaaatataatacatatacacrtgctcaaattatagctctatatggcatgtatataacattgatgaaataaaaataatagcacatagtaagctctcagcaaatatttgcttgattctttgca

SEQ ID NO: 31556 - DNA, 201 bp, Homo sapiens
tcccagcagaggagggaggctgccttggaagcctggctgcactgtgtagggagggtacccagcagagggctgggaggtctccaggcccctttgagcactgrcagcccatcatctgacctctccaggaacccacgagaaagcatgagatgaacagacagacttggcttgaagctcacttcctagttgtgttactcctcaggg

SEQ ID NO: 31557 - DNA, 201 bp, Homo sapiens
ctgctcacacatatttatggcatacctttcttaaatcttttgtcaaagaaggtagcaatgtgtatggctatacatttggacagatttattacaaaaatatratacatatacacatgctcaaattatagctctatatggcatgtatataacattgatgaaataaaaataatagcacatagtaagctctcagcaaatatttgc

SEQ ID NO: 31558 - DNA, 201 bp, Homo sapiens
cggcaggctgtgcctgtctgtgtacacgccagctccatgaggtggaagctttggcaatgggctcccagggagcttccccgcaggcttctcaggggaatgtrttgggagtagatgcatggagagttcgttttttctccctttcatgaatgagaaaacgggcagagaaatcacggcactcattggccgatgtttctgttggtg

SEQ ID NO: 31559 - DNA, 201 bp, Homo sapiens
tttatgatgttgcgagtcttgattgtctcatatgtaaagtgactatgtcaacaatagccttgtaagattgtggtgaggaaaaagtgaatgtgtgcagaggsctggccggtggcaggcactgtgacaattatcgtctttgttggtaggttgattgcctgttctctgtgtcatgtgtacccagcagactccagttgatatcac

SEQ ID NO: 31560 - DNA, 201 bp, Homo sapiens
ttacctcagaacaactccaaggggcatgtgctttgtttgtcctcattatatagattggggaaacgcatgtccagagggttgagccctactcagcctcatcygggtactgactgggggccaggactcaggtccagccagtttcacagcagagcctgtgctcttggccatgatgataatggcactttcccacccagtcctttt

SEQ ID NO: 31561 - DNA, 201 bp, Homo sapiens
gcctttgtcccacaccagatttcttccttgtgttcagagaatctttcaggtgctcacaccacccttgtcttctgccttgaaacctatttctctagccactrtaccaccctcctcagaccacttcacctcccacatcccccacaaatacttcttatttatctacatgttctgagatgtgttctgcattatgccaggccagta

SEQ ID NO: 31562 - DNA, 201 bp, Homo sapiens
aggtgacctggccaattacaaataattaggagccccatcacataacagtgctttatagactggttggctgtctcctggtggcacccaggcacttgcacttycgtgcggcccagataactaactccaggtcttctgcaggaagtggggatatgtgatgtgagctccccagtgggtcttccttggtcacagtttctaaggcat

SEQ ID NO: 31563 - DNA, 201 bp, Homo sapiens
tgattgaaaataagttgtggtgtttttgtgaacctggggtcctaaacacagcttccaaagtctttttatgttagggagtacataaatgcaattgcagtgtmtgtaatgaaatgctaatcccatcgcacacacaaaggatctcctaaatgatgagcaagcataacttctgtcagtttactcaagaaaataggtttttggcaa

SEQ ID NO: 31564 - DNA, 201 bp, Homo sapiens
aactggcgcaagtgaagagatgacagtagatgtgtcagggaagcggggagctgccatcctaaaaggagtagttccctgcagcctggagaggccagggtagwatatttcccaagaaaatcatgaagaggacagagaggattggggaggctttattgtgttggtgacgatctgtgaattataatcaaggcatgttgatggaca

SEQ ID NO: 31565 - DNA, 201 bp, Homo sapiens
ctggggtcgatgtgggatgattggtggttgactgatggcaataaatgaggacaaggagaaggcagggcccctcagctgcatgccatgggcaggtttcaacmgagtgtgggctacatgtccagatctcacccaagcactgtggacaaacatgaaggagaaggcagggctgctgcccacatggggagtctcatctatttgggg

SEQ ID NO: 31566 - DNA, 201 bp, Homo sapiens
tatttttagtagagacagggtttcaccatgttggtcaggctgatcttaaactcctgacctcgtgatccacctgcttcagcctcccaaagtgctgggattayaggtgtgagccaccatgcctggccataacctgcagttttaaacatatcgggctgaatatagttgagggcgcttaaatgctatgatgctgtgattcagctg

SEQ ID NO: 31567 - DNA, 201 bp, Homo sapiens
agggtgatcttgtaggatttaaagaagggagtaggaggaaagtaatgatgcactcaccagccagttttctagcccatttttattacctactgtgtgctcascactgggatgagaggaacacatgccgggccaccctgtatcctactggtactgtgatttccaacaccatcccctgttctttgactgatgaaatcggcatat

SEQ ID NO: 31568 - DNA, 201 bp, Homo sapiens
gagccactgcaccttgcctgtgtgtatgtttttgttgagggtgatcttgtaggatttaaagaagggagtaggaggaaagtaatgatgcactcaccagccasttttctagcccatttttattacctactgtgtgctcagcactgggatgagaggaacacatgccgggccaccctgtatcctactggtactgtgatttccaac

SEQ ID NO: 31569 - DNA, 201 bp, Homo sapiens
acaaacccataactgatgacttcccagtaaagccagttaaacaaccagctggcatgggatcataatcgatcagtactgcagagtaacaaaaactgttttcwatttacattagagtcatttcaaggtctaagaaaaatgttttaagattaaaaaaggggggcccattttgatgttatcatcattactattgatggatgattg

SEQ ID NO: 31570 - DNA, 201 bp, Homo sapiens
aaagacctgccccatgatttaattacctcccattgggttcctcccatgacatgtgggaattgtgggagctgcaattcaagatgagatctgggtggggatakagccaaaccatatcaagacacctggtaggccaccaactgggaaataaggtctggattttattcttaaaatcatcacacccttgctgtgtgacgtttgggc

SEQ ID NO: 31571 - DNA, 201 bp, Homo sapiens
agcctcacaatcatggcagaaggtaaatgaggagcaaagtcacatcttacatggcagcaggtaagaaggcatgtgcaggggaactccccttaataaaaccrtcagatctcatgagacctattcactataatgagaacagtatgggaaaaacatgcccccatcattctgttacccctgactgggtccctcctacaacacatg

SEQ ID NO: 31572 - DNA, 201 bp, Homo sapiens
gaatgctttctttggaacccaaagtctcctcagccacacctttacaagttttatggttctgggtggaagcatgttttcagaaatctaagcctacgaggtatttttttttttttttggcaggttttcactctcattgcccaggttggagtgcagtggtgctatctcagctcactgcaacctccgcctcccaggctcaaggga

SEQ ID NO: 31573 - DNA, 201 bp, Homo sapiens
aatgctttctttggaacccaaagtctcctcagccacacctttacaagttttatggttctgggtggaagcatgttttcagaaatctaagcctacgaggtatttttttttttttttggcaggttttcactctcattgcccaggttggagtgcagtggtgctatctcagctcactgcaacctccgcctcccaggctcaagggat

SEQ ID NO: 31574 - DNA, 201 bp, Homo sapiens
ttaatgattcaaaggctgggggaagtccaggctcacaaacggctttcccaaagctccagaaggaactttgttcttctctacattcccccaccgcccccccscccacacacccaggcattcctcttagattttataatctctttggagcagatcggcaggtaggacctctcatctgtttttttcataccgccatgtcatcag

SEQ ID NO: 31575 - DNA, 201 bp, Homo sapiens
aggctgcagtgggctgtgattgcaccactgcactctagcctgggtgacagagtgagacacattctctattttaaattaaaaataaataaataggccaggcrtggtggctcacacctgtaatcccagcactttgggaggccgaggcaggtggatcatgaggtcaggagatcaagaccatcctggctaacacagtgaaacccc

SEQ ID NO: 31576 - DNA, 201 bp, Homo sapiens
tgagaatctatgcacatacaagcgtatgtgcacacatatatgcgtgtctatgtataattttcccatttaaaaaatgatggtgcactttcacactactctcttttttttttttgagaccgagtttcactcttgttgtccaggctagagtgcagtggcatgatctcggctcactgcaacctctgcctccgggattcaagtgat

SEQ ID NO: 31577 - DNA, 201 bp, Homo sapiens
ctatggatgattaaatggctctgcagaaatattacagatatttttaaatgtatgataacaaaaatccttttttggtggcaagattatatattatatatatwtttttttgagacagagtctcgctctgttgcccaggctgcagtgcagtggcgttatctcggcttgctgaaacctccgtttcctgggttcaagcaattctcc

SEQ ID NO: 31578 - DNA, 201 bp, Homo sapiens
ttttaaactttcatcccttagttcaattttaaagtttgtaacatttgggacccttctcagagccctggatttactcctggcatcaagatgttcagggcagrgctgagctggaggggaattccgcattcctagtgatccttaactggtgcccctggggaatttatctaacatactggagcctccactggtctgtaaggcaga

SEQ ID NO: 31579 - DNA, 201 bp, Homo sapiens
gtccaccgggattttcatctagcgagatggctatggacttcccctctctcctccccattttgcaccaggctccttctttgcatcaggtgttagggacagatttttttttttttttttttgagatggagtctcactctgttgcccaggctggagtgcaatggcaccatctcggctaactgcaacctctgcctcccaagttca

SEQ ID NO: 31580 - DNA, 201 bp, Homo sapiens
actcctgacctcgtgatccccccacctcggcctcccaaagtgctgggattacaggtgtgagccaccatgcccagcccacttttatatttttttattttgctttttttggagacagagtctcacttcgttgtccaggctggagtgtagtggcatactcttggctcactgcaacctctgcctccagggttcaagtgattctcc

SEQ ID NO: 31581 - DNA, 201 bp, Homo sapiens
ctgtaatcccagcactttgggatgccaaggtgaaaggatcacttgagcccaggaattcgagaccagcctgggcaacatagtaagactctgcctatacctgaaaaaaaaaaaaaaaagccaggcatggtgatgcctgtctgtagtcccagctactcaggaggctgaggtgggaggagcccttgagcctaggaggtagaggct

SEQ ID NO: 31582 - DNA, 201 bp, Homo sapiens
gggaggctgagccaggtggttcacttgaggtcaggagtttgagaccagcctggccaacatggtgaaaccccctctctactaaaaatacaaaaaattagccrggtatggtggcaggcacctgtagtcccagctacttgggaggctgaggcaagataattgcttgaacctgggaggcagaggttgcagtgaactgagatcgcg

SEQ ID NO: 31583 - DNA, 201 bp, Homo sapiens
caatggctgtttgtaattttttttttttttcggagtcttgctctgttgcccaggctggagtgcagtgatgcgatctcggctcactgcaacctccacctccyggattcaagcgattctcctgcatcagcctcatgagtagctgggattacaggcatgcaccactacgcctggctaatttttgtatttttagtagagacgggg

SEQ ID NO: 31584 - DNA, 201 bp, Homo sapiens
ggaaggggggacaccgtttgaggaaggttcagaggcataaagaacttgacatgggacagggctggtgaggattccctctgggacatttcccccatcttccwagtgaagacccatcctgcaaaatccgtggatggaaagcagcgggcataacctcccagggtggattacataactgggctgggccttggctggggctgggcc

SEQ ID NO: 31585 - DNA, 201 bp, Homo sapiens
ctcagtagaggtttgtggaggggatggatacatgaatacatgatttaatcctgctatctgttgtttgcagcctgttctctcttaacgtgccctcaaatgasataaagcagccaaatacctgtattaaaaacctacactttccctccaggatttagtctcccttcatttgacaactgggcactggacaaggtttacagagat

SEQ ID NO: 31586 - DNA, 201 bp, Homo sapiens
accacagctgtagaatcagagaaaagtaaaggaagtcttgtaatcccatggaccctctaagacacctcatgaaattctggataaggataggtcaactaccytatcctgcatgtcagtttggtttgcatcctatgcatgaggttagtgcccctgttgtctccatagtctatgctgtcatagaagtaatggggtctacaggca

SEQ ID NO: 31587 - DNA, 201 bp, Homo sapiens
tgagaatgaagagaccactgtagcgcccaaagcctaggctcagaaaatggtccagagaaattgtcttatagtggggaaaccacagctgtagaatcagagaraagtaaaggaagtcttgtaatcccatggaccctctaagacacctcatgaaattctggataaggataggtcaactaccctatcctgcatgtcagtttggtt

SEQ ID NO: 31588 - DNA, 201 bp, Homo sapiens
gtcaacatccccatcatcactgaactaggtaggggtcaatgtcagctttggggggagtttttgttctgtctttcaaaccatacaggatatgaggaggttgrtttatttcttagccctttcaactttgtagctgctatggggtttgttttgagggggctgggaggaaggtatggggagaaatatggcagattaccggaaggg

SEQ ID NO: 31589 - DNA, 201 bp, Homo sapiens
tttgcttgagacttttctttgcccttgaggtaatagagagtctattccagggaaaaagaaaagggctaaaggcaaccagaaaattccaaaaggattttctwctgaatactgaacagggcggagtgttgggcaatgattctaacaggtcaagtctacagcgaagatatatgagctgcgattctagatatggggggctttggt

SEQ ID NO: 31590 - DNA, 201 bp, Homo sapiens
ttttcttgtgaatatagatgggacttcggagctgtaaggaagagagtggaatatttgagacctagctgttactttctttgtgaagacacttaaataacatkttcaggttttatttactccttccatgctcaagcggaagtttccgtgacagcagatgagaatgaagagaccactgtagcgcccaaagcctaggctcagaaa

SEQ ID NO: 31591 - DNA, 201 bp, Homo sapiens
ggtgagccatacaccagacacattcctatgtaatatcttatttaatctccctgacaacctgctgagggagagttaccaccttcattttacagttgagaaarcagagattcaggggaattaggtacctttcccatagccttatagctagtcaagggcacatggagttgatctccaaacatctgatttcaaagtctatgcttt

SEQ ID NO: 31592 - DNA, 201 bp, Homo sapiens
gattttgggtggtcttggggttggactgaacttatggttttagcatctggctctcacatgccagtttactcctcaaaatttgtgtgcctggttaatgcctyttttaagaaaatgtaatttttttttcaggtgagccatacaccagacacattcctatgtaatatcttatttaatctccctgacaacctgctgagggagagt

SEQ ID NO: 31593 - DNA, 201 bp, Homo sapiens
ctgtggggctggggaccaaggcagttctagactggctacccattcaggcctggccactcaggttgtagccacttgtgtcatttggtaggaaaagtgagaasttatgagccagaggtttcaattatggttttgccacttactgattctatgacttataaggttacttagcttcttggggtcagggttcactcatttaaaaat

SEQ ID NO: 31594 - DNA, 201 bp, Homo sapiens
cactcaggctgtgcccggcttgtgacaactgtcgtgaagggaaatcttagcttcagagacagaaagcagattttgggtggtcttggggttggactgaactyatggttttagcatctggctctcacatgccagtttactcctcaaaatttgtgtgcctggttaatgccttttttaagaaaatgtaatttttttttcaggtga

SEQ ID NO: 31595 - DNA, 201 bp, Homo sapiens
tcatggagggttttatgccctccatgcatgaaagactttcttggagagtggatgtgcagaagaaaaagtaaaaacagacagaatcatcttttccttccaartggatgcagagcagattcatgtccccactcaggctgtgcccggcttgtgacaactgtcgtgaagggaaatcttagcttcagagacagaaagcagattttg

SEQ ID NO: 31596 - DNA, 201 bp, Homo sapiens
atgcggaactcacccaacacctcgcctaagctgatgaggtaaggagaggggctggttgcccacggtttccctcttagcccttctcttcctcccctcgcccyctcctcaccctgccaggcccagagtctcccctccccagcaagcccggggtgggggaggggagcgagatcgttagatggcttcttaaaggctggagtattt

SEQ ID NO: 31597 - DNA, 201 bp, Homo sapiens
agcagcagctataataagagactgagaaacttggactactttttgaactcatggagggttttatgccctccatgcatgaaagactttcttggagagtggawgtgcagaagaaaaagtaaaaacagacagaatcatcttttccttccaaatggatgcagagcagattcatgtccccactcaggctgtgcccggcttgtgaca

SEQ ID NO: 31598 - DNA, 201 bp, Homo sapiens
tctaagcaggtcccattggaaaaaaaaaaagttgtatttttatatagttctagttagtttctcatctgtgatctatgctatttttaattgaaaaaaaaaaagtgtttccatacattgtcaggaggagccgttcccctgtcccagcctctcacaaagcacaccctcactccctcatttttccagtagtcccagggctagacc

SEQ ID NO: 31599 - DNA, 201 bp, Homo sapiens
cagggagataatgtgtgtgaagcccatagcacaatgcttgacaaatagttttcagggaatgttagcttctatctaagcaggtcccattggaaaaaaaaaaagttgtatttttatatagttctagttagtttctcatctgtgatctatgctatttttaattgaaaaaaaaaaagtgtttccatacattgtcaggaggagccg

SEQ ID NO: 31600 - DNA, 201 bp, Homo sapiens
agccttgttcaaactgactaggcacaggtgtagacccactgcctctcctgtgctcagccccaagacaggcacctgggagagctgtgaggacagcacagatsccatcccattcatgacagcgcattttaaactgtaaaggactgtgtataccagctttcactatcccctttagtgtaccccatcctgcagcatgatgagatg

SEQ ID NO: 31601 - DNA, 201 bp, Homo sapiens
tgtctactttgttaagatgtcttgaaagaaagacttcttccatcctcctggcacaactgaatgtgcttggtatggggagacgtgtctaactgaatctaagmaactaattggaataggcaaaggaggaagtgatgaaagtgaagctgcagtttctgcaaaggtggctttattgtataaggtgcaggttagtaccccaaatga

SEQ ID NO: 31602 - DNA, 201 bp, Homo sapiens
atagaactctcaaagcaacaatgcccttgggactttttgatgcatatgtctttgttcatagaatttgggagaaaagagagagagggagagaaagactctgtgtgtgtgtgtgtgtgtgtgtgtgtgtgtgtgtgtgtgtaggaaacaattatgtcctgcctaaaaattaagtggagaagaagagcatgggggaattggcca

SEQ ID NO: 31603 - DNA, 201 bp, Homo sapiens
tagaactctcaaagcaacaatgcccttgggactttttgatgcatatgtctttgttcatagaatttgggagaaaagagagagagggagagaaagactctgtgtgtgtgtgtgtgtgtgtgtgtgtgtgtgtgtgtgtgtaggaaacaattatgtcctgcctaaaaattaagtggagaagaagagcatgggggaattggccac

SEQ ID NO: 31604 - DNA, 201 bp, Homo sapiens
tatagctgggaaaaacagacagagtcatgaccctgggttcctttgtttttggaagtcatgtggacattcttcttttttagcactgtttctttctaatgatraaggaaacagtatattgatgaactcctatttttcatttgtggtgctttctgaatgctttctttggaacccaaagtctcctcagccacacctttacaagtt

SEQ ID NO: 31605 - DNA, 201 bp, Homo sapiens
agaactctcaaagcaacaatgcccttgggactttttgatgcatatgtctttgttcatagaatttgggagaaaagagagagagggagagaaagactctgtgkgtgtgtgtgtgtgtgtgtgtgtgtgtgtgtgtgtgtaggaaacaattatgtcctgcctaaaaattaagtggagaagaagagcatgggggaattggccacc

SEQ ID NO: 31606 - DNA, 201 bp, Homo sapiens
gtctcagcctccagagtagttgggattacaggcatgtgccacctgtaaaaaaaatacctggctaatttttgtatttttagtagagatggggtttcaccatrttgcccaggctggtcttgaactcctgacctcaagtgatctgtccgcctcggcctcccaaagtgctcgtgttacaggcatgagccaccatgcctggccatg

SEQ ID NO: 31607 - DNA, 201 bp, Homo sapiens
tagtctcagctactcaagagcctgaggtgggagcatggcttcagcacaggagtttgaggcagaagtgagccctggttgcaccactgtgttccagcctgagkgacagagtgagaccctgtctttaaaaaaacaattttgcaaaaagaaagtggggaggaaggagcctagtggtgaacaccagggtttggaatcagaccagac

SEQ ID NO: 31608 - DNA, 201 bp, Homo sapiens
gaagcaggagaatcacttgaaccctggaggtggaggttccagtgagccaagattgcgccactgcactccagtctgggcgacaagaacaaaactccgtctcaaaaaaaaaaaaaaaaattaaattaaatgcttgctttttggcaggcgctgtggcccttgtaagtatcacctcatttaatcctcataacatcttacagggta

SEQ ID NO: 31609 - DNA, 201 bp, Homo sapiens
gcttcttacattcagaagggactcttgagtaatttaaacttctagatcccatgctccctgagggcaaaggccaggccagacttaactgtttcagttttgcrtttctctgtctctcactctggcccttgtgcataggtgttcaataaatgtttgttggcattgttattaataaattcaccaggacaaaaacattataattta

SEQ ID NO: 31610 - DNA, 201 bp, Homo sapiens
ttggaccttgttgcaattggtcattcattgatatttttctgatcaacaaatcaaccatagtttcttttgaataattgcaagattttttttatttttcatatgtgtgtgtgtgtgtgtgtgtgtgtgtgtgtctgtgtatgtgcgtgtgagagagagagagagagaatatggacgatgcagaggtggatggaggattatttt

SEQ ID NO: 31611 - DNA, 201 bp, Homo sapiens
tggaccttgttgcaattggtcattcattgatatttttctgatcaacaaatcaaccatagtttcttttgaataattgcaagattttttttatttttcatatgtgtgtgtgtgtgtgtgtgtgtgtgtgtgtctgtgtatgtgcgtgtgagagagagagagagagaatatggacgatgcagaggtggatggaggattattttc

SEQ ID NO: 31612 - DNA, 201 bp, Homo sapiens
gaagatggcaggcattctgactccagaatcccctggttctgacagaatcccctgacagttctgacagttcgagaccagcccggcccacatggtgaaacccygtctctaccaaaaatacaaaaattagccaggcatggttgtgcacatctgtagtcccagctacttgggaggctgaggcacaagaatcactggaacccggga

SEQ ID NO: 31613 - DNA, 201 bp, Homo sapiens
atttaatgtttatggtataatctaggtgatgggatacaggtattgtctgtgaaatcctttcaacctgttgtatgtttggaatcttctcttctcttttcttytcttctcttctcttttctcttctcttctcttctcttctcttctcttctcttctcttctcttctcttctcttctcttttcttttctttctttttttgagag

SEQ ID NO: 31614 - DNA, 201 bp, Homo sapiens
ggccttggaagtgcagaggatgccggtcgtcccaggtgctccggggagtatttctgtttagagtggcatgtggagggagtgctctcctggtacagcaggcrtccaggcagagtgagactctgctagactcaactctttcttcttctctgaaggaatcagagactgaaacaaggatggcttcatcagtttggccatagcctg

SEQ ID NO: 31615 - DNA, 201 bp, Homo sapiens
ctgatgaacgtgttggttctcccaggctgtctcccaaacataaaggcaaccatttccttcttctgagaatgctggctgcctaacactagataacatcttargtggcagcagggaaaataatgcaagtagatagatgcagagaaattgaaaaggaccctagttctgccagggtggctacagcctggcctgagagttttgtca

SEQ ID NO: 31616 - DNA, 201 bp, Homo sapiens
ccgtggacatcccaagatgaatctcatcacaagaatctcaggtgcagatgtatttcagcaaagcagcaattgcagctgttttctaaatgacttcaacttargagaatttttcctatatagcatatttcatcacatgagagatcctctttaaccctgccatttactattctagtaatgtattcctagcaagagaaacaagga

SEQ ID NO: 31617 - DNA, 201 bp, Homo sapiens
agcgctaaaatatttttcttccattgtaactgaaactgctgttggcttccgtcccaaaaaccagaaagacaattatacttaactgtttagagatttataawtaccacactggagtagcctctaggtagtaactttagatatctaccccaataattttcttttattggtttgtgatttagatcttatcttgagtcctctata

SEQ ID NO: 31618 - DNA, 201 bp, Homo sapiens
tgtgagacagtgtggattaggatctctaaattactggatgacaaaaagcagaacgaaaagggccttcctaaagtggaactctgggatcaaatccacaggayagaatgcattgaggacctctgcatgttaattttcaaatgatcagtaaagacaggctagataaaccttggtgataaaagcatcatttcttttgagcagtga

SEQ ID NO: 31619 - DNA, 201 bp, Homo sapiens
ctctttgacctgaagctatagttacactaaatgaacatccacgtataagcggacaccctcctttctccacatttcaacaaaggttaagagcctcaagtagrgaatgacatttttctttggaagtatggcagcagtccttggagagatagcattaattgggggcatagggtacaccttccctatcctaaagtctgagatgtc

SEQ ID NO: 31620 - DNA, 201 bp, Homo sapiens
gcacagaattagggctgacttaaggccaaacttgatctgttggctcaacaatatcaccaaggatctggcttctttccatctctccgttctgtcttatgctrtctttcatatcctttggtgtctttatcaaaggctggcaccttttaggccctaatatgactgaaggagctcctggggctagatgcttccttcatcatgccc

SEQ ID NO: 31621 - DNA, 201 bp, Homo sapiens
cacacacacacaaacacacacacacatacgcacacacacacacagctttcctcccgccctctttgacctgaagctatagttacactaaatgaacatccacrtataagcggacaccctcctttctccacatttcaacaaaggttaagagcctcaagtagagaatgacatttttctttggaagtatggcagcagtccttggag

SEQ ID NO: 31622 - DNA, 201 bp, Homo sapiens
aatttagcatgaaaaatgtgcattcacattgagaaagtagagccttcattggacagctgccactgcatgttattagggctcctagactaacaaagcctctyttttctcttctgttctcttttcacactcccttttgatgtcacttttctagcccacatggtgtcagaactgacccagcctagggattctggaccagacact

SEQ ID NO: 31623 - DNA, 201 bp, Homo sapiens
gaaacaaatgaggaggaaacaatagactaatttttaaaatccatggagatttgaagaatacaaataggacttccagaaataaaaaatagaataactgaaaytgaaggtcttcagcaattggcacacatttgtgtaagttatttttatgagcaacattaagatagcaattctcataaagatatatcaaagaaagtatttttt

SEQ ID NO: 31624 - DNA, 201 bp, Homo sapiens
catcactattcctctgcccttgtgcctagtttgcaaaccagtgggtttatctggttgttttccccagagttggagcactgcagctgtttccatagcactgyggcccacagggagttgtgtgttgggggctcagttgttgtcttacagaaaaaaaccttgtaaaggcaattcagcaagccacccttctagcaccaagagata

SEQ ID NO: 31625 - DNA, 201 bp, Homo sapiens
tcagcagaaacaacagacagaagaatcagattcccgagggtttcagatatagttccaatggaataggtaatgtattttaaatgtttgaaacaaatgaggargaaacaatagactaatttttaaaatccatggagatttgaagaatacaaataggacttccagaaataaaaaatagaataactgaaattgaaggtcttcagc

SEQ ID NO: 31626 - DNA, 201 bp, Homo sapiens
cctggacatagttttaaaatatttgttcactgttttatcatcttaattttaccctagtcttcaggcctgtcctttccgtaagctaggtgactatgtgggtyttgcattaaacctttggtagagagagctcccctctgagaacctgaagagatgtaaagaggaacagcacaaggtcagagagaactgggtagaatccagctc

SEQ ID NO: 31627 - DNA, 201 bp, Homo sapiens
atgtttatggtataatctaggtgatgggatacaggtattgtctgtgaaatcctttcaacctgttgtatgtttggaatcttctcttctcttttcttttcttytcttctcttttctcttctcttctcttctcttctcttctcttctcttctcttctcttctcttctcttctcttttcttttctttctttttttgagagagtct

SEQ ID NO: 31628 - DNA, 201 bp, Homo sapiens
tttatggtataatctaggtgatgggatacaggtattgtctgtgaaatcctttcaacctgttgtatgtttggaatcttctcttctcttttcttttcttctcttctcttttctcttctcttctcttctcttctcttctcttctcttctcttctcttctcttctcttctcttttcttttctttctttttttgagagagtctcgc

SEQ ID NO: 31629 - DNA, 201 bp, Homo sapiens
tatggtataatctaggtgatgggatacaggtattgtctgtgaaatcctttcaacctgttgtatgtttggaatcttctcttctcttttcttttcttctcttctcttttctcttctcttctcttctcttctcttctcttctcttctcttctcttctcttctcttctcttttcttttctttctttttttgagagagtctcgctc

SEQ ID NO: 31630 - DNA, 201 bp, Homo sapiens
cagagtggggaacaccaggcatcagcaataagctagacttatggctccaggctctcttttccctccactaaagtggaacattttggctgaaggagtgtgtgtgtgtgtgtgtgtgtgtgtgtgtgtgtgtgtaaagaaagaagactggaatagtaggactttaggcaccaagaatcccctcccttgctagcctggcatatt

SEQ ID NO: 31631 - DNA, 201 bp, Homo sapiens
tttgggaagaattacctagagatttgtcactgacctgtgttcttgaactataaaacatgaatatgtggcttaagaaatagtttttcttaaggctgggcacrgtggctcatgcctgtaatcccagaattttgggaggccaaggtgggcagatcacttgaggccagaagttcaagaccagcctgaccaacatggtgaaaccct

SEQ ID NO: 31632 - DNA, 201 bp, Homo sapiens
gtatattattctctagaaggcaggagaggtgaggcctttcatactcatccctgcagacctgcacatttctggcaccagacccatatatctatatatctatrtattcatttaccacagcccagcattcctggcagcctgagagctggtggctagttgagaagaacatttagtctccctttcctgggtctcgtttccacccct

SEQ ID NO: 31633 - DNA, 201 bp, Homo sapiens
gagccgagatcatgccactgcactccagcctgggtgacagagcgagactccatctcaataaataaataaataaataaataaataaataaataaataaataratggatgctcaggattggatgacttattgggcaaaagcctgggcccttgcttaattggttcagacatttgttgagtgttacctatgtgctaggaagtact

SEQ ID NO: 31634 - DNA, 201 bp, Homo sapiens
ggaaaatgcagtggcttttacttgatgcagtttatgatgtttggttaatagaatgtcacataaaaacaaatcccctgattatcccactgccaatgggtggyactgcattctaataaaggcagcacttctttggtggtgtgggggaaaagaattgcagcccagtgcaggagagcctgatgaagactttattatttaatgaac

SEQ ID NO: 31635 - DNA, 201 bp, Homo sapiens
agccgagatcatgccactgcactccagcctgggtgacagagcgagactccatctcaataaataaataaataaataaataaataaataaataaataaataartggatgctcaggattggatgacttattgggcaaaagcctgggcccttgcttaattggttcagacatttgttgagtgttacctatgtgctaggaagtactg

SEQ ID NO: 31636 - DNA, 201 bp, Homo sapiens
atttggagtgactacaatgttaaataaatcggggcaatgtgtttatagataatgtgctctccttctgcaagctgccaccagcctgccaatacttatatcctcatccatccatccatccatccatccatccatccatccatccatccactcatccatccatccatccatccactcatccatccacccatccatccacccatc

SEQ ID NO: 31637 - DNA, 201 bp, Homo sapiens
tttggagtgactacaatgttaaataaatcggggcaatgtgtttatagataatgtgctctccttctgcaagctgccaccagcctgccaatacttatatcctcatccatccatccatccatccatccatccatccatccatccatccactcatccatccatccatccatccactcatccatccacccatccatccacccatcc

SEQ ID NO: 31638 - DNA, 201 bp, Homo sapiens
actaccaaattcacagtatgggttgttcagctggcatgtattattatttttgtggttgttttcccatcatcgcttaaggaaacaaccacaccctcttaccmgtctggttcgtgtgagaaacagccaggcaccattccatcctccaatccagagactgcgctcttgtggccatgccgtaagactttgagagttaacttgcac

SEQ ID NO: 31639 - DNA, 201 bp, Homo sapiens
ctctctgggcgtagaacttggctccattgcctggcttgcctgatcctagctgtgcttaatagctcagcctcgtcgatggacacatggcattccccaccacrggatccatcccgaaacagcagtcaagtgctcctttacaggaatcatactaccaaattcacagtatgggttgttcagctggcatgtattattatttttgtg

SEQ ID NO: 31640 - DNA, 201 bp, Homo sapiens
ttctagggcgtggtgtttgcccgcatcttctggtgaggcctggctatctctgaggggcagaccagcacacctgtgggtgcagcagctcacaggagtctgtygggcggcactgccaggccctcgggaccctgagtaaggtctgacgcatcagggcaggcagaggggaggccacatttcgcctgccactgatgttagcgggga

SEQ ID NO: 31641 - DNA, 201 bp, Homo sapiens
ccacttacaaagctaaaatgtattatttctgttatcagcttccaaaacctcagaaatggggggaaaaagagccaagtaatataattcattaaagaacacayaagaatctatccacaagcagtacatgttactcattagatgccaccatgtgcctttacataatgcctgacacaatagggactcaataaatatttaaaggag

SEQ ID NO: 31642 - DNA, 201 bp, Homo sapiens
ttgagaggctgagttgggaggatcacttgagcctgagaggtggaggctgcagtgggctgtgaaagcaccactgcactccagcctgggcaacagaacaagascctgcctcaaacaaaaacaaaaacaaaaacaaaaactgaggaacatggatttctctacatgttaagaagtctgggttttcccccacttacaaagctaaaa

SEQ ID NO: 31643 - DNA, 201 bp, Homo sapiens
aatcatggggcccctgaaagtccatccctcctccagaggtagaagcgcctccatctctgtgtacctgaaaacaataaaaggcatgtttatttaaaataatractgccggaggcccccaggaggggctgaggatcgaggaaacattactgtggccaaagtcattttttatttctggagcaaggtagcagactcaggggggtg

SEQ ID NO: 31644 - DNA, 201 bp, Homo sapiens
catgctcaaattatagctctatatggcatgtatataacattgatgaaataaaaataatagcacatagtaagctctcagcaaatatttgcttgattctttgyacaaatgatttatttcactccttacaacagccctatgcagtcttctctctgactcttacccacttctccctgttgtagactcgaagtgaagctgccatga

SEQ ID NO: 31645 - DNA, 201 bp, Homo sapiens
aagaggagacccaaaacctcaggaatcaagataaatgatagtttcatgcaatattttcaaactatcaaaataaaatattttcaaaataatcaaaatttaaraaatccaggatgaacagaatgtcataattttaagtgaagacagtataaatattgatttcaaagctgacatttaagtactgaattcactaggggtggaaac

SEQ ID NO: 31646 - DNA, 201 bp, Homo sapiens
ttgccatatggaacatttaggatttcccaggaggaaacacgttcaaccagttgcttctgttacctccggactaagagggatcctgatagtagctgtggctrgtgaaggaacacctctattatctggctctgggtgctgcagaaccaggcagttaacaggacaagaaaaccaaatgatccatgggtgcaaatgtgcttttgc

SEQ ID NO: 31647 - DNA, 201 bp, Homo sapiens
gcacttttgccctggtggcctaaatttagcctgatgttaccacttgtggcaggtcacaggctggatgccgtatctgggacctagggttttaatgacttgcctggatattggtgtagtatgcatgccaactgatattcaatcaacatctcctgccagcataaaaaagtttaaggaggtgagttactacttctatcctatgaa

SEQ ID NO: 31648 - DNA, 201 bp, Homo sapiens
atgcctttaggacaaaagcccctacttcccatgccagtttgccccaacagcatggcagaaatggaaaaggggagtgtaggctgaacaggacctttggaaarcaccaggttctgatttccagaccctcggtcttcttgtgcaggctttccccctctttgtttttcccttttctcaaattccttgacgtggtggcaagctgaa

SEQ ID NO: 31649 - DNA, 201 bp, Homo sapiens
atgagcattaacagccaatacagtatcaagctggaggctgtctcagaggtgggaaagttgcaggcaagagcacagaaagtcagaattcttagcaaacagcygttgtccaactgaccaggagtgcaaattgttctactcgcaaagctgcttcacgtatgtacattctttttgttttgttttgtttttttgagacagagtctc

SEQ ID NO: 31650 - DNA, 201 bp, Homo sapiens
ctgttgtccaggctggagtgcagtggcacaatctcggctgactgcaacctccacctcctgggttcaagagattctcctgcttcagcctcccaagtagaggrgattacaggcgtgtggcaccaggcctggctagtttttgtatttttagtagagacaaggtttcaccatgttggcaagcctggcctcgaactcctgacctca

SEQ ID NO: 31651 - DNA, 201 bp, Homo sapiens
aacatgatcaggaactgttcttattcatgtatttgaatgcttacttgcttattgtattcctgcccactggaatgtaagttctaagagggcagggatctggytagtcagattcaatgcttgtagaggtcagaacccagccaggaaaacaaagtggctcaagagagtatatttaatgtagggaactattaccctagcatcaga

SEQ ID NO: 31652 - DNA, 201 bp, Homo sapiens
catacctgaatacctgagaaacttcaacacacacacacacacacacacacacacacacacacacgcacacacacacacgcacacgtactttccgaaatctrttctgtgaggctctttgggtcgtggtaaggacaattgctttggaacaagcacactatgtattctagatagaccagtggttctcaaactttgagtgcacca

SEQ ID NO: 31653 - DNA, 201 bp, Homo sapiens
tattctattctattctattctattctattctattctattctattctattctattctattctattctattccattccattccattccattccattccattcyattttcttaaaaaataattgcttataacctgttacatagatttcctggtcaaccagggggttgaggcctgccatctgaaattgctgttgtagtccagctc

SEQ ID NO: 31654 - DNA, 201 bp, Homo sapiens
atttattgatttgcatatgtggaaccagccttgcatcccagggatgaagccgacttgatcatggtggataagctttttgatgtgctgctggattcggtttkccagtattttattgaggatttttgcatcaatgttcatcaaggatattggtctaaaattctctctttttgttgtgtctctgccaggctttggtatcaggat

SEQ ID NO: 31655 - DNA, 201 bp, Homo sapiens
agcgaggtacagacctattctattctattctattctattctattctattctattctattctattctattctattctattctattctattctattctattcyattccattccattccattccattccattccattttcttaaaaaataattgcttataacctgttacatagatttcctggtcaaccagggggttgaggcctg

SEQ ID NO: 31656 - DNA, 201 bp, Homo sapiens
ttggagtgactacaatgttaaataaatcggggcaatgtgtttatagataatgtgctctccttctgcaagctgccaccagcctgccaatacttatatcctcatccatccatccatccatccatccatccatccatccatccatccactcatccatccatccatccatccactcatccatccacccatccatccacccatcca

SEQ ID NO: 31657 - DNA, 201 bp, Homo sapiens
ggagtgactacaatgttaaataaatcggggcaatgtgtttatagataatgtgctctccttctgcaagctgccaccagcctgccaatacttatatcctcatccatccatccatccatccatccatccatccatccatccatccactcatccatccatccatccatccactcatccatccacccatccatccacccatccatc

SEQ ID NO: 31658 - DNA, 201 bp, Homo sapiens
tccctcctgccaggccctttgtgttctctgacaacctaaagaaccttccttcctggttactgggtctgtgctcttggaccctgatatattaataaatattrattgtttgttgcacacctgctacaaatccaccaggcccagtgctagatgctatgaaatataagaattaataagccctggctcctgacctcaggttcttag

SEQ ID NO: 31659 - DNA, 201 bp, Homo sapiens
ctcctgccaggccctttgtgttctctgacaacctaaagaaccttccttcctggttactgggtctgtgctcttggaccctgatatattaataaatattgatwgtttgttgcacacctgctacaaatccaccaggcccagtgctagatgctatgaaatataagaattaataagccctggctcctgacctcaggttcttagccg

SEQ ID NO: 31660 - DNA, 201 bp, Homo sapiens
cctccatccctcagaccctacctttcctggccccaaggctgcctctggctagtgtgacagacacaccctgggcccctgaagtctgaaagccacatttttcraggggaacctggccactatgagtgtggaatattggggccttaaatttcctgcctgtagaatgaggcatttgggctaggggagtggttcctagactttttg

SEQ ID NO: 31661 - DNA, 201 bp, Homo sapiens
ggtgaacctcttgccataaaattatgctcctgcaaagtgatgggcctgagcacagttgggatggggacagaggaaatctcacaggtccaaagctaagtccygctccttcagactctcaactgggttcccaagctggcatggatagaaagggcacagtttaccattggtaaaggctttactctttagaatttgccccccact

SEQ ID NO: 31662 - DNA, 201 bp, Homo sapiens
ttctggatcttaggccaaactgtgccacaggatgtcatagttattgtcatgaaacaaagcattttttaaaaagctaacatggggccgggcgaggtggctcrctcctgtaaatcctagcactttgggaggctgaggcaggtggatcacttgaggtcagaagtttgagaccagcctggccaacatggtgaaaccctgtctgta

SEQ ID NO: 31663 - DNA, 201 bp, Homo sapiens
ggcagagaaaggaactgtgtttctctgtccttgatggaactgccctccataggcacagggccctggaagaagggtcgtgatggtacaagcagtacccagawgtggcatgaattgagtgctcttcatgttaataaacctttcgtgggcactttgcagcagccaataatccttgcacatgcattctcccgtctgctgctcaca

SEQ ID NO: 31664 - DNA, 201 bp, Homo sapiens
ctctgtccttgatggaactgccctccataggcacagggccctggaagaagggtcgtgatggtacaagcagtacccagaagtggcatgaattgagtgctctwcatgttaataaacctttcgtgggcactttgcagcagccaataatccttgcacatgcattctcccgtctgctgctcacactgttcccgggaggacagcagg

SEQ ID NO: 31665 - DNA, 201 bp, Homo sapiens
ggtacaagcagtacccagaagtggcatgaattgagtgctcttcatgttaataaacctttcgtgggcactttgcagcagccaataatccttgcacatgcatwctcccgtctgctgctcacactgttcccgggaggacagcaggatgggtacgtgtccctttttggcatcagacagctggatttaaattcacactgtgtcttc

SEQ ID NO: 31666 - DNA, 201 bp, Homo sapiens
gagtgctcttcatgttaataaacctttcgtgggcactttgcagcagccaataatccttgcacatgcattctcccgtctgctgctcacactgttcccgggakgacagcaggatgggtacgtgtccctttttggcatcagacagctggatttaaattcacactgtgtcttcctgggccagctacttaacctctcatctgtcaa

SEQ ID NO: 31667 - DNA, 201 bp, Homo sapiens
aatgctgtgtttagtgtaaagtcataatccacactggtccttacctcccaaggttaaaagcatactgtatttctaaagtgttctggcagaatattcttcgkcgggcacctggcttgcactaaaaacccatgcattttacctttatctgagtttgaaagaaattatcagtgcacccatctggaatatatattagaattctag

SEQ ID NO: 31668 - DNA, 201 bp, Homo sapiens
ggaactactttcctaaatatttcagaagtgttctaatcatatagatcatacatgcagtgaatatatctttatgtatgtccacacatacacacacggacatwtgtacgagcaaatttgtgatcttcaaattggtatctcttatgtagtgacagaaagtagattagtgtggtctggggcttggaaatgggaaaggggattgat

SEQ ID NO: 31669 - DNA, 201 bp, Homo sapiens
tgaaaatgggcttcgcatcttcaattaggaatttgggcttccaaccctcctcctgaggctcccttccccacaaccaggctatgataataaatttcagaacytcatctccctctgcgagtgtggattctctccccaactaatcctccaatactcatctgagcataacactcccgatgaaaccacacttgtcccttctaaaca

SEQ ID NO: 31670 - DNA, 201 bp, Homo sapiens
catcttcaattaggaatttgggcttccaaccctcctcctgaggctcccttccccacaaccaggctatgataataaatttcagaacctcatctccctctgcragtgtggattctctccccaactaatcctccaatactcatctgagcataacactcccgatgaaaccacacttgtcccttctaaacacttcaatgaattccc

SEQ ID NO: 31671 - DNA, 201 bp, Homo sapiens
gtgccaggccctgtgctccatctggggatatacgggacctctctattcatcctattcttgtttcaagtcgtcttctttttcttcctttcttttttttttttcctgaacaattctctctctaggacttaacttattgtctaagacatttcatgtagccctcccttgacattctcatgcaacatcttttgtactgttgcattt

SEQ ID NO: 31672 - DNA, 201 bp, Homo sapiens
cttccaaccctcctcctgaggctcccttccccacaaccaggctatgataataaatttcagaacctcatctccctctgcgagtgtggattctctccccaackaatcctccaatactcatctgagcataacactcccgatgaaaccacacttgtcccttctaaacacttcaatgaattcccttatcttccagtctggaatgta

SEQ ID NO: 31673 - DNA, 201 bp, Homo sapiens
ttcttatctgtaaaaagatgagatgagaatgaccctaactcatagggctgtagtgaagattaaaatccaacagatgactcagtaaagttacctcttattcytactattattaaatgctgtgaggaaagctgaatgctgcctgtattgttattggtttatagcaatgttttgtattcttatagataatagccttgtgcatct

SEQ ID NO: 31674 - DNA, 201 bp, Homo sapiens
cttctaaacacttcaatgaattcccttatcttccagtctggaatgtaaccacaaaagaatatcaatgagaggcatgagtggagctggctacaaatgaaacrtgaacaaaatcttggtggagtgcaatagggtttcagcaagaaggatcccaggttgcacttcccaggtggaagtgggttccttagactacattcggtgagt

SEQ ID NO: 31675 - DNA, 201 bp, Homo sapiens
tcatttgactttttgcacttcggttttcttatctgtaaaaagatgagatgagaatgaccctaactcatagggctgtagtgaagattaaaatccaacagatractcagtaaagttacctcttattcttactattattaaatgctgtgaggaaagctgaatgctgcctgtattgttattggtttatagcaatgttttgtattc

SEQ ID NO: 31676 - DNA, 201 bp, Homo sapiens
ggctaattttttcccactacagagacgctgctattctcagtactctaccaggtgctctgtgagcttgaggtttccactctggctggtgggaaggtgaaccrttcccagccctgtataaactctgggaaatgttctgtctgctcctttagggtgtttctctcccccaccttggatagctttcacacatgcctgtgtccacca

SEQ ID NO: 31677 - DNA, 201 bp, Homo sapiens
ctctttccctctctctcttcatatttcaaagctctctctctctctctctctctccctctctgtctctctccctctctaacacacacacacacacacacacwcacactctctctctctctctctctctctctaggaacatctctctttccctctctccatgtttcaaaactctgtctctctctaactctctctctctctttc

SEQ ID NO: 31678 - DNA, 201 bp, Homo sapiens
aaactctgttgagaatatgtttccatagtttattaagcatgtatctcaaggaaaaaggtctttcatgagaagctgaaccagaggcaaaaaaaaaaaaaaaagtctcaaggctagagatcttcctttcttccttcttgttcctttataccttcttgaacagaacctttgtttctgaacagccaacagccaattcctttgact

SEQ ID NO: 31679 - DNA, 201 bp, Homo sapiens
tcaatctctgaatatattggctcctcataagagtaggtgagcacttgctgtgggaaagccatggtgggaggtggtatgaacataattcctgtggccatggygctggtgtcagagcctgcctgtaccaattattagctgcatggcttgggtaattcatttgactttttgcacttcggttttcttatctgtaaaaagatgaga

SEQ ID NO: 31680 - DNA, 201 bp, Homo sapiens
cagctagacctctgatcagaacataagcaatattcagatttttcaatctctgaatatattggctcctcataagagtaggtgagcacttgctgtgggaaagscatggtgggaggtggtatgaacataattcctgtggccatggcgctggtgtcagagcctgcctgtaccaattattagctgcatggcttgggtaattcattt

SEQ ID NO: 31681 - DNA, 201 bp, Homo sapiens
acattctctattttaaattaaaaataaataaataggccaggcatggtggctcacacctgtaatcccagcactttgggaggccgaggcaggtggatcatgakgtcaggagatcaagaccatcctggctaacacagtgaaaccccgtctctactaaaaatacaaaaaattagctgggcatggtggtgggtgcctgtagtccca

SEQ ID NO: 31682 - DNA, 201 bp, Homo sapiens
ataatagtcaacatctacaagaataataacagcagcacactgtatccatctttaactaacacgaactctagcgcagactgtctggatttatatcccagctsaacctcttataactgtgtgacctcgagtcgttcacctaacccctcatgcctattttcctcatccgtaaaatgggcataataatagtacatactacataaa

SEQ ID NO: 31683 - DNA, 201 bp, Homo sapiens
ctgaaaacactgaaatgactggtgccttgctctatctccagctgtcttgacacatactaggtcctcagcaagcaattgttggatggatgaattaatggaaygcaccactccaaaggagtcagctttcaggtcaactctaatggagtggatccctaagagggaagggctttgcaggctgggtttaacagtggagacttcctg

SEQ ID NO: 31684 - DNA, 201 bp, Homo sapiens
tttctctccaaccagtaaacagggcaagagaatttgaacctggctctatatcttcagggcaagtctgctaatatcctcttgcaactgaaatatgttcttcrtgggctggaaagagttaattttgttcattttctcaaacctcttctccatgatggcttttgtctacctacctattccagataatattaatagatatctatg

SEQ ID NO: 31685 - DNA, 201 bp, Homo sapiens
ctctttcatgagccctttaatctgagcctgctgacacttttatatgtgcagggttatgttacttgaggaattcctttgaagacaattttaaactttcatcscttagttcaattttaaagtttgtaacatttgggacccttctcagagccctggatttactcctggcatcaagatgttcagggcagagctgagctggagggg

SEQ ID NO: 31686 - DNA, 201 bp, Homo sapiens
atgtctttgttccgggaggtttttgatgttcctcaggtcagtctcttgggggaaatcctggattgtttatatttaaatggtccaggccaggatgagagatrtgtggggagtagagtgtagtgtggcatacctctaagacttcctggatgcctctggatgttccattgcaaaccatggcttgagctccagtgtgaaattatg

SEQ ID NO: 31687 - DNA, 201 bp, Homo sapiens
gttatgttacttgaggaattcctttgaagacaattttaaactttcatcccttagttcaattttaaagtttgtaacatttgggacccttctcagagccctgratttactcctggcatcaagatgttcagggcagagctgagctggaggggaattccgcattcctagtgatccttaactggtgcccctggggaatttatctaa

SEQ ID NO: 31688 - DNA, 201 bp, Homo sapiens
tactggttaagtctttctgtctcctgcccttcaaaagcagtcattgtgtttgtttttttcagaggtaccatcagggttgtcagaaagtggaatttcccgcsagatcagaatttcttcagccttcattcatgacctgagtacttttggttttgagggacaaacttgctctattttgagcactgaaggaaaacatctaactcc

SEQ ID NO: 31689 - DNA, 201 bp, Homo sapiens
tgagaggcctggcacagtggtggttcttaaaccagaggaacatacctgaatacctgagaaacttcaacacacacacacacacacacacacacacacacackcacgcacacacacacacgcacacgtactttccgaaatctattctgtgaggctctttgggtcgtggtaaggacaattgctttggaacaagcacactatgta

SEQ ID NO: 31690 - DNA, 201 bp, Homo sapiens
caaacttgctctattttgagcactgaaggaaaacatctaactcccaattatgggtctgtgcacgtgaataattgggtaatgggattaaagtgcttgaagayacaacccttcctcaggtgccccttttcacacataaggaaagtggagtgcgaagggcactggctcacgggaaggagtggtggggaccccaggccttcagtc

SEQ ID NO: 31691 - DNA, 201 bp, Homo sapiens
tcttcctgtctaatagcccaatagaatcctgccagaatttctacaaagatttcacattacagatcgacatggctttcaacgtgttcttccttctctacttyggcttgcgggtaagtttgtgcaacattgttcagtatcacaatggggtgtttcagtctgggacccagggatcatccccctcagcctctgctctcgcagtca

SEQ ID NO: 31692 - DNA, 201 bp, Homo sapiens
tgtgtgcaaagcatacattgtgtatatacatgtgtattatatctatgtgttatatatacatgtggatacattctgctagattttatatatatatatatatwcacacgcatagatattaatatatatatcttatagaaagaaaagttcctgaaacaatggctgtccttaccacatgagatgcagcttgacataatcttttca

SEQ ID NO: 31693 - DNA, 201 bp, Homo sapiens
ctttggaagtgggtctctatcaccttgcaaactgaagatgttgggatcccttgttcagggagatttctcatgatcctcctttccatacaacaaacggcccmattcctctgggtctccctggatcacagcagtgttgattggtgtgctcaatggcaaatgcttggactttcttctagcaatagaagctttagaaactttgat

SEQ ID NO: 31694 - DNA, 201 bp, Homo sapiens
gtaatgggattaaagtgcttgaagatacaacccttcctcaggtgccccttttcacacataaggaaagtggagtgcgaagggcactggctcacgggaaggartggtggggaccccaggccttcagtccctcatttaacaaggttgtaaagtctgatctgacttcttactgcaagcaccgctacttctatgacatcctccatg

SEQ ID NO: 31695 - DNA, 201 bp, Homo sapiens
tattatcactattattattaccttagttttggaaattactatcacttttgagtgctgagtcatctgattcagtcttagaacaacgttgggaattcgtaacmttatccccagtttacagaagagaaaacaaagacttgaagaggtcaaattatttgcttaagatcctatagctaggaggtgatagggctggaactttagctc

SEQ ID NO: 31696 - DNA, 201 bp, Homo sapiens
acataaggaaagtggagtgcgaagggcactggctcacgggaaggagtggtggggaccccaggccttcagtccctcatttaacaaggttgtaaagtctgatytgacttcttactgcaagcaccgctacttctatgacatcctccatgccctttttatttcaaaagcagtttaatatgttatttcatttaatctccactgcaa

SEQ ID NO: 31697 - DNA, 201 bp, Homo sapiens
gtgtgtgcaaagcatacattgtgtatatacatgtgtattatatctatgtgttatatatacatgtggatacattctgctagattttatatatatatatatayacacacgcatagatattaatatatatatcttatagaaagaaaagttcctgaaacaatggctgtccttaccacatgagatgcagcttgacataatcttttc

SEQ ID NO: 31698 - DNA, 201 bp, Homo sapiens
cttctcctggatcatccctgtgggccctcagtttgctgtgatatcacaaaggccaccatgtcccttgaaaattcaagactaggacattggaaaagagagarataaatctcccgtttttaggtttatgctgagcaaagactaatgacaaataattagaagctaggaccagttttccaagtaacaacctacctgatcatcagt

SEQ ID NO: 31699 - DNA, 201 bp, Homo sapiens
taaaaaaatttggtgtgtaggtctatgaattttcacaaatgtatggaggcgtgtaaccaccactataatcagtggaactgtgcctttaccgcatcgaaccrcctccttccatctctaacccctggcagccagggatctgtttttcatcaccatagctttatcttttcaagaatgtcaaataaggagaatccacaggatgtg

SEQ ID NO: 31700 - DNA, 201 bp, Homo sapiens
gccattctcctgtctcagcctcccaagtagctgggactacaggggcctgccaccatgcccagctaatttttctatatttttagtagagatgggctttcacygtgttcaccaggatggtctcgatctcctgaccttgtgatccgcccgtctcggcctcccaaagtgctgggattataggcgtgagccatcgtgcctggccag

SEQ ID NO: 31701 - DNA, 201 bp, Homo sapiens
actaagacccgcccccccctccctccctgcctccctttattccttcctttggctctccatttatttatttacttgtttagcaaagtttattgagtacttaktctgtgtcaggcacttgtgtaggttttggtgaaacagtgaacaaaacacacatgttttctgcttttatgggccttgcattccagtggagatggccaaaaa

SEQ ID NO: 31702 - DNA, 201 bp, Homo sapiens
actttgcatgactcttattctgagtgactccagtgtgaatatgacattactaatgacctgctaagtgtgtacagatgtgggtttctccagatgtggtgatyaataacataatggagatagcggttgactcatgtttatgagttgtttgccttttattacgtttctgagtttatttgctttgaactgttttttaactccagc

SEQ ID NO: 31703 - DNA, 201 bp, Homo sapiens
aaataaggagaatccacaggatgtggccttttgaaactggtttctcttatgggcttactttttttttctcagttagaacttttatttaaaatcaacaatcmattgaacttgcctatttgccgaacaatatctacaggtagaaatttgcaaggataactctggataagcatagtaggccatctatttcatcatgaaggaaat

SEQ ID NO: 31704 - DNA, 201 bp, Homo sapiens
ttttctaagtaaagagtaatattatcagtgaagagaggtagtttgacttcttcttttcctatttggttgccttttctttctttctcttgcctggttgctcwggctaggacttgcaatgccatattgaataggagtaatgagagcgggagtctttgctttgttcctcttctcaaggggaatgcttgtagctttgcccattca

SEQ ID NO: 31705 - DNA, 201 bp, Homo sapiens
ggcttactttttttttctcagttagaacttttatttaaaatcaacaatccattgaacttgcctatttgccgaacaatatctacaggtagaaatttgcaagrataactctggataagcatagtaggccatctatttcatcatgaaggaaatttttgatgtactattttgaagactctatttacagtcccttatatttaaact

SEQ ID NO: 31706 - DNA, 201 bp, Homo sapiens
ttcatgttaataaacctttcgtgggcactttgcagcagccaataatccttgcacatgcattctcccgtctgctgctcacactgttcccgggaggacagcakgatgggtacgtgtccctttttggcatcagacagctggatttaaattcacactgtgtcttcctgggccagctacttaacctctcatctgtcaatggaggac

SEQ ID NO: 31707 - DNA, 201 bp, Homo sapiens
ggaggacagcaggatgggtacgtgtccctttttggcatcagacagctggatttaaattcacactgtgtcttcctgggccagctacttaacctctcatctgycaatggaggacattagtaccaacgtcatagagttactatgatcatgctaaaaaacagtagtcgatagtataattattgttagtagtactatttactagta

SEQ ID NO: 31708 - DNA, 201 bp, Homo sapiens
attgttagtagtactatttactagtaatatctattctagattgtgcatggtaagaactgactttccatttgctgtagctctcctccctcctctcctccttyccccactccttccttccctcccacccaccaagatttgtcaggtgcttactctgagctcacagggattcaatattgaagatacagccataaatgaaacaga

SEQ ID NO: 31709 - DNA, 201 bp, Homo sapiens
atatttcagaagtgttctaatcatatagatcatacatgcagtgaatatatctttatgtatgtccacacatacacacacggacatttgtacgagcaaatttrtgatcttcaaattggtatctcttatgtagtgacagaaagtagattagtgtggtctggggcttggaaatgggaaaggggattgatttaacaggcatgaggg

SEQ ID NO: 31710 - DNA, 201 bp, Homo sapiens
ccaggctctctgcacccagccctttgaaaagtgcaaggaatgccgattaatgtataaaacaggctccctaggtctgctggaccagctatgtctcgaggcaggccagctccagttgtgcaagtggacaagcaggctaggtagttattttacttctgtccattagcaatacagctcagagaaaggtcatcattggtggtttat

SEQ ID NO: 31711 - DNA, 201 bp, Homo sapiens
acataatttgctggcatctttttaaacatcttcatctgcagtcatagttgcagtgggtatttgtgttggggtccagttaaatgtacattgttagataaataatgaataaggttttagtataagcatgtcccatgtggtatttggaatatacttatactaaaaagttatttgttgtttatctgaaatttaaattttactggg

SEQ ID NO: 31712 - DNA, 201 bp, Homo sapiens
cataatttgctggcatctttttaaacatcttcatctgcagtcatagttgcagtgggtatttgtgttggggtccagttaaatgtacattgttagataaataatgaataaggttttagtataagcatgtcccatgtggtatttggaatatacttatactaaaaagttatttgttgtttatctgaaatttaaattttactgggt

SEQ ID NO: 31713 - DNA, 201 bp, Homo sapiens
ataatttgctggcatctttttaaacatcttcatctgcagtcatagttgcagtgggtatttgtgttggggtccagttaaatgtacattgttagataaataatgaataaggttttagtataagcatgtcccatgtggtatttggaatatacttatactaaaaagttatttgttgtttatctgaaatttaaattttactgggta

SEQ ID NO: 31714 - DNA, 201 bp, Homo sapiens
taatttgctggcatctttttaaacatcttcatctgcagtcatagttgcagtgggtatttgtgttggggtccagttaaatgtacattgttagataaataatgaataaggttttagtataagcatgtcccatgtggtatttggaatatacttatactaaaaagttatttgttgtttatctgaaatttaaattttactgggtat

SEQ ID NO: 31715 - DNA, 201 bp, Homo sapiens
aggtctggtgtagatttcaggcacagctggatccaggtgttcaaatgatgacatcagtagtctattacttttacttttctctgcagtggcttcattctcagggaaggatgacttttcctattctttcctgcaaatgttccacgcttgagtcttattggcttgtcatggatcatgtgattattaatggcccaattgctgttg

SEQ ID NO: 31716 - DNA, 201 bp, Homo sapiens
ggtctggtgtagatttcaggcacagctggatccaggtgttcaaatgatgacatcagtagtctattacttttacttttctctgcagtggcttcattctcagggaaggatgacttttcctattctttcctgcaaatgttccacgcttgagtcttattggcttgtcatggatcatgtgattattaatggcccaattgctgttgg

SEQ ID NO: 31717 - DNA, 201 bp, Homo sapiens
ggctcacaacaacctctgcctccagggctcaagtaatcttcctgccttagctttccgagtagctgggactacagctgggcaccatcatgcccagctaattaaaaaaaattattgtagagatgggggggtctcactgtgttgcccagactggttttaagctcctgtgctctagcaatcctcccacctcagcttcccaaagtg

SEQ ID NO: 31718 - DNA, 201 bp, Homo sapiens
ctggtgtagatttcaggcacagctggatccaggtgttcaaatgatgacatcagtagtctattacttttacttttctctgcagtggcttcattctcagggaaggatgacttttcctattctttcctgcaaatgttccacgcttgagtcttattggcttgtcatggatcatgtgattattaatggcccaattgctgttggcag

SEQ ID NO: 31719 - DNA, 201 bp, Homo sapiens
caatgagttactatttagggagtgctcagaaccatacccagtagacagtcatcatatatacatgtctgttatatacaaaaaaaagtcatataagctttatwtgagtgcccaatagaaagctttaccaaggcaagacttgaagcaggccttgaagattactccattggatcttcttcttttcatctctgtcatcaataactg

SEQ ID NO: 31720 - DNA, 201 bp, Homo sapiens
aatgggcacattgtatgaaacttgatttagtttctagcatatgtaggtataaggtacaggttgacatggataaatcctggctttagttttcatgaaccctraagttcacaatttgctgaactttgtatttaatatttactgatgaaattcttacggtgtcgtcccttccaaaacaaaatcggaggcatacttagacttttc

SEQ ID NO: 31721 - DNA, 201 bp, Homo sapiens
agccatcttcataacagtgaaagtttctggaatctataaaacatcaatttgtatgtagaaactgaagtttaagaaagacaagcttttctcttaatttaaaytattgcgtctcatgggaaatttaattttttaaataaatcacatattccaatgaagcagaaagctttgctagatacacagtgaagatgtttgctttaaaaa

SEQ ID NO: 31722 - DNA, 201 bp, Homo sapiens
atgtctaagttaaagacggagagaagttaccactctggcagagcagatctaacatgcctgtatgttggtggtggggtagagaaggtggttggagaggggarggatattggccgaaaacctttagaggagatactgggtattacatatatatgtctatgtattcctgaaataatggcgggatgcttttttcccccccttaaa

SEQ ID NO: 31723 - DNA, 201 bp, Homo sapiens; identical to SEQ ID NO: 3845

SEQ ID NO: 31724 - DNA, 201 bp, Homo sapiens
tatcattttaataataattcataatggttaaacaaagacctgtgtgccaggcactgttctcaaacacctcatgtgtattatttcatttaaatttcatgacrgtgtatgaagaaagtgttgttattttcaccatttgacagatgaggaacctgaaacttcatgttaagtaacttgtaagtggtagtgcatagactttaaatc

SEQ ID NO: 31725 - DNA, 201 bp, Homo sapiens
gtttagagcagatttgggagtgtggtaaagaagaatagggaggaggtgtggctggttgatttgactaactgggtgcaaggtgaagcccaaggtacaggcayacttgtgattttttttttgtttttaagggtaactttcttcagggagccttttgtgacccctacaccaggtttcactgtgctatgtacttccatagaatcc

SEQ ID NO: 31726 - DNA, 201 bp, Homo sapiens
aaactgatggaaaattttcactcatgtcatagacaaaatgcttattcccttaacacataaagaccaaagagtgcctagaaattaataagttaaaaaaaaaagatgaacaataccaaaaaatggattaagaatatgaaaaaggcatttcacagtaaaggaaatgcaaacaggccttagacatatgaaaagatgattaaattt

SEQ ID NO: 31727 - DNA, 201 bp, Homo sapiens
ctctttggtgctaaggaattggcttgagaattagagggagacagtaagaggagaaaatggaaaattagtatgtgaaaattcagtgtggcaaaaattattaktagtagtagtagtagtagtagagacagggtgtcactctattgcccaagctagagtgcagtggcatgatcatagctcactgcagcctcaacttcctgggat

SEQ ID NO: 31728 - DNA, 201 bp, Homo sapiens
aacaccatgcttcttttaccttacagtttcttagaggttgttccataatatccattagagatgtacatcatttcctttaatgagttggcatattccatcakataaagggatcataattgaagtaaaattgagggatgtttaattgtgtctagtctttcatgattggtattgcaatgactgtcattgtactaatgtcccctg

SEQ ID NO: 31729 - DNA, 201 bp, Homo sapiens
gtgccatagaggcaaagatgtgtatatatgtgtgcatttttatgggaatacgttttctttaaattgtcataggagtctctggccaaaaaaaaaaaaaaaaattggtatggacaactgatgtgaattattatgtaacctactagttttcagagaaaaccattataagattcttaaccccaaggctctattgggcataattta

SEQ ID NO: 31730 - DNA, 201 bp, Homo sapiens
tagcgttttcacccattagcagaattctctgattcatgagcagcactaagtagataccgtgtgcgtgcattttgaatgaattcatttctacactattttayaggagtattgaatagttgggaattggaacccctccagggggaaccaaacattgtcgttcagaagaagacaaagagagattgaaatgaagctgttgatttc

SEQ ID NO: 31731 - DNA, 201 bp, Homo sapiens
tttaaatgcaattatagatattctcaagaattttgttttagttaaaggggtaagtagaagcaagtgatttttagtcataaaagacacctgtagaactttttaaaatcaggcacattcagccctcaccactggagactttgttccagtagatttggggttgattctgggtatctgttttttcatgttctgtaagaaagtata

SEQ ID NO: 31732 - DNA, 201 bp, Homo sapiens
tccagtagatggagctgttgactaaggatgctaacgtgtgcgataaacattaatagttttcaagacatactgtcaattcttaattatttatattaacagaraaacagcacaaattatttatgagtgcctactctttttgttgttgttgttacttcctttaaaaaatgcaattgtaggccgggcacagtggcttatgcctgt

SEQ ID NO: 31733 - DNA, 201 bp, Homo sapiens
ttgaaattaagttacttttcactgttcaaaaagtgcattgttattggctggactgtaatcaaaatatttagtcctttttattctattgtcatgggcttattaactactttctctcttaaacattactaataagtatgtatatttctctttaggccaacaactgtatcctgtagattatttcagtctaaaaattagttttca

SEQ ID NO: 31734 - DNA, 201 bp, Homo sapiens
ttattacctcctcaatgaggcttttcctgacgccatcccatttttgaataaatcatgagcttcctaagagaattgccatgtcttatccttttatttactgkgcttaacacgttcactctgcaggcaccagtacatggcagttactcagttaatgcttgtggaataaactgaacacattaaaaaaattaatacaaaaaagaa

SEQ ID NO: 31735 - DNA, 201 bp, Homo sapiens
tcttcctattcactgatgtttacagttgcttctctatttagctttctttttaaaaataatttttaaaagtttttttgaataccagaaatcaccttgctttytttttaaaaaaaatgcatattttttctgagaacacctcgtaatttttccattatgccttgtgctattaatggatacaatctgcagtaactatttatcgtt

SEQ ID NO: 31736 - DNA, 201 bp, Homo sapiens
gaggtggtgctagaaatgacaaccacttcttggcaaagtgaatcacaccacttttttattgttctctttatgaagtatccgtggcgaaatgactgtccctktccactgctgccactaaatgaacgttatctctgtggtactttgctcatcagcacgaagacgaaagtagacatgatgatctgggccatttggcgctaatgt

SEQ ID NO: 31737 - DNA, 201 bp, Homo sapiens
ctatcaattcagcattgctttgatgatcttctttcctgaagtcctacaatttttaaattatctcgttatgtagtttaagatatatacatctctttctgtgrctgtattgtaaattcctagagaacaaggactgggttttattgatcttcactatcccttatagccagtaccttttaatgaatactttccactggtaaaaag

SEQ ID NO: 31738 - DNA, 201 bp, Homo sapiens
tagggaaaatcaagaccaattaaaattttaactagattaacaattattgtctcggatccatctcactgcaatgttttggtaagttaattatttttcttctstccttttggctttgtgagttgtattgattaatgttgaacaatgttgcattttgtcttccccattttacattttccctcgcccccgccaaaccatgacacc

SEQ ID NO: 31739 - DNA, 201 bp, Homo sapiens
ctttttgtattcctagagagcaacttcttcaagggcccggctctatgatgttgttgcagtttttccaaagacagaaaagctttttcatgtgagtaacagakaagtaaaagaaagtagtgtatatatgttatataagaagtctgatgttctgactttgtagatgacctgttttgactcatctggaaacttttaggatttgtt

SEQ ID NO: 31740 - DNA, 201 bp, Homo sapiens
tagttttcaagacatactgtcaattcttaattatttatattaacagagaaacagcacaaattatttatgagtgcctactctttttgttgttgttgttactkcctttaaaaaatgcaattgtaggccgggcacagtggcttatgcctgtaatcctagcactttgggaggccgaggcaggtggatcacttgaggtcaggagtt

SEQ ID NO: 31741 - DNA, 201 bp, Homo sapiens
gatgtggatttagtctgcataactgtaacagagaaactaccattttacttcaaaagacctcctattaatgtggtaagtgtactttccattctgtatttgartcttagaaacttacattagcaaattggaaaagaagcagaagaaatcagtgttcttagaaggaaaaacaaaggctagggaataggaggcagttttagaaaa

SEQ ID NO: 31742 - DNA, 201 bp, Homo sapiens
tcagtagtagggagtgaggagggatgtgaagagagaatcagtgaaaatgaagtaggccagtgcatgcttatctctgacagttctctttatttcctgtgaargcgattgaccgaggcctggcttttgaacttgtctatagccctgctatcaaagactccacaatgagaaggtatacaatttccagtgccctcaatttgatgc

SEQ ID NO: 31743 - DNA, 201 bp, Homo sapiens; identical to SEQ ID NO: 3846

SEQ ID NO: 31744 - DNA, 201 bp, Homo sapiens
cccattgggactttgttcttcttagcctcttcataattcctgtttatgtaaagtcagcttccccacagccaagttaaactctcttaatcaagtagagccayggatttattttcttctccttgtgggtggtgccatttgagtgttgatctgtctttcataaagctgtaccttgacatgtaaggggtcagtagtagggagtga

SEQ ID NO: 31745 - DNA, 201 bp, Homo sapiens
agatttcacattaaaatcacctgtgtgattagagatacactctgttgtaaggctgcaggaaagcagacattctcatattttgctcgtaactgtgtaaatgrgaacagtccctatgcggagagtgggtaatttggcaacaactattcaaattacaaatacgtttactgatttaaacaacagttttaaactgtatgatctcac

SEQ ID NO: 31746 - DNA, 201 bp, Homo sapiens
acaatatgatactctacaactgtaaaacagaggaagttatgagctgacttggaagagctttcatgtcaggacaacaatgcagcagactaccttttggatargaaagaaaaatagtatctcttcgtatttgcttatagttgtatgaagaaactctggaagaagacacaagaaattaataaaagtgattattggaggaaggga

SEQ ID NO: 31747 - DNA, 201 bp, Homo sapiens
atggactgccagttctagaaaaagacaagtttctccattccccgtaaatgctcaggagtaaaccccagtagtcacagctgggccagtcccaacttatactytgggcaatcgaaactcatttgccaagcagagacttggaccatactgcctagaacatgcctaccattctttctttattcttttgaaagagtactgccactc

SEQ ID NO: 31748 - DNA, 201 bp, Homo sapiens
aaagagatcaataaatttatgagtgattttattcattaactcaactagtatttactgaacacattttgcataaccaggccattgttgagtgttggcaatayaatgcaattgattcttcagaggtaccttgatgttctaataagagagatagggtacatgctgtaaaatgaggcaagcatgtgctccacatgggagccatac

SEQ ID NO: 31749 - DNA, 201 bp, Homo sapiens
gaagccggagctggactccaagggtacaatcttctaagcttctaagttactatcagcccttcctgattctcacgacagtgtctaaacaaatactggaatttggggcacggacaggaagcgccgtggaggctcggagaaggaggaggacgtgggagtgttggaacaatactatctagacagagagagggtaggtgggggcag

SEQ ID NO: 31750 - DNA, 201 bp, Homo sapiens
aattagtagttttggtaaaatatatagccaaggagatggctgataatatggctaaaagggatgtttttacttatctgtggtttttggttagccaggtgcaycgaggttcctttgatgatggatcatctataatgaacaacgttatcacaggacatcttctccataagctgctatttattcactcaaaatataaatatatta

SEQ ID NO: 31751 - DNA, 201 bp, Homo sapiens
gtggcatgaacgcggctcactgcagcctcaacctatgggactcaagagacccttctgcttcaggcccctcaagtgtctgggacatatgtgtgtaccaccayacccagctaatttttaaatttttttgcagtgatggagtctcacaatgtttcccaggctagtctcaaactcctgggctcaggcagtcctcccacgtcggcc

SEQ ID NO: 31752 - DNA, 201 bp, Homo sapiens
ttacttggtttactatgtttgtatacagtttactgtaaatgtagggagtacatttctgttttccttttgatagttcatggagtagtagcccctctctcacsccattgggactttgttcttcttagcctcttcataattcctgtttatgtaaagtcagcttccccacagccaagttaaactctcttaatcaagtagagccac

SEQ ID NO: 31753 - DNA, 201 bp, Homo sapiens
atgcctttcaagcttctcttatattttcaaaagctatgaaacccatcaaaattataaggacttaaatttatgtaatttttttatttttggatacttaaatwttctattaatttgctataagtcattgaaatgttataaataattttctcatatctactctttgttcattttatttcagcctttagaaataagagggccata

SEQ ID NO: 31754 - DNA, 201 bp, Homo sapiens
ataaggacttaaatttatgtaatttttttatttttggatacttaaattttctattaatttgctataagtcattgaaatgttataaataattttctcatatmtactctttgttcattttatttcagcctttagaaataagagggccatatgacgtggcaaatctgtatccttttctgagtaaaaagttgttgacattgtctt

SEQ ID NO: 31755 - DNA, 201 bp, Homo sapiens
attttcagtgactcttttatgagttggacagctgtggcagttgggatggggcagattctttatgagccaagtatttctgccaaaacaacattgcttcccargcttactaagttactatgactgtcttaaagctagccagcctctgatctctacttcctaaagccctggggttggagtaggagtgactgaagtggggattct

SEQ ID NO: 31756 - DNA, 201 bp, Homo sapiens
gaaactgagcctcgctctgcaacccatccttatgtagaagaccatatgagttagagagtctccaggccctatcttttgagaaagtctgtggacatattccrcttttgctggattacagttaaaccatttaaaccaaacctaaaagagtagcaaaacagttgactttgtaaaaggtcagatgtatttcaacacagaaccatc

SEQ ID NO: 31757 - DNA, 201 bp, Homo sapiens
tccactcttccttactctgccctttcccctggtacatgccactgatgttgtttgtcagcgtagccatcctggaagtttgaatttgtctgtcaagcctgtayacactagcattgtcagtaagctttgtttttaatgtaatacataacagccaaatatttttatcactataaatcaaataatggcaaaatcagagccaggtat

SEQ ID NO: 31758 - DNA, 201 bp, Homo sapiens
tgataggcttctaatctcccttccttcttctccctcaccagaaggccatgctttccctgttgaaaatctctgttttagagaacggatatgttaaaaatatrtgttaaactatttattaggaaaacaaaaccagcaaatacatttttaaaaatccaactaacaaaacatagactgtaacttttacatttattataactcaga

SEQ ID NO: 31759 - DNA, 201 bp, Homo sapiens
tcatgttggccaggctggttttgaactcctgacctcaagtgatccacccgcctcggccaggatactttaaattaagcacagatcttaattttgtcacgatktgggcccttttctttggttgtggtgaaaagcagtattaagaaaggtaaatcattcatcttttaccaataggccagatgccatgtgagaatcatcagcttg

SEQ ID NO: 31760 - DNA, 201 bp, Homo sapiens; identical to SEQ ID NO: 3844

SEQ ID NO: 31761 - DNA, 201 bp, Homo sapiens
accaatgcagagaagtccttaaaggacctgatggagctgaaaaccatggcacaagaactacgtgacgaatgcacaagcctcagtaactgatgccatcaackggaataaagggtaacagcaatggaagatgaaatgaatgaaatgaagcatgaagagaagtttagagaaaaaagaataaaaagaaacaatcaaagcctcaag

SEQ ID NO: 31762 - DNA, 201 bp, Homo sapiens
gacctccagcaaactccaacagacctgcagctgagggtcctgactgttagaaggaaaactaacacacagaaaggatatccacaccaaaaacccatctgtamatcaacatcatcaaagaccaaaggtagataaaaccacaaaaatggggaaaaaacagagcagaaaaaccggaaactctaaaaatcagagcacctctcctcc

SEQ ID NO: 31763 - DNA, 201 bp, Homo sapiens
gatccttttgttctttttaaaactttatgtcagtatgcttatgattttagaaatacattcatattggctaatagaattcaattttaacataacttattctrtacaatttggaccagaaatttggtatatggtgtaagatgtaaaaaaaggggtgcagtggggggaaatttgcaatctgagttatttttcatctgttacaaa

SEQ ID NO: 31764 - DNA, 201 bp, Homo sapiens
atccagaatctacaaagaactcaaacaaatttacgagataaaaacaaacaaccccatcaacaagtgggcaaaggatatgaacagacacttctcaaaagaakacatttatgcagccaaaaaacacatgaaaaaatgctcatcatcactggccatcagagaaatgcaaatcaaaaccacaatgagataccatctcacaccagt

SEQ ID NO: 31765 - DNA, 201 bp, Homo sapiens
acctgacttcaaacaatactacaaggctacagtaaccaaaacagcatggtactggtatccaaacagagatatagaccaatggaacagaacagagccctcasaaataatgccgcatatctacaaccatctgatctttgacaaacctgacaaaaacaagcaatggggaaacaattccctatttaataaatgatgctaggaaaa

SEQ ID NO: 31766 - DNA, 201 bp, Homo sapiens
acacaagtctaactggaactgttttatgagacttctgtggcttttggtgaaataaagaatttttaaagaaaccagtccagcgtgatgatttttctaatgartgtcaaagccaagcaagggaggctcagaggaactgaatgtctccagctgctaaggctctactgtctgaaaagcttttggtggtgtgtaattaaaaaccat

SEQ ID NO: 31767 - DNA, 201 bp, Homo sapiens
acaaaccactgctcaatgaaataaaagaggatacaaacaaatggaagaacattccatgctcatgggtaggaagaatcaatattgtgaaaatggccatactkcccaaggtaatttacagattcaatgccatccccatcaatctaccaatgactttctccacagagttggaaaaaactactttaaagttcatatggaaccaaa

SEQ ID NO: 31768 - DNA, 201 bp, Homo sapiens
cagccaatatcatactgaatggataaaaagtggaagcattccctttgaaaactggcacaagacagggatgccctctctcaccactcgtattcaacatagtsttggaagttctggccagggcaatcaggcaggagaaggaaataaagggcattcattaggaaaacaggaagtcaaattgtctctgtttgcagatgacatgat

SEQ ID NO: 31769 - DNA, 201 bp, Homo sapiens
acagaacagaatctcaattagtcctgtaatcacaaattttgtgctagtctacaaataacaggtggttcaagctttccccagcttcaggcttggtgtaataygtggcattcatcttccatcttactacttaataggaatggtaaccgtttactcacatatttttatttttacactttttattgaccacagttcttgtctgtg

SEQ ID NO: 31770 - DNA, 201 bp, Homo sapiens
caaaccgaatccagcaacacatcaaaaagcttatccaccatgatcaagtgggcttcatccctgtgatgcaaggctggttcaacatacgcaaatcaataaaygtaatccagcatattaacagaaccacccacaaaaaccacatgattatctcaatagatgcagaaaaggcctttgacaaaattcaacaacccttcatgctaa

SEQ ID NO: 31771 - DNA, 201 bp, Homo sapiens
gtacataacaaaatgaaggcagagataaagatgttctttgaaaccaacgagaacaaagacacaacataccagaatctctgggacacattcaaagcagtgtrtagagggaaatttatagcactaaatgcccacaagagaaagcaggaaagatctaaaattgacaccctaacatcacaattaaaagaactagagaagcaagag

SEQ ID NO: 31772 - DNA, 201 bp, Homo sapiens
ttcttttcagcaccacactacacctattgcaaaattgaccacatagttggaagtaaagcactcctcagcaaatgtaaaagaacagaaattataacaaactrtctctcagaccacagtgcaatgaaactagaactcaggattaagaaactcactgaaaaccactcaactacatggaaactgaacaacctgctcctgaatgac

SEQ ID NO: 31773 - DNA, 201 bp, Homo sapiens
tggaggaagatctaccaagcaaatggaaaacaaaaaaaagcaggggttgcaatcctagtctcggataaaacagactttaaaccaacaaagatcaaaagagrcaaagaaggccattacataatggtaaagggatcaattcaacaagaagaactaactgtcttaaatatatatgcacccaatacaggagcacccagattcata

SEQ ID NO: 31774 - DNA, 201 bp, Homo sapiens
ctcctgaaggaagcactaaacatggaaaggaacaaccggtactagccactgcaaaatcatgccaaaatgtaaagaccatcgagactaggaagaaactgcaycaactaacgagcaaaataaccagctaacatcataatgacaggatcaaattcacacataacaatactaaccttaaatgtaaacaggctaaatgctccaatt

SEQ ID NO: 31775 - DNA, 201 bp, Homo sapiens
tactgggttcatctcaatggggagtgccggacagtgggggcaggacagtgggtgcagtgcaccgtgtgtgagccaaaacagggagaggcatcccctcaccygggaagtgcaaggggtcagggaattccctttcctagtcgaagaaaggggtgacagacggcacctggaaaatcaggtcactcccaccctaatactgcactt

SEQ ID NO: 31776 - DNA, 201 bp, Homo sapiens
tgcagaagatgggtgatttctgcatttccaactgaggtactgggttcatctcaatggggagtgccggacagtgggggcaggacagtgggtgcagtgcaccrtgtgtgagccaaaacagggagaggcatcccctcacctgggaagtgcaaggggtcagggaattccctttcctagtcgaagaaaggggtgacagacggcacc

SEQ ID NO: 31777 - DNA, 201 bp, Homo sapiens
atggccaaataggaacagctccagtctacagctcccagcatgagcgatgcagaagatgggtgatttctgcatttccaactgaggtactgggttcatctcamtggggagtgccggacagtgggggcaggacagtgggtgcagtgcaccgtgtgtgagccaaaacagggagaggcatcccctcacctgggaagtgcaaggggt

SEQ ID NO: 31778 - DNA, 201 bp, Homo sapiens
aaacaaaaaacaacacttgccagtgtttggctctggaaccttctggaacctgggtttataatagaagggagccaccacctcagaaggcaaagtgctgcccrgaagggagtgaaaaacttagtagcaaggaataaccaacacacaggcatggaccttgacttatatatggccgttttgcatacaaccaacaatggcggacac

SEQ ID NO: 31779 - DNA, 201 bp, Homo sapiens
gtttgtgtaaatttaaaatggatcatatggtatcatatcacaaaggtaactagatagcattaagcaaattcaatatttagaataaggcagatattacattytttgcaattatttaaacttatgctgaaaagtttttagatgtcatttgaaaatgaaatggggtacatagatttaaaaaaattaggaggtatctgatcaaaa

SEQ ID NO: 31780 - DNA, 201 bp, Homo sapiens
aaacaaacaaacaaacaaaaaacaacacttgccagtgtttggctctggaaccttctggaacctgggtttataatagaagggagccaccacctcagaaggcraagtgctgcccggaagggagtgaaaaacttagtagcaaggaataaccaacacacaggcatggaccttgacttatatatggccgttttgcatacaaccaac

SEQ ID NO: 31781 - DNA, 201 bp, Homo sapiens
aaaataaaaataaaaaataaaaaatagccaagcatggtggatcatgcctgtggttccagttcttaggagactgaggtggtagtatcactcgagcctgagakgtcaaggctgcagtaagccattatcacgccactgcactctagcctgggtaacagaggcactgtctcaagaaaaaaaaaaaaagcaacaacaacaacaaca

SEQ ID NO: 31782 - DNA, 201 bp, Homo sapiens
agttagctaagctttgtaggtgtccgcacctcagggagtggggcttggcctttacaccttaggtgtgagaacttgcactccctagcctggcaagtgtcacrtggtgctttgacaataccaagagctggcttggcctcaagcagtggtttgagggactgttctgctatttaatattggaaatcattgacttttggtaagata

SEQ ID NO: 31783 - DNA, 201 bp, Homo sapiens
aggtcactttggcattttggatttcccaaagtattaaatgactcatttatataaaaagtttacttctgtaggtgggaggaatagccagcaaaaaatccttytgggaaggaaaaatactacaaagtccaagttcttgtgaaaaaacaaacaaacaaacaaacaaaaaacaacacttgccagtgtttggctctggaaccttct

SEQ ID NO: 31784 - DNA, 201 bp, Homo sapiens
ctttatacaagaaagcagtgctagacctcttggaagtttacttttcatctacaaatttgaatttgcggcatttctgagtgtttctaccagtctctcttatrgttgaggtctgttaatcattcactcactagtgataacattcatgaatatgacattttaaattagtatctcacctcatagaaagaattgtgcagcttttac

SEQ ID NO: 31785 - DNA, 201 bp, Homo sapiens
gagctgccaagctgaagagtccacttgcctggagacatcaaaaaccatccaaggtctgatctcccacctccagctcagtatgctgcctgttctgaccccamatgtgttagcattaagttgttaagcagatagactgaatgcatttgccccctcaagaaatgactgagatgccaaactctgtaatggacattgatgttttcc

SEQ ID NO: 31786 - DNA, 201 bp, Homo sapiens
aaatggttgttgaaaaatattattgacttggtgccctcttttgtggcttttaaggttatttagttctctctagacagtagttggggtatgtactgggcacrtcactgcctagttacttcctcctctaaatgtgagatgtttcagcctactgaagtcgataaggagtcgtttgtgagcctttcagttgcatgcaagcagtgc

SEQ ID NO: 31787 - DNA, 201 bp, Homo sapiens
caacagaagataagaccactctatattcattataacagtttctctttagacacttctgtaattagatttgttttttaaaaggcttccccctgctgattttyccccctgcattgttttaaagggggtgattagtttagtaatgaggaagttgttgaaggatatctggggttaagaagctgaagactgatgtattcaatgtaa

SEQ ID NO: 31788 - DNA, 201 bp, Homo sapiens
aggcttacacagggtcaggattgtcaggacatcactaggcaatagtttttctgctccattataaccctacgggaccaccacatgaccgaaagtttattacrtggcacatgactgtacttccttttgcggccctgtgacattttgctaaaacgtttcagtaaaatgtagatataaagaaggaccaaggagttgcagcatgaa

SEQ ID NO: 31789 - DNA, 201 bp, Homo sapiens
gaaaagcttttggtggtgtgtaattaaaaaccatagacatcagagtgctagtgtttgaaaactcacagaagcaagcaagggggtcttttcagagaatgagycccgctctaggtctttgcttacctcttctctccagagaaaactcagaggcataaaaggtgtccctgcctctctcacaggtagatgtatggtgtgtgtggt

SEQ ID NO: 31790 - DNA, 201 bp, Homo sapiens
tcagtccccccatctctcatctctcctgggaaatcatctgacttttgcaaggtccttggagttttcagcgtaatcacttaaggtcacattctatatcaagyttcagtttaactttgctacaggattagtttatcacaaaactttagttgagtacattataatacagtcatacatcgcttagccacagggtagttctgagaa

SEQ ID NO: 31791 - DNA, 201 bp, Homo sapiens
tccagagaaaactcagaggcataaaaggtgtccctgcctctctcacaggtagatgtatggtgtgtgtggtgctgtacgctttggcttctatctgcacacamtgctctctgtcccatttcataccttgacagttgtcagtgtggttccaaattagcttttttatgtttcttctcttgccaggagtggctttaaggtgaagaa

SEQ ID NO: 31792 - DNA, 201 bp, Homo sapiens
actaaaatttggtgagcattcttgtttccatatgtagtttctaactcatcagcaaggaggtaaatttccaattagaatcaagaatattttaaatgatcagwtaaaactgagtaaattagttggtttaatcagtccccccatctctcatctctcctgggaaatcatctgacttttgcaaggtccttggagttttcagcgtaa

SEQ ID NO: 31793 - DNA, 201 bp, Homo sapiens
gggaccaagttggaaaacactctgcaggatattatccaggagaacttccctatctagcaaggcaggccaacattcaaattcaggaaatacagagaacaccrcaaagatactccttgagaagggcaactccaagacacataattgtcagattcactacagttgaaatgaaggaaaaaatgttaagggcagccagagagaaag

SEQ ID NO: 31794 - DNA, 201 bp, Homo sapiens
aaagggtcttgtagaaagtctttttacataaacagaaaactgtgatcttttgttggaaacaaatctaccactaaaatttggtgagcattcttgtttccatrtgtagtttctaactcatcagcaaggaggtaaatttccaattagaatcaagaatattttaaatgatcagataaaactgagtaaattagttggtttaatcag

SEQ ID NO: 31795 - DNA, 201 bp, Homo sapiens
cacctcacatggccgtgtactcctctgggacaaaacttccaggggaacgatcaggcagcagcatttgcagttcaccaatatccgctattccacagccaccrctgctgatacccaggcaaacagggtctggagtggacctccagcaaactccaacagacctgcagctgagggtcctgactgttagaaggaaaactaacacac

SEQ ID NO: 31796 - DNA, 201 bp, Homo sapiens; identical to SEQ ID NO: 3847

SEQ ID NO: 31797 - DNA, 201 bp, Homo sapiens
cacagctcaaggaggcctgcctgcctctacaggctccacctctgggggcagggcacaaacaaaagacagcaataacctctgcagacttaaatgtccctatmtgacagctttgaagagagtagtggttctcccagcatgcagctgcagatctgagaacgggcagactgcctcctcaagtgggtccctgagtcccgagtagcc

SEQ ID NO: 31798 - DNA, 201 bp, Homo sapiens; identical to SEQ ID NO: 3848

SEQ ID NO: 31799 - DNA, 201 bp, Homo sapiens
ctgtctcagtgccaatatgcctccctgcactgaagctgttggtttctaaaaattcgttcagaccagttttaacctatagaatgttaacatcacataatatrcattgcagcatatagactcttgctctatcatttttctaaatagctcttttggtgtacttgttattcatatcacttggataatgcgcatacacaatttggg

SEQ ID NO: 31800 - DNA, 201 bp, Homo sapiens
agagaaaactcagaggcataaaaggtgtccctgcctctctcacaggtagatgtatggtgtgtgtggtgctgtacgctttggcttctatctgcacacactgmtctctgtcccatttcataccttgacagttgtcagtgtggttccaaattagcttttttatgtttcttctcttgccaggagtggctttaaggtgaagaagca

SEQ ID NO: 31801 - DNA, 201 bp, Homo sapiens
ttctgtaggtgggaggaatagccagcaaaaaatccttttgggaaggaaaaatactacaaagtccaagttcttgtgaaaaaacaaacaaacaaacaaacaaaaaacaacacttgccagtgtttggctctggaaccttctggaacctgggtttataatagaagggagccaccacctcagaaggcaaagtgctgcccggaaggg

SEQ ID NO: 31802 - DNA, 201 bp, Homo sapiens
agaaaactcagaggcataaaaggtgtccctgcctctctcacaggtagatgtatggtgtgtgtggtgctgtacgctttggcttctatctgcacacactgctytctgtcccatttcataccttgacagttgtcagtgtggttccaaattagcttttttatgtttcttctcttgccaggagtggctttaaggtgaagaagcatg

SEQ ID NO: 31803 - DNA, 201 bp, Homo sapiens
cttctgtaggtgggaggaatagccagcaaaaaatccttttgggaaggaaaaatactacaaagtccaagttcttgtgaaaaaacaaacaaacaaacaaacaaaaaacaacacttgccagtgtttggctctggaaccttctggaacctgggtttataatagaagggagccaccacctcagaaggcaaagtgctgcccggaagg

SEQ ID NO: 31804 - DNA, 201 bp, Homo sapiens
acttctgtaggtgggaggaatagccagcaaaaaatccttttgggaaggaaaaatactacaaagtccaagttcttgtgaaaaaacaaacaaacaaacaaacaaaaaacaacacttgccagtgtttggctctggaaccttctggaacctgggtttataatagaagggagccaccacctcagaaggcaaagtgctgcccggaag

SEQ ID NO: 31805 - DNA, 201 bp, Homo sapiens
taactgaaagatatttttcttaagtcagatggtttcccaattcattggtttcgacaaaataagaagacctgagttgttagctgatagatctaaaaataatmtttgatgatagaatttttgggcacatgacttggaaaggggttcaaagaattgaaagtccttctgttacagaactaccttctgtttcatctatcgtttata

SEQ ID NO: 31806 - DNA, 201 bp, Homo sapiens; identical to SEQ ID NO: 3851

SEQ ID NO: 31807 - DNA, 201 bp, Homo sapiens
tacttctgtaggtgggaggaatagccagcaaaaaatccttttgggaaggaaaaatactacaaagtccaagttcttgtgaaaaaacaaacaaacaaacaaacaaaaaacaacacttgccagtgtttggctctggaaccttctggaacctgggtttataatagaagggagccaccacctcagaaggcaaagtgctgcccggaa

SEQ ID NO: 31808 - DNA, 201 bp, Homo sapiens
agtttacttctgtaggtgggaggaatagccagcaaaaaatccttttgggaaggaaaaatactacaaagtccaagttcttgtgaaaaaacaaacaaacaaamaaacaaaaaacaacacttgccagtgtttggctctggaaccttctggaacctgggtttataatagaagggagccaccacctcagaaggcaaagtgctgccc

SEQ ID NO: 31809 - DNA, 201 bp, Homo sapiens
tttacattgagcttatcatcatgagaaacttaatcatgggtgtgtttctcttttacccatgtggttcttggtgagtgaccactattataagtacacttttycccttttagatcagaagaaaacttttccaggttgtttgttcaacagaagataagaccactctatattcattataacagtttctctttagacacttctgta

SEQ ID NO: 31810 - DNA, 201 bp, Homo sapiens
tcaagtgtcaacttgacttcctgtaatacctccctttaggcaagttacagtttcttgataagaaataaggcacaggaggttaatgagatggtgcatatgtytaggagtgtatcagctatctactgctctgtaacacatgctaaaattctgtttctgagtgtttcctagagaaagggtaaaactataatgactgaaaaattt

SEQ ID NO: 31811 - DNA, 201 bp, Homo sapiens
ccaagagctggcttggcctcaagcagtggtttgagggactgttctgctatttaatattggaaatcattgacttttggtaagataaagctactggcttggawcagttaattttactgagtcagctcaacttgagtttggtggcagagggtggcactcagtaggaaaactagggaaagaagatcatgaagtaatgattatgca

SEQ ID NO: 31812 - DNA, 201 bp, Homo sapiens
atcatcatgagaaacttaatcatgggtgtgtttctcttttacccatgtggttcttggtgagtgaccactattataagtacacttttccccttttagatcasaagaaaacttttccaggttgtttgttcaacagaagataagaccactctatattcattataacagtttctctttagacacttctgtaattagatttgtttt

SEQ ID NO: 31813 - DNA, 201 bp, Homo sapiens
tcctgttagctattctgcactttttggtaagcaacttcaaggactaaggaatataaaaagttaaatcctaggagactggaaaagatggctaaagtaggccrtgtcatacattcctgcccttacacctgtgagagctgttgcattttgagtagtgaggcttgtagatgtggccaggccaagagaagagtggccggggagagc

SEQ ID NO: 31814 - DNA, 201 bp, Homo sapiens
gagaaataaaatcctttacagacaagcaaatgctgagagatttaattaacaccggacctgccctaaaagagctcctgaaggaagcactaaacatggaaaggaacaaccggtactagccactgcaaaatcatgccaaaatgtaaagaccatcgagactaggaagaaactgcatcaactaacgagcaaaataaccagctaaca

SEQ ID NO: 31815 - DNA, 201 bp, Homo sapiens
tgataagcagaaaagacggatgaggaaggagctttactgtcccaaccagaaacaacaactaagaatccatgactgtattctctccctcggatactcctgtkagctattctgcactttttggtaagcaacttcaaggactaaggaatataaaaagttaaatcctaggagactggaaaagatggctaaagtaggccgtgtcat

SEQ ID NO: 31816 - DNA, 201 bp, Homo sapiens
aggcttttatcagcctgaagccatggtttttagtttctgtctctagtgataagcagaaaagacggatgaggaaggagctttactgtcccaaccagaaacarcaactaagaatccatgactgtattctctccctcggatactcctgttagctattctgcactttttggtaagcaacttcaaggactaaggaatataaaaagt

SEQ ID NO: 31817 - DNA, 201 bp, Homo sapiens
ttaggcttttatcagcctgaagccatggtttttagtttctgtctctagtgataagcagaaaagacggatgaggaaggagctttactgtcccaaccagaaayaacaactaagaatccatgactgtattctctccctcggatactcctgttagctattctgcactttttggtaagcaacttcaaggactaaggaatataaaaa

SEQ ID NO: 31818 - DNA, 201 bp, Homo sapiens
cttttcagctgttgttctgcagcatttttgatgtaggaagttaacttttctttttaagttttaaatttcttaagagctgagttcatttggcttttctgggmgtgtcactgttagagtacagcaggggctggtactgctccattgtgattgaggacaaatgacaggatgagcacagtcagcatatggccacagatcagtgat

SEQ ID NO: 31819 - DNA, 201 bp, Homo sapiens
ctgtgaccttttaagagcaactccctttgaacttcccaacataaattaatttctacatccttaaagcactgaataaacattgtataaagaaatttcagcawgcaaaacatggaatgaagaaatctgtttaatccagcatttactttttaagtttctctgtgtcactctgaagtccattcctatgcagtttgtgcccagcag

SEQ ID NO: 31820 - DNA, 201 bp, Homo sapiens
agggatgtccacgctaccaatgaggagaaactgacatccacgtcatgtggtcagaaatcaggtgcgggcaaggtgaaaggtgaccagagggagacctggartactttgaatgttccagtgctcccatgtctaccataaatcatgcgttttcatcctcagaagcaggtatggaagcatatcttcatctttctaatgtatata

SEQ ID NO: 31821 - DNA, 201 bp, Homo sapiens
ctctatgcctaagacagaaagtcatttttatagttatcccaataagttggttccttattgggaaccagatttaaaaagggggaagagatttaaagaaccgrctacactgtaactgatcagccacatcacaggcaagtggaggctgctgtactggtgtgggggtggctacaggccctgttaggtgaatccagaccatgtcct

SEQ ID NO: 31822 - DNA, 201 bp, Homo sapiens
aggaagttggactaagcagggctgaagcctcttactgatggacttttcagatcattctagagctaagcccctctcctgggtaccaagttagatggatggcyttaaactttacttatgaaaagtttagaaacatgttcctgactacattaaacattattaaaaacttagatcttcttaaacaacataattttatttgtggca

SEQ ID NO: 31823 - DNA, 201 bp, Homo sapiens
aggggaacttagtcaatcctgtttatttcaattcctcttagtgtctgtgtctttcaggataaggactttgtttttctctgggtgtagggaggacccctctsttattaggtcttatgacctattttcatgggaaggtctgagggattcctttatggcctgcttcaggggagagggcaggagaggtgccaagagaccttcctg

SEQ ID NO: 31824 - DNA, 201 bp, Homo sapiens
actgtcattcttggcctgcactggggtttccaagagcctttcactagggggaaaagcaaccaacttattgggataactataaaaatgactttctgtcttargcatagagaaggagacgtgccaaaaggtggaagaagacgtgtccaccatgcttgtaagttcctgaatgtggagggccaggtggggctcgggtttctttca

SEQ ID NO: 31825 - DNA, 201 bp, Homo sapiens
ctgtttgtggctgactaacctgtgctcttcttctgaatgtcatggacttgtaatgctgaactgcacagcgctcagcagaatgccagcgctccttttaaatmaaattttggaatgctgtttatgtgttcactgtcattcttggcctgcactggggtttccaagagcctttcactagggggaaaagcaaccaacttattggga

SEQ ID NO: 31826 - DNA, 201 bp, Homo sapiens
ctctctcccaagtgtcttccaagctagatcctagtcagtgggataagcccagcttcaacccctttgggagccactccattctgcagaactccccaaccctstcttctgagggcttctaccactttgacccaaataactttgataaatccatggatccctttaaaccaactgtgaccttaacaagcagtgacttttgttctc

SEQ ID NO: 31827 - DNA, 201 bp, Homo sapiens
atttccagatcctcactgtccctgaagaaaaggcgcctgaagaaaagggaaccctttcacaatgactctctctctctctttgtctccatttttttttttttgtaaaactctcactaaaagctacaaagatgcatcaccacagggtgtgaaagtctccagggcaccaaagggaagatctgaaatattggtataggttctaag

SEQ ID NO: 31828 - DNA, 201 bp, Homo sapiens
aggaagaatgagtttagatttgctggcttaaattttaaagcttattatcttatctgctgcattaattagatcaaggccactcttctgggctggaatttaarttcattcagacttgatgataaaaaaaaaaatcagtgttacagtgtgttcactttctgccgtaatgccatggttagtccagtgcattagccaaaattgtaa

SEQ ID NO: 31829 - DNA, 201 bp, Homo sapiens
atgagtgcctgagaaaccaatttccagatcctcactgtccctgaagaaaaggcgcctgaagaaaagggaaccctttcacaatgactctctctctctctttstctccatttttttttttttgtaaaactctcactaaaagctacaaagatgcatcaccacagggtgtgaaagtctccagggcaccaaagggaagatctgaaa

SEQ ID NO: 31830 - DNA, 201 bp, Homo sapiens
tctgcagtgacccatgattttgccattgtactccagcctggctggcagaacaaaaccctgtctaaaaacaaacaaaacaaaacaaacaaacaaaaaaaaaacaagaaaacaaactactgtgggcaattgtaacacagtcgtaagcatttgtgtatctaaacatatctaagcatagaaaaggtacagtaaaaatatggtata

SEQ ID NO: 31831 - DNA, 201 bp, Homo sapiens
cttaaagcactgaataaacattgtataaagaaatttcagcaagcaaaacatggaatgaagaaatctgtttaatccagcatttactttttaagtttctctgygtcactctgaagtccattcctatgcagtttgtgcccagcagtaggtggtggctgggactaaggccagagtacagtcagtggtggggagtcagtctcacct

SEQ ID NO: 31832 - DNA, 201 bp, Homo sapiens
ttataacagtttctctttagacacttctgtaattagatttgttttttaaaaggcttccccctgctgatttttccccctgcattgttttaaagggggtgatyagtttagtaatgaggaagttgttgaaggatatctggggttaagaagctgaagactgatgtattcaatgtaatccttttccccacaggggctgctggagtc

SEQ ID NO: 31833 - DNA, 201 bp, Homo sapiens
ctggtctttgttggtcttcaattgtgaacgttttgagggactgggagaagcatttggcaaacatgaaatgaggcccttttggaaggatatgattgattgawttagcatgttaattaaagacacactggatggcccaggcctgaaagagatcttctggtcaattctgtgtgatggtagcttctataataaggttgtccagct

SEQ ID NO: 31834 - DNA, 201 bp, Homo sapiens
ccaatgaggagaaactgacatccacgtcatgtggtcagaaatcaggtgcgggcaaggtgaaaggtgaccagagggagacctggagtactttgaatgttccrgtgctcccatgtctaccataaatcatgcgttttcatcctcagaagcaggtatggaagcatatcttcatctttctaatgtatatatgcatagaaatgcctg

SEQ ID NO: 31835 - DNA, 201 bp, Homo sapiens
acaagtatcccagaacttaaagtaaaacaaaaaataaataaaataaatatgtcatatgtctgactttttatgatttttatgttcattgtttaacttacagwaataataactaatacatatggtgccttatcatgtgcaggcattgttctaagtgccttgcatatacttattcatagcaaggtgttactcttttctcctttt

SEQ ID NO: 31836 - DNA, 201 bp, Homo sapiens
tggttcatttttcttcaggctgtagaagaagcatggcaccagtgtctgcttctggtgagggactcaggaagcttccaataatggcagaaggcaaaggggarcaagtggtcacatggcgagagggaaggaggaagagagaggggtaggaagatgccaagctgtttttaagagacatatcttgcagaaactaagagaccaaga

SEQ ID NO: 31837 - DNA, 201 bp, Homo sapiens
ttatttggttcatttttcttcaggctgtagaagaagcatggcaccagtgtctgcttctggtgagggactcaggaagcttccaataatggcagaaggcaaargggagcaagtggtcacatggcgagagggaaggaggaagagagaggggtaggaagatgccaagctgtttttaagagacatatcttgcagaaactaagagac

SEQ ID NO: 31838 - DNA, 201 bp, Homo sapiens
cctatgcttttgcttctttatcgagaaagtggacactaacaaaagtgcttattgaagtactaggaacatagggatacttgtggcaagttgtataggagacrctgatgtgtgtgagactgcttgaatttctttataattttctgtcaatatggccatatcttgtagtggtgtgttagttcatttgcgttgctgtaaaggaat

SEQ ID NO: 31839 - DNA, 201 bp, Homo sapiens
tactttgaatgttccagtgctcccatgtctaccataaatcatgcgttttcatcctcagaagcaggtatggaagcatatcttcatctttctaatgtatatawgcatagaaatgcctgaaagcctaatgaagcaggaggcaccttacagagcttaaagaattgggtcactggaaggatagatttaggattattgacctatgct

SEQ ID NO: 31840 - DNA, 201 bp, Homo sapiens
agtgatctaccagatttcagacatttctaatagggatgtccacgctaccaatgaggagaaactgacatccacgtcatgtggtcagaaatcaggtgcgggcraggtgaaaggtgaccagagggagacctggagtactttgaatgttccagtgctcccatgtctaccataaatcatgcgttttcatcctcagaagcaggtatg

SEQ ID NO: 31841 - DNA, 201 bp, Homo sapiens
ctttgttgtgtttctcaggatgaaggggcagtgatctaccagatttcagacatttctaatagggatgtccacgctaccaatgaggagaaactgacatccaygtcatgtggtcagaaatcaggtgcgggcaaggtgaaaggtgaccagagggagacctggagtactttgaatgttccagtgctcccatgtctaccataaatc

SEQ ID NO: 31842 - DNA, 201 bp, Homo sapiens
taactccctcagatatctttatggagttgtatccacttggttccattcatgagatgtcacttttccccattgcttgccctcctaaagggtaacatcttctytgttgtgtttctcaggatgaaggggcagtgatctaccagatttcagacatttctaatagggatgtccacgctaccaatgaggagaaactgacatccacgt

SEQ ID NO: 31843 - DNA, 201 bp, Homo sapiens
gtcacaattgaaagttccagcttcctccttgctttgtacccagatctgtggctaactccctcagatatctttatggagttgtatccacttggttccattcrtgagatgtcacttttccccattgcttgccctcctaaagggtaacatcttctttgttgtgtttctcaggatgaaggggcagtgatctaccagatttcagac

SEQ ID NO: 31844 - DNA, 201 bp, Homo sapiens
ttaacaagcagtgacttttgttctcccactggaaatcatgttaaagaaatattagaatcacccaagaaggcaaagtcacattgaataatgagtgacagtgkgtgctgggtgtcacgctctgtgtcttctctgtgagtttgtcagatggctacttttggctttggtgaactgaatttacctttgaggtccaccaaggttgat

SEQ ID NO: 31845 - DNA, 201 bp, Homo sapiens
tcatatcacaaaggtaactagatagcattaagcaaattcaatatttagaataaggcagatattacattctttgcaattatttaaacttatgctgaaaagtktttagatgtcatttgaaaatgaaatggggtacatagatttaaaaaaattaggaggtatctgatcaaaaaaaattgaaaaccactgtcttagaccacttaa

SEQ ID NO: 31846 - DNA, 201 bp, Homo sapiens
tagtgaggcttgtagatgtggccaggccaagagaagagtggccggggagagctgccaagctgaagagtccacttgcctggagacatcaaaaaccatccaargtctgatctcccacctccagctcagtatgctgcctgttctgaccccacatgtgttagcattaagttgttaagcagatagactgaatgcatttgccccctc

SEQ ID NO: 31847 - DNA, 201 bp, Homo sapiens
aaaagaaaagaaataccagacgtttccttttcagattgttgtcttgtttctgaatcctcagcttaatgaggtaagctcctttccctgggcctggagacgtytttatgtttaaaaaaaataaagagtggcataagataggtaggtagagattcgacggttttcagaaatcctggcgaggctgtcaggagtcacattatagac

SEQ ID NO: 31848 - DNA, 201 bp, Homo sapiens
gcaaggtgaatcaagtgtcaacttgacttcctgtaatacctccctttaggcaagttacagtttcttgataagaaataaggcacaggaggttaatgagatgrtgcatatgtctaggagtgtatcagctatctactgctctgtaacacatgctaaaattctgtttctgagtgtttcctagagaaagggtaaaactataatgac

SEQ ID NO: 31849 - DNA, 201 bp, Homo sapiens
aagataagaccactctatattcattataacagtttctctttagacacttctgtaattagatttgttttttaaaaggcttccccctgctgatttttcccccygcattgttttaaagggggtgattagtttagtaatgaggaagttgttgaaggatatctggggttaagaagctgaagactgatgtattcaatgtaatccttt

SEQ ID NO: 31850 - DNA, 201 bp, Homo sapiens
gggagggatagcattaggagagacacctaatgctaaatgatgagttaatgggtacagcacaccaacatggcacatgtatacatatgtaagaaacctgtacrttgtgcacatgtaccctaaaacttaaagtataataataataaaagaaaaaaaagaaacatttccacctgtagtagctaaataaaacacatacaaaggatc

SEQ ID NO: 31851 - DNA, 201 bp, Homo sapiens
accatggaacactatgcagccataaaaaaatgaatgatgggttcatgtcctttgtagggacatggatgaagctggaaaccatcattctcagcaaactatcrcaaggacaaaaaaccaaacactgcatgttctcactcacaggtgggaattgaacaatgagaacacatggacacaggaaggggaacatcacacaccggggac

SEQ ID NO: 31852 - DNA, 201 bp, Homo sapiens
tacagcaggggctggtactgctccattgtgattgaggacaaatgacaggatgagcacagtcagcatatggccacagatcagtgatgcaaattctcctgccrtgaggacatagccacaggaatctgtggcatctgtgctcactatagatttgcaaccgggagtccattgagttctattgtctatacactggtctttgttggt

SEQ ID NO: 31853 - DNA, 201 bp, Homo sapiens
gccacatcacaggcaagtggaggctgctgtactggtgtgggggtggctacaggccctgttaggtgaatccagaccatgtcctggggagtgtccacttggakttgggtcctgatggctacttacctagatgttttctgggaaatgagaccctcacacagccatggggaggaagccgccatgttggtaaaatgcccagtttct

SEQ ID NO: 31854 - DNA, 201 bp, Homo sapiens
gaggcaaggatatagcgtaaatttgggagactaaattgagtgaaactggaaggggctggtgagggaggggctgtaccttgcaacgagtgattctttcacascccaaggtttcccaaagaatattgatggaaaccaggtacctgctgtggtttcataggaaaagctccgggacctcaagccattgcttgagtaggtcaacaa

SEQ ID NO: 31855 - DNA, 201 bp, Homo sapiens
ctacctaggaccctgccctgtggcccagggtgtcgtccggcccacttgcagtcttaatctctgaattctgggccctggaacaggctgtgtctagttctcayttgccgtactcaccgggcccctttacatactctactttctctttccctctgggtttgagtgctagtaaccccaggctcgtgtgtccactgctgtcatgct

SEQ ID NO: 31856 - DNA, 201 bp, Homo sapiens
aggcagtcgactgtccctggcactgagtttgtgctgcctgggccctgcctctccgcctgcctcagagtgtgggctgcagaatgggcccggggagggagacyggatttctttgattctgagccccgtgttttccacgtgtgacatttctgaaatcaggacaggtctcagaatcaatggcacctccaatatgggagtcttccy

SEQ ID NO: 31857 - DNA, 201 bp, Homo sapiens
cctgcctcagagtgtgggctgcagaatgggcccggggagggagaccggatttctttgattctgagccccgtgttttccacgtgtgacatttctgaaatcargacaggtctcagaatcaatggcacctccaatatgggagtcttccytttagtgtctgaaaatggcttttaggtgagaaaataaagtgataaggagagaatg

SEQ ID NO: 31858 - DNA, 201 bp, Homo sapiens
aaataaaacaggagctgagagagaatactatccgtgtagtgctcaatggcctagttcaagttccagccctgccattctgctaacctgcctactttgacaarttactgaatctctcagtgccttgtttcctcatctaaaaaatggcagaagtaggaatgttaggattgaagtgataatgatcaataggcacggtgcctgcca

SEQ ID NO: 31859 - DNA, 201 bp, Homo sapiens; identical to SEQ ID NO: 3852

SEQ ID NO: 31860 - DNA, 201 bp, Homo sapiens; identical to SEQ ID NO: 3853

SEQ ID NO: 31861 - DNA, 201 bp, Homo sapiens
cggcctcccaaagtgctgggattacaggcatgagccaccgcacccggcctgtgcactttatttctattattattacattataatatataatgaaataattwtacatctcaccataatgtagaatcagtgggagccatgaacttgttttccgcaactagacggtcccatctgggggtgatgggagatagtgacagatcatca

SEQ ID NO: 31862 - DNA, 201 bp, Homo sapiens
aaagccaaggcccagagtggtgggcgggaggcagttcttccccaccgctcctcacctctctctgtctcctcccgtcccacccccaagtctgttcacacagygagcctgcagttttcaaggtggcttgtcaaggacatctcctgacatgcacgttcacctcctgaccttgttcctgctgtaaatttgtgaattaagtgggga

SEQ ID NO: 31863 - DNA, 201 bp, Homo sapiens
ggcagtttaaaaactggcaaggaacagaagggttgtgggggcagatttttatctaaagtcagggccatgatttgtgcatttgaccctgtgtaagttacacygcaacaagaaagtgaatttttaaaaatcacaaaaatactgcagatagacataaagccaaggccctagagtcagggtgctggaggctcagcagcttctctc

SEQ ID NO: 31864 - DNA, 201 bp, Homo sapiens
ctggagtgatcctcccaccccagccttctgagtagctgggcccacaggtgtgtgccaccatacccagctaatttttatttgtatttttttgtagagatggkgtctccctgtgtttcccaggcaggtcttaaactcttgggcttaagtgatcctcctgcctcggcctcccaaagtactagaattagagacatgagccatgtg

SEQ ID NO: 31865 - DNA, 201 bp, Homo sapiens
cagcagcgcaactgcgaggacatgatccagatgttccaggtgaggacggagctgccctctgctctcaggggtgggtggggcaggtggatgcttccgtggcrgctggcctggaacgcaggccctgcctcctgcttggggagccttacctggcaactggggccctcacggggctagactggggggtaaggagcagcatcagga

SEQ ID NO: 31866 - DNA, 201 bp, Homo sapiens
gaggatttctcaggctatgccatggcagctgcagaggcccagggagaggtaacctctgctcccggcctcagggccctctggctctgcctctccagcctgamgcccactcccccgctcctctccttgctctgtccccccatgtggctgtcatcctctacctgcgtctcccctcttcctttatccttttgcttttctttctcc

SEQ ID NO: 31867 - DNA, 201 bp, Homo sapiens; identical to SEQ ID NO: 3854

SEQ ID NO: 31868 - DNA, 201 bp, Homo sapiens
tgacccactctgttgatacactatgtgtcctgcagatgcttttacagggttaaatgataccacaagaggcagggcagcgggctcgacgagctctgttctgrtgcgggcaggaggcgggagcccggatctgtgcgactgaaggtgggagactgggccgggtggacctggtggtctggtgtgggcaggaggtgggcaatgagg

SEQ ID NO: 31869 - DNA, 201 bp, Homo sapiens
tctgctgtctggccctgtaacctgtttccttctttctctaagttcccaccctctctgtccaatccacattatggcagctggtatcctccccgttctcttcwctcaggcagtcacgaacgtcatctccaggaagtttcattttgcttccccttgcggcccctgccctttgtacccaaaacaaagagaggcagtcgactgtcc

SEQ ID NO: 31870 - DNA, 201 bp, Homo sapiens
cggatttctttgattctgagccccgtgttttccacgtgtgacatttctgaaatcaggacaggtctcagaatcaatggcacctccaatatgggagtcttccytttagtgtctgaaaatggcttttaggtgagaaaataaagtgataaggagagaatggtaagaggattgggcccctttcagcagttagccaggcttgtatgc

SEQ ID NO: 31871 - DNA, 201 bp, Homo sapiens
tgtggatgaagatttggctgtctgagaggagcccggccccaaggggcaagggaaagggatgtgatgccaggagtgctggctgtataccaagtggattcctyagatggctgataaccaagccgataggacaggagtgagagcagaggtagtgtcttgcagactccaacccaagccttgaggagggagcgggtgactgacagg

SEQ ID NO: 31872 - DNA, 201 bp, Homo sapiens
taaagatgtgcttcctccgtgtctgtcatacactgagaccaacaggctacagtgtccctgattcttggaaaagcctggagaagctggggagatgcggttcmcaatgcctcggtataggaggctgtgttgagctgacattcaaatggattctttaataataatgaaactggcgagtatttattgtgcactttggtgtcactg

SEQ ID NO: 31873 - DNA, 201 bp, Homo sapiens
ctagtgttggcctgttggcctcccgtccacggctcctccccttctctttgctttccttccctttttcccctagccacccctaactccagagaaagacaagsaacaaaagtctcggtgttgcgtcacagaggtggcgcagcttctgagggcctggggttgcagagcagttagtgagcagcttctggggtggaggctctgcag

SEQ ID NO: 31874 - DNA, 201 bp, Homo sapiens
tttcatctcgggtcccagtgcccccagaggatatgacggggacaccctcagcacagtgttggggtgggggaaggagctgcagagatgaaggttgttggccyttcacctcactccacactctgtccctttctccagggcattgatgattccagcaaagacaagtaagtcaggttactgaggagggagaaggcacttgcaccc

SEQ ID NO: 31875 - DNA, 201 bp, Homo sapiens; identical to SEQ ID NO: 3877

SEQ ID NO: 31876 - DNA, 201 bp, Homo sapiens
cctaggcttcctggaattgcgggtgccccagactgctcctactttttgatgagacctcaggagatttcctcagttttggctttctctgtctttgaggtctstctgtcactgggaaggggaatctttctccaacctgtgcaaagacccatgcggacccctagactcccagccagccgagatggggccgggagagcctatgca

SEQ ID NO: 31877 - DNA, 201 bp, Homo sapiens
cttgctgtccctgccttccttagggagggcccagcactcagctcagcctcctctccctcagtactcccggaaggtggatccccgcttcggagcctacgttkcctgtgccctgttggtcttctgcttcatctgcttcatccagcttctcatcttcccacagtgagagccctgcctttcctctcttagcttctctcttcacca

SEQ ID NO: 31878 - DNA, 201 bp, Homo sapiens; identical to SEQ ID NO: 3880

SEQ ID NO: 31879 - DNA, 201 bp, Homo sapiens; identical to SEQ ID NO: 3881

SEQ ID NO: 31880 - DNA, 201 bp, Homo sapiens
cctgccttccttagggagggcccagcactcagctcagcctcctctccctcagtactcccggaaggtggatccccgcttcggagcctacgttgcctgtgccmtgttggtcttctgcttcatctgcttcatccagcttctcatcttcccacagtgagagccctgcctttcctctcttagcttctctcttcaccacttcccaga

SEQ ID NO: 31881 - DNA, 201 bp, Homo sapiens
agtacctgaacggggactacgaggtggagccaggccgtggtggcgagcgcaacgcgtacctcaaggagcagcacattgagactttcctcatcctgggcgcmagccagaaacgggtcagggccagggcagggctgggggcaggggagcaagaagagggacaaatggggaggagcaggccaaggcctcctctgggcccctctt

SEQ ID NO: 31882 - DNA, 201 bp, Homo sapiens
ttgtgtgggagcaggagccacccccctggctctccctccctccctcaggtgctgtccatacctttcctttcattgtttctcacatggccatgcccatgcawctggtgaaaccatgtctcctgccctcagccggggcacccaagatgccctgaaccctgaggatgaggtggatgagttcctgagccgtgccatcgatgcccg

SEQ ID NO: 31883 - DNA, 201 bp, Homo sapiens
ggagtgtctggctacagcttcatgtagtggatctcgataggcacattcttggggcagtggcgaaattcactgctgcccctgtgccagtccttggggccagrgctgcccatacaacttcctctgggctgagaaacattccctgtgcccatttgggtatgtgggtttctagacaggtggggtttgtggcctccttcctcgtct

SEQ ID NO: 31884 - DNA, 201 bp, Homo sapiens
gggcctgggttgtgggctgggggaggggaagactgccaggagctgatctggggctgcatcctcccaggctggtacgtgaggtgacaggtgtgaatgtgaayatgcgcgtgggcatccacagcgggcgcgtgcactgcggcgtccttggcttgcggaaatggcagttcgatgtgtggtccaatgatgtgaccctggccaacc

SEQ ID NO: 31885 - DNA, 201 bp, Homo sapiens
gacctcatgatccacccgccttggcctcccaaagtgctgggattacaagcgtgagccaccgcacctggccagaatgccagaatgccagaacgtaccttttwaaaagtaactttatagcccgtttgtttgtggagcacgtgcccttagggcactgtcagacatcttaaagggccaggtccttctgccccaaagcttctcttc

SEQ ID NO: 31886 - DNA, 201 bp, Homo sapiens
tcttttccgtcctgcttgtgtttacttctgccattgccaacatggtaagggtccagtgggaattctcccacctctgctctgtgccaagcactgtcctggasactgggagtacagcggagaaaaggacatattttctgccctcagggagccccctcccagaataggggaaggttaactccggttctccttccttgttctccc

SEQ ID NO: 31887 - DNA, 201 bp, Homo sapiens
aggctggagtggtgcagtggcgcgatctcagctcactgcaacctctgcctcccaggttcaagcgattctcctgcctcggcctcctgagtagctgggactasaggagcgcgccaccatgcccagctaatttttgtatttttagtagagacaagtttcaccatgttggccaggatggtctcgatctcttgacctcatgatcca

SEQ ID NO: 31888 - DNA, 201 bp, Homo sapiens
gctggtgtttgcgctggcgctgtatctgcatgctcagcaggtggagtcgactgcccgcctagacttcctctggaaactacaggtgactgtgtgggcctttsggggaagaggaggaacctaggggcggagcctgggccaggccagaaatgtatcttgtgctagctggctaaggctcaggccacacctaggcccaccctggtt

SEQ ID NO: 31889 - DNA, 201 bp, Homo sapiens
tgtggatctgccatctcctgttacccccctgcccagggagcagaggccagggtccttcaggcgctgctgtaggcacagccccgccatcagcacagcgcctkggtcctccactggaccctaactagagagtgctgtcttgctcaaggttttgaaggcttgtggcctgttgcccaccctgcctcaggcacagagaggaagttg

SEQ ID NO: 31890 - DNA, 201 bp, Homo sapiens
cctgaatggcccggtctataggtgcataccaccacaccaggctaatttttttttttttgagacggagtctcactctgtcacccaggctggagtgcaatggygcgatctttgctcactgcaacctctgccacccgggttcaagcaattctcctgcctcagctcctgagtagctgggattacaggcgcccgccaccacgcccg

SEQ ID NO: 31891 - DNA, 201 bp, Homo sapiens
agacttcctctggaaactacaggtgactgtgtgggcctttgggggaagaggaggaacctaggggcggagcctgggccaggccagaaatgtatcttgtgctwgctggctaaggctcaggccacacctaggcccaccctggttccattccttctctgtgcccatcccttactccctgccccatcctctacctgccccctttac

SEQ ID NO: 31892 - DNA, 201 bp, Homo sapiens
ctgtctccagcagctctggggactgacagccaaggacacagggactgatagaaccaggcatctgactggctagaaagacgtgtgttcttgctcatgatttyctcatctttccatctcttgacgatgacagaggtttgggtttaaagtgttgtagagtgaggagaagaactaatatttttcaagtgtgtacttcttgacagg

SEQ ID NO: 31893 - DNA, 201 bp, Homo sapiens
gcagccttctgctcatgtccaaccaaggctgtgctcccgtcccctgcatctgggtctgtccttgcccgctgggccctgagaggagtgaagggcctgggttrtgggctgggggaggggaagactgccaggagctgatctggggctgcatcctcccaggctggtacgtgaggtgacaggtgtgaatgtgaacatgcgcgtggg

SEQ ID NO: 31894 - DNA, 201 bp, Homo sapiens
tttcctcatcctgggcgccagccagaaacgggtcagggccagggcagggctgggggcaggggagcaagaagagggacaaatggggaggagcaggccaaggyctcctctgggcccctcttctgagcctgtacccatgctgcccgcacagaaagaggagaaggccatgctggccaagctgcagcggactcgggccaactccat

SEQ ID NO: 31895 - DNA, 201 bp, Homo sapiens
gataacagtgattcctcttctcctagctcagttccataagatgctgctgggcccctgctgttgaacacagccttaacatttgtccttgagccccatgcagscttctgctcatgtccaaccaaggctgtgctcccgtcccctgcatctgggtctgtccttgcccgctgggccctgagaggagtgaagggcctgggttgtggg

SEQ ID NO: 31896 - DNA, 201 bp, Homo sapiens
tgatagaaccaggcatctgactggctagaaagacgtgtgttcttgctcatgatttcctcatctttccatctcttgacgatgacagaggtttgggtttaaartgttgtagagtgaggagaagaactaatatttttcaagtgtgtacttcttgacaggcattattagattctttcctgaggaccattatcatttccattttgc

SEQ ID NO: 31897 - DNA, 201 bp, Homo sapiens
ctggggtctttgccttgacagccaggtctccttgtgttgttcagattatcagcgaggagcggttccggcagctggaaaagatcaagacgattggtagcacytacatggctgcctcagggctgaacgccagcacctacgatcaggtgggccgctcccacatcactgccctggctgactacgccatgcggctcatggagcaga

SEQ ID NO: 31898 - DNA, 201 bp, Homo sapiens
cccaaaaggtaaggattggagaaattgcttaatattgcacttgtgggtctgtgttctgtgagtgagctactggagggaccttctgaagctgtatgcccaaktcctgcctggagtcctaggctgcctgttttcccagctcctcagtcttacactgatagcagcagctggaagggggctcttgagacagggaagtggggaagg

SEQ ID NO: 31899 - DNA, 201 bp, Homo sapiens
ctgactacgccatgcggctcatggagcagatgaagcacatcaatgagcactccttcaacaatttccagatgaagattggtaagagggctttgttgcttggygggttttcccaggactttttccaggtgaagctgggattataggctggggatgggatcacagatttcccatcagggctcctgtggggttttcttccctctg

SEQ ID NO: 31900 - DNA, 201 bp, Homo sapiens
acttcccagaagcttcctaaatacccacacaagcccacaatccctggagcctgcatccctgcttgttccagagggtgggacaagaatgcccagatcttccrgaattaaatgatttttctggccctgttctgccccagctccaccctgatgcttgggatctatgccagcatcttcctgctgctgctaatcaccgtgctgatc

SEQ ID NO: 31901 - DNA, 201 bp, Homo sapiens
cctgcctttcctctcttagcttctctcttcaccacttcccagaagcttcctaaatacccacacaagcccacaatccctggagcctgcatccctgcttgttycagagggtgggacaagaatgcccagatcttccagaattaaatgatttttctggccctgttctgccccagctccaccctgatgcttgggatctatgccagc

SEQ ID NO: 31902 - DNA, 201 bp, Homo sapiens
tcccggaaggtggatccccgcttcggagcctacgttgcctgtgccctgttggtcttctgcttcatctgcttcatccagcttctcatcttcccacagtgagrgccctgcctttcctctcttagcttctctcttcaccacttcccagaagcttcctaaatacccacacaagcccacaatccctggagcctgcatccctgcttg

SEQ ID NO: 31903 - DNA, 201 bp, Homo sapiens
gctgggaggaacatgggcccggagggcttccacaggtgtctctgcagtctgctaggacaggggtagggtggctagtgttctgtgtatggtggggcagggaytgggggaagggagctagcctgactagagaacccctgggcccctgcaaatgcagcaggaaggattccaggctaagcgggctcccctcccactcccccaggt

SEQ ID NO: 31904 - DNA, 201 bp, Homo sapiens
tactcccggaaggtggatccccgcttcggagcctacgttgcctgtgccctgttggtcttctgcttcatctgcttcatccagcttctcatcttcccacagtragagccctgcctttcctctcttagcttctctcttcaccacttcccagaagcttcctaaatacccacacaagcccacaatccctggagcctgcatccctgc

SEQ ID NO: 31905 - DNA, 201 bp, Homo sapiens
cttctgtccttatctgtgaccagtccaataagaggtatttcctctcaaatgaactggtggatgggagtggttaatagcatggctactagagatggactatktggtttgaattctggctgctccatttactggcttatttgagaagtcttctaacttctctaagcttcagttaccttatctataaaatggggataataatac

SEQ ID NO: 31906 - DNA, 201 bp, Homo sapiens
gggatttctgaggctgttggggagggcaggctggactccagacagggaggaggtcacatggggagagggagaaggccatgcctcttccactgggccccatmcctggttgccattcctccttggctgatacaaccttcaactcttggtctcttgatgcctctagctgttccctaaggccctgcaacgtctgtcccgcagcat

SEQ ID NO: 31907 - DNA, 201 bp, Homo sapiens
aggctgcctgttttcccagctcctcagtcttacactgatagcagcagctggaagggggctcttgagacagggaagtggggaaggcagccaaggcgtggcargaaatgagtgttggggcagggctgggtctggggtctttgccttgacagccaggtctccttgtgttgttcagattatcagcgaggagcggttccggcagct

SEQ ID NO: 31908 - DNA, 201 bp, Homo sapiens
gagacctcaggagatttcctcagttttggctttctctgtctttgaggtctgtctgtcactgggaaggggaatctttctccaacctgtgcaaagacccatgyggacccctagactcccagccagccgagatggggccgggagagcctatgcagtaggggagttgggctagagggaatgccatctgtgcaggccagaggggat

SEQ ID NO: 31909 - DNA, 201 bp, Homo sapiens
agcttgttgtagtagaaaaagcctctggtctctgctgggtttgaatccctgctctgctgctcattagctgtgtgactttagacaggtgagttagcttctcygagcctcaatttcttcatctgtaaaatggcaatgtcacctaaatcacagggtagttgtaaagattatagtaactaacatttatggaaggctgactatatg

SEQ ID NO: 31910 - DNA, 201 bp, Homo sapiens; identical to SEQ ID NO: 3886

SEQ ID NO: 31911 - DNA, 201 bp, Homo sapiens; identical to SEQ ID NO: 3887

SEQ ID NO: 31912 - DNA, 201 bp, Homo sapiens
gcaaaaccccattcctttgatatgtggccatagcttgttgtagtagaaaaagcctctggtctctgctgggtttgaatccctgctctgctgctcattagctrtgtgactttagacaggtgagttagcttctctgagcctcaatttcttcatctgtaaaatggcaatgtcacctaaatcacagggtagttgtaaagattatag

SEQ ID NO: 31913 - DNA, 201 bp, Homo sapiens
attctcaggtcctttaataccccaggagcttccctcacctttctaggtcactgtgagcctctctggtgcccatgccccttgtgccttggaatgccacaacwcccctgtgggggaaagggaggagatggaggagctcccagcatgtgaccccaaatagttacccccaaggaaaccctagtcctgggaaatccttgtgtcttt

SEQ ID NO: 31914 - DNA, 201 bp, Homo sapiens
cccagccaccatctttgacaactatgacctactgcttggcgtccatggcttgtgagtttattctcaggtcctttaataccccaggagcttccctcaccttkctaggtcactgtgagcctctctggtgcccatgccccttgtgccttggaatgccacaacacccctgtgggggaaagggaggagatggaggagctcccagca

SEQ ID NO: 31915 - DNA, 201 bp, Homo sapiens
ctctctgggcctggatgctcccctgtgtgagggcaccatgcccacctgcagctttcctgaggtgttcgagcagtgctcaggcggtgggggggctgtcctgkcacagacattggcccttctgtgccaggcctggtgatgggcgctggggacccaggaactcaccagagtctcccacactaggagcaaccaggggccctggtg

SEQ ID NO: 31916 - DNA, 201 bp, Homo sapiens
gcgctgcccatctggcttgagctctcattctatggccacctggggcaagtgctgagtattcctccatcctgtccccgagtgagtacaaatgtcagtgctgstagctcagcaggtttaattacaagggacccctcagggtactctgtgagcatagaggagtgtggccctggtggggacacaggcatgcatggatgacagtgc

SEQ ID NO: 31917 - DNA, 201 bp, Homo sapiens
ttgagccaactgcatctcctccctgttgagacccctggtagtgccctgtccttgctgtccctgccttccttagggagggcccagcactcagctcagcctcstctccctcagtactcccggaaggtggatccccgcttcggagcctacgttgcctgtgccctgttggtcttctgcttcatctgcttcatccagcttctcatc

SEQ ID NO: 31918 - DNA, 201 bp, Homo sapiens
tgggtgttgaccgtggtgagagcatagctttgctggcagcagctggggatttgagggcagatagagtatgcgtggagggtggtgggccatgcaggctgggwgggcaagagagtaaaggttacccttccctccaattccttcccattcaggagaatcactgcctgaggatcaagatcttgggggactgttactactgtgtgt

SEQ ID NO: 31919 - DNA, 201 bp, Homo sapiens
tgaagcacatcaatgagcactccttcaacaatttccagatgaagattggtaagagggctttgttgcttggcgggttttcccaggactttttccaggtgaarctgggattataggctggggatgggatcacagatttcccatcagggctcctgtggggttttcttccctctgacctcctatatcaagtctgatattaagaac

SEQ ID NO: 31920 - DNA, 201 bp, Homo sapiens; identical to SEQ ID NO: 3878

SEQ ID NO: 31921 - DNA, 201 bp, Homo sapiens
gcaagttctgcgggatgggcagtgcctggagtggagcccagggtgggatggttgcagttggttggacaattacatagctctgaagctatccccttgggggsggtcagagtgttcctgggagggtcatgcattctcctggatagcatttgcccctttctctgtgagtatgagccagatgctaggatgtgtttccagggggct

SEQ ID NO: 31922 - DNA, 201 bp, Homo sapiens
gtgccctgtccttgctgtccctgccttccttagggagggcccagcactcagctcagcctcctctccctcagtactcccggaaggtggatccccgcttcggrgcctacgttgcctgtgccctgttggtcttctgcttcatctgcttcatccagcttctcatcttcccacagtgagagccctgcctttcctctcttagcttct

SEQ ID NO: 31923 - DNA, 201 bp, Homo sapiens
tgggaagccgaggtgggcagatcatgaggtcgggagttcaagaccagcctgaccaacatagtgaaaccccttttctactgaaaaaaaaaaaaaaaaaaaaattaggccgggcgcagtggctcacgcctgtaatcccagcactttgggagtccgaggcaggcggatcacgaggtcaagagatcaagaccatcctgactaaca

SEQ ID NO: 31924 - DNA, 201 bp, Homo sapiens
caaccaggggccctggtgtgttgtaggggctgggcatggaaggtggaggatatgggggtttgaggggtgtggtgggaaggttaggtcaggcaggagagtgsagggctctccctgcccaagggtgctgtggcctctgccttcacccaacgctgcctctgccacccccgcagtacttcatcgggaacatgctgctgagtctct

SEQ ID NO: 31925 - DNA, 201 bp, Homo sapiens
tcatctatttggtgctgcttctgctgggtcccccagccaccatctttgacaactatgacctactgcttggcgtccatggcttgtgagtttattctcaggtyctttaataccccaggagcttccctcacctttctaggtcactgtgagcctctctggtgcccatgccccttgtgccttggaatgccacaacacccctgtggg

SEQ ID NO: 31926 - DNA, 201 bp, Homo sapiens
tgactttgatgaggtacttttccagttggctggtggtggcagagagtggggggtacttggagaccagggattggaatgggtgagtggaactgggaagagaragagagatttgatgggacccagagtcatcaggggtaagggtatgcacagtggaggcagaggcaagaacccatgaaggtgtcagaggcagcaagggggtca

SEQ ID NO: 31927 - DNA, 201 bp, Homo sapiens
ggctctccctccctccctcaggtgctgtccatacctttcctttcattgtttctcacatggccatgcccatgcaactggtgaaaccatgtctcctgccctcrgccggggcacccaagatgccctgaaccctgaggatgaggtggatgagttcctgagccgtgccatcgatgcccgcagcattgatcagctgcggaaggacca

SEQ ID NO: 31928 - DNA, 201 bp, Homo sapiens
gtgtgtggggggagataagaacagggaaggggactggtgaatggaggaggctgaagcaaaatgttgtgggtggtggatggtggtgggaaacctgctcactstgggctctgtctccagcagctctggggactgacagccaaggacacagggactgatagaaccaggcatctgactggctagaaagacgtgtgttcttgctca

SEQ ID NO: 31929 - DNA, 201 bp, Homo sapiens
tgagccagatgctaggatgtgtttccagggggcttggaacatggccagaaactagtcctttgggaacaggtccgggccagtgctggtgggggtggtgtgtkgggggagataagaacagggaaggggactggtgaatggaggaggctgaagcaaaatgttgtgggtggtggatggtggtgggaaacctgctcactctgggct

SEQ ID NO: 31930 - DNA, 201 bp, Homo sapiens
atctccttggtttttcccttttaatttgctgtgaagctaagacaagttttcttacctttttcttgagccaacagaccttctcaaacagaaaccctcctttktctttaatcctgctgtcctcaggcccatttctttcctctccccagagtctcagtttcatccatccttgactccacaatgtcttccttgtgcaaataaagc

SEQ ID NO: 31931 - DNA, 201 bp, Homo sapiens
taaatatgaggtaaccattggtgtcaagtgtgaaccttccattcgattgctagtttgatcagtccacatctaaatgtggaaagttctgtattcctatggcrgaagacatgtgtatttgatgtattaaaacctgctgatgtctccagaactaaatttgttcctttgtaggcctctgggttagcggtagctaaaaagcagaaa

SEQ ID NO: 31932 - DNA, 201 bp, Homo sapiens
gtgtcaagtgtgaaccttccattcgattgctagtttgatcagtccacatctaaatgtggaaagttctgtattcctatggcggaagacatgtgtatttgatktattaaaacctgctgatgtctccagaactaaatttgttcctttgtaggcctctgggttagcggtagctaaaaagcagaaatgtatagtattagcttgtct

SEQ ID NO: 31933 - DNA, 201 bp, Homo sapiens
tgctccttcaagagaaggattgccttcaataaagaggtaaatgatagtatcctgtttattgtggacgtaggcagccaaagcaatatgataaactgctggaracacacatatcagtaatcatccacattattagtgccattaatcataattccaaaaatatgacagcagcagccaactttttgaccaattttgcttctgcct

SEQ ID NO: 31934 - DNA, 201 bp, Homo sapiens
gttctaatacagtcttagatatttgttattgagtattcttccctctttcctagagataaatattcagaacactaaatctgtttctagaaaaaccatctctrtcgctggagagctcaaaattggttccttgttggattctttgttccaattgttacatacaactgagtagggcttcctctgccagggagtccccctcctgtt

SEQ ID NO: 31935 - DNA, 201 bp, Homo sapiens
atacaaagtgtgctgtcccaatgggaagaaatggtgccctagaaagtgatggagtcattatttaagtgtttgaatagatctctctcaatccatgctgaaayggatcgcctgacattacattgcaggattttaaagtcctacctccaggcaaatctcatagttactggcaaaaatgaaagtgtgaaatgctttttaatgtat

SEQ ID NO: 31936 - DNA, 201 bp, Homo sapiens
atcattgttgttaaaaaagcagtactgaaggcattttagatcacagagccccagtggtctacattttgtttgctttgacattattaaactcaatctgtttstctaactgtgactctaattactacatttgcatggcagaaaagtttgctttgtgggttgacttttattaacagtgcttgcatgttgttttctgctcttgct

SEQ ID NO: 31937 - DNA, 201 bp, Homo sapiens
ctgcagatgtgtgagaagcaacagagttctagattacagtcatcgcaaaatgtgtgctcgtgaaattaagaaagggggagggtgttaaaaataataaacaggggtaggatttcatgagctgctcatagttggcagatagttttatcaatagaataatagcgcatagcgtaactctacttccacattcttgtaataactggt

SEQ ID NO: 31938 - DNA, 201 bp, Homo sapiens
tatatatatttttggagcaacatactatagttgtcataaaactatctttattcttctcctctaaagtgctgttgtaaattcatttgacctttactgcaggaaaaaaaaaatcttttttatataggatatgaagaccaaggctcagtctgtaacaaatagtggaccattacaaaagaggaaagaaaaaagccagggctgagc

SEQ ID NO: 31939 - DNA, 201 bp, Homo sapiens
agtgatcattcgtggttgtactaagaggaagggataccttctttgcctaaatgccatagtgaaggtttagccatgaagcattttttttctttttttaaagscttctcagaaataatgtgcttgccataagactcccacaagcttcaaataaatgaatgtggcagaattggaaagaagcttgtccttgccaaaaaattgcaa

SEQ ID NO: 31940 - DNA, 201 bp, Homo sapiens; identical to SEQ ID NO: 3905

SEQ ID NO: 31941 - DNA, 201 bp, Homo sapiens
tgtaattccagcactttgggaggctgaggcaggcagattgctggaggccaggagttcaagaccagcctggccaacatagcaaaaacccatctatactgacaaaaaaaaaaaaaaaaagctgggcatggtggcacatgcctgtaaaaattagctcctattattttggaaatatatcttctaaaatctttataaagtaaggct

SEQ ID NO: 31942 - DNA, 201 bp, Homo sapiens
actgcagatgtgtgagaagcaacagagttctagattacagtcatcgcaaaatgtgtgctcgtgaaattaagaaagggggagggtgttaaaaataataaacaggggtaggatttcatgagctgctcatagttggcagatagttttatcaatagaataatagcgcatagcgtaactctacttccacattcttgtaataactgg

SEQ ID NO: 31943 - DNA, 201 bp, Homo sapiens
tcagggttagggcaagtgtcactcacagagggatacaaagtgtgctgtcccaatgggaagaaatggtgccctagaaagtgatggagtcattatttaagtgwttgaatagatctctctcaatccatgctgaaatggatcgcctgacattacattgcaggattttaaagtcctacctccaggcaaatctcatagttactggca

SEQ ID NO: 31944 - DNA, 201 bp, Homo sapiens
tcgcctgacattacattgcaggattttaaagtcctacctccaggcaaatctcatagttactggcaaaaatgaaagtgtgaaatgctttttaatgtatattwaacaacacatagtctggtgattactgatgtgtattctctgtggactccctttgctatcagaggaggatgctgagagacaactttttacacatttattctg

SEQ ID NO: 31945 - DNA, 201 bp, Homo sapiens; identical to SEQ ID NO: 3906

SEQ ID NO: 31946 - DNA, 201 bp, Homo sapiens; identical to SEQ ID NO: 3907

SEQ ID NO: 31947 - DNA, 201 bp, Homo sapiens; identical to SEQ ID NO: 3908

SEQ ID NO: 31948 - DNA, 201 bp, Homo sapiens
attgaacagacagatgttttcctttgttttataccatataagactctgtacagtatgtttgtgaaagattgaactagaataatgaaagtttgtttgcaaasattttggtcctctcagcgttctctgtgttgtgctgttgccccattaccaaatggttagattcaaaaagggtgggaaaagatttttaatatcccaacaaaa

SEQ ID NO: 31949 - DNA, 201 bp, Homo sapiens
tcaaacagtacacaataatttaaagagaatgtatttcttttttgcatttaatggcctcagacatttctttcatcagtctaaaagttagaaatatccctttrttttaacttttatgtcgtttccatttttcatgtttttgtaattattttttctatgttcacatcagcattcacttccgttaaatttgccaaaggaaactgt

SEQ ID NO: 31950 - DNA, 201 bp, Homo sapiens
tacttggaagctttgaaaacatgtgctaaacttgaatggagcaacactcctttctgaaaagccagaagaagggggttttaaagcaggatctctcaatgttyagtgttttgtgtttccccacacgatttgtcagagagaaatgaaagcaagcctgaaaccaagcaattgagagtgagaaagaggagagagactattctccaa

SEQ ID NO: 31951 - DNA, 201 bp, Homo sapiens
cccatatacatatatgtacacacatacatacagacaaataggcatgcatatggtatgtatatgttattgttacgctatgtatatgttgttatgatcattckgtacaatatcatttgagaatttgtgaatgtgtgtgttgaacggcagagttgagctggaaaataaaggcaaaaactaatccaaagtggggcctcagttatt

SEQ ID NO: 31952 - DNA, 201 bp, Homo sapiens; identical to SEQ ID NO: 3909

SEQ ID NO: 31953 - DNA, 201 bp, Homo sapiens
ttgaaaaaaaaaatgtatgcaggccgggcgcagtggctcatgcctgtaatcccagcactttgggaggccaaggcaggtggctcacttgagggcaggagtcygagaccagcctggtcaacatggtgaaaccccatcttaactaaaaatacaaaaattagctggacatagtggcgcatgcctgtaatcccagctacttgggag

SEQ ID NO: 31954 - DNA, 201 bp, Homo sapiens; identical to SEQ ID NO: 3919

SEQ ID NO: 31955 - DNA, 201 bp, Homo sapiens
atcagtagattagatgatttctaagttctagctgtaagctcctctggttcagcgccatggcaatgagaaagaatcaagggcaaggtcaggggaatggacgwgggaaggtgagagtggccagtaccccactcacggctttctgtgcctgcagagttcacccatgcagggcagggagggctgattgaagagcccacaggtgat

SEQ ID NO: 31956 - DNA, 201 bp, Homo sapiens
caactccactccatccactccactccgtccaacttcatcccatccactacattcaactccactccatccactctactccatctactaccttcaactctacyccatccatccactccactccatccattccatccaacttcatcccatctactacattcaactctactccatccactccactccatccattgcatccaactt

SEQ ID NO: 31957 - DNA, 201 bp, Homo sapiens
catcccacagcgggaggtggtcgataccactggcctcaaccagtcccacctgtcccaacacctcaacaagggcactcccatgaagacgcagaagcgggccrccctgtacacctggtacgtccgcaagcagcgagaggtggcgcagcgtaagtaatgaccctaccccgcatcttccctgggagggcccaggactctccccta

SEQ ID NO: 31958 - DNA, 201 bp, Homo sapiens
accccactcacggctttctgtgcctgcagagttcacccatgcagggcagggagggctgattgaagagcccacaggtgatgagctaccaaccaagaaggggbggaggaaccgtttcaagtggggcccagcatcccagcagatcctgttccaggcctatgagaggcagaagaaccctagcaaggaggagcgagagacgctagt

SEQ ID NO: 31959 - DNA, 201 bp, Homo sapiens
cagggcggaatgcatccagagaggggtgtccccatcacaggcacaggggctgggctccaacctcgtcacggaggtgcgtgtctacaactggtttgccaacbggcgcaaagaagaagccttccggcacaagctggccatggacacgtacagcgggccccccccagggccaggcccgggacctgcgctgcccgctcacagctc

SEQ ID NO: 31960 - DNA, 201 bp, Homo sapiens
gtttgcctctgcagtgtcctccagcagcctggtgctgtaccagagctcagactccagcaatggccagagccacctgctgccatccaaccacagcgtcatcragaccttcatctccacccagatggcctcttcctcccagtaaccacggcacctgggccctggggcctgtactgcctgcttggggggtgatgagggcagcag

SEQ ID NO: 31961 - DNA, 201 bp, Homo sapiens
ggatttttaacttttaaggagaaattggagaatttgagatgcagagtcaatatatgactgtagtattaggactctttcagtaacaggggacagaaccccarctcaaatggatttaaacagaaaagggaatgaattgactgaagcaatgtgaggagtccagggctgcttcaggcatggctagatcaaggggctcaaatgagg

SEQ ID NO: 31962 - DNA, 201 bp, Homo sapiens; identical to SEQ ID NO: 3927

SEQ ID NO: 31963 - DNA, 201 bp, Homo sapiens; identical to SEQ ID NO: 3929

SEQ ID NO: 31964 - DNA, 201 bp, Homo sapiens
tcaggaggctgctctgctcccccaggtcttcacctcagacactgaggcctccagtgagtccgggcttcacacgccggcatctcaggccaccaccctccacrtccccagccaggaccctgccggcatccagcacctgcagccggcccaccggctcagcgccagccccacaggtgagaggccctggctccaccccctccctta

SEQ ID NO: 31965 - DNA, 201 bp, Homo sapiens
ttgaacacaggttaagaaagtgatggcatgtgtgctgtgtgtttgtcatcagtagattagatgatttctaagttctagctgtaagctcctctggttcagcrccatggcaatgagaaagaatcaagggcaaggtcaggggaatggacgtgggaaggtgagagtggccagtaccccactcacggctttctgtgcctgcagagt

SEQ ID NO: 31966 - DNA, 201 bp, Homo sapiens
tattaccagctcccagcctggtgtggttgtacccacctgtaatcccagcacatttgggaggcaaaagtgggaggatcacttgagcctaagagttcaagacmagcctgggcaacagaaggagaccccatctctccaaaaaatacgaataaatgagccaggtgtggtgcagcaggtgtgtagtcctagccacttatgcccgct

SEQ ID NO: 31967 - DNA, 201 bp, Homo sapiens
agccttgtttgcctctgcagtgtcctccagcagcctggtgctgtaccagagctcagactccagcaatggccagagccacctgctgccatccaaccacagcrtcatcgagaccttcatctccacccagatggcctcttcctcccagtaaccacggcacctgggccctggggcctgtactgcctgcttggggggtgatgaggg

SEQ ID NO: 31968 - DNA, 201 bp, Homo sapiens
ctcagccttcaaaccccaatcttgaagtattctgatcctgcccatcaggcagcatcagggcactgagactcaggaaaacagtagccacggcaggagggggsggggacagaggatctgacgtccccaacaaaagccagactgcctgcatcctaatcctagctctgcccctttctagcttgagcaggtgattttatacttctg

SEQ ID NO: 31969 - DNA, 201 bp, Homo sapiens
ttccagatcttcccatggccgattccttctccttcagctccctgattgctccatccaaaagggggccccacccccgtcactctcttccactactgttgttyactttctctggttccctgtcaagacttgtgatcatctgatttgtttgttttctatctcctgccatgaaaatagaagctcttcaaggacaaggcccgtgtt

SEQ ID NO: 31970 - DNA, 201 bp, Homo sapiens
tagctgtaagctcctctggttcagcgccatggcaatgagaaagaatcaagggcaaggtcaggggaatggacgtgggaaggtgagagtggccagtaccccaytcacggctttctgtgcctgcagagttcacccatgcagggcagggagggctgattgaagagcccacaggtgatgagctaccaaccaagaaggggcggagga

SEQ ID NO: 31971 - DNA, 201 bp, Homo sapiens
gtccacggtaagtggtatgtggggacaagggacacgtgggaaggtgggagggttggggaggactgtcccagtgacagcagtcacctaaacctctttgcacktcagtttggttccattccattcatgccactccttatcactctacttcactctgttcattcatccattccactctatctcattccattcactctactcctt

SEQ ID NO: 31972 - DNA, 201 bp, Homo sapiens
ccctttctataaggttcctggacccggccctggcagctgtcatgacagccactgaggccattctgtgtcctggcattcaccccatgaggcgtgtccatgaycacccccattttacagatgagaaagtggacactcaaggaggggagggacttgcctcatctcccacagctaccagatggcagggccaggactcgaacccag

SEQ ID NO: 31973 - DNA, 201 bp, Homo sapiens
agcgtggtggacccgggccgcgtggccctgtggcagccgagccatggtttctaaactgagccagctgcagacggagctcctggcggccctgctcgagtcarggctgagcaaagaggcactgatccaggcactgggtgagccggggccctacctcctggctggagaaggccccctggacaagggggagtcctgcggcggcgg

SEQ ID NO: 31974 - DNA, 201 bp, Homo sapiens
agcctggcctggaggctcatgggtggctatttctgcagggcggaatgcatccagagaggggtgtccccatcacaggcacaggggctgggctccaacctcgwcacggaggtgcgtgtctacaactggtttgccaaccggcgcaaagaagaagccttccggcacaagctggccatggacacgtacagcgggccccccccaggg

SEQ ID NO: 31975 - DNA, 201 bp, Homo sapiens
gcctgtgtccacgtttgtcatgtgtgtgcgtctacaagtctctgtcctcatgaccatgtgtctgtgtccctgtgtcctggcataaatgaccatacctcacygtccctgagtctatgtgtaggcccctgggctccataactgctttcatgcacagtccccaccctcagagttgacaaggttccagcacccaggaccgcagcc

SEQ ID NO: 31976 - DNA, 201 bp, Homo sapiens
cagcaactcaagcagggaggcaggcactaagcataatacatcaattctgtggtacctcagaaggtgaagggtctatgggcaaattacagcagggtaagggrgactgatgttttctaagtttttgttttatgaagaaaaattaagcccagaaagcccttatttgcaggtacaattatgcagaagcccagtacataagataga

SEQ ID NO: 31977 - DNA, 201 bp, Homo sapiens
tgctgagcagatcccgtccttgccctctcccagggaggacccgtggcgtgtggcgaagatggtcaagtcctacctgcagcagcacaacatcccacagcggraggtggtcgataccactggcctcaaccagtcccacctgtcccaacacctcaacaagggcactcccatgaagacgcagaagcgggccgccctgtacacctg

SEQ ID NO: 31978 - DNA, 201 bp, Homo sapiens
acacagcaggagatgatgatagaggttggctgtcaatggatgcaggggaaaggggtgcctggcaggcattgcagtctgcatgtgtctctgggacaagtgtktttccgtgattgagggtgtctgcaggccagtgtgttcccatgtgaatgcacgtatctgtgtgtgtgcacgactgcttgtgtgagcagatccctagtgcgt

SEQ ID NO: 31979 - DNA, 201 bp, Homo sapiens
gaggcagaatcgcttgaacctgggaggcggaggttgcagtgagctgagattgtgccactgcactgcactccagcctgggcaacagagtgagtactctgccaaaaaaaaaaaaaagaaaaagaaaagtaatttggtggatatgccagctatcacataacactcccagcagggtttgagacagccccctgtgatcaaagcact

SEQ ID NO: 31980 - DNA, 201 bp, Homo sapiens
ctgattgaagagcccacaggtgatgagctaccaaccaagaaggggcggaggaaccgtttcaagtggggcccagcatcccagcagatcctgttccaggcctrtgagaggcagaagaaccctagcaaggaggagcgagagacgctagtggaggagtgcaataggtacaacggcgggcgggaaacagtgctggtttggtctggg

SEQ ID NO: 31981 - DNA, 201 bp, Homo sapiens
cagggccccctgacttggcaggaagaggagggcaaaggactccagagctgcaggggaggggcaaagagtcaggcatcccagacccagggcgaaggcaaccygacggggtggggctgggcctgacctgcccagggccccagatgggactgggggctttggggtgagggtgggggcaggggatgctttcttacctggctgagt

SEQ ID NO: 31982 - DNA, 201 bp, Homo sapiens; identical to SEQ ID NO: 3958

SEQ ID NO: 31983 - DNA, 201 bp, Homo sapiens
ggcggctagcgtggtggacccgggccgcgtggccctgtggcagccgagccatggtttctaaactgagccagctgcagacggagctcctggcggccctgctsgagtcagggctgagcaaagaggcactgatccaggcactgggtgagccggggccctacctcctggctggagaaggccccctggacaagggggagtcctgcg

SEQ ID NO: 31984 - DNA, 201 bp, Homo sapiens
ggctcagagagggggaatgacttgccagagccacttaaattagtggcaggtcccagtggagggctgtttcctgaccaccctgccccctcctccaaaccackggctctgggaaggagaggtggtgcccttgggaggtcttgggcaggggtgggatataactggggggcccagctgattccctccccttccactccaggcctg

SEQ ID NO: 31985 - DNA, 201 bp, Homo sapiens
acagaagccaagctggtgagtgtccttgcttgtaaggaaaacccaacctcatctttccttggcagggagattctggagcagtccctagggaggccctgtgkggaccccggccccccggacacagcttggcttcccctcgtaggtctcagcagctgggggccccctcccccctgtcagcaccctgacagcactgcacagctt

SEQ ID NO: 31986 - DNA, 201 bp, Homo sapiens
gacagcccttgctgagcagatcccgtccttgccctctcccagggaggacccgtggcgtgtggcgaagatggtcaagtcctacctgcagcagcacaacatcmcacagcgggaggtggtcgataccactggcctcaaccagtcccacctgtcccaacacctcaacaagggcactcccatgaagacgcagaagcgggccgccct

SEQ ID NO: 31987 - DNA, 201 bp, Homo sapiens; identical to SEQ ID NO: 3925

SEQ ID NO: 31988 - DNA, 201 bp, Homo sapiens
gcacaacatcccacagcgggaggtggtcgataccactggcctcaaccagtcccacctgtcccaacacctcaacaagggcactcccatgaagacgcagaagygggccgccctgtacacctggtacgtccgcaagcagcgagaggtggcgcagcgtaagtaatgaccctaccccgcatcttccctgggagggcccaggactct

SEQ ID NO: 31989 - DNA, 201 bp, Homo sapiens
ccccactcacggctttctgtgcctgcagagttcacccatgcagggcagggagggctgattgaagagcccacaggtgatgagctaccaaccaagaaggggcrgaggaaccgtttcaagtggggcccagcatcccagcagatcctgttccaggcctatgagaggcagaagaaccctagcaaggaggagcgagagacgctagtg

SEQ ID NO: 31990 - DNA, 201 bp, Homo sapiens; identical to SEQ ID NO: 3948

SEQ ID NO: 31991 - DNA, 201 bp, Homo sapiens
gacgtgggaaggtgagagtggccagtaccccactcacggctttctgtgcctgcagagttcacccatgcagggcagggagggctgattgaagagcccacagrtgatgagctaccaaccaagaaggggcggaggaaccgtttcaagtggggcccagcatcccagcagatcctgttccaggcctatgagaggcagaagaaccct

SEQ ID NO: 31992 - DNA, 201 bp, Homo sapiens
cggctttctgtgcctgcagagttcacccatgcagggcagggagggctgattgaagagcccacaggtgatgagctaccaaccaagaaggggcggaggaaccrtttcaagtggggcccagcatcccagcagatcctgttccaggcctatgagaggcagaagaaccctagcaaggaggagcgagagacgctagtggaggagtgc

SEQ ID NO: 31993 - DNA, 201 bp, Homo sapiens
cccttctgcagtaaggagccctgccccgtccccgctcccaggagagcctagaggggcccccctcagctcctaacgagccccccttctgagttgagtccccrtgaccttcagcctttagcctagttgctgggaagggggacagggcccatgagagcccaggggtccttgcttggaggtttgagcctccagcccctgaactgc

SEQ ID NO: 31994 - DNA, 201 bp, Homo sapiens
tgagcagatcccgtccttgccctctcccagggaggacccgtggcgtgtggcgaagatggtcaagtcctacctgcagcagcacaacatcccacagcgggagrtggtcgataccactggcctcaaccagtcccacctgtcccaacacctcaacaagggcactcccatgaagacgcagaagcgggccgccctgtacacctggta

SEQ ID NO: 31995 - DNA, 201 bp, Homo sapiens
agctgcccaatgggctgggggagactcggggctccgaggacgagacggacgacgatggggaagacttcacgccacccatcctcaaagagctggagaacctyagccctgaggaggcggcccaccagaaagccgtggtggagacccttctgcagtaaggagccctgccccgtccccgctcccaggagagcctagaggggcccc

SEQ ID NO: 31996 - DNA, 201 bp, Homo sapiens
gctccaacctcgtcacggaggtgcgtgtctacaactggtttgccaaccggcgcaaagaagaagccttccggcacaagctggccatggacacgtacagcggsccccccccagggccaggcccgggacctgcgctgcccgctcacagctcccctggcctgcctccacctgccctctcccccagtaaggtccacggtaagtggt

SEQ ID NO: 31997 - DNA, 201 bp, Homo sapiens
cagccccacctatggggagagacagcccttgctgagcagatcccgtccttgccctctcccagggaggacccgtggcgtgtggcgaagatggtcaagtcctrcctgcagcagcacaacatcccacagcgggaggtggtcgataccactggcctcaaccagtcccacctgtcccaacacctcaacaagggcactcccatgaag

SEQ ID NO: 31998 - DNA, 201 bp, Homo sapiens
tggcctcaaccagtcccacctgtcccaacacctcaacaagggcactcccatgaagacgcagaagcgggccgccctgtacacctggtacgtccgcaagcagygagaggtggcgcagcgtaagtaatgaccctaccccgcatcttccctgggagggcccaggactctcccctaactcataggtgggggctggaagcttcacca

SEQ ID NO: 31999 - DNA, 201 bp, Homo sapiens
gaggaaccgtttcaagtggggcccagcatcccagcagatcctgttccaggcctatgagaggcagaagaaccctagcaaggaggagcgagagacgctagtgkaggagtgcaataggtacaacggcgggcgggaaacagtgctggtttggtctgggctgcggcaaggccagggaaggggaaggtgactctaggtcctgtaaaa

SEQ ID NO: 32000 - DNA, 201 bp, Homo sapiens
gcagagctcagcttctcagaaccctccccttcatgcccaggacagggttcctctgagcctggcctggaggctcatgggtggctatttctgcagggcggaabgcatccagagaggggtgtccccatcacaggcacaggggctgggctccaacctcgtcacggaggtgcgtgtctacaactggtttgccaaccggcgcaaaga

SEQ ID NO: 32001 - DNA, 201 bp, Homo sapiens
ggggagactcggggctccgaggacgagacggacgacgatggggaagacttcacgccacccatcctcaaagagctggagaacctcagccctgaggaggcggyccaccagaaagccgtggtggagacccttctgcagtaaggagccctgccccgtccccgctcccaggagagcctagaggggcccccctcagctcctaacgag

SEQ ID NO: 32002 - DNA, 201 bp, Homo sapiens
acggctttctgtgcctgcagagttcacccatgcagggcagggagggctgattgaagagcccacaggtgatgagctaccaaccaagaaggggcggaggaacygtttcaagtggggcccagcatcccagcagatcctgttccaggcctatgagaggcagaagaaccctagcaaggaggagcgagagacgctagtggaggagtg

SEQ ID NO: 32003 - DNA, 201 bp, Homo sapiens
gcctgggactagggctgtcaggcacgtctgccacgtctgcccctctctcccctgcggccagccctctacagccacaagcccgaggtggcccagtacacccrcacgggcctgctcccgcagactatgctcatcaccgacaccaccaacctgagcgccctggccagcctcacgcccaccaagcaggtaaggtccaggcctgct

SEQ ID NO: 32004 - DNA, 201 bp, Homo sapiens
gcacgtctgccacgtctgcccctctctcccctgcggccagccctctacagccacaagcccgaggtggcccagtacacccacacgggcctgctcccgcagaytatgctcatcaccgacaccaccaacctgagcgccctggccagcctcacgcccaccaagcaggtaaggtccaggcctgctggccctccctcggcctgtgac

SEQ ID NO: 32005 - DNA, 201 bp, Homo sapiens
ttctgtgcctgcagagttcacccatgcagggcagggagggctgattgaagagcccacaggtgatgagctaccaaccaagaaggggcggaggaaccgtttcmagtggggcccagcatcccagcagatcctgttccaggcctatgagaggcagaagaaccctagcaaggaggagcgagagacgctagtggaggagtgcaatag

SEQ ID NO: 32006 - DNA, 201 bp, Homo sapiens
tccaacctcgtcacggaggtgcgtgtctacaactggtttgccaaccggcgcaaagaagaagccttccggcacaagctggccatggacacgtacagcgggcsccccccagggccaggcccgggacctgcgctgcccgctcacagctcccctggcctgcctccacctgccctctcccccagtaaggtccacggtaagtggtat

SEQ ID NO: 32007 - DNA, 201 bp, Homo sapiens
gtacagcgggccccccccagggccaggcccgggacctgcgctgcccgctcacagctcccctggcctgcctccacctgccctctcccccagtaaggtccacrgtaagtggtatgtggggacaagggacacgtgggaaggtgggagggttggggaggactgtcccagtgacagcagtcacctaaacctctttgcacgtcagtt

SEQ ID NO: 32008 - DNA, 201 bp, Homo sapiens; identical to SEQ ID NO: 3933

SEQ ID NO: 32009 - DNA, 201 bp, Homo sapiens
cccacgcggtgggggaggcggctagcgtggtggacccgggccgcgtggccctgtggcagccgagccatggtttctaaactgagccagctgcagacggagcwcctggcggccctgctcgagtcagggctgagcaaagaggcactgatccaggcactgggtgagccggggccctacctcctggctggagaaggccccctggac

SEQ ID NO: 32010 - DNA, 201 bp, Homo sapiens; identical to SEQ ID NO: 3934

SEQ ID NO: 32011 - DNA, 201 bp, Homo sapiens
ccttgctgagcagatcccgtccttgccctctcccagggaggacccgtggcgtgtggcgaagatggtcaagtcctacctgcagcagcacaacatcccacagygggaggtggtcgataccactggcctcaaccagtcccacctgtcccaacacctcaacaagggcactcccatgaagacgcagaagcgggccgccctgtacac

SEQ ID NO: 32012 - DNA, 201 bp, Homo sapiens
agccacaagcccgaggtggcccagtacacccacacgggcctgctcccgcagactatgctcatcaccgacaccaccaacctgagcgccctggccagcctcasgcccaccaagcaggtaaggtccaggcctgctggccctccctcggcctgtgacagagcccctcacccccacatcccccgggctcaggaggctgctctgctc

SEQ ID NO: 32013 - DNA, 201 bp, Homo sapiens
cggcaggcaaacgcaacccacgcggtgggggaggcggctagcgtggtggacccgggccgcgtggccctgtggcagccgagccatggtttctaaactgagcyagctgcagacggagctcctggcggccctgctcgagtcagggctgagcaaagaggcactgatccaggcactgggtgagccggggccctacctcctggctgg

SEQ ID NO: 32014 - DNA, 201 bp, Homo sapiens
cccagcaccccgttctcctctggaaggaaccagagtccccagttccttgcgtgccctctggtattttacacgtgcacaaatatgtagaaatcctcttttamctcacttcaaattattcataagtagcagcacagcagacacaccagataaactctgctccacctgggcacacagagcttcctcagcggggttttttcagtg

SEQ ID NO: 32015 - DNA, 201 bp, Homo sapiens
tccagtgagtccgggcttcacacgccggcatctcaggccaccaccctccacgtccccagccaggaccctgccggcatccagcacctgcagccggcccaccrgctcagcgccagccccacaggtgagaggccctggctccaccccctcccttactgtccctgcccccttccatgttggtcccaccccttctgttgctgtccg

SEQ ID NO: 32016 - DNA, 201 bp, Homo sapiens
aggtgggagctgctcccctttcctgtatggccacaggcaccccacctcaccagcaggcgccattagaggctgcccgttctacatccccatccgctggcgghctccccgtctcctggagaactgggtgggtcctgagctcgatgcctcccctctcctcagcagagctgacctagttactaattacccatgtgctttattatt

SEQ ID NO: 32017 - DNA, 201 bp, Homo sapiens
ctccagtgagtccgggcttcacacgccggcatctcaggccaccaccctccacgtccccagccaggaccctgccggcatccagcacctgcagccggcccacsggctcagcgccagccccacaggtgagaggccctggctccaccccctcccttactgtccctgcccccttccatgttggtcccaccccttctgttgctgtcc

SEQ ID NO: 32018 - DNA, 201 bp, Homo sapiens
agggatcggaaaacgccctgagtgaaaaaagtggggcctccagcgtcagggtcaggaaaggagccagggagagaggggcgggggacccctattgaaggcctgggccattggggaggttgaggctgggaagacggtacagaggcagaatgtctagtagaagctgtttcccgggagaagtcagtgtctgggaagaagccgggg

SEQ ID NO: 32019 - DNA, 201 bp, Homo sapiens
agggaggacccgtggcgtgtggcgaagatggtcaagtcctacctgcagcagcacaacatcccacagcgggaggtggtcgataccactggcctcaaccagtyccacctgtcccaacacctcaacaagggcactcccatgaagacgcagaagcgggccgccctgtacacctggtacgtccgcaagcagcgagaggtggcgcag

SEQ ID NO: 32020 - DNA, 201 bp, Homo sapiens
gagacagcccttgctgagcagatcccgtccttgccctctcccagggaggacccgtggcgtgtggcgaagatggtcaagtcctacctgcagcagcacaacawcccacagcgggaggtggtcgataccactggcctcaaccagtcccacctgtcccaacacctcaacaagggcactcccatgaagacgcagaagcgggccgcc

SEQ ID NO: 32021 - DNA, 201 bp, Homo sapiens
ctccccatcctgagtacccctagggacaggcaggtggggtgggtgtgggtgcctggtgggtggctagcagccttgtttgcctctgcagtgtcctccagcakcctggtgctgtaccagagctcagactccagcaatggccagagccacctgctgccatccaaccacagcgtcatcgagaccttcatctccacccagatggcc

SEQ ID NO: 32022 - DNA, 201 bp, Homo sapiens
ggaggacccgtggcgtgtggcgaagatggtcaagtcctacctgcagcagcacaacatcccacagcgggaggtggtcgataccactggcctcaaccagtccyacctgtcccaacacctcaacaagggcactcccatgaagacgcagaagcgggccgccctgtacacctggtacgtccgcaagcagcgagaggtggcgcagcg

SEQ ID NO: 32023 - DNA, 201 bp, Homo sapiens
cgctatggacagcctgcgaccagtgagactgcagaagtaccctcaagcagcggcggtcccttagtgacagtgtctacacccctccaccaagtgtcccccaygggcctggagcccagccacagcctgctgagtacagaagccaagctggtgagtgtccttgcttgtaaggaaaacccaacctcatctttccttggcagggag

SEQ ID NO: 32024 - DNA, 201 bp, Homo sapiens
cacaacatcccacagcgggaggtggtcgataccactggcctcaaccagtcccacctgtcccaacacctcaacaagggcactcccatgaagacgcagaagcrggccgccctgtacacctggtacgtccgcaagcagcgagaggtggcgcagcgtaagtaatgaccctaccccgcatcttccctgggagggcccaggactctc

SEQ ID NO: 32025 - DNA, 201 bp, Homo sapiens
tgtttgcctctgcagtgtcctccagcagcctggtgctgtaccagagctcagactccagcaatggccagagccacctgctgccatccaaccacagcgtcatsgagaccttcatctccacccagatggcctcttcctcccagtaaccacggcacctgggccctggggcctgtactgcctgcttggggggtgatgagggcagca

SEQ ID NO: 32026 - DNA, 201 bp, Homo sapiens; identical to SEQ ID NO: 4053

SEQ ID NO: 32027 - DNA, 201 bp, Homo sapiens; identical to SEQ ID NO: 4055

SEQ ID NO: 32028 - DNA, 201 bp, Homo sapiens; identical to SEQ ID NO: 4056

SEQ ID NO: 32029 - DNA, 201 bp, Homo sapiens
tacacaaggacaacagagaaaactgtccttctcactcccatccccagcaccccgttctcctctggaaggaaccagagtccccagttccttgcgtgccctcyggtattttacacgtgcacaaatatgtagaaatcctcttttacctcacttcaaattattcataagtagcagcacagcagacacaccagataaactctgctc

SEQ ID NO: 32030 - DNA, 201 bp, Homo sapiens
ctgttatctgctgtgatccaggaggtgtggccctgcctccccatcctgagtacccctagggacaggcaggtggggtgggtgtgggtgcctggtgggtggcyagcagccttgtttgcctctgcagtgtcctccagcagcctggtgctgtaccagagctcagactccagcaatggccagagccacctgctgccatccaaccac

SEQ ID NO: 32031 - DNA, 201 bp, Homo sapiens
ccaggtcttcacctcagacactgaggcctccagtgagtccgggcttcacacgccggcatctcaggccaccaccctccacgtccccagccaggaccctgccrgcatccagcacctgcagccggcccaccggctcagcgccagccccacaggtgagaggccctggctccaccccctcccttactgtccctgcccccttccatg

SEQ ID NO: 32032 - DNA, 201 bp, Homo sapiens
gtcagggttctccaggaacacagaaccaacagatttatttgaaggacttggcccgtgtctgcggggggctggcaggcctgaaatctgttgctggcagctcyggggagtgaattctgcagccttgaggcagaattccttctctgggaaaccggtttttgctcttacggccttccactgatgtaggaggcccacccatatttt

SEQ ID NO: 32033 - DNA, 201 bp, Homo sapiens
gaagaaaaacagagtttataagaaaaattagatgcctttaccctaaagcagccactggaattcccagactcttgtgtatccttccagagagattttctgcrtatagtagcaatagatatgttattttcttgctctttttctgattaatgggaacatactagacacactattttacatgttgtgttttgtctcttggcaata

SEQ ID NO: 32034 - DNA, 201 bp, Homo sapiens
ggttcctctgagcctggcctggaggctcatgggtggctatttctgcagggcggaatgcatccagagaggggtgtccccatcacaggcacaggggctgggcwccaacctcgtcacggaggtgcgtgtctacaactggtttgccaaccggcgcaaagaagaagccttccggcacaagctggccatggacacgtacagcgggcc

SEQ ID NO: 32035 - DNA, 201 bp, Homo sapiens
cccttccactccaggcctggcctccacgcaggcacagagtgtgccggtcatcaacagcatgggcagcagcctgaccaccctgcagcccgtccagttctccyagccgctgcacccctcctaccagcagccgctcatgccacctgtgcagagccatgtgacccagagccccttcatggccaccatggctcagctgcagagccc

SEQ ID NO: 32036 - DNA, 201 bp, Homo sapiens
ggcacaccgtctacttcctagggttataagatgtaagtggccagtcctcagcacggtgcctggctcacagtaaatcctcaagaaacatgagttctcagacttttttttttttttttttgagacaggatttcactctgtcgccaaggctggagtgcagtggcgcgatcacagctcattgcagccccgacctctcgggctcaa

SEQ ID NO: 32037 - DNA, 201 bp, Homo sapiens
ctggcctggaggctcatgggtggctatttctgcagggcggaatgcatccagagaggggtgtccccatcacaggcacaggggctgggctccaacctcgtcayggaggtgcgtgtctacaactggtttgccaaccggcgcaaagaagaagccttccggcacaagctggccatggacacgtacagcgggccccccccagggcca

SEQ ID NO: 32038 - DNA, 201 bp, Homo sapiens
gaggctcatgggtggctatttctgcagggcggaatgcatccagagaggggtgtccccatcacaggcacaggggctgggctccaacctcgtcacggaggtgygtgtctacaactggtttgccaaccggcgcaaagaagaagccttccggcacaagctggccatggacacgtacagcgggccccccccagggccaggcccggg

SEQ ID NO: 32039 - DNA, 201 bp, Homo sapiens
taccagatggcagggccaggactcgaacccaggtcccacctcaaagcccattctcttaaccattgccatcagtcagggttctccaggaacacagaaccaayagatttatttgaaggacttggcccgtgtctgcggggggctggcaggcctgaaatctgttgctggcagctccggggagtgaattctgcagccttgaggcag

SEQ ID NO: 32040 - DNA, 201 bp, Homo sapiens
tttctggcatcttttggaaaattggaaaaattcatattcccatataacagtgcaccaggcctcactgcatccactcacatcggctccaatgacccctggcrgtggggcggtcacctgagtttgtaatctatgatgccattgtcaggagtgggcactttggagtcaggtgggtgggctttgcagcctgcctttttgcaagct

SEQ ID NO: 32041 - DNA, 201 bp, Homo sapiens
ctcccgcagactatgctcatcaccgacaccaccaacctgagcgccctggccagcctcacgcccaccaagcaggtaaggtccaggcctgctggccctccctyggcctgtgacagagcccctcacccccacatcccccgggctcaggaggctgctctgctcccccaggtcttcacctcagacactgaggcctccagtgagtcc

SEQ ID NO: 32042 - DNA, 201 bp, Homo sapiens; identical to SEQ ID NO: 3920

SEQ ID NO: 32043 - DNA, 201 bp, Homo sapiens
gagctctagtgccaatcttaaggaaatcttttggtttcagacctttttggaatttgggactgggttaagagatttggggcctgtgtatgtctgtgtgtacmtggttgagagtgtatgcgtgtgtgtgtgttacatttttatctgagtcactgtgagaatatgtggtttatgtgcgttttcctagtgtctgtgtgtctcttg

SEQ ID NO: 32044 - DNA, 201 bp, Homo sapiens; identical to SEQ ID NO: 3970

SEQ ID NO: 32045 - DNA, 201 bp, Homo sapiens; identical to SEQ ID NO: 3971
  misc_feature (1)...(201): n = A,T,C or G, or insertion/deletion polymorphism (see Tables 1-2)

SEQ ID NO: 32046 - DNA, 201 bp, Homo sapiens
cagggagagaggggcgggggacccctattgaaggcctgggccattggggaggttgaggctgggaagacggtacagaggcagaatgtctagtagaagctgtytcccgggagaagtcagtgtctgggaagaagccggggtgggtcctgggtcccaggcctccctggggtgccccatgttggtggccacagcaggaacctgagc

SEQ ID NO: 32047 - DNA, 201 bp, Homo sapiens
gggggcccagctgattccctccccttccactccaggcctggcctccacgcaggcacagagtgtgccggtcatcaacagcatgggcagcagcctgaccaccytgcagcccgtccagttctcccagccgctgcacccctcctaccagcagccgctcatgccacctgtgcagagccatgtgacccagagccccttcatggccac

SEQ ID NO: 32048 - DNA, 201 bp, Homo sapiens
cgtggccaagggagaaactgggacccagagttccttcctgggtgtcctcccgggtcctttctgtccctgatcagctcaaaccccagcgtgtttcttttttkttgttgttgttgttatttttgagacggagtctcactctgtcggcccggctggagtgcatggcgcgatctcggctcactgcaagctctgcctcctgggttc

SEQ ID NO: 32049 - DNA, 201 bp, Homo sapiens
caattcaattcatttcaattcaactaaattcagttaaattcagttcagttgtcttctactgagcacctactgcatgtcaggtatagcactaggcagtgggrggaatggagctaataaatgcagtcccagccttcaaggaactgggagcagctgacccagggcttggcaaaaggtagaaacaaaggcagatttgctggctgc

SEQ ID NO: 32050 - DNA, 201 bp, Homo sapiens
gccactgccctcagccttcaaaccccaatcttgaagtattctgatcctgcccatcaggcagcatcagggcactgagactcaggaaaacagtagccacggcrggagggggcggggacagaggatctgacgtccccaacaaaagccagactgcctgcatcctaatcctagctctgcccctttctagcttgagcaggtgatttt

SEQ ID NO: 32051 - DNA, 201 bp, Homo sapiens
actgccctcagccttcaaaccccaatcttgaagtattctgatcctgcccatcaggcagcatcagggcactgagactcaggaaaacagtagccacggcaggrgggggcggggacagaggatctgacgtccccaacaaaagccagactgcctgcatcctaatcctagctctgcccctttctagcttgagcaggtgattttata

SEQ ID NO: 32052 - DNA, 201 bp, Homo sapiens
acgtctgccacgtctgcccctctctcccctgcggccagccctctacagccacaagcccgaggtggcccagtacacccacacgggcctgctcccgcagactrtgctcatcaccgacaccaccaacctgagcgccctggccagcctcacgcccaccaagcaggtaaggtccaggcctgctggccctccctcggcctgtgacag

SEQ ID NO: 32053 - DNA, 201 bp, Homo sapiens
caacatggcaaggttcctcctctaaaaaagaaagaaaggaaagatgataggaaagggaggaaagataggaaagggaggaaagataggaaagggaggaaagrtaggaaagggaggaaaggtaggaaagggaggaaggaaggaaggaaggaaaagaaaagaaagaaaaagaacgagagaaagaaagaaaggcaatacacattt

SEQ ID NO: 32054 - DNA, 201 bp, Homo sapiens
gaggtgggaggactgtttgagcccccaggggttcggctccaacctggacaacatggcaaggttcctcctctaaaaaagaaagaaaggaaagatgataggaragggaggaaagataggaaagggaggaaagataggaaagggaggaaaggtaggaaagggaggaaaggtaggaaagggaggaaggaaggaaggaaggaaaag

SEQ ID NO: 32055 - DNA, 201 bp, Homo sapiens
cctttctgtccctgatcagctcaaaccccagcgtgtttcttttttgttgttgttgttgttatttttgagacggagtctcactctgtcggcccggctggagygcatggcgcgatctcggctcactgcaagctctgcctcctgggttcacgccattctcctgcctcagcctcccgagtagctgggattacaggcatgcaccac

SEQ ID NO: 32056 - DNA, 201 bp, Homo sapiens
ggggaggggaggcatcaggcagcctggctctaggatcagataaacatgtttgccacagagcaccaggctggactttgtactgcccttccttctgagctctvagcagggagatgaaggagagaggatcctaggagccccggaaagaagggagagagagaagctggggagaggcctgcgggggtggggtggtcctggcaacat

SEQ ID NO: 32057 - DNA, 201 bp, Homo sapiens
ggaatcacgcagacccaagttcaaatcccagtctgcctgtttcagtgctgctgtattgagctgtatttatctgtaactttttgtttgtttgtttgtttttygagacagagtctcactctgttgcccaggctggaatgcagtggcgcgatctcggctcactgcaacctctgcctcccgggttcaagcaatcctcctgcctca

SEQ ID NO: 32058 - DNA, 201 bp, Homo sapiens
acgcagacccaagttcaaatcccagtctgcctgtttcagtgctgctgtattgagctgtatttatctgtaactttttgtttgtttgtttgttttttgagacrgagtctcactctgttgcccaggctggaatgcagtggcgcgatctcggctcactgcaacctctgcctcccgggttcaagcaatcctcctgcctcagcctcc

SEQ ID NO: 32059 - DNA, 201 bp, Homo sapiens
gcatggtggtgtgccataatctcagctactgaggaggctgaggtgggaggactgtttgagcccccaggggttcggctccaacctggacaacatggcaaggktcctcctctaaaaaagaaagaaaggaaagatgataggaaagggaggaaagataggaaagggaggaaagataggaaagggaggaaaggtaggaaagggagg

SEQ ID NO: 32060 - DNA, 201 bp, Homo sapiens
gcctctgcagtgtcctccagcagcctggtgctgtaccagagctcagactccagcaatggccagagccacctgctgccatccaaccacagcgtcatcgagaycttcatctccacccagatggcctcttcctcccagtaaccacggcacctgggccctggggcctgtactgcctgcttggggggtgatgagggcagcagccag

SEQ ID NO: 32061 - DNA, 201 bp, Homo sapiens
gtttgttttttgagacagagtctcactctgttgcccaggctggaatgcagtggcgcgatctcggctcactgcaacctctgcctcccgggttcaagcaatcytcctgcctcagcctcccgagtagccgggattacaggcacctgccacaatatctgacttattttttatttttattatttttttcgtagagatggttttctc

SEQ ID NO: 32062 - DNA, 201 bp, Homo sapiens; identical to SEQ ID NO: 3997

SEQ ID NO: 32063 - DNA, 201 bp, Homo sapiens
cttgctgagcagatcccgtccttgccctctcccagggaggacccgtggcgtgtggcgaagatggtcaagtcctacctgcagcagcacaacatcccacagcrggaggtggtcgataccactggcctcaaccagtcccacctgtcccaacacctcaacaagggcactcccatgaagacgcagaagcgggccgccctgtacacc

SEQ ID NO: 32064 - DNA, 201 bp, Homo sapiens
ccgggttcaagcaatcctcctgcctcagcctcccgagtagccgggattacaggcacctgccacaatatctgacttattttttatttttattatttttttcrtagagatggttttctccatgttggccaggctggtcttgaactcctaacctcaaaagacccgcccaccttggcctcccaaagtgctgggattacaggtgtg

SEQ ID NO: 32065 - DNA, 201 bp, Homo sapiens
agcacaacatcccacagcgggaggtggtcgataccactggcctcaaccagtcccacctgtcccaacacctcaacaagggcactcccatgaagacgcagaakcgggccgccctgtacacctggtacgtccgcaagcagcgagaggtggcgcagcgtaagtaatgaccctaccccgcatcttccctgggagggcccaggactc

SEQ ID NO: 32066 - DNA, 201 bp, Homo sapiens
aggagaggaggagagaaaatttatatggctcaggcagtctgatcccttctgttcccccacagggagacccacagcagagacatgactcacaggtggcatcrggtccctttgagtctctctggtgggagaatctcaacccacagagtaggattccagtgttcacatgcatttttggtactatgaggcctctgaatgtcaacc

SEQ ID NO: 32067 - DNA, 201 bp, Homo sapiens; identical to SEQ ID NO: 3947

SEQ ID NO: 32068 - DNA, 201 bp, Homo sapiens
cggtggctcacgccagtaatcccagcactttgggaggccgaggcaggcagatcacaagatcaggagatcgagaccatcctggctaacacggtgaaaccccrtctctactaaaaatacaaaaaaattagccgggcgtggtggcgggtgcctgtaggcccagctacttgggaggctgaggcaggagaacggcatgaacccagg

SEQ ID NO: 32069 - DNA, 201 bp, Homo sapiens
tgtcaggcacgtctgccacgtctgcccctctctcccctgcggccagccctctacagccacaagcccgaggtggcccagtacacccacacgggcctgctccygcagactatgctcatcaccgacaccaccaacctgagcgccctggccagcctcacgcccaccaagcaggtaaggtccaggcctgctggccctccctcggcc

SEQ ID NO: 32070 - DNA, 201 bp, Homo sapiens
aaaaaaagaaaaagaaaagaaaaaccagccgcctgttctggtgctgcagggaaacaggcctggccacagccaagggtgcagattttcaggaagcatttttwaaaaaatatatatatatacacacatatatatatatacagagagagagaagccactgaggcccacagaatttgcatcattttattccttgtccaaggtcac

SEQ ID NO: 32071 - DNA, 201 bp, Homo sapiens
ctggtacgtccgcaagcagcgagaggtggcgcagcgtaagtaatgaccctaccccgcatcttccctgggagggcccaggactctcccctaactcataggtsggggctggaagcttcaccatccccattacacagacaggtagatggaaaggaagtcagtgggattcaacctgcatttattacctattctgcgccaggcact

SEQ ID NO: 32072 - DNA, 201 bp, Homo sapiens
agtgagccgagatcgcgccactgcactcgagcctgggtgacagagtgagactccatctcaaaaaaaaaaaaaaaaaagaaaaagaaaagaaaaaccagccwcctgttctggtgctgcagggaaacaggcctggccacagccaagggtgcagattttcaggaagcatttttaaaaaaatatatatatatacacacatatata

SEQ ID NO: 32073 - DNA, 201 bp, Homo sapiens
tgtaggcccctgggctccataactgctttcatgcacagtccccaccctcagagttgacaaggttccagcacccaggaccgcagccccacctatggggagaracagcccttgctgagcagatcccgtccttgccctctcccagggaggacccgtggcgtgtggcgaagatggtcaagtcctacctgcagcagcacaacatcc

SEQ ID NO: 32074 - DNA, 201 bp, Homo sapiens
ggacagggttcctctgagcctggcctggaggctcatgggtggctatttctgcagggcggaatgcatccagagaggggtgtccccatcacaggcacaggggmtgggctccaacctcgtcacggaggtgcgtgtctacaactggtttgccaaccggcgcaaagaagaagccttccggcacaagctggccatggacacgtacag

SEQ ID NO: 32075 - DNA, 201 bp, Homo sapiens
ccctgtgtcctggcataaatgaccatacctcaccgtccctgagtctatgtgtaggcccctgggctccataactgctttcatgcacagtccccaccctcagrgttgacaaggttccagcacccaggaccgcagccccacctatggggagagacagcccttgctgagcagatcccgtccttgccctctcccagggaggacccg

SEQ ID NO: 32076 - DNA, 201 bp, Homo sapiens
gggcttacaaaatgcgctaagctcattttttcctcctccccatctctgaagtctgaaatatcattagccccatttcacagatgcggaaactgaggcacacrgaggttaagcaaagaatcaaggccaggtctaaagcccccacactgagaagtcagctcccctccagatgtggagatgaataccacaaccttgcatgccctg

SEQ ID NO: 32077 - DNA, 201 bp, Homo sapiens
aaaaaccagccgcctgttctggtgctgcagggaaacaggcctggccacagccaagggtgcagattttcaggaagcatttttaaaaaaatatatatatatayacacatatatatatatacagagagagagaagccactgaggcccacagaatttgcatcattttattccttgtccaaggtcacaggacaagcagagtcccac

SEQ ID NO: 32078 - DNA, 201 bp, Homo sapiens
ctgcccctttctagcttgagcaggtgattttatacttctgagcctcagtttcgtctgcagggtagagatgacaatagcccttgtccacagggttaaatggyatggcacttgtagagtaaacatgtagtaactgcaatatacagcagttattattagtgatcccattttacagatgagcaaattaaggctgagagaggcagt

SEQ ID NO: 32079 - DNA, 201 bp, Homo sapiens
cagcaggtctccttcgtccatccatccatcatccatctacccacccacccaccaatccatccatccattcatccaaccatccatccatccatcatccatcyacccacccacccaccaatccatccatccattcatccaaccatccatccatccatcatccatctacccacccacccaccaatccatccatccattcatcca

SEQ ID NO: 32080 - DNA, 201 bp, Homo sapiens
tccattcatccaaccatccatccatccatcatccatctacccacccacccaccaatccatccatccattcatccaaccatccatccatccatcatccatcyacccacccacccaccaatccatccatccattcatccaaccatccatccatccatcatccatctacccacccacccaccaatccatccatccattcatcca

SEQ ID NO: 32081 - DNA, 201 bp, Homo sapiens
tccattcatccaaccatccatccatccatcatccatctacccacccacccaccaatccatccatccattcatccaaccatccatccatccatcatccatcyacccacccacccaccaatccatccatccattcatccaaccatccatccatccatcatccatccacccatctatctgtccatccactctaccctaccatcc

SEQ ID NO: 32082 - DNA, 201 bp, Homo sapiens
accaccatgcctggctaattttttgtagttttagtagagacgggggtttcaccatgttggccaggctggtctcgaactcctgacctcaggtgatccacccrcctcagcctcccaaagtgctgggattacaggcgtgagccaccatacccggcctgggtccctgctttctcagagcccatggttaagtgggaaagtgggaga

SEQ ID NO: 32083 - DNA, 201 bp, Homo sapiens; identical to SEQ ID NO: 32003

SEQ ID NO: 32084 - DNA, 201 bp, Homo sapiens; identical to SEQ ID NO: 32004

SEQ ID NO: 32085 - DNA, 201 bp, Homo sapiens
gcattcctaaagtaggtgtcaaggatacaacctgtttgagtccatatgggctgctataacaaaataacataaactgggtagcttataaacaaaataaatgkatttctcacattttggaggctgagaagtccaagatcaaggcaccagcagattcagtgtctggggagagccctcttcccagtacagatggcgccttcctac

SEQ ID NO: 32086 - DNA, 201 bp, Homo sapiens
gggtaccctctcgttgcagcagtgaggacagtgacgaggagtggcggcggtgccgggaggcagctgtgtcggcgtccgacatcctacaggagtcagccatycacagccctggaacagtggagaaggaggcaaagaagaaaaggaagttgaaaaagaaagccaagaaggtggccagtgtcgactcggctgtcgctgccacca

SEQ ID NO: 32087 - DNA, 201 bp, Homo sapiens
ctgctgccctcatcaccccccaagcaggcagtacaggccccagggcccaggtgccgtggttactgggaggaagaggccatctgggtggagatgaaggtctygatgacgctgtggttggatggcagcaggtggctctggccattgctggagtctgagctctggtacagcaccaggctgctggaggacactgcagaggcaaac

SEQ ID NO: 32088 - DNA, 201 bp, Homo sapiens
taagggagggggtggagccagggcctctcacctgtggggctggcgctgagccggtgggccggctgcaggtgctggatgccggcagggtcctggctggggaygtggagggtggtggcctgagatgccggcgtgtgaagcccggactcactggaggcctcagtgtctgaggtgaagacctgggggagcagagcagcctcctga

SEQ ID NO: 32089 - DNA, 201 bp, Homo sapiens
ccctcatcaccccccaagcaggcagtacaggccccagggcccaggtgccgtggttactgggaggaagaggccatctgggtggagatgaaggtctcgatgaygctgtggttggatggcagcaggtggctctggccattgctggagtctgagctctggtacagcaccaggctgctggaggacactgcagaggcaaacaaggct

SEQ ID NO: 32090 - DNA, 201 bp, Homo sapiens
agtcccagtggctcttccagctcctggattctgcggttgccccatgagcctcccacccaggtgcccacccatccccaccagcttaccgatgaccagggtgsaggcacctgtgttggtgaacgtaggacccagggaggcaggctcaccaggcccgatggtcatgaccccaggaagtgaggccatgatgaggttctggggctg

SEQ ID NO: 32091 - DNA, 201 bp, Homo sapiens
atgagtcccagtggctcttccagctcctggattctgcggttgccccatgagcctcccacccaggtgcccacccatccccaccagcttaccgatgaccaggrtggaggcacctgtgttggtgaacgtaggacccagggaggcaggctcaccaggcccgatggtcatgaccccaggaagtgaggccatgatgaggttctgggg

SEQ ID NO: 32092 - DNA, 201 bp, Homo sapiens
  misc_feature (1)...(201): n = A,T,C or G, or insertion/deletion polymorphism (see Tables 1-2)
gctatacctgcaaactgaacccagccatgggcacagggctcagccagctccaaggacaaggtgtcccccccaccctggggacaaggcatttccaagccccmcctccctctccaagttcaaggactgggctggcaaacccagactgcccatgagaccctgatggtgatgaaggcttgctcgagagttgggccaaaaaannnn

SEQ ID NO: 32093 - DNA, 201 bp, Homo sapiens
ctgggttcgagtcctggccctgccatctggtagctgtgggagatgaggcaagtccctcccctccttgagtgtccactttctcatctgtaaaatgggggtgrtcatggacacgcctcatggggtgaatgccaggacacagaatggcctcagtggctgtcatgacagctgccagggccgggtccaggaaccttatagaaaggg

SEQ ID NO: 32094 - DNA, 201 bp, Homo sapiens; identical to SEQ ID NO: 32012

SEQ ID NO: 32095 - DNA, 201 bp, Homo sapiens
cggacagcaacagaaggggtgggaccaacatggaagggggcagggacagtaagggagggggtggagccagggcctctcacctgtggggctggcgctgagcyggtgggccggctgcaggtgctggatgccggcagggtcctggctggggacgtggagggtggtggcctgagatgccggcgtgtgaagcccggactcactgga

SEQ ID NO: 32096 - DNA, 201 bp, Homo sapiens
ggacagcaacagaaggggtgggaccaacatggaagggggcagggacagtaagggagggggtggagccagggcctctcacctgtggggctggcgctgagccsgtgggccggctgcaggtgctggatgccggcagggtcctggctggggacgtggagggtggtggcctgagatgccggcgtgtgaagcccggactcactggag

SEQ ID NO: 32097 - DNA, 201 bp, Homo sapiens
ggccatctgggtggagatgaaggtctcgatgacgctgtggttggatggcagcaggtggctctggccattgctggagtctgagctctggtacagcaccaggmtgctggaggacactgcagaggcaaacaaggctgctagccacccaccaggcacccacacccaccccacctgcctgtccctaggggtactcaggatggggag

SEQ ID NO: 32098 - DNA, 201 bp, Homo sapiens
ctccctgccaaggaaagatgaggttgggttttccttacaagcaaggacactcaccagcttggcttctgtactcagcaggctgtggctgggctccaggcccrtgggggacacttggtggaggggtgtagacactgtcactaagggaccgccgctgcttgagggtacttctgcagtctcactggtcgcaggctgtccatagcg

SEQ ID NO: 32099 - DNA, 201 bp, Homo sapiens
gtgttaggtcagtgtctctcaaccttggcgctactgacatctttgactagcatttgtcgtgggggtctatccttcttcccattataggatgtttaccaacrtccctggcctctacctactagatgatagtagcactcaccccaccagttgtgacatccaaaaatgtctccagacattgccaaatgcccctgatggccacca

SEQ ID NO: 32100 - DNA, 201 bp, Homo sapiens
tctactccctctccccgggttgcttttcctgaacagggcttggggggcacctttggcatacaggaagggaggttagggaaagcacccagggcattgctgcrtctgcctcgagggcattgctgagagccttgttctctgctgtgcacagtggcatctccatctgcactcaccagacacatgcttcctggccttgtgcctcta

SEQ ID NO: 32101 - DNA, 201 bp, Homo sapiens
ggaccaggagctcctgagggcagaggcggggcagcttcagcacctggcacctgggaggaggggctggcatctgggggtgctgactctgctcctttgttttytttgtttgtttgcttggttgggtttttttgttattgtttcttttttaaatttttttattttgtgtcttcttaaaattttttttttgtttctctttatctt

SEQ ID NO: 32102 - DNA, 201 bp, Homo sapiens; identical to SEQ ID NO: 4095

SEQ ID NO: 32103 - DNA, 201 bp, Homo sapiens; identical to SEQ ID NO: 4097

SEQ ID NO: 32104 - DNA, 201 bp, Homo sapiens
tgctgccctcatcaccccccaagcaggcagtacaggccccagggcccaggtgccgtggttactgggaggaagaggccatctgggtggagatgaaggtctcsatgacgctgtggttggatggcagcaggtggctctggccattgctggagtctgagctctggtacagcaccaggctgctggaggacactgcagaggcaaaca

SEQ ID NO: 32105 - DNA, 201 bp, Homo sapiens
aagccaggagagccctgcctgccttccctgttagcttcggcctccctgggctcaggcgttagagccccaggctctggcacagagtagccacccaggaaatkcctgtgtgagtaggtgatggggtcagtacaaatggcatgtgggtcactagctggaaggagttggggcaggaaggagtggcccggtgggtacattggtgac

SEQ ID NO: 32106 - DNA, 201 bp, Homo sapiens
gtggttggatggcagcaggtggctctggccattgctggagtctgagctctggtacagcaccaggctgctggaggacactgcagaggcaaacaaggctgctrgccacccaccaggcacccacacccaccccacctgcctgtccctaggggtactcaggatggggaggcagggccacacctcctggatcacagcagataacag

SEQ ID NO: 32107 - DNA, 201 bp, Homo sapiens
ttttctcctcttctgtcttggtgggttccctggaatagccaagcagactccagtcaggaccaggccaaggcagtggccctgtcaggcagctggagaaatcrtgagctcagcgggagggaaagccctcttggcggcagctttggatgtttactgcttttgagcacctgtcttgggccagacacctcacttgatcatagttgc

SEQ ID NO: 32108 - DNA, 201 bp, Homo sapiens
catggaagggggcagggacagtaagggagggggtggagccagggcctctcacctgtggggctggcgctgagccggtgggccggctgcaggtgctggatgcyggcagggtcctggctggggacgtggagggtggtggcctgagatgccggcgtgtgaagcccggactcactggaggcctcagtgtctgaggtgaagacctgg

SEQ ID NO: 32109 - DNA, 201 bp, Homo sapiens
ctcgatctcttgacctcgtgatccgcctgcctcagcctcccaaagtgctgggattacaggcgtgagccaccgcgcccggccttgactccatcttaaaagtkcatctatctggagttcacccacttctcaccacatcaattactgcagcagactccgtgttcctgcctttgccccaacagtctcacgctgcacagcagccaa

SEQ ID NO: 32110 - DNA, 201 bp, Homo sapiens
tagagacagggtttcaccgtgttggccaggctggtctcgaacttatgacctcaggtgatccgcccaccttggcctcccaaagtgctgagattacaggcatragccaccacacccagcctagattacattcttgagtgcgtctagtaatagccaccaggagttgagaattttctttttgcccctgttctaaacactttgtat

SEQ ID NO: 32111 - DNA, 201 bp, Homo sapiens
tctatcttatgtactgggcttctgcataattgtacctgcaaataagggctttctgggcttaatttttcttcataaaacaaaaacttagaaaacatcagtcycccttaccctgctgtaatttgcccatagacccttcaccttctgaggtaccacagaattgatgtattatgcttagtgcctgcctccctgcttgagttgctg

SEQ ID NO: 32112 - DNA, 201 bp, Homo sapiens
atggtgagtggttatacttaatagaagctatcatttattaagcacctaatgtgtgtctggaggtgggcgaaacagttttggtatattcttttttttttttytttttttgagataggaactctctctgccacctaggctggagtgcagtggagcaattatagctcaatgcagcctcaacctcccggacccaagcagtcctcc

SEQ ID NO: 32113 - DNA, 201 bp, Homo sapiens
gtgattctcctgcctcagcctccctagtagctgggattacaggcgcctgccaccacgcccagctaattttttgtatttttagtacagacagggtttcaccrtgttggccaggctggtctcaaactccagacctcaggcaatccacctgcctcggccttccaaagtgctgggattacaggtgtgagccaccgcgcctggtct

SEQ ID NO: 32114 - DNA, 201 bp, Homo sapiens
tctcaaccttcaaagtgctgagattacaggtgtgagccactgtgctcggcttctagttttttttgtttgtttgtttgttttttggggttttttttttttttgcatttttttttttttgagatggagtttcactcttgttgcccaggctgcagtgcaatggcacgatctcagctcactgcaacctctgcctcctgggttcaa

SEQ ID NO: 32115 - DNA, 201 bp, Homo sapiens
ctaaaaagcagcagcagctggaattccaaggccaagtcctgcaggactggttgggtctggggatctatggcatccaagacagtgacactctcatcctctcraagaagaaaggagaggctctgtttccagccagttagttttctctgggagacttctctgtacatttctgccatgtactccagaactcatcctgtcaatcac

SEQ ID NO: 32116 - DNA, 201 bp, Homo sapiens
cacagcagccaaagatgttctgtcaaaacccaggtcagtttatgtcccttctctgctcatttccagagctcctcctcctcaaagtccaggtcctcccattrgcccacgtcagggcccttcatgatctggcccctctgagttctccatctctgctgctcccggtttactgggcaggctctggtcacactgacctccttgctg

SEQ ID NO: 32117 - DNA, 201 bp, Homo sapiens
gggctctgcagctgagccatggtggccatgaaggggctctgggtcacatggctctgcacaggtggcatgagcggctgctggtaggaggggtgcagcggctrggagaactggacgggctgcagggtggtcaggctgctgcccatgctgttgatgaccggcacactctgtgcctgcgtggaggccaggcctggagtggaaggg

SEQ ID NO: 32118 - DNA, 201 bp, Homo sapiens
agcttgcaaaaaggcaggctgcaaagcccacccacctgactccaaagtgcccactcctgacaatggcatcatagattacaaactcaggtgaccgccccacygccaggggtcattggagccgatgtgagtggatgcagtgaggcctggtgcactgttatatgggaatatgaatttttccaattttccaaaagatgccagaaa

SEQ ID NO: 32119 - DNA, 201 bp, Homo sapiens
ttttgtttttgtttgactctgccccattgaatcttaggtttccgccttttcttcacatctgtccctggaggccgtgagaaggaagagtctccccaaccccsccgaaagcgacagccctccagctccaggtgagaactcacacctctcctcacgtcccctccttttttctcctcttctgtcttggtgggttccctggaatag

SEQ ID NO: 32120 - DNA, 201 bp, Homo sapiens
gtgggagctacgcctatgccatcaaccccaacagcttcatcctgggtctgaagcagcagattgaagaccagcaggggcttcctaaaaagcagcagcagctsgaattccaaggccaagtcctgcaggactggttgggtctggggatctatggcatccaagacagtgacactctcatcctctcgaagaagaaaggagaggctc

SEQ ID NO: 32121 - DNA, 201 bp, Homo sapiens
  misc_feature (1)...(201): n = A,T,C or G, or insertion/deletion polymorphism (see Tables 1-2)
atccattgacagccaacctctatcatcatctcctgctgtgtggggcacagggcgctcaccgtgggggctctgcagctgagccatggtggccatgaaggggntctgggtcacatggctctgcacaggtggcatgagcggctgctggtaggaggggtgcagcggctgggagaactggacgggctgcagggtggtcaggctgct

SEQ ID NO: 32122 - DNA, 201 bp, Homo sapiens
gtggccatgaaggggctctgggtcacatggctctgcacaggtggcatgagcggctgctggtaggaggggtgcagcggctgggagaactggacgggctgcarggtggtcaggctgctgcccatgctgttgatgaccggcacactctgtgcctgcgtggaggccaggcctggagtggaaggggagggaatcagctgggccccc

SEQ ID NO: 32123 - DNA, 201 bp, Homo sapiens
gcagcagtgaggacagtgacgaggagtggcggcggtgccgggaggcagctgtgtcggcgtccgacatcctacaggagtcagccatccacagccctggaacwgtggagaaggaggcaaagaagaaaaggaagttgaaaaagaaagccaagaaggtggccagtgtcgactcggctgtcgctgccaccacccccaccagcatgg

SEQ ID NO: 32124 - DNA, 201 bp, Homo sapiens
gctgagattacaggtgtgagccactgtgctcggcttctagttttttttgtttgtttgtttgttttttggggttttttttttttttgcatttttttttttttgagatggagtttcactcttgttgcccaggctgcagtgcaatggcacgatctcagctcactgcaacctctgcctcctgggttcaagtgattctcctgcctc

SEQ ID NO: 32125 - DNA, 201 bp, Homo sapiens; identical to SEQ ID NO: 32052

SEQ ID NO: 32126 - DNA, 201 bp, Homo sapiens
ttgccatgttgcccaggctggtctcgaactcctgggctcaagtgatcctcccttctcaaccttcaaagtgctgagattacaggtgtgagccactgtgctcrgcttctagttttttttgtttgtttgtttgttttttggggttttttttttttttgcatttttttttttttgagatggagtttcactcttgttgcccaggct

SEQ ID NO: 32127 - DNA, 201 bp, Homo sapiens
gagacaggatctcgctatgttgcccaggctggtcttgaactcctggcctcaagccatctgcccaccttagccttccaaagttctgggactacaggcgtgcmccaccacacctggctaatttttgtatttttttttagagacagggttctgtcatgttgcccaggctggtcttaaactcctggcctcaagctatcctcccgc

SEQ ID NO: 32128 - DNA, 201 bp, Homo sapiens
ttcggaaagtagtaacagcagtagcgatgcggaggagctggagcggtgccgcgaggcggcaatgccggcttggggcttggagcaacgcccgcacgtggcarggaagccaagagccggtagggtactatgtttggggagactggctgaggggcgtgggatcttcccctggagcctgagaggatggatggtgaggagagagtc

SEQ ID NO: 32129 - DNA, 201 bp, Homo sapiens
cgcgcctctcctctcacgtgacgtcatgaaggaggcttgataacggcggtgttctccacaatcctttgcggtggttcaagatggcggcgcccagtggcacwgtgagcgattcggaaagtagtaacagcagtagcgatgcggaggagctggagcggtgccgcgaggcggcaatgccggcttggggcttggagcaacgcccgc

SEQ ID NO: 32130 - DNA, 201 bp, Homo sapiens
ggaggtcacaaggctgctacgcccagaagccagtattggaagccaggttggcctcactcccaagcctgaactcactacctgcctctctctgcggccacctyctggtgacctggaccaagggaggacagcgagaggcagctctggggctgtgtcctgactccagctaacccagggtaccctctcgttgcagcagtgaggaca

SEQ ID NO: 32131 - DNA, 201 bp, Homo sapiens
ctggctgctgccctcatcaccccccaagcaggcagtacaggccccagggcccaggtgccgtggttactgggaggaagaggccatctgggtggagatgaagrtctcgatgacgctgtggttggatggcagcaggtggctctggccattgctggagtctgagctctggtacagcaccaggctgctggaggacactgcagaggc

SEQ ID NO: 32132 - DNA, 201 bp, Homo sapiens
attgacagccaacctctatcatcatctcctgctgtgtggggcacagggcgctcaccgtgggggctctgcagctgagccatggtggccatgaaggggctctrggtcacatggctctgcacaggtggcatgagcggctgctggtaggaggggtgcagcggctgggagaactggacgggctgcagggtggtcaggctgctgccc

SEQ ID NO: 32133 - DNA, 201 bp, Homo sapiens; identical to SEQ ID NO: 32069

SEQ ID NO: 32134 - DNA, 201 bp, Homo sapiens
ggtgaggagagagtcactgggactcggcttccttccccgagagacctccagggactgggtgtagtgcagattgaaagcatgggcaggtgcagtagggaggktatttcattattccagtcggggaagctgaggtacccaaatgtcttttgattctgcctccttgggtctatcctcactgccccacactgggaaggctgccgt

SEQ ID NO: 32135 - DNA, 201 bp, Homo sapiens; identical to SEQ ID NO: 4100

SEQ ID NO: 32136 - DNA, 201 bp, Homo sapiens
atggggtttcaccatgttgaccaggatggtctcgatctcttgacctcgtgatccgcctgcctcagcctcccaaagtgctgggattacaggcgtgagccacsgcgcccggccttgactccatcttaaaagtgcatctatctggagttcacccacttctcaccacatcaattactgcagcagactccgtgttcctgcctttgc

SEQ ID NO: 32137 - DNA, 201 bp, Homo sapiens; identical to SEQ ID NO: 4102

SEQ ID NO: 32138 - DNA, 201 bp, Homo sapiens
actgtggaaatataggtcactattttatttatgtaacctctagagacagctcttaaatccagtgatgaactcgtcactcaaaccactttaattttagggtrgcatctactttgacttatttttctgacaattaattcaaaccaagacactatggcaggatctggggatacagaggtaaaaagaggcagaccacgtattcaa

SEQ ID NO: 32139 - DNA, 201 bp, Homo sapiens
ttctgagacagaatgatgggccagagccccgcagcctgaatcccacagggttcccctcaattggagaaagtagaggaggtgtttaggaaggcagctgcatwtcagcctgtgggagcagttttcctttgtgactctctggcttcaggctgaacagggcctgcttggcattgcactgagtcacagagatgtttctgcagtaga

SEQ ID NO: 32140 - DNA, 201 bp, Homo sapiens
ccacccaggtgcccacccatccccaccagcttaccgatgaccagggtggaggcacctgtgttggtgaacgtaggacccagggaggcaggctcaccaggccsgatggtcatgaccccaggaagtgaggccatgatgaggttctggggctgctggttgaggcctggggatgtctgctccaagctgtgcagtgctgtcagggtg

SEQ ID NO: 32141 - DNA, 201 bp, Homo sapiens
ggctggagtgcagtggcgtgatcttggctcactgcaacctccgcctcctgggttcgagcgattctcctgcctcagcttctcaagtagctgggactacaggygtgcaccaccacacccagctaatttttgtattttttagtagagatggggtttcaccatgttgaccaggatggtctcgatctcttgacctcgtgatccgcc

SEQ ID NO: 32142 - DNA, 201 bp, Homo sapiens
ggtgcccaccaccaggcccagctaatttttttttatatttttattagagacagggtttcaccgtgttggccaggctggtctcgaacttatgacctcaggtratccgcccaccttggcctcccaaagtgctgagattacaggcatgagccaccacacccagcctagattacattcttgagtgcgtctagtaatagccaccag

SEQ ID NO: 32143 - DNA, 201 bp, Homo sapiens
catctccatctgcactcaccagacacatgcttcctggccttgtgcctctagagaaatgtggtttatttttatgttagagagcctgtgaaggctgaagcttytcttgatgacagtcatcatctgcatcgtcatcatagctaccatttgctgagcagctacttgtggctaggccgtgtgccacaagtgcttgatatccatttt

SEQ ID NO: 32144 - DNA, 201 bp, Homo sapiens
ctctgctgtgcacagtggcatctccatctgcactcaccagacacatgcttcctggccttgtgcctctagagaaatgtggtttatttttatgttagagagcytgtgaaggctgaagcttttcttgatgacagtcatcatctgcatcgtcatcatagctaccatttgctgagcagctacttgtggctaggccgtgtgccacaa

SEQ ID NO: 32145 - DNA, 201 bp, Homo sapiens
gtattcccattttatagatgagaaaaacaaaggctcagggagagaaagtgacttgcccggcatcacacagcttggtggcagagccaggactcaactgaacygtctccctctgtaatactgtttctgttccctgacggtacctcaccttcatcacactgtagtcatgatggaagagatgctcttcttccaagtgattatgtg

SEQ ID NO: 32146 - DNA, 201 bp, Homo sapiens
aagaacattatcatgtgggtcctgttgttacctttatcctccaggtgaggaaacaggctgtcagcaaggagacaggtgtgcctgaagtcacatcatcatcrcagctaccatttactgagcaactgtttgtggccaggctctgtgctaagtgcttgatgtccattttctcatttaatccttctgatgaccctgagaggtagg

SEQ ID NO: 32147 - DNA, 201 bp, Homo sapiens
caatctacatacctccacgtgtccttgcagactgcaagccagagtagtatattcaaggctctgagaattcctgtagtgaagagacctgtgtaactgtttarcccagcattttccaaacttgtttggccacagtgcctttgtttcatggaaaaccagtcaacaacctgcggaacaggtctggggatacactggtctagatct

SEQ ID NO: 32148 - DNA, 201 bp, Homo sapiens
atgagccttcccaaagtgtgaaccagctattcttctgagacagaatgatgggccagagccccgcagcctgaatcccacagggttcccctcaattggagaawgtagaggaggtgtttaggaaggcagctgcatttcagcctgtgggagcagttttcctttgtgactctctggcttcaggctgaacagggcctgcttggcatt

SEQ ID NO: 32149 - DNA, 201 bp, Homo sapiens
cttctgagacagaatgatgggccagagccccgcagcctgaatcccacagggttcccctcaattggagaaagtagaggaggtgtttaggaaggcagctgcakttcagcctgtgggagcagttttcctttgtgactctctggcttcaggctgaacagggcctgcttggcattgcactgagtcacagagatgtttctgcagtag

SEQ ID NO: 32150 - DNA, 201 bp, Homo sapiens; identical to SEQ ID NO: 4104

SEQ ID NO: 32151 - DNA, 201 bp, Homo sapiens
acacactatccccccagagtccaagatggagcccatgctaaccattgcccttaccttagctgaataccctggttcaaaaacatttacttccctgagcctcmgtttcctggcttgtaaaatgaggattataagaatctctgctcctaaggagataacagatgtaaactctgaagttgttaacttttagaatcactgggaagg

SEQ ID NO: 32152 - DNA, 201 bp, Homo sapiens
gaacaacaatgaccttggtgagtagaaatatgcttcctgccctgcccgcagtcctgttattccctccacctgtgctggggatgtcagggaaaattctgtakatgcctctccgagtcttcttgagccttgattttcacattgatcgcgtcttccttgttttctgtgtttgtacctcatctccaccctggactacgagctcct

SEQ ID NO: 32153 - DNA, 201 bp, Homo sapiens
cacctccgcctcccaaagtgctaggataacaggcatgagccaccacgcctggcctcttaagaaattgtttcccttttcctggcactattataactgagactgtgatgaacatcctcatcatattcttcccaacattgttgggtctttctgtttttttttttctgattttttttctttatatctttgtcagatgatcactat

SEQ ID NO: 32154 - DNA, 201 bp, Homo sapiens
tggaaagggaggccttctcattcaagtgggagagaccagaatatagctccaggcaggatgttttcattagaattagatttggctgcatgtgctggggggawaaataaaagtaacagagacttaatcgaggaatttaattttcttaggcattccagggctagtaaggcatattccttagcatcgtggatcacaaccctttcc

SEQ ID NO: 32155 - DNA, 201 bp, Homo sapiens
ggctgagacagaattgcttgaacccgggaggcagaagttgcagtgagccgagatcacgccactgcactccagcctgggcaacaaagtgagactccatctcaaaaaaaaaaaaaaaaaaggaagaaaataaaagaaatgtggcaatgtttggagacatttttggttgtcacaactgggggcagtgctactagcatctaggag

SEQ ID NO: 32156 - DNA, 201 bp, Homo sapiens
aggtgttttaaatatatttacctgtccttttattgctctcaccaactcttgctcagggtcaccaggagctgctgcaggtgggccatgctgggagccccagyggcttcatcacccccttcctgcccatccctcccctctcagactttcagtccctccagatctggtccaatcttgccgtggtaaagatgggaaaacagagca

SEQ ID NO: 32157 - DNA, 201 bp, Homo sapiens
gtttcctggcttgtaaaatgaggattataagaatctctgctcctaaggagataacagatgtaaactctgaagttgttaacttttagaatcactgggaaggygaactaggggattcacatgctattctaagagttaatttcctgagcaggtatcatgtgccaaaaccatactgggtactttgtgtctattatctaatttaat

SEQ ID NO: 32158 - DNA, 201 bp, Homo sapiens
agctgtggtttcatgtgatgtcagcctggcttttctcatctgtcctctggcctggggcctgagcactggtcagcaccacccgccatccagtgagcctcttytttggttcatcttgacattttgatgaatgctggctgcttgccaggactgtgctgggctgtgtgcaggactgaggctccaggtccaccctccagaagtttc

SEQ ID NO: 32159 - DNA, 201 bp, Homo sapiens
tgtgcaggactgaggctccaggtccaccctccagaagtttcctcactggatgggaggaaagatggttgcagaaatgaccatcataccaggtgctccagcakccagacagtgggctgtgaggtccatcagagggagcagtcttagtcaggaatagcaatcagggagggttgcttggaggaggcagattttgagataaacccg

SEQ ID NO: 32160 - DNA, 201 bp, Homo sapiens
gcacatgggggtagacattgtgcagaggacttcaaaccattccaaatcctggacttggagctcagtccaggtttcactgaaaactggaagtccagggaggyctaaggggcatctagattatagaacttctgaattttgaaaggatcgcgtggtcagagggatcctggagggggtggcaggagagaaggtgaggacgagggc

SEQ ID NO: 32161 - DNA, 201 bp, Homo sapiens
atggcatcccaggtgcagagaggagtggggaaagccatggagcccatccacacaggctcacggtacccccagaggaaagccagaaagggggttaggagtcrgagagctttgaatgggtaggtttagggaaagtgggctgtgctgtgctctgggaagatggttctggctggatgggaggggactgggggcaaggagagggta

SEQ ID NO: 32162 - DNA, 201 bp, Homo sapiens
attaattgtgtaattaattgtttcttttcagtctcttccattccctccacccctaagaatgcaagcattgtgagccccaggtccacatctgtggctggctyccctgtatcgcagttgtatttgcacaatgcccggcactaagtagctgcttcataaaatgagtacgcacatgggggtagacattgtgcagaggacttcaaa

SEQ ID NO: 32163 - DNA, 201 bp, Homo sapiens
ggggcttagcacctgggccagcagctgctgtgctcgacttctcgccgggccttagctgcctccccacggggcagggctcgggacctgcagcccgccatgcytgagcttcccccacgccgtggtctcctgagcggcccgaacctccccgacaagcgccgccccctgctccacggcgcccagtcccatcaaccacccaagggc

SEQ ID NO: 32164 - DNA, 201 bp, Homo sapiens
ggaggctgaggcaggaaaatcgcgtgaacccaggaggtggaggttgcagtgagccaagatcgcaccactgcactccagcctgggcaacagagtaagactcygtctccaaaaaaaaaaaaaaaaaaaaaaagacatcaggacatgaagcctaagcagggaccatcctatgcaaaccagggactagagatgcactaaccatct

SEQ ID NO: 32165 - DNA, 201 bp, Homo sapiens
gccaacatggcaaaaccttgtttctactaaaaatacaaaaattagccgagcatggtggcacgagcctgtagtcccagctactcaggaggctgaggcaggaraatcgcgtgaacccaggaggtggaggttgcagtgagccaagatcgcaccactgcactccagcctgggcaacagagtaagactccgtctccaaaaaaaaaa

SEQ ID NO: 32166 - DNA, 201 bp, Homo sapiens
agcttcactcctgaagccatcgagaccacgaacccactgggaggaacaaacaactccagaggctccgccttaagagctgtaacactcaccgcgaaggcctraagcttcactcctgatccaggagaccacaaacccaccggaaggaagaaactcctaacacatccgaacatcagaaggaacaaactccggacacaccgcctt

SEQ ID NO: 32167 - DNA, 201 bp, Homo sapiens
atcaggactttgggagaccgaggcaggcagaccacctgaggtcaggagttcaagaccagcctggccaacatggcaaaaccttgtttctactaaaaatacaraaattagccgagcatggtggcacgagcctgtagtcccagctactcaggaggctgaggcaggaaaatcgcgtgaacccaggaggtggaggttgcagtgagc

SEQ ID NO: 32168 - DNA, 201 bp, Homo sapiens
gtggcatgcacctgtaatcccagctactcaggaggctgaggcaggagaatcacttgaacctgggaggtggaggttgcagtgagctgagatagcaccactgyactccagcctggccagcacagccagactccatctcaaaaacaaaacaaaacaaaacaaaacaaacaaacaaacaaaacagatcaacaaagaaaaactttt

SEQ ID NO: 32169 - DNA, 201 bp, Homo sapiens
gcttcactcctgaagccatcgagaccacgaacccactgggaggaacaaacaactccagaggctccgccttaagagctgtaacactcaccgcgaaggcctgmagcttcactcctgatccaggagaccacaaacccaccggaaggaagaaactcctaacacatccgaacatcagaaggaacaaactccggacacaccgccttt

SEQ ID NO: 32170 - DNA, 201 bp, Homo sapiens
agtgccctctgtgctcagactggagtcggctgccttgacccctcacctcctctccttcaaaaatgttagaggcagggatgggctggaggattgagacctgrgtcctagcctctctctgccccttgtctgcctttgaccttggacaagtccctccctgtcctggggtttcagattccttacttgtaaaacgaggaacaccat

SEQ ID NO: 32171 - DNA, 201 bp, Homo sapiens
gggcactgctcacctcgctgctttcctgggcctttctccagctttttttttggtctgcctcttcctgcctgattctccatccagggccccagcttaacccycttttggcttcttctctctccggagccacctgatactcaactcaactcctgtgaatatctttatgcatccaaacaacaactcaatcatattcatcactca

SEQ ID NO: 32172 - DNA, 201 bp, Homo sapiens
ctttagcagtaagcccacacctagaagcctgcttatgtttgaagaagagaagggaacaattggttgatgttatgtttcttgagatacccatctccaggggygacgttcaaaatatttaaccaccagtgtgttgtgagcacagacccgtcaggaggttagaaggcagcgggtagggccagcagggactgtggccagagagca

SEQ ID NO: 32173 - DNA, 201 bp, Homo sapiens
ggagcacacaacgattagaaatggtcatcctcctctcgtaaatctgaagaagaacgctggtttttgttctagatctgtcctgaaattccttgggcaaatcwttccttgctctgtgcctcagttcccctaatgggagagtgtgtgcactgatgatctctaagcatccttgcagctataaacttctttgactccctaaggtac

SEQ ID NO: 32174 - DNA, 201 bp, Homo sapiens
atgtattcccctagctctgcaaatgcagggaacagggagcacacaacgattagaaatggtcatcctcctctcgtaaatctgaagaagaacgctggtttttrttctagatctgtcctgaaattccttgggcaaatctttccttgctctgtgcctcagttcccctaatgggagagtgtgtgcactgatgatctctaagcatcc

SEQ ID NO: 32175 - DNA, 201 bp, Homo sapiens
tccattcatcagatgatggacatttgggttgtttcttcttttggctattctgaataatgctgttatgagcattcatgaacaagttttttgtgtggacttaygtttttatttattttccacccaagagtggaattgctgggtcatatggtagctctatgtttaactttttcaggaactgacaaactgtctttcaaaggagct

SEQ ID NO: 32176 - DNA, 201 bp, Homo sapiens
aaaccttttgcccattcagctttttggccagagacttgccaggaatcagagagtagccaggctaatccacctgcctcagcctgtcccagaggaggcttctrgtcactctctctgttgcctttctttgtgcagaatatccccatccccaccctcaaggcatatgcagaagccctgaaagaaaactcatatgtgaagaagttc

SEQ ID NO: 32177 - DNA, 201 bp, Homo sapiens
attgccactggacatttctcatatcattgcctggaacttaattatatgactcaacctagctgcaagggagcctgtgaagtgtagcctttaatctgagcagscaagagctcaactaaaaagtggaggctttcttttattgctaaagaaggggaagcttgaatcggggacgatttggagtctgtcactgtgggttcactagtg

SEQ ID NO: 32178 - DNA, 201 bp, Homo sapiens
gtctcgatctcctgaccttgtgatccgcccaccttggcctcccaaattgctgggattacaggcgtgagccatcgcgcctggcccatggtggttacttctayggaagggggtgggactgggaataaatcgggtgagggagactctttccttttactcaatctgtgttaatatcatatgaattgttaataatgtggttatatt

SEQ ID NO: 32179 - DNA, 201 bp, Homo sapiens
aaattgaggtaaaacttatataacataaaattaaccatttaaaaatgaacaatccacaacattgtgcaaccaccacctctatcaaggcccaaaacactttyattgctccaaaataaaaccctgtacctattacagttagttactctcccactccctctgccccagcccctagtaccaccaatctgtatctatggatttact

SEQ ID NO: 32180 - DNA, 201 bp, Homo sapiens
aggatcacctgagcctgggaggcagaggttgtagtgagccgagatcgcgccactgcactccagcctggatgacagagaccctgtctcaaaaaaaaaaaaamaaacaaacaaacaaaaaaaacaaaaaactaaacatgaggctgggcacagtggctcgcgcctgtaataccagcactttgggaggctgaggcgggaggattg

SEQ ID NO: 32181 - DNA, 201 bp, Homo sapiens
tgcccatctcacccttccaaagtgctgggattacaggcatgagccactgcgcccagcctgaattttatagtcttaacttatatttaagtcattccattttragttcaactttacatatggtgtgaaataggggtccaacttcattctcttgcatgtggatattcagttgtctcaatatcatttgttgaagcgattactctt

SEQ ID NO: 32182 - DNA, 201 bp, Homo sapiens
tgagtttctttctggactctgaattctatttcattgtctatctatctatccttacgccagcactacactgtttagctttttagtaagttttgaaatcaatragtatgagtgctctaactttgctctttttcaagattgttttggcatttgtcgcccgtaattccatatgaatttaaggatcaccttttctgtttctgggaa

SEQ ID NO: 32183 - DNA, 201 bp, Homo sapiens
tccctgataacagtcccctcacagaggcagctttcagaaaaggatatggagtttgtgacagtgactgaagatatgcattttaatggtacaaagattgaaaktggggctgggaacggtaatcccagcactttgggaggccaaggcaggcagatcacttgagtttgggagttcgagatcagcctggccaatatggtgaaacac

SEQ ID NO: 32184 - DNA, 201 bp, Homo sapiens
tattcaatacacaggactatccagaagaaaaatggacaataaatctgaacaattcacaaaacaaatccaactggccaataaatatgaagtgatactcaacmcattaggatatagggaaatgcaagtttgaacctcaatgagataccattactcacatatcagaatttctaaagtgtttcaatttttgtaacttcaagtgtt

SEQ ID NO: 32185 - DNA, 201 bp, Homo sapiens
accctgtctttactaaaaatacaaaaattagccaggtgtggtggcatgcgcctgtagtcccagctactcgggaggctgaggcagaagaattgcttgaaccygggaggcggaggttgcattgagccgagatcacaccactgcactccagccttggtgacagagaaagactctgtctcaaaaaaaaaaagtaaaaaaaattaa

SEQ ID NO: 32186 - DNA, 201 bp, Homo sapiens
tggtggacaatatctgagaactgctgcttaaggaaaagtgggatgtgtggagcatcacttatgttcctgatgccccccaccccaaagtcagtcaggccttkattttctacctactgtcctctcataaaaagctccaactcccagtgtctcttttgatctgtggcctaaatctctctgcaagtacaccagcaccacctgcca

SEQ ID NO: 32187 - DNA, 201 bp, Homo sapiens
ggagtaatgaccccgtggcgtatgtatgtacctttctgttctgttgcattgtggctgggggccttgaaacagaagggttgaaatatgtggcctcaggactrgttgtatcccactaacaaagagctctatgtggtacagtggaaggcattggaccaggagccatgaggggtgtagagggaacagccatcacctggcaccacc

SEQ ID NO: 32188 - DNA, 201 bp, Homo sapiens
ggaaacctgccacgttattcaaaacactgagagattctccgagataaaatcatgagtcagacacacgctgctgcatgggatctcaaggctggaaaagtctrgtgcccactaggctcgggggtaacacaggccctgggcaggcccctcccctgtgccatcgctgctgctatatcacgttcatattcagccttgttttacagc

SEQ ID NO: 32189 - DNA, 201 bp, Homo sapiens
agttttttgaatttatatttggataatacattccctgttaaacatacatatttgggtaaccaatctcctattaacatatattctacctgattatataacartagaagggatcataagtaataatttttgaccgtttactatgttaggcactgtgctgagcacattttctgcattatctagtttaattttctcaaccactct

SEQ ID NO: 32190 - DNA, 201 bp, Homo sapiens
caatctccagtgggtagagtggcctccacaacaaggaagtgtccagcccagaatgtcagttgtgctgaggttgagaaactctgctttaactaaatccgtgrcctctaccagatagattcgaaaagagatgagagtttgcaaacccttctcccctcagttacaacccctgaatttcttctatcgcaatacttagcctttctg

SEQ ID NO: 32191 - DNA, 201 bp, Homo sapiens
aggagttcaagaccaacctggccaagttggtgaaaccccgtctttactaaaaatacaaaaattagccggacgacaaaaaatacaatattttttgtattgtatatatatatatatataaagtatttatatattgtatatataaaaaatacaaaaattacaggatgacactcctgtaatcccagctactcgggaggctgaggc

SEQ ID NO: 32192 - DNA, 201 bp, Homo sapiens
ttttctctaattttactctactttctccattcacctctcatctccctggttactccaatttttttaatttctctttgtgggatcatagccctacatgttawcacactacctggacacatagcattcatttagcagatgtttattgaatgaataagaaataagagaatgagaggtgcttttctatgcatacatgatcaccaa

SEQ ID NO: 32193 - DNA, 201 bp, Homo sapiens
gggactctggagttggataacctaattcccaggcctcctttctgttgtgttttgaagtattcccagttgtccatatcatctgggaatggccagaattggcyccgtcaaatgtccaaagtgagattcttgatgttcctgttgcgtctggccagaaagggagcctcagagccaccggctccaggatacaccttgtaacaccta

SEQ ID NO: 32194 - DNA, 201 bp, Homo sapiens
caaccagctctctataaaatggaccagtcggctctctgtaaaatggaccaatcagcaggatatgggtggggccagataagagaataaaagcaggctgccgrataacgcagtggcaacccgctcgggtccacttccgcactgtggaaactttgttctttctctgtttgccataaatcttgccactgctcactctttgggtcc

SEQ ID NO: 32195 - DNA, 201 bp, Homo sapiens
gtggtctcctgagcggcccgaacctccccgacaagcgccgccccctgctccacggcgcccagtcccatcaaccacccaagggctgaggagtgcgggcgcasggcgcgggactggcaggcagctccacctgcggccccggtgcaggatccactgggtgaagccagctgggctcctgagtctggtggggacttggagaatctt

SEQ ID NO: 32196 - DNA, 201 bp, Homo sapiens
aatctgggcctgttcctagatgctgcctccaccccagccagccagtcacctccttgccaatcccagtgtcctgccgtgtatgttgagccctcgtcacagtyatctcctccaacatcctcaggcccccagctcctccagggcaggcacccctggcactcatcccaagtctccttccgaagcttgccttgtcacccctccact

SEQ ID NO: 32197 - DNA, 201 bp, Homo sapiens
aatctgccactgcagctctctccacttagcaaaatctgaattgcagcctgtgagttaagacagttgtgtgggttggggtatcgtgtggagggagagtaacrtgtttaaaagcagaaaacatcccttcctgggagtcaccattttacagtattctcagggaagacctttgcagcaagcagcccagacatagcacactgcaaa

SEQ ID NO: 32198 - DNA, 201 bp, Homo sapiens
cagtcacctcccaactccctaattcttgcatcaagctggactgtgctcctcatctatagacatctctgcctcctgattcctttctcttcaccaccccattyatttgcccaccaagtcctgtcaatgctaccttccttaatttctcttacatccatttctatcgccacatccagtaccccagtaaggacttcctctctcccc

SEQ ID NO: 32199 - DNA, 201 bp, Homo sapiens
caccatgatgaccccaagagatgcaaaatgaaaacatgcacccgcgcgcgcacacacacacacagacacacacacacacagacacacacacacacacacascggcttttccaatttaaaccacttgacaactttgacgtttagagcatcgagcatggctcattgtgttctgggatgaagctcatagcaactgcagaaagtg

SEQ ID NO: 32200 - DNA, 201 bp, Homo sapiens
accatgatgaccccaagagatgcaaaatgaaaacatgcacccgcgcgcgcacacacacacacagacacacacacacacagacacacacacacacacacacmggcttttccaatttaaaccacttgacaactttgacgtttagagcatcgagcatggctcattgtgttctgggatgaagctcatagcaactgcagaaagtga

SEQ ID NO: 32201 - DNA, 201 bp, Homo sapiens
atgtatgcatgggaaaaagattggaatgaaatattacaaaattctaaacagtggttatacctgagtgagactatcacaagtttttaacttttttattgtaraacatggcaaacatacagaaaagtgcataaaacttaaatgcacagcttaaggaatcataacaggcatgtaacccctgtccaggtcaagaaacgaaaacat

SEQ ID NO: 32202 - DNA, 201 bp, Homo sapiens
agcaccttgaactgttgatttatgctgggtctacagtcactggagagccccacatctttctcatggctgctcagccacgtccactcatccggtgcttgcargctgcaggctgggcctgaaggaaggtgaaggaaaccggttatcgagctgtatcatcccttctctcatgtcccctttacagtaccccttgggagaacattc

SEQ ID NO: 32203 - DNA, 201 bp, Homo sapiens
gagaccctgtctctaccaaaagtttgtaaactaaaacaaaaatgaaaaaaaaaaaaaaacaaaccaccatgccagatcaagagagagaccatgggagaaaygaagagctttatattttgatactttgttttgtttttgttttgagacagggtctcaatctgttatccaggctggagtgcaatggcatgatcttggctcact

SEQ ID NO: 32204 - DNA, 201 bp, Homo sapiens
atttgtgcagtgttttatccatccctcaagtaaaagtccacaggtaggcaatctagggctgggatggagctcagctccccagacttctcagagtcctagaytttgtccagctcatctttctgccattcctaaggtgtagccctatagccataatagccacattccaggcatccaaatagagaaaaagggatggggaggggg

SEQ ID NO: 32205 - DNA, 201 bp, Homo sapiens
aggagaatggcgtgaacctggaggtggggagcggagcttgcagtgaaccgagatcatgccactgcactccagcctgggcaacagagtgagactctgtctcaaaaaaaaaaaaaaaaaaagaaaagaaaaaaagaaaaagaaaacaaaaatgcgccattcattggtttgttcttttagcatattcacagagtcgtataacca

SEQ ID NO: 32206 - DNA, 201 bp, Homo sapiens
aggagacatttcggaacactgcagcctcagaccctaatgcctcccctagcaggccatgccgccctcatctgctgggcctctgctgcactgtgctttctctytccctgcgatgcccctgcactccctctcttcacctggctggctcttccctggtccctcagactcagttcaggaccacctcctccaggaagcccagggctg

SEQ ID NO: 32207 - DNA, 201 bp, Homo sapiens
tatataatgggagatcacatgctgtttttgaaaacgagttaaagtggtaaacaatcaggagtttaaaaatatgcatctatctttggttttactgacaatcrtgtgatattttgttaaacataccatttaatagaaagaaaacaaactttaacctctaatgaggctgatattctcaatatttactttaaaaatgtgataagc

SEQ ID NO: 32208 - DNA, 201 bp, Homo sapiens
ctagtggaactttggtcctttgaaactaagacttctaggccagcagaccacagggtcatgggaacaatgaacaaaagttttgctagtgcatcactaggagwaatggtgagtggtgccactcctatttccaatcttgattccctgacccatgaatcctagctatgggagaaatggcatccgcaattgcccactgattcagag

SEQ ID NO: 32209 - DNA, 201 bp, Homo sapiens
aggaagagttgggtctgggaaaagatgttttagtttgaatccgaaggcagaaaaaagccaatgtcccagctcaaggcagtcaggcaggaggaaattcccgyttacttggaggagggtcagctttttttccctactcaggtcttcaactgattggatgcccaccccccaccgccatatcgggggaataatctgtgttactca

SEQ ID NO: 32210 - DNA, 201 bp, Homo sapiens
atgatcctcacaataccttacgggggcgagtacggttagcctctcactatgcagaccaagaaacccagtccagggattttccactttttatttgagccacrgaatcctttcttcaagtgaaattttatatggaacccaaataaatacatcaggtaaaatcaggagtgagtccccctcacttatccctaaccctttgcaggg

SEQ ID NO: 32211 - DNA, 201 bp, Homo sapiens
tcacaggtagcaggccccacacgggagaagatgagaaccagccagggagaacgtgagaagagggcagagcccagagaaacaggtgggccaagaataatgcrtcatcaaggagacctgggaggattcagaaaggaagcagggaaaccaggagagcttcgctgcaaggagtgggagctcattaaggtcccttaggacagcgag

SEQ ID NO: 32212 - DNA, 201 bp, Homo sapiens
gctactcgagaggctgaggagggaggattgcttgagcctgggagctggaggctgcaatgagctatgattatatcactacactccagcgtgggtgatggagraaaaaaaaaaaagtttaaaataagagaaagagctttgtcaggctcaggctggccctgagctggagagtgggctgggaagtctatgctgaccccaagggtc

SEQ ID NO: 32213 - DNA, 201 bp, Homo sapiens
cagctactcgagaggctgaggagggaggattgcttgagcctgggagctggaggctgcaatgagctatgattatatcactacactccagcgtgggtgatggrgaaaaaaaaaaaaagtttaaaataagagaaagagctttgtcaggctcaggctggccctgagctggagagtgggctgggaagtctatgctgaccccaaggg

SEQ ID NO: 32214 - DNA, 201 bp, Homo sapiens
aggcaggagaatcgcttgaacctgggaggcagaggttgcagtgagccgagattgcgccactgcattccagcctgggtgcaacagagcgagagtccatctcaaaaaaaaaaaaaaaaaggttggaggtggaatgactcttcagtttagtcagtttgagggtgcatatcttttgggtgatgttctgcccataccagccaccca

SEQ ID NO: 32215 - DNA, 201 bp, Homo sapiens; identical to SEQ ID NO: 4105

SEQ ID NO: 32216 - DNA, 201 bp, Homo sapiens
cccaggccagacaaggcctggggtgagtcccacaaatgagaatatgtataatgtctggggtagtggccagattccccactttttattccaatatttgacartgaggatgtgcttaatattttgaagagaagttaaagtagatggattgtgctgtcttgttttcccagattggatgatttgtgtctggctttttttactcaa

SEQ ID NO: 32217 - DNA, 201 bp, Homo sapiens
cctgctggcaaaccaattcttccctctgaaccggctccctctggggggaaatgggggctctggactaggcagtcccctggccacgccattgggtgactccrcagagaaggtctgcagccagcagacctgagtttaaatgtggatctgctgcttcctagtagtgtcgtttgggtaagtcacttaatctctctaagtccttct

SEQ ID NO: 32218 - DNA, 201 bp, Homo sapiens
atagtaaagtaaaagtagggtatattaatgtaatctcaattaaaggcatagtttgtttttttctaaaaggaaaaattattatgaaggagacattatcaggwaattttaaaaaataaaaaaattaagaaaatgaaaatatcacaatattttttgataaataaacacttatatacctatatgaacaaataggtatataagtca

SEQ ID NO: 32219 - DNA, 201 bp, Homo sapiens
ctcaattttttcatttataatttgaagagactaaattactggttatcagacttgggtgcatattgaaatctcctgagaagtttttaaaaacacagccatcrgagtcccactccccagagattctgattcaggtagtttggggtatagcccggacagcagggttttaaaagtctccttaggactagatgattgaatgtcctc

SEQ ID NO: 32220 - DNA, 201 bp, Homo sapiens
aaaattagccgggcatggtggtgggcatctgtagtcccagctactggggaggctgagacagaattgcttgaacccgggaggcagaagttgcagtgagccgrgatcacgccactgcactccagcctgggcaacaaagtgagactccatctcaaaaaaaaaaaaaaaaaaggaagaaaataaaagaaatgtggcaatgtttgg

SEQ ID NO: 32221 - DNA, 201 bp, Homo sapiens
aggcaggaaaatcgcgtgaacccaggaggtggaggttgcagtgagccaagatcgcaccactgcactccagcctgggcaacagagtaagactccgtctccaaaaaaaaaaaaaaaaaaaaaaagacatcaggacatgaagcctaagcagggaccatcctatgcaaaccagggactagagatgcactaaccatctccacccag

SEQ ID NO: 32222 - DNA, 201 bp, Homo sapiens
gtcagggctggaacttgggtttcctgactcttcattaagggctcccatattgtctctctaacaggaaaccatatctaatcaagtgacttggatattttttaaaaatcatcaccaaatatttgctaaataccgtattcagggagaggtggaagagaaaatatccttctctgacctccagaagcctacagtctagtagcagaa

SEQ ID NO: 32223 - DNA, 201 bp, Homo sapiens
tacccaggccgctgtgtgaacgatgagcctccatttgctctgagagagcaaatctgagacgggtctttctaaggttcttgtctttctggtaggtattactmagcacagaaattcaggagacacagacaagttcttccacgatgtcgtacagacgagaactagagaaataccgtgacctggatgaagatgaaatccttggag

SEQ ID NO: 32224 - DNA, 201 bp, Homo sapiens
caggagttcaagaccaacctggccaagttggtgaaaccccgtctttactaaaaatacaaaaattagccggacgacaaaaaatacaatattttttgtattgtatatatatatatatataaagtatttatatattgtatatataaaaaatacaaaaattacaggatgacactcctgtaatcccagctactcgggaggctgagg

SEQ ID NO: 32225 - DNA, 201 bp, Homo sapiens
agtaagaattatctatattattttgtgtcacaggagttgaccagaaagacctctgtaactgagaggtgacagcatgctggcagccctcacagccctccctygctctcggcgcctcctcagccttggcgcccactctggccgcgcttgtggagcccttcagcccgccgctgcactgtgggagcccctttctgggctgggcaa

SEQ ID NO: 32226 - DNA, 201 bp, Homo sapiens
caactcacacatactgtcctttcaaaacaacagacttcagactctgttaacaaaccaattagtgcgaggtttcacagtgctttctcagcaacagtgctggyccctggtctacagggaaaagtgccttatatcttatctccattcctttccagtgaggaagaggaggcttgcggacctgactgggcccatcattcccaagtg

SEQ ID NO: 32227 - DNA, 201 bp, Homo sapiens
cgtccagctaatttttttttttgtattttttagtagagaccgggtttcaccatgttagccaggatggtctcgatctcctgaccttgtgatccgcccacctyggcctcccaaattgctgggattacaggcgtgagccatcgcgcctggcccatggtggttacttctacggaagggggtgggactgggaataaatcgggtgag

SEQ ID NO: 32228 - DNA, 201 bp, Homo sapiens
tggagtacagtggcatgatctcagctcactgcaaactccgcctccctggttcaagcaattctcctgcctcagcttcccaagtaactgggactacaggtgcrctccaccatgcccagataatttttgtatttttagtagagatggggtttaccatgttggccaggatggtctcgatctcctgacctcgtgatccgcccgcct

SEQ ID NO: 32229 - DNA, 201 bp, Homo sapiens
gactgtcagggatggccagcagacaccagaaggtaggaatgaggcatggaacagattccccgtcaaagcctccagatggaatcaaccctgctgacacctcrattttggacttctggtcctctgaactgagacagagtaaatctctgttgttttaagccatccagtttgtggtcatttattatggcagccctataaatctaa

SEQ ID NO: 32230 - DNA, 201 bp, Homo sapiens
gaaggaagaacatcaatcagtctttcaggagagggaactattttcttaaccccaatcctcagtatattgtcaagacaggccactagacagagggcatagtrgttaaggcggactccggatcagtctgcacaaggccagggaacctaggagcaatgaagggcagactcaaatccttcattagtcctttggggggccttaaat

SEQ ID NO: 32231 - DNA, 201 bp, Homo sapiens
gcagagtccaagtagaaccccagcctcctggctcccttgcggggcttcttctgagtggtgccccctacccccacccagcccctgtgatgtgcagccctcasgtgccccaaccctgcacatgctcccttccacagtatctttgtgttggcagaaagtgagccccttgtttctgtgagccacctccctttcatcggtcactct

SEQ ID NO: 32232 - DNA, 201 bp, Homo sapiens
atgaggactgggaaaagaccatcaggattggcagggatcatgagtgacttagaccagggtattgcagcaggctcaaaaaatgagatctgccagtgacccascctgtctgagcctcgttttctcctcatacaatggagacaacaatagccccatttcataggggctgcttgtgagaattaagtgagatgattcagggcaagc

SEQ ID NO: 32233 - DNA, 201 bp, Homo sapiens
gtggatcccaggttcgcgctgagagtgtttggggcaggtgaagtttcccaaactgggagagacaaggtttaaagcaccacgacacgcgctacgcggccaartggagctggaaagagcttggaggcgggagccccaggttgtcgccggctctcggcatggccttggcaatccccctcttgtttctggatctcagtctcccat

SEQ ID NO: 32234 - DNA, 201 bp, Homo sapiens
cttactttggcactacacttttattacagcagctaaggtctcaccatggctttggggatgagcaccttgaactgttgatttatgctgggtctacagtcacyggagagccccacatctttctcatggctgctcagccacgtccactcatccggtgcttgcaggctgcaggctgggcctgaaggaaggtgaaggaaaccggtt

SEQ ID NO: 32235 - DNA, 201 bp, Homo sapiens
ccaaagaaagaggctgtcactggaaagagccattctggtttggccacgttgagctggatgtgccagcaggacatcagggaatcagaggccaggggcagagmagcctgggctggggctggggatttcagagtcacatcaatagaggtgagagtaaaagtaaaataaaattttgaagttttcatgcaagtgtttcttgccatt

SEQ ID NO: 32236 - DNA, 201 bp, Homo sapiens
aagtgcctaagtttttcataaggagaaaccgacctggcagataactggaaaataaaatcctcaaggccagttaaaaacttttgttttccagtcaaatcccytgtaaaaggcaactaggggagttgctggcctgtgataggtttggcctggcctggcctggcctgatgtggaggcaggtgggcgtctagggcacacttaggt

SEQ ID NO: 32237 - DNA, 201 bp, Homo sapiens
ctaaatatccatctacaccagggcgtcccgtgaagccaatagaaggaataaggtcattctctacatactgactctgaaagagctctgcaaaatattaaatraaaaaggtgggctaggcatgacagctcatgcctgtaatcccagcactttgggaggccaaggagggagctcactagagaccaggagttcaagaccagcctg

SEQ ID NO: 32238 - DNA, 201 bp, Homo sapiens; identical to SEQ ID NO: 4108

SEQ ID NO: 32239 - DNA, 201 bp, Homo sapiens
tgggtccggcaggggaagggctgaaggcaggtctcagggagggggctctgctgactcaggctcaggaggaggccacctgtgcctccccttcaggtgccccrgccccaggctggggggaggcagggcagtgtgacacagaggaggtggcgagtggcatttgatttattcctttattcctcattcctggttagtcaccgaggt

SEQ ID NO: 32240 - DNA, 201 bp, Homo sapiens
aggaaggagggaaggaagggagggagggagggaacagagagatcccttgtactctatgcagtttaggtgggaactgtagttttgtatcacagcaaggatastaacatttataaggtcaagatacgaaatatttccatcacagggatctctcatattgcccttttgtagccaagttcacttgtctcttccttctgcctcctt

SEQ ID NO: 32241 - DNA, 201 bp, Homo sapiens
agtcctgtttgttgggcttagctctgttctctgcttcactcaggacatctgttgcacagatctcatggaccactaagctctccttctccaggttaaaattyccagttttcttcattcacccccattcaatgcggcttttgaatttcctcaccattcacattactctctaggcaattctagtttgtctttattcttatggag

SEQ ID NO: 32242 - DNA, 201 bp, Homo sapiens
cattttttatggctgcatagtattccatggtgtatatgtgccacattttcttaatccagtctgtcatagatggacattcgggttggttccaagtctttgckattgtgaataatgccgcaataaacatacgtgtgcaggtgtctttatagcagcatgatttatagtcctttgggtatatacccagtgatgggatggctgggt

SEQ ID NO: 32243 - DNA, 201 bp, Homo sapiens
tttaaggtaaaagttgaaaatgtcaacttcatagtaaagtaaaagtagggtatattaatgtaatctcaattaaaggcatagtttgtttttttctaaaaggaaaaattattatgaaggagacattatcaggtaattttaaaaaataaaaaaattaagaaaatgaaaatatcacaatattttttgataaataaacacttatat

SEQ ID NO: 32244 - DNA, 201 bp, Homo sapiens
tttattgctctcaccaactcttgctcagggtcaccaggagctgctgcaggtgggccatgctgggagccccagcggcttcatcacccccttcctgcccatcyctcccctctcagactttcagtccctccagatctggtccaatcttgccgtggtaaagatgggaaaacagagcatctgagaagataagggatttgcccagga

SEQ ID NO: 32245 - DNA, 201 bp, Homo sapiens
ggtaaaagttgaaaatgtcaacttcatagtaaagtaaaagtagggtatattaatgtaatctcaattaaaggcatagtttgtttttttctaaaaggaaaaattattatgaaggagacattatcaggtaattttaaaaaataaaaaaattaagaaaatgaaaatatcacaatattttttgataaataaacacttatataccta

SEQ ID NO: 32246 - DNA, 201 bp, Homo sapiens
agaactgagagccaacacacttctgttgtttctgtcacttggtttgtggggctttgacgggggcatccccaggaaacaaatacaaatgctaagaaatgaaygagctaagaactcctcttttacccaactcctctttttggttttttctttgtcttgggccaccttgggaccttgtcactggccttccaatcaattggctac

SEQ ID NO: 32247 - DNA, 201 bp, Homo sapiens
gtaaaagttgaaaatgtcaacttcatagtaaagtaaaagtagggtatattaatgtaatctcaattaaaggcatagtttgtttttttctaaaaggaaaaattattatgaaggagacattatcaggtaattttaaaaaataaaaaaattaagaaaatgaaaatatcacaatattttttgataaataaacacttatatacctat

SEQ ID NO: 32248 - DNA, 201 bp, Homo sapiens
aatgcctggcatgacttcctggccctgccctagggcaggatgtgtcggtcctgggtgtgataagagaaagaaattggcagccagtgggcttcttgtgcagyacacggacacctatgtggatcacggtattaataataaataaaaaacaccatgacagtctgggcatggtggttcacacctgtaatcccagcactttgggag

SEQ ID NO: 32249 - DNA, 201 bp, Homo sapiens
tttctggcctgttctgtttttttattggaggaactctttgtctattaaacaaatcagccttttgtttaatatgaagcaaatatattttcccccagcttgcygtttgctttttggtattgttcgtattaattttcatattggttttttggaaaatacaaaaacatgtttcataaagctctatcttacattaacacctgctat

SEQ ID NO: 32250 - DNA, 201 bp, Homo sapiens
tattttttattttttcttgactaaagagccagcccctgggcaacaaagtggaaatggagattgtgagcatgttggaaaaaaacgcaacacttctcaaattyggctaccactttacccagcaaggaccccggcttcgggcatccaacgcaatgatgaacaacaatgaccttggtgagtagaaatatgcttcctgccctgccc

SEQ ID NO: 32251 - DNA, 201 bp, Homo sapiens
ccacattttctggcctgttctgtttttttattggaggaactctttgtctattaaacaaatcagccttttgtttaatatgaagcaaatatattttcccccarcttgccgtttgctttttggtattgttcgtattaattttcatattggttttttggaaaatacaaaaacatgtttcataaagctctatcttacattaacacc

SEQ ID NO: 32252 - DNA, 201 bp, Homo sapiens
gagtcatttgtgagccttgagtaccaggctgaggagatggggctgtgtcctgttggcttagtgagggaatgagctgagatcatgcaagtggggcacgaggyagggcctgggacacagtaaattgcagcagttcttggcagtggggagccattagaggtggttgtgtatttctgtttggtttctatttctggtttttaaatt

SEQ ID NO: 32253 - DNA, 201 bp, Homo sapiens
ctctatgttgcctgcccaggttggtctcaaactcctggtctcaagtgatcctcctgcctcagcttcccagagtgctgggattataggtgtgagccactgtkcccggctaccagtggctatcaagcactagaaatgtggctaataggactgaggaaatgaactatacatcgttttcattttaattatttagatgtatagagc

SEQ ID NO: 32254 - DNA, 201 bp, Homo sapiens
cactcaggggagaccagtactttctgagactagcccatcctgagttttagcagggcatttgcagcaagagacctcaaggagaggccagggttcctgctaaytggggagggtgggtggaggagctgccagttccttcttggggcctcagatggttgctgtgccatctccaggccaaaacggccagattccagggctgtgctg

SEQ ID NO: 32255 - DNA, 201 bp, Homo sapiens
atggattcagtatactcatctctaagatgcagatgctggctcctgcctgccctgctcacctcccagggatgtagacaggtcgaatgggggcaatgcatgtyaaggggctttgtactctgcacgaagcatcagctttgcagaggcagtcctcgaagtccctggtagccccttcactcaggggagaccagtactttctgagac

SEQ ID NO: 32256 - DNA, 201 bp, Homo sapiens
gacttcgaacatggtgttggaggtgctgggcggagcaggcccaccagagagtggtgggtggttggagcctttttcacagagcgggtgactgggaccaagartgtgggtaactcactggaggaagaagagtagggagaggaggacatggggcgtccaggtcacctgtagttggtatggcctgtctcccaagtggaacatttc

SEQ ID NO: 32257 - DNA, 201 bp, Homo sapiens
ggacacaggcataatacactgagcttgacacagagcagacaggaagctgtgccaggagattaactcttactggtgcaaggcatcacagagcaggtgatacyggaactgagctctggatttttttaattccatgccgagtgagggcctttgagaaaggccgcaaggagagtgttgtgtagggaaggaattggggatgggaat

SEQ ID NO: 32258 - DNA, 201 bp, Homo sapiens
agaacaaacaactttataaagggagaacaaaagaggcatgtagccacttccagttaactcaataaatgtgactcggttacctgccgagcactgtgctgggyaccaacagggcagcctggctgggactctgcctttcaggagcacaggctggtggggacacaggcataatacactgagcttgacacagagcagacaggaagc

SEQ ID NO: 32259 - DNA, 201 bp, Homo sapiens; identical to SEQ ID NO: 4110

SEQ ID NO: 32260 - DNA, 201 bp, Homo sapiens; identical to SEQ ID NO: 4111

SEQ ID NO: 32261 - DNA, 201 bp, Homo sapiens
ctcttgcatgtggatattcagttgtctcaatatcatttgttgaagcgattactctttccccattgaatgcaccttgcaccctagttgaaaatcaatttgcyatagatgtttgagtttctttctggactctgaattctatttcattgtctatctatctatccttacgccagcactacactgtttagctttttagtaagtttt

SEQ ID NO: 32262 - DNA, 201 bp, Homo sapiens; identical to SEQ ID NO: 4112

SEQ ID NO: 32263 - DNA, 201 bp, Homo sapiens; identical to SEQ ID NO: 4113

SEQ ID NO: 32264 - DNA, 201 bp, Homo sapiens
  misc_feature (1)...(201): n = A,T,C or G, or insertion/deletion polymorphism (see Tables 1-2)
cttagaaagaaactggagcctggggtgggggtagggggtctaggcagcagctcagtcaggtcacaccagctgttagtgacagcaagcattttctgggcaanttttgtgtgcctaggactgtgctaggtgatatcagaggtagcagaaaggctacctctgactgaagaagctttataaccttttaggggaaaaaaaagactc

SEQ ID NO: 32265 - DNA, 201 bp, Homo sapiens
aaaaagctccttgcttctaataagctctaataagttgattagaaaataaacttaataattcctaataagctctaataaacatctagtcaggtggtgttgaytagtatctacaaaccaccacattttgaacaccaaggtgagtgctagttaccacaaagcttcctcctggccattgcattaagatagtggatttttaaatct

SEQ ID NO: 32266 - DNA, 201 bp, Homo sapiens
caccttggcttcccttgagcttcccagaagctggtgctatgtctgaggcatctccttatctcagtgcccagctcaggacctggcccttcaggagtgcctgrtaagtaagtttgccctggatggtcgtgcatattgttcacagcacaatgaggtagcagagagcaaaattcaacccagaatccactctccaagctgtgtgcc

SEQ ID NO: 32267 - DNA, 201 bp, Homo sapiens
gtcacctgagtgaagccctccagggtaggggaggacacagagcacagagggtaggcaacagagggtgatgggcaaggctggagaagttggctggggacccrgggagggggtcacattagaaaaggctctggatgccacaccaaggagatgaaacttgggactaggggcatgaaggagagctagatggaagcaggagtttga

SEQ ID NO: 32268 - DNA, 201 bp, Homo sapiens
ggggtcacccttgtatatcgcatatttgccccatgccctccatcttcatatgtgtttccatatgatcttcaaaaactacccccaaaactccagaaggtggyctgatattcagagccctttgccccactccctgcctcccccgacttctctgctgctcctgtctagtttctgtcccactgctgtggtgttccatccccacag

SEQ ID NO: 32269 - DNA, 201 bp, Homo sapiens
agcagaggggggcattatcccaaccaggggtgccgggagcctgtgtggtgaggtgcgctttaaagacatgctctctatccatccatgggaagcagttggarcttgggaagcagttggagcttaggagttggagcttgggaagcagttggagttttcagcttgggagtagcatgaggactgattttcaccaagatcatttgg

SEQ ID NO: 32270 - DNA, 201 bp, Homo sapiens
caatctgagcggtgctgggattccaacctagacagtcttggcccagtaacctgtgctgttaaccctgggagcacctctgagactagcccagaaggaaactsagagagcagattggggaattatgcgtaaattcttatttccaacttgatttcttttgaagttgttatgttattttcacaataaatactaatctttcaagaa

SEQ ID NO: 32271 - DNA, 201 bp, Homo sapiens
gggagccttgtagggctcatttcagcatgaacaccttctctatttctaacaagaactagaggagaccgagagtgttcaaacaacaatccattctcaaaaascaaaacaaggaaaatagagagaaaaccacgcaaacccaccacaccagggagccatctgctgttgccatgagaccccatgccagagggacgtgggtgtatc

SEQ ID NO: 32272 - DNA, 201 bp, Homo sapiens
gagcttctgtaagcaaagaaaatagccgacttataacgtgggactgtgtggtcagccacttagcagatatctatgaatgaatctccactaccacagaccchcatcaatgaacactgacagactggagggctgttgtacaactcacacatactgtcctttcaaaacaacagacttcagactctgttaacaaaccaattagtg

SEQ ID NO: 32273 - DNA, 201 bp, Homo sapiens
gggagcacagtttgatgaaaaaatgcaggactagaagttaggtgtttcgcttccaatcccaaccctgtctcttccactccatgtgaccttggaccaagctrccatccttcctagacctcaatgtccccagccatggaatagcagagttggttggtcattttcagggttaagctaacctgacttataatctggtcttatacc

SEQ ID NO: 32274 - DNA, 201 bp, Homo sapiens
atggaagcaggagtttgagtggagaggagggggtgttctggaggatgggggaatggaggaggcaggccttcgatgaggccgaggcctgggcagagctgtgrgattgcatctgagatgcagcttcaccaagagcccagctgttcctagtgccggctcagaggccgagcagctgagatggtaccagtctttctagcctgaggc

SEQ ID NO: 32275 - DNA, 201 bp, Homo sapiens
tggaaacctgccacgttattcaaaacactgagagattctccgagataaaatcatgagtcagacacacgctgctgcatgggatctcaaggctggaaaagtcyagtgcccactaggctcgggggtaacacaggccctgggcaggcccctcccctgtgccatcgctgctgctatatcacgttcatattcagccttgttttacag

SEQ ID NO: 32276 - DNA, 201 bp, Homo sapiens
cagagccagaaggcactgagacaacatctagcccagtcctcctttcacaagcggggaaactgaggatgagagaagggatgggactagcctgaggccacagsccaggttagtggcagagctcggttggagctgcagtatcctggctgcactgatggatggatgggagaaaccctgtgggccccgagggagcctgcaggcccg

SEQ ID NO: 32277 - DNA, 201 bp, Homo sapiens
ctgatgttttaccctgagggacaggcaggatgacaagatggaaagagagccttccaaagaaagaggctgtcactggaaagagccattctggtttggccacrttgagctggatgtgccagcaggacatcagggaatcagaggccaggggcagagcagcctgggctggggctggggatttcagagtcacatcaatagaggtga

SEQ ID NO: 32278 - DNA, 201 bp, Homo sapiens
tgtacctttctgttctgttgcattgtggctgggggccttgaaacagaagggttgaaatatgtggcctcaggactggttgtatcccactaacaaagagctcyatgtggtacagtggaaggcattggaccaggagccatgaggggtgtagagggaacagccatcacctggcaccacctacacgtcatcctggccaatcctcac

SEQ ID NO: 32279 - DNA, 201 bp, Homo sapiens
cagagagtggtgggtggttggagcctttttcacagagcgggtgactgggaccaagaatgtgggtaactcactggaggaagaagagtagggagaggaggacwtggggcgtccaggtcacctgtagttggtatggcctgtctcccaagtggaacatttccatcagctcagctctggcttgctcactcacacacacagtcagtg

SEQ ID NO: 32280 - DNA, 201 bp, Homo sapiens
aaacagcccagtttccaccctcacagagtctacgttaaacaaacaccaggtaagtatgaaatgacaaatgagagtgagcgtctgaacagaatcagtacagygtgtgagggaggcacttggggtagggctgggggagaccagggaagagctatggagaagagcctaggagcagaagagtagcagtgagaaagtgcggagaag

SEQ ID NO: 32281 - DNA, 201 bp, Homo sapiens
caggcccctctgaacggagtggcctggcaggcttgctatctgctgatgggaggagcctggagggcaagctcaggtgtgccctcctaactcaggtgtgacaygggtgagatgcatcactcatgtattcacctaactgctcactaagccagtgcacattattgaactcctactgtatactaggatgaacaggagccagtcctt

SEQ ID NO: 32282 - DNA, 201 bp, Homo sapiens
aaaaaaaaggttggaggtggaatgactcttcagtttagtcagtttgagggtgcatatcttttgggtgatgttctgcccataccagccacccatgtattccyctagctctgcaaatgcagggaacagggagcacacaacgattagaaatggtcatcctcctctcgtaaatctgaagaagaacgctggtttttgttctagatc

SEQ ID NO: 32283 - DNA, 201 bp, Homo sapiens
cagcacatcccagaacccccgtgagctgctccgtgggagctggagagcctgccccagaatgggactccttcttggtgatctgattcacctgctgctgactyaggcctcagcttctgttgcccacgtagatgcagcctaaattaaaacccacgagagcttgaaaaaatgcagatgcctctctccccaccagttctcttagtg

SEQ ID NO: 32284 - DNA, 201 bp, Homo sapiens
aaggtcagggcagctgagccaaaggcctagctctttgtggagagaaagcaaagagagggaggaagagtcccagagtgtgtatgttagggcagaggctgtgkctggagggggtggggctcttagaggtttggatcctgctggtccctttgtaacatcaagacgctgtgactgaggcaagagttggctcaccccgctgcccct

SEQ ID NO: 32285 - DNA, 201 bp, Homo sapiens
aggtcagggcagctgagccaaaggcctagctctttgtggagagaaagcaaagagagggaggaagagtcccagagtgtgtatgttagggcagaggctgtgtstggagggggtggggctcttagaggtttggatcctgctggtccctttgtaacatcaagacgctgtgactgaggcaagagttggctcaccccgctgcccctg

SEQ ID NO: 32286 - DNA, 201 bp, Homo sapiens
tggctcaagcctgtatcccagcactttggaagtccaagacaggcgggttacttgagggcaggagttcaagaccagcccgggcaacatggtgaaaccccgtytctactaaaaatacaaaaattagctggacgtggtggcacgtgtctgtaatcccagctacttgggaggctgaggcaggagaatcgcttgagcccgggaggt

SEQ ID NO: 32287 - DNA, 201 bp, Homo sapiens
aggagcagaggtagagaggcctgaagcaggaaaccagccaggaggcttctctgctggtcccggcaagactcacaagggctggaacgagggtgatgcccacrgaaggagacatttcggaacactgcagcctcagaccctaatgcctcccctagcaggccatgccgccctcatctgctgggcctctgctgcactgtgctttct

SEQ ID NO: 32288 - DNA, 201 bp, Homo sapiens
tggaacttgggtttcctgactcttcattaagggctcccatattgtctctctaacaggaaaccatatctaatcaagtgacttggatattttttaaaaatcaycaccaaatatttgctaaataccgtattcagggagaggtggaagagaaaatatccttctctgacctccagaagcctacagtctagtagcagaagcagacgt

SEQ ID NO: 32289 - DNA, 201 bp, Homo sapiens
gtatctagatatgtctaacaccacatagattctgaggcatacaccaggtgctgtgggagaattagaaagggagaggaggaatccaggaagactccctggargaggaagagttactcctagtcttgaaggatagggccatagagttgttagataaaatacagtatgttcaattgaattcaaatttcagagaacaacaaatat

SEQ ID NO: 32290 - DNA, 201 bp, Homo sapiens
aaagggagaggaggaatccaggaagactccctggaggaggaagagttactcctagtcttgaaggatagggccatagagttgttagataaaatacagtatgwtcaattgaattcaaatttcagagaacaacaaatatgtcccaatattgaatggggcgtacttagctaaaaaaaaatttggtgttggccgggcgaggtggct

SEQ ID NO: 32291 - DNA, 201 bp, Homo sapiens
aattgaattcaaatttcagagaacaacaaatatgtcccaatattgaatggggcgtacttagctaaaaaaaaatttggtgttggccgggcgaggtggctcaygcctgcaatcccagcactttgggaggtcaaggtggtggatcaagaagtcaggagttcaagaccaacctggccaagttggtgaaaccccgtctttactaaa

SEQ ID NO: 32292 - DNA, 201 bp, Homo sapiens
tttgccatgttactaccattccaggtagcctgagtgcccccaagtgaccaaggaaaagcttacccttagagggtctttactcccaatgccccccaccttcycatcctctacctttttgttgtttaaaattcagctgacctgttagttgccacctgggaaggtctgaccacttcattctttatgcctctcatacctcagaga

SEQ ID NO: 32293 - DNA, 201 bp, Homo sapiens
gggaatcagaggccaggggcagagcagcctgggctggggctggggatttcagagtcacatcaatagaggtgagagtaaaagtaaaataaaattttgaagtwttcatgcaagtgtttcttgccatttctgtgagccagagttcccggggtttggagtgtgggtccctaggaggctcttctgtctgcagaggcacatcatgag

SEQ ID NO: 32294 - DNA, 201 bp, Homo sapiens
tgttggagatccctgattcctattctttggagaagttggtccccagagggagaaacctgaagggactctcagcatggagggacccacagggctctacaatsgtccacgcagggctgtgggtccaccagaggctgttccattgcagccactcccgtaacaggtcccctgtgtgtttgcaggaaaggtctgggttcctaagca

SEQ ID NO: 32295 - DNA, 201 bp, Homo sapiens
tcacttagtataatgttctccaattccactcatgtggttgcaaatgaacaaatttccttttttttttttttttttttaaagaaaaggctgaatcgtactcyattgtgcatatatcccccagtttctttatccattcttgttgatagacacttaggttgattccttattttgggtattgtgaatgatgctgcaatgaacatg

SEQ ID NO: 32296 - DNA, 201 bp, Homo sapiens; identical to SEQ ID NO: 4106

SEQ ID NO: 32297 - DNA, 201 bp, Homo sapiens; identical to SEQ ID NO: 4107

SEQ ID NO: 32298 - DNA, 201 bp, Homo sapiens
gcctgttggaccagatcagtggttttcacctgagaagattaaaaaatatataccaacgcccaggcctgaccctagagattctgattctattgttctgggcyggcccaagcatcaccattttgtaaaagttccccaggagtctctgatgtgccgctggagcagagaccccctggggtagatgtctcttaaagagtatcatat

SEQ ID NO: 32299 - DNA, 201 bp, Homo sapiens
tggaccagatcagtggttttcacctgagaagattaaaaaatatataccaacgcccaggcctgaccctagagattctgattctattgttctgggccggcccragcatcaccattttgtaaaagttccccaggagtctctgatgtgccgctggagcagagaccccctggggtagatgtctcttaaagagtatcatatgcaacc

SEQ ID NO: 32300 - DNA, 201 bp, Homo sapiens
attttgtaaaagttccccaggagtctctgatgtgccgctggagcagagaccccctggggtagatgtctcttaaagagtatcatatgcaacccccttacctrttttccagaaacagggccagagagggcaggaggcttccacagagacacctagcaagtcaggaacattgccgatcattgggaccaaggccaggttccagcc

SEQ ID NO: 32301 - DNA, 201 bp, Homo sapiens
gtgcagttctccccactttgcacttaaaaaatctagggttcggagaggtcaggcaacttgttttgtccagtcacacagcaagtgagaggtggacctgcaaktccagtgcagtcacgtgacccctaaatcttcactcggcacatcatattagaacaagagcctgcccttccctgttcctcagtttttccatctctaaaatca

SEQ ID NO: 32302 - DNA, 201 bp, Homo sapiens
ttagctatattcaccatgctgtgtaacagagctttataaaacaccttattcctcttgtccaactgagatttttgtatcctgtggccattatctccccattycccacccacagcttctgtaatgacagttttactccctgcttctatgaggtcaattgttttagattccacatataatttgtctttttgtggctggcttatt

SEQ ID NO: 32303 - DNA, 201 bp, Homo sapiens
gggttcggagaggtcaggcaacttgttttgtccagtcacacagcaagtgagaggtggacctgcaagtccagtgcagtcacgtgacccctaaatcttcactyggcacatcatattagaacaagagcctgcccttccctgttcctcagtttttccatctctaaaatcaatggttttggttgggcgcagtggctcacacctgca

SEQ ID NO: 32304 - DNA, 201 bp, Homo sapiens
ctcgggactgaggctgttagcaggcctggcagcagggagcgcagattgggaagggagcaggcctctcaggcctcctgctcattctcacctgcctctgctgsctctttgcccatggctggggcctctgcagtacttgggctcctccttgggggacattgagtccccaaggctatgaggacagcgactggctctgcagacagg

SEQ ID NO: 32305 - DNA, 201 bp, Homo sapiens
tttgggaggtcaagacgggtggatcacttgaggtcagaagttcgagaccagcctggccaacatggtgaaaccccgtctctactaaaagtataaaaattacmtgggcttggtggtgcatgcctgtaatcccagctactcgggaggctgaagcaggagaagcacttgagcccaggaggcggaggttgtagtgagccgagattg

SEQ ID NO: 32306 - DNA, 201 bp, Homo sapiens
agattatttgcatcctacattaatgccgcagtgaagcagacagacttcatgttttccaactgaatatttgtatcgtaaaagcctcctgccagctcctcctygggactgaggctgttagcaggcctggcagcagggagcgcagattgggaagggagcaggcctctcaggcctcctgctcattctcacctgcctctgctggct

SEQ ID NO: 32307 - DNA, 201 bp, Homo sapiens
tggtgaaaccccgtctctactaaaagtataaaaattacctgggcttggtggtgcatgcctgtaatcccagctactcgggaggctgaagcaggagaagcacytgagcccaggaggcggaggttgtagtgagccgagattgcaccactatactccagcttgggcgacagagcgaggctccatcacaaaataaataaataaata

SEQ ID NO: 32308 - DNA, 201 bp, Homo sapiens
atgaaatttgcgcccatctgctaatttttgtaagagaaatgtttgttatggcagtgcctcagcttcctcctgactttacaacagattatttgcatcctacrttaatgccgcagtgaagcagacagacttcatgttttccaactgaatatttgtatcgtaaaagcctcctgccagctcctcctcgggactgaggctgttagc

SEQ ID NO: 32309 - DNA, 201 bp, Homo sapiens
gggcattccaagcagagggaacagcatgagcaaaggcaggacagttgaaagtatatgggatgttcacaaggaatggggctgggtaggtgtttgggtggctrcagcccaaggcctttaatgtcaagctcaggggcctggcgatggaagcaggtgggaagcagagaccgtggcagtttcctggacggtgatgccaggtgataa

SEQ ID NO: 32310 - DNA, 201 bp, Homo sapiens
ccagcttgggcgacagagcgaggctccatcacaaaataaataaataaataaataaaaatttaaaaaaataaaaatgatggtttcatcagcaggtcccaatraccaattttattttataagtctcaaaagatatttctgatcaaattaaattgtacttactctgaagtagccatcaactcttctttttaaacatccagcaca

SEQ ID NO: 32311 - DNA, 201 bp, Homo sapiens
gtggcagctgccagggagttgccccttccctccacacactatccccccagagtccaagatggagcccatgctaaccattgcccttaccttagctgaatacmctggttcaaaaacatttacttccctgagcctccgtttcctggcttgtaaaatgaggattataagaatctctgctcctaaggagataacagatgtaaactc

SEQ ID NO: 32312 - DNA, 201 bp, Homo sapiens
gtgtgcctaggactgtgctaggtgatatcagaggtagcagaaaggctacctctgactgaagaagctttataaccttttaggggaaaaaaaagactcaaagscatgcctaaaaattcaagaatgcctacaaattctatctaaacaaagtgaggaaatgatttattgagacagaggccagttaggcaaagcatgctggttggg

SEQ ID NO: 32313 - DNA, 201 bp, Homo sapiens
tagagacatcacaagttgctactttgtacctcttaaacactgtaccttctctctctctaggaagaagttgcctatgaagaaagggcctgtgaaggcggcamatttgccacagtagaagtgacagataagcctgtggatgaggctctacgggaagcaatgcccaaggtcgcaaagtatgcggggggcaccaatgacaagggt

SEQ ID NO: 32314 - DNA, 201 bp, Homo sapiens
ccatatgctctattttttttttaaccctgcagtgcttattatgtctttggattggttgactaggtggcgtgtgcccacagtaagctgagctacagcacaasgcaaggccagcatcaggctggagatccccagagtcagcccctggtagctcagattctgctgggtcctgaggctcagtgagcagtggggttccagaccctg

SEQ ID NO: 32315 - DNA, 201 bp, Homo sapiens
ggggaaaccactctgatatcagcccagtctgtccctcacttgaaggcatccctgctcaatatctccaagttcctgcttcactcccaggtgtgggaccatakgctctattttttttttaaccctgcagtgcttattatgtctttggattggttgactaggtggcgtgtgcccacagtaagctgagctacagcacaaggcaag

SEQ ID NO: 32316 - DNA, 201 bp, Homo sapiens
gatgaggctctacgggaagcaatgcccaaggtcgcaaagtatgcggggggcaccaatgacaagggtgagtacccctgcaggatgtggctctggtctcgggsaccagctttgcaaggtctcacttcatcagtggtaaatgcaagtgaggggctacaaggcacctgtagtgacctgtttcaatgacctgtgaacctcctgcac

SEQ ID NO: 32317 - DNA, 201 bp, Homo sapiens
aacgaaagaaaaaaagaaagacagagagaggaaagaaaggaggataaagaaaagaaacagaggtttaaatgctcacttcaccccccatagctttagagaascttgcaacgagtattagactggagtagactagagtttgggaactggaatttttgtttcagtttcaccattcagtagttacatcactttgagcaacttagt

SEQ ID NO: 32318 - DNA, 201 bp, Homo sapiens
actgggcaacattgcaagaccccatctgaaagagagagagagagagagagagagagagagaggaaaagaaaaaaaaaaaaagcaaagacactttggaaggytgacataggtggatcgcatgagctcagaagtttgagaccagcttgggcaacgtggtgaaaccctgtctctacaaaagaagacagagaaaacaaaatacaa

SEQ ID NO: 32319 - DNA, 201 bp, Homo sapiens; identical to SEQ ID NO: 4140

SEQ ID NO: 32320 - DNA, 201 bp, Homo sapiens
gagcatttactgcattgtacaataatttgtgtaatactcctcaccatcctcctgattatccctatcatattaatctccaaatctgtaccacctggcaaagkttttcgacaatgtttattccatgaattaataaagtagtgactgaacgtccagttgggtgatctgtgaccacctcaaagtcagcttgacctccccaaacat

SEQ ID NO: 32321 - DNA, 201 bp, Homo sapiens
gttttacaaatccatctcttaagcctgaattttcacagtggtcccgtggttcaaatgagtggttatggatacagatgctatgaaaacaagtgatccctgcrctagaactggtttaatacattgtggcccagcttttctccaggagatcctattagacgaggtcctcatctctctgcccatctattatggctcttgtattcc

SEQ ID NO: 32322 - DNA, 201 bp, Homo sapiens
ggactactgtgtaaaagaacaagatctgtgcagaatagatataaatgcgctacgcagggagcacagaggcagtcaattctgccagggggctatgatggggmcttcagtggagtgtcctgagctggggcctcagggatgtgtaggagtgcacacaacagagaagagcatgcacaaaggcccagagctgtaccattgcttttg

SEQ ID NO: 32323 - DNA, 201 bp, Homo sapiens
gaaattttagaattagcttaagacctagaaagggcagcactaggatttgagcacacactagccattttgcctctaactgatgaaggaagacatttgaggascactcctttggagctttccaaaatcagtatttaaagagccaacattgtcccttttcctagagaacagttcagtgtcacagcacaagtagggggtgcagag

SEQ ID NO: 32324 - DNA, 201 bp, Homo sapiens
aaaaaaaaaaaaaaaaaccctttcgtaggtctacctgtgcatataggatgaggttcaaactctttagcatggcattcaaggccttcgcatctggctgcagkggatccacttctcctgtttcagttcccaccactgtcccctcagatgtttattatgtgaatgagtgagtgaaacttatgtaaccacttcactcactaggtc

SEQ ID NO: 32325 - DNA, 201 bp, Homo sapiens
tctgatacctctattctgaatttgatatgggcatacaactgtccgcccaaagtatctaacacagtggctaaagagagaggttacagactgggcaacattgyaagaccccatctgaaagagagagagagagagagagagagagagagaggaaaagaaaaaaaaaaaaagcaaagacactttggaaggctgacataggtggat

SEQ ID NO: 32326 - DNA, 201 bp, Homo sapiens
ctccaactaaagacatggttcataaaaaactccagtgtcttacaggctcttattgcctgaaaaaagtctttcctggatgttcattgtctgtctactaaccmagtttcctctcatttgaacctcaatgaagctagagcccaactttcttcatctcccttataatctcttcaatatatttgaagaatcaagcctctgctattc

SEQ ID NO: 32327 - DNA, 201 bp, Homo sapiens
atgctcaataaatgcttaatatcacctctttcttaataccttcccttcatgttctaagtcagaacccatcattcgctattcctcacccccagaacattctrgatgtaccttccaccttcattccagcatttccttccagccagcataatctttgcatgtgtttctctcctgaccacacttagagctctcgagggtagaaag

SEQ ID NO: 32328 - DNA, 201 bp, Homo sapiens
ctagagaacagttcagtgtcacagcacaagtagggggtgcagagagcactcaacacctgcttccacctccagcacttgattcatttcagacaaatggttcyccaactaaagacatggttcataaaaaactccagtgtcttacaggctcttattgcctgaaaaaagtctttcctggatgttcattgtctgtctactaaccca

SEQ ID NO: 32329 - DNA, 201 bp, Homo sapiens
ttctgtgtcatgtgtatcttcacagcattcacccagccctaccctggattatttttaggcaaattccagacattatattatttcattcataaatatttcargtaattactgaagatttttttaaaatataatcacaataccttttttctgaaatttcaatagtacttcattaatttataatataaaatattcaatgctcag

SEQ ID NO: 32330 - DNA, 201 bp, Homo sapiens
accccttctgtctgttcattcttatttcataaggaatgagatagacatgattgaatcagttcacattaagacttcaagcagatggggctagtttctgatcrtttgttttaccagaccctgagtaatgagtggatataatttttttttcttttgtctttaactttttagtatgggaattttcaaacttatagaaaggtagaa

SEQ ID NO: 32331 - DNA, 201 bp, Homo sapiens
tgagataaaacactgccctggaggagagcttctttcaagatgaggcgtttatagataaagacgtattcacaggcttacaaagataatgtatagacttcacrtttctttcttttaggggctcaaagcactttatgagcatttcttaactcaccttcaagtgcgcgcaggaattcggagagcagtgggcccactgttattgtg

SEQ ID NO: 32332 - DNA, 201 bp, Homo sapiens
tcccatggtaaccaaattctttattcagaatactgagctctgacattgggtgagataaaacactgccctggaggagagcttctttcaagatgaggcgtttrtagataaagacgtattcacaggcttacaaagataatgtatagacttcacgtttctttcttttaggggctcaaagcactttatgagcatttcttaactcac

SEQ ID NO: 32333 - DNA, 201 bp, Homo sapiens
gtagtcaggctttggaagatacgttaacctgtaggaggtcaggaagaaatcttttccttcttaacactgtcttaacatttttttaaatgaaaatatgtatragaattataaaactcactaaagaaaacctttaaaataacaaaacagtattccctaattcccccattcaatacaatcaatgttgtcttttgaatgtatttt

SEQ ID NO: 32334 - DNA, 201 bp, Homo sapiens
ctatcaaaggcaggtcggtgaccatttccttttaattctctgaaatctaaacagctgaaagtgccaaatgtggtgtctagcctggctccatggaatttttracacggagttctcacacagcatatgatcattcctcaactcgccacttgatgtcactgcatagtcaaatgagcattcaaaattaccctgcagtggtttgtg

SEQ ID NO: 32335 - DNA, 201 bp, Homo sapiens
tggtcaagctcagagtcattcttcctccctgcatgcctgcaccagacactccctaaaaaataacacattatgattttttgcttccttggacgaaagccccrcttccctccactagccttcactattgcttgtgtcatctttcccctttctaactcttccagaccttttgagtcagctcctgttgtgtttctggaatcaggg

SEQ ID NO: 32336 - DNA, 201 bp, Homo sapiens
gcttgtgtggggccctcccaagtcttccttgggtctttgcctttgttagctctgagatttttacttttttagttttggtttttggtttgtttttttttttkttttttttttgacacagggtcttgtgttgcccaggctagcctagctctgtttttaaatgaagctgctacaagtcactgctgtgatgaactcagtcactag

SEQ ID NO: 32337 - DNA, 201 bp, Homo sapiens
aagtgttcaataagaagctgttgaattggccatcacagtggctgacatctgtaattctagtactttgggaggccaaggcaggtggatcacctgagcttagsagttcgagaccagcctgggcaacataatgagaccccgtctctaaataaaaaacaaaaacaagttggtgaatggatacatgaacaaaagagcttcatcctt

SEQ ID NO: 32338 - DNA, 201 bp, Homo sapiens; identical to SEQ ID NO: 4139

SEQ ID NO: 32339 - DNA, 201 bp, Homo sapiens
gggtttcaccatcttggccaggctggtcttgaactcctgaccttgtgatccacctgcctcggcctcccaaagtgctgggattacaggcgtgagccaccacrcctggccatcatttgttttaatattttgttagaatctggatccaagtcagattttgtagtactttctttttgttgttgttgttaagagacaaggccttgc

SEQ ID NO: 32340 - DNA, 201 bp, Homo sapiens
gcacaagaatcgcttgaacccaggaacccaggaggcagagtttacagtaagccgagatcatgccactgcactccagcctgggcaacagagcaagactgtcrgaagaaagaaagaaagagagagagagagagagagagaaagagagagagagagagagagaaagagactgataatctacagtcttgatatatattgccaaat

SEQ ID NO: 32341 - DNA, 201 bp, Homo sapiens
aaaataagctgggtgtggtggcgcacacctgtaatcccatctactcagaaggctgaggcacaagaatcgcttgaacccaggaacccaggaggcagagtttrcagtaagccgagatcatgccactgcactccagcctgggcaacagagcaagactgtcggaagaaagaaagaaagagagagagagagagagagagaaagaga

SEQ ID NO: 32342 - DNA, 201 bp, Homo sapiens
agaatttataattctgctgtaatgaatatcttactacctatagccttttccatattttagattgatgttttaaataggcagtaattaaatactggctaggmatggtggctcacacctgtaatcccagcactttgggaggccaagatgggcaaatcacttgaggtaggagtttaagacgagcctggccaacatggcaaaacc

SEQ ID NO: 32343 - DNA, 201 bp, Homo sapiens
ccccacagtcaaggctgacttgctgcctcatgattcctggtctggcgcaatttcctctaccccatgtgaagggggatttaagtacaaacttggcactcagkgttaaaattacaatattaaggccgggcacagtggcatacctgtaatcccagcactttgggaggccgaggtgggcagaacacctgaggtcaggagttcgag

SEQ ID NO: 32344 - DNA, 201 bp, Homo sapiens
cactgcaaaacaaaaatgggtcagaaagcaagaggaaaaaaaagagatgtgtttaatttttaggatatttctcaagctgataatttagagagctaaaaacrtgtgttagccttagtaacatttactaggagctgctctgtctattgagtaaccattcttttattcctttacttacttaaaaaacttgctttaaaaaaaaaa

SEQ ID NO: 32345 - DNA, 201 bp, Homo sapiens
tgtgagtgtggctggcaacgtaggtagaagctcagtggtgcctgcatcatcaagggcaggttaagaacttgatgaatgaatgcctttaggcagcagattawttaacacagttagattggtgtagagtgccctatatatgctctctggacaatcccaacctcattcacagctctagtctccccttatgctaatgactcccaa

SEQ ID NO: 32346 - DNA, 201 bp, Homo sapiens; identical to SEQ ID NO: 4138

SEQ ID NO: 32347 - DNA, 201 bp, Homo sapiens
gagctacagcacaaggcaaggccagcatcaggctggagatccccagagtcagcccctggtagctcagattctgctgggtcctgaggctcagtgagcagtgrggttccagaccctgtctggcaaatgaagggtctgagaattcttgggccatcctgctcttaaaaacttggcagttcatgctggccacctctctacttttaa

SEQ ID NO: 32348 - DNA, 201 bp, Homo sapiens
ctcaggaggtcgaggctagtgagccatgatcataccactgcacaccagcctgggtgacagagtgaaacactgtctcaaaaataaataaataaataaaatayatgtgtgtgtgtttgtgtgtgtgtgtgtgtgtgtgtgcacagagagtagcaactatttgcttggcttttacattgtattaagtattataagtaatgtaga

SEQ ID NO: 32349 - DNA, 201 bp, Homo sapiens
tctcaaatgaaaggggagttctggaattctctgcagcaacagaaagagcaaaacaccctaagtttacttaacagtttgctactgaaggctctttggaagtrtcagattcaccagatggagggcttcacagcagcctcagaatgattcagcacggtgccccacagtcaaggctgacttgctgcctcatgattcctggtctgg

SEQ ID NO: 32350 - DNA, 201 bp, Homo sapiens
aattgtggctcatgcctataatgccaacactgggaagccaagacaggaggattgcttgagcccaggagtttgagaccagcctgtacaacatagggagactytaccaaaaaaaaaaaaaatttttttttttaattagcagggcatggtggtatgcacctgcggtcccacttactcaggaagcctaagtaggaggatcgcttg

SEQ ID NO: 32351 - DNA, 201 bp, Homo sapiens
acacaaaaattagctgggagtggtggcgttcgcctgtagtctcagctacttgtgaggctgaggcagaagaatcacttgaacctgggaggtgaaggttgctsttagcagagatcacaccactgcactccagcccgggtgacagagcaagactctgtctcaaaaataaaataaatattaaatatgctcattgagactacactt

SEQ ID NO: 32352 - DNA, 201 bp, Homo sapiens
ggcaggtcggtgaccatttccttttaattctctgaaatctaaacagctgaaagtgccaaatgtggtgtctagcctggctccatggaatttttgacacggasttctcacacagcatatgatcattcctcaactcgccacttgatgtcactgcatagtcaaatgagcattcaaaattaccctgcagtggtttgtgttatttct

SEQ ID NO: 32353 - DNA, 201 bp, Homo sapiens
tactgccctggcactccttgccccctaaaaatatcattagatgataaccttctgttttcctggcatcttcccttatagcacctgtaacaatgttcagcacrtggtagatactcagtagttgttggttaaatgaataaaagaagaaaaagaccaaaggaaagagccagttagctctttctccagtgagatcttgtttttggt

SEQ ID NO: 32354 - DNA, 201 bp, Homo sapiens
caactcgccacttgatgtcactgcatagtcaaatgagcattcaaaattaccctgcagtggtttgtgttatttctgattctgttgaaagcaatgttaatgaratggtagaaggcaaatgtactacttcaaatgcaaaagtactctatcaaataatgcagtgagtgcattcaatgacaaaattaattctaaaatgaaagcctg

SEQ ID NO: 32355 - DNA, 201 bp, Homo sapiens
catacacccatgccccataaactaacctaagtggtcctttcctgtgttcccatactgccctggcactccttgccccctaaaaatatcattagatgataacmttctgttttcctggcatcttcccttatagcacctgtaacaatgttcagcacgtggtagatactcagtagttgttggttaaatgaataaaagaagaaaaag

SEQ ID NO: 32356 - DNA, 201 bp, Homo sapiens
ctctcaaatctgcctttctcccaccttcatcatctcacacttggctgttcctgggctccggtggccccacatctctcaaccccttgccatttcccctgtcyctccactgccagcagagggatccttccaaagcacaattggatcgtgccagtcctctactttaaaaccctttccaggccgggcgtggtggctcacacctgt

SEQ ID NO: 32357 - DNA, 201 bp, Homo sapiens
tggtattggcttccagctctcccatttctgacccttctaaagtgtccttttatcaccacctgcctaaggcacaggactgatcacatcgcctgtctttgctyagaaactgagcctccccagaggctgctcagctctggttgggggcctcaggcccatccaaccagatgttggggtttgaacaaaagcccagttagtaatgag

SEQ ID NO: 32358 - DNA, 201 bp, Homo sapiens
tgtgatttacccactcgttcattccttcattcaaaagatagtggatttcttgttcacttactctgtaccaggaactattttaggtgtctaacagtaaaatrgacgtcatgaggtaatgtccttgcccctggaagaattcaagtgccatctggatagatgggtgacacttatgccatgtgacatttgcactaggtgggaagt

SEQ ID NO: 32359 - DNA, 201 bp, Homo sapiens
catctttatcatccttacagctcttatggtgtctggcttgcattttgtgctcagtgatgttcaactcaataagcacaggtccagcctggttgaatgaaacrcttattgtgtgaagcctctcttcctgttgcagtgaggctgtcagttcctggtctgatacttcttttgcctagcacagggctgcatgcatagcagaccgta

SEQ ID NO: 32360 - DNA, 201 bp, Homo sapiens
tgattgagtgatgttggtgaccatagttcatcattgcctagatgtcttgttccattagaggccataaaacgataatgttctctgtttctccttcttctttwattacctgcaatatttcagtaaagagaaacttcccctcgtttactatttggcttcctttatttcatatagaaaaagccagatacatgcttacttgatacc

SEQ ID NO: 32361 - DNA, 201 bp, Homo sapiens
gcagcatttaaggaagcactcactctcacagctgtccaagtgcaggatggggactgagagtgagcgcctccttaaatcttgtgccctgggttagatgtctscttgtcttttccattctatttcctgtgtttgggaagcagcaggtataataaaatgaacttgtattttatttgaattccagctctactgcttactagcaga

SEQ ID NO: 32362 - DNA, 201 bp, Homo sapiens
ggcccttaatattcatatgccccccaaactaaatcatgaacacccctacagctgcccctcctgcctaatgttactcttcagcctttaatccctattctggytagcggcatcttcttctacccagaggcttaactggaagccctggagaatcctctcttccttcctctctcttacctccctccacatacaggtacctctcaa

SEQ ID NO: 32363 - DNA, 201 bp, Homo sapiens
taatgagatgttttgagcacatcttagcatttcttgccctagagctagaattagccatttctctaaggaacgctggtttcttatggtgggaaggggtatamgggtactatcaaaggcaggtcggtgaccatttccttttaattctctgaaatctaaacagctgaaagtgccaaatgtggtgtctagcctggctccatggaa

SEQ ID NO: 32364 - DNA, 201 bp, Homo sapiens
actactgtgtaaaagaacaagatctgtgcagaatagatataaatgcgctacgcagggagcacagaggcagtcaattctgccagggggctatgatggggccytcagtggagtgtcctgagctggggcctcagggatgtgtaggagtgcacacaacagagaagagcatgcacaaaggcccagagctgtaccattgcttttggc

SEQ ID NO: 32365 - DNA, 201 bp, Homo sapiens
ccagccacttgttgctatgcagtgatatatgaaacagtgttgccaaattcttaaggaaaaccatacatccagattcttagcgaaatcacccaatttaaaawtaattcgacaaaaactgttttttgagtgctatgtgccaggcactcttctaggcaatgggataaaagattaaaaccagcaaaattctctgccctcatggaa

SEQ ID NO: 32366 - DNA, 201 bp, Homo sapiens
tgcctagcacagggctgcatgcatagcagaccgtacaccagtgtgtgctgatccattgatgttaaagtttcgaagttgaatggtcaagctcagagtcattyttcctccctgcatgcctgcaccagacactccctaaaaaataacacattatgattttttgcttccttggacgaaagccccgcttccctccactagccttca

SEQ ID NO: 32367 - DNA, 201 bp, Homo sapiens
cctgtgattctaacactttaagaatccatgtgttcttgcttttgtcatggaatggggctcactttgtctttttggattaatgatgatggcccacacaggcrgagaggggtctgggctggttcgtggcctgtgccctcagattccttcctcacccattccctgctctgctgtcttcctgtggagtggaagctgacccattcg

SEQ ID NO: 32368 - DNA, 201 bp, Homo sapiens
atgatggcccacacaggcggagaggggtctgggctggttcgtggcctgtgccctcagattccttcctcacccattccctgctctgctgtcttcctgtggartggaagctgacccattcggcctgtttcccaggccagatgtcagccggcgcccagctacgtttgctcagtgggagtctctactgggagataaaaagggaga

SEQ ID NO: 32369 - DNA, 201 bp, Homo sapiens
cttccttggacgaaagccccgcttccctccactagccttcactattgcttgtgtcatctttcccctttctaactcttccagaccttttgagtcagctcctrttgtgtttctggaatcaggggtgtgtgtatgtttgagattcctcagttcccatggtaaccaaattctttattcagaatactgagctctgacattgggtga

SEQ ID NO: 32370 - DNA, 201 bp, Homo sapiens
gcatcttctctcagtgtttgatgggaatatggggccatatgggatattggtaccaggctaaagcaaatcatttaacccaaatgaacctgtttctacagctrtaaaatgagtataaaaatatcttttccatctatttccagagttactataagtattaaattctttaaaaccatgaaaacattttgtaaagtagtatacata

SEQ ID NO: 32371 - DNA, 201 bp, Homo sapiens
aaagtcagactggaccccaggcaagaagggggtcttattgggaaagggctgttaccaattttctttcagagtcaagccacgaactgaattccttcctacawttagttcggcctaagcccaggaatcccacaaggacagcttaagggttagaaacaagatagagtcaatgaagtctgatttctttcactgtcataatttcct

SEQ ID NO: 32372 - DNA, 201 bp, Homo sapiens
ctgattatccctatcatattaatctccaaatctgtaccacctggcaaagtttttcgacaatgtttattccatgaattaataaagtagtgactgaacgtccrgttgggtgatctgtgaccacctcaaagtcagcttgacctccccaaacatgttatcacatacacccatgccccataaactaacctaagtggtcctttcctg

SEQ ID NO: 32373 - DNA, 201 bp, Homo sapiens
ctactgtgtaaaagaacaagatctgtgcagaatagatataaatgcgctacgcagggagcacagaggcagtcaattctgccagggggctatgatggggccttcagtggagtgtcctgagctggggcctcagggatgtgtaggagtgcacacaacagagaagagcatgcacaaaggcccagagctgtaccattgcttttggcc

SEQ ID NO: 32374 - DNA, 201 bp, Homo sapiens
catctctactaaaaacacaaaaattagctgggagtggtggcgttcgcctgtagtctcagctacttgtgaggctgaggcagaagaatcacttgaacctgggrggtgaaggttgctgttagcagagatcacaccactgcactccagcccgggtgacagagcaagactctgtctcaaaaataaaataaatattaaatatgctca

SEQ ID NO: 32375 - DNA, 201 bp, Homo sapiens
attttgaaaggctaggcctgagtgtctattctaataggtgtaatttcttcccacagatcatcaatttctacatgaatatgctgatggagcgaagtaaagaraagggcttgccaagtgtgcatgcatttaatacctttttcttcactaaattaaaaacggctggttatcaggcagtgaaacgttggacaaagaaagtagatg

SEQ ID NO: 32376 - DNA, 201 bp, Homo sapiens
taagttttcatcttatgtagtttaaatgccacactcaaaaatacaagcatagctataaactttttagaatcagtaattttagtgtttggaattctgctctrtatattaaaattaagacaaggacgttaagacaaaataggctatgtatgagttctttgagaacagtacgttttagaaaactcattgttcctctgaatttta

SEQ ID NO: 32377 - DNA, 201 bp, Homo sapiens
tggaactcttgtccttttcttcccaacttctacatcttctatcagttgtaccagctctactgtcttgcggtacgtgtttatggatctggctttccctactrgacagtgagctgctcagtggcagggaccctttcttaatgcacgtagtcggtgcacagtaaatgaatgtgtatgaaagaatttgaacacttagggtttacg

SEQ ID NO: 32378 - DNA, 201 bp, Homo sapiens
ttctccttccctgttcatttgtttccattttctctcattgctgatagcagtgtaagtcgttgaattctgttacgtttattgcttctattctagctcttctrtagtaacaaaggtatcaaaaatggttctgaagtaaaattctgccataatattatagttattgagctgatacctgttaagagcaatatgaataaaattatg

SEQ ID NO: 32379 - DNA, 201 bp, Homo sapiens
gtcccaaccattttggataagggatactgaacttgtaagacatgtacttacatactttaaatacatatgattcagttaaccatgctgtgagtaaactaaayccacaaataggatattctttttttcttacctcaagatgcaaatgatttgatacattttatttaaacaacttcctaagtacaggctagagtcaaagtatat

SEQ ID NO: 32380 - DNA, 201 bp, Homo sapiens
aaatatttaaaaagtttcttttgggagcatttttgttttttgtttgtgtttttctttgttgttgttgttgttgttttctgagacagggtctcactctgtcrcccaggctggagtgcagtgactctgtcatggctcactgcagccttgacctccccgggctcagagtatccttccaggtcggcctcctgagtagctgggact

SEQ ID NO: 32381 - DNA, 201 bp, Homo sapiens
gactcagaaagattacagtagtcttcccaggtctttttactcctcatgcttcagtctccttgccttaccacaatatgggaataccagttataccattgaarctgcctcaacaggaatttttttttttttttttttttttgacacagagtctccctgtgttgcccaggctgaagtgcagtggtgtgatctcagctcactgca

SEQ ID NO: 32382 - DNA, 201 bp, Homo sapiens
ttcttttttaaaatagtatttatgactacttaaattctgccctggtatattttaggaatgtgggattatttagtgtactgtttagtcaagtttgagctttrtggtgttgatagaagccaacaagatggcttttattattttatgcacatggactccaggaatgtgtcaatactccctgggatcatgttcctcacttaactt

SEQ ID NO: 32383 - DNA, 201 bp, Homo sapiens
cgcgccactgcactccatcctgggcgacacagtgagactccatttccaaaaaaaaaaaaaaaaaaaacctcacctgaattcattccttggcaaaacctacktgaactgacatgaagctgtttatattttttcttttttaaaatctctgtaaaaatgagtattttcacattttgctgtagataacatgtttgattacagagt

SEQ ID NO: 32384 - DNA, 201 bp, Homo sapiens
cctcagtttacctgcctttatctgctgatcctgactttattggtatttgtcttctctctcaccctgctgtcccctccttcaccaggatgaaaatgagcagsaaggcccaaactttaggatctaggatctggaacttctcctttattactttattggattgacttctctagatcaagctttttaaaaatctgcctctcaatc

SEQ ID NO: 32385 - DNA, 201 bp, Homo sapiens
cagcagaagaggtaaggaaaacgtgtgacaaaagctactaaaagttaggatctttccctacattgagccatttgctccctattaataattagttgtttaaraaccattctattttatccttcctgtgctttttctgtctgaattactctttttgagtgttatcatctattctaaagagattaaagaggtgttttagcagga

SEQ ID NO: 32386 - DNA, 201 bp, Homo sapiens
tttagtagagatggggttttgccatgttagccaggctggtctcaaactcctggcctcaagtaagtgatccgcccacctcagcctcccagagtgctgggatyacaggtgtgagccaccacacctggcaggtggattacttcttaaagcacttctttgtgttaaaacaggaaatgaaccagtgttaacagtgtgtgttactga

SEQ ID NO: 32387 - DNA, 201 bp, Homo sapiens
agaacctgatgcagcatccttatatatcatttattcatttattgtatctttccctcaaatgggaaacctattattttacctgttttgtttggttggttttrtattttgaaagtgaaaataatctctaggttggatttattttacttattatctgttcttatctttcttacaaactctttttttagtggattatcaaacagt

SEQ ID NO: 32388 - DNA, 201 bp, Homo sapiens
agcttccttggtttctggaactctttcctcttgaaaaatagaatagtgatgtatagcatgacactcatttatgtcattcttttttttttttttcacttcaracttacgattccagaggtaatctctgataggcacctaggggagatgtatttccatggctgtcatgtgcttcaccgtccttatctctctgcctgattcctt

SEQ ID NO: 32389 - DNA, 201 bp, Homo sapiens
ttggtttctggaactctttcctcttgaaaaatagaatagtgatgtatagcatgacactcatttatgtcattcttttttttttttttcacttcagacttacrattccagaggtaatctctgataggcacctaggggagatgtatttccatggctgtcatgtgcttcaccgtccttatctctctgcctgattcctttcacctc

SEQ ID NO: 32390 - DNA, 201 bp, Homo sapiens; identical to SEQ ID NO: 4155

SEQ ID NO: 32391 - DNA, 201 bp, Homo sapiens
ttgggaggctgagacgggcggatcacgaggtcaggagatgaagaccatcctggctaatacagtgaaaccctgtctctactaaaaatacaaaaaattagccrggcgtggtggcgggcgcctgtaagtcctagctactcgggaggctgaggcaggagaatggcgtgaacccaggaggcagagcttgcagtgagccgaaatcgc

SEQ ID NO: 32392 - DNA, 201 bp, Homo sapiens
ttaaataattatatatgtaatatgtactatattaaataattatatatgtaatatgtactatattaaatatatatgtaatatattaaataatatattatatrtaatatattaaataatatttatatatgtgatatgtaatatattaaataatattttatatatgtaatatataatacattaagtaatatataaaatatatat

SEQ ID NO: 32393 - DNA, 201 bp, Homo sapiens
ttcctggtttctataatattactaggttagctcctgtgagtgaatgacctgaaccatactattcaaatgctgctgttagtctcttggactttgtggttgakaagggtaaatttaatttgaaaatcagaatggggaggtcaaggtgaaaatctagagaggtaaaattggaaaaatggcttttgtccccccaaaagttgtctt

SEQ ID NO: 32394 - DNA, 201 bp, Homo sapiens; identical to SEQ ID NO: 4158

SEQ ID NO: 32395 - DNA, 201 bp, Homo sapiens
aaagtatattatctggtatttactcaacctgtcttttacacacttgataatttttgttttgttttgttttgttttgttttgttttgttttttgagacagagtcttgctctgcccccaggctggagtgtagtggcaccatcttggctcactgcaaccttcgccttccaggttcaagtgattatcctgcctcagtctccccag

SEQ ID NO: 32396 - DNA, 201 bp, Homo sapiens
caaagtatattatctggtatttactcaacctgtcttttacacacttgataatttttgttttgttttgttttgttttgttttgttttgttttttgagacagagtcttgctctgcccccaggctggagtgtagtggcaccatcttggctcactgcaaccttcgccttccaggttcaagtgattatcctgcctcagtctcccca

SEQ ID NO: 32397 - DNA, 201 bp, Homo sapiens
taatttttcaaagtatattatctggtatttactcaacctgtcttttacacacttgataatttttgttttgttttgttttgttttgttttgttttgttttttgagacagagtcttgctctgcccccaggctggagtgtagtggcaccatcttggctcactgcaaccttcgccttccaggttcaagtgattatcctgcctcag

SEQ ID NO: 32398 - DNA, 201 bp, Homo sapiens
tgttttcactggagctccttagagttccataacttaatgtctgaagttattttgagggagctgttttaaattgtccaattctgcagatagggagaggaggktatagaaattattctaccactcctagctgaaacttcaggaggtttttgatatgccagattgtaatccacaagttagaaaattcaaataataagtaattct

SEQ ID NO: 32399 - DNA, 201 bp, Homo sapiens
aagaagaatattacctattacgactccatgggtgggataaacaatgaagcctgcagaatactcttgtaagtagggagttgaggacagaagagtttgatatygggtataggtggtgtttttccagtaattgaactcagttgtttgataccttcaatggagtgattgataaaatcttcatattaagtaaaaatgcatattttg

SEQ ID NO: 32400 - DNA, 201 bp, Homo sapiens
atcgtttgagcccaggatttcaaggctacggtcagctgtgattgtgccactgcactgcagcctgggtgacagagcaagacactgtctcaaaaaaaaaaaamaaaaacgaaaaaacaccaacattcaagtggagggtggcagaactagtaagtcatttagcagggcaagggatagacaagaaactggcaacatttgcctttg

SEQ ID NO: 32401 - DNA, 201 bp, Homo sapiens
gaaagtcaaaccatcactgccatgtatctgcatatgaaaaatcttttcctattaaacctgttccaagtccatcttggagtggttcatgtcgtcgaagtctyttgagccccaagaaaactcagaggcgacatgttagtacagcagaagaggtaaggaaaacgtgtgacaaaagctactaaaagttaggatctttccctacat

SEQ ID NO: 32402 - DNA, 201 bp, Homo sapiens
gagatgtgatatcgctagtgccaccatcagaaagaaacgtctggaccctcctgctcaggttatgaaaatccccttaactgccacaatttgcttacctggcwcatcgcctcctggtaattcccttgaaccgtctctttcttggtgtaccctaacgtgatctctggatctatgcctcgtttctctttccttgagcttggtgat

SEQ ID NO: 32403 - DNA, 201 bp, Homo sapiens
tgcagttgttgacttgcattgcggctttggaactcttgtccttttcttcccaacttctacatcttctatcagttgtaccagctctactgtcttgcggtacstgtttatggatctggctttccctactggacagtgagctgctcagtggcagggaccctttcttaatgcacgtagtcggtgcacagtaaatgaatgtgtatg

SEQ ID NO: 32404 - DNA, 201 bp, Homo sapiens
gggaaaaactgataaaccgattttcttcatctcataaacacagagactttttttcttattctcaggttgtggactttagaaagaagaatattacctattaygactccatgggtgggataaacaatgaagcctgcagaatactcttgtaagtagggagttgaggacagaagagtttgatatcgggtataggtggtgtttttc

SEQ ID NO: 32405 - DNA, 201 bp, Homo sapiens; identical to SEQ ID NO: 4144

SEQ ID NO: 32406 - DNA, 201 bp, Homo sapiens
tttgtctgttccttttttagtgtcattatggattcagtattttgtaatccactataattgttatacttttaatgctcacattctcagaaatttggctagtsgaagccctttaagcttgcttctgtctgtttgaccttaactcatgaattttgggtaacacccttgctttctgtcattgcaggatgcccttgtactgtttct

SEQ ID NO: 32407 - DNA, 201 bp, Homo sapiens
tgtgtgagagacaaatatttctactgttacaactttaaacttaagtataataattttctagttctttactaagactcattttcattagcatcatgtttctrtcctcaaaattatagtaatagatgctaagcatagatactgattacaaaggaacaaagttacaattcattttgaaagtaaattagcttattttaattatca

SEQ ID NO: 32408 - DNA, 201 bp, Homo sapiens
cagatgaatggaagtgactgtgggatgtttgcctgcaaatatgctgactgtattaccaaagacagaccaatcaacttcacacaggtgagctgagccttccrtagggagctctaggattactttgtctccaagctgccctgtagatgtttttctctccagttgttctctttaggggcctctaccctaacctttagcatgctt

SEQ ID NO: 32409 - DNA, 201 bp, Homo sapiens
gttcaagatcagcctagctaacatggtgaaaccctgtctctacaaaaatacaaaaatcacctgggtgtggcggcgggtgcctgtaatcccagctattcggsaggctgaggcgggagaatcacttgaacctgggaggtggaggttgctgtgagccaaggtcgtgccactgcctccagtctgagtgacagagcaagattccat

SEQ ID NO: 32410 - DNA, 201 bp, Homo sapiens
ctcaaatgggaaacctattattttacctgttttgtttggttggttttatattttgaaagtgaaaataatctctaggttggatttattttacttattatctrttcttatctttcttacaaactctttttttagtggattatcaaacagttttgcgggaaagtcaaaccatcactgccatgtatctgcatatgaaaaatcttt

SEQ ID NO: 32411 - DNA, 201 bp, Homo sapiens
attagttgtttaagaaccattctattttatccttcctgtgctttttctgtctgaattactctttttgagtgttatcatctattctaaagagattaaagagrtgttttagcaggacttcattatttgtcttactattatatcttctatgcctgctggacagctgactttacttaatctttaatgttgcctgaatggtttctc

SEQ ID NO: 32412 - DNA, 201 bp, Homo sapiens
ggacttcattatttgtcttactattatatcttctatgcctgctggacagctgactttacttaatctttaatgttgcctgaatggtttctcatacatcaaastatctctctttgatctttgctagacccttcctaaaccgttgtctcctatggaaaaattgttactcttcctccgtagtttttgataaaattttatttcagt

SEQ ID NO: 32413 - DNA, 201 bp, Homo sapiens
tgagccagaagaatagctgctgactgatgcctgggggaccaagcccataattgtggagctggagccgcactgtgtcccttgcttcagtctgatctttgggragcctgcacagttctgacctcagttaagagctaagggaagagatttgggaatgtttggccctgtgtaacagcaaaaggattcattggtgagggtgtctgg

SEQ ID NO: 32414 - DNA, 201 bp, Homo sapiens
aacagctgtcccacagtgtatattccctatcttcttataccccagatgttgcatttggatccaaagattctggtactcttcatcatccccatcatcaccaytctgttccacatcagccagataacttagcagcttcaaatacacaatctgaaggtaaacatggtatcatataactacatttttagtcctaatagccaatta

SEQ ID NO: 32415 - DNA, 201 bp, Homo sapiens
agaactgctttacagtgttgtcataagtcaagcatttgggactcagaaaattattgaaatttgcactttgcatattttatatggtataaagttattacttyaaacaaaatgaaaattaggagtattatttataaagttattggtggtaatttataaaaaaacagtttactagtgtcctaaaaattattttgtgctctctat

SEQ ID NO: 32416 - DNA, 201 bp, Homo sapiens
aagatgaaacaacaattttcagacattggataacaggtagtaccaggcagtgatccctgaggaagggaaataaaaggtatgtatgctataatatccccagytttctagggtggggtgtgtgtgttgtgaaggagggactggtagagtctgtgcagaggggcttccctccagtctttggctgagtaccaatttgtgcatgta

SEQ ID NO: 32417 - DNA, 201 bp, Homo sapiens
ctacaggactctgtcccttttaaaaaatataattcagcaccttaattaattatttttatacttcaaaacactcgtcttagggttttttcaggttttaaaaygtaacattagctagcttctttaactttatcatgctatgcaattattgcttcctttactcttaagatcctaattttctttttttatttgagacggagtctt

SEQ ID NO: 32418 - DNA, 201 bp, Homo sapiens
atgagccctaggcactaaattcctgtaacatccacctccccccataatcattttaatagttaatatatatccacacatttccagatatgtactcagggtayagcaccacctctgattaagagctatctctgtaaagttatcaaaagaaccaaaaccagattgatttttctcaacctttttaatatgtgttataaatggctt

SEQ ID NO: 32419 - DNA, 201 bp, Homo sapiens
gaaatagagaattattattcttgtgttttcactggagctccttagagttccataacttaatgtctgaagttattttgagggagctgttttaaattgtccarttctgcagatagggagaggaggttatagaaattattctaccactcctagctgaaacttcaggaggtttttgatatgccagattgtaatccacaagttaga

SEQ ID NO: 32420 - DNA, 201 bp, Homo sapiens
agctggagtgcagtggcgcgatctcggctcactgcaacctccgtctcccgggttcaagcaattctcctgcctcagcctcctgagtagctgggactacaggygggcagcaccgtgccgggctaattttttgtattttcagtagagacggagtttcaccatgttagccaggatggtctcgatctactgacttcatgatccacc

SEQ ID NO: 32421 - DNA, 201 bp, Homo sapiens
tattcttgtgttttcactggagctccttagagttccataacttaatgtctgaagttattttgagggagctgttttaaattgtccaattctgcagatagggmgaggaggttatagaaattattctaccactcctagctgaaacttcaggaggtttttgatatgccagattgtaatccacaagttagaaaattcaaataataa

SEQ ID NO: 32422 - DNA, 201 bp, Homo sapiens
gtgaacccgttatatagctagttgactgatttttgacaaaggtgctaggactacagaaagggaaaggacagtctcttcactaaatggtgttgggaaaattmtatttccatatgtagaagaatgaaattaggtccttatctcataccatatgcaaaaatcaactaaaaatggaataaagactttaagactagaaactctaaa

SEQ ID NO: 32423 - DNA, 201 bp, Homo sapiens
actaaatacatatttaccttctagtgaacattctttgaattaaattgtataacaaatattttgcctgtttttttccttgaagcctgaattatttcattagwttgtctatgtgttttcctttcttgttagtatgtagtattaatacgtataatatataaatataattatattgagttctgaaatagtcttagttctgctata

SEQ ID NO: 32424 - DNA, 201 bp, Homo sapiens
cttgcattgcggctttggaactcttgtccttttcttcccaacttctacatcttctatcagttgtaccagctctactgtcttgcggtacgtgtttatggatmtggctttccctactggacagtgagctgctcagtggcagggaccctttcttaatgcacgtagtcggtgcacagtaaatgaatgtgtatgaaagaatttgaa

SEQ ID NO: 32425 - DNA, 201 bp, Homo sapiens
ccaaaggcatgttattaatatcttatgtaatttactttaaactaaataagacttttttctcctgtgttcccctttctcctgtgtccactgctcatattcayctgccttccctaaaaaaggaatatttgagggatgataagcactagatgccagctatagagacctcaacagaaaccataatcccaagaatcactccgagac

SEQ ID NO: 32426 - DNA, 201 bp, Homo sapiens
ctcccaaagtgctggaattacaggcatgagccactgtgttaggcccataattcttaattatcttaaggattctgcctgagctttggcagagctaggattcygtttacatgctagtttgagaaatacttgccttattggatgtgtttaaactgttttttttttttgttttcttatagacagttcaagaagaagaaagagaga

SEQ ID NO: 32427 - DNA, 201 bp, Homo sapiens
ttgaacctgggaggtggaggttgctgtgagccaaggtcgtgccactgcctccagtctgagtgacagagcaagattccatctcaaaaaaaaaaaaaaaaaaactcaaaattagtaagccttagatataagacagggtttttgagttcacaatattcttcttgccaatttgccaatttttcccattagatagtataaagagac

SEQ ID NO: 32428 - DNA, 201 bp, Homo sapiens
attaaggcattatctcactttttctcaaaatgtggtccatggatgacctgcattggaatcatctctcataggcctcttcattcttgtaactatgagggagkgtggtggagacaggcatttttaacaaacatctcaggtgtattttaaagtctgagaaccactgaatttaccttttcttgttgaagatttgaacattgaaga

SEQ ID NO: 32429 - DNA, 201 bp, Homo sapiens
gaagacttaaagagaattatgcactgtttgattttctttagatcttgtctgatttggattcagaccacatgtaatgattttaaagagttgatttcattgartttagaatattcagctgtgtttctctagtctgagtcttgaagaaaaaagaaaatgtattatgctaagaataagtacctcaaactttccaggtaatgataa

SEQ ID NO: 32430 - DNA, 201 bp, Homo sapiens
cctcacctagcctcttaatggagtgggaaggggcagggacttggaaattagaggctcaaaatgtaaagaaggctgatggcaagcctggggagaggcctgaraatgagggaagggctgagggctgtgaggagtcctcacacaaagaccctagcacaggtcttcggcagtgaacatgcccctggccctccgcagggtggagtc

SEQ ID NO: 32431 - DNA, 201 bp, Homo sapiens
tgaagatttgaacattgaagaagacattcactcattggtattctcactctttaaggctcctattctgcagttcatctcttctgaacaaataagtattagcygaccatgttgcagcatgagggaatactgtgggatttctttataggaatccagttttacttccctttctacctaagttctactcattttagatcacttata

SEQ ID NO: 32432 - DNA, 201 bp, Homo sapiens
gctttccaaaatcgcctccatttatgtatgatattttttaaatggacattgaaaaagttatattattattaaatatttgaggtattgggggagaagttacrgtcttcacctcctaactccaatttattttaagtatattaattacactacagtttttaaactgatctgttcctaagcctaaacctgtaggtacctgtttta

SEQ ID NO: 32433 - DNA, 201 bp, Homo sapiens
tcatatttaaattttctcagttgacccaaaagtatcttttatagttagtttagttttgcatctggaagttattggctttgtcacttataactagaacagcctttttttgttttgttttgttttgttttgttttgtttttttgttttgttgagacggagccttgctctgtcggccaggctggaatgcagtggtgtgatctcg

SEQ ID NO: 32434 - DNA, 201 bp, Homo sapiens
tattattttgtcttcattaaagattttctatatgcatcatttagcaggtggcttttttaatgcaataaagccatgctgttattttaaaaaaatgttattayagaagtagtacaaatactttgggaaagtttagaaaatatagttaagaaaaataaaaaataaaaacatcacattgccaccagcctgagatcaactctgtaa

SEQ ID NO: 32435 - DNA, 201 bp, Homo sapiens
agggatagagtgctggtgggtgtccagggcatgctgcaccatctctgcgatgtactggttgatgaggatgatgccagtgtcatcccggtttagaaattgcyggaaagtgtcttcgatctcattgatggtcgtatccttctccaccaccaggaaattggggtggcagttcttgttaagctcccctatgctgcccagcaggaa

SEQ ID NO: 32436 - DNA, 201 bp, Homo sapiens
atttatttttaattattattattattattttttgagatggagtctcgctctgtcacccaggctagagtgtaatggcgcgatcttgactcactgcaacctcygcctcctgggttcaagcaattcacctgcctcagcctcccgagtagctaggattacagctgcctgccaccatgcccggctaatttttgtacttttagtaga

SEQ ID NO: 32437 - DNA, 201 bp, Homo sapiens
actcctcatgcttcagtctccttgccttaccacaatatgggaataccagttataccattgaaactgcctcaacaggaatttttttttttttttttttttttgacacagagtctccctgtgttgcccaggctgaagtgcagtggtgtgatctcagctcactgcaacctctgcctcctaggttcaagcaattctcctgcctta

SEQ ID NO: 32438 - DNA, 201 bp, Homo sapiens
tggctcatcgcctcctggtaattcccttgaaccgtctctttcttggtgtaccctaacgtgatctctggatctatgcctcgtttctctttccttgagcttgrtgatttctgtttatcggtgcctgtgcagtatttccactatcttgttagcagtaacttgcttctttatcactttcaagtcagccttgttaaagtcatttta

SEQ ID NO: 32439 - DNA, 201 bp, Homo sapiens
tagtcctaatagccaattaactgttcattagctcattacaggcaacattgtaatatacatataaataaatgagcataccgaatctgaaaatatgaagtccraaatgttccaaaatctgaaactttttgaataccaacatgatactcaggaaatgctcagtggagcatttgggattttggatgtttggatttgggatgctca

SEQ ID NO: 32440 - DNA, 201 bp, Homo sapiens
aatccccttaactgccacaatttgcttacctggctcatcgcctcctggtaattcccttgaaccgtctctttcttggtgtaccctaacgtgatctctggatmtatgcctcgtttctctttccttgagcttggtgatttctgtttatcggtgcctgtgcagtatttccactatcttgttagcagtaacttgcttctttatcac

SEQ ID NO: 32441 - DNA, 201 bp, Homo sapiens
taagttagtgtaaggattttagactttctttgtgagggtcctgtatttaatattcagtgtacatcaacaatatgtttcataatgagagtggtctacatttsgtcacgttccttttcattttctagaactagtgtttatgattctcgagcacgagaaagattgcgccagattgaagaacagaaggcattggccttacagctt

SEQ ID NO: 32442 - DNA, 201 bp, Homo sapiens
attattttttgagatggagtctcgctctgtcacccaggctagagtgtaatggcgcgatcttgactcactgcaacctccgcctcctgggttcaagcaattcmcctgcctcagcctcccgagtagctaggattacagctgcctgccaccatgcccggctaatttttgtacttttagtagagatggggtttcgccatgttggcc

SEQ ID NO: 32443 - DNA, 201 bp, Homo sapiens
aatactcttgtaagtagggagttgaggacagaagagtttgatatcgggtataggtggtgtttttccagtaattgaactcagttgtttgataccttcaatgsagtgattgataaaatcttcatattaagtaaaaatgcatattttgtatctaagtaagtttagtttaaaaacaataccaaagtatgccctaatgggagcaat

SEQ ID NO: 32444 - DNA, 201 bp, Homo sapiens
atttaagcacgctctttgacttatgacaggtttattgggacataaccctatcataaatcaaggaacatccacagatttctttatcccacttactctgaagytttatctttcagagattgcaggagcgggaacattcagtacatgattcagtagaactacatcttcgtgtacctcttgaaaaggagattcctgttactgttg

SEQ ID NO: 32445 - DNA, 201 bp, Homo sapiens
tttattttaagtatattaattacactacagtttttaaactgatctgttcctaagcctaaacctgtaggtacctgttttattttagaaggttatttttacarcaaaagaaaactgggttgggtatcttttcctaagtaccttctttgcataagcatccctggctaatctgggtatactcaagcttcacagctgtggaggatt

SEQ ID NO: 32446 - DNA, 201 bp, Homo sapiens
aaatgagtgccagttcacatgtccataataatgatgggagctatcttaaaaagcaccattttcaaagtaccatacttcgtaggctttcaaagttactgccyttgagaagctaacatcctgatggagtattattaggtatccttaagtattgatactcattgaagaatacttaattttggccagacacagtgggtcatgcct

SEQ ID NO: 32447 - DNA, 201 bp, Homo sapiens
ggttcttatttttaatctaagaaggaaagaagcttggaaagatgtcattttttttgttgttggtcttccaggagattcctcagcagatgaatggaagtgaytgtgggatgtttgcctgcaaatatgctgactgtattaccaaagacagaccaatcaacttcacacaggtgagctgagccttccatagggagctctaggatt

SEQ ID NO: 32448 - DNA, 201 bp, Homo sapiens
ccagaagaaatattacgtgttcttcaggcggaagaagaatatcaaatggaaatgtcagtctacacaaaggaatgaagagtggaattgctctcattttttcmtacctctagaagacaggtgactaaggcagaactaaaacaacatactgtgggatttataacatacagaagtaaaatataatcacagcacaaagaaggagac

SEQ ID NO: 32449 - DNA, 201 bp, Homo sapiens
gtctaatagttacttttaaaaaagtaaaatgggccgagtgcagtggctcatgcctgtaatcccagcattttgggaggccgaggcgggtggatcacttgggktcaggagtttgagaccagcctggccaacatggtgaaaccccgtctctacaaaaaatacaaaaattagccaggcatggtggtgcatgcctgtaatctcagc

SEQ ID NO: 32450 - DNA, 201 bp, Homo sapiens
ttgagcccaggatttcaaggctacggtcagctgtgattgtgccactgcactgcagcctgggtgacagagcaagacactgtctcaaaaaaaaaaaaaaaaaacgaaaaaacaccaacattcaagtggagggtggcagaactagtaagtcatttagcagggcaagggatagacaagaaactggcaacatttgcctttgatgac

SEQ ID NO: 32451 - DNA, 201 bp, Homo sapiens; identical to SEQ ID NO: 4147

SEQ ID NO: 32452 - DNA, 201 bp, Homo sapiens; identical to SEQ ID NO: 4148

SEQ ID NO: 32453 - DNA, 201 bp, Homo sapiens; identical to SEQ ID NO: 4149

SEQ ID NO: 32454 - DNA, 201 bp, Homo sapiens
ggttgttccagactttaggaattaatatggaaacaaggatctgaatgttgtgctgaaaaagagaagggaggactagatgaagtggaaagaagtaatcgggrattactgggaaggaatagaaaccaaaatgttagaagtaaactgattaacagtaaatttataaacaatcgaatggtgataaatatagtctgaggattatat

SEQ ID NO: 32455 - DNA, 201 bp, Homo sapiens
aaaactacatgtaaccaagaatgaataatttaaaagaccagaaatacaactgagactgtttgttgaaaaccttgcaaaagaaagaagtatggggaaaggcrtatcaggtctagacaaaagcattgaaaattaagggtgtctctgtgtccctacagcaacacatgccatacttccggaagcggatggtctgggagatcctcc

SEQ ID NO: 32456 - DNA, 201 bp, Homo sapiens
tgcatctatttttacatacaaatagtaaacattaagtggcagttaaattaaggcattatctcactttttctcaaaatgtggtccatggatgacctgcattrgaatcatctctcataggcctcttcattcttgtaactatgagggagtgtggtggagacaggcatttttaacaaacatctcaggtgtattttaaagtctgag

SEQ ID NO: 32457 - DNA, 201 bp, Homo sapiens
gtcatgagtgtagctggtccatgtcagtcactgacatcttatttcacagctctgttcgtttggattaaactctgtctctatttctaggaggcagccatgcwtaaagacgagtttcatctgaaatttttcatgtgtgtgattcagtctcgccagttagtcaggactcctcagagaacaggtacccttgtctcctgatcatac

SEQ ID NO: 32458 - DNA, 201 bp, Homo sapiens
atgtgaccaaggccatggatgagaagaaatttgacgaagccctgaagctgagaggccggtgaggagatgacgggaagctcactagctacagaaatcagagscgtgaacgaagccaaagatctccatggctccaggcccaaaacatgagcttctgctgcttccttttctgattctctctgcagcaagttcctgcccaagaaa

SEQ ID NO: 32459 - DNA, 201 bp, Homo sapiens
ctggttccctgcccctgattgcctcccacaaagaaccattacaagacaagaggctgagctgtccatggtttacccaagtctctgcttgttttcttcctttkactctgcgtaaccctctctctgtccctctgttggtcccttcagctggtggttaagcgtctgggatatgacacccgggttactgtcttggggcatgtgcag

SEQ ID NO: 32460 - DNA, 201 bp, Homo sapiens
tggtgtaaagagtgggtagtgctctgaggctggaagccactgtggcaggtgaacataaatggaaggtatccgttagagacagaatctcattgaggggcccyggtgctcttacccttgccccacgaataaaatggaggctctccagaccttttatcaactatgaggactaggagaacttgttgggtatgggtgaggctattt

SEQ ID NO: 32461 - DNA, 201 bp, Homo sapiens
agctaagactaaaaggcaagaggggccattgagtgaagagcaagggggagagctgggagtgaggtgggaaggtatgggccgggagcaggcggtagggagarctgaaaggagcagaaaggaaaagaagagatacggcatcctaagctggagccgagagggggatgggcagggcagtcgtgaaggatcctagccccttggcca

SEQ ID NO: 32462 - DNA, 201 bp, Homo sapiens
cttgtcagtctacaagggtgtggctttcctctggaagaagtccaaagctctcaggctgcaaagctcagacttggtatagtgggagagcctgactgaggtgkctctagccagtctaattgccgttcctttagctagtggcatcttgattcctgctgtgtcttaactgaccattgtcttaaattctagagtggatcatgaccc

SEQ ID NO: 32463 - DNA, 201 bp, Homo sapiens
atgcaagaacttgatgagctctaagggccctgctagcctatggagaatatagttccagggtttaattaatggcaaagattaaagagtgataagaatcaggmccctgatcatgtctttctaactataacccattgtccttgcagacctgtgaccgcatcaagcagtcagcagctggcaccaagcgtcgggtgtttatcattg

SEQ ID NO: 32464 - DNA, 201 bp, Homo sapiens
tcagtaacacacactgttaacactggttcatttcctgttttaacacaaagaagtgctttaagaagtaatccacctgccaggtgtggtggctcacacctgtratcccagcactctgggaggctgaggtgggcggatcacttacttgaggccaggagtttgagaccagcctggctaacatggcaaaaccccatctctactaaa

SEQ ID NO: 32465 - DNA, 201 bp, Homo sapiens
aggaagctggctggagctatgttgggggctggactggccaaggtggctctaaacttgggactaaaaggtaagtagcactgcagaggcacctcctcccagtyacctcttaaagttgcccttggatgtgggttcattatgccatggtctgcttcaaccaccctgttgtctgggtcctccaccctcaacctcacagttgctgcc

SEQ ID NO: 32466 - DNA, 201 bp, Homo sapiens
tttccaaccaagggggatccaggggtagggttagaactcaagcagtggcaccagtcccacacaggcctcctagtgctttagccttgtgcagagctctgtgkcttatccccacagatagaggaagctggctggagctatgttgggggctggactggccaaggtggctctaaacttgggactaaaaggtaagtagcactgcag

SEQ ID NO: 32467 - DNA, 201 bp, Homo sapiens
gagaaatgttcaaaggaatatgggaaagtgaaagttgtatgcatagtattataaatcagcgtagacctactaaagctgaaatataagacccaagggggaargtctgtgtgtgtgtgaaacagagagagagagaaagagagagagaaagagaaagagggatggggagggaaaggaagaagggagagaggtggggatggatca

SEQ ID NO: 32468 - DNA, 201 bp, Homo sapiens
accttccgttctgagtggagtgacttgttgagtgacctccagaaagcaggtaagagagttttcacatcagtattgcttatttgtgtcggtacgtgcacgcrtgtacacacacacatcgcccccgccctgcttttacctcccattggagaaaaatgttacccagacacaaataggcagtctttgccctcctttttctggtat

SEQ ID NO: 32469 - DNA, 201 bp, Homo sapiens
aaacctgtggcttcccccgacagatagggacctgagatctaaatcgatctcaggctatctcgtgttttattgagaatcacagaacgttagtgcttgtagargttattggagatactttagtcttaccaggttcagagaagtgaagtgatttcccaaaggttttaagtgcacggcccatctaggactaggaaacaagtttct

SEQ ID NO: 32470 - DNA, 201 bp, Homo sapiens
gtagccagggaaatagcccacctgcaaatccccataacatcacagccacatgtcactagggattgagagtgatagaaactgaaattctatggaggcaaggmggcaaaacagaaaactcaaaatagagctgagaggtcctagctgaaggagaagctcaaattcagaagtcgcctgcccagagctgagtttgatggactctag

SEQ ID NO: 32471 - DNA, 201 bp, Homo sapiens
cctggagttgaaactgtcgctgtgctcccccctcagaccaaagatgtgaccaaggccatggatgagaagaaatttgacgaagccctgaagctgagaggccrgtgaggagatgacgggaagctcactagctacagaaatcagaggcgtgaacgaagccaaagatctccatggctccaggcccaaaacatgagcttctgctgc

SEQ ID NO: 32472 - DNA, 201 bp, Homo sapiens
ctccagggtgggagcccaaccccatttgataggaattttgccactaagatgggcgccaaggctatgaactggatgtctgggaaaatcaaagagagttaccrtaatggtaggtggggtgagagcgagtgccctctatagaggctggttccccagtatagaagctgactgcccatccctcattgcagggcggatctttgccaa

SEQ ID NO: 32473 - DNA, 201 bp, Homo sapiens
agtagtcaagaaatatcactcgggtctcaaggaaggcgggagatgaagccggtaccacagaaagccgagcttcccggtgaaaacagctctccccagagaasacccagctctggcgggaaagccccggaatcgcaaccggcctttccccaagtacggctgggcgctgggatggggcctgctgtaacggcagggagacggtct

SEQ ID NO: 32474 - DNA, 201 bp, Homo sapiens
aggaggaagaggaggagaaaggcaagcaggaggaggcggagccttcttgtcagcatctgttagtggaggttgggaagcctctcctccttccccctccctckttgcctccacctggctcctccccatgttcgtccatcacccctcccccctttcccaaggacaatctgcaagaaagcagcggcggaggagagctaagactaa

SEQ ID NO: 32475 - DNA, 201 bp, Homo sapiens
cagttatgttaggccatcacagcattggaataggggatatctcagcatgttgagccctgtctctggggagctgacttctacctcttccaaagggaggcacrgtgattggaagtgcccggtgcaaggactttcgggaacgagaaggacgactccgagctgcctacaacctggtgaagcgtgggatcaccaatctctgtgtca

SEQ ID NO: 32476 - DNA, 201 bp, Homo sapiens
gagataccacagagtaggagagttggagaaatgtttacgtgagacgcagaagtagtcaagaaatatcactcgggtctcaaggaaggcgggagatgaagccrgtaccacagaaagccgagcttcccggtgaaaacagctctccccagagaagacccagctctggcgggaaagccccggaatcgcaaccggcctttccccaag

SEQ ID NO: 32477 - DNA, 201 bp, Homo sapiens
atcaccaagctcaaggaaagagaaacgaggcatagatccagagatcacgttagggtacaccaagaaagagacggttcaagggaattaccaggaggcgatgwgccaggtaagcaaattgtggcagttaaggggattttcataacctgagcaggagggtccagacgtttctttctgatggtggcactagcgatatcacatctc

SEQ ID NO: 32478 - DNA, 201 bp, Homo sapiens
catacacattcatttactgtgcaccgactacgtgcattaagaaagggtccctgccactgagcagctcactgtccagtagggaaagccagatccataaacasgtaccgcaagacagtagagctggtacaactgatagaagatgtagaagttgggaagaaaaggacaagagttccaaagccgcaatgcaagtcaacaactgca

SEQ ID NO: 32479 - DNA, 201 bp, Homo sapiens
cttcctggtctcaggaagcctgctagaaggcctggcagcatacatgtatctcccagagagggtaattggcctagatgtgggtggtggcttgatcttggccrtagggtcacttggactgtgtcatatgtctatctcttgcagccaccagaggacatttgtgttagaagtaatgggccgccactgtgggtaagatcctcattc

SEQ ID NO: 32480 - DNA, 201 bp, Homo sapiens
ctcttagcatttgaaaataccaccctggtttcctggggcagggagagggtggaggagtgatcacaggatgctttgctctttatggaaaggtcataaacaasactatggggactgacacataagcagatcttactctagggtcacagggaaggtctggccctgaaaataaccttaccagaggactggagccagagccagaag

SEQ ID NO: 32481 - DNA, 201 bp, Homo sapiens; identical to SEQ ID NO: 4182

SEQ ID NO: 32482 - DNA, 201 bp, Homo sapiens
tatgatagtctcacgagcatccaggactcactaatgggaggaggtggcttgactctcagagaatctcttcccagggatcctgtcttaatcttgggaatttrtagagaagcctaacgggctgaacaggtataatgtgtcacacagggttatcaaggcctggtggatggtggagatcacatcaaggaagccacctgggagagc

SEQ ID NO: 32483 - DNA, 201 bp, Homo sapiens
cctttggaagtaaagcagccttgagaagagtttttattaaagaggcattaatgatggaggacctttgcgtagcgaggaaacctttctgcctatgtaacagyatggtggtgcaggatatggaaggcatatttagagtcagtataaatattgatgcgtagtccctttgcaagagtgagagctcaagttaagacaatgagttca

SEQ ID NO: 32484 - DNA, 201 bp, Homo sapiens
aactgggaaaaaaggcagcaatgaggtgtggctgtagcccaggaacagtcagggaagcagataatttagttaaaatgccttgacctaacaagggaactggrcaggtggggataactaaaaaggagtgcttaaaagagtattgtccaagttgtcacgagagttggggagttttaaggggtctagaagcctggctgtcaatac

SEQ ID NO: 32485 - DNA, 201 bp, Homo sapiens; identical to SEQ ID NO: 4183

SEQ ID NO: 32486 - DNA, 201 bp, Homo sapiens
cgccgccactcaccgaaccggaaccggctgccatgcgaaggggtttccggccgggcgcggaacgcaaaacccgggaaccgccgcgaaccggaaccgccttyacagcaccggaagagtcgctaggtggctgaagaggagggggctggggcaggaggtcaaagaacagagttaaggaccagtggggcgcctgcgcggtgtggc

SEQ ID NO: 32487 - DNA, 201 bp, Homo sapiens
tcacacaaggctgggcacctctagtgctactgctagatatcacttactcagttagaattttcctaaaaataagctttatttatttctttgtgataacaaaragtcttggttcctctactacttttactacagtgacaaattgtaactacactaataaatgccaactggtcactgtgcttttgcttctcctgttatcatctt

SEQ ID NO: 32488 - DNA, 201 bp, Homo sapiens
gccctgtctctggggagctgacttctacctcttccaaagggaggcacggtgattggaagtgcccggtgcaaggactttcgggaacgagaaggacgactccragctgcctacaacctggtgaagcgtgggatcaccaatctctgtgtcattgggggtgatggcagcctcactggggctgacaccttccgttctgagtggagt

SEQ ID NO: 32489 - DNA, 201 bp, Homo sapiens
ttcaaattctttcatacacattcatttactgtgcaccgactacgtgcattaagaaagggtccctgccactgagcagctcactgtccagtagggaaagccakatccataaacacgtaccgcaagacagtagagctggtacaactgatagaagatgtagaagttgggaagaaaaggacaagagttccaaagccgcaatgcaag

SEQ ID NO: 32490 - DNA, 201 bp, Homo sapiens
tttgtccatgaggttggttctgtactttgttcttcatcattctttctctgtcttcttctaaatctgccttctatccccttcccacattctgtgtccttacmtcccagttagttacattgctgtgtttgattttccttgactccgtagcttcatgagtcactctttcctacttgactccaatagtgatggtgggacctgagc

SEQ ID NO: 32491 - DNA, 201 bp, Homo sapiens
ctttaatcagacttcctttgcccctgcatagaaagcagcaagaaataaacccagctgatggttttttcctattgtttattgaatttgtacagattatttcytatttgccctcatctttcctgcttttttcattctccttttgctctggtgtacctaaaactcacctcagactccctttgctctgatgactcatttggacct

SEQ ID NO: 32492 - DNA, 201 bp, Homo sapiens
tggggtttgaggaccggaatctaatttttgaagatttttctaatgtcaggagctgactgggtggtaaaatgcttattaggaataaggtggccttctggccyctctgggtctagggtggtaaagcgtctaagggttgctgctaagccggccatgaactgggctgggttctttacctcgggtagtttctttaagtttgtcata

SEQ ID NO: 32493 - DNA, 201 bp, Homo sapiens
tgcgaaggggtttccggccgggcgcggaacgcaaaacccgggaaccgccgcgaaccggaaccgccttcacagcaccggaagagtcgctaggtggctgaagwggagggggctggggcaggaggtcaaagaacagagttaaggaccagtggggcgcctgcgcggtgtggcgaggcccgagaagcgaagggagcatttaagact

SEQ ID NO: 32494 - DNA, 201 bp, Homo sapiens
gaagactttgatgagaggattattctagattcagagaaaagactaaataaagtactgattcgttatctttagccaaatgtaatatctctggattccagggygccttttcttaggagcaacctctccgtgacttcttttgtccctcctttcaggtatgaatgctgctgtcagggctgtggttcgagttggtatcttcaccgg

SEQ ID NO: 32495 - DNA, 201 bp, Homo sapiens
gtgaggaactcatgtcgtcaaacaacagagatgagcacagagctactggtgcccaaacataaaaaacccctggcctgatgtctttctgcttctgccagccyaagaaattcacagggactccctccagggtgttctgctccttgttctaagtgcagttgtatatggagattctgtgctctagtccttaagaaaaatggaata

SEQ ID NO: 32496 - DNA, 201 bp, Homo sapiens
accccaggactctggggagtgaaggaactaagccgctgccatatctgagctgagtacttagggggaggaggaagaggaggagaaaggcaagcaggaggagscggagccttcttgtcagcatctgttagtggaggttgggaagcctctcctccttccccctccctctttgcctccacctggctcctccccatgttcgtccat

SEQ ID NO: 32497 - DNA, 201 bp, Homo sapiens
atcttttagagcaagtcgcgtttctttccttccctcccaccaacttccccttctccttttctccatggttatcaagaccatctgttatcattggccccctrggaagcaggttggaggagataggatgagccaaaaataagaattaagattaactattaggaaggatatccacatcccagtatttcaaaaatgggagaaagt

SEQ ID NO: 32498 - DNA, 201 bp, Homo sapiens
cagaagactttgatgagaggattattctagattcagagaaaagactaaataaagtactgattcgttatctttagccaaatgtaatatctctggattccagkgcgccttttcttaggagcaacctctccgtgacttcttttgtccctcctttcaggtatgaatgctgctgtcagggctgtggttcgagttggtatcttcacc

SEQ ID NO: 32499 - DNA, 201 bp, Homo sapiens
tctcattgtcaggtaagatcacagatgaggaggctacgaagtccagctacctgaacattgtgggcctggttgggtcaattgacaatgacttctgtggcacygatatgaccattggcactgactctgccctgcatcggatcatggaaattgtagatgccatcactaccactgcccagaggtaaggggacttgggaggtaggc

SEQ ID NO: 32500 - DNA, 201 bp, Homo sapiens
aaataggcagtctttgccctcctttttctggtattgtctacaattccttttggctagagtttctctctctctagatatctcctctttaggcatgccaggtrcctcacccagtggctcctggtttgcttctcattgtcaggtaagatcacagatgaggaggctacgaagtccagctacctgaacattgtgggcctggttggg

SEQ ID NO: 32501 - DNA, 201 bp, Homo sapiens
aatcaaagagagttaccgtaatggtaggtggggtgagagcgagtgccctctatagaggctggttccccagtatagaagctgactgcccatccctcattgcrgggcggatctttgccaatactccagattcgggctgtgttctggggatgcgtaagagggctctggtcttccaaccagtggctgagctgaaggaccagacag

SEQ ID NO: 32502 - DNA, 201 bp, Homo sapiens
gatgtctgggaaaatcaaagagagttaccgtaatggtaggtggggtgagagcgagtgccctctatagaggctggttccccagtatagaagctgactgcccrtccctcattgcagggcggatctttgccaatactccagattcgggctgtgttctggggatgcgtaagagggctctggtcttccaaccagtggctgagctga

SEQ ID NO: 32503 - DNA, 201 bp, Homo sapiens
tcgttgaggctaactcaactttttctcctccctttctcatttctattcagtcaacttctcttttccctgaccttagtttattccccaaataggttccaatyggggtgggagggatcagggaggaattaggaccttagtagtcttgggcttgattacatgacatttcagcttgtcagtctacaagggtgtggctttcctctg

SEQ ID NO: 32504 - DNA, 201 bp, Homo sapiens
taaaatgactttaacaaggctgacttgaaagtgataaagaagcaagttactgctaacaagatagtggaaatactgcacaggcaccgataaacagaaatcaycaagctcaaggaaagagaaacgaggcatagatccagagatcacgttagggtacaccaagaaagagacggttcaagggaattaccaggaggcgatgagcca

SEQ ID NO: 32505 - DNA, 201 bp, Homo sapiens
gaatgaagaaactgaggaaggagggtacggaggtctgagtttaggaatagtgaccagattaggaatgcagagccctagttgagtttgcagaaaccacagayctggcttttattgcatctgtcttctctgctggcagagtaccatgccaatactgaattctttaacatgtacttgagcattgatcctgaaaccttggtagaa

SEQ ID NO: 32506 - DNA, 201 bp, Homo sapiens
ctaggaaggaaaggagttgttgttttgtagaagggattggggtttaggagatttgccagacacgatcagcagaacacgtgtgttttcatgaagaattatgytgagataggtaatggataaggaagaaatttgggcctgactgaagtaatgggggctgtccgtgaagccttgtggcagtacagcccaggtaatttgctgagc

SEQ ID NO: 32507 - DNA, 201 bp, Homo sapiens
attggggtttaggagatttgccagacacgatcagcagaacacgtgtgttttcatgaagaattatgttgagataggtaatggataaggaagaaatttgggcytgactgaagtaatgggggctgtccgtgaagccttgtggcagtacagcccaggtaatttgctgagcctgatgggtgtcagggtcagtccaagtgaaagtga

SEQ ID NO: 32508 - DNA, 201 bp, Homo sapiens
tttctctgagaaaggtaatgtaaatgtaaaagaagtttttgaggctattctatagaagatgtcataattcaatgttcctcaaaggcagggactatatttatttttttaaacctctcggcacctaatgcaaaatctagcacacagactcccaagaaatgtttgcttaaagacggatagagggccacaggggcaggttttatt

SEQ ID NO: 32509 - DNA, 201 bp, Homo sapiens
tatctcagcatgttgagccctgtctctggggagctgacttctacctcttccaaagggaggcacggtgattggaagtgcccggtgcaaggactttcgggaaygagaaggacgactccgagctgcctacaacctggtgaagcgtgggatcaccaatctctgtgtcattgggggtgatggcagcctcactggggctgacacctt

SEQ ID NO: 32510 - DNA, 201 bp, Homo sapiens; identical to SEQ ID NO: 4180

SEQ ID NO: 32511 - DNA, 201 bp, Homo sapiens; identical to SEQ ID NO: 4181

SEQ ID NO: 32512 - DNA, 201 bp, Homo sapiens
ccaattagctgtgtcagtagattccattcattgtttgtagttcccaatcagctttaaaaaaaaaagtttttcaaatttgcatacaagtcatctaaaatcartaacaacttgatctaatttagaaaaatgaaagagtatcgttcactaaagcagatctcttttgggtagatggaccatcacaaaaggagctcttacatgctt

SEQ ID NO: 32513 - DNA, 201 bp, Homo sapiens
ccatgtagtctcgcctagctatatctggggaatcggccggatagttccattggggatcgcctcagggaactgctctaatgccttcctggaggtgtggttcrtgaagccagcagttatcagcatgcgattgggctagagaaaaaactttcccattcatctggggagagggtagaagttaggatgacatttaggtcactccag

SEQ ID NO: 32514 - DNA, 201 bp, Homo sapiens
gtgataaagaagcaagttactgctaacaagatagtggaaatactgcacaggcaccgataaacagaaatcaccaagctcaaggaaagagaaacgaggcatakatccagagatcacgttagggtacaccaagaaagagacggttcaagggaattaccaggaggcgatgagccaggtaagcaaattgtggcagttaaggggatt

SEQ ID NO: 32515 - DNA, 201 bp, Homo sapiens
tcccatctgtaaaatgttcctaaggaaggtgggagattctacatcctccttagtaatgaaacccagtatctcataatatacaacctcaaacctttttatcwtgtctttattggaagaataatgctatattcctcctaactttattaagaacaggagaatattattaaattctagctgggtagcttttgtctctatgatttc

SEQ ID NO: 32516 - DNA, 201 bp, Homo sapiens
gatactgcccaactgtttccagaatagctgtaccattccatcagcaatttatgaaccacctgttttgtttgcatccttaccagcatttgggggtcgtcacyttttttttttttttttttttttttactattctgataggtatatagtggtatttcttttttctttctttctttttttttgagatggagtctctctctgttg

SEQ ID NO: 32517 - DNA, 201 bp, Homo sapiens
cccagggacttatagatacctctcttggggtatctataaggctttctttacctagagctatttttcctgtgaatacctggatattgcagcttctgctgctrgcaccatggattgcaaggagctaaggggaaaggattggcagtacctgggtacagttagaaatctcagtgcagagagaggaaaaatactacaaaacacatt

SEQ ID NO: 32518 - DNA, 201 bp, Homo sapiens
aatgagccagaattctccaccagtatcccaaagtcatggctgcccaggagtacatatgatatgaaaacctaagtatacttacctctctcaggtaagtataytttctctcagggatagaaagccttaatttcccagggacttatagatacctctcttggggtatctataaggctttctttacctagagctatttttcctgtg

SEQ ID NO: 32519 - DNA, 201 bp, Homo sapiens
cccaaactttcaggccttaccttagatcagttatcagaagcatttggcactgttccaacttcttgaaactgtccacttttggcttctaagacattgctaartcctggttcttttgtatttcttgctgccccttattagtttttatcatggaaccccccttccccttcctgttccttcaatgttggttttcctcagggttgc

SEQ ID NO: 32520 - DNA, 201 bp, Homo sapiens
ctgagaggccggtgaggagatgacgggaagctcactagctacagaaatcagaggcgtgaacgaagccaaagatctccatggctccaggcccaaaacatgarcttctgctgcttccttttctgattctctctgcagcaagttcctgcccaagaaaattagttgtgaggtgactgggaggctcagttcatctcaggggtgtgg

SEQ ID NO: 32521 - DNA, 201 bp, Homo sapiens
tggagaacaaatgcttttattttgtgtagtcaaatggggttttatctcctagtcacttgcatttgtattgtttgtgccagaatgtgcagaggtagagatamaagtaagcaagaggaagagggcagtggtaaaagcaagaggagacccgactgtggagacaatgaagcaaagggaaggtgagacttgagtaatggatgcacc

SEQ ID NO: 32522 - DNA, 201 bp, Homo sapiens
gggttctttacctcgggtagtttctttaagtttgtcataattaacagctttgtaagctgcctttttaagcccttcaacttggcaggaaaccatgtagtctygcctagctatatctggggaatcggccggatagttccattggggatcgcctcagggaactgctctaatgccttcctggaggtgtggttcatgaagccagca

SEQ ID NO: 32523 - DNA, 201 bp, Homo sapiens
atttgataggaattttgccactaagatgggcgccaaggctatgaactggatgtctgggaaaatcaaagagagttaccgtaatggtaggtggggtgagagckagtgccctctatagaggctggttccccagtatagaagctgactgcccatccctcattgcagggcggatctttgccaatactccagattcgggctgtgttc

SEQ ID NO: 32524 - DNA, 201 bp, Homo sapiens
ggcacagttcaggcccaggattgtaaacaactctcttccatgtgtctcttccttcctggagaggtgtggtgtggaagatgatttatacccaaccttatccrttcccagttaggcttaggatttactctttcattttcaggcaaatgttgaacatctggtgcaaaagatgaaaacaactgtgaaaaggggcttggtgttaag

SEQ ID NO: 32525 - DNA, 201 bp, Homo sapiens
cagtccacactgagcttcttacaggaattaggcacagttcaggcccaggattgtaaacaactctcttccatgtgtctcttccttcctggagaggtgtggtrtggaagatgatttatacccaaccttatccattcccagttaggcttaggatttactctttcattttcaggcaaatgttgaacatctggtgcaaaagatgaa

SEQ ID NO: 32526 - DNA, 201 bp, Homo sapiens
ccagagagtccagtgaggtctctcagtagcagcagatctggaggtgcacatgctccttgtggtgtggttccctttccggcctccatcccctctgttacatycccacacatgcatgtgtgtacgtgctcaggcacgtgcttggtgtaaagagtgggtagtgctctgaggctggaagccactgtggcaggtgaacataaatgg

SEQ ID NO: 32527 - DNA, 201 bp, Homo sapiens
ggaaggtatccgttagagacagaatctcattgaggggccccggtgctcttacccttgccccacgaataaaatggaggctctccagaccttttatcaactaygaggactaggagaacttgttgggtatgggtgaggctatttgtagagtacaacttctagcaggatgcttctgactctcatctcagatacctggcccttgtc

SEQ ID NO: 32528 - DNA, 201 bp, Homo sapiens
ggcagctttgccttttggggctggatgataatttgtcatgggtggctgttctatgcactgtaggacagttgcacagcatccctggtctctacccactagawgccagtagcacctccctctcactcccaattgtaacaaaaatgtctccaaacattcccactttcccacctgcttcctcttaattcaaaggaaatctgtatg

SEQ ID NO: 32529 - DNA, 201 bp, Homo sapiens
cccattggagaaaaatgttacccagacacaaataggcagtctttgccctcctttttctggtattgtctacaattccttttggctagagtttctctctctcyagatatctcctctttaggcatgccaggtgcctcacccagtggctcctggtttgcttctcattgtcaggtaagatcacagatgaggaggctacgaagtcca

SEQ ID NO: 32530 - DNA, 201 bp, Homo sapiens
tgacctctgcgccataatccagaaggatgctgacactctcaagatttcccttcatggcagcccagctgagcggtgtatcattgttgtaatccagggcattsacagaggccccgctctctaggagagcccgcacacactcagcattgttcttaaaggctgcccagtgaagtggggtatctctgttgccatccaaagcattgg

SEQ ID NO: 32531 - DNA, 201 bp, Homo sapiens
tatttgtgtcggtacgtgcacgcgtgtacacacacacatcgcccccgccctgcttttacctcccattggagaaaaatgttacccagacacaaataggcagkctttgccctcctttttctggtattgtctacaattccttttggctagagtttctctctctctagatatctcctctttaggcatgccaggtgcctcacccag

SEQ ID NO: 32532 - DNA, 201 bp, Homo sapiens
catgggaaggaattcagtgacaagagagggaccctatttgccctttactcttagcatttgaaaataccaccctggtttcctggggcagggagagggtggargagtgatcacaggatgctttgctctttatggaaaggtcataaacaagactatggggactgacacataagcagatcttactctagggtcacagggaaggtc

SEQ ID NO: 32533 - DNA, 201 bp, Homo sapiens
tgtcatgtggtttcatgggaaggaattcagtgacaagagagggaccctatttgccctttactcttagcatttgaaaataccaccctggtttcctggggcarggagagggtggaggagtgatcacaggatgctttgctctttatggaaaggtcataaacaagactatggggactgacacataagcagatcttactctagggt

SEQ ID NO: 32534 - DNA, 201 bp, Homo sapiens
ggactctggggagtgaaggaactaagccgctgccatatctgagctgagtacttagggggaggaggaagaggaggagaaaggcaagcaggaggaggcggagmcttcttgtcagcatctgttagtggaggttgggaagcctctcctccttccccctccctctttgcctccacctggctcctccccatgttcgtccatcacccc

SEQ ID NO: 32535 - DNA, 201 bp, Homo sapiens
tcgatgatgggcaacctgcctaggtaactagtgactctcaagactacttctagtgacctgaaaatgtgggaagcattccaaaggagtgctgcttcacccayttgctccttgtgtcacagcttctccctggaagataagagctttctatcatatttttcacttcatctaggccatctatcaccagcattgcccatgccccct

SEQ ID NO: 32536 - DNA, 201 bp, Homo sapiens
ttgtaaaaaattttcatcttaggaaaccatttaataatagatttctcatgtatttttaaatgttcaattcacaggcaatttatatgaagcttcagaaacayatctatgtatttcgtcttaacttaaatacatctatattggagtcaattcactggaaacctttattgagttcccgctatttgcccaataatatactggaaa

SEQ ID NO: 32537 - DNA, 201 bp, Homo sapiens
tgaggctttctagtgtaaatacggattttaggggtcaactgaccttgtttatcacattctcactttgataaaatattgatcactgagtcgtgtattttccrggtaagattttgacctggtttgttgtgatagatgccaggcagataaggaggacttgagagttgaggggggaacaaaatttatcccatgagcttgtcatta

SEQ ID NO: 32538 - DNA, 201 bp, Homo sapiens
aacaccaatttttatataccctcatctgtcttttcttagctgctcatcttccctttttttccctttcttctgttgtctttctctttccctttacaaataawccctatgatggttgtttcttccattgttagccacattttagtttgctttgttagtgaattcattcagatatgtgagtcattctccttctattggactggc

SEQ ID NO: 32539 - DNA, 201 bp, Homo sapiens
ttgctctctcagaccatgcaaggcagatggggtgagcacctggtgtgaagtgagagggggctcctgggagacaggaaaacaccaatttttatataccctcrtctgtcttttcttagctgctcatcttccctttttttccctttcttctgttgtctttctctttccctttacaaataatccctatgatggttgtttcttcca

SEQ ID NO: 32540 - DNA, 201 bp, Homo sapiens
cactttacacggtcacaaattttacaggcagtgcctctgcttttacatgttgttccttcggcctggactgtccttctggcataggctttcagcacctatgwctttcctttgtggcatttgacacaaaggtcattcatttttagtgtagggggttacctatttaatgtctgtcaatacttacaggctgtaacctctttgagg

SEQ ID NO: 32541 - DNA, 201 bp, Homo sapiens
ggaatttacagtcaagctggggatttggaacatcctgcatatgaaaataaagatgcataggctaaacaaacaggttctggagtgagatttcttgggcttgmaccccgggtcacccatgccccatatgtgtgcctttgggcatcttattcaacccctctcaccattagtcttctcatttgtcaaatggggataataatggaa

SEQ ID NO: 32542 - DNA, 201 bp, Homo sapiens
tatccctcatatacagtagcacctggctcgtgctgaatgcccaataaccattcatgataggaatgcaccattttacagtgtaatctcacagcagccctcaraggaaggtactgcacagagaggcagaagaacttgcctgcctgcctagcaaattagcagcaaagccaaaatttaacctcagtcagccggactccaaagtgt

SEQ ID NO: 32543 - DNA, 201 bp, Homo sapiens
agactgctcaaagtaatatttataatacaggatttcagtgttaggacctcagacataattctagccttcctttgtagacttttgattcaggccttaagtamgtgtttaaaaactaatgtcctacatttctggtagaaatataaagataatcctgagatgtgtcattcttccctgttacttctgtctttggttaataactga

SEQ ID NO: 32544 - DNA, 201 bp, Homo sapiens
ggctcttccctgacataatttttagggctttgtagtataaaggaagagcaaggaaagtgggagaaagggtagggatgatctagccatattatagacagcarggaaattttctttgctccaagttctgtacatacacaattgaaacctgaataaaacgccctcttgcgatggtttctccagctctgcagttgttctgaagag

SEQ ID NO: 32545 - DNA, 201 bp, Homo sapiens
tccactgcactctccagcctgggtgacagagcaagactccttctcaaaaaaaaaaagaaaaaaaaagaaaacactctcttaatataaaaccagaatattaygtatttgaagaaagtgttctgagactgatgacttctggttttgctgtttctgattatggtttgctctgaacacatcgcctcataatctcctagaagatgt

SEQ ID NO: 32546 - DNA, 201 bp, Homo sapiens
gctttcccgaggatttatttccagccatgatgtacaaatggctgtgggtgttgaggctgtaatggatcttgtgtttaaggcttccactgtcgcggctcagmagagccctccctcggcccgcccctcagattgctgcctctggctcagagcatgactgcatctctcggccccatcacctgccagctctgagctggtggctgt

SEQ ID NO: 32547 - DNA, 201 bp, Homo sapiens
caactcttggccaatcttgtcacctccacctccacctccttttccctccctgtgttactcttctgaaacaaataacagccatggtatcacttcatctgtaratatttcagtacgtatttctcaaagggttccaaaagcacataagcagaaccatgacacccacatctcatacaataataacgctccagtattatcaagcat

SEQ ID NO: 32548 - DNA, 201 bp, Homo sapiens
ggagaatcgcttgaactttgaagggaggttgcactagccaagattgtgccactgcactccaacatgggagacagagcgagactatctcaaaaaaaaaaaaatgcataaagccataattctatgcctattcaacttagatgagcaccaggatcttttttggctctataaaaaataagaattggctgggcgcggtggctcacg

SEQ ID NO: 32549 - DNA, 201 bp, Homo sapiens
tgattgtttatatccttttcagcctacagttctatgattctgtgaatcagtgtccttgcccagtgttgcacacagtacagacatttcttcaacaagacatygttcactgcactcacttaccttagcctgttctttctttggaattagtacaaagagaaaagttctcaatattgtatgaaggaaaacacttcctaaatctcc

SEQ ID NO: 32550 - DNA, 201 bp, Homo sapiens
gattcggtggcaacgtttctaaactccgctttttaggatttgctattcctcaagattctattttcctcctgtccacccacttatatatggggtgtcatgaytgatgttgcttgtagtgtttcccagaaagacgctgtttgggagcactgcggcagacatcttccacctgctctgcctgtttgcacccagccaagtcgactg

SEQ ID NO: 32551 - DNA, 201 bp, Homo sapiens
aaaccaagatggcagcaaaagtgaccattggtcatcctcactactcattatatgctaattataatgcattagcatttgaaaagacactcccaccagcaccrtgacagtttacaaatgccctggcaatgtcaggaagttaacctatatagtctaaaaaggagtggaacccttagttctgggaaatacccacctctttcctgg

SEQ ID NO: 32552 - DNA, 201 bp, Homo sapiens
aggtataatctactcatatgctgattgacggcgggcattaacaattcacagtgtcatccagtttcagaaccaccagggttctgaggccagcccctttgctscttggaaggggcatggagacgcagagaggataaggagctggatccaggtcagggggtggtgctggagcttaaaccctgtgctctgtccatctggtcacct

SEQ ID NO: 32553 - DNA, 201 bp, Homo sapiens
actagtggcagatgaggtaactggtggttgtggggggtggggagggatagatgggaagtctgctggtttgtattattttcgaacgaaggaaaatgcagaasgatcctccgcaccagtccaggaggggaggacagagcagacattatgcaaggcagcagcttgtcctttggctgcaaagagttgggctctttttaatttgtc

SEQ ID NO: 32554 - DNA, 201 bp, Homo sapiens
atgctgttacaagactgggttttcagagacttataatgtaaccataaaaaggaatttaagagtggatctttgaaagttcttgaactgggagcgattaaacrtcttagagttgatagatttttatccacagtctgtcagggagccatttcctatccttggagcctctgttggtctgtggcacagtgaagtcaggttcagtgg

SEQ ID NO: 32555 - DNA, 201 bp, Homo sapiens
aaatttgggggaaagtttgacccaataattttatactgaaccaagttatgtagaaagatagtagtattctaaaaaaaaaaaaaaaaaaaaaaaaaaaaaaatccatgaactcaaggaaaggcccatgagtctttctttaaaaaactactcagtgacaaaatgcagtgagtcaagggatcaacgaagtcagttcattcattc

SEQ ID NO: 32556 - DNA, 201 bp, Homo sapiens
attttgtatccttcaactttactgaatttgtttctcagttctaatggttttttggcagagtctaggtttttccaaatataagatcggatcatctgctaacraggataatttgaccctcttcctttccaatttggatgccctctatttttttctcttgtctgattgctctagctaggacttccagtattatggaaggatgaa

SEQ ID NO: 32557 - DNA, 201 bp, Homo sapiens
taatttttctacagagattttattttagatgccctttcctccacgagatactcagatctgttttcacacagaaggcgtgcatttgtcctgcttgttttctstatgccagcttggagtggccgctaactcgtctttgtccttcactctcaggtgacagaccatgccaccactgccctgctccactatcagctgccccagatg

SEQ ID NO: 32558 - DNA, 201 bp, Homo sapiens
atagcggaaatgatcagcaaacatagatttgtcagtgtgaggatgcacactttgtgaaaaaacatttcattctctctgcttgcattctccatcaagcttckgctttttcctctaagcctgatgcccttagttgaatttctaatttatcaccttagaccccagttgcctcattaaatgtgtcttctgaggaaatggattttt

SEQ ID NO: 32559 - DNA, 201 bp, Homo sapiens
cattaaatcagaaagttgtttgagaaagataccagtatatagtaaccgtaaatatagtaagctcatggattaggattacacttcaagcgtgtttattcgcrttgtgacttcagcttactgttctctgtgataaacggaggggtctgtgagcgtgattgtgtgtggcgcgctcctcagtcctagcagcagcatctgttgtta

SEQ ID NO: 32560 - DNA, 201 bp, Homo sapiens
aaccatgggcttgaaaaccaccatatgcgactattactgtccatgctttcatcctgatagggagcattaaatcagaaagttgtttgagaaagataccagtrtatagtaaccgtaaatatagtaagctcatggattaggattacacttcaagcgtgtttattcgcgttgtgacttcagcttactgttctctgtgataaacgg

SEQ ID NO: 32561 - DNA, 201 bp, Homo sapiens
ctgtatgagctctttcagaaaagcaacttctcaactttcacagattaggaaaggtatagacaccgtgacagagggctcacaccttgcagaggatgactcargtctagttcagcataacacctctgtctctgagaactgtacaccccaactccatggacacattcagtggaccagaacaaagagctggctccagatgctctc

SEQ ID NO: 32562 - DNA, 201 bp, Homo sapiens
tgtttgatcttgtaaatattaatttagtctggttgttcatgtggttttcgatggtcccaaggttaattactgtattttgtttataaagtactcatagatgwctaggtccattgtggaggacttacaaaagctccatctgggcttaggcctgcagagttgcaataaaacttggtgagcgttaatgaaaaagaatttccagtt

SEQ ID NO: 32563 - DNA, 201 bp, Homo sapiens
ttcaacttttactaggcctaagacatctcaaggagccctttcccaactgatatggtttggctgtgtgtccccacccaaatctcatctctaattgtaatccscaggtgttgagggaggaatctcatgggaggcaattggatcatggggcggatcccccatgctattctcatgatagtgagtgctcatgagatctgacggttt

SEQ ID NO: 32564 - DNA, 201 bp, Homo sapiens
agcaatttgggaggcagaggcagaaggagcacttgagcccaggagttcaagacaagcctggacaacatagtgagaccccatctctaaaaaaaaaaaaaaaatttttttttaaaatctgacttttctactcagcatagtcattttgagattcatccatattgttgcatgtatcaataggttatttcttattattgctgtata

SEQ ID NO: 32565 - DNA, 201 bp, Homo sapiens
ctggaatgtatctggtatcatcaatgccaatcattttcctgacctcttttagcttattatgctcagatccacagaaaaggataggctggtgatttttttgytttttttcttttgaatatattatttcattttataatagtggtttgatccctctagttaaattggtatctatgactaagcataatgcattgtcatttatgt

SEQ ID NO: 32566 - DNA, 201 bp, Homo sapiens
gccccaaagggtgactgcttctgacaggcagacgtggagggtagggaggagggcaggagaatattccaggtagaaaggacagtttgagcaaaggtaaacaraacaactaggttcctaaatttcttaatctaaaaattagatttgcaggtgtgttaggctgttcttgggttgcaatgaagaaatacccaaggctggggaatt

SEQ ID NO: 32567 - DNA, 201 bp, Homo sapiens
ctgagagtactcgtttaaaatagatacacaggaattcttaataataacatgaaaaacctgttttcagtgcagattatacttatttctagcttgcggagacrttaaatctctaattttggttagtgtggaaagaactggacattctttgtgtttggaggcagtggtgagggggatgggtactaaaggtgtttctaaacctca

SEQ ID NO: 32568 - DNA, 201 bp, Homo sapiens
ttggttccagtgaacggatggataatggggagtcctctcaatactgatattagtccagatgctttacctgtcctaatgttctgtcttagaggtggcttatsagtgctatgagtgagtataaggcatcttaatagcagatttcatttgtggtttgcagtgtgagttgacccacatctaaatcttccttgatctaatcgtctt

SEQ ID NO: 32569 - DNA, 201 bp, Homo sapiens
gacactgtcctctgaaagaaaaaagggatttgttgttgttgttgttgtttgagatggagtcttgctctgtcacccaggctggagtgcagtggtgtgatctycactcactgcaacctccgctttgtgggttcaagtgattctcctgcctcagcctcccaagtagctgagattacaggcacctgccaccatgcctggctaatt

SEQ ID NO: 32570 - DNA, 201 bp, Homo sapiens
actagccccccaccccatcttcactgctctcatctcctgtcgtctgaacccttgctccagccgtctcattggtctcctggtctacctgctttgaaacactstgcctcccctcatcttccacactggactcatcattccagagatgccagtctgctaccctgttggctcctgttgcttgcaggataaagccccccctttcta

SEQ ID NO: 32571 - DNA, 201 bp, Homo sapiens
tgttttcaggccagactacttgtcttacgcttatcctacaccctttggatcccttgcaacttgtctccaatttaacatttttctgttccaatacttatctycattcttgtaacaaatgcttattgatcaaatactatgtgaaagataaccccaaactgtaatctctagcactgattacattgcgggtggcatccccattgt

SEQ ID NO: 32572 - DNA, 201 bp, Homo sapiens
gccattcatcttcagaactcttcatcttgcaaaactaaaactgtgcccactaactgtaacttccaattcccactccaccatctcctggcagccaccattcwactttctgtctctatggatttgacctctgtaagtatatcctaaaagtggaatcagacagtatttatttttttctgacttagcgtaatttccccaaggttc

SEQ ID NO: 32573 - DNA, 201 bp, Homo sapiens
agaggaaaggctttcattttttccccattcagtatgatgctaactgtaaatctgtcatatatggcttttattatgttgaagtatgttccttccatacccaratttttgaaggtttttatcataaaatgatgttggtttttatcaaatgttttttcagtatcaattgaaatgatcgcatggtttttgtccttcattctgttc

SEQ ID NO: 32574 - DNA, 201 bp, Homo sapiens
ataaatgctggatgttttcaggccagactacttgtcttacgcttatcctacaccctttggatcccttgcaacttgtctccaatttaacatttttctgttcyaatacttatctccattcttgtaacaaatgcttattgatcaaatactatgtgaaagataaccccaaactgtaatctctagcactgattacattgcgggtgg

SEQ ID NO: 32575 - DNA, 201 bp, Homo sapiens
acccagctggagtgcagtggcgtgatctcggctcactgcaactgctgccttctgggttcaagcaattcttgtgcctcagcctcctgagtagctggaattayaggcgcctgccatcatgcttggctaatatttgtatttttagtagagatggggtttcgccatgttggccaggctggtctcagactcctgacctcaggtgat

SEQ ID NO: 32576 - DNA, 201 bp, Homo sapiens
agtctcagcacaaatgctccccactttttacacgtaacaatttgatgttttataatgaagacctacatgtcacatccccctaaccttgagtttctttctgkttgacctgtgctcatagccagtcgagaaggtgaaggccacagtcagtgcatagtctggtgctcttcctgaaccccctgggtgccagggaaggggctgtcc

SEQ ID NO: 32577 - DNA, 201 bp, Homo sapiens
ggcaaaatatgtgctatgcttccatcttaaatatgtatgccaaagctgtacttggctttttatcttttggaggcaagtgatttcaagttccgtgtaaatayggcattctgtctaaaacctagtaatgtcattttgtgggagttccccatcctcctcctccctactccctactcttgaaattgctattatctttatctcagg

SEQ ID NO: 32578 - DNA, 201 bp, Homo sapiens
aaaaaaaaaaaaggaagaagaattatgcattattcttagaattacaatttacagtataaagtttcctttcaagtataaaattcatggggtacatagtgacstgatgctagaggtttcctcagccagtgtctttgttcttaggagcattccctgtgctgggcactgtgtgcagtctttatccgcactgttgtactcacccct

SEQ ID NO: 32579 - DNA, 201 bp, Homo sapiens
aactaaaactgtgcccactaactgtaacttccaattcccactccaccatctcctggcagccaccattctactttctgtctctatggatttgacctctgtawgtatatcctaaaagtggaatcagacagtatttatttttttctgacttagcgtaatttccccaaggttcatacctttagcaggtgtcagagtaatatttca

SEQ ID NO: 32580 - DNA, 201 bp, Homo sapiens
ttgaaaaagagggcctattattattgttcataaaattgaactatctctagctcagccctcagctgtgcctggcctgcccatttaacatctcttcacttacrtatttcaaaagtatcctaaacttggtgaaaaggaagtgatatttcccctccaggttttttcccttcttcttctcaataaatagcaaagtcattacctggt

SEQ ID NO: 32581 - DNA, 201 bp, Homo sapiens
aaccgaaagtgctgttatgggtttcccatactgtcaaagaccctctcacaaagcccattttctccgggttgtcagggtaacgaatttggaaacatgcagcrcacatactaacaacagctaggagccaatgcttatataacaagagaggagatggacagaactataaatataaagcacaggagccgatgctcataacattca

SEQ ID NO: 32582 - DNA, 201 bp, Homo sapiens
gctagcggtggcaggagcctagagaagtggcttcatctgagaaccccatgccctcatccgtgaggcacaaggctggtgattcagtgatggtggaggggctrggggcttagagatggaacagatcggctgtgcattggtcacagggaggctacgcagtggggatgcgcgtgttgcctgctgttctgttttcctgctttttga

SEQ ID NO: 32583 - DNA, 201 bp, Homo sapiens
cagcactttgggaggccgaggcgggcagatcatgaggtcaggagttcgagaccagcctggccaatatggtgacaccccatctctactaaaaatataaaaaktagccaggtgtggtggggatcgcctgtagtcccagctactcgggaggctgaagcaggagaatcgcttgaacccgggaggcagaggttgcagtgagccgag

SEQ ID NO: 32584 - DNA, 201 bp, Homo sapiens
cctcagtgtttcctgctgtcactctgtcttattattctcatcgactgaggataattgatctgtcttcactcagcaacttccatttgcatgttttaggagtrgctgtgtcatctcatctcttattttgtggtagacactctccccttgttgttaaggctttgtatacctgtgttcaaagggattactggctgtattcatctt

SEQ ID NO: 32585 - DNA, 201 bp, Homo sapiens
tcctgatcttgtcagtgatcattcagggagttgtattcagttgtgtggttggttgggagctgattctctttccctgtagcctcagagcccctccctctccrtgtggcctctgcacgtgatctcttgagcagaagagctggacttcttaggtggcagttcagggttcccaagagtgcgaaagcaaaagctgccaagcattct

SEQ ID NO: 32586 - DNA, 201 bp, Homo sapiens
gctccctgcagggcagcagccggcttcttctgttctcatccatcttctgtctctggtctcatccagtagtgaaataagagagttggccatcatctcattcrttccctcatccagctcaacaacaggtgtccactccccagcactttgggaggccaaggtaggcagatcacctgaggtcaggagttcaagaccagcctagcc

SEQ ID NO: 32587 - DNA, 201 bp, Homo sapiens
tacataatgtagattttgaaaaggtaacaaaaacattaaaaaataatgtttttgttatctgaaaaagttattaagattaggatggatattgttctagactttttctgtgcatatgtcatatatagtttttaaaagcaatagtttttttaaagcaataaataggttttaaaagcaaaataatctccaaaaaggagtatatta

SEQ ID NO: 32588 - DNA, 201 bp, Homo sapiens
aaaaactgttatgggaaatgtcagacgaaatgaaaagtgaccagagaaaattcatttccccagctcctgacagtgcagggccccttccctggactaactcrggccctgtggctgatgaggattctgtccccaccgccacacccccaccagtccccacagtactcagggccagctccctgcagggcagcagccggcttcttc

SEQ ID NO: 32589 - DNA, 201 bp, Homo sapiens
atacataatgtagattttgaaaaggtaacaaaaacattaaaaaataatgtttttgttatctgaaaaagttattaagattaggatggatattgttctagactttttctgtgcatatgtcatatatagtttttaaaagcaatagtttttttaaagcaataaataggttttaaaagcaaaataatctccaaaaaggagtatatt

SEQ ID NO: 32590 - DNA, 201 bp, Homo sapiens
ggtggatcacgaagtcaggagttcgagaccagcctgaccaacatagtgaaaccttgtctctactaaaaatacaaaaaaattagccaggcacggtggcgcgygcctgtaatcccagctactcaagaggctgaggcaggagaatcgctagaactcgggaggcggaggtgtgcagtgagctgagatcgcgccattgcactccag

SEQ ID NO: 32591 - DNA, 201 bp, Homo sapiens
ttgaggaatagtgccattttgggaacttgatgatggtctctgtcattggtagatgggttattttttggcattagcaactagatcagctttaataagtgcamgtccatgctgttgggtccgtttctgtcactgtggccactttattcatgggtctatcatgctaacaatgggatggctgatgtcaactggttgggtcacttt

SEQ ID NO: 32592 - DNA, 201 bp, Homo sapiens
ttgggacttcataatttctataggacaaagagacaatgtaaattattagcgttagccttgttgttcgaagaacagtggtattgatcaatagactgtggatsccttgcaacttgtcttagggtttgtattttaccaaatggagccatttctctccaaacccactgcagtcaataatgtgccgcaaaaatgatgtttctcttc

SEQ ID NO: 32593 - DNA, 201 bp, Homo sapiens
cagactagagtgcagtggtgtggtctcggctcactgcaacttccacctcccaagttcaagcaattctcctgcctcagcctctcgagtagctgagactatargtgtgcactgccacacccagctaatttttgtgtgtgtgtgtatttttagtagagacagattttcaccatgttggccaggctggtcttgaactcctgacct

SEQ ID NO: 32594 - DNA, 201 bp, Homo sapiens
ttggaacaacagtgactcccagccctagctacacattagaatcttacggggagttgtttcagggaagaggcccagtcatccatatttttaagcagctcccrggatgattcctgcatgcagctgagactcagaaccactgctccagaaggggtacgaggattgctccagcgatggaggctctgggccaagagttgtcagagc

SEQ ID NO: 32595 - DNA, 201 bp, Homo sapiens
ctattgctctgagcaattcttttccctatgattccccagagtgcaagtttggggaaatgcgggaactttctgtatttctttgtcaccattaagcaaaccgrgagtgcaacctgacttccccaagttgagaaaaatcactttcctgcccatgcattagtttagctcaaggggaaaccctttttcgaaagtgctttctgggta

SEQ ID NO: 32596 - DNA, 201 bp, Homo sapiens
atggagataaacctcagtaacttttcctgcacaatgaggtggttaggctctgctgccatggtgggctcctccatccaggccgtgtgctctttcgtcttgtscaaggttgtttcaccaaaactgattggttgctccactactcttaaaggtcatgcttaatcacatttcaggaagattgaagaagactccaaattgcccaag

SEQ ID NO: 32597 - DNA, 201 bp, Homo sapiens
agggccatttctcctttcctgtatcacattatattacattgtgttttatcatcagaggcacaactggtttggttttgcagagcaaaatgagtgaccttcastatggaagaacatcggttttagctttgacagtccctcggtctgacctcttggtttccaagtcacatcgctccgttttctttttatgattcagttactgtc

SEQ ID NO: 32598 - DNA, 201 bp, Homo sapiens
tgcaccaccgcaccaggacaatttttttgttatttttagtagagacggggtttcaccatgttggttgggctgctcttgaactcctgacctcaagtgatccrcttgcctcagcctcccaaagggctgggattataggcgagagccactgtgcccagccaattttgatggtttcttgatgcttttttctttctgtctctgtgc

SEQ ID NO: 32599 - DNA, 201 bp, Homo sapiens
aactaatgctggttgtaagtgaaactcttttgtttcagatctttctgttctttcttggaatggaaagtaattttaatggtttcttttctttttcttttttyttttttttttgagacagagtctcactcactctgtaccccaggctggggtgcagtggcgtgatcttggctcactgcaacctccacctctcaggttcaaacg

SEQ ID NO: 32600 - DNA, 201 bp, Homo sapiens
aaatagttccagcattgacttagtccacagatatttcattgagctcctaatctgggccaggccctgtggttggcacagagcatgtagcagtgaattaacaratcgtgcagtttcccaagacgtttcctccttcgattttcggagttggagctcgagatgatagcagccccaaagcagccattccaatggggtgctgcagcc

SEQ ID NO: 32601 - DNA, 201 bp, Homo sapiens
actgtctgctggccgggttacggtgaatcccccgggtgcccagtaggaactgacagaatggagcgaggaggtctatgaaaggtggtccagattttttttttctgaactaaattgggaattggccttttggtacagagtgatgtttttccacttcccaccactgactgcatgaaaggctgatctttccgtgttaatgtgcaa

SEQ ID NO: 32602 - DNA, 201 bp, Homo sapiens
ttttatgggacttaattagggctcctgcagtgcagcccctctgcttgccaggccccctacgctgtcggctaatgtaatccccggagtggggtgggggggggtgtggtgttttccctgttttatagatgagaagccaagcagaggggttcacacagcagcacacggaggggctggctgccaggctggccacggccgagctct

SEQ ID NO: 32603 - DNA, 201 bp, Homo sapiens
gcctcattaaatgtgtcttctgaggaaatggatttttttccccaagtcaagcagctcctcagtagcccaaggttcagcattttgcttttcctagaaccacraggaaaattcccattcatttgacacaacctgatgacactctttttccacaaaactaacaagtcgcccttaggaagtggctgtgcacagcagcatatattg

SEQ ID NO: 32604 - DNA, 201 bp, Homo sapiens
tttgacacaacctgatgacactctttttccacaaaactaacaagtcgcccttaggaagtggctgtgcacagcagcatatattgaatactgctgttgaaagragacgtgttatttccacgggtgacttgtttcatggaaagttcacccttgtgaacccctaattccttttgactgcacagtctccatatggctccacagaga

SEQ ID NO: 32605 - DNA, 201 bp, Homo sapiens
aaatgggtggttgtgtagtacagctcatcacatagaagctggatccatttttttttttaaatctctctttgcataacaaagagcttcaggattgttaatayttcacaccatgctgtcccccaactaatgctggttgtaagtgaaactcttttgtttcagatctttctgttctttcttggaatggaaagtaattttaatggt

SEQ ID NO: 32606 - DNA, 201 bp, Homo sapiens
gagtgtaatgaacaccgtgcctgagatgccccacactcttccaggccactctcagcacggagcctggtctccccaccccatcgggagcctttccttcctcrtgactctcattaaaatgtaaaagtttgttagtatgaatactagcactcaccacccaacagccacattataatgagaatagaatgttcttcaaaaaaaggt

SEQ ID NO: 32607 - DNA, 201 bp, Homo sapiens
gcatgttaaaaggcaggattgaagatgaatacctggccattgtcctgattttataccagtcagacttaactgaaaaaaaaatgtgtctcgttcgaatttawctttttgggggatttaggttatgttaatgctatagcttcattaattaccccatatcaataaaaaaggcagcttttagcctccgagcataagagaggaaaa

SEQ ID NO: 32608 - DNA, 201 bp, Homo sapiens
ctttttattttttttttttttttgagacgggagtctcgctctgtcgcccaggctggagcgcagtggcgcgatctcggctcactgcaagctccgcctcctgrgttcaggccattctcctgcctcagcctcccgagtagctgggactacaggtgcctgcaaccacgcccggctaattttttgtatttttagtagagacggggt

SEQ ID NO: 32609 - DNA, 201 bp, Homo sapiens
gatagctcagtggttctgaatgcagactgatagtatgtttgaatctgtgtatgataagccatgtcgtggtcatggtgtactgcggtagactacaaattctrtggtttttattataagcaagatatggtggtagcaagacttcccagaactaactttgtctctaaggaaaacctctggattttcttattaaaaaattacgta

SEQ ID NO: 32610 - DNA, 201 bp, Homo sapiens
catttatcacgccgccaccagttggcctaagcagggctaacaccatgtccccgcgtccttgacagacgtagccgccagctgttccaccgtcatgctctcaygccagcatgctcacacggccgcatgctctcacgccagcagaccccatcatccaccgctgctgggactccctgttttcttcatgctagaaagtctgccggt

SEQ ID NO: 32611 - DNA, 201 bp, Homo sapiens
ctgtattcttacaataaaatatctagagaaaagaatatgtcattaagaaaatcataaggaagtgaaaaaatatttactgttcattaagtggaagtggatcctcataaaggtcttcatcctcatggtcttcatgttgagtagagtaaggaggaggaggttggtcttgctgtctcaggagtggcagaggtggaagaaaatctc

SEQ ID NO: 32612 - DNA, 201 bp, Homo sapiens
ggtgacaggaggctgaggcaggagaatcgcttgaacccaggaggcagaggttgcagtgagccaagatcaccccactgcactccagcctgggtggcagagcrggactccatctcaaaaataataaataaataagaattgacaaacttcatagagctttatggattcagaagatcccaaaagtaagccagtgcaagacttttc

SEQ ID NO: 32613 - DNA, 201 bp, Homo sapiens
tttgttggaaaggtgaattctcaaagcaggaagccttttgaaatgcttattcacactcagacaatttattatagacctagagagaggcttagtgtggagcrcgggactaggtgatccccatgagaagagtggcttgggcgcagggctgtgagagggaggggcaggggaggccaagagagtggctaggtgacaagagccatc

SEQ ID NO: 32614 - DNA, 201 bp, Homo sapiens
tgggtgtggtgacaggaggctgaggcaggagaatcgcttgaacccaggaggcagaggttgcagtgagccaagatcaccccactgcactccagcctgggtgrcagagcgggactccatctcaaaaataataaataaataagaattgacaaacttcatagagctttatggattcagaagatcccaaaagtaagccagtgcaag

SEQ ID NO: 32615 - DNA, 201 bp, Homo sapiens
gtacctacctcacagggtggttgtacagattaattaaatgaattagaatagcacctggttcatagtgagtcctgtatacacattagctaatgttattattwttttttttattgataggccaagcactgttctggacactggggatgtagctgtgaggactaggggagatatctactcctacggggcttacattctaggcag

SEQ ID NO: 32616 - DNA, 201 bp, Homo sapiens
tcccccttcacctcccacacacatgctttctgccaggttggggatgctatctggccccgggttcctcgtgcaggtaagtttttggtcagctcacctcccctgatcctagatgcagataccgctcagtttcaaagcacttttccccctacacgagttctgggggaagatcattttaagtgaccagctcctctcaccttctca

SEQ ID NO: 32617 - DNA, 201 bp, Homo sapiens
agatgaggccatctgtaagatgcctcgccagatagccttgggctcatgaaaggctctgagctattgtttccccatctggagaataagactgtgatggggcyagtcacatgggccagttctggggattacatgagtgtgtgtggagggcctagtgcagtgcctggcatggaacaggtgctcagcagctggatgctgccagct

SEQ ID NO: 32618 - DNA, 201 bp, Homo sapiens
tagccttgctctagccaacccttcaggcccaactgtcacgtgccccttgtggcccttagtgtctggttctgatcctggcctcactctcagctaacctgacytgggtttgtctcagacccatcgtgacatagactaaaatttaaaacccagtgtcttccgtagatactgagtcaaagagaaattgcataaaatagaaaactg

SEQ ID NO: 32619 - DNA, 201 bp, Homo sapiens
atgcaactgtggtaagccgaacaaacagcctttcaaacagggagaaatacaagtgaacagtgagatttgccttttgatcctagaagagtatgcccctgccmctgtgaatattattctgatgactgctaccacttaatatgcctactgtgtgctcaggactctatttgaccccttactatatgcttatgattatttatttga

SEQ ID NO: 32620 - DNA, 201 bp, Homo sapiens
aggcggatggcagatagcattaagaccaggctccctaggtgatctagtttcagtactaaaatccagattgggttattgtggggttttttttttttttttttggaacagcttttaatatttagtagcaaataagtagtgtgacttagttagaaaaacaaaatgtttgctcagatctatcatatgctcctaatacagaaagga

SEQ ID NO: 32621 - DNA, 201 bp, Homo sapiens
gaaacctactgccacctagccatggacaatacagacccctggagagacttcatgactggaccattgagggagggatgcaactgtggtaagccgaacaaacrgcctttcaaacagggagaaatacaagtgaacagtgagatttgccttttgatcctagaagagtatgcccctgccactgtgaatattattctgatgactgct

SEQ ID NO: 32622 - DNA, 201 bp, Homo sapiens
cagtgctccagcctggccaggctttccgttgctggaatcttccacacgccccctgcctccaggcctgcatcctttctgccgacagcatgcctcttctcccsctctgggtccccaactctgctaactaatttttctacagagattttattttagatgccctttcctccacgagatactcagatctgttttcacacagaaggc

SEQ ID NO: 32623 - DNA, 201 bp, Homo sapiens
gaatacctgtattcatttctcccccttcccctagtattctttttggtacagcctttcaacatggtaaataagggtctgtaaggaaaaacttgaattttttwaaaaaaaaaaacatgaataacaactgatgttaaactatggtgttatttatccagcagatttaggtaaggcacggtggtagactctagaaatacagagagc

SEQ ID NO: 32624 - DNA, 201 bp, Homo sapiens
agcaggcagagtgtcatttagcaaggacagttaggtcctgtcactccgttcgaagccctgccacggcacccatcttatccagaggaaagcttacaatggcygccctcacccacctcagctccttccttcttccctgtctcctgctgattcaaagccattccaggcacactcccatctccaccttagagcttctgtgctgac

SEQ ID NO: 32625 - DNA, 201 bp, Homo sapiens
gaattccttgcaattttgaagtccaggttcaaggcaaagagaccaaaatcatagtgtttaattgcatttgaagccataatgaaaccaggttgacctccatrttcttgtcgtagccctgccatggactggctggcttctccgctctgctgcctgttctctaccagcaggcagagtgtcatttagcaaggacagttaggtcct

SEQ ID NO: 32626 - DNA, 201 bp, Homo sapiens
tccctggaggctccttgcacttggtcctagggtgaagaagctttttatagccagcaagtctccagcagagtagattcagagaatgggacttagaaatgggyggggtgggggcgggtgaccatctgaaagggcagaatcacaaagagccaggaaaggtttcaagcgtgttcatatttttctgacatttaaactctgcagggg

SEQ ID NO: 32627 - DNA, 201 bp, Homo sapiens
acatgtttattgagtatgcattatgtgcaggattattgcaggaattaaagacgtgagcctcagactctcccctcaaggagttgattgtctgatgaatgackatcaaacttactgtcatacaaatagcgtgtttgtcccaggaggggttctgcggtttcctcagatgtgttgactgtttctgactctgagtgtgcatttgct

SEQ ID NO: 32628 - DNA, 201 bp, Homo sapiens
tctccctctctccttctagttcctccaatgtaccccacctaactgaattttgagtttattatttcctgaagacagacatctttattcctttttttttttttaagaaaaaaaaaaaatagaagccttaaaaggtcaagtaagttgctcagggtctggcagtgaaaataactgtgatgctagcacccaaatcttggacttcta

SEQ ID NO: 32629 - DNA, 201 bp, Homo sapiens
cagaagttcctaacctttttgtgcagaaaaagacaatgtttgtacacataaaaggaacagctaataccattatttgcctattttgtgttaagtgctttatrtgctgtgttcactcctttacttctcataatgattatgtgaagaggatagtgatgctaccttatttcacagataaggatgccaaagcttagagaggttaaa

SEQ ID NO: 32630 - DNA, 201 bp, Homo sapiens
gagaattgcttgaacccgggaggccgaggttgcagtgagctgagatcgtgccattgcactccagcctgggcaacaagagcgaaactccatctcaaaacttaaaaaaaaaaaaaaaagattcatgagaggaaagtgttttctgagctggagactctgccgtaagtgcaacctgataatgaaagcagaagtaatcactttaaa

SEQ ID NO: 32631 - DNA, 201 bp, Homo sapiens
agccctcaaggacaaggacccttggcctcgtgcttctcctgccctctgagtctccggccagtgcctagtattggtcagaacacagctggaagccagagagsaaaaaggcttgttgatgtaatctgtgtgtaggccagcctcctggggcacagtgcgggatggcagagggacaaacgaaagctctccagcatagtccctgtt

SEQ ID NO: 32632 - DNA, 201 bp, Homo sapiens
gcacaacgggcttatcctcccttgccaccaagaaactgggaaacttttcccaaaagctctcaacctctttattatgattatgttaccctgaaatatgagtaaaagaaaaatctttttctaaaatgttacgagagcacttaatgtacaaaatgcaagaagaaacctccattgaagatgtttaaaatagtaatgaaatataca

SEQ ID NO: 32633 - DNA, 201 bp, Homo sapiens
ctctgagcatggttttagctgcatcccacacgttttaatatatttttatcattcagcccaaggtattttctaatttctcttgtgatttcttctttgacccrtgagttgtttaaaagtgtgtttaatttctgaatatatgggggctctttatgttatatttttgttatttatttttcacttcagttgtggtcagagaacata

SEQ ID NO: 32634 - DNA, 201 bp, Homo sapiens
caggcctatttcagactttattaaaacatcatttcccctgccttgttcccagatttctgtgcttaatcatagaaagccagcttgttcaaatatacattattcttgcttggaaaactcttggcttgtcttcctccccacctccttccctattttgtaaccttgcttcaccgaggcccttcttattaaatatcataatttgct

SEQ ID NO: 32635 - DNA, 201 bp, Homo sapiens
gagggtagtggctgaatttggaatgccttggttgcaagctgaagttagattttaactagtacatagtcagtagcaaggtattttgagcaaggctctgctgkcccagtgacttgccaggtagatacattgcttcctaacggcaggtgtttgagtacagctatatcatagctgtaggttataggcgaattgatagtgatgcca

SEQ ID NO: 32636 - DNA, 201 bp, Homo sapiens
gggcaacagagcaagactccgtctcgaagaaaaaagaatccagtaatacagtaattcagtagctcaaggatgtcatctttgtaaactgctgttcttcctcyggctgctcccttgatggctgcaagacggctgcagcccgtccagtcagacaagacaaagccaagtcccaggtaactctgcctctagaatcgcttgaaccca

SEQ ID NO: 32637 - DNA, 201 bp, Homo sapiens
catttctctctccacacttctgaagatcctccttcagaactaggtttgcctagatgacaggttggtaggtgcagcaagccaccatggcagtcgtgtacctrtggaacaaacctacatgttctgcacttggttaaagtaaaattaaaaaaagaactaggtttgtaaagtacagttgatctttgaacaatgcaggggttgttc

SEQ ID NO: 32638 - DNA, 201 bp, Homo sapiens
attttactgagttttgccagttctcatttcgcatgttcttcttgtccagccatctcgcttctgagaacgtctattcctgatttgtgctgttttttcaaagyagcagttagttgtttccttaatttctttcagctcagtttgaaataattggttacagttttcaccggcttgtggtccctgtttcgtggtgtggactgtcct

SEQ ID NO: 32639 - DNA, 201 bp, Homo sapiens
catttaataccaggaggcagtggagcagtgcaaaatttgggggaaagtttgacccaataattttatactgaaccaagttatgtagaaagatagtagtattytaaaaaaaaaaaaaaaaaaaaaaaaaaaaaaatccatgaactcaaggaaaggcccatgagtctttctttaaaaaactactcagtgacaaaatgcagtgag

SEQ ID NO: 32640 - DNA, 201 bp, Homo sapiens
gcagaatgagtgttctgagtactcttccaggcactagggatctgggcctgcacaacaaaacaaatccctgccctcatggcagtgatagtttttgtgaacawgtaaatagtgtgtgcaatttcaggaccccaggacaaggacctcagagttggtcagagagagacaattcaggtagaggctcataggtaaaacagaggatga

SEQ ID NO: 32641 - DNA, 201 bp, Homo sapiens
tagtgtgtgtttatttctgtctgcagtacgtctagtcttgcttttagttgtacggttttgttttttgtttggttggttggtgttatgttttggttttttgttttttttttttgtttttgtttttgtttttttgagacggagtgtctatcacccaggccggagtgcagtggcataatcttggctccctgcaacctctgcctc

SEQ ID NO: 32642 - DNA, 201 bp, Homo sapiens
tccaggcagactctggtctcctctctgtcactctagattaaatgtgtcttttttttctttctttttttttttttttaaatagagacagggtcgtcttgaattcctgggctcaagcaatcctcccaccttgacctcctaaagtgctaggattacagacgtgaaccattaagcccagccagatgtgtcttttgagagttcata

SEQ ID NO: 32643 - DNA, 201 bp, Homo sapiens
gcagcagggagaattgcttgaatccatgaggtggaggttgcagtgagctgagattgcgccactgcactccagcctgggtgacagagcgagactccatctcaaaaaaaaaaaaaaagactaaaaaccactgatgaaagaaatcagaaaacccaacagtcttttataaagtccattcatggaccccagaaagcctttagtttt

SEQ ID NO: 32644 - DNA, 201 bp, Homo sapiens
gtgtgtgtatgtgcgtatgtgcgggggacagattccttcactctcttgggactactgttcctttaactggaaaggaaatttctctaccctcaacattttargctcttctgggttcccactgcagctgctaatgccagtgtcatcaccactgctacgattgcttgggggctgggacgtgagagaatggagagacgggaaaaa

SEQ ID NO: 32645 - DNA, 201 bp, Homo sapiens
tggtggcgggcacctgtagtcccagctacttgggaggctgaggcaggagaatggtgtgaaccagggaggtggagcttgcagtgagctgagattgcgccacygcactccagcctgggtgacagagcgagactcggtctcaaaaaaaaaaaaaaaaaaaaaaaaaattcagcagaatggggccttgcctttaagaaatgcctg

SEQ ID NO: 32646 - DNA, 201 bp, Homo sapiens
atgataccatcagatcttgtgagaatgaactcgctgtcacgagaacagtgtggggatgaccaccccatgattcagttacctcccactgggtccctcccacracatgtgggggttatgggaactacaattcaagatgatatttgggtagggacacagccaaattgtaccatcttccaagttgctaaaaaagtaatgtaccca

SEQ ID NO: 32647 - DNA, 201 bp, Homo sapiens
tttcttgctgtcacaaaaggggctcttgatatctataacttatattgatttcctactcttcttttccctgtgaacataatcaggcctggaccctgtctttyacagagcgactgtcttcattggacaccttcagccaaaatcaggttgttaattgccacatgcagtgggctgtcttcccacgggctgtgtcagcatcttcag

SEQ ID NO: 32648 - DNA, 201 bp, Homo sapiens
gactgtttgcagattaaatgtctgcttttgtccacagtgttttgattttgcttctgaagcagaaatttgtagacgaataactgacccctcttaaaggaaaygtacaagaatgaagttgtcttgaggcgaccttgtcagagccaggagacccagggcctgctggtgccgttttcccccttggtgttccctctctgtgttgcc

SEQ ID NO: 32649 - DNA, 201 bp, Homo sapiens
tgtctacagaacacaaaatatcgtctgcctccagaggttgcagtgagctgagatcgcgccattgcactccagcctgggcaaaagagcgagactctgtctcaaaaaaaaaaaaaagtctgcctcagttaaatgtacaaattgcccagattttaagataccccagacctagcagttgaaacataaaccctgctctcagcatac

SEQ ID NO: 32650 - DNA, 201 bp, Homo sapiens
ttaatgaacttggtggctggtttatttttaaggcagttcagtgcttagagcaactgctcttattaaatagcacctcactttcctccctctcccccccgccmcccgcctcccattttcccattgtaagcttttatacatacgtgtgtgtgtacatgtgcatgtgtatgtggcactataatatatacacacatatatacacac

SEQ ID NO: 32651 - DNA, 201 bp, Homo sapiens
gcttactggcctgaagattggcatgtccttgttacaaagtaagtatctgttcagatcttttgccctcttctagtcctactctgctgaaagtgtgtatgtgtttttttttttttaatcatcaattgggtgttgaattttgtcaaacgttttttctgcatttattgaggtgatcaaatgattttcctttattttaatatggta

SEQ ID NO: 32652 - DNA, 201 bp, Homo sapiens
tgtaagtttcctgcgttttggaaaaagtcatcaaaacttgggtagaaatttgctaagtcattctttcccctactggcaagtattaagtaacagtattcatkaaataccacagagaggctatgtaataaagaaataatcctaggcctaggtggcgataactctctagaagagttgaaattgagaatataattaaagattaaa

SEQ ID NO: 32653 - DNA, 201 bp, Homo sapiens
aaatgatcaaaatgatgccgggtgggcaaaatcaccctgccactctgcatagttagcaggcctcctccactcaaagagtcagcagggctggaatggctgarcttgcatggaccctagtaaatacaaaggaggaaagccaaaaggagagtcgattccttgagccaggaggaggcccctgccaagctgtctttccctgtaatt

SEQ ID NO: 32654 - DNA, 201 bp, Homo sapiens
tgaagcttgtttgtaattgtagaatattggaaatagccgaaatgcctgtgcagaggcgtgtgattgaatacattatgatacactcgcacaatggagccacrtcacttttttttccatcttcagaaaagaatgagaaagacctctatgactcacatgcagtgattgccaggatatattgttaatagaaaaaaagcaaaatgc

SEQ ID NO: 32655 - DNA, 201 bp, Homo sapiens
gcgaattaaaattgcactgaggtaccatttctcacctaccagattggcaaaaattaaaaaaacataacaacaggttctgttggtaaaggctgtggggaaaygccctctcataccttgctaatgagaatgcagattcatccaactgttttgaagggactttggcaatgtctaagaaaactatgtacatcacacttccagcaa

SEQ ID NO: 32656 - DNA, 201 bp, Homo sapiens
tgtgctctccctcacccaagtgtgcagatcctctccaggccatttagcagctgctggaggaaggaggaggagtggtgtcactcaagactgtctttcctccycttttcaatgcctctttcagtgaaataaagttaaaacaagatactgtgattgcttacctgatttttcattcttattatggtgcttttttgtgtgtagttg

SEQ ID NO: 32657 - DNA, 201 bp, Homo sapiens
cagcttctctaagcctccttcctgattggtggtgtgggttgtaggaacaccttcccctttattgcattgcaaggatttaatgcctgccccacagtgaacasttggaggctattgttaccgtttcaaaagttacgtagcctgggagtcttgattggtcttttccgtttacatactactcatttgaggggggtgtctgtttgt

SEQ ID NO: 32658 - DNA, 201 bp, Homo sapiens
cacaggtccaaaaggactggatcagtggttctgaacgttttatttgaggatgctccataaacactctgggatgactgcagaatgagtgttctgagtactcytccaggcactagggatctgggcctgcacaacaaaacaaatccctgccctcatggcagtgatagtttttgtgaacaagtaaatagtgtgtgcaatttcagg

SEQ ID NO: 32659 - DNA, 201 bp, Homo sapiens
tttggatccagaagaaggcctttcttctggggtcaatgccagggtgacccccattgtcctgttcatctttgtcccttagaaaccttgtctttaacccttcrgtaaccacaccaagagacttttccagacttgggtctcacatgaaacttacaaaagacctagtctctgacattgatggacacatcatgataggacaggacc

SEQ ID NO: 32660 - DNA, 201 bp, Homo sapiens
tctctgacattgatggacacatcatgataggacaggaccggctttgggaactttttcgtggacccggcccatagatagacttcattatggatggttgagcygaaacttctcctcaccttccaactctctcttaccctgctatgttttggggctccggcaaagatattcccaggtatgtcttttaaaggaatggaactcttt

SEQ ID NO: 32661 - DNA, 201 bp, Homo sapiens
ttggaattgggctgcaatatatttattagggatcaccccctgtgaaagaaagtgggaggaagcaggactgctgggggagatggcagcctacagtgcagggstggcaacgcctcggtcaacccaggggatctctgcagcagggttacctgccttgtcctgtgttggccaaaagtctgggcctttgtacccctgcctcactca

SEQ ID NO: 32662 - DNA, 201 bp, Homo sapiens
tcatctggtttggcaccacggtgggagctgatggcctccctagcactgacacagcctgcagagcaaagcaacctgagttctcatcacctgagtccctaggrgatcctgtctcttgccttgtctaaccaagacttattaaaaaccacttaatttggccgggtgcagtggctcacgcctgtaatcccaacattttgggaggct

SEQ ID NO: 32663 - DNA, 201 bp, Homo sapiens
ttgtctctgaggacaggtcatgctggtggcaagtaagatttggactaccaggcactaggctggtgattttttctttctttctttctttctttctttttttwttttttttttgagacagggtctcactttgtcacccaggctggagtgcagtggcgtgatcacagctcattgcagcctcagccgcctgggctcaagcaatcc

SEQ ID NO: 32664 - DNA, 201 bp, Homo sapiens
tatggagtgtaagtgaaaagaaaagcagtttctttcttggtaatgtggtattgaatccgaagcctcggaccatacaatgtcccaggaagcttcgtgatttrtatattgtatgtgatcttttcttaaacattgttaacctgtgccctttacagacaataccaggtcagaaaatgtcaggggagctttggattgccttcataa

SEQ ID NO: 32665 - DNA, 201 bp, Homo sapiens
tgtatatgtaaattataaagcttagataaacccatgagctcatcactcaatttgagaaatagaatataaacaatatggctcctccccagtccctgcctccygacccgtggtcatctccaccctgagaggcaccccttctcatttttaaaatgcaatttgccacatgtgcctgtatccctaaataatgcctccttgagtttt

SEQ ID NO: 32666 - DNA, 201 bp, Homo sapiens
ccctaccctcctgtagccaagctggtacctaaggggcaaggcaaagtcccttttacttttccttctgcttttctccagcagaaggagtctctccccagaascaccacggctgggaatgtgctggatctcacttgaagccagcacgtctcagagtctcacccaaggcccacggcataccacctgggtgtcactgttggttat

SEQ ID NO: 32667 - DNA, 201 bp, Homo sapiens
cagcgctgtcacgaggggcaccgctgtctttgagacaacgtggctctggcaccagtgcacactcccctgaagagggggcagaggcccgaatcccctaacaytggtcaggcttgtgccacctccaacagatggaccagtaacaccttttcacatccctccctgtctttgaaaaccaggacataagtcaccagtttgttgtct

SEQ ID NO: 32668 - DNA, 201 bp, Homo sapiens
taaatgagcctgaaatacagactgtgcaatcctggttttgagaaaaacagacatatacctattgataagcgcacttgtaaacaggctagaggggatatctgtacactgcactgttagagaggagtgtttatgtcatggtgggtggggcaagatcattagtttctttactttctgcttaagacaccgaagtattgtttgatc

SEQ ID NO: 32669 - DNA, 201 bp, Homo sapiens
aacaggcttgaagaggctcaagcccacagtgctacagtactaagtgacagagtgacaatttggatcccagtctgacttgagagttcaaactttcatccttaaaaaaaaaaatcacttgaagccaaatgctcagctcttccccagcctgcagcatgtcatgcttgcttgcttgccacccacttggccctcagctccctagag

SEQ ID NO: 32670 - DNA, 201 bp, Homo sapiens
cagtaacaccttttcacatccctccctgtctttgaaaaccaggacataagtcaccagtttgttgtcttctgcctttgggaaatcctcacattttctgtgtrggaagcacagccagcccatgtcactccacccttttctacctcctgccactctagtagcagttcacataccatagcctgtataccttgatttgcaattttt

SEQ ID NO: 32671 - DNA, 201 bp, Homo sapiens
aaatcacttgaagccaaatgctcagctcttccccagcctgcagcatgtcatgcttgcttgcttgccacccacttggccctcagctccctagagtctccaayctccctgtagccaaaggtgaactcaggacccagcaaccgaggctgagaactgcctcaaattgttctgggcccactcaattctgagatctcttaggcaaaa

SEQ ID NO: 32672 - DNA, 201 bp, Homo sapiens
ttggtctgtctctgttttcttttggttgtatccaattttacagttttcctagaaagaagcaacagccagtttccctcatcccccttgctgccgcagctctsgagcctgctgttaagaggacagttccgcccagcacgactctgtcagggctacacatacctagcagctgtgcagaattcagagtgctaactttttaaaaaa

SEQ ID NO: 32673 - DNA, 201 bp, Homo sapiens
aggtttttttcatcagatacaagttcttccagttattgacacagtcactcctaagacttagcttaagtgttaatggctcaacaatctcagccgattaacaytaatcataataatatttattgaatgtgtgctttgtgccagccactttgctgagcccttttcatgttcttaaccctcactaactccaataaccagagtatg

SEQ ID NO: 32674 - DNA, 201 bp, Homo sapiens
ttccacaaaaatatttagtctacattagcagtagcctagttaggcaatctagattgtccccctttttcaaaaatgctaatgtgcccaaatcatcagactcrtaatttctaaagatacctttgaaagccccgtaattcagatctctggtttccttccacaaatttcaactgcatttgtcccaaagaggtggaaaacatattc

SEQ ID NO: 32675 - DNA, 201 bp, Homo sapiens
gtggaggtacaatgctaagctgctatttatttgattataaaattggagatacattccttttgaaaaagactggctctaagatgtaatttgagtattctccmaatcacatatttaaaggaaaaagagataaataacagcaactaaaacaagttttacaaatgactacaaagtaattatgtttcttttcgtggctttttgctt

SEQ ID NO: 32676 - DNA, 201 bp, Homo sapiens
agaagaatataattttatcacattatttcttgttacttatcatatttccaagtcttagaactgcacctggcacaaaggaagcgttctgttaagagctgttdaatgaatgaatgaagacaagcggtacaagcaagcgctagaggaattaaagtttgagttttggttgtgccattcagcaaagactggcagagtgctgtcctg

SEQ ID NO: 32677 - DNA, 201 bp, Homo sapiens
ttcttctctcccgtgttccacatttcaggcaaatgaacaaaggaggcccctgtgagtgtaaaacagtccagactcctgatttctgtccccagctctgtctkacccactcctcttctttgggcaggtcatttctctccgggcctgagtttccttactttttaaatgagagaattaaactttgcaatctccaaggccccttct

SEQ ID NO: 32678 - DNA, 201 bp, Homo sapiens
gaaccagagcaactccatcttgaataggggctgggtaaaataaggctgagaccttctgggctgcattcccaggacgttaggcattcttttattaaagttcttttttttttttttttaattgatcattcttgggtgtttctcgcagagggggatttggcagtgtcataggacaatagtggagggaaggtcagcagataaaca

SEQ ID NO: 32679 - DNA, 201 bp, Homo sapiens
atgagagaattaaactttgcaatctccaaggccccttctcactctgaaaacactatctacatagtcagatataatcacacatccccagtgtcctgggatcrttaaaagttcagtctactaacagaactgtgtggtaagaatggtaatgaggttgctggtcagtctgacacaggagcctcagggattcctacttgatctgta

SEQ ID NO: 32680 - DNA, 201 bp, Homo sapiens
aggtggatcacgaagtcaggagttcgagaccagcctgaccaacatagtgaaaccttgtctctactaaaaatacaaaaaaattagccaggcacggtggcgcrcgcctgtaatcccagctactcaagaggctgaggcaggagaatcgctagaactcgggaggcggaggtgtgcagtgagctgagatcgcgccattgcactcca

SEQ ID NO: 32681 - DNA, 201 bp, Homo sapiens
tgaaaaatctcaaattgaaagtgtagatactataaaatttttaaagaagggaatacattatggttgaactttcaaaatacaaatagtgtatttttaataamcaagttatgaatgtccttggattcttgtgttagggaggtggagaaaggaaagaaagtggcttcctcttacctttatgcgaaatagaatctggagacacac

SEQ ID NO: 32682 - DNA, 201 bp, Homo sapiens
gccaaggcgggtggatcactaggtcaggagatcaagaccatcccggctatggtgaaacccgtctctattaaaaaaaaaaaaaaatagaaaaaatcagccgygcgtggtggcggccacctatagtcccagctacttgggaggctgaggcaggagaatggtgtgaacccgggaggtggagcttacagtgagccaagatcacgc

SEQ ID NO: 32683 - DNA, 201 bp, Homo sapiens
ttggcataaatctagcagaaaatcaagtacgaaccacctgctgtgcactcctagcaaaagagggccctatggttaaggggtccctttttcacccatgcgcrccaggtaaatagaccgtattatctaaggtccttctgtcccagatggtaggagcttttccctagggtcctgaataatatatttaaaccttttaaaaagagc

SEQ ID NO: 32684 - DNA, 201 bp, Homo sapiens
gtttcctccttcgattttcggagttggagctcgagatgatagcagccccaaagcagccattccaatggggtgctgcagccggctcctgccagtgcctgttsagtatcttgcgagctggttcttcaaccactactagtttgaaatcaaacttggtgggagtgttgacaccacggaaatcggcaaacactgcaagtcaggact

SEQ ID NO: 32685 - DNA, 201 bp, Homo sapiens
aaataaatgttttttcttaccatgtttgtattcagtactatttaaagtatacagaaatagagctatcaacctaacgcttgaaattattgaaggaatcaaaygttgggggtgttcactgatacccaggactaatcaaggaaagaggaaggttgttgttgaggatgatcagttggaaaactgcaaggaatggggatataagga

SEQ ID NO: 32686 - DNA, 201 bp, Homo sapiens
aaataagcaacttctaaacacttgagtacttaactttccctgtttactaatcttgtgaggaaatactccgaatagtagaggcgcccgctcttctagcttgscctcgggggctgtgtgctggcagataatgccctcagcaggtgcgttaggaagagcgtctctgttcaagctcagctcccccaggcgctgctcggccacagt

SEQ ID NO: 32687 - DNA, 201 bp, Homo sapiens
ccttaggaaaaagccttacccctacattccaaaggtgacaaaaaggccaccaaggccaggggcggtggctcacgactgtaatcccagcactttgggaggcygaggcgggcggatcacctgaggctgggagttggagacaagcctggccaacatggtgaaatcccatctctacgaaaaatacaaaaactagcagggcatggt

SEQ ID NO: 32688 - DNA, 201 bp, Homo sapiens
ccaactcctagggaaggaaactgtttcaacatgggatcattccccagggattggaaccgtcaccctcctctgagtcaggttgtgctgcacaccttagttgrgtgtgtggtgccgctgcagtgtttcacaccactaaagaggctccataaacagtcattacattgttttatttatttatttgagacggggtcccactctgtc

SEQ ID NO: 32689 - DNA, 201 bp, Homo sapiens
gagaagaattctgagttagatttccttctcaatatagctactcatttagaacgacctagtgggtacatttttcctattttctcattacatttatcaatttrttatctgacatgcttagggtgacaggatttgatttaaaaggtgatcattctcatcaattttgtgaaaattcagtcattcctggtgttattggaggaagcg

SEQ ID NO: 32690 - DNA, 201 bp, Homo sapiens
tgttgttaatggggctggttataaaacccttagcttttgatacagtttcactgaagttgtagagatgtggatttggagagcccagatatttgtgtcatccrgtgaccttcacgtgaccttctataggagtctgttctcacgctgttatgaagaaatacctgagactaggtaatttataaagaaaagatatttaattgactc

SEQ ID NO: 32691 - DNA, 201 bp, Homo sapiens
tcctatgaccaattaattcagtgcagtttattgagtaggcatttagacggtagatggaatttccgtcacccctaaggaacctctgacatcgttgggtagtrtttagagcgtcatgaaaacccagacctggaagagccagaaggcatctcctttctaccctcatttcatagtgaaggaaataaggatgcagataagtgaagc

SEQ ID NO: 32692 - DNA, 201 bp, Homo sapiens
taacaaaatcctcaggtggtgaatatcattacagttggaaaaacattgactagagcagtgattggcaaaccaaggcccactagcctactacccgtttctgyaaacagagttttattgagcacagccatgcgcattcatttccatattacatatggctgcttttgtactacagttggagatgcacagaggtcaggcattgcg

SEQ ID NO: 32693 - DNA, 201 bp, Homo sapiens
ttacatgattgtaaagagagaggaagcatagaaagtggttagtattatgcctgggacaaaataagtgctcattaattacatgaggcacttctgagtgtcaygagtcagaaagtgtggtctgtggatcagcagcatggtctcctgggaacttgctgaaactcagtcacagatcctcctgaatgcgaatctacattttaacaa

SEQ ID NO: 32694 - DNA, 201 bp, Homo sapiens
tttccctccttcttcctgtcagttaacatggacgtgcctcccaagtgtggcttgtacaggacctgactttacacatcaaatgtggggctaggattggtttktacagacctcaccccaccattctttttccttattaatactttttacactttttaattttaaacaaaggagcacttagaatttaaaggtctcctatgacca

SEQ ID NO: 32695 - DNA, 201 bp, Homo sapiens
gttaaaaaaatcaaatggaaatgaaataatggttctacacgtgtgcggcaaactgagtaactggaagcagtcaccacatccgagcattgccaagaggtgcyacagcgacagtcctcagcccttcctgggcacgggagggaaagccattggaatgtgggaaggcaggcatcatctgccctcgccagctcctggttgaatgtc

SEQ ID NO: 32696 - DNA, 201 bp, Homo sapiens
ggagaataaatatagggacattttgttttaaatgctctctgtcgttatgcttcattagcatatatgttgtaaaagttacttttctccccttgagagaaccrtactcagttcaataagccacagactgaaatctgtagcctgtcagggacggaacactttaggcggacaggagaactgattcgctcccctgctgcgtcccgg

SEQ ID NO: 32697 - DNA, 201 bp, Homo sapiens
cagagcaagactccatctcaaaaaaaaaaaaaaccccactgaatttgactctcatcctattaatatttgagattagtgctgagaattcaatgcatgttccragcatgttttaaaaaatcaacttgaagtataacttacataaaataaaatataccagttttatgtattttatgtttatgaatgtacagttcaatgagtttt

SEQ ID NO: 32698 - DNA, 201 bp, Homo sapiens
acaaggtattttatgggacttaattagggctcctgcagtgcagcccctctgcttgccaggccccctacgctgtcggctaatgtaatccccggagtggggtsggggggggtgtggtgttttccctgttttatagatgagaagccaagcagaggggttcacacagcagcacacggaggggctggctgccaggctggccacggc

SEQ ID NO: 32699 - DNA, 201 bp, Homo sapiens
aggtgggagggtgggaggggtgggaaggatgagaaattgcctaacagcgacgatgtatactattcaggtgatggttacgctgaaaccactatttttttttwaaagagagagaatggaatagacaggtaatttcagctgacttggaatgtggtgtggaaactctcactgcacctgtgtttggctgggctttgctgcagagag

SEQ ID NO: 32700 - DNA, 201 bp, Homo sapiens
cgccttgctgagcagggaggcttgggatcccctctgggatctgcccccactggcctctggccgctccctctgccagtgctccagcctggccaggctttccrttgctggaatcttccacacgccccctgcctccaggcctgcatcctttctgccgacagcatgcctcttctccccctctgggtccccaactctgctaactaa

SEQ ID NO: 32701 - DNA, 201 bp, Homo sapiens
tcccagcggaatctcattagctttgccgcacaatgggaccgaacctcggctgccacagagtggatttaaattagttaatagcagattttttttttttttttgccccaggcctgttttttccaagtcttggatgctgagcaaaaaaacaactttgttgttgaaaaatgtaaaacaaaaaaatattgaaggtggagtgctttg

SEQ ID NO: 32702 - DNA, 201 bp, Homo sapiens
gttagcagttggatggcactaaggctgctacagcaaaactactagttctgcccaactgtgcagagagcacaggcgtggcaggaatgcaggagctgtgtacratgtgtttgtttttaaaatgcagggctctaacggtagtctctgaagactcagattcctccctgagctcccataggatgagtgattcatgggattaatgat

SEQ ID NO: 32703 - DNA, 201 bp, Homo sapiens
tttggcagctataaaagggaatgtcagcagaatgtccagaaaagcagagaggtttcttctaccattgaggcccattaaggtactgccttttcccccgggcracacccatcagtgcagcaggaccagtggtccgtccatgagacataccaaagggaatcactggggacaggtgtgatccacagacagccatatggggcccag

SEQ ID NO: 32704 - DNA, 201 bp, Homo sapiens
ctaagagccattcgccgtgtcatcaggtcccggctcccctactgtttcctgtgtggattcacttgcctcagtttcctcatctgtaaaacagagacgcagcygggcgcgtgggtcatgcctgtaatcccagcactctgggaggccgaggcagaggatcatgatcctaggagtttgagacaagcctgggcaacatggcaaaac

SEQ ID NO: 32705 - DNA, 201 bp, Homo sapiens
aggaagctgtgcagcatgctcctcgtccatgtgtgtcggcagtgctggtgtctgtcgtctccgcgagctgttactggaatgagcccttgtgttcatgggtrtcgtcatgcggggttcttgtgttttgtggggcttgggttttggtaacttatttttataagcaataaaccttttgtatcctggataaggctttgtctcctg

SEQ ID NO: 32706 - DNA, 201 bp, Homo sapiens
ccaggaaaacgtgttggggcgggaggcggattcctccaggagccggcattgctgccatggaaggtgggggctgaagggaaatgcggctgagacccaggtcygcaaggcctcctttgctccaccagggctttcagaaggatcctgtaggtggctgtggagtggccagcgggggtacatcacccctaaaggctgtctgcagcc

SEQ ID NO: 32707 - DNA, 201 bp, Homo sapiens
accaacctgcttctcgtggtgggatgccttagccagccacctacccagatccctgggtgtcatccgtcgcttctgcctgtccctcacaccctctgacagawctattgatttcccctcttcacagcctctcagctcttccctctccatcttgactggtgctgcctctccccgggcctccattattgctcagggcaatgccgc

SEQ ID NO: 32708 - DNA, 201 bp, Homo sapiens
tgtgctcgttcatggggtgtgcgttactcgtgtgtgtgctcatttatggggtgcatgttacacgtatgtgtgtgtgctcattcatgggacgcctgtttctygtgtgtgtgctcgttcatcaagtggcagtgttgctcggtggttcagagcgtaggctccagagcctgaccactctggctcacatgctgtgttacctgacag

SEQ ID NO: 32709 - DNA, 201 bp, Homo sapiens
gttttggtcttaagacaggaaaagatctgggcttgttaaatgtttgttacttcgtttgtgggggaaacaaattagtgacattcacctggataacataatayttaaaaaatttctttcagttaaaacataaagaaaaggagataatgcgatgtttttttcatagaaaagggaaacagttttcttcatataaaatacatctgt

SEQ ID NO: 32710 - DNA, 201 bp, Homo sapiens
ccaggcttctcttttaaataagcaacttctaaacacttgagtacttaactttccctgtttactaatcttgtgaggaaatactccgaatagtagaggcgccygctcttctagcttggcctcgggggctgtgtgctggcagataatgccctcagcaggtgcgttaggaagagcgtctctgttcaagctcagctcccccaggcg

SEQ ID NO: 32711 - DNA, 201 bp, Homo sapiens
gactcagaaggcattttgaggccaagggtatgggatcatcttccttatgtgtgccatctccagtgtcgccttgtcctcattgctctttagagtttctcatstgaggcgtcagagaagtcacacccagtaatagttgctgaaatgtccgtttttatgtatttattttatgtactcctgttattggcaggtagaagaggaaag

SEQ ID NO: 32712 - DNA, 201 bp, Homo sapiens
ttgtgtgctcatccatggggcgcgtgttatgcgtgtgtgtgtgtgtgcttgttcatggggtgtgtgtatgtgtgtactcacttatggggcgtgcattactygtatgcatgtgtgctcgttcatggacgtgtgttactcgtatgcatgtgtgctcgttcatggacgtgcgttactcgtatgcatatgtgcttgttcatggac

SEQ ID NO: 32713 - DNA, 201 bp, Homo sapiens
cttctagtctccagtcttgcttccctcacagtctgtccttcacttggcttccagagctgtcttcctaaaatacacatgcgagcggatgattctctttcttkttgccatctcccccttgcccaaagcagccctccccaaagtaggaaagtaggatattaatagatgttaggcagaaagcaatgcatggtcaaacaagtttga

SEQ ID NO: 32714 - DNA, 201 bp, Homo sapiens
ttcatcttcggggagcattgtgtgtgcgtgcgtgttttggtcttaagacaggaaaagatctgggcttgttaaatgtttgttacttcgtttgtgggggaaamaaattagtgacattcacctggataacataatacttaaaaaatttctttcagttaaaacataaagaaaaggagataatgcgatgtttttttcatagaaaag

SEQ ID NO: 32715 - DNA, 201 bp, Homo sapiens
gccccctggggccagatgatgcccatgacctttgggcactcgggagcccctgaggacaatccctggatcactgagaaatacaagggcccctgttttagaaygcctggcaggaactgtaagtttccatttaaatcaaatcaaataccccaagttgaaagtattcagaaaattcggaggaaaaaagataggaaagaggtgcaa

SEQ ID NO: 32716 - DNA, 201 bp, Homo sapiens
ctcataggattgggatcagcctggagagtggctatatcttatttaattgatctatgagttatatattgagatatctatgtatttattgagagatgtagctrtgtttacctgtgttctatcttagatagcagcctcgattttctaatgcagtgttgtgtgcttttgtgttaacatggaatattgctttcaatcagtatggcc

SEQ ID NO: 32717 - DNA, 201 bp, Homo sapiens
taggcagctcagcagggcttcctttcagcaaattctgtgacgtcaaaacctcatcagagcaactcgcactatgggcgggtgggtcccaggctggggtctgygtccaggttctcatatacgaaatgaaaagctttagcaaagtcttagaagagttacgtgagcccctcgtcttcatccgtatattgtttattgttgctataa

SEQ ID NO: 32718 - DNA, 201 bp, Homo sapiens
gtgtatggtagggtgagcaccgaatccggggcgtacagcaggacgcacacctggatccagggctcacagtaggatgcacactgaatcccgggcacacagtrggatgcacactgaatctggggtccacagtaggaccatcccactctccccgccctgcaccttttctcacactacactttttcattccctcgatgaatgtgt

SEQ ID NO: 32719 - DNA, 201 bp, Homo sapiens
gcctgtctccccatccccgcattcctcttgcttcagggacccctgcctcactggtttattgctaccctcctgccttctcctccctccctttccttgggctygcatccctttgatgtttttacaagccttttttcaaacctgcactcactggtgggtgaatcgcctccctctccttgggagcattagtgcccttcctggcct

SEQ ID NO: 32720 - DNA, 201 bp, Homo sapiens
ctgtgcaggacaaaactcctctctatagtcaactccttcaagcatataagtggtcaaacaaggtaagggagatgtaataaacggagctaatatatggaaarccaagttttcttatattccatacatgcagaaagcaagagtatgtttttattgctttttatgttcttgattcagcatggggttatagagttggaagttgta

SEQ ID NO: 32721 - DNA, 201 bp, Homo sapiens
gggctgttaagcctggatcctgtgcaggacaaaactcctctctatagtcaactccttcaagcatataagtggtcaaacaaggtaagggagatgtaataaayggagctaatatatggaaagccaagttttcttatattccatacatgcagaaagcaagagtatgtttttattgctttttatgttcttgattcagcatggggt

SEQ ID NO: 32722 - DNA, 201 bp, Homo sapiens
tccctgttcggtgccctgcacaggtgagacccccacactcagagggactccacagctgggagctgcctcccagagtcgttgaaggcccttctgtcttttayagatctcagccctctgaccatctccccgcctcttaaatggtgattaactttttccaacagggagaacttatgttgtaaggacagaatgtggtgtcatttt

SEQ ID NO: 32723 - DNA, 201 bp, Homo sapiens
atggctcccgccgcctctgaagaggacactttctagtgaattcagttcgtgctacccttgagcagcctgtgctacagcaggcacatttgtgaatctcccarcctgtgcctggcgtcggaactgtagcttcccaaagacttacctgccctgggagatggcgggcagctgctggccacagccctgggcctgcacctttatctg

SEQ ID NO: 32724 - DNA, 201 bp, Homo sapiens
tgccagtttaaaactgctactttctttaaactgcgaagggatctgggagaaaccacttccagcttcattcactggtgctttctctacttgctgaaaaagcrgtggtttcagaaatgatcttccaaaatagttccagcattgacttagtccacagatatttcattgagctcctaatctgggccaggccctgtggttggcaca

SEQ ID NO: 32725 - DNA, 201 bp, Homo sapiens
atcctgtgggcaagtcaggcaggaaacaagtaaacaaagaaataatagagcttcaggcagttttaaatattatgaaaactttaaattttgaaatggtaaaragggtccagtgtaatggctcatgcctgtaatcccagtactttgggagtccaaggggggcagatcacctgaggtcaggagtttgagaccagcctgaccaac

SEQ ID NO: 32726 - DNA, 201 bp, Homo sapiens
agagtttatacaatgtataaatagggtgtccatgagactgtttcagtgaaagccttttctccgtgcctggcacacagcatgggttaataactgtagctgcyggtagtgatggccgtcaccatcatctttgtcatccttaagccagcctcttcatttgtagaggaagaaactgagtcccagatcctgtggccactcagcagc

SEQ ID NO: 32727 - DNA, 201 bp, Homo sapiens
acccttgagcagcctgtgctacagcaggcacatttgtgaatctcccaacctgtgcctggcgtcggaactgtagcttcccaaagacttacctgccctgggasatggcgggcagctgctggccacagccctgggcctgcacctttatctgcaaactgggagagcggggatgggagtcagtgggtaggaggtgggcagaggcct

SEQ ID NO: 32728 - DNA, 201 bp, Homo sapiens
ttacttaattttaattaaacttaaatagcctcctgtagccagtggccactatgttggacaacacagatctggaggctggaaggaaccttgggccatgtagwtgagtgcttgacctaacccttttttccttcactgtgcatatttccacagtctttatgtctagctaaggaggggcaggggatgggatagggctttgaaaag

SEQ ID NO: 32729 - DNA, 201 bp, Homo sapiens
aatattgaccttgggataaagagcatcctattttgaaaggaagaatttaaaaaaaatttttctcagttatttaactgttcattagaatagtcttgaaacckgatctgtcattccccttacccccaattctgtgtttagattctcttcctggacattctgttgccctctgtttagctgttgcctttaaaagtaaggcaacca

SEQ ID NO: 32730 - DNA, 201 bp, Homo sapiens
tatctcattcttagagcccatcagttgatacctattatcaactaatgagtttcttaaacattccaagagaataattggctgagtgtgtgctagttaaatartataaagcatgggaaataagtctcaggttaggtcaccattttgagaaaatttctacacataatgtttacatttaggagaggaaaaatgtatttccatttt

SEQ ID NO: 32731 - DNA, 201 bp, Homo sapiens
actaaaaaatcacattttttcatatgtcagttcatggccacacatagtacaagtcttacggtacatgtcatcttctaggttttcttctggtccatactcaygttgatgaacaatcgtctcccttttccacacgctgcttcttactgctcgccgcaattctgaaaaaaaaattttaaagtcatcttttcagtggtgctattc

SEQ ID NO: 32732 - DNA, 201 bp, Homo sapiens
gtttgtttattataagttttatataaatatatactctaatatatattttacatataattatatactgtatatatagaagcaagcatatggaaagtaatacatatatatatatatatatatatatatatatatatataaaatcatttattcaacaaatacttaacagtgccaagctctgtcctaattacttgccatacagca

SEQ ID NO: 32733 - DNA, 201 bp, Homo sapiens
tttgtttattataagttttatataaatatatactctaatatatattttacatataattatatactgtatatatagaagcaagcatatggaaagtaatacatatatatatatatatatatatatatatatatatataaaatcatttattcaacaaatacttaacagtgccaagctctgtcctaattacttgccatacagcag

SEQ ID NO: 32734 - DNA, 201 bp, Homo sapiens
ttgtttattataagttttatataaatatatactctaatatatattttacatataattatatactgtatatatagaagcaagcatatggaaagtaatacatatatatatatatatatatatatatatatatatataaaatcatttattcaacaaatacttaacagtgccaagctctgtcctaattacttgccatacagcagt

SEQ ID NO: 32735 - DNA, 201 bp, Homo sapiens
tgtttattataagttttatataaatatatactctaatatatattttacatataattatatactgtatatatagaagcaagcatatggaaagtaatacatatatatatatatatatatatatatatatatatataaaatcatttattcaacaaatacttaacagtgccaagctctgtcctaattacttgccatacagcagtg

SEQ ID NO: 32736 - DNA, 201 bp, Homo sapiens
ttgaggttaatttttagcacaccttcattcaacttgaattgttgagcaatcaaaaagacagatgcttggtaatgattttagaatggtagatttaaaaaacatagagattattcgaatgatatggtttttaaataaagcagttatcagtaattcagttaataaaagctagttaaagcaggaattgtaaaacgtggtcctttt

SEQ ID NO: 32737 - DNA, 201 bp, Homo sapiens
tgaggttaatttttagcacaccttcattcaacttgaattgttgagcaatcaaaaagacagatgcttggtaatgattttagaatggtagatttaaaaaacatagagattattcgaatgatatggtttttaaataaagcagttatcagtaattcagttaataaaagctagttaaagcaggaattgtaaaacgtggtccttttt

SEQ ID NO: 32738 - DNA, 201 bp, Homo sapiens
taaatttccctggcctagataagaacccatggaatttctgaatgagaagacagtgtctctgaaccacaacaggactttgaggtatatatgtgtgggtggcrgggtgggggggtactttcactatagaatataagtcttaacatttggccagacacagtaaaatgcttcccctggaggagatttaacacactggaatctaaa

SEQ ID NO: 32739 - DNA, 201 bp, Homo sapiens
cattttacccacagtagaacttctttcagagttggaattaatcttcccaaaccctgccactgctttattagctaagtttctatgatattctaaatccttcrttgtcattcagcagtgttcacaaggagttgattccatctcaaaaaaacactttctttgctcatacatagaaagcatcttcttattttttaaagttttatt

SEQ ID NO: 32740 - DNA, 201 bp, Homo sapiens
gtaatttgtatatgtcataaaatactcttgatttttttttcacgcatttaaaaatgtaaaaaccatttttagttcccagctatgcaaaaaacaggtagtaggctagattcagcccttaggctatagttttttagaccaatagtttagcctatacaagattgcttattttgtagttattataaagaacatttaggtttaata

SEQ ID NO: 32741 - DNA, 201 bp, Homo sapiens
ataattggtgtgtaaagtaggcagtggttgtatggttaggtatgagatgtggtagaaaaaacactacagctgatactctggggtataagtgaacatgacartggaatttcctgaaatatagagctttaacacttcagaacttttatccccatcacccagtttagtgcttggaacataatagtctctcaaatatttgttgaa

SEQ ID NO: 32742 - DNA, 201 bp, Homo sapiens
aggaagccacaaacttcacttcccatagttcactatctctgggtcggcctcacgtttgcacaagggaagtagcagaagggaagaggacacttgtatttctrtaggagtctctgggggaagagggagaggactatagatacttaacactttccccgtactgtgaggaggaatggggcagtcattcccaagttaacggaatac

SEQ ID NO: 32743 - DNA, 201 bp, Homo sapiens
taaccaaatactttagtcaaaattatgtaatgatctacttagatatgtctaactgaaaatctggtttacatttaagactgctaatgtttgtggtcgggtatttttttttttttgtgcaggggaaactagaatgggacctcaaaatttgtttctcctgaatttgtatttaattggtatcacctctgtaaggtgcatatccat

SEQ ID NO: 32744 - DNA, 201 bp, Homo sapiens; identical to SEQ ID NO: 4251

SEQ ID NO: 32745 - DNA, 201 bp, Homo sapiens
tagttggactactgaatgccaggaattacaattttggtggagaatttgtagaagccatgattcgtcaacttaaagaatcattgaaagcaaacaattataaygaagccgtgtatttggtaagttagtttgtttgttggtatgttatgactactgttgggatggagggaaaaggtgaactacaaccaaataatttaaaatgct

SEQ ID NO: 32746 - DNA, 201 bp, Homo sapiens
caggcatgagccactgtgcccagcccactgcattatgtctttatattaaagtattcatgggccaggcttagtggctcatacctataattccagcaatttgsgggctcaggcaggctgatagcttgagctcaggagttcgagaccagcctgggcaacatggcaaaatcctgtctccactaaaaatacaagaaaaaaaagaaa

SEQ ID NO: 32747 - DNA, 201 bp, Homo sapiens; identical to SEQ ID NO: 4255

SEQ ID NO: 32748 - DNA, 201 bp, Homo sapiens
ttcctttatttatatatcagtagggactaattaatttatatttcattcgatgggttataaactatgaggattatttattttgatgcccaaattgtccctgrtatgtacatgaggagccccggtaagctctctctctctctctctctctctatatatatatatatatattttttttttttttttaacgtccccagccattca

SEQ ID NO: 32749 - DNA, 201 bp, Homo sapiens
ggttgtatggttaggtatgagatgtggtagaaaaaacactacagctgatactctggggtataagtgaacatgacaatggaatttcctgaaatatagagctktaacacttcagaacttttatccccatcacccagtttagtgcttggaacataatagtctctcaaatatttgttgaataagtaaaagaaatctgttttctag

SEQ ID NO: 32750 - DNA, 201 bp, Homo sapiens
gtcttacggtacatgtcatcttctaggttttcttctggtccatactcatgttgatgaacaatcgtctcccttttccacacgctgcttcttactgctcgccgcaattctgaaaaaaaaattttaaagtcatcttttcagtggtgctattcaggtgaatccaaaaatccaactccatcaagctttcagccatgtacatgtgtg

SEQ ID NO: 32751 - DNA, 201 bp, Homo sapiens
gatctcggctcactgcaagcgccacctccgggttcacgccattctcctgcctcagcctcctggtagctgggactacaggcgcccgccaccacgcctggctmattttttgtagttttagtagagacggggtttcactgtgttagctgggatgatctcgatctcctgacctcgtgatccgcccgcctcggcctcccaaagtgc

SEQ ID NO: 32752 - DNA, 201 bp, Homo sapiens
agacatagctaaaagtaatcctgttccaaagttaatggaatgataaaaagattcacataaaattcagcaacttaacgccattgttttggggttttcttgtkatactgggttcttaaatcagtgcacgcctattacctgagaagctgacaatttatacaacattagttggactactgaatgccaggaattacaattttggtg

SEQ ID NO: 32753 - DNA, 201 bp, Homo sapiens
gttaatgtccatcatagtttgccatttcaattcagtaagtatgtacctctggtaagggatggaaataagaaaaatgactacacagtgctgccctcaggggrctcgcctgaatctaatgggtgtgaagatagatacttgcacaatttacaataaaagaccaatttgtaagtattgctggagaaagatgactaattcagcccc

SEQ ID NO: 32754 - DNA, 201 bp, Homo sapiens
gatgggttataaactatgaggattatttattttgatgcccaaattgtccctgatatgtacatgaggagccccggtaagctctctctctctctctctctctmtatatatatatatatatattttttttttttttttaacgtccccagccattcattgagcattcccttattttctagaacaacatatttaggatcatcttgc

SEQ ID NO: 32755 - DNA, 201 bp, Homo sapiens; identical to SEQ ID NO: 4249

SEQ ID NO: 32756 - DNA, 201 bp, Homo sapiens
tattcattccagtaactcatactctataacaggattgccttttttgttacctctttgtctaccttacattaaaagcagatttcttgttgctctggtgatgccttacggtgtatattagcacaaatttttataataaggactcaactgataccaaccaatagtaaatacaaggagtcccatcacgtgagcatctgacttacg

SEQ ID NO: 32757 - DNA, 201 bp, Homo sapiens
tcagatgttgtcagacatcttaagacataagcttaagtgttttttttttttttttttggtattaatataatagaggctatgaataaggaaacctgtgtgatttttttttttcaaggaatggatgatagaattaagacagtcacataaaactaagacttaaaattacaagtggtttcatattttcagtgtttgaaatcagtg

SEQ ID NO: 32758 - DNA, 201 bp, Homo sapiens
ttacaataaaagaccaatttgtaagtattgctggagaaagatgactaattcagccccaaggacagaaggctgtatcagctgttaagaatgaaattacaaargttgaaagattttattttctgtaaccatagcttgacatacagtaaccaaatgccatatttctttaagattgtttgtttgggaaattttgcactctacaat

SEQ ID NO: 32759 - DNA, 201 bp, Homo sapiens
ttccctggcctagataagaacccatggaatttctgaatgagaagacagtgtctctgaaccacaacaggactttgaggtatatatgtgtgggtggcggggtgggggggtactttcactatagaatataagtcttaacatttggccagacacagtaaaatgcttcccctggaggagatttaacacactggaatctaaatggta

SEQ ID NO: 32760 - DNA, 201 bp, Homo sapiens
cactactcagaggcaaccatgtatgtctgagtttctctgctgtttacttagtattctcgcatgagcatttctccatgcttgaaaaaaaattgtgggttgctttttttatatatgtctcgtttaattattcctcattgctgatcattttccttccatgaacattttaatgcatagattcctgttaaaatttctgattacttc

SEQ ID NO: 32761 - DNA, 201 bp, Homo sapiens
cagaggcaaccatgtatgtctgagtttctctgctgtttacttagtattctcgcatgagcatttctccatgcttgaaaaaaaattgtgggttgctttttttatatatgtctcgtttaattattcctcattgctgatcattttccttccatgaacattttaatgcatagattcctgttaaaatttctgattacttcgttagaa

SEQ ID NO: 32762 - DNA, 201 bp, Homo sapiens
gagatacaaacagcaagggtcttaatagacaggtgtttgaggttaatttttagcacaccttcattcaacttgaattgttgagcaatcaaaaagacagatgsttggtaatgattttagaatggtagatttaaaaaacatagagattattcgaatgatatggtttttaaataaagcagttatcagtaattcagttaataaaag

SEQ ID NO: 32763 - DNA, 201 bp, Homo sapiens; identical to SEQ ID NO: 4256

SEQ ID NO: 32764 - DNA, 201 bp, Homo sapiens; identical to SEQ ID NO: 4257

SEQ ID NO: 32765 - DNA, 201 bp, Homo sapiens; identical to SEQ ID NO: 4258

SEQ ID NO: 32766 - DNA, 201 bp, Homo sapiens
tgttagccactgtgctttttggcagatcaaaggtttatgcagtacttagaagtgctgggttttgagttttgtcctgtactggttccgagaatgataaggtrtagtctttgctatcagaaagctcaggcttttgttgaagattaagctttctttttgccccataggaataactccgcctaacattcaaggccttcataacca

SEQ ID NO: 32767 - DNA, 201 bp, Homo sapiens; identical to SEQ ID NO: 4259

SEQ ID NO: 32768 - DNA, 201 bp, Homo sapiens
ggatcttttgagcccctcaaaaagctgtacatcctggctcagctgtggtgctttcaaagttggaatttaattgcatagttctctgggaggagtgtagatcraataagcattagtgtcgtgtgtttttatttgatcgaattatagagagaagaaattttcattacagttttcagttttagatttttgtgtttgaaagagcat

SEQ ID NO: 32769 - DNA, 201 bp, Homo sapiens
aagaagtcttggactgccagaaagatctgagcatctatttcaagtaacagtgtggaatgacttgattttcttgtttcctgaccccaaagtctaaaagaatkctttttttttttttttttttgagatggagtctcgctctgtcgcctaggctggagtacagtgacacgacctcaactcagtgcaacctccgcctcctgggtt

SEQ ID NO: 32770 - DNA, 201 bp, Homo sapiens
acaaagatttttcattaaaaaaaatccttgtcaaatttgttaggaggttatatagtacctgttagaccctttagttcatgtccatttgctgctaccattgstcatcagaatatttaggcttaaactgattctgtaccacttagattcctaattgccacccccccaacaaccccccgccccaccttttttttgagatggcat

SEQ ID NO: 32771 - DNA, 201 bp, Homo sapiens
gaagttggtaagaactggattttttaaaaagctattgagcatccatttttttcatttccctttttatttttttaatgttggggattttcaggggtccattrttcctatcagcacttttttttccccttcctcttttcatcattctgcagcatgggtgggctgctgaaggaaatgttccacaagattgcttatatgcttttt

SEQ ID NO: 32772 - DNA, 201 bp, Homo sapiens
aaagtttggacacccatcaggctataggattaaagtccagactctttagcctgaccctttatggtttccccagtctgtttctctattcttgtctcccataygctccccagcaatatcaaaataacttgcagatccctaaacacaccttgtttttgaacctctatgcctagactgccctccttgctcactacttgaggctgt

SEQ ID NO: 32773 - DNA, 201 bp, Homo sapiens
atcctttcagatggattttatacctgcttctctatactagccaagtctgtctgagtgaagtggtaatgttatctttaatttacattttaaaacttttacatagttaaattttaataaaaaatctgttcttgccttgggaactaccatagatacgttttcttcagggtacattgagcgaattccccaaattgtattcgtatt

SEQ ID NO: 32774 - DNA, 201 bp, Homo sapiens
atagatgatagaatgtaattgaaatattcccttgttctttggaatgccagctattacagagttgacatatatttatttaaatgcttaatttgaaaaatgtmaaaacagacagttccaaacaggtagactttgtaagtaaaataaaaacaaaaacttagcacctttttttgtaccatcttacaagttagcttacttttgtat

SEQ ID NO: 32775 - DNA, 201 bp, Homo sapiens
tgggactgataaaagatattttctgaggctgttatttgtattgtaggttgtcttaccatcagcgtatattagatattgttcctcctaccttctcagctctrtgtcctgcaaacccaacctgcatttacaagtatggagatgaaagtagcagtaagtaatgaaactaatccctctgtctttaaaaggtaccagttcaagtat

SEQ ID NO: 32776 - DNA, 201 bp, Homo sapiens
tgctggcttagacaaaaactcaaaggatttttttttccctttcacttcttggttgtcagctgagttcaagttgttggagatcatgactttccaggtaagtygggtgttaccgaagaatgggactgataaaagatattttctgaggctgttatttgtattgtaggttgtcttaccatcagcgtatattagatattgttcctc

SEQ ID NO: 32777 - DNA, 201 bp, Homo sapiens
ttgggagccgaggctcggcgtctttgggtgtccacggaagagactggaagctcttctccccgggaacgtgcggggagccgcggagggaaagaggagaatayggtggcggtgtggtcgggcggcttctagaaagcgacttctcccccgccccagttctttgagtcaagggccgatcctcgggaaagaaggcctggtgaaccc

SEQ ID NO: 32778 - DNA, 201 bp, Homo sapiens; identical to SEQ ID NO: 4248

SEQ ID NO: 32779 - DNA, 201 bp, Homo sapiens
tttccatttttaatgttaatgtccatcatagtttgccatttcaattcagtaagtatgtacctctggtaagggatggaaataagaaaaatgactacacagtrctgccctcagggggctcgcctgaatctaatgggtgtgaagatagatacttgcacaatttacaataaaagaccaatttgtaagtattgctggagaaagatg

SEQ ID NO: 32780 - DNA, 201 bp, Homo sapiens
caagagaataattggctgagtgtgtgctagttaaataatataaagcatgggaaataagtctcaggttaggtcaccattttgagaaaatttctacacataaygtttacatttaggagaggaaaaatgtatttccatttttaatgttaatgtccatcatagtttgccatttcaattcagtaagtatgtacctctggtaaggga

SEQ ID NO: 32781 - DNA, 201 bp, Homo sapiens
ccaaatcattcagccactccttcagtgctcttgcaaagtatgtatgagtacagagccttgcttgagagtttggaattttgcttggtgaacaccagtggtayggtaatttttacctaagattgttgaatatgaagatcttaatagtgtataattggacacagtgggtttgggtttgtggtagctgaaatccatatcctaagg

SEQ ID NO: 32782 - DNA, 201 bp, Homo sapiens
gttttagttactttacttttctattttacagggttggtttttgttttccattttgtgggtctaaaatttcttgtaaggctataagatgtacagtgtacccrtataaaattaggattgacttatagaggggaaatttatttggtttattaagatcctttcagatggattttatacctgcttctctatactagccaagtctgt

SEQ ID NO: 32783 - DNA, 201 bp, Homo sapiens
ttggccaggctagtctcaaactcctgacctcaggaggcctccgcctcccaaagtgctgctgggattataggcgtgagccacggtgcccagtctcctaattrtcattttctatgctggggatcctagctgtaatataaaatgtagaggacaaaaatatcaagaggacagtaattggatttataagtccctaaaaagccagtg

SEQ ID NO: 32784 - DNA, 201 bp, Homo sapiens
gagagaggaaatgtcattgtagggcatcctagagaattggaatgctaatatgtagaaaaataacttttgctttggttattgggagacttacataactttcytggagttggcttgtttttaacaccagctggcagccaaatcactgtccatttgggtcttgccgcgagaacctcagagtaaataagacaagtaaaacaaagc

SEQ ID NO: 32785 - DNA, 201 bp, Homo sapiens
actgctcaaatggtcaaatagtgataaattgtagccaagtccccccatgttgttaccaagacaagtgccactaaatttccctggcctagataagaacccayggaatttctgaatgagaagacagtgtctctgaaccacaacaggactttgaggtatatatgtgtgggtggcggggtgggggggtactttcactatagaata

SEQ ID NO: 32786 - DNA, 201 bp, Homo sapiens
ttataacaagaatgagcagccttggcccataggacttgcccagtttttctgtatggcccattagcagatgaatgattagcaagctgtctccctgttgttamtgctcaaatggtcaaatagtgataaattgtagccaagtccccccatgttgttaccaagacaagtgccactaaatttccctggcctagataagaacccatg

SEQ ID NO: 32787 - DNA, 201 bp, Homo sapiens; identical to SEQ ID NO: 4247

SEQ ID NO: 32788 - DNA, 201 bp, Homo sapiens
acatacagtaaccaaatgccatatttctttaagattgtttgtttgggaaattttgcactctacaattcgtaagatgaacaaacatgtcctgaagatccagmaagagctggaagaagctaaagagaaacttgctaggcaacacaaacgggtaagttttgtgtaaacttgtaagtagttaaagaaaatataccagaaactctg

SEQ ID NO: 32789 - DNA, 201 bp, Homo sapiens
aactaagacttaaaattacaagtggtttcatattttcagtgtttgaaatcagtgacggtcttttattgtttattagaaccaaaaaacattacacaaatatytgtgtatagatgtgagcaaccatctatttagcatttgaggtaaggcaccaaggaattgctgtgcttacatttttctgttttactataaaatatttttcag

SEQ ID NO: 32790 - DNA, 201 bp, Homo sapiens
aaagatagagcctcccctctagagtagagagaagacagtcaagtaaagtatagtgtatcatatagtgacaggcgctatggagtgataccaggtaaagaggrgagagatttctgtgagggagaagttactattttatgtaagttgattagagaaggcttcggtgtgaatggcatttgaacaaagacttgccggaggtaaggt

SEQ ID NO: 32791 - DNA, 201 bp, Homo sapiens
ttttctcagttatttaactgttcattagaatagtcttgaaacctgatctgtcattccccttacccccaattctgtgtttagattctcttcctggacattcygttgccctctgtttagctgttgcctttaaaagtaaggcaaccaatgatgaaatcttcagcattctgaaagatgtaccaaatcctaaccaggatgatgacg

SEQ ID NO: 32792 - DNA, 201 bp, Homo sapiens
ctcttctccccgggaacgtgcggggagccgcggagggaaagaggagaatatggtggcggtgtggtcgggcggcttctagaaagcgacttctcccccgcccyagttctttgagtcaagggccgatcctcgggaaagaaggcctggtgaaccccatgggtagacccttggtctctaaggatgcttcagaatttcgtccgtaaa

SEQ ID NO: 32793 - DNA, 201 bp, Homo sapiens; identical to SEQ ID NO: 4252

SEQ ID NO: 32794 - DNA, 201 bp, Homo sapiens
accaatagtaaatacaaggagtcccatcacgtgagcatctgacttacgtagattcaagcttgtggactcagcaaaaaagaaaagtacaaaaacaaaacctytctgaagttggcagccattaccttgttgagactcagacttcatttccacggtcccgaggaaagaaagaggaagtgggtgttggcaaaatgaaagagaagt

SEQ ID NO: 32795 - DNA, 201 bp, Homo sapiens
cacaggtataaattaaataactatgctgcgtgctttgatttctaacacgaggtttcttgtgtaacctctgtacaaggcacagaaaatacaattccctcccttttttttttttttctgagacggagtgtcattctttgtcaggctggagtgcagtggcgcgatctcggcttactgcaacctccgcctctcaggctcaagtga

SEQ ID NO: 32796 - DNA, 201 bp, Homo sapiens
caattgtcagctgctgtcagtcactgccctgactttccgtatgcttgactctctatatatagagtgtgtgtatatatataaactataatagaatgtattatatatatttatatattatataaatttatatttatatattatataagtttgtttattataagttttatataaatatatactctaatatatattttacatata

SEQ ID NO: 32797 - DNA, 201 bp, Homo sapiens
gtcagctgctgtcagtcactgccctgactttccgtatgcttgactctctatatatagagtgtgtgtatatatataaactataatagaatgtattatatatatttatatattatataaatttatatttatatattatataagtttgtttattataagttttatataaatatatactctaatatatattttacatataattat

SEQ ID NO: 32798 - DNA, 201 bp, Homo sapiens
gctgtcagtcactgccctgactttccgtatgcttgactctctatatatagagtgtgtgtatatatataaactataatagaatgtattatatatatttatatattatataaatttatatttatatattatataagtttgtttattataagttttatataaatatatactctaatatatattttacatataattatatactgt

SEQ ID NO: 32799 - DNA, 201 bp, Homo sapiens
cagtcactgccctgactttccgtatgcttgactctctatatatagagtgtgtgtatatatataaactataatagaatgtattatatatatttatatattatataaatttatatttatatattatataagtttgtttattataagttttatataaatatatactctaatatatattttacatataattatatactgtatata

SEQ ID NO: 32800 - DNA, 201 bp, Homo sapiens
ggtaggattggacatggcaaaaattcctagacagtggaaacatacacagcctatcaggttgcagcgtctcttagcagggacactcttaagttgaatcaagrctaagccagtgaagtagaaatcctgttgaaggatccagactgttgggagagaaaactagcaagagccagctatgtgcagagtctcagctagtccagatgg

SEQ ID NO: 32801 - DNA, 201 bp, Homo sapiens
agaattgatatatgtgtggtctcttatacataagcttcaaattctggtccaaaccaggttgatattaatatactaatggtccaatctggtaggattggacrtggcaaaaattcctagacagtggaaacatacacagcctatcaggttgcagcgtctcttagcagggacactcttaagttgaatcaaggctaagccagtgaa

SEQ ID NO: 32802 - DNA, 201 bp, Homo sapiens
aacttaatagacaaataagaaagctaggcactgtgatcagcagcagtcatgagtcctctctaaagcagctgtggggtggctaacacttggctgcatccagwgcttatactgtttctctgtggtgctgtggggttgaagactcacctcttcgagtgacctatcttattcctcttggtgatggtttatcaattagttgtttgc

SEQ ID NO: 32803 - DNA, 201 bp, Homo sapiens
cacttgggaatgatgggcccagtcaggtccgcaagcctcctcttcctcactggaaaggaatggagataagatataaggcacttttccctgtagaccagggrccagcactgttgctgagaaagcactgtgaaacctcgcactaattggtttgttaacagagtctgaagtctgttgttttgaaaggacagtatgtgtgagttg

SEQ ID NO: 32804 - DNA, 201 bp, Homo sapiens
aaaaagaagttgcttctcatttcaggaggagaacaatcatcacagcaaagacaggcatgagtgtcctcatcttagccttccctcagactgcctgggtgtaytttatgaattgtgacttctttatgccagcgactcaaatgctctttgccttggattttcattttatagtggccagggcagtgaagaaggggaggtgctcct

SEQ ID NO: 32805 - DNA, 201 bp, Homo sapiens
cccaaaaagatctcctacaagaagcctggtatgcttgcttttagaagattgtgctttaattcacagggacaaaacttaatagacaaataagaaagctaggyactgtgatcagcagcagtcatgagtcctctctaaagcagctgtggggtggctaacacttggctgcatccagtgcttatactgtttctctgtggtgctgtg

SEQ ID NO: 32806 - DNA, 201 bp, Homo sapiens
gcagggaaaataagtacattgtgccaccattttcccagctgtggagctgagagaaccctagcccaggagtcaggaggcctgggttgggatcctggcttcamcattgctagctggacaagcccattaacatggggatcatctcacctgccctgcctgcctgtctacctgccaagagctgtactactgggctaattcagggct

SEQ ID NO: 32807 - DNA, 201 bp, Homo sapiens
ttcaagacagaaaccacaatcttttatgacctaatctcagattgccataccatcactttttattgatgctattggtcacgtagactaacctcagtacagtstaggagagaactatgcaagggtctaaataccaggaggcaggatcatcagggatcatcttggaggctgggcaccatacctcagagttgttactttttagtg

SEQ ID NO: 32808 - DNA, 201 bp, Homo sapiens
ccagatactcaggaggctgaggcaggaggattgcttgagcccgggaggttgaggttgcagtgagtttaaatcatgccactgtactccagcctgggtgacamagcaagaccctgtctcaaaaaagtttttctaggccaggatctatagtcttcaccagactaccaagtaaatccgtagcacacatgattttaggaactcata

SEQ ID NO: 32809 - DNA, 201 bp, Homo sapiens
tttttagtagagacggggtttcaccatgttagccaggctggtcttgaactcctgacctcaggtgatccgcctgcctcagcttcccaaagcattaggattayaggtgtgagccaccatgcctggcctacgtcccatgtttgaatctcccttttcaccccactctttttgtatccatgtaattgtgtgacagtaccttatata

SEQ ID NO: 32810 - DNA, 201 bp, Homo sapiens
tcctctctagagtgctcttccctgcaccttcacatggcgcataccccacttcagatctcggctcacatattgtctccttagagctgcagtctgaagtagtsctctccagatcttgtcacgttctatccctttctgcttttcaaagaatttattactatctgaaagtataatcttcatttataagcttcatgaggacaggaa

SEQ ID NO: 32811 - DNA, 201 bp, Homo sapiens
aggaggagaacaatcatcacagcaaagacaggcatgagtgtcctcatcttagccttccctcagactgcctgggtgtattttatgaattgtgacttctttaygccagcgactcaaatgctctttgccttggattttcattttatagtggccagggcagtgaagaaggggaggtgctcctttattactgctaccatgacctgg

SEQ ID NO: 32812 - DNA, 201 bp, Homo sapiens
agtggaggggtgacaaggcaagcttcggaaggagacttgggatgagtgccaggggtgcctgccctggaggagctgggggcctgaggatgttggaggagatractgtgacgagggctcaacatacacggcaggacactgggattggcaaggaggtgactggctggctggggtggaggcagcatctaggaacaggcccagatt

SEQ ID NO: 32813 - DNA, 201 bp, Homo sapiens
gcctctcaatggttttcccggcggcccttgcgccgacgccaggagacttccggagcttggtgacgtcacgagcgagcttttctacccaaatacgcggcggkggaataggctcgagggcggtgagcagtgacaattgctaggcggagacagtgcagggaagagagaccttagaaaggatcaggactggcgggtatgtgctca

SEQ ID NO: 32814 - DNA, 201 bp, Homo sapiens
ttcctctctagagtgctcttccctgcaccttcacatggcgcataccccacttcagatctcggctcacatattgtctccttagagctgcagtctgaagtagwcctctccagatcttgtcacgttctatccctttctgcttttcaaagaatttattactatctgaaagtataatcttcatttataagcttcatgaggacagga

SEQ ID NO: 32815 - DNA, 201 bp, Homo sapiens
tccttcctctctagagtgctcttccctgcaccttcacatggcgcataccccacttcagatctcggctcacatattgtctccttagagctgcagtctgaagkagtcctctccagatcttgtcacgttctatccctttctgcttttcaaagaatttattactatctgaaagtataatcttcatttataagcttcatgaggaca

SEQ ID NO: 32816 - DNA, 201 bp, Homo sapiens
gctgtttccttcctctctagagtgctcttccctgcaccttcacatggcgcataccccacttcagatctcggctcacatattgtctccttagagctgcagtstgaagtagtcctctccagatcttgtcacgttctatccctttctgcttttcaaagaatttattactatctgaaagtataatcttcatttataagcttcatg

SEQ ID NO: 32817 - DNA, 201 bp, Homo sapiens; identical to SEQ ID NO: 4287

SEQ ID NO: 32818 - DNA, 201 bp, Homo sapiens
tcaaatgctattgctgcagaaaggcttttcctactctctgtgttcgaagggcttctccatcactgcctccctaccctgctgattattcttcataacctttwcaccatctgactttaaaaataaaaaatcaatttatccacttgtttacttcaccccactggaatgtaaactctaagcaggcagaaactttttcactttcgt

SEQ ID NO: 32819 - DNA, 201 bp, Homo sapiens
tggcagtgaaggaggcagctccaccagcagcttacgtggagctgtccgctgcccccagtactccccacccccaggcagccaaagcatgccttcacccctcrtatggctccagcatggagttcgtaagtacaaaatctgagggtctttaatctcaagatatgaaaaacacttaacagtcatagagactcatcagatgtaaaa

SEQ ID NO: 32820 - DNA, 201 bp, Homo sapiens; identical to SEQ ID NO: 4290

SEQ ID NO: 32821 - DNA, 201 bp, Homo sapiens
ctggtattatttaccctaatgactgcatggctcgctccctaattcaggtttctgctcaaatgctattgctgcagaaaggcttttcctactctctgtgttcraagggcttctccatcactgcctccctaccctgctgattattcttcataacctttacaccatctgactttaaaaataaaaaatcaatttatccacttgttt

SEQ ID NO: 32822 - DNA, 201 bp, Homo sapiens
cttcccaggatctagagggtgaaggccctgcctgctgtcatcacccatccccctaggaggcaagatctggccagttggtgccttgaccccttggtcagcarttcctcagtgtcccgcagtgggagccaggagcccctgactgatagcagcggccatgagtcctctacgtcagcactcctcgccatgcgccgttcttccgtg

SEQ ID NO: 32823 - DNA, 201 bp, Homo sapiens
ttataactgaaggtgctggcacacatcttgattgatttgggttgtacctgttgcttttctggtattatttaccctaatgactgcatggctcgctccctaawtcaggtttctgctcaaatgctattgctgcagaaaggcttttcctactctctgtgttcgaagggcttctccatcactgcctccctaccctgctgattattc

SEQ ID NO: 32824 - DNA, 201 bp, Homo sapiens
aagaagatggtgtgagttttaggaatcagatggtcaagtgccctagcaacagcaggagagacacaggcctcggggagaggggtgtggactgcgcatgttcmctgtaggtgggttatcgcctgtatttaggtgtgttgtcccccctggaaaagggaacaatcaaagaggaaaagaccacttaacaagggggttgggaggtag

SEQ ID NO: 32825 - DNA, 201 bp, Homo sapiens
caacagctagatccttaaggcacagaattctagaggcctaagttaggccaataacatgcatactatatatagccaaagaccatagcctgtgcagcagcatwtacccagtcagttgacattgtttgtgaggttttttctttttttttttgagacagagtctcactctgtcacccaggctagagtgcagtggtgtgatcttgg

SEQ ID NO: 32826 - DNA, 201 bp, Homo sapiens; identical to SEQ ID NO: 4283

SEQ ID NO: 32827 - DNA, 201 bp, Homo sapiens
ttttctattttctctaagtgttggccggcctgagaaataaagagaaagagtacaaaacagagaaattttacagctaggtgtccgggggtcgcttcacatgktggtaagttctgtgatgcccacctgagccacaaaaccagcatgtttttattagggatttcaaaaagggaagggtgtacgaatagggagtggatcacagag

SEQ ID NO: 32828 - DNA, 201 bp, Homo sapiens
atgtttttattagggatttcaaaaagggaagggtgtacgaatagggagtggatcacagagatcacatgcttcaaatggcaataaaaaagataacaagggcrgaagggcagagcaaggtcacaaggccagggctaaattagaattactgatgaggtttcatgtcccactgtgcacgcattgtctttaataaacatcttaaca

SEQ ID NO: 32829 - DNA, 201 bp, Homo sapiens
tggaggagcatggaaagcatggaagagactaggccctgaaatatgatgaggctgttgaggagggactcagactccagagctggataggaccttaattgtcrtgtactgtagcattccctaaaatatgttctgtggaacactagttctagaggatgctaacaaggtattgaaaaaaggggtattaaagacaaatttgggaag

SEQ ID NO: 32830 - DNA, 201 bp, Homo sapiens
tgtataaacatggaaggttgtgtataccaaaatgttagtaaggattatctaggcatgtagggttatcgatggtttttattttcctaaaatattctctgatyatattacacacatgcatatgtttgtgtcttttatgttctttcaaagtttaaaattatataccacttccaatgagttggcattggcttgtgccatgaatct

SEQ ID NO: 32831 - DNA, 201 bp, Homo sapiens
tttacggacgaaattctgaagcatccttagagaccaagggtctacccatggggttcaccaggccttctttcccgaggatcggcccttgactcaaagaactrgggcgggggagaagtcgctttctagaagccgcccgaccacaccgccaccatattctcctctttccctccgcggctccccgcacgttcccggggagaagag

SEQ ID NO: 32832 - DNA, 201 bp, Homo sapiens
ggatgcatattcatttattcaacaaatcgtattgagtgcctactatgtggcaggcactgttctaggggatatgctggtgagcaaaacagacacacacccaygtggaacttgtattccagtggatggtttgcagtggtaggctgtcctccaaacaccatgcagagatacatgctcatgtataccctcagccctcagatgtac

SEQ ID NO: 32833 - DNA, 201 bp, Homo sapiens
taaaactcagaaatctggtgagagagtctaagaaaatatgaattaaaggcatccaggcacataatatactttgtgactcccatgagcctgcctttgacatstatcaaggatcttgcaaagttgcctttgggcagcctctccagttcccctgaggaccctgggaaggtgacccacagcccacagcctcggttttaagttgag

SEQ ID NO: 32834 - DNA, 201 bp, Homo sapiens
tttgaaatctaattgcaggcctttgccctttttgtcaaaaccaaagaagttccaacaaaaaggagttttgaatgtaaagaaaaattgtggaaatgctgtcrgcagctattcacagaccaaaccagcatccatagacatgtggcaacacaacatgctgatgaaatttatcaccagacagcttctattttaaagcaactggct

SEQ ID NO: 32835 - DNA, 201 bp, Homo sapiens; identical to SEQ ID NO: 4288

SEQ ID NO: 32836 - DNA, 201 bp, Homo sapiens
caaatgctctttgccttggattttcattttatagtggccagggcagtgaagaaggggaggtgctcctttattactgctaccatgacctggaggatccccartggatctgtgcctggcagacagctctgtgtcagcacctgcacctcacaggcaaggtaacaccttctcctatattccttccttcactgggtccatcttgcc

SEQ ID NO: 32837 - DNA, 201 bp, Homo sapiens; identical to SEQ ID NO: 4297

SEQ ID NO: 32838 - DNA, 201 bp, Homo sapiens
aagatgattttaaggtaagagaaaatgaaaattaaatggatctagagccatctgcttctgcctctgtgcatgttattgaagaggagttcaaagtagagaartaagcagtgccaaataaataccctttcccctttattttttggggcttggggagtttttttgttttgttttttgacagggtcttgctctgtcacccaggct

SEQ ID NO: 32839 - DNA, 201 bp, Homo sapiens
gagcctagatctgctgacctctgtggaggactctgttaagctacctggatttagattaagctcagaattcacttctttggctgttggactattgtagctcsatagcaaatggggctttccaggagttttattcacattcttttgttcagcatgcatgaaacagaatacctcatctgaactgaaggctatgccattttagaa

SEQ ID NO: 32840 - DNA, 201 bp, Homo sapiens
gcattatcgggggaaccagcccccaatatgtcaacgtaggttcttttctattttctctaagtgttggccggcctgagaaataaagagaaagagtacaaaasagagaaattttacagctaggtgtccgggggtcgcttcacatgttggtaagttctgtgatgcccacctgagccacaaaaccagcatgtttttattagggat

SEQ ID NO: 32841 - DNA, 201 bp, Homo sapiens
aaggctgcttagccccagacatcaggaaattcagttacttccctagctacgttgacaaaaatctagaacttttcagagagaagagagtgctgatgtactgyaccgggggcatccgctgtgagcggggttcagcctacctcaaagccaaggtgagccaccaccccggggcactgtgggcatggcagtgaaggaggcagctcc

SEQ ID NO: 32842 - DNA, 201 bp, Homo sapiens
gaaaataactaatagtgttatttgtgatattttaggccaaactgtattatgtattttccagtgtgacttagtcttatatcctgagaataaaattatgatgctgagagttatttaacctcctcaatataaagcctagttttaatttctctaatagtctcttctaaagcttactaataagagaagtgttacttctcagagaat

SEQ ID NO: 32843 - DNA, 201 bp, Homo sapiens
gctgcttagccccagacatcaggaaattcagttacttccctagctacgttgacaaaaatctagaacttttcagagagaagagagtgctgatgtactgtacygggggcatccgctgtgagcggggttcagcctacctcaaagccaaggtgagccaccaccccggggcactgtgggcatggcagtgaaggaggcagctccacc

SEQ ID NO: 32844 - DNA, 201 bp, Homo sapiens
ataggcaacagatttgaacaggcaagccagaaataaacaaatagattaagcaggaaaaagtattcagcattactactaatcaaaaatattaaaaaaaaaaatagggtagcatttcttttgccttttatttggaccaacattaaaaatattgatgataaaaaatactgatagaactcagtgaggctatggataaaatggcac

SEQ ID NO: 32845 - DNA, 201 bp, Homo sapiens; identical to SEQ ID NO: 4293

SEQ ID NO: 32846 - DNA, 201 bp, Homo sapiens
gacagaagacttactatttggaaaccttccccgggttccacaggatctacgagattctagtcagcaaagggagcaatgcctgtccacgtgtgtgtgaatgyatgtgtttataatgatggcttttccttcctccccagagtgttcatactgtggagcccgctgggaccagtataaactctgctctactccccagtgccgcca

SEQ ID NO: 32847 - DNA, 201 bp, Homo sapiens
tttttccaaccacaatgagatactacaattcacccattaaaatggctaaagtgagaaagaccaactgtgtcaaatgtgaaatgaggatgtggaacaactgsaacacccagtcactgttggtgggaatgtaatatggcacaaccactttggaaaagtgttcggcaatttcttaaacatgcatcgttcctgtggcccactcct

SEQ ID NO: 32848 - DNA, 201 bp, Homo sapiens
atgttagaattgctcagcggtgttgcagttttataattaaatgcttacacctaaagaaacactttttcagcttaacattcctgcacatggcaggtatgcartaagtatttatcaatgttgaattatctggaacattctgggccctaactagaggttttttaagacttcagctattgttattacaaaacagaccatcattct

SEQ ID NO: 32849 - DNA, 201 bp, Homo sapiens
ctagcaacagcaggagagacacaggcctcggggagaggggtgtggactgcgcatgttcactgtaggtgggttatcgcctgtatttaggtgtgttgtccccmctggaaaagggaacaatcaaagaggaaaagaccacttaacaagggggttgggaggtagttggccagctttggaatagctggtgagagagagaaactttca

SEQ ID NO: 32850 - DNA, 201 bp, Homo sapiens
tgtacaggaaaactcccagttttaaaaccatcaactctcatgagatttattcagtctcatgagaacagcatgggaaagacctacccccatgattcaattasctcccactgcgttcctccaatgacacgtgggaattgtgagaattacaattcaagatgagatttgggtggggacacagccaagcaatatcaggtttttatt

SEQ ID NO: 32851 - DNA, 201 bp, Homo sapiens
gatactgtcttctgtagagcaaatataaaaagaagttgcttctcatttcaggaggagaacaatcatcacagcaaagacaggcatgagtgtcctcatcttasccttccctcagactgcctgggtgtattttatgaattgtgacttctttatgccagcgactcaaatgctctttgccttggattttcattttatagtggccag

SEQ ID NO: 32852 - DNA, 201 bp, Homo sapiens
cttgcctgccaaccttggattgcaaatgctgtgctcattataaaaaagattcactgttgagttcttaaaagttagggaaattctgctgagcatttaagtasaatattaggcagccattaacatggtattttataagaatatttactggcataaaccaggagtcagcaaactttttcttgaagaaccagatagtagataatt

SEQ ID NO: 32853 - DNA, 201 bp, Homo sapiens; identical to SEQ ID NO: 4291

SEQ ID NO: 32854 - DNA, 201 bp, Homo sapiens
ttgatgaacgctatgctctgtcctacaacagtgatgtggtgtcaggtaggtcagcacaggctcagagcccaaactgaaatgaagcacattgtcagttcacyattctagaaaaatgacacagggaagacaggccagtgctcattactgagcactgaataagcagggaaaataagtacattgtgccaccattttcccagctgt

SEQ ID NO: 32855 - DNA, 201 bp, Homo sapiens
tctagattggccagttcttttcattcttcaaacattctgaagttcttttcctcctgaaaatcttccctctgattatttttttctttaacctttactccatstggaaataaaatgcccctaagtgtgatatgaggtatcagaagaacatggctttggagacaacaatacggtttaaattccaactcaactcactagccatgt

SEQ ID NO: 32856 - DNA, 201 bp, Homo sapiens
gcaaattggggatgatggatgtatgcatctagaacagtgcctggtgcacagtgggcatgccaaaaatgcaataacgggcaattattttcacagccattatkcagggttcagttagaaagtggggcatctgcgagtgcagctgcagactgaaaaccaactttatttcaaaagctcaccttgcacaatggctcttattaaaat

SEQ ID NO: 32857 - DNA, 201 bp, Homo sapiens
agagcacttgaataaaatgagaatcacttgactcagggaaaatgacatttaatcaccggctaattaactccccttaccttctcctttactgcatccccacmccgtttcaggtcctttactttgtgcttatggaatcaaagttggtctgtgaggttttctctgatccagatgtattttattaatttaatcattgtatgaact

SEQ ID NO: 32858 - DNA, 201 bp, Homo sapiens
tgaggttttgtatgtaaaagaattgtgaaaaacagcatggtgggagtttctgttacaggcaacaaatttattataactgtctcatgccagtttataagagwaggcaaccacagcgggattccatagggatgtttcagtggttatatagtccacgaagatgacctcattggatggaataaatctctttcagtgacagctaaa

SEQ ID NO: 32859 - DNA, 201 bp, Homo sapiens
gataatacaaggcaacgctctagagaaaatcattcctatctacctatgtgtttctgaaatttcacttggcatgcagtgtcctgtgatacctgtctacaacwctactgagatgtgcagctgtatggcagctgtattgaatgccactttaaaggtgctggtactttagatgattcttctatagtagtttgcagttgtacataa

SEQ ID NO: 32860 - DNA, 201 bp, Homo sapiens
ttagatgattcttctatagtagtttgcagttgtacataaatatgcacaaagctcattttatgcataattaaaaccagttattccattagagttttcaccarcctttacctggtaactacctgtacaacactgacaataaataaaaacacgttatttttgttgactcattttgagaacagattctgttgggtggtcacttga

SEQ ID NO: 32861 - DNA, 201 bp, Homo sapiens
aggctacattatggatgaacctcaattacattacactaagtgaaagaagccagatgcaaaacgctacatattgggtgattctatttatatgaaatgtccaraaaatgcgcagttatagagaccaagagcaaattaatggttgcctggggctggagatgggagtaaagactgactacaaatgaagataattggtatttttgg

SEQ ID NO: 32862 - DNA, 201 bp, Homo sapiens
ggataatgaaaacattactttcacagtcgcctggcctgccaggtctcccttctaacctttaaggaccatctttgggtggaagcgcagtaaaggtggtcctrggggaaatcatggactttagtcagagtcccacgggctgactggtctgctgtcactcacatgatctcttagaggctccttctatctgcttcccagggcagc

SEQ ID NO: 32863 - DNA, 201 bp, Homo sapiens
tcctggatttaattacttacaagctttgtgaacttgttcaggtccttgaatatctctagactgtcaaaaatcagtgatcctcagacagtgggattcccatmatctatagcggtgttttttcaggtccagagaacttccatgtcagggcccagaaggtgtctgcagaggtcttctacagcctctgctggcgacctcaagaga

SEQ ID NO: 32864 - DNA, 201 bp, Homo sapiens
tttgggaggcagaagtgggtgatcactcgaggttaggagtttgagaccagcttggccaacgtggtgaaactccatctctactaaatatacaaaaattagcygggcgtggtggtacacacacataatcccagctacttgggaagtggaggcatgagaatcacttgaatccgggaggcggagcttgcagtaagccaagatcac

SEQ ID NO: 32865 - DNA, 201 bp, Homo sapiens
tttaaaaactggatttggttgttaaaactggtaattttttccatcagtttgggttgaataacatagccatattccattaggtaaaactaatactgagtcgrtgtatctacccatctatccaaatcctagttttgaccctactttccaccaatttgccgataggatgttgacttagccttgggccctacaatttagggttta

SEQ ID NO: 32866 - DNA, 201 bp, Homo sapiens
gatttggttgttaaaactggtaattttttccatcagtttgggttgaataacatagccatattccattaggtaaaactaatactgagtcggtgtatctaccyatctatccaaatcctagttttgaccctactttccaccaatttgccgataggatgttgacttagccttgggccctacaatttagggtttagctctgggcac

SEQ ID NO: 32867 - DNA, 201 bp, Homo sapiens
tgtgaactgtgctcctgcgggtaaggtggccacgcccagggcaaggctgggggagcctgggttttcagactcccgaggaagggaagcctcccccagctgcktcatcaggcggcatcacggtgggttcgtccacttgctacgttttttaagccacaattgtgtcaactagcgttgtgcccgcggacgccacatcagttctgg

SEQ ID NO: 32868 - DNA, 201 bp, Homo sapiens
tccatttcctcttgaacgcccttctgtggctgatctggttctatgagggtcctttgtagccctagactgttcatgtagcatgactcacaacctcaggtttygagtttttttgtagaccttctgttctaataagattgtaaagattgagataatacagataaacaggtaagaacagtgcctggcacacagtcaatgcaaatg

SEQ ID NO: 32869 - DNA, 201 bp, Homo sapiens
aagcccaaggggtttaacaagttctgactttcatgaaaacatataaaccaaaagtacaatttttccagcgtggttctttatactagaaatcttcttgtttygtcaagtaacaaaagcaaaacctggctcttttgttattgattattagtgaatccatataaagcaggatatttgggggtgagagtgggttacctttaacat

SEQ ID NO: 32870 - DNA, 201 bp, Homo sapiens
gaggcaggagaatcacttgaacctgagaggcggaggttgcagtgagctgcgatcataccactgcattccagcctaggcaacaagagtgaaactgcgtctcaaaaaaaaaaaacaaaaagggggacattttcttaaccatgatgccactatctatcgcatcaaaaaatccaaggagttttagaaactttttttcactttcta

SEQ ID NO: 32871 - DNA, 201 bp, Homo sapiens
ctcttctcccccaaaggatcacaactcctcaccagtaaaggaacaaaactagacagagaatgagtttgacgaattgacagaagtaggcttcagaaggtgartaataacaaactcttccaagacaaaggagcatgttcctacccaattgcaaggaagctaagaaccttgataaaaggttacaggaactgctaactagaataa

SEQ ID NO: 32872 - DNA, 201 bp, Homo sapiens
agggttctgaggtcacctttcctgggctgtcattaattgtgggatcttagattggtaactaaactccaggtcatagtcgcctcatctgtaccaacaatacrtacctcataggactattgtaagagttaagatcatgtatgtgagtcctggtacatggattgtgcttaatatgttagtgtcctgaaatctgaaaaaagggca

SEQ ID NO: 32873 - DNA, 201 bp, Homo sapiens
ccaattgcaaggaagctaagaaccttgataaaaggttacaggaactgctaactagaataaccagtttagagaagaatataaatgacttgatggaggtgtaraacacagcacaagagcttggtgaagcatacaccagtatcaatagccaaattgatcaagtggaagaaaggatatcagagtttgaagatcaacttaatgaaa

SEQ ID NO: 32874 - DNA, 201 bp, Homo sapiens
gagcagtgtatagtctaggactacatgttaccaagcaaaacctttttttctaaggccgcctttcttttttctttttggaggcagtgtcttgctctgttgcscaggctggagtgcagtggtgccatctcgcttcactgcaacctatgcctcagggttcaagtgattctcctgcctcagcctcctgagtagatgggattacag

SEQ ID NO: 32875 - DNA, 201 bp, Homo sapiens
gtttatgtacagaatttagggcttcctgtctttgactctctcatttccaggtttctttcctcattttgcagcatccgtggttgcttcaaacttggtcctcttttttttttttttttttttttttttggggagatgaagttttgctcttgttgcccaggctggagagcagtggcacgatctcggctcaccgcaacttcctcc

SEQ ID NO: 32876 - DNA, 201 bp, Homo sapiens
gggcgctttctccttggccagggcgaaggcatcccggactagcttggcaccatctccagtgaacatctgcaccagctgggggccagtcagctttaggaagktggccttagtctgtgccctacaggcccaggccaggagggtcttctccgtccctgggggccagcaccccttttggatgttggatccgcaagttctcaaact

SEQ ID NO: 32877 - DNA, 201 bp, Homo sapiens
aatttgaggactgtgaaaatgatataaaattgaaaattcagtgttcatgttttattggaacgcagccatattcattcatttacgcagtatcgatggctacttttttttttagcatagtagcaaagttgagtagttgttgacagagacactacagtctgtgaggcataagacacttaatacctggctcttatacaaaatatc

SEQ ID NO: 32878 - DNA, 201 bp, Homo sapiens
tcttagtggtctctagctcttttattttacagataaggaaatagaaacattgagattaattttaatatatgggaacatgttaagcttcaggcacaatttargtcaatcaattaaattttattcatattttactgggtatcagacactgctaggtgttaaaatttatagtctggtctattttcgagtcacactggaccattt

SEQ ID NO: 32879 - DNA, 201 bp, Homo sapiens
aaattcttgtaaaaaattgttaatgaagggattgatatagcttacttttatatctgattattttacagcttacagtgcaccattttaaagattttgtgcartcttgcaggaaattccaggactggttaatgtatcatgaaatatttatgaagcattggtagtatgtgcagcatttcataaaaaaggtagtcccatagagga

SEQ ID NO: 32880 - DNA, 201 bp, Homo sapiens
atcctcctgcctctgtctccctagtagatgggattataggcgtgggccactatgctgcctccaattctaggctgttatcctctcagcccatacactcttgytggaataatctccttggaaaatagagctgatgagatcactcccaatccagagtctgaagtcaacagctgagtcagcccttcctggtgtgactttcagcct

SEQ ID NO: 32881 - DNA, 201 bp, Homo sapiens
acagagtgggcccccatttccagcatcaacaatgatcagggttttgccacactgggttcatccatcaatcccagccatccatcaatgccagccagccatgktttttacccctacctaccttattatgcttctctaaaagtagggatatttttggttgggtgcaggggctcatgtctgtaatcctagcactttgggaggctg

SEQ ID NO: 32882 - DNA, 201 bp, Homo sapiens
cctatgtaacaaacctgcacgttctgcacatgtatcccagaacttaaagtataataaaacaaaaaacaattagccaggcgtggtggcacatgcctgtggtsccagctactggaaatgttgaagcaggaggatggcctgagcccgggaggttgaggctgtacttagctggccgtcattgcaccactgcactctagcctggct

SEQ ID NO: 32883 - DNA, 201 bp, Homo sapiens
tagaagaagaggtggggacataatctcatgcacactctgagcagaagagtcatagccagtaactgtgtagtgggatcttcagcagctttgtggggaggcasgggtgggagtggtggcattgaagatgggccttgaagacagagaaaagtgagagtggcaggaaagtgagcagctgcagctagtgttccaagtgcataaaac

SEQ ID NO: 32884 - DNA, 201 bp, Homo sapiens
cctgccctggtgtcctttattgtacttactgtctgtgaatttgcctattgcaggtacctcgtaagtggagacatacaatatttgttctgttgtgaccggcktatttcacttagcaatttgtctctaaggttcactcatgttgtagcatgcatccaaattttatttctttttaagaccgaataatctgttgtatgtgtttac

SEQ ID NO: 32885 - DNA, 201 bp, Homo sapiens
caggttagttacatatctatacatgtgccatgttggtgtgctgcacccattaactcgtcatttagcattaggtatatctcctaatgctatccctccccccstcgccccaccccacaactgtccccggtgtgtgatgttccccttcctgtgtccatgtgttctcattgttcagttcccacctatgagtgagaacatgcggtg

SEQ ID NO: 32886 - DNA, 201 bp, Homo sapiens
tttctgagtggatttgtagtttgctaatatttccttaaagatatattatctccattccattcttgtcacttttcttaacttgatttaacacatgattaagygatgattgactacgagaagtggcagagtattgcagttccaagcgcagactgtggagccagcctatcttggttcaaatcccagcctttctgctccctaact

SEQ ID NO: 32887 - DNA, 201 bp, Homo sapiens
atgttctcaacataaaaacataatgaggaaacacataaattctgattaaattcactcctaagccacagtaactatgtttgggtaggttataaaaaagtcamactttaaaatttttcttctcttcagaagtagataccgcttccccccaccccccataatcatttgccttagttatggctgatcaataaattaaaccataga

SEQ ID NO: 32888 - DNA, 201 bp, Homo sapiens
agaatggtttgcaaagacttcatctactccttatactctgggaggctctctgccctttctgggatgcctacacttgagtccagcatttattaggctttgtkagttcatactgacattaacaaacactaaggttaagttgctgttcagttttgaactttgcaagtcttcaaaacaatgactctggggattaaagacgtactc

SEQ ID NO: 32889 - DNA, 201 bp, Homo sapiens
acagctcataaagatagtgcggacccaaggagtgagcagcagcaagatttattgtgaagagcaaaagaacaaagcttccacaatggggaaggggacccgasccagttgccactgctgagcaggttgcccttgctggcttgggtggccagcttttatttccttactgggccctgcccacatccttctgattggtccatttta

SEQ ID NO: 32890 - DNA, 201 bp, Homo sapiens
agagccttttttcttttcttaatttgtcattaatgtctcagcaaagaagagcatttattttaatatgatcatcggacttgaaaggcttctacagagagctrtgggtacatgtgatatgaagaataagctgagatccatatgcacttgaaaaaccaagaaaattaagagggttcttttttttttctttttttttgagatgga

SEQ ID NO: 32891 - DNA, 201 bp, Homo sapiens
acccatgtttctcttctaatgtaccacttcacacccaccttggagctgttcctaaactgggttctggtcttggaagccttctttgcaccttcctgccaacratggcagttcctgaaattctgacacttacatgaatcaagacttcctgtttctcttccactgctctatctagaaatgaattttaagaggcttttcttcccc

SEQ ID NO: 32892 - DNA, 201 bp, Homo sapiens
gtgcagtcatgactcacagcaacctcaaactctcagactcaagtgatcctcccacctcagcctcccaggtagctgagactacaggtgtgtacaaccacacycgactaatttttgtattttttgtagagatgagattttgccatgttgcccagggtcatcgtcacctcctaggctcaagtgatcttcctgccttggcctccc

SEQ ID NO: 32893 - DNA, 201 bp, Homo sapiens
atcgtcacctcctaggctcaagtgatcttcctgccttggcctcccaaattgttgggattacaagcgtgagccactgtgcacagccagttccatgttttctrtgccagtagttcacttgtgtgcatgcctgaaatcatcacatgtggatttaaggtttttgttttggtgttcttagcttcttaggcatttaatccttgcatt

SEQ ID NO: 32894 - DNA, 201 bp, Homo sapiens
gatttaaggtttttgttttggtgttcttagcttcttaggcatttaatccttgcattagaaggtgtaggagataggcatggatatttttaaatgatggaccrgggaaagctcctggaatggttatattattcaggattcttggttgaagtaactaaaatggacactggtttgtttaagcaaaaggctgtggggcagtttgca

SEQ ID NO: 32895 - DNA, 201 bp, Homo sapiens
gtataagaaagattacaatccctaccctgtctgtcgagtggaccccatcaaacctcgggacagtaaatatccatgtagcgacaagatggagtgtttgcctmcttataaaggtgggagagcacagaggggcagattgggggaaagacaggctgagcctgtgtgcgggccaggaaatgtgttttatgtgcatactcagttagt

SEQ ID NO: 32896 - DNA, 201 bp, Homo sapiens
tgcctcagcctgccgagtagctgggattacaggtgcccacccccacgcccagctaagtttttgtattttcagtagagatagggtttctccacgttggccasgctggtcttgcactcctggcctcaagtgatctgcccacctcagcctcccaaagtgctgcgattacaggtgtgagccaccgtacccggtgatttttgccaa

SEQ ID NO: 32897 - DNA, 201 bp, Homo sapiens
aaactccatctctactaaatatacaaaaattagccgggcgtggtggtacacacacataatcccagctacttgggaagtggaggcatgagaatcacttgaayccgggaggcggagcttgcagtaagccaagatcacgccactgcactccagcctgggtgacaggatgagactctgtctcaaaaacaaaaaataacaaaacaa

SEQ ID NO: 32898 - DNA, 201 bp, Homo sapiens
taacgcccttcatcatcatcagcagaagtactctctctcgttttttagctctgatttgccttacatctttctcaggaaaggatcgtttactctccaccccyttaagtattagagaaaactcaaggggaggtttttatgttttcacgatctctgaggtctcttcactggtcttgtttattggtcttgacttcctaaccccgg

SEQ ID NO: 32899 - DNA, 201 bp, Homo sapiens
ctttctcaggaaaggatcgtttactctccacccccttaagtattagagaaaactcaaggggaggtttttatgttttcacgatctctgaggtctcttcactrgtcttgtttattggtcttgacttcctaaccccggcaggaagagggaacactgaccctcagcagcactggctttatttttcatgtagagcctctatggttg

SEQ ID NO: 32900 - DNA, 201 bp, Homo sapiens
tatactgacaacctgtatttcagactcaccagactctgttacagactaacatgcccagctcacgaactgggtgcctgctaaatattttttctaaaaagtgsatattggctgctaacatgtaaaatctcatgagttttaaatatctgggctgggcgtggcgcctcacacctgtaatcctaacactttgggaggccgaggcgg

SEQ ID NO: 32901 - DNA, 201 bp, Homo sapiens
gcgcctcacacctgtaatcctaacactttgggaggccgaggcgggtggatcacctgaggtcaggagttcaagaccagcctggccaacatggtgaaaacccrtttccactaaaaatacaaaaattagccaggcatggtgatgcacgcctgtaattccagctacttgggaagctgaggcaggagaatcacttgaacccgggag

SEQ ID NO: 32902 - DNA, 201 bp, Homo sapiens
gacagagccagactctgtctcaaaaaaaaaaaaaaaaaaaaaaaatccgtacttttagtttcttctgaaataccaaaagacgtgacagtattgtgactgcrttcctaaatggtaatggtcagctcttgccctgagacaggatgtgttctatctatagccatcatggaaaaaggtaaggggaaatactgtgaaactttcccc

SEQ ID NO: 32903 - DNA, 201 bp, Homo sapiens
gagagtcagctagccaaataatatatttctatataaacaagtaaagagtacagaagggcctttaccaggactaacaagaaagggctttgggacaacttcastgtttcgggtggtcaggatctttctgctcctaacattcttggccaggttctaaaagactatagggtttcttttttttttttcctagaaatatggaacctg

SEQ ID NO: 32904 - DNA, 201 bp, Homo sapiens
aaaagactatagggtttcttttttttttttcctagaaatatggaacctggttacatgggatatttgtttagtaggaccagaggtgtgtaaagaaacagcaratagcccctggattatcttttatttcccatcagaagggagcttgatggaaagactgattcagaagcatgcaggaaatgtgggttccagccctaaaaatgt

SEQ ID NO: 32905 - DNA, 201 bp, Homo sapiens
agaagcatgcaggaaatgtgggttccagccctaaaaatgtggccatgaccatgtgccagggccacccctctactgcacgtggcactggttgcctgaggagktttagaacgtcctgggaagggtaaggtgcagataagtgaaaataaaccttactaggtttcaacttttatataaggtgtttttgttgttgttgttgttttt

SEQ ID NO: 32906 - DNA, 201 bp, Homo sapiens
cttgctacgttttttaagccacaattgtgtcaactagcgttgtgcccgcggacgccacatcagttctggcgaatgtggctgttttcgggccttctgtgcckcttcacttgagaactgcaggagggttgaaaatgggcgtgaccgcgcagtctgcactcccttccctgaagcccagaaagtgtcagccaaggagggagaaca

SEQ ID NO: 32907 - DNA, 201 bp, Homo sapiens; identical to SEQ ID NO: 4313

SEQ ID NO: 32908 - DNA, 201 bp, Homo sapiens
gtaggtcttcatcatctcatagccagacaactgccattggtttctccacttctagactctttttaaaaaaagaaaaatgaggtctttctcttttgcccagkctgtagtgcagtggtacaatcatagctcactgcagccttaaacatctaggctcaagtgatcctcctgcctctgtctccctagtagatgggattataggcg

SEQ ID NO: 32909 - DNA, 201 bp, Homo sapiens
ttggaagaaaataattaagaggaaacaattggccttgcaacaattcttgccaagataatcttgtggataaagctagtgaaagatgggttggatgacaatawtaggttaggtggattcccaggtcattgaacaagcaggccagaagagtttcaacagatggctttttacctgcttaaaacaatgtcaccattgttagtgata

SEQ ID NO: 32910 - DNA, 201 bp, Homo sapiens
aatgccaatttatttagaatgagacagatctactgagagtgcctagaaactcatttttgctggtcagagtatactttctgtttagaaaaattaaaagtaarccaaaatataatcacaggttgcttgtctgagttctaagcaaggggactgctgccatttgcacgttctgatgtatccttctgagattagggactgggtggg

SEQ ID NO: 32911 - DNA, 201 bp, Homo sapiens; identical to SEQ ID NO: 4321

SEQ ID NO: 32912 - DNA, 201 bp, Homo sapiens
agaatatggatttgctcacgacgtataagaaagattacaatccctaccctgtctgtcgagtggaccccatcaaacctcgggacagtaaatatccatgtagygacaagatggagtgtttgcctacttataaaggtgggagagcacagaggggcagattgggggaaagacaggctgagcctgtgtgcgggccaggaaatgtgt

SEQ ID NO: 32913 - DNA, 201 bp, Homo sapiens; identical to SEQ ID NO: 4315

SEQ ID NO: 32914 - DNA, 201 bp, Homo sapiens
tggcttggagctcatgggtgactctcaacagttaactcttcatgatcttgatctcactgtccagaagccatgtgcgctggatgatctcctccgtggacatsttgagcacctccaccccagttccatcttgcttggcctcatcccacacggttgccatcttcttttctagtttttgaatttttagtagagatggggtttcac

SEQ ID NO: 32915 - DNA, 201 bp, Homo sapiens; identical to SEQ ID NO: 4318

SEQ ID NO: 32916 - DNA, 201 bp, Homo sapiens
actgccacctgttaaaaatcctctaaaccttctcattgcctagagtagggagggcaaatgattccatttcaggtgccaattggcagggctgtctgaaatgkgtgtgctctgaagtgcataaagtgctgtgattagacatgtctgacatatgtgcagagcggtagtagcagcaggtgtgccacatcatccctaagagggcaa

SEQ ID NO: 32917 - DNA, 201 bp, Homo sapiens
gggctgtctgaaatgtgtgtgctctgaagtgcataaagtgctgtgattagacatgtctgacatatgtgcagagcggtagtagcagcaggtgtgccacatcrtccctaagagggcaaggtctgaacttctaagcatggtccataagactcttcttgatctggtttctgtctgcctgtccagaaccatttatccttccccagc

SEQ ID NO: 32918 - DNA, 201 bp, Homo sapiens
tgaggtggaaagatagcttgagtccaggaggcggaggttgcagtgagcagagatggtgccactgcactttagcctgggtgacagagcaagaccttgtctcaaaaaaaaaaaaagaaaaccccaaaactttaatggacttcacctctttagacggtgaatattctttttgaggtgatggaaattgcatgagtaaaggaaaat

SEQ ID NO: 32919 - DNA, 201 bp, Homo sapiens
tcttagctcttttagtgattgtataacttatgagttgtttatttttttttaaaagcctgaaagtactaaacatttgaagaatgaagtatcacgagatgggtgtgtgtgtgtgtgtgtgtgtgtgcataatggctaaaaaagtaaatttcctttagctcatgctctgtatgaattggtcatctgtatacattaaatgtatat

SEQ ID NO: 32920 - DNA, 201 bp, Homo sapiens
tggatatccaacttttcctgtgccatttgttaaaaaaggctgtccttcccacattgaatagtcttgatacctttgttgaaaactcacttaaccatatatgkgagggtttatttctgggctctattctataccactggtctatatgtctgtccttatgctagtatcatactgttttgattacatagctttgtaatcagtttt

SEQ ID NO: 32921 - DNA, 201 bp, Homo sapiens
caggtagttctttatagtggtatgaaaatggactaatacactttgtatttttgctcctttttttttcctttccttttttcttccttgaataacctctctgytaatggtccgtctggctaactctacttagcccaagcgtcacctcatgtttgaagcccttcctgatttcctctgctgatttaggtgcccagcatccttagt

SEQ ID NO: 32922 - DNA, 201 bp, Homo sapiens
actgcttttgagtgctaggggcaatgaggggaatggtgacacagaatttaatgataagatctagttccacccgactctggaacaatcgttttggacttttwttttttttttttttttttttttttttggcagggtctcattctcttacccaggctgaagtgcagtggcatgatctaggcccactgcaacctccgcctcccg

SEQ ID NO: 32923 - DNA, 201 bp, Homo sapiens
tgcttttgagtgctaggggcaatgaggggaatggtgacacagaatttaatgataagatctagttccacccgactctggaacaatcgttttggacttttttwttttttttttttttttttttttttggcagggtctcattctcttacccaggctgaagtgcagtggcatgatctaggcccactgcaacctccgcctcccggg

SEQ ID NO: 32924 - DNA, 201 bp, Homo sapiens
atgccaagtaaatttttgtattttttggtagagacggggttttgccatgttgcccagagtggtgtggagctcccaacttcaagtgatccactgccttggcmtctcaaagtgctgggatttacagccgtgagccaccacgcctggcagttgtggactttctttgaggaaaatgtgtatatacacatgccattttcatacaat

SEQ ID NO: 32925 - DNA, 201 bp, Homo sapiens
atggtccataagactcttcttgatctggtttctgtctgcctgtccagaaccatttatccttccccagcctgcactctccctgcttccccagcctggcttccagcctgaccttgcttccccagcactcatgctgtcactccagcatggctttgcatctgcccaacttcccctggaaatctcttgcctcttatttctccatag

SEQ ID NO: 32926 - DNA, 201 bp, Homo sapiens
cataagactcttcttgatctggtttctgtctgcctgtccagaaccatttatccttccccagcctgcactctccctgcttccccagcctggcttccagcctgaccttgcttccccagcactcatgctgtcactccagcatggctttgcatctgcccaacttcccctggaaatctcttgcctcttatttctccatagctgcct

SEQ ID NO: 32927 - DNA, 201 bp, Homo sapiens
ataagactcttcttgatctggtttctgtctgcctgtccagaaccatttatccttccccagcctgcactctccctgcttccccagcctggcttccagcctgaccttgcttccccagcactcatgctgtcactccagcatggctttgcatctgcccaacttcccctggaaatctcttgcctcttatttctccatagctgcctc

SEQ ID NO: 32928 - DNA, 201 bp, Homo sapiens
taagactcttcttgatctggtttctgtctgcctgtccagaaccatttatccttccccagcctgcactctccctgcttccccagcctggcttccagcctgahcttgcttccccagcactcatgctgtcactccagcatggctttgcatctgcccaacttcccctggaaatctcttgcctcttatttctccatagctgcctca

SEQ ID NO: 32929 - DNA, 201 bp, Homo sapiens
tcaaaactttgcctatcagccttagcatccatccatggttgaatgaatccacctgaatctaccactgtcaccaccatggttgccaaatggtgatggcttaktttcatcatttcctctacatttattatttggcattctataagaaagagctttctcttctcccccatttatacatgtatatatatatgtcagtatgtactc

SEQ ID NO: 32930 - DNA, 201 bp, Homo sapiens
tggttgatagaaagcatttgacaaagttcaacactcataaaagctctcaacaagcttaggactagaaggaaacttcctcagcctgataaagggcattcacaaaaaaaatctgtacttctaaaacatcatacttaatgtgaaagactaaatggcttccccctaagattgagaacaaggctaggatgtcagctttcaccactt

SEQ ID NO: 32931 - DNA, 201 bp, Homo sapiens
gcagcttcctggggcccagtcagccgctccaggtgcttaagtctggactgcggaggccggggcggtggcgtgcagggtgaggtctcccgggctggcgcgcrtgcaagccccctgctgctacctcgcgctaggccagctccaggagggcaacagacgacaggacattgcaaaagggccacttaaattttccttcgagtaaac

SEQ ID NO: 32932 - DNA, 201 bp, Homo sapiens
cacttcccagatgttgtggcggctgggcagaggcgctcctcacttcccagacagtgggacagccgggcagaggtgctcctcactctccagatggtgtggcrgccgggcagaggcgctcctcacttcccagacagtgggacagctgggcagaggtgctcctcactctccagatggtgtggcggccgggcagaggcgctcctc

SEQ ID NO: 32933 - DNA, 201 bp, Homo sapiens
tggtgatggcttagtttcatcatttcctctacatttattatttggcattctataagaaagagctttctcttctcccccatttatacatgtatatatatatstcagtatgtactcattgatctgttttgttcagtgggttataacctattactatcatcatttattttaatactcaaattattccctgtttgagctccttcc

SEQ ID NO: 32934 - DNA, 201 bp, Homo sapiens
tcccagacagtgggacagctgggcagaggtgctcctcactctccagatggtgtggcggccgggcagaggcgctcctcacttcccagacggtgtggcggcckggcagaggggctcttcacttcccagatggtgggacagccaggcagaggcgctcctcacttcccagatggtgtggcggccaggcagcggcgctcctcactt

SEQ ID NO: 32935 - DNA, 201 bp, Homo sapiens
ctgtttgagctccttccagttggctcccatgtccttttgacatatgtccattatccattcagcatttcctgactttctgacacaagatgttccaggcttaycttgtatttctctacctcaaccctcaaactttttctctaacagctctccctccttttacttgaggttaatatttagaaaccaaggtctgattgttcactg

SEQ ID NO: 32936 - DNA, 201 bp, Homo sapiens
acagctgggcagaggtgctcctcactctccagatggtgtggcggccgggcagaggcgctcctcacttcccagacggtgtggcggccgggcagaggggctcytcacttcccagatggtgggacagccaggcagaggcgctcctcacttcccagatggtgtggcggccaggcagcggcgctcctcacttcccagacggtgtgg

SEQ ID NO: 32937 - DNA, 201 bp, Homo sapiens; identical to SEQ ID NO: 4305

SEQ ID NO: 32938 - DNA, 201 bp, Homo sapiens
gaacgctggtgagacagaatcattcactcccgtggaaagggggctgaagccagggagccgaatggtcttgctcagcggatcctcccccaatggagcccaamaagctaagatccgctggcttgaaattcttgctgccagcacagcagtctgaagttgacctgggacactcgagcttggttgggggaggggcatccactatta

SEQ ID NO: 32939 - DNA, 201 bp, Homo sapiens
atctggtaatttatgggcccgatggggcaacctaggtcttggatgttagtcaagtattttgaaagaatgccagcagtaggccgggcgtggtggctcacgcytgtgatcccagcactttgggaggccgaggtgggcggattacctgaggtcgggagttcgagaccagcctgaccaacacggagaaacaccgtctctactaaa

SEQ ID NO: 32940 - DNA, 201 bp, Homo sapiens
ctttgctgttctgcagcctcctctgttgatacccaggcaaacagggtctggaatgcacctccatcaaactctagcagacctgcagaagaggggcttgactrttagaaggaaaactaacaaacagaaagcaatagcatcaatatcaacaaaaagcatgcccacataaaaactccatccaaaggtcaccaacatcaaagatta

SEQ ID NO: 32941 - DNA, 201 bp, Homo sapiens
aaatgaagataattggtatttttggcatgatgcaaatactctataacttgattttggtgatggatatacaactccataaaagtcactaaattgtgtacttmagatggtaccttttattatgcaaattagatttcaataaaactgttacaaattgtgcctgcggactccactagtgttggtgtgtatacccaaggctcctgg

SEQ ID NO: 32942 - DNA, 201 bp, Homo sapiens
cagtatttcatagccagccaaactaagcttcataagtgagggagaaataaaatcctttacagacaagccaatgctgagggattgtgtcactaccagccctrccttacaacagctcctgaaggaagcactaaatatggaaaggaaaagacggtaccagccacgcaaaaacataacgaaatgtaaagaccaatgacactatga

SEQ ID NO: 32943 - DNA, 201 bp, Homo sapiens
atatttataaaactatgagatttattctgggaattcaaagttggtgtaacatcagaaaatcaattaatatgccacattaataaagtaacagaaaaaagccrcttggttgatagaaagcatttgacaaagttcaacactcataaaagctctcaacaagcttaggactagaaggaaacttcctcagcctgataaagggcattc

SEQ ID NO: 32944 - DNA, 201 bp, Homo sapiens
ttgaatgtataagacatagtctccatctttgcacagcgtgcagtctaggtaggaaggcagaatgctcattaagaggtgcagagcatatatagtgagaagtstccctcctgcccctgcagtagggttatgactcatttgggtgttccttctctgactctgttctcattctgtccctgcaaaggagtcactttccattggaag

SEQ ID NO: 32945 - DNA, 201 bp, Homo sapiens
ttatgaggccagcatcatcccgataccaaaatctggcagagacacaacaaaaaaagaaaatttcaggccaatatccctgatgaacgttaatacaaaaatcstcactaaaatactggcaaaccgaatcgagcagcacatcaaaaagcttatccaccacaatcaagtcagcttcattcctaggatgcgaggttggttaaacat

SEQ ID NO: 32946 - DNA, 201 bp, Homo sapiens
aaggtccaccagtatgaccagttcgtcccgagtgaagagaatatggatttgctcacgacgtataagaaagattacaatccctaccctgtctgtcgagtggrccccatcaaacctcgggacagtaaatatccatgtagcgacaagatggagtgtttgcctacttataaaggtgggagagcacagaggggcagattgggggaa

SEQ ID NO: 32947 - DNA, 201 bp, Homo sapiens
tctgggtccctcctccattgtaatctttctttaattggtcccttcccttttattccggttacaacctccctggttctctcatttttgtgtttggaaactgktcctaaattaccttcctagtttttttttctcccatgattcccttacatgaaactacaccttgaattggatcaggtttcttggcatcccctgagtggacct

SEQ ID NO: 32948 - DNA, 201 bp, Homo sapiens
gcaagaagtactaaaggaaatccttcaggctaaaagggaatgataccagatggcagcacaaatctacacaaaaagtagtaaagcatactggtaaatgtaaytaggtaaatatatacttttctttgttttcttcttaaatcattaaaaagatatttttttcttttaattcatttaaaagacaattacagaatcaatatttat

SEQ ID NO: 32949 - DNA, 201 bp, Homo sapiens
cccgggttcacaccattctcctgcctcagcctccctagtagctgggactacatgcgcctgccacgacgcctggctaatttgttgtatttttagtagagacrgggtttcaccatgttagccaggatggtcttgatctcctgacctcgtgatcagcccaccttggcctcccaaagtgctgggattacaggcgtgagccaccgt

SEQ ID NO: 32950 - DNA, 201 bp, Homo sapiens
acttcagatggtaccttttattatgcaaattagatttcaataaaactgttacaaattgtgcctgcggactccactagtgttggtgtgtatacccaaggctyctgggaagcagcttttttttctaaccttttgtacagcagtaagcaagagaattccctatagattcagagggctcactagggctactttaaatctggtaat

SEQ ID NO: 32951 - DNA, 201 bp, Homo sapiens
agcctcccccagctgcttcatcaggcggcatcacggtgggttcgtccacttgctacgttttttaagccacaattgtgtcaactagcgttgtgcccgcggaygccacatcagttctggcgaatgtggctgttttcgggccttctgtgccgcttcacttgagaactgcaggagggttgaaaatgggcgtgaccgcgcagtctg

SEQ ID NO: 32952 - DNA, 201 bp, Homo sapiens
tcccagacggtgtggcggccgggcagaggggctcttcacttcccagatggtgggacagccaggcagaggcgctcctcacttcccagatggtgtggcggccrggcagcggcgctcctcacttcccagacggtgtggcggccgggcagaggcctcctcacttcccagatggtggggcggccgggcagaggtgctcctcacttg

SEQ ID NO: 32953 - DNA, 201 bp, Homo sapiens
gtgccactgcactccagtctgggcaacaagagcaagacaccatctcaaaacaaacaagcaaattaaaaacaaaaacaaattaaaaagaaaaaaatgaacamaaatatcggtagccatacactgcagggaagataagactctatggaattagtgcaggtaagctaaacacaagtaaaaccaactcccaatggggatcagaat

SEQ ID NO: 32954 - DNA, 201 bp, Homo sapiens
caagaaatcagggaagacaacttctgagttagtctgaggctgcagtgctagttgtggcaagcaacagaccagcaaaccagctaggaatgtaagaagggagmttcagagaatgagacagacacagtgggtcttgataagctcatatgtattcctggtggtcgggaaggctgtgcatatgggcaagactgtgtgcagactaaa

SEQ ID NO: 32955 - DNA, 201 bp, Homo sapiens
ttggtactcagaggaataaatgtagtgaaatgagggcatttttttctaaaatcattccattcattgtttaaattaactttcttttgctttagtgacattayaggggatttggctcctattttgaaaagctccgtagagacagaaaatatagattagccctgatacattttgatggaagatacaacagttgagattttggtt

SEQ ID NO: 32956 - DNA, 201 bp, Homo sapiens
gcaggctaggctgtggaaacaagcagctgtgctgtcagtggggcctgacttgattgggaatagagtgcatccccaggagtttcaataaaaacaatagtgakcttaatggcaagaaatcagggaagacaacttctgagttagtctgaggctgcagtgctagttgtggcaagcaacagaccagcaaaccagctaggaatgtaa

SEQ ID NO: 32957 - DNA, 201 bp, Homo sapiens
ctgtttcatttatgtagtggctctgccggagcaggctaggctgtggaaacaagcagctgtgctgtcagtggggcctgacttgattgggaatagagtgcatmcccaggagtttcaataaaaacaatagtgagcttaatggcaagaaatcagggaagacaacttctgagttagtctgaggctgcagtgctagttgtggcaagc

SEQ ID NO: 32958 - DNA, 201 bp, Homo sapiens
ccttacaggagagattttgggcctcacaaagtggcaccagtgaaggtccaccagtatgaccagttcgtcccgagtgaagagaatatggatttgctcacgaygtataagaaagattacaatccctaccctgtctgtcgagtggaccccatcaaacctcgggacagtaaatatccatgtagcgacaagatggagtgtttgcct

SEQ ID NO: 32959 - DNA, 201 bp, Homo sapiens
cgttaatggctcttggagaaagattagattttcaattaaaatgaagccaattttagataaatagttggtagtattatcagcctaaaataaacttaagagcstgctggtggatgagggggtggtatcaggacttctggagatgaggagtaaggagcttggcaaatcctcttcccaaaaagcaatgacaaaactggacaaaac

SEQ ID NO: 32960 - DNA, 201 bp, Homo sapiens
ctgtgtcctcatgtggtgaaagccagaaggaaaaaagggccttggctagctccctccagtcattgtatagcagtgctaatccattcatgaaggtggagccygcatgatgcaatcatttcccaaaaggcctcacctcccaataccaccgtattggggattaagtttcagcacatgaattttggggcacattcagactatagc

SEQ ID NO: 32961 - DNA, 201 bp, Homo sapiens
ttccttacaggagagattttgggcctcacaaagtggcaccagtgaaggtccaccagtatgaccagttcgtcccgagtgaagagaatatggatttgctcacracgtataagaaagattacaatccctaccctgtctgtcgagtggaccccatcaaacctcgggacagtaaatatccatgtagcgacaagatggagtgtttgc

SEQ ID NO: 32962 - DNA, 201 bp, Homo sapiens
tagattaacctatgggtaccagtttgcaacatgtgtgtcttatgaggtttttttttgaatactactttcttagttcatttgtgctgctgtaacaaaaatasttgagagtgagtaatttataaataagacatttatttctcgcagttctgaaggctgggaagttcaagatcaaggcgctgataggtttggtgtccagtgagg

SEQ ID NO: 32963 - DNA, 201 bp, Homo sapiens
agactacttaccgctcaacacacacacacatacacacacacacacacacacacacacacacacgcacgcacgcatgcaccccaccacaccccagcagtacyctttgtttaatctctttcactgccattttcccctgtctctccctttgtccatacagctacatctcaggctgtcctcttcaaactacagaagagtgagtat

SEQ ID NO: 32964 - DNA, 201 bp, Homo sapiens
agagtccctctctcttcagcccttttgctgtttcctcctagcaaagccctaatcctgttttccccatgtctacacctgggcacacacctgagcatatctcyagtcttgtcagcttttactcattttccacagaaagggagcagagcagtcttctatacatggcaatctgatctgaccactcctttgtataaaactcctcag

SEQ ID NO: 32965 - DNA, 201 bp, Homo sapiens
gatatgggtggggacacagagccaaaccatatagtttcacccctggtccctccaaatctcatgtcctcacatttcacaaaaaacatgccttcccaacagtycctccaaagtcttaagtcatttcggcattaacccgaaagtccacagtccaaaatttcatctgagacaaggcaagtcccttccacctatgaacctgtaaaa

SEQ ID NO: 32966 - DNA, 201 bp, Homo sapiens
gagttcctctgcccttcactttggcctccctgaggaggtgccaggtttggagagtagtggttaactgcttgcaacctgaccacttcctagctgtgtgttayggattgaattgtgccacctcaaaagattttgaagtcctaatgctccagcctccaaatatgatcttatttggtaaagagtctttacagaggtagttgaggt

SEQ ID NO: 32967 - DNA, 201 bp, Homo sapiens
tgagcaccaatgtcaagaagggaagatgggacatgatagatcagttcctttaaggcaaggaagtatgtacattatttttctttctaattattacccaacayagtacatgacatataacaagagctttgagagtgtcatatggatgaatgaataagtgggcaataaatgaaaagacaaaattgtacattgtttaacttgtga

SEQ ID NO: 32968 - DNA, 201 bp, Homo sapiens
ctttgagagtgtcatatggatgaatgaataagtgggcaataaatgaaaagacaaaattgtacattgtttaacttgtgaatattacagtgggataatcaggkgatcaggatataataggtaagactaagcaccttctgtatctgagaagatttttgtctcttttcacccaagtgagtagctttggaaatctgcagaggaaag

SEQ ID NO: 32969 - DNA, 201 bp, Homo sapiens
gtggaaggaaggtggagagcgcagcagtagaaacggtggcattgtggttggagtgcagggttttcaggtggggtggggatcgtgagagacaagggtgagtmaggcaggagccaggtccagaaaggcttataaattatgccaggaagttgaattttacctggaagagttttaaactggggaaagccatctgatttccattta

SEQ ID NO: 32970 - DNA, 201 bp, Homo sapiens
cacctgaaaggaagatacctccgcagtgaaggggttgggtggaaggaaggtggagagcgcagcagtagaaacggtggcattgtggttggagtgcagggttytcaggtggggtggggatcgtgagagacaagggtgagtcaggcaggagccaggtccagaaaggcttataaattatgccaggaagttgaattttacctggaa

SEQ ID NO: 32971 - DNA, 201 bp, Homo sapiens
acagacacccttcagagggaaatgttagcattgagaggtgggaagttgcgagtgccctggagggcaacacaagtccgagctaagccctggctccttagggyggttcctggtgggcattgcagtgagcatctgggcctttttatctgggatgctttggggagggactgcttcctgtttagtgaagaccattatactttttcg

SEQ ID NO: 32972 - DNA, 201 bp, Homo sapiens
tagataccgcttccccccaccccccataatcatttgccttagttatggctgatcaataaattaaaccatagaggaacacttacaaaggaacttaaattttrtactggaaaaggcgattggcttttgtctttgggaaaccaatttcagaatagtctgtgaactggtgaatttggttttgggcttttgtctgctcttttccgg

SEQ ID NO: 32973 - DNA, 201 bp, Homo sapiens
agcaggaagtgctgatgtagaagctacagcaagttatccggaaaatctagctaagatcactggtgaaggcagctattttaaacacaacaaattttcagtgyagatgaaacagttatctattggaagaagatgccatctaggacttttatagctggagaggaaaagtcaatgcctggcttcaaagtttcagacaggctgaca

SEQ ID NO: 32974 - DNA, 201 bp, Homo sapiens
aaaagaaaagctagttaattggagcaattctggggagactaaaatatagacttttcttttacgtgaatttaaaggctgtaagattatgtgtgattggggayatgcagttatgttgcggttaatgacaggtttcagtgaatgttctcaacataaaaacataatgaggaaacacataaattctgattaaattcactcctaagc

SEQ ID NO: 32975 - DNA, 201 bp, Homo sapiens
aactttaaaatattactgttcattgacaatacacttagtcacccaagagctctgatggagatgtataaggagatgaatattgtctatccctgctaacatarcatccattcttcagccctgggtcaaaaagtaatttcaattttcaagtcttatttttaagaaatatattttgtaaaactgtagctgccatagaatgtggtt

SEQ ID NO: 32976 - DNA, 201 bp, Homo sapiens
gaaacttacttctctgaccagtttctttttcttggttcatgtcacatgtgcacagagactgggaaatgtaccacagaaagagaggggagatccagtgttcytaaaaagaaaagctagttaattggagcaattctggggagactaaaatatagacttttcttttacgtgaatttaaaggctgtaagattatgtgtgattggg

SEQ ID NO: 32977 - DNA, 201 bp, Homo sapiens
aaaaggtgattacctaaaagatctgccttttagctgccctcccttgcacagactggagctgaccttcaggctggaagctttgaatcttaaatagttaatgraaaattaagcaatgaagcctcacacagtgccattttctgcttccacctgttggctctccccagaatctacctttttagagctttaaagtcatttgaaata

SEQ ID NO: 32978 - DNA, 201 bp, Homo sapiens
agggaagctaccatctgggtgttcccctagaggcttacaggggaagggatgcgtcagcccagtgtctgcacagcccagtgtctgcacacccttgtgtctgygcagattgtcgtcacccctctgctcttagcactcttattactggaacatcccacccacttctttatctaaacagtgaccctgcttagtttctgaggttgg

SEQ ID NO: 32979 - DNA, 201 bp, Homo sapiens; identical to SEQ ID NO: 4314

SEQ ID NO: 32980 - DNA, 201 bp, Homo sapiens; identical to SEQ ID NO: 4319

SEQ ID NO: 32981 - DNA, 201 bp, Homo sapiens; identical to SEQ ID NO: 4320

SEQ ID NO: 32982 - DNA, 201 bp, Homo sapiens
ataagtgggcaataaatgaaaagacaaaattgtacattgtttaacttgtgaatattacagtgggataatcaggggatcaggatataataggtaagactaarcaccttctgtatctgagaagatttttgtctcttttcacccaagtgagtagctttggaaatctgcagaggaaagggatcagataccagggataccagctta

SEQ ID NO: 32983 - DNA, 201 bp, Homo sapiens
gagaagatttttgtctcttttcacccaagtgagtagctttggaaatctgcagaggaaagggatcagataccagggataccagcttaagtagccaggtgagycaaaagaaactctggtctggaatcagttgacagatgagacacccagcttgtcttatccagtgcggcaccaggcacatgtgggccatttaaccaggatgtg

SEQ ID NO: 32984 - DNA, 201 bp, Homo sapiens
agataccagggataccagcttaagtagccaggtgagtcaaaagaaactctggtctggaatcagttgacagatgagacacccagcttgtcttatccagtgcrgcaccaggcacatgtgggccatttaaccaggatgtgtaatgataacaagggcaagacacgtctgggttttggctgcattttgtttgagattcctgtgtgt

SEQ ID NO: 32985 - DNA, 201 bp, Homo sapiens
cagcttaagtagccaggtgagtcaaaagaaactctggtctggaatcagttgacagatgagacacccagcttgtcttatccagtgcggcaccaggcacatgwgggccatttaaccaggatgtgtaatgataacaagggcaagacacgtctgggttttggctgcattttgtttgagattcctgtgtgtgtgcactagagataa

SEQ ID NO: 32986 - DNA, 201 bp, Homo sapiens
atatacaacctaacaatgtctttgaagtgaacagtgccctcttagatgtgtcactcttgtgcagtatgcaacctgcacaactgtatgtgacagtctttgcmcccttgcttcctactattgaatctttctggaattttgtagatattttcaggtaaacttttctttcagtctttgtagacacgatgatgaggaaccgccccc

SEQ ID NO: 32987 - DNA, 201 bp, Homo sapiens
atattttcaggtaaacttttctttcagtctttgtagacacgatgatgaggaaccgcccccccttttttttttctcctttggagaagactccttgagttctkttatgctacaggaaaaatgtcacttcttttcataaggtcaaattcccattttatttgctgtggcaaatactatcattcatcttaaatctggtttgtttta

SEQ ID NO: 32988 - DNA, 201 bp, Homo sapiens
gaaaccatgtcttctctccgaatataccgagaactaccctttctatcactcctacctgcccagagagtccttcaagccaaggcgggagtaccagaaagggyctataccaatggaaggcctgactacatcaaggtgagggcaaacagtattaatgtatgcaggtacatacaacactaatggagtaacatgcagtgctaatgt

SEQ ID NO: 32989 - DNA, 201 bp, Homo sapiens
taggaaattgggtttatttctcccaagaaggtaatcaacctaactctgtgtcttttataggcggcatcactgtccacatctccctaccaagatttatgatraaacagagaaaccatgtcttctctccgaatataccgagaactaccctttctatcactcctacctgcccagagagtccttcaagccaaggcgggagtacca

SEQ ID NO: 32990 - DNA, 201 bp, Homo sapiens
gaaaaaagtaaccgttgaattctggttttcaatgttggcagtcacatgattttacagtctgagtcacatttggcggaagtactcttaggaaattgggtttwtttctcccaagaaggtaatcaacctaactctgtgtcttttataggcggcatcactgtccacatctccctaccaagatttatgatgaaacagagaaaccat

SEQ ID NO: 32991 - DNA, 201 bp, Homo sapiens
cacaggtagctataagtgatgggacaggcatacacagggtgatgggagaaaatatgtgcacacacagggaagagtagtggggagaggggatacgacggcgrggtggatcctgggtataagatgattggcggaagtctttctaaggctgtaataactgaggtgagacctgaaagaataaatgagggagactttcaatgtgaa

SEQ ID NO: 32992 - DNA, 201 bp, Homo sapiens; identical to SEQ ID NO: 4312

SEQ ID NO: 32993 - DNA, 201 bp, Homo sapiens
ccatgtacttccccaaagtattgcattttagtttctgtgatgaaaaatcagtccagtgtgaaaatgggaaaacaatgctatgccattcatgaaggtagctragttggaaaacaccagcatggagtttttgctgatgtgctggtgcctgatgatgagagggaccccagctggattgtgaagattgtgggcacacacaaaatt

SEQ ID NO: 32994 - DNA, 201 bp, Homo sapiens
ctggaaaatagctttacattagagcagtgaggaattcttggtttctttctctcattttatctcccttcccccatgtacttccccaaagtattgcattttartttctgtgatgaaaaatcagtccagtgtgaaaatgggaaaacaatgctatgccattcatgaaggtagctgagttggaaaacaccagcatggagtttttgc

SEQ ID NO: 32995 - DNA, 201 bp, Homo sapiens
gataagtagtctagtagtgccgaggtgctaaagtactgctgtagttactttgtaattctgtttgcgtggagttcaagggtgagtgaaacttacatctctctggtctgtctgctccacttcagctgtagttctttcttttgggtctcacttttcgctcagcacaactttcagcttctgctgggccttgggttttcttggtcg

SEQ ID NO: 32996 - DNA, 201 bp, Homo sapiens
ctataggtgagaagaaaataagtagggatatctctaatggtacttgttaatatgcaattctagccatatgaacagtacaggtgttgatgattttctctggrgagtagatggacgagatgtacatagtaacaacagtggtggcagtaatatttatataaaaggttgaacttactagcaggagcagcatgccagctgttgcct

SEQ ID NO: 32997 - DNA, 201 bp, Homo sapiens
aaatacatagctttgtacactaagtgccaagaatgtgcatgctgaaaaagaaaaagcacacttttcttgattgtatttaacactgtgaaatttagatattyatactataaggacagcatatttgtggaagattttccttgtacatgatgaggaatatctaaaatatttaccatgaatcaatactgcttttataatacaaag

SEQ ID NO: 32998 - DNA, 201 bp, Homo sapiens
tgagctttgttaagtggggccagagcagtgtatagtctaggactacatgttaccaagcaaaacctttttttctaaggccgcctttcttttttctttttggmggcagtgtcttgctctgttgcgcaggctggagtgcagtggtgccatctcgcttcactgcaacctatgcctcagggttcaagtgattctcctgcctcagcc

SEQ ID NO: 32999 - DNA, 201 bp, Homo sapiens
ccatagctgcctcatccttcaacacctgattcaagtattaccgcctttgaagcctccccaccttcttgccccttagccataccctacacagtcatgatgaygctaaccttgatcatatggtcaaggttgagagtctgccagatttctccactgtaaagtcaccatgttccctttgtatttgattatgatggagattctgat

SEQ ID NO: 33000 - DNA, 201 bp, Homo sapiens
caataatatttaacatgcatccgctgtgggcgatgggtcattggtttactatgcaaacataacaatttgtctcttgaatgtgcagaagatactttaaagtwctcaatttatttgccaacaattaggagatattttattaaaggggtataaaatagaaatacatagctttgtacactaagtgccaagaatgtgcatgctgaa

SEQ ID NO: 33001 - DNA, 201 bp, Homo sapiens
agctttgttaagtggggccagagcagtgtatagtctaggactacatgttaccaagcaaaacctttttttctaaggccgcctttcttttttctttttggagrcagtgtcttgctctgttgcgcaggctggagtgcagtggtgccatctcgcttcactgcaacctatgcctcagggttcaagtgattctcctgcctcagcctc

SEQ ID NO: 33002 - DNA, 201 bp, Homo sapiens
gcaataatatttaacatgcatccgctgtgggcgatgggtcattggtttactatgcaaacataacaatttgtctcttgaatgtgcagaagatactttaaagytctcaatttatttgccaacaattaggagatattttattaaaggggtataaaatagaaatacatagctttgtacactaagtgccaagaatgtgcatgctga

SEQ ID NO: 33003 - DNA, 201 bp, Homo sapiens
ttgcaacctccgcctcccgggctcaagcgattctcctgcctcagcctcccgagcagctgggattacaggcgcccgccactacggccggctaatttttgtattttttttgttttgttttattttgcctctaaaccatcttttattgcgcacttcagccgcgagtccggggctggcctgccgtgccctaggcgtagtactgta

SEQ ID NO: 33004 - DNA, 201 bp, Homo sapiens
tgatatattcatataacatgtaacaatcaaattagggtaattagcatatctatcacttcacacattgatcatttatttgtattgggaagcttacaaataatcttctagctattttgaaatatatggcaaattataactatagtcaccctactgtattatcaaacactgtaatttatttcttctatccaacttatttttgta

SEQ ID NO: 33005 - DNA, 201 bp, Homo sapiens
gatatattcatataacatgtaacaatcaaattagggtaattagcatatctatcacttcacacattgatcatttatttgtattgggaagcttacaaataatcttctagctattttgaaatatatggcaaattataactatagtcaccctactgtattatcaaacactgtaatttatttcttctatccaacttatttttgtat

SEQ ID NO: 33006 - DNA, 201 bp, Homo sapiens
atatattcatataacatgtaacaatcaaattagggtaattagcatatctatcacttcacacattgatcatttatttgtattgggaagcttacaaataatcttctagctattttgaaatatatggcaaattataactatagtcaccctactgtattatcaaacactgtaatttatttcttctatccaacttatttttgtatc

SEQ ID NO: 33007 - DNA, 201 bp, Homo sapiens
aggatggcttgagccttggaggcggaggttgcagtgatgcagtgagctgagatcgcaccactgaatcccagcccaggaaacaaggcaagaccctgtctcamaaaaaaaaaaaaaaattatttcgacaggctgaaatgctgggccccaaacaaactggaacttagcaagagtaagcatgaagttttacatttgggatgaaaa

SEQ ID NO: 33008 - DNA, 201 bp, Homo sapiens
atatctgtaatcccagcaacttgggaggctgaggcagaaggatcgtttgaggccaggaatttcagactagcctgggccacatagtgatactcagtctcttaaaaaaaaaaaaaaaaagggccaggcgtgatggctcatgcctgtaatcccagcactttgggaggcagaagtgggtgatcactcgaggttaggagtttgaga

SEQ ID NO: 33009 - DNA, 201 bp, Homo sapiens; identical to SEQ ID NO: 4324

SEQ ID NO: 33010 - DNA, 201 bp, Homo sapiens
ggacctgctgatgtcccttttctgatccttatcctttccctttctctaaaatacctatgttccctcctcctgctggacttgtaaggcccggtttcacttgyaagttccctgttaacccagccctgtggctccccatcaaagaaaaaccccgctccgtgttctcatcctctatgcatcagcatgctttatatcctcgattaa

SEQ ID NO: 33011 - DNA, 201 bp, Homo sapiens; identical to SEQ ID NO: 4327

SEQ ID NO: 33012 - DNA, 201 bp, Homo sapiens
atctcagatagtcggaccgattgtgagcacagaaatggcaataatatttaacatgcatccgctgtgggcgatgggtcattggtttactatgcaaacataayaatttgtctcttgaatgtgcagaagatactttaaagttctcaatttatttgccaacaattaggagatattttattaaaggggtataaaatagaaatacat

SEQ ID NO: 33013 - DNA, 201 bp, Homo sapiens
gaatcctaaaatgatagggtactagttggcttaaattgaaatctcagatagtcggaccgattgtgagcacagaaatggcaataatatttaacatgcatccrctgtgggcgatgggtcattggtttactatgcaaacataacaatttgtctcttgaatgtgcagaagatactttaaagttctcaatttatttgccaacaatt

SEQ ID NO: 33014 - DNA, 201 bp, Homo sapiens
atctttgtccttgagggattcctggttaatgagggttgggttgatcaccaatgagaagacatggtcctgggtatcttgggaggggtattcagggcattcayggtgcaggtagggaaaggagatgactccatgagcacactcaggcagtgaaacatttatttttgcataagggtttttgatatttcaaagtgagacaaggtt

SEQ ID NO: 33015 - DNA, 201 bp, Homo sapiens
tctgtctttccctttttggctctactaatgttagaacaaattattttctgttccttgataacttctagatatctttcttttagcagatcatcctcttacayactgtttatccatctattaaatacgtatataatattggctagcttccaaaacaaaaagatgtcagacttgatctttgtccttgagggattcctggttaat

SEQ ID NO: 33016 - DNA, 201 bp, Homo sapiens
aatttttgtatttttggtagagatggggtttcaccatattggccaggctggtcttgaactcctgacctcaggtgatccatcggccctgtcctcctatagtrctgggattacaggcatgaactacaccttgaatctcttcctagcttctagtcctgcctcgtgcactctctgtctgtagatgccctgggtcgaggccagcag

SEQ ID NO: 33017 - DNA, 201 bp, Homo sapiens
aaatctgtctttccctttttggctctactaatgttagaacaaattattttctgttccttgataacttctagatatctttcttttagcagatcatcctcttrcacactgtttatccatctattaaatacgtatataatattggctagcttccaaaacaaaaagatgtcagacttgatctttgtccttgagggattcctggtt

SEQ ID NO: 33018 - DNA, 201 bp, Homo sapiens
ctacagcaattgagacagttatactgacacaaagacaagtataatgaccaatgcaactaagttgagagtacagaaataagcctttatgtctattgtcgttracttctcacaaagatgcctaggcacttcagtgtgggagaggatagtctttttgatgaatggtgctgggacagttggatatccacatgcaaaaagacgaag

SEQ ID NO: 33019 - DNA, 201 bp, Homo sapiens
aagtttcagttctttggatcatggctgccaagcttacttttaaatgccctaggcagggcaattctacaaactttctttagatactaattagttcttaaacrttgagaaatctgtctttccctttttggctctactaatgttagaacaaattattttctgttccttgataacttctagatatctttcttttagcagatcatc

SEQ ID NO: 33020 - DNA, 201 bp, Homo sapiens
tatctgtaatcccagcaacttgggaggctgaggcagaaggatcgtttgaggccaggaatttcagactagcctgggccacatagtgatactcagtctcttaaaaaaaaaaaaaaaaagggccaggcgtgatggctcatgcctgtaatcccagcactttgggaggcagaagtgggtgatcactcgaggttaggagtttgagac

SEQ ID NO: 33021 - DNA, 201 bp, Homo sapiens
ccttttacccctgggaattgtgaattctggagtggaaagactagagagttctggtaggctaaagaaacctcctctctcccttttccttcccggcctatggrtccatctgggtatgtctgtggatgtacctgagcaaggtggcgagggcagctcttggaacgacccaagtatcacagagcttgaagaagtttcagttctttg

SEQ ID NO: 33022 - DNA, 201 bp, Homo sapiens
aatgttgtgcagctgttaccactatttgtttccagaactttttcatcatcccaaactctgtacttgtttaaacaaaaataacttcccattacccctccctsccatcctgccctggtgtcctttattgtacttactgtctgtgaatttgcctattgcaggtacctcgtaagtggagacatacaatatttgttctgttgtgac

SEQ ID NO: 33023 - DNA, 201 bp, Homo sapiens
aggtggccacgcccagggcaaggctgggggagcctgggttttcagactcccgaggaagggaagcctcccccagctgcttcatcaggcggcatcacggtggkttcgtccacttgctacgttttttaagccacaattgtgtcaactagcgttgtgcccgcggacgccacatcagttctggcgaatgtggctgttttcgggcct

SEQ ID NO: 33024 - DNA, 201 bp, Homo sapiens
aaggtctctactactctcttttccaagtatcagaaagtcagtgttatgtccttttacccctgggaattgtgaattctggagtggaaagactagagagttcyggtaggctaaagaaacctcctctctcccttttccttcccggcctatggatccatctgggtatgtctgtggatgtacctgagcaaggtggcgagggcagct

SEQ ID NO: 33025 - DNA, 201 bp, Homo sapiens
atttatctgttgatggacatttgagttgtttctacttctggctattggaataatgcttctgcgattggtctacaggtatctgtttcagtccctgctttcarttcttttggatacatacctgaaagtcgaattggtggatcatagggtaattctatgtttaactttttgagaaaccatcatactgttttgcacagagactac

SEQ ID NO: 33026 - DNA, 201 bp, Homo sapiens
aaaaaaaaaaattctgtgattctagcttggagccaatgctccaagttttgttaattatttattaacaattaacagaatcaagtattgttaattatttctgrgatccatcataaggtctctactactctcttttccaagtatcagaaagtcagtgttatgtccttttacccctgggaattgtgaattctggagtggaaagac

SEQ ID NO: 33027 - DNA, 201 bp, Homo sapiens
tcctaatgactagtgatactgaaaatcttttcatgtcctttttgccgtttgtatatctcctttggagagatgtctactcaaggtgggttgtttgtttgttktttttgtttttgccattttaaaattgattttgtttttcatgggttgtaggaattcttacatattctggatattaatcccttatcagatctgcaaattttt

SEQ ID NO: 33028 - DNA, 201 bp, Homo sapiens
ttaaagttctgttatccattctaggattgcctgagagtcatagatgacttgagctagttgtatgtcaggaaatgtacctagtcctttggaagtgatagacrcctatcctatgtctatgactggttcatgtacatcattcggaacttcagatttttcatctacataacataatggagatactagaacagatatttcccatgc

SEQ ID NO: 33029 - DNA, 201 bp, Homo sapiens
gaaatcattgccaaatccaatgtcatgatttttccctatgttttcttctcagcgtttgtatagttttagttcttatgcttaggtctttgatccattttgarttagtttttgtatgtggtgttaggtaagggtcccacttcattcttctgtgtgtggatatccaacttttcctgtgccatttgttaaaaaaggctgtccttc

SEQ ID NO: 33030 - DNA, 201 bp, Homo sapiens
atttctttctcttgcctgattgccccagcagaacttccaatactatgctgaataggagtggtgagagaaggcatccttgtcttgtgccagttttcaaaggkaatgcttccagtttttgcccagttagtatgatattggctgtgggtttgtcataaatagctcttactattttgagatacattccatcagtacctagtttat

SEQ ID NO: 33031 - DNA, 201 bp, Homo sapiens
atgttgaaccagccttgtatcccagggatgaagctgacttgattgtggtggataagcatttgatgtgctgctggatttggtttgccagtattttattgagratttttgcatcgatgttcatcagggatattggcctaaaattctctttttttgttgtgtctctgccaggctttggtatcaggatgatgctggcctcataga

SEQ ID NO: 33032 - DNA, 201 bp, Homo sapiens
tttttgcatcgatgttcatcagggatattggcctaaaattctctttttttgttgtgtctctgccaggctttggtatcaggatgatgctggcctcatagaawgagtgagagaggagtccctctttttctgttgtttgaaatagtttcagaaggaatggtaccagctcctctttgtacctctggtagaattcggctgtgaatc

SEQ ID NO: 33033 - DNA, 201 bp, Homo sapiens
ggatattggcctaaaattctctttttttgttgtgtctctgccaggctttggtatcaggatgatgctggcctcatagaaagagtgagagaggagtccctctktttctgttgtttgaaatagtttcagaaggaatggtaccagctcctctttgtacctctggtagaattcggctgtgaatccatctggtcctggacttttttt

SEQ ID NO: 33034 - DNA, 201 bp, Homo sapiens
ttatcgatttcttccagactttatagtttatttgtttagaggtgtttatagtattctctgatggtagtttgtatttctgtgggatcagtggtgatatcccstttatcattttttattgcgtctatttgactcttctctcttttcttctttattagtctggctagtgggctatctgttttgttgatctttccaaaaaaccag

SEQ ID NO: 33035 - DNA, 201 bp, Homo sapiens
tctgttggacaacactgatcttgagtctcattatttggaagtcttgatctctcccaccccaattaaatccctcccaccccaattaaatctgctcagtgacyggttgggatggagcgaggaattttataggtgttttctaagctgtggaagtctgtatttggcttttccagtctgaggtcatgggaaaaagcaatgggaaat

SEQ ID NO: 33036 - DNA, 201 bp, Homo sapiens
gcaaataaactagaaaatctagaagaaatggataaattcctggaaacatacattctcctaagactaaaccaggaagaatttgagtccctgaatagaccaayaacaagttctgaaattgaggcagtaattaatagtccaccaaccaaaaaaatgcccaggtcaagatagattcacagctgaattctaccagaggtacaaaaa

SEQ ID NO: 33037 - DNA, 201 bp, Homo sapiens
aaatccacgaaggtaaggaggaaacagtgcaaaaaggctgaaaattccaaaaaccagaatgcctcttctcccccaaaggatcacaactcctcaccagtaarggaacaaaactagacagagaatgagtttgacgaattgacagaagtaggcttcagaaggtgagtaataacaaactcttccaagacaaaggagcatgttcct

SEQ ID NO: 33038 - DNA, 201 bp, Homo sapiens
tgaacaggcaacctactgaatgggagaacatttttgcaatctgtccatctgacaaagggctaatacccagaacctacaaggaacttaaacaaattcacccrtcaaaaagtgggtgaatgatgtgaacagacacttctcaaaagaagacatgtatgcggccaaacaaacatatgaaaaaaagctcatcactggtcattagag

SEQ ID NO: 33039 - DNA, 201 bp, Homo sapiens
aattgtcaggatctggaccaaggggaaagaaaaaccaatgaggtggaggggcactggtggtgatagactctggggccgtgaggaaaggaggtcaaagatgwatacaggtgtctgagttgggtgagaaggaattgatggtacccttctcaaaagtgggaaatagaggagaaacagttcgggggaggagggaaggcaggtaga

SEQ ID NO: 33040 - DNA, 201 bp, Homo sapiens
aagtgggtgaatgatgtgaacagacacttctcaaaagaagacatgtatgcggccaaacaaacatatgaaaaaaagctcatcactggtcattagagaaatgsaaatccccaatgagagccgggtgcggtggctcatgcctgtaatcccagcactttgggaggccaaggcgggcagatcatctgagttcgggagttcaagact

SEQ ID NO: 33041 - DNA, 201 bp, Homo sapiens
aggaaatgtacaagacacactggattttgaagtgtagtaagaaagagtaagaaagtaaaatatctcattaataatttttaaatggatgttgaaatgataatattttaggtatattgggtcacatgaaacattaataaattaatttcacttgtttctttttaccttttaaaaaactttttagttttttttagagatactaca

SEQ ID NO: 33042 - DNA, 201 bp, Homo sapiens
ggaaagtgagcagctgcagctagtgttccaagtgcataaaaccgaaacttggtgctatagattgagatgaattatggaagtaagaaagactgctttatttkttatttgttttagtgcctctgattatgccatatgaagacaggtcagagaaagcctaagaaagagacggatattgtattaatcaacaaaaagtatttttta

SEQ ID NO: 33043 - DNA, 201 bp, Homo sapiens
tttgtggggaggcaggggtgggagtggtggcattgaagatgggccttgaagacagagaaaagtgagagtggcaggaaagtgagcagctgcagctagtgttmcaagtgcataaaaccgaaacttggtgctatagattgagatgaattatggaagtaagaaagactgctttatttgttatttgttttagtgcctctgattatg

SEQ ID NO: 33044 - DNA, 201 bp, Homo sapiens
tgtctctaaaagacaaaaaaaaaagtttaaaagtagaggctcatgcaaggctgtgcagtagaagaagaggtggggacataatctcatgcacactctgagcrgaagagtcatagccagtaactgtgtagtgggatcttcagcagctttgtggggaggcaggggtgggagtggtggcattgaagatgggccttgaagacagag

SEQ ID NO: 33045 - DNA, 201 bp, Homo sapiens
atagattagattctaaaaaactattgaaagttcataagtttgaaaagcccaaagtcacgttataccagctactattcaagctgccagttgattgcaggggraatggtcatggatttgttttgatgaacagctttgtttgcagccatgaaaattcttaacatgaaagttgatgctggtcatggtgcttatacctgtaatccc

SEQ ID NO: 33046 - DNA, 201 bp, Homo sapiens
ttctgtgggatcagtggtgatatcccctttatcattttttattgcgtctatttgactcttctctcttttcttctttattagtctggctagtgggctatctrttttgttgatctttccaaaaaaccagctcctggattcattgatttttttgaagggttttttgtgtctctatctccttcatttctgctctgattttagtta

SEQ ID NO: 33047 - DNA, 201 bp, Homo sapiens
tcggaggagttaagtggttttctcaatgttacacaagtagtcagtggcagagctaggattggaaccagatcttcctgcctctgagcccctttccactatgmaccctgcctcctcgagtgaaggagaaccctcttcactgcccacatgaggctaggctcagcaggggatccagaagactggtggaggcaagacaagtcataa

SEQ ID NO: 33048 - DNA, 201 bp, Homo sapiens
gtctttgttctcattggtttcaaagaacatctttttttttttttttgacggagtcttgctctgttgcccaggctagagtgcaatgcgcgatctcggctcastgcaagctccgcctcccgggttcatgccattctcctgcctcagcctcccgagtagctgggactacaggtgcccgccaccacacctggctaattttttgtg

SEQ ID NO: 33049 - DNA, 201 bp, Homo sapiens
aggatcacaactcctcaccagtaaaggaacaaaactagacagagaatgagtttgacgaattgacagaagtaggcttcagaaggtgagtaataacaaactcytccaagacaaaggagcatgttcctacccaattgcaaggaagctaagaaccttgataaaaggttacaggaactgctaactagaataaccagtttagagaag

SEQ ID NO: 33050 - DNA, 201 bp, Homo sapiens
gggcagacatactatttattgctgcccttaggtttatcggagcagccagaaaagagaattacttggtacaggctggcattccatcaagccatgttgtgtayggctgtgatttaaaagcataggctttgaaatcaggcagacctgggcgtccagttgtgcctttgtcaccttctggttatgtgaccttgaggaggataacat

SEQ ID NO: 33051 - DNA, 201 bp, Homo sapiens
cggggtttcactgtggtagccaggatggtctcaatctctggacctcatgatccacctgcttcaacctcccaaagtgctgggattacaggtgtgagccaccscacctggcttcaaagaacatctttatttctgccttcatttcgttatgtacccagtagccattcaggagcaggttgttcagtttccatgtagttgtgcagt

SEQ ID NO: 33052 - DNA, 201 bp, Homo sapiens
ttgggccctggcgtgaaggctgctgctgaccagctgtgttaccttgggaagtaactcagcatccacatctgtatactgaagtggtagggctggccgatctstagggttcttctacatctagcgttccattttatttccctgattattaccgttattgctttatctaatgacactctcgtttaagcagcaaagaaagttctg

SEQ ID NO: 33053 - DNA, 201 bp, Homo sapiens
acctggcttcaaagaacatctttatttctgccttcatttcgttatgtacccagtagccattcaggagcaggttgttcagtttccatgtagttgtgcagttytgagtgagtttcttaatcctgagttctaatttgattgcactgtggtctgagagacagtttgttgtgatttctgttcttttacatttgcccaggagtgctt

SEQ ID NO: 33054 - DNA, 201 bp, Homo sapiens
actactgggaaaaaggaaaaatgggctgcaaatcctttaagagtctgaactttgggtttgaaattggattgtaagtggaggtcaggtatgtgggaggtgaytgggccctggcgtgaaggctgctgctgaccagctgtgttaccttgggaagtaactcagcatccacatctgtatactgaagtggtagggctggccgatctg

SEQ ID NO: 33055 - DNA, 201 bp, Homo sapiens
gaaggtaatcaacctaactctgtgtcttttataggcggcatcactgtccacatctccctaccaagatttatgatgaaacagagaaaccatgtcttctctcygaatataccgagaactaccctttctatcactcctacctgcccagagagtccttcaagccaaggcgggagtaccagaaagggtctataccaatggaaggcc

SEQ ID NO: 33056 - DNA, 201 bp, Homo sapiens
atctcagcactttggaaggcctaggtgggcagatcacctgagactgggagttcaagaccagcctgaccaacatggagaaaccccgtctctactaaaaatayaaaattacctgggtgtggtggtgcatgcttgtaatcctagctattctggaggctgaggcaggagaatcacttgaacccaggaggtagaggcaggagaatt

SEQ ID NO: 33057 - DNA, 201 bp, Homo sapiens
cgtttgttataccctttgaatatcttgattttcttgcttttaaatgccggtcattataggctataggaagtagggtgtggattatttggtagttgttaggaaaaaaaaaaaaaaagtccatgactcctgcttggtgtgcgcagggtaggcagcaccgaaatcaaatgtagcttcagtctgccactgagcgtacctatgtgg

SEQ ID NO: 33058 - DNA, 201 bp, Homo sapiens
ccctttgaatatcttgattttcttgcttttaaatgccggtcattataggctataggaagtagggtgtggattatttggtagttgttaggaaaaaaaaaaaraaagtccatgactcctgcttggtgtgcgcagggtaggcagcaccgaaatcaaatgtagcttcagtctgccactgagcgtacctatgtggcattgggccag

SEQ ID NO: 33059 - DNA, 201 bp, Homo sapiens
aagttgtacaccatgaaaagctgcctgctacctacatgctgagaacccacttggagtgacacagttcagattaaagactttatttcaacatggtctgaagygaatttgatgttccacttcttagctcttttagtgattgtataacttatgagttgtttatttttttttaaaagcctgaaagtactaaacatttgaagaatg

SEQ ID NO: 33060 - DNA, 201 bp, Homo sapiens
ctgagaacccacttggagtgacacagttcagattaaagactttatttcaacatggtctgaagtgaatttgatgttccacttcttagctcttttagtgattrtataacttatgagttgtttatttttttttaaaagcctgaaagtactaaacatttgaagaatgaagtatcacgagatgggtgtgtgtgtgtgtgtgtgtgt

SEQ ID NO: 33061 - DNA, 201 bp, Homo sapiens
tgacaaagggctaatacccagaacctacaaggaacttaaacaaattcacccatcaaaaagtgggtgaatgatgtgaacagacacttctcaaaagaagacaygtatgcggccaaacaaacatatgaaaaaaagctcatcactggtcattagagaaatgcaaatccccaatgagagccgggtgcggtggctcatgcctgtaat

SEQ ID NO: 33062 - DNA, 201 bp, Homo sapiens
acttcttagctcttttagtgattgtataacttatgagttgtttatttttttttaaaagcctgaaagtactaaacatttgaagaatgaagtatcacgagatgggtgtgtgtgtgtgtgtgtgtgtgtgcataatggctaaaaaagtaaatttcctttagctcatgctctgtatgaattggtcatctgtatacattaaatgta

SEQ ID NO: 33063 - DNA, 201 bp, Homo sapiens
cgggaggctgaggcaggaggatagcttgagcccaggagtttgagaccagcctgggcaacatggcaaaactccatttctacaaaaaaaaaaaaaaaaaaaarttagccaggttgtgcagtggtgcatgcctgtagtcccagctacttaggaggctgaggtgggaggattgcttgagcccaggaattttgaggctgcagtgag

SEQ ID NO: 33064 - DNA, 201 bp, Homo sapiens
ggaaatgtacaagacacactggattttgaagtgtagtaagaaagagtaagaaagtaaaatatctcattaataatttttaaatggatgttgaaatgataatattttaggtatattgggtcacatgaaacattaataaattaatttcacttgtttctttttaccttttaaaaaactttttagttttttttagagatactacat

SEQ ID NO: 33065 - DNA, 201 bp, Homo sapiens; identical to SEQ ID NO: 4322

SEQ ID NO: 33066 - DNA, 201 bp, Homo sapiens
gagtgtaagcaggtcaggatttctcacagctgttttagtaggcagagtgcttccacttggggaataacaccacaagaaatctcaattttccctgatgcttrttccatttcattctgtgtactcctctctgcacagatttaaataccaaattgtttctattacttcacagtttccacctggggtctcgggagtttgcccaga

SEQ ID NO: 33067 - DNA, 201 bp, Homo sapiens
taaaaattaacctcagcttggaaaattttctgctgtgatggttggggtgacttagttttgaaactccctttttacctttcttagctctgctgggattaaattttttttaaatttggcagatttgaaaaacaatgtgaagatttttttttactctaaaaatacagaaaatagttttagcccaatcttgtttgcatagttttt

SEQ ID NO: 33068 - DNA, 201 bp, Homo sapiens
gaaatgtacaagacacactggattttgaagtgtagtaagaaagagtaagaaagtaaaatatctcattaataatttttaaatggatgttgaaatgataatattttaggtatattgggtcacatgaaacattaataaattaatttcacttgtttctttttaccttttaaaaaactttttagttttttttagagatactacatc

SEQ ID NO: 33069 - DNA, 201 bp, Homo sapiens
aaattaaaaatgacgtgtatgacatggcttgcattctatttccattggatgatgttattctagaggaacctattatattcttgttttttttttttttaacttttttttcttacctgtgtaccagtgtaccagtgcagttgttatattcttaaagttctgttatccattctaggattgcctgagagtcatagatgacttgag

SEQ ID NO: 33070 - DNA, 201 bp, Homo sapiens
tgattttgtgctagtaaaggtcccagatggtctaggtgaagcagaaccattctaattcattctgccttcaggttttctccagaataggactggaaacatckgagactgtgagttggaggtgctcttctctacacaatgctgccatcttctagatccacgggaagtccagtctgggtaatggggcaggagcacccacaatgg

SEQ ID NO: 33071 - DNA, 201 bp, Homo sapiens
aggagcatgttcctacccaattgcaaggaagctaagaaccttgataaaaggttacaggaactgctaactagaataaccagtttagagaagaatataaatgrcttgatggaggtgtaaaacacagcacaagagcttggtgaagcatacaccagtatcaatagccaaattgatcaagtggaagaaaggatatcagagtttgaa

SEQ ID NO: 33072 - DNA, 201 bp, Homo sapiens
agtaagggagggaagagctaagagagaaagggcatttagtatcctccccaaaggtcaggaaagaaacaagagagttagtagcaggcttgagtcttgcactrcccattgaattttatatatatattttttgttcaaagagacacctgactctcttactcagagctgtaccactgggcatatacttagcctccatagcctggg

SEQ ID NO: 33073 - DNA, 201 bp, Homo sapiens
gatggaggaggtctatatgtagcatttaaagagaagtcctccctacttctccccagcagactacttaccgctcaacacacacacacatacacacacacacwcacacacacacacacacacgcacgcacgcatgcaccccaccacaccccagcagtactctttgtttaatctctttcactgccattttcccctgtctctccc

SEQ ID NO: 33074 - DNA, 201 bp, Homo sapiens
taaagtatatctatgtccaaaagttgttatattttgcagtttacttgtcctttggcctctgggtatatcataaattaaatagaaaaacttttagtaaatamatattttaaaagtttataaaccactgcaggtaaacacaaatgcactttaggaaaagtgtgggctttactctttccctgaggccagttgggttgtgggggt

SEQ ID NO: 33075 - DNA, 201 bp, Homo sapiens
tttatgatccctgatcatttcactggcaccatgagtggagtataagctggagttattcagatttctctcactgttctgattctttaaagatctctacagaygaggtgtaggtagggagtatgagatatcttgcctcaagattgctgtaaagtatatctatgtccaaaagttgttatattttgcagtttacttgtcctttgg

SEQ ID NO: 33076 - DNA, 201 bp, Homo sapiens
gatggcagcacaaatctacacaaaaagtagtaaagcatactggtaaatgtaactaggtaaatatatacttttctttgttttcttcttaaatcattaaaaakatatttttttcttttaattcatttaaaagacaattacagaatcaatatttataaaactatgagatttattctgggaattcaaagttggtgtaacatcaga

SEQ ID NO: 33077 - DNA, 201 bp, Homo sapiens
tcaaatgattcacccacctcagcctcccaatgtgctggggttacaggaatgagccaccgcacctggctaggatctggtttatgatccctgatcatttcacyggcaccatgagtggagtataagctggagttattcagatttctctcactgttctgattctttaaagatctctacagacgaggtgtaggtagggagtatgag

SEQ ID NO: 33078 - DNA, 201 bp, Homo sapiens
atccaatttctggttgcctgaggggttagtccttgtcagaagttctggtttacttatttattttctcagacggagtctccctctgttgcccaggcaggagygcagtgttgctatctcgactcagggcaacctctgcctctcaggttcaaatgattgtcctgcctcagcctcccgagtagctggaattacaggtgcccacca

SEQ ID NO: 33079 - DNA, 201 bp, Homo sapiens
agtctttttcactaaacttggtggtagcctcttaatccttccagcgtggcactcaggcagcgactgctagttggtatatcatttgcatctctttgttataygcgtaccaaataaccattaaagttgcttttctctgacttatacttcaggggttggccctgctttctgttatccaatttctggttgcctgaggggttagtc

SEQ ID NO: 33080 - DNA, 201 bp, Homo sapiens
ctgttttctagccaccaaataagatgtctttttcccagccctcatgacttttgatttttctgtggcatcaaactgttaaacatataaaagtcgtttctttstttgatccctgtgacagagttttcttactctttttgtcagtttttcccccagaaacttattttccttcttcgcaaatacggtttctccaaggttttgttt

SEQ ID NO: 33081 - DNA, 201 bp, Homo sapiens
ccctcgagcctgggcgtgccccaagacaggtggttggggtctaggagtcggctgcagctggcgatgctctgaggggacgtcagggcctcaggatcgccccyatgaagacgaagtgcatctgtgaactgtgctcctgcgggtaaggtggccacgcccagggcaaggctgggggagcctgggttttcagactcccgaggaagg

SEQ ID NO: 33082 - DNA, 201 bp, Homo sapiens
cccagggatggcttcaccaattgtaccttcttgaagaggtttctctaattaatctaaatatttttcacagaagaaactctttttccttttcattgccaagrggggaggggccggaagagcccatgaggtgctctccagtagccgctgaacatatcgtttgctgctctctcccatccctcagctctggctcttgctggcatc

SEQ ID NO: 33083 - DNA, 201 bp, Homo sapiens
atggttcaagtaagatagcataggtaaagaaactccttttgtatgtggtgcatattcaaaaaaaattaattccttttctctcatctcccttggtcctcaawggttacaatctgtaagagcaatggctgaaatgttggccacttcactcatgatgttgaagttcctcttggacaggtaaacagcttatcatgtccctcaagt

SEQ ID NO: 33084 - DNA, 201 bp, Homo sapiens
aaaggaaaaaacaaacccttcaagaaatatgggactgtatgaaaagaccaaacccacttttgattggtatacctgaaagtgacgggcagaatggaaccaarttggaaaacacttttcaggatataatccaggggaacttccccaacctggaaggacaggccaacattcaaattcaggaaatacagagaacaccagaaagat

SEQ ID NO: 33085 - DNA, 201 bp, Homo sapiens
agtggtatcttccttcccccagaggattggctctccaagaattgaaagagttgtggacatgtttctttctgtgtctccctctgaggtgatgaggccattgrcaaaatcctaccccacgcgtcccagggatggcttcaccaattgtaccttcttgaagaggtttctctaattaatctaaatatttttcacagaagaaactct

SEQ ID NO: 33086 - DNA, 201 bp, Homo sapiens
ccgaaatcaaatgtagcttcagtctgccactgagcgtacctatgtggcattgggccagttgcttaatcctttggaacatctgttctctctcctttgcaaartaaaggtggcaatacctgccaagaggcagttttatggttcaagtaagatagcataggtaaagaaactccttttgtatgtggtgcatattcaaaaaaaatt

SEQ ID NO: 33087 - DNA, 201 bp, Homo sapiens
tggctcatgcctgtaatcccagcactttgggaggccaaggcgggcagatcatctgagttcgggagttcaagactagcctgatcaacatggagaaaccccgwctctactaaaaatacaaaaattagccgggtgtggtggcacatgcctataattccagctacttaggaggctgaggcaggagaatcacttgaacctaggagg

SEQ ID NO: 33088 - DNA, 201 bp, Homo sapiens
taaatgccggtcattataggctataggaagtagggtgtggattatttggtagttgttaggaaaaaaaaaaaaaaagtccatgactcctgcttggtgtgcgyagggtaggcagcaccgaaatcaaatgtagcttcagtctgccactgagcgtacctatgtggcattgggccagttgcttaatcctttggaacatctgttctc

SEQ ID NO: 33089 - DNA, 201 bp, Homo sapiens
tgaggcaggagaatcacttgaacccgggaggcagaggttgcagtgagcggagattgtaccactgcattccagcctgggtgacagagccagactctgtctcaaaaaaaaaaaaaaaaaaaaaaaatccgtacttttagtttcttctgaaataccaaaagacgtgacagtattgtgactgcattcctaaatggtaatggtcag

SEQ ID NO: 33090 - DNA, 201 bp, Homo sapiens
gctggagtgcagtagcgcaatctcggctcactacaacctccgccacctgggttcaagcgattcttctgcctcagcctcctgagtagccgggactacaggcrtgcaccaccatgcccagctaatttttgtacttttagtagagacagggtttcaccatgttcgtcaggccggtctcgaactcccgacctcagtggatccacc

SEQ ID NO: 33091 - DNA, 201 bp, Homo sapiens
gagcttagtggaaaccactggacaggggcttgagaatgagagggagttgagggccttgtctgatgcttgacttgaatcaggccacttaaaaaaaatttttyttttaaaacaaggtttccttctgtagccatggctggagtgcaatggtgtgatcatcgctcagtgcagcctcgaattctgggctcaagtgatccttgcccc

SEQ ID NO: 33092 - DNA, 201 bp, Homo sapiens
gggagggcagaaggatcacacacaaggctgtcacttcacacttggagggttgcacagtggctgggcagaggtgcttctctcttcccagatggtggggcgtrtgggcagaggtgctcctcatttcctagaggggggcagctgtgcagaggcacccctcacttcccagacagggcagtgggcgggcagaggcactcctcacat

SEQ ID NO: 33093 - DNA, 201 bp, Homo sapiens
ttcctgagcttagtggaaaccactggacaggggcttgagaatgagagggagttgagggccttgtctgatgcttgacttgaatcaggccacttaaaaaaaaytttttttttaaaacaaggtttccttctgtagccatggctggagtgcaatggtgtgatcatcgctcagtgcagcctcgaattctgggctcaagtgatcctt

SEQ ID NO: 33094 - DNA, 201 bp, Homo sapiens
tacctgtaatcccagcacttcgggaggctgaggcaggaggatagcttgagcccaggagtttgagaccagcctgggcaacatggcaaaactccatttctacaaaaaaaaaaaaaaaaaaaaattagccaggttgtgcagtggtgcatgcctgtagtcccagctacttaggaggctgaggtgggaggattgcttgagcccagg

SEQ ID NO: 33095 - DNA, 201 bp, Homo sapiens
agggcagtgggcgggcagaggcactcctcacatcccagacggtggggcggcctggcagaggcattcctcacttcccagactgtgggcggccaggtggaggygctcctcacttcccagtcagttgggtggccgggcagaggggctcctcacttcccagacagggtggtggctgggcagaggcgctcctcacttcccagaggg

SEQ ID NO: 33096 - DNA, 201 bp, Homo sapiens
gtgggcggccaggtggaggcgctcctcacttcccagtcagttgggtggccgggcagaggggctcctcacttcccagacagggtggtggctgggcagaggcrctcctcacttcccagagggtggggcggctgggcagaggcgctcctcacgtcccagtcagttgggtggccgggcagaggcgctcctcacttcccagtcatt

SEQ ID NO: 33097 - DNA, 201 bp, Homo sapiens
ccgaatataccgagaactaccctttctatcactcctacctgcccagagagtccttcaagccaaggcgggagtaccagaaagggtctataccaatggaaggsctgactacatcaaggtgagggcaaacagtattaatgtatgcaggtacatacaacactaatggagtaacatgcagtgctaatgtataatattaatgtaatg

SEQ ID NO: 33098 - DNA, 201 bp, Homo sapiens
tcccagacagggtggtggctgggcagaggcgctcctcacttcccagagggtggggcggctgggcagaggcgctcctcacgtcccagtcagttgggtggccrggcagaggcgctcctcacttcccagtcatttgggcgaccgggtggaggcgctcctcacttcccagacagggtggcggccaggcagaggtgctcctcactt

SEQ ID NO: 33099 - DNA, 201 bp, Homo sapiens
agtggtctttaccatttggcatgtttttgcagtggctggtactggttgttcctttctgtatttagtgcttccttcaggagctcttgtaaggcaggcctggkggtgacaaaatctctcagcatttgctttctgtaaaggattttatttctccttcacttattaaggttagtttggctggatatgaagttgcaggttgaacat

SEQ ID NO: 33100 - DNA, 201 bp, Homo sapiens
ctccatccagttttgttccctggtgaggagttgtgttcctttggaggagaaagggcattctggtttttggaattttcagcctttctgctctggtttctctycatgttagaggttttatctacctttggtctttgatgttggtgacctacagatggggttttggtgtggatgtcctttttgttgatgttgatgctattcctt

SEQ ID NO: 33101 - DNA, 201 bp, Homo sapiens
cctcaagtgatcctcccaatgtggcctcccaaaatgctgggattacaggcaaaagccaccacacccagcttatataataaaacttttggaaaggaaaaaawttattaaagttctctatattgtgtttttattttctttatttttgtgtttggtatgaatgtgcagtggtttctaaacctgaattatttgtggggactttga

SEQ ID NO: 33102 - DNA, 201 bp, Homo sapiens
ggagaggaggactgcttacccgagcagagtgctcctgctgagcccaggcggtttccatttcccggggtctctgttaggattgcagcaccttcaaaacattkaacatacttccctgccggaagccacatccttcagtggtgacacccagaaacagcccccttggtcttttgcttgttttggagagatgcagcgtgactgctt

SEQ ID NO: 33103 - DNA, 201 bp, Homo sapiens
gtgctgtgatcagctttcccctcgctgagttgctaagttgcatgcatgctgaaaagggctcccagagaacaggtatgtttgccagacacagttgctcctgkacctgcccttggaaaaagtcccctgcagtggctgggggtcccctccttctcctttctgatttgtcctgtttcttatccagtgtcgtcatagtcgggctga

SEQ ID NO: 33104 - DNA, 201 bp, Homo sapiens
agaaatgataagttgatttggtttaactcattttgtaggttcgcctttcttttcaacctcttgaaagccaggtacctgagttatgtgctaccaagaccttwggtatttcagctgagttgggggttaggattctggacttatccccctccctggaatttcccaagttttagctgcttctcttgtaaattggggatgatattg

SEQ ID NO: 33105 - DNA, 201 bp, Homo sapiens
gagaacaggtatgtttgccagacacagttgctcctggacctgcccttggaaaaagtcccctgcagtggctgggggtcccctccttctcctttctgatttgycctgtttcttatccagtgtcgtcatagtcgggctgagtggggttagtatgacagcacatgcacacactttaaggagacctcacagaagtattatagaaga

SEQ ID NO: 33106 - DNA, 201 bp, Homo sapiens
agaaggaaagctgactgaaggcagaggctgaggctgagtcctgtagcttctgcaggattagcgcagtgctggccacatagcaagcatgatcatggatgagmcctcaacagatgtgagaggtaattgtttaatatgttcttaatgagaacacatggacacagggagggtaacaacacacatcggggcctatctgggggtggg

SEQ ID NO: 33107 - DNA, 201 bp, Homo sapiens
gaaaagaccaaacccacttttgattggtatacctgaaagtgacgggcagaatggaaccaagttggaaaacacttttcaggatataatccaggggaacttcyccaacctggaaggacaggccaacattcaaattcaggaaatacagagaacaccagaaagatactccacaagaagagcaaccccaagacacataatcatcag

SEQ ID NO: 33108 - DNA, 201 bp, Homo sapiens
aggcagtgtcttgctctgttgcgcaggctggagtgcagtggtgccatctcgcttcactgcaacctatgcctcagggttcaagtgattctcctgcctcagcytcctgagtagatgggattacaggcacatgccaccatgcctggctaatttttgtatttttagtagagacagggtttcaaccatgttgtccaggctggtttt

SEQ ID NO: 33109 - DNA, 201 bp, Homo sapiens
gtggtatctgacaacctcaggctatgggcaggtctgccatcctgtcagcaggctaggtgaccagggtaggccttgtcctttggttcacgttacactggggycacctgtgtgggtggagattctggtactttgccttcattttggggggatcaggaattcactttccaatcccctccccattaaggtctgaatatagcacca

SEQ ID NO: 33110 - DNA, 201 bp, Homo sapiens
caatgctattcccatcaagctaccattaactttcttcacagaattagaaaaaacgactttaaatttcttatggaaccaaaaaaagcctgtatagccaagayaatcctaaaactaagcaaaaagaacaaagctggaggcatcatgctgcctgacttcaaactatactacaaggctacgataaccaaaacagcatggtactcg

SEQ ID NO: 33111 - DNA, 201 bp, Homo sapiens
ttgagtgtagtggtgcaaacatggctcactgcagcctcaacctctgaggttcaagcaattctcctaccttggcctcccaaagttctgggattataggcatragccacggtgtcctgctaggaatttagttctaattaggggtttaattttctgacagagttctcagcaacaagcaagtcaaatctgtaaaattgtcccatt

SEQ ID NO: 33112 - DNA, 201 bp, Homo sapiens
gcttgagtgtagtggtgcaaacatggctcactgcagcctcaacctctgaggttcaagcaattctcctaccttggcctcccaaagttctgggattataggcmtaagccacggtgtcctgctaggaatttagttctaattaggggtttaattttctgacagagttctcagcaacaagcaagtcaaatctgtaaaattgtccca

SEQ ID NO: 33113 - DNA, 201 bp, Homo sapiens
cacttgcaagttccctgttaacccagccctgtggctccccatcaaagaaaaaccccgctccgtgttctcatcctctatgcatcagcatgctttatatcctygattaattatatgtacgctgggaaaacagatattttctatttttgtgtgtgcactgtatcatagcaacacagttttctttattaacagctaacacatatc

SEQ ID NO: 33114 - DNA, 201 bp, Homo sapiens
tcttgagcaaataattctttaatgtcctttcaactttaacttttgaggacattgtacttgttggcgagtgggctctggagatgctcagaggcctggataaraaggtgtccatctgcaggagcagctgcccacggctgctgaggaaaagccaccaatgggtgactctcttggagcaagttcttatatttggccacaagatgg

SEQ ID NO: 33115 - DNA, 201 bp, Homo sapiens
catctccctgggacagagcacctgggggaaggggtggctgtggatgcagcttcagcagacttaaatgttcctgcctgccaactctgaagagagcagcagawctcccaggacagctgtcgagctctgctaggggacagactgcctcctcaagtgggtccctgacccccaggcctcctggctgggagacacctcccagcaggg

SEQ ID NO: 33116 - DNA, 201 bp, Homo sapiens
actttaacttttgaggacattgtacttgttggcgagtgggctctggagatgctcagaggcctggataaaaaggtgtccatctgcaggagcagctgcccacrgctgctgaggaaaagccaccaatgggtgactctcttggagcaagttcttatatttggccacaagatggcagacgtttcctgatcaattctcactgcgggt

SEQ ID NO: 33117 - DNA, 201 bp, Homo sapiens
gggcatctctgaaagaaaggcaacagccccagtcaggggtctatagataaaactcccatctccctgggacagagcacctgggggaaggggtggctgtggaygcagcttcagcagacttaaatgttcctgcctgccaactctgaagagagcagcagatctcccaggacagctgtcgagctctgctaggggacagactgcctc

SEQ ID NO: 33118 - DNA, 201 bp, Homo sapiens
accaacttaattagttcccccaactcccacaatgggccatttttgattgtagagtacaatatgaaggctctggtccaactgagaaaatagtatctgatataaaaaaaaaagtgtaattctaaaagccttttagtaaagtaatataaatagcaaatctccctcctgagattaaaatgtagtaacactactttttctaaaatt

SEQ ID NO: 33119 - DNA, 201 bp, Homo sapiens
gcagctcccagtgagaccaatgcagaaggtgggtgatttctgcatttccaactgaggtactcacttagtctcattgggactggttagacagtggctgaggsccacagaaggtgagcagaagcagggtggggcgtcgcctcacccaggaagcgtaaggggttggggaactccctcacttagccatcggaggctgtgagggac

SEQ ID NO: 33120 - DNA, 201 bp, Homo sapiens
gtctgcagctcccagtgagaccaatgcagaaggtgggtgatttctgcatttccaactgaggtactcacttagtctcattgggactggttagacagtggctraggcccacagaaggtgagcagaagcagggtggggcgtcgcctcacccaggaagcgtaaggggttggggaactccctcacttagccatcggaggctgtgag

SEQ ID NO: 33121 - DNA, 201 bp, Homo sapiens
atctattcatcccattatccatgcatctcttaaaaatgtatttctggctgggtgctgtggctcacatctgtaatcccagtgctttgggaggccaaggcagrtggattgcttgagcccaagagttcgagaccagcctggccaacatgaggaaacctcatctctacaaataacaaaaaagggaagactggcaagatggctgaa

SEQ ID NO: 33122 - DNA, 201 bp, Homo sapiens
gaaaactggctagccatatgcagaaaactgaaactggaccccttccttacactttatacaaaaattaactcaagatggattaaagacctaagcgtaagacstaaaaccataaaaaccctagaaaaaaagctagctaataccattcaggacgtaggcatgggcaaagacttcgtgactaaaacaccaaaagcaatggcgaca

SEQ ID NO: 33123 - DNA, 201 bp, Homo sapiens
aagagagccttggaaatatttgtttagcacagctgttgggtttcatccgaaattcacagggtcctagattgcttgtgaagagagtgaaactccagtcaagwgagcttgctgttttttggctggaggacactaaaaggccatgtgggaacaagcctagtgcagctgacacaaacttcagagtgtgagaagggaagcttcctt

SEQ ID NO: 33124 - DNA, 201 bp, Homo sapiens
tttggttgttttttgcagtgcctggaagagagccttggaaatatttgtttagcacagctgttgggtttcatccgaaattcacagggtcctagattgcttgygaagagagtgaaactccagtcaagagagcttgctgttttttggctggaggacactaaaaggccatgtgggaacaagcctagtgcagctgacacaaacttc

SEQ ID NO: 33125 - DNA, 201 bp, Homo sapiens
ccctggtaatcacattgaaagaaaatttcctagaatactgttgtataccttcttgatttctttgataagcttacctgcctgtaattgtcttttttaacccrtttttaaaataagttgcttctattctggagagtcagctagccaaataatatatttctatataaacaagtaaagagtacagaagggcctttaccaggacta

SEQ ID NO: 33126 - DNA, 201 bp, Homo sapiens
ataggggtgagatagtgggtcatgaacagttactgttttaaaatagggattagaggggctttggttgttttttgcagtgcctggaagagagccttggaaakatttgtttagcacagctgttgggtttcatccgaaattcacagggtcctagattgcttgtgaagagagtgaaactccagtcaagagagcttgctgtttttt

SEQ ID NO: 33127 - DNA, 201 bp, Homo sapiens
gtaatcacattgaaagaaaatttcctagaatactgttgtataccttcttgatttctttgataagcttacctgcctgtaattgtcttttttaacccgttttwaaaataagttgcttctattctggagagtcagctagccaaataatatatttctatataaacaagtaaagagtacagaagggcctttaccaggactaacaag

SEQ ID NO: 33128 - DNA, 201 bp, Homo sapiens
gatggcccacaccagtaatctcagcactttggaaggcctaggtgggcagatcacctgagactgggagttcaagaccagcctgaccaacatggagaaacccygtctctactaaaaatataaaattacctgggtgtggtggtgcatgcttgtaatcctagctattctggaggctgaggcaggagaatcacttgaacccaggag

SEQ ID NO: 33129 - DNA, 201 bp, Homo sapiens
tctctactaaaaatataaaattacctgggtgtggtggtgcatgcttgtaatcctagctattctggaggctgaggcaggagaatcacttgaacccaggaggyagaggcaggagaattgcttgaatctgggaggtggaggttgcggtgagctgagatcatgccattgcactccagcctgggcaacaagagctaaactttgtct

SEQ ID NO: 33130 - DNA, 201 bp, Homo sapiens
taagcttacctgcctgtaattgtcttttttaacccgtttttaaaataagttgcttctattctggagagtcagctagccaaataatatatttctatataaayaagtaaagagtacagaagggcctttaccaggactaacaagaaagggctttgggacaacttcactgtttcgggtggtcaggatctttctgctcctaacatt

SEQ ID NO: 33131 - DNA, 201 bp, Homo sapiens
cccagagtggtgtggagctcccaacttcaagtgatccactgccttggcatctcaaagtgctgggatttacagccgtgagccaccacgcctggcagttgtgractttctttgaggaaaatgtgtatatacacatgccattttcatacaattccaagtggctcatgggtcccctgaagttcaaggaacccaagttaagaatca

SEQ ID NO: 33132 - DNA, 201 bp, Homo sapiens
  misc_feature (1)...(201): n = A,T,C or G, or insertion/deletion polymorphism (see Tables 1-2)
tcagggatcttagagtagtgtttaaagaagttgggattacccttgaagggaaccattacagtgcctgaaaacgtggagtgctcatagaagacttcagtcancagttatgaagatgtagagaggaagagctggttttcttttttctttttttctttttttttttttgagacagggtctcactctgttgcccaggttatagtg

SEQ ID NO: 33133 - DNA, 201 bp, Homo sapiens
aagcttacctgcctgtaattgtcttttttaacccgtttttaaaataagttgcttctattctggagagtcagctagccaaataatatatttctatataaacragtaaagagtacagaagggcctttaccaggactaacaagaaagggctttgggacaacttcactgtttcgggtggtcaggatctttctgctcctaacattc

SEQ ID NO: 33134 - DNA, 201 bp, Homo sapiens
agctctgattgctacactgtgtgcataggcataccttgttctactgtgctttgctttatcgcactttgcagatagtgtgtttttttaatgtaggtttgtgrtaaccctgtgttgaagaattctgtctgctgtttttccaataccatgcgctcacttcatgtctctgtcacatattgctaattctcacactgtttcaagctt

SEQ ID NO: 33135 - DNA, 201 bp, Homo sapiens
ccaggcgtggtggcacatgcctgtggtcccagctactggaaatgttgaagcaggaggatggcctgagcccgggaggttgaggctgtacttagctggccgtsattgcaccactgcactctagcctggctgacagagcgagaacccccacctccaaaaaaaaaaaagaaagaatttcaaagtaaataagagatcaagcaaaat

SEQ ID NO: 33136 - DNA, 201 bp, Homo sapiens
taggtttgtggtaaccctgtgttgaagaattctgtctgctgtttttccaataccatgcgctcacttcatgtctctgtcacatattgctaattctcacactrtttcaagctttttaattattatgtctgttatggcgatctgtgattaacctttgatgttactatttaaattcttttagggtgccatgagccacgcccgtat

SEQ ID NO: 33137 - DNA, 201 bp, Homo sapiens
ctgcagatttccttggggtccaggcctcccattatgttggccattccagccccacagcagaggttcctctggagatggacatctagattggccagttcttytcattcttcaaacattctgaagttcttttcctcctgaaaatcttccctctgattatttttttctttaacctttactccatgtggaaataaaatgccccta

SEQ ID NO: 33138 - DNA, 201 bp, Homo sapiens
tctgccatgattttaagtttcctgaggcctccccagccattgcagaactgtgtgtcaattaaacctctctagtttataaattactcagtctcaggtagttstttatagtggtatgaaaatggactaatacactttgtatttttgctcctttttttttcctttccttttttcttccttgaataacctctctgttaatggtcc

SEQ ID NO: 33139 - DNA, 201 bp, Homo sapiens
gaatgtaatgctttggtaaaaaagttatctgagtgaaaaactaattgaattgtttggtcagcctcagcttattgctctccctcccaactgacgttatatayaaagtcaccagaaggaaaggtttgctcagagtaaccccttctgccatggtgactctgttggaagtcatccagtgacagaagaccctggaggcagcagctc

SEQ ID NO: 33140 - DNA, 201 bp, Homo sapiens
ccctcccaactgacgttatatacaaagtcaccagaaggaaaggtttgctcagagtaaccccttctgccatggtgactctgttggaagtcatccagtgacasaagaccctggaggcagcagctcttgtcccgggtccttttgttttgtgtgtttcattgtactttgcagagcttttcctaggagactggttgcctgccctga

SEQ ID NO: 33141 - DNA, 201 bp, Homo sapiens
gatgtcagctggctggtagaaattaacatggtatatagcataactgttatcatttttatcttaattaattttatgagacatttaacatgttcacacatcargccaaacatctggggctatatggatggtggcatttatccaactgtttacacaccctgctttccaagtatcagccatgctcactgggtcccatccacttgc

SEQ ID NO: 33142 - DNA, 201 bp, Homo sapiens
aatctacagtgtgctgtgcaagcaacccagtcttggataggggtgagatagtgggtcatgaacagttactgttttaaaatagggattagaggggctttggktgttttttgcagtgcctggaagagagccttggaaatatttgtttagcacagctgttgggtttcatccgaaattcacagggtcctagattgcttgtgaaga

SEQ ID NO: 33143 - DNA, 201 bp, Homo sapiens
ttccaggcattgtgcttagctgtttatataatagtgaacaagataccccctttctcaccaaggaatctagtttgggtgataaaaaagcattttttaatatygtggacttaatgctgtgataaaagtaatctacagtgtgctgtgcaagcaacccagtcttggataggggtgagatagtgggtcatgaacagttactgtttt

SEQ ID NO: 33144 - DNA, 201 bp, Homo sapiens
ttatttgttttagtgcctctgattatgccatatgaagacaggtcagagaaagcctaagaaagagacggatattgtattaatcaacaaaaagtattttttastgtttttatctttcctacacttttagagtaaacttccagtacccaagtgcttgcagttcttttgtctgtaccttcgaattttagatctgcactttccaat

SEQ ID NO: 33145 - DNA, 201 bp, Homo sapiens
tagtaaggcagaggccatacaacccccatctccaagctctgtgcttatgggtagaggagtgtccttatagtctgagacatcaacttgaattttcctcagaraggaatcagatgtaatgaaaagagcatccttttagaagtcagcaaaagaggcattagccctggttttaaaatggactgttctatgatattgagcaggttc

SEQ ID NO: 33146 - DNA, 201 bp, Homo sapiens
actaatacatgagttcagcgagatgtcagtactgaacaatatataaaaatcagttgtttctgtattctagcatggacaatcaaaatggagtcaagaaaacygttctctttttaatagcctcaaaattaataaaatcttggaataaaattttaaaaaagcaagtgtaagtcttgcatgctgaaagctaccaacgattgctgg

SEQ ID NO: 33147 - DNA, 201 bp, Homo sapiens
tgaggtgggaggattgcttgatcccaggaggtcgaggctgcagtgagctgtgatggcaccactgccctccagcctggatgacagagtgaaaccttgtcttaaaaaaaaaaaaattctgtgattctagcttggagccaatgctccaagttttgttaattatttattaacaattaacagaatcaagtattgttaattatttct

SEQ ID NO: 33148 - DNA, 201 bp, Homo sapiens
aaggtttgctcagagtaaccccttctgccatggtgactctgttggaagtcatccagtgacagaagaccctggaggcagcagctcttgtcccgggtcctttygttttgtgtgtttcattgtactttgcagagcttttcctaggagactggttgcctgccctgacgtgtcagagctcctggcagggccccagatttggtctcc

SEQ ID NO: 33149 - DNA, 201 bp, Homo sapiens
ggatggtgttttcttcattctcttgtgtcagggtccggctcatccaggctgcaaagccaaatgcctttaaacttgagtgtggcaagatgtagaggaaaagrgttttggagttggggagagctgaattgaaatcttggttctggcacttacggtgggcccttgggcaagttgctgagcccctctgtttagtttttcttttgt

SEQ ID NO: 33150 - DNA, 201 bp, Homo sapiens
cccaggccaaaggctctggactgtcccaccacgtgccccctgccttctccctgagcctttgctcaaatccttctctttgcacagatacccccattcaccaytgtccagtcatgactgaggtgtaaaatctgacccattctcagctctggtgaaatttcctcacaaaggctgagtttattacacatttttctaccctcacat

SEQ ID NO: 33151 - DNA, 201 bp, Homo sapiens
ctttggacctatagttgctgtgtataattgaatagtagacattcaaacatggctttcaatgaggtactagaatagattcaacatatataatctaagtttcyttacctttatttgtgaagagtaaaagcaaaaatttgatgctatcccattttagtagaggcttgtgaaatattcctttgcagctgcaaagatgctgaggcc

SEQ ID NO: 33152 - DNA, 201 bp, Homo sapiens
gatcttctgcaagatggactacttcaggtaggctgcggccgccgagccagcagtgtcgccgagggcaggccccgggcgcattcggaggccacttttgcggmgtgtggtctctcctccagaaccccggcgtcccgagtgcacttccggcgcgcagcgctggtccaacctgccggcgctcagcggcgcgaacccagagctcca

SEQ ID NO: 33153 - DNA, 201 bp, Homo sapiens
tggggtagagagtagggtgtgcagccactgtgggaagaggcaggagactgggcccagtctggccagtagtgaccttcgcaagttgctgcttctctcggccyttagttcgccctttccaaggctgtctcccagagctgccaaagaggccactgttggggggaagtctctataaaggctccctaaatggtggttggtatgaat

SEQ ID NO: 33154 - DNA, 201 bp, Homo sapiens
ttcaagcttcaggggctgggtaagtggtggcaccattctctgaaatagagggtgtaccagaggaaacaggctgctagggttgggacagagtcacaggtgastcatccactttaaagaacacactttccctggtgcccgggatcaggccctgggctgacttctgggatggagtaaaccagactccgctgcctcctggagggg

SEQ ID NO: 33155 - DNA, 201 bp, Homo sapiens
ctgggtaagtggtggcaccattctctgaaatagagggtgtaccagaggaaacaggctgctagggttgggacagagtcacaggtgagtcatccactttaaaraacacactttccctggtgcccgggatcaggccctgggctgacttctgggatggagtaaaccagactccgctgcctcctggaggggcttccagtctggtgt

SEQ ID NO: 33156 - DNA, 201 bp, Homo sapiens
atagctcaaagtcagagattggatgagaaccttgctttttttttttttttttttttttagacagagtttcactcttatcgcccaggctggagtgcaatggmgcaatctcggctcactgcaacctccacctcctgggttcaggtgattctcctgcctcagcctcccgaagtagctgggattacaggcgcctaccaccatgcc

SEQ ID NO: 33157 - DNA, 201 bp, Homo sapiens
accccatgaggtcagatcaagaccatcctggctaacacggcgaaaccccgtctctgctaaaatacaaaaaattagctgggcgtggtggtgggcacctgtastcccagctacttgggaggctgaggcaggagaatggcctgaacctgggaggcagagcttgcagtgagccaagatcgtgccactgcactccagcctgggcga

SEQ ID NO: 33158 - DNA, 201 bp, Homo sapiens
cactcgccggctctgaaccttcgattcctcctatgaaaaccggatgccagagtccccacctcaccgggttgcgacgaagccgaggtggcgcaacgttgagscccaggaccccggcccgtagtaaggtctctacgcgcggctgggctccccctcctcccgcagcacaaataatcggaagccagcctcccctcagaggccaga

SEQ ID NO: 33159 - DNA, 201 bp, Homo sapiens
aggggcgagactggaaacagggagaccggggaggaggttgacagtgagggttgcatgatgggagcctggcctaggagggcaacagtggagatggtgagaaggagatggatcccagagatacttgggaaacagaaccaacagcatcgatgattggctggatgaggggttgaggagagagaggagtgcatgattatgattttc

SEQ ID NO: 33160 - DNA, 201 bp, Homo sapiens
agaacaatgaagtattaaaaataaaatgggaatatggttagtgttttagtatgactgtaaaagtaatatgagtggaaagagaatatctaacatatacgccrgttaacaaaattaaaccttacagaagtaaggcaacatatgattgtttttaaatacctcaaaagttacaggaatactgaaagtaaaaagtttccataatca

SEQ ID NO: 33161 - DNA, 201 bp, Homo sapiens
caggggcgagactggaaacagggagaccggggaggaggttgacagtgagggttgcatgatgggagcctggcctaggagggcaacagtggagatggtgagaaggagatggatcccagagatacttgggaaacagaaccaacagcatcgatgattggctggatgaggggttgaggagagagaggagtgcatgattatgatttt

SEQ ID NO: 33162 - DNA, 201 bp, Homo sapiens
ctactgaaaccttgcccagggctacccaggaggtaagtggcagagatgaaactggtttcagggctccagtctgtagagagcacggggcaggtgggatcctrtgtgcagcctgggggatgagctccaaggcatcctctcgtccacaggtcaggtacagtgcgggcaggtgcactgccggctgccttacaccgcaccccccgt

SEQ ID NO: 33163 - DNA, 201 bp, Homo sapiens
ctggactaggatctggaggtgagagggtgaggtgaggggattctgaaatcccatcattccactcccaccctctcctctgagggggcattcctgcttaagggcctccacccaggcactgagggatgaagggggtgataagaacgtatttgtgaatctggacggctgtgtgtgtgtgtgtgtgtagtcagacaggggttaatg

SEQ ID NO: 33164 - DNA, 201 bp, Homo sapiens
ggccctgagagatgaggtcacagggctaagtggtagagactagataagccctatagctgcctggctccgccatccctgcccctaaacacccccatactctyctataggtgagatatatcagccacccgtctgtgcatcgtggggcccctctctgctgatccaaagagtccctgcccagtttggttggcacgcccgctgtgt

SEQ ID NO: 33165 - DNA, 201 bp, Homo sapiens; identical to SEQ ID NO: 4329

SEQ ID NO: 33166 - DNA, 201 bp, Homo sapiens
caccagaaaaatgtgacaggactcttaatttcttcaccttttggtgaagaccatttttctttctgttttcttccaaaaatggaagaaaattctggaggaaraatagtgctcctttccgggacattcacatttcccctgctaccgacaaccatagccccagacatacctgcagctgctgccctacaatagggcatggcccga

SEQ ID NO: 33167 - DNA, 201 bp, Homo sapiens; identical to SEQ ID NO: 4330

SEQ ID NO: 33168 - DNA, 201 bp, Homo sapiens
gcaagttgctgcttctctcggcccttagttcgccctttccaaggctgtctcccagagctgccaaagaggccactgttggggggaagtctctataaaggctycctaaatggtggttggtatgaatgcctcgattatcactgttgtcatcattggcagggtggatgctgggcacaagcccatgatggcatttccccacgcagc

SEQ ID NO: 33169 - DNA, 201 bp, Homo sapiens
tgtagtcatgcccaccagatgcccctcacactttactgtgaaatgacacattgccattgaccagccagccagtgatccttgacctgaacttcagggaactrgctgtgtcagcagcagtgagatgtcaaccaagtgctagaggtgggagtgggagggggaaagggacagacagtcctgatctcccactgtgtatcgggcacc

SEQ ID NO: 33170 - DNA, 201 bp, Homo sapiens
gcagggtcatggccttgtctgctgatcccagtgggaggcatcaactggcctgaggcttggaccaccaggcctataggatcagaggagaatggtggagaatyacttcctgagagggatgcttgttcccaagtgctttctcaaaaagtggagaaagctgcttccctataactaccctccaacccacagacatctttcctatcc

SEQ ID NO: 33171 - DNA, 201 bp, Homo sapiens
taattttgccaaggtcactcctatctggactctttttcctgatggaaaaagatggagtcaggagtcattggaagagagatttcttttccaaagtaatttcrcttctgtcctctttgaagttaggcaagttctgggctcgaataatggttctgcatcttccttaggtaagttattcaggagaagatttgattttttttggtt

SEQ ID NO: 33172 - DNA, 201 bp, Homo sapiens
gcaggggcgagactggaaacagggagaccggggaggaggttgacagtgagggttgcatgatgggagcctggcctaggagggcaacagtggagatggtgagaaggagatggatcccagagatacttgggaaacagaaccaacagcatcgatgattggctggatgaggggttgaggagagagaggagtgcatgattatgattt

SEQ ID NO: 33173 - DNA, 201 bp, Homo sapiens
gatttcccccttgctcaccaatttagctgtcaaagtaaataaatgtgaagctgggtctccagcctcccccagctcacattaccttcctagaattactcccyggcagggtcgaaccattgctgggggcctcccacagaattatccagttactaatgaagcctctttcaaactgaacccttgggcctagactcaaatggggga

SEQ ID NO: 33174 - DNA, 201 bp, Homo sapiens
gtgtgacagtgggtgagtttcttagctttcttgcatactcattccctcatctgtaaaaatgaggacaacagtatctcaaagcagtgttctgagcatcaaaygaggtaactgaaaatcctcaacattcagcaagtgccgcataagtattggctgctcttgtgatggtgggagtggttttggttggcagaactaggagtgcag

SEQ ID NO: 33175 - DNA, 201 bp, Homo sapiens
cctcgaggctgaggctgccgaggctgtcgttccaggtgtggtttcaaaactgccgggcgcgtcataaaaagcacacgccgcaacacccagtgccgccctcsggggcgcccccgtcccgccttccctccgccctgtccgacgacatccactacaccccgttcagcagccccgagcgggcgcgcatggtcaccctgcacggct

SEQ ID NO: 33176 - DNA, 201 bp, Homo sapiens
gtgggacgggggtgggcggggcctggggaccgcgggcacgccccggagctcgtagctgggctcggcgcggagggtggtgcgtgcacgtggccatccttctscaggaggcgacgaggcagtcccgcctggggtctcccggcggcgcgtccgactcttttcctcgaggctgaggctgccgaggctgtcgttccaggtgtggtt

SEQ ID NO: 33177 - DNA, 201 bp, Homo sapiens
gctcagccacctcccatgccctcctcttgcaggtcatcctttttcagtactaacgctgccggcacttccgcatctgcccgtgggcgccccacagctgcccytcagccgctgagatccagtgtccaagctgcggccaggagtccacccacctccgcatccacccccgtccgccatcctgcccaccaccaggtcggttcccga

SEQ ID NO: 33178 - DNA, 201 bp, Homo sapiens
gaagaagaaacaggatttgccaaaaattacatactagtagatttgcctagctccaaagcccagcctcttaactaccataccataccatatcataccatacsacaccaccttggccctaagctctagggcaccttaatcagatctcataaagccaaggaggcttctgggatgtagctgcctctgttttagtttcccatctaa

SEQ ID NO: 33179 - DNA, 201 bp, Homo sapiens
tccccatggggctggcccctgaacccactcatctagaccagcactggcctggccaggagaacagtgctctgagcactcaggggagcatcccctgcctccaycgcatcgtcatttggccacacacacctgtgaggttccagagccacatttcttcctggttgtgtcccctgatcccacaaatccaacacttggaaagttctt

SEQ ID NO: 33180 - DNA, 201 bp, Homo sapiens
ggaccagggtctctaactataaggggaaaggaccaggtttctgagtctggagaccaggctctcccatactgtgttgacatatgaggtttccttttctctcygggcctcagtccctacatctgtgcaagacagatactggactagaatgatccctaaatctcttctggctctgacattgtgattccccagattgcccaggaa

SEQ ID NO: 33181 - DNA, 201 bp, Homo sapiens
actaaacaaacagtagtagtcattgctgttgtcatctagttcagtgcaggacaaggaaaacgagaactcagagttaaacagtttgcctagtgtcacaaagycagtaagtgcttatctgtctgttcatctaagaaactgcacttctgtacagctggcgctatagcttatattcatctctggagcaggatcgctagggttcct

SEQ ID NO: 33182 - DNA, 201 bp, Homo sapiens
ccggggtcggctcttcgagggggagtaggctgggttgggcaaagctgtttcctctcccctttactgcgggacggggaacagagaccgtggtctgggctggrcactccgctggggaagccgcgtttccgaggtccggaaccgcctgtgcttaggggagcggtggattcaacgaaggtgctctgcgcctcctgagggaaccgc

SEQ ID NO: 33183 - DNA, 201 bp, Homo sapiens
cgtaaactgagctgagccacgaggagcacaggaggatcctagagctgggacagcttccagcatttcgggagacacgcggagcatgagaaagttgctgagarttcactagcggcgcctacctcggaccaagggtatgaggacactgtgactgacctacctgtgtaggcgcagaacggactcgggcgtcggggactcgcggga

SEQ ID NO: 33184 - DNA, 201 bp, Homo sapiens
taaagggttaactgcttcccctcgtgtttatgggggtgggggttcagtgagtgccctggaggctaaagttcctcttcccagctaggcccaaacgacttcakgcaagcccctagccttctctggccctccgccttgagcccaagctctgtcgcgggctccagcgggagaagcctaccccctcccgcaaagcgagggtcccag

SEQ ID NO: 33185 - DNA, 201 bp, Homo sapiens
tgcacagagcctgttaaaggtgccaaggatcaggggcgctataagtaccaggggtctgagctacctgctaatacttggtgtagagtcaataagaaatctasatgatccctttggacttggggccatgacctccagagtccctgccaggactctgtccatacactctgttgaccaaacttagatctgtctttgctgcttaga

SEQ ID NO: 33186 - DNA, 201 bp, Homo sapiens
agatgtatgttcaaaatttattgctgtgttaatggtagtgaaatattggtccagtcatatgatggagttttatgaggcaaatgatgtgatctacattcacrtggaaacctttctttgacgtgcttacggttgggggacagattctagccaggcatttgtagcatgaacccatatgtaaaattgtgggtgtggcctgtgtat

SEQ ID NO: 33187 - DNA, 201 bp, Homo sapiens
ataaagcagatatgtaatatgtagtaagcctgatattgtaaaaatatagctatgatggtagctaaaatgcactgagaatttatagaccaggcgttatgctrtattgttacagtaagattatttttttaatgaacatttgaacagtgattattcctggtcagtgggtttatgggtgagtagtgtttctatattttctttctt

SEQ ID NO: 33188 - DNA, 201 bp, Homo sapiens
acatacatatgcacatatgaattttaagtctagtttgctgaataagtcttttcttaatacataaggctcagtatgttccatgtgccttttgaaactgtcgyccaggctggggtataatggggcgatcacagctcactacagcctcaatcctctgagcccaagcaatcctcccacctcagcctccagagtagtgggactata

SEQ ID NO: 33189 - DNA, 201 bp, Homo sapiens
ggtaataatttaatttctattgataaaagaatttattactgaatgtatagtggagaagaggaagcttattaatgatctgaatttatgtgaagtgtacgctrtattttattttcctactttcttccatgcctaataatatttttcaagatttttagtggcagtgcttctctcgtttttctagttggaaactttcatattatt

SEQ ID NO: 33190 - DNA, 201 bp, Homo sapiens
acatcttcacaatggcggagcaggagagagagaaagagagagcaaatcttggaatatactaagagtctggtgttgattgcctattttttaatgctaataastaagtgttctttttctctgggggatttcttaactgttctattgtaaaagcaactactataattgccttttataatacccagatcgctggatttgctatat

SEQ ID NO: 33191 - DNA, 201 bp, Homo sapiens
agatttcaatatgctgtgtaaggagaggaaccaaaacaaaaggacaaaaacagttttttaaataagtgcacacttaggcttacttagagaacgggatgttyttattagcagatttgggacttgaggcatgcaaaactttcagagagagccatatgttcttatgcatgccagccttgcgacagtcacgattctgtggttctg

SEQ ID NO: 33192 - DNA, 201 bp, Homo sapiens
aactccttctctgtccagttttgctcctttgctggcaaggagttgtgatcctttggaggagaagaggcgttctggtttttggacttttcagccttgttgcrctggttttccctcatctttgtggatttatctacctttggtctttggtgtcagtgacctttggatggaatttttgcgtggtcatgctttttgttgatgttg

SEQ ID NO: 33193 - DNA, 201 bp, Homo sapiens
ttctctcatcactaatatatttctgttgcttcaatgtgcaaaacactgtgctagatattgtggggaagactaaaatgaataatagctaacactaggcaagktcacattgtttgtcagatgctatgctaaatgctagatgtgggtgatttcatttagtgctgaaacagccctgtgacagagctcttgttagtttctctctct

SEQ ID NO: 33194 - DNA, 201 bp, Homo sapiens
tagctatgtgcccaggatgtaaaagtgggtttttggttaaaaagctagcagttttgctattactggtgcctataattaattaattgtgtgtctgtatattwatctatttgtgagcttgtaagtgtatgtatatgtgcatatgtccatatgtacatacacaacatacatatgcacatatgaattttaagtctagtttgctga

SEQ ID NO: 33195 - DNA, 201 bp, Homo sapiens
ctgtgctagatattgtggggaagactaaaatgaataatagctaacactaggcaagttcacattgtttgtcagatgctatgctaaatgctagatgtgggtgrtttcatttagtgctgaaacagccctgtgacagagctcttgttagtttctctctctctctctctctctgtctctctctctaccgtttgaggaaactgatgc

SEQ ID NO: 33196 - DNA, 201 bp, Homo sapiens
gaatacaaatatgtaatattctttttctgagaagcctaagtagtttttcttgctatgcctgaattttggcagataaacgtgtcaaaccaatttgttatacmcctgttgtaacagaagtgacaaagaaaaatcacagttcagagatttgacaggtttgtactgaaatggtgtttagtatatctaggtgttctatctagaaaa

SEQ ID NO: 33197 - DNA, 201 bp, Homo sapiens
agattcctaatacttctagcctccagattttttatcttatatctcattctttttacctttaagatgccatctggagagatttttggccaggttttctaagmtactgtgtaggttgtttgagctgttgtcttttattgatggtgcttctgctcctcatttgcctcataattttctctggactcatctttaattcctctggag

SEQ ID NO: 33198 - DNA, 201 bp, Homo sapiens
tctaaattgttgcttttaatgacaaagtcatgctcctcctggaggatgtgatgggagctgtgcagtgagattaaataggtactggaagaaaccatagtttsgtgttttgcagttgttcatagatcaaatagttctttgctttgtgtgaaaaatccctcagcagcgagagatgaggaggatgaattagatcagcatgaattt

SEQ ID NO: 33199 - DNA, 201 bp, Homo sapiens
ttgtcttgtctttttgaattcatgtagtacttcctttctcaaataaccccagaaggatggcaaggggtgtacgtgctgtgttttgtccctccctcttcctrtgcccaactggtaaggaaattggatgttttactacgatctctggctccccacccctgccccctgctcatatagcttgggaagtgatgatatgcgctgagt

SEQ ID NO: 33200 - DNA, 201 bp, Homo sapiens
ctatgggattctcatttgtttaaattatacatgtgattacttgacacgttaaagtgtacacaatttaggaaaatgggattaaaaatccagaaacacttaaraagttcttatagtgaagattaaaaaagtgatttcatttaatgactttcagaaaaaaaaatcactgggtggaacataaatgtttgaagtattcttgaacaa

SEQ ID NO: 33201 - DNA, 201 bp, Homo sapiens
ttaaaaaagtgatttcatttaatgactttcagaaaaaaaaatcactgggtggaacataaatgtttgaagtattcttgaacaaaagtgctctctgatactayagacataaaaattcttaaattacccgtgaaatatgctgttcctagggaatggttgtgaagtactttttagtcactcacctgatagagaaaagtagtctga

SEQ ID NO: 33202 - DNA, 201 bp, Homo sapiens
ctacagggccaactgagggacttgagcatataagattttggtagacacaggggttctaggttctagaaccaatcccctgcatacactgagggacaactctrttggcacagagttgattgaggcagtaggaaatgggaagataaagctggcagctctttccacacatggaaagcataataggaaagaagggcttaagttagc

SEQ ID NO: 33203 - DNA, 201 bp, Homo sapiens
cgtgaaatatgctgttcctagggaatggttgtgaagtactttttagtcactcacctgatagagaaaagtagtctgaaaagctcatacacactgaattactwcttcagtttaactttttttgtgcctgctagttagttgccaggcactttacattgagtagtgaataacagacacctgcttttcaagggctgcttctgtagt

SEQ ID NO: 33204 - DNA, 201 bp, Homo sapiens
tcccctcagatgggtacctactatttcagatctgttttgtttagagaactacagcaagcttagtagccatttctgatacctgttttagtagcaaattatastgcttcctgttcgtttgatttcttccagggacatattttattttcctgcctccttagaatgtctggcaaaaagctttatttcatctgaattctgctgggt

SEQ ID NO: 33205 - DNA, 201 bp, Homo sapiens
agtttccgtgtagttgagcagttttgagtgagtttcttaatcctgagttctagtttgattttactgtggtctgagagacagtttgttgtaatttctgttcytttacatttgctgaggagagctttacttccaactatgtggtcaattttggaataagtacagaactcacaccaaatcttttaactacccatgcttctagaa

SEQ ID NO: 33206 - DNA, 201 bp, Homo sapiens
cttgtctgaaaagctgttggaaattagtgtgcactgactcccccaagatgcccctggaaatcaccactgcttgctctaccaaggtaccagaaaatctgccytggaaaatgagtcctttggattaaatctttccatcttcaggacctgcttgaagtgcaggtgtccctggagagggagctaattaaatcatttaacacttaa

SEQ ID NO: 33207 - DNA, 201 bp, Homo sapiens
atttctccattgctcagtgtttttctagggacactagagaatttggactagctgattctcagggtttcttccagtactgaacttgcctgaaaagtgatacrtaaccacacgcaaacttccatggggtgtttgaataaaaacttatatcctaaaaataaaataatgaagtatggattgtaagaacaattaggttaattacaa

SEQ ID NO: 33208 - DNA, 201 bp, Homo sapiens
aactactgtaatcattttaatcagctgattaatttgctctagcagcttaaaatgtttttgctccattttactttttctactgcatgatagaaaaattgttkttctgtgaatgagaaagttaaaatttgtgctcaatggcaggaccccagagagatgtttctgggaattgagattcagaggcagcctgcattcagctttctt

SEQ ID NO: 33209 - DNA, 201 bp, Homo sapiens
gcacgatggcaggcacctgtaattccagttactcgggaggctgaggcaggagaatcgcttgaacctgggaggcagaggttgcagtgagccgagattgtacyactgcactccagtctgggcaacagagtaagactccgtctcaaaaaacaaaaacaaaaacaaaaacaaaattaatgttcagcgttgttggttagtaccaat

SEQ ID NO: 33210 - DNA, 201 bp, Homo sapiens
ggaacttttaatggacatccgaattacaggggttttgtgagaattacattgttggatcccatatgtaaaaatggaggctaatctatcaattattaaccctkgttgtactttaaaattctgattaagaaacgatttttggcaggagaggctattagccaagtgtaatgtatgtaacacttactttataaaggtatgttgaat

SEQ ID NO: 33211 - DNA, 201 bp, Homo sapiens
attgtgaagctgggtgtgacagtcatatgatggatgacaggcccaggatggagagacatcttgatagcatggagcagtggacacaaaattgaacaaagatrtgtacacagtggtgtaatttggtttgaataaaaccaaccgaaaaagtaaagatgaagaaggaaataacaggtaaaacagagctagggttttagatgaaat

SEQ ID NO: 33212 - DNA, 201 bp, Homo sapiens
ctgtatccaccctcctagcattaattcagtacgcctaagtgaagttgctagctgctaaagaaatagttggagtgctattcagctgtgaggctaaaaatctygaactaaaacatggaaattgtttttctaatttcatttgggtaaaaatgaattcccgtgaatacatgttagcaaagcaagcttccttttattatttctcat

SEQ ID NO: 33213 - DNA, 201 bp, Homo sapiens
ctgtgttacataatatatcattgatggcatgtgccatcatttattcagccagtcatctcatggtgaatgcatagatcagcattatttataaagtgtcacgwtgaacactttacatgtatctttggccacctatctgtgtttttagagctaacactcaggagttatgttgctgtatcaaaaggtttacctgttaagttttga

SEQ ID NO: 33214 - DNA, 201 bp, Homo sapiens
ttggtgcttaaaaaaattaaaatcaacaaggagaaatctacccaaactgatccaatatacactgagctaatgaaggaaggtggtgtactttttgtggggtrgtatttttattttgattatgttgaagtggtagagaaagaaggggagagatctgggggtctgagagtcagaggaggctacaaatgatatagcaaagcaaat

SEQ ID NO: 33215 - DNA, 201 bp, Homo sapiens
agaattttgaaaaaggcaagtttttcatttaagtgcattacatattaagaaattcatatcaaacttttgaaaaacaagtttgacaaaaaagcaagtgataktggctctacaaaatgtacttctgaactttctatatgatgtatttctataatatatagaagtatatagaaatattctataatatagaaatatataatcata

SEQ ID NO: 33216 - DNA, 201 bp, Homo sapiens
tgtgtttttagagctaacactcaggagttatgttgctgtatcaaaaggtttacctgttaagttttgacccctattgcaagtttgcattctggaatagatgyaccagtttacattcctgagagtgcattggagtgcacttccttgtcacgcttgctgatgatctctgtgcaagaagaaaatagttctggctaccacaatctc

SEQ ID NO: 33217 - DNA, 201 bp, Homo sapiens
aggtggtgtactttttgtggggtggtatttttattttgattatgttgaagtggtagagaaagaaggggagagatctgggggtctgagagtcagaggaggcyacaaatgatatagcaaagcaaataactagattatgaatcttttgaaatcatgcaggggaacaaaatattgttactgccttatcaaaaagtattttctcct

SEQ ID NO: 33218 - DNA, 201 bp, Homo sapiens
ccatcttctgtttgtgagcgcgagagaaggtaggatcagatatcttgggtggagcccagtctccagctcaagacttgagttgtaaaaatcgtgttgtattktgggacaaaaatcaagcagttcattttggctagggtttaggggatagaaatgggtggaggagagtcataaggctttctaaaataagctgcactacagcag

SEQ ID NO: 33219 - DNA, 201 bp, Homo sapiens
gaataaggacattttcttatataaccatagtacagtgataagaaacaaaactttttatatccagtccacaatctgaacttaaattttgtcagttgtcccartaataacttttgtagcatttctctcctccactgggtccaggatccatccacttgtattgtgtttaattattatgtcttaagtttcttttaatcttgaatc

SEQ ID NO: 33220 - DNA, 201 bp, Homo sapiens
acatttttggttaccacgactggaaaggtgctaccagcatctggtaagtagagctcaaggatgctgctaaacatcctgcaatgcacaggacaaaaaaatayctcagtaaagaattatctagtccaaaatgtcagtagtacctccattgatatacccttctctaatgggattctaccagggttggagagttaggaaattgtt

SEQ ID NO: 33221 - DNA, 201 bp, Homo sapiens
ttgctcagaagctgatgcttcagtctagaggcagaattccttcttcctcagagtcagctcagctttgttcttagggcttttccattgattggatgaggccyacccacattatgaaggataatcttctttacttgaagtcaacagattgtagatgttaaccattttcacaaaacagcttcacagctattgcattagtttgat

SEQ ID NO: 33222 - DNA, 201 bp, Homo sapiens
ttgatgtaaaggtatttatagtctttatttacctggttttgtgtgaatgttaatgcgcttgactgtagggtgctggcctagacctggcttggggctttatwtagtaaatatgctgtatcactcttctaaagtttgtaacattctatacttggaaacactttggtccccaaaggtttcagagaagagattgtgaacttatat

SEQ ID NO: 33223 - DNA, 201 bp, Homo sapiens
ggcccagggtagtttgtagtttcaattcacaaaactggttagtagaaaggggctagccagaaattttctcttaacaaatgagaaatcctgattgacttgcwttggccttgtcaacagagtcatcaggcattaggttctagaccacttattaaccagctcagaaatcccaaagtaattattagcacttttttcttctcttta

SEQ ID NO: 33224 - DNA, 201 bp, Homo sapiens
ccatatgaattttagggtgggatttccatttctacaaaaaatgttactgagactttgatagggattgcattgaatctttagattgctttgaataatgttgrcatcttaataatattaagtcttcgagttcatgaacatgggatgtatttccatttatatatgtcttttaaaatttctttcagcagtgtttggtagttttca

SEQ ID NO: 33225 - DNA, 201 bp, Homo sapiens
ctttgatttaaagtttgttaaaataatcaagtttaaaaagaaagtatatgggttgagtgatatccctcccaaattcatttcattttcccccggaacctcaraatttgatctatgtcagctcaggctgccataacaaaatatcataaataatagaaatttattttcttgcagttctggaggttatatagtccaagatcaagt

SEQ ID NO: 33226 - DNA, 201 bp, Homo sapiens
cttataaggttaccaatcctactggattaggactttgacctcctgacttcctttaattacttcctaaaagcactatctcaaaatacaattacattgggtaytggggtttcagcatatgaatttggggaggacaaatagcagtcttcttaccttttttacattcatcacttaccaactctattcctttagcgtaggttgggc

SEQ ID NO: 33227 - DNA, 201 bp, Homo sapiens
atttcagatgttgtcagataagttggttttctttaccccccaccaccatcctttgagcccaagaccgatttgcttggttgtctgctatacaaccacatggrtattgttagactttgtgtttctgcagttgaagtacttacacacttccactctaaaatcttctctttgtcctgtgttctttatctcacatttgtatcatca

SEQ ID NO: 33228 - DNA, 201 bp, Homo sapiens
aataacttttgtagcatttctctcctccactgggtccaggatccatccacttgtattgtgtttaattattatgtcttaagtttcttttaatcttgaatcaytcttcatccttttttctttcgtgaccttgatgtttttgatgagtacaggcaaattattttgtagaatgtgtcttaacagatttgtctgctgtttcttcat

SEQ ID NO: 33229 - DNA, 201 bp, Homo sapiens
taaatacaatttttagatcttcatttgtgaattgtctgtgtcttttggctgttttttacatggtgtttatcttgtcttttaaacatatttggtatatattwttagtgttattggctttttaactgtgatacatgttgcagcaaatacttttttctagcttgtcgtgtattcttttttgattgggatataattcacatacca

SEQ ID NO: 33230 - DNA, 201 bp, Homo sapiens
caattctttcacctcagcctccagagtatctgggaccacaggtgcacactaccatgttcaactaatttatttttatttttgtagagacagagtcttactaygttgcccaggctggtctcggaaatcctgggctcaagcgatcctcctgcctcaggctcccaaaatgctaggattacaggtgtgagccactgtgcctggcct

SEQ ID NO: 33231 - DNA, 201 bp, Homo sapiens
ttcttctttcccctacattccagaactaaaggacaagtaacttcaaaagtgctgcctccgggctcccttcctggtacctattctgcttcacttttgccacrtcatgagaaggggtaaccagtctcttaagtcttttctttctaaatattcctctgtctcttcctctcaggtctcacttgaacaactaaaggggcagcctcc

SEQ ID NO: 33232 - DNA, 201 bp, Homo sapiens
aagcagttgtaccattttacaattttggcagtgcttgagagtttccatttctccacatctctaccaatacttgctgttgtctgtccttttgactataaccrtcttattgggtgtgaaatggtatcttattgtgatttgatttgtgtttctcttaagactaaggatgttgagcatctcttcatgtgcatattggtcatttgt

SEQ ID NO: 33233 - DNA, 201 bp, Homo sapiens
aagagttagcagagcctggtaaaggaaacagcatgcaagcaggcaagagggaacggttgagttcctgaaaaaaaaagataagttgccaagaggcagggtcytgtgaaatcagactgcatagtattgatccagctggtcattctggctaagttcttgagatagacctcactgatggatacccagtggtgaggagattttata

SEQ ID NO: 33234 - DNA, 201 bp, Homo sapiens
actggaagaaaccatagtttggtgttttgcagttgttcatagatcaaatagttctttgctttgtgtgaaaaatccctcagcagcgagagatgaggaggatkaattagatcagcatgaattttccttttcctctagaaatgcttcagacacctaagggccttaagccagggtccataagtggaaagctgtaagggaaaaaag

SEQ ID NO: 33235 - DNA, 201 bp, Homo sapiens
aaaagtccaaagttggcttatttttaaaaattcagcgcttttagtaacgtttattgatttttttaaattccaaaaatgacataagatcattttgaaaagtktaagtacaaaaaagtagtaatattatcaaccaactgtatggtacttaactgtgcgctagatacaattctcagcactttatgtgcagtaactaatttaatc

SEQ ID NO: 33236 - DNA, 201 bp, Homo sapiens
ctgtttatgtaataccatgatttttttaattaaaaattttattttgtgttagttttagattcatatgcagttgtaagaaataatacagagattttctgtaktctgtatccagttttccccagtggtaacatcttgaaaaacggtagtatggtatcaaaaccaggatattgacattgataacagtctacaggttttttgcag

SEQ ID NO: 33237 - DNA, 201 bp, Homo sapiens
ctgagctaaatcctgaacatgtctcttgtccctgattatgtggttaattcagaattctaagctgaggaatatagtatctgttttgcagcctgaaaattatygtgggaaatcccttctgttgaacccagaagatgtcctagggatagaaacatgtctataggccctttaataaaaatgggattctttttaaggagcaacttt

SEQ ID NO: 33238 - DNA, 201 bp, Homo sapiens
tgattcatcatctccacagctggagtgggctgctgtgtgtacatggatgtatttccttatagccttctttcagccttccctactcaactatatttgagaawttcccctgttgtcttaaatattttcaaaaaacctgattgttgaatggctgactacctatttaaaagaataggtgaggtggggcatggtggctcacgcctg

SEQ ID NO: 33239 - DNA, 201 bp, Homo sapiens
ttttgtgttagttttagattcatatgcagttgtaagaaataatacagagattttctgtagtctgtatccagttttccccagtggtaacatcttgaaaaackgtagtatggtatcaaaaccaggatattgacattgataacagtctacaggttttttgcagtttacttgaactcatttatgtatatatgtgtgtatttactt

SEQ ID NO: 33240 - DNA, 201 bp, Homo sapiens
gtgtcccgctaggctccgcgccctcgcgcccatagccccggcggcggcacgaccagaggcggccaggggagcgcgccgccccgctcggccctccagtcccsctccgccgcctccctcccgcacagcagccgccagcgcggcctcctgcaccatgtcggtggccggcctcaagaagcagttccataaagccactcaggtaag

SEQ ID NO: 33241 - DNA, 201 bp, Homo sapiens
tgtgcacaaattccattctactggttgtaagtgcctattcttacgatatctgtgagcaaaaatcactgaagaagatataactcagttttctttacatattstgatgccttacgggggagcaaaaactgaatcgatgttgtccaatagaaataggatgcaagccacatatgtaattttgaattttctagaaaccacattata

SEQ ID NO: 33242 - DNA, 201 bp, Homo sapiens
gtggcatgcacctgtaatcccagctactcgggaggctgaggcaggagattcgtttgaacccgggaggcagaggttgcagtgagccaagagtcaccattgcrctctagcctgggcaacaagagtgaaactccatctcaaaaaaaaaataaaataaaataagtgagtgaaccataaattatttaaacattcttttgttgttgg

SEQ ID NO: 33243 - DNA, 201 bp, Homo sapiens
atcatttggggcctctttgtggggagagattggaagtgagtcacaagcatgagtatagaaattggggaacaggtagtaaaataattaccgtcattcgatgwtatgattgtatacctagaaaactttatgggagcaattgaaacaacatgacgaacaataagcatgttcattttaacatacagaaatattagcatatgggaa

SEQ ID NO: 33244 - DNA, 201 bp, Homo sapiens
ggctccatttcacattgttatgaagagctggtagaaataaggatagtgcagcattaagagatactctgacctgaatcttactggtatgtgatcagtatatrcctaaaacaaccattcagtaaacatttatggaggatctgctacgcaccatacactgcattttgcactgggtatccagtgaggaacaagtgtataaaagga

SEQ ID NO: 33245 - DNA, 201 bp, Homo sapiens
ctggagattaggaagggtagtgtgtggcagggtgaggggaaggttatgaggcgataacacgacaaggtgactgtagtcaataataacttaattgtacattkaaaaataactaaaacagtataattagattgattgtatcacagaggataaatgcttgagtggatggatattctattttccatggtacgattatcactcatt

SEQ ID NO: 33246 - DNA, 201 bp, Homo sapiens
tgaattcatctttaagctccttgaatggagggtctgtgttttatttctctttgtttccctctttccttgtgtggctcttgaaatcattatgaattgatctragcacttccttatggaggcatgcagaattaacagcataattgtggcaagaaatgtctttgccttttctttttaatgcaaatgagagttagtaacatgttc

SEQ ID NO: 33247 - DNA, 201 bp, Homo sapiens
atgtgatcagtatatgcctaaaacaaccattcagtaaacatttatggaggatctgctacgcaccatacactgcattttgcactgggtatccagtgaggaayaagtgtataaaaggaaaaatagcaaatacttacacagtgctttttaggtgtcagacactgttttaacagcttacgcatgttacttaatttattactccca

SEQ ID NO: 33248 - DNA, 201 bp, Homo sapiens
ctttaagctccttgaatggagggtctgtgttttatttctctttgtttccctctttccttgtgtggctcttgaaatcattatgaattgatctgagcacttcsttatggaggcatgcagaattaacagcataattgtggcaagaaatgtctttgccttttctttttaatgcaaatgagagttagtaacatgttctttgtattt

SEQ ID NO: 33249 - DNA, 201 bp, Homo sapiens
atcagtatatgcctaaaacaaccattcagtaaacatttatggaggatctgctacgcaccatacactgcattttgcactgggtatccagtgaggaacaagtktataaaaggaaaaatagcaaatacttacacagtgctttttaggtgtcagacactgttttaacagcttacgcatgttacttaatttattactcccaacaac

SEQ ID NO: 33250 - DNA, 201 bp, Homo sapiens
agcttacgcatgttacttaatttattactcccaacaaccctatgaggtagatactattattgtatccatttaactgatgagactgaagcacagagaagatragtaatgggctcgcagacatgcaactactaaccaaggcaaaccactgactgtgctagtttggaagggcagacagaagagggttggtgcagtactctgggc

SEQ ID NO: 33251 - DNA, 201 bp, Homo sapiens
tggtttatctcgtttttaagactgcatcctgcccgttaaaaatgcagtggctgtcagtttgaggttgttgctgcctcatgattagattcagggtgatgcartctcagttggaatattgcatagtgatgtgtccttgccaggatgtccaacctgcaggcaccttatgcccatcggtggcgatgatttttaacatcctttcac

SEQ ID NO: 33252 - DNA, 201 bp, Homo sapiens
catttgactgttgtgtctgatcatgactgttttaaatgacatgagtgttgagtaggccaactcactttcactctttttttggacttcatcatattctcaayaacaatcataacagcacattaatattaccctttaaaaaataacctgtttaaggtagtactgttggagatggtgaccggagttgttgctaattactctttt

SEQ ID NO: 33253 - DNA, 201 bp, Homo sapiens
tgccagcttagtgaaccagtgtactaaagaactctggtaacatgagttgatttgataagaaaacttaatataggtcccttctagaaaatgcactctcagtmgagaattgcattttgaaatataaatctcaagttcatcactccagttcatcactccataacaggtgcccgcaggcacattattttgcttttcaagatcatc

SEQ ID NO: 33254 - DNA, 201 bp, Homo sapiens
cttgaatggagggtctgtgttttatttctctttgtttccctctttccttgtgtggctcttgaaatcattatgaattgatctgagcacttccttatggaggyatgcagaattaacagcataattgtggcaagaaatgtctttgccttttctttttaatgcaaatgagagttagtaacatgttctttgtatttatcttgggta

SEQ ID NO: 33255 - DNA, 201 bp, Homo sapiens
catccttaaggggactggccagggtttctttccatggcagtctcagagcagcaagagactaagggtgaaagttgcaaggtctttagaggcccaggcccggraagtgtacagtggcagttcattaacattgtcttggccagtgcaagtgaccagaccagcccagattcaagggatggggagtagacttcatctagataggag

SEQ ID NO: 33256 - DNA, 201 bp, Homo sapiens
agcaggtaggtggtgtgggattcagggacattactctgcgtatatgtttcatctattgcagcagcctttcctgttacatacttataccctgtgggggcagyggacaagtacagttctgatacctgagactgtgcgaagaaagcaagccaggaatttgtgtgataggggagactccacaatttctcgtttgattcagcataa

SEQ ID NO: 33257 - DNA, 201 bp, Homo sapiens
gcagcaagagactaagggtgaaagttgcaaggtctttagaggcccaggcccgggaagtgtacagtggcagttcattaacattgtcttggccagtgcaagtsaccagaccagcccagattcaagggatggggagtagacttcatctagataggaggagccaccaggttacattgccaaggggtgtgcatacagggatgggag

SEQ ID NO: 33258 - DNA, 201 bp, Homo sapiens
taaattttttgatttagatcatagaatttctagagatactaattttcaaattttatacctcagacaggaatccatctttctgagttttgtgtagttatatktttggtcctaatttgtcagtaaacaggacttttatttcctccatagagaagtcagtgatttttctgtctggggtgtcttcttgcatgccccctggttgtc

SEQ ID NO: 33259 - DNA, 201 bp, Homo sapiens
taccataattagaggagaagagaaaacgggagagggcaactgttttccactggtctctgagaatactacattttgttatttaaaactacttttcatgtatrttttaaaacataaaatgtaaaatattctgtcttccctttgtactgtcctgaggacaaaacctcagtgaaggtgaaaggtcacgatgaactttttctggtg

SEQ ID NO: 33260 - DNA, 201 bp, Homo sapiens
ttcacagtgataggtgcgcaaacatgattttccatctccatgctctttccatgtttaccatttagcctttgacattctgctctaagcaagagtctcatatmatttctatttatttattttttgtgtgcactcaagagttcccattttccgttggttcataatttaccactgtactcaatttgagccctcaatcaaatttga

SEQ ID NO: 33261 - DNA, 201 bp, Homo sapiens
gtgattgtttgttgctgtcagcacagtataccttactagaactgaattgacgtctctactttttgagcattttttgtacattgttgtggtatttctttgtrgtagtcatctcacatgctttaaacttcgtatgtcttatttccttccttagtaggtcacattgggagctcatcttccccttcacttaggagacagtgcaat

SEQ ID NO: 33262 - DNA, 201 bp, Homo sapiens
caataaacatttgtatctctcatagcacataccagatttttaaaatttggcgggttttaattcaggacttaaggggtgaattatcttattaaataaataaytcaagtatacagggaagtgaaagacagtcatttacctaatgctctgaacatctttcttgagataaagtagtgctgtgaactgataaagttcacataaagc

SEQ ID NO: 33263 - DNA, 201 bp, Homo sapiens
gagcagtcgcctttgagctctggcaacacactctcctgtgcatatgccacatgttttgcttgtttgctttttgtcatgtaggaacttctgtgtaataaagsttcttccctaatcccatgtctgttcatctggcttacttactcctttcagaatcagcccagcctacaggaagcttttcccagcctactcttctctctcaac

SEQ ID NO: 33264 - DNA, 201 bp, Homo sapiens
ttggctctttggttttggttcccagagggaggctctggccgcaggacacagcagatggagcctgtgggagcccatgtttgtgcctcggcaggtgtgggtcygggacgggtctgacctccacctggcacctgcttcttttattgcctccatatgtcaaggggatatgagcccatgtgagtgctttcagattgctctggcctg

SEQ ID NO: 33265 - DNA, 201 bp, Homo sapiens
ctcacgcatgtaatcccagcactttgggaggccaaggtgggtagatcatatgaggttaggagttcaagaccagcctagccaacagggtgaaaccctgtctstactgaaaatactaaaattagctgggcatggtagtgggcacctgtaatcccagctactctggaggctgaggcaggagaatcacttgaacccaggagttgg

SEQ ID NO: 33266 - DNA, 201 bp, Homo sapiens
aaaacaggaaaccttgcaaacgaaactgtgggtaatatgtagttataaaccatctttccaggaaggagctgaaagctctgcatgatccctctattataaakttttccaactccttttgaaggatgttaagtaatttgccccatagtctatgggaatttttcacctcggggaaatggggctgagaaagttattacttttaac

SEQ ID NO: 33267 - DNA, 201 bp, Homo sapiens
catgtgagtgctttcagattgctctggcctgaggccatggttgggaatggcaggagcatgttgcgggggacagggacctttgtgagggacagttgagccastctgaggttagaggaccacacagctgccccttctagaagcctcgctgggccagaggtgtggcttcattaaggtcctagttggactgtgtcctcatctctc

SEQ ID NO: 33268 - DNA, 201 bp, Homo sapiens
attagctgggcatggtagtgggcacctgtaatcccagctactctggaggctgaggcaggagaatcacttgaacccaggagttggaggttgcaatgagctgmgattgcaccactgcactccagcctgggtgacagagcaagactctgtctcaaacaaagaaacaaacaaaaagtatatcacaaatattgttacatattcttc

SEQ ID NO: 33269 - DNA, 201 bp, Homo sapiens
aaagtttttagctctagatattcaaagaaaatcagtgttcatcctgttgaattcatgggaacatcattgttttttatattatataaaaggaaactttccarttttcttaaatatacaattttttgatagtgagaaataaaattaactcaatttagatagacaaaatgcctttactcattttctaagaaaatcttaaatttc

SEQ ID NO: 33270 - DNA, 201 bp, Homo sapiens
ctgaggttagaggaccacacagctgccccttctagaagcctcgctgggccagaggtgtggcttcattaaggtcctagttggactgtgtcctcatctctctyttatttcctgctctgtttttgattttattttcttaaaatcttcatgctcatggatttttaaaatggcagtaatgatttttatttttttaaagagtaaaac

SEQ ID NO: 33271 - DNA, 201 bp, Homo sapiens
tggcagtaatgatttttatttttttaaagagtaaaacaatggcagtctagtgcagttactttaagacatatcaggtaacctttaccagtaaatcgaaggcyattgaataaggaatgtgtaaggatctgtggactccctgaaattagatgcaaaatgttatatgtttgtatgaatgcattttttggaggaatggctcccata

SEQ ID NO: 33272 - DNA, 201 bp, Homo sapiens
aggaatgagatcagatcctttgcaggggcatggatgaagccagaagccatcatcctcagcaaactcacacaggaacagaaaatcaaacactacgtgttctygtaagtgcgagttgaacatagagaacacctggacacagggaggggaaccaacatgcaccagggcctgttgtggagggaggcaaggggagggaacttagag

SEQ ID NO: 33273 - DNA, 201 bp, Homo sapiens
catactgcctttcgtttcataacagtcttccaaaaaacagtattcttgtgactgttactgagtataaactggatacttctggatacggctctggttgtacrtaagtgtttttcaccttgtgttacacacaaacacacaccctactccgtttgttggaagcctgcaagtgatcatgcgtatcaatgctaggagtgacgtcaa

SEQ ID NO: 33274 - DNA, 201 bp, Homo sapiens
tacttctggatacggctctggttgtacataagtgtttttcaccttgtgttacacacaaacacacaccctactccgtttgttggaagcctgcaagtgatcaygcgtatcaatgctaggagtgacgtcaagtagactggctgggaagggcagaatgtggtaggcggttaaaaagcaaaaggcacatgctatatgactttttgc

SEQ ID NO: 33275 - DNA, 201 bp, Homo sapiens
catggaaagcataataggaaagaagggcttaagttagcaggtaggtggtgtgggattcagggacattactctgcgtatatgtttcatctattgcagcagcstttcctgttacatacttataccctgtgggggcagtggacaagtacagttctgatacctgagactgtgcgaagaaagcaagccaggaatttgtgtgatagg

SEQ ID NO: 33276 - DNA, 201 bp, Homo sapiens
gctataaaaaatgatgagttcatgtcctttgtagggacatggatgaaattggaaatcatcattctcagtaaactatcgcaagaacaaaaaaaccaaacacygcatattctcactgataggtgggaattgaacaatgagaacacatggcctctcacattctcttacttaacctctgcttgccagcttagtgaaccagtgtac

SEQ ID NO: 33277 - DNA, 201 bp, Homo sapiens
tgttgaattcatgggaacatcattgttttttatattatataaaaggaaactttccaattttcttaaatatacaattttttgatagtgagaaataaaattawctcaatttagatagacaaaatgcctttactcattttctaagaaaatcttaaatttccggataggaaaataaatatatattttttgaaatccattttcaaa

SEQ ID NO: 33278 - DNA, 201 bp, Homo sapiens
taaataacaaagaacttttgcacagagtcagaggatggtcttttatttattatcagaggtgatgcctttctataaatattgagaatacagtagtgtcctayagggatagctatttcgtctttctaaagagcttgtgcattaagtaatgttgttctttaataatgcacttaaattacatttagatttttttgctaaatgtgt

SEQ ID NO: 33279 - DNA, 201 bp, Homo sapiens
tacattatttataagcaggagaagacaaacgaaaataagacccagtgtgaaaaaaataacagagatcgtgagcacacctagtgctcagctctggtttccartaccatccttcagtaaaaggaaccagggcacctcggagaaatggctgattctagtatgggggcaggaagcatgcaagatgagcctggagcattttgtagt

SEQ ID NO: 33280 - DNA, 201 bp, Homo sapiens
taattctgtttgttcctctgtctgtagcaactagaacaactccaggcaagtggtaggtagcactgagtaaatatcatgtgaatgaaagaattctcaaattstgccccttagtttcctctgaatgcttaaccgcacattctgtgtgactcttggaaagattgttctctgctgtgtgttatctttttgtgcctgtatgagact

SEQ ID NO: 33281 - DNA, 201 bp, Homo sapiens
tttctttttcacgcaactattaggtgacatttccaagactggaattcatgtgtcttgactctaaatccaatttttaaaaacccttgcctaaagtggctctyatttactgaattgtcaacggtattctttgtacatataaataaattattttatggattgccccataatgcagattaggcaggataatttatgaattctgat

SEQ ID NO: 33282 - DNA, 201 bp, Homo sapiens
ccaggcaagtggtaggtagcactgagtaaatatcatgtgaatgaaagaattctcaaattgtgccccttagtttcctctgaatgcttaaccgcacattctgkgtgactcttggaaagattgttctctgctgtgtgttatctttttgtgcctgtatgagactttgtttcccttctggattgccaaaactgcagcagttgtata

SEQ ID NO: 33283 - DNA, 201 bp, Homo sapiens
ctgttttaatatgagtaaaattatggtgatttttcaaaaaagtattttggaaaagtattatgtttattttctatcaaatgtatgtgggtatacacacaaaracacatttgcctacatatgtgtgtgtttatatatgcaaatatgtgcatatgcatataaactaaaatacatgtatttagacggtagcaagattaagaaaat

SEQ ID NO: 33284 - DNA, 201 bp, Homo sapiens
tttgttggaagcctgcaagtgatcatgcgtatcaatgctaggagtgacgtcaagtagactggctgggaagggcagaatgtggtaggcggttaaaaagcaamaggcacatgctatatgactttttgccttttcttgttgtctttaagacttttgtgatggttacataacaccagtgggaccagagactagggcaggccaaag

SEQ ID NO: 33285 - DNA, 201 bp, Homo sapiens
attctcaaattgtgccccttagtttcctctgaatgcttaaccgcacattctgtgtgactcttggaaagattgttctctgctgtgtgttatctttttgtgcmtgtatgagactttgtttcccttctggattgccaaaactgcagcagttgtatacctctgatttatgtctacacccccacaatatctagctaggtgcctggc

SEQ ID NO: 33286 - DNA, 201 bp, Homo sapiens
tttggaaaagtattatgtttattttctatcaaatgtatgtgggtatacacacaaaaacacatttgcctacatatgtgtgtgtttatatatgcaaatatgtrcatatgcatataaactaaaatacatgtatttagacggtagcaagattaagaaaataattaggtcattaatactaattgcagttgtaatgaaagttgtata

SEQ ID NO: 33287 - DNA, 201 bp, Homo sapiens
aagtgatcatgcgtatcaatgctaggagtgacgtcaagtagactggctgggaagggcagaatgtggtaggcggttaaaaagcaaaaggcacatgctatatractttttgccttttcttgttgtctttaagacttttgtgatggttacataacaccagtgggaccagagactagggcaggccaaagatgcactgattaagga

SEQ ID NO: 33288 - DNA, 201 bp, Homo sapiens
tctctgctgtgtgttatctttttgtgcctgtatgagactttgtttcccttctggattgccaaaactgcagcagttgtatacctctgatttatgtctacacycccacaatatctagctaggtgcctggcaaaaagaagtgactgctcagtagcgtttatgggataaacatgtgtttctgctttggacctgtccttttactgc

SEQ ID NO: 33289 - DNA, 201 bp, Homo sapiens
gtgggtatacacacaaaaacacatttgcctacatatgtgtgtgtttatatatgcaaatatgtgcatatgcatataaactaaaatacatgtatttagacggyagcaagattaagaaaataattaggtcattaatactaattgcagttgtaatgaaagttgtatagtggatgaatgcagaatagttaaaatgaagatagaatt

SEQ ID NO: 33290 - DNA, 201 bp, Homo sapiens
actccttggtgtgggactcgtgatttggtgtaggactcatgatttagcttgggaactctctttttcggggaaaataagagccttttttctgattctgtgasagcacgtgatcactttttgtcatcctcacatagagcagattttcatggcataatttaagaaggaagtgcttccaaagagccagattcctaagggaagatt

SEQ ID NO: 33291 - DNA, 201 bp, Homo sapiens
gcagaatgtggtaggcggttaaaaagcaaaaggcacatgctatatgactttttgccttttcttgttgtctttaagacttttgtgatggttacataacaccrgtgggaccagagactagggcaggccaaagatgcactgattaaggaaattactgctacctaacagttattctggagctcaagtatttcctgttcattatgc

SEQ ID NO: 33292 - DNA, 201 bp, Homo sapiens
tgtgtgttatctttttgtgcctgtatgagactttgtttcccttctggattgccaaaactgcagcagttgtatacctctgatttatgtctacacccccacartatctagctaggtgcctggcaaaaagaagtgactgctcagtagcgtttatgggataaacatgtgtttctgctttggacctgtccttttactgcattcagc

SEQ ID NO: 33293 - DNA, 201 bp, Homo sapiens
ggaggaggaatatagtatttattgagcactgatgcattttcagtgcagtgctaggtatatgaggcattgtctcatctttaaaagtaaccatttttctccayataaagtaaaaacagttgaagaatttctagtatgaaaatagactaaaaattcattgtaacacaaattatcagtgggagctcatcagttttcctgagtata

SEQ ID NO: 33294 - DNA, 201 bp, Homo sapiens
gatggtgatgctatagaggaaaaaacccgcaattacttttgcaccaacctaatattaagttttatatttcacatttgtgggcttgtttcatcaacggagcrgtttccaaggcttcaaggaaacattgttctatgttttctctcatccatccccctgtggagggatgttgagaggagagtcggttttgaaggtgcagttctt

SEQ ID NO: 33295 - DNA, 201 bp, Homo sapiens
acctgtgagtggaagcccagtggtagaaatgtgcactgtggcttgcatgtggcaatctacctaatgggagaattactctctctccattctttcctagcccstcacatttattaagaataacatgaaaagtgccgggtactaggggcacctatgtgaataaaatacaaaggctgaagaactcatagtggaaacacatggtct

SEQ ID NO: 33296 - DNA, 201 bp, Homo sapiens
cattatataggggcaagaagttttggtctttatctttgcctagaaccttgaagtactccatgatttcctgggattttcacgagttgtacttgtaactcatsgttgtagggctaagagaaaggcagtgggaggaggaatatagtatttattgagcactgatgcattttcagtgcagtgctaggtatatgaggcattgtctca

SEQ ID NO: 33297 - DNA, 201 bp, Homo sapiens
tccccacatcccatcatcttctgcaaacttaacaatttactatactttttctgaaaatgagccttttaatctcccaatccatagttggacgaggctcactytgaaaagtaaagaggttggcttattgataacttcaggcctgctccttgcttacatgctgatgtttactttttgaaatcgacctaaaaaatgtcaatactt

SEQ ID NO: 33298 - DNA, 201 bp, Homo sapiens
gtactaggggcacctatgtgaataaaatacaaaggctgaagaactcatagtggaaacacatggtctccatatcatgagaatcattatttatcctctagaargccagggaatttgttcatgaagcttaacccagagtcctcttgtctacttagaagatcttgccagaatgggttacagacatagtgattagctggaagtaaa

SEQ ID NO: 33299 - DNA, 201 bp, Homo sapiens
actgcaaaaatcaggtttcttatttttacccagaaccttcttggtaaccactgtttttcacagagatgcaaagatctcttggatgcacatttattccttastgtttaaaccactgtcataggtcaagttctgaaagagaactgctcgccctgcttccccgcaagaaatcattatataggggcaagaagttttggtctttat

SEQ ID NO: 33300 - DNA, 201 bp, Homo sapiens
atacaaatgtcactgtcaaagctacatattgggctgtccgggtgatttactgtgagcatgcccatattcttagaatttagattccatccagttatttgaarttgtagatgatgttatagggaacatatttttgcctatgtttttcttttaatgattacatcctttaattaaatttggactttaaatttggaatttctgggt

SEQ ID NO: 33301 - DNA, 201 bp, Homo sapiens
tttagagagcctactaaaaccttcacaagtgggggcttacagactagagttttatttttatttttattttttctgtagggaatggagtaggggaggcagtrgcacacttaggtgataccttgcacagcagtcacaatgttgaaatttgaagaaatctagtgaaaattataaaattttcactagacatgaataaatcattat

SEQ ID NO: 33302 - DNA, 201 bp, Homo sapiens
agagccacccctagaggatggaatgtcttctgcgtagaggtgacagctaactgggggaggatgagtcattattggaaagcaggacaacatcctttgggctsagaacagtggccatttatttaagctgtcgctggctggtggtcctctttgacatttttcttatttggtatatggaaaaaatatagcataagacatccacta

SEQ ID NO: 33303 - DNA, 201 bp, Homo sapiens
tgaggacaaaagtagtttggagttctgtagaggagctgccagtattaatgaactatcacttggagcctgcaacctgtcagccttgacttttcctctcctgrgtcagccatcattggtcctccacattgcttttcactttgccagctaaggcttttcagtggcttctgatataggtcttgtttctcaagtgagtgtgccctc

SEQ ID NO: 33304 - DNA, 201 bp, Homo sapiens
ggagtagatgcctgaggttgtcagcaaatattgaagatttttatttccagggggttagaaacttcacgtagcttctctgctctgcacacataaggagtaaktggattattttccctgagtcagtaaggttttcggtgtcacataatctcaggggaacaaatgcaattgcttagatctcaatatactcctcagatggcaact

SEQ ID NO: 33305 - DNA, 201 bp, Homo sapiens
catgagtcctattgtcaccttatatatcaaaccaagacatacctaaaagctcttagtggtcaccaagaagacgcgaacactttagtagaaaaataagacawcaatatgaaaggcagtatttgaaagagcaagtggccaagatacgaatgcaaaaatcaaggaaatcagacagcaatatctgacatttttcattgtttagat

SEQ ID NO: 33306 - DNA, 201 bp, Homo sapiens
gtcttgtttctcaagtgagtgtgccctcaggaggggaactgggcaatctgggaagggagctttgatttcacaaccatgtgggaatgccagtagaatgagaygccatgatgagtgtgggtacctgcccttcttggcaggagtggactagaaatcagttggtgttactgcaagcccagtccattgatgtgcacatccattgtg

SEQ ID NO: 33307 - DNA, 201 bp, Homo sapiens
taatattaatataagaaagtgtaaatagctgtaataagttatggtgagattaaaagccatttctttttcttttttgcaccaacgtgttctttagtgttttrgcacatttgtagtagagttttgaagttatttttataaatcagatatgtaggattctaggtctgtgaaatgaaattgaatgaagaggatttgacagtcttc

SEQ ID NO: 33308 - DNA, 201 bp, Homo sapiens
agaactgcagtggtgatgatacatatgatacatcttcttgggtagttacatattttcttcttgttaccagggtattccttttaactatgagaaatcagaaraatacagaaaatcacaaagaagagactagaaataacccaaactccacaacaggttttgctttttgtcttctctgatgatgaagtaaaatatgttggccat

SEQ ID NO: 33309 - DNA, 201 bp, Homo sapiens
actgaattgtcaacggtattctttgtacatataaataaattattttatggattgccccataatgcagattaggcaggataatttatgaattctgatttctsctcttaaaacctatgcatacttaatttatagaatgttaattaaagtaattctgttttaatatgagtaaaattatggtgatttttcaaaaaagtattttgg

SEQ ID NO: 33310 - DNA, 201 bp, Homo sapiens
ttagagggttgggactttcagctccagcctccttagaggggaaagggggtgaaggttaagtggatcaccaaaggccggtgatttaatcagtcatgcctatrtaatgaagcctccataaaaacccaacatcacagggtttgggaggattttcagacagctgaacatgtggtggttcctgaaagaggatgtgcctggagaggg

SEQ ID NO: 33311 - DNA, 201 bp, Homo sapiens
ggtgaatttttgctacttgtaaaaatgaagaactgctgagtagcaaaggatcctaaagatggttgaagtgactaatgggattaagatttgcagcatacaawtaaaaataaaatttacaaaacccagccttggcaagggtacactgccaaatggcactgtatttccagcaggttcttctttctgggatccagttaggcaata

SEQ ID NO: 33312 - DNA, 201 bp, Homo sapiens
gcaaaggatcctaaagatggttgaagtgactaatgggattaagatttgcagcatacaattaaaaataaaatttacaaaacccagccttggcaagggtacastgccaaatggcactgtatttccagcaggttcttctttctgggatccagttaggcaatatgtgtcaatatgcagattccctttgattaaggtacttcttgg

SEQ ID NO: 33313 - DNA, 201 bp, Homo sapiens
tcttcacagatttctttgggatggaaagttctttctttaacctgattactgtttctaggtgctgtaaattgctgatcattctcagtaaatcaccagcattytgttctttctcagtcttgacaaagttgccattgtgcatatgtgtatttgtgtgtgtgtgacagggaacatgcatggtttctgaaaaaaaaaaaaaaaaaa

SEQ ID NO: 33314 - DNA, 201 bp, Homo sapiens
ctcctttcatttttcccttcatttttctacagtctcactcgtatttgtgtttggttttgatagtgagactgaattttgtttctgcttaaatgattatcacrctttatatatttcattttttgattttgactcttagcattctttcatgtcagatgtttctagagaaactctactttgcgtaatttagggaccccagagtag

SEQ ID NO: 33315 - DNA, 201 bp, Homo sapiens
agtggaaatgttggggtactgaggaagaacaattttgatttgcaattggtaaatgaggaatatctgttcagagtgtgagtgagatgaaaattgttcttctrtttaatttgtttgtaaaccttggctagagttggcctgacagattgtgtccctttccctctggccatactttttttgggagggggctggcctgcattttaa

SEQ ID NO: 33316 - DNA, 201 bp, Homo sapiens
ttccttgtgtgtctgttttttaaatgaaattaaatatcacaggtcacaggtcacatgaaggggtctatctataatgattctctttgacaacaaatggaatwttggaatatagtgagtttcctgacattggagacagccatgtagaatggagacaacaattgatttggggttttgtagaaaatattttttattgtgtgggaa

SEQ ID NO: 33317 - DNA, 201 bp, Homo sapiens
tgaagggaattagtaaatcagactggcattgaatctctgggagctagaaaatgggctaagatttagatggcatattcactttctgcgttccgtttgtctgsgtgcttgttcttattcattcctaattttttcctgtagctagtcttttaggattttggtgtcaaccttacatataattgcctgggtacttcctgaggtgat

SEQ ID NO: 33318 - DNA, 201 bp, Homo sapiens
gttttgcagaagcagaaaatgctaggattgtaaccctgatgatcagttctccctgatgacttggcctgtgttgcgcctactaaattcttcttgtcttctcstttgctctattgtcatgatattggttgaagggaattagtaaatcagactggcattgaatctctgggagctagaaaatgggctaagatttagatggcatat

SEQ ID NO: 33319 - DNA, 201 bp, Homo sapiens
tgccctttatctacctaagattgtattatgtcaaggaaaattgccagcttcttcttaaagtatgaaataacagttaaataaactgatgggagaaactgtgrtatggtaaacagatatacactttattggtgagagataggaactaggatttattgtataccatgtaggttcagacatatgctcttataattcttatgccat

SEQ ID NO: 33320 - DNA, 201 bp, Homo sapiens
gtctcatagttttgcagaagcagaaaatgctaggattgtaaccctgatgatcagttctccctgatgacttggcctgtgttgcgcctactaaattcttcttrtcttctcctttgctctattgtcatgatattggttgaagggaattagtaaatcagactggcattgaatctctgggagctagaaaatgggctaagatttaga

SEQ ID NO: 33321 - DNA, 201 bp, Homo sapiens
gaaactgtggtatggtaaacagatatacactttattggtgagagataggaactaggatttattgtataccatgtaggttcagacatatgctcttataattsttatgccatttaattttcataaccgctctgtgtacctatcaaggaatggaggggtcagtccatgtcatgctcttccactgcgccatatttctcctatttc

SEQ ID NO: 33322 - DNA, 201 bp, Homo sapiens
tgtctttagagtagaatgttttataatcctttgggtatatacccactaatgggattgctgggtcaaatggtatttctagttctagatccttgaggaatcascacactgtcttgcccaatagttgaactaatttacactcccaccaacagtgtaaaagcattcctgtttctccacatcctcgccagcatctgttatttcctg

SEQ ID NO: 33323 - DNA, 201 bp, Homo sapiens
tagatctcaatatactcctcagatggcaactttgaggaggtaaccaggaggtatctgcactccctctgtgctcgcctggggccttctgactttctctgtawaaagccctttctgtattgatgctcccgggtggtagtgggttggatggccattacataatcacaacctctttttttcagtcagggtagctattatgcagag

SEQ ID NO: 33324 - DNA, 201 bp, Homo sapiens
ttccagaccctctgaaatatatgcctcttttcttgctatgcctagtataatacctcactcattgtcaaccactagagacttagcttcttgttcttggttckactactaaattttttgacttgggcaaatcatttaaatatttctaggtgttctttaaggcttaaaaaccaaggttagtttagctttgtcattctttcttct

SEQ ID NO: 33325 - DNA, 201 bp, Homo sapiens
gtcatgatattggttgaagggaattagtaaatcagactggcattgaatctctgggagctagaaaatgggctaagatttagatggcatattcactttctgcrttccgtttgtctgtgtgcttgttcttattcattcctaattttttcctgtagctagtcttttaggattttggtgtcaaccttacatataattgcctgggta

SEQ ID NO: 33326 - DNA, 201 bp, Homo sapiens
gagtgatgatagaattccaacttgtggctgtcctaagagtggtctcttctgagtgttttcccgatggcaggaagtgggagtgaaggacagatagagggggwaagcaacacagctcaggtcccccaacaaggagatatcagagcattcctggccaggagatggagcagggtatccaggggccctttggaatgaggtaaacca

SEQ ID NO: 33327 - DNA, 201 bp, Homo sapiens
cctgaggtgatcctgctgattttagaagaagtgaaagggaatattacatatggtagtagaaggagtcctggataggaagactttgcagtcctggcttcaaktccagatgcaggcagtcacttgtcactttggtcaacatcttaaggcctccaggcttcagttaccttgtctaaaacaaggcaccttctgcctctgaatttc

SEQ ID NO: 33328 - DNA, 201 bp, Homo sapiens
accttcaaagaatatttgagcatttctaactggaaggaagtgaaaaagaaaggtgtggtgagttgagcacgtggctgactcattgaggagtcctgggtttsaactgctttatctgtaagagctcaatttaattcagagttaagtgcctaaaaggtatccagcacatgcctcctggggttcgggatgcactgttcttgacct

SEQ ID NO: 33329 - DNA, 201 bp, Homo sapiens
tctagtatttaaaaagtaagggcaaagattgtgtctcatagttcagtatcatagtagctctttttctagtatacaagttagccttctgctccctgctttcrcctaagttcatcttttccagtctctgtctacttataaaattaaaatacctctgaacttgttttgaatttgttatgctacttagcaatgggtgcctcatgt

SEQ ID NO: 33330 - DNA, 201 bp, Homo sapiens
ggcatccccggtctgggcgtccaccctcggtcccccgcccccggcttggtgcgcgctgccttcccgcgggtccccggcgtcctgcctggtagcgctgctcsccgcccccgcatcatctcgcgcccgtgctgcaggaaggggaccgcggctgcactgctgccgcggcgcgcaggtgccttggcggcgcggtgggagattatg

SEQ ID NO: 33331 - DNA, 201 bp, Homo sapiens
acgcccagctaatttttttgtatttttggtagagacggggtttcaccgtgttagccaggatggtctcaatctcctgacctcgtgatccacccgcctcggcytcccaaagtgctgggattacaggtgtgagtcactgcgcccggccctaattttttatgaacatgaattttacatgtggttagtgactgtttgcatttgtta

SEQ ID NO: 33332 - DNA, 201 bp, Homo sapiens
cactttggtcaacatcttaaggcctccaggcttcagttaccttgtctaaaacaaggcaccttctgcctctgaatttctgactcataaaatggtccaagccrtattgtcagtgattagtgcttttaatatcagcttcatacagaggtagctttccaggctgctctaacttttggattacataacagagatagagtgcctgat

SEQ ID NO: 33333 - DNA, 201 bp, Homo sapiens
cctcctggggttcgggatgcactgttcttgacctcacagagcatttatttaagctgaaagtcatgtgcctgctgtgagattgggtgctctgagtgtacacracagaggaaatctggctggtctatgttatttccttggaatgtctcttggagtcagctgtgatgcccccaggggttcaggcacaagggagaaaaatgagtg

SEQ ID NO: 33334 - DNA, 201 bp, Homo sapiens
aaatagttggagtgctattcagctgtgaggctaaaaatctcgaactaaaacatggaaattgtttttctaatttcatttgggtaaaaatgaattcccgtgawtacatgttagcaaagcaagcttccttttattatttctcataccacagatacaatatccagaaatgtgttgatgtgaaataaaatcaaatcaaggtgatta

SEQ ID NO: 33335 - DNA, 201 bp, Homo sapiens
ggggtttcaccgtgttagccaggatggtctcaatctcctgacctcgtgatccacccgcctcggcctcccaaagtgctgggattacaggtgtgagtcactgygcccggccctaattttttatgaacatgaattttacatgtggttagtgactgtttgcatttgttatttgacaaacataaaatgtatcataatggaaaatga

SEQ ID NO: 33336 - DNA, 201 bp, Homo sapiens
ctaggctccgcgccctcgcgcccatagccccggcggcggcacgaccagaggcggccaggggagcgcgccgccccgctcggccctccagtcccgctccgcckcctccctcccgcacagcagccgccagcgcggcctcctgcaccatgtcggtggccggcctcaagaagcagttccataaagccactcaggtaaggcgcgcgg

SEQ ID NO: 33337 - DNA, 201 bp, Homo sapiens
ctgccaaggtattcaagtacagccacactgaagctttgctttctaggcacaaagtttgattatcttatatctgcttgccatgctttttaatataactggarttagatgttggggtttctcagtctgtggacaaatatgcaggtgcttatgtatggaatattaatgatggagtttaaaaagagttacttaagaagaagtatc

SEQ ID NO: 33338 - DNA, 201 bp, Homo sapiens
ttcaaaagagtttcctatgataatgtttggttcattcaggttgaaaatgatgaaaacaacttctagaaagagatgacagtgtaagttacatctggcaaccyagaaacaaagttctgtagactactcatcatatcaatcattttttcccaaattattatggtgaaacctagatacaaagagcactgttccatcagggatctt

SEQ ID NO: 33339 - DNA, 201 bp, Homo sapiens
tggtgcgtgcctgcagtctcagctacttgggaggctgaggcaggggaatcgcttgaacctcagaggcagaggttgcagtgagccgagatcatgccactgcrctccagctaggtgacagagtgagactctgtctcaaaaaaaaaaaaaaaaaaaaaaatcaaatacagaaagacatgggggaggaaaagccaaaattcggtg

SEQ ID NO: 33340 - DNA, 201 bp, Homo sapiens
tctcagtctgtggacaaatatgcaggtgcttatgtatggaatattaatgatggagtttaaaaagagttacttaagaagaagtatctagcatgggataaccktggattgaaaagcaccaagtgcatcttatgaatgcatttctaggccctagcacagaacttgccactgtgggcagcatgggaatgttaggtaaaggtaatg

SEQ ID NO: 33341 - DNA, 201 bp, Homo sapiens
atgcaaaatgttatatgtttgtatgaatgcattttttggaggaatggctcccatagctttctgcagattcttgtggacatttgacagtccctctccaaagyatggcctccaatatgtcttcttcacattcctttggagaactgcctttacctcccgtgtctctcatagatatctgagcactttaatttgtggaagagtcga

SEQ ID NO: 33342 - DNA, 201 bp, Homo sapiens
ccaccaatctcctgctgccatccctggcctgccctcagccttactaccatgtggcaccactattgagcactagcccctcttggctgtccagtagtgcttgsttttgatactgtgaaatatcatgagcttgagctcccagcaaagaccacgtgcctctttgaacaagggcagctctattagttcagtgcatcatccattttc

SEQ ID NO: 33343 - DNA, 201 bp, Homo sapiens
gtggacaaatatgcaggtgcttatgtatggaatattaatgatggagtttaaaaagagttacttaagaagaagtatctagcatgggataaccgtggattgaraagcaccaagtgcatcttatgaatgcatttctaggccctagcacagaacttgccactgtgggcagcatgggaatgttaggtaaaggtaatggatgaatgg

SEQ ID NO: 33344 - DNA, 201 bp, Homo sapiens
agaggaaggtaacattcttcccttggtgtcagtgctaagctctgagattgttatttgtcaaataaagcacaaatgtgttttcctctagttacgtgaagacmttgtgtggaatgccttactgtttggagaaaatcttggtttggctcttgggctctctggtgatcattttataatgctcatcatgggaggtgacgggaagaa

SEQ ID NO: 33345 - DNA, 201 bp, Homo sapiens
gtgaatgcatagatcagcattatttataaagtgtcacgatgaacactttacatgtatctttggccacctatctgtgtttttagagctaacactcaggagtyatgttgctgtatcaaaaggtttacctgttaagttttgacccctattgcaagtttgcattctggaatagatgcaccagtttacattcctgagagtgcattg

SEQ ID NO: 33346 - DNA, 201 bp, Homo sapiens
aatgatggagtttaaaaagagttacttaagaagaagtatctagcatgggataaccgtggattgaaaagcaccaagtgcatcttatgaatgcatttctaggycctagcacagaacttgccactgtgggcagcatgggaatgttaggtaaaggtaatggatgaatggtctgtgttctaataacctgcctgacctgtctggaat

SEQ ID NO: 33347 - DNA, 201 bp, Homo sapiens
gacattttggtttctttttttttcatttttgcttttggttgaaattgttcgtggaagctaaaatgcattctaaggtgaaataaattttcacttatccttgsggcattacaatttaatagaaagagaagctcatttagaactttattggcttcagttccttctggctacagcataatcagagaccttgactttccatgtcat

SEQ ID NO: 33348 - DNA, 201 bp, Homo sapiens
actgatttcatagcactgatgttttgcaagatatcctagaggggcccttaaaaatttatcatttctcattttcaagtcagtatcaaaaaagtcctatttcrttagacattcatttatgtatctattatccagatatttattgggttcctgctgtattccaggccctctgctgagtgctagaggtatataaaccagcaaaac

SEQ ID NO: 33349 - DNA, 201 bp, Homo sapiens
ggaaagatttattttaaaagacatggaaggcatgaactgcaaaagaaaaaagtggtaaattttaatcaaaatttaaaacttttgttctttggaagatagayctgggggaacaaggcaagtcataaactgggagaaaatattgtaaagcaaaaatctaatgaaatgtgtgtgcttagaatatgtgaagaactcttacaccat

SEQ ID NO: 33350 - DNA, 201 bp, Homo sapiens
acgatgtggagcaaccggcacctttatacatttttgttgggaatgcaagttggaaaacattatggttgtataagataacataaaattgccgtataattcakcagttcaactccttggtgttagtcgaagagaaaggagaacatgttcatacagactttatgtgaatattcatggcagtgctattcataatagtcttaaaaa

SEQ ID NO: 33351 - DNA, 201 bp, Homo sapiens
tctttattttctatgtaaattgtgttgatggatcagtacacaatattgtatcatttatcatttctattggaatgtttttattttaattactttggtagacygatttgcattaagaaagttacccatggatagatatattagaggatgttttaatattctttaatatataatattcttcagaagattaaccaactaatgtat

SEQ ID NO: 33352 - DNA, 201 bp, Homo sapiens
ttatattttggttttcagttttagatcctacacacatgggccaaaaatttgttttcagaattatttcatccgctctaatgtgatttatcttacaagttttsttcccaccccccccactataagacctcagtctttacaacagctttggttgacatatccagatgcctccttggcactttctattgggtgtttctggcagtc

SEQ ID NO: 33353 - DNA, 201 bp, Homo sapiens
ttgtgagaacatagcacagtttacttgtccattttctccactgatgagcatttaggtgtttgcattttctagatattttgaatagcacagttttttttttwaattttttttttattatactctaagttttagggtacatgtgcacattgtgcaggttagttacatatgtatacatgtgccatgctggtgcgctgcacccac

SEQ ID NO: 33354 - DNA, 201 bp, Homo sapiens
cttgtgagaacatagcacagtttacttgtccattttctccactgatgagcatttaggtgtttgcattttctagatattttgaatagcacagtttttttttttaattttttttttattatactctaagttttagggtacatgtgcacattgtgcaggttagttacatatgtatacatgtgccatgctggtgcgctgcaccca

SEQ ID NO: 33355 - DNA, 201 bp, Homo sapiens
aaaatgtcccatctttttttttttttttaagccaagaagtatgataatacttacctggccaccacagatgagaattgaagtgcaataaaacttgccacaakctgggaggaaccagcagtgtgctgctacaggcttaacaaccatctttctggaagaaaaaccttgatttgtagcatgagccagtttctgtgtctcacatgg

SEQ ID NO: 33356 - DNA, 201 bp, Homo sapiens
gtaaaataatatattcttctcagcaacccaaacaaaatacataaaaatggaaaaaacactaccgtgaaacgtagcctcagtaatgagatgggcaggccacktttgcctttctcccaaagaggacacgtctagcaagatccactggactgctgacggtggtggattgctgggcacaagcatgcctttatggatggtctggct

SEQ ID NO: 33357 - DNA, 201 bp, Homo sapiens
ttttacattcatcacttaccaactctattcctttagcgtaggttgggctctcatccctatctttagttttatactagaggcagactagatatttatagccraacccaccaactctaagaactttcctcttgtccatgacaatctgggagtgccatatttatacatttcagtatacctcttggttaacatacttccataaca

SEQ ID NO: 33358 - DNA, 201 bp, Homo sapiens
acggatagggaggaagcaaatgctctgtaaatacctgtagacagaggcagggagacctttgtagaatggagagtgttagggaccttcctcttctttatttsggaaaatcttagattacatattcattggttgatctcatgcttgtgtgcttatggaaataaagcatttagtcagtaaaatattgttacccaaggactcaat

SEQ ID NO: 33359 - DNA, 201 bp, Homo sapiens
tatgacaatgttggtgagtcagtgctttgaaggccctaaggttaaatgttttgaataccacccccatgcatagtattttgggttcagtggggctttaaaayatcctttattctccccacatcccatcatcttctgcaaacttaacaatttactatactttttctgaaaatgagccttttaatctcccaatccatagttgga

SEQ ID NO: 33360 - DNA, 201 bp, Homo sapiens
tttttacattcatcacttaccaactctattcctttagcgtaggttgggctctcatccctatctttagttttatactagaggcagactagatatttatagcmgaacccaccaactctaagaactttcctcttgtccatgacaatctgggagtgccatatttatacatttcagtatacctcttggttaacatacttccataac

SEQ ID NO: 33361 - DNA, 201 bp, Homo sapiens
tgattatctgttcaatagcccatttaggactaggttgaagaagcagcagttttctgcataggtagcatttgagatccattatcagagggaaatgattattrtatgatgctgttgtcccttagaactttcaagaggaaaatgttaggattaggtagttatataatgatttgtttgatagaaggagcactgaggttgaaatca

SEQ ID NO: 33362 - DNA, 201 bp, Homo sapiens
aagggaaattaggtatcattttcttttgactcaggaagattattttcccattgtgcaagtttactagccatagagttaataaccctcatcacccttatatsaactggaatttttatattattcttggaaatgattttaagtggatatttaattcaaatcttgttactcttgtgtccactgaacgtactacttacctagtcc

SEQ ID NO: 33363 - DNA, 201 bp, Homo sapiens
atttctttgtgagttagtcttggtaggttttgtgtttctaagagtttgtccatttcatttaggttatacagttcattgttgtgcagttgttcatagtactyttaataatcttatttacttgtgtagatcagaatgaatatccccactttttatttctgattttagtaatttgtgtcttttctctctgtttttttctagttc

SEQ ID NO: 33364 - DNA, 201 bp, Homo sapiens
gagaaggttggaggagctgaaggaaccaagctagatgatgacttcaaagagatggaaagggtaagccttcactactgcctagtgttccctttgacataaamatgtctaccataattagaggagaagagaaaacgggagagggcaactgttttccactggtctctgagaatactacattttgttatttaaaactacttttca

SEQ ID NO: 33365 - DNA, 201 bp, Homo sapiens
aggttaccaatcctactggattaggactttgacctcctgacttcctttaattacttcctaaaagcactatctcaaaatacaattacattgggtattggggyttcagcatatgaatttggggaggacaaatagcagtcttcttaccttttttacattcatcacttaccaactctattcctttagcgtaggttgggctctcat

SEQ ID NO: 33366 - DNA, 201 bp, Homo sapiens
ctgacatgcaggggctcagcactttcagtatatagtcctagtacctgagagctagcaaaaaacaagcagagatgtttctcttagcccaggcagctcctcastgtgggggtctggtgccaacattgcaactgtattgtgtattatttaaatgtgtttgtatgtttgtgttcagtgtacatatgttttcagatttgtgaaaaa

SEQ ID NO: 33367 - DNA, 201 bp, Homo sapiens
gttttaccatgctggccaggctggtctcgaactcctaacctcaggtggtccgcctgcctcagcctcccaaagtgctgaggttccaggcatgaaccactgcrcccagcagagcccctttttaagtgaatgtaaaatgagaagactaatactcatttgggggattttagttaaggcttaaaaataatgtagattatttagctt

SEQ ID NO: 33368 - DNA, 201 bp, Homo sapiens
tttacctgttaagttttgacccctattgcaagtttgcattctggaatagatgcaccagtttacattcctgagagtgcattggagtgcacttccttgtcacrcttgctgatgatctctgtgcaagaagaaaatagttctggctaccacaatctcagaagaagaacatatggtcatacacatggcaacattatctctagagaa

SEQ ID NO: 33369 - DNA, 201 bp, Homo sapiens
atctctggatggttctaaataccacctgatcctcaaccaaagctggtagccactaatatccatagttctggaaataatattttacccattcatcttctacrgcatctgagactccaggaactgacacacatttccagaaatgtcttgtctttgactcttctactgcccataaaattggagttcctcacgcttcatttgaac

SEQ ID NO: 33370 - DNA, 201 bp, Homo sapiens
ttctcttaccatatttgaaggaatggccagatttttctcagccttccaaccctttcactgtgttttgtcgtgtatgtaggatttacccagtagcaaaactrtaaattcagggtcttcaagctaaaacttcctaaagcaataccctaagactcagttgtgaactgaaaaatctgtgggactctagaggagcggaagatctgc

SEQ ID NO: 33371 - DNA, 201 bp, Homo sapiens
tccttaaatctatggttttaaaatgttttctgagtaattctgatatgcatcaggttgaccaccactagtaaaagcctttagacaaggattttgttttttgragacttaggggtttccatctgaaactttgagtcccacaggaaatttgacggaatgggaaagagaatgggtttgggagtggctcagacctgagcctgaatc

SEQ ID NO: 33372 - DNA, 201 bp, Homo sapiens
gttgctgatgatatatttatggaatgctatttccatcctagtttaaggtatctgttgctcttagttactggagctatgctgatttcagaactacaaacagyttttaatattgaacatgctaactggttcaatgtatatgttgtactactttagtttttgtggggaatggactttaaagattagtttcatgctgatccacag

SEQ ID NO: 33373 - DNA, 201 bp, Homo sapiens
acttattctgatattttaatcaaactctgaggacttaaacatatggtataaagaatgctagttaatagctttttgtgttattttaatggcaaaaactgcarttatgtttgcaccaacctaaatagaaccatatcagagtagcagaagaactcatctcaaagcctgtcttagagaggtggatggacctgtgcactgtgtttc

SEQ ID NO: 33374 - DNA, 201 bp, Homo sapiens
tcaggttgaccaccactagtaaaagcctttagacaaggattttgttttttggagacttaggggtttccatctgaaactttgagtcccacaggaaatttgayggaatgggaaagagaatgggtttgggagtggctcagacctgagcctgaatccaatcttttcctgttagtaactatgagagctcggataggctttccaggc

SEQ ID NO: 33375 - DNA, 201 bp, Homo sapiens
taagactgcctatcttttttttttttctaatctgaacagttattttgcttatgaaatataaaattaggacactttgtcattttgtatttaaattcttatawcacttattttgggctcctatacatgctcttcctgcgtttggctttcctagccactgtagttgggatgtttgaaatattcagggtactgaacagcagttta

SEQ ID NO: 33376 - DNA, 201 bp, Homo sapiens
cccataatgtctccttcatggtgtgatgggaaaggaggaggcgtggagcattgtgctaagacacacccccccggtgtggggatgtaagaagggccagagcyccaaacaagatgagctttgaagacatctttttccttagtctgaaattcagtgatgacaagcttcctctgagttacatgtttgcaatatatagttccaagc

SEQ ID NO: 33377 - DNA, 201 bp, Homo sapiens
tgattataagcaagttgaaaaaaattgttttttacctagatgagtttattttaaaaagttattaagcatttataaaggagccttttttggggtggctcctrattattaccaagtttccaatattataaactctgtgcttgagttgaatattatagtttaggcttctatctcctagtagtgtttccaagcaaacagtttttc

SEQ ID NO: 33378 - DNA, 201 bp, Homo sapiens
gagtcccacaggaaatttgacggaatgggaaagagaatgggtttgggagtggctcagacctgagcctgaatccaatcttttcctgttagtaactatgagarctcggataggctttccaggctctctgaggttccatatcctttctttatagatgcagcccatccctctttctgcaaataggagtaattgaaccaaacccac

SEQ ID NO: 33379 - DNA, 201 bp, Homo sapiens
tggctgaatttataccattcattattttactgcttaagtggctgcatctgggcaagaaggacctacaaaccctttgccatggccattgcacatcatcatcrtataatacactggctaaaggaagtgttttctggaggtgttcatcagtactgtagttaagagtttactgattaatattaatagcctgttatccagagatct

SEQ ID NO: 33380 - DNA, 201 bp, Homo sapiens
ttgtgctaagacacacccccccggtgtggggatgtaagaagggccagagctccaaacaagatgagctttgaagacatctttttccttagtctgaaattcartgatgacaagcttcctctgagttacatgtttgcaatatatagttccaagcttatattcattaaaggtaatgaccaagaagattaacagcaaaaaaaatac

SEQ ID NO: 33381 - DNA, 201 bp, Homo sapiens
tgataaataacttcagtgaaatttcaggatacaaaattaatgtacaaaaatcagtggcatttctgtacaccaacatcatccaagctgagagccaaaccaaraacacactcccattcacaatagccacaaaaagaataaaacaactaggaaaacagctaaccagggaggtgaaagatatctacaatgagaattacaaaacac

SEQ ID NO: 33382 - DNA, 201 bp, Homo sapiens
tgtccatgtgttctcattgttcaacacccatttatgagtgagaacatgtggtgtttggttttctgttcctctgtgagtttgctgagaatgatggtttccarcttcatccatgtccctgcaaaggatatgaacttatccttttttgtggctgcatagtattgcatggtttatttatgccacattttctttatccagtctatc

SEQ ID NO: 33383 - DNA, 201 bp, Homo sapiens
gttaaaacagttatactctccaaagcaatttacagatttaatgccattcctatcaaattaccaatgacattcttcacagaattagaaaaaaaaaatattaraactcctatggaatcaaaaagcctgaatagacaaggctaagctaaaaagacaaagctggaggcatcgcattacctgacttcaaattatgctacaggctat

SEQ ID NO: 33384 - DNA, 201 bp, Homo sapiens
ccttgtatagtttgaagtcaggtagcgtgatacctccagctttgttgtttttgcttaggattgtcttggctatatggacttttttggttccatatgacatktaaagtagttttttctaattctgtgaattttctaattctgtgaagtaggattttctaattttgtgaagaaagtcaatggtagtttgatggaaatagcatt

SEQ ID NO: 33385 - DNA, 201 bp, Homo sapiens
ctcagtactttaagtgggtgtgtatgcattattaatagttgtagtttcttaacttcagtgacagaaaagttaagaatttgaaaatattttagtttttcatwtgcctttttaatatttcttttatgttaccactgtgagttacccattttcaagtgggtgtgtaattcatctacttatttatctaatttatttatttactta

SEQ ID NO: 33386 - DNA, 201 bp, Homo sapiens
caaaaacaaaaattgacaaaatagagatcttctgcacagcaaacagacaatctacagaatgggagaaaatatttgcaaactatgcatgcaacaaaggtctratatccagaatttataaggaacttaaatttacaaacaaaaaaaaaccccattaaaaaatgcacaaaagacataagcagacacttttcaaaagaaagcata

SEQ ID NO: 33387 - DNA, 201 bp, Homo sapiens
attttattctctttgtagcaattgtgaatgggagtttgctcatgatttggctctgtatttgtctatttttggtgtataggaatgcttgtgatttttgcacrttgattttgtaccctgagactttgctgaagttgcttatcagcttaaggagtttttggactgagacgatggggttttctaaatatacaatcatgtcatctg

SEQ ID NO: 33388 - DNA, 201 bp, Homo sapiens
acaatctacagaatgggagaaaatatttgcaaactatgcatgcaacaaaggtctaatatccagaatttataaggaacttaaatttacaaacaaaaaaaaamcccattaaaaaatgcacaaaagacataagcagacacttttcaaaagaaagcatacatgtggccaacaagcatataaaaacatgctcaacatcactgatca

SEQ ID NO: 33389 - DNA, 201 bp, Homo sapiens
ctgagacgatggggttttctaaatatacaatcatgtcatctgcagacaatagtttgagttcttctcttcctatttgaatacctttatttctttctcttgcsttattgccctggccagaacttccaatactatgttgaataggagtggtgagatgttgaataggagttttcaaagggaatgcttccagcttttgcccattca

SEQ ID NO: 33390 - DNA, 201 bp, Homo sapiens
tgcatgcaacaaaggtctaatatccagaatttataaggaacttaaatttacaaacaaaaaaaaaccccattaaaaaatgcacaaaagacataagcagacayttttcaaaagaaagcatacatgtggccaacaagcatataaaaacatgctcaacatcactgatcattagaaaaatgcagatcaaaatgacaatgagatact

SEQ ID NO: 33391 - DNA, 201 bp, Homo sapiens
tgttgaagcagccttgcatcccacgggtgaagccgacttgatcgtggtggataagctttttgatgtgctgctggattcggtttgtcagtattttattgagsattttcacattggtgttcatcagggatgttggcctgaaattctcttttttgttgtgtttctgccaggttttggtatcaggatgatgctggcctcataaaa

SEQ ID NO: 33392 - DNA, 201 bp, Homo sapiens
ctgatcattagaaaaatgcagatcaaaatgacaatgagatactatctcacaccagtcagaatgactgttatcaaaaagtcagacaataacagatgttggcragattgcagagaaaagagaatgcttatacactgctgctggaaatgtaaattagtttagccattgtggaaagcagtgtggcaatttcttaaagaacttcaa

SEQ ID NO: 33393 - DNA, 201 bp, Homo sapiens
agtcttgggagggtgtatgtgtccaggaatttatccatttcttctggattttctagtttatttgcatagagatgtttatagtattctctgatggtagtttrtatttctgtggggtcagtggtggtatcccctttatatcattttttattgtgcctatttgattcttctctcttttcttctttattagtctggctagccatc

SEQ ID NO: 33394 - DNA, 201 bp, Homo sapiens
ttttcttctttattagtctggctagccatctatctagtttgtcaactctttcaaaaaaacagctcctagattcattgatttttcgaagggttttttatctycttcagttctgctctgatcttagttatttcttgttttctgctagcttttgaatttgtttgctcttgcttctgtagttcttctaattgtgatgttagggtg

SEQ ID NO: 33395 - DNA, 201 bp, Homo sapiens
gctataaatttacctgtaaacacgctttggctgtgtcccagagattctggtacactgtgtgttcttattggtttcaaataacttatttgtttctgccttawttttgatatttaccttgtagtcattcaggagcaggttgttcagttttcatgtagtcgtgcggttttgagtgagtttcttcatcctgagttctaatttgat

SEQ ID NO: 33396 - DNA, 201 bp, Homo sapiens
tttacaattttgtttgtttttgcagtggctggtactggtttttccttaccatatttagtgcttccttcaggagttcttgtaaggcaggcctgatggtgacrtaacctctcagcatttgcttgtctgtaaagggttttatttctccttcatttatgaagtttagtttggctggatatgaaattctgggttgaaaattcttgt

SEQ ID NO: 33397 - DNA, 201 bp, Homo sapiens
gaaatttgatgagtctaaggaaattgctgagtcaagcatgttcaatctcttggagatggatgtaagtgactcctgtggttttcaatttaatcttatcatcraggcacaacattaatatgttaaaggccataacccttaaaagcattaatatctgattacactatgtgataagaacttcagtagatagttatttattttaaa

SEQ ID NO: 33398 - DNA, 201 bp, Homo sapiens
ttgctgagtcaagcatgttcaatctcttggagatggatgtaagtgactcctgtggttttcaatttaatcttatcatcgaggcacaacattaatatgttaarggccataacccttaaaagcattaatatctgattacactatgtgataagaacttcagtagatagttatttattttaaataattgtcagtcataaagtagac

SEQ ID NO: 33399 - DNA, 201 bp, Homo sapiens
ccataaagccactcaggtaaggcgcgcggcaggtgcgtcccggggcagtccggggcgaagctgcgaggggcgcgctcggcgctggccgtccggcggcagcytggggagttcggcaccgagcctcgcccgcgccggccgcgccccgcctcgcaagccaaggcggcggctcggggcatccccggtctgggcgtccaccctcgg

SEQ ID NO: 33400 - DNA, 201 bp, Homo sapiens
gctctctgaggttccatatcctttctttatagatgcagcccatccctctttctgcaaataggagtaattgaaccaaacccacagagttgtgaagattaagrtaaattgtttgtataaagctcctggcttagagtagacaccaattaaaagctaatctcacctgccacatataaaaccactggaagaaaactgttcttgaat

SEQ ID NO: 33401 - DNA, 201 bp, Homo sapiens
ctatctctgttttgtatactttactcagattctccaggtacctagaatggcctttcccaggtctctccctttacggttcactctttcagaaagcccagctsgagcatcatctgttcattagccttcccagccttactctttcaggtggaatttgttactgtgtcttctgcagtgtaaatattaatacattacagcctcacc

SEQ ID NO: 33402 - DNA, 201 bp, Homo sapiens
tagacatagcacttgcacattataggtgcttcatgaatatttcttttgctcactttatcacagagaaaatcttttaaaaatagatttttggtaaatgactrtattcaaccaggcagtgaaacttcacatttcttctgtatagggaatgcataattgtttccagtgtaacctccttattgattttaatcaatttaatctttt

SEQ ID NO: 33403 - DNA, 201 bp, Homo sapiens
tccaaagcacagtgggcggtcatggtacttctgaacaggaaagctttacctaagggtttgaaaaaatgatgtatacagaagcattttataaaaaattaaartgtttaaatgaagtaattcagtacacagtggggaagagcaaggaaaaactggaagccacaggcacctctgcatctttctgtcaccctctctaacgcacgc

SEQ ID NO: 33404 - DNA, 201 bp, Homo sapiens
ggttcatccatgtccctgcaaagaacctgctctctctcttttatggctgcatagtattccatggtgtatacgtagcacattttctttatccagtctctcaytgatgggcatttgggttgattccatgtctttgctattacgaatagtgctgcagtgaacacatgtgtgcatgtgtctttataatagaacaatttatattcc

SEQ ID NO: 33405 - DNA, 201 bp, Homo sapiens
ctccacagagtcactgcaggggccaccacagtgaagggaggatggggaagggcacacagtgatagaatttgagcgtgtaatcctgcttcatccagaacagwattgctgtaattcattttaagatcttaagggaaagggagagtttagtgctttaaaaaagtggttgataagactgactgacggagagaacactggagcgta

SEQ ID NO: 33406 - DNA, 201 bp, Homo sapiens
gcagtgactcacgcctgtaatcccagcactttgggaggctgaggtgggcagatcatgaggtcaggagatcgagaccatcctggctaacatggtgaaacccygactctactaaatatacaaaaaattagctgggtatggtggcaggcgcctgtagtcccagctactcgggaggctgaggcaggagaatggcttgaacccagg

SEQ ID NO: 33407 - DNA, 201 bp, Homo sapiens
tccacagagtcactgcaggggccaccacagtgaagggaggatggggaagggcacacagtgatagaatttgagcgtgtaatcctgcttcatccagaacagarttgctgtaattcattttaagatcttaagggaaagggagagtttagtgctttaaaaaagtggttgataagactgactgacggagagaacactggagcgtac

SEQ ID NO: 33408 - DNA, 201 bp, Homo sapiens
ggcggcagagtgagactctgtctcaaaaaaataaaataaataaataactttcacctccctggttagctgtattcctaggtattttattatttttgtggcawttgtgaaggagattgttcctgagttggctcttggcttgactgttcttggtgtataggaatgctagtgatttttgaacattgattttgtatcctgagactt

SEQ ID NO: 33409 - DNA, 201 bp, Homo sapiens
ttattttgtgcagtaaaatagtagtctcatttcaaattttttcaaccatttaaagaagtagaaatggaagtttttattacctaaaaaacatgcctgtatcygtatatatttacagtttcactttcttttttttatttttattttttattatactttaagttctagagtatgtgtacatgtgcacagcttgcaggtttgtta

SEQ ID NO: 33410 - DNA, 201 bp, Homo sapiens
gcacctcttcatgaactttcctgtcctctcagttgtaccaggcttttgattctgccagatgcagcgggagagcaattgctcttcctaaagaaatccatagytggctttattttcctcttatcttttcttgccatggtaaacttttatggtcatttatctctgtcataaaaatgaatgttgtacgtgtaatctttcctgtct

SEQ ID NO: 33411 - DNA, 201 bp, Homo sapiens
tacaagagagggcagggagcttcctaaattgcttcttaaaggaaaaagtaactgttccattcttgatgagaggtatttaccctcttagggggcattgagtstgttgcctggagtgaactgaagatacctattctctcttgtctgttgtctttagaagacaagtggtaatcctttgggttttcatctgtgaagggccctgtt

SEQ ID NO: 33412 - DNA, 201 bp, Homo sapiens
gggaacttgtgcttttaatcaggcaaatttctgtatcctgactgcaacacacacatgttgtgaccttgggcaagacccttgactctctgattctccatttycttgttgtggtctcattagagaattaaatgacatatcaactaccactattctcatctatcacatctgagctgaaatatcttccactggctctcatgtctt

SEQ ID NO: 33413 - DNA, 201 bp, Homo sapiens
ttttttccaagtctagaaattagatggatgttatgtgtttttatattaatattttcataatggttgttaggattgaggaagaataccaactagccactttytaaaacatgtagagcagttgagctgtttataataaagttcatatgtctttgagtgtggaatgtttgctcacttttttttatctaacaaatatttgttgag

SEQ ID NO: 33414 - DNA, 201 bp, Homo sapiens
atccagaatctacaaagaactcaaacaaatttacaagaaaaaaacaaccccatcaaaaagtgggcgaaggatatgaacagtttcactttctttaaacagcsttccctaatggctcctcacaccaatcccaggcaaggttagttgaagacggaggctcaggagcttataagatgagaaattcttgtaatttaggatgcatca

SEQ ID NO: 33415 - DNA, 201 bp, Homo sapiens
ctcaactctctctagggctgtccattatcttttatgtgtttgaaagctgtgcaatcaaaggacaatggagacagaacattggtaagccaatgtcaccttcyagcattctctgtgatctacctgtattttactgtgctgtactaactttgtgctatgcaactgtgctgtactaactttgtgctatgcaacagtcactttgtg

SEQ ID NO: 33416 - DNA, 201 bp, Homo sapiens
agattatagagttagtaagtgacagactgaccctaaatccaaaatagaactctgactccaatgctgtaccctatagctcaaatgtttaaaaaagaaagttycttccaaatgagcatttagtttttggatcagggcatggactgaggggcgggggatgcagtgtgagggaaggtttagaatattattcttcctcctttcctt

SEQ ID NO: 33417 - DNA, 201 bp, Homo sapiens
agcgttaaacagaatgctcccctggtctcttcctcttatgtccatgaagtctatcaagtaattatctgtaagaatgcagccatgcctggtgcagtgactcwtgcctgtaatcccagcactttggaaggccaaggcggatggatcacttgaggccaggagttcgagaccagcctgaccaacatggcaaaaccccgtctctac

SEQ ID NO: 33418 - DNA, 201 bp, Homo sapiens
agatgttaaccattttcacaaaacagcttcacagctattgcattagtttgattgaataagtggatactgtagacttgcgaagttgatgcatgcaactcacygtcacagaaataagcatgaaatttgtagttgtaacgtatcttagaactcttctgattacccaggtccaccctgttgtggctccattttgtggatgaggaa

SEQ ID NO: 33419 - DNA, 201 bp, Homo sapiens
acatagtggttgtttggaattttgctaatactaggaccttcacatatggcttcacaagttgtgtactgcacaactccagggggctactgagcatttttaarctaatcactacctggtacacactcaatcttaaagatctttgaaatttgaatcaatcaaaaggatatttatacaagatttatatgtagacaggcacatttg

SEQ ID NO: 33420 - DNA, 201 bp, Homo sapiens
actgagtcaattaaacctctttcctttataaattatccagtcttgggtatgtccttataacagcatgagaacggactaatacagggaccattaaggaattytaagccttggagtgttatggtcaggtattccttctagaaagttgatactgtggactgcaatttaggaatgagaagctagaggaatttttcaacaaattaa

SEQ ID NO: 33421 - DNA, 201 bp, Homo sapiens
atatttatacaagatttatatgtagacaggcacatttgaaattgcatccttctaaagataattttatatcattataacttcacaagaaaaaatttgttttyctctgttgatcctagtaatagcaaacacacacagtaatatgactgccatggaatgaaaaattattaagtattgaaaaactgaactgaaagataaaatctt

SEQ ID NO: 33422 - DNA, 201 bp, Homo sapiens
agccaatcctcatctttgaagtgtgataataatagtacagctctctcctcttatctgcaaggggtatgttccaaaatccccaatgtatgcctgaaactggrtattactgaatgctgtatataaattagatacagtaggagattcacaacaataactaaagtagaacaattataacagtatacttaataaaagatatatgat

SEQ ID NO: 33423 - DNA, 201 bp, Homo sapiens
ttataacttcacaagaaaaaatttgttttcctctgttgatcctagtaatagcaaacacacacagtaatatgactgccatggaatgaaaaattattaagtaytgaaaaactgaactgaaagataaaatcttttaatgtgtggattatggaaaaggaggaggcttactttatgcaaggctgatattatataccggtatatatt

SEQ ID NO: 33424 - DNA, 201 bp, Homo sapiens
aattgatcactgaaatccagaaagcgaacagaatccattactttctcaacagaacccaatgctttctcaaatcccttggtaattcctccatttccccagaygaccaatgttattctttctcttaccatagattagtttgagttttctagagttttggatacctgtaatcatataatattgtattcctttttgtctgacttc

SEQ ID NO: 33425 - DNA, 201 bp, Homo sapiens
aattgctaacagaagtatgccaggcatgctgggcaagtcataggattttatagatgaaattaatggaagtatgtgaaatgtactctatgtgctgtaaaggwctgtatgtttgattatgtttgatattatttagtagtagtcaaagatgtactagcagctgctccatacccattatttttttctggagtctgttatgctttg

SEQ ID NO: 33426 - DNA, 201 bp, Homo sapiens
gtcactagagatgatgggtggagcctgggcagccatctaccaggtatggtgcaaggaggggattgaagctcagcatggagcattagatataatcccttggwaggtcccttccaagtgagattttgttcttgagttcaattatatgtcaagtgggaggcttaaactaaatcactggatttagtttctctggtgacagctgca

SEQ ID NO: 33427 - DNA, 201 bp, Homo sapiens
caggaatccatattgtgatgagcaacttacgtgattctaacagactggatgatttgaaaagcaagactgccatttctatctcacttaatttcaaggaaagwgtttttcctctggcttctcatgagataccatttctcttgaagacagggcctgtggggcctgtgagtgtgtcctttcattgtgtgtagggcatgtgcattc

SEQ ID NO: 33428 - DNA, 201 bp, Homo sapiens
gtacagatgctccttaacttatgatggggttaaagtcttgaatatatcatgtaatttatcgaataatgcattaaaagtaaaaaacagaatggttgtaaggrtacttgaggtatggtttctactgagcacatatcaattttgcaccatcataaagcctacaaatcgtaaagtcagggaccatctctcttatcaatagtggga

SEQ ID NO: 33429 - DNA, 201 bp, Homo sapiens
tggttgtaagggtacttgaggtatggtttctactgagcacatatcaattttgcaccatcataaagcctacaaatcgtaaagtcagggaccatctctcttaycaatagtgggaagataaaggatatttctgaggatctatgtataactcaatagaggcctgagaactcagttgtggagcagggggcatcagtagtactggtg

SEQ ID NO: 33430 - DNA, 201 bp, Homo sapiens
ctctgttgatcctagtaatagcaaacacacacagtaatatgactgccatggaatgaaaaattattaagtattgaaaaactgaactgaaagataaaatcttytaatgtgtggattatggaaaaggaggaggcttactttatgcaaggctgatattatataccggtatatattatataccggtatatattggtatatactgat

SEQ ID NO: 33431 - DNA, 201 bp, Homo sapiens
tattatatactggtatatattatataccactaggtacagcaggttatggaaaagtttctcatagttgaagggggagccttttaacaaacagaaaatttctscagtggacttaattgatacctaaatttctacattaaaatttaatcactttcatttatacctatgtcatatattacatgtacataccttgaataggaggat

SEQ ID NO: 33432 - DNA, 201 bp, Homo sapiens
ctttgtatatcccattttctctgtcaatcatcagcacacacgaacacattttgttttgaccctcctttgtggtcgtaaatcgcctttccttgtcagtttgrtctgcgagtgtcatcttttctcctgcgtgttcgctctgaatccagcctgtatgacagtgaatgcccctggacagtgtgtccccatatgcattcgcatata

SEQ ID NO: 33433 - DNA, 201 bp, Homo sapiens
ataagcagagttgatgctgcatgattctttcttgagggcagcaaaatctgcctccatgcctgacccactgtaggcatccaataaatgcctctgggacaaartatgtttcattttattcaccttattttcaccagaaggtaatgaattatattttgaaacaaattttaggaaactacaagcttcttctttggataaacgggc

SEQ ID NO: 33434 - DNA, 201 bp, Homo sapiens
atatgcattcgcatataacccacagacagcaagcggctccagaaatgtgctgatgagctggatttcttgagtcacagaagcatatggttaaatatatttgyagaagaagatattttgaaactcgacacttgctgggttttccttcccatgcctcacctctgatcactttatcatgctgtggcactggggttgatataataa

SEQ ID NO: 33435 - DNA, 201 bp, Homo sapiens
aatctgcctccatgcctgacccactgtaggcatccaataaatgcctctgggacaaaatatgtttcattttattcaccttattttcaccagaaggtaatgawttatattttgaaacaaattttaggaaactacaagcttcttctttggataaacgggctttccacatcttggcagaccactgctgagtacagtgtcagcatg

SEQ ID NO: 33436 - DNA, 201 bp, Homo sapiens
acagtaagttcattttcttcctgctgttgcaggttatttgggcttggctcttgtaaaagacaacttgtacccagtgaattctcacatgaattcaaatcttrtaagctaggaatactgtaaatctctactgatgcttgactgagtaggactttacaactccagatggcagttgtaatactttagcatttaccatacagagaa

SEQ ID NO: 33437 - DNA, 201 bp, Homo sapiens
gaaatgtgctgatgagctggatttcttgagtcacagaagcatatggttaaatatatttgtagaagaagatattttgaaactcgacacttgctgggttttcyttcccatgcctcacctctgatcactttatcatgctgtggcactggggttgatataataaaagctagatgacattttatctcaggaatatcgatgcatacc

SEQ ID NO: 33438 - DNA, 201 bp, Homo sapiens
aaacaaaattaagaactgctgtatactggtgtggcatggtgctgaagtcaggctttgggaaagtacacaatgtggcagcatttcttaaaggcctggagacsgtgttaaaaatgcagattctggccaggtgcagtggctcactcctgtaattgccacactttgggacgccaaggcgggtggattgcttgagcccaggagttt

SEQ ID NO: 33439 - DNA, 201 bp, Homo sapiens
aggtagctttcttttatttttcctgtatccccagtgcttgatgttctactgtagaaaactttttataagatgctctcaggagacttactaagaaaaaaagygaggtctgagccggcaggtggtgctctctgtcctttgcgctcagcacttcagggcatgacataagcagctgtggctcctggagctggccaccaggactag

SEQ ID NO: 33440 - DNA, 201 bp, Homo sapiens
gtatagcaaagcaaagcaaagcaaagcagcctacctgatagacctcctcattaccattcctgtgtgtcagtttctaaccacagggcatggaaacgggaagygaggctggttgtatttaagtgagatgtgtgaatatttggaataccccttaatcttgaggctagtttctttgcaagtttcaggttggggttccgtgtattt

SEQ ID NO: 33441 - DNA, 201 bp, Homo sapiens
gtattgaagatgcatacctatctaaactggtggttcttgacttatgagccatgatgtgcttttaggtgagccaccaaaatttgatgaatgtggacaattakcgtttgctgcagtggtcactacagtggctttccagaggaaacattttgattggattgagtggtagtgtgttgtggagcagggtacgacttgtggcacata

SEQ ID NO: 33442 - DNA, 201 bp, Homo sapiens
ggttgatagttaacgctggtgcctgagacacatgtatgattttcatcacagtagcgaaggattcactctctctacgttgctatatccacttgtaagtacartttgtaaactctactttggaggaatctgaaggtggtgaggaagtgaaagacctgcccaaagtgacatacccagaaagtggcaggattgatacccaggaag

SEQ ID NO: 33443 - DNA, 201 bp, Homo sapiens
tgtgtgtgtttttgtgtgtgcgtgtgtgtgtgtgtgtgtgtgtgtgtgttttgcctcagcaatgactgaattccctatcactgcccatgtttgaccccctygttcccaccgcccatgttggaacacacactgacctgctagttccctcccatcatgtgaggcacaccagtcatctcttgtgagttttgtggttagtaattt

SEQ ID NO: 33444 - DNA, 201 bp, Homo sapiens
gggattttcacgagttgtacttgtaactcatggttgtagggctaagagaaaggcagtgggaggaggaatatagtatttattgagcactgatgcattttcartgcagtgctaggtatatgaggcattgtctcatctttaaaagtaaccatttttctccatataaagtaaaaacagttgaagaatttctagtatgaaaataga

SEQ ID NO: 33445 - DNA, 201 bp, Homo sapiens
gtatctacatgtgtatgtatgtagtattaatacagcgggtcatttggaatagatccctcttaagatatgatttcatccttcattattttactcaaggtggrgtacattatttttgtatgccatagctccagtgcactgcatatatttatgtatgcaacagtttaccttaccaagtataaattacaaaattttttacataat

SEQ ID NO: 33446 - DNA, 201 bp, Homo sapiens
ctcagcttcactgctgatcctttctctcacagatgccttgaatctaaatcacagtgcctgcttagtaattttacttaaattgtaaaagatgactagcactrtacagtcaaagcacatttaaaacacactcacagtttgttttctgtgacagaaaacaaaacagaaaaatgttttccagatgccagtgcaagcttattgcat

SEQ ID NO: 33447 - DNA, 201 bp, Homo sapiens
ccctagaaccagtgatgggtgtccttatgagaagaggagaggacacagagaaacacaggaaagaaggccacgtgaagaatgagaagaggttgaagttacaygtcacgagcaaaggaatgccaggagccaccaccacaagctggaagacatgaggaaggattctctcagagcctccagagggaaccaactttgccgacacct

SEQ ID NO: 33448 - DNA, 201 bp, Homo sapiens
actggtgcctataattaattaattgtgtgtctgtatattaatctatttgtgagcttgtaagtgtatgtatatgtgcatatgtccatatgtacatacacaamatacatatgcacatatgaattttaagtctagtttgctgaataagtcttttcttaatacataaggctcagtatgttccatgtgccttttgaaactgtcgtc

SEQ ID NO: 33449 - DNA, 201 bp, Homo sapiens
ggtctttgtggattttatttgcttcatatttgtacaaagctttcataatgtactgtcacattctcaccttaagtattttttatgttttttatattagtgtkcatggagccttctaaaatttcttctatgttcactatttttaccaaacttcaatatattatattttcagttaaaaaattagaatgaataagttctctggtt

SEQ ID NO: 33450 - DNA, 201 bp, Homo sapiens
tccctttcagagagtaccagagaaattcagaaaggaaattgtgggattaaggcttatttttattttaataaaaaacatcaaaggaggaggtaattgagaaratctgaatgtttagaaatgacatttttaatacaatattgcatgtgctaattggctgccaatataatggttttgtgactatttgagagttgaatggacatc

SEQ ID NO: 33451 - DNA, 201 bp, Homo sapiens
cgggtccactcagttatttggctctgtttgggaaggctctgggaaaaatgccatttatctatcttttcaacttgaggggacatgctttcttcacagatttytttgggatggaaagttctttctttaacctgattactgtttctaggtgctgtaaattgctgatcattctcagtaaatcaccagcattctgttctttctcag

SEQ ID NO: 33452 - DNA, 201 bp, Homo sapiens
tttactttttcttctttatttcctctctgttctttggatcatctcatctgccttcatgtatcatcaggtttgttgattcattcttttgcccatgcaaatgragtgcttagcccttcttgtgaatttttcatgcaaatttttatactcttcaagagtcccatttgactcttttagaaaataatttgtgtttgtatttatatc

SEQ ID NO: 33453 - DNA, 201 bp, Homo sapiens
tggaggcttgtcctctggaacctcacagtcttagtgtaagttacacacagtctgaggagaggagcccagaaggcttcacagctaattcctcctggaaaatscagctaactgatgagatgtggaagtgtgagcgggatcacaggcttaaacgtctgccctgtgagggtgggctttcgagaacgcaggacagacagctgtaaa

SEQ ID NO: 33454 - DNA, 201 bp, Homo sapiens
ggaaaaatgccatttatctatcttttcaacttgaggggacatgctttcttcacagatttctttgggatggaaagttctttctttaacctgattactgtttytaggtgctgtaaattgctgatcattctcagtaaatcaccagcattctgttctttctcagtcttgacaaagttgccattgtgcatatgtgtatttgtgtgt

SEQ ID NO: 33455 - DNA, 201 bp, Homo sapiens
ttggagatggatgtaagtgactcctgtggttttcaatttaatcttatcatcgaggcacaacattaatatgttaaaggccataacccttaaaagcattaatrtctgattacactatgtgataagaacttcagtagatagttatttattttaaataattgtcagtcataaagtagactgagaaatagaaaagtttcttctgca

SEQ ID NO: 33456 - DNA, 201 bp, Homo sapiens
aatcttcatgacaaagatcttagggaaattcaagtatgtacaatgagtcttctggaaagtgggcagttgaaatcatacagatgcagatgccttttttcttyagaaaacatttttttagcttaccctgtgtgttgtcagctctgggcacgttaattacaaaacaacccagtaagacaaaatgagagaaaccagaaatgtgat

SEQ ID NO: 33457 - DNA, 201 bp, Homo sapiens
ctttgctggctgtggaagtaggttttgactctgctgacccagcataatcatagtgagctcgaatgtttaaaaatagaaggggtatgaagaactactacacracacacgaataagaagagacaacccaatagcagaacaaacaacagtagcagcaacaacaaaaaatagatgtgtgatatgcctaggcaggctataaaatag

SEQ ID NO: 33458 - DNA, 201 bp, Homo sapiens
aacagtagcagcaacaacaaaaaatagatgtgtgatatgcctaggcaggctataaaataggaagcagagaggatcaattagcattaaagatattccacctrtcaggaatatgacatttaaaacaatgatgtatcataaacttataatcatcagatttgcaaaaattaaaaagtctgacaaagtattggggaagatgtggag

SEQ ID NO: 33459 - DNA, 201 bp, Homo sapiens
gaaattcaagtatgtacaatgagtcttctggaaagtgggcagttgaaatcatacagatgcagatgccttttttctttagaaaacatttttttagcttaccmtgtgtgttgtcagctctgggcacgttaattacaaaacaacccagtaagacaaaatgagagaaaccagaaatgtgatacttttcagcctgttatgactgtg

SEQ ID NO: 33460 - DNA, 201 bp, Homo sapiens
atttctttgggatggaaagttctttctttaacctgattactgtttctaggtgctgtaaattgctgatcattctcagtaaatcaccagcattctgttctttytcagtcttgacaaagttgccattgtgcatatgtgtatttgtgtgtgtgtgacagggaacatgcatggtttctgaaaaaaaaaaaaaaaaaaaaaaaaaaa

SEQ ID NO: 33461 - DNA, 201 bp, Homo sapiens
gtatgccatagctccagtgcactgcatatatttatgtatgcaacagtttaccttaccaagtataaattacaaaattttttacataatctcatttagtagcyacagtagtaatgtgaagtaagtcctactgttacatccaatttcagacagtgaaactgagagcgaagtaccatgtgcaaggtcacagaaagtaaaaacttg

SEQ ID NO: 33462 - DNA, 201 bp, Homo sapiens
ttacttaaaagcattctccatgtaattcaccatactttttcagatatgcaaaggttttaaagtgctcagatgagagaattcttgccatgctgtgttattarcctacatcattatattcttcttaagtcattgtccctcctatttctgggcattatcacgaaggcaaactataatgaactgtgttgtatgtatcacaagaat

SEQ ID NO: 33463 - DNA, 201 bp, Homo sapiens
tttccttatcactggttttgagtgtttgattatgatttctttcttttcttttttttttttttagatgggttctcactttgttgctcaggctggtcacaaawttgctttgttgtccaggctggttatgaatatgatttcctttgatgtaatttgcctagtgtttcttgtgtttaggattcattgagcttcttggattcatca

SEQ ID NO: 33464 - DNA, 201 bp, Homo sapiens
agcgggatcacaggcttaaacgtctgccctgtgagggtgggctttcgagaacgcaggacagacagctgtaaagtcatccaagcttgaactgcaatagcatraaccagtacacattcctaaaatgcttaaataagatataatttgaatatagaaagtactgtgcacaaattccattctactggttgtaagtgcctattctta

SEQ ID NO: 33465 - DNA, 201 bp, Homo sapiens
agtgctcagatgagagaattcttgccatgctgtgttattaacctacatcattatattcttcttaagtcattgtccctcctatttctgggcattatcacgamggcaaactataatgaactgtgttgtatgtatcacaagaatagatgtgactgtttttcatactggaaacagaaacaggaatatgcagcaacttccaaaggt

SEQ ID NO: 33466 - DNA, 201 bp, Homo sapiens
tgcagcagttaagatgaatagtctgcctctacagagagcaacatatataagtttgatgggtaacaagttacagaaggttgtataaggttgtatgcggtatrgtattttatactgtttatgtaagttaaaatacagcaaataagtttttgttgtttatggataccatagcacaggtgtcaactatgtaaagtgtgtaggctg

SEQ ID NO: 33467 - DNA, 201 bp, Homo sapiens; identical to SEQ ID NO: 4347

SEQ ID NO: 33468 - DNA, 201 bp, Homo sapiens
ccaagcttgaactgcaatagcataaaccagtacacattcctaaaatgcttaaataagatataatttgaatatagaaagtactgtgcacaaattccattctwctggttgtaagtgcctattcttacgatatctgtgagcaaaaatcactgaagaagatataactcagttttctttacatattctgatgccttacgggggagc

SEQ ID NO: 33469 - DNA, 201 bp, Homo sapiens
attctcctgcctcagcctctcaagtagctaggactaccagcacacaccaccatgcctgcctaatttttattatttatttgatatttgaggtccaatttctytctttttttaaacttgtatcttaacttcaggggtacacgtgcaggtttgttacataggtagacacgtgtcatgggagtttattgtacagatgattttatc

SEQ ID NO: 33470 - DNA, 201 bp, Homo sapiens; identical to SEQ ID NO: 4350

SEQ ID NO: 33471 - DNA, 201 bp, Homo sapiens
gccttttcagtttgcactgagaagttactcttaccctgatgtgataatctaatacaaatttccaaactgcttacataaaaagcagcttgaatgtgaaaaaygttgtacacagtaggggtttgtttctctatggaaatgcttttcccttgaatgcctatatggtctagatttttccagcatttctgagatttgggtatcaaa

SEQ ID NO: 33472 - DNA, 201 bp, Homo sapiens
caatgatgtatcataaacttataatcatcagatttgcaaaaattaaaaagtctgacaaagtattggggaagatgtggagaaacagaaattttggtaaactkcagataggactataagttggtataactccttcggggaggaatgcagcagtaacaaaataggttgaatattatatagtcacacactagacacagtaattat

SEQ ID NO: 33473 - DNA, 201 bp, Homo sapiens
tgcctggaacactcttctccagctcctgttaatgtctgctgctcctcatcactccaccttcagtcagatgccgtctccctgtacagtcctttcctgccccsacccctattgaaaatagtttctcctcatccctctcatacctccttatattatttcctatcaacatttggaattatcttctaatttatctttttgtttatt

SEQ ID NO: 33474 - DNA, 201 bp, Homo sapiens
actctcaccacaggaagcatcgctgtttccaataaatattgctgaagacagaaccaaaggctctgctccttcattttgtgtcagttctttgggtctaacamtgggtggatgggggctggtttcagtctccattgctttctcatgcagccaaacaagacctggctccaacttcatatctacctctttacacgtaggaaaagt

SEQ ID NO: 33475 - DNA, 201 bp, Homo sapiens
aaaaagtctgacaaagtattggggaagatgtggagaaacagaaattttggtaaactgcagataggactataagttggtataactccttcggggaggaatgyagcagtaacaaaataggttgaatattatatagtcacacactagacacagtaattatactacaaggcatagattccagggaaaactgtcactcatgagcag

SEQ ID NO: 33476 - DNA, 201 bp, Homo sapiens
caaggactatgtctcttttactcctttatatatacccagttcctagcacagagtttggtgctagcgattgattaatttgcttaatgaatgaatcaaatcaygtgaagcatacataagctccatcttacgggagtagctaacttttcaggtaagtgtcgtggtctgcagacttttacagatcagtatcagagctgttctctg

SEQ ID NO: 33477 - DNA, 201 bp, Homo sapiens
atatagtcacacactagacacagtaattatactacaaggcatagattccagggaaaactgtcactcatgagcagcaggagacattaatagagagatgcttrttgctgcactttttgtaatagtgaaaatcataaaacaacccaaataggtatcagtggggaaatggagaagtaaatgttaatatagacttacagtggaaca

SEQ ID NO: 33478 - DNA, 201 bp, Homo sapiens
gtctcttttactcctttatatatacccagttcctagcacagagtttggtgctagcgattgattaatttgcttaatgaatgaatcaaatcatgtgaagcatmcataagctccatcttacgggagtagctaacttttcaggtaagtgtcgtggtctgcagacttttacagatcagtatcagagctgttctctgtgtaatatct

SEQ ID NO: 33479 - DNA, 201 bp, Homo sapiens
ccagggaaaactgtcactcatgagcagcaggagacattaatagagagatgcttgttgctgcactttttgtaatagtgaaaatcataaaacaacccaaatakgtatcagtggggaaatggagaagtaaatgttaatatagacttacagtggaacacgatgcagcagttaagatgaatagtctgcctctacagagagcaacat

SEQ ID NO: 33480 - DNA, 201 bp, Homo sapiens
tctcttttactcctttatatatacccagttcctagcacagagtttggtgctagcgattgattaatttgcttaatgaatgaatcaaatcatgtgaagcatayataagctccatcttacgggagtagctaacttttcaggtaagtgtcgtggtctgcagacttttacagatcagtatcagagctgttctctgtgtaatatcta

SEQ ID NO: 33481 - DNA, 201 bp, Homo sapiens
gggaaaactgtcactcatgagcagcaggagacattaatagagagatgcttgttgctgcactttttgtaatagtgaaaatcataaaacaacccaaataggtrtcagtggggaaatggagaagtaaatgttaatatagacttacagtggaacacgatgcagcagttaagatgaatagtctgcctctacagagagcaacatata

SEQ ID NO: 33482 - DNA, 201 bp, Homo sapiens
aatttgcttaatgaatgaatcaaatcatgtgaagcatacataagctccatcttacgggagtagctaacttttcaggtaagtgtcgtggtctgcagactttyacagatcagtatcagagctgttctctgtgtaatatctatttggtgtcatgtacaattagtatatttcacaattgctttgggaaaagtgtggatgtgcata

SEQ ID NO: 33483 - DNA, 201 bp, Homo sapiens
tacagcaaataagtttttgttgtttatggataccatagcacaggtgtcaactatgtaaagtgtgtaggctgtttttgaacagctcacaagctaagaatgaygtttacattttaaaagtgtaaaaacaaccaaaacatgttacatagactccacctgaccctcaagttttaaaatatttctatttgctcctttactaaaaaa

SEQ ID NO: 33484 - DNA, 201 bp, Homo sapiens
atacataagctccatcttacgggagtagctaacttttcaggtaagtgtcgtggtctgcagacttttacagatcagtatcagagctgttctctgtgtaatayctatttggtgtcatgtacaattagtatatttcacaattgctttgggaaaagtgtggatgtgcatactgtcatgtataaaatcactgggctgaagctatta

SEQ ID NO: 33485 - DNA, 201 bp, Homo sapiens
atctgtgtgcccagggccatgccctccatgccctccagcccaagcttggtagacagctccctgaaggccacctctgactttcctgccccaggagttattcytgtgccttggaacttcagttcttcctgggggcagcctgaaacatcagggattaacacactggaggcaaccacagccactgggaatgtgaatcagtggatg

SEQ ID NO: 33486 - DNA, 201 bp, Homo sapiens
agctattaatagacatttgtgtttatatacatagataatagttgtatctatttttgaatgagaaaactgaagctgcaaggtgattagcaatttgcccgaastatacaacagaacagccagaatctttattcagatattactatctccaaggcacattctgttttcaaaacaaaatgtcttatgctacaaagtcttaaacta

SEQ ID NO: 33487 - DNA, 201 bp, Homo sapiens
acagatttctttgggatggaaagttctttctttaacctgattactgtttctaggtgctgtaaattgctgatcattctcagtaaatcaccagcattctgttytttctcagtcttgacaaagttgccattgtgcatatgtgtatttgtgtgtgtgtgacagggaacatgcatggtttctgaaaaaaaaaaaaaaaaaaaaaaa

SEQ ID NO: 33488 - DNA, 201 bp, Homo sapiens
ctctttgaagaggtccttcacatcccttgtaagttggattcctaggctttttattctctttgtagcaattgtgaatgggagtttactcatgattgggctcwctgtctattattggtgtatgggaatgtttttgattttttgcacattgatttttttaatcctgagactgctgaagttgcttatcagcttaaggagtttttg

SEQ ID NO: 33489 - DNA, 201 bp, Homo sapiens
aattgtgttgatggatcagtacacaatattgtatcatttatcatttctattggaatgtttttattttaattactttggtagaccgatttgcattaagaaakttacccatggatagatatattagaggatgttttaatattctttaatatataatattcttcagaagattaaccaactaatgtatcataaaatcggtagagt

SEQ ID NO: 33490 - DNA, 201 bp, Homo sapiens
agactgctgaagttgcttatcagcttaaggagtttttgggctgagatgatgggattttctaaatatccagtcatgtcgtttgcaggcagagacagtttgamttcgtctcttcctgtttgaatacactttatttctttctcttgcctgattgtcttggccagcacttccaatactatgttgaataggagtggtgagagaggg

SEQ ID NO: 33491 - DNA, 201 bp, Homo sapiens
cttctggaaagtgggcagttgaaatcatacagatgcagatgccttttttctttagaaaacatttttttagcttaccctgtgtgttgtcagctctgggcacrttaattacaaaacaacccagtaagacaaaatgagagaaaccagaaatgtgatacttttcagcctgttatgactgtgccactcatgagggctgtctctggc

SEQ ID NO: 33492 - DNA, 201 bp, Homo sapiens
acaagtgcttcctcacattgtaattctttcatttgtccatggggattttggtgctggtaagaaattctgtagggaatcggtcaaatcattttatattttgrttttcagttttagatcctacacacatgggccaaaaatttgttttcagaattatttcatccgctctaatgtgatttatcttacaagttttcttcccacccc

SEQ ID NO: 33493 - DNA, 201 bp, Homo sapiens
gggctgtgatggaaataatgactaaaacaattgaataccttcaacccaatccaggtaaggcatcatcttatatgtttaaaggatccctcgaggtaactttyagtttctctttgatagacattttaagtttggtgtgtttcttcttttggtgttgcttcctcggtccacttttctgagaggttagcgacttcatggatagca

SEQ ID NO: 33494 - DNA, 201 bp, Homo sapiens
aataatgactaaaacaattgaataccttcaacccaatccaggtaaggcatcatcttatatgtttaaaggatccctcgaggtaacttttagtttctctttgrtagacattttaagtttggtgtgtttcttcttttggtgttgcttcctcggtccacttttctgagaggttagcgacttcatggatagcacattttaactggg

SEQ ID NO: 33495 - DNA, 201 bp, Homo sapiens
tttattcagatattactatctccaaggcacattctgttttcaaaacaaaatgtcttatgctacaaagtcttaaactacaaagatacctccaggcttggtawgtgtggcaagtgtactctagggtgacttgtacaggttcacacccttatataatcccttcccgttgggtgtagatggaacctgtgacttgctgctaaccaa

SEQ ID NO: 33496 - DNA, 201 bp, Homo sapiens
ctcagtaaatcaccagcattctgttctttctcagtcttgacaaagttgccattgtgcatatgtgtatttgtgtgtgtgtgacagggaacatgcatggtttytgaaaaaaaaaaaaaaaaaaaaaaaaaaaaaaaaatccttgccccttttagatttggaaattagcatagctaggctagccagatccctcttttggaggaa

SEQ ID NO: 33497 - DNA, 201 bp, Homo sapiens
tcccttgatagtgattacattatatggccaaatcgatggtgcatcactcccatgaccaagtcacattatgtgagacagtcttagcagactaatacgagagrcattcccttccttgtctagaagaagcacactgccatgttatgacagcccaaggagaggaccacatgtcaaggaactgggggtagtctctagaacctaagg

SEQ ID NO: 33498 - DNA, 201 bp, Homo sapiens
tacacattcctaaaatgcttaaataagatataatttgaatatagaaagtactgtgcacaaattccattctactggttgtaagtgcctattcttacgatatytgtgagcaaaaatcactgaagaagatataactcagttttctttacatattctgatgccttacgggggagcaaaaactgaatcgatgttgtccaatagaaa

SEQ ID NO: 33499 - DNA, 201 bp, Homo sapiens
tgctgcctactcccaggtgttaagttactggtaggacccacggctgtgtgtttattgcacaatttggtgaatcaaaggctgacttcctggtgagcaccccstagcagggtgagatatggacctttctggagtctgttttacaagaagtgtttactgggatattttaggaattctcagataaatccatatgatagcctacct

SEQ ID NO: 33500 - DNA, 201 bp, Homo sapiens
gcagactaatacgagagacattcccttccttgtctagaagaagcacactgccatgttatgacagcccaaggagaggaccacatgtcaaggaactgggggtrgtctctagaacctaagggtggccactggccaacagccagcgggaagccagagctctcaatcacactgccacagagaagtgaacagcccggactcaggaag

SEQ ID NO: 33501 - DNA, 201 bp, Homo sapiens
gggctgctgactgtgtactacagcacagggtcttaatatccctccctgctgtttcctacttgaggcataagagagctttgtcaccttggagagaggtgttmtataaataccattatttgggttgagagtagcacgatccagtgctagggttgtctatttgtgtaagtcagtaggcaaatcttcctcttcccttttctcagt

SEQ ID NO: 33502 - DNA, 201 bp, Homo sapiens
aggctatttgccctgtggctttaggctccttggataccttacattgaagtaggaggtagattgggaacacctgtcactgtcttttcagcttaagatgaggkctcctgaaccccccagggagtataggtcagtccagttccaccaaagactgaagatatctttgtgttttgaaacatgatagcaaagaacacttggcacagt

SEQ ID NO: 33503 - DNA, 201 bp, Homo sapiens
aggctgatgatgttagtacactgagggttgtgtatttttcagatttcacaaactgttttatgcccctgagggggacagttgcctgctttgccagggcactstgtgagacctgtgttggcaccttgcagcacccaatcttgaggtgggagatgtttgctgccccatgtcacaagttcttagggctgctgactgtgtactaca

SEQ ID NO: 33504 - DNA, 201 bp, Homo sapiens
tttttcagatttcacaaactgttttatgcccctgagggggacagttgcctgctttgccagggcactctgtgagacctgtgttggcaccttgcagcacccartcttgaggtgggagatgtttgctgccccatgtcacaagttcttagggctgctgactgtgtactacagcacagggtcttaatatccctccctgctgtttcc

SEQ ID NO: 33505 - DNA, 201 bp, Homo sapiens
cttttctcagtgtcttctaatagttaactacaaaagaaacaacatagatgtgagtatatttacctaagttctcattacagtataactctttctgtcatttygtaattgttagtgtgcaaaacagcagagcacattggtatcagtgcagagagcatcagagggccacgtttcagacttgtagatgctctgagacttcaccta

SEQ ID NO: 33506 - DNA, 201 bp, Homo sapiens
ttggcagaccactgctgagtacagtgtcagcatgacttccagccgcgtctcagcctccctcacctactgcgggacttgtccggggctctgttgcatacccygccattgtatacagactcaaccaaaaaccggtattctaaagctcatcatttttgtcatttagagcacttattttctcatttcagaaagtggatgtcacca

SEQ ID NO: 33507 - DNA, 201 bp, Homo sapiens
agaagcaaattttaaaaaatttaaaagatttttgcacactgaagttgcatattgattatagccaacccaaatagatcctttcctgggaacagaagtttgastgggtttggaatcagggtacctgggtttcagtcctctctctgtaacacctggctgtctgaccatagcatacctggtcacttcactccccacgtccttggc

SEQ ID NO: 33508 - DNA, 201 bp, Homo sapiens
tatcaggcctacattaggcactgggaaagagggatgaacaagatcaaaatcactgccttgcaggaactcagaaagtttgtagaggcattcatataaacaaygatagtttaaaatactgtctaacaagtgctgaatggttaggcacaggggccatgggagcacagaggggtttggaagtcttcatggggaatggtataattg

SEQ ID NO: 33509 - DNA, 201 bp, Homo sapiens
atgggaatagcctacatagatgcgaacagccaccaattagaagatatcgtggaaggaaagatctcatttgcagtagcattaaacaaagataaaattcctarctataaatgatataatttttctatttaaaaaataaatataacacatgtatgatttttcctagaaaaagacatgagaaacagaaaagcataccatgttctt

SEQ ID NO: 33510 - DNA, 201 bp, Homo sapiens
gtcttctaatagttaactacaaaagaaacaacatagatgtgagtatatttacctaagttctcattacagtataactctttctgtcattttgtaattgttartgtgcaaaacagcagagcacattggtatcagtgcagagagcatcagagggccacgtttcagacttgtagatgctctgagacttcacctaagaaaaccagg

SEQ ID NO: 33511 - DNA, 201 bp, Homo sapiens
agccccaaatcttatttagtgtgatttgaggatttatactcatcttacaattgtaatctctatattagacttcacaaatttagttaaaataatttagaatkaatttttcttatttttcatagtaaaacatgcataacatgaaattatcttaactatttttaagtatacatttcactggtattaaatacattcataatgttg

SEQ ID NO: 33512 - DNA, 201 bp, Homo sapiens
ggaattctcagataaatccatatgatagcctacctgtatttcctatgaataaattgggtatttaagatgtatattcttttcatttgtcatttttccttgaktttaaaatttcccttcattggctgggtgcggtggctcatgcctataatcccagcactttgagaggccgaggtgggcggatcacgaggccgggagattgag

SEQ ID NO: 33513 - DNA, 201 bp, Homo sapiens
gaggaaaatgttaggattaggtagttatataatgatttgtttgatagaaggagcactgaggttgaaatcagaagatacaaatttgaatgcttgcttctatwcccaccagatgcatagcctttagtaagtttttcagaccctcagagccacagtttgctgctataaaaatgagactctccacctaagtcagggaatggttgt

SEQ ID NO: 33514 - DNA, 201 bp, Homo sapiens
atttttcttatttttcatagtaaaacatgcataacatgaaattatcttaactatttttaagtatacatttcactggtattaaatacattcataatgttgcrtaatcaccaccaccatccatctccataactctttttgtcttgtaaaagtaaaactctatccccattaagtaataactccccctttcctacttcagccgct

SEQ ID NO: 33515 - DNA, 201 bp, Homo sapiens
ttattcattctcatgttcacattcactgtataatcttgtttgtggcttatctttgacttttatacatactacatagattggacaattttcctggtgatackgtactctcacattgtgaagggatggctcaatattaattttagagtggatgctttgaaatattatcaatgacaagattttagcattttataaccttcaacc

SEQ ID NO: 33516 - DNA, 201 bp, Homo sapiens
ctgctttgaggaacactggtggagggagtgaccatgtgatataaggagaatcgattttccttcttcttctgcgtgtgaccttgtatttattctgccatccrctataacttctgagggtttactttttatcaggaatttaaatcctaaggtgtcataaagatgagttaaaatggttctgttcttgaagtatcttcagtgtga

SEQ ID NO: 33517 - DNA, 201 bp, Homo sapiens
ttttgtgacggctttatttcacttggcataatgtcccaaggtttacttatgtaatagtgtatataagaattgccttcctttttaaggctgaatagtattcygttgtgtgtaaatagtgcaatttttatatagattcacctgttgatagacaactgagttgctttcacattttagctattgtgaataatgcttctatgacca

SEQ ID NO: 33518 - DNA, 201 bp, Homo sapiens
taatgtcccaaggtttacttatgtaatagtgtatataagaattgccttcctttttaaggctgaatagtattctgttgtgtgtaaatagtgcaatttttatrtagattcacctgttgatagacaactgagttgctttcacattttagctattgtgaataatgcttctatgaccatgagtatacaaatatcactctgaaactc

SEQ ID NO: 33519 - DNA, 201 bp, Homo sapiens
tatatagattcacctgttgatagacaactgagttgctttcacattttagctattgtgaataatgcttctatgaccatgagtatacaaatatcactctgaarctctgctttcaattattttgggtagatatccagaaatggaattgctggaacttaagggaattctattttttatttctgaggtaccactgtgctctcttcc

SEQ ID NO: 33520 - DNA, 201 bp, Homo sapiens
tattttttatttctgaggtaccactgtgctctcttccacagcattttactttctcaccaacagtgcacaagggttcgagttactctacatccttgctaacrcttgttattttctgtttttttgatgtttaccatccttatgagtgtgaggtggtatctcattgtagttttgatttgtaatgacctaatgattagtgaagtt

SEQ ID NO: 33521 - DNA, 201 bp, Homo sapiens
gttgtttgggttttttgttgcgttttaggagttctgtacatatcagatatgatttacaaatattttcccccattctgtgggttgcctttttactcagtttmtagtgtcttttgatgcacacaatttcttaactttcgtgaagtccaattgtgtaattttttttgttgttgcatatgcctttggtatcatatccaggaattc

SEQ ID NO: 33522 - DNA, 201 bp, Homo sapiens
attctgtgggttgcctttttactcagtttctagtgtcttttgatgcacacaatttcttaactttcgtgaagtccaattgtgtaattttttttgttgttgcrtatgcctttggtatcatatccaggaattcattgccacatccagtgtcatgaagcttttgcctgtgttttcttctaagagttctagagttttagatcttac

SEQ ID NO: 33523 - DNA, 201 bp, Homo sapiens
ccagttattttcttatcttttgttctttagccagattcatttgtctttctgactttttcatgatttttctgtattttacccttattctttagaaatgtttstctattctgtgcttgtgattgatttctaacgtctcctagaagttacaaagggcctgggttaaaatcctgtcagcaataacgccatatggtttcctagatg

SEQ ID NO: 33524 - DNA, 201 bp, Homo sapiens
taaccaaccagagcacaagtgacaggcaagcttttagctttagggatgttcttaacacatcccgaagattttgtgctctcaatgtgtccctgctatttggrgcttccctgaaaaagattctgtcaggagcttctgctaattaaattgaattggtccagctttgttgtaaacaggtaacggattgtggtgttttattacttg

SEQ ID NO: 33525 - DNA, 201 bp, Homo sapiens
tttttagaaaaattttttgtagagatggggtctttctgtgttgcccaggcttgtcttgaacacctggcctcaaatgatcctcttgtcttggcctcccaaastactggcattacagacaagagctactgcagtaggctacagttacttttgtttccaatcccaggtaatagacatcccctcactactgactcatcctcttcc

SEQ ID NO: 33526 - DNA, 201 bp, Homo sapiens; identical to SEQ ID NO: 4345

SEQ ID NO: 33527 - DNA, 201 bp, Homo sapiens; identical to SEQ ID NO: 4344

SEQ ID NO: 33528 - DNA, 201 bp, Homo sapiens
tcttagtgtaagttacacacagtctgaggagaggagcccagaaggcttcacagctaattcctcctggaaaatccagctaactgatgagatgtggaagtgtsagcgggatcacaggcttaaacgtctgccctgtgagggtgggctttcgagaacgcaggacagacagctgtaaagtcatccaagcttgaactgcaatagcat

SEQ ID NO: 33529 - DNA, 201 bp, Homo sapiens
tgggttgcctttttactcagtttctagtgtcttttgatgcacacaatttcttaactttcgtgaagtccaattgtgtaattttttttgttgttgcatatgcstttggtatcatatccaggaattcattgccacatccagtgtcatgaagcttttgcctgtgttttcttctaagagttctagagttttagatcttacagctag

SEQ ID NO: 33530 - DNA, 201 bp, Homo sapiens
ttccatttatatatgtcttttaaaatttctttcagcagtgtttggtagttttcattgttgaagtcttttacctccttggttaaattaattcctgagtattktattctttttgatactattgtaaatggaattaaccttttaatttccttttcagattgttcgttgtcagtgtatagaaatgcaactgatttttgtgtgttg

SEQ ID NO: 33531 - DNA, 201 bp, Homo sapiens
aaatttctttcagcagtgtttggtagttttcattgttgaagtcttttacctccttggttaaattaattcctgagtattttattctttttgatactattgtmaatggaattaaccttttaatttccttttcagattgttcgttgtcagtgtatagaaatgcaactgatttttgtgtgttgactttgtgtcctgctactttgt

SEQ ID NO: 33532 - DNA, 201 bp, Homo sapiens
gttatcatgaagctaccaggccctgcataactgtgtgccaccaaaatctccattgtttttgacaatgctcttaggcgtgaacttctcccctctttgttccmaataaagtcagtctcctcagtcagcaaggcagaaggggagctccctctgtcctcagggcatgccatttctcctgcacagaatctctgtggcactgagtca

SEQ ID NO: 33533 - DNA, 201 bp, Homo sapiens
agtcttttacctccttggttaaattaattcctgagtattttattctttttgatactattgtaaatggaattaaccttttaatttccttttcagattgttcrttgtcagtgtatagaaatgcaactgatttttgtgtgttgactttgtgtcctgctactttgttgaattcatttattagttctgacagctttttgtgggaaa

SEQ ID NO: 33534 - DNA, 201 bp, Homo sapiens
aggcgtgaacttctcccctctttgttcccaataaagtcagtctcctcagtcagcaaggcagaaggggagctccctctgtcctcagggcatgccatttctcytgcacagaatctctgtggcactgagtcagagttgtggtgatggtggctctggtctttgtagcctgcctctcttcgtgtggaatgtctaccctgtgagtga

SEQ ID NO: 33535 - DNA, 201 bp, Homo sapiens
taaaatatgctgttgaatttgctttgctagcattttgttgagaattttcacaacaatgatcgtaagagatattggtctgtagttgtcttgtagtgtctttrtctggctttgctatcaagataatgctgtcctcatagaatgagcaggaaattttccttcttcaattttttggaaaagtttgaggagagttggtgttagttc

SEQ ID NO: 33536 - DNA, 201 bp, Homo sapiens
aagataatgctgtcctcatagaatgagcaggaaattttccttcttcaattttttggaaaagtttgaggagagttggtgttagttcttcaaatatttggtaraagtcactggtgaagccatcagatcctaggcttgtttttgttgggagatttttgattactgattcaatcttcttactaatgataggtctgttcagatttt

SEQ ID NO: 33537 - DNA, 201 bp, Homo sapiens
gttagtcttggtaggttttgtgtttctaagagtttgtccatttcatttaggttatacagttcattgttgtgcagttgttcatagtactcttaataatcttrtttacttgtgtagatcagaatgaatatccccactttttatttctgattttagtaatttgtgtcttttctctctgtttttttctagttcagctagctaaat

SEQ ID NO: 33538 - DNA, 201 bp, Homo sapiens
gccatcataatcatctagggtggggagaaaaatagggtgcggagggcagaatcacccctcatccttgctcttccagcagggaacactcattttcacacccytgtgcctctgcagccccaccctttgttgaggtttgtgctgggcatgtacgttccacagagtctgctggtttccagtgtgacagaaatctcatttgtgata

SEQ ID NO: 33539 - DNA, 201 bp, Homo sapiens
tccttgctcttccagcagggaacactcattttcacacccttgtgcctctgcagccccaccctttgttgaggtttgtgctgggcatgtacgttccacagagwctgctggtttccagtgtgacagaaatctcatttgtgataaaccttgattttgaattgtagtaaatgaaactttaaaaaaagcagacattaaaactccctg

SEQ ID NO: 33540 - DNA, 201 bp, Homo sapiens
agaaatctgaataatgtgtatatgagtgtgttatgttattctttgtactttgcattttcaaaatgtcccatctttttttttttttttaagccaagaagtaygataatacttacctggccaccacagatgagaattgaagtgcaataaaacttgccacaagctgggaggaaccagcagtgtgctgctacaggcttaacaacc

SEQ ID NO: 33541 - DNA, 201 bp, Homo sapiens
agcataaaataacattgtgagatttcctctagcaattttaaacttaaactagatgtttattcgagggcagctttaagctgcatttgcatagcaggcttttkgctgtgtatttattgggaggagagctgttggaaattacagagctgttggaaataaaccctagctaattctcagggtttcttccagtattgaacttgtctg

SEQ ID NO: 33542 - DNA, 201 bp, Homo sapiens
tagtctagtggggagggcaaacttggggcaagtaatgaccagcgtggcgaggaggaaaactaatggagctacagaagcccagcacagaggaaactcacccrtactgcattgtcaaggagaaccttcctgatagttaagtgaagatgggaaagagttagcagagcctggtaaaggaaacagcatgcaagcaggcaagaggga

SEQ ID NO: 33543 - DNA, 201 bp, Homo sapiens
ctttttagtttttctcttggtgagtttattgatgaattcaataaatattttctttgtgtcttccatgaaccaggaggtaggatatagacaaggttcctgartgcatgaagttcgtagtctagtggggagggcaaacttggggcaagtaatgaccagcgtggcgaggaggaaaactaatggagctacagaagcccagcacag

SEQ ID NO: 33544 - DNA, 201 bp, Homo sapiens
agcaattttaaacttaaactagatgtttattcgagggcagctttaagctgcatttgcatagcaggctttttgctgtgtatttattgggaggagagctgttrgaaattacagagctgttggaaataaaccctagctaattctcagggtttcttccagtattgaacttgtctgaaaagctgttggaaattagtgtgcactgac

SEQ ID NO: 33545 - DNA, 201 bp, Homo sapiens
tcagaataatttatattttgtcatcgttggatggagtcttttataaatgttaataaagtcagtgtggttgataggatagttctagtctactatgtatctgrcaattttctgtccatttgttttaattattgagaaaagggtactgaaatcctcaactttaatttaggattttgtctgttttacttgtatttctgtgttttt

SEQ ID NO: 33546 - DNA, 201 bp, Homo sapiens
taatctttagttgtacgatattgtgaattttacttgacttagggggctggatgttttaatttttctataacagttcttggtctttgttctgggacacagckaaattacatggaaacagttttattcttttgggtcttgcttttaatatttgctaggagggaccagagcatcatttggtttatagctaaagcgccttgcttt

SEQ ID NO: 33547 - DNA, 201 bp, Homo sapiens
attgtatcagacaagggggaaaacgcgtgtgtgactttccctaaggtaagatgggcttaagggatattgaaaccagggcagagaaatgttttctgtgaccmaccagtcagggcaaggcatagaaggagcaatgacttattcattagcccagatagaaggccagtctttttcaggctgcggcgcagagacgccaggctcaaa

SEQ ID NO: 33548 - DNA, 201 bp, Homo sapiens
tttggacatcctcctcacagtatcctcagtgccggacatacaaaagacattcagtgactatttttaaatgaacaagtggtagaaattagaaggtagtcagkttctgacctgtgatggcagaggaggagatactgtgatagggaaacaagcatataaaaaaggcaacacatttgactgttgtgtctgatcatgactgtttta

SEQ ID NO: 33549 - DNA, 201 bp, Homo sapiens
tttcacattttctgatgtacttgctgttctcatcttctgatttcatgccctctggccttctagccccgtgcatcgtttttgagcacatttgaacatgtctkatccatgtagtctgaacctgttgctctctgagggttaccctactcatccctgcatgcttgccttcatctggaaccagcctgatgcattccaagaggagga

SEQ ID NO: 33550 - DNA, 201 bp, Homo sapiens
ggtgctggtctcttggaggagctatgctttccctatttaccccctgggcttttggacatcctcctcacagtatcctcagtgccggacatacaaaagacatkcagtgactatttttaaatgaacaagtggtagaaattagaaggtagtcaggttctgacctgtgatggcagaggaggagatactgtgatagggaaacaagca

SEQ ID NO: 33551 - DNA, 201 bp, Homo sapiens
agaagattaaccaactaatgtatcataaaatcggtagagtaactgactagctttatgaaattgtaaatttgttgaaaattgattttttttttactggagaygagagttccataattgaaaaaatatcctatgccagtgctttgtagattgcaagtaacgtagataatcttgcctgtagttccttgatgaaaatgatctgtt

SEQ ID NO: 33552 - DNA, 201 bp, Homo sapiens
gcatcccccagtgcaagcttccaggttccttatctatgtttgcagtctgatcttccaggctactctttgttagaaaataagtaatttcttgggctgctttytgttagaagggaagttctgcgaaggatgctgtgccctcactatctgcctcaatagttttttctacctcctgtatcatgataatggcatgtttagttatat

SEQ ID NO: 33553 - DNA, 201 bp, Homo sapiens
aaagccttaagctcctgggggaagggcggcaaactctaggctcaggggacaggtggagacctatttcagctaggggaaaggaacaggaaaattgctgtacstttggaggagggtcaaagaaatattatccactgggactattagagatctcctaacattgtgggaggaggtagatcacttggaacgtcctacccctatacc

SEQ ID NO: 33554 - DNA, 201 bp, Homo sapiens
tgccggtaaaaactgccagattccaaagccagagttttttcaatacactcaaggaataaaacgtcagctgctgtttttattagcactcaccaatgagacascatcctgtcctgttccctgttttcatcctgcagcgccatatattgctccaaagcttagatagtgcccagagcccacctacagctcatcttcctatgaggc

SEQ ID NO: 33555 - DNA, 201 bp, Homo sapiens
tcagggtttatttcaggattacaaaagtaatatgtatttattgggaaaagtataaacgaacaaaaggaaatttaaacaatctatattctctcaccagagakagttttgatatataaggacttagttttctgttaatcttttttatatgtatattttaacaggatcatactaatgtaagcctgatttcttttaactttacta

SEQ ID NO: 33556 - DNA, 201 bp, Homo sapiens
atcgaaatggccacatccaggggtttctatggaacttgaccatttcagggtttatttcaggattacaaaagtaatatgtatttattgggaaaagtataaaygaacaaaaggaaatttaaacaatctatattctctcaccagagatagttttgatatataaggacttagttttctgttaatcttttttatatgtatatttta

SEQ ID NO: 33557 - DNA, 201 bp, Homo sapiens
tccaggcactgtggaagggtgctgaagacacaaagaggagtaaaaatatgcatccttttcttaaatagttggaagcctagtgagggagatagaaatatatrccattaacaatagagtgagggcagtacccctagaggccctataagtacaaagtgctttgaatccttagaggaaggagtggtccttatgattggagtggaa

SEQ ID NO: 33558 - DNA, 201 bp, Homo sapiens
gcttaagggttcctgttcttctttttaagtcattaaattgtatcagacaagggggaaaacgcgtgtgtgactttccctaaggtaagatgggcttaagggayattgaaaccagggcagagaaatgttttctgtgacccaccagtcagggcaaggcatagaaggagcaatgacttattcattagcccagatagaaggccagtc

SEQ ID NO: 33559 - DNA, 201 bp, Homo sapiens
atatttttaataacacagaagtttcattaacccaagattcttaatatgtaataaatttgtgaatgaacttaaaagctagtctcttcagatatgtgaattartaggctttttttaatcatttgaagtagataagctagtagaaaatggctttcttcctccttcttatgaaaatatagaacatatccaagatactcttagtaa

SEQ ID NO: 33560 - DNA, 201 bp, Homo sapiens
tcccccaagatgcccctggaaatcaccactgcttgctctaccaaggtaccagaaaatctgccctggaaaatgagtcctttggattaaatctttccatcttyaggacctgcttgaagtgcaggtgtccctggagagggagctaattaaatcatttaacacttaaatagggattcagttatgaaattatcttctgagaaagaa

SEQ ID NO: 33561 - DNA, 201 bp, Homo sapiens
ctttattctagctgtgcaactgtgggcaagttccatcttctccaaagttagcttcctcagggtattgcaagaattaaatagcaaaatgcacataagtgtcyggcgtagagtaagtgatagcttcctttcttttcctcattttaatcaattacccagttggtggatgtgataacaaatgaacttcctgaagatcagagctgt

SEQ ID NO: 33562 - DNA, 201 bp, Homo sapiens
ctccttctttggcgggtccactcagttatttggctctgtttgggaaggctctgggaaaaatgccatttatctatcttttcaacttgaggggacatgctttyttcacagatttctttgggatggaaagttctttctttaacctgattactgtttctaggtgctgtaaattgctgatcattctcagtaaatcaccagcattct

SEQ ID NO: 33563 - DNA, 201 bp, Homo sapiens
aaattagccaggcgtggcagcgggcgcctgtaatcccagctactcgggaagctgaggcaggagaagttcttgaacccaggaggcagaggttgcagtgagcygagattgcgccactgcactccagcccgggtgaccgacagagcgagactccgtctcaaaaaaaaaaaaaaaaaaaaaaaattcccctcgttaatatgtgtt

SEQ ID NO: 33564 - DNA, 201 bp, Homo sapiens
acaaaacaacccagtaagacaaaatgagagaaaccagaaatgtgatacttttcagcctgttatgactgtgccactcatgagggctgtctctggcttctctrtgtttgattttcatattgaatagtttttttcagactttttctccagaggataatatacttttcctgagaatacacagttttgttaattattctatggttt

SEQ ID NO: 33565 - DNA, 201 bp, Homo sapiens
gataatgcatttcatacacctaatataccaaacattatagcttagcctagcctaccttaaacatgctcagaacccttacattagcctgtagatgagcaagwtcatctaacacaaagcctattttgtaagaaagtggtgaatatctcatgcagtttattgaatactgtactgaaagtgaaaagaagattggttgtgtgggtg

SEQ ID NO: 33566 - DNA, 201 bp, Homo sapiens
tgccagttttgcaaagtaattgaaataaaagagaatcctccaagcattttactttaggcaaataccaacagaccttcctctgagtatgaaagtaaggtatmaggattatttctcctaatttatagaaatgtttctgaaacttttatttcaaaatatagatactcctgcagcaaagtaaacatctgattgactgaagaacac

SEQ ID NO: 33567 - DNA, 201 bp, Homo sapiens
aatccttgcttatcatatcattgcatctaaaacaacctgcatgtgaatataaaagagtccttttttccctcaacacattaaaatgccattattacaattargaaattagtgattccctaatattcatgatgatttttaaggcataggaaaaatgagtcttccagtaagtaaataatgtccaccgaaatatctaaaaggcac

SEQ ID NO: 33568 - DNA, 201 bp, Homo sapiens
tctattagcaacttcattagacatccactagtacataactttgtcactgaaaccatatcattgccccccgaatagccttctagactcctaaccttggaatrcaccaaggaatatttaaactgtctcatagttttgcagaagcagaaaatgctaggattgtaaccctgatgatcagttctccctgatgacttggcctgtgtt

SEQ ID NO: 33569 - DNA, 201 bp, Homo sapiens
ctgtataatcttgtttgtggcttatctttgacttttatacatactacatagattggacaattttcctggtgatacggtactctcacattgtgaagggatgrctcaatattaattttagagtggatgctttgaaatattatcaatgacaagattttagcattttataaccttcaaccaagcacttatttgggggtctgcaac

SEQ ID NO: 33570 - DNA, 201 bp, Homo sapiens
gtttggccattatgcattctgttagactgaaattttaacacacatactctgattaattttacaaaagatgtatctgggttttagtaattttgtgaatcaargaactgggaatttattatcatatcaaaaaacgtgaccactcagggttctgaaatacggatttattgttgttctgtgactctagtccgtttcgtagctacc

SEQ ID NO: 33571 - DNA, 201 bp, Homo sapiens
gggaagacttggctttagcctcctctctgttgtgttttaacctcttcatgtctcgggcttcttacttttctcctggtgttgttgagtgtagagtggttgtratgatgagttcacagagatttaagagctctaagttcttttgggtcagaggagtgatttctcttttttgcagtgtaaggtacaaaatattaaatatctgag

SEQ ID NO: 33572 - DNA, 201 bp, Homo sapiens
aagtgttaaataaaacccttatttcttcttagtgaaggttctttcaattgacaattaactggatttttctatatttctctgagagttattcattgtgacasattttgtttcatgacagatgtaaagaacttctttaatttttgatgttcatagagtagacgtcatacaataataaccttgcaaataggaagtatcgatcat

SEQ ID NO: 33573 - DNA, 201 bp, Homo sapiens
tctcccaaagaggacacgtctagcaagatccactggactgctgacggtggtggattgctgggcacaagcatgcctttatggatggtctggctttctctggrgcctgccactctttgatggcttcaatggcaagtgcttcgacctctgagataaataatttctgtgaaatcatttctagagtgaagctaacttttccaacct

SEQ ID NO: 33574 - DNA, 201 bp, Homo sapiens
ctttattgtaatgtaaacccaccaaacaagatttctggcagttctgtacatggaaaatataaggactcaatttgtaggtaagtggtttctatcctggagamaacaaagcccatcatactggatgttcacatcagctgggctgtatgacaatgttggtgagtcagtgctttgaaggccctaaggttaaatgttttgaatacc

SEQ ID NO: 33575 - DNA, 201 bp, Homo sapiens
tggcaaaactagtgatataaagcagattagtgattgcctgggctggtagttgagagatggcatttgactacagaaagtaccaggaaactttttagggtgayagtattattattaatatatcttgaatgtggtgggagttataaggttgtgtgcaattatgaacactcatcaaaatataaaattaaaatgagtgacttttct

SEQ ID NO: 33576 - DNA, 201 bp, Homo sapiens
caacttgaggggacatgctttcttcacagatttctttgggatggaaagttctttctttaacctgattactgtttctaggtgctgtaaattgctgatcattytcagtaaatcaccagcattctgttctttctcagtcttgacaaagttgccattgtgcatatgtgtatttgtgtgtgtgtgacagggaacatgcatggtttc

SEQ ID NO: 33577 - DNA, 201 bp, Homo sapiens
agccctcaatcaaatttgagttggctagtgggggccccttcaagatggctcctgtgtccatgtggcatgttcccatcacttacttttgacaaatttttcastttctggcataacaatgtgatcaggctcatcttgtatatactctagccctggagccatctgttcctttgaggatcccagattccttttagtggagaaagg

SEQ ID NO: 33578 - DNA, 201 bp, Homo sapiens
aggtttgaatcctgcctctgctgcttctgaccttgagagagtatttaacttctgaacctgtccatgctgaagtgatgataatttccgttgtctcttcaggrttgaggtgaagagaaacgagtgtgtagaacacacgtataaagtgttcaataaattatagttattgacataaaggatatttttattagtataaaatactat

SEQ ID NO: 33579 - DNA, 201 bp, Homo sapiens
acacacgtataaagtgttcaataaattatagttattgacataaaggatatttttattagtataaaatactatcccttatgctatgaagaagttacccaagstagaccttttagtttttccaacttaaaaaatagagcgctccatttccgctaaatcttgaagttctgtgtcgccctaaagtgtagaaaaaataatttaaac

SEQ ID NO: 33580 - DNA, 201 bp, Homo sapiens
tgtcctacttttgtagccatttttttccatcaggtccgtgaacctgatgttatctacagagaagctttagacctagaattacttccttttgagaactgatrtgctggataatatagcctgggtttgtttgtttgtttatttatttattcatttgagacaaagtttgactcttgtcgcccaggcaggagtgcaatggcgtga

SEQ ID NO: 33581 - DNA, 201 bp, Homo sapiens
cccatattgggtatattcctaaaggaatataaatcattctaccataaaggcacatgtatgcatatgttcagcacagcagtattcacagtagtaaagacatagaatcaacctaaatggacttgatatagaaaatatgtatcatatgtaccatattcaggccacttaaattgacgtagattcaacctaagtcgactggataaa

SEQ ID NO: 33582 - DNA, 201 bp, Homo sapiens
tgaaacaagttttatgaaaaaaggagagtattagcctgaggacaaaagtagtttggagttctgtagaggagctgccagtattaatgaactatcacttggarcctgcaacctgtcagccttgacttttcctctcctgggtcagccatcattggtcctccacattgcttttcactttgccagctaaggcttttcagtggcttc

SEQ ID NO: 33583 - DNA, 201 bp, Homo sapiens
aaaagaatctcaggggctttcctacaaatgtctgtcacaacctcaacaacctcacaacctcaagtctgtcctattttagagacacacacacaaaaatgctrtaaaggaagtattaatacttgtttagagagattatcaggaacattgtacttaacagtgagaaatctgaataatgtgtatatgagtgtgttatgttattct

SEQ ID NO: 33584 - DNA, 201 bp, Homo sapiens
tcccatattgggtatattcctaaaggaatataaatcattctaccataaaggcacatgtatgcatatgttcagcacagcagtattcacagtagtaaagacatagaatcaacctaaatggacttgatatagaaaatatgtatcatatgtaccatattcaggccacttaaattgacgtagattcaacctaagtcgactggataa

SEQ ID NO: 33585 - DNA, 201 bp, Homo sapiens
tttcatctgtgtatcttctgaagctgaaatgaacactatgcccattttgctgtatgtccatttgagtattttctaatacctttttggggagtaggtgtatsttcagctgaaagaatatttctaagtatccaagtccttaaggaagctaaaagttttgagttatgcaagtgtgccttcagtgtcctttggcaacccctttct

SEQ ID NO: 33586 - DNA, 201 bp, Homo sapiens
acttaagtggaaatcttctttatgctaagttaatcaggcctgttactaagagaatatgtacttggatattaccagcttaggtatataaataactcttctgscaagtgcataacaaggcacattcaggggtctcatggggttatggccctcagcttgtctctggctgacacagtgtagtttagcaaaagagtcctgggcatt

SEQ ID NO: 33587 - DNA, 201 bp, Homo sapiens
aatattgttaaaacagttatactctccaaagcaatttacagatttaatgccattcctatcaaattaccaatgacattcttcacagaattagaaaaaaaaaatattagaactcctatggaatcaaaaagcctgaatagacaaggctaagctaaaaagacaaagctggaggcatcgcattacctgacttcaaattatgctaca

SEQ ID NO: 33588 - DNA, 201 bp, Homo sapiens
tgatttatgctacctctaagtcatcttaacattagtattcacaaaactacattgcagtgaaattcaacaaatctttactgaatacctcttatgaggaagaygataaagaataagaggaaaatgagatttttagtttgtttggaatacagagtgtatgggaagtataatagattagaagtataaagtctcaatgctgtacta

SEQ ID NO: 33589 - DNA, 201 bp, Homo sapiens
aatcaatattgttaaaacagttatactctccaaagcaatttacagatttaatgccattcctatcaaattaccaatgacattcttcacagaattagaaaaaraaaatattagaactcctatggaatcaaaaagcctgaatagacaaggctaagctaaaaagacaaagctggaggcatcgcattacctgacttcaaattatgc

SEQ ID NO: 33590 - DNA, 201 bp, Homo sapiens
cacgtagcttctctgctctgcacacataaggagtaagtggattattttccctgagtcagtaaggttttcggtgtcacataatctcaggggaacaaatgcarttgcttagatctcaatatactcctcagatggcaactttgaggaggtaaccaggaggtatctgcactccctctgtgctcgcctggggccttctgactttct

SEQ ID NO: 33591 - DNA, 201 bp, Homo sapiens
agaaatcggagataactcaaagaaatggaaaatattttatgctcacagataggaagaatcaatattgttaaaacagttatactctccaaagcaatttacakatttaatgccattcctatcaaattaccaatgacattcttcacagaattagaaaaaaaaaatattagaactcctatggaatcaaaaagcctgaatagacaa

SEQ ID NO: 33592 - DNA, 201 bp, Homo sapiens
ctcttttaaatttgttggacagataatagaaaattagatagtaatatattgcttagaaaaacgtacttaggacatttcttgctaaccttaattttttgggyggcctacaaacaaatccctatctaattgatttttgtcagggtttataacgttctaagcctgatcttcagttgatttgcgtatgactcccacatgttgaaa

SEQ ID NO: 33593 - DNA, 201 bp, Homo sapiens
cccatagtctctgccagaaagctccttgatctgataaataacttcagtgaaatttcaggatacaaaattaatgtacaaaaatcagtggcatttctgtacaycaacatcatccaagctgagagccaaaccaagaacacactcccattcacaatagccacaaaaagaataaaacaactaggaaaacagctaaccagggaggtg

SEQ ID NO: 33594 - DNA, 201 bp, Homo sapiens
aggaagtcaaactatctgtctttgtagaccatatggttctatacctagaaaatcccatagtctctgccagaaagctccttgatctgataaataacttcagygaaatttcaggatacaaaattaatgtacaaaaatcagtggcatttctgtacaccaacatcatccaagctgagagccaaaccaagaacacactcccattca

SEQ ID NO: 33595 - DNA, 201 bp, Homo sapiens
acctcagaggcagaggttgcagtgagccgagatcatgccactgcgctccagctaggtgacagagtgagactctgtctcaaaaaaaaaaaaaaaaaaaaaaatcaaatacagaaagacatgggggaggaaaagccaaaattcggtgaaatattcctctctgtataaaaccatgattgagtcactgtcagtcatttggtaaag

SEQ ID NO: 33596 - DNA, 201 bp, Homo sapiens
aacctcagaggcagaggttgcagtgagccgagatcatgccactgcgctccagctaggtgacagagtgagactctgtctcaaaaaaaaaaaaaaaaaaaaaaatcaaatacagaaagacatgggggaggaaaagccaaaattcggtgaaatattcctctctgtataaaaccatgattgagtcactgtcagtcatttggtaaa

SEQ ID NO: 33597 - DNA, 201 bp, Homo sapiens
gaacctcagaggcagaggttgcagtgagccgagatcatgccactgcgctccagctaggtgacagagtgagactctgtctcaaaaaaaaaaaaaaaaaaaaaaatcaaatacagaaagacatgggggaggaaaagccaaaattcggtgaaatattcctctctgtataaaaccatgattgagtcactgtcagtcatttggtaa

SEQ ID NO: 33598 - DNA, 201 bp, Homo sapiens
taacatataactttctattgcatcaaaaagatatactttctccttttttaatgagttggttagtatattgctaagttctgaatgtgtccctctaaaatacrtatgttgaagcttgactgccaatgtgacagtattaagaaatggggcctttaggaggtgactaagtcatgagggcactcatgattaagtcatgaatgggat

SEQ ID NO: 33599 - DNA, 201 bp, Homo sapiens
tcaaaaagatatactttctccttttttaatgagttggttagtatattgctaagttctgaatgtgtccctctaaaatacgtatgttgaagcttgactgccartgtgacagtattaagaaatggggcctttaggaggtgactaagtcatgagggcactcatgattaagtcatgaatgggattagtgctctcttaaaagaagtt

SEQ ID NO: 33600 - DNA, 201 bp, Homo sapiens
caaaagaagacatgtggccaacaaacatatgaaaaaaagctcaacatcactgaaaaaaagctgaacatcagtgatcattagagaaatgcaaatcaaaactrcaatgagataccatctcacgccagtcagaatggcgattattaaaaagtcaagaaacaatagatgtgagcctgtggagaaatgggaacactttcacactgt

SEQ ID NO: 33601 - DNA, 201 bp, Homo sapiens
tttttctgagggagaatgcccttagcctgttaccagattcttaaataaattcctaattgctgccccttcctcccctcgaaaagtaaaaatagggtggggcrtggtggctcactcctgtaatcccaacactttgggaggccaaggcgggcggatcacttgaggtcaggagttcaaaaccggctttgccagtgcagtgaaacc

SEQ ID NO: 33602 - DNA, 201 bp, Homo sapiens
ttcctaattgctgccccttcctcccctcgaaaagtaaaaatagggtggggcgtggtggctcactcctgtaatcccaacactttgggaggccaaggcgggcrgatcacttgaggtcaggagttcaaaaccggctttgccagtgcagtgaaacctcgtctctactaaaaatacaaaaagattagctgggcgaggtggcaggtg

SEQ ID NO: 33603 - DNA, 201 bp, Homo sapiens
aaccctcatcacccttatatgaactggaatttttatattattcttggaaatgattttaagtggatatttaattcaaatcttgttactcttgtgtccactgwacgtactacttacctagtccttggtttagtctttaatgcccaaaccaaaattaaggccagttctctacttattgttataacaattgcctgccctgtgttt

SEQ ID NO: 33604 - DNA, 201 bp, Homo sapiens
agactaaagagagctataactatacttattaaaatgccatgattgtgagaccctgccaagtcttttgcattctaccaacaaaatattttcatgctatactraatcattagctgatgacaaatgcttcaggaaataatttcactatttataaaggttttacatttagtacaacttctaaatgccaaatatgatgttgtagtt

SEQ ID NO: 33605 - DNA, 201 bp, Homo sapiens
tcaaactaacctttccccatagatactaatggaagcagttttataatgctgagaaacatctcaatatcaagctatgtattagtctgttctcatgttgctartaaaggcatacccgagactgggtaatttataaaggaaagaggtgtaattgactcacagttctgcatggctagggagggctcaggaaacttacagtcatgg

SEQ ID NO: 33606 - DNA, 201 bp, Homo sapiens
atatctaaattacctaaattcttagtgttgtcacccctccagtgccccccaaaaaaggtcaacaggtcagagttaaattagcatttactcaggaatggggkttgcaacctggctagcagtcagagattgtaccacccgagaagggcaagggggctatttaaaagaacttatttagattacataaattgcttgtcacattat

SEQ ID NO: 33607 - DNA, 201 bp, Homo sapiens
cttccatctggctgttcatctgtatccttttaatacctttctaataaatggctaaacataagtaagtgtttccctgagttccgtgtgctgctctggcaaaktagttgaatcacaggagggagttgtgggaaccctgatttatagctggtaggttagaagcacaggactgtgcttgtgactggcatctgaagccagttgtgg

SEQ ID NO: 33608 - DNA, 201 bp, Homo sapiens
atggctaaacataagtaagtgtttccctgagttccgtgtgctgctctggcaaattagttgaatcacaggagggagttgtgggaaccctgatttatagctgrtaggttagaagcacaggactgtgcttgtgactggcatctgaagccagttgtgggaccgagccctcaacctgtgggatctgacgctatctccaggtagtgt

SEQ ID NO: 33609 - DNA, 201 bp, Homo sapiens
aaggaaatcagacagcaatatctgacatttttcattgtttagattggcagagatgaaaaggatagtaacattctgggttagcaagagtataagaacatggrtccccgtttatggtgggagtgtaaactgttaaaacacttctggagatcagtagttctcttccctgtaattctgtttttaggaaactattcacagaatata

SEQ ID NO: 33610 - DNA, 201 bp, Homo sapiens
gtccttgaaatggagactgtattatacagatattcaggtcagctttaacatatcctttaggcctaatcacttttttctttcaacatgcctaatgtagcatratagttaatagcatagtagtttgacttttaaaattgatttctagggaagaatgtaaatataggaaagcttcctgatagagattatctaaacttaggcata

SEQ ID NO: 33611 - DNA, 201 bp, Homo sapiens
ctttccctaaagatagagaatatgcaaattattaaaaaatcaaatacaggccaggcgcgatggctcatgcctgtaatcccagctctttgggaggccaaggygggtggctcatgaagtcaggagactgagaccatcctggccaacatggtgaaaccccgtctctactaaaatacaaaaaactagccaggcatggtggtgcgt

SEQ ID NO: 33612 - DNA, 201 bp, Homo sapiens
gtggtgttttattacttgatacttattgctgaaacaagttttatgaaaaaaggagagtattagcctgaggacaaaagtagtttggagttctgtagaggagmtgccagtattaatgaactatcacttggagcctgcaacctgtcagccttgacttttcctctcctgggtcagccatcattggtcctccacattgcttttcac

SEQ ID NO: 33613 - DNA, 201 bp, Homo sapiens
tttccatgtgccagtaaaatgggaatggtgatttccttaaggtattgctctggagaatttaaataattgagttaaatgtcaaacttcacatttagagagcytactaaaaccttcacaagtgggggcttacagactagagttttatttttatttttattttttctgtagggaatggagtaggggaggcagtggcacacttag

SEQ ID NO: 33614 - DNA, 201 bp, Homo sapiens
ccagtgggaccagagactagggcaggccaaagatgcactgattaaggaaattactgctacctaacagttattctggagctcaagtatttcctgttcattakgcaataatgtagcctttcgagtctccaaatgccatttggaagaagagggtgggggagttggaggtagtaggttggatctgaggcttagtctcttgcctgc

SEQ ID NO: 33615 - DNA, 201 bp, Homo sapiens
ccatttgacccagccatcccattactgggtatatacccaaaggactataaatcatgctgctataaagacacatgcacacgtatgtttattgcggcattatycacaatagcaaagacttggaaccaacccaaatgtccaacaatgatagactggattgagaaaatgtggcacatatacaccatggaatactatgcagccata

SEQ ID NO: 33616 - DNA, 201 bp, Homo sapiens
ggtaggtgctcttgatgtccttaatttcaaaatgaggaagtcagagcaggcacggtaagtaaagaataatggatcctgagcctcaccttttggtcactccrttggcagggtatgtgcttggggcatgaaaaccaagactcaaagactgccaatcctctgccgcagtttttgagagtaagaactatgcttgctgtaatatgg

SEQ ID NO: 33617 - DNA, 201 bp, Homo sapiens
aataccatttgacccagccatcccattactgggtatatacccaaaggactataaatcatgctgctataaagacacatgcacacgtatgtttattgcggcaytatccacaatagcaaagacttggaaccaacccaaatgtccaacaatgatagactggattgagaaaatgtggcacatatacaccatggaatactatgcagc

SEQ ID NO: 33618 - DNA, 201 bp, Homo sapiens
tttgggagcaaaactaggataactcttttgcacttgcagtatgccataagtgccgcagtttttgactttttctactttgcccaataaaaatgttgctctayaacccttaatttttataactgttctggcctcagttttccacagtgaatgttcctagtttgtgtaatgttctttaggttgctaatttctgcctccagagcc

SEQ ID NO: 33619 - DNA, 201 bp, Homo sapiens
ctgttggtgggactgtaaactagttcaaccattgtggaagtcggtgtggcgattcctcagggatctagaactagaaataccatttgacccagccatcccaytactgggtatatacccaaaggactataaatcatgctgctataaagacacatgcacacgtatgtttattgcggcattatccacaatagcaaagacttggaa

SEQ ID NO: 33620 - DNA, 201 bp, Homo sapiens
gcaagatgctctagcctgcagaaaagtcactttagcatttccctgctttgactatggcacacggacatttggaaattcttattctggttttggcaacacaraaagctttcctttttccccttccctcctggctgactaagctcatcttaatgccactaaattaccaatgccttatttggcaagctgcctggtaaatcaaat

SEQ ID NO: 33621 - DNA, 201 bp, Homo sapiens
aggtgcagcagaccaccatggtacacatatacctatgtaacaaacctgcatattctgcgtatgtatcctggaagttaaagcaaaattaaaaaaaaaaaaaaggaaaacatgggcttaaataggacacaagatctattcctcctttgaaaaacccattaagtttggataaattctaagaggtagcattttaactagcatcct

SEQ ID NO: 33622 - DNA, 201 bp, Homo sapiens
tcctaaagactctcaatattgtggacattcaaactaaatgattccagaatgactttaaaatgctagtgtcagagcaggcagtagggatgccttcctgtatrggtgtggccatattcacctgtatggggcccaggcagtaactgaactgatagtttcatcaaagtcaacacgttattttttgaactctgacactctatgctt

SEQ ID NO: 33623 - DNA, 201 bp, Homo sapiens
tatttgattcttctctcttttcttctttattagtcttcctggtggtctatcaattttgttgatcttttcaaaaaaccagctcctggattcattgattttttgaagggttttttgtgtctctatctccttcagttcttctctgatcttagttatttcttgccttctgctagcttttgagtgtgtttgctgttgcttctctag

SEQ ID NO: 33624 - DNA, 201 bp, Homo sapiens
gcttgtgatttttgcacattgattttgtatcctgagactttgctgaacttgcttatcagcttaaggagattttgggctgaggcgatggggttttctagatrtacaatcatgtcatctgcaaacagggacaatttgacttcctcttttcctaattgaataccctttatttctttctcctgcctgattgccctggccagaact

SEQ ID NO: 33625 - DNA, 201 bp, Homo sapiens
aagtcattggtagcttgatggggatggcattgaatccataaattaccttgggcagtatggctattttcatgatattgattcttcctatccatgagcatggmatgttcttccatttgtttgtttcctcttttatttcgttgagcactggtttgtagttctccttgaagaggtccttcacatcccttgtaagttggattccta

SEQ ID NO: 33626 - DNA, 201 bp, Homo sapiens
ttggcttaggattgacttggcaatgcgggctcttttttggttccatatgaactttaaagtagttttttccaattctgtgaagaaagtcattggtagcttgrtggggatggcattgaatccataaattaccttgggcagtatggctattttcatgatattgattcttcctatccatgagcatggaatgttcttccatttgtt

SEQ ID NO: 33627 - DNA, 201 bp, Homo sapiens
aatttaatcctttttgtcacatcttaaaataaattttaactagttggaaaatatgaaggtaaaagagtgtaaaaagaaaatatggtttcttttgaaatggrgaatactttctaaacataacatatcatgcagagactgtgcactatggatgaaggctggtgaatttttgctacttgtaaaaatgaagaactgctgagtagc

SEQ ID NO: 33628 - DNA, 201 bp, Homo sapiens
tactggagctatgctgatttcagaactacaaacagcttttaatattgaacatgctaactggttcaatgtatatgttgtactactttagtttttgtggggartggactttaaagattagtttcatgctgatccacagtgtgggaacatgtttggtatttttaaaaactctttactcattgtctgaggtgagaaattgttgga

SEQ ID NO: 33629 - DNA, 201 bp, Homo sapiens
agtatgaaagagaaatggtcaagcttgggagtcatggattgtactttggggctgggaatcttatagattgttcatatatggaaagcattttaagggcattkcagaaagccttctggttgaacttcatgaaacttaactcttccttcccgactgtctctcccaccttctgaaaaccacagaaacagctctatttattgggtt

SEQ ID NO: 33630 - DNA, 201 bp, Homo sapiens
tttgaacatttttaaaaaagacttttgctttcctctttctaagtgttttgtatcataccccaatgcagaggccaccagccaccttgcctctttcacccccrtctccaggagattggcaggtctaatggctgtcactgtagaacagaccttccaggtgactcttgacccctcaaatgaggagtaaccggatcccatgtagac

SEQ ID NO: 33631 - DNA, 201 bp, Homo sapiens
tttcttctaatgctatcccttcccttgccccacattccctgacaggccccagtgtgtgatgttcccctccctgtgtccatgtgttctcattgttcaacacmcatttatgagtgagaacatgtggtgtttggttttctgttcctctgtgagtttgctgagaatgatggtttccagcttcatccatgtccctgcaaaggatat

SEQ ID NO: 33632 - DNA, 201 bp, Homo sapiens
cagtataaaaaaactttaatattattgatttgcaaaagaaggattataaacaaaacgctaacaagacagttgattgtcaaattttcctctttatttctccrtttttggggaagatggagtgggaataaggtaggaaacatgcaccaaaatgaaaacatttcttgtaggtgagaataacaaggactctatcactgaaacatt

SEQ ID NO: 33633 - DNA, 201 bp, Homo sapiens
agattaatttctttaggtagcatgtttttactttagttgtagcaaagagccacatttacaacaggagcttgggcccagtcatggaacagtgctgtgtgtgmacattctgtgggactgattctgaggacatgccactgagtcttttggtctgtgttggagaggtcaccttaattccagagcagcaaagagttttatttatga

SEQ ID NO: 33634 - DNA, 201 bp, Homo sapiens
atcttattgtctgatttttataccatacagactaataaaaattagtttatgcacttatttgttacttttatttctgaatagataatacagtcagcgtagtrtaaaaggttagacagtgatgtctgaattctactccttcccctagctagtttccttcccagaggcaaccattgttactgttaccatgttttcctaaagaca

SEQ ID NO: 33635 - DNA, 201 bp, Homo sapiens
atttatgagaaatatcctgatatgttaaaatatgtttttgaacatattttggatcaatttgtcttattaaaaagccagcattatttgtatgccaatgttcmttgcagcattattgaccatagtcaagaggtgggagcaacccaagtgtctgtggagagataaatagataaacaaaatatggtagatcctgccacatgctac

SEQ ID NO: 33636 - DNA, 201 bp, Homo sapiens
gacgtcattcaaaaagtgaacagggtactactatttgcacataaaaaagagcaggttatggtttcacagacactttagattcttattcagagaggatagcyttgagggtaaagaactacttctcatgtcttactgaagctagggtcatggaacatctccagctggaatagtttctgttaaataagattgtatgatatgatt

SEQ ID NO: 33637 - DNA, 201 bp, Homo sapiens
actctgtgatcccacttataaggtacctagagtagtcaaattcatagacagaaagtagaacagtggttgagaggggagggcaactggggagttgtgtaacrggtacagagtttcagatgggagagatggaaagagttctagagatggacggtggtgatggttgcataaaacatgaatacacggctgggcgtggtggctcac

SEQ ID NO: 33638 - DNA, 201 bp, Homo sapiens
aggcctctgttctgttccattggtctatatctctattttggtaccagtaccatgctgttttggttactgtagccttgtagtatagtttgaagtcaggtagygtgatgcctccagctttgttcttttggcttaggattgacttggcaatgcgggctcttttttggttccatatgaactttaaagtagttttttccaattctg

SEQ ID NO: 33639 - DNA, 201 bp, Homo sapiens
gctaataaaattattcctgaaggttaaaaacaaggaagttatgaaccggatttgaggttgaaattaggtagggggaacatgaattattttctgtaacgtayaagtggaaacaatttaatcaatcctttttatttttattgaatgtagacagaaaattcagtgcaggtggctgcattgcatttcatttacaataattaaaaa

SEQ ID NO: 33640 - DNA, 201 bp, Homo sapiens
atggctagccagttttcccagcaccatttattaaatagggaatcctttccccatttcttgtttttgtcagatttgtcaaagatcagactgttgtagatgtrtgatattatttctgaggcctctgttctgttccattggtctatatctctattttggtaccagtaccatgctgttttggttactgtagccttgtagtatagt

SEQ ID NO: 33641 - DNA, 201 bp, Homo sapiens
aagtctttaatccatcttgaattgatttttgtataaggtgtaaggaagggatctagtttcggctttctccatatggctagccagttttcccagcaccattyattaaatagggaatcctttccccatttcttgtttttgtcagatttgtcaaagatcagactgttgtagatgtgtgatattatttctgaggcctctgttctg

SEQ ID NO: 33642 - DNA, 201 bp, Homo sapiens
ctagggtttttatggttttaggtctaacatttaagtctttaatccatcttgaattgatttttgtataaggtgtaaggaagggatctagtttcggctttctscatatggctagccagttttcccagcaccatttattaaatagggaatcctttccccatttcttgtttttgtcagatttgtcaaagatcagactgttgtaga

SEQ ID NO: 33643 - DNA, 201 bp, Homo sapiens
tttgtcaattttgtcttttgttgccattgcttttggtgttttagacatgaagtccttgcccatgcccatgtcctgaatggtaaagcctgggttttcttctrgggtttttatggttttaggtctaacatttaagtctttaatccatcttgaattgatttttgtataaggtgtaaggaagggatctagtttcggctttctcca

SEQ ID NO: 33644 - DNA, 201 bp, Homo sapiens
ctgggtcaaatggtatttctagttctagatccctgaggaatcgccacactgacttccacaatggttgaactagtttacagtcccaccaacagtgtaaaagygttcctatttctccacatcctctccagcacctgttgtttcctgactttttaatgatcgccattgtaactggtatgagatggtatctcattgtggttttga

SEQ ID NO: 33645 - DNA, 201 bp, Homo sapiens
cattattttctcctttttattcattctcatgttcacattcactgtataatcttgtttgtggcttatctttgacttttatacatactacatagattggacarttttcctggtgatacggtactctcacattgtgaagggatggctcaatattaattttagagtggatgctttgaaatattatcaatgacaagattttagcat

SEQ ID NO: 33646 - DNA, 201 bp, Homo sapiens
ctcctgtggacttagaggttgagcaagattttctgtcctgagagaacccacgttcatattctgacttggtctctgtgaagatttgaaaaacatttttttttcctgaaaagatacagctgtacccattgaagcaaacgtggaactctgttcattattttctcctttttattcattctcatgttcacattcactgtataatct

SEQ ID NO: 33647 - DNA, 201 bp, Homo sapiens
ttgttggaaaatcatgggctcatgattgagttgggctcagctggatgtttcttctttttgtctttttaggggtcactcatgggtcctcattcatctggtcrcccagctgaaggtagaaggtctagaatgaccttactcacatctctggcaatttgttgctggctgtcagctctgcctccctctctcatccttaaggggact

SEQ ID NO: 33648 - DNA, 201 bp, Homo sapiens
tcctccagagaagactactgcctgctctgctctgtcatgtcttgggtagtatttggcagtatcactcggctctttgatttcttgccctgttacccttacaygtggctgtttgccatggtctgtcaattctgcttcaatagtcctccctaataaatcttccctctcttctactcttagagtctctcaccttgactttttttt

SEQ ID NO: 33649 - DNA, 201 bp, Homo sapiens
gtattagatggacccatttttgtatattgaaccatatgcttgtatttcaggaacaaataccacttggtcatggggtataatttttaaaatatgctgttgawtttgctttgctagcattttgttgagaattttcacaacaatgatcgtaagagatattggtctgtagttgtcttgtagtgtctttgtctggctttgctatca

SEQ ID NO: 33650 - DNA, 201 bp, Homo sapiens
attaattcctgagtattttattctttttgatactattgtaaatggaattaaccttttaatttccttttcagattgttcgttgtcagtgtatagaaatgcarctgatttttgtgtgttgactttgtgtcctgctactttgttgaattcatttattagttctgacagctttttgtgggaaatctttagagatttctatatgta

SEQ ID NO: 33651 - DNA, 201 bp, Homo sapiens
aggtaccactgtgctctcttccacagcattttactttctcaccaacagtgcacaagggttcgagttactctacatccttgctaacacttgttattttctgkttttttgatgtttaccatccttatgagtgtgaggtggtatctcattgtagttttgatttgtaatgacctaatgattagtgaagttaaccacctttttatg

SEQ ID NO: 33652 - DNA, 201 bp, Homo sapiens
gaaatacaaaattagccgagtgtggtggtgcatgcctgtaatcccagctactcgggaggctgagacaggagaatcatttgaacccgggaggcggaggttgyggtgtggtgagctgagatcgtgccattgcactccagcctgggcaacaagagcgaaactccgtgtcaaaaaagaaacaaacaaaagcaaccatgaataaac

SEQ ID NO: 33653 - DNA, 201 bp, Homo sapiens
gagacaggagaatcatttgaacccgggaggcggaggttgtggtgtggtgagctgagatcgtgccattgcactccagcctgggcaacaagagcgaaactccrtgtcaaaaaagaaacaaacaaaagcaaccatgaataaacttatgccactgaattatatatacacttacaagttaagatggtaaattttatgttacatata

SEQ ID NO: 33654 - DNA, 201 bp, Homo sapiens
tttcactagcttagccttacctacttccagaggaagacttcatccgaaattgagatgaccagggaggtcatttgtgctcaagaaaaattcatctagcaggyatgtattgagaaccagtatatgataggggtaagaggctagaaatataaagggtaatgaaatgctgctgacatgcaggggctcagcactttcagtatatag

SEQ ID NO: 33655 - DNA, 201 bp, Homo sapiens
ggtgagtgagtggtgatgaaatcatctaatcagttatgacatagctgagtttttcaggtcttataatcttacaggactaccatcatgtatttgagccatcrttgaccaaaatgtctatgcggcacgtggctgtatttagctgaacgattaagtagaaataacctattaagacctttttccaaagtattttttacatggttc

SEQ ID NO: 33656 - DNA, 201 bp, Homo sapiens
tgcatttcatttacaataattaaaaaatgtttgagtaaaacagctctgttttggtggacagagatccaggacacccactttcacttacaggtgatccgctstttcactgatcccagcatctgctgcttctgtgtcacaccgctgggggaatgggggatccagagctgatgaaggcatggtcctggctctgctttgtccagc

SEQ ID NO: 33657 - DNA, 201 bp, Homo sapiens
tggacagagatccaggacacccactttcacttacaggtgatccgctctttcactgatcccagcatctgctgcttctgtgtcacaccgctgggggaatgggrgatccagagctgatgaaggcatggtcctggctctgctttgtccagctagtgacaatgttagtaacccgcattattgagcacttaataaacaataattctc

SEQ ID NO: 33658 - DNA, 201 bp, Homo sapiens
atgcagagatgtgatagcttgcccaagatcagtctgtaagaggtataattagagtttgaagccaggtagtcagagtttttttttttctggatattttgcaragaaagtttgagacttaaggaaagagcaaagatgctcttgtgtttaagcagatccattgagcactttttgggtcatggtctctgtacccataaaactctg

SEQ ID NO: 33659 - DNA, 201 bp, Homo sapiens
attccagtgatctctctcaaatggggagagaaaggagtagagtttcagctggaatgctctgagcaacacgtatccctgagtgcacccataatgtctccttyatggtgtgatgggaaaggaggaggcgtggagcattgtgctaagacacacccccccggtgtggggatgtaagaagggccagagctccaaacaagatgagct

SEQ ID NO: 33660 - DNA, 201 bp, Homo sapiens
ttatgaagagctggtagaaataaggatagtgcagcattaagagatactctgacctgaatcttactggtatgtgatcagtatatgcctaaaacaaccattcagtaaacatttatggaggatctgctacgcaccatacactgcattttgcactgggtatccagtgaggaacaagtgtataaaaggaaaaatagcaaatactta

SEQ ID NO: 33661 - DNA, 201 bp, Homo sapiens
agggccagagctccaaacaagatgagctttgaagacatctttttccttagtctgaaattcagtgatgacaagcttcctctgagttacatgtttgcaatatrtagttccaagcttatattcattaaaggtaatgaccaagaagattaacagcaaaaaaaatacattggagcaatcacagcattctaataaccttgtttattt

SEQ ID NO: 33662 - DNA, 201 bp, Homo sapiens
gcatgacttccagccgcgtctcagcctccctcacctactgcgggacttgtccggggctctgttgcataccccgccattgtatacagactcaaccaaaaacyggtattctaaagctcatcatttttgtcatttagagcacttattttctcatttcagaaagtggatgtcaccagcagggctgtgatggaaataatgactaaa

SEQ ID NO: 33663 - DNA, 201 bp, Homo sapiens
cctgatctgtaatccttcaggaggcaaatgagctgcaacagagccatggtttctctccctctttctgggagccacccacccccttcacccaatacagaggrcctaaggagtgattgattttataaaagatacagagtaacacactctgtatattcatcagaccgtgtaaataactaacttctagacctctcagatataaat

SEQ ID NO: 33664 - DNA, 201 bp, Homo sapiens
tcaaggacatggatacaccaagggtgaagtttagagcagaaatttaataggagaaagaaaaagaacagctctctgctgcagaaaggggtcccagaaaaagrgttgccatcctgtagtgaaatacaggaatttttacagacaagctagtggggaggcagtatctgaacatagggtgtgaaaaaccagttaggatcaggtgtg

SEQ ID NO: 33665 - DNA, 201 bp, Homo sapiens
cacttaagttatgggggaattcacccatgttttccccttataattctgtcattttcaaaatggctgttcttttgtctcagaaccatttattttattttatwactttagaagcagggtctcattttgttgcccaggctggagtgcagtggcacaatcgtagctcactgcaacctcaaagtcctggactctggtgatcctcct

SEQ ID NO: 33666 - DNA, 201 bp, Homo sapiens
ttatgctaagttaatcaggcctgttactaagagaatatgtacttggatattaccagcttaggtatataaataactcttctgccaagtgcataacaaggcayattcaggggtctcatggggttatggccctcagcttgtctctggctgacacagtgtagtttagcaaaagagtcctgggcattattatggaggaccgaggtg

SEQ ID NO: 33667 - DNA, 201 bp, Homo sapiens
ttaatgtctcaatactcaagagaaaatattttctccatgcaatggtgaacattcatttactgttggaaatagtcactgcatgtttgcactctaaacctttygtgattgagtgtggcaatgagtgtgcagtaaaatttttttttcttatttttttattttattttatcattattatactttaagttttagggtacatgtgca

SEQ ID NO: 33668 - DNA, 201 bp, Homo sapiens
ataagagagctttgtcaccttggagagaggtgttatataaataccattatttgggttgagagtagcacgatccagtgctagggttgtctatttgtgtaagtcagtaggcaaatcttcctcttcccttttctcagtgtcttctaatagttaactacaaaagaaacaacatagatgtgagtatatttacctaagttctcatta

SEQ ID NO: 33669 - DNA, 201 bp, Homo sapiens
ttcttttgcaaaaacaagcagattcatgtgttttcttttcccactctttcatacacaaaggtaacgtgtgtgtgtgtgtgtgtgtgtgtgtgtgtgtgtgkatatacattaagtttgcttttttcatcagttcataggaagcattctcattcatcctaacagcttattcagccagttttctaaatattggcatttcacttg

SEQ ID NO: 33670 - DNA, 201 bp, Homo sapiens
tgtacagttacattcattaatttacttggaaagtgcctccatgttaaggcagtatccctgccttcaaggggcttccagttttgatttttaaaaaattgtaygtaaatcagtaccttacagaacatagtgcttggtgtcctggggaggtttcccatggaatattcaggctgggtacatcaggcttcctagaagagagagggc

SEQ ID NO: 33671 - DNA, 201 bp, Homo sapiens
tgaatccctggttctcaggccttaagagttggactgagccatactactggcttttctggttctccagtttgaagagaggccttcccagcctccgtaacacwtgagccaattcccctaataaataccctctcatttatctgtatgtgtatatctcctattggttctgtttctctggagaaccctaatataaccactaatagg

SEQ ID NO: 33672 - DNA, 201 bp, Homo sapiens
cataagagagctttgtcaccttggagagaggtgttatataaataccattatttgggttgagagtagcacgatccagtgctagggttgtctatttgtgtaagtcagtaggcaaatcttcctcttcccttttctcagtgtcttctaatagttaactacaaaagaaacaacatagatgtgagtatatttacctaagttctcatt

SEQ ID NO: 33673 - DNA, 201 bp, Homo sapiens
agcatgcagaattaacctgttttcacattttgcagcagcacatgtaaaaatacatgctttcagttttttggccaagtctttttttttttttttttttttttgagacagagtcttgctcttgtcacccaggctggagtgcagtggcacgacctcagctcactgcaacctctgcctgccgggttcaagcaattctgctgcctc

SEQ ID NO: 33674 - DNA, 201 bp, Homo sapiens
atagcccaggaaaatataaggaaggataataaggaaaactagccctaatatatatttaaaaacattaaaaaatctttgatatttaacatagtgtattactrgttcatgaagaaacagattaatagtttaacataagatacaagtgtatttcaaatcactaaaacaaaatagataataaatggttttgggaaagatggatag

SEQ ID NO: 33675 - DNA, 201 bp, Homo sapiens
gcataagagagctttgtcaccttggagagaggtgttatataaataccattatttgggttgagagtagcacgatccagtgctagggttgtctatttgtgtaagtcagtaggcaaatcttcctcttcccttttctcagtgtcttctaatagttaactacaaaagaaacaacatagatgtgagtatatttacctaagttctcat

SEQ ID NO: 33676 - DNA, 201 bp, Homo sapiens
agggaaaatgtatacaaattaatcgttagtatttgtggcactcactctgtgatttggcctatttcacctccctatgctctggatttattatctgtaacgggaacaataatggttgttcttacaaatggtagttgtgaggattaaatgagttaaaatatgtgaagcccttaaaacagtttctggcatacagtaaatattagc

SEQ ID NO: 33677 - DNA, 201 bp, Homo sapiens
ggcataagagagctttgtcaccttggagagaggtgttatataaataccattatttgggttgagagtagcacgatccagtgctagggttgtctatttgtgtaagtcagtaggcaaatcttcctcttcccttttctcagtgtcttctaatagttaactacaaaagaaacaacatagatgtgagtatatttacctaagttctca

SEQ ID NO: 33678 - DNA, 201 bp, Homo sapiens
agtttattgttttatgaaatacatgttttctgcccatcactggtcatcttatgtccttaatgctagaacaataggaattttcccagggctgaattctggcrccatttcatactagaccttttctctgtttctccccttttccttgtgtgtgtgtgtttgcacgtgtgcacacatgtatgtgtggtgtgtgtgtgtgagaga

SEQ ID NO: 33679 - DNA, 201 bp, Homo sapiens
ggaggccgaggtgggcggatcacgagatcaggggatagagaccatcctggctaacacagtgaaactctgtctctactaaaaatacaaaaaagtagctgctsttggtggtgggcacctgtaatcccagctacttgggaggctgaggcaggagaatggcatgaacctgggaggcggagcttgcagtgagccaggatcatgcca

SEQ ID NO: 33680 - DNA, 201 bp, Homo sapiens
aagggttttatttctccttcatttatgaagtttagtttggctggatatgaaattctgggttgaaaattcttgtctttaagaatgttgaatattggcccccrctgtcttctggctcctagggtttctgctgagagatccgctgttagtctgatgggcttccctttgtgggtaacctgacctttctcactgcttgcacttaac

SEQ ID NO: 33681 - DNA, 201 bp, Homo sapiens
agagcttttccatttccacatcctggcaatgaaaaataatcaaaatgcataaaggacagattacaaaagcagttgtgaggaaaatgttgttaagcttcaarggaatagggtatttcaaggataaatatattaagaaagaaaacttaagtcaggtgatgggtgatataattcatatactaatgtattgaaaggctggagggt

SEQ ID NO: 33682 - DNA, 201 bp, Homo sapiens
tatcccctttatatcattttttattgtgcctatttgattcttctctcttttcttctttattagtctggctagccatctatctagtttgtcaactctttcaraaaaacagctcctagattcattgatttttcgaagggttttttatcttcttcagttctgctctgatcttagttatttcttgttttctgctagcttttgaat

SEQ ID NO: 33683 - DNA, 201 bp, Homo sapiens
aaccagtacacattcctaaaatgcttaaataagatataatttgaatatagaaagtactgtgcacaaattccattctactggttgtaagtgcctattcttaygatatctgtgagcaaaaatcactgaagaagatataactcagttttctttacatattctgatgccttacgggggagcaaaaactgaatcgatgttgtccaa

SEQ ID NO: 33684 - DNA, 201 bp, Homo sapiens
gttctgtttatgtgttttttgtcattggttctgtttatgtgatggattacgcttattgatttgtatatgttgaagcagccttgcatcccacgggtgaagcygacttgatcgtggtggataagctttttgatgtgctgctggattcggtttgtcagtattttattgagcattttcacattggtgttcatcagggatgttggc

SEQ ID NO: 33685 - DNA, 201 bp, Homo sapiens
tggctttcacatcttgggttcatggacaggccaggggaatcagtaggatttgatgcttcgagggtactttgggagtacatctgtattagattactgctccygggtgcttgctggctttcacgtcttgggggtgtggagcttacacatgttttctattcttaaaactcagttcctattgaagtgatgaccaaagtgattttg

SEQ ID NO: 33686 - DNA, 201 bp, Homo sapiens
tctgtattagattactgctcccgggtgcttgctggctttcacatcttgggtacatggacaggccagggcaatcagtaggatttgatgcttcgagggtactytgggagtacatctgtattagattactgctcccgggtgcttgctggctttcacatcttgggtacatggacaggccagggcaatcagtaggatttgatgctt

SEQ ID NO: 33687 - DNA, 201 bp, Homo sapiens
tctgtattagattactgctcccgggtgcttgctggctttcacatcttgggtacatggacaggccagggcaatcagtaagatttgatgcttcaagggtactytgggagtacatctgtattagattactgctcccgggtgcttgctggctttcacgtcttgggtacatggacaggccaggggaatcagtaggatttgatgctt

SEQ ID NO: 33688 - DNA, 201 bp, Homo sapiens
ggacagatggattaactcttctgagtcagcaggggactattaaaaacatcactcttggacctgcctgtatctcgctgccagacagaccttcccaggacacrgttttcatcatgtctctgtgattgtttattgagctgttcttgttcaggagtctcagtactttaagtgggtgtgtatgcattattaatagttgtagtttct

SEQ ID NO: 33689 - DNA, 201 bp, Homo sapiens
gcagttcttgctttcatagcatgtagttaaaataaaaaccacagtgtagtgttctgacatcccctcttgctcaggcatagggcatatttggtgaaccttgrccattctgacaactgttctggcagctgtttcttgtgtcattcttttctgggctttattgtaatgtaaacccaccaaacaagatttctggcagttctgtac

SEQ ID NO: 33690 - DNA, 201 bp, Homo sapiens
tataggcagtatggtctgtgttttccatttgcttctgtgctgtgtgaagtgttaggcccaggctttgggaactatccatttcttggtagatgttgggtcargtggaaatgttggggtactgaggaagaacaattttgatttgcaattggtaaatgaggaatatctgttcagagtgtgagtgagatgaaaattgttcttctg

SEQ ID NO: 33691 - DNA, 201 bp, Homo sapiens
cagcagcctttcctgttacatacttataccctgtgggggcagtggacaagtacagttctgatacctgagactgtgcgaagaaagcaagccaggaatttgtrtgataggggagactccacaatttctcgtttgattcagcataagcctgcattgttggggtatctccaggaagtcagccccagtgcaggcagcagacctcac

SEQ ID NO: 33692 - DNA, 201 bp, Homo sapiens
tatatttcattttttgattttgactcttagcattctttcatgtcagatgtttctagagaaactctactttgcgtaatttagggaccccagagtagagcaawtccagtttgaaaatattctaattttggcttttaaaaacatgtgaagtgtgaggatgaaaccattagagcttgactttcttagaaatttgtcaagtatata

SEQ ID NO: 33693 - DNA, 201 bp, Homo sapiens
ccttgccatttttcatggattcccttgtcttatattcagagaacattttcagattgccttaagcctgtttgtttcctgtttatccaggtttcacttttcaytgatgggctactacaaggcctaacttttgcatatacctgtgtccaggtgtctcagtccaggaagttctgtagtcctgtttatgccatgtatttggacttt

SEQ ID NO: 33694 - DNA, 201 bp, Homo sapiens
atttttagtaagataagcctattataaatttatggaaaaatagtaaagtatagcccaggaaaatataaggaaggataataaggaaaactagccctaatatrtatttaaaaacattaaaaaatctttgatatttaacatagtgtattactggttcatgaagaaacagattaatagtttaacataagatacaagtgtatttca

SEQ ID NO: 33695 - DNA, 201 bp, Homo sapiens
tttgctattgtgaataatgctgcaataaacatacgtgtgcatgtgtctttagagtagaatgttttataatcctttgggtatatacccactaatgggattgstgggtcaaatggtatttctagttctagatccttgaggaatcaccacactgtcttgcccaatagttgaactaatttacactcccaccaacagtgtaaaagc

SEQ ID NO: 33696 - DNA, 201 bp, Homo sapiens
tttcctagaaaaagacatgagaaacagaaaagcataccatgttctttttatgattgaaaagacttagcatcataaaggagtcagctttctctaagttaaastgtaaatgtaatgtgatacttatacaaaagataatatttttagtaagataagcctattataaatttatggaaaaatagtaaagtatagcccaggaaaata

SEQ ID NO: 33697 - DNA, 201 bp, Homo sapiens
cacacatgatctgtggcttttggagcctgtggcagggccctggatggggaagggtaagcattctgatgctatagtgtgatggaaacttctgtggggaagcrtaggattcagtgccagtacttgtgatgcaagtagttatttgagcattccttttgtttgtttttaattttaaagttcaaggatacgtgggcaagatgtgca

SEQ ID NO: 33698 - DNA, 201 bp, Homo sapiens
cagtagcattaaacaaagataaaattcctagctataaatgatataatttttctatttaaaaaataaatataacacatgtatgatttttcctagaaaaagasatgagaaacagaaaagcataccatgttctttttatgattgaaaagacttagcatcataaaggagtcagctttctctaagttaaactgtaaatgtaatgtg

SEQ ID NO: 33699 - DNA, 201 bp, Homo sapiens
tttttcttctttttaatgggtagctttttatttattcattttttttaaatgggtagctttaatttcaaccaaaaagttctgggtagatttttttctagctsaagggagaattgtatattgggcactaagtattaacgggtaaaatcctgccaactgcccttttatagatcttcagtgtgaagcaagactttgcataggttg

SEQ ID NO: 33700 - DNA, 201 bp, Homo sapiens
ttcagacattttgatttaaagatcttaaggtaagagaagtagagttaacagcatacatttagagctagatgccttagcagctggcttggaggcttttttttcttctttttaatgggtagctttttatttattcattttttttaaatgggtagctttaatttcaaccaaaaagttctgggtagatttttttctagctcaagg

SEQ ID NO: 33701 - DNA, 201 bp, Homo sapiens
gcaacctacagaatgggagaaaatttttgcaatctattcatctgacaaagagctaatatccagaatctacaaagaactcaaacaaatttacaagaaaaaaacaaccccatcaaaaagtgggcgaaggatatgaacagtttcactttctttaaacagccttccctaatggctcctcacaccaatcccaggcaaggttagttg

SEQ ID NO: 33702 - DNA, 201 bp, Homo sapiens
ggcagagctctcagaaggtgctggatccctaaccgctttgctgggttcttcattcctggcccacccgagagctcttctggaagtaaaggcctgaaactgtraccttcttggctatggtgaaaagtaacagacgtcaagtgttagcaagcagaccctatctgttatttgacttttaaaatcacaaacaataaagtaatcatt

SEQ ID NO: 33703 - DNA, 201 bp, Homo sapiens
caatggttgaaccagtttacattcccaccaacagtgtaaaagtgttcctatttctccacatcctctccagcacctgttgtttcctgactttttaatgattrccattctaactggtgtgagatggtatctcattgtggttttcatttgcatttctctgatggccagtgatgatgagcatttttccatatgtctgttggctgc

SEQ ID NO: 33704 - DNA, 201 bp, Homo sapiens
acaatggttgaaccagtttacattcccaccaacagtgtaaaagtgttcctatttctccacatcctctccagcacctgttgtttcctgactttttaatgatyaccattctaactggtgtgagatggtatctcattgtggttttcatttgcatttctctgatggccagtgatgatgagcatttttccatatgtctgttggctg

SEQ ID NO: 33705 - DNA, 201 bp, Homo sapiens
gattccaaagccagagttttttcaatacactcaaggaataaaacgtcagctgctgtttttattagcactcaccaatgagacaccatcctgtcctgttcccwgttttcatcctgcagcgccatatattgctccaaagcttagatagtgcccagagcccacctacagctcatcttcctatgaggcagagagctagcttgatct

SEQ ID NO: 33706 - DNA, 201 bp, Homo sapiens
agtgataggtgcgcaaacatgattttccatctccatgctctttccatgtttaccatttagcctttgacattctgctctaagcaagagtctcatatcatttctatttatttattttttgtgtgcactcaagagttcccattttccgttggttcataatttaccactgtactcaatttgagccctcaatcaaatttgagttgg

SEQ ID NO: 33707 - DNA, 201 bp, Homo sapiens
tcagtgatgacaagcttcctctgagttacatgtttgcaatatatagttccaagcttatattcattaaaggtaatgaccaagaagattaacagcaaaaaaaatacattggagcaatcacagcattctaataaccttgtttatttttgttttttaacacgttgtttgtcagttgggctttctgaaaacataagataatgcttt

SEQ ID NO: 33708 - DNA, 201 bp, Homo sapiens
gaaggaaagatctcatttgcagtagcattaaacaaagataaaattcctagctataaatgatataatttttctatttaaaaaataaatataacacatgtatratttttcctagaaaaagacatgagaaacagaaaagcataccatgttctttttatgattgaaaagacttagcatcataaaggagtcagctttctctaagtt

SEQ ID NO: 33709 - DNA, 201 bp, Homo sapiens
gtaatatggcagaatgaaattatacctgctccttccttgcttcttccttcccttcctccctcccttttcctttcgtttcctttcgtttcctttcctttcckttcctttcctttcctttcctttcctttcctttcctttcctttcctttcctttcctttcctttccttccccttccccttccccttccccttccccttcccc

SEQ ID NO: 33710 - DNA, 201 bp, Homo sapiens
gattctggctcaatataagaaaaacttttggctatcaaagctgggtttttggtgtgtgtgtttttgtgtgtgcgtgtgtgtgtgtgtgtgtgtgtgtgtgttttgcctcagcaatgactgaattccctatcactgcccatgtttgaccccctcgttcccaccgcccatgttggaacacacactgacctgctagttccctcc

SEQ ID NO: 33711 - DNA, 201 bp, Homo sapiens
ttaaccagttattttcttatcttttgttctttagccagattcatttgtctttctgactttttcatgatttttctgtattttacccttattctttagaaatrtttctctattctgtgcttgtgattgatttctaacgtctcctagaagttacaaagggcctgggttaaaatcctgtcagcaataacgccatatggtttccta

SEQ ID NO: 33712 - DNA, 201 bp, Homo sapiens
aagaactatgcttgctgtaatatggcagaatgaaattatacctgctccttccttgcttcttccttcccttcctccctcccttttcctttcgtttcctttcstttcctttcctttcctttcctttcctttcctttcctttcctttcctttcctttcctttcctttcctttcctttcctttccttccccttccccttcccctt

SEQ ID NO: 33713 - DNA, 201 bp, Homo sapiens
agattctggctcaatataagaaaaacttttggctatcaaagctgggtttttggtgtgtgtgtttttgtgtgtgcgtgtgtgtgtgtgtgtgtgtgtgtgtgttttgcctcagcaatgactgaattccctatcactgcccatgtttgaccccctcgttcccaccgcccatgttggaacacacactgacctgctagttccctc

SEQ ID NO: 33714 - DNA, 201 bp, Homo sapiens
ctttggtccccaaaggtttcagagaagagattgtgaacttatatattgaactaaatttttgccaaatttggcttattttgtgtgtgtgtgtgtgtgtgtgkggtttaaggagttgaaagtttaatagaagaaaggagagaggagagcatctccttgcaagagagagagagaaagagagaaacgtctgaaaaagtccaaagt

SEQ ID NO: 33715 - DNA, 201 bp, Homo sapiens
tagattctggctcaatataagaaaaacttttggctatcaaagctgggtttttggtgtgtgtgtttttgtgtgtgcgtgtgtgtgtgtgtgtgtgtgtgtgtgttttgcctcagcaatgactgaattccctatcactgcccatgtttgaccccctcgttcccaccgcccatgttggaacacacactgacctgctagttccct

SEQ ID NO: 33716 - DNA, 201 bp, Homo sapiens
atagattctggctcaatataagaaaaacttttggctatcaaagctgggtttttggtgtgtgtgtttttgtgtgtgcgtgtgtgtgtgtgtgtgtgtgtgtgtgttttgcctcagcaatgactgaattccctatcactgcccatgtttgaccccctcgttcccaccgcccatgttggaacacacactgacctgctagttccc

SEQ ID NO: 33717 - DNA, 201 bp, Homo sapiens
ctagaattaatgagtagaaaccatggggagatagattctggctcaatataagaaaaacttttggctatcaaagctgggtttttggtgtgtgtgtttttgtrtgtgcgtgtgtgtgtgtgtgtgtgtgtgtgtgttttgcctcagcaatgactgaattccctatcactgcccatgtttgaccccctcgttcccaccgcccat

SEQ ID NO: 33718 - DNA, 201 bp, Homo sapiens
tacaggtgtgagtcactgcgcccggccctaattttttatgaacatgaattttacatgtggttagtgactgtttgcatttgttatttgacaaacataaaatrtatcataatggaaaatgatcaagtagcaaagaaatgccttcaacagctttctatatgttttggcttatgtacttaaggatgtagacagctttatgagaca

SEQ ID NO: 33719 - DNA, 201 bp, Homo sapiens
aaatgaatgttttggttgaaaagtatgttgcactaggtgtgatatttggtacacaatagatggtcattaaatatttccctttttctctattaggctgctgmtgatgtagtgaagagaaagtttaaatccaaatgatttcagccctgaactagaaagttctgtctcagtgggctgtatgatctcagaaaatcacttaatttc

SEQ ID NO: 33720 - DNA, 201 bp, Homo sapiens
ctcctcaagctgtgtgtctgtggacctctttgggtaggatgtgttctccagttttccacagaactgctgctgcctacagcgttctaccctgactgttcatkcccatatgttctgtagctgagccggtagacatttattgttctgccagtaaatgaatgttttggttgaaaagtatgttgcactaggtgtgatatttggtac

SEQ ID NO: 33721 - DNA, 201 bp, Homo sapiens
aaacaaaatttcaaagtcaaccagagaaaaagacacattatatacagaagaagaaagatgagtcaaagcagacttctcatcagaattaggtaaggttacastgttaacagaataaactgtcaacccagattcctatgtccttcaaaatatccttcaaaatgaaagaaagcaaatataagtgatcttattactcttcatttc

SEQ ID NO: 33722 - DNA, 201 bp, Homo sapiens
cttcctcttgaagcatacagaatggagagggggtgcagtgggagagtcactttacagtggagaaacccacacacactaccccagccaggtgatcaaggtgyacgtcatcaacagtgataaatcatgttgatagtgtgttcccttaatatgatgtgatgaaaatggcacttcacctctgtggtcttcctcccttaaactccc

SEQ ID NO: 33723 - DNA, 201 bp, Homo sapiens
caacccattttccagaagttagcagctgcatttttttccattgagggcaaaacataatatatgggtataactttagtgctagctaattacttctattggtrcttaaaaaaattaaaatcaacaaggagaaatctacccaaactgatccaatatacactgagctaatgaaggaaggtggtgtactttttgtggggtggtatt

SEQ ID NO: 33724 - DNA, 201 bp, Homo sapiens
ttaacacttattctacatcagccttaatgttttagggaaaatatatttactaagctgtttgtgtacaggagtatcacacagtagatgaagcacttatgttyctggaaaaaaagagataaattaggaagctttcagatttgtttataaaagaaatatgaggctaggaaagaagcatgatgacttttgtgatacacacagtga

SEQ ID NO: 33725 - DNA, 201 bp, Homo sapiens
atctaagtgaaaaggaagtttttgcagggagaggcccctgtactttggggggaggagggctatatgggagagaaggaaaggtgggaaaggtggccatcccyggcagaaagacccacacatccacttcaaaagaggttaaaaaaaaatgcttctctctgtgtatctgttggagagtgggtggtaggtgacaaaactggaagc

SEQ ID NO: 33726 - DNA, 201 bp, Homo sapiens
gaggcagaggttgcagtgagccgagattgcgccactgcactccagcccgggtgaccgacagagcgagactccgtctcaaaaaaaaaaaaaaaaaaaaaaaattcccctcgttaatatgtgtttattgttaaaaacttaggacgaaagttaaaaaaaaaaacccacactacttaattacagagatcttcattaacataattc

SEQ ID NO: 33727 - DNA, 201 bp, Homo sapiens
ggaggcagaggttgcagtgagccgagattgcgccactgcactccagcccgggtgaccgacagagcgagactccgtctcaaaaaaaaaaaaaaaaaaaaaaaattcccctcgttaatatgtgtttattgttaaaaacttaggacgaaagttaaaaaaaaaaacccacactacttaattacagagatcttcattaacataatt

SEQ ID NO: 33728 - DNA, 201 bp, Homo sapiens
ggatggtctcaatctcctgacctcgtgatccacccgcctcggcctcccaaagtgctgggattacaggtgtgagtcactgcgcccggccctaattttttatraacatgaattttacatgtggttagtgactgtttgcatttgttatttgacaaacataaaatgtatcataatggaaaatgatcaagtagcaaagaaatgcct

SEQ ID NO: 33729 - DNA, 201 bp, Homo sapiens
acattatatacagaagaagaaagatgagtcaaagcagacttctcatcagaattaggtaaggttacagtgttaacagaataaactgtcaacccagattcctmtgtccttcaaaatatccttcaaaatgaaagaaagcaaatataagtgatcttattactcttcatttcactgccaacatttaaaaatcaatggaaatgaaga

SEQ ID NO: 33730 - DNA, 201 bp, Homo sapiens
tatttaattaaaaaggtgcatacagatatgtatgtagtgtggtttggcaatagttaaaattgggagcaggaaaggaaaattttagaaatcttggtttccargcaaccaaacacacaatatcatatctgtgtaccacttgcttcatgttaagatgccctaaatgtaaataattgatggagcagagactaaaagaaccattat

SEQ ID NO: 33731 - DNA, 201 bp, Homo sapiens
gtatctaatttttttattttattttttgagacagagtctcgctgtcgcccaggctggagtgcagtggtgggatctccgctcactgcaggctccgccccgcygggttcacaccattctcctgcctcagcctcctgagtagctgggactacaggtgcccgccaccacgcccagctaatttttttgtatttttggtagagacgg

SEQ ID NO: 33732 - DNA, 201 bp, Homo sapiens
agcacgatccagtgctagggttgtctatttgtgtaagtcagtaggcaaatcttcctcttcccttttctcagtgtcttctaatagttaactacaaaagaaamaacatagatgtgagtatatttacctaagttctcattacagtataactctttctgtcattttgtaattgttagtgtgcaaaacagcagagcacattggtat

SEQ ID NO: 33733 - DNA, 201 bp, Homo sapiens
tgcactgctgccgcggcgcgcaggtgccttggcggcgcggtgggagattatgtaaagtcgcctcttcacgggtgaccttgcggagtcggtgcacccggctktcccgggatgtgttggcatgagcggtggccgcactgggggtggcggggcggaggccggcggtttgcgctcttctcccttaccctgttgtcagaaccctcc

SEQ ID NO: 33734 - DNA, 201 bp, Homo sapiens
aggaggcagaggttgcagtgagccgagattgcgccactgcactccagcccgggtgaccgacagagcgagactccgtctcaaaaaaaaaaaaaaaaaaaaaaaattcccctcgttaatatgtgtttattgttaaaaacttaggacgaaagttaaaaaaaaaaacccacactacttaattacagagatcttcattaacataat

SEQ ID NO: 33735 - DNA, 201 bp, Homo sapiens
gagctgaaagctctgcatgatccctctattataaatttttccaactccttttgaaggatgttaagtaatttgccccatagtctatgggaatttttcacctyggggaaatggggctgagaaagttattacttttaaccccagtgaaccacaccagaaacagttacagcatcatacaaatcaatttctgcattttccataaag

SEQ ID NO: 33736 - DNA, 201 bp, Homo sapiens
gtgaccttgcggagtcggtgcacccggctgtcccgggatgtgttggcatgagcggtggccgcactgggggtggcggggcggaggccggcggtttgcgctcytctcccttaccctgttgtcagaaccctccttccccgccgcccgcaggctccaggggaatggaaggctggggtcttcctttagggacccgcatacattaac

SEQ ID NO: 33737 - DNA, 201 bp, Homo sapiens
aataaacacagggcttaatgttgagagggtatttttagacttagaagcagcttgctgctttccatgaaatagttgagtgtaattcatgactcatgtttccrtttttggtggtttttctttaaaggatgaaggctggattaactgtgtgtttgtgcgtgcctctgcagtttggttctctggattcataggagtgggtttctt

SEQ ID NO: 33738 - DNA, 201 bp, Homo sapiens
gtgtatctaatttttttattttattttttgagacagagtctcgctgtcgcccaggctggagtgcagtggtgggatctccgctcactgcaggctccgccccsctgggttcacaccattctcctgcctcagcctcctgagtagctgggactacaggtgcccgccaccacgcccagctaatttttttgtatttttggtagagac

SEQ ID NO: 33739 - DNA, 201 bp, Homo sapiens
ccttatctgatgatgaactaaattatttgggggagttgaaaaatagagaaatgccagttattttttattcagcacattgtatatactcaaaacattttctstaaggcaaaaacaggaaaccttgcaaacgaaactgtgggtaatatgtagttataaaccatctttccaggaaggagctgaaagctctgcatgatccctcta

SEQ ID NO: 33740 - DNA, 201 bp, Homo sapiens
gaccttgcggagtcggtgcacccggctgtcccgggatgtgttggcatgagcggtggccgcactgggggtggcggggcggaggccggcggtttgcgctcttstcccttaccctgttgtcagaaccctccttccccgccgcccgcaggctccaggggaatggaaggctggggtcttcctttagggacccgcatacattaactt

SEQ ID NO: 33741 - DNA, 201 bp, Homo sapiens
tatcacaagtaggataattggggatgtgcaaagatgtatgttcaaaatttattgctgtgttaatggtagtgaaatattggtccagtcatatgatggagttytatgaggcaaatgatgtgatctacattcacgtggaaacctttctttgacgtgcttacggttgggggacagattctagccaggcatttgtagcatgaaccc

SEQ ID NO: 33742 - DNA, 201 bp, Homo sapiens
aaagtgtatctaatttttttattttattttttgagacagagtctcgctgtcgcccaggctggagtgcagtggtgggatctccgctcactgcaggctccgcsccgctgggttcacaccattctcctgcctcagcctcctgagtagctgggactacaggtgcccgccaccacgcccagctaatttttttgtatttttggtaga

SEQ ID NO: 33743 - DNA, 201 bp, Homo sapiens
aacatgacagtaagttcattttcttcctgctgttgcaggttatttgggcttggctcttgtaaaagacaacttgtacccagtgaattctcacatgaattcawatcttgtaagctaggaatactgtaaatctctactgatgcttgactgagtaggactttacaactccagatggcagttgtaatactttagcatttaccatac

SEQ ID NO: 33744 - DNA, 201 bp, Homo sapiens
ctgccaaatggcactgtatttccagcaggttcttctttctgggatccagttaggcaatatgtgtcaatatgcagattccctttgattaaggtacttcttgraatttatcacaagtaggataattggggatgtgcaaagatgtatgttcaaaatttattgctgtgttaatggtagtgaaatattggtccagtcatatgatgg

SEQ ID NO: 33745 - DNA, 201 bp, Homo sapiens
ggtggttgaagaaccttttctttatttttcacattttctgatgtacttgctgttctcatcttctgatttcatgccctctggccttctagccccgtgcatcrtttttgagcacatttgaacatgtctgatccatgtagtctgaacctgttgctctctgagggttaccctactcatccctgcatgcttgccttcatctggaac

SEQ ID NO: 33746 - DNA, 201 bp, Homo sapiens
agagtgatgatagaattccaacttgtggctgtcctaagagtggtctcttctgagtgttttcccgatggcaggaagtgggagtgaaggacagatagagggggtaagcaacacagctcaggtcccccaacaaggagatatcagagcattcctggccaggagatggagcagggtatccaggggccctttggaatgaggtaaacc

SEQ ID NO: 33747 - DNA, 201 bp, Homo sapiens
tcgctttaacccaggaggtggaggttgcagtgagccaagatcatgccactgcactccagcctgggcgacagagtgatactcagtctcaaaaaaaaaaaaaattactatataacaatgattttttgaatgaaggtagatgtagcataattgaactttgttacttatgtattctgtattatgtgcttgttaggtggttctctt

SEQ ID NO: 33748 - DNA, 201 bp, Homo sapiens
ttaatttgagttatagcatagagatggtgatgctatagaggaaaaaacccgcaattacttttgcaccaacctaatattaagttttatatttcacatttgtrggcttgtttcatcaacggagcggtttccaaggcttcaaggaaacattgttctatgttttctctcatccatccccctgtggagggatgttgagaggagagt

SEQ ID NO: 33749 - DNA, 201 bp, Homo sapiens
ggaacttcagacggaggcatccagcaccacggacagctcttcagagctgttgggtggatgtaaaaactcctaggggtttttcctggaaaaactgcttctamttcttcctagctaaagatgtctactatacacaagtatcggactttatgcaaccctctcttttctcatcttcaatgtagtaataataaatgttctatatag

SEQ ID NO: 33750 - DNA, 201 bp, Homo sapiens
cattattatccccattttacagatgaggaagctgaaacacagaggtggttacacagcttcagtggcagagtcaggattgaaaccacaccacctggtttcaragccagtaactgccagtagtttttaaccatgagtcctattgtcaccttatatatcaaaccaagacatacctaaaagctcttagtggtcaccaagaagacg

SEQ ID NO: 33751 - DNA, 201 bp, Homo sapiens
tttttttgagtctgagtctcacctgtcacccaggctggagtgcagtggcacgatcacggctcactgtggcctcaacctcctgagctcaagcaattctttcrcctcagcctccagagtatctgggaccacaggtgcacactaccatgttcaactaatttatttttatttttgtagagacagagtcttactacgttgcccagg

SEQ ID NO: 33752 - DNA, 201 bp, Homo sapiens
attacatttagatttttttgctaaatgtgtgaaatcagtttaaaattccatctttcatttaagactgcttattaaggaataataatcccttatttaaattatgatttttgacagttgacaaagtgcttttacacatattttctcatctaattctaaaaacagatctagtgttagatgatgttggttttcattcctgaggtg

SEQ ID NO: 33753 - DNA, 201 bp, Homo sapiens
aattacatttagatttttttgctaaatgtgtgaaatcagtttaaaattccatctttcatttaagactgcttattaaggaataataatcccttatttaaattatgatttttgacagttgacaaagtgcttttacacatattttctcatctaattctaaaaacagatctagtgttagatgatgttggttttcattcctgaggt

SEQ ID NO: 33754 - DNA, 201 bp, Homo sapiens
aaattacatttagatttttttgctaaatgtgtgaaatcagtttaaaattccatctttcatttaagactgcttattaaggaataataatcccttatttaaattatgatttttgacagttgacaaagtgcttttacacatattttctcatctaattctaaaaacagatctagtgttagatgatgttggttttcattcctgagg

SEQ ID NO: 33755 - DNA, 201 bp, Homo sapiens
aggtgaaggaaacaagcagtcacagcttatatttttccaaactaaattaaatccaactgaaatgtatacttgccagactgacaggaatttcaatatcaccmtccagggatattctctcctgtgcctagtttgtcagccccctaaccccaatccccacacgtgtgtacagtctagaaaggaatttcgctgaaatctgctttc

SEQ ID NO: 33756 - DNA, 201 bp, Homo sapiens
tcctcatcactgtccccactcctttcatttttcccttcatttttctacagtctcactcgtatttgtgtttggttttgatagtgagactgaattttgtttcygcttaaatgattatcacgctttatatatttcattttttgattttgactcttagcattctttcatgtcagatgtttctagagaaactctactttgcgtaat

SEQ ID NO: 33757 - DNA, 201 bp, Homo sapiens
tgttgcgcctactaaattcttcttgtcttctcctttgctctattgtcatgatattggttgaagggaattagtaaatcagactggcattgaatctctgggarctagaaaatgggctaagatttagatggcatattcactttctgcgttccgtttgtctgtgtgcttgttcttattcattcctaattttttcctgtagctagt

SEQ ID NO: 33758 - DNA, 201 bp, Homo sapiens
gagagacacatgttcacacttgtcctcttagaagcatgtagattttatgcatgatgtccccattattgtaaatggagtgcacaaagataattcagcaagtycttatctctcagtgtctcaattatgaatagtttttgattcagtgttgccctgagggcctctgaggtgggtagagaaaccgtctgtctccagattctggac

SEQ ID NO: 33759 - DNA, 201 bp, Homo sapiens
ctttgtgaacttgtggtatttgtgaacaggagctcaaattaaatattccatttcagtcattaactgatgtgaaaaactcttccttttctggatgaaactayagatatgtttgggcaaaggagagtgaaagttgatattgataccagacactttacagctattagaccttacacctaaatccttatgtctaagatttaaagc

SEQ ID NO: 33760 - DNA, 201 bp, Homo sapiens
agtcacttgatctcaacttcttcctcctcacacccacattttctcagttgcacagctgaggtaatatggtcctgggcatgattttaggttctgacgttctrtgcttctggtctcgttcccctctggttcattatctactgtggctatagtgacttttctaaagagcaaatctagcattgttcttcttcttaaaactcttca

SEQ ID NO: 33761 - DNA, 201 bp, Homo sapiens
tgtttacaatttggaggtaaaaaaatgcttttgccaagtaaaatttattagagaagaaaatcctttcagcatgaaaatatataatgataccaaaaattgadcatcttattttcatgtacttcattacttaattgctcataaagatataatttactgtataattagaataaagtattctttttttactgtaataaagggcag

SEQ ID NO: 33762 - DNA, 201 bp, Homo sapiens
atgaattggtctcggcaggtgccacaggctagattttctgccatttagtttttgtgtttctcacttgccaaggggtgactgagtgtttttcattgtttatytcctgttccagttgttgctttatagctttttccagttttcttctttctctttgagacataaattggtcttttaattcctactaaccctaattctactttt

SEQ ID NO: 33763 - DNA, 201 bp, Homo sapiens
tatgctatgaagaagttacccaaggtagaccttttagtttttccaacttaaaaaatagagcgctccatttccgctaaatcttgaagttctgtgtcgccctwaagtgtagaaaaaataatttaaactgcgttaggaaagaacttaaaaggttggagaaggtcggcatgtgatgcgatacggttaatgtttatcacaccgaat

SEQ ID NO: 33764 - DNA, 201 bp, Homo sapiens
gctagggtaaagttaatgatgaattggtctcggcaggtgccacaggctagattttctgccatttagtttttgtgtttctcacttgccaaggggtgactgartgtttttcattgtttatttcctgttccagttgttgctttatagctttttccagttttcttctttctctttgagacataaattggtcttttaattcctact

SEQ ID NO: 33765 - DNA, 201 bp, Homo sapiens
tgtcccaagcctatgcatgcagtgattgcttgatactgtagttttaatttgagttatagcatagagatggtgatgctatagaggaaaaaacccgcaattayttttgcaccaacctaatattaagttttatatttcacatttgtgggcttgtttcatcaacggagcggtttccaaggcttcaaggaaacattgttctatgtt

SEQ ID NO: 33766 - DNA, 201 bp, Homo sapiens
taaattacatttagatttttttgctaaatgtgtgaaatcagtttaaaattccatctttcatttaagactgcttattaaggaataataatcccttatttaaattatgatttttgacagttgacaaagtgcttttacacatattttctcatctaattctaaaaacagatctagtgttagatgatgttggttttcattcctgag

SEQ ID NO: 33767 - DNA, 201 bp, Homo sapiens
acagccagttctgttatgtaacaaaattcatttaagagatgcctgacagtatgtttctgtaatgctctagtatttaaaaagtaagggcaaagattgtgtckcatagttcagtatcatagtagctctttttctagtatacaagttagccttctgctccctgctttcacctaagttcatcttttccagtctctgtctacttat

SEQ ID NO: 33768 - DNA, 201 bp, Homo sapiens
gtgatggttacataacaccagtgggaccagagactagggcaggccaaagatgcactgattaaggaaattactgctacctaacagttattctggagctcaartatttcctgttcattatgcaataatgtagcctttcgagtctccaaatgccatttggaagaagagggtgggggagttggaggtagtaggttggatctgagg

SEQ ID NO: 33769 - DNA, 201 bp, Homo sapiens
tgaagttgttgagtggagtttgcagtaaatggtggtatcttggtttgatagctttgggacaggagcacaaacatttaatggtgaattcacggtatgatgtrtttcagcccaaagttaagaccaaagcacaactttagccatatatatcttattaatgaagcttattaagtgagtaaaggaatgaaaatggaaatggttgga

SEQ ID NO: 33770 - DNA, 201 bp, Homo sapiens
ggagttactgatataaagcctggaacattgctaagctcatagtgtccagtaaaactgtgtctactggttgctgctgtgaatgattcaggtgaacgtaggcrttttctgtaggcgctttccacatgattatggtagaataatttgattgtttcctaagcgtatcattcagttgtatcttcatgacattttgtcaatctgtat

SEQ ID NO: 33771 - DNA, 201 bp, Homo sapiens
ttaaattacatttagatttttttgctaaatgtgtgaaatcagtttaaaattccatctttcatttaagactgcttattaaggaataataatcccttatttaaattatgatttttgacagttgacaaagtgcttttacacatattttctcatctaattctaaaaacagatctagtgttagatgatgttggttttcattcctga

SEQ ID NO: 33772 - DNA, 201 bp, Homo sapiens
gggctcctatacatgctcttcctgcgtttggctttcctagccactgtagttgggatgtttgaaatattcagggtactgaacagcagtttagacacaaaaargtacctgggtgcagaagcattttcattaaaattacatgaacgctggagtttattctacagcacaaagccttcctggatgaactggattaatgtttgatag

SEQ ID NO: 33773 - DNA, 201 bp, Homo sapiens
atacaaagtttaggaagccataaatggtaaaataatatattcttctcagcaacccaaacaaaatacataaaaatggaaaaaacactaccgtgaaacgtagyctcagtaatgagatgggcaggccacttttgcctttctcccaaagaggacacgtctagcaagatccactggactgctgacggtggtggattgctgggcaca

SEQ ID NO: 33774 - DNA, 201 bp, Homo sapiens
cccctaatgtgatggtatttggagatggggcccttgggaggtgtttaaagttatatgagttcgtgagggtagaaccctgctgatggaatttgtgcccttawaagaagaggaagaggaaaagggagggaggtggggggaggtagggaagagagagagagagaaagagagagagagagacagacagagagagagagagagcat

SEQ ID NO: 33775 - DNA, 201 bp, Homo sapiens
ttcccccaaatatacgttgaagccctaacccctaatgtgatggtatttggagatggggcccttgggaggtgtttaaagttatatgagttcgtgagggtagraccctgctgatggaatttgtgcccttaaaagaagaggaagaggaaaagggagggaggtggggggaggtagggaagagagagagagagaaagagagagaga

SEQ ID NO: 33776 - DNA, 201 bp, Homo sapiens
cctgctatggactgaatgtttgtgttcccccaaatatacgttgaagccctaacccctaatgtgatggtatttggagatggggcccttgggaggtgtttaargttatatgagttcgtgagggtagaaccctgctgatggaatttgtgcccttaaaagaagaggaagaggaaaagggagggaggtggggggaggtagggaaga

SEQ ID NO: 33777 - DNA, 201 bp, Homo sapiens
aaatcttatgtttctccctgctatggactgaatgtttgtgttcccccaaatatacgttgaagccctaacccctaatgtgatggtatttggagatggggccyttgggaggtgtttaaagttatatgagttcgtgagggtagaaccctgctgatggaatttgtgcccttaaaagaagaggaagaggaaaagggagggaggtgg

SEQ ID NO: 33778 - DNA, 201 bp, Homo sapiens
agctcaggttagagaatagggtggctgaattttcttagaaaaagagcccagataatatctggcatgtacatagatcttgaaaattagctggacttaagtargcatttagttttcaagctttagtttagtgaatgtggggatcctgatctgtaatccttcaggaggcaaatgagctgcaacagagccatggtttctctccct

SEQ ID NO: 33779 - DNA, 201 bp, Homo sapiens
caacatctgggccctgaaaaggaagtgtctgttgcctgttttgcacatcccccctccccccgtgtatgtgtcacattttcctgggggtgtgtgtgtggatrtgtgtgtgcatgcacatgcatgtgtgtgtatgtgtttgaatgtctcataattccttgttgaaacctgtacattttagatactatggtaactctggatatt

SEQ ID NO: 33780 - DNA, 201 bp, Homo sapiens
tgtgtcatgggagtttgttgtacagatgatttcatcacccaggtattaagcctagtacccattagttatttttcctggatcttctccctgcccacacctaycaccctcctataggccccagtgcatgtcattccctctgtgtgtccatgtgttttcatcatttagcacccacttacaagtaagaacatatagtatatggtt

SEQ ID NO: 33781 - DNA, 201 bp, Homo sapiens
gtctttttttctctagctggtatttaagatttttttccttatcactggttttgagtgtttgattatgatttctttcttttcttttttttttttttagatgkgttctcactttgttgctcaggctggtcacaaaattgctttgttgtccaggctggttatgaatatgatttcctttgatgtaatttgcctagtgtttcttgt

SEQ ID NO: 33782 - DNA, 201 bp, Homo sapiens
aacgtttctcattatattaacataaatattatatatgtgtgtgtatatatagtttaacttatttgtattacacacacacacacacacacacacacacacamgtttaacctgtattctgtctcccctgttactttgcttattttagaatatggcaatattttaatattttggacagccaaactgacatttattcaatatatt

SEQ ID NO: 33783 - DNA, 201 bp, Homo sapiens
cacctctgatcactttatcatgctgtggcactggggttgatataataaaagctagatgacattttatctcaggaatatcgatgcataccaaatagagcatyctttaccttgtcacacttgctctccactcctacacgcagattacacaacagcctgtgctggagacattttcaacctccacatttgcttgtttgaagtggg

SEQ ID NO: 33784 - DNA, 201 bp, Homo sapiens
ttcgcatataacccacagacagcaagcggctccagaaatgtgctgatgagctggatttcttgagtcacagaagcatatggttaaatatatttgtagaagawgatattttgaaactcgacacttgctgggttttccttcccatgcctcacctctgatcactttatcatgctgtggcactggggttgatataataaaagctag

SEQ ID NO: 33785 - DNA, 201 bp, Homo sapiens
gaatttcaatatcaccctccagggatattctctcctgtgcctagtttgtcagccccctaaccccaatccccacacgtgtgtacagtctagaaaggaatttygctgaaatctgctttcaagcagagaagagccttaccatccaccaatctcctgctgccatccctggcctgccctcagccttactaccatgtggcaccacta

SEQ ID NO: 33786 - DNA, 201 bp, Homo sapiens
ccttcaaggggcttccagttttgatttttaaaaaattgtacgtaaatcagtaccttacagaacatagtgcttggtgtcctggggaggtttcccatggaatmttcaggctgggtacatcaggcttcctagaagagagagggcgtctgagctaaatcctgaacatgtctcttgtccctgattatgtggttaattcagaattct

SEQ ID NO: 33787 - DNA, 201 bp, Homo sapiens
cagctcagttccaggcagccaacaggcactgggatattggaataaatgaattatgaagcacagttgactgtcagtgtctaatgtactaaaacttctctaayacaaaaagtaggaggaaaaattcttccttttccctaaatcatcagatactcatatgtaaccaacatttgtcacatgcatttacttttatgcaaagagcaa

SEQ ID NO: 33788 - DNA, 201 bp, Homo sapiens
tcctctttatttctccatttttggggaagatggagtgggaataaggtaggaaacatgcaccaaaatgaaaacatttcttgtaggtgagaataacaaggactctatcactgaaacattctctttttaatgtttaactgcaggatgcttaaagaaatcctacaattattgtagacattgatgtgctatcaagaaaaatccatc

SEQ ID NO: 33789 - DNA, 201 bp, Homo sapiens
tgttttcatcctgcagcgccatatattgctccaaagcttagatagtgcccagagcccacctacagctcatcttcctatgaggcagagagctagcttgatckttggggaataatggcagagctctcagaaggtgctggatccctaaccgctttgctgggttcttcattcctggcccacccgagagctcttctggaagtaaag

SEQ ID NO: 33790 - DNA, 201 bp, Homo sapiens
cagcttaaagtgggcccacagaagaagagagggtagagagtgaaaatggagtcacaaacccagcagagaatcctccctctggtttctgaataaacattgtrtacacagaagaaatcagtacgcagaaccttcccagaggaatcagactgactacaaaagttgaaaatctcttgctacaaaatacttagaaatgatggataa

SEQ ID NO: 33791 - DNA, 201 bp, Homo sapiens
ttttgagctaaagaaagttttttcctacacttaagttatgggggaattcacccatgttttccccttataattctgtcattttcaaaatggctgttcttttrtctcagaaccatttattttattttattactttagaagcagggtctcattttgttgcccaggctggagtgcagtggcacaatcgtagctcactgcaacctc

SEQ ID NO: 33792 - DNA, 201 bp, Homo sapiens
ccgggcgaggcctcaggcactgcataaaaagttgaatatgtctgactttgtttttatggactcctccaagctttatctccctatccactatctgaacttcrtgctgcagctcccttgattttgacctctttggctttggtcttggtttcccccacatcacatgtcctctttagacttgacaacatcactcccatttttaaa

SEQ ID NO: 33793 - DNA, 201 bp, Homo sapiens
atctgggtgggatgagctctttctttagacaagtcacaagggacactggaatagtttttattcctacttctcttttaagatggagtcctgccctggggacmaaatgtaataatctaatattggtatccccagggtctctgggtcttccctgagaccactggcttcagccaagctagtggtgtctgtttacactacatgagt

SEQ ID NO: 33794 - DNA, 201 bp, Homo sapiens
aaaatacctcagtaaagaattatctagtccaaaatgtcagtagtacctccattgatatacccttctctaatgggattctaccagggttggagagttaggawattgttactttcttcatacatggagaggagcataagtgagccatgtgccattctggactgaggtgccaccatggtgccagcatttgataatagtaaactc

SEQ ID NO: 33795 - DNA, 201 bp, Homo sapiens
actttagaagcagggtctcattttgttgcccaggctggagtgcagtggcacaatcgtagctcactgcaacctcaaagtcctggactctggtgatcctcctrcctcagcctcctgagtagccaggactacaggtgcatgccaccatgcccaagtagtttttaaaatttttaatagagatgaggttttgctatgttgcctagg

SEQ ID NO: 33796 - DNA, 201 bp, Homo sapiens
agatcatactgcaaagtgacagctgagcaaaggctcccccttgagaagggcatgtgctactcagctcatggcatctgggctctcattgataatggggggtwggttggaagattcttggaagccacagcaagacacaccacacctgggctctcataatcattttgccaccctagagagctccagacacacgattggccctct

SEQ ID NO: 33797 - DNA, 201 bp, Homo sapiens
gagacatttttggttaccacgactggaaaggtgctaccagcatctggtaagtagagctcaaggatgctgctaaacatcctgcaatgcacaggacaaaaaartacctcagtaaagaattatctagtccaaaatgtcagtagtacctccattgatatacccttctctaatgggattctaccagggttggagagttaggaaatt

SEQ ID NO: 33798 - DNA, 201 bp, Homo sapiens
tggtcttttaattcctactaaccctaattctacttttattttatctatcagaaaatattgccacagttatcaataaaaacattggaaagatgtgttttgtktgtctcttttaaatttgttggacagataatagaaaattagatagtaatatattgcttagaaaaacgtacttaggacatttcttgctaaccttaatttttt

SEQ ID NO: 33799 - DNA, 201 bp, Homo sapiens
tttgaagttgttcattaagttgttgaggattgcagatttgtgtagcacatttgaagtgtgttgtggtgtaagcagcagggttgagggtggttgtgggcccygtaacatgtgggccattgtctgtgatccgttagccccatgctctttgacgtgattcatggatccttagccctgaatggttttctaggtacatctggtaga

SEQ ID NO: 33800 - DNA, 201 bp, Homo sapiens
aagtgccgcagtttttgactttttctactttgcccaataaaaatgttgctctacaacccttaatttttataactgttctggcctcagttttccacagtgamtgttcctagtttgtgtaatgttctttaggttgctaatttctgcctccagagccaggagatctgtcttcttttgattattcccaaaggtaaattttgggaa

SEQ ID NO: 33801 - DNA, 201 bp, Homo sapiens
ctaatcatttttcctgcaagacctcccgtggttaataccatccagcatattatttatctcagacattgtatttttttatgtctgggaattatacctcatarttatgtgtatatataagcagctgttcctcaactcataatgggcatcgcattatgtccagataaacctatcataagttgaaaatatcgtaaattgataatg

SEQ ID NO: 33802 - DNA, 201 bp, Homo sapiens
tacatggtactttgaagttgttcattaagttgttgaggattgcagatttgtgtagcacatttgaagtgtgttgtggtgtaagcagcagggttgagggtggwtgtgggccccgtaacatgtgggccattgtctgtgatccgttagccccatgctctttgacgtgattcatggatccttagccctgaatggttttctaggtac

SEQ ID NO: 33803 - DNA, 201 bp, Homo sapiens
acccctcccaactgctgtggacacttgggctgtgtgctgcctactcccaggtgttaagttactggtaggacccacggctgtgtgtttattgcacaatttgrtgaatcaaaggctgacttcctggtgagcaccccctagcagggtgagatatggacctttctggagtctgttttacaagaagtgtttactgggatattttag

SEQ ID NO: 33804 - DNA, 201 bp, Homo sapiens
ctacatggtactttgaagttgttcattaagttgttgaggattgcagatttgtgtagcacatttgaagtgtgttgtggtgtaagcagcagggttgagggtgkttgtgggccccgtaacatgtgggccattgtctgtgatccgttagccccatgctctttgacgtgattcatggatccttagccctgaatggttttctaggta

SEQ ID NO: 33805 - DNA, 201 bp, Homo sapiens
tcctctagttacgtgaagaccttgtgtggaatgccttactgtttggagaaaatcttggtttggctcttgggctctctggtgatcattttataatgctcatyatgggaggtgacgggaagaatggccagcaagatgctctagcctgcagaaaagtcactttagcatttccctgctttgactatggcacacggacatttggaa

SEQ ID NO: 33806 - DNA, 201 bp, Homo sapiens
cccatcaaaaagtgggcgaaggatatgaacagtttcactttctttaaacagccttccctaatggctcctcacaccaatcccaggcaaggttagttgaagayggaggctcaggagcttataagatgagaaattcttgtaatttaggatgcatcaaaacttactttcaaatagtaattggaaattttggacattgagaaaaat

SEQ ID NO: 33807 - DNA, 201 bp, Homo sapiens
ctaaagctcatcatttttgtcatttagagcacttattttctcatttcagaaagtggatgtcaccagcagggctgtgatggaaataatgactaaaacaattgaataccttcaacccaatccaggtaaggcatcatcttatatgtttaaaggatccctcgaggtaacttttagtttctctttgatagacattttaagtttggt

SEQ ID NO: 33808 - DNA, 201 bp, Homo sapiens
ctaccaattaccagctgtctcaagggacagacttgtggagtctcctattcggaaggtcatgtggctgatcatccagtgccgcataaatcgctttctgtacrttctctcttttatgctgtcacatgttgggcagctctcccttttgaagaacacatttcgtattttgggtatttctcatcattcgaaacatctttttcatat

SEQ ID NO: 33809 - DNA, 201 bp, Homo sapiens
cttttcagcttaagatgaggtctcctgaaccccccagggagtataggtcagtccagttccaccaaagactgaagatatctttgtgttttgaaacatgatakcaaagaacacttggcacagtgcctgacacttagtagggactcaagaaatattatgcaccttcctttcctggggtactgcagctcaacctagggcatctca

SEQ ID NO: 33810 - DNA, 201 bp, Homo sapiens
ttttctatgtaaattgtgttgatggatcagtacacaatattgtatcatttatcatttctattggaatgtttttattttaattactttggtagaccgatttrcattaagaaagttacccatggatagatatattagaggatgttttaatattctttaatatataatattcttcagaagattaaccaactaatgtatcataaa

SEQ ID NO: 33811 - DNA, 201 bp, Homo sapiens
aagctcacattgaagtaactggaagatctgtggtattttatctgactgtggtatatttaacaaataatgtatgcaaacagttcaggtgacacataatatcmgagtagctataaactgttatcagtttgaactttcaagagatggtaagaaggaaaattaggatagtttaaggtaagatataatgattcccagaagatgtga

SEQ ID NO: 33812 - DNA, 201 bp, Homo sapiens
ttcgagggtactttgggagtacatctgtattagattactgctcccgggtgcttgctggctttcacatcttgggtacatggacaggccagggcaatcagtargatttgatgcttcaagggtactttgggagtacatctgtattagattactgctcccgggtgcttgctggctttcacgtcttgggtacatggacaggccagg

SEQ ID NO: 33813 - DNA, 201 bp, Homo sapiens
ggctcttgataggtgatgaaggggcaagtgtatttttagctgttggttgccatttcaacgaaatagccgtcaactgtaattttctccaaaagtgggaaaayagagaaaaaaactaacatttttctgtacttcattttccatctgtaaaatggagaaacaaaacccatctgttgtgttttgcaaggctggatgatgtgtacg

SEQ ID NO: 33814 - DNA, 201 bp, Homo sapiens
gggagtacatctgtattagattactgctcccgggtgcttgctggctttcacatcttgggtacatggacaggccagggcaatcagtaagatttgatgcttcragggtactttgggagtacatctgtattagattactgctcccgggtgcttgctggctttcacgtcttgggtacatggacaggccaggggaatcagtaggat

SEQ ID NO: 33815 - DNA, 201 bp, Homo sapiens
gtcactaaaagcagtgaaagacttcagaaaccatgtttcatgtctttggtcttccctgatggatgctaaagccattaggtttcccccaacagtcagaacayaaagatgtgacttggagtactgtggccacctgttctgcccaagtgcatcagctgtgttcatcaactcacaccaagggtgggggttggattctcttcttcc

SEQ ID NO: 33816 - DNA, 201 bp, Homo sapiens
ttagccttcccagccttactctttcaggtggaatttgttactgtgtcttctgcagtgtaaatattaatacattacagcctcacccacactctgcctcacascagtgagtgagcactctgactctccacctggataataagctttttaagagcagaggctgcacctcacttctttcagagtccccctagacatagcacttgc

SEQ ID NO: 33817 - DNA, 201 bp, Homo sapiens
ctctgctgaaaactatgcgtgcctttataaaatatggagctgatgttgctgaaaattaaaatgacaaaatattgtgtttagataaataacaacaatggcartatttttggcaagaaatcacatattgtccctcccccaagcagtctgttccctgcaattctgaatgtttggtaattctaagcaccctagaggaaggtaaca

SEQ ID NO: 33818 - DNA, 201 bp, Homo sapiens
gggtggcattgcctgtctgtcctctctctctagttctgtgcacagaaggaacaggaacaggaacagaaggcacagaggaacagggaggaaaagcccttccrggagtgtgcctgagtgtggcttgtggtgaatttgtggtagtagctctggtcagattttacaacttagaatatgttttgaatccatatatgtggtacactc

SEQ ID NO: 33819 - DNA, 201 bp, Homo sapiens
gcatacctcctaagaataaggacattttcttatataaccatagtacagtgataagaaacaaaactttttatatccagtccacaatctgaacttaaattttrtcagttgtcccaataataacttttgtagcatttctctcctccactgggtccaggatccatccacttgtattgtgtttaattattatgtcttaagtttctt

SEQ ID NO: 33820 - DNA, 201 bp, Homo sapiens
gcccgctttctagggcctcctgagaaaggggtcaccggacttctctaggtcagttgtccctaaaagtaggtcgaggacctgcaggtagagcctggtatagyttgagtcagggacagaggtattagtgttctttcacaagtcatttttttttttttttgaaatggggtctttgtgtcccagactggagtgcagggggacagt

SEQ ID NO: 33821 - DNA, 201 bp, Homo sapiens
tctgtctctccttacataagtgtttccagaaagctaataaaattattcctgaaggttaaaaacaaggaagttatgaaccggatttgaggttgaaattaggyagggggaacatgaattattttctgtaacgtacaagtggaaacaatttaatcaatcctttttatttttattgaatgtagacagaaaattcagtgcaggtgg

SEQ ID NO: 33822 - DNA, 201 bp, Homo sapiens
agctaataaaattattcctgaaggttaaaaacaaggaagttatgaaccggatttgaggttgaaattaggtagggggaacatgaattattttctgtaacgtrcaagtggaaacaatttaatcaatcctttttatttttattgaatgtagacagaaaattcagtgcaggtggctgcattgcatttcatttacaataattaaaa

SEQ ID NO: 33823 - DNA, 201 bp, Homo sapiens
atggacaggccagggcaatcagtaagatttgatgcttcaagggtactttgggagtacatctgtattagattactgctcccgggtgcttgctggctttcacrtcttgggtacatggacaggccaggggaatcagtaggatttgatgcttcgagggtactttgggagtacatctgtattagattactgctcccgggtgcttgc

SEQ ID NO: 33824 - DNA, 201 bp, Homo sapiens
atttgatgcttcaagggtactttgggagtacatctgtattagattactgctcccgggtgcttgctggctttcacgtcttgggtacatggacaggccagggsaatcagtaggatttgatgcttcgagggtactttgggagtacatctgtattagattactgctcccgggtgcttgctggctttcacatcttgggtacatgga

SEQ ID NO: 33825 - DNA, 201 bp, Homo sapiens
tcataatcattttgccaccctagagagctccagacacacgattggccctctaacagaggaacattttaatacaagtgtgtactgctcaaggactcatttgytaagttaggggcagactccttggtaccaccaaatcctatttttcctaaatcggtcaatgtattgtcatatcccctgtgtgcagttttaactctgtgagtc

SEQ ID NO: 33826 - DNA, 201 bp, Homo sapiens
tgggagaaactgtggtatggtaaacagatatacactttattggtgagagataggaactaggatttattgtataccatgtaggttcagacatatgctcttayaattcttatgccatttaattttcataaccgctctgtgtacctatcaaggaatggaggggtcagtccatgtcatgctcttccactgcgccatatttctcct

SEQ ID NO: 33827 - DNA, 201 bp, Homo sapiens
tcccgggtgcttgctggctttcacatcttgggtacatggacaggccagggcaatcagtaggatttgatgcttcgagggtactctgggagtacatctgtatyagattactgctcccgggtgcttgctggctttcacatcttgggtacatggacaggccagggcaatcagtaggatttgatgcttcgagggtactttgggagt

SEQ ID NO: 33828 - DNA, 201 bp, Homo sapiens
gcaatcagtaggatttgatgcttcgagggtactttgggagtacatctgtattagattactgctcccgggtgcttgctggctttcacatcttgggttcatgracaggccaggggaatcagtaggatttgatgcttcgagggtactttgggagtacatctgtattagattactgctcctgggtgcttgctggctttcacgtct

SEQ ID NO: 33829 - DNA, 201 bp, Homo sapiens
gctgcatagtattccatggtgtatatgtgccacattttctttatccagtctatcattgatgggcatttgggttggttccaagtctttgttactgtgaatastgtggcaataaatatacatgtgcatgtgtctttatggtagaatgatttataatacttttggtatatactccgtaatgggattgctgggtcaaatagtatt

SEQ ID NO: 33830 - DNA, 201 bp, Homo sapiens
tcctggccaacatggtgaaaccccatctctactaaaaataaaaaattagctgggcttggtggcacgtgcctgtaatccccgctactcaggaggctgaggcmggagaattgcttgaacctgggaggtggaggctgcagtgagctgagatcgcaccactgcactctagcctgggtgatatagcaagactccatctcaaaaaaa

SEQ ID NO: 33831 - DNA, 201 bp, Homo sapiens
ttagtgatgaggccagatttcagccctgagtgcagatcgttgaggagagtgaagatcaaggtcatcagagttgaggttttcaggaaactgtgggaataggrttgaatgagtcatgaacacaaacactgaagtcaccccggatgatggtgggatttcatatagctcctgtgagccaaggaatgaagtcatcagtggatgtac

SEQ ID NO: 33832 - DNA, 201 bp, Homo sapiens
gagatcgcaccactgcactctagcctgggtgatatagcaagactccatctcaaaaaaaaaaaaaaaaaaaaagaaaagaaagtagtgtggagatgcccctragactggagacaaaaagatttagataatgaggttatttatgcaagaaagacccaatggcaccagttcttattttgcacctttacctactcaagcaaatgc

SEQ ID NO: 33833 - DNA, 201 bp, Homo sapiens
ccctcatggaagactatgagacacacaaatctaaaaggcgcgagagaatggatgatagtagtgtaagtttttcctcctttcctctttcacttctctgagcrcggccatcggtgtggcgtgtggcattccagttcaggcacaaatgtgtatgtcgttgtctggtcagcattagggttccagtatcagttttcatatatgtgg

SEQ ID NO: 33834 - DNA, 201 bp, Homo sapiens
atgaaggagaaagaaaagtgccaaacccacttcctgatcctaatgccatctggcttaagagcccatattcattgagtctgaaatgcaacggacaactaccrgtttgtctggaggcggtacaaatactcttctaatatttttttaaaaactataggatgtagtctattttcaactttattcaaccagatttatttaccccta

SEQ ID NO: 33835 - DNA, 201 bp, Homo sapiens
tgttgttctatttgacagtttttccttcaccattcataaaaaggattaacaaaattgcccaaaacaactctataaagtctaggagtggcacgtcagtctckgaaaaagcaaagggggttttgttattgttgctgatgatggtattgttactatttcaccactgtcataacagcaaagaggaacagctgccctatggtgtta

SEQ ID NO: 33836 - DNA, 201 bp, Homo sapiens
tttattcaaccagatttatttacccctaccgagttttctaaatcagtgaatcagtattttaaggaataaatcttaggcacataaaatgataggaataaaakatgtattataaagcttctttaatcaatacaagctattcttataagtctattggttaatgtctagattgccgtgcccacttaaaatgggaaaacattccag

SEQ ID NO: 33837 - DNA, 201 bp, Homo sapiens
atctcctattatttttaccaccttctattattcttactcttggcccacttcctttgtctgtatcacctgcctggcccctattggcatttgagcatgtgacscctaatctaccatcattcactcattttatggctgggtcaaataagtcctaggtggaaatgggacttaccttagcaagataacagcagactcagaactaaa

SEQ ID NO: 33838 - DNA, 201 bp, Homo sapiens
aagtagttgactttcaccctgagacacagacttatagaccatagatgaaaaatgacaatcaagatataatgcataagttgagcacggtggtatgtgcctgyaaatcccagctactcaggaggctgaggcaggaggattgcttgagcacaggaatttaagtctagtctgcacaacatagcaggaccctatttctttaaaaag

SEQ ID NO: 33839 - DNA, 201 bp, Homo sapiens
tatagatcattttctacgtgtgcttctatggttgtagtataaattcttggaagtataaccactgggtcaaaagcattgtgtattttaaagtggggtccacrttgccaaattgccatccaactttatggagttggatgagggtacctctctcattacatgctgataactaatatataggtggaaaacttgtagtttttgtgt

SEQ ID NO: 33840 - DNA, 201 bp, Homo sapiens
tctcaaagtgtatctctagagtaaaggcagccgatggcaggtttttctgggggcaaaatgaacactaccaatccaccttgctagagttctctctctactcmctgaggtcttagggaggcaaccgtacataagattttctgaaatttgggatctggtctacagccgtaccaccctgaatatgcccgacctcgtctgaaactt

SEQ ID NO: 33841 - DNA, 201 bp, Homo sapiens
caacctagtcagagaggacaactatttgcaccatgaattgaattatagccaaacaggtcttgagtaattcattgtgcatatatcctatgaaatgaagctcycaaggacccagaatgtaaactttaaaaagtaaccagtgttaatacattaaaatttcattaatttcgtattaatttacttaaagcatcatgtaatttcaag

SEQ ID NO: 33842 - DNA, 201 bp, Homo sapiens
agtatcatctgattgtccatcatgcccaacatctgtgtctctctgccagccaaatccaacaggtatcaaaagtggcttaaagcaggaggggttattagtcrgttaaaagcaaagcatgtcaaggaaataatctattcatgtaggagcaaagatttttcttctataaacttgcatttaagataaagctgacaatctccttgc

SEQ ID NO: 33843 - DNA, 201 bp, Homo sapiens
catggagtttgccttgtgcaaagtcatagaaacaaatccaggtgcactgtgggcaccagagctaataaagaagagaatcttgtagacatgaaagagagaargtaagagagataaaaggagatatgtggaaagagagagagagaaagggaggccataaactttggtggtttttgcctttagtttcacttatgtaggcctttt

SEQ ID NO: 33844 - DNA, 201 bp, Homo sapiens
tcatcaggattaatcacatttttaaattaaaatgttattactaaaacacttaaaactaaaatagcatttttaaactaaaatgctatgtctgttttctctcactcttgttatgaaatgtttcctaatgtgaagtgttttcttgatggaagactaaaatattgagacaacatatatatttatgtctcacatctccttcttatg

SEQ ID NO: 33845 - DNA, 201 bp, Homo sapiens
cagctacttacacagtgatttaaagtcatttcatatgtgaaaaacataagaccaatggatatccacatatagatttgatttgtgttgtgtaaggatatacmcaaatgcaggcaaaggaacccacatgctgtggatttgttcactcattcactcattcacagtggatgcattgattctttcaatgaatgtttactgagcact

SEQ ID NO: 33846 - DNA, 201 bp, Homo sapiens
cgtggttgaaaacaatagcaatttgttctctcacagttcaggagtcctgaagtctgaaattacagatggcagggttggttccttctggaggctttgagggmgaatccgttccatgcctttctcctagcttctcgtggttgctagcaatgtgtaacatttcttgacttgtaaatgaatcattccaaattctgcctccagatt

SEQ ID NO: 33847 - DNA, 201 bp, Homo sapiens
actcattcacagtggatgcattgattctttcaatgaatgtttactgagcacttactgtgttcctggcattattctaaccactagggatagagcagtaagcmaaacaggttacgtcccttccctagcggagttttactatggcacataccaccacacacaccactaaatactttagagcttgctctccaagagggagagcag

SEQ ID NO: 33848 - DNA, 201 bp, Homo sapiens
aacaaattctcacaaattacgtggttgaaaacaatagcaatttgttctctcacagttcaggagtcctgaagtctgaaattacagatggcagggttggttcmttctggaggctttgagggagaatccgttccatgcctttctcctagcttctcgtggttgctagcaatgtgtaacatttcttgacttgtaaatgaatcattc

SEQ ID NO: 33849 - DNA, 201 bp, Homo sapiens
tcttcacctggcatttgaaagcccctcacaatctgcccttgattatattatcaggcatatttctagaatatcacattttcccttgcacaagccgtctgctytgcccaccaagcacctcctgcctcatgtgtgattccatttaggtcctttcaaagccaagttgccaggttctagttccaattctacccaactcgcgttttc

SEQ ID NO: 33850 - DNA, 201 bp, Homo sapiens
gagggcgcctcaccatgtcctctccataagccaggctacataggtcatcatctgggatcttatttttctgaattgtttgtggctcagctcttcttaatatrgtactttctgaccagggcgggggggtggggagcctgtagtctcagctactcaggagactaaggtgggaggattgcttgagctcaggcattcaaggctgca

SEQ ID NO: 33851 - DNA, 201 bp, Homo sapiens
tcactgcttggggctccctttcacttgcctgtatggatagagctttaatgtttatttcgtgggcaattcataacctgtagcacatgaaggaggctgtcacrcaatgtataccacccctgtggtaggcccaggaccggcgtttgtctcaaacaattccagtaggccttttattcagtgaagtggatagatttggtggatacc

SEQ ID NO: 33852 - DNA, 201 bp, Homo sapiens
tatttcagaggtaacccctttagatcagtgccaggtccatcccagagaaaacctcttgggcctccgcaaagggctttctattcaggaattcaaatacacaygagagtgtcaacctgtctctcttgagtctcctccactacagtttctattaccagattaaaatgttaagctgaagcttcttgagaagcaagggtattctag

SEQ ID NO: 33853 - DNA, 201 bp, Homo sapiens
gtttaaaggcagatcattgttctgaagttccgctaagttctaatgcccaccctgctgagaaatcctccaagaacaaagtgagattttaaaaatccacaggkttacttggagccaaaggcaattaagaggaagagaaataactggccaagtctcaatgtgatggctgtctgtgcagagactctagtgaggaagagagctaac

SEQ ID NO: 33854 - DNA, 201 bp, Homo sapiens
cctggaaataaaatactgggtaaactagcataggtatataggctcctgaggatatataggtatatcatatatattctacatatatatatatatatatatakgtatatatacctccaaaaggatgcttttcaaaaggatgaaactggcaagaataaaatctcactagttgccaaatgaaacttcatttttgaaacacaggag

SEQ ID NO: 33855 - DNA, 201 bp, Homo sapiens
gcgtgtactaattatttcttgagtgaacaaatgtgctaaagtggtgagcaaatgtcttgaggagacagaagttaccttgcaaaggagacttttggaactgrgtgttcaagaatgagtaggggctctcttgatgaaaggaaagaggagtaataggagaaaaagaattgtagtcaaggaaacagaatgcacaagggaatggag

SEQ ID NO: 33856 - DNA, 201 bp, Homo sapiens
ctgggcacaccagagcatattccctactcaagcaagggtggagatgtctgcaatctttctaaccaacaacatatcttgaatagcgctcatttgccagtggraaaaaaaaaaggataacataacatcccttatactaattaacaaaccatctggtgcatatttagataactattcctgaagtgctttcctttgctttccaac

SEQ ID NO: 33857 - DNA, 201 bp, Homo sapiens
tgtaattcataaaaacatataatttccctctaatatttcatttttcctaattataaaaataatgcatgcttattatagaaatgtagacataaaaaactatraaaagaagaaaagaaaactcaatccaaatcttaccactcagaaatgacgtgccactggtaacatttagacttatttcctcctaatatgtatattttaaac

SEQ ID NO: 33858 - DNA, 201 bp, Homo sapiens
gaaaaaaaagaagtggtactcatttactgagcaccaactatatataatctattgcacttgctatgaatttctttatatactcttatgtttccctcacagtrtatctgggaggtagaattactattcctctattaaagataaggaaacagtggtgtaaagtttcaagtgagatcttcaacccactttctcacagttgccccc

SEQ ID NO: 33859 - DNA, 201 bp, Homo sapiens
agaaacatttaaaaaaaaaaaaaagaaaaacttcagaagccttctgaggttcagaggtcatgtttcggaggtcatgtttcagggtgcggtatttggagccytcccggaaacacaaaagcctccctggtgacattcttagcccctaggaagggcagtaatgacagcccacaactgacaagtactgatgaatagttcttgaag

SEQ ID NO: 33860 - DNA, 201 bp, Homo sapiens
ctgggaggtagaattactattcctctattaaagataaggaaacagtggtgtaaagtttcaagtgagatcttcaacccactttctcacagttgcccccagakcctgccgctgagaacttacaatttggagaaacgacagctgccaccaggggcttactgattggtgtgctctttttgaagaatgaacagaagtaaaagtcat

SEQ ID NO: 33861 - DNA, 201 bp, Homo sapiens
ggaagagggttggcggccatccccaccggaggggcatcctggaaaactccagagagggaagcttgtgaccatgactcctagcagagcggtactgacaaccyagtacaaaacccatagtggaaacactttcacctactctcatacattcatcttcccctgagaggaagcagagctgacattgtccagtcccattctgcactc

SEQ ID NO: 33862 - DNA, 201 bp, Homo sapiens
cctctattaaagataaggaaacagtggtgtaaagtttcaagtgagatcttcaacccactttctcacagttgcccccagagcctgccgctgagaacttacartttggagaaacgacagctgccaccaggggcttactgattggtgtgctctttttgaagaatgaacagaagtaaaagtcatacagttaggaaaagagaataa

SEQ ID NO: 33863 - DNA, 201 bp, Homo sapiens
tcaagatgcccaacccttattgtcctgactcatggagggaggctgcttgctaagtaatcgtgagacccaggagaggaagagggttggcggccatccccacyggaggggcatcctggaaaactccagagagggaagcttgtgaccatgactcctagcagagcggtactgacaacctagtacaaaacccatagtggaaacact

SEQ ID NO: 33864 - DNA, 201 bp, Homo sapiens
catcaaatgcctttctccctttgaaaaacagaagcaattacaggaaggtgagcctaaccaatgatctgtgaaagtcggaggttgagacagaggtcccacaygtgtacatctagaaaaccagttgggtgatgtggttaggtttggcttttggttatgtggatatcctagcaatattatgagtaagtgaagaaaaatgaggtt

SEQ ID NO: 33865 - DNA, 201 bp, Homo sapiens
atttttagtagggatttctaatgcattcttttttcccattgatggttgttaatacttcccctacacacacacacacacacacacacacacacacacacacaagcataaatagggcacacgtattctcccatgtaagggctgctgtcccttctccctcccacttatagcgatgtgtgcctctctgtagctgaaggttgcctt

SEQ ID NO: 33866 - DNA, 201 bp, Homo sapiens
atgtggttaattgaaacccttccatattcttgatggggcagaaccttcagctgttttcatgttcatgttcaggggtgtaaatttctagacgatcttgtggrcctctgtcagctctgagattaaatgacgtgtgcatttgcttatcggattcttaactctaaaaccctgggatgaggactaggaaggagaaccaggaggcgc

SEQ ID NO: 33867 - DNA, 201 bp, Homo sapiens
tttttagtagggatttctaatgcattcttttttcccattgatggttgttaatacttcccctacacacacacacacacacacacacacacacacacacacaagcataaatagggcacacgtattctcccatgtaagggctgctgtcccttctccctcccacttatagcgatgtgtgcctctctgtagctgaaggttgccttg

SEQ ID NO: 33868 - DNA, 201 bp, Homo sapiens
cagcagtctgagatcaaactgcaaggcagcagcaaggcttggtgaggggtgcctgccattgctgaggcttgagtaggtaaacaaagtggccgggaagctcraactgggtggagcccaccgcagctcaaggaggcctgcctgcctcagtagactccatctctgggggcagggcatagctgaacaaaaggcagcagaaacctc

SEQ ID NO: 33869 - DNA, 201 bp, Homo sapiens
agggagctgttaaaatgttcaacacagctttaaaatgacataagaagaggactgagacatatccatttggcattggggactttacagggagcagtggcagyggcatgggggaggcagaagccagaacgctaagcattgaggagaatggcaaagattactggttgtctgtcccccataccaattttccccttcttacatggg

SEQ ID NO: 33870 - DNA, 201 bp, Homo sapiens
agaacggtcagtctgcctcctcaagtgggtccctgatccccgagtagcctaactgggaggcatcccccagtaggggcagactgacacctcacatggccggrtacccctctgagatgaagcttccagaggaatgatcaggcagcaacatttgctgttcagcagtattcactgttctgcagcctccgctgctgatacccaggc

SEQ ID NO: 33871 - DNA, 201 bp, Homo sapiens
gaaggaatatttcttagtggcagccaagtaggtcaaagtaatgcatgttgtcccatcaaatgcctttctccctttgaaaaacagaagcaattacaggaagstgagcctaaccaatgatctgtgaaagtcggaggttgagacagaggtcccacatgtgtacatctagaaaaccagttgggtgatgtggttaggtttggcttt

SEQ ID NO: 33872 - DNA, 201 bp, Homo sapiens
ttctctttgtctgatgagagatagatgttaaatcagtaaatatgtgtgtatactgattgaatttctcctcagaaaaggggtttttcttttctatcacattktcaggctgcaaattttctcaacttttatgctctgcttcccttataaaaccgaatgcctttaacagcacccaagtcacctcttgaatgctttgctgcttag

SEQ ID NO: 33873 - DNA, 201 bp, Homo sapiens
acacctcacatggccgggtacccctctgagatgaagcttccagaggaatgatcaggcagcaacatttgctgttcagcagtattcactgttctgcagcctcsgctgctgatacccaggcaaacagggtctggaatggacctccagcaaactccaacagacctgcagctgagggtcctgactgttaaaaggaaaactaacaaa

SEQ ID NO: 33874 - DNA, 201 bp, Homo sapiens
ctctttgacttcctgttgagttggctcaatggaaggcaccagcaggagaaccatggatgagagaaaattgaggtcagtgtacggtttaatctatggtttcycttcctacagggcagtgggttggccagggcatctttcctcttctgaaggccacagcagcccttcctactgctacagctacagctctctcccactgctggt

SEQ ID NO: 33875 - DNA, 201 bp, Homo sapiens
cttgggagctcttcaaacacttggaggcagcaagtctattttcctttggttttctcttttcccagccttcatgctgcagatcaaaggaatggagctgaaartgggggctgggaaatatctaagtcagtgtctcctaaagtgtgggcatcaacaggtggtaagaaaggttatttttagatagcacatgcatgatcattttat

SEQ ID NO: 33876 - DNA, 201 bp, Homo sapiens
ataatgggagactttaacaccccactatcaacattagacagataacgagacagaaagttagcaaggatatccaggacttgaactcagctctgcaccaagcrgacctaatagacatctacagaactctccaccccaaatcaacagaatatacattattctcagcaccacatcacacttatttcaaacttgaccacatggttg

SEQ ID NO: 33877 - DNA, 201 bp, Homo sapiens
gaactcagggtggaaatggaacatcctggccacctacccaggagaggcctcatgtagtaagaaaagggagaggaaggagcagtgctagaaatcagattatmcagacagaaaaccacctcccagactgcctgatggcagggggtgggtctttccatcttaatctttccagcccaagcaccatgcctgcaacacaacagaaat

SEQ ID NO: 33878 - DNA, 201 bp, Homo sapiens
tgcaggtttgttacatatatatacatgtgccatgttggtgtgctgcacacattaactcgtcatttaacatcagggatatctcctaatgctatccctccccsctcccccgaccacacaacaggcccccggtgtgtgatgttccccttcctgtgtccatgtgttttcattgttcaattcccatctacaagtgagaacatgtgg

SEQ ID NO: 33879 - DNA, 201 bp, Homo sapiens
agagcttggcattcagaggtaacaatatgtgctttgttactctgcaggtttgccgtgaagtgtgctgtaatctttgccaggggtgtgctgctctctcccargagggttcacagcccgggaggaacacttcagactgcttaacgacttgctcgggccttgccttatatggaatttttccttctgcacaagagaatgacaacc

SEQ ID NO: 33880 - DNA, 201 bp, Homo sapiens
aacaccccactatcaacattagacagataacgagacagaaagttagcaaggatatccaggacttgaactcagctctgcaccaagcggacctaatagacatytacagaactctccaccccaaatcaacagaatatacattattctcagcaccacatcacacttatttcaaacttgaccacatggttggaagtaaagcactcc

SEQ ID NO: 33881 - DNA, 201 bp, Homo sapiens
acatcagggatatctcctaatgctatccctcccccctcccccgaccacacaacaggcccccggtgtgtgatgttccccttcctgtgtccatgtgttttcabtgttcaattcccatctacaagtgagaacatgtggtgttgggttttttgtccttgccatagtttgctgagaatgatggtttccagcttcatccatgtccat

SEQ ID NO: 33882 - DNA, 201 bp, Homo sapiens
accctcatggaagactatgagacacacaaatctaaaaggcgcgagagaatggatgatagtagtgtaagtttttcctcctttcctctttcacttctctgagygcggccatcggtgtggcgtgtggcattccagttcaggcacaaatgtgtatgtcgttgtctggtcagcattagggttccagtatcagttttcatatatgtg

SEQ ID NO: 33883 - DNA, 201 bp, Homo sapiens
ggttttttgaaaagatcaacaaaattgatagaccactagcaagactaataaagaagaaaagagagaagaatcaaatagacgcaacaaaattgataaagggkatgtcaccaccaatcccacagaaatacaaactaccatcagagaatactataaacacctctacacaaataaactagaaaatctagaagaaatggataaatt

SEQ ID NO: 33884 - DNA, 201 bp, Homo sapiens
ttttagactttgtggaccatatagtctttgtcacacattaattgttttctttctcttttctctttccttcccccatcttttcctccctctctttcttcttytccttcctcttcttttttcttccttctccttccccttctcttcttcttcttcttcctcttcttttttttttttttttttttttttaaagaaacaaccctt

SEQ ID NO: 33885 - DNA, 201 bp, Homo sapiens
ccttcttcttgggagctcttcaaacacttggaggcagcaagtctattttcctttggttttctcttttcccagccttcatgctgcagatcaaaggaatggarctgaaagtgggggctgggaaatatctaagtcagtgtctcctaaagtgtgggcatcaacaggtggtaagaaaggttatttttagatagcacatgcatgatc

SEQ ID NO: 33886 - DNA, 201 bp, Homo sapiens
aaaaccataaaaaaccctagaagaaaacctaggcagtaccattcagcacataggcatgggcaaggacttcatgtctaaaacaccaaaagcaatggcaacaraagccaaaattgacaaatgggatctaattaaactcaagagcttctgcacagcaaaagaaactaccatcagagtgaacaggcaacctacagaatgggagaa

SEQ ID NO: 33887 - DNA, 201 bp, Homo sapiens
atagcaaagacttggaaccaacccaaagtccatcaatgatagactggattaagaaaatgtggcagatatacaccatggaatactatgctgccataaaaaakgatgagttcatgtcctttgtagggacatggatgaagctggaaaccatcattctcagcaaactatcgcagggacaaaaaaccaaacaccgcatgttctcac

SEQ ID NO: 33888 - DNA, 201 bp, Homo sapiens
tttgtaatgcaagtgatgctagctcagaaactccatgcctggccctctctagacacccaagggaagggctgcagaacgtgggcaactcccagggcttttgaggccctggagcttcccacccggaacacaaaatacactgtcatgtgtcatcttgctttgtgacttctcatcttaaggtcttgtcaaagctggccacgtagg

SEQ ID NO: 33889 - DNA, 201 bp, Homo sapiens
ttcagcactgccacttactgccttgacccaggatgagttaatagctcacagcctcagtttactcatctgtccaattaggatagtagtactatctcataggrtttttgtaaagactgaagttaataagtgcataatcacatagagttgctcttggaaaatagtaagtgcctgtgaatattaaaaatttcctggccaggtgcc

SEQ ID NO: 33890 - DNA, 201 bp, Homo sapiens
tttgtcacacattaattgttttctttctcttttctctttccttcccccatcttttcctccctctctttcttcttctccttcctcttcttttttcttccttytccttccccttctcttcttcttcttcttcctcttcttttttttttttttttttttttttaaagaaacaaccctttacaagtgtaaaaccactcttagctc

SEQ ID NO: 33891 - DNA, 201 bp, Homo sapiens
taacgtagtcacacactgccatgtctctggtttctcacttgcctcctttgctgtggatctttgtttttatatcttgtgtggcaaaatgctgttggctctakccggttgctagtgtagccaaaagtggaccttacttagtctgtccgatctagggtgatgctttttgctgccttacataagcttccagattacagtattgtg

SEQ ID NO: 33892 - DNA, 201 bp, Homo sapiens
taggaggaacagtggcttcaatctgaaggactgtgccagcttagggtgagtatgactcagtctggaagcagaagcagaagggaatatggttttgtggatgracgtgggagacagcatggcatgaggttagtgctctgaggtctggtgcatctggcttcctgtctaggctctgctgctgactggctggatgacctttagcgt

SEQ ID NO: 33893 - DNA, 201 bp, Homo sapiens
ggcttcttgaggactcattttcatatagatgttgtcattcagtaaacattgataaagcatctactatgtgcctggcgctgtgctgggcattggaaacacastgatgtgcaagacagacactcttcctactctcatggagtttagagtccaaaggaagagagaggcagacaggacacatgtaaagtatgactggtatgtgct

SEQ ID NO: 33894 - DNA, 201 bp, Homo sapiens
agctgcaggaccttggttgcatttcctaactacatctggaaaagaaagatgatcataactagaacttaacctttgaaggttttatgagcatgaaaagatgwctggaaagaacttagcccaccaggacagggctccgtgaatgtcatctgtgactgtgggtacccttccttcaaatgagtgaacaataccctcctcattgac

SEQ ID NO: 33895 - DNA, 201 bp, Homo sapiens
tagcaaaagcaatatgccagtggtgctcaaacttcacagtgcatccagttcacctgaagggcttgtttaaaaaaaaaaaagcaagcagatttctaggccaycttagaatcagagattctcatttaggaggtctgaggtgaggccaagaatttttatttctaatgctgctggtcctgggaccagacacggagaaccactgta

SEQ ID NO: 33896 - DNA, 201 bp, Homo sapiens
gtgcagtggtgcaatcttggctcactgcaacctcctccgcctccctgtttcaagcaatcttcccacctcaacctccagagtagctaggactacaggcacgyaccaccatgcccagctaatttttgtatttttagtagagatgggatttcaccatgttggccaggctggtctcaaactcctgacttcaagtgatccgtccac

SEQ ID NO: 33897 - DNA, 201 bp, Homo sapiens
actgatgtgtgcaggatgctgtaggaagatatgaatggatgttattagcacacctaagctgcttagatgggcttgaagggttgagagaacagagaagtagyggaatgaaagcagctttgaatggcaggagcttgtctagggagcagaggcctaggtctagctgagctgctcacctggtccccatcgcccacaaagctttaa

SEQ ID NO: 33898 - DNA, 201 bp, Homo sapiens
gaaaaataacttatccaaaagatggaccttcctgtttctcaatgagctctcctaagagagagcagaagagggagagggaattgccctctatttggaggccrcagggcctggtcctcatagctatcctaaggaagagaaagctcaggaccaaggaagagccaccacctggagtggggagggtgggacggggttgcatcctgc

SEQ ID NO: 33899 - DNA, 201 bp, Homo sapiens
ggaggctgaggcaggagaatcacttgaatcaaggaggcagaggttgcagtgagccaagatcacgccattgcactccagcctgggtgacagagcaagactcygtctcaaaaaaacaaaacaaaacaaaaacaaaaacaaaaaactagatattttgcacgttacctttttaaaagcctgacatatctgtatgatatccctgca

SEQ ID NO: 33900 - DNA, 201 bp, Homo sapiens
tacataagaacatatgggccaggtgtggtagttcacgcctgtaatcccagcactttgggaggctgaagcaggtggaccacttgaatccaggagttcaagaycagcctggcgaacgtggtgagaccccatctctactaaaaatacaaaatttaactgggcgtggtggcatgtacttatagtcccagctacccaggaggctga

SEQ ID NO: 33901 - DNA, 201 bp, Homo sapiens
gctacatttctgaaaaataatgatggtcatggaatggaagacagatctgagctgaggaccttggaggcctgaactggtgcacttgccatgaggatggagargaaggatgaggcaggaaagatactgcaggtcccagcttctccatgaatccaagggctttgctctccactctgccttcagcctagtgacacaatttataca

SEQ ID NO: 33902 - DNA, 201 bp, Homo sapiens
gattctcttcaggttgattctcaaagtgtatctctagagtaaaggcagccgatggcaggtttttctgggggcaaaatgaacactaccaatccaccttgctrgagttctctctctactcactgaggtcttagggaggcaaccgtacataagattttctgaaatttgggatctggtctacagccgtaccaccctgaatatgcc

SEQ ID NO: 33903 - DNA, 201 bp, Homo sapiens
caggagaggcctcatgtagtaagaaaagggagaggaaggagcagtgctagaaatcagattatccagacagaaaaccacctcccagactgcctgatggcagsgggtgggtctttccatcttaatctttccagcccaagcaccatgcctgcaacacaacagaaatgcaaggaatgcagttgaggtggtgcattagtctatcct

SEQ ID NO: 33904 - DNA, 201 bp, Homo sapiens
tctttttctcccctcacatctctcttcatctctccctgtctctcaccctcttcctcctctccctcaagtctaggcagctcagcctctctcttttttctccyttctttttcctcctgcctctccagcttatctcttcctacttattttcccaattcagtattataaatacctagctactgggctggcaaatactgaactctc

SEQ ID NO: 33905 - DNA, 201 bp, Homo sapiens
gaattttggcatctttgattaaaaaaatgtctagttttttccacagcgcccctgcaattaattaaagtgtttccctgtgtactgcaaatgtaccttatctrctctttattccaagagcccaaaggttcaaaaattgtttccgaactctcagaatttccatttggctcttggttggcattcaaagtccaatagtataataat

SEQ ID NO: 33906 - DNA, 201 bp, Homo sapiens
tgtgccatcctgttgtcttgcccaacaatgaatggcaaggcaagcagctgggactatctactcgtagcttgtcacaaatgtgctccaactccagaggatgrtgcagtaatttcctccctttttctttcgggttgtgctttctgctactcaaaagttctgctctcctgtgatcaagatggtaagtcctgtttcatgctgttg

SEQ ID NO: 33907 - DNA, 201 bp, Homo sapiens
atatagtttattaaactttcccatgtattacctcatttggttctcacaataacttgtggataagaaatggttaaaattatctcaattttatagctgatgcrtagctagacccagatgaaaatctactttgaaaacatcaactcagaaagagcaccagactttgctgacatagacagggttttgttaattcaagtagttcat

SEQ ID NO: 33908 - DNA, 201 bp, Homo sapiens
ggacaccccatttaacaaactgccaaatgcccctctcccaagggcccctcccttcccacctttatctgaacatcgaagtgtgccatcctgttgtcttgccyaacaatgaatggcaaggcaagcagctgggactatctactcgtagcttgtcacaaatgtgctccaactccagaggatggtgcagtaatttcctcccttttt

SEQ ID NO: 33909 - DNA, 201 bp, Homo sapiens
attggtcttggaatccaattagagccagactccaggccagttctatgatacaccccaagctcaggaatttcttcctcctctttttaatttctatgagacastttcaataataactttgaggtctctagttctgagtggccatgattttgtaatgcaagtgatgctagctcagaaactccatgcctggccctctctagacac

SEQ ID NO: 33910 - DNA, 201 bp, Homo sapiens
tactcgaggaaagccattggaaacctgtcaagctgttccctagtactgaaagacagtttgtgacaaaacaggcttttctgcgcccttgggctttctgtgastttctcaagatgtttgcagttgatgatctgcatgcaagcaagccacgttgacagtttctgacctgtttccagcacctttgcaagtgtgtgtggaagaact

SEQ ID NO: 33911 - DNA, 201 bp, Homo sapiens
aatagcataaaaataaggggtatgggtggtggtagttgctgaggggaatgacaatggatttggtaacacagcatgctaatatcatgcaaataatgagatgrtataggaatctctgctctagtggtgggtctgaggtttgctctagtggtgggtctgaggttttctctactgagggcaaaattggagctttttttaaaaaaa

SEQ ID NO: 33912 - DNA, 201 bp, Homo sapiens
tgactttctcaagatgtttgcagttgatgatctgcatgcaagcaagccacgttgacagtttctgacctgtttccagcacctttgcaagtgtgtgtggaagmactgttcagattcattttggatgcttttccatatatcatggggaatttgatctatatatctcagagtcacttaaagttaactcatcgaggcagttagaga

SEQ ID NO: 33913 - DNA, 201 bp, Homo sapiens
ccagcagatttcacttggctgattttgtttttctgttctttttctgttttcctgatgaggcttctgtacttctccctttaaggaggcaactgaatagcatraaaataaggggtatgggtggtggtagttgctgaggggaatgacaatggatttggtaacacagcatgctaatatcatgcaaataatgagatgatataggaa

SEQ ID NO: 33914 - DNA, 201 bp, Homo sapiens
ctgcatgcaagcaagccacgttgacagtttctgacctgtttccagcacctttgcaagtgtgtgtggaagaactgttcagattcattttggatgcttttccrtatatcatggggaatttgatctatatatctcagagtcacttaaagttaactcatcgaggcagttagagattgtgcctatcgtttactaaattataaaaag

SEQ ID NO: 33915 - DNA, 201 bp, Homo sapiens
agtaggtaaggtagttgtgctgccttaaaatttatttttatatttgtcattaaaaacaaacatgaaacttggaggttaattttgtctgtttaaattttgaygctttcattttgacaaaatcttttaagaataatgacgaggctgcagtgattgaaatacaatttgtgtggcttttaggcaagtgagcatttagcaagtaag

SEQ ID NO: 33916 - DNA, 201 bp, Homo sapiens
acagaaaaagtaccctctaaggtatccaaggtagcttggactcttatttgtaaaatcaagaccagttaagctacttctctaagatcacattagttaggaamtgagcaggactacaaagtagaacttatattaagtccattgttttggttactgtgaatcctataacagaatccaaaagctgagaactagaagtaattttag

SEQ ID NO: 33917 - DNA, 201 bp, Homo sapiens
tgcctgttatgcctttcctattttacctccttttcagattatgatagttttagcaaagaagtattcagttctagagactcattatcaaggaaagagagagytcttcatttggttttatcagataatagataataataaatatggcctggctttctttgcactgggaagatagagaatgaggaaggagaatgactattagtc

SEQ ID NO: 33918 - DNA, 201 bp, Homo sapiens
ttggttactgtgaatcctataacagaatccaaaagctgagaactagaagtaattttagaaattatcaaattcaacttcttcattctctcttttttgtcttrttatggtaagaacacttaatgggagatctgccctcttcacagattaagcgtagtatacagtgttgttaattatagtcacagtgttctatggcagatctct

SEQ ID NO: 33919 - DNA, 201 bp, Homo sapiens
cggaccaaagtgaaacacccaggggtggagggggtaaggagcttttctagaacaccttgcaaatcttgttgatggcttagatgtttacaaaactctagaaraatcttatctccttgatatgagatcctggaagcaaggagttaaaagcctggctgcctacctaaggaggaggaggaaggagtggaagtaaacgaagacatt

SEQ ID NO: 33920 - DNA, 201 bp, Homo sapiens
ggccaattttatcagtttgttcttttaggatatgtcctgttccttttacacccaaaagtcacttttcaccctgaaattaggtgtttactttttatgcttarctctctaatccatgtggagtttatctgagtgccagttgtgggatatggattcaaactgtagttaatttctccccagaagttaaccagatactctatgcac

SEQ ID NO: 33921 - DNA, 201 bp, Homo sapiens
gaacataacgtgttctatctatctgtatgtttgcgcctattcgccaaccactctttatccccacctaccctcatacacacccttcccagcttctagtaacyatcattctaatctctacctccatgagattaacttttttagctcccacgtatgagtgagaaaatgcaagatatgcctttctgtgcctggataattttactt

SEQ ID NO: 33922 - DNA, 201 bp, Homo sapiens
agcctggaatccctataggctagtggttagagacagtctcttaatcattcctgtttttactatgctgccttcttagtgcttaatacaaactaagcttgttstctccttttactatggttgggggtataaatctcagtccataaacaaaggcttacaaaaaaatagcattaaaaaaattttattttaagttccaggatacat

SEQ ID NO: 33923 - DNA, 201 bp, Homo sapiens
ccaacatgccagacaaatattattataattttttgttacagatgaagaaacagacacaagggtttagggcaagggtacacagctagtggcaaagccaagcytggaatccctataggctagtggttagagacagtctcttaatcattcctgtttttactatgctgccttcttagtgcttaatacaaactaagcttgttctct

SEQ ID NO: 33924 - DNA, 201 bp, Homo sapiens
ctcagatatttatatttctttttgtattctttcaataagtcgcatttttcaggaaatttttggtaatatcatctactttttaaaatttattgacataaagttttcataatgtcctcttaatctttttaatgtgcataggaatctatactgatgccccctttcattcctgatatttgttttgtttcttttctattaatttta

SEQ ID NO: 33925 - DNA, 201 bp, Homo sapiens
ttttactgagagtttttaacgtggatcaatgttgaattttatcaaaagcctttctgtatctattgagataataatgcggtttttgtctttaattctgtttstgtgatgaatcacatttattaatttgcatatgttgaaccaaccttgcatcctagggataaatcctacttgattatgatggataagctttttgatgtgctg

SEQ ID NO: 33926 - DNA, 201 bp, Homo sapiens
tgtcccttgtaaattggattcctaagcattttattctcttcgaagcaattgtgaataggagttcactcatgatttggctctctgtttgtctgttattggtrtataagaatgcttgtgaattttgcacattgattttgtatcctgagactttgctgaaattgcttatcagcttaaggagattttgggctgagatgatggggt

SEQ ID NO: 33927 - DNA, 201 bp, Homo sapiens
ctgagtcatctgtaagtctgtttcagtttactatttttttctttgtggctacaggtcacattttccttctttatatgtttagtgatttttaattatatgcygtacattaaaaataatatattgaggagacctgggatttatcttcctctgaagactgttgaactttcaggcagttaagttactggtggcctcccttaactt

SEQ ID NO: 33928 - DNA, 201 bp, Homo sapiens
cccagaagccgagcagatgccactatgctttctgtacagcctgcagaatggtgagccaattaaacctcttttctttataaattacccaatttcaggtattyctgtataacatagcaagaatggattaatacagatcttgagatgagatcattcttgatttaatccaatgtcagatatccttataagagaagtgcagaggga

SEQ ID NO: 33929 - DNA, 201 bp, Homo sapiens
tgtaaggattacaggcgtgagccaccacacttagccaccacacttggccaccacgtctttaagattatgaataaaaaggtgtcactttcgaagattctcaragggagtaactcctccccctaatactgagctgcagtccatcttaagccttgctggtatacatctcaaagaagaagatattgaggatagcttgtgcaacgt

SEQ ID NO: 33930 - DNA, 201 bp, Homo sapiens
tgatttggctctctgtttgtctgttattggtatataagaatgcttgtgaattttgcacattgattttgtatcctgagactttgctgaaattgcttatcagsttaaggagattttgggctgagatgatggggttttctagatatacaatcatgtcatctgcaaacagggacaatttgacttcctcttttcctaattgaatac

SEQ ID NO: 33931 - DNA, 201 bp, Homo sapiens
tcttctgcctcaagcccctaacttcagcctgaaatcatcaacatccatcacagtagcggaacaacctagaaggaattgtttcattctgaaaagactttgaratgattaaaatatgcaatacaaatgggtgaaaagaaataggtgataaaatcaagacaaatgggaaattaagtttgggaatattaattaaagctgggcaaa

SEQ ID NO: 33932 - DNA, 201 bp, Homo sapiens
ttttgtaggagcctctgagaagaccattatgaattttgatgttttcagattaagtttaatcagcacccctctccccatccctaatgtaagtgttgctcaargcattcaggtgactgggtttctcacaagaacagaagcatttaaatgccttctgttaccaacccaataatgctaacctgaagccctgctttgctgttggat

SEQ ID NO: 33933 - DNA, 201 bp, Homo sapiens
gatttggctctctgtttgtctgttattggtatataagaatgcttgtgaattttgcacattgattttgtatcctgagactttgctgaaattgcttatcagcttaaggagattttgggctgagatgatggggttttctagatatacaatcatgtcatctgcaaacagggacaatttgacttcctcttttcctaattgaatacc

SEQ ID NO: 33934 - DNA, 201 bp, Homo sapiens
tgtgtggtaagccagggcaggcattgcactaagcacaatgtcacagtggggttgtagagatgaaaaggattcctgcctgcagataacatacaatccagtarggtggaaagacatggatatgcctaattatgagacaaggtaaacaagggcaggctgggggatcagcatgacaaaagacactagggcaggatggagttttca

SEQ ID NO: 33935 - DNA, 201 bp, Homo sapiens
attacaaacatgagccactgcacccggcctttgagttttcttttattccggctgcatacctcccagttaatctgacatctttctcacctcattaaactggmtccaactgctaatacgtcatcaaattcaaaagaaatgcgacccgctaccaaaatccagatctgaaaacatttaaccttaggctgtggttcaaggtgcaaa

SEQ ID NO: 33936 - DNA, 201 bp, Homo sapiens
cctcccggattcattgattttttgaagggttttttgtgtctctatatccttcagttctgctctgatcttagttatttcttgccttcggctagcttttgaaygtgtttgctcttacttctctagttcttttaattgtgatgttagggtgtcaattttagatctttcctgctttctcttgtgggcatttagtgctataaattt

SEQ ID NO: 33937 - DNA, 201 bp, Homo sapiens
tttataaattacccaatttcaggtatttctgtataacatagcaagaatggattaatacagatcttgagatgagatcattcttgatttaatccaatgtcagrtatccttataagagaagtgcagagggagatttgagacacatgagagaaggtcatgtggaaatggaggcagagattggagttctcctgctacaagccaagg

SEQ ID NO: 33938 - DNA, 201 bp, Homo sapiens
ttctcttgatttagggtggagagttctgtagatgtctattaggtccacttggtgcagagctgagttcaattcctggatatccttgttaactttctgtctcrttgatctgtctaatgttgacagtggggtgttaaatctcccattattattgtgtgggagtctaagtctctttataggtctctaaggacttgctttatgaat

SEQ ID NO: 33939 - DNA, 201 bp, Homo sapiens
gaactaagcgagttcagtggttgactctgggtcttttaataacttctgatcttcaattttttcatctgtaaaatggaacaataccttcttttttcttttctttttttttttttttttagatggagtctggctctgtcacccaggctggagtgcaatggtgccatctcagctcactgcaacctccgcctgctgggttcaagc

SEQ ID NO: 33940 - DNA, 201 bp, Homo sapiens
catgttggccaggctggtcttgaactcctgccctcaaatgatccccccaccttggcctcccaaagtgctgggattacaaacatgagccactgcacccggcytttgagttttcttttattccggctgcatacctcccagttaatctgacatctttctcacctcattaaactggctccaactgctaatacgtcatcaaattca

SEQ ID NO: 33941 - DNA, 201 bp, Homo sapiens
tgggtcttgactctttgtctaatttgccagtctgtgtcttttaattggagcatttagcccatttacatttaaggttaatattgttatgtatgaatttgatyctgtcattatgatgttagctggtgattttgcccgttagttgatgcaatttctttctagcatcgatggtctttacaatttgacatgttttcgcagtggctg

SEQ ID NO: 33942 - DNA, 201 bp, Homo sapiens
tttatggaggaggttttctgagtgtgtcatgtgctgtggagtcctttcttgctggagagtaggcagccgagctcagactggtgtcttgcttctctctctcttttttttttttttgcaaatcttgtaaaactctcagcttttgtgctaagaggcaaagaggacgctcagtcctgcacatatagtgcaaagctatatgagtcg

SEQ ID NO: 33943 - DNA, 201 bp, Homo sapiens
gcaagtagaggaggagtgttctaccctggaataacacaaattagaggtgcctgtatgtatgtgtatggtgtgtgtgtgtgtgtgtgtgtgtgtgtgtgtgtatatgtattaaacttcatgctttttaaagcctccttctaaaatgccatctttcagatgtgcctatctgtgtcttattttggtagtttttcttttctttcc

SEQ ID NO: 33944 - DNA, 201 bp, Homo sapiens
acgacattggagggtggttagtgagtctgagttgaaggattatgagggccccaaggctggtcctgagtgtgctggttaaaggggtgcacaggcacctgacrtaacagagctgggagtccagcaactaacaggagagagaaaaggtggcatccttctccctgtgaaagtcgccttaagaaagcttaggctccacttatggca

SEQ ID NO: 33945 - DNA, 201 bp, Homo sapiens
tgcaccaccatgcccggctaatttttgtattgttagtgaagatggggtttcaccatgttggccaggctggtcttgaactcctgccctcaaatgatcccccmaccttggcctcccaaagtgctgggattacaaacatgagccactgcacccggcctttgagttttcttttattccggctgcatacctcccagttaatctgac

SEQ ID NO: 33946 - DNA, 201 bp, Homo sapiens
tcttagccatctagcatttgttcaagagactcagtcttgtggtctacagctagccttctgtttccatgctgtggaactcaccacattcacagggtggcctgggggaatatggttttggggggaatgtgtggtgcttgtctcttggaggtcccatgggtatggaaggagaccctcgccagctttgttcataggcacagaatc

SEQ ID NO: 33947 - DNA, 201 bp, Homo sapiens
tccctccagggaaatccttcggggtactctgaacacatttctgttggattaacagggcccttagtgagatggtgttaggctgtccagcgactgggatcttccatttctttcagagcaggagacagcaaaatcatggcttttgttatctatctatatatacttattaatgaagacattccaaatgaatgatgacttcctgag

SEQ ID NO: 33948 - DNA, 201 bp, Homo sapiens
gaaagaataatattagcccaagcagtggttctactcacttaaggagaatggagtatgtttatttaattttaactgaaaagtcctggccaatatttctaagsctggcttgggataacagaatgaatggccttgggggagagggaggagaaagaagatgactgattttagtgtctgctttatggtgtgtgctgtttaatcctc

SEQ ID NO: 33949 - DNA, 201 bp, Homo sapiens
atctctaaataatgaatatattcctgaagatttctttgtatttgtaattattgcagatcaaatattttatttccatagaaaactgaccttctaaagatgayacaaggtgtctctctttagtattaaagaatttatgctttaaaactttagatactgggtatggtggctcttgcctataatcccagtattgtgtgaagctga

SEQ ID NO: 33950 - DNA, 201 bp, Homo sapiens
attaacttttttagctcccacgtatgagtgagaaaatgcaagatatgcctttctgtgcctggataattttacttaacataataacctccagttccatcacrttgcttcaagagaacatttagtggcaaagaatactttgtaagaatcccatactgtatctccttctttcataccaatgcgtggtttaatatataataacct

SEQ ID NO: 33951 - DNA, 201 bp, Homo sapiens
cgctttcactcaccattgtaaacccagaaactagcactgtgttagcccactgtataagaggtgttcattaaatattgttaaatgaactcacgaaacaagtrtctgtccttcagatccttagagtacaaatgcactcaattttcctccccaagagctccctgggagtttttttcaactgttgcattttttttctcatttttt

SEQ ID NO: 33952 - DNA, 201 bp, Homo sapiens
tattaatctagatgtgtagggcagtatagatattcacctttaaattaattgatcgattatcctcactgaattgccaccccagacccacagaagggattatyggagctggcaatgtcttgaaatggcaatgtccacatggaagtggcattaatacagcagcctttgtgctttgtcattgcaacccaggccaatgtaagtcac

SEQ ID NO: 33953 - DNA, 201 bp, Homo sapiens
gataaggaaacagtggtgtaaagtttcaagtgagatcttcaacccactttctcacagttgcccccagagcctgccgctgagaacttacaatttggagaaasgacagctgccaccaggggcttactgattggtgtgctctttttgaagaatgaacagaagtaaaagtcatacagttaggaaaagagaataaaactgtcttta

SEQ ID NO: 33954 - DNA, 201 bp, Homo sapiens
ttttcagtgagtttaaccttccataagcacagatactctgttataaaagtgagtttaagctgcttcttgataatgaatgttgactgaaagtcaggccctayttccagtgtcatatgtggattgtcatatttaacccccgtaacaacctttgatagagataccattattttatatatatatataaaatatatatatttattt

SEQ ID NO: 33955 - DNA, 201 bp, Homo sapiens
ttctgggagtgggaagtctgaaatcaaggtgtcagcagggttggttccttctggaggctctaaggaagaatctgtccttgcttctctcctagcttctggcmgctgctggaatttcagagatgcataggccctcaatgtggggtgggagggaagtaggtggaggtccttggctcatggacacattgctccaatctctgcctc

SEQ ID NO: 33956 - DNA, 201 bp, Homo sapiens
aggtataaagaccctgcagtgggcatggggtgggtatgtgtgacaaattccccagggagatcaagggatcaggagtagaatgaggcatgcatggtaagaartgagttctgagaggtagacaggacccagataatattgagaggctcaagttaggggttcagattatattctataggggctgggaagccattgaaatgattt

SEQ ID NO: 33957 - DNA, 201 bp, Homo sapiens
attgggtttaggtcccaccttaaattcaggatgatttatctcaatatccttaactaaattacttctgcaaagactctaagtgaagtcacattcacaagtasaaggggtaggacttggacagatcttttggacagccactattcacccaggtacagtcatcatagttattactttcaattcaggctcctattgtctcttgac

SEQ ID NO: 33958 - DNA, 201 bp, Homo sapiens
tcttcccaggagtgggaagcctgtgtttttccaccttaccatctgatctgctccagagggctctgcattagaaaaatagggagctatggggaatgactagsgggtggagatcatgagagcagtgtctatggaggattatcagttatgctcagaaagggaagatttggcacctggtcatcgatttttagtacagtaattgtc

SEQ ID NO: 33959 - DNA, 201 bp, Homo sapiens
ccatcttgtacatccttctccaaaacagggtgtctcccagaactctaaacacactgcgctcttttacacctcctggcctttgcacagcttgttctctctgmctatatactacctcccccctagcccccattgagagcctatgcatccttgaaattcagttcttatttcatctcctctgagatgccttcctggacccttctc

SEQ ID NO: 33960 - DNA, 201 bp, Homo sapiens
tcagttgtgccacctggaggctgggggaggaacgcaaataatgaataattggtaaagggaaccaaagcgctgtttctaccatcttttcctccctgcctgcrtggatccacacctcactgtttcttactcaactccttcaatgccacgacactgtagccacttccactggtggacacatatcctctctccctccttccttcc

SEQ ID NO: 33961 - DNA, 201 bp, Homo sapiens
ctcccagaactctaaacacactgcgctcttttacacctcctggcctttgcacagcttgttctctctgcctatatactacctcccccctagcccccattgasagcctatgcatccttgaaattcagttcttatttcatctcctctgagatgccttcctggacccttctctggcagttcccctagatcccaagaactgcctcc

SEQ ID NO: 33962 - DNA, 201 bp, Homo sapiens
gtttctaagcatgtactgagtacccaccattgagggtgctacaaggcaacattccctcccattcccaatcctgcctggcaacagtgccttctgtttcttcrttttattcctaagacttgccctggcctttgtcctacctttccgttctcaagcaggatatgctgggtcagttgtgccacctggaggctgggggaggaacgc

SEQ ID NO: 33963 - DNA, 201 bp, Homo sapiens
actgcgctcttttacacctcctggcctttgcacagcttgttctctctgcctatatactacctcccccctagcccccattgagagcctatgcatccttgaarttcagttcttatttcatctcctctgagatgccttcctggacccttctctggcagttcccctagatcccaagaactgcctccttatccttactgattcttg

SEQ ID NO: 33964 - DNA, 201 bp, Homo sapiens
taacacacaggacacccccttccaccaacaaagaattatcctgcacaaaatatcaatggtgccaatgttgaaaaaccctggtctaattgtctagatgtagmattcacatcctgtagatatgtttcgtagcctcagatgtatgcaaatctctaggaagtagatcttaaaggagttgatacaaattgcagtgtgctatgcaaa

SEQ ID NO: 33965 - DNA, 201 bp, Homo sapiens
cactttttggtaaataaaggcgactttagttgcagcctggctaccaggttatgttaaacacaggtctctgggaccaaattctggcactcatacagacttgwgttgaataaacatttataaaaaatgctatgaggaaatctcagctccctaaatttctagatgctccaaccccaccttgcctgaagacagatgtggcaactt

SEQ ID NO: 33966 - DNA, 201 bp, Homo sapiens
tgtttgttatctgaggccttattccttaggatgacagtccaagtacttaaaaaaaaagtatcccttttgcctctttcaaatgcatattttttattcttaawttttttattgatacataatgtttgtacatatgtatgggatttatgtgatattttgttacatgcataaaatatgtaatgattaagttagggtatgtgaggt

SEQ ID NO: 33967 - DNA, 201 bp, Homo sapiens
gacagtttcagagtgccccgcataggccgtgcaactggagaaggtgccctgtggaggcagaatgctgctgctggggtccttaaccaggcagaggttggatrtgaagatgagatgatgtagcttcttttgagtaggtttgaggggttgggttttttgtttgttttttcttctaagccttggaaggatgcatgaactcgttga

SEQ ID NO: 33968 - DNA, 201 bp, Homo sapiens
ctccagtaatctgcctgcctcggcctcccaaagtgctgggattataggcataagccaacatgccagacaaatattattataattttttgttacagatgaakaaacagacacaagggtttagggcaagggtacacagctagtggcaaagccaagcctggaatccctataggctagtggttagagacagtctcttaatcattc

SEQ ID NO: 33969 - DNA, 201 bp, Homo sapiens
catctgtaaaattcagataataatagtgctactctcataggctgatatgaggtttacattagttaatatatgtaaagcactttgaatgaattcagtaatayagtcagcaccatgtaagtgtgtattaaatttaaaaatagaccaggcaaggtggctcatgcctataatcctagcacttcaggaggccaaggtgggaggatt

SEQ ID NO: 33970 - DNA, 201 bp, Homo sapiens
tgcataagttgagcacggtggtatgtgcctgtaaatcccagctactcaggaggctgaggcaggaggattgcttgagcacaggaatttaagtctagtctgcrcaacatagcaggaccctatttctttaaaaagaaaaaaaagatgtaatgctatcttttggctcccaagagtcagtaggaaggatgggagaggaggggacag

SEQ ID NO: 33971 - DNA, 201 bp, Homo sapiens
catattagcatagatgtgagttgtaattttataggattatggaactgtaattgtggaactcctgcagggcagactctggaggctagctttttagaaaactraaacctccagtataaacttaatttctgtcatttgccccattttcttgaaagttaagtgccagaaaagaaaaggatcgagtctctcttttctttctacaat

SEQ ID NO: 33972 - DNA, 201 bp, Homo sapiens
ctgttcacaatttggacattttcctttcaaacacatttttcatgaatatattataggaaagttaaaaccatctctattctaaaaggaaaatctaccatttkgctcagagagaaagttactgagtttgtctatgtgattttaagtagtatttgattagagtattaaagaaatggggtacttcaagtaacataacacctgata

SEQ ID NO: 33973 - DNA, 201 bp, Homo sapiens
taattattgtctagataattacaataatccaaacaataaccattacggatttggtgagctcttaaaatacccatgtcccagatttctgtcacggttattascagtctctgcttattaaggtaatgagaaatgtttcaaatgaagatgaaattgaatttggatggaggttgtgttgagggattttaacagttgaaacaggag

SEQ ID NO: 33974 - DNA, 201 bp, Homo sapiens
aatgagcgaggctctgtgggtgtgggaccctctgagccaggcgtgggatacaatctcctggtgtgccgtttgctaagaccattggaaaagtgcagtattarggtgggagtgacccgattttccaggtaccgtctgtcacccctttccttggctaggaaagggaattccctgaccccttgcacttcccaggtgaggcaatgc

SEQ ID NO: 33975 - DNA, 201 bp, Homo sapiens
tggacacagttactggccttttggtctgatcagaggccaattttgagctaggagtttcccatgcatatgcatgatgtcctactatctgtgatacatgctgsgcatctgagcctgcctggtatgctaatgatcagaccagggaaatgcacatcactgtgagtcacaagggtagcacgtctaatctaaaaaattcaaacccct

SEQ ID NO: 33976 - DNA, 201 bp, Homo sapiens
ctgcgtcactcatgctgggagctatagactggagctgttcctattcggccatcttggctccacctcttttctttttttttctttcattctttctctctatrtctcttctctttcctctttctctcttttcctctcgcctgcctgccttccttccttccattttctctctctctcttcctttctttctttcctttccctccc

SEQ ID NO: 33977 - DNA, 201 bp, Homo sapiens
atgcaacggacaactaccagtttgtctggaggcggtacaaatactcttctaatatttttttaaaaactataggatgtagtctattttcaactttattcaascagatttatttacccctaccgagttttctaaatcagtgaatcagtattttaaggaataaatcttaggcacataaaatgataggaataaaatatgtattat

SEQ ID NO: 33978 - DNA, 201 bp, Homo sapiens
cttccattttctctctctctcttcctttctttctttcctttccctccctttccttccttcctttctttctttctttctttctttctttctttctttctttctttctttctttcttctctctttctttacaagatcttactctgtcatgcagtgttgcaaacacagctcactgcagcttctacctcctgggctcaagtgatg

SEQ ID NO: 33979 - DNA, 201 bp, Homo sapiens
gccgggatttaagaaaggtgcctcttggctgggtggcatgaactcagtcagctggctttccccaggcacctgattggccttaaacactgagtttttgtggygtgacttgacatacatcttgggctgatatcacgtgctgtttctactggggtgggaagtgctttgaaaatgtccttgctccagtggaactgtgagacatat

SEQ ID NO: 33980 - DNA, 201 bp, Homo sapiens
gtcatcacagaggaggtgactttaagcagggtgttgaagggtgagtagaagattgctaggcagaaataataaatctaggttgctgtagtgtttcagaagasaaaatatatctggagaggttttctctggcttccctaggcccatgtgttgccctaaaatcagaacagcagcaaaataatacaaataaccaacatttattga

SEQ ID NO: 33981 - DNA, 201 bp, Homo sapiens; identical to SEQ ID NO: 4383

SEQ ID NO: 33982 - DNA, 201 bp, Homo sapiens
gatctactatctacaagctggaggcccaggaaagccaatgatgtaattccagtccaacccagaaggccagaaaccaggggagtcagtggcacaagtcccartccaggtccaatggtccaagaaccaggggcaccagaagacggacatcccaggttaagcggagagagaaagttcacccttcctccacttttgtgttctatt

SEQ ID NO: 33983 - DNA, 201 bp, Homo sapiens
aggattcttaagaaaagcagaaccaataagatgtatgtagacatatggaaaaatattatgagggattggctcactcaattatggcggttgagaagccccaygatctactatctacaagctggaggcccaggaaagccaatgatgtaattccagtccaacccagaaggccagaaaccaggggagtcagtggcacaagtccca

SEQ ID NO: 33984 - DNA, 201 bp, Homo sapiens
agcctttgcaaattctggtgcagtgttacgaggagacaaagttcacaaacattaccttgcccctgggtaccacgtgacttttgtctccctatatctcctgyacaattgcaaggattaaacatgctaatatgtataacggacttagcaccctgctctccaataatggcttaataatgctctggtttctcttcagatcatata

SEQ ID NO: 33985 - DNA, 201 bp, Homo sapiens
ttgtttgcacatctgtccctttactaaggtggaactccttaaggacaagggaccatatcttcagcagctctgaatagcattggtgcttcatgcagggcctygcctataaatacaacttcaacaggtgggagttgttggtgggttcccacctgcaagcataagtcagcaggcttcacagtgagtggcctaacataggtgtgg

SEQ ID NO: 33986 - DNA, 201 bp, Homo sapiens
gtccctttactaaggtggaactccttaaggacaagggaccatatcttcagcagctctgaatagcattggtgcttcatgcagggccttgcctataaatacawcttcaacaggtgggagttgttggtgggttcccacctgcaagcataagtcagcaggcttcacagtgagtggcctaacataggtgtggatcagaaggaaatg

SEQ ID NO: 33987 - DNA, 201 bp, Homo sapiens
atgagtgagaatggtaatcccagggactaataacaacaattgccatttattgaatattgttcattcagaaaggcacggtgtgaaatactttttgtttttcrcctaacgttatttatagtctaatggaagaaatagaaaagcacataagcagttactatccaggagtactatgaaaatgagcatccaggaggaacatgtaaa

SEQ ID NO: 33988 - DNA, 201 bp, Homo sapiens
attgggtaaaataaaatataaaataacatcataaccttcccaattaccaggaggcatttgtttattcgttatttgattattatttattcaggacatttagygtgagaaagggaaaggcaaaagcatgaagaagttaagtcagtagctaaagacacaaactcagagtgaacactgaaatgcttttcagcatgtattatctca

SEQ ID NO: 33989 - DNA, 201 bp, Homo sapiens
cttggaagggtgctttgatacgggctgaaactgcaactaagatcctgctggactaaaatcttctggctgggaggagaggagtgagcttggatgtgtctctrtggaatatgcccttgttaggatttcactttcggcctctttcattcttgaaattctcaccaaggggtcagctagtgagtttatggctttcatctgattcta

SEQ ID NO: 33990 - DNA, 201 bp, Homo sapiens
tccaaggatgtcatgcaggcttccctcacttgtctttgtaccatgcattttttgagctaacccttcatttttggaaggattctgcctcaccggatctcttrtatatcttaaaacacaaagcacagaggctgcactgtacaggatgaggcctaagagaacgtggagactgtaggggatgggccacacagcatggcggagttt

SEQ ID NO: 33991 - DNA, 201 bp, Homo sapiens
ggacagcaccaacaaaattagtcctgagccagggacaacaaaagtaaggctgcctgtctcccagtctttacttaaccaactctgctggagagttcatttcrctttctttctgggatgctgagatgctaggatgagaggaatagctgggctttgagatgggacaaacattttgaaatactcattatctcatagttctggcat

SEQ ID NO: 33992 - DNA, 201 bp, Homo sapiens
cagtctgggtttgaatggatctgaattttaatagctttttcctccaaaatattatttctatggcaaataagcagcccttccttataatgctgaaatcatakaagttagttgttttcccctcattttttgacaatcattctttttgcggtagtaacgaaatcaagcagttttcatttggctttttggtagttgaagttaatt

SEQ ID NO: 33993 - DNA, 201 bp, Homo sapiens
aaaaacctgtgctccatttactaccatctcatttggcactggaaacacaaatgtacaactagttataaaagtaggatcaagtccaaaacctgtggctatcwgtttcggggaggcagctgtcaatgcaagataaggaaaaaattcctcaatatttagagctgccccagtttggaattaactacttcatgggatggtgagcaa

SEQ ID NO: 33994 - DNA, 201 bp, Homo sapiens
agcatcacacttttctttctggaaatgttcttaatttaaatttaactaagcttccctttcttccagtctggcagcttccccaacattcatgaatacaattycataataatatgtctagaaatgaggagtatccagcaaggagttttactctgtttctttaaacataaagacttggcctaaagagtgttttaagcaatgctc

SEQ ID NO: 33995 - DNA, 201 bp, Homo sapiens
ttttctatgttatagatatatttgtggatgctgagaatgttcatggtaaatacaagacagtctctgccctcacggagcttgcattctggtgggagactagrgaagaataatttatgaataaactattgaatatatactatgtttgtatagtttgtagtacagagacttggttgtgctggggagggggataccttcatagaa

SEQ ID NO: 33996 - DNA, 201 bp, Homo sapiens
gcgcccccgggagcgggcgcccagaggtgggtgtccaagctggggaggggaggggctggagtgtcctcgagtgtgaggaaggggtggccgaggaaggggtkgccgaggaagggctggaaatctgggagtcctcggaagcaccgcgggcttttaaagggctttttgtggtccttgtcgagcggagcgtgtgctgggagaggg

SEQ ID NO: 33997 - DNA, 201 bp, Homo sapiens
atcagctgcctccttcccctccgctggctttgttagcacacgcgctctgacaccgggccaccggctgccactacacggagggcagcaggaaggctctggckagccagtgagctggaagcatctctgtccacacctcagcctctgaaccccatcgggggagtcctcaaacacgcggagacaccattactgccacaaagacgc

SEQ ID NO: 33998 - DNA, 201 bp, Homo sapiens
aaagtatttctagaaaggggcagtgaccatccttatgaaaagctgctgatatgccacgaaatctgaggccagaggattgtccactggatttagtagcaagraggttactggtgccctgaactggagctgtttagatggagaggtggaggtgaacactgggaggtctggatttaagtgagaatgagatgaggcagcaggagt

SEQ ID NO: 33999 - DNA, 201 bp, Homo sapiens
gaaaaagttgagtcaaggctgaagctctggcatctctaaccactggtcagtaaattctattgaaattcaatagtataagagacaaacaggcaaaaaggatsgtgaaaccatttccaaataccaagataaaggaggctattgacattcaggaaccctgagaacagctgatgtcccattgtagacttcatcctcttccttggg

SEQ ID NO: 34000 - DNA, 201 bp, Homo sapiens
ttacatctcctctcattaatagcactattgatttttatttgatttaacacattatttcattgttattacaaattatgtgttttaaatgcctattttgatgyataattctataatgtacacttagttcagtagtacatgtgtattacttgtatttatcatgtgtgaatatatatatatacacacatggtatgtgctcaaaat

SEQ ID NO: 34001 - DNA, 201 bp, Homo sapiens
aaatctatggatggatcatgcctgctacagaaaagccaatgatgcttaatccagagatgacctttttgccattaagtaagaaccagagatcagtgagaaaygtcttactttggaaatccgtaaacatacaaatcatccatatggatggtgtaaaaccactagttgagctagagtaagcaaatgatctttgtggattctagg

SEQ ID NO: 34002 - DNA, 201 bp, Homo sapiens
cagctacttgggaggctgagggaggagaattgcttgaatccaggaggtggaggttttggtgagccgagattgtgccattgcactccagcctgggcagtaartctatggatggatcatgcctgctacagaaaagccaatgatgcttaatccagagatgacctttttgccattaagtaagaaccagagatcagtgagaaacgt

SEQ ID NO: 34003 - DNA, 201 bp, Homo sapiens
agcattccaaggtaagcggctgatcccaggaacctattccattattagacatgcagatcacactccggagagctgggcagtgcctgccctgccgtgaaggygctgccgccaaccaaaccagcctttttcattcaatcaggaaaccatctcttggcttttcttgtgaatttctcaaattcagggcattattacagcattcca

SEQ ID NO: 34004 - DNA, 201 bp, Homo sapiens
cttggctcatggacacattgctccaatctctgcctctgtctccatgtggccttcccctctgggtgtgtgtgtgtgtcttaaatctctttctcttatgaagmcattggttattgggtttaggtcccaccttaaattcaggatgatttatctcaatatccttaactaaattacttctgcaaagactctaagtgaagtcacatt

SEQ ID NO: 34005 - DNA, 201 bp, Homo sapiens
ctttattttcaaggaaaaaagaaagaggcagactgaaatagaaggcaagcgacaacagcttgacgagcagatacttctgctgcagcattccaaggtaagcrgctgatcccaggaacctattccattattagacatgcagatcacactccggagagctgggcagtgcctgccctgccgtgaaggcgctgccgccaaccaaac

SEQ ID NO: 34006 - DNA, 201 bp, Homo sapiens
gtcttacaccagagctgtgtctctcatggacatgacctgtctggtgcttacaggaatgagaggttttggccctagctaaattggtttagtggtgaagaagattgaaggtttttgatcagggcagattgtgccaaatgggctactgcaggcagaggcagaggcaggaaggccagtgagggagctattgcaggagaccagctg

SEQ ID NO: 34007 - DNA, 201 bp, Homo sapiens
tatatatatacacacatggtatgtgctcaaaatattttacagattagagtatgtgaaaaaaatttgaagaccactctgcataataaatgtgcaggggctgrcccatgagacatgttcagtaaatgcttgtttccatcctctttctccctggaaataaagtcgatagtgtgtgtgtggaccttgcttattaaaggaaagtgg

SEQ ID NO: 34008 - DNA, 201 bp, Homo sapiens
gttggccaggacagcacttcgtcatttgaacaatttccattttccacaagctctctgtgattgatgacctaaccaggcacatggcattccgttccaccagsaatgtggccagtggggagatggctatgtcagtaacacctgtttgtggtagaccaacaatggcgccctaaaagatatatccgcatcaaatccctgggacct

SEQ ID NO: 34009 - DNA, 201 bp, Homo sapiens
tgaaatttagtgtagcattgagacatttaaacacatttttgaagcacaaaacttatttatcctagttcaaagccagatttggtttgacctgtcttggtggygttttctgtggttctgagatccaacccccaacttcgtcccttttgacctagtttatcacccatgtccttgggttgaaaatagtagtgtaatcctaagaga

SEQ ID NO: 34010 - DNA, 201 bp, Homo sapiens
gagatggtttagaagggtgtttttaattgtataaaacacaactataagtcaatgcaaacaagaccatagactaacatatgccagtcttggatgtgcattcygaaagttgatggttaaaatagtctatgggggccggatgcggtggctcaggcctgtaatctcagcactttgggaggccgaagcttgcagatcacctgaggt

SEQ ID NO: 34011 - DNA, 201 bp, Homo sapiens
tgatagataccaaagggaagcaaagtaccacactgaagcaaagtaccatggaaggactgctccccacttttgatgcatgataaagaccaacctgcctgcakgaagatgatggtgcacttctcctgaacttcaccatcatgatcacagtcaaagccagtgatgatggagtataatcacaccagtaaatgaagttcccctgct

SEQ ID NO: 34012 - DNA, 201 bp, Homo sapiens
ggagaggaaataaaggaaaagcaggaaccacaaactaggctaagaaccacagtaaacacagtctgagagccaagtgttctcttatgacaccatccctgttkctgtgtttggttctctgtcctttcttcaagtaagggcgactgtgtccacctccggtggttcccaaatcaggctgtcacagaatcagatggaaagcttaag

SEQ ID NO: 34013 - DNA, 201 bp, Homo sapiens
agcccacatctaatctgttacaagtcacactgattctacctccagaatgtaccaccatgccttttgattcttctgtctctcttctgtttcaagctaatatkctctgtcacttgaaccatgcaataaactcccatcacttgtactttgtaatcctgccccttgcaatgtgttcttcctattgggcttagaagacacagcaaa

SEQ ID NO: 34014 - DNA, 201 bp, Homo sapiens
atttcccaactctgtgtttctcctacatagatacccacttttcactctttccaacacaggtcttcccatgctgcttttttgttgttgaagattttagtttkgaatagtggttttttttttattagtatactggtgccatttacatgtatattacaatgggcaatttgggtggtacaatgttatgtcaatgtcgagaaggca

SEQ ID NO: 34015 - DNA, 201 bp, Homo sapiens
actacagtgttcacccttgtattctcagatcttagtacactgccaggctcaatgggttttcaaacatatttacataaagaaagaaaacaatgacaaaagtrcagatgacatgcccatggatactctggacataaatgcttgtaatatttctctctgtaagcgtttccagtgggaagttcagcttttgtctcaattactctg

SEQ ID NO: 34016 - DNA, 201 bp, Homo sapiens
agttgctaaatgagataaaagtctcagccaagaaccaaagaacttggacctcataggactttgctcctgtttattatcaaagtgatacatggctacattcwtgtcattattccacaagatttgaggcctctggaatcaaggtgccatcttgctttcttcaccaggggactctgtcctctgggctctttctcatttcccaac

SEQ ID NO: 34017 - DNA, 201 bp, Homo sapiens
atcccagctccagaactggacctgagttactggataatgctgtcattaggaaactgtgaccacctaggagttggactgctaaatgggcaatgtcagcaggytgttacagatactctatgcagaccaagcttatttggctcttctcagctcagccacctgttgtaaacagctgagaggggcttagctccacgtggaggttgt

SEQ ID NO: 34018 - DNA, 201 bp, Homo sapiens
ggaaagccatttaatatgttcagtatactagaaggaaaaagcccatttctcagtggatagttctcaatactaaaacatttgacaagcaaatcaagactacygcaaagactatctctgagagaatcagaattcttaaaacttaaaatctcaagatttggtctttttccccctaatatgactggaaaatcttatggttcttcc

SEQ ID NO: 34019 - DNA, 201 bp, Homo sapiens
ctcattcactcacttgagcctgccttgcacatttctgcatcaaagcccctttgtccatgttatcatcctagcttgaaatgctgtctgaacacctctatgcyttgatcatttttctcttcaagatcctactgacatgttccaacctcctgaaatcctgccctgcctccccacaagcagagttactcagactctcttctttgc

SEQ ID NO: 34020 - DNA, 201 bp, Homo sapiens
aaccactctatgaattgcttagcagtcagcacttggactcatcaatgcctgagccctctgtgggaatcacaaactgtttctgatacctggcagctttactmatttatgttatctgtctggcttcctaaggtatttgagtttgcaatgcttgctcctaaaattaactaggcagtggtctaacaagaaaaggaaggaagggag

SEQ ID NO: 34021 - DNA, 201 bp, Homo sapiens
agctaggatacataatttttttcaggtgggcatgttgccatccccaaccaaataaggattctgttagtttggaagagggggagaatagatattgagaagascactcagcgtccccaccacacactcccaggcagaaccaactattctacagcatgttgttctttcctctattattgctatttttggtttgtattgtaattt

SEQ ID NO: 34022 - DNA, 201 bp, Homo sapiens
agcagcacctatctgaacccacagttctcgtctaggtgctcacctatctcatctcaaccactctatgaattgcttagcagtcagcacttggactcatcaaygcctgagccctctgtgggaatcacaaactgtttctgatacctggcagctttactaatttatgttatctgtctggcttcctaaggtatttgagtttgcaat

SEQ ID NO: 34023 - DNA, 201 bp, Homo sapiens
ggggattccctactcacagggtcattgggaagtttggataaaataatccacatgaattcttagctcagttcctggcacagaataagtgctcagtaaacackggtggtaattattatcatttcactgaaagaatatggctgttgagactttccccaaatcatagctgcagctgctattctggaatatttccagagtctcctg

SEQ ID NO: 34024 - DNA, 201 bp, Homo sapiens
aggtcaggattccaatccaggtcttctggctctctgttttttactgacattttgctataccgtaaaatgagaaaaatggcttgggcaacatgtaactttcytcctagttctaactttcatgtctctaacattttgatatgccttcacccatcccaagcatgtaaagaaaattccgaagtcaaacatagtagcagcagcagc

SEQ ID NO: 34025 - DNA, 201 bp, Homo sapiens
gaaaattcatgttttgggaaggataaaattgctggaacaatgtcctagaggagataagaagggagggatggcgaggctgagcgattttcctaaggtcacayagccagtaagtgacaggtcaggattccaatccaggtcttctggctctctgttttttactgacattttgctataccgtaaaatgagaaaaatggcttgggc

SEQ ID NO: 34026 - DNA, 201 bp, Homo sapiens
agccatgatcatgctactgcactccagccatagtgacagagtgagaccctctctcaataaataaataattttaaaaagaaaattcataatatacaatctaycctcttaaagtgttcatttagtacagtattattaactgtgagcacaagaaaaattttttttgatagaagaaatcacagcatatttgataaagtgaaagaa

SEQ ID NO: 34027 - DNA, 201 bp, Homo sapiens
agcacatggggagactgatggaccaaatggctggctccactataaaacactccagcgtttagcctttgttctgcctcctgggcgttagcaagctgactccygcacagaagacttcttggttgactcttgaagagtcagggatttagtcaatgcaagctgtaaactggctcagcactagagaagcagcagacatgagtagaa

SEQ ID NO: 34028 - DNA, 201 bp, Homo sapiens
tgcactgagccaagattgcaccactgcattccagcctgggcgacagagcgagactctgtcctctgtctcaaaaaaaaaaaaaaaaaaaaaaagtatatatrtatatatatatatatatatatatatatatatatatatacacacacacacatatatcttgccatttcttcaaacttttcaccaatgtagatcattttaact

SEQ ID NO: 34029 - DNA, 201 bp, Homo sapiens
gttattgtggtgtaatttatatatggcaaaattcactcttttcaaatgtacagttcaacgtgttttgacaaatgtatacatgcatataattacctccaaartgaagatacagaacatttccgtcaccacagtgttctcttggtacttctgttgtcaagccaccctcttcaccctcagcccctattgatcactgattcgatt

SEQ ID NO: 34030 - DNA, 201 bp, Homo sapiens
aaacatggcatcaaaacggtgattctttaaggtgcaagatagtgtgaatcatttagtctccagcaaatgcatccatcataatataagaccttttagaattrgaaaaataatcaaacctgtaacaaattttgcaagcaatttataaacaggtgctagaatctaagatattggtgacagtagagaagcaaacaaacaacaaca

SEQ ID NO: 34031 - DNA, 201 bp, Homo sapiens
aacccagatttttggaaccctattcccagcctcttacacttagatgtgatgtatcctcatttcttcattgcacatttcttcatttcatagaatggtagaawgttttgtaagtgtacatgtaaaaattaatcaattccagaatcaccacaaactcagaaaacatggcatcaaaacggtgattctttaaggtgcaagatagtg

SEQ ID NO: 34032 - DNA, 201 bp, Homo sapiens
gtgatgggcctcaaccacaaaacagcaacagcaaaaaacatttttctctaatatttgttactccaaataggttatcttcaatacgttattgtggtaagagwttcttctcaggagtgtttgctgctgtcaggggtaacatggtgaaggatagagcaagccctgccatgctccagtctcagctggctgtgtggattccaccca

SEQ ID NO: 34033 - DNA, 201 bp, Homo sapiens
agattttactgggtgttctgtatttttatttgccaagtccagtggccctaggcaagaggagtgttgcaaaggaaatgaagggaaccgcgtaatgtgttttrattattgtcctttgggattatttgtggttttgggttctttttgaaaaaaaaaaaaaaagacttttttcattttaaacatgacaatgtattttattaagct

SEQ ID NO: 34034 - DNA, 201 bp, Homo sapiens
caagtagaggaggagtgttctaccctggaataacacaaattagaggtgcctgtatgtatgtgtatggtgtgtgtgtgtgtgtgtgtgtgtgtgtgtgtgtrtatgtattaaacttcatgctttttaaagcctccttctaaaatgccatctttcagatgtgcctatctgtgtcttattttggtagtttttcttttctttccc

SEQ ID NO: 34035 - DNA, 201 bp, Homo sapiens
gtaaagtcatgggatatttgagtagaaagggcttacaggctctctcatcaaattgtcttattttacagttaagattctgaggcccagagagaaaggacttraccaaggccatttgacgacttactactagacctgggatgggactcaggcccacacatttgttccacactgagtagtttttagggcacttgaccttttatt

SEQ ID NO: 34036 - DNA, 201 bp, Homo sapiens
atttagtggcaaagaatactttgtaagaatcccatactgtatctccttctttcataccaatgcgtggtttaatatataataaccttgtttgaaataaaagsctttgatgcctggtgcccttaccacttatgaagtaaccatcggtttccaccactaaaagtctcctatggtcacaaagtcctttgtgaaaaaatccaaagg

SEQ ID NO: 34037 - DNA, 201 bp, Homo sapiens
aagcttaactgcatactgggaagtgtagttccagcacttaggtggatccaagaagtaagatttatggcagaagtattctacatgctgggattgtagctttycatgcacagggtgttgagtcagcgtctcaaagaatcagacaatgacggttaggagcaataccccacccgtgcagagctgcattagaatttagagttaggt

SEQ ID NO: 34038 - DNA, 201 bp, Homo sapiens
gagctgattccttttaaggcaggcaaaaagctgcttcccattcacccttccttctttctctattcacccaacctccacaactccccaaatccagtaggatraaaaaagggagggatctttttccctcccttgaagcatgtgtaaagcttaactgcatactgggaagtgtagttccagcacttaggtggatccaagaagtaa

SEQ ID NO: 34039 - DNA, 201 bp, Homo sapiens
ttacaccatgcccagagatactaaataatttgcccaaatccacacaactagtaagcccaaaaactgggatttgaattttggcatctttgattaaaaaaatstctagttttttccacagcgcccctgcaattaattaaagtgtttccctgtgtactgcaaatgtaccttatctactctttattccaagagcccaaaggttca

SEQ ID NO: 34040 - DNA, 201 bp, Homo sapiens
ttatggcaaccctgggaaatgaatgcactcagattctgccaagaatcacacctatgcttcttgagtgcaaatgccatagaggctgataaaccaatattacraagatccacataattttcttattttactctacttacccttataaattgttttttacctgttcttgttttgggagaaccactaacttttttcagcctatat

SEQ ID NO: 34041 - DNA, 201 bp, Homo sapiens
tatttatcatccttcactggaagaaaagggtagctgtatctcagaatagcttctattttatatcctattctgttttgttgcttgtccagacattgaatttaaaaaaaaaaaaaaacaggtatggatcagtatttcttgaaatgcctgaccctgagaatcacctgcagcaatgtagaaaacaacaataacacagcttgccag

SEQ ID NO: 34042 - DNA, 201 bp, Homo sapiens
aacctccaatatggacaacaggcaaaaatatggtgattattcccagtttgggcatttgtgaaagatgtggctgaggctgtatggatgcgtgtgcacacacmcacacacacacacacacacacagaggccgatgggaaaatctaactcagcaggaaagctatcacagagcgctggatttaggcacaatgagtaaacagggat

SEQ ID NO: 34043 - DNA, 201 bp, Homo sapiens
aattcacagtgatgctgatatccacgatcgtggggtggttctgtgcagggatctctaaaccttttagaaccttccaccagtttccctgcaatcaataggtrgctgattccatcagatcaaaccattttcctgttggaaagtggtaggtccttttgttaagtgttcttagaactcaccaatgatttcatcgaaaaagcatct

SEQ ID NO: 34044 - DNA, 201 bp, Homo sapiens
cagcccctgtcatttcctgttttcagatccccaccttctgccctgcatgttggggaggggtccatggccagaacggaatggcagctctctgctattgtagratccctgctgttgtgctcgaacctgtatataagacaaacagtcattcttgggagtggccagacattatctagagaattccaaccactcagctgaagagaa

SEQ ID NO: 34045 - DNA, 201 bp, Homo sapiens
agcccctaggaagggcagtaatgacagcccacaactgacaagtactgatgaatagttcttgaaggcaaaccctgccctcagggagctctgccatagcttgrcatgtcttctagaactacgtgcaaggggtcgcagagcagctaattctgccgcggtatgggcagtcaccaggaaacttcaagggggagcaggtttaacctg

SEQ ID NO: 34046 - DNA, 201 bp, Homo sapiens
ccacagagtggcaatttgtggctggagatacagaagaaccttctcccaatcaggctgccccaccatgttcaacctgcctgccttgcagagagttggctctycctgttactgtgggaaatccaaggggtctcagaaaacatctacagaatggagatactggcccatttcctagcaggattatctgtgtttgtctgggggtga

SEQ ID NO: 34047 - DNA, 201 bp, Homo sapiens
ctgactttgcataatataaatacagatatccttactcattaagaggctgtgttgttttagaaattagtaagtggctacatctgcataattttgcattggtragagttggcttctttagcgaacatgattttgtatttttggagaggaaaaccttgggcccatcaggttagccttttctgagatggagactcaagtgggacc

SEQ ID NO: 34048 - DNA, 201 bp, Homo sapiens
ctccaacattggggattacaattcgacatgagatttgggtggagacacagatccaaaccatatcactcctttatcttgccatgcctttgtcttctcactcytctgcaaaaagagctttggggtttactgtagcaaataatggaaaacattaaagaagtattgttagcatagttcttttgctttcaatttttacctaagtta

SEQ ID NO: 34049 - DNA, 201 bp, Homo sapiens
tagagagtggcagaagaggtggttctttaagggaaattgagggacatgtatgtcagatcaagaaaacacatgtcctctgcagggacgttcaggccatgtasccagttgttgtctttgtttttaaataatttttataaacacctaccctaggctaaccttccaaataagcaaaagtttcagaattgatagttgattgattga

SEQ ID NO: 34050 - DNA, 201 bp, Homo sapiens
acaatttaaaaaatcagatcctcagtcacactggccacatttcaagtagtcagtaaccagcctatggctaggagcaccataatgggcagtgcagagcaatrgggagaaagggcactggggaggcggatgggagaagcagtaagaaagggaaactagatcacttgttggagagcacatgtatgcatttcaaagaactgcctc

SEQ ID NO: 34051 - DNA, 201 bp, Homo sapiens
gaatgttaagtcccctttttgacggctgggctttttttcttatgccaagtttaagtgcaaagcagcagttcccttgtgccctgggacttttgcctaggaayaagggactgccagaaaacctcagaaaatccccatggagatgtctctgaaaaccatgtaaacagggacattgtctaagtgggtcatcctgaatatatgatg

SEQ ID NO: 34052 - DNA, 201 bp, Homo sapiens
agatgacaactgtttactggatgtgagatgtaatattttgggaggaaaatagtggaaattgagtgactgcgggactcggctaagatgggtagatggggcaygaggagaactggtcctgtgtctgtcaagggatcaatgagtaaggaaaaatgggcttcaaggacaaaaagccaggagaaaagaaaaagaagataccagaga

SEQ ID NO: 34053 - DNA, 201 bp, Homo sapiens
tagactcttgcttgctgtatcaaggtgactgacagcagcttccggcttttattctactttctcaattccgtacagttccaacaagtctcagaatggggtcwcatgggctctgattgcttctcctgctccttatgacccccagggatggggtgggggtgagcggcagtgctctgattggtcagacttaggtcacctgctcac

SEQ ID NO: 34054 - DNA, 201 bp, Homo sapiens
tgcttctcttagaagtcaaagagttggtgaggtaactgcaatcctgtctatatcagtgtagtgataatgcagtagtgtaatgaagaatggagctgcacgtrtgaggtttttcaagtccacaaagatcaggtattgtctacggtcaataaagatttttttaaaaaaccctcttaactaaagagaggtaacttccttttcaaa

SEQ ID NO: 34055 - DNA, 201 bp, Homo sapiens
ggccggttcacattgcagcctgtgtgcttcctggggcagcgtccaccaggtgtgtgcgggcaggtacaggatgcgagctcagtcctgcttcccctgaaatyctgtgacctggcagagggctgtgttcctgtgtccttacatcggatgtcctactgaagaaagggaaactgggacgaagctgtaggcacagtgggttctgaa

SEQ ID NO: 34056 - DNA, 201 bp, Homo sapiens
tgtggaagattggcttaaaaaaagatgcttgctgctgggctttggggaaggactaaacagaggcttggggtggggggacgactccaggaatattatgaccraatgctcaggcatacgttggcttcatagcctggagaaccaagagaagggtgacctgaacggtggctgccatcctctctgcggaagctgtcctcctgttaa

SEQ ID NO: 34057 - DNA, 201 bp, Homo sapiens
tgctcaggcatacgttggcttcatagcctggagaaccaagagaagggtgacctgaacggtggctgccatcctctctgcggaagctgtcctcctgttaagtrgaaaaccaggagtcagcgactcagccagccacgcggtagaacctcctcccagaaaccgggaatgttagttttcccttctctgtttgatattgacaagggc

SEQ ID NO: 34058 - DNA, 201 bp, Homo sapiens
ttctatggcaaataagcagcccttccttataatgctgaaatcatagaagttagttgttttcccctcattttttgacaatcattctttttgcggtagtaacraaatcaagcagttttcatttggctttttggtagttgaagttaatttgtcaatttcctgctagtcttctattacgtacacatttttctggttagctgacaa

SEQ ID NO: 34059 - DNA, 201 bp, Homo sapiens
ggtaggtgtattgatttcctagggcagctataacaaattctcacaaattacgtggttgaaaacaatagcaatttgttctctcacagttcaggagtcctgamgtctgaaattacagatggcagggttggttccttctggaggctttgagggagaatccgttccatgcctttctcctagcttctcgtggttgctagcaatgtg

SEQ ID NO: 34060 - DNA, 201 bp, Homo sapiens
ttctcccttgatcttcctgctctccctctctctttatattcacatctttggctcaaatattccctcctccagtggcacattcttttctttttttttctttwtttttattttattttattttattattattatactttaagttttagggtacatgtgcacaatgtgcaggtttgttacttatgtatacatgtgccatgtttg

SEQ ID NO: 34061 - DNA, 201 bp, Homo sapiens
aacaaatatttattgagcatctgtatgtacagggaagaatgtgaggtacagtaacacaaaatatatagtcctatctcttaataagcctgcacttgggagarggtatagatagggttgggaaggataaatatatttttaacactctaatacaaggcagagtgtaccaaaagttagaaatgctgtggagaatcagaatgaatg

SEQ ID NO: 34062 - DNA, 201 bp, Homo sapiens
tctggggagctgttgattattctcatgaatgtgcacctaatacagtctgccctccctattcatgggttccatatccacgccttcagtcaatcttggattgwaactattggaaaaaataatagatagctgagtctgtactgaacatgtacagactttttcttgtcaccattccctaaataatacagtataatcaactgttta

SEQ ID NO: 34063 - DNA, 201 bp, Homo sapiens
tgtaatcccagcaccttgggaggccaaggtgggcagatcacaatgtcaggagatcgagaccatcctggcgaacacagtgaaaccccgtctctactaaaaawacaaaaaagtagctggccgtggtggcgggcgcctgtagtcccagccactcgggaggctgaggcaggagaatggcgtgaacccaggaggcagagcttgcag

SEQ ID NO: 34064 - DNA, 201 bp, Homo sapiens
gatgaattcatgaacttttctcaaaacatcaagaaagtgtatatactagaagttatgtacaggctagaccatagggctcagatgagtactttaaaactttycctctttggttagaataaaaaatgtgaaaacttacatcatgtacatatttacctaaaaaatcagccattaagaaaaataatttgtatgtgtcacacacaa

SEQ ID NO: 34065 - DNA, 201 bp, Homo sapiens
aatttttattaacaaaacatctattttgcatatctagcattctgtatccttttcgtataatgctttgcaatgaagcatctatcataaaaaccactaaaccrtacagatggtgtttatgcaacacaatttaatgtcccagcaagaactagtgatttgttacatacattatgcatcattgtgatgtatatatccagattttaa

SEQ ID NO: 34066 - DNA, 201 bp, Homo sapiens
tcaagggactggttacagaattgtctggggtttaaataccctttagagatttcccattggttacttggtgtatgccctatgtaatgaagtagtggctcatkattagtctgattggttgcaggaggggaccaatcagaggctgaagttacaaagctacaccctatgcaaacatctgattgtggaaagcaaccaatcagaggc

SEQ ID NO: 34067 - DNA, 201 bp, Homo sapiens
agctggttcatttcattcattgactcaacaaatatttactaagtgtctgccataggccagttactgttctaggcatgtaggagacagtagtgaggaagatrgatgaggtttctgtcctcagggacctgagatcgtagaggagggaagcaaacacagagccatttggagtggtaataagtgctgagaagggaagaaagggaa

SEQ ID NO: 34068 - DNA, 201 bp, Homo sapiens
tgctggtccttctctctaacatggctaactctaccccactttaagactcagctttatcagcccttgctatgagaagcctttgttgatcaccccaggaggakaaaggtgtccccttttgtgctctccatcaagagcatcacagaactaatgcatcatcttaatactattaatgtgtctgatgtgtcggagaggccccaaagg

SEQ ID NO: 34069 - DNA, 201 bp, Homo sapiens
tgcctggactaactatctcacatctccctgtcacacccaactcccaattctctccaccatgctggtccttctctctaacatggctaactctaccccacttyaagactcagctttatcagcccttgctatgagaagcctttgttgatcaccccaggaggagaaaggtgtccccttttgtgctctccatcaagagcatcacag

SEQ ID NO: 34070 - DNA, 201 bp, Homo sapiens
tttacaagtgcttttttttctgcctaaaatttaagaaatactttacccaatgtactaaatatatatgtgtgcatgtgtgtgtgtgtgtatatatataaaawatatatataatataatatataattatattatatacacacatataatatataatatacatattgtacatatgtataatacatattacatacatatgtatta

SEQ ID NO: 34071 - DNA, 201 bp, Homo sapiens
aaatataaaaaagaaaagccatctatatgcagatgtctgggcagtataaaaggtctgagagatgtgcttaatactatgattattaaagaagttaatgtctrtgagagcacccagcacatagtaggcactaaataaatgtttgctggatttgaatctaaagcatgcttgatcagacctacatagaggcaattccttgaaaag

SEQ ID NO: 34072 - DNA, 201 bp, Homo sapiens
gtccccggagtgtgatgttccccttcctgtgtccatgtgttctcattgttcagttcccacctatgagtgagaacatgtggtgtttggttttttgtccttgyaatagtttgctgagaatgatggtttccagtttcatccatgtccctacaaaggacatgaactcttcattttttatggctgcatagtattccatggtgtata

SEQ ID NO: 34073 - DNA, 201 bp, Homo sapiens
tgtgtctttatagcagcatgatttataatcctttgggtatatacccagtaatgggatggctgggtcaaatggtatttctagttctagatccctgaggaatygccacactgacttccacaatggttgaactagtttacagtcccaccaacagtgtaaaagtgttcctatttctccacatcctctctagcacctgttttttcc

SEQ ID NO: 34074 - DNA, 201 bp, Homo sapiens
tatatacatatattatatgtataatacatatacgtatataatatgtataatacatattatatacgtatattatgcgtataatacagatatatgtatatatwtgatatgttgtgtgttatatataacatatatatgatatgttgtgtgttatatataacatatataggatatgttgtgtgttatatataacatatataggat

SEQ ID NO: 34075 - DNA, 201 bp, Homo sapiens
atatacatatattatatgtataatacatatacgtatataatatgtataatacatattatatacgtatattatgcgtataatacagatatatgtatatatakgatatgttgtgtgttatatataacatatatatgatatgttgtgtgttatatataacatatataggatatgttgtgtgttatatataacatatataggata

SEQ ID NO: 34076 - DNA, 201 bp, Homo sapiens
gtatataatatgtataatacatattatatacgtatattatgcgtataatacagatatatgtatatatatgatatgttgtgtgttatatataacatatatakgatatgttgtgtgttatatataacatatataggatatgttgtgtgttatatataacatatataggatatgttgtgttatatataacatatataggatatg

SEQ ID NO: 34077 - DNA, 201 bp, Homo sapiens
ctaaaaacaatttaaaaacttagctggtcatggtggtgcacacctgtagtcctggctgcttgggaggctgaagtgggaagatcccttgagcccaggagttytaaggtggcagtgagctatgatcacaacactgcactctagcctggggaacagaccaagacattgtctcttaaaaaaaaaaaaaagtaggtaaagattgaa

SEQ ID NO: 34078 - DNA, 201 bp, Homo sapiens
ttttttcccagtggaggagctggatgttgttcctaaaagaaaagggcagagggaccctgggcaggcaaaattttcagctgcctgccaccttagcccctgtscccacactcacttctgaaccacatgtgatcagtcttctcttcccaccacataactgaaacttcaaggtcatgggtgagctctatgttgttaagtcttatt

SEQ ID NO: 34079 - DNA, 201 bp, Homo sapiens
aggagctggatgttgttcctaaaagaaaagggcagagggaccctgggcaggcaaaattttcagctgcctgccaccttagcccctgtccccacactcacttytgaaccacatgtgatcagtcttctcttcccaccacataactgaaacttcaaggtcatgggtgagctctatgttgttaagtcttatttataggagcgatca

SEQ ID NO: 34080 - DNA, 201 bp, Homo sapiens
cattttcagtcattcattatcaataaatactgattcaggcccagtatgtgttaggcatgattctaggcaagagagagaaaccatgaatgagagacatggtstctgcccttggggagggtgtaatgaagttcgtcagttttgtgctttgtggtttctttctatgcgttatgtttttaaagtcctcttccatcctaaagtcag

SEQ ID NO: 34081 - DNA, 201 bp, Homo sapiens
ttgaggccagactggccaaaatgttgaaaccccatctctactaaaaatacaaaaattacctgggcatggtggtgtgtgcctgtaatcctggctactcgggrggttgaggcaggagaatcgcttgaacccgggaggcagtggttgcagtgagctgagattgcactactgcactccacctgggcaataagagtgagactccat

SEQ ID NO: 34082 - DNA, 201 bp, Homo sapiens
actctgtaagtcttcagtgcacaaaatttatatgaacctaataataaacactgaataataaatttgtgaagtaaataaaaatattgggaggacaagttgarggggatgccaatggataatgcctaaaactgataaatagaaagcaagatagcctaaacatcatatttagaaaagtgtggcaagtaccaaaaagaaataact

SEQ ID NO: 34083 - DNA, 201 bp, Homo sapiens
tttgggccgagttagcaatatgtaagtagaaaactaagtaattgaggaatatagttaacttcagaggaaaaaacctcagaaaattagacaagaaaacatartatactctgtaagtcttcagtgcacaaaatttatatgaacctaataataaacactgaataataaatttgtgaagtaaataaaaatattgggaggacaagt

SEQ ID NO: 34084 - DNA, 201 bp, Homo sapiens
cctagatgcaaccatactttaaaaaatatattttccatcgtggttggttgagtctacagtgtgtaaccacagacgcagagggccaattgtacttactcttkggaggaaaaatcggagggaagcaggccgaagtggtgacccgtaggaattgttgttttctgtactattaggcgctttaaactatgtaactgtatgtcttta

SEQ ID NO: 34085 - DNA, 201 bp, Homo sapiens
acggtttggctactctaggtaccttgtatcagtggaatcatatagtatttgtccttctgtactaacttatttcacttaggggagttttttttaaaaaggcrtaagtctataaacacaagcataacagaaaacgaggcaacaacagcgtggtttttggcattaggatacaggggtgtgtgtggctaaaataaggaggcctag

SEQ ID NO: 34086 - DNA, 201 bp, Homo sapiens
aggaaatctgtgcttagagtgctgtggcagaagtagaaattgctgtcagccaactgattttctgattcttctgtctataaaagctgtgcccattgttaacwtaggtgataagttgaatttttagtttttttaggttttttgtttgtttgtttgtttttgaggtggagtctcactccgttgcccacgctggagtgcagtggt

SEQ ID NO: 34087 - DNA, 201 bp, Homo sapiens
ttgtgtgttatatataacatatataggatatgttgtgtgttatatataacatatataggatatgttgtgtgttatatataacatatataggatatgttgtrtgttatatgtaacatatatatgatatgttgtgtgttatatataacatatatatgatatgttgtgtgttatatataatatatatgatatgttgtgtgttat

SEQ ID NO: 34088 - DNA, 201 bp, Homo sapiens
atatataacatatataggatatgttgtgtgttatatataacatatataggatatgttgtgtgttatatataacatatataggatatgttgtatgttatatrtaacatatatatgatatgttgtgtgttatatataacatatatatgatatgttgtgtgttatatataatatatatgatatgttgtgtgttatatataacat

SEQ ID NO: 34089 - DNA, 201 bp, Homo sapiens
atatataacatatataggatatgttgtgtgttatatataacatatataggatatgttgtatgttatatgtaacatatatatgatatgttgtgtgttatatrtaacatatatatgatatgttgtgtgttatatataatatatatgatatgttgtgtgttatatataacatatatgatatgttgtgtgttatatataacatat

SEQ ID NO: 34090 - DNA, 201 bp, Homo sapiens
ctatttcttttctttctctcactcttttatttatttctttctttcttttagacagggtctcgctatgtcacccaggctggagcacagtgtgatcatggctyactgcagcctcaacctcccaggcccaagcaatcctcctaccttagcctcctgtgtagctgggactataggcgtgcagcaccacacttggctaaattttta

SEQ ID NO: 34091 - DNA, 201 bp, Homo sapiens
tataggatatgttgtgtgttatatataacatatataggatatgttgtatgttatatgtaacatatatatgatatgttgtgtgttatatataacatatatakgatatgttgtgtgttatatataatatatatgatatgttgtgtgttatatataacatatatgatatgttgtgtgttatatataacatatatatgatatata

SEQ ID NO: 34092 - DNA, 201 bp, Homo sapiens
cctcttttctacctggtgaatgcatccttcaaggcccagttaattcatcatctactttgtcgagtttttctcaccacctgtatcagttgagaattgcattyagctatgatcacaacagaggcttaagcccataacaagcaatctggagccaggcattccagaagtggtgtactctttccatcgtgccctctgggacccagg

SEQ ID NO: 34093 - DNA, 201 bp, Homo sapiens
agcactcatgtttcagcaagaaaaaaaagcccagtagccaaattttaaaagtgggcaaaggacacaatcagttcattgaaatggaaataaaaatagctttraaacatattgaaaaatattcagaacttctcatagtaagagaaatgtgaattaaagttgcaacaagatgccatcttctgtctatcagattgacaaagatta

SEQ ID NO: 34094 - DNA, 201 bp, Homo sapiens
tctgtgtgtgtctggaataagtgttggggggacactggcatgagaattccagcatacagggacatgcaacaaaagtgtcaagagtgtcctctagaagaacsctgagcttgcatggagtttgccactttccagaggatgcaatagctccttctttgttgttctgctttggccttggtttattataaagaattgttctctttt

SEQ ID NO: 34095 - DNA, 201 bp, Homo sapiens
ccttgcaaaactagcagtcaaataaaacagaactctaaaattgaatttaaagtacagttttgtctggctagccatatgtagaaagctgaaactggatcccytccttacaccttatacaaaaattaattcaagatggattaaagacttaaatgttagacctaaaaccataaaaaccctagaagaaaacctaggcaatatctc

SEQ ID NO: 34096 - DNA, 201 bp, Homo sapiens
aagggtttccaaggccactagctggcagaaggataaggtggaaatgtaaatgacatgcccctctcttcatgaaaacaatgtcagttgttcctctcagtccycaccataacagtttctgaaattctttctcacctccttcacttatttatcctttctgctccctgctagactgctaggggtggggacaggagtgatgtctga

SEQ ID NO: 34097 - DNA, 201 bp, Homo sapiens
aagaatcagctggtgatacacatggagtgtttgctccaagaacatttctcatggtgtggaaaatggcagtggtggcctcctggctttcaggctgaaatacrtttagctgatctttgtcggcaaaggtgtccaacaatagcaactgcttatgacaactaattttaggaaacgtgtgtagttaatttgaaatatcgccctggg

SEQ ID NO: 34098 - DNA, 201 bp, Homo sapiens
aggctgagacaggagaatctcttgaacccaggaggcagatgttgcagtgagccaagattgtgccactgcactccagcctgagcgacagagtgagactccakctcaagaaaaaaaagaaaaagaaaaagaaaaaaaaaagtcactgtaagagatgaattagaagaatgtgtcttgaatgcgggcacaatttatttttgttgt

SEQ ID NO: 34099 - DNA, 201 bp, Homo sapiens
acttctgccccagctctaccttggttgataccccaaatgccccttttcctctggcctacctagcctgctttctccccttcttccttggttaactttgcacrtgaccattttgattctctaaagagaatcattcaattaggaaatggaaatctgaggcaatgagagagaggagacatgcatcactatttatttttagaaact

SEQ ID NO: 34100 - DNA, 201 bp, Homo sapiens
atgtctgtactgtttttgtaaatgtacaatgattccaaaataaaaggtgtatttaagaaacagaaatgccaagtgtatatgtgtgagtacacacgtgctckcacatgtgcatgtgtacagttgtgcatatgtaagtctttgtgcatatgtaagtgccccttgctgcacaccccctgctgttctgtgtgtgctgctccactc

SEQ ID NO: 34101 - DNA, 201 bp, Homo sapiens
actccatgctgtaccatagagagaggagcctgacctttggctttgggatctatgcgaccccagtcagaacatggcacttttgatgtcttcatgacctttgrcgtgctactcttcctctttgcatttctgtttttttcgtctgtaactgggaataatacccatccggcaagtttcgaattagaaattagaggccaggtgtgg

SEQ ID NO: 34102 - DNA, 201 bp, Homo sapiens
gattgaaatacaatttgtgtggcttttaggcaagtgagcatttagcaagtaagaatttcccagattgggtttagagttgtatttgcttatgttccaaactyttttttttttttttttttggtaagataattttgaatatcagtagaacttggggcagatagaatgacagaacatggaatgtgtaatccttttgggatttgt

SEQ ID NO: 34103 - DNA, 201 bp, Homo sapiens
accaccagggtcactaccagcagatcagagccacttccctgtccctgggggcatcgtcttagactttggtcaccaccaaagaggagacataagaagaaggrcaggaagaggtagcattgagcaagagctctggatttgccatcatcagctgaggattctgaattaggaaacatatctatttaggtttaaactacaaaatat

SEQ ID NO: 34104 - DNA, 201 bp, Homo sapiens
gcttgtccccatcagtaagctttggtgtcacaccagccggatgactttctggtggagggccagcttcctgcacttccgtgacaacagcctgacagccccayggaggcatggctgtagacattaagacatttctgtagacatttgttctagttgttgtccttttttgtctgttatttattatttatttatttatcattattt

SEQ ID NO: 34105 - DNA, 201 bp, Homo sapiens
cattaaactgatagtatcaaagccaggatttgaatgctgcccgcagcaggccattggagcctttgctttgactgctgccctgagctgccacccaagatggyggcagcgtctcgcacttttcccatgagcacactgtgcaggtggtctcagcagcctgagtgtgagccacagactgattccattgcaatgggaaagcttgag

SEQ ID NO: 34106 - DNA, 201 bp, Homo sapiens
ggtgacagcgttgaatggcttgtccccatcagtaagctttggtgtcacaccagccggatgactttctggtggagggccagcttcctgcacttccgtgacarcagcctgacagccccacggaggcatggctgtagacattaagacatttctgtagacatttgttctagttgttgtccttttttgtctgttatttattattta

SEQ ID NO: 34107 - DNA, 201 bp, Homo sapiens
tactttcttgggagtttgatgtttcctcttgcttccacagctgtcagaaagggcttgttctgagggtgacctgcaggttgcaaggctgtggaaacatagcrgtgacagcgttgaatggcttgtccccatcagtaagctttggtgtcacaccagccggatgactttctggtggagggccagcttcctgcacttccgtgacaa

SEQ ID NO: 34108 - DNA, 201 bp, Homo sapiens
cattactagttggcctcactttaaaaaatgttgtttcttggatagcatttttctttcacaagttggtttgctttcacatgtcaaaaaacaaaaccagggcygggcgcggtagctcacacctgtaatcccagcactttgggaggcgaaggtgggtggatcatctggggtcaggggtttgacaccagcctggccaacatggtg

SEQ ID NO: 34109 - DNA, 201 bp, Homo sapiens
tccaaaacagggtgtctcccagaactctaaacacactgcgctcttttacacctcctggcctttgcacagcttgttctctctgcctatatactacctcccchctagcccccattgagagcctatgcatccttgaaattcagttcttatttcatctcctctgagatgccttcctggacccttctctggcagttcccctagatc

SEQ ID NO: 34110 - DNA, 201 bp, Homo sapiens
cagcagcatcactgccttgctccgtgatcttcccatgtttgagtcacctcatccttgatatggaaggggcagtacctgttctctcagtagcataagataavaggtagggaagtgcttgggaaaatgcaataaaagacactgctggaagccttcagcagtaggttgggttacagaggtcttggccttgcaaaatgaagtgag

SEQ ID NO: 34111 - DNA, 201 bp, Homo sapiens
cacctagccagttaaaaacattgggcaaagctgtaaactacatcacaggagttcaaaatgtcaacagagctgcccccagtcctgtctgtgtttttgcttargacccagtgttgtgtcactactccccattgataataaacaaaacatgcctcatatgttcacagttatttagagtttacagaattctctccttctatcaat

SEQ ID NO: 34112 - DNA, 201 bp, Homo sapiens
tcagcatgtgtttgttcattccacaaaggtttactaaacccttgctttgtgacaggcactgtataccagttggccttctctctacattatgctgttgcaayaggcaaccccagtaatggtttctttcttgctactggagctctgttctaggtgtcttcattcctggacccaggctgcaggatcagcccctatatggaacat

SEQ ID NO: 34113 - DNA, 201 bp, Homo sapiens
tttgtatttttagtagagacaaaatttcaccacgttggccaggctggtcttaaactcctgacctcaagtgatccacccacgttagcctcccaaactgctgrgattacaggcgtgagccaccacgcttggctcaaatttcctcttctgtaagaacaccagtcatattagactcatccactctaaagacttcattttaattta

SEQ ID NO: 34114 - DNA, 201 bp, Homo sapiens
atgtgaaaactgtgtgcttctcaatatcccaccttttctcctttaaatttggaatcctcaaaatcatctctggagaaaggcatacatctgtctcccaggcrtgttcttaactttggcaaataaatctaaaatgattgagatttgtcttgtcattttcttccattgacagaggctagaagaccaagatccaggtgtttgcag

SEQ ID NO: 34115 - DNA, 201 bp, Homo sapiens
ccaggatacatgtgcaggacctacaggtttgttacataggtaaacgtgtgccatggtgctttgctgcacctatcaacccatcacctacatattaagccctrcatgcattagctagttatcctgatgctctccctccccaccccctccaagaggccccagtgtgtgttgttcccttccctgtgtccatgtatactcattgtt

SEQ ID NO: 34116 - DNA, 201 bp, Homo sapiens
tctactgaccttgtgatccacccgcctcagcctcccaaagtgctgggattacagcaggagtttttactctaaatattaagttaagcttacaagttaagctrcttgtaagctgtctgaaggtctatttccctgactttgcagttccttaattttgaaggcaatctctgcctgtatgtcttcttccttagagacctttgtccc

SEQ ID NO: 34117 - DNA, 201 bp, Homo sapiens
gacacatgggaagctgaggccctggcccctctttcatgccacagcctgggagatgctgccttctcagcagaaagcctcaggaggtattttgaaaagggaatttgttgttttcattctggttagataagttacaaactaattttttaaactgggaaaatattgaaaattgttttttaaaaatgaaatcacctttaattccat

SEQ ID NO: 34118 - DNA, 201 bp, Homo sapiens
acacatgggaagctgaggccctggcccctctttcatgccacagcctgggagatgctgccttctcagcagaaagcctcaggaggtattttgaaaagggaatttgttgttttcattctggttagataagttacaaactaattttttaaactgggaaaatattgaaaattgttttttaaaaatgaaatcacctttaattccatt

SEQ ID NO: 34119 - DNA, 201 bp, Homo sapiens
cacatataaatatatgtgtatatatattatataactggcatatacattattgggatatatattagtaggatgtatatatatatatgtgtgtatacatatatgtgtgtgtgtgtgtgtgtgtgtgtgtgtgtatatatgtaaaatgtatacacacttctatttgacctgtaccagttcattattaccacaataatgctaact

SEQ ID NO: 34120 - DNA, 201 bp, Homo sapiens
gcggtggctcaggcctgtaatctcagcactttgggaggccgaagcttgcagatcacctgaggttgggagtttgagaccagcctgatcaacatggagaaacycggtctctactaagaatgcaaaattagctgggcatggtggtgtgtgcctataatcccagctacttgggaggctgagggaggagaattgcttgaatccagg

SEQ ID NO: 34121 - DNA, 201 bp, Homo sapiens
acatataaatatatgtgtatatatattatataactggcatatacattattgggatatatattagtaggatgtatatatatatatgtgtgtatacatatatgtgtgtgtgtgtgtgtgtgtgtgtgtgtgtatatatgtaaaatgtatacacacttctatttgacctgtaccagttcattattaccacaataatgctaacta

SEQ ID NO: 34122 - DNA, 201 bp, Homo sapiens
ttcagtttgtaaaatgtaccacataatactactttatcaaccaaaccacttaattctaagatcttgggtctattttgaaaacaacaaaaacatgatgtgayagaagcagcattcttgagtgtaaagggacccatggactgagctttgtctcatttatgcctttatcgtatgacttagaggaagtcatttttcctctcttgg

SEQ ID NO: 34123 - DNA, 201 bp, Homo sapiens
cagtctggtctcaaactcctgacctcgtgaactgccctcctccgcctcccaaagtgctgggattacaggtgtgagccaccacgcccggctgccatatattstttgtataagtgacaggtctgaaaatagctgtgtttatgattacggagttaaagggaaaagaatgccatagctaatgggagagaaaaatgaaaggtcaat

SEQ ID NO: 34124 - DNA, 201 bp, Homo sapiens
cagggagccagagaggagtggtttctggccagccttccctgttcagttacctcatggaacccttgggaccagggccttgatttacaaatagagtggccacyaggtaaaagttgcccatggccagtggtagcaggatcgaccctagtgtctctgaatcattaagtacttcctttctgccctcttccatttcttactcaaaaa

SEQ ID NO: 34125 - DNA, 201 bp, Homo sapiens
actgcacaccctaaatatctgctaaagtactctgtactttgagatttaaatcaaatctgctcaggccaggtgtggtggctcatgcctgtaatcacacctcwaataaataaataaataaataaataaaacctgctcagagcccacctggttggtagtatcatccagtctacacagggaacctctagtccagagctcctctac

SEQ ID NO: 34126 - DNA, 201 bp, Homo sapiens
attttacttgcacttttttaattatgaagagtttgagtatctcttcacaagttcaagggtcatttttacttatttatctgtaaactacgttttttttggtkttttttttttttttttttttttggagacagtctctcactctgtcaccctgctggagtgcagtggcacgatcatggctaactgtagccttgacctcctggg

SEQ ID NO: 34127 - DNA, 201 bp, Homo sapiens
aaagctggtggaggacttgcttaggtcatgttaattagtttttctcagctctcaccaggtgtcattcatggaggttgcataaaagaaactcatacccaggkatgagctttttcttaaatattacctttctgaattttgaaatttagtgtagcattgagacatttaaacacatttttgaagcacaaaacttatttatcctag

SEQ ID NO: 34128 - DNA, 201 bp, Homo sapiens
ttggtggcgttttctgtggttctgagatccaacccccaacttcgtcccttttgacctagtttatcacccatgtccttgggttgaaaatagtagtgtaatcstaagagaaggggcctgaaaggaagggaagagaaatcagatgtcagctggtgaggatgagaaatactgcaacaagggagcagcattgacccttgagagcta

SEQ ID NO: 34129 - DNA, 201 bp, Homo sapiens
ggagaccgtggaaagaggggagaggggagaggggagagggaatcacagaattttcaaactggtttagcatgctggctctgcagccagactgcctgagctcraatgtcagttgacttttctgtaaaatgggataataatagtaccagtttcatagatttgcaggagatgtgagattacatgaattcacttataaaaagtgcg

SEQ ID NO: 34130 - DNA, 201 bp, Homo sapiens
accacgcccagctaatttttgtattttttagtagagacaggttttcaccatgttggccaggctggtcctgaactcctgacctcaggtgatccacctgcctyggtctcccaaagtgctgggattacaggcgtgagccaccccgcctggctgccttttgtttttctagtacgctgatgagaccaaaaagaagatataataaaa

SEQ ID NO: 34131 - DNA, 201 bp, Homo sapiens
tctccctctctccagtctgtttttgctctgttcccaaacaatgctttgatgtgcaaggcactcctaatggaagataagtcatcaattagcccgatggaagrttaagctgaaaacagacttttcagggaagggattatcactgagctgttaatcactgattgacattatctattggggatatattcttatgggagacttact

SEQ ID NO: 34132 - DNA, 201 bp, Homo sapiens
ttttatatatatatacgcactttatcctgtctaatgtagtgctcctattttctttttcatattctttctgttagagccaaattcactactctgactttgcrtaatataaatacagatatccttactcattaagaggctgtgttgttttagaaattagtaagtggctacatctgcataattttgcattggtgagagttggct

SEQ ID NO: 34133 - DNA, 201 bp, Homo sapiens
tgcaagctccctcagctagttaattttgcgtttaagtctatgtgattttcattctaatgtcttttggaattaaatgtaatgttgtaagaaaagaagcgtcygaccaataaagcaaggcagtctaggctgttttatatatatatacgcactttatcctgtctaatgtagtgctcctattttctttttcatattctttctgtt

SEQ ID NO: 34134 - DNA, 201 bp, Homo sapiens
actttttgccagaaaagagcatgcagagtgaacttgtgacataatacattccttgaagctcccacgttatagtttcctggtaacatagagttgtttatatkattgctacttaaaacttggttgctttgtagatcctacttgggaattgaattaacttcagtgaacttgatagaagctgcatctttctgtaaagttttgggc

SEQ ID NO: 34135 - DNA, 201 bp, Homo sapiens
gatcacatcgaaagcctctgaacctctgaaaggcattaaaagttgtcccactgcacctatgagccatccagagaaacgttaaataagttggtccagaaacmcttttgaagtcctccatcctttcaatacttttcttacttctttgcttctgagcgggaggtgcagcatttaaaatcaaagacattaataataaggtctcat

SEQ ID NO: 34136 - DNA, 201 bp, Homo sapiens
agacagaggcagagatatgacttgaggattcattcatccatttgttcagtaggtatttacagattgcctcctctgggaaggtattggcaacactgaaaagwtggtgtccccaggtttcagctgcctgaggctgaaacctttatttcaccttttgcacataatttcttgaaggacagatgtcctgatacctaagatgcttgt

SEQ ID NO: 34137 - DNA, 201 bp, Homo sapiens
aatgggccaagcttaggaattccaagaaggcagactcaagatagagggctgccaaagctcacagatgtggaatgaaaccagtttcaaaacctgattcttcrctcagttggaatgtgttttaaaacctggactcacttgagatgtttgcacctggtaagaatgtttcaaaccttgaattctactttgtgtaattatctgtga

SEQ ID NO: 34138 - DNA, 201 bp, Homo sapiens
cttcctcatggaaacctcccctgacctccctgagtagcccaaactctcctattgtaggcactctcagagcgcttctcatagatgcaattttacgtttgttygtaattctgttttgttttttcacaacaataaattttgagagggcagctctatgcctagtctccaccctgtgtccccgatgcccagcacagtgcctgaagc

SEQ ID NO: 34139 - DNA, 201 bp, Homo sapiens
ccacgtcattccccagcccaatcccttatgctttctttcaatgacacttaaaatttaagacccaaacctacatgatctggccccatctgccttttcagacwcttcttcctcctcgagccccttaccccatcctagccaccgaagccagtgatgccacatcccagcctctttctgcctctgcaggacagttttgtgtgtgct

SEQ ID NO: 34140 - DNA, 201 bp, Homo sapiens
acactctccttatctacccagtttcctctagggactcatgttgatcaactgacattgccaaagctaaccaagagaaaaggaagtcatcacagtgaaatatwgatattcatttctagccagatttccaattgctcattttcaatctgctatgtaaagaccttagccactatataccttaagcaacattcagcctagtttatt

SEQ ID NO: 34141 - DNA, 201 bp, Homo sapiens
aaatgtcagttgacttttctgtaaaatgggataataatagtaccagtttcatagatttgcaggagatgtgagattacatgaattcacttataaaaagtgcrtgatacttaaagccatgttacctttaaacttccaatccattcattcatttattcaacaaaaactacatactgtgatggttgcacaagcctgtgaaaatac

SEQ ID NO: 34142 - DNA, 201 bp, Homo sapiens
acaacaacaacagcaacaacaacaaaaaccaaccagtgattaattgtaatcttttaggcccattttaaatgcgtcctcctccatgaaatatttcttggttyctctggacggatgttgtttctcttgcctctgaattcccagagaactttgtacctctcttagggaaattatcaatctctgtcttttattatagttagttat

SEQ ID NO: 34143 - DNA, 201 bp, Homo sapiens
gtctgccccatacagaagttcaagctgtgcattgcacaactccaaggagtgtctatcacatagcaagttatataaatggtgccccagagtttgatagtccrcaatatgtacagttgtgtgcattgatcatgaagagagaatccatgttcacttcccaattcagccctcaagaaaaccaacacgaggtcttcgacagcttac

SEQ ID NO: 34144 - DNA, 201 bp, Homo sapiens
cccaaagtccttgcttggacctctcctcctctccactcctcccctcccctcccctccccattgggcactgccagggcccagtacaagtgaaacagatgctyaactcctagacttgtggaggcttaggtagaccagcaagtcactattaggacagaaaaacaagaccacgtcattccccagcccaatcccttatgctttctt

SEQ ID NO: 34145 - DNA, 201 bp, Homo sapiens
ttaacagtgaacaggtgcaaaaccaagatttgaaaccagtttttgatcttggtttgatcttgatgccacatcccagcctctttctacctctgtaggacggytttgtgtctcctctgcattttcagcctccattgctaatctgacaccatctaaagcaggaatatccttattaatggaatagtgcttaatgggattaggctt

SEQ ID NO: 34146 - DNA, 201 bp, Homo sapiens
cttcagccttttctctcctgttagggatcaaaacttgccaaaacagaaattttaaaaagacacgcaggatgtggggctgctcctgggaggtttgctgtgtktgtttggggtcctgcaccctccactccactcctgagtgtccaagggtggatgtccagaaatttagccacctactcccatcagtgtagccagaacctttgc

SEQ ID NO: 34147 - DNA, 201 bp, Homo sapiens
tttccctgaaccagtgaaattgctatcaggaaaaaatgactcaagtttccaggcagctatgaatgaggtgtttttctgggcggtctgagcaactatctttyggaaggatacataagaaggtacaagctgccagcccatccatttccctaagatgaacttgaagcacgttttctttcagcagcccagacagcacaggctttt

SEQ ID NO: 34148 - DNA, 201 bp, Homo sapiens
cttccttctactgacatctggtacttaggataagggaaaaggctttccctgaaccagtgaaattgctatcaggaaaaaatgactcaagtttccaggcagcyatgaatgaggtgtttttctgggcggtctgagcaactatcttttggaaggatacataagaaggtacaagctgccagcccatccatttccctaagatgaact

SEQ ID NO: 34149 - DNA, 201 bp, Homo sapiens
ttggcatttaaaaatgttcacttcttattgcaagacagggacagtctttaaagatttttctgctcaccaccactaccaaaaactaataacaaattttgtcytcatggggaagaaaatcttactcattcttgagatttcacagccatgtctaaagatctaggctatataagaagagaggaatgccttagaaatgtaatgctg

SEQ ID NO: 34150 - DNA, 201 bp, Homo sapiens
catgatacccttttctatgtatggagggtgaggtgtttctccttggtttaccctgaccaatttattattactgttccaaaaaggaaactgcatgattaatrtcagaatcaggtccaaaggcctctggctctggtgatggctaatgtgatttggatctagattctgtttaataacctgccaaaggcacctagctctttctct

SEQ ID NO: 34151 - DNA, 201 bp, Homo sapiens
ttgttcaatcaagtcactgaatcatcagccctgtgatatctacaagcgcatgcatgtgtctgagtgaagtgagctgggcagttccatgatacccttttctrtgtatggagggtgaggtgtttctccttggtttaccctgaccaatttattattactgttccaaaaaggaaactgcatgattaatgtcagaatcaggtccaa

SEQ ID NO: 34152 - DNA, 201 bp, Homo sapiens
ggccaggccgcttcttgtcctcttttggggctgggactggtatgatgttgaagtagcccatctctaagtcttcccctcctccctgccagcttaattgtgcmacattgttcaatcaagtcactgaatcatcagccctgtgatatctacaagcgcatgcatgtgtctgagtgaagtgagctgggcagttccatgatacccttt

SEQ ID NO: 34153 - DNA, 201 bp, Homo sapiens
aatttttagaattaactgaaagagtggcaagttgagcattcaatttgcaagtcatgctatgtttggaattaggagggataaccccttttccttcccaaagrgactgacaagcataccaagagggggtgggatttctggaactctgtgaagttaacaagaagggacttggaaagttagaagaaggagggggagctgcattcc

SEQ ID NO: 34154 - DNA, 201 bp, Homo sapiens
gacaccgcagccttgctttgcacaatcttgctagctttgtgagtttcactggggattggaggggaggcccgccttcaacttgagctgcttgtgttttggtkggtggtaatgccttagaaacagaaaggagccagctccccttcagccactcaggcttctgcctgggtttccttttaaccctggaatttcatgtggaccctc

SEQ ID NO: 34155 - DNA, 201 bp, Homo sapiens
tctgaagaatattctagaactttaaaattaatattaacaaagcattgacgttgttttagtaaagaagcaattcagaataaagttggtatgattgctttactttttttttttttttttttgagacggagtttcgctcttgttgcccaggctggagtgcaatggcacgatctcggctcactgcaacctctgcctcccacgttc

SEQ ID NO: 34156 - DNA, 201 bp, Homo sapiens
cgaggctgtgactttataatttttagaattaactgaaagagtggcaagttgagcattcaatttgcaagtcatgctatgtttggaattaggagggataaccmcttttccttcccaaagggactgacaagcataccaagagggggtgggatttctggaactctgtgaagttaacaagaagggacttggaaagttagaagaagg

SEQ ID NO: 34157 - DNA, 201 bp, Homo sapiens
cttaagtgctttgatccctgtaatataataaaatggcctacacttaaccatcattctggtaccactctctgtgtcagaggttgttgctcttttatttgccrgttttctttctaaaagcagtcatgagcagacaagcttagaaagggtattttcttcgtgttgtttcagggaaaatagagaaagtcaaacctcctccatccc

SEQ ID NO: 34158 - DNA, 201 bp, Homo sapiens
tagaaggatataggtgtcaacatccagaaggatacaggtgtcaacagataagattatgctcataattagaaaatagaattcattgagcatctgcaatatgycaggagctttgtatacattatctcatttgtttgtcacaataatcttatgaaatgaatactattgtatttcccattttacagacagcatagcttaaactca

SEQ ID NO: 34159 - DNA, 201 bp, Homo sapiens
ttacaggtaagaggcaatgaccaggttagcaaccagtcaagaacattcatgagcaaatgctggtctagtctgaagggccatcttgggtacacttgggcacwactggtgctgggctgaacatgccactcaggagtttttactggaacacaggcatgtagaaacacatctagaaggatataggtgtcaacatccagaaggata

SEQ ID NO: 34160 - DNA, 201 bp, Homo sapiens
gttcttaccagattcttgaaaggattctgtgaactcttctcccctaaagcttagaatcactgttctggatggtaccaaaaaccacacagtagaacactttrtacttttgtctcccacctctgataataaatgcagaatttggcatagtcaaaatgttacaaaaggtttgtacagcatcaaaagaccttggattgcaaattt

SEQ ID NO: 34161 - DNA, 201 bp, Homo sapiens
agcactttgggaggctgaggcaggaggattgcttgaactcaggagtttgagaccagcctgggcaacttggccagacatcatctctacttaaagaaaaaaamccgccgggtgcggtggcttacgcctgtaatcccagcactttgggaggctgaggcgggcagatcacgaggtcaggagtttgagactatcctggccaatatg

SEQ ID NO: 34162 - DNA, 201 bp, Homo sapiens
agaatcgcttgaccccaggaggaggcggctgcagtgagctgagattgtgccactgcactccagcctgggtgacagagtgagattctgtctcaaaataaataaataaataaataaataaataaataaataaataaataaataaaataaaaaataaaaaaacaaaaaaaataaaaaaataaaaaaacaaacaaactagccagg

SEQ ID NO: 34163 - DNA, 201 bp, Homo sapiens
gaatcgcttgaccccaggaggaggcggctgcagtgagctgagattgtgccactgcactccagcctgggtgacagagtgagattctgtctcaaaataaataaataaataaataaataaataaataaataaataaataaataaaataaaaaataaaaaaacaaaaaaaataaaaaaataaaaaaacaaacaaactagccaggt

SEQ ID NO: 34164 - DNA, 201 bp, Homo sapiens
tcacagtgagtgaaagaaagtgagctgggaaaagcctgaatcaatgattgaactttccatcctcctggaatagtcttgttttgtatgctcttggactgatsctcaaatgtattcatgtccattgctcttcccgccttgcttgtgtcggttactcttgttccctcttctctaggctccctacagcccttgcagttgctttca

SEQ ID NO: 34165 - DNA, 201 bp, Homo sapiens
cattgaaaccacagcagccacagataagctatatatatatatatagagagagagagagaactatagagagagggcaaactatgtatatagaataaagtgtrtatatatagtgtaagatacatatatatatatgtcgttttgtgtgtgtgtgtgtgtgtgtgtgtgtgtgtgtgtgtatgtagttctacttccaagaatttc

SEQ ID NO: 34166 - DNA, 201 bp, Homo sapiens
cctgagtctgagtaatttataaagaatagagatttggttcttacatttctggaggctgtctcatcccatagaagaaggtcagagggcaaaagagcatacarcctgtgagagacaagagagagccagtcttactttgataatgaatccattcctgggttgaccattcgtgaggtcagagccctcatgaccttatcgcctctt

SEQ ID NO: 34167 - DNA, 201 bp, Homo sapiens
ccccaagtgctgggattacagacacgagccactgtaccctgccaataatccacatctctatgaaataaaaaccatggactccacttcagcttttcatcacmcctttagcactgagtttccccattcctattctccagggttaaccactgtctttgtctaatttctgctgctgaaagagtatacctgagtctgagtaattta

SEQ ID NO: 34168 - DNA, 201 bp, Homo sapiens
gagcctgggaggcagaggttgcagtgagccgagatggagccactgcactccagcctggtgacagagcaagaactctgtctcaaaaaaaaaaaaaaaaaaargaaaaaaagaaagaaagaaagaaaaagaaaaaaagagacatgtaacgggaatttgttcccatcttggtgacagtttcagagtgccccgcataggccgtgc

SEQ ID NO: 34169 - DNA, 201 bp, Homo sapiens
gagctccccagcagggctgccaagtatgattgttcaggttgcatactgcacaatcctggaaggctccattcacatcaagtacaatgtgaatggtgctcttrgagttgttcagtgcataacatgcatactacacctgctcaggcaaaagcaacctatccgttctttggaacatatagctaaaattcaaccagaaacttactt

SEQ ID NO: 34170 - DNA, 201 bp, Homo sapiens
attttgccagcccaatgcatacaagagagtgcagtttgtgtgtgtgtgtgtgtgtcaatgtaaagacaaatatttctttaaataataatgtatttgtattwttttttgcagtggaattggaaattttctcacagtcctatccagatgtgcaaagaagtggtagtttatttctataagtgacctaatcatccactgtgtaca

SEQ ID NO: 34171 - DNA, 201 bp, Homo sapiens
tctcatttaaagatttagaaagataaagtaaaagggtggggatcagattctgcccttcctctattctttcctacaatttgagtctcatgttggctcttttsttcatttgtttttaattgactcatgatagttgtacctatttgtggggtataatgtgagatagtgcagctttcatttgcctttctcttattatgagtatgt

SEQ ID NO: 34172 - DNA, 201 bp, Homo sapiens
aatcgcttgaccccaggaggaggcggctgcagtgagctgagattgtgccactgcactccagcctgggtgacagagtgagattctgtctcaaaataaataaataaataaataaataaataaataaataaataaataaataaaataaaaaataaaaaaacaaaaaaaataaaaaaataaaaaaacaaacaaactagccaggtg

SEQ ID NO: 34173 - DNA, 201 bp, Homo sapiens
cctgggcctggtggagggcgcttgtaatcccagctacttgggaggctgaggcaggagaattgcttgaacgtgggaggcagaggttgcagtgagccgcgatygtgccactgaactccagcctggcaacaagagcaaaactcggtctcaaaaaaaaaaaaaaaaaaaaaaaaattattgtcctagaaaacactaataacgttg

SEQ ID NO: 34174 - DNA, 201 bp, Homo sapiens
gttggtatagttttcccttctcttcttttggggtgtgaatctttttgttcttgatgtatggagtcatttatgcattatagaacccagatttttggaacccyattcccagcctcttacacttagatgtgatgtatcctcatttcttcattgcacatttcttcatttcatagaatggtagaatgttttgtaagtgtacatgta

SEQ ID NO: 34175 - DNA, 201 bp, Homo sapiens
atcgcttgaccccaggaggaggcggctgcagtgagctgagattgtgccactgcactccagcctgggtgacagagtgagattctgtctcaaaataaataaataaataaataaataaataaataaataaataaataaataaaataaaaaataaaaaaacaaaaaaaataaaaaaataaaaaaacaaacaaactagccaggtgt

SEQ ID NO: 34176 - DNA, 201 bp, Homo sapiens
tggggtgtgaatctttttgttcttgatgtatggagtcatttatgcattatagaacccagatttttggaaccctattcccagcctcttacacttagatgtgmtgtatcctcatttcttcattgcacatttcttcatttcatagaatggtagaatgttttgtaagtgtacatgtaaaaattaatcaattccagaatcaccaca

SEQ ID NO: 34177 - DNA, 201 bp, Homo sapiens
ggaaaattccatccaaaataatattattgctttcctaaaaccaacctgaatgtttgaaggcagatgaataggtcaggaattataacagtatctattacttygtggattgttgtaatgtctgaaacaaggatagaatttttttttcaattttactttaagtttcgggatacatgtgcagaatgtgcaggtttgttacacagg

SEQ ID NO: 34178 - DNA, 201 bp, Homo sapiens
tgtgcgtgtgcgcgtgcacgcgcaccttgtaggtaggtgaggagattactagattgactctcctgtacatttaagttaaatggaacaaaaaaaaatgactrttgcttagaataatggataagccggcctcctattttttgttctctacttgactgatcagtccttgggaaattcttcaatgggattttcctatgacatatt

SEQ ID NO: 34179 - DNA, 201 bp, Homo sapiens
tatttttaaaactactcaaaattttaaaatactaaaagaaaaaatgggactcaaatttaatgagcccgtgtgtgcgtgtgtgtgtgcgtgtgtgtgtgtgygcatgtgtgtgcgtgtgcgtgtgcgcgtgcacgcgcaccttgtaggtaggtgaggagattactagattgactctcctgtacatttaagttaaatggaaca

SEQ ID NO: 34180 - DNA, 201 bp, Homo sapiens
gagattcttcataaatgagagaaggtagtagtcggtttcgtttgcattaagagaaggagcacatttctttgcacaaagtaaaataccctcccacgactccscactgctccccgtatccctgctggcttatgcttatcatgcatcccagtggtgaatggagaaattccatgctttccttctcctgcagaggttccttcctgg

SEQ ID NO: 34181 - DNA, 201 bp, Homo sapiens
tcccagctttagcacttatggctggagcccttgggcaagtcacttaaaactctctgaaccttggtttcctgatatgtaaactacagctatcaagagtactracctcctacgcttgttttgaggaataaatgtaattatgcataaaaatcgcatggtctaatgcccagcatatcataaatgctcaacaaaggttatgagcac

SEQ ID NO: 34182 - DNA, 201 bp, Homo sapiens
gggaatatttttattgggacttgaaaagagaaaaagagcttaaactgaagcatgaaagatttccattagagttttgagagtgtcagactctcaaacaatartatcagggatgcagtggaaaagtttctaagcatgtactgagtacccaccattgagggtgctacaaggcaacattccctcccattcccaatcctgcctggc

SEQ ID NO: 34183 - DNA, 201 bp, Homo sapiens
cttgaatccatggactggacccgaaacattggtctatctcagtgagggaggaagggtgctactagaatctgatgggtagagaccagggatgcagctaaacrctctataacacacaggacacccccttccaccaacaaagaattatcctgcacaaaatatcaatggtgccaatgttgaaaaaccctggtctaattgtctaga

SEQ ID NO: 34184 - DNA, 201 bp, Homo sapiens
cattacagatgagcagaatttattcattttgggggaaaaaatgaacagactgtatttggaaacttagatcatatccaaagcacttgatgattcctgtttgraatcatttttccttcaaagaatagttcagatcagtgttaaatgcagggcagagatggactcaagagtgggaggcattgcttttgaatggaatcacaatgt

SEQ ID NO: 34185 - DNA, 201 bp, Homo sapiens
aatgtcacatgcacggaagcatagtctagcttccaaaaaccattgaaaggagtttcaatcttttcttttaaattcatatatatgtatatatatatatatakagagagagagagagagagagagagcagagagagtttatttgggccaagcctggggactgcaacccaggagcatagattcaagttgccctaaatatacact

SEQ ID NO: 34186 - DNA, 201 bp, Homo sapiens
gctcaagcagtcctcccacctcggcctcccaagcagttccacaattacattcccaaagtgctgggataacaggcatgagccgccatgtgctggcctaaagwtaacacttaaaatgctagcaattgtgcagcagatcaattgttcatccttcacactgattaagtagctttgaacatggaaattctctaagcctgactgccc

SEQ ID NO: 34187 - DNA, 201 bp, Homo sapiens
tctgaggcaggctcagtgatttgtgaagaggttaaaattgcaaattctggctctgccacatctgtgctatatgaccttaggcagttccttaatttttcatstcttaagtggagacaatgctagtacttcttcacagaattgtgatgagttaaatactagtaagaagagttcagcacatgtaagtgctcagtaatgttacct

SEQ ID NO: 34188 - DNA, 201 bp, Homo sapiens
tcactgcctggttgtgcatcatagagttcacagcattgtgaaatcacccttaaggcaaagctgacagcatctttatttattgtgcatggatttcatgttarcctcatcatccttttgctgcatgttgataaggcagaaatagtgagtcatttaaatagcggattacaaagactctgatgtagtaaatctaccctctaggtt

SEQ ID NO: 34189 - DNA, 201 bp, Homo sapiens
cccagagccttgcagtgccagtgctgttagccactgtccccgactccatttgtgagaatgctgctgactggcatttatgagagtgcttagtacctgccagrcactgtgcctggggatttacatggattatctacttttaccctcaaaacaccgatatgagttaggcactattaatttcattttctgattgagagagctgat

SEQ ID NO: 34190 - DNA, 201 bp, Homo sapiens
catggtggcacacacctgtagtcccagctacttgggagactgaggcaggaggatcacttgagcccaggaggtggaggctgcagggggctgagatctcaccrctccattccagcctgggcaacagagcaagactctgtctcaaaaaaaaaaacaaaaaaacaattatcagttggccttctacataacacagggctacactgt

SEQ ID NO: 34191 - DNA, 201 bp, Homo sapiens
tgattgtccttttaatgtttgttatctgaggccttattccttaggatgacagtccaagtacttaaaaaaaaagtatcccttttgcctctttcaaatgcatwttttttattcttaaattttttattgatacataatgtttgtacatatgtatgggatttatgtgatattttgttacatgcataaaatatgtaatgattaagt

SEQ ID NO: 34192 - DNA, 201 bp, Homo sapiens
ctgtggaattttctcattatatcctttgctatctaagccaactgcatgttgttgttgttgttgttgttgttttttgaaaaccagaaaatctgatctcttarggttaacagtttggcccatctgaaataagtccatacaattaaaaacatttctttctattgacagggactgagggttgagggaaagcactgcagattttcc

SEQ ID NO: 34193 - DNA, 201 bp, Homo sapiens
atcaagtcatttttctgcttgaaataatgcagtggcttctcatcttattcaggaaaataggtaatccaaagtgcttatcaaggtttgcaaggaccttaggwtctggctcactgccagtcttctctcacccctcctttctcagctctgaagtcctcctggctgctccaaacatgattgctcagtgtccccacacctgctgtt

SEQ ID NO: 34194 - DNA, 201 bp, Homo sapiens
tagttttgatcctgggagcaagaattagtcaagaatggacctgatctaagaccactgtagttttttggacaggctatgagccagtggactggcacagatgratacaaataacacatagctaatactaattgagaatctaaaaggtgtattctgtggcctttataagcatgaacttatccaatgagttccatgaactcatga

SEQ ID NO: 34195 - DNA, 201 bp, Homo sapiens
ttctggaagagcagagtcagaattcaattccaggtttgtcatatttcagagcccacagtttattgctttctgtgtaatgagtaaatatttcttttagaatmaaaaaatattttaattaaaatgtaatgacaggaaaatagttttgatcctgggagcaagaattagtcaagaatggacctgatctaagaccactgtagtttt

SEQ ID NO: 34196 - DNA, 201 bp, Homo sapiens
tattttccatctgctcacagattgtgaggtttattattgtttctgttattgttttttgagacagggtctcaccttgttgcccaggctggagtgcagtggcrccatcttggctcactgcaacctccacctcccaggttcaagtatttcttgtgccttagcctctagcctccctggtagctgggattacaggtgtgcgccacc

SEQ ID NO: 34197 - DNA, 201 bp, Homo sapiens
aaaaggatgttgcttctctacacgtaaaacttgttggaagacagattatcctcctagaagagcagatgttctctattacaaaagaggaaaagcatttagaytcttccggtggtgaatagaggccacaggttacagctttctttggcctttgcttttaaaaaaacattctgctgaaggccttttgttgccagtggtgtccag

SEQ ID NO: 34198 - DNA, 201 bp, Homo sapiens
tgtggacgtaggtcttcctttgtcttgggattgtacctaggagtagaattgctgggtcatatggtaaatctgggtttaactttttaaaaagctgtcagackcttttccaaagcatctacaccactttacacctcaccaacaatgaatgaggcttccaagttttctacatcctagccaacacttactactgtccatcttttg

SEQ ID NO: 34199 - DNA, 201 bp, Homo sapiens
ggtcatttttctgtttcattttttacttgttagaggctctaaattgtagttctttttttaaataacacaactttattaaggataaaatttgcatgccatayggttcccccaggtaggtatatgattcaataatgtttcataaatttactaaccatcacacaatccagttttagaacacacacagttttaaataatttccat

SEQ ID NO: 34200 - DNA, 201 bp, Homo sapiens
tgagactccatctcaaaacaaaaaacaaaaaaaccctctcttcttcataaattacccagtctcaggtaactctttacagcagtgtgaaaatggactaatamacctgtgaatgtgacttatttggaaaaaaagtctttgcagatacaattaacaatcttggctgggcacgttggctcatgcctgtaatccaagcactgggag

SEQ ID NO: 34201 - DNA, 201 bp, Homo sapiens
tacaaacagtaagctcatcacctgatattattacatctgccacttagaagctgtgtgactggaagcactctgtgcctcagttacctcatctgtaaaattcrgataataatagtgctactctcataggctgatatgaggtttacattagttaatatatgtaaagcactttgaatgaattcagtaatatagtcagcaccatgt

SEQ ID NO: 34202 - DNA, 201 bp, Homo sapiens
tataaaaacaacttaagttcaagactatcctctccagtcttctattcatacttttatttaatttaaaaagactgttggaaactttcaagtttttacttgcrttagtttgtttctgccttatcagaacccataaaaatagtagtttttactgacattagtttgtttctgccttataagaacccataaaaatactagtttttt

SEQ ID NO: 34203 - DNA, 201 bp, Homo sapiens
cttagcaaataaacgtttcctctgtgggctgggggtgttacaatgtttttaaatagtgggattatcaagtttagggttttattggctcagagggcaagtgygaaatcttgagtctgtctggtgctggggtttgaaacctgatgcccatgtgtcacttgctttattaagtcaccaccttggaagggctgcttcctccttatt

SEQ ID NO: 34204 - DNA, 201 bp, Homo sapiens; identical to SEQ ID NO: 4458

SEQ ID NO: 34205 - DNA, 201 bp, Homo sapiens
gctggagtgcaatggcatgatcttggctcactacaacctctacctcatgggttcaagcaattctcctgcatcagcctcccgaatacctgggattacaggcrcccaccaccacacccggctaatttttatatttttagtagagatggggttttgccatgttggccaggctggtcttgaactcctgaccttaggtgattcacc

SEQ ID NO: 34206 - DNA, 201 bp, Homo sapiens
ggttttattggctcagagggcaagtgtgaaatcttgagtctgtctggtgctggggtttgaaacctgatgcccatgtgtcacttgctttattaagtcaccaycttggaagggctgcttcctccttattaatgaaaagcctgctccatttgttttggcttgcaccaacctaacagtgtctttaaatcagcgacagactgtttt

SEQ ID NO: 34207 - DNA, 201 bp, Homo sapiens
caaattgtttgattttatcagactccctctccactttcagaaacagctgagagggctgtcactgcactgagattagcatggcattccagaactcgggcccrgtaagcatccaggtccaagggtgccttggaggggtacacctcacctttgcagtccagggcagaggaaggcagggaggctaggagtgcagcactgagagag

SEQ ID NO: 34208 - DNA, 201 bp, Homo sapiens
tacagggtaaaactctggcaagatgctgtggtgacttatctgagcctaaaacaaaggagaaccatcccagaatcctagaaatctcccttcccccaaatcartgaagggaagtttcataatgatggacagagtcccagatggaaattgactacctgttctacagaaaggtcttcaattctaacagagaactctctgatcgca

SEQ ID NO: 34209 - DNA, 201 bp, Homo sapiens
agaactctctgatcgcaggaaaagctatctcaatttcaatgacttgtccactgacagaaaatagtgtaagaagggctcactctgggggagtgagaagtaargcattagaggaggaaagatgataactgagtgggaagaaagaaaatcatgaaggaccaacaggaggcacctgggtcgcagcccagggagcattaatgatcc

SEQ ID NO: 34210 - DNA, 201 bp, Homo sapiens; identical to SEQ ID NO: 4374

SEQ ID NO: 34211 - DNA, 201 bp, Homo sapiens
cacacacaactgacaaaagatccaagtttttctgtttccttctcttctgcttatctctgtttctcccatctcatcctctgactgctacactcttttctgcrtgtatttaagctaattagatatgtagatcagaatgtggggctgttggtcttcagaccccatgaaggggaaatcactggagtgactgagaaacatcaagga

SEQ ID NO: 34212 - DNA, 201 bp, Homo sapiens; identical to SEQ ID NO: 4376

SEQ ID NO: 34213 - DNA, 201 bp, Homo sapiens
ctctgtttctcccatctcatcctctgactgctacactcttttctgcatgtatttaagctaattagatatgtagatcagaatgtggggctgttggtcttcaraccccatgaaggggaaatcactggagtgactgagaaacatcaaggagtgaatgagagccccaggtggtgctggcattttcatttactggcttgatcatct

SEQ ID NO: 34214 - DNA, 201 bp, Homo sapiens
gaacaatagggtatctagttgctgcaaagaatagacttataaataaactaatatcagatggagaaagttttggcatgggtgtagaatggcctcctggtatwacttcccctcccatcctcttctggtgtggtgcctgttcccggctagggggtgttctgtaagtgtgtcactgccatgtactaaccctggtcttttccctct

SEQ ID NO: 34215 - DNA, 201 bp, Homo sapiens
aggggaaggaatcttgttaattcaaagtacagaaactgaaagcaacgttttgaattaacaaagtacggcttatctgatatttttattagtgaacaataggktatctagttgctgcaaagaatagacttataaataaactaatatcagatggagaaagttttggcatgggtgtagaatggcctcctggtattacttcccctc

SEQ ID NO: 34216 - DNA, 201 bp, Homo sapiens
gggatgctgaccagagtccaaatcacagcctcctggatgttcagccccatctttacttttagcgcaggatctgccctcagtggggttttccagtgtgctckctctctctttctcatcccatgacttcattactgagaggtcatccaaccactctgtctcatcttagaacaagagaagacctcgtcggttttcctgggctac

SEQ ID NO: 34217 - DNA, 201 bp, Homo sapiens; identical to SEQ ID NO: 4378

SEQ ID NO: 34218 - DNA, 201 bp, Homo sapiens
gccatgaacaaacattcttgctaacaattcttgctctaaattggttgatataacatccacttgagtcaaaatgattaagtaggtatccattgagtgtcatrcatcgcaatggcaaagcattggagttacagaaaataagtaaaatcatctcccttgctcttacagatctgacagtctaggcacccaatagatgggtaaaca

SEQ ID NO: 34219 - DNA, 201 bp, Homo sapiens; identical to SEQ ID NO: 4379

SEQ ID NO: 34220 - DNA, 201 bp, Homo sapiens; identical to SEQ ID NO: 4380

SEQ ID NO: 34221 - DNA, 201 bp, Homo sapiens
ctttgtagcaacatggatgcagaaggaggccattatcctgcaagaattaatgcagaaacagaaaatcaaatactgcatgttctcccttataggtgggaacyactacacatgggcataaagatggaaacagtagagactggggactctaaaagaaggggcaatagagaaaggagaaagggttgtaaaactacctattggata

SEQ ID NO: 34222 - DNA, 201 bp, Homo sapiens
tggatatctacccaaaggaaaataaatcgtcttatcaaaaagacactcacactcatgttttctgtagcactattcacagtaggaaaatcatgaaattaacstaagtgttcatcagcggtagactggataaagaaaatgtggcatatatacaccatggaatactacatagtcatataaataatgaaatcatgtcctttgtag

SEQ ID NO: 34223 - DNA, 201 bp, Homo sapiens
ccttcccccatcttttcctccctctctttcttcttctccttcctcttcttttttcttccttctccttccccttctcttcttcttcttcttcctcttctttyttttttttttttttttttttaaagaaacaaccctttacaagtgtaaaaccactcttagctcctctggccatacagaaacaggctcaggctgtctttggcc

SEQ ID NO: 34224 - DNA, 201 bp, Homo sapiens
agtgggaagatcccttgagcccaggagttctaaggtggcagtgagctatgatcacaacactgcactctagcctggggaacagaccaagacattgtctcttaaaaaaaaaaaaaagtaggtaaagattgaaacaggctggcacacggttagaactcagtactaaaatataaaggagataacatattgcccactaacattttg

SEQ ID NO: 34225 - DNA, 201 bp, Homo sapiens
tgaagccaggatctgtcccatccaggaaaggagaattggcaggagttggggacatcttgccatgggtgaatactcctctgagaagggagaagggaggaggmagcttacagacagaaccatgagggagggacaacatggagcccaaagccctgctcctgagttgctgggtctggatctcggggtcagggttgtttgtgagat

SEQ ID NO: 34226 - DNA, 201 bp, Homo sapiens
caggaaaggagaattggcaggagttggggacatcttgccatgggtgaatactcctctgagaagggagaagggaggaggaagcttacagacagaaccatgarggagggacaacatggagcccaaagccctgctcctgagttgctgggtctggatctcggggtcagggttgtttgtgagattggagaggcagcagaagtagcc

SEQ ID NO: 34227 - DNA, 201 bp, Homo sapiens
cgtgttgtcctggacttttcaagaagccgataactcctaggtagaaccaggaacccaactctactcgtctgtcctacgtagggtctacaaggcagtgtaayacaccacgccctgcaccctaactgatcatagtcagccgtggtgaccacaggatggttcatccttcttgctggttcccagcatccttcttgctggttcgca

SEQ ID NO: 34228 - DNA, 201 bp, Homo sapiens
taggtagaaccaggaacccaactctactcgtctgtcctacgtagggtctacaaggcagtgtaacacaccacgccctgcaccctaactgatcatagtcagcygtggtgaccacaggatggttcatccttcttgctggttcccagcatccttcttgctggttcgcatgtgctcttttggcacttatcactcccacattctgga

SEQ ID NO: 34229 - DNA, 201 bp, Homo sapiens
agtgggtaagcaaatgccacacaaaagaaggcacatagtgcacacttgtaccatcatctaacgtctgcatggttctattgcagggctatactttcttatcrgtagatacatggaaatggaaatgcacctgcttttaaatatatacttaatgcacaagtgtcaatgatatagttttcacctgaagaaaatctagagccatca

SEQ ID NO: 34230 - DNA, 201 bp, Homo sapiens
cagggagctatctcctggaggaggctgagacataagccctgggaatcacatgttctttcagatggaaaattccctgtctgtaagtagtttttttttttttktttcttttttaaactgctaaaacattgagtatgcagacacacatgtgaccagtccatgagatctcacatgggctccagcctccatcttatttgaatgcag

SEQ ID NO: 34231 - DNA, 201 bp, Homo sapiens
acacttgtaccatcatctaacgtctgcatggttctattgcagggctatactttcttatcggtagatacatggaaatggaaatgcacctgcttttaaatatrtacttaatgcacaagtgtcaatgatatagttttcacctgaagaaaatctagagccatcaaagtacagggcgagacatactatatgagcctgaacgattgt

SEQ ID NO: 34232 - DNA, 201 bp, Homo sapiens
gagctatctcctggaggaggctgagacataagccctgggaatcacatgttctttcagatggaaaattccctgtctgtaagtagtttttttttttttgtttyttttttaaactgctaaaacattgagtatgcagacacacatgtgaccagtccatgagatctcacatgggctccagcctccatcttatttgaatgcagaaag

SEQ ID NO: 34233 - DNA, 201 bp, Homo sapiens
tagttggatatgcatttttgagagagtactccactgtagtatatgaagtaatttgaattgggagggatggggagtgggcagtaagaccactcagaggtggytatcttgatactgatccaagaatgaaatagggatagactgacatgagagagtggctgtggagatggtgaagaaggcatggatttgatagttatgtggttg

SEQ ID NO: 34234 - DNA, 201 bp, Homo sapiens
cagaatcctcttgtttaaaagatggaaaatgagaagtactgactaatgggaggaatgttaagaataccgatagctcaacccttaaaaaaaaaaaagcctayataaaagggtggataaaatgaagtcattcacttaagttggtccatggcatttttcatgaagcaatgattgggttgagtgatcaagattaccatttccaga

SEQ ID NO: 34235 - DNA, 201 bp, Homo sapiens
gtatatgaagtaatttgaattgggagggatggggagtgggcagtaagaccactcagaggtggctatcttgatactgatccaagaatgaaatagggatagamtgacatgagagagtggctgtggagatggtgaagaaggcatggatttgatagttatgtggttgaattgctggaacttggtactgattgagtaaagggtgag

SEQ ID NO: 34236 - DNA, 201 bp, Homo sapiens
taaatagcatagtttgggttttaaatgcctgtgtttgtaatgggttcaaagattttaaaatactaaaatttagaaagttgaaagaagtgctggaagaggaraaaagattttccctctgctccttggccaaccatcaggcagtcatttcatgtgccttcctgtttcacctagggttcttggtcccaagcaacagaaatagat

SEQ ID NO: 34237 - DNA, 201 bp, Homo sapiens
gatcagggattctgtgtcagctattggaagtttgaagtaattgattagtatcttgatgagcttcaacaatttcagtaagtttgggtagcaaattgcacccytttttttttttttgaaatggagtctttctctgttgcttgggctggaatgcagtggcgcgatctcggctcactgcaagctccgcttccccggttcacatca

SEQ ID NO: 34238 - DNA, 201 bp, Homo sapiens
attctgatgcagatttctgattaggaaccatgttttagtctttctcatctttcacagtttctttacaaacgatttctatttttctgaagccccaaccctaygccatcagtcttaatcaatgactctttgttcaattgggaaaaccagtccatctgatgcaaattcacttaacctctctcctgagagttgaactcaaacttt

SEQ ID NO: 34239 - DNA, 201 bp, Homo sapiens
caaggctaactggctaatgtgatgctcatctgaatgtcctcttgactaattagagactttgactaatattcaccttcctttttgactgtatctttggcctmatttccctgttgtctaatttgctttgacccccaaacatccaagtcttgcctgacctaaaaaccctttccactagaccctgcttcccatgggctatgttcc

SEQ ID NO: 34240 - DNA, 201 bp, Homo sapiens
ctctctactcactgaggtcttagggaggcaaccgtacataagattttctgaaatttgggatctggtctacagccgtaccaccctgaatatgcccgacctcrtctgaaacttgggatctggattaggaaactgcttgaaaaccagaatctaagatgtgatttccaatgggcctgtcgtagggtcttcagtgaatatctacac

SEQ ID NO: 34241 - DNA, 201 bp, Homo sapiens
tccgggaggccggtctcagacaccacagagccctcatccccagaagggaaggaagagagcctagctacagagccagccccaggtacccaaaagaaaaagcrctgtcaatgctgtgttgtcatgtgaccacttctttcttctcctttcttctgggcagcctgtactctccaccactcacgtagacctcactgtaccactaac

SEQ ID NO: 34242 - DNA, 201 bp, Homo sapiens; identical to SEQ ID NO: 4434

SEQ ID NO: 34243 - DNA, 201 bp, Homo sapiens
aaagatgggattgtacccccacatgtagagtaacgctctgccttgtttttgttcctacagggtttctccagtacggatggaggtaagtgctctctgcccckactgtagatgaatgttttaatcctggtcagcttagggggtttcattaacaggggcttaaggaagaggtactgtgttgatttgtaaaggcatcagaagaag

SEQ ID NO: 34244 - DNA, 201 bp, Homo sapiens
agccatcctcctacctcagcctcccaaatagctgagattataggcatgagccactgtacccaggtatattgtattttcttaaagcaagtcatggtataccygaaagaaaccaaatataaggcactgtagatgaatcccagtgctgttggcagaagggacagggaggccacatgtgaaccaggggtcactggccctgcccca

SEQ ID NO: 34245 - DNA, 201 bp, Homo sapiens
aaataatgagatgatataggaatctctgctctagtggtgggtctgaggtttgctctagtggtgggtctgaggttttctctactgagggcaaaattggagctttttttaaaaaaaaaaaaaaatttaatttttttttgagacagggtctccttctgttgcccaggctggagtgtagtggtaccatcacagctcactgcagcc

SEQ ID NO: 34246 - DNA, 201 bp, Homo sapiens
gagccatacagtgtctatgggttgaaaaacgaaattcagaaagcaaatagttggtcaccttagagcccagagggatgctcagaattccctaacctcacagyggtgactactgaaagtttcattctgttttatgacttgacttgcagcgaggaaggtagcacagctgtaaaccagctgtattttatttacgcttggaaacag

SEQ ID NO: 34247 - DNA, 201 bp, Homo sapiens
ttgcagtgtgctatgcaaatgggaatatttttattgggacttgaaaagagaaaaagagcttaaactgaagcatgaaagatttccattagagttttgagagygtcagactctcaaacaataatatcagggatgcagtggaaaagtttctaagcatgtactgagtacccaccattgagggtgctacaaggcaacattccctcc

SEQ ID NO: 34248 - DNA, 201 bp, Homo sapiens
ttcattagttgatccttctttaagctttgagtaattcaggaattggtcttcattgggacaatggaccgcaattttcagaaccataatcctagttttttagtttttttttttaaatttttatttatttatttatttattttttgagacagagttttgctcttgttgcccaggctggagtgcagtggcgcaatctcagctcac

SEQ ID NO: 34249 - DNA, 201 bp, Homo sapiens
tccaaggctctgagaccctctttctcaaacgcctcaaatctgaaatgtcttggagacttcaccactgaagtgagagagatgtttgctggcaatattgaaaygccatggtttgcctattaggtaatctttgaacgtggtgctctgaactcagaaaggttgtttttttcttctttctctttccccctgtgcatgtgtattttg

SEQ ID NO: 34250 - DNA, 201 bp, Homo sapiens
tcaggaattggtcttcattgggacaatggaccgcaattttcagaaccataatcctagttttttagtttttttttttaaatttttatttatttatttatttmttttttgagacagagttttgctcttgttgcccaggctggagtgcagtggcgcaatctcagctcacagcaacctccacctcctgggtttaagccattctcc

SEQ ID NO: 34251 - DNA, 201 bp, Homo sapiens
attctcttgagcatataagaatacacacaaatactcacttgtgcctcttcagttattgaagaattgagtttgtcctgtgtatctggggagctgttgattaytctcatgaatgtgcacctaatacagtctgccctccctattcatgggttccatatccacgccttcagtcaatcttggattgtaactattggaaaaaataat

SEQ ID NO: 34252 - DNA, 201 bp, Homo sapiens
tgatgcagcagttacaagtagtaaaatagatcagtatgtactgacatgaagaaaatagacttacacataccttatgtaaaggaggtgaggaaaaggaacawtggtcttttctgtattattagaatttgaatatcaaaattggattcatatattacttatataattaaaaaattaagttagtcagacttagaactctttgaa

SEQ ID NO: 34253 - DNA, 201 bp, Homo sapiens
gctggtgatgttagctgcttccttggcgtctgagttctggcttgtgagcagatcttatgcccaatacatcagaaactccatgtctccttcagttgtagtcrttgggagaatccatgggttgactggagcctaaggaaagcaccaaaaagtcactagaggcactggagtggatatgaccttttcctttgaacagcagtttgc

SEQ ID NO: 34254 - DNA, 201 bp, Homo sapiens
tggcgtctgagttctggcttgtgagcagatcttatgcccaatacatcagaaactccatgtctccttcagttgtagtcgttgggagaatccatgggttgacwggagcctaaggaaagcaccaaaaagtcactagaggcactggagtggatatgaccttttcctttgaacagcagtttgcacaacatataccggtggctttgt

SEQ ID NO: 34255 - DNA, 201 bp, Homo sapiens
aacccacagcaaggccacttgatgtctcagtctgtagagtaggtgcttaataattgtctttgacgagttaatgggtgcagcacaccaacatggcgcatgtrtacatatgtaacaaacctgcacattgtacacatgtaccctagaactgaaattataatgaaacaacaacaacaacaacaacaaaataataataataattgt

SEQ ID NO: 34256 - DNA, 201 bp, Homo sapiens
caaccaaaaagccaagctaactctgttttgatccatccactcttcttaccatttcccatgtcattttaaaagcctcctaatattgagactccattttgatrtatcaggatagaatgagaagaacccaccttcaaatcctggctagggcacttactaggcaggtgatcttgggaaacgtccctctatttctctatacctctt

SEQ ID NO: 34257 - DNA, 201 bp, Homo sapiens
acatggcccttcacttcttttgtaaacggacataattgatccaacacagcatgattgctttctagtgcagcaattttcagaatactgccttctcaaagatrtggttctcctgattgattatgaaatgagataaaaatataagtccttggtttaataagtgatgaacaagcccataaaatactaggtttttacttttgctag

SEQ ID NO: 34258 - DNA, 201 bp, Homo sapiens
cgtgtgtttgtttgtgtgtgtgtgtgtgtgtgtgtgtgtgtgtgtatgtgtgtgtgagagagagagccaattaagagacagagggagttgggtggggggamttatggccacatcggtaaatggttttatgctatgctttggtctagtgcctactcttctgaattctgcaaaccctgactctctcatcactttcctggagtt

SEQ ID NO: 34259 - DNA, 201 bp, Homo sapiens
atcactttcctggagttctcaggggaccctgaggagatcacaagcctgcccccagaacctagcactcctgaagtctctctggagatgtgagggaagaagasaataggtcctcacatcttcacttacttgggcttctctctcagaggcagagaatcgactgggattccagtctgcagggccttgggcagtctttagtctggg

SEQ ID NO: 34260 - DNA, 201 bp, Homo sapiens
gagaaattgaccagtctccttcactaggaatgtgggtcaagacacagggaagccttgtttccagtgaaggggtggggagttccagaagtattttcatcccrtcttcagacctgtacctgaggcataagacagagagaatagcagaacagtgattactcttttgaccaataccgtagaagctctcagaaaaaaaggctggac

SEQ ID NO: 34261 - DNA, 201 bp, Homo sapiens
aaggtttagttaggatggaggtgaagcacctggcaggtagctgtcattggatggtgttgagcagagcccttagcttttgtctgtattgctgtcttgtcctrtggggggtcagaagcaacatctctgaagtggaatgtgtattaatgactttttttttttttagacagagtctcactctgtcacccaggctggagtgctgcc

SEQ ID NO: 34262 - DNA, 201 bp, Homo sapiens
gatatcatgaagataaataaagatatagctattaaaatgtttgaaatttcagggaaaattgcaatgtaatgaggatgatgatgaggattagctaattagagttattgtttattgagtatctactaagtaccagactctgttctaggcatttaatacactttgtgtttaattttcaaaacaacatttaaagataggtattat

SEQ ID NO: 34263 - DNA, 201 bp, Homo sapiens
gttgcgtttccccagcacagtcaaattctgggctggggcatgggagaaagatgggttaagtctttaaagatgggaaaagatgggattgtacccccacatgkagagtaacgctctgccttgtttttgttcctacagggtttctccagtacggatggaggtaagtgctctctgccccgactgtagatgaatgttttaatcctg

SEQ ID NO: 34264 - DNA, 201 bp, Homo sapiens
tttacttctgcccgtctaccaaccaaacacgtatctgtgttctcatataagcctgcaaaattttacaccctgcctttcagggagacaggccacatggagcrcatgacctcttgtagtcgtctcctcacagtccttcccactgtgagagaaggaaacttgcagacccccaactggatctgggagcatatttttaagcacagt

SEQ ID NO: 34265 - DNA, 201 bp, Homo sapiens
ggtgaatcagggtgatggcttttcagttgacattggaagaatgaggaggaaggaggaagaagtggcagccgggtaggacagcaggtcttctctgtcccccsagttcttctgatgtcctgcacagaaacctgaggggtagagtagcaaaggagaaatccaagctcaggctgggaaagaagctcatggcaccaaggttagggc

SEQ ID NO: 34266 - DNA, 201 bp, Homo sapiens
tcaccatagactctaattagtctgaggactctaattagttctgctaaaaagtctcactgctattcggtgacaaagctcctataatgtggcatgcatgtagrcagttgtagtttccaaaaaagaaagaagtaggtggagcataggatgctcaaagtagacaatgatcaaagacttttgagagtcatcagtctaggaaagtta

SEQ ID NO: 34267 - DNA, 201 bp, Homo sapiens
tgtatgtttggttaaattatacttggttgtttgcataggctgtctctccctgagacgctcacctcacttctctatgggtcagcgaaacacataccctgtgkaatcacctcccctataaaaccccatggcaacctcttccaacaattcatcctttgcattccatccaagtatgtcttgttatatccatagcatttagtgcat

SEQ ID NO: 34268 - DNA, 201 bp, Homo sapiens
ctctccctgagacgctcacctcacttctctatgggtcagcgaaacacataccctgtggaatcacctcccctataaaaccccatggcaacctcttccaacarttcatcctttgcattccatccaagtatgtcttgttatatccatagcatttagtgcatttattatttcctctcctgctttcctctactagattttgagagc

SEQ ID NO: 34269 - DNA, 201 bp, Homo sapiens
tgcttgtggtgaatgtaattcagggtgtcttaggactatcctgctcattatgaatagaggataaaaacagatttctaagttctccatctgccataaaattmtgggaagaaaaaatatgaagtattcctttctgcacacacagaagtcttccattttgcaattttctatctagtctgctgtcctttctctctcttctttatc

SEQ ID NO: 34270 - DNA, 201 bp, Homo sapiens
taggtaattgctctctaactcaaccaaaacaaatctaaaccacatcaagtcagcaccttaatttgggaaattcctcttattagaaaagaatctttaagaasctatactcaaggtatgcaaatctgaaatgcaaacctgatatgaagcccaagcctaactcatgtcagtcaggatgtttgagttgatcctgatttattatta

SEQ ID NO: 34271 - DNA, 201 bp, Homo sapiens
gtcgatccttcatttttatgaaaagatgcaatgcaaaataaccttgatttagaatttaatgaggctgacatttaacctgagttcagttaggaagacaaacraaaaacacagacaaagttgagagaaggaaaataattacctacttgaatagtgtgggcaattctccatccatatgccccaggagaatatgaggtgggagat

SEQ ID NO: 34272 - DNA, 201 bp, Homo sapiens
gtctgtgtttgagtgctaatgtcgacaactttgaggccaataaataccaaatggggctctaggatttgggcaactgtgatagtgtgtgtgtcctgcatgtsacatgagaaagagagaggccgggatttaagaaaggtgcctcttggctgggtggcatgaactcagtcagctggctttccccaggcacctgattggccttaa

SEQ ID NO: 34273 - DNA, 201 bp, Homo sapiens
gatactttatgaacattttaagggattctcatgagtaattttgattatagacgatttttactttatgcattgactaggaaccaaatgcaactttcttagaragacacaaaattcattgtccaaatagaccatagggtcagcaggctttgtaaacatgttttgtatgtgcctaggggttgagagcaggggcgggagaggttc

SEQ ID NO: 34274 - DNA, 201 bp, Homo sapiens
ttaccacttatgaagtaaccatcggtttccaccactaaaagtctcctatggtcacaaagtcctttgtgaaaaaatccaaaggcaaagagagaggcaggtcygccccatacagaagttcaagctgtgcattgcacaactccaaggagtgtctatcacatagcaagttatataaatggtgccccagagtttgatagtccgcaa

SEQ ID NO: 34275 - DNA, 201 bp, Homo sapiens
gggttggagggaagggctcccagttccggagagggtccatgtgccagccaccctgctgaatgccttatgttaggggggtgagatctcagatgtgcacaggwaccaggttgacttggctgagcttttgggactgtggtagccaagagagggcagactcctgaggggacagagagtgctcaactccaactgatgggcactgtg

SEQ ID NO: 34276 - DNA, 201 bp, Homo sapiens
agagagacacaaaattcattgtccaaatagaccatagggtcagcaggctttgtaaacatgttttgtatgtgcctaggggttgagagcaggggcgggagagrttctggtccgttcatcaaaccaggggctggtgttaatgtttgatcaacaaaacacatgtaggcctaggctctgatctaggtccaactgccaacatagcct

SEQ ID NO: 34277 - DNA, 201 bp, Homo sapiens
tcatatcctcctgtttttgcattggggcatagttcatttcaaaaaggactttcctggtgattgaatgaatgtgcatcttatctgaatctggaatcacgttygcctaatttgaagcatggagaaaattctggaccttcttatcttcaaagagagcaataagcatttgttggtttaaacaagacatcatctgatgataccaag

SEQ ID NO: 34278 - DNA, 201 bp, Homo sapiens
ctaggggttgagagcaggggcgggagaggttctggtccgttcatcaaaccaggggctggtgttaatgtttgatcaacaaaacacatgtaggcctaggctcygatctaggtccaactgccaacatagccttttcatgcctgcctttcctacttcaggtagagagaggagaaaaaacctattgaggaaaaaagaaagaataat

SEQ ID NO: 34279 - DNA, 201 bp, Homo sapiens
gctgcttgggaggatgaggcaggagaatggcatgaacccgggaggcagagcttgcagtgagccgagatagcgccactgcactccagcctgggcaacagagsgagactccgtctcaaaaacaacaacaacaacaacaacaacaacaacaaaaaaaaaaaaacactacctggtagtgtttacagccttgagtgcccagaccaa

SEQ ID NO: 34280 - DNA, 201 bp, Homo sapiens
gaactttaagcacacttagtgaaagactaaaggtcagagagcacaccagccacattccctgagtccaagcagggagccagagaggagtggtttctggccarccttccctgttcagttacctcatggaacccttgggaccagggccttgatttacaaatagagtggccaccaggtaaaagttgcccatggccagtggtagca

SEQ ID NO: 34281 - DNA, 201 bp, Homo sapiens
tatgacaaagagaaagaaaaatatcttgcagatctcagctgatatcatctagctgcatggcgtgggcaattttcggagcctaattttcttcatctttaaakgggaaagtttccagagagtcactagatccctgctagacgtgactattttatgatttcataaatgtttggaggactagagggtctaagacagcaattgact

SEQ ID NO: 34282 - DNA, 201 bp, Homo sapiens
taagcacacttagtgaaagactaaaggtcagagagcacaccagccacattccctgagtccaagcagggagccagagaggagtggtttctggccagccttcmctgttcagttacctcatggaacccttgggaccagggccttgatttacaaatagagtggccaccaggtaaaagttgcccatggccagtggtagcaggatcg

SEQ ID NO: 34283 - DNA, 201 bp, Homo sapiens
gtccccaaataaatggaagaaatggtgcaaaatgcaagctacaaagtaggtgtttgatcatacacattcatattttattatttaatttgattcaatcttarggtcagagctaacagaaataaatatatttattattattattgatcaataattattagaaccataaagaagtgtcctcacactcagagtctagtgtgctag

SEQ ID NO: 34284 - DNA, 201 bp, Homo sapiens
tggtctgcctggaaatttccaaagggactttggtgccttaataaatattttcaaattgctcaaggttttggaagatagcagagccataattgtgaaatcgrgttaaagaatgattgctgcagtacttgcgtcggccctgtggccatgctgaagtggacagggttgtggacactcacaattgctcactgcagatggacagcc

SEQ ID NO: 34285 - DNA, 201 bp, Homo sapiens
gatgaattttgggaggacacaattcagcccatatcagatgtgctctcccttagggggttctaagacaactggggcatcagccttaaacatgaggcgatagragcggctcttgtatttctgtctttagtcccttggtctgcccgttagtccttctagaaggagtccacttgacagatcatgatgcccttcagaagtacccag

SEQ ID NO: 34286 - DNA, 201 bp, Homo sapiens
gttgtcaacctgttttcatcactggatgtttagaagccttggataatatcaaaggtatctatgttggagaccatgggcttcaatttctggctgtcttttgrcatttagaacctaaacagctctgggctggtagacatcactgacatgactttattgttcccatgagtgaacatctgcatgagatcaaaagtagtgatttca

SEQ ID NO: 34287 - DNA, 201 bp, Homo sapiens
aagcagcagcaaatgctatcagcctggaccatgagattgcatgtgccctgcagtgatcttccaccttgactgacattaaaactacctggtagtggccgggygtggtggctcacacctgtaatcccagcactttaggaggccgaggcgggcggatcacgaggtcaggagatcaagaccatcctggctaacacggtgaaaccc

SEQ ID NO: 34288 - DNA, 201 bp, Homo sapiens
tttcccattcccaagcaacattccaaagttctcacttcctggttaaccttcccaatttccaactctgttttctgccctacttcgtttgcttccttaatgtrttaggctgttcctgcattgttataaagaaatacctgagacagggtaatttatgaagaaaagagctttaattggctgatgattctgcaggctgtatagaag

SEQ ID NO: 34289 - DNA, 201 bp, Homo sapiens
tcagtctcccaaagcgctgggattacaagtgtgtgccaccgcatctggccaaggctaattacatttaagatgataattgtatttcccaaattaaaaaaaawatttccaagtcactgaatattaaaaacacgagctgtgggcctattctcttcaggccagggttcttaggtcaacctcagacaacctgaaagtgagataaat

SEQ ID NO: 34290 - DNA, 201 bp, Homo sapiens
ttcccttttagaatatcatcttttcctgtccctccttgggtctcacaacatttcccttgtgccaaatactgcccctacccttcaatctaaacactccccaratttcatccccggtaggaaagcccactttgaatatgagtgaaatagggactccattccccttacttactgtaaccaacttatatttataaacatttatta

SEQ ID NO: 34291 - DNA, 201 bp, Homo sapiens
attaaaaaaaatatttccaagtcactgaatattaaaaacacgagctgtgggcctattctcttcaggccagggttcttaggtcaacctcagacaacctgaamgtgagataaattctgcagttagtgtgaattattcagactatcagaatctgccaaatcaaattccatttcttcaagaacttatttccagtcagagtacaaa

SEQ ID NO: 34292 - DNA, 201 bp, Homo sapiens
ctccattccccttacttactgtaaccaacttatatttataaacatttattaaaagagggaattaaattcacttcttttatgttttaatttaaccaacaaaygtttgttgagattagcactggtcaacaaaacagtcatgattctctttgtctgatgagagatagatgttaaatcagtaaatatgtgtgtatactgattgaa

SEQ ID NO: 34293 - DNA, 201 bp, Homo sapiens
ctgtaccatgtcagtgttcttgtgtggtacatgaaacatcaggcaatggcaggtacttgctgccctcctgggtgggttgggtatgagatccatgtgtttgyaggaatgcactttaacacctgcagttattaatttgatgccacacctatagattttgcctcacacttctctggaatggtcttcaaaacagtatgggatcca

SEQ ID NO: 34294 - DNA, 201 bp, Homo sapiens
gagaaagtgtctgttgcccaaccagaggcctcatgctgtccaaatatagagattataagctgttcaggtgtgtttcagaactagtatagaaagggaagctkctttggcctcctttagatttgtgactagttttgtagtacattgaaccttatgaaattgccattttgtagatccataatattgactattgacagttccata

SEQ ID NO: 34295 - DNA, 201 bp, Homo sapiens
taacttgatgtacatcatcactgtcagtggtcgtggtctgtgctcttgctctgtctacttgtcactttctcagagagccctagtaagccacaaggtgcaawtgttcagaagacagtgaaaatcacttacaaagacaaagcttaaaatatctcattgacttttaaaagtgatcaagtgattgttttacagttcatcaaattt

SEQ ID NO: 34296 - DNA, 201 bp, Homo sapiens
tgttggttgtttctatgaacaaacaagttgaatgtgtataaaattatagaatcatgtttttagcccctcataattctccaagatgtcattccattgtgttytggcattgacccttgctctgggaaggtctgaggctagactatttcttctttgtagatggcttgcctactcccatccctcccactcctgcaattttttttt

SEQ ID NO: 34297 - DNA, 201 bp, Homo sapiens
ggggtggaggagggccaagttccaacctcagttgtctttacttcctcccacacagagagctatgttatgaaagtggtgtggaggccgggcgctggaggccrggtgcggtggctcatgcttgtaatcccagcactttgggaggctgaggcaggtggatcatgaggtcggaagatagagaccatcctggccaacatggtgaaa

SEQ ID NO: 34298 - DNA, 201 bp, Homo sapiens
aggcaggagaatggcatgaacccgggaggcagagcttgcagtgagccgagatagcgccactgcactccagcctgggcaacagagcgagactccgtctcaamaacaacaacaacaacaacaacaacaacaacaaaaaaaaaaaaacactacctggtagtgtttacagccttgagtgcccagaccaataagatcaaaatctct

SEQ ID NO: 34299 - DNA, 201 bp, Homo sapiens
gccatgttgcccaggctggtctcaaactcctgggctcaaggagtcctcccatgttggccttccaaaatgctgggattataggtataagctactgcacctgrcccaaaaacaactctttcagaaaaatgtgtggcttcttgagatacaaaccctagcaaagtatcttttttaaaattattattatactttaagttctagggt

SEQ ID NO: 34300 - DNA, 201 bp, Homo sapiens
tagcagagccataattgtgaaatcgggttaaagaatgattgctgcagtacttgcgtcggccctgtggccatgctgaagtggacagggttgtggacactcamaattgctcactgcagatggacagcctttgcttttctggtcatacatatgcttgatcctgaaattctctagatgggctacttctgagcagctgcttggaga

SEQ ID NO: 34301 - DNA, 201 bp, Homo sapiens
aaagacccccttgagcctcaaaggatgttcgaagcatgattcagttggggagttattggtcaacatggtgggacaattcttcactgtgtgggactgccctmaacagtacagggtacttagcatgtctgccctcccaatgctgagtaccagtggtgctccacagtcactgtgacaatcaagaaaagtaatgattgccacatg

SEQ ID NO: 34302 - DNA, 201 bp, Homo sapiens
agagcttgcagtgagccgagatagcgccactgcactccagcctgggcaacagagcgagactccgtctcaaaaacaacaacaacaacaacaacaacaacaamaaaaaaaaaaaaacactacctggtagtgtttacagccttgagtgcccagaccaataagatcaaaatctctgaaggtgaggcctgggcttggtgctttttg

SEQ ID NO: 34303 - DNA, 201 bp, Homo sapiens
atatgcttgatcctgaaattctctagatgggctacttctgagcagctgcttggagaatgggaagccaaccctatagtgtaaggtttcttaactgaagtacyattaacactttgggatagataattttctgctgtctgtggggccgatcttttgcattataggatgttagtggcatccttggtctctatccattaaatgcta

SEQ ID NO: 34304 - DNA, 201 bp, Homo sapiens
tggcacttcccaatcatcatgtattgggatgtgaagttgtgtggagtctgaggctgacccctggtagtgtgaggaccttgggggattgccttggaaaatasagggtccagcccaaggctctggctttcagggtcgggggttgagatgaatttgtcacagctccacctgagctcaccacactgggaagtcaaacagaggcaa

SEQ ID NO: 34305 - DNA, 201 bp, Homo sapiens
gcttgcagtgagccgagatagcgccactgcactccagcctgggcaacagagcgagactccgtctcaaaaacaacaacaacaacaacaacaacaacaacaamaaaaaaaaaacactacctggtagtgtttacagccttgagtgcccagaccaataagatcaaaatctctgaaggtgaggcctgggcttggtgctttttgatg

SEQ ID NO: 34306 - DNA, 201 bp, Homo sapiens
ggtttcttaactgaagtaccattaacactttgggatagataattttctgctgtctgtggggccgatcttttgcattataggatgttagtggcatccttggyctctatccattaaatgctagtagcacaccccactcttcattgtgacaatcaagaaggtctccagacattgccaaatatcctttggggaaaaaaataaccc

SEQ ID NO: 34307 - DNA, 201 bp, Homo sapiens
gtagtgtgaggaccttgggggattgccttggaaaatagagggtccagcccaaggctctggctttcagggtcgggggttgagatgaatttgtcacagctccrcctgagctcaccacactgggaagtcaaacagaggcaacagcttctgtttgctaagtgttaccacatgctaggcactgtgttgagtatggtgaaggacctc

SEQ ID NO: 34308 - DNA, 201 bp, Homo sapiens
gtgaacatctgcatgagatcaaaagtagtgatttcagtgtcaccaatattgaaaaatacagaaattgaaattgtaggtaaacccctggatggttatagttmaggacagaaagacaaggagtgaaagaaactccgtgaaacaggaaatgccaagaaaagcctatagcttccctgacttgagacaaaggctgttgactagaat

SEQ ID NO: 34309 - DNA, 201 bp, Homo sapiens
tcagctcctatgtgaactctaactgatagaaagtgtccatctatagtgccgccgtgggaagatctttgaagctgcattttaggtgttggagaaaggacatyaagacagattagagctgtcttccatgggcaagagatgagggagttggcatacacgtgtaaggaaccttcttacctaacatttctgcggagattcactata

SEQ ID NO: 34310 - DNA, 201 bp, Homo sapiens
gaacagctccagtctacagctcccagcgtgagcaacacagaagatgggtgatttctgcatttccaactgaggtactgggttcatctcattggggcttgtcrgacagtgggtgcaggacagggggtgcagcacattgagcattagccaaagcagggcgaggcatcgcctcacccaggaagcgcaaggggtcagggaattccc

SEQ ID NO: 34311 - DNA, 201 bp, Homo sapiens
ggatggttatagttaaggacagaaagacaaggagtgaaagaaactccgtgaaacaggaaatgccaagaaaagcctatagcttccctgacttgagacaaagrctgttgactagaatctcttgattcttagtccagtgattattttctagcaatagggacttgctcaagcacaggaaattagttccaatatggtgggggcaca

SEQ ID NO: 34312 - DNA, 201 bp, Homo sapiens
tatagtcagcaaaatattagaaaactgtgatagataatgtgctttgattgattgatgtacagtcagcaaaatattagaaaactgtgatagataacatgggmtttgattgatgtacagtcagcaaaatattagaaaagttaaagataacatgcttttttattaagtaaaatctagtggcagttctaatacttactctaattg

SEQ ID NO: 34313 - DNA, 201 bp, Homo sapiens
gttccaatatggtgggggcacatggccaatttcaatagcctgttggaatagcctggagatgccctgttgcatactggcatgtttgattccttattgaaaamagataaaatatatacaattgcaaaattcatataattctgcaaaagtaatataatgtaaaggaaaaagaggaaaaaaagttctgctaccatgttaaaaaaa

SEQ ID NO: 34314 - DNA, 201 bp, Homo sapiens
caatatagtgagattccatctctactaaaaatcaaacagttcggtggctcacgcctgtaatcccagcactttgggaggccaatgagggcggatcacctgargtcgggagttcgagaccagaccgaccaacgtggagaaaccccatctctactaaaaatacaaaatttgccgggcgtggtggcgcatgcttgtaatcccagc

SEQ ID NO: 34315 - DNA, 201 bp, Homo sapiens
gttatataaaaagtctgtgattcctactcctaataaagtcatggtatattagtccaatctcacactgctataaataacttcccctgagactgggtaatttrtaaagggaagaggtttaattgattcacagttctgcatgtctggggaggcctcaggaaacttacaatcatggtggaaggggaagcaggcacatcttacgtg

SEQ ID NO: 34316 - DNA, 201 bp, Homo sapiens
atttctagggaatttctggccgttcaaaaatgtcatctgaacccaaagcttttatttctaagctgagctgaatccatcaccgagtaaagagcaggagggaraactcatttgttcaaatgcctgcaggtattggcctgagggaatatggggagaatagctattcccaaggataccctttttctttcttagtggttggccatt

SEQ ID NO: 34317 - DNA, 201 bp, Homo sapiens
atgggaacacactcactatcatgagaacagcatgggagaaactgcccccatgatccaatcacctcccaccaggttctgcccctgacacatggggattatgrggattacaattcaagatgagatgtgggtggggacacagagccaaaccatatcatataggtactaatgatctacctggggcttgtgcttacattcataact

SEQ ID NO: 34318 - DNA, 201 bp, Homo sapiens
tgccctctgtggggccaggtattttgtttttgtttttgtttttgtttttgtttttgttttagatgagtcttgctgtgttgcccaggctggaatgcaatggkgcgatttcggctcactgcaacctccgcctcctgtgtttaagcgattctgttggcttggcctcccaagtagctgagacaacaggtgcgcaccacaacatcc

SEQ ID NO: 34319 - DNA, 201 bp, Homo sapiens
aacagtgaaagtgagaaatctcagagtctcattggtctgacagctatgtaaggaactgaggggatgtaccattgcaaatcgtcaaaatggaaataccccaratgcaatgcaggactctggatgcgattctggaacaaagaaagaacacttgtgggggaaaaaaaatagtgcaacccagagtctttatttaacagtattgta

SEQ ID NO: 34320 - DNA, 201 bp, Homo sapiens
cacactctatttggcctgattggtcctttcatgtattcatttgtttattcaaaaaacatttattgagcacctactatgtattgctaggtctgtgctaggtrctgtagtgcatatctcttggtggaggtggcagaagagtccagaaaattttagtgcggtaacttatatggcgagaaacacataggataatgggacactgga

SEQ ID NO: 34321 - DNA, 201 bp, Homo sapiens
agaacagcatgggagaaactgcccccatgatccaatcacctcccaccaggttctgcccctgacacatggggattatgaggattacaattcaagatgagatstgggtggggacacagagccaaaccatatcatataggtactaatgatctacctggggcttgtgcttacattcataactgaaggcggtgctaaatgttagct

SEQ ID NO: 34322 - DNA, 201 bp, Homo sapiens
ctatactggtgattttgactcaggtctgggatgggtcctgagagtctgcatttctaaggagctcccatgtgaggccaatgctactttgggtaggaaggagmtaaatgatgacttgacatgggaaaagagaaagagggattgaagaaaacatttcaggtagagggaatggtgtgtcaaaaagcctagaggtgtaggagcatg

SEQ ID NO: 34323 - DNA, 201 bp, Homo sapiens
tctgtcttatccccaaacgccctgaattctcacttctttcttttgtaactgggcccctgctctgatggtttcctcctttcctttgcctgatgctacctctkttaccttcttggggttcttccccagcaaatttttctaggttctttcttctgcattcactttccatctctctcagctgggttgtgtcctttggccgctatc

SEQ ID NO: 34324 - DNA, 201 bp, Homo sapiens
ttagccccatggggctagagcactgctactgaaaaaaaaccaccctaactatatttgcagctttacggtgtgtaaaacttcagtttaaaaacaaaagggaraaaaggtctctgccttcaaagattataagctattcattcaaaaagaccaaacattgtaagaaataactggataattaatccataaagggcaagagaagta

SEQ ID NO: 34325 - DNA, 201 bp, Homo sapiens
ccaattactccccgaaggcctcaactccaaataccattacattagggattagggtttccacatacgaatgttggggaacacaacattcaggccatagcacsatcctaataaatggcaccactatccaaccagttgcacagactccaaacctagtcatcattgctgcctctagttcctcttgccctatagcctgtgtataag

SEQ ID NO: 34326 - DNA, 201 bp, Homo sapiens
atggaaacagttgctttgccaacttcaccttttttatcaggggctcttcttggattcttggactgtgtttgagatcagttcactcttgatatctcccctcsgcatggaaagcatccacaaatttccagctagagcatgaacttgcaatttggtttgcctagatcctggaagtctacagagttagaatctttcctggttctg

SEQ ID NO: 34327 - DNA, 201 bp, Homo sapiens
ccttagtatccctttacactgcttaacttttccataatgccctcatgactatgtaacattaaatatttatttatttatttattatatgtgaggagagcctygctagaatgtaaacctgatgaagacttcaaaacccctggaacagtgcttttgcacagagtaatcatcatcaatacatacttggtgaaaaactgtaaaaat

SEQ ID NO: 34328 - DNA, 201 bp, Homo sapiens
aggggcagaatcacctaaatcaatgggtatatatagttataacacttttgattcacatcaccaaatggttcaccagaagacttgcaccatttatatacatrcagataccaacagtatgtaagtctgttcctcaaaccttcactaatgctgagtgtgattgcttttgaaatcctgcccactttgatagtcaaaataacagcg

SEQ ID NO: 34329 - DNA, 201 bp, Homo sapiens
agcttcaatgtgttcatccacaaaatacggattagccctatttcacagagttgccatgaggatttattgagataatgtatgtaaatgtctacacattgtargtattcaattaataattgttaccatcatcatccatatcatctatatttcctgtcaaggaaactggcataccagctaagccagcaagcacatgcaaatagt

SEQ ID NO: 34330 - DNA, 201 bp, Homo sapiens
agcctcagcaatggcggatgcccctcccccagccaggctgctgtctcacagatcatctcagactgctgcgctagcagtgagcaaggctccatgggtgtggraggtgcacagccaggtacgggagagaatcaccttgtctgccggttgctaagaccttgggaacagcacagtatttgggcgggagtgtcctgtttttccagg

SEQ ID NO: 34331 - DNA, 201 bp, Homo sapiens
tattctgtcaggcttctttatctatgttcgtgaacaaatattgttgtaattttttttcttataatgcctctatcaaattttggttcagagttatgttggcmtcataaaactagctggaatggggtgtcttcctcttttattttctgaaagagtttaggttgaagtgctattgtttcttccttaaatgtttgatagaaatca

SEQ ID NO: 34332 - DNA, 201 bp, Homo sapiens
tcggctcactgcaacctccacctcccgggttcaagcgattctcctgcctcaacctcccgagtagctgggactacaggcatgtgccaccacgcccagctgatttttttttttgtatttttagtagagatgggatttcactgtgttagtcaggatggtcttgatctcctgaccttatgatctgcctgcctcggcctctcaaag

SEQ ID NO: 34333 - DNA, 201 bp, Homo sapiens
gagatcgtgccactgcactccagcctgggtaacagagtgggactctgtctcaaaaaaaaaaaaaaaagaatttttgccataccaagaatggggttgacttsgtcctgcattttaagacagaggtttcttctgcctcaagcccctaacttcagcctgaaatcatcaacatccatcacagtagcggaacaacctagaaggaat

SEQ ID NO: 34334 - DNA, 201 bp, Homo sapiens
atttattataagtcagagatataatgtcatttaatactcacaataagcttagaggtatacattattccaactcaacgatgcaattcaaatgttgttgaggrtttatgtgtggtaagccagggcaggcattgcactaagcacaatgtcacagtggggttgtagagatgaaaaggattcctgcctgcagataacatacaatcc

SEQ ID NO: 34335 - DNA, 201 bp, Homo sapiens
catgtagtaatttgatccaactttattctcttggaccagtcaagaccaattaaggagccaccatccatgccatgcctctgtttatcctaatgagaagtgcrtggattgataatgaaggctggcagcttaatgtagctcaaaacataatttgtaaactctaatgaccagaatgttagccataagaatggtataaatggaact

SEQ ID NO: 34336 - DNA, 201 bp, Homo sapiens
atgattgtgaggcctccgcagccatatggaactgtgattcaattaaatgtctttcctttataaattacccagtctcaggtacgtctttattagcagtgtgwgaacaaactaatacagtaaattggtactggtagagtgaggtgctactgtaaagatacctgaaaatgtggaagcaactttggaactggtgaacagggagag

SEQ ID NO: 34337 - DNA, 201 bp, Homo sapiens
gagtctttatttaacagtattgtatcaatgttaatttcttagttttgacaaatgcatcctggttatgtaagatgttaggattatgggaagctgggtaatgratagatggagagtttctgcactatgtctgtactgtttttgtaaatgtacaatgattccaaaataaaaggtgtatttaagaaacagaaatgccaagtgtat

SEQ ID NO: 34338 - DNA, 201 bp, Homo sapiens
tctcatggctgccacccacataattctaaaggtctcccaatgggagaacagccaccctggtaagtgtccagcatcatacaaggagtctctgcccattgtgrctcttgcttgagcccccacacttagccctcaccaagctgtgtgatttaggattcaggtgttagaacggagaaggcaccaggcctactgcaccatatcaat

SEQ ID NO: 34339 - DNA, 201 bp, Homo sapiens
ttgtgcacactatcttgttttgtatttccaaccacgacagctatgttcagttgtgccccatcccctcccctgttctgtggcctgcggtgctgagaactgcragcagccaatgggactgctgcttactgtgaggtccatgcagtgtccacccccgcttcctgccctgagactgcctccaggcctggcacgtcttcctaagac

SEQ ID NO: 34340 - DNA, 201 bp, Homo sapiens
tgaaattgaggggacttgactaagttgggagctggcaaaccccttgccaccaccacagcctttgcagataaagtctttgccttgctttcccatcccctaayggcaaaatgaattgctaagatgagaaaaaggaattttgcaccatctgcaccaattctgaggttttgcaagtgatcaccaatgtggagagtatggttcagg

SEQ ID NO: 34341 - DNA, 201 bp, Homo sapiens
acagctatgttcagttgtgccccatcccctcccctgttctgtggcctgcggtgctgagaactgcgagcagccaatgggactgctgcttactgtgaggtccrtgcagtgtccacccccgcttcctgccctgagactgcctccaggcctggcacgtcttcctaagacaggcctatcaacccagtggatccttctgccccttcc

SEQ ID NO: 34342 - DNA, 201 bp, Homo sapiens
cagtaacacctgtttgtggtagaccaacaatggcgccctaaaagatatatccgcatcaaatccctgggacctatgtgtgtgaccttatttggaagaggggtttttttttgcagatgcaattaggaatcttgagatgcagagaacatcctgtgctatccaggtgggccttaaatgcaatgacaactgtcttcataagagacg

SEQ ID NO: 34343 - DNA, 201 bp, Homo sapiens
tcatctgtaaaatggaacaataccttcttttttcttttctttttttttttttttttagatggagtctggctctgtcacccaggctggagtgcaatggtgcsatctcagctcactgcaacctccgcctgctgggttcaagcgattctcctgcctcagcctcctgagtagatgggattacaggcgcccaccatgcccagctaa

SEQ ID NO: 34344 - DNA, 201 bp, Homo sapiens
ctcctggcctcaagtaatcctcctgctttggcctcccaaagtgctggaaatataggcataagccactacacctggcctcaagaagtaatttttaaataatrtttttcataagaagttgagccatgttactgaaatgatgacatgctgaatggtgcattgcagcattgcatagtgaaattgaggggacttgactaagttggg

SEQ ID NO: 34345 - DNA, 201 bp, Homo sapiens
catgaacttgcaatttggtttgcctagatcctggaagtctacagagttagaatctttcctggttctgaactcagaagcagcagtgagcagtgggactgctrggacctttaccagcaatcacccaccacatgcaccagcttcaagcagctctgcagaagccgtccgtcaccctccccgttgcacaccttggctgtgaaccgc

SEQ ID NO: 34346 - DNA, 201 bp, Homo sapiens
cagatgcaattaggaatcttgagatgcagagaacatcctgtgctatccaggtgggccttaaatgcaatgacaactgtcttcataagagacgtatagggagmtctgacagatagaaggggagaaggcaatgcgatcaccactaggtagaggttagagggatgcacccctaagtcagggaatgccagcagctgccagaagctt

SEQ ID NO: 34347 - DNA, 201 bp, Homo sapiens
ggctggtctcaaactcctgacctcaggtgatccacccgcctcggccacccaaagtgctgggattacaggcgtgagccactgctcctggccaaaaacaatamcttctttaaagccttgtagagatcccaacgtgagatgggtgtgatatatatttttaagagaacacaataaatagcactccattacttgcctgagttctga

SEQ ID NO: 34348 - DNA, 201 bp, Homo sapiens
tcctggaagtctacagagttagaatctttcctggttctgaactcagaagcagcagtgagcagtgggactgctgggacctttaccagcaatcacccaccacrtgcaccagcttcaagcagctctgcagaagccgtccgtcaccctccccgttgcacaccttggctgtgaaccgccagggcaggggcatgtgtgggaagcagg

SEQ ID NO: 34349 - DNA, 201 bp, Homo sapiens
gtatagggagatctgacagatagaaggggagaaggcaatgcgatcaccactaggtagaggttagagggatgcacccctaagtcagggaatgccagcagctrccagaagcttaaagaggcaaaggatgaattgtcccctagagcctccaaagggagtgtggcactgcttatgccttggctttggacttctggcctccagaac

SEQ ID NO: 34350 - DNA, 201 bp, Homo sapiens
ccatcaggtcccaaaatgttcagagttgggttagtatctgtggctttcaccaggtaaacacatcagtgttcttcctaatttggactgttgtggcttccctrgttcttttttcccctagattgttataaaggttctgtattagttttccagggctgttataataaagtgccacaaattgggtggcttaaacaacaacaattt

SEQ ID NO: 34351 - DNA, 201 bp, Homo sapiens
tatggctcttcttcagccctgggagcaggggagtgcagacttttgttcaacccctttcacagatgtgcacactgaagtcccagtgtgtccagtgacttgcycaaggtcatcagcactgtctggtggagctgggactcgaacccagtcctcctgctctcagctgtgggaaatggagacagcagttgccctggaagatgtttc

SEQ ID NO: 34352 - DNA, 201 bp, Homo sapiens
ttatctttgtgcccactcagccatcaccacttccaacacacacccacacctgtggagagaatgcagcctcctagagctcatgtcatggcaggactgagggmagtagtcagttcttggtgctctctaatagggctctgaattgcagcctgggccgtgcccattcatttatgtattgtctatagctgcttctgtgttacaaga

SEQ ID NO: 34353 - DNA, 201 bp, Homo sapiens
cagcttctccctatgtctcttcacatcatcttctttctacatatgtctgccggtgtgtccaaatttccccttttcataaggacaccaatcatgttggaatrgggcctaccctaatgacataagttgatgacttctgaaaggaccctgactcagaaatatcctgaggtactgggggttaggacttcaatatatctttctggg

SEQ ID NO: 34354 - DNA, 201 bp, Homo sapiens
tttgccagctcctgcactagaggataaagattaacaggattgactccacatagaggagaggagaggaaggggcaaggatggaagcaaggagggagaagggktagagagaaagaaagagggaggggggtcactcagagacttcacaaagtatgttatttcctaaaaactgtaatgcccagtatctagtgattacctgtggca

SEQ ID NO: 34355 - DNA, 201 bp, Homo sapiens
catgtatatcttactttgtaaaataatcccctctatgaacatgtaagactactgttcacaatttggacattttcctttcaaacacatttttcatgaatatrttataggaaagttaaaaccatctctattctaaaaggaaaatctaccattttgctcagagagaaagttactgagtttgtctatgtgattttaagtagtatt

SEQ ID NO: 34356 - DNA, 201 bp, Homo sapiens
ggagttcaaaatgtcaacagagctgcccccagtcctgtctgtgtttttgcttaggacccagtgttgtgtcactactccccattgataataaacaaaacatkcctcatatgttcacagttatttagagtttacagaattctctccttctatcaatttgtttgtgcctgaaggagcaggaaaggtattattttctgcatttta

SEQ ID NO: 34357 - DNA, 201 bp, Homo sapiens
tagaggagaggagaggaaggggcaaggatggaagcaaggagggagaagggttagagagaaagaaagagggaggggggtcactcagagacttcacaaagtaygttatttcctaaaaactgtaatgcccagtatctagtgattacctgtggcactgtcagccttctgcctgggaacaggaatcttgcaaagatcaaatgcagg

SEQ ID NO: 34358 - DNA, 201 bp, Homo sapiens
tttgttcaagatcatccaggctgtggccggagcccacatcatccatgtctctatgtcagctgtctttccactgctccaagccacctgccctgctgccctcygtttcccctccaggtcactgttgtgcggaccatgcaacccgagtctcaaagactcacggatccccttgctgtgctctaggacccagtcctagcacctcct

SEQ ID NO: 34359 - DNA, 201 bp, Homo sapiens
agtatgttatttcctaaaaactgtaatgcccagtatctagtgattacctgtggcactgtcagccttctgcctgggaacaggaatcttgcaaagatcaaatrcagggcccagagccccaggactctgcattggcattcgtcagtaagttttgaaggaggcagacatctcaaaaccatcctaagcataaggcacccagctggt

SEQ ID NO: 34360 - DNA, 201 bp, Homo sapiens
tgctgccctccgtttcccctccaggtcactgttgtgcggaccatgcaacccgagtctcaaagactcacggatccccttgctgtgctctaggacccagtccyagcacctcctaacctccccaagagggcaaaaagcagcctaggtctggtgagggtggccaaggccagaggattctgttagtatgcagatcaaaggaggagc

SEQ ID NO: 34361 - DNA, 201 bp, Homo sapiens
ctccccaagagggcaaaaagcagcctaggtctggtgagggtggccaaggccagaggattctgttagtatgcagatcaaaggaggagcatgggcaaagtgasaaggtttgtgatggagcagaacagtgtcaggaagtgatgtgaagctcagcgtggctcgtggatgttgagaagtgaggttgatgggcagggggtgctggac

SEQ ID NO: 34362 - DNA, 201 bp, Homo sapiens
tccccaagagggcaaaaagcagcctaggtctggtgagggtggccaaggccagaggattctgttagtatgcagatcaaaggaggagcatgggcaaagtgacraggtttgtgatggagcagaacagtgtcaggaagtgatgtgaagctcagcgtggctcgtggatgttgagaagtgaggttgatgggcagggggtgctggacc

SEQ ID NO: 34363 - DNA, 201 bp, Homo sapiens
ttggtggagagtggtgtgatggctgatttatttgtcttgtttgtttgttgtttcatttttccattttactagtgtgatttcagaatcacaaggaggcaagraggaaaattgattttagatagcagcttcagaatgaaaaatgagtggaaattccacttttcggtctagaccagggaccagcaaacaatagcccgtgggcca

SEQ ID NO: 34364 - DNA, 201 bp, Homo sapiens
tgagtggaaattccacttttcggtctagaccagggaccagcaaacaatagcccgtgggccaaattcagcctgcagcctcttttcataaggcctatgagcastgcctggtttttatatttttacaaatttgaaaaaattcaaaaaaggatcttttatgactcatgagatttgtatgaaattcaaatgtcagcatccataaat

SEQ ID NO: 34365 - DNA, 201 bp, Homo sapiens
atagcccgtgggccaaattcagcctgcagcctcttttcataaggcctatgagcagtgcctggtttttatatttttacaaatttgaaaaaattcaaaaaagkatcttttatgactcatgagatttgtatgaaattcaaatgtcagcatccataaataaacttttaccagagcataaccatgcccattcatgtatgtgttgtc

SEQ ID NO: 34366 - DNA, 201 bp, Homo sapiens
caaattcagcctgcagcctcttttcataaggcctatgagcagtgcctggtttttatatttttacaaatttgaaaaaattcaaaaaaggatcttttatgacwcatgagatttgtatgaaattcaaatgtcagcatccataaataaacttttaccagagcataaccatgcccattcatgtatgtgttgtctatggctaagttt

SEQ ID NO: 34367 - DNA, 201 bp, Homo sapiens
aagggcgcgctttggactgaggatttgaatgtggaagattggcttaaaaaaagatgcttgctgctgggctttggggaaggactaaacagaggcttggggtsgggggacgactccaggaatattatgaccgaatgctcaggcatacgttggcttcatagcctggagaaccaagagaagggtgacctgaacggtggctgccat

SEQ ID NO: 34368 - DNA, 201 bp, Homo sapiens
gagcggatccccagccgtccctgggcgttctcccgggttctagcaaagccccccggggtgcccatcagtttccttgggtgactacagcgtgtgttttttcyttcctctttcccctgcctgtgtgcccttctccaggatggcagaggcggaattgcacaaggaaaggctgcaagccatagcagtaagtccactttcatttta

SEQ ID NO: 34369 - DNA, 201 bp, Homo sapiens
tactggctgtgagatgaatgcataaccagaacctcccattcccctttttccagcgtctctcctatctcccagcagtgctttatcactttctcctctcaagytgataaagagaaaggaagaaagaaacagagaagtcggtttatgttcataattaacatccatgaactctgcataattttttcccctctctttacaggtcct

SEQ ID NO: 34370 - DNA, 201 bp, Homo sapiens
ggctgtgagatgaatgcataaccagaacctcccattcccctttttccagcgtctctcctatctcccagcagtgctttatcactttctcctctcaagttgayaaagagaaaggaagaaagaaacagagaagtcggtttatgttcataattaacatccatgaactctgcataattttttcccctctctttacaggtcctcgag

SEQ ID NO: 34371 - DNA, 201 bp, Homo sapiens
ctaggactagagcagggctcagccaagcacatggtgctggcaggacacttggagctgtccctataccagcagcaatcttttgtcttgcttatttaattacyttatcctaaagtacgtctttactagaaatttgctgtcctcagtgagaagcagtacctttcccttgttccctgctgaaccaccagggtcactaccagcaga

SEQ ID NO: 34372 - DNA, 201 bp, Homo sapiens
cacttacattagatttaacttactttttaattctggtcccgtaaggtggaagattagataattgattttaaacttatcttctctaatattgatattctacrctataaattctctctagtcgttagtttagctgcctctcataattgtaacacactgtgttatcattttcattcagttttaaatattttccaaattcctttg

SEQ ID NO: 34373 - DNA, 201 bp, Homo sapiens
acaaagaaaggctaacatcattgatgtcatcaagagcactcatgtttcagcaagaaaaaaaagcccagtagccaaattttaaaagtgggcaaaggacacartcagttcattgaaatggaaataaaaatagctttaaaacatattgaaaaatattcagaacttctcatagtaagagaaatgtgaattaaagttgcaacaaga

SEQ ID NO: 34374 - DNA, 201 bp, Homo sapiens
catgagaccagggtatataacagcccccagtggccttacccttcacctgcatgtgtgctacattttttttttttttttttttttgagacggagtttcgctyttgtcacccagcctggagtgcaatggcgtgatctcagcttgcagcaacctccgcctctcgggttcaagcgattcttgtgcctcagcctcctgagtagctg

SEQ ID NO: 34375 - DNA, 201 bp, Homo sapiens
ccacgcctggctaatattttgtatttttagtagagacagagtttcggcatattggccaggctggtcttgaacccctgacctcaagtgatctgccagcctcrgtctctcaaagtattgggattataggcgtgagccaccacacccagccgggttgctaatctttgaggcaggcaacacacatccaaaatgctttaccctacc

SEQ ID NO: 34376 - DNA, 201 bp, Homo sapiens
tggatcctgtctataatcactgtaagagtatagttaggaataattctatgtgaacaaactcaagtctttaagcctaattattaaaaaattacaggtcaagyaccataaatttgcctatgtgctgcaagagtaatcaaagagatctctacaaacaatgatttgtaatgaaaaggcaagaataacatcaataaaaaccatggt

SEQ ID NO: 34377 - DNA, 201 bp, Homo sapiens
cccaggactctgcattggcattcgtcagtaagttttgaaggaggcagacatctcaaaaccatcctaagcataaggcacccagctggtgatttgaagatagscatcttccccattactagttggcctcactttaaaaaatgttgtttcttggatagcatttttctttcacaagttggtttgctttcacatgtcaaaaaacaa

SEQ ID NO: 34378 - DNA, 201 bp, Homo sapiens
aatatgactgtgtcttttaccagccatagttacttgctgtgtacttccctaaggagactggcatttcagatctatttgatctttgtgtgctacatacttayggggtggaaggctaggaggtgaggtggggcagggagagagtgtatggggcagacaattagagcaccaaagaatatatgtgtagttcttgtaacgagattt

SEQ ID NO: 34379 - DNA, 201 bp, Homo sapiens
aggggtcagctagtgagtttatggctttcatctgattctattctcagtcctgcatagacctgggtatacgctgttggcctaggctggctgtgccgtgggcytacagagaagtgctcattggcttttcgttggattcgcctctccatgccttttcttgcctgggagcattacagccttgagtaccaggcttggagtgtgggg

SEQ ID NO: 34380 - DNA, 201 bp, Homo sapiens
ctcatcgtggcagctattttattttctctcacaaaactcccttttgctaacataccctcttacaattttttgacatatttcaatttccccatggtagcacrtagtgcctcatatgcctgcatttaatctgcccccatgttttcaattctatagctctgcccatcacccaggaggactagtacctttaacacattagccttc

SEQ ID NO: 34381 - DNA, 201 bp, Homo sapiens
taccccattttgtctgtgctatcttatgtaaaatgcagattctccacattttttcctctgccccttttgtttatgtgaaaactgtgtgcttctcaatatcycaccttttctcctttaaatttggaatcctcaaaatcatctctggagaaaggcatacatctgtctcccaggcatgttcttaactttggcaaataaatctaa

SEQ ID NO: 34382 - DNA, 201 bp, Homo sapiens
ttgtcctatgttgctcaggctagtcttgaactcctgggctcaagcaatcctcctgccccggtcttgctgggattataggtgtgagccaccatgcccagtcttttttttttttttttaatttataaagaaatacatggtgtggtggttcatgactgcaatctcagtgctttgaggacagaggtggtaggaagtcttgatgag

SEQ ID NO: 34383 - DNA, 201 bp, Homo sapiens
gcttccggtgaggcctcaggaagctttcagtcatggagaaaggtgaagcagaaggctggcaagttgtatggtgggagcaggagcaagagcaaggggtggcgggggtgtcacagactttaaacaaccagatctcaggggaactcactcactattgcgagtgaacaccaaggccccatccccaggattcacccccaggaccaa

SEQ ID NO: 34384 - DNA, 201 bp, Homo sapiens
tacagcatcaaaagaccttggattgcaaattttacaggtaagaggcaatgaccaggttagcaaccagtcaagaacattcatgagcaaatgctggtctagtytgaagggccatcttgggtacacttgggcacaactggtgctgggctgaacatgccactcaggagtttttactggaacacaggcatgtagaaacacatctag

SEQ ID NO: 34385 - DNA, 201 bp, Homo sapiens
ttcatctctttagtgaacttttggcttttgcaaaagacctgaaggcccattgaccaaaagtagcctctgcccaggcaagggagcacaaaacccactcatcytctagaaatggactggagagtgcaacacaggaagtgcccacacagatgtttcctagaccttgcctttagggtccctctgttctcagggatgcagtctatc

SEQ ID NO: 34386 - DNA, 201 bp, Homo sapiens
gatattttctcccattctgtaggttgtctgtttactctgttggtagtttccttttgctgtgcaaaagccctttggtttaattaggtcccagttgccagacsgacagctttgaattctggtcttaacacttcataactgggggatctaggggcaagttacctaacctctctcagcctcagtgtcctcatctgtaatggaggg

SEQ ID NO: 34387 - DNA, 201 bp, Homo sapiens
gaagtagcgtctacctgtcatcttagctttatctttctctgtatttactcaaaatagaatctttaaatctacaggggtttgttgttgtttatttctacagwtgtatttgtaaccttttattgattaaacaattgtaagaaatggagtattcaatacaatttccttttatagtcactggaaactctgcgtgctttaatagag

SEQ ID NO: 34388 - DNA, 201 bp, Homo sapiens
ttgatgaggtagttcatttaaagcactcagaactgcgcgtggcacctgtaaacactcccacccccagtaccttttcacaagtactattaggatgatgctgtttagcagcaattatcagcacctctcatctcaagttatattgctagtgacaaaacctttggcatttcagtgtatagctttccaatcttttccataactgta

SEQ ID NO: 34389 - DNA, 201 bp, Homo sapiens
ggctgtaaatatattccttggagcttgggagccccatggctatgttccaggccagagagtccaaagaaaatcaaagactgccacctaacagcttttttggycatcctgaaagtccccaccttctcccaggtagctccagagatagacaactcccagccaggctctgacagctgaatcgaatggcccagtggtggcacattc

SEQ ID NO: 34390 - DNA, 201 bp, Homo sapiens
tgttccaggccagagagtccaaagaaaatcaaagactgccacctaacagcttttttggccatcctgaaagtccccaccttctcccaggtagctccagagawagacaactcccagccaggctctgacagctgaatcgaatggcccagtggtggcacattccccagagggcttcaggttcaggatgcagccaagtttcctgct

SEQ ID NO: 34391 - DNA, 201 bp, Homo sapiens
taagaaatactttacccaatgtactaaatatatatgtgtgcatgtgtgtgtgtgtgtatatatataaaatatatatataatataatatataattatattayatacacacatataatatataatatacatattgtacatatgtataatacatattacatacatatgtattatatgtataatacatattatatatattatatg

SEQ ID NO: 34392 - DNA, 201 bp, Homo sapiens
tcatgccagaagaagtgactccactagtttgttgtgtgactcagattgatgattggatactaggtgatgaaaaatataatttttaacttctctggtagaartcatgctggtggcatgctggaatcctaaaaccttaaagcaaataaaatccactgagagccaagatgtggtaaggaaggagaaatcttctaattctttcca

SEQ ID NO: 34393 - DNA, 201 bp, Homo sapiens; identical to SEQ ID NO: 4384

SEQ ID NO: 34394 - DNA, 201 bp, Homo sapiens; identical to SEQ ID NO: 4369

SEQ ID NO: 34395 - DNA, 201 bp, Homo sapiens; identical to SEQ ID NO: 4370

SEQ ID NO: 34396 - DNA, 201 bp, Homo sapiens; identical to SEQ ID NO: 4371

SEQ ID NO: 34397 - DNA, 201 bp, Homo sapiens
ctggataataccctgaagagtgttttacaacttggttccattctccccatcactttctggtacaccaatcaaatgtagtttggtcttttcacatagtcccrtatttcttggaagctttgtttgttcctttttgctcttttttctctaactttatcacttcatttcattaatttgatcttcagtcactgataccctttcttc

SEQ ID NO: 34398 - DNA, 201 bp, Homo sapiens
tcttttctttaagaatgttgaatattggtccccactctcttctggcttgtagagtttctgctaagagatctgctgttagtctgatgggcttccctttgtgkgtaactcaacctttctctctggctgcccttaacactttttccttcatttcaaccttggtgaatctgacaattatgtgtgttggggttgctcttcttgagg

SEQ ID NO: 34399 - DNA, 201 bp, Homo sapiens
aagcatgacatatctttgggtgtgggaccatctggcctgctgcaaggcatagggaagagtcattagattaccccatctgcctgctctccggatccctgatrtgccttgtgcctgaaaagccttctcttattggactctagaattctaaaaccaattctgatgaagcagaataaacatgctctttgtggctttaattatagt

SEQ ID NO: 34400 - DNA, 201 bp, Homo sapiens
tctaagaatgtccttggaagaattcaaggaattcctgataccccagaaactatacataaaatgctgtatgcatgtgcactgctctgagaaggagtctatakttcttaccagattcttgaaaggattctgtgaactcttctcccctaaagcttagaatcactgttctggatggtaccaaaaaccacacagtagaacacttta

SEQ ID NO: 34401 - DNA, 201 bp, Homo sapiens
agaagctagtgactgaaagcagcaggtgccatgtagaatccagtctggttgtggtggtggcagctgatgccttcagttttcagaagcagcaattgcagggytcccggtggaggcaaccagtgcccagcatctgccgggtcagcagagcaggctcctgtactgcgttcagtggtggggctgttgtgtttcctccagaccagc

SEQ ID NO: 34402 - DNA, 201 bp, Homo sapiens
cagggtctcactgtgtccccaggctggagtgcagtggcacaatctcagctcactgcaacctccgcttcccaggcttaagcaatccttccatttcagcctcytgagtagttgggattacaggcatgtgctaccatgactggctaatttttgcattttttgtagagatggggtttcaccatgttgcccaggctggtctcgaac

SEQ ID NO: 34403 - DNA, 201 bp, Homo sapiens
tgagacttgtgatgatatggatttttttaaaataaatcagctactatatcatactagagcagaaggaatttaatatttccttctgtcccttggttgaattrccagagatttgtctattttattggtctgttcaaagtcccagcacagagtaggcactgagtacctactgcaacatgaattccttggagactgtcatattta

SEQ ID NO: 34404 - DNA, 201 bp, Homo sapiens
caaataatcacgaggaccttcccctccctggagaaatagattgaaacctcttcccctccctggagaaatagatccaagcctctccactgccatcttgtcaracatatttacattgctcaactgacttgggaagaaaacaaatttccagtatgagactctctggtgggccaagctgtttctcaaggagcattgagaaataat

SEQ ID NO: 34405 - DNA, 201 bp, Homo sapiens
gaggcaggagactcgcttgaacccgggaggtggaggttgcggtgagccgagatcgcgccattgcactccagcctgggcaacaggaatgaaactcggtctcaaaaaaaaaaaaaaaaaaaaaaaaatcgaacaattagctggatgcttgtagtctcagctactcaggaggctaaagaggatcacctgagcccaggactttgg

SEQ ID NO: 34406 - DNA, 201 bp, Homo sapiens
tggttgaattgccagagatttgtctattttattggtctgttcaaagtcccagcacagagtaggcactgagtacctactgcaacatgaattccttggagacygtcatatttacaaaggtttgcctgacagagttggccctgtcagaatcaaattgctaataccacgtcttcaatacataaactgcctttgaattacttattc

SEQ ID NO: 34407 - DNA, 201 bp, Homo sapiens
gcccccaattaaagcataagtaagatactcaaaatctcattcctattcctattccactagcagttactgagcactgattaaatgccctgaactgtgccaattttttttttttttttgtaagacagagtcttactctgtcacccaggctggagtgcagtggcacgatctcggctcactgcaacctccgcctcccgggttcaa

SEQ ID NO: 34408 - DNA, 201 bp, Homo sapiens
cttagcccatgacagggaatcacagattccaaatgagtgccctcagaatgactggtttccttgaaagcagctgtttcataaacatgactttgcgggggcakctcaggccttccatgcagtggagtctgctggtcttggggctgctctgttaagcaaaggatgggaaccaaaggtactgacattttaatattagccacacag

SEQ ID NO: 34409 - DNA, 201 bp, Homo sapiens
tcacaagcagcaagcagctcaagggactggttacagaattgtctggggtttaaataccctttagagatttcccattggttacttggtgtatgccctatgtaatgaagtagtggctcatgattagtctgattggttgcaggaggggaccaatcagaggctgaagttacaaagctacaccctatgcaaacatctgattgtgga

SEQ ID NO: 34410 - DNA, 201 bp, Homo sapiens
acagcactccctcctcattttttaaataagatgaacaaaggcagcaagccctttgaccctcatcattatacaaattgtagtgtacctctgacatggagaarctggagagaagacagggcaggttagagagtatgctctgtgctttgtggttagagacaaagggatgataagtgtgagaggccattggtataaacttttggc

SEQ ID NO: 34411 - DNA, 201 bp, Homo sapiens
gagtgcagtggtgtgatcttggctcatggcaacctctacccactgggttcaagtgattctcctgccttagcctcccaagtatctgggattacaggcatgtrccaccacacctggccaatttttatatttttagtatagatggggtttcgccatgttggctaggctagtctcaaactcgtgacctcgggtgatccacccacc

SEQ ID NO: 34412 - DNA, 201 bp, Homo sapiens
ctcagccaagcacatggtgctggcaggacacttggagctgtccctataccagcagcaatcttttgtcttgcttatttaattaccttatcctaaagtacgtstttactagaaatttgctgtcctcagtgagaagcagtacctttcccttgttccctgctgaaccaccagggtcactaccagcagatcagagccacttccctg

SEQ ID NO: 34413 - DNA, 201 bp, Homo sapiens
ataagtgtgagaggccattggtataaacttttggcagcaacaggaagtagaagagtttttaaaatcttgtgcatcaaaaataagacattgcactgaaaacrtaagtcttatgttcctattggttcatatgcactctagttcatgcttttgtatattattggctgagaactgaagcaaaatataaatgcttactcataaaga

SEQ ID NO: 34414 - DNA, 201 bp, Homo sapiens
aggaagagatccgagcagctcaggaaagggaagaggagctgaagaggcagagacaagtcttgcagagtacgcagagccccaggacaaagaatgccccatcrctgccctccagaacatgctacaaaactgctccaggtaagtgaggtgcctcacatgagagacagatgccacagcagtctgttgttgttgattccagctcat

SEQ ID NO: 34415 - DNA, 201 bp, Homo sapiens
aagaagggaagtacagtgttgattcttcatgggagactgatggaattataatagacttctgttcttaaggtagaaaattatcatttttttaacctgaaaabatagagtaatagtctatgataaggacaaattaccccaatatgtttttaaaacattgcaattattaacaaagtggtagtttctttcatttaaaaccccctt

SEQ ID NO: 34416 - DNA, 201 bp, Homo sapiens
cacgcctgtaatctcagcactttgggaggctgaggagggtggatcgcttgaggtcaggagtttgagactagcctggtaaacatggtgaaaccccatctctrctgaaaatacaaaaattagccaggcttggtagcatatgcctgtaaccccagctacttgggaggctgaggcaggagaatcgcttgaacccgggaggcagag

SEQ ID NO: 34417 - DNA, 201 bp, Homo sapiens
tatcaagctagtacataaaattgtttgaaaactgaatcagatgtttatgtaattcataaaaacatataatttccctctaatatttcatttttcctaattayaaaaataatgcatgcttattatagaaatgtagacataaaaaactatgaaaagaagaaaagaaaactcaatccaaatcttaccactcagaaatgacgtgcc

SEQ ID NO: 34418 - DNA, 201 bp, Homo sapiens
cacgacagctatgttcagttgtgccccatcccctcccctgttctgtggcctgcggtgctgagaactgcgagcagccaatgggactgctgcttactgtgagrtccatgcagtgtccacccccgcttcctgccctgagactgcctccaggcctggcacgtcttcctaagacaggcctatcaacccagtggatccttctgcccc

SEQ ID NO: 34419 - DNA, 201 bp, Homo sapiens
agctacaccctatgcaaacatctgattgtggaaagcaaccaatcagaggctgcagtgaagttacaaagttatacttctatgcaaatgaagatttggcccamggccaacctgattggttgtgggaagggagcaatcagacataatttcaatttttcatctgccacacaagaaaagggtgggggatttgcaaagggagtagtt

SEQ ID NO: 34420 - DNA, 201 bp, Homo sapiens
aaatattatttctatggcaaataagcagcccttccttataatgctgaaatcatagaagttagttgttttcccctcattttttgacaatcattctttttgcrgtagtaacgaaatcaagcagttttcatttggctttttggtagttgaagttaatttgtcaatttcctgctagtcttctattacgtacacatttttctggtt

SEQ ID NO: 34421 - DNA, 201 bp, Homo sapiens
cccaactgctgcctcatctgcagtagttcctttcagatgaaaagttaaaatgggagagaaatattttgcatttgctcttttcattagactattcgatttcyatgtaaatgtcttctacagggattgaaagaaatgaatatattggttcaccagacattgctgaaggttccaacacagccttgacctatttttgtttgaaat

SEQ ID NO: 34422 - DNA, 201 bp, Homo sapiens
tttctatggcaaataagcagcccttccttataatgctgaaatcatagaagttagttgttttcccctcattttttgacaatcattctttttgcggtagtaaygaaatcaagcagttttcatttggctttttggtagttgaagttaatttgtcaatttcctgctagtcttctattacgtacacatttttctggttagctgaca

SEQ ID NO: 34423 - DNA, 201 bp, Homo sapiens
cagatgaaaagttaaaatgggagagaaatattttgcatttgctcttttcattagactattcgatttctatgtaaatgtcttctacagggattgaaagaaaygaatatattggttcaccagacattgctgaaggttccaacacagccttgacctatttttgtttgaaattgagaaatgctcacaaatgtaagaggcctcctt

SEQ ID NO: 34424 - DNA, 201 bp, Homo sapiens
accattctgcctacctgtacagaaagtgctggatttttccaccacaaggggcttatcaatgtggtgtcataaagcgggtcttactttctcatcagagcccrtatcagaccacttcccttcttggtctttagaggaaaccaaagtgaagcactcctagcaaagaatttgatgttatgaccatcaaagcaaaagtatagctct

SEQ ID NO: 34425 - DNA, 201 bp, Homo sapiens
aatttttttggcaaagattttatatatttgtagttatgctctctataaattttgcatcaagcttttttcatttcacattttcataaataatttctcatgcygttataaactcttcataaacataattttaattggctacgtaattgttttttaggagtacatttggctgcaagtgcctgaaaacctgggaagaaacagctt

SEQ ID NO: 34426 - DNA, 201 bp, Homo sapiens
ctataaaggaccctaaatggaaactctgctgtgttgtgcatttgacttggcactaataggccagatatattaactgttgggtgaaattaatgataatattkcatctaaattctatgggatgtttcttaaggttttgggtgttaaattaccccttctaaaatccagtattgaggctcgaactaatcaatgtcttctttttct

SEQ ID NO: 34427 - DNA, 201 bp, Homo sapiens
ttaacaacaatatattttagattttaacatagctggaagagaggactaaaaatgttcccaacacaaagaaatgataaatacacgagatggtggatgtcctraacaccctggttattatacatcctatgcatgtaacaaaatattacaggtacccaacaaatgtgtacaaatatcatatgtcaataaaacaattaaaagtaa

SEQ ID NO: 34428 - DNA, 201 bp, Homo sapiens
ctatgaagtcatgtgtgataaataaacatgcatctgagtttatgtaattcagccaagaaatattttttgaacattttctatgttatagatatatttgtggrtgctgagaatgttcatggtaaatacaagacagtctctgccctcacggagcttgcattctggtgggagactagggaagaataatttatgaataaactattg

SEQ ID NO: 34429 - DNA, 201 bp, Homo sapiens
tcagtttttagacagactatttttcttttttttcccctcagatgtataaatagcattgaatctgcagtagtgttagaaaggtaattataacccaaccatgyctgagatgacattgtgatttcttaatagaaaaagcttgttgggtccccacttgcaagttgatttttcataatttaattctcaaaatgtcaccttatttct

SEQ ID NO: 34430 - DNA, 201 bp, Homo sapiens
tatgaagtcatgtgtgataaataaacatgcatctgagtttatgtaattcagccaagaaatattttttgaacattttctatgttatagatatatttgtggaygctgagaatgttcatggtaaatacaagacagtctctgccctcacggagcttgcattctggtgggagactagggaagaataatttatgaataaactattga

SEQ ID NO: 34431 - DNA, 201 bp, Homo sapiens
ttctcgcagtttttcagtactttacctctttctctgattcttcatttcaaaagcctaggaatcctctggcaaaaagtcacttaaaaggtttggggcaaggraacaagattccctttagctcacatggaaggaagtcaaagctgaattatcttcatctagcaatagaaagaataaagattgcaacgtttacaatttaatata

SEQ ID NO: 34432 - DNA, 201 bp, Homo sapiens
ggagagtggtaggtgatgtgaccaaagaggtggtggctggggctggattatgaaggcatctatataccgtggtaaggatgttggcctttacttgacatgasatcagaatccagtggaagatttggagcacaagaattgcacaatctgacctattttttaaaaagattactctggctgatgtggtgagctgagttagtaagg

SEQ ID NO: 34433 - DNA, 201 bp, Homo sapiens
ggcagctctctgggaccttttttttttttttgtctgaaagaattccaatattatgagcatgtaatataaacaaaggtagtgctttaatctattgggaaaakgatgaatgatttaatcactagcaatgacatggagggagaaaatcaatatgaaccaatggagcctcttttataaaggcactaattcaccccctgatatggt

SEQ ID NO: 34434 - DNA, 201 bp, Homo sapiens
ttatatattcacaaatatatggtttggaattataacttatctttaaaagggaagcagagcataaaagttcaaaaaatttaaagcctgatgttgcgatagaraagaaaatctcattttctgaagagaaattcaagccagctgcagaaatttgcataagtaacaagaaagccaaatgttaatcaccaaaacaatggggaaaat

SEQ ID NO: 34435 - DNA, 201 bp, Homo sapiens
tcgagtgcacaaatagagaggctgttcttgtgcaggagtgatagcagagcccacagaatgagtgcaggtgtgcgggagcctgtggtggcttggtctgtggrtgaaccttctgactgcttccgttttctcagtgaaatgggaagcaaggtcatcagctggcagggaggaagggggaagaggtgttggaaatttgaggagaga

SEQ ID NO: 34436 - DNA, 201 bp, Homo sapiens
aatgaggagatgcatccccgcacctagaggtgtacagtctagtggtctttctgctcttcctgcttttttctgggaaagagactttttgtggggggttgggsgggggtgagtccaggacagcaagttcatcataaatgcaaatgggaaggctattgatatttttattcatagcatgaatgatgtaataaatgagtcacgatg

SEQ ID NO: 34437 - DNA, 201 bp, Homo sapiens
aatgtaaaatacaattttcttcctgttcatgcctggaaatctttggagtattgcttggctggccaacctccaagttcatgatcggggagaaggctgacacrtgactctgagcagccaaactagacaattcatggctagggtcagaactcctggcttcagtggttttgtgaatggaggtgttaccaagttcctgcggcacat

SEQ ID NO: 34438 - DNA, 201 bp, Homo sapiens
gctggagtgcagtggcatgatctcagcccactgcaacctctgccccccaggttctagtgattcttctgtctcagcctcccaagtagctgggattacaggcrcatgccatcacacctggttaattttgtatttttagttgacatggggtttctctatgttggtcaggctagtcgcgaactcctgacctcaggtgatacgcct

SEQ ID NO: 34439 - DNA, 201 bp, Homo sapiens
cacatgccatcacacctggttaattttgtatttttagttgacatggggtttctctatgttggtcaggctagtcgcgaactcctgacctcaggtgatacgcytgccttggcctcccaaagtgttgggattacaggcgcgagccactgtgcccagcccagtgttggttatttttaaagactcatcagttcataataaaatgcc

SEQ ID NO: 34440 - DNA, 201 bp, Homo sapiens
ggggtttctctatgttggtcaggctagtcgcgaactcctgacctcaggtgatacgcctgccttggcctcccaaagtgttgggattacaggcgcgagccacygtgcccagcccagtgttggttatttttaaagactcatcagttcataataaaatgcccttaatgccgcatacaaatgagagtctatggaattgtgcatcct

SEQ ID NO: 34441 - DNA, 201 bp, Homo sapiens
gtcaagtgatttgcccaagaccatagagactataaatgagggagcctgagagaaactcctgggctgtctgctttcaaagaccgagctctttccaggccacygttctctttgaaagaaatgtttcctttggaataattcatttagtgagatgccagttaccatcattgctgtctctcttactctaaatatattgtgatggac

SEQ ID NO: 34442 - DNA, 201 bp, Homo sapiens
gaaaggcttgtgtggacagaatgagggtgagttatttgccttgaatactgaaaaaggaaagctcagaggttccaaaggtggcagtggttgtctagtactayctgcagagagacccccagctttgggaggtcctgaatttctgtatgctggtgaggtggggtcagtggtaaggtgaggagggtcctcaggccacagtgaggc

SEQ ID NO: 34443 - DNA, 201 bp, Homo sapiens
gtttccaaaaccgttccagttctgctctaataatgggggacggggaaaaagagggtgcctccttcctcagtttgccatcttctttttccagcttccaaaarcatactcgaggaaagccattggaaacctgtcaagctgttccctagtactgaaagacagtttgtgacaaaacaggcttttctgcgcccttgggctttctgt

SEQ ID NO: 34444 - DNA, 201 bp, Homo sapiens
gctacaccctatgcaaacatctgattgtggaaagcaaccaatcagaggctgcagtgaagttacaaagttatacttctatgcaaatgaagatttggcccaargccaacctgattggttgtgggaagggagcaatcagacataatttcaatttttcatctgccacacaagaaaagggtgggggatttgcaaagggagtagttc

SEQ ID NO: 34445 - DNA, 201 bp, Homo sapiens
caccctatgcaaacatctgattgtggaaagcaaccaatcagaggctgcagtgaagttacaaagttatacttctatgcaaatgaagatttggcccaaggccwacctgattggttgtgggaagggagcaatcagacataatttcaatttttcatctgccacacaagaaaagggtgggggatttgcaaagggagtagttctggt

SEQ ID NO: 34446 - DNA, 201 bp, Homo sapiens
ccctatgcaaacatctgattgtggaaagcaaccaatcagaggctgcagtgaagttacaaagttatacttctatgcaaatgaagatttggcccaaggccaamctgattggttgtgggaagggagcaatcagacataatttcaatttttcatctgccacacaagaaaagggtgggggatttgcaaagggagtagttctggtcc

SEQ ID NO: 34447 - DNA, 201 bp, Homo sapiens
aggcaggaaaatcacttgaacccaggaggcggaggttgcagtgagccgagatcgcaccattgcactccagcctgggcatcaagagcaaaattttgcctccaaaaaaaaaaaaaaaaaaaaagaatagtgctgttcttattgttgtttcttccatccccctacagcagagtttcttaacagctgtgctattgacatttaggg

SEQ ID NO: 34448 - DNA, 201 bp, Homo sapiens
gtgactcacgcctgtaatcccagcacgttgggaggctgaggtgggcggatcacctgaggtcgggagttcgagatcaccctgaccaacatggagaaaccccrtctctactaaaaatacaaaattagccaggtgtggtggcgcgtgcctgtaatcccagctacttgggaggctgaggcaggagaatcacttgaacctgggagg

SEQ ID NO: 34449 - DNA, 201 bp, Homo sapiens
tctcgcagtttttcagtactttacctctttctctgattcttcatttcaaaagcctaggaatcctctggcaaaaagtcacttaaaaggtttggggcaaggamacaagattccctttagctcacatggaaggaagtcaaagctgaattatcttcatctagcaatagaaagaataaagattgcaacgtttacaatttaatatat

SEQ ID NO: 34450 - DNA, 201 bp, Homo sapiens
gagatgatataggaatctctgctctagtggtgggtctgaggtttgctctagtggtgggtctgaggttttctctactgagggcaaaattggagctttttttwaaaaaaaaaaaaaatttaatttttttttgagacagggtctccttctgttgcccaggctggagtgtagtggtaccatcacagctcactgcagcctccatct

SEQ ID NO: 34451 - DNA, 201 bp, Homo sapiens
agaattagccttttcaactctttcctcatatgcatagcaacagtaatttatttcatgtgggttaatgtctttagcattaggacacttctggttttatggaytgatggccaatgtgtttttaataatgtattttgcttctattgaagtcatgagtacaaattcgtaattcatttgaatgagggatatggacaaacaggaaca

SEQ ID NO: 34452 - DNA, 201 bp, Homo sapiens
tgttttttgtcaaatgaagcagcagtgcacatcgattattgttagaggaagcaataagaacaaaactaagaggacatgaaccagccgggaagatcaggagwctgcaagtagtctttgaggttggatcatggtagggggccatggcttgagatgaagctgtgaaatagacaggagcctcactggctatgctagggaacctgc

SEQ ID NO: 34453 - DNA, 201 bp, Homo sapiens
gaggctaggagtgcagcactgagagagcagtggccactgccttacaaggccaagaagcgtcccatctccccaacaactgtcaggttccttcctgccctggraacagctctaatctgtctgtttaccacctacctgccagccttcagcaggaattccaggactgctgggcctatcagctgaagtagaggatgaaaaagaaca

SEQ ID NO: 34454 - DNA, 201 bp, Homo sapiens
agagttactggttttgtcctggttaagggaaggagaaatctggaaaccagtgggctatcccggtgaggagcacagctcagacctcagccatcaaacaagtrtcagaaactgcaagtgagttccttaatggtgtcctatgcaaacttgttgtcgtttgactcatatctaattctgagcgtaggctggttgcctcttgtccac

SEQ ID NO: 34455 - DNA, 201 bp, Homo sapiens
gtgagaggctagagttatctcagcaggggtttcgttttgttttgttttgttttgttttgtttttgagacagtctcactctgtcgcccaggctgaaatgcaytggtgtgatcttagctcactgcaacctctgcctcctgggttcaagtgattctctcgtgccttagcctccagagtagctgggattacagttgtgtgccacc

SEQ ID NO: 34456 - DNA, 201 bp, Homo sapiens
ttaaatgtaggacaactacatatcttgatagccagtgggaatgactgacaaagtccagtaagtctactcttgagagattctagaatgtagagatagcagcyggaccaggaagccctagctttatcatgtgccatctctgagatgctggatgtgggctgttcccactgtgcctcacttttcccatccactgtcatatatttt

SEQ ID NO: 34457 - DNA, 201 bp, Homo sapiens
ctgacaaagtccagtaagtctactcttgagagattctagaatgtagagatagcagctggaccaggaagccctagctttatcatgtgccatctctgagatgstggatgtgggctgttcccactgtgcctcacttttcccatccactgtcatatattttatggtcttgcacacactctgggattaagtaacatcaattatgca

SEQ ID NO: 34458 - DNA, 201 bp, Homo sapiens
taagattatgagctaatattttgtaaggtctgggcattgcacagaaaaccttggttgtaatacacattattattacattgatttgaatagcaatggtacartcatagccccggaaacatagcgactacataaaataaaagcttccgttaacactgagcacagcagccaggcttccgcattgttgttgtccctaggatttgg

SEQ ID NO: 34459 - DNA, 201 bp, Homo sapiens
tgagacaggagaatcgcttgaacccaggaggcagaggtttcagtgagccgagatcgcgctactgcactccagcctgggtgacagagtgagactcagtctcaaaaaaaaaaaaaaagaaagaaagaaaatactgtaggccttgcaggccatatggtctctgttataactacatttctcaactttgctgctcaaacttgaaaa

SEQ ID NO: 34460 - DNA, 201 bp, Homo sapiens
gctgccgccaaccaaaccagcctttttcattcaatcaggaaaccatctcttggcttttcttgtgaatttctcaaattcagggcattattacagcattccartttctgcaagcataagattacagtgtgcatgtggacagggtggagggtttgtgcgtgtgaagtgtggtggctatatatagaaattggatgagaatacttc

SEQ ID NO: 34461 - DNA, 201 bp, Homo sapiens
aacttttcaactttggtccctagggctacattaaccctctttcctgccagacaataatctgaggttggttgctgctttcagaagaaacagtgtttgaaagytaagaaaaatgtacctagaaatctaatttctaatttcattgtcatgccttaacagaacacccagatgccttaaaagacttttacaaaatgcaaatttctg

SEQ ID NO: 34462 - DNA, 201 bp, Homo sapiens
tcagctcactgcaagctccgcctcccaggttcacgccattctcctgcctcagcctcctgagtagctgggactacaaatgcccgccaccacgcccagctaatttttttttttttttggtatttttagtagagatggggtttcaccatgttagccaggatagtctcgatctcctgacattgtgatccacccgccttggcctcc

SEQ ID NO: 34463 - DNA, 201 bp, Homo sapiens
tgcccgccaccacgcccagctaatttttttttttttttggtatttttagtagagatggggtttcaccatgttagccaggatagtctcgatctcctgacatygtgatccacccgccttggcctcccaaagtgctgggattgcatattcatttttcgtctatgcatccattcatccatctttccatccatccatccatccatc

SEQ ID NO: 34464 - DNA, 201 bp, Homo sapiens
attaaaatactgtagttgagggaatttaggggatttgaattgcatttcctctctagaatggggtgagacagaagtggtgtccttctttcaggcatctaggkttgtttctttggggtgtgtatgtgtgtatgtttccatgtgtgtggcagcttaccaggctatgtcccaattaataaggagatgtatcatcctcattccagt

SEQ ID NO: 34465 - DNA, 201 bp, Homo sapiens
aagttattttattagttcacttacatactgctgataaagacatacctgagactgggtaatttataaagtaaaagaggtttaatggactcacaattgcacayggctgaggaggcctcacaatcatggtggagggcaaaaggcacatcttacatggcagcaagcaagagggagaattagagccaagtgaaagggatttcccct

SEQ ID NO: 34466 - DNA, 201 bp, Homo sapiens
gccccagtgagatgaaccaggtacctcagttggaaatgcagaaatcacccatcttctgcattgatcatgctaggagctgcagatcggagctgttcctattyggccatcttggaaagccctcacaaagtatctttttaaatgcagttggaggtcttttgtgcctctttttgatgaatctcaatttggaaaaacaactcttaa

SEQ ID NO: 34467 - DNA, 201 bp, Homo sapiens
gttagcagaagccttgggagtcagcagaaggctcccaatgaataaccaagctggattaccagaggaaaaaaacatagcaaaagctggacaaaggtggtgayccagagaagaatcaggcataagagccagcccaccaaagaagcacaacaggaacaaagcagttagatgtgttctgtgtgtgcaggcgacagaagcaagcaa

SEQ ID NO: 34468 - DNA, 201 bp, Homo sapiens
taaatgtttagaaaggatgttggggacctaacagcccccttcctaacagaaggaagtggtgaacatcagtctttggaaaagacagaagcgaaggcaactgyaggcatctaagtaccaggattcagtggacagttcttcaaggacccacagctggaatgaacaacctccaaccatgctcgtattctgagccactcaattgaa

SEQ ID NO: 34469 - DNA, 201 bp, Homo sapiens
attccacctgtcaaaaccttggttttgtaaactgcaaaataggaccagtaatacctatgattagctgctgctgttacgaattaagttcagtaacaagtccracatggctggcgcatgctgttttcaataaatataaattctgctcccaaccattcaacatcaaatgagttgatctgcaaaaagtgttttgaaaactacaga

SEQ ID NO: 34470 - DNA, 201 bp, Homo sapiens
agattgcctaatgctcataatttgtaatagatatgcaattgtaattgatcttggatacacatttatgatttttccctcttcaaactgaattcaaagataamattaacctagggtacatggagacctgggattaaatgttttgaagaactaagtatagctgaattagtatagcttacaagtatataaattataaagactctc

SEQ ID NO: 34471 - DNA, 201 bp, Homo sapiens
tgttgttcatcatttccatgcatggttttatacttatactacaaatgtgtatatacataaacaacaccttatttttgcatgtttgaagacattctataagyggtaaatcatgttgcagtatcttctgctcctgactttgttctgtctgcattgttttgagatgtgtccttgttgatcactgtggctctggttcattcttta

SEQ ID NO: 34472 - DNA, 201 bp, Homo sapiens
aactgaattcaaagataaaattaacctagggtacatggagacctgggattaaatgttttgaagaactaagtatagctgaattagtatagcttacaagtatrtaaattataaagactctctccctttatgtgcacccagtacccttgggaactggttattaagttcggatcacatcctatacctttaaagatgaaacaagat

SEQ ID NO: 34473 - DNA, 201 bp, Homo sapiens
ttaatttgcaaaatgttttattttctgaagccacagtgtaattcacagatgcaccaagatcaaaggtctctaagaagaagaggttgtggggaaagagcccwgtagaggtagggaggccacaatgaacccattgagttattccacctgtcaaaaccttggttttgtaaactgcaaaataggaccagtaatacctatgattag

SEQ ID NO: 34474 - DNA, 201 bp, Homo sapiens
tgagatgtgtccttgttgatcactgtggctctggttcattctttataactgctgtatggtattccattgaatgaatatatcactatttattcaatcttctrttatggaaatgtagactatttccagtttttcttaccgttagaaataatgcttttatgaatgttattatacatgtctctttatgtacctatggaagaacct

SEQ ID NO: 34475 - DNA, 201 bp, Homo sapiens
aaagaatgctaaatttcttaataaaatatcgaaagataccaaaaacaaaaattttcaacatcccaaattgagacaaatgacctattgttaccttctagaargaattttcactaattatagtcaatggagttgggtagagaaaagtagtcagggtcttaaccatgctctgcttcaggaaaagagaacagcttcacattcctt

SEQ ID NO: 34476 - DNA, 201 bp, Homo sapiens
tgcattgcactatctaaccatatcgcagaaattttgtgtcaacagagaagtaaccttgctaactagattagagtgtgttttacttctctatttaaattatwcttgttttcttgctctctgcctcccagcctcccattctctttctttccttgccaggactttgaattttttcaggttacttggccatatgctttaagtctt

SEQ ID NO: 34477 - DNA, 201 bp, Homo sapiens
taccgttagaaataatgcttttatgaatgttattatacatgtctctttatgtacctatggaagaacctgtctctatatttaggagtagaagcactggctastagcctgatacatcctaacatttactagatattgtaaattatttttcaagttggttgcattaacctgtagcataataagttttttggtctctctatttag

SEQ ID NO: 34478 - DNA, 201 bp, Homo sapiens
tgacaagatgcttcatttattagctgtgtgacttggtaaattaccttgatcattctgaattgttcatctgtaaaatggaataataatcctacctctctagwttcatgcaaaaggagagagtttttcaactcatatgtgctaatgttactttatatttggttcacatttattctgggaactaaccacttttgatcaatgact

SEQ ID NO: 34479 - DNA, 201 bp, Homo sapiens; identical to SEQ ID NO: 4373

SEQ ID NO: 34480 - DNA, 201 bp, Homo sapiens
agagtgttttcaatagaacaggctcagtgaccacagggagaagggctcagctatggttcaggtaacacacctcattggagtttctaatctgagaaactgcrgggggcaggcaaggaaataggagctgtcacctagagcagaatttttctatccaaggtgaattaccaacttcaagaaaatttctaatccatcacagccaat

SEQ ID NO: 34481 - DNA, 201 bp, Homo sapiens
catatgctggtttgtttgtcacttggccacacagttctactttttcctctttgtctgcaactgaacagcctaggaaacttacaagatttctgctttttttkgggggggcgggggggtaaggtatcgtattttgagttcaatctggtcgcaaactggattctgtccagatttttgttgggatttcagatgtttagccccaaa

SEQ ID NO: 34482 - DNA, 201 bp, Homo sapiens; identical to SEQ ID NO: 4375

SEQ ID NO: 34483 - DNA, 201 bp, Homo sapiens
gggaagtagcacttgttgatcaccttttgggaatgatgattcccttgaattcactggatggctctcaggattggatgacagagtacagtgcttggtttccygtctgtcctcaacagatatttatttcctgtcccctcctctcctcaccttgggtaactggtattagtgttgcaggagcaataaggatacttgaactctgct

SEQ ID NO: 34484 - DNA, 201 bp, Homo sapiens
tacaggcattaaaaatgatgtcatagaggtgtgcatatttaaaggaaaagatatccgtgttgcattaaagagtacataaaaaagcaagaatatgtacaatrtgtacaataattccaattatgcaacacacacatgtaactccaaaaaaagtcttaaaaagtaataagtttttattggagtgacatgaaaaagtagcaaaat

SEQ ID NO: 34485 - DNA, 201 bp, Homo sapiens
gaaatacaagtgacttgacattgaattattcacttcagactcatttacttctccctgcccagggacagatcctaagaggggttaggagggctgggcagtcrttcaacgttccctgcttatctccgttcttcttcccagggatgcatccttattagctcttcttctgactacatgtgagcattccattccaatccagccgct

SEQ ID NO: 34486 - DNA, 201 bp, Homo sapiens
aagtctatgtgattttcattctaatgtcttttggaattaaatgtaatgttgtaagaaaagaagcgtctgaccaataaagcaaggcagtctaggctgttttwtatatatatacgcactttatcctgtctaatgtagtgctcctattttctttttcatattctttctgttagagccaaattcactactctgactttgcataat

SEQ ID NO: 34487 - DNA, 201 bp, Homo sapiens
atctacagatattcctgaatattgtgggccacaaagcacatattaagatgaatttgaatttattctattaaatagtatgctttggtttatcttataaatgytgtatttaacagacttgtttctaaattaaatttttttaaagcactggaagagaaaggaagcacaaacatttgaatagtacttgctccatggaggcgggca

SEQ ID NO: 34488 - DNA, 201 bp, Homo sapiens
aacaaagataattaacaccgataattatgaccatgtattgaacaccagtagaggatgctgtggttcgtgcccaggatgaggttctcattccctcacccagyggctggcactctcaggtgagcccctctctaggaattgccctcacctgaaggcagccacctcccagggccagcacagacttgatgactggtggatgaggag

SEQ ID NO: 34489 - DNA, 201 bp, Homo sapiens
tagtaataatgttagatgcactgtggaaaaactaggcacgtagctgttaagctgggaatgtatgaacggtatacatgctatgctttaaaatctagctcaatttttttttttttgcattgaccttgaacatgctgacaacataggtcggcatgggtaaagctaaagaatggccttagggtttgaaaacaactacatgagctc

SEQ ID NO: 34490 - DNA, 201 bp, Homo sapiens
atttgcaaacctctgtttccaaccatccaagtgggtggaatggtcaaagacctggatattacctgtgcccaccaagtcaagacaaggacttggatgagcarctactagctgatccaacaaagataattaacaccgataattatgaccatgtattgaacaccagtagaggatgctgtggttcgtgcccaggatgaggttctc

SEQ ID NO: 34491 - DNA, 201 bp, Homo sapiens
attctattaaatagtatgctttggtttatcttataaatgctgtatttaacagacttgtttctaaattaaatttttttaaagcactggaagagaaaggaagyacaaacatttgaatagtacttgctccatggaggcgggcagtgttctgaggtattttaaacattagctcatttaagcttcataactttgatgtaggtattc

SEQ ID NO: 34492 - DNA, 201 bp, Homo sapiens
gtgagccgagatcgcgccattgcactccagcctgggcaacaggaatgaaactcggtctcaaaaaaaaaaaaaaaaaaaaaaaaatcgaacaattagctggrtgcttgtagtctcagctactcaggaggctaaagaggatcacctgagcccaggactttggtgctgcagtgagctatgatggcactaccgcactctaacctg

SEQ ID NO: 34493 - DNA, 201 bp, Homo sapiens
agagtaaaggcagccgatggcaggtttttctgggggcaaaatgaacactaccaatccaccttgctagagttctctctctactcactgaggtcttagggagrcaaccgtacataagattttctgaaatttgggatctggtctacagccgtaccaccctgaatatgcccgacctcgtctgaaacttgggatctggattaggaa

SEQ ID NO: 34494 - DNA, 201 bp, Homo sapiens
atccattcatccatctttccatccatccatccatccatccatccatccatccaatcaacagaaacaacagtagaaattaacttggtcttgtatgcggaagmagtgaggtttttctcaaggacttggaaacaagggaatcagctagttctttatggctatcttggtaaaattctcacacagttgatgagattggctatctga

SEQ ID NO: 34495 - DNA, 201 bp, Homo sapiens
ggtgctgagttcactgcatgaagggtcccaggagtcctctttccccttggtttttctactcctttccttttctgctctttctaccacctcctactgctggrcctctttgtatctgtactccaccatggaaaataagttttgtttgccccagatcttcccatttcccagagtggagcctttataattcatgatgtttactaa

SEQ ID NO: 34496 - DNA, 201 bp, Homo sapiens
aaatggcaagagtttgtttaaaatgcaaatctctgagccccaccctcagagaggccagcggggcagtggaatatgcactgaacacttcgggcactaactcrtgtgccaatggttgcacttggacatatactactctaggcctttgggctcctttcgtccctgcagcaccttctgtcctcaagacaggggctctcttgtttt

SEQ ID NO: 34497 - DNA, 201 bp, Homo sapiens
tgttatgaagtggatcagtggcacctgatgattttgtaaatcctatttgagcaaaaaagaaaaaaggattcttgggtgatcttacacagaggcaagatagyagagtgtacctcttggcttcaaatcccagatctacagctcactcggtgtgataccatggataagtcagttaatgttagcacctacctcatgggatgcttg

SEQ ID NO: 34498 - DNA, 201 bp, Homo sapiens
aaggtctcactatgttgcccaagctggtctacaactcctggaatcaagcaatcctcctgcctcagcctcccaaagtgttgggattacagacatcagccackgtgcccatctaggggcatatgatttttataacatttggagattattactgaagatgattgggagtcattaaagaagggagtcattgaagaagagtcttga

SEQ ID NO: 34499 - DNA, 201 bp, Homo sapiens
atccttatgattattattgttacatatattactgtatctagcaaaaacaatattagaattgttagtattataataattattatcatcattgatggggaagraaaaatgaagcccacctgagttcacagacaagaccctctccaaacagtaaaacaattaaaaaccaagttgtatttgtctgtgctcctttggattcaactg

SEQ ID NO: 34500 - DNA, 201 bp, Homo sapiens
tataaaagctgtgcccattgttaacttaggtgataagttgaatttttagtttttttaggttttttgtttgtttgtttgtttttgaggtggagtctcactcygttgcccacgctggagtgcagtggtgcgatcttggctcaccacaacctccgcctcccgggttcaagcgattctcctgcctcagcctcccaagtagctggg

SEQ ID NO: 34501 - DNA, 201 bp, Homo sapiens
tcttagtagaaaagaaaaatctaaaagattctcattttaagtgacttgagctatcagttaaattttaaaagccaattattttgaagcagtagagccttacraattctaaagtcacacactggaagccaaactatctagagtataaatatttccttttgagggggatactgacagattcttctattttatcccaattccagt

SEQ ID NO: 34502 - DNA, 201 bp, Homo sapiens
agcacctacctcatgggatgcttgtgaaagttaagtggatttacatgtaaagcacataaagcagtaagagttctataagaattatcattattgtcaccatyatcacccagtactatggctgcaaataccatttatgtatatatgactgccaaattgagaatcccagtcttccatgttcaactgcttttctgacatgtccgc

SEQ ID NO: 34503 - DNA, 201 bp, Homo sapiens
tgtgtgttgttcccttctacgtgtccgtgtgttccatcattagttctcacttataaatgagaacatgcagtatttggttttctgttcctgtgttagtttgstaaggataatggcctccacctctatccatgtccctacaaaggacatgatctcatccttttttgtggctgcaaagagtactaattattgcactgggctgta

SEQ ID NO: 34504 - DNA, 201 bp, Homo sapiens
aatgtaccaccatgccttttgattcttctgtctctcttctgtttcaagctaatatgctctgtcacttgaaccatgcaataaactcccatcacttgtacttwgtaatcctgccccttgcaatgtgttcttcctattgggcttagaagacacagcaaactccttaacaaggctacagaatcctacctaatctggcccctgcct

SEQ ID NO: 34505 - DNA, 201 bp, Homo sapiens
atactcacacacacccgtgtacatgcacatgctttttcttagaatacaaaggataaaggctaaactgttaccaaccatttatatcatatacatatatatakagagagagagtaggtgttattatagacagaaggcagaaaggatttggaaaataggataaaattagttacatgaccttttctatttttctttttgtttctt

SEQ ID NO: 34506 - DNA, 201 bp, Homo sapiens
cttctgtcctcctttcagaagcccctgtcaagtttccctttgtccagctgccagctccccacctgctccttccttgtattgacttgccatgatgacattcrtttgacaaatgtgaagtttgacagtccttagcaccttgggaggagtttgagaccagcctggccaacatggtgaaaccttatctctactaaagctatgata

SEQ ID NO: 34507 - DNA, 201 bp, Homo sapiens
gattacaggtgtgaaccaccgtgtccgtcctattctgtttttcttaagtgtcactgggaaacatggtcttccaatcaaattggcagtttaaccttggcttraatgcaaatatgttgttattatggtccaataggtggtaactcgcacttgtagaatgagccattgcgtgtggaggctagagtcttaaactgagactcagtt

SEQ ID NO: 34508 - DNA, 201 bp, Homo sapiens
taggggaccctgtgctttggatggtgcactcagtatacaccattccatttggagacatgttggagacaacataagggggatctggagtcagttaaggaagscttttgaattggtgatttcccctgaaagcatgactttggagccaagtagaaaatcaactatgctttttcggcttcttaaaaatgtctaaacacctttgtg

SEQ ID NO: 34509 - DNA, 201 bp, Homo sapiens
tctgcagggccttctgagggaggagtttcttctaccctggaagtcagcttctgcttctcttcatcttgctggcatcttctctaccacaatggttattagtrtctttaatcttcaatcccatgggaagaaagagctgttatctctcttcccataaaggacactcagtcacctaagacatttctctgtagttgaacatagctt

SEQ ID NO: 34510 - DNA, 201 bp, Homo sapiens
cttcagtgagccatctctcgggatcttccagctctggtattctgagtttctctaatttgaggagttggttagagatctcttttctcaacagtgtacctgtkccgagaaatgttactgttatagaaggaagtggttttggaaacgggtcagagtggaggaaagaggttgagttctcaaaaaactaaaggctaggtataagta

SEQ ID NO: 34511 - DNA, 201 bp, Homo sapiens
gaccaggcccactgccttttccagttttttttctttctttcttttttttgagacagagtcatgctctgttgcccaggttggagtgcagtggcgtgatcttyggctcactgcaacatctgcttcctgggttcaagcaattctcctgcctcagcctcctgagtagctgggattacaggtgctcgccaccacacccagctaatt

SEQ ID NO: 34512 - DNA, 201 bp, Homo sapiens
ttctcaaaaaactaaaggctaggtataagtaactgattcatcacagagatgactaattcatcagaacagctgtctgttctaaaatatgtcacatcaaataktcattgaataaaatattgaagtctcaactgctaacctagagagagccaagcagcttttaaaaaatcaggatagaagtgtacttttcatttccacattgga

SEQ ID NO: 34513 - DNA, 201 bp, Homo sapiens
tcattctggtaccactctctgtgtcagaggttgttgctcttttatttgccagttttctttctaaaagcagtcatgagcagacaagcttagaaagggtattytcttcgtgttgtttcagggaaaatagagaaagtcaaacctcctccatcccccaccactgaaggccccagcttgcagcctgacttagcccctgaagaggct

SEQ ID NO: 34514 - DNA, 201 bp, Homo sapiens
atttattttgtgcctacaacagattaagtatctgaataaaaatataaaaacatgaattgattaaaaaatggcctctcataatgtgcaaaacagggtctgtyggggaaattttgagaggtttttgtggagaacaatggttctgaatgttttgtagaaagagcaaccgatttgccccaccctttcccactttccaatggaaaa

SEQ ID NO: 34515 - DNA, 201 bp, Homo sapiens
ttggtgctttttgatgatcctcaggtgatcttaatggtcttccagggttgagcactgtggggaaaattgaggccaagatgtggaggcatctaactggctcktgcatgttaagaactggatgagatgggaagccagacattagaaataatggggtcagggcaccacttacatggtattaatagccagaggtcttgaatcttc

SEQ ID NO: 34516 - DNA, 201 bp, Homo sapiens
cacaaaggaatcacaggtgaatatttttatagtgagggtaaggaagtcttatctatgtatgacatcaaagccagaatgtgcaagtaaaaaagattgccagwtatgactttataaaaataacaaacatctgaccaggaaacaacaggagacttattacaagttctcattcacctcctacttccccaatctgccccacccagc

SEQ ID NO: 34517 - DNA, 201 bp, Homo sapiens
tttttattcattaactaaatactaagccaaacagcaaatagaataactaatttaaaagctgtggtgtgcataatagttattttaacatatctacaaaaagyataatataatatgaaagtgtctgtggtttccgttggtgacaaggtcacaggtactgctaatcctcctgaggtttgttatctacaattgcaactgagagaa

SEQ ID NO: 34518 - DNA, 201 bp, Homo sapiens
aatacttagaaactacagtgctttaatggaatcttccatttggatccaggaactaatcaatgagaaaagatgactcttatcctaatttctgccaaaagaaragcaagtccatctttgacaatgatctctacactcacatgctcctttcttctgtagggatactccccaaactttacatttagaacatggtaaaaagcctct

SEQ ID NO: 34519 - DNA, 201 bp, Homo sapiens
ctatggactccttgaatcctataaaatgtctaggattacaatttttttaaagaaggaattatattgaaaatcattaaaatattttaaaaacaaatctgtgytattgtaaggcatgtattttttattcattaactaaatactaagccaaacagcaaatagaataactaatttaaaagctgtggtgtgcataatagttatttt

SEQ ID NO: 34520 - DNA, 201 bp, Homo sapiens
gtggagattggaaagtagtctttgggtgaaaatatgctccattatggctaaagtgttggctatgccagtccttttaattaatgaacttaaagtaaccttakactccttcctcttccatcatctgtcatacctaaataattatatatgaattagatttcttaaaatgctatatgtacatgcatgctttagcaagtaactttt

SEQ ID NO: 34521 - DNA, 201 bp, Homo sapiens
attagaggtcatgcttagaattcagaccatttcttcttcttctttcttttcttcttccttcttccttctttcttcttctttgttaagcaaatatactcttytctatgtgttaccacttctgtggtgcccgtgtgattttgaagtgtttttcgtatgccattagacctggtcttttctgccagattgactggaactggtaga

SEQ ID NO: 34522 - DNA, 201 bp, Homo sapiens
caggagaaagtttcaaaaattttcaaaatatcttttgaaatgtaagccttccttaggcaggcaacactttctaccttgcattatggttgtttgtgtgcaaygtcttaatacacataggcatatacatacatctgcctgcacactttggtaacaggagacatgtctttcttttatttacattcctaacatcagagcccagca

SEQ ID NO: 34523 - DNA, 201 bp, Homo sapiens
gtacaggccaaagaggcagatgagtcatcatataaagatagcactagacgccatagaaggtcttcttcttttgaaaagcagaaacaattatgaaaaggtgsggataggcttttgaaggttgtgtctgatctctggctaggctcacaagcccagcaggagcctgtcctacaaagcctttccctgaggagagcttgcaggttg

SEQ ID NO: 34524 - DNA, 201 bp, Homo sapiens
gtgatcatgctgtgtccccccaccaactcaatctatgtctttaccaaatatttaatgaacaccaccatgctaccatgttaccaggtagcaaaagatgaccragaccccattcctgctgacaatggaactcataggagaatcaaataacaattgtacttgaagaaattgtctctaagatagtgcgacatggaattgagacct

SEQ ID NO: 34525 - DNA, 201 bp, Homo sapiens
ctttcaccctgatgggccacacagtccagatgaatggatggagatattgggtttgactctgctccatcacttaagtagcagagcatgttagaatctctcaraatcttggctttctggtctcttagacgaagatcaggatccccatcacctgggccattgtggagtttgggccaaataatatattttaaccatctatcatgg

SEQ ID NO: 34526 - DNA, 201 bp, Homo sapiens
ctgaagtgctttcctttgctttccaaccggggactgtcaaatgctaaccaaccatcctgaagcatgaattgtgtgaatttcttattaggaaatgcagatgktaaactaattacacctggagtgtatattgacgttaacttatatacatgtatacatacagacacccactgtctatgctgaactactctgaagtaattacag

SEQ ID NO: 34527 - DNA, 201 bp, Homo sapiens
cacatgggctatacttatactgctgtttatctgaatttcaaacgtaaatgggcattctgtatttcacttgctaaatctggcatctgtaagctggcaggtacctggaaagactcctccttccaaggaggaaaccaggtcatgggtgaaggctttagtcagggatagggggaaggaatatttcttagtggcagccaagtaggt

SEQ ID NO: 34528 - DNA, 201 bp, Homo sapiens
ataaccctatggcctatggcttttatctcccagacaagggaactctctctaaatgtaatttttccctcaattttaatcacagcatttaatgtaatcatttrggggaatcaatctgaaaatcatcagggattcttttttctttttactgctaccacgaatagtgattgtgcaacagagttggggaaagacttttgtttttga

SEQ ID NO: 34529 - DNA, 201 bp, Homo sapiens
tgttaaatagagataataaaagtttcttactccataggtcaattgaattaactgaatccactattaagaacagcaattatgtcactataattccccaatcyttctgccctgccccaagtcccactaagggaggagagaagaaaagaaggaatgaaccatgcttgcctctaacttcaagtctccccagcaagggatcaaaat

SEQ ID NO: 34530 - DNA, 201 bp, Homo sapiens
atgggctatacttatactgctgtttatctgaatttcaaacgtaaatgggcattctgtatttcacttgctaaatctggcatctgtaagctggcaggtacctggaaagactcctccttccaaggaggaaaccaggtcatgggtgaaggctttagtcagggatagggggaaggaatatttcttagtggcagccaagtaggtcaa

SEQ ID NO: 34531 - DNA, 201 bp, Homo sapiens
ggaaagacttttgtttttgatgttgcaatagcaggaaatagaaagttgctgctgtcagccacttggtcagagttacatttcttttgcaccacaaaagaagwcttgtaggagactggaatatggttccaggtaacccaactatacattcaatgatgaatgcaccactgcaaaggagaggtgtggccattgttgagtaatttg

SEQ ID NO: 34532 - DNA, 201 bp, Homo sapiens
catgtaactccaaaaaaagtcttaaaaagtaataagtttttattggagtgacatgaaaaagtagcaaaatggaatgtcacacttcacacagtctctcatcrtggcagctattttattttctctcacaaaactcccttttgctaacataccctcttacaattttttgacatatttcaatttccccatggtagcacgtagtgc

SEQ ID NO: 34533 - DNA, 201 bp, Homo sapiens
aaagtcatacagttaggaaaagagaataaaactgtctttattcatagaataatgattgtttaggtaggaaattaagaaatctacaaaaagttactagaacyaataagtgaatttagcaaggtctcaggataaaagatcaatataaaaacgtctatttctatacactagcaatggatgattgaaaaatgacatttaaaaaca

SEQ ID NO: 34534 - DNA, 201 bp, Homo sapiens
aaggttgttccgttattagctgattttcttatatcatcattaacactgctagcaaacttggtacattttgccagcccaatgcatacaagagagtgcagtttgtgtgtgtgtgtgtgtgtcaatgtaaagacaaatatttctttaaataataatgtatttgtattattttttgcagtggaattggaaattttctcacagtcc

SEQ ID NO: 34535 - DNA, 201 bp, Homo sapiens
tggctgggagctagggagtggcatgtcatccctggggagatgagaaagggtcagacttggtgtaagttttggagattgagctcacagatttgtgtgtgtttgtgtgtgtgtgtgtgtgtgtgtgtgtgtgtgtgtgtgtcaggttgtatgtatattgtggcaaaaagagaggactcacagaggaggccaaagtattttggc

SEQ ID NO: 34536 - DNA, 201 bp, Homo sapiens
gacatttaaaaacatttcacttacagaattcctggaaagcattaggatctgaatcatttatcattacggtagtcttctatccagaagaaaaagggagtcarcagagaagagttgctaggaaagtcaaatgtctacattttacttccaaagagttgagaatcctcagactctttacaccatgcccagagatactaaataatt

SEQ ID NO: 34537 - DNA, 201 bp, Homo sapiens
aggttgttccgttattagctgattttcttatatcatcattaacactgctagcaaacttggtacattttgccagcccaatgcatacaagagagtgcagtttgtgtgtgtgtgtgtgtgtcaatgtaaagacaaatatttctttaaataataatgtatttgtattattttttgcagtggaattggaaattttctcacagtcct

SEQ ID NO: 34538 - DNA, 201 bp, Homo sapiens
ggctgggagctagggagtggcatgtcatccctggggagatgagaaagggtcagacttggtgtaagttttggagattgagctcacagatttgtgtgtgtttgtgtgtgtgtgtgtgtgtgtgtgtgtgtgtgtgtgtgtcaggttgtatgtatattgtggcaaaaagagaggactcacagaggaggccaaagtattttggct

SEQ ID NO: 34539 - DNA, 201 bp, Homo sapiens
ggttgttccgttattagctgattttcttatatcatcattaacactgctagcaaacttggtacattttgccagcccaatgcatacaagagagtgcagtttgkgtgtgtgtgtgtgtgtcaatgtaaagacaaatatttctttaaataataatgtatttgtattattttttgcagtggaattggaaattttctcacagtccta

SEQ ID NO: 34540 - DNA, 201 bp, Homo sapiens
caacaaggactggctcctgaggctaggagactgctcggtatgtccaagaaacagctaaaaaataccaagtggagtgagtgaggtctggaatggtagaagaygaggtctggggaggttgcagggaccaggttttatagggctttatagaataatataaggacttttgccttttctttttagacggagtctcactgtgttgtc

SEQ ID NO: 34541 - DNA, 201 bp, Homo sapiens
ggtctggaatggtagaagacgaggtctggggaggttgcagggaccaggttttatagggctttatagaataatataaggacttttgccttttctttttagayggagtctcactgtgttgtcaggctggagtgcagtggtgcgatcttggctcactgcaacctccgcctgccgggttcaagcgattctcctgcctcagcctcc

SEQ ID NO: 34542 - DNA, 201 bp, Homo sapiens
tctcacataactgagaggagaagcaagctctcttgtgtctcttcttatatgggcactaatctcatcatgagggctccaccctcacaacccaattactcccygaaggcctcaactccaaataccattacattagggattagggtttccacatacgaatgttggggaacacaacattcaggccatagcaccatcctaataaat

SEQ ID NO: 34543 - DNA, 201 bp, Homo sapiens
aggtatttgtcctaatactctccctccccttgtcccccacccccaacaggccctggtgtgtgatgttcacctccgtgtgtccacgtgttctcattgttcamctcccacttatgagtggaacatgccgtgtttggttttctgttcctgtattagtttgctgagaatgatggtttccagtttcatccatatccctgcaaagga

SEQ ID NO: 34544 - DNA, 201 bp, Homo sapiens
ttattccaagtgagaagaaagttgctggggtgtcttaaattttcctcaaggcaataatagttgtcttgcataatagtggtctactttgcatattagatgtytattgcacttttaatacacatgtgcatgcacattgcacacactttgagaacaggaactacatcttgcttttatttttatcctcaacttcagtacctagag

SEQ ID NO: 34545 - DNA, 201 bp, Homo sapiens
acacacacacacacacacacacacacacacacaagcataaatagggcacacgtattctcccatgtaagggctgctgtcccttctccctcccacttatagcratgtgtgcctctctgtagctgaaggttgccttgtattaggacactgactgatgagtactccccaccagggtccggagagtgtgcttcattcacctttcag

SEQ ID NO: 34546 - DNA, 201 bp, Homo sapiens
aagaagagttcagcacatgtaagtgctcagtaatgttacctgcagtcattgccgtcttcatcaccatcatcatgatcaccatcatcatgatcatgatcatsatcatcatcatcatcatcatcatcatcaatgacatctgtggtttttaatagtggctgcatagtaaaatcacctgagaaatttacaaatagatcctgatat

SEQ ID NO: 34547 - DNA, 201 bp, Homo sapiens
caggctagcccccaggccaccacgctgattttcagttaaaaagtcactggtattgaggttttttaaaattataaatgccttcttaaacagatgttttactytagaaatgtttgttaaaatatattctattcaatttctagtaatggttagcaaatttgccttgacgttcttggggttcctgtcttggcattcatgcagaat

SEQ ID NO: 34548 - DNA, 201 bp, Homo sapiens
cccttattccacaggtattctttgctgtttctgttttatctacaggtttttatttttgttgttgttgtttgtctttttgtttttgtttttgtttttttctttttttttttttgagacggaatctcactctgtcaccaggctggagtgcagtggtgcgatctcagctcactgcaacctccacctcccaggttcaagagattc

SEQ ID NO: 34549 - DNA, 201 bp, Homo sapiens
ggtccgttcatcaaaccaggggctggtgttaatgtttgatcaacaaaacacatgtaggcctaggctctgatctaggtccaactgccaacatagccttttcrtgcctgcctttcctacttcaggtagagagaggagaaaaaacctattgaggaaaaaagaaagaataatattagcccaagcagtggttctactcacttaagg

SEQ ID NO: 34550 - DNA, 201 bp, Homo sapiens
agaagagttcagcacatgtaagtgctcagtaatgttacctgcagtcattgccgtcttcatcaccatcatcatgatcaccatcatcatgatcatgatcatcdtcatcatcatcatcatcatcatcatcaatgacatctgtggtttttaatagtggctgcatagtaaaatcacctgagaaatttacaaatagatcctgatata

SEQ ID NO: 34551 - DNA, 201 bp, Homo sapiens
tacaaaacagcatttctgagtagaaggcataatcaaatatgatttcatgaactgatgcatatatgagttagaggccaagaaatattgaatcatgaagtaargttcttctcatttctaaaatactgtaactccataatttttttcttttttttttgagacagagtctcactctgtcacccaggttggagtacagtggcatga

SEQ ID NO: 34552 - DNA, 201 bp, Homo sapiens
attctttgctgtttctgttttatctacaggtttttatttttgttgttgttgtttgtctttttgtttttgtttttgtttttttctttttttttttttgagayggaatctcactctgtcaccaggctggagtgcagtggtgcgatctcagctcactgcaacctccacctcccaggttcaagagattctcctgattcagcctcc

SEQ ID NO: 34553 - DNA, 201 bp, Homo sapiens
gcctgcatggactctttgtgagacagtgttgttggatactttatgaacattttaagggattctcatgagtaattttgattatagacgatttttactttatkcattgactaggaaccaaatgcaactttcttagagagacacaaaattcattgtccaaatagaccatagggtcagcaggctttgtaaacatgttttgtatgt

SEQ ID NO: 34554 - DNA, 201 bp, Homo sapiens
ctcttaatgtctctctcccttccctggattctaggtggaaaaaaggcagctgatctctagcacatgggacaatgcctggttcaaagcgtgggctaatacayttagcaggatggaaggagggaaggtgggatggaaggaaaagagggagagagggagaaaagaaggaaggagaaaggaaggaaggaaggagggagcaaaggc

SEQ ID NO: 34555 - DNA, 201 bp, Homo sapiens
agaaggaaggagaaaggaaggaaggaaggagggagcaaaggcaggtaggtaggaagaaaggaaggaaggaaagaaaaagagggaaggaaggaaagaaaaasagtgaaggaaggaggaagggagggaagacaggcaggaagaaaggtaagaagaaaggaaggaaagaaagaaagaaatggaaggaaagaaggaaggaggaag

SEQ ID NO: 34556 - DNA, 201 bp, Homo sapiens
aattctccttgaagaggtccttcacatcccttgtaagttggattcctaggtattttattctctttgaagcaattgtgaatgggagttcactcatgatttgkctctctgtttgtctgttaatggtgtataagaatgcttgtgatttttgcacattgattttgtatcctgagactttgctgaagttgcttatcagcttaagga

SEQ ID NO: 34557 - DNA, 201 bp, Homo sapiens
tgtacattttaatacctaccctggtggtagatgcacactatttatacagagcacattcaacaggcagcatgtcaccagtgatgcatagctgtttacgcatrttgaggtgtgggggtggatcctgtctataatcactgtaagagtatagttaggaataattctatgtgaacaaactcaagtctttaagcctaattattaaaa

SEQ ID NO: 34558 - DNA, 201 bp, Homo sapiens
aattagccaggcgtggttgcaggcgcttgtaatcccagctactcaggaggctgaggcaggaaaatcacttgaacccaggaggcggaggttgcagtgagccragatcgcaccattgcactccagcctgggcatcaagagcaaaattttgcctccaaaaaaaaaaaaaaaaaaaaagaatagtgctgttcttattgttgtttc

SEQ ID NO: 34559 - DNA, 201 bp, Homo sapiens
atataaccttagggtttagtacttaatcatatattgagggggctgctctgtcctctttctgatgccccattctccactcccttatctttctctcgctctcttttttttttttttgagtcagcatctcactctgtcacccgggctggagtgcagtggcgtggtctcagctcactgcaacgtccgcctccagggttcaagcga

SEQ ID NO: 34560 - DNA, 201 bp, Homo sapiens
aaagccctcttcactgactgaaaaaatctagatgcttagggtttgtggtcagctttgcaagctggcacaggtaagggaggaaacactctgaaattgcagtscagcatttcaacatttcatgtgtgttacttagcaacaatagcaggaggcctgccagatgtaccagagtcatcgtgcctcgctcaggttttgtaggatcca

SEQ ID NO: 34561 - DNA, 201 bp, Homo sapiens
tggggatactgttttgtttttcttttcttatgattgctgttaacgatgtcatgtttaagtaaggaaagaaggttttgatattcctctaagagttaccagcmtgtggaggagttgtgctccaagaggatcgaaggcttagaattcaaatgtaaaagtgtttaccttcttaggccagtcatctgatcaacacgtaatgtagct

SEQ ID NO: 34562 - DNA, 201 bp, Homo sapiens
catcaatttttaaatggtggagtagctcccatgatggatgttatgaaagggtctatgggtgcatatgaaagggagtggtcattactactcagtccaggtaraactccctggatggagggtgaagacaatgtggtttgagttgttaggtaaatgtttccttatcatttttcattatatgttacatttacattctgttcatcc

SEQ ID NO: 34563 - DNA, 201 bp, Homo sapiens
tcattcaaaaacaggcagatgtatgtatgtttgtgagccatgatagggatccagaaatatttacataattttcatctattaagagatttaacagctgtgtytgccatgtagttactttaaaatataaaatgcaaggtcagatctcttggggatactgttttgtttttcttttcttatgattgctgttaacgatgtcatgtt

SEQ ID NO: 34564 - DNA, 201 bp, Homo sapiens
cacctcccgggttcatgccattctcctgcctcagcctcccgagtagctgggactataggcgcctgcctccacacccggctaattttttgtatttttagtaragatggggtttcaccgtgttagccaggatggtcttgatctcctgacctcatgatctgcccgccttggcctcccaaagtgccgggattacaggtgtgagcc

SEQ ID NO: 34565 - DNA, 201 bp, Homo sapiens
tgttttataaacatccgtggttattttctctctgatagaatcctggaaataaaatactgggtaaactagcataggtatataggctcctgaggatatatagrtatatcatatatattctacatatatatatatatatatataggtatatatacctccaaaaggatgcttttcaaaaggatgaaactggcaagaataaaatct

SEQ ID NO: 34566 - DNA, 201 bp, Homo sapiens
aaaaaggaaggtggtggcaaaaactactatttaatgatggtcaaaaataaaaaataaagatattagcaattataaatattaattgtgttaagtatcactcyttaacaaagaccagacctagactggaagaaaatcagagaatggaagatgttgacaaaagaggaacactcattatttgtgcctgttaatggagaagacata

SEQ ID NO: 34567 - DNA, 201 bp, Homo sapiens
cttctttacatggcagcagcaaggagaagcgctgagcataaggggggaaaatctccttgtgattcatgcctgtaatcccagcactttaggaggttgagttsggtggatcgcttgaggtcaggagtttgagaccagcttggccaacatggtgaaaccccgtctctactaaaaatacaaaaaattagctgggcatggtggcag

SEQ ID NO: 34568 - DNA, 201 bp, Homo sapiens
atggagaaaattctggaccttcttatcttcaaagagagcaataagcatttgttggtttaaacaagacatcatctgatgataccaagcccagattcctgccyaatccggataggttagatttccagcccatttccatttacctggtgtagttgccagtggctttgattctatcaggccatcatgcatgaaggcaaattctta

SEQ ID NO: 34569 - DNA, 201 bp, Homo sapiens
ccactcccatgattcaattacctccccaccaggtccctcccatgacacatggggattatgggaactataattcaagatgagatttggatggggacacaacraaaccatatcaaatattaatagagtctggcagggaggaagcatgacttcatactggtggtgagtcagaaggggcatcttcatattttaaggaaggtggca

SEQ ID NO: 34570 - DNA, 201 bp, Homo sapiens
caggaaacaacaggagacttattacaagttctcattcacctcctacttccccaatctgccccacccagcctctccagacatgcctcactcttcaccggggycacctcaaaaagtggtatctaggctgggcacagtggttcatgcctgtgatcccagtacttgggaggctgaggtgggaggatcatttgaacctaggaattc

SEQ ID NO: 34571 - DNA, 201 bp, Homo sapiens
ttcccataaaggacactcagtcacctaagacatttctctgtagttgaacatagcttagttctcactcacagaatgacatttgaatagttctaaaggctcaytgcaaacatgagcaccctacggtgttacaaagtccctgtggattggctggcatggctctgctgatagggctgagctcacctacgtgactctaatctgcgt

SEQ ID NO: 34572 - DNA, 201 bp, Homo sapiens
tggagcacaggctggcaggggtcggcaaaatttttgtataaatggccagattttaactattttagactttgtggaccatatagtctttgtcacacattaawtgttttctttctcttttctctttccttcccccatcttttcctccctctctttcttcttctccttcctcttcttttttcttccttctccttccccttctct

SEQ ID NO: 34573 - DNA, 201 bp, Homo sapiens
ctctattcacccaacctccacaactccccaaatccagtaggataaaaaaagggagggatctttttccctcccttgaagcatgtgtaaagcttaactgcatmctgggaagtgtagttccagcacttaggtggatccaagaagtaagatttatggcagaagtattctacatgctgggattgtagcttttcatgcacagggtgt

SEQ ID NO: 34574 - DNA, 201 bp, Homo sapiens
gtagttccagcacttaggtggatccaagaagtaagatttatggcagaagtattctacatgctgggattgtagcttttcatgcacagggtgttgagtcagcrtctcaaagaatcagacaatgacggttaggagcaataccccacccgtgcagagctgcattagaatttagagttaggttagaagctgcgcaaacacctgttc

SEQ ID NO: 34575 - DNA, 201 bp, Homo sapiens
aaatttttattaacaaaacatctattttgcatatctagcattctgtatccttttcgtataatgctttgcaatgaagcatctatcataaaaaccactaaacygtacagatggtgtttatgcaacacaatttaatgtcccagcaagaactagtgatttgttacatacattatgcatcattgtgatgtatatatccagatttta

SEQ ID NO: 34576 - DNA, 201 bp, Homo sapiens
cttccttaggcaggcaacactttctaccttgcattatggttgtttgtgtgcaacgtcttaatacacataggcatatacatacatctgcctgcacactttgrtaacaggagacatgtctttcttttatttacattcctaacatcagagcccagcacactgcttggaatgtcataggaactcagtgaatgaataaagaatgaa

SEQ ID NO: 34577 - DNA, 201 bp, Homo sapiens
gggctgattttcttacctaagaaatgttgagctttatgatttctgaggttggctatatgtgaattgccctagtaagtgcaaatgtgttttcataggttagaaaaaaaaaaaaagcccaaaaagtattttctgggaattgagagttgtaagcacctacaattctagaatatactttattataaaagttaaaatgttatgcaa

SEQ ID NO: 34578 - DNA, 201 bp, Homo sapiens
gcgtgttctgggcatgtcctcaaagaaagaagggactttgcaaacgggaaggggttgggagctctatcctcattcattcccttgcagcctttgtgatgttkgattgcaatttgccacttctggtgaggcgggtacgcagaatacattatccagcttaaactcaacaaaccctgtttcaacaaactgaagaagtggcttaaa

SEQ ID NO: 34579 - DNA, 201 bp, Homo sapiens
attcctaggtattttattctctttgaagcaattgtgaatgggagttcactcatgatttggctctctgtttgtctgttaatggtgtataagaatgcttgtgwtttttgcacattgattttgtatcctgagactttgctgaagttgcttatcagcttaaggagattttgggctgagatgatggggttttctaaatatacaatc

SEQ ID NO: 34580 - DNA, 201 bp, Homo sapiens
tcatacccaaaaggagcttctgggtcttgaagataaaccactttctcttgttcctctcagttgctctgatattctaagacccagagcagattttttttttwaaccaggagtccatgagtcttctaagaatgtccttggaagaattcaaggaattcctgataccccagaaactatacataaaatgctgtatgcatgtgcact

SEQ ID NO: 34581 - DNA, 201 bp, Homo sapiens
ggggccagctgccttcacattctgtcctcttggaaatcctcataacagcctcagaaggtaggtgtattgatttcctagggcagctataacaaattctcacmaattacgtggttgaaaacaatagcaatttgttctctcacagttcaggagtcctgaagtctgaaattacagatggcagggttggttccttctggaggcttt

SEQ ID NO: 34582 - DNA, 201 bp, Homo sapiens
gttgcttatcagcttaaggagattttgggctgagatgatggggttttctaaatatacaatcatgtcatctgcaaacagggacaatttgacttcctcttttmctaattgaataccctttatttctttctcctgcctgattgccctggccagaacttccaacactatgttgaataggagtggtgagagagggcatccctgtct

SEQ ID NO: 34583 - DNA, 201 bp, Homo sapiens
agggtgttgattttagatctttcctgctttctcttgtgggcatttagtgctataaatttccctctacacactgctttaaatgtgtcccagagattctggtrcactgtgtctttgttctcattggtttcaaagaacttctttatttctgccttcactttcttatttacccagtagtcattcaggagcaagttgttcagtttc

SEQ ID NO: 34584 - DNA, 201 bp, Homo sapiens
attcaatatgatattggctgtggatttgtcacaaatagctcttattattttgaaatatgttccatcagtaccttgttttttgagagtttttagcctgaagsgctgttgaattttgtcaaaggccttttctgcatctattgagataatcatgtggtttttgtctttggttctgtttatgtgatggattacgtttattgattt

SEQ ID NO: 34585 - DNA, 201 bp, Homo sapiens
tgagataatcatgtggtttttgtctttggttctgtttatgtgatggattacgtttattgatttgtgtatattgaaccagctttgcatcccagggatgaagycaacttgatcatggtggataagctttttgatgtgctgctggatttggtttgccagtattttattgaggatttttgcatcgatgttcatcagggatattgg

SEQ ID NO: 34586 - DNA, 201 bp, Homo sapiens
atccattgctgcttcaccaggtctctttagccgcctgacgccttcattgtttagtgttacattgtctccctttgttcaaagatgcaaagttggccgggcgyggtggctcacacctgtaatcccagcactttgggaggccgaggcgggtggatcacgaggtcaggagaccgagaccatcctggttaacatggtgaaaccctg

SEQ ID NO: 34587 - DNA, 201 bp, Homo sapiens
gccaggtgcacttccttccatcccaccctcaccccttctgcatttgccttcatgctggagacatcctgacttagccagaaagttaaaaatttaggaagaasctctctaaagatagccacacatagctcgtggaaccagttcttcatcatgattgtcattgcgtcctgcgcactgaaaacgtgacttacaaaagagaggcag

SEQ ID NO: 34588 - DNA, 201 bp, Homo sapiens
ccaaagggtgaaaatactctttgaaaatactctttgattttattacacttaatcttagccaaaggccaagaagcgattgtatgctttgattttaaatagtrgcatgtttatagggagatagggcaagtgttggaaggataagagtgctttctatacacataaatggattttcaagaaatgttttgtgaccaactggtttta

SEQ ID NO: 34589 - DNA, 201 bp, Homo sapiens
attcttatatccagaatggaaataatttcgggaataacaaactccttatgtttaccactgttccactgtttaagtcactgttttcttttttctttctttcttttttttttttttttcttttgtggcagggtctcactctgtcacccaggctggagtgcagtggtatgattttggctcactgcaacctctgcttcctgggtt

SEQ ID NO: 34590 - DNA, 201 bp, Homo sapiens
agataatcatgtggtttttgtctttggttctgtttatgtgatggattacgtttattgatttgtgtatattgaaccagctttgcatcccagggatgaagccmacttgatcatggtggataagctttttgatgtgctgctggatttggtttgccagtattttattgaggatttttgcatcgatgttcatcagggatattggtc

SEQ ID NO: 34591 - DNA, 201 bp, Homo sapiens
ggtggataagctttttgatgtgctgctggatttggtttgccagtattttattgaggatttttgcatcgatgttcatcagggatattggtctaaaattctcttttttttgttgtgtctctgccaggttttgatatcaggatgatgttggcctcataaaatgagttagggaggagtccctctttttctattgattggaatagt

SEQ ID NO: 34592 - DNA, 201 bp, Homo sapiens
atcagtgacaggtgaacctctgtgaaaattgaaagggcaatttagttgaaatggaagcatttattcaggaaacaggtgatctgggaaaatttgatgtgcatttttttttttttttttgagacagagtttcactcttgttgcccaggctggagtgcaatgatgtgatctcggctcactgcaacctctgcctcccaggttcca

SEQ ID NO: 34593 - DNA, 201 bp, Homo sapiens
tggttggtaggctattaattattgcctcaatttcagagcctgttattggtctattcaaagattcagcttcttcctggtttagtcttgggagggtgtattgyccaggaatttatccatttcttctagattttcaagtttatttgcgtagaggtgtttatagtattctctgatgatagcttgtatttttgtgggattggtgct

SEQ ID NO: 34594 - DNA, 201 bp, Homo sapiens
caaaatattatttttaaaactactcaaaattttaaaatactaaaagaaaaaatgggactcaaatttaatgagcccgtgtgtgcgtgtgtgtgtgcgtgtgygtgtgtgcgcatgtgtgtgcgtgtgcgtgtgcgcgtgcacgcgcaccttgtaggtaggtgaggagattactagattgactctcctgtacatttaagttaa

SEQ ID NO: 34595 - DNA, 201 bp, Homo sapiens
ctgcaacctctgcttcctgggttcaagtgattctcgtgcctcagcctcccacgtaactggggttatagagcccagctaatttttccatttttggtagagayggggttccagccatgttggcaaggctggtctcgaacttctgatctccagtgatccgcctgtctcagcctcccaaagcgctgggactacaggcgtgagcca

SEQ ID NO: 34596 - DNA, 201 bp, Homo sapiens
tagtcttgggagggtgtattgtccaggaatttatccatttcttctagattttcaagtttatttgcgtagaggtgtttatagtattctctgatgatagcttstatttttgtgggattggtgctgatatcccctttatcatttttttattgcatctatttgattcttctctccttgtatttgattcttctctcctttcttctt

SEQ ID NO: 34597 - DNA, 201 bp, Homo sapiens
atcaccagtgtatgaggatttgcattaaataaattataggtaattacattaacaaaccaagaagacttacagttaaagagggcaaaaatataatttacttwactgctctatgaaatctatttgtggatttctctcttctcaaaggagaattaatcagagaacaactttgttgttattgttgttgttgtcgtttaagaaaaa

SEQ ID NO: 34598 - DNA, 201 bp, Homo sapiens
tcaaggtcaagctcccaatatttcaagtacaaataagacttcacctgtgcacaaacatgtgcttacacacttccatcctcctgaattttctttccagactrttttacagataaggaagcagctctcaaaagacctctctcagacatttgaaaacacattttttttcagagtgctaaattcatgcttcttattttatatatg

SEQ ID NO: 34599 - DNA, 201 bp, Homo sapiens
ccacgctaccaaaagggattccaagctgacggagcacatcgtggtcattgtgctaaggtaaaccagactggcccctaagctctctgagaaaccaatgaccygactgtgtctactggcatcagataaccaggctggagtagaacctggccttcccaaagactttctagtttgtagctaattcatagccaaacctagaattgt

SEQ ID NO: 34600 - DNA, 201 bp, Homo sapiens
agagaagtaagtcttagctagagagggcataggatttgcatggattgttttaagaagaggaagtctaaattcttaggtgaaggagttaggagaaaatagtsaaagaggtgaaatgcaggtgagtggaggataaatgatggtatggggtccctgagaggtcagggcatgatggaattcaaggtactggttattagccttttt

SEQ ID NO: 34601 - DNA, 201 bp, Homo sapiens
cagagtgctaaattcatgcttcttattttatatatgttagaaataaacacataaataataaacagtcttgcctggactggttcatgttcaattcataggcrctgagtattctttattaggacatactcactattgtttgttgaattattgcacttttaagaaatcaatctgaagattaaacattaggagtctcgataaaaa

SEQ ID NO: 34602 - DNA, 201 bp, Homo sapiens
ctttgtcttctcactcttctgcaaaaagagctttggggtttactgtagcaaataatggaaaacattaaagaagtattgttagcatagttcttttgctttcaatttttacctaagttattgtccaattttacattctgaatggtgaactgggtggcctggccacactatttggctgcctctggcaaaaacttctgccctcac

SEQ ID NO: 34603 - DNA, 201 bp, Homo sapiens
agggacatattttggggaaaagtgatgagtttattttggacatgttgagatcataataccttcggaatatacatgtgagatgcctgataggaaataacatrtaggtatggaattcaggaaggagatctggttttggggacttcagtaaatctgcatcaaatagtaactttagccatggatgtgaatgaggctatccaggga

SEQ ID NO: 34604 - DNA, 201 bp, Homo sapiens
tgatgatgctactctccagcttcaaaccctttacctgttttccttggactataagataaagttcaacttccttaatttagcttagagagtcttttatgatrtgacctcctcttacttctctggccttgtctctcataattgtgtcattccattgctgaccactccagcaactacctgccattccttggatgtaccaagctc

SEQ ID NO: 34605 - DNA, 201 bp, Homo sapiens
accactcagaggtggctatcttgatactgatccaagaatgaaatagggatagactgacatgagagagtggctgtggagatggtgaagaaggcatggatttratagttatgtggttgaattgctggaacttggtactgattgagtaaagggtgagaggtatggagaaataaagttaatagccatgtttccagcatagacaag

SEQ ID NO: 34606 - DNA, 201 bp, Homo sapiens
ttcctgtgggcatatttaccttagagcttactgtgtcatagtacattggaagctgatttttttctctatcctcctctagcctcagctgcctaggggtaaasacactacagtgttcacccttgtattctcagatcttagtacactgccaggctcaatgggttttcaaacatatttacataaagaaagaaaacaatgacaaaa

SEQ ID NO: 34607 - DNA, 201 bp, Homo sapiens
agcttgaaatgctgtctgaacacctctatgccttgatcatttttctcttcaagatcctactgacatgttccaacctcctgaaatcctgccctgcctccccrcaagcagagttactcagactctcttctttgcattcctgcagcattttggtcttgcaatttgagctctactgtgcactgcattgtaactattcatatagct

SEQ ID NO: 34608 - DNA, 201 bp, Homo sapiens
tcagaggtgctgtttattctttggtgtccttttgggtagtttagggaaatccatgctgtaggtgaccacaagagagaatgttcccttttagaactatattsattgagcacaggctgtgtgcaaatactcttctaggcactgtggatgccatagcaatacatgctgtttctgctttcatagagcagtgatttccaaatcctg

SEQ ID NO: 34609 - DNA, 201 bp, Homo sapiens
atgttttataaacatccgtggttattttctctctgatagaatcctggaaataaaatactgggtaaactagcataggtatataggctcctgaggatatatakgtatatcatatatattctacatatatatatatatatatataggtatatatacctccaaaaggatgcttttcaaaaggatgaaactggcaagaataaaatc

SEQ ID NO: 34610 - DNA, 201 bp, Homo sapiens
ctacatatctgtgcatcttctacttatggttttatttaggtgagaataaataagagtacctcatagtagataagaatagtacattacacacgcgcgcacgmacacacacacacacacacctggggttagatgaaattgtatatttggggaacttggggtaaagagtacagagccacacagcagttaccttctgcatcctcc

SEQ ID NO: 34611 - DNA, 201 bp, Homo sapiens
ctgaggggaatgacaatggatttggtaacacagcatgctaatatcatgcaaataatgagatgatataggaatctctgctctagtggtgggtctgaggtttkctctagtggtgggtctgaggttttctctactgagggcaaaattggagctttttttaaaaaaaaaaaaaaatttaatttttttttgagacagggtctcctt

SEQ ID NO: 34612 - DNA, 201 bp, Homo sapiens
agagagacttttttcccagtggaggagctggatgttgttcctaaaagaaaagggcagagggaccctgggcaggcaaaattttcagctgcctgccaccttakcccctgtccccacactcacttctgaaccacatgtgatcagtcttctcttcccaccacataactgaaacttcaaggtcatgggtgagctctatgttgttaa

SEQ ID NO: 34613 - DNA, 201 bp, Homo sapiens
ctctcaacactgttgtatttgggattaagtttccaacacatgaatttttgggagacacattgaaaccacagcagccacagataagctatatatatatatakagagagagagagagaactatagagagagggcaaactatgtatatagaataaagtgtgtatatatagtgtaagatacatatatatatatgtcgttttgtgt

SEQ ID NO: 34614 - DNA, 201 bp, Homo sapiens
cctctcctctgagcagcaaacacttcttctgaggttcttgttttggcaggttggccagacaggcaccccacttgactgctcaactatgaaactgcagttcyagagaagagaacaggtctgaattaagcaccttaagccagttggtcagcatctccttttattcggagagtagttactgagattcaaacccatgtcaactga

SEQ ID NO: 34615 - DNA, 201 bp, Homo sapiens
ctattttagactttgtggaccatatagtctttgtcacacattaattgttttctttctcttttctctttccttcccccatcttttcctccctctctttcttyttctccttcctcttcttttttcttccttctccttccccttctcttcttcttcttcttcctcttcttttttttttttttttttttttttaaagaaacaacc

SEQ ID NO: 34616 - DNA, 201 bp, Homo sapiens
ttcacttgttggtgaggactaaaaattaaaacaattgaactcatggacatagagagtagaaggatggttaccagaggctcggaagggtagtggggaggggkaagtgggtatggttaataagtacaaaaatatgattagatatataactagaatgaataagatctaatatttgatagcacaaagggtaactacagtcaataa

SEQ ID NO: 34617 - DNA, 201 bp, Homo sapiens
gttctgttctacagagtaagggtgctttctgctacatgtcctttgacatgtggcctaggttattattatctcaagaggcaaaactgctttatagtaccaayctgcagtctaataagtgtgtttgttccctaacaaagctaagtttctatatgtttttgcttattgttataaatttgaagggtccttgtataatgaaaatat

SEQ ID NO: 34618 - DNA, 201 bp, Homo sapiens
atctctcaacactgttgtatttgggattaagtttccaacacatgaatttttgggagacacattgaaaccacagcagccacagataagctatatatatatakatagagagagagagagaactatagagagagggcaaactatgtatatagaataaagtgtgtatatatagtgtaagatacatatatatatatgtcgttttgt

SEQ ID NO: 34619 - DNA, 201 bp, Homo sapiens
caaggtcagagctaaggaagtcacccagtgattttttctggaatgccatccattgctgcttcaccaggtctctttagccgcctgacgccttcattgtttastgttacattgtctccctttgttcaaagatgcaaagttggccgggcgtggtggctcacacctgtaatcccagcactttgggaggccgaggcgggtggatca

SEQ ID NO: 34620 - DNA, 201 bp, Homo sapiens
agttaatataggctataagttggaatcaataatccatgaaagaaaccctggatagggtttttaggacacaggcactgctataccctaatagaatggatcarctttcattcagttaaaaaaaaatctacttcttttttatgccacaaagtgccaccttaaatttatcttagtgattgaatgtcatacccaaaagaatcaaaa

SEQ ID NO: 34621 - DNA, 201 bp, Homo sapiens
tcctttgattttggtatccaagggggtcctgaaaccaattctctgaggatactgagggatgactgtatgatgttgtcaggacagatttgctaacagcgtgtgtttgtttgtgtgtgtgtgtgtgtgtgtgtgtgtgtgtgtatgtgtgtgtgagagagagagccaattaagagacagagggagttgggtggggggacttat

SEQ ID NO: 34622 - DNA, 201 bp, Homo sapiens
tgcctcatgcacaaaagaattgagagcaaggactcgaacagatatttgtataccaatgctcacagcagcattatttccaatagccaaaagacggaaaaaamcccaagtgtccatccacagatgaatggataaacaaaatgtgatatatccctacaatggaatattattcagccataaaaggaatgaaattttgatatatgt

SEQ ID NO: 34623 - DNA, 201 bp, Homo sapiens
cctttgattttggtatccaagggggtcctgaaaccaattctctgaggatactgagggatgactgtatgatgttgtcaggacagatttgctaacagcgtgtgtttgtttgtgtgtgtgtgtgtgtgtgtgtgtgtgtgtgtatgtgtgtgtgagagagagagccaattaagagacagagggagttgggtggggggacttatg

SEQ ID NO: 34624 - DNA, 201 bp, Homo sapiens
tggaaaagtcacttaacttctctgaacctctttttcctatgaagtgggactaataatccctacgatagatttgtatggagaataaagtttaaaatgcctcrtgcacaaaagaattgagagcaaggactcgaacagatatttgtataccaatgctcacagcagcattatttccaatagccaaaagacggaaaaaaccccaag

SEQ ID NO: 34625 - DNA, 201 bp, Homo sapiens
ctttgattttggtatccaagggggtcctgaaaccaattctctgaggatactgagggatgactgtatgatgttgtcaggacagatttgctaacagcgtgtgtttgtttgtgtgtgtgtgtgtgtgtgtgtgtgtgtgtgtatgtgtgtgtgagagagagagccaattaagagacagagggagttgggtggggggacttatgg

SEQ ID NO: 34626 - DNA, 201 bp, Homo sapiens
atttataagccctagacacatggccctggaaaagtcacttaacttctctgaacctctttttcctatgaagtgggactaataatccctacgatagatttgtwtggagaataaagtttaaaatgcctcatgcacaaaagaattgagagcaaggactcgaacagatatttgtataccaatgctcacagcagcattatttccaat

SEQ ID NO: 34627 - DNA, 201 bp, Homo sapiens
gtcagcagtgctgacttgcagaatgtacacggcattattgaaacatggttaacaatgaaagtgttgatggccacgctaccaaaagggattccaagctgackgagcacatcgtggtcattgtgctaaggtaaaccagactggcccctaagctctctgagaaaccaatgacctgactgtgtctactggcatcagataaccagg

SEQ ID NO: 34628 - DNA, 201 bp, Homo sapiens
tttgattttggtatccaagggggtcctgaaaccaattctctgaggatactgagggatgactgtatgatgttgtcaggacagatttgctaacagcgtgtgtttgtttgtgtgtgtgtgtgtgtgtgtgtgtgtgtgtgtatgtgtgtgtgagagagagagccaattaagagacagagggagttgggtggggggacttatggc

SEQ ID NO: 34629 - DNA, 201 bp, Homo sapiens
aggaaaacagtatttataagccctagacacatggccctggaaaagtcacttaacttctctgaacctctttttcctatgaagtgggactaataatccctacsatagatttgtatggagaataaagtttaaaatgcctcatgcacaaaagaattgagagcaaggactcgaacagatatttgtataccaatgctcacagcagca

SEQ ID NO: 34630 - DNA, 201 bp, Homo sapiens
ccaaccccgcaggaaatttctctcttgtcagcagtgctgacttgcagaatgtacacggcattattgaaacatggttaacaatgaaagtgttgatggccacrctaccaaaagggattccaagctgacggagcacatcgtggtcattgtgctaaggtaaaccagactggcccctaagctctctgagaaaccaatgacctgact

SEQ ID NO: 34631 - DNA, 201 bp, Homo sapiens
tggtatccaagggggtcctgaaaccaattctctgaggatactgagggatgactgtatgatgttgtcaggacagatttgctaacagcgtgtgtttgtttgtgtgtgtgtgtgtgtgtgtgtgtgtgtgtgtatgtgtgtgtgagagagagagccaattaagagacagagggagttgggtggggggacttatggccacatcgg

SEQ ID NO: 34632 - DNA, 201 bp, Homo sapiens
cttcaaggtcccatctctcaacactgttgtatttgggattaagtttccaacacatgaatttttgggagacacattgaaaccacagcagccacagataagctatatatatatatatagagagagagagagaactatagagagagggcaaactatgtatatagaataaagtgtgtatatatagtgtaagatacatatatatat

SEQ ID NO: 34633 - DNA, 201 bp, Homo sapiens
gtatccaagggggtcctgaaaccaattctctgaggatactgagggatgactgtatgatgttgtcaggacagatttgctaacagcgtgtgtttgtttgtgtgtgtgtgtgtgtgtgtgtgtgtgtgtgtatgtgtgtgtgagagagagagccaattaagagacagagggagttgggtggggggacttatggccacatcggta

SEQ ID NO: 34634 - DNA, 201 bp, Homo sapiens
aatttaaactaattccagaagcacacagctgtattaaattgccccgatcaagtatgtgaaagtaaatggtaggcatcctaaccagctgttaactattctagaatttagtgggaagggcaggtttctgtgtcgtggtattagggctctacctggagggtgaactgggccgatctaaaaagctcccacagcccctttgcacct

SEQ ID NO: 34635 - DNA, 201 bp, Homo sapiens
gtgtcaggcaggcacagcatccataggtggtaggagctgaagctaggctttcccaatttcattattcattccccagccagcagggtggacaggatttagtrggcaggccaccatccctccactgccaaccccgcaggaaatttctctcttgtcagcagtgctgacttgcagaatgtacacggcattattgaaacatggtta

SEQ ID NO: 34636 - DNA, 201 bp, Homo sapiens
ttcaaggtcccatctctcaacactgttgtatttgggattaagtttccaacacatgaatttttgggagacacattgaaaccacagcagccacagataagctatatatatatatatagagagagagagagaactatagagagagggcaaactatgtatatagaataaagtgtgtatatatagtgtaagatacatatatatata

SEQ ID NO: 34637 - DNA, 201 bp, Homo sapiens
ggatggtgttgagcagagcccttagcttttgtctgtattgctgtcttgtcctgtggggggtcagaagcaacatctctgaagtggaatgtgtattaatgactttttttttttttagacagagtctcactctgtcacccaggctggagtgctgccatgacagctcgctgcatcctgaaaccatcctcccacctcagcctcccc

SEQ ID NO: 34638 - DNA, 201 bp, Homo sapiens
gaatttagtgggaagggcaggtttctgtgtcgtggtattagggctctacctggagggtgaactgggccgatctaaaaagctcccacagcccctttgcaccytagtttttctctgaccttagaaaacccagtttgatgattctttcatatcctcctgtttttgcattggggcatagttcatttcaaaaaggactttcctggt

SEQ ID NO: 34639 - DNA, 201 bp, Homo sapiens
ctcaacactgttgtatttgggattaagtttccaacacatgaatttttgggagacacattgaaaccacagcagccacagataagctatatatatatatatakagagagagagagaactatagagagagggcaaactatgtatatagaataaagtgtgtatatatagtgtaagatacatatatatatatgtcgttttgtgtgt

SEQ ID NO: 34640 - DNA, 201 bp, Homo sapiens
ataaagacatacccgagactgggtaatttataaggaaaaagaggtttaatggacttatagttccacgtggctggggaggcctcacaatcatggcagaaggygaaaggcacatctcacatggcaacagactggaaatgagagcttgtgcagggaaactcccctttataaaaccatcagatctcgtgagactgattcactatc

SEQ ID NO: 34641 - DNA, 201 bp, Homo sapiens
ctttcatatcctcctgtttttgcattggggcatagttcatttcaaaaaggactttcctggtgattgaatgaatgtgcatcttatctgaatctggaatcackttcgcctaatttgaagcatggagaaaattctggaccttcttatcttcaaagagagcaataagcatttgttggtttaaacaagacatcatctgatgatacc

SEQ ID NO: 34642 - DNA, 201 bp, Homo sapiens
cagataagctatatatatatatatagagagagagagagaactatagagagagggcaaactatgtatatagaataaagtgtgtatatatagtgtaagatacwtatatatatatgtcgttttgtgtgtgtgtgtgtgtgtgtgtgtgtgtgtgtgtgtatgtagttctacttccaagaatttctactacagccatggaggcac

SEQ ID NO: 34643 - DNA, 201 bp, Homo sapiens
atttgtacctctgagtatttcagtcttcagcttattgggacaaagagcagctactctgacaaactttaaaatgctctgagaaatagagcagttatcatggaaaaaaaaagtcatcatagaaaaagctaagtgaggggggttgtgggttatagtttgtcaatatttaaaggaaaaccagggcccagtagaattgtttctata

SEQ ID NO: 34644 - DNA, 201 bp, Homo sapiens
aaatactagttttttactcctacgaaagtgaaatggcaaaagtgtacctatgcacattatttttcccaccaatggtcatattcttagcaaataaacgtttyctctgtgggctgggggtgttacaatgtttttaaatagtgggattatcaagtttagggttttattggctcagagggcaagtgtgaaatcttgagtctgtct

SEQ ID NO: 34645 - DNA, 201 bp, Homo sapiens
atatccttgttaaccttccatctcattgatctgtctgatattgacagtggggtgttatagtctcccattattattgtgtgggagtctaagtctctttgtargtctctaaggacttgctttatgactctgggtgctgctgtattgggtgcatatctatttaggatagttaggtcttcttgttgaattgatccctttaccatt

SEQ ID NO: 34646 - DNA, 201 bp, Homo sapiens
gaaatactagaaaacacagaaggatataaagagcaaagatgaaagcattccaaatcctaccatctagatacaacctatgttgatatttagcatgtatgcasaggatagatgctatcctgtagcatgatcatttatatgcatgtgcgtacacatgcatttactttttataaaaatgatataatactgaacatgctattctgt

SEQ ID NO: 34647 - DNA, 201 bp, Homo sapiens
ttactgtatctagcaaaaacaatattagaattgttagtattataataattattatcatcattgatggggaaggaaaaatgaagcccacctgagttcacagrcaagaccctctccaaacagtaaaacaattaaaaaccaagttgtatttgtctgtgctcctttggattcaactgaccaacacccaggcaaagggaaaatata

SEQ ID NO: 34648 - DNA, 201 bp, Homo sapiens; identical to SEQ ID NO: 4382

SEQ ID NO: 34649 - DNA, 201 bp, Homo sapiens
gagaagactgcattagatttcagtcatgaaactacaaaacagtggcgtctgcagcctggctgggatgactgttgttaaccccatgacactctgttccttgsgaagctgctttgccccaggactcaggttttcctgagaaagagagcagcctggactgaccacaccctcagagcctggcccaaggccacatgtgaacttata

SEQ ID NO: 34650 - DNA, 201 bp, Homo sapiens
acatgggaagctgaggccctggcccctctttcatgccacagcctgggagatgctgccttctcagcagaaagcctcaggaggtattttgaaaagggaatttgttgttttcattctggttagataagttacaaactaattttttaaactgggaaaatattgaaaattgttttttaaaaatgaaatcacctttaattccattac

SEQ ID NO: 34651 - DNA, 201 bp, Homo sapiens
atccttgtcctcaaggagcccatagtttgttagagagagaagatgtgtaaatagttaagtgtataaagtgctacagtgcttgaggtctaatgtagaaaaawccacagcctgtggggagggaagagaaaggagggagtgatgcaatctatttggagggaacagaaaaatcttctgtatttgtcagtactctttgagttgtaa

SEQ ID NO: 34652 - DNA, 201 bp, Homo sapiens
agaaagcctcaggaggtattttgaaaagggaatttgttgttttcattctggttagataagttacaaactaattttttaaactgggaaaatattgaaaattrttttttaaaaatgaaatcacctttaattccattactcagagacaactatcactgacatttttctgttttttcagtcttaattctcatgaaggtgtgccct

SEQ ID NO: 34653 - DNA, 201 bp, Homo sapiens
aatggggattccctactcacagggtcattgggaagtttggataaaataatccacatgaattcttagctcagttcctggcacagaataagtgctcagtaaayactggtggtaattattatcatttcactgaaagaatatggctgttgagactttccccaaatcatagctgcagctgctattctggaatatttccagagtctc

SEQ ID NO: 34654 - DNA, 201 bp, Homo sapiens
cctactcacagggtcattgggaagtttggataaaataatccacatgaattcttagctcagttcctggcacagaataagtgctcagtaaacactggtggtarttattatcatttcactgaaagaatatggctgttgagactttccccaaatcatagctgcagctgctattctggaatatttccagagtctcctggcagtgct

SEQ ID NO: 34655 - DNA, 201 bp, Homo sapiens
ccaaccaaacacgtatctgtgttctcatataagcctgcaaaattttacaccctgcctttcagggagacaggccacatggagcgcatgacctcttgtagtcrtctcctcacagtccttcccactgtgagagaaggaaacttgcagacccccaactggatctgggagcatatttttaagcacagttggcattgcttgaaaaag

SEQ ID NO: 34656 - DNA, 201 bp, Homo sapiens
aggtgcatgctgttgtggtttgccatttcctgatgagttaaacgaaaatggcaagaaaaatgacttgtctccatatgtatttttttgtgcctgttctgaawtatgggactgcctcgaaatgttggagtccatgcaacagtgatatacaatggtgtggtttgctgtgctgtgctgtgggggcgagtgggagggtactgggga

SEQ ID NO: 34657 - DNA, 201 bp, Homo sapiens
cattcccatctggcagggagctatctcctggaggaggctgagacataagccctgggaatcacatgttctttcagatggaaaattccctgtctgtaagtagtttttttttttttgtttcttttttaaactgctaaaacattgagtatgcagacacacatgtgaccagtccatgagatctcacatgggctccagcctccatct

SEQ ID NO: 34658 - DNA, 201 bp, Homo sapiens
ttctttgtcctgtatattggagtcaccaatgagtatctccagcctcacttattaatggacctcttggctaattctgagggcaggaggattaccatccccamccctacccacttacccaaggctgtttaccaacctatgcaaggcctttgtgtgaattaggaaaaaaaaccacccttgttcctctatgaagatatgaagatg

SEQ ID NO: 34659 - DNA, 201 bp, Homo sapiens
agcacaggctggcaggggtcggcaaaatttttgtataaatggccagattttaactattttagactttgtggaccatatagtctttgtcacacattaattgktttctttctcttttctctttccttcccccatcttttcctccctctctttcttcttctccttcctcttcttttttcttccttctccttccccttctcttct

SEQ ID NO: 34660 - DNA, 201 bp, Homo sapiens
gaaggagaaagatagaatgtagctacggctgaagttttgctgagtgagaaaaactgatctttgccatcaaaacaagttcagtgtcccccgagcccccatcrggggtgtggtggcctctggggtcctgtccacagggactcagctcagggccctgctctctccagttttccactttataaaaagtcatatgcagagaggccc

SEQ ID NO: 34661 - DNA, 201 bp, Homo sapiens
aaaatttttgtataaatggccagattttaactattttagactttgtggaccatatagtctttgtcacacattaattgttttctttctcttttctctttccytcccccatcttttcctccctctctttcttcttctccttcctcttcttttttcttccttctccttccccttctcttcttcttcttcttcctcttctttttt

SEQ ID NO: 34662 - DNA, 201 bp, Homo sapiens
aggagagtgaaagacagaaggagaaagatagaatgtagctacggctgaagttttgctgagtgagaaaaactgatctttgccatcaaaacaagttcagtgtyccccgagcccccatcgggggtgtggtggcctctggggtcctgtccacagggactcagctcagggccctgctctctccagttttccactttataaaaagtc

SEQ ID NO: 34663 - DNA, 201 bp, Homo sapiens
taactattttagactttgtggaccatatagtctttgtcacacattaattgttttctttctcttttctctttccttcccccatcttttcctccctctctttyttcttctccttcctcttcttttttcttccttctccttccccttctcttcttcttcttcttcctcttcttttttttttttttttttttttttaaagaaaca

SEQ ID NO: 34664 - DNA, 201 bp, Homo sapiens
attccctgctgttttattgccttttatatcctagctggctaagttaaaggatttctggagttgaagcccagatgctgaaagttgctttcaaaatatatggyggtaaagaaaggaagaaagcaaatggatatctggcagcctggcttctcacttggcatctcccaggctttcccttttgtttacacctgaactgcgtggagc

SEQ ID NO: 34665 - DNA, 201 bp, Homo sapiens
agactttgtggaccatatagtctttgtcacacattaattgttttctttctcttttctctttccttcccccatcttttcctccctctctttcttcttctccytcctcttcttttttcttccttctccttccccttctcttcttcttcttcttcctcttcttttttttttttttttttttttttaaagaaacaaccctttaca

SEQ ID NO: 34666 - DNA, 201 bp, Homo sapiens
tgtcccagtttgggtgataaaccatctggtcaccttaaacttgaatgctatgaagttcacagtaagaattccctgctgttttattgccttttatatcctarctggctaagttaaaggatttctggagttgaagcccagatgctgaaagttgctttcaaaatatatggcggtaaagaaaggaagaaagcaaatggatatctg

SEQ ID NO: 34667 - DNA, 201 bp, Homo sapiens
tatagtctttgtcacacattaattgttttctttctcttttctctttccttcccccatcttttcctccctctctttcttcttctccttcctcttcttttttyttccttctccttccccttctcttcttcttcttcttcctcttcttttttttttttttttttttttttaaagaaacaaccctttacaagtgtaaaaccactc

SEQ ID NO: 34668 - DNA, 201 bp, Homo sapiens
ttttattgatgccttggcaattctccatgatacagacacaatgctgagggcacggcaagactcctgtacgcaaactgttctgaaggatcagagtgttgtarggtgacagtcagcctcatccacatcaaagcatttcctttttttcttcaccatttttgatcagtttcatattcctgtgggtactaatgaaaaggaacagca

SEQ ID NO: 34669 - DNA, 201 bp, Homo sapiens
tccttcaaagccgacactctaggcaatccctaacaatgttacagtgcttaaaagactgagtgtgtttggggctgttaacaagcccatgtgcatagcttgamagcaaagagccagtgaaaatgacagttgaaaaccacatggctactctgctacacccaagccctcggaactttgcacataacgttcaaattaactgtgaag

SEQ ID NO: 34670 - DNA, 201 bp, Homo sapiens
gtgaggagtctttgggccaaggtgacttgcctgctccctacccctgtcccctgactgtgcttcacctcccaagactctgaattgtctcctgaacggtcccrgctcacatccagaactcacatgggcctcttctctgcatctgtcttcccaaggatgggccactctgaagggtgtaccaaagggaagcagtttgccttgaag

SEQ ID NO: 34671 - DNA, 201 bp, Homo sapiens
ctctgacagtctaattctgtgatctgtgatagaatacatatctcaaaacaactggagccactgtcggtctgtccaacatatatttgcaaaatgcgtgctgkgcctgtttgatctaactgactttttggaacttggtgtccttgagatctttggatgggtttgtgcattaaccttaagtgctttgatccctgtaatataata

SEQ ID NO: 34672 - DNA, 201 bp, Homo sapiens
atggccaagcctggcaccaatggggtaggggagtatcctcctcccatagagcagcactgcagatctcttgacaatgagtgaggatatataatcctcccacrgggaaggcagaaaggatttgggggcaataatactgtctgccacatgctgtcatgaatgctatctagttttagtctcttgataactctgtgaggtaggtat

SEQ ID NO: 34673 - DNA, 201 bp, Homo sapiens
agttgccaagttagaagcctgggatgtaagatgaagaaaggtgagtccccttcggcttggaactggaagaggtcaaatggccctttcccctcccaaacggrgccatgcaagccccatttatcttgtgtgttttatccacattccttgttcacaggttttagccgcatcaaccacaaagggcataattggaaaaatcataat

SEQ ID NO: 34674 - DNA, 201 bp, Homo sapiens
ttccacgtcagttaaggattgtttctctaaacacacaccaaaaggggaaaacatagttacttcctaaattcttatatccagaatggaaataatttcgggartaacaaactccttatgtttaccactgttccactgtttaagtcactgttttcttttttctttctttcttttttttttttttttcttttgtggcagggtctc

SEQ ID NO: 34675 - DNA, 201 bp, Homo sapiens
ctggtaattggtgtctatttctggtcccagaagagatgcaaaaattttatgcagaatatgcatgaaattgttcatctcaccctatagtcacattattcttkgagattccaattaagtggtagctagaatcattagatgctttctgttctgaatattaaccttataaatattaactttgtcctcataataactatctgaggg

SEQ ID NO: 34676 - DNA, 201 bp, Homo sapiens
cactttcgaagattctcaaagggagtaactcctccccctaatactgagctgcagtccatcttaagccttgctggtatacatctcaaagaagaagatattgrggatagcttgtgcaacgtagctctggtggccgctaaggaaagagcaaacagctctatggctgcagacatcaggctttaaatgacaccaggatggtgaatg

SEQ ID NO: 34677 - DNA, 201 bp, Homo sapiens
ctccttctttcataccaatgcgtggtttaatatataataaccttgtttgaaataaaagcctttgatgcctggtgcccttaccacttatgaagtaaccatcrgtttccaccactaaaagtctcctatggtcacaaagtcctttgtgaaaaaatccaaaggcaaagagagaggcaggtctgccccatacagaagttcaagctg

SEQ ID NO: 34678 - DNA, 201 bp, Homo sapiens
cagaagcagatgctggtgttatgcttcttgaacagtctgcagaactgtgagccaaataaatctgttttccttataaattacctagtctccagtatttcttyatagcaatgcaaaaacagactaatacatatctcatacttgaaaagtcagttgttgtttagactgcttgccctacttttaatacttcaatttctctgtcaa

SEQ ID NO: 34679 - DNA, 201 bp, Homo sapiens
gattcatatctttgtcatataaataatgaacagccatgtatctgaactgccccatagatgatgccaaaagtaactgctgagcaaactcattatagctctgmttctttttaatgtctaaagccttaaaataaagaaacccctttgggagtggataaaacgtggttctcacatcttacactttagtatgaattagatttacct

SEQ ID NO: 34680 - DNA, 201 bp, Homo sapiens
ctattgtttcttccttaaatgtttgatagaaatcactagtgaaatgatctggattgaatttttcttggttgaaaggtttctaattacaaattcaatttatktaatagatatagaactactcagatatttatatttctttttgtattctttcaataagtcgcatttttcaggaaatttttggtaatatcatctactttttaa

SEQ ID NO: 34681 - DNA, 201 bp, Homo sapiens
tgttaattctagctctgctgatcatttgctgtgtgaccttgggcaagtcttttgctctcttcagtctcagtttcctcatatcttcagtgagccatctctcrggatcttccagctctggtattctgagtttctctaatttgaggagttggttagagatctcttttctcaacagtgtacctgttccgagaaatgttactgtta

SEQ ID NO: 34682 - DNA, 201 bp, Homo sapiens
aaagtaattgaacttctgggcttcagatgcctcttgagtatgatctagactaataatattgggtttttcttaccccaatgggagatgcagagctactcaargcatggaattctaaagctcaaaagtcatctggcttagtctagccccaggtatgtgagctcaggggtatgagctctccatcacaattggacctgtgctaaa

SEQ ID NO: 34683 - DNA, 201 bp, Homo sapiens
ctgacctcacctcaggtgatctgcctgccttagcctcccaaagtgctgggattacaggggtgagccaccgtgcgggcttcttttttttttttctttttgakaccaagcctcacttcctcacccaggctggaatgctccaacttctgctctccgggttcaagagattctcttgccaaatagctaggattacaggtgtacacc

SEQ ID NO: 34684 - DNA, 201 bp, Homo sapiens
aaggttgcagtgagctatgatcacatcactgtgctccagcctgggcaacagagcaagagcctgtctcttaaaaaaaaaaaggaaggtggtggcaaaaactrctatttaatgatggtcaaaaataaaaaataaagatattagcaattataaatattaattgtgttaagtatcactccttaacaaagaccagacctagactgg

SEQ ID NO: 34685 - DNA, 201 bp, Homo sapiens
tgtctttgcacgtgagatgggtgtcctgaatacaacacactgatgggtcttgactctttctccaatttgccagtctgtgtcttttaattggggcatttagcccatttacatttaatgttaatattgttatgtgtgtatttgattctgtcattatgatatttgctggttattttgcccattaattgatgcagtttcttcata

SEQ ID NO: 34686 - DNA, 201 bp, Homo sapiens
gtttggcccatctgaaataagtccatacaattaaaaacatttctttctattgacagggactgagggttgagggaaagcactgcagattttccaggtgtattttttttttttttttgctccctggattttgcctgaaccctcacttttctctttcagggaactttaagcacacttagtgaaagactaaaggtcagagagcac

SEQ ID NO: 34687 - DNA, 201 bp, Homo sapiens
aatggaatatatattatatatatatattccatgtatatatacagaaatatacacacacacacacaaattatatccttattttattatttaatttaattttkgtttttgagatggagtcttgcctatcacccaggctggagtgcagtagcacaatctcggctcactgcaacctctacctcccaggttcaagtgattctcctg

SEQ ID NO: 34688 - DNA, 201 bp, Homo sapiens
ggtggcttaaacaacaacaattttatcatctcatagttctggaggctagaagtctgaaatcaagatgtccagctagattggtttcttctgagggttgtgaggaaggatctgttccaggcctctctcctggacttggggatggccagcttctccctatgtctcttcacatcatcttctttctacatatgtctgccggtgtgt

SEQ ID NO: 34689 - DNA, 201 bp, Homo sapiens
cttgggaagctgaggcaagaagtttgcttgagcccaggtgttcaaggctgcagtgagctgtgatcgaaccattgtactccaggctgggcagcaaagtgccaaaaaaaaaaaaaaaaaaaaaggagagagagagaataaaggaagcacctttgcaggtacatgagcctgatttgaaggggtaactcacacagtgctgtaaaa

SEQ ID NO: 34690 - DNA, 201 bp, Homo sapiens
taattttctaatttaagccttgtaatactcccatgaggtagtgatgatgatgatgatgatgaagagagaagagaagcacaggaggtgaagtaacttgctgccccccctaaaaaaattcaatggaaggacatacaagatgaatgaaaaataattttaaaaaagtgaaagagcaagtatttgaactcaactctgcctaattct

SEQ ID NO: 34691 - DNA, 201 bp, Homo sapiens
cctttgacaaaggtgcagagaagcaggttgagatggacccccgatctcccatctacccacaatctgcttatgtctgggctcccacctctgcctgtaactgyatctccttgcttctctggagttgccaactgtattagtccattttcatactgctatgaagaaataaccaagactgggtaatttataaagaaaaagaggttt

SEQ ID NO: 34692 - DNA, 201 bp, Homo sapiens
gtaaactacatcacaggagttcaaaatgtcaacagagctgcccccagtcctgtctgtgtttttgcttaggacccagtgttgtgtcactactccccattgawaataaacaaaacatgcctcatatgttcacagttatttagagtttacagaattctctccttctatcaatttgtttgtgcctgaaggagcaggaaaggtatt

SEQ ID NO: 34693 - DNA, 201 bp, Homo sapiens
gactcacagttccacatggctggggaggcctcacaatcatggcagaaggtgaaggaagatcaaaggcacgtcttacatggcagcaggcaagacagtgtgtkcaggggaactgccctttataaaaccatcaggtctggtgagacttattcactatcacgagaacagcatgggaaaactcgctcccacattgaattacctcct

SEQ ID NO: 34694 - DNA, 201 bp, Homo sapiens
tgcttgctagttccagaataggaagaaactagaatcagaatagtctgtgtttgtttgcttgcttgcttatttatttatttccaagaacaggtttttggggraaaaaaaagaaacactaacacattaaaatgtacacattaactgtaagatgcattgctatttcagtaacattataatgcgagaggaaacacaatagcatat

SEQ ID NO: 34695 - DNA, 201 bp, Homo sapiens
gggcagtaatgacagcccacaactgacaagtactgatgaatagttcttgaaggcaaaccctgccctcagggagctctgccatagcttggcatgtcttctaraactacgtgcaaggggtcgcagagcagctaattctgccgcggtatgggcagtcaccaggaaacttcaagggggagcaggtttaacctgaatccttgctga

SEQ ID NO: 34696 - DNA, 201 bp, Homo sapiens
gaaggtgggctgataactttccagcctttgtagtggaggaatatgggtttcttaaaataaaatgacctgaattagaattactgtgtcaaagagcagttgatttttttccccgaaattccagtctgattgcttatttggtgaaaagcaggatttaaaaacctgtgctccatttactaccatctcatttggcactggaaacac

SEQ ID NO: 34697 - DNA, 201 bp, Homo sapiens
caggatagtctcgatctcctgacattgtgatccacccgccttggcctcccaaagtgctgggattgcatattcatttttcgtctatgcatccattcatccatctttccatccatccatccatccatccatccatccatccaatcaacagaaacaacagtagaaattaacttggtcttgtatgcggaagcagtgaggtttttc

SEQ ID NO: 34698 - DNA, 201 bp, Homo sapiens
ctgggggtcagattacagactggaccacactcctaactttctttacccctgagacctctggagtcctagatgtggacgtggtgtttatggtgcattcatgyttctgaactcttttttttttttttttttttttttgagatggagtctcactatcatccaacctggagtgcagtggtacgatcttggctcactgcaacctct

SEQ ID NO: 34699 - DNA, 201 bp, Homo sapiens
aaattggtactggtagagtgaggtgctactgtaaagatacctgaaaatgtggaagcaactttggaactggtgaacagggagaggctggaacagtttggagkgctcagaagaagtcaggaagatgtgggaaagtttggaacttcctagagacttgttgaatggctttgaccaaaatgctgatagtgatatggacaataaagt

SEQ ID NO: 34700 - DNA, 201 bp, Homo sapiens
cacacagtcttggtgaaatgtcacatgcacggaagcatagtctagcttccaaaaaccattgaaaggagtttcaatcttttcttttaaattcatatatatgwatatatatatatatagagagagagagagagagagagagagcagagagagtttatttgggccaagcctggggactgcaacccaggagcatagattcaagtt

SEQ ID NO: 34701 - DNA, 201 bp, Homo sapiens
ccggcctgtgcccaccctaataccacttccttggagtcccttttgccattggagatgatgcattcacaggttccagggattagggcgtgggcatctttggrggctgttgccccatctacccctaccacaccattttgcaggtctctcacatgaatcctgcaggatcttgctggtttccctgcttacatcttcttccctgcc

SEQ ID NO: 34702 - DNA, 201 bp, Homo sapiens
aggatagtctcgatctcctgacattgtgatccacccgccttggcctcccaaagtgctgggattgcatattcatttttcgtctatgcatccattcatccatctttccatccatccatccatccatccatccatccatccaatcaacagaaacaacagtagaaattaacttggtcttgtatgcggaagcagtgaggtttttct

SEQ ID NO: 34703 - DNA, 201 bp, Homo sapiens
aatcacaggggtggttaccccatgttgctgttctcattatagtgagtgagttggttttataaggggcttgtcctctttttgctgggcacttcttcctgccrccatatgaagaaggacatgtttgcttccccttctgccaggattgtgaggcctccccagccatgtggaactgtgagtcaattaaacctctttcctttttaa

SEQ ID NO: 34704 - DNA, 201 bp, Homo sapiens
aaatgtcacatgcacggaagcatagtctagcttccaaaaaccattgaaaggagtttcaatcttttcttttaaattcatatatatgtatatatatatatatagagagagagagagagagagagagagcagagagagtttatttgggccaagcctggggactgcaacccaggagcatagattcaagttgccctaaatatacac

SEQ ID NO: 34705 - DNA, 201 bp, Homo sapiens
aaaaagggggatagtccattctagctgcccaatgtgcatgaccttgtgaggtagtaagaaccatgaccaggaaaaggccatgtcatccatcaggtgacttygtagaggaggcttctgccctgatgggagagtagcttaggcagcctcgaggccccttccacttcaatttgggaaatatttaatgagctcccactgtgtgcc

SEQ ID NO: 34706 - DNA, 201 bp, Homo sapiens
ttagccactgtccccgactccatttgtgagaatgctgctgactggcatttatgagagtgcttagtacctgccaggcactgtgcctggggatttacatggattatctacttttaccctcaaaacaccgatatgagttaggcactattaatttcattttctgattgagagagctgatgtgagagaaatgcagtgattttctca

SEQ ID NO: 34707 - DNA, 201 bp, Homo sapiens
gtctcgatctcctgacattgtgatccacccgccttggcctcccaaagtgctgggattgcatattcatttttcgtctatgcatccattcatccatctttccatccatccatccatccatccatccatccatccaatcaacagaaacaacagtagaaattaacttggtcttgtatgcggaagcagtgaggtttttctcaagga

SEQ ID NO: 34708 - DNA, 201 bp, Homo sapiens
tagtaactttagccatggatgtgaatgaggctatccagggaaagaatgcaaaatataaggtcaacctggtgactcactgtgctgagggaagccagggaagyagaaggggagtcagggtagacagaaacaggggggtaggtgaagatgaaagaactttccaggaaggagggagtgatgcatggtgccaaatgccactgacag

SEQ ID NO: 34709 - DNA, 201 bp, Homo sapiens
cagtgaatgaatccatctccttatccaatgctgaacttcaggcttccatgtttatcccactcttagtcccttttttttttttttttttttttttttttttyacagagaaaaggggtctgtttgctctttgtgttctttgtgttcatagtgtttccaagccccaggccattcagagcttttgtctccagtgccccacacatt

SEQ ID NO: 34710 - DNA, 201 bp, Homo sapiens
tgtcacatgcacggaagcatagtctagcttccaaaaaccattgaaaggagtttcaatcttttcttttaaattcatatatatgtatatatatatatatagakagagagagagagagagagagagcagagagagtttatttgggccaagcctggggactgcaacccaggagcatagattcaagttgccctaaatatacactcc

SEQ ID NO: 34711 - DNA, 201 bp, Homo sapiens
ctcgatctcctgacattgtgatccacccgccttggcctcccaaagtgctgggattgcatattcatttttcgtctatgcatccattcatccatctttccatccatccatccatccatccatccatccatccaatcaacagaaacaacagtagaaattaacttggtcttgtatgcggaagcagtgaggtttttctcaaggact

SEQ ID NO: 34712 - DNA, 201 bp, Homo sapiens
attttcttttaccttatcatggacagagtggccccccagaagcacaggatgcaagacaacacacatttcagtggctgctccttctgcatacatcattgagytctgccaagggtttgaacacacacacacgtaaataaaggcctaattatgtgtgtgtgtgtgtgtgtgtgtgtgtgtgtgtgtgtgtgtgtattatatgta

SEQ ID NO: 34713 - DNA, 201 bp, Homo sapiens
tcgatctcctgacattgtgatccacccgccttggcctcccaaagtgctgggattgcatattcatttttcgtctatgcatccattcatccatctttccatccatccatccatccatccatccatccatccaatcaacagaaacaacagtagaaattaacttggtcttgtatgcggaagcagtgaggtttttctcaaggactt

SEQ ID NO: 34714 - DNA, 201 bp, Homo sapiens
cttctggactgacgtttctattgtacttgagtcccatcatttgacattagaagatctccttccaagaaatatttcttaccaccaaaagacagttaactttkacttcagacagaacattctggtctgcacccagaacctttaatacctgaatcttttaaatcagtgatggtctcttcttctaaaaagtaaaaggtaaatcaa

SEQ ID NO: 34715 - DNA, 201 bp, Homo sapiens
ttgtacttgagtcccatcatttgacattagaagatctccttccaagaaatatttcttaccaccaaaagacagttaactttgacttcagacagaacattctkgtctgcacccagaacctttaatacctgaatcttttaaatcagtgatggtctcttcttctaaaaagtaaaaggtaaatcaaattcagtatgtctcaattaa

SEQ ID NO: 34716 - DNA, 201 bp, Homo sapiens
tgagatctcacatgggctccagcctccatcttatttgaatgcagaaagtcaaattcaccaagatcccattccacagatttctggaaattatcagtgaatcwtggaagttctacaaatctgctctggtcatcccttctttcctaaactgaccctctagtcctagattactgcttcactcttcccacggacaattgtcaccca

SEQ ID NO: 34717 - DNA, 201 bp, Homo sapiens
ggcactcggcaggctgaggcaggagaatcaggcagggaggttgcagtgagccgagatggcagcagtacagtccagcttcggctcggcatcagagggagacmgtggaaagaggggagaggggagaggggagagggaatcacagaattttcaaactggtttagcatgctggctctgcagccagactgcctgagctcaaatgtc

SEQ ID NO: 34718 - DNA, 201 bp, Homo sapiens
agcagttagatgtaaccattgatgactgatggacgttccaggattttgtgatatggtcgtgatgcaaggaagggatcacatctcatggtgcccagctttcyggaatcttcctgctttcactttcccacttctttctggggtgtacccagatttgtcttgtcttacctcaggggtttcctcctttcctctgataccttggca

SEQ ID NO: 34719 - DNA, 201 bp, Homo sapiens
ggattcctgtgatattcaatggattataatccatttcttttattatttttatccgcaacttgttcagttacagctcacgggagccctttctggctaacttrtatgtcctttggagatgtccccgttttcctttgaatgcttcctcaatttctggcatcgcaagatattccagtttcatcttatactttcccaaccctgaaa

SEQ ID NO: 34720 - DNA, 201 bp, Homo sapiens
gccctgctatccttacatagggggagctcaccttcagcccagcctcagatgcagccttcacagtggccacacaaggcaggcaccggccccagatgggtaaytgaggaccaaatgggaaggagttctgaggaaatcatacggcatttcacctccgacttcgggggagtctttctttggtgtttgtggtccttatatctgtgt

SEQ ID NO: 34721 - DNA, 201 bp, Homo sapiens
tatcagaagtcttgggtcggcttctccctgggtggactgaagcatataacaaaatctcaaaaccaaaccaagatcttatttattgagagtcaagaaagagraaggaaagagtgggaaggataggggaagagaaagagggacaggacacagataaatgactgaaaacacaaacacagctattgcctcatgctgagtttaacc

SEQ ID NO: 34722 - DNA, 201 bp, Homo sapiens
taaagaatgagagagcccacaagacaaggctagaaaggaagtttgcagacacatcctgaagggaactatatgccatgctggggagtttggtgtttattttytaaagacacaaggaaccaacagagggtttatgactcaagtaactgtgggcaggatggagcacaggctggcaggggtcggcaaaatttttgtataaatggc

SEQ ID NO: 34723 - DNA, 201 bp, Homo sapiens
gtgttctccatgttatagataagaaatgtgagataaaagatgaacaacaaaggacaaaactggaaatagagcccaagacttccacgtgcagtccagtgctrtttttcagttccatgctaccacacattagactattagaaaatttctctatttaactatacagatttggaagcatgctttcctcctactaatttgttattc

SEQ ID NO: 34724 - DNA, 201 bp, Homo sapiens
ggaagactgtgaagaaaccagtttggaagtatgaggtgtcacaagagtctataggacaggaaagagctgtccttagcaaccccagactggcagcaagagtkgggatgaattagaaaggatacaagactgagagacaggggcaaggggagggggagaccaggtaggaagctcttccaacaatctagggaagaggaagtgaat

SEQ ID NO: 34725 - DNA, 201 bp, Homo sapiens
attctgttgtatagtacagtggaggatagccatgacccacctatgaaaacctttgtggaaatgtagagaaaacgaaaacacttgatgaaagaggttttttyatttatttaaaattttggacctggaacacattttaaccaagggtttgtaaattgtctgtcagcctgggaagccctcagtcaaggtagtttgcatgttgcc

SEQ ID NO: 34726 - DNA, 201 bp, Homo sapiens
tcacctgaggtcgggagttcaagaccagcctgaccaacatggagaaacccccatctctactaaaaaaaaaatacaaaattagccaggcgtgatggcgcatkcctgtaatcccagctactcgggagactgaggcaggagaatcgcttgaacctgggaggcaggggttgcaatgagccgagatgtgcactccagcctgggcaa

SEQ ID NO: 34727 - DNA, 201 bp, Homo sapiens
ttatttctagcacataaacaactgtctaatataaagacatttcaatgctttctcctgattcccccaccggctgttgtccatcaggcttccccaccaggacygaggttgccttaaacaagtcagcatcctaaggcttgccactggcatcccagcaacccagtatcaatctccccagtacttccctctatgctaatgctgatc

SEQ ID NO: 34728 - DNA, 201 bp, Homo sapiens
ttatgttcttcttttctgtcctttttggtaaaaaaaaacgcaggttgtattccaaagctgtattaacacaacattctcttccccactcctacccagccttyttcagagctgtgaatttcattacaggagcattgaggcagaaccttgcaggtgtggcccaaaggggctaaagtgggcataggttgggatttacttctgccc

SEQ ID NO: 34729 - DNA, 201 bp, Homo sapiens
gtcacacatgacagaatcctaattcaaagtgccttaaaaaaaaaaaaaaaaagataatatcttcttgcaaatttgaaaagtccaggagttgttgttttggsttggactccatttcccagctttgccttcctctctgtgggctttctcttctgcatagtgtttccactaagaggtggccaccagggttcccaggtgttattt

SEQ ID NO: 34730 - DNA, 201 bp, Homo sapiens
caaatgtctttctgttttgaatcatttgagagtaaattgccaacatgatgccccatcacccccaattttgtagactgctccctaatgtgggtctctgatgytttcatatgatgattttcaggttgtgcatctttggtaggaataccaccaaattgatgctgtgttctcactgtatccaaacaggtagcacgtggtattagt

SEQ ID NO: 34731 - DNA, 201 bp, Homo sapiens
attaactttttaaaattggaaagaatctccaacctaaagaaaagttcccaagtacagtacaaatgtctttctgttttgaatcatttgagagtaaattgccmacatgatgccccatcacccccaattttgtagactgctccctaatgtgggtctctgatgttttcatatgatgattttcaggttgtgcatctttggtaggaa

SEQ ID NO: 34732 - DNA, 201 bp, Homo sapiens
gggccagatttgggagctcatgggagttatagaactgctttttctaatttacaagttctaaagtcttgttcctggtcacttccttctcaaaagcgaagggygcagaggctcctgtggaaacaccttcccttgtgaagtctgcacagagtcctcacagagcctctggagtggctaccttccatgtgctggctaccaccgtct

SEQ ID NO: 34733 - DNA, 201 bp, Homo sapiens
catctgatttgggagttgtcctctactaactaaccccttctgaatgctggtttccttcccagcaatgatagtcatggcatggcattgcagactggtccatrcaaaatgcttttgttcatcttccgtgtaactgggtttttcttcttaagtcaccacaaagcaactactttggaatcaggagtggacgcatctgttcttgtc

SEQ ID NO: 34734 - DNA, 201 bp, Homo sapiens
cagatttgacctcaggatcctttcaacacaatgctacaggtagccactgctcccaactgagcaatggtagtacttgaagtagcgtctacctgtcatcttasctttatctttctctgtatttactcaaaatagaatctttaaatctacaggggtttgttgttgtttatttctacagatgtatttgtaaccttttattgatta

SEQ ID NO: 34735 - DNA, 201 bp, Homo sapiens; identical to SEQ ID NO: 4372

SEQ ID NO: 34736 - DNA, 201 bp, Homo sapiens
tggttgcacttggacatatactactctaggcctttgggctcctttcgtccctgcagcaccttctgtcctcaagacaggggctctcttgttttcctcatgcragagctgttgcccagctagtccatcccactgaggacaaactctgactcaccttttaagatgtagttctctggctaggcacagtggctcacacctgtaatc

SEQ ID NO: 34737 - DNA, 201 bp, Homo sapiens
actcaaagcatggaattctaaagctcaaaagtcatctggcttagtctagccccaggtatgtgagctcaggggtatgagctctccatcacaattggacctgygctaaaaaacaaaaacaaaaaaaccaaaactctcctcttctcccctagggtaaagaaacttctctggttgattattagactatcttattggtcttatgca

SEQ ID NO: 34738 - DNA, 201 bp, Homo sapiens
ctgaaataaaattcatgcctttcccacttaacagagggccatttttcaagcatcagctgacatatgtatgtgcatgtactgtgaaatgataagctattagrcatgtgtcaaccagaaaatggggatgccacacttacagcatgcccacaggacaggcttgtcagggctgtctcattcacttgtacatttacttggctagtt

SEQ ID NO: 34739 - DNA, 201 bp, Homo sapiens
atagtgaatatagtatctagccttgaggggtagagacttacttttgagagtcagagagtaagtaaatgtcttttcaatgtacaaaaaggagagggggaaamactgtgaaatttaatgctatatgcatgtataattatataagtaatttgactacataacatttcaaaattctgtgcacaagaaatagaagaaataaagttg

SEQ ID NO: 34740 - DNA, 201 bp, Homo sapiens
gagtaaattgccacttcccttttaagaagagaacccatgtataccttagatcccaatcactgagttttgccatcgaaaactctgacttataatatgatgtktagaaagtaattgaacttctgggcttcagatgcctcttgagtatgatctagactaataatattgggtttttcttaccccaatgggagatgcagagctact

SEQ ID NO: 34741 - DNA, 201 bp, Homo sapiens
aggtgatcttgggaaacgtccctctatttctctatacctcttattctgaagttttaagactgaaataaaattcatgcctttcccacttaacagagggccakttttcaagcatcagctgacatatgtatgtgcatgtactgtgaaatgataagctattagacatgtgtcaaccagaaaatggggatgccacacttacagcat

SEQ ID NO: 34742 - DNA, 201 bp, Homo sapiens
ttgtataaatgtgtgaattattgacatggatccaattaaatggggaatggtagcaagaagtagtccttggtccttcattgtagggagaaaaagttttagarggaggatactgcagaatggagtttctgatggaaaatgtttccaccctcacagattttaaataactcttctttagggaggtcagtgaggctacagggagcc

SEQ ID NO: 34743 - DNA, 201 bp, Homo sapiens
atgtcattttaaaagcctcctaatattgagactccattttgatgtatcaggatagaatgagaagaacccaccttcaaatcctggctagggcacttactagrcaggtgatcttgggaaacgtccctctatttctctatacctcttattctgaagttttaagactgaaataaaattcatgcctttcccacttaacagagggcc

SEQ ID NO: 34744 - DNA, 201 bp, Homo sapiens
ctggaaaagaaagatgatcataactagaacttaacctttgaaggttttatgagcatgaaaagatgtctggaaagaacttagcccaccaggacagggctccrtgaatgtcatctgtgactgtgggtacccttccttcaaatgagtgaacaataccctcctcattgacttggaaaacaagtgcccctagcatgctccttcaac

SEQ ID NO: 34745 - DNA, 201 bp, Homo sapiens
atcaccttggagctctgaggacctcgcacggcccaggctgagagcatatagctctgcagggtcccaggatatgcttatggatccaaggtagtgttgacctsttcaacttctgttcccttccttatgcttcgggttccctcggtttggggagttagcctcccccagacctcctgactgcagctttgcctggtttgtccaaag

SEQ ID NO: 34746 - DNA, 201 bp, Homo sapiens
ttctcttagtctggctcaacttactatagacagcaggacctcaatcaatacccttaatctggaggctgactaaagacaaaatattgaattcactcttcatrttttcatcataaaccccaaattctatgacaatgatgattttggaaacaataaattaagcatcaagcatcatatggcaaaatctattggaatgtaatattt

SEQ ID NO: 34747 - DNA, 201 bp, Homo sapiens
agtcgtctgtggcagatcacgctttgaagatggtgcaagtgtgtctgtgagaatctgtgtgcccttttccagaacaaaaccaagtgactcggtgattctgkcgcctcgtttcttagccatctagcatttgttcaagagactcagtcttgtggtctacagctagccttctgtttccatgctgtggaactcaccacattcaca

SEQ ID NO: 34748 - DNA, 201 bp, Homo sapiens
aatggaatttaggtttgctttctgaaatcaatccaggcaagcctttttgcacatgagcattcttagaaagtctttgaatgtctattcttactcacttctabgggtggcacaaaatccaaaaataaaattaccatgaggttctgcttgcttcctgctttagcgacactggaaatcctccagggatagctcatgtactttgta

SEQ ID NO: 34749 - DNA, 201 bp, Homo sapiens
atccttgtggcatgtgcctgtccttgtgtgagtgcttgtgtgtgtgtgtgtgtgtgtgtgtgtgagcaactcacctaaaaagtaggctctagagtaggctytaaagagcttggctgtgccttttgaactgacagatacatatactttatagaactgtgaactttttcacccaataaaacaggggtaatacaagagtcttct

SEQ ID NO: 34750 - DNA, 201 bp, Homo sapiens
cagagagacaattcacctccccaagtacttaaacactcattgtagccccagttgttctagcctatttcatatccattagaggtcatgcttagaattcagaycatttcttcttcttctttcttttcttcttccttcttccttctttcttcttctttgttaagcaaatatactcttctctatgtgttaccacttctgtggtgc

SEQ ID NO: 34751 - DNA, 201 bp, Homo sapiens
ccaggaggcggaggttgcagtgagccgagatcgcaccattgcactccagcctgggcatcaagagcaaaattttgcctccaaaaaaaaaaaaaaaaaaaaagaatagtgctgttcttattgttgtttcttccatccccctacagcagagtttcttaacagctgtgctattgacatttagggctggatagttatttgttgtga

SEQ ID NO: 34752 - DNA, 201 bp, Homo sapiens
aaatagatagataaactctatgtccagaaccaaggagtctattttggttgtctattgtctggatccactcattaggctggagaagggttaccagataaaayacaggattcccagttacaagtgaatttccaataaacagcagtataaatgtcaagtatcacatgggctatacttatactgctgtttatctgaatttcaaac

SEQ ID NO: 34753 - DNA, 201 bp, Homo sapiens
cctaagccctcgacagaaaagcacatgtttccatgaagtctgaagtctcaaatgattgcatttcatggagtttgccttgtgcaaagtcatagaaacaaatscaggtgcactgtgggcaccagagctaataaagaagagaatcttgtagacatgaaagagagaaagtaagagagataaaaggagatatgtggaaagagagag

SEQ ID NO: 34754 - DNA, 201 bp, Homo sapiens
tttcttttaccttatcatggacagagtggccccccagaagcacaggatgcaagacaacacacatttcagtggctgctccttctgcatacatcattgagctstgccaagggtttgaacacacacacacgtaaataaaggcctaattatgtgtgtgtgtgtgtgtgtgtgtgtgtgtgtgtgtgtgtgtgtattatatgtatt

SEQ ID NO: 34755 - DNA, 201 bp, Homo sapiens
taccttatcatggacagagtggccccccagaagcacaggatgcaagacaacacacatttcagtggctgctccttctgcatacatcattgagctctgccaagggtttgaacacacacacacgtaaataaaggcctaattatgtgtgtgtgtgtgtgtgtgtgtgtgtgtgtgtgtgtgtgtgtattatatgtattaagctct

SEQ ID NO: 34756 - DNA, 201 bp, Homo sapiens
cgatctcctgacattgtgatccacccgccttggcctcccaaagtgctgggattgcatattcatttttcgtctatgcatccattcatccatctttccatccatccatccatccatccatccatccatccaatcaacagaaacaacagtagaaattaacttggtcttgtatgcggaagcagtgaggtttttctcaaggacttg

SEQ ID NO: 34757 - DNA, 201 bp, Homo sapiens
atctcctgacattgtgatccacccgccttggcctcccaaagtgctgggattgcatattcatttttcgtctatgcatccattcatccatctttccatccatccatccatccatccatccatccatccaatcaacagaaacaacagtagaaattaacttggtcttgtatgcggaagcagtgaggtttttctcaaggacttgga

SEQ ID NO: 34758 - DNA, 201 bp, Homo sapiens
catttcagtggctgctccttctgcatacatcattgagctctgccaagggtttgaacacacacacacgtaaataaaggcctaattatgtgtgtgtgtgtgtrtgtgtgtgtgtgtgtgtgtgtgtgtgtattatatgtattaagctctttttcctttctccatagcactgcatatacaaagatcagccaccctgagttgaaa

SEQ ID NO: 34759 - DNA, 201 bp, Homo sapiens
tcagccctcaagaaaaccaacacgaggtcttcgacagcttactagatcttagagatcaacttcatcatttacagcaaaacatgccaaggttcaccaaaaakgtataggcttgtctatggtcataagacttagtgatagaaaagggatagatcccagatttctctttttttcattgatttatctatgtaactttttatgtat

SEQ ID NO: 34760 - DNA, 201 bp, Homo sapiens
tctcctgacattgtgatccacccgccttggcctcccaaagtgctgggattgcatattcatttttcgtctatgcatccattcatccatctttccatccatccatccatccatccatccatccatccaatcaacagaaacaacagtagaaattaacttggtcttgtatgcggaagcagtgaggtttttctcaaggacttggaa

SEQ ID NO: 34761 - DNA, 201 bp, Homo sapiens
tcagtggctgctccttctgcatacatcattgagctctgccaagggtttgaacacacacacacgtaaataaaggcctaattatgtgtgtgtgtgtgtgtgtrtgtgtgtgtgtgtgtgtgtgtgtattatatgtattaagctctttttcctttctccatagcactgcatatacaaagatcagccaccctgagttgaaataaa

SEQ ID NO: 34762 - DNA, 201 bp, Homo sapiens
atagtccgcaatatgtacagttgtgtgcattgatcatgaagagagaatccatgttcacttcccaattcagccctcaagaaaaccaacacgaggtcttcgasagcttactagatcttagagatcaacttcatcatttacagcaaaacatgccaaggttcaccaaaaatgtataggcttgtctatggtcataagacttagtga

SEQ ID NO: 34763 - DNA, 201 bp, Homo sapiens
ctcctgacattgtgatccacccgccttggcctcccaaagtgctgggattgcatattcatttttcgtctatgcatccattcatccatctttccatccatccatccatccatccatccatccatccaatcaacagaaacaacagtagaaattaacttggtcttgtatgcggaagcagtgaggtttttctcaaggacttggaaa

SEQ ID NO: 34764 - DNA, 201 bp, Homo sapiens
tggcgcccaggctggggtgcggtgttgtgatcatggctcactacagcctcaacctcccccagctcaggtgatcctcctgcctcagactcccaagtatctgrgactacaggcacataccactatgcctggctgatttttgtatttttgtagagacagggtctcactgtgttgcccaggctggtctcaaactcctaggctcaa

SEQ ID NO: 34765 - DNA, 201 bp, Homo sapiens
tgctttttcggcttcttaaaaatgtctaaacacctttgtgaaacaggattctctgagaccaggcccactgccttttccagttttttttctttctttctttyttttgagacagagtcatgctctgttgcccaggttggagtgcagtggcgtgatcttcggctcactgcaacatctgcttcctgggttcaagcaattctcctg

SEQ ID NO: 34766 - DNA, 201 bp, Homo sapiens
ccagtagcttcacctggttctggaatgaaatacaacacacattagggcttcagaccctcttctctctgaaagcctgccctttgtttttgagacagagtctygctctgttgcccaggctggagtgcagtggtgcgatctcggctcactgcaacctctgcctcctggattcaagtgattctcctgccctcagcctcccgagta

SEQ ID NO: 34767 - DNA, 201 bp, Homo sapiens
cttcatgtctaaaacaccaaaagcaatggcaacaaaagccaaaattgacaaatgggatctaattaaactaaagagcttctgcacagcaaaagaaactactrtcagagtgaacaggcagcttacagaatgggagaaaatttttgcagcctactcatctgacgaagggctaatatccagaatctacaaagaactcaaacaaat

SEQ ID NO: 34768 - DNA, 201 bp, Homo sapiens
cctcttctctctgaaagcctgccctttgtttttgagacagagtcttgctctgttgcccaggctggagtgcagtggtgcgatctcggctcactgcaacctcygcctcctggattcaagtgattctcctgccctcagcctcccgagtagctgggattacaggcatgtgccactacacccggctaatttttgtatttttgagta

SEQ ID NO: 34769 - DNA, 201 bp, Homo sapiens
tggccgaatgtcggtgtgccagctgtttcatgcaccagacctgtagttcacccctactcttttacctgtagttcatccctactcttctaaggcttgaatgraaaataatttctaatttgttgtaaaatttaccaatttggtattgctgctgtaaacaggattttatctagggtttagatgccttatcttcaaattccacta

SEQ ID NO: 34770 - DNA, 201 bp, Homo sapiens
tgcacaatggaatactatgcagccataaaaaaggatgggttcatgtcctttgtagggacatggatgaagctggaagccatcattctcagcaaactatcgcmaggacaaaaaaccaaacaccacatgttctcactcataggtgggaattgaacaatgagaacacagggacacaggaaggggaacatcacacaccggggcctg

SEQ ID NO: 34771 - DNA, 201 bp, Homo sapiens
cctgccctttgtttttgagacagagtcttgctctgttgcccaggctggagtgcagtggtgcgatctcggctcactgcaacctctgcctcctggattcaagygattctcctgccctcagcctcccgagtagctgggattacaggcatgtgccactacacccggctaatttttgtatttttgagtagagacaaggtttcacca

SEQ ID NO: 34772 - DNA, 201 bp, Homo sapiens
tcatcagtctaggaaagttattctcaaccctggctgggtatcagaattgtctgtagtgcttctaagaattatgagttatggccagacgcggtggctcatgmctgtaatcccagcactttgggaggccaaggcgggtggattacaaggagtttgagagcagcctccccaatatggtgaaaccccttccctactcaaaataca

SEQ ID NO: 34773 - DNA, 201 bp, Homo sapiens
cctctgcctcctggattcaagtgattctcctgccctcagcctcccgagtagctgggattacaggcatgtgccactacacccggctaatttttgtatttttkagtagagacaaggtttcaccatgttggccaggctggtcttgaactcctgacctcaggtgatttgcctggcttggcctcccaaagtgccgggattacaggc

SEQ ID NO: 34774 - DNA, 201 bp, Homo sapiens
aatcctcatgacaatcctaagtggaaggaagaactccccatgttaccagtgacgcagcggaagcccaggtgctactgaaggtcacgcagtcagcattgacraagtctacactagaatccaggcctgacacaacccaaagtctgtattttttccctctgcagtctcttaaaattggcaaaaggtaaaccttcatgcgaccct

SEQ ID NO: 34775 - DNA, 201 bp, Homo sapiens
tagagacaaggtttcaccatgttggccaggctggtcttgaactcctgacctcaggtgatttgcctggcttggcctcccaaagtgccgggattacaggcatragccactgcgcccgggccaaaagcctgctttttgatcagcaatattggagacagttgtaggaaacactgaaagactgcaggatgcagtggggagggcgaa

SEQ ID NO: 34776 - DNA, 201 bp, Homo sapiens
gttgaagtaggagctgttcaattggaggtgagatttttagtagggatttctaatgcattcttttttcccattgatggttgttaatacttcccctacacacmcacacacacacacacacacacacacacacacaagcataaatagggcacacgtattctcccatgtaagggctgctgtcccttctccctcccacttatagcg

SEQ ID NO: 34777 - DNA, 201 bp, Homo sapiens
cagtgggttctgaagatcagatataactgagggaaagttaggtcatgattgccacctggatgctgttctctctcttcacggtaggtctcagttacttttaytgtggacttttgcttgctgcagagggaacttacacctttcatgcctcaagctcattaaggcacatttctcttttattcttcagggacattgcatttatga

SEQ ID NO: 34778 - DNA, 201 bp, Homo sapiens
ggttcccatgcaaatcgcttaaattccttcatcaccagaatctctccaacaggcccaactccagcccagctgtgaacactgctgtcatggagacaactccaaaatgaaagaactatgcaattgcctgaaggtgctaatggagagccagtttactctaatctcttattactaaggaacctctcggtttcgagattaagtggg

SEQ ID NO: 34779 - DNA, 201 bp, Homo sapiens
ttgggtgccccttggtgggaatcctcatggcccacctgttgtagttggtttctacactaatccaatctcccaacatgtcctccctctaaccccctttgcaygtctctctccacaactgtcatccttttcttgttccttgcaagctcccagcagcagcccagactgtgatcaaacttgggctgccccttaggctaagtgaca

SEQ ID NO: 34780 - DNA, 201 bp, Homo sapiens
cagttgggagttctcatctggttgggttccatggtagattttttaaatgtctttatgcatggaaggtaactttaaagatggaaatatgagtggtgttttayagattgctcaaaccgccaggttaagattgacaagagtttcaaccaatagaacgtggaggaaatgcaagaacatcttgtcctcatcaaaagtgctggggat

SEQ ID NO: 34781 - DNA, 201 bp, Homo sapiens
atgaagtggacaagaattccaaatacaaagagtgtaaatacatgacattttactgtatatagaaacagatggtgcctgtaatcccagcactttgggaggcyggggcgggtggatcacgaggtcaggagatcgagaccatcctggctaacgtggtgaaaccctgtctgtactaaaaaatacaaaaaaattagccaggtgcgg

SEQ ID NO: 34782 - DNA, 201 bp, Homo sapiens
tgttttccttacttctggattggaaaattctgaagaccatataatgatgtcttgatgactcaaggcaggactttttaatcttctaatgtaggcggggcggsccctgaaggcagaggtgtgtggacacaagaagagtgcagactcttggggcacctggggaagtagtgtccgtgtcacattaaattcatttaaactcttata

SEQ ID NO: 34783 - DNA, 201 bp, Homo sapiens
ataaaagtatcagaagtatatattcttctgatgtccagttctattgagaaaaatttattgtctttttggttatgttgttaggtctgtggattttttccccmaatgattgtgttctgttttgttttctaaacactgttaggaaatgctccctctgatcctgatgctgtgagtgctgaagaggccttgaaatatttgctgcat

SEQ ID NO: 34784 - DNA, 201 bp, Homo sapiens
cagccatctgataacagttctatgcctgttgctgagtggaacaagaaataaagacaacacccaggccctgactttcggatctgattggagaagccagtcakgtagtttgtctgaatgccatataatttgataggtagcaggagagcatgagttgtaagccagcctaggacctactcccaatagcgcttggttctccaggaa

SEQ ID NO: 34785 - DNA, 201 bp, Homo sapiens
tttaaatgtttagtagaatataccagtaaggccatctcggccaggagttttctttaatgaaagtttttcactattagttcagttactttagtagacattarcctattcaagtttatctgtgtcttctggaatgagcattggtagtttatgtctttcaagtaatttgttcatttcatctaaattgtcagatttattggtatg

SEQ ID NO: 34786 - DNA, 201 bp, Homo sapiens
gatgtgattattttctagattgctgtttgccttctagaactcattaattgcagacaccatccccttagtattaggtgaaatcttataatttacgatgatartatttgcatttttgttttccaggtgattgtccaagtgctgaccctacagtgaaactgggagctgtgggtggaagtggatttaaagtttgccttagaactc

SEQ ID NO: 34787 - DNA, 201 bp, Homo sapiens
cagcactgggctgagagggtagccccttcacctggtcttgctgagatgtggcctttgtcagggaagattatgactgatgtgttcttaagaggaaagcagarattttaaggaggttgagatgtgattattttctagattgctgtttgccttctagaactcattaattgcagacaccatccccttagtattaggtgaaatctt

SEQ ID NO: 34788 - DNA, 201 bp, Homo sapiens
gacatttgttccaaaggttccaattattcaagactgcctttggcttcttttacaacatggatgattctatgttatgggcactgaaactaaaagaaactgtggaaggattggtaccttagagaaatgaaaaagcaaaaacatcagaaattatggtgtatttctgtaaagttagtgacactgagtgtgcccacctctcttgcc

SEQ ID NO: 34789 - DNA, 201 bp, Homo sapiens
cataggagtacatggacaggcgcgactggtaggcgatgtgcattgcaggggtgttgaaggcttcaaacagcatttcagcatatttctctctgttggtgtgwgggctcagtggcgggtctgaaaccaagaccgcatgctcctccggggcgatcttcatctcttgtcggaagagatattcccagatatcctgcactgtatccc

SEQ ID NO: 34790 - DNA, 201 bp, Homo sapiens
aaccaagaccgcatgctcctccggggcgatcttcatctcttgtcggaagagatattcccagatatcctgcactgtatcccagtccacgatgatgccatgtygcagagggttaaccagcttgagatgaacgtttgtgttgttgagttcctgccccacgaatgtctccttgcgattatccccagtcttggcggtctccatgta

SEQ ID NO: 34791 - DNA, 201 bp, Homo sapiens
tgacatttgttccaaaggttccaattattcaagactgcctttggcttcttttacaacatggatgattctatgttatgggcactgaaactaaaagaaactgtggaaggattggtaccttagagaaatgaaaaagcaaaaacatcagaaattatggtgtatttctgtaaagttagtgacactgagtgtgcccacctctcttgc

SEQ ID NO: 34792 - DNA, 201 bp, Homo sapiens
tctgagttgcagctggagaaactggcaaattaaaatcacattgggaaagagaattactgtgtttcacaccataccagtagaaatgacaggctgttttctgstggtagggatttggcctttggtattggaagtcttgagaagtattagataatctttgctgatacagtctattttctcctcaggttctaggtcccaattcta

SEQ ID NO: 34793 - DNA, 201 bp, Homo sapiens
gtccagatgtgcatgacttcacaggctttacgacagccaatcaaggaaatcatgaaaaagattgtggatctggcacaaaaaaaaaaaaaaaaaaaaaaaaatggtgcatgaaggatttcaagataggaatcttggagaaattcaagaggtgatagacatcacaccagaggaattaacagaagatgacttgatggagatgag

SEQ ID NO: 34794 - DNA, 201 bp, Homo sapiens
cctcccaaagtgctgggattacaagcgtgagccaccgcgcccggcctgtaactagtttttttaagataaagtcttattccaactttaattggaatttatgraataccttgttgatagtgaatttatttaagtagccttttttcagtattgatattcttatatctttatggcaccatttagtggagagaaatgtaaacaaac

SEQ ID NO: 34795 - DNA, 201 bp, Homo sapiens
ttagccaggatggtctcgatctcctgacctcgtgatccacccgcctcggcctcccaaagtgctgggattacaagcgtgagccaccgcgcccggcctgtaamtagtttttttaagataaagtcttattccaactttaattggaatttatgaaataccttgttgatagtgaatttatttaagtagccttttttcagtattgat

SEQ ID NO: 34796 - DNA, 201 bp, Homo sapiens
tctagtatattgtcatctgtttattatttatacctctgttcactctcttatacttcaagtctattgttaagagtttttatttggattcaaaaaggctggtrtatcagtcaagatctagaaaggaaaacaaaagcctatctattattttatcacagaatttaatatatggatttgttaaataagtattagaggactaaacaa

SEQ ID NO: 34797 - DNA, 201 bp, Homo sapiens
tgattgtcattcagccaagtaccaagcataattcttgcaggttgtattttaggctttcttattctttgtatcgtttattgtaaacctttccttgatagttytctgttagctttattcaaaggagtgttgatacaggctgtgaccataaggctcaaagcgaaacttttcttgaaagtcaagataaatatagagaacaacaag

SEQ ID NO: 34798 - DNA, 201 bp, Homo sapiens
ggtaactttctaagctgtcatttactctagcttactttgtacttaaactaatatgatctgaacgaagatgttttgtcctttttttggtaggtgtttcttgraaatgtggaaaccttcattaaacagatagattctgtgaatcatattaacttgttttttacagaattgaagtaagtattttgaataattcatgtgtatctt

SEQ ID NO: 34799 - DNA, 201 bp, Homo sapiens
gttttgccaatcctcccttgctttaggtatcaagtcttcgttcaggtgattttacaagttcagtggtagcgcatattctgggataatgttgatgaactctragatctggaatctcagtctctaatttgttaatgcttattaaggaaaaagagctcgcttggaaaacctagtaacctctttctttttgctgaattttaaccc

SEQ ID NO: 34800 - DNA, 201 bp, Homo sapiens
aaagtagactgggttaatttgcttgtgtttactttggtgaaaggtgaaaaatgaagtttctttggtggcagaaggctttctcccagaggatggaagtggcygcattgttggtgttcaggacttgctggatcaggagtctgtgtgtgtggccacagcctctggagacgtcatactctgcagtctcagcacacaacaggtaag

SEQ ID NO: 34801 - DNA, 201 bp, Homo sapiens
tccattttgcactggaccagccacgtcttaggtatctatctttagtcctgattacaggaacttaggtgtgaaatcatagggtggtagaactatgtgatagraaaggtaggtttaactgatttgagatagaattgcttgtgatttcagttttatttctttgcaggaatgtgtccttggtctgactgacaggtgtcgcttttt

SEQ ID NO: 34802 - DNA, 201 bp, Homo sapiens
tccagttctatttcatataatgcctatttcaggccttaacccttcagtaaaggaggtttggtttctataccctaggacagtttcattgagaataaattttkttaggctacctatgtattccctactgtgcagactacagtacagtactagcagaattcttaggctgttactagaatatgatgatgaatgcccgggtggtca

SEQ ID NO: 34803 - DNA, 201 bp, Homo sapiens
atgttatcaattattcttgaaagtagactgggttaatttgcttgtgtttactttggtgaaaggtgaaaaatgaagtttctttggtggcagaaggctttctyccagaggatggaagtggccgcattgttggtgttcaggacttgctggatcaggagtctgtgtgtgtggccacagcctctggagacgtcatactctgcagtc

SEQ ID NO: 34804 - DNA, 201 bp, Homo sapiens
atgaactctaagatctggaatctcagtctctaatttgttaatgcttattaaggaaaaagagctcgcttggaaaacctagtaacctctttctttttgctgarttttaaccctccttcactgctccccgcctttagttttttctctttgcttaaacctcatgctcaaactattttccattctgcatctccagcccagaaaaat

SEQ ID NO: 34805 - DNA, 201 bp, Homo sapiens
  misc_feature (1)...(201): n = A,T,C or G, or insertion/deletion polymorphism (see Tables 1-2)
gatgagcgtgttcatcagcagggctgatagtcttgaggttcagtgggagagctaaggcacatggttgttatttgttctcttctatttcacataatgtgtgnggtttcaattgcagttaatggagagtggcttgttgtgataattaaggcttattagttaatggtgtgtttagcattacaggccggcctgagcagcaatcat

SEQ ID NO: 34806 - DNA, 201 bp, Homo sapiens
tgtaatagcattttgatgacatttgaagtagcctgtggggattcaaattaagtttgactttaacagcttatgttgctaccaggaagaacagctaccttccwtcccagctaaactcatacatccagactgtaactactgtattcctagctcctcttctgtctagagaatggcaaggttcttttggtatcagtttcgacatat

SEQ ID NO: 34807 - DNA, 201 bp, Homo sapiens
taccaggaagaacagctaccttccatcccagctaaactcatacatccagactgtaactactgtattcctagctcctcttctgtctagagaatggcaaggtwcttttggtatcagtttcgacatatccacttattcctttttttttcttaagttttttcatttagaaaaaaaaacagatggggtcttaatatgttgcccagg

SEQ ID NO: 34808 - DNA, 201 bp, Homo sapiens
atctgtctatcagggttcagaagactaaatgagataatatatgtgattagcaaccttttatccctagttgtacaaatcattcaaagttaattttatttagkaggggaaacagaaatgtgatcttgagaatagttttagtagatttttattcaacacatactagaatgcctataattgtggtggatggtagaatgcagtggc

SEQ ID NO: 34809 - DNA, 201 bp, Homo sapiens
tgccagtatataaaaatggattttcaaatagtgctaatcagtgggatacccttttgtttttcctcatgattttataaagatgtcctaatatgcaaaaataraatgtttccccattcatttgttctttcaactttcccaaaggaataactgatattacatcttttttgaagaaaacattctaaagttgagaatcttgcctct

SEQ ID NO: 34810 - DNA, 201 bp, Homo sapiens
ataatcaaaattaattaatttaaatgggaagtccttactttcatatcagcttttctgttaagtcagcagcccactgtgtacatggatcctatctggatgtmtcaccagtttctctgattatagtttcagtgtgtaaaatgctgttacagtcctccttaaacttttcaaaatagctttaaaaaaaagtgcaaatatgttcat

SEQ ID NO: 34811 - DNA, 201 bp, Homo sapiens
gtctgttttagcttacttatttctcataatacctctgtaaagtatatgccatttgcaccatcattttacagatgagacaactaagacatggagcagttagrtaacttgcctgagatcatgcaggtggagccaggatcaaatcccagcgagtctagctccagagtttgttctcttcttgacagataatttatcctcacaaaa

SEQ ID NO: 34812 - DNA, 201 bp, Homo sapiens
tcccttctccttttttttgtcagttcatctgcagcggtggatggggtcataatcagtctatgttgcaattccaagaccaagtcagtagtattacagctggytgatggccagatatttaagtacctttggggtgagtatcaaggtgttaggaaagcatgttatgacttacatagatgcttagttcttaagaacatgtacttg

SEQ ID NO: 34813 - DNA, 201 bp, Homo sapiens
ctgagttgcagctggagaaactggcaaattaaaatcacattgggaaagagaattactgtgtttcacaccataccagtagaaatgacaggctgttttctgckggtagggatttggcctttggtattggaagtcttgagaagtattagataatctttgctgatacagtctattttctcctcaggttctaggtcccaattctac

SEQ ID NO: 34814 - DNA, 201 bp, Homo sapiens
ttcttcttatttttgttaactgagctcccctcccctaccccccctttttttgtttgtttgttttgtttgtttgtttgttttgccaatcctcccttgctttrggtatcaagtcttcgttcaggtgattttacaagttcagtggtagcgcatattctgggataatgttgatgaactctaagatctggaatctcagtctctaat

SEQ ID NO: 34815 - DNA, 201 bp, Homo sapiens
attaaaatcacattgggaaagagaattactgtgtttcacaccataccagtagaaatgacaggctgttttctgctggtagggatttggcctttggtattggmagtcttgagaagtattagataatctttgctgatacagtctattttctcctcaggttctaggtcccaattctactgcaaatagtatcatggcatcttatca

SEQ ID NO: 34816 - DNA, 201 bp, Homo sapiens
gattggatacaatttttcactacaaaaaattgactacaattcttcctcaattctaagaccgcatctttagtatgatcagtttcatgcttctagcggtgggrgacctggtgcaggaaaatccagcatgaccattgtatgtgtaatttttaaaaatatttatgtggcatatgcttgttcataaaggcacaccacagttccagt

SEQ ID NO: 34817 - DNA, 201 bp, Homo sapiens; identical to SEQ ID NO: 4487

SEQ ID NO: 34818 - DNA, 201 bp, Homo sapiens
cccgggttcacgccattctcctgcctcaccctcctgagtagctgggactacaggcgcccgccatcacgcccggctaatttttttgtatttttagtagagamggggtttcaccgtgttagccaggatggtctcgatctcctgacctcgtgatccacccgcctcggcctcccaaagtgctgggattacaagcgtgagccaccg

SEQ ID NO: 34819 - DNA, 201 bp, Homo sapiens
aggaacagctgctgctgggggaaaagccagccggtcgggccaggtgtggtggtggctcacgcctgtaatcccagcactttgggaggccaaggcaggcggaycacctgaagtcaggagttcatgactaatgtggccaacatggagaagccccgtctctactaaaaatacaaaattacccgggcatggtggcgcatgcctgta

SEQ ID NO: 34820 - DNA, 201 bp, Homo sapiens
gggctccgtgcccaagtggaagggaaattaagaacttggagtcaagtggtagacatttgagtggtgtggagacaagttcgttgccaaagttttcaaagatkgtgtttgatgcatcctgagtatcactcctttttccccctcattgcttcttgattgtttattatatgccaggcttttttctagtacttggcttgttgtact

SEQ ID NO: 34821 - DNA, 201 bp, Homo sapiens
ctaaacaaggcaaaagggaaatacagaggaaggacattgagatagtaactgtaggaagcagctttaccctctagctgagggaacaggaggagttgttgggrattattagaatttagaagcctggaagtggggccctgtagagctggctcttgaacctctgagaggagggtgccagccagctaatcctggcatttctgaggg

SEQ ID NO: 34822 - DNA, 201 bp, Homo sapiens
tagctcctaatccacttgtcctgccacagccccattgctgtcagttcttcattactttcctgatgtgctggagaatctgaaatttgtttttacttgtgagytctgtggttatgtcataaattctgctggcatatggcagtgttagccttgttttcaaatatcttttgaattctcagaaaaagcctagatagttgccaagag

SEQ ID NO: 34823 - DNA, 201 bp, Homo sapiens
tcccttctaaaccccccagtcagcaagaaaggtcttctcaattgtatcttagtgatcatgaaagttaaaggaactgtgcataattgttaagtccagagatrgtgtttgccccagaggtcttatcttgctggcttgacttggaaatctaaatttagtacatctctaagtttggtgaggtagaatatgaaggtgctctacttt

SEQ ID NO: 34824 - DNA, 201 bp, Homo sapiens
gatttcctcatttagaaatgggcataagacttctctgtgtgcttcaatagaatgctttgaaggttaaataagagggtgtgtgtaaaagcactttacaaacygttgaaataaaagcaactaggaatcagggccccagaacttcttgaatttattataataggtatttcttagaagaaatgtgatcatcatcttcaaaactgt

SEQ ID NO: 34825 - DNA, 201 bp, Homo sapiens
ctcaggctggagtgcagtgatcaccgctcactgcagcatccaccgccccgggctcaggtgatcctcccacctcagcctcttgagtagctgggactacaggygcatgccacaacacctggttaattttcaaattttctgtagagacagggtgtcaccaagttgtccccgctggtcttgaacaactcctgggctcaagtggtc

SEQ ID NO: 34826 - DNA, 201 bp, Homo sapiens
ttactcttaaaaggttccacaaaagtattaatgaatgtgtgtatgcatgcagagaaacaggaagcaaaaaaatgtcaaaatgttagtaattggtaaatcamagtgaagggtatatgtgtgttcattgaactcttacaacttttatgtaggtttcaacgtttcaaagtattttttaaaagttaccttttcaaatgaagtttg

SEQ ID NO: 34827 - DNA, 201 bp, Homo sapiens
ggaaatcaagcataaatagctagagaagaaaaattccttactgttcatttttaaaaattgctataactcttagatgccagttggttttttgctcttttcckttctttttaaaacagcctgtttaaaactatgtccttaaaacatgtcattcagaattattatttcacttgatttttaggtatacatataaaactacttgtt

SEQ ID NO: 34828 - DNA, 201 bp, Homo sapiens
atatttttataattcaactcttttccaaaagtcatttttatttatcatcatcagcatgccaggtgtatgttagtaatttgatcgctgggctacatgttctrttgatgaccattccatacacacctgttcttagagaagaagatgtcacgaagaccatgtaccctgcaccagttaccagcagtgtctacctgtccagggatc

SEQ ID NO: 34829 - DNA, 201 bp, Homo sapiens
gttggattcaagcaattcgcctgtctcagcctcccaaagtgctgggattacaggcatgagcctccgtgcctggcctgatatttgcttttttttttttttttaatgctctctattgcagagttggcaaactacaacctgtgacaaatccagcatgccacctgtttttgtaaataaagctttattggagcatagccatgctca

SEQ ID NO: 34830 - DNA, 201 bp, Homo sapiens; identical to SEQ ID NO: 4495

SEQ ID NO: 34831 - DNA, 201 bp, Homo sapiens
cgttacaaacagtactctatagaaaggattgtcaaatgtatggaaaagaaccttgacagaacatgaaagtctgaaagaattacaccatcaatgatgccatmattgttatagaaaaagctgtgaaagccatcaagcccaggacaataaattcctgctagagaaaactgtgtccagatgtgcatgacttcacaggctttacga

SEQ ID NO: 34832 - DNA, 201 bp, Homo sapiens
ttactagtatatagaaatatagctgaagtgttttgcagggaggctgtataattgaccttgtatcctgcaaccttgctaaactcatttattagttctagaasctcttgggtgtattctctaggattttctacatcaacaaacatggtttctataaatatagttttatgtctttcttacaatcaatacttttttctatctgta

SEQ ID NO: 34833 - DNA, 201 bp, Homo sapiens
cttgacagaacatgaaagtctgaaagaattacaccatcaatgatgccatcattgttatagaaaaagctgtgaaagccatcaagcccaggacaataaattcstgctagagaaaactgtgtccagatgtgcatgacttcacaggctttacgacagccaatcaaggaaatcatgaaaaagattgtggatctggcacaaaaaaaa

SEQ ID NO: 34834 - DNA, 201 bp, Homo sapiens
ctgttctcttccacactctctctgctctagtcacactggccgtcctgttactcctcagacctgctatacacattcctgctgcatggccatggtgccttctstgccctctgcctggtgccccctatctcatcacgtggtttattctcctgacagccattagagctcacactccctgagagctgcaaggagactgtcctctgt

SEQ ID NO: 34835 - DNA, 201 bp, Homo sapiens
gatactgcctatccatacttacatctcatgtaaagaagacaaccccagaactggaaattgtactgcaaaaagtacacgagcttcaaggtagagatccgctyacagagaaagtgcttaaggtggccgtgactgctactagtcttctgcaggtgacaatcaccatgtcattgccacaccacagatttaacatgtgacttttta

SEQ ID NO: 34836 - DNA, 201 bp, Homo sapiens
ttgacagaacatgaaagtctgaaagaattacaccatcaatgatgccatcattgttatagaaaaagctgtgaaagccatcaagcccaggacaataaattcckgctagagaaaactgtgtccagatgtgcatgacttcacaggctttacgacagccaatcaaggaaatcatgaaaaagattgtggatctggcacaaaaaaaaa

SEQ ID NO: 34837 - DNA, 201 bp, Homo sapiens
cccgggctggagtgcagtggcaccatcttggctcactgcaacctacgcctcctaggctcaagcaatctcacctcagcttacaggcgtgcaccaccatgccyggctaagttttgaattttttttgttgagacggggtttcgccatgttgcccaggctggtctcaaacttgtgagctgaagcaatccatctgcctcggcctcc

SEQ ID NO: 34838 - DNA, 201 bp, Homo sapiens
ccccagcgtgcttgattttctttttgtagtacatgtgtttaattattccagcatttgggaagaaaaaagataatgtgggagaaaggacctgcagtgggatsatagaaatttttggctttggatagaagctatgtatgattctgtcaatggagctgggaatataacttaccactctttcaaatttcttctctctagatgaag

SEQ ID NO: 34839 - DNA, 201 bp, Homo sapiens
ggcgatcttcatctcttgtcggaagagatattcccagatatcctgcactgtatcccagtccacgatgatgccatgtcgcagagggttaaccagcttgagaygaacgtttgtgttgttgagttcctgccccacgaatgtctccttgcgattatccccagtcttggcggtctccatgtagggcttgcccaccgttgttgagat

SEQ ID NO: 34840 - DNA, 201 bp, Homo sapiens
tttggtgttggatccttttcacagtgttagctccgagtaatctagctagctttcacccatgcctctctggccttctcttgcaggttgcgtcaaatatcacrtcatttgcagtatatgatgagtttttattgttgacaacccattcccatacctgccagtgtttttgcctgagggatgcttcatttaaaagtaagttttcaa

SEQ ID NO: 34841 - DNA, 201 bp, Homo sapiens
agtatctgtttaactttgtagtcaactgctgcttattgtctctacaggaaagctggttgagcagaggaagcacattgatgcggccatggttttggaagagwgtgcccaggtaaactcaattcctcccttctaaaccccccagtcagcaagaaaggtcttctcaattgtatcttagtgatcatgaaagttaaaggaactgtg

SEQ ID NO: 34842 - DNA, 201 bp, Homo sapiens
atctagctagctttcacccatgcctctctggccttctcttgcaggttgcgtcaaatatcacgtcatttgcagtatatgatgagtttttattgttgacaacycattcccatacctgccagtgtttttgcctgagggatgcttcatttaaaagtaagttttcaatgtataaaacagaaatggtcccttctccaatgtcttttg

SEQ ID NO: 34843 - DNA, 201 bp, Homo sapiens
ctattaaaccatggaagaactctggtggatttcctgttcggtttccttatccatgcacccagaccgaattggccatgattggagaagaggtaggtgaacayggagcaggaaatttacttaaagtagttacccagggactgatggcattaagtagaaagagcgtgggctttggaggtggacttgggtctccactaaatgcct

SEQ ID NO: 34844 - DNA, 201 bp, Homo sapiens
atacacacctgttcttagagaagaagatgtcacgaagaccatgtaccctgcaccagttaccagcagtgtctacctgtccagggatcctgacgggaataaamtagaccttgtctgcgatgctatgagagcagtcatggagagcataaatcctcataagtatgtatgctgtcaccaggtggcatcctttgaaaaaccgaagtg

SEQ ID NO: 34845 - DNA, 201 bp, Homo sapiens
accctgcaccagttaccagcagtgtctacctgtccagggatcctgacgggaataaaatagaccttgtctgcgatgctatgagagcagtcatggagagcatraatcctcataagtatgtatgctgtcaccaggtggcatcctttgaaaaaccgaagtgtgtagttgtccttgtccagcctacttacctttctcattctggtg

SEQ ID NO: 34846 - DNA, 201 bp, Homo sapiens
tcagggtatgagaaatttagggaaaatataaaaacgtattcttaagccagacaaagattaattttagattttgtagtatttggtagtatctcaggttttgyccctccaaataattaggagtggactgtatacaagatgcttcagtcttccttcatccaggaacgtctcagtggtttttaagttttattcatgtcttggata

SEQ ID NO: 34847 - DNA, 201 bp, Homo sapiens
gagcaagattgtgtctctgatgtgggaccctgtgaccccataccggctgcatgttctctgtcagggctggcattacctcgcctatgattggcactggacgrctgaccggagcgtgggagataattcaagtgacttgtccaatgtggctgtcattgatggaagtaagctcctgggaagtgtgtccatgagcctgcaaggggt

SEQ ID NO: 34848 - DNA, 201 bp, Homo sapiens
ctgttgtttcttgtttgttgtatttattagtaactgggtgcaaataaacatcttaggagctaggtagctgtacatattcacgaggctggagataagacaargctaatttggtaacatttggcagtgctgaaggcctgctttggattctcgtgtttctgtgctctctgtgctccctgagcccttgcctgtgcctgcagtggg

SEQ ID NO: 34849 - DNA, 201 bp, Homo sapiens
ccccctaactgaactgggagagatgcttaggccaggataaagaattgtgggacactgctttctgcgtaggccccccagcgtgcttgattttctttttgtartacatgtgtttaattattccagcatttgggaagaaaaaagataatgtgggagaaaggacctgcagtgggatcatagaaatttttggctttggatagaagc

SEQ ID NO: 34850 - DNA, 201 bp, Homo sapiens
ccacagatttaacatgtgactttttagttgccattttaagacccttgtcagtttttttcagtgctgccctctaaagcatatataaaagtatcagaagtatrtattcttctgatgtccagttctattgagaaaaatttattgtctttttggttatgttgttaggtctgtggattttttccccaaatgattgtgttctgtttt

SEQ ID NO: 34851 - DNA, 201 bp, Homo sapiens
ttagttgccattttaagacccttgtcagtttttttcagtgctgccctctaaagcatatataaaagtatcagaagtatatattcttctgatgtccagttctrttgagaaaaatttattgtctttttggttatgttgttaggtctgtggattttttccccaaatgattgtgttctgttttgttttctaaacactgttaggaaa

SEQ ID NO: 34852 - DNA, 201 bp, Homo sapiens
ttgcatgttaagtgttttagcaaatgttgatgttgatggttttttgcaaagagcgcatcagctatttgtgaactagatctgtgaatcttgcagagtcaccktctctggctattaaaccatggaagaactctggtggatttcctgttcggtttccttatccatgcacccagaccgaattggccatgattggagaagaggtag

SEQ ID NO: 34853 - DNA, 201 bp, Homo sapiens
tggtgcgatctcggcttactgcaagttccacctcccgtgttcacgccattctcctgcctcagcctctctagtagctgggactacaggtgcccatcaccacrcccggctaattttttgtatttttagtagagacagggtttcactgtgttagccaggatggtctccatctcctgacctcgtgatccgcctacctcagtctcc

SEQ ID NO: 34854 - DNA, 201 bp, Homo sapiens
gctgcccctccagccggacttaacccagcctcttgattgcttgcagggggttgataataacgctgaaagcgagagtattaattcacgatggaaggcggcgrttaatagaggctcgggtgctgtggtgcgggtcctttctcgcgtgtgagactttttcgtggaggtggtgtcctctgtgcttctccatctaacgtggtgttt

SEQ ID NO: 34855 - DNA, 201 bp, Homo sapiens
attgcatggcttttttttgtttctttttttttgagacggagtctcactcagtcgcccaggctggagtgcagtggtgcgatctcggcttactgcaagttccrcctcccgtgttcacgccattctcctgcctcagcctctctagtagctgggactacaggtgcccatcaccacgcccggctaattttttgtatttttagtaga

SEQ ID NO: 34856 - DNA, 201 bp, Homo sapiens
agttctaccacttcgtaataatcactattcaaattttcttgtcttctaggtttttcatgtatatatctcagtatagctatcatcttgtttttgttaaaagygtagtaggtatgggccaggtgcggtggctcatgcactttgggggcccagcactttgggaggccgaggcgggcggatcacgaggtcaggagatcgagaccg

SEQ ID NO: 34857 - DNA, 201 bp, Homo sapiens
taaaattgcatggcttttttttgtttctttttttttgagacggagtctcactcagtcgcccaggctggagtgcagtggtgcgatctcggcttactgcaagytccacctcccgtgttcacgccattctcctgcctcagcctctctagtagctgggactacaggtgcccatcaccacgcccggctaattttttgtatttttag

SEQ ID NO: 34858 - DNA, 201 bp, Homo sapiens
taccatatttttgatgtgtgtttggttgcgggtatagaatccacaatatgaagggccgactgtattcattgaaaaaaatacgaatataaatcgacctgtgyagttcaagcctgtgttgttcaagggtcagctgtacttacatagagagacggtgagagagggaatagggtggggcgggagggagagagagtaatagagtgt

SEQ ID NO: 34859 - DNA, 201 bp, Homo sapiens
taatgacatattttacagatttgtttaatgcctctgtaggttagtgatttacagctagggatgagctcaggtagtgggattatttgatttgagagaggaartacagctattataaagatttggaagtaaatccataactgaaagccaatgacagatcttttttcccttctaggtaaatgacttgctctggaatgcagattc

SEQ ID NO: 34860 - DNA, 201 bp, Homo sapiens
acaataagtattttattacaatttcgagaacttaaaattatgaaaagccctcattacctatatcatcaatcagattcttagaggctcttttttttttttttaacttttttactttaatgcagtattttgtagtggagattcctagcagaaagaatcgtgacactcatcatataaaggagggcttctcttaacctgagggaa

SEQ ID NO: 34861 - DNA, 201 bp, Homo sapiens
agatgtggctttatctgggctttggtttggagtagttttatctattcatctaaccgtctgtctctaagtgtataagtgtgtgtgtgtgtgtgtgtgtgtgkatagtattgggtgtgtatatatgtattttgtctacattgtattgaagtaggtagtgcagcatcaaaaggaaattgttgattttcaaaatcagtgaaatgt

SEQ ID NO: 34862 - DNA, 201 bp, Homo sapiens
cagatgtggctttatctgggctttggtttggagtagttttatctattcatctaaccgtctgtctctaagtgtataagtgtgtgtgtgtgtgtgtgtgtgtgtatagtattgggtgtgtatatatgtattttgtctacattgtattgaagtaggtagtgcagcatcaaaaggaaattgttgattttcaaaatcagtgaaatg

SEQ ID NO: 34863 - DNA, 201 bp, Homo sapiens
attagagtggctaattctcatgggctaatgtgatgggaagaaattttgtataaatgcagtcatgcgcatatatgtgtgtgtgtgtgtgtgtgtgtgtgtgtgtatacataccttttctatgtttagatacacaaatacttgacatggtattacaattgcctgtagtattctgtaaagtaacatgctgtccaggtttgtagc

SEQ ID NO: 34864 - DNA, 201 bp, Homo sapiens
atgatttatttcccctaggaggccaacttgagctgagtctcagctgaattggtgttgggtaggtgagggataagggtggggagtagtcagctgaattggtrttgggcaggtgagggataagggtttggagtagtcagctgaattggtattgggtaggtgagggataagggtggggaacagtccaagcaagtgaatgtgtcc

SEQ ID NO: 34865 - DNA, 201 bp, Homo sapiens
aattagagtggctaattctcatgggctaatgtgatgggaagaaattttgtataaatgcagtcatgcgcatatatgtgtgtgtgtgtgtgtgtgtgtgtgtgtgtatacataccttttctatgtttagatacacaaatacttgacatggtattacaattgcctgtagtattctgtaaagtaacatgctgtccaggtttgtag

SEQ ID NO: 34866 - DNA, 201 bp, Homo sapiens
taattagagtggctaattctcatgggctaatgtgatgggaagaaattttgtataaatgcagtcatgcgcatatatgtgtgtgtgtgtgtgtgtgtgtgtgkgtgtatacataccttttctatgtttagatacacaaatacttgacatggtattacaattgcctgtagtattctgtaaagtaacatgctgtccaggtttgta

SEQ ID NO: 34867 - DNA, 201 bp, Homo sapiens
ttaggtttttgtcttttatgagcatacaacttttgacttctattgatcaaggttgaggagcagtagctttcttgttagacacacttaacaagaaggttaartctagttatgagccatgtcaaaataacagaccaaaaatatatcaaaaagtggtgaaaaataggataaatattagtagatgaagcaactttttaaagatat

SEQ ID NO: 34868 - DNA, 201 bp, Homo sapiens
atgtttaaagaggcatttgaatgcatgagaaagctgagaatcaatctcaatctgatttatgatcataaccctaaggtaactttctaagctgtcatttactstagcttactttgtacttaaactaatatgatctgaacgaagatgttttgtcctttttttggtaggtgtttcttggaaatgtggaaaccttcattaaacaga

SEQ ID NO: 34869 - DNA, 201 bp, Homo sapiens
atgtttgctggaaaaaaaactcttctggattttatctattctttagttaggtgagctttcgatattgtaacactctgagtttgctttaagaccctcaggcrgtttgattgcatctacacaagataaacccaaccagcaggatattgtgttttttgagaaaaatggactccttcatggacactttacacttcccttccttaa

SEQ ID NO: 34870 - DNA, 201 bp, Homo sapiens
cctaaatctcctcttgtcacaggatatcagcattgcttatggggagcacctgatgcaggagcacatgtatgagccagcggggctcatgtttgcccgttgcrgtgcccacgagaaagctctctcagcctttctgacatgtggcaactggaagcaagccctctgtgtggcagcccagcttaactttaccaaagaccagctggt

SEQ ID NO: 34871 - DNA, 201 bp, Homo sapiens
ttgtcgatttgtccctgaagttaagtagtatcttgccagtaaggggactgccttttaaagttcttttgatactggagaatgcccgaggccaccccaaactscatgagttcaacaccgaagacattgaagtgatctacttgcccccaaacacacatctctaattcagcctctagatcagggtgtcataaggacctttaaggc

SEQ ID NO: 34872 - DNA, 201 bp, Homo sapiens
ggaaggttggaggttgcagatgtccaagaaagagtactaataggcctaggtcctgtggcaatatggaggatattcctttcctagcctggaaagaagtggarggaagtcttcctccgagaagataagggaataaggctgatgggtgtgaaatttcagagaaactagttttgaggcgtttttatgatgtttaaagatgaaaaa

SEQ ID NO: 34873 - DNA, 201 bp, Homo sapiens
taacaggtttcagttaatgaatgctcttctgtgtaatgtaagccctgttgtatagttgatagcattttctagccagttcccagaactccttgtttccagtrtcaatacttggcacctttgtccactgacactaatccccagattaatttgtaattaaagccctactggtgagatttctgagaaacgttgttgcaaaattag

SEQ ID NO: 34874 - DNA, 201 bp, Homo sapiens
ttcctgagaaaaacattgaaagttatttttttgtgaattgccattattgtttagatatactgtgatgttcagatggcttatcttacaaattgaatatcccyaggtctaatcctcttctttctttttcactgcagacagggtgttggtgacagtcttccggcagactgtggttccgcctcccatgtgcacctaccaactgct

SEQ ID NO: 34875 - DNA, 201 bp, Homo sapiens
gatgatctccgtggagacagtggctgagtaatcttcagatcccagtacttagcaagtgctcagtcggtgttggatgtaggccacaaaccggatcgtaaagrattcaactgtatattgacagccacggaactaatcaatgaatagatccgtatgaagagtaagcaaaaaggcagcaaagacagtttttcagcttggggacat

SEQ ID NO: 34876 - DNA, 201 bp, Homo sapiens
ccttcccacattatggggaataatctgctttccttatagtcagccgattataaatattaatcacatctacagaataccttcacagcaacatctggagtttcagcagatagctgggtgccatagcctagccaacttgacacaataaaattaactgttgtaagtcatcacgtgctttccctagtgcatggtattaccacagaa

SEQ ID NO: 34877 - DNA, 201 bp, Homo sapiens
tttattgttgacaacccattcccatacctgccagtgtttttgcctgagggatgcttcatttaaaagtaagttttcaatgtataaaacagaaatggtccctyctccaatgtcttttggagtcttgatgactttttgaattcttcatttattttggctttttatcaaggagtcctaggctggagaaaatctttagagttattt

SEQ ID NO: 34878 - DNA, 201 bp, Homo sapiens
acaggtgtcgctttttcatcaatgacattgaggtatcaaggcttggtttggtgttggatccttttcacagtgttagctccgagtaatctagctagctttcrcccatgcctctctggccttctcttgcaggttgcgtcaaatatcacgtcatttgcagtatatgatgagtttttattgttgacaacccattcccatacctgc

SEQ ID NO: 34879 - DNA, 201 bp, Homo sapiens
tctcccagaggatggaagtggccgcattgttggtgttcaggacttgctggatcaggagtctgtgtgtgtggccacagcctctggagacgtcatactctgcrgtctcagcacacaacaggtaagtggaagactccagtgaggggggagtctcaagcatcctcaaataggttacttgctatttgtggaagttttcaaatcagt

SEQ ID NO: 34880 - DNA, 201 bp, Homo sapiens
ttcctcaagtaccatatttttgatgtgtgtttggttgcgggtatagaatccacaatatgaagggccgactgtattcattgaaaaaaatacgaatataaatsgacctgtgcagttcaagcctgtgttgttcaagggtcagctgtacttacatagagagacggtgagagagggaatagggtggggcgggagggagagagagta

SEQ ID NO: 34881 - DNA, 201 bp, Homo sapiens
gttgccataggtctagtgtttctcaaaatttttaagtctgcagttgatatcattatcattatgatatttaattggcttgggtttttgttttttttttttttaatcctatactggtttgtacgagccattccttttcccttactgacttgaagagtcagttatttaagaataacattggactctggaaataacatagtatgt

SEQ ID NO: 34882 - DNA, 201 bp, Homo sapiens
gattttaataactgtcaagcataattagagtggctaattctcatgggctaatgtgatgggaagaaattttgtataaatgcagtcatgcgcatatatgtgtrtgtgtgtgtgtgtgtgtgtgtgtgtatacataccttttctatgtttagatacacaaatacttgacatggtattacaattgcctgtagtattctgtaaagt

SEQ ID NO: 34883 - DNA, 201 bp, Homo sapiens
tcacaaggtcaggagatcaagaccatcctggctaacacggtgaaaccatgtttctactaaaaatacaaaaaaaaaaaattagccgggtgtggtggtgggcscctgtagtcctagctactcgagaggctgaggcaggagaatggcatgaacccgggagatggagcttgcagtgagccgagattgcgccactgcactccagcc

SEQ ID NO: 34884 - DNA, 201 bp, Homo sapiens
tggaagaccttcagagagaagaaagctccattccgaaaacctgtggtaagacagctgtagtaccccagccttctgccccataaaacgtagttgaaagtagwcaggtatgggatttccttcatcccttctacttagtcccttagtagaatcaaagatgctgaagtgggtaggtggaaatgggggtggttaggttttgattga

SEQ ID NO: 34885 - DNA, 201 bp, Homo sapiens
tttgggaggccgaggcaggcggatcacaaggtcaggagatcaagaccatcctggctaacacggtgaaaccatgtttctactaaaaatacaaaaaaaaaaaattagccgggtgtggtggtgggcgcctgtagtcctagctactcgagaggctgaggcaggagaatggcatgaacccgggagatggagcttgcagtgagccga

SEQ ID NO: 34886 - DNA, 201 bp, Homo sapiens
taaagttgaaaataaacatgtgggccaggcacggtggctcaggcctgtaatctcagcactttgggaggccgaggcaggcggatcacaaggtcaggagatcragaccatcctggctaacacggtgaaaccatgtttctactaaaaatacaaaaaaaaaaaattagccgggtgtggtggtgggcgcctgtagtcctagctact

SEQ ID NO: 34887 - DNA, 201 bp, Homo sapiens
ttcatgagaaaacccactaaaagaatgctttttcctggtagccttccattgtgatcataaagtttggaagtaaagttgaaaataaacatgtgggccaggcrcggtggctcaggcctgtaatctcagcactttgggaggccgaggcaggcggatcacaaggtcaggagatcaagaccatcctggctaacacggtgaaaccat

SEQ ID NO: 34888 - DNA, 201 bp, Homo sapiens
tcttcatgagaaaacccactaaaagaatgctttttcctggtagccttccattgtgatcataaagtttggaagtaaagttgaaaataaacatgtgggccagrcacggtggctcaggcctgtaatctcagcactttgggaggccgaggcaggcggatcacaaggtcaggagatcaagaccatcctggctaacacggtgaaacc

SEQ ID NO: 34889 - DNA, 201 bp, Homo sapiens
aaaagctctggggttcattagtgtagggactagggctggtaattttcttgtgtagtcagtttcctcaagtgttctcttcaaatttaaagatttcagggtaygagaaatttagggaaaatataaaaacgtattcttaagccagacaaagattaattttagattttgtagtatttggtagtatctcaggttttgtccctccaa

SEQ ID NO: 34890 - DNA, 201 bp, Homo sapiens
ccaccacccctcccaccagtttgaaatacagaacattcttccactttgaatcactgggtgagcatgcctgaggttgaaatgcagtccctcctctcagggcrgggcctccaggttgtgtttgctctgacctggaggttgcaggggtagcagacacatgaactctggctctgatggtcttattgctgcaaactccacctgcct

SEQ ID NO: 34891 - DNA, 201 bp, Homo sapiens
agtggcccgatctcggtcactgcaagctctgcctcccgggttcactccattttcctgcctcagcttcccgagtagctgggtctacaggcgcccgccaccamgcctggctaattttttgtatttttggtagaggcagggtttcaccgcgttagccaggatggtctcgatctccatctcgtgatctgcccgtctcggcctccc

SEQ ID NO: 34892 - DNA, 201 bp, Homo sapiens
aagaaagatggaatagaaggctggtttttgttactacgattagatccaatctgcatttccatgggaacaatcagattattttcttgctaaaatctagccarggtcatctgggcattaaggctgtgggggtattgaagggcagtgcaggagaagagagacgcttattaagcataagctttggccatcttgaagtcacaaagt

SEQ ID NO: 34893 - DNA, 201 bp, Homo sapiens
aaaagaaaatccttatatatacatattttctcctatctctgcttgcagtatatgattcctggttagaaaagaaacttaacaaatctaagtgaaagagtgcmtgggagttttaggttacaatgacagaatcttttcctaaccctctctctccattcactttttttaaagcaggggcatctttattgatcaacatgtttgtcg

SEQ ID NO: 34894 - DNA, 201 bp, Homo sapiens
cgtagtaggtatgggccaggtgcggtggctcatgcactttgggggcccagcactttgggaggccgaggcgggcggatcacgaggtcaggagatcgagaccrtcctggctaacacggtgtaaccccatctctactaaaaatacaaaaaattagctgggcgtggtggcaggcgcctgtagtcccagctactcaggaggctgag

SEQ ID NO: 34895 - DNA, 201 bp, Homo sapiens
gagtttaatgaactcccatgtaactattactcactttcagtagataccaacattttgcaaaactattttcatcggtccgcaactctttggcctatacatayatatacttacatatatttttatttcctggagttttaattctagaaatcatattttcaatatttatttataacagttaaggacatttttctttacataacc

SEQ ID NO: 34896 - DNA, 201 bp, Homo sapiens
gtcaagtcctgcagtcaaccctgcagaacactcagatatgaaaagtcagccttttgtatacttgggttttgcattcctcaagtaccatatttttgatgtgygtttggttgcgggtatagaatccacaatatgaagggccgactgtattcattgaaaaaaatacgaatataaatcgacctgtgcagttcaagcctgtgttgt

SEQ ID NO: 34897 - DNA, 201 bp, Homo sapiens
cttccttaaagatgaggttaaggtaagtgcctgagtttgtttcaccctcgaatgtagaggactttccatagctatagagggaattttttttttttttttttgagatggagtttcattcttgttgcccaggttggagtgcgatagtgcaatctcggttcactgcaacctccgcctcctaggttcaagtgattctcctgcctc

SEQ ID NO: 34898 - DNA, 201 bp, Homo sapiens
ggttgatcatgctgttctagctttttatatccttattgatttcctcactacttgctctatcaatgactgggaaagtgttgaagtctcccagtatttgtctrtttctcctttgattctaccagtgtttgcttaatgtattttgaagctctgttataggtgcatacatgtttatgagtatgttatagatgtattcattttgat

SEQ ID NO: 34899 - DNA, 201 bp, Homo sapiens
tgcccagaagagacttgattggagagtgacgagactggaatatgggatcaacaccggttgagtggagttagtgaggggaaaaaggagatgggtttgagatrtgtgtaggagatggagatgtcagggctcactgatggattggatggcttcacattccattttgcactggaccagccacgtcttaggtatctatctttagtc

SEQ ID NO: 34900 - DNA, 201 bp, Homo sapiens
tcttaaaaggttccacaaaagtattaatgaatgtgtgtatgcatgcagagaaacaggaagcaaaaaaatgtcaaaatgttagtaattggtaaatcaaagtraagggtatatgtgtgttcattgaactcttacaacttttatgtaggtttcaacgtttcaaagtattttttaaaagttaccttttcaaatgaagtttgtggt

SEQ ID NO: 34901 - DNA, 201 bp, Homo sapiens
ggaaatcagaatgcattcttccattgaaacagtattgtaaacaattggatgttattgaatacctcaggtacactataggcatttgcaaaatgacctagaawccaaattataatgccacatctgtgagagaacttttttaaaaagtaccacttattgagtacttacagattaaaaaaacaaagtgtagaggttaggtaactt

SEQ ID NO: 34902 - DNA, 201 bp, Homo sapiens
ttcttcaccccctgaatcatttcatttaaataaatatggtcatttatcactattaagctatttatttttctcttagagattaatgattcatcaagggatasttgtacttgtctcgtgggaatcacttcatcatgcgaaatctgaaattatttcggaccctggagttcagggatattcaaggtccagggaatcctcagtgct

SEQ ID NO: 34903 - DNA, 201 bp, Homo sapiens
agctcagattcggaagtggttggacaagtaagtgccattgtactgtttgcgactagttagcttgtgatttatgtgtgaagacaataagtattttattacartttcgagaacttaaaattatgaaaagccctcattacctatatcatcaatcagattcttagaggctcttttttttttttttaacttttttactttaatgca

SEQ ID NO: 34904 - DNA, 201 bp, Homo sapiens
agaatctagaacttctgggtgctgtgctttgaggctcctgggatggaaatcagaatgcattcttccattgaaacagtattgtaaacaattggatgttattkaatacctcaggtacactataggcatttgcaaaatgacctagaaaccaaattataatgccacatctgtgagagaacttttttaaaaagtaccacttattga

SEQ ID NO: 34905 - DNA, 201 bp, Homo sapiens
acaagaaaataaacatatatttctgaccttattgattcttgatattttatctgcatggaaagctattttttggcagttattattgttcttattttagagaygaggctgagcaggaagggtcctttgaaaaagaaaagattgcccttgaacccctctggcaagtgggatgaagtctgcttcccagcctctaacggccttctt

SEQ ID NO: 34906 - DNA, 201 bp, Homo sapiens
tacataaaagcaaattatagtttggtgttgccataggtctagtgtttctcaaaatttttaagtctgcagttgatatcattatcattatgatatttaattgscttgggtttttgttttttttttttttaatcctatactggtttgtacgagccattccttttcccttactgacttgaagagtcagttatttaagaataacat

SEQ ID NO: 34907 - DNA, 201 bp, Homo sapiens
cttttactcttttccctttcctcagggagtggtttgctcatttagaaaaggccaagatatatcactgtagagtttcgtttcttttcttttcctccaccccmcatctttaccttgttctgggagaaaggagaattagaagtctgagttgcagctggagaaactggcaaattaaaatcacattgggaaagagaattactgtgt

SEQ ID NO: 34908 - DNA, 201 bp, Homo sapiens
tggactcccctaggcctagaggtgacaatagccaattatggacagaacccatgacatttccccatcccacactgtttttagacttgttcctgagaaaaacrttgaaagttatttttttgtgaattgccattattgtttagatatactgtgatgttcagatggcttatcttacaaattgaatatccctaggtctaatcctct

SEQ ID NO: 34909 - DNA, 201 bp, Homo sapiens
agaactcctcatttggaaaagagatacaagtaggttcttaattatcttgggcttctgggaacagaatcagccagcatgcagtcctaaattcagccatctgrtaacagttctatgcctgttgctgagtggaacaagaaataaagacaacacccaggccctgactttcggatctgattggagaagccagtcatgtagtttgtc

SEQ ID NO: 34910 - DNA, 201 bp, Homo sapiens
tctttagtatgatcagtttcatgcttctagcggtgggagacctggtgcaggaaaatccagcatgaccattgtatgtgtaatttttaaaaatatttatgtgrcatatgcttgttcataaaggcacaccacagttccagtttcagtctaaactgtctacatttacatatacatcaaaagattcttctgaagcatcattactgg

SEQ ID NO: 34911 - DNA, 201 bp, Homo sapiens; identical to SEQ ID NO: 4500

SEQ ID NO: 34912 - DNA, 201 bp, Homo sapiens
taaggctgtatctatctttgtttcttcttttttttttttcttattccctgaagtctgaattcaactcgaatagtagattttacgcttcttcacagatttcrttgttccaaggccgcatatattttgcattcctaactcttaaaaggctgtggttttaaggcagggtatatatgaagccattgtacagagcagaaaatggtg

SEQ ID NO: 34913 - DNA, 201 bp, Homo sapiens
cagatagaagcctgggggtttgcaccaggatagtcactaccatttgtacgcagcagcaattgaggtactgtagcacttggatgtgagcagacaggaaatgrtcatatggacccataatttataggaattgcaaacagccctgcttcatcagaatcagaatcaatggcaggaggaaagtattgggtcctggattaggtgatg

SEQ ID NO: 34914 - DNA, 201 bp, Homo sapiens
gatacagatgatacagatgtttgtgtaacacaaaaggatttttacgtttcttcatttggttataaggctgtatctatctttgtttcttcttttttttttttcttattccctgaagtctgaattcaactcgaatagtagattttacgcttcttcacagatttcattgttccaaggccgcatatattttgcattcctaactct

SEQ ID NO: 34915 - DNA, 201 bp, Homo sapiens
tgtaatgtgaggtggtatattaattcatattctgtgtaatattctacataatactgattttatagtcatgtattctatatagagaacttaatcagatctgygttattaccaaatccacacataggaaagtgctttaaggattttgaaagtattaattcccttggtttagtgtggcttggttgcaggcccaggtttaaagct

SEQ ID NO: 34916 - DNA, 201 bp, Homo sapiens
gtggccctggaggagacgtttcttcccgtcatgctgcagaatgagaacatttccatgttttcgtcattgtctgctgctgcctttaccacctctgtggctcmtccctattcaccttgttcacatcttaactcatctgtgccctgttgtgaagcttacacaatatgtaaacaaaactctaccctgttggacaaatggaacact

SEQ ID NO: 34917 - DNA, 201 bp, Homo sapiens
aaggattttgaaagtattaattcccttggtttagtgtggcttggttgcaggcccaggtttaaagctagaggtctgacctcttggcctttttgccttagtcyctggcacctgaaactccaggtactgagatggactcccctaggcctagaggtgacaatagccaattatggacagaacccatgacatttccccatcccacac

SEQ ID NO: 34918 - DNA, 201 bp, Homo sapiens
tgtacctgggaggcagaggttgcggtgagccaagattgtgccactgcactccagcctgggccataaagcaagactccgtctcaaaaaaaaaaaaaaaaaaattgggtgagagggaggaattgaggaggataccaagggttgggcctgaacaaatggaagcataattatatgtagaaatttctatgagctactcttctagaa

SEQ ID NO: 34919 - DNA, 201 bp, Homo sapiens
gtctccttacaagggttgagatgggcaggtaatagcatatataaaacagctatcatagcatcagcacagtgtaggcactcaaatggtagttgctgcttttrttttagtagacaaataatttttgaaactttttaaagcgtagtttttatttcaaaacaactttattgtgagtaaaatatgcatagtgggtctaatttaaca

SEQ ID NO: 34920 - DNA, 201 bp, Homo sapiens
ctggcacctctgctcttaaccattccatttagtacaatcataaacctttacttgcagttcatggtgggaaatatcaaacttgtcatatacagcttgttttyttttcgtatttgaaagatagatgcttttactttccaaacattttgtagcattgtttcctggttactgagctcttccagtctatttatcttcatttaatgg

SEQ ID NO: 34921 - DNA, 201 bp, Homo sapiens
gtgaaagttatacatgatacataagcacatctatgttccagtaaacgtttgtttgtaaaagcagatgtaggctgtagttttgcaaatccctgctgtaaccscatcatttcttgtcttccattggaaaagttctctttcttcattccttggtccttaatctttctgtggaaacttgcagatagaagcctgggggtttgcacc

SEQ ID NO: 34922 - DNA, 201 bp, Homo sapiens
tccggaggctgaggcaggagaatcgcttgaacccgggaggcagatgttgcggtgagccgagatcgcgccattgcaccccagcctgggcaataagagcgaaactccgtctcaaaaaacaaaaaaacctgcatgatatgttagaggttcaagtaatttctagcagttcttgaatataattgtcaccaaaacttactaaaatca

SEQ ID NO: 34923 - DNA, 201 bp, Homo sapiens
agctcaggagaggccagagctatggactgagagtagtgggtatgtaggaaattctgacagttttgggaacagatggactgtctcagggagcagatgctgtrcaggaagagtctagaatccagggtggaactctggggcatccagctttgaggacagtcagagagagagtaacagcacacagtatactttgggatgggaaag

SEQ ID NO: 34924 - DNA, 201 bp, Homo sapiens
ctcattttaatattagaacttaatagataaaggaacttatttaccagggtcaatcactaagactttttgaagaagggatattgttctttcccccccccccctttgtaattccccagtgtgttagtaagggatattttttctagttaagaaaaacaaaaacaaaaacatgcactttgaggaaaatgtggaaaacaaaagttt

SEQ ID NO: 34925 - DNA, 201 bp, Homo sapiens
taagatttctacctcattttaatattagaacttaatagataaaggaacttatttaccagggtcaatcactaagactttttgaagaagggatattgttctttcccccccccccctttgtaattccccagtgtgttagtaagggatattttttctagttaagaaaaacaaaaacaaaaacatgcactttgaggaaaatgtgga

SEQ ID NO: 34926 - DNA, 201 bp, Homo sapiens
taaggactgttgcaacctagccctccgcctacctttggggcctccgtttagagtactcatcttactgcgagcaacaccctagagctcgcactgcaatcgcyggccccagaatgcgccctgaagtatttcaggccaccaggtctttgcaaatgccattccctggggctagacggaacacagaagtccagtgccttctgacgt

SEQ ID NO: 34927 - DNA, 201 bp, Homo sapiens
ctcccaaagtgctgggattacaggcgtgagccaccgtgcccggcctcagtagaacccttttaactgcaatgttaagaaactcattattcattcaacacaayagttcttaaccctggccacacctttagaaaaaaaatgatattcaggcttcatctcaagagttcagttcagtgtgttggaatggagattatacgtaagtat

SEQ ID NO: 34928 - DNA, 201 bp, Homo sapiens
tttgttacatgaaaacaaaatcatttttgtttgtgtttctctaaggtcaacagaccctgattatgatgacaaaagattttgagccaatcctggagcagcaratccatcaggatgattttggtgaaagtaagtatagctttgtgcaatattttgtgacctacgtttcttcccatttttgaccatttccttgtgcactaatag

SEQ ID NO: 34929 - DNA, 201 bp, Homo sapiens
cgcgtgcgcaattcggagccgactctgggtgcggactgtgggagctgactctgggtagccggctgcgcgtggctggggaggcgaggccggacgcacctctstttgggggtcctcaggtaagcgatccatccagggtaggggcacgggagtggacctctccgccggcggtgtccgggtgaaggagacccggagcctcctctg

SEQ ID NO: 34930 - DNA, 201 bp, Homo sapiens
cttgttttaatttttaaatataaatttttaatttttatgagtacatagtaggtacatatatttatgggctacatgagatgttctgatacaggcatgcagtrcaaaataaccacatcatggagaataggatatccatcccatcaagcgtttatcctttgtgttacaaacaatccaattacagtcttttagttattttaaaat

SEQ ID NO: 34931 - DNA, 201 bp, Homo sapiens
caaagtccctcgatttagtttacatttactttagcttatactttgtaaaaaatactcttctaaatgctttgtctgttttagcttacttatttctcataatmcctctgtaaagtatatgccatttgcaccatcattttacagatgagacaactaagacatggagcagttagataacttgcctgagatcatgcaggtggagcc

SEQ ID NO: 34932 - DNA, 201 bp, Homo sapiens
ttgagtggagttagtgaggggaaaaaggagatgggtttgagatatgtgtaggagatggagatgtcagggctcactgatggattggatggcttcacattccrttttgcactggaccagccacgtcttaggtatctatctttagtcctgattacaggaacttaggtgtgaaatcatagggtggtagaactatgtgatagaaaa

SEQ ID NO: 34933 - DNA, 201 bp, Homo sapiens
tgaccaaggtgatggcttaaagctattgatttgagatgattccttactttatagtttaagcatataatgccataattttcctcaagcaccgttttagttaygttatacaaattttgaaatgttttgttttcatttcctaatttcccttgtgatttctttattgaaccttggcttatttagaagtatgtttaacttgcagat

SEQ ID NO: 34934 - DNA, 201 bp, Homo sapiens
ggggtgttgaaggcttcaaacagcatttcagcatatttctctctgttggtgtgtgggctcagtggcgggtctgaaaccaagaccgcatgctcctccggggsgatcttcatctcttgtcggaagagatattcccagatatcctgcactgtatcccagtccacgatgatgccatgtcgcagagggttaaccagcttgagatga

SEQ ID NO: 34935 - DNA, 201 bp, Homo sapiens
aaaaaggagatgggtttgagatatgtgtaggagatggagatgtcagggctcactgatggattggatggcttcacattccattttgcactggaccagccacrtcttaggtatctatctttagtcctgattacaggaacttaggtgtgaaatcatagggtggtagaactatgtgatagaaaaggtaggtttaactgatttgag

SEQ ID NO: 34936 - DNA, 201 bp, Homo sapiens
tactagttgcccacgctggtctgaaactcctggcctcaagtgatccctccacctctgcctcccaaagtgctgggattccatgtgtaagccactgtgcctgrccaaggtgatggcttaaagctattgatttgagatgattccttactttatagtttaagcatataatgccataattttcctcaagcaccgttttagttatgt

SEQ ID NO: 34937 - DNA, 201 bp, Homo sapiens
ctcttgctcaggctggagtgcagtggcacgatcatggttcactgcagtctcaaactcctacattcaagctgtcctcccccctcagcctccagagtagttgrgattacaggtgcatgccaccatgcctggctaatttttaattttttttgtagagatggggtgttactagttgcccacgctggtctgaaactcctggcctca

SEQ ID NO: 34938 - DNA, 201 bp, Homo sapiens
gacgtgaaagaagatttagattaagcgtaaaagtaagaatatttttatagcttttaaaatgtataagtgtgtggttttaagtattaaataatacttgaaartgttagaaaataagatgagaaaaaaatctcatagttctaccacttcgtaataatcactattcaaattttcttgtcttctaggtttttcatgtatatatct

SEQ ID NO: 34939 - DNA, 201 bp, Homo sapiens
cagagggccaacattttgtgtatccaggctccatggggtcaaatgtaggactggggtatgcttggattttggtatccttggggtgtcctggaaccaattcyccatagatactgggggacaactgtagtttgattttatatattatataatatgcagttaatatataatacacatttaaaaattatgtagctttgggtttat

SEQ ID NO: 34940 - DNA, 201 bp, Homo sapiens
gtatatgatgagtttttattgttgacaacccattcccatacctgccagtgtttttgcctgagggatgcttcatttaaaagtaagttttcaatgtataaaayagaaatggtcccttctccaatgtcttttggagtcttgatgactttttgaattcttcatttattttggctttttatcaaggagtcctaggctggagaaaat

SEQ ID NO: 34941 - DNA, 201 bp, Homo sapiens
ttgttgtcttcttcctgttcccttgtcaggattatgaagaagctgtgctcttgctgttagaaggagctgcctgggaagaagctttgaggctggtaagaatyttgtaaatcctctggatgttgggtgctaagcagagagagcaagcaagggattccaggtcagttggaatctcttgtcttctgaggttcatgaaataagtag

SEQ ID NO: 34942 - DNA, 201 bp, Homo sapiens
cctcccttctaaaccccccagtcagcaagaaaggtcttctcaattgtatcttagtgatcatgaaagttaaaggaactgtgcataattgttaagtccagagrtagtgtttgccccagaggtcttatcttgctggcttgacttggaaatctaaatttagtacatctctaagtttggtgaggtagaatatgaaggtgctctact

SEQ ID NO: 34943 - DNA, 201 bp, Homo sapiens
gcgtacgtatcacattgattcagcacattgactatatcctgggcatatagggaaagtggaagcaaatagattggttttctactgggacggtgtagtgggartggggagaatattcttcagcgctgtgtggaagttgttcagacactttcccagcatatctgagacattaaacttggcattggaaggttttcttcctcagcc

SEQ ID NO: 34944 - DNA, 201 bp, Homo sapiens
acggcctctcactttcctttcagaactcagggatgggatcaggctttaaagggaccccaggtaattgcttttccttttgttttatgaaaaatttgacttgkcacttctatgttgttatgatggactttgcgggttgtgtttaaggctgaatcagctttgtatcgcagaattctagtatattgtcatctgtttattatttat

SEQ ID NO: 34945 - DNA, 201 bp, Homo sapiens
  misc_feature (1)...(201): n = A,T,C or G, or insertion/deletion polymorphism (see Tables 1-2)
ggttggagtggggagagatgggggaagatggggtcagagacggcctctcactttcctttcagaactcagggatgggatcaggctttaaagggaccccaggnaattgcttttccttttgttttatgaaaaatttgacttgtcacttctatgttgttatgatggactttgcgggttgtgtttaaggctgaatcagctttgtat

SEQ ID NO: 34946 - DNA, 201 bp, Homo sapiens
tccatccttggaggcctagtgccgtcggagagagagcgggagccgcggacagagacgcgtgcgcaattcggagccgactctgggtgcggactgtgggagckgactctgggtagccggctgcgcgtggctggggaggcgaggccggacgcacctctgtttgggggtcctcaggtaagcgatccatccagggtaggggcacgg

SEQ ID NO: 34947 - DNA, 201 bp, Homo sapiens
ttcatttcatctaaattgtcagatttattggtatgaagtgtttatagtattctcttattttactgtccgtagggtctatggtgatgtcctgtctttcattstagatattgatgtgtcttcttttttctgattattctggccagaggtttatcaattttattgatcttattaaagaatgaactgtttcattgtttttctcta

SEQ ID NO: 34948 - DNA, 201 bp, Homo sapiens
acaccttttaagaaggtaaatgaatgtggtacctgatttttttattctgtaatttcagagtagaaatccagtgatagcagcttggcattggggctgtaatstgattataactggtttgtatcataatgaaaatatgctgggcccatggagctcagtttttgtgaatatcttttctattctttctctgtcttctcacagact

SEQ ID NO: 34949 - DNA, 201 bp, Homo sapiens
ttggctgggcttagctggggcctctggctcagggtcctttacaaggctgcaattaaggtattggccagggctagagtcatctcaaggcttgactagttttwaatttcattttctaatgttttattactagtatatagaaatatagctgaagtgttttgcagggaggctgtataattgaccttgtatcctgcaaccttgcta

SEQ ID NO: 34950 - DNA, 201 bp, Homo sapiens
acctctgtttgggggtcctcaggtaagcgatccatccagggtaggggcacgggagtggacctctccgccggcggtgtccgggtgaaggagacccggagcckcctctgcctgctgcgggccggggactggagtgcgggctgcaccacctctttcctagagccttaaattctttttgcagccttgccacctgctccatcgggg

SEQ ID NO: 34951 - DNA, 201 bp, Homo sapiens
atttctcttcttccaaatttctttccccacatggtctttctttatatcttattgaatttatatcctcccaaataaacatcttttgcttcatatatatgccrtgttagacatagcttaaatcgtaatccttctttaactctgctgctattttaacctaagtcagtagaactctgaccttactttttgagtgtgtgccgtact

SEQ ID NO: 34952 - DNA, 201 bp, Homo sapiens
gtaagcgatccatccagggtaggggcacgggagtggacctctccgccggcggtgtccgggtgaaggagacccggagcctcctctgcctgctgcgggccggsgactggagtgcgggctgcaccacctctttcctagagccttaaattctttttgcagccttgccacctgctccatcgggggcgctgggaggcgcgacagccc

SEQ ID NO: 34953 - DNA, 201 bp, Homo sapiens
tcattttgcattcccctcagtgatatgtgagagtgcttcagtgactcctatactcaccaacactgggtgtattactgtgacactagatgtattatctattrctacgtaacaacttaccttaaaagctggcagcttaaaacaacagaccctattatcccactttttcaatgggccaagaatcttggctgggcttagctgggg

SEQ ID NO: 34954 - DNA, 201 bp, Homo sapiens
ctagtgcaggtctttatggggacaggagtaggaatgccacatcccgtggtaagtggatgtttaactttttaggaagctgcagaactaatctgcagtggccrtatcattttgcattcccctcagtgatatgtgagagtgcttcagtgactcctatactcaccaacactgggtgtattactgtgacactagatgtattatcta

SEQ ID NO: 34955 - DNA, 201 bp, Homo sapiens
ttctactgcaaatagtatcatggcatcttatcagcaacagaagacttcggttcctgttcttggttagtattttttctcatttaatattacaatactaagcrgaaggactatctttctgtaagtattgagaagatcagcagtataaggagagattggatacaatttttcactacaaaaaattgactacaattcttcctcaat

SEQ ID NO: 34956 - DNA, 201 bp, Homo sapiens
ttctttttctggttattagcctttcccaaatccctccgtttccatgctggcctctttttacaaatgtcgagaattccttatttcaggccttttagttattygttcggtctccattgttcctttctgctttagaaatttatgatattggttgtttataccttctatctctgttcttggatctcttctattctttacagctct

SEQ ID NO: 34957 - DNA, 201 bp, Homo sapiens
ctctgatgtgggaccctgtgaccccataccggctgcatgttctctgtcagggctggcattacctcgcctatgattggcactggacgactgaccggagcgtrggagataattcaagtgacttgtccaatgtggctgtcattgatggaagtaagctcctgggaagtgtgtccatgagcctgcaaggggtcctgagcctagggc

SEQ ID NO: 34958 - DNA, 201 bp, Homo sapiens
gcaagccctctgtgtggcagcccagcttaactttaccaaagaccagctggtgggcctcggcagaactctggcaggtaagtacaatcatttatatgtttacrtctacaaaggttttaaaaaatttatttcttttgtttggtaattttgcaaataaatttagggcagaatactctgagacagtcttgttctcactgataaaaa

SEQ ID NO: 34959 - DNA, 201 bp, Homo sapiens
gtccagagatagtgtttgccccagaggtcttatcttgctggcttgacttggaaatctaaatttagtacatctctaagtttggtgaggtagaatatgaaggkgctctactttaacataccactggtttgaccttggtagaaagtacttaattacatctcaaggtagctgtgctttttaaaattgagtttgccaaagtagaaa

SEQ ID NO: 34960 - DNA, 201 bp, Homo sapiens
tatttatttttgagacaaggtcgggctctatcacccgggctggagtgcagtggcaccatcttggctcactgcaacctacgcctcctaggctcaagcaatcycacctcagcttacaggcgtgcaccaccatgcctggctaagttttgaattttttttgttgagacggggtttcgccatgttgcccaggctggtctcaaactt

SEQ ID NO: 34961 - DNA, 201 bp, Homo sapiens
caactgctgcttattgtctctacaggaaagctggttgagcagaggaagcacattgatgcggccatggttttggaagagtgtgcccaggtaaactcaattcytcccttctaaaccccccagtcagcaagaaaggtcttctcaattgtatcttagtgatcatgaaagttaaaggaactgtgcataattgttaagtccagagat

SEQ ID NO: 34962 - DNA, 201 bp, Homo sapiens
ttgtaaaggaagattaatgcataaaattattttgtgtaatttacatacaataaaattatgtgttgtacagttgtataatttacatataataaagctaattyaccaattttagatgaagaattcagtacatttggacatatgtttgtagctgtgtaaccaccattgcactcatgatctagaacatttctaacacccccaaaa

SEQ ID NO: 34963 - DNA, 201 bp, Homo sapiens
atttacatataataaagctaattcaccaattttagatgaagaattcagtacatttggacatatgtttgtagctgtgtaaccaccattgcactcatgatctrgaacatttctaacacccccaaaagttccctacttccccttttgcagtcagccttctccctccactgccagcctttggcaaactgatcagtcagtaaagtt

SEQ ID NO: 34964 - DNA, 201 bp, Homo sapiens
aacactctgagtttgctttaagaccctcaggcagtttgattgcatctacacaagataaacccaaccagcaggatattgtgttttttgagaaaaatggactycttcatggacactttacacttcccttccttaaagatgaggttaaggtaagtgcctgagtttgtttcaccctcgaatgtagaggactttccatagctatag

SEQ ID NO: 34965 - DNA, 201 bp, Homo sapiens
ggtaggctgtcaggtcagagcccgcgtagtccagccttccggtgatgctgggcaaaggataaccctcgtagatggggaccacgtaggacacgccatggccyacctccaccaccaggccggaggtccttccataggagtacatggacaggcgcgactggtaggcgatgtgcattgcaggggtgttgaaggcttcaaacagca

SEQ ID NO: 34966 - DNA, 201 bp, Homo sapiens
tcttaaaacataagatgccatagttaaattatcttagatttatgtgtaagctgtcagtaagatttgatatttgcctgtagagtgactagtataccttggcwtaggttaaatggactgtcattttcctttctggatgaagtagctgtcatggagaaaatgggaaagtcacatgattgctcctggccttcaatgaggttggag

SEQ ID NO: 34967 - DNA, 201 bp, Homo sapiens
gtcatgtctgcacacattcctgaagcagcccttcttagctggtaactgagaagccttcctccatttggcatccccctaactgaactgggagagatgcttargccaggataaagaattgtgggacactgctttctgcgtaggccccccagcgtgcttgattttctttttgtagtacatgtgtttaattattccagcatttgg

SEQ ID NO: 34968 - DNA, 201 bp, Homo sapiens
gtggggagaatattcttcagcgctgtgtggaagttgttcagacactttcccagcatatctgagacattaaacttggcattggaaggttttcttcctcagcyttgtggcttgtgtgttttcccattccccacgaggcagttcctcccctgaatgctcagtttatattaacatctgattttattttttgaacaaatgttgtga

SEQ ID NO: 34969 - DNA, 201 bp, Homo sapiens
gactctagttagttcatttaccgccctgaaagtaaacccacacattagcaggcagtgttttcatcggcttctggttcttcttttctagatgatgaggtacyccacgggcaagagtcagacctcttctctgaaactagcagtgtcgtgagtggcagtgagatgagtggcaaatactcccatagtaactccaggatatcagcg

SEQ ID NO: 34970 - DNA, 201 bp, Homo sapiens
tagggagtggttgattttaagttctgcatttttatgcacatctaccctgtaagtaacgtctggcctttctgacatttacatgtatgcacattcttaccttstctgcacccccttcctccatcctaattaaaacgttgctggggtactttttatgtcattcactttaggtacctctaactgggtactgaaaacatcattcct

SEQ ID NO: 34971 - DNA, 201 bp, Homo sapiens
aaactgaattttgctttaggaatttaaaatggagatctgtgaagttgtgtggggtcatcagcaactgcaagaaagtagccaggcaaggtagcacatgcctrtagtcctagctactcaggaggcttaaaaatatctgtgtaatttctaacaggagatcatccaagaatcgccgaaaagcggagcggaagaagcacagcctca

SEQ ID NO: 34972 - DNA, 201 bp, Homo sapiens
ccaggtcagttggaatctcttgtcttctgaggttcatgaaataagtagaaataggtcaggttcctggcttaaggaaaagcggtgtttttaaaatcattttyatcattcttgataataatttgaaatattactgtcttttactgaaatgaattgaatttccttggctgccttgtaggaggcctgtttttcaggaaaatattc

SEQ ID NO: 34973 - DNA, 201 bp, Homo sapiens
tgttggaatagccaggaatgaggtggggaaaataaaaggccaaatgtcgaagcattctgaaagcaaaggcagtttagctgcgtcagggacaagggttgccygaaccagaggcgaggctggtaccaggggctctagtaccagagtggaggaaagggtaaggacacctatgaaaagagatgagcagaagctctggtcatctca

SEQ ID NO: 34974 - DNA, 201 bp, Homo sapiens
ggaagcaagccctctgtgtggcagcccagcttaactttaccaaagaccagctggtgggcctcggcagaactctggcaggtaagtacaatcatttatatgtytacatctacaaaggttttaaaaaatttatttcttttgtttggtaattttgcaaataaatttagggcagaatactctgagacagtcttgttctcactgata

SEQ ID NO: 34975 - DNA, 201 bp, Homo sapiens
ttctagtgcaggtctttatggggacaggagtaggaatgccacatcccgtggtaagtggatgtttaactttttaggaagctgcagaactaatctgcagtggycgtatcattttgcattcccctcagtgatatgtgagagtgcttcagtgactcctatactcaccaacactgggtgtattactgtgacactagatgtattatc

SEQ ID NO: 34976 - DNA, 201 bp, Homo sapiens
ttgcttatggggagcacctgatgcaggagcacatgtatgagccagcggggctcatgtttgcccgttgcggtgcccacgagaaagctctctcagcctttctsacatgtggcaactggaagcaagccctctgtgtggcagcccagcttaactttaccaaagaccagctggtgggcctcggcagaactctggcaggtaagtaca

SEQ ID NO: 34977 - DNA, 201 bp, Homo sapiens
tgcccttgttttctgttctcttccacactctctctgctctagtcacactggccgtcctgttactcctcagacctgctatacacattcctgctgcatggccrtggtgccttctgtgccctctgcctggtgccccctatctcatcacgtggtttattctcctgacagccattagagctcacactccctgagagctgcaaggag

SEQ ID NO: 34978 - DNA, 201 bp, Homo sapiens
caggaggcttaaaaatatctgtgtaatttctaacaggagatcatccaagaatcgccgaaaagcggagcggaagaagcacagcctcaaagaaggcagtccgmtggaggacctggccctcctggaggcactgagtgaagtggtgcagaacactgaaaacctgaaaggtatattctcagtcctgatgatgattcctgaccacaa

SEQ ID NO: 34979 - DNA, 201 bp, Homo sapiens
atcatattaacttgttttttacagaattgaagtaagtattttgaataattcatgtgtatcttttccatagttttctctcttcttgttaaggaaatcaagcrtaaatagctagagaagaaaaattccttactgttcatttttaaaaattgctataactcttagatgccagttggttttttgctcttttccgttctttttaaa

SEQ ID NO: 34980 - DNA, 201 bp, Homo sapiens
gttgggtgattgaattgaaaataccagtgaatgaaacatacctaaaagggtagataggttgggttggaaagatataccacatcgagggttaattaaatggrtaagatgtcattatctttttttctttgtaaaggaagattaatgcataaaattattttgtgtaatttacatacaataaaattatgtgttgtacagttgtat

SEQ ID NO: 34981 - DNA, 201 bp, Homo sapiens
aataatgaagatcaagatgtaaacccgctgaaactaggccttctcacttggattgaagaagacgtcttcctggctgtaagccacagtgagttcagcccccrgtctgtcattcaccatttgactgcagcttcttctgagatggatgaagagcatggacagctcaatgtcaggtattgcagtttttccctgtactccacatgt

SEQ ID NO: 34982 - DNA, 201 bp, Homo sapiens
ggctgagcaggaagggtcctttgaaaaagaaaagattgcccttgaacccctctggcaagtgggatgaagtctgcttcccagcctctaacggccttcttttyattttcccttgcagttcagctctggactgttggaaactatcactggtatctcaagcaaagtttatccttcagcacctgtgggaagagcaagattgtgtct

SEQ ID NO: 34983 - DNA, 201 bp, Homo sapiens
ggacctactcccaatagcgcttggttctccaggaaaaatcatgtgggaaagatggagatgacaatgataaggcggagctgcattctcttacataaatgggratgtatgggttgttaacatggatgacctaatgcagcctctgtctttgctccatcccagaatctagaacttctgggtgctgtgctttgaggctcctgggat

SEQ ID NO: 34984 - DNA, 201 bp, Homo sapiens
gtccttgtccagcctacttacctttctcattctggtgttcttcacttattacctcagatactgcctatccatacttacatctcatgtaaagaagacaaccscagaactggaaattgtactgcaaaaagtacacgagcttcaaggtagagatccgctcacagagaaagtgcttaaggtggccgtgactgctactagtcttct

SEQ ID NO: 34985 - DNA, 201 bp, Homo sapiens
tatgatgacaaaagattttgagccaatcctggagcagcagatccatcaggatgattttggtgaaagtaagtatagctttgtgcaatattttgtgacctacrtttcttcccatttttgaccatttccttgtgcactaatagccatgtcattaggccaaagaactgtgaaagttaaacccccagctattaaatgtctattagc

SEQ ID NO: 34986 - DNA, 201 bp, Homo sapiens
agttttatctattcatctaaccgtctgtctctaagtgtataagtgtgtgtgtgtgtgtgtgtgtgtgtatagtattgggtgtgtatatatgtattttgtckacattgtattgaagtaggtagtgcagcatcaaaaggaaattgttgattttcaaaatcagtgaaatgtcactatttttgagaaaaatggtctgtttacact

SEQ ID NO: 34987 - DNA, 201 bp, Homo sapiens
ttgcctgagggatgcttcatttaaaagtaagttttcaatgtataaaacagaaatggtcccttctccaatgtcttttggagtcttgatgactttttgaattmttcatttattttggctttttatcaaggagtcctaggctggagaaaatctttagagttattttacttagaccctaatctcaacataatatctcagttaaat

SEQ ID NO: 34988 - DNA, 201 bp, Homo sapiens
tttttaaagcaggggcatctttattgatcaacatgtttgtcgaagtttcatcataaagtagttcctgtccattaacttcacttactgaatatgtgctatcrcattttgctattccttaaaaattgagctagactttacatatagtgaaatgcagagatttcaggtgtacaatttgatgagttttaataaatgtatacagcc

SEQ ID NO: 34989 - DNA, 201 bp, Homo sapiens
tttacagctagggatgagctcaggtagtgggattatttgatttgagagaggaaatacagctattataaagatttggaagtaaatccataactgaaagccartgacagatcttttttcccttctaggtaaatgacttgctctggaatgcagattcctctgtgcttgcagtctggctggaagaccttcagagagaagaaagct

SEQ ID NO: 34990 - DNA, 201 bp, Homo sapiens
gtgagcctgtggcaggactgggaccagccctggcttggaagtgagtgggagaagaaaccttagagaaattcttggaaccagagtagaggtggtggtacacrtggatacagatgatacagatgtttgtgtaacacaaaaggatttttacgtttcttcatttggttataaggctgtatctatctttgtttcttcttttttttt

SEQ ID NO: 34991 - DNA, 201 bp, Homo sapiens
tgtgcggcctaaaattacatggttatttttaagatgatgggcatatgtgtgagctaatttcttctcttataaaggaaatgtaacaagtggttcatgttccmctccggttctttctcacatggctcttttttctagtggagggtgggcacatggagcacagaaggctcatggcctcctttcctatgttggtacatttgctat

SEQ ID NO: 34992 - DNA, 201 bp, Homo sapiens
cttattctttgtatcgtttattgtaaacctttccttgatagttttctgttagctttattcaaaggagtgttgatacaggctgtgaccataaggctcaaagygaaacttttcttgaaagtcaagataaatatagagaacaacaagattctgctaaaagtgtgctgattttagagagttgtggtaattctctgtgaagagtta

SEQ ID NO: 34993 - DNA, 201 bp, Homo sapiens
tgactcctatactcaccaacactgggtgtattactgtgacactagatgtattatctattgctacgtaacaacttaccttaaaagctggcagcttaaaacarcagaccctattatcccactttttcaatgggccaagaatcttggctgggcttagctggggcctctggctcagggtcctttacaaggctgcaattaaggtat

SEQ ID NO: 34994 - DNA, 201 bp, Homo sapiens
  misc_feature (1)...(201): n = A,T,C or G, or insertion/deletion polymorphism (see Tables 1-2)
atgagcgtgttcatcagcagggctgatagtcttgaggttcagtgggagagctaaggcacatggttgttatttgttctcttctatttcacataatgtgtgcngtttcaattgcagttaatggagagtggcttgttgtgataattaaggcttattagttaatggtgtgtttagcattacaggccggcctgagcagcaatcatg

SEQ ID NO: 34995 - DNA, 201 bp, Homo sapiens
aaggcttattagttaatggtgtgtttagcattacaggccggcctgagcagcaatcatgtgtcccatggggaagttctgcggaaagtggagaggggttcacsgattgtcactgttgtgccccaggacacaaagcttgtattacaggtaagctggtttttcagacaagatagatagtctgattgtcattcagccaagtaccaa

SEQ ID NO: 34996 - DNA, 201 bp, Homo sapiens
gcctccgtgcctggcctgatatttgcttttttttttttttttaatgctctctattgcagagttggcaaactacaacctgtgacaaatccagcatgccaccygtttttgtaaataaagctttattggagcatagccatgctcattagtttacatcttgtgtatggctgctttaacactacagcagcagagttagagttgtga

SEQ ID NO: 34997 - DNA, 201 bp, Homo sapiens
tcccacactgtttttagacttgttcctgagaaaaacattgaaagttatttttttgtgaattgccattattgtttagatatactgtgatgttcagatggctwatcttacaaattgaatatccctaggtctaatcctcttctttctttttcactgcagacagggtgttggtgacagtcttccggcagactgtggttccgcctc

SEQ ID NO: 34998 - DNA, 201 bp, Homo sapiens
aatgccattcctggaccaggcgccaaacactgagcccccagagcagcctgccctcgccttggtgattgcatttgtcaaactgctgattagctggtttgtcrcctccaccaggctgtgggctccttaagggcagggactccatgttgtattcctctctgaatctctggctaacatccagcctggagaatcgaggatttggcc

SEQ ID NO: 34999 - DNA, 201 bp, Homo sapiens
tgcccatgccattaaccaccactctaccatgccaccagcatcaccattttcagtttgtcctcagacaatatacacatctttctttgatcaagcccctgccrgcttctttagcaccagcttctgccactgtccacattcccagttacttgtaggtagttctacagatgtcacatcgtgtgattcctctgtcatttctctacc

SEQ ID NO: 35000 - DNA, 201 bp, Homo sapiens
tttatcttaaaactaattagcctcaatttgaacttcttatctgggagaatggtcctgacctgttctctgattcctcatctggaataccacagcaccttccycgtggggttccctgcttctttcccacccctcctctagcccaaccttactgctgtaagtctgattatcctaacaagtacagatctttcccatatatttcag

SEQ ID NO: 35001 - DNA, 201 bp, Homo sapiens
tggaggagctccctaggtaagaacgtcaagtagatccttttttggttaagaatgagcacctgtgaagttaacttcagtgtctcagaatcaaaattggttgwcagttcttccttctcatgctgtttgcagacatgtcagggaaactctgcttgtctggagagagtgatgaggccacctccccgtgccctgcaagacgcagtt

SEQ ID NO: 35002 - DNA, 201 bp, Homo sapiens
cagacagtcatgatgactaaattacaccttttaagaaggtaaatgaatgtggtacctgatttttttattctgtaatttcagagtagaaatccagtgatagyagcttggcattggggctgtaatctgattataactggtttgtatcataatgaaaatatgctgggcccatggagctcagtttttgtgaatatcttttctatt

SEQ ID NO: 35003 - DNA, 201 bp, Homo sapiens
aagccaatgacagatcttttttcccttctaggtaaatgacttgctctggaatgcagattcctctgtgcttgcagtctggctggaagaccttcagagagaaraaagctccattccgaaaacctgtggtaagacagctgtagtaccccagccttctgccccataaaacgtagttgaaagtagtcaggtatgggatttccttca

SEQ ID NO: 35004 - DNA, 201 bp, Homo sapiens
atgttctctctggattgaaccagggcccctctaagtgagctggggtacagaaaattagtccagcccaataggactagagagaggggactgtcaaggaccarggcaattagaacagagctcaggggagtactgcagtcctgatgggaaacagagtgcagatctgaagctgcagtgcattccaacatgtaggatacattaagt

SEQ ID NO: 35005 - DNA, 201 bp, Homo sapiens
ctgagaagttttggggagtgtcttttctagagtaggtctttctgatagaaatatctattaatgcatcttttccttgtattatttgaccatctgatagatagcacacctatcagggaatggtcttataaggtattttcacccaaagcacaccttaaaaactgatgaattacttatcttgggaattaataaaaataaattgga

SEQ ID NO: 35006 - DNA, 201 bp, Homo sapiens
taaaagtaactaacctaaaacaagatacatttgaagccatacatttctggatttgaatcctgtctctactattaacagctgaattacttaactgctcttamgtctgagtctcctcatctatgaatgggtatgataaaacctgccatcccattttgttctaagaataagaggtcatttatggaagcacagcatggtgaatag

SEQ ID NO: 35007 - DNA, 201 bp, Homo sapiens
actgagaagttttggggagtgtcttttctagagtaggtctttctgatagaaatatctattaatgcatcttttccttgtattatttgaccatctgatagatagcacacctatcagggaatggtcttataaggtattttcacccaaagcacaccttaaaaactgatgaattacttatcttgggaattaataaaaataaattgg

SEQ ID NO: 35008 - DNA, 201 bp, Homo sapiens
cgaatgatctggctggaattctttgaaattacctctactccaggtcacttaagtcatgccaagagatgagtctaaaattttctctaagtcactgcggggcrgggtcggggggactcacataaggtacactggaaaatgtatattccctcaagactctattttgatgaatacagctcaaatttacttaatctaggattcagc

SEQ ID NO: 35009 - DNA, 201 bp, Homo sapiens
tccggtatgctccatatgctctcccttgacctccctactccagtcacactggcattctttcagttcctcctacttgttttgttcctcctgccctagggccyctttgcacatggagtttcttctacctggaacactcattccttcccagaacatctagttaacttcttctgcttcttgagattgtaaatcagtcatcatttc

SEQ ID NO: 35010 - DNA, 201 bp, Homo sapiens
aatgcaccatgaataaggagtcccaggatgttggtgtataggatttgtggagagacgaggtgaaagatgaagaggaaaggtgactcataaattcatgcagytccacaaatgccactctatactttgaattctaattttctgaggtgactatgggaatcatatgcctaccttcttgtcaggggttatcagaaaaaaatagag

SEQ ID NO: 35011 - DNA, 201 bp, Homo sapiens
gactgagaagttttggggagtgtcttttctagagtaggtctttctgatagaaatatctattaatgcatcttttccttgtattatttgaccatctgatagatagcacacctatcagggaatggtcttataaggtattttcacccaaagcacaccttaaaaactgatgaattacttatcttgggaattaataaaaataaattg

SEQ ID NO: 35012 - DNA, 201 bp, Homo sapiens
ctctcaacacacacaaaaggcttctttgggcacattgcagaccttcccccaaggtattctgcagaatagccgccaggcaccaacaacaaagatgtgactcrggcatgagatgatggataagagggaacagagtaacagaggttgtgttcttgagacctgtgtcatcttgaaaaacgccctgaattcagcattgtttatatt

SEQ ID NO: 35013 - DNA, 201 bp, Homo sapiens
gtgactcataaattcatgcagttccacaaatgccactctatactttgaattctaattttctgaggtgactatgggaatcatatgcctaccttcttgtcagkggttatcagaaaaaaatagaggcagattcatgcccagaacaaaccatgagaattagcatgcatgcacacatgcatgtgtcttaatgtctgatgaaactat

SEQ ID NO: 35014 - DNA, 201 bp, Homo sapiens
agactgagaagttttggggagtgtcttttctagagtaggtctttctgatagaaatatctattaatgcatcttttccttgtattatttgaccatctgatagatagcacacctatcagggaatggtcttataaggtattttcacccaaagcacaccttaaaaactgatgaattacttatcttgggaattaataaaaataaatt

SEQ ID NO: 35015 - DNA, 201 bp, Homo sapiens
aaaagccggctgtcagccttcatgcttccttcccattaatgaatcattttcacttttctcctctggtcttaaatataggaatgatccagagaaactagacrccttcatcatggacaaagcccttctggattatgaagtgtcaatagatgctgactgcaaacttctcactgtggggaagccatttgccatagaaggtattaa

SEQ ID NO: 35016 - DNA, 201 bp, Homo sapiens
actatgggaatcatatgcctaccttcttgtcaggggttatcagaaaaaaatagaggcagattcatgcccagaacaaaccatgagaattagcatgcatgcayacatgcatgtgtcttaatgtctgatgaaactattaagttggtgcaaaagtaattgcagtttttgcctttgaaagtaataggtttatgtgatttaattttt

SEQ ID NO: 35017 - DNA, 201 bp, Homo sapiens
tctacatttcaatttaatttcttttaatttgaaatgtgtcttgagtaactgccatggatttatcataatgcaatactttgtgtttcccacttttaaaattktattaaaattactggaaaaagtaacctggagacagccttgactgaaaaaaacttgaatgacattaagtcagagttaccatatctggaatatttgttccat

SEQ ID NO: 35018 - DNA, 201 bp, Homo sapiens
tctgtttcctaccatgtaatagaaactgtacccagagcgtagttctcactatgaccctgtaaggtagacatttttatctttatttagagagatttgcgtgkcttttcctaaaagaaatgaacttgggcctataccagtcaattgagttaattcaaccaaggaaggaaacaaaccagttgcctaacctgtgccaaataacaa

SEQ ID NO: 35019 - DNA, 201 bp, Homo sapiens
tcaaatgtgatttacatttatatctctaatgaaaattagtacgtacttcacactttctgatttttctatgtcccttctgtggcaacataatgtcttatttmttctatttgtatttgtaaattatagagtaatatttgtgacaggcaatgggtgaatatgttttgctaagagcctacacttacatcatctgatttttcaaaa

SEQ ID NO: 35020 - DNA, 201 bp, Homo sapiens
tttcagcatccaaaacaggctataaacttaagcagcagatttttatatgtgaaaaatacaataaatcaaagctcaaaccttttaaaattacaaaaaaaaaacccctcctatgtcaacattgtgccaggtctaaatcctacacgtattacctatttatcatatgtattctgtctccttcaatagaatataagctgcatagat

SEQ ID NO: 35021 - DNA, 201 bp, Homo sapiens; identical to SEQ ID NO: 4635

SEQ ID NO: 35022 - DNA, 201 bp, Homo sapiens
catagaggccaggggcggtggctcacgcctgtaatcccagcactttgggaggccgaggtgggcggatcacgaggtcaagagatcagaccatcctggccaayatggtgaaaccccgtctgcacaaaaaaaaaaaaaaaaaaaaattagctaagcatgctggcaccgcgactgtagtcccagctacgcgggaggctgatgcag

SEQ ID NO: 35023 - DNA, 201 bp, Homo sapiens
catagccccattcttccttcttattgtcacattaccttcttgcatcaattcttttgaatagccttttaatatctagcttctttccaccagaccattctgcwcactgctgctagataaattttcttaaagcaatttttattctttcattcattcaagaaatacttatcaaatataatgccctgagcttcatgccattccctt

SEQ ID NO: 35024 - DNA, 201 bp, Homo sapiens
tatttgtaaattatagagtaatatttgtgacaggcaatgggtgaatatgttttgctaagagcctacacttacatcatctgatttttcaaaatacctactgyattccactctacatttcaatttaatttcttttaatttgaaatgtgtcttgagtaactgccatggatttatcataatgcaatactttgtgtttcccacttt

SEQ ID NO: 35025 - DNA, 201 bp, Homo sapiens
ttaacatttgaagaaattataggcactgtctttttaaataaaaattcgaatttatttttattaagacaaggaagcaaagctgaacactgcttcctatcttwggcctcactgcttttcttactttttgcctttgctcctctttcccaggtttctagccaataccactttcagaggcctcagtggttccatcagagtaaaagg

SEQ ID NO: 35026 - DNA, 201 bp, Homo sapiens
catattttaaacttttaatttaagtttaggggtacatgtgcaggtttgttacataggtaaacttctgtcatgggggtttgttgtatagattatttccttgyccaggtattaagactagtacccatcagttgtttttcctgatcctctccctcctcccaccctctaccctcctataggccccagtgtgtattcccctctatg

SEQ ID NO: 35027 - DNA, 201 bp, Homo sapiens
ctatactttgaattctaattttctgaggtgactatgggaatcatatgcctaccttcttgtcaggggttatcagaaaaaaatagaggcagattcatgcccagaacaaaccatgagaattagcatgcatgcacacatgcatgtgtcttaatgtctgatgaaactattaagttggtgcaaaagtaattgcagtttttgcctttg

SEQ ID NO: 35028 - DNA, 201 bp, Homo sapiens
gatggttccccttacaccatgttgccattttcatcccgttttcactacataaaactcacctcagtgaattcatctcaagaaagttttgctgtacttccccrttaatgctcttgaacacctgcctgctgtgcttccccattaatgctcttgaacacctgcctcctttctcctttaactcttctttggttatcttgagataat

SEQ ID NO: 35029 - DNA, 201 bp, Homo sapiens
gcttccccattaatgctcttgaacacctgcctcctttctcctttaactcttctttggttatcttgagataatctctccaagtctttctgttataattgtgygccctaaaactttgaaaataatagaagaattttactgagaaatgtgctccaaggaattgatgtttttacctcttagaggcgatccagacaccccaaatct

SEQ ID NO: 35030 - DNA, 201 bp, Homo sapiens
ctaaaaatgaaactccccaaagttctatctactattttcttaaaactacatttctgttgcatgtaatattttaaattataataacagtgttttcttacttktgtgtaaatagtttatatttctagctcaaaatttaagctgtttttttttggtattagtcttggaatctaaacaccacttataaaatatttatatgggaaa

SEQ ID NO: 35031 - DNA, 201 bp, Homo sapiens
ttctagctcaaaatttaagctgtttttttttggtattagtcttggaatctaaacaccacttataaaatatttatatgggaaaatatgttcggatgaaaaasctattgacttacaaggtaagatttgtgatcctctgtatttatacaccgtctgtctgcaagttgagccctggctacgtatctgtaaccctgatagcagata

SEQ ID NO: 35032 - DNA, 201 bp, Homo sapiens
ttagcatttggggatgattgacaagtggatagaaactgcagctgtgtttttatccagtgaggtttctctttgggtctgcagtctaaggagtggatctgggmactcacaggacatttcagccattggcatatgttctgctggtatctaagatgggatgagaaaataacttcacagaacataaagttcactggaaaataaagc

SEQ ID NO: 35033 - DNA, 201 bp, Homo sapiens
tttttctgccgtaagccgaaaattcccccaatcttaatgggaggtgacattttatatggagtaatggccacactctaaagattcttccaccactgacttaytatctgctttatttctcttcatatccttttatctactggatattaggatggttccccttacaccatgttgccattttcatcccgttttcactacataaaa

SEQ ID NO: 35034 - DNA, 201 bp, Homo sapiens
ttactttcagaatattttgtcagaatctattaatatttttcaaactcaagaagtgagtttaccatgatattctatcaaaaaactgctgcctaaaaaatgcmaaaaaacagaaaattttaacaatgccaaccaaataaaacctatcaatgtttccttaaattatatttcaactaggtttttttctgtgcatgacctgaaggc

SEQ ID NO: 35035 - DNA, 201 bp, Homo sapiens
cattatcttatgtaaaaagatgaacacaatactaactagagctttatttatcagaacgagtgattgccaaaattaagccagggatgctatgcatgaaaaakctgtaagagtgattatgctaaagtattaaaaataaaattataaagacaagctatacgcagcagtgaaattatttttaagcaaaaagaaataatcatttca

SEQ ID NO: 35036 - DNA, 201 bp, Homo sapiens
caaacagagatacaagataaaaattatttccacatccctcagtcactcagaatgtactcttattataccgtagttactcacatgagtgcttttctctcctrttaatgctaaattccttgaggagggcctataccatttcttatactaaataaggtagagcaattcagaggtaaatgagtcaaattgtttgacttcaatcaa

SEQ ID NO: 35037 - DNA, 201 bp, Homo sapiens
gagaaaagcataatagttttatttcaatacactatgtattcaaaataagataatcacataagatcatcaccttctaggggatcagcttctttcaagtaggraaattcattaaaagtaagttagttaactacatacttttggaaaacatatgtatattataactgcataataaaagcttaataaaacattaaacataggatg

SEQ ID NO: 35038 - DNA, 201 bp, Homo sapiens
ctcctcccaccctctaccctcctataggccccagtgtgtattcccctctatgtgtccatgagttctcatcacttagctccaacttgtaagaaagaacatgyggtatttggttttcccttcctgtgttagtttgctaagagtaatggcctccagctctatagcatacgtggcatttttaaatctgttttgaacatttaggtt

SEQ ID NO: 35039 - DNA, 201 bp, Homo sapiens
ccttctaggggatcagcttctttcaagtagggaaattcattaaaagtaagttagttaactacatacttttggaaaacatatgtatattataactgcataayaaaagcttaataaaacattaaacataggatggggtcaaagcagttttccatcaaaagaattctgacttcactacaacactcaaaccccacttgaggctaa

SEQ ID NO: 35040 - DNA, 201 bp, Homo sapiens
aactattaagttggtgcaaaagtaattgcagtttttgcctttgaaagtaataggtttatgtgatttaattttttgagtatttttcaaaattcccttttcayttttcaaattcactttgatagcattttaattttaatcagggagaatttagtgcctatggagaagtcatagatctctgtggttcttttgggacatttgttt

SEQ ID NO: 35041 - DNA, 201 bp, Homo sapiens
gcaagaaagataaacttatgattcactgcatgttgcagcagccacaggaggttgaaattttttttcctgatagggggtcagaagaaaaaaataatcttgtwcctggctgctcttgcagataaccccaagagagaggaactggcctgctgtgcaaacgaggttcaagaggatgattctatcctcacttaactctttttgcta

SEQ ID NO: 35042 - DNA, 201 bp, Homo sapiens
ctgcaatgttcattctcataaaagccataattcatggctgctccacagcccttttctttcagcaattatgcatattagaggaaagtttgaatacataaaamccaaatgctgatagaaaagcaagcctcataaaagacgcatttactcaactagttttcctcaaaggaaaatgtgaaagctaactaggctgcaccagtccaa

SEQ ID NO: 35043 - DNA, 201 bp, Homo sapiens
ttcattgttgttgttctgggtaggagggtgaagctacacaagacaaaagactttacatagaaaaatttgacctaggtcttgaaaaattaatagatgttggrcagacaatgctgataaatgtgccttgcgcaagccatacgactgcaatttgctactatgagaacagccccgggggttcaaggcataaggataatattttta

SEQ ID NO: 35044 - DNA, 201 bp, Homo sapiens
taacagcaacttctagcccaagcaccatgcgaggtgcctgggaatttaagagtaagcaaaatagacactgtccttgcaacatggaatttagtaggaaagaraaacattaatcaaaggagcacataaattagtcaatgattgatttaagccatgctaaattactgagaagtaaaatatagcataatctaggagcctggcagg

SEQ ID NO: 35045 - DNA, 201 bp, Homo sapiens
ttgttaactgtcccactttatcttgcttaacactgtatcctcagaacctagcagagtgctgggtgaacagtaaatattcagtaaatgttgttcgactaatgaatgaaaaatggcagcatcattggaataagagtatagtgctctgacgtgattactttgaaatcaacgtttttgatatgacctttcaaaatcattcttata

SEQ ID NO: 35046 - DNA, 201 bp, Homo sapiens
ctgttcctagggcctaagcaaatggcaactccccatttggataattattgagtaagtaaatggacttgattatgacatctattgaagcagaggtggccaayatgagaccagtaggattgaggtagagggtgggagcacctctcatttgcagttgaaattatgtccaaaggtgacccagagtgtttgagccaggacattgta

SEQ ID NO: 35047 - DNA, 201 bp, Homo sapiens
tacgagacagatgatgctgccccagcctaggtggttttggatccctggtggtatattatggagttggattagaatcattcagtgggtcttatatggatcakacacacagtacacgacaattagtggaaattggcagggtggggggaatggtatattctttcccttcctgaatgttctccaattcaagaaaccataggaaaa

SEQ ID NO: 35048 - DNA, 201 bp, Homo sapiens
atgatgctgccccagcctaggtggttttggatccctggtggtatattatggagttggattagaatcattcagtgggtcttatatggatcagacacacagtrcacgacaattagtggaaattggcagggtggggggaatggtatattctttcccttcctgaatgttctccaattcaagaaaccataggaaaatcatcaaggc

SEQ ID NO: 35049 - DNA, 201 bp, Homo sapiens
tgctgccccagcctaggtggttttggatccctggtggtatattatggagttggattagaatcattcagtgggtcttatatggatcagacacacagtacacracaattagtggaaattggcagggtggggggaatggtatattctttcccttcctgaatgttctccaattcaagaaaccataggaaaatcatcaaggctttg

SEQ ID NO: 35050 - DNA, 201 bp, Homo sapiens
attagtggaaattggcagggtggggggaatggtatattctttcccttcctgaatgttctccaattcaagaaaccataggaaaatcatcaaggctttgctarttcagattgataagtcaaaaactgaacaaatatacatgtaacttatttatttattttctcacctacttctaaaataattttgaggtggcatctttacaga

SEQ ID NO: 35051 - DNA, 201 bp, Homo sapiens
ctgtgaggagattgctaatgtcagggaggacagctctgaaatatgagctgagacctgaatgtgaagaaagaatcagccgcatagtgatctagaggaagaargttccactcagatggagcagcaaccaccagggtatgagacaggaactagcttgaacctcaaggctttgggaccacgtgggtggaataagtgaggtgagaa

SEQ ID NO: 35052 - DNA, 201 bp, Homo sapiens
ccatcagcctaaaggtgataaaagacttatttcacttcatggtaagaccatagatataatttcaggaacagaaaataaaaatgtcaatgtcaacaaataayaatattaacatgtattacatacctgctatagtctagggactatgctatctgctttaaattgaattttcctcacttaaactttactgcatccatacagatg

SEQ ID NO: 35053 - DNA, 201 bp, Homo sapiens
ctacaggtcagccaaaacgaattaataataaaccccagagtaacgataataaataataagcccccaaaacaattccacaaggacaatttctgagaaatgcrttatcaatcaaaatgtgagctcttcagtagaaagataaattttaatgcatgatacagagacatcctgagtcagtaagtcagccaccaaatgccactgaac

SEQ ID NO: 35054 - DNA, 201 bp, Homo sapiens
aattgggctaaaagaaggtagatgacttgtccaaagccatatagctaataaaaggtaaaggcaggattcatacccaacaatatctgatgataaattattcmtactcactatttcattaacacatgcagtaaaaatgttctcccctacctgatttattccaacaagtcctttcctcacctctggacttaggctgcaaaagct

SEQ ID NO: 35055 - DNA, 201 bp, Homo sapiens
tcataccacaaacatgactgaagagcagagactgctgctaaggctgtgatatttgaatctttgcacaaatggtacaggattcagtctgggatgaagaagcraaagagacacagatgcaggcaggaataactcccacacctccaccaccattaccatcactactccctttcccaaggaagtactgtggcaagaatatatcct

SEQ ID NO: 35056 - DNA, 201 bp, Homo sapiens
aggcctccctcctcagttgaccctgaattatgattcaacacactagagactcttttctcttcaaactatgtttatctttatgcttacacagtcaagcaatrtcaatactcactggccttttattaataataaatgttttcattattgattctgcatatattcttaagaacctattatgtgccaggcattgtgaagaattag

SEQ ID NO: 35057 - DNA, 201 bp, Homo sapiens
ttggggttttacagtgaggcttttaatccatcttgagttgatttttgtatatggtgaaaggtaggggcccagtttcaattttctgcaatggctaggcatgktctcacttacaagtgggagctaaatgatgagactacatggacacatagaggggaacaatacacacagcagcctactggagggtgggaggagggagaagat

SEQ ID NO: 35058 - DNA, 201 bp, Homo sapiens; identical to SEQ ID NO: 4636

SEQ ID NO: 35059 - DNA, 201 bp, Homo sapiens
ttggaatggctttgaaggtcatcagaaactaagatatatttagacaatttaacaaacaggacaagaaacaccactgttgttcttcaaagaagataagcacracagctagaatacatggggatatataacagtctgctgtgatggctcatgcatagtctgggaagggaggcaagagatcctgagtcttcaggatcatccatg

SEQ ID NO: 35060 - DNA, 201 bp, Homo sapiens
tttccaaatatttttaccactcttgcctgatttttctgtatatggaactttaatatttacagtctgatccatagcgggttaagcaatcttctcccacaccmctgaatgattctttgatgctttgaaccaacttcttggtgactcctctctccctgcagctctgcacttacttgggatttcattctacgagtgcatggcagc

SEQ ID NO: 35061 - DNA, 201 bp, Homo sapiens
gaatgattctttgatgctttgaaccaacttcttggtgactcctctctccctgcagctctgcacttacttgggatttcattctacgagtgcatggcagcacrcacattccccagccatatttcctgccctattcttttggaaatttcaggctctgaaacaatgtctaaccagattatgatggaacaaaacctgcaaaattaa

SEQ ID NO: 35062 - DNA, 201 bp, Homo sapiens
acttatgggccctcactctgcgccaggcactttccatgcattctcacattcttacatttaattctcaaaatgaatccataagttaggaagtagcattgtcytcattttagagatgagggaggtatgactcagagatactaaatgacttacaaaaggccacatggtgcataaatcatggagacagaacttaagcataggttg

SEQ ID NO: 35063 - DNA, 201 bp, Homo sapiens
ccaatacacacactataaaatacacataccataaaaatacacacatcataaaacatcttaaattaaattaaaatatcttaaattaaattaaaaatgcattyaatacacctaacctaccaaacatcattgcctagcctagcccacgttaaacatgctcagaacacttctatcagcctataattaggcaaaatcctctggaaa

SEQ ID NO: 35064 - DNA, 201 bp, Homo sapiens
atcaaaggattgagttgggcctctgtataacatgacatgaagacatggaatggactagccctattttaccaggaatcctaagtaagactattttaggaaasatgatttgatctacaggatatccaattttgcagtaaagaactgtcccataatgatttttttttaataacagctaaaacgtctcatcttttgaagacatta

SEQ ID NO: 35065 - DNA, 201 bp, Homo sapiens
aggcaggaataactcccacacctccaccaccattaccatcactactccctttcccaaggaagtactgtggcaagaatatatcctctggatacttaataaactaaaaagaagaagttgcttatctgcatagtgtcttccatccaccacctctgtggcatgctgtcagtctcagatgctgccccactctcctgccaccacccc

SEQ ID NO: 35066 - DNA, 201 bp, Homo sapiens
gtgaaatggcagcttcccttccttctctttctcccctgcagttagacatctccaaatgaagctgtagtgtctcagtatgaactatggtgacaattaatatycccactgttaaatctcttcatcgttactccactctaccttcagcactgctaatgcttaactcacataaattttgctcaaagcattaagtccttccctgtt

SEQ ID NO: 35067 - DNA, 201 bp, Homo sapiens
gctgggttaaataaagcaaagtacatttcttcatcggaatatggtattagtgttaaggaaagaaattgagcaggttgtgaattatcaaattaaaaagtagwttgtacaaaatatgaatctataataaaattccacataaaaccattgtactaacattttttgttttactgaattggcactcatgaaacagggttgctcacc

SEQ ID NO: 35068 - DNA, 201 bp, Homo sapiens
aaattttttctccagaaggcccctacatatactgcttacatttcaacgtaagacaaacgttatctgaaagagatgatactcctgttttctatatgggttaytaatttagacgagatgattttgcttacatagagaacaaggggaatatatatcactgggcggtttgatgaatttcagggagaagacacaaattatcagatc

SEQ ID NO: 35069 - DNA, 201 bp, Homo sapiens
tgcttacatttcaacgtaagacaaacgttatctgaaagagatgatactcctgttttctatatgggttactaatttagacgagatgattttgcttacatagrgaacaaggggaatatatatcactgggcggtttgatgaatttcagggagaagacacaaattatcagatctatagaagaagaaaccagaaaaaaaggcaact

SEQ ID NO: 35070 - DNA, 201 bp, Homo sapiens; identical to SEQ ID NO: 4652

SEQ ID NO: 35071 - DNA, 201 bp, Homo sapiens
ctggcacagcttcctgccaagattcaaatccctgtcgctctctactcctcataggtgaagctgcttctccctcattttcaagcactgactttttccttgtstttccccaacaaggctcaggaaccaatcctgttctatcttagggagaatttaagatgctatatctggatcctttctcttcagaagtttggttcaaggaca

SEQ ID NO: 35072 - DNA, 201 bp, Homo sapiens
atgctatatctggatcctttctcttcagaagtttggttcaaggacaagcagttctggcaactccaggagcttgtcagaaatgtagaatctcagacccaatstcaggctctgccctagacctactaaaccagaatctgcattttaacaagatccctaggtgtattctgcacaatacaatcagagaagcaaagctataggtca

SEQ ID NO: 35073 - DNA, 201 bp, Homo sapiens
tttaaaacatgatggaaactttagctcatgaatcaaaacaaccctccagagctaaaagccagctgtatttgcataacaatttagcagatccaaacagcagrgcaaggtcgggtgaaataagttgccaaggtcatggtcatgaagtagtattagactcagaaaggctgatccccagtgcttgctccaccccatggatctctc

SEQ ID NO: 35074 - DNA, 201 bp, Homo sapiens
taggtcagtttccatatgatccaacatcagatcactactgctgctggccccactcttatctttcactcttgaatctgtgacattctaggactacgtctaayaattggttctattccctcttaacaagcttaatgttccattgacttccatactgtcatcctgcttagctctggccttctcccagcatctgggagatgcttt

SEQ ID NO: 35075 - DNA, 201 bp, Homo sapiens
ccatatgatccaacatcagatcactactgctgctggccccactcttatctttcactcttgaatctgtgacattctaggactacgtctaataattggttctmttccctcttaacaagcttaatgttccattgacttccatactgtcatcctgcttagctctggccttctcccagcatctgggagatgctttgactcagagtc

SEQ ID NO: 35076 - DNA, 201 bp, Homo sapiens
ctcttcccagcttctctgaagaaatgaaaggtgctgcccctgtattcacataattttatcatctgcacacttttacacaggcctctcatctgcaattgaawgctgttaagtggaaaaagtattacatactgaaaatacaagtcttttatcctaatcccattattttcttttcatttttacaaccttttagaaaatgactat

SEQ ID NO: 35077 - DNA, 201 bp, Homo sapiens
ccctcccagctgctttcacaggctggcgttgagtgtttgcggcttttccaggcatatggtaaaagctgttggtggatctgccattctggggtctggaggayggtggccctcttctcacagctccactaggcagtgcttcagtagggactctgtgggggctccgaccccacatttcccttctgcactgccctagcagaggtt

SEQ ID NO: 35078 - DNA, 201 bp, Homo sapiens
gttaaaagagcacaatgtaatgaaacgcatatgaaatagtggccaaaatgttcccaatctgcctctttcgttgcagatgttcccaatctatctctcactarccatgtaattttgggcaagtgactatctctgagcatctacacttatcagaagtgtagatcaaaagaaggtactttaccaatctgacaaagatgttgtgaa

SEQ ID NO: 35079 - DNA, 201 bp, Homo sapiens
ataaataaactttgtgtagcctaaatgtacagtgttcagatatgtttagataccattatgttgtaattgactacagtattcagcatagtaacatgctgttsaagtctgcagcctaggagtaataggttatactatgtagcctaggggtgtagtaggttatgccatctaggcttgtgtaagtgcacgctatgatgttcatat

SEQ ID NO: 35080 - DNA, 201 bp, Homo sapiens
gtcaagcaatatcaatactcactggccttttattaataataaatgttttcattattgattctgcatatattcttaagaacctattatgtgccaggcattgwgaagaattagaaaatcttcaaaaaaatgaatcaaacaaatgtccattcaaaaaacccaacatataaattgataatcatcacaatttattcctgaacatta

SEQ ID NO: 35081 - DNA, 201 bp, Homo sapiens
ggattatgatttgcccatgcttgcctaaaggccctaagtgctaataaattcattgttcctgcagagaaagctccatgggttggtcataatctggtcatcarcacttatcttttctttaagaatcccaagagtctggacactgacagacacattgttgttcttggcctaagaagtccctaaccctttgactaattagccata

SEQ ID NO: 35082 - DNA, 201 bp, Homo sapiens
tgtcagagttacgcaagttttcatttctcacacagtcattttcagtttgggctgacagaactgttaacatcttaaaatgttaatgaaatcaccaaaaacakggcattttcagctaggctttcagattagaaaagtcatttctcatggcagactacacacacataattacaggtattagagattttattcttcctaggtccc

SEQ ID NO: 35083 - DNA, 201 bp, Homo sapiens
accagaacttgctctcattcccagcacgatgaactgcatggaggtggaaactacaaatctcacttcaggacaatatttatcaaggtaggatgcaaggtctyggttatatccccattcatagggccatgacagagagtaaaattcccctatctgtccgctttgcagaaatcttgactctgagtagctttaaactttaataat

SEQ ID NO: 35084 - DNA, 201 bp, Homo sapiens; identical to SEQ ID NO: 4646

SEQ ID NO: 35085 - DNA, 201 bp, Homo sapiens; identical to SEQ ID NO: 4648

SEQ ID NO: 35086 - DNA, 201 bp, Homo sapiens
ctctcatctgcaattgaatgctgttaagtggaaaaagtattacatactgaaaatacaagtcttttatcctaatcccattattttcttttcatttttacaascttttagaaaatgactattttgcttcactaatatgacaaataattatgacacacatcatttgtaaagtccttcattgcctcccaaacactttcacttcat

SEQ ID NO: 35087 - DNA, 201 bp, Homo sapiens; identical to SEQ ID NO: 4650

SEQ ID NO: 35088 - DNA, 201 bp, Homo sapiens
gattccctacatctttgtgaagcagaaaatgcatctgctgttggaggagactgaggctcagaggagttaagtgatttttccaaggatcaagctgctacttraacccaagttttaatttcagatccatcataatttttgggacaatgtgctgcctcatattaaactatattcaaaaacatattaagcatacaatgataggaa

SEQ ID NO: 35089 - DNA, 201 bp, Homo sapiens
cttaaacccaagttttaatttcagatccatcataatttttgggacaatgtgctgcctcatattaaactatattcaaaaacatattaagcatacaatgatargaatgcttacagctctcaaagctttgctcagcattttgagagtgtagtttgagaagaacaattatcagaaaaagaaattcataatatgctcacttaatta

SEQ ID NO: 35090 - DNA, 201 bp, Homo sapiens
ttcaaggagctgaatatcttgcaggtcaaatatgaaatcaagtagtcagtctactgagagccaaactgaagtccaaaattgcagaatatattttgctttakgtcatgtaccaaatgactaataggcagcgaaggttttcaggattataattttagcccaaggctctggtaactacatgaaatctttgagtggtttatgata

SEQ ID NO: 35091 - DNA, 201 bp, Homo sapiens
ttgactaatgactttaagtatacaaattactttttaaatgagaatggcaggaaggaaattcattcacccatcaattccataaatatatatgtcaccatatrtattttgtctgtttgccattaagataaaggctaggaatacaatagcagacaagtcagatccctacccgccatttccaaaatcttacactttagcaagata

SEQ ID NO: 35092 - DNA, 201 bp, Homo sapiens
aaatcttacactttagcaagataattagaccttaaatgaccatacccatgagatgagtgttacgatgaagaatggaatattatcccaaatatattaacagraacctggcaaactgggcttgatgtgaggaacacagtcagagaaagcctccttgaggaagaaaacatgaattctgaatgatgaattaaaattatggaggaa

SEQ ID NO: 35093 - DNA, 201 bp, Homo sapiens
aacagaaacctggcaaactgggcttgatgtgaggaacacagtcagagaaagcctccttgaggaagaaaacatgaattctgaatgatgaattaaaattatgraggaaaagaggagaggaaacctctcttaataggcagataaagtaaatgaggaaaaaaaaagagaccttgaagggagtacacagggaatcagtctccctct

SEQ ID NO: 35094 - DNA, 201 bp, Homo sapiens
ggcttgatgtgaggaacacagtcagagaaagcctccttgaggaagaaaacatgaattctgaatgatgaattaaaattatggaggaaaagaggagaggaaayctctcttaataggcagataaagtaaatgaggaaaaaaaaagagaccttgaagggagtacacagggaatcagtctccctctgaatgataggaagagctgtg

SEQ ID NO: 35095 - DNA, 201 bp, Homo sapiens
tctactttaggatagtaagaggagagtcaaggagtcatttcacatgtaagctcaagaaatcacgcacatttaatgtttaatttggagaactgtcccatatrtggagaagaaaatcaaacagaattggaccacaggtaagctctgtggctaaaatggacaaattcatgttatcataaaaggaaggcagataccacagggctc

SEQ ID NO: 35096 - DNA, 201 bp, Homo sapiens
cacatggaaaaatacaaatgtaaactatgtatagtaaataattcagataactggaggtctatggacattgtgaaatatcaaaattggctgtaagagttctraaagacaatccaaagagagaatagcttagggctcttgaatgaaaaagagcagaaaaaaaaaaaagactacataagtgtgaacttgtgacaaatgcaaaag

SEQ ID NO: 35097 - DNA, 201 bp, Homo sapiens
aattatcaatcatacatataaaatggaaaatagatacaagaaagattatgtttcagaatatcaaattgtatcaataataagtggaaggtgaaaacaaagtrgagacacaaaccaagagaacaaaatacttaaatatgtgcctaaagttctaaatagcagttcttagatacaggaaaaaatggtttttggttttagggtgag

SEQ ID NO: 35098 - DNA, 201 bp, Homo sapiens
gaaatatcaaaattggctgtaagagttctaaaagacaatccaaagagagaatagcttagggctcttgaatgaaaaagagcagaaaaaaaaaaaagactacrtaagtgtgaacttgtgacaaatgcaaaagtgtagaactctggagaatgtgagtttttaattagaagattcgtcgtagatatgaatcacattaagaaaaga

SEQ ID NO: 35099 - DNA, 201 bp, Homo sapiens
gcaaatatttaaattccatgtataggagcaagtaatcctgacaagtaaactcagtaaacctaacaagaattaggtgatcctggtaggaagggagtttgagrgaatgttactagtaataatattcttaaagattcctaatcaggcaaaagcaaaaaatcaaaatgaagttctcacagaaaaaaaaaattgatagagctttat

SEQ ID NO: 35100 - DNA, 201 bp, Homo sapiens
gtcatgaaagaagacacttgaggatggtgatgcatttaaacaacacaaaagtgataatatgtagacagaaatgaaggctgaaaacaatggagttatttcasagctatttccacagccagaaaaaatacaaattcataataaacataaaaacataatactaataaaacttgatgtgtcaaataagacaagaaaaatcagggg

SEQ ID NO: 35101 - DNA, 201 bp, Homo sapiens
gagataatgataactactcatagtgtttgaggtattaattaaatagaatagcttatatcaagtggattaatgacagcagctgacatgtaatatgtattcawtttttttaaatgtgagttctttattttctgtttcctcaggcttctgttccctcacactaaaattcaagaggcactaaagaaaagcaatctcatggcaaaa

SEQ ID NO: 35102 - DNA, 201 bp, Homo sapiens
tttttctttaaacatggagaattttgaactcctagccttaagatgctcccattttcagcctcccaaagtgctaggattataggcatgagccaccatgcccrgccttaaacatggagaatttctatttagattatttcatttaatatggcattgccagtatttcccatgtaatgggacgcccatggtccacccacaccatta

SEQ ID NO: 35103 - DNA, 201 bp, Homo sapiens; identical to SEQ ID NO: 4639

SEQ ID NO: 35104 - DNA, 201 bp, Homo sapiens
ctacaggggacaataggaataaaagaggagctgtctgagttctaactgacacacacagccactttcccctcttttctctcactatttatagttgttgatcsttttgttctatatcctgtaagattttcttaattttgtcttccacttcactaattcaatgtttgcaatatttgccaagctttttatgtttccaaagcataa

SEQ ID NO: 35105 - DNA, 201 bp, Homo sapiens
catacaagggcttgagattttactgagaaaggcttcctcatttcttaatgcatattattgaatgttcagcaagctcttaaaagcaatccaatagttcccawaataaacatagttaattccatcaatatttattgtgcccctaacgtatataagacattgtgctaaacattgtcaggatgtcagatgcttgctcttgaggac

SEQ ID NO: 35106 - DNA, 201 bp, Homo sapiens
tcctgtaaacctctgtggagtcctcactttttattctacatgtatcaaagtcatttaaatccttcagagagtttaaagtgcagcataaattctatttcctrttacacattttttggtacgtagggacaggccacacttctttgtttcatacaagggcttgagattttactgagaaaggcttcctcatttcttaatgcatat

SEQ ID NO: 35107 - DNA, 201 bp, Homo sapiens
tgttccagatcaccaaacctttcagcctttccaacactgctgcaatgaaatagaccatacctagcattgccagcaatattatgtcaactgcaccatgcagkgataatcctgccttctgaaacattcattatattgtactgctctgttatatattctttaatatatcagccactcaaaaatcctgagagatatgtgctaaga

SEQ ID NO: 35108 - DNA, 201 bp, Homo sapiens
ggtatcaataattaggtggaattatcatgggaaaaaagtccatgattagaagcttggtgcaggtagcttgagtgattaccaacaatcaacctgttatgccygacactcctttctgtaaatcatcctggggctcagaagaattggttagctcaaagaatgtaatatgcatgctcctgctatttcttctgcctgaagacatgc

SEQ ID NO: 35109 - DNA, 201 bp, Homo sapiens
aagccccaaaagttgtatttgtgtggggcataatttatatgagtgggctgggagaataggacccagagaatgagtgagtcaaatgctttcaagattaccawggtttgggtgagagaaacaaagtgtaaccatactgaacaaaaggcagaaatgggatgatgtgtagatgaatgagttgggtatcaataattaggtggaatt

SEQ ID NO: 35110 - DNA, 201 bp, Homo sapiens
ccttttagactggctcaaactgggggccttatttcttgtctgctactgtcttattcctaatctattcctcaatttgtttcttggtgctgataatactgccmcctagattttaaaatcctgaaagaaaagaccgtattgattattttcactactgtagtctcagcaatcagtagccagtgcctgacacaaaataggtactca

SEQ ID NO: 35111 - DNA, 201 bp, Homo sapiens
cagagaaatataggttaataatcatcagcaagttatagaatctggccctcaaggccatccacaaacatgtactgtattagttcattttcacatgctgatgragacatacccaagactgggaagaaaaggagatttaattggacttacagttctacatggctggggaggcctcagaatcacagccggaggtgaaaggcactt

SEQ ID NO: 35112 - DNA, 201 bp, Homo sapiens
atatgccatctcttaataatagtttcaggctgcattgacataaagtaatcaaatttctatagggaatttaacttgcatgctagacagtttaattatctggygcatatttcaatagttcccattataagaaaatatgtccaagtttgtcacagtgaatgtctgtaacaatgatgttaatattcaataaattttaattatctt

SEQ ID NO: 35113 - DNA, 201 bp, Homo sapiens
aagaatcgcttgaacccaggagccggaggttatagtgagacaaagatcccgccactgcactccagcctggctgagagagtgagactctgtctcaaaaatamataaataaataaactttgtgtagcctaaatgtacagtgttcagatatgtttagataccattatgttgtaattgactacagtattcagcatagtaacatgc

SEQ ID NO: 35114 - DNA, 201 bp, Homo sapiens
catggtgaaaccccatctctactaaaaatacaagaaattagccaggcgtggtggctcgcacctgtagtcccatctacttgggaggctgaggcagaagaatygcttgaacccaggagccggaggttatagtgagacaaagatcccgccactgcactccagcctggctgagagagtgagactctgtctcaaaaatacataaat

SEQ ID NO: 35115 - DNA, 201 bp, Homo sapiens
atacaaagaataatgcacacaatcctcatcctcagaaaatatgtaatcaaattaacattaaaatgctgcaataaaattaggaaaagcaatgtgttcaccakagtatcaaaaaggtatgttagtatctctgacgactctttaacaaaagtagccttcccacctgactttctatcacatcatatcatttttccgttccttcct

SEQ ID NO: 35116 - DNA, 201 bp, Homo sapiens
aaattaggaaaagcaatgtgttcaccagagtatcaaaaaggtatgttagtatctctgacgactctttaacaaaagtagccttcccacctgactttctatcrcatcatatcatttttccgttccttcctttaattttgtattatctgtaattatctggtttgcttggtgttgtttttctccacaggagtagagacattttct

SEQ ID NO: 35117 - DNA, 201 bp, Homo sapiens
cagagtatcaaaaaggtatgttagtatctctgacgactctttaacaaaagtagccttcccacctgactttctatcacatcatatcatttttccgttccttyctttaattttgtattatctgtaattatctggtttgcttggtgttgtttttctccacaggagtagagacattttctgtattattcatagggattatcaact

SEQ ID NO: 35118 - DNA, 201 bp, Homo sapiens
caaaaaaggtcattacataatgataaatgtgtcaattcagcaaaaggatataacaattgtgaatataaatgtattcaacactggagtacctaaatacataraacaaatattaatagaactaaagggagagattaatggtaatactttaatagtagagacttcaggatcccactttcaccaatgaacagatcatacaacaga

SEQ ID NO: 35119 - DNA, 201 bp, Homo sapiens
agagagtagaatgatggttactagaggttaggaagcatggggggaggggtgatgaggaaaggttgcttaataggtacagaaacacagttagaagaaataarttacagtgtttggtagcacagtagggtgactgtagttaacaatagtttatattatatttcaaaacagctagaagaaaaaattaggaatgttcataacaca

SEQ ID NO: 35120 - DNA, 201 bp, Homo sapiens
tcaaaacagctagaagaaaaaattaggaatgttcataacacaaaaaatgataaacatttgagatgattaatatcctaatcatcctgatttgatcattacayattgtatgcatgtctcaaaatatcacatgtaccccataaatatgtgcaattattttctattaataaaaaatagagggaaaagggacatctaaataacaag

SEQ ID NO: 35121 - DNA, 201 bp, Homo sapiens
gtgactaatgtaatttcaaggggccaggaactaagttctgatcccaccttttcaataatcaagtctttgatcttgaacaagtcctaacatcatcaattccrgtttcttcatctgtaaaccaaagatttttaattaaggtgtaacatcactttaaggctaacattctataattctaagaagaaatagtctacctggaaatga

SEQ ID NO: 35122 - DNA, 201 bp, Homo sapiens
catttgtaagggcccatgttgcttccttgttttgtttttaatttttatttttcagaaacaggatcttactctgttgcacagactggagtgcagtgccacartcagaattcactgaaactcctgggctcaagggctaattttttgtttttactttttatttttgttttgtagagatgggggctccactctgttgcccagtct

SEQ ID NO: 35123 - DNA, 201 bp, Homo sapiens
caacagcatcctagtaccaaaaccagacaaagacacaaaaaaaaggcgaaaattacaggccaatatttcactgatgaatctagttgcaaaaatcctcaacwaagtgctatcaaaccaaattcaacagcccctgaaaaagatcattcaccacgaccaagtaggattaatctcaaggacagaaggatggttcaacacacacaa

SEQ ID NO: 35124 - DNA, 201 bp, Homo sapiens
agataaattttcttaaagcaatttttattctttcattcattcaagaaatacttatcaaatataatgccctgagcttcatgccattcccttgctcaaaaacyattttactataataatattccctttctttttccatgacccaacacttctgtggggtgaaatacacaccttaataacaatgactcactacagcattaattc

SEQ ID NO: 35125 - DNA, 201 bp, Homo sapiens
ttttccatagtgtcaactactgaatttatctctttgtgtgtggcaaggccaggaatttctaacttgaaattgtggttatatctccaattctcaccttaagytaaaaatacttaaagatgtcttgaaaaagtgtttttctcttacctataacaagacttttcataacatctttgacttctcccttttcttgttaccaggttc

SEQ ID NO: 35126 - DNA, 201 bp, Homo sapiens
cttggtttgtttacctagcccttgctgtttaaaatcagatttgcttccattaaaaaagaaaaaacactgttaccgaagggattttactacactcatcttarcatttttgtagttacttgtgctgcagaacaccctctacttgagttttgtgacaccgtcattgttttccttgtttttttcccctgtcctttcattgtcttt

SEQ ID NO: 35127 - DNA, 201 bp, Homo sapiens
atcctactttatggatttccctaacatattcatacattataaaccgcttctcatatcgcaaatatttttctccattatttgtaatggctagatagtttgcytttgaatgggttatttcttggtttgtttacctagcccttgctgtttaaaatcagatttgcttccattaaaaaagaaaaaacactgttaccgaagggattt

SEQ ID NO: 35128 - DNA, 201 bp, Homo sapiens
ggtactagacttaatacgtcggtgatgaaataatctgtacaacaaacccccatgacatatgtttacctatgtaacaaatctgcacatcctgcacatgtacycctgaacctaaaagttaaaagaaagaaagaaagttaccaggcacttcagaaactaattctgggcccacctcacttagattcatagtaatctgagctttat

SEQ ID NO: 35129 - DNA, 201 bp, Homo sapiens
taacagaatcacaatctggcttagttgtggagtgctattttttcagtcccaaccagacattcttaaacagagattcctttaaacaaataatttgcttctayatattgtaaatgtaataatgggagcaaatatatacacagatccacacacagagagatgttattgtgttgctgatacaggaggagttaatttgagtctttt

SEQ ID NO: 35130 - DNA, 201 bp, Homo sapiens
attagctgaacttactgaacatttggggcagtagcaagcactttgatggcagtacaacctgcatgcaatctatgggtgtttttggacagaaggcctcaacyagaagccaaacagaagttgtgttaatactccccagattaaaaagaaaagtttttgttttcgtaaagttcaacattcagcatgtctttgtctaacagaatc

SEQ ID NO: 35131 - DNA, 201 bp, Homo sapiens
gctctggaattagatttggttcagaactctcctttatgcctatttcctgagttatctgggacacattagttaaattcaagcctcagtttctcatgtgaaakttggagattgtaacaaatattgcttatttagtattgttgttagaggtttaaatcatataattcacgttaaggtgttagcaaaatgcttgaaatatgggaa

SEQ ID NO: 35132 - DNA, 201 bp, Homo sapiens
gttgtctgtttactctgttgatagtttcttttgctgtgcagaagctctttggcttaattaggtcccatttgtcaatttttgcttttgttgcaactgctttyggcatcttcatcatgaaatctttgtctgtgccaatgtcctgaatggtattgtcaaggttttttgtctgtttgtttgtttgtttgtttttctagggttttc

SEQ ID NO: 35133 - DNA, 201 bp, Homo sapiens
cagcgataatacaattttcatttgtattacacttgacaatattttttcagcttagtgatgaggtacacatacaatagagttttagcatagttaaatataarttatcaatcatacatataaaatggaaaatagatacaagaaagattatgtttcagaatatcaaattgtatcaataataagtggaaggtgaaaacaaagtgg

SEQ ID NO: 35134 - DNA, 201 bp, Homo sapiens; identical to SEQ ID NO: 4645

SEQ ID NO: 35135 - DNA, 201 bp, Homo sapiens
ggatggttccccttacaccatgttgccattttcatcccgttttcactacataaaactcacctcagtgaattcatctcaagaaagttttgctgtacttcccyattaatgctcttgaacacctgcctgctgtgcttccccattaatgctcttgaacacctgcctcctttctcctttaactcttctttggttatcttgagataa

SEQ ID NO: 35136 - DNA, 201 bp, Homo sapiens
ctcgttttttttaacagtctcaccagacagtaaaatgtaatgattgaaaatattgcctgtagagcttgattttgaatttcatctttgcttcttaacagtgrtgtggttttagtttcttcctctgcacaatggagcaactagtagttactacatcatagagttgtgaggattaaatgaataaataattgtaaagcacttagg

SEQ ID NO: 35137 - DNA, 201 bp, Homo sapiens
aaacagcctctcccaatatgttacagagcacttctgttttcctgctgagaagttggtgtaatttatgtttgtaaaagatatctattgctgagaccattgtwtgaaaatagacaagaaaaaggagaaggagcaaaagcaaagaaaaatactgtattgcagtcagtcacttccaacagtgactaaactctgtaagtcaattgt

SEQ ID NO: 35138 - DNA, 201 bp, Homo sapiens
aagggagaagtgagcaacttcggccttcatgctcctttccactcccctccctagcagaaacattaagcttgaagaattgtagcaatggcctttcccaggasaattctgaaagggagtattccaaaaaggaagccaaacttcgctatccactaatcccaaatcctaattccttaactgtggttgcttgccacaattaagggt

SEQ ID NO: 35139 - DNA, 201 bp, Homo sapiens
agaataggtttacgttcaaggcatccaagcaacactttttgaaatgttctttaagccatcatgttgatagatcataaaatgacatctatcattctctgagwctttcataactgaaaaaggaataaatgcagtgtagagtcaggctagagtgtttcacttccttggggccttgggtacttgtataataatttttaaaacatt

SEQ ID NO: 35140 - DNA, 201 bp, Homo sapiens
agaggcttagaggggtagccccataaagctgaaattcaggcatctgaggaaaaggggtgttgctcagctggtgatggaatcgttgagctccaaggagggamcctaaagagctcaggttcagacctttaccctgctggttgatggtatctccgagggcacggaataaagtggttctacaaatattgaaaaatagctactgtc

SEQ ID NO: 35141 - DNA, 201 bp, Homo sapiens
tgaacaagaagtcagtcatttcatttccatccaggctttcccaccatttcctactcactgccttgtctacctcatttgttcttccacttagttctgtaacwttgaagcagctctgaagtacagtgaaacccatgacctggtttgaagctagtgaagtccaggaagaattgcactctgtagttcaaaaggctcttctgggtg

SEQ ID NO: 35142 - DNA, 201 bp, Homo sapiens
ctttaatatttaatccttctgagttatctaattaagtaaaaactggcattttaaaagttcctatgccatgaggatttgagtagctgtgccaaaaggcttayatcactagactggaggtaaatttatagctgtttttattcatttgcatttcatcagcccaaaattgctgactctaggtttggcaaggaccttactgcctgc

SEQ ID NO: 35143 - DNA, 201 bp, Homo sapiens
tcttaaatgttatttaataccaataatcagtaataggttttactggaatgacagagttgtgtaatctctggaaattttctgaagatttctagtgccttttkctgatatggtttaagcatatatttggtcaaaggtactctctcaagggtccatccagttaagaatctatcatcattaagcctcaaacattcttaaaataat

SEQ ID NO: 35144 - DNA, 201 bp, Homo sapiens
taatgccaaaaacttgtttactgtgtactatagtaatccaggtcgtatacgatagaaccagctctgcccagttttgtcatttactgtttccataaacttayagaagttggttagctattctaaggattttaaaagttcatacatataaaccattcaacagtgcctggcacatggtgagctacatcatgatcatcatcacca

SEQ ID NO: 35145 - DNA, 201 bp, Homo sapiens
catagaagaggcaaaacaaaatgacttgcatgaaaagaaagggaaagaaaagaaacaaagagatagaacctttgcagcagaatagcaatgattcctttgtkgaaattctataatttgttggcttggtctccatagtatctaaaagtagacagatacttcagttggagaccatgatgataggctctacactttcattacaat

SEQ ID NO: 35146 - DNA, 201 bp, Homo sapiens
aatatcattaagatgcccaagatatttgagaaatgttggtccttcacattgctcataagttttttctataggcaaactatcattcaggaaattatgaccawacagagtctaccccactctcactcctattccgccaactacaccacaaagcaaacatccaaattttttcatagcaaactttcttgataaggaaagcagtgt

SEQ ID NO: 35147 - DNA, 201 bp, Homo sapiens
ctcaaggacagaaggatggttcaacacacacaactcagtaaatatgatacatcacattaacagaatcaagaacaaaaaacatatgatcatttcaagagatmctgaaaaagcattcataaaattcagcagccctttatgataaaactctcaacaaactgggtatagcatgaacatgccttaaaacaacaaaagccgtatatg

SEQ ID NO: 35148 - DNA, 201 bp, Homo sapiens; identical to SEQ ID NO: 4642

SEQ ID NO: 35149 - DNA, 201 bp, Homo sapiens
ttgccagtatttcccatgtaatgggacgcccatggtccacccacaccattattttattaactgcttattattccaggctcttggatatgcatagaatgttsacattttctttttttttttttttttttaccatttttgtcacaaaatgtcccatgataaaggtctttattcacaggctcttatttccttatcatacattcc

SEQ ID NO: 35150 - DNA, 201 bp, Homo sapiens
tacaataccactgtcagtgtacaagggttacattttctccatatcctcacaaacacttgttattattcaacttttgataatagtcatcttaacaggtatamagtgataactcattgtggttttgatttgcgttttcctgatgattagtgatcttgagcacttcttcatatactttgtggctatttgtatatcttctttgga

SEQ ID NO: 35151 - DNA, 201 bp, Homo sapiens
gtatttacaaggcaaaagattcacagtttcaccaccttaacatatatttccttccaatttttgtttttctgggaggttattgttttctgttttatttgccrttgtaattcaagggtctattacactgttttgctcatagtaatcactcagatatttgttaaggaatgaatgaatgaactcctgaaattgtcatgtacaact

SEQ ID NO: 35152 - DNA, 201 bp, Homo sapiens
gggagccctgagcttattttcctgcaactaggtgatcccatctgggggtgataaaagacagtgacagatcatcaggcattagattctcataacagaatcaytagattctcataagaatctaatgcttgccacctagatccctcgcacgtggggttcacaatagggttcatgctcctaagaatctaatgctgctgctgatct

SEQ ID NO: 35153 - DNA, 201 bp, Homo sapiens
atctatttttaggcatttctggaatttgtttaaagaggccaaggtttgtaacgactacatatactgttacatctcaagtggttctttgttccctgacctaygtgtttctcataatttctacctgtgaatctgttttctccatcagagattacacagagcaataaatacatcatttatagaggaaaagcagcagcatttcaa

SEQ ID NO: 35154 - DNA, 201 bp, Homo sapiens
gtatattttgaaatcaagtattatgatgcctctagctttgctcttttttctcaagattgctttggttatttgggttctgttgcaattacaaaatcatcaaytttttagttactttttaaatgaatactgctgtaacagatgatgattatcaaacaatcaaatagctaccactcacagttacttttttaaaccaatgaaata

SEQ ID NO: 35155 - DNA, 201 bp, Homo sapiens
tgaacacaacctgtaaactccttaaagaatgttgttaataaaatttttcaaatatatttactacaaatctattagtaataaaattagatgttctatcatcmtctgaactttccctttttcccatattataatttccataagattaaaatccatgcatattttattttatagccactctccagatttaatctactgttggca

SEQ ID NO: 35156 - DNA, 201 bp, Homo sapiens
ttactcataaaatagaaataatgagataatgataactactcatagtgtttgaggtattaattaaatagaatagcttatatcaagtggattaatgacagcarctgacatgtaatatgtattcaatttttttaaatgtgagttctttattttctgtttcctcaggcttctgttccctcacactaaaattcaagaggcactaaa

SEQ ID NO: 35157 - DNA, 201 bp, Homo sapiens
tatcaagggatttgtaaagcagacaagtattagccagaaacgcctcactgcctggctgagtaatggaagatggcataggataggcctgtaatcataacaastacagttcctttaaggtacagctagaaagagctagaataagtatataatgtaaaggacaggtggataccctcatgtgaaagcaagagacaagaaagaaaa

SEQ ID NO: 35158 - DNA, 201 bp, Homo sapiens
atatcaagggatttgtaaagcagacaagtattagccagaaacgcctcactgcctggctgagtaatggaagatggcataggataggcctgtaatcataacargtacagttcctttaaggtacagctagaaagagctagaataagtatataatgtaaaggacaggtggataccctcatgtgaaagcaagagacaagaaagaaa

SEQ ID NO: 35159 - DNA, 201 bp, Homo sapiens
ccctagctcccacctgtaaactgagtggaaaaaagaaatgttaaaatgtccagtgctttgggaagccgaggcgggtggatcacgaggtcaggagatggagmccatcctggctaacatggtgaaaccccatctctactgaaaatacaaaaaaattagctgggcgtggtggagggcgcctgtagtcccatctactcgggaggc

SEQ ID NO: 35160 - DNA, 201 bp, Homo sapiens
ttatcctaagagtgtcatccaacgtgattttcaaaatgtgaccaggaaccacctgggaaaaaaaaatcacatttggtagtttttaaagtatagaattttarcctcactgaattccactatattatatgctatgacctcatatatctgttttctttttaacaaactcctccagattattcatatatgcacagtacagtttga

SEQ ID NO: 35161 - DNA, 201 bp, Homo sapiens
ccactgggttgcatcaatagcttcttagatcccttttctgattctattattctgtgactgctgagtagcccatggttatttttcaatataatctcacacasagaaagaaagaagaatatatcattttgaatgaattaaagtaacaaaggaaaaaattagttttaaggagaaaaaagacagcaggaggtgtgataaaaacca

SEQ ID NO: 35162 - DNA, 201 bp, Homo sapiens
tacaaatcgcatctgcatacagtaattttcttaattgttcttaaattttataagcattcttgtcctaaggacctctaccaacacaaactggttaacccacrtatttcaacatgtacttaaaagaaatgcagttgcattaaacatggaagccaggggttggaggctgcttagcactagctccctggagtcccgagaagaaca

SEQ ID NO: 35163 - DNA, 201 bp, Homo sapiens
taatcatcagtgagaaaggaaaagcctggaactgtattttaccttgttatctcctgtcaaacaaagtatcgggaaatcagacaagagttcagatcttggtmagattagccaagtctattcctaacttcctgttttactcactgctcatccgtcattaagtacgactctttaggtttcagccgccgggtgtggtagccatct

SEQ ID NO: 35164 - DNA, 201 bp, Homo sapiens
cccttttctgattctattattctgtgactgctgagtagcccatggttatttttcaatataatctcacacagagaaagaaagaagaatatatcattttgaaygaattaaagtaacaaaggaaaaaattagttttaaggagaaaaaagacagcaggaggtgtgataaaaaccaccaaatttttaatgtatctaacctaagaga

SEQ ID NO: 35165 - DNA, 201 bp, Homo sapiens
atttgtaaattatagagtaatatttgtgacaggcaatgggtgaatatgttttgctaagagcctacacttacatcatctgatttttcaaaatacctactgcrttccactctacatttcaatttaatttcttttaatttgaaatgtgtcttgagtaactgccatggatttatcataatgcaatactttgtgtttcccactttt

SEQ ID NO: 35166 - DNA, 201 bp, Homo sapiens
ttagtttcttattgattaaaaaagctaaacatattttcaatgaaagagctatttgtgaacttaacgttgacaagtaataatgaggagatgaatctttaagracaagacagagtccttatttagtaatgagttttctgccttttatatgttacttttatcataatctcaagctgtgttaagccttgcacaaagtatctatga

SEQ ID NO: 35167 - DNA, 201 bp, Homo sapiens
tgctgagtagcccatggttatttttcaatataatctcacacagagaaagaaagaagaatatatcattttgaatgaattaaagtaacaaaggaaaaaattarttttaaggagaaaaaagacagcaggaggtgtgataaaaaccaccaaatttttaatgtatctaacctaagagaatttcattcattctcttaataatgatga

SEQ ID NO: 35168 - DNA, 201 bp, Homo sapiens
tatctaacctaagagaatttcattcattctcttaataatgatgacaattcatttattatgtcattatttatcaagcatatactatgtgctaagccctgtgyttgttgcataacaatgataataataatagcagctaacatttgttgaagacttacaaccacatgaatgagatcactatgggcaccatcctcatggaaactt

SEQ ID NO: 35169 - DNA, 201 bp, Homo sapiens
gccctgtgcttgttgcataacaatgataataataatagcagctaacatttgttgaagacttacaaccacatgaatgagatcactatgggcaccatcctcakggaaacttacaatctagcagggaaggcaaattataaaaataatcccaagtgttgtcagtgctatgtgaaactgtaggtataatgggagggtgttacaggt

SEQ ID NO: 35170 - DNA, 201 bp, Homo sapiens
cagtgctattaattctccttctctgaatgactcagggtaccctatagggggaagagcaagtcaaatgagcatagtggggaaagaaaaggaaatggcttttrtaaacatcttttactttgttttgattcaaagaccaaactagaactttaaaagttcaaaaataagaaagtatacatttttgctgttatttctcatcatttt

SEQ ID NO: 35171 - DNA, 201 bp, Homo sapiens
atcctcatggaaacttacaatctagcagggaaggcaaattataaaaataatcccaagtgttgtcagtgctatgtgaaactgtaggtataatgggagggtgytacaggtctaggggtcagtgaaggttttcctcaggaagtgacatttaagagttagctagacaaagaagtagggatgaggaaaaagtgtcccaggccgact

SEQ ID NO: 35172 - DNA, 201 bp, Homo sapiens
agacgtccaactgtctctctgacttatctggaagtatttctttttgtgaagccatatgtcctaacaggagcttcatcaccaactcagtgctattaattctscttctctgaatgactcagggtaccctatagggggaagagcaagtcaaatgagcatagtggggaaagaaaaggaaatggcttttataaacatcttttactt

SEQ ID NO: 35173 - DNA, 201 bp, Homo sapiens
aattctcagaacctcagaacctttgccttcacagagccaataagacagatatgggagctgatgagcaaatacaacagaaagtcatgcaaaggaaaaacacraagagacagtcctccagcagaattctgagcctgggtctgctggttccctgattccttccatgctttggaaaggaacgatgtgctggtgcattcagaaaag

SEQ ID NO: 35174 - DNA, 201 bp, Homo sapiens
cagtggaataccaaagaaatacaatgaacaacaggttttaagagttcctatatggcagtggttgcaggtatttatctttgtcaccctagtaactttgagarctctacagagtaggccttcaataagtgttgaataaatgaacgattttgctgattttaaaatattttttatacttgtaaacatggtaagtgtttctgcaga

SEQ ID NO: 35175 - DNA, 201 bp, Homo sapiens
agtggggccattagcatagcagatggtggaggaagtaaatgttggctttacatcacttgagaatacaatggtgctgaaatagtcaaacacacagggaatakggccagaggataaagtgtcccaaggcaacgttttccttcccagtgaatatatctctaaacccatggaatgcctcctcttgccatgaggaaatggagttta

SEQ ID NO: 35176 - DNA, 201 bp, Homo sapiens; identical to SEQ ID NO: 4638

SEQ ID NO: 35177 - DNA, 201 bp, Homo sapiens
caagcaatatataaataatcttattgatcctcatcttctttaacacttagtattacttcttatttatttatttttggacaatttaagttgatttttataarttcctgtttatattttagttctcatactgtattgtttattcacatggttttattatattattcaaaaattaaaaataaatttaaaaagtaagagagggtc

SEQ ID NO: 35178 - DNA, 201 bp, Homo sapiens
tgcaaaaacagccatagacaatacataaatgaatgggcatggctgtgttcccataaaacttgattgacaaaaactggtagcaggctagatttggcccatagaccgtaatttgctgacctctagtccctacaagagacttgatgcaatgactcaagttgtcagaagaacctaggctaaggctcatataaatcaaacatgatg

SEQ ID NO: 35179 - DNA, 201 bp, Homo sapiens
agaaatagcagacaaactaggctctgctgacagtgtgaaaaaggatgagatgagctactgctgcagtccccagcagttccactccactcagggcattcacktatctcaggagctttacctgagaaggcccacgtgcccagcactggccctgccctagcctgaagggaagcaatcttcaggaaagcggccacagatgaaggc

SEQ ID NO: 35180 - DNA, 201 bp, Homo sapiens
actcagggcattcacgtatctcaggagctttacctgagaaggcccacgtgcccagcactggccctgccctagcctgaagggaagcaatcttcaggaaagcrgccacagatgaaggcccaagacaagtcaattttccttggtaataaactagcaagtggcagagtcaggactaggaccaggtctctggaatccaactgctgc

SEQ ID NO: 35181 - DNA, 201 bp, Homo sapiens
gttagaaatgcagcaactccagcctcatcccaaacttactgcatcagaatcttcattttaacaagctccccaggcaattcactgattgaggtgaaattggmatctaggcagagcttatcattaatgccctctcaccacttctctctgggccttaactctccactttcagcctagtcatttcctgtgccctcagccaccact

SEQ ID NO: 35182 - DNA, 201 bp, Homo sapiens
tatagagtaatatttgtgacaggcaatgggtgaatatgttttgctaagagcctacacttacatcatctgatttttcaaaatacctactgcattccactctrcatttcaatttaatttcttttaatttgaaatgtgtcttgagtaactgccatggatttatcataatgcaatactttgtgtttcccacttttaaaattgtat

SEQ ID NO: 35183 - DNA, 201 bp, Homo sapiens
catcgcttcagttgttgtcatgagctagaatgcaagatgatgtagtagataatagcacatgctttgaaataagatagacatgggttctgagccagtccctrctacttacaactgcatgaccttatgcccattacttcacttctctgagcttcagtttactcatccctaagaggaagtaacaacagtgccctcttcacgaag

SEQ ID NO: 35184 - DNA, 201 bp, Homo sapiens
cctcaccagtgactcagggtcccaatggagtctgagagctgactgcttttcgccttttcacgtaactgaaatttatcatagctatctgcactttgcagtcyaaaatcaagagtagttatttaaggaaggatcccagagacattaggcttcatgaattactggttttaaaaaactgaaatgaacctcatcttttttattgtc

SEQ ID NO: 35185 - DNA, 201 bp, Homo sapiens
tttaatttcttttaatttgaaatgtgtcttgagtaactgccatggatttatcataatgcaatactttgtgtttcccacttttaaaattgtattaaaattaytggaaaaagtaacctggagacagccttgactgaaaaaaacttgaatgacattaagtcagagttaccatatctggaatatttgttccatgttagatgtagc

SEQ ID NO: 35186 - DNA, 201 bp, Homo sapiens
gtcacaggagtctgttgtacagattatttcatcacccatgtattgagcctagttttcattattttttctgatcctctccctcctcccactcttcaccctcyagtaggctccagagtctattgttcccctctatgtttccatgagaaagcacaaaatttctagaaacagaaatgtgtgtatgattttttaatcaatacatat

SEQ ID NO: 35187 - DNA, 201 bp, Homo sapiens
catgaattactggttttaaaaaactgaaatgaacctcatcttttttattgtcatattgctaccacaaatatttgtggaatattggcaagtgataacttgtkgctacgtagctgtcaaggtacattatggtactgtggcagtcgaactttgattggagaaacagctttcagctcaatttttattttattgccaggattccat

SEQ ID NO: 35188 - DNA, 201 bp, Homo sapiens
gtattaaaattactggaaaaagtaacctggagacagccttgactgaaaaaaacttgaatgacattaagtcagagttaccatatctggaatatttgttccawgttagatgtagcatgtgctttacataaattatttccaactcttgtaatgaaggaagtattttctctattttgctggtgacaaaactaaagcatagagtta

SEQ ID NO: 35189 - DNA, 201 bp, Homo sapiens
gcaaacaaaagaaagaagtggcagaagagatggaggacaacagatatgagcttatgaaacaggagtgagcttattttggtgtggtagggctgagtacctgraagagttccaaatctgaatcctcaaaacttgtgaatatgttattttttatggccaaaaggactttgaagatgtggttatgttaagcatcttgagatagaa

SEQ ID NO: 35190 - DNA, 201 bp, Homo sapiens
ttccatctgtttgcttctaaagatagagcaatttctgatgtaaaaagcatgtagccatgtctgcacatttctatgtacatgtttctgcctgtgggggttasaaaagttccgaattattattaagtttcaaagaattatgaaaaaaatgttaaaaaacacttctaagaataatttttatttaagccatttctttttctccct

SEQ ID NO: 35191 - DNA, 201 bp, Homo sapiens
caaatggctgagcaaagtcaaccagcgagagagaagaaggatatgaggaaatagatcttgtgaggcctcatagcccattgcaaggactctgaatttactcygcaagagacagaaaaccatgaccaggcattgagcacaggagtgacatgacagtcattctcactgctgtgaagaagacagaaggggttagggaaaacaact

SEQ ID NO: 35192 - DNA, 201 bp, Homo sapiens
tggatttagaagtaattaaaggagctggtagataaactcattggaaagatgtcatgctgtcttataagagtgcctgtctcccctggtctgtagtctagacrtcagtgagaagccaagacagctaagtcagcacctaggtagcttgtgcggcccttagtgttcgggttctgtcccctaaacaaaagccggctgtcagccttc

SEQ ID NO: 35193 - DNA, 201 bp, Homo sapiens
cttataagagtgcctgtctcccctggtctgtagtctagacatcagtgagaagccaagacagctaagtcagcacctaggtagcttgtgcggcccttagtgtycgggttctgtcccctaaacaaaagccggctgtcagccttcatgcttccttcccattaatgaatcattttcacttttctcctctggtcttaaatataggaa

SEQ ID NO: 35194 - DNA, 201 bp, Homo sapiens
atgtgcaaaccacaggcctgcccttaactctttccttaccttctagtttcagattattcaaatcatggaggaaaagattagatcacaacacgttgacttcrctgtattaccatacaaatgaaataacttagtacaaactgtgatctggggactcttgatctaaactgggaactgctgttgactgcattttaaactctaaaa

SEQ ID NO: 35195 - DNA, 201 bp, Homo sapiens
ctgtctcccctggtctgtagtctagacatcagtgagaagccaagacagctaagtcagcacctaggtagcttgtgcggcccttagtgttcgggttctgtccyctaaacaaaagccggctgtcagccttcatgcttccttcccattaatgaatcattttcacttttctcctctggtcttaaatataggaatgatccagagaaa

SEQ ID NO: 35196 - DNA, 201 bp, Homo sapiens
tggatatgtgacaatctaccaagaatttctgcataacataaagcatttaaaacattagttgtatagtgcataatttgttggtattcctccatgcaacatgcagagtacagtatcagatacaaactatgttttttcttcacagtgtagtaaatatatactaatgtaaattaacaataaaatgctaaagaaacataatgaata

SEQ ID NO: 35197 - DNA, 201 bp, Homo sapiens
gatattaggatggttccccttacaccatgttgccattttcatcccgttttcactacataaaactcacctcagtgaattcatctcaagaaagttttgctgtrcttccccattaatgctcttgaacacctgcctgctgtgcttccccattaatgctcttgaacacctgcctcctttctcctttaactcttctttggttatctt

SEQ ID NO: 35198 - DNA, 201 bp, Homo sapiens
accaagaatttctgcataacataaagcatttaaaacattagttgtatagtgcataatttgttggtattcctccatgcaacatgcagagtacagtatcagayacaaactatgttttttcttcacagtgtagtaaatatatactaatgtaaattaacaataaaatgctaaagaaacataatgaatataaataacctttagaaa

SEQ ID NO: 35199 - DNA, 201 bp, Homo sapiens
agaaaacacagatgtgaacaaaagcacatgttaaattgcgagcatttggatttgttctggtttgactctccaacatgggttcttagatcagtagttctcaktctgagtcagataataatttttaaaaagcttcatctctgagtaagccaattttgaaatttgactgattttagctaccaaccacacagctgggaagaactt

SEQ ID NO: 35200 - DNA, 201 bp, Homo sapiens
cgggttctgtcccctaaacaaaagccggctgtcagccttcatgcttccttcccattaatgaatcattttcacttttctcctctggtcttaaatataggaaygatccagagaaactagacgccttcatcatggacaaagcccttctggattatgaagtgtcaatagatgctgactgcaaacttctcactgtggggaagccat

SEQ ID NO: 35201 - DNA, 201 bp, Homo sapiens
gggttctgtcccctaaacaaaagccggctgtcagccttcatgcttccttcccattaatgaatcattttcacttttctcctctggtcttaaatataggaatratccagagaaactagacgccttcatcatggacaaagcccttctggattatgaagtgtcaatagatgctgactgcaaacttctcactgtggggaagccatt

SEQ ID NO: 35202 - DNA, 201 bp, Homo sapiens
gtatcagatacaaactatgttttttcttcacagtgtagtaaatatatactaatgtaaattaacaataaaatgctaaagaaacataatgaatataaataacytttagaaaaatgaaatacatgagcaaggcaattttttgaatgattacttactagttaaagagttgcctaagtgagatggggtgggctagagtaagtttgt

SEQ ID NO: 35203 - DNA, 201 bp, Homo sapiens
cctggcctcaagtgatcctcctgcctcagccttccaaaattcagggaaatctgtattttctaacagccaaatactctagcaaatctgacagaaaaactagratgattacattttacaactgggagggccccaatattgatctaatgcaatctactcatttgataaacaagaaagcccagggacattacataacattttcat

SEQ ID NO: 35204 - DNA, 201 bp, Homo sapiens
tttaatgccctttaaggtcccaaacaaaaccttgggatccttgtttgggatctcaggtctttttctccactggcagcaaatttttccttctaatgtgatcwcccaatcaatcaaacttcagaaccaaagaaagattgctttgtcggtagctcctttcattctgaatgacggttgatatatggagctgatagtttgaaccag

SEQ ID NO: 35205 - DNA, 201 bp, Homo sapiens
atttttccttctaatgtgatctcccaatcaatcaaacttcagaaccaaagaaagattgctttgtcggtagctcctttcattctgaatgacggttgatatayggagctgatagtttgaaccagcaaatttcacttctcccaattcccagcttcccttcctgatagtgcatgctggctctcgagacagccatgctcacttgac

SEQ ID NO: 35206 - DNA, 201 bp, Homo sapiens
tagagatgaaaaaagcatgaactttgaagagagaatataaaatctgggtttgcatcccatttctcagcaaatgaattgacctcaccaacctcagtttcatsatctataaaataaggagagctgtctattcatgaaattaagaaatcatgtatgccaagtacctggcacggatgtcactcaagataaaagctctagaataat

SEQ ID NO: 35207 - DNA, 201 bp, Homo sapiens
ttcaccattctgcatttattttgacttaaaagggaaaaataaggcaaataagggacagtggctccacactgagtttgaaaccctttcatgagtactcatcrgtacgcagtatatagcaaagcaaaccaaaactattaaggatgcgaaagcatgtggaaagtctttggtcgaattaaaaaccataaaccaggggcacaaata

SEQ ID NO: 35208 - DNA, 201 bp, Homo sapiens
gttacttcgatatatggggaaagattgtttctacttagggggtgaaaaaaagaaagagtaataaggtttgaatcacacattggcccagtaaagcagacttyggaagatctggcagcagaaccatgaagcagaattaatttaatcatgaaaaactttactgactactatgtgcctctgctagatattagggattagactgtt

SEQ ID NO: 35209 - DNA, 201 bp, Homo sapiens
cattctgcatttattttgacttaaaagggaaaaataaggcaaataagggacagtggctccacactgagtttgaaaccctttcatgagtactcatcggtacrcagtatatagcaaagcaaaccaaaactattaaggatgcgaaagcatgtggaaagtctttggtcgaattaaaaaccataaaccaggggcacaaatacatat

SEQ ID NO: 35210 - DNA, 201 bp, Homo sapiens
attctgcatttattttgacttaaaagggaaaaataaggcaaataagggacagtggctccacactgagtttgaaaccctttcatgagtactcatcggtacgsagtatatagcaaagcaaaccaaaactattaaggatgcgaaagcatgtggaaagtctttggtcgaattaaaaaccataaaccaggggcacaaatacatatt

SEQ ID NO: 35211 - DNA, 201 bp, Homo sapiens
accacacccggcgaattttgtcgtatttttattagagaaggggtttgactatgttggccaggctggtctcaaactcctgaccttgtgatccgcccgcttcrgcctcccaaagtgctgggatttcaggcatgagccactgcgcccggcccaccacttctattctcttgtcccagcttctgtcagaaagagaatcggtgtact

SEQ ID NO: 35212 - DNA, 201 bp, Homo sapiens
gatccgcccgcttcggcctcccaaagtgctgggatttcaggcatgagccactgcgcccggcccaccacttctattctcttgtcccagcttctgtcagaaaragaatcggtgtactaacctgcttaaacccctaaatggcagcagtatgtcccaaacttcaggcattcagttactgccctcataatttttgccatatctctg

SEQ ID NO: 35213 - DNA, 201 bp, Homo sapiens
gaccatcctggccaacatggtgaaaccccgtctgcacaaaaaaaaaaaaaaaaaaaaattagctaagcatgctggcaccgcgactgtagtcccagctacgygggaggctgatgcaggagaatcgcttgaacctgggaggcagaggttgcagtgagccgagatcgtgccactgcactccagcctggcgagactccgtcacaa

SEQ ID NO: 35214 - DNA, 201 bp, Homo sapiens
caacacagcgagactccgtctcaaaaaaaaaaaaaaaaaaaagacatgataaaaggtcaaggggtgcaaatagttgtacatttaattttacatatatatawgtatgtataaattgagcacctactatgtacaaggcaatatgccaaatgccatatgtaagggaaaagtgaaagactgaacacaacctgtaaactccttaaa

SEQ ID NO: 35215 - DNA, 201 bp, Homo sapiens
ttgctaagatttcctgccattaattttaaaaagaaacaaaagtaatttcttctccttattgcgtatgagatcaaagtttaacaaatgaggtcttaatagcrataccaagaaatgggaagccataaatgagactgcctatatggcagtagacaagcttgacaaaactcctcaaccaaatgtatgattgtgttacttctgata

SEQ ID NO: 35216 - DNA, 201 bp, Homo sapiens
tctaaaagaggattaagacagaggaggaaataaaaaggaagaaggaaaggaagaaagctaaaagaggagggcaaaagaaaacacaggagcaatttatacawatcaaaatgaggagtgaggaaatgaagcttccatttctctcacctcaagatcctgctggcagctcaagcctggacacccagagctacctattggatcctg

SEQ ID NO: 35217 - DNA, 201 bp, Homo sapiens
tgggtgattcggaggttatggtgcaggagaatgatatggtcatatttgtattttaggaagaaaactggcaacagaatagggagctgaagccaagaaaacasttaggaataatttgttcctgctagctaaatgtggagcttgccttccattgctttttgcttctaaaagaggattaagacagaggaggaaataaaaaggaag

SEQ ID NO: 35218 - DNA, 201 bp, Homo sapiens
tctctcatgcctattggatttgtttctctgtctaatactaaatgctcaatatgattagctaattcaacttcctatttagcaagaaagcaacaatttcatcygtgactcttaagccatattattgatttttaaatctgtcctatgggtgattcggaggttatggtgcaggagaatgatatggtcatatttgtattttaggaa

SEQ ID NO: 35219 - DNA, 201 bp, Homo sapiens
ctcattagatgcttctaaactatcatttaataattttctgaagaaatatgtctcaagtttgtgtaaggattaatttcaacatctggaatttctcagtagarttgtttgtaggggtgagtgtgattatatgaattaatcattatccattgtaggggtcttcatttcactcccatgtctctctctctcatgcctattggattt

SEQ ID NO: 35220 - DNA, 201 bp, Homo sapiens
tcaaacgtttcaaggtgtggctagtttctgagcttcccttgcagaaaggaaattaaaagccacctgaggttgtttgcaaaaaaaaaaaaaaaaaaaaaaaatgcaccataccccatcctatcatcccttcaaatgacacccaattccagtttcagagcagcatgggacttgaacttttgtatgttcatgactctttattgc

SEQ ID NO: 35221 - DNA, 201 bp, Homo sapiens
tttgtcctggattttgacaaaaattttactatcaggcttgaattttagtgttataagttttcataatctttgtgtgtgtgtgtgtgtgtgtgtgtgtgtgkatgtgtgtgtgtgcatgtgtatgcatgtgcatatgtgtgtgcctttgtccttatatggggagaaattggaaaacactgcatctgaggctgctaaatcaat

SEQ ID NO: 35222 - DNA, 201 bp, Homo sapiens
ttatttcatttacagtaattttcatgacttctagttataggaagtgtttattcatatagttagttacatattgtctatctctcatccaccatagagacaayaggaaatgccatgcagaggtcatggctcaaggtaggagcttaaaattatttttcatgattgaataagtgttcagtaaaggcttctatttccttattgact

SEQ ID NO: 35223 - DNA, 201 bp, Homo sapiens
atcaaacgtttcaaggtgtggctagtttctgagcttcccttgcagaaaggaaattaaaagccacctgaggttgtttgcaaaaaaaaaaaaaaaaaaaaaaaatgcaccataccccatcctatcatcccttcaaatgacacccaattccagtttcagagcagcatgggacttgaacttttgtatgttcatgactctttattg

SEQ ID NO: 35224 - DNA, 201 bp, Homo sapiens
gaatagtccagtggagtattgaacctcagtgttacataattgctccagggaagcctattttacccatttttagtgttaaatacagctcactcactggtcaygtaacactctaagactgacgaaggcttgaatcaaagcaaagcctaaatgttactgaggctaggagtataacaccagccttgggttattttttccaagtag

SEQ ID NO: 35225 - DNA, 201 bp, Homo sapiens
tccaatcaaggccaggaactcagtttttaaggtttcttcggggtccccatggacaagagaaagttcgttcagtcggttggagagcttttaattttatttttatttctcaccctctaggcattgggtgctcctcggcagccctcagtccaaccctggctgaatttctttcatgatgtataatgaaggtcacagaacacacag

SEQ ID NO: 35226 - DNA, 201 bp, Homo sapiens
atccaatcaaggccaggaactcagtttttaaggtttcttcggggtccccatggacaagagaaagttcgttcagtcggttggagagcttttaattttatttttatttctcaccctctaggcattgggtgctcctcggcagccctcagtccaaccctggctgaatttctttcatgatgtataatgaaggtcacagaacacaca

SEQ ID NO: 35227 - DNA, 201 bp, Homo sapiens
tgtgaggattaagtaatacatataaagcatgtactgtaggaacttgtttggcacataagaagtgctcaacaaattattattatatagtatattgattaatrcattgagaccaattaactgtaaaattcttccaggatagtcttcctaagtctcaacttctcccacacatttctctccccactttgatatgctgaggctaag

SEQ ID NO: 35228 - DNA, 201 bp, Homo sapiens
tgtttggcacataagaagtgctcaacaaattattattatatagtatattgattaatgcattgagaccaattaactgtaaaattcttccaggatagtcttcmtaagtctcaacttctcccacacatttctctccccactttgatatgctgaggctaagggaaacccattttatagtacctttatagttgggaccattacaat

SEQ ID NO: 35229 - DNA, 201 bp, Homo sapiens
ccatgtctgctggggtgaatgtctaattcttctacctcctatggtgtttttcctgtgggaattaaacctctcccaaacacgttcttcttggagatgcctayattaaataataaaaatgttcatcagggcggagaagtgattgaatgtcattctgactgccccagaaagcagagcccatgcagtagaggagctctagtgact

SEQ ID NO: 35230 - DNA, 201 bp, Homo sapiens
tcattcattctagtgtaactgctaaatcacacctgtggaaaacccaccatatgtcaaggtatggtgatgggaacctaaaagagtgcaaggccctgtgaaaragggtcctcattcactgcggtggacagaactcctgaccacctagaatttaccatgttataagatgtagaacaaagctggaaaagtaaggccttggggaaa

SEQ ID NO: 35231 - DNA, 201 bp, Homo sapiens
tgcttggcataccattttcccttgtgtctgcctgaaattcaatcttcatcctttgctcttctgtgcatggtacactggccactctctccctaccatgattracaactttcacttctatgtgacttttctacggtcatctttctagatctgtcatacagttatgtaattatttgttaacatgtgtctctctcctcctctctc

SEQ ID NO: 35232 - DNA, 201 bp, Homo sapiens
atgaactatatttttaatctctcttcctcaatcatgttgaaggcaaaaaaaaaaagggtttgggtttttttttttactattctgtccaatagctaaaacawaatgtagctaattagcttctttgacatggctgagcaaagagattaacagtatagtaacattttggaaagcaagtaaagccacacagtgtgaggatacaga

SEQ ID NO: 35233 - DNA, 201 bp, Homo sapiens
ctaaaacaaaatgtagctaattagcttctttgacatggctgagcaaagagattaacagtatagtaacattttggaaagcaagtaaagccacacagtgtgargatacagagtctaagctgactaataaaactctgacaacaaattaactccatttttatgttcctccctcattccttcccctgcctcccttgccctgcatta

SEQ ID NO: 35234 - DNA, 201 bp, Homo sapiens
acatttgttgaagacttacaaccacatgaatgagatcactatgggcaccatcctcatggaaacttacaatctagcagggaaggcaaattataaaaataatyccaagtgttgtcagtgctatgtgaaactgtaggtataatgggagggtgttacaggtctaggggtcagtgaaggttttcctcaggaagtgacatttaagag

SEQ ID NO: 35235 - DNA, 201 bp, Homo sapiens
atttgcgctggcgggtgtcatagcgtgtcttcacacactcaaagcagaagacatgaaaacacttagtaagaacagcatcctttttacgcatgttacagcayggacaggtcaagcgtgcctaaaaagaaaagatgtcagagtttgaacaaccatgaaagtttatgatccaaatggctctcatatactacacaaccaagaaga

SEQ ID NO: 35236 - DNA, 201 bp, Homo sapiens
gtaggaacccttgtcagccgaatgatctggctggaattctttgaaattacctctactccaggtcacttaagtcatgccaagagatgagtctaaaattttcyctaagtcactgcggggcggggtcggggggactcacataaggtacactggaaaatgtatattccctcaagactctattttgatgaatacagctcaaattta

SEQ ID NO: 35237 - DNA, 201 bp, Homo sapiens
cctccagacttaagcaactctcgttcctcagtttcctgagtagctgggattacaggcacgtgtgacccctccgtgcaatatatatatatatatatatatattttagctgagatggggtttcaccatcttagccaggctggtctcaaactcatgacctcaggtgatctaccacctcagcctcccaaagcactggaattaaag

SEQ ID NO: 35238 - DNA, 201 bp, Homo sapiens
gcctccagacttaagcaactctcgttcctcagtttcctgagtagctgggattacaggcacgtgtgacccctccgtgcaatatatatatatatatatatatattttagctgagatggggtttcaccatcttagccaggctggtctcaaactcatgacctcaggtgatctaccacctcagcctcccaaagcactggaattaaa

SEQ ID NO: 35239 - DNA, 201 bp, Homo sapiens
tgcctccagacttaagcaactctcgttcctcagtttcctgagtagctgggattacaggcacgtgtgacccctccgtgcaatatatatatatatatatatatattttagctgagatggggtttcaccatcttagccaggctggtctcaaactcatgacctcaggtgatctaccacctcagcctcccaaagcactggaattaa

SEQ ID NO: 35240 - DNA, 201 bp, Homo sapiens
atcagcctaaaggtgataaaagacttatttcacttcatggtaagaccatagatataatttcaggaacagaaaataaaaatgtcaatgtcaacaaataatawtattaacatgtattacatacctgctatagtctagggactatgctatctgctttaaattgaattttcctcacttaaactttactgcatccatacagatgag

SEQ ID NO: 35241 - DNA, 201 bp, Homo sapiens
ctgcctccagacttaagcaactctcgttcctcagtttcctgagtagctgggattacaggcacgtgtgacccctccgtgcaatatatatatatatatatatatattttagctgagatggggtttcaccatcttagccaggctggtctcaaactcatgacctcaggtgatctaccacctcagcctcccaaagcactggaatta

SEQ ID NO: 35242 - DNA, 201 bp, Homo sapiens
catccaatcaaggccaggaactcagtttttaaggtttcttcggggtccccatggacaagagaaagttcgttcagtcggttggagagcttttaattttatttttatttctcaccctctaggcattgggtgctcctcggcagccctcagtccaaccctggctgaatttctttcatgatgtataatgaaggtcacagaacacac

SEQ ID NO: 35243 - DNA, 201 bp, Homo sapiens
gtcattaattatgcaactatcattcttttttaaagtgttgttcatgaagaaatacaagtttcatcatttcacaagaattgctacatatgggaggatgagcraagaaaacagctgggaagccatgtgcacactgggcagcaggctggagactccctgactcccatggcccagaaacacagggaatgtcattctaactcatgc

SEQ ID NO: 35244 - DNA, 201 bp, Homo sapiens
ccatccaatcaaggccaggaactcagtttttaaggtttcttcggggtccccatggacaagagaaagttcgttcagtcggttggagagcttttaattttatttttatttctcaccctctaggcattgggtgctcctcggcagccctcagtccaaccctggctgaatttctttcatgatgtataatgaaggtcacagaacaca

SEQ ID NO: 35245 - DNA, 201 bp, Homo sapiens
tctactaaaaatacaagaaattagccaggcgtggtggctcgcacctgtagtcccatctacttgggaggctgaggcagaagaatcgcttgaacccaggagcyggaggttatagtgagacaaagatcccgccactgcactccagcctggctgagagagtgagactctgtctcaaaaatacataaataaataaactttgtgtag

SEQ ID NO: 35246 - DNA, 201 bp, Homo sapiens
tcccatccaatcaaggccaggaactcagtttttaaggtttcttcggggtccccatggacaagagaaagttcgttcagtcggttggagagcttttaattttatttttatttctcaccctctaggcattgggtgctcctcggcagccctcagtccaaccctggctgaatttctttcatgatgtataatgaaggtcacagaaca

SEQ ID NO: 35247 - DNA, 201 bp, Homo sapiens
gaaagaaaactttctaataaatttagtgtaggccaggcgcagtggctcacacctgtaatcccagcactttgggagaccaacgtgggcagatcatgaggtcrggagattgagaccatcctggctaacatggtgaaaccccatctctactaaaaatacaagaaattagccaggcgtggtggctcgcacctgtagtcccatcta

SEQ ID NO: 35248 - DNA, 201 bp, Homo sapiens
agacctcccatccaatcaaggccaggaactcagtttttaaggtttcttcggggtccccatggacaagagaaagttcgttcagtcggttggagagcttttaattttatttttatttctcaccctctaggcattgggtgctcctcggcagccctcagtccaaccctggctgaatttctttcatgatgtataatgaaggtcaca

SEQ ID NO: 35249 - DNA, 201 bp, Homo sapiens
tttatgcaaaatactaaggtactttctaggatccataatgataatagatgtgttattttagcatttaaaatcttgataaaacttctgacatctttctttgycttttcctttctcttaacattttcttctttatttactgtcatttctatttttacttcattaggataccattctatgtggattactgaaatttcagttatg

SEQ ID NO: 35250 - DNA, 201 bp, Homo sapiens
gggtactagacttaatacgtcggtgatgaaataatctgtacaacaaacccccatgacatatgtttacctatgtaacaaatctgcacatcctgcacatgtastcctgaacctaaaagttaaaagaaagaaagaaagttaccaggcacttcagaaactaattctgggcccacctcacttagattcatagtaatctgagcttta

SEQ ID NO: 35251 - DNA, 201 bp, Homo sapiens
acaaccacagtttgggagtagtcaagtcaattataacaaaaacaataggtgatagtattaggcaactaaagttaataaataaaataatatttagaaaatartatttttagaaatattaaaatagtttgttagaaaataagttcttttaaaagcataatgcaaacttgttatatcctatgtttagaactctgaagaatatgt

SEQ ID NO: 35252 - DNA, 201 bp, Homo sapiens
gagggtgggaggagggagaagatcaggataaacaactaatgggtactagacttaatacgtcggtgatgaaataatctgtacaacaaacccccatgacataygtttacctatgtaacaaatctgcacatcctgcacatgtactcctgaacctaaaagttaaaagaaagaaagaaagttaccaggcacttcagaaactaattc

SEQ ID NO: 35253 - DNA, 201 bp, Homo sapiens
atcacaccactgcactccagcctgggtgacagagcgagattccatctcaaaaaaataaataaataaataaataaataaataaataaataaataaataaatagagtgtcattatggtagaggaacaaggccaccagactgagaatcagaccggacttctctgctgccgtgtcaactaccgtacctaccccagtagccaatga

SEQ ID NO: 35254 - DNA, 201 bp, Homo sapiens
gatcacaccactgcactccagcctgggtgacagagcgagattccatctcaaaaaaataaataaataaataaataaataaataaataaataaataaataaatagagtgtcattatggtagaggaacaaggccaccagactgagaatcagaccggacttctctgctgccgtgtcaactaccgtacctaccccagtagccaatg

SEQ ID NO: 35255 - DNA, 201 bp, Homo sapiens
agatcacaccactgcactccagcctgggtgacagagcgagattccatctcaaaaaaataaataaataaataaataaataaataaataaataaataaataaatagagtgtcattatggtagaggaacaaggccaccagactgagaatcagaccggacttctctgctgccgtgtcaactaccgtacctaccccagtagccaat

SEQ ID NO: 35256 - DNA, 201 bp, Homo sapiens
gagatcacaccactgcactccagcctgggtgacagagcgagattccatctcaaaaaaataaataaataaataaataaataaataaataaataaataaataaatagagtgtcattatggtagaggaacaaggccaccagactgagaatcagaccggacttctctgctgccgtgtcaactaccgtacctaccccagtagccaa

SEQ ID NO: 35257 - DNA, 201 bp, Homo sapiens
cctgcctcccttgccctgcattaccaccaccctttcatttattttatccttggttttgttaaaaataataagtattatcacaggctgggcacgtggctcayacctgtaatcccatcactttgagaggctgaggtgagtggactggttgactccaggagttcaagaccagcctgggcaacacggtgagaccctatctcaaca

SEQ ID NO: 35258 - DNA, 201 bp, Homo sapiens
ctgtggttccagctacttggggggctgagccgggaggatcacttgagcccaggaggtcaaggttgcagtgagccatgatggcaccatggcactccagcctrggcaacagagcaagaccctgtctccaaaaaaaaaaaaaaaaaaaaaaaaaaagtatcacatatatatgcatatatatgtattcctaaaactatattgttt

SEQ ID NO: 35259 - DNA, 201 bp, Homo sapiens
tatttgccaagaactcccaaagttgtatttcaacacagacccttcttctgagctccaggccatgtatccaccttcctatttgacatctccacttgaatatyctccaggcatctgaaatttaagttgtcaaaagctgaaccttgatcttccctcctaaatctatttttcctcctgtgcctcacatcttggtaatggctcctc

SEQ ID NO: 35260 - DNA, 201 bp, Homo sapiens
tccagctgagatctcccttcttcagactctgataatcccagaccaatatgaatcatatctcccttcataatctcatatatctcacattatgtcatagcacytgtcataatttataaatcatactatttctaaacatatactcaattgagtttttgttttagtgtgtcccttcattaaactgtgagagcttggtgagggaca

SEQ ID NO: 35261 - DNA, 201 bp, Homo sapiens
ttttatattgatcaaacatttgaaggaagcatagaggaaaatggggacttagggagctagcatgtctgtttcctaccatgtaatagaaactgtacccagarcgtagttctcactatgaccctgtaaggtagacatttttatctttatttagagagatttgcgtgtcttttcctaaaagaaatgaacttgggcctataccag

SEQ ID NO: 35262 - DNA, 201 bp, Homo sapiens
acagcctctgcctgctggatttcccattgctcaatacactaagtctcaaacggctatttttttcttaactttctcccagaaaaggtcagaaggagaaagcrtaattattaatgcttcgcttgccatcccttttgcttcaaatgtcatacactgccgggctctgttagtgtggggaaccaggattagctttgaaatcagaca

SEQ ID NO: 35263 - DNA, 201 bp, Homo sapiens
gcagatgaatgtgggatggggtcagccacagaaaagtggccgcaacccaactgtctgagagtgtgcagcctctgcacttccagacaggggtccagcctgcrgggagagagaccatgcccttgcacttgttgggaaggagagagaagtacaatcaagtccacttaaatgaccctggtcttgggagtcagaccaccctggctc

SEQ ID NO: 35264 - DNA, 201 bp, Homo sapiens
cttggaacccagagaccttgattgcatgggatagggaaaaggagaagcatattttgaaacagtccaaaagtaaatcattaaactctccagtgattttattwtcaggggaagtgcgcagcaggaaacagtaccccatatctgaactttccccatcttttgcttcaccctattcctgaaaccaccagcctccatctgaccttc

SEQ ID NO: 35265 - DNA, 201 bp, Homo sapiens
agggcctgactgaaagtgtgaaatatatttaatgagatcgtttatggcgaacacctggcttgacaaatgttctctccttccctgattatagaaccatgcaygcagaaaaaatacatatatttggtgaataataagcatagacaagaaattacagttggtgcacccaccctcttaggcccatcttggtcccatctcgaaaaa

SEQ ID NO: 35266 - DNA, 201 bp, Homo sapiens
atttgcagaggggacaacagactttctgacctgagaactggagaatttttaaaacaaaatctctcattccagcccaacctatttaactttttgtggaggawttttacatggaggaagtgagcacatgtcatgctagccaagaggacattattgtcattaaagagaggcattatttatacaccctgcaatgtgcacattaaa

SEQ ID NO: 35267 - DNA, 201 bp, Homo sapiens
tataattaatggaggtaaatcaattggcaaataagaatgtaaatgaatatgggtatatatttatctcctatggtttgtgttttaaatgatgattaaccatyagcctaaaggtgataaaagacttatttcacttcatggtaagaccatagatataatttcaggaacagaaaataaaaatgtcaatgtcaacaaataataata

SEQ ID NO: 35268 - DNA, 201 bp, Homo sapiens
aatttccatgtgtgtgtttaaaaaaaaactgacatttctatgtgataattaacaagattgtgatgacaaagccattcagtcccctcattgtcctttcctcyaattctgctcttccttccactctttagtgtttccaaattccatgcgaaaaaagttgctaaataaatggacttgagaattcttctggatgatttggaaaaa

SEQ ID NO: 35269 - DNA, 201 bp, Homo sapiens
tcagcctaaaggtgataaaagacttatttcacttcatggtaagaccatagatataatttcaggaacagaaaataaaaatgtcaatgtcaacaaataataawattaacatgtattacatacctgctatagtctagggactatgctatctgctttaaattgaattttcctcacttaaactttactgcatccatacagatgagg

SEQ ID NO: 35270 - DNA, 201 bp, Homo sapiens
gcaactgcttttggcatcttcatcatgaaatctttgtctgtgccaatgtcctgaatggtattgtcaaggttttttgtctgtttgtttgtttgtttgttttyctagggttttcgtagtttggggttttacagtgaggcttttaatccatcttgagttgatttttgtatatggtgaaaggtaggggcccagtttcaattttct

SEQ ID NO: 35271 - DNA, 201 bp, Homo sapiens
acttgataatcagcagggtgcaatgagtcaacattaaaaggaaagcctcgccaaagaactatcaagggagaagtgagcaacttcggccttcatgctcctttccactcccctccctagcagaaacattaagcttgaagaattgtagcaatggcctttcccaggagaattctgaaagggagtattccaaaaaggaagccaaac

SEQ ID NO: 35272 - DNA, 201 bp, Homo sapiens
ataatcactcaccttgatatgcattttacaatttgcaaagtaatttcagtcacttaaccttgcatatacgtaaaaacctaaaacaactttgagaggaaggyattattctcccaaattacaaatgaacaaactgagcgttgggtaatttattttaccgagcaagtaaaaaaataaaattttctgattttaagtccagttctc

SEQ ID NO: 35273 - DNA, 201 bp, Homo sapiens
tatcctaaaatatgaatattcagtattctatacaatatagtatgatggctagaaacatggactttgaagacagttctatatttgaatcccagctctaccarctgtgataccaggacatattatttgagcattttgaggctcagcttctacaaactggggagatagtcatatatactttataggattgtggtaaaaatgaag

SEQ ID NO: 35274 - DNA, 201 bp, Homo sapiens
cccaatgtgagaaccttgacctattcaccttccatctctttgtagccccagagctatctagccacagtttctctggaagataaactcacttttttttttttcctgaattccagggctttatctgctctccagagtcacttaggaaattgcaggtccaattctgccgaccagactctggcaattttcaaagaggaattttaa

SEQ ID NO: 35275 - DNA, 201 bp, Homo sapiens
taatatatacattgatgccactgatgtctgcaaaagattaccagtatttgcatatacttgacattctctatacaacaagtgaatttttatgttaatttgtrtgtatgcatgagactcagtaagaattctccaaaatagaaagatttgttggaataccaaatagctactatctgtcatttaagattttttgatagttgagac

SEQ ID NO: 35276 - DNA, 201 bp, Homo sapiens
atagatgatagacatctagatgataaggataaaaatgtagatagatagatgatagatagatagatagatagatagatagatagatagatagatagatagatggatgcaagctggtcaatgcccttggtaattaaatttacttctgattatcctggaagccatgacaaaaagaaacataggatgggttggaaatttttttaa

SEQ ID NO: 35277 - DNA, 201 bp, Homo sapiens
cactgccctggaaaagaaccactaacaagttgaagaagtattgctggggtgatgcttacaggaacctagagcagtcaggtaacccacagaaagcaaatcaragacagaaaagacagacaagaagcagcaaaccctttctcttccttcagtcttgcagtctccccctagtggcctctactggcaaagcccaccagaaccaga

SEQ ID NO: 35278 - DNA, 201 bp, Homo sapiens
gatagatgatagacatctagatgataaggataaaaatgtagatagatagatgatagatagatagatagatagatagatagatagatagatagatagatagatggatgcaagctggtcaatgcccttggtaattaaatttacttctgattatcctggaagccatgacaaaaagaaacataggatgggttggaaattttttta

SEQ ID NO: 35279 - DNA, 201 bp, Homo sapiens
gcccatggtccacccacaccattattttattaactgcttattattccaggctcttggatatgcatagaatgttgacattttctttttttttttttttttttaccatttttgtcacaaaatgtcccatgataaaggtctttattcacaggctcttatttccttatcatacattcctggaagaggaaaataatactagttgat

SEQ ID NO: 35280 - DNA, 201 bp, Homo sapiens
agatagatgatagacatctagatgataaggataaaaatgtagatagatagatgatagatagatagatagatagatagatagatagatagatagatagatagatggatgcaagctggtcaatgcccttggtaattaaatttacttctgattatcctggaagccatgacaaaaagaaacataggatgggttggaaattttttt

SEQ ID NO: 35281 - DNA, 201 bp, Homo sapiens
acagtatttcaatggctcctaactgacttaagaggccattgaaacactgaaatttaaatggcctcctaacccatcctttaccaccttttttttttttttttaagatggagtctcacactgttgcctgggctggagtgcagtggtgcaatctcagctcactgcaacttctgcctcccaggttcaaacgattctcctctctca

SEQ ID NO: 35282 - DNA, 201 bp, Homo sapiens
cagatagatgatagacatctagatgataaggataaaaatgtagatagatagatgatagatagatagatagatagatagatagatagatagatagatagatagatggatgcaagctggtcaatgcccttggtaattaaatttacttctgattatcctggaagccatgacaaaaagaaacataggatgggttggaaatttttt

SEQ ID NO: 35283 - DNA, 201 bp, Homo sapiens
gtggattaacattaggctctctgctacttattcaaatttctgcagccagcttggatttctccccaaaaatggatttttcttttccactgcatcatcaggcwgcaaattttctgaacctttgtgttctgtttcccttttaaaatggaatgcttttaacagcacccaagtcacctttcgaatgctttgctgcttagaaatttc

SEQ ID NO: 35284 - DNA, 201 bp, Homo sapiens
tctgttttttacatttgttacatcagccctagggaactaatacagatagatgatagacatctagatgataaggataaaaatgtagatagatagatgatagvtagatagatagatagatagatagatagatagatagatagatagatggatgcaagctggtcaatgcccttggtaattaaatttacttctgattatcctgga

SEQ ID NO: 35285 - DNA, 201 bp, Homo sapiens
caggctgcccgagccagcagtggcaactggctcgggtccctttccacactgtggaagctttgttctttcgctctttgcaataaatcttgctactgctcackctttgggtccacgctgcttttatgagctgtaacactcaccacgaaggtctgcagcttcactcctgaagccagcgagaccacgagcccaccgggaggaacg

SEQ ID NO: 35286 - DNA, 201 bp, Homo sapiens
tatctttggatgcttgacaatcttttagtctttatccatgaaaaatgaactatatttttaatctctcttcctcaatcatgttgaaggcaaaaaaaaaaagkgtttgggtttttttttttactattctgtccaatagctaaaacaaaatgtagctaattagcttctttgacatggctgagcaaagagattaacagtatagta

SEQ ID NO: 35287 - DNA, 201 bp, Homo sapiens
gacgtggagaacctttatgtctagctcagggattgtaaatacaccaataagcaccccgtgtctagctcagggtttgtgaatgcaccaatggacactctgtrtctagctactctggtgggaccttggagaacctttatgtctagtccagggattgtaaatacaccaatcggcactctgtatctagctcaaggtttgtaaaca

SEQ ID NO: 35288 - DNA, 201 bp, Homo sapiens
agtatctttggatgcttgacaatcttttagtctttatccatgaaaaatgaactatatttttaatctctcttcctcaatcatgttgaaggcaaaaaaaaaaagggtttgggtttttttttttactattctgtccaatagctaaaacaaaatgtagctaattagcttctttgacatggctgagcaaagagattaacagtatag

SEQ ID NO: 35289 - DNA, 201 bp, Homo sapiens
gaggacctagctacatggcaccatctatgaaccagaaagcaggccctcaccaggcaccaaatctaccattgccctgatcttggacttcccagcctccagamctataagaaaccaatttcttttgtttttaagtctcccagtctatgatattttgttatagaagcctgagcagactaagataactattaactatccctccaa

SEQ ID NO: 35290 - DNA, 201 bp, Homo sapiens
cgtataaattacacgaaacaatgtggtagaaatactagtcaaagtcttgattgctacttttcttaaaaatatgaatttcacaaattgttttttttttttttgagactgagtctcactctatcatccaggctggagtgcagtggctcaatctcagctcactgcaacctctgcctcccaggttcaagcgattctcatgcctca

SEQ ID NO: 35291 - DNA, 201 bp, Homo sapiens
ctgattgacatcagaaaagatctgtgccacctgatagaatacgattttatgggaaagcaaatcataattactcttgcctctaggtagaaaccatatttgtyaacttggaaggaaaatgactcataaaaaatagacatactcttcagccaaaggtcagccttcttcctgtaaatctaaactacacatcaccatttacccatt

SEQ ID NO: 35292 - DNA, 201 bp, Homo sapiens
aaataaaatgtcattgcagcaaagtgtaatcataattaatagatcacaagttttgaaataaggtgttaaaatagaaatgtattgagatactgcttaatgtyatactaatactatttctagtgttaagctcgtcaatgtcaggtagcaagcaatgaatgtgaatcaataaaaagtgtttgaattctcaaatgaaataagcca

SEQ ID NO: 35293 - DNA, 201 bp, Homo sapiens
ctgtctagctcatcttctgctactttgctcaagtacttcagccattataagcaacttgctaatatctacacctgtactctttcccacttctgtgattatgrtacttgttcccttttctccctcaggatcaaatacttcttgaagaaagaaaaaagtcttcctctattgttcccagcaagaagtaatttctcaattctctga

SEQ ID NO: 35294 - DNA, 201 bp, Homo sapiens
caagcaatgaatgtgaatcaataaaaagtgtttgaattctcaaatgaaataagccattatacagtaaagctgatttaataattatgaaattattctgaagygataaaccaatatatataaaaggcatattacatcacaattagttgaactgtgattttgacatacaaaacatccttatatcaatgttttaaatgtcttgag

SEQ ID NO: 35295 - DNA, 201 bp, Homo sapiens
ctgggagatactggcatcttttgcaaattttagcggctgttgaataattgctgttaggatgttttttgcttctcatttgctgatttagtctcaccacctcrttacaagattgtggtttcttttctgaaatctgtgagtttcatttgaaagtgagaagggaaaaaagggagatcaatctccctgacttgagagactataaaa

SEQ ID NO: 35296 - DNA, 201 bp, Homo sapiens
cactggtccctacccccaggtggagacaatgagacatttagttagttgtcctacggaggagaggcagtagagtcaggctgcagtggaatctccctaggatrccaaagtggcattatgtctgttgctcacagatgcagagactgacaattgtgtctccacagcagaggtggatgctagctacaccagctatgctgattttga

SEQ ID NO: 35297 - DNA, 201 bp, Homo sapiens
catgagccactacacctggcccaagctctatttcttagtagctgtgccaccttgggaaaattactcactttttctgaaccttgattttgtcttctattaamgggggatgatcattgcagtcacctcatgaggccattgtgaggatgaaataaaataatatgcataaggcactagggacatcagtaggtattagctcttcat

SEQ ID NO: 35298 - DNA, 201 bp, Homo sapiens
ttgagagaagtgaatttggcaggggtatctagagtggggatagagaaaagaaagtaatacatttgtctggacttcttaagtttcagatgcctaacagcaaycctaaaggagatatcaagaatggagtccaatatataagatctctgtattgaagaataaggggtatagatgatatctaaatttagtgagagtgcagataag

SEQ ID NO: 35299 - DNA, 201 bp, Homo sapiens
accattgggtgagccggagcctgtggttccaggggagatccagaatgcatgtgtctcttcccacgcatttatgtcatgttggtagctttagatcagccatrgtgagaaaagaacaaaagcttttagttgtttttgttttgttttggagaatttgtttaccagtaaatacatcactgcctgtaccccaaatgttaccagctc

SEQ ID NO: 35300 - DNA, 201 bp, Homo sapiens
actttttctgaaccttgattttgtcttctattaaagggggatgatcattgcagtcacctcatgaggccattgtgaggatgaaataaaataatatgcataakgcactagggacatcagtaggtattagctcttcatttgtataattattattaaattacaatttctgggcagggactacaccttatgcttgtctgtgtcctt

SEQ ID NO: 35301 - DNA, 201 bp, Homo sapiens
taaataaataaataaataaataaataaataaataaataaataaatagagtgtcattatggtagaggaacaaggccaccagactgagaatcagaccggactyctctgctgccgtgtcaactaccgtacctaccccagtagccaatgactgtgaactataaatcatgaatcatcaggaattagctgattcataatgaaaaatt

SEQ ID NO: 35302 - DNA, 201 bp, Homo sapiens
agtcatcagaacagttgtatcctttgaccaggtaatctcactcattgcaatgtatatctcaaagaaataaaaatattttaaaatgctatacatggccaggygcagaggctcacgtctttaatcccagcactttgggaggccgaggcaggtggatcgcttgaggtcaggagttcaagaccagcctggtcaacatgctgaaac

SEQ ID NO: 35303 - DNA, 201 bp, Homo sapiens
ggcacatgcctttagtcccagctacttgggaggcagaaacaggagaatcatttgaaccagaaaggcggaggttgcagtgagttgagatcgctccactacaytctgccctgggagtcacagtgaaacgccatctcaaaaaaagaaaaaaaaatactatacacaaaatttttattgtagcaatatttgtcgtatataccataa

SEQ ID NO: 35304 - DNA, 201 bp, Homo sapiens
aactaaagttaataaataaaataatatttagaaaataatatttttagaaatattaaaatagtttgttagaaaataagttcttttaaaagcataatgcaaayttgttatatcctatgtttagaactctgaagaatatgtgtgcatatggtcattgttcagaagagaaaatggagcattgaaagtaattgttttatagtacaa

SEQ ID NO: 35305 - DNA, 201 bp, Homo sapiens
ttatcaatcaaaatgtgagctcttcagtagaaagataaattttaatgcatgatacagagacatcctgagtcagtaagtcagccaccaaatgccactgaacrttttcctaggtcctgagattatagtgaggaacaaatgtctggaccctctagggacttacagtttagtagtgaggaattgtttagcaaactcatgaagaac

SEQ ID NO: 35306 - DNA, 201 bp, Homo sapiens
gtgcctgttttatgcctagaagttttggtttgaaaggcaggactgaaaacaaaagagtttggatgggtagcttttgattctgctgatgttattattaaatracattttaaaatataatgggtaatttattagaaggaagtaatcagctttctttagaaacataatgaatgctgttgccaattcaactgcacaaacacttat

SEQ ID NO: 35307 - DNA, 201 bp, Homo sapiens
agcctcctgagtagctggaattacaggcgcatgccaccacacccggcgaattttgtcgtatttttattagagaaggggtttgactatgttggccaggctgktctcaaactcctgaccttgtgatccgcccgcttcggcctcccaaagtgctgggatttcaggcatgagccactgcgcccggcccaccacttctattctctt

SEQ ID NO: 35308 - DNA, 201 bp, Homo sapiens
gtgcggcccgagcctcctcgacgaacgccaccccctgctccatggcgcccagtcccatcgaccacccaagggctgaggagtgcgggcgcacagcgtgggamtggcaggcagctccacctgcagccccggtgcaggatccactgggtgaagccagctgggctcctgagtctggtggggacgtggagaacctttatgtctagc

SEQ ID NO: 35309 - DNA, 201 bp, Homo sapiens
tttttcacaaatatgtttaaataatctcctaacagccctgtaaagcaaatgactatgtatagacaaaatatggagaaatagaaagaactatgcattgtaggaagtgagaagccatccagaagaaaaacagactaatagcaccttcttaacttcgtctatttgtcagccttcaaccaaagaacagattggatccatcacagc

SEQ ID NO: 35310 - DNA, 201 bp, Homo sapiens
tgagtcccattgccctagataactgtatactctcttaggaaagtattgctcattttagtggcaacagtaaatatagagatgagaaatctcattgtcttttyttctgctagctctggctattgccacatatacacaagaatagaggacctatgtagcaccagaaatatgatgccaaatccataaaactaggcaagaagaaag

SEQ ID NO: 35311 - DNA, 201 bp, Homo sapiens
gatgttgtttcagatatctgggagtggtggcacagtgtaataaattttaatttaatctgtattgtgtgtgtgtgtgtgtgtgtgtgtgtgtgtgtgtgtttagtggcagggtgttgctatgtgctatgttgcccaagcttgtctccaactcctggcctcaagtgatcctcctgcctcagccttccaaaattcagggaaatc

SEQ ID NO: 35312 - DNA, 201 bp, Homo sapiens
atgtgtgcagcatacagcacattacaacaaggggaccagaaaaaccatgaagcagaatccagaatctgtaaacttcaaagctctaagaccggggtggggggtggataaagtcctccagggacaagctgacaataaaataaatacgctgtcaagcacatttgtttctgtatttcaactcagaaacatattttaaatcactgt

SEQ ID NO: 35313 - DNA, 201 bp, Homo sapiens
tatgatgttgtttcagatatctgggagtggtggcacagtgtaataaattttaatttaatctgtattgtgtgtgtgtgtgtgtgtgtgtgtgtgtgtgtgtgtttagtggcagggtgttgctatgtgctatgttgcccaagcttgtctccaactcctggcctcaagtgatcctcctgcctcagccttccaaaattcagggaa

SEQ ID NO: 35314 - DNA, 201 bp, Homo sapiens
gaaaatctgcacctagtacagaagccataggtagagaagagtggtcaattagtctcggatattggaaagcattagaaatatataaaagtgtaaagatggayggggagatttatttggggattgtttctttgtccctactttccttctatgtaatgtggactcagaggctggtattcagttgctgtgttcagcccatttctc

SEQ ID NO: 35315 - DNA, 201 bp, Homo sapiens
gttaatgggtgcagcacaccagcatggcacatgtatacatatgtaactaacctgcacattgtgcacatgtaccctaaaacttaaagtataataataataamataaaaaaataaaaaaaatttttaaaaaaggaatgatagtccatttccatggtaacaatatccagggatgggctcaggacatagtcacaataaaagcaaa

SEQ ID NO: 35316 - DNA, 201 bp, Homo sapiens
cgcatgagatagaaagaagtgtaatacagagttctggttcccaagaaacttacactttaactggggagataatatagtgcacaaaatggttgcttttctgrtcttcacagaatccattccctctttttggtcacagcatcctgcatttcttcatccctcttctactctcactgatttatatgaggtgaaccccacccctgg

SEQ ID NO: 35317 - DNA, 201 bp, Homo sapiens
ttgagactctggatatgcactagctaggggagaacacatttttcatctgaatattgataaaaatctacataattactattgcaaaaaaaaaaaaaagggggagacccagaattggggacatgccatttaatattatggccatttacaaaaacaaagatagatgtgaatgcaacttgtaataagtcaaggtataggaaaaaa

SEQ ID NO: 35318 - DNA, 201 bp, Homo sapiens
gtatcaaagtcatttaaatccttcagagagtttaaagtgcagcataaattctatttcctgttacacattttttggtacgtagggacaggccacacttcttygtttcatacaagggcttgagattttactgagaaaggcttcctcatttcttaatgcatattattgaatgttcagcaagctcttaaaagcaatccaatagtt

SEQ ID NO: 35319 - DNA, 201 bp, Homo sapiens
atcacaactataataaattgattctgaagttgcagcacaaataggtatatattaattggtatttattagttggataggtatatattagttggattttcacragacttggacaataatacaagtctataaatgcagaatgtagtgctagataagggtatgttaagaacttcaagtcagggttggttttaaatccaactttat

SEQ ID NO: 35320 - DNA, 201 bp, Homo sapiens
gttcagaccgtctgaacttgaagtttagcactgccacttactacttgagtgacttaatcaagttacttaacttctctgagccttaatttcctttgttctayattcatttatgtaaaatggatataagagtagatcctattacccatagaatcattgtgattgatgattgatagatagatagagataatagatgatagattg

SEQ ID NO: 35321 - DNA, 201 bp, Homo sapiens
ttttttttttctgtaagaagccctatagcatcagttctggcctcagctgacctagttcagccccagtcctgacaattacagtgaaatcacatcttaaggtraataatggatctaaggtaattatattatgatcatacttacctttaaaagtctcatgtaagacagtatcgtacctggtagttgggttctagaatcagcttg

SEQ ID NO: 35322 - DNA, 201 bp, Homo sapiens
caagatcagactgatctttctggctcctcaagatttaatttatattaaaattatgttcttccttccacaaggatcccatggcattttgtatataaaattayatagtggtacttggcccattctatcctcattatttgtctgtgaatctgagttctgagctagaatataaattctgttaagtggagacgctattattgagcc

SEQ ID NO: 35323 - DNA, 201 bp, Homo sapiens
tgttcaattcccaccaatgagtgagaacatgcagtgtttggttttttgttcttgcgatagtttgctgagaatgatggtttccagtttcatccatgtccctrcaaaggacatgaactcatcatgaactgcatagtattccatggtgtatatgtgccacattttcttaatccaatctatcgttgttggacatttgggttggtt

SEQ ID NO: 35324 - DNA, 201 bp, Homo sapiens
ctcccgaagtgctgggattacaggcgtgagccaccacgcccagctacaagttgtttttttaaatgttagttaattggagcaattattggtggaatattatyttgagaatacctttataagcgcatttgaatggatgtttttgcctagccaatgaccatgtgttgaactacggtcgggtagacaaaatgaagacttgaattc

SEQ ID NO: 35325 - DNA, 201 bp, Homo sapiens
gttacttttttaaaccaatgaaatacatttaagtgcaattgtgtaaactaacatcatgaagttttagtttctaagtcaactttttttttattgcatttcgkttttttttttaattttattgttattatactttaagttttagggtacatgtgcacaatgtgcaggtttgttacatatgtatacatgtgccatgttggtatg

SEQ ID NO: 35326 - DNA, 201 bp, Homo sapiens
ttaattggagcaattattggtggaatattatcttgagaatacctttataagcgcatttgaatggatgtttttgcctagccaatgaccatgtgttgaactayggtcgggtagacaaaatgaagacttgaattctgacatttaggagctgacagtctagtgaatgaggtcgaaatgtaagtaaatggttataaaacaatggga

SEQ ID NO: 35327 - DNA, 201 bp, Homo sapiens
cccgtgttgtcataaacagcattatttccttccgtgttagagctgaataatattcgtgtgggtgtgtgtgtgtgagagagagagagagagagagagagagacatttaggttgcttacatgatttagctactgtgaatagtgctgtaataaacatgaaagtagagatatttcttcaagttactgatttcagttcctttgaat

SEQ ID NO: 35328 - DNA, 201 bp, Homo sapiens
gattgaatgtgtgatgtgttgctcattttatgatgaataaataagaaaatactttaattaggatgtcaacattttgcatgcaaatatggcttctaaaatayatattaaatatattaaatattgatcttgcttatactgtgaactgtctcaaaaacattttctaagtaatttgcaaagtgcagattttatctcagctgttat

SEQ ID NO: 35329 - DNA, 201 bp, Homo sapiens
atctcagctgttatgcaaattacgtattcttaattagtgacatattgggagattttaataaagaaaaattcattagtaagcctcattcttttaaggagaayggtatcttgggaggtttgttgataaaaaagatgaatacctgaactactttgttaaacactcactaaacaaggttctcactcatggagttagatccacgcc

SEQ ID NO: 35330 - DNA, 201 bp, Homo sapiens
ccggctgcaacagatttttaaacttaagcaaaacctatcaaaagaataacgggaaagctcaatgttttgaagtaagaaagagagtgacagatgaagcctcraaccacagcactccaaggatgctagtgcaggaactaggggactatgtctttggggcactgacattggaaatgactcatctccaaacacctttgatatcca

SEQ ID NO: 35331 - DNA, 201 bp, Homo sapiens
gtattcttaattagtgacatattgggagattttaataaagaaaaattcattagtaagcctcattcttttaaggagaatggtatcttgggaggtttgttgayaaaaaagatgaatacctgaactactttgttaaacactcactaaacaaggttctcactcatggagttagatccacgcccttatcaaaccatgacaaagata

SEQ ID NO: 35332 - DNA, 201 bp, Homo sapiens
gtctagtttttctgtctagtccatatcagaacatatactgtaagtgccctagttcacagggttaggaatcactatattatttagttggtaattttcctttytgtggcttctggcataagctctctctagaaccagggccaattgtttctctctaatgacttggagggaggctagcctgaggctatccttaaaagtgcaagt

SEQ ID NO: 35333 - DNA, 201 bp, Homo sapiens
gacttgatcaacattggtcagtgtactagtaaaaaagtccacattctggaggatttctgactctacatcattttcactcaactcttgcagctggaaaaatwtgtatttccaatcttcttccacttctgatatatgtgccgagataaaaactaaaatgagtaagggcaatgtacaatgaaaagtttgatagaatctatgcat

SEQ ID NO: 35334 - DNA, 201 bp, Homo sapiens
gcctgaggctatccttaaaagtgcaagttgatttatcatcttttcctttgttccatggatgagatccaacatgcagcttcaactagcctcacggggacagwtatgttaactgatttcattccacaagaagaaacattggtaacaagatttggctattttctaatgttatgaatgcagtgtttaagcaattattaaagtata

SEQ ID NO: 35335 - DNA, 201 bp, Homo sapiens
cccatggtgaaaggctggaagggcaacaaaagggactagctagcttcctcaagcccttttataagggcactcatcccttcataagggctcttaataccaamccttggagtttaggtttaaacatatgagtttgagagggacatatacattcaaactatggcactattcatgccttgtatacttttccttcagccacagcag

SEQ ID NO: 35336 - DNA, 201 bp, Homo sapiens
gaactcaccatctttttccccttaaatctactcattctcttccctgagggacgttctttccttgacagctaccaggtatattaaattgtttcaattctctmtctctatctctctcaatctctaagagaccataaggtggtccagacccagggccttggcacaactccaggggccatttgcacagtggattaacatacgaat

SEQ ID NO: 35337 - DNA, 201 bp, Homo sapiens
tggcatcttcatcatgaaatctttgtctgtgccaatgtcctgaatggtattgtcaaggttttttgtctgtttgtttgtttgtttgtttttctagggttttygtagtttggggttttacagtgaggcttttaatccatcttgagttgatttttgtatatggtgaaaggtaggggcccagtttcaattttctgcaatggctag

SEQ ID NO: 35338 - DNA, 201 bp, Homo sapiens
caaatgacagaaagtgacattgttctcacatctttgaaccactgctttcccaactcctcattcacctcttctgcgaatttctctatattttgtagccaaasattcttgacatttaaaattagagaaagtcaaagttgatgaaaagtaaatttactggaaataatcatcagtgagaaaggaaaagcctggaactgtatttta

SEQ ID NO: 35339 - DNA, 201 bp, Homo sapiens
gctcctcggcagccctcagtccaaccctggctgaatttctttcatgatgtataatgaaggtcacagaacacacagggagaaatagtctccagctgtccttragtccagaaaaaatgaatatccatctgaaaaccaaagagtacacaagcattgggccaggtatatcattgtattcatggccttttctttcctattctgtca

SEQ ID NO: 35340 - DNA, 201 bp, Homo sapiens
atcaatgttttaaatgtcttgagagtatggaattgagagaaaaagtttatgtcaactatggtatcagttctagagggtctttaaaataaaaataatcagcrtttagctgagttttcattcttaatgcaataaagcaaattagcatgtgacatatgccatctcttaataatagtttcaggctgcattgacataaagtaatca

SEQ ID NO: 35341 - DNA, 201 bp, Homo sapiens
taatttgagactctggatatgcactagctaggggagaacacatttttcatctgaatattgataaaaatctacataattactattgcaaaaaaaaaaaaaarggggagacccagaattggggacatgccatttaatattatggccatttacaaaaacaaagatagatgtgaatgcaacttgtaataagtcaaggtataggaa

SEQ ID NO: 35342 - DNA, 201 bp, Homo sapiens
aagtccctggtcccctttaagtgaccccacttgcccctgttctctctgctttttccctggtccagaggggtttgagacccattggggccaaggccaagctycacaaggccgcagttctctcctgttacctagacatcaacgcactgatttacagggagaactgaaactgtcaagcagactggtgactcaagcacactcgtt

SEQ ID NO: 35343 - DNA, 201 bp, Homo sapiens
cctcagatgagggcacacctctcatcataacagaagaaaaagggatggaaaacaggattctttttgtttgtatcttttctgggactgctgcagtccccttctatgcagtctccatctagcttgttggaatcatttcctttatctcttgaagtatctctttccagtcaatgagcactctcccctcccctctcagtctgtggt

SEQ ID NO: 35344 - DNA, 201 bp, Homo sapiens
ttggaatcatttcctttatctcttgaagtatctctttccagtcaatgagcactctcccctcccctctcagtctgtggtattcctgcatcatattgcaagtstgttagtgacaagctgtatactagtccagtcacagctgttccatgacatgttacatctattttttctatttttaacataaatttttaataacagtaacac

SEQ ID NO: 35345 - DNA, 201 bp, Homo sapiens
tgctccagggaagcctattttacccatttttagtgttaaatacagctcactcactggtcatgtaacactctaagactgacgaaggcttgaatcaaagcaargcctaaatgttactgaggctaggagtataacaccagccttgggttattttttccaagtagacactgagtcttacactcagcatttgtcaccttgcactca

SEQ ID NO: 35346 - DNA, 201 bp, Homo sapiens
aagtaagagtccaggaaaaaagtcaattcagttacatgaatgggaacaaaaacacaatggcttggtagggtgtttctatttagttttgtcctgtggtagaytgcaaaagttgtcataaccctcctactcctcctcctgcttcttctcctatggtggaaaaaatcagcagctatgctgcttagggctctaatctattcttgt

SEQ ID NO: 35347 - DNA, 201 bp, Homo sapiens
ctcttgattataccatctcctctccatttctgctactgccttagcccttaccaccttaagccctttatgagactagcagagagagagtaaaagaggaagcraaagaaagaaggaagaagcattgttcctcacatgtggacttatgttcagtcccctcctccttccaaactatgtcctatataactagcaaggaaaaaaatc

SEQ ID NO: 35348 - DNA, 201 bp, Homo sapiens
cttcctcctctacgaaactttccttggcaccctatagtagaatgtgcaggtgctcttgctctctgttccagtgacaccagatttacctctatcatgatgcycattatgcgggtctgaattgcctgctcactttctctctccccagaattagactttgagcttcttgagctccttgagaccaatgagtttgtctttcatccc

SEQ ID NO: 35349 - DNA, 201 bp, Homo sapiens
ctctctgttccagtgacaccagatttacctctatcatgatgctcattatgcgggtctgaattgcctgctcactttctctctccccagaattagactttgascttcttgagctccttgagaccaatgagtttgtctttcatccctgtaactctagagttggaagagtgcccaggagtttgtcagtttatggtgccagtaaaa

SEQ ID NO: 35350 - DNA, 201 bp, Homo sapiens
taatcagtaataggttttactggaatgacagagttgtgtaatctctggaaattttctgaagatttctagtgcctttttctgatatggtttaagcatatatytggtcaaaggtactctctcaagggtccatccagttaagaatctatcatcattaagcctcaaacattcttaaaataatgaagggttcctctttccacaact

SEQ ID NO: 35351 - DNA, 201 bp, Homo sapiens
taggttttactggaatgacagagttgtgtaatctctggaaattttctgaagatttctagtgcctttttctgatatggtttaagcatatatttggtcaaagstactctctcaagggtccatccagttaagaatctatcatcattaagcctcaaacattcttaaaataatgaagggttcctctttccacaacttcctctttac

SEQ ID NO: 35352 - DNA, 201 bp, Homo sapiens
gttttactggaatgacagagttgtgtaatctctggaaattttctgaagatttctagtgcctttttctgatatggtttaagcatatatttggtcaaaggtastctctcaagggtccatccagttaagaatctatcatcattaagcctcaaacattcttaaaataatgaagggttcctctttccacaacttcctctttacttt

SEQ ID NO: 35353 - DNA, 201 bp, Homo sapiens
ggaaattttctgaagatttctagtgcctttttctgatatggtttaagcatatatttggtcaaaggtactctctcaagggtccatccagttaagaatctatmatcattaagcctcaaacattcttaaaataatgaagggttcctctttccacaacttcctctttactttcctgatcagtaaattgaccagaagaaattaacc

SEQ ID NO: 35354 - DNA, 201 bp, Homo sapiens
gcttagatccaaatccatgcaattcaaaagtgactgcacagccaggcatggtggcacctacatgtagtctcagctgcttgggaggctgaggcaggaggackgcttgagcccaagagttccagactaccctgggtgacatagtaagaccctgactcttaaaaaaattttttaattaaaaaaaaaagtgatcccactactatt

SEQ ID NO: 35355 - DNA, 201 bp, Homo sapiens
tgttttaaattgtgcattttctctgacagtacaggactaagcactgaagcctatttattagaatttggctaacaaagcactatttttgcatggcacagggktacctcatgaggggaccagtaagggatatttatttttaaaacatctgctctcaactgtgttggttttctttgacttgctctatgcaaatcacagctcttt

SEQ ID NO: 35356 - DNA, 201 bp, Homo sapiens
acccgtgttgtcataaacagcattatttccttccgtgttagagctgaataatattcgtgtgggtgtgtgtgtgtgagagagagagagagagagagagagagacatttaggttgcttacatgatttagctactgtgaatagtgctgtaataaacatgaaagtagagatatttcttcaagttactgatttcagttcctttgaa

SEQ ID NO: 35357 - DNA, 201 bp, Homo sapiens
agagtatcacttaatccatgaagaatatatttgctcttgattttgtctgaccattatatcttagagttaatttatgatcgaatcagctgaggtatctgaaractgatgccaatttctaattcctcgtgttttatcttctggtgctgcagaaggcaccatggattttgtaccattagattttattttataaataacccccca

SEQ ID NO: 35358 - DNA, 201 bp, Homo sapiens
taaatcaatatagcaaagaggcaaaataagagaaaatatttgcaaactattcattcaacaggggattaataaccaggttataaaaggatctcaaacaattmtgtagccaaaacaaaagcaaataatctaattttaaaatgggcaaatgatctgaatatgtatttttcaaaagaagacatagaaatggccaacaggtatatg

SEQ ID NO: 35359 - DNA, 201 bp, Homo sapiens
cataatatcctctgagttcacccgtgttgtcataaacagcattatttccttccgtgttagagctgaataatattcgtgtgggtgtgtgtgtgtgagagagwgagagagagagagagagagacatttaggttgcttacatgatttagctactgtgaatagtgctgtaataaacatgaaagtagagatatttcttcaagttac

SEQ ID NO: 35360 - DNA, 201 bp, Homo sapiens
caggggattaataaccaggttataaaaggatctcaaacaattctgtagccaaaacaaaagcaaataatctaattttaaaatgggcaaatgatctgaatatrtatttttcaaaagaagacatagaaatggccaacaggtatatgaaaaaatgctcaacatcactaatcataagggaaatgcaaattgaaaccacaatgaggt

SEQ ID NO: 35361 - DNA, 201 bp, Homo sapiens; identical to SEQ ID NO: 4644

SEQ ID NO: 35362 - DNA, 201 bp, Homo sapiens
ctgattatgcttcttgtccttgatcccttataataatcaccattgtactgtgctgtctaatattatagcctctacccaaatatggatacttgaatttaaawtaagattacataaaatttgagtcagtttctcaagcacatgaatcacatttcaagtgtttaaaacatcttatgtaccccataaatatatatgcctactatg

SEQ ID NO: 35363 - DNA, 201 bp, Homo sapiens
aacataatatcctctgagttcacccgtgttgtcataaacagcattatttccttccgtgttagagctgaataatattcgtgtgggtgtgtgtgtgtgagagwgagagagagagagagagagagacatttaggttgcttacatgatttagctactgtgaatagtgctgtaataaacatgaaagtagagatatttcttcaagtt

SEQ ID NO: 35364 - DNA, 201 bp, Homo sapiens
gtgctgcataacattcatggaccacatatacaacagtgattctataaattataatggagttgaagaaaacctattaccaagtatttactatactgtttatkgttattttagaggttattccttctacttattttttttaagttaattgtgaaacaacctcaggcaggtccttcaggaggtattccagaaggcagcattttt

SEQ ID NO: 35365 - DNA, 201 bp, Homo sapiens
atcacataagatcatcaccttctaggggatcagcttctttcaagtagggaaattcattaaaagtaagttagttaactacatacttttggaaaacatatgtwtattataactgcataataaaagcttaataaaacattaaacataggatggggtcaaagcagttttccatcaaaagaattctgacttcactacaacactcaa

SEQ ID NO: 35366 - DNA, 201 bp, Homo sapiens
ttaacataatatcctctgagttcacccgtgttgtcataaacagcattatttccttccgtgttagagctgaataatattcgtgtgggtgtgtgtgtgtgagwgagagagagagagagagagagagacatttaggttgcttacatgatttagctactgtgaatagtgctgtaataaacatgaaagtagagatatttcttcaag

SEQ ID NO: 35367 - DNA, 201 bp, Homo sapiens
ttttgtctatccagggtacccttgatatcctagacatctgaccctaagggaagaaggaagaggaagtgtagagtgcaggtaaacagccaaagcaggtaatrcttaggtaaggacagccattccatgttctctctggattgaaccagggcccctctaagtgagctggggtacagaaaattagtccagcccaataggactaga

SEQ ID NO: 35368 - DNA, 201 bp, Homo sapiens
atttaacataatatcctctgagttcacccgtgttgtcataaacagcattatttccttccgtgttagagctgaataatattcgtgtgggtgtgtgtgtgtgwgagagagagagagagagagagagagacatttaggttgcttacatgatttagctactgtgaatagtgctgtaataaacatgaaagtagagatatttcttca

SEQ ID NO: 35369 - DNA, 201 bp, Homo sapiens; identical to SEQ ID NO: 4651

SEQ ID NO: 35370 - DNA, 201 bp, Homo sapiens
tactaaataaggtagagcaattcagaggtaaatgagtcaaattgtttgacttcaatcaattagggaagaaaagacataaacaaaaggagaagcaacttagraggttacaaatacgccaaagtttagcaacagatgaagtactgtccaagttcaaggaaagaatgatcaccttcaactcattacaatggaagaaagtttaat

SEQ ID NO: 35371 - DNA, 201 bp, Homo sapiens
gttcaaacattgatacaaatattcagggttattttcattccattttacctttaccacatacatatctatgtattcacactgtgttttttttttttttttttgagtgactaatgtaatttcaaggggccaggaactaagttctgatcccaccttttcaataatcaagtctttgatcttgaacaagtcctaacatcatcaatt

SEQ ID NO: 35372 - DNA, 201 bp, Homo sapiens
aattttttttcctgatagggggtcagaagaaaaaaataatcttgttcctggctgctcttgcagataaccccaagagagaggaactggcctgctgtgcaaaygaggttcaagaggatgattctatcctcacttaactctttttgctagaataatttattttacaataaaagtaatatatgttgcttctcacggcctcctacc

SEQ ID NO: 35373 - DNA, 201 bp, Homo sapiens
agacctgaaactatgaaactactagaaaaaaacattgggaaatgcttcaggacattggtcttggcagattttttgggtaagatctcaaaagcacaagcaamgtgaggaaaaataaacaaacaggactacattgagctaaaaggtttctgtaccacaaaaaaataaaaataaatcaatatagcaaagaggcaaaataagaga

SEQ ID NO: 35374 - DNA, 201 bp, Homo sapiens
gctgtgcaaacgaggttcaagaggatgattctatcctcacttaactctttttgctagaataatttattttacaataaaagtaatatatgttgcttctcacrgcctcctaccaactcatctgggaagcaagctccacgcttcagagtgggtgggctcttgaagcatgagaccatgaaagcaggaatttatgagtgatatatt

SEQ ID NO: 35375 - DNA, 201 bp, Homo sapiens
tgcacacaatcctcatcctcagaaaatatgtaatcaaattaacattaaaatgctgcaataaaattaggaaaagcaatgtgttcaccagagtatcaaaaaggtatgttagtatctctgacgactctttaacaaaagtagccttcccacctgactttctatcacatcatatcatttttccgttccttcctttaattttgtatt

SEQ ID NO: 35376 - DNA, 201 bp, Homo sapiens
tgttgcttctcacggcctcctaccaactcatctgggaagcaagctccacgcttcagagtgggtgggctcttgaagcatgagaccatgaaagcaggaatttrtgagtgatatatttaatagaacttatttggatatttcctcaatgtaaaatagcactattcattataggcaatgcagaaaataaagtagagagatggaagc

SEQ ID NO: 35377 - DNA, 201 bp, Homo sapiens
ttataaaatttacagacttataataaccctccaagcaagtagcaaaaattttaaaatctgaaagaatgaccacacacacacacacacacacacacacacamaatggatttattgcatacatcttcagattaacaaatcaaccagcaagctactctttgtgcatagggtctgtggaggatacaaagaataatgcacacaatc

SEQ ID NO: 35378 - DNA, 201 bp, Homo sapiens
aataaagtagagagatggaagcaagcatctactacctcatcatccaaatcatgttattttagcatttggggatgattgacaagtggatagaaactgcagcygtgtttttatccagtgaggtttctctttgggtctgcagtctaaggagtggatctgggcactcacaggacatttcagccattggcatatgttctgctggta

SEQ ID NO: 35379 - DNA, 201 bp, Homo sapiens
gataaacatttgctggaaaaaaagaatcaaagatttctaaatcctgtttcaagtcagaaatcttggttttgaattttgtctctgttccataactgggtttygtgaccctgggaaagttacttatactctgaacctcagtctcctcacctaaaaatagaaatgaaaattatgactcctcatggcaccgtccccagacaatta

SEQ ID NO: 35380 - DNA, 201 bp, Homo sapiens
agtaaaatatagcataatctaggagcctggcaggagacctgatctgaatggggaaagaaggtctgtctaagatctgaatgagataaatgagttaaagggamgttgatgaggatgttagagaagagcattttagggggatggggctgcaggtgcagaatccccgaggctagacagaggggagtgcaactgtctcatcaacta

SEQ ID NO: 35381 - DNA, 201 bp, Homo sapiens; identical to SEQ ID NO: 4628

SEQ ID NO: 35382 - DNA, 201 bp, Homo sapiens
ctcaaggggctggaagtttaggaaactatgatgcatccatctttcacatcatccttataaaaatacctgcattttgctaagatttcctgccattaattttraaaagaaacaaaagtaatttcttctccttattgcgtatgagatcaaagtttaacaaatgaggtcttaatagcgataccaagaaatgggaagccataaatg

SEQ ID NO: 35383 - DNA, 201 bp, Homo sapiens
gccaggaaaatgggaatgagagtcagacaagtaacaagatagagggttttgatcactagacattctagataaaccatttctcagaagaagaaaaatccaargaatgtcatactgtagggagagctgtacttcctacaggctccatgtacttccaaatagaaaacataataggagaaatatcctattcagtgtagcaacaaa

SEQ ID NO: 35384 - DNA, 201 bp, Homo sapiens
ccttgcagaaaggaaattaaaagccacctgaggttgtttgcaaaaaaaaaaaaaaaaaaaaaaaatgcaccataccccatcctatcatcccttcaaatgayacccaattccagtttcagagcagcatgggacttgaacttttgtatgttcatgactctttattgccccatgacaccctagcaggtagtctgtccatggctt

SEQ ID NO: 35385 - DNA, 201 bp, Homo sapiens
tgctcgccttcccccagagccagggcgaaatgatggagctcgacttggtcagcttagtcctgcacattccagtgatcagcatcgtgcgccacgagtttccrcgggagagtcaggtgagaggagcctggtgcgtggagtggagatgggcgctgctgggggccggggccattgcatgaggggagagaaaacggcttggtaaag

SEQ ID NO: 35386 - DNA, 201 bp, Homo sapiens
atttttcaaactcaagaagtgagtttaccatgatattctatcaaaaaactgctgcctaaaaaatgccaaaaaacagaaaattttaacaatgccaaccaaayaaaacctatcaatgtttccttaaattatatttcaactaggtttttttctgtgcatgacctgaaggcatataattaatggaggtaaatcaattggcaaata

SEQ ID NO: 35387 - DNA, 201 bp, Homo sapiens; identical to SEQ ID NO: 4631

SEQ ID NO: 35388 - DNA, 201 bp, Homo sapiens
ttttctgtgcatgacctgaaggcatataattaatggaggtaaatcaattggcaaataagaatgtaaatgaatatgggtatatatttatctcctatggtttstgttttaaatgatgattaaccatcagcctaaaggtgataaaagacttatttcacttcatggtaagaccatagatataatttcaggaacagaaaataaaaa

SEQ ID NO: 35389 - DNA, 201 bp, Homo sapiens; identical to SEQ ID NO: 4632

SEQ ID NO: 35390 - DNA, 201 bp, Homo sapiens
ccttcctacatgactttttcttctacaggttttgtgtagtttcttcaaagttaactccctaaagtttacctgctgaagtagtgacaagtacacattttttwaaaaaaatatacacctcaccttaacttcatattggttctattaggcagagttaatgatgtaatataattggcttagatccaaatccatgcaattcaaaag

SEQ ID NO: 35391 - DNA, 201 bp, Homo sapiens; identical to SEQ ID NO: 4633

SEQ ID NO: 35392 - DNA, 201 bp, Homo sapiens; identical to SEQ ID NO: 4634

SEQ ID NO: 35393 - DNA, 201 bp, Homo sapiens
aggctctattttttttttcttttagacagagtctcactctgcacccaggctgaagtgcagtggcacaatcttgactcactgcaacctctgcctccagactyaagcaactctcgttcctcagtttcctgagtagctgggattacaggcacgtgtgacccctccgtgcaatatatatatatatatatatatattttagctgag

SEQ ID NO: 35394 - DNA, 201 bp, Homo sapiens
gaacttaagcataggttgccctgactactaagtcctaacctctatactgcttctcaaaagaggacagaaaagcccaactgctgaagaagacagtggccccrccagcaaggaaaacttagaacttaaggacactgtagaacctgctgaagaggacaatgcagaatcgcacaggaaatatagaagcagatggtggctccaacc

SEQ ID NO: 35395 - DNA, 201 bp, Homo sapiens
cacaagataggcactatagatgtagtcttaagtaggtaaatgagacctccagtttacagataaaaaaacaagagtcagagaaactatgtaacttgcccaasgttgcagaactagtaatagtaacagagatttgtacaaccatacaggattccggtcactgcctcacaattttctattcttccttgaatccccttttagtct

SEQ ID NO: 35396 - DNA, 201 bp, Homo sapiens
tgtagtgagagaagccaactgccaaaaaatcaccatcatttttggttgttatctgaaaatgactgtgagagctcaacttgtgttgccaggacctcaagccrgttgggatcaggggctccctgctcatctcaactagaggaacttcctctaaatccaacttcccatggggctagtggtttcctccacaacattccacaggcc

SEQ ID NO: 35397 - DNA, 201 bp, Homo sapiens
gagagaagccaactgccaaaaaatcaccatcatttttggttgttatctgaaaatgactgtgagagctcaacttgtgttgccaggacctcaagccagttggratcaggggctccctgctcatctcaactagaggaacttcctctaaatccaacttcccatggggctagtggtttcctccacaacattccacaggccctatgg

SEQ ID NO: 35398 - DNA, 201 bp, Homo sapiens; identical to SEQ ID NO: 4637

SEQ ID NO: 35399 - DNA, 201 bp, Homo sapiens
cgcaaaagaggaaaatggttttcacaaggtctcacatatataattggtaaatcgaagaacaataattcaaatgaagatgtgagtgactccaaataaagccrcctctttctagacgctcctgaagattgcagtgactctctgaagttctgaccaaggttttggatttcattgcttactaatagtctttctttatgtcaaatg

SEQ ID NO: 35400 - DNA, 201 bp, Homo sapiens
acagtcatgtgctgcataacattcatggaccacatatacaacagtgattctataaattataatggagttgaagaaaacctattaccaagtatttactataytgtttatggttattttagaggttattccttctacttattttttttaagttaattgtgaaacaacctcaggcaggtccttcaggaggtattccagaaggca

SEQ ID NO: 35401 - DNA, 201 bp, Homo sapiens
cttcctatctttggcctcactgcttttcttactttttgcctttgctcctctttcccaggtttctagccaataccactttcagaggcctcagtggttccatyagagtaaaaggttccaccatcgtcagctcagaaaacaactttttcatctggaatcttcaacatgaccccatgggaaagccaatgtggacccgcttgggca

SEQ ID NO: 35402 - DNA, 201 bp, Homo sapiens; identical to SEQ ID NO: 4641

SEQ ID NO: 35403 - DNA, 201 bp, Homo sapiens
aataagcatttccaacatatacccttagtggcaaatctggggcaagaagaggggagaagtttcgcggtagttgtccatgtttccttctcccatcctccatrccatgagtaattgtgtctctaactccaagtaaacagagacctaattgctttctcttttatgcaaaatactaaggtactttctaggatccataatgataat

SEQ ID NO: 35404 - DNA, 201 bp, Homo sapiens; identical to SEQ ID NO: 4643

SEQ ID NO: 35405 - DNA, 201 bp, Homo sapiens
catggtaggtgagaagatctatgaagagctttctggaatacatgaccccaaggtaatacttcattttactttagctttcttgattgtccattataattccrtatgttgtatcttctgctgtagtatgctcatgttcttccatctaacacaggaatattctctcagccaagtatagagactagtccaaaagtctgttgcctg

SEQ ID NO: 35406 - DNA, 201 bp, Homo sapiens
gctgtagtatgctcatgttcttccatctaacacaggaatattctctcagccaagtatagagactagtccaaaagtctgttgcctggtttaactaaatattycattgtttgtttcataaatgaaacaaaaagactgagaagttttggggagtgtcttttctagagtaggtctttctgatagaaatatctattaatgcatctt

SEQ ID NO: 35407 - DNA, 201 bp, Homo sapiens
cttccatctaacacaggaatattctctcagccaagtatagagactagtccaaaagtctgttgcctggtttaactaaatatttcattgtttgtttcataaaygaaacaaaaagactgagaagttttggggagtgtcttttctagagtaggtctttctgatagaaatatctattaatgcatcttttccttgtattatttgacc

SEQ ID NO: 35408 - DNA, 201 bp, Homo sapiens
catacatgtatatattatgtataatatataatggaaaatataaagcatgtataatatagtacatatgtatatttgatatgtgtgtgcataggtatatatawgtgcatgtgtatgtaccagagcagaatttgtaatgataaaacataaagccattttctataaaatgcctcctcttcagtcacaagaaaaaaaaacttaaga

SEQ ID NO: 35409 - DNA, 201 bp, Homo sapiens
atgttatatacagtatataacatagagtatttgtatatcatacatgtatatattatgtataatatataatggaaaatataaagcatgtataatatagtacwtatgtatatttgatatgtgtgtgcataggtatatatatgtgcatgtgtatgtaccagagcagaatttgtaatgataaaacataaagccattttctataaa

SEQ ID NO: 35410 - DNA, 201 bp, Homo sapiens
ataatttgtataaaataacatagactagacatcaacaagaaatatgtatgtaaatttcacattatgttacacatatatatgatatgcatatgttatatacrgtatataacatagagtatttgtatatcatacatgtatatattatgtataatatataatggaaaatataaagcatgtataatatagtacatatgtatattt

SEQ ID NO: 35411 - DNA, 201 bp, Homo sapiens
tggttgacatcttggataatggacctacacaattatctttttcattgctcacccagaattctcccaccccctgctaaactgatctatgctacctttgtgcmaaaccagcacaaatcagtctatcctctaaagaatttcagaaaaaattccttttgcaagccttttacccttgttctttcccctgtggagatagtaagcagc

SEQ ID NO: 35412 - DNA, 201 bp, Homo sapiens
cagcctaaaggtgataaaagacttatttcacttcatggtaagaccatagatataatttcaggaacagaaaataaaaatgtcaatgtcaacaaataataatattaacatgtattacatacctgctatagtctagggactatgctatctgctttaaattgaattttcctcacttaaactttactgcatccatacagatgagga

SEQ ID NO: 35413 - DNA, 201 bp, Homo sapiens
taagtgatttttccaaggatcaagctgctacttaaacccaagttttaatttcagatccatcataatttttgggacaatgtgctgcctcatattaaactatrttcaaaaacatattaagcatacaatgataggaatgcttacagctctcaaagctttgctcagcattttgagagtgtagtttgagaagaacaattatcagaa

SEQ ID NO: 35414 - DNA, 201 bp, Homo sapiens
tcagaatattttgtcagaatctattaatatttttcaaactcaagaagtgagtttaccatgatattctatcaaaaaactgctgcctaaaaaatgccaaaaaacagaaaattttaacaatgccaaccaaataaaacctatcaatgtttccttaaattatatttcaactaggtttttttctgtgcatgacctgaaggcatataa

SEQ ID NO: 35415 - DNA, 201 bp, Homo sapiens
aattattttgaaatgtattttgtcactttagagttcatcataaattcaaaaatagtaaaagtaatctatttattttctctgaaaagctctgtgctaagtargcattacaatgatattatgaaaataatgaaaaattctaggcatttttgcactaaatgcttcaatatagttataaaaagaaggaagctagtccttggcaat

SEQ ID NO: 35416 - DNA, 201 bp, Homo sapiens
agtgctgggtgaacagtaaatattcagtaaatgttgttcgactaatgaatgaaaaatggcagcatcattggaataagagtatagtgctctgacgtgattastttgaaatcaacgtttttgatatgacctttcaaaatcattcttatactagatgctgtggaacaaataggagaaaaacccctgttgggggcaatgtggtat

SEQ ID NO: 35417 - DNA, 201 bp, Homo sapiens
taataaccattcatacttggaacattttatgcattaataatacttggagtaaaaatgaacagcattttccaaatacaataactcaaaaataaatggaaacrtttgtgaaaatgtttcatttttgaaaatctccttgggctgagtcaaaccatggaaaattttagctcaaacgaaaattcttcctctttcccagccccccta

SEQ ID NO: 35418 - DNA, 201 bp, Homo sapiens
ccagggctggtttgttaatggagatgagcctgcaagggttcatgtggtagagaattaagcaggatgactcctttttcagtcaggatgaattacacctcatygttattcatttgaagcatagatttaggaagaattttaatcatattatatttttgcagcatttatgtttttcaaggctttttcacaaatatgtttaaataa

SEQ ID NO: 35419 - DNA, 201 bp, Homo sapiens
atttctgttgcatgtaatattttaaattataataacagtgttttcttacttttgtgtaaatagtttatatttctagctcaaaatttaagctgtttttttttggtattagtcttggaatctaaacaccacttataaaatatttatatgggaaaatatgttcggatgaaaaagctattgacttacaaggtaagatttgtgatc

SEQ ID NO: 35420 - DNA, 201 bp, Homo sapiens
caaatgctgatagaaaagcaagcctcataaaagacgcatttactcaactagttttcctcaaaggaaaatgtgaaagctaactaggctgcaccagtccaagrtgtccctagttcaagggagttggagaaagcatgaaaactacagctgcagggcattatacagggcttactgcctgggattttttgtcaacccattggcagt

SEQ ID NO: 35421 - DNA, 201 bp, Homo sapiens
cttatgtaccccataaatatatatgcctactatgtacccacaaaaataaaaaactttttaaaaatttaaatttaaatttaaaataaataaattttaaaaayataaattttaaaaatttttaaataaaatatttttttaattttaaataaaaatttttaaatgggaacatatgggtagtgacttctatattggacaacatag

SEQ ID NO: 35422 - DNA, 201 bp, Homo sapiens
ttaatcagggagaatttagtgcctatggagaagtcatagatctctgtggttcttttgggacatttgtttttctgccgtaagccgaaaattcccccaatctyaatgggaggtgacattttatatggagtaatggccacactctaaagattcttccaccactgacttattatctgctttatttctcttcatatccttttatct

SEQ ID NO: 35423 - DNA, 201 bp, Homo sapiens
ctcctgggaatttaatgcaaagttgctcttttgaaaggagagtgccaggagagtacctcaaacacactcttttttcttcattcctttttttcttaatccckgtttcttctaactttcatagggtgtcatggaaaccaccacatgagaactgcccatgccactttgatgaccttcctatttccagaatctagtacagagact

SEQ ID NO: 35424 - DNA, 201 bp, Homo sapiens
ttcctgtgttagtttgctaagagtaatggcctccagctctatagcatacgtggcatttttaaatctgttttgaacatttaggttaaatccaacagatatttggaaacatggagccagagttcaagagagagattgaagctagtaagaatcctggcagagggaggccatactgtttattaaagccctaggggagtatgcgat

SEQ ID NO: 35425 - DNA, 201 bp, Homo sapiens
gattttccacaaattccatgtgctcacatggagaactctcctggcctggaaacaattataaggcaaggattaagttccagtgctcattttagtctttaccrgactgtgaaacaatggcaggacagcaatatagttttatggcagcttttgagctctggtgcttttgataagtcttcctcagaattaagaacaatggaaagg

SEQ ID NO: 35426 - DNA, 201 bp, Homo sapiens
aatttatgagaagcaatcatgagaaatcacactgccatggcagattatcagagcctgtaattcaatgaagttgaatacaaaggcagacagtgcagtgatgsgtctgttctgtctagtcttcctgagaaaagggaaagaatggttcctgaaaaacaggaagacatgagggtgagtagtcctctccctcctgctcgatggaat

SEQ ID NO: 35427 - DNA, 201 bp, Homo sapiens
ggtagaaagctacaggctttatactatacactatatagtatatatggtatatgtatactgaaggaggcgggggagaagggaggcatccactattcctaaakgtagttattcagaatatatgcctgaatctttgagggttcctccataataatggctcactcactgattctctgagcattccagaacaaagacaaattgact

SEQ ID NO: 35428 - DNA, 201 bp, Homo sapiens
gtcaaatttttgccaacctttctcttaaattaagggaaaattggcttatacctttgtttacgttattaaccttcttagcaagtattaagatatttgctatmccaatacatagatactttctatgtataaataaatacatagatactttctatgtataaataaatacatagatactttctatgtataaataaatacatagat

SEQ ID NO: 35429 - DNA, 201 bp, Homo sapiens
cttggatccaaagaaaaattctcactgaagagaagtaatttagctactgacgcagtatatgttagtttctgaaaatgacagatgaatatacccacgttgtrttaagtaatactttacactgtgtgagatcccaggagatggtgtgaaatagtgtgtatttaattatgtgacctagattacttgtgacctgcatagtctcaa

SEQ ID NO: 35430 - DNA, 201 bp, Homo sapiens
atgtagcacaattactaacttataatattccatatgctataaaatgcagcctgaagaaatgatattgaagagccttttaaggtgtcaaaaaatcaaaatayaatgttaagtgaaaagtcaggatacaaaaccacatactacattttcaattttgtaatatgcatatgtacatgctataaagggacatgactggaaggaaat

SEQ ID NO: 35431 - DNA, 201 bp, Homo sapiens
gagaaatatcctattcagtgtagcaacaaaagttcatgatagatcatggaaatgtcctctataaaaattgggttaaaagaaaaaatttgttaatgtaccamcacataaaagatagttgggataaaataactaccatattaccaagttgggagactgaatacttaaagatgtcaaaattccttgattagtttataggtttga

SEQ ID NO: 35432 - DNA, 201 bp, Homo sapiens
catatttttaatatatgatgtaatgagaaatttaattgttatttttctaactaatctattttctcaaattctaatatcctatttccttccctatttctttrttattttaatttataacacagtaatttaatactccattagtacctattagtacctattagtgcttccctgttttaattattattgctttataaaaatgac

SEQ ID NO: 35433 - DNA, 201 bp, Homo sapiens
taataaaaataaattggaagatccatattttaaatagcaaagaatctttttcatcactaaaaagtgatacaatggaaagaattaaattttattataagcaycaaagtcaactgctagggaactcactgagtgtagaacaaggagtatcagactaactgagatggcagaattagctaaggcctataaagtaaggggagctgc

SEQ ID NO: 35434 - DNA, 201 bp, Homo sapiens
catgtctaaagcaacttaagctaagctgagcctttcatattataaaacattcacaggcttttccaaatgccccttgtcacaccaagtctcaatgtattgawctatttactataagttactattaaacatttaaaattaatttcatagaccatcaacaagtaggacatttgtagctatctttactaaatgatagaatgcccc

SEQ ID NO: 35435 - DNA, 201 bp, Homo sapiens
agaccatcaacaagtaggacatttgtagctatctttactaaatgatagaatgccccagagggctggtggcagctttaaagatttttcatagatggtttcarttggatgtaagttctgttttgcaaccaaaagaatgtaagaaatttgacccatatattgcaaaccttctgataagtgacatgaacctcatgagaggattca

SEQ ID NO: 35436 - DNA, 201 bp, Homo sapiens
gactaggcaagaaattttgtaacttctcaatgaatactcagggctttatgttaggagctggaattcagtgaacacaaataaaatcattagcataaataaaygcatcaccctaaagggagatgttggtgatgcttctgcattcacattctgcactggcatcagcagcctttgtttattctttgccccaggagtcctgtaaat

SEQ ID NO: 35437 - DNA, 201 bp, Homo sapiens
tatcttatgtaaaaagatgaacacaatactaactagagctttatttatcagaacgagtgattgccaaaattaagccagggatgctatgcatgaaaaatctstaagagtgattatgctaaagtattaaaaataaaattataaagacaagctatacgcagcagtgaaattatttttaagcaaaaagaaataatcatttcatct

SEQ ID NO: 35438 - DNA, 201 bp, Homo sapiens
ctatacgcagcagtgaaattatttttaagcaaaaagaaataatcatttcatctctgactctaccagaataaagagtgaaattttttaataagtctaacccrgtccacaacacaaagccagcagaactggacaaagtcaactttgcattacaactagtgagttcttaatgaaatgggacaaacctaaatctaaactattttc

SEQ ID NO: 35439 - DNA, 201 bp, Homo sapiens
atttttaagcaaaaagaaataatcatttcatctctgactctaccagaataaagagtgaaattttttaataagtctaacccagtccacaacacaaagccagyagaactggacaaagtcaactttgcattacaactagtgagttcttaatgaaatgggacaaacctaaatctaaactattttcaatttgagataataaatgaa

SEQ ID NO: 35440 - DNA, 201 bp, Homo sapiens
aacacaaagccagcagaactggacaaagtcaactttgcattacaactagtgagttcttaatgaaatgggacaaacctaaatctaaactattttcaatttgrgataataaatgaatttccactaagtttcctaaaaatgtgcatgtgtgtactagcgttgtttctacggtaaaatatctcttttgtaggttcacttctttcc

SEQ ID NO: 35441 - DNA, 201 bp, Homo sapiens
tgtgcatgtgtgtactagcgttgtttctacggtaaaatatctcttttgtaggttcacttctttccataaaaagacacccagattacttagctaagcaatgyttgaccccgggatttaggaggaataattgttgtgatagaattttttagttttcatccaaatatgtcatattatgtggactacataatgtcctcactctca

SEQ ID NO: 35442 - DNA, 201 bp, Homo sapiens
caagagaaagaaaatgaatagagctgaaattatagctttggtcactgatatagatttggtcactgaagaaaggatgtgagaaatattgcattccaatcagyaggacttggcaattaattggttgggagaggcaacaaagagtcacaccttcagagctgcaggcctgagtgtctgagaagatgctggtacattcaaggaagc

SEQ ID NO: 35443 - DNA, 201 bp, Homo sapiens
tcttagcaaaaattattaggaaatcagttgttaggaatcaatagttccattagacaggaagcatagttttccaaactatgggaattttatcccagaactakgtatcacagtgaaattaaaggattaagcctcataagaaagcaaaagtaccctatgttaaagtctttggccaatgctttctaattcttctttttcatatct

SEQ ID NO: 35444 - DNA, 201 bp, Homo sapiens
tgtcctcactctcaaacagagatacaagataaaaattatttccacatccctcagtcactcagaatgtactcttattataccgtagttactcacatgagtgcttttctctcctattaatgctaaattccttgaggagggcctataccatttcttatactaaataaggtagagcaattcagaggtaaatgagtcaaattgttt

SEQ ID NO: 35445 - DNA, 201 bp, Homo sapiens
ccattatcttatgtaaaaagatgaacacaatactaactagagctttatttatcagaacgagtgattgccaaaattaagccagggatgctatgcatgaaaaatctgtaagagtgattatgctaaagtattaaaaataaaattataaagacaagctatacgcagcagtgaaattatttttaagcaaaaagaaataatcatttc

SEQ ID NO: 35446 - DNA, 201 bp, Homo sapiens
gccctgccttgggccgctgccccctgtctacccatcatctgcatgtgtagcagctcttagacctacatttgatgccgggaggggacccaggcctggccgcrgaagggagcggggttaagaggaagcaggggctctgtgaggactggacagaagcacctagcacagcccatcctaggagagctcagggccccgtggatgagt

SEQ ID NO: 35447 - DNA, 201 bp, Homo sapiens
agctgttagttcgaggggaccaggctctgtgtggtcccgacagcactgtgtcttccaggcaccagctggtggtgagcagccctccgagacctgtgaggcayggggacatggtgcagctggtccacggcatgaccacccgctccctgaacacgtgagtgtgcccgccgtctgctctgctgcacctgtgggtttcctctgtgg

SEQ ID NO: 35448 - DNA, 201 bp, Homo sapiens
aaagggagcacccggggatgatgtgccgctgggatagaaggcagggaggcactgggggcagatgcatccttgaggagagatgaggaggccccgaggctcgkccaggttggggtccctgggctgtaagcagctgagatggcacccaggagctgcccagggtcaggtagctgtggccgcactgtgggcttctggtcgtcgggg

SEQ ID NO: 35449 - DNA, 201 bp, Homo sapiens
tcttcctctaccactacctgcccgcactcaccttccaaatccttctgctccctgtggtcctgcagcacatcagcgaccacctgtgcaggtacgggggctgyggagacagtggctggaccgggcagcagccctctgctgggaagcccatgcgcagcaaacacatggggtgcagcgaacctcacccatttcacgttacactga

SEQ ID NO: 35450 - DNA, 201 bp, Homo sapiens
gccgaggcagctcccaccagcaacaggtgacctgttaccccttcaaagacgtcaataactggtggattgtaaaggatcccaggaggtgagtgcaggtcctrtgactccagagcagagctcacctcctggcctggccaggcgagaccctgggatgcagtcctgggcccccttctttccctccctcactgactctagtcaccg

SEQ ID NO: 35451 - DNA, 201 bp, Homo sapiens
ggcgtatggcagggcccagggtcggccccagctctgtggctgtggctgacctcagcactgcctgcctaaatcatctgatttcggctccttgtctgtggtaycttcattttccctgaaaccccttgctaggttgtatttgttgaaatctgcttccctttgcagaaactttaggagaaaggcgtgtgggcccgatcgatgacc

SEQ ID NO: 35452 - DNA, 201 bp, Homo sapiens
aaccagccttgtgttatgaaacagaaaacagaaaacatgaggacatgtaacatgtaaaaaaggaaagtacttgttcacaaaacttttgagttatgtgtgtgagtgtgtaagaaccagatcagactggaaaaaactctctcccactgtgggttcactgtcaacaaaacatcaggccagccagtgtctaggctgtctcctcaa

SEQ ID NO: 35453 - DNA, 201 bp, Homo sapiens
ttgctaggttgtatttgttgaaatctgcttccctttgcagaaactttaggagaaaggcgtgtgggcccgatcgatgacccacttccagatacgtttctttycctttcttttctttttctcataaatagacacagggtctcactatgttgcccaggctggtgtcaaactcctgggctcaagcagttatcctacctcagcctc

SEQ ID NO: 35454 - DNA, 201 bp, Homo sapiens
accagccttgtgttatgaaacagaaaacagaaaacatgaggacatgtaacatgtaaaaaaggaaagtacttgttcacaaaacttttgagttatgtgtgtgagtgtgtaagaaccagatcagactggaaaaaactctctcccactgtgggttcactgtcaacaaaacatcaggccagccagtgtctaggctgtctcctcaat

SEQ ID NO: 35455 - DNA, 201 bp, Homo sapiens
gtgggcccgatcgatgacccacttccagatacgtttcttttcctttcttttctttttctcataaatagacacagggtctcactatgttgcccaggctggtstcaaactcctgggctcaagcagttatcctacctcagcctcccaaagtgctctgattacaggcctgagccaccgcgcctggcccagatacatctctttgtt

SEQ ID NO: 35456 - DNA, 201 bp, Homo sapiens
cagtgagccgagattgtaccactgcactccagcctggtgacagaacaagactctgtctcaaaaaaataaataaataaaattagccaggtgtggtggcatgygcctatagtcccagctactcaggagcctgaggcaggaggatcccttgagccctggtggtcaaagctgcagtgagccatgatggtgccactgcactccagc

SEQ ID NO: 35457 - DNA, 201 bp, Homo sapiens
gcgcctggcccagatacatctctttgttgacttcacacagatatgagaacggccgaggcagctcccaccagcaacaggtgacctgttaccccttcaaagaygtcaataactggtggattgtaaaggatcccaggaggtgagtgcaggtcctgtgactccagagcagagctcacctcctggcctggccaggcgagaccctgg

SEQ ID NO: 35458 - DNA, 201 bp, Homo sapiens
tcactgtctcctgatggtgtcctcccattgctgcctgcccagctccagcacctgcagcccgagtgggctttttcttttttttcttcttattttttcggggkacagagtcccaccctgttgcccaggctggagtgcagtggtacgatctcggctcactgcaacctccgcttcccgggttcaagcgattctcctgcctcagcc

SEQ ID NO: 35459 - DNA, 201 bp, Homo sapiens; identical to SEQ ID NO: 4770

SEQ ID NO: 35460 - DNA, 201 bp, Homo sapiens
tctgcgagaatgttcttggacttggctcccccatggcccctctatgtaggggtctgctgggatgtcactgcatccaaaagtgcctcctgggtgctgtcccycaccatttgttttattagtggcactcctacaggtgcacgctctgcccaccggcatgatggctgtttcccagagggctgtgagggccttgtcttgttcaca

SEQ ID NO: 35461 - DNA, 201 bp, Homo sapiens
gagctcagggccccgtggatgagtgtacaaggacaggctgggaatgttgacccgctttctatgcagagaatggagtttgggcacacctccttaaagtggtmaagcttaaagtatgagtgagtccaagaagcctggaagctcgggcacgagtggagccgtgaaggcttcttccttctcagtccttcgtccttgtccgacttg

SEQ ID NO: 35462 - DNA, 201 bp, Homo sapiens
agcctgggcaacatagtaagaaccctctctctaaaaaagcaaaagagagagaagacccggcctgtgggagcagcagagtcggtgtagctcgagccctttcmtatagatgcctggctgcgctgggtgctggctggggcgctgtgtgccggtggctgggcagtgaactacctcccgttcttcctgatggagaagacactcttc

SEQ ID NO: 35463 - DNA, 201 bp, Homo sapiens
gagcgatgctgacagctgacagtcatagattcatcctgtttgttgagaattccttgcattaagagcagccgctgcaccctagaaagtgctgggtttctccmaagcttttcctgacaaaggcctgtgacttggttttctctaaacgctttggcaacctggagccaggagtaggggtgtggcatgtgtgcctgttgaaggaaa

SEQ ID NO: 35464 - DNA, 201 bp, Homo sapiens
cacaacagccccacacagttgtatcgcttctgaagtaatgccttttttcatgagtgtttttcatcctcatacgttttcccttgctaccttaaaattgacaygtgtttcctctttgaaacagagaatgctctcatcactcagtcaaggctaatgcttttggaatcagtgttaatatttttcaatctattggccgtgttgtcc

SEQ ID NO: 35465 - DNA, 201 bp, Homo sapiens
ggccaaagtgagggagtcacctgaggccaggagttcaaaaccagcctgggcaacatagtaagaaccctctctctaaaaaagcaaaagagagagaagacccrgcctgtgggagcagcagagtcggtgtagctcgagccctttcctatagatgcctggctgcgctgggtgctggctggggcgctgtgtgccggtggctgggca

SEQ ID NO: 35466 - DNA, 201 bp, Homo sapiens
tacctgctccgacggcgaagaaatgtccatgacctccctcagggttagtacctctcccacatggctttctttctttttaatatagacatggggtcttgctrtgttgtccagggtgttcttgaactcctgggcttaagcgatcctcctgcctcggcctcccatagtgctaggattacaggtgtgcgctgagcattcaccgcc

SEQ ID NO: 35467 - DNA, 201 bp, Homo sapiens
cgatgacccacttccagatacgtttcttttcctttcttttctttttctcataaatagacacagggtctcactatgttgcccaggctggtgtcaaactcctrggctcaagcagttatcctacctcagcctcccaaagtgctctgattacaggcctgagccaccgcgcctggcccagatacatctctttgttgacttcacaca

SEQ ID NO: 35468 - DNA, 201 bp, Homo sapiens; identical to SEQ ID NO: 4663

SEQ ID NO: 35469 - DNA, 201 bp, Homo sapiens
agtgggtcaccctggacaccaatattgcctactggctgcaccccaggaccagcgtaagcgagcgatgctgacagctgacagtcatagattcatcctgtttsttgagaattccttgcattaagagcagccgctgcaccctagaaagtgctgggtttctccaaagcttttcctgacaaaggcctgtgacttggttttctctaa

SEQ ID NO: 35470 - DNA, 201 bp, Homo sapiens; identical to SEQ ID NO: 4673

SEQ ID NO: 35471 - DNA, 201 bp, Homo sapiens
aaggcaaccagtttatccccgtgcaagtggagctttctcagggtcgaaatcacctcatttgaccgggcagtcttgggtgtggtggggaaagctaagtggartgatgcggttcgataaggggtctttgttagaaaggcaggaagccagctttttgctgcactgacagcttctgctctgagctcttgaccttgtgctacttct

SEQ ID NO: 35472 - DNA, 201 bp, Homo sapiens
tgctggcgctgagaagtgatgactcggaacacaagtacagctccagcccactggagtgggtcaccctggacaccaatattgcctactggctgcaccccagraccagcgtaagcgagcgatgctgacagctgacagtcatagattcatcctgtttgttgagaattccttgcattaagagcagccgctgcaccctagaaagtg

SEQ ID NO: 35473 - DNA, 201 bp, Homo sapiens
gtgtgtgtgtgtttttgagacggagtcttgctgtgtcgcccaggttggagtgcagtggtgccatctcggctcactgcaacctctgcctcctgggttcaagcaattctctgcctcagcctcccgagtagctgagattacaggtgcccgccaccacacccagctaatttttgtatttttagtagagacgggatttcaccatct

SEQ ID NO: 35474 - DNA, 201 bp, Homo sapiens
acctccctgactgggggtatcggcaactggagatcgtcggggagaagctgtcccggggctaccacgggagcacggtgtggaacgtggaggagcaccgatayggcgcgagtgagtccgcggcgtggcttccgccgctcctggaatgtactttcagctgctcaatatttgataacaccccagagttctcattttggtgggaag

SEQ ID NO: 35475 - DNA, 201 bp, Homo sapiens
ataactcaagacgcttcttccgaggtgtcgctggaaggcaaccagtttatccccgtgcaagtggagctttctcagggtcgaaatcacctcatttgaccggrcagtcttgggtgtggtggggaaagctaagtggagtgatgcggttcgataaggggtctttgttagaaaggcaggaagccagctttttgctgcactgacagc

SEQ ID NO: 35476 - DNA, 201 bp, Homo sapiens
ggctcaagtcagtatcattgtttggtgacaggtctttatttttacattgaaggaaatttgaaaaggaatgaaataatccttgagatgtctttttgcaggarattgtgaacagaggatctgacacagacgtctggaagaccatcctctcagaggtccgctttgtgcacgtgaacacttccgctgtcttaaaggtaaggacac

SEQ ID NO: 35477 - DNA, 201 bp, Homo sapiens; identical to SEQ ID NO: 4656

SEQ ID NO: 35478 - DNA, 201 bp, Homo sapiens
taataactcaagacgcttcttccgaggtgtcgctggaaggcaaccagtttatccccgtgcaagtggagctttctcagggtcgaaatcacctcatttgaccrggcagtcttgggtgtggtggggaaagctaagtggagtgatgcggttcgataaggggtctttgttagaaaggcaggaagccagctttttgctgcactgaca

SEQ ID NO: 35479 - DNA, 201 bp, Homo sapiens; identical to SEQ ID NO: 4657

SEQ ID NO: 35480 - DNA, 201 bp, Homo sapiens
gggcattgggaaggaaggccagtaccagccccttatagcttccctcacttggggacttgtccctttgtctcaggctcaagtcagtatcattgtttggtgayaggtctttatttttacattgaaggaaatttgaaaaggaatgaaataatccttgagatgtctttttgcaggaaattgtgaacagaggatctgacacagacg

SEQ ID NO: 35481 - DNA, 201 bp, Homo sapiens; identical to SEQ ID NO: 4760

SEQ ID NO: 35482 - DNA, 201 bp, Homo sapiens; identical to SEQ ID NO: 4659

SEQ ID NO: 35483 - DNA, 201 bp, Homo sapiens
ttctttctgtctctcactcatcaaccttctgcttctgtctcagggaggactagctcggatcacccagggtcagccactggaggtggcctttgggtcccagrtcactctgaggaacgtctttgggaaacctgtgccctgctggcttcattcccaccaggacacctaccccatgatgtaaggtgatggttttactttgaagat

SEQ ID NO: 35484 - DNA, 201 bp, Homo sapiens; identical to SEQ ID NO: 4662

SEQ ID NO: 35485 - DNA, 201 bp, Homo sapiens
tgtgattaaatgggagatcattaccactgttacaagaatggccaccagcctaaacatcaccccagagggaggagtggccatcgggaaggctggcttagggkcatttttctttctgtctctcactcatcaaccttctgcttctgtctcagggaggactagctcggatcacccagggtcagccactggaggtggcctttgggt

SEQ ID NO: 35486 - DNA, 201 bp, Homo sapiens
tgggcggcagagcaagaccctgactcaaagaaaagaaagagacagtagaaaatcaaaagagatgtgtattgggtgatgactgtatgaggccttgtgtctayagaatgttttaacattcacaacagccccacacagttgtatcgcttctgaagtaatgccttttttcatgagtgtttttcatcctcatacgttttcccttgc

SEQ ID NO: 35487 - DNA, 201 bp, Homo sapiens
tgaggccaggagttcaaaaccagcctgggcaacatagtaagaaccctctctctaaaaaagcaaaagagagagaagacccggcctgtgggagcagcagagtyggtgtagctcgagccctttcctatagatgcctggctgcgctgggtgctggctggggcgctgtgtgccggtggctgggcagtgaactacctcccgttcttc

SEQ ID NO: 35488 - DNA, 201 bp, Homo sapiens
cttcgtggttcccgggtgttgctggagggacttggcgtatggcagggcccagggtcggccccagctctgtggctgtggctgacctcagcactgcctgcctraatcatctgatttcggctccttgtctgtggtaccttcattttccctgaaaccccttgctaggttgtatttgttgaaatctgcttccctttgcagaaactt

SEQ ID NO: 35489 - DNA, 201 bp, Homo sapiens; identical to SEQ ID NO: 4766

SEQ ID NO: 35490 - DNA, 201 bp, Homo sapiens; identical to SEQ ID NO: 4767

SEQ ID NO: 35491 - DNA, 201 bp, Homo sapiens; identical to SEQ ID NO: 4769

SEQ ID NO: 35492 - DNA, 201 bp, Homo sapiens
acttcctctaacacaggacacttcctcacacggaacacttcctcacacggagcacttcctgtaacaggacacttcctcacacggagcacttcctctaacayggagcacttcctgtaacacaggacacttcctcacacggagcacttcctctaacacaggacacttcctcacacggagcacttcctcacagggagcactttc

SEQ ID NO: 35493 - DNA, 201 bp, Homo sapiens
cctctaacacaggacacttcctcacacggaacacttcctcacacggagcacttcctgtaacaggacacttcctcacacggagcacttcctctaacatggagcacttcctgtaacacaggacacttcctcacacggagcacttcctctaacacaggacacttcctcacacggagcacttcctcacagggagcactttctcta

SEQ ID NO: 35494 - DNA, 201 bp, Homo sapiens; identical to SEQ ID NO: 4672

SEQ ID NO: 35495 - DNA, 201 bp, Homo sapiens
aaagctaatttcaaagccttcacccatagtttatgcactctgctgctgatggggtccccagttttgtaaacgtgcattttagagtctgtgaacatgacggygctatgtgaaagcatagctgcagtacacagagatggtgtgtgcacagtgtagtcagctctgcagtgtggttgcttttccagaatacagtagcaacgtgcc

SEQ ID NO: 35496 - DNA, 201 bp, Homo sapiens
aggagtggccatcgggaaggctggcttaggggcatttttctttctgtctctcactcatcaaccttctgcttctgtctcagggaggactagctcggatcacycagggtcagccactggaggtggcctttgggtcccaggtcactctgaggaacgtctttgggaaacctgtgccctgctggcttcattcccaccaggacacct

SEQ ID NO: 35497 - DNA, 201 bp, Homo sapiens
ggaaacctgtgccctgctggcttcattcccaccaggacacctaccccatgatgtaaggtgatggttttactttgaagataattaaatgctttatttgctcrtagatttgcttatcttagcaactttccctttctttgaggaagtttgtttgcaggacagaaagaagttgagcagcccgggtgctgattgccagtgagcttc

SEQ ID NO: 35498 - DNA, 201 bp, Homo sapiens
ccctgaacacacatgccgggcgggagacctgccctgaggctcggcagcccctcagtggggtctgctgctggactccaaatgtgaccgtttgccagaggtcrgcatcccagggtggtcccctggctcagaaaaggtccgcttgtagctccgcccattggaccctcctcggtgccatttgcagatgtcaccattcagaatgtc

SEQ ID NO: 35499 - DNA, 201 bp, Homo sapiens
ggcggcttttgtaacttctcaggatggaatcccaatgtgaatctcccacaaggggcacctgctgacagcgtgacccgggcaggggttccccttccaacccragtggacacgggagccacggccttcccatcacgccctttactctcctgcggtgtcaccagctgagcggggctcacctccctgactgggggtatcggcaac

SEQ ID NO: 35500 - DNA, 201 bp, Homo sapiens
acaggacacttcctcacacggaacacttcctcacacggagcacttcctgtaacaggacacttcctcacacggagcacttcctctaacatggagcacttcctgtaacacaggacacttcctcacacggagcacttcctctaacacaggacacttcctcacacggagcacttcctcacagggagcactttctctaacacagga

SEQ ID NO: 35501 - DNA, 201 bp, Homo sapiens
caggacacttcctcacacggaacacttcctcacacggagcacttcctgtaacaggacacttcctcacacggagcacttcctctaacatggagcacttcctgtaacacaggacacttcctcacacggagcacttcctctaacacaggacacttcctcacacggagcacttcctcacagggagcactttctctaacacaggac

SEQ ID NO: 35502 - DNA, 201 bp, Homo sapiens
ggacacttcctcacacggaacacttcctcacacggagcacttcctgtaacaggacacttcctcacacggagcacttcctctaacatggagcacttcctgtmacacaggacacttcctcacacggagcacttcctctaacacaggacacttcctcacacggagcacttcctcacagggagcactttctctaacacaggacac

SEQ ID NO: 35503 - DNA, 201 bp, Homo sapiens
cttcctcacacggaacacttcctcacacggagcacttcctgtaacaggacacttcctcacacggagcacttcctctaacatggagcacttcctgtaacacaggacacttcctcacacggagcacttcctctaacacaggacacttcctcacacggagcacttcctcacagggagcactttctctaacacaggacacttcct

SEQ ID NO: 35504 - DNA, 201 bp, Homo sapiens
acggaacacctcctcacacggaacacttcctcacacggagcacttcctcacacggaacacctcctcacacggagcacttcctcacacggagcacttcctcwaacagaacacttcctcacacggagcacttcctcacagggagcactccatcacacggagcacttgctcacacggagcacttcctgacatggaatgtttgaa

SEQ ID NO: 35505 - DNA, 201 bp, Homo sapiens
cggaacacctcctcacacggaacacttcctcacacggagcacttcctcacacggaacacctcctcacacggagcacttcctcacacggagcacttcctctmacagaacacttcctcacacggagcacttcctcacagggagcactccatcacacggagcacttgctcacacggagcacttcctgacatggaatgtttgaaa

SEQ ID NO: 35506 - DNA, 201 bp, Homo sapiens; identical to SEQ ID NO: 4771

SEQ ID NO: 35507 - DNA, 201 bp, Homo sapiens
aacacctcctcacacggaacacttcctcacacggagcacttcctcacacggaacacctcctcacacggagcacttcctcacacggagcacttcctctaacrgaacacttcctcacacggagcacttcctcacagggagcactccatcacacggagcacttgctcacacggagcacttcctgacatggaatgtttgaaactg

SEQ ID NO: 35508 - DNA, 201 bp, Homo sapiens
tgacgaagtatattatgggcagtacatctctttttacatgaaacaaatcttcttcttggatgacagtgggccgccatttggccacatggtgctggccttgrgaggtaggagtcatcaggagagtagcccctacccttcaggacctcaaatacatttaaaacttatcagtgcatttcttacaggcagaaaccaggtcttatt

SEQ ID NO: 35509 - DNA, 201 bp, Homo sapiens
cctcacacggaacacttcctcacacggagcacttcctcacacggaacacctcctcacacggagcacttcctcacacggagcacttcctctaacagaacacytcctcacacggagcacttcctcacagggagcactccatcacacggagcacttgctcacacggagcacttcctgacatggaatgtttgaaactgccattga

SEQ ID NO: 35510 - DNA, 201 bp, Homo sapiens
gctggtcatcccggtcgtcctgtacttactgttcttctacgtccacttgattctagtcttccgctctgggccccacgaccaaatcatgtccagtgccttcyaggccagcttagaggtaagtaagcagtgggcatcgtggccactggagaaggaagatgatagtggacccagagttttcttacaaacacatcaagtgaacat

SEQ ID NO: 35511 - DNA, 201 bp, Homo sapiens
ctataatgtaacgtgatgtgattaaatgggagatcattaccactgttacaagaatggccaccagcctaaacatcaccccagagggaggagtggccatcggraaggctggcttaggggcatttttctttctgtctctcactcatcaaccttctgcttctgtctcagggaggactagctcggatcacccagggtcagccactg

SEQ ID NO: 35512 - DNA, 201 bp, Homo sapiens
acaaccagccttgtgttatgaaacagaaaacagaaaacatgaggacatgtaacatgtaaaaaaggaaagtacttgttcacaaaacttttgagttatgtgtgtgagtgtgtaagaaccagatcagactggaaaaaactctctcccactgtgggttcactgtcaacaaaacatcaggccagccagtgtctaggctgtctcctc

SEQ ID NO: 35513 - DNA, 201 bp, Homo sapiens
ctcagccatgagaattcagagctgtgcccctccggtgcagctgttagttcgaggggaccaggctctgtgtggtcccgacagcactgtgtcttccaggcacyagctggtggtgagcagccctccgagacctgtgaggcacggggacatggtgcagctggtccacggcatgaccacccgctccctgaacacgtgagtgtgccc

SEQ ID NO: 35514 - DNA, 201 bp, Homo sapiens
gagccgggtggctggggatcccttctgtagcctctcgtgagccctcatggaccacggctcctcccttcttttctagggcgtctgcctgagcccgcttttckacaagatgtggggatttttgaagcgccctgtagtggtgacggctgacatcaacttgagccttgtggccctgactgggatggggttactgagccggctgtg

SEQ ID NO: 35515 - DNA, 201 bp, Homo sapiens
caaccagccttgtgttatgaaacagaaaacagaaaacatgaggacatgtaacatgtaaaaaaggaaagtacttgttcacaaaacttttgagttatgtgtgtgagtgtgtaagaaccagatcagactggaaaaaactctctcccactgtgggttcactgtcaacaaaacatcaggccagccagtgtctaggctgtctcctca

SEQ ID NO: 35516 - DNA, 201 bp, Homo sapiens; identical to SEQ ID NO: 4674

SEQ ID NO: 35517 - DNA, 201 bp, Homo sapiens
aagcaaaagagagagaagacccggcctgtgggagcagcagagtcggtgtagctcgagccctttcctatagatgcctggctgcgctgggtgctggctggggygctgtgtgccggtggctgggcagtgaactacctcccgttcttcctgatggagaagacactcttcctctaccactacctgcccgcactcaccttccaaatc

SEQ ID NO: 35518 - DNA, 201 bp, Homo sapiens
atgctttccagagacagccaccacgcaggagggaggatcaccccaggcaacccagacacgggtgttcacatgtgaggctgtgagctccacatagcacaaargaggcttgctgactttgggcggccatgtctgctgggacctgggtgatccagtgcgtgccacagccagaagcaccattccctgcatatggccactagccac

SEQ ID NO: 35519 - DNA, 201 bp, Homo sapiens
cacgtcacgtctgcatcactactgtgggtgagcctggacggacgggggctggggctgcccgtggcagcggcaagggatgctttccagagacagccaccackcaggagggaggatcaccccaggcaacccagacacgggtgttcacatgtgaggctgtgagctccacatagcacaaaggaggcttgctgactttgggcggcc

SEQ ID NO: 35520 - DNA, 201 bp, Homo sapiens
ggagttcaaggaattttctgaaatctcggtcttggttttccaggcatgatgttgcagcccccctgagcccccattcacaggaggtctcctgctacattgamtataacatctccatgcccgcccagaacctctggagactggtgagtaaggctgcggctatagcagccacaaccgtcagtaatgaacactccctcacacgga

SEQ ID NO: 35521 - DNA, 201 bp, Homo sapiens
cttcccaccaaaatgagaactctggggtgttatcaaatattgagcagctgaaagtacattccaggagcggcggaagccacgccgcggactcactcgcgccrtatcggtgctcctccacgttccacaccgtgctcccgtggtagccccgggacagcttctccccgacgatctccagttgccgatacccccagtcagggaggt

SEQ ID NO: 35522 - DNA, 201 bp, Homo sapiens; identical to SEQ ID NO: 4863

SEQ ID NO: 35523 - DNA, 201 bp, Homo sapiens
gtgtccttacctttaagacagcggaagtgttcacgtgcacaaagcggacctctgagaggatggtcttccagacgtctgtgtcagatcctctgttcacaatytcctgcaaaaagacatctcaaggattatttcattccttttcaaatttccttcaatgtaaaaataaagacctgtcaccaaacaatgatactgacttgagcc

SEQ ID NO: 35524 - DNA, 201 bp, Homo sapiens
  misc_feature (1)...(201): n = A,T,C or G, or insertion/deletion polymorphism (see Tables 1-2)
ctcctcggagccccaagtccgtgctaaccccgttgggcccccgcggcccttccgctgagaccatccacacctgttggtgtcctcccgccttccgagcatancccccagggggcgggtgggtcagtgtctccagaagccggccccgtgcctgtcacaggacgagcggttccaggcgggaatcccgcttctgtgtctccagtc

SEQ ID NO: 35525 - DNA, 201 bp, Homo sapiens
cacactcaaggtaagcaggtggttctagggagggccgaggagaggggccagctaggacgtcccctcgggctcacacagacctgcctggcggcaggcctccsccggttggtttctgtgggtcccccaccccttcccacagtcagtgtccctgcaatggaagctgactgtgtgtgtggcctggagaccctgtgtctgcagcag

SEQ ID NO: 35526 - DNA, 201 bp, Homo sapiens
tcccctttcacaaggacacatgggacccagtactgtgagagggcttagtgctgggtgacagtgatctgattgaaaaaaaggagaagaatttggctcattayggccacataccctgggagtagttctcagctgtaaaaacattctctgtgcctgctcctccctctgcctaaaaaagccccatatctcccccacattcacact

SEQ ID NO: 35527 - DNA, 201 bp, Homo sapiens
ggttaatttttaaattttttgtagagatggggtctccctgtgttgcccaggctggtctccatctcctgggatctagtggtcctcccacctcagcttcccaragtgctgagattacaggtgtgagccactatgcctggcctattggctgctatataaagaaaacttttgtttttttttgcattcatgctgtctgaaatttct

SEQ ID NO: 35528 - DNA, 201 bp, Homo sapiens
catccctgctggcggttaagacccctgtcagctctcccggactcctccagcccgtcagactatcagactagaatagaaagcagccctcgcccttgcgctcrtgctttcatgagatggggtcccaccaactgcagacacagctgtccccaggacttggtccctgtctgcctcttgcagcttgtctcttctgccgccttcttg

SEQ ID NO: 35529 - DNA, 201 bp, Homo sapiens
gtttctgagcatcttaaaatcacctttgaaggaaaagtcctcacaggaacacccccccttgtgccttacagacaaagaagtatgccgatgtgatcatcccrcgaggagtggacaatatgggtaagaagctggcctgctgggctgtccccccgcccctcccagagcttgaggcagggacagttccaccagtgtgcagttact

SEQ ID NO: 35530 - DNA, 201 bp, Homo sapiens
agttctctgggccctgagtgtccccccaggagcgtggttggagccagtcaggaagcctgttgcactgtggggagccctgccctgccctgccacaactgtgrtcctggagaaatcctcccatcttcccttcccacgttggggcctttagggccctccacacacacctctgcccactgtgccctcccgtgctttggggcaaag

SEQ ID NO: 35531 - DNA, 201 bp, Homo sapiens; identical to SEQ ID NO: 4862

SEQ ID NO: 35532 - DNA, 201 bp, Homo sapiens
gttgctgtgccagggtatttgcagaagcttcatgattccagaggaacaatgtcacactttgtagaagtgccacacttagcttggcccagtgaattgagtcrttagcgtagccagctgtctcctgtaatggagtgggaacactggaagggggctgtcttctgtgatggaatggggacactggaagaggcactttcttttggc

SEQ ID NO: 35533 - DNA, 201 bp, Homo sapiens; identical to SEQ ID NO: 4864

SEQ ID NO: 35534 - DNA, 201 bp, Homo sapiens
ggtctctttttgtcgtctagggtggagtgcaatggcacgatctcggctcactccaaactccacctcccaagtttaagcaattctcctgtctcacccttccragtagctgggattacaggcgtacgccaccacacccagctaatttttgtatttttagtggagatggggttttgccatgttggctgggctggtctcgaactc

SEQ ID NO: 35535 - DNA, 201 bp, Homo sapiens
gcctgttaaggtaaaaatacagcacaaaggaactgaaaccaagattcctgcctttgataatgtaggacaagtaagttctatctgctgctttttttttttttgagatagggtctctttttgtcgtctagggtggagtgcaatggcacgatctcggctcactccaaactccacctcccaagtttaagcaattctcctgtctca

SEQ ID NO: 35536 - DNA, 201 bp, Homo sapiens
tgcctgttaaggtaaaaatacagcacaaaggaactgaaaccaagattcctgcctttgataatgtaggacaagtaagttctatctgctgctttttttttttttgagatagggtctctttttgtcgtctagggtggagtgcaatggcacgatctcggctcactccaaactccacctcccaagtttaagcaattctcctgtctc

SEQ ID NO: 35537 - DNA, 201 bp, Homo sapiens
ctgtgccaggcacggagcgggggggcggcagggatggaacccggcacatgggcctctgcctccttggcgcgctgtaggcgcgagcctaaagtcatcaggcracagcccccgccacgttccggggcgccccgacggctccagcagcgggtggggtgggaggcgtccggacagtccggaggcctcgatggccaagaggagcct

SEQ ID NO: 35538 - DNA, 201 bp, Homo sapiens
ccatccacacctgttggtgtcctcccgccttccgagcataacccccagggggcgggtgggtcagtgtctccagaagccggccccgtgcctgtcacaggacsagcggttccaggcgggaatcccgcttctgtgtctccagtcgaccgtgtgtgagaagatcatggagttgctgggacagaacgaggtggaacagcggcagcg

SEQ ID NO: 35539 - DNA, 201 bp, Homo sapiens
ttgccgctgcagttctccgggacgtgcgccgagggagggacctggagcagattctgacgcagtacaccaccttcgtgaagccggccttcgaggagttctgyctgccggtacctgtgctcgctgcttcagagcccattttcccctttcacaaggacacatgggacccagtactgtgagagggcttagtgctgggtgacagtg

SEQ ID NO: 35540 - DNA, 201 bp, Homo sapiens
gttagcgtagccagctgtctcctgtaatggagtgggaacactggaagggggctgtcttctgtgatggaatggggacactggaagaggcactttcttttggytgcctcagctgcactttctgcctcacttcttggatcatggcctctcacacctggctgatgactgagtctgtgtcccccatttgccgatgacaccagcacc

SEQ ID NO: 35541 - DNA, 201 bp, Homo sapiens
gccaggagatccgggacatgttccacctgcgcctcttcgtggacaccgactccgacgtcaggctgtctcgaagaggtaaggcggccgcgggcctccgtgcstgcctggccgaggctggcggcaggtcctgaggtctgaagcacgcctgccccttgccgctgcagttctccgggacgtgcgccgagggagggacctggagca

SEQ ID NO: 35542 - DNA, 201 bp, Homo sapiens; identical to SEQ ID NO: 4869

SEQ ID NO: 35543 - DNA, 201 bp, Homo sapiens
tcttggtgttctacagccaggagatccgggacatgttccacctgcgcctcttcgtggacaccgactccgacgtcaggctgtctcgaagaggtaaggcggcygcgggcctccgtgcctgcctggccgaggctggcggcaggtcctgaggtctgaagcacgcctgccccttgccgctgcagttctccgggacgtgcgccgagg

SEQ ID NO: 35544 - DNA, 201 bp, Homo sapiens
ttagcgtagccagctgtctcctgtaatggagtgggaacactggaagggggctgtcttctgtgatggaatggggacactggaagaggcactttcttttggcygcctcagctgcactttctgcctcacttcttggatcatggcctctcacacctggctgatgactgagtctgtgtcccccatttgccgatgacaccagcacct

SEQ ID NO: 35545 - DNA, 201 bp, Homo sapiens
ccgtgctttggggcaaagtcctcagagaggccagtgtgggaggcggtaggtaaactagtgctggtggcttgaagctccgggccaggtaaacgggcagatgyggcagggagacacctgccactgctagaagattccaccctggctggctggcatggtcagccttttcccaaggacttgtgggaagaaggcctgcaaagccgc

SEQ ID NO: 35546 - DNA, 201 bp, Homo sapiens; identical to SEQ ID NO: 4866

SEQ ID NO: 35547 - DNA, 201 bp, Homo sapiens; identical to SEQ ID NO: 4867

SEQ ID NO: 35548 - DNA, 201 bp, Homo sapiens
cgtgggggaagggggctgagccctgtggctgggttctgacaactgtaacggttttgtcgagcttaggcccctttggagggagaatcaataaataacaaacmccaactacaaacgccagttggttccttttttaattacatttaaaaaagacaaaggcatggagctgtatggatgacacaccttgaccactgacgaggaaga

SEQ ID NO: 35549 - DNA, 201 bp, Homo sapiens
gatttggaaggtgagtgcgggcaggtagtggtagaggaagagtgtcttctccatcaggaagaacgggaggtagttcactgcccagccaccggcacacagcrccccagccagcacccagcgcagccaggcatctataggaaagggctcgagctacaccgactctgctgctcccacaggccgggtcttctctctcttttgctt

SEQ ID NO: 35550 - DNA, 201 bp, Homo sapiens; identical to SEQ ID NO: 4871

SEQ ID NO: 35551 - DNA, 201 bp, Homo sapiens; identical to SEQ ID NO: 4872

SEQ ID NO: 35552 - DNA, 201 bp, Homo sapiens
cactttctagggtgcagcggctgctcttaatgcaaggaattctcaacaaacaggatgaatctatgactgtcagctgtcagcatcgctcgcttacgctggtyctggggtgcagccagtaggcaatattggtgtccagggtgacccactccagtgggctggagctgtacttgtgttccgagtcatcacttctcagcgccagca

SEQ ID NO: 35553 - DNA, 201 bp, Homo sapiens
ttttttccagagaactcttattattagtcaatggtaatttattcttgagttgctctgaatacctactagtgccataatattccaaatgaacctgggtatcygtttcttgggggtgggttttgtttagaggttatgggtgatggtgaaagtgcacatgattctccccgtgacgaagcactgcagaacatctcggctgatgat

SEQ ID NO: 35554 - DNA, 201 bp, Homo sapiens
gtgtttttgagcagaggttaagagtcagtggttttgattttagtcccaatggattcctgttaaattattcttcctatgacagatgactccgaagcaggttmtgaaagttcctttaaaaaccttcattactattttaaggacaattatcagtcaacacttggaatttcttagcttttaaacttttcagcctcctttcactta

SEQ ID NO: 35555 - DNA, 201 bp, Homo sapiens
aaaagaaagaatagctaagggagtcagtttactacctcaaaattacagactgcctaaacaaatgtttaaattgatgtccttctctggattctcccactagmcctgggtacccctgaatgttcaaatgccttagagttgtcctcctttgcatctggggtgactggcccacagagagttggggcatattttaatgggaggagg

SEQ ID NO: 35556 - DNA, 201 bp, Homo sapiens
aggtgggagccactgtgcccaacctagagtttattttttagatcaattttagctttacagaaaaattgagatgatggtacagagacagcatcaagatcaaktcttcatattattaacatcttatattagcatagtacatttgtttcaattatgacagtttgttacaatattgtgaactaatattgatacattatcattaaa

SEQ ID NO: 35557 - DNA, 201 bp, Homo sapiens
taaggtttcctctgaaaatctgtcaggagcaaggactactttggcattaaccatcactgtttgatttcttgacaggtatgtgagatggggagtgatttgattttttttttttttttttaatagaaaagaggaatagttgttccccaaatgtttcttcctccactgccttccagtactttctttacatgaaagattagtgta

SEQ ID NO: 35558 - DNA, 201 bp, Homo sapiens
ctgtgctctcagtgataagtgttaaaacatgagttgaaaaacttgaacttctcaaaatctgattaatatgcatgggcataatctatttcttttttctttgkttttttttttttttttttttttgaggtagagtcttcctctgttgtccaagctggagtgtagtggcccgatctcgggttcaagtgattctcctgccttctg

SEQ ID NO: 35559 - DNA, 201 bp, Homo sapiens
attttttattattttgtaccaaaacataatttctatttagtattctggttgtactgaattttattgtcttctgaaagaaaatagaaactttttttcttgatttttttttttttttttgaggcggagtctagctcttgttgcccaggctggagtgcaatggcgtgatctcggctcaccgcaacctctgcctcctgggttcaa

SEQ ID NO: 35560 - DNA, 201 bp, Homo sapiens
agtagagatgggttttctccatgttggtcaggctggacttgaactcccggcctcaggagatccacccacctcagcctcccaaagtgctgagattacaggcrtgagccaccgcgcccagccttcttcttttttttttttttagacggagtttcgcttttatcgcgcaggctggagtgcaatactgcgatctcggctcactgc

SEQ ID NO: 35561 - DNA, 201 bp, Homo sapiens
aaacaaaacaaaaaacaaacaggcgagcccagcacagcggtgcaagcctgtggtcccaggtactcaggaagctgaggcatgaggatcccttgagccctcaygatagcacctgtgaatagttactgcattctagcctgggcaacatagcaagacctatttctaaaacaaaaatgtagacaaattattacattctaggcagta

SEQ ID NO: 35562 - DNA, 201 bp, Homo sapiens
cagcctcccgagtagctaggactacaggtgtacaccaccacacccaactaatttttgtatttttagtagaaacggggtttcatcatgttaaccaggctggyctcgaactcctgacctcaggtgatccacctgccttggcctcccaaagtgctgggattacatgcgtgagccaccgcgcccggctgtgatctgactttttaa

SEQ ID NO: 35563 - DNA, 201 bp, Homo sapiens
ggggtacatgtgcagatttgttacatgggaaattgttagagcaaattgtatgttgctggggtttggtgtacagatgattttgccacccaggtagtgagcayagtaaccaataggtttttttttgtttttgtttttttaatttaagatagagtcttactctgtcgcccaggctggagttgcagtggtgcgatctcagctcac

SEQ ID NO: 35564 - DNA, 201 bp, Homo sapiens
aggctggtcttgaactcgtgacctctggtgatccacccgctgtgctgggattacaggcatgagctaccatgcctggctttttttttttttttttttttttkggaggcagagtctcactctgttgcccaggctggagtacagtggcatgatctctgcttactgcaacctctgccttccaggttcaagtgattctcctgcctc

SEQ ID NO: 35565 - DNA, 201 bp, Homo sapiens
tcagcctcctgagtaactggatttataggcgcgcaccaccacacctggctcatttttgtattgttagtagagatggggtttcacaatgctggtcaggctgrtctcaaactcctgacttcatgatccacccgcctcagcctcccaaagtgctgggattacaggcttgagccactgcacccggccttgttaatatttaatgac

SEQ ID NO: 35566 - DNA, 201 bp, Homo sapiens
ggtgtctgttctgcagctggcaccatgatcagtctctaccatgtctgcagcctgacatgctactttgtatatgtgctactgaagagagcacagacatgctrctttgtaaaaccagtctgtgcagtaatttttctaaagaaaagttaggacccttattcttcaaagagagtatgcactgaatatatctgatgtcatgcaaag

SEQ ID NO: 35567 - DNA, 201 bp, Homo sapiens
gtatgctggccagcatggtagctcatgcctgtaatcctagcactttgggaggccaaggcaggtggatcacccgaggtcaggagttcaagaccagcctggcygacatggtgaaactctgtctctcctaaaaatacaaaaaattagctaggtatggtggtgggttcctgtaatcctagctacttgggaggctgagacaggaga

SEQ ID NO: 35568 - DNA, 201 bp, Homo sapiens
ctaggcagtgccccagtagggactctttgtgggggctccgatcccacatttcctttccgcactgcccttgcagaggttccccatgaggaccctgcccctgyggcaaacttctgcctgggcatccaggcgtttctatacatcttttgaaatctaggtggaggttcccaaaccccattcttgacttctgtgcacccacaggct

SEQ ID NO: 35569 - DNA, 201 bp, Homo sapiens
agctgggattacaggtggctgccaccatgtccagctaattttttttatttttagtagagacggggttttaccatgttggccaggctggtcttgaactcctrctctcaagtgatctgcccgccttggcctctggaagtgctgggataggtgcaagccaccatgcttgggcagatgttttaatttgtaaaggaactaggacca

SEQ ID NO: 35570 - DNA, 201 bp, Homo sapiens
tattgataattcagttaagtatttgaagtttgttttttctttcttttttttccagagaactcttattattagtcaatggtaatttattcttgagttgctcygaatacctactagtgccataatattccaaatgaacctgggtatccgtttcttgggggtgggttttgtttagaggttatgggtgatggtgaaagtgcacat

SEQ ID NO: 35571 - DNA, 201 bp, Homo sapiens
ttgattgtatacatgtatgtgttgtattatatgttcttttgtgtgtgtggtttttttcgagatggagtcttactttgttgcccaggttggagtacagtggygcaatcttggctcactgcaacctccacctcccgagtttaagcaactctcctgcctcgacctcccgagtagctggaccacaggtgtgtgccaccatacgtg

SEQ ID NO: 35572 - DNA, 201 bp, Homo sapiens
tgctggaaacacaacacacacacacaaaatacgtatatgtatatatacacataagtgtgtgtgtgtgtgtgtatatatatatataaaatctagtgatttcratgtgtttgtataatttttagaaaatgggattctaccagaatgtgaacatttatggtcacctgcctggcctaggactaacccaggagtttgtgtttcact

SEQ ID NO: 35573 - DNA, 201 bp, Homo sapiens
atggagttcagattttcttacagagatggtcaatacatgagataaataagtaaaatgtatagtatgctcagtgctaaggagaaaaaacaatgcagggaaartgtgtggcatagtagaggctgaaatcttacatagggtggccaaactcactgaagaacatgatactttggtaaagacctaaaggaagtaagaggtctggga

SEQ ID NO: 35574 - DNA, 201 bp, Homo sapiens
gaggatatctatactttttttttgagactagacactactgtgacaacagctaattctgggaggcagaatatacgtgctaaattattatttgtatctttccytattttctgctgttcgttttgtttttttctttttgtttgttttttgagacagagtcttgctctgtggtccaggctggagtgcagtggcgccatctcaagt

SEQ ID NO: 35575 - DNA, 201 bp, Homo sapiens
ccagcctctggatgctgaggtagaaggattgcttgagctggggaggtcaaggctgcattgagccgtgatcacattactacactccagcctgggcaacagcragaccctgtctcaaagtaaaaaaaaaaaaaaaaaagactgggcataatggcttcatcccagaactttgggaggccaaggcaagaggctcacttgagccca

SEQ ID NO: 35576 - DNA, 201 bp, Homo sapiens
ccattttttaattatgaaaaatttctaacatacaaaaaccattgaaagatagcacagcgatcattatatacctaccacctcagttcaacagtttatatttwgctatatttaaaaaaattctcttaatgtttttgctgaaccatgtacaagttgcagacatcctaacactttctttctttcttcctttttttttttttttga

SEQ ID NO: 35577 - DNA, 201 bp, Homo sapiens; identical to SEQ ID NO: 4889

SEQ ID NO: 35578 - DNA, 201 bp, Homo sapiens
aaattgtttacttttttggtgaacagcctggcatcatttgagttggcaaaagcatctcttcctgaaagaagagagcatccaggagtaaagctagaaacttmttccaaaggcctcttctcagcacggtggcactcaggaactctggggagagctgctttcacgccatactcaagcgcttgatgaggaggagagaatgaagct

SEQ ID NO: 35579 - DNA, 201 bp, Homo sapiens
cctttaaaagaaagaatagctaagggagtcagtttactacctcaaaattacagactgcctaaacaaatgtttaaattgatgtccttctctggattctcccrctagccctgggtacccctgaatgttcaaatgccttagagttgtcctcctttgcatctggggtgactggcccacagagagttggggcatattttaatggga

SEQ ID NO: 35580 - DNA, 201 bp, Homo sapiens
ctctacaaaataaaaataaaaaattagctgggcatggtggtgtgtacacctgtggtcctagctacttgggaggctgatacggggaggatcgcttgagccasggaagtcgaggctgcagtgagctgtgattgtgctactgcactccagcctgggcaacagaatgagatcctatctcaaaacaaaacaaaaacaaacaaaaag

SEQ ID NO: 35581 - DNA, 201 bp, Homo sapiens
taagaccctgtctctacaaaataaaaataaaaaattagctgggcatggtggtgtgtacacctgtggtcctagctacttgggaggctgatacggggaggatygcttgagccagggaagtcgaggctgcagtgagctgtgattgtgctactgcactccagcctgggcaacagaatgagatcctatctcaaaacaaaacaaaaa

SEQ ID NO: 35582 - DNA, 201 bp, Homo sapiens
agttcgaagcaggagctctgatatagtatcttctgtccggagacccatgagtgaccccagctggaaccggcgtccaggaaatgaagagcgagaactccctycagctgcagccattggtgctacttctttggtggctgcacctcattcatcatcttcatccccgagtaaggactcctcaagaggagaggtatgggacatagg

SEQ ID NO: 35583 - DNA, 201 bp, Homo sapiens
gtacgattctgattatgttgtgtaaagcaaggtaagtatatttaagcagtagtaccataaaggatataatactaaactcacatgtatagaactgggacacraaattcgagaatgtttcagtttctccaaatttcatatactttttgtgtggatattttgttcttcttcctgtttattttttactattgttttttaaaggca

SEQ ID NO: 35584 - DNA, 201 bp, Homo sapiens
acttaacacttaatctaactagcattaactagtccagacttacacatgtatttgcactgattttattcatgccctggtagctttgtttatctgggtcacaraagctgaaattgtggtgtgctaagagaatcacaaatgtaacatacctcttatcttctatttagaggccccagacctaaagcaggaggagcgtctgcaaga

SEQ ID NO: 35585 - DNA, 201 bp, Homo sapiens
acttggaaggttgaggcaggagaatcacttgaacctgggcagcagagcttgtagtgagccgagatcacactgctgcactccagcctgggcaacagagtgaractccatcttaaaaaaaaaaaaagcagtgcctgaagttcttagttggggctcagtatataattattggatgaatggatgagggcaggttctttatattat

SEQ ID NO: 35586 - DNA, 201 bp, Homo sapiens
ggactacaggcgcccgccaccacgcccggctatttttttgtatttttagtagagacagggtttcaccatgttagccaggatagtctcgatctcctgacctygtgatccgcccacctcggcctcccaaagtgctgggattacaggtgtgagccatcgtgccctgccagtagcagcttcttatattcaacagtgattgcttgt

SEQ ID NO: 35587 - DNA, 201 bp, Homo sapiens; identical to SEQ ID NO: 4880

SEQ ID NO: 35588 - DNA, 201 bp, Homo sapiens
ttttattgctgcaaaccactatggcacatgtatccctgcaaaggacatgaactaatccttttttatggctgcatagtattccatggtgtatatgtgccacrttttcattatccagtctatcgttgatgggcatttgggttggttccaagtctttgctattgtgaatagtgcttcaataaacgtatgtgtgcatgtgtcttt

SEQ ID NO: 35589 - DNA, 201 bp, Homo sapiens
gttgcccaggttgaactcctgacctcaggtgatccaccggccttgacctcccagagtgctggggttacaggcatgagccgccaccgctcccagccaaaaamcctgtatttaaaggcatcatgtgtaaatgtataaaaccatttcaaaacctttaatttactcagagccaaaacagcaaccaagaattttttttttctttct

SEQ ID NO: 35590 - DNA, 201 bp, Homo sapiens
ctttattcagacttaaatagaataacagcaagttctgtttctgcagtattaatatataccaaagcttatagagctcctttagaaggatatcatgcatgtckaaacgggaaaaaatggacttactagtatttcaatatgttgcacatactcttaaatgttctgtattcctttactcacactcacacatacctttatgaagca

SEQ ID NO: 35591 - DNA, 201 bp, Homo sapiens
tatctgtaacactcgtagggtaatggaaaggcatggcttcagctgctttaatttatatacttttattccacaggtatttaaaagcttgacagaccttctamataggtttgtagttaaaaattgataatttaagattaaggagttaaatatgcatttgctgtggtttgtttccttatcagtaatctttccattgataaacca

SEQ ID NO: 35592 - DNA, 201 bp, Homo sapiens
tactatttcatatgcctggtcaggtgatatgaatagtattatgaaacagatttttagaacagaatagacgtgcttgctttcatagagacgtatttgtgagyatctgtctgtagcttatgtctccctaccactgctttgggttgcaggtaggccgccttttgcagcagttagcaatgactggctctgaagagggagatcccc

SEQ ID NO: 35593 - DNA, 201 bp, Homo sapiens
tgaggatattctggacaaatacaggaatgccattaaacggaccagccccagtgatggagcaatggcaaactatgaaagtacaggtgataatcatgacagaratttgagtagtaaacttttatatcatagtgataaaggtaatctgaatttaagtggcctttaaaagaaagaatagctaagggagtcagtttactacctcaa

SEQ ID NO: 35594 - DNA, 201 bp, Homo sapiens
gctgaggatattctggacaaatacaggaatgccattaaacggaccagccccagtgatggagcaatggcaaactatgaaagtacaggtgataatcatgacaragatttgagtagtaaacttttatatcatagtgataaaggtaatctgaatttaagtggcctttaaaagaaagaatagctaagggagtcagtttactacctc

SEQ ID NO: 35595 - DNA, 201 bp, Homo sapiens
tttgtctatttctctaaattattttatttgaaattttttattagcaactcggagcagaagccgcaccaatatgctaatggacctacatatggaccatgaargatcatctcaagaaaccatccaggaggtgcaaccagaagaggtgttggtcatttccttaggtacaggtccccagcttactccagggatgatgtcagaaaa

SEQ ID NO: 35596 - DNA, 201 bp, Homo sapiens
tcttagttacttggtttatcttgatctccagatttatatatatcttactgagttgtcattagagattgttaaattagatttggtggtatttaatttcacamtcatacaattaatggaggtttatctaattgtgaaagttccagataggcacccatttctagattggttggatacttctatgttatttgcttcctctgggaa

SEQ ID NO: 35597 - DNA, 201 bp, Homo sapiens
gattgagcagaactgtggtttatataacctacagtcagcttattactctggtaatggcttcattgtttaagagaatttctcgaaagtcttttagctaagcrtgagcaaaaacatacatgagtacattgtgtgggaaatacatattgtatttgaaaaagtgatttcattagctaatgttctttgcttttgccaggtgaattt

SEQ ID NO: 35598 - DNA, 201 bp, Homo sapiens
cctaccactgctttgggttgcaggtaggccgccttttgcagcagttagcaatgactggctctgaagagggagatccccgaacaaagagcagccttggaaartttgacaaagtaagaataaatatgatttatagaaaattctgaagtattagtgagcctaactgttctctttattaaatcttgtccttaggtgatatctaaa

SEQ ID NO: 35599 - DNA, 201 bp, Homo sapiens
agattagaaagaatacttatctaagaggctcaactctaactgtaatccatatctagctgtaatccatatctagtcaacatgtttcacgtgttttgtaaaamtcaatgatgactgtttgtgtaccatattttctgaaatgaatgtttacatgtgtattttggggggttttcagggttcttcatgaacatatccagagattgt

SEQ ID NO: 35600 - DNA, 201 bp, Homo sapiens
gattgcaaaaaactgtgtataaatggacctgtgcagttcaaacccatgttgttcaagggtcaactgcagtttactacaatttcacggagacatgaataccrtgtgtttgtttcatgagaacaaaagaagagccgatgagcatgctacttaagctgtctatgtcttgatttcgtcttctgtaaaatgaggatgataacaacg

SEQ ID NO: 35601 - DNA, 201 bp, Homo sapiens
tgcgccaccatgtccagctaatttttgtatttttagtagagttggggtttcgccatgttggccaggctggtctcgaactcctgaccgtgggtgatctgccygcatcggcctccaaagtgctaggattacaggcgtgagccaccgtgcccagcctaatacagtatcttcaatctgcatttgattgcaaaaaactgtgtataa

SEQ ID NO: 35602 - DNA, 201 bp, Homo sapiens
cctggacttgagtgatcctcctgcctcagccttaccaagtagctaggactataggtcggcaccaccacacctggcattgtttctttttctgttcttctttytgagagggagtcttacttgtctcccaggctggagtgcagtggtgtaatcttggctcactgaaacctctgcctcccgggttccagcgattctcctgcctca

SEQ ID NO: 35603 - DNA, 201 bp, Homo sapiens
ttacaggcatgagccactgcgcccggccaaaatggctttttttttttttttttgagacggaatctcgctctgtcgcccaggctggagtgcagcgcgtgatytcggctcactgcaaccttcacctcttgggtttgagcaattcttctgcctcagcctcctgagtagctgggactacaggcgcgtgtcaccatgcccggctaa

SEQ ID NO: 35604 - DNA, 201 bp, Homo sapiens
ggaggcggaggttgcagtgagctgagatgacgcttactgcactccagtctgggcaaaagagcaagaccctgtctcaaaaaaaaaaaaacaaacataaatartatactgcataaatatgtgtttatgcttatatgcacgtagagtatctcctggaagaatctcccaacaaactggtcacatgagttggctctgaggaagact

SEQ ID NO: 35605 - DNA, 201 bp, Homo sapiens
attcctggtgaccctgaactcctctgatattatagtggtgtcttagaaaagcagaacaaattggtatactttttaaattatcaaacccttttcctcaatctttttttttttttttttttttgggacagggtctggctctgtcacccaggctggagtgcagtgacacgatctcagctcactgtaacctccgcctcccgggtt

SEQ ID NO: 35606 - DNA, 201 bp, Homo sapiens
taaagaaaggtgattgtttatatttctgcctctgtcttcaagtgggtcagctttcatacaatgtgaagttgacttttgctgctactatagttgtttttgcyttatgtctgtattttttattattttgtaccaaaacataatttctatttagtattctggttgtactgaattttattgtcttctgaaagaaaatagaaactt

SEQ ID NO: 35607 - DNA, 201 bp, Homo sapiens
ttgaacttcagtgtttttaacacagacgtataataatgtttaatactttcgatttgtatttttaagtagtgcaaatagatttctttttttttttttttttwaatttatttttttattgataattcttgggtgtttctcacagagggggatttggcagggtcatgggacaatagtggagggaaggtcagcagataaacaagt

SEQ ID NO: 35608 - DNA, 201 bp, Homo sapiens
tcagcagataaacaagtgaacaaaggtctctggttttcctaggcagaggaccctgcggccttccgcagtgtttgtgtccctgattacttgagattagggaktggtgatgactcttaaggagcatgctgccttcaagcatctgtttaacaaagcacatcttgcactgcccttaatccatttaaccctgagtggacacagcac

SEQ ID NO: 35609 - DNA, 201 bp, Homo sapiens
actaccagaatgtaaatataagtaactgtgtatctgcattacattctgttgatttacttggttcaagaattattaagtgatcctgatatgtgttttataatttttttttttttgagatggagtctcactctgtcacccaggctggagtgcagtggtgcaatcacggctcagtgcaatctctgcctcctgggttcaagtgat

SEQ ID NO: 35610 - DNA, 201 bp, Homo sapiens
agtgattctcctgcctcagcctcccaagttgctgggattataggcgagcaccaccacgcccggccaatttttgtatttttagtagagatgaggtttcaccwtgttggccgggctgttcttgagctcctgacttcaggtgatccacccacctcggccttccaaagtgctgggattacaggcgtgagccactgcatccagctt

SEQ ID NO: 35611 - DNA, 201 bp, Homo sapiens
gccgggctgttcttgagctcctgacttcaggtgatccacccacctcggccttccaaagtgctgggattacaggcgtgagccactgcatccagcttctttgkcatgtgttaatgataacttaatataattggtgatcaaaacatgaactttaaagttgcttaggtctaggtttgagtcctcagctgtgccacatataggctg

SEQ ID NO: 35612 - DNA, 201 bp, Homo sapiens
ctcacacctgtaatcccagcactttggggggccgaggtgggcagatcacttgaggccaggagtttgagaccagcctggccaatgtggcaaaaccccatctytaccaaagatacaaaaaattagctgcaagtggtggcagatgcctgtaatcctcagatggttgaggcataagaattgcttgatcccaggaggcggaggttg

SEQ ID NO: 35613 - DNA, 201 bp, Homo sapiens
gtccaactgaccccggggtcctgggctcttcccgtcagtgtcgggcgaggtgggggtcgggggacactgggttagacccaggggagagatgtggcggcgcrcaggagccagggcggcctggggctgaggagagggagagacgcgtgggggatgggatgggaagggacaggaggaccgcggggcggcctcgggtgggggcca

SEQ ID NO: 35614 - DNA, 201 bp, Homo sapiens; identical to SEQ ID NO: 4886

SEQ ID NO: 35615 - DNA, 201 bp, Homo sapiens
gcttcctgagtagctgggaccacaagcacgttccactgtgcccagctaacttttgtatatttttgtagagatggggcttcgccatgttgcccaggctggtytctccctatattttttcctgaagcatttgaaattatttccgaagaataaggatattttcatatatgaacacaatatatttattatatttatatatttttt

SEQ ID NO: 35616 - DNA, 201 bp, Homo sapiens
ggtggatattgcagtgagccaagatcacgccactgcactccagcctggcaacagagcgagactccgtctcaaaaaacaaaacaaaacaaaaaaactcctgmaatagaaataaggttttttggatttataagtctacttagaagaactgttgtttttttttttttggttgtaagtttattcaatgcaaaagaatcctctcca

SEQ ID NO: 35617 - DNA, 201 bp, Homo sapiens; identical to SEQ ID NO: 4887

SEQ ID NO: 35618 - DNA, 201 bp, Homo sapiens
atccccagcatctggcattccatgtttctgctcctgtggcctccacggtgcaacaagctagtggttttcttggacctctgccttatctttcttcttttgcstattcacttcttcctccacttggctgtcatggcacagaggtttccaagaaaatggcgctaaggctgagagctcttttcttttttttaaaaaaaaattact

SEQ ID NO: 35619 - DNA, 201 bp, Homo sapiens
ttttactgaggtggctgaccacgtccacgaccaaatccgtctcaactggaatttggctgctgacccagccccagcctcagctttcttgtcggcactaagtggcacagcactccatctgtaggtatgtctgtcagcactccatctgtaggtatgtctgtcagcttcccctcttgtgagtctcgcaggtcactcaccctccag

SEQ ID NO: 35620 - DNA, 201 bp, Homo sapiens
ttactgaggtggctgaccacgtccacgaccaaatccgtctcaactggaatttggctgctgacccagccccagcctcagctttcttgtcggcactaagtggcacagcactccatctgtaggtatgtctgtcagcactccatctgtaggtatgtctgtcagcttcccctcttgtgagtctcgcaggtcactcaccctccagac

SEQ ID NO: 35621 - DNA, 201 bp, Homo sapiens
tactgaggtggctgaccacgtccacgaccaaatccgtctcaactggaatttggctgctgacccagccccagcctcagctttcttgtcggcactaagtggcacagcactccatctgtaggtatgtctgtcagcactccatctgtaggtatgtctgtcagcttcccctcttgtgagtctcgcaggtcactcaccctccagacc

SEQ ID NO: 35622 - DNA, 201 bp, Homo sapiens
gatcagcagcatttaaagatgattaattcccacagatgtattgaggagatgccgtcgtaagagaatcaaagagctgttaagattattttattttaaaaagtttttttttttttttttttgagatggagtctcgctccgtcgcccaggcggagtgcagtggcatgatcttggctcactgcaacctctgcctccgggttcaag

SEQ ID NO: 35623 - DNA, 201 bp, Homo sapiens
aaacaaacaaaaagaaatccttttcttagtaatttatcctgctatccaactccaaataaagcctccaactttttctacagactgaagaacgcaaagatagrgatgatgagaaatcagacaggaacagaccttggtggagaaaacgttttgtttcagccatgcctaaaggtaattttataaaatattagaacgctgtattag

SEQ ID NO: 35624 - DNA, 201 bp, Homo sapiens
ggcaataagagttgtgccttaaggcaaacaagactgactttcttatttcacaaacttacttaaatcctttttagcctgagcaacatagtaagaccctgtcyctacaaaataaaaataaaaaattagctgggcatggtggtgtgtacacctgtggtcctagctacttgggaggctgatacggggaggatcgcttgagccagg

SEQ ID NO: 35625 - DNA, 201 bp, Homo sapiens
aaaaaaggccgaatataggacctatctctgaggttactgtaaagattaaatgagattatacatatccttactatgctcagcatttggcacatagtacacayttggttttattattattaatactactgctaccatctctactgcccttctggagtttatttgtactgcatttacttttttcataagtatttattgagtgcc

SEQ ID NO: 35626 - DNA, 201 bp, Homo sapiens
gctcgccttctaccctaatcaagatggggacatacttcgcgaccagtaagtacttctatgttgagtgcctatgtggaactacatagggatctaccaggtarcccatattttaggcaagctatacgtgtaacttagtgtctgattgtaaaaggaaattcattggttaccatttttcacctgtcagagttacatgatcacaaa

SEQ ID NO: 35627 - DNA, 201 bp, Homo sapiens
cctgcatccccttggctcactcagcatttctgagcagattagaaagaatacttatctaagaggctcaactctaactgtaatccatatctagctgtaatccrtatctagtcaacatgtttcacgtgttttgtaaaaatcaatgatgactgtttgtgtaccatattttctgaaatgaatgtttacatgtgtattttggggggt

SEQ ID NO: 35628 - DNA, 201 bp, Homo sapiens
atggtttaccagaccacacagacccagaaggtaaattgctgcaggatcgtttaatttttcctatgtttatgggttgcaccatatgaaattgccagtattcrgctgttgaagctgtacagcaattccatatggttcaacttaatatgtttacattagtatcacttaagggcactttgattactgatgatttattaaagtatt

SEQ ID NO: 35629 - DNA, 201 bp, Homo sapiens
gggttcaagcaattctcatgcctcagccacccaaatagctgggattacaggcgtgcgtcaccatgcccagcgaattttttttcatttttgctagagacagrgtttcgccatgttggccaagctggtctcgtggtctccagctggcctcaagtgattcgcccgcctcagcctcctgaagtgttgggatcatagacatgagcc

SEQ ID NO: 35630 - DNA, 201 bp, Homo sapiens
tatgtttacattagtatcacttaagggcactttgattactgatgatttattaaagtattttctaattgggagtggcaatacagcttagttctaatgatacrtgacaaagcagaattgacgtcccaaatgctgaattagcttatttaagcacatggaaattctcaagaataacagaattcttgtatcttttatttagacaat

SEQ ID NO: 35631 - DNA, 201 bp, Homo sapiens
catgaacatatccagagattgtctaaagtagtgactgcaaatcacagagctcttcagataccagaggtaatacaggtttatatagcatgggtaatgttaaytaaatgctgcgtgttattataccatataatgttaccacgtgttcaaggaactgaaatgtgataaaatataaaacatcattttcactctatgtaattcagt

SEQ ID NO: 35632 - DNA, 201 bp, Homo sapiens
aagaaaacatgaaaatttcaggtatttgagctttctgtttgtttttgttacaacccccactaatgagacatgaattagcataaaattttaaattatctttrgttttttgaatctgttatttctggaattactgcaacaatggtacatatttttaaattaacctcttttatcacatgtgataaatctagttcctgtgtagag

SEQ ID NO: 35633 - DNA, 201 bp, Homo sapiens
ctcgaaagtcttttagctaagcgtgagcaaaaacatacatgagtacattgtgtgggaaatacatattgtatttgaaaaagtgatttcattagctaatgttytttgcttttgccaggtgaattttatgaagagtgtgatgtctggagatcaactgagagaagatagaatggctcttgacaatttattggcaaacctaccccc

SEQ ID NO: 35634 - DNA, 201 bp, Homo sapiens
caacaagttcctcatctccacctcagcctggaccttatcgttcatatcactgtcagcattttcgtcaaagccattcaacaaatctctaggaagttccatastttcccacattttcctgtcttcttctgagccctccaaactgttccatcctctgcctgttacccagttccaaagctgctttcacattttcgggtgtctttt

SEQ ID NO: 35635 - DNA, 201 bp, Homo sapiens
tggctgtcatggcacagaggtttccaagaaaatggcgctaaggctgagagctcttttcttttttttaaaaaaaaattactaaagtaataaatattctttgktttttatttttatttttatttatttattattattattatcttgagatggagtagtgctccgtcacttgagctcaggagcctgcacttggccaggctggag

SEQ ID NO: 35636 - DNA, 201 bp, Homo sapiens
actgaggtggctgaccacgtccacgaccaaatccgtctcaactggaatttggctgctgacccagccccagcctcagctttcttgtcggcactaagtggcacagcactccatctgtaggtatgtctgtcagcactccatctgtaggtatgtctgtcagcttcccctcttgtgagtctcgcaggtcactcaccctccagacct

SEQ ID NO: 35637 - DNA, 201 bp, Homo sapiens
aatgccaaccattataatgaaagttttaaaaactttactaattttttacagcttgaaccattttaacattgccatctgacccaaggaaaatacagctgggrgttgggtttttacctgattaagcgtttgtatttctgcagctgctttttggcacattatgaatgagcaccctaaaaggacagtttgagagtagtgttaatg

SEQ ID NO: 35638 - DNA, 201 bp, Homo sapiens
ttcaccatgttggcgagcctggtcttgaactcctgacctaaagtgatctgccggcctcggcctctcaaagtgttgggattacaggtgtgagccactatccygggcctgttctttgtttttttaaaaaaaactaaaaacaatggaaaaaaaatgaagggttttctttctcacatatgcatgcacttaccatttgatttgaat

SEQ ID NO: 35639 - DNA, 201 bp, Homo sapiens
ctgaggtggctgaccacgtccacgaccaaatccgtctcaactggaatttggctgctgacccagccccagcctcagctttcttgtcggcactaagtggcacagcactccatctgtaggtatgtctgtcagcactccatctgtaggtatgtctgtcagcttcccctcttgtgagtctcgcaggtcactcaccctccagacctt

SEQ ID NO: 35640 - DNA, 201 bp, Homo sapiens
ctaaaaagcagtgcctaggttgggcgcggtggctcacgcttgtaatcccagcactttgggaggccgaggagggtggatcacgaggtcaggaattcaagacyagcttggccaagatggtgaaacctcatctctactaaaaatacaaaaattacaggctcctgtaatcgcagctacttggaaggttgaggcaggagaatcact

SEQ ID NO: 35641 - DNA, 201 bp, Homo sapiens
cattgaaggcagacaggatgacagtgtagacgaaagagaatttcataatcagggagataaaaaatttggatgggatcagggtagtcttttgttttgttttrttttgagacggagtctggctctgttgcctaggctggagtgcagtggcatgatctccgctcactgcgacctcagcttcctgggttcaagcgattcttgtgc

SEQ ID NO: 35642 - DNA, 201 bp, Homo sapiens; identical to SEQ ID NO: 4885

SEQ ID NO: 35643 - DNA, 201 bp, Homo sapiens
agtggtgtaatcttggctcactgaaacctctgcctcccgggttccagcgattctcctgcctcagtctccctcctgggctgggactacaggcgggtgccacratggctggctaatttttgtatttttttgtagagacggggtttcaccatattggccaggctggtcttgaactcctgacctcgtgatctgcccgccttggcc

SEQ ID NO: 35644 - DNA, 201 bp, Homo sapiens
agcctcctgagtagctggaatacaggcatgcgccaccacgcccagctgattttgtatttttagtagagacggggtttcgccatattggtcaggctggtctygaacccctgacctcaggtgatccacctgcctcggcctcccaaagtgctgagattacaggtgtaagccaccgcatccggcccactcttcaatattaaaacg

SEQ ID NO: 35645 - DNA, 201 bp, Homo sapiens
atatagcccatagatttaaaaaaaaaaaaaaaaaaaaaaaagacccatgcccagagaaagtgttttagctcatgcctgtaatcccagcactttgggaaacsaaggcgggaggatcacttgagctcaggaatttgaggccagcctgggaaacaatgagacctggtctgtacaaaaaaaaaaaaaaaaaaaaatttaaataag

SEQ ID NO: 35646 - DNA, 201 bp, Homo sapiens
attttctttctagtggtatactagtagtattcctgcattatagagccaaaaatatgttgagatgtattttgagatacatgttgtattctttggctggtcargaaaaaatggaagaaataatggaaaactaagaaaataaatttttttaagaaatggagtttgaggcttgggaatcatttttaatatatttgtaacaaaaag

SEQ ID NO: 35647 - DNA, 201 bp, Homo sapiens
ggcttcaccaaactgccaatgaggtccgtgcacaaaaagattaagaactcctgaaataatttgggaggccgaggcgggcggatcattgaggtcaagagatmgagaccatcctggccaacatggtgaaaccccatctctactaaaaatacaaaaattagttgggtgtggtggcccatgcctgtaatcccagctacttgggag

SEQ ID NO: 35648 - DNA, 201 bp, Homo sapiens
gcttcattccaatacaacttttatttatacaaacaggcagcaggctaaatatgacctgaaagtcatattttgctggcccctcctctataccattatggaargatatagaaatccagtgtgcttcactcttgccactaaaatctccttactgtgctctcagtgataagtgttaaaacatgagttgaaaaacttgaacttctc

SEQ ID NO: 35649 - DNA, 201 bp, Homo sapiens
tataatctcatgggcccactggagtttcaccatggttgactgaaaggtctttatgtggcgcatgactgtattttgtaattcataaatttcaccttatcggrcagtgcctcctctctgtgctttgcgttagagtagatatgcttgcttatcaggggttggcagagtttttctgtgaagggctagatagcagatattttggac

SEQ ID NO: 35650 - DNA, 201 bp, Homo sapiens
aagaagaaagggtttcttgtcaggtagtgagcttattttgtggcgtcatcagcgtttctaaagagatgtgccagaaggcattccaaatctgggtgttgggrgcttctgacttccgtggtccctcccactctgccataatatgcttttccgattcttatagcacccgtcatggaactcagtgtatgaaaaaaggtcagaaag

SEQ ID NO: 35651 - DNA, 201 bp, Homo sapiens
tttcattagtttatttggaataattacccctaacattgtttttttttttttttttttttcgagacaaggtcttggtctgtcatgcaggctggagtgcagtracgctatcacagctcactgcagcctccacctccctgtctcaagagattcccctgcctcagccttctgagtagctgggaccacaggcacatgacaccatgc

SEQ ID NO: 35652 - DNA, 201 bp, Homo sapiens
aaaccacattttattgtcttaatacctacgaagaacatttattttattttattttttttttgagttggagtctcgctctgtcccccaggctggagtgcagkggcacaatctcagctcactgcaacctctgcctcctgggttcaagagattctcctgcctcagcctcctgagtagctgggattacagacttgtgccaccatg

SEQ ID NO: 35653 - DNA, 201 bp, Homo sapiens
aagtaaagtaactagccaaagattgcacagctagggagtggcaaacctgagacttgagcccaggtactcttgctccagcgtttaactcctagactgcctcygggatcttaggcatattgttctgcagtttgctcttttcgcttaatgatgtctgatggacatctttcttttttgttgttgttgctgtttttcgttttaatt

SEQ ID NO: 35654 - DNA, 201 bp, Homo sapiens
gattataggcgtgagccactgtgcctggccgctttattcattttaattcatttaactttcaaaagcctgtgaacataccctatgaagtaggttctggtgtrtgtgtttgcagatgaagaaactgagtcatagagaagtaaagtaactagccaaagattgcacagctagggagtggcaaacctgagacttgagcccaggtac

SEQ ID NO: 35655 - DNA, 201 bp, Homo sapiens
gttcatcagtgcttagcacataggaggtatttaataattaacatctgttgaatgaatgagtgaaggaagtgtgttaagtaaagcatactatgcttgtctgttttttttttttttttgagacagggtcttgctttgtctcctaggctggagtacagcttactgcagccttgacctcccaggctcaagcagtcctcctacctc

SEQ ID NO: 35656 - DNA, 201 bp, Homo sapiens
acagtttttaactctaagaatatcagtgctgttgagaatataagccagatgcaaaagaatacatactgtatgattctatttgtatgaagttcaaaaagagrcaggactgatctttgatgacagaaatcagaataatggttactttttgggcttgagagggtggtattgactgggaaagggcacgtgaaagcgttcttgggt

SEQ ID NO: 35657 - DNA, 201 bp, Homo sapiens
tgattttctttctatttaatgcttttgcaacccaggacaacagttagcagccatcactgcctgggattcctcagctaccaatattacctctcatattacastagtaaccccgtttggtgggtaataggctgttcttcctcttcttttataattttatttaagaaatagtttataaaagtatgctccatgtgcatgttgctt

SEQ ID NO: 35658 - DNA, 201 bp, Homo sapiens
tttctaattttttttcatgccctgaagtagaattattcttttattaggtttaatccaaagtagtgaagccttttgaacttcagtgtttttaacacagacgyataataatgtttaatactttcgatttgtatttttaagtagtgcaaatagatttctttttttttttttttttaaatttatttttttattgataattcttgg

SEQ ID NO: 35659 - DNA, 201 bp, Homo sapiens
ttgagacagagtctcactctgtcacctaggctggagtgcagtggcacgatctcagctcactgcaagctctgcctcccggattcacactgttctcctgcctyagcctcccaagtagctgggactacaggtgcccgccaccacgctcggctaattttttgtattttcagtagagaaggggttccaccgtgttagccaggatgg

SEQ ID NO: 35660 - DNA, 201 bp, Homo sapiens
ctcctgggttcaagcaattctcctgcctcagcctcctgagttgctggtcttacaggcatgtgccaccacacccggctaactttgtatttttagtagagacrgggttttgccatgttggccagactggtctcgaacttctgacctccagtgatccacccaccttggcctcccaaagtgctgggattacaggtgtgaatcact

SEQ ID NO: 35661 - DNA, 201 bp, Homo sapiens
aggcgggtggatcacctgaggtcaggagttcaagaccagcctgtccaacatggcaaaaccccatctctactaaatatacaaaaattagccgggcatggtcrtggcacctataatcccagctactcgggaggctgaggcaggagaatcacagtgggggaggaggtgtgcagaggttgcagtgagctgagatggtgctatttc

SEQ ID NO: 35662 - DNA, 201 bp, Homo sapiens
aattttttcatgcttgtccaccttaatgagaaatttcgttccagtattttaaagggaaatgtttcactgtttttttcctgttttaacagagctgtgttgcmgctttccttgatgttgtgattgggggccgtgcagtggagacccctccattgtcttccgtcaatcttctggaaggattgagcagaactgtggtttatataa

SEQ ID NO: 35663 - DNA, 201 bp, Homo sapiens
atgaatgggaggtagtggcaaaggggatgatatctataatttttttttttttttgaggtggagttttgctcttgttgcccaggctggagtgcaaatgcgcratctcggctcactgcaatctccgtctcccgggttccagcatttctcctgcctcagcttcccgagcagctgggattataggcatgcaccactatgcccggc

SEQ ID NO: 35664 - DNA, 201 bp, Homo sapiens
agcctgggcctcaaagtgagacccctgtctctattaaaaaagaaaaaatttataaaaaaaaaaaaaaaaagaaactgctaccggttactgttaggaggagraaaaaaaaactgttggttgagtgtaaactggtatagctgcttttgaagacagtatttgcagcccttagtaaagttgaagataggcgtactctataatttc

SEQ ID NO: 35665 - DNA, 201 bp, Homo sapiens
ccagtagaaatgtctccaggcaaactgttccttcatgtagccttgagacttgagagactgcatggccttcatgacatgaaggttgggcacgttcttgtctkccagctctgggtgcttaggcatgtggacatccttcttggccaccatgactccctccttaaaaaggagttcataaatggcaatctggttctttagaagaac

SEQ ID NO: 35666 - DNA, 201 bp, Homo sapiens
agttgaacaaatgtcacctctttagcaaacttcctgggagattctgagataggtggttggcatatgcaaaatgctagattaagaagtgaattgataggccrggcacagtggctcacgcctgtaatcccagcactttgggaggccgaggcgggcggatcacctgagattgggagttcgagaccagcctgaccaacatggaga

SEQ ID NO: 35667 - DNA, 201 bp, Homo sapiens
tttgatgacagaaatcagaataatggttactttttgggcttgagagggtggtattgactgggaaagggcacgtgaaagcgttcttgggtttttaaaatgtwccatgtcttaatctgagtggtgattactgggtgcatgtatgtgtaaaaattgttcaagctgaacacttgacatttgtgcactttactgtattttacctca

SEQ ID NO: 35668 - DNA, 201 bp, Homo sapiens
ctcactgcaatctctgcctcctcgctggttcaagcgattcttctgcctcagcctcccaagtagctgggattacaataggcacctgccgctacacctggctratttttaaaaaattttaattttagtggctcatgcctgtaatcccaacactttggaacgccaaggtgggcggatcacaagatcaagagattgagaccatcc

SEQ ID NO: 35669 - DNA, 201 bp, Homo sapiens
tttccagcatattattgctactcatggaaactagggttcacagattacttccaaaaaataactttggggttgttttcaaaaggattggtatgtctttcatwgaagaacattcgaagaacacttaaatgattttggcagagctatgacatctgagtaattgattcttttttatttttcacttctctaggcaaatccaccctg

SEQ ID NO: 35670 - DNA, 201 bp, Homo sapiens
ctccagcaaataaaaagaatcgattacctataggtaaagagaatttctcgtattggagctttctcttaaatctaatatttcattagcctttgttattgctsagtgttttggaacatatgtttaagtacttgggaaagtctttctcttcatgtttactgatggtatttcagtttttagaaatcgtatcagattagttaaggt

SEQ ID NO: 35671 - DNA, 201 bp, Homo sapiens
taatcccagctactatggaggctgagacaggagaatcacttgaacccaggaggcggaggttgcagtgagccgagatcgtgccattgtactccagcctaggygacagagtgagacttcatctcaaaaaaaaaaaaaaaaattaaaaatcaaaaataaaaaaaaaacactgaggaaaagtatgtgcacaataaaaaaaaatag

SEQ ID NO: 35672 - DNA, 201 bp, Homo sapiens
ttattgtcttttcttgaaaaaattttggaaatgttataagtagtcatctttaaaactatgtagccctcagcctggtgtggtggcacgtgcctgtggtcccwgctacttgggaggctgagatggggagattgcttgagcctgggaggtcgaggctgcagtgaaccatgattgtgccactgcacttcagcctgggtgacagag

SEQ ID NO: 35673 - DNA, 201 bp, Homo sapiens
tcctttctacaaagttctaaataatataataaacaatattattttagaagtttccatcaataaagtggaaaataatagtattttctattattttcattaayaatcagtcttttatcaactgagctaagatatcttaatgttacaaaatgaagcaaaagtttcattttattttttcaagtttgtttatttaagaattctatt

SEQ ID NO: 35674 - DNA, 201 bp, Homo sapiens
agcatataccatgttccatactgtgggtaggcactttataaatgttgtttcatttaatccccacagaagtcctgtgagagtggatgtgtcttgcacatgargcactgtgatagacactggatacaaagaccattaggacctgcccttactgtcaagttggctgttgatagtttagttagggagagcaagaagagactagta

SEQ ID NO: 35675 - DNA, 201 bp, Homo sapiens
acagagcgagactccgtctcaaaaaacaaaacaaaacaaaaaaactcctgaaatagaaataaggttttttggatttataagtctacttagaagaactgttktttttttttttttggttgtaagtttattcaatgcaaaagaatcctctccaattttactgaggtggctgaccacgtccacgaccaaatccgtctcaactgg

SEQ ID NO: 35676 - DNA, 201 bp, Homo sapiens
attttatttgaaattttttattagcaactcggagcagaagccgcaccaatatgctaatggacctacatatggaccatgaaggatcatctcaagaaaccatycaggaggtgcaaccagaagaggtgttggtcatttccttaggtacaggtccccagcttactccagggatgatgtcagaaaatgaggtatgaatcagttgct

SEQ ID NO: 35677 - DNA, 201 bp, Homo sapiens
ttattttagaagtttccatcaataaagtggaaaataatagtattttctattattttcattaataatcagtcttttatcaactgagctaagatatcttaatrttacaaaatgaagcaaaagtttcattttattttttcaagtttgtttatttaagaattctatttaattaagccttatttgcttggttaacatttgctatct

SEQ ID NO: 35678 - DNA, 201 bp, Homo sapiens
tctttttttctttttcttttcttttgagacagggtcttgccatgtcacccaggctggagtgcagtggcatgatcacagctcactgaagcctcaacctcccrggcttatgtgacaagtgatcctcctaccttggcctcctcccaaattgctggtactataggtgcacaccatgacacctggctgattttgtttttatttatt

SEQ ID NO: 35679 - DNA, 201 bp, Homo sapiens
ccgacagagtcctccgtgtcctcccccgcatgacccccttggtgagtacgcgtcccgatttagtccgcgggctgtgagcggctccctgcctcgcggccggkttgctccggcctagggccgcagcctgtctctgactgcccggccgtcaggtccaactgaccccggggtcctgggctcttcccgtcagtgtcgggcgaggtg

SEQ ID NO: 35680 - DNA, 201 bp, Homo sapiens
tctcgagtgactgggattacatgcgcctgccaccacgcccagctaattttttgtatttttagtagagatggggtttcactgtgttagccaggatggtgtcratctcctgaccttgtgatccgcctgtctcggccttccaaagtgctgggattacaggcgtgagtcaacgtgcccagccaactgttactacttctaataacc

SEQ ID NO: 35681 - DNA, 201 bp, Homo sapiens
ccatactcaagcgcttgatgaggaggagagaatgaagctaggagttttgaatgtgtttttgagcagaggttaagagtcagtggttttgattttagtcccartggattcctgttaaattattcttcctatgacagatgactccgaagcaggttctgaaagttcctttaaaaaccttcattactattttaaggacaattatca

SEQ ID NO: 35682 - DNA, 201 bp, Homo sapiens
tgtggtgaaacctcatctctacacaaaatacaaacattagctggatgcggtagtacatgcttgtagtcccagctgcttgggaggctgaagtgggaagattkcttgagcttgggacatcaaggctgcagtgagccattatcatgccacagtactccagcctgggtgacagagcaagatgctgtctggaaaaaaaaaaacaac

SEQ ID NO: 35683 - DNA, 201 bp, Homo sapiens
acaggcgtgagccacccacagtgcctggcccagttttctgtcttggttagggtttgtcactattacttattttgaagcccagttgtccctaattgggccartgagagccccttcaggctggctcctgagttcttttgatgcactgctactattctttgagcatatctttactttctggcaaaagatgttataggcggatac

SEQ ID NO: 35684 - DNA, 201 bp, Homo sapiens
ttccaggttcaagtgattctcctgcctcagcctccctggtagctgggattacaggtggctgccaccatgtccagctaattttttttatttttagtagagayggggttttaccatgttggccaggctggtcttgaactcctgctctcaagtgatctgcccgccttggcctctggaagtgctgggataggtgcaagccaccat

SEQ ID NO: 35685 - DNA, 201 bp, Homo sapiens
agtcacaagctctgggttactcagaaagaaagtgcctaatgtcaagatttgttcttttgagacagaatctcactctgtcacccaggctggagtgcagtagygtgatctcagcccactgcaacctccatctcctgggttcaagcaattctcatgcctcagccacccaaatagctgggattacaggcgtgcgtcaccatgccc

SEQ ID NO: 35686 - DNA, 201 bp, Homo sapiens
gagacatattctcactctgtcatcagagtgcagtggtgccatcatagctcactgaagcctcaaactcctggcctgaacagggcgatcctcctgcctcagcytcctgagtagctgggaatacaggagcatgctactttgcccagctgagtccttcttatttgctttggacagactagtacttgaaaaaataattttcaaatg

SEQ ID NO: 35687 - DNA, 201 bp, Homo sapiens
gacccggacacccacgacagcctcagggggcagctgacctagggctgcctaaggcggaagtgggagcccctagccgcccgggcggaactacagctcccagrggcccccgcggcgctgcgcacgcgcgctggcgtggcggcagcgccgctgcaggacgcagggaagccaacaggcgagtggcgaaggtggcggcagcggcgg

SEQ ID NO: 35688 - DNA, 201 bp, Homo sapiens
tgacctcgtgatctgcctgccctggcctcccaaagtgctgagattacaggcgtgatcctctgcgcccagccttgttgatttactttctttaaattttgcaratttaatacgtgacatgacaactgttttatgtgcatctttttacttaattctcaacaattacatggcatacatactgttactgtcaccattttatagatg

SEQ ID NO: 35689 - DNA, 201 bp, Homo sapiens
gtatttatggaagcagcttagtttatccagggaaccaaagcttcctcaaagcatgggggttgtgaaaacttcctctaagtttacagtgttctaaggatttyagattgttcttagttacttggtttatcttgatctccagatttatatatatcttactgagttgtcattagagattgttaaattagatttggtggtatttaa

SEQ ID NO: 35690 - DNA, 201 bp, Homo sapiens
atgtcgaaacgggaaaaaatggacttactagtatttcaatatgttgcacatactcttaaatgttctgtattcctttactcacactcacacatacctttatsaagcagaagacaatggaaataggtattaaaaagaaaattcaaagccaagattgtgaaatgagaatatgtcattttgcctactagtaccaatttttttttt

SEQ ID NO: 35691 - DNA, 201 bp, Homo sapiens
ccatgttggtcaggctggtcttgaactcctggcctcaagcaatccacctgccttggcgtcccaaagtggtgggattacaagcatgagccaccactcctggyctgatagtcggcttttacttttacttttagttaagtcttttacacatgtaggtttcataatgttagcaggtagtctgttttacctctttagttacgactt

SEQ ID NO: 35692 - DNA, 201 bp, Homo sapiens
ccctggcacagatgccctcatctctctgctagggttctgataattctttatcccaggtatgtagatgaaaatggaaattaagtgatttgtccatggtcacrtgataggctattaaaggaattacagtccctgtcctttggcctgttttttgtttgtttgtttgtttttgagatggagtctcactctgtcgcccaggctgga

SEQ ID NO: 35693 - DNA, 201 bp, Homo sapiens
ctttcttcttttgcgtattcacttcttcctccacttggctgtcatggcacagaggtttccaagaaaatggcgctaaggctgagagctcttttctttttttwaaaaaaaaattactaaagtaataaatattctttgttttttatttttatttttatttatttattattattattatcttgagatggagtagtgctccgtcac

SEQ ID NO: 35694 - DNA, 201 bp, Homo sapiens
atggtgccgctgcactccagccagcctggcgacagagcaagaccttgtctcaaaaataaaaaataaaagaaaaatgggaaggccagtttggcaggagcagsaaagtttatgtagggaaatagcataaattaggattggaggggtggattgaagcaagattgtgctttgaatattaaaccaaggagtttggaaattatctct

SEQ ID NO: 35695 - DNA, 201 bp, Homo sapiens
ttgtttttgcaactctttgaaaaattgtaagcctacagaagggttgttcagtaaacattcatatacccttcacctagatttgctgttaacattttgccatrtttactttacacatagaagatgcacattttactttgggaatccgagacggtcagattacttgagcctaggaatttgaattttgaggcaaggtcttgctct

SEQ ID NO: 35696 - DNA, 201 bp, Homo sapiens
tatgagatatctctgcacatagtgaaaaacaatacccggggccctggcctgaagagggtgaccaccacacgtgagtatcacctttaatacttatagaatgrtaaggctgattgtacctcatagcacctcctggttgagaaagtgccttctcatatagcatctacatcatttaacttttgctgcatttttaaaaatccagat

SEQ ID NO: 35697 - DNA, 201 bp, Homo sapiens
ggcgctctgatcctgactctttcaattacagactgtgttaccttggacaatttggctaagtccttatgcaaaaaaagtatgatgccatttacttaataggrttgtgaggattaaatgagataattcatataaagcccatagcggaaggcctggcaggtagcaagggcccagcaaatgagagctattcacgttgccattaat

SEQ ID NO: 35698 - DNA, 201 bp, Homo sapiens; identical to SEQ ID NO: 4980

SEQ ID NO: 35699 - DNA, 201 bp, Homo sapiens
caccatcgatctcacagaggacgagaaccagtactccatcgggaacctgaagcctgacactgagtacgaggtgtccctcatctcccgcagaggtgacatgkcaagcaacccagccaaagagaccttcacaacaggtaaaaggcctccccctgttaacagatatagtaaaggaaagattgaaagatttccatcccactccat

SEQ ID NO: 35700 - DNA, 201 bp, Homo sapiens
ccagttgacttgggtctaaagtgaaattcaaaattaagttcaacaaaaatattgtgaaattagcaatggaccacagatcactggaaccaaagggatcttaraattggaaaccatacacagttgctcattttacaagagaaactgagacctcaagagtggatgcgacttgcccaaggtcacacaatgaccctgctggtcaga

SEQ ID NO: 35701 - DNA, 201 bp, Homo sapiens
ggcataaaaatgtatataataggcactcaacaaaatgttagtttccttattgttcaattcaatctgtatttagtttcataatagaagctgtcatttattgmataactactatattccagcagaggttagcaaaccatagggtggcagcctatttttgtaaataaagttttattggaacacagccatgctcatttgtttgtg

SEQ ID NO: 35702 - DNA, 201 bp, Homo sapiens
tctaacatagagcttcacattttatcccagagaggtcatagttaggtatatctctacttccttctaatacaggaggaaatgaaaggagtaagggtctaggrtttgttctctatcagttcttcccccatcgtgtgccatccaacctaatcctgtgactcacttcaaacagaataatcaagtagatttgggaaacactctata

SEQ ID NO: 35703 - DNA, 201 bp, Homo sapiens
actgagctcttaaaagcccttgggttgatgtctagaatctcatgggaaggagctaggtctgtctttgtcacttttgtaccttctgcacttagtgtggtgtytggaacgtagtaaatactcactgaataactgaatgaattaaaacgaactaattacagaactgaggctgtgacaaattccttgatacatcttactgtagaa

SEQ ID NO: 35704 - DNA, 201 bp, Homo sapiens
accccagaaatgagaaggtcgaaatatttctgctttgtattcaaaatcctttagaccttgtcttgtccatagctcttgtgtgcttacctcatatcatcgtmccttgtgatcaacctggctggtccccagctacatttcagccttctcaaaagaaatataccaatgagtatatttccaaaacgtatttaaaacctttgccat

SEQ ID NO: 35705 - DNA, 201 bp, Homo sapiens
tcactacatattgatacccctactggagagaagattgcacggactggtaaatgatgttgtctttcctccttctcccaccattttctctccctctagaagcmgaaccggaagttgacaaccttctggtttcagatgccaccccagacggtttccgtctgtcctggacagctgatgaaggggtcttcgacaattttgttctca

SEQ ID NO: 35706 - DNA, 201 bp, Homo sapiens
ctgtgttttctaaagagtctttgtagaataagttgctcattctgaaattataaaagtcctactatcagaacatgattcttcatgtctgacctaaatacctycaactgcaatctcaagtaagtttccctgggttcatccacaaaggagacttaaaacagccagttgtctgcatgagaatattttacattcttaaaggtcatt

SEQ ID NO: 35707 - DNA, 201 bp, Homo sapiens
ccatgcatacttaatcataaagctgtcttttcttggaacatcttacagggcttgtgtccccagtacaaactttagaaaatgtagccttaatacccttcacrttactccaatctaccactctaatggcttgtctactcttcttcatacatgactagcaaatggtggtgtttatgctttaaaagaacacagatctaaaaaatg

SEQ ID NO: 35708 - DNA, 201 bp, Homo sapiens; identical to SEQ ID NO: 4971

SEQ ID NO: 35709 - DNA, 201 bp, Homo sapiens
gccagagacctcttaccggcaaactggtctagctcctgggcaagagtatgagatatctctgcacatagtgaaaaacaatacccggggccctggcctgaagmgggtgaccaccacacgtgagtatcacctttaatacttatagaatgataaggctgattgtacctcatagcacctcctggttgagaaagtgccttctcatat

SEQ ID NO: 35710 - DNA, 201 bp, Homo sapiens
cacccactgccctcagaccaccatgagccaataggaaatacacaatgctcaagaataacatactctttcccccaacgatgcaacatttggtggtaccagtktacgtctcttaaacacacagtgagaaatcctcactctactcacactctggtcattattaccctaaactcattgccttggagtctcaatcagcaactataa

SEQ ID NO: 35711 - DNA, 201 bp, Homo sapiens
atgtacaggtctctaatccttaattttctctggaaaggttttgactcctttgttatatatgaggtcatggtttagagaggataagtagcttgtcaaagttrcagggctagtgagtgacatttgaacccaggtatgcctaattccaaagcctaaccattttctacaacactgaaaatataatggatttttcccaaagtacaa

SEQ ID NO: 35712 - DNA, 201 bp, Homo sapiens
aagtcacaggtatttgtttgactctaaaaattaattttaataaagaaagcaaagtctgacacaagtgtgtcttgttttgcgttagatacataagctgaggyggagcaaaaagcagcacaacatgcttagcttggaaatagatttgtcctggatatgggaccccaaaaatctgcgttttgtgccaatgcaaagactatgtct

SEQ ID NO: 35713 - DNA, 201 bp, Homo sapiens
atagatttattcatgcagagatggcaaaaaggcttctagaagccttcaaggcatctggaaccctcgctgaatgatcactgagaaatggaagcatcccaaaygtatctgtcagcttgcttcatctccacagcagccacaggctgtctggcatcttaatggtctacttctagaggattgatagtattctgctttgagccaggt

SEQ ID NO: 35714 - DNA, 201 bp, Homo sapiens
tgccaaaggagtttacttgatcatagagaaatcttgtctcaaagtagaaagtactgagctcttaaaagcccttgggttgatgtctagaatctcatgggaargagctaggtctgtctttgtcacttttgtaccttctgcacttagtgtggtgtttggaacgtagtaaatactcactgaataactgaatgaattaaaacgaac

SEQ ID NO: 35715 - DNA, 201 bp, Homo sapiens
ggatcttagaattggaaaccatacacagttgctcattttacaagagaaactgagacctcaagagtggatgcgacttgcccaaggtcacacaatgaccctgytggtcagacctgcttggcagaagaggagctcagagcttctcctccagatcttccatttattgcacttcctgttatatggcctcataagaggccaagtatc

SEQ ID NO: 35716 - DNA, 201 bp, Homo sapiens
agggatcttagaattggaaaccatacacagttgctcattttacaagagaaactgagacctcaagagtggatgcgacttgcccaaggtcacacaatgacccygctggtcagacctgcttggcagaagaggagctcagagcttctcctccagatcttccatttattgcacttcctgttatatggcctcataagaggccaagta

SEQ ID NO: 35717 - DNA, 201 bp, Homo sapiens
tggtgtttgatgaagatatagtttcatttctaaatcagatacactctttttgggggcaacagtgaataagtgtcagtgaggttcattattcctcatcttgsttttactgtgttccaggtacaccctccatggtaactgtggacggaaccaagactcagaccaggctggtgaaactcatacctggcgtggagtaccttgtca

SEQ ID NO: 35718 - DNA, 201 bp, Homo sapiens
ttctgaaagagccaactagatttcttaaaattctggatgaagaccaaaatagaagaggtcattgttccattgggaaatgaattcaaatttatttttgaaayaattttccagaattttacaggaatctatattgttgccacttgtccagaaccactttttattttcttttctgtctaggcaagaaatagaagagagaaagca

SEQ ID NO: 35719 - DNA, 201 bp, Homo sapiens
tgcagtggctcacgcctgtaaccctagcattttgggaggcagaggtgggcagatcacctgaggtcaggagttcgagaccagcctggtcaacatgatgaaaycctgtctctactaaaaatacaaaaagttagctgagcgtggtggtgggcacctgtaatcacagctactcaggaggctgagacaagagaatcgcttgaacct

SEQ ID NO: 35720 - DNA, 201 bp, Homo sapiens
atctgaactaagaaaattcctttaggagtcagcccagtgtagctcaatgtagttgaaagcagacattttagaaccacaaataaatcaggattcaaaagctrgctctgcctcttaagccagtcatggaaactccctgagtctcaaattaattttcaaataagcataataatacctaactcaccaggttgtcatgacaaatga

SEQ ID NO: 35721 - DNA, 201 bp, Homo sapiens
tcttcacaacaagtatctgtttacatgtctgctttctatacctgactgtgagctcattaagggcaagacctatccatcattggcttctgaaacaccccacsaccactaggctatcccatagcccgttcttacacttgttcaacacatctctgttgaatgcaagaataaatcatttagaaattaattctcagtcctcttgga

SEQ ID NO: 35722 - DNA, 201 bp, Homo sapiens
ccagccaaagttggctgcaccggccacagcctgcctactgtcacccgcctctcccgcgcgcagatacacgcccccgcctccgtgggcacaaaggcagcgckgctggggaactcgggggaacgcgcacgtgggaaccgccgcagctccacactccaggtacttcttccaaggacctaggtctctcgcccatcggaaaggtaa

SEQ ID NO: 35723 - DNA, 201 bp, Homo sapiens
gaagtggagtgggatcctctagacattgcttttgaaacctgggagatcatcttccggaatatggtaaggagtacaaaagagcagatccatttgatctcaargatttgaaagatgaccaaagggttctgaagacttctgtatcaactaattttccttagtttttggtggaggacaaggctctcattagcatcatttgtgttt

SEQ ID NO: 35724 - DNA, 201 bp, Homo sapiens
gcctatgggcaggaagttccataatcccatctgatctgtatctcaacaaatctattagaaggatctcagagaccaggagccttctttcttgctaaagagasagtactagcttttcaaaccctgctcctacctgccctctgcatgttttattcttatggttggggaaagcactggcaggaccatcttcaagacaaaatgtta

SEQ ID NO: 35725 - DNA, 201 bp, Homo sapiens
ataatgcaatccaaatcactcaattcaaaacaattgttttccttgctcttatataacagataaacttggtggttgctagaaactacataaaattccaaaartaagggggccaggttttattcctgtgttgcctggaatatcttcagatcaaacaagagcaaaaagggcctttgagacaggtgtggcctgtgtgcaagatgc

SEQ ID NO: 35726 - DNA, 201 bp, Homo sapiens
agccctaagcccatgccccactctacatatgctgccttttgataatgcaatccaaatcactcaattcaaaacaattgttttccttgctcttatataacagrtaaacttggtggttgctagaaactacataaaattccaaaaataagggggccaggttttattcctgtgttgcctggaatatcttcagatcaaacaagagca

SEQ ID NO: 35727 - DNA, 201 bp, Homo sapiens; identical to SEQ ID NO: 4989

SEQ ID NO: 35728 - DNA, 201 bp, Homo sapiens
aggcctcagcagattctggaagcccatttgatgccaacggaaactcgccaatatctacccaaggctaataagtgtttgcaaacagtacaccttggcttaartattctccaaaaaggaagtacataaaacttgagatccagccagaggttctgggagaaaaacagaggtcaaatattttggtgcttacatgtgcacagccac

SEQ ID NO: 35729 - DNA, 201 bp, Homo sapiens
taacgtttcagccctcaactttgtcattcatataatggagatgacaaactatgtctcacagggctcttgcaacattcaaatgaggtaatatatggcaaacwcttggcatagtaccttccacatattaagggttcaataaatggaaacttttcttagtttctctgtttatcattttacaaggacttgtccaagattaatatt

SEQ ID NO: 35730 - DNA, 201 bp, Homo sapiens
ttggacaaggattgaaagggatgttgccaagctctacagtcattaaatatttttttcctctatgctttgttttaaaaacctagcttctctattttatcccmcactaacctcctccttccccactctaagaagtgactaacgtttcagccctcaactttgtcattcatataatggagatgacaaactatgtctcacagggct

SEQ ID NO: 35731 - DNA, 201 bp, Homo sapiens
cagaatgtcaggaggttttgagtttaggcatctgcagattctaaagctgacagctatgaagtacgatgctgttggaaactctttggaaaagctttctgtcyggagggagggcaggacagggagcaccacttgaagaatgaatgcctctttttcatgtttttgtagactttttcccccatttttacagagctttcccatatg

SEQ ID NO: 35732 - DNA, 201 bp, Homo sapiens
ggtatagaaagatcagcaatgactgcttaataactggaagtttggataatcattgtcattgccaaaaactgccatcactctggaagttaaaagaggcattkagccagtcttggattgtttcttgtgtgttgttcctcagcccgcccccagcccccgctttttatctcacccaatctgagggtgtctcactaggctggcagg

SEQ ID NO: 35733 - DNA, 201 bp, Homo sapiens
aaatgttctcctaggagaatcctaggggataatcgtaatagctaatatttactgaggactctataggcatcatgccatttagtcaaccatagcttctagtragtcttatcacccaccctattcaaatatgcacaatgtaaggctgaaaacgtttaagtagcttacccaataccatgcagaaagtacttggtggagttaaaa

SEQ ID NO: 35734 - DNA, 201 bp, Homo sapiens; identical to SEQ ID NO: 4999

SEQ ID NO: 35735 - DNA, 201 bp, Homo sapiens
ctcaaccttggttttctcaactacaaaataaacctgcccaggtctgtagtccttcctcctacaagatattttccagaccttttattgctgatcaattttcwataaagattagaatctgtgttttctaaagagtctttgtagaataagttgctcattctgaaattataaaagtcctactatcagaacatgattcttcatgtc

SEQ ID NO: 35736 - DNA, 201 bp, Homo sapiens
cctagtttgtctatgacgacagcttaatcctgacattgcggcccatgcaacttgtgtccactctggcccatgcaacctgttcactgaacctgcggccatgsttactcggtggctaaactgaagagacaaccaggtttttaaaatatttcttcctttatgaaaaataagcctattcaattttggccaccaaatattcgaaat

SEQ ID NO: 35737 - DNA, 201 bp, Homo sapiens
caccatccctgggaggagggctggatcttcccttggggccacaccacgctgatccctggaccacaaggatgcttatgaggtctgctcactggaatcccaargactttataaaaatgcaaagggccaaattccactttatgataaccccagggattctgattcaatgatctcaggcaagacacagcatctcatttttttttt

SEQ ID NO: 35738 - DNA, 201 bp, Homo sapiens
tcccaaagtacaaaaacacccactgccctcagaccaccatgagccaataggaaatacacaatgctcaagaataacatactctttcccccaacgatgcaacmtttggtggtaccagtgtacgtctcttaaacacacagtgagaaatcctcactctactcacactctggtcattattaccctaaactcattgccttggagtct

SEQ ID NO: 35739 - DNA, 201 bp, Homo sapiens; identical to SEQ ID NO: 5000

SEQ ID NO: 35740 - DNA, 201 bp, Homo sapiens
aaagaagttcagaagagctcagtgatttgtccaaggtaaaacagcttgtagaaggtggatgcaatcctggctgcagaaaactgcatccgacaatgttctcrgtgacaaagaagggtcaggactgagagtgtggaccacccccatgcaacccatgcccactttgggtggctttctgttatgtttgtgagagcagaagagata

SEQ ID NO: 35741 - DNA, 201 bp, Homo sapiens
tgaaggggtcttcgacaattttgttctcaaaatcagagataccaaaaagcagtctgagccactggaaataaccctacttgcccccgaacgtaccagggacwtaacaggtctcagagaggctactgaatacgaaattgaactctatggaataagcaaaggaaggcgatcccagacagtcagtgctatagcaacaacaggtac

SEQ ID NO: 35742 - DNA, 201 bp, Homo sapiens
tgttccaggtacaccctccatggtaactgtggacggaaccaagactcagaccaggctggtgaaactcatacctggcgtggagtaccttgtcagcatcatcrccatgaagggctttgaggaaagtgaacctgtctcagggtcattcaccacaggtgagttggtggggttgtgtgtgtgtgtgtgtgtgtgttactatttttc

SEQ ID NO: 35743 - DNA, 201 bp, Homo sapiens
cgggacagtcattctgcacacatctgctgaagaaagtgcttcccctttgccagatcttatgccagatgctaactatgaatgtatcctaaagatgctcttakactagggctgtgaaataaataagaaaacagctcatgatacaacctcagatgaatgtcctcagatcagaaaaaagaactgctatgatcatcagctctaaga

SEQ ID NO: 35744 - DNA, 201 bp, Homo sapiens
taaagatgctcttatactagggctgtgaaataaataagaaaacagctcatgatacaacctcagatgaatgtcctcagatcagaaaaaagaactgctatgawcatcagctctaagacccatctactaggcatagttccaagattgcccatttctatgagtttttaattgtttgcatcacattattgcacctggaaattcccc

SEQ ID NO: 35745 - DNA, 201 bp, Homo sapiens
gttctatttatgttgttacttacagacttacctgcacctgaaggcctgaaattcaagtccatcaaggagacatctgtggaagtggagtgggatcctctagrcattgcttttgaaacctgggagatcatcttccggaatatggtaaggagtacaaaagagcagatccatttgatctcaaggatttgaaagatgaccaaaggg

SEQ ID NO: 35746 - DNA, 201 bp, Homo sapiens
ataagaggccaagtatctgggaacttaaaaaaaagtaatgaaggtaaaaatttaaaatgagaaagggagacctatatttaacaacagtacaacaaaatgayaaatactgcaatgaaattgaaagggttactaactaataacccaggatgcttccttcacaccaaaaccaaattttcatgctgagtgcatcttaggcctggc

SEQ ID NO: 35747 - DNA, 201 bp, Homo sapiens
ctcataaccaaccctccctccctgcatcatccccagcacataaacgcacagacacacacacacacacacacacacacacacacacacacacacacacacasaggcacttgttctgtccttaggggctacaagaggcaagccagtgcctgctttgccaggatttctacatggtaaccctgacccactcaaccttggttttct

SEQ ID NO: 35748 - DNA, 201 bp, Homo sapiens; identical to SEQ ID NO: 4985

SEQ ID NO: 35749 - DNA, 201 bp, Homo sapiens
gtggatggattgtgagtaccaccagggactgcagagccctcaggcctaggggaagagggagagggcaaagcaggggaggagaagagggtgatctcctcctratgcactctgacacccacatgtgtgaggccttgcaagatagtgcctgtcacacagaggcactcaggaattctctcttaaacaaaagaatgggaaacacgc

SEQ ID NO: 35750 - DNA, 201 bp, Homo sapiens
ttagtttgaatgactaaatagcaatgatcagtgaacacctcgcctaacagtaaccaacctggaggccttctctctctctctctctctctctttttttttttaacagggcgttaactggttccactggaagggccacgaacactcaatccagtttgctgagatgaagctgagaccaagcaacttcagaaatcttgaaggcag

SEQ ID NO: 35751 - DNA, 201 bp, Homo sapiens
agaaacaccacttcctatgtcctgagaggcctggaaccaggacaggagtacaatgtcctcctgacagccgagaaaggcagacacaagagcaagcccgcacrtgtgaaggcatccactggtgagtctgccctgagcttcctccaaactctaggttgattctgaggttagcagatctcctcagccagggtgtcctcacatgag

SEQ ID NO: 35752 - DNA, 201 bp, Homo sapiens
gaggtaggagactcggaaaggggagagagaggaggagtgttgtgggtttggatggattcatgaaaaagaccctgataattttcatcctctaacatcatgakcaaagaaaatgaattctttatttgtgagaccatctggagagaagagaactcatttgtaaagtgctatgaggttcttagaagaaactttcttgtgaagggt

SEQ ID NO: 35753 - DNA, 201 bp, Homo sapiens
actgaccccatctctgtcattattcagaacaagcccctgagctggaaaacctcaccgtgactgaggttggctgggatggcctcagactcaactggaccgcrgctgaccaggcctatgagcactttatcattcaggtgcaggaggccaacaaggtggaggcagctcggaacctcaccgtgcctggcagccttcgggctgtgg

SEQ ID NO: 35754 - DNA, 201 bp, Homo sapiens
acagggtttcaccatgttggccaggctggtctcgaactcctgacctcagatgatccgcccaccttggcctcccaaagtgtggggattatgggcgtgagccvccgtgcctggcctgtaaggcactttagagtttaaaaagtactttcaccaccttatctccttggatcttcactaatgcactgggaggttggaagtggggca

SEQ ID NO: 35755 - DNA, 201 bp, Homo sapiens
ctcaatgctagttgaagcatttgcatgatcttcaaagtatggaagaattacctgatgctgtttttctaccccagtgcatctggggagctgaaaaaaaaaaattagtagagactggatggcatgccagaccttctgaatcatactctccagcctctttcattttaaccagactccagttctgataggcagccaagatcaaga

SEQ ID NO: 35756 - DNA, 201 bp, Homo sapiens
ccaggagaagacaggaaagggggctcttgagcacagaagatgcctaatttctatcttcacctcatcaagtttataaatttccccttttgttttttttttttaatcctttctcctctcctctcttcctccctcataccattgtaaactcttctctgtaatgtcctatccctcttcctcctgagaaggccctgctgtagctcc

SEQ ID NO: 35757 - DNA, 201 bp, Homo sapiens
tctttgattttcttctctagagcctagtagcttatagccaaagagaggtgcccatgcgcgtgcgtgcttgtgtgtgtgtgtgtgtgtgtgtgtgtgtgtgkctacatgcctgtgctccaggaccaggagaagacaggaaagggggctcttgagcacagaagatgcctaatttctatcttcacctcatcaagtttataaatt

SEQ ID NO: 35758 - DNA, 201 bp, Homo sapiens; identical to SEQ ID NO: 5007

SEQ ID NO: 35759 - DNA, 201 bp, Homo sapiens
ctctttgattttcttctctagagcctagtagcttatagccaaagagaggtgcccatgcgcgtgcgtgcttgtgtgtgtgtgtgtgtgtgtgtgtgtgtgtgtctacatgcctgtgctccaggaccaggagaagacaggaaagggggctcttgagcacagaagatgcctaatttctatcttcacctcatcaagtttataaat

SEQ ID NO: 35760 - DNA, 201 bp, Homo sapiens
atagcggaaggcctggcaggtagcaagggcccagcaaatgagagctattcacgttgccattaatgcatcatcatcgttacaattatcatctttttttttttacgttccaaagattcttccttctatctattatctcatcatatctcatctcatcatatcatatctcatcattttatccagagatacacttccttgttcttt

SEQ ID NO: 35761 - DNA, 201 bp, Homo sapiens
cagtatgtagcacaaaaggttccaacctcagttctaccatctgaacatttatctaatagttaataaaataacaagaaagaatgcaaaaaaaaaaaaaaaaagtcaagggtaggagccttctttagtgaaacagcactaagaacaaagcaaaaagaccataacattttaaaagccattttgggcaggctcaaggagaatgta

SEQ ID NO: 35762 - DNA, 201 bp, Homo sapiens
tctaactttatccaggaaaataaacagcaaaagatttagcaaatcttatcatttcttagtgggttataaccatgagctattaattttgacacaaaaaaaaacttacctcctccctttatttcagcttgtgaggatatgtcactaattgacttcattaatttgattcaaactgtgcactagaagtgggatagaaacacatga

SEQ ID NO: 35763 - DNA, 201 bp, Homo sapiens
cagagtaccttgtcgtgtacacgcccacccacgagggtggtctggaaatgcagttccgtgtgcctggggaccagacgtccaccatcatccgggagctggarcctggtgtggagtactttatccgtgtatttgccatcctggagaacaagaagagcattcctgtcagcgccagggtggccacgtgtgagtgagcagaactct

SEQ ID NO: 35764 - DNA, 201 bp, Homo sapiens
ttctgatggaaaagttttcaggaaacatccaggaagttttgcctaattaaaaatttaaagagactaagttcatcttttcaaataaagtatccccaaagcawgtttcctcaacttatgagaacagtaataataataataataacaaaagaacaacctttttttttttcatgtgacatccatgggccagtctctgtgctagat

SEQ ID NO: 35765 - DNA, 201 bp, Homo sapiens
cgctgaggttgatgttccaaagagccaacaagccacaaccaaaaccacactcacaggtgagctctgcatctctgcaagcctgagccagccagccctagagsgcccttaaaggatgggcacctgctcccacatgtccccatttgcaaccctcagaaataagtccaatttcctgaaatactgcttattggattgcagtgagtt

SEQ ID NO: 35766 - DNA, 201 bp, Homo sapiens
acgctgaaccttctccactaatcctccttatccctcaggattgccatcactgattggggttggctttgggtatggaaagaacatagaacttggagtcggargacctgattgtatctcagcttaggcacctagcagatgtatgacctaggataagtcattaacctctctggtttttttagatgtgatcggggttggaaggca

SEQ ID NO: 35767 - DNA, 201 bp, Homo sapiens
cagccagccctagagggcccttaaaggatgggcacctgctcccacatgtccccatttgcaaccctcagaaataagtccaatttcctgaaatactgcttatyggattgcagtgagttcttttgtaaaacattccgaaaatttgttgtagcctccagagaccaactcaaagccatttttatcatcctctgaaagtctctctga

SEQ ID NO: 35768 - DNA, 201 bp, Homo sapiens
tgtaagtttccatttagctgtaatggaaaagaagtgtctaaactagatgcagctaatttgaaattcctgtctcctttttttcttctgattaaaaaaaaaaatgcatttaccagtactgtcagaaaaaaaaaaagaaaaaagaaaaaacacctagaaaagagacgctgaaccttctccactaatcctccttatccctcagga

SEQ ID NO: 35769 - DNA, 201 bp, Homo sapiens
tgtcttctccagacctcgattctccaagagacttgactgctactgaggttcagtcggaaactgccctccttacctggcgacccccccgggcatcagtcacmggttacctgctggtctatgaatcagtggatggcacagtcaaggtattttaagtatataacaactcctcaatgctagttgaagcatttgcatgatcttcaa

SEQ ID NO: 35770 - DNA, 201 bp, Homo sapiens
ctccttcctctcacaacgatgccctctttcctgcaatagcttaagtacacccagattcatcgatatgtttataggtgttcctgagacgcaaaaacggacgygagaacttctaccaaaactggaaggcatatgctgctggatttggggaccgcagagaagaattctggcttggtaatgcagccctgcatgtttatatctaaa

SEQ ID NO: 35771 - DNA, 201 bp, Homo sapiens; identical to SEQ ID NO: 4975

SEQ ID NO: 35772 - DNA, 201 bp, Homo sapiens
agtacaaaaattggggtcaggcgcagtggctcacgcctgtaatcccagcactttgggaggccaaggcgggcgaatcacgaggtcaggagattgagaccatyctggctaacacagtgaaaccccgtctctactaaaaatacaaaaaaaattagccaggcgtggtggcgggtgcctgtagtcccagctacaggctgaggcagg

SEQ ID NO: 35773 - DNA, 201 bp, Homo sapiens
caggcagatcatgaggtcaagagatggagaccatcctggccaacatggcaaaaccctgtctctactaaaagtacaaaaattggggtcaggcgcagtggctsacgcctgtaatcccagcactttgggaggccaaggcgggcgaatcacgaggtcaggagattgagaccattctggctaacacagtgaaaccccgtctctact

SEQ ID NO: 35774 - DNA, 201 bp, Homo sapiens
aagcatgtttcctcaacttatgagaacagtaataataataataataacaaaagaacaacctttttttttttcatgtgacatccatgggccagtctctgtgstagatgctttgcaagctttatctctcttaagatttgaaaaaaacaaaaacaaaaaacactagaggtagctgctgttatccctacttatagcttatcaaac

SEQ ID NO: 35775 - DNA, 201 bp, Homo sapiens
aaaaaaaaaaggagaagaagaagaaagaaagattcaaagattcactgaatacccagaatatgcctgtctctgctgggaatttaaaagactcactctctcartcaatgaataaccctacctaaattgactcaaactgtacagaaatctgttatgaaacaatgagacacgtatgatattagaatgctcttcaaggacagtggc

SEQ ID NO: 35776 - DNA, 201 bp, Homo sapiens
tccatctttaccattcaccatcaccttggaaaaatctatttctttaagctccagatccaacagctgaaaaatgggtttatagtattctccttgtggggtcrtcataagactcaagacataaataacaaagcaccatgtttgcacctgataaatacagagcattgttagtttctgctattcaagggtcccaaatctaggggg

SEQ ID NO: 35777 - DNA, 201 bp, Homo sapiens
tttctgctgtctcccaacattattaggaaagtggctttcttaaaaataaccaataaggctagatagaacaatagacctatgcaatcatgaactccctctcktttttaagagaactttggatgtgttttaatgtaagattaaaaaatgagtattttttcctatccagttacctaatgtgaattaaatcattcagatgagtct

SEQ ID NO: 35778 - DNA, 201 bp, Homo sapiens
agtagagatggggtttcagcatgttggccaggctggtttccaactcctgacctcaagtgatccacccgcctcggcctcctaaagtgctaggattacaggcrtgagccaccgtgcacagctgcaattttttaaaaagaaaaaaatgcataattttgcacttccatataggaaaacctctttattttcttcaagataacatat

SEQ ID NO: 35779 - DNA, 201 bp, Homo sapiens
tgatgcatagtaagtgcctaatgaatcgatgaaagaataacagaggaatgaatgaatgcagagtgaatgaatcacataaattaagagactggcacctcccytaactcttaccaagctgcctctatctctcagaataaagaagatgagggagagatcaccaaaagcctgaggaggccagagacctcttaccggcaaactggt

SEQ ID NO: 35780 - DNA, 201 bp, Homo sapiens
gtcttctgggttcatccgtgttgttgaaaatgacagaattttcctcttttttaaggctataaagtattccattatatatatatgtgtatatatatatatatgtatatatacacacatatggaatgtatatatttatatataaatatgatctatctatctatacaccacattttctttatccattcatccattgacagacac

SEQ ID NO: 35781 - DNA, 201 bp, Homo sapiens
gtgtctgaaatgttctcctaggagaatcctaggggataatcgtaatagctaatatttactgaggactctataggcatcatgccatttagtcaaccatagcktctagtaagtcttatcacccaccctattcaaatatgcacaatgtaaggctgaaaacgtttaagtagcttacccaataccatgcagaaagtacttggtgga

SEQ ID NO: 35782 - DNA, 201 bp, Homo sapiens
tgtcttctgggttcatccgtgttgttgaaaatgacagaattttcctcttttttaaggctataaagtattccattatatatatatgtgtatatatatatatatgtatatatacacacatatggaatgtatatatttatatataaatatgatctatctatctatacaccacattttctttatccattcatccattgacagaca

SEQ ID NO: 35783 - DNA, 201 bp, Homo sapiens
tatggctacattctggaaaaatccactgcttcctctaataatgtctctctctttctctctgcccatattccttctttagaaccaaagccacagttgggcaygctaatctttagcaatattactccaaaaagcttcaacatgtcatggaccactcaagctgggctttttgcaaagattgttatcaatgtgagtgacgctcac

SEQ ID NO: 35784 - DNA, 201 bp, Homo sapiens
attactccaatctaccactctaatggcttgtctactcttcttcatacatgactagcaaatggtggtgtttatgctttaaaagaacacagatctaaaaaatraaataaaaataaagaacacaaatatacacctgcagagaaagcaatatattttctatcatcatattcaatgcaggtgtagacacagcctaacatactgtct

SEQ ID NO: 35785 - DNA, 201 bp, Homo sapiens
ttggtaacattgcttccttccatcatagccctgaattatcagatctctctacccagcaatggttctattaacaacctcaatcttaaaacacagccaaatawctcaaatttatttttttcttctcccctaccccttccttttacagccaaagaacctgaaattggaaacttaaatgtttctgacataactcccgagagcttc

SEQ ID NO: 35786 - DNA, 201 bp, Homo sapiens; identical to SEQ ID NO: 4987

SEQ ID NO: 35787 - DNA, 201 bp, Homo sapiens
ataagagaactgaattaccctcctccgggcagttctctcagatactgagtcattgttagaacatcaaattagcaaatagctagaccagaaggaaaaaaaaagaaattacacaattatgactggagactgtaccaaagagaaagccattcattagcacaagtacacacagcagcttttggaacaaggaatgtcctgggctat

SEQ ID NO: 35788 - DNA, 201 bp, Homo sapiens
tcaataggaaaataccatttccaagagaaaaacccaaatatgcatgaaggcaaaagaaattttttgtttgtttgttttgagacagagtctcactctatccyccagactggagtgcaatggcgccatctcagctcactgcaacctccaccttctgtgttcaagcgattctcctgcctcagcctcctgagtagctgggattac

SEQ ID NO: 35789 - DNA, 201 bp, Homo sapiens
taagaggcaaacatagatgtgttaaatggaatagctaaagaagtagaagcccaggcacctgaccttggtaagcatagaggaagaaagaaaacaggaaaagygagagctcttgggtgaaggagccatgtggctataagtcctgaaatgttgcagagttttaggttcaaccatcagaagcaagaaccttccagctctgtatca

SEQ ID NO: 35790 - DNA, 201 bp, Homo sapiens
tacagcccctgcagtggatttttccttaggggtatttatggaccttaaggcaggagcttaaggataatttggaccctattagccatgtagaacatgatacrtgattacatttgtagacattttggtgccttaatgtcagcaagggttgcaaaatgagttttgatatgcatgtattccagagatgtatagaagttccagtta

SEQ ID NO: 35791 - DNA, 201 bp, Homo sapiens
agcagacaaagctcccgcctccctaacattcttgacctcagtggtgtacagtccagtgtggcagggaaggcaatcataggggtaattatgacacagacagygggggacgtgcagagctcagttggaacctggagcagggggattccaggcagcctgcagggcactcatggcttcccttgggcagcacttgcttatgtgtgt

SEQ ID NO: 35792 - DNA, 201 bp, Homo sapiens
agaaactgatgaaatcccaatataaactatacaacagacctcccataggatattgaggcagcacaaaaaagaagaggctttttttttttttttttttttttgagatggagtctcgttctgtcacccaggctagagtgcaatgactcaatcttggctcactgcaacctcaacctccagggctcaagcgattctcctaactca

SEQ ID NO: 35793 - DNA, 201 bp, Homo sapiens
ctcttagtttaaattgctcaagatcctctaacatagagcttcacattttatcccagagaggtcatagttaggtatatctctacttccttctaatacaggargaaatgaaaggagtaagggtctaggatttgttctctatcagttcttcccccatcgtgtgccatccaacctaatcctgtgactcacttcaaacagaataat

SEQ ID NO: 35794 - DNA, 201 bp, Homo sapiens
tagaaactgatgaaatcccaatataaactatacaacagacctcccataggatattgaggcagcacaaaaaagaagaggctttttttttttttttttttttttgagatggagtctcgttctgtcacccaggctagagtgcaatgactcaatcttggctcactgcaacctcaacctccagggctcaagcgattctcctaactc

SEQ ID NO: 35795 - DNA, 201 bp, Homo sapiens
tggaacgtagtaaatactcactgaataactgaatgaattaaaacgaactaattacagaactgaggctgtgacaaattccttgatacatcttactgtagaasagattacaggagagctaattacattagggccatcaggaaagtaagagtatttgttcattcattaattccacaatataagaacctgctatgtgtaagttca

SEQ ID NO: 35796 - DNA, 201 bp, Homo sapiens
atttaaagacattcttcagtgtgggaaaaatgtgcaaagttctttttattggttcttctccactgtccacagactatttcccccatccctttctccacaggaaaaaatatacatgtttcatttaaggtgaagcagacgtttctttccctccttgaattctaacttttaaagccttctgcattcactcagtcaataaaatac

SEQ ID NO: 35797 - DNA, 201 bp, Homo sapiens
aaagtgaagatagaataactatctgtggagatatctggccttttatctgtagcatctgcttagggacaaaaggagaggcagtttctcccatgactcggctktcagtttattttttttcctattggcagagttaaattggggtcccaagattttattttcctttcacaaaaagtaaaatctgattaaggaagaaccaaaact

SEQ ID NO: 35798 - DNA, 201 bp, Homo sapiens
gatatctgtattacttatgatggtgatgatgatgatgtcaacttcctgattattattattatgtcaacttcttaatgatcttccaaggccttttcaaccamtatttggtgattgtaattctttccttttctaggaagccccccatgaacttcccagtgcaaagtggcacataattatctcattcaggctggcattaatacc

SEQ ID NO: 35799 - DNA, 201 bp, Homo sapiens
ccatgcactagaatgaagtgttttgtgccacagacttgccatgcctataccaaatgatcttctacagttgcttctaagtcctgctcaagcatgattttgaycctataatttgatgtctgtctgtgtctttggaaagtactgagaagctgggccaaatgtttcccgttaggaacacagtcttgaaagactaaaccacaggca

SEQ ID NO: 35800 - DNA, 201 bp, Homo sapiens
aacggacgcgagaacttctaccaaaactggaaggcatatgctgctggatttggggaccgcagagaagaattctggcttggtaatgcagccctgcatgtttrtatctaaaatgcctgattctgccctccttgtcacttttcctaacccacagggacctatgggagagaaagagatgaggaagaagaactacttctggtggca

SEQ ID NO: 35801 - DNA, 201 bp, Homo sapiens
cagaaaagagccccacaccaggctaattcatttgcttttcttgctactgagttagaagagataggataacaggaaaaccagggctgtagccacagcctccwcattttcctaaaaattttagagtgtccctgctacttgacaaattgaaatactaagatttatacatttccatggaaaaagcaacagtgggaaagagagggc

SEQ ID NO: 35802 - DNA, 201 bp, Homo sapiens
cagtttatttctctaactttcattccttcctcattaatccagcaatttattaaatcaacaaatatttaagtacctactgagtgccaatccagaaaaactayaattcaaaagtgttgggtagatatttgggtcctgaaacattgagtatgttgggaatcagggcaatcaggattgatttctaatgaccatctttcaaaaaaa

SEQ ID NO: 35803 - DNA, 201 bp, Homo sapiens
agaaaagagccccacaccaggctaattcatttgcttttcttgctactgagttagaagagataggataacaggaaaaccagggctgtagccacagcctcctyattttcctaaaaattttagagtgtccctgctacttgacaaattgaaatactaagatttatacatttccatggaaaaagcaacagtgggaaagagagggct

SEQ ID NO: 35804 - DNA, 201 bp, Homo sapiens
catcatcagttaaaaaggtatctgggttcctttgacaacttgctccaaattatgacggtagaatgcctcagagtcttgaaatgtttgtgcacagcacttgkctggattgggagtgaggagacccacaaagcaatggtactgaaatgcttcaaaaattcaatatattaaattacaaattagatttccaaatagtagtacatg

SEQ ID NO: 35805 - DNA, 201 bp, Homo sapiens
tctgctttctatacctgactgtgagctcattaagggcaagacctatccatcattggcttctgaaacaccccaccaccactaggctatcccatagcccgttyttacacttgttcaacacatctctgttgaatgcaagaataaatcatttagaaattaattctcagtcctcttggataatcactggctcccccagcatcttaa

SEQ ID NO: 35806 - DNA, 201 bp, Homo sapiens
ctatccatcattggcttctgaaacaccccaccaccactaggctatcccatagcccgttcttacacttgttcaacacatctctgttgaatgcaagaataaaycatttagaaattaattctcagtcctcttggataatcactggctcccccagcatcttaactgggcaccagctaagccactgtgctgcctaaatggacaacc

SEQ ID NO: 35807 - DNA, 201 bp, Homo sapiens
tcacatccctgtaagactcagaaactgcccatgtcagtgaatgccaaacaattagaagcaaataaagtgtctctatttttttcccatctcactagccattracttccccacagtggggcaaggggccatgtggggtttcatggattgactctaccatctgcagacttcgctgaagagtcaaagttgaaacctggaagccaa

SEQ ID NO: 35808 - DNA, 201 bp, Homo sapiens
ttaagactatttatctctcaagtaagaacactgatatttaaccctatatgtcaaattgtaaaactgtgttttgttgagctgttcgttctgctattccatamcaaacccctatcaaaatactccataggaatctcgtgaattacagacacacacacacacaccatgtatgtagctattcaattctagaacttctaataatga

SEQ ID NO: 35809 - DNA, 201 bp, Homo sapiens
ttgaaactggctttttttccttcagcataattctctcgagattcatctaaattgcttcttttatcaatagttggttccttttaactgctttaaatctgagyagcattttatggaatggatattccatgacattattttcaatcttctcagactccgatggggtcatgtgggtgatgtataattagacctattttacaaaag

SEQ ID NO: 35810 - DNA, 201 bp, Homo sapiens
acccagagatgtgactctcctgtggtccctcagctcctctgtggcagacctaggattccagcccagatgcagttgactttcagccccagaagcagccctgycttgcagcctgaagagcattcatctctctgttctcctcccagagttggacacgcccaaggaccttcaggtttctgaaactgcagagaccagcctgaccct

SEQ ID NO: 35811 - DNA, 201 bp, Homo sapiens
ccgctgcgtggacggccagtgcatctgccacgagggcttcacaggcctggactgtggccagcactcctgccccagtgactgcaacaacttaggacaatgcrtctcgggccgctgcatctgcaacgagggctacagcggagaagactgctcagagggtgagtgccagggcgcagaccagcatataaaggccatgatggagtg

SEQ ID NO: 35812 - DNA, 201 bp, Homo sapiens
cctctcattttctcttttctcttagtcattaagacattaacctagtttgtctatgacgacagcttaatcctgacattgcggcccatgcaacttgtgtccaytctggcccatgcaacctgttcactgaacctgcggccatgcttactcggtggctaaactgaagagacaaccaggtttttaaaatatttcttcctttatgaa

SEQ ID NO: 35813 - DNA, 201 bp, Homo sapiens
tacctactgcatacattgtaccgtactgatatttgaggaaaagtagttcccaaagtcagcattgttatgtggactcatttgtgcctgctcatagtgcttgyggaagactagatactcagaatgctagacagaactcgagaaaaagagtgatccaaggaaatcaggagagctggcaaaggtgttatggcaagggatgttatt

SEQ ID NO: 35814 - DNA, 201 bp, Homo sapiens
tagtgcttgcggaagactagatactcagaatgctagacagaactcgagaaaaagagtgatccaaggaaatcaggagagctggcaaaggtgttatggcaagrgatgttattccagttgaagcttgatatgcaagaaaagggttagaagtgtggacatatttggaaatggcttgaagagtctttctcacaatatcttcagtct

SEQ ID NO: 35815 - DNA, 201 bp, Homo sapiens; identical to SEQ ID NO: 4995

SEQ ID NO: 35816 - DNA, 201 bp, Homo sapiens
gcttccattctcaaagtcatctcagtgtcacaacatggctgctgtaatacagccattccatctgtgttctaggcagcataagggaggaagaaccaaaactyccaaagaggagcaccttctgggtgagtctttctggaaaccccaccaatcacttctccccatagttcattggccactcctagctgtaagggaggcagggaa

SEQ ID NO: 35817 - DNA, 201 bp, Homo sapiens; identical to SEQ ID NO: 4996

SEQ ID NO: 35818 - DNA, 201 bp, Homo sapiens
agaaccaagaagaaataaatctatagtagagatttaaatttcagctttataaacatgagcttgttataaagtgtcaaggggcaacaaatgaatcagaaatrcccaaaagatgaaatccctctcttttctttctctttctctctctttcttccctcttccctcactcctgctcttcttcctcctcctccttcctctgcccct

SEQ ID NO: 35819 - DNA, 201 bp, Homo sapiens; identical to SEQ ID NO: 4997

SEQ ID NO: 35820 - DNA, 201 bp, Homo sapiens
gaagaaataaatctatagtagagatttaaatttcagctttataaacatgagcttgttataaagtgtcaaggggcaacaaatgaatcagaaatgcccaaaaratgaaatccctctcttttctttctctttctctctctttcttccctcttccctcactcctgctcttcttcctcctcctccttcctctgcccctctccctta

SEQ ID NO: 35821 - DNA, 201 bp, Homo sapiens
tggtggaggacaaggctctcattagcatcatttgtgtttgcatctatattttaagggatgttggtttttccctgattttaataagtaagtgtagcacttasggctgacaccctagacaaatagaagttgtcacctcaaggttccaattgtccatcatcaccttagaaatctctactcagaggcaaagaagagaagaaacag

SEQ ID NO: 35822 - DNA, 201 bp, Homo sapiens
ctgtcggaaataagtactggggtgacactcatgtcccattcagttccgcattcaatgctgactctgggatcaatgttcaaggccagtcccacacccagaayctttcaattgtcacctctggttctgccctttactgtccaggagggaaatttcagctgagatttctcaggtccatattttctgtctctcccaggtgactcc

SEQ ID NO: 35823 - DNA, 201 bp, Homo sapiens
ccctttgagacttccatggtgccctctcattttctcttttctcttagtcattaagacattaacctagtttgtctatgacgacagcttaatcctgacattgyggcccatgcaacttgtgtccactctggcccatgcaacctgttcactgaacctgcggccatgcttactcggtggctaaactgaagagacaaccaggttttt

SEQ ID NO: 35824 - DNA, 201 bp, Homo sapiens
ttccaagtgaagaaactcaggcttagagcattgtgtgcaattgctcaagttcacattgatagtagagcttagattctaaccccaagtctgtctgattccamagcctgcgttcattttagatttaaacatatgaaattgccaaaattaatcataccatttttcctaatattaatttttatacagcctcatagagacctcatc

SEQ ID NO: 35825 - DNA, 201 bp, Homo sapiens
acacactggagtggagtatatcactcactcctcaatgcattcccaagaagtagacatatttaccttctttttccaagtgaagaaactcaggcttagagcaytgtgtgcaattgctcaagttcacattgatagtagagcttagattctaaccccaagtctgtctgattccacagcctgcgttcattttagatttaaacatat

SEQ ID NO: 35826 - DNA, 201 bp, Homo sapiens
atttattcaacttgttctgcatgccacgaaccaggcccagcagtctacacactggagtggagtatatcactcactcctcaatgcattcccaagaagtagayatatttaccttctttttccaagtgaagaaactcaggcttagagcattgtgtgcaattgctcaagttcacattgatagtagagcttagattctaaccccaa

SEQ ID NO: 35827 - DNA, 201 bp, Homo sapiens
cggctactcaggaggctgaggcagagaatagcttgaaaccaggaggcagagtttgtagtgagctgagatcatgccactgtactccagcctgggtgacagaktgagactctgtctcaagaaaaaaaaaaaaaaaaaagagtcctcattatatgagttagtatatgtatgaaataggagctattgttaaccccattttacaga

SEQ ID NO: 35828 - DNA, 201 bp, Homo sapiens
cgggcatggtggctcatgcccgtaatcctagcactttgggaggccaaagtaggtggatcacctggggtcacgagttcaagaccagcctggccagcatggcraaaccctgtctctactaaaaatacaaaaattagtcgggcctggtggtgcatgcctgtaatcccggctactcaggaggctgaggcagagaatagcttgaaa

SEQ ID NO: 35829 - DNA, 201 bp, Homo sapiens
atgcgggtcacagagtaccttgtcgtgtacacgcccacccacgagggtggtctggaaatgcagttccgtgtgcctggggaccagacgtccaccatcatccrggagctggagcctggtgtggagtactttatccgtgtatttgccatcctggagaacaagaagagcattcctgtcagcgccagggtggccacgtgtgagtga

SEQ ID NO: 35830 - DNA, 201 bp, Homo sapiens
gaaacacccaagggcacactgctgacctgggactccagcctgaaggaaatggactaaggaacagccaccacaggtcttaagatggatcacagcagggggtscctgatgccatctgcattttagaggcaacagaagatcttcagacctctgtggctgacagtggaaaagacaggtcaaacaaacctagagagattttagagg

SEQ ID NO: 35831 - DNA, 201 bp, Homo sapiens
agggagtgaggctcagactgcactttcccatgccaacagcctgcatctgagctaagacccaggaagcacagaaagttggagaggccagaaacacccaaggscacactgctgacctgggactccagcctgaaggaaatggactaaggaacagccaccacaggtcttaagatggatcacagcagggggtccctgatgccatct

SEQ ID NO: 35832 - DNA, 201 bp, Homo sapiens
gcccaaaagatgaaatccctctcttttctttctctttctctctctttcttccctcttccctcactcctgctcttcttcctcctcctccttcctctgccccyctcccttagctttcccttgagtttgataaatgctgtatctaagagagattcctattgcccctcaatcattccaccttctggtgatggccacattgcctcc

SEQ ID NO: 35833 - DNA, 201 bp, Homo sapiens
agagcagggagtgaggctcagactgcactttcccatgccaacagcctgcatctgagctaagacccaggaagcacagaaagttggagaggccagaaacaccmaagggcacactgctgacctgggactccagcctgaaggaaatggactaaggaacagccaccacaggtcttaagatggatcacagcagggggtccctgatgc

SEQ ID NO: 35834 - DNA, 201 bp, Homo sapiens
aacatggcaaaaccctgtctctactaaaagtacaaaaattggggtcaggcgcagtggctcacgcctgtaatcccagcactttgggaggccaaggcgggcgratcacgaggtcaggagattgagaccattctggctaacacagtgaaaccccgtctctactaaaaatacaaaaaaaattagccaggcgtggtggcgggtgcc

SEQ ID NO: 35835 - DNA, 201 bp, Homo sapiens
caaatatttacctgttcattttgtatttttagtagagacaggatttcaccatgttggccaggctggttttgaactcctgatctcaagtgatccacccgccycggcctcctaaggtgctggcattacaggcatgagccgccacggccggccacaatttaccacatatacctgaaacctttaaacctttaaccttttttccag

SEQ ID NO: 35836 - DNA, 201 bp, Homo sapiens
aaaaagacctgaatttggagttgctccaccaggaaacatttttttttttttttctgtcacccaggctggagtgcagtggaacgatctcagttcactgcaayctctgcctcccaggttcaagtgattctcctgccttagtctcccaagtagctgggattacaggctcccaccaccacatctggctaatttttttgtatttta

SEQ ID NO: 35837 - DNA, 201 bp, Homo sapiens
gttcttgggagtagaataggatttagcagtactagatcatttggtgagaaaaagacctgaatttggagttgctccaccaggaaacatttttttttttttttctgtcacccaggctggagtgcagtggaacgatctcagttcactgcaacctctgcctcccaggttcaagtgattctcctgccttagtctcccaagtagctg

SEQ ID NO: 35838 - DNA, 201 bp, Homo sapiens
gtgactcataatcatcataggaatagtaagacttcttgaaaatgtgacaaaaactatgaatccgctccccaggggtggaaatacacacacacacacacacactatgcataatcacacactgttttggcatacaagcctataatttcagggaattcaggttatgaattcctacctggtataacaggatgtgagtctcatctg

SEQ ID NO: 35839 - DNA, 201 bp, Homo sapiens
cagtgactcataatcatcataggaatagtaagacttcttgaaaatgtgacaaaaactatgaatccgctccccaggggtggaaatacacacacacacacacacactatgcataatcacacactgttttggcatacaagcctataatttcagggaattcaggttatgaattcctacctggtataacaggatgtgagtctcatc

SEQ ID NO: 35840 - DNA, 201 bp, Homo sapiens
cgttcttacacttgttcaacacatctctgttgaatgcaagaataaatcatttagaaattaattctcagtcctcttggataatcactggctcccccagcatyttaactgggcaccagctaagccactgtgctgcctaaatggacaaccacttctcagttctggaattcttcaaacacctagggttaggagggtcttcgcttt

SEQ ID NO: 35841 - DNA, 201 bp, Homo sapiens
ggcagtgactcataatcatcataggaatagtaagacttcttgaaaatgtgacaaaaactatgaatccgctccccaggggtggaaatacacacacacacacacacactatgcataatcacacactgttttggcatacaagcctataatttcagggaattcaggttatgaattcctacctggtataacaggatgtgagtctca

SEQ ID NO: 35842 - DNA, 201 bp, Homo sapiens
ctaagccactgtgctgcctaaatggacaaccacttctcagttctggaattcttcaaacacctagggttaggagggtcttcgctttggcagttagagttttytcaattcttttatgacacaggttgcaccggactcactcaactatggagatcagatgtcctcaggaaaaaaaaaaaaaaaaaaaaaaaatacacacttaag

SEQ ID NO: 35843 - DNA, 201 bp, Homo sapiens
gcatgaacccaggaggcggagcttgcagtgagccaagatggcgccgctgcactccagcctgggcgacagagcaagactctgtctcaaaaaaaaaaaaaaaraaaaagaaaagaaagaaatagtaacatagccccagcctaatgcatttcacaaggcagtgactcataatcatcataggaatagtaagacttcttgaaaatg

SEQ ID NO: 35844 - DNA, 201 bp, Homo sapiens
ggcatgaacccaggaggcggagcttgcagtgagccaagatggcgccgctgcactccagcctgggcgacagagcaagactctgtctcaaaaaaaaaaaaaaraaaaaagaaaagaaagaaatagtaacatagccccagcctaatgcatttcacaaggcagtgactcataatcatcataggaatagtaagacttcttgaaaat

SEQ ID NO: 35845 - DNA, 201 bp, Homo sapiens
actacgttaaatttcctttctacattgtagaagcagtaatagtgggttctgttctgcaccatttactgagaaaaatctcctttcttttaattaaaagtagrcacactcatttcacacaaacagctttgctctgtgatacagccattcttcctttagacataaagtacgagcagaaaaaggtggaagaagaaacaagctgag

SEQ ID NO: 35846 - DNA, 201 bp, Homo sapiens
ctgtaagcgagaagaaaaatttggtgtaagctgcctcatgggttgccaaaatgatgtggaaacaaattcatctgcatttctaaacaataggaattctcctygtcctcccaaacctagaatatttcatgtatgtgcttaagtcaacaagataaatatattccatgagctactaaaaatgaaatcataagtaactaattctga

SEQ ID NO: 35847 - DNA, 201 bp, Homo sapiens
ctacctgttgctgaaagtgtataaagagaggatggttaataacctcttcacaggaatgctgttttgtctctataggaagtctgaccagctgatgtgcaagytcttcactagcccccaaattctaagaaatacaatttctgtgtttattaataaacactgcagcacaaacttgactataatcaactttcttttcttaagtag

SEQ ID NO: 35848 - DNA, 201 bp, Homo sapiens
ctggcatgacactggccttggtttcccaacctggtaaataaatttttatctcacagtaatgctctgaataaaagtctataatgccaaaatctgaagaaatrattcaacactgataacatttaacaccaaggcaattgaaataagattaaagcttaacatttaacccttcttccaccccacactccccacaaaagctttcag

SEQ ID NO: 35849 - DNA, 201 bp, Homo sapiens
gaaaagaaaaacattcattaaagtccatatttttcattacaaatgtttccttttattaagctcttactgctaccaaagactgtttgccatttctttcgcayacattatctcatgcacttttcacaatgatcctatgaggactcccttaacacatttattgatgacagtactctggcttatggtcacagataataaccttgc

SEQ ID NO: 35850 - DNA, 201 bp, Homo sapiens
ttgagtttgataaatgctgtatctaagagagattcctattgcccctcaatcattccaccttctggtgatggccacattgcctccttcctccagtgagaaarcctcacacctgcgcagtcactgaagaagttttatctccctaagatcctgaggtgtggggcttctccactagagaaaggaggtaatgtggctataaccagg

SEQ ID NO: 35851 - DNA, 201 bp, Homo sapiens
taaatgctgtatctaagagagattcctattgcccctcaatcattccaccttctggtgatggccacattgcctccttcctccagtgagaaaacctcacacckgcgcagtcactgaagaagttttatctccctaagatcctgaggtgtggggcttctccactagagaaaggaggtaatgtggctataaccaggagatttacta

SEQ ID NO: 35852 - DNA, 201 bp, Homo sapiens
cctgaggtgtggggcttctccactagagaaaggaggtaatgtggctataaccaggagatttactagctagaattattctgtttctgaatgagagccccatrttggcattccaaagcctcagcagttgcatttccccaccacgcctccttaatgccatttcaaagatatcatgtttcgtatttaaagacattcttcagtgtg

SEQ ID NO: 35853 - DNA, 201 bp, Homo sapiens
tctgtttctgaatgagagccccatattggcattccaaagcctcagcagttgcatttccccaccacgcctccttaatgccatttcaaagatatcatgtttcrtatttaaagacattcttcagtgtgggaaaaatgtgcaaagttctttttattggttcttctccactgtccacagactatttcccccatccctttctccaca

SEQ ID NO: 35854 - DNA, 201 bp, Homo sapiens
ttcttcagtgtgggaaaaatgtgcaaagttctttttattggttcttctccactgtccacagactatttcccccatccctttctccacaggaaaaaatatayatgtttcatttaaggtgaagcagacgtttctttccctccttgaattctaacttttaaagccttctgcattcactcagtcaataaaatactatcaccatgc

SEQ ID NO: 35855 - DNA, 201 bp, Homo sapiens
gttctttttattggttcttctccactgtccacagactatttcccccatccctttctccacaggaaaaaatatacatgtttcatttaaggtgaagcagacgyttctttccctccttgaattctaacttttaaagccttctgcattcactcagtcaataaaatactatcaccatgctctgtgctaagttctggggttactaga

SEQ ID NO: 35856 - DNA, 201 bp, Homo sapiens
tggactcctgtaccccttccccaaggactgctcccaagcaatgctgaatggagacacgacctctggcctctacaccatttatctgaatggtgataaggctsaggcgctggaagtcttctgtgacatgacctctgatgggggtggatggattgtgagtaccaccagggactgcagagccctcaggcctaggggaagagggag

SEQ ID NO: 35857 - DNA, 201 bp, Homo sapiens
tataagtcctgaaatgttgcagagttttaggttcaaccatcagaagcaagaaccttccagctctgtatcactggattcttaatagcagaagcctgccaggmgccactcaatgtctgtggggcttacagagaaaaatgaagaatcagtggccctgaagaatttttcctggggaattccagggttttactgatggattgggcc

SEQ ID NO: 35858 - DNA, 201 bp, Homo sapiens
ggcacagtcaaggtattttaagtatataacaactcctcaatgctagttgaagcatttgcatgatcttcaaagtatggaagaattacctgatgctgtttttytaccccagtgcatctggggagctgaaaaaaaaaaattagtagagactggatggcatgccagaccttctgaatcatactctccagcctctttcattttaac

SEQ ID NO: 35859 - DNA, 201 bp, Homo sapiens
aaaatctctgtatttggatggatgtaaaaattcagctaaattgaatacgcagtgagattacataaaaacaactgtttcaaatgcatacttggctaaagacsaaatgcctattatctacaagattgacctgtcttttcattgtcttttgtaactggttttgtttttttgattgttttgtttttttaatcctaaagactgcaa

SEQ ID NO: 35860 - DNA, 201 bp, Homo sapiens
aacttaggacaatgcgtctcgggccgctgcatctgcaacgagggctacagcggagaagactgctcagagggtgagtgccagggcgcagaccagcatataawggccatgatggagtggactcctagtatgggttggaaaactacgtttatatatataaacattcatgcacactgattctttgtacgtattaatatatccatt

SEQ ID NO: 35861 - DNA, 201 bp, Homo sapiens
accccacactccccacaaaagctttcaggaccattgtttttatcttcttattttttgtagcgggctggggccataaatgtaccaggtatttggagaatggrggactaaatattaaagcctatattctacccagccttctcaacagatgactaactgtgagcagttaggcacctagccttacagaggtgccatattgcttac

SEQ ID NO: 35862 - DNA, 201 bp, Homo sapiens
agggccgctgcgtggacggccagtgcatctgccacgagggcttcacaggcctggactgtggccagcactcctgccccagtgactgcaacaacttaggacartgcgtctcgggccgctgcatctgcaacgagggctacagcggagaagactgctcagagggtgagtgccagggcgcagaccagcatataaaggccatgatgg

SEQ ID NO: 35863 - DNA, 201 bp, Homo sapiens
cttggagtcggaagacctggttgtatatctcagcttaggcacctagcagatgtatgacctaggataagtcattaacttctctggtttttttagatgtgatmggggttggaagattgatgaaggttcaacctcagatggcagataaatttcaagtttaattaagccctacccattcactcaacttgacttcttgaacatttg

SEQ ID NO: 35864 - DNA, 201 bp, Homo sapiens
caggaactgggctcagtccctgtactcgctccgaggtgccactgagcagctgctgcccagagcccaggcgagccctggtcccatttccagcttgaccaagyacaagaggggagccagggctgcggatcctactccctcttgctccccaggcatccgtctcacaattagaaaacccgtgtggggagcaaagcaaaaatcaca

SEQ ID NO: 35865 - DNA, 201 bp, Homo sapiens; identical to SEQ ID NO: 4981

SEQ ID NO: 35866 - DNA, 201 bp, Homo sapiens
attcctacctggtataacaggatgtgagtctcatctgatttcacacactacaacaaatggttctcaagccagatggagcctgagggtgcaaccgtccttcmgctgaatttgaatctgggtgccctgggtagatacagaaaaatgtggctgcttaagcctggctgagaacttctgtttcttttgttgcaggccgcttggaca

SEQ ID NO: 35867 - DNA, 201 bp, Homo sapiens
taatttcagggaattcaggttatgaattcctacctggtataacaggatgtgagtctcatctgatttcacacactacaacaaatggttctcaagccagatgsagcctgagggtgcaaccgtccttcagctgaatttgaatctgggtgccctgggtagatacagaaaaatgtggctgcttaagcctggctgagaacttctgtt

SEQ ID NO: 35868 - DNA, 201 bp, Homo sapiens
cacacacacacacacacactatgcataatcacacactgttttggcatacaagcctataatttcagggaattcaggttatgaattcctacctggtataacasgatgtgagtctcatctgatttcacacactacaacaaatggttctcaagccagatggagcctgagggtgcaaccgtccttcagctgaatttgaatctgggt

SEQ ID NO: 35869 - DNA, 201 bp, Homo sapiens
aggtgtccttatagaattagaaagccattagctacctcattttagttgcggaaaattagaatgttttggttatataaacccacataccaacttgagccaamcttccacaaaaaactttggaaaataaaacagaaaaaaataacaaggacacaagagtgagctcttaaggggtttacttaactcggatataccccagggaag

SEQ ID NO: 35870 - DNA, 201 bp, Homo sapiens
agagagagagagagatagggattttgcatgtgcctgtgtgtctccagagctcatactctcccatggatgccctgtttccacatgcatcctatttcaaggarttttgctgctttggaattatgtctttatctccaataactaaagttgataaagctacatgagtttcaacaacttcaaatcagagctgaaaatctgtttctg

SEQ ID NO: 35871 - DNA, 201 bp, Homo sapiens
ttcaggcttctgataagtcctgctttgaaaaaccctattttaccttaattataagtttctaaaacgtatttgaccatgaaatctacccactttctaccccraaacctatgagtacgccatgaaatttctaccccagagagcactctctgataggtactgctgtggccccatcacctcattttacaaatagagaaactgagg

SEQ ID NO: 35872 - DNA, 201 bp, Homo sapiens
ttgcagtgagctgagatcatgccattgcactccagcctgagtgacaagagcaaaacaccatccgaaaaaaaaagagatagagagagagagagagagagagrtagggattttgcatgtgcctgtgtgtctccagagctcatactctcccatggatgccctgtttccacatgcatcctatttcaaggagttttgctgctttgg

SEQ ID NO: 35873 - DNA, 201 bp, Homo sapiens
gttgcagtgagctgagatcatgccattgcactccagcctgagtgacaagagcaaaacaccatccgaaaaaaaaagagatagagagagagagagagagagagatagggattttgcatgtgcctgtgtgtctccagagctcatactctcccatggatgccctgtttccacatgcatcctatttcaaggagttttgctgctttg

SEQ ID NO: 35874 - DNA, 201 bp, Homo sapiens
aatcagccaggcatggcagtgtgcacctgaaatcccagctacttgggaggctgaggcaggaggatcacttgaacctgggaggcggaagttgcagagagtcragatcatgccattgcactccagcctggacaacagagtgagactctgtctcaaaaataaataaataaataaaatagctcttcaattatcatttgaatttta

SEQ ID NO: 35875 - DNA, 201 bp, Homo sapiens
actttgggaagttgaggcaagtggattgcctgagctcaggagttcgggaccagcctggggaacatggtgaaactccaactctactaaaaaaaaaaaaaaaatacaaaaaatcagccaggcatggcagtgtgcacctgaaatcccagctacttgggaggctgaggcaggaggatcacttgaacctgggaggcggaagttgca

SEQ ID NO: 35876 - DNA, 201 bp, Homo sapiens
ctctgtcgccgaggctggaatgcagtggtgtgatctcagctcactgcaacctctgcctcctgggttcaagcaattcgcctgcctcagccccccaggtagcygagattacaggcaccctccaccatgccctcctaatttttgtatattcagtagagacagggtttcaccatgttggccaggctggtctcgaactcctgacct

SEQ ID NO: 35877 - DNA, 201 bp, Homo sapiens
gcaagaaatagaagagagaaagcaagtgctctgcagttttatttcaaaaattgaaaccagaccacaccagggcagtttgtggtctgaatgtatcaatggatctagtcatatttcatctgagcatttcttaggtatactaaaccacaaatatgaatctcattattgtgtctggatggaaatattttatggattaagatttgt

SEQ ID NO: 35878 - DNA, 201 bp, Homo sapiens
accaattccaactagaaaagtctttctcctgttgtgctgaaatttgtcttctcataaccaaccctccctccctgcatcatccccagcacataaacgcacasacacacacacacacacacacacacacacacacacacacacacacacacacaggcacttgttctgtccttaggggctacaagaggcaagccagtgcctgct

SEQ ID NO: 35879 - DNA, 201 bp, Homo sapiens
ggcaagaaatagaagagagaaagcaagtgctctgcagttttatttcaaaaattgaaaccagaccacaccagggcagtttgtggtctgaatgtatcaatggatctagtcatatttcatctgagcatttcttaggtatactaaaccacaaatatgaatctcattattgtgtctggatggaaatattttatggattaagatttg

SEQ ID NO: 35880 - DNA, 201 bp, Homo sapiens
gcccaggtctgtagtccttcctcctacaagatattttccagaccttttattgctgatcaattttcaataaagattagaatctgtgttttctaaagagtctytgtagaataagttgctcattctgaaattataaaagtcctactatcagaacatgattcttcatgtctgacctaaatacctccaactgcaatctcaagtaag

SEQ ID NO: 35881 - DNA, 201 bp, Homo sapiens
aggcaagaaatagaagagagaaagcaagtgctctgcagttttatttcaaaaattgaaaccagaccacaccagggcagtttgtggtctgaatgtatcaatggatctagtcatatttcatctgagcatttcttaggtatactaaaccacaaatatgaatctcattattgtgtctggatggaaatattttatggattaagattt

SEQ ID NO: 35882 - DNA, 201 bp, Homo sapiens
cccaacgatgcaacatttggtggtaccagtgtacgtctcttaaacacacagtgagaaatcctcactctactcacactctggtcattattaccctaaactcwttgccttggagtctcaatcagcaactataatggctttttagatggaaatttaagtcatttagcaacacacagaaaagtgttggggagaagtccaaaaaca

SEQ ID NO: 35883 - DNA, 201 bp, Homo sapiens
taggcaagaaatagaagagagaaagcaagtgctctgcagttttatttcaaaaattgaaaccagaccacaccagggcagtttgtggtctgaatgtatcaatggatctagtcatatttcatctgagcatttcttaggtatactaaaccacaaatatgaatctcattattgtgtctggatggaaatattttatggattaagatt

SEQ ID NO: 35884 - DNA, 201 bp, Homo sapiens
ggctaccctcagttccttgccacatgggcttctccaacaaggccatttacattaacaaagccaatgagaaagagagttaccgggcatggtcgctcacaccycttaatcccagcactttgggagcccgaggcgggtggatcacttgaggttaggagttcgagaccagcctggccaatatgctgaaaccccgtatctactaaa

SEQ ID NO: 35885 - DNA, 201 bp, Homo sapiens
ttgttgttgtttttgttttgttttgtttttgcagatattacagggacagttggtaaagtgtcaataagaatataattagaatgtggtaggtatgtggatasgaccttcttagttaaattcactagtgctttctcagtccttaggcccctgatcagtcatatagaatgcttcccagttcaattttccttgccacaattcctc

SEQ ID NO: 35886 - DNA, 201 bp, Homo sapiens
ttggtatctcaggacacttctatctctgaaagccggggcatcactacatattgatacccctactggagagaagattgcacggactggtaaatgatgttgtytttcctccttctcccaccattttctctccctctagaagccgaaccggaagttgacaaccttctggtttcagatgccaccccagacggtttccgtctgtcc

SEQ ID NO: 35887 - DNA, 201 bp, Homo sapiens; identical to SEQ ID NO: 4991

SEQ ID NO: 35888 - DNA, 201 bp, Homo sapiens; identical to SEQ ID NO: 4992

SEQ ID NO: 35889 - DNA, 201 bp, Homo sapiens
ttttaaaatagcacaaacgttagggctgtggcacaaaaataagatcagaactttctagaaaaaccttattactagcctcagagccaccaactaacacccamctgataggcagatctctacataataacctttagaaatgatgcagttagcttctgctgaaactatctaggactctctcctcaacagatacaaaaagcaggg

SEQ ID NO: 35890 - DNA, 201 bp, Homo sapiens
aatgcttttcattcaatttgggaaggaaaaacaattcctctcaattttccaccaaaaatgagctgctccatctgttataaaaaactgtgctgtacatgagrtttctagaaatagcttcaaaaagggctatgggaaaaagggccaactttttggtgatagggtttctgtgctgagccctaagcccatgccccactctacata

SEQ ID NO: 35891 - DNA, 201 bp, Homo sapiens
cataaaattccaaaaataagggggccaggttttattcctgtgttgcctggaatatcttcagatcaaacaagagcaaaaagggcctttgagacaggtgtggyctgtgtgcaagatgctcatatcttcctctgtagtccgcaaacttttgtttttagcagtacaactccttttgcaaatgaaatcttccaaggaaccctacta

SEQ ID NO: 35892 - DNA, 201 bp, Homo sapiens
catgaaataatattcttctttggatttatttcccgaccatgtaaaaaagtaagaaaaactgttgttagcttgctgactaccaaaataagcagctggccagwtgtgggcctcgggtaacagtttgcggacctctgttctcgatcaaacaaaatttgaaggagtgtatgctctgacaatatgaaacaagcaggaagaatgttc

SEQ ID NO: 35893 - DNA, 201 bp, Homo sapiens
gaatgatcactgagaaatggaagcatcccaaacgtatctgtcagcttgcttcatctccacagcagccacaggctgtctggcatcttaatggtctacttctrgaggattgatagtattctgctttgagccaggtgttgggaagttatatagtcagaggttggggctggtcttgactcatagctcctttgcttggccctccag

SEQ ID NO: 35894 - DNA, 201 bp, Homo sapiens
gaatcagcctgatggttttaattcacttctccagtgcttggagataactaaaagcttccctccctatatatgagttctggtggaacacagattatttactkctgagagtcttttgctagttggaaatggtgcttttctatctctaaatccctcaaggatatgggtagtgtggttcttgcatgtaagaaatgtttctttaaa

SEQ ID NO: 35895 - DNA, 201 bp, Homo sapiens
agccttcctctgacacagttttccgttgctcatctttattatgtgcctccatgggtttgaagctcggtagagactatcgcttcattttgcatatgactgcycccctttttaaataattattgcaactaaactttaatgcatacctgtacatcccagttgaatctagcaagagcatagctctgcattttaacctcagtcatt

SEQ ID NO: 35896 - DNA, 201 bp, Homo sapiens
tcagaccctgatggtccaagcaaccacaggtatttcctattatggcttcttcactcttcattgaatttcctctgaatagctttccaaaaatcacccgctayccacttttcaccctcctagttgctcccaatccttctcaaatttgatagagccatccaaatcaaagctttaaagctttaaaataactctcaccccaaatta

SEQ ID NO: 35897 - DNA, 201 bp, Homo sapiens
tttaattaggaaatctttttccctcagattagtacctatcaacgtgttgtagattacactttagaaaatgctgtttaaagttacacagctaagttaaagcmaagttaagggggttagacatatctctatttttcagatttttctgcagtttttcctgtcctgcctgtagatcataaagatatttcattaccagtagtttct

SEQ ID NO: 35898 - DNA, 201 bp, Homo sapiens
aacctgacttgctttggttgaatttctaaatcatcttttcatctgatcttgaataatctttttcaatcccacccattatcatctgcctgtggtcgttctamtcaaagtttgcctatgtcatgttcaaagaggtatgtgcatgccatttctggtgacttggtcagaaagatctacactctctttctctctagcaggatttta

SEQ ID NO: 35899 - DNA, 201 bp, Homo sapiens
tctcttgtgctttcttcttgacagccatgggctccccaaaggaagtcattttctcagacatcactgaaaattcggctactgtcagctggagggcacccacrgcccaagtggagagcttccggattacctatgtgcccattacaggaggtaggagactcggaaaggggagagagaggaggagtgttgtgggtttggatggat

SEQ ID NO: 35900 - DNA, 201 bp, Homo sapiens
gacattaacctagtttgtctatgacgacagcttaatcctgacattgcggcccatgcaacttgtgtccactctggcccatgcaacctgttcactgaacctgmggccatgcttactcggtggctaaactgaagagacaaccaggtttttaaaatatttcttcctttatgaaaaataagcctattcaattttggccaccaaata

SEQ ID NO: 35901 - DNA, 201 bp, Homo sapiens
gaaataaccctacttgcccccgaacgtaccagggacttaacaggtctcagagaggctactgaatacgaaattgaactctatggaataagcaaaggaaggcratcccagacagtcagtgctatagcaacaacaggtactgtaaataaacaggagagaacagagaaaagtcatgactcaggggtcttcttctcacagggctga

SEQ ID NO: 35902 - DNA, 201 bp, Homo sapiens
tttcaggctccagagacccatgtggtttctgaaactttccatgggcagggcaaaaacccaggcagccacagagtctgggggtggctaccaggccacagaaraaagctgtaggaggagatgtcttagatgagagaaaaatgcagaaagaggaagaaaaaaaaacccttgctgaatttctgtgggtttcagcatgtaataatc

SEQ ID NO: 35903 - DNA, 201 bp, Homo sapiens
ataaagagagggcaatcatatttactgaattctcactgcatgccagatgctgtgctgggagtttcacatttgttatctctgctaatcctcaaaacatcccygtgggtgggtaccacttttccctctggacagatggagaaactgaggttcacagaagtgaagggacctgcccaaggtcacccagcctctcagtggtatttg

SEQ ID NO: 35904 - DNA, 201 bp, Homo sapiens
aacttcttaatgatcttccaaggccttttcaaccaatatttggtgattgtaattctttccttttctaggaagccccccatgaacttcccagtgcaaagtgkcacataattatctcattcaggctggcattaataccagaccttgcttgtgtatgatattctagtttctgagatctctaggaacaaaaaatagctccttact

SEQ ID NO: 35905 - DNA, 201 bp, Homo sapiens
caggaatgctgttttgtctctataggaagtctgaccagctgatgtgcaagctcttcactagcccccaaattctaagaaatacaatttctgtgtttattaayaaacactgcagcacaaacttgactataatcaactttcttttcttaagtagaatttcctctagtaagggagtctataatcctaagccaagacaatgggtgc

SEQ ID NO: 35906 - DNA, 201 bp, Homo sapiens
actccatgttggggtatcttccaggctcattttacagtacgaaaaatgaaaggggtatttctactcctgtaaattttaaaatattgtagcaatttattaaytaatttttcaaaaaaaattccaaataaccttccaaagcacttttgggggtgggggacatatgtagaagatgctggtctgatattctcagacaaaagttct

SEQ ID NO: 35907 - DNA, 201 bp, Homo sapiens
ttgggaagctggagggggctaatggaagtacaatttaactccctatcctagcagagactaggaggcaggaaccttacttgtatgacaacatgtttttcccraggcagtgagcaatctcaaggacactgcaggccaggtaaaatagaaacagcacaggttaacccttgacagtcccaaggacaaacactggtcaaatggatt

SEQ ID NO: 35908 - DNA, 201 bp, Homo sapiens
tgctttgtgacttctctgtaaaggagaaaagtctgcaaaccaacctgattctaatcctggtggccagacatttttcagttatgcccttaagcctaaactcctttccctccaccttgtctcacatttccagcttctcttccactttagaaacaaccctgtcactatcattactctctttggcccttcatcatggaataaaag

SEQ ID NO: 35909 - DNA, 201 bp, Homo sapiens
tccgttgttacaaggtgacctatttaagggctgaagggctcagagaggttatataattgtcccagggacacacagctgacacatcacagagctggtattcragtctgcctaactcatctacatagagtttaaaataaagttggagaggccagaacacatctagtgttcaagatgaggtagataaagggatactctctcttt

SEQ ID NO: 35910 - DNA, 201 bp, Homo sapiens
caatgtggcgcaagcagggaagcctggttggaaagaacaccaggctggcagggaggagatacaagttctaaacttgatgaggtgagcaagcttggtcaagkcgttctgtcttactcacctctataaaataagaaagttggaccagatatgcccaaaataccctcccagtgctagggacacgtaactcaaagttcagagcag

SEQ ID NO: 35911 - DNA, 201 bp, Homo sapiens
gttggaaagaacaccaggctggcagggaggagatacaagttctaaacttgatgaggtgagcaagcttggtcaagtcgttctgtcttactcacctctataawataagaaagttggaccagatatgcccaaaataccctcccagtgctagggacacgtaactcaaagttcagagcagggagtgaggctcagactgcactttcc

SEQ ID NO: 35912 - DNA, 201 bp, Homo sapiens
aagaccaaagctccatgcaaactcaggcgactcttgactcaggtgaaaaactgggtcagattcagccagttcctttgaaagtttccacaacccagaccaayagagagataggcaagaggcagctgtgatataccaaatggtcaaattgaaacagaactcatttagtttgaatgactaaatagcaatgatcagtgaacacct

SEQ ID NO: 35913 - DNA, 201 bp, Homo sapiens
gttctagtaaatttacctcctcacccaccagtgatttctgcagctcctctttgatctagatccaagttgctgctgagtttaggactgtattcaactaggcrgtcaagctcaggcttaagtaaaaggaggctattgacatggactcttgttaggttttgttccccaggagcgcaacaaaataggaactactgtttaatgagt

SEQ ID NO: 35914 - DNA, 201 bp, Homo sapiens
aatctttttcaatcccacccattatcatctgcctgtggtcgttctaatcaaagtttgcctatgtcatgttcaaagaggtatgtgcatgccatttctggtgmcttggtcagaaagatctacactctctttctctctagcaggattttaaaaaataaaggtgccctgagcatgctgagaatagactctgaatcacaacccaag

SEQ ID NO: 35915 - DNA, 201 bp, Homo sapiens
catctgcctgtggtcgttctaatcaaagtttgcctatgtcatgttcaaagaggtatgtgcatgccatttctggtgacttggtcagaaagatctacactctytttctctctagcaggattttaaaaaataaaggtgccctgagcatgctgagaatagactctgaatcacaacccaagaattgcatgagaggacccagtagtc

SEQ ID NO: 35916 - DNA, 201 bp, Homo sapiens
gctcttctttcaagccatcatcttgtccaaatcttggtgcatgtggtgaatattcagagcattaaattttgaaaatgtttctttttcctggaagcagctascatgtccatgagtcatttcagaaggtttaaagtggtgggagaaaaatgcccctcattttgcatggaacattgaccataccctaactaccactatctttct

SEQ ID NO: 35917 - DNA, 201 bp, Homo sapiens
ggcagataaatttcaagtttaattaagccctacccattcactcaacttgacttcttgaacatttgccaatgttcaatttggcaaatgctgccaaatggtgrcagcaaaaacttcaatggcaaaggctgcacatggtgtcagtttactaaattctagcccaaaaagcctcagaaaatatttagaagtctctttcttttcatt

SEQ ID NO: 35918 - DNA, 201 bp, Homo sapiens
gtttttaagagaactttggatgtgttttaatgtaagattaaaaaatgagtattttttcctatccagttacctaatgtgaattaaatcattcagatgagtcytcaaatgcagaacatggtaatttcttaagggactgagacaaggaggaacgagatgagattctcactcctcaggaggggagaaatggccacagatcccatc

SEQ ID NO: 35919 - DNA, 201 bp, Homo sapiens
aagcccttgattgcctaattagcctgaatgccctcactttcattggaattcactgctttgatggtgtggaggtgcaaagaggccagctatcaaagagagaygccacttatctaaacaaaatccaggaacagaattcgagacccttgtctctcagacgaagattgtttgcccagtataagagatttcatcctcgcttttgat

SEQ ID NO: 35920 - DNA, 201 bp, Homo sapiens
ctttgatggtgtggaggtgcaaagaggccagctatcaaagagagacgccacttatctaaacaaaatccaggaacagaattcgagacccttgtctctcagaygaagattgtttgcccagtataagagatttcatcctcgcttttgatagaattatgattcttgggaaatctttacgtggaaaaaactgcctcagaataaaca

SEQ ID NO: 35921 - DNA, 201 bp, Homo sapiens
agccacagcaaaatttaaatctctatttacaaaatgaaggtattcattcccttattcattcagtcaccaaacacttctttttaaaacatttttctttatgwctcatggattagaccctaggcattagtgaattaatgcaagagcatttatctctttgtaagtttccatttagctgtaatggaaaagaagtgtctaaactag

SEQ ID NO: 35922 - DNA, 201 bp, Homo sapiens
aataagtggcaagaaatcacccatgtaaaaataataatcagtatttgtaggcttggagaaaatgctagaatccaggcagcaacctagtaagagggaaaaaycctgtttcttattaacagggacaccctatcctgggatgcaggtctcagtctcctcctccctgtggctgcccataaaacgactccagatcagaggcagagc

SEQ ID NO: 35923 - DNA, 201 bp, Homo sapiens
tttggatgtgttttaatgtaagattaaaaaatgagtattttttcctatccagttacctaatgtgaattaaatcattcagatgagtcttcaaatgcagaacrtggtaatttcttaagggactgagacaaggaggaacgagatgagattctcactcctcaggaggggagaaatggccacagatcccatcaggccattgcttgt

SEQ ID NO: 35924 - DNA, 201 bp, Homo sapiens; identical to SEQ ID NO: 4983

SEQ ID NO: 35925 - DNA, 201 bp, Homo sapiens
agttggctgcaccggccacagcctgcctactgtcacccgcctctcccgcgcgcagatacacgcccccgcctccgtgggcacaaaggcagcgctgctggggractcgggggaacgcgcacgtgggaaccgccgcagctccacactccaggtacttcttccaaggacctaggtctctcgcccatcggaaaggtaagtctgttt

SEQ ID NO: 35926 - DNA, 201 bp, Homo sapiens
ccacaggccagtgggtgggagtgcagcttccaagaaacaccacttcctatgtcctgagaggcctggaaccaggacaggagtacaatgtcctcctgacagcygagaaaggcagacacaagagcaagcccgcacgtgtgaaggcatccactggtgagtctgccctgagcttcctccaaactctaggttgattctgaggttagc

SEQ ID NO: 35927 - DNA, 201 bp, Homo sapiens
tccgtgtatttgccatcctggagaacaagaagagcattcctgtcagcgccagggtggccacgtgtgagtgagcagaactcttttgggcagcctcacctgaygtcagcccacccagtgtataaccctccctcgccacggcccctacaatcctatagttgttctttacagttataccaaataagagcctagaattaagtccat

SEQ ID NO: 35928 - DNA, 201 bp, Homo sapiens
gagtagaggcaaaactttaaccctggcagtcctggcaggtttatgttctaaaccactctattacttttcagtggagatcactgactatttttctttaagtrgaaacattctggtttatgagtttagcatcagtataattaccttcatatctaaaaagcaagctctggctagaaattgacccttttttccttaataataaca

SEQ ID NO: 35929 - DNA, 201 bp, Homo sapiens
agcaaatcttatcatttcttagtgggttataaccatgagctattaattttgacacaaaaaaaaacttacctcctccctttatttcagcttgtgaggatatstcactaattgacttcattaatttgattcaaactgtgcactagaagtgggatagaaacacatgaagtataccggaaagaaattatactcgaaaaaaaaaaa

SEQ ID NO: 35930 - DNA, 201 bp, Homo sapiens
aacttgttctgcatgccacgaaccaggcccagcagtctacacactggagtggagtatatcactcactcctcaatgcattcccaagaagtagacatatttaycttctttttccaagtgaagaaactcaggcttagagcattgtgtgcaattgctcaagttcacattgatagtagagcttagattctaaccccaagtctgtct

SEQ ID NO: 35931 - DNA, 201 bp, Homo sapiens
atcatcgtcccttgtgatcaacctggctggtccccagctacatttcagccttctcaaaagaaatataccaatgagtatatttccaaaacgtatttaaaacytttgccatctcaaaatctcaaccatgatcttaacaaacttacccagtgggctcgtcattggaaaaccaaatgtgaacttattttatcggtaatcactaat

SEQ ID NO: 35932 - DNA, 201 bp, Homo sapiens
ccatgatcttaacaaacttacccagtgggctcgtcattggaaaaccaaatgtgaacttattttatcggtaatcactaatatcagagagactctgcaacacrgactaaatccataattttctcaagactaatgattcctacagaaattaacaacggaatagtcaaacatctgtgtttcccaaagtctttctagagattacta

SEQ ID NO: 35933 - DNA, 201 bp, Homo sapiens; identical to SEQ ID NO: 5002

SEQ ID NO: 35934 - DNA, 201 bp, Homo sapiens
agataatggagaagcagcacgtctatctatacacattaatatttataaaatgctacatgtgaataatcagtacggtgatcagcaaggataaaggagagagstggcaagattaacatgctactgtttatgaagctctctaactttgatactcataacaactctgaaaggcacctagagtgtccttggagtttaattaccttt

SEQ ID NO: 35935 - DNA, 201 bp, Homo sapiens
agatgcctaatttctatcttcacctcatcaagtttataaatttccccttttgttttttttttttaatcctttctcctctcctctcttcctccctcataccrttgtaaactcttctctgtaatgtcctatccctcttcctcctgagaaggccctgctgtagctcctcctctcactcacaaggtacctctccatagcacaagc

SEQ ID NO: 35936 - DNA, 201 bp, Homo sapiens
cagatcaccacattctccatcctaaaggcttggctcagacacaaattctaggcactgagttttcctaaataaggaattcaggaagaaccattgatgaacargacagttaactgtttctgggcttctcttgtgctttcttcttgacagccatgggctccccaaaggaagtcattttctcagacatcactgaaaattcggcta

SEQ ID NO: 35937 - DNA, 201 bp, Homo sapiens
ttctgggcttctcttgtgctttcttcttgacagccatgggctccccaaaggaagtcattttctcagacatcactgaaaattcggctactgtcagctggagrgcacccacagcccaagtggagagcttccggattacctatgtgcccattacaggaggtaggagactcggaaaggggagagagaggaggagtgttgtgggtt

SEQ ID NO: 35938 - DNA, 201 bp, Homo sapiens
cagccatgggctccccaaaggaagtcattttctcagacatcactgaaaattcggctactgtcagctggagggcacccacagcccaagtggagagcttccgrattacctatgtgcccattacaggaggtaggagactcggaaaggggagagagaggaggagtgttgtgggtttggatggattcatgaaaaagaccctgataa

SEQ ID NO: 35939 - DNA, 201 bp, Homo sapiens
aaaaatccagatacagtggtttaaaataacaattctttgcatgttggtgatttgggtttgggctcagctgagcagcttatctgttcttgactgcactcctmatgtatctgtgtgcttaaggggtggattggcctaggatggcctcagccaggatggtgtctttctgtttcgcagagcctctcattctccaggatgctggtc

SEQ ID NO: 35940 - DNA, 201 bp, Homo sapiens
atcatacagcaacagagtcatgatttttaaaatagcacaaacgttagggctgtggcacaaaaataagatcagaactttctagaaaaaccttattactagcytcagagccaccaactaacacccaactgataggcagatctctacataataacctttagaaatgatgcagttagcttctgctgaaactatctaggactctct

SEQ ID NO: 35941 - DNA, 201 bp, Homo sapiens
ctctctggacttgctcccagcatccggaccaaaaccatcagtgccacagccacgacaggtacatgtgcattctcccatttctaacgcactctctccacagwcttctttgcagggtgaagcctctccttctcctctcccattgatgtacaagccacagggcactaactcttccatggtgctaggctggggtgctgtttaaca

SEQ ID NO: 35942 - DNA, 201 bp, Homo sapiens
tatttctttaagctccagatccaacagctgaaaaatgggtttatagtattctccttgtggggtcgtcataagactcaagacataaataacaaagcaccatstttgcacctgataaatacagagcattgttagtttctgctattcaagggtcccaaatctagggggatatcagtgtccttgacggaaacccaacttctttaa

SEQ ID NO: 35943 - DNA, 201 bp, Homo sapiens
ttcacatttgttatctctgctaatcctcaaaacatccctgtgggtgggtaccacttttccctctggacagatggagaaactgaggttcacagaagtgaagrgacctgcccaaggtcacccagcctctcagtggtatttggacaatgaagctctttcaggctccagagacccatgtggtttctgaaactttccatgggcagg

SEQ ID NO: 35944 - DNA, 201 bp, Homo sapiens
agacgtgccaggagaccgtaccaccatcgatctcacagaggacgagaaccagtactccatcgggaacctgaagcctgacactgagtacgaggtgtccctcrtctcccgcagaggtgacatgtcaagcaacccagccaaagagaccttcacaacaggtaaaaggcctccccctgttaacagatatagtaaaggaaagattga

SEQ ID NO: 35945 - DNA, 201 bp, Homo sapiens; identical to SEQ ID NO: 4977

SEQ ID NO: 35946 - DNA, 201 bp, Homo sapiens
tgggactgatgtgtcaacacctagacttcaaaaacagactctgcagttttctcacaatctgctgtaaattattgttccttttcattccctgtataaagccmacttcctgtcacttgttattgtttactgaaccaatgctgaaaacacatttaaaaaaaaaaaaaggagaagaagaagaaagaaagattcaaagattcactg

SEQ ID NO: 35947 - DNA, 201 bp, Homo sapiens
gggtaccacttttccctctggacagatggagaaactgaggttcacagaagtgaagggacctgcccaaggtcacccagcctctcagtggtatttggacaatkaagctctttcaggctccagagacccatgtggtttctgaaactttccatgggcagggcaaaaacccaggcagccacagagtctgggggtggctaccaggcc

SEQ ID NO: 35948 - DNA, 201 bp, Homo sapiens
actttcttgcgtgaattctttctatcaaaaataagtttccatacactgtcaagacagtctattgcctcacttttctgcttggtaattctgatggaaaagtyttcaggaaacatccaggaagttttgcctaattaaaaatttaaagagactaagttcatcttttcaaataaagtatccccaaagcatgtttcctcaacttat

SEQ ID NO: 35949 - DNA, 201 bp, Homo sapiens
aaacccaggcagccacagagtctgggggtggctaccaggccacagaagaaagctgtaggaggagatgtcttagatgagagaaaaatgcagaaagaggaagraaaaaaaacccttgctgaatttctgtgggtttcagcatgtaataatccctgtgggttggagaggggaaaagatgaggaagtgagttccctagagcctgaa

SEQ ID NO: 35950 - DNA, 201 bp, Homo sapiens
cctcactctaaggagtgtctttcctgctgtaaactcttcccattcgctcttctccctgccacatttggtacaggatgataaaaatgcatgggtaggttgawaaggccagtaatgttcatgtggctcccaactgaaacctcaagggagtctggtaggtcatttaaaataaaaataaaaatacatctccagcctctacatgtt

SEQ ID NO: 35951 - DNA, 201 bp, Homo sapiens; identical to SEQ ID NO: 4984

SEQ ID NO: 35952 - DNA, 201 bp, Homo sapiens
ctccttattccacagttggactcctgtaccccttccccaaggactgctcccaagcaatgctgaatggagacacgacctctggcctctacaccatttatctraatggtgataaggctcaggcgctggaagtcttctgtgacatgacctctgatgggggtggatggattgtgagtaccaccagggactgcagagccctcaggc

SEQ ID NO: 35953 - DNA, 201 bp, Homo sapiens
gcttggtggagaacactggctatgacgtcagtgtggcaggaaccaccttggctggggatcccaccagacccctcactgcctttgtcattacaggtactcartcagaggttctcacttgtctaacacagagagaaaaggagataagtcatcttaaaggaaaattcaacaaaaatacaatcttcactgcaaatgtgtactctc

SEQ ID NO: 35954 - DNA, 201 bp, Homo sapiens
ggctgttttatccctagtttagagattctgcctaaaaagtgactcctaagttagtaaaggcctaagatcgaaatcctgttcataaatcatgctaggtaacrcagttcatatatgtgccaaaagtataaccatctttttctttaaaaaataattattcttaaaactgacaacacagatgcagctagatgcagctaatttgaa

SEQ ID NO: 35955 - DNA, 201 bp, Homo sapiens
gtttagagattctgcctaaaaagtgactcctaagttagtaaaggcctaagatcgaaatcctgttcataaatcatgctaggtaacgcagttcatatatgtgmcaaaagtataaccatctttttctttaaaaaataattattcttaaaactgacaacacagatgcagctagatgcagctaatttgaaattcctgtctcctttt

SEQ ID NO: 35956 - DNA, 201 bp, Homo sapiens
tataaccatctttttctttaaaaaataattattcttaaaactgacaacacagatgcagctagatgcagctaatttgaaattcctgtctcctttttttcttytgattaaaaaaaaaatgcatttaccagtactgtcagaaaaaaaaaaaaaagaaaaaaaagaaaaaagaaaaatcacctagaaaagagacgctgaaccttc

SEQ ID NO: 35957 - DNA, 201 bp, Homo sapiens
aaaggctgcacatggtgtcagtttactaaattctagcccaaaaagcctcagaaaatatttagaagtctctttcttttcattagtgataattttcagaagayggactttgccatctgattttcacattaaaccaggtctctcccagggtctaaattgccatcactaagacatgtcaattagtacaattaaatatttaattat

SEQ ID NO: 35958 - DNA, 201 bp, Homo sapiens
aggtaagttgaccaacttgtccccgcttgcctggtactgtctcagttttagcaccagaagttccacacctaggaaatcccgcagtccctggcaaaccaggrtggttggtcacctgtgaataggaaataaacacatgcccccaagcaatgtgatcagtattgctttccaccactggacatgacccagcaggcctgagagata

SEQ ID NO: 35959 - DNA, 201 bp, Homo sapiens
taaattataaaagggcatgtgaaaaagtgacaaagagaggagagcatgcatcaggacaaattaagcatgggcagcaggcttggggatgtcccctccgaccrtcctctacctcggtctcagtggcaaagcgattccagccagtaccatgtgggaaaaaaatctcctgacccccagttccccttccttctgatttggggcctg

SEQ ID NO: 35960 - DNA, 201 bp, Homo sapiens
caaccaccttatttatacagaggaagttcttgccaaaggtcacgtagttcagtggtagggaaaggacttgaacccagtcttcttgatacccagcccgaatwtctgccctacatttgctgatcttatccgatattaatcatcctgtcttctccagacctcgattctccaagagacttgactgctactgaggttcagtcggaa

SEQ ID NO: 35961 - DNA, 201 bp, Homo sapiens
aacccagtcttcttgatacccagcccgaatttctgccctacatttgctgatcttatccgatattaatcatcctgtcttctccagacctcgattctccaagrgacttgactgctactgaggttcagtcggaaactgccctccttacctggcgacccccccgggcatcagtcaccggttacctgctggtctatgaatcagtgg

SEQ ID NO: 35962 - DNA, 201 bp, Homo sapiens
ctgttaataccatttttatccagtgtttatattatttatattcgctacccaagaattttctttcttttaccttttaatttgaaataactttagatcttcaracaagcgaaggagatttcctaaactttaccttccaaacttgttattgaatttttcattttggttatctcactttatatttccaagatcttttgcttgttc

SEQ ID NO: 35963 - DNA, 201 bp, Homo sapiens
cctcatgcctttgccatgtggatggtgaatgatgcaggtgttgccctttctgatctccagccccccagcctttcatactttacctggctgattctacatcktttttgaatgatgaatttttgtttcaggaatcagcctgatggttttaattcacttctccagtgcttggagataactaaaagcttccctccctatatatga

SEQ ID NO: 35964 - DNA, 201 bp, Homo sapiens
tgaaactcaattctcccattgaagaaaacaggataaggtaccttcccagttcccaggatgcaggagaaccttccaggggcttctgcactgatgcatgactkcccaaactaagctggctgtttgcaggttgtagagaagatcgttgtgcttggtttactaggagtgtaggttgaattccaatcccagacactaaggtcattt

SEQ ID NO: 35965 - DNA, 201 bp, Homo sapiens
agtctacagcagtgctctcatccttaccagatgcggtctctccctccttatattattttaacttgctctgcaccttctggcccaaggacctttgcttgtgytgtactctccccatctctgatatctcagcagtgcacatggagcctggtagagagtgggtactcaatgaattcttgtccagtaagtaagtgaatggatggg

SEQ ID NO: 35966 - DNA, 201 bp, Homo sapiens
accaccagggactgcagagccctcaggcctaggggaagagggagagggcaaagcaggggaggagaagagggtgatctcctcctgatgcactctgacacccmcatgtgtgaggccttgcaagatagtgcctgtcacacagaggcactcaggaattctctcttaaacaaaagaatgggaaacacgctggctactttttgaaac

SEQ ID NO: 35967 - DNA, 201 bp, Homo sapiens; identical to SEQ ID NO: 5010

SEQ ID NO: 35968 - DNA, 201 bp, Homo sapiens
ttctctcttaaacaaaagaatgggaaacacgctggctactttttgaaacggggagataagtttcttgtagtttatctcatccaatcctcatcaaacaactstgtgatgtataaatgacagttgatcattgaacccattgcttacattaattagcactgactaagcatttattatctaccaggcactgtgctaagagtttaa

SEQ ID NO: 35969 - DNA, 201 bp, Homo sapiens
attggagtttctgctgtgaaggaagacaaggagagcaatccagcgaccatcaacgcagccacaggtggggcacacctggaattcccatcccactgagctgstgctgggcagatgagacagagtcaatgtggccaaaacctatttaaagagaaaaagtagaagcctggaggaaaaagggccctgtagtaccatctagcccca

SEQ ID NO: 35970 - DNA, 201 bp, Homo sapiens
ctgcccatatctcagggctaccccctagtactgattttattgtctacctctctggacttgctcccagcatccggaccaaaaccatcagtgccacagccacracaggtacatgtgcattctcccatttctaacgcactctctccacagtcttctttgcagggtgaagcctctccttctcctctcccattgatgtacaagcca

SEQ ID NO: 35971 - DNA, 201 bp, Homo sapiens
ttgagcttccacattatgcgggatgcaaggccggacatttacatgccaattctttttttttaatcttttgattttgagataattgtagattcacatgcaaytgtgagaaagcatacagacagatcccctgtgcccatcacccaggttcccccaagggtagcgtcttgcataaatgtagactaatataacaactgagaaatt

SEQ ID NO: 35972 - DNA, 201 bp, Homo sapiens
aacggggtagggagggcttcgtgtaggaggagactgcggaactgggccttgaaggatgagttgggaattgaaaggcaggaaaggaggccgaggacatgagygggctgcacagctgggaggcggcaagagagaagggtagctgtagaggggagtgggagaaaagtcagagagaaaacggggagcagaagttatcgggctata

SEQ ID NO: 35973 - DNA, 201 bp, Homo sapiens
tgagagaggtagaagaacagccaaaggaatagttgtaattatactactttatgtttgcctaaagtaagggcttttcagttgaggaatcatagactcctagmgagttcaaggatatacctccaggatttgtcatcccagtaatatttttttatagaattatgtgtgcatttctctgggaaagagggcactaaccttgatctg

SEQ ID NO: 35974 - DNA, 201 bp, Homo sapiens
ctggacctctccatgtccgcccagagcctcggggaagaggccactgtggtaaggatcgtacagtgcccaaaggttgaggtcatggtgggagcagctcctgrccttctcagagtgtggggctcctgctcagcaaacccatgggagcctgaggcacggggatctctgaccaaatactcacttgggggtggagtttgccaaggc

SEQ ID NO: 35975 - DNA, 201 bp, Homo sapiens
tacgatctcctgtgtctgacatcccttggggatcaggccttcatgatagtaggcttggtgcaattccataaatagtagaagggatttgttatctatttggrtgacttattaagtaaaaagacgtgaaaaaacaaaatcatgtatatgtaagttccaccattcgaatccttaattgactaagttataacaagaaccaatcat

SEQ ID NO: 35976 - DNA, 201 bp, Homo sapiens
tccgagtccactggccctctatccactagacatttgccacctgtgtgtgggtgttcaagtcctatgttggaactgaacatttgcttgcaacgacctgaagractgtataattttactggggcttgtaaaaacacccttaattctgccaagagcttggcagatttggaggagttgtcgggggtagggtgagcagaggatgag

SEQ ID NO: 35977 - DNA, 201 bp, Homo sapiens
cccttggggatcaggccttcatgatagtaggcttggtgcaattccataaatagtagaagggatttgttatctatttggatgacttattaagtaaaaagacrtgaaaaaacaaaatcatgtatatgtaagttccaccattcgaatccttaattgactaagttataacaagaaccaatcatattacttatatatttatatata

SEQ ID NO: 35978 - DNA, 201 bp, Homo sapiens
gggatccaaatccgagtccactggccctctatccactagacatttgccacctgtgtgtgggtgttcaagtcctatgttggaactgaacatttgcttgcaaygacctgaaggactgtataattttactggggcttgtaaaaacacccttaattctgccaagagcttggcagatttggaggagttgtcgggggtagggtgagc

SEQ ID NO: 35979 - DNA, 201 bp, Homo sapiens
ggtgaagagacttacttgaggtcacaaattctattaggaggcatggctgggatccaaatccgagtccactggccctctatccactagacatttgccacctrtgtgtgggtgttcaagtcctatgttggaactgaacatttgcttgcaacgacctgaaggactgtataattttactggggcttgtaaaaacacccttaattc

SEQ ID NO: 35980 - DNA, 201 bp, Homo sapiens
attccataaatagtagaagggatttgttatctatttggatgacttattaagtaaaaagacgtgaaaaaacaaaatcatgtatatgtaagttccaccattcraatccttaattgactaagttataacaagaaccaatcatattacttatatatttatatatatatatatatatattttttttttttgctggatgaggggtgg

SEQ ID NO: 35981 - DNA, 201 bp, Homo sapiens
gccgagtggatggaaccacaggtgcccacacagccatgagggaggagtaggactacaggaggtggaggcatattacagggtgagtgcaaggtggagaaaawctgttgtccacagcaacactacattagggctgccgggatgccttgctgcattgagcaaggattgcttctcacataatgtatagcaattcagtttacaaaa

SEQ ID NO: 35982 - DNA, 201 bp, Homo sapiens
taaaaagacgtgaaaaaacaaaatcatgtatatgtaagttccaccattcgaatccttaattgactaagttataacaagaaccaatcatattacttatatatttatatatatatatatatatattttttttttttgctggatgaggggtggacggggtctcactctgtcacccaaactggagtacagtggtgagatcacggc

SEQ ID NO: 35983 - DNA, 201 bp, Homo sapiens
ggtagctctttctggaaccaaatggttgtagaggtgaagggaaggtcccaagagaaggagatgaggacactggtcctacaaaggaagaaggtgccgagtgkatggaaccacaggtgcccacacagccatgagggaggagtaggactacaggaggtggaggcatattacagggtgagtgcaaggtggagaaaaactgttgtc

SEQ ID NO: 35984 - DNA, 201 bp, Homo sapiens
aaacaaaatcatgtatatgtaagttccaccattcgaatccttaattgactaagttataacaagaaccaatcatattacttatatatttatatatatatatatatatattttttttttttgctggatgaggggtggacggggtctcactctgtcacccaaactggagtacagtggtgagatcacggctcactgcagcctcaa

SEQ ID NO: 35985 - DNA, 201 bp, Homo sapiens
aacttacagcttccactgtcagctagaaatcttgaacttcttttactattttagtttgaaaagtcctgggatggggaagtcctagagaagggtcctgatgrgcctgacttgggtgaggtacccaatcttggacaaatcacctatgaccaggaggtcggatcacatgagaacatggtagctctttctggaaccaaatggttg

SEQ ID NO: 35986 - DNA, 201 bp, Homo sapiens
acaaaatcatgtatatgtaagttccaccattcgaatccttaattgactaagttataacaagaaccaatcatattacttatatatttatatatatatatatatatattttttttttttgctggatgaggggtggacggggtctcactctgtcacccaaactggagtacagtggtgagatcacggctcactgcagcctcaacc

SEQ ID NO: 35987 - DNA, 201 bp, Homo sapiens
ggcaaaattaaagaaaatctctatgtaatgagcatgtatcagatgccaggcattttgctaatcactttgctatggtattttattgaaacctcacaacaacrctttaaaaaaagcattaacatccccattgtacaggtaaggaaagtgaggcccagagacatttaggaacctttccaaggtcacacagctaataagtgacac

SEQ ID NO: 35988 - DNA, 201 bp, Homo sapiens
aaaatcatgtatatgtaagttccaccattcgaatccttaattgactaagttataacaagaaccaatcatattacttatatatttatatatatatatatatatattttttttttttgctggatgaggggtggacggggtctcactctgtcacccaaactggagtacagtggtgagatcacggctcactgcagcctcaacctc

SEQ ID NO: 35989 - DNA, 201 bp, Homo sapiens
aatcatgtatatgtaagttccaccattcgaatccttaattgactaagttataacaagaaccaatcatattacttatatatttatatatatatatatatatattttttttttttgctggatgaggggtggacggggtctcactctgtcacccaaactggagtacagtggtgagatcacggctcactgcagcctcaacctccc

SEQ ID NO: 35990 - DNA, 201 bp, Homo sapiens
atacaatttgcacatcataaaattcacccacctaaagtgtctaatccagtagtttttaatatattcatgaagttatgcagtcatcaccactgtctaattckagaccattttcatcacaccaaaaagaaatttcataccaattagcagttgttctcttttctctctttccctctcctccaccagatctgggcaaccatgaat

SEQ ID NO: 35991 - DNA, 201 bp, Homo sapiens
cggctcactgcagcctcaacctccctgagctcaggtaatcctctcatctcagcctccagagtagctgggactacagatgcacactaccacacctggctaatttttttttttttttttttgtagagacagggtttttgttacattgcccaggctggccttgaactcatgggccaccaaggtgattctcccaccttggcctcc

SEQ ID NO: 35992 - DNA, 201 bp, Homo sapiens
acatgagcatcatccagcacagcagccccaaacaaggcaagtccggatgcacatgcctacgtagtggccttttattgggtgattactatgtgtccagccgrggccatgtatgtaacatacagaatctcatttaaccttcccctcaaccctttaagaaagggtgagaaccaccctcattttacagacaagaggaggaaattg

SEQ ID NO: 35993 - DNA, 201 bp, Homo sapiens; identical to SEQ ID NO: 5123

SEQ ID NO: 35994 - DNA, 201 bp, Homo sapiens; identical to SEQ ID NO: 5124

SEQ ID NO: 35995 - DNA, 201 bp, Homo sapiens
tgcatgcagcagagctgtggatgcagcagaatagaactagactctgttagcactggaaggacccaaagtcctgtacatctctttctgtacagaggtgtacrgaaaactgccctttgtgtacaaactgagcaaaccaaggcccagataggggaagacactgactgaagggtgtatgggccggactggggtaacagcatgagt

SEQ ID NO: 35996 - DNA, 201 bp, Homo sapiens
cagactgtggggacacccaggagcctgtttttaatgaaaacagcaagcagcagcagagtcactaaatacagcagagcttcagccgtctccttgcctggtcrggctactttgtaaacgtatctctaatagaagaaatcagggagatggaaattaggcagtggctggagattacagaccttgggcagcagggctgtgcatgca

SEQ ID NO: 35997 - DNA, 201 bp, Homo sapiens
ctgggaatcaaacaccagacataggtgcctgggcagtctttcccatccctggatttatgaaaccatagatgtgaaagtccttgagagaaagaagctacagwaatgcaggtggctggagaaggctaggcagtctgttctcaccagccacaggcatgttgatgggagcccagagacatggtctcttgtgatgcctttgttttc

SEQ ID NO: 35998 - DNA, 201 bp, Homo sapiens
gagtcattcagtgaaaataactgggctgggctggggcagatggcacagaggaaagcattcctggcaggggtgggagtccctgggacagcatggggcacgcyggggctgtgtcaggcatgtcagggagtagggagtgcagctgggtcctgaccacagagggcctcttgagccaggtggcagcagcctggtcagccctggccc

SEQ ID NO: 35999 - DNA, 201 bp, Homo sapiens
tgaactcagcaccttccctgcccactcttgtctgcccctagcttcagtgaatggtgttgccatctacctggtcacctggagcgagaaatggaatcttctcyaactcctccttccctccctttcctggtatgattggtcagtgccaagatggcccagtctgacctccacatctctcacttttgtctccccactgagctggac

SEQ ID NO: 36000 - DNA, 201 bp, Homo sapiens
tccagagatgctgctgacttgttgtaggccctgggcctccttgtcatcatctataaaaggaaaaaaggtgaagaacaactctggtttttaactctggtcaygcattagagatggctgggaagcttaaaacaatgcaggtgtctgagtccagtgctagaccaagtaactgagacactggggctggggctttgggcttgcagg

SEQ ID NO: 36001 - DNA, 201 bp, Homo sapiens
ttgcctaatttcctattttatatcttctttcattatcagaagtgtttggttcaacatctggattataggcctccataaaaccaaatagatggctgggtacrgtggctcactcctgtaatcccagcactttggtaagcctaggtgggtggatcacctgaggtcaggagtttgagaccagcctggtcaacatggcgaaacccc

SEQ ID NO: 36002 - DNA, 201 bp, Homo sapiens
cgatggctcttgttatatttgctcagtgctccagctgtgaaagcacagtcaggaccccagtcttgtgagtcacagagtcctccagggagctcacttctgaygcatgggaaaggcaatcctaacttccagtggcctggacctcctccctcctgggaatgctccctgtggctgagacatggaagtggttttgaaagcactgag

SEQ ID NO: 36003 - DNA, 201 bp, Homo sapiens
ttcaagcaaagtggaatatacctgtaaagcgtggcctctctctccctccctgcagagactgcttcccagggtcacctggacctcacgcagctcatcggtgwcccgctgccctcgtccgtatcctttgtcacaggctatggtggcttcccggcctacagtttcgggcctggtgccaatgttggccgcccagccaggactctc

SEQ ID NO: 36004 - DNA, 201 bp, Homo sapiens
aagaaggtgattttccatttttttttaacatgtatgtgtttggtggcaggtgttaaaggagagaaaggatcctggggtcttcctggctcaaagggagaaaraggcgaccagggagcccagggaccaccaggtattccagctcttgttctcaatcttgcctttgattttttgctcctgagaacaaatgcgactgagaaatgt

SEQ ID NO: 36005 - DNA, 201 bp, Homo sapiens
aggtatctgagtgagattgggcgctggaatttgctaaacgtttcagattggctgaaaatagctattaacttttctcttctttgagatacaattcacatgcyataaaattcacccctttaaattgtacaattcagtgatttttggtgggctcataaggttgtacaacctcatgaaccactctgtaattctagaacattttca

SEQ ID NO: 36006 - DNA, 201 bp, Homo sapiens
tgtttgagtggactttgctaaatgagcttagtttgaaaacctgtctcagaaaggttttatatagaaagaaggtgattttccatttttttttaacatgtatrtgtttggtggcaggtgttaaaggagagaaaggatcctggggtcttcctggctcaaagggagaaaaaggcgaccagggagcccagggaccaccaggtattc

SEQ ID NO: 36007 - DNA, 201 bp, Homo sapiens
ttctctaagatgccccgcactggtttagtggctcggattccttggttctaggcctggtcacaggagctttgccaagtcccctccattctctggacttagawactcaaagtgagtattccgcaaagtgaggaaaaggctggctcatcacggagatagggtggctggattggaagccatggctgatgcgccccatttctaaga

SEQ ID NO: 36008 - DNA, 201 bp, Homo sapiens
tggtgctggtgggattacttgtgacaactactggcattcattagaattctttatgattgatgataaatatgatgtgttaagacaggcatacaatcacgctwgtctagagtccattaagctcattcattcatgcacatgtgtattatttgtacattcattcgttcattcattcatcaaatgctcaatttatgcctacttcag

SEQ ID NO: 36009 - DNA, 201 bp, Homo sapiens
atacatacccattcatgggaagtttgagttcctggaccacctggagtcttgactccatccttcttgctgctgaagggtcattgatatagtaggcagactargtggagccccacccgcaaccccggtacagactcccccatctcagtgaggctgcagcagtgaatcagccagaaatcacaccagccatggctcgaaaatgtc

SEQ ID NO: 36010 - DNA, 201 bp, Homo sapiens
acatctccttgaggaagatggttttcctttgcccagtgcagggcgcagactaggtggtcaggaaggtctaactggatgctgtaggggtggggatggcagcygagccaaggctgtggggctgtgcacctctctttggtttggtcacacatgtgcctattctgctcatcttagctgagcctcctagttggcaacaagcactct

SEQ ID NO: 36011 - DNA, 201 bp, Homo sapiens
taagtcacacgctgggggcacagcacccaagatacaggtggaagttgggatgctttgtggcgctgtgaatggggttgaacacacttctctccgggagtcakctgatacctcagacatttttcagagtgtggtttttgtgtaacttctcttttctgttttgtcttagctgtggcccttccaggtccccctggccctccagga

SEQ ID NO: 36012 - DNA, 201 bp, Homo sapiens
ctttgggggactccagagccaaaggaaggcctgactctgtggcattgcctcttttgtcacatgcccccgggacagtggctgcctgtttctgcaaacaccasggcagagcttgcagtgcctaacctggccttcctctctttccaggttgatactgctcatcctgggagtccagagctcatcacttttcacggtatacactcc

SEQ ID NO: 36013 - DNA, 201 bp, Homo sapiens
ggctcactgcagcctcaacctccctgagctcaggtaatcctctcatctcagcctccagagtagctgggactacagatgcacactaccacacctggctaatttttttttttttttttttgtagagacagggtttttgttacattgcccaggctggccttgaactcatgggccaccaaggtgattctcccaccttggcctccc

SEQ ID NO: 36014 - DNA, 201 bp, Homo sapiens
gcacagaaggattttggcaccatacggatgactttgattctacacatcaattgggaagaagccaggtttcaagtggctttgtctgaatagagaaggaaatrcaggaatctggggaaaactgggaaggaatattatccagaacagcctggactccagacccctgaaacttaatgaggtgtccagaatagcacccccaatcta

SEQ ID NO: 36015 - DNA, 201 bp, Homo sapiens
gctcactgcagcctcaacctccctgagctcaggtaatcctctcatctcagcctccagagtagctgggactacagatgcacactaccacacctggctaatttttttttttttttttttgtagagacagggtttttgttacattgcccaggctggccttgaactcatgggccaccaaggtgattctcccaccttggcctccca

SEQ ID NO: 36016 - DNA, 201 bp, Homo sapiens
aaaatgacgcagtttggccgcgtatttgcccagacatctggctaagtctaaacgttgaggcatccaagtctgcagctcagggcctgggaactctggcctasagggcaggacccacctatgtcaggtgactaacgggctccaggctctacatggagacaacagcaacccagtatgtgtttatatccatggcctgaagagaaa

SEQ ID NO: 36017 - DNA, 201 bp, Homo sapiens
ggcaggagaatcacttgaacctgggaggtggaggttgcagtgagccaagatcccaccattgcactccagcctggctggatgacaaaagcgaaactgtgtcaaaaaaaaaaaaaaaaaaagagtaaaaatctaactcatttgtaggctgatggtataatgattctaatgtggtattttgtctctatagggccaagtactttt

SEQ ID NO: 36018 - DNA, 201 bp, Homo sapiens
cgggttactttggaatccttttagctcctgaagcgtagagctagaatatatcaaagtagaatggaaagaaagctttgcattttttgaaaagttgctttcayattaatttgatcatgtggaaagttgtctccaaagcagtggaagcttccagtcctgtgcaccggcaatatgtgtcatggaaattagagaatgctaagtaac

SEQ ID NO: 36019 - DNA, 201 bp, Homo sapiens
ttattgagcacttatgcagtgctaaggactctgccaggccctggggacacaacggtgaactagacggatgtggcctctgctctcaggagcttgcaaattayaatttagaaatattctttgaggtgagttcgtaattgatccctgttggaggtgatgttaaggcttgggtcatagccttcaaaatgacgcagtttggccgcg

SEQ ID NO: 36020 - DNA, 201 bp, Homo sapiens
aaatagacacacactaactgtgactctagacagaatattgtaattgtaagtggagaaacaggtaccataggatatacaggatatgtttgttttcatttttwcttaggggtgagaatcagagatggcttcctgcaagaggaagttgtttattggcctttgaaagatgagaaggagtcactggtctgaaaatgaaagagaagc

SEQ ID NO: 36021 - DNA, 201 bp, Homo sapiens
gaagagagtcagatttctgtgagaaaacccagtggggagggtgggccttgtgtacaggccttagtcacagaaccatgcataatcattctctcattcattcracaaatatttattgagcacttatgcagtgctaaggactctgccaggccctggggacacaacggtgaactagacggatgtggcctctgctctcaggagctt

SEQ ID NO: 36022 - DNA, 201 bp, Homo sapiens
tacctgagacactttctgaacaacttgaaggtgagtatttctctaccaatatttggcctgtgtttttcaggttttggtttatgtcagagactgagttcatyccactcttactgaaatattcctgtgttctctgcttccagggggagaatggagacaaggggttcaaaggtgaaaaaggagaaaaaggagacattaatggca

SEQ ID NO: 36023 - DNA, 201 bp, Homo sapiens
ggcccacctggcttacctggccctccaggcccccctgggccacctggagctgtgattaacatcaaaggagtaagttggcacgcagtgggaagaccttcccrattggcctaagctggagtcaggtgtcctgttgacctcacctctcttgttctcattacccacaggccattttcccaatacccgtccgaccacactgcaaaa

SEQ ID NO: 36024 - DNA, 201 bp, Homo sapiens
atatgatgggctcagaaagactgagattcaaatcccagttctgctactaattagctgtgtgtctgagagcccttgagtcgcatggtctcactgagccttaktttccgcatctgctaagtgggatcaccaaaccctacatgtaggattgttgaaagaatttgagagattgcatgaagcacatactcagtatctcattcggta

SEQ ID NO: 36025 - DNA, 201 bp, Homo sapiens
tcctgctgcaagctcctgcctctaggcttagaggagaaactgttgcatggtactaaggccaagctggcttcactttgaaaatgactgtgctatctaacaasagttttgcatttatgcttgcatttctgagacacatttcctctggcaatatatcacatgagggacccccacagtccattcccacccgtatactgggaatgc

SEQ ID NO: 36026 - DNA, 201 bp, Homo sapiens
atggcctcaagggtaccaaaggagatccaggggtcattatgcaggtgagtcaccctggggatggagccggaggttggtgtccagagagggtgagagagtgyggggtccacagagcagggcctgtggactgaatgttcaggaatgttgttcttcttccttcactgccactgccaaaggtcctcccacccagccctgtccttc

SEQ ID NO: 36027 - DNA, 201 bp, Homo sapiens
gaatgccagttctgcagaaacagtgtttctcactagtcctgtggggatgtacaacacttcatggtgggcattctcacaactttgtacgtagaaaacttagygcccttggttgtcctgtgcgggcactcttgggagagccctcctgttcccttacaaccccacgctacacaggcctagatgagatgagtctggaagattgac

SEQ ID NO: 36028 - DNA, 201 bp, Homo sapiens
tgtgattaacatcaaaggagtaagttggcacgcagtgggaagaccttcccaattggcctaagctggagtcaggtgtcctgttgacctcacctctcttgttstcattacccacaggccattttcccaatacccgtccgaccacactgcaaaatgccagtaagtagcaatcactgccttaaagagcaggctttggcatggata

SEQ ID NO: 36029 - DNA, 201 bp, Homo sapiens
agggaagctgtaggtgcacatacccatattatccaataattccacttccagctgtggaattacctgcacaggtaagcaggaggagatgtgtataagggagyccgtggcagtatcatttgtaatattgatggaaacctcaccttccaccaacagaaatgtgaatcaacccattgtagcttatttataccatagagtactgtt

SEQ ID NO: 36030 - DNA, 201 bp, Homo sapiens
tgagcctcagctgccttacctgtcaaatgggcaacataaccacatctatgtcatagaattgtgagaataaaatgaatatatgtgaaaacatatagcacgcrgtgggcacataataagtggtaagcaatgcaactcctggggatcctgtaactctacactgtgatttgcactctaaatcttgaaaattatgtgagtttttca

SEQ ID NO: 36031 - DNA, 201 bp, Homo sapiens
ggtgtgctgggggtaacgatgatcgtaggtaagaacgtgctttgaaactgggctggcaccacagaaacgactgttacaactccctggcagcctcatgagcraggtgaggtggtgccttaatgctggttttgttttcagggtcctggtgatgaagaagacttggcagcagccacaacagaggagcccctcatcacagctggg

SEQ ID NO: 36032 - DNA, 201 bp, Homo sapiens
aaactgaggtctagaatgacatgcactatattcttggtaacttcttcagaaaccaaagttttagatgatttccacagatttttgtgccccttccagctgcytgagacagtatggagaatgcttttggatattgagttatcagggacattgggtagattatgggaaaatggaacagcctattaatttagtccagttctgtaa

SEQ ID NO: 36033 - DNA, 201 bp, Homo sapiens
gggtgtgctgggggtaacgatgatcgtaggtaagaacgtgctttgaaactgggctggcaccacagaaacgactgttacaactccctggcagcctcatgagygaggtgaggtggtgccttaatgctggttttgttttcagggtcctggtgatgaagaagacttggcagcagccacaacagaggagcccctcatcacagctgg

SEQ ID NO: 36034 - DNA, 201 bp, Homo sapiens
gaaaatgaaagagaagccctccagaccaagggaccccatgagcaaaggtttagattcacaaaagaagagggtgtgatttgaaaacaactgcaagctgggtrtggctgcaatctagtgtgttaagaaagctagcaagggcaatgaggatagagaagtgatttggcatcagggttaaggagtttaacttgattcattagactt

SEQ ID NO: 36035 - DNA, 201 bp, Homo sapiens
gaacaattttgcaatattcagggaagctgtaggtgcacatacccatattatccaataattccacttccagctgtggaattacctgcacaggtaagcaggargagatgtgtataagggagtccgtggcagtatcatttgtaatattgatggaaacctcaccttccaccaacagaaatgtgaatcaacccattgtagcttatt

SEQ ID NO: 36036 - DNA, 201 bp, Homo sapiens
gccacatgcaagcctggatctactggccatgggaagcactaggctggtttaagcaatgagctttctgagtgggagcctctcaggcccttctccctgtgtcscctgaacgcttaacctggccctggatccctcagagacaccacttggaaacaagccacaggatgtgaagctctggtgcttttactctctgtggcaccagga

SEQ ID NO: 36037 - DNA, 201 bp, Homo sapiens
aactagggtgtgcatcagagacactagggggctggttaaaacacagggtgctgggcctcagcccagggtttctgattttgtaggtctggagtaggtctcgrgaatctgcatctctaataagtccccagatactgctgctgctggtccagaaaccacactttgagaaccactggcgtcatggataagcagacgggctatgga

SEQ ID NO: 36038 - DNA, 201 bp, Homo sapiens
tgtggtggtgcatgcctgtattcccagcactttgggaggccgaggtgggtggatcacctgaggtcaggagttcgagaccagcctgaccaacatgaagaaamcctgcctctactaaaaatacaaaattagccgggtatggtggtgcatgcctgtaatcccagctactcgggaggctgaggcaggagaatcacttgaacctgg

SEQ ID NO: 36039 - DNA, 201 bp, Homo sapiens
ccctggttcctgcccacacgtctctctccacacctccccacaagcagagggagccggcttcagcctctgccaacccagagaggggctcccacagtgcagtsgtgggctgaagggctcctcaggtgtggccagagtggacgccaaggccgaggaggcactgagggcgagcgagggccgccagcacgttgtcaattctcgcta

SEQ ID NO: 36040 - DNA, 201 bp, Homo sapiens
ctgaggacaggcatcctgccagcttcttttccatagctccaatactaatatggggcctggtatacaaatggtactgaatacacttgttggacgaaagcatrtataattaatgagtagaacaaatgttaatatttataaattataaattgagcattctgcagttgaacaacagtcttggtccaaagtctctggaataaatac

SEQ ID NO: 36041 - DNA, 201 bp, Homo sapiens
ttacccatgccccagacctgcttctcctcctgggttccccatctctgaggatggcaccccatctatgtggtcaccaagagagaaacatccttgagtggtcytctgccttccccagccctgcccagtgtgtccccatgtccccctgagtctagctgtgcagtgcctcctcctcctctcttgggcgatggcaccagcctccta

SEQ ID NO: 36042 - DNA, 201 bp, Homo sapiens
cagtgtgtattctactgttgagaaaaaatatatttctgattggtttatgcattttaatcttaacgaacaaccaaatactatataacaattccttccagggycctagaggaccaaaaggtgacactggtttacctggctttccaggactaaaaggagaacaggtaagaggggcccaggtatctgagtgagattgggcgctgg

SEQ ID NO: 36043 - DNA, 201 bp, Homo sapiens
tctttgttgaatacctacagtgtgccaagtgtttggatattttgtctccaacaccgacagcataccgcctactcagtagcactagccactattttataggkggaaaaaccaacacttggaagagctaagtccagagtccccacccattctgacttttgccacaaactccccaactctcagaggatcagctaaactcctgtg

SEQ ID NO: 36044 - DNA, 201 bp, Homo sapiens
aatagacacacactaactgtgactctagacagaatattgtaattgtaagtggagaaacaggtaccataggatatacaggatatgtttgttttcatttttayttaggggtgagaatcagagatggcttcctgcaagaggaagttgtttattggcctttgaaagatgagaaggagtcactggtctgaaaatgaaagagaagcc

SEQ ID NO: 36045 - DNA, 201 bp, Homo sapiens
cctcttgatcccccagagcccagcccaggtcacctgtatctgggccccatgttggtgtctggtcctttttttccaggggacccaattccttgtcctcttgwtcccccagagcccagcccagcgccaagtccagacagggttggaaagtggatgctggttgtggacaaggccagactgggcccaggatagaatgaatgatag

SEQ ID NO: 36046 - DNA, 201 bp, Homo sapiens
ggtaaggctgactacaattaaataaacttttcagtgatttaacacaatagcagcttatttctcgctcttgcaaattccactgtggttgttctcagcttggyatctctcctccaagaagtgactcagggatccaggatgcttccattctgtgattctgccatcttgtggattcaaggtcgcacaggagctagcaggctgaag

SEQ ID NO: 36047 - DNA, 201 bp, Homo sapiens
tttagggtgaacctggaatgcatggagccccaggaccaatggtaagtcagagcgtctctcagctggatctgggctggggtttgaagcatttttcatacttygatttggttagatttagttgtcccggttatgaaaattcaaagatgtggcaaagatgtgcaaaatgtgcatatactagggtaaggctgactacaattaaat

SEQ ID NO: 36048 - DNA, 201 bp, Homo sapiens
ctctggccattgcagtgaacgtgctttctctcactctgcctctaatgcttttgtgcttgcttcttctccctgctggcgtgctcaggactacctttcctcaycagtggagtggtaagatctaaataccaggtgtgggcttagggggatggaagaaagaggctgctctgcttgctttgatgctactgtcctagctactcccag

SEQ ID NO: 36049 - DNA, 201 bp, Homo sapiens
gcccagggaagcaagagcacctcttgctttaaacactctgtttaaacactctgtttcctatgtggtaaggtcagatggatctagagggacggacatgacayccccgccctaacctcctgccaccttgaatgactggtccaggcagccgggcagttctgctctggccattgcagtgaacgtgctttctctcactctgcctct

SEQ ID NO: 36050 - DNA, 201 bp, Homo sapiens
caagagagaagggtagctgtagaggggagtgggagaaaagtcagagagaaaacggggagcagaagttatcgggctataggatataggaaacatttccccaktttggagaaaactcagtgacgtggctgtccttggagtctggcagttaaatgcaagtagtggaaatttcttctctttccaggcaggagcagaagcagaggg

SEQ ID NO: 36051 - DNA, 201 bp, Homo sapiens
tttaagactttatttgggggaaaaaaaaggaaggaaaagagtttcactgctaaacaataataacaaatagttgaaagccactgctgtaatgggtaattcastctttcatccagacaagacaggaacttgtgaaaagttaaaatagcaataaagtgttgaaatgcctttttgaggcagatgtggctgtgtgagtcattgtca

SEQ ID NO: 36052 - DNA, 201 bp, Homo sapiens
caggaaacatctttatgtgctccctttagatggctctttgatagtctattaaaactaaaactaaaaatacccattctccaaaatcccacatgggaagatgyccacacaaatggaggaaagcatcctcttcccaactctcctcaacaaggaaggcagtaacttcatccttcaaacccccatcatggtacagcaagtggccta

SEQ ID NO: 36053 - DNA, 201 bp, Homo sapiens
catgccccttggtgcttcccaaactgcccatcaggaaggtccctccacctcaccacggagggggtacaggagccaagagaagccaaggattacacccttcrtgtcacaggaaacatctttatgtgctccctttagatggctctttgatagtctattaaaactaaaactaaaaatacccattctccaaaatcccacatggga

SEQ ID NO: 36054 - DNA, 201 bp, Homo sapiens
aggacagccagggcttcccggatccagaaacctggtcagtattatcatcagtgtgtagtcatcattccatttgggatagatatacttaaaactctgcctaygatctcctgtgtctgacatcccttggggatcaggccttcatgatagtaggcttggtgcaattccataaatagtagaagggatttgttatctatttggatg

SEQ ID NO: 36055 - DNA, 201 bp, Homo sapiens
ggaatattgaacatataaatgtcatggaacagagaggaacacatctcaaaggaattgctcagagaaggcagaacagctggggatggtggggagtaaacacmcttcaatgttttctccttcctcacccctccctccaaatgcattcaaatgagtgcatcagcttatctccaggtgaactgtcaattagcaagacagctgttt

SEQ ID NO: 36056 - DNA, 201 bp, Homo sapiens
ggagtgagggtgggaggggaggggagatgggcagggctggacagctagcctgctgcagaatttcaacctatctaccttctggggcccaggggccacatcaygcacctgacttccatcacagcttcacagcagacttttctccctgtggtttctcttgatggctgaggcccctgtcttcaacttccctgttttccccttggc

SEQ ID NO: 36057 - DNA, 201 bp, Homo sapiens
aggtccacgtggggactgggctctgatcccaacgcagctcgcctgttcccgggatcagccacactccttatctagcagacaaaaggtcagttgaaagcaayggagctagccaaagtgtccttttcttcttgatgtgtagacagcccggatggtgggagaaagccctggctaagcaaagcccctaatatttgcattcagagc

SEQ ID NO: 36058 - DNA, 201 bp, Homo sapiens
tgaagacatggaactttctggtgaacctgtacccgaggggaccctggaaaccaccaacatgagcatcatccagcacagcagccccaaacaaggcaagtccrgatgcacatgcctacgtagtggccttttattgggtgattactatgtgtccagccggggccatgtatgtaacatacagaatctcatttaaccttcccctca

SEQ ID NO: 36059 - DNA, 201 bp, Homo sapiens
cttaggagccttgaggttgcagccccatcttctccacacaccactctgagcccctaattctcttctctgatgacacctcaccagcctttgaggcaacttgwaagaagtgagggatgtgaaactgcttagcacactgtgacgctctgtgcaagtcattgtggagacaggtttatgccttcacagctgtgcaatgccgatgtc

SEQ ID NO: 36060 - DNA, 201 bp, Homo sapiens
ccagcctggccaacatggtgaaaccccatctctacaaaaaatacaaaaattagcccggcgtggtggcgtgtgcttgtaatcccagctactcgtgaggctgmggcaggagaatcgtttgaacccaggaggcagagtttgcagtgagctgagatcgcaccactgcactccagcatgggtgacagagtaagagagaacctgtct

SEQ ID NO: 36061 - DNA, 201 bp, Homo sapiens
cctttttttcttccttcagggcccacctggcttacctggccctccaggcccccctgggccacctggagctgtgattaacatcaaaggagtaagttggcacrcagtgggaagaccttcccaattggcctaagctggagtcaggtgtcctgttgacctcacctctcttgttctcattacccacaggccattttcccaataccc

SEQ ID NO: 36062 - DNA, 201 bp, Homo sapiens
tgggaggccgaggtgggtggatcacttgcggtcaggagttggagaccagcctggccaacatggtgaaaccccatctctacaaaaaatacaaaaattagccyggcgtggtggcgtgtgcttgtaatcccagctactcgtgaggctgcggcaggagaatcgtttgaacccaggaggcagagtttgcagtgagctgagatcgca

SEQ ID NO: 36063 - DNA, 201 bp, Homo sapiens
cagacgtctgtgctgctggctgcctgctcttgtctccaggtccatgactgcccatgactggcctccattcaggtagtaggatgccatctttgcctcaacarcacagcagttctcaaactagggtgtgcatcagagacactagggggctggttaaaacacagggtgctgggcctcagcccagggtttctgattttgtaggtc

SEQ ID NO: 36064 - DNA, 201 bp, Homo sapiens
tttccaagaatcactctttggaggcagccttccacccagcgtggtccatgctgcatagcgtaggctccttgtgtgagaaggcacagttcaccatttatgcrccttaggtagctaggacccactgggcctcacttctcacaatgcctgcaagtccccccaaacaccttactcccatcagaacccactgggaacctgaggcct

SEQ ID NO: 36065 - DNA, 201 bp, Homo sapiens
tccggcacttagaatagtgcctgctgtacagcaggtgctcaataaatgcttctggaatgaatagaaatgtgtgtgttgatggccatgagaagctttcattyctccatccacgtttacctttccaggaatagcgtgtggagctgctttagcatggagatcttgggtggaatgtgaagaatgctgtcatgcatatgcatgtgg

SEQ ID NO: 36066 - DNA, 201 bp, Homo sapiens
tcagagagaaaacggggagcagaagttatcgggctataggatataggaaacatttccccattttggagaaaactcagtgacgtggctgtccttggagtctkgcagttaaatgcaagtagtggaaatttcttctctttccaggcaggagcagaagcagagggctctggcctaggctggggctcggacgtcggctctggctct

SEQ ID NO: 36067 - DNA, 201 bp, Homo sapiens
aggtcatctgatttttctctttggcaaatttggggatttattgttctttattcttggtgtttaaaaattcctctgcattgttactaaatgtggattattgkttctattttatttttattttttaatttatttttatttatttattattattttttgagatggagtcacgcagtggtgcgatcttggctcactgcaacctcc

SEQ ID NO: 36068 - DNA, 201 bp, Homo sapiens
ctgcaaacaccacggcagagcttgcagtgcctaacctggccttcctctctttccaggttgatactgctcatcctgggagtccagagctcatcacttttcayggtatacactcccttcttcatcatttgtttctctgggacatctccttgaggaagatggttttcctttgcccagtgcagggcgcagactaggtggtcagga

SEQ ID NO: 36069 - DNA, 201 bp, Homo sapiens
ctcacccatgggagcagccagttccgtgaggaaggttatcacaactaccaagcaaacagcatgggctcgagtctgtgaaggagaaagggggagattgttgygtgggggttgcctattgtgtgcaggcagttttgcggacacgtcatggcctcatctttctcatctatcctgagagctttgcttaggctcatactcaactag

SEQ ID NO: 36070 - DNA, 201 bp, Homo sapiens
cctctgggttaggctataaaattggcatccagttattggagtcatgtttccactgcaggtggaaggtcacacttagtttctccctggtgaggctggccagyagggaggtgacagagcctagtcgctgtcacttctttcaccgagcacaccttctcctcccatctccccagaatggctggagtgtccctgctggctcctttg

SEQ ID NO: 36071 - DNA, 201 bp, Homo sapiens
aaattctctcactaagaaataatgtacaactccaacatcaccattttgggaataggagccttccctcagcctgttcattggagctcctccttttcaccctrcctgttcacataagttccagtaaagtggactcttctacccacaagttaatctactcgtgttccaagctgatggccatcttatctgtgagtcaatggaatg

SEQ ID NO: 36072 - DNA, 201 bp, Homo sapiens
agcctaggtgggtggatcacctgaggtcaggagtttgagaccagcctggtcaacatggcgaaaccccatctctactaaaaatacaaaaaattagctgggcrtggtggtgggcacctgtaatcccagctactcgggaggctgaggcaggagaatcacctgaacccgggaggccggggttgcagtgagccgagatcgtgccat

SEQ ID NO: 36073 - DNA, 201 bp, Homo sapiens
taatttcactgagctgccaaactgtcattgtaaaatcagcttctgtcttttccgttgatgtaagagaaatacaattagatcatcatcaccttccctttctmcaagcaatcccaattggtctttgaacaattctctaaaccttgtataagaaagaaaagagaagtaagctgcttttgcctaggatgcagtaatgggtttaga

SEQ ID NO: 36074 - DNA, 201 bp, Homo sapiens
acatttgatgccattcaagtatgcactgagggctctctgggtgctcggcctcctgctggactctgggcacccagtgtgtctcaggtttgggctggctcttragccctagtttagaggagccgatggacccacgcacaactaagcttcgagtcaggtggtcctagcatctcactgagaccttgacagaggctagtgggagca

SEQ ID NO: 36075 - DNA, 201 bp, Homo sapiens
gaccatcctggggaacactttggctcctgatcaagtgtcctgaacatgttatttaggtttgatttagcccactctgatcaaggggatcgcagaagcagcamgagggctaagcccaaaagaaatggacttgtaggtctgggagaatcaggaaaagggcactgggcagttctgactgagtctcttctcaccacctggtgaccg

SEQ ID NO: 36076 - DNA, 201 bp, Homo sapiens
  misc_feature (1)...(201): n = A,T,C or G, or insertion/deletion polymorphism (see Tables 1-2)
aactgggctggcaccacagaaacgactgttacaactccctggcagcctcatgagcgaggtgaggtggtgccttaatgctggttttgttttcagggtcctgntgatgaagaagacttggcagcagccacaacagaggagcccctcatcacagctgggggtgaagagtccggcagccctccccctgatgggccaccgctgccc

SEQ ID NO: 36077 - DNA, 201 bp, Homo sapiens
gacacatagcggctctgggccctcagtcaggacacttgtagatagagatgaatgtgacctcactcctgtccgcaacaaattcacaatcaagcggcaggaartaagccatctgaactgacattgattaatcactctgtgctccaagtttacctgattctcttcaccacattcctcttcagtataaggtgaatgggagataag

SEQ ID NO: 36078 - DNA, 201 bp, Homo sapiens
ttccagccgttcactgaccattttgttctctttagggtgatgctggggaggagcttcctggccctcctgaaccttctgggcctgttggacccacggtgagrttcccatccaggcttgtcacacacacaggtgtaagaccagggatgcggccaaaacagccacaggctgaggactctcctttttggcccccaaagtatcttg

SEQ ID NO: 36079 - DNA, 201 bp, Homo sapiens
gctcttcccactagtcatttggcaaataggtactgagagcttattatctgccggtgcaggggatggtgcagtgatcaggcagcctctctcttcatggggcycactgacttcagcccagtacaagccctagctcatgcccagctcactgaccaggaccagggaatgtcatcggaactcagcagccccatgtcccaaatatgt

SEQ ID NO: 36080 - DNA, 201 bp, Homo sapiens
ttttgttttcagggtcctggtgatgaagaagacttggcagcagccacaacagaggagcccctcatcacagctgggggtgaagagtccggcagccctccccstgatgggccaccgctgcccctgcccacagtggctcctgaaagatggatcactccagtaagtggcatagagctgtaagatttgacttggcagaccttacag

SEQ ID NO: 36081 - DNA, 201 bp, Homo sapiens
actgagagtgggccaagaggtggcctggcttcgtggttgagactgcaggctgtacatcctcattcccacgcttttacctgttcgtctccattgccaaaacmatcatgtcttccactggcagtcatgctgtgtacgtgcaaaccgtggcttctgatccgtctcttttccccagggctccctccagcagctcaccgtgcaccc

SEQ ID NO: 36082 - DNA, 201 bp, Homo sapiens
attatcgctgtacagtgaatttttttctcacttcttgctgctttgaccagggagaaagggggatggatggagccagtattgtgggaccccctgggccgagrgggccacctgggcacatcaaggtcttgtctaatgtgagtatcattcaggtcagagcttgtctacatattttccacctttgccaaagggaggagaaggttg

SEQ ID NO: 36083 - DNA, 201 bp, Homo sapiens
ctggcaccacagaaacgactgttacaactccctggcagcctcatgagcgaggtgaggtggtgccttaatgctggttttgttttcagggtcctggtgatgamgaagacttggcagcagccacaacagaggagcccctcatcacagctgggggtgaagagtccggcagccctccccctgatgggccaccgctgcccctgccca

SEQ ID NO: 36084 - DNA, 201 bp, Homo sapiens
ttctcattgctcactattatgaacactattgtgacgatcgtagtcttgtagctttgtatttgacgacttctgcaattatttcctagcacaacacaatttcytaaaacaaatagttgggtctagtgcatgcccatttttaaggcttttgttgcattgttcagacaggcaataataatttatactccctgcaacagcatatga

SEQ ID NO: 36085 - DNA, 201 bp, Homo sapiens
ggaaagagctgtggcctggaagccagagatctgatcccttccgttccccgggcctcagtttctccagcagaactcaggcggttggctgaatagtaagatayaagttaaagtagacctaagttaaaatgggcctcggttaaggtcagactgcctgggtttgaactgtggctggctgagtgatcttgggcaatggatttcatc

SEQ ID NO: 36086 - DNA, 201 bp, Homo sapiens; identical to SEQ ID NO: 5131

SEQ ID NO: 36087 - DNA, 201 bp, Homo sapiens; identical to SEQ ID NO: 5102

SEQ ID NO: 36088 - DNA, 201 bp, Homo sapiens
gtttcttgtccaactctcaaaatggacattttgaaacagaaatgcttcctcttacagccagcatctcatgagccccttctagtttcagctccttccaacaycctaatcatttacagctcatgtctgtagtggagaaactttatcagcatagcctgcaagataacagcttggagctgcaactttcatccttaacttagaaat

SEQ ID NO: 36089 - DNA, 201 bp, Homo sapiens
ctcattcccatcagcagtggcagtgtatgagggggttccaatttctcctcccatattatggtatcctcattgtatctttttgattatagccatcctacttkgtatgaagtgatatctcactgtggttttggtttgcatttccctaatgactaatgatgttgagcatcttttcacatgtgagtggaaacttcctggctgctt

SEQ ID NO: 36090 - DNA, 201 bp, Homo sapiens
gattggtttatgcattttaatcttaacgaacaaccaaatactatataacaattccttccagggtcctagaggaccaaaaggtgacactggtttacctggcyttccaggactaaaaggagaacaggtaagaggggcccaggtatctgagtgagattgggcgctggaatttgctaaacgtttcagattggctgaaaatagcta

SEQ ID NO: 36091 - DNA, 201 bp, Homo sapiens
catcaaaatgttataagcagttatctctgagtggtaggattatggatggtttttactttttttattgtacttccgtattttattaatacaagtcttctacrataatacatatcactattctttttgcttctgccatcagttaatgagtgttattttaacaactaaatttggggagtctgtgggtcagagaaagtatagaga

SEQ ID NO: 36092 - DNA, 201 bp, Homo sapiens; identical to SEQ ID NO: 5109

SEQ ID NO: 36093 - DNA, 201 bp, Homo sapiens
tagaatctgtattgacaaaaagctctgcaggtgattctggtcctcagccagggcctctttcccaaccacacccagatgctcacagttctctggacagaccragcactttctcccctccatggcgccttagttcctgcggttctgtttgcctggagggcccctcccagctcccatttctgcctggcaagttcctacttagcc

SEQ ID NO: 36094 - DNA, 201 bp, Homo sapiens
atgatgtgggaagagaacttgaaaatcatttttatctctcttcatctatttctctctctccctctgcctcttctgtctcttaccactaagcatctctactytatttcctccctccagttgccccattcaatgcacacactttgccccaggtcaaagccctgtgctcctggcaggtgcccctccctactgcctccagcccct

SEQ ID NO: 36095 - DNA, 201 bp, Homo sapiens; identical to SEQ ID NO: 5110

SEQ ID NO: 36096 - DNA, 201 bp, Homo sapiens
cagtgcggacccaaagacactaacagcgatatttattgcaaagagcaaaagaacaaagcttccacaatgggaaaaggacctcaccaagttgccgctgctcrctcaggcagcctgcttttgttcccttatctgaccccccccacatcctgctgattggcccattttacagagagctaattggtccactttacagagagctga

SEQ ID NO: 36097 - DNA, 201 bp, Homo sapiens; identical to SEQ ID NO: 5111

SEQ ID NO: 36098 - DNA, 201 bp, Homo sapiens
agatagagaagtgggaggggaaggaagagaactggcatttcttgataccactgtgtacctggtgctattgtgtctggaattggtgggttcttggtctcacygacttcaagaatgaaaccacggaccctcgcggtgagtgttacagttcttaaaggtagtgtgtctggagtttgttccttctgatatttggatgtgttcaga

SEQ ID NO: 36099 - DNA, 201 bp, Homo sapiens
gaagccaactcaggcaaaggtgccaacagcccaaggttgcccttagagagggacaggaaaggagagtggagtttgagcctgagatgatcacaggggacagragtagggcagagaagcttgggagggggcaccagagctgggcagctttggacagagatagagaagtgggaggggaaggaagagaactggcatttcttgata

SEQ ID NO: 36100 - DNA, 201 bp, Homo sapiens
tgacaacgaaactcttcccagatgcccatgggtgctcacgcctgcccgcacctgctggccttcactgtgccacctagtccacatggtccctggggtggctytgtgcccaggatccaggaaacagaggttgagggaagggggtaaaggaagggacgtaaagacccccactgcagcaagacagcaggaaccactgcttcttcc

SEQ ID NO: 36101 - DNA, 201 bp, Homo sapiens
gacccccaaatcatccttctaagattctactctgggaagctgtctctcctctcccaggcataatgagcatctctttgtctcagggcttctcagactgtacwgtgaccactgattagttgcctgcatccctaactgctacataggaagttctatgaggcagggatgggcctgtccaactctgaatcctggaacagggatttc

SEQ ID NO: 36102 - DNA, 201 bp, Homo sapiens
ttaaatgcagagttgaggttgagtctttctccctaataccaggttgctcagagatccgtctcctagctctgaaaaaatgtcagggcagaccagaagagaayagtggctgcccagtggccagcaagactgtgggagaccccctctcgttgtcagcagagccccgctcctggtagctggtagggaggtgcccagtgttgatgc

SEQ ID NO: 36103 - DNA, 201 bp, Homo sapiens
tggctcagagaagtgaagtatcttatccaaagttgcccatcttttaaatgcagagttgaggttgagtctttctccctaataccaggttgctcagagatccrtctcctagctctgaaaaaatgtcagggcagaccagaagagaacagtggctgcccagtggccagcaagactgtgggagaccccctctcgttgtcagcagag

SEQ ID NO: 36104 - DNA, 201 bp, Homo sapiens
ccaaaaaataccacaaagaagtgtcattttgaaaaataacatgacaaaattactttataggccccagaaagtcatttggcatggctccagcccccatggcrtccgccttgtggataactactgtgaagcatggcgaaccgcggacacagcggtcacgggacttgcctccccgctgagcacggggaagattctggaccagaa

SEQ ID NO: 36105 - DNA, 201 bp, Homo sapiens
acaggcatgcccagctcatttctgtatttttagtagagatacagtttcaccatattggtcatgttggtctcgaactcctgacctcatgatccacccacctyggcctcccaaagtgctgggattacaggcgtgagccactgtgcctggcctatttgcaattttctaatgacaaatgacgttgcgcattttttcaagtgcttc

SEQ ID NO: 36106 - DNA, 201 bp, Homo sapiens
agcctcctgcttagggagaggggattgcagcccccagcaaagctacaatcgactctgtgtggttattaatattatattatatctcaacagtggggatcagrtgagagctaagctattaagtgcatattaagctaaatggtgctggtgggattacttgtgacaactactggcattcattagaattctttatgattgatgata

SEQ ID NO: 36107 - DNA, 201 bp, Homo sapiens
tccatgttaattgttcctcataccctggcaagttgtacttggcaaagcattttctcattcaaaactctactggatcctcactgcagtctcatgagaaagaytgtatcaccctattttgcagaagagaaaactgaggcccaggggaaaattgcacaaagctgcctttcatggcaattctaagcagtaatttatgggagagaa

SEQ ID NO: 36108 - DNA, 201 bp, Homo sapiens
ttcacaatattgtgcaatcaacatctctatcaagttccaaaacattttcatcaccccaaaagaaatatctatgcccattaatcaattgctccccattcccycattttctcagcttcaggcagtcactaaactactttctgcctctatggacttgcctattctagatatttcatgaaaatggaatcatacagtgtatgacct

SEQ ID NO: 36109 - DNA, 201 bp, Homo sapiens
ttctggtgaacctgtacccgaggggaccctggaaaccaccaacatgagcatcatccagcacagcagccccaaacaaggcaagtccggatgcacatgcctaygtagtggccttttattgggtgattactatgtgtccagccggggccatgtatgtaacatacagaatctcatttaaccttcccctcaaccctttaagaaagg

SEQ ID NO: 36110 - DNA, 201 bp, Homo sapiens
ggcactgacgcggttcctgttgactttctattcagggtccagataatgaagagcgtttagcagcaacagcagcaggggaggccgaggcactcgccagcatrcctggggaagtggaggccagtggtgtggcccccggggagctggacctctccatgtccgcccagagcctcggggaagaggccactgtggtaaggatcgtac

SEQ ID NO: 36111 - DNA, 201 bp, Homo sapiens
ccccattttggagaaaactcagtgacgtggctgtccttggagtctggcagttaaatgcaagtagtggaaatttcttctctttccaggcaggagcagaagcrgagggctctggcctaggctggggctcggacgtcggctctggctctggtgacctggtgggcagtgagcagctgctgagagtgagtgtgaaggaggacacga

SEQ ID NO: 36112 - DNA, 201 bp, Homo sapiens
ataaacaatgttacaacaggtccttgtgctggtcagatttacttggataattcagtcttctccattctgccaaagaacatctctggcacattcgttacccygcagttcgttggaacaagacatagcactccaagattactgtaatgcacagaaaaatggacaaatacttcacaaggatgtcaggagtccaaaaatgctctt

SEQ ID NO: 36113 - DNA, 201 bp, Homo sapiens
tctcctgccatgaagcgatgccggctctcaggaggaccgatcccctggatttcattctctttgttaaatgggccccagagctgagcccttcagtctagcamagattcagggtcaagaggaccctcacccaatgctgggagagggccgctgattctctcactctgtggagtgttgcttccttctgactccagaaggggcatt

SEQ ID NO: 36114 - DNA, 201 bp, Homo sapiens
caaccccacgctacacaggcctagatgagatgagtctggaagattgacatggtgctgagtctctgtcttcatttgtggcactgaccaagccagggttagcygcagcctctgctgcactcacgggatgcgctgctggaacctcagtgagagcacatatttcatcttgccttgcgttactgtgagctctgtctgtctcccagt

SEQ ID NO: 36115 - DNA, 201 bp, Homo sapiens
tgctttaaacactctgtttaaacactctgtttcctatgtggtaaggtcagatggatctagagggacggacatgacatccccgccctaacctcctgccaccytgaatgactggtccaggcagccgggcagttctgctctggccattgcagtgaacgtgctttctctcactctgcctctaatgcttttgtgcttgcttcttct

SEQ ID NO: 36116 - DNA, 201 bp, Homo sapiens
tggtgggcattctcacaactttgtacgtagaaaacttagcgcccttggttgtcctgtgcgggcactcttgggagagccctcctgttcccttacaaccccaygctacacaggcctagatgagatgagtctggaagattgacatggtgctgagtctctgtcttcatttgtggcactgaccaagccagggttagccgcagcctc

SEQ ID NO: 36117 - DNA, 201 bp, Homo sapiens
tcccctccattctctggacttagaaactcaaagtgagtattccgcaaagtgaggaaaaggctggctcatcacggagatagggtggctggattggaagccayggctgatgcgccccatttctaagagtggttccatttgagactgtgttggaatggtatgcagctcagtttatgtctgtgctcagctcctgtcatctctgca

SEQ ID NO: 36118 - DNA, 201 bp, Homo sapiens
tgttggacgaaagcatgtataattaatgagtagaacaaatgttaatatttataaattataaattgagcattctgcagttgaacaacagtcttggtccaaartctctggaataaatacttagcacacagaacacttcctgagaactcccagggtaccaaacctattgttgtgcttgtattcttttgtgtttgcctcttagaa

SEQ ID NO: 36119 - DNA, 201 bp, Homo sapiens
ggatcccgcacgagggcagcaggtggagcggcctgccagtcccacgctgcctcctcagcccttggatggtcgatgggaacagccgccgcagagcagggggyggtccccgtcagggaggcttgggccatgtgggagcccactgccagggggctcgggcatggcaggctgcaggtcccaagccctgccctgcgggaaggcggc

SEQ ID NO: 36120 - DNA, 201 bp, Homo sapiens
gagaattcgagagcagtgcgggccggtcggcagtgctgggggacccggcacaccctctgcagctgctggcctgggtgctaagcccctcactgcccagggtyggtggcaccggctggccgcttagagtgcggggcccgccgagcccacgcctacttggaactctcactggcccgcaagcgctgcacgcagccctggttcctg

SEQ ID NO: 36121 - DNA, 201 bp, Homo sapiens
caggtaagaggggcccaggtatctgagtgagattgggcgctggaatttgctaaacgtttcagattggctgaaaatagctattaacttttctcttctttgakatacaattcacatgccataaaattcacccctttaaattgtacaattcagtgatttttggtgggctcataaggttgtacaacctcatgaaccactctgtaa

SEQ ID NO: 36122 - DNA, 201 bp, Homo sapiens
gtacgaagtgggtagtgaaattgatttttaccataatttggaaagagaactcaactcaacactcctttgttctcacacacactgtgctttgtctaaccacmtgctgggcatcccccttagaacatgcactgcctgaggacaggcatcctgccagcttcttttccatagctccaatactaatatggggcctggtatacaaat

SEQ ID NO: 36123 - DNA, 201 bp, Homo sapiens
gttttctgtgccctggcagagccatgggactttgtggaagtgccttcgggctggtaggtgaggacagaacaactctacttcaagcatttattaaaattaamattaaattgtaattataaaagtaatatatgaatatagttttcattgcctcatgtgtcctatttcctctttaattatttttgttagagtaggtcctccagt

SEQ ID NO: 36124 - DNA, 201 bp, Homo sapiens
ctggagactctaatgtgaggtggcatctgggccttgaagagcgagtaaaaatcggccaagtgtggtggtgcatgcctgtattcccagcactttgggaggcygaggtgggtggatcacctgaggtcaggagttcgagaccagcctgaccaacatgaagaaaccctgcctctactaaaaatacaaaattagccgggtatggtg

SEQ ID NO: 36125 - DNA, 201 bp, Homo sapiens
caaaaattagccgggcgcagtggcacaaacctgtaatcccagctgctcgggaggctgaggtgggagaatcgcttgacccgggagccagaggttgcagtgarccgagatcgcgccactgcacttcagcctgggtgacagggtgagactccgtctccagaaaaaattgaaaaaagattgatacaacagacttgggggaaaggg

SEQ ID NO: 36126 - DNA, 201 bp, Homo sapiens
ttttgtagctgtgggatctcccgaaagttctttactatttctttgctccagtttctccatctgtaaaatggaggtggtgatgatgaccctgcggtgtgggatgacgtgaggggatgtttatagaagtgctttagctggtgtcagtcactgcgggaataacaaattcctcttaccaaaacacctattggtgataagctgttc

SEQ ID NO: 36127 - DNA, 201 bp, Homo sapiens
accactgaacccactttagggaacacaggctattatcattattaagttgttccttcagctcctgcagttgggcctggcctatagcttcctgcctgggggcrggggcggggaaggaggagtaagctgactcccaggttccagcttctggtcagctgcactttattcaagacaacccattttcaggctggggcagagaattct

SEQ ID NO: 36128 - DNA, 201 bp, Homo sapiens
gacaggccttgacccagggggctggagtgcccaagcctctctacatccacttacctccaggggctgacttggacaggcttcctgctggccagccttcttcycccacagctggggccacttggctgcctcaccccaggccctaggacattcctgttttccatcagtgggatctagtgattcaggggacttagcatcccaaca

SEQ ID NO: 36129 - DNA, 201 bp, Homo sapiens
ccaacgatttggcagtttcttaaaatgttaaatatatacttaccctacaatctagcacttccactcctaagtatctacttaagggaaaggaaagcatatgkccacccaaaaactcatatgtatgttcatagcagcattatttataatgaccaaaactggaaataaagttaaattcaccattagctggtgaatagataaaca

SEQ ID NO: 36130 - DNA, 201 bp, Homo sapiens
cccagtcttcacacatcccaatctcacagattacactgaacggtggtaaacaatttagatcagcttgggtatgacacgaagcttcctcttggctatttctrcaacttaacattgaatggaaggaaatcacttaagccctaaaaacactgtctggcaggaggtaaaatgtcttgcttggcttcctgccccatccctcccaca

SEQ ID NO: 36131 - DNA, 201 bp, Homo sapiens
agggagatgtaaattatggctgccttgaggcctgtggataacaactcaagagatttcattgaccccatagtatcaatcatgccaaagaaatcaagaaacamcccaggccatgtttcacttagagaaagacttagaaagctcagaattaaaatactctttcaagctcctcctatcattcagtgctcctcccaacccaatgct

SEQ ID NO: 36132 - DNA, 201 bp, Homo sapiens
aaagcatgtttgtaagtgggctgttatgagcggaaatacatgttcccaacgatttggcagtttcttaaaatgttaaatatatacttaccctacaatctagmacttccactcctaagtatctacttaagggaaaggaaagcatatggccacccaaaaactcatatgtatgttcatagcagcattatttataatgaccaaaac

SEQ ID NO: 36133 - DNA, 201 bp, Homo sapiens
cgtgagacgtgggggatgcattacgcctctcctgtccaagccattcctttggagacctgcttctcaaatgggtgtgctcacagtccttggctgtgtgacastagcatgcgaagagccacattgtttatttcctggaggattttactcagtggttggtaatttgtggtgaggagaccagtaacaactggggaataatttgga

SEQ ID NO: 36134 - DNA, 201 bp, Homo sapiens
actcagtggcagaggccaactttgggttccatggtcttttgtgaactttgctgcaacttccagtttcccaaaaggaagatggatctggggataggaacttyggtgtttctttctcctcctgtgtgtgtctctgggatccctcagtgtcagggctgttgtttctaacacaaaggaagccctattcccatttataatgtaaaa

SEQ ID NO: 36135 - DNA, 201 bp, Homo sapiens
cctagcctggccctgggggagcatcttggcttcccaccctcggtcagtcctgcagcactaccgcccagggccacccggggtaaaggcctttggtctaggtrgagtgcagtcaagccctggattctactacctgccttgctcctgcctctgcttatcagacagtgaattgcttcagggcgggggcaaagggtctctaccttt

SEQ ID NO: 36136 - DNA, 201 bp, Homo sapiens
cagagaaacagaatgaggagaggatggaagagacagcctgaatgtggctcgaacacgttgagggaggaaggcagggtgaagtttctgggatgaaagcaggrccttcgcccaggagccgtttttcctagcctggccctgggggagcatcttggcttcccaccctcggtcagtcctgcagcactaccgcccagggccacccgg

SEQ ID NO: 36137 - DNA, 201 bp, Homo sapiens
tacccacttttatgtaatatgtattgactgttctctgaatacaagcaatgtgtgatatcctgggcagaaaatgaaaagcaagataggcttgctgcttgccytctaggatcctatagtctaatgggggacattgatgctaaataaaggattgtacaaaaagactctttatgtttataaatggtagaaaatgttagaaagtgc

SEQ ID NO: 36138 - DNA, 201 bp, Homo sapiens
gacatgtgcctgtactcccagctacttgggagcctgaggtgggaggatcgcttgagcccaagaggttaaggctgcagtgagccgaggtcacaccactgaaygaaccccagcctgggtgacaaagggagactctgtttcaaaaataaaaaagaaaaaaaagaaaagaaatacaggatcccaaatcctgcctcagacccacaa

SEQ ID NO: 36139 - DNA, 201 bp, Homo sapiens
caggggctcacacctgtaatcccagcactttgggaggccaaggtagggtgattgcttgaggccaggagtttgagaccagcctgggcaccatagtgagacamcatctctataaaaaattagcatgatgtggtgacatgtgcctgtactcccagctacttgggagcctgaggtgggaggatcgcttgagcccaagaggttaag

SEQ ID NO: 36140 - DNA, 201 bp, Homo sapiens
gatgtctgtgcattgacaactcctggggactcagggctttgggggactccagagccaaaggaaggcctgactctgtggcattgcctcttttgtcacatgcycccgggacagtggctgcctgtttctgcaaacaccacggcagagcttgcagtgcctaacctggccttcctctctttccaggttgatactgctcatcctggg

SEQ ID NO: 36141 - DNA, 201 bp, Homo sapiens
gcttgagacagtatggagaatgcttttggatattgagttatcagggacattgggtagattatgggaaaatggaacagcctattaatttagtccagttctgyaagagttgggacataagatccccagtcttcacacatcccaatctcacagattacactgaacggtggtaaacaatttagatcagcttgggtatgacacgaa

SEQ ID NO: 36142 - DNA, 201 bp, Homo sapiens
catgggcatcatccaggagctcattagaaacagagtcccaaggccgggcacaggggctcacacctgtaatcccagcactttgggaggccaaggtagggtgattgcttgaggccaggagtttgagaccagcctgggcaccatagtgagacaacatctctataaaaaattagcatgatgtggtgacatgtgcctgtactccca

SEQ ID NO: 36143 - DNA, 201 bp, Homo sapiens
aagtaggtgcccaggaactggatctgaaattctcattcttgctccttccccaggataccgaaggctctggaagcacccagctattgaatgaacccaaactstccagaccaacggctgcaattgtaggtcgcctctgaaaccttcattatgagggttgtcacactgtcacactacagtgaggaagctgtgggctgcatcccg

SEQ ID NO: 36144 - DNA, 201 bp, Homo sapiens
gtggaatcattggttggtataagcaatctagaagattcctttaatttttggcaccatctgcctcataagaacatgggcaactggcattgtccatcttctarccctagagcaatgctttgaggtgggtactatcatccccgttttgcagattatgaaactgaggctctgaagaggtagctttctctattaagtgaaagagtt

SEQ ID NO: 36145 - DNA, 201 bp, Homo sapiens
ccaaaaatgctctttgatctttgctggatgttagttgcaaaatttggctgccaaaagaaagaactgtcctacatatgatggaattctgatatttggttccsttggggatatctaagtcattttgatgcacaaagccattatcttcaaggctaggtgaaaattaatattttataatctttctcagttacaatgaaaaataaa

SEQ ID NO: 36146 - DNA, 201 bp, Homo sapiens
tgtgctggtcagatttacttggataattcagtcttctccattctgccaaagaacatctctggcacattcgttaccctgcagttcgttggaacaagacatarcactccaagattactgtaatgcacagaaaaatggacaaatacttcacaaggatgtcaggagtccaaaaatgctctttgatctttgctggatgttagttgc

SEQ ID NO: 36147 - DNA, 201 bp, Homo sapiens
tcctcctttccactcctcctatgttcccacctcaaatgaatgggaccatcatcctccagtcacctaatccagaattttcttctctcttccttaagttctayatcccatcaagcatcaagtcttgttgatttttctgcccaaacacatcatgaatcgccggctctgtcctcctccaatgctggcccctgtgctgagcctgcc

SEQ ID NO: 36148 - DNA, 201 bp, Homo sapiens
agggtaatgtcacctctcccctcctttacacagtcccagggatcactcacatcactaggggctcagtgagtgctggaagtcagtatcaaaggcagatcagstacttaggtggggcctcccaggttggcaaacactgggcagcagcagggaccctggtctagaagaaaaaagccaatgtttattcagcagctgctgtgtacc

SEQ ID NO: 36149 - DNA, 201 bp, Homo sapiens
aggtcgcacaggagctagcaggctgaagttggggagggggaagagattgtgaaagataataaacatcacttctggcacattctgtaagccaaaacccagaygcttgtggcctcaaaatgtagtttagctgtgtgtccaggaaggagaggtgcacttgcagttataccacagaacttgccagctaaagatgaccaatttccc

SEQ ID NO: 36150 - DNA, 201 bp, Homo sapiens
attccttccagggtcctagaggaccaaaaggtgacactggtttacctggctttccaggactaaaaggagaacaggtaagaggggcccaggtatctgagtgrgattgggcgctggaatttgctaaacgtttcagattggctgaaaatagctattaacttttctcttctttgagatacaattcacatgccataaaattcaccc

SEQ ID NO: 36151 - DNA, 201 bp, Homo sapiens
gcacatagctttatcagccctttgagtccccttcaagacagaatcagattaactgcaggtgtgttcatgctattgtttggtaattggcttttacacctgcraagccagtttttgaaatgctgggctccctagggtgcaaaattaaagcataaatagttttctcacaatggcccctgctgaaaacccacaacgccagctcat

SEQ ID NO: 36152 - DNA, 201 bp, Homo sapiens
actgtttaataagctgctcatatgcacttccatacccaaatacagtggcagagctgagtgtgatgggaaaagggggagatcctcaaacccaaactcaacgtgtcaggtgggagcaggagaggaaagaggaggaacttgaagccagttagggagcaggtgatgcctgaccaatgacaagggtgaggcctcccagggagaagg

SEQ ID NO: 36153 - DNA, 201 bp, Homo sapiens
agtttgaaaacctgtctcagaaaggttttatatagaaagaaggtgattttccatttttttttaacatgtatgtgtttggtggcaggtgttaaaggagagaraggatcctggggtcttcctggctcaaagggagaaaaaggcgaccagggagcccagggaccaccaggtattccagctcttgttctcaatcttgcctttgat

SEQ ID NO: 36154 - DNA, 201 bp, Homo sapiens
tgggctcagaaagactgagattcaaatcccagttctgctactaattagctgtgtgtctgagagcccttgagtcgcatggtctcactgagccttattttccscatctgctaagtgggatcaccaaaccctacatgtaggattgttgaaagaatttgagagattgcatgaagcacatactcagtatctcattcggtattcccc

SEQ ID NO: 36155 - DNA, 201 bp, Homo sapiens
ctgtgtttcttataaggtgtcaggatcttccatggctgtggccgtcaatggcctgctttcccgccttcttgccaagaaatggtgtcaagattctaaaatcwaagttaaaactgagatattctgggagtaaattcctataaaaaacgatcctcaacttagcttttatgcttggcaaatgagttcgttcctaagctggggatg

SEQ ID NO: 36156 - DNA, 201 bp, Homo sapiens
taggctcaaagagaacatgtgggaatgaaaggacaggctgggcccaaaggagaaaaggtttgtgctgtgaccatcctggggaacactttggctcctgatcragtgtcctgaacatgttatttaggtttgatttagcccactctgatcaaggggatcgcagaagcagcaagagggctaagcccaaaagaaatggacttgtag

SEQ ID NO: 36157 - DNA, 201 bp, Homo sapiens
cctcaagcaattttcctaccttggcctcctaaaacactggaattacaggcatgagccaccataccaggccctattttaaaattttaaaaaatgatatatakagagagagatagggtatttctttgttgcccaggctgaagtgcagtggcatgatcgtatttcattgcagcctcaaactcttgggttcaagtgattctatca

SEQ ID NO: 36158 - DNA, 201 bp, Homo sapiens
atttttcagagtgtggtttttgtgtaacttctcttttctgttttgtcttagctgtggcccttccaggtccccctggccctccaggacagccagggcttccyggatccagaaacctggtcagtattatcatcagtgtgtagtcatcattccatttgggatagatatacttaaaactctgcctacgatctcctgtgtctgaca

SEQ ID NO: 36159 - DNA, 201 bp, Homo sapiens
ctatagcttctgaccccctcccctttgaatttgggggattagtacacatcttcaattgaataagggaacagaaagtctaggaaacaacctctagtcggcccaaaggaaacgggattgagaaggtggccttggttaactctttgtttgcctgaagaagcccaagacagcccattgtctcctgggcaacaagacccaaatccg

SEQ ID NO: 36160 - DNA, 201 bp, Homo sapiens
gcttccttatgtctgggcctccaggcctgcccggaaatccaggcccggctgtgagtagagacccctccaagtcatctaccccaaagacttacagctttccyggaagcccccaatgggactaggcagttagggctagtcattgtactataagctggaggcagagcttggggattagccagctctttccccatccttgttgat

SEQ ID NO: 36161 - DNA, 201 bp, Homo sapiens
ataggatataggaaacatttccccattttggagaaaactcagtgacgtggctgtccttggagtctggcagttaaatgcaagtagtggaaatttcttctctytccaggcaggagcagaagcagagggctctggcctaggctggggctcggacgtcggctctggctctggtgacctggtgggcagtgagcagctgctgagagt

SEQ ID NO: 36162 - DNA, 201 bp, Homo sapiens
tgcctctaggggcccaaaggaccaccaggacataaaggagaatttggccttcccgggcgacctgtaggtatcagtgttcattggacaggctggagggggargacacgtgggccaggctggtctgtgggcggagggtttactgaggtgtctgctgtgggttccagggtcgcccaggactgaatggcctcaagggtaccaaag

SEQ ID NO: 36163 - DNA, 201 bp, Homo sapiens
ggttgtgcgtgctggctggcttctggtaagggcaggtctggtgcctctccgcacacaggtgcgaagcatgaacaccgggagggacatctggggcttttgckgctcaagaaataacggaactgaattgctcggttgcttaacccagctctgagttacctaagcggtcacgtctatcatgggcagtggctccaccggtggtgg

SEQ ID NO: 36164 - DNA, 201 bp, Homo sapiens
aggttgtgcgtgctggctggcttctggtaagggcaggtctggtgcctctccgcacacaggtgcgaagcatgaacaccgggagggacatctggggcttttgstgctcaagaaataacggaactgaattgctcggttgcttaacccagctctgagttacctaagcggtcacgtctatcatgggcagtggctccaccggtggtg

SEQ ID NO: 36165 - DNA, 201 bp, Homo sapiens
tacatccccaccagcaatgtatgagggctttaattatgcacatcatcgccaatgcttgttttcagtttttaaaattatagccattttagtggatataaaayggcatctcattgtggtttttatttgcaattctttctttctttcttttttctttctccttccttccctccttccttccctccctcccttccctccttcctt

SEQ ID NO: 36166 - DNA, 201 bp, Homo sapiens
acctgaggtcaggagtttgtgaccagccgggccaacatgacaaaatcttgcctttactaaaaatacaaaaattagctgggcgtggtggtgcacgcctgtgstcccagctacttgggaggctaaggcaggagaatctcttgagcccaagaggcagaggtggcagtgagccgagatcatgccactacattccagcctgggtgg

SEQ ID NO: 36167 - DNA, 201 bp, Homo sapiens
cctatggacttcagctcacatcaaatcactggcaggcttctgaatgggacatgcaacgtcccacacctgtgcttttgcataggctagtgccatttttattytattattattttttgggacagggtcttctctgttgcccaggctgtagtgcagtggtacaatcttagctcattgaagcctcaaagtcctgggctcaaggga

SEQ ID NO: 36168 - DNA, 201 bp, Homo sapiens
gtagatcagaagcaaaatcacctctcagaaagtattgcaggggttagaacccctatcatgacttaaatgatgcagggtatggtagatcccattacatttcmattaattagcttgtataggcccctgcgaaagccaaatctattatcagatgatagtggatttccaaaaatcagatgatagtggatttccataaacttggcc

SEQ ID NO: 36169 - DNA, 201 bp, Homo sapiens
aagtggaagtccttgaaactacaccctttcctccacttcaaggcagtagatcagaagcaaaatcacctctcagaaagtattgcaggggttagaacccctaycatgacttaaatgatgcagggtatggtagatcccattacatttcaattaattagcttgtataggcccctgcgaaagccaaatctattatcagatgatagt

SEQ ID NO: 36170 - DNA, 201 bp, Homo sapiens
agcaggggaggccgaggcactcgccagcatgcctggggaagtggaggccagtggtgtggcccccggggagctggacctctccatgtccgcccagagcctcrgggaagaggccactgtggtaaggatcgtacagtgcccaaaggttgaggtcatggtgggagcagctcctgaccttctcagagtgtggggctcctgctcagc

SEQ ID NO: 36171 - DNA, 201 bp, Homo sapiens
agcatcaactgggaagtttgtgcagcctccccatgcccaagccacacctgaaccagctcaatcaacatctttgggagtgaggcaagagcattagtagtttaaaaaaaaaaaaaaaaaagtctccccaggtgattctactgtgcagccagggttgagaaccaccgctatgcaagtaaagcacttcgtgcccaggacatagta

SEQ ID NO: 36172 - DNA, 201 bp, Homo sapiens
gctagacataaaagttctccaagtccccacccaactcaggagtccagctggcttcgcctagtggatcccgcacgagggcagcaggtggagcggcctgccaktcccacgctgcctcctcagcccttggatggtcgatgggaacagccgccgcagagcagggggcggtccccgtcagggaggcttgggccatgtgggagccca

SEQ ID NO: 36173 - DNA, 201 bp, Homo sapiens
acagaggaggtcagagtcccagggccacagaggctctccagggatgcacaggactggtgggggatatgcagtgcaagcttgtcctcacacttgcctgtgaygagcgagcgtccaggcctcaccaatgcaaccccgccctcctgctcagttgtgaaggcacatagctttatcagccctttgagtccccttcaagacagaatc

SEQ ID NO: 36174 - DNA, 201 bp, Homo sapiens
gggagggtgtgtgtgatgcgtgctcatactggtcagctctttccaccacagcctgtgccctccaagtatggcacagaaacaaagggcttctgagccctggsgtgggacaaggcattcccttaagctgtctctgcaaaggacaatgccatttttctttcctgtgtgatcctgattttaaagatgagcacgatttctacagaa

SEQ ID NO: 36175 - DNA, 201 bp, Homo sapiens
catcttctcagcagcctctagcatagtagatgtctctgctgaggacaggattggggtcaggatcctgtgttcttgccaccagtctacccatcactcattcytaatgtctgggatagctttgcctaactaagtaagtgtttgcacaggagcttagagtttggaggcaacgttgcatatggagacataaggcctccatgttga

SEQ ID NO: 36176 - DNA, 201 bp, Homo sapiens
gagctggacctctccatgtccgcccagagcctcggggaagaggccactgtggtaaggatcgtacagtgcccaaaggttgaggtcatggtgggagcagctcytgaccttctcagagtgtggggctcctgctcagcaaacccatgggagcctgaggcacggggatctctgaccaaatactcacttgggggtggagtttgccaa

SEQ ID NO: 36177 - DNA, 201 bp, Homo sapiens
agaattattgcaaaggatacatggacattttctgtctacagatacctaacacctgtgtgttgagggggctattaatgctttgatattgacaagatggagakggtcactgccctccaaagctttggattagaactgtcagctccaagagggaaggaacttgtctatcactgctggatctccggcacttagaatagtgcctgc

SEQ ID NO: 36178 - DNA, 201 bp, Homo sapiens
cttgctttgatgctactgtcctagctactcccagccccattgaaaagagacttctgtgtggctcagccctgctccccaggggccagcattgaagtttaggrccaaagcctcagagtcagatagaaggtttctgcacccagtcttgttctcttgacaatcatcttctcagcagcctctagcatagtagatgtctctgctgag

SEQ ID NO: 36179 - DNA, 201 bp, Homo sapiens
gaggcagccttccacccagcgtggtccatgctgcatagcgtaggctccttgtgtgagaaggcacagttcaccatttatgcaccttaggtagctaggacccmctgggcctcacttctcacaatgcctgcaagtccccccaaacaccttactcccatcagaacccactgggaacctgaggcctcagaaaatgctggactttgg

SEQ ID NO: 36180 - DNA, 201 bp, Homo sapiens
gactgctgggctggaatattgaacatataaatgtcatggaacagagaggaacacatctcaaaggaattgctcagagaaggcagaacagctggggatggtgrggagtaaacacacttcaatgttttctccttcctcacccctccctccaaatgcattcaaatgagtgcatcagcttatctccaggtgaactgtcaattagca

SEQ ID NO: 36181 - DNA, 201 bp, Homo sapiens
ctctccacacctccccacaagcagagggagccggcttcagcctctgccaacccagagaggggctcccacagtgcagtggtgggctgaagggctcctcaggygtggccagagtggacgccaaggccgaggaggcactgagggcgagcgagggccgccagcacgttgtcaattctcgctattgtatgcatgatttcacttttg

SEQ ID NO: 36182 - DNA, 201 bp, Homo sapiens
aagtgctgggattacaggcgtgagccgctgcacccgtcctctaggatcagtattggcccagcctctaggatcagtattggcagatatgtgacagagccagrcatgctatactgccatggtgactctaggtcagtttgaatctcagagtcaccatgacagtatagcttgcctggctctgctacatatctgtggccagttttc

SEQ ID NO: 36183 - DNA, 201 bp, Homo sapiens
ggggccagttacccagcaaggcagcagcagtccctaggagaagagctggtcccctggctgcccatccagggctctggcccctgcctcttgtccccctaccygtgcagaggagcactggtaaaagcccaggcgtcaaacactatcccccaggcactagcttggcatatgcccaagccctgagatcgcttgtggtttctgtca

SEQ ID NO: 36184 - DNA, 201 bp, Homo sapiens
cccataactgagagtgggccaagaggtggcctggcttcgtggttgagactgcaggctgtacatcctcattcccacgcttttacctgttcgtctccattgcmaaaacaatcatgtcttccactggcagtcatgctgtgtacgtgcaaaccgtggcttctgatccgtctcttttccccagggctccctccagcagctcaccgt

SEQ ID NO: 36185 - DNA, 201 bp, Homo sapiens
gctgagtctctgtcttcatttgtggcactgaccaagccagggttagccgcagcctctgctgcactcacgggatgcgctgctggaacctcagtgagagcacmtatttcatcttgccttgcgttactgtgagctctgtctgtctcccagtagactgagcttttcaaggttgagaatgtgtctgaagcatctacctctgccctc

SEQ ID NO: 36186 - DNA, 201 bp, Homo sapiens
ccctgggcccaccagcctcacctgcctcccaaccctgccctccttttctagcaagcgtgtgtatgtgatatttagcagaaatgttgtgggttgattgtcamtgatgttccccagggccctgagggacagcctggagttgatggagccaccggccttcccgggatgaaaggggagaaggtacggggaacacgggagggtccc

SEQ ID NO: 36187 - DNA, 201 bp, Homo sapiens
ggactgtggagatcttagtgaaaacccagcattatgaacctttgaccagcaaagtctatgtgcgcctccagccacactgaaagaccaccctgcagccatcyactgtgcaggatgatggggctagagcagggtgagagtaggcactgcctatagtatgtatatcaagaatagaatgtttcatgaaagaaaagttaagctgtg

SEQ ID NO: 36188 - DNA, 201 bp, Homo sapiens
tcaggggctggggccttccttgacattgctgaagaaaaggtgagtagatggtaaatttcatttgattagtcagtagtaggcttgtttgcttatttcaaacttggtgatgattttactgagcaccagagagaaccacaagggttttggttgaatagcatcaagattgcttctgtcctcatggtacagaggaggtcagagtcc

SEQ ID NO: 36189 - DNA, 201 bp, Homo sapiens
  misc_feature (1)...(201): n = A,T,C or G, or insertion/deletion polymorphism (see Tables 1-2)
tgaggaagtgaccctcctcgtgaactgtgaggagcacagccgcatccccttccagcggtcctcccaggctttggcttttgagtccagcgctggaatcttcntgggcaatgcaggagctacagggctcgagagattcactgtgagttaaagtcccactccaggtagatcagggaggtggatgaacagactcgccatgcaata

SEQ ID NO: 36190 - DNA, 201 bp, Homo sapiens
tgaggaaactccagatcatagagaaaaagcaagagattaaagtcaaggggacctagctttgtgtcccaaactgatctttggattgaaatgagatctaacartcagtgttcttctggggacaaagttgacagtaagacgtggcgggtctgtagaggggatgagagcatcagtgctgtgtgtgtgttgggggtgacctccaag

SEQ ID NO: 36191 - DNA, 201 bp, Homo sapiens
attctttcaagtttctgattagcctttccaaaggaagcaatcagatatgcatttatctcagtgagcagagggatgactttgagttctgtctgtcctttgtmtgtaaggaatttccttaaggacaaattgtgagggaggtatgtacctttcttatcttagtagataccttttaaaggaatagcatgggaggccgttttgccc

SEQ ID NO: 36192 - DNA, 201 bp, Homo sapiens; identical to SEQ ID NO: 5108

SEQ ID NO: 36193 - DNA, 201 bp, Homo sapiens
cttgaggaaactccagatcatagagaaaaagcaagagattaaagtcaaggggacctagctttgtgtcccaaactgatctttggattgaaatgagatctaayagtcagtgttcttctggggacaaagttgacagtaagacgtggcgggtctgtagaggggatgagagcatcagtgctgtgtgtgtgttgggggtgacctcca

SEQ ID NO: 36194 - DNA, 201 bp, Homo sapiens
caatgggatgcctttatcagctgcttctctaggatattgccaacataaagccacagtgaggcaactgagggcctcagagaaagccttgtccttggagtcaraagacccaggtccagtaactcaatatggaatcctgggcaagacatttccattctctgagcctcagctgccttacctgtcaaatgggcaacataaccacat

SEQ ID NO: 36195 - DNA, 201 bp, Homo sapiens
tctactatggtggcttacaatttttatgatagattttttaaagctctgagaaggaagagagagagagagagacagacacagagagagttagagatagaatragagagagaaacggagacatggttgatgtctgatgaagacattcctgctaagtccccacgttagggatctgcaatgaactcagatgaatgccccgattcc

SEQ ID NO: 36196 - DNA, 201 bp, Homo sapiens
gtgggatcagccaacccagcaatgggctaaaaacactagtgcacttcagaaagagttttaaaaacaaggctacaccacaagcagttttttttgtttttttktttttttttttttgagatggagtcttgctctgtcgcccaggctggagtgcagtggcgcggtctcggctcactgcaagctccacctcccaggtttacttac

SEQ ID NO: 36197 - DNA, 201 bp, Homo sapiens; identical to SEQ ID NO: 5112

SEQ ID NO: 36198 - DNA, 201 bp, Homo sapiens
ggtacgaagtgggtagtgaaattgatttttaccataatttggaaagagaactcaactcaacactcctttgttctcacacacactgtgctttgtctaaccamctgctgggcatcccccttagaacatgcactgcctgaggacaggcatcctgccagcttcttttccatagctccaatactaatatggggcctggtatacaaa

SEQ ID NO: 36199 - DNA, 201 bp, Homo sapiens; identical to SEQ ID NO: 5113

SEQ ID NO: 36200 - DNA, 201 bp, Homo sapiens
ttgtggcctcaaaatgtagtttagctgtgtgtccaggaaggagaggtgcacttgcagttataccacagaacttgccagctaaagatgaccaatttcccagraaaccctcaaaggaaccccacaaaacctctctgggatttttgattctggttgtgaatatgccactcatttgctgtgagaccttgtgcaagccctcttctc

SEQ ID NO: 36201 - DNA, 201 bp, Homo sapiens
aactaactatgctgccctttcccagtgatcacatcactgcaccgcacacaacactgacaggcagggctgatctctcccattttatgataatgaaacaaactgtgactcagagaagctcactggcttgtccaaggtcatgggacttgactgagctgggatcataactcaggtctcctaaccaccaggcagcaggtgcagaca

SEQ ID NO: 36202 - DNA, 201 bp, Homo sapiens
ctctctacaagggaccaggctgtttcaggaaaaggactaaaaagttcatctccatctcacccacagtgtagactggcacaaggcctgccacaaatttgaarcttagtatgtatgcataatattttcaaaataacaataataaaataaagacataaaacacaattttgattggaaggaggcttgtatacacttctaataaga

SEQ ID NO: 36203 - DNA, 201 bp, Homo sapiens; identical to SEQ ID NO: 5117

SEQ ID NO: 36204 - DNA, 201 bp, Homo sapiens
actaactatgctgccctttcccagtgatcacatcactgcaccgcacacaacactgacaggcagggctgatctctcccattttatgataatgaaacaaactgtgactcagagaagctcactggcttgtccaaggtcatgggacttgactgagctgggatcataactcaggtctcctaaccaccaggcagcaggtgcagacac

SEQ ID NO: 36205 - DNA, 201 bp, Homo sapiens
gttgacttaagcctgctctctcccttactggctatgtcactttgggtgggttctttgccttccctgaacctcagttttctttatgcttgtgtgacccttgragcatgcaggaggagagatagtgataacttctttcattgatacagggttttcttgtttgtttacaaagtacctcattatcttaatagggacttctaataa

SEQ ID NO: 36206 - DNA, 201 bp, Homo sapiens
gaggctctccagggatgcacaggactggtgggggatatgcagtgcaagcttgtcctcacacttgcctgtgatgagcgagcgtccaggcctcaccaatgcamccccgccctcctgctcagttgtgaaggcacatagctttatcagccctttgagtccccttcaagacagaatcagattaactgcaggtgtgttcatgctatt

SEQ ID NO: 36207 - DNA, 201 bp, Homo sapiens
ccagggaagaagaaatgcctattttacattttgcagatgaggaaacagctttggagagcttgctgtttcctcgagatcacacagctaggaatggacaaacttaaggacttgagtccatgtctctggccccaaggccagggctactgtcactgcaccaccctggtctcctcccactccctagagccttctcttcctctttct

SEQ ID NO: 36208 - DNA, 201 bp, Homo sapiens
caaagaacatctctggcacattcgttaccctgcagttcgttggaacaagacatagcactccaagattactgtaatgcacagaaaaatggacaaatacttcrcaaggatgtcaggagtccaaaaatgctctttgatctttgctggatgttagttgcaaaatttggctgccaaaagaaagaactgtcctacatatgatggaat

SEQ ID NO: 36209 - DNA, 201 bp, Homo sapiens
agattatgaaactgaggctctgaagaggtagctttctctattaagtgaaagagttggtgattaaacatgggtttatcaaaaagaatgcccttccttgattsagtgctctttttaaaactcttgagaacattttctccctttctgaagatgatttcttcagcaggtcatgaaactctttacagttaagagtcacagttacag

SEQ ID NO: 36210 - DNA, 201 bp, Homo sapiens
gctgaggcctttggaaggggctgggagggagggggtcctgctgactctggaaatgccgctcctaatccagcgtgctctatctttggtgtgtcacaggggcyggacgggttgcctgggctgccaggatttccagtaagtaccaccctcgctgtcttctatctgtgccccgtggctgcgatcattctgttccttccacctaga

SEQ ID NO: 36211 - DNA, 201 bp, Homo sapiens
gatcttagaagccgtcacctacactcaagcctcggtgagtactgggatgctgtgccatgtgatcttgctcagcttttagcaggctgagaattactagaggrggcccagagtcctgggtctgacctctttgtttccagacctgtgagcttaatcgttgactcatctgggggggtcaggaaaataatggccaatgggcacttt

SEQ ID NO: 36212 - DNA, 201 bp, Homo sapiens
ttttttccccctcttgaccctgtgtcatggtatctgaacatctttccaagttagctggtgaagagatacctcattcttttccaagactgcaaaatgtagtyattgatagcagaatgcctgcttcctgtagggtctggtgagatcctgaatgacacactggagggggttcattctgtggatggtgaccccattactgacagc

SEQ ID NO: 36213 - DNA, 201 bp, Homo sapiens
ccaaggcacccggttgcctgttgcataaattttagtctccttggctggacatttgaggctctctgactccagtctcctaaaggaaaaagaattgagagtarcaagagctgggaagtcccaaccactgcagttaaggcctgcagtcttaagctccttcagcttcagtcatctcatctgaaaatggcatagccacagtcccca

SEQ ID NO: 36214 - DNA, 201 bp, Homo sapiens
gggtgggaggatgccctgaaaggtacgttctaatgctggagctccaggcgaaggtgtggtcctggaggagcaaaggaaagggaatcatggagcctccagtwatctgaggctttagcgctttccaccccccagcctcacacccactgaaccaggggcatgggcgaaggggcacagctcctcatgccaatttcatttcagggt

SEQ ID NO: 36215 - DNA, 201 bp, Homo sapiens
tgagcatcatccagcacagcagccccaaacaaggcaagtccggatgcacatgcctacgtagtggccttttattgggtgattactatgtgtccagccggggycatgtatgtaacatacagaatctcatttaaccttcccctcaaccctttaagaaagggtgagaaccaccctcattttacagacaagaggaggaaattgagc

SEQ ID NO: 36216 - DNA, 201 bp, Homo sapiens
gtggaggtgggggacatgcactgatggtgccacaggccactgggcagttatatggattctttcagtgaacaaagtggctgtctccttctccttcttcttcmtcttccagttgccctttcctttctcctcctcttcttctccacctcccctccctttccctgtcttcccctttctttaatgtctaggcacttacgacagagt

SEQ ID NO: 36217 - DNA, 201 bp, Homo sapiens
gattgtccagggtgaggaagtgaccctcctcgtgaactgtgaggagcacagccgcatccccttccagcggtcctcccaggctttggcttttgagtccagcrctggaatcttcatgggcaatgcaggagctacagggctcgagagattcactgtgagttaaagtcccactccaggtagatcagggaggtggatgaacagact

SEQ ID NO: 36218 - DNA, 201 bp, Homo sapiens
gtccttttcttcttgatgtgtagacagcccggatggtgggagaaagccctggctaagcaaagcccctaatatttgcattcagagcttccctgacaccatcktgacccgtggaaggggccaccccacctccttcttcccaggggtcagtccttggaggacaggcaatcggctgcttgcacggcaccccctggtggtcagagc

SEQ ID NO: 36219 - DNA, 201 bp, Homo sapiens
ggcaagatttgcccaacttcaccctgcagccagggccagcattggactggaacccagactcctgatctccaggccaaccatccctcctctgagccctcacygcccaggctggcatgaaccctttcatatccgagtgctctgtgtctccactgcgattttgctcttgagggtggagagtgagtctaatcttcttgcttactg

SEQ ID NO: 36220 - DNA, 201 bp, Homo sapiens
cccccagaacaacttctagcccatctatattcttgttacactttgcagatagctctattatagcagctgtcacattgcattcaattatttgtatgtctttytcatcaaccccagggtgttttcattcttgtgtccctagtatctaacgcagcgtcgggtatagaatgtgaactcaataaatatttatgaatgggtgatccc

SEQ ID NO: 36221 - DNA, 201 bp, Homo sapiens
gaattgtgctttaaaataagtgatgagctgttgaaatagatttggattgttttgacaaacaggtgcaggttaaagattcgcttgaccagttggtaggaggrgtcccagtaacactgaatgcacaaacaattgatgtaaaccaagagacatctgacttggatccaagcaaaagtgtaacacgtgttgatgatggagtagctt

SEQ ID NO: 36222 - DNA, 201 bp, Homo sapiens
caaataaatggagacccaaatttaaaaattaaggtctactaaggaagagtgtcctttcttaaagactcttattcacttatttattatattttctaacctcytttttattttagctacaagcccagcagggaagaatcatcatctggatcctctcatgcggtgatggacatctccttgcctactggaatcagtgcaaatgaa

SEQ ID NO: 36223 - DNA, 201 bp, Homo sapiens
actttggcacgagggagaaattttcagatgcatcttatcaaagtataaacattccagtaacacagaacatggttccttcatcccgacttctggtctattayatcgtcacaggagaacagacagcagaattagtgtctgattcagtctggttaaatattgaagaaaaatgtggcaaccagctccaggtaagccacaaattat

SEQ ID NO: 36224 - DNA, 201 bp, Homo sapiens
tgcatcctaaagcacaggttttgtttttgtttgtttattttttacttattgttgctgctgctgtttatttttagattttatccaagggcaaaattatccaytttggcacgagggagaaattttcagatgcatcttatcaaagtataaacattccagtaacacagaacatggttccttcatcccgacttctggtctattaca

SEQ ID NO: 36225 - DNA, 201 bp, Homo sapiens
ctttataaatcttactgaggtttatgaccatctacaaaatatgatttgtgccatcattttaaaattactatattttaacatatgcctcaaaaccacttgtwcgatacttcaaaaataacacaaaagaaatgtcttgggtattgtgagatatgggtcataaaatcataaaatttaagatctagaagggaacttaataatcca

SEQ ID NO: 36226 - DNA, 201 bp, Homo sapiens
tatctttttttaaaaaaaccagatgaaccttgtaaagaaattctcaggccaagaagaacgctgcaaaagaagatagaagaaataggtactgtaagattcawgtgattgtaaaaaggttatggtcatatcattcaaaaactggacaaaattaaatgttatataaattcccctaattgaaataaaatgaatgaaaagaaagat

SEQ ID NO: 36227 - DNA, 201 bp, Homo sapiens
tggcccaggggttggggacccctaccatacacaattcaaaattaaagcaatactaaacttaaaaacataaagcttctataaatactgaaattaaagtagcyttatatccctaaatttttctaattacaaaactctttataaattccatttagtacaacagttgaaaatgttaattctggaaacgggctgctcaggttcgat

SEQ ID NO: 36228 - DNA, 201 bp, Homo sapiens
ccagatgaaccttgtaaagaaattctcaggccaagaagaacgctgcaaaagaagatagaagaaataggtactgtaagattcatgtgattgtaaaaaggttrtggtcatatcattcaaaaactggacaaaattaaatgttatataaattcccctaattgaaataaaatgaatgaaaagaaagatatgtatggaggtctagct

SEQ ID NO: 36229 - DNA, 201 bp, Homo sapiens
ttactgaggtttatgaccatctacaaaatatgatttgtgccatcattttaaaattactatattttaacatatgcctcaaaaccacttgtacgatacttcaraaataacacaaaagaaatgtcttgggtattgtgagatatgggtcataaaatcataaaatttaagatctagaagggaacttaataatccaagagttgttcc

SEQ ID NO: 36230 - DNA, 201 bp, Homo sapiens
aaagcctggaataattctgccaggtggggtggtgggtgccctccaagcttgttgggccacttgaattagtcgatcactatgcccttttgggttaaaacacrtttttttcctatgtaatagcgtatgtagttctcgctattcaaattagatacttttgtgatatacacttagtaatccagtttatatttgtaagtttttaaa

SEQ ID NO: 36231 - DNA, 201 bp, Homo sapiens
tagtgactttaccacggtcactcagccagcagatgccacagctggaattcaatcactgcttttttcttcattgagcaaaaaatattgaccccatttacatkttctggtcaacatgattaaaagtcttccttggctgcagtagctaagagaaagtgctgctatcaccttaactttctaaatgtaaactaaacctccagcttc

SEQ ID NO: 36232 - DNA, 201 bp, Homo sapiens
agccaatgctgagggtcctccatgacttttgtcctttaaaaggactatgcatattactcaagtttaagaaacactaatctaaaaaatttctagtcaaacayaggaattctttaatgttcttagcagtaaatgctcatatctcttaacaaattcttccacttattaggtttgttaacaattaaaattcatttattaaaagtg

SEQ ID NO: 36233 - DNA, 201 bp, Homo sapiens
tgaaccctccccaggagaggccggtacagaagagtttggcggacagcctgacccctggggacctgaccacagctgggctcttataaaataaatcaggctgrgcacggtggctcacacctgtaatcccagcactatgggaggccaagacgggcagatcacaaggtcaggagatcgagaccatcgtggctaacacggtgaaac

SEQ ID NO: 36234 - DNA, 201 bp, Homo sapiens
tgagaattgaaggagactttcaagataaatgaaattcaagaggccaacatggggaggaatgcattccaggtaggggaactggctacttgtgagttctttgrgaatcccaaaattactatctttgaagttttccaagtctttcacattttgtacttttccacaaagttaacagttgccaaataccaaataattttatatttt

SEQ ID NO: 36235 - DNA, 201 bp, Homo sapiens
aaatcagacacagtccatgccttaagaagtttctagtctagctagaaggacagatgtgggacaaaaaattgtgacagaaattcaagtgtaaaagaggtaargaggagacagaaagatatttaaaacaaagagcatccaggaatattttactggatactgtgagaattgaaggagactttcaagataaatgaaattcaagag

SEQ ID NO: 36236 - DNA, 201 bp, Homo sapiens
atcatcttgttctgttcatggaaaacatgtgggtggcaaacagggtaagaatgttgccatgaagtcacagagggagcttattctgtgaaacctgcccctcytggtggacacagacagggatgggaaattgaaggtcagctgcagccttggcaatgacttcaaaagtgagggcaagatagccttgtattaggcatccctaaa

SEQ ID NO: 36237 - DNA, 201 bp, Homo sapiens
gtctggacagtcaactagccataactattgtgggtagggggatcatatagcaacagaaaccaggtatcccttgagattccttctaagcctgagatgttatsactctgcgtcatcaagagcacttgcattattaccatttcagctgctaaatataaacattcagtagtgaagaaatgttgttacgatggagcctgcgttaat

SEQ ID NO: 36238 - DNA, 201 bp, Homo sapiens
tactaaaaatacaaaaaaaatagccgggcgtggtggcaggcacctgtagtcccagctactcgggaggctgaggcaggagaatggcgtgaacccgagaggcrgagcttgcagtgagctgagatcacgccactgcactccagcatgggcgactgagcaagactccgtctcaaaaaaaaataaagaaatcaaattcagcttttc

SEQ ID NO: 36239 - DNA, 201 bp, Homo sapiens
ctcagaagagctctgagagaggaggctggtacatgtcaacccacttttcatagctctatcctccctccctatcaaatgatgaaagaaagcatggtttgtttctctattatctttccaggtgcttctcaatgatgacctcattgtcagtacaggatttggcagtggcttggctacagtacatgtaagtatttaattgatatc

SEQ ID NO: 36240 - DNA, 201 bp, Homo sapiens
tctcagaagagctctgagagaggaggctggtacatgtcaacccacttttcatagctctatcctccctccctatcaaatgatgaaagaaagcatggtttgtttctctattatctttccaggtgcttctcaatgatgacctcattgtcagtacaggatttggcagtggcttggctacagtacatgtaagtatttaattgatat

SEQ ID NO: 36241 - DNA, 201 bp, Homo sapiens
gttcataacctgaggttaatctgggggacactgtttggtaaactgttctttctcagaagtagaaatgctatctcagctaattgaaagctaatgattccttsagcattgtaaaactacattttcacagttcctgaacaacctgatagttcatgctgtacagaggcagggaaacaccatcgagagggttgttgaatattatag

SEQ ID NO: 36242 - DNA, 201 bp, Homo sapiens
ctctcagaagagctctgagagaggaggctggtacatgtcaacccacttttcatagctctatcctccctccctatcaaatgatgaaagaaagcatggtttgtttctctattatctttccaggtgcttctcaatgatgacctcattgtcagtacaggatttggcagtggcttggctacagtacatgtaagtatttaattgata

SEQ ID NO: 36243 - DNA, 201 bp, Homo sapiens
actctcagaagagctctgagagaggaggctggtacatgtcaacccacttttcatagctctatcctccctccctatcaaatgatgaaagaaagcatggtttgtttctctattatctttccaggtgcttctcaatgatgacctcattgtcagtacaggatttggcagtggcttggctacagtacatgtaagtatttaattgat

SEQ ID NO: 36244 - DNA, 201 bp, Homo sapiens
cataaaaaacatcaactcctacccctcaaagtatctaatagattgtcagtttaaaaggctggtgtggtcttgttccttgctctggttgctataaaataggrtcgtctgtagtttttgcctggataaactaccagaaggcaaagtccaagagggaaggagttctcagagctatatctattatttggcctcacatgaaaggat

SEQ ID NO: 36245 - DNA, 201 bp, Homo sapiens
cttttttaaatttttatttttttaatatacatcgtactggtgattggctccaggtcagaatgaagaagggtgctattccatttaattttatttgacttcaktatgcatttactacacacaactatgtgcgatacactatattaagccactatttttatcctaaaatatctgtactataaaacaaacattaataaacaggaa

SEQ ID NO: 36246 - DNA, 201 bp, Homo sapiens
tgttccagtagagtggtctgttgagattattgatcaagtgaggaaagagaatagatgactcaaagatctcttgcaactctaaagtcagagattttaacccrtacattgtagaaaagcaaataaatggagacccaaatttaaaaattaaggtctactaaggaagagtgtcctttcttaaagactcttattcacttatttatt

SEQ ID NO: 36247 - DNA, 201 bp, Homo sapiens
ttttataaatataaaaataccacacactacttacagaagaattgtggcacagtgaccataagccatttagaatcaagggcaaactgtagtttgaggataakgataaattggtatttctccaaagcacagagtgcttagaataggtaaggatatagaagaataaaagtttagttattgttgaagcccagggtagttgcctgt

SEQ ID NO: 36248 - DNA, 201 bp, Homo sapiens
ttaagatgcatcctgatctccagtattttttccatcgaagtctactgaattctcttaatagtaattcaggcaacagaataagttttatatggttaataacwtttctttctttgaatttatattgattttggaaaaaaaaaaaagctaaaaagctgcctgactcagcctaggcccactgcagtttgttaaatacatgaagac

SEQ ID NO: 36249 - DNA, 201 bp, Homo sapiens
agtcaaagggaacttttgagaagccacagaggtataagatttcagttctgtactcttccaattgatagaccagaggcagaggcaaaggtgatttagggggyttggtttttaaaaaaatatcttcagggtaaaaatataaataccaaataatttttaatatattcaagattgcaatccatgtttgagacactctccatttga

SEQ ID NO: 36250 - DNA, 201 bp, Homo sapiens
ctcagcactgaaccactagcttctgttccttttctcttatacttcccagttaatggaattcggtttattgtccagttccatttagtctttcctaaattgargaaagccttcttggccaaggaaaagatccagaactcaccaataatcaacagctggctccatgagggtctcagttagttttggttttttcaaaatcctcaa

SEQ ID NO: 36251 - DNA, 201 bp, Homo sapiens
ttactttcacctagtctttttatcatataagaccagaggctcagcactgaaccactagcttctgttccttttctcttatacttcccagttaatggaattckgtttattgtccagttccatttagtctttcctaaattgaagaaagccttcttggccaaggaaaagatccagaactcaccaataatcaacagctggctccat

SEQ ID NO: 36252 - DNA, 201 bp, Homo sapiens
cactctccactcgggaggcccttttccatcctgctgacaaagtgtttgcatctgtgagcaagagtgctctgcttctacccatccaattagggagatgttcrgatgtcacattagagttccaagtgttttatattctgttctaaattgttaatttggtgaagaatagggttaaatttttatgagtcagagattttagaatac

SEQ ID NO: 36253 - DNA, 201 bp, Homo sapiens
aagtgatccgtccaccttgacctcccaatgtgctgggattatgggcgcgagccaccacgcccagctggcaggtgcaaatttttctaggctgtttaagtatkttcatgcattcttaaattgcatgttctgagcataaattaacatcctattaataattttaatcacgctcttatctttagtgcattcattccttcaaggact

SEQ ID NO: 36254 - DNA, 201 bp, Homo sapiens
ataaaggtgccttacataattataaaatgacagacaagaatttccttgggaggccagtagaggtaaatgaagaactttctgtagtattttacaattggctragaccattgaaatcatctgttccactctttattttataaatctatctcttcactacttaaacatatattgagtgtcagctatgtcctaaacagggatgcc

SEQ ID NO: 36255 - DNA, 201 bp, Homo sapiens
gacatcgatgtttcttacaagcataaaggtgccttacataattataaaatgacagacaagaatttccttgggaggccagtagaggtaaatgaagaactttstgtagtattttacaattggctgagaccattgaaatcatctgttccactctttattttataaatctatctcttcactacttaaacatatattgagtgtcag

SEQ ID NO: 36256 - DNA, 201 bp, Homo sapiens
aaacacctcccattaggcctcacctcctaacactgccacattggggaccaagctttccaacacatgaactttgggggacacattcaaaccacagcaggcaycaagaaaaatatattacctacttgcctcacaaatcttatattgcagtggggtaggccaacaataaactataaataaaagcattacaaattgagatgaatg

SEQ ID NO: 36257 - DNA, 201 bp, Homo sapiens
ggctagcttgtagcagcagcaacactcaaagaggcaatggaagcatgaaagtccccctgagcctaggcttggtgctggcacaccatcacttccacacattmttttgtccaaagcaagttacaaggtcagcccagaggaaatagacccctcccacactttgtggacacaatgaactgtgcaaaggtcgttgatacatgggga

SEQ ID NO: 36258 - DNA, 201 bp, Homo sapiens
cagattatctgaattcttcaagttcagtttatttaaaaggagactatcctcaaaagtgttatatccgtggtttcctgctacctccaaccatgggccttttkggaatactttgttttttaatcttcctggggaaaacctggggacaggagcaaacgtaagtaaaacaagctatcttcatttttcaatgcatcttagttatga

SEQ ID NO: 36259 - DNA, 201 bp, Homo sapiens
taagtgtgttcaaagatttgctcattaatgattctgttctgacaggttccaaagcagctgaaaacagtttactcttatatttgtctgtttgttttcttgtyttatgtgccagcatcccactacagaggctacggaaactctgattacaaacgcatagtagcatgtgccaggtgagcctatttccacaaaggggagcataga

SEQ ID NO: 36260 - DNA, 201 bp, Homo sapiens
tttaactttcttttaaaattttaatagtctaattataagtcttttattttgaaatattctttggaagtagatacattataaataatctgcaaacagtcttmccctggaaactctgtataaatccaaattttctaaattacaggtaccattagcagacgaaaggagttcccatacaggatacccttagatttggtccccaaa

SEQ ID NO: 36261 - DNA, 201 bp, Homo sapiens
agagaattttagcaaaaaaatcatgagatggactctactatataaataaatattatttctgtagcattttggctcaacttaccaaaatgcctgaatgagargcaaggcacctgcattccaaactacagaacacttccttccttttcgaatgagatcagaatgttctacttgataattcccaattcgagcaattcatatact

SEQ ID NO: 36262 - DNA, 201 bp, Homo sapiens
catttgaaaaatatcatctgtgtatttcactggtttgtgataaccatgtaacaattagtaccttttagatctttagaggaatgatttatacatctcaatgkgctcaacattttgcctttctggacaggtatttcaattcttagagaagagtgatctgggctgtggggcaggtggtggcctcaacaatgccaatgtgttcca

SEQ ID NO: 36263 - DNA, 201 bp, Homo sapiens
aggatttttattaaggtctcctgtttatcacttcaatttttttcattttgtcataaatgtatacatgtaaatatattatatataaacacatacttaggatrtcattcttttttagcaccctcgtatttctgatctgtgatctttttacatggccacaagcactcaactaccttagcatcctgcctttattctttttgaaag

SEQ ID NO: 36264 - DNA, 201 bp, Homo sapiens
caatagcatactcatctctcagccaaagttacctttatattgattggactgataaccataaggctttgctagtgggagaacatctgaatattattgttacycccaaaagcccatatattgacaaaataactcactataattacttggtaagtacataatgatggatttacatcttattcccccacctggaacattttcctt

SEQ ID NO: 36265 - DNA, 201 bp, Homo sapiens
agtcatgtttctcagttttatagatgagaaagatgaggtccagaaagataaagtttattcatttattccttcaacaaatatttatgtacctgctaaatgcratggacattgccttagtccattgtgtgttgctgtaacagaaaaaacgacacactggataatttacaatggacagaaatttattacctcatggttctgggt

SEQ ID NO: 36266 - DNA, 201 bp, Homo sapiens
acagagtagaggccaggtgcggtggctcacgcctgtaattgcagcactttgggaggccaaggcgggcggatcatgaggtcaggagttcaaaaccagcctgrtcaatatggtgaaaccccgtctctactaaaaatacaaaaattagccgtgcgtggtagtgcacgcctgtagtaccagctactcagaaggctgaggccggag

SEQ ID NO: 36267 - DNA, 201 bp, Homo sapiens
agtccgttgtttctatttattgccattgccttttttcaaagatgtaactaaagcatctttatatatacagatgtatagataagtggagaggcagcctggcygtataactgcactcatatgcctttctagcctgctaaaagaagagagacttccaaaagccaaaatcccaagagagacccaatgtaaaatgtgggccaatct

SEQ ID NO: 36268 - DNA, 201 bp, Homo sapiens
cgcaaaaagctagagcgaattgtatttgctttacctttagggaagtgctgtctagactctcactccttaaggataccagggatgagacacccaagagtacsaaagagaaagagagataggagtaagagcttataaaaaccaggtgcagtggctcacacctataatcccagcactttgggaggctgaggcgggtggatcacc

SEQ ID NO: 36269 - DNA, 201 bp, Homo sapiens
aatcaatattccactgtatttgaatatcaacattttaacttccagaaaacagttgcagtttgccctacctgattctctaaccacctgggaaattcaaggcrttggcatttcaaacactggtaagcaggtttaagtgatatatgcatttaaatagtgatttgattagcaagatgtaattctttgttagtatctatttagttt

SEQ ID NO: 36270 - DNA, 201 bp, Homo sapiens
gagtttggggcaagactgaaacatacacccaactccatgagttccttgaaagaaataatagacatagaagaaaatgtccagcacctaaataccctcaaacwtttcttgagaaatacaaagcagattttttaaagtacgaatatcattcatattagcaaaacccaaaattgatgatgatgaacattttttatattcgtcttt

SEQ ID NO: 36271 - DNA, 201 bp, Homo sapiens
ctaaacatatttttgtgccttgctgattgctgacaggacacaatcaatgccattgagggcctgacggaatattcactcctggttaaacaactccgcttgartatggacatcgatgtttcttacaagcataaaggtgccttacataattataaaatgacagacaagaatttccttgggaggccagtagaggtaaatgaagaa

SEQ ID NO: 36272 - DNA, 201 bp, Homo sapiens
tttcattctgacccattaattgaaaagcagaaactgaagaaaaaattaaaagaaggtaaaaaaaaaaagtatttcacataaaaattgggtgattctaaacyaatatttttattaaactaatatttaagttgtgaattatagaaaactttgtaagagaattttagcaaaaaaatcatgagatggactctactatataaataa

SEQ ID NO: 36273 - DNA, 201 bp, Homo sapiens
agtctaattataagtcttttattttgaaatattctttggaagtagatacattataaataatctgcaaacagtcttcccctggaaactctgtataaatccarattttctaaattacaggtaccattagcagacgaaaggagttcccatacaggatacccttagatttggtccccaaaacagaaatcaaaaggattttgagtg

SEQ ID NO: 36274 - DNA, 201 bp, Homo sapiens
ctgtggagctaatgttcaatatatagttgattaagaaattacatgttagttattcttagctttcagttccaggaacaattttctgtctttgggcaagctgrcatgctatattttgctggtgaataagatttatataacctatttatttcacatcttataatgaccaggaagcttacagccaaatttaatgctttatttaat

SEQ ID NO: 36275 - DNA, 201 bp, Homo sapiens
aatacaaagcagattttttaaagtacgaatatcattcatattagcaaaacccaaaattgatgatgatgaacattttttatattcgtcttttttttttttttaaagaacattgtggatattgaacttttctctttaactacaagcctccatcttatttctgtttctttcccccaagggcattcactatcatgagtttatgca

SEQ ID NO: 36276 - DNA, 201 bp, Homo sapiens
cttaagttgttacactcaaggcttagttttaaagaaatatctcggccaggcgcggtggctcacgcctgtaatcccagcactttgggaggctgaggcgggcrgatcacgaggtcaggagatcgagaccatcctggctaaaacggtgaaaccccgtctctactaaaaatacaaaaaattagccaggcgtggtggtgggcgcct

SEQ ID NO: 36277 - DNA, 201 bp, Homo sapiens
ttcctgatttctgcagagctaaagagggaaaagataaaaattctgttcagcttatttcagatattttattaaatacttctaatatttattattttttttttgtggggtggggggacagggtctcactctgttgcccaggctggagtgcagtggcgccatgtcagctcactgcaacctccacctcctgatttcaagcgattc

SEQ ID NO: 36278 - DNA, 201 bp, Homo sapiens
gttgagtctcttcaagataatgaggagagatggggaagattggaaaaagaagaagggaaatggctgaaatgaaccatatttcccttctataacatttaacwgatcttcatccttcatatttaatttgaagacatgggtatttgtcttcaaatatttgatctataaatattttgtacatcaaagattgtataatcagttaaa

SEQ ID NO: 36279 - DNA, 201 bp, Homo sapiens
ttaggcagctttcctgatttctgcagagctaaagagggaaaagataaaaattctgttcagcttatttcagatattttattaaatacttctaatatttattwttttttttttgtggggtggggggacagggtctcactctgttgcccaggctggagtgcagtggcgccatgtcagctcactgcaacctccacctcctgattt

SEQ ID NO: 36280 - DNA, 201 bp, Homo sapiens
gaattgcttgaatccaggaggcggaggttgcagtgagctgagatcatgccgctgcactccagcctgggcgacatagcaagagtctgtctcaaaaaaaaaaatgtattttgatataattcttcacttgtatttcagttctgtgttaaaatgtctgctgtggagggaatctgcacttcggaaagcccagtcattgatcatcag

SEQ ID NO: 36281 - DNA, 201 bp, Homo sapiens
agaaaactttgtaagagaattttagcaaaaaaatcatgagatggactctactatataaataaatattatttctgtagcattttggctcaacttaccaaaaygcctgaatgagaggcaaggcacctgcattccaaactacagaacacttccttccttttcgaatgagatcagaatgttctacttgataattcccaattcgag

SEQ ID NO: 36282 - DNA, 201 bp, Homo sapiens
ggtttacagtccctttttgtatttctaaatgattataactagtatcatactatacctatcattctgtaacttacctttttcttttaatactttttagttaytttagatctagtagtataggtaaatatagctcactccttttcattgccatgcagtattttattttacaaatatatcacatagtatatattctttatctat

SEQ ID NO: 36283 - DNA, 201 bp, Homo sapiens
tttgtaattctttattgtggctagttgagaattatcaattagataatggatctttcaaggaaaattcacagtatcaaccaataaaattacaggtaaggaarccaaatgcacaaattagcaatagttttatttagtttgagttttattctcatctgattatgggaggatgaagaagaagaagaaaaaaatgtaattctgcaa

SEQ ID NO: 36284 - DNA, 201 bp, Homo sapiens
ttttttgtttcaggactgcttgtaggtgagatcttgtctgcagttctaagtcaggaaggcatcaatatcctaacccacctccccaaagggagtgcagaggyggagctgatgagcgttgtcccagtattctatgtttttcactacctggaaacaggaaatcattggaacatttttcattctgacccattaattgaaaagcag

SEQ ID NO: 36285 - DNA, 201 bp, Homo sapiens
cattcttctgcatgaatgggataaccagttttcccagcaccattaattgaagagactgtccttcctccaatgtatgttcttggcacctttgtcaaaaatgmgttcactataggtgtgtggatttgtctgggttttctattctgttccataggtctatatgtctgcttttatgccactaccatgctgttttgaattatacta

SEQ ID NO: 36286 - DNA, 201 bp, Homo sapiens
tatcatcagtgtcatttcctctgggaaagcaaagaattaataccctttacactttaattcatctgagtatcatgaactgaggagtgttatttcagtagagyaataaaaagtaaaatccatctatgtacatgcgtccacatgcttacttgtttctccaattttttcttcacacagacctcctccttgcctgctcattgtgaa

SEQ ID NO: 36287 - DNA, 201 bp, Homo sapiens
agcaggaagggaaagagtgggagataaggcttaaaacacagagtagaggccaggtgcggtggctcacgcctgtaattgcagcactttgggaggccaaggcrggcggatcatgaggtcaggagttcaaaaccagcctggtcaatatggtgaaaccccgtctctactaaaaatacaaaaattagccgtgcgtggtagtgcacg

SEQ ID NO: 36288 - DNA, 201 bp, Homo sapiens
tccttctttccaataacttgaaaataacttaaactccagaattgaaagatttcagaacaatgatagatattagagaccacctagtccaacctactcatcgrcagttgagaaagctgaggactaagtaaggtgaattcagtttcccagtgtcacaggctaataaattgtagagctgggtctaaaactgatagctgggactgg

SEQ ID NO: 36289 - DNA, 201 bp, Homo sapiens
ctatcctcaaaagtgttatatccgtggtttcctgctacctccaaccatgggccttttgggaatactttgttttttaatcttcctggggaaaacctggggayaggagcaaacgtaagtaaaacaagctatcttcatttttcaatgcatcttagttatgacgaatgaagagttaaatttaacagattctgttaacttgaaaat

SEQ ID NO: 36290 - DNA, 201 bp, Homo sapiens
gaggccaaaataacattcttgcctctctgcaagctcagtaacctgatcctctgcagcaattgaaagacaaagaaaactatgaaattatttatatggatagmttatgctactgataagtcaataagaaccaaaatctttataaagggtggttccagaatattcttttaggggcttctaaacactatgtatttttgcttgacg

SEQ ID NO: 36291 - DNA, 201 bp, Homo sapiens
tgctgcttatatccatgtaagtatttatacatagtttgccttttccaagaaaaataattttttagtttgaaaagtggtccagaaaagttgatccagggaaytcaggttatataaacttatgtttttaactgaatgttttctgcctttattttagccagaaggtgtcaaaagggaaagctattctggtgttactttggatcc

SEQ ID NO: 36292 - DNA, 201 bp, Homo sapiens
gatttccatgtgtgtcagtctcctcatctgtcgaatgggagtaataacagcaccaacctcatagaggtttttagaggttaaatgagttaatacatataaarcacttagaacaattatctggcttataaataacttctttttaagcatttgctctggtcaatatgcaaatagccataaaatcttattgctgcttatatccat

SEQ ID NO: 36293 - DNA, 201 bp, Homo sapiens
tcaggaggctgaggcaggagaattgcttgaatccaggaggcggaggttgcagtgagctgagatcatgccgctgcactccagcctgggcgacatagcaagastctgtctcaaaaaaaaaaatgtattttgatataattcttcacttgtatttcagttctgtgttaaaatgtctgctgtggagggaatctgcacttcggaaag

SEQ ID NO: 36294 - DNA, 201 bp, Homo sapiens
ccgtgcctctactaaaaatacaaaaattagctgggtgtggtggcgcatgcctgtaatcccagctactcaggaggctgaggcaggagaattgcttgaatccrggaggcggaggttgcagtgagctgagatcatgccgctgcactccagcctgggcgacatagcaagagtctgtctcaaaaaaaaaaatgtattttgatataa

SEQ ID NO: 36295 - DNA, 201 bp, Homo sapiens
taatcaaggtcaacttttttagagataaagtatttcgagtctgggcacggattacagcatcatgcctgtaattccagtactttgggaggctgaggtgggcrgatcacctgagatcaggagttcgagatcagcctggccaacatggagaaaccgtgcctctactaaaaatacaaaaattagctgggtgtggtggcgcatgcc

SEQ ID NO: 36296 - DNA, 201 bp, Homo sapiens
gggccaaatctagcctgccatctcttttgtatgtcctttgcaataacacaattatatataacttgacagcattttttttttttttgagacagagtctcgcyctgtcgcccaggctggagtgcaatgggaagatctcgggtcactgcaagctccgcctgccaggttcaagcgattctcctgcctcagcctcccaagtagctg

SEQ ID NO: 36297 - DNA, 201 bp, Homo sapiens
ttccatatatgtggatctatttatagattctctcctctgttttgtttacatcagtatcacactgatttaaagtaccatagatttgtggttatattgtatawctattaggcaagtactctctggtattcttatttttcaaacgtttttgatgttgttattcttacacatttactctgccagataaactttggaattagtttg

SEQ ID NO: 36298 - DNA, 201 bp, Homo sapiens
agaagggtaaagatcaaaaaatgacctattaggtactatgcttattacctgaatgatgaaagaatctgcacaccaaacctctgcgacacgccatttacctrtacaacagacctgcacatgtgccccgaacctaaaataaaatgtttttctaaagaactgttttttctatattttctatagtacttttatagttttttgtga

SEQ ID NO: 36299 - DNA, 201 bp, Homo sapiens
gttactcagctgggaagaggaaaattttgatttgagctgaggactctgactcctgttctaataacactttttaccaaagagagcctagttattccaaagcragaacctgattaaatcatgttgcctctgttctctttcatggccaaagattatatgcctagacccagttcggataagtgaattttattgtcaaaaaatggg

SEQ ID NO: 36300 - DNA, 201 bp, Homo sapiens
tagcaatattatatagaacataagcttaaaatatgtttatataaaagtaaaataacaaactatatctgtgtggaattgtgtgtgtatatatatatatatatggcagtgagaggtagatgttaaaggaaaaaaggtgtatctatttttgtttctcatattcaagggacttattcccagaagcgattgcctcattttctcctt

SEQ ID NO: 36301 - DNA, 201 bp, Homo sapiens
atagcaatattatatagaacataagcttaaaatatgtttatataaaagtaaaataacaaactatatctgtgtggaattgtgtgtgtatatatatatatatatggcagtgagaggtagatgttaaaggaaaaaaggtgtatctatttttgtttctcatattcaagggacttattcccagaagcgattgcctcattttctcct

SEQ ID NO: 36302 - DNA, 201 bp, Homo sapiens
ggtgggttccaagtctttgctagtgtgaatagtgctgcagtaaacatacgtgtgcatgtgtctttatagcagcatgatttataatcctttgggtatatacrcagtaatggaatcactgggtcaaattgtatttctagttctagatccttaaggaattgccacactgtcttccacaatggttgaactagtttacactcccac

SEQ ID NO: 36303 - DNA, 201 bp, Homo sapiens
gtccaacactattttctggctcctaaattcctaatatattcatttgaatatttaagatattcttattttgaaataaattatattaatagactaacaagtaacgtaaatagtttaatctttcatttcttatagtagtttactagcatttctgtgtgctctgctatcaaatttaactttcttctgcttgaagccattttttat

SEQ ID NO: 36304 - DNA, 201 bp, Homo sapiens
agtccaacactattttctggctcctaaattcctaatatattcatttgaatatttaagatattcttattttgaaataaattatattaatagactaacaagtaacgtaaatagtttaatctttcatttcttatagtagtttactagcatttctgtgtgctctgctatcaaatttaactttcttctgcttgaagccatttttta

SEQ ID NO: 36305 - DNA, 201 bp, Homo sapiens
tagtccaacactattttctggctcctaaattcctaatatattcatttgaatatttaagatattcttattttgaaataaattatattaatagactaacaagtaacgtaaatagtttaatctttcatttcttatagtagtttactagcatttctgtgtgctctgctatcaaatttaactttcttctgcttgaagccatttttt

SEQ ID NO: 36306 - DNA, 201 bp, Homo sapiens
ctagtccaacactattttctggctcctaaattcctaatatattcatttgaatatttaagatattcttattttgaaataaattatattaatagactaacaagtaacgtaaatagtttaatctttcatttcttatagtagtttactagcatttctgtgtgctctgctatcaaatttaactttcttctgcttgaagccattttt

SEQ ID NO: 36307 - DNA, 201 bp, Homo sapiens
ggttaaagtgagccaagatcatgccactgcactccatgttgggcaacaggagcaaaactccaactaagatagaaagaagaaggaaggaaggaaggaaggaaagaaagagggaggggagggaggaaggaaggagggaagaaaagaaagaaagaaatttataatagagcagaatgaataagacaagtgcatctatacatggct

SEQ ID NO: 36308 - DNA, 201 bp, Homo sapiens
gggttaaagtgagccaagatcatgccactgcactccatgttgggcaacaggagcaaaactccaactaagatagaaagaagaaggaaggaaggaaggaaggaaagaaagagggaggggagggaggaaggaaggagggaagaaaagaaagaaagaaatttataatagagcagaatgaataagacaagtgcatctatacatggc

SEQ ID NO: 36309 - DNA, 201 bp, Homo sapiens
aagccattgcactccagcttgggtgacagagtgagactccatctcaaacaaacaaacaaaaaacagagtagaatcaggtcatttcgccttaaagacaccayttcactccccttttaaaacattgcttctttttagggtaccttgcctgttgaagcccgagagaacagcttatatcttacagcctttactgtgattggaatt

SEQ ID NO: 36310 - DNA, 201 bp, Homo sapiens
gttttacagaaagcattacatcacagtatacatgtctttttgaaatttctcttttcaggtcaaaactgatgctccagatcttccagaagaaaatcaggccrgggaaggttaccgagcaatagcatactcatctctcagccaaagttacctttatattgattggactgataaccataaggctttgctagtgggagaacatct

SEQ ID NO: 36311 - DNA, 201 bp, Homo sapiens
gaacaatgatagatattagagaccacctagtccaacctactcatcggcagttgagaaagctgaggactaagtaaggtgaattcagtttcccagtgtcacasgctaataaattgtagagctgggtctaaaactgatagctgggactgggatggaagaatgatccagtgcccccagcttctctgtcttatctttgctaaatcc

SEQ ID NO: 36312 - DNA, 201 bp, Homo sapiens
agtatcatctctgaatgagaaagtcatggaagcattttgatttgatgagtagctaacaacatgacagcttttatggaattgttatttattaaaatttacgtaagtgattattcaaattcctcttcaaaaaagcacaaaagaaactccagataataaactttcttgacattttttgcttattttaacttggtgtttagtttt

SEQ ID NO: 36313 - DNA, 201 bp, Homo sapiens
atttccattaggtcagtcctcttttcacccccatattgcttgctccaggatagtgggatctgagggtagttcatatcaattgataggtggttgcttgacakagaaactgaagtatcttctcttgtttccagaaaatcgacacagctctaattaaagctgacaactttctgcttgaaaatacactgccagcccagagcacct

SEQ ID NO: 36314 - DNA, 201 bp, Homo sapiens
atagcccataatcccatcattcttgtctgtagtctttgtaaagttgcttgacaccacagctgtataaacactgaagtaatggagggttttttcccctttascatttgttattgtgaaatttagaaatttataaagcaaggaaaataatttgaaaggtatgttttacagaaagcattacatcacagtatacatgtctttttg

SEQ ID NO: 36315 - DNA, 201 bp, Homo sapiens
agggttaaagtgagccaagatcatgccactgcactccatgttgggcaacaggagcaaaactccaactaagatagaaagaagaaggaaggaaggaaggaaggaaagaaagagggaggggagggaggaaggaaggagggaagaaaagaaagaaagaaatttataatagagcagaatgaataagacaagtgcatctatacatgg

SEQ ID NO: 36316 - DNA, 201 bp, Homo sapiens
gagggttaaagtgagccaagatcatgccactgcactccatgttgggcaacaggagcaaaactccaactaagatagaaagaagaaggaaggaaggaaggaaggaaagaaagagggaggggagggaggaaggaaggagggaagaaaagaaagaaagaaatttataatagagcagaatgaataagacaagtgcatctatacatg

SEQ ID NO: 36317 - DNA, 201 bp, Homo sapiens
aagccagccaaaagagaaactgtcttaactttcatagtaagtattttatttatttaaataatactttaattcatttttcaggacaagaatctcatttcatwaccctgtcctcacactacactaaatcattcaatgttccataaatggttattgaacatctgcaatgagtatagaatcatagatctatacctctgtaataca

SEQ ID NO: 36318 - DNA, 201 bp, Homo sapiens
gagaattgcttgaacatggcaggcagaggttgcagtgagatcgcgccactgcactccagcctgggcaacagagcaagactgtctcaaaaaaaaaaaaaaaagagaaaaaaaaagaagacgatgtaatatcctcatccattctaatcgtagagtaaaatgagagaagtttgctataaatattggcccatttctgcaagatag

SEQ ID NO: 36319 - DNA, 201 bp, Homo sapiens
tctgtggccagtccctgctctctgttcccgctcaaacatctttcctcattccctaatgtctttccagtaaggtcgccctttcccaggcagcttctttcccmctaaatgccattcctacccttgggcacctaccagctggggaggagcatgatcacaattacctttaaatttgtaacagttgtcaaagggaagtgtaagcaa

SEQ ID NO: 36320 - DNA, 201 bp, Homo sapiens
tcacatggtgggtatactataatttattgaaccatgtttctattaaagacatttgggttgtttacaggttttcactattataactgattttgcaaagtctscatttatgcatacatatcttcctacatgtatatttctgtaggatagatgttttgtcttggagtgaactaactgggctaaagggcatggacattttacctt

SEQ ID NO: 36321 - DNA, 201 bp, Homo sapiens
ttgtccagtaagcagtgtaatatccagaggctgggaccttcctcggttatcaaggctttccttaagaatggcttcatgtctcatgcctgtaatcccagcaytttgggagtccgaggtggggggatcacaaggtcaggagtttaagaccagcctggccaagatggtgaaaccctgtctctactaaaactacaaaaattagcc

SEQ ID NO: 36322 - DNA, 201 bp, Homo sapiens
ttacttctccaatcctcttctataaagcaaagatattgcactaccttatctcaagttttctgccagttctaattatccacaattctgccgtacagaaaaargctgttatcaaaaattcattcatttgacttcattgtcaggaggcctaattccagattatcaatatacaaaagaaagcaaggagaaatgcaatcttgaata

SEQ ID NO: 36323 - DNA, 201 bp, Homo sapiens
ctcctccaagcacacggattctctttcctgctgtgcagcctgtggttggaggaggggtggtataggcaatacagggagatcttcccccctacccccacccyatcttcaatgcctctttccttatcattacggtaaaagtaggcactgtgatcactcacctgattttatggcttttatgaaggtgctgtcttgcgtggatag

SEQ ID NO: 36324 - DNA, 201 bp, Homo sapiens
gctgtaaagttgcctttacattatttcttttaaacccactagcttttctgcagacagaatgcttcatgaatttaagataatcataactcagatagagataycaaaggccatttctccatcaggttcctgtagtggttttcatgtctcaaaatcctgattcaagatgggcttgaggcttggaaactgagatactaagacagt

SEQ ID NO: 36325 - DNA, 201 bp, Homo sapiens
tgagacagggtctcgctctgtcacccaggctggaagacagtggtgtaatatcggctcactgcagccttcgcctcccaggttcaagcaattctcccacctcrgcctctcaagtagctgggattaacaggcgtgcaccaccacacctggctaatttttgcatttttaataaagaaggtgtttcaccatgttggccaggatggt

SEQ ID NO: 36326 - DNA, 201 bp, Homo sapiens
agaatatactcacaacaaacatctttttctttgtttgtgtgcttggattttgcaatgtttcaaaggcattcttctgaacttgaattctcatcatagaggtrcaatgtctaaaaacatgcaatatataagagagttactgaatatatttttcttgatgaggttttccttaatgatgtgatttcatctcgtgaatttttttct

SEQ ID NO: 36327 - DNA, 201 bp, Homo sapiens
aactgtcagatgctttaaaggatttaattgctgataaattaattccattgttactaaaaacttcctgcttttaccagactcttaaaatgtcacaatgttggcaaaagcctggaataattctgccaggtggggtggtgggtgccctccaagcttgttgggccacttgaattagtcgatcactatgcccttttgggttaaaac

SEQ ID NO: 36328 - DNA, 201 bp, Homo sapiens
acattttttcctgtagagttgtttgaactccttatatattcttgttattaatctcttgtcagatgggtagctgcaagtattttctcccattctgtaggttktctgcttactttattgattcctttgctgtacagaagctctttaacttgatgtgatcccatttgtccattttggctttggttgtctgtgtagtggggtatt

SEQ ID NO: 36329 - DNA, 201 bp, Homo sapiens
tcccaggttcaagtgaatctcctgcctcagcctcccaagtagctgggattacaggcacccgccaccacgcctggctaatttttgtatttttagtagaggcrggttttcgccatgttggccaggctggtcttgaactcttgacctcaggtgatccacccacctcggcctcccaaagatctgggattacaggtgtgagccagc

SEQ ID NO: 36330 - DNA, 201 bp, Homo sapiens
tcttttagttatttttaaatgtacaattaaattattattgactgtagtcaccctgttgtgctgtcaagtactaagtcttattcattctttctattttttgkacccataaaccatccccacatccccctcatcctcctactacccttcccagccttctactctatatctccataagttaaattgttttgatttttagcaccc

SEQ ID NO: 36331 - DNA, 201 bp, Homo sapiens
tttttttttttttttttcagtaggaatctggctctgtcacccaggctggagtgcagtggtgcaatcttggcttactgcaacctctgcctctgggttcaagygattctcctgcctcagcctcctgagtaactgggattaaaggcgcctgccaccacacctggttaatttttgtatttttagtagggacagggtttcaccata

SEQ ID NO: 36332 - DNA, 201 bp, Homo sapiens
cttaccttcctcactaatgcaaatgcagatgactcccaagaaaatggtaaaatgctcagcatgtttattactgaaaatcccattgatcatttgccccccaratctcatttttatccttcttcccaaatattctgtaccctgatcttagaatgccaagactacataactcacctgtataaaatgtttcactggccttcaaga

SEQ ID NO: 36333 - DNA, 201 bp, Homo sapiens
tttttttttttaatcttaaaccttcaatttagaatctaaaccctggctttaaatccccaaataagatgcactccacttattcatctatttttttttaatcrgtgaaacaaaaggggttttagtgacagtgtgatgactttgaacagtttttgggttcaaattttagctctctaatttactagttgtgtgattttgaattaa

SEQ ID NO: 36334 - DNA, 201 bp, Homo sapiens
tgataaagggaaactgtttatggactagataccaaatccatgtatgcagttctggtctctaaggacaatttaagggacctctgagggcattttggcttcaygtgattttttttttttaatcttaaaccttcaatttagaatctaaaccctggctttaaatccccaaataagatgcactccacttattcatctatttttttt

SEQ ID NO: 36335 - DNA, 201 bp, Homo sapiens
tatgcctagacccagttcggataagtgaattttattgtcaaaaaatggggaagcaaaatcctctcctgagaattgaatcctatcttgcctgttccaattcygtagctgagcaacatccctattgcatcatttatattaaacagaggtggatcgatgaagcctgttggtgaaaccaagaaaaaaacttacagaaaatattaa

SEQ ID NO: 36336 - DNA, 201 bp, Homo sapiens
tagccttgtagtatagtttgaagtcaggtagcatgatgcctccagctttgttctttttgcttaggatgaaagacactttaaagtgcctcaagtgctttacrtaatttcaaattgttacattttatctgaatcctgttattgtaaccatgttagtaaaacagttttatgctattgtctgacagatatttttataataaagta

SEQ ID NO: 36337 - DNA, 201 bp, Homo sapiens
gccaaagttacctttatattgattggactgataaccataaggctttgctagtgggagaacatctgaatattattgttacccccaaaagcccatatattgayaaaataactcactataattacttggtaagtacataatgatggatttacatcttattcccccacctggaacattttcctttgcctctagagaggcattaga

SEQ ID NO: 36338 - DNA, 201 bp, Homo sapiens
actcctaaaaactgtcaacatgatgcttgccatttccttaggtggattttctgaagaggcagaaatacctggcatcaaatatgtcctctctccctacaaamtgaatttggttgctactcctcttttcctgaagcctgggattccatatcccatcaaggtagattgggtgagggggtagacgttgctacatatgatcatctt

SEQ ID NO: 36339 - DNA, 201 bp, Homo sapiens
aaatagactcctttctctcactatgtttttgcctccagtgtgtctcatttgcttccctctgtctctgtgttgtctttgtgcataactctgttcaatctctygtctctgtattgctctctgttcttttcatttttgcttctttccgtccctgaatctctttttttctgtcttttttgcttactcctctgcattcatttttct

SEQ ID NO: 36340 - DNA, 201 bp, Homo sapiens
acactgaagcatttgatgcaacaatctctattaaaagttatcctgataaaaaatttagttactcctcaggccatgttcatttatcctcagagaataaattycaaaactctgcaatcttaacagtatgtatttatcctttattttctttatatatatatacagaatattctcaataaaaatgtgtacaaagtttgaatattg

SEQ ID NO: 36341 - DNA, 201 bp, Homo sapiens
tctctctttcaccttcttttcctcctctaaatgctgacagtatagaattgaaacattcatgtggtttttagatttttatctatcattatatattttattayaaataatatattttattatgttgattaaatggaaatgtttattccctgcccttaatttagaaatccagagcaaaatttttttttgttctttgaaaatgtg

SEQ ID NO: 36342 - DNA, 201 bp, Homo sapiens
tcccatctgcagcagcagtgttgccataatacctttgtcactttcccactttaaatagaatcttcttgcttacttgtccccaatgtaggtaacaactgtakttcacaaaaccagtacctctgaggaagtttgcagcttttatttgaaaatcgatactcaggatattgaaggtaaaaacagcaggatttacgctgtaatttt

SEQ ID NO: 36343 - DNA, 201 bp, Homo sapiens
cttgctgattgctgacaggacacaatcaatgccattgagggcctgacggaatattcactcctggttaaacaactccgcttgagtatggacatcgatgtttyttacaagcataaaggtgccttacataattataaaatgacagacaagaatttccttgggaggccagtagaggtaaatgaagaactttctgtagtattttac

SEQ ID NO: 36344 - DNA, 201 bp, Homo sapiens
tgtcagatgctttaaaggatttaattgctgataaattaattccattgttactaaaaacttcctgcttttaccagactcttaaaatgtcacaatgttggcaraagcctggaataattctgccaggtggggtggtgggtgccctccaagcttgttgggccacttgaattagtcgatcactatgcccttttgggttaaaacact

SEQ ID NO: 36345 - DNA, 201 bp, Homo sapiens
gggccacttgaattagtcgatcactatgcccttttgggttaaaacacttttttttcctatgtaatagcgtatgtagttctcgctattcaaattagatactyttgtgatatacacttagtaatccagtttatatttgtaagtttttaaataaaataatttttaaaaatcactcaaaagcatgtatagactcacttccattat

SEQ ID NO: 36346 - DNA, 201 bp, Homo sapiens
cagttctaattatccacaattctgccgtacagaaaaaagctgttatcaaaaattcattcatttgacttcattgtcaggaggcctaattccagattatcaayatacaaaagaaagcaaggagaaatgcaatcttgaatagtctatcctttggtttttacaaattggggacaaaatgttccagaaaggcgggtggaatatgct

SEQ ID NO: 36347 - DNA, 201 bp, Homo sapiens
cttccattagcagtgcacgagggttctcgtctctccacaacctcaccaacacttgcctctctaaaatgtggcatttttaatgggtataaagcactatctcwttattgttttaatttggattcttctggttactaatgattttaagcatttcttcatatacttgtccatttgggtttcccatctgtcaattgcctattcata

SEQ ID NO: 36348 - DNA, 201 bp, Homo sapiens
ccctcatttcctgacacaccatcctcattggtttaggcaggcccctctcgttttattttttccttcatcccggaccccattcccattccccttcctccaartgtacccactcaaatgtgtttgctgtatacttttgaatagaaaggtaatgttgttttgtatgtatgtacctctttaatctatgtatatgtaacattgtgc

SEQ ID NO: 36349 - DNA, 201 bp, Homo sapiens
tggatttacatcttattcccccacctggaacattttcctttgcctctagagaggcattagaattatcctttatacttttattcccaaagcactttcaagarcatcatctaacttgaacatcagtttctcaaaaaacctttgaaatagggcatgattttcatgaccatttcacagatgaggaaactgagggacagagaagtt

SEQ ID NO: 36350 - DNA, 201 bp, Homo sapiens
agtatctttgtatcaaaaattattttgattatgttataaataataaaaagccaatgctgagggtcctccatgacttttgtcctttaaaaggactatgcatrttactcaagtttaagaaacactaatctaaaaaatttctagtcaaacataggaattctttaatgttcttagcagtaaatgctcatatctcttaacaaattc

SEQ ID NO: 36351 - DNA, 201 bp, Homo sapiens
accctagaatcacaaaatgttagtactggaaaggatctttttgatcatgtgcaaccctgctgttggatataaaagaaagtggcatgtccaaggttgcacaktgaattatagacagtcatgtcagcactccctgttcaggctctttgctttgcttcctggaagggattggtaaatatggtttataatgtctaaagctaacag

SEQ ID NO: 36352 - DNA, 201 bp, Homo sapiens
tagcaagatgagttagaatattatctttgccattgtgtggctcaggaaatggaggcttctaacctctcttttgattaactaattttatccagagttaatamgtggtggtactggtatgtgaaccagtgtgtacctgactccagagcatgagctaataacacttctgctgtctgagggtagatattgctgccatgatatcat

SEQ ID NO: 36353 - DNA, 201 bp, Homo sapiens
gtgtgtatatatatatatatatggcagtgagaggtagatgttaaaggaaaaaaggtgtatctatttttgtttctcatattcaagggacttattcccagaarcgattgcctcattttctcctttatccagtcctaaaccaatcaaagaaatacagaagttagatagcagaagaccttatcacacctactccttgactgactt

SEQ ID NO: 36354 - DNA, 201 bp, Homo sapiens
ttggtggcaaattcttaaaaagccttaagatggagatatcattccttgaaaatagactcctttctctcactatgtttttgcctccagtgtgtctcatttgyttccctctgtctctgtgttgtctttgtgcataactctgttcaatctctcgtctctgtattgctctctgttcttttcatttttgcttctttccgtccctga

SEQ ID NO: 36355 - DNA, 201 bp, Homo sapiens
cattaaaatgtaaatacctcaaaggcatgaactaaattcagattactgttttatatccaggacttggcctaggatactgaaaataaatgtgttgaacgaawgcacactgcctctgaactcttataatgccttattggtacaattattacagtgcagtgtaatttatttacttaactatttcttccactagattgtaaactg

SEQ ID NO: 36356 - DNA, 201 bp, Homo sapiens
taacgtattgtttctttacatattttcaaattttggtatgtccagaagatacaaaattgttcaattgtttaaaaatgcagaacatatatattcttaaattkctacttaccataaaaaacagccttggttttgctcataatagttttctctgtctgttttgtcttctgattcaaacagtgtaatattaattttttctctttc

SEQ ID NO: 36357 - DNA, 201 bp, Homo sapiens
ccagcctgggcgacagagcgagactccgtctcaaaaaaaaagaaaaaaaaagaaattgtgtctatgctcggtgccttttcttcctggaggctaggtctgayggtgtactcagaaactaaaggcacaaaacctctaaaaggaaagtgagaattcagaggcaaaaagcttaacctgatttggacaacctcattgtcccttcca

SEQ ID NO: 36358 - DNA, 201 bp, Homo sapiens
gtacattcttgaaaatactacatgttccatagtgcagaattaaacctattattttattactgctatcatttctccaacttcatcttgtgccacttgccccrtggcaaattatgtgctagccatggtctggcatgtccagtgctttcctacctccgtgcctttgcacatgtcatcccctctacttggaatgggcttcacctg

SEQ ID NO: 36359 - DNA, 201 bp, Homo sapiens
gttcatgctcctaggagaatctaatgccaccactgatctgacaggaggcagagctcaggtggtaatgctcctttgccccactgctcacctcctgctgtgtrgcctggttcctaacaagccatggactggtatttgtccatggcccaggggttggggacccctaccatacacaattcaaaattaaagcaatactaaacttaa

SEQ ID NO: 36360 - DNA, 201 bp, Homo sapiens
attatgctactgataagtcaataagaaccaaaatctttataaagggtggttccagaatattcttttaggggcttctaaacactatgtatttttgcttgacrgctaccatcacatagaccagcagtccccaaccattttggcactagggacaggttttgtggaagacaatgtttccatggaccaggattggggtggggatgg

SEQ ID NO: 36361 - DNA, 201 bp, Homo sapiens
ttcagaaaaaaatacataaataatttatactttggtggggaggaaggaaaattatttcagaattgtgctttaaaataagtgatgagctgttgaaatagatytggattgttttgacaaacaggtgcaggttaaagattcgcttgaccagttggtaggaggagtcccagtaacactgaatgcacaaacaattgatgtaaacca

SEQ ID NO: 36362 - DNA, 201 bp, Homo sapiens
atagaattaaatctttctataagctgagaatacacttctctttactaaattaaacataagtaaaccaggtgtggtggagcatgcctaaatagttccagctwcttgggaggctgaggtgggaggatggcttgaggccaatagttcaaggttgcagtgcgctatgattgtgcctgtgaatagccactgcactccaacctgggc

SEQ ID NO: 36363 - DNA, 201 bp, Homo sapiens
caatgaaggaggctgccaaagttttagctgcttctgaaaagtcttgtctcatacaaatgatcttttcttttctttttcaaatgaacttttaggttcatctrtctcctgatgcagatgcatattctccaggccaaactgtgtctcttaatatggcaactggaatggattcctgggtggcattagcagcagtggacagtgctg

SEQ ID NO: 36364 - DNA, 201 bp, Homo sapiens
gctccaggtaagccacaaattataagtcacaattgaattttcttttcaatgaaggaggctgccaaagttttagctgcttctgaaaagtcttgtctcatacmaatgatcttttcttttctttttcaaatgaacttttaggttcatctgtctcctgatgcagatgcatattctccaggccaaactgtgtctcttaatatggca

SEQ ID NO: 36365 - DNA, 201 bp, Homo sapiens
tgtactcactgtttagttcccacttataagtgaaaatatgtgatatttggttttctgttactgtgttaattcacttaggatagtggctttatttctgggtkctgtaacctgttccattggtctacgtgtctttttttgtatcagtaacatgttgctttggttactgtagccttgtaatatagtttgaaatcaggtagtagg

SEQ ID NO: 36366 - DNA, 201 bp, Homo sapiens
aactcaagctgcacattgaagtcagctggagagctcttagagctgtccaaatgtcccgggctccagaggtcattctaatggtagccagggttgagaaccamtgatgttaaaccctctcccaactaaataccgaggcctcaattggccactgtattagtttcctgttattgctaggtaacaatttattgcaaatgtaatggt

SEQ ID NO: 36367 - DNA, 201 bp, Homo sapiens
gtacagaggcagggaaacaccatcgagagggttgttgaatattataggggcaacatgatgtgagattttactttcacctagtctttttatcatataagacmagaggctcagcactgaaccactagcttctgttccttttctcttatacttcccagttaatggaattcggtttattgtccagttccatttagtctttcctaa

SEQ ID NO: 36368 - DNA, 201 bp, Homo sapiens
ttaaagactcttattcacttatttattatattttctaacctcttttttattttagctacaagcccagcagggaagaatcatcatctggatcctctcatgcrgtgatggacatctccttgcctactggaatcagtgcaaatgaagaagacttaaaagccgtatgtgttttcttttaaatcgtgttgtgaatgcttcattttc

SEQ ID NO: 36369 - DNA, 201 bp, Homo sapiens
atgctgtaatcaaaatataggcaaagtgcttctggattgacctctgattgttggagtgggaaggttctgcagagattgttgttggtgatgacgatgatgaygatgatgattatgataataaagtggatgttgtgttgatgttacagcttgtccaactataccagaaagtctagctgtttgctaggctttaaagtctgctct

SEQ ID NO: 36370 - DNA, 201 bp, Homo sapiens
ttccttataagttcttctccgaaataactcctcctttttctccttttaaaaagttgataaatggaattgctcaagtcacatttgattctgaaacagcagtsaaagaactgtcatactacagtttagaagatttaaacaacaagtacctttatattgctgtaacagtcatagagtctacaggtaagtgtgtgtgtgtgtgtg

SEQ ID NO: 36371 - DNA, 201 bp, Homo sapiens
caacgctggggaccgggcagatttctggagaatgcgtggccagaggtctggggtgaagaagaacctgaggaaaagtcgggaagacctcacagctgttgtgyctgtcagcaccaagttcccagcttatgagagggttttgctgcgagaaggtgaggaagtcacatggggcctggaaatgaactgactgggctctgagcctgt

SEQ ID NO: 36372 - DNA, 201 bp, Homo sapiens
ttcgagagtccaggttgctctgtctttctgagtttgagtctgtctaggaaggataactggggaagaagatcctgactgaaagtatcctggggccaggtgcrgtggctcatgcctgtaatcccaccactttgagaggctgaggcaggtggatcacttgaggccaagagttcgagaccagcctggccaacacggtgaaaccct

SEQ ID NO: 36373 - DNA, 201 bp, Homo sapiens
gtgagttctgcacatttcatatattctacagtcatgttcttgattttacggatcatggatcttatttattttcacctacacacagttttggcttttttttycccttgaggtacataatgtattatagatactaactggcaataattgctatgttaacaaagatttgcatgctattgtattttttgattaaggactgtttag

SEQ ID NO: 36374 - DNA, 201 bp, Homo sapiens
aaagtgcaaaagctgccttggcttgttgaagccttgacctcacaggctcaggtgattctcccacctcagcctcccaagtatctgggactatggatgtgcaycaccatgaccagctatttttttctatttctagtaaagacagggttttgccatgttgtccaggctggtcttgagctgctggactcaagcaatctgcctgca

SEQ ID NO: 36375 - DNA, 201 bp, Homo sapiens
tgcactgaatggaaggaaggtaaaggggagatcagagataggagaagctgtgttgagtgtctagtactgtaacttgtactaagctgaatgcaacaaacgaygcttttgtctttcagtgtatagagacatcctggcttgtggcagaggggattcgttttttataagaagccactttgaatgtgagaaggaaactccacagag

SEQ ID NO: 36376 - DNA, 201 bp, Homo sapiens
agggagaggagcaaagtttgaaaaactacttcttgggtactgtgttcggtacttgagtgacaggatcattagaagcccaaacctcagcatcagacaatacmcatatataacaaacctgcacatgtactcctgaatctaaaataaaaataaaattaaaaaggattggctagcactgggaagagcagtcttttcccgcccagc

SEQ ID NO: 36377 - DNA, 201 bp, Homo sapiens
actctgttaaaaggccttgaaggccataacgaagctttgggtggggggaagtcagaaatccctcatgtattaaatgacttgactttccctacaaaagaagygaaccagtttcccagtaaacatcccaccccataactatttttgaggcattcataggcttaagaccaatgaatttttacatcacccccgggggaattgcat

SEQ ID NO: 36378 - DNA, 201 bp, Homo sapiens
gcagtgagccaagtttgtgccactgcactccagcctgggcaacagagcaagaatctatcccaaataagtaaacaaacaaacaaacaagatatatctcatasagcctttacttattaaaacaaagtatttgatgctatattactttatatatccatttctctaacttttccccttttgtaaacaggataagcatgcactact

SEQ ID NO: 36379 - DNA, 201 bp, Homo sapiens
tgttacagcacagacatattctaatcccaaaaggggtcacgtaatgcagcccttccttttgacagattaaaaaactgaagccaaagtgattataaatgaarttaaaactatccccactttattttcccccctgcttttgtctgagtacactaaatagcgagcgtcttccctcagagagttaaatttgggattcacgtgagg

SEQ ID NO: 36380 - DNA, 201 bp, Homo sapiens
tgcctgttttaaaacctgctctgttgtggtagtttcctaaaatgtgaacagttattcttaaaataatgtatttttacaagtttattaagtaaaaccagaakagtcttaagtagcattgaaagtatttaaaaatatgcataacttagtaattacaatgtttttgtttttgatagcaattcagagtccataaactcccaaagc

SEQ ID NO: 36381 - DNA, 201 bp, Homo sapiens
cacaagccagaccctggcacgccccagcacacgaggtaagggctgcctagtgggtacaggtctaaggcggggacttctcaaggactgggacttgaagaaaraatttcctttacccaaatttcagagtaacaggaggattttttccccacagattgactgtttgccttactcattccatcaaatttaattgtaaagattaca

SEQ ID NO: 36382 - DNA, 201 bp, Homo sapiens
aagagtggtacagccttccatgtgtgctgtcttattaggccataagaaaggccagcacttttgcataatcacaattctgatgtatgactgagcccagactraactatagcgtccctaactgtccaatattgtacatatgttacagcacagacatattctaatcccaaaaggggtcacgtaatgcagcccttccttttgaca

SEQ ID NO: 36383 - DNA, 201 bp, Homo sapiens
aaacttggacactctgaatattggatgatttaaagatttattatttctctttgttaggtgtgataataatattgtgatttttttaaaaacaaagttctttkaggaatgcatactaaataaaatatttatggttgacctaatataatgttgagaatttgcctaaatagtctgcagtgaggggagtagatgggattatagaca

SEQ ID NO: 36384 - DNA, 201 bp, Homo sapiens
ttttgtctctggggtacaaaatctcacttctatttttaagtatcatattttagctatgagatgagcacagtaatctttgcagagtaccataataggaatasagaagtccgtggaatcaaagttaattttcttcgggttgtctaatggatcagtttatttcagtgctgtaaataattaataaccaaggaaattgtaagctca

SEQ ID NO: 36385 - DNA, 201 bp, Homo sapiens
tgaaaatgaccataaagatccatgatgtggtaataattagctattttgatgaagttcatattttcctgtgagactataaggctagtgattgagccaggccraacacctatgtctctctagagattgtgtcattgttctctactcaccatcaatacatgcattaacttacaaagcgaaaggaacttggtttcattatttaaa

SEQ ID NO: 36386 - DNA, 201 bp, Homo sapiens
agcacccacacagtgagacttagatccagtgagagtcagtggtaagacagaggtggcaagagcagcataatgagacgatttttatcagaaaaaccagacaytgagggtcgtaacagtttaatgtcagtttagaaaacaaaaacaaaaaaactccatgaatattttcttctttcctgtttaaagtttagatccctattccct

SEQ ID NO: 36387 - DNA, 201 bp, Homo sapiens
ggaatccaacttttgcctgctactgctgctgtctgtaggaagaagaaaaacaaatggcttctgctttccttcatccttccaaatctcaaacacgtgtacctcgctggtagaaccctgttggcaagagagatgggggatctctggtagaaacagaaactcagtgccagcaaagaagaaatggcatagatgccacctggggtt

SEQ ID NO: 36388 - DNA, 201 bp, Homo sapiens
ccaatttttaaaaattttctataaaatacatttgcatatcacaaatttttatttttaaaaaacaaactttgaattacatgttttcttggaatcttcaaagyactcagtgcatggttcgaagatcatttaagttgacttatggatttagagacccaagtggggctacccttttatgctaattatagaattttaattcctgat

SEQ ID NO: 36389 - DNA, 201 bp, Homo sapiens
tgagaatttcttgttttgggataaaactttttgctttcttacactgcagaaatctatattcttattatgtctaggcttctaacttagaagaaaaagtgttyttcacatgttcttttttcctcttacagtttgaacatgtgtgagtgtttactttgatggcttgagacttttatgaagcatgtcccttatgtggacagcttt

SEQ ID NO: 36390 - DNA, 201 bp, Homo sapiens
accattttttataaacacagatcaatgggactgtaactgagaacatgtctttaacggatgctcgaaaattgatagaaaagtcaagaggaaaactacagctrgtggtgttgagagacagccagcagaccctcatcaacatcccgtcattaaatgacagtgactcagaaatagaaggtaaaggaagaggaggctgtgagctta

SEQ ID NO: 36391 - DNA, 201 bp, Homo sapiens
gaagaggcaggaaaggtagactcaatctgccagacttagagctaaaaaaatttgcctggtatgtttccatgaagaaaattttcctgtagaagcagtggcaygacctctgttacaagtctgcttattgataatgaagctttttctgtgttatcaatttcgttgaatttatatgtatgtatatacatatacacacacacaaat

SEQ ID NO: 36392 - DNA, 201 bp, Homo sapiens
aaaatttgctgttaaatatactcgtacctcttgggtattagatccttcaccaggagtcagtattcattttggtgttcacccactcatctccctattttttwtttatttatttatttatttaatttttttatttctttttgagacggagtcttgctctgttgcccaggctggagtgcagtggcgcgatttcggctcactgca

SEQ ID NO: 36393 - DNA, 201 bp, Homo sapiens
agagtattaaaggaagtgttccgagttctaggttgtgtttctttgatgcctactaaagctgagcacacctgagaccctgggtggagctctacaatgggaayaggagtaagtaatgtaggcttcgagagacaatcattctgctctcagtccttggaagactgttcctaggtatatatggcaaagcagatgaaattatttgag

SEQ ID NO: 36394 - DNA, 201 bp, Homo sapiens
tcttgggtattagatccttcaccaggagtcagtattcattttggtgttcacccactcatctccctattttttatttatttatttatttatttaattttttwatttctttttgagacggagtcttgctctgttgcccaggctggagtgcagtggcgcgatttcggctcactgcaagctccacctcccgggttcgagccattc

SEQ ID NO: 36395 - DNA, 201 bp, Homo sapiens
tcatctccctattttttatttatttatttatttatttaatttttttatttctttttgagacggagtcttgctctgttgcccaggctggagtgcagtggcgygatttcggctcactgcaagctccacctcccgggttcgagccattctcctgcctcagcctcccgagtagctgggactacaggtgcctgccaccacacctgg

SEQ ID NO: 36396 - DNA, 201 bp, Homo sapiens
cacttgaacccaggaggcagaggttgcagtgaacctagatcacacccctgcattccagcctgggtgacagagtgagaccccgtccccccccccccccccamaaaaaaaaaaaaagtagcagcagtcagtgcttcagttatattaattgaatgatgaatgaatagtgtatccatctctagatgtattaaaaagaaaaaactt

SEQ ID NO: 36397 - DNA, 201 bp, Homo sapiens
tgacagtggtgggctgtgtacactctctggcctcagcttccctatttgtaaaatggggatggtggtgctaactcacagggttgtgggcattcagggaaaawttgtatatttagtactgggtgtggtgccctgccaaatgttaatgacttccttcctctccagttttcacacttaccttgtctcccatttctgaggtgaata

SEQ ID NO: 36398 - DNA, 201 bp, Homo sapiens
actgtaagtcatttgtgtgaggctgagctggagaactgcactcgtggttctgcatttttttttttttttttttttttttgagacggaattgcactcttgtygcccaggctggagtacggtggtgcaatttcggctcagcgcaacctccgcctcccgggttcaagcaattttcctgcctcagcctcccaagtagctgggatt

SEQ ID NO: 36399 - DNA, 201 bp, Homo sapiens
gtggtgcaatttcggctcagcgcaacctccgcctcccgggttcaagcaattttcctgcctcagcctcccaagtagctgggattacaggcgcctatcaccamgcccggctaattttgtatttttaatagagacggggtttctccatgttggtcaggctggtctcgaactcctgacctcaggtgatccacccaccttggcccg

SEQ ID NO: 36400 - DNA, 201 bp, Homo sapiens
taggtaaaaatataaccagagaagttgctaccaagcatagttgactttgagctgacctaacttttggattatgtactcactaagaacttacctcttattarttaaacaaatacaaggaaataaataacccaataaaaacactcaaaacaagtttatccccaaatagtgtacttgatgctaaggacagacctaaagtttgtt

SEQ ID NO: 36401 - DNA, 201 bp, Homo sapiens
tctcctgtagcagtttgctttgagttgtgggtgccacctccctcactgtctttttctgagggtacataaataaattgcatcctagcttgagatcaggagcmatggtttttagttctctgtgtccaacacaattcttctacacagtgtcttgcccaatacatgtgttggtaatactgacaaacatagttaatcttcttcttt

SEQ ID NO: 36402 - DNA, 201 bp, Homo sapiens
gatgaaaacaaacaaaagggtcagtggcatcttactataaacttctctgttttttctttctttctttctttctttctttcttttttttttttttctttttstgtttttccttcctaataggtgaacacacaggatttcagaggattagtgcgggaggatgccgttctctacctgttagaaatccctaaaggtgaaatggtg

SEQ ID NO: 36403 - DNA, 201 bp, Homo sapiens
tggtcatggtcaatggcacccccatggaggatgtgcttcattcgtttgcagttcagcagctcagaaaaagtgggaaggtcgctgctattgtaagtactggktttgctttcagcttgccttaatagcattttggttttttgcccagaagaaaattaccccttgcttttaagcatttgacagaattacataacctagggaccg

SEQ ID NO: 36404 - DNA, 201 bp, Homo sapiens
agactgatttctgtaacggatgttcattcttttcactttatagtcacatggatgccactgtaagagctccgtgtcacataaggtgttgtttttctggaagsgccttccagattctgtatctattgctctgtgattctaggtacttttctaaaggtataagcttgagaaattagttttcaagtctgtaagttaatgtagagc

SEQ ID NO: 36405 - DNA, 201 bp, Homo sapiens
ggatttgaatccacactttctgactacagactctacgatgtgatctttttttttaaaacagctttattgagatataattcatataccatacaataaaagtrtgcaaccagtggcttttagtactgtatattcacagagttgtgtggccatcaccacaattcattttagaacattttcttcaccccaaaaggaaactgcata

SEQ ID NO: 36406 - DNA, 201 bp, Homo sapiens
aggcaaggagaaattaagtaactcgcccaaggtaaagggtggagcatggatttgaatccacactttctgactacagactctacgatgtgatcttttttttwaaaacagctttattgagatataattcatataccatacaataaaagtgtgcaaccagtggcttttagtactgtatattcacagagttgtgtggccatcacc

SEQ ID NO: 36407 - DNA, 201 bp, Homo sapiens
tgtaagttaatgtagagctgaaaggtgacttaattctaagagttgctgctttaatgtataattttatggaacctaatgagtgttttctttttaaagtcatyccactttattattaataaaataaaaggtaatatataaatctggctgatagatggggttacttttttccctgtctttagcttcctttgtgttctgataaat

SEQ ID NO: 36408 - DNA, 201 bp, Homo sapiens
gcagaagtgtctgtcctattataagtttattttatgaaacatgagctataatgtagtccttttttttttttttttctttttttggagacggagtctcggtygcgcctggctaattttttgtattttttagtagagatggggtttcaccgtgttagccaggatggcctcgatctcctgacctcatgatccgcctgccttggc

SEQ ID NO: 36409 - DNA, 201 bp, Homo sapiens
agcgtttggcatccctgccatatggatgtgtcactgtgtgagatgacaacaggatttgctggaaatgtgggccactattgtatccgccttacgtaaccacrtggagtgatggaaatgggtgagcagcccggaatgtaggcggtggcctggcccatgcatctccagagaccatgaagactgctcaagccctacataggatgt

SEQ ID NO: 36410 - DNA, 201 bp, Homo sapiens
aagaaccgagtttttcttaactttagaatgtgaattttttcctccttcaaatactttttcctataacccagacctattttactttccagggaccctactaktactgccctaaggtaatttgctagaaatggagtggtcaagatgtattgattaacgttttaggcatacttctgtagtactacttccgaaggctccttgcag

SEQ ID NO: 36411 - DNA, 201 bp, Homo sapiens
caagatgtattgattaacgttttaggcatacttctgtagtactacttccgaaggctccttgcagagaaatttgaagtgataaggaaggcaaatattcgaartggaaagataagtataaccagtgactatttcagccactggtttagcagttcaagtgagctggctgtttgtaaagcttgcttagtaaatgaatgtgctaga

SEQ ID NO: 36412 - DNA, 201 bp, Homo sapiens
ctgattggattatatcacagcaatgaactgtcctgaaaaaacagctgtaacataccactccagactgttaccagacttagtcggctggctttatatttgtsttgtcaaaactgggatgctgtcatttctgtttctctgtctctttcgtctgttccaatttgagatatactgactatgttagtgtagtctgctacatggata

SEQ ID NO: 36413 - DNA, 201 bp, Homo sapiens
actcctgccagtcactgtgggggatacaaagatgaacaagattcaatttctgcatttaggggtctagtggacctgaaactgttagactttactctgcaatmctgtgtcgggattcctgagactgagggagggaatgtatgatgccgatgcacactctgcaatacagaaatttagcaaagagtgggattggtcctatatgca

SEQ ID NO: 36414 - DNA, 201 bp, Homo sapiens
caggtgtgtgccagcatgcccagctaatttttgtattttttttgtagagaagaggtttcaccatgttgcccagactggtcttgaactcctgggctcaagckatccatccactttggcctcccaaagtgctggaactacagactacagaactacagagccaccgcacccggcctatattttgttttaaataaagatgagcaa

SEQ ID NO: 36415 - DNA, 201 bp, Homo sapiens
ggagagcaatgccttacatcaggaatacaaccaaaatgtctaagtccggagactcgaggcaaagtgggaaacgttactcacagtgctttttatccagaggygtggacttagttactccaaaggagtccagaagcataacacttctggagaggcatctactggacttgtttttccacgaaacttctagacttgttttgatca

SEQ ID NO: 36416 - DNA, 201 bp, Homo sapiens
gtactgtgttcggtacttgagtgacaggatcattagaagcccaaacctcagcatcagacaatacccatatataacaaacctgcacatgtactcctgaatcwaaaataaaaataaaattaaaaaggattggctagcactgggaagagcagtcttttcccgcccagctagaaagttgtggttttttttttttgttttttagag

SEQ ID NO: 36417 - DNA, 201 bp, Homo sapiens
tactgtgttcggtacttgagtgacaggatcattagaagcccaaacctcagcatcagacaatacccatatataacaaacctgcacatgtactcctgaatctaaaataaaaataaaattaaaaaggattggctagcactgggaagagcagtcttttcccgcccagctagaaagttgtggttttttttttttgttttttagaga

SEQ ID NO: 36418 - DNA, 201 bp, Homo sapiens
cgttttttataagaagccactttgaatgtgagaaggaaactccacagagcctggccttcaccagaggggaggtcttccgagtggtagacacactgtatgayggcaagctgggcaactggctggctgtgaggattgggaacgagttggagaaaggcttaatccccaacaagagcaggtaacagagatcgcattctcacatac

SEQ ID NO: 36419 - DNA, 201 bp, Homo sapiens
attcgaaatggaaagataagtataaccagtgactatttcagccactggtttagcagttcaagtgagctggctgtttgtaaagcttgcttagtaaatgaatrtgctagaaatatattgacagaatttggttttatctctttttctccagacttttagtcggccagggctaacaatggatgtccaaacagtttacagtggctg

SEQ ID NO: 36420 - DNA, 201 bp, Homo sapiens
aatatacataacataaaatttaccatttcaaccacttttttcttttatttattttgttttgttttgttttgttttgagacagggtctccctctgtcacccmggctggagtgtagcagtgtgatcacagctcgcagcagcctccacctctcaggctcaggagatactcccacctcagcctcctgaatagctgtaaccacagg

SEQ ID NO: 36421 - DNA, 201 bp, Homo sapiens
cctgcacatgtactcctgaatctaaaataaaaataaaattaaaaaggattggctagcactgggaagagcagtcttttcccgcccagctagaaagttgtggttttttttttttgttttttagagacttctccatttgcccaatttaaagtgcaaaagctgccttggcttgttgaagccttgacctcacaggctcaggtgatt

SEQ ID NO: 36422 - DNA, 201 bp, Homo sapiens
tgcttggttttaaatcaatgtatgtatttctgacccaaatatctataaatatttcagctagtagtgttacagctggaggaagggacccgtggtgttgcttygtgtattttgatttgacaatattctttagaaataaattgtcaagtgaactaatattacacaaaagttagggaaagttaagagaggcagctgaaattccat

SEQ ID NO: 36423 - DNA, 201 bp, Homo sapiens
gtccaggctggtcttgagctgctggactcaagcaatctgcctgcattggcctcccaaagtgctgggattatagacatgagccatgagcctaggcagaaggtttttttttttttaatatgtcaaaacatcacaatatacagaagaattaaaaatatttacagtacaggccaggcacaatggctgtctgttgtaatcccagtg

SEQ ID NO: 36424 - DNA, 201 bp, Homo sapiens
cactggcctggattccacctcttgttggatgggtggtcagttttaacattagggggtgttgattgtgagctcttgagagcagggctggttctttgcattcytaggtaggcatgatgtagagtagttgctcagtaaataggggaaggtgaaaggaagagaagggagaaggtgagtctcaaaagactggaatgtgataagcac

SEQ ID NO: 36425 - DNA, 201 bp, Homo sapiens
ttagaaaataaggttggttgagaatgtgccatcgttctgggagtttgaatgggtgatatgagaacgttagggaatttgtctaggcctctagaattggatcrcttctccctcggggagatagctcacacacagctgtgctgcagggaggagagagggagattctattacctgtggccgcttttattttagaagcttttggtg

SEQ ID NO: 36426 - DNA, 201 bp, Homo sapiens
gagtagttgctcagtaaataggggaaggtgaaaggaagagaagggagaaggtgagtctcaaaagactggaatgtgataagcacacgtttatcacactgggkgtgtattctctcccttttcttagagtattccttgcctcctgaaaaaagcactttgcaggaaatatggagatcttctgaacctgtggctttgtgttattgg

SEQ ID NO: 36427 - DNA, 201 bp, Homo sapiens
ctataggaaaaccacaagttttccaactgccagctttctgacctgaagaagtaacaccattttattttaatttttaataaattttttcttttctttttttyttttttttcagacagagtcttgctctgtcacccagtctggattgcagtggtgcgatctcagctcactgcaaccatcaccttccgagttcaagcaattctc

SEQ ID NO: 36428 - DNA, 201 bp, Homo sapiens
aaataggggaaggtgaaaggaagagaagggagaaggtgagtctcaaaagactggaatgtgataagcacacgtttatcacactgggggtgtattctctcccytttcttagagtattccttgcctcctgaaaaaagcactttgcaggaaatatggagatcttctgaacctgtggctttgtgttattggactgagaagtccaaa

SEQ ID NO: 36429 - DNA, 201 bp, Homo sapiens
aagaacatatttcctgcatctcacaaaatgccgttttaactttaggttttctttatgatgaatgcagaccatacttatctcagacagctgcaacataaagytttaaaagactgcttaacattttgtatatatttagtgtaaatcactcattttgtctctggggtacaaaatctcacttctatttttaagtatcatatttta

SEQ ID NO: 36430 - DNA, 201 bp, Homo sapiens
aagccaacaagcttaaaaaaacgtgtgcacacctttttacaggtaagtgaaatgtaaatgtagtccctttgctaaaaaatgagaaataaagaattgaagartagaagaaataattaattaatctgaatggagaatttgaaattgtgttcatgactccttgaaaaatagttaatcctataaaatgggatattaggccaatgg

SEQ ID NO: 36431 - DNA, 201 bp, Homo sapiens
ctcaagatgtctttttcatttttagagatgggatcttgttgtgtttcccagactgatcttgatctcctgggttcaagcgatccttccacctcagcctcccmaggtgctgggattacaggtgtgagccaccatacgcagctctcaaaatgtctttgatatatgttttcttccctatccaggatccaaagttcactcattgca

SEQ ID NO: 36432 - DNA, 201 bp, Homo sapiens
tgaggcacgagaatcgcttgaacctgggaggcggaggttgcagtgagctgagtacagtccagcctgggcaacagagcgagactttgtcttaataataaatwaaataaataaataaataaggcattgacttttcttccttaaaattttaaaaatttatgcataatgcatagttatagggtatgtgtgattaatttaatacat

SEQ ID NO: 36433 - DNA, 201 bp, Homo sapiens
gagcacattgcacttggtcgacatttgttgaatgaatgagtaaagaattagtgatggcatatttacatacccatgttcatggcagcgtttttcactatagycaagaggtgaaagtaacccaagtgtctgttgacagatgagtggataaacaaaatatgtcatatacatacaatggaatattattcagccttagaaagggag

SEQ ID NO: 36434 - DNA, 201 bp, Homo sapiens
taatcctgtcctttccttcagacctcatctcggtgtccctggctcatggaaaccctccctggccaacctgccttgatcagatgctggctcctgcaaagctycctgagggcagtgctttatttgttttgctcttcatttgttcctcagagcacattgcacttggtcgacatttgttgaatgaatgagtaaagaattagtgat

SEQ ID NO: 36435 - DNA, 201 bp, Homo sapiens
ggtgcatggttgcttttgggtctgtaagtatggaagctaggaatctttgagaaggcacatccttaaacccataagctcttctcatggaggtagctgtccamcacaaaatgtccttctgatgccattggtagaacaagtactggttggagcaggctgcagttgttcttacgttctgatggccatcctctactgtcccctccc

SEQ ID NO: 36436 - DNA, 201 bp, Homo sapiens
ctcaaacattattttccccgtcacctccctgatgggaggtgcttctcaaacgttaatgtgcatattaatcacataggggctctagttagaatgcatatttktatcagtaggtccaagttagggcttgagattctgtatttttaacaggctcccaggggttggctacgtaatacccaaagggtggggttcttgcctttattc

SEQ ID NO: 36437 - DNA, 201 bp, Homo sapiens
ttaaccgccatgggcgcggactatctgagttgcgacagccgcctcatcagtgactttgaagacacggacggtgaaggaggcgcctacactgacaatgagcyggatgagccagccgaggagccgctggtgtcgtccatcacccgctcctcggagccggtgcagcacgaggaggtgaggcgaggcaggccacgggcaggaaca

SEQ ID NO: 36438 - DNA, 201 bp, Homo sapiens
agatcagtgtaataaacatttatcttctaaaatattactattctgccatctttacttggtctctgtatgtatataaacactcatgtctttctgggcaaccwtgcgaaggaaagttacagacatgacagttcatttctacttacttcacatgcatttcctatgaatgaggacattcatctatataatactattatccgatct

SEQ ID NO: 36439 - DNA, 201 bp, Homo sapiens
aatcacataggggctctagttagaatgcatatttttatcagtaggtccaagttagggcttgagattctgtatttttaacaggctcccaggggttggctacrtaatacccaaagggtggggttcttgcctttattctccaattctaataggaaaggcatgtgtttgaagctcaggactccgtatgtaggctcactggcttta

SEQ ID NO: 36440 - DNA, 201 bp, Homo sapiens
tctaagaaaagtaataattttacagtattatctaaaatccagtccatatctcaagatgtctttttcatttttagagatgggatcttgttgtgtttcccagrctgatcttgatctcctgggttcaagcgatccttccacctcagcctcccaaggtgctgggattacaggtgtgagccaccatacgcagctctcaaaatgtct

SEQ ID NO: 36441 - DNA, 201 bp, Homo sapiens
gtatttttaacaggctcccaggggttggctacgtaatacccaaagggtggggttcttgcctttattctccaattctaataggaaaggcatgtgtttgaagytcaggactccgtatgtaggctcactggctttatgggattaaccaggctcattgctaggtggtactaatgtgtccctcttttctgtgggaaccatcatctg

SEQ ID NO: 36442 - DNA, 201 bp, Homo sapiens
ttcacctttattttcagactgtatggtcaagttctaacttatgtatgtcagttatgccaaaggcagtttatagagttgaaatcaaattctaacaaggagcrtgatttataaaaagctgtttcagttcctaaattgaggcttatttctgcaacttaaaaaatgttttaataccactgttcaagagtttcggtatattggctg

SEQ ID NO: 36443 - DNA, 201 bp, Homo sapiens
taaccaggctcattgctaggtggtactaatgtgtccctcttttctgtgggaaccatcatctgatggtgccccaggtctgggagggaacgattgaccttgtrtgtttcctatggggccaaccttgatggtgacatttagctgagcagctctaataattgttttttcaacctgcctttttgacaaagccgtttatgattatct

SEQ ID NO: 36444 - DNA, 201 bp, Homo sapiens
gttatataagtttagtcaggtttaaaattatagggtacacagggctgtgcctgtgttgccaaattagcaccttccttttggcttattaatggcttctttgyaattacaaataagaatgatctgtttatagcttagcttagtgtatcagaactaggaacatagaggtcttaaatgtaactatcagctgattttttttttttt

SEQ ID NO: 36445 - DNA, 201 bp, Homo sapiens
gtacaactggtgcttcaaacagtacgtccctatttggactgaagacattgtttcctatcccggccagcttctagtgataactccagtctgcactatcaatmttttccagcctctacaggctgtttctttcagataaggaatttccctttataaacctgtcagctgacaatgactatgctttgttttgtttctcatttgttt

SEQ ID NO: 36446 - DNA, 201 bp, Homo sapiens
tgcccaccttggcctcccaaaatgctgggattataaatgcgagccaccacgcccagccaggttacagatgtttaactttgattctttacctctgaagtcarataaacctgggtgtgaattcttttgtcctgccacttgcttgcttgactttgagcaatttacctttttctcatgttcagttttctcagttgtaaaataggc

SEQ ID NO: 36447 - DNA, 201 bp, Homo sapiens
tgcctgctagctaagaactgttcttgcattttaaatggttatgtaagtatctatatgatctccgtgattttgcctcttgtagtggcaagcctaaaatattyattgtcaggccctttgagaaaatgtttcctggctcctgcctcagacctcctggaagcagggtgttggcttgatttgtctcctgttctgcaatctgggaat

SEQ ID NO: 36448 - DNA, 201 bp, Homo sapiens
gagtgtgattggatgattaaatataaatgttgacctgattggattatatcacagcaatgaactgtcctgaaaaaacagctgtaacataccactccagactrttaccagacttagtcggctggctttatatttgtgttgtcaaaactgggatgctgtcatttctgtttctctgtctctttcgtctgttccaatttgagatat

SEQ ID NO: 36449 - DNA, 201 bp, Homo sapiens
tgaattacacccagtggttcccaattgtgatttttttcaacccagactccagacaaggtgtcaaaaccatgagacaaaggttaaatccaacgtccaacaawagttctcgaaagttatttgatcaagccaacaagcttaaaaaaacgtgtgcacacctttttacaggtaagtgaaatgtaaatgtagtccctttgctaaaaa

SEQ ID NO: 36450 - DNA, 201 bp, Homo sapiens
taagacagaggtggcaagagcagcataatgagacgatttttatcagaaaaaccagacattgagggtcgtaacagtttaatgtcagtttagaaaacaaaaamaaaaaaactccatgaatattttcttctttcctgtttaaagtttagatccctattccctaaactaaggaaagatgagaaggaaagttggtgatatatgaat

SEQ ID NO: 36451 - DNA, 201 bp, Homo sapiens
gaaagctgtggacctgttgaattacacccagtggttcccaattgtgatttttttcaacccagactccagacaaggtgtcaaaaccatgagacaaaggttaratccaacgtccaacaaaagttctcgaaagttatttgatcaagccaacaagcttaaaaaaacgtgtgcacacctttttacaggtaagtgaaatgtaaatgt

SEQ ID NO: 36452 - DNA, 201 bp, Homo sapiens
ggaccagcaggaaaccagcaagcagagtgcccagtggttcattctttcactcttattcttttcttttttaattaccacagatcgaaattgcccagaagcaycctgatatctatgcagttccaatcaaaacgcacaagccagaccctggcacgccccagcacacgaggtaagggctgcctagtgggtacaggtctaaggcgg

SEQ ID NO: 36453 - DNA, 201 bp, Homo sapiens
catgttgccttatgatcctaggaaataccactcaccaaatgttactgatgaaaacccatctgagtgccagctcataccagtttactctttgcatatatgcygatgaaggaaaaaggcattttttctaactattgtgaggccataggatgatagctagaaatgtggagcttttgctcattaaggttcaatgataaaatattt

SEQ ID NO: 36454 - DNA, 201 bp, Homo sapiens
ctggacttgaactcctgacttgaggtgatccgtccacctgaatctctcacagtgctgggattacaggcatgagccaccacgcctggccaggaatagctactttttttttttttttttttgagacggagtcttgagtcttgttctgttgcccaggctggagtgcagtggcgtaatctgggctcactgcaacctccgcctccc

SEQ ID NO: 36455 - DNA, 201 bp, Homo sapiens
ccaggctggtcttgaacttctgacctcaggtgatctgcccactgcagcctcccaaagtgctgggattataggcatgagccactgcacctggccagctaacttttttttttttttgagacagagtctcactgtgtcaccctggctggagagtgcagtggcatgatctcggctcactgcaacctctgcctcctgggttcaagt

SEQ ID NO: 36456 - DNA, 201 bp, Homo sapiens
tcactctgtagctagaagaaattaaatctctcatttgctaatgttgttctcccttttaaaaaatatctcccatctttcctttctgaaacggaacctattgyagccctaataccaaaatggtaaggttcaagaagggagacagcgtgggcctccggttggctggtggcaatgatgtcgggatatttgttgctggcattcaag

SEQ ID NO: 36457 - DNA, 201 bp, Homo sapiens
cgcctaatcattgttgagtttctgctctatgcaagggctatgttgaatattcttttacgtagtcctcacaagaaccttgtgtgttaggaggcttcgtttckgttttgttttgttttgttttgttttgttttgagacggagtctcgctctttcgcccagggtggagtgcagtggcgcgatctcggctcactgcaggctccat

SEQ ID NO: 36458 - DNA, 201 bp, Homo sapiens
gtgtagcacaaggcagcgtgcaatgtgttgatattactaggagagtggtaccaggagaacaggctgcagaggagctggattcagaagaaaagcaagacagwctgagaaagtgtggcttagccgcggtatggaggatggatggtagcacagataggctgcagggcccctaatttgagttcctgcacaaaaacgaccataata

SEQ ID NO: 36459 - DNA, 201 bp, Homo sapiens
atgtgttgatattactaggagagtggtaccaggagaacaggctgcagaggagctggattcagaagaaaagcaagacagactgagaaagtgtggcttagccrcggtatggaggatggatggtagcacagataggctgcagggcccctaatttgagttcctgcacaaaaacgaccataatatcaacattgtaccaaagccaag

SEQ ID NO: 36460 - DNA, 201 bp, Homo sapiens
gtggcatatgcctgtggtcccaactacttggagactgaggcaggcaggaggatcgcttgagcccaggagttggaggctacagtgagttctgattgtcctgygaataggaatagccactgcagtccagcctgagcaccacagtggagactccacttttttttttttttaagtttaaaaaagttaaaaaaaaaaaaagacaaa

SEQ ID NO: 36461 - DNA, 201 bp, Homo sapiens
  misc_feature (1)...(201): n = A,T,C or G, or insertion/deletion polymorphism (see Tables 1-2)
tctgcaaaaaataaaaaaagtttccatatattatcaatgggaaagtttgtgtttaaaaatggtgaggagctaggcagtgtagtcccagctactcaggaggnttgagcctaggagtttgagtttagtctgggcaacatagtgagatcttgtctcttaaaaaaaaatctaggttagcatgtggttgaatgaaaagaaaaaaat

SEQ ID NO: 36462 - DNA, 201 bp, Homo sapiens
gccaagctgaattggggagaaaccacagtttctttcgtttagttatgttatcaaaagcccatacaatacttttactgcttatcataacagctaggcaagtrtgtatgctttaatggcctttcttgtcatttcagctggtttcaagagacctgtggtcttattcggccccatagctgatatagcaatggaaaaattggctaa

SEQ ID NO: 36463 - DNA, 201 bp, Homo sapiens
acccatctgagtgccagctcataccagtttactctttgcatatatgctgatgaaggaaaaaggcattttttctaactattgtgaggccataggatgatagmtagaaatgtggagcttttgctcattaaggttcaatgataaaatattttcgtatgttcaggggctgggagattttctaaatttccgtgaagaaaagtagtg

SEQ ID NO: 36464 - DNA, 201 bp, Homo sapiens
tttcctgtttctccactgaaccctgggaagggtgcttatttctctcctcactgtctttccccaggacccagaattgataggttagttgagtttctgtgggyagtctaaggttgtgttactatttaaaatgttagtaacattttcagattcactgagattcttgctgagtgtggtggcatatgcctgtggtcccaactactt

SEQ ID NO: 36465 - DNA, 201 bp, Homo sapiens
taacctttctaatcttgccaaagctcttgagtgtttccccatcagtttccttctctcttatatttcagttttttaattgagttcatgatcaaaccttcatytgatcacatcacatgtactgtgcatccactgtgattagatagcttatgggatccttgaaatcacattgacaggcactgtaaagtcacagccaagttagca

SEQ ID NO: 36466 - DNA, 201 bp, Homo sapiens
ctatcagacagccacactttaatgtggagtagactagtcagctttcttctactatctaactgacaccatacacattgttaaagagataattttgattgggratgaagatagggaattttgaagccagaacattctggtgatggagcagatactgccgagatgttggcctcgggacagcctggaggaggaggacactgataa

SEQ ID NO: 36467 - DNA, 201 bp, Homo sapiens
gtgcacccactgaacctaaaataaaagttgaaattatacacatatatgtaaatacatagatatgtatacatatatgtatgcatgtgtgtatatatgtatamagatatgtatgtacatgtatatgtgtatgtatagataagtgtgtacttaattccagagggtggctgaaagggaagaaggaaataaaaaattatatatgga

SEQ ID NO: 36468 - DNA, 201 bp, Homo sapiens
atgtcttcattcatcagagacctctgtgtgttcattactgtatgagaccccaaagactctaagttgcctctaagacacagccttacagggaggtattaagygattatgtatacagctagctaaaaccacaactttattatagaaatattaagaatatgtcttatcatgtgagagtattctttcttcaagtccatagcctcc

SEQ ID NO: 36469 - DNA, 201 bp, Homo sapiens
atccacccattgaaagtatatagttcagctgggcatggtggctcacgcctgtaaatcccagcacattgggaggccaaggtgggcaggtcacttgagctcargagtttgagaccagcctgggcaacatgatgaaaccctgtctctattaaaaataaaaaaattagctgggtgtggtggtgggtgccggtagtcccagctact

SEQ ID NO: 36470 - DNA, 201 bp, Homo sapiens
gtccctgttctgaaacttttctcaagagggcagtgaatgtagtcaagccatgcccatttgaagtgatgctcacatgtgtgctaatcaagtttgaaatttcrtaaattctctgaccaagtaataaaaatgaagggacttttaaaagaagagcagaatgtgacatgtgcagccctacattcacttccctttcacttttaatgt

SEQ ID NO: 36471 - DNA, 201 bp, Homo sapiens
ttttataggtgggaaacggaggctcagaaacattaagtaaattgcccagtgtcacacggcttgtgtgacagggaggggatttgagccaaggtccatttgaygaatttgaaacctgtagattctgtcaattccaccagtctctgctttttagaatcacagtggcaagaaaataggagaagctcaaggccctgtgttgattat

SEQ ID NO: 36472 - DNA, 201 bp, Homo sapiens
aggattgggaacgagttggagaaaggcttaatccccaacaagagcaggtaacagagatcgcattctcacataccccttttaatccttccccctgcagaaarctagagaccgccccccttcccccgtaaaaggaaaccccacatgatgagttcattacttgtcaccatctatttcttgtttatggagagtggcctgaactgt

SEQ ID NO: 36473 - DNA, 201 bp, Homo sapiens
ttaaccattgcagcaagccgtgaagctggttatttgtccttgttcctgttggagctgtgactcccataggacttgtgcactgaatggaaggaaggtaaagrggagatcagagataggagaagctgtgttgagtgtctagtactgtaacttgtactaagctgaatgcaacaaacgatgcttttgtctttcagtgtatagaga

SEQ ID NO: 36474 - DNA, 201 bp, Homo sapiens
caagtagatgctcaaaaagaatcaaaatggctaatattgtggcattcattaattagcagtctgcatcacctcttcccttttaaagagctatattcattatytgaatatgaattatacataggataacattttaaccttgtaaaaattgccaataaaaatagttaatcacagtatattctactgaaccatctactgttgctt

SEQ ID NO: 36475 - DNA, 201 bp, Homo sapiens
accgtttcactgtgtggaaaccagtcactgttggcagtgagcggagattgcaccattgcactccagcctgggcgacaagagtgaaactccatctcaaaaawatatatatataatgtaaatgcaaaccatttcactgtgtggaaaccagtcactgttactgttctctggcagtaacatactgtttttttttccagagttccc

SEQ ID NO: 36476 - DNA, 201 bp, Homo sapiens
gagcttatagaactgctctgagaatgtgttcttgagttctacaaatattatggggtgcgttgggggctggctcactccagctcagttcccatgtgttaagkggaacttctgatctgttgaatgcctaaccatgacggagcccaggagacaaagtaaggtgtggtttgttttgctgtaagaccacgtttggttagcttttct

SEQ ID NO: 36477 - DNA, 201 bp, Homo sapiens
cttggctctgcttctccttgtttcctagatggtggccatctcatggtccagatttatatacatctcagcctcaaatcaaatggcacactttacatttgcaygctgtttggccaagcccattggcatataacatacactatggtagcaagaattggccagaggctccccaagaccagacttctgaattcctaaccccagctc

SEQ ID NO: 36478 - DNA, 201 bp, Homo sapiens
ggtggcctggcccatgcatctccagagaccatgaagactgctcaagccctacataggatgtggatccaggctgttaaaaagttgaggagatggaaaggccrtgtgagtccctctgcaagctctccccttgttttccccaacctttcttcatgggaaggggagggaagcaaaaccattctcacagtgagtcctttatcctca

SEQ ID NO: 36479 - DNA, 201 bp, Homo sapiens
ttgagggtggggactgtgtcctatgttgacaggtctttgttttcaaagtctgatgtacaatagagactaaacgttcaatgactgaatgcagttcatttttwaaaatttttttttttttgagacagagtctcactctgttgcccaggctggagtgcagtggcatgatctcagctcattgcaacctccacctcccaggttcaa

SEQ ID NO: 36480 - DNA, 201 bp, Homo sapiens
tacctcggcctcccgaagtgctaggattataggcgtgagtcaccacgcttgggcagcagactgatttcttttttttttttttttgagacagagtcttgctstgttgcccaggctggaatgcagtggtgcaatctcagcttactgcgacctctgcctcccggattcaagcaattctcctgcctcagcctcccgagtagctgg

SEQ ID NO: 36481 - DNA, 201 bp, Homo sapiens
ccttcacgaaggagacataattctcaaggtgggtagatgggggcagagaacggtagtgtgcatactgccgttcatcgcctgcatgtccacattcagcaccmacacagtgagacttagatccagtgagagtcagtggtaagacagaggtggcaagagcagcataatgagacgatttttatcagaaaaaccagacattgaggg

SEQ ID NO: 36482 - DNA, 201 bp, Homo sapiens
cactttccagtgtatcagaagttgttgatgactgttacgggtgcagtgcaggaaaacaaaaggagcatgagaaataatgccagcatgttagggggtttgcrgtttatttccttgctactcagtatgtggtcctcatcccccaacccctgaccccaatagcatctgcataatcaggtaactggatagaattgcagaatctca

SEQ ID NO: 36483 - DNA, 201 bp, Homo sapiens
gtgggggaaaaacatctcatttggcttagtagtaagctccaaataacaattgcattgttgttctgaattgtctttgagtgtgattggatgattaaatatamatgttgacctgattggattatatcacagcaatgaactgtcctgaaaaaacagctgtaacataccactccagactgttaccagacttagtcggctggcttt

SEQ ID NO: 36484 - DNA, 201 bp, Homo sapiens
aataggcctaccctatcagtcatggttcagtcaagaagacatgtcattctagctatttcaaggagaaggggattcaatacagagtattagttgccttcagracaaagaaaaggcgagatgcgcaaaaaatggaagcccaccgctggctttctgatttgccgcaaaaaaagttagaaagctgctgccacccagagaagactc

SEQ ID NO: 36485 - DNA, 201 bp, Homo sapiens
acaacccccactttgaaaatggagaaacgtcaattgtcatttctgatgtgctcccgggtgggcctgctgatgggctgctccagtgagtgtcctccctcgcyccgcagcccctaccagccctactggttggccctagacggggtattttggttggtgtccactttatttaaaaaaaagaaaaaaataacaaacttttatata

SEQ ID NO: 36486 - DNA, 201 bp, Homo sapiens
cacagccaagaaaggtaacattgatgtggtgtgattttgtatatagtccattttccacgttttcttaattgtcctagttatgtgcttcatagctttttttwaaattcagaatacaaccaaggaccattcatgacatttgatttttatgtctttttgtgatttttatgtctttccagtcccctcttttttctaaataacttt

SEQ ID NO: 36487 - DNA, 201 bp, Homo sapiens; identical to SEQ ID NO: 5322

SEQ ID NO: 36488 - DNA, 201 bp, Homo sapiens
tattaaatgacttgactttccctacaaaagaagcgaaccagtttcccagtaaacatcccaccccataactatttttgaggcattcataggcttaagaccartgaatttttacatcacccccgggggaattgcatttgcaatgacttctgcctacatttaacttttgatctagttctttgtacactgacaaaagttcacagc

SEQ ID NO: 36489 - DNA, 201 bp, Homo sapiens
ttgtgatttttttcaacccagactccagacaaggtgtcaaaaccatgagacaaaggttaaatccaacgtccaacaaaagttctcgaaagttatttgatcamgccaacaagcttaaaaaaacgtgtgcacacctttttacaggtaagtgaaatgtaaatgtagtccctttgctaaaaaatgagaaataaagaattgaagagt

SEQ ID NO: 36490 - DNA, 201 bp, Homo sapiens
gagaccctgtctcttcaaagaaaaaaaaaaaaatctagaaacttggacactctgaatattggatgatttaaagatttattatttctctttgttaggtgtgataataatattgtgatttttttaaaaacaaagttctttgaggaatgcatactaaataaaatatttatggttgacctaatataatgttgagaatttgcctaa

SEQ ID NO: 36491 - DNA, 201 bp, Homo sapiens
agaccctgtctcttcaaagaaaaaaaaaaaaatctagaaacttggacactctgaatattggatgatttaaagatttattatttctctttgttaggtgtgataataatattgtgatttttttaaaaacaaagttctttgaggaatgcatactaaataaaatatttatggttgacctaatataatgttgagaatttgcctaaa

SEQ ID NO: 36492 - DNA, 201 bp, Homo sapiens
gaccctgtctcttcaaagaaaaaaaaaaaaatctagaaacttggacactctgaatattggatgatttaaagatttattatttctctttgttaggtgtgataataatattgtgatttttttaaaaacaaagttctttgaggaatgcatactaaataaaatatttatggttgacctaatataatgttgagaatttgcctaaat

SEQ ID NO: 36493 - DNA, 201 bp, Homo sapiens
ccgagccacgtgaaaagctttattgagttttgacttagataccatataatccacccattgaaagtatatagttcagctgggcatggtggctcacgcctgtaaatcccagcacattgggaggccaaggtgggcaggtcacttgagctcaggagtttgagaccagcctgggcaacatgatgaaaccctgtctctattaaaaat

SEQ ID NO: 36494 - DNA, 201 bp, Homo sapiens
cgcctgtaaatcccagcacattgggaggccaaggtgggcaggtcacttgagctcaggagtttgagaccagcctgggcaacatgatgaaaccctgtctctaytaaaaataaaaaaattagctgggtgtggtggtgggtgccggtagtcccagctacttgggaggctgaggtgggaggatcacttaagcccgggagctggagg

SEQ ID NO: 36495 - DNA, 201 bp, Homo sapiens
gaggccaaggtgggcaggtcacttgagctcaggagtttgagaccagcctgggcaacatgatgaaaccctgtctctattaaaaataaaaaaattagctgggygtggtggtgggtgccggtagtcccagctacttgggaggctgaggtgggaggatcacttaagcccgggagctggaggttgcagtgagccgagattgcacta

SEQ ID NO: 36496 - DNA, 201 bp, Homo sapiens
tgacagatccttgcttcaatggcttaacctctaaggtgcggttggcagtatggggaggcaggaaggtatagtgtgcaggcccatagcaaggtgctgggcgsgaggacttgaatagtgacattaaggactcatttgcatcttggctttgctctggacaggccctgatgaaaacaaacaaaagggtcagtggcatcttactat

SEQ ID NO: 36497 - DNA, 201 bp, Homo sapiens
tttagctcagagccgagccgatggtgagcaaatttggtcatttagtttagttggggtgggggtggggagtgggaaggatgagagaggtgtcttggtaccasaataggcaaatctgggtattaaaaaattgagatggatctcaacacctagtccttgggccctaggtgtgtgaagaaaatgtgagtgccgtttaactttcca

SEQ ID NO: 36498 - DNA, 201 bp, Homo sapiens
atgtccacattcagcacccacacagtgagacttagatccagtgagagtcagtggtaagacagaggtggcaagagcagcataatgagacgatttttatcagwaaaaccagacattgagggtcgtaacagtttaatgtcagtttagaaaacaaaaacaaaaaaactccatgaatattttcttctttcctgtttaaagtttaga

SEQ ID NO: 36499 - DNA, 201 bp, Homo sapiens
cccagggatgttcctagagctgatgttctgaggaataaggatgattatgtggggtgctctgtgtttctgaaaaattatataaatgaggcaggaaagacackcagtagtttgctctttgggtacacttgtagttagttggtaagctgcccaagggctttggcgattttattcactgatgtctctgaagtgccacaaaccact

SEQ ID NO: 36500 - DNA, 201 bp, Homo sapiens
gaagcagcattagctgcaccactgattagctgggtggcttttgctgtcttgtgactctagtttgcaatttctttttttttttttttttttttttttgaggkggagtctagccctatcgctgaggctggagtgcaatggcccgatctcagctcactgcaacgtctgcctcctaggttcaagcgattctcctgcctcagcctc

SEQ ID NO: 36501 - DNA, 201 bp, Homo sapiens
aaattttttgtagagatggggtctcactatgttgcacaggctgcccttgaactcctaggctcaagcgatcctctcgcttcagcctgagtgctggaaatacrgacgtgagccactgcacccagccctcttctaatttcttaaaacataaacacatagtccgggtggcttggtggctcatgcctgtaatcccagcactttggg

SEQ ID NO: 36502 - DNA, 201 bp, Homo sapiens
tgaatgtacacacatatgtatttatgaaactgttatctcttgagacatttacgtatgacatgtgattcagttccagagaggacacgccgagcagattgtcyaggatgggtgcgacacccactccctttaagtccacaggggatattgcaggcacagttgtcccagagaccaacaaggaacccagataccaagaggaacccc

SEQ ID NO: 36503 - DNA, 201 bp, Homo sapiens
tcatcacagagcagaatcccttttccctttcaatcagctgcgtctgtaatagaagtaaaagttgtttttttttttttttttccagtagggaatggggatgraggtttggaaggacccacaaaagaggagtgtgatgaatgctttgtattctagtactagcctacctgtcaccagttctttttatgtcttcatttgtcaagt

SEQ ID NO: 36504 - DNA, 201 bp, Homo sapiens
tccctatccaggatccaaagttcactcattgcatttaatcattatctctttagttccttttaatctagaagggttcctctttccccttgcccctctacccsaccccccactttaaaaatggcattgggccaggttcagtggttcacgccagcactttgggagatggaggcaggcagatcacctgaggtcaggagttcgaga

SEQ ID NO: 36505 - DNA, 201 bp, Homo sapiens
catgactccttgaaaaatagttaatcctataaaatgggatattaggccaatggcatttatatattgaactttgtaattttgtctatttgaaaatgaccatraagatccatgatgtggtaataattagctattttgatgaagttcatattttcctgtgagactataaggctagtgattgagccaggccaaacacctatgtct

SEQ ID NO: 36506 - DNA, 201 bp, Homo sapiens
tgtccaggatgggtgcgacacccactccctttaagtccacaggggatattgcaggcacagttgtcccagagaccaacaaggaacccagataccaagaggamcccccaggtgagccattaagaccactcagtttcaacagttgtgttcagaagtgtgtgctcacacagccataacaaagagtgaaatcatgtcctttgcagc

SEQ ID NO: 36507 - DNA, 201 bp, Homo sapiens
cctcccaatgtgctgggattacaggcatgagacactgagcccagctgggatttcttttggtgtgaaggccagtgatcagtcactagtaggttttggaaggyacaataggtgtatagtggagaggcaaggttcttcagtggaaaggatataagctttctagtcacaccagcctgagttagaatctgtcctctgccacttttt

SEQ ID NO: 36508 - DNA, 201 bp, Homo sapiens
tggtctgtaaaataggctttaacaaggattttcgtaggaacaggaagccttgaggtagaaaacaagtatccctgctttgacctagagagatgcatgctcayggcaggcgaatgaatcaaggagaagagaaaatactgtttcagtagactctctagtgatgtgtgtgttcacaccatttatgagaaatcctaagctttcaat

SEQ ID NO: 36509 - DNA, 201 bp, Homo sapiens
tcattcctttctctgcttccacaagccattctgcagtttttaaaggtctgttggtatgatatttttgatatgatagagtgataggggaggaagtattttgrcactgatgaaggacatcactgtattatcaagtgactcttgctcatgattcattgccgaagaatgtggacagccaaacagcctcacctgtaaatgcattta

SEQ ID NO: 36510 - DNA, 201 bp, Homo sapiens
aggcgcccgccaccacacccggctaattttttgtgttttaagtagagacggggtttcaccgtgttagccaggatggtctcgatctcctgacctcatgatcygcccacctcagcctcccgaagtgctgggattacaggcgtgagcccccatgcttggccaatgagtgcattttttaagaggattgaggaattgttgaaaaat

SEQ ID NO: 36511 - DNA, 201 bp, Homo sapiens
gatcgtgccattgcactccagcctgggctggagcaaaactccatctcaaaaaaaaaaaacaaaaaaactttttaacaaatatgtacaacttcattaaaatmttggaaaatttattgtgcttccacatattggaaaatgctgttttagacacatgcagaattccagagaggtatggctatagagcacatctagaaagtcaga

SEQ ID NO: 36512 - DNA, 201 bp, Homo sapiens
gggttggatctgagcactgacagacaggtttgcttctggtttcaatgtagtaaggtgacctgataacaagggccacttgagaagttgcaaatgcagatttyctccgtgttaggtggtgaccaataaaagcatattttgtttttaggatgtagaaaggctataaaactgcaatgtctttgtatcatcaaacatttctgtgtt

SEQ ID NO: 36513 - DNA, 201 bp, Homo sapiens
gatagcaatggaaaaaaaaattcaggcatggaaatccaatatgcagtattgcagtagctagttttaattttatttttgtttttttggttttttttttggaratggagtcttgctctgttgcccaggctgaagtgtggtggtgcggtcttggctcactgcaacctctgcctcccgggttcaagcggttctcttgcttcagcc

SEQ ID NO: 36514 - DNA, 201 bp, Homo sapiens
atagcaatggaaaaaaaaattcaggcatggaaatccaatatgcagtattgcagtagctagttttaattttatttttgtttttttggttttttttttggagwtggagtcttgctctgttgcccaggctgaagtgtggtggtgcggtcttggctcactgcaacctctgcctcccgggttcaagcggttctcttgcttcagcct

SEQ ID NO: 36515 - DNA, 201 bp, Homo sapiens
cacaataggtgtatagtggagaggcaaggttcttcagtggaaaggatataagctttctagtcacaccagcctgagttagaatctgtcctctgccacttttwacttgtatgacctcaaccaacttactttacttctgacttcagtgtcctttctgtaaaatgagtctattaataatgatattgataatagctaaaattgagc

SEQ ID NO: 36516 - DNA, 201 bp, Homo sapiens
ttcatctagaccatttttgtaatggcatggaagcagcattagctgcaccactgattagctgggtggcttttgctgtcttgtgactctagtttgcaatttctttttttttttttttttttttttttgaggtggagtctagccctatcgctgaggctggagtgcaatggcccgatctcagctcactgcaacgtctgcctccta

SEQ ID NO: 36517 - DNA, 201 bp, Homo sapiens
taagctttctagtcacaccagcctgagttagaatctgtcctctgccactttttacttgtatgacctcaaccaacttactttacttctgacttcagtgtccwttctgtaaaatgagtctattaataatgatattgataatagctaaaattgagcatgtactatgtgccaggcattaccttgatttctctacatgcactgtct

SEQ ID NO: 36518 - DNA, 201 bp, Homo sapiens
tcatctagaccatttttgtaatggcatggaagcagcattagctgcaccactgattagctgggtggcttttgctgtcttgtgactctagtttgcaatttctttttttttttttttttttttttttgaggtggagtctagccctatcgctgaggctggagtgcaatggcccgatctcagctcactgcaacgtctgcctcctag

SEQ ID NO: 36519 - DNA, 201 bp, Homo sapiens
cgtacacacacacacgcccctaaacaatagattaattttgttggcaattttttactatagtgaaaaacgcataccaaaatttactgtctgtaccatttgtraatgtacagttcagtagtgttaagtatattcaagttgttgtaaaacattgttttttgagctatataaaaatggtatcacactctacaaatccttctgggg

SEQ ID NO: 36520 - DNA, 201 bp, Homo sapiens
ctgcacatgtactcctgaatctaaaataaaaataaaattaaaaaggattggctagcactgggaagagcagtcttttcccgcccagctagaaagttgtggtkttttttttttgttttttagagacttctccatttgcccaatttaaagtgcaaaagctgccttggcttgttgaagccttgacctcacaggctcaggtgattc

SEQ ID NO: 36521 - DNA, 201 bp, Homo sapiens
atttccactctacccatagccaaggatgagacagtcactgcatctccatctgtgtgctggtatttttttcccctaatagatccacccagacctgatctccyaccctgtttggatccccagcctcctctaaatgcctgcttcagtgctggcttatctctgtggttctgagtgttcttggcatttctagctttctcacaggca

SEQ ID NO: 36522 - DNA, 201 bp, Homo sapiens
agtttgagaccagcctgatcaacatggtgaagccccatctctactaaaatacaaaaattagccgggcgtggtagtgcgcacctgtaatcctagctacccargagactgagtcaggagaatcgcttgaacctgggaggcggaggttgcagtgagtgaagatcacgccactgtactccagcctgggcgacagaacgagactcc

SEQ ID NO: 36523 - DNA, 201 bp, Homo sapiens
attttgtgatttttctatttagaaacgcactcttgttagtccagattgataacagtagatgtttcttaacctacagctcctcaaccaaaagcagccccgaraacttttcttcgtcctagtcctgaagatgaagcaatatatgggtatgtatttccgtctctctttgttttcccttcttccttacagctctgtctctgtaac

SEQ ID NO: 36524 - DNA, 201 bp, Homo sapiens
ggagtttgagaccagcctgatcaacatggtgaagccccatctctactaaaatacaaaaattagccgggcgtggtagtgcgcacctgtaatcctagctaccyaggagactgagtcaggagaatcgcttgaacctgggaggcggaggttgcagtgagtgaagatcacgccactgtactccagcctgggcgacagaacgagact

SEQ ID NO: 36525 - DNA, 201 bp, Homo sapiens
ccctcttctaatttcttaaaacataaacacatagtccgggtggcttggtggctcatgcctgtaatcccagcactttgggaggccgaggcaggtggatcacraggtcaggagtttgagaccagcctgatcaacatggtgaagccccatctctactaaaatacaaaaattagccgggcgtggtagtgcgcacctgtaatccta

SEQ ID NO: 36526 - DNA, 201 bp, Homo sapiens
aaaatggttcagctggtgaaatagagcagctgcaagtttgttgatgcccagcattgaagtctctgtattcctcaaatgcgtcctgtcttctcagtcttggracccagaactcatccatgtatctgtgagaactgatagtgtttctgcccttgccaagattttattagtctgattaatgtgaaaatattgagactctaagta

SEQ ID NO: 36527 - DNA, 201 bp, Homo sapiens
catgtgtccttgtgcatttagtcacacggttctcccggtgcctctgcccaggtagaggaatcactgggtcgtggaatgtgcatacctttaattctgatatmtgcgtgctctttctatgggcctgcctgtaaagctccccctggtgctaagcagctacctgctgtcattcagagagaggtcagatattgctagcaagtctga

SEQ ID NO: 36528 - DNA, 201 bp, Homo sapiens
taaaagatgccttccctggcgagcacatcaaggtttcagtcgcttggctgtgtccttgggaattttcttgagtccccactcccaggagccacatcagaccycactgaccgtccaacacaaattcctctagatggaagggatggatgatgaccccgaagaccgcatgtcctacttaaccgccatgggcgcggactatctgag

SEQ ID NO: 36529 - DNA, 201 bp, Homo sapiens; identical to SEQ ID NO: 5317

SEQ ID NO: 36530 - DNA, 201 bp, Homo sapiens
agaaaaagtgttcttcacatgttcttttttcctcttacagtttgaacatgtgtgagtgtttactttgatggcttgagacttttatgaagcatgtcccttaygtggacagctttcgattaatctttggttttagctttgacctccatcactgggcagcagcagtctgtggatatagaatctaaaagccgcctgttcaggggg

SEQ ID NO: 36531 - DNA, 201 bp, Homo sapiens; identical to SEQ ID NO: 5325

SEQ ID NO: 36532 - DNA, 201 bp, Homo sapiens; identical to SEQ ID NO: 5326

SEQ ID NO: 36533 - DNA, 201 bp, Homo sapiens; identical to SEQ ID NO: 5327

SEQ ID NO: 36534 - DNA, 201 bp, Homo sapiens
gtctatatcataactatacttgatagtttggctataagtgctcaatagcttgaagcccaagaagttggtatcgaaatttgttgtttgtttaaacccaagtrctgcacaaaagcagatacttgaggaaaacactatttccaaaagcacatgtattgacaacagttttataatttaataaaaaggaatacattgcaatccgta

SEQ ID NO: 36535 - DNA, 201 bp, Homo sapiens
tgagttctgattgtcctgtgaataggaatagccactgcagtccagcctgagcaccacagtggagactccacttttttttttttttaagtttaaaaaagttaaaaaaaaaaaaagacaaagaaaaaggaaagttgatttttggttctaactcagttgtgacaaacggtggatatatggttctgaccacattctaaattggac

SEQ ID NO: 36536 - DNA, 201 bp, Homo sapiens
aagtttgttgaggatagaaatgaaaaatgaggcaaaagaaaccaggaattgagatgtgtgtgtgcctgtaccagcacccgtgtgagccccttgcaggtaaygacccatggtccctgcacaccagtcttctgttactaagttttgcataaattgagtctggtggttggcaagctacatatagccagctgcgtgtttgttgtt

SEQ ID NO: 36537 - DNA, 201 bp, Homo sapiens
tgctgacttgtgggaagatgctggctgcatgagatgcccctgtctgcagtcactcatagcttggaaaagcaaaaaggaaaaagggttggatctgagcactgacagacaggtttgcttctggtttcaatgtagtaaggtgacctgataacaagggccacttgagaagttgcaaatgcagatttcctccgtgttaggtggtga

SEQ ID NO: 36538 - DNA, 201 bp, Homo sapiens
gctgacttgtgggaagatgctggctgcatgagatgcccctgtctgcagtcactcatagcttggaaaagcaaaaaggaaaaagggttggatctgagcactgacagacaggtttgcttctggtttcaatgtagtaaggtgacctgataacaagggccacttgagaagttgcaaatgcagatttcctccgtgttaggtggtgac

SEQ ID NO: 36539 - DNA, 201 bp, Homo sapiens
ctgacttgtgggaagatgctggctgcatgagatgcccctgtctgcagtcactcatagcttggaaaagcaaaaaggaaaaagggttggatctgagcactgacagacaggtttgcttctggtttcaatgtagtaaggtgacctgataacaagggccacttgagaagttgcaaatgcagatttcctccgtgttaggtggtgacc

SEQ ID NO: 36540 - DNA, 201 bp, Homo sapiens
acagcgaacagcccctttgctgctgctgcagatgtggcagggatgcactgcaccaaaggcaggtgctgtgtatgtcacttcagattgccagctcccagcaygtcccttgttcttccaaagaagaaaacttgacaatataggggaagaagattctgctctttatacacagaactttgtatagagttctggaatgaggaagtg

SEQ ID NO: 36541 - DNA, 201 bp, Homo sapiens
cacatcagaccccactgaccgtccaacacaaattcctctagatggaagggatggatgatgaccccgaagaccgcatgtcctacttaaccgccatgggcgcrgactatctgagttgcgacagccgcctcatcagtgactttgaagacacggacggtgaaggaggcgcctacactgacaatgagctggatgagccagccgagg

SEQ ID NO: 36542 - DNA, 201 bp, Homo sapiens
tgacttgtgggaagatgctggctgcatgagatgcccctgtctgcagtcactcatagcttggaaaagcaaaaaggaaaaagggttggatctgagcactgacagacaggtttgcttctggtttcaatgtagtaaggtgacctgataacaagggccacttgagaagttgcaaatgcagatttcctccgtgttaggtggtgacca

SEQ ID NO: 36543 - DNA, 201 bp, Homo sapiens
gagagatactgggatattttccaagttttggctgttgggaacattgctgctgtgaatactctatacatgtgtccttgtgcatttagtcacacggttctccyggtgcctctgcccaggtagaggaatcactgggtcgtggaatgtgcatacctttaattctgatatatgcgtgctctttctatgggcctgcctgtaaagctc

SEQ ID NO: 36544 - DNA, 201 bp, Homo sapiens
actcccaggagccacatcagaccccactgaccgtccaacacaaattcctctagatggaagggatggatgatgaccccgaagaccgcatgtcctacttaacygccatgggcgcggactatctgagttgcgacagccgcctcatcagtgactttgaagacacggacggtgaaggaggcgcctacactgacaatgagctggatg

SEQ ID NO: 36545 - DNA, 201 bp, Homo sapiens
agacaggtttgcttctggtttcaatgtagtaaggtgacctgataacaagggccacttgagaagttgcaaatgcagatttcctccgtgttaggtggtgaccwataaaagcatattttgtttttaggatgtagaaaggctataaaactgcaatgtctttgtatcatcaaacatttctgtgtttctgatgtttcagatgttcct

SEQ ID NO: 36546 - DNA, 201 bp, Homo sapiens
ccgccgaagtgggcattggatttgacctattacgaacctggagcaggaccagggatgccctggttgctctgcagaatgtggctcagaggtaagtgatctgytcgggatacccagtcactgtgctcagagccatgcctccccgggcagccggaggacatggatgtgctctggaatgtctttaacaccctttttttgttagtt

SEQ ID NO: 36547 - DNA, 201 bp, Homo sapiens
ttgctttttctttatatttccactgcatgcgtgcgtacacacacacacgcccctaaacaatagattaattttgttggcaattttttactatagtgaaaaaygcataccaaaatttactgtctgtaccatttgtaaatgtacagttcagtagtgttaagtatattcaagttgttgtaaaacattgttttttgagctatataa

SEQ ID NO: 36548 - DNA, 201 bp, Homo sapiens
tcattttgagggtggggactgtgtcctatgttgacaggtctttgttttcaaagtctgatgtacaatagagactaaacgttcaatgactgaatgcagttcatttttaaaaatttttttttttttgagacagagtctcactctgttgcccaggctggagtgcagtggcatgatctcagctcattgcaacctccacctcccagg

SEQ ID NO: 36549 - DNA, 201 bp, Homo sapiens
gggtggggactgtgtcctatgttgacaggtctttgttttcaaagtctgatgtacaatagagactaaacgttcaatgactgaatgcagttcatttttaaaawtttttttttttttgagacagagtctcactctgttgcccaggctggagtgcagtggcatgatctcagctcattgcaacctccacctcccaggttcaagcga

SEQ ID NO: 36550 - DNA, 201 bp, Homo sapiens
gccgaagtgggcattggatttgacctattacgaacctggagcaggaccagggatgccctggttgctctgcagaatgtggctcagaggtaagtgatctgctygggatacccagtcactgtgctcagagccatgcctccccgggcagccggaggacatggatgtgctctggaatgtctttaacaccctttttttgttagttcc

SEQ ID NO: 36551 - DNA, 201 bp, Homo sapiens
atcccatgatagaaactgccttgcgcttctcactcacgctctcagcccggggaatcccagcggggaggagggagggaggtcgttttcttcagctccccagrtggtctgtgctgggtgtgctgacggtccttttgggaaaacaggtccacctttgccagcgtaattcagaaagagatgtaattttctgagagcacacacctg

SEQ ID NO: 36552 - DNA, 201 bp, Homo sapiens
attactggtaccatccttcaactcgccctccttccagttgaaattattatcccctcttcactttgcaaaattctaactgcattgaaaaatttgctgttaartatactcgtacctcttgggtattagatccttcaccaggagtcagtattcattttggtgttcacccactcatctccctattttttatttatttatttattt

SEQ ID NO: 36553 - DNA, 201 bp, Homo sapiens
ctctgaaatgctgctgtaactttttcagtaccatccagatattataatactgaatgagcccctactcctgccagtcactgtgggggatacaaagatgaacragattcaatttctgcatttaggggtctagtggacctgaaactgttagactttactctgcaatactgtgtcgggattcctgagactgagggagggaatgta

SEQ ID NO: 36554 - DNA, 201 bp, Homo sapiens
ttggcttttaacatgtttctacattctttatgtaaaatatataggatttttacctatctggccaagatttttcaaaggaaaaaagctttataaaaagattwaaaaaaaacacaataagtaactatttgccttagttcctttctcttcttttgtcacacaaaaaccttactgttaatgcattaagttttttgtttatggtag

SEQ ID NO: 36555 - DNA, 201 bp, Homo sapiens
ttgagacttttatgaagcatgtcccttatgtggacagctttcgattaatctttggttttagctttgacctccatcactgggcagcagcagtctgtggatayagaatctaaaagccgcctgttcagggggactttgggcagtgaacacttcggtatctgttttggggttggcttttaacatgtttctacattctttatgtaa

SEQ ID NO: 36556 - DNA, 201 bp, Homo sapiens
accaaaacagctggcagaagtgtctgtcctattataagtttattttatgaaacatgagctataatgtagtccttttttttttttttttctttttttggagrcggagtctcggttgcgcctggctaattttttgtattttttagtagagatggggtttcaccgtgttagccaggatggcctcgatctcctgacctcatgatc

SEQ ID NO: 36557 - DNA, 201 bp, Homo sapiens
ctggcttcttttgctgtcatcccatatggaggtcaggcaataggtggtcctcatttcttgggtgcgaataaattttctgttgactacaaaagaagctttcmgttctagaaaggggtgaaaaagattgagtttgcctacgagggcggagaagctgctgcacaatactaagctgtggctgatacaggatcctcttcaggctca

SEQ ID NO: 36558 - DNA, 201 bp, Homo sapiens
gtgtggtaattattatttctattgtagactttaatcagccatattaaatatatgcattatgttcacagagaaaacatggtatcatctttggaaactttacrgtatgctctatattatagataccctatataactatggtactaaacacacgagttagtgacaagtcaggcatttggagggaatgtttgtaacccattgtgg

SEQ ID NO: 36559 - DNA, 201 bp, Homo sapiens
tcagcctcctgagtagctgggactatggcatgtgccaccatgcctggctaactttaaaaattttttgtagagatggggtctcactatgttgcacaggctgsccttgaactcctaggctcaagcgatcctctcgcttcagcctgagtgctggaaatacagacgtgagccactgcacccagccctcttctaatttcttaaaac

SEQ ID NO: 36560 - DNA, 201 bp, Homo sapiens
aagtaaaattgactggatttgattaatgaaatgcatgttagctgcgttttctggctttagagatttacttcccgtggtttcttctcagagctgaacaaatrgccagtgttcaaaatgcccagagagacaacgctggggaccgggcagatttctggagaatgcgtggccagaggtctggggtgaagaagaacctgaggaaaa

SEQ ID NO: 36561 - DNA, 201 bp, Homo sapiens
ggagaggcaaggttcttcagtggaaaggatataagctttctagtcacaccagcctgagttagaatctgtcctctgccactttttacttgtatgacctcaaycaacttactttacttctgacttcagtgtcctttctgtaaaatgagtctattaataatgatattgataatagctaaaattgagcatgtactatgtgccagg

SEQ ID NO: 36562 - DNA, 201 bp, Homo sapiens
atggtatttgtggaccacctttggaaactgatcaggaaatggagtgtattaaatcactaatatagatttgaaaataaacttaaaagcccagggtgaaaacrtgtcattgctctccgcaggccaaaacccagaacaaagaagaatcctatgacttctccaaatcctatgaatataagtcaaacccctctgccgttgctggta

SEQ ID NO: 36563 - DNA, 201 bp, Homo sapiens
gctgggattacaggcgtgagccactgcgcccagcctaactcaataatttagatgagaagaaagccataattgattgtgtgagccatcagaagtagtaaatrtgataggtactaagtaataataagtgacctcataaaatacatcagcgaaaatttgcaagccgggcaagactggaagtgtgaaggaaaagtggctgttagc

SEQ ID NO: 36564 - DNA, 201 bp, Homo sapiens
ggtggggactgtgtcctatgttgacaggtctttgttttcaaagtctgatgtacaatagagactaaacgttcaatgactgaatgcagttcatttttaaaaatttttttttttttgagacagagtctcactctgttgcccaggctggagtgcagtggcatgatctcagctcattgcaacctccacctcccaggttcaagcgat

SEQ ID NO: 36565 - DNA, 201 bp, Homo sapiens
ttagagtgcagatgagaggtgaggttgagcaacttggagaatacggctaaacattaataaaaagaaaagctaatggagttagaattacttagaaaataagrttggttgagaatgtgccatcgttctgggagtttgaatgggtgatatgagaacgttagggaatttgtctaggcctctagaattggatcgcttctccctcgg

SEQ ID NO: 36566 - DNA, 201 bp, Homo sapiens
ctaagtccttggatggttcccttggcctcagtgactctgagagagccatcactgcaggtgtgatcagtgccagggtcttcctttcttccttctctctcacttttttttttttttttttgagatgtggtctcactctgtcacccaggctagtgtccagtggcacagtctcagctcacttgagcctcctgggctcaagctgtc

SEQ ID NO: 36567 - DNA, 201 bp, Homo sapiens
atttcaactttgcaacatgtactgttgtgtttctgagttgttgactatttcagttccaaacagttcgttatttcctgtcagaggaaacttcagagtaacartaaagtgctggtgtggcttcaaaggcttggagaaatgaaaagcagtggagaaattttgtgaggttcctttggcttagaaggttcagaaaggctttgagcg

SEQ ID NO: 36568 - DNA, 201 bp, Homo sapiens
aatatttgaggggtaaaatggatggttacatctaaacgtgcagggtttttttcttgtcattattccctaaacaatatagtataacaacgatttgcgtagcrtttacattgtattaggaattataagtaatccagagatgatttaaagtatataagaggatgtacataagtcatatgcaaatactgtgtcattttgtatcag

SEQ ID NO: 36569 - DNA, 201 bp, Homo sapiens
ggaaactgaggcaaggagaaattaagtaactcgcccaaggtaaagggtggagcatggatttgaatccacactttctgactacagactctacgatgtgatctttttttttaaaacagctttattgagatataattcatataccatacaataaaagtgtgcaaccagtggcttttagtactgtatattcacagagttgtgtgg

SEQ ID NO: 36570 - DNA, 201 bp, Homo sapiens
cttgcatccaagcttcacacttgcttggtgtgtggccttgggctagttaatttcactactttaccttggtttctcatctataagatgggcatcatagcaayacctaccttgcaaagtttgtgtagtcgtgaaatgagctaatccaggtaaggtacttggaaagtaactggttgatgcatagtaagtgctattatgtaagat

SEQ ID NO: 36571 - DNA, 201 bp, Homo sapiens
gtctgtttttggagtttaaatttattgctgtttgcatttcaacacaactgctttgaaagctacaggttgcctcaggcaccctgtcatcctttcccaattctttttttttttttttttttggagactgagtttcactctgtcacccaggctggagtgcagtgacacgatctcagctcagtgcagcctctgcatcccaggttc

SEQ ID NO: 36572 - DNA, 201 bp, Homo sapiens
ttcttaaacagaagaaagctatgttacttggaggaaaacctgaagcatcattgcttacaaaatttgcttaatggttctttttggctttagaagtgatagtrcaataagaggccatggcaatgtagtttaaaagaaatcctaatttacctgcagtctgataattttaggggtacaatttgttattttggactaacttgcttg

SEQ ID NO: 36573 - DNA, 201 bp, Homo sapiens
gttgcctcaggcaccctgtcatcctttcccaattctttttttttttttttttttggagactgagtttcactctgtcacccaggctggagtgcagtgacackatctcagctcagtgcagcctctgcatcccaggttcaagcgattctcttgcctcagcctccagagtagctgggactacaggcatgtgccactacacccagc

SEQ ID NO: 36574 - DNA, 201 bp, Homo sapiens
tgaaaaatgaggcaaaagaaaccaggaattgagatgtgtgtgtgcctgtaccagcacccgtgtgagccccttgcaggtaacgacccatggtccctgcacaycagtcttctgttactaagttttgcataaattgagtctggtggttggcaagctacatatagccagctgcgtgtttgttgttttttctgcctgctagctaag

SEQ ID NO: 36575 - DNA, 201 bp, Homo sapiens
aggaatttccctttataaacctgtcagctgacaatgactatgctttgttttgtttctcatttgtttctgtaagcccatctgttcctgaacagtctctggtkattgatttgacctttattttattgagtgcttgtaataaatcctgaaagccacttattgaaggatttttaatatttctcctctctgatgtacaggattcca

SEQ ID NO: 36576 - DNA, 201 bp, Homo sapiens
tttttttggagactgagtttcactctgtcacccaggctggagtgcagtgacacgatctcagctcagtgcagcctctgcatcccaggttcaagcgattctcytgcctcagcctccagagtagctgggactacaggcatgtgccactacacccagcgaatttttttattttcagtagagatggggtttcaccatgttggccag

SEQ ID NO: 36577 - DNA, 201 bp, Homo sapiens
tcagtgcagcctctgcatcccaggttcaagcgattctcttgcctcagcctccagagtagctgggactacaggcatgtgccactacacccagcgaatttttktattttcagtagagatggggtttcaccatgttggccaggctggtcttgatctcctgacctcaggtcatctgcccgccttggcctcccaaggtgctgggat

SEQ ID NO: 36578 - DNA, 201 bp, Homo sapiens
cttcacatgttcttttttcctcttacagtttgaacatgtgtgagtgtttactttgatggcttgagacttttatgaagcatgtcccttatgtggacagcttkcgattaatctttggttttagctttgacctccatcactgggcagcagcagtctgtggatatagaatctaaaagccgcctgttcagggggactttgggcagt

SEQ ID NO: 36579 - DNA, 201 bp, Homo sapiens
gtaaaacattttcttttcatgctttttaatttctgtgtaacattagccattcagttgacctgaaacattgctagtttatttctagctggcgtgtgtgtgtktgtatcagagggtctatactgtataaatacttctctaaatattcttttccataatgttgctctaaagtgtctcatttactcaattctgtcaacttagatg

SEQ ID NO: 36580 - DNA, 201 bp, Homo sapiens
tcctccctgtgaggaaacgagtttggcacatatcccctggcagcatctgacatggcataagtactcagggagtatatgtcgaatgaatgagcctcttggtsggctcttgtacttgcactgaattgtaattgcttgtttacacatcccacctccccactgggctgtgtgacttcctttgcatcataacttggggtgatttgt

SEQ ID NO: 36581 - DNA, 201 bp, Homo sapiens
gggtttttaaaaatacttgtattaattttagcagatctatgtgaaactgatagcctcttactggatctgtggatcaaaggctgctgttttccatgtgctargaatctgtaatggttttgcttcctgggtagagcttaacatactggcttttgtgtttgttcatgtttgagaatttcttgttttgggataaaactttttgct

SEQ ID NO: 36582 - DNA, 201 bp, Homo sapiens
ttctgacatacgccgccaccacgtagacgaaccttgaggacattatgctatgtgaagtaagccaatcacaggaagacaaatcttgtgtgagtccacttatatgatgtgtctaatgtagtcaaattcatagaatcacaaaacagaatggtggttgccaggagctgaggggagagggaaatggggagttgtttgataggcatg

SEQ ID NO: 36583 - DNA, 201 bp, Homo sapiens
ataagttcctcataggaagagttttcctttgaccctcagaactgtgagcttcaagctttgtcttctatgaaaattaaagacattcccgaatttaatgtttrttgaattaatccaggtagaaaaaaatgtctctgggccagtgcccaggtacccagacttccagatcagtaatcacaatttcctcatttgaggggttttgtc

SEQ ID NO: 36584 - DNA, 201 bp, Homo sapiens
caatggaatattattcagccttagaaagggaggaacttctgacatacgccgccaccacgtagacgaaccttgaggacattatgctatgtgaagtaagccartcacaggaagacaaatcttgtgtgagtccacttatatgatgtgtctaatgtagtcaaattcatagaatcacaaaacagaatggtggttgccaggagctga

SEQ ID NO: 36585 - DNA, 201 bp, Homo sapiens
agtaggtctgggatctagttgtgttgattctggtgacctatcacaaacccctctctaagcttattgctttttgctgttaaacttggtcataagcaagctgygtccattgtgaagtgtgtgctgtgagcacatcgcatacactagatttaatcatccactgccggcactcagtgcattgtgaagggagggtaaggagctggt

SEQ ID NO: 36586 - DNA, 201 bp, Homo sapiens
tctcacataccccttttaatccttccccctgcagaaaactagagaccgccccccttcccccgtaaaaggaaaccccacatgatgagttcattacttgtcaycatctatttcttgtttatggagagtggcctgaactgtaaatagccaccagccagtttattgtgagtaaatttagcatcatgtggttggttgctgaatgtg

SEQ ID NO: 36587 - DNA, 201 bp, Homo sapiens
taacacacatgagctgggacagaaggtagagaacatagaaaatgcctggtgaggattatgtgcatagctgatcagacagtggggaacgactgatgatattygcaaaggaggttaagtcctggcagagtttttttgttttgttttgtttttgctttttgttgttgttgttgttttaatgaggaacttcaggcattttgtcca

SEQ ID NO: 36588 - DNA, 201 bp, Homo sapiens
tttgtaccaggcaggcagtgatctgggaagcgaggaggaggaaatggtttaaggaacatgtacctcccaagatggaaaggatttgggggttcagcagagtrggatcatcaaatgaatcccagtgcaagtctactgactttggtgggtggagagtaaatcgaggagtcccatttggagtgagtgcccaggagaaaggcaaga

SEQ ID NO: 36589 - DNA, 201 bp, Homo sapiens
cccagttttcagtcagcttacagaccgaggagcgtgtacagcctgagtaccagcggcgacgtggggcagggggtgtcccctctgtgtcacatgtgactcamgcccggcaccaggaatcctgcctacatacaactagaaccagcttctccctcccaatccctctcagctccaccccaggcttctgtacagccattggtgaga

SEQ ID NO: 36590 - DNA, 201 bp, Homo sapiens
tgaaaggtgaaagggggaaaaaaataatctcacccatagacaatcagtgtttatatttatttctggacatttcctctcaagccttttttttttttttttttaaattcaacatttaaactgtgaagctttctgattttgctcttggtaaagccttcaaaaaatcccaacattttcctgggcttggtacagccctatatccaa

SEQ ID NO: 36591 - DNA, 201 bp, Homo sapiens
acttgctggtacacagtctgcccttcccgacgcaggcacactgtgaacttaagagggcagataggctggaacggggtaaaccacagggaccacagactaartcttccctctcctcaaatcagctcctcccctttcagagcctgcaactgttaccactgcaccatcagcttcaagtcatcccccaggctcagtgaatcacca

SEQ ID NO: 36592 - DNA, 201 bp, Homo sapiens
ttgggattacaggcatgagccacgtcgcctgaatactgcccgaccagttttttttttaatagtttaaaatggtctggcttgttagggttaacacctggtcygtggaggcattcagaaagaatctgaatgcctgttggtcagggaagctgtagaagggatttctgtattggaaagagattgatctcagttgcgtttcaactc

SEQ ID NO: 36593 - DNA, 201 bp, Homo sapiens
taggctggaacggggtaaaccacagggaccacagactaagtcttccctctcctcaaatcagctcctcccctttcagagcctgcaactgttaccactgcacyatcagcttcaagtcatcccccaggctcagtgaatcaccaagtcctgctacctccccatccatctatctcccaagctttctctcccttctccactacggtg

SEQ ID NO: 36594 - DNA, 201 bp, Homo sapiens
tggtctcaaactcctgggctcaaccggtcctcctgtcttagctccccaaagtgttgggattacaggcatgagccacgtcgcctgaatactgcccgaccagktttttttttaatagtttaaaatggtctggcttgttagggttaacacctggtccgtggaggcattcagaaagaatctgaatgcctgttggtcagggaagct

SEQ ID NO: 36595 - DNA, 201 bp, Homo sapiens
tattgctaataggaagttgaggcaggtacacaatatgccagatgcaagggcagatcctcgtttttgttgggcttatacaaattttggtgttctgttaaaaaaataactcaaaattatcagtgcaacattagtattgggccttggaaaggactgtgtaagtgaagggccttgacacttcgttggcttcatagtaatccacct

SEQ ID NO: 36596 - DNA, 201 bp, Homo sapiens
tgggggatgacgttcctccttttcacaggtgccatcaccccactcatcaggtaccgtcgccgtgtcaggtcctccctgagagtggccagagctgggggagcagacacagaagggaggcagggaatgggcatgcctgaggaggggcacacagctatgtgtgtgactgcagtggggaaccagtaagcagcatgcagatacgta

SEQ ID NO: 36597 - DNA, 201 bp, Homo sapiens
ttattgctaataggaagttgaggcaggtacacaatatgccagatgcaagggcagatcctcgtttttgttgggcttatacaaattttggtgttctgttaaaaaaataactcaaaattatcagtgcaacattagtattgggccttggaaaggactgtgtaagtgaagggccttgacacttcgttggcttcatagtaatccacc

SEQ ID NO: 36598 - DNA, 201 bp, Homo sapiens
atgatgagggcaaaggaagcataaaagtggacatcatatgtgttgtacatgcggtactcctggcctggaggaatgaatgagacacactgttgccagaattsctgcttccccttcaaacccctctgtagcttgtcctctagatttagaggtggggcattgttactagtccacacccaacaccccctcatcctaaccaatacc

SEQ ID NO: 36599 - DNA, 201 bp, Homo sapiens
ccttcttccctaggcagtccccaacttgtgactaggccttgtacatcctgggtccctatttcccacctatgttgtctgtaaacaacacagtccagaatctytgtcccctaactgtggtggccacagcaagggccttgggcttagagaatggaataaagaagctggaatcccagatgcctgcaattctagctaaagccagaa

SEQ ID NO: 36600 - DNA, 201 bp, Homo sapiens
atgcataccagggaaaaatgggaggctttatagacggacaagatggcattgggttatgccttgaagaaatttggtggttgaggaagttttctgggccaggmtacagatggtggagagatgggaaaaggagtgcattacctcttggatcatggtagctgccagcccgtagaccacacccacccagacttcatcagactgcac

SEQ ID NO: 36601 - DNA, 201 bp, Homo sapiens; identical to SEQ ID NO: 5392

SEQ ID NO: 36602 - DNA, 201 bp, Homo sapiens; identical to SEQ ID NO: 5391

SEQ ID NO: 36603 - DNA, 201 bp, Homo sapiens
acaaaaccagcagcagcagcacctgcatcttggtgaggatggtgatgaggggagaaatccttttctcagttggtggggacagggcaatccagagcccttcytcatctcctttttcctgtgctctaggtcctactagtctccttctgcctcctccttgtacctgctatgtactcctctgacacaagggggagcctgccagct

SEQ ID NO: 36604 - DNA, 201 bp, Homo sapiens; identical to SEQ ID NO: 5389

SEQ ID NO: 36605 - DNA, 201 bp, Homo sapiens
cagcatcctgtaccctcaaggtagccaaatcgaccgtagtcccgtagggtggggcggaggtgacacatgtttctgcccagctcctctggtagggagtcctyaagaacttccagccacactgtgcctccatcagccaggaagtatagttcattgaacagcgcagatttgtaccaggcaggcagtgatctgggaagcgaggag

SEQ ID NO: 36606 - DNA, 201 bp, Homo sapiens
tggttagtggggtattgggagaggaaaataagcccatttctaactttctagactataaagcctggttcctctgaaaacctaggggatggaacagtgcaatytgcataagctggaagtctcttcctaactgtggtagacctggaggctaggccttctctgagcagagcagagatggggtggggctcaccataaatctgtctt

SEQ ID NO: 36607 - DNA, 201 bp, Homo sapiens
catcccatcgacttcccggctgggtgtgaggtacgtcaggaggcaggaacctgccagttctccttggtgcaaaaatctgaccctcggctgccctgcaaagkgggagggcctgacccagaatggggctcagccaacacccctgttcctggggctcctgctccccactccagctaaactcaactgatcatccatctgctgact

SEQ ID NO: 36608 - DNA, 201 bp, Homo sapiens
tggtggatccgagaagctggaggagtctgtggagccaagaagcaggactgaaaggacccttcacactaagctgaaactgcatgtctccccccatttcctcyggacacttagacacccccttcctcctcaagcacggaagcctctggtgagaccccgataagggagctgagtcatgcctacccttactccccagctggtcca

SEQ ID NO: 36609 - DNA, 201 bp, Homo sapiens
ggaaggggtatgattgtcctgatggctcagggttgcaggaggttcagaggggaaggaggaaaggccaggctggaggctgggctgttagcacttccctcccmcagttcagacggctcactctgggctcaggtttgccatggcttcctttggtccaaacataggccctgtccttagtcctgtgccctgtttgacttttggcca

SEQ ID NO: 36610 - DNA, 201 bp, Homo sapiens
gggctagtaggcagcaccttgatgggcaggtcccagctgaaggtgtctacaggtacttgctcaggtcctgtccaggtggtaggttcgggctgttccacagsgggtaggagtaccaatcctggttctcgggacgttacaaattcaaaatgcaatctccacttcaaggacactatggaagaaaaagattaaggtagaagcatc

SEQ ID NO: 36611 - DNA, 201 bp, Homo sapiens
agtctgtaacctgcacatccttggtgccgccagtctcttcagggcaataaacttgtggatcctctttggcacagcttatctgctccgaggctgggacgccrgttcccatgttccctggatcctgggtccccatgacctcgatggcgccaagtcccgagccctcggatactaagtatctcgccagcctattccagatgcggg

SEQ ID NO: 36612 - DNA, 201 bp, Homo sapiens
acttactcttaacctcccaggcccaggggcttacaggagtatgatgagggtggatgaagagaccatgctggggtggaggtggggttcaggggctaaggtayagggcaggctctttccttaccgtgactcgtgcagccacagccatcgtgtaggggtttggaagggttggatgatgcaggagcagcccccggacagtttccc

SEQ ID NO: 36613 - DNA, 201 bp, Homo sapiens
tccctgaacatttcacgcagtcagggaacaggtgaggaaagaaataaataagtgattctaatgctgcctaggtcaccctcaacccccatttactggcacarttgggtggagagaagggaaggggtatgattgtcctgatggctcagggttgcaggaggttcagaggggaaggaggaaaggccaggctggaggctgggctgt

SEQ ID NO: 36614 - DNA, 201 bp, Homo sapiens
cttccaatcagcagtatcatggattaaatatgcattgacgcggagccatggttcatcatctgtgggagaggaggggacttgggtcacttgcattggtggayagggtagagggtgcaaaagttgagggagggaagctgaccttggggtggacttttacctgggtccccaatatcatgggggatgacgttcctccttttcaca

SEQ ID NO: 36615 - DNA, 201 bp, Homo sapiens
gttcatcatctgtgggagaggaggggacttgggtcacttgcattggtggatagggtagagggtgcaaaagttgagggagggaagctgaccttggggtggayttttacctgggtccccaatatcatgggggatgacgttcctccttttcacaggtgccatcaccccactcatcaggtaccgtcgccgtgtcaggtcctccct

SEQ ID NO: 36616 - DNA, 201 bp, Homo sapiens
gtgccatcaccccactcatcaggtaccgtcgccgtgtcaggtcctccctgagagtggccagagctgggggagcagacacagaagggaggcagggaatgggyatgcctgaggaggggcacacagctatgtgtgtgactgcagtggggaaccagtaagcagcatgcagatacgtatgaagggaagggaaagaagagacaatct

SEQ ID NO: 36617 - DNA, 201 bp, Homo sapiens
gttcctctgaaaacctaggggatggaacagtgcaatttgcataagctggaagtctcttcctaactgtggtagacctggaggctaggccttctctgagcagrgcagagatggggtggggctcaccataaatctgtcttaggggtacagaattgatcatgtcgatgaaaggtgtcttcttttccacatgggtcttccggtacc

SEQ ID NO: 36618 - DNA, 201 bp, Homo sapiens
atgctaggccaggggatgctcactattggcccctctcttcctctaggtcccttctagatcaactgaggaaactccaggccatggtgattgagatatcaaayaaaaccagcagcagcagcacctgcatcttggtgaggatggtgatgaggggagaaatccttttctcagttggtggggacagggcaatccagagcccttctt

SEQ ID NO: 36619 - DNA, 201 bp, Homo sapiens
agagaggaagaagtcgtttgcaaaaatagaatgaaaagtaagagagaggatccagtgcagagatggaggaggtggcctgaacaggagtttcactgtgtctyaggatgctaggccaggggatgctcactattggcccctctcttcctctaggtcccttctagatcaactgaggaaactccaggccatggtgattgagatatc

SEQ ID NO: 36620 - DNA, 201 bp, Homo sapiens
gagctgccatgattgaagtggtagcagagctcagccggggtcctgtatttttggctggggaggcgctggagtgtgtagtgaccgtcaccaacccccttccscccacggccacttctgcatccaggtggggatgctggcactgaaggtggtggcccttctgggaagaagccagattatctctggggctgaggcagagctcag

SEQ ID NO: 36621 - DNA, 201 bp, Homo sapiens
acaggtgcctgccacaacgcccagctaatttttttttttgtatttttagtagatatggggtttcacgtgttagccaggatggtctcgatctcctgatctcrtgatccgcctgccttggcctcccaaagtgttgggattacaggcgtgagctaccgcgcctcgcaggccatgcagtttctagcagaggcaggtcctggggaa

SEQ ID NO: 36622 - DNA, 201 bp, Homo sapiens
ccggtttccccaggatgaggctgtagccccatccagtccattcttggaggaggatgaaggtgggaagaaagattcatggctagctgagctggctggggaaygcctaatggctgccacatcctgccgcagcctccgtgagaattctttcagaattgtcctaccccatccttcccctcattgttttcccatctcagagacagt

SEQ ID NO: 36623 - DNA, 201 bp, Homo sapiens
cccatcaccagtgggagagtccagctgtccatcctgaagtagatcctgccacacctgctgccccgtgctgtcagggtcaaaggctgtgatgtgggttaccrtggtagctgcctgtgaaggggtcagggactgtgagggcaggctccacgagtacactgggtcccggctagctccccagctcctcttacttactcttaacct

SEQ ID NO: 36624 - DNA, 201 bp, Homo sapiens
ttgctaataggaagttgaggcaggtacacaatatgccagatgcaagggcagatcctcgtttttgttgggcttatacaaattttggtgttctgttaaaaaaataactcaaaattatcagtgcaacattagtattgggccttggaaaggactgtgtaagtgaagggccttgacacttcgttggcttcatagtaatccacctct

SEQ ID NO: 36625 - DNA, 201 bp, Homo sapiens
cctgcatcttggtgaggatggtgatgaggggagaaatccttttctcagttggtggggacagggcaatccagagcccttcttcatctcctttttcctgtgcyctaggtcctactagtctccttctgcctcctccttgtacctgctatgtactcctctgacacaagggggagcctgccagctgagcatggaggtaagaggctt

SEQ ID NO: 36626 - DNA, 201 bp, Homo sapiens
attgctaataggaagttgaggcaggtacacaatatgccagatgcaagggcagatcctcgtttttgttgggcttatacaaattttggtgttctgttaaaaaaataactcaaaattatcagtgcaacattagtattgggccttggaaaggactgtgtaagtgaagggccttgacacttcgttggcttcatagtaatccacctc

SEQ ID NO: 36627 - DNA, 201 bp, Homo sapiens
ctctgtaggtcctggacgggaagggtcgggcctcgtcgtcattgagccgacgattagctcgcccggccaaagggcgactgggcccgcagagaggggaggarccgcggggccagcccaccaggcaccgccccgggacgggcccgcaaggcaccgcccccgggacctcggcccggcccctgggccacggcaccgggtccccca

SEQ ID NO: 36628 - DNA, 201 bp, Homo sapiens
cccgcgctctatggtcgcggggggcaggcaggaagctgctctggccccgttctcgatgctcgggagccgccaaagcccggcagcccctccctggcaggaarcgagggtgcggcgcaatccggagaggacgccaggacgacgcccgagttccctttcaggctagaactcttcctttttctagcttggggtagaaggcggagc

SEQ ID NO: 36629 - DNA, 201 bp, Homo sapiens; identical to SEQ ID NO: 5395

SEQ ID NO: 36630 - DNA, 201 bp, Homo sapiens
ctctggctgctcctcctcctctctcacctcagtgtctccttctcctaggccacaggccttcaggaaccactgtccagcacactggtcagacataacactaygagactgaggccgagagctgctgtcatagttgtaatagcggcctggagtcgaggaagagaaaaataaggctcctggtgtcctctcagctgccttaagact

SEQ ID NO: 36631 - DNA, 201 bp, Homo sapiens
ataccgactgccatttcttttgtttcctctcttcctctcagctgcaatatctagagaactttctgagatcaccacagcagaggcagagcctgtggttcctygaggaggctttgactctcccttttaccgagacagtctcccaggttctcagcggaagacccactcggcagcctccagttctcagggcgccagcgtgaaccc

SEQ ID NO: 36632 - DNA, 201 bp, Homo sapiens
ataaatcccaggaaaccaagtcaggcagagaggtggtagaatactttttattcttgactgtctccccctgaggaagcaacaataatacagaagctaagtcrtcccctgtgaagggaaaaaccaacagtcagacattactttgggcaagctcagaagccagggacacattttacaatgtttggggttcgactacgctgtgaa

SEQ ID NO: 36633 - DNA, 201 bp, Homo sapiens
tctctgctagaaagatcagttgaagttacaagagaaggacatccagatgtggaaggttagtctgcagaaagaacaagctagatacaatcagctccaggagyagcgtgacactatggtaaccaagctccacagccagatcagacagctgcagcatgaccgagaggaattctacaaccagagccaggaattacaggtataaac

SEQ ID NO: 36634 - DNA, 201 bp, Homo sapiens
cagtggtgtcgaggcagaagttttaagtcactttataaatagcctcaggtaatgttagtgaatgaggtgggaattgaattttaatagtagctgttcagatrcttcctgtcactaacttctccatcacacatgggccttctttttgggtttcttgggcatgtgctttgtaaagagtctttttcggccggatgtagagaggag

SEQ ID NO: 36635 - DNA, 201 bp, Homo sapiens
ggcagagaggtggtagaatactttttattcttgactgtctccccctgaggaagcaacaataatacagaagctaagtcgtcccctgtgaagggaaaaaccarcagtcagacattactttgggcaagctcagaagccagggacacattttacaatgtttggggttcgactacgctgtgaaaaccaggtcatcgcccttgctca

SEQ ID NO: 36636 - DNA, 201 bp, Homo sapiens
tggaaaaacaagctaggtggcccaagctgattagcccacactatcgccaagttgactggatgggcgccatctttgtttaaaattgagctcatgtcactccrggctctggggctgcctgcatttggaggaccagatatgacattatcgtcttctgactacacagaaggcaaactcagagtctccctagacaaatagtaggta

SEQ ID NO: 36637 - DNA, 201 bp, Homo sapiens; identical to SEQ ID NO: 5417

SEQ ID NO: 36638 - DNA, 201 bp, Homo sapiens
gtaggaacaaagaactgattcatgaccttgggactaagctgccaattccagcataaggactgtgtcacgtggtgtgggaagcagttactgctgactagacrggctgcaacactcagctcactccgtgtcagagacccactctgacgttcctttcctcaaaacgcccagtgatctcttcgtgttcgtgttcctggccttgag

SEQ ID NO: 36639 - DNA, 201 bp, Homo sapiens
atattctccccatgccctggacactttcttttctgtatttaataccgtgttttcagcatctaagatataatgagcttcctacaacagttgagtaggatcayatgctttgttaaggtaaacctatggagtgcccttagtgttgctgtgctgttttctgtaaacttggaaaaaaaatgcaaatctctgatggagttactaacc

SEQ ID NO: 36640 - DNA, 201 bp, Homo sapiens
acagaagctaagtcgtcccctgtgaagggaaaaaccaacagtcagacattactttgggcaagctcagaagccagggacacattttacaatgtttggggttygactacgctgtgaaaaccaggtcatcgcccttgctcaggagccacaaaatcagaattctggcttctgtcatggtctccctctcccaagtaaaggcgaagg

SEQ ID NO: 36641 - DNA, 201 bp, Homo sapiens
gtctaaattaggctaaaaagtatttgatagtttaataaaactgatgagtttactgaagaaagaagtcctgctaaaatccttgctggcttttttttttttttaaatagaaagcatacaaataacacttcacgttgcatagagtaagctataaaagtgctaaaatagaataatactcttctgagatactttgatttataattt

SEQ ID NO: 36642 - DNA, 201 bp, Homo sapiens; identical to SEQ ID NO: 5423

SEQ ID NO: 36643 - DNA, 201 bp, Homo sapiens
gtttaattggtggtgaaagacagttaccttaaagtgggcaaaggggattcctaagagacagctatttgcagagcccctcctaggcgttcattcattcatttgaggaactggaggatgaagagcctgcaatcggagggaccttgtagaattaaagctctttctttgtgtttcctgttaaagagttttgctttgtgtgttttg

SEQ ID NO: 36644 - DNA, 201 bp, Homo sapiens; identical to SEQ ID NO: 5424

SEQ ID NO: 36645 - DNA, 201 bp, Homo sapiens; identical to SEQ ID NO: 5426

SEQ ID NO: 36646 - DNA, 201 bp, Homo sapiens
tgtttaattggtggtgaaagacagttaccttaaagtgggcaaaggggattcctaagagacagctatttgcagagcccctcctaggcgttcattcattcatttgaggaactggaggatgaagagcctgcaatcggagggaccttgtagaattaaagctctttctttgtgtttcctgttaaagagttttgctttgtgtgtttt

SEQ ID NO: 36647 - DNA, 201 bp, Homo sapiens
tctcttgagtccagtattataaaacagagagtgggctagcggagttcagtgtcagtgtgagtgagtgtcagtgtaattccacatcctccgaatgtggacastccaatcaccagctccttttttcctccccggctttcttacaggcttgactgttgtaatgacgggtgctcagattccatggtagggcacaatgaagaggca

SEQ ID NO: 36648 - DNA, 201 bp, Homo sapiens
gtgtttaattggtggtgaaagacagttaccttaaagtgggcaaaggggattcctaagagacagctatttgcagagcccctcctaggcgttcattcattcatttgaggaactggaggatgaagagcctgcaatcggagggaccttgtagaattaaagctctttctttgtgtttcctgttaaagagttttgctttgtgtgttt

SEQ ID NO: 36649 - DNA, 201 bp, Homo sapiens
ggtgtttaattggtggtgaaagacagttaccttaaagtgggcaaaggggattcctaagagacagctatttgcagagcccctcctaggcgttcattcattcatttgaggaactggaggatgaagagcctgcaatcggagggaccttgtagaattaaagctctttctttgtgtttcctgttaaagagttttgctttgtgtgtt

SEQ ID NO: 36650 - DNA, 201 bp, Homo sapiens
gtcttttgtagtatccccaggacagagccatgtccagccttctctgttcagcatgaagagttattacagacatattctatacagtgtaagcagttttacasttacagggattacactgtatttctttgacttcagttgtctttgtttctcttcagaagagccacctggcagcaaaggttctgtcactctaagtgatcttcc

SEQ ID NO: 36651 - DNA, 201 bp, Homo sapiens; identical to SEQ ID NO: 5428

SEQ ID NO: 36652 - DNA, 201 bp, Homo sapiens
taacctaaaaccacacactaaccccctgtgttcttctcttccattttagggtgtgctacttctaccccttactccacgtctcggctgatgttgttaaataygccagggcagctacctcagactctgagttccccatcgacacggctgataactgaaccaccacaagtatggtgtcaactagtgtgcctgctctctcctctg

SEQ ID NO: 36653 - DNA, 201 bp, Homo sapiens
cttgggactaagctgccaattccagcataaggactgtgtcacgtggtgtgggaagcagttactgctgactagacaggctgcaacactcagctcactccgtktcagagacccactctgacgttcctttcctcaaaacgcccagtgatctcttcgtgttcgtgttcctggccttgagtccctccatatggccacaggaagtgt

SEQ ID NO: 36654 - DNA, 201 bp, Homo sapiens
gtgtcctgccatgtctacgatggttgtaaagaaaaggttttgttgaatccgagtcattccaataaatgagtggagactgggatttcctgcccggggtggtytaataggagcaccatgatccaggcaacaggaaagaagcaggacagaggcctccccacaggcacacacggggcctcaagagcagcatcagagggacttact

SEQ ID NO: 36655 - DNA, 201 bp, Homo sapiens
tactgaggcctaaacataatgaaacgagtagtgaattctaaacaccaacctaataatatcaaaaacagtttttaagctattgcagtgaagtacctgtattytgacttgactatatctcttttcagagacattaagaactgagaattttatttgctatgggattatttttggtacttttagttatattatttttaatatttc

SEQ ID NO: 36656 - DNA, 201 bp, Homo sapiens
gcaggacagaggcctccccacaggcacacacggggcctcaagagcagcatcagagggacttactttgctctgaggctgcttaagtcgttgctttggctaaygagggttttgcatttctccaggaggttgttggtgactggggtgccagagtgcacggcctcaaagtgctggcagagcttattcagctctgaacagatgtcc

SEQ ID NO: 36657 - DNA, 201 bp, Homo sapiens; identical to SEQ ID NO: 5430

SEQ ID NO: 36658 - DNA, 201 bp, Homo sapiens; identical to SEQ ID NO: 5431

SEQ ID NO: 36659 - DNA, 201 bp, Homo sapiens
ggaggaagagtgagtggtggggaatcaggtgggaacagttggtaggggtagctgtaaggattagtgagagtgcacggatgttcctggttcaatgctttgcrtgattatccatgaataagtcctgttgtttatgacgaaggccagatagatgcgttcatccaccctgtgctgaagtcgagccatttagcacagctggaacag

SEQ ID NO: 36660 - DNA, 201 bp, Homo sapiens
taattccagtcttttttttttttttttttttcaggaagtagaaatgatgaaagccgcctatcggaaagagctagaaaaaaacagaagccatgttctccagyagactcagaggcttgatacctcccaaaaacggattttggaactggaatctcacctggccaagaaagaccaccttcttttggaacagaagaaatatctaga

SEQ ID NO: 36661 - DNA, 201 bp, Homo sapiens
tctcttcctctcagctgcaatatctagagaactttctgagatcaccacagcagaggcagagcctgtggttcctcgaggaggctttgactctcccttttacygagacagtctcccaggttctcagcggaagacccactcggcagcctccagttctcagggcgccagcgtgaaccctgagcctttacactcctccctggacaa

SEQ ID NO: 36662 - DNA, 201 bp, Homo sapiens; identical to SEQ ID NO: 5434

SEQ ID NO: 36663 - DNA, 201 bp, Homo sapiens
gcgtcttggtgttgataaccatgctaccaatgattccacagtctgggaaacagcatcttcttgatttctttgacatttttggccgtctgtcatcatggtgmctgaagaaaccaggtacagatctcctcatatacctgttgggccctgtgaggtgaatgctttcattattgattaattgctcatatgctgtaaggaatggac

SEQ ID NO: 36664 - DNA, 201 bp, Homo sapiens; identical to SEQ ID NO: 5436

SEQ ID NO: 36665 - DNA, 201 bp, Homo sapiens
tcgggcatggtggtgggtgcctgtaatcccagctacttgggaggctgaggcaggagaatcgtttgaacccaggaggcagaggttgcagtgagccgagatcrtgctactgcacgccagcctgggtgacagagcgagaatccatctcagaaaaagagagagaagaaaactttggtggaggaagaaattgtgaaagaaataata

SEQ ID NO: 36666 - DNA, 201 bp, Homo sapiens; identical to SEQ ID NO: 5437

SEQ ID NO: 36667 - DNA, 201 bp, Homo sapiens
tttatatttaaaaacaaagaagtctttactgtagacagtgggattccaggaggttgtacagttgagtgcatatgttcaaccaactatattaacttggaagsctcctcagtcagcttatagagagcctcactcaccttggctgggcagattgtttggctttggaagaaggttttaacagtaaagacagacaccaacattaag

SEQ ID NO: 36668 - DNA, 201 bp, Homo sapiens
gaaaatgaaatcagggctagttctttctgctgagaatcattatatagtctcatatattctcaattctcctaccaatatattattcttactggatatcttcygtaatgaaaggcttgatgcttgatgtaaaaatcaaaatatatttaaaactttattcccagactcatagattcctattctaataggaataatggatgtctt

SEQ ID NO: 36669 - DNA, 201 bp, Homo sapiens
ggtgagaatataatctaaatggattgatgagaatataatctaattttgaggcacatcatttagttcagattgcaaaacacttatcttttccaaaagagtamgttttgttaatcatggataagtcttcagttagactgttaggaaaatgaaatcagggctagttctttctgctgagaatcattatatagtctcatatattct

SEQ ID NO: 36670 - DNA, 201 bp, Homo sapiens
ggcaggagaatcgcttgaacctgggaggcggaggttgcagtgacctgagattgcaccattgcactccagggcaacaagagtgaaactgtctcaaaaaaaamaaagatcttgtttaaagaaatcttacatttccagtactataattgtatagtgatgatttggcccataggtacccatctttcaacccatactttgaataga

SEQ ID NO: 36671 - DNA, 201 bp, Homo sapiens
ctgtgtcatgggttcccaacaggaagtggttctgctgcccccatagtccctgacatttggcaatgtctggagacattttaggttcatgtttttggtgctgytggtatccagtgggtaggagccagggtgctgccaaatatcctacaatgcacaggcagccccctgcaacaaagaagtatccatcctaaaccctgctctatg

SEQ ID NO: 36672 - DNA, 201 bp, Homo sapiens
tttaacagtagatatggattattttttgtaattaaaaaagcaataaagggccaggtgtggcggctcacgcctgtaatcccagcacttggggaggccgaggygggcggatcacaaggtcaggagattgagaccatgttggccaatgtggtgaaaccccatctctagtaaaaatacaaaaattagccaggcgtggtggcaggt

SEQ ID NO: 36673 - DNA, 201 bp, Homo sapiens
ttacagtaaagtctttggtacaactggtatgtatgtcttaggttggatttgattagttggttttggcctgcctttaatggcaggaggagctctcttttagrtctaagggaccacttgctgttgtaaacttgtttttgacacttattgcaaatccctggggctttcagaatgtgtaaagtgaacctaaaaacaaaaaagaga

SEQ ID NO: 36674 - DNA, 201 bp, Homo sapiens
tactaattccagtcttttttttttttttttttttcaggaagtagaaatgatgaaagccgcctatcggaaagagctagaaaaaaacagaagccatgttctcyagcagactcagaggcttgatacctcccaaaaacggattttggaactggaatctcacctggccaagaaagaccaccttcttttggaacagaagaaatatct

SEQ ID NO: 36675 - DNA, 201 bp, Homo sapiens
tagatggttttctggaaggaaccttgtacctgggattcatagcttggcaagcctcaaagatccttactcttcaattactaaaaattgttggccgcctttarcaattattcttattttgaaacaaaaaaaaccccagcttttaatagcatttttcttttttcatggggtactcttgtttatacttttgtcctcatttttaag

SEQ ID NO: 36676 - DNA, 201 bp, Homo sapiens
gttgctttaaattaattttgggggataaattatatgctatagtagtttttaggaattggatgatcctgtctcagaatatatccttcataaatgttgaggcrccggcatttccacggatggaatttcctcttagtgacttaactgatcactgaactgtaattttggtttagcagtaatagtgccaagcgcaacagagctgtg

SEQ ID NO: 36677 - DNA, 201 bp, Homo sapiens
ataaaatagtctatccatgcctggacctgtgtctgaattgtccttgaatttttatggataaaaaattgaatataggaaacaagttatagtgaagagacatstgccttcatttacacatgcagtacatttttacatcatagacaaatgtgtacaaaattatcttaggcaaattgatatgcggtcacctattttatgttacat

SEQ ID NO: 36678 - DNA, 201 bp, Homo sapiens
caagacttgagagattggagcacatcattgctgtctttatttgtgttaacttcatacattcatgtgaggactgcccttgttcttttacattttcagcaccycttggacaggattaacgaatatgtgggcaaagccgccactcgtttatccatcctctcgttactgggtcatgtcataagactgcagccatcttggaagcat

SEQ ID NO: 36679 - DNA, 201 bp, Homo sapiens
taccgactgccatttcttttgtttcctctcttcctctcagctgcaatatctagagaactttctgagatcaccacagcagaggcagagcctgtggttcctcraggaggctttgactctcccttttaccgagacagtctcccaggttctcagcggaagacccactcggcagcctccagttctcagggcgccagcgtgaaccct

SEQ ID NO: 36680 - DNA, 201 bp, Homo sapiens
tttaattgtcaactaatattccatcatttggatgttccacaaacattcagccctttataatttgtcaacccaactcttctagccaatgatggagcatgtgygaattcatccggaattagtgactggatccaaggaccatgaactggaccctcgaaggtatagaaactagtgtcaaaattttaaagaatctttcgagagatt

SEQ ID NO: 36681 - DNA, 201 bp, Homo sapiens
agaagcctcatatgaagatggctattctgtgtctcaccaaatctcagcccgctttcctcatcgttcagccgatgtcaccaccagcccttatgctgacacayagaatagctatggtaaaaagtgtctttggtacttatctgttttgcaactttgtctctggaaaacattatttgtctttgttgattttcttttctggagtaa

SEQ ID NO: 36682 - DNA, 201 bp, Homo sapiens
aaaggaactcctctgggaaccccagcaacctctcctcctccagccccactctgtcattcggatgactacgtgcacatttcactcccccaggccacagtcayaccccccaggaaggtgcgatccagctcgtctgctatccctctgcccaggcacagtgactcacttgcaagcctcactttgagaagcctaattatgccagat

SEQ ID NO: 36683 - DNA, 201 bp, Homo sapiens
gtcttgtgatataaatgatacttatcttttcaggaagagagaatggattctgcaagaccatgtctacacagacaacaccatcttctgaatgacagaggatsaggtaaaatttctgcgttactacaggccttgcttgcctcttctaattgggttatatgtgtttaagaaaagaaagttaaatggaaacaaggaaattctggg

SEQ ID NO: 36684 - DNA, 201 bp, Homo sapiens
gtgactgttcatcttcctttttctcagtttggtagtggccccaatgaagaaccttcagaacctgtagcacacgtcctggagccagcacagcgccttcgagygagagaatggcccaacaagcaaatgtcggggagcttcttgccatgctggactcccccatgctgggtgtgcgggacgacgtgacagctgtctttaaagaga

SEQ ID NO: 36685 - DNA, 201 bp, Homo sapiens
ttcagatgaaatgttcgcagtgtgtgttaaattgcctgtgttggaagacagctaaaatgatgacatttctggtctctgctagaaagatcagttgaagttayaagagaaggacatccagatgtggaaggttagtctgcagaaagaacaagctagatacaatcagctccaggagcagcgtgacactatggtaaccaagctcca

SEQ ID NO: 36686 - DNA, 201 bp, Homo sapiens
agctgttaaagaaagcaaaaggaaacacagaggaagatggtgtgccctctacctccccaatggaagtgctggacagactgatacagcagggagcagacgcrcacagcaaggagctgaacaagtaagggactggggcactctcttctgtgttaaatggtccattttattgtgaagtacagaaagtgtaagagaggaacaaga

SEQ ID NO: 36687 - DNA, 201 bp, Homo sapiens
gctggaggactgcaggaacatgattgcggagctgcggatagaactgaagaaggccaacaacaaggtgtgtcacactgagctgctgctcagtcaggtttccyaaaaggtaagaagaaatgaggcagacctgaatctgctgaaacaccatttgctaacattcttccttcagacaggttaaagaaatagattacttgagtgtct

SEQ ID NO: 36688 - DNA, 201 bp, Homo sapiens
acaacaaggtgtgtcacactgagctgctgctcagtcaggtttcccaaaaggtaagaagaaatgaggcagacctgaatctgctgaaacaccatttgctaacrttcttccttcagacaggttaaagaaatagattacttgagtgtctgtgtcatgggttcccaacaggaagtggttctgctgcccccatagtccctgacattt

SEQ ID NO: 36689 - DNA, 201 bp, Homo sapiens
gaaatagtgtgctcctagctgattccctgtttaatgacgtctatgtgctagttttatgtcgtcggatttttcactttgctcatgttttttggttagctctsaaacagtgagtcggtccagcagcagatggagttcttgaacaggcagctgttggttcttggggaggtcaacgagctctatttggaacaactgcagaacaag

SEQ ID NO: 36690 - DNA, 201 bp, Homo sapiens
caaattctgagggcccaagaaagtagagccgttgagctaaggcattcccagtcctctgtgggctggtggctaggtaggcctgtgatctggcctgttggtgytcctcaaacttcatgtccacgtctctttgggcagacgaagctggaggactgcaggaacatgattgcggagctgcggatagaactgaagaaggccaacaac

SEQ ID NO: 36691 - DNA, 201 bp, Homo sapiens
agcacagcagccgaggaggtcagagttcccagtccttcccactcctttgggcaggtcgcttgagattaagacatgaatggtgacacctcggaattccctcrtaattctcagaaaccgtggggacaagtgattttgtgtgtgtatgtttgcatgtaactggccatgatgatgaagggtcagaagatgattttatttctccaa

SEQ ID NO: 36692 - DNA, 201 bp, Homo sapiens; identical to SEQ ID NO: 5452

SEQ ID NO: 36693 - DNA, 201 bp, Homo sapiens
caaagcacagttctgaagtgtgtttctgtctatttttgttgtccttgggtaccatcctccccacctgccattatgtcagggactgtgaacccatgggactkgtttattttgccttaacattgaaatagtgtgctcctagctgattccctgtttaatgacgtctatgtgctagttttatgtcgtcggatttttcactttgct

SEQ ID NO: 36694 - DNA, 201 bp, Homo sapiens
agcacctcttggacaggattaacgaatatgtgggcaaagccgccactcgtttatccatcctctcgttactgggtcatgtcataagactgcagccatcttgraagcataagctctctcaagcacctcttttgccttctttactaaaatgtctcaaggtaggatgtttgtaaggatttgaatgaaatggttttatgagtatag

SEQ ID NO: 36695 - DNA, 201 bp, Homo sapiens
caggcaaggtaactttcatcaggaaaggcttttgtgtttttattaagtggaacttcctatattctggctggtctgtatctttcagaggacagctgcaggcygcagagagcaggtatgaggctcagaaaaggataacccaggtgtttgaattggagatcttagatttatatggcaggttggagaaagatggcctcctgaaaa

SEQ ID NO: 36696 - DNA, 201 bp, Homo sapiens
attcatgtgaggactgcccttgttcttttacattttcagcacctcttggacaggattaacgaatatgtgggcaaagccgccactcgtttatccatcctctmgttactgggtcatgtcataagactgcagccatcttggaagcataagctctctcaagcacctcttttgccttctttactaaaatgtctcaaggtaggatgt

SEQ ID NO: 36697 - DNA, 201 bp, Homo sapiens
ttctggtctctgctagaaagatcagttgaagttacaagagaaggacatccagatgtggaaggttagtctgcagaaagaacaagctagatacaatcagctcyaggagcagcgtgacactatggtaaccaagctccacagccagatcagacagctgcagcatgaccgagaggaattctacaaccagagccaggaattacaggt

SEQ ID NO: 36698 - DNA, 201 bp, Homo sapiens
cccgtctgtactaaaaatacaaaaattagccaggcgtggtggtgcatttctgtaatcccagctactctggaggctgaggcaggagaatcgcttgaacccargaggcggaggttgcagtgagccgagattgtgccattgcactccagcctgggcaacaagagcgaaactccacctcaaaaaaaaagaaaagaaaacatccca

SEQ ID NO: 36699 - DNA, 201 bp, Homo sapiens
caactgcagaacaagcactcagataccacaaaggtatgccagggctcgggagccagaccttagtggggaaagcgtttcagacccagacagtatgtctcccrcatggcatagagaatggcttgatgacttatttcctaaaagacggagcggcagtcccactactccgtggtccagctatacaagcactttccagccaccatg

SEQ ID NO: 36700 - DNA, 201 bp, Homo sapiens
atgatgacatttctggtctctgctagaaagatcagttgaagttacaagagaaggacatccagatgtggaaggttagtctgcagaaagaacaagctagatasaatcagctccaggagcagcgtgacactatggtaaccaagctccacagccagatcagacagctgcagcatgaccgagaggaattctacaaccagagccagg

SEQ ID NO: 36701 - DNA, 201 bp, Homo sapiens
ctgaaacaccatttgctaacattcttccttcagacaggttaaagaaatagattacttgagtgtctgtgtcatgggttcccaacaggaagtggttctgctgyccccatagtccctgacatttggcaatgtctggagacattttaggttcatgtttttggtgctgctggtatccagtgggtaggagccagggtgctgccaaat

SEQ ID NO: 36702 - DNA, 201 bp, Homo sapiens
gcctcctgagtagctgggaccacaggcatacaccacgatgctcagctgatttttattgtattttttgtagagatgggatctccctatgttgtccaggctgstctctaactcctgggctcaagtgatcctccctcctcagcctcccaaagttctggcattacaggcgtgagccactgtgtccagccggatgccactttttct

SEQ ID NO: 36703 - DNA, 201 bp, Homo sapiens
ttgtgtttagtggccctgggctgggtccctatggcctgggcaggacgagcggctcccctggtgctctcctggtgcgcctggggctcactcacgtgctgcarcaccttgcgcggcaacttctcggagtgggcgatccattctttcattaagtctaggatgagggggatgaggctgaccacgccgccgtagtggttccgggcc

SEQ ID NO: 36704 - DNA, 201 bp, Homo sapiens
gttttaacacaggaaaagctcattgatgtggtttcaaatttcactttgtaactttaagaaactaacacttatcaaattttggtgtaataacaaagatgatkatttgaaaagtctgtcaacatacgtttactttttgcggctgggcgtggtggcttgcttctgtatccagcactctgggagtccaagggaggtagattgctt

SEQ ID NO: 36705 - DNA, 201 bp, Homo sapiens; identical to SEQ ID NO: 5418

SEQ ID NO: 36706 - DNA, 201 bp, Homo sapiens
gatggatttgaaataagggtgtctggtgtgttcggatttgtttgcattttagaaaaccactcttcctgtctttggagtgaggtgggaatatacatagatamaaagtcctgctggcagccacttgtttatagctgttttgcactcctcaatctgtctccaactaagaggctcttctcaacgggttccttttctaggccacgt

SEQ ID NO: 36707 - DNA, 201 bp, Homo sapiens
tagatgttggacttaacagacttgtgacctaaccagctatactaactcttagccattgatgagactgtcaagaaggaaatagtatgtatttagttcttttrctgaaaaaagactgtctgctttttagatcaataatttgaaatataaatgtggtcttagccaaaacccaaggtagaatcagaagtaggaataaaacttaga

SEQ ID NO: 36708 - DNA, 201 bp, Homo sapiens
cttggcccccgaggggacggctgcaccctgggcctcggtccctcgggcaggggcgaggtgggccccttcgtcagtccctcacttggtggggtgacaggttyacgctaggtgcggagggcagggtagagacgcttggcgggaggggaagggtcgcgagggtggggctggtcccagaacttaaagagaggggtcggggtatag

SEQ ID NO: 36709 - DNA, 201 bp, Homo sapiens
cagcacctcttggacaggattaacgaatatgtgggcaaagccgccactcgtttatccatcctctcgttactgggtcatgtcataagactgcagccatcttrgaagcataagctctctcaagcacctcttttgccttctttactaaaatgtctcaaggtaggatgtttgtaaggatttgaatgaaatggttttatgagtata

SEQ ID NO: 36710 - DNA, 201 bp, Homo sapiens
cggggatcacttgaggtcaggagttcgagaccagcctggtcaacatggtgaaaccccatctctactaggaaaaaaaaaattagccaggcgtggtggcacgygcctgtaatcccagctactcgggaggctgaggcaggaaaaccacttgaacccgggaggaggaggctgcagtgagccgagatcatgccactgcactccagc

SEQ ID NO: 36711 - DNA, 201 bp, Homo sapiens
atttttatttttcttcttatatactatgctatggtggaatttgacagggattatagtatttaagctccctctttttaaacgagatttggtatgataggctyaggtaaattacctactttttccttaaatcggagtgacatagctttacaacagagtgtactccctgtatatttcaacagacagggttgaaaacggctctca

SEQ ID NO: 36712 - DNA, 201 bp, Homo sapiens; identical to SEQ ID NO: 5420

SEQ ID NO: 36713 - DNA, 201 bp, Homo sapiens
gtgttaaattgcctgtgttggaagacagctaaaatgatgacatttctggtctctgctagaaagatcagttgaagttacaagagaaggacatccagatgtgraaggttagtctgcagaaagaacaagctagatacaatcagctccaggagcagcgtgacactatggtaaccaagctccacagccagatcagacagctgcagc

SEQ ID NO: 36714 - DNA, 201 bp, Homo sapiens; identical to SEQ ID NO: 5422

SEQ ID NO: 36715 - DNA, 201 bp, Homo sapiens
cgtaggaattgtaaaataaggtagggatttttgtcttacagctctacattggttcataagtagggtcttgatacaaattgtagactgtcgaaagttaagtrttgttctcaagtagggaaagttttctgagtttgatttttcattttcagtgtttttgtgtatacttcatactgttccttttttagaagtccactgtatatg

SEQ ID NO: 36716 - DNA, 201 bp, Homo sapiens
agactgatctagatccccagaaagttaactctagcagctttatttatagtaatagttataggctgaaaaaaaatcggcagtttttctaatagttgggctcrgtgttcatatatgttctgcccttgtctctaagcaggtggaaaaggaactcctctgggaaccccagcaacctctcctcctccagccccactctgtcattcg

SEQ ID NO: 36717 - DNA, 201 bp, Homo sapiens
aaatgccttctcagtccttcttacattgtcttttcaaaatggatacagcatgtttattttttataagtactaattccagtcttttttttttttttttttttcaggaagtagaaatgatgaaagccgcctatcggaaagagctagaaaaaaacagaagccatgttctccagcagactcagaggcttgatacctcccaaaaac

SEQ ID NO: 36718 - DNA, 201 bp, Homo sapiens
tccagtcttttttttttttttttttttcaggaagtagaaatgatgaaagccgcctatcggaaagagctagaaaaaaacagaagccatgttctccagcagastcagaggcttgatacctcccaaaaacggattttggaactggaatctcacctggccaagaaagaccaccttcttttggaacagaagaaatatctagaggat

SEQ ID NO: 36719 - DNA, 201 bp, Homo sapiens
aaaatgccttctcagtccttcttacattgtcttttcaaaatggatacagcatgtttattttttataagtactaattccagtcttttttttttttttttttttcaggaagtagaaatgatgaaagccgcctatcggaaagagctagaaaaaaacagaagccatgttctccagcagactcagaggcttgatacctcccaaaaa

SEQ ID NO: 36720 - DNA, 201 bp, Homo sapiens
agagttattacagacatattctatacagtgtaagcagttttacacttacagggattacactgtatttctttgacttcagttgtctttgtttctcttcagargagccacctggcagcaaaggttctgtcactctaagtgatcttccagggtttttaggtgatctggcctctgaagaagatagtattgaaaaagataaagaag

SEQ ID NO: 36721 - DNA, 201 bp, Homo sapiens
tcctcagcaagaaaatctttcccaggctggacgtggtggctcatgcttgtaatcccagcactttggtaggccgaggcgggtggatcacgaggttaggagawcgagaccatcctggcgaacatggtgaaaccccgtctctactaaaaatacaaaaaattagccaggtgtggtggcgcacacttgtagtcccagctacttggg

SEQ ID NO: 36722 - DNA, 201 bp, Homo sapiens
tcaaagagggagagagaaaaagaaggatgggggaccaattctgtttaacatacctctcaggaccatggatatagagtgctgtacataccatttttttttttccttttaatgttggatttctgcagatggtagttcagtcctggcaacaaggccagcattgggatgatcttacattaattagtgcctcaccagtggtgtcga

SEQ ID NO: 36723 - DNA, 201 bp, Homo sapiens
gtctgtactaaaaatacaaaaattagccaggcgtggtggtgcatttctgtaatcccagctactctggaggctgaggcaggagaatcgcttgaacccaggakgcggaggttgcagtgagccgagattgtgccattgcactccagcctgggcaacaagagcgaaactccacctcaaaaaaaaagaaaagaaaacatcccaaca

SEQ ID NO: 36724 - DNA, 201 bp, Homo sapiens
tgatccccagtttatgctagatgttggacttaacagacttgtgacctaaccagctatactaactcttagccattgatgagactgtcaagaaggaaatagtrtgtatttagttcttttgctgaaaaaagactgtctgctttttagatcaataatttgaaatataaatgtggtcttagccaaaacccaaggtagaatcagaag

SEQ ID NO: 36725 - DNA, 201 bp, Homo sapiens
aacccaggaggcggaggttgcagtaagtcgagatcacaccactgcattccagccccagcctgggcaacagggcaagactgtcacaaaaaaaaaaaaaaaaagtgcaaggtagactagtgggttttaacacaggaaaagctcattgatgtggtttcaaatttcactttgtaactttaagaaactaacacttatcaaattttg

SEQ ID NO: 36726 - DNA, 201 bp, Homo sapiens
ccttcatccttctttttcctagaccagtggttctgaacctttagtggacgtcagaattacctagaaggccccacccccaaagtatccaattccgagatctrgtgaaaggcctgagaatttacatttctaacaaatacccaggctcctgctcgtggtgccaggaccacattttgagaaccactgccctagactatcaaacta

SEQ ID NO: 36727 - DNA, 201 bp, Homo sapiens
ccccatcgacacggctgataactgaaccaccacaagtatggtgtcaactagtgtgcctgctctctcctctgctttctggtgaagctgaccctttgggtcaratttagtatgtggttgggaaaatttcacactgctcatttcaggagtcacttttaaggatccatgatattagcaaagaaagttactgttgcctcttagatt

SEQ ID NO: 36728 - DNA, 201 bp, Homo sapiens
aatccattctaaagacatcttaggtatctgccactagtattttcaaaaggtttgtgtgtactcttggctctctcacagctcataatgcatcttggctaggrcagagatatgtgaaaaaaatggcgtacgggtcctgctaatgacagctgtccatggctgttaggctagagttcatgtgtaatcctaggcatataagccatc

SEQ ID NO: 36729 - DNA, 201 bp, Homo sapiens
actgtgtccagccggatgccactttttctcctctctctgagtgacactggcatgtggcagcatgccacccaaactgcctagtctttcccaggtggaatacygactgccatttcttttgtttcctctcttcctctcagctgcaatatctagagaactttctgagatcaccacagcagaggcagagcctgtggttcctcgagg

SEQ ID NO: 36730 - DNA, 201 bp, Homo sapiens
tctgtcacacccttacagtaaagtctttggtacaactggtatgtatgtcttaggttggatttgattagttggttttggcctgcctttaatggcaggaggarctctcttttagatctaagggaccacttgctgttgtaaacttgtttttgacacttattgcaaatccctggggctttcagaatgtgtaaagtgaacctaaaa

SEQ ID NO: 36731 - DNA, 201 bp, Homo sapiens
ggttataaattactttgttaaatttctgtagtgtacccaggtatgtaacctgctacgtgcttgtcaggcttggcattcggtctgtgctggtacctttagcmcctggcagaattccactgggccttttccccaaggtttatgcactctatatatttttttccttttgaacctcaaaggaggtatattaatgaatgaatgttt

SEQ ID NO: 36732 - DNA, 201 bp, Homo sapiens
ttgtatatcaagataaagcagctgctctactaccatagagagcttgggttttgaagggtgagtttttgaagatttgccctgatgatcccatctatggatayctccctgtagccagtggtatttgggtgtgcaattagatgtctcagatgagaggtatatgctaaaacagagaaatgatccccagtttatgctagatgttgg

SEQ ID NO: 36733 - DNA, 201 bp, Homo sapiens
gtcagttaagtccctcagattttttaggtacagagaattgaatattatcaaatggtctagaggaccatcttttttttttttttttttttttttttttttamccagaataacctaaaaccacacactaaccccctgtgttcttctcttccattttagggtgtgctacttctaccccttactccacgtctcggctgatgttgt

SEQ ID NO: 36734 - DNA, 201 bp, Homo sapiens
ctatcacttattttggaggtgtaatgactgggaacagaaagggggagaaacagatccgaggcacaagagagctcctgaaaaagctgctgaaacgtgcctgkgccatctcctgagagaagcctagatgggcggcctccaaggagtccttgtgctgtttgggaccttgagtagctgcctctccatggggccctgtttcccagt

SEQ ID NO: 36735 - DNA, 201 bp, Homo sapiens
gactttcattgcattttacaggtggaagagattagaaactcatgatgttgtgatcgagtgtgccaaaatctctctggatcccacagaagcctcatatgaakatggctattctgtgtctcaccaaatctcagcccgctttcctcatcgttcagccgatgtcaccaccagcccttatgctgacacacagaatagctatggtaa

SEQ ID NO: 36736 - DNA, 201 bp, Homo sapiens
gacagttttaaaaatattcttggccgggtacagtggctcacgcctgtaatcccagcactttgggaggctaaggcaggtggatcacctgaggtcaggagttsaagaccagcctggcaaacatggtgaaaccccatctctactaaaaatacaaaaaattggctggggatggtggcgggcacctggaatcccagctactcggga

SEQ ID NO: 36737 - DNA, 201 bp, Homo sapiens
tgtttctataggataaattcttagaagtgaaaccatggatcacataacaggaatctttagacagttttaaaaatattcttggccgggtacagtggctcacrcctgtaatcccagcactttgggaggctaaggcaggtggatcacctgaggtcaggagttcaagaccagcctggcaaacatggtgaaaccccatctctacta

SEQ ID NO: 36738 - DNA, 201 bp, Homo sapiens
tatggcaggttggagaaagatggcctcctgaaaaaacttgaagaagaaaaagcagaagcagctgaagcagcagaagaaaggtaggaacaaagaactgattsatgaccttgggactaagctgccaattccagcataaggactgtgtcacgtggtgtgggaagcagttactgctgactagacaggctgcaacactcagctcac

SEQ ID NO: 36739 - DNA, 201 bp, Homo sapiens
ctccgccttccaggttcaagtgattctcgagtcttagccactcaagtagctgggattacaggtgcatgccaccatgcctggctaattttttttttttttttgtattttttttttaagatggggttttgccatgttgcccatgctggtctcgaacttggcctcaagtaatccgcctgccttggccacccaaaatgctgagat

SEQ ID NO: 36740 - DNA, 201 bp, Homo sapiens
atcaattttgaaaacaacaaaaacagttacatatttattttgagagcattgaggaggagggaaaggatatatggaagagtcctcaatcctcacttcccattaatagtaagttaatagatggtgtctataatttataaatcaagaaattaaaagcacagggcatattctttagaactatagaggcaggataacaattcagct

SEQ ID NO: 36741 - DNA, 201 bp, Homo sapiens
gtaaatagaaagcagaaccaaaggatagagcttggtaatatgagcagaacagagatttagaatgatcagttcaggaagtcccagcatccaattaaaaaaawtttttttttaaagaagagccgggtgcagtggctcacgcctgtaatcctagcactttgggaggcggacgggggaggatctcttgaggtcaggagttcgaga

SEQ ID NO: 36742 - DNA, 201 bp, Homo sapiens
tatccattgggtgttaagtgtcttcagttagcctgaagttatttatttgacttaatatttaaactgtaggcgtgctgaaaggtttccatatatatatatattttaatttactggtctctaaatactgctttgaagtgagcctttaagttgacttgttagtgctatatgaatttctccttcaattatacttctgttgtagtt

SEQ ID NO: 36743 - DNA, 201 bp, Homo sapiens; identical to SEQ ID NO: 5446

SEQ ID NO: 36744 - DNA, 201 bp, Homo sapiens
gtatccattgggtgttaagtgtcttcagttagcctgaagttatttatttgacttaatatttaaactgtaggcgtgctgaaaggtttccatatatatatatattttaatttactggtctctaaatactgctttgaagtgagcctttaagttgacttgttagtgctatatgaatttctccttcaattatacttctgttgtagt

SEQ ID NO: 36745 - DNA, 201 bp, Homo sapiens
tagccaggcgtggtggtgcatttctgtaatcccagctactctggaggctgaggcaggagaatcgcttgaacccaggaggcggaggttgcagtgagccgagrttgtgccattgcactccagcctgggcaacaagagcgaaactccacctcaaaaaaaaagaaaagaaaacatcccaacaatttgagaatcactgcactcggc

SEQ ID NO: 36746 - DNA, 201 bp, Homo sapiens
ttttgtattttcagtagagatggggtttctccatgttggttaggttggtctcaaactcccgacgccaggtgatccgcccaccttggcctcccaaagtgctrggattacaggcgtgagccaccacacctggcctgggctcctgcactttaattcaagccctgtgacttgcagtgagtgtggccaggcaagcactccctgtca

SEQ ID NO: 36747 - DNA, 201 bp, Homo sapiens
cagaagctaagtcgtcccctgtgaagggaaaaaccaacagtcagacattactttgggcaagctcagaagccagggacacattttacaatgtttggggttcractacgctgtgaaaaccaggtcatcgcccttgctcaggagccacaaaatcagaattctggcttctgtcatggtctccctctcccaagtaaaggcgaagga

SEQ ID NO: 36748 - DNA, 201 bp, Homo sapiens
aatgagtacgtgagtcaacttgtgatttgtgattctctcagtgtttagagcctcttcatgtactgtacaatgccgatcctggtgccagtgcctgacagacrtttcctgtttgaccttttctcctgcagatggacactgacgtcgttgtcctcacaacaggcgtcttggtgttgataaccatgctaccaatgattccacagt

SEQ ID NO: 36749 - DNA, 201 bp, Homo sapiens
ctccaactactaagacctattcaatcacacatgactacacatgttggcaggttttaccatcagctgttttactctcacatagtaagtagttatttcctacmcttttttccttccttctaggcactgataggaagagagaatgggagcaagtatcttaccctttttagatgcatttgtgctgaaggcgtcttggttcacttg

SEQ ID NO: 36750 - DNA, 201 bp, Homo sapiens
tatatgaagcacctactgtgtgctggcccttttctaggcatttaatataatttgatgaaaaaaagcaaaaaaaaaaatccctgccctcctgggcctccgtyctagtcggagagtcagacagtaacactagacgtcataagcaggtacggtagatgtgacgccctcacggcctcctctagatacggctgcatcctcccctat

SEQ ID NO: 36751 - DNA, 201 bp, Homo sapiens
aacaggatccagctccctcacaaactctagagctggagccagctccagcaccagttccatcattacagccttcctggccttcacctgtggttgcagagaaygggctgagtgaggagaagcctcacctcttggtgttccctccagatctggtggcagagcagtttacactgatggatgcggtgagcagctcagcttggcagg

SEQ ID NO: 36752 - DNA, 201 bp, Homo sapiens
gtgggccccaggaggcccccagaggtcccccagctgttccaagtgagaccagttggggctgggggctgagaaagccttcaggggaggggccttgctcatcytcctaccccaatgtcacagggcatcatccagggcaccgttccctacctgggcacgttcctcaccgacctggtgatgctggacactgccatgaaggactat

SEQ ID NO: 36753 - DNA, 201 bp, Homo sapiens
gcagatagagacttgaggggtccttccccccaaccccagccccagaccctgcctcaggggagctgggatgcctgaggtggtcctgctgctcctggtggggktcagcacagcccctcagaggcgcctttgatatacaaaggggcgaggcagtgtggggctgaggagcaggggtcaggtccccgccatggagctgctcacatg

SEQ ID NO: 36754 - DNA, 201 bp, Homo sapiens
accttcaacccagagcttctgcagcacatctaccagccactgaacctgaccattggggtcacggtgtttgccgtggggaagtgagtagtgggctggggaakgggagggaggtctccctgagccacaggagtttatagttgggaagagaccagaccagacgtgcacacaggaccctgctgggcacccaggaggctcggaacc

SEQ ID NO: 36755 - DNA, 201 bp, Homo sapiens
agtgcacagcgggccgctggcccaggagtggaatgagtggaagccattcctttattttattattattattattattattattattgttgttgttgttgttrttattattattattattattattattattattattattattgagacagggtcttgctctgtggcccaggctgcagtgcaggggccagatcacggctcact

SEQ ID NO: 36756 - DNA, 201 bp, Homo sapiens
cctggttggcgcccatcgtctccgagggaaccttcaacccagagcttctgcagcacatctaccagccactgaacctgaccattggggtcacggtgtttgcygtggggaagtgagtagtgggctggggaaggggagggaggtctccctgagccacaggagtttatagttgggaagagaccagaccagacgtgcacacaggac

SEQ ID NO: 36757 - DNA, 201 bp, Homo sapiens
cagcgaaagggagcggagtgcacagcgggccgctggcccaggagtggaatgagtggaagccattcctttattttattattattattattattattattattgttgttgttgttgttattattattattattattattattattattattattattattgagacagggtcttgctctgtggcccaggctgcagtgcaggggc

SEQ ID NO: 36758 - DNA, 201 bp, Homo sapiens
tcagcgaaagggagcggagtgcacagcgggccgctggcccaggagtggaatgagtggaagccattcctttattttattattattattattattattattattgttgttgttgttgttattattattattattattattattattattattattattattgagacagggtcttgctctgtggcccaggctgcagtgcagggg

SEQ ID NO: 36759 - DNA, 201 bp, Homo sapiens
atcagcgaaagggagcggagtgcacagcgggccgctggcccaggagtggaatgagtggaagccattcctttattttattattattattattattattattattgttgttgttgttgttattattattattattattattattattattattattattattgagacagggtcttgctctgtggcccaggctgcagtgcaggg

SEQ ID NO: 36760 - DNA, 201 bp, Homo sapiens
tacgaacatctgaatatgacgaagtagcaaaggtggatattcactcattcatttcgtatctgtctcctgggcccaggccatgccggggcggggggtgggggtaacaagaatccggggagttgccaggggaaggggaagtgctcatctggggagtgcgtgggcacagagagattccagaaggaggtgtcctgtggtcgtggt

SEQ ID NO: 36761 - DNA, 201 bp, Homo sapiens
aatcacttgaacctgggaggtgatgagtgcagtgagccaagatcatgccactgcactccagcctgggcgacggagccagaccctgtctcaataaacaaacgaacaaacaaacaaacaaacatcatgggagccattggaaggtgttcccattggaagatgctcccatatgccacagggggccgatatctgatttttgcttca

SEQ ID NO: 36762 - DNA, 201 bp, Homo sapiens
ccagggcctgacctgagtcagggtacctggctgccattcctcccggccttggccaagcccaggttggaaaaggtgatggccaaaggccacagtcacccagwcactgccctgtgcccagttcccgctctgaactgctgtgtgtccggcagcccccagaactgcaccccaggcccaaagcccactgtctggggccctgcgtta

SEQ ID NO: 36763 - DNA, 201 bp, Homo sapiens
agcagctggacagacacttttcctgtgagatcttgggcaagtccctgctctctctggggctcagtctttccacttgtcagacgggtgtgttggatgcgtcygatggcttccaatgtctggtttgcagcaaaatgagaaaaacagggacaaggtagtaagttgttgtattgttgtggtggtggtggtggttgtttacaactc

SEQ ID NO: 36764 - DNA, 201 bp, Homo sapiens
tggggtgatactaaatgctctcccagatggctgtggtgaatggagtactggcaactgtcccagcactttgcacagtccttgggcgcagggtgcaggggctrtggggttgggatgtgtccttggggagcccccttaactaagccaactcttcacccagccgccaggcccccagcactgagctcagtaccagtggcagctccc

SEQ ID NO: 36765 - DNA, 201 bp, Homo sapiens
ttgggattctcttctgggtgggacagaaatggtggagggattttagtggaggtgacttgttctggccacagggtgagtacagggaggtaggtttcagggcycccctgaaaccctctagctccatttctctgatgctcccccaccccagcccagcccacccccacatgcccacccacatcccctgagagtctccaccctgag

SEQ ID NO: 36766 - DNA, 201 bp, Homo sapiens
gtacagaaatgaagaaggtagtgatcagggacaaggctggcctgagggcagagggggaggaaaggagcagccgtgcaaagcccccaggagctgaaggggckgtgctgtaggggaggtgaggtcagggaagtatccagggcctggccacataggccctgagccctgccaggacctcgactttctcggggaggaagacaggag

SEQ ID NO: 36767 - DNA, 201 bp, Homo sapiens
gagctttgtgccatctctgagcttcatcctcaaactcacctgcaaaacctgcgtcacatatcatgatggtgaaatgatacccgcattggcatggcagtgcrtagtagaaattatcagagggttgttgactctggtttaggcgccaggttggaggcagcagtgatcagcagaaatggaagtcagagtccccagcctaggcct

SEQ ID NO: 36768 - DNA, 201 bp, Homo sapiens
attcaaaataagaactctggttcttccctgcagaggatgccaccttggggtgccatttttttgacacggagcatgtgccaggccctatcttgagtgcttcycatccagtgtttcatttcagcatgcagtctttttgaggcagagatgttccctgttgatgggctagaaccaaggctcagcaagggaaaggaacctgcctgg

SEQ ID NO: 36769 - DNA, 201 bp, Homo sapiens
ggagagccagctgtgtgctagatgctgttctaggcatcaggaccctggggaacagagtccctgctctcaaggagcttacaaactccccgccatggggggcrtgaaaggaccccgtggtaggtgaattgtgttgttttgttttgagacggagtcttgctctgtcgcccaggctggagtgcagtggcacgatctcagctcact

SEQ ID NO: 36770 - DNA, 201 bp, Homo sapiens
ctgagcccaactttgagaacaggaaggcctggatgggagtagaggggaggaagggaccccaagaacaaagacccagagactggcccctgtgctgcccgggrggccttgtcaccgccctgtgcttccctctggccccaggagttcgaggtgatcgcccagatcaagctgctgcagtcggcctgcaacaactacagcatcgcg

SEQ ID NO: 36771 - DNA, 201 bp, Homo sapiens
actggatcgaggtggccagggtatgccagaggaggggcctgggcccccactttggcttcatctgttctcaggttgtggtctgcagtccaaggccctgtacrggccccagtctacccttcccaggggcatgctggccttgactctcccagcccactgcctggatgctcacgtcttccttacactctttccttgggttgagct

SEQ ID NO: 36772 - DNA, 201 bp, Homo sapiens
acctgcctcagcctcccaaagtgctgggattacaggcgtgagccaccgtgcccaggcttaacacactcttaaacaaccaatgggtctaaaaggaagtcacragggaaattagaagacaccttgagacaaaacaaaaacacaacataccaaaacttacagcatgcggtgaaatcgaaagcagtgcttgggggaaatttatag

SEQ ID NO: 36773 - DNA, 201 bp, Homo sapiens
aaatggggtgatactaaatgctctcccagatggctgtggtgaatggagtactggcaactgtcccagcactttgcacagtccttgggcgcagggtgcagggrctatggggttgggatgtgtccttggggagcccccttaactaagccaactcttcacccagccgccaggcccccagcactgagctcagtaccagtggcagct

SEQ ID NO: 36774 - DNA, 201 bp, Homo sapiens; identical to SEQ ID NO: 5551

SEQ ID NO: 36775 - DNA, 201 bp, Homo sapiens
cgggagccgaggtgagaacatggatgaggggtgtccagcctggaaggagcgaggtggagccccagaccctgggagagggtggggcagtagaatggtgggaraaggcaggtggggccacactgcccagtgggttggactttggggatgggaaggctatgagacctggttgcctcagatgttctctctggggatggcagtgag

SEQ ID NO: 36776 - DNA, 201 bp, Homo sapiens
ctgccctccctcaggctcctctccagcctcatcacctcttccaaggagctctcctggtgatcttcccacaagaacctccgaatattttagagtctggcccrtcgagctcacttgttcatctaggcatttatggagagccagctgtgtgctagatgctgttctaggcatcaggaccctggggaacagagtccctgctctcaa

SEQ ID NO: 36777 - DNA, 201 bp, Homo sapiens
gccaaggaaggagccaagcccagggattaacgggacagtgggtggcaggagggtgggacacagcagtgtccctcagacccagggccctagagtcccaaggrattgcgcttctctagccctggggaacttcttgcaggcaaaggactgtgagaaagagggcagcgggcaccagccctgccacctcctggcagccagccaagg

SEQ ID NO: 36778 - DNA, 201 bp, Homo sapiens
gggcaggtgctgggggaaggccggagcatggcccctggttgtcacaccactgcccctctgctcatagctacaacctgtcgtgcgagctggagcccccatcygagtcagccagcaacaccctcaggaccaagaagaacacagccattgtcaagcgctggagcgagtaagggcctggccaagggtggtaggggcagctgcctt

SEQ ID NO: 36779 - DNA, 201 bp, Homo sapiens
cctgatcacccctctgcccctccccaccagagctgaagatccctgaaaacgccaacgtcttctatgccatgaactctactgccaactatgactttgtcctsaagaagcggaccttcaccaagggagtgaaggtcaagcacggagccagctccaccctccctcgcatgaagcagaaaggactcaagattgccaagggcatct

SEQ ID NO: 36780 - DNA, 201 bp, Homo sapiens
aagtatccagggcctggccacataggccctgagccctgccaggacctcgactttctcggggaggaagacaggagcaatgatggctggcttctctgtctggygtgggctggtaccagagccgcaggggtgttggttaggaggccgctgtggcaaccaggctgggagccctggaaggggccagcagggtcagagtctagacag

SEQ ID NO: 36781 - DNA, 201 bp, Homo sapiens
aagagggaaatgtgggtttttatgtgaagtcgcctgaccttttactgttggcttaaaattttaaaaacacttcgcaagccaaacaaaacacatgtgtgggygggatctggctgccagctgtcagttcacagcctgccttttaaagttcctctgcgagcagcgtcccgacttccgaaaggtctgtgcagccgtgctctccag

SEQ ID NO: 36782 - DNA, 201 bp, Homo sapiens
cgggtcacacagtgtgagagccagggctgggatgagacttaggctttcacaggggagggtctcagtgcccacggcccccctgctgccaggcccacacagcygctgacactcacaccctggttggcgcccatcgtctccgagggaaccttcaacccagagcttctgcagcacatctaccagccactgaacctgaccattggg

SEQ ID NO: 36783 - DNA, 201 bp, Homo sapiens
cagagccgttgccctggttggagtgaggaggcctcacgagtgaactggacaccccaggaccagcagagggaaagaggggagcaaatgaagcttctgaggckccttgaattacccctggagcctgcaggttctgctcctttgaccccctgggactcaggagagctgctaccttgacaacacccaaacaaaggtgtgtgtttt

SEQ ID NO: 36784 - DNA, 201 bp, Homo sapiens
gaggctgggcgcggtggctcacacctgtaatctcagcattttgggaggccgaggcgggtggatcacctgaggtcaggagttcaacaccagcctggccaacrtggtgaaaccccgtctctacaaaaaagaaatacaaaaattagctgggtgtctcggcaggtgcctataatcccagctactccggaggctgaggcaggaaaa

SEQ ID NO: 36785 - DNA, 201 bp, Homo sapiens
gctggtaagtggaccccagcctggctgaccccagcacacagtggggaccctggcaggctgctggtgtagcagtgggtgaccgggtgatcatcactaggtamactcatttcatccagtccttcctggagtcagccgaggagttcttcatgcgtgggtaccgggtgcactactacatcttcactgacaaccctgcagccgttc

SEQ ID NO: 36786 - DNA, 201 bp, Homo sapiens
gcccaggccatgccggggcggggggtgggggtaacaagaatccggggagttgccaggggaaggggaagtgctcatctggggagtgcgtgggcacagagagrttccagaaggaggtgtcctgtggtcgtggttgattcgtggaggggaggtgtggtgatggcacagagggtgatgactgggaccagtgtctatcgggtcagc

SEQ ID NO: 36787 - DNA, 201 bp, Homo sapiens
tgggaatgatccccctcccaaaggccgggtacccgcgtgcctacggggactaggggagcagcggggagtcggaagacatcgcaggaacccagcccccagcyagggggtgtgggggcgtgagcggagcccgcctgctcctcagcttggcgcgctctggcggcagcaccagcaggtggcgctgtgccctcccgtgcggccgcc

SEQ ID NO: 36788 - DNA, 201 bp, Homo sapiens; identical to SEQ ID NO: 5554

SEQ ID NO: 36789 - DNA, 201 bp, Homo sapiens
ggcaggagcagaagccagttactaggggattggaagcctggtggactcatcataatcacgtcccaggtcgtggctggccgggttggggaagtggagtgccrggacagtggctctcgagctgtgatctcattccaccccaggctgtaggtctgtgcagccgccagtctgtgccctatctgggaaacaggttacacaggtgca

SEQ ID NO: 36790 - DNA, 201 bp, Homo sapiens
tacccgcgtgcctacggggactaggggagcagcggggagtcggaagacatcgcaggaacccagcccccagccagggggtgtgggggcgtgagcggagcccrcctgctcctcagcttggcgcgctctggcggcagcaccagcaggtggcgctgtgccctcccgtgcggccgcccagcccggcgcggagctgccgcagacaaa

SEQ ID NO: 36791 - DNA, 201 bp, Homo sapiens
ggggatatgatgtcaggtgttgtccggtaccacgccatcaggtcccagtgccggtcaccgagctgtgtgcattctctcttgacccccactgttgcctgtgrcaggtagtgctgccctccccagatgacacaccaaggccgagggccaggggctgggcagagccagcgagagacagggagctgctgtctggtgggccagaac

SEQ ID NO: 36792 - DNA, 201 bp, Homo sapiens
gggttgtcacatgttgaattggtggcccctccggggtggcagtgactccccagggtgtcgggcactgggcacggcgggagtgggggacagttgtcagagcrgtccccacacatgccctggctacagggggcagctgcagtcagcttccggcggcacttgggaacacagacccggtgtggtcaggtcacccagagttacagg

SEQ ID NO: 36793 - DNA, 201 bp, Homo sapiens
ctcttcctcctctgcttccctccacttcgggttgtcacatgttgaattggtggcccctccggggtggcagtgactccccagggtgtcgggcactgggcackgcgggagtgggggacagttgtcagagcggtccccacacatgccctggctacagggggcagctgcagtcagcttccggcggcacttgggaacacagacccg

SEQ ID NO: 36794 - DNA, 201 bp, Homo sapiens; identical to SEQ ID NO: 5542

SEQ ID NO: 36795 - DNA, 201 bp, Homo sapiens
ctccgtctgcctgctgcctccctctcccgctgtccctcgctgtggtcctcaggctcactcttggttcttgggctcagtttccatctgtgtgtccccctccrtctcttcctcctctgcttccctccacttcgggttgtcacatgttgaattggtggcccctccggggtggcagtgactccccagggtgtcgggcactgggca

SEQ ID NO: 36796 - DNA, 201 bp, Homo sapiens
cacagtgccaggcagcgagcactgcaggagtgggggacagctgtccgagcggcccccgatttgcagcccatggatgcatttatcacgtttgttcctctgcrtgcctccccctcaatatgccgggggtgtacccatttccaagggatgacagcagggccccacagcgagccccaggctgatccggagccctctgcatccccg

SEQ ID NO: 36797 - DNA, 201 bp, Homo sapiens
actggagggtgagggtaggaggttataatccaggaccacctcctggggagtggctgagcccaactttgagaacaggaaggcctggatgggagtagaggggrggaagggaccccaagaacaaagacccagagactggcccctgtgctgcccggggggccttgtcaccgccctgtgcttccctctggccccaggagttcgagg

SEQ ID NO: 36798 - DNA, 201 bp, Homo sapiens
cacaggaaagaatggccccttggggctggctcatcccaaggccccctgtgctgtgacatttccagctggcactttgtggagcatttccaaggagtccgggrccaggatggcggctgaccaccctccaggaggggagatcatggatgccggggcccctcggggtgtgatgtgccccacctatcacagctgtgggatagacgt

SEQ ID NO: 36799 - DNA, 201 bp, Homo sapiens
gcactgcttcactgtctgctcccctgagaagcctgagagctggtgctatgacggttactgtccccattttactgatggagaaattgaggccccaggaggtraaactaaggctaggaagacacagagcaggcactggaacccgaatctgcactccagatcttaaaagagttccccaaacccacaggaaagaatggccccttg

SEQ ID NO: 36800 - DNA, 201 bp, Homo sapiens
ctggccttggctcagtgggccctgatctaggggcccctggcaagaggtggggtgagcctctgctctcacattgcctcacccctcaatagtgagtgctcagygggcaggctgcaccccaccctctgggagaacaggattagtgggaagatgagacccacacacagctctgagagagtaaggcagctcaccagcactgagcta

SEQ ID NO: 36801 - DNA, 201 bp, Homo sapiens
tcgggtgctccactccactagggcacgcaggcgacgagcacactggcagagggcctcccgcagggcccactccccacctggctctcgccccaccatggccygggaagcaggccaggtttgtgccaggcctgccgtgcccagggggaggaagggctctgtgttctttgcctgtgtctctgtggtgaccgccaggagaagggc

SEQ ID NO: 36802 - DNA, 201 bp, Homo sapiens
cgggaattcctggtcctgcctgtcacagcagcaggtatgacagccacgcgggtgacaccaggcccaggcactcgggtgctccactccactagggcacgcargcgacgagcacactggcagagggcctcccgcagggcccactccccacctggctctcgccccaccatggcccgggaagcaggccaggtttgtgccaggcct

SEQ ID NO: 36803 - DNA, 201 bp, Homo sapiens
catccctggggttcctccaggttgagagccggggcctgactcagctgcataatattccagaagggaggctggagccactgccccagttcagctcctcatgrctgtggggccactgtgagtcctctgaggacacttcaacagtgctgcaggagccaggcgcagtggctcatgcctgtaatcccagcattttgggaggccaag

SEQ ID NO: 36804 - DNA, 201 bp, Homo sapiens
tgtgtggtggtttccaggcccccgacacagggggaatgggagtggggacttggagaattaagggagaaagctaggctagcttggggcagcctctccactcrtcctcggctggcccatggcctggtacaagcgggaattcctggtcctgcctgtcacagcagcaggtatgacagccacgcgggtgacaccaggcccaggcac

SEQ ID NO: 36805 - DNA, 201 bp, Homo sapiens
ccgcccctccccggccccaccctcttcccctccggccccgccccccagcctgacatcagcagggccgggccgcgggctcacagcggtggcaaagcccagcmgcgcgggccgcgccgccgcccccgccgcgcgccgggccggccccgcgcccgcgctgcgagccttccatggtgcagcgcatgtgggccgaggcggccgggc

SEQ ID NO: 36806 - DNA, 201 bp, Homo sapiens
ctgtaaggggatagtgtggggctttgccccaaaaatggtagggccccactctctgaccctttcccccactgcacacacagccccacactcaggatttccarttgcactgacagggtcactgaacacatggtcagcctctccaaactccgcctgagcctgtagtcaggtgcaggtgctcagtgctgagtgcttcatgtccat

SEQ ID NO: 36807 - DNA, 201 bp, Homo sapiens
aagccagttactaggggattggaagcctggtggactcatcataatcacgtcccaggtcgtggctggccgggttggggaagtggagtgccgggacagtggcyctcgagctgtgatctcattccaccccaggctgtaggtctgtgcagccgccagtctgtgccctatctgggaaacaggttacacaggtgcatcccctgcacg

SEQ ID NO: 36808 - DNA, 201 bp, Homo sapiens
ctggcggcagcaccagcaggtggcgctgtgccctcccgtgcggccgcccagcccggcgcggagctgccgcagacaaaggtctcgctttcgggtcgcgaggrgcttgcgcacagctgtaaacaggccaggggcacggccacctcatgggtgacacacacgggaggaaatcaaaccaggcggggccgaggcggggtgactggg

SEQ ID NO: 36809 - DNA, 201 bp, Homo sapiens
ctgtcacctccctacccgcacaaggccctcccaccacctcctcgctcaccgagctaccaggcccgcccctgaggctgctggtccttgacagttggttcagygattgattcacacagcagatactggcctctgtacacctggctggcgctgggtgcctggcctgtgggaagcaccctggcttctgtggaaggctcaggggta

SEQ ID NO: 36810 - DNA, 201 bp, Homo sapiens
caatggcgcctccccgtgtgcacacaagcctgggaagggccaggcaccaggaccacattccttccaattacagtggccttccaacggtcagggctgggccyggctgctgggcagggcggggctgggaggccctaggccccaagtggtggttaatggcggcaaggagacataaacagagctaatgagcccctttcatcgtct

SEQ ID NO: 36811 - DNA, 201 bp, Homo sapiens
tacagtggccttccaacggtcagggctgggcccggctgctgggcagggcggggctgggaggccctaggccccaagtggtggttaatggcggcaaggagacrtaaacagagctaatgagcccctttcatcgtctccctgctctaatgaaggccttggactctgggctttgcattttgggggttcttgattctggagcctcaa

SEQ ID NO: 36812 - DNA, 201 bp, Homo sapiens
tgtggttgggctgggtacagcccttggaacaggggactgtggttctgggccaactttgataccgactgactatgtgaccttagtgtgtcccttctcgctgrcctcagtttccccattggtggcccatctacccctctgcctgtgtgtttaccgttcagtgcataaacattgccctgtgaattatgtcacctactggggcct

SEQ ID NO: 36813 - DNA, 201 bp, Homo sapiens
cctcacatgtcggcatccacctcggccatcaggcccctggtcctcaggtgaggcaggtggctttggagcaggacacctgggtccaaattccagctcagcgyttattgctgggcatcctagaagcagcacaggtcccctctgagcctccctgtctgccctgaggtccccgcagttgctgtgagggtgtaagaaagccctgcc

SEQ ID NO: 36814 - DNA, 201 bp, Homo sapiens
tggggggtgggcaggcgtgagccgcctgttggagctggggcttggtgaggctgcgcgaggcggtgctcctcttcttcccaccagcgttctgtcccgggtcrcttgtgtgctgggcaccctgcatggacacgggataaaacccagagatccccacaaggctcaagctgcatcctcagcttccccagcaccagcccagactgc

SEQ ID NO: 36815 - DNA, 201 bp, Homo sapiens
acatcttcactgacaaccctgcagccgttcccggggtcccgctgggtccccaccggcttctcagctccatccccatccagggtcactcccactgggaggaracatccatgcgccggatggagaccatcagccagcacattgctaagagggctcaccgggaggtggactacctcttctgccttgatgtggacatggtgtttc

SEQ ID NO: 36816 - DNA, 201 bp, Homo sapiens
cagtccttgggcgcagggtgcaggggctatggggttgggatgtgtccttggggagcccccttaactaagccaactcttcacccagccgccaggcccccagyactgagctcagtaccagtggcagctcccactccaagtcctgtgaccagctcaggtgtggcccctacctcagcagcggggacatcgctgacgcgctcagcg

SEQ ID NO: 36817 - DNA, 201 bp, Homo sapiens
gatggagtcaggctatggcactcctggcacaggggcagcatccaccaacattgatcaaatgtctgttatgtgcctggcaccggggcaggcatgtaaccctktggcacctgaactcctcaatccccactggaaatgatcattgcacatccgccaagcacggccatgagccgagcccatgctgagttcttgtggaatcctcca

SEQ ID NO: 36818 - DNA, 201 bp, Homo sapiens
tcagcaaacatttccaagctatctgctaggatccagttacaagccacactctgagcactgggcagaccccggactgccatctggaccttgctgccagggayggagtcaggctatggcactcctggcacaggggcagcatccaccaacattgatcaaatgtctgttatgtgcctggcaccggggcaggcatgtaaccctgtg

SEQ ID NO: 36819 - DNA, 201 bp, Homo sapiens
gtgtctgggtatgggagcagggagaagagggaccacagagattcagcctgaacacaccttttccctaaacgagacagctgctcaggggccggagagtgacktaagatgcccaaggaatcgctcctcgcctccgtctgcctgctgcctccctctcccgctgtccctcgctgtggtcctcaggctcactcttggttcttgggc

SEQ ID NO: 36820 - DNA, 201 bp, Homo sapiens
tgagcgcttctttccagggcctctttaagccccccacccaaccaaacatgcgcacactgtaggaaacaccttctcggccactgagcccttctacggggctrggctgcgaggtcacactttgcagacaaggaaaccgaggctcagggaaagccctccccaccccctcaaaccacgtggtaagctccctgttaaacctggagt

SEQ ID NO: 36821 - DNA, 201 bp, Homo sapiens
actggccgcggtgtctgggtatgggagcagggagaagagggaccacagagattcagcctgaacacaccttttccctaaacgagacagctgctcaggggccrgagagtgacgtaagatgcccaaggaatcgctcctcgcctccgtctgcctgctgcctccctctcccgctgtccctcgctgtggtcctcaggctcactcttg

SEQ ID NO: 36822 - DNA, 201 bp, Homo sapiens
cgccactgcactccagcctgggtgacagagcgagactccgtctcaaacaaaaaaaaaagaaaaaaagaaagttgagcgcttctttccagggcctctttaarccccccacccaaccaaacatgcgcacactgtaggaaacaccttctcggccactgagcccttctacggggctaggctgcgaggtcacactttgcagacaag

SEQ ID NO: 36823 - DNA, 201 bp, Homo sapiens
ctcctagcgacagctgcacagtgtttgtaaacaatgggcctcacacccagccagggcctgcccctacctagaaaggtgcctgtgggttgggttttgctagyctgggcttgtgtgtgtggccaggtgcattatcccaggccacccggcgtgctgggcagagcatcgtgggaccactggtaggtcgtgtgtcctgggagaagc

SEQ ID NO: 36824 - DNA, 201 bp, Homo sapiens
atgctggcatggagacctgaacagctcttggagggtccctgggcaggggagggcagctggtaccttgctgtcctttgtcaggcatcccaggtgaggcagayaggagaggcccttgagcctcgccttccaggggagaagccaaggaaggagccaagcccagggattaacgggacagtgggtggcaggagggtgggacacagc

SEQ ID NO: 36825 - DNA, 201 bp, Homo sapiens
agtaaacagcttcgcgaggagtcactgctctggctctgagtcacagctcctagcgacagctgcacagtgtttgtaaacaatgggcctcacacccagccagsgcctgcccctacctagaaaggtgcctgtgggttgggttttgctagcctgggcttgtgtgtgtggccaggtgcattatcccaggccacccggcgtgctggg

SEQ ID NO: 36826 - DNA, 201 bp, Homo sapiens
gtgggaggagggaacagtctcttacaggagaagcagggtaggcactgctgggacagacccctcctcattccatggaggcctcacatggggaacagaaggayggaggcctcacttggggagtaggagaatgtgacaaggccctctccggacccagcacctggccagaggctgtgagtgcctgtgcttggtgctgaggggact

SEQ ID NO: 36827 - DNA, 201 bp, Homo sapiens
gatgtggtgccgagtaaacagcttcgcgaggagtcactgctctggctctgagtcacagctcctagcgacagctgcacagtgtttgtaaacaatgggcctcrcacccagccagggcctgcccctacctagaaaggtgcctgtgggttgggttttgctagcctgggcttgtgtgtgtggccaggtgcattatcccaggccacc

SEQ ID NO: 36828 - DNA, 201 bp, Homo sapiens
cactacctagcagagccggctgggcctgaatgtgtgttgagcgacttgacggggcctcaggttcccagaagccagggggaggggagctggagtgtcccccsagctggacaccgagtctggccagcagctccctgagtcaagttagcagcaggaaagaggagcaaaagccaggcctcggcctctgctatctgcttcctggac

SEQ ID NO: 36829 - DNA, 201 bp, Homo sapiens
aggctgtctggaaaagtgctttgtccccattgaggtgtgctaaaggcggcgccagactaggctctagggtacgaaggggtgtcaggagttgatcctgcctsccaggcttctgaacgtggcaagaatttgcctctgggctgcacagtgacaggtgtcagtgatgcccccgtccctgggagtctcctagtcagagccaaagag

SEQ ID NO: 36830 - DNA, 201 bp, Homo sapiens; identical to SEQ ID NO: 5546

SEQ ID NO: 36831 - DNA, 201 bp, Homo sapiens
tgcagggcccccaggagcatccctgatcacccctctgcccctccccaccagagctgaagatccctgaaaacgccaacgtcttctatgccatgaactctacygccaactatgactttgtcctgaagaagcggaccttcaccaagggagtgaaggtcaagcacggagccagctccaccctccctcgcatgaagcagaaaggac

SEQ ID NO: 36832 - DNA, 201 bp, Homo sapiens
ccgcgcccggctgccgggcgttgtcttcacagagctccacgcaggagatcggtgaggagctgatcaacggagtcatctactccatctccctgcgcaaggtkcagctgcaccacggaggcaacaaggggcagcgctggctcggggtgagtgcgctcggggtctccactgggagacgcagctggggatccctcccaggacttt

SEQ ID NO: 36833 - DNA, 201 bp, Homo sapiens
ggtgaggagctgatcaacggagtcatctactccatctccctgcgcaaggtgcagctgcaccacggaggcaacaaggggcagcgctggctcggggtgagtgygctcggggtctccactgggagacgcagctggggatccctcccaggactttttcacttgagggcccccagttctgatcccaaaggaaacggccttcactcc

SEQ ID NO: 36834 - DNA, 201 bp, Homo sapiens
aggtagtgatcagggacaaggctggcctgagggcagagggggaggaaaggagcagccgtgcaaagcccccaggagctgaaggggcggtgctgtaggggagrtgaggtcagggaagtatccagggcctggccacataggccctgagccctgccaggacctcgactttctcggggaggaagacaggagcaatgatggctggct

SEQ ID NO: 36835 - DNA, 201 bp, Homo sapiens
atggcttgagggtgggtctgtcctgggcaggagcagaagccagttactaggggattggaagcctggtggactcatcataatcacgtcccaggtcgtggctrgccgggttggggaagtggagtgccgggacagtggctctcgagctgtgatctcattccaccccaggctgtaggtctgtgcagccgccagtctgtgccctat

SEQ ID NO: 36836 - DNA, 201 bp, Homo sapiens
aaggacagatgtcagccaggtacagaaatgaagaaggtagtgatcagggacaaggctggcctgagggcagagggggaggaaaggagcagccgtgcaaagcycccaggagctgaaggggcggtgctgtaggggaggtgaggtcagggaagtatccagggcctggccacataggccctgagccctgccaggacctcgactttc

SEQ ID NO: 36837 - DNA, 201 bp, Homo sapiens
agtcggcctgcaacaactacagcatcgcgccagatgagcaatttggggcctggttccgggccgtggagcggctcagcgagactgagaggtgaggccggggsagcaaatggggacagtgggggcaggctgtcctagggggccagctccagagggccagcagctatgacccatggtcagcctcagcccctgttgcctgaggat

SEQ ID NO: 36838 - DNA, 201 bp, Homo sapiens
cccaggaccccacactagtgagtattgatacagggtcagccctggaacccgaccacactggcagcaccccaggtcagggtgcctgagggctgaggggatasggccttgctgaccctgtcctctaccctggcaggagggcacctccaagtttgccaccctggagatgaaccccaagagagcccagaaacggccgaaggagac

SEQ ID NO: 36839 - DNA, 201 bp, Homo sapiens
tgaaatggcatctagggcccccctcctgcgtggacacacacagagttccctacaggggagcatcgcagggggctcctgggacacctgtccctctccctccrtggcacagctccactgggggccctggcatgcacgagaagcccagaggacggtaccctgatcagtgaccaaacgggtaaaggcagatggggcagagcctct

SEQ ID NO: 36840 - DNA, 201 bp, Homo sapiens
ggtgtgtcctggagcctatggcagacactggacaaagcccttagttgtagcgcccacagcagatgtgcgtctggatggggagcagactgaggcggggggayggggggtgggcaggcgtgagccgcctgttggagctggggcttggtgaggctgcgcgaggcggtgctcctcttcttcccaccagcgttctgtcccgggtca

SEQ ID NO: 36841 - DNA, 201 bp, Homo sapiens
ggcacttggtgtgtcctggagcctatggcagacactggacaaagcccttagttgtagcgcccacagcagatgtgcgtctggatggggagcagactgaggcrgggggatggggggtgggcaggcgtgagccgcctgttggagctggggcttggtgaggctgcgcgaggcggtgctcctcttcttcccaccagcgttctgtcc

SEQ ID NO: 36842 - DNA, 201 bp, Homo sapiens
acacgaagaggaggctccagggtctggtgctgggtcaggggcccagatgagcctcagaccacacaggcagggaccacaggcaggagagtggcctggtacaygttttgtgggttcggggagagaggcttctctggaagccggggctgttctgtgtctttggaaaggcacaggaaaggctggcatgttgttgaacttttctcc

SEQ ID NO: 36843 - DNA, 201 bp, Homo sapiens
cttgatgtggacatggtgtttcggaacccgtggggccctgagaccttgggagacctggtggctgccattcacccaagctactacgccgttccccgccagcmgttcccctatgagcgcaggcgtgtttccactgcctttgtggcagacagcgaaggggacttctattatggtggggcagtcttcggggggcaggtggccagg

SEQ ID NO: 36844 - DNA, 201 bp, Homo sapiens
ccaatggcatcatggctgcctggcgggaggaaagccacctgaaccgtcacttcatctcaaacaagccgtccaaggtgctgtcccccgagtacctctgggaygacaggaagccccagccacccagcctgaagctgatccgcttttctacactggacaaggatatcagctgcctgaggagctgaccacggagctgggggttgc

SEQ ID NO: 36845 - DNA, 201 bp, Homo sapiens
cttctattatggtggggcagtcttcggggggcaggtggccagggtatatgagtttactaggggctgccacatggccatcctggcggacaaggccaatggcwtcatggctgcctggcgggaggaaagccacctgaaccgtcacttcatctcaaacaagccgtccaaggtgctgtcccccgagtacctctgggacgacaggaa

SEQ ID NO: 36846 - DNA, 201 bp, Homo sapiens
ggcatcctagaagcagcacaggtcccctctgagcctccctgtctgccctgaggtccccgcagttgctgtgagggtgtaagaaagccctgcccttgggctcycataggggctgccttagtttgtgggcacccaccctgcacccagacttgggcactgcgggagccgaggtgagaacatggatgaggggtgtccagcctggaa

SEQ ID NO: 36847 - DNA, 201 bp, Homo sapiens
gagcagcgtcccgacttccgaaaggtctgtgcagccgtgctctccaggggcttgtggttgtagcccccaaggaaaggcaggtgcacgtcccggggggaggytgggaacctgggaaggctaggtgggggtgtgggggggcgtgagctggggcaggagggaggaagggatcaatgccgattcataagaaccccccacttccgg

SEQ ID NO: 36848 - DNA, 201 bp, Homo sapiens
cacacaggggccctcctgtgaactggaggtcattgagatacttgcaccctgaacttagaagggcaccgtgaggataaaatcacctttgactctttatgaaragtcataaagagtcttcctgctaggagtttgcaggaaggagtgactgggagcgcaaacctgagagtcagacaggattggaagccctgctctgctgtgtgg

SEQ ID NO: 36849 - DNA, 201 bp, Homo sapiens
tgtcacgatgttcaccaggaacagcagccgcagggaagttcgggctgtctagaggtcaaggggagagaagcctgggaggtgggatgggagccctggcttgrcctcaggggacccagacaagtgggttccttaactcctctgtacccccattgcctcctctgtgggcctacggatgtgggggagtatgagatgttcctgagg

SEQ ID NO: 36850 - DNA, 201 bp, Homo sapiens
ccgggtctccctagcctggagcaggggaaaggtcctccccactggggtgtgtagccttccacaagtcattctgcggctctgcctccccaccacacacaggrgccctcctgtgaactggaggtcattgagatacttgcaccctgaacttagaagggcaccgtgaggataaaatcacctttgactctttatgaaaagtcataa

SEQ ID NO: 36851 - DNA, 201 bp, Homo sapiens
ctgtgggcctacggatgtgggggagtatgagatgttcctgaggcccctggcaccgcatgggcaggccctccgcagatggcagccaatgtctgctccgcttygcagaagggagatggccgatggcccaccagctcccgctgcccttggggagccagggtgtgggtggagggcagggacacttgcaggccctaagttgaatcc

SEQ ID NO: 36852 - DNA, 201 bp, Homo sapiens
taggccccagctcccagccactgcttggatccttacagttagacgttgggttcctcctggagctggacctgggggcaggcagggttggggaggggagctgyggtgcccttggcagggctgggtcctgctgggctcaaagccaatgggagcggctggggcagggcctggattcttggatcctcagcttcttggcaacctgcg

SEQ ID NO: 36853 - DNA, 201 bp, Homo sapiens
ggcccaccagctcccgctgcccttggggagccagggtgtgggtggagggcagggacacttgcaggccctaagttgaatccacaggtttttttcaggtaggrgaactacggccccgaggaggcgagtaagttgcccaggccacgcatcccactctcccccgacccccttcttccctgaggccaagttccaggccctgctgcc

SEQ ID NO: 36854 - DNA, 201 bp, Homo sapiens
cgagctcacttgttcatctaggcatttatggagagccagctgtgtgctagatgctgttctaggcatcaggaccctggggaacagagtccctgctctcaagragcttacaaactccccgccatggggggcatgaaaggaccccgtggtaggtgaattgtgttgttttgttttgagacggagtcttgctctgtcgcccaggct

SEQ ID NO: 36855 - DNA, 201 bp, Homo sapiens
gggtgtgtatccagggcctctgggcctgcaggggcagcggctgtgtgctgtgggatgcggtggggcacatgtgcattctagcacgtgtgttgggggcaggkgcatctctctgcctttgggtgaccctgtatgtctgcagcatgcatgtgctcagatgtgacaagcttgacagtggctgagggagcacatatatgaaggggt

SEQ ID NO: 36856 - DNA, 201 bp, Homo sapiens
cagccccttcaggcaggcagcaggctggtggcggcaccgggcacacagtgtccctggcacggcaggcagcctcccaaccacaagggcccgtttgtcctggytcccctggcccgagcgcactgggcgaccagggcctgctggacacaggggcctgactgtgggctcagcccccatcccccatcctcaccagccacggctgtg

SEQ ID NO: 36857 - DNA, 201 bp, Homo sapiens
tcatcattgttcatcaactacaaaaggatcttaacactcttcccctccccgactccagacggagtcttgctccatcgcccaggctggggtgccgtggcacratctcagctcactgcaacctccacctccaaggttcaagcaattctcctgtctcagcctcctgagtagctaggattacaggtgtgcaccaccacagctggt

SEQ ID NO: 36858 - DNA, 201 bp, Homo sapiens
ttcattgaacaaatatatatgaagcacctactgtgtgctggcccttttctaggcatttaatataatttgatgaaaaaaagcaaaaaaaaaaatccctgccytcctgggcctccgttctagtcggagagtcagacagtaacactagacgtcataagcaggtacggtagatgtgacgccctcacggcctcctctagatacggc

SEQ ID NO: 36859 - DNA, 201 bp, Homo sapiens
ccacctggctgcgggtcttggcaatgctgattcacctctctgagcctcgctttgctcatatgaaagagaaactggagtgctaagaggacctcatggggttktcaccatgcctgggcgggatgaggcgtggaaagtgctccctcaacgcctggccctgtagggaatgggctgcggggctgtggtgctcgtttttatgatttt

SEQ ID NO: 36860 - DNA, 201 bp, Homo sapiens
gaggactggggtgggtgccagagggtgaatgaggaggggtcggtgctgggccacacgaagaggaggctccagggtctggtgctgggtcaggggcccagatkagcctcagaccacacaggcagggaccacaggcaggagagtggcctggtacacgttttgtgggttcggggagagaggcttctctggaagccggggctgttc

SEQ ID NO: 36861 - DNA, 201 bp, Homo sapiens
taggcgtgaacaggcagttcaaagctcacatcagtgaggagcaaagagaaaaggcatttttcactgggacaggttagccacgtggcccactggaagggackctttctggctaagacaagaaaacatgtgctctacaaagaatggtgacagctgtggaccaaagtgtcaagtgttaaaatccatgagtgtgtgattctaaaa

SEQ ID NO: 36862 - DNA, 201 bp, Homo sapiens
cctcctctgtcccaccccagtatgagaatgagtcggccctgaacctttatgagacttgcaaggtgcggaccgtgaaggctggcacgctggagaagctggtrgagcacctggtgccagccttccagggcagcgacctctcctacgtcaccatcttcctgtgtacctatagagccttcaccaccacccaacaggtcctggacc

SEQ ID NO: 36863 - DNA, 201 bp, Homo sapiens
aggaggactggggtgggtgccagagggtgaatgaggaggggtcggtgctgggccacacgaagaggaggctccagggtctggtgctgggtcaggggcccagrtgagcctcagaccacacaggcagggaccacaggcaggagagtggcctggtacacgttttgtgggttcggggagagaggcttctctggaagccggggctgt

SEQ ID NO: 36864 - DNA, 201 bp, Homo sapiens
gacttccagccttgcaggcccagaatcactgtgttcccagatatacagcaacagcagagcagtgctccccatttgattgttaaggggcagacactgatgcmtgcagcctcatgcaggacaagctgagctttgagcagacccaattctcccagttccgcacaccttggctgcccacgggcgggggaggcagtgggatggcag

SEQ ID NO: 36865 - DNA, 201 bp, Homo sapiens
taatttttgtattttttagtagagatggggtttcactgtgttggccaggctggtcttaaactcctgacctcaagtgatccacctgccttggccttccaaartgctgggattacaggcgtgagccaccgcaccatgcagcaggcggagttctcatccgcactttccagagggggaggcaggctcaggaaggccaggccaccg

SEQ ID NO: 36866 - DNA, 201 bp, Homo sapiens
ttccctgcctcaagcagctggtggcctacgtgcagctcaacatgccaggctcagacctggagcgccgtgcccaccttctcctggcccagctggagcactcrgaacccattgaggcagagcctgagggtgaggaggactggggtgggtgccagagggtgaatgaggaggggtcggtgctgggccacacgaagaggaggctcc

SEQ ID NO: 36867 - DNA, 201 bp, Homo sapiens
gtgccaccatgctgtggccacccagtcccagggttggacttccagccttgcaggcccagaatcactgtgttcccagatatacagcaacagcagagcagtgytccccatttgattgttaaggggcagacactgatgcatgcagcctcatgcaggacaagctgagctttgagcagacccaattctcccagttccgcacacctt

SEQ ID NO: 36868 - DNA, 201 bp, Homo sapiens
gctgctacacaccaagtaaccaggtcgttccttaaccccaagtcctcagtttacctctggacagtagagatgaggtcacccctatcctccagagtgactgygcagattctagatggaacagacaggaagctcagcaggcctggcctgtgggagcggagggtgctcaccaaggtgcatccatgggtcacccccatctgttca

SEQ ID NO: 36869 - DNA, 201 bp, Homo sapiens
ggaggctgacaccagcccagcgctcatctggctttcattacctctggcagcagctcgggctttgtgtgctgggagggtccggcggagcgctcacagtggcygtgcaggttccctctctccgtccctgaggaactgagggagaggcagagctgagccccacccctgcctgggggtcttgtcttccctctctctggccctggc

SEQ ID NO: 36870 - DNA, 201 bp, Homo sapiens
tcagccccaaccttggtgccttccgctctcccccacctccctggcttcccctcctctgagggtgtctgtaaggggatagtgtggggctttgccccaaaaatggtagggccccactctctgaccctttcccccactgcacacacagccccacactcaggatttccaattgcactgacagggtcactgaacacatggtcagcc

SEQ ID NO: 36871 - DNA, 201 bp, Homo sapiens
ccagggctgctggcagcaattgctggcctccatgaagactgaaggctgaggccagggcaggcccagtgatgagtgaggcatgaggaagggtcccattcatycatccattctcctggccctgctgttaagccccaggctgtcttccttcctcactggcttccagaaagagtagttgaggatgtccctgtccctgcttcccct

SEQ ID NO: 36872 - DNA, 201 bp, Homo sapiens
acggaccagacctggggaggttggcatggccagggctgctggcagcaattgctggcctccatgaagactgaaggctgaggccagggcaggcccagtgatgrgtgaggcatgaggaagggtcccattcattcatccattctcctggccctgctgttaagccccaggctgtcttccttcctcactggcttccagaaagagtag

SEQ ID NO: 36873 - DNA, 201 bp, Homo sapiens
acttctattatggtggggcagtcttcggggggcaggtggccagggtatatgagtttactaggggctgccacatggccatcctggcggacaaggccaatggyatcatggctgcctggcgggaggaaagccacctgaaccgtcacttcatctcaaacaagccgtccaaggtgctgtcccccgagtacctctgggacgacagga

SEQ ID NO: 36874 - DNA, 201 bp, Homo sapiens
tggactacctcttctgccttgatgtggacatggtgtttcggaacccgtggggccctgagaccttgggagacctggtggctgccattcacccaagctactaygccgttccccgccagcagttcccctatgagcgcaggcgtgtttccactgcctttgtggcagacagcgaaggggacttctattatggtggggcagtcttcg

SEQ ID NO: 36875 - DNA, 201 bp, Homo sapiens; identical to SEQ ID NO: 5544

SEQ ID NO: 36876 - DNA, 201 bp, Homo sapiens
gctgcgggtcttggcaatgctgattcacctctctgagcctcgctttgctcatatgaaagagaaactggagtgctaagaggacctcatggggttgtcaccakgcctgggcgggatgaggcgtggaaagtgctccctcaacgcctggccctgtagggaatgggctgcggggctgtggtgctcgtttttatgattttcctgtcc

SEQ ID NO: 36877 - DNA, 201 bp, Homo sapiens
gcggcagcaccagcaggtggcgctgtgccctcccgtgcggccgcccagcccggcgcggagctgccgcagacaaaggtctcgctttcgggtcgcgaggagcytgcgcacagctgtaaacaggccaggggcacggccacctcatgggtgacacacacgggaggaaatcaaaccaggcggggccgaggcggggtgactgggtgg

SEQ ID NO: 36878 - DNA, 201 bp, Homo sapiens
gatggatgcggtgagcagctcagcttggcagggcaggggtgggcctgccttctggcagcatctgctgtcccagacctaccatttgctgatccagagctgaygttctggtcaaatcccagctctgctgctacacaccaagtaaccaggtcgttccttaaccccaagtcctcagtttacctctggacagtagagatgaggtca

SEQ ID NO: 36879 - DNA, 201 bp, Homo sapiens
agggtgaggaggactggggtgggtgccagagggtgaatgaggaggggtcggtgctgggccacacgaagaggaggctccagggtctggtgctgggtcaggggcccagatgagcctcagaccacacaggcagggaccacaggcaggagagtggcctggtacacgttttgtgggttcggggagagaggcttctctggaagccgg

SEQ ID NO: 36880 - DNA, 201 bp, Homo sapiens
cctgagggtgaggaggactggggtgggtgccagagggtgaatgaggaggggtcggtgctgggccacacgaagaggaggctccagggtctggtgctgggtcaggggcccagatgagcctcagaccacacaggcagggaccacaggcaggagagtggcctggtacacgttttgtgggttcggggagagaggcttctctggaag

SEQ ID NO: 36881 - DNA, 201 bp, Homo sapiens
atctctactaaaaatacaaaaattagccaagcatggtggtgtgtgcctgtaatcccaactacttgggaggctgagacatgagaattgcttcagcccaggasgctgaggttgcagtgagccgagatcacaccactgcactctagcctgggtgactgtctcaaaacaaaacaaaacagtgccacggggaagatgctgtgcgtc

SEQ ID NO: 36882 - DNA, 201 bp, Homo sapiens
gtctgaggattggcacttgggaagggggcaagatgtgctcgtggaatgtgctgtctggtcccgccctctcagtttacagatggagaaactgaggcccaatrgtacggaccagacctggggaggttggcatggccagggctgctggcagcaattgctggcctccatgaagactgaaggctgaggccagggcaggcccagtga

SEQ ID NO: 36883 - DNA, 201 bp, Homo sapiens
gaggccaaggcaggaggattgcctaaggtcaggagtttgagaccagcctggcccacatggtgaaaccccatctctactaaaaatacaaaaattagccaagyatggtggtgtgtgcctgtaatcccaactacttgggaggctgagacatgagaattgcttcagcccaggaggctgaggttgcagtgagccgagatcacacca

SEQ ID NO: 36884 - DNA, 201 bp, Homo sapiens
ataatttttgtgaagtaggcccttctagtcgtgtgcacatgggggtcttgttctgaacggatgaactgccgcctcactccagtcacagtggaagtgtttcrtgggtgtctgaggattggcacttgggaagggggcaagatgtgctcgtggaatgtgctgtctggtcccgccctctcagtttacagatggagaaactgaggc

SEQ ID NO: 36885 - DNA, 201 bp, Homo sapiens
gcaggagccaggcgcagtggctcatgcctgtaatcccagcattttgggaggccaaggcaggaggattgcctaaggtcaggagtttgagaccagcctggccmacatggtgaaaccccatctctactaaaaatacaaaaattagccaagcatggtggtgtgtgcctgtaatcccaactacttgggaggctgagacatgagaat

SEQ ID NO: 36886 - DNA, 201 bp, Homo sapiens
acgggtgggcgcttgttcccaggcccatcactcagcgaaggagataaagagagcagaggagataaagtcagtggcaggcagcttctggactttcagtttcyggaggcattgggagcttggccccagaagaaagggatgggaggaggagcttagggccgagggcagtgtctcggtcacctctttgtggccctgtggggacct

SEQ ID NO: 36887 - DNA, 201 bp, Homo sapiens
agggaggaagggatcaatgccgattcataagaaccccccacttccgggcagtgcttagtgatctcgagagtccttagttcctcccagcagaggctccaacygccaagcacagggttgtcattggccttgagtgtcaaacccacccaagttcacctggactgcccccagccatctctgatagccccatgtgggcatccggac

SEQ ID NO: 36888 - DNA, 201 bp, Homo sapiens
ttatagttgttttttttaaacagttgtcttgctgacatcatgatccaaaatccacacattgcatttgttagacgtctctgacccttcttttagtctagttycccctttctttttcctctgaaatgtatttgttgaagaaactgggttgtttgtcccatagaggttcccacagcctggatttgtggattgcacccttgtggt

SEQ ID NO: 36889 - DNA, 201 bp, Homo sapiens
cccaggttcaagcgattctcctgcctcagcctcccaagtagctgggattacaggcacgcgtcaccatgccaggctaatttttttgtatttttagtagagaygaggttttaccacgttggccaggctggtcttgaactcctgacctcaagtgatccacccagctcaacctcccaaagtgctggaattacaggcgtgagccac

SEQ ID NO: 36890 - DNA, 201 bp, Homo sapiens
ctgaggcaggagaatcgcttgaacccgggaggcagaggtgcagtgagccgagaccatgccactgcactccagcctgggtgacagagtgagacgatgtctcmaaaaaaaattagccgagcatggtggcatgtgcctgtaatcccagatacctgggaggctgaggcaggagaatcacttgaaccgggaggtagaggttatagt

SEQ ID NO: 36891 - DNA, 201 bp, Homo sapiens
tttccttgggttgagctaaaatcctcctgtcacccccgggtcgcaggcgtgccctctggggactccctgggtgtctgtctcattaggaggggaggcttggycaagggggactgaggccaggcaagctgggagctccagccccacctcatgcctcctgctcttcccgccccaggagtgccggatcctcaagaacttctcgtc

SEQ ID NO: 36892 - DNA, 201 bp, Homo sapiens
caagtggctgagtgtggtggctcacgcctgtaatcccagcactttgggaggctgaggcaggcatatcacgaggtcaggagtttgagaccagcctggccaaygtagtgaagccccatctctactaaaaatacaaaaattagctgggtgtggtggcatgcgcctgtagtcccagctacccaggaggctgaggcaggagaatcg

SEQ ID NO: 36893 - DNA, 201 bp, Homo sapiens
gacccaccagggtaggacatttcaactcctaccctctccttagattcatgggacatgggacatttggacacagagagaagggggtcccctcccactggagrgtgagggtaggaggttataatccaggaccacctcctggggagtggctgagcccaactttgagaacaggaaggcctggatgggagtagaggggaggaaggg

SEQ ID NO: 36894 - DNA, 201 bp, Homo sapiens
gcacctggccagaggctgtgagtgcctgtgcttggtgctgaggggactccagagggtccttggccactgcactctgggggagccgctccagggtcttttcyctgatggtccatcccccgccgcgatgcaggtgaccagccaagataaggctccggctgtaatccgcaaggccatggacaaacacaacctggaggaggagga

SEQ ID NO: 36895 - DNA, 201 bp, Homo sapiens
ctgatggtccatcccccgccgcgatgcaggtgaccagccaagataaggctccggctgtaatccgcaaggccatggacaaacacaacctggaggaggaggarccggaggactatgagctgctgcagattctctcagatgaccggagtaagtcagaagaccagagggcgatggcagagggggcaggtccacaccactccccag

SEQ ID NO: 36896 - DNA, 201 bp, Homo sapiens
gctcagaggcgggagggggctccaagagcttcctctttcccttcagcaggtgtgcccaagcactcaccctgggttgtgggggggcagcgttgggcttgggygtggctctgaaagtgacccaggggggcctgccctccagagctggcagtctggagggggcgatggacagggcacaaaagcaaacaggcacagaaaggaaaa

SEQ ID NO: 36897 - DNA, 201 bp, Homo sapiens
agcgaaagggagcggagtgcacagcgggccgctggcccaggagtggaatgagtggaagccattcctttattttattattattattattattattattattrttgttgttgttgttattattattattattattattattattattattattattattgagacagggtcttgctctgtggcccaggctgcagtgcaggggcc

SEQ ID NO: 36898 - DNA, 201 bp, Homo sapiens
ctcttcccgccccaggagtgccggatcctcaagaacttctcgtcactgtatgccatcctctctgccctgcagagcaactccatccaccgtctgaagaagaygtgggaagacgtttccaggtgggcatgcctctgtaggagctcctggtgcaccagggacctcccacagggctggcatcacccccttagtgagcccatggga

SEQ ID NO: 36899 - DNA, 201 bp, Homo sapiens
gatgacactgcggtttgcagatagctctcctgttactgcaggcccaggtctgcgggtgctcggaaggcagccctgggcacgggtgggctgtctgtgcagayagagacttgaggggtccttccccccaaccccagccccagaccctgcctcaggggagctgggatgcctgaggtggtcctgctgctcctggtgggggtcagc

SEQ ID NO: 36900 - DNA, 201 bp, Homo sapiens
cctgaggtcaggagttcgaaccagcctggccaacatggcaaaaccccatctctaataaaaatacaaaaaaattagccaagtggctgagtgtggtggctcaygcctgtaatcccagcactttgggaggctgaggcaggcatatcacgaggtcaggagtttgagaccagcctggccaatgtagtgaagccccatctctactaa

SEQ ID NO: 36901 - DNA, 201 bp, Homo sapiens
caggctggagtgcagtggcacgatcttggtcactgcaacctctgcctcccaggttcaagcagttctctgcctcagcctcccgagtagctggggttacaggygccgccaccacgcctggctaatttttgtatttttagtagaaacagggtttcaccatgttagccaggctggtcttgaactcctgacctcatgatccacccg

SEQ ID NO: 36902 - DNA, 201 bp, Homo sapiens
actgggcgaccagggcctgctggacacaggggcctgactgtgggctcagcccccatcccccatcctcaccagccacggctgtgccttggggaggggtctcygcccacagcagagcaacttctacttacctgtgaacagagacccattccccaagaattgttcctgggccaggaatttaggaagggaaaaccccctaggtta

SEQ ID NO: 36903 - DNA, 201 bp, Homo sapiens
ggcaagctgggagctccagccccacctcatgcctcctgctcttcccgccccaggagtgccggatcctcaagaacttctcgtcactgtatgccatcctctckgccctgcagagcaactccatccaccgtctgaagaagacgtgggaagacgtttccaggtgggcatgcctctgtaggagctcctggtgcaccagggacctcc

SEQ ID NO: 36904 - DNA, 201 bp, Homo sapiens
tagacctggacaggtgcggtggctcatgcctgtactcccagcactttggaagtcgaggcaggtggatcacctgaggtcaggagtttgaggccagcctggcyaacacggtgaaaccccatctctactaaaaatacaaaaattagccgggcgtggtggtgcacacctgtaattccagctactcgggaggctgaggcaggagaa

SEQ ID NO: 36905 - DNA, 201 bp, Homo sapiens
gttgccacagtgagtgtgggagggagtgggggtttgcattttgcctttttaaagcactagacctggacaggtgcggtggctcatgcctgtactcccagcaytttggaagtcgaggcaggtggatcacctgaggtcaggagtttgaggccagcctggccaacacggtgaaaccccatctctactaaaaatacaaaaattagc

SEQ ID NO: 36906 - DNA, 201 bp, Homo sapiens
agccattcctttattttattattattattattattattattattgttgttgttgttgttattattattattattattattattattattattattattattgagacagggtcttgctctgtggcccaggctgcagtgcaggggccagatcacggctcactgcgtcctcgacctcctgggctcagacctccagagtagctgg

SEQ ID NO: 36907 - DNA, 201 bp, Homo sapiens
aagccattcctttattttattattattattattattattattattgttgttgttgttgttattattattattattattattattattattattattattattgagacagggtcttgctctgtggcccaggctgcagtgcaggggccagatcacggctcactgcgtcctcgacctcctgggctcagacctccagagtagctg

SEQ ID NO: 36908 - DNA, 201 bp, Homo sapiens
gaagccattcctttattttattattattattattattattattattgttgttgttgttgttattattattattattattattattattattattattattattgagacagggtcttgctctgtggcccaggctgcagtgcaggggccagatcacggctcactgcgtcctcgacctcctgggctcagacctccagagtagct

SEQ ID NO: 36909 - DNA, 201 bp, Homo sapiens
cagcgggccgctggcccaggagtggaatgagtggaagccattcctttattttattattattattattattattattattgttgttgttgttgttattattrttattattattattattattattattattattattgagacagggtcttgctctgtggcccaggctgcagtgcaggggccagatcacggctcactgcgtcc

SEQ ID NO: 36910 - DNA, 201 bp, Homo sapiens
gcacagcgggccgctggcccaggagtggaatgagtggaagccattcctttattttattattattattattattattattattgttgttgttgttgttattrttattattattattattattattattattattattattgagacagggtcttgctctgtggcccaggctgcagtgcaggggccagatcacggctcactgcg

SEQ ID NO: 36911 - DNA, 201 bp, Homo sapiens
tgtgaagggacaaaggctgccgcatcctggcatactcgggtggctgcagctctgttcctcatgcctctgttctttgtttctgtctccactccaaccccagycaggccatctgtgagctgcaagaagaggtgtcccggcttcgtctgcggctggaagacagcctgcaccagccactccagggcagcccgacacgcccagcat

SEQ ID NO: 36912 - DNA, 201 bp, Homo sapiens
cctcctcaccaccctctgtcaggtaggaggaactatcctcaagtttgactatggattgccagagaggtcagcagcttgcccgtggccccagtgaggggtgwtaggagccagaattgaacccagggctccctagctccaaagcccaggccccttcacccctagtacgtgacccctagtggtggaagcaaactcacctgcatg

SEQ ID NO: 36913 - DNA, 201 bp, Homo sapiens
aagaaagttccacttccttggttgaacagaaatggtaaaatcgcttggtcagttctctcacacctcctcttagttgcttttggccagtgatcacttacacrcccttgctggagtgggtgtctgtcccgggatgcgctggggagactgctcggtggtggcccagccaaggtttctttggctcgaacaggcatgaggctgtca

SEQ ID NO: 36914 - DNA, 201 bp, Homo sapiens
tccatctgtgcagagaatattcatttgtttaacccaatgtttcccaaattcactagtcctcccttcacagaatcctgattcacctttcacagaatcccccragggagtgaatccagccttggggagcacccgggacaccctggctgtgtccagagagaccagccctgggagggcctggccggagcagctgcagctgccacc

SEQ ID NO: 36915 - DNA, 201 bp, Homo sapiens
tttatttctttattgtttttgagacagggtcttgctctgtcacccaggctgcagtgcagtgtcgccattatggctcactgcagccttgtcctccctggccyaagcgatcctcctgcttcagcctcccaagtagctgggaccaaaggggcatacttccacatccagctaatttttttatatatataattttttttttttttt

SEQ ID NO: 36916 - DNA, 201 bp, Homo sapiens
atactctcttccttccatcgtgttagaagcatttctccaggttgaacttctcacaaataacctttaaaggccacacaaaacctcatccaatgacatcatcwctctttccttttgctagtaaatccacagagagattgcctggtgagcctagaggtgaagagcagattgtccctccaggaaggcagcgagccaggtcttcct

SEQ ID NO: 36917 - DNA, 201 bp, Homo sapiens
cttaacccctggtaagcactaatctgttctccatttctataattttatcatttcaagaatgttctataaatagaatcatatactatgtaaccttttgggaytggcttttcactcagcataattctctggagatttatctagattattctgtgtattaatagttagctcctttatatattgctgagtagtattccaagggtt

SEQ ID NO: 36918 - DNA, 201 bp, Homo sapiens
cggcttcgtctgcggctggaagacagcctgcaccagccactccagggcagcccgacacgcccagcatctgcctttgaccgccccgcccggacccgcggccrgccagcagactccccagccacctggggctcccattatggcaggtgggtgacctcaaaactcccacctctgtcctggtggcagctacagaagatagtcttg

SEQ ID NO: 36919 - DNA, 201 bp, Homo sapiens
acgtatatgtgtgtatgtgtgtcatacttaaatatgtacatattttacacatgatgtgtgtatgcacactcaccgtgtgcacacgtgagagagagacagaractattaaaaccatttggaggaagaggagatcattattccagaatcttcctctattttgcatccatccacagggctgatactgacagttctggtttcttt

SEQ ID NO: 36920 - DNA, 201 bp, Homo sapiens
tgtgtgtatgcacactcaccgtgtgcacacgtgagagagagacagaaactattaaaaccatttggaggaagaggagatcattattccagaatcttcctctrttttgcatccatccacagggctgatactgacagttctggtttctttccccaggccacgaataccatgttctgtcccctaaggcggtcccaaaaggcaatg

SEQ ID NO: 36921 - DNA, 201 bp, Homo sapiens
cagaggcctgttttttttcctctttctttttgtttcctgactcagagtctctgggtcctgggtggggccagtgttgggagcctcttgtgctcctgtgcccscttttctgtgaagctcctgcttctcccgcttgactcgctctgccccgggtacacaggccttgctgttctcagggaaagcccgctggctcccccaccttgg

SEQ ID NO: 36922 - DNA, 201 bp, Homo sapiens
ccctagcggttcctggctcagagtttgaggggcacaaacggatttctgaacagccccttcccaacaagacaatcagcccacccccagcccccgcccctgcygctgcgcctctaccctgtggaccaacagagaccatccccagcttcctgctcaccagggcagggcgagagtaagttagacacttggatcctggggattcaa

SEQ ID NO: 36923 - DNA, 201 bp, Homo sapiens
aggggcacaaacggatttctgaacagccccttcccaacaagacaatcagcccacccccagcccccgcccctgccgctgcgcctctaccctgtggaccaacrgagaccatccccagcttcctgctcaccagggcagggcgagagtaagttagacacttggatcctggggattcaagctcatcatacagacgggagcgtgatg

SEQ ID NO: 36924 - DNA, 201 bp, Homo sapiens
cagccatccccaaaacatgagcccctccctggttttagaggccacacagctccagcctcctccttgtcaccagtgctaggtctcacccccctttttggcawtgcatctcatccaaatccctccacttgtgcttggaagtgtctctaggctggctcccgggaaactctgagctctttcaggattctggaagggtaacagaat

SEQ ID NO: 36925 - DNA, 201 bp, Homo sapiens
aacaggtgtttctttcctcatgcctgggtaagccctggcactcaggccctggcactgggtgtggagacaggcatagggatgaggtggattgatgactgttwtagtaataagaatggtcataggtgatgtttatggaccactctcttaaataatttgcagttggggaagctgaggcacagagaggttaaataacttgaccaa

SEQ ID NO: 36926 - DNA, 201 bp, Homo sapiens
acagggaggggattcactctgggtccatggggcttgaggggagctgagattccagctggccagtgcctcactccatctggacctctgtgcactctaccccraaggctggagagaccccaggatggtcttctgctcagaacccacgagttcagaggcagtcctcagaacccaccgagccatttcactctgctcagagcccac

SEQ ID NO: 36927 - DNA, 201 bp, Homo sapiens
atccaggagagagatgatggggactgggttctcggggagggcccctacagaggggaagaagggattcatttgggaagaggtattttggaagttgggcccaygagacttggtaactaattaacttcagggatgttcagggaaggaggggatctagagtgactcagagttctgtctggctagtcaggtagatgctgctgccat

SEQ ID NO: 36928 - DNA, 201 bp, Homo sapiens
tggttgttgtcaatgtcatcacccagatggaggcagcttgtcccctccgcagtgggtcccgaggagagctcagtgctgcagaaggcctgcatgggggctcytgatctgatgatttagatgtaatcctcccctgacatctcttcctcctcttctaggtggtgctgtcacaggggacccactgggaccgcctcccgctgatac

SEQ ID NO: 36929 - DNA, 201 bp, Homo sapiens
gaagtgtgagcaccattcagggctctaccggaaggaagcaggatgatactatcatctcctgcccaaccccatctcacagctgccctgaaggaacagtacayggcaggcttgcagctcctatgtgcagaagagaacacagagccccggaacagggaggggattcactctgggtccatggggcttgaggggagctgagattcc

SEQ ID NO: 36930 - DNA, 201 bp, Homo sapiens
ccctctgtcaggtaggaggaactatcctcaagtttgactatggattgccagagaggtcagcagcttgcccgtggccccagtgaggggtgataggagccagrattgaacccagggctccctagctccaaagcccaggccccttcacccctagtacgtgacccctagtggtggaagcaaactcacctgcatggctggggcctg

SEQ ID NO: 36931 - DNA, 201 bp, Homo sapiens
tcctgcctctcagcaagcagaaaaaggccttttcttttttatcgcctttaaacaaaattacaaaatagttgccaaaagtttggaaaccctgttaaaaaaartgggggctggaggggagaccctttatagagtcctattggtgtatatcctttggaatttggagttttagataacggtggtcataaatacaatttagattcc

SEQ ID NO: 36932 - DNA, 201 bp, Homo sapiens
tggagtgcagtggcatgatcatggctcactgcagcctcgacctttctggctcaatcaatcctcagaactcagcctcccgaggagctgggactacaggtgcwtgccaccacacccagctaatttttgtattttttgtagagacagggtctcacagtgttgcccaggctggtctcaaactcctggcctgaagtgagcctctca

SEQ ID NO: 36933 - DNA, 201 bp, Homo sapiens
ggtggggctctcaagtctgggagtgtaggcgtcaaaggagagaactgtcagcaaaggtgtgggcagcatcaggggacccaacaaagactgaggaatccccrggtagtagcattagccgggagctgtgcccactctcaagtctctctcttcccaccctgtgatctctcataggtccctcccactagacagacccaaccagaa

SEQ ID NO: 36934 - DNA, 201 bp, Homo sapiens; identical to SEQ ID NO: 5621

SEQ ID NO: 36935 - DNA, 201 bp, Homo sapiens
gtcaaccagaaggcggaagaaaaacagtaatgttatcgaggagaagtggccaatcgcccatcacagtcccggggcaagagtctggtggagattaaagccarccctcccggttccacccatgggaaggccaaggccaggaagaaggagggacttgctcaggtcttctggccagaagctgagatgggggtgcattggaatggg

SEQ ID NO: 36936 - DNA, 201 bp, Homo sapiens
tgctttagcccagagcctcaatgctcagtaaacattctcaataatgtgatggtgatgataacattatcggtgtcgatagtctataaggatttggggaaagrgtggctaattttctgaagcccacagttttgcaaatcaagaatgaggatccagagtctctcatgtaaagggtccttatggagataatagtgagagtgtatt

SEQ ID NO: 36937 - DNA, 201 bp, Homo sapiens
ggcggggtcgtcgccacgcccaccccccggactgtggtatctggcaacagcgcccccagcaccagcccctccagcctttgcctacatctcctcggttcccrtcatgccttatccacctgccgctgtgtaagagccttcattctgaccttcccagcctctttctatagatcactgaatatgttagcattcagacctgggtgg

SEQ ID NO: 36938 - DNA, 201 bp, Homo sapiens
ccctgggatagaggctggtggggtggggaggcctggggtggaggctggctgaggtggagagccctgggatagaggctggtggggtggggaggcctggggtrgaggctggcttgggcaggaagccctggggtagaggctggctgcggtagggaggcctggggtttgggccaggaactccctgctggtggagggagggtgtac

SEQ ID NO: 36939 - DNA, 201 bp, Homo sapiens; identical to SEQ ID NO: 5638

SEQ ID NO: 36940 - DNA, 201 bp, Homo sapiens
tatcattatgccagtggctgggaactgggagatccaggcagatgtcctggaagtcacagccttcaagaccaggtctggttgaaaggacaggtcttgagtakgtggagagggtggcagggagtggacctgccctctggccccacgatctcttcattccttcccccatctttgcctggggaattcccccagccttccagcctc

SEQ ID NO: 36941 - DNA, 201 bp, Homo sapiens
ggcctggtctggtttcagggcttccagcggctgaaggctgcccacgcggccctagaggaggagtacctgaaggcttgtcgggagcaacaccctgcccagcygcttgccggctccaaggggacgcctggaagatttgatcctcgcaggtacctgctggggtggaaggcctggaaggacagatgggatgggcccctggggtcc

SEQ ID NO: 36942 - DNA, 201 bp, Homo sapiens
gctctcctacctggcctggaatgcttttttcatcatcctcccccacctctcaatctgaattcttaccccagtgaggtcagagaggattcttggaggaaccrgcttctaaactgggatcaccagacttccctggcctgtgtcagggcagcccccgtgcctcctccagcacatctcacctggatttgtagttgcctggtgatc

SEQ ID NO: 36943 - DNA, 201 bp, Homo sapiens
ggagggaggcactttgtccttataatttgtacacggggaatagagagaaatcttatcctaattagtatacatatccaaatggtggcacgatcaaaagctgwgatttgagtccctttggacccacgtgctgagaagatgccttgaaacccttattggatgatggggaaactgaggctagatgggggtgggatttctctaatg

SEQ ID NO: 36944 - DNA, 201 bp, Homo sapiens
gaatgctacctttttttttttttttttccttttgagacagggtctcactttgttgcccaggctggagtgcagtggcgctgtcatggctcactgcagcttcracctcccgggcttaagtgatcctcccacctcgacctctggagtagctgggactgcaggtgtgcacaattacacctggctaatttttcgtagagacaaggt

SEQ ID NO: 36945 - DNA, 201 bp, Homo sapiens
gcctgtggatggcagaggggacttgggctgagacctcctgattcccaatggaaccttctttcatcttgcttattttgagttctcaccatcatctaaaggcygatattaaatggaccctaagggggcatcccctggagtctctgctctgatactctgttcctggacctgcctgatgtagctgccatcttgggctcctggtgg

SEQ ID NO: 36946 - DNA, 201 bp, Homo sapiens
gtcgcagccaaggagggaagaatggtattccctgcacctccctcctccagcccttgagaagtcagcctttcccgggctgcactgttccctggggaactttstgtccaaaaatagttgcctgctgacttttctcagccacacaaatcaagcaggatccaagtgttcatgaggataaagggacaaacacagaccttctgtcct

SEQ ID NO: 36947 - DNA, 201 bp, Homo sapiens
catatttatgaagtgtgtgccatgtaccatgacacatggtagggattcagtgggatgggaggtggcagggaaggtggcgtctaccttcacagagttttctktagagttgaactggttacagtgatttagttataattttggtcagtgcactgaaggagaattatggggttctgtgagagtagcaggagtaacatgactgag

SEQ ID NO: 36948 - DNA, 201 bp, Homo sapiens
tatgtatctttgtactttgaaatgtgacctcagggaggaggagagaggttaacagttctgaggctgttgcccttagaagctgagtcaatcagggacttcaragctctttgagtcccataccctgcctcccaacccaccctagcagggtgatatccccttgcgatatcaagagcaggtggtactttctctattttacagtga

SEQ ID NO: 36949 - DNA, 201 bp, Homo sapiens
tgagactaagtaggaattactagagacagaaagagaaaacccatccagcagggaaaacagcttgtgcaaaggccctgtggctagagtatgggaagagaaargaaaaatagtctgagatgtggctggagaggcaggcaggggccccatgatgtaggggcttgtgggtcacgtagagagcatggccttaaactctgctggatt

SEQ ID NO: 36950 - DNA, 201 bp, Homo sapiens
tttactcttttctatattctttgcatcttacgtagcgcctggtatatagtaggaagtcatagggcttttttaaaaagttaatttgcgcccactgggtgctmagtatgtatctttgtactttgaaatgtgacctcagggaggaggagagaggttaacagttctgaggctgttgcccttagaagctgagtcaatcagggactt

SEQ ID NO: 36951 - DNA, 201 bp, Homo sapiens
aaggccctgtggctagagtatgggaagagaaaggaaaaatagtctgagatgtggctggagaggcaggcaggggccccatgatgtaggggcttgtgggtcaygtagagagcatggccttaaactctgctggattttctggcaggggatgacataagatgacttgtgggtaggccagtctgaggctggggaggtggcagggca

SEQ ID NO: 36952 - DNA, 201 bp, Homo sapiens
ttgtagcaaaaatcgggatggtgactgtggccgtgctgcagtgtgggtgacattgaaaaccacagtatcaattccccactgcacgggtattaaaaatgagyggggagtggaggtggggtgaaagcctggggtttgggacgcgtctgtaggtggtaactccccgcattacgtcccctccaattgccaatcccccaaccccgt

SEQ ID NO: 36953 - DNA, 201 bp, Homo sapiens
acagctggtgggaaccccttgagaacagcaagtctgtgccctgccagcaggtgggtgggggtatggttgagcctttttggaaggtctggttactgatttgrggggtggtcttccttccccatctccctgacacatctgacagccttggtttcagagttgcggtaccccagctttgaatcctctgtctgcgcttcctggctg

SEQ ID NO: 36954 - DNA, 201 bp, Homo sapiens
ctagagggtaggaaaactctaccaggtgccactacacgcttgaatggggagaaaacctgagtacaatatcttaagggaccctcatgctcctgcagttgaargtattgcagggggctggggtggccatgctggaatggatgggggtcaggagagttaactctggcaggaaatctaggtttaaatctcaactctgctccttgt

SEQ ID NO: 36955 - DNA, 201 bp, Homo sapiens
gtcggcaggacggtggtggagcccgagagaggtaagggattggaacggaggagggcccgggaggccgctttccttctggacgggccagtcacagactctcygggacagtccaggcagccggaccagcccagccaggaagttgcagctgctggagctgcaccgcttttctcttggcttaggggatcccggcctccagggcaa

SEQ ID NO: 36956 - DNA, 201 bp, Homo sapiens
aactctggcaggaaatctaggtttaaatctcaactctgctccttgtttctgttgactttgggcaaatcatttgagcgtgagttacctgtctataaaatggkttgtaataatcgtaggtactggtgggattgttgtgacatggtatctgtatggtgcctggcacacagcaggtgctcaattcatggcagccagtatcgaaga

SEQ ID NO: 36957 - DNA, 201 bp, Homo sapiens
agacaaaccccctccttctgacaaacacttgtaggaaatcaggctgggcgcttcctgccgaggcgaggcggcctcaaccacggcaggggcggggagaggtrgggagcgatgctggtctgtgagcagcagcttgggctggcagaacggcctggaggtgggccagggcgcaatggagacagggggctccctgggtttggaaca

SEQ ID NO: 36958 - DNA, 201 bp, Homo sapiens
cattgcacgtaaatgtggaggtgagctctggcaacagtgaggtggaggacaggccacaggaccccctggcccgactcaggcacaaggagctgcagatggarcaagtttaccatggcctcatggagcggtgagtgccacctggacctgaccagggtgtctggccagcagctggatcttggctgtcccccactgggcagaggt

SEQ ID NO: 36959 - DNA, 201 bp, Homo sapiens
agatatatattattttataactggcttgtccacttaacataacaaaatttttacattatttgatattcttcaatagcatgactgttaacggcagctaatawtattcctttgagtggaactatcacaatttctttcaatgatcacctgttacgggacactgctattgtttccaaccattttacctattgcaagtttcagttg

SEQ ID NO: 36960 - DNA, 201 bp, Homo sapiens
gagaaggccaccacgaggagaaaagcaccttcaactcccagccccaagcagaggagcaagcaggcggggtcgtcgccacgcccaccccccggactgtggtrtctggcaacagcgcccccagcaccagcccctccagcctttgcctacatctcctcggttcccatcatgccttatccacctgccgctgtgtaagagccttca

SEQ ID NO: 36961 - DNA, 201 bp, Homo sapiens
cacagggtagggcctgtccagctctcataggggaagggctgggtggaccctccatctttggctggatctgccaagtggtcagactctgtctctctgtgctrttccctccctgataggggcagagaaggccaccacgaggagaaaagcaccttcaactcccagccccaagcagaggagcaagcaggcggggtcgtcgccacg

SEQ ID NO: 36962 - DNA, 201 bp, Homo sapiens; identical to SEQ ID NO: 5672

SEQ ID NO: 36963 - DNA, 201 bp, Homo sapiens
tgacccaaagtccacattctttgttatgtgtgttttttgcttcctctacctccatgattctttttctcttgacctctggtttcttcctcacgtggcttttycttccatgttccccacttctcgtctcccttgcttctccctgctctgcccatcatgactcatttctgtttcatttttcagcggatcctcctgagtatggtt

SEQ ID NO: 36964 - DNA, 201 bp, Homo sapiens
gtttcgccatgttgaccaggctggtctcgaactcctgacctcaggtgatcctcccgcctcagcctcccaaaatgctgggattacaggtgtgagccacggcrcatggcctgttgtaaacattttaaagcatgtctttctctttcttttgctttctctctctttctttttcctatcctgtctccttcctttcttcctcctcct

SEQ ID NO: 36965 - DNA, 201 bp, Homo sapiens
ttttttttttaattgagacagtttcactgtcatcgcctaggctggagtggggtggcacgatcttggctcactgcaacctctgcctcccaggttgaggcagytctcctgcctcagtctcccgagtagctgggattacaggtgcacgtcaccacacccagctaatttttgtatttttagtagagacggggtttcgccatgttg

SEQ ID NO: 36966 - DNA, 201 bp, Homo sapiens
tcacaggaggggcaactgaagacggaggtgcccaaggtcagaaggaagcaccacacagaggtgaggtggtattcgtttgttttgtttttaagaatagtacrtgttcatttcattcttatttttaaagcaactgttatatttgaaaaatacccaaaaggaaaaatggtaaacttccctatcaaaaaaacttgcctataattc

SEQ ID NO: 36967 - DNA, 201 bp, Homo sapiens
ctgccacccagatgtgggtaaaaggcaggaaaggggatagaggggtgggcgattaccaggatgagggctcctggttctagccctggctacgccagatattyacaagctgaccttgggaacgtccactcattcattcattcattcattcacagaacacattcatcagccataaacagtgtgccaggcttcaggaaagatatt

SEQ ID NO: 36968 - DNA, 201 bp, Homo sapiens
aggctatgcccagcaatggcagccacctgggttaatgctgcctgggttaatgaccagggagggagggtgagtgagtgacagggtgtcaggggagcccgccycttgcacaatggcacacatggcctccagagctgatagggaggggcctcattagggtttggctctgctccatgtggggctgggggctacagggagagccct

SEQ ID NO: 36969 - DNA, 201 bp, Homo sapiens
acatcagcctcattgggttgttatgagggctatgagtcaggcttgggcaagtagctaggttgagtggatcatccaggatatatttattgtatttctattgkatatcagggcctgtgtgctgggtcctggggatatgatgatgagagcctcacagagctcccaactgagtgaagagacagatgttaatcaaataatcacata

SEQ ID NO: 36970 - DNA, 201 bp, Homo sapiens
ctctgtgtggaaccagggcctcactataaaattggaacattggctttgtgaattgcaattagttggtaagaagctccactctcgattttattgtgcacagrtattaattatctctgcgggctgcaatgttgtgagcaccaagcttggttattagaagccaggtctttgtgtgtttgaaactctactgcagctcatcacctt

SEQ ID NO: 36971 - DNA, 201 bp, Homo sapiens
agtctcactctgtcccccaggctggtatgtagtggtacgatctcagctcactgcaacctccaccactcaggttcaagtgattctccagcctcagcctcgckagtagctgggactacaggtatgcaccactgcgtccagctaatttttgtatttttagtagaaatgggtttcaccatgttggccaggctagtctcaaactcc

SEQ ID NO: 36972 - DNA, 201 bp, Homo sapiens
ctcgtgctgcttctccagtggctcacacttatcctagaaggcagcggggaattggggtgagggagaagcagaggcatggggacagggtgggaggtcttccrgggagagggcagaatgagctctggcctgtggaaccagctcaaccagggctccaaccctggcactgtcacttcccagctgggtgatcttgggcaagtcatt

SEQ ID NO: 36973 - DNA, 201 bp, Homo sapiens
ttctgggcgcaagcaatcctcccgtctcagcctcccagagtgctgggattacaggcgtgagccaccatgtctggccagttcattgcttttaatgcaggggmcggattagtggtttttaacctttggtcacccatccctttgggagattcgttaaaagttattaatgctctccccagaaacatgcatacgtggaaagaggtg

SEQ ID NO: 36974 - DNA, 201 bp, Homo sapiens
agagctggtatatgctaagaagtgaatggcctgtctttccagaggctgaagcagaggatgtggacagcccagcaagttcccatgagcctcttgcctggctyccccagcagggccgtcagctggacatgactgaagaggagccagatgggaccctcggaagtctggaggttgaggaggctggagagagctcctcaaggttgg

SEQ ID NO: 36975 - DNA, 201 bp, Homo sapiens
ccagcgtttctgtgggacctcattgatctagacatcgaggacacacttctccagccagtggaatatgacctaaagattcacctttctggtgctgacacttmtgccctctctctccatcatctcttttccgagaaaagcctgtcctttctagggctatcttttctgcaatttgcccattgattgtatggaccaagaagctac

SEQ ID NO: 36976 - DNA, 201 bp, Homo sapiens
tcctataggactgggctaggaaggatgctcttctacccacttcccaggacatggggccagaccctcccactcctgcagaatccctattattattattattwctattattaattattaattattgcctttctccagcaccccttgcttggcaaatggaacccccagatattcttccatgagggggttttgctatcaagccta

SEQ ID NO: 36977 - DNA, 201 bp, Homo sapiens
agcgtttctgtgggacctcattgatctagacatcgaggacacacttctccagccagtggaatatgacctaaagattcacctttctggtgctgacacttatsccctctctctccatcatctcttttccgagaaaagcctgtcctttctagggctatcttttctgcaatttgcccattgattgtatggaccaagaagctactg

SEQ ID NO: 36978 - DNA, 201 bp, Homo sapiens
ctggagtgcagtggcgccatcttggctcactgcaacccccatctccaagattcaagctattctcatgcctcctcctctcaagtagctgggaatacaatagygtgccaccacacccggctaatttttttggtatttttggtagagatgggtttcgccatgttggccaggctggtcttgacctcctggcctcaggtgatctgc

SEQ ID NO: 36979 - DNA, 201 bp, Homo sapiens
aagattcacctttctggtgctgacacttatgccctctctctccatcatctcttttccgagaaaagcctgtcctttctagggctatcttttctgcaatttgmccattgattgtatggaccaagaagctactgccttctgagtttttcttttctttttttggttcgtgtgcattttttctactaagaaagttccacttccttg

SEQ ID NO: 36980 - DNA, 201 bp, Homo sapiens
aacccaggtctttgtgactccagagtcccaccttttcaccactatgctcttcctgtgctagtgttagagtcctgacaggcctctccgttcatgcctgcatkcattcattcattcattcattcattcatcacttacccctatggggccctgggccccgtccccaaggaacacacaacaaagcagagtggccaaagctggggt

SEQ ID NO: 36981 - DNA, 201 bp, Homo sapiens
atgcacaaaagaatatataaacctctatgttaataataaagaataggccgggcgcagtggctcatgcctgtaatccagcactttgggaggccgaggcgggmagatgacgagttcaggagttcgaaaccagcctgaccaacatggtgaaaccctgtctctactaaaaacacaaaaattagctgggcgtggtggtgtgcgcct

SEQ ID NO: 36982 - DNA, 201 bp, Homo sapiens; identical to SEQ ID NO: 5674

SEQ ID NO: 36983 - DNA, 201 bp, Homo sapiens
gtgggtttgcccctaccctgacttggctgtgctgtgcctccctgcttccacaggtgaacctgttctctgacccaccccagcccaaccacagcatccacacrggaatggtgccccaggggaccaaggtcttgtccttcaccatcccacagccccgctctgcagagtggtggccgggcccggccgaggacccccaggcctctg

SEQ ID NO: 36984 - DNA, 201 bp, Homo sapiens
ctgaaggaacacatagaccagacccagcaagagcctgagccgcccgggtcagactcagctctggacagcaccccagccctgccctgcctccatcagccaaygcacctgcctgctccttctggacaagcccccatgccagccatcaagacctcctgccctgaggtacctcttggctcaaccatattgggctgttccctcgtg

SEQ ID NO: 36985 - DNA, 201 bp, Homo sapiens
ggtgaacctgttctctgacccaccccagcccaaccacagcatccacacgggaatggtgccccaggggaccaaggtcttgtccttcaccatcccacagcccygctctgcagagtggtggccgggcccggccgaggacccccaggcctctgcggcctcaggtgagtccgggagaagagctgcagctggaggctccttctgcct

SEQ ID NO: 36986 - DNA, 201 bp, Homo sapiens
gaggaggggttctggttagaaacagcggggcaggcccagctcagcaccccacactcccagcaaaatctagatcttctggtttggaggtcagtgtgggtcawtggcctcatcaggaacttcctttgtgaccttgaactaggcaccgtctcttcacttcccccatcattccacctgcacaagtgtgagcttggaagttctctc

SEQ ID NO: 36987 - DNA, 201 bp, Homo sapiens
tggagtgttgagcagtaaaggaagagaggggtagagaggagagacctatgggagatcctacagggcctgaaggccatgggtaaggggagacattcactgcrtattccatgagtgcacaaaggctgagaggacagggaaggggattttaagcagggacgtagcgtaggcaggtttatgttttagagttctctggccaccggc

SEQ ID NO: 36988 - DNA, 201 bp, Homo sapiens
aattaacttcagggatgttcagggaaggaggggatctagagtgactcagagttctgtctggctagtcaggtagatgctgctgccatgtgcagagacagggragtaagtttgcagagaaagatgaatgttaagtgcctgctggcactcagtaagaaactaaagagttacatcagagagactgagatacccaagtggctgact

SEQ ID NO: 36989 - DNA, 201 bp, Homo sapiens
caccaggatttactatagtcttgcagacagcttccagcctgctcttagtcagccctcccggttcaggtggtgctaggaagcatcgaggtgtctccctgtcygctctccactcacagcgctttattctgctccgtctcagagcccagatccactgcagtactgtttcctgagcatccacaaggtgcagggcctcaggggtta

SEQ ID NO: 36990 - DNA, 201 bp, Homo sapiens
acaggcagctcgggatggaaagagaggggtgggcagtgctggatggccagacagggtcaccttccggggccaatacacaggtaggtcaggagggagggccrggatgggtgcagctcctggtgtcagcgggggctcctctgttatgagaagccctttccatatacccagtgggccattcaaatatcattttctatcagttct

SEQ ID NO: 36991 - DNA, 201 bp, Homo sapiens
cccaagcgatcctcctgcttcagcctcccaagtagctgggaccaaaggggcatacttccacatccagctaatttttttatatatataatttttttttttttttgcaaagatggggtctttctatattacctaggctagactcaaacttctgggcgcaagcaatcctcccgtctcagcctcccagagtgctgggattacagg

SEQ ID NO: 36992 - DNA, 201 bp, Homo sapiens
taagggttttgcataaattaatcctcacagttctatgaactaagtactgcagtactattacgtccattttatagacaaggacaccaaggctcagagagatkaagtaacttgcccaagggcacacagcttacaagtggtagaagcaggatttgaacccaggtctttgtgactccagagtcccaccttttcaccactatgctc

SEQ ID NO: 36993 - DNA, 201 bp, Homo sapiens
attaggtatatctcctaatgctatccctccccccaccccacaacagcccccggtgtgtgatgttccccttcctgtgtccatttgttttcattgttcaattsccacctatgagtaagaacatgcggtgtttggttttttgtccttgtgatagtttactgagagctgtggtgtctttaatgcctctcttgaacttctgtggaa

SEQ ID NO: 36994 - DNA, 201 bp, Homo sapiens
tgctcaaaacattgttgttgatcatctagattatatcagttacgtgatgttgtcgaagtgggtgttattgttgtccctcttgtacagatagaaagcctgargttcagagaggtaaagccacttgacgagagtcacacagcttctcactggtgttagcgcatccttactttggggtgtgcagggtgtgctggtgtcagctcg

SEQ ID NO: 36995 - DNA, 201 bp, Homo sapiens
actgaggctcaaagaaaggaaggaataatgacaacaataataccattggtattattagctaatatcataggtaatatttattgagtgcgacattctagccrctgtgccagggcttttactgcaagaagtgaggtttgggagggcaggagctcttatctgttttgtcaccattgttattccctagtgtctacctagtacaga

SEQ ID NO: 36996 - DNA, 201 bp, Homo sapiens
cctccatctttggctggatctgccaagtggtcagactctgtctctctgtgctgttccctccctgataggggcagagaaggccaccacgaggagaaaagcaycttcaactcccagccccaagcagaggagcaagcaggcggggtcgtcgccacgcccaccccccggactgtggtatctggcaacagcgcccccagcaccagc

SEQ ID NO: 36997 - DNA, 201 bp, Homo sapiens
gacttgctttgttgtcagtaaattcctgcaggtttcacttcaatttttctcaaggctaccatgcctggggctggtggtagaagctgttcccagcacccacstctccatgcttggcagaaaccccacatcctgaggacggacccagctcctcttaccaaggcatagatgtggctgggtgtgggagtctacaggactggatta

SEQ ID NO: 36998 - DNA, 201 bp, Homo sapiens
tcctggggcagtcgtctcacagttcttctgcaggagggaggcgatgtccacgtggggcctttgcctcctaaagtccagccggtttgcatttaaaacatgtsattggggctgtttgttgcaaggggatttcatcagctcccaccgtcctgcagactctgccagaggcgctaggataggggtttccagagagactgggaatgg

SEQ ID NO: 36999 - DNA, 201 bp, Homo sapiens
cattggcctcccaaagcactggcattacaaggtgtagccaccgcgcccggtatgtaaatttgctttcttgctgccctctcagctgagtctaagcaagtcgytaaggaatcttccactccagcagagatgagaaccaatgctgcatgctcagacctccagcagacacgggggaaagcgcctgccagtgttccaactcattga

SEQ ID NO: 37000 - DNA, 201 bp, Homo sapiens
tgtctgacatctgtcacttaccatgatgttttcaaagttaatccttgttggagtagcacatacaagtacttcatttcttttcttcttttttttttttttttgagacagagtctcactctgttgcccaggctggagtgcagtggtgcagtcttggctcactgcaacctccgcttcccgggttcaagcaattctcctgcctca

SEQ ID NO: 37001 - DNA, 201 bp, Homo sapiens
gcataaccccatcgtaatttgaggagcctctgtagttacttacaccagacggtccctagaggagggagtgcaggctgctgttttggggatgcaagaagccygttcatacagttcagattattttatcagcatctgctgcttgccaattagcacacattagatatgtggggagagtcgggcccaggtgtgaacccatggctg

SEQ ID NO: 37002 - DNA, 201 bp, Homo sapiens
tctaccttttcctcttcaggataagttgcctcactttcttagttcattttattaaataaatcaattcctagttacttctcaagggtcttcgtatcttcatsaaacagtccaagtaaccgtgaattgtttgcaggtctgtttataactgtacattggctttattccagaagtggtttaaagcaccttatgaaaatacatacg

SEQ ID NO: 37003 - DNA, 201 bp, Homo sapiens
ggtgtcacggcccggcccagccccctggccaggcctgccaactgcgaaggcctcagtggtgtccttcctaatacccacagcctggacttctggagcccacrtccactctggtccgtgtgaagaaaagtgcggccaccctgggcatcgccatcgagggtggcgccaacacccgccagcccctgcctaggattgtcactattc

SEQ ID NO: 37004 - DNA, 201 bp, Homo sapiens
gtcaggagagacttcgggagaaggtgagactgacacccctccccctacagtggtgtcctgtccccaaaacatcacacgttcttttttttttttttttttttgagacagagtcttgcttcattgccaggctggagtgcagtggcacgatctcggctcactacagcctctgcctcctgggttcaagcgattctcttgcctcag

SEQ ID NO: 37005 - DNA, 201 bp, Homo sapiens
aggcagctggtgtttcagaaggcacccctgccatcccctgacagggtgctgttgaccctctgcagggaatgaccctcccacctagcagcaggagggcttcrttaggcctcagatctcctggcattcaactccaaagcttgtgtggtcatgggcaagtaattttacctctctgagcctctagttccccatctataaaatggg

SEQ ID NO: 37006 - DNA, 201 bp, Homo sapiens
gcaacctccgcctcccaggttcaagtgattgtcctgcctcagcctcccaagtattacagggaggattacaggcacctgccaccacacctggctaatttttrtatttttagtagaggtggggtttcatcatgttgcccaggctggtgtcgaactcctgacctcaggtgatccgcccacctcagcctcccaaagtgctgggat

SEQ ID NO: 37007 - DNA, 201 bp, Homo sapiens
gtaatcccagcactttgggaggccgaggcgggtggatcacgaggtcaggagatcgagaccatcctggctaacacagtgaaaccctgtctctactaaaaatmcaaaaaaaaaaaaaaaattagctgggcgtggtggcaggtgcctgtaattgcagctactcaggaggctgaggcaggagaatggcatgaacccgggaggcgg

SEQ ID NO: 37008 - DNA, 201 bp, Homo sapiens
tgtctttctctttcttttgctttctctctctttctttttcctatcctgtctccttcctttcttcctcctcctcttcctccatattttactgttttttttttaagtggactcaaactagatatatattattttataactggcttgtccacttaacataacaaaatttttacattatttgatattcttcaatagcatgactgt

SEQ ID NO: 37009 - DNA, 201 bp, Homo sapiens
ctctcccagctctcggacagcgggcagactctaagcgaggacagtggtgtggatgctggcgaggcagaggccagcgccccaggccgaggaaggcagtcggygtccaccaagagcaggagtagcaaggagctgcctcggaacgagaggcccacagatggggccaacaaaccggtgagccaggaggaggaggatgcagagggc

SEQ ID NO: 37010 - DNA, 201 bp, Homo sapiens
cccagtctcattgttcacagctctctccttgaaattatacatgtgcttgcttattgtccatgtctctgctagagtggagagcaggggactggcctgtcttsggccctgccatattcccaggtgatttaaaagcacccgccacacagtaggagctcagtgagtacctacgaatgaaggaatgggatggtggggcttgaggaa

SEQ ID NO: 37011 - DNA, 201 bp, Homo sapiens
aaggactgttcttggccccagctttcagcagttgtgtattccagggtggccatcagctcgaggagacttgagcccctcctcgcttaccagcatgcccaccstggggtggcttccggagaaccgggacatctctgaggaccagtcctcagcagagcagacccaggcactggcttctcaggccagccagttcctggccaaggt

SEQ ID NO: 37012 - DNA, 201 bp, Homo sapiens
caccccacactcccagcaaaatctagatcttctggtttggaggtcagtgtgggtcattggcctcatcaggaacttcctttgtgaccttgaactaggcaccrtctcttcacttcccccatcattccacctgcacaagtgtgagcttggaagttctctctgcttaaactcactttgggttctctctctgcctccctagcggtt

SEQ ID NO: 37013 - DNA, 201 bp, Homo sapiens
cctgctggggtggaaggcctggaaggacagatgggatgggcccctggggtccctcagtctccaggagggaggcactttgtccttataatttgtacacgggkaatagagagaaatcttatcctaattagtatacatatccaaatggtggcacgatcaaaagctgtgatttgagtccctttggacccacgtgctgagaagatg

SEQ ID NO: 37014 - DNA, 201 bp, Homo sapiens
ggcatcatgtcattgaatctttatagcagcccctgtggggtggctactcttcttatccctgttttacagatgaagaaactgaggcttagagacgtgaagcytcaaaggtcagggccagcaggagatggggctgggatttgaacccaggtccacagtgactctgagatttttttctctcctacatgggtggttcccaaatct

SEQ ID NO: 37015 - DNA, 201 bp, Homo sapiens
ttttaaagcatgtctttctctttcttttgctttctctctctttctttttcctatcctgtctccttcctttcttcctcctcctcttcctccatattttactsttttttttttaagtggactcaaactagatatatattattttataactggcttgtccacttaacataacaaaatttttacattatttgatattcttcaata

SEQ ID NO: 37016 - DNA, 201 bp, Homo sapiens
tgaaaaatacccaaaaggaaaaatggtaaacttccctatcaaaaaaacttgcctataattctactacctagtgataatgattgtaaactttttttttttttaattgagacagtttcactgtcatcgcctaggctggagtggggtggcacgatcttggctcactgcaacctctgcctcccaggttgaggcagttctcctgcc

SEQ ID NO: 37017 - DNA, 201 bp, Homo sapiens
cctccctgaccccagctatataagctgcttctctcttccttttcccctctccagcagcctctacgctctcccagctctcggacagcgggcagactctaagygaggacagtggtgtggatgctggcgaggcagaggccagcgccccaggccgaggaaggcagtcggtgtccaccaagagcaggagtagcaaggagctgcctc

SEQ ID NO: 37018 - DNA, 201 bp, Homo sapiens
gtttgggagggcaggagctcttatctgttttgtcaccattgttattccctagtgtctacctagtacagagccctacacagagtaggtgctcaaaacattgktgttgatcatctagattatatcagttacgtgatgttgtcgaagtgggtgttattgttgtccctcttgtacagatagaaagcctgaggttcagagaggtaa

SEQ ID NO: 37019 - DNA, 201 bp, Homo sapiens
gccgcccaggttcaagcgattctcctgcctcagcctcctgagtagctgggatcacaggcgtgtgccactacacctggctaatttttgtatttttagtagaratggggtttcaccatgttggccgggatggtctcgatttcctgacctcatgatcctcccacctcggcctcctgaagtgctgggattacaggcgtgagccac

SEQ ID NO: 37020 - DNA, 201 bp, Homo sapiens
cctctgcctcctgggttcaagcgattctcttgcctcagcgtcccgagtagctgggattacaggcatgcgccaccatgcccggttgtatttttttttttttyttttttagtagagacggggtttcaccatgttggccaggatggtctcaatctcttgacctcgtgatccgcccgcctcggcctcccaaagtgctgggattac

SEQ ID NO: 37021 - DNA, 201 bp, Homo sapiens
tgtgaggtcttgtgagagcaggccatgtctctgtgcctcagtgtcttcatctgggaggtgtcagggtgtgggtgggggtagaagcagggtggcaccctggmcagctctggctggatgggaaggggctgcagagggcacggggaggctgtgcgggctgcgtagctgtgctggcaaaggagagcctgggcgtctgggcagttc

SEQ ID NO: 37022 - DNA, 201 bp, Homo sapiens
tgagctctcctacctggcctggaatgcttttttcatcatcctcccccacctctcaatctgaattcttaccccagtgaggtcagagaggattcttggaggarccggcttctaaactgggatcaccagacttccctggcctgtgtcagggcagcccccgtgcctcctccagcacatctcacctggatttgtagttgcctggtg

SEQ ID NO: 37023 - DNA, 201 bp, Homo sapiens
acagtgaggaaaatgcaagcccagctatacacagtgagtaacagcagccaggactagcacctgtctcctgatgcccagcctgcttctctatcacagcatcrtcccagcctgaggttggcaggtagttggcactaacgtgtgtttgttgactgactagctgactggccagttctggggctttgtggtgaggagggccatggc

SEQ ID NO: 37024 - DNA, 201 bp, Homo sapiens
gctgcataagctactgtaccttgactttttgaagtcttaaatttgaatatttatttttgggtaggcaacgaattcacattgttcagatttcaaaggatgcraaggacatgtagtagaaaaatctacttctcattcctgtcttccagccacccagttctccttcccagaagcaattcatattttagtttcttgaattcctct

SEQ ID NO: 37025 - DNA, 201 bp, Homo sapiens
gctgtgtccagagagaccagccctgggagggcctggccggagcagctgcagctgccacccccacccccaccgccactccccacctcatcgctctgcctggrcatctgctcaggttttgggcttctctgcttcaaactccttatcggtccctgaaacaaaagggcttcctggcttccctggcccatccccattccctgtcac

SEQ ID NO: 37026 - DNA, 201 bp, Homo sapiens
ataggaggtcccattggacaggaccaagtgacagaatggattcagggggttagagggagagagatggcaaagatgcctcccagccttctggcctgtatgcrtagaggggatggtgttgccgtctgctgagatgggagacactggagggaccatccaccgggtttgggtttgagtttgagtttgaaggacctctgagataat

SEQ ID NO: 37027 - DNA, 201 bp, Homo sapiens
tctgttggaccctaagcacattagagtcacacatttagctttgagcttcctagttgccaatgccaaaagagaaatgcaatagttacatgcactaccatgcycataaaacaaattctttcagaagcaccaccattttattcttcccttcccttccctcctctcctctcctctcccttcccctctcctcttctcttctctcct

SEQ ID NO: 37028 - DNA, 201 bp, Homo sapiens
ggttattagacctgggtgagtttaactggagcagctgttgttccagtctgggacagagcaactggggcagaggatttgttccccaaagagagacctccccracatggagtctcacagggtagggcctgtccagctctcataggggaagggctgggtggaccctccatctttggctggatctgccaagtggtcagactctgt

SEQ ID NO: 37029 - DNA, 201 bp, Homo sapiens; identical to SEQ ID NO: 5619

SEQ ID NO: 37030 - DNA, 201 bp, Homo sapiens
gcctggaagagctgaaggaacacatagaccagacccagcaagagcctgagccgcccgggtcagactcagctctggacagcaccccagccctgccctgcctycatcagccaacgcacctgcctgctccttctggacaagcccccatgccagccatcaagacctcctgccctgaggtacctcttggctcaaccatattgggct

SEQ ID NO: 37031 - DNA, 201 bp, Homo sapiens
tccctgacagctgaggtcatgctggccctatggtttggggaaaatcttgtgctgtgctctggcctagagggtaggaaaactctaccaggtgccactacacrcttgaatggggagaaaacctgagtacaatatcttaagggaccctcatgctcctgcagttgaaggtattgcagggggctggggtggccatgctggaatgga

SEQ ID NO: 37032 - DNA, 201 bp, Homo sapiens; identical to SEQ ID NO: 5620

SEQ ID NO: 37033 - DNA, 201 bp, Homo sapiens
aattattgcctttctccagcaccccttgcttggcaaatggaacccccagatattcttccatgagggggttttgctatcaagcctagggtgatcctggcctycccaagatccggctccaagaagattgcaggagtccatgttttcttgtcccactgtaaccccagagcctggcacgctggctggcatgtactagatgggcag

SEQ ID NO: 37034 - DNA, 201 bp, Homo sapiens
ttggggcagggctccagggcctgagctgctaaggctggtgcattctactgcctcctgaatcacttagcttctctgagctccgctttgctcatctgtaaaawaaagataaaggcaccaactggtacatgggtaccaaagatgaggatgccagccctgggctaggcactgggtttaactgttggaggaactgtcagactgttt

SEQ ID NO: 37035 - DNA, 201 bp, Homo sapiens
tagctgggattacaggcatgcgccaccatgcccggttgtattttttttttttttttttttagtagagacggggtttcaccatgttggccaggatggtctcwatctcttgacctcgtgatccgcccgcctcggcctcccaaagtgctgggattacaggcataagcccggccatcacacattcttccagggaggaagggagtg

SEQ ID NO: 37036 - DNA, 201 bp, Homo sapiens
cctcactcctgcacaaacagtttcccctattattaatatcttacaataatgtggcacattggccacgttagtgaagcaatatccatacattattggtaacygaagttcgtagttccttcaggccgttttcctccaaagtcctgtctctgttccaggatcccatccacgatcccatgtggtatgcgattgccatgcctcctt

SEQ ID NO: 37037 - DNA, 201 bp, Homo sapiens
gtagagacagggtctcacagtgttgcccaggctggtctcaaactcctggcctgaagtgagcctctcaccttggcctcccaaaatgctgggattacagatgygagccgtcatgcctggacatttttaaggttttttaaaatcccaattagcaatgggaacgttggcatttcttgttttctacaatagctgtgttctggttgc

SEQ ID NO: 37038 - DNA, 201 bp, Homo sapiens
ctaaggtagtggtggtagacttcagagcagtagatgagtttgcgatctttataggaggtcccattggacaggaccaagtgacagaatggattcagggggtyagagggagagagatggcaaagatgcctcccagccttctggcctgtatgcatagaggggatggtgttgccgtctgctgagatgggagacactggagggacc

SEQ ID NO: 37039 - DNA, 201 bp, Homo sapiens
ccaacactcatataggcactcaacaaacccatgtaccaaggagagtgctcggccctgggacccagcagtgaaggggactagcaagagggccctgccctctkggagcttataactttgtggagactgagaatcctaaccatcttccattttccttatgggttttctccgcaagtaagtgatgagcactgggttttttttaat

SEQ ID NO: 37040 - DNA, 201 bp, Homo sapiens
gtttacttgctggttcactcattcattcgaatagctattagttgctattattatcagtataataattattagaaatgcttatatttgttaagaaataattrtatgttatatggtatattaattatgatataattataacacacattattaataaaaaattactgttaataggagaaccataggtgttggggtcagatagag

SEQ ID NO: 37041 - DNA, 201 bp, Homo sapiens
ggtgaggccaggccacgatttgggaagggcttcccagtgtgccttggacacattcctcagacataaagggatactgcctctttcaggagacctggatggcrtccccagagacagacagtggctttgtgggctcagaaacaagcagagtttcacccctcacccagactccagagcaccggctctcccacatcaggtatcccg

SEQ ID NO: 37042 - DNA, 201 bp, Homo sapiens
aataaacagacacaaagatgttcggtgacgtatatgtgtgtatgtgtgtcatacttaaatatgtacatattttacacatgatgtgtgtatgcacactcacygtgtgcacacgtgagagagagacagaaactattaaaaccatttggaggaagaggagatcattattccagaatcttcctctattttgcatccatccacagg

SEQ ID NO: 37043 - DNA, 201 bp, Homo sapiens
taattattagaaatgcttatatttgttaagaaataattatatgttatatggtatattaattatgatataattataacacacattattaataaaaaattackgttaataggagaaccataggtgttggggtcagatagagcagtgttgtgatcctcatccaaggacttatcagctggggattttgagtaactgacttaataa

SEQ ID NO: 37044 - DNA, 201 bp, Homo sapiens
ctgctggtaacttcttgttccgaataaaagaggggatcaggattgattaatgttctctcttgaatgtgtccctgacagggcacaggcaggatggccgatgstgacaggaaccagcggtgactctggggcccctggcagcagctctgtctcctgaagatgaagtggcccaggtgaagcccaggccagccccaatggccagct

SEQ ID NO: 37045 - DNA, 201 bp, Homo sapiens
acggccccgttcagttctcccaacaagcctgtgaaatgggcgctatgtttatccccatgttacagccgctcagagcatggggagaaaacaccactgacccygtgcccgagccattcagaaccaaaccagcaagtcggggtgtggggaatagcatcacttgttcatttcttattgttgctttgcttatcatttcttcctggc

SEQ ID NO: 37046 - DNA, 201 bp, Homo sapiens
tcctgggcctggctgttgggagctgggccagcaaccctggggtgtgagcctctgggaggtgaggccaggccacgatttgggaagggcttcccagtgtgccytggacacattcctcagacataaagggatactgcctctttcaggagacctggatggcgtccccagagacagacagtggctttgtgggctcagaaacaagca

SEQ ID NO: 37047 - DNA, 201 bp, Homo sapiens
catccaaggacttatcagctggggattttgagtaactgacttaataacctctctgtgtctcagttttttcttctatataatgggctgttggggtccccacmctgtcttcctttcaggactgccattaagagtaaatgaaaaggcatgcagttcttcacctgtgtttggcctagccaagggctgcactgaaagatggtattt

SEQ ID NO: 37048 - DNA, 201 bp, Homo sapiens
ctcaccggacaatctctctgtggacttactagcaaaaggaaagagatgatatcattggatgaggttttctgtagcctttaaaggtgatcttaacccttaawagtgagcttaacctggagaaatgcttccaacacaatgagaggaagagagtatagaagtcaaaaccaaagactctgaagtcagtctcacagaaaatggctc

SEQ ID NO: 37049 - DNA, 201 bp, Homo sapiens
ggctttgtgggctcagaaacaagcagagtttcacccctcacccagactccagagcaccggctctcccacatcaggtatcccgggatcccgccattgtcccrtcagtgccacattcctgggacagcctgggaatcacagtgcctgtgatggcccagaataagagaggatggtctgtccattcgtaggccctcatttcatccc

SEQ ID NO: 37050 - DNA, 201 bp, Homo sapiens
gggagaatcacctgagatcagtagttcaagaccagcctggccaatgtgacaaaaccccgtttctactaaacatgcaaaaaaaattagctgggtgtggtggygggtgcctgtaatcccagctatttgggaggctgaggcacaagaatctcttgaacccaggaggcagaggttgcagtgagccaagatcatgccattgcactc

SEQ ID NO: 37051 - DNA, 201 bp, Homo sapiens
acagtggtgtggatgctggcgaggcagaggccagcgccccaggccgaggaaggcagtcggtgtccaccaagagcaggagtagcaaggagctgcctcggaamgagaggcccacagatggggccaacaaaccggtgagccaggaggaggaggatgcagagggctgagaggaacacgggccccaggcacagaatgggaggtccc

SEQ ID NO: 37052 - DNA, 201 bp, Homo sapiens
cctgagtacaatatcttaagggaccctcatgctcctgcagttgaaggtattgcagggggctggggtggccatgctggaatggatgggggtcaggagagttractctggcaggaaatctaggtttaaatctcaactctgctccttgtttctgttgactttgggcaaatcatttgagcgtgagttacctgtctataaaatggt

SEQ ID NO: 37053 - DNA, 201 bp, Homo sapiens
tctgacttctgacacctcagattagctttgcctaaaaggttcatctttttttttttttgagatggagtctcgctctgttgtccaggctggagtgcaatggkgcactctctgctcactgcaacatccacctcccgggttcaagagattctcctgcctcagcctcctgagaagctgggattataggcacgcgccaccacgcct

SEQ ID NO: 37054 - DNA, 201 bp, Homo sapiens
tcactgagcctttcctgcagaatgtttggttccaccctaaaaccacagggatgatcactgtcagagtgaataagacagcgcttcacagtttagacatggcytacctgtcctgcctcttcaagtgtggaatgtataccactgatagcccttgaaatgattttgggtagtgtgggacatgattttcagtaggacacatgcagt

SEQ ID NO: 37055 - DNA, 201 bp, Homo sapiens
acctgctctgagcagttaaagggacagctcaccatgtagttataacagtgtccacatcgtgggattgctgtgaaggtgcccaacacggcacacacagagcrtctagactagcgcttggcacgggggcagggttctggaaatgccagctgttactcctaagggggagactggggattaaaacccaggcatccaccccagagc

SEQ ID NO: 37056 - DNA, 201 bp, Homo sapiens
gtttacctgctctgagcagttaaagggacagctcaccatgtagttataacagtgtccacatcgtgggattgctgtgaaggtgcccaacacggcacacacasagcgtctagactagcgcttggcacgggggcagggttctggaaatgccagctgttactcctaagggggagactggggattaaaacccaggcatccacccca

SEQ ID NO: 37057 - DNA, 201 bp, Homo sapiens
cctgccatattcccaggtgatttaaaagcacccgccacacagtaggagctcagtgagtacctacgaatgaaggaatgggatggtggggcttgaggaaagayagctcgactgaccatcaggatcgatctgttcccaacatctggtgaacccttggagggttcttacaacaagggaaagtttacctgatccgccaggttcaca

SEQ ID NO: 37058 - DNA, 201 bp, Homo sapiens
gtagggtgtctgtaagggctttgtagctgctgtcttgcttaacctccactgcaagatggtcatattatccacatttcacagataagggcgctgaagcccartgagcgcaggggatgtgctaaaggatcagggctctggagtcagtagccgggatcagcgagctcccctccacttgtccttggccgagttgtttacctgctc

SEQ ID NO: 37059 - DNA, 201 bp, Homo sapiens
aaagttaatttgcgcccactgggtgctcagtatgtatctttgtactttgaaatgtgacctcagggaggaggagagaggttaacagttctgaggctgttgcycttagaagctgagtcaatcagggacttcaaagctctttgagtcccataccctgcctcccaacccaccctagcagggtgatatccccttgcgatatcaaga

SEQ ID NO: 37060 - DNA, 201 bp, Homo sapiens
ttgctagtaaatccacagagagattgcctggtgagcctagaggtgaagagcagattgtccctccaggaaggcagcgagccaggtcttcctcagtgcctcgrgaggtgctccgactgtccctgagtaagtgaccacctgcaaaggctgatttccagaggccacagtctgagcatgttggctcagtggtcagggaccacagca

SEQ ID NO: 37061 - DNA, 201 bp, Homo sapiens
cagttctggggctttgtggtgaggagggccatggctcgcatggaaggcagaggcctggctcaggaaaggctcactggtttaggcgcctgggggcaagtgcraaactctagtcagtcactgcagctgcctctgacgtgcaccttcccctggttacagtgagatttctgccacgactgagtcatcccagaagacaggatgttc

SEQ ID NO: 37062 - DNA, 201 bp, Homo sapiens
cagctggcttcttttgagtctatgggagggcacttgatgaagggttttatgaacattttctcattaatctttttataaccctctgaggtaattgctgttaktatccccacttgacagatgaggaaactgaggatcagagaggcgcagagccattttctgtgaaactgacttcagagtctggctttgacttctatactctct

SEQ ID NO: 37063 - DNA, 201 bp, Homo sapiens
agtcaggagagacttcgggagaaggtgagactgacacccctccccctacagtggtgtcctgtccccaaaacatcacacgttcttttttttttttttttttytgagacagagtcttgcttcattgccaggctggagtgcagtggcacgatctcggctcactacagcctctgcctcctgggttcaagcgattctcttgcctca

SEQ ID NO: 37064 - DNA, 201 bp, Homo sapiens
aataaagaataatacaatgaatatccctagacccaccacccaaccaaagagttagaacattgccagcatgccttcactctcacccattaattcggtgtttrttcatttatgacaatgacataaaatcagctggcttcttttgagtctatgggagggcacttgatgaagggttttatgaacattttctcattaatcttttta

SEQ ID NO: 37065 - DNA, 201 bp, Homo sapiens
gagagaggctctgtctcaaaataataataataataataaagaataatacaatgaatatccctagacccaccacccaaccaaagagttagaacattgccagsatgccttcactctcacccattaattcggtgtttgttcatttatgacaatgacataaaatcagctggcttcttttgagtctatgggagggcacttgatgaa

SEQ ID NO: 37066 - DNA, 201 bp, Homo sapiens
gttctttgtttctgtctccactccaaccccagccaggccatctgtgagctgcaagaagaggtgtcccggcttcgtctgcggctggaagacagcctgcaccrgccactccagggcagcccgacacgcccagcatctgcctttgaccgccccgcccggacccgcggccggccagcagactccccagccacctggggctcccat

SEQ ID NO: 37067 - DNA, 201 bp, Homo sapiens
actgcatgggttgaaaaatcaaatagaaaaacttgcagaaccctttaggatatgacatattagccaggttcattgtactgaaatttgaaattacagataaygtggacaaaagggaacaaaagaaaaaaaaatactctggaaaccatcagtgctgacgttttggtgtagaacctgtgagctgttctctgtgccgatataaat

SEQ ID NO: 37068 - DNA, 201 bp, Homo sapiens
ctccaaccccagccaggccatctgtgagctgcaagaagaggtgtcccggcttcgtctgcggctggaagacagcctgcaccagccactccagggcagcccgrcacgcccagcatctgcctttgaccgccccgcccggacccgcggccggccagcagactccccagccacctggggctcccattatggcaggtgggtgacctc

SEQ ID NO: 37069 - DNA, 201 bp, Homo sapiens
aaccccagccaggccatctgtgagctgcaagaagaggtgtcccggcttcgtctgcggctggaagacagcctgcaccagccactccagggcagcccgacacrcccagcatctgcctttgaccgccccgcccggacccgcggccggccagcagactccccagccacctggggctcccattatggcaggtgggtgacctcaaaa

SEQ ID NO: 37070 - DNA, 201 bp, Homo sapiens
gctaaacggtcagccagatcctctagtgtgagggggtggagtgttgagcagtaaaggaagagaggggtagagaggagagacctatgggagatcctacaggrcctgaaggccatgggtaaggggagacattcactgcgtattccatgagtgcacaaaggctgagaggacagggaaggggattttaagcagggacgtagcgta

SEQ ID NO: 37071 - DNA, 201 bp, Homo sapiens
cccgccattgtcccgtcagtgccacattcctgggacagcctgggaatcacagtgcctgtgatggcccagaataagagaggatggtctgtccattcgtaggscctcatttcatcccctaaccgtgatttcttgttcctgtgttatggacagaggaaacagagcttcagagaggggagtaactagtccagcctcacatagcta

SEQ ID NO: 37072 - DNA, 201 bp, Homo sapiens
caagtccccgaggaggtgacacttttccatagtcctagagaaaggccactgcctcctccatctactgaggccctggagatagtggaacgccagttttcttytaccccaaggtccctctgtgaccttgggcagtgaccttgccttccctgggcttttttttttttttttttttttgagtcagggtcttgctctgtcacctag

SEQ ID NO: 37073 - DNA, 201 bp, Homo sapiens
gcccaagtccccgaggaggtgacacttttccatagtcctagagaaaggccactgcctcctccatctactgaggccctggagatagtggaacgccagttttyttctaccccaaggtccctctgtgaccttgggcagtgaccttgccttccctgggcttttttttttttttttttttttgagtcagggtcttgctctgtcacc

SEQ ID NO: 37074 - DNA, 201 bp, Homo sapiens
agagcatggggagaaaacaccactgaccctgtgcccgagccattcagaaccaaaccagcaagtcggggtgtggggaatagcatcacttgttcatttcttaytgttgctttgcttatcatttcttcctggcctgctttcaaatcctgacttagcctgggtgtgttggttgctactggatgtcagctggttctaggatctgag

SEQ ID NO: 37075 - DNA, 201 bp, Homo sapiens
ggtctcttttcatgcgtcccattgtcctctttttcttgaatattgttaggttttgagctagaggctttggtggtctggaggagaaacatgaccatttcccytccagaccatgagctccacgggcgtggggagttttggcaagagcacgtgagtgcctccttcagtaagcacaggatgcctgctgctctcttgttggtgatt

SEQ ID NO: 37076 - DNA, 201 bp, Homo sapiens
catgatgtgtgtatgcacactcaccgtgtgcacacgtgagagagagacagaaactattaaaaccatttggaggaagaggagatcattattccagaatcttsctctattttgcatccatccacagggctgatactgacagttctggtttctttccccaggccacgaataccatgttctgtcccctaaggcggtcccaaaagg

SEQ ID NO: 37077 - DNA, 201 bp, Homo sapiens
gcatattttctgtcttatatgtattatgtactgttttcttacaataaagtaagccagagaaaagaaaatgttattaaggaaatcataaggaagagaaaatytacttactttcattaagtggaagtggatcatcataaaggcctacatccttgtcatcttcacattgaggaggaggagttaagggggagattgatctactgt

SEQ ID NO: 37078 - DNA, 201 bp, Homo sapiens
aggccaccagggtcctcccaaggcagtgcccggtgcaggctgagaaaagtcatggggctcccctggagtaagtcactgagcctttcctgcagaatgtttgkttccaccctaaaaccacagggatgatcactgtcagagtgaataagacagcgcttcacagtttagacatggcttacctgtcctgcctcttcaagtgtggaa

SEQ ID NO: 37079 - DNA, 201 bp, Homo sapiens
attgattaatgttctctcttgaatgtgtccctgacagggcacaggcaggatggccgatgctgacaggaaccagcggtgactctggggcccctggcagcagmtctgtctcctgaagatgaagtggcccaggtgaagcccaggccagccccaatggccagctcggagactgagatccgctgggctgagcctggcctggggaag

SEQ ID NO: 37080 - DNA, 201 bp, Homo sapiens
acgtttaaaaataaactttaatgatgaccaaacccgttaattttaagtctttgttcaaactacttatgatttaaaatgagtcacagagttggatcgggtgkccacactgggtagaactgggtactgacctctgccagtcagctgcgtaactccaggccctagggtgccccgtctgtccagccagggattgcatggatatgc

SEQ ID NO: 37081 - DNA, 201 bp, Homo sapiens
tcccagctactcaggaggctgacgtgggaagacgacttgagcctgggaggcagaggttgcagagagccgagattgcgccactgcactccagcctggccaayagaaccagatcctatctcaaaaaataagtaaataaataattcagatgccaagccatttctagctaagccacaatactttgtcacttataggattcctatt

SEQ ID NO: 37082 - DNA, 201 bp, Homo sapiens
tcatccaaaccccacttaactgtgtcttaacttacactttcctcaagttctttgccgcatactggtttgttacttcctgacaattctgtctatagacgttkatgttttgtctgcccctgctttgaaaattcactcatcattgggccattttccaaaaatgttttccatgaattttgtcctcttccattctctcttctcatg

SEQ ID NO: 37083 - DNA, 201 bp, Homo sapiens
gacgtggcaagttcacgttacaaggagcgcataggacgggaggttttaatgcagtcatctttgggaggtacaatctgccaaacatgtcattcccacatttyagtcattcaaaattagtgccttcagtacagggcagaaaatagcaacatggttgaatcacgaaaccaaggtccagagccagtgatggatatatcaagtcct

SEQ ID NO: 37084 - DNA, 201 bp, Homo sapiens
ctgttgttcagcaacacatgactatattccaggaattgctaataaaaattgcatatttgttcatttttgtctgtacctatccattcctttggatgactgcrgccaccactgcaactgcagctgtgaggatctggactgttacaatagcttccagaccttggcctgcagtctctttgcctgcaaacttaactcatgcatagt

SEQ ID NO: 37085 - DNA, 201 bp, Homo sapiens
cctgtctctacaaaaaatgcaaatattagcctaacgtggtggcatgcgtctgtagtcccagctactcgggaggctgaggtgggaagatcactcgagcccarggaggtcgaggctacagtgagccatgatcggccactgcacttcagcctgggtgacagagtgagaccctgtctctaaaaaaaagaggggcaacatttcatc

SEQ ID NO: 37086 - DNA, 201 bp, Homo sapiens
ttctgtttacaggcaggtgcctgtaatcccagctactcaggagtctgaggcaggagaatcacttgaacccgggaggtggagattgcagtgagccaagatckcaccactgcactccagcctgggcgacagagcaagactctgtctcaaagaagaaaaaaaaaatagaaaggtggtgtggggacaaatcgaggtaacacatgt

SEQ ID NO: 37087 - DNA, 201 bp, Homo sapiens; identical to SEQ ID NO: 5700

SEQ ID NO: 37088 - DNA, 201 bp, Homo sapiens
taccaggtaccattgtgagcactttatacacatgataccatttagtgctcccaacattccttagaacataagcacagtcatcccccagtacatgcggaggrttgatgccaggacccccgagtataccagatccacgcatactcaagtctcacagttgttccctgaggagcccacggattcgagaagtcaaccctctatgaa

SEQ ID NO: 37089 - DNA, 201 bp, Homo sapiens
ctatgaattctgcatcctgcaaatactctattttcaatctgcatttgcttgacaaaaatctgtgtggacctacacagtccaaataatccatgttgttcaakggtcaaccctatgtctgtcgtttccatgttagaaaagccaagacacaggggaaggtcagcaacttgccgtgtgtcatacaggaattaagtagggagctga

SEQ ID NO: 37090 - DNA, 201 bp, Homo sapiens
ttacaggcacatgccacttcgcccagttaattaaaaaaaaaaaatcatattgatggggtcttgctatattgcccagactagtctcaaactcctggcctcawctgatcctcctacctcactcagcctcccaaagtgctgggattacagttgtgggccactgtgcccagcccattttaatcctagggctaggattatttgcca

SEQ ID NO: 37091 - DNA, 201 bp, Homo sapiens
cgtctactcaggggaggctgagcccaaaaggtgaaggctgcagtgagctaagatcgcgccatttcaccctagcctggaaaacagagcaagaccctgtctcaaaaaaaaaaaaaaaaaaaagggtcaggcacagtggctcacacctgtaatcccatcattttgggaggccaaggtgggcagatcacctgaggtcaggaattc

SEQ ID NO: 37092 - DNA, 201 bp, Homo sapiens
ttgcagtgagccgggatcgtgccactgcactccagcatgggtgagagtgagacttggtctccaaaaaaaaaaaaaaaaagagtgtgtatacacacacacayacatatatgtatataatacctataaggtaacatttgcaggttccagggattaggacctgatttctttgggatatttttcagccttctacagttagggcag

SEQ ID NO: 37093 - DNA, 201 bp, Homo sapiens
tctgggaggtggaggttgcagtgaggagagatcatgccactgcactccagcctgggcaacaagagtgaaacaacatctttaaaaaaaaaaaaaaaaaaaaaggagcatttacatcaccaactgaaattaaataattgtcccccaaggtgatgtgtagcctgacttttgtgactgagggattgatctcttgacaagtcttta

SEQ ID NO: 37094 - DNA, 201 bp, Homo sapiens
agaatagatgtaacttgtggtttctctttacactggttgcttctgccccaacaggtcatcaaggtaagctttttgattattgtgcatgttgcatttgaaawctcagtaatgcttcctcttagtaaatagtgttaatatccatctttcagggatgtttttattttttaatggcttttggtctcttgaaacagcattccaggt

SEQ ID NO: 37095 - DNA, 201 bp, Homo sapiens
tcctggattacctgagtgggacctaaatccagtcataagtgtccttctgagagacacttacacatatatatatgtatggctgggcgcggtggtggctcacscctgtaatcccggcactttgggaggccaaggcgggtagatccccagaggtggggagttcatctctgctaaatatacaaaattagctgggtgtggtgtcat

SEQ ID NO: 37096 - DNA, 201 bp, Homo sapiens
aatgtcattgtggtgtttattagtataaggatccccacagtgaacttttgtgaatcctgaaagcaaactgttcaagagaattagagttggagaaggtcacmattaagtaatgacttcttttgacccctgacacccaggcatttctgcccctttctgaccacagtccttggttctttgaacaagcccatcttcttttgcctt

SEQ ID NO: 37097 - DNA, 201 bp, Homo sapiens
  misc_feature (1)...(201): n = A,T,C or G, or insertion/deletion polymorphism (see Tables 1-2)
gagggctgtgcatgtggatgtgagctccttcatgtaaaataacagccagtcccatcagagtcaatggggaggacattttcaggtgttcactagttcctatnctccttgtttatgtgagtgtcctcgctgggaggcagttgctctgaatattaacaccaggaccctgttctagagagggctacagattctagtttgcccaag

SEQ ID NO: 37098 - DNA, 201 bp, Homo sapiens
atttatccccaaattctcaaataaggtcaaacacaatggcacatctcttggttcttgcatgtgtgcatgtgacatttttcttgggctctctgcttgctcaytctgttctggactgtttactcttgaggcctatgcacagctgttgacctggaatttgtccttagcaatcacgttgggaattcttgattgacctgtttattg

SEQ ID NO: 37099 - DNA, 201 bp, Homo sapiens
tttacccagcctggacctcagattctccaacttgaaagtgatgggctggggcagccataccctcattggtaggcaaggactttggtttacctgtgccatgycgtggtcatcaggcacatgcttcaggactgctgaaccccatatagggctttgttgcttatcactgggcagttttaacaactttttattgaagcataataa

SEQ ID NO: 37100 - DNA, 201 bp, Homo sapiens
  misc_feature (1)...(201): n = A,T,C or G, or insertion/deletion polymorphism (see Tables 1-2)
gttctggaggatgagggctgtgcatgtggatgtgagctccttcatgtaaaataacagccagtcccatcagagtcaatggggaggacattttcaggtgttcnctagttcctatcctccttgtttatgtgagtgtcctcgctgggaggcagttgctctgaatattaacaccaggaccctgttctagagagggctacagattct

SEQ ID NO: 37101 - DNA, 201 bp, Homo sapiens
tttttgcctactctttcccctctctgtgcctgcatcgtaccccttgctaactactgcccagggcccctcccaggctcagaagggcacacccttggcacctyctgccctggagttcagtgttcccccccaacagccccgctgctcggcctcctcactgctcttaaaaatctgttgtggttttcagggtattttcctagacat

SEQ ID NO: 37102 - DNA, 201 bp, Homo sapiens
gcttttgttgcccaggctggagtgcaatggcgcgatctcagctcactgcaaccttcgcctcctgggtttaagtgattctcttgcctcagcctcccaaatasctgggattacaggcacctgccaccacgcctggctaattttttatatttttagtagagatggggcttcatcatgttggccaggctggtctcaaactcctga

SEQ ID NO: 37103 - DNA, 201 bp, Homo sapiens
atacaaaaaattagctaggcgtggtggtgggcacctgtaatcacagctacttgggaggcctaggcaggagaaccacttgaacctgggaggcagtggttgcrgtgagccaagatggcaccactgcattccagccagggtgacagagggatactctgtctctaaataaataaataaataaataaataatattagtgcttatat

SEQ ID NO: 37104 - DNA, 201 bp, Homo sapiens
cttgtttcatatctctgagcttgctgctgtctgttctggctgctgaaccccaagtcttaaaccctcttctagcctcacttgcagtttgtgttgtgttccaracagttgtggttgccaaagcagtttactgtcaataactcttccaaataattgaagtgttactgatcgtagattcagaaacagcatgagttaaatcttgcc

SEQ ID NO: 37105 - DNA, 201 bp, Homo sapiens
tagacaaagtatgtaatgttaaaaagcccaaatttaaggaccttttaagtattgagttcttggaatatttactcaagaatcttcaacagaaaaatcctcarctacaaatagcttcctatttcaaagatactcagaaatcttaacattaattttttaatgaaaaatatggggaaaggtgttagggaattaacactcccagaa

SEQ ID NO: 37106 - DNA, 201 bp, Homo sapiens
ggctttgcgccgcctttgttccacatccaccctgtgaggtaggagctgaaatcagtcctgtcttacaaagagcagatgggtcattagaatttaagccattktctctgaggtcacacaactagcaggcatcggggctagattcaattccaggctgttggtgtggctacagagctcctgttcctgatagtaatacagccccga

SEQ ID NO: 37107 - DNA, 201 bp, Homo sapiens
aaatttatctcagctcttcaaaataccatgtgagcatagtgtaactcacttggacagctgtggaatgaaactcttgttttagtggccattagatacgtcargagaactgactacgtagaagaatgtgtggtaaaggtagtttggcaattggtcaaatttgaagtagcatttacaggccgaggcaggtggatcacctgaggt

SEQ ID NO: 37108 - DNA, 201 bp, Homo sapiens
tttagccctgggatttgaagctgcagggagctatgattgtgtcattgtacttcagcctgggtgacagagcaggaccactaactcttaaaaaaaaaaaaaaraaaaagaaacataactttgtagaagcctcctgaactgtgttttactgtgaagaatcaatctttatattcaaataaattcaaattaacagctgctattata

SEQ ID NO: 37109 - DNA, 201 bp, Homo sapiens
agacattgttatttaaattggtattttcttaagttttgagtgaagctagtgatttatgtttattcaacattggtgtttctcttgggacttgtttcttttcktattctcctacagacttgttcatatttttcttaatggttttaaggaactctttctatataaaggaaattagcccttttatgtcatctgtggtggtaattt

SEQ ID NO: 37110 - DNA, 201 bp, Homo sapiens
tcgcatttgtgatttttgtttttgttttgaagggacaggtgtggctcctgtgagaacagcttgttagagatgagtggaggcaaggagactgttaaaacacwactgcaggccgggtgcggtggctcatgcctctaatcccagcactttgggaggctgaggtgggcagattacttgaggccaggaattcaagaccagcctggc

SEQ ID NO: 37111 - DNA, 201 bp, Homo sapiens
atcctcacaaccatccttgtctttgaaaggcagaacttttgttttgttttgttttgtttcgcctcttatcaccagcatttaaaacagagtctggaattgcrtctgcgttcctcattctctactgtgtttgaccctggttgtggaaggtgatgggctgagtgattaagtctaacaccaatgtggtcactcactaacgactga

SEQ ID NO: 37112 - DNA, 201 bp, Homo sapiens
aaacactaagctcagcagaggtatatgagaggcaacaaatattcttttataaaaaacagccaaaaactatgacaaacctgagtttacacaggaatatcagygtcttagagctgatttttagaagccatataatcatagtgtgatgatttggggagggtatggattttgtcaatacatattttgtcaatacgtattgaatag

SEQ ID NO: 37113 - DNA, 201 bp, Homo sapiens
gcatattttatcacaaaagtcaaatgtgcttattgtataattttcaaagagataaagtaaaatcctccataatcctctttccatattacagttgacagttygggtattatattccaagttttttactgtgtatatattaaaatacacatgcaaacattttgttgtttttataagaccatgcttgttttataaaaacagctt

SEQ ID NO: 37114 - DNA, 201 bp, Homo sapiens
taaacgagcagtgtctatgaaagtcatggtttcacccaagctgtatatttgccaaatcacaattccaaacttaccacgtttttttttttttttttttttttgccagggaagaggatcatagctgcagcattctgtaatacatgctgtcagtttgagttggtgtaatttcattctaaagcaaagaggcatcatatcataatt

SEQ ID NO: 37115 - DNA, 201 bp, Homo sapiens
ggggctctgcaggactgtgtagaagggtggagtacccatcatgggtgcatctaagactagaattcgagtcctgcagcctactgtcaaactctcttccccaygtagtagctgtgtgaccttggccaagtgtcttagcctctctgaacttgtttcctcatctgtcagaacagtaatactgaccttgtccagttactgttaggg

SEQ ID NO: 37116 - DNA, 201 bp, Homo sapiens
aatttaatttctttttgataattcatttactcaattcttttggaccagaaacattttatctcaggggcatgatgaacacttgtcctctgtagtgcaatgtsttgtgtattttattatcgaaattcttacttaaaacttacatttgcgaatcaagccatttctttttttttctttttctttttttgagactgagtttcactc

SEQ ID NO: 37117 - DNA, 201 bp, Homo sapiens
ctactcaggagtctgaggcgggaggatcgccacttgaacccaggaggtggaggttgcagtgagccaagactgcaacattgccctctagcctgggcaacagagtgagactctgtctcaaaaaaaataaacgggtgcggggtagtagggtcttcacagatgtgattaagttaaggattttgacctgaggatattatcctggat

SEQ ID NO: 37118 - DNA, 201 bp, Homo sapiens
tgtattcaaggagtacaacataattctttgatatatgtatgtgtactgattaaaaatatggaatacttcacaaatttgcatgtcatccttgtgcagggacyatgctaatcttctctgtattattctgattttagtatatgtgctgtcaaagcaagcaatttaatttctttttgataattcatttactcaattcttttggac

SEQ ID NO: 37119 - DNA, 201 bp, Homo sapiens
tacccatgtgttaagtccctagcatgtgtctgccaccatgcttggcaccaaggatgtagccatgaatgagaacgccatggttcttgccctcatgggatgtrctaagaggaacagacaggtaatgacatgggctcatgagtcccatgaagcactttctaacatgaccgtcaagccctatgccagtgttatgtgacatcccta

SEQ ID NO: 37120 - DNA, 201 bp, Homo sapiens
tacatgtgtgttggaaccactgagaaagatgtgttgcttttgttccctgtagtagattttccaacaccaaagactgagctggtccagaagttccacgtgcrgtacttgggcatgttacctgtagacaaaccagtcggtatgtgaaatgtttattgtctttccactttgcaagtgtgcgggagctcacaggaggcgttcgcc

SEQ ID NO: 37121 - DNA, 201 bp, Homo sapiens
aggtcagaaaacactgttctagggattctgaatgataacattgtatcaggggacaggataacaaagctagagtttcagactttcatttacttatctccacyccccgccctgcccccgcctcctgtgccttctctgaaaagtgttgtgttcttacgaacagcacttccattgcattcagtcaatacagttgtaagtgatgat

SEQ ID NO: 37122 - DNA, 201 bp, Homo sapiens
aaagaagcatgcaacagagacttctgcaaaaatggagtgagaagtctactggcaagtccttgcctcgcgtgctcagtttgtgaaaagtggacagttgtgcrcagcatgagaagtaggtggctgtgccagggaacaggagatggcgtcctcttccaaaaagctggaatagacattgtcattctggtgtgctggttttttttt

SEQ ID NO: 37123 - DNA, 201 bp, Homo sapiens
tctgtctgtgtccttgacaatcagcaacccaagtgatttttctgatgggtaaaaagacatgacatgttccctgctgctcaggatggagccaaaccccacgmtgtgacatgtcaggtctcacccctgcctgcccccatcccaggcagcacagctgagccaggcacttacccagctgcaccggactgtgccttcacacactta

SEQ ID NO: 37124 - DNA, 201 bp, Homo sapiens
ggatcaaaacatgcttatgaccactcttttccatatcaatattttatgaaatagtgatgcagttaccttcagatcccatagtgacttgtaccctgcagtawtatctcttaaagtagggtagatttacagagtagagggactgatattatgtaatctggaaattctgtttatctttgaattaaattttgactcttccactgg

SEQ ID NO: 37125 - DNA, 201 bp, Homo sapiens
tcaacatgatgttatccttatattagatgcttaaaagtacttttgattatctgaaggggagaatgaggggagaataatcagaactctgtgcatgttttgayacaatgctttatggtttactgagggtctatctccattagtcctttcaggactacagggtgtagcattatgtcccttttacagatgaggaaactgagacct

SEQ ID NO: 37126 - DNA, 201 bp, Homo sapiens
tgagctgggctaggctgagtagatgggcgtgcgctggacagtgtggggagggccactggccaccacgtgagggaagacaccactacgagcggacaccaagwcccacctcttctggagcagcggggagtgccgtgcagtgggaggaacatgctggaaagttggtgggacaaattttggaactcttaaaatccacccagaggt

SEQ ID NO: 37127 - DNA, 201 bp, Homo sapiens
caaagaggaagaaacatttgaaagtcctgaggcgggagaggatgagttagggggcacagttacagtctctgagggagatccggacagggggcatggcaggracacagtggatgaagatggatgctgacatggcaaacaggcaggtaacgtgatggggaggacaaagccaagcagacacaggtgcctttctctctgcgggca

SEQ ID NO: 37128 - DNA, 201 bp, Homo sapiens
gagagcagattgcaaaggtggggcgtagaaaagaggcatttgacctttatcatttgaaatagagcaggaaggagggagaaggggaggcctggcgttgaacwcttgttatctggtgtcacacttacaccatcctctgtgagagtggctaactccctgcaagaactgtagggccaggattctaactcagacaccctgaatatg

SEQ ID NO: 37129 - DNA, 201 bp, Homo sapiens
attggtgtttaagtatcagagctgtgaactcaagctttggaatggcttgtgttcagaggagttatattttaacagagaaaaatgagaatgtaggagaattrtcgtgtcatgaattttcagctagccttgagcctttgggtggactgaaaaagtcttgttcacttgggagccaagagttcctgcttctgtgagtccatgtga

SEQ ID NO: 37130 - DNA, 201 bp, Homo sapiens
gccctaaggaggtagtttaggctttgcttcatgctctgtgtgcctgagtaaaataggaaatgatggcttttaagaaaatggaaattattacttgagatcarcatttcatctgggctttgaaaaactctggggtttctttcatcttccaggagagcagcacaactgagctgtgagaaaggaaaccaaaccctagggaaagtt

SEQ ID NO: 37131 - DNA, 201 bp, Homo sapiens
tattgtttgcttttaaaattaccttaaggaaataacttcactgtctgcttctaataatgtttagtcatttatttggtaagtaattaaagcaccatcactcwcctgccctcgtcttcaggtgataatctagacatagagggagtgagccaacaagttgctgttagagttaacttgttccctaacccatcttgtgaatatcaa

SEQ ID NO: 37132 - DNA, 201 bp, Homo sapiens
tgcttttcctctctacccagttctcagcaggttcaaccctccactcttgccccctggtttgcattttgctaccacttcatagagattttcttagcattgtrgagaaagtcccctggtagggacatacccagcccctgagacttagtctttaagagcactctgttgatattgtcaaagaatcaactccattgttggcctttt

SEQ ID NO: 37133 - DNA, 201 bp, Homo sapiens
ctgccactgtggaatgttttagtgcttttcctctctacccagttctcagcaggttcaaccctccactcttgccccctggtttgcattttgctaccacttcrtagagattttcttagcattgtggagaaagtcccctggtagggacatacccagcccctgagacttagtctttaagagcactctgttgatattgtcaaagaa

SEQ ID NO: 37134 - DNA, 201 bp, Homo sapiens
gatatgattttagcttctgtcactgccactgtggaatgttttagtgcttttcctctctacccagttctcagcaggttcaaccctccactcttgccccctgstttgcattttgctaccacttcatagagattttcttagcattgtggagaaagtcccctggtagggacatacccagcccctgagacttagtctttaagagca

SEQ ID NO: 37135 - DNA, 201 bp, Homo sapiens
ttacaggtgtgagtcaccacgccctgccaaacataccagaatttataccattgtctgcctctgaaactcctattggcccttcacgattcagctcaggagtsccttctgagcaggccttagcccatgatatcaagtaattaccctattttaaggatcctgttattgtttaacattttttccctttcagaatggatttggggc

SEQ ID NO: 37136 - DNA, 201 bp, Homo sapiens
tggtacccacatgtaattttatgtttagtttgggatttaataaaattgaagacacagagtatgaaactagatggatcttgtgtagtaactgtttcaaaatsagattcattgctaaagtgtacaaaagcagaattatacacagagaaaaccaagtcccaagtctagatgggtgtggcaatgcgcctcatgatccattaactt

SEQ ID NO: 37137 - DNA, 201 bp, Homo sapiens
tgccagctcaggtctctcttcctcttctgataaagccaccagtcccactctcatgataacccatgaatccatgggtgaattaatccactcatgagggcagygcctcttaaaggccccacctctgaatactgcaacattggtgtttaaatttcgatgcgagttttgtagtggacagacattcaaaccattgcattgtattag

SEQ ID NO: 37138 - DNA, 201 bp, Homo sapiens
atgttagggcacttgaagttatctgtgctggagattgaatagattttcagtgatggagatctggggagagcattgtccctcagagctgttgaaaagtaaaraatctttctttttcaaaaattaaccactaaagaagtttatgattgttttctctctctttacttcacggatattttgaaaatacagattttagttcttagt

SEQ ID NO: 37139 - DNA, 201 bp, Homo sapiens
gacagttgtggttgccaaagcagtttactgtcaataactcttccaaataattgaagtgttactgatcgtagattcagaaacagcatgagttaaatcttgcyctccctagaaagacaactgttaactagaaaagcataatataaaattttctgcacagaacctggtacttaggaggagcttagtaaatgttgaacaaatgag

SEQ ID NO: 37140 - DNA, 201 bp, Homo sapiens
agttgtggttgccaaagcagtttactgtcaataactcttccaaataattgaagtgttactgatcgtagattcagaaacagcatgagttaaatcttgccctycctagaaagacaactgttaactagaaaagcataatataaaattttctgcacagaacctggtacttaggaggagcttagtaaatgttgaacaaatgagaaa

SEQ ID NO: 37141 - DNA, 201 bp, Homo sapiens
gcagtgactgccttcgcctcacgtgccccctggtgaggccacatttctgtcttcctgtctacattaggactgaaagatatttcagggttttggtaatccartatttggattaaaagcaatatcctttcgtgtagaaaaactgtgcatttccaaatgattttagttacacgatttaggatattggtgtgacttccatgcgag

SEQ ID NO: 37142 - DNA, 201 bp, Homo sapiens
cccttgctaactactgcccagggcccctcccaggctcagaagggcacacccttggcacctcctgccctggagttcagtgttcccccccaacagccccgctkctcggcctcctcactgctcttaaaaatctgttgtggttttcagggtattttcctagacatcatttcatctgatcttctcaggagtctcctgaggcagaaa

SEQ ID NO: 37143 - DNA, 201 bp, Homo sapiens
gaagaaatctggatgtttaaacaaagaattgaggcattaaaaaaatgtcattgtggtgtttattagtataaggatccccacagtgaacttttgtgaatccygaaagcaaactgttcaagagaattagagttggagaaggtcaccattaagtaatgacttcttttgacccctgacacccaggcatttctgcccctttctgac

SEQ ID NO: 37144 - DNA, 201 bp, Homo sapiens
cccagaagcttggagatgccaggaaccacagagccccaaagagggagtcatagccctggctcagggagctcctaggcctgggctccccaaaaggctgcagytctttttctcatcgcctgcaacgtggcaagcaaggggcgtgtttcaaccctgtttgtgttacagctctttcagccctgccattctgcaggtcccgagttc

SEQ ID NO: 37145 - DNA, 201 bp, Homo sapiens
tctacattgtgccatttcttttgggtttcataaactgagtcctcaaggttgtgacaaaacttttatcagatttgcaagtgattaaacatcaaatacaaggcaatgtaatatgatgtgacagaaaagtgagtccagttgtctgagctttcaggtgttttagacttttagatattttggataggctttttggttctgaatttt

SEQ ID NO: 37146 - DNA, 201 bp, Homo sapiens
agatgccaggaaccacagagccccaaagagggagtcatagccctggctcagggagctcctaggcctgggctccccaaaaggctgcagctctttttctcatygcctgcaacgtggcaagcaaggggcgtgtttcaaccctgtttgtgttacagctctttcagccctgccattctgcaggtcccgagttcttgtcctacgtcc

SEQ ID NO: 37147 - DNA, 201 bp, Homo sapiens
gtatggatggatttcacaaacataccaggaagaactaatcatttggactatggacacgtctgcctttggggttcacctgacgaatagtgctgacattcttytaataaaattctctctttctccccccgccccgccccccaatttttcagcagatatatggagtgatcactcatttcagactgatccagatttgccgcctgg

SEQ ID NO: 37148 - DNA, 201 bp, Homo sapiens
ttccttgggaatcttttgcgtgcaattagaattctagagtattggccaggcacagtggctcacgcctgtagtcccagcactttgggaggccaaggttggcrgatcacgaggtcaggagatggagaccatcctggctaacatggtgaaacctcgtctctattaaaaatacaaaaagcctggcgtggtggcaagcgcctgtag

SEQ ID NO: 37149 - DNA, 201 bp, Homo sapiens
ccagataacaaacctgcatatgtgcctctgaacctaaaataatagttagaaagaaaaaaaatgaatagattaaaaataaaataaatgtactcctagccaarcatgggtgagtgaactcagatgtgtggtggccaagttgtcccaaattggcccttgattcctgtatatcctcagccttcagttcttaatgtgatatcagtg

SEQ ID NO: 37150 - DNA, 201 bp, Homo sapiens
attgagtatgtatggacacaaagatggaaacagtagatactgggacccacttgagggaggagagtggcagggccaagggtgggaggagggtgaggattgcraaactacctattgggtattatgctcattacctgcgtacaaaataatctgcataccaaacccccacgacacacaatttatccagataacaaacctgcatat

SEQ ID NO: 37151 - DNA, 201 bp, Homo sapiens
ggattacaggcaggagccactgcacctggcctggtctcaaattcttacgctcgagaaaccctactgccttggcctctcaaagtgctgggatgcattagccrctgtgcctggcaagttgaatggcattttaaggcatattccactttactgcttgttctgcgtataggagaagcatagcccccaaacaagaatgtaactgct

SEQ ID NO: 37152 - DNA, 201 bp, Homo sapiens
ggactttgcaggtgcttgcccattttccagtcacccacctttgttgtctctcacactctgcttcacatgtttacatcactggcctgtctgtagagtcagtstggtccattgttgacttccgaggcttttccaatctgctttccttgggaatgtttttttttttttttttttggagatagagtctcactctgtcgcccaggc

SEQ ID NO: 37153 - DNA, 201 bp, Homo sapiens
ccaggtggagccagtgcggcgtgtttgaagaatgggaatgctgttctggaggccagggcagaggtgaggacagaaaaatattggtggggcgagggacaggwttcggagggcatggcacggcagggcagaataaggacttaaaacatttttaattctgggagagacgaaaaggctttgagcaaagaactaacttgatctggt

SEQ ID NO: 37154 - DNA, 201 bp, Homo sapiens
tttatttttgccgtatctccttctctttataacttctgtactgatatctgaccttaaacttagtcatgccaggaatcataacccctatatttcaaggtatrtgaaccatagtacaggaattttaatctattaggaagattaaggggacagtttctaaaatacatatctatgtatgtatatgtatgtgtttgtatgtaattg

SEQ ID NO: 37155 - DNA, 201 bp, Homo sapiens
gttgaacctgtttatcagtactgatagttttttatgtgtatgactttgctagtattttctatataccagattatgtcatctgcagatatagttttatttcwtgtccaatctggatgttattattatttatttttgcagtgatttgaaaacttgagtgtgatgtgagaaatacaaagttatgtgctttggagtttctagtga

SEQ ID NO: 37156 - DNA, 201 bp, Homo sapiens
agttgatctgttgcaatgacaaagccagccctagagccctcattctcctggccccctctacattgtagtttctgcattgcactgctgctcacagagactgrtttaattgcacaaaccagtttactagtttgatttttttttaacttctctgaattatgtttgtgtgattaaaccataatgctgtaatcttctgatagggtg

SEQ ID NO: 37157 - DNA, 201 bp, Homo sapiens
cctccccgcccaaaccatttatttgttccaaattaccttgcagactgcttggatattgaattttagagagaacggagagccacacaaaatatttttatgamtatccattggcttgtggccaagtcttcccatcttttcaaatgaaggtgttttggtcttcctacagaagaaagtatggagaaggcgggtctgaagctcgag

SEQ ID NO: 37158 - DNA, 201 bp, Homo sapiens
ggccagagaatgtgctaatgtacttaactgaccttgcttttgttaatgaaacatgagtgatgcttatgagaaaaggaatgccctttgtaaggtagagtttraagaaagtatatctgatattggtggctagaatatgtttgtggggtaaagtgttaatgttgctgaaacaccagaggtttggtctaggacctgctgcttgac

SEQ ID NO: 37159 - DNA, 201 bp, Homo sapiens
ctaattgttggagaaagatgatgtgtttgattttagacatgtcagttgagatgatgtgggaataatagccaaggactgacatcctcaagatagagttgtcrtttttagggagaagtcagagagattcagactttgtcacctggacaccaaatttctgcaccctgtctgggactcgtgtatgtcctttattttaaccaagat

SEQ ID NO: 37160 - DNA, 201 bp, Homo sapiens
tagtcaactcaaggccaaaaatgagatttttaaaagccagcagatattcagtaaactgataagatatgtagaaaggccagatatgatgggaattgtctagyagacgtattttatttggccatcgcagtgtttaaaggattattttctggaattgggatgactggactttgcaggtgcttgcccattttccagtcacccacc

SEQ ID NO: 37161 - DNA, 201 bp, Homo sapiens
gctgaaatgcagtggcatgattatggctccatgcagcctccacttcttgggttcaggagattctcccacattaggctctttttttttttttttttttttttaagatgggagtctcactctgtcacccagattggagtacaatggcacaatctcagctcactgcaacctccgcctcctgggttcaagtgattctccttcctc

SEQ ID NO: 37162 - DNA, 201 bp, Homo sapiens
tcgggattacagcgagaaccatggtgcgggacctgtagtgctttttaaagtgaaataacatagcaaagcactggcttgcagtggatgtggaatcaatgctstgtggcaaagatatttaaaaagtgccaagtgagcaccatagatggaaaattgaggaataacagagaaaaagagagagtattttgacttggagtgtgcgag

SEQ ID NO: 37163 - DNA, 201 bp, Homo sapiens
ccacatgttggaacatccgattcttctgtaaaatagggataaaatgatataaacacctttataaaatcatattgctttcttggccaggcgcagtggctcayggctgtaatcccagcattttgggaggccgaggcgggcagatcatgaggtcaggagatcaagaccatcctggctaacatggtgaaactccatctctaccaa

SEQ ID NO: 37164 - DNA, 201 bp, Homo sapiens
gctgatatgaatatgttacctggtgcacataccgagtgtggaattgttgggtcatagagtagagatatcttccactttactagttaatactattttctttyctaaaatgattgtaccaaattacccttctacgagcagtagtatctacaagatcctgttgttctacatgcctgccaacaattggtattgtaatacttttta

SEQ ID NO: 37165 - DNA, 201 bp, Homo sapiens
gccaggttccaggaaacgagggcagtgggttacccttaactaacgtgacctgctcattgcaggtcacttagtgtgcctggcctctacctaccagtggtgcstcattgtgggaacccatcactcccatacattttcatgtgtcccgagataggaagtacccctcgggagaactactctgagtctagcccgtggtgtcagagc

SEQ ID NO: 37166 - DNA, 201 bp, Homo sapiens
gcagtgagccaagatcacaccactgcacttcagcctgggagacaaagggtaaccctgtctcaaaaaacatttttgttaaaaaaaaaaaaaaaaaaaaaaargagagaagagttcttaattgctcctgtgctccagaaattaaactactggaaatctcttctcttgttcttgtccctaaaatggaatttgtgccataagctt

SEQ ID NO: 37167 - DNA, 201 bp, Homo sapiens
tacaaatgactttaaggtgttactggaacaatactcaccacaaagctatgatttcattgtgaaataccaacaagaccctgattccgtttgcctgctgcagrcattaatgtttactgttagaactgaggcatcaaagggaataaataaactgctgacattgtgttgccttcaggatccgtcacgggaatatatggtaggggt

SEQ ID NO: 37168 - DNA, 201 bp, Homo sapiens
gcatcagatgcaaataaatcactgtgatccattcctagatgggtaaagcttggtgtatatgtgtgtgtgtgtgtgtgtgtgtgtgtgtgtgtgtgtgtgtrtatataaataaatatataaatatgtgtgtgtgtaaaaacactttcatctttgaactgctgtcttccaatgttaacattgagaaatacagtcgtatcgcat

SEQ ID NO: 37169 - DNA, 201 bp, Homo sapiens
attcgagggaccttaacttttatttacccttctctcctttctaattcccttctgctccattctagagaggtgaccattcaacacatgcttaggatgaatcygctagattcttagagagaggcttaatagctcacagaatcatttatagtttaaaagagttctagaaacagggcactcacaaacatgatggtacatatctac

SEQ ID NO: 37170 - DNA, 201 bp, Homo sapiens
aggaaggtgatgggtcctgagggtggtgcagctccctggcctggacatcgggggtcggtcttctgctcgtgatactcctgctcgctggcttcatacttccmgcgttacttccaggggttaccagcgtttccatccagtcatttcacacacctcattgaacaattttccaagtgttggtttgctctcttccttactacatat

SEQ ID NO: 37171 - DNA, 201 bp, Homo sapiens
tatcacttaaatgtcaacacagtgaaaagggttgtaaataacatctgagtgttatgaaaatagcttcaatctctgagactcctcgaagttccctttgggamcttctgctctaggtatgaggatcagtgctcttagcaatttggttggaaagaagagtctttgaagaatgataactgtgagagagaaagtcaaataggtagg

SEQ ID NO: 37172 - DNA, 201 bp, Homo sapiens
tacgtgtgcgacgcaggagcgaaagtgtggagcttgtgacactacatacgtgtgcgaggcaggggccaaagtgtggagcttgtgacactacatatgtgtgygaggcaggagccaaagtgtggagcttgtgacattacatacatgtgcgaggcaggagccaaagtgtggagcttgttacattacatacgtgtgcgaggcagg

SEQ ID NO: 37173 - DNA, 201 bp, Homo sapiens
ctacatacgtgtgcgaggcaggggccaaagtgtggagcttgtgacactacatatgtgtgcgaggcaggagccaaagtgtggagcttgtgacattacatacrtgtgcgaggcaggagccaaagtgtggagcttgttacattacatacgtgtgcgaggcaggagccaaagtgtggagcttgttacattacatacgtgtgcgag

SEQ ID NO: 37174 - DNA, 201 bp, Homo sapiens
aatttacaagagcaaattcaatttgtaatgttgcaaaggaaagggcttttcactttgcatgaataaaacatttttgcttgcgaaaaagaagcccatttcamattctcttttgtaactttccttgctgagaaagtggaatctcttcagggatttcttgatgtggttaaaatgaataagagaagtgtgtattataccagacat

SEQ ID NO: 37175 - DNA, 201 bp, Homo sapiens
gtttcgctcttgtcgcccatgttggaaagcagtgacgcgatcttgggtcactgcaacctctgcctcccaggttcaagcaattctcctgcctcagcctcccragtagctgggattacaggcacccgccaccatgcccagctcatttttgtatttttttaagttatacttttaagttctggggtacatgtgcagaacgtgcag

SEQ ID NO: 37176 - DNA, 201 bp, Homo sapiens
tgcagtgagccaagatcacaccactgcacttcagcctgggagacaaagggtaaccctgtctcaaaaaacatttttgttaaaaaaaaaaaaaaaaaaaaaaragagagaagagttcttaattgctcctgtgctccagaaattaaactactggaaatctcttctcttgttcttgtccctaaaatggaatttgtgccataagct

SEQ ID NO: 37177 - DNA, 201 bp, Homo sapiens
actggtttagagcattatttggaggtgattttgtgtttccctgtctggtttgtcactgctttgtccaatgcccttctttttttgcccaattcctacttccsttatagttttcatttgttataaaatggttgtcataaaattaactttatggccctgccagtctagttagcagataaggtaatgattagatttgggtaaagt

SEQ ID NO: 37178 - DNA, 201 bp, Homo sapiens
tgaaattttggcaagcctttcctgtgtcccagcctttgtctcctcgcctcgatgagaaatgcagcccttggtctctggaatacgactttcactctcatttracgttagccctgtcactgtgttggacagatgcctgtgattggctgctgcagtagcaggagtggtggctggtgaaatgtgtctactcagtgtcattagcag

SEQ ID NO: 37179 - DNA, 201 bp, Homo sapiens
aactcattggcaagtatgcttcaggaatgcttagagtgggaggaagagtgtcgttttttttaagttgatgaaaaagaatgcagaaaccgggagcagtggcycatgcctgtaatcctagcactttcggaggccaaggcaggtggctcacttgaggtcgggagtttgagaccagcctggccaacatggtgaaaccccgtctct

SEQ ID NO: 37180 - DNA, 201 bp, Homo sapiens
aatctttctttttcaaaaattaaccactaaagaagtttatgattgttttctctctctttacttcacggatattttgaaaatacagattttagttcttagtytggcaagttgtttagcttctggggagagggtcctgtggacagtggcagcttaggaagcaactggaggtaggcctctaggagtcctgtgtgaggcttctca

SEQ ID NO: 37181 - DNA, 201 bp, Homo sapiens
acaaacctaattatgtcaacacaactggcagcacctcttatttctggctttagctagcttaagtgatagagctttggataagtctgtatttttcacacttytagaaacctcttctaactgttcattttagctcagatggcttttggttaattttaactgtaaatatttttcccccttttttcttacaaatactaggcccat

SEQ ID NO: 37182 - DNA, 201 bp, Homo sapiens
gctggagtgcaatggtgcaatctcaattcactgcaacctttgccccccggtttcaagcggttcttctgcctcagcctcccaagtagctgggactacaggcrcccgccaccacgcccggccaattttttgtatttttagtagagacagggtttcaccatgttggccaggctggtcttgaactcctgacctcaggtgctctac

SEQ ID NO: 37183 - DNA, 201 bp, Homo sapiens
cagatgaggaaactgaggctcaccaagattgagtaacctgggtcacactgctaataagtggccgacctgagatttcatcccagagttagtggcttcaacayctgggccccaagccacactgtgctgggccccttctcccatagttgcaccttactcttcttgatccatgtccacagagctgtgtgaccttggatgtggcag

SEQ ID NO: 37184 - DNA, 201 bp, Homo sapiens
accaagattgagtaacctgggtcacactgctaataagtggccgacctgagatttcatcccagagttagtggcttcaacatctgggccccaagccacactgygctgggccccttctcccatagttgcaccttactcttcttgatccatgtccacagagctgtgtgaccttggatgtggcagccaaacgaatatgcccttcca

SEQ ID NO: 37185 - DNA, 201 bp, Homo sapiens
ccccaagccacactgtgctgggccccttctcccatagttgcaccttactcttcttgatccatgtccacagagctgtgtgaccttggatgtggcagccaaaygaatatgcccttccagttttttgaaatactacctagggcagagtgtttggtctgtttgtcccattgataataagtctctggtgcctagcacatggtaggt

SEQ ID NO: 37186 - DNA, 201 bp, Homo sapiens
gctcttcatagaaggaacatttgagtaataacatactcagaatggaacgaggcgatctttgtagctgctgtatatagaaagtcgttgtggaaagggcccatttttttttttttttttggcagtctctatctcccttcctagccatgtcttctactagcagcattcgggggtccctgaaagcacggcttagccttgctactg

SEQ ID NO: 37187 - DNA, 201 bp, Homo sapiens
tcaagcaattctcctgcctcagcctcccaagtagctgggattacaggcatgcgccaccatgcccagctaatttttgtatttttagtagaggcggggtttcrccgtgttggtcaggctggtcttgaactgctgacatcaggtgatctgccctcctcggcctcccaaagtgctgggattactggtgtgagccaccgtctcgct

SEQ ID NO: 37188 - DNA, 201 bp, Homo sapiens
agttttttgaaatactacctagggcagagtgtttggtctgtttgtcccattgataataagtctctggtgcctagcacatggtaggtgtcataaatatttgytgaatgaatgaattaatctgtcctgtaaggctcagctcaatttcatgtttttaagaaactgtccatcactaactctgaattaaaaaaaaaaaaaaaaaag

SEQ ID NO: 37189 - DNA, 201 bp, Homo sapiens
tttccagatcagctgttgtagcattgcagtgcttgtgctcaagtcacccttattttacttaataatggcccaaagcacaagaggagtgacgctggcaattyagatatgccaaagaaaagctgtaaagtgatgttgttttatgtatttgaaaatctctttaatgtacggcttcatcaaaggcagctgaatttgcttatctgc

SEQ ID NO: 37190 - DNA, 201 bp, Homo sapiens
aggtgtcataaatatttgttgaatgaatgaattaatctgtcctgtaaggctcagctcaatttcatgtttttaagaaactgtccatcactaactctgaattaaaaaaaaaaaaaaaaaagcccgggctcagtgactcacacctgtaatcctagcactttgggaggcccagatgggcgaatcacttgaggtcaggagttggag

SEQ ID NO: 37191 - DNA, 201 bp, Homo sapiens
tgcttagtagccgtctgtctctgtttccagatcagctgttgtagcattgcagtgcttgtgctcaagtcacccttattttacttaataatggcccaaagcayaagaggagtgacgctggcaatttagatatgccaaagaaaagctgtaaagtgatgttgttttatgtatttgaaaatctctttaatgtacggcttcatcaaa

SEQ ID NO: 37192 - DNA, 201 bp, Homo sapiens
ggtgtcataaatatttgttgaatgaatgaattaatctgtcctgtaaggctcagctcaatttcatgtttttaagaaactgtccatcactaactctgaattaaaaaaaaaaaaaaaaaagcccgggctcagtgactcacacctgtaatcctagcactttgggaggcccagatgggcgaatcacttgaggtcaggagttggaga

SEQ ID NO: 37193 - DNA, 201 bp, Homo sapiens
acctgtgagttgcttagtagccgtctgtctctgtttccagatcagctgttgtagcattgcagtgcttgtgctcaagtcacccttattttacttaataatgrcccaaagcacaagaggagtgacgctggcaatttagatatgccaaagaaaagctgtaaagtgatgttgttttatgtatttgaaaatctctttaatgtacgg

SEQ ID NO: 37194 - DNA, 201 bp, Homo sapiens
gtgtcataaatatttgttgaatgaatgaattaatctgtcctgtaaggctcagctcaatttcatgtttttaagaaactgtccatcactaactctgaattaaaaaaaaaaaaaaaaaagcccgggctcagtgactcacacctgtaatcctagcactttgggaggcccagatgggcgaatcacttgaggtcaggagttggagac

SEQ ID NO: 37195 - DNA, 201 bp, Homo sapiens
agtaggatactgtatctcaggatacctggctcctgagacattccggtgttcaataaatattgtggaataaatataattacctcaaaatatagtagtccttrttcacagtttcactttctgtggcttcagttacctgcaatacaccgaggttggaaaaaattccatggaaaattctagaaataaactataagttttaagctg

SEQ ID NO: 37196 - DNA, 201 bp, Homo sapiens
tggctgttttttaatttttaatttgtagagacagggtctccctatattgcccaggctggtttcgaactcctgagctcaagcaatcctcctgtctcagcctyccagagtactgggatacaggtgtgatgcagagtagtaggatactgtatctcaggatacctggctcctgagacattccggtgttcaataaatattgtggaa

SEQ ID NO: 37197 - DNA, 201 bp, Homo sapiens
gtttggcttcccctggggccgctctcccgggtttgtgctggccgcctttttgttctgtccttacatggcctattctctgtgtgggcgcctccctgctgtcycttcctcctcttataaggataccacacacacacacagacacatacacacacacatatgccacacacacaccacacacacccacaccatacacatatgcca

SEQ ID NO: 37198 - DNA, 201 bp, Homo sapiens
tctgaccagtgtttccattcatcccttgctctctgtggacaaagaagctattccacagcctgtgctcttccctttctccagaacaagcctcagcctcttcsaggatttcaaagtggctttcgtcttttagttgatgtcctatctctctctctgtctccttttttttttaactttgtgtgcttggaacaagggccccaagtt

SEQ ID NO: 37199 - DNA, 201 bp, Homo sapiens
tttaaggaactgagcagaaagttatagggcaaagacagaggagcacagaggaggcatcacttgctgtttcaggacagtttagaataaacccacccttttarttataccagagtaatgagccttacccacagtttgtgaaaatataattaacaatgtatcttggttcagtagaccaggctgtcaggtcattatcagaatcat

SEQ ID NO: 37200 - DNA, 201 bp, Homo sapiens
caccatatgaacagtctgatcatttccattatctcatttagttcacaaaataatcctgcttgtaattattcgtatatttcagacaaggacagcgaggtttkgagagatcaattttatctggtgaacactaatgtttgaatataaaaatctcattttaatatggtggaagaccatgaaatcttagcattcgagggaccttaa

SEQ ID NO: 37201 - DNA, 201 bp, Homo sapiens
ccttttcagcaaattttgtagcttgtggggacagatgaccctgaattccagcagcacctgcaatcaaaatagttctcattccagggcccacacaacagggygtgtttgaaagtacttaaaaggaaagtgtaggcaacgcattgtacccttagtcataaaacattatcctggaatttgccttgccccaaagcttgggaagcc

SEQ ID NO: 37202 - DNA, 201 bp, Homo sapiens
ctaggaagcttcatagaggaaggggatctgtcctacaaggccttaacatttagggccatggagagaagggagggcggatggggagcagaagtggggagggygtggtcttggggcatcggtaggcactcgaggagactggcctctgtagaaggcctcacagtgggtctgtgctctgaagagctcctcacagagctggaggag

SEQ ID NO: 37203 - DNA, 201 bp, Homo sapiens
actaggattgtgcaaatcccccactttctcattttcctcagttagtgccccatgggtgtcctggcttctggaccagtgttattgttattattattattttwtttttttttgagacggagttttgctgtttgttacataggctggagtggagtggcacgatcttgactcactgcaacctctgcctcccggtgcggagaccag

SEQ ID NO: 37204 - DNA, 201 bp, Homo sapiens
cagttccctcagggatgaccttcgatgtctcacaacactaaagtttttccagcagtcttttgggaactgctatagttgtagccttttcctatttgtcgttmcccctgattaacctgggagaaaaatgattcttccctttaatgatctatgtttatttctatgaagggcagtgtgtctcagacttacttcttgctccctgca

SEQ ID NO: 37205 - DNA, 201 bp, Homo sapiens
ggagggaggaatggagagttactgtttaatatgtacagaattttagttggggaagacgaaaagttttgaagacgaatggtggtgatcattgtacaacaatrtgaatgtacttaatgctgcagaactatacacttaaaaatagttaaaattccaaggagaaattaatttgcactagactgaagctcctgggggcatgttctc

SEQ ID NO: 37206 - DNA, 201 bp, Homo sapiens
cagggagacttcatcttgcatgcgactatgaataattcataaacatggttatctggaaatatgtggtcatcattagcattttaatgaaaaaaaaaaaaaaaagctgtcattatcctaagtctctgttttgtttctaccttttttttttctccccccaccacagctaaccatctcagtctttcctgaggacttgggaactgc

SEQ ID NO: 37207 - DNA, 201 bp, Homo sapiens
tcatctggtgtattttcagtttcggaaaatacattgagctgtccattgtcgtgtgtgcattttctatatgttatatgtcactgaaaagtttttttttttttccaatcaacatgacatctaacctctccaatacagaaaaaaaaatttcctcatttcaagcttttaaagttttataggatattagttcagatgtcagagcaa

SEQ ID NO: 37208 - DNA, 201 bp, Homo sapiens
taaaattccaaggagaaattaatttgcactagactgaagctcctgggggcatgttctcacctcagtgcaatctgctgctgggtctgaagctccgaggagcsgggaagtcacagaccccaggagctgggagggtatagacgccactcacctgaacttgacaccaagctactcatccagacaggtttcaaattgtgaattggg

SEQ ID NO: 37209 - DNA, 201 bp, Homo sapiens
ttccaatttgaggctccaaataaattttataaaaagaatctctcttgaacctctggctcactggaagcctctaaaatactgccattcattagaaatacaatgtgagccacatccctaatgttaaatatttaatagccacattcaaataagtaaaaagcaatagacgaggttaattttaatcatctattttatttaactcaa

SEQ ID NO: 37210 - DNA, 201 bp, Homo sapiens
tctttgtgtttagtttcaaggattggacttgaatttctaaagaacagcattaattctagagaagggtaaaagtgttgaaagtgagagcagtagaacgttaygagtgcttcaaaattgttggccattccttacctagaattttaatatttaattcagaacaagttttgtatccttccagtcatgggaccacatgatgttttc

SEQ ID NO: 37211 - DNA, 201 bp, Homo sapiens
ggtgtataataaggaagacagtcagcaaggcaggtggggtagaatctggacttgccggacctcctcagatcctggaagtccggccctgctgagggagcctractgaccttcttctcctatgaaagtcaccataaaatgatcttttgtccttttttttttttttttttgagacagagtctcgctctgtcacccaggctggaa

SEQ ID NO: 37212 - DNA, 201 bp, Homo sapiens
cagcactttgggaggccgaggcgggtggatcgcttgaggtcaggagctcaagaccaacctggccaatgtggtaaaaccctgtctctactaaaaattagtcrggtgtggtggtgcatgcctgtaatcccagctacttgcgtgtctgagatacaagaatcacttgaacccaggaggcggagactggagtgagccgagatctca

SEQ ID NO: 37213 - DNA, 201 bp, Homo sapiens
atggttgaaattaaacccattttgatacttaaatgggtaatccttcagctgttttgaaaatcgtgatcattctcaatgtcttattctttgagatttttttwaaaaaattttaattgttttttttgagacagagtctcgctctgtcacccaggctggagtgcagtggcatgatctctgctcactgcaacctctgcctcccgg

SEQ ID NO: 37214 - DNA, 201 bp, Homo sapiens
cgtgaacccgggaggcggagctggcagtgagccgagatggtgccactgcactccagcctgggcgacagagcaagactccatctcaaaaaaaaaaaaaaaawaataataataataatatttgccttcatatggtagaattaatatttttctgtttcagacgcctcatgttctttgttgataaatcaatagattgagagtatg

SEQ ID NO: 37215 - DNA, 201 bp, Homo sapiens
tgtcataaatatttgttgaatgaatgaattaatctgtcctgtaaggctcagctcaatttcatgtttttaagaaactgtccatcactaactctgaattaaaaaaaaaaaaaaaaaagcccgggctcagtgactcacacctgtaatcctagcactttgggaggcccagatgggcgaatcacttgaggtcaggagttggagacc

SEQ ID NO: 37216 - DNA, 201 bp, Homo sapiens
aatacaaaaattagcctggtgtagtggcaggcacctgtagtcccagctactcgggaggctgaggcaggagaattgcttgaatctgggaggtggaggttgcrgtgaggagagatcatgccactgcactccagcctgggcaacaagagtgaaacaacatctttaaaaaaaaaaaaaaaaaaaaaggagcatttacatcaccaa

SEQ ID NO: 37217 - DNA, 201 bp, Homo sapiens
ctcacgtccatattagtagccctacagtggtccaaaccgaaattggtcactggcccatctggaaatatgagaaaaattgggcatctttctctcaggaaaaygtacatgtacaaaaccccgcacccatttcaggggttcatagctcctccgagctaacaggttaagattgccctaggttattaattttctcttcataaagac

SEQ ID NO: 37218 - DNA, 201 bp, Homo sapiens
ctcacacctgtaatcctagcactttgggaggcccagatgggcgaatcacttgaggtcaggagttggagaccagcctggccaacatggtgaaaccctgtctstactaaaaatacagaaaattaggtgagcgtggtggtctgcgcctgtaatcccagctacttgggatgctgaggcaggagaattgcttgaacccgggaggca

SEQ ID NO: 37219 - DNA, 201 bp, Homo sapiens
tgatgacaatttgaggccatataagcttgttttctttttgaaaaagaaattctagcttaaaattttattttgtacttgatatttcaggtcctcatctcacrtccatattagtagccctacagtggtccaaaccgaaattggtcactggcccatctggaaatatgagaaaaattgggcatctttctctcaggaaaacgtaca

SEQ ID NO: 37220 - DNA, 201 bp, Homo sapiens
tgaggcaggagaattgcttgaacccgggaggcagaggttacagtgagccaagacagtgccactgcactccagcctgggcagcagagtgagactccatcttaaaaaaaaaaaaaaaaaaaacctccttccgtgagctcccaacccatgtttgtgcctcagtgtatccttcattcatggtccgtgctatagattgctgctatg

SEQ ID NO: 37221 - DNA, 201 bp, Homo sapiens
gtcggatatgctccttcatggacatgagctcattttaccactgtcttctttggtcctgtaccccgaggctgactttcctggttacaggcaaggcctgtatcccacggctcactggctcctggcccctggtctcacccctcactgcatcccctgccccacctggtccctgaaggagatcccccagttttctgacagcatgct

SEQ ID NO: 37222 - DNA, 201 bp, Homo sapiens
ggacatgagctcattttaccactgtcttctttggtcctgtaccccgaggctgactttcctggttacaggcaaggcctgtatcccacggctcactggctccyggcccctggtctcacccctcactgcatcccctgccccacctggtccctgaaggagatcccccagttttctgacagcatgctctcattttgctgcttgcat

SEQ ID NO: 37223 - DNA, 201 bp, Homo sapiens
gacatgagctcattttaccactgtcttctttggtcctgtaccccgaggctgactttcctggttacaggcaaggcctgtatcccacggctcactggctcctrgcccctggtctcacccctcactgcatcccctgccccacctggtccctgaaggagatcccccagttttctgacagcatgctctcattttgctgcttgcatt

SEQ ID NO: 37224 - DNA, 201 bp, Homo sapiens
ggtaataagcctgttaagaaaagtaagcaattatataattggcaaagaaattaatacaaagatctaaaccaagaaatatcaaagtcttttattcttagaatttttttcatttcacgtatattccttgtctgccttcagaatctaaaattctggcccactttgtttatagagcggtccctttagacatttgccttattttta

SEQ ID NO: 37225 - DNA, 201 bp, Homo sapiens
agctcactgcagcctggatctcctgggcttaagtgatcctcccacctcagcctccagagtagctgggattacaggcacatgccacttcgcccagttaattaaaaaaaaaaaatcatattgatggggtcttgctatattgcccagactagtctcaaactcctggcctcaactgatcctcctacctcactcagcctcccaaag

SEQ ID NO: 37226 - DNA, 201 bp, Homo sapiens
ctatagcagtgttgctttagagtttgaatcctttgatgtcttaaattgattggtttccagtcttgaggcaaagtggaactcttgcatagttgatgagagcragagtcacaaacctaattatgtcaacacaactggcagcacctcttatttctggctttagctagcttaagtgatagagctttggataagtctgtatttttc

SEQ ID NO: 37227 - DNA, 201 bp, Homo sapiens
ggtcaaaaatggtaagaggcagccctgggatttgaacctagattttactttcagtctgaggaaccacataacttagggtaaagaaaggagccatctgtctwtagcagtggttctcaaggtgtggctcccagatcacaacttcagcatcatctgagagcttgttagagatatagattcttgggtcctacccagacctactga

SEQ ID NO: 37228 - DNA, 201 bp, Homo sapiens
tattttaatttcagtgtttctggtaagaaatctgcctttactaatgactgaaatggacctggtttttgttttcccctttattacagtttgtggattagtcrgtgtattgaacatgaaattcaatataactaaagtgggttttaaaagataatgaaatcaatactaacgtgaaaagacttgtcttcatcagagccaccccac

SEQ ID NO: 37229 - DNA, 201 bp, Homo sapiens
tcagtcttccacaaacattcttttattctattcgagtctataggtctatatgttgggagggccagtgccaaggaaaagggccattttggtttcagttgacytcacgctttgccttggattgagattgatccatggttgtcatagattgttttctgttgctataacgaaatacctgagactggataatttataatgaacaga

SEQ ID NO: 37230 - DNA, 201 bp, Homo sapiens
aaaatgagctatgctgcctgcctagggcttcggaatctcttccacttaacaaagattcttgttatacacatttattataaatagcctttgcattttacagrgcagaacaggaagactccaggccattgggcaggagaatttcttttgttttttttccaaaatttttgttagagttgagttaaagagatactgtggcaatcc

SEQ ID NO: 37231 - DNA, 201 bp, Homo sapiens
aaagttactcatttgctggttggatggatagattcacgatcattaatgcatgctctctgatgtttgctacatcaatatgcttgtagaaatagaaaaagtartaacaatttgtataaaatagttgtttagaacactcagatagggtgattcttatttatgttctaggctcctggaaagaatgaagaattggggccactaatt

SEQ ID NO: 37232 - DNA, 201 bp, Homo sapiens
tgtgtgtatatgaacttcttcacacggtatgtggcacatagtaaaaggctccataaagttactcatttgctggttggatggatagattcacgatcattaaygcatgctctctgatgtttgctacatcaatatgcttgtagaaatagaaaaagtaataacaatttgtataaaatagttgtttagaacactcagatagggtga

SEQ ID NO: 37233 - DNA, 201 bp, Homo sapiens
tagtagtatcttgagaatccggaaagtggaaaattatattttaggggatctttccattcctctaagcaactgaggtttagatcaaatgccacttccactaygaaacctttctagaccctccgagctgtataaagtccttataaagtcctttctctgtattcccaaagaaatgtttctaagtttctgctatcatgtttatct

SEQ ID NO: 37234 - DNA, 201 bp, Homo sapiens
tccctcagtggccccaggtagtaagcatgatggctcagataaataaatacctgttggtcacactgtatatagtctctctgttaatcacttagtgtttcatrtttgctttatgaaaacgttgaaaagatgcatcattttgaaccttcctgggtacaggtttcagtggtacccacatgtaattttatgtttagtttgggattt

SEQ ID NO: 37235 - DNA, 201 bp, Homo sapiens
cagttgaaagaaaagagaaaacgagagcaaatatcttgtgacatcttagtatgccatgccatagtacatgtataaaaagggtatagttgtctgttgacttsctgtgtgttaaatacatagtcatcacagtggtgtgtgttttatgactaaatcatgatgcaattatctttggatcgtagactgcactttggggagcctaga

SEQ ID NO: 37236 - DNA, 201 bp, Homo sapiens
ctgttgtagttaagttttaaactaacctaaagttttgttcaggcacagtggctcatgcctgtaatcccagcactttgggaggctgaggcaagaggatcacytgagcccacaagttcaagaccagtaagaccccatctctcctcctccaaaaaaattagttgggcatggtggacggtggcatgtgcctgtagttccagctac

SEQ ID NO: 37237 - DNA, 201 bp, Homo sapiens
aagaaaatagatagaaccaccagggaaggaaatcacatttttacaatcgataaggtagataaattacaaggactaaagataaggaaaagaggagttaagayattaacttgtttaagaagaaaaaaaaagtagcgtttttgaagtgccctttaaaaatcccagtactttcaatgatgcatactactgtggaatgtggcagta

SEQ ID NO: 37238 - DNA, 201 bp, Homo sapiens; identical to SEQ ID NO: 5702

SEQ ID NO: 37239 - DNA, 201 bp, Homo sapiens
cttgagacctccaatttctagtgatggtgatgataacactaacagtgaccatccatgcagtgaacacggctgctgcatgccaacctttattctaagtgttktatacactacccagtgaggcaggtactattatgatccctgttttacagatgtgcatctgaagcccaaagaggttgaggaacttgtccaaggacactcaca

SEQ ID NO: 37240 - DNA, 201 bp, Homo sapiens
cgccaccatgcctggctaatttttttgtatttttagtagagatggggtttcaccatgttagctaggatggtctcgatctcctgacctcaagtgatcttccygcctcggcctcccaaggtgctaggattacaggagtgagccaccgtgcacagcctatatttgtcatttttaatagttccataatctatcagtgtatgacca

SEQ ID NO: 37241 - DNA, 201 bp, Homo sapiens
cccaagtagctgggactacaggcgcgcatcaccacgcccagctaatttttttgtatttttagtagagatggagtttcactgtgttagccagaatggtctcratctcctgaccttgtgatccacctgccttggcctcccaaagtgctgggattacaggcatgagccactgtgcgtggccggcagtctcagtcttattttcaa

SEQ ID NO: 37242 - DNA, 201 bp, Homo sapiens
ggtggcaagaaaccatccagggtttctgcaaatgcagggagctggggattgccgttaacacacaccaacttcctgaggacacacagtggctcgtagaagcwccctgtccagctgggaggcaagactgtggtctcatgctagtgagacttccttaaccagagtcacagcctcaaaatgagaacaaacagtctggcgtcacca

SEQ ID NO: 37243 - DNA, 201 bp, Homo sapiens
ccgcctcagcgtcctgagtagctaagactatagatacatgccaccatgcccagccttttccatttatttgacttttatcttattctgacaggttttttttktgtgtgtgtgtgtgtgtgtggaatttttaaggttttctacccatgagattatgtcatctgcaaacaaagataattttactgtttcctttccaatttaggt

SEQ ID NO: 37244 - DNA, 201 bp, Homo sapiens
atatatgtatagcactttgaacagtgcttgctgctattatatttcaaaaaccaattgtttcaaagctaaaaggaaatgatttttgataattctacaaatayctcctgaacttcctctttaatgacaggccatatgctagccagtaagtgtacatgttggcccaggcagacaggatccctgctttcctagatccatcaggcg

SEQ ID NO: 37245 - DNA, 201 bp, Homo sapiens
ttaagattcatagtttttattttgaatactcataattggacacagtctctggattttctggttgattataatagttggttaattcttttttttttttttttgagacggggtctcgctctgtcgcccaggctggagtgcagtggcgctatctgggctcactgcaagctccgcctcccgggttcacgccattctcctgcctca

SEQ ID NO: 37246 - DNA, 201 bp, Homo sapiens
agtatgtgttatcattatatgtgaagaatatagatgcaagcacaattttattgattgaaaaagcccagcctgattctattacttaaagggattttaaagakattatattgggtaaccttgggttgaaacatgttccctttacaatccaaaactggtcaatgtattctttatttaacctgattgattcttgtcctctccctt

SEQ ID NO: 37247 - DNA, 201 bp, Homo sapiens
aagatatgtccttttctctgatactatgcctttctcatttttgggtaagattcttttatgatttgataggaatatttttatctagccgctgaatggtccaygaaattggtaagtctgggaatctgggcctgagatgcagggaggcctgcccttgggattgagttgagtcatggaggccaggccaacatgtggagtttgtgg

SEQ ID NO: 37248 - DNA, 201 bp, Homo sapiens
tgttaagtttttgtaaaatcactatacagagcctttgtttatttaaatctgtaaaaggtgattgttggacatttgccatctaactcatgtttccataacaygagagctggattctgacagtcttaatactgtttttagcttttgctttacagatacccttatgtccaaagagtaaatgcattaaaaattttaaaaaccaca

SEQ ID NO: 37249 - DNA, 201 bp, Homo sapiens
atcatgagttaatttttgtataagttgtaaggagagggtccagtttcagttttctgcatatggctagccagttttcccagcaccatttattaaatagggartcctttccccattgcttgtttttgtcaggtttatcaaagatcagatggttgtagctgtgtggcgttatttctgatgcctttgttctgttccattggtctg

SEQ ID NO: 37250 - DNA, 201 bp, Homo sapiens
tccatgaaattggtaagtctgggaatctgggcctgagatgcagggaggcctgcccttgggattgagttgagtcatggaggccaggccaacatgtggagttygtgggtcagctgatggggcccctgggctttccaggaatatagagtcacccaaggtcctaggaactgtgaatgagctaattttgaaagtgccctaggagcc

SEQ ID NO: 37251 - DNA, 201 bp, Homo sapiens
tgcttgaacctgggaggtggaggttgcagtgagctgagattgcgccactgcactccagcctgggtgacagagtgagactccatctcaaaaaaaaaaaaaaataataataataataacaacaataataattcctacctcattgaggtagggattaaatgaaagaacacatatgagagtttccagactctggcctcacccatg

SEQ ID NO: 37252 - DNA, 201 bp, Homo sapiens
gcagccttgatctcccaggctcaactgatcttccttcctcagcctcctgaatagctgggaccacaggtatgccccactgctcctggctaatttttttttttgttttgttttgtagatacagtttctccgtgttgcccaggctggtcttgaactccagggctcatgtgagtctctccccacttagcttctcaaagtgctggg

SEQ ID NO: 37253 - DNA, 201 bp, Homo sapiens
tatgattatcagccatgttataaaacttaaacattattttaaggtcaaggaaaataagtcaccttgaatttcccgtaagttttgaagcactggaacgaggwctgtttttgttccttggcttttgctcatgtgtcggttttgcagcacaggatcagtcacgtggttgtggggcctttggggttgaggagcttccactgcatg

SEQ ID NO: 37254 - DNA, 201 bp, Homo sapiens
acctgaacatgcagtcgactgacacttggcgtttctctccgtaaattaataagttggcatttctggttgatatttttagatttgtatgacttgttcataaygtgctgatgattgaacctgctcagcaggttaatgagagtcgctgtggggcaggcattgcaaataatggtgattgcatggtgcaccggcctttctttagta

SEQ ID NO: 37255 - DNA, 201 bp, Homo sapiens
atctgtccacatcagcctcccaaagtgctgggattacaggtgtgagccaccgcacctggcctccctggctttcattgtccaagctcattgaaaatcttttwtgctgctcatttgtccgtgtgatcatggtttagatgattcacgtatggattcttgctattcaaagtggagcctctgaataagaacttgggcatcacctgg

SEQ ID NO: 37256 - DNA, 201 bp, Homo sapiens
attcaggtttaaaaagtcactggtttgtttctcagtatgtttaaattttaggattaattttttttcttcctcctagagttcgagtctcataagaaagaatygtgttaatagcccccgttatgttttgctggagtttatcagtcggtagaaatctactgagcaataagaagatgtttcatagccttggtataggaatcattg

SEQ ID NO: 37257 - DNA, 201 bp, Homo sapiens
ccatcctccagtgtctttatctgtcatctgactttctcctctgacacaaagtaccagtccccttctctggaaacagttttgaatcctcaatgtacagcccmctgaacacctgcctccaaatcatttgggtcagaagggacggtgcttatgtaaaaaaagcgaggagtctgtttgagacctactgagttacaccctctgaga

SEQ ID NO: 37258 - DNA, 201 bp, Homo sapiens
gttgcacgttatatcagttattatccagtttaaatgcaggtctgaaggaagtaaaattgatttttctatgctacttggggacatcataggttattggtatsctggttgaattttcagttaggtttctatgaaagaaagatgagtggttaggtttgttgaattttttttctttcacagtattttgtaaataaactgggatat

SEQ ID NO: 37259 - DNA, 201 bp, Homo sapiens
cttcataatactcagttactacagtaacagctaccatatttatcagagaattagctgtaatatgtaccagaatttcacacataattgaacctgtctttctrtgaaccagacctgtttttaaaaactgccttcattccataaacaccgtttgtgtaccttttctgtacaagccccatgcccagtagtagggactcagagttt

SEQ ID NO: 37260 - DNA, 201 bp, Homo sapiens
tcagagaattagctgtaatatgtaccagaatttcacacataattgaacctgtctttctatgaaccagacctgtttttaaaaactgccttcattccataaayaccgtttgtgtaccttttctgtacaagccccatgcccagtagtagggactcagagtttatctaacatagatatccttcacaaaagcagatgttttatttt

SEQ ID NO: 37261 - DNA, 201 bp, Homo sapiens
tctgataggagtttaaaagtgttccttcttcatttctttggaggagttgaggattgatgttaattcttctttaaacatttgatagaattcggctgtgaagstgtctactctttgggttttctttgttgggaggtttttgattactaatcaatgtctctgctggttataggtctgtgttcaagtttttcatttcttcatgat

SEQ ID NO: 37262 - DNA, 201 bp, Homo sapiens
ggctggagtgcagtggcaagatcatagctctctgcagcctcaaactcctgggctcaagcaatccttctgcctcagcctcccaggcaggtaggacaacaggygcaagccaccacacctggctaatgtttaaaaaaaaaaattttttttttttgagacagagtctcattctgttacccaggctggagtgcagcggtgtgatct

SEQ ID NO: 37263 - DNA, 201 bp, Homo sapiens
ccacagggctgcgatggcaatagccacagctgtcaaaaagtctagtatcagtacagaagctccccatataatcctaggaagttcctttgctagggcagggktgagttgataaaccatagtgggtgtatattgatgtggtcaagagtctttgagaaaccactttgtggtgaccttttcaccaacagactaaggtaatactcc

SEQ ID NO: 37264 - DNA, 201 bp, Homo sapiens
cagggaagttcatccaagccttggtgtccaggatttttattgaggctccaccccaaaggcatagacaactggtccagggctaatctcagtctcgagtcccyccagaggtggagctgatactgcatgggccaagcgcccaccccagatcaccctattagaccctctagtgtatcccaaggccactaggcaaacagaaacacc

SEQ ID NO: 37265 - DNA, 201 bp, Homo sapiens
aagaaataatcatgagcccctcattcattcatttactccgcagatatttatggactgcctgtgttgtgctagataactctgcaaggtgttggtgattcagwgatgggaaagacacaatcaatccctcaccaacttcaagaaggaagtagggatgcaagaaagagtatatgatatgttgctcccctaaaaggccacagtgtc

SEQ ID NO: 37266 - DNA, 201 bp, Homo sapiens
gaaagcgattatagactttatctgcattgcagtgggaagccactgtgtggttttaaggttcgagcatggatactcatatttgtgattttcgtttttgaagkgactcgcatttgtgatttttgtttttgttttgaagggacaggtgtggctcctgtgagaacagcttgttagagatgagtggaggcaaggagactgttaaaa

SEQ ID NO: 37267 - DNA, 201 bp, Homo sapiens; identical to SEQ ID NO: 5697

SEQ ID NO: 37268 - DNA, 201 bp, Homo sapiens
gagtagctgcgagtacacacacgcgccaccatgcctggctaatttttgtatttttagtggagacgaggtttcactatgttggccaggctggtctcagactsagaccaaatcttactcttgttgtctgtagctgcttagttctgcgctttaaactaagggcaaacttggctcctgcattcttgacagtgaaaagcaggagct

SEQ ID NO: 37269 - DNA, 201 bp, Homo sapiens
gcaaaaccccatctctgaagcatgaggatcacttgaacccaagaggaggaggttgcagtgagccaagatagcggccactgcactagtgagacactgtctcaaaaaaaaaaaaaaaatgacagcagccctcctgatgagatgttggctggaactagggtggcagcatggagttgagagaagggggcaagttggagagagcag

SEQ ID NO: 37270 - DNA, 201 bp, Homo sapiens; identical to SEQ ID NO: 5698

SEQ ID NO: 37271 - DNA, 201 bp, Homo sapiens
atgaggatcacttgaacccaagaggaggaggttgcagtgagccaagatagcggccactgcactagtgagacactgtctcaaaaaaaaaaaaaaaatgacakcagccctcctgatgagatgttggctggaactagggtggcagcatggagttgagagaagggggcaagttggagagagcaggaggaggcagagttggcagga

SEQ ID NO: 37272 - DNA, 201 bp, Homo sapiens; identical to SEQ ID NO: 5699

SEQ ID NO: 37273 - DNA, 201 bp, Homo sapiens
taaattaggaaatggaaaaaggaaagttaaacaaattacaaatgtttaattggtaaatgtagagagtggttttgaaaacatggatgtgtgtgtgtacacaygttttatatttggaagcctatatgcatatagtgtcatcattttttttctagtagaatatttcttagttcacatgatacaattaaatatatttatcaagat

SEQ ID NO: 37274 - DNA, 201 bp, Homo sapiens
ggtctgaatatgtgctcaaaatggtaagtgtcactggctgacaggtgctgtatataaagctttgtgtcttctttggtccctttgttatattatacaagagygcaggtgacatattcctcctgccgagctgtcttaatcaatatttctgtgcctaagggaggattttacctacgcatttctttctccaaagaaactccaaat

SEQ ID NO: 37275 - DNA, 201 bp, Homo sapiens
acctttgtatggtaattagttaagatttagatcccctgttaggaaacctgcagggttaaggatttttgataggaaggctatgggttgtcagtggcttcagygctttcgggttacacccttgtttacactggcaacaaggtggtattggagtgttacagggttacagagaagaccttcaattatcaattataggttttaaat

SEQ ID NO: 37276 - DNA, 201 bp, Homo sapiens
tggaatatatggcataggtttttcatgtgagaacagaacagaaaaggattccccatttagaatctttatggtgtttactgtagccagacatattctgaatmggaggctcatgggtctgaatatgtgctcaaaatggtaagtgtcactggctgacaggtgctgtatataaagctttgtgtcttctttggtccctttgttata

SEQ ID NO: 37277 - DNA, 201 bp, Homo sapiens
aagataaattggtctatacattatattaaaggattttattttaactcttgctcagatgctacatggggtaacagctgagataactaactgatcattgatcrccctttctctgatatatcaaggatatcctttcctttttttcaaggaaaggaaagatgaatttcctgttgacttaactattaataacagtggtttcctttc

SEQ ID NO: 37278 - DNA, 201 bp, Homo sapiens
taatacagtgatgcccaggggataggtgaaatgtgaaattctgcttgtccctatctgaagtagagttaatgcatgtaagacacagagaagaacctggcatragagttaacagtatataaatgttggcagtaacaatggcaatagtaataaatgatgcttatggtgtttgcagggttctgtctgatttttagttacaactac

SEQ ID NO: 37279 - DNA, 201 bp, Homo sapiens
catcttgagttgatttttgtatacggtataaggaaagggtccagcttcaatcttttgcatatggctagccggttatttcagcaccatttattgaataaagrgtcttttccccattgctgttttttgtcagctttgttgaagataagatggtcatagatgtatggctttatttctgggctctctattctgtcccattggtct

SEQ ID NO: 37280 - DNA, 201 bp, Homo sapiens
ttttctaaggataataatctccagctccattcatgttcctacaaaagacattatcttgtgcttttttatggctgcatagtattccatggtatatatgtacyacattttcctttttttctttttttttttttttttttggggagatggagtctcactctttcgcccaggctggagtgaagtggcatgatcttggctcaatgc

SEQ ID NO: 37281 - DNA, 201 bp, Homo sapiens
gttcagattatttcatcacctaggtattaagctcagtacccaatagttatcttttctgctcctctccctcctcccatcctccacactccagtgtttgttgyctccttctttgtgtttgtaagttcttatcatttagctcccacttataagagaaaatgtgctacttggttttctgttcctgcattagttttctaaggataa

SEQ ID NO: 37282 - DNA, 201 bp, Homo sapiens
cacaatgtaactggaaattactaactggattccactcttcacctgtggactgcaagctttgtgaagtcagcagtgtggttgcctctgtttacttctaacayctagttcaatgcctggttcctggcacatgtgcattgaatgaactgatgaatgaatacatgaatgaatgaatgagtgccttgtatttactatttaggagtt

SEQ ID NO: 37283 - DNA, 201 bp, Homo sapiens
tgactctatcctttgccttcattgagctaatagtctaatgtcaccaactgtattcactagggttaaaacttcatgggattcgttacttctctcatgacacwcaatgtaactggaaattactaactggattccactcttcacctgtggactgcaagctttgtgaagtcagcagtgtggttgcctctgtttacttctaacacc

SEQ ID NO: 37284 - DNA, 201 bp, Homo sapiens
gtgtaagacagtgtttattgtacataccactggttctcaacaaatacttctgattaaggatataaaatatctagaaatgtttatgttgcagtctaagattyaaggctgtggaattcatttagcaaattcttattaagcactcactgtagtgccaaatcttagacaggccctggggataagtactgagcaaaattgactcta

SEQ ID NO: 37285 - DNA, 201 bp, Homo sapiens
gcaaagcttcactaagtaattttctgagaacaaaagagattgaaactttctcctcaaatcgcctggtgttgtcgaatactcctgttttgttttgttctgcktgtgctccctctcgtctcgttggtccactgtgataccgtgataaccatcggagggcggccattaagcggctttgcagtattctgaaaatcttttacagaa

SEQ ID NO: 37286 - DNA, 201 bp, Homo sapiens
gtagtctggagaagaaaggcattgtgctaacctttatccatatttcatatggaatacttgaagttttatttttactttttatttatttatttatttatttwtttttgagacagagtcttgctctgtcgcccaagctggagtgcagtggtgcagtcttgactcactgcaacctccgcctcctgggttcaagtgattctcctg

SEQ ID NO: 37287 - DNA, 201 bp, Homo sapiens
aggagtttctgaaaattagtggatgacttaaagtatataaaagtggacaaattaaatatattagggattttgctattttatttatttatttattattattwttttttttttgagatggagtctcgctctgtcgcccaggctggagcgcagtggcgccatctcggctcactgcaagctctgcctcccgggttcatgccattc

SEQ ID NO: 37288 - DNA, 201 bp, Homo sapiens
ctgtcaccaggctggagtgcagtgacgtgatctcggctcacagcaaccgctgtctgccaggttcaagtgattctcctgcctcagcctctcgagtaactggractacaggtgccagccacccacctggctaattttttgtatttttgatagagacggggttttaccgtgttagctaggatggtcttgatctcctgacctcat

SEQ ID NO: 37289 - DNA, 201 bp, Homo sapiens
ttgtacactttatttctattattattactacattgtggtctataatgaaataattttgcaactcattgtaatgtagaatcagtgggagccctgagcttgtkttcctgcaactaggtggtcccatctggggatgatgggagacagtggcagatcatgaggcattacattctcataggaagcatgcaacctagatccctggca

SEQ ID NO: 37290 - DNA, 201 bp, Homo sapiens
ttcacctttagttttggttgctattgtggggtgaagaaggagtgtcaaaacaataacaacaaattatttcctttttttttttttttttttttttttttgakacggagtctcacttggtcgcccaggctggaatgcagtggcttaatctcggctcactgcaacctccaccttccaggttcaagcagttttcctgcctcagct

SEQ ID NO: 37291 - DNA, 201 bp, Homo sapiens
agagattggtgggaagggaagggacactcgtatgcatatgcacacatgcacacgcacacatgcgcgtgtgcacacagacacacagacacacacacacacasacacacacatatttttgacctgcaattcagcagtgcctaaacccagcatctcctgtttcactttcttggcaacttagctagttcatctgagttaggtgtc

SEQ ID NO: 37292 - DNA, 201 bp, Homo sapiens
acaataacaacaaattatttcctttttttttttttttttttttttttttgagacggagtctcacttggtcgcccaggctggaatgcagtggcttaatctcrgctcactgcaacctccaccttccaggttcaagcagttttcctgcctcagctacccaagtagttggaactacaggtgcccgccactgtatccggctaattt

SEQ ID NO: 37293 - DNA, 201 bp, Homo sapiens
ctctgcgcaagctctgtctttttttgcctgctggcatccatgcaagacatgactagctcctccttgccttccaccatgattgtgaggcttccccagccacrtggaacttaagtccattaaacctctttcttttgtaaactgcccagtctcaggtacagcatgaaaatggactaaagggtcacaaccatctttggaggggcc

SEQ ID NO: 37294 - DNA, 201 bp, Homo sapiens
aggtgtggtggcgcgtgcctgtaatcccagctactcggaaggctgaggcaggataattgcttgaacttggggggcggaggttgcagtgagccgagatcgcrccactgcactccaacctgggcgacagagtgagactctgtctggaaaaaaaaaaaaaaaaggaaatttggagacagacacacacacagaagaaagagaatg

SEQ ID NO: 37295 - DNA, 201 bp, Homo sapiens
aagagtgtgtgtgcaggggaattgctctttataaaaccatcagatctcgtgagacttactcactatcatgagaacagcatgggaaaaacttgcccccatgrttcagtgattcagttaccgcccactgggtccctgccatgacacatggggattatgagagctacaattcaagatgagatttgggtggggacacagtcaaat

SEQ ID NO: 37296 - DNA, 201 bp, Homo sapiens
gggtttttttttttttaagtctctgagaacaattcataaagccatatctgtcaacttatgtactactaaaatacaggatgaactttccaacaaatgttgttataatacttgtggttccatttccaattcagccattatagatgccccgaggaaacaaacaaaggggaaaaataagatacgaccaaattcattatgatttca

SEQ ID NO: 37297 - DNA, 201 bp, Homo sapiens
gtggtgtgttttaccaaacccaaacaagacctatagttaaatactcccttgattttccatgtgtatttcctattttctgttcctttctttgtaaaaggagygtatgagactttgaatatagccaaaaacatggctaatatgctttgcctattttgctcttttttttttttttttttttttttgagacggactctcactctg

SEQ ID NO: 37298 - DNA, 201 bp, Homo sapiens
agggtttttttttttttaagtctctgagaacaattcataaagccatatctgtcaacttatgtactactaaaatacaggatgaactttccaacaaatgttgttataatacttgtggttccatttccaattcagccattatagatgccccgaggaaacaaacaaaggggaaaaataagatacgaccaaattcattatgatttc

SEQ ID NO: 37299 - DNA, 201 bp, Homo sapiens
gccgagctcttacacaagagtagtttgtaagattctctctaaagttcagatccttgctgctgccttttagttagttgagttcagaaaggaattattaagtstcctgaggcctttcctaagaagttagaagcagaatgtgtttgtaaatgtggtctgtaattttgtaaaagttataagtaaaagggagtgtgaatgaaatgc

SEQ ID NO: 37300 - DNA, 201 bp, Homo sapiens
gaaagactttccataaagcatcagccagtattatcaaagaaggtgtcatggtttgtagctcagtaagaaccctactttccgttttgcttccttttttttgtttttttttttgagacagagtccctctctgtcacccagcctgtagtgcagtggcacaatctcggctcactgcaacctctgcctcccaggttcaagtgattc

SEQ ID NO: 37301 - DNA, 201 bp, Homo sapiens
gtttgttacaaaactatcagtcatgcagcctccttgtctcacctatacagctttcctcttggacagcccccctaggaaatgaatttctttttctttcttctttttttttttttttttggagatggactttcgctcttatcgcccaggctggagtgcagtggcgtaatcttggcttactgcaacctgtgtctcccagattca

SEQ ID NO: 37302 - DNA, 201 bp, Homo sapiens
atggagtcgggataccagatatggcttggtgtggctcatagcacactggtggaaaccgaagtcaccggtagatgtttgaggcatggactgtgttcattctktgtaaccatatgcagctggttttggcccaagtgcagccttctgcgataacctagtattcttgcagtgaaatcatgcataaagaaacatgaaattcgagtt

SEQ ID NO: 37303 - DNA, 201 bp, Homo sapiens
atcgtatgttgcacccttgaaacagattgtcctctagagcaggggttggcagatttttcctgtaaaaggccagttttaaaaaaaaattttttttttgagayggggtctcactcagttacccaggctggagtgcaagtggtgtgatcacggctcactgcagccttgacctcctgggctcaagcagttctcctgcctcagcct

SEQ ID NO: 37304 - DNA, 201 bp, Homo sapiens
tcgtatgttgcacccttgaaacagattgtcctctagagcaggggttggcagatttttcctgtaaaaggccagttttaaaaaaaaattttttttttgagacrgggtctcactcagttacccaggctggagtgcaagtggtgtgatcacggctcactgcagccttgacctcctgggctcaagcagttctcctgcctcagcctc

SEQ ID NO: 37305 - DNA, 201 bp, Homo sapiens
gtagattctaaagggacctgggattgagtttcaagaatcactgaactgttccagctctgcccccttccaaaattgtgtataaaattgtgagtctgtgcacttttttttttttttttttttttggagtgttttcatccgagggccttgatccaaaacaggtcaggaacctttcctttctcctcgtggagctccccttccctc

SEQ ID NO: 37306 - DNA, 201 bp, Homo sapiens
gggtcataagcttttccttgaaccagccactagagccctggggatttgctactgtgattggctgtgccttggccatgtgccccctgaaataaggagtacartcatctctgcctgaaacacatgggcctaatccctagagtgtgcgctctgcgctccataggtatctttactttgttggttttgttcactgctatatcctca

SEQ ID NO: 37307 - DNA, 201 bp, Homo sapiens
gaaggcctctatgattcccatttcacagatgaagaaactgaaaaacaaagaggctaagggccctgaccaagggcagacagctgataaatgacacacacacrcacacacacacacacacacaccccactcacacccacccacccacccacccacacccacctacccacacccacctacccacccctgaagctggagggaaaa

SEQ ID NO: 37308 - DNA, 201 bp, Homo sapiens
gcgacctcagctcactgcaaccttcgccccccgggttcaagtgattctcctgcctcagcctcccgagtagctgggactacaggcatgtgccaccatgcccrgctaattttttgtatttttagtagagacgggatttcactgtgttagccaggatggccttgatcttctgacctcgtgatccgcctgcctcagcctcccaaa

SEQ ID NO: 37309 - DNA, 201 bp, Homo sapiens
gttgtgcgcagcatgagaagtaggtggctgtgccagggaacaggagatggcgtcctcttccaaaaagctggaatagacattgtcattctggtgtgctggtttttttttttttttttttttttttttgaggaatttccttttcatttggattccagttacacatgccaggtacttctgttatttcaggcttatattaatgaa

SEQ ID NO: 37310 - DNA, 201 bp, Homo sapiens
attaaatataatcaagctgttttctcctttatatgacatttttcatgttatatttcaacaaagaactaaaataaaacataaacactaagctcagcagaggyatatgagaggcaacaaatattcttttataaaaaacagccaaaaactatgacaaacctgagtttacacaggaatatcagcgtcttagagctgatttttaga

SEQ ID NO: 37311 - DNA, 201 bp, Homo sapiens
atcttccttcctcagcctcctgaatagctgggaccacaggtatgccccactgctcctggctaatttttttttttgttttgttttgtagatacagtttctcygtgttgcccaggctggtcttgaactccagggctcatgtgagtctctccccacttagcttctcaaagtgctgggattacagatatgagccactgccctcag

SEQ ID NO: 37312 - DNA, 201 bp, Homo sapiens
tgtgctggtttttttttttttttttttttttttttgaggaatttccttttcatttggattccagttacacatgccaggtacttctgttatttcaggcttayattaatgaaaacattgccaattactccggcatttattttcccaaggaacagccacggagagcatgctgatcaggcagccttgggatgtgcggctcatgtg

SEQ ID NO: 37313 - DNA, 201 bp, Homo sapiens
aggaatagtttttcacctatcatccccagagaaaatgagtggaattcctcaacaaaatatgtagccccagagatgcaggggtgggacttcaggcaatagaytaaagctgatctaacttggaagtgaagtcaacctagacactttacaggctggaatagctgaagacatgggggcttgaacccacgctccaaagctgcactt

SEQ ID NO: 37314 - DNA, 201 bp, Homo sapiens
ttcagcatcccttcttataattctataacagagaagtggttaggcaacttctgttcttttagtctctgtttactataataaaactataaatctttctcctyttaaaaaagtagctgtatatgccatttattaactggtttactgatttgttggtctgtttgagcacacatgtattgctccttctgtgtccttggccctggg

SEQ ID NO: 37315 - DNA, 201 bp, Homo sapiens
aagacacagaactcattcaaatccacgactagtgactctgttcctcaagatccttcaaggcctggctccatgtcagctcattcaaatccacgactagtggytaattagatcagatttccttagggttttttgtttttgttttttgttttttgttttgataggatcttgctccatcacccaggctggagtgcgtggtacaat

SEQ ID NO: 37316 - DNA, 201 bp, Homo sapiens
aaaattgacctcatgttcatgctcttaaaaaaaaaaaaatcaattatttttgagacaggcctcactctgtcacccaggctggagtgcagtggcatgatctyggtttgccgcagcctcaacctccagggctcaaaccatcttcctgccccctcctcctgagtagctggggccacaggtgcgcactacaacgcctggctaatt

SEQ ID NO: 37317 - DNA, 201 bp, Homo sapiens
gaactatttattaattgtgaaatttgaggacatttctcattatttttgtggtatttgatgctataatatttgcaagacaaggaacatgtgggtagctctaygcattccattttccattcctgataaaaattcaaagcacgtatgttactgatgctagagttaaacattttattttttaaaagtatcatttctaattggctg

SEQ ID NO: 37318 - DNA, 201 bp, Homo sapiens
gaacttatttatgtgagtaactttgtgattaatatccatctccccaacaactaggctgtaagttccacaagacggtaaatgtgtttttactcactaaagtrtcccctgctcctagcataatgcatgacacatggcaggtatggagtaaatatgggtcagataataactcagggctatttataatataaagtcattagcaga

SEQ ID NO: 37319 - DNA, 201 bp, Homo sapiens
acctgagaatttgcttattgaaatgtttccctcctttttttcccccttttctggaatttatgtgttcagataggttatattatctgtgaatatcactttakgataataaaggggttattataagctatttgttatagaaagggagtattgggttttatagcattgcattgagtttctagggaagtagctatttgaaggtaa

SEQ ID NO: 37320 - DNA, 201 bp, Homo sapiens
taagtgtttttaactgctgtttaatctctaggcactttactaatttttaaaagttggaaattcctatggtaatatgattcccaaagaaaggtctccagtcycttaactaaaagatttagaataccttagctaaccttagagttaaagcaaaatgtctgccccctggtgtcagatcaacaactagcatcttagctaattctc

SEQ ID NO: 37321 - DNA, 201 bp, Homo sapiens
tgttattggcagcagtgcaaatcatgtctgagttgtcaatacaacacatacctctttcagtctgcatttatagctattgcactaacaatggttctacacayaggtgagcatctgatacctgtttattacgactgctggaatagtcatacctgagaatttgcttattgaaatgtttccctcctttttttcccccttttctgg

SEQ ID NO: 37322 - DNA, 201 bp, Homo sapiens
aggctgatctcaaactcctaggctcaagctaatcctcctgccttggcctcccaaagtgctggaattacaggcatgagccaccttgccccatctgaataaayaggaaattaatgttcacttccagccctagactggaagctcctgagccccagtgctgtgtctgtttaggatctattgcttaacagattgatgaccctcaca

SEQ ID NO: 37323 - DNA, 201 bp, Homo sapiens
ctcttgagactattaaaacacaagtttctttaaaagtttattgagaccaggtgcagtggctcacacctgtaaacccagcactttgggaggccgaagtgggrggatcacctgaggtcagaaattcgagaccagcttggccaacatggcgaaactctgtctttactaaaaatacaaaaattagttgggtgtggtagtgggtgc

SEQ ID NO: 37324 - DNA, 201 bp, Homo sapiens
gtatacgaattagttactaactgaaatggaatcttggagaaaatgagcttttgcttgtttatttgtaagtataaaatcttcataattttcatgatgactcmtatggtcaaggaactgtggaactgaggatagggataggaaggaaccacagaaagcttatatgatccagctaccttgcaaaaaacccttttcgtgattgac

SEQ ID NO: 37325 - DNA, 201 bp, Homo sapiens
tcaagcagtcttcctgcctcagcccccggagtaactgggaagacaggcacacaccatcacatccagctaattaaaacaattttttttttttttgtagagaygcagtctcactgtgttgcccagaatggtttcaaactcctcaaagattgggctcaaagttcgggctcaagtgatcctcccgccttggcctcccgaagttct

SEQ ID NO: 37326 - DNA, 201 bp, Homo sapiens
cagggtttttttttttttaagtctctgagaacaattcataaagccatatctgtcaacttatgtactactaaaatacaggatgaactttccaacaaatgttgttataatacttgtggttccatttccaattcagccattatagatgccccgaggaaacaaacaaaggggaaaaataagatacgaccaaattcattatgattt

SEQ ID NO: 37327 - DNA, 201 bp, Homo sapiens
tttccttagcatgagttaggtttcttgagttgtttcattcctgggggaactaataccgttaaaatttccttgacatttcaagaaatgatcatataccacaytgcaaattttgaacacagcagaggcatgatttgggtgtagagacaccttgggaagcattgattcagactcagattcttcagattatctgatcagaacctc

SEQ ID NO: 37328 - DNA, 201 bp, Homo sapiens
catttatttctgacttctttactcatgatttttttcccctcaattaattgtacgtcctgttctccttttcttcctcctgttcttctccttttcctattttygcacccattttttctagtagagggttttgcttgcaaatgttacttggtggataatggatgtaatttttacaaagttcagggtttttttttttttaagtct

SEQ ID NO: 37329 - DNA, 201 bp, Homo sapiens
cctgggggaactaataccgttaaaatttccttgacatttcaagaaatgatcatataccacattgcaaattttgaacacagcagaggcatgatttgggtgtrgagacaccttgggaagcattgattcagactcagattcttcagattatctgatcagaacctcttgtcctctccaagaaccaaggtctgtgtataccttttc

SEQ ID NO: 37330 - DNA, 201 bp, Homo sapiens
ttcttcttcttcttcttcttcttcttcttcttcttcttcttcttcttcttctccttctccttctccttctcctcctcctcctcctcctcctcctcctcctyctccttctccttcttcttcctttttttttttttgcccttaagcctattgcttccttccttaatgttatttcttgcttgctttcattttctttggatgctt

SEQ ID NO: 37331 - DNA, 201 bp, Homo sapiens
tccaggacactggtgaagagagacattcatttggtgacatccagaaacctcggcttcatttgttccttcctttgttcagcaaatgcttattgagtacatastttgtgcctggcactgtgctaagttcaggaggacagagaggaatgtaccagaacattggttatagggtgctgcagtagaggcatgtgtgtgatgggagtg

SEQ ID NO: 37332 - DNA, 201 bp, Homo sapiens
ttcttcttcttcttcttcttcttcttcttcttcttcttcttcttcttcttcttcttctccttctccttctccttctcctcctcctcctcctcctcctcctyctcctcctccttctccttcttcttcctttttttttttttgcccttaagcctattgcttccttccttaatgttatttcttgcttgctttcattttctttgg

SEQ ID NO: 37333 - DNA, 201 bp, Homo sapiens
ttcttcttcttcttcttcttcttcttcttcttcttcttcttcttcttcttcttcttcttcttctccttctccttctccttctcctcctcctcctcctcctyctcctcctcctcctccttctccttcttcttcctttttttttttttgcccttaagcctattgcttccttccttaatgttatttcttgcttgctttcatttt

SEQ ID NO: 37334 - DNA, 201 bp, Homo sapiens
cacttttcattagattttcttcttaaaagcatttattatggatctcacacatgtaacttcagggtccttaacttcagggtgtaggagctaaaggaggtggrtgtgtcacactagaaactataatgctaagttgaaatttgccctgaataatttgtctctaaatggagatggtagtacagagatgtattagtctgttttcac

SEQ ID NO: 37335 - DNA, 201 bp, Homo sapiens
ctaatagcctcagaatgggaaaatttaaagagaatggaaagcagctgacttaaccattttcccagagaaagctcctcctgcttctgcataaagatgtatartgtaatccttagagatctcacttcaattattgtgtcctttattcgaatgaataagtagagaatttagtttttgcacttgtcagtactataacatgccttc

SEQ ID NO: 37336 - DNA, 201 bp, Homo sapiens
aataaaagcttaaaaaaagtgaaatccagaattattccctgaagatggactctatgttaattttaatatgtacttaaacacctggatttagtctagccctytaaaaaacagccatgtttaaaagatcacttaggactatttctaaattaaaagaatcaacctcttaagtcataaccttctattggctcttagaacaactgg

SEQ ID NO: 37337 - DNA, 201 bp, Homo sapiens
gtcaaaagaaggggatatatgataggttttctttctctacttttgaaacattttctagtactaaattagagatattaactccttcaggcctcttaagttctattgctaaatagagatcagtgctcctttgatgaccatataaggaaaacgtttctgggaaaaatattgcagaagccatgagcggttatgttatctaatagc

SEQ ID NO: 37338 - DNA, 201 bp, Homo sapiens
attggcagagccagaaccaaagagcaggacccaggacatcagcccagtttcccccatggcctatttagacattgctcattttcatgcttttttttttttttggtacactattttcattcaattgcatttgtgtaatatatttgacagtgaaattttgcattaattcagctaagtcctgaagtagaggtgtaaggcatgctc

SEQ ID NO: 37339 - DNA, 201 bp, Homo sapiens
gacaaattaaatatattagggattttgctattttatttatttatttattattatttttttttttttgagatggagtctcgctctgtcgcccaggctggagygcagtggcgccatctcggctcactgcaagctctgcctcccgggttcatgccattctcctgcctcagcctcccgagtagctgggattacaggcgcccgcca

SEQ ID NO: 37340 - DNA, 201 bp, Homo sapiens
tattggcagagccagaaccaaagagcaggacccaggacatcagcccagtttcccccatggcctatttagacattgctcattttcatgcttttttttttttttggtacactattttcattcaattgcatttgtgtaatatatttgacagtgaaattttgcattaattcagctaagtcctgaagtagaggtgtaaggcatgct

SEQ ID NO: 37341 - DNA, 201 bp, Homo sapiens
ttgatgggattaaatttgatcactgacgttcctgctcttttgaagagagcacctattctgttaacccataggattcatttgatcaaatgtgatttttttttagatgaaagggacttctttcaggggttcattcttctccactgagttcacagagggaaaaaaggaaggaagtagaattaaactatacaatgaaaacagctt

SEQ ID NO: 37342 - DNA, 201 bp, Homo sapiens
gaatggtgtgagcaccatgggtcaggggattaagtgacttcattagggtcccaggcagctcaggacagctctgggtagctcagggagggaactccaagagkgtggccccaaccagacttgcactgtgttcctctctccgttccattcctctctttcctgggacgtctctgatctctcccccattgagctgtcatctcctgt

SEQ ID NO: 37343 - DNA, 201 bp, Homo sapiens
tagagtaatcattcagtagaatgaaggttcaaattgaccattggctttggcaacatggaggtcattggtgatcttgacaagcagttttgatagaatggtargaatgaaagcctaattggagtgagcttaatgggaggagagaaatggagactgtaaatatagacagcccttgactttacaactgtctctcccttgtttatc

SEQ ID NO: 37344 - DNA, 201 bp, Homo sapiens
atggtgtgagcaccatgggtcaggggattaagtgacttcattagggtcccaggcagctcaggacagctctgggtagctcagggagggaactccaagagtgkggccccaaccagacttgcactgtgttcctctctccgttccattcctctctttcctgggacgtctctgatctctcccccattgagctgtcatctcctgtct

SEQ ID NO: 37345 - DNA, 201 bp, Homo sapiens
atgaatgatggtggttcctgctgggcaaagcggagagacacgaaggcagatctcctctttgtgtcggagttggtgtcatgtaacctccctgcctggttggsagctggaagtgatgagtcctcagctggtatttcctgccacactggtgttgtgactgccctctgctggtggctgttttcccctgtgatgtgctgctgtcat

SEQ ID NO: 37346 - DNA, 201 bp, Homo sapiens
agggtccaggaggccaaggtcactgcagacctccctgtggctgagaccacctggcctgtctcccactgttctggaaagctctctacccctttccctcaacyccctttctttgatatctttgggaccagcctctcctgggcttctcctgccctcttccccagcaatttttttcccaccttctcattggacctcctgcctcaa

SEQ ID NO: 37347 - DNA, 201 bp, Homo sapiens
gatcctttgttgatcacatccgccaagcccctgttggcatgtaagggaacatagccacaggttcctgggatgtggggagggatcatgactctcccgcagcmgcccttttcagaagtcaggtgccaaaaaggcaggcttttcacacaggcaagtgatgcttggatttcgtcttaaatcaatgaaattcgatcgcttgtatgt

SEQ ID NO: 37348 - DNA, 201 bp, Homo sapiens
tttttttttgtaatcaaaatcagggtgtcattgggacattgtagaatgtagtatcctttcattatattagaaaggtagctaatctttaagtaagtgagaawtgaattgtgagtttattgagtctagcctcatggcactggtaagaataaatggaaatagaaccttgccatgttagtgattccaacagtgttatggactgaa

SEQ ID NO: 37349 - DNA, 201 bp, Homo sapiens
gcttgtatgtttcattgtccatagatgaagtcgctccactggtctgtgctctaggcctgaaagaaaggcctcactgcctcttacagatctccatatttagrgacttgggatatgttacatgagagtgaaatgggaaatgcacaaatctcttgacctctacagtgaggagaagacacctgttttatcctgggaagtgatgaa

SEQ ID NO: 37350 - DNA, 201 bp, Homo sapiens
aaaagtaaaaaagcaagtaattcttcccttttcagccaagtctagactgttgatttggacttcccaaggcacacaggtaggggagaggtgatgacatttcrgggagagggagcagtgtgagaggggacatggaggcaggaatgtgccatctgtgtagtcaggagggtgttggtggtggagagtgactgaagatgaggcaag

SEQ ID NO: 37351 - DNA, 201 bp, Homo sapiens
ggttagttaccggactcacccaccgtcatggactgacagattgctgcctccctaatctattagcctctaccttggaggaaacaacaaaagataaggctgtaaaaaaaaaaaagtgagaattcctcccaaaaaagcctgaggctgctgagtttctccctggggaagctgtgggttccagatggttgcccttaaggcatcagt

SEQ ID NO: 37352 - DNA, 201 bp, Homo sapiens
accctctggggccctctaggcaatcataaggacttcatgttttactgtggggacagagaagactgattgcaagttctgatagcagaagtgctgtggtgtgrcttgagttttaacaggattcctctgttgagaatagagtgtagagggcaaggatagaattaggccaagcagcaaggaggtcactggaataatccaggccag

SEQ ID NO: 37353 - DNA, 201 bp, Homo sapiens
ttcctctgtagttatatctccagacagtatcctggcttagcatcagatgcaaataaatcactgtgatccattcctagatgggtaaagcttggtgtatatgtgtgtgtgtgtgtgtgtgtgtgtgtgtgtgtgtgtgtgtgtatataaataaatatataaatatgtgtgtgtgtaaaaacactttcatctttgaactgctgt

SEQ ID NO: 37354 - DNA, 201 bp, Homo sapiens
ctccttctcatttaaaaacaagtgtatttaacattttttggaatattccaaagagttgttcagcattttgcaattgatgttattggcagcagtgcaaatcatgtctgagttgtcaatacaacacatacctctttcagtctgcatttatagctattgcactaacaatggttctacacataggtgagcatctgatacctgttt

SEQ ID NO: 37355 - DNA, 201 bp, Homo sapiens
tcctctgtagttatatctccagacagtatcctggcttagcatcagatgcaaataaatcactgtgatccattcctagatgggtaaagcttggtgtatatgtgtgtgtgtgtgtgtgtgtgtgtgtgtgtgtgtgtgtgtgtatataaataaatatataaatatgtgtgtgtgtaaaaacactttcatctttgaactgctgtc

SEQ ID NO: 37356 - DNA, 201 bp, Homo sapiens
gatatattgtagcatatttgtaaagaatgaagtagttctgtatatgtgctcctttggaaagatttataagatatatatacacacttacgtgtacatatatrtaaaaaatgaaaaaaatgccttgtggaatcaatgtgattaccattcccttttgtataatttttttaaaaaaggtatatatgctggtgtatgcattttttc

SEQ ID NO: 37357 - DNA, 201 bp, Homo sapiens
cttttcctgtcgctgtgtctgcctcttagacacaaagtacagaaactaataaacggaaaggttaagctatacagaaccctttccaaagctgtgattgccarcctccagctttttagagacatttctggtttgattcacggagtctgtgttgtctagaagagcttgacttggtctgctaggggttgattgtctagcagttct

SEQ ID NO: 37358 - DNA, 201 bp, Homo sapiens
gggtgtggtggtgggcgcttgtagtcccagctgctcgagaggctgaggcaggagaatggcgtgaactcgggaggcggagcttgcagtgagccgagattgcracactgcactccagcctgggcgacagagcgagactccatctcaaaaaaaaataaaaaaataaaaaatttgcagatgttctcaagtgtgctttattttgct

SEQ ID NO: 37359 - DNA, 201 bp, Homo sapiens
cttagcatcagatgcaaataaatcactgtgatccattcctagatgggtaaagcttggtgtatatgtgtgtgtgtgtgtgtgtgtgtgtgtgtgtgtgtgtrtgtgtatataaataaatatataaatatgtgtgtgtgtaaaaacactttcatctttgaactgctgtcttccaatgttaacattgagaaatacagtcgtatc

SEQ ID NO: 37360 - DNA, 201 bp, Homo sapiens
ttctttatttgtggggggctgggggctgggactacaggcacccgccaccatgcctggctaattgttttttttgtatttttagtagagatggggtttcaccrtgttagccaggatggtctccatctcctgaccttgtgatcagcccgccttggcctcccaaagtgctgggattacaggcatgagccactgcgcccggcccta

SEQ ID NO: 37361 - DNA, 201 bp, Homo sapiens
gttgtacccaagttggacactcattggctctgcagtgccccctcgtgggtcctgtgtgggcattcttccttttctctcatgcccatagtgggttggctacygctgctctctccagccagagttgtagaaaagtaaatgaatccaaagtggatgcaaaagaaataatgaggagatggggaatcctttccagaaatgcatgaa

SEQ ID NO: 37362 - DNA, 201 bp, Homo sapiens
tactcttcattatgcatgcattacaagactatacacattttacttgtttaactgaaactgtgtgtattgtactaagcaggcaatttaaaggattttttttwaaatagttgactgttattgaattttgctttattttctgactttaaaacccacccccagagtgagttaaaatttcacacatgtagccgggcatggtggatc

SEQ ID NO: 37363 - DNA, 201 bp, Homo sapiens
tttctttatttgtggggggctgggggctgggactacaggcacccgccaccatgcctggctaattgttttttttgtatttttagtagagatggggtttcacyatgttagccaggatggtctccatctcctgaccttgtgatcagcccgccttggcctcccaaagtgctgggattacaggcatgagccactgcgcccggccct

SEQ ID NO: 37364 - DNA, 201 bp, Homo sapiens
tttgagaaaaagcctgagttggggaaatagtgcctttggacatttcttattgccttctttggtccttatacccaaagctatacaattcaaatttcattttrtgcccatgtgcagcagttaagccttgagaccacaagcacaattcattagattgcacaaaataaagaagagatctatctaactttagggctataatttcta

SEQ ID NO: 37365 - DNA, 201 bp, Homo sapiens
ttagattatggctgaacggaagaatgccaaagcgctggcctgcagctccttacaggaaagggccaatgtgaacctcgatgtccctttgcaaggtaagtcaktggcacctcatgtcttcattatggccctgtccctcctggtccaggactgaaggctctcagatggttctctggtatttcaagtctccttaaagagcacact

SEQ ID NO: 37366 - DNA, 201 bp, Homo sapiens
ttcctgcaactaggtggtcccatctggggatgatgggagacagtggcagatcatgaggcattacattctcataggaagcatgcaacctagatccctggcaygtgcagttcacaatagcatttgcgttcctatgagaatctaatgctgccactgatctgtcagggggcagagcccaggaggtaacgtgagcgatggagaccg

SEQ ID NO: 37367 - DNA, 201 bp, Homo sapiens
agtagattttacatcattctggattcgaattaattctggcttgctctgtctctttttttttttgagacagggtctcactctgtcgccaggccagagtacartggtgcgatctcagctcactgtaaacctccacttgcctcagcctcccaagtagctggaactacagtcgtgtgctaccacatccagctaattttcgtattt

SEQ ID NO: 37368 - DNA, 201 bp, Homo sapiens
gaggtgggagcctggtgaatggaagaagtccattccaagcaatcaggagactgctactctgaggaatagtttttcacctatcatccccagagaaaatgagyggaattcctcaacaaaatatgtagccccagagatgcaggggtgggacttcaggcaatagactaaagctgatctaacttggaagtgaagtcaacctagaca

SEQ ID NO: 37369 - DNA, 201 bp, Homo sapiens
taatgtagaatcagtgggagccctgagcttgttttcctgcaactaggtggtcccatctggggatgatgggagacagtggcagatcatgaggcattacattstcataggaagcatgcaacctagatccctggcacgtgcagttcacaatagcatttgcgttcctatgagaatctaatgctgccactgatctgtcagggggca

SEQ ID NO: 37370 - DNA, 201 bp, Homo sapiens
gccacgttttctggtgcgagcctaatgctggtaacgtgtctgaggcggtgcaggccgcctgcatggtgagttatcccggtacaggctgttgagccctcccrcctctgctcatctctaatatgccatacattatagcagaatcactcacggaaatgaaaaaagtcgaatccctaaagtaatgctttactttataacgccgtc

SEQ ID NO: 37371 - DNA, 201 bp, Homo sapiens
tcatatacaaacctttttttaaaaattaaaaatctttgtctctgaatataaaaatgtttcatgctcattattaaaaaaaacttagaaaaatagcaacttayaaaacatcagaaggccattttctaaatcctgtcacccggagattaccactatgaacattttgatgaactcttctattcattcctttagcagtgatttctt

SEQ ID NO: 37372 - DNA, 201 bp, Homo sapiens
tttggataagtgaaaggacttttggaactctgatattctttttttttttgagacagggtctctgttgcccaggctggtgtgcagtggcgtgatcacagctmactgcaacctcaacttcccaggctcaagtgatcctcccgcctcagcctcacaagtagctgggactagaggtgtgtatcacctctaatttttgtgtttttg

SEQ ID NO: 37373 - DNA, 201 bp, Homo sapiens
ctgttcctcatttccctggactgtgaaatggcgaattttgagaattaaatgagtaatagacatgaagtacttagaacagcatctagttaattcatggtaartgctcaataaaatgtcagctgcttagtattttcatagccccaaatctaggtaatgggtcccccatgtctgccttcatacttatccaccttcaccctgcag

SEQ ID NO: 37374 - DNA, 201 bp, Homo sapiens
cctgttcctcatttccctggactgtgaaatggcgaattttgagaattaaatgagtaatagacatgaagtacttagaacagcatctagttaattcatggtamgtgctcaataaaatgtcagctgcttagtattttcatagccccaaatctaggtaatgggtcccccatgtctgccttcatacttatccaccttcaccctgca

SEQ ID NO: 37375 - DNA, 201 bp, Homo sapiens
gttaagaaacttggactccctgtgacattgtactaagtcagctttagctgttttgtccactactgagagaaataatatttacctacctcctagaatgatasggaagagaatttctgtgaaatatctgctatttcccaatattttacatttaaattataaaaatgtgcatttcattcttttttcgagaaacagtactcttca

SEQ ID NO: 37376 - DNA, 201 bp, Homo sapiens
agcttctcagtggtcaagttgtgatcagagttcacagcaacaagacttcacacccaccttttagccattgactgcccatttatactttatatagagagaaraaccaaggtatatgaacttaaaagattaagcaatttttatttgtttgttgttataggtatgggaatttttaaaacagttactttataggtagtggatgct

SEQ ID NO: 37377 - DNA, 201 bp, Homo sapiens
cttcattaggaaaacagttcttacagaagctcatctctgacttgattttatttctgtgctggggttgtttgctaaaacttgaaataatcttaaatgaaaasacaaaatacaaaatagcattctcatattgatgattcctatatgtgtgcagaagctaggaattttagtgataaaattaagttctttgttgctatgcatctt

SEQ ID NO: 37378 - DNA, 201 bp, Homo sapiens
taaggaaaagaaaacagcaacatatactattgaacattgtatttatttttgtttttgagacggagtcttactcttgttgcccaggctggagtgcaatagcrctatctcggctcactgtaacctctgcctcccgaattcaagtgattctcctgcctcagcctcctgagtagctgggattacaggtgcccaccaccacaccca

SEQ ID NO: 37379 - DNA, 201 bp, Homo sapiens
atgtttatcgattaatacctacctgatagggttgctgtgaacacccaacagtgcaaaagtagttgtagttagtaataataatagtgctgtattaaatgcaytttttactcatgatattttcaatttatggtgggtttattgcaatgtaagtcaagggtatgggtaatgatggtgctttatttctagtcagcagtaatttgt

SEQ ID NO: 37380 - DNA, 201 bp, Homo sapiens
tgggtggcttaacccaggggtcttctacccccagccagggatactggtctgtggcctgttagcaactgggccacacagcaagaggagagtggcaggccagygaatgaagcttcatatgtatttacagccgctccccatggctctcattaccacctgagctctgccccctgtcagatcagtggtggccttagattctctaag

SEQ ID NO: 37381 - DNA, 201 bp, Homo sapiens
tacaatgaaataatactaagcagtatgttaaactatgggacatttttatttcttcaaggattataacactgggggattatcaactttctaatgaaaaaaaataatagcacgtgtaagattggacctatttggataattaaatattaatgaaagaagatgtgacttttgatttttagccatgaatttttaagggacttctat

SEQ ID NO: 37382 - DNA, 201 bp, Homo sapiens
ctggtgaagagagacattcatttggtgacatccagaaacctcggcttcatttgttccttcctttgttcagcaaatgcttattgagtacatagtttgtgccwggcactgtgctaagttcaggaggacagagaggaatgtaccagaacattggttatagggtgctgcagtagaggcatgtgtgtgatgggagtggaggggaag

SEQ ID NO: 37383 - DNA, 201 bp, Homo sapiens
catggagccaggaaaggctgagaatcctttggctccagtattagggccttttctatcattacttttcctgtgtatctcatagttttcttttaaaaaaaaaatcatgagttccaagtactcttattaatctgcagttcattgactttaatgagcaattttttttgtttcccgtaattgtattgaattagaacatttttcatc

SEQ ID NO: 37384 - DNA, 201 bp, Homo sapiens
gcttattgagtacatagtttgtgcctggcactgtgctaagttcaggaggacagagaggaatgtaccagaacattggttatagggtgctgcagtagaggcaygtgtgtgatgggagtggaggggaaggaaggctgtcctaatcctgcgagagtggcaagagctgtggctagtgactcctcatgtaaaattcccactacagca

SEQ ID NO: 37385 - DNA, 201 bp, Homo sapiens
aggagaatgtggatttgtggcatgattatctttatttcctgtaaagaaaacaggattttcattagatcctgttgtgctgttctcccatgagagaaataatratgagatagactgccacatttggagtatatatacaattttgcttaacatttaaatgatttttatacgaacatttgtgaaggtttgaacgtttgcctacat

SEQ ID NO: 37386 - DNA, 201 bp, Homo sapiens
agaacattggttatagggtgctgcagtagaggcatgtgtgtgatgggagtggaggggaaggaaggctgtcctaatcctgcgagagtggcaagagctgtggytagtgactcctcatgtaaaattcccactacagcaaacccttcagctgcttcctttgtcatctttccttaactcaattttattcctgcctaccacccagga

SEQ ID NO: 37387 - DNA, 201 bp, Homo sapiens
attttctgaagagaagggtaaatgcactcagttcattcatcaaagcatgtctgcaacacaggaagacacgcagtgttttcttctatgaggaagaaagcacraacagctgtctaggacaaacttcttgacacagccatgcacttggtcccactgatgtttgccaaaataggcgattattgtcagtatttttgtcagcagtga

SEQ ID NO: 37388 - DNA, 201 bp, Homo sapiens
attgtctcatgatcacagtcatctcctgctgacttgaattttatttcagtttaaatcattttcctttactagtactagatcctgctgttacgtgtacacgygtgtgtgtgtatatgtgtatcttttttttacaagctgcaagtagaaataagaaacaaaaataaagtgaggtgttttattgaatttttatcttttcttcct

SEQ ID NO: 37389 - DNA, 201 bp, Homo sapiens
atcattgtctcatgatcacagtcatctcctgctgacttgaattttatttcagtttaaatcattttcctttactagtactagatcctgctgttacgtgtacrcgtgtgtgtgtgtatatgtgtatcttttttttacaagctgcaagtagaaataagaaacaaaaataaagtgaggtgttttattgaatttttatcttttctt

SEQ ID NO: 37390 - DNA, 201 bp, Homo sapiens
agaatgatttgctcatggaattgctgttattcacctttagttttggttgctattgtggggtgaagaaggagtgtcaaaacaataacaacaaattatttccyttttttttttttttttttttttttttgagacggagtctcacttggtcgcccaggctggaatgcagtggcttaatctcggctcactgcaacctccaccttc

SEQ ID NO: 37391 - DNA, 201 bp, Homo sapiens
aggtggctcacttgaggtcgggagtttgagaccagcctggccaacatggtgaaaccccgtctctgctaaaaatacaaaaattagccgggcatggtggcacrcgcctgtaatttcagctactcaggaggctgaggcaggagaatcgcttgaacccaggaggtggaggttgctgtgagctgagaccgcgccactgcactccag

SEQ ID NO: 37392 - DNA, 201 bp, Homo sapiens
gtgaagatttctccctaccctcaaacagttctggtatctctgagtacattcactatattaataagttgaattgtgtccgcccagaaagatacattgaagasctaacctctggtacctataagtctgacattatgtaggaagagagtcattgcacctgtaatcaagttaaggtaaggtcattagagtggtcctaatccaata

SEQ ID NO: 37393 - DNA, 201 bp, Homo sapiens
aacaacactgattcattttcagcttcccaatcaacatcagtagattttacatcattctggattcgaattaattctggcttgctctgtctctttttttttttgagacagggtctcactctgtcgccaggccagagtacagtggtgcgatctcagctcactgtaaacctccacttgcctcagcctcccaagtagctggaacta

SEQ ID NO: 37394 - DNA, 201 bp, Homo sapiens
tagcatcagatgcaaataaatcactgtgatccattcctagatgggtaaagcttggtgtatatgtgtgtgtgtgtgtgtgtgtgtgtgtgtgtgtgtgtgtrtgtatataaataaatatataaatatgtgtgtgtgtaaaaacactttcatctttgaactgctgtcttccaatgttaacattgagaaatacagtcgtatcgc

SEQ ID NO: 37395 - DNA, 201 bp, Homo sapiens
taacaacactgattcattttcagcttcccaatcaacatcagtagattttacatcattctggattcgaattaattctggcttgctctgtctctttttttttttgagacagggtctcactctgtcgccaggccagagtacagtggtgcgatctcagctcactgtaaacctccacttgcctcagcctcccaagtagctggaact

SEQ ID NO: 37396 - DNA, 201 bp, Homo sapiens
actggttattacactagatagaagggttctgtgaaattcagttttcactaagggttgttagagattccaagagttcaacagactggcttttgaagttatgttttttttttgttttttttcagagggagtttcacccttgtcccccaggctggagtgcagtggcacagtctcggctcactgtaacctctgcctcctgggctg

SEQ ID NO: 37397 - DNA, 201 bp, Homo sapiens
gtcacatggctattccagtccctaaccattgtcttctgggcactctctggttggatcccccagatgaacacagtattccaaaagtgagcagagagcagacyagggccaggggctgctctgtcctttgaccgccaaggacacactattgtggtgctcgatgttcttggcaaccacatcaccccctgatttctcttcacatgg

SEQ ID NO: 37398 - DNA, 201 bp, Homo sapiens
gcatgtacctgtagtcccagctactccagaggccgaggtgggaggatcatctgagcctgggaggctgaggctacagtgagccgtgattgtaccactgcacyccagcctgggtgacagagcaacaccctgtctcaaaaaaaaattgatgatggtgatgggtgcgctctgtgaatgtactaaaatccactggattgcacactt

SEQ ID NO: 37399 - DNA, 201 bp, Homo sapiens
aagggacactcgtatgcatatgcacacatgcacacgcacacatgcgcgtgtgcacacagacacacagacacacacacacacagacacacacatatttttgrcctgcaattcagcagtgcctaaacccagcatctcctgtttcactttcttggcaacttagctagttcatctgagttaggtgtctgtctcttacatccaaaa

SEQ ID NO: 37400 - DNA, 201 bp, Homo sapiens
cttatgatgatggcgtgtgggggcctgattttcttcagcaaggattgctaaactggggattgaattgattgtatttagattatttatttatttatttattkagatgaagttttgcttttgttgcccaggctggagtgcaatggcgcgatctcagctcactgcaaccttcgcctcctgggtttaagtgattctcttgcctca

SEQ ID NO: 37401 - DNA, 201 bp, Homo sapiens
gaaacatttgctggatggaaaatccataaaagaaagctcctgtgaaaagctgaggctgacaataatttaagcaaaatcaggttagtataagtaagagaggmtggataaagcggattgggccggatagggaaaagttgttttgttccttccaggctcattttggagaccaccccaaatgattattttcagttatttgtgaga

SEQ ID NO: 37402 - DNA, 201 bp, Homo sapiens
ggtcttgaactcctccctggaacggcaggggagcaccaccatgcccagctaggttttcttttgtggaaaatggaggtagataaagagtggaggaggctggkcacagtagctcacgcctgtaatcccaatactttgggaggctgaggcgggcggatcacttgcggtcaggaggttgagaccagcctggccaacatggtgaaa

SEQ ID NO: 37403 - DNA, 201 bp, Homo sapiens
tatttatgatttacttgttgaatgttggtttcatatataatttcctctattaggaaatgaaagattattcgtttcccctttggattatgtagcctataaamttttctattacaccattcatattgcaatgtaaatatattctaaatcctgaaccgcattagaattttttatagcccccacttatgtgtctttttgtggtgc

SEQ ID NO: 37404 - DNA, 201 bp, Homo sapiens
tgtggaaaatggaggtagataaagagtggaggaggctggtcacagtagctcacgcctgtaatcccaatactttgggaggctgaggcgggcggatcacttgmggtcaggaggttgagaccagcctggccaacatggtgaaacccatctctaccaaaaaatacaaaaattagccgagcgtggtggcatgtacctgtagtccca

SEQ ID NO: 37405 - DNA, 201 bp, Homo sapiens
cgtgaacatggctcactgcagccccgacttcccaggctgtagtgaccttcccacctcagcctcctaaatagctgggcccacaggcatgtcccaacatgccyggctaattttttaaatttttgtagagacaaggcctctctttgttgcccaggctggtcttgaacgtctgggctcaagtgatcctctggccttagcctccca

SEQ ID NO: 37406 - DNA, 201 bp, Homo sapiens
agagatgttatctttgttccatgaattgcaggctctgtgagccattttccatatagtgccaaactatcacaacaggattctttgctttttaaattccttcstctcactacaagaagtcctattaacatgttttctgagctatagagtaaaatctgtcaaatatagcatggaaagcagatgggtggttgctgtcatcctttt

SEQ ID NO: 37407 - DNA, 201 bp, Homo sapiens
aattcaagatgagatttgggtggggacacagtcaaatcgtattaccccaggtttgggaacccttgctctggagttgagtaacatcttggtcacttttaccyagatattcattctttttatgcagtattttgaacattggcttttagtgttgttgagtgcatggattttcagattattagagattaatgtgtagatcttaac

SEQ ID NO: 37408 - DNA, 201 bp, Homo sapiens
tatctcaactgttctcactaccaaggcaggctaggggaatgaatgatgagtttttctaagaaaaattaacaggtgacaaaattgaaccaggttcatcagartcacagatcaagaacacaaatcccatgtgtcctgactccccactccagtgctctttcagaaaggccgtgttacccctcagccttccttcccacccctgtg

SEQ ID NO: 37409 - DNA, 201 bp, Homo sapiens
ggcttgaacttgggggtggaggttgcagtgagctgagattgcaccactgcacttcagcctgtgtgaaagagtgagaccctgtctcaaaaaaaaaaaaaagaaaaaaaaaaaagagagccaaggggagggacttagcctacgaattagttagagagaccttttactttgacatagtccagaagatgctaagaaccaagaatg

SEQ ID NO: 37410 - DNA, 201 bp, Homo sapiens
cctctttatctcaactgttctcactaccaaggcaggctaggggaatgaatgatgagtttttctaagaaaaattaacaggtgacaaaattgaaccaggttcmtcagaatcacagatcaagaacacaaatcccatgtgtcctgactccccactccagtgctctttcagaaaggccgtgttacccctcagccttccttcccacc

SEQ ID NO: 37411 - DNA, 201 bp, Homo sapiens; identical to SEQ ID NO: 5704

SEQ ID NO: 37412 - DNA, 201 bp, Homo sapiens
gtggaaccccgtctttaccaaaaatacaaaaattagcggggtatggtggcatgcacctgtagtcacagctagccaggaggctgaggcaggagaattgcttraatgcaggatgttgaggttgcagtgagtagaggtggcaccattgcactccagcctgggcaacagagtgagactccgtctttaaaaaaaaaaaagtcataa

SEQ ID NO: 37413 - DNA, 201 bp, Homo sapiens
tgtgcactgctgctttcttttgcttctaaagatcaaaaccaagttttgcatagtctgaggattagtccacccccagcactttaaccagatggttgctgacratggattctctttggatcatttaattaaccattgaactcactagcagttttgcaattacaaatttttttcccttacaagaaacctcatgattcagggatc

SEQ ID NO: 37414 - DNA, 201 bp, Homo sapiens
cacaaatgttaacgatccagacactggccagcttcccaggagtgcagctcctggcatttcatccatgacaaccattgccctgcttctactgagaaagggtwtctgtgtctgtgtcgtacagtatgtatactgatgagccctcagcttccaaacctcatccggccatcccttgcacaggtagttgtgcactgctgctttctt

SEQ ID NO: 37415 - DNA, 201 bp, Homo sapiens
agcctctaaacgtgctgggattacaggcatgacctaccatgcctggcccaagtgagattttatttggtaaccagtgaaaagctttaagaatattcatgttkgtgacagttaacacttacacagcaattactgtgtgccatcaccattctgagtgctttacacacactctcctatttaattcccacaacagacatttggtat

SEQ ID NO: 37416 - DNA, 201 bp, Homo sapiens
tgaactcactcaaaaggtaaccgactctgggctcagtcacatgaacttttgtaagacacacaaatgttaacgatccagacactggccagcttcccaggagwgcagctcctggcatttcatccatgacaaccattgccctgcttctactgagaaagggtttctgtgtctgtgtcgtacagtatgtatactgatgagccctca

SEQ ID NO: 37417 - DNA, 201 bp, Homo sapiens
aagaaagaaagaaagaaaaattgtcccaaaggaacgagaaacactgtataaccccaagaaccttgacaagaaggctttttaagtcacttgtttcaactacstcattttaccgagaggaagggttactgctttaaggtagaccagccaattagcccttgggcaggtaggaacaggaccacagaaactgttaggtgtgttaac

SEQ ID NO: 37418 - DNA, 201 bp, Homo sapiens
gagtctcactctgtcgcccaggctggagcgcaacggtgtgatctcagctcactgcaacctccgcctcctgggttgaagcgtttctcctgcctccacctccsgagtaactgggactgcaggtgtgcgccaccatgcccagctaattttgcatttttagtagagacaggctttcaccacattggtcaggctggtctcaaactc

SEQ ID NO: 37419 - DNA, 201 bp, Homo sapiens
gtgaagtggtggcagacggattacctgaaatcagatggagtcgggataccagatatggcttggtgtggctcatagcacactggtggaaaccgaagtcaccrgtagatgtttgaggcatggactgtgttcattctgtgtaaccatatgcagctggttttggcccaagtgcagccttctgcgataacctagtattcttgcagt

SEQ ID NO: 37420 - DNA, 201 bp, Homo sapiens
tatggtgaaaccccatctctacaaaaaaaaaaattagctgggtgtggtggtgccttgtagttctaactacttgagaggttgagatgagagaatcacttgarccacgaggttgaggctgcagtgagccatgatcacaccactgcactacagcctgggcaagagagtgagaccctgtctcaaaaaaaaaatcatctgtaacta

SEQ ID NO: 37421 - DNA, 201 bp, Homo sapiens
tggccagtgagacctgagaataagtccactgggatgggagtgaggttgctgggaaagcatttattgtctctataaagcctgacaactgagcttgtcagtaycctcccttgctttcccattctttctgccttgaatgctgataagatgcctggatgtacagcagccttcatgtcaccatgaggtgacaagcatgaaggaaag

SEQ ID NO: 37422 - DNA, 201 bp, Homo sapiens
aagtcaccttgaatttcccgtaagttttgaagcactggaacgaggtctgtttttgttccttggcttttgctcatgtgtcggttttgcagcacaggatcagwcacgtggttgtggggcctttggggttgaggagcttccactgcatgcaaaggcactttgttaacacagcgggacctgggtgagtgagccaggtcctaggcc

SEQ ID NO: 37423 - DNA, 201 bp, Homo sapiens
ttgaactcctgacctcaggtgatccacccaccttggcctcccaaagtgctgggattgcaggggtgagccactgcgcccagccagaagttacatttattacyattaagttattagccacttacatagacactgttctgagcacttaatgtgtatacttttattcttcactacaactctgttacatagatgcaactattatca

SEQ ID NO: 37424 - DNA, 201 bp, Homo sapiens
ataaacgtaaaatttaaagtcatctggggctggacacagtggctcacgcctgtaatcccaacacgttggaggctgaggcaagaggatcatgtgaacccagragtctgagaccagcctgggcaatatggtgaaaccccatctctacaaaaaaaaaaattagctgggtgtggtggtgccttgtagttctaactacttgagagg

SEQ ID NO: 37425 - DNA, 201 bp, Homo sapiens
catgttggccaggctggtcttgaactcctggcctcaagttatctgcctgcttcagcctcccagagtgctaggattacaggcatgagtcaccatgttggatwaatatttaaaattttttgtagagatagggtctcactatgttgcccaggctggtctcgaactcctgggctcaagcaatccacttgtcttggcctcccaaag

SEQ ID NO: 37426 - DNA, 201 bp, Homo sapiens
tcccaggttcaagtgcttctcctgcctcagcctcccacaggcacctgccaccatgcctggctaattttttgtatttttagtagagacagggtttcaccacrttggccaggctggtcttgaactcctgacctcaggtgatccacccaccttggcctcccaaagtgctgggattgcaggggtgagccactgcgcccagccaga

SEQ ID NO: 37427 - DNA, 201 bp, Homo sapiens
actaacgtgaaaagacttgtcttcatcagagccaccccacaattggccctgtgctctctgttgctgcatacttaggtcctacagttcttcatgtaaccgcmtgaaaagctctacttttctactaagaataaataatcctgctgaaatggaccataggtaactcaattaaacatagcttcctaccactgggttgtttaatta

SEQ ID NO: 37428 - DNA, 201 bp, Homo sapiens
tataactaaagtgggttttaaaagataatgaaatcaatactaacgtgaaaagacttgtcttcatcagagccaccccacaattggccctgtgctctctgttkctgcatacttaggtcctacagttcttcatgtaaccgcctgaaaagctctacttttctactaagaataaataatcctgctgaaatggaccataggtaactc

SEQ ID NO: 37429 - DNA, 201 bp, Homo sapiens
actggtgttatcattaagaaaactgccaaatgtcttctaggccactgtttggtgaaatctggattggctcatatgtataatatgttgaaatgggatttcaytataattttctaaactaagagtggatttggtttttgtgcagaaggattgaggaagtgatgttagacatatcacaaaaacttaaaagagatttagagaatg

SEQ ID NO: 37430 - DNA, 201 bp, Homo sapiens
cctaaatttatcttaataatttttcattattttacacctgcatgtttattcaagcaatttgaaataaagatctttttgaatgatttcttcagtgctttcaygagggctgtgtaagggactttgctatttaggtggcactcatgagtgatggattaatgcagtagattccaggaccagatgtccctgtttctagatctcagc

SEQ ID NO: 37431 - DNA, 201 bp, Homo sapiens
atccaagaggtattttgaatcttgaaaagcttgcctgttttttgtatggactctgtgaaagttgttttaggtcatagccctttgctcactggctgccttattatttatttatttatttatttatttatttatttatttatttgatggagtctcactctgtcacccaggctggagtgcagtggcgccatctcggcttactgc

SEQ ID NO: 37432 - DNA, 201 bp, Homo sapiens
tactacttctcttaaggataatagtaatttcttaagagacactaatttaattttcctcctatactgtgcaaaaagaaatgtcctggtccttttaactgatrtgatttttggctttgctttaaattattgattacattttaaaaggggagggactttctgatgagaatagcactctctttaatagcctttcacaaaatcaat

SEQ ID NO: 37433 - DNA, 201 bp, Homo sapiens
tccaagaggtattttgaatcttgaaaagcttgcctgttttttgtatggactctgtgaaagttgttttaggtcatagccctttgctcactggctgccttattatttatttatttatttatttatttatttatttatttatttgatggagtctcactctgtcacccaggctggagtgcagtggcgccatctcggcttactgca

SEQ ID NO: 37434 - DNA, 201 bp, Homo sapiens
gaatataaaaatctcattttaatatggtggaagaccatgaaatcttagcattcgagggaccttaacttttatttacccttctctcctttctaattcccttstgctccattctagagaggtgaccattcaacacatgcttaggatgaatctgctagattcttagagagaggcttaatagctcacagaatcatttatagttta

SEQ ID NO: 37435 - DNA, 201 bp, Homo sapiens
ccaagaggtattttgaatcttgaaaagcttgcctgttttttgtatggactctgtgaaagttgttttaggtcatagccctttgctcactggctgccttattatttatttatttatttatttatttatttatttatttatttgatggagtctcactctgtcacccaggctggagtgcagtggcgccatctcggcttactgcaa

SEQ ID NO: 37436 - DNA, 201 bp, Homo sapiens
gcaagaggagagtggcaggccagcgaatgaagcttcatatgtatttacagccgctccccatggctctcattaccacctgagctctgccccctgtcagatcrgtggtggccttagattctctaaggagcacgaatcctattgtgaactgcacatgtgagggatctaggttgtacgctctttatgggaatctaatgcctgatg

SEQ ID NO: 37437 - DNA, 201 bp, Homo sapiens
caagaggtattttgaatcttgaaaagcttgcctgttttttgtatggactctgtgaaagttgttttaggtcatagccctttgctcactggctgccttattatttatttatttatttatttatttatttatttatttatttgatggagtctcactctgtcacccaggctggagtgcagtggcgccatctcggcttactgcaac

SEQ ID NO: 37438 - DNA, 201 bp, Homo sapiens
agtgccagctccactccctcaaggcagagcttccttcttattagtcacaactctggctaatgctctcaggacttggatttactcattcgtgaaatgaggtkgccgggttccggggtcccagagcccttgtgttctgggtctccatgctgtggttaaatgctcctcccccgagagcacagtgcagaatcccaggagtcagcc

SEQ ID NO: 37439 - DNA, 201 bp, Homo sapiens
actgttttgtggagaatagaatgaaaggaggaagcagagtcattgtaaaaagccaggcgagacaatggtgattgctgggccagggtgctagagagggcggwggtgtggacaggttccagatataaggtacagctgacagaatttccttataaattagatatggactgagagagagagaaagagaatgtaagcatagacaag

SEQ ID NO: 37440 - DNA, 201 bp, Homo sapiens
ggtcttggaagaagccagtttggaggtaccattaggagtttgatttaggacttaggtttctgatgcttcttagacattggtatggttaggctttgtgaccycacccaaatctcatcttgaattgtattccccataattcccacatgtcaagggagaaagtaggtagaggtaattgaatcatgggggtggtttccccatgct

SEQ ID NO: 37441 - DNA, 201 bp, Homo sapiens
gaacattggttatagggtgctgcagtagaggcatgtgtgtgatgggagtggaggggaaggaaggctgtcctaatcctgcgagagtggcaagagctgtggckagtgactcctcatgtaaaattcccactacagcaaacccttcagctgcttcctttgtcatctttccttaactcaattttattcctgcctaccacccaggat

SEQ ID NO: 37442 - DNA, 201 bp, Homo sapiens
caatgtcctgagttatcttttagcccaaacccttctccctcctcaactgcccccttcccctctcttgtcagatgactaaaatgaggtctgagtaaatcagrtgacatcctgaaggttctagtcagtagcagaactaggacaaaaacccagggactcatggtttctagtgcctgcaactcactacaccaaaatctagaaagc

SEQ ID NO: 37443 - DNA, 201 bp, Homo sapiens
cagtttgctcatctgcaaataggaatactaattgtgcttatataatatgattgttgtgaagatttcatcagtgaatgtataagggcagagaacaatacttratgtgagataagaccttacttaacgagtatttttatttttagttttaaacaaaaactttaccttttgactctaaagagcttgagtttagagtatccaggg

SEQ ID NO: 37444 - DNA, 201 bp, Homo sapiens
gtaacaacactgattcattttcagcttcccaatcaacatcagtagattttacatcattctggattcgaattaattctggcttgctctgtctctttttttttttgagacagggtctcactctgtcgccaggccagagtacagtggtgcgatctcagctcactgtaaacctccacttgcctcagcctcccaagtagctggaac

SEQ ID NO: 37445 - DNA, 201 bp, Homo sapiens
gtatttttatttttagttttaaacaaaaactttaccttttgactctaaagagcttgagtttagagtatccagggcagttgagcttgtagccctacctgtargtatgctttggtgtaggaaatggccatagtttttgtgtttttctagttcctttttgtccgttggctttatttcccattgtctcatctcttgagattttta

SEQ ID NO: 37446 - DNA, 201 bp, Homo sapiens
ggggaaaatgtaacaacactgattcattttcagcttcccaatcaacatcagtagattttacatcattctggattcgaattaattctggcttgctctgtctctttttttttttgagacagggtctcactctgtcgccaggccagagtacagtggtgcgatctcagctcactgtaaacctccacttgcctcagcctcccaagt

SEQ ID NO: 37447 - DNA, 201 bp, Homo sapiens
gtttggttttgaaaaaaaaaaaaaaaaaaatatatatatatatatatatatatgcatagaaaatattccttctgcagtcagtattttcagcagatgggaargggcaggagtgacttgagcttccagccatttcaatctgggtaccttataacatggaagcttgtctggggatgaataaattatagcagttggaataattat

SEQ ID NO: 37448 - DNA, 201 bp, Homo sapiens
agctctgtctattttgggaatggtgagaaaatgggaagcgggtcaggggagatgttgcattacttcctgattgccatagctcccttctctgtaaaatcccrtgaaggattgagaggcaggtggtagtgcttgcttagtaactcttccctttacacccaccagctccactcccaagttgggtgcctactacttccaaaatac

SEQ ID NO: 37449 - DNA, 201 bp, Homo sapiens
attacgttcatatgaaacgcccaaaataggcagagctctagcgtcagaaagtaggtaagggttgccttggtctaggggtctggggagtgggggaaaaatgsagaatgacccctaccaggcacggggtttctctttggggtgatgaaactgttctaaaattgattatggtaggtctagcatggtggctcacacctgtaatct

SEQ ID NO: 37450 - DNA, 201 bp, Homo sapiens
taggtagaggtactcctcttattactgagaggagtaataagaaagaagcttttactctgatccctttaagtatgttttcacaacataatctcagaaaaacrtttttctctgtactcctcctccccatccatagtctaaaatccttttttacatcaaatattaaagcttgtccattaaccactctgacaggctgaacaattt

SEQ ID NO: 37451 - DNA, 201 bp, Homo sapiens
cagcatgagaagtaggtggctgtgccagggaacaggagatggcgtcctcttccaaaaagctggaatagacattgtcattctggtgtgctggtttttttttktttttttttttttttttgaggaatttccttttcatttggattccagttacacatgccaggtacttctgttatttcaggcttatattaatgaaaacattgc

SEQ ID NO: 37452 - DNA, 201 bp, Homo sapiens
gaggctgaggcaggagaatggcgtgaactcgggaggcagagcttgcagtgagccgagatcacaccactgcactccagcctgggcgacagagcgagaccccrtctcaaaaaaaaaaaaaaaaaaaaccgaaaaaaaatttctgtttttgatgaacttcttttattatataactttgtaaattttttgaccagtaatttaaat

SEQ ID NO: 37453 - DNA, 201 bp, Homo sapiens
gcccaggctggagcgcaacggtgtgatctcagctcactgcaacctccgcctcctgggttgaagcgtttctcctgcctccacctcccgagtaactgggactrcaggtgtgcgccaccatgcccagctaattttgcatttttagtagagacaggctttcaccacattggtcaggctggtctcaaactcctgacctcaggtgat

SEQ ID NO: 37454 - DNA, 201 bp, Homo sapiens
gttgagccctcccgcctctgctcatctctaatatgccatacattatagcagaatcactcacggaaatgaaaaaagtcgaatccctaaagtaatgctttacyttataacgccgtcattcctagggccagaatcagttatgataaacagattacatctccaaaggccagaactcctgaaagaagtggggccagatagaggctc

SEQ ID NO: 37455 - DNA, 201 bp, Homo sapiens
gccatgcagtgatggcctcttcagacatttgggcaaggttccgcctttcgagaaaaacacaggtcctttctgaattcggcctggctatactttctgaatgmcagttcctatgtgctgccactcttaagcttgatcctgggatctcctgattggatgccgcataatgtctcttgcagaatgaagaggaagtcttagtggaat

SEQ ID NO: 37456 - DNA, 201 bp, Homo sapiens
ctaaggaaaagaaaacagcaacatatactattgaacattgtatttatttttgtttttgagacggagtcttactcttgttgcccaggctggagtgcaatagygctatctcggctcactgtaacctctgcctcccgaattcaagtgattctcctgcctcagcctcctgagtagctgggattacaggtgcccaccaccacaccc

SEQ ID NO: 37457 - DNA, 201 bp, Homo sapiens
agatggttttaatttttacgtggcaaaatgtaccaatttttttttttctgtagtggtgctgaattgtgtgtgtgtgtgtgtgtgtgtgtgtgtgtgtgtgwgatgagaaaaagcattggaaacttgagacagaaaggtaggtaaggcctaccatgaaaaaaatcctcaataaatgtttgtgggaaatgtgacaaagtagga

SEQ ID NO: 37458 - DNA, 201 bp, Homo sapiens
ggtgagttatcccggtacaggctgttgagccctcccgcctctgctcatctctaatatgccatacattatagcagaatcactcacggaaatgaaaaaagtcraatccctaaagtaatgctttactttataacgccgtcattcctagggccagaatcagttatgataaacagattacatctccaaaggccagaactcctgaaa

SEQ ID NO: 37459 - DNA, 201 bp, Homo sapiens
aagtattaattcagtgaatgggtgctctgcacatccctctactgagatgccatgaacctgagtaaccacatttttgtagtgtagcatagtcttatccgtgrctacctccttacttgtagataactttctgtgcatgtctcagagtccgtcagttagattctagatttttacatggcatgtgaacccaacctgtaaaattgg

SEQ ID NO: 37460 - DNA, 201 bp, Homo sapiens
ttctgtatttggatgccatacctctaggtgggagccgtttaaattttgatttcttgttggtgagatatgaccctttgttctccagggttcatcaggatctyagcccctacacactaagcctgtctcatgttctgatagccttttacatcttcagagctttaactttctctcatctgactttaagttctatctttggttctg

SEQ ID NO: 37461 - DNA, 201 bp, Homo sapiens
tagtagagatgggttttcaccatgttggccaggctggtctcaaactcctgacctcaggtgatccgcctgcctcggcctcccaaagtgctgggattataggygtgagccacctcgcccagcctaatgttattgttttcttggcttggggacctgatgcttcatgggtgttctgtatttggatgccatacctctaggtgggag

SEQ ID NO: 37462 - DNA, 201 bp, Homo sapiens
aaataaataagatttgcttgttgaaacctcaagctgacgttctgcagaggctactcatagcagaaagaaatgttaaccttagcagcccttgctgccctcamataaggcaggaaagccaatttgacctggggcctgctcaccaggcctgtgtctgaacagggccacaactgttccctggagaagggaaacgatttcagtaaa

SEQ ID NO: 37463 - DNA, 201 bp, Homo sapiens
tcgagaccagcctggccaacatggtaaagccccatttctactaaaaaaaaaaatacaaaaattagctgggtgtgtttgagggcgcctgtaatgccagctamgagagaggctgaggcaggagaattgcttgaacctgggaggcggaggttgcagtgagccaggattgtggcattgcactccagcctgggcgacaagagcaaa

SEQ ID NO: 37464 - DNA, 201 bp, Homo sapiens
cctcccttctacgtactcctttgtagcttgcttctcctgatcattaaataagatttggctgggtgctgtaaccccagcacttcgggaggccaaggtgggckgatcaccggaggtcaggaattcgagaccagcctggccaacatggtaaagccccatttctactaaaaaaaaaaatacaaaaattagctgggtgtgtttgag

SEQ ID NO: 37465 - DNA, 201 bp, Homo sapiens
atgtgagaaagttttcacgtaacttccagataggtgaccgtgaggacatgtgtaaagaagttcctatatgttaatgggggtgtttgtcgcctcctcttatrgacaaaacaagccttgaaacaatttttcactggttatatttagtaagtgcatgtgcgtgcctgtgtagattttttacttaacgtagaatgaattactgtc

SEQ ID NO: 37466 - DNA, 201 bp, Homo sapiens
tgagatcaccaagaaggcaggtactgaatgttcgcaattagagtaatcattcagtagaatgaaggttcaaattgaccattggctttggcaacatggaggtyattggtgatcttgacaagcagttttgatagaatggtaggaatgaaagcctaattggagtgagcttaatgggaggagagaaatggagactgtaaatataga

SEQ ID NO: 37467 - DNA, 201 bp, Homo sapiens
tgaggcagaaggatcacttgaacccagaaggtggaggttgcagtgagctgagatcatgccattgcactccagccggggtgacagagcaagaccctgtctcaaaaaaaaaaaaagaactgtattgaggtcaccggctgtttatccagccttgtttatcatcctaacaccatctgacattgtcccccaacaaaaatctcagag

SEQ ID NO: 37468 - DNA, 201 bp, Homo sapiens
ttcaaattgaccattggctttggcaacatggaggtcattggtgatcttgacaagcagttttgatagaatggtaggaatgaaagcctaattggagtgagctyaatgggaggagagaaatggagactgtaaatatagacagcccttgactttacaactgtctctcccttgtttatcctggagatgcggagtcactaggatgct

SEQ ID NO: 37469 - DNA, 201 bp, Homo sapiens
tttcagaaaacctgtgcaatttcataatcaaaggagatattaaatgtttagtttctacaaggccatattagctcttaaaaagattttttaaatgtaattgwtgggattaaatttgatcactgacgttcctgctcttttgaagagagcacctattctgttaacccataggattcatttgatcaaatgtgatttttttttaga

SEQ ID NO: 37470 - DNA, 201 bp, Homo sapiens
cacgtgtaagattggacctatttggataattaaatattaatgaaagaagatgtgacttttgatttttagccatgaatttttaagggacttctatttgaagrcatgctgaattgtttactaaattcaggaaacagttacagattttcaaccctgtgctgaggcaacgtgcaggtgcttaggagacaaaagagaatgggcccc

SEQ ID NO: 37471 - DNA, 201 bp, Homo sapiens
gtttgaatcctggatctaccactcaccagctttgtgctgaacccagtttcctcatgtataacatgggtacagtaacttagtatcaacctcaaagggttggrgtgaggactcactgagataatacttttgacatttgaatagaggtggtaggagacaaggttggaatggcaggccaggggagtcagctgggacactgtgatt

SEQ ID NO: 37472 - DNA, 201 bp, Homo sapiens
ccctttacacccaccagctccactcccaagttgggtgcctactacttccaaaataccccgtaattgggtcacaacattatctgcctgcttggaatcatatytaaaaatcaaagcaaagatgcagactatgtcagcaggatttgaaatgtttccatcctctgctttgaggctttgcagaattattctgaaaacaaaagaagg

SEQ ID NO: 37473 - DNA, 201 bp, Homo sapiens
caaaggagatattaaatgtttagtttctacaaggccatattagctcttaaaaagattttttaaatgtaattgatgggattaaatttgatcactgacgttcytgctcttttgaagagagcacctattctgttaacccataggattcatttgatcaaatgtgatttttttttagatgaaagggacttctttcaggggttcatt

SEQ ID NO: 37474 - DNA, 201 bp, Homo sapiens
attgcttaaatgcaggatgttgaggttgcagtgagtagaggtggcaccattgcactccagcctgggcaacagagtgagactccgtctttaaaaaaaaaaaagtcataattaacaggactcttcgttaagaaacttggactccctgtgacattgtactaagtcagctttagctgttttgtccactactgagagaaataatat

SEQ ID NO: 37475 - DNA, 201 bp, Homo sapiens
gccattgagcagttggcccttcctccagccgagctcttacacaagagtagtttgtaagattctctctaaagttcagatccttgctgctgccttttagttarttgagttcagaaaggaattattaagtgtcctgaggcctttcctaagaagttagaagcagaatgtgtttgtaaatgtggtctgtaattttgtaaaagttat

SEQ ID NO: 37476 - DNA, 201 bp, Homo sapiens
ttaattaaccattgaactcactagcagttttgcaattacaaatttttttcccttacaagaaacctcatgattcagggatcaaaaacaccatagtttaaaaraagttaggcacaatggctcacgcctgtatccccagcactttgggaggccgaggcgggaggaacacttgagttcaggatttcgagaccagcttggccgacg

SEQ ID NO: 37477 - DNA, 201 bp, Homo sapiens
tcctggaggttcctactgtttctgggaacttagactttggggccctcttgttagtggtctctgtattcgtggcatttctgctctccctaaatgagataggragtatgaacactgaatatgttggatactatcactgtggagagggtctccatgttccagaattcaggggggaaaacctcctgcattcaaattccaattatt

SEQ ID NO: 37478 - DNA, 201 bp, Homo sapiens
tatatcctgttagcaatgagtaaaagggaaaaaataattcttgtgtgttcatttttgtttcctctaaaggatgtgcatttcaggggtgtttctttaagcaractaattgggaacaaaagagaactggcatatgctaagtgaaattagccagtcacaaaaggaaaaatattgtacaattctacttgtatggattgcctacag

SEQ ID NO: 37479 - DNA, 201 bp, Homo sapiens
tcatctctaatatgccatacattatagcagaatcactcacggaaatgaaaaaagtcgaatccctaaagtaatgctttactttataacgccgtcattcctasggccagaatcagttatgataaacagattacatctccaaaggccagaactcctgaaagaagtggggccagatagaggctccgatgagtttcataaccacca

SEQ ID NO: 37480 - DNA, 201 bp, Homo sapiens
tgacacccaaagcctgagatcattttaagaaaagacatcttccagatcttttgcttataatagtattttttgatactctgaagttctactcttaggggtaraacttataaatgctcttttctatcttggtacaaactgccttgtttgtttgtttaccttaaaacagacttagactactttaatttggggggattgcttgcc

SEQ ID NO: 37481 - DNA, 201 bp, Homo sapiens
tctacttgtatggattgcctacagtaaatttagagacagacagtagaatggcagttgccagaggttgcggggagggaggaatggagagttactgtttaatrtgtacagaattttagttggggaagacgaaaagttttgaagacgaatggtggtgatcattgtacaacaatgtgaatgtacttaatgctgcagaactataca

SEQ ID NO: 37482 - DNA, 201 bp, Homo sapiens
tgtgacaagtcttcaccaggaggaatcggatgccctggaaagaagcctacctggtgtctgcttttgttgcagaatgagactctggaaacatgccagaatastctttggagggactttagtcctttttcccttccctatactccacatgaagaggattaggatgctgggggtaggtcagaaagggtcccatgtgtgtgagag

SEQ ID NO: 37483 - DNA, 201 bp, Homo sapiens
tttttctggtggagggagagtgagtgactgcttttccgggggcacacatctgcataacacattgcctgaaatgcccttccctggaactagagtgtggttcrtaccctctcatggtttccatctctgatttcttttcccggtgttgatccctcagtccaaggcatgaacactgttacttattttatttgatttgttctccat

SEQ ID NO: 37484 - DNA, 201 bp, Homo sapiens
ggatttgttaactcaattagatgattgaagataatgaagcaaataaaggtgcattaagtgtagtaccttttagttgcgggaggggagtagtgtaaactgayatgattgaccaaaccatggagtgacttcttgtcctctttcactgtcttccagtgttttgctgtgcgttctctgggatgggtagagatggcagaagaggac

SEQ ID NO: 37485 - DNA, 201 bp, Homo sapiens
ggcaaaaagatatttgtcactacattttttaaatagcaaaaaatagttacaatttaatttccagcaatagaggatttgttaactcaattagatgattgaasataatgaagcaaataaaggtgcattaagtgtagtaccttttagttgcgggaggggagtagtgtaaactgatatgattgaccaaaccatggagtgacttct

SEQ ID NO: 37486 - DNA, 201 bp, Homo sapiens
attcctagcacagtacccagcaagaagaaagtgctcagtcagtggtggcttgaggtatggtggtcagaaataaaagtgtgcaaggaaggagggagctatawgattatgataatccctaacatgtattgagctcttacagtatgccagccattatgtcaaaggtttgacagtcatgttttagtccccagcaaaactcaatga

SEQ ID NO: 37487 - DNA, 201 bp, Homo sapiens
agaaggccagccctggtcaagccttccagtgacctgcacctctgtcacacttattgcagggcctgcatgctaatcatcagcaagccctgggcctgcctgcrgtgacagggagacttcatcttgcatgcgactatgaataattcataaacatggttatctggaaatatgtggtcatcattagcattttaatgaaaaaaaaaa

SEQ ID NO: 37488 - DNA, 201 bp, Homo sapiens
ttgattggggtcattaacttagtcctctatagttgtccaatagcatattttaaattggcacatcttagaagcattaaacattgcagttatttctaaattgyagatgttaatgcctttggaatatgaaagttggggatcaggccgggcacggtggctcacgcctgtaatcctagcactttgggaggctgaggcaggcagatc

SEQ ID NO: 37489 - DNA, 201 bp, Homo sapiens
gggggtcagagaaggccagccctggtcaagccttccagtgacctgcacctctgtcacacttattgcagggcctgcatgctaatcatcagcaagccctgggsctgcctgcggtgacagggagacttcatcttgcatgcgactatgaataattcataaacatggttatctggaaatatgtggtcatcattagcattttaatga

SEQ ID NO: 37490 - DNA, 201 bp, Homo sapiens
tctcctcttctctacctacttctactgccctaatctccaccctttccttctccctgaatgattgtaacaaccgaacaggtctcctgcctctaccctgcccscttcaaatccacccagagaatcatgcatccaaaacccagatctgacccatcagtggctgtttacacccaggataaagtcagagttctttgagacatgtac

SEQ ID NO: 37491 - DNA, 201 bp, Homo sapiens
ctgtgtaagggcaagagcagggccactgtgacaggggaggcccagaggcctcagccccacactgggctcctctgcaggttgcccctggacctaagagtgcwacacctctggaaaacagtgtggagagcagtgctgtggcctggagggaggaggacgcagctagcaggcagttagtcggttccctgggcatttcctttgcct

SEQ ID NO: 37492 - DNA, 201 bp, Homo sapiens
ttcccccttagactttcagcctctccccctgaactgagtccttcagcctgtagccatgcgctgtgagcacttagtctcttccagcagccacgcattccctytcctgggctcttccacttgctctgtttattctgttatctctgcctccaccacttcactaaaacagctctccatcaaggtggacagtgacttcttaaatgt

SEQ ID NO: 37493 - DNA, 201 bp, Homo sapiens
aaaacatagtataggtagatagggcttggttctatccatgatttcaggcatccactggggatcctggaatgcatcccccatggacaaaggggagctactgyactttccttctaatatccgaggattgtggactcccctcttcttcgaggtcagtcccttcatctgtactcctgaccctttggcccacctcttttgagatct

SEQ ID NO: 37494 - DNA, 201 bp, Homo sapiens
acttagaaataacacgctccgggcaggttttttaggcttggctaaatgacttcaaatgagttctgcttaaggaacactatttgaattccctaagaaccaaraaataaacaaaaaaggcatcacaacagcccaagtatgtgttcagaggccgtgccctgtgcccttcagatcttatctggagcttggtattttaagtttcgt

SEQ ID NO: 37495 - DNA, 201 bp, Homo sapiens
ttttagtgtttaacttttattgaattattccaaatcattcaaacattcaacttcattttcgttgaaacattaatttatctgaataaaaaaattaaaaaacwttcatttctctgaatattgtgtttatatacaatttactatgtgtttatatatttaaattgtaagaacaactggtgtaaataggaataaacatatctgacc

SEQ ID NO: 37496 - DNA, 201 bp, Homo sapiens
tcttgttaatttttattccatttataactaagcaaaaagttatgagtgaaataatgattcttcatattaaattcctctgtatatactttgaccaaactctrtgtatatcaatatttagagtttttaatgtcacaaatgaattcccatcttgcttgttaacctatctaactaggctgggttggtgacaagcttgtcttgagg

SEQ ID NO: 37497 - DNA, 201 bp, Homo sapiens
atcccaggcccttgtcttccctgtccaggccggcagcacctgtgaggccccgcacccgttccttacagccagcttgccctgggccctggatcactgcattrctgttgtctgaatcacctccgtggccttgtttttcatccttgatgttttcccaaaagcattgtttctccagtatccgcaaaacagcatcctgtgatgttt

SEQ ID NO: 37498 - DNA, 201 bp, Homo sapiens
cctatttctagcaacagaataaacctcctctttttatttcaacaaaatctcagcgtaagcttagtaaaactagggtgggtttaattgaagataaacagtcygattcgtgccattcagcataaagttcctctcatgatacctctaggtacctccttatcagcccaacttgaaagccaccaaccttggcctctgccgttggtc

SEQ ID NO: 37499 - DNA, 201 bp, Homo sapiens
ttttaaagcagagttcacgtgctcttgtaactactgactgcatctactctcatgagccctaaggaggtagtttaggctttgcttcatgctctgtgtgcctragtaaaataggaaatgatggcttttaagaaaatggaaattattacttgagatcaacatttcatctgggctttgaaaaactctggggtttctttcatcttc

SEQ ID NO: 37500 - DNA, 201 bp, Homo sapiens
acaggcatgagccaccatgctgggcctgatctaatttctaatctagagtttacaaaaatccttttaaaaaaaacaataatatggtgaaaccccatctctaytaaaaatacaaaaaattagccgggactggtggcggatgcctgtagtcccagctactcgggaggctgaggcaggagaatggcgtgaacccgggaggcggag

SEQ ID NO: 37501 - DNA, 201 bp, Homo sapiens
caaagggcaatcaattcaaattttaaaggttttgtatctccagagtttgaatgaatataggggaatctgatctgatttcttttgtttttttggagacagaktgtcactcttgttgcccaggctggagtgcattgtcacaaacatgactcattgcagcatcgccctcctgggctcaagcagtcctcctgcctcagcccccca

SEQ ID NO: 37502 - DNA, 201 bp, Homo sapiens
ctactcttctgcccattcacaacagtaagaatctgagcatgtctctggccacacgcaaacagtggcagctcccgattcacaagctgcttacatttccaaastgaggttgttgtgaggtcaattagtggtttagaactctgaatgggttggctaatggtagaaactaatataaagaataggtgagctggccggtcgcggtgg

SEQ ID NO: 37503 - DNA, 201 bp, Homo sapiens
agcattgttgattggtgttcttttaagttatgaggtgtggacataccatgttacgtttttaaaatgtgtctaataggtttatctgacagaaaatggccccwcctgacctatccataacttccttttaagtctaaacgtgtgtcctgtgatccaatgtttgtctagagttccgtgtcatgttcctccaacatactgtgtcat

SEQ ID NO: 37504 - DNA, 201 bp, Homo sapiens
cctgtgtaacaaatctgcacatcctgcacacgtacctggaacttaaaagttgaaggaaaaaataagaaaaatggtatgtcgtgtctctgtacctttttcartttcattttaaaaatagacaatacctggccgggtacggtggctaacacctataatcacagcactttgggaagctgaggcgggcagatcacttgaggtcag

SEQ ID NO: 37505 - DNA, 201 bp, Homo sapiens
ttgtggatagttaaggtagtgtccatgatttgataaccaactggaaagtttccttatgttttcttcatgctgaactgctaaaaatttaggtgagattaatyaattgtcattattatattaaatgaaaagccaaagagtgaacttagggatgaaagcttagaggaccagtggtctgaaaatttcaaattttaattctgattt

SEQ ID NO: 37506 - DNA, 201 bp, Homo sapiens
acctttgccttacatatgtagatgcatgaagggtttaaatagtcagcactttaaaataatgaacttgaatgtctctgccattttttgttccttgggtagtrcctttgtctcactactcattgtagtttgttcttattatttgttgcattattgtggttactctcttgtggatagttaaggtagtgtccatgatttgataac

SEQ ID NO: 37507 - DNA, 201 bp, Homo sapiens
tgtgaaggtttgaacgtttgcctacattctgcagccccagttattaacaatacagtgctgtcttgtcaagaacaatttctttatatcagcgaaacttcagrtagtttaaacttatttctacaacaggagagctgggtacagattttcattaaagcacatttattttacgttagtattgaccttgaaagttaatttttgaaa

SEQ ID NO: 37508 - DNA, 201 bp, Homo sapiens
caggaatatagagtcacccaaggtcctaggaactgtgaatgagctaattttgaaagtgccctaggagccagtgactatttttgaattatagcttgagaatracaaggaaagcaccaagatgaaagatgagggtgtaagggaacagaatgggcaagtggttgaagtgtgaatttcagcaggtgaacctcaagatgtatcttg

SEQ ID NO: 37509 - DNA, 201 bp, Homo sapiens
gaatctgcacatgatggggatggagtgtatttgcacttgagctattcggaggaaggactttattcaaggctcagtggcattattccgagtggactcatgtrcaaaggcacattttagggtagagagtaccaaactagttctgaattgcctcagattccgcctagggagcatgcttacggcaaacagttgttaaaaaccata

SEQ ID NO: 37510 - DNA, 201 bp, Homo sapiens
gtggcacacgcctgtaatcccagctactcgagaggctgaggcaggagaatcacttgaacccaggatgtggaggttgcattgagccgagatcatgccattgyattcagcctgggcaacgagagcaaaacttcatctcaaagaaaaaaaaaaagaaaaagaaaaatatgttttggttaggggagggagatggaatctttttat

SEQ ID NO: 37511 - DNA, 201 bp, Homo sapiens
atttcacggaatacgaaactcatgtagcttctatatagaaatgtgaaaaatgaaagcttgtctctagttccctgcctcttaaagacttcaaactgcttccyttcctggtttctgtatctcaaatcttttgtcaactctgatcctgatcctgccttctagttctgcatgtgtcttctcctgaccctcctcatgcaaccaagt

SEQ ID NO: 37512 - DNA, 201 bp, Homo sapiens
tttttctgtagtggtgctgaattgtgtgtgtgtgtgtgtgtgtgtgtgtgtgtgtgtgtgatgagaaaaagcattggaaacttgagacagaaaggtaggtwaggcctaccatgaaaaaaatcctcaataaatgtttgtgggaaatgtgacaaagtaggaattcaagtttcaatcaaaagtggtatgaccaactataaacaa

SEQ ID NO: 37513 - DNA, 201 bp, Homo sapiens
gttcatgcctttgttgccctgatgcacagtcgggaaaggatgacgagaagggagctcagtaaagacctttcagggattgtttctgagtttgtcattgccayctgtcctcctctctcccctggcttttcagactattcccattttgtgagactcctgggtttctgattggtgtggcgtggataccataggtagatgtaacac

SEQ ID NO: 37514 - DNA, 201 bp, Homo sapiens
aggaaggagggagaaggggaggcctggcgttgaacacttgttatctggtgtcacacttacaccatcctctgtgagagtggctaactccctgcaagaactgyagggccaggattctaactcagacaccctgaatatgcaggagcagggctggggttcaggggagcagggacagtagaggagtcaggtgaacccactgaccag

SEQ ID NO: 37515 - DNA, 201 bp, Homo sapiens
gtatttatttgttgagatggagtttcactcttgttgcccaggctggagtgcaatggcgcgatgtcggctcactgcaacccccgcctcctgggttcaagcarttctcctgcctcagcctccggagtagctgggactacaggcgtgagccactgcacccggataatttttatttttttgtttttttgatttttttgagatgga

SEQ ID NO: 37516 - DNA, 201 bp, Homo sapiens
aacgtgttcactgttcctccaggggaatttccacagtcactctcagagcattcttagagatacttttgcaataactgagctgtccttttttttttttttttatgagaaggaatcttgctctgtcagccaggctggagtgcagtggcacgatctcagctcactgcaacctgtgcctcccaggttcaagcagttctcctgctg

SEQ ID NO: 37517 - DNA, 201 bp, Homo sapiens
gtaccaaactagttctgaattgcctcagattccgcctagggagcatgcttacggcaaacagttgttaaaaaccatacacttgtttatttatttgagaattrcattttccatattgcaaatatacctgttactatttgagactgaactgtgtaacttcaccattggcccacagcgtcccagctctgaccccccagactggcg

SEQ ID NO: 37518 - DNA, 201 bp, Homo sapiens
ggtagagagtaccaaactagttctgaattgcctcagattccgcctagggagcatgcttacggcaaacagttgttaaaaaccatacacttgtttatttatttgagaattacattttccatattgcaaatatacctgttactatttgagactgaactgtgtaacttcaccattggcccacagcgtcccagctctgacccccca

SEQ ID NO: 37519 - DNA, 201 bp, Homo sapiens
gggtagagagtaccaaactagttctgaattgcctcagattccgcctagggagcatgcttacggcaaacagttgttaaaaaccatacacttgtttatttatttgagaattacattttccatattgcaaatatacctgttactatttgagactgaactgtgtaacttcaccattggcccacagcgtcccagctctgacccccc

SEQ ID NO: 37520 - DNA, 201 bp, Homo sapiens
agggtagagagtaccaaactagttctgaattgcctcagattccgcctagggagcatgcttacggcaaacagttgttaaaaaccatacacttgtttatttatttgagaattacattttccatattgcaaatatacctgttactatttgagactgaactgtgtaacttcaccattggcccacagcgtcccagctctgaccccc

SEQ ID NO: 37521 - DNA, 201 bp, Homo sapiens
tagggtagagagtaccaaactagttctgaattgcctcagattccgcctagggagcatgcttacggcaaacagttgttaaaaaccatacacttgtttatttatttgagaattacattttccatattgcaaatatacctgttactatttgagactgaactgtgtaacttcaccattggcccacagcgtcccagctctgacccc

SEQ ID NO: 37522 - DNA, 201 bp, Homo sapiens
tagacggatataggtgggtgccctgaggtgaacagctttttctccctgagccacgtgtgcttttcccatctgtaaaatatctttagtgatacttacctggycatgctgtgggaagggtttactgtgataacatgtgaaagttcttgctatatagagcaagtaatcaagatatttagccacttttcatattttgtttcatat

SEQ ID NO: 37523 - DNA, 201 bp, Homo sapiens
ttatggcacaggacttttaaaatgaagctgtgaaagtttacagtccatagagaataaaaatctagaagtttaaaagaaatgattggtagtttctttactcrttcagaaaaacaatgccatatttcccaaaattcctggttatggaaacgcaaccaggaaatggacttccttaaggcaaggacgaccatcctttgttggaga

SEQ ID NO: 37524 - DNA, 201 bp, Homo sapiens
gggggaaaaccattctctctgagctttgcttggcttttccttttgccaccaagccactgaaaagtataggaagaggcaaggcatcgcaacatgggatagcygcctcctatacgagactgttaatactgtgtatcagtaagtgaggtggaagagggagttaggttatcagtttgtttctcacccactttatgaacattgcaa

SEQ ID NO: 37525 - DNA, 201 bp, Homo sapiens
ggggtttcgctgtattgccaaggccagtcttgaactcctgagcttaatcattttgcctgcttcagcctgccaaagtgctagaattacaggcgtgagccacsgcgcccggccagtcttaattttttttaaagcatttttagatttacaggaaaactgagcagatagtacagggtatctcaatactccctcacctccctttct

SEQ ID NO: 37526 - DNA, 201 bp, Homo sapiens
aattcctggttatggaaacgcaaccaggaaatggacttccttaaggcaaggacgaccatcctttgttggagacatttgattggttgtactattgccaggtrcatttgtgttattttacaaattctagtagaagcgggtataatggtaggagctgggcagagaagtgtttccagtcatttttcctattagaagccatctcta

SEQ ID NO: 37527 - DNA, 201 bp, Homo sapiens
cagaagtttttaattgtaacaaaattcagtttattcgttttttctttcaaagctcatgattttgatgtttctaaaaactctttggctggctaatcaaagcycatgaaaagtttctgtgtttctttctaaaacttagtttttgtgttttttttaatgcagtctcactctgtcaccaggctggagtgcagtgacgtgatctcg

SEQ ID NO: 37528 - DNA, 201 bp, Homo sapiens
actagtgcactttaggaggccgaggcggcggatcacctgaagtcaggagttcgaggccagcctggccaacatggtaaaaccctgtctctactaaaattacaaaaaaaaaaaaaaaaaaattagccaggcatggtggtgggtgcctgtaatccccgctactagggaggatgcggcaggagaccatcacttgaaactgggaga

SEQ ID NO: 37529 - DNA, 201 bp, Homo sapiens
tattagaagccatctctattggaggaaaaaaacaaggcctgctgcctccaaaggttaatcagtaatgacataattcaaacagctggagaactggggagaawttggagtttagcaaatgatttcttgcatgtgcgattgtgttccatttctctccattcatttatggagagaatgataaatgtatcaagggtggtgaagtat

SEQ ID NO: 37530 - DNA, 201 bp, Homo sapiens
ctagtgcactttaggaggccgaggcggcggatcacctgaagtcaggagttcgaggccagcctggccaacatggtaaaaccctgtctctactaaaattacaaaaaaaaaaaaaaaaaaattagccaggcatggtggtgggtgcctgtaatccccgctactagggaggatgcggcaggagaccatcacttgaaactgggagac

SEQ ID NO: 37531 - DNA, 201 bp, Homo sapiens
caaggcctgctgcctccaaaggttaatcagtaatgacataattcaaacagctggagaactggggagaaattggagtttagcaaatgatttcttgcatgtgygattgtgttccatttctctccattcatttatggagagaatgataaatgtatcaagggtggtgaagtatataaagagcattgttttttaaatctcagtaat

SEQ ID NO: 37532 - DNA, 201 bp, Homo sapiens
tagtgcactttaggaggccgaggcggcggatcacctgaagtcaggagttcgaggccagcctggccaacatggtaaaaccctgtctctactaaaattacaaaaaaaaaaaaaaaaaaattagccaggcatggtggtgggtgcctgtaatccccgctactagggaggatgcggcaggagaccatcacttgaaactgggagaca

SEQ ID NO: 37533 - DNA, 201 bp, Homo sapiens
atgctgtgattacaggcgtgagccaccacacctggcctaatgtttaaaattttttgtagatatgggggtctcgctatattgcccagctggtcagaaatacrttttattactacttaatgcttcgaaagcaaagtgatgggccagagaacacaaaggcaagggtgacgagccctcgggaagtagggaaaggcctcatgggag

SEQ ID NO: 37534 - DNA, 201 bp, Homo sapiens
aagatatatggtatccatatacccagcttcatatacaaacctttttttaaaaattaaaaatctttgtctctgaatataaaaatgtttcatgctcattattwaaaaaaacttagaaaaatagcaacttataaaacatcagaaggccattttctaaatcctgtcacccggagattaccactatgaacattttgatgaactctt

SEQ ID NO: 37535 - DNA, 201 bp, Homo sapiens
ttaagatgtctttccacaggttcccatcccactcttccataagacaatctctatttcctattaaataaaaaagagtattttgcaaaagcatttggcttttygaacaaactaaatattattgcattctgtgcttgtcccgtatcgctgagtgcaggaatagtccaaaccatactctccaaagcttctgcaggcctgttccat

SEQ ID NO: 37536 - DNA, 201 bp, Homo sapiens
atttgggtataacactcaggattactttccacatggaaggtagaaatggctttgcaatatgtatcatggagataatataaggtatgaaatgaaaattgtcktctctagtttattgggaaaaaaactagaagtcatagggtcatcaaattgtaaagagaaaagaattttgcacatcatatagtaaaatttcacttttttccc

SEQ ID NO: 37537 - DNA, 201 bp, Homo sapiens
tacttgggaggctgagacaggatcattgcttgaactcaggaggcggaggttgtagtgagccactgcactccagcctgggtgacagagtgagactctgtctaaaaaaaaaaaaaatatatatatatatatatatatatatatatatataatatattaaattaaattaaataaagcatatcagtcctattggagtagagcccc

SEQ ID NO: 37538 - DNA, 201 bp, Homo sapiens
agacaggatcattgcttgaactcaggaggcggaggttgtagtgagccactgcactccagcctgggtgacagagtgagactctgtctaaaaaaaaaaaaaatatatatatatatatatatatatatatatatataatatattaaattaaattaaataaagcatatcagtcctattggagtagagccccattgttagagctca

SEQ ID NO: 37539 - DNA, 201 bp, Homo sapiens
acaggatcattgcttgaactcaggaggcggaggttgtagtgagccactgcactccagcctgggtgacagagtgagactctgtctaaaaaaaaaaaaaatatatatatatatatatatatatatatatatataatatattaaattaaattaaataaagcatatcagtcctattggagtagagccccattgttagagctcatt

SEQ ID NO: 37540 - DNA, 201 bp, Homo sapiens
aggatcattgcttgaactcaggaggcggaggttgtagtgagccactgcactccagcctgggtgacagagtgagactctgtctaaaaaaaaaaaaaatatatatatatatatatatatatatatatatataatatattaaattaaattaaataaagcatatcagtcctattggagtagagccccattgttagagctcattta

SEQ ID NO: 37541 - DNA, 201 bp, Homo sapiens
gatcattgcttgaactcaggaggcggaggttgtagtgagccactgcactccagcctgggtgacagagtgagactctgtctaaaaaaaaaaaaaatatatatatatatatatatatatatatatatataatatattaaattaaattaaataaagcatatcagtcctattggagtagagccccattgttagagctcatttaac

SEQ ID NO: 37542 - DNA, 201 bp, Homo sapiens
tcattgcttgaactcaggaggcggaggttgtagtgagccactgcactccagcctgggtgacagagtgagactctgtctaaaaaaaaaaaaaatatatatatatatatatatatatatatatatataatatattaaattaaattaaataaagcatatcagtcctattggagtagagccccattgttagagctcatttaactt

SEQ ID NO: 37543 - DNA, 201 bp, Homo sapiens
attgcttgaactcaggaggcggaggttgtagtgagccactgcactccagcctgggtgacagagtgagactctgtctaaaaaaaaaaaaaatatatatatatatatatatatatatatatatataatatattaaattaaattaaataaagcatatcagtcctattggagtagagccccattgttagagctcatttaacttaa

SEQ ID NO: 37544 - DNA, 201 bp, Homo sapiens
gaggttgtagtgagccactgcactccagcctgggtgacagagtgagactctgtctaaaaaaaaaaaaaatatatatatatatatatatatatatatatatrtaatatattaaattaaattaaataaagcatatcagtcctattggagtagagccccattgttagagctcatttaacttaattactgcattaaagacccttt

SEQ ID NO: 37545 - DNA, 201 bp, Homo sapiens
acaatgagttatctagatcccactggtacctagagaagaaattagcacaaagctctgcatggaggctcggctccagcacaggaatccgtgtccccctaggkgttggtctgggaccagctggaggcccacttatgaggactgcagacacattaagagctcaggatgcacctctgttgaggtgtcccaggacccttggatatg

SEQ ID NO: 37546 - DNA, 201 bp, Homo sapiens
acgcgcctccccagcagccaatgggcggccgcggcgggcggggcagggagggcgcagggaggcgcgggcgccgctctcttcaacttgagcccggggcagtscgcgcggctgcttgagcgacggcaccgctggctggtgccggcaccctggggcttgtcgtagcacctggggcggcatccccgcccgacttcggaaggaccg

SEQ ID NO: 37547 - DNA, 201 bp, Homo sapiens
cggggcatttctgccgtggacagcgttctatgattgaggcagtgactgccttcgcctcacgtgccccctggtgaggccacatttctgtcttcctgtctacwttaggactgaaagatatttcagggttttggtaatccagtatttggattaaaagcaatatcctttcgtgtagaaaaactgtgcatttccaaatgattttag

SEQ ID NO: 37548 - DNA, 201 bp, Homo sapiens
gcgtgaagatttaaatattgcttacaacactctattagcttgtgggggaatctgtgccttttctattatctgtttccctataccaatattgtaaccaggcwcgtctatggattcctaattaatgtgtagctgtgaatcttcattactgccttgggtgggagaaggcggaaggagggggcaatcccattagtctttttcttt

SEQ ID NO: 37549 - DNA, 201 bp, Homo sapiens
caacagtccttgcatgcctttctctgcctaagctcacgtacactctctgcctcttgctgggaagacgtttctcccctttgatatttgaggcaatgaatggwcttctcccccattgtacattaacaaggttctattttcctctaggatttgcatgcagccactgttaacccggaccccagtttaaaagagtttgaaggagca

SEQ ID NO: 37550 - DNA, 201 bp, Homo sapiens
ggtaatctggtttgggagaatggtggagaactggatgcaggtaggagcagtggaagtggcaagaaatgactggattctgaatatttgttcaaagtggagcsagcacggtttgttgatggactgaatgtggggtgtgatagaaagagaggagtcaaggacaattctgaggatcttagtcggagcagctggaagcaggaggct

SEQ ID NO: 37551 - DNA, 201 bp, Homo sapiens
cagtccttgcatgcctttctctgcctaagctcacgtacactctctgcctcttgctgggaagacgtttctcccctttgatatttgaggcaatgaatggtctyctcccccattgtacattaacaaggttctattttcctctaggatttgcatgcagccactgttaacccggaccccagtttaaaagagtttgaaggagcaacc

SEQ ID NO: 37552 - DNA, 201 bp, Homo sapiens
aatactattttgaatgaaaaaaatactattttatttgacatagtcaataaagaagaaaagctataataaactatttataatgataatgtgcagagcagagktttctttgaaatgggagttaagaattacataaaggtgtcacagagtgattgaacagttactatacagcatattccctaccttaaaggttagggtcctgaa

SEQ ID NO: 37553 - DNA, 201 bp, Homo sapiens
tggatctaccactcaccagctttgtgctgaacccagtttcctcatgtataacatgggtacagtaacttagtatcaacctcaaagggttggggtgaggactsactgagataatacttttgacatttgaatagaggtggtaggagacaaggttggaatggcaggccaggggagtcagctgggacactgtgattttactgacta

SEQ ID NO: 37554 - DNA, 201 bp, Homo sapiens
tcccccaaaatgatgtataacgtgatttggtacctaagtttttagacacttgaatgttttttctctcttccatttaaacttgaaggttgtgaaatgtagtscatattcattcatactctgttcatttcaggagatacccacaagcagaatggggtgactggggcctgctttgacctcatattttcctatttctacaggaat

SEQ ID NO: 37555 - DNA, 201 bp, Homo sapiens
tttggatccaatccgtttgctgctgtcttatccttatttgcagatgggacctgccctttgcaatagcatcaatagaaagataagctgggagggaagggtcrctgggtacattttagcaagtcttagtataattcatatgagtgcaaatatttattaaaaaacacccctcgtggggccaggcgcaatggctcatgcctgtaa

SEQ ID NO: 37556 - DNA, 201 bp, Homo sapiens
tgaagtggtgattcattgtggttttaatcggcattttccaaacaaatgatgttgagcatgtttcatgtgcttgtgaaaaacatttatcttctttggtgacrtatctgttcagatgttattgcccatttaaaaaattgtgttgtttgttttcttattatcgactttattcatagttgccaaaactggaaagagtaaaatacc

SEQ ID NO: 37557 - DNA, 201 bp, Homo sapiens
ggggacttctgcagtgctgataatgttctggtttttcatctggtgtattttcagtttcggaaaatacattgagctgtccattgtcgtgtgtgcattttctrtatgttatatgtcactgaaaagtttttttttttttccaatcaacatgacatctaacctctccaatacagaaaaaaaaatttcctcatttcaagcttttaa

SEQ ID NO: 37558 - DNA, 201 bp, Homo sapiens
aatgagttatctagatcccactggtacctagagaagaaattagcacaaagctctgcatggaggctcggctccagcacaggaatccgtgtccccctaggtgytggtctgggaccagctggaggcccacttatgaggactgcagacacattaagagctcaggatgcacctctgttgaggtgtcccaggacccttggatatggg

SEQ ID NO: 37559 - DNA, 201 bp, Homo sapiens
ggtggtggtggttattttagcattctaaaatgtgtgaagtggtgattcattgtggttttaatcggcattttccaaacaaatgatgttgagcatgtttcatrtgcttgtgaaaaacatttatcttctttggtgacgtatctgttcagatgttattgcccatttaaaaaattgtgttgtttgttttcttattatcgactttat

SEQ ID NO: 37560 - DNA, 201 bp, Homo sapiens
cactttccttagagatagagatggtatcttattcatctttgtagctacagtgcttagcatggtgctgggtgtatagtaggtgttctgcatatgttttttamataaaaaatcaactgacagtaaatcgacttgatggccacaaaaatgggcaaaaataatttctgcgtaggagtcacccttagaagggagcatgaaggggac

SEQ ID NO: 37561 - DNA, 201 bp, Homo sapiens
agttatctagatcccactggtacctagagaagaaattagcacaaagctctgcatggaggctcggctccagcacaggaatccgtgtccccctaggtgttggkctgggaccagctggaggcccacttatgaggactgcagacacattaagagctcaggatgcacctctgttgaggtgtcccaggacccttggatatgggctcc

SEQ ID NO: 37562 - DNA, 201 bp, Homo sapiens
ttgtttgtttgagggtggtggtggttattttagcattctaaaatgtgtgaagtggtgattcattgtggttttaatcggcattttccaaacaaatgatgttsagcatgtttcatgtgcttgtgaaaaacatttatcttctttggtgacgtatctgttcagatgttattgcccatttaaaaaattgtgttgtttgttttctta

SEQ ID NO: 37563 - DNA, 201 bp, Homo sapiens
tgtagatgttctggatggtcatcctgacacccacccactggatatcagcctcggttgtcaatgtccagaaatctgtgtttaacctgcgatggtttgcaagraaacccactggatctcttagttaaattaatgccccttctctcagctttgttacctagaaaaaaaaattaatgcccctttctctgagatgatctggaagag

SEQ ID NO: 37564 - DNA, 201 bp, Homo sapiens
gttatctagatcccactggtacctagagaagaaattagcacaaagctctgcatggaggctcggctccagcacaggaatccgtgtccccctaggtgttggtctgggaccagctggaggcccacttatgaggactgcagacacattaagagctcaggatgcacctctgttgaggtgtcccaggacccttggatatgggctcca

SEQ ID NO: 37565 - DNA, 201 bp, Homo sapiens
ttggcattgccaggattttttggtttgtttgtttgagggtggtggtggttattttagcattctaaaatgtgtgaagtggtgattcattgtggttttaatcsgcattttccaaacaaatgatgttgagcatgtttcatgtgcttgtgaaaaacatttatcttctttggtgacgtatctgttcagatgttattgcccatttaa

SEQ ID NO: 37566 - DNA, 201 bp, Homo sapiens
tggatttgggtataacactcaggattactttccacatggaaggtagaaatggctttgcaatatgtatcatggagataatataaggtatgaaatgaaaattrtcttctctagtttattgggaaaaaaactagaagtcatagggtcatcaaattgtaaagagaaaagaattttgcacatcatatagtaaaatttcactttttt

SEQ ID NO: 37567 - DNA, 201 bp, Homo sapiens
ctcatcttgggtaaatacgtaagagtgggatcactgggttgtagggtgacagcacgcttaagtttatgagaaactgccagcccgctttctgaggaggtgcrccgttttgcattcgcaacagcaaagtaagaaagttcagttgctccgcatcctcaccagcagttggcattgccaggattttttggtttgtttgtttgaggg

SEQ ID NO: 37568 - DNA, 201 bp, Homo sapiens
ttatctagatcccactggtacctagagaagaaattagcacaaagctctgcatggaggctcggctccagcacaggaatccgtgtccccctaggtgttggtctgggaccagctggaggcccacttatgaggactgcagacacattaagagctcaggatgcacctctgttgaggtgtcccaggacccttggatatgggctccag

SEQ ID NO: 37569 - DNA, 201 bp, Homo sapiens
tcttgctctgaaaaataggaagggggaaagttaagttaatggcagtagtgggcccagggcttcaaagggccatgcatcgtgttttctacctgagtgctcartgtattgtagacagtctgggggaaatggcaggaacagctggagcgctcatggggaccagtgtagaaatgctctctgggtcctccctggccaccgtggtct

SEQ ID NO: 37570 - DNA, 201 bp, Homo sapiens
ctggcctgcactgtaaggccatactcaagccgccatcctgtaggagctttatatggattaaataatggaattttatggcactctcaggacctgaaggcctytatgattcccatttcacagatgaagaaactgaaaaacaaagaggctaagggccctgaccaagggcagacagctgataaatgacacacacacgcacacaca

SEQ ID NO: 37571 - DNA, 201 bp, Homo sapiens
tccatctacatatacacatatagacatgcatatatgtgtgtatatatgcatatttacatatacatgcatatatacccgtgtgcacatatatacatgcatatgtacatgtatatacacacactctcaataagtgcatgtgtgggacactcctttctgccacctctgttttaggaaaccttaaatttgccaggagtctgtttg

SEQ ID NO: 37572 - DNA, 201 bp, Homo sapiens
gctgcagaattgtgaacttgaaagcttaacaacatgtttgtcagagaacttgagttttgagataactttggtttggttttgaaaaaaaaaaaaaaaaaaawatatatatatatatatatatatgcatagaaaatattccttctgcagtcagtattttcagcagatgggaaagggcaggagtgacttgagcttccagccatt

SEQ ID NO: 37573 - DNA, 201 bp, Homo sapiens
ctggaaatggaagtttcctccctcctcattgggactctgaaatccccttaactaagtactggtgggaatttttgttttcttttttcttttcttttcttttsttttttttttttttttttttttttgagacaggtttcactctgtcacccaggctggagtgcagtggcgcacctcagctcactgtagcctctgcctcccagt

SEQ ID NO: 37574 - DNA, 201 bp, Homo sapiens
aatggaagtttcctccctcctcattgggactctgaaatccccttaactaagtactggtgggaatttttgttttcttttttcttttcttttcttttcttttytttttttttttttttttttgagacaggtttcactctgtcacccaggctggagtgcagtggcgcacctcagctcactgtagcctctgcctcccagtcaagc

SEQ ID NO: 37575 - DNA, 201 bp, Homo sapiens
atttttgttttcttttttcttttcttttcttttcttttttttttttttttttttttttgagacaggtttcactctgtcacccaggctggagtgcagtggcrcacctcagctcactgtagcctctgcctcccagtcaagccattctcctgcctcatcctctcacctcagcctcctgagtagctgggactacaggcgtgtgcc

SEQ ID NO: 37576 - DNA, 201 bp, Homo sapiens
ggaggagtgaggagctttggcctcccctgaataagcgtgaggaagcaaagattccccagcaataaagtagatgctgaatccccagcaataaagtagatgcygaatgtcatctcagcccccactggagtgagactgcctttgtgcattctctccagcacatcagtggttcctataaatctcacaatgattgcttttctcaag

SEQ ID NO: 37577 - DNA, 201 bp, Homo sapiens
ggtgtcttcttcctttcttggagctcacactatgctggcgtggggcccattgcaggttctctgcactggagcatccctgggaagcagtgtggatgacaccraggtgagacaagaagatactgctgctgatggccgccttggaggtcagctgagcatgtggcagtaggcgcaaacaacgaggggcctcaggtcatctgcact

SEQ ID NO: 37578 - DNA, 201 bp, Homo sapiens
ccggatggagaactgggtcaagcttcactccagagaatccccagacacctctctggcagaacccactgacatcctagctttgaaaagcatttcagtatttaaaaaaaaaaaaaaaaagcaataacaaagcctagttatatttaaaaccatatacataatgacagtgatcgtttctgcctgtaatgaccacaaatgccagtt

SEQ ID NO: 37579 - DNA, 201 bp, Homo sapiens
tcttccccagatatcctcctggataatgtcctttctcatttaattcttactcaaatgttagtctgtcggtgaaacctaccctgatcgatgttttaaaaatygcaaaccttcctgtcactcctccccaaatccctcttaaccttttaatttttttccctgtagatcttagccccttctaacatacctgcatactttacttac

SEQ ID NO: 37580 - DNA, 201 bp, Homo sapiens
aacagtgttatttttctaatttcataagaattttagaaacgtattttcctaaaatggtttgttaaatacctcatccgactcagtaatgtttatttttgccrtatctccttctctttataacttctgtactgatatctgaccttaaacttagtcatgccaggaatcataacccctatatttcaaggtatatgaaccatagta

SEQ ID NO: 37581 - DNA, 201 bp, Homo sapiens
ggtttcaccatgttggccaggctggtctcgaactcctgactcaaatgatcctcccttctcggcctcccaaagtgctgggattacaggcaggagccactgcrcctggcctggtctcaaattcttacgctcgagaaaccctactgccttggcctctcaaagtgctgggatgcattagccgctgtgcctggcaagttgaatggc

SEQ ID NO: 37582 - DNA, 201 bp, Homo sapiens
tgagtagctgggactacaggcgtgtgccaccatgcccagctaatttttaaatttttttgtagaaacagggtcttgccattttgcccaagctggtctcgaaytcctgggctcaagcagaagccacctcagcctcccaaagtgctgggattataggtgtgagccactgtgcccagctgagaatgcttttaagttaacaatgaa

SEQ ID NO: 37583 - DNA, 201 bp, Homo sapiens
tggatttcagattttcagattagggatgattaactggtaattatataatgcaaatattccaaaatcccaaaaatctgaagttcaaaacccttctcttcccragcattttgggtaaggaatatttagcctatagttagtgagcagtttctggccaatcagaaggatgctgactgtagatgttctggatggtcatcctgacac

SEQ ID NO: 37584 - DNA, 201 bp, Homo sapiens
agcctcccaaagtgctgggattataggtgtgagccactgtgcccagctgagaatgcttttaagttaacaatgaatacttagaatctatgcttagaatacaytgaagacattatttcattgccatgcaaaaatgtgtatcttgtgtcttaaaaggaaagcatgttgatgtcatgactttaatgctacacaaatgtatatctt

SEQ ID NO: 37585 - DNA, 201 bp, Homo sapiens
tttggaaggagcacccttaagcctgaggttctcagtagtgctatgttgtatactatgtgcacactctaaaaggaaatagtgttcttaggttatacttcatstcaagactttaatatcactagttagaaaatacgtgttttattctgtgtggaggtatttagaattagacattccagtgataaaatattaaaatattttact

SEQ ID NO: 37586 - DNA, 201 bp, Homo sapiens
tcccgcctcagcgtcctgagtagctaagactatagatacatgccaccatgcccagccttttccatttatttgacttttatcttattctgacaggttttttktttgtgtgtgtgtgtgtgtgtggaatttttaaggttttctacccatgagattatgtcatctgcaaacaaagataattttactgtttcctttccaatttag

SEQ ID NO: 37587 - DNA, 201 bp, Homo sapiens
tatccatatcagtccaggtcccataagaaaacaggtggcatatggtaggtaatgggaagacaatggactctagtgtggagggaatgccactcctaccttgrtgcttcaggacaattaatctgctagtgttgtttagaatggattgaagaacagaggggaagaaggtagggagaccaaattgtttcattaaattatataaaa

SEQ ID NO: 37588 - DNA, 201 bp, Homo sapiens
ccaccctcctcatcctccccactccagtcctctggtcccatgagtgaaatattttatcagtctgagcgttctccttcctggataggcaaggctgctgtcaktgagatgtttttgacctcttgggtgtgacctgactccgctgggtccctgccaagcttctcctcagagagaattgaatcgatcaggttgggtctcaaagca

SEQ ID NO: 37589 - DNA, 201 bp, Homo sapiens
tgattgcaagttctgatagcagaagtgctgtggtgtgacttgagttttaacaggattcctctgttgagaatagagtgtagagggcaaggatagaattaggscaagcagcaaggaggtcactggaataatccaggccagatgaatgagggcttgggtaaggggcagcaatggatctacgctgaaggtcgagtcaggactgtt

SEQ ID NO: 37590 - DNA, 201 bp, Homo sapiens
attgatgttggaatgctggccccatcacagcctccctggcttttgaacacagtgggcagatttctgcctcagggccattgcattggctggttcttcttgtrttctcttccccagatatcctcctggataatgtcctttctcatttaattcttactcaaatgttagtctgtcggtgaaacctaccctgatcgatgttttaaa

SEQ ID NO: 37591 - DNA, 201 bp, Homo sapiens
ctaccaacaaatgaaattagatgtcagaagataaacccagattagccattttgattttaatgtgttattagtgcatattctgcatgctgatatgtgttgayggcatttctctcagccgaaatggtttgtcagaggcagagtaacagactctccataataaagggtctggggggatttggaggaaagactactaaccaggga

SEQ ID NO: 37592 - DNA, 201 bp, Homo sapiens
aaacagtctggcattcttcagaaggtgaaacatagttactttagacccagcaactcagttcctaggcgtagacccaagagaagtgaaaacgtttgtgcatrcaaaaacgtgtatgcaaatgttcacagcagaattattgatgagagtcaaaaagcgaaacaacctgaatgtcctgacaaatcaactgacaattagataaat

SEQ ID NO: 37593 - DNA, 201 bp, Homo sapiens
caggatcctttgttgatcacatccgccaagcccctgttggcatgtaagggaacatagccacaggttcctgggatgtggggagggatcatgactctcccgcmgcagcccttttcagaagtcaggtgccaaaaaggcaggcttttcacacaggcaagtgatgcttggatttcgtcttaaatcaatgaaattcgatcgcttgta

SEQ ID NO: 37594 - DNA, 201 bp, Homo sapiens
ttttgataagagattatgttgactttctagttcaatattaagagctcttatgttgacttgcagatcaatattaagagctctgatacgtgaacatgggacaygtttccatttctttcagttttctttaatatctttcaacagtgttatattgctttcagggtacaagtctaatacttccatatcaaatttattcctaagtat

SEQ ID NO: 37595 - DNA, 201 bp, Homo sapiens
tctttgaatatttccatatttctatattgtgtggggaaaaaaagaaaaaaaaagcatttgagtaatgtaaatttactggtttggattaaatgagaatgaargtattcatgagagtccctagaatcagttaatccaagtcctgggttaagaaataagaaatcagtagagaatttgttctctgtttttgtagagaatgaggtt

SEQ ID NO: 37596 - DNA, 201 bp, Homo sapiens
tgagcacacggaggtgctgggagggtggcatgctccaggagggcttggaaactgtgcgcctgcccccacctcttgcctggtgcatcctttccatttgactrttcatgagttatatcctttttgataaacctttatgtatatgcaaagaaacataagtgtcttcctgggttctatgagccaacctagtgaattattgaacgt

SEQ ID NO: 37597 - DNA, 201 bp, Homo sapiens
attgttttttaaatctcagtaatttatggacctctatttagaggaaacatttctcacaaatcctcagtaataaatatttttattatgaaggagcttcaatrtaaactaggtataaactccttacgcgtctagctcttacttaactgtaaagcagtgatagatttatagagcaaattcaaacaaaactacaaaaccaataaa

SEQ ID NO: 37598 - DNA, 201 bp, Homo sapiens
acttgtggttccatttccaattcagccattatagatgccccgaggaaacaaacaaaggggaaaaataagatacgaccaaattcattatgatttcacttttrtggttaaatagatttctagctagagctggagttgcttctcaattaaacagatatttctggagggcctgaaatctgccaaaccctatactagtctgtgact

SEQ ID NO: 37599 - DNA, 201 bp, Homo sapiens
ctttgaaaccatctctgtcctgactgacttcagtgcagatagcattggttctaaaatcctttcaagttccagaaatggcctggatcttgttcctgttaacrgaatagacaaaccgcagagcagtcttagagtttttgagatcacaaaggctgtctggggaacataaaagctgcttttccaggtgttttccatcgcatcggg

SEQ ID NO: 37600 - DNA, 201 bp, Homo sapiens
tgttaacagaatagacaaaccgcagagcagtcttagagtttttgagatcacaaaggctgtctggggaacataaaagctgcttttccaggtgttttccatcrcatcgggtttctaatgaatcttgctcctttggcattactgggatactttccaagtataaagtcactccactccatttctgaattggctaaaaccctagat

SEQ ID NO: 37601 - DNA, 201 bp, Homo sapiens
agccttctgagtaactgtgactacgggtgcacaccaccacacctggctaatttatatacacacacacacacacacacacacacacacacacatacacacayatatatacatatacatacacacacacacacgtttgttttttttttgtaaatacggggttttaccatgttgtccaggctgttctcaaactcctgggctcaa

SEQ ID NO: 37602 - DNA, 201 bp, Homo sapiens
gccaacttcaatggtcttggctttattttggggagaaagcggcgtccagcctcatggagttggatttgtagtttcaaagacttgcactcatttgtgttttygaactttgaagggtggggcatggagacctgccatttctgttgggataattctggctgtgagcctccagtctgcttggccagattttatatactctaatct

SEQ ID NO: 37603 - DNA, 201 bp, Homo sapiens
cctacctcagccttctgagtaactgtgactacgggtgcacaccaccacacctggctaatttatatacacacacacacacacacacacacacacacacacayacacacatatatatacatatacatacacacacacacacgtttgttttttttttgtaaatacggggttttaccatgttgtccaggctgttctcaaactcct

SEQ ID NO: 37604 - DNA, 201 bp, Homo sapiens
tttaattcagatgcattttcatttatttcttaagtagaaagtaaaagaatataacttcttagaagaaagattctgtcagaggtttatagaaacgactggakgggaaatgttaaattcaaatttttcccttaaatcttcttttaaattatgtcttctgatgaaaatggtggtgttttaatcaaaggagatattcatataggg

SEQ ID NO: 37605 - DNA, 201 bp, Homo sapiens
gcgggggagtgggcacatcaacctgcagttgagctcagggagaagtaggcagattgttcagccagagtcattaaagtattcttgctgcgggccaggcatcrctcttgagtagcactccatctacacaaaatgaatagaaccatagtccctcccgccgcctggaaacatatatatatatatatgtgtgtgtgtgttcagcca

SEQ ID NO: 37606 - DNA, 201 bp, Homo sapiens
cctcacaaggcttaaatcccttaaaccaatgtgagataatatgaagggattctataaatgattgtagacctattaataataccgtaggtgtgcccactttrcatctgtcaccagcaccattgttaccacctatttctagcaacagaataaacctcctctttttatttcaacaaaatctcagcgtaagcttagtaaaactag

SEQ ID NO: 37607 - DNA, 201 bp, Homo sapiens
taggtctatatgttgggagggccagtgccaaggaaaagggccattttggtttcagttgacctcacgctttgccttggattgagattgatccatggttgtcrtagattgttttctgttgctataacgaaatacctgagactggataatttataatgaacagaaatatatttaggtcacagttctggaggctgggaagtccaa

SEQ ID NO: 37608 - DNA, 201 bp, Homo sapiens
gtgtcccaggacccttggatatgggctccagtctgcaggttccaggccccagcagcttatgatggcgctcctgataagccagacatggattggattgggcrgagtaagcccacaggaagaactggccctgtggcctacagtgtaagacacctggagttggacatgttacctgactctaggtcccccgactgaatcgatatt

SEQ ID NO: 37609 - DNA, 201 bp, Homo sapiens
aagcaccataaattctcaccctggtccatggaactggcagcccagcccctaggcctctggttgtccctggcctgaaggtgcggtttcactgtggacctgamcctttctgcccaggagcctatctgcctcctgccgccattaacctgccattcacagtgcccatggtgcccaggctgttcatgctgaggggtgcctgcagac

SEQ ID NO: 37610 - DNA, 201 bp, Homo sapiens
gattatcaaaaattgctgatttcaagaccattctcacctacacccattctcctttcattattatgcttaggcttttggatttttaagggttgtgatctcartgcagtttttttcccagtacttctcaagaaaacaaaattgagattaccataattgtctctagttttcttaaagtaaaatacaaatcttcactcagatttt

SEQ ID NO: 37611 - DNA, 201 bp, Homo sapiens
aggctggtcttgacctcctaggctcaagagatcccacccacctcagcctctcaaagtttctggattacaggcatgagccaccatgcctggtctaatgtatstattcttctacaggcttttatttttttaagctttcctttttcatcacaatatgttaacatttgaaatgataataatgccataaattaaaaacgtttcaca

SEQ ID NO: 37612 - DNA, 201 bp, Homo sapiens
ctatgtgcacactctaaaaggaaatagtgttcttaggttatacttcatctcaagactttaatatcactagttagaaaatacgtgttttattctgtgtggasgtatttagaattagacattccagtgataaaatattaaaatattttactacatctaaaatattctataaccaggtcatatgattaaccttaattatatata

SEQ ID NO: 37613 - DNA, 201 bp, Homo sapiens
ttgcgccgcctttgttccacatccaccctgtgaggtaggagctgaaatcagtcctgtcttacaaagagcagatgggtcattagaatttaagccattttctytgaggtcacacaactagcaggcatcggggctagattcaattccaggctgttggtgtggctacagagctcctgttcctgatagtaatacagccccgagaaa

SEQ ID NO: 37614 - DNA, 201 bp, Homo sapiens
gaaaagagaaaacgagagcaaatatcttgtgacatcttagtatgccatgccatagtacatgtataaaaagggtatagttgtctgttgacttgctgtgtgttaaatacatagtcatcacagtggtgtgtgttttatgactaaatcatgatgcaattatctttggatcgtagactgcactttggggagcctagaaaaatagac

SEQ ID NO: 37615 - DNA, 201 bp, Homo sapiens
agaaaagagaaaacgagagcaaatatcttgtgacatcttagtatgccatgccatagtacatgtataaaaagggtatagttgtctgttgacttgctgtgtgttaaatacatagtcatcacagtggtgtgtgttttatgactaaatcatgatgcaattatctttggatcgtagactgcactttggggagcctagaaaaataga

SEQ ID NO: 37616 - DNA, 201 bp, Homo sapiens
aagaaaagagaaaacgagagcaaatatcttgtgacatcttagtatgccatgccatagtacatgtataaaaagggtatagttgtctgttgacttgctgtgtgttaaatacatagtcatcacagtggtgtgtgttttatgactaaatcatgatgcaattatctttggatcgtagactgcactttggggagcctagaaaaatag

SEQ ID NO: 37617 - DNA, 201 bp, Homo sapiens
cctttcccagtgatgaccattaccttatgtttttatttcctctcagaaaatgtttgagtcatagatccgcatattaataataaattttaagaccggcatgrtggctcacgcctgtaatcccagcactttggaaggccaaggtggagagatggcctgagctcaggaatttgagaccagcctgggcaacatggtgaaacccct

SEQ ID NO: 37618 - DNA, 201 bp, Homo sapiens
tggatttgtcggaggtgttaaaatggtgacagaaatgaacaggatcctaaaagtcagctactttaaatatcattttcttatagctcccactatactgattstaagattgaaaaatgtggagaaccttattgtatctgaattcagcgtaaacaagcactcagaaaggctaattttttaaaagtagtccagcagttcccctag

SEQ ID NO: 37619 - DNA, 201 bp, Homo sapiens
taagcaaaataataaaagaaacaaagttgttgggggaaggatataacccaattaagagaactattttaaagtcctcaaaataacttatttatggtgaagckcataaaaagttaaaacattagccatctgttcattaaaggcatttctctttttgacatttactgaggagtgttttattagccttaagtaatatttaaaagt

SEQ ID NO: 37620 - DNA, 201 bp, Homo sapiens
ttgtttacactggcaacaaggtggtattggagtgttacagggttacagagaagaccttcaattatcaattataggttttaaatttaccctggcttttaaargaatagggtacactgttttctctttactgcttctgtctctttctctctgactcctttgtctcttcctctctttccttctctctttgactttctgtctctc

SEQ ID NO: 37621 - DNA, 201 bp, Homo sapiens
cacaagacggtaaatgtgtttttactcactaaagtatcccctgctcctagcataatgcatgacacatggcaggtatggagtaaatatgggtcagataatarctcagggctatttataatataaagtcattagcagaatgtctaattcttaactttatagaagttggagtttgtttggtcagggaaacaggaatattttatt

SEQ ID NO: 37622 - DNA, 201 bp, Homo sapiens
gtgtggtataggcccaacagaagacattttggcaaaatttagaatagaacagagagggatcctttatgaattccaacacttaggtgtggttttgattcacwctggatgtacgtgactactatttgaaattccaagtccagagtcccatgttgccatgtataaatccgtgctttcgatgtgtgtggtttgggttgtgatgtg

SEQ ID NO: 37623 - DNA, 201 bp, Homo sapiens
ttcttttgaatctgcttaatttttaggcatattttacagctgtgtggtataggcccaacagaagacattttggcaaaatttagaatagaacagagagggaycctttatgaattccaacacttaggtgtggttttgattcacactggatgtacgtgactactatttgaaattccaagtccagagtcccatgttgccatgtat

SEQ ID NO: 37624 - DNA, 201 bp, Homo sapiens
agagcttttgcaaatataaaggtttttcaatttaagttgtgctttagaaaacctctggcatttgatttttttcttttaacttttcatggaagtgcattacrcatatagaaatgtgcacgtaagagcacagcctgatgaatttccacatctcaatgaaaaaaacatgacattctcagtgtcccagaagccacccttttgctt

SEQ ID NO: 37625 - DNA, 201 bp, Homo sapiens
agagcaagtaagaacagaggcagaatttgaaccccagcattccagcaggcaatgtgtctttattcattttctgatgcttataacagaatacctgaaactgrgtaatttataaagataaggaatgtatttcttatggttatagaggctgaaaagtccaaggccgagagactgcatctgatgagggccttcttcctggtgggg

SEQ ID NO: 37626 - DNA, 201 bp, Homo sapiens
ctgaaactgggtaatttataaagataaggaatgtatttcttatggttatagaggctgaaaagtccaaggccgagagactgcatctgatgagggccttcttsctggtggggactctctgcagagccctgagtgggtgcagggcatgacatggtgagagagctgagcatgccagctcaggtctctcttcctcttctgataaag

SEQ ID NO: 37627 - DNA, 201 bp, Homo sapiens
caggcttgttggcacatgcctgtaatcccagctactcagcaggctgaggcaggagaatcacttgaacccaggaggcagaggttgcagtgagctgagatcgygccactgcactccagcctgggtgacagagcgagactccatctcgaaacaaaacaaaacaaaacatcttaacaagccaagagaaagcatacggaagaaagg

SEQ ID NO: 37628 - DNA, 201 bp, Homo sapiens
attatttcttgcaaactgagaaatcctttgagagtgtgtggtagtaggataatacatgttacactgttaacttttagcaaactttacttttgttgaaaacsttgtaagtttgggattaccttataacctaataaatttgggattaccttataagttaatatggactgaacgccctgggttctttgctattaataagatctc

SEQ ID NO: 37629 - DNA, 201 bp, Homo sapiens
taactaactgatcattgatcaccctttctctgatatatcaaggatatcctttcctttttttcaaggaaaggaaagatgaatttcctgttgacttaactattaataacagtggtttcctttcagtgtttaataagaaactctcagaaattctgtctagacattttatgtcaacattttttgagatgttaattgaaacacttg

SEQ ID NO: 37630 - DNA, 201 bp, Homo sapiens
ataactaactgatcattgatcaccctttctctgatatatcaaggatatcctttcctttttttcaaggaaaggaaagatgaatttcctgttgacttaactattaataacagtggtttcctttcagtgtttaataagaaactctcagaaattctgtctagacattttatgtcaacattttttgagatgttaattgaaacactt

SEQ ID NO: 37631 - DNA, 201 bp, Homo sapiens
agacttcacctgggtccaggctttgcctgctactgcctttggaatgagtcaccctaatatagaaggcttgtttttctctttttaattttatttttctttckttcttcaatttcctccctcaataggtgctggatattagacctttgtcagatgcacagtttgaagatagtttctcccattctgtaggttgtctgtttactc

SEQ ID NO: 37632 - DNA, 201 bp, Homo sapiens
ttttgcattttattaagtgtagggagttaatgcataaatcagatggagctcttttccacatagagctcatagtcaaatgggggagacttattcgtctacaygttagtgaaatagcatatgaacaaagaatatgggggtagaaagaagagtgtgattaaatctcctaggagtatcaggaaaagttgttttaagacgggtttt

SEQ ID NO: 37633 - DNA, 201 bp, Homo sapiens
ttttttttgagagacctgaaggtcatttcctgaggaaggatctcagataaacaaatataaatttcttttaagaccagaagggtcaatttctatgtttatcmaaaaaagctatctgtaggactattgggtcagttttacatatccatagaagaaaaacttgtatatgagtgttaactcataatagctaaaaactgaaaacaa

SEQ ID NO: 37634 - DNA, 201 bp, Homo sapiens
aatggaaaatggtacagtggctttgtactacagtctgggagttcttgaaaatgttatatatatatatatatatatatatatatatatatatatatgtaacratatgtttataaaaatataaaaatgtgtgtgtgtatgtacaaaaaagttactgtactcagcagttccactcctgagtacacacccaagacaattgaaaat

SEQ ID NO: 37635 - DNA, 201 bp, Homo sapiens
tacacacaccctgaatattttcttaaaacacaagagctactagattgtaacactgggaattccccaggacgatagagaggtctaaggaccaagcagtgtgrgaaagatgtcagaagtgctacctgtatttggttgtaattgtagctactttgcattttttaaacaaagaaaatttctacatgctctatagagtgacacata

SEQ ID NO: 37636 - DNA, 201 bp, Homo sapiens
ctgttggagggaatggaaaatggtacagtggctttgtactacagtctgggagttcttgaaaatgttatatatatatatatatatatatatatatatatatwtatatgtaacaatatgtttataaaaatataaaaatgtgtgtgtgtatgtacaaaaaagttactgtactcagcagttccactcctgagtacacacccaaga

SEQ ID NO: 37637 - DNA, 201 bp, Homo sapiens
ctttccctacaggaatcttatgggatcctataggaattataaaggtcagtgtttaatgagccctccgtataaggcaactgtcactgtgatgaatgcactgyatggattatctcatttgatgctgtacttctaagaggtagatactgttataatctcctaatacagatggggaaggtgaggcacactaaggttgtttgagag

SEQ ID NO: 37638 - DNA, 201 bp, Homo sapiens
aattgcagaaacatttcatattaaacatcatataggacttcaagtgacagatctggatagatttcatatttattagggcacatattgctcagcaagttctragtttttaaataagtagatttaagccattggcaaatagatactaatgtccctaaattctaaacttattattaaatataatcaagctgttttctcctttat

SEQ ID NO: 37639 - DNA, 201 bp, Homo sapiens
cctttccctacaggaatcttatgggatcctataggaattataaaggtcagtgtttaatgagccctccgtataaggcaactgtcactgtgatgaatgcactkcatggattatctcatttgatgctgtacttctaagaggtagatactgttataatctcctaatacagatggggaaggtgaggcacactaaggttgtttgaga

SEQ ID NO: 37640 - DNA, 201 bp, Homo sapiens
gaggcaggagaatggcgtgaacccgggaggcggagcttgcagtgagtcgagatcgcgccactgcactccagcctgggcgacagagcgaaactccgtctcawaaaaaaaaaaaaaaaaaaaaaaaaagaaagaaaaatgaatctttaaaatcaagtacaagaattagttggacttaaccatatttgtgtaataattgcatga

SEQ ID NO: 37641 - DNA, 201 bp, Homo sapiens
cttgctctgtcaccaaggctagagtgcggtgacatgatcttacctcactgtggccatccatcctcagacgattctcccacgtagcggggactacaggcgcmtgccaccatgcccggctaatttttgtatttttggtagagacagggttttgccatcttgcccaagctggtctcaaactcctgggctcaagcagtccacctg

SEQ ID NO: 37642 - DNA, 201 bp, Homo sapiens
gatggttttaatttttacgtggcaaaatgtaccaatttttttttttctgtagtggtgctgaattgtgtgtgtgtgtgtgtgtgtgtgtgtgtgtgtgtgtgatgagaaaaagcattggaaacttgagacagaaaggtaggtaaggcctaccatgaaaaaaatcctcaataaatgtttgtgggaaatgtgacaaagtaggaa

SEQ ID NO: 37643 - DNA, 201 bp, Homo sapiens; identical to SEQ ID NO: 5706

SEQ ID NO: 37644 - DNA, 201 bp, Homo sapiens
cgaatgtgggtggccagaatctcaatgcctggcccttctggctgctgctgtctcttagaggacagacacaggtgacacctgtaacagtaactacaaaaagdtatgatataacgacctcttctttgtagcacagaatgtaaataccgtgggcattttgatacaagcagggtcctggggccagaggaccaggcggaccgttga

SEQ ID NO: 37645 - DNA, 201 bp, Homo sapiens; identical to SEQ ID NO: 5708

SEQ ID NO: 37646 - DNA, 201 bp, Homo sapiens
gacttaaatccaggcaacctggcccagacttgtgcccacttttctattctgcctctgtgaagcacctgccagggaaagaccaccagtcatcagcctgcccmacagctgcccggttcaccctggagagaggagcagggtgctcactgcctgcctccagctggccacactgagctctcctcacctcttcaagtaggtcccgcc

SEQ ID NO: 37647 - DNA, 201 bp, Homo sapiens
ctcccaccagcataacagcccccttgcagacatccccccaccctctgccctacacacccatggactcccacagatggagtctcttgcttttcaggaggagkttctattaccaagcagctctggctgttacagatttcttctttatgttgacccgaaatcttcctcttggaacttccaggtactgactggagatctgccatc

SEQ ID NO: 37648 - DNA, 201 bp, Homo sapiens
gttacagatttcttctttatgttgacccgaaatcttcctcttggaacttccaggtactgactggagatctgccatctgtagcagcagagaaaggtcccccmattctctttggtggccagctcctcagacacttgaagccttgctgtgtttcaccatgtgttatgtgttttagaggcgctggacaagcatctatcattgagt

SEQ ID NO: 37649 - DNA, 201 bp, Homo sapiens
aatattgcaagactgggatggctcggagtaagggccagtcctggcaagacacaaggcactgtgcaaactgagtacagactcccgcacagcacccctgcagyggcacctgagcctcaccacagtgcctggggcatatgcatagggcagctgggagttctcgcaaacaactggggggccttctgacctccctgcctttgctca

SEQ ID NO: 37650 - DNA, 201 bp, Homo sapiens
ggatcgcttgagcccaggaatctgagcccagcctaggcaacatggcgagaccctgtcttgctagaaaatcaaaaaacatagttgggtgtgatggtgcatayctgtggtcctagccactcaggaagctgaggtgggaagatcgcttgagcccaggagtttgaagctgcagtgagccatgtttgtgccactgcccaccggcct

SEQ ID NO: 37651 - DNA, 201 bp, Homo sapiens
tgaatgtatggatataattttacgtggttttgctcagtgaaaaacacagcattgcaattgttggttgaatcagatgacaggtaggtgaatcagttatggaytgtttttttagggatagcttactagttcaatgcttgtaggtgtatttctcaaacagacccagtggccacaaaagagggtcaagcttttccagggtgacca

SEQ ID NO: 37652 - DNA, 201 bp, Homo sapiens
atgaatgtatggatataattttacgtggttttgctcagtgaaaaacacagcattgcaattgttggttgaatcagatgacaggtaggtgaatcagttatggwctgtttttttagggatagcttactagttcaatgcttgtaggtgtatttctcaaacagacccagtggccacaaaagagggtcaagcttttccagggtgacc

SEQ ID NO: 37653 - DNA, 201 bp, Homo sapiens
ggttgcccccattttcccagtaccacagggagcaccccgcacattcctctaattgaactgcatgagaaggcatgtggcatacactctcgatattgctgggycatagggtgtatgtcgtttacttcttttggggaaaaaaatgatttgtttatcttatttttattgatgaatgtatggatataattttacgtggttttgctc

SEQ ID NO: 37654 - DNA, 201 bp, Homo sapiens
tgaaaatgttttttgaacctaccaaaatttttatgcagtaaagtctttgtacttgatagccatatatgtgtgtttgtatataattctgagtctcctgtttmactttttattttgaaataattacagatttgtagaaaagttgcaaatattgagttctcctagaccccttcacctaactttccctaatattaacttcttcat

SEQ ID NO: 37655 - DNA, 201 bp, Homo sapiens
tctgtcatccaggctggagtgcagtggtgcgatctcggctcactgcaaccgccgccttctgggttcaagtgactctcctgcccctgcctgccgagtagctkggattagaggtgtacaccaccacacccagctaatttttttatttttagtagagacagggtttcaccatgttggccaggctgacctcgaattctgatctca

SEQ ID NO: 37656 - DNA, 201 bp, Homo sapiens
cagatggttttaatttttacgtggcaaaatgtaccaatttttttttttctgtagtggtgctgaattgtgtgtgtgtgtgtgtgtgtgtgtgtgtgtgtgtgtgatgagaaaaagcattggaaacttgagacagaaaggtaggtaaggcctaccatgaaaaaaatcctcaataaatgtttgtgggaaatgtgacaaagtagg

SEQ ID NO: 37657 - DNA, 201 bp, Homo sapiens
acagatggttttaatttttacgtggcaaaatgtaccaatttttttttttctgtagtggtgctgaattgtgtgtgtgtgtgtgtgtgtgtgtgtgtgtgtgtgtgatgagaaaaagcattggaaacttgagacagaaaggtaggtaaggcctaccatgaaaaaaatcctcaataaatgtttgtgggaaatgtgacaaagtag

SEQ ID NO: 37658 - DNA, 201 bp, Homo sapiens
ttcttcagtctgttttttgcttttatcgtgtttatagtcactttttttctaaacagatggttttaatttttacgtggcaaaatgtaccaatttttttttttctgtagtggtgctgaattgtgtgtgtgtgtgtgtgtgtgtgtgtgtgtgtgtgtgatgagaaaaagcattggaaacttgagacagaaaggtaggtaaggc

SEQ ID NO: 37659 - DNA, 201 bp, Homo sapiens
catgtttgcggtaccttggttgattacagtaaaaagaacaagaagtctggtctttgctttaaggaacttagatctgttcaatttgtgattaatagcatcgrtaagagacctttttgaacattttgcaaccgagaattcacaatttagacaccaaatagttctgtgttctcatctttacagaaaggaggatgtccttctaaa

SEQ ID NO: 37660 - DNA, 201 bp, Homo sapiens
aaaaacaaaaaaccaacaaccccttttatataggctcttgtagatccacttcatttttcctaagggcagcatggtacttcattgtatgggtgtattatcatctaatgaaccagctgtgcactgaagaacatctaggtggttactggtcttttgacttcagaagaatagaatccacgttagcttgtctgtgaaacaaattat

SEQ ID NO: 37661 - DNA, 201 bp, Homo sapiens
caggcatcaagctttgcatttattttgcaagccctctttatcgggtttgtatgatcttgttgtgtacagctaacaaaaggttacttctttgtcatgaaagscgtcctcagttttcagagacagtggggcaccacagagactttctttctctgcatccacatttctattaatgtcattactgcatttgattcctttatgaag

SEQ ID NO: 37662 - DNA, 201 bp, Homo sapiens
aaaaaacaaaaaaccaacaaccccttttatataggctcttgtagatccacttcatttttcctaagggcagcatggtacttcattgtatgggtgtattatcatctaatgaaccagctgtgcactgaagaacatctaggtggttactggtcttttgacttcagaagaatagaatccacgttagcttgtctgtgaaacaaatta

SEQ ID NO: 37663 - DNA, 201 bp, Homo sapiens
aacctaatataaccaaaatattatcgtttcaacatgcaatcaatatttaaaaattattagacattttacattttttccacgccaagtattcacaatcagcrtgcattttacactcacagcaatcaacttggatgcaatattcattggaaatacttgatctgtatttaaatttcataaaatttagagttgaggaagtagact

SEQ ID NO: 37664 - DNA, 201 bp, Homo sapiens
atgcatctccctgtgttacccaggctggtcttaaactcctagactcaaacagttctcccgccttgacctcccaatgtgctgggattataggcatgagccamtgtgcctggccaattcattctgttttaaatggttgtctaggttgtttcaaggttttggttatttcagtgctgctgatatgaatatgttacctggtgcaca

SEQ ID NO: 37665 - DNA, 201 bp, Homo sapiens
ttcctctttagaattatttaaaggtacatagcatcttttactgaatcaaatgacaagagggcattttatttatttatctatttatttatttatttatttatctgtttgcttaatggtgcttttgtgatttggggttgcaagctctctctgtggtcctgttggatatttattgatccctagtagcattatcataaggcatat

SEQ ID NO: 37666 - DNA, 201 bp, Homo sapiens
acatgcatctccctgtgttacccaggctggtcttaaactcctagactcaaacagttctcccgccttgacctcccaatgtgctgggattataggcatgagcyactgtgcctggccaattcattctgttttaaatggttgtctaggttgtttcaaggttttggttatttcagtgctgctgatatgaatatgttacctggtgca

SEQ ID NO: 37667 - DNA, 201 bp, Homo sapiens
attcctctttagaattatttaaaggtacatagcatcttttactgaatcaaatgacaagagggcattttatttatttatctatttatttatttatttatttatctgtttgcttaatggtgcttttgtgatttggggttgcaagctctctctgtggtcctgttggatatttattgatccctagtagcattatcataaggcata

SEQ ID NO: 37668 - DNA, 201 bp, Homo sapiens
cattcctctttagaattatttaaaggtacatagcatcttttactgaatcaaatgacaagagggcattttatttatttatctatttatttatttatttatttatctgtttgcttaatggtgcttttgtgatttggggttgcaagctctctctgtggtcctgttggatatttattgatccctagtagcattatcataaggcat

SEQ ID NO: 37669 - DNA, 201 bp, Homo sapiens
cggctttctcccaccaaacaaatcacatggggtcacctgtaatattgcaagactgggatggctcggagtaagggccagtcctggcaagacacaaggcactrtgcaaactgagtacagactcccgcacagcacccctgcagcggcacctgagcctcaccacagtgcctggggcatatgcatagggcagctgggagttctcgc

SEQ ID NO: 37670 - DNA, 201 bp, Homo sapiens
tttacatcgacacattcaaccaactgcagatgggaaatatttggaaaaaaatacaacaatgaaaaataatacaagtttttaaaaataatataacaattatytacatagttttgcattgtattaggtattataagtaatctagagattaaagtatacaggaagatgtgcataggttatatgcaaatactgtcccattttata

SEQ ID NO: 37671 - DNA, 201 bp, Homo sapiens
tgacctcctgggctcaagcagttctcctgcctcagcctcctgaatagctgagactcacactttacacaccaccacacctggctatttaaaaaaattttttktagagctgaggtctcactgtgttgtccatgctgacctcgaactcccgggcactggccacatattaaatatttgaggcttttggagccatgtggcctctgt

SEQ ID NO: 37672 - DNA, 201 bp, Homo sapiens
aaaatgaatagaaccatagtccctcccgccgcctggaaacatatatatatatatatgtgtgtgtgtgttcagccaagtcattaaagtatttttgctgcagsgcaggcattgctctaagtagcactccatctacacaaaatgaatagaaccatagtccctcccgcagcctagaaatgtatatatctcaggtaggcaaaacaa

SEQ ID NO: 37673 - DNA, 201 bp, Homo sapiens
aaaccatggagtgacttcttgtcctctttcactgtcttccagtgttttgctgtgcgttctctgggatgggtagagatggcagaagaggacctcgcccccgstaaaagtagtgttgcggtcaacaactgcatcaggcaactttcctactgcaaaaatgacatccgagacacagtcgggatttggggagaggtaagtggcatg

SEQ ID NO: 37674 - DNA, 201 bp, Homo sapiens
atagttgtccaatagcatattttaaattggcacatcttagaagcattaaacattgcagttatttctaaattgcagatgttaatgcctttggaatatgaaarttggggatcaggccgggcacggtggctcacgcctgtaatcctagcactttgggaggctgaggcaggcagatcatgagatcaggagatgaagaccatcctg

SEQ ID NO: 37675 - DNA, 201 bp, Homo sapiens
atcccttagcactgccagatgccagtgaggactggggcctggagagagagcgtttctcagtagctaagtgacacagattcatgggtgagctttaggggccyagaactcccctaaacatgcctgcaaaatgggatgtgccagtgtataagagcagttttgcagactggaagaaggacctgtattctcaaaggggaaggtgac

SEQ ID NO: 37676 - DNA, 201 bp, Homo sapiens
cagtatgggccgcctctctctttttttcttgctgcataaaaggatgtggaagggcgggggagtgggcacatcaacctgcagttgagctcagggagaagtargcagattgttcagccagagtcattaaagtattcttgctgcgggccaggcatcgctcttgagtagcactccatctacacaaaatgaatagaaccatagtcc

SEQ ID NO: 37677 - DNA, 201 bp, Homo sapiens
agaggaggattatttccaattgtggttttctttgatcatgaaaggaaaatgtgctcatgatggcaagagtcaggcaaaaagagactaaaaagtaaacatcmctagaaatttcaacatttggagataattgttaacacttgtggtcaaaccttttaagcctctccccacttgcaaaaaaaaaaaaaaaaaaaaaaagcaggg

SEQ ID NO: 37678 - DNA, 201 bp, Homo sapiens
catggctgttataaacattgaattgacatactataaacactataaatatacatgtaaaggtcttggaacagtccttagcacataataagcattctttatgyattcgccattatactgttcctactacaagaaggaatggatatggcccctgccttcaagtaatggagaagaaacaagcaaattcaatgcactgtaccagga

SEQ ID NO: 37679 - DNA, 201 bp, Homo sapiens
taacattgagaaatacagtcgtatcgcatggttcttttgaagccaagtaatgtcacagtcagtatcctttttatcagtagaaaaaatgcgaacacccaacrtcggctgcatgctcaccaaggtgtctcagcaagcaataaatgatgtgccgccgctgccgtcgctctgagatctggagtctgagacgtgtttaaaacagtc

SEQ ID NO: 37680 - DNA, 201 bp, Homo sapiens
taaatatacatgtaaaggtcttggaacagtccttagcacataataagcattctttatgcattcgccattatactgttcctactacaagaaggaatggatayggcccctgccttcaagtaatggagaagaaacaagcaaattcaatgcactgtaccaggagctgagctactgagtcacgaatgggggttgttccgggggcat

SEQ ID NO: 37681 - DNA, 201 bp, Homo sapiens
tggggcatggcgaggtgaggttgcgaggcagggttttccggccagaccttcacgatggccagttgcctgctatagtaaatccctgtcccttcccaaggccrccaaggctttcttggggaaagtatccatcatagtctatgaaaaggctgccaggtcttaccttaagagaaataatttaaaaattcctctgtagttatatct

SEQ ID NO: 37682 - DNA, 201 bp, Homo sapiens
caccgtattctgttgttcagagttgtcagactccacttcttgatgagacgtggcaagttcacgttacaaggagcgcataggacgggaggttttaatgcagycatctttgggaggtacaatctgccaaacatgtcattcccacatttcagtcattcaaaattagtgccttcagtacagggcagaaaatagcaacatggttga

SEQ ID NO: 37683 - DNA, 201 bp, Homo sapiens
cctccctctccaccacaagaaggatagaaccacagaaaagacatacctatgaaacaagagattttgacctcagttgtgtttttccaatgctctgcatgtcygcctgcccgtttgattgattggggactttaagctccatgattccatagctctaccacttaataaaaactccacttttgatggaataagggaatttggaga

SEQ ID NO: 37684 - DNA, 201 bp, Homo sapiens
tcattcctctttagaattatttaaaggtacatagcatcttttactgaatcaaatgacaagagggcattttatttatttatctatttatttatttatttatttatctgtttgcttaatggtgcttttgtgatttggggttgcaagctctctctgtggtcctgttggatatttattgatccctagtagcattatcataaggca

SEQ ID NO: 37685 - DNA, 201 bp, Homo sapiens
cagctgcagaattgtgaacttgaaagcttaacaacatgtttgtcagagaacttgagttttgagataactttggtttggttttgaaaaaaaaaaaaaaaaawatatatatatatatatatatatatgcatagaaaatattccttctgcagtcagtattttcagcagatgggaaagggcaggagtgacttgagcttccagcca

SEQ ID NO: 37686 - DNA, 201 bp, Homo sapiens
cctaggcaacatggcgagaccctgtcttgctagaaaatcaaaaaacatagttgggtgtgatggtgcatacctgtggtcctagccactcaggaagctgaggygggaagatcgcttgagcccaggagtttgaagctgcagtgagccatgtttgtgccactgcccaccggcctgggcaacagagagcaataccctgtctcaaaa

SEQ ID NO: 37687 - DNA, 201 bp, Homo sapiens
cttctttattgtttttttaaagatatatggtatccatatacccagcttcatatacaaacctttttttaaaaattaaaaatctttgtctctgaatataaaaatgtttcatgctcattattaaaaaaaacttagaaaaatagcaacttataaaacatcagaaggccattttctaaatcctgtcacccggagattaccactatg

SEQ ID NO: 37688 - DNA, 201 bp, Homo sapiens
acttctttattgtttttttaaagatatatggtatccatatacccagcttcatatacaaacctttttttaaaaattaaaaatctttgtctctgaatataaaaatgtttcatgctcattattaaaaaaaacttagaaaaatagcaacttataaaacatcagaaggccattttctaaatcctgtcacccggagattaccactat

SEQ ID NO: 37689 - DNA, 201 bp, Homo sapiens
gggcacttctttattgtttttttaaagatatatggtatccatatacccagcttcatatacaaacctttttttaaaaattaaaaatctttgtctctgaatataaaaatgtttcatgctcattattaaaaaaaacttagaaaaatagcaacttataaaacatcagaaggccattttctaaatcctgtcacccggagattacca

SEQ ID NO: 37690 - DNA, 201 bp, Homo sapiens
tttgtcaccttcttttaccccagagttttcatttacgaatagaagacgtatgtgagggagagggcacttctttattgtttttttaaagatatatggtatcyatatacccagcttcatatacaaacctttttttaaaaattaaaaatctttgtctctgaatataaaaatgtttcatgctcattattaaaaaaaacttagaaa

SEQ ID NO: 37691 - DNA, 201 bp, Homo sapiens
aaaaatcatgcattcttcttcagaggaaaaaaatcttccttggcccatttagcaagatccttgctccttagtttcctttaattatcttgatttttttttttaaactggagaagaccatctgctttatgaggcagttcatctcttatgttttctctaataggtctttgaaggcccagttaagcatattaaggcttcatctca

SEQ ID NO: 37692 - DNA, 201 bp, Homo sapiens
ttttaaaaatatcagtctttaataccacaccataaaatccaaatggcagttgcattcatttcctattgttgctgtaacaaatggccacaaaccgagtggcytaacgccacgccacttgattcttttctgtttctggaggtcagaagtgtcaaatcccagtgttggctgggctgtgtttcttccaggggctctcggggagaa

SEQ ID NO: 37693 - DNA, 201 bp, Homo sapiens
catgagctgtaacctagagtctttgctctgcttggcagaagaggaagagaagatgccacatacagtttggagtaggatgatgacacagtttttaaaatgayggatgcagtttggtatgaaatgaatcactgtttaatctgtgttactttgctcatatggacacacttggactcagcacccacttcctgtgcaatggcatat

SEQ ID NO: 37694 - DNA, 201 bp, Homo sapiens
tgtgagtcattgctttgtcctgcacacccatcctgcctatgaaaccgacctgtgagttgcttagtagccgtctgtctctgtttccagatcagctgttgtarcattgcagtgcttgtgctcaagtcacccttattttacttaataatggcccaaagcacaagaggagtgacgctggcaatttagatatgccaaagaaaagct

SEQ ID NO: 37695 - DNA, 201 bp, Homo sapiens
tcctcacttcccagacggggtggcggccgggcagaggctgcaatctcggcactttgggaggccaaggcaggctgctgggaggtggatgttgtagctagccragatcacgccactgcactccagcctgggtaacattgagcactgagtgaacgagactccgtctgcaatcccggcaccgaggctggtagatcactcacggtt

SEQ ID NO: 37696 - DNA, 201 bp, Homo sapiens
atccaaatggcagttgcattcatttcctattgttgctgtaacaaatggccacaaaccgagtggcttaacgccacgccacttgattcttttctgtttctggwggtcagaagtgtcaaatcccagtgttggctgggctgtgtttcttccaggggctctcggggagaatccgttttcttgccttttccagcttcttgaggctgc

SEQ ID NO: 37697 - DNA, 201 bp, Homo sapiens
aaagacttcagctttagtcacaggggttttatactagctaaaaaagaaaaagaaaaagaaactcacctcaaggctctatataaatgtaaaaatggaaattrcagccaggcatggtggcttatgcctgtaatcccagcactctgggaggccgaggtgggagcattgcttgagcccaggagtttgagacctgcctgaacatag

SEQ ID NO: 37698 - DNA, 201 bp, Homo sapiens
ctgggcagaggcgctcctcacatcccagacggggcggcggggcagaggcgctccccacatctcagacgatgggcggccgggcagaggggctcctcacatcycagacgatgggcggccaggcagagacgctcctcacttcccagacggggtggcggccgggcagaggctgcaatctcggcactttgggaggccaaggcaggc

SEQ ID NO: 37699 - DNA, 201 bp, Homo sapiens
gcagttgcattcatttcctattgttgctgtaacaaatggccacaaaccgagtggcttaacgccacgccacttgattcttttctgtttctggaggtcagaartgtcaaatcccagtgttggctgggctgtgtttcttccaggggctctcggggagaatccgttttcttgccttttccagcttcttgaggctgcctgcattcc

SEQ ID NO: 37700 - DNA, 201 bp, Homo sapiens
taaagaagttcctatatgttaatgggggtgtttgtcgcctcctcttatagacaaaacaagccttgaaacaatttttcactggttatatttagtaagtgcaygtgcgtgcctgtgtagattttttacttaacgtagaatgaattactgtccctttttctttactctggagcacatttacgtaaagcacttgccagttcagac

SEQ ID NO: 37701 - DNA, 201 bp, Homo sapiens
cagagggggatttggcagggtcataggacaatagtggagggaaggtcagcagataaacaagtgaacacaggtctctggttttcctaggcagaggaccctgyggccttccgcagtgtttgtgtccctgggtacttgagattagggagtggtgatgactcttaacgagcatgctgccttcaagcatctgtttaacaaagcaca

SEQ ID NO: 37702 - DNA, 201 bp, Homo sapiens
tgttgctgtaacaaatggccacaaaccgagtggcttaacgccacgccacttgattcttttctgtttctggaggtcagaagtgtcaaatcccagtgttggcygggctgtgtttcttccaggggctctcggggagaatccgttttcttgccttttccagcttcttgaggctgcctgcattccttggcccctgcctcctgttct

SEQ ID NO: 37703 - DNA, 201 bp, Homo sapiens
aacatcaagtataatttttgtcttccaaaactgtcctcaaaatattttcatgtaatgggtcccagcagtcctgccagtcggggtgagttagccgtttgggyggctgtgtggacagagtcacctagaggcaatgtggggcttagcccagtcccaagtgtgtaccatttctaaggccacctcattctctgagcctgggaatca

SEQ ID NO: 37704 - DNA, 201 bp, Homo sapiens
ctgttctttcccttaggaagaaagtgcctcccgccttcccttgtgaatttgcggggcccacctagatagtccagagtaacatccccatctcaggatccttygttgatcacatccgccaagcccctgttggcatgtaagggaacatagccacaggttcctgggatgtggggagggatcatgactctcccgcagcagcccttt

SEQ ID NO: 37705 - DNA, 201 bp, Homo sapiens
aagcccctgttggcatgtaagggaacatagccacaggttcctgggatgtggggagggatcatgactctcccgcagcagcccttttcagaagtcaggtgccraaaaggcaggcttttcacacaggcaagtgatgcttggatttcgtcttaaatcaatgaaattcgatcgcttgtatgtttcattgtccatagatgaagtcgc

SEQ ID NO: 37706 - DNA, 201 bp, Homo sapiens
gtgtatgtactgtgtgtgcgaggaaccttccaggctctcacccatcttcagctgagtcctggcaaggggatggagatggcctgagcacaggcagggaggcraagagcagcttagaatggctgcgtggtgagggggctggaaatggagggatggatgccagaaatttccaggaggtgaaacaggacgaatgtggggattggg

SEQ ID NO: 37707 - DNA, 201 bp, Homo sapiens
cccgagcccagtcgtggaacccattcagtactgagcaaggaccgactttcccaacaggaaggagggatgtgtgccacaggcccacacttgtactcagcccrcaaacatgtattagtaccggtgatacgccaggcctgaactagacgctgggatgagttaggcacagtcgtcttcatggagctgcagagtgttgaggggaag

SEQ ID NO: 37708 - DNA, 201 bp, Homo sapiens
aggcacagagggcacaaagccgaagttcgataggaataatccattgcttattgaccaggacctgttcatccgccgtgtcggtaaccttgggatgttgcackctggggcctgccagccaccatggagaggctgatggatcttggaggcttctatcagagaatgtcagagccggggagggacttggaaatcatgtttttcaac

SEQ ID NO: 37709 - DNA, 201 bp, Homo sapiens; identical to SEQ ID NO: 5701

SEQ ID NO: 37710 - DNA, 201 bp, Homo sapiens
atagtaaccatgtgaggtaaatatttttatttttatttttatttttttttattgatcattcttgggtgtttctcgcagagggggatttggcagggtcatargacaatagtggagggaaggtcagcagataaacaagtgaacacaggtctctggttttcctaggcagaggaccctgtggccttccgcagtgtttgtgtccct

SEQ ID NO: 37711 - DNA, 201 bp, Homo sapiens
ttgactctcttatgggccacatggtcatactgttataaaaatggccatggcctagagtggaggattgatgttgccttgcttcctggaagcatagggactcyagaatgagcaacttttttctaaaattgcccaacctaagtatttggtgatggagagatacctctaagctcccaaacaaggaaattattgcccttctctcct

SEQ ID NO: 37712 - DNA, 201 bp, Homo sapiens
gaagaatcgcttgaacccaggaggcagaggttgcaagccgagatcacgccactgcactccagctgggtgacagagtgagactgtctcaaaaaaaaaaaaaagaagaaagaaagaaagaaaaattgtcccaaaggaacgagaaacactgtataaccccaagaaccttgacaagaaggctttttaagtcacttgtttcaacta

SEQ ID NO: 37713 - DNA, 201 bp, Homo sapiens
gagtggcaagacctaggctttctggatgttccagtgcctttgtagaataagttactcaccttacatgaccctttacattcttgcagtccaccaagaaccarggaaccaagtggtcccctcccccgaaaaatcctgactttaaaaataatatttgggctgggcacagtggctcatgcctgtaatcccagcagtttgggaggg

SEQ ID NO: 37714 - DNA, 201 bp, Homo sapiens
tatgtttcattgtccatagatgaagtcgctccactggtctgtgctctaggcctgaaagaaaggcctcactgcctcttacagatctccatatttagggactygggatatgttacatgagagtgaaatgggaaatgcacaaatctcttgacctctacagtgaggagaagacacctgttttatcctgggaagtgatgaaacctc

SEQ ID NO: 37715 - DNA, 201 bp, Homo sapiens
tctctcccaatcctttctggtttcattagctcattgactgtgaggtgtattcgttgcggactatcaatatagaggacacgtggagggtggaaatggatggmaggaaagggtggcaaaagccaaaacccctttgttgagcctaatcttttaggagaatttaaagcactcacattcagagaaaaataactcttggatttatgt

SEQ ID NO: 37716 - DNA, 201 bp, Homo sapiens
aggacttgaaagagttgagggaggatcccctgggttgtgcatatggcgggaaggggtattccaggagtggaggatgtcagcagggtgggaatgggatcagtgaggggaggaggagcagaggagtcagaaggatctaagggtagggctgaaggtgggaaaacaacctgtagggctgtttaggacacggaaagggccttgact

SEQ ID NO: 37717 - DNA, 201 bp, Homo sapiens
acattctccagggcggaggttttttaggtattcccacagcaaactaagaataccacattgtgatttcaaagctctaagcagatccgtcaaaagggggtgcrtggcagacgctcagtttaagcaaattgctgagagtcagaagggcagtgaagctggcagccactgtttcctttccagttttcagccgcttgccttgtctcc

SEQ ID NO: 37718 - DNA, 201 bp, Homo sapiens
tgggttcccacggtgcgttttaggctgtccagtgccgaatctcaccccctaagaggactgttgcacatgacacacccaaatagaaaaacattctccagggyggaggttttttaggtattcccacagcaaactaagaataccacattgtgatttcaaagctctaagcagatccgtcaaaagggggtgcatggcagacgctca

SEQ ID NO: 37719 - DNA, 201 bp, Homo sapiens
cagctgttatatgcagtaattgtttctttaataagttaggtgaccatacatactaacttgctgggacaatcctagctatgcctgctgttctggcaaaattyttgatactgacccctttcaatatcaaaaatgtcctggtttcgatcataaattaaataaccaccctactaataaaggaatgttgtagcattctatatcttt

SEQ ID NO: 37720 - DNA, 201 bp, Homo sapiens
cctgttgcttcccgtactagtgtcattaagcagctgtcccctcagctccaaacccacacttccccgctcagctttgtgatgctggggctgggactccgcaractacgctcctgcttctctcgtctgctacctgttagactctggtgactgtgcagcactcgaaggagaactgccaggtggaggaggaaggaggaacttgct

SEQ ID NO: 37721 - DNA, 201 bp, Homo sapiens
gggaagacaggaaaggaaatcaaagacaagaattaggaaattgaacccagagtcctcaagcaagaacccaatttccaagagtaaaaagctcttgggaacakaatcatgcaggcgcggtcatggcagccagaggacggaaatgccagatcagacgtggggccaaagaaaaagaagggagccagagagttgacttaaaatgga

SEQ ID NO: 37722 - DNA, 201 bp, Homo sapiens
acagaatgtaaataccgtgggcattttgatacaagcagggtcctggggccagaggaccaggcggaccgttgagctgggctaggctgagtagatgggcgtgygctggacagtgtggggagggccactggccaccacgtgagggaagacaccactacgagcggacaccaagacccacctcttctggagcagcggggagtgccg

SEQ ID NO: 37723 - DNA, 201 bp, Homo sapiens
agatttcagccaagcgaaaatggatgacaactattttggtattttatgaaattgaaacagatcatagcagatggttttagtcataaaatgaatggctttcmgacttaattatacgtttaagtgataacgacaatgagttttatctctttggctacagttggttttctgattctcaattcattttccctcttggaaacaact

SEQ ID NO: 37724 - DNA, 201 bp, Homo sapiens
ttaatctaagtcatcccatttcatcatgccaggaccctatgaggtccatcctgttatcctcatggcaacagatgaggaaactgaggctcaccaagattgastaacctgggtcacactgctaataagtggccgacctgagatttcatcccagagttagtggcttcaacatctgggccccaagccacactgtgctgggcccct

SEQ ID NO: 37725 - DNA, 201 bp, Homo sapiens
gagtggaggatgtcagcagggtgggaatgggatcagtgaggggaggaggagcagaggagtcagaaggatctaagggtagggctgaaggtgggaaaacaacstgtagggctgtttaggacacggaaagggccttgactttgctgccaacgaagatgtgaaggctccaggcaagggtaacaatctaacttacattttatgagg

SEQ ID NO: 37726 - DNA, 201 bp, Homo sapiens
cctccccgccgggtccctccagccttccctcgcgcagccgctgccaaagcctggagaagtggaatctcgtcagcgccgctccctgcgcgggactcgcggarcggcactgagcatgctcagttgccggagcccgttctggtctcaagtaggaagctagtgcgctgtaaccgcatctgatctgggcgctccgggaagggcgag

SEQ ID NO: 37727 - DNA, 201 bp, Homo sapiens
ctcgcgcagccgctgccaaagcctggagaagtggaatctcgtcagcgccgctccctgcgcgggactcgcggaacggcactgagcatgctcagttgccggarcccgttctggtctcaagtaggaagctagtgcgctgtaaccgcatctgatctgggcgctccgggaagggcgagactggagcagagccgctgggcgccggag

SEQ ID NO: 37728 - DNA, 201 bp, Homo sapiens
taacagctgtgagcccccacacccggccaattttgaaaaatttttagtagacatgcatctccctgtgttacccaggctggtcttaaactcctagactcaarcagttctcccgccttgacctcccaatgtgctgggattataggcatgagccactgtgcctggccaattcattctgttttaaatggttgtctaggttgtttc

SEQ ID NO: 37729 - DNA, 201 bp, Homo sapiens
ctgtaaccgcatctgatctgggcgctccgggaagggcgagactggagcagagccgctgggcgccggagccgaggcgagcgccgcgcgcaccactggtgagsccagctttcttccttgcctttgccccggattccggggcagcacgagagtgctggggaaacacccgggtagcggcagcagcgtgcggcgagcggctgcggg

SEQ ID NO: 37730 - DNA, 201 bp, Homo sapiens
cccggccccggggctccgcggccactgctgcccgctcagccgcagccacacctgcagcagctgccgcggcatctgcagcggggcgcctgctgcggagtccygtgcgccctgcgcccgcgccgcagggccagtggcacggcgactgcgggctcactctccttgacttccatccctcccgcttcccggcgccctctttccctc

SEQ ID NO: 37731 - DNA, 201 bp, Homo sapiens
ctgctgcccgctcagccgcagccacacctgcagcagctgccgcggcatctgcagcggggcgcctgctgcggagtcccgtgcgccctgcgcccgcgccgcarggccagtggcacggcgactgcgggctcactctccttgacttccatccctcccgcttcccggcgccctctttccctcagcagccccggcttggcagggcct

SEQ ID NO: 37732 - DNA, 201 bp, Homo sapiens
gcatctgcagcggggcgcctgctgcggagtcccgtgcgccctgcgcccgcgccgcagggccagtggcacggcgactgcgggctcactctccttgacttccrtccctcccgcttcccggcgccctctttccctcagcagccccggcttggcagggcctggggcgggggagaccgggttggaggcggtgcgcccgggtgggga

SEQ ID NO: 37733 - DNA, 201 bp, Homo sapiens
tttttcccttccggctgtgttgcttactgaattctttatctgccacctttttattgccagcatgtctatttcaatgcctgttatgagtctgttcacgttartaaggaagctcagctttgtcttacgttcctaaagctgtgcttagttttaaacaacaacaaaaaatacatgcattgtattattcatctgtgtcttactttg

SEQ ID NO: 37734 - DNA, 201 bp, Homo sapiens
tggcatgaaacctctggctggttgcacctttgcccgagttttgctcgggcctgctgggctcattccacccacttggcctgggagactgcactcggctcackcttctagcctggatcccacacctgccaaaagtgagccagacacgagtggcaagggctgtgtgagtgagcatggggtccggccactgcacacagccaggca

SEQ ID NO: 37735 - DNA, 201 bp, Homo sapiens
aatgaaaagagttggaaacaccagggctcagtaagcaggtggcaacaggtacttgattcctggtactagcttctgtcaccatttaaagaagagacacaagraactatagctataacccttccacttcctggcttataaaagaaaacgcaatgattctcatgactgcaggcgttaaatggagtgagactccatgtatgggca

SEQ ID NO: 37736 - DNA, 201 bp, Homo sapiens
atagagggagtgagccaacaagttgctgttagagttaacttgttccctaacccatcttgtgaatatcaatgctaacaacagtgtcttgtgtttttttttttcttttcttttctttttctttaaatcaatgtgcttttttcctatgtgaataattatatgtctagaaacagccatggagtgattttgctgttctgaatgggg

SEQ ID NO: 37737 - DNA, 201 bp, Homo sapiens
aggaatgtatttcttatggttatagaggctgaaaagtccaaggccgagagactgcatctgatgagggccttcttcctggtggggactctctgcagagccckgagtgggtgcagggcatgacatggtgagagagctgagcatgccagctcaggtctctcttcctcttctgataaagccaccagtcccactctcatgataacc

SEQ ID NO: 37738 - DNA, 201 bp, Homo sapiens
cattctcctggccccctctacattgtagtttctgcattgcactgctgctcacagagactgatttaattgcacaaaccagtttactagtttgatttttttttaacttctctgaattatgtttgtgtgattaaaccataatgctgtaatcttctgatagggtgggcagatggcttgagcccaggactttctctactaaaaata

SEQ ID NO: 37739 - DNA, 201 bp, Homo sapiens
agtgattcaccatatccacaagaggtcctccatgtggctgggtgctcaccgtggttttaagtaggaggcttgtctgcaccttgccaggagtttgtaccctsatggcattctggcatggaaaccactgtgctgtcattttccctgctcagaatcagttctaaatccttatgcgttcctgtgctttgtcagataggagccttc

SEQ ID NO: 37740 - DNA, 201 bp, Homo sapiens
atttggacattatctgccaaaatttgtttggtatatataacagcttttggagagattttcactgctatgcttttctttcttttatgctttgttatttggarttttaatttctcaaatgatcccttctttttagatttcaaattataacctatttcctgcaccattgctgacgcctggtgatccatgtcagaagtacttcca

SEQ ID NO: 37741 - DNA, 201 bp, Homo sapiens
cccactgaccaggtacagggagttgatgagataaaggagatctgtgaagaaaatagaaaatgggagatttcagccaagcgaaaatggatgacaactatttyggtattttatgaaattgaaacagatcatagcagatggttttagtcataaaatgaatggctttccgacttaattatacgtttaagtgataacgacaatgag

SEQ ID NO: 37742 - DNA, 201 bp, Homo sapiens
aaaaaaaaaaagaatcaaacgttgtgctgactcccttaggattctgaaccatggaggataacaatttatgctcaccctcgctacaccctgcagcagttagraagaagagatctggtgggtggtgggtggtgggaagataagtcaaatctctttatagtacagtgaaggccagggaatggcccgcagtctttggagtagtgg

SEQ ID NO: 37743 - DNA, 201 bp, Homo sapiens
tgtggctgactgtggtctcctttttcatgtctcagctctgtgcacatacattcctccccgtaggaattcatcatatctaatttacagcaaattctttagamcaactacctaaaatgttttctcttctgcaattaccatgcctatcttggcagagagtttctttgtatttacttcacctttgcattacacactgagttccag

SEQ ID NO: 37744 - DNA, 201 bp, Homo sapiens
attggttttgccattttgttaaccctctagagaacgtttgctttcctctcttgacctagaattggagggtcttgaggaggagaatggcatagatcaaaaaytgaaaaccttgagtcagattaatgactggatgttgcttgtggttggctgaatcctgcaggtatttcttgaagtttgtgaaaaaataagcccaatgcagtg

SEQ ID NO: 37745 - DNA, 201 bp, Homo sapiens
aaactggccaggaagcatttgctgctgaaatttagcacgtggtgctcctccccgcccaaaccatttatttgttccaaattaccttgcagactgcttggatrttgaattttagagagaacggagagccacacaaaatatttttatgaatatccattggcttgtggccaagtcttcccatcttttcaaatgaaggtgttttgg

SEQ ID NO: 37746 - DNA, 201 bp, Homo sapiens
cagatgaggaaactgaggggtgaagagtttaagtcgtctgcccaaaactagcagtgggagagtgatgcagccaggatttaaacccaggtagcccaaatacrgcatctacaatctatctcaaatctatggcatcacagatgagctggtgtccacctttccctgaaggagttgaaggagcttttatagaagaagtgatatctg

SEQ ID NO: 37747 - DNA, 201 bp, Homo sapiens
tgggtctatagagaaaggctgacagctaaggaatgaatgacggtactatgtgatacgtattactgggagaaatactcagtgcttcccagacgagcacttaycctgcttgggtgtggggagtgtgtggggcaaagcttccaggagaagggatgctaagtctattccacagtgcacctggacctctatcttatggttccttaa

SEQ ID NO: 37748 - DNA, 201 bp, Homo sapiens
gtggcgtaatcttggcttactgcaacctgtgtctcccagattcaagcgattctcctgcctcagcctcccgagtagctgggattacaggcgcccgccaccasacatggctaatttttttgtatttttagtagagacagggtttcgccatgttggccaggctggtcttaaactcctggcattagcttatctgtccatctcggc

SEQ ID NO: 37749 - DNA, 201 bp, Homo sapiens
aatggcgtgaacctgggaggcggagcttgcagtgagccaagattgtgccactgcaatccggcctgggctaaagagcgggactccgtctcaaaaaaaaaaaagaaaaaaattgatggagaactgatggtttttcctacagaacaattagattaattcagatgctggctgggtgcagtggctcatgcctgtaatcccagcact

SEQ ID NO: 37750 - DNA, 201 bp, Homo sapiens
tattaatagaatgactaaaaggtcattctgctggagaaggagtcagtcgactttttctgcaaaagaccagacagtaaataggctttgtaggtcatgctgtstctgccatggtaggcaaaagcacctacagacacgatataaatgaatgtgcatggctgtgttccaataaagcttttatttgtaaaagcaggtacaaaaatg

SEQ ID NO: 37751 - DNA, 201 bp, Homo sapiens
tgaatgtagatgaaaatacttcattgtctacttttagggtttaattttgaccatccatgtgcttaatatttatagtctaatggttaatatgctgttcggcrgataaggagcatccatgtgtcaggcaccttgtgaggcagcatgaaggactgagacagatgaggtccctgtttgaagaggcaggagataagccggaaaaac

SEQ ID NO: 37752 - DNA, 201 bp, Homo sapiens
ctctactaaaaatacaaaaaattagccgggcgcggtggcgggcgcctgtagtcccagctactcgggaggctgaggcaggagaatggcgtgaacctgggaggcggagcttgcagtgagccaagattgtgccactgcaatccggcctgggctaaagagcgggactccgtctcaaaaaaaaaaaagaaaaaaattgatggagaa

SEQ ID NO: 37753 - DNA, 201 bp, Homo sapiens
gaaggaaaaaataagaaaaatggtatgtcgtgtctctgtacctttttcaatttcattttaaaaatagacaatacctggccgggtacggtggctaacacctrtaatcacagcactttgggaagctgaggcgggcagatcacttgaggtcaggagtttgagaccagcctggccaagaggtaaaacccccgtctctaaaaaaat

SEQ ID NO: 37754 - DNA, 201 bp, Homo sapiens
ccagcctgggtgacagagcgagactctgtctcaaaaataaaataaaataataaaaggacactataaaataataaaagtcccttcaaattaggaacttccarttgaatccgaagataaaacaaataacagcaaccatatatgatgtttttatttaaactcaacactgaaggatcaaaattatatcggcctcagtttctgtgg

SEQ ID NO: 37755 - DNA, 201 bp, Homo sapiens
gcctcccagattcaagtgattctcctgcctcagcctcctgactagctgggattacaggtgcatgccaccatgcccagctaattttatatttttagtagagrtgaagtttcaccatgttggccaggctggtctcgaaccactgacctcaggtgatccacctgcctcggcctcccaaagtgctgggattacaggcatgagcca

SEQ ID NO: 37756 - DNA, 201 bp, Homo sapiens
cattttggaagtaagaggccagacttgatgccttcagacatttattatttctaacactggtgcatgcatctttcctgtctctcacaggtggcttggtgcargtgtagttttatcttgttgaaagccttttgttcttctttgaacagtgggactgtagtgttatcaacagggccagtgctaggaccagaaagctttcggtgt

SEQ ID NO: 37757 - DNA, 201 bp, Homo sapiens
ccgtccctggccttgttttttgttttgtgtttatgagatggagttttgctgtttttgcccaggctggagtgcaatggtgtgatctcggctcacagcaaccwccgcctcccagattcaagtgattctcctgcctcagcctcctgactagctgggattacaggtgcatgccaccatgcccagctaattttatatttttagtag

SEQ ID NO: 37758 - DNA, 201 bp, Homo sapiens
tgaaagccttgtcataatattagaataatgatgtgtgtggactatcctgagtactggatatctaaatttatcttttaagaaaaatggaagggagagcatcrggaagaatagctaatagatactgggcttaatacctaggtgatgggttgatctgtgcatcaaaccaccatagcacatgtttacctgtgtaacaaatctgca

SEQ ID NO: 37759 - DNA, 201 bp, Homo sapiens
gctgggctacccttcctctcagtgtaggtcagcccgtccctggccttgttttttgttttgtgtttatgagatggagttttgctgtttttgcccaggctggmgtgcaatggtgtgatctcggctcacagcaaccaccgcctcccagattcaagtgattctcctgcctcagcctcctgactagctgggattacaggtgcatgc

SEQ ID NO: 37760 - DNA, 201 bp, Homo sapiens
atactataaacactataaatatacatgtaaaggtcttggaacagtccttagcacataataagcattctttatgcattcgccattatactgttcctactacmagaaggaatggatatggcccctgccttcaagtaatggagaagaaacaagcaaattcaatgcactgtaccaggagctgagctactgagtcacgaatggggg

SEQ ID NO: 37761 - DNA, 201 bp, Homo sapiens
ttacattgttgttctctttgagaaacttcagtagtttctcagaacattagaacacagttctccttggaacctcacactgtatgacacttggcaagtgttcrtcattgtattgaaagaacaaatacatgtctgtagaacagaaaactttttgttgagcgagtaaatggatgtctgtgcaatagacgtgacacgtatacaaca

SEQ ID NO: 37762 - DNA, 201 bp, Homo sapiens
cagctggatgaccttgggcaagttacctaccccctctgtgcctcagtttcttcatctgcaaaatgagggtaatgatggagccaacctcacatggctgttawaaacattgaattgacatactataaacactataaatatacatgtaaaggtcttggaacagtccttagcacataataagcattctttatgcattcgccatta

SEQ ID NO: 37763 - DNA, 201 bp, Homo sapiens
agaggtttttggtactgtttttagaaccttgttctttgaaacacataattaaggaaacgggtaaggaagattgtgctgccccagagattaaattttctgggtttcagcgtcctcatctttcaaatgaatgtgtcatcaaattagaagtcatttcaggttctgagaaaatttcagatttcaaatgaaatgtagtagccctga

SEQ ID NO: 37764 - DNA, 201 bp, Homo sapiens
gtttattgtgtgtgagctactaccccctagttttaaaatttccccttattggcccagtgcggtggctcacggcctgtaatcccagcactctgggaggccasggcgggtggatcacgaggtcaggagatcgagaccatcctggctaacatggtgaaaccccatctctactaaaaatacaaacaattagctgggcatggtggt

SEQ ID NO: 37765 - DNA, 201 bp, Homo sapiens
aaaacaaaaaaccaacaaccccttttatataggctcttgtagatccacttcatttttcctaagggcagcatggtacttcattgtatgggtgtattatcatctaatgaaccagctgtgcactgaagaacatctaggtggttactggtcttttgacttcagaagaatagaatccacgttagcttgtctgtgaaacaaattatc

SEQ ID NO: 37766 - DNA, 201 bp, Homo sapiens
ctcgatctcctgacctcatgatctgccaccttggcctcccaaagtgctgggattacaggcatgagccaccgcgcccggactttaatgaattgaatattttwaaaaatatcagtctttaataccacaccataaaatccaaatggcagttgcattcatttcctattgttgctgtaacaaatggccacaaaccgagtggcttaa

SEQ ID NO: 37767 - DNA, 201 bp, Homo sapiens
gctcatcaacttcttgcaccaaaccagccctccttccctcccccactccagtgatggggtgcttagctgtcctagcagggaccccagagttattcttaatygcctccctcatccacgtctctcacacatctgccactcctgccagctatccttccaacacctcttccatctgtctcctctgccctgttctcgcagatgctg

SEQ ID NO: 37768 - DNA, 201 bp, Homo sapiens
gtactttaaaaatcaatacattgaatgacttttgtttccagtgattggtttctgtacaccgttcttatatattttatttatatctgttaactcagtccttmcgacaactctgttaggtagttgttagttctgttttatttatgagaaaatagagactttagggaagttagagaatgggcctcagggcttgtcggtaagtga

SEQ ID NO: 37769 - DNA, 201 bp, Homo sapiens
tctcagcctactgcaacctccatctcctgagttcaagtgattctcacacctcagcctcccaagtagctgggattacaggtgcacactaccgcacccgcctratttttgtatttttagtagagatggtgttttgccatgttggctaggctggtcttgaactcctgacctgaagagatccacccgccttggcctcccaaaatg

SEQ ID NO: 37770 - DNA, 201 bp, Homo sapiens
tccagctaatttttgtatttttagtagagacagggtttcaccgtgttggccaggctggtctcgaactcctgacctcaaatgatcctggctcagcctcccaragtgctgagattacaggcgtgagccactacgcccggccagaagctggtatttcattcctgttgagcaaacatgagaatgaagtgtcctgtctattaaaaa

SEQ ID NO: 37771 - DNA, 201 bp, Homo sapiens
tttgaaaggcgttgtctgatttcagaagccttttcctgtaaacgctgggcggcatctcttactatccctgacctgttagtgtaaaaacaacactcttcccytaagaaggtgcagcagtcctcctttctcagcagtgaggaggtctatgcctcagaggcttcggagtgtcactgctgccagagtctatttgggattgtagag

SEQ ID NO: 37772 - DNA, 201 bp, Homo sapiens
gttttattgcttctgtcacttattgcaaaattactttccagaaagcctgcagcagcatataatcccatcagtaatatcctagagtactcctctttgtccaygtatcagttcactctaggctttgtcatttgtatttattcatcttagtttattgtgtgtgagctactaccccctagttttaaaatttccccttattggccc

SEQ ID NO: 37773 - DNA, 201 bp, Homo sapiens
caccttaatcagttgttcagtgaaacctctaaatagcaatggcaacacaaaatcaccacacacatacacacgcatacgcgcacgcgcacgcgcgcgcgcgsacacacacacacacacacacacacttccccaaagagcaaagtctttttctaactctgaaaatgttttttgaacctaccaaaatttttatgcagtaaagtc

SEQ ID NO: 37774 - DNA, 201 bp, Homo sapiens
ctggagatgatcagagtatagattcgcttggcttttaaatagagtcataagagattaataatcttctcagaacttgcctcctgcctgttcagatgaaatayatgttttattaacattgtttcagctgacatgaaaacaggatatgaaccaaagtcattttaaaagcgctgtctgtgatgagcaatagcaggagaaaaagga

SEQ ID NO: 37775 - DNA, 201 bp, Homo sapiens
agatcctggaagtccggccctgctgagggagcctgactgaccttcttctcctatgaaagtcaccataaaatgatcttttgtccttttttttttttttttttgagacagagtctcgctctgtcacccaggctggaatgcagtggtgcaatctcggctcactgcaacctccacctcctgggttcaagtgattctcctgcctca

SEQ ID NO: 37776 - DNA, 201 bp, Homo sapiens
tgtctcaaaaataaaataaaataataaaaggacactataaaataataaaagtcccttcaaattaggaacttccagttgaatccgaagataaaacaaataayagcaaccatatatgatgtttttatttaaactcaacactgaaggatcaaaattatatcggcctcagtttctgtggccttctaatgtagctgatatctcttt

SEQ ID NO: 37777 - DNA, 201 bp, Homo sapiens
aaaacaggatatgaaccaaagtcattttaaaagcgctgtctgtgatgagcaatagcaggagaaaaaggaatccagccaactccctactgtttgtggcatcmttcccttagcttcttaccaacctgatcaggaagaagggagttcactctttcccctacttaggtatttattcacatattcaagaatattgattgattgcct

SEQ ID NO: 37778 - DNA, 201 bp, Homo sapiens
ccctagggctcactgaggcagtactttactctgcaggtaccattgcatggtgctggctccataaaatatttacacacagaagaacatctcttggccagacrtattataattactgcgtatcttattagccttgggctcgtttgatagcgtggagggaatgtctgcaagaataaccctgagagccctcagatgcttaatttc

SEQ ID NO: 37779 - DNA, 201 bp, Homo sapiens
caactccctactgtttgtggcatcattcccttagcttcttaccaacctgatcaggaagaagggagttcactctttcccctacttaggtatttattcacatrttcaagaatattgattgattgcctactatgtgccagacagtggtaagtgaacaggcagaaaggttcttgctcgcatgagctttactttcttggtggagag

SEQ ID NO: 37780 - DNA, 201 bp, Homo sapiens
cacactctgcttcacatgtttacatcactggcctgtctgtagagtcagtctggtccattgttgacttccgaggcttttccaatctgctttccttgggaatstttttttttttttttttttggagatagagtctcactctgtcgcccaggctggagcgcaacggtgtgatctcagctcactgcaacctccgcctcctgggtt

SEQ ID NO: 37781 - DNA, 201 bp, Homo sapiens
acgcctgtaatcccagctctttgggaggcctaggcaggagaatcacttgagaccaggagttgaggagcagcctggacaacatagcaagaccccatctctamaaaaaaaaaaagattttaaattagccaggtgtggtggtatgtgcctgtagcccaagctacttaggaggctgaggcaggaagatcacttgaacccagaaat

SEQ ID NO: 37782 - DNA, 201 bp, Homo sapiens
tccatcacttgcctctggtgggatctttggcatgttacctaaccctctgtgcttcagtttcttaatctgtaaaactgacataataaccatatctttttcayagggttgctggaggtgatcagttagataatccttacaaagtacctacttagcacaatgcctggcacataataagcattcaataaatgttatatagcgtta

SEQ ID NO: 37783 - DNA, 201 bp, Homo sapiens
tttttttttttttttttttttggagacaggatctcacttctgtcacccaggctgaaatgcagtggcatgattatggctccatgcagcctccacttcttggrttcaggagattctcccacattaggctctttttttttttttttttttttttaagatgggagtctcactctgtcacccagattggagtacaatggcacaatc

SEQ ID NO: 37784 - DNA, 201 bp, Homo sapiens
cttccaaagtgatgggattataggcatgagccaccgtgcctggccttcttccccagtttgataacagttgaaaaccactgactgataaaattaataaagtmcaaagtacttatttaaatgtgtaatttttttttttttttttttttttttggagacaggatctcacttctgtcacccaggctgaaatgcagtggcatgatt

SEQ ID NO: 37785 - DNA, 201 bp, Homo sapiens
accttgccttcagtagcccccgcagttggtccgaattccagtcctccaggcgagtcgctctgagttgggttcccacggtgcgttttaggctgtccagtgcygaatctcaccccctaagaggactgttgcacatgacacacccaaatagaaaaacattctccagggcggaggttttttaggtattcccacagcaaactaaga

SEQ ID NO: 37786 - DNA, 201 bp, Homo sapiens
aaccttgccttcagtagcccccgcagttggtccgaattccagtcctccaggcgagtcgctctgagttgggttcccacggtgcgttttaggctgtccagtgycgaatctcaccccctaagaggactgttgcacatgacacacccaaatagaaaaacattctccagggcggaggttttttaggtattcccacagcaaactaag

SEQ ID NO: 37787 - DNA, 201 bp, Homo sapiens
caaaggtaagctctgtgttgctgctgagatgtggttgaagagaaaccatgagttggttccttggttatgatacttaaccttctcttggaaccatcagatcrgagatagataaactcagcaaatgaggtctttggagtcgccatgttaccagcttcatcccactttctacttcctggaagagacagtggagtagaatgttaa

SEQ ID NO: 37788 - DNA, 201 bp, Homo sapiens
gcactttgggaggccgaggcgggcgaatcacctgaggtcaggagtttgagaccagactgagcaacatggtgaaaccccgtctctactaaaaatacaaaaattagctgggtgtggtggcgccgagtaatctcagctactcgagaggctgaggcaggagaattgcttgatcctgggaggcagaggttgcagtgagctgagatg

SEQ ID NO: 37789 - DNA, 201 bp, Homo sapiens
gctgctttggaaaacagtctggcattcttcagaaggtgaaacatagttactttagacccagcaactcagttcctaggcgtagacccaagagaagtgaaaaygtttgtgcatgcaaaaacgtgtatgcaaatgttcacagcagaattattgatgagagtcaaaaagcgaaacaacctgaatgtcctgacaaatcaactgaca

SEQ ID NO: 37790 - DNA, 201 bp, Homo sapiens
tagattccccccgcaggatcctcacatagcattatacctttcttggatcagtttaggtttcatcccacagctcttctacaatctcatttggttgttgtggstataactagtgtatcaattgtgtattgccacaattaatgctgcataatgaagcaccccaaaattcagtggcttaaacaatagccattagtatttttggga

SEQ ID NO: 37791 - DNA, 201 bp, Homo sapiens
tgatgcatagtattccattgtaggatgtgatcctttatttaatcagtttcctaatgatggacatttaacttgtttttgatttttttctaatagaaataatrctgcttatttgtccttatgataaatacctaaaatttgctttgtcacagcatattctaatatgcaaagtataaatgctgatgtgctgtgaatgaacagtta

SEQ ID NO: 37792 - DNA, 201 bp, Homo sapiens
ttctttgtagtaagctatttgttttgtgtggttttcttcatctgtgttttattttaccataaaaagattttaaaatatttttatgaaagaatgacactatrcatactgcctttctcccaacttttattatgagaagtttcaaacagaaaaattgaaagcattgtgtaggcaatacctatatactcatcatactgttttaca

SEQ ID NO: 37793 - DNA, 201 bp, Homo sapiens
tggttatgttgtcatccttatttattcatcttctaatttcccaatgctgtccatctgggtttttctcaggtctctgtagaatcctttttttttttttttttgagatggagttttgctcttgttgcccaggctggagtgcagtggcgtgatctcggctgactgcaacctacctcccaggttcaggtgattcccctacctcag

SEQ ID NO: 37794 - DNA, 201 bp, Homo sapiens
aagagagactttgtggggctcttcgccttgctatttttacactttgacttccaggccctgcttcctgttccctcacaaaagaacaaaaagcacaaattacraagagccgcagagcccctttgaaaggacaccgatggctttcagctcccactcttgacctgtcccctgtcagcaggtgacagtgccttcagtcagaggcag

SEQ ID NO: 37795 - DNA, 201 bp, Homo sapiens
actctttgtatttagcccaaaggaagccctcaacaaatgttagatacttaatattacctggagccctatccctgtgggctttggttaggccccataggcargccacaagtggcaatatttgggggcagtaccctttctgtataaatcctgactataacaataaaagacttgtacctcctgtccctgtttcagttaacaatc

SEQ ID NO: 37796 - DNA, 201 bp, Homo sapiens
gcctgagggattgtaacattaaatagcaattaaaaaacacattaacggccagatgtggtgccttacgcctgtaatcccagcacttttggaggccgagggcrgcggatcacctgaggtcaggagttcaagcccagactggccaacatggtgaaaccccgtctctactaaaaatacaaaaattagccaggcttgttggcacat

SEQ ID NO: 37797 - DNA, 201 bp, Homo sapiens
tgagggattgtaacattaaatagcaattaaaaaacacattaacggccagatgtggtgccttacgcctgtaatcccagcacttttggaggccgagggcggcrgatcacctgaggtcaggagttcaagcccagactggccaacatggtgaaaccccgtctctactaaaaatacaaaaattagccaggcttgttggcacatgcc

SEQ ID NO: 37798 - DNA, 201 bp, Homo sapiens
agaaccatagtccctcccgccgcctggaaacatatatatatatatatgtgtgtgtgtgttcagccaagtcattaaagtatttttgctgcagcgcaggcatygctctaagtagcactccatctacacaaaatgaatagaaccatagtccctcccgcagcctagaaatgtatatatctcaggtaggcaaaacaatggcagaga

SEQ ID NO: 37799 - DNA, 201 bp, Homo sapiens
tgattactaaattgttaaagtatttaaaatcattacagaagaaaatcatgaccgtgatattttgttgtgatcattaaaattcccttggtttaagctcaaaycgttgcacatataccacacaatcaaataataatactagaagttcttaatgttggcacagaagatttcttgatgttttgtagttatactgttttttttgtt

SEQ ID NO: 37800 - DNA, 201 bp, Homo sapiens
tgctttgtcagataggagccttctggtgtcaaggtgtttcgtgttgttttatttttttgagacggtcttgctctgtcacccaggcaggagtgcagaggcaygatctcagctcactgcaacctccacctcccgggttgcagtgattctcacgtctcagcctcctgagtagctgggactacaggtgtgcgccaccatgcctgg

SEQ ID NO: 37801 - DNA, 201 bp, Homo sapiens
gaagcttgtctggggatgaataaattatagcagttggaataattatgatagaggacaagcagcagccgagagtacaattgacaatggggccaagttggccygattctgtcgtatcagagcatgcatctgtttgccaggttacctgaaaatgctgttttcgaggattctggtgtgttttgtttttcatcgccctccctttta

SEQ ID NO: 37802 - DNA, 201 bp, Homo sapiens
tcctttttcccttccctatactccacatgaagaggattaggatgctgggggtaggtcagaaagggtcccatgtgtgtgagaggacaggctttgcccctgaraaagatgagaagaatgtgttgtcctcagggcaggaggcacagcacctctgctaaaggaagagcggggaggaaatgccccagccagacttgggaagcttaa

SEQ ID NO: 37803 - DNA, 201 bp, Homo sapiens
aaagccccatttctactaaaaaaaaaaatacaaaaattagctgggtgtgtttgagggcgcctgtaatgccagctacgagagaggctgaggcaggagaattgcttgaacctgggaggcggaggttgcagtgagccaggattgtggcattgcactccagcctgggcgacaagagcaaaactcaaaataataaataaataaata

SEQ ID NO: 37804 - DNA, 201 bp, Homo sapiens
acgttgccaactattttctagaaacattgatgcaatttggtctattgcctccaaatcccaatactattcattatgaacttactatagccagatttatcttycctgtagcccccacttacccagtttcatttctgtgattgcagtttcccatagtacagtacactaagatagttatgagaaatagagaccacattcacttgc

SEQ ID NO: 37805 - DNA, 201 bp, Homo sapiens
ccagcacttcgggaggccaaggtgggcggatcaccggaggtcaggaattcgagaccagcctggccaacatggtaaagccccatttctactaaaaaaaaaaatacaaaaattagctgggtgtgtttgagggcgcctgtaatgccagctacgagagaggctgaggcaggagaattgcttgaacctgggaggcggaggttgcag

SEQ ID NO: 37806 - DNA, 201 bp, Homo sapiens
aaccgagatcgcgccactgcactccagcctgggcgacacagcactccagcctgggcgacacagcgagattctgtctcaaaaaaaaaaaaaaaaaaaaaaaatcccagcattttgggaggctgaggtaggcagatcacttgagcccaggagtttaagaccagcttgggcaacatgatgaaaccctgtctctacaaaaaatac

SEQ ID NO: 37807 - DNA, 201 bp, Homo sapiens
ttagttagggccttctgttgtgtttgaagtgctgtgttcctattataatggatactgatctggctaacatttaacaagaatcacagccttaatgaaaaacrtggaaaacatttattttcttttaaaaaataatattttcttttgtttttgatagaatcaagtagaagtggccaggcatgatggcttatgctgtaatcccag

SEQ ID NO: 37808 - DNA, 201 bp, Homo sapiens
acggcattaaagcactcttactgtccaagagataggctgtgggtaaatagtgtagtgcctataaaacattttcccccaaatcttttaacttaaaaagttartactggggacaaaattgacacagatagctcagaggttccccagtggcactcaagcatgtgttggtgtggcattgcctgcaaaacaccttcacattcctat

SEQ ID NO: 37809 - DNA, 201 bp, Homo sapiens
gttcacccgtctctgctgcttccagcccgggagaccttgggcaagtcacttccctttctttgatgggcctcatccatcaagctgaagacaagaaatcttgragttcagctctaaaagccaggttctggggctagctggggagctggagttcacttagagaatagcagaatatgaaggtgaagagatgagctaccatctgca

SEQ ID NO: 37810 - DNA, 201 bp, Homo sapiens
gtgtcagacagatcgtgtctgatgatcacaggtggtagaatttcagataaccacaggttcctgggaatctagaagctgttggaaaaactgggagtgatgtkctttctggcccttggagatcttttgggccagctgtgtggttttacagacgagatgctgaagcctggaccctgcgtggctgtgtgaggcgcccggttaatg

SEQ ID NO: 37811 - DNA, 201 bp, Homo sapiens
tggggagctggagttcacttagagaatagcagaatatgaaggtgaagagatgagctaccatctgcagttggagttcagatttgggatcaataaacttctgyagggcctcaaatcactagacccaccccaggtccattcagaagacagtcccagttgtcccacaggtggcagtaatgagccgcagtcaacacagcacaggag

SEQ ID NO: 37812 - DNA, 201 bp, Homo sapiens
aaataggttgggctagttaactgcagcaggaacatgcccttaaggcataaattgctcatgctattgtttgtggcttaagaacgcctttaagcggttttcckccctgggcgggccaggtgttccttgccctcattcgcgtaaacccacaaccttccagcttgggcgttagggccattgtgaacatgtcacagtgctgccgat

SEQ ID NO: 37813 - DNA, 201 bp, Homo sapiens
ttagaaaacaacagtgaaaagtgaaattagccctgaagatagttatcagtaacttttactgagtaccaggtattgttttaaggccaacttcgcagatatamattcatttaacactcactaggatcaggctctgcgctccggggctgaggatactgcagaccaagtccctgcctttgtgtaacgtacattccagggtgtgga

SEQ ID NO: 37814 - DNA, 201 bp, Homo sapiens
ccctctttctaattgattttgcagtctcctgtggcttgtaaatgagtgtatcacgcttcttagaattacgtctagtagaagtcctgtaataggagagcccraggggtatgccgactttaggttataggttacatatggcatctgttttgcctacttaaactattttatcttattaatgattttattgccttagaatccatt

SEQ ID NO: 37815 - DNA, 201 bp, Homo sapiens
gaagcaggtagattgggagggtggggggagcccatggtgatgagtccttagtggatgaaggattggcctggaggccactgtgcctttaagccaaaggaatraccagtggggacaagagtcggataaagtgtttgagaggtatttcacagcaggcaatgtcctgagttatcttttagcccaaacccttctccctcctcaact

SEQ ID NO: 37816 - DNA, 201 bp, Homo sapiens
tattatctattcaaataagcattgatcattgatccttggcttcattcataaacaaaaatagtctactggtttggatagtgtctatgaaaaaacatataatwatttataaaaaacaagtatcaacattggtctggcttgcattaaaaaatctttcggtgcagtttgttagtgtactgtctttaaggatgaaagaatatagtt

SEQ ID NO: 37817 - DNA, 201 bp, Homo sapiens
ccctagaggagtgggctccagtgtgttccttcttgccttgtctgcctggtcattttgacatagaaatttcagctgtgttgaattggcttggtggatatttytggaatcaggcttgaaaaggagagaccttccctgtgacattagtaaaaacaaaaaagtctgagtcatgtggatcacctgaggtcaggagtttgaggccag

SEQ ID NO: 37818 - DNA, 201 bp, Homo sapiens
ttcattcataaacaaaaatagtctactggtttggatagtgtctatgaaaaaacatataataatttataaaaaacaagtatcaacattggtctggcttgcawtaaaaaatctttcggtgcagtttgttagtgtactgtctttaaggatgaaagaatatagttttgaatgtaatcgtcatgcatctgaggccctttgaggaca

SEQ ID NO: 37819 - DNA, 201 bp, Homo sapiens
aaggagggcagctgtggtagtttgctggagggaacgaaatgaagtattattgagggaaacagccaaaatgcaagcccttctggggagaggttgcatgtgcrgtttgccaagtactaagcactttctcagtatcttatgggagtggctcaaggcgggggcagacttcatttgatcctcacaacagttctttgacagagacag

SEQ ID NO: 37820 - DNA, 201 bp, Homo sapiens
agagaagcaaaagaggaagctgcagttttgagactggatagaccaagaaaagagataggagaaacaaggggttgggtttgttggggtgatgtctgtcttaracatgtcaggtttcagggactgctgaaggctgtaggcctgggtgcgtgtgtcagacactgcccttgatgcaggctcagccaggggtgggtgaggaatgag

SEQ ID NO: 37821 - DNA, 201 bp, Homo sapiens
gtggttgaaagaacttaattctggagattttagataaggtggtgattgtgaccagagcagtgtttatctggcattgtagatctgcgatagatccgggacartgtatggggaggaattagactggctgtcaggggaggagttatgggactgtgcaggactgttttaaaaatgggttggacaaagagctaggcacattgagaa

SEQ ID NO: 37822 - DNA, 201 bp, Homo sapiens
tccccttgggctctccagagtgtatttatatctgtgctttccttgttgtgagaacttcagcagtctcttccttttgattctcattgcaccctgtgctttagtagtaactccccatccagctctctttgtggtggtagaaacccagctcctacccagtaactgctgccactccttttccttggagttagtattctcatgttc

SEQ ID NO: 37823 - DNA, 201 bp, Homo sapiens
tcttactctcctaaccctaccttcccagccatgggtttagtatctgtttcagcttgagtttctgatgcagaaacacaaatgtgattttctcaaattacaawcatggaacttgccagacagccagctttttccttggccctccgtgactgtgtgtccctgtgcatgcagtacccctgtccttgcaattctgctttccaggga

SEQ ID NO: 37824 - DNA, 201 bp, Homo sapiens
gtcatagtgatggggtttcactatgttggctaggatggtctctatctcttgacctcctgatccacctgccttggcttcctaaagtgctgggattacaggcrtgagccactgcacccagcctacatggtgctttaaaagaagttgggaatgttactgttagtccacaactccctggcttgcttttttttttttttttttttt

SEQ ID NO: 37825 - DNA, 201 bp, Homo sapiens
agggtgacgagccctcgggaagtagggaaaggcctcatgggagagatggcatttgtttgatctggaccttaactcataagtaggcatttgcaaaatggaawtttgttatttaaatcataaaagcattatattctgattacctggtcatataaaaaaatcggttaaaaaatagtaacattaaatttaatcaatagtggatgt

SEQ ID NO: 37826 - DNA, 201 bp, Homo sapiens
cacgccattcttctgcttcagcctcctgagtagccgggactagaggcgcccaccaccacgcctggctaattttttgcatttttagtagagacggtgcttcrccgtgttagccgggatggtctcgatctcctgacctcgtgatctgcctacctcggcctcccaaagtgctgggattacaggcatgagccaccgcgcccggcc

SEQ ID NO: 37827 - DNA, 201 bp, Homo sapiens
ctctgtctcaaagaagaaaaaaaaaatagaaaggtggtgtggggacaaatcgaggtaacacatgtataagaaataaatattattgatcttttagtagttcrtaagcatggtgattggcttttcatgtgcatgtgtgaaatgtgccttccacaaaccttgttacaaagttggcacactaccattgatgtgaaagaaaaaagt

SEQ ID NO: 37828 - DNA, 201 bp, Homo sapiens
agaagttctgagacgaaatctttctatttgcaggttcctgttgtcactatgataaagagtgctggggcatctgttttgtgctaaagctaactagaagtgtygctgctctgagcaacaggcaggaagtacttctgtccttaaaaccaaaaatagatgctctttctcattatcatagctcaaatgatcatcttttttaatgag

SEQ ID NO: 37829 - DNA, 201 bp, Homo sapiens
taaaaccaaaaatagatgctctttctcattatcatagctcaaatgatcatcttttttaatgagatgggcacatcccttgtggttttcacagatttaatgamcagattatttaatgcagagcttggggaagaacagctctggtaagaaagatgatggaaattttactggaagcaaaaataacaactttattccttctttttt

SEQ ID NO: 37830 - DNA, 201 bp, Homo sapiens
aataactgtgacttattacaataaaaatgtacttccctttcacatagaagcctggcagtagcagtccactaatatgatggctctgccctacaaagacctcrggaaccaaatttcttctgccttcctgctctgctgtccctaggctatgtcctcatagtccaaggcagcatctctgttgcaggcagaaggaaaaagtatgcc

SEQ ID NO: 37831 - DNA, 201 bp, Homo sapiens
  misc_feature (1)...(201): n = A,T,C or G, or insertion/deletion polymorphism (see Tables 1-2)
tggccatctggaaagatgaagtttcttacgtactttcgcttcctgattcctcccactctcaaaacaagattttttcaaagtgcagtcagaaaataaaagcntccagtcttgaaaacaggactcattcttcctccagaccttgtacagactgtcaacaacccacatttttgtatagcccaggaaccctataattacaccgtg

SEQ ID NO: 37832 - DNA, 201 bp, Homo sapiens
atttttcatgattcttaaagggattcacttgtcttattttaatatattggtatgtttacacatttctcactatattttaacttccaagagaccattaccayggagaaaaaaaattatttgttaagagagttggaggtgtcaggatttaggtatactgtatgtggtctgacttgctttggacagctctgccaagtattgtgt

SEQ ID NO: 37833 - DNA, 201 bp, Homo sapiens
agggtgaggattgcaaaactacctattgggtattatgctcattacctgcgtacaaaataatctgcataccaaacccccacgacacacaatttatccagatwacaaacctgcatatgtgcctctgaacctaaaataatagttagaaagaaaaaaaatgaatagattaaaaataaaataaatgtactcctagccaagcatggg

SEQ ID NO: 37834 - DNA, 201 bp, Homo sapiens
aataaataatgcatatccatgctaataagtatttacctacagcatcacttttagtgaaagggaaacaactggatcttagccttttgtttaattttgggctrtcctggctttcagttagaaaggagtgtaaatatgtggaatatatggcataggtttttcatgtgagaacagaacagaaaaggattccccatttagaatctt

SEQ ID NO: 37835 - DNA, 201 bp, Homo sapiens
ccctcttggggttcttaattatgtatatttgaagtcttctccctgcattgaccctgttccctcctgaagttcctgtctgtcatgctggaccctatttcacrtgcttggtgttcatcttgtcatctttattcatgaggaggcacaaagcaaggctttgtcaattggtggcctcgcataagatgaccacctcttttcagaagt

SEQ ID NO: 37836 - DNA, 201 bp, Homo sapiens
tggcacctgcctgtaatcctagctacttggtaggctgaagcagtagaattgcttgaacctgggaggtggaggttgcagtgagacaagatcgcaccactgcwcttcagcctgggcgagagtgagactcagtctcaaaaaaaaaaagaaaaaagggaatcactgcacaatacaacaaaatatgtttaaatccatgagttcata

SEQ ID NO: 37837 - DNA, 201 bp, Homo sapiens
gtgggcagatcacgaggtcaggatatcgagaccatcctgactaacacagtgaaaccccgtctgtactaaaaaacacaaaaaattagccgggtgtggtggcrggtgcctgtagtcccagctgcttgggaggctgaggcaggagaatggcattaacccgggaggaggagcttgcagtgagccaagatagcgccactgcactct

SEQ ID NO: 37838 - DNA, 201 bp, Homo sapiens
ttgtgatttttgcacattgattttgtatcctgaagaatatattttcaatactggagataggtttcccaaagacaattgtgtgtgtgtgaaggtcttttaaycaaaaaaaagataatttttgagactttattctcaggttgttcttgaggtaatatacgttcttgattcctccagtatcctaaagtagttgttcatatgtcc

SEQ ID NO: 37839 - DNA, 201 bp, Homo sapiens
aatgcaaaaaattagccaggtgtggtggtgcatgcctgtaatcccagctactcaggaggctgaggcaggagaattgcttgaacccgggaggcagaggttgyggtgagcccgagattacgctacagcactccagcctggaggacagagtgagacaccatctcaaaaaaaaaaaaaaaaaaaaatagagacagacttctggca

SEQ ID NO: 37840 - DNA, 201 bp, Homo sapiens
ataccctgccattgggggctggtgtggatattggaggaagaatatattttcttttctttttttttttttttaatttaagttctagggtacatgtgcacaaygtgcaggtttgttacataggtatacatgtgccatattggtttgctgcacccatcaactcgtcatttacattagttatttctcctaatgctatccctcccc

SEQ ID NO: 37841 - DNA, 201 bp, Homo sapiens
tgttttttaaaaaaattctgggccgggtgcggtgtctcatgcctgtaatcccagcactttgggaggccgaggtgggcagatcacaaggtcaggagatggaraccatcctggctaacacagtgaaaccccgtctctactaaaaatacaaaaaattagccgggtgtggtggcgggcgcctgtagtcccagctactcagaaggc

SEQ ID NO: 37842 - DNA, 201 bp, Homo sapiens
aaaatttttgtaatctcaacattgaccacagtaatgatttgtgatatatgatttcaaatggtcttcctgagtatatacatgtatatatatgaagatgtacrtacatgtttgtgtgtggagagagggaatcacatcatgcatactactgttttttaaaaaaattctgggccgggtgcggtgtctcatgcctgtaatcccagc

SEQ ID NO: 37843 - DNA, 201 bp, Homo sapiens
tttgcatttctctgatgaccagtgacgatgaacattttttcatgtgtctgttggctgcataaatgtcttcttttgagaagtgtctgttcatatcctttgcmcactttttgatggggttgtttttttctcgtaaatttgtttgagttatttgaagattctggatattagccctttgtcaaataggtagattgcaaaaatttt

SEQ ID NO: 37844 - DNA, 201 bp, Homo sapiens
atacctctctgaacatgcataaggacacatagtgggttaagaacaaagccgtgggtatacatgagcgtggcttagcaatcccagttcggggaatttatcckcaaaaactatttctaaagaaaataggtctttaggccaggcacagtggctcacgcccgtaatcccagcactttgagaggccaaggtgggcagatcacctga

SEQ ID NO: 37845 - DNA, 201 bp, Homo sapiens
gtaccagtatataaaactccagaacgggcgcagtggctcacgcctataattccagcactttgggaggccaaggcgggcagatcacctgaggccgggagttsgagatcagcgtgaccaacatagagaaaccccatctctactaaaaatacaaaattagctgagcatggtggcacttgcctgtaatcccagctactcgggagg

SEQ ID NO: 37846 - DNA, 201 bp, Homo sapiens
ttcccatgatcgggaacttaattttgtttttagaataagttttcacagtgtctcacttagttctcagagtgtacagatgtttatctgtaaaagggaagctrctgtttttatattttgtgtggtcagatgtcatctttatctttttcttctttccttctaaaggtgaataccagagaagaagttgaagatctttgccgccta

SEQ ID NO: 37847 - DNA, 201 bp, Homo sapiens
ggttgctttgactctgaacatatgtctcttcccttccatcctttgactggaaaggaaggctccagttagcttataaatgtggcatggtcccagtgagaackggaaagaattgttttaaaaatgaaactgtactccatggattacaaggaagttagatcacatggtcattcatgttcggggaccttactttactttggtaag

SEQ ID NO: 37848 - DNA, 201 bp, Homo sapiens
gggaatgcaccaagtcaggcccagaggggccagatcaggtgtttgggaatttaaagcaaaacttaggccacacagagccaagacactactacaagcagacytgacactccagcaggcctgtgagccttcagactttaggccattctgcagagccagatgggtcctcagtggcttaggaaggcccctcccttacagctgcgt

SEQ ID NO: 37849 - DNA, 201 bp, Homo sapiens
agaccaggcaatttaaagtcaatgttgtggaggggtgtgcattattttggtttttagttttactaataattcttatgtctgcctaaagataaggatttttrtaaaagaaattgtacattatgtatcatttctattgagggtaggtgggtggctggtattctccttccccaaatactttagtacaacccccagaggagcttt

SEQ ID NO: 37850 - DNA, 201 bp, Homo sapiens
ttcagaactggaagaaatctttgatactatccactcattaatttaaagtaaaagaattaagacccacagagggtaaacctgttgttgcccaaggttccacagcttgttgttggcagaagactcctgatcccagctatacctctctgaacatgcataaggacacatagtgggttaagaacaaagccgtgggtatacatgagc

SEQ ID NO: 37851 - DNA, 201 bp, Homo sapiens
gcagagggtaaagaccaggcaatttaaagtcaatgttgtggaggggtgtgcattattttggtttttagttttactaataattcttatgtctgcctaaagakaaggatttttataaaagaaattgtacattatgtatcatttctattgagggtaggtgggtggctggtattctccttccccaaatactttagtacaaccccc

SEQ ID NO: 37852 - DNA, 201 bp, Homo sapiens
gtctattttttaggcctttttgacagccccccaggttcagatgatgcaaagcttattgatatattttatcccggagatcagcagtctgtgacatttggaaycaagtctagagtgggaatgggtggcatggaagccaaggtaagaatctggtgccttaactgcctataacaattttaaagcccaaactatattgtatccttt

SEQ ID NO: 37853 - DNA, 201 bp, Homo sapiens
tttctgaaaaggagttcatgatcttccctttcaaaaatatgctccattttatttttccccaagacatcaacattcttattctccattccagcagctagacyctggcatttcagaggtactcaacaaattttttatcgagtgagtgaattatttttctatatgtatgtttcctgtgttttatataccattaaggctactgtt

SEQ ID NO: 37854 - DNA, 201 bp, Homo sapiens
aatacagaagaagagtccacacactgtttcacgagaaggagtgtatcatgatttgtagtaatcgaagaacatgtttatgggaacagggtgactcagctctyctggggaggatggatgaggagttagcaggaagagagggtaccaagtgaggggaaagcagcagggtgggtctggggcatggacaggaagcagaggctggga

SEQ ID NO: 37855 - DNA, 201 bp, Homo sapiens
agagccagccacatgctggttcataaaccagcatttgggatctactcgatagcccaccctacctccatcccttgtgaagagatgaaagagacagtacggtracttacagtcccctttcctttctcaatgcccaggtatcagtgctgcagaatcagggcagagagatgatgctggtgaccagtggagccgtagcctttggca

SEQ ID NO: 37856 - DNA, 201 bp, Homo sapiens
ggtcatgttgtaagtcccttttgacccagacacagagagttttgtacacctgcagaaggtcacaaagctagcaggtgtacagctggagttcaggcctaggmagtctggctctggagcccataagtaggaagtttaggcaggtcacctgcatgggagatctggattccaactcagtctttccacaacaccgtgattgatgaa

SEQ ID NO: 37857 - DNA, 201 bp, Homo sapiens
tccagacatccaggcatcccacagataaagcaagagctattccatggcagctgaaatcttacactaccttgtaattaaattttcagtttttaaaaaacaakttcctgaggtgttaatattgggaaattgctaacctgaaacttgatacaatttttttcttatattttctattctaaattatcaagcctgagcaacaaagtg

SEQ ID NO: 37858 - DNA, 201 bp, Homo sapiens
ggtttttgaactcctgacctcaagttatccacccgtctcagcctcccaaagtactgggattacaggcgtgagccaccatgcccggcccaccttgcacatcsttaacgttcaaggcttcctgcttcaatccctgttccaactgtcttgagggcccattgctggcaagtggccagtcagatcatgctggagggaggaaagtag

SEQ ID NO: 37859 - DNA, 201 bp, Homo sapiens
gtacccctcagtcgtacacatggcaagtccttcgcccaccgcagtgagctgaagcatgccaagagaatcgtggtgaagctcggcagtgccgtggtgacccraggggatgaatgtggcctggccctggggcgcttggcatctattgttgagcaggtgattgccaagatagaaattatgctgtactaaaattgggtttttaag

SEQ ID NO: 37860 - DNA, 201 bp, Homo sapiens
ggacccctttattgtcagtatcactgatggcttcctataagtacatctgttaggaaaaagaactttcagtagttaatggaaattagaatgcaactgtcggycaggcacagtggctgacacctgtaatcccagcactttgggaggcccaggcaggtgaatcacgaggtcaagagattgagaccatcctggccaacatggtga

SEQ ID NO: 37861 - DNA, 201 bp, Homo sapiens
gggtttcaccatgttggtcaggctggtatcgaactcctgacctcaggtgatccacccacctcagcctcccaaattgctgagattacaggcgtgagccaccrtacctggccaactcagttctctttgctaatggtgctaaggaagccatatagtttagttgctaaaatccagtggtttgttctggagtcaaaccacctcagt

SEQ ID NO: 37862 - DNA, 201 bp, Homo sapiens
tcctgtctacctgagcaagaaaggctgggaaatgtagtctttcgactggtggcagtgtgcctggctaatacttggggatctggtaattgtgtgagaaaggkcgaatgggtaagtagtaagcagctaagcaggaggtgttgggcccataagaagtattgaaggggttctgtgcctgacattcagcttttactcttttacttt

SEQ ID NO: 37863 - DNA, 201 bp, Homo sapiens
tcctgggtttttaaaactagcccttctgcttatgaagtaacttcgtagcttaaaacaactgtctgtttaggtcacaattctgtgggatggtattttggackgggctcagctgcacagtggttctgtgtctgtgtcaggtctcagattgacttagggctgattgttggggatgaaggggcctctgctgggatgatacatcat

SEQ ID NO: 37864 - DNA, 201 bp, Homo sapiens
aatggcacagccaggttgcctcggagataggaaaccccacaatggtaggacaaaagaaggtgccgtgggcctaagtaccagcatcaaaacaaacaggccarccagaagtacaaggttaccttctacagcagaccttgaaataaaaagcttcagaagggcacttctgtccctttccattaggtataaaatttccagccctct

SEQ ID NO: 37865 - DNA, 201 bp, Homo sapiens
ggagttcttcctgcagcacgtagacagtgcctgtgtgttctggaatgccagcactcgcttttctgatggttaccgctttggactgggtaagaaagactctrgttgggaagaaagaagttccttgtgaagcactgtgtggtctaggggtatgttgaggtgggaaagacacctccccttgactgtcacatgcttggtcaagat

SEQ ID NO: 37866 - DNA, 201 bp, Homo sapiens
tgtgtatcagttagttcctttttattactgagaagtatgtaatgctatgagtgtatcacagttagtgtaaccattcacccattaaaggacatctgggttgytctcattttttggctgttatgaataaggctggtatgaacattgatgtacaggattttgtgtgaacatagttttcatttctgtgggataaatgcctaagag

SEQ ID NO: 37867 - DNA, 201 bp, Homo sapiens
aggcaggtcacctgcatgggagatctggattccaactcagtctttccacaacaccgtgattgatgaagctaacttgtcttcttcctgttgagatttttcayaagcctgagtatttaatacgtgagaacacatggagaggccccagtggggacccagaccctgccctgatctgtcaccagtcaatggctggaaacagggatg

SEQ ID NO: 37868 - DNA, 201 bp, Homo sapiens
aaccgagatttgtagccatattctcttcctccacaggattaagatgttagccagttgtaggcattgccactgccttccaggggtacaagagttattttgtmatcctgtgggcatcaggaagaaagacatggcagcagcctctggcctttcctcttgcttttcatggctggctggcaaggatcaagctgacatttcaaatag

SEQ ID NO: 37869 - DNA, 201 bp, Homo sapiens
cccacacggatgtcatcgtcacagaggacggtcagtgtccagatgcttcccgcatacagtgtctgcctttgctgctttctgatcctgctcctcttagcccsccttgggctgcagaaaaacatcatttgagtaggcttatggtaatgtttagtagtggttgcatttggtactttgatgagtgctttcacatcactttattgt

SEQ ID NO: 37870 - DNA, 201 bp, Homo sapiens
ttcaggcctaggcagtctggctctggagcccataagtaggaagtttaggcaggtcacctgcatgggagatctggattccaactcagtctttccacaacacygtgattgatgaagctaacttgtcttcttcctgttgagatttttcataagcctgagtatttaatacgtgagaacacatggagaggccccagtggggaccca

SEQ ID NO: 37871 - DNA, 201 bp, Homo sapiens
ccaaggcagaaccaactctgcacattcattcattcattcatttattccacaaatatgtatgcagggacactcctgggtgtcagatactggagcctcaatgrtggaggatgccagtagggccccaatgaggaatttacagtcagctaattagggcaccagagcagtaccacccgtattaacagccaacatttaccaagcact

SEQ ID NO: 37872 - DNA, 201 bp, Homo sapiens
ccccttgggctgcagaaaaacatcatttgagtaggcttatggtaatgtttagtagtggttgcatttggtactttgatgagtgctttcacatcactttattrtattgtcacagctggaggaggaggggcagggatgattagctctgcttcgaagatgactaaccctgtcagaggcactatcatttaatgcgtgcagcaaatc

SEQ ID NO: 37873 - DNA, 201 bp, Homo sapiens
tgttttaaaaatgaaactgtactccatggattacaaggaagttagatcacatggtcattcatgttcggggaccttactttactttggtaaggaagcctgtygattgggcacctgtgtttgccaagcaccacagtgaactggattagacaggaggaaagctctcctttagccaggactaaatccctccccagacctaatttg

SEQ ID NO: 37874 - DNA, 201 bp, Homo sapiens
atttcagttgtttttatgttgttgcccctggacttcctctgttccaggtaaaaattcatgcaggccccaaatttgcctcctatctgaccttcagcccctcygaagtgaagtcactccgaactgagtatggggacctggaattatgcattgaagtagtggacaacgttcaggatgccattgaccacatccacaagtatggca

SEQ ID NO: 37875 - DNA, 201 bp, Homo sapiens
cctgatttataagtgaggaaacagaggcttagaaaaattgggtaactcttacatatgtaactaacctgcacattgtgcacatgtaccctaaaacttaaagtataataataataataataataataaagaaaaattgggtaactctccacaagacacacagcaagtgcagagctcgaacccaaatctgaccaacttcaaagg

SEQ ID NO: 37876 - DNA, 201 bp, Homo sapiens
ctgatttataagtgaggaaacagaggcttagaaaaattgggtaactcttacatatgtaactaacctgcacattgtgcacatgtaccctaaaacttaaagtataataataataataataataataaagaaaaattgggtaactctccacaagacacacagcaagtgcagagctcgaacccaaatctgaccaacttcaaaggc

SEQ ID NO: 37877 - DNA, 201 bp, Homo sapiens
tttcaactggtgatgaccgtggatgtgggagcaaggcctggcactctcagaagagtaggtttaaaaactgtggtgtgcattcttcttggattaacatctcygtttttttaatggtgtacctttcttctagagagcagaaattatccatcatctggctgatctgttgacggaccagcgtgatgagatcctgttagccaacaa

SEQ ID NO: 37878 - DNA, 201 bp, Homo sapiens
gatttataagtgaggaaacagaggcttagaaaaattgggtaactcttacatatgtaactaacctgcacattgtgcacatgtaccctaaaacttaaagtataataataataataataataataaagaaaaattgggtaactctccacaagacacacagcaagtgcagagctcgaacccaaatctgaccaacttcaaaggcct

SEQ ID NO: 37879 - DNA, 201 bp, Homo sapiens
tacagttacataatctcctacagattatacagtctcctacagattgtatccatcatgccccttcccccccttttttttttcttatgactcctgattattaytattagccatggtttgctaattataataatcaggagtcataagaaaaaaaaaggaggaaaagtaagaagtgacctagaggttggcagtgagagaggaagg

SEQ ID NO: 37880 - DNA, 201 bp, Homo sapiens
cagaggcttagaaaaattgggtaactcttacatatgtaactaacctgcacattgtgcacatgtaccctaaaacttaaagtataataataataataataataataaagaaaaattgggtaactctccacaagacacacagcaagtgcagagctcgaacccaaatctgaccaacttcaaaggccttgttcctcatcgtttttg

SEQ ID NO: 37881 - DNA, 201 bp, Homo sapiens
ggggtgtcttcaagtacctaggactgaattttttcactttgattaaatgcattaaataaataatttacaaggaagaaccagatgtaaaaacttacctggamataaactaactaatgatattaaatatgtaagactctatgtaacatgttaattcaaagtactggcccctgtacagttacataatctcctacagattataca

SEQ ID NO: 37882 - DNA, 201 bp, Homo sapiens
acatcttttcatgtgtttatatcctcttcagtgaaatgttagttcatgtctttagctcattctttttgtttttttttgttttttgagatggagtcttgccytgtcacccaggctggagtgtagtggcgcaatctcagctcactgcaacctctgcctcccgggttcaagcgattctcctgcctcagttcctgagtagctggg

SEQ ID NO: 37883 - DNA, 201 bp, Homo sapiens
taattatttgggggttaatggttcagatagtaggcacatacacacttaaatatgtacatacctaaatacagatttaatgagtgttgcattccaacatttgsttatgtctgtgtatgtgggttttctcattaatattgtatgaacagtgtgttcatgttgtaaactctgcaagggcagggcctatatatttttcataattca

SEQ ID NO: 37884 - DNA, 201 bp, Homo sapiens
gcccaggagctcaaggttgcagtgaactgtgataaagtcgctgcactacaacctgggcaacagagcaaaaccctgaccacccccccacccgcccctgcagaaaaaaaaaaacaaaaaacacccagaacaacagcaatgatcaaacccacctcccagattgagtccatcagataaattttaaaaatatttatcaagagacta

SEQ ID NO: 37885 - DNA, 201 bp, Homo sapiens
ataggaacaggtaagttggggtaagtgtgagccaccctggagaaaaaaggcattttggttcatcaacaggttttctatttattcattctccccaccccccygagatggagtcttgctctgtcacccaggctggagtgcagtggcatgatctcagctcactgcaacctccgcctcctgggttcaagcgattctcctgtctca

SEQ ID NO: 37886 - DNA, 201 bp, Homo sapiens
tcctggggcttcctaggagagctggaactcagcctgggccttgacaactgatgggatttgcacaaacagaggggaaaagttccatgctactaagtacacagtgtgactggtgcccctgcagttgtgcaatccagtggttctggggaagggacaggctctaggagtgtattccaggtagaggacaggcaggaatgagtatgg

SEQ ID NO: 37887 - DNA, 201 bp, Homo sapiens
cccatgtggaaagtcagagatacgacacctacatgtcaatatctttacctgtaagaagtcttagtcctgtgttatccactgtaatttgaagtcccaggatrggaacaggtaagttggggtaagtgtgagccaccctggagaaaaaaggcattttggttcatcaacaggttttctatttattcattctccccacccccctga

SEQ ID NO: 37888 - DNA, 201 bp, Homo sapiens
cctggggcttcctaggagagctggaactcagcctgggccttgacaactgatgggatttgcacaaacagaggggaaaagttccatgctactaagtacacagtgtgactggtgcccctgcagttgtgcaatccagtggttctggggaagggacaggctctaggagtgtattccaggtagaggacaggcaggaatgagtatggc

SEQ ID NO: 37889 - DNA, 201 bp, Homo sapiens
agccagactccctttgcagtatggcattctgtgtatgctggggtcttcctgttacagcaggacgcacccacataccccacctcgtccttcccccatcattrtcccctgccctctgaggtggtgaggcccatcggatctttgtatttaagtggtgagccatataccgagcatgtgtttgtgggtgaactgtgctgggactga

SEQ ID NO: 37890 - DNA, 201 bp, Homo sapiens
aaggagccacttactttttctctcttttctataatatagaggaggtgggagtttccctaatacagaggagtttggagcaggagagtcagatttttactccragggtaaggggaagtagagggaaataaaatgaattgtccagtatttttcattactcactttttaaaaaatgtattctgcagatactttggttagtgacca

SEQ ID NO: 37891 - DNA, 201 bp, Homo sapiens
ccatgggtaggtgtgggcctcggccgagggatggcggctgcatcgggccgccagggcgcgctgcaagaccgtggcgcgctcccatatgccggtgcgcggcsgccccgggatctacggatggctacgggccctgacctccccggcctcccctgggtacaccatgtaaggaactgggccaagtggagacttcaggcatccgcg

SEQ ID NO: 37892 - DNA, 201 bp, Homo sapiens
gaggatcacttgagcccaggaattcaagatcaacctgggtaatatagtgagtccctgtttctacaaaaaatagaaaagtcagctggacatggtggtatgcrcctgcggttccagctactcggggctgaagcagaaggttcacttggagctgggagttccaggctgcagtgagctgttatcgtgccactgcactccagcctg

SEQ ID NO: 37893 - DNA, 201 bp, Homo sapiens
aaaaaagaattggatagcacccagatatgtgtatttcattctaatcttctaatctgtgtggggccccagaaacctaaagtttaactcccctgctcttagcrtcttttgtatactgggaagtttagcgtttttctccctcatgcattttccatctatttaatccttttagattttggtgaccaatttggatttccatgatga

SEQ ID NO: 37894 - DNA, 201 bp, Homo sapiens
tatagttttcagagtgagtcatgctgtgtagttacaggagtcaaacctgctgactccatctttattcctagtgagccacagagttatctgagttacaagtytgattcaaatttgctctgccttttttctttttcttaattttattttccgttttatcttttatagacagaggtccaagataacttttcatcactatgatgt

SEQ ID NO: 37895 - DNA, 201 bp, Homo sapiens
ggacaacgttcaggatgccattgaccacatccacaagtatggcagctcccacacggatgtcatcgtcacagaggacggtcagtgtccagatgcttcccgcwtacagtgtctgcctttgctgctttctgatcctgctcctcttagccccccttgggctgcagaaaaacatcatttgagtaggcttatggtaatgtttagtag

SEQ ID NO: 37896 - DNA, 201 bp, Homo sapiens
tcctgcttcaatccctgttccaactgtcttgagggcccattgctggcaagtggccagtcagatcatgctggagggaggaaagtaggactagttcagttgtygaggctacaggagccactttgggctgtggttttacaggctcacctttctgttctatcctagaacttgcttatttcagttgtttttatgttgttgcccctg

SEQ ID NO: 37897 - DNA, 201 bp, Homo sapiens
gttcaaggcttcctgcttcaatccctgttccaactgtcttgagggcccattgctggcaagtggccagtcagatcatgctggagggaggaaagtaggactasttcagttgtcgaggctacaggagccactttgggctgtggttttacaggctcacctttctgttctatcctagaacttgcttatttcagttgtttttatgtt

SEQ ID NO: 37898 - DNA, 201 bp, Homo sapiens
caaagtggaatgtgttgtgtgctaaagagggttcaaaggtaagacagaccacatggcactatgctgactgaactgtttctggcaaccttttattcacgtgtcaaggtgttcccaagcatatattattttttggatttgatttgaaaagatggtgcagaaacgtttcaaaccaaaaacttatgtacattcactgcctccccc

SEQ ID NO: 37899 - DNA, 201 bp, Homo sapiens
aatcaaatgagtagccacagtttcaggtgctgaaagcacctgaccaagtactgcttacctctaaagcaaacctgggacttcgctagggtacagggagtagsaatgtatatgtggcacctccctttttccacacgagtctagtgcctaggtaccatatgcaggaactgggatctttattgtcaagtattcattttaggaaaa

SEQ ID NO: 37900 - DNA, 201 bp, Homo sapiens
caatattagtgtacttaatgcagtgatatttgggattcagtaatttgtagaatgtctccctggattatgtttttactatattgttaaggttgtaaacaaaycaaaagccagtaagtttcaaatataaagttgtgctgtgtcctaaattcatgcctgcaagaaaatataatagatgccctcaaggcaaaaatggacaatctg

SEQ ID NO: 37901 - DNA, 201 bp, Homo sapiens
gctgaagcagtagaattgcttgaacctgggaggtggaggttgcagtgagacaagatcgcaccactgcacttcagcctgggcgagagtgagactcagtctcaaaaaaaaaaagaaaaaagggaatcactgcacaatacaacaaaatatgtttaaatccatgagttcataattatacttaaaaaaaaaacttcattggccatt

SEQ ID NO: 37902 - DNA, 201 bp, Homo sapiens
tgagcagatgccagcaccatgcttcctgtacagcccacagaactatgagccagttaaacctcttttctttataaattacctagcctcaggtatttctttayagcaatgcaagaatggcctaacacagttttataagaaactgtcaaactgtctttgcagagtgacagtaccattttacattcctactagcactgtatgagt

SEQ ID NO: 37903 - DNA, 201 bp, Homo sapiens
tgcacaatacaacaaaatatgtttaaatccatgagttcataattatacttaaaaaaaaaacttcattggccatttttggaggccactagagaagctactcatattgaaaatggatgagtaaaggggaagagacacacatttgtcctgcttttcatagacaaactgtacctcagggtaaccaaatagttggtaaaggagagt

SEQ ID NO: 37904 - DNA, 201 bp, Homo sapiens
agtagagatggggtttcaccatgttggtcaggctggtatcgaactcctgacctcaggtgatccacccacctcagcctcccaaattgctgagattacaggcrtgagccaccatacctggccaactcagttctctttgctaatggtgctaaggaagccatatagtttagttgctaaaatccagtggtttgttctggagtcaaa

SEQ ID NO: 37905 - DNA, 201 bp, Homo sapiens
gcacaatacaacaaaatatgtttaaatccatgagttcataattatacttaaaaaaaaaacttcattggccatttttggaggccactagagaagctactcatattgaaaatggatgagtaaaggggaagagacacacatttgtcctgcttttcatagacaaactgtacctcagggtaaccaaatagttggtaaaggagagtt

SEQ ID NO: 37906 - DNA, 201 bp, Homo sapiens
gcctggctaaattttgtactttttgtagagattgggtcttgccatgttgcctgggtggtcttgaacctcctgggctcaggcattgtgcctgccttggcctyccaaagtgctgggattacaggcatgagccaccatgcccagccaattgttttaattaaaaaataaattaaaatgtctgatttttgtctgccacctgctaaa

SEQ ID NO: 37907 - DNA, 201 bp, Homo sapiens
tacctaaatctcctgaatttttttgaattatattcttaatcaactgtacaactacacactagagacatctcaataacagtcacttcaggaaacaactgaawaaaaaatctaactcccaaattattttattttgaaattcctttacctgtaaagatgtaaaatagctgttattttatattatggatattattttacatgtac

SEQ ID NO: 37908 - DNA, 201 bp, Homo sapiens
ccaggtgctttcagttgttttccttaaataacagctttatggagatgtaattcacataccatacaattcacttatttgaagtttacaattctgtcctggcrtggtggctcacacctataatcccaacactttgggaggccaaagcgggaggatcacttgagcccaggaattcaagatcaacctgggtaatatagtgagtcc

SEQ ID NO: 37909 - DNA, 201 bp, Homo sapiens
tagactgttttccaaagtaaggccccttgtaccatttcacattctcaccagcattgtatgaaggttctaatgtgtttacatcattgctgttattcagttgttttttttttttttttttttttgaggcagagtcttatcctgtcacccaggcaggagtgtagtggcacaatatcggctcaccgcaacctccacttcccaggt

SEQ ID NO: 37910 - DNA, 201 bp, Homo sapiens
atcctttccccatttcttgtttttgtcaggtttgtcaaaaatcagatggttgtagatgtgtggtgttatttcttaggcctctgttctgttccattggtctrtctctctgttttggtaccagtaccatgctgttttggttactgtagccttgtagtgtagtttgaagtcaggtagcatgatgcctccagctttgttcttttt

SEQ ID NO: 37911 - DNA, 201 bp, Homo sapiens
aacatcctggagggcccccttgtgcccttcccagtcaatatgtagcccccttccccacaaactacttttttgacttctgtcacattaaattacttttgcctttttttttttttttgagacatggtcttgctctgttgcccagactggaattcagtggcacaatcttggctctcggctcactgcagcctcagcctcctaggc

SEQ ID NO: 37912 - DNA, 201 bp, Homo sapiens
tttattacaaagtggaatgtgttgtgtgctaaagagggttcaaaggtaagacagaccacatggcactatgctgactgaactgtttctggcaaccttttattcacgtgtcaaggtgttcccaagcatatattattttttggatttgatttgaaaagatggtgcagaaacgtttcaaaccaaaaacttatgtacattcactgc

SEQ ID NO: 37913 - DNA, 201 bp, Homo sapiens
aatacaaaaattagctgcgtgtgcctgtaatcctagctacttggaaagctgaggcatgagaattgcttgaacccaggaggtggaggttgcagtgagcagasattatgccactgcattacggcctgagcgacagaatgagaccctgtctcaaaaaaaaaaaaaaaaaaaaaagaattggatagcacccagatatgtgtattt

SEQ ID NO: 37914 - DNA, 201 bp, Homo sapiens
cagcctggccaacatggcgaaaccctgtctctactaaaaatacaaaaattagctgcgtgtgcctgtaatcctagctacttggaaagctgaggcatgagaaytgcttgaacccaggaggtggaggttgcagtgagcagagattatgccactgcattacggcctgagcgacagaatgagaccctgtctcaaaaaaaaaaaaaa

SEQ ID NO: 37915 - DNA, 201 bp, Homo sapiens
tgattactttcagtttttaatgtaaaccatgggacagattgtggattttttttgtttttgtttttcctttgttgggacagattgttttaagttggagccaytgtagaagtctaggctatctgggtaccatattcttatatgttactctgttcttctctgctgttcccttcttcctggaggggccactcttggctctaatat

SEQ ID NO: 37916 - DNA, 201 bp, Homo sapiens
ctgaggcagtaagatcacttgagcccaggaagttgacgctgcagtcaactgtgatcatgccaccgcactgcagcctgagtgacagaaacagagaccctgtygggagaggggggggaaagaagaagaaatattttttttagtttaatttaaaattaaattcagatctattaaatggtgtatctgaagtcacatagcaagtgc

SEQ ID NO: 37917 - DNA, 201 bp, Homo sapiens
attgtgcaaccaaaaccacagtcatttgtagaacactttccctttcatcacccaaataagaaattccataaccattagcagtcactccccacttctacccmaactccccatccctaggcagtctccagtatattttctgtttctatggattaacctgttctggaaattttatttaaatggcatcatatactatggtggccc

SEQ ID NO: 37918 - DNA, 201 bp, Homo sapiens
tgctatagtcactgaagatggtgcgatgagcatggcttgtatatttcagtggctagaagactgcatgtttggaaaagggattgccagtagacagtgtgttytgcagacagaaggggcctgcaagagccgtcatctacatatttgggttcattggttttgcctgatcctagcttggttttgcctgagcttggctgtgttctt

SEQ ID NO: 37919 - DNA, 201 bp, Homo sapiens
gtggttgcattcaacagggtgaggtgctatagtcactgaagatggtgcgatgagcatggcttgtatatttcagtggctagaagactgcatgtttggaaaarggattgccagtagacagtgtgttttgcagacagaaggggcctgcaagagccgtcatctacatatttgggttcattggttttgcctgatcctagcttggtt

SEQ ID NO: 37920 - DNA, 201 bp, Homo sapiens
actaacttccataaatttctcagactaaccccacatgctcacacacaatcttagttaactccagtaatagtctgctttagagcaagagcagtgacaacacmgccctattccattttgtctaacacactttcactcactcaccaaatatttaagggcctactatggccaggccctgaatcagatcctagaatacagagatat

SEQ ID NO: 37921 - DNA, 201 bp, Homo sapiens
cagacccttaaccatcctcactttgactgtttcagtgcctgctttctttactatttgcttccagctttccctacctcatcctgccctacacagcaagaacrctcttccgtaaacattagagagattgcattatttattgttgagcctcaaggtttgttgccatttagtttcttgctatctccattcacccatttatctttt

SEQ ID NO: 37922 - DNA, 201 bp, Homo sapiens
cctatggtgtacctagcagtcttgggcattggggatactgtggtgaacaaatcagacatgattccagtcctcatgggacttacgaatttttggtggctacycctaaatgttctagaaccttctttctacattgtttcatttttacctaaatctcctgaatttttttgaattatattcttaatcaactgtacaactacacac

SEQ ID NO: 37923 - DNA, 201 bp, Homo sapiens
tcagttcttgttacactaataacttaggattccaagtgctaacacttctgaagacagagaagttaaatgtctttatttcactggcttctttgatttcaggkggcttgcttctctttgcacctggttggttgccttttatagcagatatttattaagctttgaagggaaagaggaatgctggtgattggttggtttttcact

SEQ ID NO: 37924 - DNA, 201 bp, Homo sapiens
tagctttattacaaagtggaatgtgttgtgtgctaaagagggttcaaaggtaagacagaccacatggcactatgctgactgaactgtttctggcaaccttwtattcacgtgtcaaggtgttcccaagcatatattattttttggatttgatttgaaaagatggtgcagaaacgtttcaaaccaaaaacttatgtacattca

SEQ ID NO: 37925 - DNA, 201 bp, Homo sapiens
aacttaattttgtttttagaataagttttcacagtgtctcacttagttctcagagtgtacagatgtttatctgtaaaagggaagctgctgtttttatattktgtgtggtcagatgtcatctttatctttttcttctttccttctaaaggtgaataccagagaagaagttgaagatctttgccgcctagacaaaatgataga

SEQ ID NO: 37926 - DNA, 201 bp, Homo sapiens
ctgcgactgttcacacacacacatgtataaccaccagccgtatcaagatacagaacagtccaacatcctggagggcccccttgtgcccttcccagtcaatrtgtagcccccttccccacaaactacttttttgacttctgtcacattaaattacttttgcctttttttttttttttgagacatggtcttgctctgttgccc

SEQ ID NO: 37927 - DNA, 201 bp, Homo sapiens
cccaccacttcctagcttacacaggtgccctccctccttttcttcctattgatgtgtaacatacgtacagtaaagtatacagatcctgtgaaccactctgygactgttcacacacacacatgtataaccaccagccgtatcaagatacagaacagtccaacatcctggagggcccccttgtgcccttcccagtcaatatgt

SEQ ID NO: 37928 - DNA, 201 bp, Homo sapiens
tagtagtagaactagagagagaactaaggtgaccatgacctgatatttgcacatattcttgcaggccctactgttgagcagcagggagaaatggcgcgatmtggaggaaggatgttggccaccttggaacctgagcaggtaataaccttaggtgataatattgttatagttttcagagtgagtcatgctgtgtagttacag

SEQ ID NO: 37929 - DNA, 201 bp, Homo sapiens
tgtctattttttaggcctttttgacagccccccaggttcagatgatgcaaagcttattgatatattttatcccggagatcagcagtctgtgacatttggamccaagtctagagtgggaatgggtggcatggaagccaaggtaagaatctggtgccttaactgcctataacaattttaaagcccaaactatattgtatcctt

SEQ ID NO: 37930 - DNA, 201 bp, Homo sapiens
gcattgcacctgaaagattttttttaaatttggaagataccaaaaagagcaggtgttttttgtgtctcaaaatattcctaactctgcattattatttgctwacataaaaactaagatggttgaggcctagaaaggagccacttactttttctctcttttctataatatagaggaggtgggagtttccctaatacagaggag

SEQ ID NO: 37931 - DNA, 201 bp, Homo sapiens; identical to SEQ ID NO: 5719

SEQ ID NO: 37932 - DNA, 201 bp, Homo sapiens
ggccagatcaggtgtttgggaatttaaagcaaaacttaggccacacagagccaagacactactacaagcagacttgacactccagcaggcctgtgagcctwcagactttaggccattctgcagagccagatgggtcctcagtggcttaggaaggcccctcccttacagctgcgtcttggcactatttatttacaagaatgt

SEQ ID NO: 37933 - DNA, 201 bp, Homo sapiens; identical to SEQ ID NO: 5720

SEQ ID NO: 37934 - DNA, 201 bp, Homo sapiens
accaagtcaggcccagaggggccagatcaggtgtttgggaatttaaagcaaaacttaggccacacagagccaagacactactacaagcagacttgacactycagcaggcctgtgagccttcagactttaggccattctgcagagccagatgggtcctcagtggcttaggaaggcccctcccttacagctgcgtcttggcac

SEQ ID NO: 37935 - DNA, 201 bp, Homo sapiens
accctgttctccacggtggggggtgccatgtggccctggccacttaactcagttctctttgctttatttgtttgtttgcgacggagtctcactctgttgcycaggctggagtgaagtggtgcaatctcggctgactgcagcctccgcctcccaggctcaagaaagtctcttgcctcagcctcctgggtagctgggactaca

SEQ ID NO: 37936 - DNA, 201 bp, Homo sapiens
tgctgggaaatacaaggtgtcattagagagtggccccactttattaccctaaactgcctcccagaattctgggagcatttcccccactggactgtcctatrggataccagctcttcctttgcactagccccaaagtctcaaagggaaattctactgtaaaaacaaaaaactagcacctctttactataagacatagttgac

SEQ ID NO: 37937 - DNA, 201 bp, Homo sapiens
ttattacaaagtggaatgtgttgtgtgctaaagagggttcaaaggtaagacagaccacatggcactatgctgactgaactgtttctggcaaccttttattcacgtgtcaaggtgttcccaagcatatattattttttggatttgatttgaaaagatggtgcagaaacgtttcaaaccaaaaacttatgtacattcactgcc

SEQ ID NO: 37938 - DNA, 201 bp, Homo sapiens
attacaaagtggaatgtgttgtgtgctaaagagggttcaaaggtaagacagaccacatggcactatgctgactgaactgtttctggcaaccttttattcacgtgtcaaggtgttcccaagcatatattattttttggatttgatttgaaaagatggtgcagaaacgtttcaaaccaaaaacttatgtacattcactgcctc

SEQ ID NO: 37939 - DNA, 201 bp, Homo sapiens
atagaaggtaatattcctgtcacacctgtaaggtgcaactgggactggaacccaaatcaacctaccataccacagtgcaggagcaaatttccaaatatctyagcctgtggttcactttgttctctgaccacaagtctctgttagcctgctgctgtcattcatgaataactggcttggcccatgtgaaaaggacccctttat

SEQ ID NO: 37940 - DNA, 201 bp, Homo sapiens
ttacaaagtggaatgtgttgtgtgctaaagagggttcaaaggtaagacagaccacatggcactatgctgactgaactgtttctggcaaccttttattcacgtgtcaaggtgttcccaagcatatattattttttggatttgatttgaaaagatggtgcagaaacgtttcaaaccaaaaacttatgtacattcactgcctcc

SEQ ID NO: 37941 - DNA, 201 bp, Homo sapiens
actgggatctttattgtcaagtattcattttaggaaaatgccagaagtcaagcccttgtgttgataacccactaaacgccttgcacattcttttttattcttttttttttctttgagacggagtcttgctctgtgccccaggctggagtgcagtggcacaatcttggctcactgcaacctctgccttccaggttcaagcag

SEQ ID NO: 37942 - DNA, 201 bp, Homo sapiens
ctgcttgaacctcccaagtagctgagattacaggcacctgccaccatgccctgctaatttttttagtaaagacggggtttcaccatgttggccaggttggtttttgaactcctgacctcaagttatccacccgtctcagcctcccaaagtactgggattacaggcgtgagccaccatgcccggcccaccttgcacatcctt

SEQ ID NO: 37943 - DNA, 201 bp, Homo sapiens
tcccgaaagttcgatagttttatattttatacttaaatccatgatccattttttttttgttttcttgagacaagatcttgctctgttgttacccagggctrgagcatagtggcacgatcaaggctcactgcagcctcaacctccagggctcaagtgatcctcctatgtcagcctcccaggtagctaggactatgggttgca

SEQ ID NO: 37944 - DNA, 201 bp, Homo sapiens
ctgcattccagccagcaggaagaaggaaaaaccataggcagaggagtgtctgccagctgccccttctaagtgacattccaggaagacccccctgcccagtrcttgaccaaaactagctcatggcctaccctctctaaaagggatctgggaggtgtagcttttttatttgggcacattgcagctccaagaaagtaagggttc

SEQ ID NO: 37945 - DNA, 201 bp, Homo sapiens
cataggattagacatgccaccagaacagcctcctttacccgggttaagccttagaacctgagaagccatctactgagtctgcgttgcatttcctacctgcrgacttttattctgggcttcatttcttggaggaactaggccttctgcattacacactccctgcaaatattaggttggcacaaaagtaattgtggtttttgc

SEQ ID NO: 37946 - DNA, 201 bp, Homo sapiens
gggccccttctttccaagagtatggagcctgcactggtgggtggcgtgggtggcggtggtggcagcgccgggatgccgcgggttttagctggccgcacgcygactctcaggggcctgggtccctagttccccgcggccctccaggcgttcatcatcccctcctcaaagccagactccctttgcagtatggcattctgtgta

SEQ ID NO: 37947 - DNA, 201 bp, Homo sapiens; identical to SEQ ID NO: 5742

SEQ ID NO: 37948 - DNA, 201 bp, Homo sapiens
acatttgtcctgcttttcatagacaaactgtacctcagggtaaccaaatagttggtaaaggagagtttcccttttggaattattccagattataaatgacraaggaatcattgagttagagtgtcagcattttgcatctcctaatggaataatggatcttggcaatgatcatcaacagatgctaacatcacaaaaagaaag

SEQ ID NO: 37949 - DNA, 201 bp, Homo sapiens; identical to SEQ ID NO: 5725

SEQ ID NO: 37950 - DNA, 201 bp, Homo sapiens
ccagctatgagtgcagtaaggagaagacaagatggccaagtggaaagtccatttgcataatcagatttgggtggggtggccagcctttctcgtgcactacrtaaacgtcacacctggtcaaaccaatctgtgagccctatgtaaatcagacaccacctcctcaagcctgcctataaaatacgctgtggtccaccacttttc

SEQ ID NO: 37951 - DNA, 201 bp, Homo sapiens
aatctgaagagcttggcttactcaggtatcaaggcctcagactccactcacttttctggggcctgttggggtattttgacaatgcatcagaaatagcattraatctgttgcctggctggctcagctggactgttaggcctgagaaccacagggagcttcccacctggtcttgctgctttagatgattggagcatgcaggtt

SEQ ID NO: 37952 - DNA, 201 bp, Homo sapiens
ttctgcaggacaacatcgtcgcggagttctccgtggacgagaccggccagatgagcgccacagccaagggccgagtccgtcttttgaagtcagtggccgcyggggcagctgcgccctttgcgctccagggttccccaagggccctgcctgctgatcgccacgtgggcattgtgaagggaagggagcaccgaatgggtggag

SEQ ID NO: 37953 - DNA, 201 bp, Homo sapiens
ataggaccaagggttgttcagggagactctctctgctcggtgatccagggtagaagtgtcctttattgtaaccctttgctctccatatatggcacaccacmctcttggacttcctctaaagttgtgtgttggatgaaattgcatttttaaattttatttaatttttaattttaatttattattattttttttttagagaca

SEQ ID NO: 37954 - DNA, 201 bp, Homo sapiens
tcgtcgcggagttctccgtggacgagaccggccagatgagcgccacagccaagggccgagtccgtcttttgaagtcagtggccgccggggcagctgcgccstttgcgctccagggttccccaagggccctgcctgctgatcgccacgtgggcattgtgaagggaagggagcaccgaatgggtggagggagggaggaagccc

SEQ ID NO: 37955 - DNA, 201 bp, Homo sapiens
cgtggacgagaccggccagatgagcgccacagccaagggccgagtccgtcttttgaagtcagtggccgccggggcagctgcgccctttgcgctccagggtyccccaagggccctgcctgctgatcgccacgtgggcattgtgaagggaagggagcaccgaatgggtggagggagggaggaagccctttgcccggcttggct

SEQ ID NO: 37956 - DNA, 201 bp, Homo sapiens
tagagagggagagttaaccttttggagggggttcaatatgtagatgaataaactgaggccaagagaactttgcccaaggacatgcaacaagtttgttagakccaatgtcagaagccaggcttccaaatctcaggccaggatcaggtggccctgaactgcagggactcctaatccagaccagcttttgcaaagtattgtttg

SEQ ID NO: 37957 - DNA, 201 bp, Homo sapiens
aggaccctgccaagttcaagatgaagtactggggcgtagcctcctttctccagaaaggaagtgagtagtcagctctgtgggactgtcttgggaatggggcscctaccgggccaaatcgctgggtttcttctccagaggtacctacccttaggaagaatggcctgcggaaaggtctggaagtgtcaggaacccgcagcacca

SEQ ID NO: 37958 - DNA, 201 bp, Homo sapiens
cttttaaagtcaagaacagtagccaattttactaaatccaagtattgaaagttacttaattcctctgtcaaaatttaaatgatggcgaccattttggaggaaaaaaaaaaaaaaaaagttaagctgccgatcggccaagctaatagctgcctggatcatgagtcgaggtaacatttcaaaggcaagtgtttttgtgtctga

SEQ ID NO: 37959 - DNA, 201 bp, Homo sapiens
ggagaattacttgagcccgggaggcggaggctgcagtgagttgaggttgcaccactgcattccagcctgggcaacagagcaagattctgcctcaaaaaaawaataataataataatcaaacaaaatggagcatttctgttggtcacgaactgacccactacaccaaacagatgggaacttagaccaaaatcaaattgattt

SEQ ID NO: 37960 - DNA, 201 bp, Homo sapiens
gaattacttgagcccgggaggcggaggctgcagtgagttgaggttgcaccactgcattccagcctgggcaacagagcaagattctgcctcaaaaaaataawaataataataatcaaacaaaatggagcatttctgttggtcacgaactgacccactacaccaaacagatgggaacttagaccaaaatcaaattgattttga

SEQ ID NO: 37961 - DNA, 201 bp, Homo sapiens
ggcccaagctccacatctctgcatccaactgcctattcaatttggaagtctcactgagatttcaaactgatgagctccaaatgaaactcttggctcccccmcccctaatctttgcccaggcccccccatttttgttgcctgcttcaccatccaaccaatgacaggctaaaaaatcagagtattccccttgagttctccctt

SEQ ID NO: 37962 - DNA, 201 bp, Homo sapiens
tttcagggaagtgccacggagtaagcaggcgaccaccgaggctgctaaaatatttcctgtcctgaccagggttgcgtttctggagaatatttaacagggarggttttaacgcttttaaagatgttgaaactaaagaacaaatattgaccagagggcaccacaacgctcctgaaagagagtaaaatacatcctttataaaat

SEQ ID NO: 37963 - DNA, 201 bp, Homo sapiens
tttctccatgttggtcaggctggtcttgaactaccgacctcaggtgatcctcccacctcagcctcccaaagtgctgggattacaggagtgagccaccgtgmctggcctatctcatttaatttttacaatcttataaggtaggtaccattatcattttacaggtgagaaactgaggcacacagaaattaagttagcttgccc

SEQ ID NO: 37964 - DNA, 201 bp, Homo sapiens
ttcaaatagtgcagcaaaacatcccaaagtgatttatttagagtaaaatatacttttctgataatggattacaaaaatcaataccagaggtacaagattaytaatttttagaaagaggaaacacatatgttctatagcattttgagatgtgctccttaatggactaggattctgttggcaatgcctttaggcacagggtca

SEQ ID NO: 37965 - DNA, 201 bp, Homo sapiens
acatttcaaaaaagaagctgtgcagtgttgtagttaagcccgcccggttaaaattagacctcctaagttcaaatcccaactccaccactacttgtggaacyttagatatgttccttcacttctctgtgcctatttcgtcatctgcaaagtgaaacgatcatagaacctacctcatagagttgtgttacaagatgcaatgag

SEQ ID NO: 37966 - DNA, 201 bp, Homo sapiens
tccacaacggtgagtcaggagcagggtgccttctggctcttcctgcagggcagtgggtttggactaaggggcccacgtgctagtgaaattcattttgtccrtaccccagagaaaacaggggttcttgggagcccctttctgaggccaaatccagatcctgcttggccagatttttcactggccttctcatagggctcatgc

SEQ ID NO: 37967 - DNA, 201 bp, Homo sapiens
actggccttctcatagggctcatgcaggtgtgggtaaaggcctttgtccagttcactggcactaacactgccgtgggctctcttttctttttattctgctycctcgggccatttctgtggtcacccctggctacactgccccaaaaaaccattgtgactgaattaagattgtttgggattgagcagcccagtaaagaggtg

SEQ ID NO: 37968 - DNA, 201 bp, Homo sapiens
gggtttcctcagttgggggttttgagattctctggaacaaccataggatcttttaggagatattacccttgtctgatcttgattttaaagccaggaacatkgtgcaggaaagagctccatttagtttgagtggacactcactcattgctatgggatactgggtttcaaaatccaaatacagtaatgctaaaatgtagagaa

SEQ ID NO: 37969 - DNA, 201 bp, Homo sapiens
ccccaacggcctgcccccagaagcgcagaagattgtaaggcagcggcaggaggagctgtgcctggccaggcagtacaggctgatcgtccacaacggtgagtcaggagcagggtgccttctggctcttcctgcagggcagtgggtttggactaaggggcccacgtgctagtgaaattcattttgtccgtaccccagagaaaa

SEQ ID NO: 37970 - DNA, 201 bp, Homo sapiens
tcactatgttgcccaggttggtctcaaactcctggcctcaagttaccctcccacctcagcctcccaaagtgctgggattacaagcacgagccatggtgccyggccacacatatactctaattaacattctttcctctcctgccttcgttgatatttttaccactttcatttactcttattcttcatggcttacatttcagc

SEQ ID NO: 37971 - DNA, 201 bp, Homo sapiens
cactccaggggttctcagagaggcacacccagaggcaacttaggaccagcattccaggtggccttacaccctctaacgctgggggatccagttccctctgygcttctccaactggaacactgcagagggagcatcaccccttgctccaacacctgagcctgagatggagacacaaagcctttttgtttcttgcccctctcc

SEQ ID NO: 37972 - DNA, 201 bp, Homo sapiens
agccttgaaggtgtttatgaattacagccacctgtatccgtaagggttgcaatctgctgtgatgcatttgaattaagaagcatttgaatgaagccagctcyaaggccatcatgatgttcattatctacataaaaactgggtccactttctgtcgttaatggctttgttttgtattttccaggttactgcgatggcagatca

SEQ ID NO: 37973 - DNA, 201 bp, Homo sapiens
tggtcgtgagtttctccgacatctgagcccatgagggaaaggcattgatcggcatggtggctttctggcttgcagatgatgaccactggatcgtcgacacrgactacgacacgtatgccgtgcagtactcctgccgcctcctgaacctcgatggcacctgtgctgacagctactccttcgtgttttcccgggaccccaacg

SEQ ID NO: 37974 - DNA, 201 bp, Homo sapiens
tctgctgaataactttatggttcctgctgagcagtcatggttctggaacatctcctcagccccacctctgacactgttaccctggaacagcctcaaggcayaggagtggctcattctcctggcaggcctagggtgagttgaagagaggggctccacacccactcctgtgacagcccccctgcagagcctgggtttgggctg

SEQ ID NO: 37975 - DNA, 201 bp, Homo sapiens
tcctcgtctttgaattattcagccaaaagagcctggagattaaccaaaccaacttaggccttcttttaaagtcaagaacagtagccaattttactaaatcsaagtattgaaagttacttaattcctctgtcaaaatttaaatgatggcgaccattttggaggaaaaaaaaaaaaaaaaagttaagctgccgatcggccaag

SEQ ID NO: 37976 - DNA, 201 bp, Homo sapiens
cctcgtaaccagggaaagaatgacttcatccaaggatgaggaagaccacccagatactctggagcctgtgaggggagtcagtggttagggtgaggcccagsaggcagccctgtggcttctgttcccagcctttctgctgaataactttatggttcctgctgagcagtcatggttctggaacatctcctcagccccacctct

SEQ ID NO: 37977 - DNA, 201 bp, Homo sapiens
gaactgcagggactcctaatccagaccagcttttgcaaagtattgtttgagctcttctgtgagataggaccaagggttgttcagggagactctctctgctyggtgatccagggtagaagtgtcctttattgtaaccctttgctctccatatatggcacaccaccctcttggacttcctctaaagttgtgtgttggatgaaa

SEQ ID NO: 37978 - DNA, 201 bp, Homo sapiens
agagaaccaacctcattctcgcagtgctctggcagttcatctcttgcaaatactcttaaaagggagagcctggtcaaggtcactatgatttaaattcctcrtctttgaattattcagccaaaagagcctggagattaaccaaaccaacttaggccttcttttaaagtcaagaacagtagccaattttactaaatccaagta

SEQ ID NO: 37979 - DNA, 201 bp, Homo sapiens
ctggccaggcagtacaggctgatcgtccacaacggtgagtcaggagcagggtgccttctggctcttcctgcagggcagtgggtttggactaaggggcccaygtgctagtgaaattcattttgtccgtaccccagagaaaacaggggttcttgggagcccctttctgaggccaaatccagatcctgcttggccagatttttc

SEQ ID NO: 37980 - DNA, 201 bp, Homo sapiens
ccaagagaactttgcccaaggacatgcaacaagtttgttagagccaatgtcagaagccaggcttccaaatctcaggccaggatcaggtggccctgaactgyagggactcctaatccagaccagcttttgcaaagtattgtttgagctcttctgtgagataggaccaagggttgttcagggagactctctctgctcggtgat

SEQ ID NO: 37981 - DNA, 201 bp, Homo sapiens
ccggacgccaaacccctgctgtcatccttctcacagttctctgggacctggtacgccatggccaagaaggaccccgagggcctctttctgcaggacaacawcgtcgcggagttctccgtggacgagaccggccagatgagcgccacagccaagggccgagtccgtcttttgaagtcagtggccgccggggcagctgcgccc

SEQ ID NO: 37982 - DNA, 201 bp, Homo sapiens
cttcctaaagaaataaaaccagcttctggaagtcactgtgttctcaggcctggtcgtgagtttctccgacatctgagcccatgagggaaaggcattgatcsgcatggtggctttctggcttgcagatgatgaccactggatcgtcgacacagactacgacacgtatgccgtgcagtactcctgccgcctcctgaacctcga

SEQ ID NO: 37983 - DNA, 201 bp, Homo sapiens
cctaaagaaataaaaccagcttctggaagtcactgtgttctcaggcctggtcgtgagtttctccgacatctgagcccatgagggaaaggcattgatcggcrtggtggctttctggcttgcagatgatgaccactggatcgtcgacacagactacgacacgtatgccgtgcagtactcctgccgcctcctgaacctcgatgg

SEQ ID NO: 37984 - DNA, 201 bp, Homo sapiens
tttcaaagtggtttcagggaagtgccacggagtaagcaggcgaccaccgaggctgctaaaatatttcctgtcctgaccagggttgcgtttctggagaatayttaacagggagggttttaacgcttttaaagatgttgaaactaaagaacaaatattgaccagagggcaccacaacgctcctgaaagagagtaaaatacatc

SEQ ID NO: 37985 - DNA, 201 bp, Homo sapiens
aagaggaaacacatatgttctatagcattttgagatgtgctccttaatggactaggattctgttggcaatgcctttaggcacagggtcagagaggacccartgagaagggagcattttgtttcttgcctcctccccctatcaaaccagattagtttgcttttgtctcttgtatattggtattttatcaggatttcatttgg

SEQ ID NO: 37986 - DNA, 201 bp, Homo sapiens
agtgtctacatgctctttttcccatttttttccccatttatcctaagtttcaaatcaggaatctacttggtagctagagaataatgcaggccaggggacayatatcatggaatcttagagagggagagttaaccttttggagggggttcaatatgtagatgaataaactgaggccaagagaactttgcccaaggacatgca

SEQ ID NO: 37987 - DNA, 201 bp, Homo sapiens
tccccaaacctcagctcaagaaacctggcctaagctcaaaaggacctttcggtttgtcaggtgtcattttccccaccagccactgtgccaaggtgtgtgcyttctccatgctttctcctcctgtctttcacatcaccactccacctagctctgcatttcctccgtctctttgggctgaatccctgagacagcttgactatc

SEQ ID NO: 37988 - DNA, 201 bp, Homo sapiens
ctacccttaggaagaatggcctgcggaaaggtctggaagtgtcaggaacccgcagcaccacctgaggttaggggaacaagattgggagcagctacctaccscctccccaaacctcagctcaagaaacctggcctaagctcaaaaggacctttcggtttgtcaggtgtcattttccccaccagccactgtgccaaggtgtgt

SEQ ID NO: 37989 - DNA, 201 bp, Homo sapiens
ctgtcttgggaatggggcgcctaccgggccaaatcgctgggtttcttctccagaggtacctacccttaggaagaatggcctgcggaaaggtctggaagtgkcaggaacccgcagcaccacctgaggttaggggaacaagattgggagcagctacctaccccctccccaaacctcagctcaagaaacctggcctaagctcaa

SEQ ID NO: 37990 - DNA, 201 bp, Homo sapiens
ttgtggattttttttcctttggtgcagaatatgtttgcacaaagtttgactgaagatacatagctttagtcactgttgtgtaagagatattgggaatgacyacaatctcccaagactgacacaacttcacaatgaataccaatcttcacaagatatttagagaggacaaggaaaccaatttgtgaaacacatgagttttaa

SEQ ID NO: 37991 - DNA, 201 bp, Homo sapiens
tttccttctggttggtagttttagctgaaagtggggagagttgttattaagattgttggagatcattcctaccccaaagctagacctgttgcagatttttwaaaaaatcttgtggttgtgaaccagtgcttgaatattggagaattacatagaattattttaagctctgaatctgaataaaagtccttctatatgcaagta

SEQ ID NO: 37992 - DNA, 201 bp, Homo sapiens
gcgatcaaaatactgagaataactcgaagtgtatataagaggaaactattgccccattttttctttcctttacagaaaacatctattaaaagccatctatrctagttatgtcaatttcgtttcctcaattctcatagctgggtgtattaggttaagatgtctgttccacatttaagtggatcagactttctctccactgtt

SEQ ID NO: 37993 - DNA, 201 bp, Homo sapiens
cactcctgctgctgccaatttggtatggcagataaaggaagctggatagagctgtgacagatgaggaggaataaggcaaaaggatgatcaggaaatagcarcaatagttaagcttctttgtctttaatattgtgacttttttgaaaagtcagactcggaaacaaaaagtagaagggtgattacctggaatttgagaatgag

SEQ ID NO: 37994 - DNA, 201 bp, Homo sapiens
gtggtttccctccctacctgttcacctgatagtgagttcttgcaagatctgatggttcaaaagtgtgtggcttcctttgctctctctcttctgctttgctrtgataagatgtgcttgcttcccctttgccttcagccatgattgtaagtttcctgaggcctccccagccatgcagaattgtaagtcaattaaacctcttct

SEQ ID NO: 37995 - DNA, 201 bp, Homo sapiens
acagatgaggaggaataaggcaaaaggatgatcaggaaatagcaacaatagttaagcttctttgtctttaatattgtgacttttttgaaaagtcagactcrgaaacaaaaagtagaagggtgattacctggaatttgagaatgagagaaacgggaagatgtggttcaaagggtgtaaatgtggaattgtatgacaagtaag

SEQ ID NO: 37996 - DNA, 201 bp, Homo sapiens
agagtaaatgttaagtattctcactacaaaaaagttaactctgtggggtgatgtaatgttaattaccatgattatggtaatcattttgcaatgtatacatrtattaaaacatcactttgtactccttgaataaatacaatttttatttgtcaactatacctaaagcttgacaacaatacattgtgattttttattttataa

SEQ ID NO: 37997 - DNA, 201 bp, Homo sapiens
gcattgtggattttttttcctttggtgcagaatatgtttgcacaaagtttgactgaagatacatagctttagtcactgttgtgtaagagatattgggaatraccacaatctcccaagactgacacaacttcacaatgaataccaatcttcacaagatatttagagaggacaaggaaaccaatttgtgaaacacatgagttt

SEQ ID NO: 37998 - DNA, 201 bp, Homo sapiens
attaaaacatcactttgtactccttgaataaatacaatttttatttgtcaactatacctaaagcttgacaacaatacattgtgattttttattttataaakaattttaggcagggcgcagtggctcacgcctgtaatcttagcactttgggaggccaaggcaggaagatgggagcccagcagttccagaccagcctggata

SEQ ID NO: 37999 - DNA, 201 bp, Homo sapiens
gacaccttgtcttaaaaaaatcatttttataaaacattgccatattgaccaaagttttcctcttttggggaaacatttaagcatttgtttagagcagccayaattgtacaattgcctatgttaccttaaaaatctgctgaattttcaaaaaatgtcctctgccacatatctgatttttagaagtgaatatgattcacacct

SEQ ID NO: 38000 - DNA, 201 bp, Homo sapiens
ttagaacagtgcttcttaatcttggctgtacagtgtaatctctgggttgcttaaaacacacacagacacagacacacacacacacacacacacacacacamttgtaggccaggttgcattttggacaaattaagtcacaatctcagggatagagagttggcatcagcatttaccccctccttatcttgctttatgcatttg

SEQ ID NO: 38001 - DNA, 201 bp, Homo sapiens
cagccccgcctcccaaagtgctgggattacaggtgtgaaccatgtgccctgcccaggctttctgtttttaaagctttgaggccttgaactatcttgagggrtctattcactgatgctccataggtttggaagatgacctagtctttcctagcaattccaggtgacaagctatagtagaaacatctatctgtaactacctcc

SEQ ID NO: 38002 - DNA, 201 bp, Homo sapiens
gacacactcctgctgcagatactagccaaacccatccctttatttcggcccatccctttgtttcctacaaggaatacttttagttaatctataatctataraaacaatgcttatcactggcttgctgttaataaatacgtgagtaaatctctgtttgaggctctcagctctgaaggctgtgagacccctgatttcccacgc

SEQ ID NO: 38003 - DNA, 201 bp, Homo sapiens
gattacaggtgtgaaccatgtgccctgcccaggctttctgtttttaaagctttgaggccttgaactatcttgaggggtctattcactgatgctccataggwttggaagatgacctagtctttcctagcaattccaggtgacaagctatagtagaaacatctatctgtaactacctcccttccaacgatttttagaatgtac

SEQ ID NO: 38004 - DNA, 201 bp, Homo sapiens
ccaggtgacaagctatagtagaaacatctatctgtaactacctcccttccaacgatttttagaatgtacatggtagtttaaaaaaaaaagaggaggaagakaaattgttaacctgacaagattgcagccaataggtataaagagattttatcttcatgaaaagattttgccttgaaactaatgataaggacacaagaaaat

SEQ ID NO: 38005 - DNA, 201 bp, Homo sapiens
catggaagttatttatactccctgtctccccttttgccctctcgtttttcttgaatttatcctcatatggctttatttttttcctaccatttcatggacaytgttcttgctgaagctatcaatgacttccacaagtccagatttggtagtcccttctcagtcatgacacagacgagctctccctcctcaaatctcacttgt

SEQ ID NO: 38006 - DNA, 201 bp, Homo sapiens
ggagctaactaggaaatcataagggagacagagataatataaagaaggaggagagagttacacagtccctccaagcctctctgtattctggtaggtggtarctggattctcagaaatgacagataccacccaggttgccctccttcctttcatatccatgagagacattgcatttctcagagcctagatcagtgcctggca

SEQ ID NO: 38007 - DNA, 201 bp, Homo sapiens
gggttttgtgaattccaactggagctaactaggaaatcataagggagacagagataatataaagaaggaggagagagttacacagtccctccaagcctctctgtattctggtaggtggtagctggattctcagaaatgacagataccacccaggttgccctccttcctttcatatccatgagagacattgcatttctcaga

SEQ ID NO: 38008 - DNA, 201 bp, Homo sapiens
tatagggccaatttgcacagtcagtgacttcttcagcatgctgagtagccttagatagtgaaagggttttgtgaattccaactggagctaactaggaaatyataagggagacagagataatataaagaaggaggagagagttacacagtccctccaagcctctctgtattctggtaggtggtagctggattctcagaaatg

SEQ ID NO: 38009 - DNA, 201 bp, Homo sapiens
agtagagataaaatagttaagatataaatagtttatagggactaaagtaaggagtcaaccagagattaataagactttcagtagcagtaaaacccaatgastattagcatctatttgtactatatttcaataaatcaagacaaaaaaattcattgtaaaatactgcttcaataggagaaaacaaaattcctaagataggtt

SEQ ID NO: 38010 - DNA, 201 bp, Homo sapiens
cctttgtgccaacttctgtgtttctgaattttaaaagaatcattattgtgttttagagcagattgtcccattacttttgtgtctctgtctagttatcttcrcgcaaatgcccttttttcctcccatccttaggataacagattgccatacaagtgtgtaccattttttctatcaggtctttccctttgatcttttaaaagc

SEQ ID NO: 38011 - DNA, 201 bp, Homo sapiens
ccccagccatgcagaattgtaagtcaattaaacctcttcttcataaacctcttttcctcagaacgtcttcagaaagactttatagtctcagagtcctttakagcagtgtgagaacaaactaatacaaatgtgttttcatgtcaaactttcactgttcttctgtctccaggaagaataatccactctcctggactattattg

SEQ ID NO: 38012 - DNA, 201 bp, Homo sapiens
agatgtctgtggcatccctccatttagtccccagtggctttccagaagaatcgcaggaggggaagaagcctgcccccactgttggccatggcaggtgggtytgaggtttctaggcgattaccaatgtggaggtgccatcatcaacccagtgtggattctgaccgcagcccactgtgtgcaattgtgagtgaaactggtatt

SEQ ID NO: 38013 - DNA, 201 bp, Homo sapiens
gggacattcaagccaaaacagagttcattgtatttccatgtctctcttaccatatctcttctaccaagtagctacccctcaccctcataaagttcccagargagaatagattagctgaacatgtactaacttctctgaataaaatagaaacaaacttaatgattttctacttatccaatctacttttaagccataatttca

SEQ ID NO: 38014 - DNA, 201 bp, Homo sapiens
aaatccttaacattttcaagtactttgaattgagaaagcgaatatacttaaggttgagtgtgtgtgtgtgtgtgtgtgtgtgtgtgtgtgtgtgtgtgtgkagggaggggggaaaaaaggcaagagggctcaacttcttcaaacatagtggaaccatgccagaatgctggaagaatatatattgtaaaagagcaagtcaga

SEQ ID NO: 38015 - DNA, 201 bp, Homo sapiens
tcacgccacgggtctggctgttctaagaaatactgtctaaaatgtttcattttgaccaactaatgggtttgacttgtgtggcaattactgcaacttgcctrttataaatttggccactgtggataaatgaaggttatatgtagctaaagctcaaatatacttgctaaaaatattatatttcagtttggtgacagcaataac

SEQ ID NO: 38016 - DNA, 201 bp, Homo sapiens
ggaggtagctccttagctgatgaatgggttaacaaacgtgtctattttgcttaggcgaatcctcctgcctgagagctaatgtatgagtaggggttaactcmggtaagagactcttattacatatattcattctgtttttcagataaacatagaaaacctttaatgtagacatgtttttcgtgacagaagaattataataga

SEQ ID NO: 38017 - DNA, 201 bp, Homo sapiens
catcctttatgcatcagctcaaatgttattgaaactgtatacacatacatgcacatgtaagcaaacatataactacctttattctttactattcactctgrgtatttcctttatagctactattagcatcttatttgtttatactctgtcttactcggtatgtctggctcacagtaggcattgaataattttttaataaaa

SEQ ID NO: 38018 - DNA, 201 bp, Homo sapiens
gaattgtttatttgaataaaggtaatgacatttcagctaaggcagagtaggagtggaaaataaggaggtagctccttagctgatgaatgggttaacaaacktgtctattttgcttaggcgaatcctcctgcctgagagctaatgtatgagtaggggttaactcaggtaagagactcttattacatatattcattctgtttt

SEQ ID NO: 38019 - DNA, 201 bp, Homo sapiens
taactacctcccttccaacgatttttagaatgtacatggtagtttaaaaaaaaaagaggaggaagagaaattgttaacctgacaagattgcagccaatagktataaagagattttatcttcatgaaaagattttgccttgaaactaatgataaggacacaagaaaatggataaacaaaaagctgatggacgatgactagtg

SEQ ID NO: 38020 - DNA, 201 bp, Homo sapiens
gaggaagcttgtttacttcgatggaggacagggaagggaatcaaggaaaacttggatttctcttttttttagcaagactccatggaagttatttatactcmctgtctccccttttgccctctcgtttttcttgaatttatcctcatatggctttatttttttcctaccatttcatggacactgttcttgctgaagctatca

SEQ ID NO: 38021 - DNA, 201 bp, Homo sapiens
tgctgtgcagaagctctttagtttaattagatcccatttgtcaattttggcttttgttgccattgcttttggtgttttagacatgaagtccttgcccatgyctatgtcctgaatggtaatgcctaggttttgttctagggttttttatggttttaggtctaacatgtaagtctttaatccatcttgaattattttttgtat

SEQ ID NO: 38022 - DNA, 201 bp, Homo sapiens
gtaaggagtcattattcttggccaaaaaaagcagcttgaaaatgtgagggaagctctccgaaattatctgttggaaggatttttgagtttttcttcgaggmgatgacaggagtttgggagggaggagattgaaacgtacacttatcccactttctaaattggaaaacagataggctaaaggtgctttttcctatctgcatt

SEQ ID NO: 38023 - DNA, 201 bp, Homo sapiens
ggattttcaactatgctgagaaaagtctgaagtaattaatataagaagtgtttacagatcaataatagaaaagctaaaatctgtaaaataaatttatagamcctagatacctttgacttagtcttgattaaagttaaaccagaggtcctgtgccttctgttttccacttatttttcaaaagaatgacacactgttgaccca

SEQ ID NO: 38024 - DNA, 201 bp, Homo sapiens
tgatttgcatttctctgatggccagtgacggtgagcattttttcatgtgttttttggctgcataaatgtcttcttttgagaagtgtctgttcatgtccttygcccattttttgatggggttctttgtttttttcttgtaaatttgtttgagttcattgtatattctggatattagccctttgtcagatgagtaggttgcga

SEQ ID NO: 38025 - DNA, 201 bp, Homo sapiens
ttgctacaaataaatattaggtcattcttcaaatagtatttcaccattgtatactttaaaatgccaacgaatgctttttcttcttttctctttcttggctstaatctcctccttcctttcatccctacaagtatttgtgaagaacctactatggaccacggactgagtcatcttggttctgaggattcagtagtgaaaaaa

SEQ ID NO: 38026 - DNA, 201 bp, Homo sapiens
aaaatgaaagcttcatgagagcagagacctttctctctgttcccttctgtatacttccaaatgaggtcaacacctagggactcggaccgttttctttttcrtgaatttttgctgagtttgttttttgcatgaagttaaattactcttcagaaaggctaacttaattttcactgccattagcagtgcctaggatcttctttc

SEQ ID NO: 38027 - DNA, 201 bp, Homo sapiens
taattttatagtttgaggtcttagatttgagtctttaatccattttgatttgacttttgcaaatggtgaggaatagggaactactttcattcttctgtattaaggacatccaattttcccagcaccatttatcaaagtgactgtcctttccccaatgtatttttttttttgcacctttgtcaaaaatgagttcaatgtaga

SEQ ID NO: 38028 - DNA, 201 bp, Homo sapiens
tgaaaagatttggtgaaaacatgccagccctcatttttaatttcatgtacagagaaacctctttttgttcaacagaacaaacttgcttcctcctgtttgcacaggtgtaatgaaagctttttggcttgcagtaaggagggatgtgggaggtgattgaaataatttggttaatggggaaatctggaaagaaaataaatttgt

SEQ ID NO: 38029 - DNA, 201 bp, Homo sapiens
cctttgcagtgcagaagatttttaacatgatatgatcttatgtgtccatttttgctttggttacctgagcttgtggggtattactaaagaaatctttgtcsagtccagaatcctggaaagtttcctcaatgttgttttttattaattttatagtttgaggtcttagatttgagtctttaatccattttgatttgacttttg

SEQ ID NO: 38030 - DNA, 201 bp, Homo sapiens
tcccattctgtgagttgtctcttggctttgtttcctttgcagtgcagaagatttttaacatgatatgatcttatgtgtccatttttgctttggttacctgwgcttgtggggtattactaaagaaatctttgtccagtccagaatcctggaaagtttcctcaatgttgttttttattaattttatagtttgaggtcttagat

SEQ ID NO: 38031 - DNA, 201 bp, Homo sapiens
gatattaaagtatactctaaaaccatggtaattaaaactatcagaagaaacatgtgattgaaaatagattagaaggggccctagaaaatttaagaccattktatgtggttaatttggcattaccactcagaaaatgtataaaattattcttcacatcatacagtagctgataaaggagttagtttacctaaggcattaaaa

SEQ ID NO: 38032 - DNA, 201 bp, Homo sapiens
ttattcagtgttatctttaattggagatgcgattaggcttcaatgacagtagatgaagaacaggattatgatttttgtttatattaggaaatcatataagmatattatttgtaagcaattatatatttatgtatataaatatataaccatatatatttataattgtataagttatatgtgacaccaattcatatcatgctg

SEQ ID NO: 38033 - DNA, 201 bp, Homo sapiens
aaggggacagagaaggaagagtacattagcaatatcaattattacttataatgttaatcaactgtatatctgttctttacttagaattaattcataaaacmtactgttttctatttccttctccccaaaagttttatgactctatttcaatttctctaaataaggtttacaagctctggggtataggaaaggtaaaaaaat

SEQ ID NO: 38034 - DNA, 201 bp, Homo sapiens
catgttaacacaggcctgcctaaggatcaaatatgaaaataaattattcagtgttatctttaattggagatgcgattaggcttcaatgacagtagatgaaraacaggattatgatttttgtttatattaggaaatcatataagcatattatttgtaagcaattatatatttatgtatataaatatataaccatatatattt

SEQ ID NO: 38035 - DNA, 201 bp, Homo sapiens
ggattttgaatgaggaagatcatgatctgacacatttttaaaagatcacttttattactgggttgcagatagactgtaggcaggcaagaccacaagctggragaccaactactgcaatagtccaggtaaaagatgatgcagtcatccaggtaaaagtctagctttgaccacatttgtagaggtggtgaagagtggtagggc

SEQ ID NO: 38036 - DNA, 201 bp, Homo sapiens
tcaacagatggagaggcaggaagaggtcattctatgccaagggaattagatataagcaatgtcaaggaggtggggaagattggggttttttgggttttgaktatcccactgtgactggacaacaatgtgaatgggaactggggtagcagtggatgatgagaatagaaaggatgatcgggacttaattgcagaggaccttga

SEQ ID NO: 38037 - DNA, 201 bp, Homo sapiens
gatctaaattcatttttaaaatcgtactgagacttgaatagtgtactacaaagataacagttctacaagtttataatctggtagaaagagctagacaaaartaactatactacaagaggaaataagctttataatccataccatccaagaaagtgcacactataaaagatagagactaattctctttggtgtggtttttaa

SEQ ID NO: 38038 - DNA, 201 bp, Homo sapiens
atactacataggaatgatttctggggcttttcctcccacaaaatggggcagtttaaaacactctacttcagcaatttttttttgagacaaggtctccctaygttgcccaggctgggctcaaactcctgggctcaagggatcttcccaccccagcgtactaagtagtagggattacacgggcatgccaccacaacttggctt

SEQ ID NO: 38039 - DNA, 201 bp, Homo sapiens
agaattgtttatttgaataaaggtaatgacatttcagctaaggcagagtaggagtggaaaataaggaggtagctccttagctgatgaatgggttaacaaaygtgtctattttgcttaggcgaatcctcctgcctgagagctaatgtatgagtaggggttaactcaggtaagagactcttattacatatattcattctgttt

SEQ ID NO: 38040 - DNA, 201 bp, Homo sapiens
aaaataagttctcccatgtgtagagttaaactgacttttccttaggctgctttaatcctggatttgtttcttttttgtttcttttgatagtggctgctttrgtgcccactatattttgttctcaggctttcatctttatttttaacatgttctccccaaatacaggtcctgcttcacttcagacaaataataaatgcaaaa

SEQ ID NO: 38041 - DNA, 201 bp, Homo sapiens
tttgtggaatgttgaccatcacttcaatattcagttctagtaacatgacggtgatatactttaaaagtgatggtaaaaatcgtttacaaggcttcaaggcyagatttaccattttgccctcaggtgagtataaacatttgtgtaataaggacttttgtttatgcaaatggttacagggaagataatttagccatgtttacc

SEQ ID NO: 38042 - DNA, 201 bp, Homo sapiens
tgattaattctgtcacatttatttctatgatcatggtaatactttgcttagcatcacctagaagatggaaaatagttcatgtcctataagctttagtctcwttttacgaattttctacataccctgtcctctgaaatatatctaaatgtagctaaaaatatctttaagctttagaaaatctttctgcaagtatctcatttt

SEQ ID NO: 38043 - DNA, 201 bp, Homo sapiens
tgctactacttctgaacaattccaccataatattttggtacagccttcctttagccagttttatgtgtaatagccaaagtgatcattttaaaatgagtaaytgagatcatgtttataatccaatgttttcctaactcattcatagtaaaagtccttatagtgcctacaagatgctataggatctggctcttgactatccct

SEQ ID NO: 38044 - DNA, 201 bp, Homo sapiens
ttgaaaagatttggtgaaaacatgccagccctcatttttaatttcatgtacagagaaacctctttttgttcaacagaacaaacttgcttcctcctgtttgmacaggtgtaatgaaagctttttggcttgcagtaaggagggatgtgggaggtgattgaaataatttggttaatggggaaatctggaaagaaaataaatttg

SEQ ID NO: 38045 - DNA, 201 bp, Homo sapiens
gatttagtgattaattctgtcacatttatttctatgatcatggtaatactttgcttagcatcacctagaagatggaaaatagttcatgtcctataagcttyagtctcattttacgaattttctacataccctgtcctctgaaatatatctaaatgtagctaaaaatatctttaagctttagaaaatctttctgcaagtatc

SEQ ID NO: 38046 - DNA, 201 bp, Homo sapiens
attgaaaagatttggtgaaaacatgccagccctcatttttaatttcatgtacagagaaacctctttttgttcaacagaacaaacttgcttcctcctgtttscacaggtgtaatgaaagctttttggcttgcagtaaggagggatgtgggaggtgattgaaataatttggttaatggggaaatctggaaagaaaataaattt

SEQ ID NO: 38047 - DNA, 201 bp, Homo sapiens; identical to SEQ ID NO: 5754

SEQ ID NO: 38048 - DNA, 201 bp, Homo sapiens
aaacaaatttgaaccaaagttacctccccaaaacaatcctgtatctaccgtaaaagctattctgcatggtgagttggtgacatgttattactatctgtttratcttgtttcttcattaactagatgtctcttttggaagcccttatcttacattggctataactccacagtgaagaagaatgagtcttatatttaggtcca

SEQ ID NO: 38049 - DNA, 201 bp, Homo sapiens
ttactttcaattaatttttttttcttctacagagtctttaaacaaatttgaaccaaagttacctccccaaaacaatcctgtatctaccgtaaaagctattstgcatggtgagttggtgacatgttattactatctgtttaatcttgtttcttcattaactagatgtctcttttggaagcccttatcttacattggctataa

SEQ ID NO: 38050 - DNA, 201 bp, Homo sapiens
cattctttccagctaggagaggaaatgaatcttgatttctgggatatggtcagtaacactaagggagatggtccccaagaagaggagttttagtatattargaagaatgcaagatttagagttgaacttaggcttgatcctagttctgtcccgtaagagctgtgagatcaaattttcagaggtctggctttttcatatgtg

SEQ ID NO: 38051 - DNA, 201 bp, Homo sapiens
attttttattatactttaagttctagggtacatgtgcacaacgtgcaggtttgttacatatgcatacatgtgccatgttggtgtgctgcacccattaactyatcatttacattaggtatatctcctaatgctatccctcccccctccccccaccccacaacagtccccggtgtgtgatcttccccttcctgtgtctaggtg

SEQ ID NO: 38052 - DNA, 201 bp, Homo sapiens
actgagataaatacagtattaagagaaacgtattttctcttccttatgatttttttgtatatattttttattatactttaagttctagggtacatgtgcamaacgtgcaggtttgttacatatgcatacatgtgccatgttggtgtgctgcacccattaacttatcatttacattaggtatatctcctaatgctatccctc

SEQ ID NO: 38053 - DNA, 201 bp, Homo sapiens
cccaatgcttccacagggtcaggttgtgggagtctggctatattggtagaagaagggacaaatcactctgccaagtatcctgatttgtatcccagtaacayaaggtgtcattggttcatttgtgctccagagaagcacattataaaggtaggcaactgaggaatcgctctacctcataaagaatagagttacgttagttag

SEQ ID NO: 38054 - DNA, 201 bp, Homo sapiens
agtaaaatatagaccagaagctaccttgtcacagatataattttttaaacatattctttttttcttgcaaagatttttattatttattaaacaaatttaaratattgataaatacagtactgagataaatacagtattaagagaaacgtattttctcttccttatgatttttttgtatatattttttattatactttaagt

SEQ ID NO: 38055 - DNA, 201 bp, Homo sapiens
ttgctaactggctttcagattttttattctaagttcttttttaatttttaattttgtgggtatatagtaggcatatatatttatgggggacatgagatttygatacagggatacaaggaataatcacatcagggtaaattgggtatacacatcacttcaagcatttataatttgtgttacaaacaatccaatcatatcgtt

SEQ ID NO: 38056 - DNA, 201 bp, Homo sapiens
cattatggagtcattatcatctaccaggtacttgccaagtgcttcacttgagttagctccgttaataaaggcatattgaaacacatgagtaagtcaaacccattatgcaaggaattgaaatgagcatggttatgactgtggagaaaatgcctacatgcattaagaatcttcacctttaaataaggtatattgaaaaataat

SEQ ID NO: 38057 - DNA, 201 bp, Homo sapiens
tcattaacgccttccttttataatgtcaagccttgcttaaattctgtttgaattttgcatatctttatttgcattccccagaagcagaccctgagataagsattctggtacaatggtctgttttaggaatcatagatatcaccagtaggaaagggaggagatggtacagggaagggaaggcagccaatctaggatgcatta

SEQ ID NO: 38058 - DNA, 201 bp, Homo sapiens
cccctggaggcaaacactgataacttactagtgtccttgggaggtattttgagcatttactaacgtgtgtgtgtgtgtgtgtgtgtgtgtgtgtgtgtgtkcgcgcgcgtgtgtacttatgctgcttggcaatgccttggtcactgaaaaatatctcaaagatctttccagatgagcccacagagctcttcttaataactg

SEQ ID NO: 38059 - DNA, 201 bp, Homo sapiens
tccccaccactcagtcaagaaacatgcagcaatagatttcacctccatgagggagacacaactgggcattaatctaggtggacgtccttccatgtgaaaayatgagagaggcaatgaagtcccctttaacactgaatataagtttattgtcattaacgccttccttttataatgtcaagccttgcttaaattctgtttgaa

SEQ ID NO: 38060 - DNA, 201 bp, Homo sapiens
tggagtcctgtttcatcattttacagaatggaatcaattcctacctcgtgggttaaattaattgctcggcctaaaatacagaaactgctgtcaaattttcrttcttattttttactagagttcactttttaacctaggtggattacatggaagaagactttactcaatgactttcatgagtcctggaccgctggtgagggt

SEQ ID NO: 38061 - DNA, 201 bp, Homo sapiens
atgaaaagtaaggctcctcatcagattcccattctacccctggaggcaaacactgataacttactagtgtccttgggaggtattttgagcatttactaacstgtgtgtgtgtgtgtgtgtgtgtgtgtgtgtgtgtgcgcgcgcgtgtgtacttatgctgcttggcaatgccttggtcactgaaaaatatctcaaagatct

SEQ ID NO: 38062 - DNA, 201 bp, Homo sapiens
tcaggtaggaaatgttttccatcatagatcttcatggtgaggtatttttaataagtaggttacttttctaggagaaaaaggtcacatcagtcattttaaasataaaataatttgctacctactgtccttcaggaagcactgcaacatagtagataatgatggatattggatacatggacccaagttgaagatcctagcttc

SEQ ID NO: 38063 - DNA, 201 bp, Homo sapiens
aatgaaaagtaaggctcctcatcagattcccattctacccctggaggcaaacactgataacttactagtgtccttgggaggtattttgagcatttactaaygtgtgtgtgtgtgtgtgtgtgtgtgtgtgtgtgtgtgcgcgcgcgtgtgtacttatgctgcttggcaatgccttggtcactgaaaaatatctcaaagatc

SEQ ID NO: 38064 - DNA, 201 bp, Homo sapiens
tgaggcagaagaatcgcttgaacctgggaggtgtaggttgcagtgagctgagattgcgccactgcactccagcctgggtgacagagtgagactcagtctcaaaaaaaaaaaaaaaaaagaaaaaaaagagttgccaattaagatgtccggttaaaaaaaaaattattagtgtttgctttttggaaactgggcataaaatac

SEQ ID NO: 38065 - DNA, 201 bp, Homo sapiens
tctcaaactcccgacctcaagtgatgcaaccgcctcagcttctcaaattgtacgttagcatctttatacaaaggtatttaaccttacccaagacagcctaraaagagatgggaaagttggataaatgttaaatctgaagaagtgtttttaaaagttttgattttgattcaaattatggtgaattcagaaatgtttttaaag

SEQ ID NO: 38066 - DNA, 201 bp, Homo sapiens
aggctatcattccatgattacaaataggtggttatgtggggtggttttgcacttgtggcaattggactgcaatttggccttaaaatgacacaattcctcgytctcagatggagaggaattgccttgaaatttgcatgtaccagactaagtgccagtatatatatgactgatattttcgtgactcatagaaggtgtccatgg

SEQ ID NO: 38067 - DNA, 201 bp, Homo sapiens
ctgccaggaagaactctttcaattcaggtctacagaaatcgtaagattcctttgtaagatgcattctaattttagaatgtgcaaatgtgaaaaaattgtgytttagaaacgagtatagggccaatttgcacagtcagtgacttcttcagcatgctgagtagccttagatagtgaaagggttttgtgaattccaactggagc

SEQ ID NO: 38068 - DNA, 201 bp, Homo sapiens
aaatccagtagtttctttgcattctcagtagtacacgttgtatatatatatatgtaacaaatttggtagttttcagtatgtgtgatgtcctttgggggttrtttatcttgctggtccataggaggggtacactaccccaagaatcaagacatctgagttctagttctagttctagctctgccactgaagagccaccttacc

SEQ ID NO: 38069 - DNA, 201 bp, Homo sapiens
taatataaaagtatctatttcatctgatattttttgattggtgaatatttactcactcatgtaaatcatcaacctgaatagttattaaactaaagtttacytgaacggatgtgttcaaatacttaatactaacagcgtctggtaatgagattgctgtgggatttagtgattaattctgtcacatttatttctatgatcatg

SEQ ID NO: 38070 - DNA, 201 bp, Homo sapiens
tttcttcctgaattcttatgcagaaatatttgatacactaacatttaaattgaaaataagctagaaaaaaagtgtttctggttttattctcctgccagtgkcctctctttacaaaaatgccaaattgggaaatgaagacatgttacatgaaacacttgtattttttaaattcagaattctacatcagctcaggccaaactg

SEQ ID NO: 38071 - DNA, 201 bp, Homo sapiens
ataaatatataaccatatatatttataattgtataagttatatgtgacaccaattcatatcatgctgaatttttcttcctgaattcttatgcagaaatatwtgatacactaacatttaaattgaaaataagctagaaaaaaagtgtttctggttttattctcctgccagtggcctctctttacaaaaatgccaaattggga

SEQ ID NO: 38072 - DNA, 201 bp, Homo sapiens
gtttggggacccctctctcacttagcttgaccagacttcaaaatcctcttaaaacagcaatcactaataataaatcaaagttggcatagatttgaaacctmtttttcatctttcagctagagattttgaggacgaaaataattagatgatggaacaatttgagaaagtactggcctttgaagtcataaagcctaaactaca

SEQ ID NO: 38073 - DNA, 201 bp, Homo sapiens
atctatttcatctgatattttttgattggtgaatatttactcactcatgtaaatcatcaacctgaatagttattaaactaaagtttacttgaacggatgtrttcaaatacttaatactaacagcgtctggtaatgagattgctgtgggatttagtgattaattctgtcacatttatttctatgatcatggtaatactttgc

SEQ ID NO: 38074 - DNA, 201 bp, Homo sapiens
ctttctcaacaaaatagaccatgtattagcaaagtgaaaagtcaaatctttacaaagaatgttggaggctgatataatgtatgtaaaatatttgggtacayagtagatacttaataaatgatgtgtgggagtttggggcaaattctggcacatataggtccttcagatcttataaattttcaatcagaatttaaaacaata

SEQ ID NO: 38075 - DNA, 201 bp, Homo sapiens
aattgtgatttaaattctacctctataatatcatttcaagaaaataagacacattaaatagaatggttttctaacagaataatttgtaactgacagtaacraagtcttaattttctccttgcaagcctagatttttcagtcttgtgatagaatctggtttttctttgctttatttatgttggtccctggtgtctgtgtgtt

SEQ ID NO: 38076 - DNA, 201 bp, Homo sapiens
ctcgaactcctgacctcagatgatccacccgcctcggcctcccaaagtgctggtgctgggattacaggcgtgaaccactgcacccagcttatttgacatcytttttttttttttttttttttttaaagactgggtcttgttctccacccaggctggagtgcagtggcatgcactctgcctcctgggttcaagcaattctcc

SEQ ID NO: 38077 - DNA, 201 bp, Homo sapiens
taagtcaaacccattatgcaaggaattgaaatgagcatggttatgactgtggagaaaatgcctacatgcattaagaatcttcacctttaaataaggtataytgaaaaataatttgagtaactttacttttcctgaagaaacagtgtttaaagaaatggaagaattaaatggaagaattagtctccaagtagaagtgacagt

SEQ ID NO: 38078 - DNA, 201 bp, Homo sapiens
ccaggttcaagcaattctcctgcctcagcctcctgagtagttgggattataggcacccaccaccatgcccagctaatttttttgtatttttaatagagacrgggtttcaccatgttggtcaggctggtctcgaactcgtgacctcaggtgatacaccagccccgcctcccaaagtgctgggattacaggtgtgaaccatgt

SEQ ID NO: 38079 - DNA, 201 bp, Homo sapiens
taggtctttcaagtaaattttctcctcttttaaggtggagcagtaaggagtcattattcttggccaaaaaaagcagcttgaaaatgtgagggaagctctcygaaattatctgttggaaggatttttgagtttttcttcgaggcgatgacaggagtttgggagggaggagattgaaacgtacacttatcccactttctaaat

SEQ ID NO: 38080 - DNA, 201 bp, Homo sapiens
ttgccaccgatacaggtgagaagggccaaacacataatagtgcatgaagactttaacacactaagttatgactctgacattgccctaatacaactaagctytcctctggagtacaactcggtggtgaggccagtatgtctcccacacagcgcagagcctctattttcctcggagatctgtgctgtgaccggatggggaagc

SEQ ID NO: 38081 - DNA, 201 bp, Homo sapiens
tacacttcttttatttcggtgggttggcaaaaggggttagtttcaacgtgtgcaacctaatggaatcaagcaagatgaccactttcacaatcttattaggyctagctatgaattcttcatttcacatattgttaagcattgtggattttttttcctttggtgcagaatatgtttgcacaaagtttgactgaagatacatag

SEQ ID NO: 38082 - DNA, 201 bp, Homo sapiens
caccacctttatccagaaggtggttcatagccccctgcaaattgtaaaccaatattgctcttttaaatttaatagaaagtcttctgcattgtttatgtatrtaagtgcagaaatttaggattattttggaccatcaacaaggaagttgctggattctttgactttcttacgttgtaatttgcttacttgccaccgatacag

SEQ ID NO: 38083 - DNA, 201 bp, Homo sapiens
ttcccacagtcattgtctattacattggctttcatttcattagtagctttgatctctctatgaaaccatcttcatttacctgactaaaatgaaagcagcakcatccattccttcccacagtcattgtctgttacattggctttcatttcatcagtaactttgacctctctatgaaaccatcttcatttacctgactaaaat

SEQ ID NO: 38084 - DNA, 201 bp, Homo sapiens
ctgaggtgggagaatcacttgctcccaggaggttgaggctacagtgagccttgattgtaccattgcactccagcctgagtgacagagggacaccttgtctyaaaaaaatcatttttataaaacattgccatattgaccaaagttttcctcttttggggaaacatttaagcatttgtttagagcagccacaattgtacaatt

SEQ ID NO: 38085 - DNA, 201 bp, Homo sapiens
ccaaccttgactgatgtaagttgtatcacgcccctgcctccagacttctcagttcccttttcttagagcacttattatcttctaacacatgggtccccaamccccgggccgcagaccactaccaactcatggcctgttaggaactaggccacacagcaggaggtgaacaactggcaagcattaccacctgagctctgcctc

SEQ ID NO: 38086 - DNA, 201 bp, Homo sapiens
cttcagcatactccagaatcacctggagagcttctgattctttaagtctggtgtggggcctgagaatttcctgatggtggtgttccacacttaggaaaatmtggtgttctcatcttgttaattccacacaggattttgtgctcattgggacttttatcttacttttggagaccaagctcactttgcaattatatatgtgaa

SEQ ID NO: 38087 - DNA, 201 bp, Homo sapiens
gtcacagctgaccttactgggagttagagagatgacattttaacccagagactgtgacttaggatgaccttggaatatgtggctgtttaaggttagcataygctgtatggtccattcataattcatgagaaccataattcaacctctgggtgaatagtatgaattttaattaggtgaataactcacatgaatcttaggttt

SEQ ID NO: 38088 - DNA, 201 bp, Homo sapiens
tacaggtttggatcggggccaacccctctcaaaagtgggctcaaggtatataacaaaggccctgagttctgtccaagaagtgaatggaagccagagaggaragggtatgtgtggttctaattagagaaggaagctgacttgaagaaagtcatcagaggaaagcaaacaggaggattgtaccatattcacaatctgagtttt

SEQ ID NO: 38089 - DNA, 201 bp, Homo sapiens
tggaaaacaaaacaaacgtgtaagtttccaccactttttagtaatgttatttcactttccttctcttcttttaaggtaaggtctgtggaaaaatattgccytcaccattgctggcagagaccagtgaggccatggttccatttgtttctgatacagaagacagtggcagtggctttgagcttaccgttactgctgtacaga

SEQ ID NO: 38090 - DNA, 201 bp, Homo sapiens
gttatgattttatagctcatgaggtctttggtagctctaatactgaagatttcaacagatggagaggcaggaagaggtcattctatgccaagggaattagrtataagcaatgtcaaggaggtggggaagattggggttttttgggttttgagtatcccactgtgactggacaacaatgtgaatgggaactggggtagcagt

SEQ ID NO: 38091 - DNA, 201 bp, Homo sapiens
tgtgaggatgttcttctgaccaagccagaagggatcatgcagatcccaagaaattctcacagaactactatggggtaaggaagtcatgattattataatgsaagaagtgtgtggaaaaaattgcttgactgacatcaacacttggtacttgcttaaaacattattcttcaccttttttccaaaaagaatagactcttaggt

SEQ ID NO: 38092 - DNA, 201 bp, Homo sapiens
ttttccagccacctatcttcaacctacaggctttataaatgtgttttctgtatttctgtctaagtcatcaatgaaataccgtactcggtggaaccaaagayagaatcatttccataccatttagaccttccctccaggttaacatttcttgtatggttatttaatcacctgtggaacttcctagccacataattatctacg

SEQ ID NO: 38093 - DNA, 201 bp, Homo sapiens
tgtgcttgcttcccctttgccttcagccatgattgtaagtttcctgaggcctccccagccatgcagaattgtaagtcaattaaacctcttcttcataaacstcttttcctcagaacgtcttcagaaagactttatagtctcagagtcctttatagcagtgtgagaacaaactaatacaaatgtgttttcatgtcaaacttt

SEQ ID NO: 38094 - DNA, 201 bp, Homo sapiens
tctgacattgccctaatacaactaagctctcctctggagtacaactcggtggtgaggccagtatgtctcccacacagcgcagagcctctattttcctcggrgatctgtgctgtgaccggatggggaagcatcagtgcaggtaagcatatttttgttgcataaacattaatgccagttgttatttttgaaaataggtcatgt

SEQ ID NO: 38095 - DNA, 201 bp, Homo sapiens
gaaggcatgatgtggcttccctgggagggagatcgcagaggcaatgggacaggggactgttgcctcgctgaactgagcagtgcatgttagtagagccagawgatggtagggtggtttccctccctacctgttcacctgatagtgagttcttgcaagatctgatggttcaaaagtgtgtggcttcctttgctctctctcttc

SEQ ID NO: 38096 - DNA, 201 bp, Homo sapiens
ccatggtgtatgtgtgccacattttcttaatccagtctatcattgatggatgtttgggttggttccaagtcttttttaaacatattcttaacatcactgtgaaattaagctttaattattttcatttttcctcctcgacctaaaaaaagcctttggtgatatttggcaaggtttccaatgatactttatggtcaaaagaaa

SEQ ID NO: 38097 - DNA, 201 bp, Homo sapiens
ctaacacactatttttctctagaagtcatcaatattaagaatgtttcagctgtctgattttccactaatatttaaacgtacatgcatatattttatagtayttgtatatatcactttttttgcacataacattatatcttataattatagtggtatggtaaatgtctatgtgccacattttttaatacttcacagttgcct

SEQ ID NO: 38098 - DNA, 201 bp, Homo sapiens
aattgaatatttcacatcttatttttaaaaccacactaaccagcaaatcaaatcaattcctgcttccacgtagtcctttagccttttttaaaagacatagkgggttactgactctgagaaaagattccctctgcattgattttagtagaagttataattcttcatattcttttaacttcacattgttaaaaatgttttatt

SEQ ID NO: 38099 - DNA, 201 bp, Homo sapiens
aatactgtgctcaagagcatgaacctccctcccctgggaaggaccatgctgtgtgctggcttccctgattggggaatggacgcctgccaggtacaaaagtrtaaaccagcctagctgttcagtaacatgtgggtgaaagtagattctgcctttccccaaaagaagctcatgtttcttctattactgtgtcaaaattctttt

SEQ ID NO: 38100 - DNA, 201 bp, Homo sapiens
taaatttgtgtatgtcattgtccatgtgtgtggtatatatttatgcttgattctgaagtgcatagaggtcagagaaactgctctgagggtggggttgtttycttaggataaactctgagagattaaatcactgggttagaaagcaaaaatgtttgcttaaagaatctttctttatgattacaacctaatttagactacagt

SEQ ID NO: 38101 - DNA, 201 bp, Homo sapiens
aaacttcttaacatcattttgaggtgtatcagaagtaggcagaacttttcacaaaatgaacacccatgtaaccaacacccagatcaagaaacaaaatactrcattactagtacccagcagccgcccttgtgcctcttccagtcatcactcccctaaaagtaatcagcattctgatttctaacgcaatagttgagttttgcc

SEQ ID NO: 38102 - DNA, 201 bp, Homo sapiens
ggaacttcccatcatggatgacagagcgtgtaatactgtgctcaagagcatgaacctccctcccctgggaaggaccatgctgtgtgctggcttccctgatkggggaatggacgcctgccaggtacaaaagtgtaaaccagcctagctgttcagtaacatgtgggtgaaagtagattctgcctttccccaaaagaagctcat

SEQ ID NO: 38103 - DNA, 201 bp, Homo sapiens
ggcagtagatgtagggagaggtaaaaaattatttgagaatttgaactacaggttaatactcgtgcagatctaccatctaaattcacacctcaagtataggycaaaacatgtcaagcagaaaattcggcactgtgaagttgacagtgagcaacatgactgacagaagtgtatacagattctgccaggaagaactctttcaat

SEQ ID NO: 38104 - DNA, 201 bp, Homo sapiens
ttagtacaaaaattcctatctcatttaaccattagttggcactcttggttttgtccagatgccatatgttttaaaggattttatttcctaaatggcatttktagatggtaacttttttgaaaatgtatttactcagtgttaccagtatcaggttttatactcataatatagatggccctttttagacctcagataaattaa

SEQ ID NO: 38105 - DNA, 201 bp, Homo sapiens
ggctgacacctggaatgggagcttgtaacttttacaaaataatagatgtttatcatcttttgcaatttttacttttaagtctatactaaaatgagccaaaraagtcttaacaatgatgtatggcacaattggttggttgaggctatcattccatgattacaaataggtggttatgtggggtggttttgcacttgtggcaat

SEQ ID NO: 38106 - DNA, 201 bp, Homo sapiens
ttttaattgcttcaactttagtagatgaagtagagataaaatagttaagatataaatagtttatagggactaaagtaaggagtcaaccagagattaataasactttcagtagcagtaaaacccaatgagtattagcatctatttgtactatatttcaataaatcaagacaaaaaaattcattgtaaaatactgcttcaata

SEQ ID NO: 38107 - DNA, 201 bp, Homo sapiens
agaacatccctatgtccctcagtttagtttgtctgacatttttgtcaaggttttactgaggttatggatttggggaagaaagaccacagaagtagcatacyattcttattatatatcaagggttcatacagtcaacatgacttatcactgatgttaaccttgaccatctggctgagatagtgtttaccaggtttctctaat

SEQ ID NO: 38108 - DNA, 201 bp, Homo sapiens
ggaagctctccgaaattatctgttggaaggatttttgagtttttcttcgaggcgatgacaggagtttgggagggaggagattgaaacgtacacttatcccrctttctaaattggaaaacagataggctaaaggtgctttttcctatctgcattcattacaggcaatccttttttggatgaagccctctacaccttttgaga

SEQ ID NO: 38109 - DNA, 201 bp, Homo sapiens
actgtggcagatgtatacctatataacaaacctgcagattctgcacatgtatcccagaacttaaaatttttaaaaaatcaaaagagaaaaaaatactatgmtaaatttcttaaatgctatattcataccattgcttttgggggattttaacatatatgtatccctaaagcagtatatcatttggtttttcttggttttgat

SEQ ID NO: 38110 - DNA, 201 bp, Homo sapiens
gagggaagctctccgaaattatctgttggaaggatttttgagtttttcttcgaggcgatgacaggagtttgggagggaggagattgaaacgtacacttatsccactttctaaattggaaaacagataggctaaaggtgctttttcctatctgcattcattacaggcaatccttttttggatgaagccctctacaccttttg

SEQ ID NO: 38111 - DNA, 201 bp, Homo sapiens
ctgttgtgtaagagatattgggaatgaccacaatctcccaagactgacacaacttcacaatgaataccaatcttcacaagatatttagagaggacaaggaraccaatttgtgaaacacatgagttttaagttttagataggtctttcaagtaaattttctcctcttttaaggtggagcagtaaggagtcattattcttggc

SEQ ID NO: 38112 - DNA, 201 bp, Homo sapiens
aataaataaaattctgtaggccagtccctaaaattctggttgcctagcatagtctgggaaggcttcttaaaatcagatttttcagaggtgagttttgggartcaatattattataaagcctatctgatgtttgagaatcactactgttaactatggcaagctattggaggagtatgttctaaattactgcaaccttatggg

SEQ ID NO: 38113 - DNA, 201 bp, Homo sapiens
agtaagagtttaaagaaaatgtaagatatagaaggtagaattgcaagagtgatgactttgagtagaagaaagaagatgagatctagtacccaaaaggaggsgatggtcttaggagcaaagtacatatcatctatagttaactgatggaaggcaggatcttgaggcaccggtgcaggtatgaggtgtttgggaatagatgga

SEQ ID NO: 38114 - DNA, 201 bp, Homo sapiens
cttgaaattttcctactagaatgtaagttccatgggggccagtatttttatcatctattctattccaccaataatatatcaccaatgtctggaacagtgcstagcaaatggcaagcactaaataaatatttgctaaatgaataaataaaattctgtaggccagtccctaaaattctggttgcctagcatagtctgggaagg

SEQ ID NO: 38115 - DNA, 201 bp, Homo sapiens
gcctctctgactccagagtaacctggaagattatgaatgaacttacatgcaagaaaagtactgagaaaatcattgtaaagaatttattctatacgtattgktttattatatatatagtagggatggaatatatgaaggaagacaagtccagtgttgtattagtcagggttctcttagagggacagatatatatatgtgtgt

SEQ ID NO: 38116 - DNA, 201 bp, Homo sapiens
accctggaatcaaattaccatctgattgttcataaattttgtttccttttgcaaaacagtgaatagatagtatgtaaagatggaaattgacaaaacaaatytttgaggaattaaacacattacaaatacattattggtcattcttgttctaaaaactgaaagcaggagcttcagattaaagcagttttctaaaacatgttt

SEQ ID NO: 38117 - DNA, 201 bp, Homo sapiens
agtgcatgtgttagaaagagaggtctgtgaacacacttactattctgcccatccaggagggatcacagagaagatgatctgtgctggctttgcagcatctrgagagaaagatttctgccaggtgagaggattctggttttatacaggaaggtggaaaattgccatctgctgaagagtttctatagacaggagaaaccattg

SEQ ID NO: 38118 - DNA, 201 bp, Homo sapiens
tttgatacactaacatttaaattgaaaataagctagaaaaaaagtgtttctggttttattctcctgccagtggcctctctttacaaaaatgccaaattggraaatgaagacatgttacatgaaacacttgtattttttaaattcagaattctacatcagctcaggccaaactgaatgacttcagctatgttggtacagagc

SEQ ID NO: 38119 - DNA, 201 bp, Homo sapiens
aggatgtatggctttttgctggcctttgccttcctaagaagggcccagatacaagtgtcactctccatgcaggtagggtcctctcagagtgggtaaaaaakccaattgctaaactgctgtcttttttattcttcagatttacaataccatcctagaagtaagtgcattaagaatatttgtgtttctatttaggagaatgtt

SEQ ID NO: 38120 - DNA, 201 bp, Homo sapiens
attcctaccccaaagctagacctgttgcagatttttaaaaaaatcttgtggttgtgaaccagtgcttgaatattggagaattacatagaattattttaagmtctgaatctgaataaaagtccttctatatgcaagtatcttgcctaggtaaagaccctgggtatgagatgaccaagactagcgccagcattagtatttctc

SEQ ID NO: 38121 - DNA, 201 bp, Homo sapiens
tagtgtactacaaagataacagttctacaagtttataatctggtagaaagagctagacaaaaataactatactacaagaggaaataagctttataatccayaccatccaagaaagtgcacactataaaagatagagactaattctctttggtgtggtttttaaggtatgtgtggagtggttagaagtgtggggagagatat

SEQ ID NO: 38122 - DNA, 201 bp, Homo sapiens
tctggaagataaagtacgtgctactcagacaaaaagaatatcatatgcagaaaccctcacaaaagagaatggacaacgtataagaaaactacaaataactytacatgttttgagttttggagggaataatagaaaaggcaggagtgagatcatgttgaacatgaggcattaaattataagtgccagagtgataggatagct

SEQ ID NO: 38123 - DNA, 201 bp, Homo sapiens
aaacaaatctttgaggaattaaacacattacaaatacattattggtcattcttgttctaaaaactgaaagcaggagcttcagattaaagcagttttctaawacatgttttcttggtgtttcagggagactctggtgggccactagtatgtagacatgaaaatggtccctttgtcctctatggcattgtcagctggggagct

SEQ ID NO: 38124 - DNA, 201 bp, Homo sapiens
tggaatcaaattaccatctgattgttcataaattttgtttccttttgcaaaacagtgaatagatagtatgtaaagatggaaattgacaaaacaaatctttraggaattaaacacattacaaatacattattggtcattcttgttctaaaaactgaaagcaggagcttcagattaaagcagttttctaaaacatgttttctt

SEQ ID NO: 38125 - DNA, 201 bp, Homo sapiens
gtgaactaagctttatcttcaccctggaatcaaattaccatctgattgttcataaattttgtttccttttgcaaaacagtgaatagatagtatgtaaagayggaaattgacaaaacaaatctttgaggaattaaacacattacaaatacattattggtcattcttgttctaaaaactgaaagcaggagcttcagattaaag

SEQ ID NO: 38126 - DNA, 201 bp, Homo sapiens
tttaatacttcacagttgcctaagttatttgaccagtgaaatgtctttttaaatctaatccttgaagtgtgtggatctttacaccaggagtgtgctcataygctggtgtaacaaaaaccctatgtcctacacgtgccctgccttttagcttccctggcactggttgactccagtattaattctcaaacttcagcatactcc

SEQ ID NO: 38127 - DNA, 201 bp, Homo sapiens
tctaagagagtacaaaaaattaactataagttaaatttccatgtgtctttccttgaattcaataattatgtaagccagatactagagcagtttaaggtagktccattaatgaacatttatcagtttggtggaagggaaagagcactgaactttggcaggtgacatggactcagattttactgctgctactacctatgtgtg

SEQ ID NO: 38128 - DNA, 201 bp, Homo sapiens
tgttgacccaagtgcttttgagaacacaaaacacaggattaaccattagcctcttttgatagataagaaaggttactgaatatttacataccagttactayacaatctaaattaaatctcttgtttcttgtcacaatgaaattgatcctctggccatctctttactaaagagggcagagttttcctgtaatcatggaaagc

SEQ ID NO: 38129 - DNA, 201 bp, Homo sapiens
tataactgtgacttctggggagtacagcctctttcagaaggataagcaagaacagaatattcctgtctcaaaaattattacccatcctgaatacaacagcygtgaatatatgagtcctgatattgcactgctgtatctaaaacacaaagtcaagtttggtgagtatggagagttagaatattaaaaatgcagtggaggaaa

SEQ ID NO: 38130 - DNA, 201 bp, Homo sapiens
tcctgaatacaacagccgtgaatatatgagtcctgatattgcactgctgtatctaaaacacaaagtcaagtttggtgagtatggagagttagaatattaamaatgcagtggaggaaaactgctaattatgtacaagttaactttaatgtctgtgtggctgtctagtaatagaatagctaagctttgtttctttttaaaata

SEQ ID NO: 38131 - DNA, 201 bp, Homo sapiens
aaactgctaattatgtacaagttaactttaatgtctgtgtggctgtctagtaatagaatagctaagctttgtttctttttaaaataattttgttcggtctrtaacctattgagaaaatactgtataggctacatgtcccagccacaaattatttatgcttaacctaacaatcaacattttttccctttcatttatttccat

SEQ ID NO: 38132 - DNA, 201 bp, Homo sapiens
tgaaaaaattaggcccagaggaaaggttaattgttctacattacagactagcaactgtatctcttttttccctacttaaggtttcttctgttaaattcttwatataaagtagatatttcaaatatgtaccagcaatttatgtgctatcaaatatgtacacaatttatcttacaagaagacaaataaaggacttagtttggt

SEQ ID NO: 38133 - DNA, 201 bp, Homo sapiens
agatcgagaccatcctggccaacatggtgaaaccctgtctctactaaaaatacaaaaaattagccgggcttgacggtgcgcgtctgtagtcccagctactygggaggctaaggcaggaaaatcgcttgaaaccaggaggcggggcttgcagtgagccgagatcacaccactgcactccagcctgggagacagagcaagact

SEQ ID NO: 38134 - DNA, 201 bp, Homo sapiens
acagtaattattctttcaaccaatcatttgttaaaaattaactgtatatatcatagcaggtactggacgttttttgagaaaaagcactctgcccaaataamtttgtagtttgaggtaatcaaaggtgtaaaacaaagtaggaaatgccattagaacagggaagtgctgcgctgattcaaaaaaggtagctcttatttccag

SEQ ID NO: 38135 - DNA, 201 bp, Homo sapiens
ttattgtctaaattatttcatgctcaggcctgctatttacacagtaattattctttcaaccaatcatttgttaaaaattaactgtatatatcatagcaggwactggacgttttttgagaaaaagcactctgcccaaataaatttgtagtttgaggtaatcaaaggtgtaaaacaaagtaggaaatgccattagaacaggga

SEQ ID NO: 38136 - DNA, 201 bp, Homo sapiens
ccagcactttgggaagctgaggtgggcaggtcatgaggtcaggagttcaagaccagcctggccaatatggtgaaaccctgtctctactaaaaatacataarttagctgggcatggtggtgcatgcctgcagtcccagctacttgggaggctgaggcagaagaatcgcttgaacctgggaggtgtaggttgcagtgagctga

SEQ ID NO: 38137 - DNA, 201 bp, Homo sapiens
tactaacagcgtctggtaatgagattgctgtgggatttagtgattaattctgtcacatttatttctatgatcatggtaatactttgcttagcatcacctasaagatggaaaatagttcatgtcctataagctttagtctcattttacgaattttctacataccctgtcctctgaaatatatctaaatgtagctaaaaatat

SEQ ID NO: 38138 - DNA, 201 bp, Homo sapiens
ttgtttatactctgtcttactcggtatgtctggctcacagtaggcattgaataattttttaataaaaaatattcatttgtggccaggtgcagtggctcacrcctgtaatcccagcactttgggaggccaaggcaggcggatcatgaggtcagcagatcgagaccatcctggccaacatggtgaaaccctgtctctactaaa

SEQ ID NO: 38139 - DNA, 201 bp, Homo sapiens
ctggagagaaagatttctgccaggtgagaggattctggttttatacaggaaggtggaaaattgccatctgctgaagagtttctatagacaggagaaaccaytgctgaaatcaccaacttgtcacgtgcttcaatatcatatccctgcatgaagaccagtggggcaacagaagtaataagttaattaatccgaatttgctga

SEQ ID NO: 38140 - DNA, 201 bp, Homo sapiens
atcctttatgcatcagctcaaatgttattgaaactgtatacacatacatgcacatgtaagcaaacatataactacctttattctttactattcactctgartatttcctttatagctactattagcatcttatttgtttatactctgtcttactcggtatgtctggctcacagtaggcattgaataattttttaataaaaa

SEQ ID NO: 38141 - DNA, 201 bp, Homo sapiens
gaactgagcagtgcatgttagtagagccagatgatggtagggtggtttccctccctacctgttcacctgatagtgagttcttgcaagatctgatggttcamaagtgtgtggcttcctttgctctctctcttctgctttgctgtgataagatgtgcttgcttcccctttgccttcagccatgattgtaagtttcctgaggcc

SEQ ID NO: 38142 - DNA, 201 bp, Homo sapiens
cagtgcatgttagtagagccagatgatggtagggtggtttccctccctacctgttcacctgatagtgagttcttgcaagatctgatggttcaaaagtgtgyggcttcctttgctctctctcttctgctttgctgtgataagatgtgcttgcttcccctttgccttcagccatgattgtaagtttcctgaggcctccccagc

SEQ ID NO: 38143 - DNA, 201 bp, Homo sapiens
gacacaacttcacaatgaataccaatcttcacaagatatttagagaggacaaggaaaccaatttgtgaaacacatgagttttaagttttagataggtcttycaagtaaattttctcctcttttaaggtggagcagtaaggagtcattattcttggccaaaaaaagcagcttgaaaatgtgagggaagctctccgaaattat

SEQ ID NO: 38144 - DNA, 201 bp, Homo sapiens
tctacagaaatcgtaagattcctttgtaagatgcattctaattttagaatgtgcaaatgtgaaaaaattgtgctttagaaacgagtatagggccaatttgyacagtcagtgacttcttcagcatgctgagtagccttagatagtgaaagggttttgtgaattccaactggagctaactaggaaatcataagggagacagag

SEQ ID NO: 38145 - DNA, 201 bp, Homo sapiens
ttgctgtctttacctcagtgtttttctccctctgtgcttccctagcacgtggtacttacatatttctggaatcttgattaaacacctgtttgaggactgtytgagcacaatccttctggattgtgacaccctcaagggagcagagatacaaagatggctttgtatactaaatgactggccctcatagatacctagtacata

SEQ ID NO: 38146 - DNA, 201 bp, Homo sapiens
ctcattagcatagttataaatatgataatttaagtaaaaattaagttaatttgagccactcaaagttacttttaaagacagatttaaaatgtcaataaaakgataatttaaatttccgattaacctaaaaaagaagtgccatcatttttatttatgccaataaattgaaatataatgtcattttatcactaaggtttaaag

SEQ ID NO: 38147 - DNA, 201 bp, Homo sapiens
tgtggccacattaacaagagcatccagttctcaccctctgattatactctcttcaacatattttcagcattgcagacagagggacctttctaaaatgtacrtcaatctgatgcaattttcctgcttaaaacccttcagtggtatcccattgtcctttatatgaagtccaaattccttaagacagcctactgggcccttcat

SEQ ID NO: 38148 - DNA, 201 bp, Homo sapiens
taaatatgataatttaagtaaaaattaagttaatttgagccactcaaagttacttttaaagacagatttaaaatgtcaataaaatgataatttaaatttcygattaacctaaaaaagaagtgccatcatttttatttatgccaataaattgaaatataatgtcattttatcactaaggtttaaaggaaatgaaatctctaa

SEQ ID NO: 38149 - DNA, 201 bp, Homo sapiens
ttttaagctcctagaaaaattccagattgctttgccaataggagaagaatatttgctggttccaagcaggtaaagaaaaccttaaaaaattaattgctacrtggaaattcactatctattcttttaattgtcaaactaactgtagtctataatagatgtattaaataaataaatatattttgcttctagtgtaaacctcct

SEQ ID NO: 38150 - DNA, 201 bp, Homo sapiens
tggtggctggttaccaagagaaatgaagcagattttttctgtcctcttaaaggctaggccaaggactggcaaaaatattaattctgctacattctagtaamcagagcaaccacaaacctagctcagattaaaggggaaggaaaagagactctatatgaatagcacctatgtatagggatggaaatgatgtgtccatctttg

SEQ ID NO: 38151 - DNA, 201 bp, Homo sapiens
agtaaatcacttactttatgtatatagttactagttggcttatcactgttgaaattatttaagaaaggtaaatagtggagattaatgtgtgtgtgtgtccktgtttgtgtatgtgtgtgttcttaaacaacactgagagagtttattaagcaagttctgagaagatagtgagttttcaacagaattttaaaagcatttatg

SEQ ID NO: 38152 - DNA, 201 bp, Homo sapiens
aataaacatataatatgttgagtggtacagagtgctacaaagaaaatatgaagtgcagttggagatgaattgtcaaaaaaggtcttagcacttaaaaaacmctaaaacagcaaacaattctctttaccacctaaactgtaagagcgatctggaattgctataaagtacacaacatgggagaagtcttaaacaacagttttt

SEQ ID NO: 38153 - DNA, 201 bp, Homo sapiens
atatgaagtgcagttggagatgaattgtcaaaaaaggtcttagcacttaaaaaacactaaaacagcaaacaattctctttaccacctaaactgtaagagcratctggaattgctataaagtacacaacatgggagaagtcttaaacaacagtttttattatttataggcccattgcacactgtcattaaataccaatatgt

SEQ ID NO: 38154 - DNA, 201 bp, Homo sapiens
agaaaattaaatacaaacctctttttaaagtgaatttgacaaagcaaaataaattggaatatatagataaatatgctaaaatttgtcatatgtactttgcrtactttacatgtgttatttcattctcagggcaatctaagacagtcacttttattatctcattttatagagaagaaagctgtgcagtaaagaaatcaaata

SEQ ID NO: 38155 - DNA, 201 bp, Homo sapiens
aatacctttcccaaggttacagagctagtagtagagcctggatttgaatctgggttctgactgatttttaactgccatgacaaggatcaaagctcaaagtrtgatctctgtgttagaaacatcggggttgctctttaaaaaagccgattctcaggcctcaacccagacctactgacccagacactgcaagtagaatccatc

SEQ ID NO: 38156 - DNA, 201 bp, Homo sapiens
tagtaaatcacttactttatgtatatagttactagttggcttatcactgttgaaattatttaagaaaggtaaatagtggagattaatgtgtgtgtgtgtcyttgtttgtgtatgtgtgtgttcttaaacaacactgagagagtttattaagcaagttctgagaagatagtgagttttcaacagaattttaaaagcatttat

SEQ ID NO: 38157 - DNA, 201 bp, Homo sapiens
tgatgagactgcaaaacagatgtgaggtattggattgatctttccattgtagctagggaaatactgatgttcattgtttcagtgaagttcaatgatttcckatccgaattaactcccttaatttaacaattttttttttttttttgagagtgaatgcccctctgggcttctaggccacatggttgctagagaaattaggta

SEQ ID NO: 38158 - DNA, 201 bp, Homo sapiens
ctaaagagggaaagctagatattatattgttcttgaggttgaaagcttacagtctagtaggagagtcaactttgctgtctttacctcagtgtttttctccytctgtgcttccctagcacgtggtacttacatatttctggaatcttgattaaacacctgtttgaggactgtctgagcacaatccttctggattgtgacacc

SEQ ID NO: 38159 - DNA, 201 bp, Homo sapiens
tgatctttccattgtagctagggaaatactgatgttcattgtttcagtgaagttcaatgatttcctatccgaattaactcccttaatttaacaattttttytttttttttgagagtgaatgcccctctgggcttctaggccacatggttgctagagaaattaggtactgtgttgcacttgaaaacactaaaatctttctga

SEQ ID NO: 38160 - DNA, 201 bp, Homo sapiens
ccaaggcaggcggctgggaggtggaggttgtaggtagccaagatcacgccactgcactccagcctgggcaactttgagcactgagtgaacgagactccgtstgcaatcccggcacctcgggaggccgaggctggcagatcactcgcggttaggagctggagaccagcccggccaacacagcgaaaccccgtctccaccaaa

SEQ ID NO: 38161 - DNA, 201 bp, Homo sapiens
cggctgggaggtggaggttgtaggtagccaagatcacgccactgcactccagcctgggcaactttgagcactgagtgaacgagactccgtctgcaatcccsgcacctcgggaggccgaggctggcagatcactcgcggttaggagctggagaccagcccggccaacacagcgaaaccccgtctccaccaaaaaaatatgaa

SEQ ID NO: 38162 - DNA, 201 bp, Homo sapiens
ggcactctgcaggctgaggcaggagaatcaggcagggaggttgcagtgagccgagatggcagcagtacagcccagcttcggctcggcatcagagggagacsgtggaaagagagggagagggagaccatggggagagggagacggagagggagagggagaggaacaatcttcttatatggtttgaaggaatgagaattcaca

SEQ ID NO: 38163 - DNA, 201 bp, Homo sapiens
gatatttgttgtttttctgaatacagatctagctgagacatttataaaataagtcaaccatttattcaggcctaccagccctgctcctggtattacctcarctgtggctctatctctttacttctcctcagatcaatgaatctttgtagggcctcttcaaggataaattctcattcattcattctttgaaaaaaaaaaaat

SEQ ID NO: 38164 - DNA, 201 bp, Homo sapiens
gctgtggctctatctctttacttctcctcagatcaatgaatctttgtagggcctcttcaaggataaattctcattcattcattctttgaaaaaaaaaaaatatatatatatatatatatgaaacccattgtgtgccaggcttaaacataccagttatctaactaccaaattaagaaaaaaattaaataaatgaattaataa

SEQ ID NO: 38165 - DNA, 201 bp, Homo sapiens
tgtggctctatctctttacttctcctcagatcaatgaatctttgtagggcctcttcaaggataaattctcattcattcattctttgaaaaaaaaaaaatatatatatatatatatatgaaacccattgtgtgccaggcttaaacataccagttatctaactaccaaattaagaaaaaaattaaataaatgaattaataaat

SEQ ID NO: 38166 - DNA, 201 bp, Homo sapiens
tggctctatctctttacttctcctcagatcaatgaatctttgtagggcctcttcaaggataaattctcattcattcattctttgaaaaaaaaaaaatatatatatatatatatatgaaacccattgtgtgccaggcttaaacataccagttatctaactaccaaattaagaaaaaaattaaataaatgaattaataaattc

SEQ ID NO: 38167 - DNA, 201 bp, Homo sapiens
gtactagaaaaatgtgaagcctgttttttgtacctgaaatatcaactccactggcagtttcggagttgaaattatttgaatatggtcaaagaaaaatttcratggatggaattgggcaaggacgactttattcaagcctatcacagcaggggagagagatcagactgaactaaactccactgaaacaaaaggtgggagagt

SEQ ID NO: 38168 - DNA, 201 bp, Homo sapiens
tgatttcattcctttttatggtcaaatagtattccgttatgtaaatacacacattttctttatgcattcattcattcatgggtgcttaggttgattccacttttttttttagctattgtgaatagtgctgcgataaacatggggatataggaatccctttgatatactgattccctttcctttagattagtatcagtagta

SEQ ID NO: 38169 - DNA, 201 bp, Homo sapiens
gatttcattcctttttatggtcaaatagtattccgttatgtaaatacacacattttctttatgcattcattcattcatgggtgcttaggttgattccacttttttttttagctattgtgaatagtgctgcgataaacatggggatataggaatccctttgatatactgattccctttcctttagattagtatcagtagtaa

SEQ ID NO: 38170 - DNA, 201 bp, Homo sapiens
tttattgctgaaaattaaataaaattggcattgtttttaaaagtaatgcaagaaagcaaaaagagttatgttgataacagaatcctttattctgtacaagytctagttgcttaagcttaaatcaaatcctgctaagtatattttcttttcttaacaggaagttgctgatagtagaatattgtgcttagccttggtgcatct

SEQ ID NO: 38171 - DNA, 201 bp, Homo sapiens
tactgtgttgcacttgaaaacactaaaatctttctgactactttcactgagcaaagagacataaaatgctttaaatttgcaacatttcagaaaataaattytagtgattatttatgactcgaatctttcagattttgacagtgaaagtggaaggttgtccaaaacaccctaagggcattatttcgcgtagagatgtggaaa

SEQ ID NO: 38172 - DNA, 201 bp, Homo sapiens
tttgcaacatttcagaaaataaattttagtgattatttatgactcgaatctttcagattttgacagtgaaagtggaaggttgtccaaaacaccctaagggmattatttcgcgtagagatgtggaaaaatttctttcaaaaaaaaggaaatttccaaagaactacatgtcacagtattttaagctcctagaaaaattccaga

SEQ ID NO: 38173 - DNA, 201 bp, Homo sapiens
ccatgagcatttatttctctgtgctgagaacatttcaagtctcctagttattttgaaatgtttttaactgtagtcactttattgtactattgaacattagracttattcctcctatctaactgtatgtttgtacccgttaaccagcctcccttcatcctccccttctcccacacacccatatcctcccaagcctctggtaa

SEQ ID NO: 38174 - DNA, 201 bp, Homo sapiens
gaaagtggaaggttgtccaaaacaccctaagggcattatttcgcgtagagatgtggaaaaatttctttcaaaaaaaaggaaatttccaaagaactacatgwcacagtattttaagctcctagaaaaattccagattgctttgccaataggagaagaatatttgctggttccaagcaggtaaagaaaaccttaaaaaattaa

SEQ ID NO: 38175 - DNA, 201 bp, Homo sapiens
cttttaaatggagttcttttttttttttcctgttgaattgctttttcgagtttcttgtgtattctggatgaatagtttgcaaatatttcctcacatttaayggatcctctctatattgttgatagtttcctttgctgtgcagaagctttttagtttattatagtcccatttgtctaattttgtttttgttgcctgtgcttt

SEQ ID NO: 38176 - DNA, 201 bp, Homo sapiens
ttgcttctagtgtaaacctcctactgacatgtatcatttattttggaataaaacattgcatctgacactttaacaatatagtaaatcacttactttatgtrtatagttactagttggcttatcactgttgaaattatttaagaaaggtaaatagtggagattaatgtgtgtgtgtgtccttgtttgtgtatgtgtgtgttc

SEQ ID NO: 38177 - DNA, 201 bp, Homo sapiens
aacactgagagagtttattaagcaagttctgagaagatagtgagttttcaacagaattttaaaagcatttatggcatcacaatggatgcctatgttttagyctatactatggaaatttttcctactgctctaagcaactgggaaatttataaagtaatatgatgttgaaatgtgcaaattacattgattgatggatgcagc

SEQ ID NO: 38178 - DNA, 201 bp, Homo sapiens
ttggctctttttcggttccactcaagttttagaaatttttttttctatttctgtgagaaatatcattggagctttcatgggaatttcattgaatctgtagwttgctttgggtagtatggtcattttaacaatattaattcttccagtctgtgagcatgaatatctttccatttgtttgtgtcctcttcaatttctttcatg

SEQ ID NO: 38179 - DNA, 201 bp, Homo sapiens
ctatggaaatttttcctactgctctaagcaactgggaaatttataaagtaatatgatgttgaaatgtgcaaattacattgattgatggatgcagccaattktaaaaataaatatacactttttttctaggacatgtatttttcaggatttatataagattacatttgtctatgcataactaattgtaataatttatgtatt

SEQ ID NO: 38180 - DNA, 201 bp, Homo sapiens
ctttttttctaggacatgtatttttcaggatttatataagattacatttgtctatgcataactaattgtaataatttatgtattagtgcacagggattacygaaaatatttcatgcatctacatctgagcatgcatttgaattggttattgaccactgaatttttggtgtaggaaaaatatgtagtgaaacaatgttacaa

SEQ ID NO: 38181 - DNA, 201 bp, Homo sapiens
tgtaggaaaaatatgtagtgaaacaatgttacaaaaagattacaattgtttggaatgattaccttcattgactttaagcagtaaaatcatttgctcaacawggttgggtgttttgtgaggctgtataaccatagtgtccttttgcctttagtttgtctgaccacaggcctgtgatagagcttccccattgtgagaactctg

SEQ ID NO: 38182 - DNA, 201 bp, Homo sapiens
cttattttccaatgggattttggtcaagattaatcaatcgattacttgagatttcaccttacatgctttcagggagaggtaagtatctaatgaagacttawtagatttttagagactattaatttagacttattaatttttagagaaattagggagatggcatatgaaaagtaatatgccattttctcagagtttacttgt

SEQ ID NO: 38183 - DNA, 201 bp, Homo sapiens
tatgaatatataaataatattatgttttcatgctagagatcatgccaatgaagatatttactttgaaaaggagaagattagaagtttaaaagcatttccayattgaagtaaatattcatttccatatcttcacagttatctttctctgagttctctgactcattgtgaaaaaaaatcccaaccttcttcacagctctacca

SEQ ID NO: 38184 - DNA, 201 bp, Homo sapiens
ttttcaagtcaggtagtgtgatgcctccagctttgttctttttgctcaggattgttttggctattttggctctttttcggttccactcaagttttagaaatttttttttctatttctgtgagaaatatcattggagctttcatgggaatttcattgaatctgtagattgctttgggtagtatggtcattttaacaatatta

SEQ ID NO: 38185 - DNA, 201 bp, Homo sapiens
tagagatcgttcatcatctttgttaaatttactcctaggtattttattaattttttgtagctacttcaaatgggattgctttcttgatttttcagctactttgttgttgttgttgtatagatatgctactgatttctgtatgttgattttgaatcctttactatactcatttatcagaactaagagttttttttaatggaa

SEQ ID NO: 38186 - DNA, 201 bp, Homo sapiens
agagatcgttcatcatctttgttaaatttactcctaggtattttattaattttttgtagctacttcaaatgggattgctttcttgatttttcagctactttgttgttgttgttgtatagatatgctactgatttctgtatgttgattttgaatcctttactatactcatttatcagaactaagagttttttttaatggaat

SEQ ID NO: 38187 - DNA, 201 bp, Homo sapiens
gagatcgttcatcatctttgttaaatttactcctaggtattttattaattttttgtagctacttcaaatgggattgctttcttgatttttcagctactttgttgttgttgttgtatagatatgctactgatttctgtatgttgattttgaatcctttactatactcatttatcagaactaagagttttttttaatggaatc

SEQ ID NO: 38188 - DNA, 201 bp, Homo sapiens
atctctaagacaacctgttattacctttcacccccaacctttgaatgtggtcttctccttacctggatgactattatgccccctgcctatttcagtccaarcaccacttgctctgagtggcaggttaggtgactttgtgcttccattgcatctaatgttttccttcacagtagctataattgtatttgttaaagtagtttc

SEQ ID NO: 38189 - DNA, 201 bp, Homo sapiens
cctatttcagtccaagcaccacttgctctgagtggcaggttaggtgactttgtgcttccattgcatctaatgttttccttcacagtagctataattgtatktgttaaagtagtttctcaataccactaaatctactggctttcaacattggctgtgcatttagaaaccactaggtagctgaaaataatatgatacctgggc

SEQ ID NO: 38190 - DNA, 201 bp, Homo sapiens
caggttctcaagtgattctaaagtatatttgaggttaagatatactgcggagtgcagtgtattataagttcccatgaatgaggatttttatttctgtctttacatatttatttactagtatgtggttaacatttggatcaactcattctcattctgtaatacccacattttaaaaaatgaatgtaaaaatgtcttttatta

SEQ ID NO: 38191 - DNA, 201 bp, Homo sapiens
aggttctcaagtgattctaaagtatatttgaggttaagatatactgcggagtgcagtgtattataagttcccatgaatgaggatttttatttctgtctttacatatttatttactagtatgtggttaacatttggatcaactcattctcattctgtaatacccacattttaaaaaatgaatgtaaaaatgtcttttattat

SEQ ID NO: 38192 - DNA, 201 bp, Homo sapiens
ggttctcaagtgattctaaagtatatttgaggttaagatatactgcggagtgcagtgtattataagttcccatgaatgaggatttttatttctgtctttacatatttatttactagtatgtggttaacatttggatcaactcattctcattctgtaatacccacattttaaaaaatgaatgtaaaaatgtcttttattatt

SEQ ID NO: 38193 - DNA, 201 bp, Homo sapiens
ataaattatgctgtatttgtattgcttcataaaatcttgaacacagtagatcctctgaaaatacttgctgattgactgtatattttatatgaatgaactamgaataaaatgataaatgacatctgattgataatattgggaatggaaataattcaatttgtacataactgaggcagataattccttataaatatattgtgg

SEQ ID NO: 38194 - DNA, 201 bp, Homo sapiens
gttctcaagtgattctaaagtatatttgaggttaagatatactgcggagtgcagtgtattataagttcccatgaatgaggatttttatttctgtctttacatatttatttactagtatgtggttaacatttggatcaactcattctcattctgtaatacccacattttaaaaaatgaatgtaaaaatgtcttttattattt

SEQ ID NO: 38195 - DNA, 201 bp, Homo sapiens
ttgttctagattccatgtttcactgtttgatgactttttactacaggagtccttcttcattttcaagacccagcactgcagttaagtgacttgtactttgwggaacccaagtggctttgtaaaatcatggcacaggttggtgtcttttatttttgtggcacgggggttatggtcaaagcatagaacagatggcgcccagag

SEQ ID NO: 38196 - DNA, 201 bp, Homo sapiens
cacgttacatgctctctcttcctccatcttgcttttaactgttagcttacttctccaattcaatccacttcgtttgaactctttatcataattctataaamcttatgaaaatacagtcaactgcattttctgtatgtttctgtgtttcaatatcttcaaaatggaatgtactgccttggtacatcacccactatgaatctg

SEQ ID NO: 38197 - DNA, 201 bp, Homo sapiens
ataaaaccttggagtaggcaatctaaagacacacaagcacatataacctcatctaatttgtcaggaagaaaattccttaggtgctcactcagatcttgacygtgattacattgtagggactgtaattatctcttttctgttgcacagccactaagacatttacaaaaaaagagcaaatccggtgtttataatgctaactct

SEQ ID NO: 38198 - DNA, 201 bp, Homo sapiens
aattgatttctaaacctactcaacttgatgtttttgtatgtatgaatgattttcactagataaaagacccaactcattacttaaaatggaaacttttatayttatttagtggatcattgtgtaaaaacaacttaagattgtttaattaattgctgtattagtataatgaaatgagattatactggctatcactttaacttt

SEQ ID NO: 38199 - DNA, 201 bp, Homo sapiens
aatttgtcaggaagaaaattccttaggtgctcactcagatcttgactgtgattacattgtagggactgtaattatctcttttctgttgcacagccactaaracatttacaaaaaaagagcaaatccggtgtttataatgctaactctttcttctaaaataaatagagacattttggtactccaaagggaaaatatcatttt

SEQ ID NO: 38200 - DNA, 201 bp, Homo sapiens
acttttaacccaattatacaagcctgaaaacctttaaaaagaaagggcctccagtttatttttttatttcatagcacattttatgggattatggatatcarttaactctttaaagttccatataagatttggagcatagatgctttactagagagcatccataaagatcaagctctcaaagatgctcatctcccaaaagag

SEQ ID NO: 38201 - DNA, 201 bp, Homo sapiens
taggatctgaagtcttagacaatcatccagagagtttcttaaaaattacagttccttcttgtagaaaaggtaaggaaatcaatttgaatgttttcaattgyaacactaaagaaatttaaacttaaaaaaaaaaaaaactttaccttaaagctttgcgacagtatgaggtttagacaaggtgttgagctctgttttgaatca

SEQ ID NO: 38202 - DNA, 201 bp, Homo sapiens
tttttatttcatagcacattttatgggattatggatatcagttaactctttaaagttccatataagatttggagcatagatgctttactagagagcatccwtaaagatcaagctctcaaagatgctcatctcccaaaagagattgggacctagatgcataaacacttaaatataaatatttgctctcttctgaacaagtat

SEQ ID NO: 38203 - DNA, 201 bp, Homo sapiens
ctctcatggaagaatggtttcctgggttgctggagattgatatttgtggtgaaggagaaactctgttgaagaaatgggcattatatagttttaatgatggygaagaacatcaaaaaatcttacttgatgacttgatgaagaaagcagaggaaggtatgttttgatacaacttacaaatgcttttaagtgatccttcaatac

SEQ ID NO: 38204 - DNA, 201 bp, Homo sapiens
catcagtaccctcatcatcatcagtacacaccgactgagaggcatgttgggtaatgaaagatgactgcctttgaagccggaagactccataggacttttgragttctaggtctgcaacatgtttttagtcctaggtcggcaagcatgatgttagtcataggaccttgagcaaattatttagcatttgtacatgtttctttc

SEQ ID NO: 38205 - DNA, 201 bp, Homo sapiens
gttgttgtgtgtatacatttaattttaatcaaattaccccagaaataatgcctaagatctgtcagtcaggacataatattattagcaaaaagttgtccaawatttgagacatgatatttaaagctaaataaactcctttatacccctcttattggcattgattgggaagtttaggttgaatttaaatgctttggaactcag

SEQ ID NO: 38206 - DNA, 201 bp, Homo sapiens
ctatctgatttaaatgcaattttgactatttttacatattcctcgttgttcattcatactgtagtgccttcttctattcccccacttaacagactgcttgrttatatcagaggtgcttatctgtgcaactgtttactggacgaggggtatgtagaaaatacattgtcctcatccttatgaaattacactcataatctagtg

SEQ ID NO: 38207 - DNA, 201 bp, Homo sapiens
gatttcaccattcagaaactcattgagacaagaacaagccaactgtaagttattttttatctgtacaagtaatttatcattatacttttgttttttccttrtaatcattaataatactgttgataattcataaggaagatcttttaaaatgcataatttattttctatcataaaattaaactttcattataaaaaattttg

SEQ ID NO: 38208 - DNA, 201 bp, Homo sapiens
cgtcatttacaaagtctgtttagttggccaggtgtagtagctcactcctgtaatcccagcactttgggaggccgaggtgggtgtatcacgaggtcaggagytgaagaccagcctgaccaagatggtgaaacctcatctctactaaaaatacaaaaaaattaactgggtgtggtggtgggcatctgtaatctcagctactcg

SEQ ID NO: 38209 - DNA, 201 bp, Homo sapiens
ataataaatagtattattctcccagatttttttttaaaaaaggattcttgcctgtcgtttgaaagattaaaaaaatttgtctctaatctttatttaggtcrtgaggaattctatagtactcatccccattttatgacgcagcgagcattgtaccttgctgtctatgacctcagcaagggacaggctgaagttgatgccatg

SEQ ID NO: 38210 - DNA, 201 bp, Homo sapiens
caaagataaggggtggggttgaataccagtgatttaaacaaattaggtgtatccttctaaaaacattttacaggtagcgactccagcatctttatattagmgtaatctggagaaggttatgcctctctcaattttccctctttccatttttatttgtagggcagcaatgcattcaggcttttggtaactctttttcccaag

SEQ ID NO: 38211 - DNA, 201 bp, Homo sapiens
ccaaagttgtttctagatttgataattatacagatgtctactcacagccaagttagtgataccagtttcaaacaagaataaaataaaatattaatataaayctctttcaagtttgctttttttcagtggtattttaatcaaatctttgcagttggttcttatttatcacattcctcagtgataagcagtataggattgtgg

SEQ ID NO: 38212 - DNA, 201 bp, Homo sapiens
gaaagacatgacaatccatactccatattaatgcagcggcgattctcaaatagagaagggctttaaaaaattagaaatctctgccgggcgcagtggctcaygcctgtaatctcaacactttgggaggccgagatgggcggatcatgaggtcaggagatcgagaccatcctggctaacacggtgaaaccccatctctactaa

SEQ ID NO: 38213 - DNA, 201 bp, Homo sapiens
accagtttcaaacaagaataaaataaaatattaatataaacctctttcaagtttgctttttttcagtggtattttaatcaaatctttgcagttggttcttrtttatcacattcctcagtgataagcagtataggattgtggataagagcataaatcatagttcagatattgctttgccatctattggttttgtgaacttgg

SEQ ID NO: 38214 - DNA, 201 bp, Homo sapiens
ttctacttctagataaagaaatgcaaccttctgtcactaacttcttttactaatagaatagtaacattccaaatatcaaagtcaaatggattctctattgktatgtatttatcatcaatttataaaaataaaggcatattttaatttggtcacatttttaccctgatttaaaaaaaaatttgtttttagagatggagtctc

SEQ ID NO: 38215 - DNA, 201 bp, Homo sapiens
  misc_feature (1)...(201): n = A,T,C or G, or insertion/deletion polymorphism (see Tables 1-2)
agtaccaaagcatgttatatattcaattcagaatggttagggaagaatatgaaataattgcaatagtctagcttgtttagttttcaaaatagtgtttttanattaagaactaatataaggttgtattacacgtagaaattttaagaagaaaacaaatagtgatgactttctatttttttttctctgtaggttttcttatgc

SEQ ID NO: 38216 - DNA, 201 bp, Homo sapiens
ataacaaatcttttttcttgcagcaatacatgctgaactgcacaacctacaaatattgacaaatcatattttactcaaactttgtctttttttgcttctatttttatatttaaatatgataaaattgtgatagcacataaaatatattttctgcataaatatatttgcgtcttcctttgataataatttgttttagaaaat

SEQ ID NO: 38217 - DNA, 201 bp, Homo sapiens
ttttatatttaaatatgataaaattgtgatagcacataaaatatattttctgcataaatatatttgcgtcttcctttgataataatttgttttagaaaataacaataatagcatatatacaaaagtttacaaaaacgacactatggggtttaattctgaaaaaaactagaatttatgtaactttagcaaataatgaatgtt

SEQ ID NO: 38218 - DNA, 201 bp, Homo sapiens
ttatatttaaatatgataaaattgtgatagcacataaaatatattttctgcataaatatatttgcgtcttcctttgataataatttgttttagaaaataacaataatagcatatatacaaaagtttacaaaaacgacactatggggtttaattctgaaaaaaactagaatttatgtaactttagcaaataatgaatgtttt

SEQ ID NO: 38219 - DNA, 201 bp, Homo sapiens
attttatatttaataaggtctataatatgacagtgacaccagtggggaaaagggactggttggtctattttgataggtcagggaagaaatccagaggagcmgacatttaagttcatcctcaaaggccaagtaggagtttgccatgctgatgtggcccaaggtagccaatctgtttgtgaaatatgtacaatgccagatgtc

SEQ ID NO: 38220 - DNA, 201 bp, Homo sapiens
tcccagacggggcggcggccgggcgggggctgccccccacctcccggatggggtggctgcccagcggagacgctcctcacttcccagacggggcggctgcygggcggaggggctcctcacttctccgacggggcggctgctgggcggaggggctcctcacttctcagacggggcagctgccaggcaaaggggctcctcact

SEQ ID NO: 38221 - DNA, 201 bp, Homo sapiens
ttattgcttttttctctgaggttatttgctctgtgggttcatcttgatctttctcttttatcttgtcagttttccaaattgagtagttttgggtgacttcktatgaagtaagtactctattgattgttaaagaaggactgtattgattattaaaggtaactagaatgggcattcttcacattcatgtaggtttgcttgttc

SEQ ID NO: 38222 - DNA, 201 bp, Homo sapiens
cttcctttctgcctctgaatagagaatttttttaaaatgcagaaaaaaatttgtaatgcttctcagcaccatcttttcagatcaagaaaattttgtcttcrgaacataaaagaataggcacataatgtgcatagttttctcatggtattacaaagaatgttctcgaatgaaaatactacattattgaaaatgagcatattg

SEQ ID NO: 38223 - DNA, 201 bp, Homo sapiens
ttttaatgtgtaggtaatttcttatataaattgattttttggccttgctgtcagcatgcatttcaaattttacaccatgtgtttggggagctatggtggawattagtacattaaaaatgtctacagagccaattagtgtataagcagggaggcaaactaagggaatggtggaagaaattaaaaaaaaaggggtgtgcataa

SEQ ID NO: 38224 - DNA, 201 bp, Homo sapiens
ttttgattttaccatatagatctatgatactcttgagaacattttagattacacactatatctgtaaaaggatacttcaaagtttcctgtcttagattcakctgacagtttttctatggattgtgagaagggctcacagtttatgttcagaagggccaacaggtctccttgataaagggttccttacttcctgaagtacca

SEQ ID NO: 38225 - DNA, 201 bp, Homo sapiens
ataatttaaaatgttgtttatgttatcatatgtaaatagcatttatctcttaattggtggtaaaattattaatgtatactttatggttctagggaggtaayggtaaaagaaaacaaggaatcaaaacacaaaatgtcttattctgggagagtgaaaaccctctgccttcagaagaacactgctctttggataggaactgga

SEQ ID NO: 38226 - DNA, 201 bp, Homo sapiens
ggtttaattctgaaaaaaactagaatttatgtaactttagcaaataatgaatgttttgaacatggtgaagaaaatatattcattgcaagtatatgtgaaaraggaacatgtgtttttctagcaccttcacctatttttcatttatagactttagagttgcacaggagttacaattagatgctcttaatgactgtaaactat

SEQ ID NO: 38227 - DNA, 201 bp, Homo sapiens
ctatgctttaacttgttatgtaattaacaaaaaaatcatatataatagagctctttgttccagtgttatctctttcattgttactttgtatttgcaatttwttttaccaaagacaaattaaaaaaatgaataccatatttaaatggaataataaaggttttttaaaaactttaaatgcttttaagcatgtttatgaatttt

SEQ ID NO: 38228 - DNA, 201 bp, Homo sapiens
agtagtcttattctaccaaagttgttgcattctctagttgaattgtatgtactttgggacccaaatagcttgcttataactgaagttatagtggaatgtcwatgggttatagtttgattttaaaataaagatcaattggaggatagcctacaaggtgctgcatgagctggcttcactgtacctctcctgcctccatcatct

SEQ ID NO: 38229 - DNA, 201 bp, Homo sapiens
gattgttgcagccagggattgccttagtaagggtggcccccatggcgggcctctctgaggatgtggtaatatttgagataagatctgaatggcaagacttyagccatgtgaagggtggagggatttctagggaaaggggtcagcacaggcaaagaccctatgatgggaagaagctgggcacagcttgggattgaatgaatg

SEQ ID NO: 38230 - DNA, 201 bp, Homo sapiens
caattggaggatagcctacaaggtgctgcatgagctggcttcactgtacctctcctgcctccatcatctaccacattcctaccagatcttgcttgtctagrtgaacatccagttcttctcaattactatgctatattttgcctcagggatttgcacatgctgtttatttctttgcttagttaacatagctttttttcatgc

SEQ ID NO: 38231 - DNA, 201 bp, Homo sapiens
cctatgaaaacaagcagagctaacttaactccttctcatcagttctaaccaactgacatgggcattaaaaaaaagattttatctactaagcaaatatgatsacagtctgaagctttgttcttggaaaatcccctctcagggtgttcagcctttcttcttcagcttgcagaattctccatgtttcagtttcctgataaatca

SEQ ID NO: 38232 - DNA, 201 bp, Homo sapiens
acagagccaaaggaaaaatagaacttaaaaatttaattctgacagtacagttgacccttgaaaaacataaaggttggggtgctgaccccttgtgcagtcamaaatttgcatataacttttgacctccccaaaaaactgaaccactgatagcccactgttgactggaagctttactgataacataaacacttgattaacaca

SEQ ID NO: 38233 - DNA, 201 bp, Homo sapiens
aaacagggcaatgatgtgaatgatggtaacatattatgtgtttcataaatttgtagaaaatattacatatggtataatcaggaattttaattggtagtttrtagtgtaaagaacttagacataaattttcaaaattacaagtgatatgaagtgttaaatatttatattttcagctgaagtagaggtgtcaatcactagctc

SEQ ID NO: 38234 - DNA, 201 bp, Homo sapiens
ttaatgcataaaattatgatgacttctgtaataattggagacattccagatgaaactcttgatgtcccctctgccattgctccccaaccccagtcaccctrttacacctgagagtcaccttacattcctttcttcctctctcatttcacagctaatccttcagcaaatcttttcagctctgccaccaaaatatatcttaat

SEQ ID NO: 38235 - DNA, 201 bp, Homo sapiens
ttaatttattaaatgttgatactctatttgaaatttaatagtttctataatgtattataaaacttttccaagtatagttttttataaataataatttagtwcattagttatagctgtgtttatatttacatttatctaagtcaactaaaaatacatgagccaaactgaaataaaataagaatgttttatgatggatctttg

SEQ ID NO: 38236 - DNA, 201 bp, Homo sapiens
cttttaactgttagcttacttctccaattcaatccacttcgtttgaactctttatcataattctataaaacttatgaaaatacagtcaactgcattttctrtatgtttctgtgtttcaatatcttcaaaatggaatgtactgccttggtacatcacccactatgaatctgttatttctgttatatcccacagttgccaggc

SEQ ID NO: 38237 - DNA, 201 bp, Homo sapiens
aaaagctattttgctagtctattaaaagctattagaactgcacttcttaagattaaattctataattgaacattttaactaaccaagatattatctctttsccactgacattatttcaaattaagcttaactatttctttttagcctttggaaagtattctgaaagagtctgtgttctataaatatacttaaagaggcatg

SEQ ID NO: 38238 - DNA, 201 bp, Homo sapiens
gttttctctacaatgaagattttttttcttaatatcagcagcttcatttttatttaattgtagttgtatgcttaattccttaaacagatgatcattttttktgtttagtgcataaatattcttaaatcttgtgatatattaataaaaatcacctgaaaaaggtagcagttttaggctttttaaaaaatccgcaattaatat

SEQ ID NO: 38239 - DNA, 201 bp, Homo sapiens
taattgaagggtcacctagaaaatagaattgtgaattcagttccaaggtatttgtgtcttaaactatgaacaactttacttttttttcaggccagtttaayatatagttttaacagaaaacttacatattttgtttttgtaaaggaagccttaaaaatgtcatgctggtattgggctacaaccggaaaaatactgaaggta

SEQ ID NO: 38240 - DNA, 201 bp, Homo sapiens
tctttggaaacttccactataaatagtggtagcacgctatagatccactaggaaaatcaagcacaaactctttaaaaaataagtgtatcttagtaaaatarattagaataactagataataatggctaacatacatgaggttaatatgtgcttttcaaagattagctcatgtaattctcacagcaacctttccaaatggta

SEQ ID NO: 38241 - DNA, 201 bp, Homo sapiens
tgtgggttcatcttgatctttctcttttatcttgtcagttttccaaattgagtagttttgggtgacttcgtatgaagtaagtactctattgattgttaaaraaggactgtattgattattaaaggtaactagaatgggcattcttcacattcatgtaggtttgcttgttcaagttaccactttctgaacaagaaggttaga

SEQ ID NO: 38242 - DNA, 201 bp, Homo sapiens
ttattaaaggtaactagaatgggcattcttcacattcatgtaggtttgcttgttcaagttaccactttctgaacaagaaggttagaccatagacttttaarggctgcatactgcaaagggatactctgttctttaggttacatgggcagggatcactgctgagaccatacctgccaaaggaaggcaggctttgctctctag

SEQ ID NO: 38243 - DNA, 201 bp, Homo sapiens
cctttaaccttggtatattggtttaattccttcagaatggcttttcccattgtgataaactggttccaggcttcacgagtacttattccaagtacagaagraaagagggtacctcttttgagtacttgtatttcaaaggaatcaaatggcctacataataacccattaaataaatagatgtctctcagccccagtgagtca

SEQ ID NO: 38244 - DNA, 201 bp, Homo sapiens
gtttaaaaatactccattataatattggaactttagaccataggatgcacagcttctagtcccagctctgtcactagctatgctgaaatttcttcacctgyaaaatgaggaagttggactagattttttctaaagccccttgatatttgttctagattccatgtttcactgtttgatgactttttactacaggagtccttc

SEQ ID NO: 38245 - DNA, 201 bp, Homo sapiens
tctataatgtattataaaacttttccaagtatagttttttataaataataatttagtacattagttatagctgtgtttatatttacatttatctaagtcarctaaaaatacatgagccaaactgaaataaaataagaatgttttatgatggatctttgaaacatgatttcatttttttctttttctagagatacaatcttg

SEQ ID NO: 38246 - DNA, 201 bp, Homo sapiens
gtgaaagtggaaggttgtccaaaacaccctaagggcattatttcgcgtagagatgtggaaaaatttctttcaaaaaaaaggaaatttccaaagaactacaygtcacagtattttaagctcctagaaaaattccagattgctttgccaataggagaagaatatttgctggttccaagcaggtaaagaaaaccttaaaaaatt

SEQ ID NO: 38247 - DNA, 201 bp, Homo sapiens; identical to SEQ ID NO: 5772

SEQ ID NO: 38248 - DNA, 201 bp, Homo sapiens; identical to SEQ ID NO: 5775

SEQ ID NO: 38249 - DNA, 201 bp, Homo sapiens
cttttttattcttaatctctcagcttttctcttcagcaggggaagagtacctaatggcctttcagtaatcccttggtaaatttttctttcaagcccattasttactgtgaaggtcaacttcattagtgtatttatcttatttttttcagcccaaaataggtatattgaaatgaatgggcctaatgtcaaatgtcccgacta

SEQ ID NO: 38250 - DNA, 201 bp, Homo sapiens
tgaatgggcctaatgtcaaatgtcccgactacatcctggaagagagagaatcttcagctgtattagttgatgcagttaaataatatgtactctccaggccmtcatacaattgaaagttcagggtatcgttgctgctctgcttctaatccttccagaagtgattggtgctaggtgatggagtaactattaattgatataatg

SEQ ID NO: 38251 - DNA, 201 bp, Homo sapiens
actattaattgatataatgtgagccaaaaccaacagtcacgaataagcaaaggatttaaatttaactccattaagtcttgtgagaaattattttcaacatrggttataacatacctgtgacatcacatgaaatgctgtagtcaatttgacatcatggggcagagaagacagagttggaaatcagaattttatagacatcta

SEQ ID NO: 38252 - DNA, 201 bp, Homo sapiens
aggtttatggtaaattatatactcaaacagaagaagagactaatagcaagcaaaagtcttatattttcatttgttttcatccaaaaagtagaaaatatttkccaaacattgggaaacattttagtcagaaaaataaatatcaatgataaatagaatagagaaaaattttaaagctgagctaaacctctatgtggttttagg

SEQ ID NO: 38253 - DNA, 201 bp, Homo sapiens
aatgtttgatatcaagttatatgttttaaagttagatttgtagattctttagatactctagaggtcataaaaagtaacagcaaaaactttagtctaggtaytgttggcacttgtgaggcaaatcaaattcaggtccacaaattctttttcataattctgaaacccaaagaactctgaaaatcccaagattttttaaaaaat

SEQ ID NO: 38254 - DNA, 201 bp, Homo sapiens
tgaccctactgagggtttctgtacacatcactgtctaccctgtggaatcttacctccctttcttagttcccaatcctgaaaagcagttatggggccagtgmtctgtacagacatgttgtctcagacatcagtttgagcaggaagtaaatcatttaggggttggcatttgtttggagtgtggggaacactctatctttaggg

SEQ ID NO: 38255 - DNA, 201 bp, Homo sapiens
tctttttggtcaaagttcctgtcttgtaagaattaaagtataacatagtttgttgataggatagctctctgaaaattgactttgctcaccatttgtatgtrctacagatcaaaatagttttgaaagccaaagaagatatcataaaagttaaaattattttaatgcaaatgtttaaattgttaaattctcaaggctgggcat

SEQ ID NO: 38256 - DNA, 201 bp, Homo sapiens
atcttgctgattgcaactcaattaaatcaccgtgcctggcacagaagaaaatatgctacaggatatctcactagggaaaaggttctagttcgtttcctgcscactcaacttttgtacttagataagcaaatggccccagattccaatgcctggttttatttttgctccaaatacatatatactcttttgttttggatagtt

SEQ ID NO: 38257 - DNA, 201 bp, Homo sapiens
tgtgaaatagagattcaactaaatgattactgaaagtttttttttcagtttaaaataatgtgtaacttaaagatttttttctttttggtcaaagttcctgycttgtaagaattaaagtataacatagtttgttgataggatagctctctgaaaattgactttgctcaccatttgtatgtactacagatcaaaatagttttg

SEQ ID NO: 38258 - DNA, 201 bp, Homo sapiens
aagtcaaaacaaaacaacagagccatgaatagcaaatattgtcaatgagaggtttggaaaaacagtcttaaaggatgaaattccatagacctgatatattyccacctggaaaaagtgggcatgggacagtgattttctcttgaaagatctgctcatttttgtcatgggacatgaaggtggactggaccactcagtttcttc

SEQ ID NO: 38259 - DNA, 201 bp, Homo sapiens
ctgttgttgaagccttgtctgcttaattggacagtggatctctcgggtccctgtgggctgtgcgcttgtacttgagctctgcttcttcactctgtggtctrggccagctagcagccagctgagttcaccttggttcagactcatggcctttcattttcagtatctgacttcctggttttgctgaaaacctgtctaaaatgt

SEQ ID NO: 38260 - DNA, 201 bp, Homo sapiens
gattcaaaaactgagctttctgttctaatatccagaaacctggtagactgtatggaattattccaaagcccttcatttctcctaattttacccttgcctcyagaatggagaagaacatggagggatatgttaggaacaatttggtgctaggtactttgatcggttgctgacaaatatgctaaaagtggtcaatcctagtaa

SEQ ID NO: 38261 - DNA, 201 bp, Homo sapiens
aaatatttgacaatagtcatggttacacaatgcataaattatggctaaattattatcaggaaggaaaaatctttacttattatttcaaaagctattttgcyagtctattaaaagctattagaactgcacttcttaagattaaattctataattgaacattttaactaaccaagatattatctctttgccactgacattatt

SEQ ID NO: 38262 - DNA, 201 bp, Homo sapiens
gtgaaggtcaacttcattagtgtatttatcttatttttttcagcccaaaataggtatattgaaatgaatgggcctaatgtcaaatgtcccgactacatccyggaagagagagaatcttcagctgtattagttgatgcagttaaataatatgtactctccaggccctcatacaattgaaagttcagggtatcgttgctgctc

SEQ ID NO: 38263 - DNA, 201 bp, Homo sapiens
ttcctgatcccttttaatctccaatattgaatggtggtaacataaatatggagacagatcatgtcagaaacccagggcctaatcttttcttttctgcctaytcttctcacaggctgcttagtactttgtaagctttttttttttttctggctgtaacctagattttctctttatcattactctatttattattgttagagc

SEQ ID NO: 38264 - DNA, 201 bp, Homo sapiens
gttgtaagcctaccctatggtaaatggatatggtaacacagcataatttcctcaaaaaattacttttgtgatatacttttaaaggattatatgaatatatrcataattatagatgaatgtgatgctgtgtgtcattgtatcaccaaatctctgtccaatctgttaacagactcttaaataaaccatttttctcaagttgtt

SEQ ID NO: 38265 - DNA, 201 bp, Homo sapiens
caagctgctgatggaatctgtgagcctttcttgtttcttatcacgttttttggcagagcacatttcttccttcccaccaacaggttttgcccttttttttyccattaagattcctcctgagattggctgtcttgaaaatctgacatctctggatgtcagttacaacttggaactaagatcctttcccaatgaaatggggaa

SEQ ID NO: 38266 - DNA, 201 bp, Homo sapiens
ttttaggaattatgttttaaatgtttaaagttatcttctcgtaagccaaatttttataaaatgtaaataaatcagttatcagagagaacactttttttttwaaatacttggcagaaaaaagaaatcttcactgggtactacagggagtgtggtgtaaactgtactgaaaaatacccttgatagttccatatgacaaacata

SEQ ID NO: 38267 - DNA, 201 bp, Homo sapiens
gtggatctctcgggtccctgtgggctgtgcgcttgtacttgagctctgcttcttcactctgtggtctaggccagctagcagccagctgagttcaccttggwtcagactcatggcctttcattttcagtatctgacttcctggttttgctgaaaacctgtctaaaatgtaatatccatctgattcttcataccaagccacac

SEQ ID NO: 38268 - DNA, 201 bp, Homo sapiens
cactttgggaggcccaggcaggcagatcacttgaggccaggagctggagaccagcctggccaacatggtgaaaccctgtctctactaaaaatacaaaaagyagctgggcatggtggcatgtgcgtgtagtcccagctaccaaggaggctgaggcacgagaatagcttgaacctgggaggttgcagtgagccgagattgcgc

SEQ ID NO: 38269 - DNA, 201 bp, Homo sapiens
taataattagaatttagccatagagagtgttacacaaacctataatagctaaattacgtctagctttagaatgtgtttaactgttctaactactctacagyggttcatctctttaatcttcctaataatgccctacgatagccactgttattatctccacttcataagagatgaagtaacttgcccagagtcatagttctt

SEQ ID NO: 38270 - DNA, 201 bp, Homo sapiens
atctgtgagcctttcttgtttcttatcacgttttttggcagagcacatttcttccttcccaccaacaggttttgcccttttttttcccattaagattcctsctgagattggctgtcttgaaaatctgacatctctggatgtcagttacaacttggaactaagatcctttcccaatgaaatggggaaattaagcaaaatatg

SEQ ID NO: 38271 - DNA, 201 bp, Homo sapiens
cctagattttctctttatcattactctatttattattgttagagcacttctgattatctcagccctaaactctgcctccaattttaaataacaataactcycactcctgctaatactgctactactactaccatcaccaaactttttcttccccaaagcagttctgtttgggaaggaaacagttccctctcatacaatttc

SEQ ID NO: 38272 - DNA, 201 bp, Homo sapiens
cctagtaaaaacccagaatagttctctaaacatggtctgttgtttttctcttattagtatgctaaataataaatagtattattctcccagatttttttttwaaaaaggattcttgcctgtcgtttgaaagattaaaaaaatttgtctctaatctttatttaggtcgtgaggaattctatagtactcatccccattttatga

SEQ ID NO: 38273 - DNA, 201 bp, Homo sapiens
cagagctcctggtccagcactgtgatagctggggacgcagagacagaaacaatgcaattattgacagggaccatggtgctgtgtctgtccacattttgaarataattatggtttggatattttcacctttaaataacttggagagtttcaacattaactcagtcagatggatacatttatatcatatcctgctgggagtga

SEQ ID NO: 38274 - DNA, 201 bp, Homo sapiens
ttcctattctcttgttggacatgtaattagaaactaatatgacttaaagaaaaacaaatacacaaaatttattcatccaattaatctcttaatccaggtgttttttttttctgagactatacccatacttcaataactttgttgttactgagaatattttgagtttccctttttgtcattgttgtcagagaatgtatcata

SEQ ID NO: 38275 - DNA, 201 bp, Homo sapiens
tggtgctgtgtctgtccacattttgaagataattatggtttggatattttcacctttaaataacttggagagtttcaacattaactcagtcagatggatayatttatatcatatcctgctgggagtgacagttaattctgggtcctatggcaattgcacttttgactgagatgaatgctgactgatggctttaacatttaa

SEQ ID NO: 38276 - DNA, 201 bp, Homo sapiens
taatctattagagatcattttttgtcctctcatttatttttcatatttgcctttgatcttagctcttctctaatctttttctgtctcaaccttattaacakgtgtctgtgcagacacttttaagttttgttttttggctcagcctgtcagttaactgataatcatgctgaaaggagaagcaggacaaaacagagttcaatg

SEQ ID NO: 38277 - DNA, 201 bp, Homo sapiens
tggatattttcacctttaaataacttggagagtttcaacattaactcagtcagatggatacatttatatcatatcctgctgggagtgacagttaattctgkgtcctatggcaattgcacttttgactgagatgaatgctgactgatggctttaacatttaactaatgcgatagtatttaacacacccatataaatactata

SEQ ID NO: 38278 - DNA, 201 bp, Homo sapiens
ggaacatgaaaagtggaggttagtgaaattatctctaattctctgggttaagagatacatgaaaacagtctcttgagtaaccatttgcaggtaaatatggaagtaatggttatggttgtctctttaagtttttagtcacaagtagaaaaagaccaagttaatttttttctgtgtgtgctgaatttctatttgtagtaagtg

SEQ ID NO: 38279 - DNA, 201 bp, Homo sapiens
tcatatcctgctgggagtgacagttaattctgggtcctatggcaattgcacttttgactgagatgaatgctgactgatggctttaacatttaactaatgcratagtatttaacacacccatataaatactatagtcttcgggtaaataaaatgttaccggctggacatacatgaatatctgatggagattatggaacatac

SEQ ID NO: 38280 - DNA, 201 bp, Homo sapiens
cttaagtgaaatgatctgagctttaaatgcttacgattttgaaaactttggatggccttggttatagctatttttttcttatatttcacatggaaaatgatttttttctccaaatgataatccattaccaatgagtttaattagttataataatccatctctgtagctttgacataaaagaccatttgagcaaaacatact

SEQ ID NO: 38281 - DNA, 201 bp, Homo sapiens
ccactgaaacaaaaggtgggagagttttaagcgcaggggtgagctaatggaaacgtactggagcaccttgttggaaggaagtgggagcagttgtcaatgtsattaggccatctgtgtttgctaattgtcccttattgaaggtaggctcctactctcccacagacactggggaattccttccttccttccatccctccctcc

SEQ ID NO: 38282 - DNA, 201 bp, Homo sapiens
ctgagatgaatgctgactgatggctttaacatttaactaatgcgatagtatttaacacacccatataaatactatagtcttcgggtaaataaaatgttacyggctggacatacatgaatatctgatggagattatggaacatactctactcatacttctctgaaagtaaaaaataaaagatatgtttcagtacacaatgtg

SEQ ID NO: 38283 - DNA, 201 bp, Homo sapiens
tattggattgatctttccattgtagctagggaaatactgatgttcattgtttcagtgaagttcaatgatttcctatccgaattaactcccttaatttaacaattttttttttttttttgagagtgaatgcccctctgggcttctaggccacatggttgctagagaaattaggtactgtgttgcacttgaaaacactaaaat

SEQ ID NO: 38284 - DNA, 201 bp, Homo sapiens
tgactcgaatctttcagattttgacagtgaaagtggaaggttgtccaaaacaccctaagggcattatttcgcgtagagatgtggaaaaatttctttcaaaraaaaggaaatttccaaagaactacatgtcacagtattttaagctcctagaaaaattccagattgctttgccaataggagaagaatatttgctggttccaa

SEQ ID NO: 38285 - DNA, 201 bp, Homo sapiens
ggaagaaaattccttaggtgctcactcagatcttgactgtgattacattgtagggactgtaattatctcttttctgttgcacagccactaagacatttacaaaaaaagagcaaatccggtgtttataatgctaactctttcttctaaaataaatagagacattttggtactccaaagggaaaatatcattttggggattaa

SEQ ID NO: 38286 - DNA, 201 bp, Homo sapiens
taatgaccacatttctacttaagtttaattatgcaatcctagtttgtcttttcgttgtggagtagaaagttttgtgttatttctcctgttgagaaacaaarcactatatctgagaatccttataatcgtgatacatagtgtgttgtaaaactttttgtaagactcacttacactcctctttttactttagaaccttgctgt

SEQ ID NO: 38287 - DNA, 201 bp, Homo sapiens
ccaacatcataacagtggtggtagacactgctctctatattgctaagcaaaatagccctgttgtggaagtgtgggataagaaaactgaaaaactctgtggrctaatagactgcgtgcactttttaaggtaaattctgtggtttttaattttattcccaaaagaattatctttgcacttcatgtgtcacagaggaaggattt

SEQ ID NO: 38288 - DNA, 201 bp, Homo sapiens
gaggactgtctgagcacaatccttctggattgtgacaccctcaagggagcagagatacaaagatggctttgtatactaaatgactggccctcatagatacytagtacatatttgtcaaataaatgaatgcattctatttttggaataattctattcagaatcagataaagtttactttaagctatgaagaaagaagtctct

SEQ ID NO: 38289 - DNA, 201 bp, Homo sapiens
ttaaaaggttttattgatgatagatggtaatgtcatgtaaaaatgacatattatttatttgtagactttcctattctcttgttggacatgtaattagaaastaatatgacttaaagaaaaacaaatacacaaaatttattcatccaattaatctcttaatccaggtgttttttttttctgagactatacccatacttcaat

SEQ ID NO: 38290 - DNA, 201 bp, Homo sapiens
aggagcagaaccttccagagcatgagcgatgtgctgggcttgtgcttagctctatccatgagttaagtatctcaatccttaggaccctctgacatatgtgytattattatttctagtctatagatacagagactaaagtttagagaatataaaaaaacatttacaaggtcctatgggacaaaaactgtaggacaaaatgca

SEQ ID NO: 38291 - DNA, 201 bp, Homo sapiens
gcccattagcagagcaggcatctctgtgggccttgagacgtagtcccgtaaaactcatcccgtttctacttgatttgctttctttgagaactcttgtttayttttatatggaggtttcctgccttggattaaaacataaacctcaatctgaagttcaatttcatcttaatttatgaacgactaagagagggaacatgaaaa

SEQ ID NO: 38292 - DNA, 201 bp, Homo sapiens
gtatggtagtgaatttgatcaatggggaaattacagatcttttaaacgactgaattgtgtgcataattgttattgcatcagcaaagattgttcatttttarcctattttcattggtttgcatatattaaagggaattgtggaaggtcacagagatatttgttgtttttctgaatacagatctagctgagacatttataaaa

SEQ ID NO: 38293 - DNA, 201 bp, Homo sapiens
taaaaaatgaatgtaaaaatgtcttttattatttttatttttcaaatttaattttagattccaggaatacatgtgcaggtttgttacaaaagtatagtgcrtgatgctgaggtttggaatacaactgaactcacaacccagaaagtgggcatagtgcttgataggtagtttttcatctttgctccccttcctgtaatttcc

SEQ ID NO: 38294 - DNA, 201 bp, Homo sapiens
attaagagttgcatttctatttaaaattatattttaaaaaacgtttggaagatacttttattgtagaaactatcctcttagggccattctttaaaaaaatmttattttatatatttctcattttgttgatagtgattagattctaagagcaacagaacaatgatcatcctctcctatcagaatcactgatgtttagatgat

SEQ ID NO: 38295 - DNA, 201 bp, Homo sapiens
ctttaaaaaaatcttattttatatatttctcattttgttgatagtgattagattctaagagcaacagaacaatgatcatcctctcctatcagaatcactgrtgtttagatgatttctcattttcccaagttcaaggttccatgaaaaacatagcttgagtgggattttatgtctctgcgtttcactgttgatatatatgtc

SEQ ID NO: 38296 - DNA, 201 bp, Homo sapiens
tacagaagtggagggagtaaatgctctcagtcccacaagagaagcagattactgcagctgaacactcagtttgggtcttacttgcttttttcctttttacytaaggcaaaaatgggaaatacatggtattgaatatattttactttttgagcaaagaaaataaagaaaatgtttgttttaatcatagtctagcctcccagc

SEQ ID NO: 38297 - DNA, 201 bp, Homo sapiens
tatgtcctcccaatataacattttacaaataaccaagcacaaaatttaatattttaccttgaatatttaaaatataataatatccaaaagctcttgtaatktgtactgatatcttatactagcgtgtctgtttcacattaagtttaatgtcttaggatataaaaaatcttttttatggttagtgatttatcttgttttttt

SEQ ID NO: 38298 - DNA, 201 bp, Homo sapiens
ctgatatcttatactagcgtgtctgtttcacattaagtttaatgtcttaggatataaaaaatcttttttatggttagtgatttatcttgtttttttttccrtggaatttctggatagcgagataaatatttccatactattttatttgatatttccaaatttgcctctgaatcaacaattttcctattttaatttcattgt

SEQ ID NO: 38299 - DNA, 201 bp, Homo sapiens
tgacatctgagcaggaccactaaccattaaaaaataatcccatgtaaatggtgaaaccctgtctctactaaaaatacaaaaattagctgggtgtggtggcrtgtgactataatcccagctactcgggaggctgaggcagaagaatcgcttgaaccagggagtcagaggttgcagtgagtggagatcaggccacagcactcc

SEQ ID NO: 38300 - DNA, 201 bp, Homo sapiens
tttctacttatgtgtgaaatatgctctgtaatgcatgtcagtgtctcaaatatgcttaaatatgatcattttatgtagtttaaaaatactccattataatwttggaactttagaccataggatgcacagcttctagtcccagctctgtcactagctatgctgaaatttcttcacctgcaaaatgaggaagttggactagat

SEQ ID NO: 38301 - DNA, 201 bp, Homo sapiens
cagctgtggctctatctctttacttctcctcagatcaatgaatctttgtagggcctcttcaaggataaattctcattcattcattctttgaaaaaaaaaawatatatatatatatatatatgaaacccattgtgtgccaggcttaaacataccagttatctaactaccaaattaagaaaaaaattaaataaatgaattaat

SEQ ID NO: 38302 - DNA, 201 bp, Homo sapiens
tgtatgtggaaacgtcatttacaaagtctgtttagttggccaggtgtagtagctcactcctgtaatcccagcactttgggaggccgaggtgggtgtatcaygaggtcaggagttgaagaccagcctgaccaagatggtgaaacctcatctctactaaaaatacaaaaaaattaactgggtgtggtggtgggcatctgtaat

SEQ ID NO: 38303 - DNA, 201 bp, Homo sapiens
aggctgaggcaggagaatcgcttgaacccaggaggcagaggttgcagtaagccaagatcacacccctgcactccagcctgggcaagagagtgagactccawctcaaaaaaaaaaaaaaaaaaaaaaagaaagaaagagtagtacaatatacattcatactcatatacccgacgcataaattcattgattatttactttttg

SEQ ID NO: 38304 - DNA, 201 bp, Homo sapiens
attagaagtttaaaagcatttccatattgaagtaaatattcatttccatatcttcacagttatctttctctgagttctctgactcattgtgaaaaaaaatyccaaccttcttcacagctctaccatcttcggattgttgcctagaggggtaaaaactattgtaaaaggatgtgtgcactggatgagaatttagaattagac

SEQ ID NO: 38305 - DNA, 201 bp, Homo sapiens
gaatgtttatccttattatcattcaaggtaattttattgaagattgaagatatttataataaagattgaaggattttattgtcctgtgtggtcaaccttgkggggtgagatgttatgagacaggacaattaattgacttgatcaaggtaccttgttataaaaataacacagcctggtttagaacatctcttcctgactctc

SEQ ID NO: 38306 - DNA, 201 bp, Homo sapiens
accacatttctacttaagtttaattatgcaatcctagtttgtcttttcgttgtggagtagaaagttttgtgttatttctcctgttgagaaacaaaacactrtatctgagaatccttataatcgtgatacatagtgtgttgtaaaactttttgtaagactcacttacactcctctttttactttagaaccttgctgttcaaa

SEQ ID NO: 38307 - DNA, 201 bp, Homo sapiens
taaatattcttaaatcttgtgatatattaataaaaatcacctgaaaaaggtagcagttttaggctttttaaaaaatccgcaattaatattggtgtagttartattatatttagaaacatagagaaggaaattgctgttagaactccacatttggtgatttttaattttcataaagaattactgtgtactcattatcctgga

SEQ ID NO: 38308 - DNA, 201 bp, Homo sapiens
atgtctacagagccaattagtgtataagcagggaggcaaactaagggaatggtggaagaaattaaaaaaaaaggggtgtgcataatgtgcttcttctcttaaaaaaaaaaaaagaaaaagacaacaacaaaaagaaagaaaaatgacatttgacggtcattctaccagtagtcatggggcagatctatattatactgtact

SEQ ID NO: 38309 - DNA, 201 bp, Homo sapiens
tgcactccagcctaagcaacaaagtgagactccatcttaaaaaaaaaaattcagttctgtgttctgcatcaaccagaataagctacgcctcttataaaaarcaaatgtgcacaaaccatctgtgaggacataaggattaaatgcttgcttactttgagtattaaaataaaaagtagaagctttattatatgagtaaaagtg

SEQ ID NO: 38310 - DNA, 201 bp, Homo sapiens
ggaagtcattagagagttttcaggaggggatgatatgtatttttttaaaattgagcattatcctcggtaaacttttgtagtcgttaaaccagagattatargcaggttttacctcatatgccagttgcagctgattagtagtggctatagagaatcctgggctgagaaggatactgtggctaaccagaattcagtagatga

SEQ ID NO: 38311 - DNA, 201 bp, Homo sapiens
ctcactagaaccctacagcacaggattgcactccacgtagctgatggtttgaggtaagtaggtcatgttgttttctattcagtgcatgacaagtgtgatcyagacttgctctcaggttctgagaacacttcccagtaacactgtgccccagtaacaatttataaacaatttggatgaaaactaccatttccctgatcaaat

SEQ ID NO: 38312 - DNA, 201 bp, Homo sapiens
ttaaatcgttatttgggtctctttttattccacaaaaaaaaaatcttttccacatctcttagtggagatcaagttaacaaaattagctttaattttgtgayaagtaaatttacataaatataggattatggagataatatttttctttgcaatgtctggaccttttataaacattgagaggaaatataaccattcttactt

SEQ ID NO: 38313 - DNA, 201 bp, Homo sapiens
atgcattataactactttgggaaagaaacagtcaacatatgttactgtatgtcattctgtagattacatgtgtggtttctcatgtctctcagaataaaagmtaatgtctttacaagacctgcgatgctgtgatctgtctggctcctcggttatcatttttaaaaaaagatatactttgtacaaatttttttaattgacaag

SEQ ID NO: 38314 - DNA, 201 bp, Homo sapiens
cattgcattaaaaagttcagaaagttttgcgtttagcatgatcaaaaacttctttttaaaaattatgaggatttatttatgattttctttcttcatctgtygagcatattaaactgcttaacagcatcaacctgaaatggatcttaatgtgcaggggatttaactctttttattgtaaagttgtggataaaatatttaata

SEQ ID NO: 38315 - DNA, 201 bp, Homo sapiens
agtcccattcctcacccagcctctggagtgatttttctaacatgaaagttggatcaggacttgttcctgttattacccctcccctgccttatttcttgggkacagtgctcagccactcccatccctgaggttccttgcagataccagaggctttatatctgctgttgatttcactcaggaatgtctgactcccagatgtgc

SEQ ID NO: 38316 - DNA, 201 bp, Homo sapiens
aaatataaccattcttacttatttagtatgctagcatgatgttttttaatgttttagatccagttaaagaatatggttgtgccccatggcctatggttgaraaattaattaaacagtgtttgaaagaaaatcctcaagaaaggcctacttctgcccaggtattcttaaagttttgttaatattttgtacagaacatcattt

SEQ ID NO: 38317 - DNA, 201 bp, Homo sapiens
gcctggggcatagaagccaagcagtgtatgcaactttccttctcttctttctcttctgaaatgctatgaatatgccttttaggtagtatccagaaatgttycttcctgaaagggtccagaaactactgaaaactgtacagattatgaaatgaaacagggtgcagggatttggatttgagttgatgtttctgcttttgaaca

SEQ ID NO: 38318 - DNA, 201 bp, Homo sapiens
gcatattttaaaataatttgcctaatttgttcttagcataatgccagaaaagctttctggattttgtatcacaaaaggctagtagatttcagtagctatcaatcttctaccagcactaagtatattttaaaaactcagcattaaggtttatttttccaagtatgtttcagcacaggaaataaaatcatgctcctttggagt

SEQ ID NO: 38319 - DNA, 201 bp, Homo sapiens
cttagttcccaatcctgaaaagcagttatggggccagtgctctgtacagacatgttgtctcagacatcagtttgagcaggaagtaaatcatttaggggttggcatttgtttggagtgtggggaacactctatctttagggaaactttatatagttagttatttgtaagtaaaattacaggtggctatacatcatcttgctg

SEQ ID NO: 38320 - DNA, 201 bp, Homo sapiens
aaatattttaaggtgttcgtaatttttctttatgtttaaaaggggaaaatggcaaatattttactttctgtttatgtttggatgatgtggatttttgtttyctataatttgactggcttaactgcaaagatatcccttgctttaaaatttgaagacactgcaactaaattttatttcagcattttatattttataactcta

SEQ ID NO: 38321 - DNA, 201 bp, Homo sapiens
aaatatgcttaaatatgatcattttatgtagtttaaaaatactccattataatattggaactttagaccataggatgcacagcttctagtcccagctctgycactagctatgctgaaatttcttcacctgcaaaatgaggaagttggactagattttttctaaagccccttgatatttgttctagattccatgtttcactg

SEQ ID NO: 38322 - DNA, 201 bp, Homo sapiens
tgtaaaatcatggcacaggttggtgtcttttatttttgtggcacgggggttatggtcaaagcatagaacagatggcgcccagagcattgagcattttagartttgggtttagttaaggcagaaacttttgtgaatttggaaaactgtggaacatttcacatagaagactacttgaagagcttcatggaagaaggaaagatg

SEQ ID NO: 38323 - DNA, 201 bp, Homo sapiens
gcaggtttgttacaaaagtatagtgcgtgatgctgaggtttggaatacaactgaactcacaacccagaaagtgggcatagtgcttgataggtagtttttcrtctttgctccccttcctgtaatttccacttttaacccaattatacaagcctgaaaacctttaaaaagaaagggcctccagtttatttttttatttcatag

SEQ ID NO: 38324 - DNA, 201 bp, Homo sapiens; identical to SEQ ID NO: 5764

SEQ ID NO: 38325 - DNA, 201 bp, Homo sapiens
atttggaaaactgtggaacatttcacatagaagactacttgaagagcttcatggaagaaggaaagatgtcttgagttcacttccatgacttggttttcaarccacatacagatgtttgtatcactctgccccatgctgctttactagatcctgatgatgtcattggtttggttactgaattagtcaattgaatgatggctt

SEQ ID NO: 38326 - DNA, 201 bp, Homo sapiens; identical to SEQ ID NO: 5766

SEQ ID NO: 38327 - DNA, 201 bp, Homo sapiens
ctgtggaacatttcacatagaagactacttgaagagcttcatggaagaaggaaagatgtcttgagttcacttccatgacttggttttcaagccacatacaratgtttgtatcactctgccccatgctgctttactagatcctgatgatgtcattggtttggttactgaattagtcaattgaatgatggctttgtggaaatc

SEQ ID NO: 38328 - DNA, 201 bp, Homo sapiens
ttcaagccacatacagatgtttgtatcactctgccccatgctgctttactagatcctgatgatgtcattggtttggttactgaattagtcaattgaatgawggctttgtggaaatccttggggtaaacacatataagaaaattaggttgctgagcctgtgaaacctctatctagataacatggaggtgagttttgacttaa

SEQ ID NO: 38329 - DNA, 201 bp, Homo sapiens
agtcaattgaatgatggctttgtggaaatccttggggtaaacacatataagaaaattaggttgctgagcctgtgaaacctctatctagataacatggaggkgagttttgacttaagtgaaatgatctgagctttaaatgcttacgattttgaaaactttggatggccttggttatagctatttttttcttatatttcacat

SEQ ID NO: 38330 - DNA, 201 bp, Homo sapiens
tgtcatttataaccaacaggctgatgtttattcatttggtttactactctatgacattttgacaactggaggtagaatagtagagggtttgaagtttccaratgagtttgatgaattagaaatacaaggaaaattacctggtaagttctgttttctctacaatgaagattttttttcttaatatcagcagcttcattttta

SEQ ID NO: 38331 - DNA, 201 bp, Homo sapiens
ctgagctttaaatgcttacgattttgaaaactttggatggccttggttatagctatttttttcttatatttcacatggaaaatgatttttttctccaaatkataatccattaccaatgagtttaattagttataataatccatctctgtagctttgacataaaagaccatttgagcaaaacatactacctcagggcttttc

SEQ ID NO: 38332 - DNA, 201 bp, Homo sapiens
aagttcttctcattagcatagttataaatatgataatttaagtaaaaattaagttaatttgagccactcaaagttacttttaaagacagatttaaaatgtyaataaaatgataatttaaatttccgattaacctaaaaaagaagtgccatcatttttatttatgccaataaattgaaatataatgtcattttatcactaag

SEQ ID NO: 38333 - DNA, 201 bp, Homo sapiens
gtagcatgtttaggtgctcattgagaaaaggtgaagtcatggtaaccatgtttcaatattctcatttgtatcttgacttcctgcacatggatttttgggcmtaaaagatgtttttaaaacatgctcatacacttcagaagatgaaaagtgtatgcattataactactttgggaaagaaacagtcaacatatgttactgtat

SEQ ID NO: 38334 - DNA, 201 bp, Homo sapiens
tcaaatcagaaaaaaatttttatatataacatactaatcctttcttggttttatatgttgcaatttctttttcgagctggtggcttgctttttaaatttcytgtagggtgcccgttaatgaatggaatttcttaattttaatatatataaatttaacaattcttctttttccttcttttcctggttattcctatttggtcc

SEQ ID NO: 38335 - DNA, 201 bp, Homo sapiens
gtggtaacataaatatggagacagatcatgtcagaaacccagggcctaatcttttcttttctgcctactcttctcacaggctgcttagtactttgtaagctttttttttttttctggctgtaacctagattttctctttatcattactctatttattattgttagagcacttctgattatctcagccctaaactctgcctc

SEQ ID NO: 38336 - DNA, 201 bp, Homo sapiens
ttcctatttggtcctgttgtagagcccatctttcttttagagctacaaaaatatttacctgcaatttcttcaaacattttaaaagtttgcttttgacaagwttttaatccattggaattgacatttttatctgtatcccattcctttttttaatgtggaagactaattttttcaggttgatttactaaatggcttctcccc

SEQ ID NO: 38337 - DNA, 201 bp, Homo sapiens
  misc_feature (1)...(201): n = A,T,C or G, or insertion/deletion polymorphism (see Tables 1-2)
tattgacagggaccatggtgctgtgtctgtccacattttgaagataattatggtttggatattttcacctttaaataacttggagagtttcaacattaacncagtcagatggatacatttatatcatatcctgctgggagtgacagttaattctgggtcctatggcaattgcacttttgactgagatgaatgctgactgat

SEQ ID NO: 38338 - DNA, 201 bp, Homo sapiens
ctacatacaggtcttgcatatcttttgctggattttcttgctgcaaattgctttaaatgcagttcatggcttgagatttgttttttaactgcccagttaaygtaaatctggtctatgaattgtattgacaacaagcttgtgagtagcaatttttcagcaaccttttgctccctctccccgctccctgcacagtcccagaac

SEQ ID NO: 38339 - DNA, 201 bp, Homo sapiens
aagggtattatattataattgaggcactttatgaatatataaataatattatgttttcatgctagagatcatgccaatgaagatatttactttgaaaaggrgaagattagaagtttaaaagcatttccatattgaagtaaatattcatttccatatcttcacagttatctttctctgagttctctgactcattgtgaaaaa

SEQ ID NO: 38340 - DNA, 201 bp, Homo sapiens
gcaaattgctttaaatgcagttcatggcttgagatttgttttttaactgcccagttaacgtaaatctggtctatgaattgtattgacaacaagcttgtgartagcaatttttcagcaaccttttgctccctctccccgctccctgcacagtcccagaacaactttccttatataccaatgaaggtggaaatgtggacaggt

SEQ ID NO: 38341 - DNA, 201 bp, Homo sapiens
atttatgtcatagcatatcatcttagaaagtgatccctaagttactgcatggtatacattgtttaaccatttccctttgtgattggatgtctttaggttgwttatatttttattattatcacaaatgttgaaatcactctttttttctgaagaatttaaaagtaatttatctgtcttatggaataaaatatttatttcccc

SEQ ID NO: 38342 - DNA, 201 bp, Homo sapiens
atattaaaaagcttagacatacttattttatgtttaaaatataacatatactaggcaagacaggaaaactcatcacttttatgaaatgaggcacagacagmgtaatgggctttcttggtgtctcctgagtggcgggcaggtggccatgtcacagctctaatcccagtttcctgacttctggttctgttttcttacggtgcc

SEQ ID NO: 38343 - DNA, 201 bp, Homo sapiens
agttctgttttctctacaatgaagattttttttcttaatatcagcagcttcatttttatttaattgtagttgtatgcttaattccttaaacagatgatcattttttttgtttagtgcataaatattcttaaatcttgtgatatattaataaaaatcacctgaaaaaggtagcagttttaggctttttaaaaaatccgcaat

SEQ ID NO: 38344 - DNA, 201 bp, Homo sapiens
ttaaaatataacatatactaggcaagacaggaaaactcatcacttttatgaaatgaggcacagacagagtaatgggctttcttggtgtctcctgagtggcrggcaggtggccatgtcacagctctaatcccagtttcctgacttctggttctgttttcttacggtgccttcacactgtctctccagatcaaaaacagaatc

SEQ ID NO: 38345 - DNA, 201 bp, Homo sapiens
cccttgagattttcttttcaagttaaaaaaaatactacacataccaaagagtatcaagcacagtttaaaaatacatatttgtcttttcatgtaattttatytgtagtttagattactaatcttggtgatctagttgggttccagtttaacagttttaggttttgcttgacagagctataacacttcagtctatatttgatt

SEQ ID NO: 38346 - DNA, 201 bp, Homo sapiens
ttatatgagtaaaagtgtttccaaagtctatttgaaatgcaggtacagaatgaaaatctgttattttattaaatcgttatttgggtctctttttattccayaaaaaaaaaatcttttccacatctcttagtggagatcaagttaacaaaattagctttaattttgtgataagtaaatttacataaatataggattatggag

SEQ ID NO: 38347 - DNA, 201 bp, Homo sapiens
ggaaaaagctcagcagaaatgtggtttctgaagaggtccagcctcagtctctgcccacaaggagctctggaatatgaataggagcacagaattttcccacygccaggcaagggagccagtctttcattctcacatattgttcagtcattggctgcaatctgctgggaggtgggggtagtgtaactttcaaggcatttctgg

SEQ ID NO: 38348 - DNA, 201 bp, Homo sapiens
tatatgagtaaaagtgtttccaaagtctatttgaaatgcaggtacagaatgaaaatctgttattttattaaatcgttatttgggtctctttttattccacaaaaaaaaaatcttttccacatctcttagtggagatcaagttaacaaaattagctttaattttgtgataagtaaatttacataaatataggattatggaga

SEQ ID NO: 38349 - DNA, 201 bp, Homo sapiens
cctcagtctctgcccacaaggagctctggaatatgaataggagcacagaattttcccactgccaggcaagggagccagtctttcattctcacatattgttyagtcattggctgcaatctgctgggaggtgggggtagtgtaactttcaaggcatttctgggcaagctgcctcctgtcatctgagggtattctgtgataaat

SEQ ID NO: 38350 - DNA, 201 bp, Homo sapiens
taaacagtgtttgaaagaaaatcctcaagaaaggcctacttctgcccaggtattcttaaagttttgttaatattttgtacagaacatcatttgcatatatrcatatatatataatcttcaaatatatatacttaaacacataaacacacagagacagaattaaaaatagttataaggcaaacctcctataattttcaccat

SEQ ID NO: 38351 - DNA, 201 bp, Homo sapiens
gggggcaaggtcatagatcaacagcatcccaaggcagaagaatttttcttagtacagaacaaaatggagtctcctatgtctacttctttctacacagacayagcaacaatctgatttctgtatcttttccccacatttcccccttttctactcgacaaaaccgccaacgtcatcatggcctgttctcaatgagctgctggg

SEQ ID NO: 38352 - DNA, 201 bp, Homo sapiens
cagacgatgggcggccaggcagagacgctcctcacttcccagacggggtggcggccgggcagaggctgcaatctcggcactttgggaggccaaggcaggcrgctgggaggtggaggttgtaggtagccaagatcacgccactgcactccagcctgggcaactttgagcactgagtgaacgagactccgtctgcaatcccgg

SEQ ID NO: 38353 - DNA, 201 bp, Homo sapiens; identical to SEQ ID NO: 5791

SEQ ID NO: 38354 - DNA, 201 bp, Homo sapiens
aggaattgttttcagcaatggaaagaaatggaaggagatccggcgtttctccctcatgacgctgcggaattttgggatggggaagaggagcattgaggacygtgttcaagaggaagcccgctgccttgtggaggagttgagaaaaaccaagggtgggtgaccctactccatatcactgaccttactggactactatcttct

SEQ ID NO: 38355 - DNA, 201 bp, Homo sapiens
acttacagagctcctcgggcagagcttggcccatccacatggctgcccagtgtcagcttcctctttcttgcctgggatctccctcctagtttcgtttctcwtcctgttaggaattgttttcagcaatggaaagaaatggaaggagatccggcgtttctccctcatgacgctgcggaattttgggatggggaagaggagcat

SEQ ID NO: 38356 - DNA, 201 bp, Homo sapiens
agccaatggggattttgacacgattgcattaaatcagtagatcagggaattatgccatttttaaaattgaagtgaaattcacacaatatacaattaaccaytttaaagtgtagacttgagtggtatttagtgtattcacaatgttgtacaaccaccagctttctctggtttcaaaatgtttttattacttcacaaaaacat

SEQ ID NO: 38357 - DNA, 201 bp, Homo sapiens
atcttctttctgtttctatggatttgcctgttatggatatataaaggactcacagcatatgtaacctgttatgtctgagtcctttcacttataatgttttrgaggctcatctaagttgcaacatgtatcagtacttcattcttttttgtcgctgaaatatattttatttttccatgcacatatatcacaatttgttattca

SEQ ID NO: 38358 - DNA, 201 bp, Homo sapiens
aatttttctcctatcattgattacttcccgggaactcacaacaaattacttaaaaacgttgcttttatgaaaagttatattttggaaaaagtaaaagaacrccaagaatcaatggacatgaacaaccctcaggactttattgattgcttcctgatgaaaatggagaaggtaaaatgtaaacaaaagcttagttatgtgact

SEQ ID NO: 38359 - DNA, 201 bp, Homo sapiens
tgcttgtagggtattgctcgaaaaatttttgcctagaccaatgtcctggagattttccctagtgttttcctatagtagtttcacagtttgaggtcttagayttaagtctttaatccattttgagttgatttttgtatatggcaagggatatgagtccagtttcattcttctctgtaggatattaaattttcccagcacatt

SEQ ID NO: 38360 - DNA, 201 bp, Homo sapiens
catgaagatttacccctacattttattctaagagttttatcgttttagctcttatatttaagtttttccatccattttcagttatatttttcatttggagygaagtaagggagatctcagcttcattcttctgcatttcgctgtcctgttgtctcatcaccatttgttgaagagactctttcctcagattgaatggtctag

SEQ ID NO: 38361 - DNA, 201 bp, Homo sapiens
atagagtgttatctcattgtggttttatttatttattcatttatttagagacagagtcttactctgtcacccaggctggagtgcagtggcatgatctcagytccctgcaacttccacctcctgggtttacacaatcctcctgcctcagcccccagagtagctgggattacaggcatgtgtcaccatacctggttaattgtt

SEQ ID NO: 38362 - DNA, 201 bp, Homo sapiens
cgctgaaatatattttatttttccatgcacatatatcacaatttgttattcatctgtttatggacatttgcattgtttccaacctttggctcttatagatdatcttgctttgatcatttgtgtatgtttctttatgggcatattttcatcattcttgggtatattctcaggagttgaattgctgggtcaaatggtaatttt

SEQ ID NO: 38363 - DNA, 201 bp, Homo sapiens
aagtcaaattgtctctgtttgcaggtgacatgactgtatacttagaaaccccatcatctcagccccaaaactgtttaagctgataagcaatttcagcaagrcctcaggatacaaaatcaatgtgcaaaaataacaagcattcctataaaccaataatagacaagcagagagccaaatcatgagtggactcccattcacaat

SEQ ID NO: 38364 - DNA, 201 bp, Homo sapiens
ggtcccctaatggcaggcactagcaccagcactgagagacaactgatttttgcattgatcttgtaccctgaaattatgctgaaatcatttattagctctayttattttctatctgtattgcatgagatttttctatatagagagaatcatgtttcagtcaaatacacatgatttgaatttttcctttcctatttgaatgtg

SEQ ID NO: 38365 - DNA, 201 bp, Homo sapiens
tatctgtattgcatgagatttttctatatagagagaatcatgtttcagtcaaatacacatgatttgaatttttcctttcctatttgaatgtgttttatttyatttcttgcctaattgctctggctagaacttccaatactatgtttaatagtagtaaaaatggacatccttgttttttttcttttctttctgattttaagt

SEQ ID NO: 38366 - DNA, 201 bp, Homo sapiens
ctttggcaatggggggcacccctcacccagcctcgctgctgccttgctgtttgatctcagactgctgtgttaggaatgagtgagcctcagtgggcataagrccctctgagccaggcacgggatataatctcctggtttgccatttgctaagaccatcagaaaagcacagtattagggtggaagtgaccttattttccagat

SEQ ID NO: 38367 - DNA, 201 bp, Homo sapiens
catgattggttggttctatgtctttactattgtgaatagtgcaggaatggacatactagcacgtgtcgttttggtagaacaatttgttttcctctgggtamatactcagtagtggaattgctgcatcgaatggtagttctgcttttagttctttgagaaatctcaaaactggtttccatagtggctgaactaacttacatt

SEQ ID NO: 38368 - DNA, 201 bp, Homo sapiens
ttatccatttcttctagattttctagtttatttgcatagaggtgtttatagtattctctgatggtagtttgtattcctgtaggatcagtggtgatatcccctttatcatttttttgttctctctatttgattcttctttcttttcttctttattagtctggctagcagcctattttgttaatcttttcagaaaattagctc

SEQ ID NO: 38369 - DNA, 201 bp, Homo sapiens
agcaaatccttaaccaatgtaagtatgctccttcagtggcttgcaaaaggtaagtaaattcacctgtattttttaaataaagtgtatccctagaggtacaygttacaagaggtaatggtaaagtaaaatactttgaaaggcttttgttgccttttccagtctgtcagtgtcagaaatagtggaatgaaaccatgtattttg

SEQ ID NO: 38370 - DNA, 201 bp, Homo sapiens
ggatgaaaagttaatcagtgtcccttaaatcctcccaatattggtatttggaagtaccgagggtcaaagatggtggagaatgaggctgaaaaaggaggctytccctgcctacgtttcctccacaactcttttcatcaggtaactgatttccttccacaagaagaaggaggctcactctctagagaaactgagcttaagaag

SEQ ID NO: 38371 - DNA, 201 bp, Homo sapiens
gctggaattataggtgtgagccacgtcgcccggcctacatttattgatttgcatatgttgaaccaggcttgcatcccagggatgaagccaacttgatcgtrgtggataagctttttgatgtgctgctggattcagtttaccagtattttgttgaggattttcgcatggatgttcatcagggatattggcctgaaattttct

SEQ ID NO: 38372 - DNA, 201 bp, Homo sapiens
aatggcctcctgcttcatctataatgctgcaaaagacataacttttgttctttcttatggctgcataacattccattatgtatgtactagtctgttctcaygctgctaataaagacatacctgagacagggtaactcataaaggaaagaggtttaatggactgtcaattccacacggctggaaaggcctcacaataagtct

SEQ ID NO: 38373 - DNA, 201 bp, Homo sapiens
gttttattatgagaaggccattttaaatagcaagtatattcttcaagataacttttctcattctcaaaatttcaggttcgaatgctggagtagggaaactkgaaactctccttattgaaggataaatggtaatcctaaaaatgtagtgatctgcctgagaaaattcctagtccaataagtactctaaaaagttagattcat

SEQ ID NO: 38374 - DNA, 201 bp, Homo sapiens
gtccatgtgtttgtttttatgtcagtaccatgctgttttagttagtatagctctgtagtttaatttgaagtgagataatgtgattcctccagttttgttcyttttgcttaggatagttttgactattctgggtcttttgtgggtccatatacattttaggatttattttttctatttctgtgaagaatgccattgatattt

SEQ ID NO: 38375 - DNA, 201 bp, Homo sapiens
ctgcaatgtgatctgctccattattttccataaacgttttgattataaagatcagcaatttcttaacttaatggaaaagttgaatgaaaacatcaagattktgagcagcccctggatccaggtaaggccaagatttttgcttcctgagaaaccacttattctcttttttttctgacaaatccaaaattctacatggatcaa

SEQ ID NO: 38376 - DNA, 201 bp, Homo sapiens
ttgaacgtgtgattggcagaaaccggagcccctgcatgcaagacaggagccacatgccctacacagatgctgtggtgcacgaggtccagagatacattgascttctccccaccagcctgccccatgcagtgacctgtgacattaaattcagaaactatctcattcccaaggtaagtttgtttctcctacactgcaactcca

SEQ ID NO: 38377 - DNA, 201 bp, Homo sapiens
gagatttggggtggggacacagccaaaccatatcagcccctttgtcaaaaatgagttaactctagatacgtgaacttgtttctgaattctctattctgttycattggtccatgtgtttgtttttatgtcagtaccatgctgttttagttagtatagctctgtagtttaatttgaagtgagataatgtgattcctccagttt

SEQ ID NO: 38378 - DNA, 201 bp, Homo sapiens
ctggctgaaagagctaacagaggatttggtaggtgtgcatgtgcctgtttcagcatctgtcttggggatggggaggatggaaaacagagacttacagagcycctcgggcagagcttggcccatccacatggctgcccagtgtcagcttcctctttcttgcctgggatctccctcctagtttcgtttctcttcctgttagga

SEQ ID NO: 38379 - DNA, 201 bp, Homo sapiens
attcaattacactctttaagttattttaaaacgtacaattaagttattattgactatagtcacccttttgtgctatcatatagtagatcttattcatctccacctcccctccccccacactaccctttcgagtctctggtaaccatctttctacactttatgtccattagttcaattcttttatttttagatcccacaaat

SEQ ID NO: 38380 - DNA, 201 bp, Homo sapiens
ggattaatgtaaaagtgaagtgttgattttatgcatgccgaactcttttttgctgttaagggaatttgtaggtaagataatttctaaactactattatctsttaacaaatacagtgttttatatctaaagtttaatagtattttaaattgtttctaattatttagcctcaccctgtgatcccactttcatcctgggctgtg

SEQ ID NO: 38381 - DNA, 201 bp, Homo sapiens
aggctgggaatgtaaatttagcatttgaacaaccattatttaaccagctaggttgtaatggtcaactcaggattaatgtaaaagtgaagtgttgattttaygcatgccgaactcttttttgctgttaagggaatttgtaggtaagataatttctaaactactattatctgttaacaaatacagtgttttatatctaaagtt

SEQ ID NO: 38382 - DNA, 201 bp, Homo sapiens
ggagaatatttgggaccatagaagctgccaagaaacactgaatagggcaggggtgtttgatatctcagttgggatcctagctgatgagatagctgggttargaatgacaaaattattggttttatggtgtatgaaccataaacagacatcacacttataccctgtgctgagctggcatgttttattctctgcctaaataat

SEQ ID NO: 38383 - DNA, 201 bp, Homo sapiens
agtttatcgatcacttgattataacaacttcatttcagagatcctccaccaaacaagaaaacttttcctataatttaattcatttagctattaaatgatasgctgggcctaatcaatatcaaattaaataggttaaatttgcaggatgattagagatgagggcatttagttcctaaagaagaaaattcattttaaaaaagg

SEQ ID NO: 38384 - DNA, 201 bp, Homo sapiens
aactcaagatggattaaacacttaaacataaaaccaaaaaccataaaaaccccagaagaaaacctaggcaataccattcaggacataggcatgggccaagwgtttgtgactaaaacacaaaaagcaatggcaacaaaagccaaaattgacaaatgggatctaattaaactacagtgcttctgcacagccaaagaaactgca

SEQ ID NO: 38385 - DNA, 201 bp, Homo sapiens
ggaaggaatgtgtgaatagggtgtgagtcacagagatcacatgcttcacaaggtaataaaatatcacaaggcaaatggaggcagggtgagatcacaggacmggagtgaaattaaaattgctaatgaagtttcaggcactcattgtcattgataacatctcatcaggagacagggtttgagagaagacaaccagtctgacca

SEQ ID NO: 38386 - DNA, 201 bp, Homo sapiens
gaaccaaggtctatgactctagcacaccttagcagctgaagcccacagactgagttgtggctgtgaatctgtttctgagggtgaggtgcaggaaaatgccrtggcctgcctctgatgtagaaggggtgctctttagatttgagcccagcaagtagaatatggctactatcattaataagataggatatactaccttattaa

SEQ ID NO: 38387 - DNA, 201 bp, Homo sapiens
gttcaatgcctggccattcattcagagtacttttgattaaagtcactatttagggcctatagatatcaggggaaattcagcccctgatatttcaatgtgartccttttctattctccctaagtgttggctggtctgagaaataaagggaaagagtacaaaagagagaaattttaaagctgggtgtccaggggagacatcac

SEQ ID NO: 38388 - DNA, 201 bp, Homo sapiens
cattagctgtgagacactgaaaatgaatttgtcattctctgagctcagttttttttttttttttttttttttttgagacagagtcttactctgtagctcakgctggagtgcagtggtacaatcttggctcactgcaacctccatctcccaggtccccattcaagaaattctcctgcctcagtcccccaagtagctagcatt

SEQ ID NO: 38389 - DNA, 201 bp, Homo sapiens
aaagctacgataacaagtgccatgtggcttatggaaaagtaatgagtgattttagatcagtttggcacagacaaaaggagcttgttatgattatttctcawaaggatagtaagaaggaggaataagctataaactctgttagggggttaagaattaaggtgatttgtataatcctatagccatctaattttaggagtactg

SEQ ID NO: 38390 - DNA, 201 bp, Homo sapiens; identical to SEQ ID NO: 5781

SEQ ID NO: 38391 - DNA, 201 bp, Homo sapiens
gagtttgcaaggcagaataatagggatgaggttagtctgtgggcagttattagggaagttgcactggtaaaacttcagggggtttgaatgagaaaagctaygataacaagtgccatgtggcttatggaaaagtaatgagtgattttagatcagtttggcacagacaaaaggagcttgttatgattatttctcaaaaggata

SEQ ID NO: 38392 - DNA, 201 bp, Homo sapiens
tgcatgttcagattttggatttcttcctggttcaatcttgatgggtcatatttgtgtagggatttgtccatttcttctagattttccaatttattggcatrtagttgctcatagtaaccaataattattctttgaatttctgcagtatcagttctaatgcctcctttttaattttttatttatctgaatctactctttttt

SEQ ID NO: 38393 - DNA, 201 bp, Homo sapiens
cctactagattgatggtagggggcagggcaaggttggcaagactagctaggagtcatcacatggctatcagggagagaagtgtttgaaggccttgtgttastagtatggtttggctgtgaactcgtttgtagtttgagtttgcaaggcagaataatagggatgaggttagtctgtgggcagttattagggaagttgcactg

SEQ ID NO: 38394 - DNA, 201 bp, Homo sapiens
ctgcactactgcaccctagaacaagttgtctgttgcctcccatctagattataatagtgtgggcccatcttgtcattgtaaacccattctcttcctctatratttatcttaggttttgctgtcatattgcttttttaatatttgtttttacaaaatttcaactttataatgaatctgggggcaatattgagtccatgtacc

SEQ ID NO: 38395 - DNA, 201 bp, Homo sapiens
ttcctcagattgaatggtctaggcacccttgatgaaagtaaatttgccatagatctttaggtttatttcgtgatttcagttttattccatttgtcttgatrtctatctttatgctagtaccacactgttttgattattacagtttgtagtaagtttgaagttggaaactgagtactcactgatacagaaattaagtagaaa

SEQ ID NO: 38396 - DNA, 201 bp, Homo sapiens
ttctgtctcattgatctgtctaatattgacagtggggtgttaaagcctccatctattattgtgtgggagcctaagcctctttgtaggtctttaagaacttsctttatgaatctgggtgctcctgtattgggtgtgtatctatttaggatagttggctgttctcgttgcattgatccctttaacattatatgataccacccc

SEQ ID NO: 38397 - DNA, 201 bp, Homo sapiens
agagacagtgtttgtcactgtcacagttacgcatgaggagtaactgctctctgtgtttgctattttcaggaaaacggatttgtgtgggagaagccctggcyggcatggagctgtttttattcctgacctccattttacagaactttaacctgaaatctctggttgacccaaagaaccttgacaccactccagttgtcaatg

SEQ ID NO: 38398 - DNA, 201 bp, Homo sapiens
agagattgaacgtgtgattggcagaaaccggagcccctgcatgcaagacaggagccacatgccctacacagatgctgtggtgcacgaggtccagagatacmttgaccttctccccaccagcctgccccatgcagtgacctgtgacattaaattcagaaactatctcattcccaaggtaagtttgtttctcctacactgcaa

SEQ ID NO: 38399 - DNA, 201 bp, Homo sapiens
agtaccgagggtcaaagatggtggagaatgaggctgaaaaaggaggctctccctgcctacgtttcctccacaactcttttcatcaggtaactgatttcctyccacaagaagaaggaggctcactctctagagaaactgagcttaagaagccctgtactcagagacacacagcagtgccagaaaaggcatgaggtgtaggct

SEQ ID NO: 38400 - DNA, 201 bp, Homo sapiens
tcacaggtatgatcagagatgataagttaattaattttcagaaaagattttgggaaggtgttgctagtgtcctccttcctgtttctcttagagaagcttcrttatttaaacttttgtgcttccagctgtaatctgtttcaaactaatggtgattacaatgggatatcttggcctggcatggtggctcacacctgtaatccc

SEQ ID NO: 38401 - DNA, 201 bp, Homo sapiens
tctgggggcaatattgagtccatgtacctttctgacagaaaaatataattgcagactcttgattcaggctcacagtgtctaatgatatggccccaatttaygttttctattaatttagattgtggttgtctacaggtaataatggctttaacacataatgtctttatttatctcaaatacagggattctcttggtggggca

SEQ ID NO: 38402 - DNA, 201 bp, Homo sapiens
gaagagattgaacgtgtgattggcagaaaccggagcccctgcatgcaagacaggagccacatgccctacacagatgctgtggtgcacgaggtccagagatrcattgaccttctccccaccagcctgccccatgcagtgacctgtgacattaaattcagaaactatctcattcccaaggtaagtttgtttctcctacactgc

SEQ ID NO: 38403 - DNA, 201 bp, Homo sapiens
tagtcactattcgtaatttatttctggattcattgtaatttctgtgtatattatactgtatctgagttaatattgttttatttcttattttccatttctcrtgggcttaatgtctctttatcgcattcattattgcattagctagaatttctaggagagcattgaatagaattggtgacagtggggatccttgtttctcat

SEQ ID NO: 38404 - DNA, 201 bp, Homo sapiens
tctataatttatcttaggttttgctgtcatattgcttttttaatatttgtttttacaaaatttcaactttataatgaatctgggggcaatattgagtccaygtacctttctgacagaaaaatataattgcagactcttgattcaggctcacagtgtctaatgatatggccccaatttacgttttctattaatttagattgt

SEQ ID NO: 38405 - DNA, 201 bp, Homo sapiens
aaatttatttctcacagttctgaaggctgggagttccaagatcgatgtgtcagcaagttcagtgtctgatgtgggcctgttccttacagataatgcccccwctgtatccttatatggcagaagggcaaaaaggcaaaaggggagaaatggctcccttgcatctcttgatgttattattttagcaaggacagagccctcctg

SEQ ID NO: 38406 - DNA, 201 bp, Homo sapiens
tccagatttattatctttcttcaagattggtttggctactcttaggtgcttatatttccaaataatttttaaaggtattagtttgtcaatttcccaaaacyttgggctggaatttctggcagggtgacactaaatttataggctagtttggaaagaactgaatcttgacacgttgaggctttccattcctgaatataatta

SEQ ID NO: 38407 - DNA, 201 bp, Homo sapiens
tctggattcattgtaatttctgtgtatattatactgtatctgagttaatattgttttatttcttattttccatttctcatgggcttaatgtctctttatcrcattcattattgcattagctagaatttctaggagagcattgaatagaattggtgacagtggggatccttgtttctcatttctaatctgcaggaagcagtg

SEQ ID NO: 38408 - DNA, 201 bp, Homo sapiens
cctctctactggttcaacacatgactctttcagctattcattatatataaaaagctttgaaatctccaactattcttgccctttccatctcagtgccttgytgtctactgactttgcagactgatgtgattccctctgaaacatgaattattaggtttttagaaaatgcctttttgttctttccaaagtaaaagacaaata

SEQ ID NO: 38409 - DNA, 201 bp, Homo sapiens
tttcctcaactgtgcaaactaattcatattaataattccatgaaatgtgtccatagtaacacaagagcagaagatgggccttgtaaaggtggcccaccacrttatttgaggtctttgtcagtcttatctgccagatactgtgtggactaactgcagttaaaattcccattcccttatcacttgccctgaaatttatctgaa

SEQ ID NO: 38410 - DNA, 201 bp, Homo sapiens
ttaagattatgccagccttataaaactatgcaagaaatgtttcctaatgtgagactgtttttattgccgttccctctccccacttttcttcttgtgatcayttagttgtatctttgaaatgcctgataacttttggttaaataccagatggtatatgtaagaaattgcagaattgcagaggaggtttatattcttcaaaga

SEQ ID NO: 38411 - DNA, 201 bp, Homo sapiens
tatttatccagacactccatttgccatctcaaacctactcttttccaatcaaaaccaatatatattattagtaaaataaaaaataatataactgaaagttgtattttcaaggggaaaaagcaatgagacttggtaaggttgcaattactaatgtcatcttttgaagaagacagaattgataatttacttagagattatggg

SEQ ID NO: 38412 - DNA, 201 bp, Homo sapiens
ttgtttaatcttgggagagtgtatttgtcgaggaatttatccatttcttccagattttctagtttatttttgtacaggtgtttatagtattctctgatggyagtttgtatttctgtgggatcggtgatgatatccccttcatcattttttattgcgtgtgttggattcttctctcttttattctttattagtcttgctaac

SEQ ID NO: 38413 - DNA, 201 bp, Homo sapiens
ttcggctgtgaatccttcaggtcctgggctttttttttgcttggtgagctattccttgctgcctcaatttcagaacttgttattggtctcttcacggattsgacttcttcctggtttggtcttgggagggtgtgtctaggaatttatccatttcttctagattttctagtttatttgcatagaggtgtttatagtattctc

SEQ ID NO: 38414 - DNA, 201 bp, Homo sapiens
tctcaaacctactcttttccaatcaaaaccaatatatattattagtaaaataaaaaataatataactgaaagttgtattttcaaggggaaaaagcaatgasacttggtaaggttgcaattactaatgtcatcttttgaagaagacagaattgataatttacttagagattatggggcttaccctagtggtcactgagttag

SEQ ID NO: 38415 - DNA, 201 bp, Homo sapiens
tttttgatccattggaacttacatgtgcctcctctgcagtggtacaattactctttgtacatgatcaagagcactgttctgaatgcctgtgtacaccctgytcatgatacatcctaattattgggccagattagtggactttggggagttaatccaattcttccaaattgagaaagctgaaatataggttggttgaattct

SEQ ID NO: 38416 - DNA, 201 bp, Homo sapiens
ttggagtagtttcagaaggaatggtaccagctcctctttgtacctctggtagaattcggctgtgaatccttcaggtcctgggctttttttttgcttggtgrgctattccttgctgcctcaatttcagaacttgttattggtctcttcacggattcgacttcttcctggtttggtcttgggagggtgtgtctaggaatttat

SEQ ID NO: 38417 - DNA, 201 bp, Homo sapiens
aagaaataaaactattgtgtttagatcgcatgattgtttatgtagaaaatctcaaagaatcaaaaaacctccaaaaataaaaaaaacaaaacaaaacaaaaagaaaacaacaataatgaaaaaactcctaaaagtaataagctattgtagtaaggttgcaggatacaaggaaatcaaattcttttctctatattaacaata

SEQ ID NO: 38418 - DNA, 201 bp, Homo sapiens
caccctagaacaagttgtctgttgcctcccatctagattataatagtgtgggcccatcttgtcattgtaaacccattctcttcctctataatttatcttargttttgctgtcatattgcttttttaatatttgtttttacaaaatttcaactttataatgaatctgggggcaatattgagtccatgtacctttctgacaga

SEQ ID NO: 38419 - DNA, 201 bp, Homo sapiens
aaagaaataaaactattgtgtttagatcgcatgattgtttatgtagaaaatctcaaagaatcaaaaaacctccaaaaataaaaaaaacaaaacaaaacaaaaagaaaacaacaataatgaaaaaactcctaaaagtaataagctattgtagtaaggttgcaggatacaaggaaatcaaattcttttctctatattaacaat

SEQ ID NO: 38420 - DNA, 201 bp, Homo sapiens
ctatacatccatccattcatccatttatccatccactcatccatccattcattcatgcatgcacccatccacccatctatctcttcatctcttctacgatwcactgaacagttattgcatattctgtttgtgccagttacagagacagtgtttgtcactgtcacagttacgcatgaggagtaactgctctctgtgtttgct

SEQ ID NO: 38421 - DNA, 201 bp, Homo sapiens
gcatggaatgttcttccatttgtttgtatcctcttttatttcattgaacagtggtctctagttgtccttgaagaggtccttcacatcccttgtaagttggrttcctaggtattttattctctttgaagcaattatgaatgggagttcactcatgatttggctctctgtttgtctgttattggtgtataagaatgcttgtga

SEQ ID NO: 38422 - DNA, 201 bp, Homo sapiens
ggcctgtgcagtttgacatacatgtcagtagatggcacttatgagcaaaagccagctgtgactaggacaacttgatatagcacagcttgatccttgttttytgggggaacttctctgtttcctcagataatctgttcatctgtggaattcagagtagtctgggctccctgctgagccccagggggataaagatcggtgtca

SEQ ID NO: 38423 - DNA, 201 bp, Homo sapiens
tcaaaactggtttccatagtggctgaactaacttacattcccaccagtagtatataagtgttctcttttctctgcagtctcaccaacatctgttatttttkggctttttaatcatatccattttgattggcatgagatgatatctcattgtggttttgatttgcatttctctgatgattagtgatgttgagtgttttctca

SEQ ID NO: 38424 - DNA, 201 bp, Homo sapiens
attaagtttagtgagggcaggggtaggttagtgagggatttagggtcatttgattatgaggtgagatggtcacatggggatgaagtaattctttaacatarcatttgtatgtagaagtacagtacatttgtatgtagaagtacagtatacggagataagaatttacaatatagtgtgtgcgtcagtaatttctaacagagc

SEQ ID NO: 38425 - DNA, 201 bp, Homo sapiens
ggcaccgttcacaatagcaaagacttggaaccaacccaaatgcccatcaatgatgtactggataaagaaaatgtggcacatatacaccatggaatactacrcagccataaaaaaggatgagttcatgtcctttgcaggaacatggatgaagctggaaatcatcatcctcagcaactaacacaggaacagaaaaccaaactc

SEQ ID NO: 38426 - DNA, 201 bp, Homo sapiens; identical to SEQ ID NO: 5792

SEQ ID NO: 38427 - DNA, 201 bp, Homo sapiens
gtttgggcaagttggtctacagcctctgctatacaagcagtattttttttctagtactgtactttccagtttctatgttggtaactatataactatgtgartaattttgaattcactgtaatcaaatatgctggtaaataatttgtcagataattgcatcaaatcattcctaggaaaagcacaaccaaccatctgaattta

SEQ ID NO: 38428 - DNA, 201 bp, Homo sapiens
gaggattgatatgttccaatttttatagaaacaaatgtaaatttcctataaaatgtttgtttcaaaaatattgtttcttgtttgcatttgttcaatgtaartacttttagctcacatactatacaaaaacaggtggcagggtggacttgtgcagggagtattttttattgatgcctaatataagacatccctgtccagtag

SEQ ID NO: 38429 - DNA, 201 bp, Homo sapiens
taaaataatattggtagtttgataggaatagcattgaatctgtagatagctttgggcagtctagccattttaatgatattgattgtttcaatccataagcmtgaactgtttttccatttgtttgtgtcatctatgattttgttcatcagtattttgtagctctccttgtagagacctttttgccccctttgttagttgtat

SEQ ID NO: 38430 - DNA, 201 bp, Homo sapiens
taatcagcagtaacaattgcaacaaaagctggttacaaacaatccatggaaataggatgtgaagctagacaaccagttagaccagaaattctcagaagggmgtatgccttaaccctaaagaggcctagaagagccatggcaagatgagggcatttatagccctatcttatccatatggacaggtgccccccatgcgtccat

SEQ ID NO: 38431 - DNA, 201 bp, Homo sapiens
aagatttttgatattaagattatgccagccttataaaactatgcaagaaatgtttcctaatgtgagactgtttttattgccgttccctctccccacttttyttcttgtgatcacttagttgtatctttgaaatgcctgataacttttggttaaataccagatggtatatgtaagaaattgcagaattgcagaggaggttta

SEQ ID NO: 38432 - DNA, 201 bp, Homo sapiens
tcgctccatttcctggactgctttagtagtttgtttgcattaattttcaaccctgccttggatcactgagcttacttgcagtccatattttgaatagtttrtctgtcatttctgagttgccagtttggttagggttcattgctggggagttcatgtgatcctttggaggttttacgacattcagacatttcatggtgccag

SEQ ID NO: 38433 - DNA, 201 bp, Homo sapiens; identical to SEQ ID NO: 5794

SEQ ID NO: 38434 - DNA, 201 bp, Homo sapiens
cttttgaggagttattcataagttctttgctaaagcctgtatccagaatgttattttatagatatttttccatcagattcttatagtttgaggtcttaaayttagatcattaatccatttcgagttaattattgtatatggttcaaggaagtgtttcagtttcattctgcatatggctagtcagttatcctcattcaattt

SEQ ID NO: 38435 - DNA, 201 bp, Homo sapiens
gatattagccctttgtcagacaagagggttgcaaaaattttctcccattctgtaggttgcttgttcactctgatggtagtttcttttgctgtgcagaagcyctttagtttaactagatcccatttgtcattttggcttttgttgccattgcttttggtgtatgagacaagaagtccttgcccatgcctatgtcctgaatag

SEQ ID NO: 38436 - DNA, 201 bp, Homo sapiens
tgcactgcacccactgtcctgtacccactgtctcacaatccccagtgagatgaacccagtacctcagttggaaatgcaaaaatcattcatcttctgcatcrctcatgctgggagctgtagactggagctgttcctattcagccatcttggctccaaatgttctcaacttttattttgaagtgcacgttcatgtgtcttaca

SEQ ID NO: 38437 - DNA, 201 bp, Homo sapiens
ctgcagaattttctgctgccttttgtttggctataccctgaccccagaggtggagtctacagaggcaggcaggcctccttgagctgcggtgggctccaccyggttcgagcttcccagccgctttgtttacctactcaagctttggcaatggggggcacccctcacccagcctcgctgctgccttgctgtttgatctcagac

SEQ ID NO: 38438 - DNA, 201 bp, Homo sapiens
tttaagaatgttgaatattggcccccactctcttctggcttgtagagtttctgccgagagatcagctgttaatctgatcggcttccctttgtgggtaaccyggcctttctctctggctgcccttaacattttttccttcatttcaactttggtgaatctgacaattatgtgtcttggagctgctcttctcgaggagtatct

SEQ ID NO: 38439 - DNA, 201 bp, Homo sapiens
aatgaggtaccatctcatgccagttagaatggtgatcattaaaaagtcaggaaacaacagatgctggagaagatgtggagaaataggaatgcttttacachgttagtgggagtgtaaattagttcaaccattatggaagacagtgtgctgattcctcaaggatctggaacaagaaataccatttgacccagtaatcctgtt

SEQ ID NO: 38440 - DNA, 201 bp, Homo sapiens
gtgtcagcttcctctttcttgcctgggatctccctcctagtttcgtttctcttcctgttaggaattgttttcagcaatggaaagaaatggaaggagatccrgcgtttctccctcatgacgctgcggaattttgggatggggaagaggagcattgaggaccgtgttcaagaggaagcccgctgccttgtggaggagttgaga

SEQ ID NO: 38441 - DNA, 201 bp, Homo sapiens
gctgctggattcggtttgccagtattttattgaggatttttgcattgatgttcatcagggatattggtctaaaattctctttttttgttgtgtctctgccyggctttggtatcaggatgatgctggcctcataaaatgagttagggaggattccctttttctattgattggaatagtttcagaaggaatggtaccagctcc

SEQ ID NO: 38442 - DNA, 201 bp, Homo sapiens
aatagtgccacaataaacatatgtgtgcatgtgtctttacagcagcatggtttataatcctttgggtatatacccagtaatgggatggctgggtcaaatgrtatttctagttctagatccctgaggaatcaccacaccgacttccacaatggttgaactagtttacagtcccaccaacagtgtaaaagtgttcctatttct

SEQ ID NO: 38443 - DNA, 201 bp, Homo sapiens
tgatcgttcctctggaagttttgtctcagaagagtacccagccttgtgaggtgtcagtctgcccctaatggggggtgcctcccagttaggctacaaggggrtcagggacccacttgaggaggcagtctgtccattctcaggtctcaagctttgtgctgggagaaccactattctctccaaagctgtcagactgggacaatt

SEQ ID NO: 38444 - DNA, 201 bp, Homo sapiens
cttttgtttggctataccctgaccccagaggtggagtctacagaggcaggcaggcctccttgagctgcggtgggctccacccggttcgagcttcccagccrctttgtttacctactcaagctttggcaatggggggcacccctcacccagcctcgctgctgccttgctgtttgatctcagactgctgtgttaggaatgagt

SEQ ID NO: 38445 - DNA, 201 bp, Homo sapiens
gcggagtttcaaattttggtctgctgtacattagctgtgagacactgaaaatgaatttgtcattctctgagctcagttttttttttttttttttttttttttgagacagagtcttactctgtagctcaggctggagtgcagtggtacaatcttggctcactgcaacctccatctcccaggtccccattcaagaaattctcc

SEQ ID NO: 38446 - DNA, 201 bp, Homo sapiens
gctatgaacatctgcttttctgggataggaatcttggtgatgtgaaacctctctgactgcacgtccattcataggctctctgcagggggaagcacatcacrcgctgttggctcattctggcagtccagcctggcactgtccttacacaatcctgcatgcaattttgtatttacaataatcgggagcatttcatcttttatt

SEQ ID NO: 38447 - DNA, 201 bp, Homo sapiens
tatgttgaatgcatctccccaaatgctaagttattagggaaatagtcaataaaatgcttttatccctactgataagtaggaaacactgctgaaaagtttawtgaacttgaaatggagtttaaaaattccttatttaatcctgtcgacatttgagtcacttactattcatttttttcatgtatagatttagctatcaagcat

SEQ ID NO: 38448 - DNA, 201 bp, Homo sapiens
cagaagagagcagagataaacatgggtgttcagctctctgatttgaccaaaagtttgtttcatttcttcattcacacacttaaatttgtgcctgatatagrgtatattctcaagaagtgtttgttaaatgattgaaagcccgttcctaggatgatatgcgtacatttagtcatcagatttcaagacacccaaacatacagt

SEQ ID NO: 38449 - DNA, 201 bp, Homo sapiens
tggtacttgctataaaagatacaggtgtgcctatacacatttatcgagggcatgaagatattaaggctttactgtaataaatctgaagacaagtgactagkgtatctccctcttctgcaccaccacccccaccaccatgtgccagatctgctggcatactgctaactgatgttctttgtgaatgatggcattgagcttgtg

SEQ ID NO: 38450 - DNA, 201 bp, Homo sapiens
agggtattgtcatcttgtggacgatacccgccttgttggccttttccttctcctacctgctttcatttgttgtagttggagagtttctgtatacttttcgraagagattgggcatattggggagtgggtaggagttatgggaaaggatgagcaaattcttcctggcagaacaaagcactgttcagctgttcctctctttcc

SEQ ID NO: 38451 - DNA, 201 bp, Homo sapiens
tcctcattttagacttgccattcttttcttaaggtgcttttcttaaggtgcttaagaaaagcaccttaattccattattaaagattcaggatcattaagastcaggctggattgaaatttatctctttactgtctatggaaaaagatttaaggagaaaaatcactgtgagggatgtcgatttaggaaagctttctaaagaa

SEQ ID NO: 38452 - DNA, 201 bp, Homo sapiens
tgggctttgggctagtggcttctgctctctgggcctgtgtccttgctggtgaagtggaggatgatagggcagaaggtcttccagggttcctgacaactccrctgttcttagagtcacagtttgtgatggcattttcaggttctttcctgtttgctaaattgataataaattcaaagtattgcacaatggcatagaagaagc

SEQ ID NO: 38453 - DNA, 201 bp, Homo sapiens
cataccacagttcttgggatcatttacgttgtttttacaaaccctgaaaagtaacacatagtgccccacggggccttcttggagaatggtggtgagcacgyacatggattgcaaagctcctctgtgtagtaccaagccctaagccaagccactaatggggcatgaacaccaaaggcaggccaaggaggagtaggaatgtcc

SEQ ID NO: 38454 - DNA, 201 bp, Homo sapiens
ggaaatacagataaataagataattacagattgtgagagggtctacaaggaaagcagcttttgctggtgagagtaaggttagggagtctgggctggccccrgtgaaaaagcatatttgatctgagctctcaaaagtgagtgctctctttccgtggtgagaaaaagggaaagagctttgcaggcagagagaacagcaaatgc

SEQ ID NO: 38455 - DNA, 201 bp, Homo sapiens
gaagtagagaatctaataattctctgatagcctagccctgggagtagtctagtcttgggcgtggaacctgaaagttttagacaaatcttggaatataactygaatacagtagtgcagattgcttctttgaaacccagtctgaataggtgagaccttgcttttccttgctgaagtattttacttagcaaagaattacttgct

SEQ ID NO: 38456 - DNA, 201 bp, Homo sapiens
ataagtggtataaaatgaggtaatagatgcattttggaaaaagtaatggcactatacaaatgcaagaaatgttattgataggcttttatggcttagatgartctgacttgaactttcagcatcatatactccattagtcgagaacattgcagtgaccttttttaggaagcagtttcctggagatttaatcagtgtagaaaa

SEQ ID NO: 38457 - DNA, 201 bp, Homo sapiens
caggactgttacaaggggttttggagcagaaatctctgcagcgtgctgtctcaactcaagcgagtgggtcttctcatgttttgtatgtgtgtgttttttcrtaggtacttcaagaaggacaaagcagtttggtacttttccaggcaactatgtaaaacctttgtatctataagaagactgaaaaccatggagattattttt

SEQ ID NO: 38458 - DNA, 201 bp, Homo sapiens
aagacgtcatgatgataaagaggtaaatcccatcttttaaatccattagtttttgcttggaaaaatgtatgaagcaagtacagattcttgacatctatcaragaggtgacatgatctagcaattagaggcaaaaattgaggctttcacaagtgattttttcatatgacataggctcaatcatgcctcttttagtggacttt

SEQ ID NO: 38459 - DNA, 201 bp, Homo sapiens
ccttttctctctttctttcaaaattacctgttcatagtatatattcttccaacttccatgcagtgaagagggaatcagacggggctcctggggatctcacyagcttggagaatgagagacaaatttataaaagtgtcttggaaggtggtgacatccctcttcagggcctgagtgggctcaagcgaccatccagctctgctt

SEQ ID NO: 38460 - DNA, 201 bp, Homo sapiens
gtgtcatttgcagatttttccaggggaatggtcttggttggtacttcatatattaccaaggaagttttcaaaaatgttattccctttttcagtttttatargtttctgaaatacagcagacttgatggttctatgggcctgctctgctagagggggcttccagtcaacaaaataaccaaaactggctttgggttcagccac

SEQ ID NO: 38461 - DNA, 201 bp, Homo sapiens
gttgaggaatgcatgaaacccctctgagcatcagcttcctgggttttttaagaaaacaatgataaaccctgtcctgcctgactccagggtttctgagggastcactgaagatgaggtcagtgagcacacttgataaggcagaagatggtctgaggataaaagacaaggtcagttgggacaatagatgaagccaggagaaaa

SEQ ID NO: 38462 - DNA, 201 bp, Homo sapiens
acataaggaaatgtctttgaacacctagagtaaaaagtattcaagaagagaaatgatagatagtgcctgttttcagacaaggcagaaattgggtgttgctrtcatagttacacaagcaatctaatcatgatccaagagggaggtggcaggtagtatatggagattagatgtcaaagggctcagctttcacactaccttgta

SEQ ID NO: 38463 - DNA, 201 bp, Homo sapiens
tggttaaatattttgaagattatccctgactgtgtctattttaggttagtttgtaagtaagggggctgacacttagaagttagtagtttctatattgagaratgtgaaatgtgcaaagggctacccgcatatgacggtgattacttatcatgtatgagttgaggtatcctttttgtttggttcacaagacatctccattca

SEQ ID NO: 38464 - DNA, 201 bp, Homo sapiens
acataactagaggggaaaaaaaacctgaggataaacagccttcaaaatgaagggctaattcttgtgatagatagtaatggtttccatttccactgagggtstacccccatgccatgtctccgtcccctgaaaaaaactggtttacatttcagttatatgagctatttcacttaaatctaaacagagagaaattgagtctta

SEQ ID NO: 38465 - DNA, 201 bp, Homo sapiens
cctttttgtttggttcacaagacatctccattcatttcttctccagcctaagaatgctgtgtgctttgtacttgttttttaaattaagacgaattaaactrtacaaagggaattggtaaatggattatggagtgttattacaatgaaatacagccattaaaatgatggatatgctgactatatagaatcccagaaaaatgt

SEQ ID NO: 38466 - DNA, 201 bp, Homo sapiens
gcctctccctgagctgaggtacaagaccgaggctgcccagcccctaggtcagagacgaaaggaaggaacaggctaggggtgggctggcagagagttcaggytccctgagctgggagtatttggggaagggaaaagaggaggaggtcggaaagtttgtgatgactctgaagactctcaggtttgtcccggggggactcaggc

SEQ ID NO: 38467 - DNA, 201 bp, Homo sapiens
ttcaagcaggtctgttatcatacgctttgttttcttcttggtctgatcatagatttttaaaaaagaacctccaaaacaaaaaacctaatggttatttcaayttcttatgttttaactcttcccagaccttagaacaagcttgtccaacccaaggcctgcaggctgtatgtggcccaggacagctttgaatgtggcccagca

SEQ ID NO: 38468 - DNA, 201 bp, Homo sapiens; identical to SEQ ID NO: 5810

SEQ ID NO: 38469 - DNA, 201 bp, Homo sapiens
tggtttttgatgtagttgaggtgacggatggtgatgctggctattttaggctgcatggctttctgactactgttttagactccttcccccacacctacccrgttcatttttgcttggttttcttttgagcttggcatcttccttaaaggggattcttcaaatatatgcagagaggctgctgattgaaactactctcccacc

SEQ ID NO: 38470 - DNA, 201 bp, Homo sapiens
atttcttaatctgggtgactgcagcaaaagtaaactgattggccataattgcccaaggatgtgaactaatctaatgcttccttcatctaggctagtagagyagtttgctccctcttttgctttgcctttggtagtaaaagtcaagacctaaagaaataatcagttttgagtatttttagttttgagctgaggtagaaaacg

SEQ ID NO: 38471 - DNA, 201 bp, Homo sapiens
tgaagacagcagccctctgcgtctgcttagtgcctggatacagcctaatatcactattcgtactgttatctaacttttctcatcgggaggaaaactatgtyctgaccacgcggggagcttttcctctgcgtgcatggagccaggtttacaacaggccttacctcactgcttccccttccctttccggtttgtcctagttta

SEQ ID NO: 38472 - DNA, 201 bp, Homo sapiens
gtggcaggtaaataaaggccgtcatagactgctgggagagagagacaggtaaagattaactgctgtagaatgtcaaatgagagctgtgctgactggtttcrgtgctagtatagtgggaatatagaggaaggaatggttaattctgaccagccgtgaatgaaagggttgcttcattcattcattcataaaaaattattggat

SEQ ID NO: 38473 - DNA, 201 bp, Homo sapiens
gtactggccatgtaacaacttctgtggggttcaaagggcagagtctcagtagagatgggttcctaatgtcatcgtttatttctcatggctgccagtaatawacacgaaagaagaactaaatatagtgagttatgtactcaccagctcatggtattatcctgaacttgccgcactgagaggaaattctgtagctctgtttag

SEQ ID NO: 38474 - DNA, 201 bp, Homo sapiens
gttcagtggcacaatcacagctcattgcagcctcaacctcctgggctcaagtgatcctcctggcttggcttcccaaaatgctgtaattgtgctattttttwaaaaaattaagttattgctctgactactcagcatcagaaacctccgaggaagggttacatgttgcagatacactcagatacaagtatgctgcttgccaaa

SEQ ID NO: 38475 - DNA, 201 bp, Homo sapiens
tcagatggtgacctccccaggcctaatttctgccccagcgcagccgctccctctgtaacactgattgagtgctagcactgccttgtcaagcatctgctgtrgccacagacacataattatggccctgccttcaccttgccggccacttcctttctatcacctgggactcaccccaaggcctctttcatgaagctctctgat

SEQ ID NO: 38476 - DNA, 201 bp, Homo sapiens
catcagggtggaatgagagtcatagttgtgggacctggggtgttgttcctctcaggtcagtggaaattcaggttctcctttgatctcatacagattaatgragaattgagaactagttgttagcaaactctcttcagattaagtaagtaagcttctttaatattaattcttcacctagcaaatgtttgttgagtacccgct

SEQ ID NO: 38477 - DNA, 201 bp, Homo sapiens
tccatatgccaaatattaagtgtttatccccaaatgactatgtgatgggtgatgattgttttctgctttacgtttgtgttctgatttttctataatgatayattataagtatctataatgctacaaaagaaagaaaaagtgaaaccccccaaaatctttgccttagaaatgaagattgggtatctgtttcacattaaatga

SEQ ID NO: 38478 - DNA, 201 bp, Homo sapiens
gagaatgaagcaagctccaggccaggagaggcgacttgtgtacaaatacagaagaaagcactttctggatcaaggactgtcacctgcttcctattaatggrggaaaggaggggagtgcagtgtgtgtgtgtgtgtgtatgtgtgtatgcatgcgctgggctggttgtttttgtaaacacgtgaaaaactggaatgccgtca

SEQ ID NO: 38479 - DNA, 201 bp, Homo sapiens
ttagaggcaaaaattgaggctttcacaagtgattttttcatatgacataggctcaatcatgcctcttttagtggacttttccaaaaagtaggactgatttscccacaggcactagcttataaatgccaagtccagccagcactgctgcatgggagatacagagattgtccactgctgcacttaatgccctgtaagctagaa

SEQ ID NO: 38480 - DNA, 201 bp, Homo sapiens
ggcccaggacagctttgaatgtggcccagcacaaatctgtaaactttcttaaaacaatatgggatgtgtgtgtgtgtgtgtgtgtgtgtgtgtgtgtgtgkttgttttgttttagctcatcagctatcactagcattagtgtattttatgtgtggcccaaaacaattcttcttcttccaatatggcccagggaagccaaaa

SEQ ID NO: 38481 - DNA, 201 bp, Homo sapiens
atagctcaagcaaaggcccagaggtaggaccatgaaaggtgtgcatagagaatgatgcattccttgtttgggtgaggcttctggtgtccacaggtgaataraaaagggggtttctggagaaggggctgggaccagaagttatgtcaggagtcacggtgaccctttgaatcagtcacctgcccacctccctcaactctgcag

SEQ ID NO: 38482 - DNA, 201 bp, Homo sapiens
ccatacagtatcagtgctccaaaggcgggaccgtgatacctaatgtatggaaggcacttcagtgaatgtttgttgaatgaaagaaaaggcaagccagacayggtggcttacacctgtaatcccagcactttgggagcctgaggcaggcggatcacttgaggtcaggagttcaagaccagccagcatgacgaaaccccatct

SEQ ID NO: 38483 - DNA, 201 bp, Homo sapiens
tttcaccatgttggccaggctggtctcatactcctgacctcaggtgatcctcccgcctcggcctcctcggattacaggcatgagccaccacgcccggccargaagcaaattaataggagaaaaggcatacagatttattcgatcatagttttatgtgacacgggagccttcagaatgaagacccaaccaatggggtgcaga

SEQ ID NO: 38484 - DNA, 201 bp, Homo sapiens
tttctttctttttttttttttgagacagggtctcactctgtcacccaggctggagtgcagtggcacaatctcattgcaacctctgcccccaggttcaagaytccttcaacctcagcctcctcaagtagctgggactacaggcacatgccaccatgcccaggtaatttttgtattgtttggtagagacggggtttcaccatg

SEQ ID NO: 38485 - DNA, 201 bp, Homo sapiens
gcactttgtttccataacccatggtgctctgctagtgctcggctctgtcaggtctttgtcctgtctcgtgtttgtgtgggagcgcggggcctttgtttgcyatgaaacaaaggtgttttggttctggagaggagaatgcaggtctcctggggccctgactgacatggggtatcctcgaatagccatgccaggttttggggt

SEQ ID NO: 38486 - DNA, 201 bp, Homo sapiens
gcttttatgtaagatgcactttgtttccataacccatggtgctctgctagtgctcggctctgtcaggtctttgtcctgtctcgtgtttgtgtgggagcgcrgggcctttgtttgccatgaaacaaaggtgttttggttctggagaggagaatgcaggtctcctggggccctgactgacatggggtatcctcgaatagccat

SEQ ID NO: 38487 - DNA, 201 bp, Homo sapiens
tcttattttgtgttttttcccccaatatttgatccacggttggttgaattaacagatgcggaatccgtggatatggagggctgaccgcacgcagtttttgygggttggagaagacaaatggcagtgaattgtctgtaaggaagtggcagaaatgtaacaggcaacctgctaaaagaatatgtagctaaattttaaaactgt

SEQ ID NO: 38488 - DNA, 201 bp, Homo sapiens
tttgcttttatgtaagatgcactttgtttccataacccatggtgctctgctagtgctcggctctgtcaggtctttgtcctgtctcgtgtttgtgtgggagygcggggcctttgtttgccatgaaacaaaggtgttttggttctggagaggagaatgcaggtctcctggggccctgactgacatggggtatcctcgaatagc

SEQ ID NO: 38489 - DNA, 201 bp, Homo sapiens
tatgccaaatattaagtgtttatccccaaatgactatgtgatgggtgatgattgttttctgctttacgtttgtgttctgatttttctataatgatacattrtaagtatctataatgctacaaaagaaagaaaaagtgaaaccccccaaaatctttgccttagaaatgaagattgggtatctgtttcacattaaatgagtca

SEQ ID NO: 38490 - DNA, 201 bp, Homo sapiens
gtacctctcatcagtggttctccaggtgtcggttacggactggcagtctcagcatcacctgcaaacttgttagaaatgcagattcttgggcctcacctcakacttactgcatcagaagtgccaggatccaggcccagccacctgtgtttcagcaagccctgatgcagctacaccactgctatacgtgaatgccaatcactt

SEQ ID NO: 38491 - DNA, 201 bp, Homo sapiens
agcctggccaacatggtgaaaccccgtctctactaaaaatacaaaaattagctgggcatggtagtgggttcctgtaatcccagctattcaggaggctgagrcaggagaatcatttgaacctgggagacagaggttgcagtgagctgagatcgctccactgcactccagcctgggcaataggtctccaaaaaaaaaaaaaag

SEQ ID NO: 38492 - DNA, 201 bp, Homo sapiens
aggaaaagcctgacagtgcccaaagcaccatttatttaccaaatgcttatgttttgtttcctccttttcctcttgtttccctgctttcttctcttcccttrttctcttttacctctttccctttctcagcttcttcctcctgctgagaaggcacagcccaaaaagttgacaccagtgcaggttttggaatatggagaagct

SEQ ID NO: 38493 - DNA, 201 bp, Homo sapiens
cttatacagttatctctgtcctgtagtaagtaatacaatactgtgaaagccagaggagggaaagatggatttagccttgggagctatagggagataaagarggagaggatgttgctttgtataaccatcgatgactcacatacacgtctcaagagttcaatggaatcagtgaattttaacaggtctttaatgaaaaaaatc

SEQ ID NO: 38494 - DNA, 201 bp, Homo sapiens
tgttgggtgactgtttcctgtgagcatggaattatggccaggggttgtaattgcttataacaaattgacagggaggaaaatgtgactgtttgcctggtacrttgatgtaagggagtctttccagtgctgctgtaagatatacagtgctgagtcttctgggcttgggcctttgtttctctcccttttttttttttcaagatg

SEQ ID NO: 38495 - DNA, 201 bp, Homo sapiens
tttgtccagagcagttccggtttaccttctttgttccagtgaatgatcaatcacaccctctttcattttcaaaagtgtcccagtttaggtgatgaattatrtattatccaacagataggtagttacttttatcagtttcttgcgtatccttccaagatttctatatgcagatacatacatggggaatgtgtataatatata

SEQ ID NO: 38496 - DNA, 201 bp, Homo sapiens
cagttggggcagatccagtgttgggtgactgtttcctgtgagcatggaattatggccaggggttgtaattgcttataacaaattgacagggaggaaaatgkgactgtttgcctggtacattgatgtaagggagtctttccagtgctgctgtaagatatacagtgctgagtcttctgggcttgggcctttgtttctctccct

SEQ ID NO: 38497 - DNA, 201 bp, Homo sapiens
ggcaggcaccggtaatcccagcgactcgggaggctgaggcaggagagtcgattgaacccgggaggtggaggttgcggtgagccgagatcacgccactgcaytccagcctgggtgacagagctagactccatgtcaaaaaaaaaaaaaaaaaaaaaggaaaaagctgcatgattgggggccccaagtcccaccccctctctg

SEQ ID NO: 38498 - DNA, 201 bp, Homo sapiens
ggggcctgttctgaaatctctagtgctgtgcagtgtagttaggtcagcaccaggcccaatgtgacccacggccttggatatccttctagctttgaatttcrcagctcagtcccattgaagaaaaatgctagatgtttccctggtctattcccgtctaccttcagctgaacttagaatttagaagccactcttgttttgggg

SEQ ID NO: 38499 - DNA, 201 bp, Homo sapiens
cttacgaagggatgtgtaggacatttgaagcatgataatatcaaggttgttttcacctaagggcaggatttatgtacagtctcttagacaaagaagaaccratacactggaaatcttagaggccttccatgaacagtggttaatcagaagtcaatgtgatggattaacattcaagatggagttgtctagcctgcacaggat

SEQ ID NO: 38500 - DNA, 201 bp, Homo sapiens
tattatgccgctgttaaaatggtcattaggagaaaagcagctacatgggaaatatttgttttaatcactggtggaaagagcagtgtaaaaatggtggattmttttaattccaagtttgggctgggctaccagtcactgggggaagtgctttacctgtgtgatattgttacattctcctggaaaaccctcacaggtggggcg

SEQ ID NO: 38501 - DNA, 201 bp, Homo sapiens
ctctagtgctgtgcagtgtagttaggtcagcaccaggcccaatgtgacccacggccttggatatccttctagctttgaatttcgcagctcagtcccattgragaaaaatgctagatgtttccctggtctattcccgtctaccttcagctgaacttagaatttagaagccactcttgttttggggagttcaagcatcttccc

SEQ ID NO: 38502 - DNA, 201 bp, Homo sapiens
tctagcctgcacaggatgacaatagggaaattcattgtctttcaaacaggagtggtttcatgtggactgcaatgtgaatcatgccccctggagttgtgcartggggccattcttaatccagacactgggcgggtttgggattgattgtttcagtggcttggtgatgtcaacaagaccccagcttcttctcatctctgtcat

SEQ ID NO: 38503 - DNA, 201 bp, Homo sapiens
aggggcactgagcctctggcctggtactgatggttgtgaacaacacagccctttccccttctttcctgagttttcacaccacatgggtatgaagacaaatygcttaccatctgtctgggagggaggctttgaatcagaaaactctcaggatgaaaagaggtgcgtgggtccccttgcttagggcttctcagtctatgtgcg

SEQ ID NO: 38504 - DNA, 201 bp, Homo sapiens
agacgactgatacatgtggccactgtggcagcaatgagtggaaagtctgcacaccttgctgtgagccccagttctgctgcttttgagctgtgtgacctccrgcaagtcgcttagccttttagggcagtttctgcacatgtgaaatggggctctggctcgcagtttggtgggcagagggagcctggccagctgcacaaggcc

SEQ ID NO: 38505 - DNA, 201 bp, Homo sapiens
agtggaaagtctgcacaccttgctgtgagccccagttctgctgcttttgagctgtgtgacctccagcaagtcgcttagccttttagggcagtttctgcacrtgtgaaatggggctctggctcgcagtttggtgggcagagggagcctggccagctgcacaaggccttgcaaaggtgaaggagtagcaggtgtaaaccacag

SEQ ID NO: 38506 - DNA, 201 bp, Homo sapiens
cggggatgtggcagagcatggcagagcaggctgagggcaaaagtctggctttgacttctcaaagagaaaccgtctttgcctgaaaagcccctctctagctstggatgtttggagaacctcccttggtgctttgcctggcctgtgcaccagggagtattgtatggggaccgatgtcctccacagatgccccagggcaggtaa

SEQ ID NO: 38507 - DNA, 201 bp, Homo sapiens
ttgcctggcctgtgcaccagggagtattgtatggggaccgatgtcctccacagatgccccagggcaggtaacatgtacagggtgggcagagataagtgctsggttctcagtacagacctgtgggaaggtctgagactcgggaagctctggctaagctgggaggagggagttgaaggaatgtgttgagggtggaccacaggt

SEQ ID NO: 38508 - DNA, 201 bp, Homo sapiens
ggaccgatgtcctccacagatgccccagggcaggtaacatgtacagggtgggcagagataagtgctgggttctcagtacagacctgtgggaaggtctgagrctcgggaagctctggctaagctgggaggagggagttgaaggaatgtgttgagggtggaccacaggtgtgttggggtattcacaggggaggacctttccaa

SEQ ID NO: 38509 - DNA, 201 bp, Homo sapiens
ctcaaaacaacaacaaaaaaaccatgcagctgttacacgttctcccacctgccctaggatttctcttaccttcgccctcaaacgctttctctttggaaaartcacttgggtgcagtttgttgaaactggtcagcaaattattcttcccatagctctggcataagtctcattagaaatggttttatgaagcaaccgtaaaag

SEQ ID NO: 38510 - DNA, 201 bp, Homo sapiens
acaaattactccaccttacagggcttcagttgccttatttgtaaattggagatgaccataacagagttgttgagattaaatgagctctttcttcttcttctttttttttttttttttttgagatggagtctcactctgtcacccaggctggagtacagtggtatgatctcggctcgctgcaacctctgcctcctgggttca

SEQ ID NO: 38511 - DNA, 201 bp, Homo sapiens
atgaaagaaccaacatacttaggggagaatgagatgttgtgtacttaagctgtgttcttttccagtggtttgattttaaagtttatttgctgacatagtamgaaatttggtccaaaagagagtctgggagtctaaacctcaaatgcttcagaggtcaggcaggtagcacgagatgaagggtaagagattgaagaccaaact

SEQ ID NO: 38512 - DNA, 201 bp, Homo sapiens
caaattactccaccttacagggcttcagttgccttatttgtaaattggagatgaccataacagagttgttgagattaaatgagctctttcttcttcttctttttttttttttttttttgagatggagtctcactctgtcacccaggctggagtacagtggtatgatctcggctcgctgcaacctctgcctcctgggttcaa

SEQ ID NO: 38513 - DNA, 201 bp, Homo sapiens
agcggggagatctcggggaggaagcgattctctgattctcttgttgacctagtgagtaaataaactctctgtagtatacagaaatgacagagactaggattttttttttttttttttttttttttttttttttgtgagagagttgggtttaagtgagcaagtgggtctgaaagccctgtacaaatgttaggacttttacct

SEQ ID NO: 38514 - DNA, 201 bp, Homo sapiens
tcttaattattgcaaagtctcctgagggaataactttactccacttctggaattctagttttgtcatcctaaaaaatgcctccctccctgccccccccccyttttttttttttttttttttttgcctagactgtcccagggcatagtgtggcaataatcctgtctctccaagccagcttacccctactagaaacagagggg

SEQ ID NO: 38515 - DNA, 201 bp, Homo sapiens
cttaattattgcaaagtctcctgagggaataactttactccacttctggaattctagttttgtcatcctaaaaaatgcctccctccctgcccccccccccttttttttttttttttttttttgcctagactgtcccagggcatagtgtggcaataatcctgtctctccaagccagcttacccctactagaaacagaggggc

SEQ ID NO: 38516 - DNA, 201 bp, Homo sapiens
agacaccacactggcataatgggagccacgctaatacccctgcagtcagctggctgcatgcacattgtaccatctaagtccagaggacagtgaggactcagggttgagatcctaacgagttatgccagggcttcttggtcttactatgtgctgtataaatcttacttacactgtgtgttcttttatcacagaacagcaaaa

SEQ ID NO: 38517 - DNA, 201 bp, Homo sapiens
tgagatgaaagaaccaacatacttaggggagaatgagatgttgtgtacttaagctgtgttcttttccagtggtttgattttaaagtttatttgctgacatmgtaagaaatttggtccaaaagagagtctgggagtctaaacctcaaatgcttcagaggtcaggcaggtagcacgagatgaagggtaagagattgaagacca

SEQ ID NO: 38518 - DNA, 201 bp, Homo sapiens
gaagtctccctcttatacagttatctctgtcctgtagtaagtaatacaatactgtgaaagccagaggagggaaagatggatttagccttgggagctatagrgagataaagaaggagaggatgttgctttgtataaccatcgatgactcacatacacgtctcaagagttcaatggaatcagtgaattttaacaggtctttaa

SEQ ID NO: 38519 - DNA, 201 bp, Homo sapiens
ttgattataccagtttagggaccacattttgagaatcactgccctagaggttgactgtggactagaaaaagtagagaccaacacatcccaggtgcaccacrctgtgtcaatgcacttcaatcccattcggtaggacttgggtgaccacaggttctgtgtaagaccctatgggaggcagaaagaactcagtctgtgcccttg

SEQ ID NO: 38520 - DNA, 201 bp, Homo sapiens
atgttaattgcaagggaaagatagcccttgagccctcaacattccagctcctcctcaaaaaggcccttctcagaaggctctgggcatggtttgtcctcacygacagtcctgcctgcttgtaggtagaagaagatgggaacaggtgaaggcactacggctgcacacttacacatgtacatgatacatgcaaacagaaatgca

SEQ ID NO: 38521 - DNA, 201 bp, Homo sapiens
cacttgggaggctgaggtgggaggatcacttgaccccaaaagttcaagactgcaatgagctatgaacacatcactccaccatggatggcagagtgagatcytgtctcaaatttaaagaaatttgaggctgtctcaaattaaaagaaaaaggaaagctggggaagagaaggagactctaaaatgatggagagaaagaaaatc

SEQ ID NO: 38522 - DNA, 201 bp, Homo sapiens
aatctgggtcagaggtctgttttggtcacctcaatctgctgcttgacccaaagcaatatttgcctatttgcctcccctcagcattgtcctctgtaggccartttagttctccaaacagcatctgtcatcctggcctcccttaggcttgctttggcttcttgcggctggtaaatagacatgaccccattatgtcctgtgctc

SEQ ID NO: 38523 - DNA, 201 bp, Homo sapiens
gcatatcctaaggccttctaaaaattgtgcctaggggaagagttggctgcctagaaggggcatcatcctttctgaaatgggcaagaacatattagagtaakagatacaggaagcacaaaaatgacctggtgccatagacttcactagcagaagcctatagcaggtttaataggcctgaggtgggtaggaggaattggccag

SEQ ID NO: 38524 - DNA, 201 bp, Homo sapiens
aaagcaacattgtttgatttttcaaagaagcctttaaaaatagaaatagatgactttttccttactctaagagagaatatttcttctaatcccaggtagcrttattcttagggtttttttttaatatttatattctctgtcattccctttaactcagcttcatttcacccagtgaagaagtcattcagtaaaaaagtaagt

SEQ ID NO: 38525 - DNA, 201 bp, Homo sapiens
tccatggtttttggcttatatggttaaactacagggctgagggacttactaaggtgagattcaagtactagattgggagctttaccccattcgatgtccayttccactgattatgtttaactccagccagaacacaaggggccttgagtaagaactgtggcagtttcaagcatcactccattcccgtggctacagaaacag

SEQ ID NO: 38526 - DNA, 201 bp, Homo sapiens
aggagaaaagcagctacatgggaaatatttgttttaatcactggtggaaagagcagtgtaaaaatggtggattcttttaattccaagtttgggctgggctrccagtcactgggggaagtgctttacctgtgtgatattgttacattctcctggaaaaccctcacaggtggggcgtggtttgccaccctcattacacagatg

SEQ ID NO: 38527 - DNA, 201 bp, Homo sapiens
atgggacaattcttgcctaccacatgggaggtgtagtttatctagtggtttagcaattgatatattagaagttacataagaaggtgagcagttgtctcctraataacactggctcatagattcttaaaagttttgtgtctttatccatggtttttggcttatatggttaaactacagggctgagggacttactaaggtgag

SEQ ID NO: 38528 - DNA, 201 bp, Homo sapiens
tgacctagaaggttttatgggacaattcttgcctaccacatgggaggtgtagtttatctagtggtttagcaattgatatattagaagttacataagaaggygagcagttgtctcctaaataacactggctcatagattcttaaaagttttgtgtctttatccatggtttttggcttatatggttaaactacagggctgagg

SEQ ID NO: 38529 - DNA, 201 bp, Homo sapiens
cttgacctcctgggctcaagtgatcctcctgcctcagcctcctgagtagctaggactacaggcaccaccatgtccagctaatttttaaagttttttggtasagatggggtttcactacattgcctaggctggtctctaactcctgccctcaaacaatcctccctcctcaacttctcaaagtgctaggattacaggcatgag

SEQ ID NO: 38530 - DNA, 201 bp, Homo sapiens
aagtgctgggttctcagtacagacctgtgggaaggtctgagactcgggaagctctggctaagctgggaggagggagttgaaggaatgtgttgagggtggaycacaggtgtgttggggtattcacaggggaggacctttccaagtgctgccaatacaactctctgatcatggtggctctggagagaaggtgacttgactttt

SEQ ID NO: 38531 - DNA, 201 bp, Homo sapiens
gttgttgaggctagagtgcagtggtgcagtcatggctcacttcatcctcaacctcccaggctcaggtgattctcccacctcagcctctcgatgccagtagytgggaccacaggcgtgtgccaccacacctggataattttaaaatattttttgtagagacggggttttaccatgttgcctaggctagtcctgatcccctgg

SEQ ID NO: 38532 - DNA, 201 bp, Homo sapiens
tctttaccccagcagagcacatctacaactttgtagggttttgagtctgtagtgagatattttagattagtttctccctttcattcttcctgcctccctcmgtttattgaacaccttctaaacatttgttgagcaacttctgcatggcaagctgagctaggggctgaggtttcaaagacaaaatcattgctctcaaggagt

SEQ ID NO: 38533 - DNA, 201 bp, Homo sapiens
tctgagaatcggcctttgtcaccctgcattctcattgctggctcacttggtttttctgcccactagactgtaagctccctgaaggctaagattctggaatrctcaccttcatgtccacaaggcagagcacaatgtctgcccaataaataaatgtcatagcttggaagccagattctattaagtaattttataatcttaggt

SEQ ID NO: 38534 - DNA, 201 bp, Homo sapiens
caactggagaagccggggatagggtaggcatcaaacctgctggtgctgagaaccacccctccatgctttcctgctggctctgccaaaccaccagatgcccrgtcattccctactccacgtccccaaaggccaggcccccctgcaccccccaccaggactggttccctcaccagaaggcctttttctgcgtttcctggctga

SEQ ID NO: 38535 - DNA, 201 bp, Homo sapiens
gattacaaagctgtgtgataagtactaacaggtaagtacagggtcctctgggagaggtaggaaggaacacctggttgtgtctggtgggaggaggtgacacytgagctggagctgggatgaagggaaatgcagcaggtgaaccagcgtcttggaaggcattctatgcagagggtggtaacagcgttcattcttggaataaaa

SEQ ID NO: 38536 - DNA, 201 bp, Homo sapiens
tggaagctcatttaaagtcactgtggttgaaaaggcaattatgtggctcctggcagttgtaggagagtggctgtccccaaatcgagctaccaaggacagaytgccaaagcccaagaagaatcattgtgtaaacattagagctcagctggaccttcagaggcctaagtgagttgtttaccctgtgtaaatcccatgcagtgt

SEQ ID NO: 38537 - DNA, 201 bp, Homo sapiens
ctggttttagtataaaagtatttaagttgctttactgttgaatacaattgacgttctacgaaaatgtgtttattgtgggccctcatttgtaccagccctcygtaaatatgcatatcagtctcataccccaactggagaagccggggatagggtaggcatcaaacctgctggtgctgagaaccacccctccatgctttcctg

SEQ ID NO: 38538 - DNA, 201 bp, Homo sapiens
ttcttctgactctaattagttacagagaggattgactcttgatgctcagtggtcagcaagtactttagtatctaaagtgggccttgcaaacaagaagtcaycttgtcacattaggtttgtattctctgtaatatatgtgtactggttttagtataaaagtatttaagttgctttactgttgaatacaattgacgttctacg

SEQ ID NO: 38539 - DNA, 201 bp, Homo sapiens
tacagttaacctttttaggggctgggcctggggttctgcatttatcaagcactccaggtgattcttaaacatcttagagttttgggacctctgggctacargatttcaacctgcaatcttttcctccctaatctcctcagctgtatgtctacaggaactggacaataaaatgttagctttttgaatgttttatcgttgcag

SEQ ID NO: 38540 - DNA, 201 bp, Homo sapiens
caccgacagttgctggtgtaaagttcccggattctttgatggatggatgctgtaccgctttatgattttcttctgactctaattagttacagagaggattsactcttgatgctcagtggtcagcaagtactttagtatctaaagtgggccttgcaaacaagaagtcatcttgtcacattaggtttgtattctctgtaatat

SEQ ID NO: 38541 - DNA, 201 bp, Homo sapiens
ctgtttttgatattccttaaggaagaaaagccttgttaacaggcacctgaatgtggctgtcagaatctgtttaagagctgaatcatgacagcaaacactcwtctcagcctttcatctctggctttggagtatatgactggcttcccttttctgagtcattctctcttggcctcctacattctgaagaggtcatttgcattg

SEQ ID NO: 38542 - DNA, 201 bp, Homo sapiens
caggtggcacagaaaagatacaggtgtgagagcggaataaaacaggaagttggggtggagaggaaagctagtgacaagtagggttgtagggagaaggagaragcaaagacaggcttgcatggaacgagataaatgtgcatgagcaggcttgtgagcagagttagaaaacagcacaatttgaggtggaaccagtttgtagta

SEQ ID NO: 38543 - DNA, 201 bp, Homo sapiens
gtaaggggttaggggtgctgatagtggaggtggggctcttctcagtgactgcggtactgcttagaataggggctggcgggctatggcctagagagtatatstaggaagaattagcatcgttgttttctctgtttcctcaggctgagctaacctaactggctgtagcaggacccagacccttttggaaaagaatgagatgct

SEQ ID NO: 38544 - DNA, 201 bp, Homo sapiens
ctgcaactgcctttgatgttgagaaacgacaacgacaaaaacaagcaagaaacaaggcagcaacataggctttaggagacagacgtatcaacaggctgggygtggtgactcatgcctgtaattcctgcactttgggaagccaagatgggaggatcgattaaggccaggagttcgagaccagcttgggcaacatagtatgac

SEQ ID NO: 38545 - DNA, 201 bp, Homo sapiens
tgatgttgagaagctgttgcctaagaaccattctcaggatgacccctttatatcattcaggtgtgagtgaaatggattttggacaagggctgggccaggcrcagcactgtgttctgacccgttacgaagaggtaaaccttgacaactggtatcctagaccttaaaaattaaaaattttcgtctgggtcttggttcactcct

SEQ ID NO: 38546 - DNA, 201 bp, Homo sapiens
gaattaagaacactgttctctggccgggcgcggtggctcaagcctgtaatcccaggactttgggaggctgaggcgggtggatcacctgaagttaggagttygagaccagcctgaccaatgtggagaaaccccatctctactaaaaatacaaaattagctgggcgtggtgccacatgcctgtaatcccagctacttggaggc

SEQ ID NO: 38547 - DNA, 201 bp, Homo sapiens
gatgaaggctttggactgtggagccagagttctttcttagggatgaatgccagtgccaccatcttgatgcttctctactctaatctgctcagcagaccatccctctcagcccttctcatcattggtaaagttgttcattcaatcattcaccaaactcttactgatcagtcatatatgagatgacacactgggatgtgttgg

SEQ ID NO: 38548 - DNA, 201 bp, Homo sapiens
cagaatcctcaccctctcagtcaccgcataaccttatacaagagaatttgtttatttcggagaatcagcccacacacaggtttgaagcaagtccaaaaggracatttgccactgtgtgaaacttgtctcatcttgctgctcttcgatgagaactggtccactacttcgccctgacccccgaagttgccaatatcatttgtg

SEQ ID NO: 38549 - DNA, 201 bp, Homo sapiens
gacaccacactggcataatgggagccacgctaatacccctgcagtcagctggctgcatgcacattgtaccatctaagtccagaggacagtgaggactcagggttgagatcctaacgagttatgccagggcttcttggtcttactatgtgctgtataaatcttacttacactgtgtgttcttttatcacagaacagcaaaaa

SEQ ID NO: 38550 - DNA, 201 bp, Homo sapiens
ctttgatgtctggagtagggtggaggcagctactctgctctcttgggtccctgaggacttaatatggccgctggcagtcaccatttctcggggctatggtktatggtgcagaaggtacctctctcatagggtgcgttaggccaaatttggatagacctatccacactggtgaactccttcattcttgaggctaactcagct

SEQ ID NO: 38551 - DNA, 201 bp, Homo sapiens
caccacactggcataatgggagccacgctaatacccctgcagtcagctggctgcatgcacattgtaccatctaagtccagaggacagtgaggactcagggttgagatcctaacgagttatgccagggcttcttggtcttactatgtgctgtataaatcttacttacactgtgtgttcttttatcacagaacagcaaaaacg

SEQ ID NO: 38552 - DNA, 201 bp, Homo sapiens
tgcttgtccaatgagcttatatgtgtgccttgaaaactgagtttaaggaataggttatttactatttctgggttgatgttctaatctggactcaaaaaactttttttttttttttgacagtcttgctctgtcacctaggctggagtgcagaggtgccatcacagcttactgcagccttgacctcctgggctcaagcaatct

SEQ ID NO: 38553 - DNA, 201 bp, Homo sapiens
accacactggcataatgggagccacgctaatacccctgcagtcagctggctgcatgcacattgtaccatctaagtccagaggacagtgaggactcagggttgagatcctaacgagttatgccagggcttcttggtcttactatgtgctgtataaatcttacttacactgtgtgttcttttatcacagaacagcaaaaacga

SEQ ID NO: 38554 - DNA, 201 bp, Homo sapiens
agagaggggaaaaggcagacgtcgtatgcattttaagttcttgggtacatctgttagttgtttattatttgccagtcactttgttagacaatcccaagagrttgacaaaccacttccttttgtgtccagggaaattgaggctgagaagtgcaacaattggtgtaaacttatgtagtgaagctattggcaggcttgctgacc

SEQ ID NO: 38555 - DNA, 201 bp, Homo sapiens
gactgagtccagtgtgggggcagttgtgagagcgtgtgtccagaacgccacagaaaaccttgccggcacacagtgggccctcagcaatacctggaaaacarcgatgatgaaggctttggactgtggagccagagttctttcttagggatgaatgccagtgccaccatcttgatgcttctctactctaatctgctcagcaga

SEQ ID NO: 38556 - DNA, 201 bp, Homo sapiens
ggcctgagaaatgcataaaattgaaatttaattgatataggcaagtggttatgcaaatgatttttgcccatcctcccattttagtcaggcaattttttagaacaactttcaaccagtactttcttcagttgtctttgagatttttataaattaaagaaaaagaaacaggaaaaaaaagtgatttggaagctcatttaaagt

SEQ ID NO: 38557 - DNA, 201 bp, Homo sapiens
tttatcctataattccactttgtggaatctgtcctacagatatacctgcatatgtgaaaaaagatgtatgtccatttctgacagcattgtttgtggtagcraaagactggaaaacctaaatgtccatcagtatagtgtcttcatgcaatcaaagactgtgcagccacagaaagaaatgaggcagctttttaagtactgaca

SEQ ID NO: 38558 - DNA, 201 bp, Homo sapiens
gcctgagaaatgcataaaattgaaatttaattgatataggcaagtggttatgcaaatgatttttgcccatcctcccattttagtcaggcaattttttagaacaactttcaaccagtactttcttcagttgtctttgagatttttataaattaaagaaaaagaaacaggaaaaaaaagtgatttggaagctcatttaaagtc

SEQ ID NO: 38559 - DNA, 201 bp, Homo sapiens
cctgttctcagttttcatgagttttaagtcttttgtctgcactgtctttctccagcaaaatctcccctttctgtgcctcgctcaaaaagtgagatgagctrcattgatggtgagaaggtagtcaagaggtcggccacactacccctcccagcccgctcttcctcactgaagtcaagctcagaaaggtaagtgcccgcttgt

SEQ ID NO: 38560 - DNA, 201 bp, Homo sapiens
cctgagaaatgcataaaattgaaatttaattgatataggcaagtggttatgcaaatgatttttgcccatcctcccattttagtcaggcaattttttagaacaactttcaaccagtactttcttcagttgtctttgagatttttataaattaaagaaaaagaaacaggaaaaaaaagtgatttggaagctcatttaaagtca

SEQ ID NO: 38561 - DNA, 201 bp, Homo sapiens
cagcctcaaactcctagactcaagcaatcctcccacctcagcctcccaagtagctgggactgcaggtgtgtgctgccatgcatggctaattttttaaaaawttttttgtagagatgggatctcgctatgttgcccaggctggtcttgggtttctggcctcaagcaatcttcccgccccagcctcccaaagcactggggtta

SEQ ID NO: 38562 - DNA, 201 bp, Homo sapiens
gtccaaccagtcaacacattactcttccttttgttctgacataagtggtataaaatgaggtaatagatgcattttggaaaaagtaatggcactatacaaaygcaagaaatgttattgataggcttttatggcttagatgagtctgacttgaactttcagcatcatatactccattagtcgagaacattgcagtgacctttt

SEQ ID NO: 38563 - DNA, 201 bp, Homo sapiens
gtggctgagttttgaattcagatattgttactttccattttgattttgaaatcataggaggtctgaaatgtgtcaagatagtcatttaattttgctctttrcctttgtttttctacagaacactgagagatcaaaagactggtacaagactatgtttaaacagatccacaaactgaacagaggtactgattttcatttgta

SEQ ID NO: 38564 - DNA, 201 bp, Homo sapiens
taactcactaatgatgagtgtccatcaggccatagagcagattcatttctatagctctttgttaaccatttcctgccacaagatataagattcccatgtakgtaggccagggctgctatgatgaaggaaggtgaaattccattttagtaatataagccctagtctctgacctagaaggttttatgggacaattcttgccta

SEQ ID NO: 38565 - DNA, 201 bp, Homo sapiens
ctactcaggaggcttaggcaggagagtcacttgaacccggaaggtagaggttgcagtgagccgagatcacgccattgcactccagcctgggtaacaagagygaaactccatctcaaaaaaaaaaaacaaacaaaaaaagagatgcctttcttcttgtgttcagctttctacttctgttgatattgctggttcccttgtctg

SEQ ID NO: 38566 - DNA, 201 bp, Homo sapiens
acctgggagatgcaggttgcagtgagccgagatggcgccattacacaccagcccaggtgacagtgcgagactccgtctcaaaaaaaaaaaaatgaaaccaytatacctctccccatctccaggcacaattgaacagtactcagtaagaaacttgcacctgtccatggaaagaaacaagaggaagcatttgatgtatagtta

SEQ ID NO: 38567 - DNA, 201 bp, Homo sapiens
tcctgccctcaaacaatcctccctcctcaacttctcaaagtgctaggattacaggcatgagccaccgtgcctgcgcttgttcctttttattttattactgttttttttttttttacgcccgcttggagacttccctcctataggcctccattctgtctcctttgttcttgcccattgacctctaggcctgtggcatgactc

SEQ ID NO: 38568 - DNA, 201 bp, Homo sapiens; identical to SEQ ID NO: 5868

SEQ ID NO: 38569 - DNA, 201 bp, Homo sapiens; identical to SEQ ID NO: 5910

SEQ ID NO: 38570 - DNA, 201 bp, Homo sapiens
ggtgggaggatctcttgagcctgggaggttgagcctgcagtgagccaagatcacagtactataccactccagcctgggcaacagagcaagactccaactcaaaaaaaaaaaaaaaaaaaaaaaggaaagaaaagaactatgcatgacacataagtagtaataattcagtaaattctggttactattattgagactgagaag

SEQ ID NO: 38571 - DNA, 201 bp, Homo sapiens; identical to SEQ ID NO: 5869

SEQ ID NO: 38572 - DNA, 201 bp, Homo sapiens
tgactgtttgcctggtacattgatgtaagggagtctttccagtgctgctgtaagatatacagtgctgagtcttctgggcttgggcctttgtttctctcccttttttttttttcaagatggagtttcactctgccacccaggctggagtacagtggcatgatcttggctcactgtagcctccgcctcctgggttcaagcgat

SEQ ID NO: 38573 - DNA, 201 bp, Homo sapiens
aaacaagagtgggtttgcctctactgatccacattccttgttggagtcaggtgggaatcccagtctccaggactctgtccactgcctccggaacctgcccrttagcacaattggaaacagttggccctaggatgattgctctgttctctcactttactcttccagtgagtgtgtttttgttgaatccccttgaaactcagc

SEQ ID NO: 38574 - DNA, 201 bp, Homo sapiens
aggagcaaggagagagagagaaggggaccgatttcctgagctttctgggttgtgtgatggaagatggtttgggacacgttgagtttaagatgcctgagaarcattcaggtggatgtctagaaggcggttgaatgtatgtgtctggagctcaaaagaagggtctgtgtacataacagatttgcaggtgggtttcttgtacaa

SEQ ID NO: 38575 - DNA, 201 bp, Homo sapiens
aaaaaagatacaaaaggaatatggagctgaggaggccaggaaggtccacaaaccatgacaggaaaagtggaaactgctgatggacccatgccacacttaavcagaaccaagacagatctccagccccagtgacttgggcacaaaagtcatgagagcagcagagactcaaaccagggaaggggtgaagagaccggggatttg

SEQ ID NO: 38576 - DNA, 201 bp, Homo sapiens
tgactggagggcatcagggctggagactgggggagcaatgcgtgtttgttgtacagttgtaggtgagcaatgataaggcgggaggtggagagtaaagggaytaatgtgagctgtgtcaaagatagggaagaagcaggacttggtgactgattaggcttaaggagcaaggagagagagagaaggggaccgatttcctgagct

SEQ ID NO: 38577 - DNA, 201 bp, Homo sapiens
aactttttgtccgttctgttgcctgttgaatcttcacctaggagagcgattgacacttaatagatgctcagtaaatatttgttgaccgaataaatgagcartagaatgacatgatgagatcttttctagacagagatgactggagggcatcagggctggagactgggggagcaatgcgtgtttgttgtacagttgtaggtg

SEQ ID NO: 38578 - DNA, 201 bp, Homo sapiens
taatgcattctgtaacagaggcctgtactgtaaggggttaggggtgctgatagtggaggtggggctcttctcagtgactgcggtactgcttagaatagggrctggcgggctatggcctagagagtatatctaggaagaattagcatcgttgttttctctgtttcctcaggctgagctaacctaactggctgtagcaggacc

SEQ ID NO: 38579 - DNA, 201 bp, Homo sapiens
ccatgttacagataaggcagtaggattagaggggtgaaccactttgcccaaggtctcagtggtagggtgggatttcattttattcagatttctgactccartggcaacaaatagccatgccactatattctgctggctctctgggaatataggaacaacagataatgatttgtctacatgactttattcccaagttaaaca

SEQ ID NO: 38580 - DNA, 201 bp, Homo sapiens
gattttttcatatctggaattggtgaggaaccagcctaaatggggtgcctgacacaaaggaaagcatacagtaaatgtttgctcaatgaatggatggatcygtaaatcttaatcaactgaaatccaacttggttagcactgaggcaggcagcttgtaagttgaacctagtgcctttcactggttggacaggaatgatgtgt

SEQ ID NO: 38581 - DNA, 201 bp, Homo sapiens
agactgtcttggaatctccttgggattgctcctgttgaccctcagattgcaaagtgtcatggaggctgcttagtttcaggaccaactgaggcctttagatycacgggagcatgcagaatgtggacatgtgggaagtcaggtgtgcgggtggtgatgctggctgatgctgaggtgggactcagttctgctgaagtcccggtt

SEQ ID NO: 38582 - DNA, 201 bp, Homo sapiens
catgccactatattctgctggctctctgggaatataggaacaacagataatgatttgtctacatgactttattcccaagttaaacacttacctaaaacgcggctgcggctgccacccctgctgcagctttgcagtactgtgcaagaccttagaggccagtgatgggaggccgttagagctcctctgagtctgaaaccctca

SEQ ID NO: 38583 - DNA, 201 bp, Homo sapiens
gaataaatgagttttttcctcctgctagtctaccatttggggatttttcagtaatcgggcttggttttcccccagtttatccaaatgaataagattttttyatatctggaattggtgaggaaccagcctaaatggggtgcctgacacaaaggaaagcatacagtaaatgtttgctcaatgaatggatggatctgtaaatct

SEQ ID NO: 38584 - DNA, 201 bp, Homo sapiens
ctaatttttgtactttttgtagagacagagttttgcggtgttgcccaggctggtctcaaactcctggactcaagcgatccgcctgcattggccttccagcrtgctggggttataggcttgagccacggtgcccggcctatatgtatctgttaagccccctcttcctctgagagaaatgattctaagatggaatagcgaaac

SEQ ID NO: 38585 - DNA, 201 bp, Homo sapiens
attcccaagttaaacacttacctaaaacgcggctgcggctgccacccctgctgcagctttgcagtactgtgcaagaccttagaggccagtgatgggaggcygttagagctcctctgagtctgaaaccctcatttatagatgaggaaactgaggcccacaaaggagaagagaatgtgccaaggttaggggcagaatgggaat

SEQ ID NO: 38586 - DNA, 201 bp, Homo sapiens
tgctaaagattcttttaaagatcttagaaaaagggatggtaaaggtcactaagaaagttagcagccatttttctacaagctgcaaaggggatgttaactgygttgtaagtaaagtacaagaagagctgctttgtgaagcactagcattaaagacctgcacaccacacatggcaaccccctccctcaggtgttatagcccag

SEQ ID NO: 38587 - DNA, 201 bp, Homo sapiens
ccacatctggtgtaaagattgtgggagggggctgggtgcagtggcttacacctgtaatcccagcactttgggaggctgaggcaagcagatcacctgaggtmaggagtttgagaccagcctggccaacatggtgaaatcctgtctttactaaaaatgcaaaaaatagctgggcatggtcctagctacttgggaggctgaggc

SEQ ID NO: 38588 - DNA, 201 bp, Homo sapiens
gaggggttgggaggtttggccatttttccaaggttgcacaactagcaagatgtggagctggggtgggaactcggggggatagattgtagatcttgtttccrgatgtatctgggtttttttgttttttggtggtggtggttgttttgagacagggtctcacctgtcacccaggctggagtgcagtggcacaatcatggctca

SEQ ID NO: 38589 - DNA, 201 bp, Homo sapiens
tcccaaggcattttattggactaggtgctcccaggtgcctgagcatatgaggatatatgaaatagcaaacttagggaggtcatcctttggcaatggttctyatggggatgtggattttacccctaggagacatttggcagtgtctagagtcatttttggttgtcacaaatcttactggcatataataggtagaggccaagc

SEQ ID NO: 38590 - DNA, 201 bp, Homo sapiens
ccaccttggcatcccagagtgctgggattacaggcatgagcccctgtgtccggctaattgttaaaattctttcatatgagctgaaatcatcctgtaatacrgttttctcatttagaacccatgtcacactagtttttacaccccatgattcatttcgtcattcaaacgtatgtattgagcaccgactgttttaggttcagg

SEQ ID NO: 38591 - DNA, 201 bp, Homo sapiens
tctgtggctattgtagtagagcgagatgttaggccactgcattacccccagcccctggaaaaaagcagaggaatttagagacgatatttctactctgcctrtatgtgggattaaattaatgtattagtgcatgattggggatacatacttgcatttctaccctaaagtattccatttgtgacagttactcactaatttcag

SEQ ID NO: 38592 - DNA, 201 bp, Homo sapiens
acattccaagatgaggcattatttttaatccccattttatagatgaggaaataggcacatcaaagcagtgtaatgccatagttcctcagcaggttcagggyagagccatatccagattaggaacggtgaagctctaggccaagggactagggttggcagtaaactctcatctgccccatactgattcaaaattttgtaata

SEQ ID NO: 38593 - DNA, 201 bp, Homo sapiens
tgtgggtaagtcctagtgactttgagcccatatcaagtatgaggaacttgggccagatgctttccaagcctttctagctccagaatgctctgcgaccttasgaagtttggaaattagcctaacaaatggaatccctttgattggtgataaatttaagatggtacaggagggcagtttggatgaaaaggaacaagctgggtt

SEQ ID NO: 38594 - DNA, 201 bp, Homo sapiens
atacaggtgaacgtttacctatctagaagatgagagttataaaagacctctgtgattgccatgttcctccccctcccccgccaaactgaggaatttgaggrgttgggaggtttggccatttttccaaggttgcacaactagcaagatgtggagctggggtgggaactcggggggatagattgtagatcttgtttccagatg

SEQ ID NO: 38595 - DNA, 201 bp, Homo sapiens
caaggcattttattggactaggtgctcccaggtgcctgagcatatgaggatatatgaaatagcaaacttagggaggtcatcctttggcaatggttctcatkgggatgtggattttacccctaggagacatttggcagtgtctagagtcatttttggttgtcacaaatcttactggcatataataggtagaggccaagcatg

SEQ ID NO: 38596 - DNA, 201 bp, Homo sapiens
cgatgcctttcctagttggagaactactgctgtgggttagagcaataattctcagccttgcctgcacattggatgcgcctgagagaggggggcgctttcaraactatatctgttccccccaactcccctcaaaagttagatcaggatctgtggtggggcctgtgcagaggctgcccaggtgatctgcaggtgcgccaggtc

SEQ ID NO: 38597 - DNA, 201 bp, Homo sapiens
tggcgtttctcttaagtgtgttcttcagagtgctagccctgtaaaatttttctcaaaaagagagttctgttgtagaatgagttgggaaacactgcatgctmtatctatacctcccacccactttgaagagatactttgttgatgacatattaatagctccagaagtctttcaagaaaggaacctgaaacacgatttgggag

SEQ ID NO: 38598 - DNA, 201 bp, Homo sapiens
gctaggcagctcatcaccgacatggacagcaagcaactcctttctccgaattccccgggcatcccctgctaccacctcgctgctttccgatgtggcttccytgatacgtggtagcgccattcaagatagaggggaaagaggcttgaagtcattatgtttccttcatgggggaatgtgctgtcgaattctgcatccccatgc

SEQ ID NO: 38599 - DNA, 201 bp, Homo sapiens
cctgcaagcatgtgtcaggcacagggttggtgaaggaggactgaacttattgatggtagctgtgggtatctgagggtgatggtgctcatctttccctgcarccctctttgctccatattaagcctctttagttcttccatccgggacataaattccagcccccctttttagaaaactccattttgtccgtttctctcttta

SEQ ID NO: 38600 - DNA, 201 bp, Homo sapiens
tcatcagcatcccctggagagggcggcgggaggggcgcaaggacgacgcggttggccggacccgcctgaatgaacggggactagtatgcgccggggacacsgcgcctgcccgtgccgcccgtgccccttcttctccccgagtggctgacagcatcttgctaggcagctcatcaccgacatggacagcaagcaactcctttc

SEQ ID NO: 38601 - DNA, 201 bp, Homo sapiens
ataaattccagcccccctttttagaaaactccattttgtccgtttctctctttaaaaggtggtatccaattagacaatatctatcaaaattacaaagatamccactttatcctataattccactttgtggaatctgtcctacagatatacctgcatatgtgaaaaaagatgtatgtccatttctgacagcattgtttgtgg

SEQ ID NO: 38602 - DNA, 201 bp, Homo sapiens
gcctgaccacagcagggtacagtgtgagtattaccattttttctgtgaaccagatgctgtcctacttttaatgcctttgaagattgtattactctgggcaytgtgggctctgatgaaccttgtggtcaggatggcacccttctctgtttcccatgaatggttgccagggcaggtctcgtggacttcaggaagtttagacct

SEQ ID NO: 38603 - DNA, 201 bp, Homo sapiens
atgttggcccctgtgcatgttatcttaaatcctaacaacaatcccttaagttaggttttattatttatattgtgtggtggggaaactgagacctgggaagktgaagttgactgtggtggattgcacagctcgtcttcgggggtggacccgggacgggggctgcctcgttgaaagtccgtgctgcttctccatgccacgctg

SEQ ID NO: 38604 - DNA, 201 bp, Homo sapiens
aattgaaccctgcgtcattccaccagtaacccttctctagcttgtcatcaagtcattagtgatgccaatgtatacatttactcaccagatgtttattatgygcccattatgtgccaggcactatgccagtgccgaaggtataaaggagtaagacaactgtcctgcctggaaagagatcatcagcttgaaaagagatcatga

SEQ ID NO: 38605 - DNA, 201 bp, Homo sapiens
ccttctgattcctccttcagtaagtgatttcaggaataaaaaaggtatgggatcttcctatgcccctggagacttagagtggtgggacattaaaaaactgrtggtatccttcgtaagttaaacacacacacagacacacacacaaacaaaaaaaccgctgaggctgtagaatagtcttcagtgcttgtatatttgtagacc

SEQ ID NO: 38606 - DNA, 201 bp, Homo sapiens; identical to SEQ ID NO: 5951

SEQ ID NO: 38607 - DNA, 201 bp, Homo sapiens
aaatattgtcagctttgcgggccatacattctctgttgtaactattcaactctgccattgtggcaccaaagtagccatagacaagatggagacaagtggcrtggctgttcctataaaactgcaaaaacaggtgacgggctgggttaggcctgtgggtgtgtttgctgacacctggtctagtagaaagacaagtaactcaat

SEQ ID NO: 38608 - DNA, 201 bp, Homo sapiens
tcaggaggagaggcctgagatgggtagctacttaaaatttttttgtgtgttatgtttatatattatatttaaaaaggataataatagtatcccttttattmtttataaatgatctagaaacattgaaagtttcctcaccagttggtttataactcctcttgctcaatatgtcttttgattgagggcattgcctgttcacag

SEQ ID NO: 38609 - DNA, 201 bp, Homo sapiens
gtagtaaccacctggctacatagacagtggtgcaagcagcttcactctgtttcactgtcttatctacaagtggatcataggaggtttttctagatgctttrctgaaatctaggtgcatgatatctttggcatctcacctgatctaccaacttggtaaccacaagagaaaaatcgattggttttggcatgcctttgtcattg

SEQ ID NO: 38610 - DNA, 201 bp, Homo sapiens
gcagacaacctttgggaataaaataagttaattacttcaggatcatgagtaccaaaactttcaggcagttccccgaaagagctggtacattttatttaagaaaaaaaaaaaaaaagcctaaccattcccagagggcagtttataaatagtctttgtaaaaataacaaacatgaaatagattcatgaaaccccatcatatta

SEQ ID NO: 38611 - DNA, 201 bp, Homo sapiens
tctctcctgaggatttctagtgaaggccatgttctgcatcagccaaggtgaaaacaggtggcaggtaaataaaggccgtcatagactgctgggagagagasacaggtaaagattaactgctgtagaatgtcaaatgagagctgtgctgactggtttcagtgctagtatagtgggaatatagaggaaggaatggttaattct

SEQ ID NO: 38612 - DNA, 201 bp, Homo sapiens
gtggacgcacattgccttttcccaacattcacatttttttcgaaatgttcccaaaccatttgttctataattttgccgggagccattattggtctgtagtsgtccaggcttatttatttgtagatatcaggatcacccactttcctgctttaaaattgagacattggcccatgtctcctactcttagaccccgaactttgt

SEQ ID NO: 38613 - DNA, 201 bp, Homo sapiens
gaggtaatggtttgagaggtaagtgacattatttagggcatagagaaaatgtttacacgtttatttctgacacacagatttcccatccccagcattcgttyccacctgccttatccacaggcagaagagagggcacccagaactgaggagggtctccagacattctgaagtcctgtctcactcctgtccacctctggggaa

SEQ ID NO: 38614 - DNA, 201 bp, Homo sapiens
gaaggctttggactgtggagccagagttctttcttagggatgaatgccagtgccaccatcttgatgcttctctactctaatctgctcagcagaccatccctctcagcccttctcatcattggtaaagttgttcattcaatcattcaccaaactcttactgatcagtcatatatgagatgacacactgggatgtgttggata

SEQ ID NO: 38615 - DNA, 201 bp, Homo sapiens
ctctgttacctgcatcccccaactccaactttcctgcttctccctctccttttcaaagtacatacattgttaaacttcccaagtagtgctgtttttttccscatcttataagaactatttctcattttcttcttcttactttttttttttcttttcaagacagagtctcactccatcagccaggctggagtacaggggcac

SEQ ID NO: 38616 - DNA, 201 bp, Homo sapiens
agagcaaaggatgacagtaggcgggtggtgaagagcactcaggacttaagcgatgtttccatggatgaagtgggcatcccactccgggtatgtatattgayttagaggtccttcttaggcttcatcttaagctgtgacaagtgtacactctgagtacatgtgaaccccatcacaccatcgtctctgtaagccccatgagtg

SEQ ID NO: 38617 - DNA, 201 bp, Homo sapiens
ctccctctccttttcaaagtacatacattgttaaacttcccaagtagtgctgtttttttccccatcttataagaactatttctcattttcttcttcttactttttttttttcttttcaagacagagtctcactccatcagccaggctggagtacaggggcacaatcttggctcaccccaacctctgcctctggggttcaag

SEQ ID NO: 38618 - DNA, 201 bp, Homo sapiens
cagatggcctggacacacaaaaaaagtgtttgaaactgagtctgccatgatattttaaagggagctatgtcaaaatgtggtttattaaagggtatacgagrgagagtaagagagagagagaaagacatcatggtaagtaggtttccaaggaggaaaaaaccaaatgttcatagaactgcctggagggctccctgacaaaac

SEQ ID NO: 38619 - DNA, 201 bp, Homo sapiens
aaaaaaaaaggaaagaaaagaactatgcatgacacataagtagtaataattcagtaaattctggttactattattgagactgagaaggggacagaagataktgggagagccaaggaggcattttcaaacagcagagtggagtggagaaagactgttaggaaaggctatgcttgtagagctgactgaccacctggggaggga

SEQ ID NO: 38620 - DNA, 201 bp, Homo sapiens
gctggcagagtgaattccctagctctactggatccaaggcactaagctctgtattctaataggaatgtagatatagtcccttaatagttttgggacaaaacacacacacacacacacacacacacacacacacacacacacacacacacacacacataaggttagtaaatgaaaaggccaagtggcaaatgctaccacagg

SEQ ID NO: 38621 - DNA, 201 bp, Homo sapiens
ctaataggaatgtagatatagtcccttaatagttttgggacaaaacacacacacacacacacacacacacacacacacacacacacacacacacacacacataaggttagtaaatgaaaaggccaagtggcaaatgctaccacaggcagtcaggataaaggagcacaggtatcgaataacatcattttaacaatttatcag

SEQ ID NO: 38622 - DNA, 201 bp, Homo sapiens
taataggaatgtagatatagtcccttaatagttttgggacaaaacacacacacacacacacacacacacacacacacacacacacacacacacacacacayaaggttagtaaatgaaaaggccaagtggcaaatgctaccacaggcagtcaggataaaggagcacaggtatcgaataacatcattttaacaatttatcagg

SEQ ID NO: 38623 - DNA, 201 bp, Homo sapiens
gtgatggtggttccaaagctgtgatgaatggcttggcacctggcagcaatgggcaagacaaaggtaaggttcttggagagaaatctggattggtactggarggcatttctaaaggtgcggagtatgtcaggccggggccatcccatctgcctggtgcaaacatcattggcctaaccaagccataaactggtgacctgttcc

SEQ ID NO: 38624 - DNA, 201 bp, Homo sapiens
aatcccagcactttgggaggccaaggcgggaggatcatgaggtcaggagctcaagaccagcctggccaacataatgaaaccctgtctctactaaaactacaaaaaaaaaaaaaaattagccaggcttggtggcaggcacctgtagtcccagctacttgggaggctgaggcaggagaatcacttgaacgtgggaggcggagg

SEQ ID NO: 38625 - DNA, 201 bp, Homo sapiens
agttagcaagccttcatccgcctatccctccacaacgattgtcaatcctactattgtgctcttgcaacacaatcgaggtaagagaggcttgtgccccactmccagcccactggaatcaacatagctattccatgatacttgggtcagaaattctgttatttcacagaaattttcacaaatcccattgtttcccaaggccat

SEQ ID NO: 38626 - DNA, 201 bp, Homo sapiens
ccatgttcccctaacttcatgatgcacagtaaacctctgaaaacttgcccctctccaccacccacagattaatttcattgaccacaggtgttcaaagactkcgcatggctgtaaccaggttcatctcattccccggctgtaacaatttgctaaccaactgtcctttaatccttcaggagtcttggattcagtcttcaattt

SEQ ID NO: 38627 - DNA, 201 bp, Homo sapiens
ataatgaaaccctgtctctactaaaactacaaaaaaaaaaaaaaattagccaggcttggtggcaggcacctgtagtcccagctacttgggaggctgaggcrggagaatcacttgaacgtgggaggcggaggttgcagtgagctgagatcactccactgcactccagcctgggcgacacagcattgttgtagagctcttggg

SEQ ID NO: 38628 - DNA, 201 bp, Homo sapiens
ttcatttaataaaaggaataaacctgctttcattttgaaatgttttcagctgatagtataactcatccatttactcagaactcaccattgccgccatgttyccctaacttcatgatgcacagtaaacctctgaaaacttgcccctctccaccacccacagattaatttcattgaccacaggtgttcaaagacttcgcatgg

SEQ ID NO: 38629 - DNA, 201 bp, Homo sapiens
tgttgctgaataatcataaagactatacttagtgaaaacacatcgagaagttggaatttaagagtttgatgcaaaatggaaattttcctttgaaaataatrtgataggataaagtattaatggactattagagatcaaagcctgtctaattaaaaagtaaacacttgctctttagatggcatcacagatgtgtcaaatata

SEQ ID NO: 38630 - DNA, 201 bp, Homo sapiens
gggattacaggcgtgagccaccacgcccagcccagaatttttaattattgggacagagatagataatttgagctggggctgtcctaacaagtctggaataygtgctacatcacagaatcatgatcatcaatgcccaaagtggtgctgcatagatgcctttttgcccataggaagattcaatgatatttagatgctagcata

SEQ ID NO: 38631 - DNA, 201 bp, Homo sapiens
aatcagtagacaagagaaaatagcaccttaggcaaataaatacattaataataaaagagtgcaggttccataagtgggaaagaaagaaagatcataaacasaaattttcatgtctgggtgagttggggctgtggaaatctgtcatccattctttcctaggatccatccatcctagaaaatctttctggaggaagtgggaac

SEQ ID NO: 38632 - DNA, 201 bp, Homo sapiens
ttctgctgcattcctgctaacttttccgggaacacacagtgttttgtggaacacattttgggaaatgttggcttagctaatctaagggtgctttgagcctsgagattttatgaccttgtaaatcagtgagacatttagaaacttcaaatacagatttagtcagacatggtgccagaatctataatttgggtaaaccaggct

SEQ ID NO: 38633 - DNA, 201 bp, Homo sapiens
aaaagttgacaccagtgcaggttttggaatatggagaagctattgctaagtttaactttaatggtgatacacaagtagaaatgtccttcagaaaggtaagstgcacttctcatgccttgctttggggctctcttggatggcgcagctatgtggggaagcgtggtgttgctatcacaccccagtctgggggtgctgtctgta

SEQ ID NO: 38634 - DNA, 201 bp, Homo sapiens; identical to SEQ ID NO: 5806

SEQ ID NO: 38635 - DNA, 201 bp, Homo sapiens
tccttaaaccttttgtcatttaggtgttttcacgtgtttatgcctcggccacccactaggtctttactctttagggcaaggtgccacccatctcctgtacycctacagatggatgtagttcagtggttctcgacaggtgccttgtagcagcaggatcacctgggaactagttacaaatgcgctcatacccactgaagtaga

SEQ ID NO: 38636 - DNA, 201 bp, Homo sapiens
aaaaattagctgggcttggtggtgcacgtctgtagtcccagctactcagcaggctgaggtggaggattgcttccccgggaagcggaggttgcagtgagccragatcgcaccactgtactccagtctgagtgacagagcgagactctgtctcaagaaaaacaaaaagcaaacacccccccccacacacacacaatttaagca

SEQ ID NO: 38637 - DNA, 201 bp, Homo sapiens
aatgtcagaaatgggaagagagaagtttatattttggacccagagtgtgttttgtttgtatcagcctaatggctctgaatgatgtacagtttggtgataaraagtgatctaattatagtcttcaaattatttttcttctgttctgtcctcctcttccaaattaattttgtgatgatttgtattaccttttataaagttttc

SEQ ID NO: 38638 - DNA, 201 bp, Homo sapiens
gttggaaggctaaattcttttgccttttcctttccattaaaagattattaaatgtaaaaatagtttgatacatacacatggtttggaaattaaggcactayaaaaatgtatacattgaaaaatttcattcttacccctgctgggtcccctatactccctccctcaccccacctccattagctggaatgaactagtttgtcc

SEQ ID NO: 38639 - DNA, 201 bp, Homo sapiens
aagaaattgacctctctctttttcctcttggcttgaaacatatgagtcaaaataaatcatctacattatttttttcttcttttttttcttttttggacatktacagagctcagccatcagccctactccggaaatttcttcagagactcctggatagtaagttgccattttattttgtttacattgcttactatgttaaat

SEQ ID NO: 38640 - DNA, 201 bp, Homo sapiens
tgaggcaggagagtcgattgaacccgggaggtggaggttgcggtgagccgagatcacgccactgcactccagcctgggtgacagagctagactccatgtcaaaaaaaaaaaaaaaaaaaaaggaaaaagctgcatgattgggggccccaagtcccaccccctctctggtcttggtttactcttggaattaggggcatagct

SEQ ID NO: 38641 - DNA, 201 bp, Homo sapiens
aactctaaaactagagttcttggaagaggcatgggcttaagatggggattggagtcacctgaggagaggcgatggttgaagccctggggatagaagaagayacccaactagggagtagatgaaagactgaagaggggattgtgttgagagaaaggatgtgaaaccaagaactacccatggggacgttgggtgatgtggaac

SEQ ID NO: 38642 - DNA, 201 bp, Homo sapiens
tcttatttctagctttcttccttgtggagccattattggacttaggaagttggacttgggcaagtcactgcactactttgggcttcatttttcttacttayaaaaatagcccattggaccaggtcagcgtttcctcaagagttgtctagggaccacctacctttgaaaggcatggggtgcttactgaaatatggagtcctt

SEQ ID NO: 38643 - DNA, 201 bp, Homo sapiens
tttggttccaaactgaccgtctttgtagggtcctccagggagttctcagtgttttaatagctgctgtgtgggttctcatttgttggtactgtggaaacagtttttttttttttttttttttttttgagactgagtcttgctctgtcgtccaggctggagtgcagtggtgcgatcttggctcactgcaacctccacctcccg

SEQ ID NO: 38644 - DNA, 201 bp, Homo sapiens
aaaacgctttcaaaaataaaacctattcaaaaaaagcttcactcttgaaatgagttgaaaaagagtcttcttacaaaaagtttgatacttgaatggctgcytttgaattttttagttttaattgcttttccaattgttttctttaagaaactttttctgttgctgaataatcataaagactatacttagtgaaaacacatc

SEQ ID NO: 38645 - DNA, 201 bp, Homo sapiens
ctgaggcaggagaatcacttgaacctgggaggcggaaggtgcagtgagctgagatcgcaccactgcaccccagctcgggtgacagagtgagactccatctaaaaaaaaaaaaaaaatagacggggggagggaggtgccgagaaggggctaatttacctgattctcacatagatgggcatctgttttcctctgtcagttctt

SEQ ID NO: 38646 - DNA, 201 bp, Homo sapiens
ttgggttatacatcacaattccaccacttaatggtagggtgaccctagagaagacactggatcattgcctcctttctaaattggtaacagtgcctacatgrtaaggctactaggattaaatgagatattgtatgtaatgtgctaagcatgaggggaggctcttgatgataacaatagggttttttttccctagcaataaat

SEQ ID NO: 38647 - DNA, 201 bp, Homo sapiens
ttggttccaaactgaccgtctttgtagggtcctccagggagttctcagtgttttaatagctgctgtgtgggttctcatttgttggtactgtggaaacagtttttttttttttttttttttttttgagactgagtcttgctctgtcgtccaggctggagtgcagtggtgcgatcttggctcactgcaacctccacctcccgg

SEQ ID NO: 38648 - DNA, 201 bp, Homo sapiens
ctggtctcgaactcctgagctcaaatgatctgcccaccttggcatcccagagtgctgggattacaggcatgagcccctgtgtccggctaattgttaaaattctttcatatgagctgaaatcatcctgtaatacagttttctcatttagaacccatgtcacactagtttttacaccccatgattcatttcgtcattcaaacg

SEQ ID NO: 38649 - DNA, 201 bp, Homo sapiens
gtacagagcatggcctggaacctggattttctcactgtcccgctgggaggtcagggtaggtcaccagaaaggtggggtggggtctgagaagacttgggatrtgagatgactagaggagtgccatctctgtgagactcaggcaggttaggggagcagcagagcctcgtgctgtttctagaggggatttggggccagggagaa

SEQ ID NO: 38650 - DNA, 201 bp, Homo sapiens
tggtctcgaactcctgagctcaaatgatctgcccaccttggcatcccagagtgctgggattacaggcatgagcccctgtgtccggctaattgttaaaattctttcatatgagctgaaatcatcctgtaatacagttttctcatttagaacccatgtcacactagtttttacaccccatgattcatttcgtcattcaaacgt

SEQ ID NO: 38651 - DNA, 201 bp, Homo sapiens
tgccatttgcttccttctcttgaatatgggtaattaaagattctggttgcagaatttgcatggttgctcaagctgtgtctgctgtcacattggctccacaytggggctcttacaaatatgtgtcacatctatagctgtagatctaacgagctctctttcgtgtgcacatgcttctgtacatgagcctgtgagccctccttc

SEQ ID NO: 38652 - DNA, 201 bp, Homo sapiens
tttctctgtgacagaagcactatttgttgactggcatctagccttggtttttaagtgtttttacaaattgtgagagtacttcctagaatttttgaattaargagaatatttagagaccatctactccagtaactgacaactttttctggatcacagaacctttgagaatctgaggtcagccaaggactctaggccagtagt

SEQ ID NO: 38653 - DNA, 201 bp, Homo sapiens
ccaggctggtctcaaactcctgacctcaggcaatccgcccacctcagcctcccaaagtgctgggattataggcctgagccaccatgcctggcctagaagctttttttttttttttttttttttttgagatggagtttcgttcttgttgcccaggctggagtgcaatggtgtgatccgggctcactgcaacctccacctccc

SEQ ID NO: 38654 - DNA, 201 bp, Homo sapiens
atagctccagaagtctttcaagaaaggaacctgaaacacgatttgggagatgctaccaaagactgggttccataaggaaacagctggctttttatctaatwatggatttaaatagtccatgagttctcattggcagctaaaagtacaatggtcagtggccaccccattgtcctgcagatggatggttgtgcatctggtgat

SEQ ID NO: 38655 - DNA, 201 bp, Homo sapiens
atgcccaagcagtcagaattatcaaccaagttcttggattttcttgggcgcaattttggccaacaacatttagaacaatcaagaaagtaggctggggcgtkgtggctcacacctgtaatcccagcactttgggaggccgaggcgggcagatcacttgaagccaggagtttaagaccagcctggccaacatggcgaaaccct

SEQ ID NO: 38656 - DNA, 201 bp, Homo sapiens
aggagagcaggaccaaggctatgaggcagcttcaggttgggatgacttagcatggggctttctctttacactgttcccctttctgtatttttccttctccscctctttctttccctcatttctccccactttcctgctcctgaaatatttcatatacattgctggatttagtgcatctaggattatggtaaaaaagaggga

SEQ ID NO: 38657 - DNA, 201 bp, Homo sapiens
cttacttcaaacggcattcttcctgtgtctcccgaggatgtattttttcccctcagatgtttctttttttctacataatagtcaatgttcaagattgtgtaaaaaaaaaaaattaggaaataatccaagaacccaatattcaaaagggcctgggcagactgtcagcattttgtcaatggctctttctagcctgggttgctt

SEQ ID NO: 38658 - DNA, 201 bp, Homo sapiens
atagcagaatcaggagcctgcagatctccataggggtgaatatgctgagggtcttgctcatctatgtgcctgtggttggggatgaagggagggggaattcrtaatgccccccaaagagggctgtggcaaaaatgtggcccgagacattccttctcacagagacaaatgtccatatcccctttacggacctcttgagagtta

SEQ ID NO: 38659 - DNA, 201 bp, Homo sapiens
gtttttctattgaaatcactgtgaaattcgtatccttataattttggtcatttagttttctcttgtgaacttgtcatttatcattaaccccacatccattmttttcttgttcacctgcaactgtgaaattatgccctttggttacagacacaaacacaggtattgaaattgtgtggctttaactagattataaggtgatca

SEQ ID NO: 38660 - DNA, 201 bp, Homo sapiens
atggtgctatgtgctatgtggatcagactagaggtttagggtctctgaaatgcatcaggcagtggctgggaaggctgaagggagacaggggtgctttgtgrtgtgatgaacactcaggaagggtgattagattttgaaatgtttatgtgcctcatttaatggaaagaagaaaagcaggcagggaggaaaaaaaagtcttta

SEQ ID NO: 38661 - DNA, 201 bp, Homo sapiens
ttcagacccacattcaggcctcagagccctcttaaattccctcccctattttcttaccggccatttttctttctggttttaatagtttctgttcctttgaccccccaaccttgttctccttcaagatttctctctctctctctctctctttctctctttctctctctctctcattctaattaccttttcttagaaattagc

SEQ ID NO: 38662 - DNA, 201 bp, Homo sapiens
taaaattcaggttttattttgacgaacattttacaaagtatctttggccatttcctccataccctgccatacatgtaaaagtcagtatgggttttgcagaktatagagctcaggagtcatataaaaatggatgtcagttcttttgtgactcctattttggttctggggtgtctgtgctcactcttagtggggacaagcagg

SEQ ID NO: 38663 - DNA, 201 bp, Homo sapiens
aaatttactggtttcccagaacaggagctatttgcctgagtttcttttagagaaagctgaactgcctttttggcactccttgtcttccttttttttttttycccatgtatcttcataagtagatggcttggaaatagttaccaagaagaatacagctgtgtactccagtctaatttcctggagcgtgagccatgtcaaagg

SEQ ID NO: 38664 - DNA, 201 bp, Homo sapiens
ctgctaatgtgagacccacaaaggttgccttgtgcttttattcagcacagaactgactttctgtagttttccagatgtgccctcattgttcggccagcacycctcacataccgtgggacttcctggcatcctgcaaagtgagcacaccccttccaagttacaattggagacctttccatcctattggtttgactcaaatga

SEQ ID NO: 38665 - DNA, 201 bp, Homo sapiens
ttgtgtgctcaacagcatcctatctcttctcttaatggccatctagttcattctttaacattactggggaggaagcctccctggggcccagggaggtgaamtgacttactctgggtcacatagtagtagaagattccacactagaattgtatctcttttctgttttatatcatgttgcattgagtctccaaggtctgtaca

SEQ ID NO: 38666 - DNA, 201 bp, Homo sapiens
aaatgacttactctgggtcacatagtagtagaagattccacactagaattgtatctcttttctgttttatatcatgttgcattgagtctccaaggtctgtrcatacttcacagactcttagagaaacttatacctaatatggtgatggatagctgaatatggctaagagcacacactttgcgatctgatttgggttctatt

SEQ ID NO: 38667 - DNA, 201 bp, Homo sapiens; identical to SEQ ID NO: 5876

SEQ ID NO: 38668 - DNA, 201 bp, Homo sapiens
ttcctggtctccctgagtctcagtttcttcatctgtagaaaggggaccataactacctcattaggttttgaggatcacccaggactattgcttggtacatrtagacactcagtacattgcagctggcagcattattttccataccttgctgtagagctccaaggtatagtgaggctgccagctgtggtgaggctggcatcc

SEQ ID NO: 38669 - DNA, 201 bp, Homo sapiens
cccaggactattgcttggtacatatagacactcagtacattgcagctggcagcattattttccataccttgctgtagagctccaaggtatagtgaggctgycagctgtggtgaggctggcatccctccactttgagactgaggtagggagaactgcagcacatctcagacctgcctggattcctgtgccattttgcttcat

SEQ ID NO: 38670 - DNA, 201 bp, Homo sapiens
ttttcattgaatcctctcaaccctggaaggtcagtattaggattcccaggcgaagaaactgaggctcggagaaaggctaagtaacttgggcttttgtctcmtgttggttactgattagaaagctgggattttaaccctatggcccattgccaaacactcttgtgtcctctgcctctccctctcagagacagctttgtggct

SEQ ID NO: 38671 - DNA, 201 bp, Homo sapiens
ctgttgtcttaattctgtgtcagagaggcattgaaaatccagaattaatggaagatggtcttggaaatagtcacttgaggtgagtgacaatggaccagatraaaagaaagtcaatttcacccctgttgtggccagtatacctgtggagcgtggggaagagaaatgggtgtgggctggtaacttttaattatttagagttaa

SEQ ID NO: 38672 - DNA, 201 bp, Homo sapiens
gtcttggaaatagtcacttgaggtgagtgacaatggaccagataaaaagaaagtcaatttcacccctgttgtggccagtatacctgtggagcgtggggaaragaaatgggtgtgggctggtaacttttaattatttagagttaagtctctaatttttgtgcgcttttttaatgagtgggctctgggtaggggtaatctatg

SEQ ID NO: 38673 - DNA, 201 bp, Homo sapiens
gccacactccttcctgccccccagcccgtgtgtgatttctgcttaaatctctttcttagttgagatagacaactttttaaaaaattaccccccatttcagwatagggcaggctggagcaggctagcagcagtttttgtatttttgggatcatattgagtgggatcattaaagtcaccccgagaaatggtgactgccagtgg

SEQ ID NO: 38674 - DNA, 201 bp, Homo sapiens
ggacatttaccatcacccctgtggagcagcgggctgcatcgaaggaatgcagaagagagcagggacagaagcccagctgggccctggtattttcttggagrtttgcatctcttgttggtgtcattccctctgttgctcagtctttcacagtgttttaggggtgccccattttgctgcatgaggagaaagagagctctgatg

SEQ ID NO: 38675 - DNA, 201 bp, Homo sapiens; identical to SEQ ID NO: 5870

SEQ ID NO: 38676 - DNA, 201 bp, Homo sapiens
acccactgaccttggtggggggtgggtgtggatgtcaattcagggctatcgtgtggccagacagagctgagttggcattggcgaccctaggtcagggactktgatgtctggagtagggtggaggcagctactctgctctcttgggtccctgaggacttaatatggccgctggcagtcaccatttctcggggctatggtgta

SEQ ID NO: 38677 - DNA, 201 bp, Homo sapiens
gggagacagaggttgcagtgagctgagatcgctccactgcactccagcctgggcaataggtctccaaaaaaaaaaaaaagaattgcattaaggcctgtaatcccagcactttgggaaaccaaggcaggaggctcgcttaaggccaggggttcaagaccagcctgagcaacgtagcaaggccccatctctactgaagaaaaa

SEQ ID NO: 38678 - DNA, 201 bp, Homo sapiens
acaggtgcctgccaccacgcccagctaatttttgtatttaatagaaacagggtttcaccatattggtcaggctggtcttgaactcctgacctcaggtgatycacccacctcggcctcccaaagtgctgggattacaggcgtgagccaccgtgcccggtgatctacaatattttgaaccatttttatttaactgtaatcttg

SEQ ID NO: 38679 - DNA, 201 bp, Homo sapiens
tttcagcactttgggaggccgaggtgggcagatcacctgaggtcaagagttcgagaccagcctggccaacatagtgaaaccctgtctttactaaaaatacaaaaaaaaaaattagccagtgggcgtgatggcaggcgcctgtaatcccagctacttgggaggctgaggcaagagaatcacttgaatctgggatgcagaggt

SEQ ID NO: 38680 - DNA, 201 bp, Homo sapiens
ggagacagaggttgcagtgagctgagatcgctccactgcactccagcctgggcaataggtctccaaaaaaaaaaaaaagaattgcattaaggcctgtaatcccagcactttgggaaaccaaggcaggaggctcgcttaaggccaggggttcaagaccagcctgagcaacgtagcaaggccccatctctactgaagaaaaaa

SEQ ID NO: 38681 - DNA, 201 bp, Homo sapiens
actggaatcaacatagctattccatgatacttgggtcagaaattctgttatttcacagaaattttcacaaatcccattgtttcccaaggccatttgccccrgtttactcactctcatggcccataaaataaatcccagcagacagacagaggcccctgatctgaggtgatatcaggtgtctgaataagtaagctgggttcg

SEQ ID NO: 38682 - DNA, 201 bp, Homo sapiens
gccaccacgcccagctaatttttgtatttaatagaaacagggtttcaccatattggtcaggctggtcttgaactcctgacctcaggtgatccacccacctyggcctcccaaagtgctgggattacaggcgtgagccaccgtgcccggtgatctacaatattttgaaccatttttatttaactgtaatcttggagatcattc

SEQ ID NO: 38683 - DNA, 201 bp, Homo sapiens
gagacagaggttgcagtgagctgagatcgctccactgcactccagcctgggcaataggtctccaaaaaaaaaaaaaagaattgcattaaggcctgtaatcccagcactttgggaaaccaaggcaggaggctcgcttaaggccaggggttcaagaccagcctgagcaacgtagcaaggccccatctctactgaagaaaaaaa

SEQ ID NO: 38684 - DNA, 201 bp, Homo sapiens
agggtttcaccatattggtcaggctggtcttgaactcctgacctcaggtgatccacccacctcggcctcccaaagtgctgggattacaggcgtgagccacygtgcccggtgatctacaatattttgaaccatttttatttaactgtaatcttggagatcattccacatcacacattgagatacctcattctctttaacagc

SEQ ID NO: 38685 - DNA, 201 bp, Homo sapiens
ctggcataatgggagccacgctaatacccctgcagtcagctggctgcatgcacattgtaccatctaagtccagaggacagtgaggactcagggttgagatcctaacgagttatgccagggcttcttggtcttactatgtgctgtataaatcttacttacactgtgtgttcttttatcacagaacagcaaaaacgactcagt

SEQ ID NO: 38686 - DNA, 201 bp, Homo sapiens
agacagaggttgcagtgagctgagatcgctccactgcactccagcctgggcaataggtctccaaaaaaaaaaaaaagaattgcattaaggcctgtaatcccagcactttgggaaaccaaggcaggaggctcgcttaaggccaggggttcaagaccagcctgagcaacgtagcaaggccccatctctactgaagaaaaaaaa

SEQ ID NO: 38687 - DNA, 201 bp, Homo sapiens
gcgcaatctcagctcactgcaacctccgcctcccaggttcaagcaattctccgcctcagcctcctgattagctgggattataggcacacgccacaatgccyggctaattttttttgtatgtttagtagagatagggattcaccatattggccaggctggtcttgaacttctgacctcaagtgatccgcccaccttggcctg

SEQ ID NO: 38688 - DNA, 201 bp, Homo sapiens
ctaccaagatgatgaaaataggcatagttcctgcctccctggagcttgcagggtggtggacagaccagaccagtgagccacactagtaaacatgtcccatggaactgtgataagggccttgatggataagaacaggatgttctgggttaaaaagaaccaggagtccagctttagatgcagtgttcatggcaggcctctctg

SEQ ID NO: 38689 - DNA, 201 bp, Homo sapiens
ggccaggagaggcgacttgtgtacaaatacagaagaaagcactttctggatcaaggactgtcacctgcttcctattaatgggggaaaggaggggagtgcaktgtgtgtgtgtgtgtgtatgtgtgtatgcatgcgctgggctggttgtttttgtaaacacgtgaaaaactggaatgccgtcaccagagttggaaatgtcct

SEQ ID NO: 38690 - DNA, 201 bp, Homo sapiens
aagcattttgccatggcccactcacaaaatcctttccccagatttttttttttttccaagacagagtcttgctctgtcgcccaggctggagtgcaatggcrtgatcttggctcactgcaacctctgcctcctgggttcaagcagttctcctgcctcagcctcccgagtagctgggattgcaggcacctgccaccacgccca

SEQ ID NO: 38691 - DNA, 201 bp, Homo sapiens
gtttggaaattaaggcactataaaaatgtatacattgaaaaatttcattcttacccctgctgggtcccctatactccctccctcaccccacctccattagytggaatgaactagtttgtccagagcagttccggtttaccttctttgttccagtgaatgatcaatcacaccctctttcattttcaaaagtgtcccagttta

SEQ ID NO: 38692 - DNA, 201 bp, Homo sapiens
tatgtgtgtatgcatgcgctgggctggttgtttttgtaaacacgtgaaaaactggaatgccgtcaccagagttggaaatgtccttagcattttttttttaktcttaactttattcttttttattcttaacactagatgaagtccttgttagaacttgtatcttctcttaggcttaaataagggcagatgctgagtacctgg

SEQ ID NO: 38693 - DNA, 201 bp, Homo sapiens
ttttttttttttccaagacagagtcttgctctgtcgcccaggctggagtgcaatggcatgatcttggctcactgcaacctctgcctcctgggttcaagcarttctcctgcctcagcctcccgagtagctgggattgcaggcacctgccaccacgcccagctaattttttgtatttttagcagaggcagggtttcgccatgt

SEQ ID NO: 38694 - DNA, 201 bp, Homo sapiens
atgtctctctgtgaaacaagtgggtcatgcacaaaagatttctaagcgcccatctagaaggccctggagttgtggcctattgctttatttttttatttttkagacagggtcttgctttgtcacccaggctggagtgcagcggtgcaatcatgctcactgtggcctgaatctcccgggctcagttgatcccaagtagctggg

SEQ ID NO: 38695 - DNA, 201 bp, Homo sapiens
agacggggtttcaccatgttggccaggctggtctcgaactcctgacgtcgtgattagcccacctcggcctcccagtgtgctgggattacaggcgtgagccrctgtgcccggccagaatttttttttttttcgagtcttgcactgttgcccaggctggagtgcagtagcgtgatcttggctcactgcaacctccgcctctcg

SEQ ID NO: 38696 - DNA, 201 bp, Homo sapiens
ccgctgtgcccggccagaatttttttttttttcgagtcttgcactgttgcccaggctggagtgcagtagcgtgatcttggctcactgcaacctccgcctcycgtgtttaagcgattctcctgcctcagcctcccaagtagctgggattacaggcacccaccagcatgtccagctaatttttttgtatttttagtagatatg

SEQ ID NO: 38697 - DNA, 201 bp, Homo sapiens
atgtattagtgcatgattggggatacatacttgcatttctaccctaaagtattccatttgtgacagttactcactaatttcaggcttttatgctgctgcctttttttttttaatattcttactaaattccaaattcttctgtatcttacctgtttttccatgcttacgcctggatccctcctgcactccactactggaata

SEQ ID NO: 38698 - DNA, 201 bp, Homo sapiens
tctgaccagaatacaccgataaagttgattattttttcttagaaaaaaaaaaaaaaagaaatctgcgatatccacctttcttgccatttgcttccttctcwtgaatatgggtaattaaagattctggttgcagaatttgcatggttgctcaagctgtgtctgctgtcacattggctccacactggggctcttacaaatatg

SEQ ID NO: 38699 - DNA, 201 bp, Homo sapiens
cactgcaagcccacaggtatctaagcttctcgtcactggttttcatactcagcatgtgaatttttgtagtcaacagtgctgatggcacacagcctctctgrggaggtttttgagcactgcaattaaaaactgtctgcaggaggccgggtgtggtggctcatgcctgtaatcccagcactttgggaggccgaggcgggtgaa

SEQ ID NO: 38700 - DNA, 201 bp, Homo sapiens
aatttactggtttcccagaacaggagctatttgcctgagtttcttttagagaaagctgaactgcctttttggcactccttgtcttcctttttttttttttcccatgtatcttcataagtagatggcttggaaatagttaccaagaagaatacagctgtgtactccagtctaatttcctggagcgtgagccatgtcaaaggg

SEQ ID NO: 38701 - DNA, 201 bp, Homo sapiens
ggcccaaacttgccacacctctggctctttttgcaagagagatgttttaaaatagtcttaaatgtcagacatattttttttcacaacatgcctcagacatytcataaattattctgcagtaaaactttaataggaatgcttagaaaatgaagagttctagtcaatggagtttttggtaacttatacaaccgttaaccccaa

SEQ ID NO: 38702 - DNA, 201 bp, Homo sapiens
taaagaaaattgtctgtattgatacatgaatatacatatatgcatacataaaaagagaaaaggaaatactttcatatcatccagcagtttttttctgggtkgtaattttatgactattttttctttttttggtggggggaagggtgagttattttctatctttttaaaaacagtgaacagtattactttaatcagaaaagg

SEQ ID NO: 38703 - DNA, 201 bp, Homo sapiens
atgtcatttactgagcgttttggaggcctggcagaaaacatatggcacatttaaatcaggtaatttaaggcgattttaatgaaggaactatttataagggrtgtgggcagagctttggaaaagcatcggcaatgacgaaggacttgattcctctgtgtacctaaggttttacacgtatcacattgtcattgtcatagcccc

SEQ ID NO: 38704 - DNA, 201 bp, Homo sapiens
tagtgataagagcaggggactgagggtctaagagacctgggtttgaagccagcttcaccatttactctctgactttgggaaagtgaatttgtctgtcttctctccccttctaggggtattttatgaacatttatgatgcaggatgttaatgggtaccctaagggttggggtgggtgaggggctctgtggccaaataagttg

SEQ ID NO: 38705 - DNA, 201 bp, Homo sapiens
agctcagcagtctgccctttgacaagccctgctcgtggctgtgctgtatgctgacttttgagaacctttagtgtagtgataagagcaggggactgagggtstaagagacctgggtttgaagccagcttcaccatttactctctgactttgggaaagtgaatttgtctgtcttctctccccttctaggggtattttatgaac

SEQ ID NO: 38706 - DNA, 201 bp, Homo sapiens
gcaaaagagtggaaaaatgccaaatgtgatgtaatttcctgaatagtggggttcttacttccaaatatggaggcccctctctggaatttgtaccctttgaycccacttaaaagtctccttttgctacaaaactgaagtgtcttaatcttacacatattgaaacatctgctaaaatgccgttgaccttctgtcaacagggag

SEQ ID NO: 38707 - DNA, 201 bp, Homo sapiens
catttactagcacctgctatctgcagggcattgggctaggtgtgagtgagggggtggccctcatcttgtgggtacgttcacaggagttgatctttgattaytgcttcaagataattattgcctcaaaagtaactatttaaaatcttgttcttaaagccttttaagaagagcatcctcaatttatggtttataaactcaaaa

SEQ ID NO: 38708 - DNA, 201 bp, Homo sapiens
tgaggcaggagaattgcttgaacctgggagatgcaggttgcagtgagccgagatggcgccattacacaccagcccaggtgacagtgcgagactccgtctcaaaaaaaaaaaaatgaaaccactatacctctccccatctccaggcacaattgaacagtactcagtaagaaacttgcacctgtccatggaaagaaacaagag

SEQ ID NO: 38709 - DNA, 201 bp, Homo sapiens
gagtaggtgaaggactcagcagtatgcagcacagggcaggtgctcaagggccatctgttcttcccttccctctcctgccttccacttcctcctgtcactgmctcacggtcccctagaagtaccctccttcaccctttctttttgacacaggatcttgctctgtcacccaggctggagtgcagtggtgtgatcagagctcac

SEQ ID NO: 38710 - DNA, 201 bp, Homo sapiens
tggaaacacatgaatcctaagctattcttatctctgcctgtttctgaaccatctcagtagctttcagaagccataccacagttgttgggtctgtgggttayatcggtctccttgatttattcagatgtcacatttgtcctcctgtccttcatcattcccttgttacttttgtgtaacatcctggagaataaggaagatggt

SEQ ID NO: 38711 - DNA, 201 bp, Homo sapiens
tgctgatgcccatatcctcttttgataagcatttgttttcttgctacaaacatttgctcagacacaacattgctgaaagatcccacctgtcagtcacgtgrcatttactagcacctgctatctgcagggcattgggctaggtgtgagtgagggggtggccctcatcttgtgggtacgttcacaggagttgatctttgatta

SEQ ID NO: 38712 - DNA, 201 bp, Homo sapiens
aaagagctgtatgcctgatattttgtgtttcttggatgcattcaggcagtttttaatgatatgtcatttatcataattatatcactttggagataaattargaaaagtgtagttatttttcactttctaaatggaggaatcaaggtgaggcacttttgtataaaatcatactgtgcttctcaagtcttgagaaaaggtttt

SEQ ID NO: 38713 - DNA, 201 bp, Homo sapiens
ccgaggcaggagaatcacttgaacccaggaggtggaggttgcagtgagccaagattatggcactgtgctctagcctgggcgacagagccagactccgtctaaaaaaaaaaacaaaacaaaaaaaaaaacattatagactcacaggaagtggcaacaaatggtacagagggatcctgtgtgcccttcaccccacttccccag

SEQ ID NO: 38714 - DNA, 201 bp, Homo sapiens
tgaactcctgacctcaggtgatccacccacctcggcctcccaaagtgctgggattacaggcgtgagccaccgtgcccggtgatctacaatattttgaaccrtttttatttaactgtaatcttggagatcattccacatcacacattgagatacctcattctctttaacagctgtctagttttccattgagtagaagtgcca

SEQ ID NO: 38715 - DNA, 201 bp, Homo sapiens
tggtgtctgagctgtgagctgatgcctgctccatctgtagctagttgagagaaagaaggaagaataaaagtcatgttaattgatttgagttattttaatcratagctgtttttgtgatgttccagaaataagacacaaaataaaatctgtaaagtgcttaatgctcatatgatccacccaaacatcacattaggcatttat

SEQ ID NO: 38716 - DNA, 201 bp, Homo sapiens
tgggaggctgaggctggcagatcacttgtggtcaggagttcaagaccagcctggccaacatggcgaaaccctgtctctaccaaaaaatacaaaaattagcygggtgtggtggcaagtgcctgtaattccagctactcaggagtctaaggcatgagaattgcttgaacccaggaggcggaggttgcagtaagccaagatcat

SEQ ID NO: 38717 - DNA, 201 bp, Homo sapiens
tgccccgatttagcatgtgttgaagactggtagtgcacgatggaggtttctttcttggggcaagcagaagaaccaacagagcattgaaaagggaatctttragagagagagagagagagagagagagagagagagagagagtgggcatgtctccgaaccattttgtgtcagttaaaaaaaacaaaccaaagtatatctgct

SEQ ID NO: 38718 - DNA, 201 bp, Homo sapiens
gtgtgtgtgtatatatatattatatgtagttcatacaaatggcacatattatctacaattttttttttttgagacagagtctcactctgtcgcccaaggtrgaatacaatggtgtgattttggctcactgcgacctccacctcccaggttcaagcgattctcctgcctcagcctcccgagtagctgggattacaggtgcct

SEQ ID NO: 38719 - DNA, 201 bp, Homo sapiens
gtcagatatgtaatggatctatatatgcttgtaaaatatcaggttcttcttactatatttgattcactgatcctcttttcagcaccaaattgtttgctagrtaattgattccagtcactcctttgggatgaatgaagttgagtggaaggaggctaggtttctgtaaactatggagatcttgccaagagattgtctacatcc

SEQ ID NO: 38720 - DNA, 201 bp, Homo sapiens
aagcgatgtttccatggatgaagtgggcatcccactccgggtatgtatattgacttagaggtccttcttaggcttcatcttaagctgtgacaagtgtacaytctgagtacatgtgaaccccatcacaccatcgtctctgtaagccccatgagtgccagatcccccagaagctatgctccagacttggtgtacaacagcttt

SEQ ID NO: 38721 - DNA, 201 bp, Homo sapiens
gacatgctgcctccaaaaaaatgtccacaaaatttagtgaaaaaagtaaattctagctccatggtcttttaagcccttcagtcacttggttttacatttcsccatagtcaattactcaaaaaagcatgctgtcggggccaggcgtggtagctcacacctgtaatcccagcactttgggaggctgaggctggcagatcactt

SEQ ID NO: 38722 - DNA, 201 bp, Homo sapiens; identical to SEQ ID NO: 5913

SEQ ID NO: 38723 - DNA, 201 bp, Homo sapiens
caagcttgtccaacccaaggcctgcaggctgtatgtggcccaggacagctttgaatgtggcccagcacaaatctgtaaactttcttaaaacaatatgggatgtgtgtgtgtgtgtgtgtgtgtgtgtgtgtgtgtgtttgttttgttttagctcatcagctatcactagcattagtgtattttatgtgtggcccaaaacaa

SEQ ID NO: 38724 - DNA, 201 bp, Homo sapiens; identical to SEQ ID NO: 5815

SEQ ID NO: 38725 - DNA, 201 bp, Homo sapiens
catcctcttcccccccttttttttttaaaccagaaaggataacagagatatataaattaatttgcaatttaattaatacacttatttctttgaattgaggmgtctttgtaagatttattaaatggtatagtgatgataatattacattttcccagatttcataaagagtcttaaaacaatttttttttagagcaaccctgt

SEQ ID NO: 38726 - DNA, 201 bp, Homo sapiens
cgtgtgtgatttctgcttaaatctctttcttagttgagatagacaactttttaaaaaattaccccccatttcagaatagggcaggctggagcaggctagcagcagtttttgtatttttgggatcatattgagtgggatcattaaagtcaccccgagaaatggtgactgccagtggccatattaagtcctgagggacccaag

SEQ ID NO: 38727 - DNA, 201 bp, Homo sapiens
aagcttgtccaacccaaggcctgcaggctgtatgtggcccaggacagctttgaatgtggcccagcacaaatctgtaaactttcttaaaacaatatgggatgtgtgtgtgtgtgtgtgtgtgtgtgtgtgtgtgtgtttgttttgttttagctcatcagctatcactagcattagtgtattttatgtgtggcccaaaacaat

SEQ ID NO: 38728 - DNA, 201 bp, Homo sapiens; identical to SEQ ID NO: 5817

SEQ ID NO: 38729 - DNA, 201 bp, Homo sapiens
tttctaatgatcgtccttctttccatttcccctcctctttcttttttccctgtttgataacatatcttgaaaatattgctaaaggttctctctcccccacrccctcctctccctcaaaaggaccgctttgcatggcagtcccccaccatccacaatacctataaggattccctctacctgagctcaccaaagccttatgtc

SEQ ID NO: 38730 - DNA, 201 bp, Homo sapiens
tgaccaggccacagtgtctagagcctaggcacaaatctggtatagttgggtttgtgtgtattactccagtcctttagttggtcagctaaaggaggtggctrtgtaatatactgcaaagattgtgggctttagagtcaggaagccctgtgttcaaatcctgactatgccacttactatctttgtgactgtagtgaagttatc

SEQ ID NO: 38731 - DNA, 201 bp, Homo sapiens
gagcagagtagctgcctccaccctactccagacatcacagtccctgacctagggtcgccaatgccaactcagctctgtctggccacacgatagccctgaaktgacatccacacccaccctccaccaaggtcagtgggttttacctgtcatattgagtggcttgctaaagatgcagattccctggctatcccctcaaaggtt

SEQ ID NO: 38732 - DNA, 201 bp, Homo sapiens
tggcccaggacagctttgaatgtggcccagcacaaatctgtaaactttcttaaaacaatatgggatgtgtgtgtgtgtgtgtgtgtgtgtgtgtgtgtgtgtttgttttgttttagctcatcagctatcactagcattagtgtattttatgtgtggcccaaaacaattcttcttcttccaatatggcccagggaagccaaa

SEQ ID NO: 38733 - DNA, 201 bp, Homo sapiens
tagctgcctttttgaaacacagcagtttgtttgtagagttggagaaataacaattataaaaattgttgttaaaaaaaaaagaacaaaacagtagttcataragtttgctatgtgccaaacactattcagagtactttgcttatgttaattccttatggagtgggtgctgtgatgatccccactgttcaaatgaagagacca

SEQ ID NO: 38734 - DNA, 201 bp, Homo sapiens
gtttttcttttgccttgtatggctgtctgattagcttccattgggctgattttatctctgaaattatattgtaagcatcatgaaggttgtggggtctgcawggtgttgggcatacagttatcgatgattatggataacttggttcaccgtgatgtttctggggtggagtgaccactgtttgatacctggtttgacagatat

SEQ ID NO: 38735 - DNA, 201 bp, Homo sapiens
gtgtccttgttgtccatgaatcctgattttaacttgtcattgtttcttatgttcagatgagacctgccagagccaaatttgactttaaagctcagacactraagtaagtgccaccagttatatttatttgtctttttagctgcctttttgaaacacagcagtttgtttgtagagttggagaaataacaattataaaaattg

SEQ ID NO: 38736 - DNA, 201 bp, Homo sapiens
cccaggctggtctcagactcaagtggtccttctgccttggtcttccaaagtgctgggattacaggcttaaaccacagtgcccaacctataaaacttttaartatttttcacctattcaccctttctaacattctttcttcttgccacctgtatgccacaaatataagaatgaaataggccaggtgcagtggctcatgcctg

SEQ ID NO: 38737 - DNA, 201 bp, Homo sapiens
ttgtgtggtagcatgccagatctatccaacaagattgccacttgctttgcctgttctttgctctcagtctaaataacttctcaattcattctagtcctttwaaattttcatggcttgctgcatttcgttagctcacttaaaatgagaacatggaatcaatacagtacaaccacagacccaaagatggttagacttaaaaga

SEQ ID NO: 38738 - DNA, 201 bp, Homo sapiens
agataaggaacatcttaggacttctggctgactttgtctttttgtttgtttgtctttttaatagccatggttcacatgttttgaggaactgttacctcagytttgggacctttctaaccatctcttccccagatctggctgtttttagggggattctcatgaatgacatacatagttgactaaacatttatctagtgttct

SEQ ID NO: 38739 - DNA, 201 bp, Homo sapiens
gcatatcataatttaagcaagtagatgtctctaaggaataagacagtagataaggaacatcttaggacttctggctgactttgtctttttgtttgtttgtytttttaatagccatggttcacatgttttgaggaactgttacctcagctttgggacctttctaaccatctcttccccagatctggctgtttttagggggat

SEQ ID NO: 38740 - DNA, 201 bp, Homo sapiens
tgaagggctcggcagctgcacctccctcacgtgtgtttggccaactgctgcttgggacattgtgcctccctcagcggctcatgggtgctgattggagccagattggctctttgctggatcgaaaggtgtctcaatgctctgaaatgccataccagtcaagggtgcagttgaacttaacggtagcgtatacccgtccatctg

SEQ ID NO: 38741 - DNA, 201 bp, Homo sapiens
tggaacaggaacagtgtagtagagataaaggcaattctgtaagagtagggagaaactacccaaaggccttcacctatggcaggaattgagatttgaactgrgggaaagttgagagcagcagccaacttcaaagcaaggaagagatgtgaggaagaatgttaggaatgttatttgtgctcctgggtgacagattagagtgaa

SEQ ID NO: 38742 - DNA, 201 bp, Homo sapiens
agtttcgttcttgttgcccaggctggagtgcaatggtgtgatccgggctcactgcaacctccacctcccgggttcaagcgattttcctgcctcagcctccsgagtagctgggattacaggcatgcaccaccatgcctggctaattttgtatgtagagatggggtttctccattttggtcaggctggtctcgaactcctgac

SEQ ID NO: 38743 - DNA, 201 bp, Homo sapiens
cctccctcacgtgtgtttggccaactgctgcttgggacattgtgcctccctcagcggctcatgggtgctgattggagccagattggctctttgctggatcraaaggtgtctcaatgctctgaaatgccataccagtcaagggtgcagttgaacttaacggtagcgtatacccgtccatctgggttacatgcgccccacatc

SEQ ID NO: 38744 - DNA, 201 bp, Homo sapiens
gaaattccagatagaggagagggtaggagggggttcagctgaggtgtagcaaatagatttgactggaacaggaacagtgtagtagagataaaggcaattcygtaagagtagggagaaactacccaaaggccttcacctatggcaggaattgagatttgaactgagggaaagttgagagcagcagccaacttcaaagcaagg

SEQ ID NO: 38745 - DNA, 201 bp, Homo sapiens
ttgtctcatcttgctgctcttcgatgagaactggtccactacttcgccctgacccccgaagttgccaatatcatttgtggaaatcttactgtttggaaatktactggtttcccagaacaggagctatttgcctgagtttcttttagagaaagctgaactgcctttttggcactccttgtcttcctttttttttttttccca

SEQ ID NO: 38746 - DNA, 201 bp, Homo sapiens
ctgctcttcgatgagaactggtccactacttcgccctgacccccgaagttgccaatatcatttgtggaaatcttactgtttggaaatttactggtttcccmgaacaggagctatttgcctgagtttcttttagagaaagctgaactgcctttttggcactccttgtcttcctttttttttttttcccatgtatcttcataa

SEQ ID NO: 38747 - DNA, 201 bp, Homo sapiens
atttggcaagtgtttgaattgagaagaaatttcaaaagtgagggtatatttcctagtatctttttttttttttttttttgagatggaatctcactctgtcrcccaggctggagtgcagttgcgtgatctcagttcactgcaagctctgcctcccgggttcacgccattctcctgcctcagcttcccgagtagctgggacta

SEQ ID NO: 38748 - DNA, 201 bp, Homo sapiens
aaatagctctaatagaattttctttctgcagaaatgactgggaacccccagataagaaagtagacacaagaaaatatcgtgcagagcccaagagcatttaygaatatcagcctggcaagtcttccgttctgaccaacgaaaagatggtaatgtgcatattaaagttattttgtctcaccgtgcccatgttctttaatcaga

SEQ ID NO: 38749 - DNA, 201 bp, Homo sapiens
gtttgaattgagaagaaatttcaaaagtgagggtatatttcctagtatctttttttttttttttttttgagatggaatctcactctgtcgcccaggctggwgtgcagttgcgtgatctcagttcactgcaagctctgcctcccgggttcacgccattctcctgcctcagcttcccgagtagctgggactacaggcactcgc

SEQ ID NO: 38750 - DNA, 201 bp, Homo sapiens
ctctctggggaggtttttgagcactgcaattaaaaactgtctgcaggaggccgggtgtggtggctcatgcctgtaatcccagcactttgggaggccgaggygggtgaatcacctgaggtcaggagttcaagatcagcctggcaacatggtgaaaccccatctctaccaaaaattcaaaaattagccaggcgtggtggcggg

SEQ ID NO: 38751 - DNA, 201 bp, Homo sapiens
tgcgatttgcagagaactatgctgtcctttctattatagaaggaagtatactgggctgggcctaggcatatctgggttttggtacttacttgattctgccrtttttactgtgggattgtaggtgaattctttgacctcccaggccccagacagagaaacatatcctgctgtttacaggatatgtttgctttgcagactaaa

SEQ ID NO: 38752 - DNA, 201 bp, Homo sapiens
agctgtgggtttctctggtgctggctgcctgaaggtcacctagtggcaccttgtaatattgggggaagagatttctgcaggctggtgcattcagggagccrgtttactccgatccgtctgtcatctttgcggtacacggcatttactttgccagtcttagcttgagattgctcaggtcgttacatgaccacaaagtggaga

SEQ ID NO: 38753 - DNA, 201 bp, Homo sapiens
cagagagttcaggctccctgagctgggagtatttggggaagggaaaagaggaggaggtcggaaagtttgtgatgactctgaagactctcaggtttgtcccggggggactcaggccgccaaactgttcacttttctgcagctcggtgttgggagtgtgctctcttttggagtcacccatcctattttgggatgactgagtca

SEQ ID NO: 38754 - DNA, 201 bp, Homo sapiens
acacggagcctggagcgcagtagatgcagagtcaatatttgtggattgaagtttattaactttgtggttgagagttcagggtctgcagtcacatagacttaagtttcaaatcctggctctgccatttgcctgctcgatgatcttggcttgtgacttacctctctgagcctcattttcttcatttgtgaaattgagataaac

SEQ ID NO: 38755 - DNA, 201 bp, Homo sapiens
ttttgtacatctactgtaggataggtggtctgtctcagtggttacaagcagggctctggagcccaagggcctgagtttaaaccctagtttcttcgtttacttttttttttttttttttgagatggaatctttctctgtcacccaggctggagtgcagtggcgcaatctcagctcactgcaacctccgcctcccaggttcaa

SEQ ID NO: 38756 - DNA, 201 bp, Homo sapiens
tataagggtgaacaccctataatatcttttacaaagtatgttttcttatctgtcactatccaagaattttctttctactggggttcccttttaagggaacytggtaaattgctcataaagaggttttatcctttatattcaatgtaaaatcagccattcaaatttcaggaacctttaggtcatgcattacctcttaggtgt

SEQ ID NO: 38757 - DNA, 201 bp, Homo sapiens
tttgagatggttcagtctgataatatgtaggaagtataggagttggagttcagtgttttctgaccagaatacaccgataaagttgattattttttcttagaaaaaaaaaaaaaaagaaatctgcgatatccacctttcttgccatttgcttccttctcttgaatatgggtaattaaagattctggttgcagaatttgcatg

SEQ ID NO: 38758 - DNA, 201 bp, Homo sapiens
gccttgatgcctatttaggtttgttctgtatgtagaagtgttctgaaagagggaattcatttagccttggatatgtaggaaaaaggtctgagacgtttttwaaaaaaattctttagagtgtaatattcaagagaagaatgcatcttgtgtttattccagttgttttctggagatggggctgtaagaactccagcaacagta

SEQ ID NO: 38759 - DNA, 201 bp, Homo sapiens
catacttacatgaagcagcatttttggcctttaaagtaaagaaatcaaagccaaaaaggggtcagtttgtttctggctgtactctgtataaagttattaattttttttttttttttttttgagacagggtcttgctctgtctcccaggctggagtgcagtggtggaatcacagctcactgcagcctcgacgtcctgggctc

SEQ ID NO: 38760 - DNA, 201 bp, Homo sapiens
cttcagcaggtatggcttctcttgcattctcacctttctggccttctaccaaggaccccggagttacaggggaaccagggagttattccctgtgagtgagrgattttttcctctctatttctcagatgagtggaggctttcttccagtgctgatgccaatggaaatgcccagccctcttcactcgctgccaagggctacag

SEQ ID NO: 38761 - DNA, 201 bp, Homo sapiens
gagcggggagatctcggggaggaagcgattctctgattctcttgttgacctagtgagtaaataaactctctgtagtatacagaaatgacagagactaggattttttttttttttttttttttttttttttttttgtgagagagttgggtttaagtgagcaagtgggtctgaaagccctgtacaaatgttaggacttttacc

SEQ ID NO: 38762 - DNA, 201 bp, Homo sapiens
atcgcttgaacccaggaggcagaggttgcagtgagcagagatcgtgccactgcactccgcctaggcaacagagtgagactccatctcaaaaaaaaaaaaarttgtaatcacaaatgtcacacagacttataccctgctgtagtcacctaatcttacgagaagtcttttcccatgttgtatggtctatgttagttattctca

SEQ ID NO: 38763 - DNA, 201 bp, Homo sapiens
aaaaaaaagtctttatcgcagcagatacctcccagcttaagtcatgtgctgccccttagcccagcaccagcacccctggaaaaagtgtttatccacttctstctctcctgggcctgttagttggttgggagtggtcattctgagcccacagcaggctcaaggaaggggaatgagagtcagtgagtagggactggacagtag

SEQ ID NO: 38764 - DNA, 201 bp, Homo sapiens
tcgcttgaacccaggaggcagaggttgcagtgagcagagatcgtgccactgcactccgcctaggcaacagagtgagactccatctcaaaaaaaaaaaaaaytgtaatcacaaatgtcacacagacttataccctgctgtagtcacctaatcttacgagaagtcttttcccatgttgtatggtctatgttagttattctcat

SEQ ID NO: 38765 - DNA, 201 bp, Homo sapiens
gtgttctgcccacagtgggtgcccagaaagtggctgttagaagaatggacttttaaaaaataatagactgataattaaactggcaaaggtatggaattcaragggtggctcagtgtggttttggatttgcccttggttcttcctcaagtttaattttcatggagatatcaattagatgcaggattagttgcaatgcagaat

SEQ ID NO: 38766 - DNA, 201 bp, Homo sapiens
tcagaccgtgtcggaagctaatgccagttgtcatgaaaatagctctaatagaattttctttctgcagaaatgactgggaacccccagataagaaagtagayacaagaaaatatcgtgcagagcccaagagcatttacgaatatcagcctggcaagtcttccgttctgaccaacgaaaagatggtaatgtgcatattaaagt

SEQ ID NO: 38767 - DNA, 201 bp, Homo sapiens
gtctggatgcgacagggagtgtggtgcactcagaggtattttcatgtacctgatctttgattctcaaagattctccaattcttcaattggagagaatcaargaatcatactccctgtgaggagtatggggtaaggcttatattttataggtgagaaaagtaaaatttagcatggctagtgaacttgctcctggtcatacaa

SEQ ID NO: 38768 - DNA, 201 bp, Homo sapiens
ctgaagcctggccagcaccaggcgccttggctccagctctgcccgttgctgattgcatttggctgttgggttttttggctttctgatgtgtcgtttgtatyggccatttagcctattctgtttcacagccttttcatcctaggaatcacacaacttgagcatttttgaccttgtaaggctttgtagaagagactgtaaatt

SEQ ID NO: 38769 - DNA, 201 bp, Homo sapiens
ggggagctctgagccagggagccgtctggatgcgacagggagtgtggtgcactcagaggtattttcatgtacctgatctttgattctcaaagattctccarttcttcaattggagagaatcaaagaatcatactccctgtgaggagtatggggtaaggcttatattttataggtgagaaaagtaaaatttagcatggctag

SEQ ID NO: 38770 - DNA, 201 bp, Homo sapiens
gatttacagggctagaagttagaagatatttatgattatcttcaaaatatcaaggataaatgctacaagataacaaatatactgtgatggttgtggtagayagttgcattccacctgtacccctcaactgccattgactgatacgagaaaatcagttctgactcatgcacatcttcatctatttgtgggcttctggcataa

SEQ ID NO: 38771 - DNA, 201 bp, Homo sapiens
ggagtctggaaaaggtaccaaatgcggagcttctgttgcctactctgcgtggagagtcaggacatattatttcccagcagtgatgtgtgacagtgttctcrgagcattttcaaccaggaaatgtacctgagcctttgtgttcagcctttttgccatgtctccattacataggcatgatccactgcccacagggcagttctc

SEQ ID NO: 38772 - DNA, 201 bp, Homo sapiens; identical to SEQ ID NO: 5878

SEQ ID NO: 38773 - DNA, 201 bp, Homo sapiens
gctgagtacctggggagggctcagagaggcattgtctagtagaaatataatgtaagccacatgtgtgattttaaaatgttctagtacacacagtaaaatgraacaactgaaattttaataatatattgtaacccagtatatctaaaaattattactgagattttacattctttattttgtactaagtttttgaaatccagt

SEQ ID NO: 38774 - DNA, 201 bp, Homo sapiens
atgctctgagtcctttggcctcatgaaacattcttaaagatgatattgccttgtttttgttcttgtttttttgagattgaactcaattactggcctgtttwgcagacagccaagggcactgctgtcctgtcgcctgtaaagttctgcacaaatgcagggtgctggatggagtcactacaagctttgtgttgagttttctct

SEQ ID NO: 38775 - DNA, 201 bp, Homo sapiens
tcttctttttttttttttttttttgagatggagtctcactctgtcacccaggctggagtacagtggtatgatctcggctcgctgcaacctctgcctcctgrgttcaagcaattctcttgcctcagcctcccaagtagctgggactataggtgtctgccaccacattcggctaattttttttgtatttttagtagagaccag

SEQ ID NO: 38776 - DNA, 201 bp, Homo sapiens
ctagtagaaatataatgtaagccacatgtgtgattttaaaatgttctagtacacacagtaaaatggaacaactgaaattttaataatatattgtaacccartatatctaaaaattattactgagattttacattctttattttgtactaagtttttgaaatccagtgtatatttttacacataacacatttcacttcatac

SEQ ID NO: 38777 - DNA, 201 bp, Homo sapiens
cctgtagttggagttacttgggaggctgaggtgggagcatggagcatcccttgagcctggggtgttgaggctgcagcaaatcatgatcttaccgctgcacytcagcctgagcaacagcatgagatcctgttgctcaggaaaagaaaaagaaaagttataaacagaaggctttgtatttcagtttataacttaaaaataagg

SEQ ID NO: 38778 - DNA, 201 bp, Homo sapiens
actgctctcatgcagactgaaatagcttagggcatggggggtaagtaagcggtgcgatgggctagaggttgggcttctcagagctcatccctgcttcctakaggttcactgtgacctgtccaggctgggctggaggtgcagccaggggagactgagaagtgtggatgactcaatgatcttgctcctggaaaagcagaggtg

SEQ ID NO: 38779 - DNA, 201 bp, Homo sapiens
aaaagatacaggtgtgagagcggaataaaacaggaagttggggtggagaggaaagctagtgacaagtagggttgtagggagaaggagaaagcaaagacagrcttgcatggaacgagataaatgtgcatgagcaggcttgtgagcagagttagaaaacagcacaatttgaggtggaaccagtttgtagtaaggatcttctct

SEQ ID NO: 38780 - DNA, 201 bp, Homo sapiens
atatgacaggtgtcagggctcaggtgtagcatcacaacccgtgtctcctactctggctttgcagctcactcccttttaaagagcttccaattgagccgggscttcagctctaaaaatgacaataagtcacaggtcctctaggtcctaggatgtgccttcagagatgaagcccaccagatgaccctaggctacctgcagata

SEQ ID NO: 38781 - DNA, 201 bp, Homo sapiens
cttttaaaatttgtaatttttaccaaagttacacaggcatagagtttcaagaatccaatatttctacatgactgcagtctccgacaccgtcaccgttagcyccctgctgccccggtggcagccactttaaaatcttagctgattcttttgatatttacttccacatttgatagtaacctgtatgttttactaccttttgga

SEQ ID NO: 38782 - DNA, 201 bp, Homo sapiens
atatattttctttttactatatacatgcgttttgcctattatataattataaccacagagccgggcacagtggctcatgcttgtaatcccagcactttggkaggctgaggcaggcagatcacttgaggtcaagagtttgagactagcctggccaacatggtgaaaccctgtctctactaaaaatacaaaaattagccaggc

SEQ ID NO: 38783 - DNA, 201 bp, Homo sapiens
gagcttgttctggtaggagcttttcttattttgtcaccatcgcatctgtgtcttgttctttgaaatatgacaatgaggggaagacacacctattacctatkctagtagggttggataaatccacaatgagcagagttgctgagtgtataaggtttttttttgacagatattgtggtctctgggacatatcctacctacatt

SEQ ID NO: 38784 - DNA, 201 bp, Homo sapiens
caacagaacctgctactcaaaaagtcctcgtgtgcaagagctggtactcacctgtgcattgtcattgtcacgtactatcgtcatactagctcttaaaatakcaaagtagtctcttaacacccagggtccattctccttctaccctctcagcatccagccattaaatggttaatagcaggcacagggaggggcctcccagag

SEQ ID NO: 38785 - DNA, 201 bp, Homo sapiens
gtacagtttgtccaaccagtcaacacattactcttccttttgttctgacataagtggtataaaatgaggtaatagatgcattttggaaaaagtaatggcaytatacaaatgcaagaaatgttattgataggcttttatggcttagatgagtctgacttgaactttcagcatcatatactccattagtcgagaacattgcag

SEQ ID NO: 38786 - DNA, 201 bp, Homo sapiens
ctactcaaaaagtcctcgtgtgcaagagctggtactcacctgtgcattgtcattgtcacgtactatcgtcatactagctcttaaaatatcaaagtagtctsttaacacccagggtccattctccttctaccctctcagcatccagccattaaatggttaatagcaggcacagggaggggcctcccagagagtgctacaact

SEQ ID NO: 38787 - DNA, 201 bp, Homo sapiens
ctggagtgcagtggtatgatcttggctcattgcaacctctgcctccttgactcaagtgattcttctacctcagcctcccgagtagctgggattacaggcaygtgccaccacacctagctaatttttgtatttttagtagagatggggtttcgccatgttggccaggctgctcgaacttctgatctcaggtgatccgccctc

SEQ ID NO: 38788 - DNA, 201 bp, Homo sapiens; identical to SEQ ID NO: 5914

SEQ ID NO: 38789 - DNA, 201 bp, Homo sapiens
aagatagacttaactgcctattagagttacccgagtcttaatggagttgatactgttccagctgagagtaaagatgtgtggtatttgaattgactcttatrttagacattcatctatgtcctccacattcatttctacctgagtggaattttctggctgtggacccaaggctgaggctctgcagttagagctcttctgtgt

SEQ ID NO: 38790 - DNA, 201 bp, Homo sapiens
cttcactaggattgggagggtcttgctacagtgagaggaagtcactgcccttaatttgtctttctgtggcccataagtgaatggcctgctatagtgtgcaygtctttctgttattaagattaggggtcccagaaactggcctgtgactgctgaccacacttgacacctgcagtttttggagttgcagtgaatgttttctta

SEQ ID NO: 38791 - DNA, 201 bp, Homo sapiens
cagaaatctctgcagcgtgctgtctcaactcaagcgagtgggtcttctcatgttttgtatgtgtgtgttttttcataggtacttcaagaaggacaaagcartttggtacttttccaggcaactatgtaaaacctttgtatctataagaagactgaaaaccatggagattatttttattggaggaggaagcatcattcatga

SEQ ID NO: 38792 - DNA, 201 bp, Homo sapiens
tggtggtggaaccagtatctaagtagcaacagacttgagaagaatcaaggcaagagaaaccaagagacccattctagaggccatgatgaagtcctgcccaygcttcatgccatgatgaagatgccatggggcatctttaaagggctctcagccctgttcccactggcctgcctcctcctccttgtttacccgcccacccac

SEQ ID NO: 38793 - DNA, 201 bp, Homo sapiens
ggctcatgcctgtaatctcagcactttgggaggctgaggcaggaggatcgcttgagcctaggagcttgaaaccagcctgggcaacataatgagacctcatygctataaaaaaaaataattaaaaagaaaatctttggcttttgaattgtttgtgcaaatataacattgaaaactttgtttaggtctaaagaacatgccata

SEQ ID NO: 38794 - DNA, 201 bp, Homo sapiens
tttgtgttatatgtactcatttgtgtgtgtgcacatgtgtatgtagtcctgtgcagatttgtataatgaccaccataatcaagaaaacctttgaggctggrcgctatggctcatgcctgtaatctcagcactttgggaggctgaggcaggaggatcgcttgagcctaggagcttgaaaccagcctgggcaacataatgaga

SEQ ID NO: 38795 - DNA, 201 bp, Homo sapiens
cccacttccccagtgttaatattttatgtaggtatagtatgacatcaaaaccaggaaattgacaatgctacagtcttattcagatatcatttgtgttatakgtactcatttgtgtgtgtgcacatgtgtatgtagtcctgtgcagatttgtataatgaccaccataatcaagaaaacctttgaggctggacgctatggctc

SEQ ID NO: 38796 - DNA, 201 bp, Homo sapiens
tcagctgatagtataactcatccatttactcagaactcaccattgccgccatgttcccctaacttcatgatgcacagtaaacctctgaaaacttgcccctytccaccacccacagattaatttcattgaccacaggtgttcaaagacttcgcatggctgtaaccaggttcatctcattccccggctgtaacaatttgctaa

SEQ ID NO: 38797 - DNA, 201 bp, Homo sapiens
atagacctgtgctggacatgtagacaggcctgtttgtatttactagtgttgtttcatatgatctggaaacacatgaatcctaagctattcttatctctgcmtgtttctgaaccatctcagtagctttcagaagccataccacagttgttgggtctgtgggttacatcggtctccttgatttattcagatgtcacatttgtc

SEQ ID NO: 38798 - DNA, 201 bp, Homo sapiens
tctagccttgaaattctatgatgctctgagtcctttggcctcatgaaacattcttaaagatgatattgccttgtttttgttcttgtttttttgagattgawctcaattactggcctgtttagcagacagccaagggcactgctgtcctgtcgcctgtaaagttctgcacaaatgcagggtgctggatggagtcactacaag

SEQ ID NO: 38799 - DNA, 201 bp, Homo sapiens
agccatggctgggtcaccctttgctttcctggcagctggcttcactctgaacttaatgaggttgcagagctgaggggccacggaagggtttcccccgttgraaggactctgctgcttgtccctattaaaagagtaaatgctgactgctgggtgactccaaggaagggcttttccagccagtttccatgtggtcagtgtcta

SEQ ID NO: 38800 - DNA, 201 bp, Homo sapiens
tgggtaggagttatgggaaaggatgagcaaattcttcctggcagaacaaagcactgttcagctgttcctctctttccccttctctaaaataagagttcaawacagatagcagagtctagggttttctttgtaaacaatgaaagggcagggccaggaaagaaagtttttattgtgcagcattgataatgatcaggtcatcct

SEQ ID NO: 38801 - DNA, 201 bp, Homo sapiens
tacaaaagtctcccccaagcccatctcccaggtggagcagacaggaggatgctgtgagagcacatttgtgtcttaatccatgcagcagcgtcattggcaayctagtcattgatggccaggcgccgtgtgactgccccatgccttatgaggtgagctgacagcgggatggactggaaggtgcactgtctctggccgacatgc

SEQ ID NO: 38802 - DNA, 201 bp, Homo sapiens; identical to SEQ ID NO: 5818

SEQ ID NO: 38803 - DNA, 201 bp, Homo sapiens
tggctgtaggcatgtgtttagcatccagtgaggagcatggggaggggtgggggccctattagtttaaagcctgtggggtcatggaccccatccatgtgaaytcatttatacaagagacttaaggcgtgtgggggagggtggcaggtggagtgagtcccactctctccttggtgagactcacctttgtctgcaaacaagcag

SEQ ID NO: 38804 - DNA, 201 bp, Homo sapiens; identical to SEQ ID NO: 5820

SEQ ID NO: 38805 - DNA, 201 bp, Homo sapiens
ttgttgcatttcgggagtctgaggctgccattttcccactgtgaggtattaaaaactttccctagctcacaaggatgctgtgaatgacagatcagatacgwggaccaaggcgtatttcatgcctggtacagatggcatttatcagcctgaaatatcccttgctcagccttttaccttcacctgtaataaacagtgatgtgt

SEQ ID NO: 38806 - DNA, 201 bp, Homo sapiens
cagaggtttaacttggatataaagagcatcttttctgaagctgggcccagctgatctgagtggtgacatttagcactactaggcattagcttccagcatcyaccacctcttgccacatgccactgtgagtgttcatggactttctcctcttctctctgcaaaagagaattctattgtctattactcaactttcctagtaac

SEQ ID NO: 38807 - DNA, 201 bp, Homo sapiens
aattaacagtattgctgccaaaaacttcactccaggtaccacacagctaacttcaaacaaatgttgagaacacagtccagttgtatactggggctttcctytagcttgtctccccaccccattgctctaacaacctcttaattatttaaagactcagagatgctttttcaaagtagcattttctctgaagccacatgcatt

SEQ ID NO: 38808 - DNA, 201 bp, Homo sapiens
gcttaggctacaggggagcagggaggatcttagcttctgtaactgagcagaactcaggaaagtctcagccaacacagaggacatgacatccgaggggagcyccagggatgcgtggaatttccatcaggtgagaagggaggaggaggcattctcggcagagggcctcataggaaccaaggcctagaggtctgaaagtatctg

SEQ ID NO: 38809 - DNA, 201 bp, Homo sapiens
ggagaggaggagggagaggcaagaagtgtttatcagcacaggagatgaaaagtaaaaggaagtttccagaggagctgtctgtgtttaggatatcaagtggyagagaaggagaaaggattttgaagatactttcctgtgcattgggattttgaagatactttcctgtgcattaataatttaattccctccttttggtgctcc

SEQ ID NO: 38810 - DNA, 201 bp, Homo sapiens
gcaagtcagtgtttaaaaacccatagctagtcatgattatgtttgtagcttggttaactctgggcttggaggggttcctccaagcacacatgtcccagggygacagggcctgccggccttccttccttggcgtgcctttatctattttgggatggggacctgggcggggcttaggctacaggggagcagggaggatcttag

SEQ ID NO: 38811 - DNA, 201 bp, Homo sapiens
atatccaaaatattatcatttccatatgtaattgcataaaaaaactctcagatattttacattcttttttaaaattctgagtcttcaaaatccaatgcgtrcatgactcttacagcacatctcaagtcacactaaccatatttcaagggctcagttgccacctgtggctagtggctggagacgtatgtcctaccctgctgt

SEQ ID NO: 38812 - DNA, 201 bp, Homo sapiens
ttgataaattaacagtattgctgccaaaaacttcactccaggtaccacacagctaacttcaaacaaatgttgagaacacagtccagttgtatactggggcyttcctctagcttgtctccccaccccattgctctaacaacctcttaattatttaaagactcagagatgctttttcaaagtagcattttctctgaagccaca

SEQ ID NO: 38813 - DNA, 201 bp, Homo sapiens
aaggcagctttgcaaataagtactaaagttgtactagcccataaaaatcagctctactcaactggcatagatggctaaatgtttggtgtgctcaccaggtmatttgctcataactaatagttctttgtaaagggctttcttttcttccacattactgaaaattattgcagaatgctgttatgcccagattcagacttgttg

SEQ ID NO: 38814 - DNA, 201 bp, Homo sapiens
ggcgttgcctaggaagagttcagaaattctggagcctttgacctgatgatcccactcttgggaatttctatcttaattccaaggaaacaaaaatatcaccyacatgaagggggggtatgagtaagtacgttatgtgtatttacttgatggaatattatgccgctgttaaaatggtcattaggagaaaagcagctacatggg

SEQ ID NO: 38815 - DNA, 201 bp, Homo sapiens
tactgtgtacgggacatggtttcctacctactcatgtgccattaaagatgcagtattaaccaattggcttttataaagtgtcaatatttgtgtttatttcraaaaccttaaggcagctttgcaaataagtactaaagttgtactagcccataaaaatcagctctactcaactggcatagatggctaaatgtttggtgtgct

SEQ ID NO: 38816 - DNA, 201 bp, Homo sapiens
atcaagggccagagaaggaggaagggaggggcctggaagaagggtatgggtgtggaaaagcccaggagactgctccccagaatctctctctcaggtggggrgttggaaggaggcgttgcctaggaagagttcagaaattctggagcctttgacctgatgatcccactcttgggaatttctatcttaattccaaggaaacaa

SEQ ID NO: 38817 - DNA, 201 bp, Homo sapiens
tttttttttttttttttttttttacatttatttaaaagaagttgtggttgtcatagtgtgatgcagagagtgggtaaacataccagggatgtgctactccyctaaagatctggatccttggctctttcctggaggatgctgaattcatgtccttgaagaggttttggagcttctgagacctctgggtgaaatacactcttt

SEQ ID NO: 38818 - DNA, 201 bp, Homo sapiens
tctgtccatgctaggaagtatcttttcacctccactgcatcaggtgcccctgctcagtgctcccataacacaggtgcatactcagatcactacacttaccrtagagggtttagctcaggggtagagcatttgactgcagatcactacaattacccattattttataattcattttgagtgtctggatctatcttttattca

SEQ ID NO: 38819 - DNA, 201 bp, Homo sapiens
gaaactcccaatgtctaaattgccactactgagtagttgtgtttttgtaggtattgtacctcctttcactgaattgaataaatatagaatccatttactamagggagggcaaggcttctccttcaggatttaaaccgtaagtccctaaagacatttggaggaagtcttatctggatgcaggaggacagaccttgtgtttca

SEQ ID NO: 38820 - DNA, 201 bp, Homo sapiens
ttccccggctgtaacaatttgctaaccaactgtcctttaatccttcaggagtcttggattcagtcttcaattttggaccttttcttttcagacatggatcytacaaaaatctgcactgggaagggagcggtgactctccgggcctcgtcttcctacagggaaaccccaagcagtagccctgcgagccctcaggaaacccgg

SEQ ID NO: 38821 - DNA, 201 bp, Homo sapiens
cggggctctttttgaaagaatggtctaaaaaggcttctatgtatgtgagagagaaaaagaaggagattggttttgtgcagagacctgagtggagtaaaggraccaggggaggagaagtgttcaggcagagggaatagcaagtgaaaagaaaggcctttgacgtaggataagcttggcttagtagaggagcagtttggctgg

SEQ ID NO: 38822 - DNA, 201 bp, Homo sapiens
gtgtgatgatggctcactgaagccttgacctcccaggctcaggcagtcctctcacctcagcctcccaagtagctggggctacaggcacgcaccaccatgcycggctaatttttgtatttttagtagagatggggtttcaccatgttggccaggctggtcttgaactcctggcctcaaatgatccacccacctctgcctccc

SEQ ID NO: 38823 - DNA, 201 bp, Homo sapiens
ggagcagaaatctctgcagcgtgctgtctcaactcaagcgagtgggtcttctcatgttttgtatgtgtgtgttttttcataggtacttcaagaaggacaargcagtttggtacttttccaggcaactatgtaaaacctttgtatctataagaagactgaaaaccatggagattatttttattggaggaggaagcatcattc

SEQ ID NO: 38824 - DNA, 201 bp, Homo sapiens
agggaaagctgttcaaagccacgtgggaagggcgggaggaggctctggtgtttttgctcaggagggtgtgagttcatcagatacctcttgggggggggggsggtgtgtgtgtgtgtgtgtgtgtctcttacggtcccctgggacagtcaaatcatttggatgggtagtggtcaaagcctcaaactgacagtcacatgctgc

SEQ ID NO: 38825 - DNA, 201 bp, Homo sapiens
caggcagtctttacatgtcattttatgtaactgccatcgcttccccatgaggtaggtgctgtttaattgttcccattttgcagatgaaggaactgaggctycaagagtctaagtgacctatttaaagtcatggaattagtacaatgtagagccaggactccaactcaccagatcctaaactctccctttaactcccaaggc

SEQ ID NO: 38826 - DNA, 201 bp, Homo sapiens
attgaacacccactgtgccaggcagtctttacatgtcattttatgtaactgccatcgcttccccatgaggtaggtgctgtttaattgttcccattttgcasatgaaggaactgaggctccaagagtctaagtgacctatttaaagtcatggaattagtacaatgtagagccaggactccaactcaccagatcctaaactct

SEQ ID NO: 38827 - DNA, 201 bp, Homo sapiens
tgccaaggttaggggcagaatgggaatgagaactagaggagtctggagactttggcgcttgtggctgtttaaaggccccctaggctccctgtgtaaaagtwtgtttttagacaacaatgggaacctttgtctggagggttggtctgaccagggttgaatatgaaagggtctgtgtgtatgtgtgtttctttcctttgcttt

SEQ ID NO: 38828 - DNA, 201 bp, Homo sapiens
catcttcatctatttgtgggcttctggcataaaatgcagctgtcccatatttgctttgtctgtttcccagacaaatcgtctcattgagcttcttccatctyctcgttgggcgccttagttttcccattttgaggctcctagtgagttcctttagtcttgcagtctccagctgccatagacatttttgcctcttcccaccat

SEQ ID NO: 38829 - DNA, 201 bp, Homo sapiens; identical to SEQ ID NO: 5804

SEQ ID NO: 38830 - DNA, 201 bp, Homo sapiens; identical to SEQ ID NO: 5875

SEQ ID NO: 38831 - DNA, 201 bp, Homo sapiens
gagaatgagatgttgtgtacttaagctgtgttcttttccagtggtttgattttaaagtttatttgctgacatagtaagaaatttggtccaaaagagagtcygggagtctaaacctcaaatgcttcagaggtcaggcaggtagcacgagatgaagggtaagagattgaagaccaaactgttaggaatgttctccgcactcac

SEQ ID NO: 38832 - DNA, 201 bp, Homo sapiens
agtatatccaaaatattatcatttccatatgtaattgcataaaaaaactctcagatattttacattcttttttaaaattctgagtcttcaaaatccaatgygtgcatgactcttacagcacatctcaagtcacactaaccatatttcaagggctcagttgccacctgtggctagtggctggagacgtatgtcctaccctgc

SEQ ID NO: 38833 - DNA, 201 bp, Homo sapiens
ttcttttatgtgcgctcagcagcagcccagggtgtggatgttatgcctgtgtacaggggaggaaactgaacatcagagattgagaactcgtttaacatcayagagttggcaggtggaaaccagcatggccagccttcttgcgtttttagttatgactgtaatccccactctagaatgatgagtgtctccttgagtctggct

SEQ ID NO: 38834 - DNA, 201 bp, Homo sapiens
tatgtttaaacagatccacaaactgaacagaggtactgattttcatttgtagaagctgtgctgtgctatgtgccaatacacgttttgtgggcctgaactcrctttgctaggatgccagaagactgggtcctgcagttggacctcattaggtactggtctgcctgagcccagccatgcaccttcagagcacaggagggagga

SEQ ID NO: 38835 - DNA, 201 bp, Homo sapiens
tggcatcaagggccagagaaggaggaagggaggggcctggaagaagggtatgggtgtggaaaagcccaggagactgctccccagaatctctctctcaggtsgggggttggaaggaggcgttgcctaggaagagttcagaaattctggagcctttgacctgatgatcccactcttgggaatttctatcttaattccaaggaa

SEQ ID NO: 38836 - DNA, 201 bp, Homo sapiens
aaaaataatttcttaattattgcaaagtctcctgagggaataactttactccacttctggaattctagttttgtcatcctaaaaaatgcctccctccctgcccccccccccttttttttttttttttttttttgcctagactgtcccagggcatagtgtggcaataatcctgtctctccaagccagcttacccctactaga

SEQ ID NO: 38837 - DNA, 201 bp, Homo sapiens
ttaactttttctctgtagcctaaagctactttctcgtccagtggcagaactggcctcactttgctttactactcttggcatcaagggccagagaaggaggmagggaggggcctggaagaagggtatgggtgtggaaaagcccaggagactgctccccagaatctctctctcaggtggggggttggaaggaggcgttgccta

SEQ ID NO: 38838 - DNA, 201 bp, Homo sapiens
gcccctctccgccaccgtgcctagctagcctaaggcagtgcttttaaagtgctgagctctgtgtccaaggcatagcaagtgcttcatctttgggctcttamtgttatgagctgagttcctccctgcaaagccagggacttggcttctcagcaattccttgagtgcttttgctgtgtgcgaagaggccgtgcaccttttccc

SEQ ID NO: 38839 - DNA, 201 bp, Homo sapiens
ccttctcctctgcaaaatggacataataaaaacaccagttcattgggatttagtgaggattaagtgaggcaatgcttttatttatttatttttgagacagrgtctcgatctgtcacccaagctagagtgcagtggcgtgatcttggctcactccaatctctgcctcctgagttcaagtgattctcctgcctcagcctcccg

SEQ ID NO: 38840 - DNA, 201 bp, Homo sapiens
tttccagctcctttccctggttcttagtcatttaaccactactcagaactaggaaaaacaacatagtttagtttttctcattgataccgcaatagtttacsaggatcttccataccacagttcttgggatcatttacgttgtttttacaaaccctgaaaagtaacacatagtgccccacggggccttcttggagaatggtg

SEQ ID NO: 38841 - DNA, 201 bp, Homo sapiens
agtcaggctgtctgggttccagtatcagctcctccactgcagcaagcacacagcttcacctgtctgtgtctcggtttcctcatctgtgtaactaacctgayattagtggttacctcctagggttgtgagggtcaaatgcgttaatatattcaaagcatttagaacatttccttgtgcatagtaagctatatataagcattc

SEQ ID NO: 38842 - DNA, 201 bp, Homo sapiens
ggtctgatttttagttcagaagatacagccacttccacaagggcttcaggtcttgtataggttctgcaagttttagaacccagtgtctagcctacgtaggratgtgtgtcatgcctttggagagccacctcccaccatagagacacgcgtgagtttgatttgctccagagatgcagtttagatactcactccgagtagtac

SEQ ID NO: 38843 - DNA, 201 bp, Homo sapiens
caggtgtggtggtgcatgactggtcccagctacttgggaggctgaggtgggaggatcgcttgagcccaggaggttgaggctgcagtgagccgtgatcacascagtgcactcaagcctgggtgatagtgcaagaccctgtctcaaaaacaaaaacaaaaataaaaataaaaataaggaataaaaaccttaatacaattgctc

SEQ ID NO: 38844 - DNA, 201 bp, Homo sapiens; identical to SEQ ID NO: 5912

SEQ ID NO: 38845 - DNA, 201 bp, Homo sapiens
agaaggggctgtcctgactcaaccagcccatctcagggtggttttgagactctttgacgaaggggtgtatgaattctaagtttatgcagatgttgaggtaygtgcactattctggggcacagcagggaaggggttaatcttcctgaatttgcagaaaggaaattctcaaggtagggaactgatggctagtgacctcctacc

SEQ ID NO: 38846 - DNA, 201 bp, Homo sapiens
gtgaactcaaactgaagagggatttattggcaagatcttgggtagttcacggagtttatggaaggttggagaactgcactcagaactggggcaggaattcyaggaggctgagctggctgggatcagagccagaatcaggccctggaatagtctggataggacgttgctgctgttgccacaacaggggaggactggatgcag

SEQ ID NO: 38847 - DNA, 201 bp, Homo sapiens
tagagaggagataatccccgcaagaggggaggggtacataggggagcagggtgaaaccagcttggcaggggtgggtaagactggtttctgggggttgggcrtgttgggcaggacaggattgatccagtgggatagaggagccatggcagattgttggacaggtgagtggcatgaaaaaggcatgttagggccagaggaatc

SEQ ID NO: 38848 - DNA, 201 bp, Homo sapiens
gggagctatggaggcaaaacaccatagtgcataggagaagctggagcatgctggctaggagatttaaaggctgtttgttttccaagaacctttgcaggacmttgaattcatttttacagacatgctcaatttcttcctagtcatatatccctaaactacccatataaggaccttctttcctttcccagtaaccaacccata

SEQ ID NO: 38849 - DNA, 201 bp, Homo sapiens
caggtagcatttaacttgtgctttgaaatgtaaggagggtttcaagaacatggacaagaactttctgggtctattggagacactcagataatatttgtggratgaatgccaggctgaggttggaggcagaaggaacatggccatattggtggatggtcattttgcagtttggtgatgaggtcaagcttgtacagctcagac

SEQ ID NO: 38850 - DNA, 201 bp, Homo sapiens
acttcgtgcttgttgtgttctgagctcccaggagtgtcatgggattctagactgaagttaatgtcagggtcaagtttatcccactttcttccccttgaacrgaagtatcagcgactcagtgtttatcctttctggctttctgaagagccttctgcaccctttgcaataatgtagagggtgcatttgaagagaagtgacatt

SEQ ID NO: 38851 - DNA, 201 bp, Homo sapiens
acactgaataagaaacaagtgttttttgttttttttttctttagagacaaagtcttgctctgtcatgtcacccaggctggagtgcagtggtacagtcatakctcactgcagcctcaaactcctagactcaagcaatcctcccacctcagcctcccaagtagctgggactgcaggtgtgtgctgccatgcatggctaatttt

SEQ ID NO: 38852 - DNA, 201 bp, Homo sapiens
atagggtattgtgggaggcccagctatgagtaaggaacagaagtcctagatctcagggaggacatggggaaatagggcctgagagtaaagtggagagatgrctcctggggacagggtggggggcggtgtggggaaggattcacagaacaggtagcatttaacttgtgctttgaaatgtaaggagggtttcaagaacatgga

SEQ ID NO: 38853 - DNA, 201 bp, Homo sapiens
tgacatacatagttgactaaacatttatctagtgttctactaaggtcagacaaatgcaattttgcccagatttctacactagaacaaactggctagagtgratttttctgctttgctttctagaaatttgtgaaaatgtgtccttgttgtccatgaatcctgattttaacttgtcattgtttcttatgttcagatgagacc

SEQ ID NO: 38854 - DNA, 201 bp, Homo sapiens
tgctgcccttgagctgctaatagtgtggcgcaagagtgtgtaacttttctttgttaatggactccttgagagaagctattgaaggcaatagattgattctaaaaaaaaaaaaaaaaaagccacacgtgtaaacatgtgcacatgatttctgtggatttgcacacactcatgaatttcagggttcagaatcactgattggtg

SEQ ID NO: 38855 - DNA, 201 bp, Homo sapiens
taaaattgaaatttaattgatataggcaagtggttatgcaaatgatttttgcccatcctcccattttagtcaggcaattttttagaacaactttcaaccastactttcttcagttgtctttgagatttttataaattaaagaaaaagaaacaggaaaaaaaagtgatttggaagctcatttaaagtcactgtggttgaaaa

SEQ ID NO: 38856 - DNA, 201 bp, Homo sapiens
cataaaattgaaatttaattgatataggcaagtggttatgcaaatgatttttgcccatcctcccattttagtcaggcaattttttagaacaactttcaacmagtactttcttcagttgtctttgagatttttataaattaaagaaaaagaaacaggaaaaaaaagtgatttggaagctcatttaaagtcactgtggttgaa

SEQ ID NO: 38857 - DNA, 201 bp, Homo sapiens
tggcactttgggaggctgaggtgaatggatcacctgagctcaggagtttgagaccagcctgggcaatatggtgaaaccctttctctaataaaatttaaaamatttgcaggtgtggtggcacgcgcctgtagtcccagctgttcgggaggctgagggatgagaatcgcttgaacccaggaggcagatgttgcagtgagcaga

SEQ ID NO: 38858 - DNA, 201 bp, Homo sapiens
ggcatgcaatggcgcgatctcggctcactgcaacctctgcttcccgggttcaacctcagccttttgagtagttgggcttataggtgcccgccaccacaccyggctaattttttgtatttttagtagagatggggtttcaccatgttggccatgctggtcttggtctcctgacctcaggtgatacaccccctcggcctccca

SEQ ID NO: 38859 - DNA, 201 bp, Homo sapiens
tagtagccacatgtggctattgaaattaattagattgaaataccattaaaaattcagcttctcggtcatgctagccacaaatgctctgtaggcacgtgtgrctagtgactgccctacggtcggcatgggcagttgtagagtgtttctgtaatctcaggaggaactcttaggcaggctgatcatagagctaagattctgtgt

SEQ ID NO: 38860 - DNA, 201 bp, Homo sapiens
tgcaacacatgcatgtccctgtcctcaggaactcagggctgcagagcttggctgcagtctgctgcagggtcagggagcttagagccgtgttccatgcaccsttgtctttttcattagtggtagctgaggatgaagtagagaatctaataattctctgatagcctagccctgggagtagtctagtcttgggcgtggaacctg

SEQ ID NO: 38861 - DNA, 201 bp, Homo sapiens
cctgagcaacagcatgagatcctgttgctcaggaaaagaaaaagaaaagttataaacagaaggctttgtatttcagtttataacttaaaaataaggagcayttaattcgattctgcaaatgtggagtaataagaatgtgatcttagttccacattgcatcaggttacaggtggcacagaaaagatacaggtgtgagagcgg

SEQ ID NO: 38862 - DNA, 201 bp, Homo sapiens
tatttactttttatagcttaagtttggaaatgcatgcatttagtgtatattagcccttcccctgctttcttctagcttttaaaatttgtaatttttaccaragttacacaggcatagagtttcaagaatccaatatttctacatgactgcagtctccgacaccgtcaccgttagccccctgctgccccggtggcagccact

SEQ ID NO: 38863 - DNA, 201 bp, Homo sapiens
atgatctgatttggtccatggcctcagagcctgtgctcagggcttattgattttgggcctgtatatatgtgttccacctcagttgttaaacaaatgccacygagaagagaggttttctcagaaaagatggtgtttgcagtgttttatattacctttttggtaggttagtatatattcagttacaagttcaaaacttcttaa

SEQ ID NO: 38864 - DNA, 201 bp, Homo sapiens
ggagcattcttgacggtacagtttgtccaaccagtcaacacattactcttccttttgttctgacataagtggtataaaatgaggtaatagatgcattttgraaaaagtaatggcactatacaaatgcaagaaatgttattgataggcttttatggcttagatgagtctgacttgaactttcagcatcatatactccattag

SEQ ID NO: 38865 - DNA, 201 bp, Homo sapiens
gctcacttaaaatgagaacatggaatcaatacagtacaaccacagacccaaagatggttagacttaaaagagtcctttctagatggtcccatgtggcccasggagatcttaagctccttggtgtaaaggtcctcagcccaggtgtcccatgtctggtgaatttaattttcttctttcagccctgcacctgccatccttgca

SEQ ID NO: 38866 - DNA, 201 bp, Homo sapiens
tagctcacttaaaatgagaacatggaatcaatacagtacaaccacagacccaaagatggttagacttaaaagagtcctttctagatggtcccatgtggccmacggagatcttaagctccttggtgtaaaggtcctcagcccaggtgtcccatgtctggtgaatttaattttcttctttcagccctgcacctgccatccttg

SEQ ID NO: 38867 - DNA, 201 bp, Homo sapiens; identical to SEQ ID NO: 5813

SEQ ID NO: 38868 - DNA, 201 bp, Homo sapiens
aaaagcagtcactgatggtgaatgttagaatcccacaagttccgtggaagatggcatcaggtggctctgccatgttctaatggacatgactgtcagtggcrtttttagcttgtctcctagaattttttctttcaggttctaaatattacacaattgcatatcaaatgtcacgtaggagctaaaaaggatatttgtcattag

SEQ ID NO: 38869 - DNA, 201 bp, Homo sapiens; identical to SEQ ID NO: 5796

SEQ ID NO: 38870 - DNA, 201 bp, Homo sapiens
tgggggtagtttgtgtgttgtcacctggcagctcctgctgactattttaagatgaaatgttttggtgcgattgcttctttaggaaatctggctgaacagtygagtccgtttattgcccccttcatcctcctgaggaacttcatgggagtagtttggctttcattaaacaaaagcagtcactgatggtgaatgttagaatcc

SEQ ID NO: 38871 - DNA, 201 bp, Homo sapiens
gttccctcattcctgagcatggtatgggtctgtactgcagatgtctgtataatatatgatgtggtaaatacatagcctcagggattttgtggtttaaaagraaagttgagagggaactgtggactgtctgtaagagcagagacctctcctgccatatcaaacccaccctgctttcccattttcaagctctaacagactgct

SEQ ID NO: 38872 - DNA, 201 bp, Homo sapiens
agaatttgcagcaaaaccagataactggtatgttacttcatggtccgtggcttctcctgactttccgtgacctgtgaggacctcctggaccatgtcagtgrgaaggcgagtccaggtgaagccccagagaccagcttttttcccatgctttgtgatgcctcttctaccacttcaggctggtggtggccactgccacctctc

SEQ ID NO: 38873 - DNA, 201 bp, Homo sapiens
cacccccactgccctcctgaagttgctccctcagagtgttcctgtgacttctctcttgcctaatctaatgccgcctcctcctctgcttcaatttctggggtttttttttttttttcttttgagacatttaaccacccacttcttggagttctgtcttccctggttcagtggcaccttgtgtacttttctggttcatctcct

SEQ ID NO: 38874 - DNA, 201 bp, Homo sapiens
tttgttgctttcctgcagccaccaggcacatatacaactcaagtcagaagtgtgtgccagatgccaactgagccagagtccttgtaagcctataatatagrcaaattgtgtgtgtgtgtgtttatatgtgtgtttgtgtaaatataaacacagagagactaatttttatatattaatatataaatgtataatgccaaccta

SEQ ID NO: 38875 - DNA, 201 bp, Homo sapiens
tctccaattagaatataaagtctctgagggcaagcaccatctcttatcttgattgataacttcaataattttattgccacagctggatgaaaaagcacccraagaggatccgtttgtctttgttttaggtctgtatattctccaagcaacctttgtacacaagagcatcttgctgcaggcagggactgttttgtgtctcct

SEQ ID NO: 38876 - DNA, 201 bp, Homo sapiens
acggtggctcatgcctgtaatttcagcactttgggaggccgaggtgggcagatcacctgaggtcaagagttcgagaccagcctggccaacatagtgaaacsctgtctttactaaaaatacaaaaaaaaaaattagccagtgggcgtgatggcaggcgcctgtaatcccagctacttgggaggctgaggcaagagaatcact

SEQ ID NO: 38877 - DNA, 201 bp, Homo sapiens
gaaataagatttaaataaaactttaaccctctgtttagtgaataaatttatatgtatatttttatctttataattttaatgattcttgtaacgaattggtstttctttttcccctgctgaaacaatgtttgggctgggacacattggtctccttttcatcccctctgttttgcttgtctttggggactcctcacccctgtg

SEQ ID NO: 38878 - DNA, 201 bp, Homo sapiens
aaagctgatcctcctcaatagtaagggactgtgtgaaagtttgtttatgctggcttagcaaccttcttttttcccccagctacagtgaaaaagcaaacttytggccagacttttagactataaatagagttatcatgtctcagtcaatgagggttaaaatgttctttttaaaaaaagaaaactttggaaattccaagaagg

SEQ ID NO: 38879 - DNA, 201 bp, Homo sapiens
tgtgcttaaatataatttcttaatgtcacttgtgtagacttcagtgatagaagaaataagatttaaataaaactttaaccctctgtttagtgaataaattkatatgtatatttttatctttataattttaatgattcttgtaacgaattggtgtttctttttcccctgctgaaacaatgtttgggctgggacacattggtc

SEQ ID NO: 38880 - DNA, 201 bp, Homo sapiens
acagaactaaaagctgataatttaattctgatcagtgtcttcctcaaggccaagaagagtctatttggtgtagagagcgcagtctttctgtctcatgataytgattaccacacaaaagcattggtgaagaaacaactgactgagttgagttagggagttttttcagagtaattttgactagttgcaattttcgatttgtgc

SEQ ID NO: 38881 - DNA, 201 bp, Homo sapiens; identical to SEQ ID NO: 5871

SEQ ID NO: 38882 - DNA, 201 bp, Homo sapiens
taaatgcttggatttctgtgatcagatggggtcatctccactcatcacttcctgaagtcactgcccatttcgtcttgcaatctgtgactctcacctttagwcccagctttggaagcctaactgcagagacattaatgcatgtaaatgtgcaaaatatgtaattttgccccacaggcagctttggtgttctcatgttatagt

SEQ ID NO: 38883 - DNA, 201 bp, Homo sapiens
ctgttttggaattgtgatcctggttaaggggttctccaaagctccataaacattgcagtcctccagcaggacagcaggatggaattattatgctggagttyggtttttattaaaatacggtcaccacaatgtctacagaataagcaggcctctgaaatgcaggctcaaattatgttccctccgcctcatcggctctacatg

SEQ ID NO: 38884 - DNA, 201 bp, Homo sapiens
ttctcattgctggctcacttggtttttctgcccactagactgtaagctccctgaaggctaagattctggaatgctcaccttcatgtccacaaggcagagcrcaatgtctgcccaataaataaatgtcatagcttggaagccagattctattaagtaattttataatcttaggtcatatgtggtatctttgttagtgctcta

SEQ ID NO: 38885 - DNA, 201 bp, Homo sapiens
aacgtaaatgaagagtttattgcattgcttggcacataattagctcagtagtccagaggcccccaagcatttatttaagctgttcctctggagcacccttygcttcctgtgagtctgattggcttctcttctgagaatcggcctttgtcaccctgcattctcattgctggctcacttggtttttctgcccactagactgta

SEQ ID NO: 38886 - DNA, 201 bp, Homo sapiens
gaagaggctttgcttctctctgccctcggaggggaatggggatgagctggatgtttgaactcacatcctgcccagacacacaccctgaatgtcaacctgtmatcctaactgtgacaattttaggtcagggatctaggctgtgagcaatttgaaaacaaaacaaaactgtggcgttctgcatagctcagctgcacataaaga

SEQ ID NO: 38887 - DNA, 201 bp, Homo sapiens
tcattccataaagccaatctgttcttaacatcctttgacattgatggtgatgatgccagggatcaggctttctgaagcacttaccaagccttgaaatcatytggatgtgggcagtcacgaccccatggaggagaatgaaagttgtaaaacctgagcatgctggagtcattgtttcccccacttctacagcgtctcctccac

SEQ ID NO: 38888 - DNA, 201 bp, Homo sapiens; identical to SEQ ID NO: 5808

SEQ ID NO: 38889 - DNA, 201 bp, Homo sapiens; identical to SEQ ID NO: 5809

SEQ ID NO: 38890 - DNA, 201 bp, Homo sapiens; identical to SEQ ID NO: 5811

SEQ ID NO: 38891 - DNA, 201 bp, Homo sapiens
ccatccaagctcaagcacccttgggcttctgtaaagaaatcatcttctttctaatgattttccaagggtgcagtaaagggagcagccgcattaattctggrgctgggtggctgatcctgtctcatatcctgtccctcatcctaagagatttcctacttcctgctccagccacactccttcctgccccccagcccgtgtgtg

SEQ ID NO: 38892 - DNA, 201 bp, Homo sapiens; identical to SEQ ID NO: 5873

SEQ ID NO: 38893 - DNA, 201 bp, Homo sapiens; identical to SEQ ID NO: 5911

SEQ ID NO: 38894 - DNA, 201 bp, Homo sapiens
ttcagtggcaccttgtgtacttttctggttcatctcctgtccctcggatgactttgcatcactttggggattcttttgccttgcagctataactgtggtgyccttccatgcatgactttagcgctttactctggccttgcttctgtccaccactgagctctgccatctccctggcgtcagccatcacttttgggctgatgc

SEQ ID NO: 38895 - DNA, 201 bp, Homo sapiens
tttcttttgagacatttaaccacccacttcttggagttctgtcttccctggttcagtggcaccttgtgtacttttctggttcatctcctgtccctcggatkactttgcatcactttggggattcttttgccttgcagctataactgtggtgtccttccatgcatgactttagcgctttactctggccttgcttctgtccac

SEQ ID NO: 38896 - DNA, 201 bp, Homo sapiens
cttctctcttgcctaatctaatgccgcctcctcctctgcttcaatttctggggtttttttttttttttcttttgagacatttaaccacccacttcttggarttctgtcttccctggttcagtggcaccttgtgtacttttctggttcatctcctgtccctcggatgactttgcatcactttggggattcttttgccttgca

SEQ ID NO: 38897 - DNA, 201 bp, Homo sapiens
atctaagtctctgggcttcagttttcttactatcaagtgaggaaagctgtagtgcctcccaggttgtatgacgatcagatgagattccgctcattaacagmtcagcactgagctgctgcttaatagatgcatgacttaatagatgtgcattcctgttaccaggcggcgctctgtgggttcacttaccattgtattcagggc

SEQ ID NO: 38898 - DNA, 201 bp, Homo sapiens
ctacaggtgtgcaccaccatgcccagctagttttttttttaaagtttttttgtagagctggagtctcactatgttgccaaggctggtgtcaaatcctgacytcaagcaatcctcctccctcagcctcctaaagttctgggattataggcaccagctactgtgcctggccaagagaatgtgcatttctgcccagctccctgg

SEQ ID NO: 38899 - DNA, 201 bp, Homo sapiens
cactggcataatgggagccacgctaatacccctgcagtcagctggctgcatgcacattgtaccatctaagtccagaggacagtgaggactcagggttgagmtcctaacgagttatgccagggcttcttggtcttactatgtgctgtataaatcttacttacactgtgtgttcttttatcacagaacagcaaaaacgactca

SEQ ID NO: 38900 - DNA, 201 bp, Homo sapiens
acactggcataatgggagccacgctaatacccctgcagtcagctggctgcatgcacattgtaccatctaagtccagaggacagtgaggactcagggttgakatcctaacgagttatgccagggcttcttggtcttactatgtgctgtataaatcttacttacactgtgtgttcttttatcacagaacagcaaaaacgactc

SEQ ID NO: 38901 - DNA, 201 bp, Homo sapiens
agtttcctcatctgtaaaatggagatgatagcacctacctcaaagagtggttgattacaagggcttatgatcctgggaacatggtcagcactttataaacrgaagctatagagccaccatcttgggtgatctagaactgcttctagaactgagaatatttttagaacttccttagacccagattgagttcctgaagatgtc

SEQ ID NO: 38902 - DNA, 201 bp, Homo sapiens
atgtggtttcatgataggttctaactggcacgtgtttttgtgtgctcaacagcatcctatctcttctcttaatggccatctagttcattctttaacattastggggaggaagcctccctggggcccagggaggtgaaatgacttactctgggtcacatagtagtagaagattccacactagaattgtatctcttttctgtt

SEQ ID NO: 38903 - DNA, 201 bp, Homo sapiens
cttagaccccgaactttgtgtgattttgaagttgatcaatagcagttctaagaaacttttataatcagttaaatatgcactaaagaaattatatgttgtcraaagaaaagttggagccacatcaaaaagtggaaatcagccatggtcttgctgctccagtgttatccctgctaacattttggtgttgcttttgccaaatac

SEQ ID NO: 38904 - DNA, 201 bp, Homo sapiens
tgtgccaaacactattcagagtactttgcttatgttaattccttatggagtgggtgctgtgatgatccccactgttcaaatgaagagaccaagagactatraggttaaggaacctgctcaagctggtgtgatagagttggaattcaaacctaggcagaggttggggtcttataccctgccccaccctgcctcctcctatgt

SEQ ID NO: 38905 - DNA, 201 bp, Homo sapiens
aatacaaatgtataatgaaagtttgagagcaaagctgactgattttgggtccatatttttacttatgagtgagatttgagacttcaaggcactgtgggtaktgtcttcaatttgtgcaataaaattaattttcaaagtacaagttagaaatttagttgaagggcacatgtgagaataattttaaaatgctcttgctgtttt

SEQ ID NO: 38906 - DNA, 201 bp, Homo sapiens
tcctgcagttggacctcattaggtactggtctgcctgagcccagccatgcaccttcagagcacaggagggaggaagcacttgtgtgcctgcctcagaggtrgaatttgagatctgctctcaaatccttcctcccagatgtggaatgcagcaggctgagcccagcactctgcctgtgctccagcatctgtctgcctgggatg

SEQ ID NO: 38907 - DNA, 201 bp, Homo sapiens
atggattcccttctatgatggaatcatcttgagataagatgtaaacagctagaaaattgtggcagtcccctgaatcctggtgtagatctggaagcggggcrggctgggagacaccacactggcataatgggagccacgctaatacccctgcagtcagctggctgcatgcacattgtaccatctaagtccagaggacagtga

SEQ ID NO: 38908 - DNA, 201 bp, Homo sapiens
ctttcgtttcctcctctgtacaatgggaaagaataatcgtacccaactactagagttgttgcaaagtttacaagtgttatttgcaaaagcgctaaaacagygcctggcatttagcaagctctcaggagacggtcactgtcatggttgtgattataattacatttccctcaaaaggtaccaagactggggtcatataaggcc

SEQ ID NO: 38909 - DNA, 201 bp, Homo sapiens; identical to SEQ ID NO: 5872

SEQ ID NO: 38910 - DNA, 201 bp, Homo sapiens
taggactccacaaaggagatgtggcttcccttccacatgagtgcccaggatggtgagaaaccaataacccttcaatgccaaggaccagcaaggtcttgatsactagaattggaatgaactctggactaggagtcagggatccaggttctagatccagctgattttcagtgttatcttgggcgatttgtgccccttatctga

SEQ ID NO: 38911 - DNA, 201 bp, Homo sapiens
ggcaacttggtttttgggaaatgccaagtgtaatgtcagctgcttctgccaagtccctctgatgacacctagtgagacatctttgggcacagaaatgcctrtagttcctttttgtttcttccttgaatagatggattccttttatttacccaaatgcctttggttcttgcctttctctgttgtccaagtcctgcccttggg

SEQ ID NO: 38912 - DNA, 201 bp, Homo sapiens
gttttgtatttttttcactatgtgtggctcctgtattaattttcacccatgaatctgggttcttaataaaaagggccccagctcccacacggaaccatgcrggagcccattctccttcagcggtgccatgccccttactggcagtggctctccttgcccagaaagtgtctgtaatgtgggacaaagtgaaattttgtttct

SEQ ID NO: 38913 - DNA, 201 bp, Homo sapiens
tgaaatgtaaagttttcaagctgtttcctcatgtagaaagggcttgttagtctgaatttctgataacagtggaggtttaattattttgttcagagctcacrtcttccttttgactctgtgctctctgacttcacagttttcctccactcctccccctcccccttcctctctgcattaatttgaatgagaatgggactggag

SEQ ID NO: 38914 - DNA, 201 bp, Homo sapiens
gtcttagggatctttgtcactttaatattagagtgaaaaaaatgtcacagtaggataggataatctccaaatctcagaagcaagcatcagtaaaattgctyggtgatgctgatgctaagagtagctttctgaaaaaactgttgctcaactcctccctgttcttacattgatgtcttcttgtcctcacattgtcttacattt

SEQ ID NO: 38915 - DNA, 201 bp, Homo sapiens
ttagtgaaaaaagtaaattctagctccatggtcttttaagcccttcagtcacttggttttacatttccccatagtcaattactcaaaaaagcatgctgtcrgggccaggcgtggtagctcacacctgtaatcccagcactttgggaggctgaggctggcagatcacttgtggtcaggagttcaagaccagcctggccaaca

SEQ ID NO: 38916 - DNA, 201 bp, Homo sapiens
ttatccccaatatgcagattataatgttagtattaataattttattggtatttctggcagagacctcaggtttttaaagtcaggattctcacaagtcttarggatctttgtcactttaatattagagtgaaaaaaatgtcacagtaggataggataatctccaaatctcagaagcaagcatcagtaaaattgctcggtgat

SEQ ID NO: 38917 - DNA, 201 bp, Homo sapiens
cccctgcagtcagctggctgcatgcacattgtaccatctaagtccagaggacagtgaggactcagggttgagatcctaacgagttatgccagggcttcttsgtcttactatgtgctgtataaatcttacttacactgtgtgttcttttatcacagaacagcaaaaacgactcagtagcctttcaggtaggtgagaaatatt

SEQ ID NO: 38918 - DNA, 201 bp, Homo sapiens
attggcccatgtctcctactcttagaccccgaactttgtgtgattttgaagttgatcaatagcagttctaagaaacttttataatcagttaaatatgcackaaagaaattatatgttgtcgaaagaaaagttggagccacatcaaaaagtggaaatcagccatggtcttgctgctccagtgttatccctgctaacattttg

SEQ ID NO: 38919 - DNA, 201 bp, Homo sapiens
ttggcatgcctttgtcattgtggacgcacattgccttttcccaacattcacatttttttcgaaatgttcccaaaccatttgttctataattttgccgggarccattattggtctgtagtcgtccaggcttatttatttgtagatatcaggatcacccactttcctgctttaaaattgagacattggcccatgtctcctact

SEQ ID NO: 38920 - DNA, 201 bp, Homo sapiens
gccctcctctccctcaaaaggaccgctttgcatggcagtcccccaccatccacaatacctataaggattccctctacctgagctcaccaaagccttatgtcccactcggcacccccagacagcagaacccctcacaaccccagcctatctctgtcctcctggcagctggatcggctcccaaaggtgtggtgtgccctggtt

SEQ ID NO: 38921 - DNA, 201 bp, Homo sapiens
aggttctcagggaaagaggttttagtgtcaaaagagttccaaatgagctgaatgtttcctatgggaataattctcagagcattaggaaaaaatatcctgamcataataaacacaagaaagaatcaggaaatctggtttgttatatagcagctaaaatgcaaatagggaaatctctcaaaaaggtttcaagggctgttggct

SEQ ID NO: 38922 - DNA, 201 bp, Homo sapiens; identical to SEQ ID NO: 5838

SEQ ID NO: 38923 - DNA, 201 bp, Homo sapiens
atcacagaacagcaaaaacgactcagtagcctttcaggtaggtgagaaatatttatttatgtgttaatccctgttcctgttgaaaccgtcttccggtcacygcccgatattcaatcagcaatatcttccaagatcctctgatgtcttggggagactctttgttgctggactaccaagatgatgaaaataggcatagttcct

SEQ ID NO: 38924 - DNA, 201 bp, Homo sapiens
ccctctcttcattgtagaaggggaagaggagggtgctggaggttgacttcaaggctctttaaagcccatctcaggagaatgacattctccttggtctcctkctacccagtgggatttttatcctaatgtgatttagacccctcctcaggttttattctgcaggttacaacattgtataggaacaagaaaatggcgtatggt

SEQ ID NO: 38925 - DNA, 201 bp, Homo sapiens
ttgggagaagggcacatactttagtaaggcaggaggagggcttgctactgggattgggaggggttaagagttaggattactaagagagatgagactgggcmcctgcctgcagcatgggcatagtctagcagtggtgcaaatgtgccttaggagagacacagcatgaggaatacttggcattcagaagagggtatatatttt

SEQ ID NO: 38926 - DNA, 201 bp, Homo sapiens
ctagtgagtgacttgcaaggagataaaatctagatggtaagcaattgaactagttgtttgtaattagttttatatttaagctgtgatctttttctcagtawactcaataagataactcagtggagtcagagactgttttgagggtgctctggtggtttcctggagctcaaacccaggagactgactcattcgggcctttct

SEQ ID NO: 38927 - DNA, 201 bp, Homo sapiens
tgctagggcgtagaagaggatagtgaaggtatccaggagacgttttgtttaacaaacatcagttaaggcagctgagtgcattgctctgtgttgcataaatwttctgagcataagacaacattcacaaaaaatgcatttagaaaaccacaacaaattaataaggcctctgagcactttcaagggctagtcaatttgaatgtt

SEQ ID NO: 38928 - DNA, 201 bp, Homo sapiens
tcacacttgaatatgtatctgccattaccccccaactgtcttatgaaaggaagagaagactgtatgatagtctatgaagagaaggctgagcattggttgartatttactgagcatttaagtttagtgttgtaatcagattcaaattacaacaaagttaatgtgttgtctagtgagtgacttgcaaggagataaaatctaga

SEQ ID NO: 38929 - DNA, 201 bp, Homo sapiens
agggcccaggcattctaagaagctggcaaggggcatgtgttgggaggccagtaggagactccaaattgagtaggagacagcaggcaaatacagaaacatgaaaaaaaaaaagtgtttatttaccaattggaaattgatctgcatctcttaattcctcatttgagaccttccttctggcaaccagatccatcctccaaatta

SEQ ID NO: 38930 - DNA, 201 bp, Homo sapiens
tctcagaaagaaacattcaatagggacttatgaacagaaaccatgtctgtgtctcggatggtggtgagacaagatggtggatccctgcgctattacccccwagacccagggtttatatacggtaccatagggagggagtgacttacgaagggatgtgtaggacatttgaagcatgataatatcaaggttgttttcacctaa

SEQ ID NO: 38931 - DNA, 201 bp, Homo sapiens
ccttgtctaagcaagttggaaggctaaattcttttgccttttcctttccattaaaagattattaaatgtaaaaatagtttgatacatacacatggtttggraattaaggcactataaaaatgtatacattgaaaaatttcattcttacccctgctgggtcccctatactccctccctcaccccacctccattagctggaat

SEQ ID NO: 38932 - DNA, 201 bp, Homo sapiens
tctgtaaaataagaatgtcaagtaacaattgtttcttcatccctgtgaatgtgagccttgtgttttcaaaggtcagtgcctgtgagcacatcatggtttckagtgggttcctatggtaatcaggccatcgtgactgagggcattttgtgtcaaacaacggggtgctggattttcaaccttctatgcagtttcatgcttgtt

SEQ ID NO: 38933 - DNA, 201 bp, Homo sapiens; identical to SEQ ID NO: 5874

SEQ ID NO: 38934 - DNA, 201 bp, Homo sapiens
taaaacctgcactgctttacgtctgtcttacaatgtttatattcccctgatgttccccgtctcagccggccgtgcagagtcccagcctttttaggccatgyacggctctctcttcttgaggctgttttcttgtgtgctgccaaagggctgtgcgacgagcagtgattttatttcatatctaggggttctcttcagggtggc

SEQ ID NO: 38935 - DNA, 201 bp, Homo sapiens
actgtagtcaatacatttcctttttaagtagaaacaatataaagagcttaattcagccctgaatcaatctcactttgttgccatgattgtgtaaaacctgmactgctttacgtctgtcttacaatgtttatattcccctgatgttccccgtctcagccggccgtgcagagtcccagcctttttaggccatgtacggctctc

SEQ ID NO: 38936 - DNA, 201 bp, Homo sapiens
cctaacttcatgatgcacagtaaacctctgaaaacttgcccctctccaccacccacagattaatttcattgaccacaggtgttcaaagacttcgcatggckgtaaccaggttcatctcattccccggctgtaacaatttgctaaccaactgtcctttaatccttcaggagtcttggattcagtcttcaattttggaccttt

SEQ ID NO: 38937 - DNA, 201 bp, Homo sapiens
gctccaaagtggctcttccaggatagacccattctaaagttcagggatcccggacaggcatttttctaacttgaggttatgactgattaaaaaaaaccccmaaaaaaccaaaaaaaacattgtgcctacttcctgagcaattagaagttaagagaagcttctgcccagcctctaaaatggcctggtggaactcactggtat

SEQ ID NO: 38938 - DNA, 201 bp, Homo sapiens
aaaggctccaaagtggctcttccaggatagacccattctaaagttcagggatcccggacaggcatttttctaacttgaggttatgactgattaaaaaaaamccccaaaaaaccaaaaaaaacattgtgcctacttcctgagcaattagaagttaagagaagcttctgcccagcctctaaaatggcctggtggaactcactg

SEQ ID NO: 38939 - DNA, 201 bp, Homo sapiens
gtagtgacttctgaaaggaggagatggttacaaaagagattaaaaatccaagtgacacccacacatggtctctaaaaaggctccaaagtggctcttccagsatagacccattctaaagttcagggatcccggacaggcatttttctaacttgaggttatgactgattaaaaaaaacccccaaaaaaccaaaaaaaacattg

SEQ ID NO: 38940 - DNA, 201 bp, Homo sapiens
cagagacagtgaagcccaaggcatgctgggcacctgcaggcccactgtgattagaccatgtggcacagtcagaacgcaaaaagactgtgaagtaagtcggrcccagatggtggagaatcttgaattcaagccgttagagggattggatttattctatatagtaggatgaccttgtggtccagtttcccagggtgcttcgtc

SEQ ID NO: 38941 - DNA, 201 bp, Homo sapiens
ggatgagggaagataattgccctgttctcagttttcatgagttttaagtcttttgtctgcactgtctttctccagcaaaatctcccctttctgtgcctcgstcaaaaagtgagatgagctacattgatggtgagaaggtagtcaagaggtcggccacactacccctcccagcccgctcttcctcactgaagtcaagctcag

SEQ ID NO: 38942 - DNA, 201 bp, Homo sapiens
agaggtcagcaaataaatgagtatgcaagtaggcttacataaagtatatggatagtaaattctaggataataaagggtttgcccttggctttgtttgttgrgacagagtctcactctctcacccaggctggagtgcagtggcatgatctaggatcactgcaacctccacctcctgggctcaggcgatcctcccaacctcag

SEQ ID NO: 38943 - DNA, 201 bp, Homo sapiens
cttccctgacctcacccctgctctcctcaggaacttatttagcagctcacaacccctccatttccccagccacccaggcgaaagcacccggagtcctctgyggttttcctcctctcttttctccccacgccccgccagccactccattctagcaatgtcatctgttttatcacgcacacttattttcttagtcctgtgatc

SEQ ID NO: 38944 - DNA, 201 bp, Homo sapiens
acaggtctctctgttacccaggctggagtgcagtggcacgatcatagctcactgcaacctcaacctcctgggttcgagaaatccttccacctcagcctccygagtagctgggactacaggcatacgaaacctggctaattttttttttttttcactttttagtacagacgaggtctcactatgttgcccaggctggccttg

SEQ ID NO: 38945 - DNA, 201 bp, Homo sapiens
attcccttttcactggggccagaggaacttaggtgtacctgagctgtaaagatgtttagtcttagctaacattgtctgaggcaatggaggcaagaacttgmaggacacttacctagtcttccttcaacctacctctagcatgaggatctgagggtcttaagtgaccacaagcaaacaaaagccagtggtttgttttgtttt

SEQ ID NO: 38946 - DNA, 201 bp, Homo sapiens
gtgctaatgctgtagtaagcactattttttgtttttttgagacagagtttcactgttgttgcccaggctggagtgcaatggtgcaatctcagctcaccacracctctgcctcctggattcaagctattctcctgcctcagcctcccaagtagctgggattacaggcatgtaccatcacgcccagctaattttgtactttta

SEQ ID NO: 38947 - DNA, 201 bp, Homo sapiens
tttgggggtcatgtgcctatccctgaaccaaccattgttgcccagggatgctctgattgtccaggctctagagttagtgacagaggcagcttctctaaaayttggggaaaaggggagtccgctaaggaaaatctgggtgctttcattccaaaaaagggggcctagaacctgcatagtcaataacaacagatgtcttctata

SEQ ID NO: 38948 - DNA, 201 bp, Homo sapiens
cccagggatattcaggtgatccagttatccaaagcatttaggacagtgcctggcacatagtattgttgctattccacgtggactgagtttgattccttgayacatgaaagataagacttgcgacatttaatatattcataaagtgagaacaaagtttcacctataatcccatgtggccttcaatcaaaactttgttaaaga

SEQ ID NO: 38949 - DNA, 201 bp, Homo sapiens
  misc_feature (1)...(201): n = A,T,C or G, or insertion/deletion polymorphism (see Tables 1-2)
tcttttcattttcaaatggtttagggaaaacttcagatgtgggtggatgttttccccaagagtttggggccaccaggccctcctttcaacatcacaccccngaaagccaagaagtaagtcagtcatcctgagaccctgatacatacactgggctggggacttggtccaggaccagaaaaaaaagtaccttccaactgtgct

SEQ ID NO: 38950 - DNA, 201 bp, Homo sapiens
aagatattagagaaatttaaaacacactccaggtcatgccagctctaagcgctcattttgataagcattgcagcatgaagtcaccttggatctttttccctttttttttttttttttttttgagatggcctctcactatattgtcctggctggtcttgaactcctgggctcaagcactcctcccatctcagcctactgagt

SEQ ID NO: 38951 - DNA, 201 bp, Homo sapiens
ccagaatggccatttcacctctagcttctgagtaggagagtcgtgaatgctttgtccattgtgcatgtaaacaaaagtcatataatctcacttttaacagkgtcagaagaacctatttcttcttaactattacaaatgcattttcctgcatcgattggaaatccaggacatcactaaagatttttccattttggcatgtct

SEQ ID NO: 38952 - DNA, 201 bp, Homo sapiens
gacttggtccaggaccagaaaaaaaagtaccttccaactgtgcttcttgcagatactacctgcgtgtgatcatctggaacaccaaggacgttatcttggaygagaaaagcatcacaggagaggaaatgagtgacatctacgtcaaagggtaaggttagcatgtgagagactttgccaagctcagggaaacagactctctcc

SEQ ID NO: 38953 - DNA, 201 bp, Homo sapiens
gacaaagcctgcggggatgttcttgtaactgcagagctgattctgaggggcaaggtacattgctgtgttcttcctcatgtattctgtcagctgcttaaaaygcatgttaattctaggcactgtttgcttgaactaaagtgaggcattgacatatccatgtttgtttcacaggatggctccaaccttcccattcttccccct

SEQ ID NO: 38954 - DNA, 201 bp, Homo sapiens
catggtcccccaggggatcaggcctgtggtccagctcactgccattgaggtatgctgctccccacgtgttactcatcaaatcaaacggatgtgactgcagracaggaatcttttgtatagaacatagaatcctgctgcatattttcttgctatctccaacttcctttacaacttgtccaaaaactggaggtattcatggga

SEQ ID NO: 38955 - DNA, 201 bp, Homo sapiens
actgtttgcttgaactaaagtgaggcattgacatatccatgtttgtttcacaggatggctccaaccttcccattcttccccctcaaagggcgccaaatctrtacatggtcccccaggggatcaggcctgtggtccagctcactgccattgaggtatgctgctccccacgtgttactcatcaaatcaaacggatgtgactgc

SEQ ID NO: 38956 - DNA, 201 bp, Homo sapiens
tttatgcttcgtaattttgctctctgttatatcttcctagctaatattatcttattaagaatgtatcgactgtctttagaacttttttttgacattttgckgtctcaacatagttttgctaaagtaataatttttgtgtaagtgccatacggttgtcctgcacggctaagcttaaaagaaatatgctaaccaggctttgct

SEQ ID NO: 38957 - DNA, 201 bp, Homo sapiens
gggtcattttgcatttaaccgatgagaattgtatacattacaaaagggtcatatgtgacttgggtctgaatttgggatttttctggtgttgctaaatcacwtacctggcactggatttgattaacgttttcaatgtctgttttataatgcccgtgttcttcttgtttaaccagtcatatttttactatatagatttctcat

SEQ ID NO: 38958 - DNA, 201 bp, Homo sapiens
aaggtaagtcactcaacagatctagaacaagactggatacagaacttttctccagtctgagaaaaaaatgaactggggtagccacctcacagtaggtttgktttcttagaagccaaatgtgatgaacctagtgaaccatttcaatgatgttttggtgatggcctgcaaaacaattaatcattgaagtatataagtaaactg

SEQ ID NO: 38959 - DNA, 201 bp, Homo sapiens
tcagtctaggctttcacctccccttcctgctagccacttacctggtggtgggcactaatgaaccaatggccaggaatccttaccttttgggaactgtaatrttatcattgtttgagctcctcttttgaaaatgccatgttgtttttcttttacaaaattaaataccattttcactaattgcattcattactttgattttat

SEQ ID NO: 38960 - DNA, 201 bp, Homo sapiens
aattttcaggtaactctctaaatctagataggagattggccatgactcagaacaaaccagaaccagggtctctctgtgtctcatctgtttctctgagtctrtttcatctgccctcttgctgtgatcaccttcctatgagtccagatattacagagagtccttgagtgcttgtgtgttgtaatgcagccccatctacttcta

SEQ ID NO: 38961 - DNA, 201 bp, Homo sapiens
gggttgcagtgagccgagatcacgccattgcactccagcctggatgacagagcgagactgtctcaaaaaacatacaaaaaacccagaataccagtgatgcyagctgctgtaaaaactgaacctccaaatttccgtgttctaacacaaaaaaagtttatttctcattgattctaagtaggtattcctccaggtgggtagctg

SEQ ID NO: 38962 - DNA, 201 bp, Homo sapiens
cactttgggaggccgaggagggcagatcgcctgagcccaggagttcgacaccagcctggccaacatagtgaaaccctctctctactaaaaatacaaaaatyagctgcgtgtggtggcacatgcctgtaatcccagctactcgggaggctgaggcacgagaatcgcttgaacccaggaggcaggggttgcagtgagccgaga

SEQ ID NO: 38963 - DNA, 201 bp, Homo sapiens
ttctgctcctcagcttgattcgtgacattgtaaaaaacgatgttttgaggccgggcacagtggctcacacctgtaatctcagcactttgggaggtcgagtygggtggatcatttgaggtcaggagttcaagaccagcctgaccaacatggtgaaagcccaactctactaaaaatacaaaaacaaacaaacagaagagccgg

SEQ ID NO: 38964 - DNA, 201 bp, Homo sapiens
ataaatacatttgtttctctgaggccaaaatagcatatgggtttttaggactctgaaatagatttctaggccaaagtcagagtgtagcgcagattttctgsacccactatatgggagcacctaagagtacatgagcatgtatgtgtgaatctgagaagaacctgcaggctcctccgtaactccgagccacgtgatgctatt

SEQ ID NO: 38965 - DNA, 201 bp, Homo sapiens
aggactggcaacgtttgatagcagggatttcctgtccttgggaaatagggattctttgtgccctctacttaattttgtgactccctcttcccctgcctggyatacagtgtctttccacagtatctgattaagacatagcttgcaatttctagtttatgagtttgcctattatgactagagtgatctcaactcctcactttt

SEQ ID NO: 38966 - DNA, 201 bp, Homo sapiens
attgaggactggcttgataaattaatgcagctgactgaagaggtaggacttttaaactacacaaacgtcacctgatatggaagaagggctctgcgaaatgrcaccaagaataggatggtggaaagagaatctactacattatcttggatattgagcagctctgacagattgtaaaaatcagggagtaactgggctgaggat

SEQ ID NO: 38967 - DNA, 201 bp, Homo sapiens
ctttgactgtacaagaggcactttgctgcctctgacattggcacctggggaggcctaggccctctaccttagtgccttccttcactgagccactgctcctrtcactcagttaggtatggatttcaatcgcaggattattctagggaatctccgggccacctcatggcccctattcacatcacagtgtgtgtaaaatggtgg

SEQ ID NO: 38968 - DNA, 201 bp, Homo sapiens
tgattctaggaagcaaaagaagggaaagccagtttctctcagctgccactgtttccatcttctttccagtgactccttgggccgtaggttaaaccctaagrcctaaaatggctttgggattttaatctccctgtattccttatgaacatcaagagaccggcaggtctgctctggcaatgccagatacactctactccagcg

SEQ ID NO: 38969 - DNA, 201 bp, Homo sapiens
tgatgtggtttgcaagatggaaatccaacataaatgtatttgacagttctgaagcctaaaattaggttattcttcaaatcctctgtttctttttttcttcrtttttctagatacacgttgcctctcacagaaggaaaagccaacgtcacagttctcgatactcagatccgaaagctgcggtccaggtctctctcccaaata

SEQ ID NO: 38970 - DNA, 201 bp, Homo sapiens
gttcaaattaatcttaaagactttgccagtaattaagacagaatttttccttttgaatattatttttaaagtgctgagttaccttcccctctctttaaatygttttcatagattctagcttggggcttaagaaatatgaaaaacttccagatggcttctatcacatcccccagtcttgttgtggagtgtggaggagaaagg

SEQ ID NO: 38971 - DNA, 201 bp, Homo sapiens
cccacagctggtaagcagcagaggtaggatttgaagctaggcatttaaagcccacaggtttccctgagcaagcatatgttctcttcttgttcttatttctrgtatgtactatttatcaagccacccaccaccacccaccctggttatcctgctcagatgtcctccagcagccatactacacacagcctgggaattctgtgc

SEQ ID NO: 38972 - DNA, 201 bp, Homo sapiens
tcattattattatactggcattggagcgatgcactcatgtcagatgctctctaaatatttcttcacttgacacttatagcgacactgatgggagggattaytatcaccactttacagatgagaaaacttagcacagagaagtaactggtctagagtcccacagctggtaagcagcagaggtaggatttgaagctaggcatt

SEQ ID NO: 38973 - DNA, 201 bp, Homo sapiens
tgggcagacttcccctcatccagcagggtggagccaaggagatgccggctctgcagcccccagatggctccagtccatggcctcagtcttagggggtagcyttcttctccgcagagactcttggggactctggaacaggaattcaggaaggaacaacctttcctatgtgcgtggccgttactcagagtcctatccatcatg

SEQ ID NO: 38974 - DNA, 201 bp, Homo sapiens
tttctgggcgtctgttatctcactaggggaaagatactccatcaaaacaatgtattcaggaggattgtccccatggggatttatctaagagcttgcggggrgcttaaggtcccctggttcatccttctcattttacaggtgtgagccaggactcccccccgccccctgccaccacccctgcacccacacaactggctgcat

SEQ ID NO: 38975 - DNA, 201 bp, Homo sapiens
atgcacggttaggatttacattgttcgaggcttagagctccagccccaggacaacaatggcctggtaagagtttgggtgtggggccttctcctgtagcaakataattacagtcatcagccacaataattgtcatgttctttctttctgggcgtctgttatctcactaggggaaagatactccatcaaaacaatgtattcag

SEQ ID NO: 38976 - DNA, 201 bp, Homo sapiens
acttggggatgatggagatttgaagggatgattgtcggggaatttaaggatcactttgtttctctagggcaaagatgaatttttaggacgaagcattttcwctcctgtggtgaaactgaactcagaaatggacatcacacccaaacttctctggcacccagtaatgaatggagacaaagcctgcggggatgttcttgtaac

SEQ ID NO: 38977 - DNA, 201 bp, Homo sapiens
catcacacccaaacttctctggcacccagtaatgaatggagacaaagcctgcggggatgttcttgtaactgcagagctgattctgaggggcaaggtacatygctgtgttcttcctcatgtattctgtcagctgcttaaaatgcatgttaattctaggcactgtttgcttgaactaaagtgaggcattgacatatccatgtt

SEQ ID NO: 38978 - DNA, 201 bp, Homo sapiens
aattattgttattcctatcttcaaagaatgtgcagtatttcactctttctcaccaccacctcctccatcacactggcccatgttctcctcttgactcccartttctgctctgccctctcttctcccctgtgagctctcaaataattacttgagaatcatttcactttccctactggaaatatgcaaagtgcaatatacatt

SEQ ID NO: 38979 - DNA, 201 bp, Homo sapiens
ccaaacagtcctccaaacagaacaggttgttaaaaaactttttaattttaaataatataatatttttaatttctaaaattaaaaatgcatgtagacataarataaacaacccagaagggattatgcaactaaaaagtgaaaattctccccacacctcttctattctttctctctcccactgttagtccttcagggtcacca

SEQ ID NO: 38980 - DNA, 201 bp, Homo sapiens
ctttgtttctctagggcaaagatgaatttttaggacgaagcattttctctcctgtggtgaaactgaactcagaaatggacatcacacccaaacttctctgrcacccagtaatgaatggagacaaagcctgcggggatgttcttgtaactgcagagctgattctgaggggcaaggtacattgctgtgttcttcctcatgtat

SEQ ID NO: 38981 - DNA, 201 bp, Homo sapiens
atatccttcgggtacaccaggttccatgagccagatccgaattgaggctggagtgagtgcctgtgagccaggggtggccattctgccctaagttccatgcrgacagccaggctgtgaagctgaatctagctgagattagactacacagacctctgagaccaatttcaactctgagacttgatgattcttccaaacagtcct

SEQ ID NO: 38982 - DNA, 201 bp, Homo sapiens
catgtgcagaacgtgcaggtttgttacataggtatacacgtgccatgttggtttgctgcacccattaacctgttatctacattagatatttctccttcccytggcctctcacccctcctttcccttctttttcttatttttctcttctttattttctgtttcttaggaacaaacttcaagaaaagaagactcctttagatg

SEQ ID NO: 38983 - DNA, 201 bp, Homo sapiens
tgtattacatgtatatgtaatgtacatgtaatgtgcatgtattaccacttcctcaattcaggccttgtatctgggtaaatggagggaatgcctcaaaaatmactatgctgttgctgggggctggaggctgtgtctctgagtgacagtgtcacactccggaaactcatggcattactctgtgatgtccatggaaattcttaa

SEQ ID NO: 38984 - DNA, 201 bp, Homo sapiens
ccactagacgtgattatttctgaagtctggggtattttccagctctaacttttttttaattgttgaaatgaagacatatcttcctagatggagctctgaaycttttattttttatttttttatttttattttttacacagggaccgtcttactaaaaatgatgtagttggaacaacatatctacacctctctaaaattgct

SEQ ID NO: 38985 - DNA, 201 bp, Homo sapiens
ttcagtgtgtgaaaaaataaaactaacaatatatgactggtgagttgaaaatacgtatgtgtctaattcaacataaaataaacattggatattgtgaaacrttactctggattgtctctttctggtattttgctttccttccagaggagaggataaattgctcctggaaccgggtgtttcttaaaacaaaatttaataata

SEQ ID NO: 38986 - DNA, 201 bp, Homo sapiens
atcttcagatcaaggtttgactttattttctttctgaaaaagtaagaatacttacttaataattactaaatcattgagaaataactacttttttctgtctyatttttttagtttccttcagtgtgtgaaaaaataaaactaacaatatatgactggtgagttgaaaatacgtatgtgtctaattcaacataaaataaacat

SEQ ID NO: 38987 - DNA, 201 bp, Homo sapiens
cacgatgatccagtttgactcagggaaacccagaagtcatagtgctctttgcagaatgacacaagatgtcaacatgctttgttgtgtactttgaacagggwttggtttcacaagctgaaaagttgaatctgtcacatgtatgcagcataaaatcacagccgtgagaacatgtatacagcaggaagacaagcgactgagcta

SEQ ID NO: 38988 - DNA, 201 bp, Homo sapiens
catatctgtttcctccatcggagcaaaaccactgagatcatccattcaaccctgaatcccacgtgggaccaaacaattatattcgatgaagttgaaatctwtggggaaccccaaacagttctacagaatccacccaaagttatcatggaactttttgacaatgaccaagtggtaggtcgtttagaatttctaagataactt

SEQ ID NO: 38989 - DNA, 201 bp, Homo sapiens
tctacatgctacacatgattacatagcatgctattttgcttctgtgtttcgagtgaatgctctttgtcatttctaacaacaaaaaccctttacatgttgargttatttttgcatgcttgaagcaaactgctcagtcattagataaatcatcactgaatgctttaggcaccattgctgggtcctagtaatacatagaagata

SEQ ID NO: 38990 - DNA, 201 bp, Homo sapiens
ccaaatattccagtaaaatagcagtttacagtgttacgcttcttgtaagtaatctttatcctgtttttttaggagtctacatctaccatctgcgctgctaygtctatcaagccagaaacctcttggctttagataaggatagcttttcaggtaaaggaaaaaaaatctacatgctacacatgattacatagcatgctattt

SEQ ID NO: 38991 - DNA, 201 bp, Homo sapiens
cgatcatagctcactgcaacctcaacctcctgggttcgagaaatccttccacctcagcctcctgagtagctgggactacaggcatacgaaacctggctaattttttttttttttcactttttagtacagacgaggtctcactatgttgcccaggctggccttgaacccctgagctcaagcaatccttgcacctcagcctct

SEQ ID NO: 38992 - DNA, 201 bp, Homo sapiens
caaattactcagggcctggtaggaactaggaggatctgggggttgctgtagtcctggtgcatggttgttggtgatgttcagcagcgcaggtgtagattatraaagccacaacgcttatgtaatttttcatatccttcgggtacaccaggttccatgagccagatccgaattgaggctggagtgagtgcctgtgagccaggg

SEQ ID NO: 38993 - DNA, 201 bp, Homo sapiens
catccttcatcattgacatataaagacattaaaatatatttggatcagtccgatcatgtaattatttaagtattatagattatagaggaattggagttaayactatattgaaatctgacttgttatttgtctggagtttgtatgcattgatgaaacattttaaatgatgaaaaatatatctaagtcaatgaatgcaaacca

SEQ ID NO: 38994 - DNA, 201 bp, Homo sapiens
ggctgtcaaattactcagggcctggtaggaactaggaggatctgggggttgctgtagtcctggtgcatggttgttggtgatgttcagcagcgcaggtgtakattatgaaagccacaacgcttatgtaatttttcatatccttcgggtacaccaggttccatgagccagatccgaattgaggctggagtgagtgcctgtgag

SEQ ID NO: 38995 - DNA, 201 bp, Homo sapiens
tgagtgacccttctgaggctgtcaaattactcagggcctggtaggaactaggaggatctgggggttgctgtagtcctggtgcatggttgttggtgatgttyagcagcgcaggtgtagattatgaaagccacaacgcttatgtaatttttcatatccttcgggtacaccaggttccatgagccagatccgaattgaggctgg

SEQ ID NO: 38996 - DNA, 201 bp, Homo sapiens
caaggcattactggctaaaagggctaagaaaatgagatagtagaaaacacatattggaggttttctttaaatttatatgtatatgtaaatatgaagtcaayagaataaaaatgtaaaaaccaacaaattaatagactgtgtgtaaaagacataagaacattatctagtatgattgtgggcattaaagccaaacacatttca

SEQ ID NO: 38997 - DNA, 201 bp, Homo sapiens
tatgcttcctcaggggaacatgaaaaatgcggacagtatattcagaaaggctattccaagctcaaggtacctggatctatgctgctatgggtggagaatcracatcctttgaaactggccacaggcagagctaagaggatgactaaaaggtcccttgggtgggtgctaatgagcagggcccaggaaaacctctgtcttccc

SEQ ID NO: 38998 - DNA, 201 bp, Homo sapiens
gttattattgcattcagtggatgaagaaattgatgctcagagatgttaaacaacttgcccaagccagtacagcttgaaacataagggtatggcttataacrtaaaggaaggaacttgaattaaaaccagtttttccaatttttagctagtgagtattgtattacaaggcattactggctaaaagggctaagaaaatgagat

SEQ ID NO: 38999 - DNA, 201 bp, Homo sapiens
caattgaaaactaattaaaaaaaggttaaaagcaagctcctagtgcctcgaaacagcaatgattaatattaaacccatgtcatattttacaaatcatcaaraaaaataaagtttaaccaggttcctaagtatataagtaaactgctaaagtcataatctagtatgcatagattgtaaacttttagaaattagaaacttgaa

SEQ ID NO: 39000 - DNA, 201 bp, Homo sapiens
ctccacaggtttattttggagtggaaagtatgcagaacacaaattagaaaattcaatcttttgagagattaaaatagggaaggctaccactgaatttctgraattgcttttcaggtccaaacgttatcttaaccttaggcaagctctctggccagccacacccatccctggtaaatgttgtaggacagagaccccccccag

SEQ ID NO: 39001 - DNA, 201 bp, Homo sapiens
taaaactactgtgctttccttggagtgaattcctgcttactctttgttaaaatagccccctgatgagccaggcactctgagggaacacagattatctgagyctgaacacgccagacttctccacaggtttattttggagtggaaagtatgcagaacacaaattagaaaattcaatcttttgagagattaaaatagggaagg

SEQ ID NO: 39002 - DNA, 201 bp, Homo sapiens
gtagattttggagtgaaaagtgatctttaaacaaacgtgattgttttaagcctaaaagaagaatcttctgtgccatttaatgatttgattcccattgcaartttattattagatataataaagcaagtcacatcagttgcttccataacctttccacatgaactaatgatcatgtaggcatgaataaattctcccatacta

SEQ ID NO: 39003 - DNA, 201 bp, Homo sapiens
aaagttcagtttacatcatagagttaaacattgcaacatagcaggattggtgatggtagtatcagtcattcccactgtattgtaaattgctttaatcagcycgctctcctaacatctaattgaggtacactgtgttgataagaaaggctggttgaaatctctaaaaatctgagtccacttgttcatcacagtagacatcgc

SEQ ID NO: 39004 - DNA, 201 bp, Homo sapiens
catttggtgaattcagtcaaacaacagtttgttgcaattataatcatcagccaatccatttattgaggactgagtacagacaagagtctaaatcttgcacycatcaacagttatgatgacattgtgtagactagtagtcttcaaccctcactaataagtcacccagaatacttaaaataaaacccatgcccaggccccacc

SEQ ID NO: 39005 - DNA, 201 bp, Homo sapiens
cctcattcggctgatccttggtggcttcaagactgaagcagatgtcttctatttaagcagctgtgtcactaactagttccattaaaactttcataagtgtkagtactgattttacagagcctctgaaattcatctgctgtgtaggtctgactaagcatcctggatccctgattcagagaagaggaaaaaaatccacagtca

SEQ ID NO: 39006 - DNA, 201 bp, Homo sapiens
ccatttatcagaaacatgtattttttccaaatattccagtaaaatagcagtttacagtgttacgcttcttgtaagtaatctttatcctgtttttttaggartctacatctaccatctgcgctgctatgtctatcaagccagaaacctcttggctttagataaggatagcttttcaggtaaaggaaaaaaaatctacatgct

SEQ ID NO: 39007 - DNA, 201 bp, Homo sapiens
aaaataagttttattttacaggaaatagaactactttgggaggccacatcatcactattctatgtgctctttactgtggggaactataatagattcaagtsacccatttatcagaaacatgtattttttccaaatattccagtaaaatagcagtttacagtgttacgcttcttgtaagtaatctttatcctgtttttttag

SEQ ID NO: 39008 - DNA, 201 bp, Homo sapiens
ttccaaactcattttaaatattggttaataaagcagtggacagggaagttccgaaagaaaagcatattgaatgctttccacaagcaaaaaggcctttattccccacactgggctaacaccctaagtcaccctgtcttcttgtgcctcctagtggtaaagccaggtaattgaaacgcaaccaaaatcaaagtactgctgggg

SEQ ID NO: 39009 - DNA, 201 bp, Homo sapiens
tatgcagcataaaatcacagccgtgagaacatgtatacagcaggaagacaagcgactgagctaggcacggctgactagctctgagctttctgttcatgttwtgaattttctaattcttcattcaattttcagcctgtagtgtcctcaagcagaagcagtgctaaagttttcagaacagtgtatatgagaaaaaaaaacttt

SEQ ID NO: 39010 - DNA, 201 bp, Homo sapiens
taatacttactttagatttccataataaataatagctagtgatacagcattttgcaattacccattcaatagttacttgcttttagcttaccatgtgctasggactgtgttaggggctgggggctacattgcatcagtgcaagagatcccagggcccctggcctcataaattagacaccgtgggagggctggaacagcctc

SEQ ID NO: 39011 - DNA, 201 bp, Homo sapiens
ctctagctcagtacttggcacagagtagattttgaatactgtgtatctgttgattgatcatataacctgttttatcaaaataaggaatatcatcatcatcrtcgtcatcattaacatgtttacttctgttttaggccatggaggaattgcaagaccaagagggctgggaatatgcttctctaattggctggaaatttcact

SEQ ID NO: 39012 - DNA, 201 bp, Homo sapiens
tcagtacacatcagggtctcgcttcaggtgcctctgctgcagtgccagaaccttccatggggaactccctgctccctagaaaccctatctccaggcaggtkgtcagagcccactgtcattatatccagaggaaaagaatatggttgcactgagtggttctggggagttagattttagccgtggccccgttgttattctctt

SEQ ID NO: 39013 - DNA, 201 bp, Homo sapiens
tatcagtacctttttagcatgtccatttccttttactccttctctattttaggccatgctgtcatgagaaagtggcttcttctcaatgacccggaagatascagttcaggttctaaaggttatatgaaagtcagcatgtttgtcctgggaaccggagatgagcctcctgtgagtccctacattctctactttctacacttc

SEQ ID NO: 39014 - DNA, 201 bp, Homo sapiens
ggtttaccatgaagcttaaactgcagggcttaaactccaggccttgccatgtgttcacatggtcaaacctaattttgaatttgtgttttgcattttttagragggcccccaaaattatagtatcagattcccctaacccgaatcccctgttaacatttaaacatctgctctattgttttggcagttgtttttctacaatgt

SEQ ID NO: 39015 - DNA, 201 bp, Homo sapiens
ttggcagttgtttttctacaatgtcaacatgaccccttctgaattgatggatgagatcatcagcatccgggtaagggtcagcaagtaggaaggtactgctyactcactgccaggcaaagccaatcatttcttcactactcttctttcttccaggtttataattctcactctctgcgggcagattgtctgatgggggaattt

SEQ ID NO: 39016 - DNA, 201 bp, Homo sapiens
tattcctctgggtatatacccagtaatgggattgctgggtcaaatggcatttctggttctaggtctttgaagaatcgccacactgtcttccacaatggtgraactaatttacactcccaccaacagtgtaaaagctttcctatttctccacagcctcaccatcatctgttgtttcttgaccttttaataatctctattctg

SEQ ID NO: 39017 - DNA, 201 bp, Homo sapiens
acccctcctaacagactgaattcattgctaggacactccctgtctctgtccctcctatgtttagcagctccttcctcattccaagcatgaatccattcaayaagcattgatccaagcattgattgagagggtactctgccaggcagtgtgcttagctctgtgtatagggtggggaacaaagcaagtttggccctgcccaca

SEQ ID NO: 39018 - DNA, 201 bp, Homo sapiens
agctaggcacggctgactagctctgagctttctgttcatgttttgaattttctaattcttcattcaattttcagcctgtagtgtcctcaagcagaagcagwgctaaagttttcagaacagtgtatatgagaaaaaaaaactttagaatgagaaatatctggtcattgaaataattttccccatcaaagcaaaaaaaaaaaa

SEQ ID NO: 39019 - DNA, 201 bp, Homo sapiens
ccttcttcctccctcctacctgcctcccttccttcttccttttctcctgccttcttccttccttctcctccttcatcctcttcccttcttgctttttaaaytgagaaatattttacatacgataaagtgatccattcaacaagttgtgattattgtatataccctatgtgaaccaccacccaaaacaagacagaacattcc

SEQ ID NO: 39020 - DNA, 201 bp, Homo sapiens
cttctgtggttggagagtttaaggtgagtaagatgtgtgttggtcccgtttaaaatccaccttcattttctatataggcctagaataaaggacaaccaggstctagggaggggcacatcctgcagcctctgagggatgctggcattttctatataggcctaggataaaggacaaccagggtctaggtaggggcacatcctg

SEQ ID NO: 39021 - DNA, 201 bp, Homo sapiens
agttcagcaaaccatccaggtgattcccaggcaggctaaatgttgagaactgctacagaggtgttaaatggaaatgattttggcagcataatctagtagtrgtaataggtcaggacttggaacaagatgtgtaaagattcaaaccctgacttccctttctttctcatctgcaaaatgggaataatatctatgccttttaat

SEQ ID NO: 39022 - DNA, 201 bp, Homo sapiens
tggtaccgtctgtgactaatcaaatgtagaatccaagggaaaggcaagtgtatggacaagtgctaagtgagcagggggtgttaagagtgaaaaacatcagrtgatggggccaactggtcaggttttgagatgcttggggatccaggatgagaatttgggagggagctggagtcaagattttctctattctaaccacacccc

SEQ ID NO: 39023 - DNA, 201 bp, Homo sapiens
gaatctagccatcctccctctaccccacaaccctgtccatagaaaaattgtctcccatggaaccggtccttggtgacagaaaggttggggaccgctggtcygtggcatctgggtcatgtggtaccgtctgtgactaatcaaatgtagaatccaagggaaaggcaagtgtatggacaagtgctaagtgagcagggggtgtta

SEQ ID NO: 39024 - DNA, 201 bp, Homo sapiens
acctgggtctccaatttctcagctgtggcatgatgggaactggtctttagatgccttccgtcttttagattctaattttctagttccaggtattgagttakctgctctcagcaagatgtgaaatgcattgccttaggtgttggaggggatatagcaacaaacacagcactcttcttgctttcagtctatgtcagtggttta

SEQ ID NO: 39025 - DNA, 201 bp, Homo sapiens
ccatgtaacccctcataaagagagttgcaccatttcataatattaagttgaaccataagaaattgctgagattcaaccactttgacctataacaacagcartttcacatgattgaacctagtactattccctaatagtaaaaacaaaaggtagtttaaactaatttttatttagcagttgtgaataaataaagattagaga

SEQ ID NO: 39026 - DNA, 201 bp, Homo sapiens
ttgagttatctgctctcagcaagatgtgaaatgcattgccttaggtgttggaggggatatagcaacaaacacagcactcttcttgctttcagtctatgtcrgtggtttaaaatcctggtgatggcaaaccctttacaggtgtgttcccaattttgagcactgcgtaaaattaagtaacattaagttctgactgaactgagg

SEQ ID NO: 39027 - DNA, 201 bp, Homo sapiens
ctgggcatttaggtgcttttggttttgagtcgttggtttttataagcaatgtaacagtgaacatccttaaacatacatttttgtatgtttatgaacgtttwtctgtagggaagatccttgcatttggttggtctaggtttaaatgcatataaaattttgataaaattttataaccttcaaaaaggttttataaattcatat

SEQ ID NO: 39028 - DNA, 201 bp, Homo sapiens
aggcatgagacaccaagctcagcctagtttttaatagtataacaaatgaaatgtttctgtctttaaaaaatccaagcagcattaaaggaaatcaaaagtarttattctccccaatccatattccactccccaaagataaccattgatgtctgttttctgttcataaacaaggatataacttcctttttccctgcctaaata

SEQ ID NO: 39029 - DNA, 201 bp, Homo sapiens
ggtgagtggcctgctccggagagaaactctcacctgtcacctctgatcgtgatctgcggggaacccagcagccacctggcttgggctttaacctctcctcygctccatcttatgttctgaagagtcttccacttatagcttaagccacacaagtgccacaataagtattttctttagaatagaaatgaggcctatttaact

SEQ ID NO: 39030 - DNA, 201 bp, Homo sapiens
tgggactgtttgtttttttgattcctttcctgtgctggattctaggggagaatacagcagagaaaagatgcagaaacaataaagggaaaaaaaaccctcayttgagtaggtacctggcagaagacttgagtcaaagttggagcctctgtaactttcctctgcgggttgtccaaagaattccaaatccaagaggaaaattaa

SEQ ID NO: 39031 - DNA, 201 bp, Homo sapiens
gggtcagcaagtaggaaggtactgctcactcactgccaggcaaagccaatcatttcttcactactcttctttcttccaggtttataattctcactctctgmgggcagattgtctgatgggggaatttaaggtgagtgacaacagtctgcttcattcaacttacagaaagatgagaactttcataatagaaatctgattcct

SEQ ID NO: 39032 - DNA, 201 bp, Homo sapiens
tggtagcacctggtatagcacaaagctgccctggcctggtgttagcaatcctaataggtgaaggaaatgaagcaacacctgaggatcctaaggatcccacrtgctgggaaaggttgggtaaccatcccccttctgtgctgcagatccgcgtccgagtgattgagggccgacagttaagtggtaacaacataaggcctgtgg

SEQ ID NO: 39033 - DNA, 201 bp, Homo sapiens
gcgtgggcacccaaaccagtactcaactattatgctagaatgtctgcaagaaatggtaggaggtatactgtaagtggatgaatttcatatatgtgaactayatctcaaaagctgttattaaaaagaaagaaaaaaataaacagtagaaggtggtaaagatggttcccctggagtctgggggacactgtagcctgtttgcta

SEQ ID NO: 39034 - DNA, 201 bp, Homo sapiens
aaaatcactgtgtgcctctctcctgacaagaacgttctgttcacttgtgaacaacagctgatccacttgaagctcatttggacttactgttgtttccttgrctaggtttcctagaacttgacttgcgtcacacgatcattcctgcaaaatcaccagagaaatgcaggttggacatgattccggacctcaaagccatgaacc

SEQ ID NO: 39035 - DNA, 201 bp, Homo sapiens
ctagaatccaagtctagcgtgggcacccaaaccagtactcaactattatgctagaatgtctgcaagaaatggtaggaggtatactgtaagtggatgaattycatatatgtgaactacatctcaaaagctgttattaaaaagaaagaaaaaaataaacagtagaaggtggtaaagatggttcccctggagtctgggggacac

SEQ ID NO: 39036 - DNA, 201 bp, Homo sapiens
ggcttctttctgcagcaagccagagatgcagaggctctgggtagccttggtgagagaagggcagaacatcacatcccttaactccatgtagacctggagawgggaaaaccttgtagaccaaaaaatgccatttcatttggaaaactgtgattcaggtaaacacccatcctaagcgatgaatggggagatgtgggtgcaagt

SEQ ID NO: 39037 - DNA, 201 bp, Homo sapiens
aagacctgtatgttctgaatccggcttcagtgctttctcctggttttaaggcaaaatatgtggcctctccagcaggtcttgttggctcgctccttcaaaawacaatttttgtggcgttactatatgcctagtcctgtgttaggccctggagatagggtgatgaacaagactttatgctcccctcacccgtctctagaagcc

SEQ ID NO: 39038 - DNA, 201 bp, Homo sapiens
ttgggtatatacccagtaatgggatggctgggtcaaatggtatttctagttctagatccctgaggaattgccatactgacttccacaatggttgaactagyttacagtcccaccaacagtgtaaaagtgttcctatttctccacatcctctccagcacctgttgtttcctgactttttaatcattctcagcaaactatcgc

SEQ ID NO: 39039 - DNA, 201 bp, Homo sapiens
tttactacagccctacaagggaggcagtggcaagaaggatctgagatttgaccctacttgcaagcgaacaaggtcccccgtcacagtttcacagatgccgrcacatgactcctgggttagaataaaagaactttattgcccacagcaatagcaatgccagagtattgatatttgctcgactttttcatgcccgaattccca

SEQ ID NO: 39040 - DNA, 201 bp, Homo sapiens
gaaagcagccctgagcaatgatcgaccagcccagggcttccttccactctttcccatttttggatccttccctgcatagagtgaagcctgagcttcaactyatgtagagagatgatccactcatttctgttgttctgtgtgactcacctgttgagtaccagcagaggcacattaataataatggaaattttactggctctt

SEQ ID NO: 39041 - DNA, 201 bp, Homo sapiens
atagaatttaggagcttcatacaacccataagcctgttccagggccccgtattaagaactctgtgtgtgtatatggggaatcaaaggtgagcctagggccraaacaaagaaatcagaatagttcccatctatatgttttgacgtcatctctctggccaaccccaactggagttctttgcatttgggacagagaaataacaa

SEQ ID NO: 39042 - DNA, 201 bp, Homo sapiens
cttctcctccagggaaatgcacactgcatgttcagctaatattttgcatagaatttaggagcttcatacaacccataagcctgttccagggccccgtattragaactctgtgtgtgtatatggggaatcaaaggtgagcctagggccgaaacaaagaaatcagaatagttcccatctatatgttttgacgtcatctctctg

SEQ ID NO: 39043 - DNA, 201 bp, Homo sapiens
agaaaaccaaacaccgcatgttctcactcataggtgggaactgaacaatgagaacatttggacacagggtggggaacatcacacaccggggcctgtcagcrggatagggggctgggggagggatagcattaagagaaatacctaacgtaaatgatgagttgatgggtgcagcaaaccaacatggcacatgtatacctatgt

SEQ ID NO: 39044 - DNA, 201 bp, Homo sapiens
agagcaggggaagaattttgagttggtgatcttggaaatgtcttcaaaagtggacaaatcattatcattttcatggtactgtcggagaatattttgaatgrtctttgcagttcacaggattaaaatgtcagctttggctggggttgggaagacctgaatttgaaccttggttctaccatgtataacattgggcaagttatt

SEQ ID NO: 39045 - DNA, 201 bp, Homo sapiens
ggctttgggattttaatctccctgtattccttatgaacatcaagagaccggcaggtctgctctggcaatgccagatacactctactccagcgtaaaccagkcagtgcttgtagattcagttaggaggttgatgtggtttgcaagatggaaatccaacataaatgtatttgacagttctgaagcctaaaattaggttattct

SEQ ID NO: 39046 - DNA, 201 bp, Homo sapiens
ggcatcaccctcttgtcttaatcctccaactttggaaactaattgctttttgtctctttcgaccggggtttgaatcccagctccatcacttactagctgtrtgacctctaataagttgcttaacctctctgtgtcttggtttcttcctctgtaactgggaatgatcataatagaatttatctgttagagttgtgaagatta

SEQ ID NO: 39047 - DNA, 201 bp, Homo sapiens
ggagttatgcagccacaggcagggcatgctcaggattgccgggagccactggctaggaagagacaggaaggatttttccctcgaggcttcagagagagaaygtctctgccaacatcttgattttatacttgtaaggtttggaactgtcggggaatacatttctttcttttcttttctttttcttacctttctttttctttc

SEQ ID NO: 39048 - DNA, 201 bp, Homo sapiens
agtttcgctcttgttgcccaggctggagtgcagtggcataatctcggttcactgcaacttccacctcccgggtttaagtgattctcctgcctcagtctccygagtagctgggattacaggcatgcgccaccacacccggctaattttgtgttttttagtagagacagggtttcaccatgttggccaggctggtcttgaact

SEQ ID NO: 39049 - DNA, 201 bp, Homo sapiens
agacccacccatagattgcttaaaggcccaggattccctaagttaagtatgcttcagctaaatggtctctagcctcccttcttcttccatcattttgtggktctgtaaaatgattctaggaagcaaaagaagggaaagccagtttctctcagctgccactgtttccatcttctttccagtgactccttgggccgtaggtta

SEQ ID NO: 39050 - DNA, 201 bp, Homo sapiens
tcaccctgtcttcttgtgcctcctagtggtaaagccaggtaattgaaacgcaaccaaaatcaaagtactgctggggtgcttgtttaagttctgaatgttaragctgggtcctaagggatcatgtccttcagtctccttatcttgtaaatgagaaaacagaggcccaaagaggagaaatgacatatctgatgcccagagctg

SEQ ID NO: 39051 - DNA, 201 bp, Homo sapiens
tttcatccaggcgctcctccctgaaattctaagactgtaaatcctgtggaattgtttctagtgtttgtctaagaagtgattttgaattattcaaacttcgwaaaaagtcctcactgggaggagtgcctgaatcaccaccaggaaaagctccactttctgatttggtgccagttctcaagtagcctagggaggctgaggccc

SEQ ID NO: 39052 - DNA, 201 bp, Homo sapiens
aatcatgcttctggtcttcactctgttactcaccagcttgtgaccttaaccgtgtcactgaattctaaccctcagtttcttcgtcttctctggagttgacrtgaggattaaatagctgtatttgaacaaagatgggtgagaaacagtccctgattttaaggagcttacattctagtgtataaaataaatcataatagaaag

SEQ ID NO: 39053 - DNA, 201 bp, Homo sapiens
ggcacgatatcggctcactgcaacctctacctcctgagttcaagagattctcgtgcctcagcctcccgagtagctgagattacaggtgtgcaccaccacgyccagctaatttttgtatttttagtagagacagggtttcaccatgttggccaggctggtcttgaactcctgacctcaagtgatccaaccacctcgggctcc

SEQ ID NO: 39054 - DNA, 201 bp, Homo sapiens
cctaggtggctccacccaattggtagcacctggtatagcacaaagctgccctggcctggtgttagcaatcctaataggtgaaggaaatgaagcaacacctsaggatcctaaggatcccacgtgctgggaaaggttgggtaaccatcccccttctgtgctgcagatccgcgtccgagtgattgagggccgacagttaagtgg

SEQ ID NO: 39055 - DNA, 201 bp, Homo sapiens
cagcatgagaccctgtctcaaaaaaaaagaaaatagagaaaaaaaaattaatgcttcattcaaaatcattaaaaatgtataagttagaaagtaaagtttgmcataatctctctaccttcttcaacataactactgttaacaatttgagttatattcctccagaccttctttatgaatatgcctttatgaatattaaaatat

SEQ ID NO: 39056 - DNA, 201 bp, Homo sapiens
aggatcctaaggatcccacgtgctgggaaaggttgggtaaccatcccccttctgtgctgcagatccgcgtccgagtgattgagggccgacagttaagtggyaacaacataaggcctgtggtcaaagttcacgtctgtggccagacacaccgaacaagaatcaagagaggaaacaaccctttttttgatgaggtaaaggggt

SEQ ID NO: 39057 - DNA, 201 bp, Homo sapiens
aagatgttacacagaagtgacatgaaagtcaggaggcaagagagggtgtggagttcagatagacaaccgcaggtgtcctggggagaaacatttcaggatcrgcttgaagacattccaggatctgcttgaagacggaagtgtcagggtgtggctgattctggttctgagcctgaccacctgaatgaagagcgatggaaagac

SEQ ID NO: 39058 - DNA, 201 bp, Homo sapiens
acataaaataaacattggatattgtgaaacattactctggattgtctctttctggtattttgctttccttccagaggagaggataaattgctcctggaacygggtgtttcttaaaacaaaatttaataatagtgttactgcaaaaaaagcttcgattatttcggttcaactgctcataaacaaaagaaggggaacgtgctg

SEQ ID NO: 39059 - DNA, 201 bp, Homo sapiens
aaaataaacattggatattgtgaaacattactctggattgtctctttctggtattttgctttccttccagaggagaggataaattgctcctggaaccgggygtttcttaaaacaaaatttaataatagtgttactgcaaaaaaagcttcgattatttcggttcaactgctcataaacaaaagaaggggaacgtgctgaaaa

SEQ ID NO: 39060 - DNA, 201 bp, Homo sapiens
agacgttctttgttatctgcaggctgattctagagcatccactgagaatgtaataagtacttgtccagagtccagcattgcaaaggggtatgattgacccygactttttctcctgcttactgccataaacaatcaccagcctaaaatgctgtaattatggcaaggaggaagtacaaatcaccagcctaaaatgctataatt

SEQ ID NO: 39061 - DNA, 201 bp, Homo sapiens
tttagaaaaaaatgaaatttacagtttgaagattttcagctttcttgctcccatccaaaacttctttcccaatagcggttttatgaaatttttgtgtcaayacagagagctagcaccttattttttagagtggcattgacccaagtccacccaaatataaaataatactcccttctcaaccgaatcccttggcaggaacag

SEQ ID NO: 39062 - DNA, 201 bp, Homo sapiens
taaaaggctatttttctatgacacttgattgccattgcaggggaggggacaggaatgcttggtgtcatggtacaatttgatgtaagtgacttagttttggmtaaagtggggtttctaaatctcagtgtggaggctttatctattttgtttgtcattggtaagattgccaactcacttcttggcaagagggatgggaaagag

SEQ ID NO: 39063 - DNA, 201 bp, Homo sapiens
atcacgccactgcactccagcctgggtgtaaaaataaataaaaataaaaggctcatggtaattttaaaaggctatttttctatgacacttgattgccattrcaggggaggggacaggaatgcttggtgtcatggtacaatttgatgtaagtgacttagttttggataaagtggggtttctaaatctcagtgtggaggcttt

SEQ ID NO: 39064 - DNA, 201 bp, Homo sapiens
ttccccttccttgccctgggagaaatcctcccttcactgggagagaacttctctcccagggcggtgcgacccggagctccagcgcccgagtctccacttcktttgctgaaacttgctttctaccagctaagaaccatgctgcgagtgattgtggaatctgccagcaatatccctaaaacgaaatttggcaagccggatcct

SEQ ID NO: 39065 - DNA, 201 bp, Homo sapiens
tttaaaataaatttacccagtttccttatttttatttacatctgacatgaaaatctttattgttatttctgattagaaaatcaatagtttagctgggtgcrgtggcacgcacctgtagtcgcagctagttgggaggccagagggtcacttgtgcccaagaagtcgaagctgtagtaagccgtgatcatgccattgcactcc

SEQ ID NO: 39066 - DNA, 201 bp, Homo sapiens
aaaaggaaggtttaatttcccatttcaatttaaaataaatttacccagtttccttatttttatttacatctgacatgaaaatctttattgttatttctgaytagaaaatcaatagtttagctgggtgcagtggcacgcacctgtagtcgcagctagttgggaggccagagggtcacttgtgcccaagaagtcgaagctgta

SEQ ID NO: 39067 - DNA, 201 bp, Homo sapiens
ggccagaagcccaaactattgcttttagggctcagactctccagggtgagggtcctatcagggattctgtgggtcattttgcaagctctgcgtgagagctwccatggggttctaatggaatcctggctatgtggaggcctacggggtagagccggcccagctgggagtatcatccccgtagttcccaccccacctccaagc

SEQ ID NO: 39068 - DNA, 201 bp, Homo sapiens
tggccagaagcccaaactattgcttttagggctcagactctccagggtgagggtcctatcagggattctgtgggtcattttgcaagctctgcgtgagagcwaccatggggttctaatggaatcctggctatgtggaggcctacggggtagagccggcccagctgggagtatcatccccgtagttcccaccccacctccaag

SEQ ID NO: 39069 - DNA, 201 bp, Homo sapiens
ccactttcaacaactcttagcccttatcggtatcttgcttgacagaaatcacctccttttgcaaatcgactgctgaaactctactttataccaccttatcyacaaggtgcactagtcactgatgatcagaaagagagccccaaggccctaaccccacctaagtccaatagactacaacttacattcttctttttttttttt

SEQ ID NO: 39070 - DNA, 201 bp, Homo sapiens
atcaatgctggctctctttcctaataagcccctgggctgccttggaattcttttcaacatcatattccaggaatttaccaagcactaggcagtggcatgcmccctgaaaccctttattacccttgatctgatcaatcctttcatttcatagatgaagacatggaagcccagagatgggagatgctctttttaccacaacag

SEQ ID NO: 39071 - DNA, 201 bp, Homo sapiens
ctcatgatgatgtttctctctcagtaaacacaggagaaacagaggtaggctttgttccaacgtttggaccttgttacctgaatctttatggaagccccagrgagtacacgggattcccagacccctatgatgagctgaatactggaaaggttggtttctcaattaaggtggttattaatcagcattggttaaggtgattat

SEQ ID NO: 39072 - DNA, 201 bp, Homo sapiens
tatgttcatgtataatagtcattcctcctgtttatctgtcttgaagatgataacatgattcagagaaatctctgttggagaaactgttggtccctctttgygtttcataagagatttccaaacaagtgtgacatgtggcatcctaggctgttaccaagtctcaaccttaggctgcgtgcactagttttgtacatcttaatt

SEQ ID NO: 39073 - DNA, 201 bp, Homo sapiens
cctggcattaagctgatatgcagtggatcattcttgacaatttgtgtttcaatccctggggatctttaacaaaaagcaaatacacatgacagcacagtcaytcaagggaaccaggtggaggagaagtgaggttagaccaaaggaatggatggggtagtggagggtgtccttttctgagctttgaaactcaagatctggggt

SEQ ID NO: 39074 - DNA, 201 bp, Homo sapiens
agcctcccaaagtactgggattacaggcgtgagccaccatgcctggcctagagaatgggttatcccaggagactatactaagatgtgagcacatagaaggwgagttccttctgttaatgcacaatgaaacaagtcaaaggggtaacataccagaaaagagatttgttggacaaaaataattaagcccctggcattaagctg

SEQ ID NO: 39075 - DNA, 201 bp, Homo sapiens
atacagagagctagcaccttattttttagagtggcattgacccaagtccacccaaatataaaataatactcccttctcaaccgaatcccttggcaggaacrgtaaggtcagatgccaatgaaccatgtagtcctcactccctaagataatgtgtatttggtctttactctgacaagcattgatagccaacacattgttctt

SEQ ID NO: 39076 - DNA, 201 bp, Homo sapiens
tggcaaggaggaagtacaaatcaccagcctaaaatgctataattatggcaaggaggaagtaccacttaggcccaggatgatggaaggaagttcgtcttcgytgcttggaggaacccaacagctgtcagccccagccattgctcggtccaggacaggtttaccgaggggaagcgcctggcccccagtgcttccccgaggctg

SEQ ID NO: 39077 - DNA, 201 bp, Homo sapiens
ccccttcagccatctgggtgttctttcctgagagttgttcagtagtttttccaaatgtgaaggcacatttgtgcctgggatcctgttccccttcccatttrtttactcattccacatttatcaagcactttctatatactttgtgtaatgagttctgtaaggcatggggcagaaacaaagaagcaaaggcaagctccttgc

SEQ ID NO: 39078 - DNA, 201 bp, Homo sapiens
cagatcagagataacatgcaacacgccagattcttccccctacataaagcagaattgtttgataaatttctaatgaccatatttatcagtgtatgggacacccaggtttttttattttcactgtggttttgaagtgaagaaattggttgaaataatcactcaaggccctattttagaactagctattccagccacttctac

SEQ ID NO: 39079 - DNA, 201 bp, Homo sapiens
ctgggcaatatagtgagatgcctttaaaaaaaggaaaattacctggtcccctctgtcagtggttctcagagatgctgttgcctttctggtgtttttgtgayaacttcttgatgatcccttcgacccttatgagagaggacatgatgtctcctaaatctacctttgcttattctaattagcagggtgtctctgagggacaac

SEQ ID NO: 39080 - DNA, 201 bp, Homo sapiens
caatagattaaatatattgagagattaaacacatgaaacaaagtgagagactttgagacaaaattttatcttgggcaactcaaggttcctctcatccttaycttgtttaaggtctttttataggttttgaaaaaacattgttaattcaagcaatggataacataaataagaacctggttattatatatatacatataatac

SEQ ID NO: 39081 - DNA, 201 bp, Homo sapiens
gaaagtgggttgtagctaggtcagaggaaatccttgatggccagggtaaaggatttttattttattttatataggcttttcagcaaggacattgggaagtytgatgtgtccactgtgcattaaacggactaggaaactttggaggcaggaagagatttagcttatgagagaatgggttttctttttttgtttctttctttt

SEQ ID NO: 39082 - DNA, 201 bp, Homo sapiens
gagtctcgctctgtcacccaggctggagtgcagtggcgtgatctcagctcgctgcaacgtctgcctcccaggttcaagcagttctcctgcctcagcctccygagtagctgggactacaggcgcatgccaccacgcccagctaatttttgtatttgtagtagagacagagttttaccatgttggccaggatggtctccatct

SEQ ID NO: 39083 - DNA, 201 bp, Homo sapiens
aaaaggtaaaggaggcatggaaaatattgttggaaagtgggttgtagctaggtcagaggaaatccttgatggccagggtaaaggatttttattttattttrtataggcttttcagcaaggacattgggaagtttgatgtgtccactgtgcattaaacggactaggaaactttggaggcaggaagagatttagcttatgaga

SEQ ID NO: 39084 - DNA, 201 bp, Homo sapiens
tgcattaacagaaacgctgtgagaccacaaataagcatgaacttcttacatgtgcaaattactgtgtgctttgtgccagctcctatgctatgacctttatmttataacagcctttatccccagttcatagatgaggaaactgaggaagagaggggttaagaaacttgctcgccagcacagtggctcaagccagtaaagctc

SEQ ID NO: 39085 - DNA, 201 bp, Homo sapiens
ttactgcaaaaaaagcttcgattatttcggttcaactgctcataaacaaaagaaggggaacgtgctgaaaatgccccaagataagaaatcagggatttaawtatcattaggctgtccagaatagacttcagaaatacagtcaagcatttcttgggaagaatcaccaaaacattctgagagcaattcattgttattgtttaa

SEQ ID NO: 39086 - DNA, 201 bp, Homo sapiens
catacttaaatcctgccactccccctgaaaagtgatactttagtcacagagatgtgcagctatgtaggattctagaaactaaaacatacagtaattatttrtaggaatccaaaacatgaaggggattcaaaaaggtaaaggaggcatggaaaatattgttggaaagtgggttgtagctaggtcagaggaaatccttgatgg

SEQ ID NO: 39087 - DNA, 201 bp, Homo sapiens
gatattgtgaaacattactctggattgtctctttctggtattttgctttccttccagaggagaggataaattgctcctggaaccgggtgtttcttaaaacraaatttaataatagtgttactgcaaaaaaagcttcgattatttcggttcaactgctcataaacaaaagaaggggaacgtgctgaaaatgccccaagataa

SEQ ID NO: 39088 - DNA, 201 bp, Homo sapiens
tttactatatagatttctcatcttcgggaactggggctgcatcatatacaggtttatgcttcgtaattttgctctctgttatatcttcctagctaatattrtcttattaagaatgtatcgactgtctttagaacttttttttgacattttgctgtctcaacatagttttgctaaagtaataatttttgtgtaagtgccata

SEQ ID NO: 39089 - DNA, 201 bp, Homo sapiens
gctacaagcagttttagcttctgtctctggggcctctcattgcaggccctgcagaccatggggttacagggccttaaaataacaacgagctgtcaacatcrccctccccccgacaaagaaacaaaccatgctttcaatcaaataatgtgcaataaactccaggcctttgcttacacagcctcagaccacatttacttggat

SEQ ID NO: 39090 - DNA, 201 bp, Homo sapiens
actttgagggccccctgaagatgttacacagaagtgacatgaaagtcaggaggcaagagagggtgtggagttcagatagacaaccgcaggtgtcctggggrgaaacatttcaggatcggcttgaagacattccaggatctgcttgaagacggaagtgtcagggtgtggctgattctggttctgagcctgaccacctgaatg

SEQ ID NO: 39091 - DNA, 201 bp, Homo sapiens
gacaagaagtgattggtgcaggggaggagtgtttatccaggttatcaggtgagactcctggagaaagtgacagttgagcagaggcctggatatgcagagawcggggagggaggcatccaggcagggagaagggcgatggaagggccccaaggaagaaaatgttagcagggaaggcctgcccatgtggctgcgatagagcca

SEQ ID NO: 39092 - DNA, 201 bp, Homo sapiens
agggacaagaagtgattggtgcaggggaggagtgtttatccaggttatcaggtgagactcctggagaaagtgacagttgagcagaggcctggatatgcagrgatcggggagggaggcatccaggcagggagaagggcgatggaagggccccaaggaagaaaatgttagcagggaaggcctgcccatgtggctgcgatagag

SEQ ID NO: 39093 - DNA, 201 bp, Homo sapiens
ctttcccccaagaggctctactgcaggtgacattctgtgtttttttgtttgtttttttttttggcgttattatttccaaggtaggttaaaataagcaaagrgggggtctgataagaatctattcttgttataaatctgagtgggaggccttctatagtttgacaatattccacaagtgactctgacatgctgtcccttctg

SEQ ID NO: 39094 - DNA, 201 bp, Homo sapiens
tctatagtttgacaatattccacaagtgactctgacatgctgtcccttctgcccaaccaaggactacccattcaaaccagagattcccaacactgtctacrtattggactctcctggggaacttctgaaagcttattggatgccctggtctcaccccagactgattgcatctcctaggataggttgggagccctggtctaa

SEQ ID NO: 39095 - DNA, 201 bp, Homo sapiens
agagttgcaccatttcataatattaagttgaaccataagaaattgctgagattcaaccactttgacctataacaacagcaatttcacatgattgaacctastactattccctaatagtaaaaacaaaaggtagtttaaactaatttttatttagcagttgtgaataaataaagattagagatttttctgagtgaaatggat

SEQ ID NO: 39096 - DNA, 201 bp, Homo sapiens
agaatgaggatttgaactcagaccatctgaccccagtgtctgtgtggcacgccacggtctgatttccatctccatgtcaaacttattagctgctcagggcrgggattaccaacccgactgtacaggtgcagaaaacagggctcccagagctctattaatagaggtggggtaagtgatagagccgagatttagctagaaatt

SEQ ID NO: 39097 - DNA, 201 bp, Homo sapiens
cattagagctttatacaaagtactagtaatgaactaatttccatgtaatgcataattagctaaaaaaatgcccatacagtagtgcaggaatttcccttccrggtttatcccatcatttgttctgtcccttctcccagaagcttcagggatgctatggttggcttgaagagcctgctatgttcccatttggctcatgttcaa

SEQ ID NO: 39098 - DNA, 201 bp, Homo sapiens
cagttttttagaggtgtcaaaacgtacttggctgcaaaaataatatatgttaaaggaaagcagttattagcacacaggggctttgtttgttttgccccccrtactgataaatttttttttttttttttttttgagacagagtctggctctgtcgcccaggctggagtgcagtggcgtgatgttggcttactgcaagctctg

SEQ ID NO: 39099 - DNA, 201 bp, Homo sapiens
tatttcttcctcttcgttcaaactggcttccagctctgcagaaggtcctattttcttctcacctctaacctctaacctctcccctcaaaggaatcgcagaygacagcaggcagccaagtacagtagtatacacattctcatgagaggtaggggctgcacagagatggggcactggaaatggacttcagggaaggcagagag

SEQ ID NO: 39100 - DNA, 201 bp, Homo sapiens
aggtttattttggagtggaaagtatgcagaacacaaattagaaaattcaatcttttgagagattaaaatagggaaggctaccactgaatttctggaattgsttttcaggtccaaacgttatcttaaccttaggcaagctctctggccagccacacccatccctggtaaatgttgtaggacagagaccccccccagtgccct

SEQ ID NO: 39101 - DNA, 201 bp, Homo sapiens
atgctgctagtaataaatatctaaaactactgtgctttccttggagtgaattcctgcttactctttgttaaaatagccccctgatgagccaggcactctgmgggaacacagattatctgagtctgaacacgccagacttctccacaggtttattttggagtggaaagtatgcagaacacaaattagaaaattcaatctttt

SEQ ID NO: 39102 - DNA, 201 bp, Homo sapiens
taggagctgggtgtctttgggcaactatatttccgagccttcatttcctcatctacagagtgtggagaataatctatacctcacagggaggttgttgggarcaattgtgataaaatatatagagaacttgtcgtagtgctgacacagaatgtagcatgacaggtgctcatgtcttctggcttttatgccccacttcttccc

SEQ ID NO: 39103 - DNA, 201 bp, Homo sapiens
gagataacatgcaacacgccagattcttccccctacataaagcagaattgtttgataaatttctaatgaccatatttatcagtgtatgggacacccaggtttttttattttcactgtggttttgaagtgaagaaattggttgaaataatcactcaaggccctattttagaactagctattccagccacttctacacgaagg

SEQ ID NO: 39104 - DNA, 201 bp, Homo sapiens
agagtatgaactctgcagcctgtctccttccagggattagatctgttcttttccatctttactctgttggttgacataacctctcacttaaaagaaccccsttctttctgtaaccaacacaatacttggaaagggatgacctttggattcgaaaaattaattttcactcctggttttatccctaggagctgggtgtctttg

SEQ ID NO: 39105 - DNA, 201 bp, Homo sapiens
tcagcaagagactggttgcatttaagggatcgcttctagtgattccatttataggaactagtgtggttatccctctgtcactgctgatggcccagcctccyatttgccttgctgggcctgtctggttcctgctgggctctgggacatgggacccttctccaagtccccaggaggctgcactcactatacaggccatggatc

SEQ ID NO: 39106 - DNA, 201 bp, Homo sapiens
gcttcattacaaggagcagatacccacttcagcgtgctcaaggaaaccttgatttttctaaagctagaaagaaatctggagtccagatcacagacctcacmagagccagaatcatgtccgctcccctctcctcatttcccagggactgtgcagcctcctgcctctgcttctccctgcacatggcagccattacttttctgc

SEQ ID NO: 39107 - DNA, 201 bp, Homo sapiens
aaattataaaactcgttggtacaacttagagagtcttgtttgagttacacgaggacagaatggtgggggtggggtgtagggagagtacaaaacagaagacstgaaagtggacactcatctggggaatttggtgtgtcgtgaagaggcttccaagaaaatgcagcttatcttatggcagaggaatcacagacttatcagtac

SEQ ID NO: 39108 - DNA, 201 bp, Homo sapiens
ccagccctaagactagctcattcattcaatagtgacttactgagggtcttccatgtgccacacatcagacaaggcactggggatacagagaggataagacrgaaatgttgggtctcaaggaaatttaagtgtaatcaagacatgatatttaaatataatgatggcttctttaaagtgactagactgattttaaaatctact

SEQ ID NO: 39109 - DNA, 201 bp, Homo sapiens
ggaggagaaggaggaggaggaggagaactggacaggaaattgggccaggtgaatttctgtaggatgaccaatggtcccactttgcctgggactttagtggkaaaactgaggataacccaggcaaactgggtcatattggtcactctgcttctgtggtcccttccagccctaagactagctcattcattcaatagtgactta

SEQ ID NO: 39110 - DNA, 201 bp, Homo sapiens
  misc_feature (1)...(201): n = A,T,C or G, or insertion/deletion polymorphism (see Tables 1-2)
gcaagaggccagcacgagggcagtagccacctgaggcggcagggaggccaccaagagatcgaagaaaaacagaaatacaaagtgatctttgaagacaaatnttgctgtcttcccaaagatcaaatgggggagcatttcctcaaccaagctgagccatggttcatttgcataaggtccttctctccctagcctgttgtacta

SEQ ID NO: 39111 - DNA, 201 bp, Homo sapiens
ccctgtgggcgagtgcagggctggttggggtagctcagcaagaggccagcacgagggcagtagccacctgaggcggcagggaggccaccaagagatcgaasaaaaacagaaatacaaagtgatctttgaagacaaattttgctgtcttcccaaagatcaaatgggggagcatttcctcaaccaagctgagccatggttcat

SEQ ID NO: 39112 - DNA, 201 bp, Homo sapiens
ctcagcacagatggagctcatcccaggactggaatcagaaggaaggcactaataaggaaagacactgaggaaacaacctgattaaattaaagtgataaggragccacactggacaggcaaatttggccatccttcctcacactgtactgtgaaatggaacatcagactgccttgcttccagctggagtgtgcaccctgtgg

SEQ ID NO: 39113 - DNA, 201 bp, Homo sapiens
tgttctactgccctcttttataacactcctcaaaaatacatgataccttgacaatcatctcaaatgccacaaaactccatgactgggctgtggggagaaaygatatatttagggaacttttcagagtcttggccaactgtgctgaggagacacatttctgggattcctcaggcctatgtctcctgctctgttctccagccc

SEQ ID NO: 39114 - DNA, 201 bp, Homo sapiens
aaaaaagacattccaggctttggaacagtacaggaggaccagagagccatggggaggagtaatgtggtatgaatagggattgaactttactcatcaaccaktggggagccgctaggccgcaatgtgaacagcagattagtactagtcagggagactagtaagaaggcttactagttgagtcaaatgcttctcagcacagat

SEQ ID NO: 39115 - DNA, 201 bp, Homo sapiens
gttttaaaggatgagtggaaatttgacagaaataatggaaaaaagacattccaggctttggaacagtacaggaggaccagagagccatggggaggagtaaygtggtatgaatagggattgaactttactcatcaaccagtggggagccgctaggccgcaatgtgaacagcagattagtactagtcagggagactagtaaga

SEQ ID NO: 39116 - DNA, 201 bp, Homo sapiens
agcctggagaaacagaagcacagtgccaccactgtgttcggagcaaacacccccattgtttcctgcaattttgacagtgagttttgttttatttttgatttattttattttattttattttattttttcaagactgagtctggccctatcacccaggctggagtgcagtggtacgatcttggctcgctgcaacctcccagg

SEQ ID NO: 39117 - DNA, 201 bp, Homo sapiens
gcctggagaaacagaagcacagtgccaccactgtgttcggagcaaacacccccattgtttcctgcaattttgacagtgagttttgttttatttttgatttattttattttattttattttattttttcaagactgagtctggccctatcacccaggctggagtgcagtggtacgatcttggctcgctgcaacctcccaggt

SEQ ID NO: 39118 - DNA, 201 bp, Homo sapiens
cctggagaaacagaagcacagtgccaccactgtgttcggagcaaacacccccattgtttcctgcaattttgacagtgagttttgttttatttttgatttattttattttattttattttattttttcaagactgagtctggccctatcacccaggctggagtgcagtggtacgatcttggctcgctgcaacctcccaggtt

SEQ ID NO: 39119 - DNA, 201 bp, Homo sapiens
acagaagcacagtgccaccactgtgttcggagcaaacacccccattgtttcctgcaattttgacagtgagttttgttttatttttgatttattttatttthttttattttattttttcaagactgagtctggccctatcacccaggctggagtgcagtggtacgatcttggctcgctgcaacctcccaggttcaagcaatt

SEQ ID NO: 39120 - DNA, 201 bp, Homo sapiens
aattttaaacatgactttgtgaattccacttctgtaactcttatcttaaggaaactcttcaaatcactgaatatgatttttaaaatctcttcatgcaaacrtgactttcattttcatccttgatgaaaggagtttttaaaactacagttgaaaaccatatcacatataaggtgaagggtggtcagatcactgatattaaca

SEQ ID NO: 39121 - DNA, 201 bp, Homo sapiens
cagggactactcctgagtccatgctctaacccccaaatcctgagtcacagatattctgggaattgtacataaagtcagggcatgtgtcttctccctctgcatacgctgttgagaataagggctgaataagccactgcaacctcaggcctgaaatatacaacaatccaccctgcttttcttttcctttcctttcccttcttt

SEQ ID NO: 39122 - DNA, 201 bp, Homo sapiens
gttgaaaaccatatcacatataaggtgaagggtggtcagatcactgatattaacagtctatctcatatgtgctcattctgtctagtaagcccccaaaattraaattttaactataggaaaaaaggcaccaaaatttaaataatggttgatttcaataataattttcaggatttttggaatgagacagacctgctctacaat

SEQ ID NO: 39123 - DNA, 201 bp, Homo sapiens
agagataacatgcaacacgccagattcttccccctacataaagcagaattgtttgataaatttctaatgaccatatttatcagtgtatgggacacccaggtttttttattttcactgtggttttgaagtgaagaaattggttgaaataatcactcaaggccctattttagaactagctattccagccacttctacacgaag

SEQ ID NO: 39124 - DNA, 201 bp, Homo sapiens
atataataataaaaggagtatgaatattttgaaatgtcaaagaatcttttagatgttaactgtttcccagatctgatgctgaagtagtatagaaagccccrtttctatagctgctggagacccagtttcattttaaaggtctgtgatgataagcagtaccctaaattcagttagtttataacaaaggtaatgttttcctga

SEQ ID NO: 39125 - DNA, 201 bp, Homo sapiens
atgctctaacagataccagaaccacattcaagccccccttcccagttcttcattctctcatctcctggatgggccctcagattggggtgggttctccattaaaaaaaatcacatgaaaggatttggccaatggaaacttgacatcctcataataaagcagttttgatggatgagtatttatttggtgctgtaacataggca

SEQ ID NO: 39126 - DNA, 201 bp, Homo sapiens
atgtaattgacacaatgcccaattcttatttgctttaaacaatctatttcattataatcagactttatatgaatattaagtagtccttagatttgcagtgracttggcagatgtgcaagcactttattcctttatttgtttaaccaatcaatgaatatttatgtagtagtatcacatgatagaaccagtagtaggtgttta

SEQ ID NO: 39127 - DNA, 201 bp, Homo sapiens
ctttagataaggatagcttttcaggtaaaggaaaaaaaatctacatgctacacatgattacatagcatgctattttgcttctgtgtttcgagtgaatgctytttgtcatttctaacaacaaaaaccctttacatgttgaggttatttttgcatgcttgaagcaaactgctcagtcattagataaatcatcactgaatgctt

SEQ ID NO: 39128 - DNA, 201 bp, Homo sapiens
atccaatgaggctgaaggatcagcctcacactccatcctccctcactccctcttcccttcctgcctgccttcttttcctcctgcctgcctgtcttcctacctttctttccttccttccttcctttccttcccttccttcctttcttctctttccttcctttcttctctttccttcctttctttccttcttccttccttctt

SEQ ID NO: 39129 - DNA, 201 bp, Homo sapiens
ctgtaccccagcctgggtgacagagtgagactctgtctcaaaaaagaaaaaaaaaaagtttacaggtggtcatcaatataaccctatgacagataatacgrtcagtcttgtttgtagatgagacatagggaggtgagttaccttgtcagcattgacacagctattagatggcacagccaggatttgattcctatactctta

SEQ ID NO: 39130 - DNA, 201 bp, Homo sapiens
tccaatgaggctgaaggatcagcctcacactccatcctccctcactccctcttcccttcctgcctgccttcttttcctcctgcctgcctgtcttcctacctttctttccttccttccttcctttccttcccttccttcctttcttctctttccttcctttcttctctttccttcctttctttccttcttccttccttcttt

SEQ ID NO: 39131 - DNA, 201 bp, Homo sapiens
gccaggatggtctcgatctcctgacctcatgatccacccgcctcggcctcccaaagtgctgggattacaggcgtgagccaccgcgcccggccgtctggggrcttttcatgcatggctctgatttactctttacaaacctactcaaggtaagtcctggattcattgtctacattttacggatgagcaaactgcgtgagttgc

SEQ ID NO: 39132 - DNA, 201 bp, Homo sapiens
ccaatgaggctgaaggatcagcctcacactccatcctccctcactccctcttcccttcctgcctgccttcttttcctcctgcctgcctgtcttcctacctttctttccttccttccttcctttccttcccttccttcctttcttctctttccttcctttcttctctttccttcctttctttccttcttccttccttctttt

SEQ ID NO: 39133 - DNA, 201 bp, Homo sapiens
ggggtgtaccccgatacctgcttagctttggatctttacattatttagcttttagatatctagccccaggtgaacaattttctttagttaagtaaatgctrtatttgttacttacccttttctcctttttccaacatgaagaagtgggtttaccatgaagcttaaactgcagggcttaaactccaggccttgccatgtgtt

SEQ ID NO: 39134 - DNA, 201 bp, Homo sapiens
ctgcagggcttaaactccaggccttgccatgtgttcacatggtcaaacctaattttgaatttgtgttttgcattttttaggagggcccccaaaattatagyatcagattcccctaacccgaatcccctgttaacatttaaacatctgctctattgttttggcagttgtttttctacaatgtcaacatgaccccttctgaat

SEQ ID NO: 39135 - DNA, 201 bp, Homo sapiens
ctagagaatgggttatcccaggagactatactaagatgtgagcacatagaaggagagttccttctgttaatgcacaatgaaacaagtcaaaggggtaacawaccagaaaagagatttgttggacaaaaataattaagcccctggcattaagctgatatgcagtggatcattcttgacaatttgtgtttcaatccctgggga

SEQ ID NO: 39136 - DNA, 201 bp, Homo sapiens
gaagtcaggagttcgaggccaacccggtcaacatggtggaaccctgcctctactaaaaatacaaaaattagctaggcatggtggcacacacctgtaatccyagctacttgggaagctgagacatgaaaatcacttgaactcagggggtggaggttgcagtgagcctagttcgtgccactgtaccccagcctgggtgacaga

SEQ ID NO: 39137 - DNA, 201 bp, Homo sapiens
gctttaattctctattcgcacccaacatccctccactaaaacaaaatattctagcacacagaaagaagtccaaaccctacttattagtgatcaattaatcrtctttgcaatgttccatatgccacaatggataaagccaagccaatttatatgttcatgtataatagtcattcctcctgtttatctgtcttgaagatgata

SEQ ID NO: 39138 - DNA, 201 bp, Homo sapiens
tggtggcacacacctgtaatcccagctacttgggaagctgagacatgaaaatcacttgaactcagggggtggaggttgcagtgagcctagttcgtgccacygtaccccagcctgggtgacagagtgagactctgtctcaaaaaagaaaaaaaaaaagtttacaggtggtcatcaatataaccctatgacagataatacgat

SEQ ID NO: 39139 - DNA, 201 bp, Homo sapiens
ggatccagtaggtctagggtgggtccaggaatctgaattttaacaagtacctgaagaggttctgatcacactttaagaaatattaatctaggccgggtgcrgtggctcatgcctataatcccaacactttgggaggtcgagacaggtggatcacgaagtcaggagttcgagaccagcctggccaagatggtgaaaccctgt

SEQ ID NO: 39140 - DNA, 201 bp, Homo sapiens
gtaggtctagggtgggtccaggaatctgaattttaacaagtacctgaagaggttctgatcacactttaagaaatattaatctaggccgggtgcggtggctyatgcctataatcccaacactttgggaggtcgagacaggtggatcacgaagtcaggagttcgagaccagcctggccaagatggtgaaaccctgtctctact

SEQ ID NO: 39141 - DNA, 201 bp, Homo sapiens
aacaagtacctgaagaggttctgatcacactttaagaaatattaatctaggccgggtgcggtggctcatgcctataatcccaacactttgggaggtcgagrcaggtggatcacgaagtcaggagttcgagaccagcctggccaagatggtgaaaccctgtctctactaaaaatacaaaaattagctgggcgcggtggtggg

SEQ ID NO: 39142 - DNA, 201 bp, Homo sapiens
gataattttgtgtatgttttgtagagacagggttttgccatgttgcccaagctggtctcaaattcctgagctcaagtaatctgcccacctcggcctcccartattgctgggattacaggcatgagccaccatgcctggccttcccttggaatttaaacaaaactatcagacaacaaataaagagaatgactgtgtctcaaa

SEQ ID NO: 39143 - DNA, 201 bp, Homo sapiens
cccagggggaggctgctaaagacacacaggagagtgtctggagaaaccctgccattgatcacaagcctgtagctccctgcccacccagacaggggccccgmgaggcaggtggggctgcctgaattgggacattgcaattgtttatgaaatgcccttcaaggtagaggggaagggtgaaccaaccctttactgaacaacctc

SEQ ID NO: 39144 - DNA, 201 bp, Homo sapiens
accattttcttaaggaaagggctcacaggagttcccaagcccaaaacacacttttcccttaccgtggaagtggtactaaagagttaatgcggccgggcacrgtgggtcatgcctgtaatcccagaactttgggaggccaaggtgggtggatcacatgaggtcaggagttcaagaccagcctggccaacatggcaaaaccct

SEQ ID NO: 39145 - DNA, 201 bp, Homo sapiens
tttttagtagagacggggtttcaccatgttggccaggctggtcttgaactcctgacctcaagtgatctgcccacctcagcctcccaaagtgctaggattayagccgtgagccactttgcccagccagcatcctgtgttctaagcacctattgtctttacccaaagccaaatgacctctctgctcagggcagctcagaacta

SEQ ID NO: 39146 - DNA, 201 bp, Homo sapiens
agaatggcatggcgtgaacctgggaggcggaggttgcagtgagccgagatcgcgccactgcactccagcctaggcgacagagcaagactccatctcaaaawaaaaataaaaataaaaataaaccagtggttcccaattaggggagatttttgctccccacccccaagaggacatttgccaacgtctggagacattttggtt

SEQ ID NO: 39147 - DNA, 201 bp, Homo sapiens
ttacaggcatgagccactgcgccctgcctcccatactgagaacttagcctgttctactgccctcttttataacactcctcaaaaatacatgataccttgayaatcatctcaaatgccacaaaactccatgactgggctgtggggagaaatgatatatttagggaacttttcagagtcttggccaactgtgctgaggagaca

SEQ ID NO: 39148 - DNA, 201 bp, Homo sapiens
acctggtcccctctgtcagtggttctcagagatgctgttgcctttctggtgtttttgtgataacttcttgatgatcccttcgacccttatgagagaggacrtgatgtctcctaaatctacctttgcttattctaattagcagggtgtctctgagggacaactctcgtgactaatccagttttttagaggtgtcaaaacgta

SEQ ID NO: 39149 - DNA, 201 bp, Homo sapiens
cctatttgataacagtttcatggagcactacagtgcaccagagagtatttctggaactaagtctagaaaaatatgcataagatggcttggattttcaggcytaggtgaccgactagttagcacacaagaatgagatgcaaaccagaatagacatgaaaagttacaatctgagtagatgaaagagtgaaaaagcttgtggag

SEQ ID NO: 39150 - DNA, 201 bp, Homo sapiens
caatgaggctgaaggatcagcctcacactccatcctccctcactccctcttcccttcctgcctgccttcttttcctcctgcctgcctgtcttcctacctttctttccttccttccttcctttccttcccttccttcctttcttctctttccttcctttcttctctttccttcctttctttccttcttccttccttcttttc

SEQ ID NO: 39151 - DNA, 201 bp, Homo sapiens
ggctgaaggatcagcctcacactccatcctccctcactccctcttcccttcctgcctgccttcttttcctcctgcctgcctgtcttcctacctttctttccttccttccttcctttccttcccttccttcctttcttctctttccttcctttcttctctttccttcctttctttccttcttccttccttcttttcttcctg

SEQ ID NO: 39152 - DNA, 201 bp, Homo sapiens
ctgaaggatcagcctcacactccatcctccctcactccctcttcccttcctgcctgccttcttttcctcctgcctgcctgtcttcctacctttctttccttccttccttcctttccttcccttccttcctttcttctctttccttcctttcttctctttccttcctttctttccttcttccttccttcttttcttcctgcc

SEQ ID NO: 39153 - DNA, 201 bp, Homo sapiens
tttcacctgaagcaagtgacttgcttgctgttagcttctgtttgttttaaaatttttaaaacagggataatggcacatattctacaggactattgaggtaytaagtgaggtcatgtaagtaaagtgtttagctcagtgcccagcacatggtgggtaccgaaaaaggtttgttgtttctcctcctttatgtcctgtatgtca

SEQ ID NO: 39154 - DNA, 201 bp, Homo sapiens
tgaaggatcagcctcacactccatcctccctcactccctcttcccttcctgcctgccttcttttcctcctgcctgcctgtcttcctacctttctttccttccttccttcctttccttcccttccttcctttcttctctttccttcctttcttctctttccttcctttctttccttcttccttccttcttttcttcctgcct

SEQ ID NO: 39155 - DNA, 201 bp, Homo sapiens
gtaaagtgtttagctcagtgcccagcacatggtgggtaccgaaaaaggtttgttgtttctcctcctttatgtcctgtatgtcaattgccagggtggttaarcagaaagttctgttggcttggcagagtttgttctgtctaggttctggccttctgttaaatgtcttcctgtttggtgcttcctcaataaatgggagatgta

SEQ ID NO: 39156 - DNA, 201 bp, Homo sapiens
gaaggatcagcctcacactccatcctccctcactccctcttcccttcctgcctgccttcttttcctcctgcctgcctgtcttcctacctttctttccttccttccttcctttccttcccttccttcctttcttctctttccttcctttcttctctttccttcctttctttccttcttccttccttcttttcttcctgcctt

SEQ ID NO: 39157 - DNA, 201 bp, Homo sapiens
ctttcccttctttttttttttttttttttttttttaatttaagttctgggatacatgtgcagaacgtgcaggtttgttacataggtatacacgtgccatgytggtttgctgcacccattaacctgttatctacattagatatttctccttcccctggcctctcacccctcctttcccttctttttcttatttttctcttct

SEQ ID NO: 39158 - DNA, 201 bp, Homo sapiens
gcctcacactccatcctccctcactccctcttcccttcctgcctgccttcttttcctcctgcctgcctgtcttcctacctttctttccttccttccttcctttccttcccttccttcctttcttctctttccttcctttcttctctttccttcctttctttccttcttccttccttcttttcttcctgccttccctccctt

SEQ ID NO: 39159 - DNA, 201 bp, Homo sapiens
agactccgtctcaaaaaaaaaaaaaaaaaaaaaaagctggcaaattgttggttggttaaaaaaaaaatctaaagggcaaaaattggatttaaaaaaaattwaaaaaaatttttttgaataagactgggtcttgctatgttgcccaggctggttataattcccttgctcaaactttcttcccatctcagcttcccaaagtgt

SEQ ID NO: 39160 - DNA, 201 bp, Homo sapiens
tctgcattccagctgacattaactcaatatctgatttaaccacctgggtctccaatttctcagctgtggcatgatgggaactggtctttagatgccttccrtcttttagattctaattttctagttccaggtattgagttatctgctctcagcaagatgtgaaatgcattgccttaggtgttggaggggatatagcaacaa

SEQ ID NO: 39161 - DNA, 201 bp, Homo sapiens
cccacaaactgaatgacctgtttgctaactggcgttgggggtcatggggaagtggccataacagccacttcttgctggcaccaagagctgtaggtgccacytctactcatttccattttcagaggtggctggtgggcctcaggcttcccagcacaggagggcaggtgtgctgagggcccacactgcaatggctgtgaaccc

SEQ ID NO: 39162 - DNA, 201 bp, Homo sapiens
actccatcctccctcactccctcttcccttcctgcctgccttcttttcctcctgcctgcctgtcttcctacctttctttccttccttccttcctttccttcccttccttcctttcttctctttccttcctttcttctctttccttcctttctttccttcttccttccttcttttcttcctgccttccctcccttcttcctc

SEQ ID NO: 39163 - DNA, 201 bp, Homo sapiens
ctgtaggtgccacctctactcatttccattttcagaggtggctggtgggcctcaggcttcccagcacaggagggcaggtgtgctgagggcccacactgcartggctgtgaaccccgcttcctccttgaagacaggaaatcttcccagttgacttccccaaccatttctgagaatccaggtcgatgcctgtgtgttccacaa

SEQ ID NO: 39164 - DNA, 201 bp, Homo sapiens
gagctaagctatgggaatacaaaggcatgcagagtggtacaatggacattggagactcagaagggggagggggataaaagactgcatactgggcacaatgkacactactcaggtgacaggtgcactacaatctcagaattcacaaccatataattcatccatgtaaccaaaaacctcttgtaccccaaaagctattgaaat

SEQ ID NO: 39165 - DNA, 201 bp, Homo sapiens
ccatcctccctcactccctcttcccttcctgcctgccttcttttcctcctgcctgcctgtcttcctacctttctttccttccttccttcctttccttcccttccttcctttcttctctttccttcctttcttctctttccttcctttctttccttcttccttccttcttttcttcctgccttccctcccttcttcctccct

SEQ ID NO: 39166 - DNA, 201 bp, Homo sapiens
agctcatggggtcaggctggtgttctgggtccctgacagtcagccttcctgtctactcgcagcctgtctccttgtggcaggactgggttctccatgctctyccccaaactcccgtggtacccagaacacgttttcatctgagtccaggcccaactgccgtgagttctccagcgagccagggccttctccctctagtcgtct

SEQ ID NO: 39167 - DNA, 201 bp, Homo sapiens
cattgtgtagactagtagtcttcaaccctcactaataagtcacccagaatacttaaaataaaacccatgcccaggccccacctcccaagagggagagggayctagatatcagtatgtttttaaatctcctcaaatgattttaatatgctggcaggtctgagaaccacaggtgtggacagtctgagaaagatcatttgctag

SEQ ID NO: 39168 - DNA, 201 bp, Homo sapiens
atcctccctcactccctcttcccttcctgcctgccttcttttcctcctgcctgcctgtcttcctacctttctttccttccttccttcctttccttcccttccttcctttcttctctttccttcctttcttctctttccttcctttctttccttcttccttccttcttttcttcctgccttccctcccttcttcctccctcc

SEQ ID NO: 39169 - DNA, 201 bp, Homo sapiens
gaggcaggagaatcgcttgaacctgggaggcggaggttgcagggagccgagatcatgccattgcactctagcctgagcaacaagagcaaaacttagtctgaaaaaaaaaaaagccttttaaatcatgaactattattttccttgaaatggtttgaattgtgaacaaacagattctaaaaatctgatctcaggaaccattga

SEQ ID NO: 39170 - DNA, 201 bp, Homo sapiens
cagacctctgagaccaatttcaactctgagacttgatgattcttccaaacagtcctccaaacagaacaggttgttaaaaaactttttaattttaaataatataatatttttaatttctaaaattaaaaatgcatgtagacataagataaacaacccagaagggattatgcaactaaaaagtgaaaattctccccacacctc

SEQ ID NO: 39171 - DNA, 201 bp, Homo sapiens
ttcttattacatgccttcagtgtactcagtagccctaagaacaactgaggaacaggagaagaataaagtcaacaagctatgccagtattttcgttcacttyttaaccatagttaagaaatgtgactatgttactgtagcaacactttatgaaagttcagtttacatcatagagttaaacattgcaacatagcaggattggt

SEQ ID NO: 39172 - DNA, 201 bp, Homo sapiens
tcctccctcactccctcttcccttcctgcctgccttcttttcctcctgcctgcctgtcttcctacctttctttccttccttccttcctttccttcccttccttcctttcttctctttccttcctttcttctctttccttcctttctttccttcttccttccttcttttcttcctgccttccctcccttcttcctccctcct

SEQ ID NO: 39173 - DNA, 201 bp, Homo sapiens
agacctctgagaccaatttcaactctgagacttgatgattcttccaaacagtcctccaaacagaacaggttgttaaaaaactttttaattttaaataatataatatttttaatttctaaaattaaaaatgcatgtagacataagataaacaacccagaagggattatgcaactaaaaagtgaaaattctccccacacctct

SEQ ID NO: 39174 - DNA, 201 bp, Homo sapiens
caatatgaagtcttaaattcattccttctaactctgaagatgattctaagaatcaagacaatttgggggggatcaaagaattaaagttaaaggaatttttwaaaaaatattttcttaatgagggagaggagaggatacttagtgggaataaataacagtagcttagaaaaaatgtctaattttttatcttaacattcaaaa

SEQ ID NO: 39175 - DNA, 201 bp, Homo sapiens
aaacagaattcattttctttgctctaaattaaacacagacagcaaaatagctcatctttttaattaaataaatataaatcaaaagtgaaatgaagcaaaawttttaaaaacctaacagtgttacagaataggagagaaatgaggattctgaagacatagccacacttcaagcaacaggagccccaggagagagtgaaatga

SEQ ID NO: 39176 - DNA, 201 bp, Homo sapiens
gacctctgagaccaatttcaactctgagacttgatgattcttccaaacagtcctccaaacagaacaggttgttaaaaaactttttaattttaaataatataatatttttaatttctaaaattaaaaatgcatgtagacataagataaacaacccagaagggattatgcaactaaaaagtgaaaattctccccacacctctt

SEQ ID NO: 39177 - DNA, 201 bp, Homo sapiens
gaggcggaggttgcagtgagccgagatcgcgccactgcactccagcctaggcgacagagcaagactccatctcaaaaaaaaaataaaaataaaaataaacyagtggttcccaattaggggagatttttgctccccacccccaagaggacatttgccaacgtctggagacattttggttgcaacaacttggcgggggggtgc

SEQ ID NO: 39178 - DNA, 201 bp, Homo sapiens
ccactgaatttctggaattgcttttcaggtccaaacgttatcttaaccttaggcaagctctctggccagccacacccatccctggtaaatgttgtaggacrgagaccccccccagtgccctgttgccccttcctgtcatgtttctcaccttccatgccccagtaaactgttgaaaccagagaatgggtcagggaagcccca

SEQ ID NO: 39179 - DNA, 201 bp, Homo sapiens
taggcaagctctctggccagccacacccatccctggtaaatgttgtaggacagagaccccccccagtgccctgttgccccttcctgtcatgtttctcaccytccatgccccagtaaactgttgaaaccagagaatgggtcagggaagccccatcccactcccctgaaaatatctgggagactcttggtgtagggacagcta

SEQ ID NO: 39180 - DNA, 201 bp, Homo sapiens
cctcactccctcttcccttcctgcctgccttcttttcctcctgcctgcctgtcttcctacctttctttccttccttccttcctttccttcccttccttcctttcttctctttccttcctttcttctctttccttcctttctttccttcttccttccttcttttcttcctgccttccctcccttcttcctccctcctacctg

SEQ ID NO: 39181 - DNA, 201 bp, Homo sapiens
actccctcttcccttcctgcctgccttcttttcctcctgcctgcctgtcttcctacctttctttccttccttccttcctttccttcccttccttcctttcttctctttccttcctttcttctctttccttcctttctttccttcttccttccttcttttcttcctgccttccctcccttcttcctccctcctacctgcctc

SEQ ID NO: 39182 - DNA, 201 bp, Homo sapiens
ctccctcttcccttcctgcctgccttcttttcctcctgcctgcctgtcttcctacctttctttccttccttccttcctttccttcccttccttcctttcttctctttccttcctttcttctctttccttcctttctttccttcttccttccttcttttcttcctgccttccctcccttcttcctccctcctacctgcctcc

SEQ ID NO: 39183 - DNA, 201 bp, Homo sapiens
tttaagcctaaaagaagaatcttctgtgccatttaatgatttgattcccattgcaagtttattattagatataataaagcaagtcacatcagttgcttccrtaacctttccacatgaactaatgatcatgtaggcatgaataaattctcccatactaattctaaagtttaaaatcagcaacttgtcttaaataatgccttt

SEQ ID NO: 39184 - DNA, 201 bp, Homo sapiens
ccctcttcccttcctgcctgccttcttttcctcctgcctgcctgtcttcctacctttctttccttccttccttcctttccttcccttccttcctttcttctctttccttcctttcttctctttccttcctttctttccttcttccttccttcttttcttcctgccttccctcccttcttcctccctcctacctgcctccct

SEQ ID NO: 39185 - DNA, 201 bp, Homo sapiens
tgaacagattgagttgtttagtggttggagtcattaggatccagtctgaaaaaggaagaaagtgtaccaagaacaaaagaacttaaaaaaaaagaaaaagaaaaaaaaacccatcccccctggggtgagtttgcaacagagcaatgaaagcctttatgacatgctgtgactcagaagctcagaggtgacatagcttagcag

SEQ ID NO: 39186 - DNA, 201 bp, Homo sapiens
ctcttcccttcctgcctgccttcttttcctcctgcctgcctgtcttcctacctttctttccttccttccttcctttccttcccttccttcctttcttctctttccttcctttcttctctttccttcctttctttccttcttccttccttcttttcttcctgccttccctcccttcttcctccctcctacctgcctcccttc

SEQ ID NO: 39187 - DNA, 201 bp, Homo sapiens
tcttgtaatgtaaagtattaaaaatctaatatttgactggcagggcgaggtccacttcatttcacctccgtttgttagtttatgaccttcatcatcttttkcatctcaatagtgcagcttataaattgaaaaaaaaaattccttgcccttctctctctttctttcaataaataaaatgttatgtttttgcttacccctcct

SEQ ID NO: 39188 - DNA, 201 bp, Homo sapiens
actgcagtaagcatcatagagcatgcgaactgtgcttccatattttgcacgggggagggttacccagagggggcggtggcaagggcatgggatatccaggrggagctgaacaaacgtgcacaggaagaaaagtgctttctgctcctcagcttgattcgtgacattgtaaaaaacgatgttttgaggccgggcacagtggct

SEQ ID NO: 39189 - DNA, 201 bp, Homo sapiens
aaagtattaaaaatctaatatttgactggcagggcgaggtccacttcatttcacctccgtttgttagtttatgaccttcatcatctttttcatctcaatartgcagcttataaattgaaaaaaaaaattccttgcccttctctctctttctttcaataaataaaatgttatgtttttgcttacccctcctaacagactgaa

SEQ ID NO: 39190 - DNA, 201 bp, Homo sapiens
cgggggagcagtcaggtggtccacacacacagctggcagttgtgttggctctcggctggggctgatgaccagagcacctacacaggcctttccagcagggsagactgcagacccaggctccttacatgtggatggtgtcccccagagtgagggtccccagaaaaccaggcaggagctgtgtggccttttgtgtctaagcct

SEQ ID NO: 39191 - DNA, 201 bp, Homo sapiens
aggctggagaattgcttgaacctgggaggtggaggttgcagtgagctgagatcgcgccattgcactccagcctgggcgacagagcaagactccgtctcccaaaaaaaaaaaaaataaaagaatgaggatttgaactcagaccatctgaccccagtgtctgtgtggcacgccacggtctgatttccatctccatgtcaaact

SEQ ID NO: 39192 - DNA, 201 bp, Homo sapiens
catagggatttgttgcccaaacttggctcctttgcccaccatgggaccactgagctccagcgaggtgggcagggtctgggaaagtgattgagctcggcccrgttcaggaggtgccatctgagactacagtatcagggaggcgaggaccatgtggatagcaatgggggacattccactccagaagatggagagcagtttcca

SEQ ID NO: 39193 - DNA, 201 bp, Homo sapiens
ggctggagaattgcttgaacctgggaggtggaggttgcagtgagctgagatcgcgccattgcactccagcctgggcgacagagcaagactccgtctcccaaaaaaaaaaaaaataaaagaatgaggatttgaactcagaccatctgaccccagtgtctgtgtggcacgccacggtctgatttccatctccatgtcaaactt

SEQ ID NO: 39194 - DNA, 201 bp, Homo sapiens
ttgtttgccctagggtgttggacacattatgatggcttccatgtgtgaaattgccttgcagggtactgacagtgtagaaagctttttcatgggtgtaatctttttttttttttcttcagagatgcagtctagctctgtcgcccaggctggagttcagtggcatgatcttggctcactgcaacctctgcctcccaggctcaa

SEQ ID NO: 39195 - DNA, 201 bp, Homo sapiens
gaggaagtgggaaaggtctgagggagcggcagaattctcagctgcctgaatcatcgagggtagcctggctctggcacaggtgagcagatggtagcgttgcycctcctggaatctgggcttgcacggtgatccagcggctccatcttcagcggcttgctcatagtgagtcccttctctgttgggaattgtgctgatggccag

SEQ ID NO: 39196 - DNA, 201 bp, Homo sapiens
tgtacaagaggcactttgctgcctctgacattggcacctggggaggcctaggccctctaccttagtgccttccttcactgagccactgctcctgtcactcagttaggtatggatttcaatcgcaggattattctagggaatctccgggccacctcatggcccctattcacatcacagtgtgtgtaaaatggtggcagctgg

SEQ ID NO: 39197 - DNA, 201 bp, Homo sapiens
attcataccgattgtgcagatgaagatatttagactcagatatcaagggaggccaaagctgtgtagccagaaagaggcagggaaggactagaagctgggtyttgggatgcttggtcctttgctttttcccactccttcatatatggttggttttctttgtgcttggcgtcttctcattttaattccaccctctgtccttgt

SEQ ID NO: 39198 - DNA, 201 bp, Homo sapiens
agcggcagaattctcagctgcctgaatcatcgagggtagcctggctctggcacaggtgagcagatggtagcgttgctcctcctggaatctgggcttgcacrgtgatccagcggctccatcttcagcggcttgctcatagtgagtcccttctctgttgggaattgtgctgatggccagaagcccaaactattgcttttaggg

SEQ ID NO: 39199 - DNA, 201 bp, Homo sapiens
gtacaagaggcactttgctgcctctgacattggcacctggggaggcctaggccctctaccttagtgccttccttcactgagccactgctcctgtcactcagttaggtatggatttcaatcgcaggattattctagggaatctccgggccacctcatggcccctattcacatcacagtgtgtgtaaaatggtggcagctgga

SEQ ID NO: 39200 - DNA, 201 bp, Homo sapiens
actcagatatcaagggaggccaaagctgtgtagccagaaagaggcagggaaggactagaagctgggttttgggatgcttggtcctttgctttttcccactscttcatatatggttggttttctttgtgcttggcgtcttctcattttaattccaccctctgtccttgtcccaggccccactgacaaacaacagctcacaaa

SEQ ID NO: 39201 - DNA, 201 bp, Homo sapiens
tatggttagtggaaaggaaaaggttgaatgaggaagagagtgtggttggggttcaggcaccttaaagactggccagacccaagaagttgcaggtcccattsccagaggctgaaccccaatgctaccctctccccacccagctttaacaatggttttgccatgtaagaccccaaggtagccactgtgctaagttctgagctc

SEQ ID NO: 39202 - DNA, 201 bp, Homo sapiens
tacaagaggcactttgctgcctctgacattggcacctggggaggcctaggccctctaccttagtgccttccttcactgagccactgctcctgtcactcagttaggtatggatttcaatcgcaggattattctagggaatctccgggccacctcatggcccctattcacatcacagtgtgtgtaaaatggtggcagctggag

SEQ ID NO: 39203 - DNA, 201 bp, Homo sapiens
cagcaaacaaccagcccagcttgctaaagcgcccagaggtgaaagccatgcacagcataggaaggagggttgaggaaagtagattaaactgctggcagggcccaaaattccagtgaaagagatgactaatgatgagacaccagggtctgaagctgaggttaaattcaactggaaattcttggcctgggagggataggatct

SEQ ID NO: 39204 - DNA, 201 bp, Homo sapiens
agctgtgaggtctcttggcctgagctgaccagtcattatttctgtttattccccctctgacaggcaggaagaaacttcaggatgagaatgagacaggcaaragcctggtggagctttgtgctatttcttttcttttcttagatggagttttgctcttgttgccaggctggagtgcaatggcgcgatctaggctcactgcaa

SEQ ID NO: 39205 - DNA, 201 bp, Homo sapiens
attagaccaagttcggagatatatttaaggaactaaaacgaacgtaagatctggggtagggggatgagcagctccacaccctgctcctgtgtgagctgtgygctcccgactgggaaatgtctaactccatcgaaaacatgagatgaggggcagggaaggggctacttccaagcctttcattataatactgtgtgtaacctt

SEQ ID NO: 39206 - DNA, 201 bp, Homo sapiens
ctttatagcagcatgatttataatcctttgggtatatacccagtaatgggatggctgggtcaaatggtatttctagttctagatccctgaggaattgccayactgacttccacaatggttgaactagtttacagtcccaccaacagtgtaaaagtgttcctatttctccacatcctctccagcacctgttgtttcctgact

SEQ ID NO: 39207 - DNA, 201 bp, Homo sapiens
tcagggaagccccatcccactcccctgaaaatatctgggagactcttggtgtagggacagctataaccaccacttttacctacagagatggtcaaagattrgagagttgagagttgggtgagattctacagtagaataatagcacatcatggacagttatagacaaaaagaactagcatcttttatgtgttcgaaccatat

SEQ ID NO: 39208 - DNA, 201 bp, Homo sapiens
atgatctcgggcaagtcagttaacaaccctgatcctcagtttccttatctgtaaaatgagcatactcatatctcctatttttgttgttgttgtttgtttgyttgcttgtttgtttgagacagggtcttgctctgtcacccaggctggagtgcagtggcctgatcacggcccactgcagccttgatctctagggctcaagtg

SEQ ID NO: 39209 - DNA, 201 bp, Homo sapiens
tgagattctacagtagaataatagcacatcatggacagttatagacaaaaagaactagcatcttttatgtgttcgaaccatataattatgaaagcaagatycggcaaaccacatacacatacacatatgactggtgcttttttctaaaagattcagtgggtgtggtagaaaagccttcagctctggggcaaaatgaggcct

SEQ ID NO: 39210 - DNA, 201 bp, Homo sapiens
acaggaggcggatgttgcaatgagccaagattgcaccactgcactagatcctgggcgacagagtgagactccctctcaaaaaaaaaaaaaaaaaaaaaaatttgtagagacgaagtctcactatgttgcccaggctggtcttgaactcctggactcaagcgatcctctggccttggccttccaaaatgttgggattacagg

SEQ ID NO: 39211 - DNA, 201 bp, Homo sapiens
tcgtgaagaggcttccaagaaaatgcagcttatcttatggcagaggaatcacagacttatcagtacctttttagcatgtccatttccttttactccttctstattttaggccatgctgtcatgagaaagtggcttcttctcaatgacccggaagataccagttcaggttctaaaggttatatgaaagtcagcatgtttgtc

SEQ ID NO: 39212 - DNA, 201 bp, Homo sapiens
atgaggcctgaattaaattcaggctttaccccacttcataggcaggcaaatcgtttaccctctgagtttccatttcctgaactataaagggagataataayaatcacaggattgttgagaggtttgattcattcaaaaagtcattaagtaccagattctgtcccatgtgctgggatatagaaacgaacacatgggaataga

SEQ ID NO: 39213 - DNA, 201 bp, Homo sapiens
tgaaagtggacactcatctggggaatttggtgtgtcgtgaagaggcttccaagaaaatgcagcttatcttatggcagaggaatcacagacttatcagtacmtttttagcatgtccatttccttttactccttctctattttaggccatgctgtcatgagaaagtggcttcttctcaatgacccggaagataccagttcagg

SEQ ID NO: 39214 - DNA, 201 bp, Homo sapiens
caaataatcttggagagtttcaggataccctggaacgcaaccataaacttccttatggacattttccaagacgccaagcccatcacatgtgttacatttaygaatcttcattatccagcatttctgacagcttccaataaggcactgtggcatggtggcaaacacacacaaacacagattttggagccagagggatgtagt

SEQ ID NO: 39215 - DNA, 201 bp, Homo sapiens
cactttcttatactgtaaccagagaggaggattgggagtttctgttagatgaggagagggaagggtggggtcaaaatggaagtgtgggaggggaagtttcyggacagcgtctaggggacctcagagtcagatgcagtgaggggctctgtaggccacatagagagagcacaggcagaaccagccaggataggtctgggcaca

SEQ ID NO: 39216 - DNA, 201 bp, Homo sapiens
agcgtctaggggacctcagagtcagatgcagtgaggggctctgtaggccacatagagagagcacaggcagaaccagccaggataggtctgggcacaagccracgaggagcgtcacgctgaagcttaggaagggaagccattgggctgtgtgttgccctctcaagtggaaaagttaatgcttagcagagtgaggtccatgac

SEQ ID NO: 39217 - DNA, 201 bp, Homo sapiens
ttcattcccccaatcataacatctcattttcaagtagttgctcccattgtgtaatatttgatgtcacatagagactcgactccaaactctatgacattcgygggctgaaagacaaaggagcatgactggctttttcttcactttgaagacatctgcagtttattaattccacaaggaaagctggagggccagaggacgtcg

SEQ ID NO: 39218 - DNA, 201 bp, Homo sapiens
tctgatattatgatgacgggaattgttaggcataacagaaaaaggtaaattctaggccaattatgaagctggtcttggttactttttcaatcttccccccwcccatcttccatccccctgacatttgctgggcacccagtgtctttaagtttcctggctcccactgtggtacccgctgaggcctgccctctgagccacacc

SEQ ID NO: 39219 - DNA, 201 bp, Homo sapiens
agttcttcattattatttttggatctcattaccattctctagggaaactaatctcagctaattatatatatgcaaatttatttgactatcataagcattattttttttttttcaaatcagggaaacaaactcaagtaattctgaacggagagaaaactcctctaatcagagaataaagctcaacttaaagtaccttgcaaa

SEQ ID NO: 39220 - DNA, 201 bp, Homo sapiens
gtgatccgcctgcctcagcctcccacagtgctgggattacaggtgtcagccaccgcacctggcctgtggcactttttttttctttttctttctttcttttyttttttttttggagatggggtcttgctctgttgcccaggctggagtgcagtggcttgatctcggctcactgcaacttccgcctcctgggttcaagcaatt

SEQ ID NO: 39221 - DNA, 201 bp, Homo sapiens
tgtctcccagagttggagaggtgcaggtgggagtctagagatgccaaggttagtctaaagatgccaaggttactagtggaccaagaggagagaaacacagmcacacacacacacacacacacacagagagagagagagagagagagaagaaagaagagagaagagagaggagagacagagagagcacttcagagacttgca

SEQ ID NO: 39222 - DNA, 201 bp, Homo sapiens
atggttagtggaaaggaaaaggttgaatgaggaagagagtgtggttggggttcaggcaccttaaagactggccagacccaagaagttgcaggtcccattgscagaggctgaaccccaatgctaccctctccccacccagctttaacaatggttttgccatgtaagaccccaaggtagccactgtgctaagttctgagctcc

SEQ ID NO: 39223 - DNA, 201 bp, Homo sapiens
ctccccggcctattagcaaacagttcccagctgcctcggtcagctgggctccatgcccacacccgcatgggctagacccaggcagtcccaggctcacagckcctgtgggcagtgacacctccccacccctcaggcactgggagcgggttgccttgttcagtgtggactctcctcttcctcactttacagtcatccaaccag

SEQ ID NO: 39224 - DNA, 201 bp, Homo sapiens
gcctagcattctagatggtctaacacgaacatgttctaggagatttttttccctctaaattagagagtaggactttaaaaaaaaagagagagaaaataatttattattattattattattatttttgagacaaggtcttgctctgttgcccaggctgaaatgcaatggaacattcacgactcactcagcctcccaagtagc

SEQ ID NO: 39225 - DNA, 201 bp, Homo sapiens
tcagctctctccactgaccaggctgcctaatctggacaggatggtggctttcccttttccctgattaggacttttgacagtcatggtaggctcttcctcawcttctctgttggcaggtgctcaatggaatagaaccatatgttttgagcttatcttgtactttctctgccccagtccgtaaatcgctatttctccaagcag

SEQ ID NO: 39226 - DNA, 201 bp, Homo sapiens
attggaggaggtgttttcactaaaaattagaacattatctctcatcctgcagattccactgcatagtttactgtcttgcagtggaaggccgaccctgcgtyagctctgtaatgaacaaggcatgatttcctgcccctccaccgcctctgctcttttgtaagcagtgtgcctccccatcctcagctgggaatcatgatcatt

SEQ ID NO: 39227 - DNA, 201 bp, Homo sapiens
taaaataatgcatgtaaagtacctggttcatagaagatgataactgtgtgttaaaggtacctccattcccactctgcccctgctaaaccataatcttttcwgtctgtgtgtcgaccatgtgaagggcgcacatatcattaatcttattttacagatgcgagatgaggctcagagagtttttccagccaggcctgcctccta

SEQ ID NO: 39228 - DNA, 201 bp, Homo sapiens
cctagcattctagatggtctaacacgaacatgttctaggagatttttttccctctaaattagagagtaggactttaaaaaaaaagagagagaaaataatttattattattattattattatttttgagacaaggtcttgctctgttgcccaggctgaaatgcaatggaacattcacgactcactcagcctcccaagtagct

SEQ ID NO: 39229 - DNA, 201 bp, Homo sapiens
tggaggcaatgcagataagaaaaatctcgtggatccttttgtagaagtttcctttgctggaaaaaaggtttgtacatgatctaaatgcagatgctgctagkaataaatatctaaaactactgtgctttccttggagtgaattcctgcttactctttgttaaaatagccccctgatgagccaggcactctgagggaacacag

SEQ ID NO: 39230 - DNA, 201 bp, Homo sapiens
agcccctcttcctgccatgtatttcacagtagacatctatttgttcaaggccccaagtgtgacttttgaactaacagcttccagatatctttttgcctcaragtctcactctggggaattaacccttcaaatacaatgccgtagttatttatgaaaccaaacagaaacatttggtaataactttcatggagaaaatgtctg

SEQ ID NO: 39231 - DNA, 201 bp, Homo sapiens
ataaagaccaaacgaggctgggtgtggtggctcatgcctgtgatgtcagcactttgggaggccgaggcaggcagatcacttgaggccaggagttcgagaayagcctggtcatcgtggtgaaaccctgtctctactaaaatacaaaaattagctgggcgtggttgtgcacacctgtaatcccagctcaggaggccaaggcac

SEQ ID NO: 39232 - DNA, 201 bp, Homo sapiens
aatgcatgtaaagtacctggttcatagaagatgataactgtgtgttaaaggtacctccattcccactctgcccctgctaaaccataatcttttcagtctgygtgtcgaccatgtgaagggcgcacatatcattaatcttattttacagatgcgagatgaggctcagagagtttttccagccaggcctgcctcctaccatga

SEQ ID NO: 39233 - DNA, 201 bp, Homo sapiens
ctagcattctagatggtctaacacgaacatgttctaggagatttttttccctctaaattagagagtaggactttaaaaaaaaagagagagaaaataatttattattattattattattatttttgagacaaggtcttgctctgttgcccaggctgaaatgcaatggaacattcacgactcactcagcctcccaagtagctg

SEQ ID NO: 39234 - DNA, 201 bp, Homo sapiens
acaagaagtgattggtgcaggggaggagtgtttatccaggttatcaggtgagactcctggagaaagtgacagttgagcagaggcctggatatgcagagatyggggagggaggcatccaggcagggagaagggcgatggaagggccccaaggaagaaaatgttagcagggaaggcctgcccatgtggctgcgatagagccag

SEQ ID NO: 39235 - DNA, 201 bp, Homo sapiens
agtaatcttccttcaaattcatgaaacactgggaaattcccttttcactggggccagaggaacttaggtgtacctgagctgtaaagatgtttagtcttagytaacattgtctgaggcaatggaggcaagaacttgcaggacacttacctagtcttccttcaacctacctctagcatgaggatctgagggtcttaagtgacc

SEQ ID NO: 39236 - DNA, 201 bp, Homo sapiens
aattaatttctgtattgaccaaaaagggctgaaaagttccctattgtccctctggaggcaaaaattttcttttccattgccaactacagattcttttttgttttttttttttttttgagacagggtcttgctctgttgcccaggctggagtgcagtggcctgatcttggctcactgcaacctctgcctcacggttcaagtg

SEQ ID NO: 39237 - DNA, 201 bp, Homo sapiens
tgcagagatcggggagggaggcatccaggcagggagaagggcgatggaagggccccaaggaagaaaatgttagcagggaaggcctgcccatgtggctgcgrtagagccagcaagcggggaaaactaggaggtcagtgagaagtagggttgggacagtagggcttcatcagcccagtgaaggattggggctttatttgaagt

SEQ ID NO: 39238 - DNA, 201 bp, Homo sapiens
attaatttctgtattgaccaaaaagggctgaaaagttccctattgtccctctggaggcaaaaattttcttttccattgccaactacagattcttttttgttttttttttttttttgagacagggtcttgctctgttgcccaggctggagtgcagtggcctgatcttggctcactgcaacctctgcctcacggttcaagtga

SEQ ID NO: 39239 - DNA, 201 bp, Homo sapiens
gggaaggcctgcccatgtggctgcgatagagccagcaagcggggaaaactaggaggtcagtgagaagtagggttgggacagtagggcttcatcagcccagkgaaggattggggctttatttgaagtgtactttgagggccccctgaagatgttacacagaagtgacatgaaagtcaggaggcaagagagggtgtggagttc

SEQ ID NO: 39240 - DNA, 201 bp, Homo sapiens
tgagacaggagaattgcttgaacccatgaggaggaggtttcagtgagccgagattgtgccactgcactccagcctgggcaacagagtgaaactccgtctcaaaaaaaaaaaaaaaaaaaaaaaaaaatggaattctccctcctgggaggaagtcctgcacttgttgctgaggtggctcctcggggctcatcttcttcttgc

SEQ ID NO: 39241 - DNA, 201 bp, Homo sapiens
gcctcagagtctcactctggggaattaacccttcaaatacaatgccgtagttatttatgaaaccaaacagaaacatttggtaataactttcatggagaaawtgtctgtgaattttaagatttgcagagcaaaccacagtcatctatttatacttctgatatgagctgtttttgaggaatcaaattggaatctttctaaact

SEQ ID NO: 39242 - DNA, 201 bp, Homo sapiens
aaaaaaaaaaaaaaaattagatgagataatgctgacaaagcattttgtactcgaagattagcttttatttgggtaggtatttggggacttggggacccaaragaagcctctgctctttggactttgctacaaggaaactttaagcacttgctggatttgctcgtgtgctcatccaggtaggtgtactgtccaggctcagac

SEQ ID NO: 39243 - DNA, 201 bp, Homo sapiens
ctgtgttggcatcttagcacactcagatgcagcatgagcttcagagctgaaattccaggtttaaatcagggcatcactgccaggtgtgagctcagataaaygtcttaactctttgagcctcaatatcctcatctataaaatagcaatatcagcatctcagaggttagctttgttggcttctttctgcagcaagccagagat

SEQ ID NO: 39244 - DNA, 201 bp, Homo sapiens
tgctgtctcttcctttatctcttttgcagatgagaaaaagaaaacaaagaaagttgataatgaattgaaccctgtctggaatgaggtgacttcattgtttyttcaactttgttttaatagataagctatttctgattgtcctatctttgggtgagaggttacctcttcccttcggaaggagaatctctacatttcaccccc

SEQ ID NO: 39245 - DNA, 201 bp, Homo sapiens
aggcgtccaccaccatgcccggctaatattttttgtattttagtagagacggggtttcaccatgttgtccaggctggtctcgaactcctgagctcaggcartccacccgccttggcctcccaaagtgctaggattacaggcgtgagccgccatgtccagccagcctgtggaactttttaagactaagaattatcttacact

SEQ ID NO: 39246 - DNA, 201 bp, Homo sapiens
tggttactctgatattatgatgacgggaattgttaggcataacagaaaaaggtaaattctaggccaattatgaagctggtcttggttactttttcaatctycccccctcccatcttccatccccctgacatttgctgggcacccagtgtctttaagtttcctggctcccactgtggtacccgctgaggcctgccctctgag

SEQ ID NO: 39247 - DNA, 201 bp, Homo sapiens
ttttatttgtttgtttgtttttgagatagggtctccctcaggttggagtgcggtggcgtgattaagattcaatactgccttgaattcctgggctcaggtgrtcctcccacctcagcctcctgagtagctgggaccacaagcgtgcaccacacccaactaattgttttattttttgtagagatgggcttttgccgtgttgcc

SEQ ID NO: 39248 - DNA, 201 bp, Homo sapiens
gtggttactctgatattatgatgacgggaattgttaggcataacagaaaaaggtaaattctaggccaattatgaagctggtcttggttactttttcaatcytcccccctcccatcttccatccccctgacatttgctgggcacccagtgtctttaagtttcctggctcccactgtggtacccgctgaggcctgccctctga

SEQ ID NO: 39249 - DNA, 201 bp, Homo sapiens
ttttcctccataaaagatcaagtttttgttttattttattttattttgagatagagcctcactctgtcacctaggctggaggctggcatatactggcttgrtcttggctaactgcaagattcaagtgattctcatgcctcagcctcccaagtggccgggattacaggcatgtgccaccacacctggctaatttttgtttgt

SEQ ID NO: 39250 - DNA, 201 bp, Homo sapiens
ttcactgtggttttgaagtgaagaaattggttgaaataatcactcaaggccctattttagaactagctattccagccacttctacacgaaggaaagggggsaaaaagcctcagcccagaaaaaaggaaacaccaaatatctccctgtttctcttggcagttatgatgaacattcacagcgtgttttaatgtgcaaactagc

SEQ ID NO: 39251 - DNA, 201 bp, Homo sapiens
aagtaaagaagagtggatcacatgcagttactgatattcagaaaggagacaggtcagtgttggatgcagtgagaagctttgtaggatttgaccaagtgacrttataattattggagaggcaggatggcattcctacaagggagttgtgaagagcttgtcatagccggagatggacagtgaggaatcttgaaccactgtgaa

SEQ ID NO: 39252 - DNA, 201 bp, Homo sapiens
aatggagatttggcctacatggttggttcataaatctttctggagttcatgggcccctttgagaatctgatgagatgatggtgataataaagatgacaacragatgatgatgaggatggcaacattgtttagacgttgctatgcaactattctaaatcctttccatacagcaactcatttccttctcacaacagccctaaa

SEQ ID NO: 39253 - DNA, 201 bp, Homo sapiens
gggtctcttccagctccgaagttctatgattctattaaaatggcctggtcatggccgggtgcagtggctcacgcctataatcccagcactttgagagactsaggtgggtggatcacttgaggtcaggagttcaagaccagcctggccaacatggcaaaactctgtctctattaaaaatacaaaaattagccaggcgtggtg

SEQ ID NO: 39254 - DNA, 201 bp, Homo sapiens
gcggtcctagaagatgggagctcaggaatttgagacagagccctaaccacagcgtttctttgctaaatgaatccctgagggtccagcctgcagggtcttcrgtccctctccatttagactaaccatggctgtgcttcctcttccatccaatcctcatgaccagccacagaacagcatgcctgacatcatcatctggatgat

SEQ ID NO: 39255 - DNA, 201 bp, Homo sapiens
ccatgttggccaggatggtctcgatctcttgacctcgtcatccacccacctcggcctcccatagtgctgggattacaggcgtgagccaccacacccggcctttttttttttttttttttttttgagacagagtctctgttgccaaggctggagtgtggtggtgcaatctcagctcattgcaacctccacctcccaggctaa

SEQ ID NO: 39256 - DNA, 201 bp, Homo sapiens
tcctgtgatctctgccacttgccagttgaaactcactttctgctagccacatgttacagtagcccctgactggtctccctgtttccacgctgcttccaggrgtccctcctggcagaggaaacacccaccaaaggctgtgtcttatttatcccttttccccgcacagtacctaatgcaatggttttgactaagtgcttagtt

SEQ ID NO: 39257 - DNA, 201 bp, Homo sapiens
tgagggggattagacctcttggcaaaagagaagtccagtacattaatcgataaaaaaattttacgggataggagaaacaaaagtaagatgataaaaacaatatatatatatatatatatatatatatatatatataaaagaggtttactaaaaaaatttctagcctggccaggcgtggtggctcacgcctgtaatactggc

SEQ ID NO: 39258 - DNA, 201 bp, Homo sapiens
aagtgctgagtttacaggcgtcagccactctgcccagcctttttaatgcctttctgaaacgcccagcaggtctcaggcaggttgagagggaattccacttrtctgtaatttccccagaatccagaacacagccagctggactacaagctccatgagagcaagaggccccttgggttggtcattgtggattcctagcacctg

SEQ ID NO: 39259 - DNA, 201 bp, Homo sapiens
tgagccaagattgggccactgcactccagcctgggtgacagagcgagactctgtctcacaacaaaaaattagcctggcatggtgatgggtggctgtaatcmcagctactcgggaggttgaggcaggagaattgcttaaagcctggaggcggaggttacagtgagccaagatcgtgccactgcactccagcctgggcaacag

SEQ ID NO: 39260 - DNA, 201 bp, Homo sapiens
aatgcatataaaattttgataaaattttataaccttcaaaaaggttttataaattcatattttcaacaaaattacaagaagcccatttgcctaaatattcmtcatcccgctttataatctttgccacatgaataagtggtatcctgttatttcaattttcactctcttaatttaaagtaaagctgagtattttttcatgtt

SEQ ID NO: 39261 - DNA, 201 bp, Homo sapiens
aacaaaaaaggaaatagcactgttctatatttttatatagcttccttttggaagctgaagagactcaaaaacgaaatgcaacgtatgattcttgcatagawcctagatttctttgaaaagctaaagtttttttgtagggatgattggagaaatttgaaaattgactctgttagatgttaaatttcttggttatgataatgg

SEQ ID NO: 39262 - DNA, 201 bp, Homo sapiens
gggtgaagtgtcatgatctctaaagctttcttgcaaatagttcagtttaaaaaagagataaagcaaatgtccaaaaatggaacaattggtgaacataggtraaaggtggtatttattttaccattctttcagctgtcctgtagattagaaatattcctaagtaaaaagttggaggaaaaagtctcagttggagtaagtgtt

SEQ ID NO: 39263 - DNA, 201 bp, Homo sapiens
tttaaaaaattaacttgggtcccactctctagaggcaactactattaacatctgtgatgtatcactaagtgtttattggaggaatatatttaatgaaataygacatctgataacacaaactagcagcatatagcaaatgatttcctctcctacactttcttgctattatatcctaagcatatgcccatattaattcaaaat

SEQ ID NO: 39264 - DNA, 201 bp, Homo sapiens
tgtaaagcacctagtacagcacctggcacattgaagtgcccagtcaatggttatattaatagtagcattagctggaggagaaggaggaggaggaggagaaytggacaggaaattgggccaggtgaatttctgtaggatgaccaatggtcccactttgcctgggactttagtggtaaaactgaggataacccaggcaaactg

SEQ ID NO: 39265 - DNA, 201 bp, Homo sapiens
cattgctacctaaatagttagtgattattctaggaaactgggtggcaaactgcagaatataagtggccagagagaagttgaagggacatcaggaacacacmcacacacacacacacacacacacgcacaggctcttactatttggtgctcataaaatgacagaatgatacaaaaacatgagcattgattttgtggagcagt

SEQ ID NO: 39266 - DNA, 201 bp, Homo sapiens
atatttattgattttgttaatactcattacacagtttagggagctgtttaactcatgagtttttttggtcttgagatccctttatactttaaaaaaaaagkttgaaggccccagagagctttggtttatgtgggttatacctatgaatatttactataatagagatcgaagctgataaatttttaaaatatttattgattt

SEQ ID NO: 39267 - DNA, 201 bp, Homo sapiens
gaatcacttgaacccaggaggcggaggttgccgtgagccacaccactgcactccagcctgggcaacagagtgagactccatctcaaaaaaaaaaaaaaaamaaaacatgctgagcaaagggtagtaatgtcccaatgactagaagtctgccactattgtattatgaaatatattcagcaagagactggttgcatttaaggg

SEQ ID NO: 39268 - DNA, 201 bp, Homo sapiens
ctttgggaggccaagacgggtagatcacatgaggtcaggagtttgagaccagcctggccaacatggtgaaaccctgtttctattaaaactacaaaaattgkccaggtgcggtggctcacgcctataatcccagcactttgggaggtcaaggcgggtggatcatgaggtcaggagttcgagaccagcctggccaacatggtg

SEQ ID NO: 39269 - DNA, 201 bp, Homo sapiens
agctagtctagaaatctattcctgctactcactgctatacctgacaactggttcaggattgtggctctgatctgcttgctaggcaagacaacccttgaccmtcttttatttttactttttattcattcagcagttcctggcacataacaggtcccaatacctgtttattgaatgaataaataaatgatgacaatttatctg

SEQ ID NO: 39270 - DNA, 201 bp, Homo sapiens
cttgaacccgggaagtggaggttgctgtgagctgaaattgtgccactgcactctagcctgggcaacagggcaagactctgtctcaaaaaaaaaaattagcygggtatggtggtacacacctgtaatccccagctactgaggagactgagaacttgtttttttttagaagtgctaaaaataattttttaagaagttctgaaa

SEQ ID NO: 39271 - DNA, 201 bp, Homo sapiens
gtatacatgtgccatgttggtgtgctgcacccattaactcatcatttacattaggtatatctcctaatgctatccctcccccctccccccaccccacaacrggccccagtgtgtgatgttccccatcctgtgtccaagtgttctcattgttcaattcccacttatgagtgagaacaacaccctgcattttattcttgcagc

SEQ ID NO: 39272 - DNA, 201 bp, Homo sapiens
tttcctaaagaatttttccaagtcacaagaagtcccaagtcagtgtcaccaagaggatctccttcacctgccactttaggaacacttaaaacataatggcrgacaaaaccgtgtcctggaaacctgagcctttggacatttacaggataagggctatccctcactgggtttctttctgatattttaggagatggggaagaa

SEQ ID NO: 39273 - DNA, 201 bp, Homo sapiens
tgtgccatgttggtgtgctgcacccattaactcatcatttacattaggtatatctcctaatgctatccctcccccctccccccaccccacaacaggccccrgtgtgtgatgttccccatcctgtgtccaagtgttctcattgttcaattcccacttatgagtgagaacaacaccctgcattttattcttgcagcagttgtg

SEQ ID NO: 39274 - DNA, 201 bp, Homo sapiens
caagtagctggaattacaggcgtgcaccaccacgcccagctaacttttatatttttagtaaagacagggtttcaccatgttggctaggctggtcttgaacyccttacctcaggtgatctacccgcttcagcctcccaaagggctggaactacaggtgtgagctaccgtgcccagctgatactaatacttaaaaccagaata

SEQ ID NO: 39275 - DNA, 201 bp, Homo sapiens
ccgcaacctccgcctccttagttcaagtgattcttgtgcctcagcctcctgaacagctgggattgcaggcatgcacctctccacctggctaatttttgtgktttttgtttgtttgtttgttttttgagatggagtcttgctctgtcgcccaggctggagtgcagtagcacgatctcagctcactgcaacctcagactccta

SEQ ID NO: 39276 - DNA, 201 bp, Homo sapiens
caggcatgcacctctccacctggctaatttttgtgttttttgtttgtttgtttgttttttgagatggagtcttgctctgtcgcccaggctggagtgcagtrgcacgatctcagctcactgcaacctcagactcctaggttcgagtgattctcctgtctcagcctcctgagtagctgggactacaggcgtgtgccaccatgc

SEQ ID NO: 39277 - DNA, 201 bp, Homo sapiens
tttttgagatggagtcttgctctgtcgcccaggctggagtgcagtagcacgatctcagctcactgcaacctcagactcctaggttcgagtgattctcctgyctcagcctcctgagtagctgggactacaggcgtgtgccaccatgcctggctaatttttgtacttttagtagagatggggttttaccatgttggtcaggct

SEQ ID NO: 39278 - DNA, 201 bp, Homo sapiens
caggcgtgtgccaccatgcctggctaatttttgtacttttagtagagatggggttttaccatgttggtcaggctgttctcgaactcctgacctcatgatcygcctgcctcggcttcccaaagtgctgggattacaggtgtgagctactgcacccggcctatttttgtgttttttagtagagatgaggtttcaccatgttgg

SEQ ID NO: 39279 - DNA, 201 bp, Homo sapiens
atttctagagatagagtttgttgtaaccaagtgagttatagagaaacgtcacactttgagactaattcaggagtcctttattagctggcgaacgagagacrgctagcgctcaaaattctctcagccccgaggaaggggctagatttgttttataccgtggtctaaatagggaagggggagtttagctgaagcaatttttac

SEQ ID NO: 39280 - DNA, 201 bp, Homo sapiens
ttggaaggccaaggtaggagcactgcttgaggccaaaagttcaagaccagcctgggcaacatagcaagactactgtctctatttaaaaaaaaaaaaaaaagaagaagaagaagaaagaaatacataaaataaggtaaattaaaatcctgatctctatttactttttagcttaactatagattgtagttgattaaatatatt

SEQ ID NO: 39281 - DNA, 201 bp, Homo sapiens
tttgctcgactttttcatgcccgaattcccacagagtaacatgaagagggccagatgacacttgtacacacagtggattgagttatatgagagaactctargcttaggggacttgaattttttataatgggcagtaagcaggctggccctttgctgtgcagagagagactatcttagtgttccccatataaacatctttga

SEQ ID NO: 39282 - DNA, 201 bp, Homo sapiens
agggcagatgtttttgttcccctaatagatgaagactctgaggtttagagaggttcattatctgtcagataagcatgattcgccctgccataataatctcscagggttgtggtaagaagggaaagagatattgcatgtgggaaagctttgcaaactctgaagctgtgtgcaaatataaggtgatatcatgtaattatgtaa

SEQ ID NO: 39283 - DNA, 201 bp, Homo sapiens
ttcagtttttgggataagaatacgaaaatacagtaaaaagggtgacaacgtggttgcgaaatgtggctattctcaaagctcatggggtcaggctggtgttmtgggtccctgacagtcagccttcctgtctactcgcagcctgtctccttgtggcaggactgggttctccatgctctcccccaaactcccgtggtacccaga

SEQ ID NO: 39284 - DNA, 201 bp, Homo sapiens
tttgggatatgtttgcctttgtcttacaatataaggtgggagatgctgtgagcatgtgtttggagttggaggaaggtgaagaagttggaatggtcaaaaastagaagcccaggtggtttcactatattttcctttcttcttcatcagggaagttaattaatgctaggcttctagtacaatttcgtatggaaaagggaactt

SEQ ID NO: 39285 - DNA, 201 bp, Homo sapiens
ggaggccagagggtcacttgtgcccaagaagtcgaagctgtagtaagccgtgatcatgccattgcactccaacctaggtgacagcatgagaccctgtctcaaaaaaaaagaaaatagagaaaaaaaaattaatgcttcattcaaaatcattaaaaatgtataagttagaaagtaaagtttgccataatctctctaccttct

SEQ ID NO: 39286 - DNA, 201 bp, Homo sapiens
cctggccaacgtggcaaaacaccgtctctactaaaaatacaaaaacaacaacaacaaaaatagccagtagtggtggtgcacacctgtagtcccagacactyaggaggctgaggcacgagaatcacttggacccaggaggcataggttgcagtgagccaagatcgtgccactgtactccagcctgggtgacagagtgagact

SEQ ID NO: 39287 - DNA, 201 bp, Homo sapiens
gaggccagagggtcacttgtgcccaagaagtcgaagctgtagtaagccgtgatcatgccattgcactccaacctaggtgacagcatgagaccctgtctcaaaaaaaaagaaaatagagaaaaaaaaattaatgcttcattcaaaatcattaaaaatgtataagttagaaagtaaagtttgccataatctctctaccttctt

SEQ ID NO: 39288 - DNA, 201 bp, Homo sapiens
aggccagagggtcacttgtgcccaagaagtcgaagctgtagtaagccgtgatcatgccattgcactccaacctaggtgacagcatgagaccctgtctcaaaaaaaaagaaaatagagaaaaaaaaattaatgcttcattcaaaatcattaaaaatgtataagttagaaagtaaagtttgccataatctctctaccttcttc

SEQ ID NO: 39289 - DNA, 201 bp, Homo sapiens
tgcccgaattcccacagagtaacatgaagagggccagatgacacttgtacacacagtggattgagttatatgagagaactctaagcttaggggacttgaaktttttataatgggcagtaagcaggctggccctttgctgtgcagagagagactatcttagtgttccccatataaacatctttgagaagatagcccataaca

SEQ ID NO: 39290 - DNA, 201 bp, Homo sapiens
agggtcacttgtgcccaagaagtcgaagctgtagtaagccgtgatcatgccattgcactccaacctaggtgacagcatgagaccctgtctcaaaaaaaaagaaaatagagaaaaaaaaattaatgcttcattcaaaatcattaaaaatgtataagttagaaagtaaagtttgccataatctctctaccttcttcaacataa

SEQ ID NO: 39291 - DNA, 201 bp, Homo sapiens
gggaaagggtagggaaattgtgatagaaaaagcagaaggtcaaagcatgtcagggctggatggaatcctacaggcagcagccagggcttttattctccttytttgaggcccagagacgtgatgcccaattcatataagtgattgggactgtttgtttttttgattcctttcctgtgctggattctaggggagaatacagca

SEQ ID NO: 39292 - DNA, 201 bp, Homo sapiens
aaagtaaagctgagtattttttcatgtttatgggccgcctttatttcctttacttaggaactttcttttcataactctcttcatttttatgcaaacttaaktcaatattttagataaattttgctaattgtatataattaacattatgaacctccagtagcatttccccatactcaaaaacatgtgtctgccgggtgtggt

SEQ ID NO: 39293 - DNA, 201 bp, Homo sapiens
agataaatgcaggggctttaggtgccatccaccgagcacgtccccaggagctgctggtgcagcttgcctcaatgtcttatcggtaagtgcattcctggacrtgctttgagtcagtttacaccagtcatgcccttaaggaagggaggtaaaggggctgtaagtgaaggaactaaaatggagtctgtctggctctttcagcta

SEQ ID NO: 39294 - DNA, 201 bp, Homo sapiens
cagtagacatggacagtaaaacaagtattataattctttaaaaaaaattttttgtgagacagagtctcactctgttgcccatgctggagtgcagtggcackatctcagcttactgcaacctccgcctccgggttcaagtgattctcctacctcagcctctggagtagctggaattacaggcacacgccaccatgcccagct

SEQ ID NO: 39295 - DNA, 201 bp, Homo sapiens
attaaaagtgcaagccattgcacccagccttgttagtcacttaaagttctctctgtttttttttgttttgttttgttttgttttaagacagagtctccccrggcacggtggctcattcctgtaatcccagcactttgggaggctgaggtgggcagatcacgtggtcaggagatcgaaaccagcctggccaacaagatgaaa

SEQ ID NO: 39296 - DNA, 201 bp, Homo sapiens
aagagatcagcgccacaccatttgttagtatttataaagtaagaacattgcttgctgggtttattttattttatttttttgagatggaatattgctttgtyacccaggccggagtgcagtgacatgatctctgtttactgtaccctccgtgtcccaggttcaagtgattctcatgcctcagcctcccaagtagctggtatt

SEQ ID NO: 39297 - DNA, 201 bp, Homo sapiens
ccaggcgcggtggctcacgcttataatcccagcactttgggaggccgaggagggtggatcacttgaggtcaggagttcgaggccagcctggccaacatggygaaaccccgtctctactaaaaatacaaaaattagcagggcgtggtggcaggtgcctgtaatcccagctactcaggaggctgaggtaggagaatcacttga

SEQ ID NO: 39298 - DNA, 201 bp, Homo sapiens
ccgcctcagcctcccaaagtgctgggtttacaggtgtgagccgccgaacctggcccacttgttcttatgagaagacgggaggacacagaaggagaaaggcygtgtgaccacagaggcagagactggagttatgcagccacaggcagggcatgctcaggattgccgggagccactggctaggaagagacaggaaggattttt

SEQ ID NO: 39299 - DNA, 201 bp, Homo sapiens
ttccttgctctgtcacccaggacagagtgcaagggcatgatcatggctcactgcagcctcgacctcctgggctcagatggtcctcccatcttagcctcccraatagctcagactacaggtgtgcaccaccacacccggctagtttttaaattttttttgtagagatggggggtctccctatgttgcccaggctggtctcaa

SEQ ID NO: 39300 - DNA, 201 bp, Homo sapiens
aatgggctcaagggagctcctttgcttcttccatcatgggaggcagagaaggctccaactgcaaaccaagaagtgggccctcaccagacactgaatccgcyggtgccttgatcttggacttccccacctccagaactgtgagaaataaatttctgttttctaaaagccacccaggttgtggtattttgttatagcagccca

SEQ ID NO: 39301 - DNA, 201 bp, Homo sapiens
ctacagagtgtggagaataatctatacctcacagggaggttgttgggagcaattgtgataaaatatatagagaacttgtcgtagtgctgacacagaatgtwgcatgacaggtgctcatgtcttctggcttttatgccccacttcttcccccattgctgcagggacatacagagtcctgggggacatttccaaggggtggcc

SEQ ID NO: 39302 - DNA, 201 bp, Homo sapiens
gatcactttgtttctctagggcaaagatgaatttttaggacgaagcattttctctcctgtggtgaaactgaactcagaaatggacatcacacccaaacttytctggcacccagtaatgaatggagacaaagcctgcggggatgttcttgtaactgcagagctgattctgaggggcaaggtacattgctgtgttcttcctca

SEQ ID NO: 39303 - DNA, 201 bp, Homo sapiens
tgcccatatgcttctttccttctcgggtttgttggtttgtagccttacgtattctttctctgtcatgtgtcacacacacatacatgcacacacctgcccaycccccaccccccctacgccccccgcatgctgcacacccaaggccatgcacccgggccagggaatggaagtaatcctctggcaccgcaatatgatcgtttt

SEQ ID NO: 39304 - DNA, 201 bp, Homo sapiens
ttccacatgaactaatgatcatgtaggcatgaataaattctcccatactaattctaaagtttaaaatcagcaacttgtcttaaataatgccttttaggccrggcacagtggcttacgcctgtaatcccagcactttgggaggctgaggcaggtggatcacctgaggtcaggagtttgcgaccagcctggccaacatggtga

SEQ ID NO: 39305 - DNA, 201 bp, Homo sapiens
agaaagtgctcagtacagtgatcaataaggtaagagcaatgtctctaggaacagtggaggtagatggtcctaagttagtatggaggttcagtggtattggrgacccaggctcttacccccggttgctctgccatcactcaggagttatcattgtctgcatggtagaggcagctcactactacatctgccctccagcctgag

SEQ ID NO: 39306 - DNA, 201 bp, Homo sapiens
atacagcagtttgcacataacctcacttagttctgctgacaacgccatgaagtagacattgtccccactttagcgattccaaaaacagtcttggagagatsgagcaacttgccaaagtcagaaacccagctttgtctgacttgtaagggtagaggtcatcagggctctactcagggccagggcttcccaaattgttggtga

SEQ ID NO: 39307 - DNA, 201 bp, Homo sapiens
atatttactccttggttcaatcctaaaatctgtagataaaccactgtgaaaaataagcctactaattagagttcaatatgtttatgggttttttttttctkccttttaacaaagtgtacatagtcaaaatactgtgttccaaaagttacttgggttagtttagtgtaattatgttattcatctgaaatgtaattagatctg

SEQ ID NO: 39308 - DNA, 201 bp, Homo sapiens
catagaaaaattgtctcccatggaaccggtccttggtgacagaaaggttggggaccgctggtctgtggcatctgggtcatgtggtaccgtctgtgactaaycaaatgtagaatccaagggaaaggcaagtgtatggacaagtgctaagtgagcagggggtgttaagagtgaaaaacatcaggtgatggggccaactggtca

SEQ ID NO: 39309 - DNA, 201 bp, Homo sapiens
ctgcctttcctggctcttagaaagtctgttacaaagtctgttacaatcttaggtatggctcactataaaagtgggcaggtttgttgctttttttttttttrgagatgaagtctcactctgtcacccaggctggagtgcagtggtgcgatctctgcttactgcaacctctgcctcccaagtagctgggactacaggcgcacg

SEQ ID NO: 39310 - DNA, 201 bp, Homo sapiens
gagttgatgggtgcagcaaaccaacatggcacatgtatacctatgtaacaaacctgcacattgtgcacatgtaccctagaacttaaagtataaaaaaaaawggtaggtgtaaagggcttagcacagttgagggcatacagtaagtgctggataaatgctggcctccactaacttcggtggactagaagaatgaggaagtaa

SEQ ID NO: 39311 - DNA, 201 bp, Homo sapiens
gaactgtgctttattcctaagtgcactcagttaccatgaatgactggaagcataaaagtaggggagaacatggccaccaaggaggcattttgaggagctgratgggaatgaggctgtattcagtttggctgaataacccagcaaagtgaaaacagccacatattcggtcatgatagtacagaacatctgagggcagggaga

SEQ ID NO: 39312 - DNA, 201 bp, Homo sapiens
agtagggagtgggggaagcaatttgtcctcaaagtttcccacacagagtcagttcagaaacacatggaagaggaaatgggatgaaatctcttgaggaaaaytgaaggcaatctaaggattgttttacaagaataaaaatcattgctcggggaatactccttgggttgaagtaaaaatatttgtgaaacatgatgtcatatg

SEQ ID NO: 39313 - DNA, 201 bp, Homo sapiens
tcattttaagaattctcctttccaggaaaccaaagttcagcatcttaggaagctgtcgtaggttaaagagcctttctcagtcaacgaaggggaacagtatyttttcttgaccttattaatgtgattctttattcctgaaactgtgttatgctctggaataaaatatgcatccctcctgagttgggtaggtgatactgtttc

SEQ ID NO: 39314 - DNA, 201 bp, Homo sapiens
tatgttttgacgtcatctctctggccaaccccaactggagttctttgcatttgggacagagaaataacaattaagaagagaaaaagcagagttggagagastgttctcttcaaacaaggagattctgctaacttttaataaatttactcattgctctttaatcaggagggtgtaaatagaatcagagtgattatcttcttt

SEQ ID NO: 39315 - DNA, 201 bp, Homo sapiens
ccatatcaatgaatttttcatactcagctacgttaaaatccttggtctttcttggactttgaatgactcttttattcatgcatgattttgtaacataatgyacaatcatttggaaaattcactgagttatgtagatcactgagttatgacacatttcatcatacaatattgaaaaaaacacactttgaaatcacatttgtt

SEQ ID NO: 39316 - DNA, 201 bp, Homo sapiens
ggcgtcatcttacttaatctttactacagccctacaagggaggcagtggcaagaaggatctgagatttgaccctacttgcaagcgaacaaggtcccccgtcacagtttcacagatgccggcacatgactcctgggttagaataaaagaactttattgcccacagcaatagcaatgccagagtattgatatttgctcgactt

SEQ ID NO: 39317 - DNA, 201 bp, Homo sapiens
atccaaatgacctgagcgggcccagcgtgccaggcatgggaggtaagctgacccttctgaaggcccagccacccccagggggaggctgctaaagacacacrggagagtgtctggagaaaccctgccattgatcacaagcctgtagctccctgcccacccagacaggggccccgagaggcaggtggggctgcctgaattggg

SEQ ID NO: 39318 - DNA, 201 bp, Homo sapiens
gcgtcatcttacttaatctttactacagccctacaagggaggcagtggcaagaaggatctgagatttgaccctacttgcaagcgaacaaggtcccccgtcacagtttcacagatgccggcacatgactcctgggttagaataaaagaactttattgcccacagcaatagcaatgccagagtattgatatttgctcgacttt

SEQ ID NO: 39319 - DNA, 201 bp, Homo sapiens
ccaagtgttctcattgttcagctcccacctgtaagtgagaacatgcggtgtttggttttctgttcctctgttaggttgctgaggataatggcttccagctscatccatgtccctgcaaaggacatgatctcgttcctttttatggctgcatagtattccatggtgtagatataccacattttcttcatccagtctatcatt

SEQ ID NO: 39320 - DNA, 201 bp, Homo sapiens
agagcctggagaaacagaagcacagtgccaccactgtgttcggagcaaacacccccattgtttcctgcaattttgacagtgagttttgttttatttttgatttattttattttattttattttattttttcaagactgagtctggccctatcacccaggctggagtgcagtggtacgatcttggctcgctgcaacctccca

SEQ ID NO: 39321 - DNA, 201 bp, Homo sapiens
tcttcttccacacgagggcaccaagttgaagcgggaagaacactgagccatcagttagaaggctcaggatatggtccagttctaacgagtatttctgaggytttgatcatgtttcctaacctgccttactcttggctatgtgaaatttttcactgctactatttatgttactagagggtcaggtacaagattatgcttaac

SEQ ID NO: 39322 - DNA, 201 bp, Homo sapiens
gagcctggagaaacagaagcacagtgccaccactgtgttcggagcaaacacccccattgtttcctgcaattttgacagtgagttttgttttatttttgatttattttattttattttattttattttttcaagactgagtctggccctatcacccaggctggagtgcagtggtacgatcttggctcgctgcaacctcccag

SEQ ID NO: 39323 - DNA, 201 bp, Homo sapiens
ctactaaaaatacaaacaattagccgggtgtggtggcacacacctgtagtcccagctactcaggaggctgaggtaggagaattgcttgaacctgggaggcrgaggttgcagtgagccaagattgggccactgcactccagcctgggtgacagagcgagactctgtctcacaacaaaaaattagcctggcatggtgatgggt

SEQ ID NO: 39324 - DNA, 201 bp, Homo sapiens
cacaagttctttgaatcacatcttggaaactgcaactgttcaacaaaatattcatatgtatattcataaatatacagatgtcgggggaggaaatcagaagkctagctcacaaaattagagagcaatacggaagaacatactgaagcacagtaaagaagtcgggggaaaaagcaggcaggtggaaggaaggaataggagaat

SEQ ID NO: 39325 - DNA, 201 bp, Homo sapiens
ggtggatcctttgaggtcaggagtttgagaccaggctggccaacatggtgaaactccatctctactaaaaatacaaaaattagccgggtgtggtggcaggkgtctgtaatcccagttactcaggaggctgaggcaggagaatcacttgaatcctggaggtggaggttgcagtgagccgagattgcaccattacactccagc

SEQ ID NO: 39326 - DNA, 201 bp, Homo sapiens
gcaacctacacctcttggattcaagtgattctcctggcccagcctccctagtagctggaattacaggcacctgccaccatgcctggctaattttttttgtrtttttagtagagatggggtttcgccatgttggccaggctggtctagaactcctgaacctcaggtgatccgtctgcctcagcctcccaaagtactgggatt

SEQ ID NO: 39327 - DNA, 201 bp, Homo sapiens
caatggtgtgaccttggctcactgcaacctccacctcctgggttcaagtgattctcttgcctcagcctcctgagtagctgggattacaggcacctctcacyatgcccagctaattttttgtatttttagtagagatagagtttcaccatgttggccaggctggtctcaaactcctgacctcaggtaatccgccgccagcct

SEQ ID NO: 39328 - DNA, 201 bp, Homo sapiens
ttggctcactgcaacctccacctcctgggttcaagtgattctcttgcctcagcctcctgagtagctgggattacaggcacctctcactatgcccagctaawtttttgtatttttagtagagatagagtttcaccatgttggccaggctggtctcaaactcctgacctcaggtaatccgccgccagcctcggcctcccaaag

SEQ ID NO: 39329 - DNA, 201 bp, Homo sapiens
tggtcttgaactcctgacctcaagtgatccaaccacctcgggctcccaaagtgatgggattacaggcatgagccaccgtacccagcccaaaaaatatactsttttttcatggttgcacatatggacctaattaagtctttttatgaaccttcattctattttatggatataacataacttgtttaacaagtggtctactga

SEQ ID NO: 39330 - DNA, 201 bp, Homo sapiens
tcaacattatgttaatattaattttttaaagatctaatctctaccagggctggaccaaaacatatggggtttcaggagtatacttgatctaaaactcgacrgcaaaatctgaaatatcattttatgttataaaggcaatctgggaggataactataggtttaaattgacttaatcataactgtcctgaaaataaagttgca

SEQ ID NO: 39331 - DNA, 201 bp, Homo sapiens
ggtgtagatataccacattttcttcatccagtctatcattgatggacatttgggctgattccatgtctttgctattgtgaagagtgctgcaatgaaaataygcatgcatgtatctttataatagaatggtttatattcctctgggtatatacccagtaatgggattgctgggtcaaatggcatttctggttctaggtcttt

SEQ ID NO: 39332 - DNA, 201 bp, Homo sapiens
tcaccatcatctgttgtttcttgaccttttaataatctctattctgactagtgtgagatggtatctcattgtggttttgatttgcatttctctagtgatcmgtgatgttgagctttttttcatgttttttggccacataaatgtcttcttttgaagatttatctgttcatgtcctttgcccactttttaatgtggttgttt

SEQ ID NO: 39333 - DNA, 201 bp, Homo sapiens
acaagaggcactttgctgcctctgacattggcacctggggaggcctaggccctctaccttagtgccttccttcactgagccactgctcctgtcactcagtyaggtatggatttcaatcgcaggattattctagggaatctccgggccacctcatggcccctattcacatcacagtgtgtgtaaaatggtggcagctggagc

SEQ ID NO: 39334 - DNA, 201 bp, Homo sapiens
tttaatagtggtgggtgggggtggagaggttggtgatctggcttcattttaagaattctcctttccaggaaaccaaagttcagcatcttaggaagctgtcrtaggttaaagagcctttctcagtcaacgaaggggaacagtatcttttcttgaccttattaatgtgattctttattcctgaaactgtgttatgctctggaa

SEQ ID NO: 39335 - DNA, 201 bp, Homo sapiens
cactcattttttaaggctcatgtcacgtataacctcccccttaaatgttcccctaatcaccccagtcataaacgggagtccaagtgggagatttggcagcktgcctagaagtagtacctcccttcctccatccagaggatgtattgcgcatctacgacaggctaggaattaagttatagtgatgattaaattattggcatg

SEQ ID NO: 39336 - DNA, 201 bp, Homo sapiens
caaagtactagtaatgaactaatttccatgtaatgcataattagctaaaaaaatgcccatacagtagtgcaggaatttcccttccgggtttatcccatcakttgttctgtcccttctcccagaagcttcagggatgctatggttggcttgaagagcctgctatgttcccatttggctcatgttcaagcttggggtcttgct

SEQ ID NO: 39337 - DNA, 201 bp, Homo sapiens
cactgggctggggacttggtccaggaccagaaaaaaaagtaccttccaactgtgcttcttgcagatactacctgcgtgtgatcatctggaacaccaaggaygttatcttggacgagaaaagcatcacaggagaggaaatgagtgacatctacgtcaaagggtaaggttagcatgtgagagactttgccaagctcagggaaa

SEQ ID NO: 39338 - DNA, 201 bp, Homo sapiens
ataattagctaaaaaaatgcccatacagtagtgcaggaatttcccttccgggtttatcccatcatttgttctgtcccttctcccagaagcttcagggatgytatggttggcttgaagagcctgctatgttcccatttggctcatgttcaagcttggggtcttgctctttcccaaccagcaatttataatccgacctgtcct

SEQ ID NO: 39339 - DNA, 201 bp, Homo sapiens
caggtgggagtctagagatgccaaggttagtctaaagatgccaaggttactagtggaccaagaggagagaaacacagacacacacacacacacacacacasagagagagagagagagagagagaagaaagaagagagaagagagaggagagacagagagagcacttcagagacttgcagagaattccccttgaatcttcag

SEQ ID NO: 39340 - DNA, 201 bp, Homo sapiens
aagcaggggtgtggtcacctggttgaagccacagaacctagaaagcaggaagccaggagttgtctacaggtcctctaagtcgacatctggtttgctttccygccccctcagctgccttcaggtttagaatttaatcatttctgcataacttcaaaagattgtcattggtgaaaataatgacccaacatgtagtactggtgc

SEQ ID NO: 39341 - DNA, 201 bp, Homo sapiens
cggggcccctgaagagcggcttgctcttcacatcctcaggactcaggggctggtccctgagcacgtggaaacaaggactttgcacagcaccttccagcccracatttcccaggtaaagggccttccctcccttgaagaccattatccctgccccaaatgcaatggcagtagttgacatttttgcgccttttatcttctttg

SEQ ID NO: 39342 - DNA, 201 bp, Homo sapiens
ctgtgggatgtgtatgttggggttgggttagtgatgggaagtctgcagttttattaaccaggcgagacccagactatgatacaggtgggcatgtgcagccrtcagagacccctgagtgagaatggaaagtgggtggcctaaatgacattgtacataaaagattaaccttggtttgctctcttccacttcttgccttccatg

SEQ ID NO: 39343 - DNA, 201 bp, Homo sapiens
tgagtcagtttacaccagtcatgcccttaaggaagggaggtaaaggggctgtaagtgaaggaactaaaatggagtctgtctggctctttcagctaagagaracaatcaggttaaaacaaggtagagtatcacaagttcacgtgcagtctatctgaacctgcacattttcatatttttctgaacctatgacatgcataattc

SEQ ID NO: 39344 - DNA, 201 bp, Homo sapiens
gtgccatccaccgagcacgtccccaggagctgctggtgcagcttgcctcaatgtcttatcggtaagtgcattcctggacatgctttgagtcagtttacacyagtcatgcccttaaggaagggaggtaaaggggctgtaagtgaaggaactaaaatggagtctgtctggctctttcagctaagagaaacaatcaggttaaaa

SEQ ID NO: 39345 - DNA, 201 bp, Homo sapiens
tgagaaaggcagccaacctggggcacagtgagggttgaaagtgcaggaaggaggtgaggtcagagaaaccacaatatatgtggctttgggggccaaggcaygggctttggatttcatcctaagtggaatgagaatccgttaaaagcttttgcttatgatctgacatattttaaaaggatcactcaggctttctgtgtagag

SEQ ID NO: 39346 - DNA, 201 bp, Homo sapiens
gctcttgttgccaggctggagtgcaatggcgcgatctaggctcactgcaacttccgcctcccaggttcaagcgattctcctgcctcagccacccgagtatsggggattacaggtgcccaccaccatgcatggctaaattttgtatttttagtagagatgggtttcaccaagttggccaggctggtctcaaacttctgacct

SEQ ID NO: 39347 - DNA, 201 bp, Homo sapiens
attaaggtggttattaatcagcattggttaaggtgattatttcttcttataatgtctgatcaagtattgcaggatagaagtttcatactccctaagacttmgaatgcaaagataggaaaagactgtggagatcatctcactgggggatggccaatggccaatggccatttcccccaacttctatgcttatggtagacatca

SEQ ID NO: 39348 - DNA, 201 bp, Homo sapiens
tacctatgaatatttactataatagagatcgaagctgataaatttttaaaatatttattgatttaactgtaacaataacccgttactaacataaattacaycaattacatatttaatttaaaatgttaataaactacatatttttacaaaatacattttgtgtaaaaaatcagaaagcagagtgagactgttttgcatttt

SEQ ID NO: 39349 - DNA, 201 bp, Homo sapiens
cataactggttctccctcctccatgcctgatccacccaccctattgtgtctactggagtgagctcgtcttctggctccacattttcaacccctccttgccsttgaattctcatctagctcagcctctgcatcttctgtgcacacagcctgaagtcacctttctttcctctgaatttttctgtgcattgatacccctctgat

SEQ ID NO: 39350 - DNA, 201 bp, Homo sapiens
agctggactacaagctccatgagagcaagaggccccttgggttggtcattgtggattcctagcacctgacagaactccaagaataaagcaaataaaaaatrcatttatgtgagagtgcttcctacttcagattttgaatcatcccaactcatctcttcaaatttgagattgagatcaagccacgtgaccaatggcagagag

SEQ ID NO: 39351 - DNA, 201 bp, Homo sapiens
cagactcccaaagtgctgggattacaggtgtgagccattgcgcctcgctagaccttattcttgaatgaagtgaaacaaaaaactttttaatgccttggggkttttttttgttctttttttgttttttgttttttgtttttgtttttgtttttttgagatggagtttcgctcttcttgcccaggctggagtgcaggttgctc

SEQ ID NO: 39352 - DNA, 201 bp, Homo sapiens
cgccaggccccctctgtccccgggaagctagctcttctgcttcctggctgccttggtgctgggtgagattgagttattcatgtgtggtggttctgcccggstcattttgcatttaaccgatgagaattgtatacattacaaaagggtcatatgtgacttgggtctgaatttgggatttttctggtgttgctaaatcacata

SEQ ID NO: 39353 - DNA, 201 bp, Homo sapiens
gggcatggtggcgcacacctgtaaatcccagctactcaagaggttaaggcaggagaattgcttgaacccaggaggcagaggttgcagtgagccgagattaygccactgcactccagcctgggcaacagagcgaggctctgtctcaaaacaaagaaacaaacaaccatgtgtcttgaatgttttacccattctctgatgggt

SEQ ID NO: 39354 - DNA, 201 bp, Homo sapiens
ctgcaacctctgcctctgggctcaagtgattctcctgcctcagcctcccgagtagctgggattacaggcgcctgccaccacacctggctaatttttttttwaaattttatttttagagaaggggttttgccctgttggccaggctggtcttgaactcctgacctcaggtgatccacccgccttggcctcccaaagtgggga

SEQ ID NO: 39355 - DNA, 201 bp, Homo sapiens
aaaaaaactttagaatgagaaatatctggtcattgaaataattttccccatcaaagcaaaaaaaaaaaaaacccacaccttttcatgttattgtcataacytctcagtgtagcttaagaaatactagcatataaaggaccattcattcagaaaaatgatccaatgaggctgaaggatcagcctcacactccatcctccctc

SEQ ID NO: 39356 - DNA, 201 bp, Homo sapiens
ggtcctcttgtgttaccccttctgccaggcctttaggaaaaaaaaaatactgtggttcattcaagtaaaaagagtaaacttaaagagatcagcgccacacsatttgttagtatttataaagtaagaacattgcttgctgggtttattttattttatttttttgagatggaatattgctttgtcacccaggccggagtgcag

SEQ ID NO: 39357 - DNA, 201 bp, Homo sapiens
attctttctcttactcaggctttggaatctggtgtttgcttcacacttacagcacctctcaattcagagacttaccacatttcaagtgctctgtagccacrtgtagctagtggccaccatattggacaggatggtttcagatcctgggcttaaaacttcagacctctctgcaccctatccctcttgctttttttttgagac

SEQ ID NO: 39358 - DNA, 201 bp, Homo sapiens
gggtgacttctggctcctacggagaatgggatctgggagtggagcattgattttaccattcagaacaatatctctaattcataaacatatttttagaaacmgcccttttacttgctcttttactgaatgcctgatgaacactgtggccaagcctctgttaggcaaaaccagtagatttgacttgaaccagcggacctttca

SEQ ID NO: 39359 - DNA, 201 bp, Homo sapiens
agattcagtttagcaactaagcccttcagtgctccctgcgttcagccatgagatgctgctcttatgattctttgtgtgctgtgaaactgtggctagggtcrtattccttatcctgttcagtcccttccagagcagtagttccaagacacacgatgtgccagtatatgagggagtattcactgatgaacagaaaaatggaaa

SEQ ID NO: 39360 - DNA, 201 bp, Homo sapiens
aatcacaaaactagcaaatttgatagatttgattttctatgagataattctatagagtgagggtgaccccctctaggtgtagctctgtgcttagccatgtkggtgttaacatttgtgtggttatgtataattctgtgtgtcagatattctttgaaacattctgtagaaggcagttcattgacataagcttggaatatgaag

SEQ ID NO: 39361 - DNA, 201 bp, Homo sapiens
gaaggcagaaaccctgcctagcattctagatggtctaacacgaacatgttctaggagatttttttccctctaaattagagagtaggactttaaaaaaaaaragagagaaaataatttattattattattattattatttttgagacaaggtcttgctctgttgcccaggctgaaatgcaatggaacattcacgactcactc

SEQ ID NO: 39362 - DNA, 201 bp, Homo sapiens
ctaaagatgccaaggttactagtggaccaagaggagagaaacacagacacacacacacacacacacacacagagagagagagagagagagagaagaaagargagagaagagagaggagagacagagagagcacttcagagacttgcagagaattccccttgaatcttcagctgagaactgagtgaggaaactgcttgaggc

SEQ ID NO: 39363 - DNA, 201 bp, Homo sapiens
  misc_feature (1)...(201): n = A,T,C or G, or insertion/deletion polymorphism (see Tables 1-2)
ggaagcagttgatagttctgattccaacacctggtaatgtcccctgtgtcttgggcatgggtatgctttctcatttgatccttgctgcaattctaccaggngggcttttgtatcccctttttagaggacactcgggacttaagaggcactgtaggccctacctcctcagctgggtttgaaatgtatttgctgagtacttga

SEQ ID NO: 39364 - DNA, 201 bp, Homo sapiens
attatcaagatttttcactccgcgctttgcatttgttttcaaggttgttttaagtgactattttattttctcttgataccatctcttggagcgaggaaggrcagaggactggatcctcccaaagcttgcctgaaggaagcagttgatagttctgattccaacacctggtaatgtcccctgtgtcttgggcatgggtatgct

SEQ ID NO: 39365 - DNA, 201 bp, Homo sapiens
gactaatgatgagacaccagggtctgaagctgaggttaaattcaactggaaattcttggcctgggagggataggatctaattatcaagatttttcactccrcgctttgcatttgttttcaaggttgttttaagtgactattttattttctcttgataccatctcttggagcgaggaagggcagaggactggatcctcccaa

SEQ ID NO: 39366 - DNA, 201 bp, Homo sapiens
caccaaaaaagtaaaaataaaaataagaaagaagtcctcacttgagagctgaacaaactgagtctcgggtagagtgggtgaaatgcctcactcaaggtctyacagcagggtctaggtggagctggaacactaatgcttaccgccaaggctgtaccacctgtgctgtcccttatgcagccctgagtgcttggtcttggtcgc

SEQ ID NO: 39367 - DNA, 201 bp, Homo sapiens
aggacgttatcttggacgagaaaagcatcacaggagaggaaatgagtgacatctacgtcaaagggtaaggttagcatgtgagagactttgccaagctcagsgaaacagactctctccttcgtgagttttcattactgaatatgcccaagataggattcttggttttttgaggttattttatctcattaatgtgatctactt

SEQ ID NO: 39368 - DNA, 201 bp, Homo sapiens
ttgttattttcaccaagtcactaggccatgaaggctcccctccacccacccacctttctctcccaactagtttcaatatctctataagataaagactagarccttctgggtttttttttatttgtttgtttgtttttgagatagggtctccctcaggttggagtgcggtggcgtgattaagattcaatactgccttgaatt

SEQ ID NO: 39369 - DNA, 201 bp, Homo sapiens
ggcatttctaccctccaacccatgaattttccttcaagtcataccacatgggaagccaaattactttgtatactcgatttcaagatgttattgtttataargtatactatcaaattaataaatggttaggggccaaaaaaagcgtgatatttaatgcccccatcaattgtaagaagcatttcagtttttagtaatgttagt

SEQ ID NO: 39370 - DNA, 201 bp, Homo sapiens
tctggtggaagtcaattgcctagtgacagggcatttctaccctccaacccatgaattttccttcaagtcataccacatgggaagccaaattactttgtatmctcgatttcaagatgttattgtttataaggtatactatcaaattaataaatggttaggggccaaaaaaagcgtgatatttaatgcccccatcaattgtaa

SEQ ID NO: 39371 - DNA, 201 bp, Homo sapiens
ataatgttcacaaatgtttacagctaaaagtagaattgttttgattttttatgctatttttaactcaagtgcttattgacttaaatttaccagatgtattyggtgggtctcttctgataactttcagatgaacaccactctacagataggccttcatgctccaagaaatgaggtgaagactgtcatcattttagctagtct

SEQ ID NO: 39372 - DNA, 201 bp, Homo sapiens
  misc_feature (1)...(201): n = A,T,C or G, or insertion/deletion polymorphism (see Tables 1-2)
acatggggaagggtcacggtggtgcccgtggtgacactgagggttgtcctctgagtaaaattgggagacttcccaaacaggttcccgtgggacagaatgancttagtattaataaattcaccctagtcctggatctggactttggccttgtagacccagtcgtatgttaccaattcaaactaaccaagttcacaagagact

SEQ ID NO: 39373 - DNA, 201 bp, Homo sapiens
ttccatgccccgctcccttctaagccaatagcagatgtggctaatccatcacagcactttttcccaatgactgcttttattccaaaaaagctgcaaacacygagccacctagactagtttatcaaacttggcacttagagtgaagcctgttcacatgcctacaacttcttggtcaactgcacttcctacctctggcagttt

SEQ ID NO: 39374 - DNA, 201 bp, Homo sapiens
gcagtgagctgagatggcgccattacactccagcctgggcaacaagagtgaaacttcatctcaaaaaaaaaaaaaaatcagcttcagtgttcttaataatrtctcctgccttgcagggctgtttgaggattaaattaatgtacatgtgacattgcacatggcagtctataaatctccttacctatttgataacagtttcat

SEQ ID NO: 39375 - DNA, 201 bp, Homo sapiens
tttgattgtcactgggtttctgggaggtgggatgggtgaagtttatagttttattgagttttcctgcccttttgtgcctttgtaattgtttttatatctaractgttggggagctttttttgtacattctgtagcttttaaattgctcattgaggaaagaactctggacagctagtttgcaatttggggatctagttctat

SEQ ID NO: 39376 - DNA, 201 bp, Homo sapiens
agaagagcaattaaattgttggagacaccattactccttgaaccagcctgacgctgctttgattgtcactgggtttctgggaggtgggatgggtgaagttyatagttttattgagttttcctgcccttttgtgcctttgtaattgtttttatatctagactgttggggagctttttttgtacattctgtagcttttaaatt

SEQ ID NO: 39377 - DNA, 201 bp, Homo sapiens
ttaattttctccagggcttgagactcatggaatgacctgatgttttagctctaagagtgtgatttctgtaagctcttggcagaaaacgtatttgcgaatcmctaaatttcaggtatcaacaaacatctgtattggttcaaagtaagtttcagtagtcttagatgcattttttctctgcctgtgagaaatgggtaaaggagg

SEQ ID NO: 39378 - DNA, 201 bp, Homo sapiens
atcatgtaggcatgaataaattctcccatactaattctaaagtttaaaatcagcaacttgtcttaaataatgccttttaggccgggcacagtggcttacgmctgtaatcccagcactttgggaggctgaggcaggtggatcacctgaggtcaggagtttgcgaccagcctggccaacatggtgaaaccccgtctctactaa

SEQ ID NO: 39379 - DNA, 201 bp, Homo sapiens
cccattttgccttttccccttccttgccctgggagaaatcctcccttcactgggagagaacttctctcccagggcggtgcgacccggagctccagcgccckagtctccacttcgtttgctgaaacttgctttctaccagctaagaaccatgctgcgagtgattgtggaatctgccagcaatatccctaaaacgaaatttgg

SEQ ID NO: 39380 - DNA, 201 bp, Homo sapiens
tgggaggctgaggcaggtggatcacctgaggtcaggagtttgcgaccagcctggccaacatggtgaaaccccgtctctactaaaaatacaaaaaattagcyaggtgtggtggcaggcgcctgtaatcccagctactcgggaggctgaggcaggagaatcgcttgaacctgggaggcggaggttgcagggagccgagatcat

SEQ ID NO: 39381 - DNA, 201 bp, Homo sapiens
gctttgaggaaccagtgtctgacacattccactcttgctgcagactagaggaacttcttttgtttggaggttggggatttccttgggtgaaaactgcatayatatgatatctgtgattatctgtctagttgacattggtcaactagattggtgaggagaagggggatatgtctgtgatatttctaattaagcaaaaatact

SEQ ID NO: 39382 - DNA, 201 bp, Homo sapiens
ctttgctgtagggtcatctggaaatgttttaactgaagcaaacataaaattagactggtgaaagcaatgattagatgttccctctgtttttggctttaacwtaatgtcacagtctttgctgtgcctaatgtaacatcacatgctattgttcatctcacagtatccacaggagaaaaacaacgggccaaaggtgcctgtgga

SEQ ID NO: 39383 - DNA, 201 bp, Homo sapiens
aagcaaagacatggaggaagtggggtgcagggaaggcagtgtgctcattagattggggctgcttgtgggctggagtaagagaggaagcaaattggaaagayacaaaagatggcctctcagccaggcgcggtggctcacgcttataatcccagcactttgggaggccgaggagggtggatcacttgaggtcaggagttcgag

SEQ ID NO: 39384 - DNA, 201 bp, Homo sapiens
ggaggctgaggcatgagaatcacttgaacccaggaggcggaggttgccgtgagccacaccactgcactccagcctgggcaacagagtgagactccatctcaaaaaaaaaaaaaaaaaaaaacatgctgagcaaagggtagtaatgtcccaatgactagaagtctgccactattgtattatgaaatatattcagcaagagac

SEQ ID NO: 39385 - DNA, 201 bp, Homo sapiens
ctggtctttagatgccttccgtcttttagattctaattttctagttccaggtattgagttatctgctctcagcaagatgtgaaatgcattgccttaggtgytggaggggatatagcaacaaacacagcactcttcttgctttcagtctatgtcagtggtttaaaatcctggtgatggcaaaccctttacaggtgtgttccc

SEQ ID NO: 39386 - DNA, 201 bp, Homo sapiens
acagcagagtgggctgccgagcccctcagagccaggctttctgagccctgcaaaggaaaacattcctggaatatgaaaaacaacccagtaatcttccttcraattcatgaaacactgggaaattcccttttcactggggccagaggaacttaggtgtacctgagctgtaaagatgtttagtcttagctaacattgtctgag

SEQ ID NO: 39387 - DNA, 201 bp, Homo sapiens
gtgttgggattacaggcgtaaactaccacgcccagcttaaaattgggctcttaaaggacaatgaggtttgaaaatctggctagtgaatatcatggactcaygttatgtcagagtttatttacatgtgttaggttttattaattttttgttttcttgaagcagttacataatagagacataatatgaagattttacatcctt

SEQ ID NO: 39388 - DNA, 201 bp, Homo sapiens
acactatattgaaatctgacttgttatttgtctggagtttgtatgcattgatgaaacattttaaatgatgaaaaatatatctaagtcaatgaatgcaaacmatcaattgaaagtggaaaacttcagttaagttggcaaatatagtctatacaaacaattacacatttaactttagtctcttttctggcctccttttttcat

SEQ ID NO: 39389 - DNA, 201 bp, Homo sapiens
agagttaaacattgcaacatagcaggattggtgatggtagtatcagtcattcccactgtattgtaaattgctttaatcagcccgctctcctaacatctaaytgaggtacactgtgttgataagaaaggctggttgaaatctctaaaaatctgagtccacttgttcatcacagtagacatcgcacatctgtacaaagtcaaa

SEQ ID NO: 39390 - DNA, 201 bp, Homo sapiens
catctgtacaaagtcaaatgaacaaagttgcactttgaaagagccaataacaagcttgctgatgtcctgtattacatgtatatgtaatgtacatgtaatgygcatgtattaccacttcctcaattcaggccttgtatctgggtaaatggagggaatgcctcaaaaataactatgctgttgctgggggctggaggctgtgtc

SEQ ID NO: 39391 - DNA, 201 bp, Homo sapiens
atcaaaaatgcacactttcagatggtgtggcatcagggctgatggtggggatcagggctttaggtatggttacctttcctgtttacccacatctagggccrgacctccccacaccctgtggtgcttggagcatgatcctacccaggacagtcaggcagcaacagataacagcagagtgggctgccgagcccctcagagcca

SEQ ID NO: 39392 - DNA, 201 bp, Homo sapiens
agatactacctgcgtgtgatcatctggaacaccaaggacgttatcttggacgagaaaagcatcacaggagaggaaatgagtgacatctacgtcaaagggtraggttagcatgtgagagactttgccaagctcagggaaacagactctctccttcgtgagttttcattactgaatatgcccaagataggattcttggttttt

SEQ ID NO: 39393 - DNA, 201 bp, Homo sapiens
tcacaaacatttgttgggtggaagaatgaaggagctgattaatgtttgcggaagaactcactcagtgaaccatttctgtgggctgagctgtgaggtctctyggcctgagctgaccagtcattatttctgtttattccccctctgacaggcaggaagaaacttcaggatgagaatgagacaggcaagagcctggtggagctt

SEQ ID NO: 39394 - DNA, 201 bp, Homo sapiens
gctcactgcaacttccgcctcccaggttcaagcgattctcctgcctcagccacccgagtatcggggattacaggtgcccaccaccatgcatggctaaattktgtatttttagtagagatgggtttcaccaagttggccaggctggtctcaaacttctgacctcaggtgatccgcctgcctcagcctcccacagtgctggga

SEQ ID NO: 39395 - DNA, 201 bp, Homo sapiens
ttctttttctttctttctttttttttttttttggagatggggtcttgctctgttgcccaggctggagtgcagtggcttgatctcggctcactgcaacttcygcctcctgggttcaagcaattctcctgcctcagcctctcgagtggctgggactgcaggcgtccaccaccatgcccggctaatattttttgtattttagta

SEQ ID NO: 39396 - DNA, 201 bp, Homo sapiens
tccctgccttggctccctggttggagtcttggggacttggagactggaattttgcttcagtgccatctttcagtgatgcaaatcctaccccaagcctgggkgctcagtttctattgcattattttctgccttctccttgctttcccttcttgctgggacttcttggaatctcctatcttctctcttgaaggaccgccatgg

SEQ ID NO: 39397 - DNA, 201 bp, Homo sapiens
ataattcaaaagcataaaattcaaaagtattttaatgactgtgcaatattctactgaagacatataacttatttacctccccccactgtcgaccttatatstattttagaagtggttcagtgtttaatattttcacaaataagtgaaaaaatttaattcttcccactgaataggattttcctactctctctctgtctctct

SEQ ID NO: 39398 - DNA, 201 bp, Homo sapiens
ctgatctgtccacctcagcctcccaaagtgctgggattacaggggtacagtaaattagatggtcactccagttattggggtcttctgcttaccggcatcaraataagagagtctgcacagacatggactccctggacagtgctttgataggcactcccatcttcgcctttgatgacatcctttttaccattctctgttgct

SEQ ID NO: 39399 - DNA, 201 bp, Homo sapiens
atcacaagttcacgtgcagtctatctgaacctgcacattttcatatttttctgaacctatgacatgcataattctgaacaaagaaaatatgataggtcctsttctaagagggtccttctaaggttcaggggcaccatgcatcgtgctgagctatgttgcacttggtgttatgatgcctattgagtataaagaccaaacgag

SEQ ID NO: 39400 - DNA, 201 bp, Homo sapiens
ggaggctgaggcaggtgaatggcttgaatccaggaggtggaggttgcagtgagccgagattgtgccactgcactccagtcatctcaaaaaaaaaaaaaaaraaaagaaaagaaaaaaaagaaagaaaaaagaaaagaaaaagaaagaaatcatctgatagctctcatttgtttagtgcttactgtgtgccaggccctgggc

SEQ ID NO: 39401 - DNA, 201 bp, Homo sapiens
ctctgaggccaaaatagcatatgggtttttaggactctgaaatagatttctaggccaaagtcagagtgtagcgcagattttctgcacccactatatgggascacctaagagtacatgagcatgtatgtgtgaatctgagaagaacctgcaggctcctccgtaactccgagccacgtgatgctattcacagttctggagtca

SEQ ID NO: 39402 - DNA, 201 bp, Homo sapiens
taagagtacatgagcatgtatgtgtgaatctgagaagaacctgcaggctcctccgtaactccgagccacgtgatgctattcacagttctggagtcaatacstggcgagatcaactgagaccaacacagctgcttcaaaatgtcgccagattcaaaggcttcccacaacccatcctttccgaagatgggagtagaatcagat

SEQ ID NO: 39403 - DNA, 201 bp, Homo sapiens
caacaatggcctggtaagagtttgggtgtggggccttctcctgtagcaagataattacagtcatcagccacaataattgtcatgttctttctttctgggcrtctgttatctcactaggggaaagatactccatcaaaacaatgtattcaggaggattgtccccatggggatttatctaagagcttgcggggggcttaaggt

SEQ ID NO: 39404 - DNA, 201 bp, Homo sapiens
cgagatcaactgagaccaacacagctgcttcaaaatgtcgccagattcaaaggcttcccacaacccatcctttccgaagatgggagtagaatcagatatgsaggacgagactacagcttggatgaatttggtgagcacctagctgtggattgtaaactggtacaaagtatagtaacccatatatattgctgggtttggggg

SEQ ID NO: 39405 - DNA, 201 bp, Homo sapiens
ctgggggaagggaaactagcggatactgattgggtcagaatggaggttgtaaaaccactcaaggccataaaaggtcagcaggaaggctttgtgttttaggyaagcctgctctttccagttaaccataagccccactattgtattacatagcacgagttgcattccacatttctgttattggcctaaccttctctcctgaca

SEQ ID NO: 39406 - DNA, 201 bp, Homo sapiens
accacacctggctaatttgttgtatttgtagtagagacggggtttcaccatgttggccaggctggtcttgaactcctggcctcaagtgatccacccacctyggcctcccaaagtgctaggattacagacatgagccaccgcacctggccccaactacaaattctgcttgtgatattagaagggatgagagtccatcgcagt

SEQ ID NO: 39407 - DNA, 201 bp, Homo sapiens
ttggccaggctggtcttgaactcctggcctcaagtgatccacccaccttggcctcccaaagtgctaggattacagacatgagccaccgcacctggccccarctacaaattctgcttgtgatattagaagggatgagagtccatcgcagttgttgatcgtcttgtgtggtgttctttacaagaaagtgcacttttccaagaa

SEQ ID NO: 39408 - DNA, 201 bp, Homo sapiens
gcttgtgatattagaagggatgagagtccatcgcagttgttgatcgtcttgtgtggtgttctttacaagaaagtgcacttttccaagaaaccatgtacagrgggctcctgtcattgggtaaattgggtgaaacagggtgctatagcaatttcctggtcttgtgcaatatcctattcatagaaagtgaaggcacttattaat

SEQ ID NO: 39409 - DNA, 201 bp, Homo sapiens
cttgtgatattagaagggatgagagtccatcgcagttgttgatcgtcttgtgtggtgttctttacaagaaagtgcacttttccaagaaaccatgtacaggsggctcctgtcattgggtaaattgggtgaaacagggtgctatagcaatttcctggtcttgtgcaatatcctattcatagaaagtgaaggcacttattaata

SEQ ID NO: 39410 - DNA, 201 bp, Homo sapiens
ccagcgttaaaatctagtcctatttctgaagactgaagaggattggggagaataatacagttgctgctaacatctatcacttccaaaagatgtgcctatgytgccatgtggcgtacccggagcacctctgagaaacaacttttactttctaatttttaaatatactgtattatattttaaaataaaatgcatttccacaag

SEQ ID NO: 39411 - DNA, 201 bp, Homo sapiens
tcatactccctaagacttagaatgcaaagataggaaaagactgtggagatcatctcactgggggatggccaatggccaatggccatttcccccaacttctrtgcttatggtagacatcaataatcaatgctggctctctttcctaataagcccctgggctgccttggaattcttttcaacatcatattccaggaatttacc

SEQ ID NO: 39412 - DNA, 201 bp, Homo sapiens
tagagacgaagtctcactatgttgcccaggctggtcttgaactcctggactcaagcgatcctctggccttggccttccaaaatgttgggattacaggtatragcaccgcactgggccaggccttttcaataaggttctgacacactggctggtaggtgaacagcaaaggaaatggttccgcgcaagagggcgggtggtttg

SEQ ID NO: 39413 - DNA, 201 bp, Homo sapiens
tggtttggctaagagagctgttcagttctcccggaaaccttgtttggaggctggcattggggttaattactgcagtggtgacctccgcagaactgagtgasaggcaggcgtagctaatcggaaaacaggaaatgtcctgaagaacgacttgagcccttgagcacactcagagtgtgctctgcatttgagtcagttgttatg

SEQ ID NO: 39414 - DNA, 201 bp, Homo sapiens
gtgagccaggactcccccccgccccctgccaccacccctgcacccacacaactggctgcatgccacccaaaggagagcattgctcccttgtcttaggcacrgggtgccatggcggccaccttgtcatcagctgggagtgggtgtggaggcgagctgagtctgtccctgaacttgacttcaccttgcgccctacaatgatgt

SEQ ID NO: 39415 - DNA, 201 bp, Homo sapiens
ccaggagccctctacctgggccacccagggccctgtgagtccttctgtctctctcttttagggctcctttcggatctaccctctgccggatgaccccagcrtgccagcccctcccagacagtttcgggaattacctgacagcgtcccacaggaatgcacggttaggatttacattgttcgaggcttagagctccagcccca

SEQ ID NO: 39416 - DNA, 201 bp, Homo sapiens
tcctgcatcgattggaaatccaggacatcactaaagatttttccattttggcatgtctttaggaggaagaaatcgtggactggtggagtaaattttatgcytcctcaggggaacatgaaaaatgcggacagtatattcagaaaggctattccaagctcaaggtacctggatctatgctgctatgggtggagaatcgacatc

SEQ ID NO: 39417 - DNA, 201 bp, Homo sapiens
tgagatttttctggtgatctttctcaagtgtgtgtgctttaaataaaaaactgggcccgtttgcaaacgacatggaccttattttatactttcaatcacaraactagcaaatttgatagatttgattttctatgagataattctatagagtgagggtgaccccctctaggtgtagctctgtgcttagccatgtgggtgtta

SEQ ID NO: 39418 - DNA, 201 bp, Homo sapiens
gaaggctggtccgaaaacgcaagaaagatttaacacagactgcttcaagcaccgcaagggtaagagaagcaagggaagggagctggactggggagctctgycctcctgactacaaagtcccagctaactagccatttctgcagaaattatttgcaaatccagagcctaacactccactcaagggttctcaaagtgagccca

SEQ ID NO: 39419 - DNA, 201 bp, Homo sapiens
cacagcatgaaaaccacagatcaagggggtggttgtctgtgtgttcttctaggtttgaaaagtttgattcttagattcagtttagcaactaagcccttcastgctccctgcgttcagccatgagatgctgctcttatgattctttgtgtgctgtgaaactgtggctagggtcatattccttatcctgttcagtcccttcca

SEQ ID NO: 39420 - DNA, 201 bp, Homo sapiens
aaccacagatcaagggggtggttgtctgtgtgttcttctaggtttgaaaagtttgattcttagattcagtttagcaactaagcccttcagtgctccctgcrttcagccatgagatgctgctcttatgattctttgtgtgctgtgaaactgtggctagggtcatattccttatcctgttcagtcccttccagagcagtagtt

SEQ ID NO: 39421 - DNA, 201 bp, Homo sapiens
gatggccccagcacatcagcagcatgctctgcccatcgccctcttcctagcggcaccctgagcattctacttggctttggacactcagccctgcgggagcrctgcagtggctcaagaacatccatggctccctttgcttccacagcagtgatgacaaaaaaaaacaaacaaaaaaccacgaaacacagaggacacaggcca

SEQ ID NO: 39422 - DNA, 201 bp, Homo sapiens
aatgggtcctcttgtgttaccccttctgccaggcctttaggaaaaaaaaaatactgtggttcattcaagtaaaaagagtaaacttaaagagatcagcgccrcaccatttgttagtatttataaagtaagaacattgcttgctgggtttattttattttatttttttgagatggaatattgctttgtcacccaggccggagt

SEQ ID NO: 39423 - DNA, 201 bp, Homo sapiens
tttgttatctagactggctcacagcctgattcctcaattgccccgcaggactgcatttgcatccctgcttcttaggttcctccatggtacctttgctctgrtctacatattggaacatgctagaaaattcttagggcacatttattgttatttacccaggaattggggtggggtaatgaattgcttacagtaggacacaaa

SEQ ID NO: 39424 - DNA, 201 bp, Homo sapiens
atttatttataaaacttttaacattttagaaattcagaaaaaaattattctacattccagctaagaaaatgtgttatctccaaaatattacatgttttccygcttcaaaacttaccctttcctgttctgcattgtccttttagcttacactgaagataatatgatatcagccctttgttgtgcttgggcaatgacctttgg

SEQ ID NO: 39425 - DNA, 201 bp, Homo sapiens
ctggtaacttcgccaggccccctctgtccccgggaagctagctcttctgcttcctggctgccttggtgctgggtgagattgagttattcatgtgtggtggytctgcccgggtcattttgcatttaaccgatgagaattgtatacattacaaaagggtcatatgtgacttgggtctgaatttgggatttttctggtgttgct

SEQ ID NO: 39426 - DNA, 201 bp, Homo sapiens
  misc_feature (1)...(201): n = A,T,C or G, or insertion/deletion polymorphism (see Tables 1-2)
cagtagttttcagatgttggactttgctggcacagaacagtgatctctaagagatgggagataaatgaggtgagccctgagagttcccagcttaatgcctngagagactcatttccatgctgcaatgcaagaaaagggatccttgttgtctcccagagttggagaggtgcaggtgggagtctagagatgccaaggttagtc

SEQ ID NO: 39427 - DNA, 201 bp, Homo sapiens
aactgagtgaggaaactgcttgaggcaggactagaaagagtttatgttcccgccaaccgggggaaacaccttgtaattcatagggaaggattttgcctccmtaatgtaggtagaaaacaatcaatagaaactgacccagaaatggcacacaatcagtagacatggacagtaaaacaagtattataattctttaaaaaaaat

SEQ ID NO: 39428 - DNA, 201 bp, Homo sapiens
ctgtatgataacattgcagtcaaacatatcttgtgacaggacagttttttgtggggaggagaattagaccaagttcggagatatatttaaggaactaaaasgaacgtaagatctggggtagggggatgagcagctccacaccctgctcctgtgtgagctgtgtgctcccgactgggaaatgtctaactccatcgaaaacat

SEQ ID NO: 39429 - DNA, 201 bp, Homo sapiens
gctggggggtacctgtatgataacattgcagtcaaacatatcttgtgacaggacagttttttgtggggaggagaattagaccaagttcggagatatatttwaggaactaaaacgaacgtaagatctggggtagggggatgagcagctccacaccctgctcctgtgtgagctgtgtgctcccgactgggaaatgtctaactc

SEQ ID NO: 39430 - DNA, 201 bp, Homo sapiens
aaaaaaaatcacatgaaaggatttggccaatggaaacttgacatcctcataataaagcagttttgatggatgagtatttatttggtgctgtaacataggcrtggctggggggtacctgtatgataacattgcagtcaaacatatcttgtgacaggacagttttttgtggggaggagaattagaccaagttcggagatatat

SEQ ID NO: 39431 - DNA, 201 bp, Homo sapiens
gtcctgtctgtttttttcttttctgtattcctgactctagctcagtacttggcacagagtagattttgaatactgtgtatctgttgattgatcatataacstgttttatcaaaataaggaatatcatcatcatcatcgtcatcattaacatgtttacttctgttttaggccatggaggaattgcaagaccaagagggctgg

SEQ ID NO: 39432 - DNA, 201 bp, Homo sapiens
gagaaaatgtaccacactcatagacggcgaaggctggtccgaaaacgcaagaaagatttaacacagactgcttcaagcaccgcaagggtaagagaagcaakggaagggagctggactggggagctctgccctcctgactacaaagtcccagctaactagccatttctgcagaaattatttgcaaatccagagcctaacact

SEQ ID NO: 39433 - DNA, 201 bp, Homo sapiens
taccccgggggcgactggaagccggccgaggacacctacacggatgcggtgagtggcctgctccggagagaaactctcacctgtcacctctgatcgtgatstgcggggaacccagcagccacctggcttgggctttaacctctcctccgctccatcttatgttctgaagagtcttccacttatagcttaagccacacaagt

SEQ ID NO: 39434 - DNA, 201 bp, Homo sapiens
atgtttggggaaacgtgatggattgttggtttattttctacattcaggagttgtcctctctattctgtaagtcccatccaagaataaactctaccatccaycctatggctgttaaacttgaacttggagtagaatgttcaccactgtatttctctaagtatcttagattaagaaagtatttgtcttgcagcctcccttctg

SEQ ID NO: 39435 - DNA, 201 bp, Homo sapiens
aggatcacttgagcctgggatcacttgagactagcctgggcaacataatgagactccatctctccaaaaaaataaaaatagttagctgggtgtgatgatgyacgtctgtaatttcagccactctaggggctgaggtgggaggattgtttgagcctgggaggagatgagaggagaggcagaatgtttggataaagggggctg

SEQ ID NO: 39436 - DNA, 201 bp, Homo sapiens
cccctagaaaatgtctaaaaccatattatgtttggggaaacgtgatggattgttggtttattttctacattcaggagttgtcctctctattctgtaagtcycatccaagaataaactctaccatccaccctatggctgttaaacttgaacttggagtagaatgttcaccactgtatttctctaagtatcttagattaagaa

SEQ ID NO: 39437 - DNA, 201 bp, Homo sapiens
caaaagctcttactccaaaaacacattaataataatatcagctgggcgaggtggctcatgcctgtaatcctggcactttgggaggccgaggcgggtgaatyacttgaggtcaggagttcaagactagcctggccaacatagcgaaaccccgtctctactaaaaatacaaaaattagttgggtgtggtggcacatgcctgta

SEQ ID NO: 39438 - DNA, 201 bp, Homo sapiens
atccaagaataaactctaccatccaccctatggctgttaaacttgaacttggagtagaatgttcaccactgtatttctctaagtatcttagattaagaaartatttgtcttgcagcctcccttctgtctgccccaccatgccgggacatcgttatcgaaatggaagacaccaaaccattactggcttctaaggtaggcttc

SEQ ID NO: 39439 - DNA, 201 bp, Homo sapiens
ctttggcctcactgttctcatttgcacatgaggacaataatagtacctttgtagggttgccatgagcattacatgagataacccatgtagaacatttaaayggtgctgggaacatcactcaggaacccgtgagcagggagaaaacattcattcactcactcattcattcatttattgagctagtgtacatggagtacctac

SEQ ID NO: 39440 - DNA, 201 bp, Homo sapiens
ttgaagctcatttggacttactgttgtttccttggctaggtttcctagaacttgacttgcgtcacacgatcattcctgcaaaatcaccagagaaatgcagrttggacatgattccggacctcaaagccatgaacccccttaaagccaagacagcctccctctttgagcagaagtccatgaaaggatggtggccatgctacg

SEQ ID NO: 39441 - DNA, 201 bp, Homo sapiens
cattttccttcctaactggaaagactttaaatgtccaccaggctccctttctctaactcaccatttacctgttcaaaatcactgtgtgcctctctcctgayaagaacgttctgttcacttgtgaacaacagctgatccacttgaagctcatttggacttactgttgtttccttggctaggtttcctagaacttgacttgcg

SEQ ID NO: 39442 - DNA, 201 bp, Homo sapiens
agcacctattgtctttacccaaagccaaatgacctctctgctcagggcagctcagaactaaaaggaaaacatttcacatccaagggccttgagttgagtgraaattgtgtctgtagatatttcattactttgagtttaaagaactctgtttatgctcatatctttgagaaagaaaacaggagatgctgtgcagtggacggc

SEQ ID NO: 39443 - DNA, 201 bp, Homo sapiens
cctgagctcaagtaatctgcccacctcggcctcccaatattgctgggattacaggcatgagccaccatgcctggccttcccttggaatttaaacaaaactrtcagacaacaaataaagagaatgactgtgtctcaaaatgccaagtgagcacataaccaaaaggagaggggagacaaaagcagtcataggtcaagaaaggc

SEQ ID NO: 39444 - DNA, 201 bp, Homo sapiens
atggatagtaaattctaggataataaagggtttgcccttggctttgtttgttgagacagagtctcactctctcacccaggctggagtgcagtggcatgatmtaggatcactgcaacctccacctcctgggctcaggcgatcctcccaacctcagcctcccaagtagctgggaccacagacacgtgccaccaagcctggata

SEQ ID NO: 39445 - DNA, 201 bp, Homo sapiens
gaggtcagcaaataaatgagtatgcaagtaggcttacataaagtatatggatagtaaattctaggataataaagggtttgcccttggctttgtttgttgasacagagtctcactctctcacccaggctggagtgcagtggcatgatctaggatcactgcaacctccacctcctgggctcaggcgatcctcccaacctcagc

SEQ ID NO: 39446 - DNA, 201 bp, Homo sapiens
attaggcattgctacctaaatagttagtgattattctaggaaactgggtggcaaactgcagaatataagtggccagagagaagttgaagggacatcaggawcacacacacacacacacacacacacacacgcacaggctcttactatttggtgctcataaaatgacagaatgatacaaaaacatgagcattgattttgtgg

SEQ ID NO: 39447 - DNA, 201 bp, Homo sapiens
agatgttggtgaggccattcagtttgaagtcagcattgggaactatggcaacaagtttgacaccacctgtaagcctttggcatcaacaactcagtacagcygtgctgtatttgatggtaagattggcactaacagttctctccacacgtttacaatgggtgcaccacgggaccggaagcaagcactgtgtcttccctctgg

SEQ ID NO: 39448 - DNA, 201 bp, Homo sapiens
tgaatttctggaattgcttttcaggtccaaacgttatcttaaccttaggcaagctctctggccagccacacccatccctggtaaatgttgtaggacagagyccccccccagtgccctgttgccccttcctgtcatgtttctcaccttccatgccccagtaaactgttgaaaccagagaatgggtcagggaagccccatccc

SEQ ID NO: 39449 - DNA, 201 bp, Homo sapiens
ctatcacaaggacagaaaaccaaacaccgcatgttctcactcataggtgggaactgaacaatgagaacatttggacacagggtggggaacatcacacaccrgggcctgtcagcgggatagggggctgggggagggatagcattaagagaaatacctaacgtaaatgatgagttgatgggtgcagcaaaccaacatggcaca

SEQ ID NO: 39450 - DNA, 201 bp, Homo sapiens
ggaggaattgtacatgcccccactggtgatcaaggtcatcgaccacaggcagtttgggcggaagcctgtcgtcggccagtgcaccatcgagcgcctggacygctttcgctgtgacccttatgcagggaaagaggacatcgtcccacagctcaaaggtaacatgcaaggctgtgcataagtctgggggcttttctttttttt

SEQ ID NO: 39451 - DNA, 201 bp, Homo sapiens
agttaggtccataccttctgagcataaagcttttttctgctttctgtagttgtctagcctaagtcctcgatgaacttgaaaatgtatgtgctagctttatyttttgctctctgatggtgtttctccaattttatctcttttttaatagtatgaaaatcaagctctcatgtttggaaaatggggtacttctggattagtagg

SEQ ID NO: 39452 - DNA, 201 bp, Homo sapiens
atagtggtgggtgggggtggagaggttggtgatctggcttcattttaagaattctcctttccaggaaaccaaagttcagcatcttaggaagctgtcgtagsttaaagagcctttctcagtcaacgaaggggaacagtatcttttcttgaccttattaatgtgattctttattcctgaaactgtgttatgctctggaataaa

SEQ ID NO: 39453 - DNA, 201 bp, Homo sapiens
aaaggtctcagggacaggcaggaatctatggatcacactgtgagatctgctgctttaattgtgattttaatctttgctgtagggtcatctggaaatgtttkaactgaagcaaacataaaattagactggtgaaagcaatgattagatgttccctctgtttttggctttaacttaatgtcacagtctttgctgtgcctaatg

SEQ ID NO: 39454 - DNA, 201 bp, Homo sapiens
gccttggtgctgggtgagattgagttattcatgtgtggtggttctgcccgggtcattttgcatttaaccgatgagaattgtatacattacaaaagggtcayatgtgacttgggtctgaatttgggatttttctggtgttgctaaatcacatacctggcactggatttgattaacgttttcaatgtctgttttataatgccc

SEQ ID NO: 39455 - DNA, 201 bp, Homo sapiens
cccgccttgccctcccaaagtgttgggattataggcgcgagccactgcacccggcctaattaatactattattaatacaaaacatgattctagaaaaaaawttttaccttttgtttgacaatttaatgtcttctaggtgtcatttaaatagcctagttgttttgtgtttgtctttttggtaaaaatcactgggctattcat

SEQ ID NO: 39456 - DNA, 201 bp, Homo sapiens
acatcagtggatgaaatcacaagtgggaaaggaaagctgactgataaagagagacacagacttttggaggtaaatggtcttctgatcctttaaattgtaarctctccaagaaagcgatgcatgaagatttcctgatgctaccttcttactcttgccgtgttccctgtcttgtccagttgattagttttggaaagctgacat

SEQ ID NO: 39457 - DNA, 201 bp, Homo sapiens
ccataccctgctggtttggatatatcatttctatttagagcagataggttattagacctgtttcaaacttgagatttaaatttttaaactcagaattatayagttgatttttatttttacagaccatttcagagatgtcttccagaagtaccaaagatttaattaaaagtaagtggggatcgaagcctagtaactccaaat

SEQ ID NO: 39458 - DNA, 201 bp, Homo sapiens
gctggaatgattcacccctgactagcaggtgttgtcctggttagagatgtgagacttgtgatgtgagctttccgtgcatcccaggtcaagccggaaaaggytggatgtgacagcattggttctctttatgtcctacaggtccagtttctttacacatctctgctaaagcagcaagaagaacaaacaagggtagctctgttg

SEQ ID NO: 39459 - DNA, 201 bp, Homo sapiens; identical to SEQ ID NO: 6055

SEQ ID NO: 39460 - DNA, 201 bp, Homo sapiens
ccttacatagatcttagtggagttttagagcaaccctaagaggcggggcaggaaaggtcagtattctcattttacagatgaagaaataggtttagcaattstagatgacaagctaagaaaagaaaaatgagaaactccatgcaatgctctccttaaaagactgacagtttggaggggaccaaagccttgaattttatagag

SEQ ID NO: 39461 - DNA, 201 bp, Homo sapiens
agcaggttaatgaatgcatccctctcctgctgaaatattctgtaacttttaagttccactgattcaaattcattaaggagcatgtatatcttgtgtgaccsacttttagctcttagtttttacaagatccagtgttatggaagaatgattaccaaatactcatgggaaagctagcccttctttagctttttctcaccaccc

SEQ ID NO: 39462 - DNA, 201 bp, Homo sapiens
aacctcccagagtgctgggattataggcgtgagccaccgtgcccagcctagatctggatttcgggatgcccccgtgagttatactgtattattatggtgartgtaatgaggcaacttctattgtggaatgtctgatgttaactaatgttggattatttacagactgtggctccaaactgcttcaactcatcaataaataat

SEQ ID NO: 39463 - DNA, 201 bp, Homo sapiens
attcaattctgcctgttagaaaatgcagtttttcctcatgtttatgctgttctatggagaactgtttgaaagttgtgaaaagtgtctttaaaagacttcartaaaagtcttttttcttcaataaaaaagatatttcaagagactctgctagccacttattcctgttgctgaccttaggctaaacagattcttgaggtgtga

SEQ ID NO: 39464 - DNA, 201 bp, Homo sapiens
ctgttagaaaatgcagtttttcctcatgtttatgctgttctatggagaactgtttgaaagttgtgaaaagtgtctttaaaagacttcagtaaaagtctttyttcttcaataaaaaagatatttcaagagactctgctagccacttattcctgttgctgaccttaggctaaacagattcttgaggtgtgatggcagttttct

SEQ ID NO: 39465 - DNA, 201 bp, Homo sapiens
tgctcttccccagtggctgtagctcctagcctaacaatgtctcctaagtagggctaccttataacttcaagcagaacttggagagacaccatttagtctcagaatgtattataaatggtgtaaagcagagatttttagtatattccaaaccagggaatagctatctctttcccttctccttcttcccccttaaaaaaggtg

SEQ ID NO: 39466 - DNA, 201 bp, Homo sapiens
aagtcccccaactttattcttcaagaatgtcttgactaatataggacatttccattttcatatacattttaaaatcagcttgtcaatttttacaaaagttycctggaatttccattgggatagtatatatctatagattaatttctcaaaaattgacatctgcacaatccagaaacatttcttcatttagttcttttttag

SEQ ID NO: 39467 - DNA, 201 bp, Homo sapiens
taaggaaatagtgtgattcatttagatgtttgatgtttctcttttcaggaatattatttattttataaagtgagttgtgccataatgttgtttgtcatagrttatcttcaagaagagaagcagaaatgttacaacgatctcttggcaagtgcaaaaaaagatcttgaggttgaacgacaaaccataactcagctgagtttt

SEQ ID NO: 39468 - DNA, 201 bp, Homo sapiens
tgtttgatgtttctcttttcaggaatattatttattttataaagtgagttgtgccataatgttgtttgtcataggttatcttcaagaagagaagcagaaaygttacaacgatctcttggcaagtgcaaaaaaagatcttgaggttgaacgacaaaccataactcagctgagttttgaactgagtgaatttcgaagaaaata

SEQ ID NO: 39469 - DNA, 201 bp, Homo sapiens
ctataaagacacatgcacacgtatgtttattgtggcactattcacaatagcaaagacttggaaccaacccaaatgtccaacaacgatagactggattaagraaatgtggcacatatacaccatggaatactatgcagccataaaaatgatgagttcatgtcctttgtagggacacggatgaagctggaaaccatcattctc

SEQ ID NO: 39470 - DNA, 201 bp, Homo sapiens
tacccaaaggagtataaatcatgctgctataaagacacatgcacacgtatgtttattgtggcactattcacaatagcaaagacttggaaccaacccaaatrtccaacaacgatagactggattaaggaaatgtggcacatatacaccatggaatactatgcagccataaaaatgatgagttcatgtcctttgtagggacac

SEQ ID NO: 39471 - DNA, 201 bp, Homo sapiens
tcagaatgtattataaatggtgtaaagcagagatttttagtatattccaaaccagggaatagctatctctttcccttctccttcttcccccttaaaaaaggtggatagggaggagtaattctaatcaacaacttcttaagctgctcttcattcacctatacctcagcgttggctttgctccttggataaaccaaatcctca

SEQ ID NO: 39472 - DNA, 201 bp, Homo sapiens
tttaataataatttttaacagtcctacaaaagttgagggtgctggtgatgggacagtaacaagtccatctataacatttgccatcttagtcttttttttcytttttttttctgagacagggtcttgctctgtcgcccaggctggaatgcaatggcgtaatctcagctcactgtaacctccacctcctgtcttcaagtgatt

SEQ ID NO: 39473 - DNA, 201 bp, Homo sapiens
gctcctttttataaggatactagtcattggatttagggctcaccctactccagtatggcctcattttaactaattgcatctgcaaagcccccccctccccytttttttttttgagacggggtctcactctattgtctaggttggagtgcagtggcgcaatcttggctcactgcaacctccgcctcccgcattcaagtgatc

SEQ ID NO: 39474 - DNA, 201 bp, Homo sapiens
tcccaagtacctgggattacaggcacccaccaccacgcccggctaatttttatttttagtagagatggggtttcaccatgttggccaggctggtcttgaaytcccgacctcaggtgatctgcctgcctcggcctcccagagtgctgggattacgggcgtgtgccactgtgcctggcctccattttattattataatgtaat

SEQ ID NO: 39475 - DNA, 201 bp, Homo sapiens
atcagaaccgaaaactatgtgaaggagttagaaggagtagatgctttcacgcatctttcttaaataaataactctttatcaataaatatgaatttgagttrtttgttacagaggcaaaacaataagcatgccaaattatatagggtttttttttctaaccatagaaattatacagatctgtttatggaaataaaattttgc

SEQ ID NO: 39476 - DNA, 201 bp, Homo sapiens
ctccgtctcaaaaaaaaaaaaaaaaaaaaatttcatgaccatttaattttgacttaaattatttgtattaaaatactacttaaatgtggacaaatgtaaamtttagtataaaattaggtatctttagtatctaacacactataatttataggtatttggatatacatgtgcattgtgagtcatacagtgcttcctctctta

SEQ ID NO: 39477 - DNA, 201 bp, Homo sapiens
ccgcccctaacgccccgcccccgccaaaaaaaaaaagaaagaaacagaaacagaaaaaagaaaatacagggaaaggaggttggtgggactaggtggtgggrgagatccaaaccgtctgggccagaggctagaaactagtagtcattcattcactgccagagtttctgtgcaaaggttaggaagcagatgtttgggggttct

SEQ ID NO: 39478 - DNA, 201 bp, Homo sapiens
aacccgggaggcagagtttccagtgagctgaaatcatgccactgtattccagccggggccacagagcgagactccgtttcaaaaaaaaaaaaaaaaaaaaattggccgggctcagtggctcatgcctgcaatcccagcactttgggaggccaaggcgggcagatcacctgaggtcaggagttgagaccaacatggtgaaac

SEQ ID NO: 39479 - DNA, 201 bp, Homo sapiens
taaaaaatagagacagggttttgccatgttggccaggctggtcttgaactcctggcctcaagtaatccgctcgcctcggcctcccaaagtgctgggattayaggtgtgagccactgcccagcccacagaccccatttctgaataaggtcatattctgaggtttcaagtggacatgaattttgggggacattattcaactca

SEQ ID NO: 39480 - DNA, 201 bp, Homo sapiens
gctggtcttgaactcccgacctcaggtgatctgcctgcctcggcctcccagagtgctgggattacgggcgtgtgccactgtgcctggcctccattttattmttataatgtaatttaatttgtagtatcttctcttttggtttatccatgcaagatgctctctttggtttgaatacttctcttgaaactaaggtttgctttc

SEQ ID NO: 39481 - DNA, 201 bp, Homo sapiens
ggactgcaggtacgtgccaccatgcccggctaaaaaatagagacagggttttgccatgttggccaggctggtcttgaactcctggcctcaagtaatccgcycgcctcggcctcccaaagtgctgggattacaggtgtgagccactgcccagcccacagaccccatttctgaataaggtcatattctgaggtttcaagtgga

SEQ ID NO: 39482 - DNA, 201 bp, Homo sapiens
tcttctaagcatagtcccttttttttttttttttcctgaggcaaagtctcggtctgttgcccaggctggagtgcagtggcatcttggttcactgcaacctstgtctcctgggttcaagcagttctacctcagcctcctgagtagctgggattacaggcacgagccaccacactccgctaagtttttgtatttttagtagag

SEQ ID NO: 39483 - DNA, 201 bp, Homo sapiens
gaggaagtgttcccgccctctgtcccgccccgcggccccagccacttctcggcccgccctcaggtttactctccgcccttcaaaggcggcagccaatcggrgagccgcgtccccgccgcgcgcgcgctgctcctccttcttgcgggccgcgccctgccggcagtgacgtgccccgccctgcagccgcgggattcaaactcc

SEQ ID NO: 39484 - DNA, 201 bp, Homo sapiens
cccgccaaaaaaaaaaagaaagaaacagaaacagaaaaaagaaaatacagggaaaggaggttggtgggactaggtggtgggggagatccaaaccgtctggsccagaggctagaaactagtagtcattcattcactgccagagtttctgtgcaaaggttaggaagcagatgtttgggggttctttcacgttctgcagatcta

SEQ ID NO: 39485 - DNA, 201 bp, Homo sapiens
aaactacattagaaaaattaaagggagaaattgcacacttaaagacatcagtggatgaaatcacaagtgggaaaggaaagctgactgataaagagagacasagacttttggaggtaaatggtcttctgatcctttaaattgtaagctctccaagaaagcgatgcatgaagatttcctgatgctaccttcttactcttgccg

SEQ ID NO: 39486 - DNA, 201 bp, Homo sapiens
tacattagaaaaattaaagggagaaattgcacacttaaagacatcagtggatgaaatcacaagtgggaaaggaaagctgactgataaagagagacacagayttttggaggtaaatggtcttctgatcctttaaattgtaagctctccaagaaagcgatgcatgaagatttcctgatgctaccttcttactcttgccgtgtt

SEQ ID NO: 39487 - DNA, 201 bp, Homo sapiens
ccgccaaaaaaaaaaagaaagaaacagaaacagaaaaaagaaaatacagggaaaggaggttggtgggactaggtggtgggggagatccaaaccgtctgggscagaggctagaaactagtagtcattcattcactgccagagtttctgtgcaaaggttaggaagcagatgtttgggggttctttcacgttctgcagatctat

SEQ ID NO: 39488 - DNA, 201 bp, Homo sapiens
tattaggatacctggtaaatagtaggctttatagtaatttttgaatgcactaatgggctcatactcctttatatcctttaatcacactgccattattttaycttgggatacatgaagtagaaaaatgttttttaacctccttaattagagttacttttatatactatttatatgcatcgtatgcttcactagatttttgcc

SEQ ID NO: 39489 - DNA, 201 bp, Homo sapiens
agctgtaatggtcttgttctgggccttttccagatgcaggcatgtactttagactttgaaaatgaaaaactcgaccgtcaacatgtgcagcatcaattgcwtgtaattcttaaggagctccgaaaagcaagaaatcaaataacacagttggaatccttggtgagtctggaatgattaaactaaaatttgtcttcgtcttcc

SEQ ID NO: 39490 - DNA, 201 bp, Homo sapiens
taattgagtatgtgttttgaggttaccaggtactaagtttgttctggaaataaagacattgcgattaatagttttgcacctttaacatggtctgtttcacstttagtatgctctgtttctcagttatttaaaacaaagtaataacctaattcatcattcttcctatagcttcttggtaatttagcttaactacatgaatat

SEQ ID NO: 39491 - DNA, 201 bp, Homo sapiens
agtatgtgttttgaggttaccaggtactaagtttgttctggaaataaagacattgcgattaatagttttgcacctttaacatggtctgtttcacctttagyatgctctgtttctcagttatttaaaacaaagtaataacctaattcatcattcttcctatagcttcttggtaatttagcttaactacatgaatattcttga

SEQ ID NO: 39492 - DNA, 201 bp, Homo sapiens
caaatcagtaggtagagcctctgcctcatttgaagcaactgccctttgagcatcaattcagaggacatgaaagagggacatgatcacatctggaaacattyccccaactaccccagctgctgtgatgctggaggcactaaatagtgcctgagctggggtcaaaagggtagaatagagggtagtcacagaatcctgaactga

SEQ ID NO: 39493 - DNA, 201 bp, Homo sapiens
atattcttgataacttttgttatgctgtatttaagattgtgaaacattctggctaactattttcgctatttttaaattgatagcataacttagaagcattygattttccatactttttttttttttttgagactgggtctcaactctgttgcccaggctggagtacagtggcttgatcataactcactgcagcctcaaact

SEQ ID NO: 39494 - DNA, 201 bp, Homo sapiens
tgggggaggacagaatgggggctgcctgaccactttgtctaaaattatagctcccagacaattcctattcttttctcctgcttttccctcctcatcacatwctacagctaaatttacaatctatttaacttctcttgtttaatgttcaacctttccatcagaatagaagtcatatgaaggaaggatttttgcatgttttgt

SEQ ID NO: 39495 - DNA, 201 bp, Homo sapiens
cagagagccaaatcatgagtgaactctcattcacaattgcttcaaagagaataaaatacctagaaatccaacttacaagggatgtgaaggacctcttcaakgacaactacaaaccactgctcaacaaaataaaagaggatacaaacaaatggaagaacattccatgctcatggataggaagaatcactattgtgaaaatgg

SEQ ID NO: 39496 - DNA, 201 bp, Homo sapiens
gaggctgtagtgcagtggcacggtctcagctcactgcaacctctgcctccctggttcaagcgattcttctgcctcagcctccagagtagctgggattacasgcacctgccattgcgcctggctaatttttttttatttttagtagagacggggtttcaccatgttggccaggctggtcttgaactcctgacctcgtgatct

SEQ ID NO: 39497 - DNA, 201 bp, Homo sapiens
aggagaatgcaaccaaattggaaaacactctgcaggatattatccaggagaacttccccagtctagcaaggcaggccaacattcaaattcaggaaatacasagaatgccacaaagatactcctcgagaagagcaactccaagacacataattgtcagattcaccaaagttgaaatgaaggaaaaaatgttaagggcagcca

SEQ ID NO: 39498 - DNA, 201 bp, Homo sapiens
tactagatctggattttttgttttctttttttgagacagagtctcactctattgctcaggctggagtgcagtggcgcaatctcggctcactgcagcctccrcctcccgggttcaagtgattctcctgcctcagcctcccgtgtagctgggattataggcaccggccaccaggctcagctaatttttctttttgtattttta

SEQ ID NO: 39499 - DNA, 201 bp, Homo sapiens
acagggaaaggaggttggtgggactaggtggtgggggagatccaaaccgtctgggccagaggctagaaactagtagtcattcattcactgccagagtttcygtgcaaaggttaggaagcagatgtttgggggttctttcacgttctgcagatctatatttccatcattttgtgtctcaatgacttggtagtagttttctgt

SEQ ID NO: 39500 - DNA, 201 bp, Homo sapiens
gacttttcatgttgtaaactaaggaaatagtgtgattcatttagatgtttgatgtttctcttttcaggaatattatttattttataaagtgagttgtgccrtaatgttgtttgtcataggttatcttcaagaagagaagcagaaatgttacaacgatctcttggcaagtgcaaaaaaagatcttgaggttgaacgacaaac

SEQ ID NO: 39501 - DNA, 201 bp, Homo sapiens
gtttgaggattcatgaacccttgtttgtttccttgttattgcctgcctttactacactgaaagccccataacattagggaacatgtcttttttttttttttaaaccagtttacacccagcatgtattaggatacctggtaaatagtaggctttatagtaatttttgaatgcactaatgggctcatactcctttatatcctt

SEQ ID NO: 39502 - DNA, 201 bp, Homo sapiens
tctattgtggaatgtctgatgttaactaatgttggattatttacagactgtggctccaaactgcttcaactcatcaataaataatattcatgaaatggaartacagctgaaagatgtaagttcatttccttttaagttatgggtaaagagggctaattcatttattcttaagttttacagaaattggcaacattagtgctg

SEQ ID NO: 39503 - DNA, 201 bp, Homo sapiens
gtaatcccagcactttaggaggccgaggtggaaggatcacttgaaggcaggagttcgtgatcagagtgggaaacaaagtgagaccacccccccccccccccactccgctgtctgtataaaattttttaataaaaaattagccgggcgtggtggcgtgcgcctgtagtctcagctactcggcaggctgaggcaagacgatcg

SEQ ID NO: 39504 - DNA, 201 bp, Homo sapiens
atattatttattttataaagtgagttgtgccataatgttgtttgtcataggttatcttcaagaagagaagcagaaatgttacaacgatctcttggcaagtscaaaaaaagatcttgaggttgaacgacaaaccataactcagctgagttttgaactgagtgaatttcgaagaaaatatgaagaaacccaaaaagaagttca

SEQ ID NO: 39505 - DNA, 201 bp, Homo sapiens
tttttagtagagatggggtttcaccatgttggccaggctggtcttgaactcccgacctcaggtgatctgcctgcctcggcctcccagagtgctgggattaygggcgtgtgccactgtgcctggcctccattttattattataatgtaatttaatttgtagtatcttctcttttggtttatccatgcaagatgctctctttg

SEQ ID NO: 39506 - DNA, 201 bp, Homo sapiens
ctcggcctcccagagtgctgggattacgggcgtgtgccactgtgcctggcctccattttattattataatgtaatttaatttgtagtatcttctcttttgrtttatccatgcaagatgctctctttggtttgaatacttctcttgaaactaaggtttgctttcgtaggttgaaaaggaaacgttctttgtacactcagtac

SEQ ID NO: 39507 - DNA, 201 bp, Homo sapiens
tgatgctcaggtgtggccacaggcacacacgggtccatctcccactcaccctggctgggccagcaagtagcagattcttcagtgaaggaagaaaagaaggwtaagacagaaggccagggaggggacctgccactcctccatttgctcacactcctggtcatttacggcagtggtccccaacctttttggcaccagggaccg

SEQ ID NO: 39508 - DNA, 201 bp, Homo sapiens
atgtggaaaggccctgacatgttccttttaggtggctctattgcatttagtgaaattttaaataattcataggagaaaatatttttcttaacaaagttaargatgtccttcagaataaaagcaggagtttttgactccttgatatccattcacttatgtatttatcagatgtcttctctgtataaagcccggtgttaggca

SEQ ID NO: 39509 - DNA, 201 bp, Homo sapiens
ctctgaaatgtgaggccctttgctttctctcatgctccactgcagctactgctctgatgtgctctcatggcctgggcagagaggaggcctggggcctcccyggggccttggggagtccccagtgtgggataaacctccaggccacagggatttcccagttctctgggaaacatcattgtggtgcccatgaaaatgtgcttc

SEQ ID NO: 39510 - DNA, 201 bp, Homo sapiens
gtggttgatgatggaagggagatggatagaaaagcgtgcagattgttgcctccaaaccaatttttctttcactgaagagaattagaatcaccttttatccrtttcagactctcacacaatttcttggatggtctcttttaaatactgacacctacgataagatgaataagctagaaaacagaaaggacattgctcaggaaa

SEQ ID NO: 39511 - DNA, 201 bp, Homo sapiens
aattttatttaaggaattagctaaacaggtgttagaagatagaaaaagtgtaaagggaacagtgaggtaacatagtggtaagaagcacttcccatcactcrggcttgggaaagaaagggaaaaggttagaattgtcagaaaacagacacttggttctagttcactctattggatgtgctagagtacatataatggctgtat

SEQ ID NO: 39512 - DNA, 201 bp, Homo sapiens
gagaaaaacgcttctccctattccttggcccagtcaatgcctctttgccatgttggaaattccagggctggattctattccctcccaagcttccgccttcrcgataacgttgctctttctccctaggttcttgcgtccccctttcctttctgttttcatttccagatgtgcctctgccttcttcctataggccttcaggct

SEQ ID NO: 39513 - DNA, 201 bp, Homo sapiens
tacagatgaagtttcacccgagtacccactgctctcctcctgctgtacaacctgctggttcctaacaggccatgggccagtactggtttatagtccagggrttggggacccctgatctaagggctcaacagttcctgacacagcattcatgctcaataaacgttctctgcatgcatgaatggctggctacctcctacatcc

SEQ ID NO: 39514 - DNA, 201 bp, Homo sapiens
aaaacaaaatttattttagcctgtgcatgtagataaacagccaataatatttctggttttattataagtttgtagtcaggatataagtagtttgataattyatgttataatataatgtggttgggaaataaggttctatttgtaagagttttaaagtacaagttccccaatgaaaaatgatttctttgggaaataacatta

SEQ ID NO: 39515 - DNA, 201 bp, Homo sapiens
gatttggtagccaaagatcccccccaccccaaaagctgtttgggggcaattcaactttttaaaaacaaaatttattttagcctgtgcatgtagataaacarccaataatatttctggttttattataagtttgtagtcaggatataagtagtttgataatttatgttataatataatgtggttgggaaataaggttctatt

SEQ ID NO: 39516 - DNA, 201 bp, Homo sapiens
tggagtgcagtggcatgatcttggctcactgcaacctcagcctcccaggttcaagcgattctcatgcctcagtagctgggattataggcctgtaccaccaygtccactgattttcggtattttagtagagacaggatttcgccacgttggccagactggtctcgaactcctgtcctcaagtgatccgctcgccttggcctc

SEQ ID NO: 39517 - DNA, 201 bp, Homo sapiens
gtccaagttaactatatttgtaagggtctatttctgggttctctattttgtttcattgattcatttgtccattctttcactaataccacactgtcttgatyattgcagcttcatggcaaatcttaagtcaggtagtgtcagctttttgattttgttcttcttgtcagcaagtcttttaacctacctgattcttggcttctt

SEQ ID NO: 39518 - DNA, 201 bp, Homo sapiens
cttcatcacaccagctacatgtacaatattgaatcccgaagaagccaggtaaaaggaaggcagcattagtcattccatgctgacctattctgacaaagccrcccagagacaacaaattcagacccctcctattcctcctgggggtgtaagccacgtggaacagatccccaaacttcagtcccacgtgtcctctcatgatct

SEQ ID NO: 39519 - DNA, 201 bp, Homo sapiens
gtcattcttcttcccttgatcaattttattgaagggatatatgggcctgtggaaagttgtggatgttgtctaattatactttcttaagaacgttccaaacmaaaaatgattaaggtgagtcattagattgaggggagcactgttttgtcgcaggcagtgaacttgttcagaatcacatgcttcattaggatacatgagccc

SEQ ID NO: 39520 - DNA, 201 bp, Homo sapiens
aagtagctgagacaggtgaagagagccatggaaagtcacagaatctctgtgggtctgtagggaaagaagaaaaagcttatggtggatgcaaaagggctccrtgcaccccaagcatatgtaaatgtaaagaggaaaggaggctacatggtcactgatttgcttattcattcatggggcatatgctttagagcatggtctatg

SEQ ID NO: 39521 - DNA, 201 bp, Homo sapiens
cttattctgctttgtggatcaagagggctccactacacaatatttcagaccatttgtctcctcttgccttccagatctgtaacatgatgaatgcccctgcrgatgaatacttcacatttcaggtaactgcactctgggtcagacctcacctcttggggctggggtagaggagtggatgctctcgcctctcctccaccccca

SEQ ID NO: 39522 - DNA, 201 bp, Homo sapiens
tttatctcactgtcttgggggaggagagaaatgttaccttatagtgcttttcatcttggttctatgcagataacctatgggcctccacatgtttgctataygttttataagtcatagtccaccgccataagccccagggaacttaaagaatttagatacaaggagctgaactccttagtttaaacaattaaatcatttatg

SEQ ID NO: 39523 - DNA, 201 bp, Homo sapiens
atgagagtcttcacataatctctagacctttgacatcagcctcttttaccctgaaggcattgaagaaaaacagggtacaaaagactggggcccctacttayataaagctgtgatctaattgttaataaatgggaaggaacagggagatacatttatctcactgtcttgggggaggagagaaatgttaccttatagtgcttt

SEQ ID NO: 39524 - DNA, 201 bp, Homo sapiens
tggtggttatagaaactgggatttactcatttttttaaaaatctctaatgccaacacagagtagttgtttaaatatgtgttaaaattatgatcgattgtartattgatcagatatggcctaattattccccaactaaagtatttgctttccctgacctgccagtaacctggcaatgacctctcccagcctaaagttttgtt

SEQ ID NO: 39525 - DNA, 201 bp, Homo sapiens
taaccatcatcttctaacccaaatctcactttaggaagaagaagaagaagaaaaaaagcaatcctagctctgctgctcatactggctgtagcagagctagratttctcagctttctcctccccttggcctgagcagcctgttgctttgaatttgaaggggattccctggagtctgggggagtgggaaggggcagagacggt

SEQ ID NO: 39526 - DNA, 201 bp, Homo sapiens
tctatgaagcctcatcaaacccaagttcacctagatcttctatgtcatctcctagaatttttatacttttgtgttttacatttaggtgtataatccatttygagttattttttgtgaaaggtacaagttctgtttctagattcactttttttacatgtagatgttcagttgttccaacaaaatttgttgaaaagactatcc

SEQ ID NO: 39527 - DNA, 201 bp, Homo sapiens
tttcattctcttaacagtgtctgctgcagagcagaaggttttaattttaatgaagtccaatttttctatattttttctttcatggattgtgcttttggtgytgtatctatgaagcctcatcaaacccaagttcacctagatcttctatgtcatctcctagaatttttatacttttgtgttttacatttaggtgtataatcc

SEQ ID NO: 39528 - DNA, 201 bp, Homo sapiens; identical to SEQ ID NO: 6061

SEQ ID NO: 39529 - DNA, 201 bp, Homo sapiens
ccccagcacccattctggagctcacagttctagttccatcccatagatttaaacaaatcacttaacctctttaggcttccatttgttcatttttttttttwaagtatgaacttaattgctaagatcccttctggctttaaaatgctatgatagctgggtgtggtggctcacgcctgtaatcgtagcactttgggaggccaa

SEQ ID NO: 39530 - DNA, 201 bp, Homo sapiens
gcactttgggagagtgaggcgggcggatcaagtgaggtcagttcaagaccaacctggccaacatggtgaaaccctgtctctactaaaagtacaaaaattastcggatgtggcacacctgggattataggcacatgtctataggaggtagacgtgtgcctctgaggtaggagaaacacttgaacccaggaggcagaggttgt

SEQ ID NO: 39531 - DNA, 201 bp, Homo sapiens; identical to SEQ ID NO: 6062

SEQ ID NO: 39532 - DNA, 201 bp, Homo sapiens
tgttagattgttagttttttaggacttttgtgagcaagttgttaaactgttggcagcttgaaatctcccatggcaagagaattgggaccatggaaattggyaactgatacaagccaaggatttccccaattcccagccaggagagctgatttccccagcacccattctggagctcacagttctagttccatcccatagatt

SEQ ID NO: 39533 - DNA, 201 bp, Homo sapiens
attcaagttagatcatgaaattaatgcatggcatgaaagattccttaaattcttaggctatatatgcttataaaaactttgaaagattctcgcattttctrtgtaagagtactacaaaaatagtagacatggttcattcaattattctcagaaagcacttaccttggggccgagaggcaggcagagtttggtgaggtgggg

SEQ ID NO: 39534 - DNA, 201 bp, Homo sapiens
tgatacctactttcagatccttatgtggtcagccaataaagtatttgaagaactcacagatgttgagcgacagtttcacaaagcgctctacacggttagawcatatctgaactgtgaacgatactccattggactgctggacatgaccaaggagaaggttcttattattctacacattttgtctcatctcacatcgcctat

SEQ ID NO: 39535 - DNA, 201 bp, Homo sapiens
tcagactaaacatttttttggcaggaatactacatagatgatgctgtgtccttctcaatgcattgtgtcaagaagcccatgatatcaattttatttatggrcgatgtccagaagatctctttatgtaaaggaacattttctcctttgcaattaataagtaatacgtgaaacgttagtttgagatcagattaatatctagct

SEQ ID NO: 39536 - DNA, 201 bp, Homo sapiens
gcagtcgtttactgtttactgaatatttcttgaacagaaaaaaagttgagtatcaaaaatgagtaaggcttttgtaactaaacattttattttgcatcatwgaaagaaaagagctactggagttggatttagaatggtaacccatcacttagaaagtctttaatatggccaagtctcagtttcatcacctgtaaaatggag

SEQ ID NO: 39537 - DNA, 201 bp, Homo sapiens
ttctgccagctcagctgcatgcatgtccctccagcatctctcctcctttaatttccccacctgtccaaggacattcagtttctccctcggcatggagcacyggccatactctctgattattctaagtgcttacttttcactcgtatatattttatagccactttaataagttaagttccttaagggcaagatacatatttt

SEQ ID NO: 39538 - DNA, 201 bp, Homo sapiens
cactagtaaggacatactacacattcaaataaatacccattgaactgaatctctcctgcagatctgtctggtaggcccacatagttgttgctcatttctgyctcttagcactttctcacccacatggaatcgtctctccgcttccttctgccagctcagctgcatgcatgtccctccagcatctctcctcctttaatttcc

SEQ ID NO: 39539 - DNA, 201 bp, Homo sapiens
acctgagtctctctccaggcctgcactttcatgttacctccagggaaggctcagctgattttctgggtgtagcaacagttctgtgcaagagtgtgaggggycagcccaggctcaggggctgggggaaccagaaaccgtaattttgttttaaatagctatataccattcggtgttgaaatctgtgtaaatagagcatggctg

SEQ ID NO: 39540 - DNA, 201 bp, Homo sapiens
caaagatgcaggctttgcaagcactatgcactgcatcttttttctaaagctttgaccatcaggagacggatgttgaggtttggttcctctgcttttcattscatgtataatgactacatagagtagtaacaaattacttagattgagcacttattacatgctcagtctaaatgttaaattgtggttcaggctataagtgca

SEQ ID NO: 39541 - DNA, 201 bp, Homo sapiens
gaagcttatttgtgaccatgctgtgcccaggcctgacccctatatttatggcacgtggatgtcagaataggatgcatgtcagcaaaagggcgacaatgatwttctagagtctgaaccttaagcagtcattgtctaaacagggagtgggaatggagctggcccaggagaatgcaggctgctctgaaatgtgaggccctttgc

SEQ ID NO: 39542 - DNA, 201 bp, Homo sapiens
catgtcagcaaaagggcgacaatgatattctagagtctgaaccttaagcagtcattgtctaaacagggagtgggaatggagctggcccaggagaatgcagsctgctctgaaatgtgaggccctttgctttctctcatgctccactgcagctactgctctgatgtgctctcatggcctgggcagagaggaggcctggggcct

SEQ ID NO: 39543 - DNA, 201 bp, Homo sapiens
tagtccaggggttggggacccctgatctaagggctcaacagttcctgacacagcattcatgctcaataaacgttctctgcatgcatgaatggctggctacstcctacatcctgaatcctgctctcctggtggttttctcagcagcccttccctgcagcttattgcaactgttctcaggaaaatcaacaattctgactgagt

SEQ ID NO: 39544 - DNA, 201 bp, Homo sapiens
atgatgaatgcccctgcggatgaatacttcacatttcaggtaactgcactctgggtcagacctcacctcttggggctggggtagaggagtggatgctctcrcctctcctccacccccagagtccgcctgatgctcaggtgtggccacaggcacacacgggtccatctcccactcaccctggctgggccagcaagtagcaga

SEQ ID NO: 39545 - DNA, 201 bp, Homo sapiens
agtgacaatgctgtaggatttgcatgtcttcaatttcatgctacattacaaaactgcactcctgagaagttgtgccagttagcactcccacacacagtgtrcaagagttccagctgagtgaggtggctcatgcctgtaatctcagcactttgggaggccaaggcaggaggatcacttgaggccaggaatttgagaccagcc

SEQ ID NO: 39546 - DNA, 201 bp, Homo sapiens
ggctatgggagctatagcaagaaaaaaatatatatattttaggaagggaaatgtatcagtcagctattgtcatataatgctgcataacaacaaccctaacrcctcagtgtcatgcagtaatgaacctctatctctcactcacatttgtgggttgaccaggctttgattgacagtggctggacttggctccaagctatgaat

SEQ ID NO: 39547 - DNA, 201 bp, Homo sapiens
taaactacatctctagagtgcccaattccatgagttttgactattttatatacctgggaaaccagcaccacaatcaagatgcagaacacttctatcatccragtaattgttcatatcatgacccttcacagcacatcccactgtccactcccagccctaggcggcaacctttgaaatgttttcagttgctatggattagtt

SEQ ID NO: 39548 - DNA, 201 bp, Homo sapiens
gctaaccacagaaagcaggcattggggaggaagagtaagaaaatatgtacaaaggcttggagtaggaataagcttggtgcaattgaaaaatttttaagctgatatagctggagtctagagagtaaagagtgcgaagtacatatgaagctggtagtgcaggtagctgccagatactgtattgccttgaaggtgggctaaaaa

SEQ ID NO: 39549 - DNA, 201 bp, Homo sapiens
catctcacctagaggatctgagtagtttgttggatgtacacatgttcaaaatcagaattgcactttccaatgatatgcatttattttatttgatgcacctyatgttttcttgtggtgaatgctctatctctccatagcatactttattctaactgttttctttttgatacctactttcagatccttatgtggtcagccaat

SEQ ID NO: 39550 - DNA, 201 bp, Homo sapiens
aaagtgctgggattacaggcgtgaaccaccccgcccagcctcagaatgtgaacctttcatcaaagtaatctatgtaaagaaaaactgtatgttcctgtggmtccagcaaaagggatttccttttttgggaatctgtcacataaaaataaaagcaagaaggattagtgcagtattgttggtagtggggaaaactatacacag

SEQ ID NO: 39551 - DNA, 201 bp, Homo sapiens
caggttccactgtaggagattaggattcagtgcatctgctgcattaatctgcaggtgattctgaggcatatctcaggactgctaatctcatttgagctctrtgagttctattggccaaccagcccttgttccctggtggaaactctggcctggaaatgacacacccagaaaattctcacatttttttctacgggaaaccag

SEQ ID NO: 39552 - DNA, 201 bp, Homo sapiens
cccacgtgtcctctcatgatcttcccgccactctccccacacacactcccctgcaccccaagctctccaattgtgtacacaactggcttggctttcttcartctagatcccgagtggacttggcatttctgtctatgagatggtgatgacaataatggtacctacttcagatggttgttgtgactattagcgattagctct

SEQ ID NO: 39553 - DNA, 201 bp, Homo sapiens
cattaccattgtgtgaaactgggtgaagggtacctgaaatctctctgtacatttcttttgtaatatcctgtgaatctatgattatttcaaactaaaaaggsaaaaaaataacttgaggtcccttctcgtttgtagaaaggacctgtagacgaaactggttgggtcattaagaatgttttgtccctgcctattgtcaacaag

SEQ ID NO: 39554 - DNA, 201 bp, Homo sapiens
tagaaaatcttttccaatatgttatttttgaccacttcacagataattgagtgaggagggagaagagagacattaagaaaaatcctgaattgtatgaaccwgtgtaatttttaaacagctagaatcatggcatgttgttttccttctagatccacgtctccattagcaagacttcatggttcttctattttggagaggcac

SEQ ID NO: 39555 - DNA, 201 bp, Homo sapiens
ctaccaaagtataaaattttagcttaaccaaaatttgtaataatactcggaaaacaggaaagaggattttcttcttctttctcccactcctccttcctgtyccctctcattcttattcttattcttacgcccagccccctgcctaatttttaggtcctgcttgactatactggtgttggtaacacctctctcttctattca

SEQ ID NO: 39556 - DNA, 201 bp, Homo sapiens
aattcaaagtacctgtagaggtcagagggtatttaatttaaaatactgtgtgattctgtggctctgcttcactgatgttttctgtggttcaaaagatggastcagtttgaattttaaattattattaactttctaaatacatcagcttaacccctatctacaagaccaacacatctttttagataagattgccacagacct

SEQ ID NO: 39557 - DNA, 201 bp, Homo sapiens
aacaaagttaaggatgtccttcagaataaaagcaggagtttttgactccttgatatccattcacttatgtatttatcagatgtcttctctgtataaagccyggtgttaggcaggccctggggaaagatgggatcctttatcttgaacaatttaccatttggtgggggaactaaacattgtgaaccaatgcacaattaacga

SEQ ID NO: 39558 - DNA, 201 bp, Homo sapiens
tagaaacagcactagacaaggagtttgaggttctagtcccagctatgccccaagctagagctgattggcccctgccttaactccttgttgaacctctccgwttccttttctataaagccagggcttggtagaccagtggttctcaactggaagggatgcatcagagccacctgcacaacattttaaagaagtacctgggcc

SEQ ID NO: 39559 - DNA, 201 bp, Homo sapiens
  misc_feature (1)...(201): n = A,T,C or G, or insertion/deletion polymorphism (see Tables 1-2)
acttgaaaaagtgacattcagcaattttttgaaaggcttttaaagaagagatgggtaaaatgatttctgctgttatactttgattagcccagttctctgtngtgagaaggaaataagagcatggagctgcttggaggtggttttggtctgcggctgtccatggtgagcatcacggcatggacggagcacttcatctgggag

SEQ ID NO: 39560 - DNA, 201 bp, Homo sapiens
gaggtgcaccactatgcctggctaatttttgtatttttagtagaaacggggtttcaccatgttggccaggctggtactgaactcctgacctcaggtgatcmacctgtctcggactttcaaagtgctgggattacaggcgtgagccactgcgcccggcccaggcattggtatttttaaaaagctcccccagctacttctaat

SEQ ID NO: 39561 - DNA, 201 bp, Homo sapiens
gttaatgaaatatcagtttctggatggtaggatttgaagcaatttaagaaatatttgtctttgatgttttcctatcgtttgaatttttatagtgggcttaygtaacttttgcaactattaatgaacattgaatacatgtataaatatgtaatattccatttgttttcgagcattgtgttgaagacattatgtggagacagg

SEQ ID NO: 39562 - DNA, 201 bp, Homo sapiens
tggtggttttctcagcagcccttccctgcagcttattgcaactgttctcaggaaaatcaacaattctgactgagtcttcagagcttctcctgctgttagaytcggttgtatccttccttctccactgtgcagagacccactgcctggggaatctgcctccactcaccgccagatgctcccaggaatcagcttctgtatgtg

SEQ ID NO: 39563 - DNA, 201 bp, Homo sapiens
gttgcaaaagttacataagcccactataaaaattcaaacgataggaaaacatcaaagacaaatatttcttaaattgcttcaaatcctaccatccagaaacygatatttcattaacgtctaatgaacctcattgcagtcaccctgtggatatacacaggaagcatggagagaaaggactccatgtgttcccactacccaagc

SEQ ID NO: 39564 - DNA, 201 bp, Homo sapiens
atccttccttctccactgtgcagagacccactgcctggggaatctgcctccactcaccgccagatgctcccaggaatcagcttctgtatgtgctactctasctgacccacttctccccatcagggcttcctgctggaacctggctgcagacccgagttgatccctccccgccccccgagttcatccagcccaccagaaggg

SEQ ID NO: 39565 - DNA, 201 bp, Homo sapiens
cccagttctctgggaaacatcattgtggtgcccatgaaaatgtgcttctcagatctccacctgtgggaagtgtagccgtgcaatggctgctggcctgaaayccatggtcacatctgtgctgaggccacacgctccacaggccactcccaattggtaactaagtgtggcagggacagtaaagcaggcctgctcctggaagac

SEQ ID NO: 39566 - DNA, 201 bp, Homo sapiens
acccttcccctggcagagccagcagcaccatcactctgaccttgcttttgtcatcatagctccttctcccattctgattctaacctctcttctacttttawggatccttgtaattacattgggtccacctggaacatccaggctaatttccccatcttaaggccagctaattagcaaccatcattctatctgcaaccttag

SEQ ID NO: 39567 - DNA, 201 bp, Homo sapiens
ttttaaggatccttgtaattacattgggtccacctggaacatccaggctaatttccccatcttaaggccagctaattagcaaccatcattctatctgcaascttagttcccctgtgttgtgtaagataacatattcacaggttccagagattaggatatagacatctttgggggccattgttctgcctgccatagggttcc

SEQ ID NO: 39568 - DNA, 201 bp, Homo sapiens
cttaaggccagctaattagcaaccatcattctatctgcaaccttagttcccctgtgttgtgtaagataacatattcacaggttccagagattaggatataracatctttgggggccattgttctgcctgccatagggttcctcgaagtggactaaggggtcttcctttaacgtcaattaaagtggtcctaattcacaggag

SEQ ID NO: 39569 - DNA, 201 bp, Homo sapiens
gactgcaagcttcatgaaggcagaaacccctgtgtccatagcacacaggaaagagaaggggatggattgtgtccaggcctcagattcatcatctgccccawgaaacagagagaataattctctagtccctttcagctttggcagtgaaacctcctgtttctgaggcacctgttcagataagtcactgatgaaaggagggta

SEQ ID NO: 39570 - DNA, 201 bp, Homo sapiens
gaaagagaaggggatggattgtgtccaggcctcagattcatcatctgccccatgaaacagagagaataattctctagtccctttcagctttggcagtgaarcctcctgtttctgaggcacctgttcagataagtcactgatgaaaggagggtacgggtcactatatataatgtaaaactgactacagttaagaaattacat

SEQ ID NO: 39571 - DNA, 201 bp, Homo sapiens
tcatactggctgtagcagagctaggatttctcagctttctcctccccttggcctgagcagcctgttgctttgaatttgaaggggattccctggagtctggsggagtgggaaggggcagagacggtaccacatatcctccagtgatttaattagcagcagggaagccatcttgaatgagttgttagcagctgtggcctagtt

SEQ ID NO: 39572 - DNA, 201 bp, Homo sapiens
aagcctttgccatgcttgctgctgctttctgccatgatattgaccacagaggcaccaataatttgtaccagatgaagtaagtgaacacatgtccaatgttsacacgtattggtggacattggaaagtacttagggtgagaaaaacgcttctccctattccttggcccagtcaatgcctctttgccatgttggaaattccag

SEQ ID NO: 39573 - DNA, 201 bp, Homo sapiens
aaacaaaaaagtgttgaaagacttttagattttcttcttgttaagcatagtttcatttgttcagaggcaaattattgatagcattttattgtgaattttcrtcttacagagtttaaacatcttccagaacctaaataagcggcagtttgaaacagttattcatttgttcgaggtcgcaataatagcaactgacctggcttt

SEQ ID NO: 39574 - DNA, 201 bp, Homo sapiens
cgcaataatagcaactgacctggctttatatttcaagtaagtacataactctgcacagtggaatgccctatactctgtgtggttttaccttccataaattrtctgttgcattaatgttaaaaggcatttattcacacacatacacacacacagacacacacacacacatacacacaaaatttgctctccttttggattacc

SEQ ID NO: 39575 - DNA, 201 bp, Homo sapiens
tggaaagttgtggatgttgtctaattatactttcttaagaacgttccaaaccaaaaatgattaaggtgagtcattagattgaggggagcactgttttgtcrcaggcagtgaacttgttcagaatcacatgcttcattaggatacatgagccctctggagagtgggcttttctcactttcaataataatcttttattaaaag

SEQ ID NO: 39576 - DNA, 201 bp, Homo sapiens
tacacaggaagcatggagagaaaggactccatgtgttcccactacccaagctatttttttaagccagagttggtttttaatcaacttcattgaagtatatrtacaataaactgcatctcttattttattttatttttgagacggagtctcatcttgttgcccaggctggagtacagtggcgtgatctcaactcactgcaac

SEQ ID NO: 39577 - DNA, 201 bp, Homo sapiens
ggaaagttgtggatgttgtctaattatactttcttaagaacgttccaaaccaaaaatgattaaggtgagtcattagattgaggggagcactgttttgtcgmaggcagtgaacttgttcagaatcacatgcttcattaggatacatgagccctctggagagtgggcttttctcactttcaataataatcttttattaaaagc

SEQ ID NO: 39578 - DNA, 201 bp, Homo sapiens
taacaaaatcttgttattattcagaacatctctttccaaagcgtatgataattttatttatgctttttcatatcaaccgcatcagcctgccccattttacrcatagaaatgtgaaggagaaatcaaataccttgtgtactggcactagcaaggcaagaacatgttggcaatattctcttgcgggcgtcataggcaccatgc

SEQ ID NO: 39579 - DNA, 201 bp, Homo sapiens
tctatgcctttaagaaagtcaagctttcatagtggagtgtattcacacattcttgcattgctataaagaaatacctgagactgggtaattataaagaaaakaggtttaattcactcccggttctgcaggctgtacaggaagcacggcagcatcaacctctgggcaggcctcaaggagcctacaatcatggtggaagctgaa

SEQ ID NO: 39580 - DNA, 201 bp, Homo sapiens
cgtgtatatatatatatatagtatatatatagtatgtatatagtactatatatatactatatatagtacatatatatagtgtatatatatagtacatatayagtatatttatatagtatatatagtatatatatacactatatcgatatagtatatatataatggaatattattcagccaccaaaataatgaaatcttgtc

SEQ ID NO: 39581 - DNA, 201 bp, Homo sapiens
ctttatgctgggaatattcaaattattctttactagctattttgaaataacaatggattgttgtttgctatagttactctgttaatttattgaacagtagrtcttatttcttctacctacctgtatatttgtacccattaatcaacctgtcttcatccttcccacctccctacccttcctggcctctgataaccaccaaac

SEQ ID NO: 39582 - DNA, 201 bp, Homo sapiens
tgtgtgaatgtctgtgtgtgtatataaataatatatatattttttggagacagggtcttaccctgtcacccagggactgcagtggcatgatcacggctcaytgcagccttgacctctggggcccaagcaatcctctcacctcagcctcccaagtagctgggactacaggtgtatgctaccatgcctggctaacttttaaat

SEQ ID NO: 39583 - DNA, 201 bp, Homo sapiens
tgctgaagactagaacggcctgtactttccctggcctcagctagctcgagagccacgatctgaatgaattaaagccatttctacctgtttggggtgtgctwtgcagaattcatagttctatcgccattttaatagtcagggaaaataaaaaagattctttccgtgagcaaatgaaagcagctgagcaagtcagggcccgtg

SEQ ID NO: 39584 - DNA, 201 bp, Homo sapiens
tcagtgtgtgtgaatgtctgtgtgtgtatataaataatatatatattttttggagacagggtcttaccctgtcacccagggactgcagtggcatgatcacrgctcactgcagccttgacctctggggcccaagcaatcctctcacctcagcctcccaagtagctgggactacaggtgtatgctaccatgcctggctaactt

SEQ ID NO: 39585 - DNA, 201 bp, Homo sapiens
aaagggcactattagtacctaagatacctaggtctggcccactctctggacctcagtttcctcaccagtacaatgcacgagtagaggttgagagggaggtyccttcccgtttgaactctccaggtaaggttacctctgactatctcaggatgcatggaaggaggtatgtggctctctccacatcagggccagcaggagcca

SEQ ID NO: 39586 - DNA, 201 bp, Homo sapiens
tgactgcaagcttcatgaaggcagaaacccctgtgtccatagcacacaggaaagagaaggggatggattgtgtccaggcctcagattcatcatctgccccwtgaaacagagagaataattctctagtccctttcagctttggcagtgaaacctcctgtttctgaggcacctgttcagataagtcactgatgaaaggagggt

SEQ ID NO: 39587 - DNA, 201 bp, Homo sapiens
ctttgtaatgagagagaagcgctctatgaactgtgtctgtattcctagctgtgctctccttccctgcatgtacttgctgtctattgtaaccttgtgccttyccctctcttcctcttagcacctcactttccacttggctgtctgatcacctcttttcttctggcccaacctcagcctaacctaaataggccatagctcagg

SEQ ID NO: 39588 - DNA, 201 bp, Homo sapiens
gtgaaagggagaacagagaaaatctaaaagaatgtagaattaagaaagagtttttcaattaggaggcttgtacatgtttttagataaaaatgaaaatgagygagaagaaaaaggtatgaatgaaatgcagatatgtagtgctatatgcaaaagaagcagtactgaaatggtgactataaaccctttttcttcattatatca

SEQ ID NO: 39589 - DNA, 201 bp, Homo sapiens
gtgcttgtctatctttgccttagctacatactgtgcaaatgctacatcatggttctcaaacttcagagggcatcagaattacctgggaagcttattgaagwtgcatgcccaggccaggcatagtgactcacgcctgtaatcccagcagtttgggaggctgaggcgggcggatcacttgaggtcaggagttcaagatcagcc

SEQ ID NO: 39590 - DNA, 201 bp, Homo sapiens
gttctcatgctgctgctaataaagacatacccgagactgggtaatttataaaggaaagaggtttaatgaactcacagttccacatggctggggaggcctcrcaatcatggtggaagatgaaggaagagcaaagggatgtcttatgtggtggcaggcaagagagagcgtgtgcaggggaactcccctttataaaaccatcag

SEQ ID NO: 39591 - DNA, 201 bp, Homo sapiens
catcaactcctcttttgctgttgttttgtgttgtcaaagtaggtcttgaaaggaattccttgcttctcctgtgcgctgggcacatcttgagacctcttgcyctaattaaagaatcactgagtctgtgtttacttactaaacaaacaaaaaacccaacttgtgtgcaagtgtgtgtgtgcatgtgtgtgtgtgtgtgtctgt

SEQ ID NO: 39592 - DNA, 201 bp, Homo sapiens
tctgaagtactcttgaactcagcaaattgaaattttattttgctaatataatgagtgtgagataatatcttattgttcaaatttgtagtttcttgattagyagtgagaccagctggacatccgtgtgttttgggttccaactttttgttggctatatgtgttgtgatatcttatcatagtttggggcctttatttttaggt

SEQ ID NO: 39593 - DNA, 201 bp, Homo sapiens
tgcttgtctatctttgccttagctacatactgtgcaaatgctacatcatggttctcaaacttcagagggcatcagaattacctgggaagcttattgaagawgcatgcccaggccaggcatagtgactcacgcctgtaatcccagcagtttgggaggctgaggcgggcggatcacttgaggtcaggagttcaagatcagcct

SEQ ID NO: 39594 - DNA, 201 bp, Homo sapiens
acttaaaaccatcaactcttgtgagaactccctcactatcatgagaacagcgtgggagaactgcccccatgattgaatcacctccttccaggttcctcccycaacacctggggattacaattcgagatgagatttgggtggggacacagagccatatcaacacctctttgattttgttttccggaagttggtaaagctcac

SEQ ID NO: 39595 - DNA, 201 bp, Homo sapiens
tgggaggctgaggtgggcagatcacgaggtcaaaagatcgagaccatcctgaccaacatggtgtaaccccgtttctactaaaaatacaaaaattagctggycatggtggtgcatgcctgtagtcccagccactcgggaggctgagacaggagaatcacttaaactcagaaggcgaaggctgcagtgagccgagatcgtggc

SEQ ID NO: 39596 - DNA, 201 bp, Homo sapiens
tgattgaaaaggtacatattctctattaatatcagcacttactgtgatttttcatctgtctctggtagtggacccttccaaagttcagattctgaagcackttcttcctcatcagagtttcctgttcatttaaaaaagatgatttttaaaaacctattatacttaaagcacattttgaattattcgccaatacaattaact

SEQ ID NO: 39597 - DNA, 201 bp, Homo sapiens
ggcgcggtggctcacacctgtaatcccagcactttgggaggctgaggtgggcagatcacgaggtcaaaagatcgagaccatcctgaccaacatggtgtaamcccgtttctactaaaaatacaaaaattagctggtcatggtggtgcatgcctgtagtcccagccactcgggaggctgagacaggagaatcacttaaactca

SEQ ID NO: 39598 - DNA, 201 bp, Homo sapiens
tctgaaaattactcatccctgagtggagccaactatctgcctagtaccgtggaagaagggcaggaatgagctggggaaatcctcagcttccaatttgttgwctcaaacattctctcaccaattctaaggagcacacctgtattagtctgttttcacactgctgtaaagctactacctgagactgggtaattataaagaaaa

SEQ ID NO: 39599 - DNA, 201 bp, Homo sapiens
ctgggttcaagtgattcttctgcctcagcctccagagtagctaggactacaggcacacgtcaccacgcctggctaatttttttttttttttttttttttttgtattttagtagagatggggtttcaccatgttggccaggatggtctctctatctcctgacctcgtgatccacccaccttggcctcccaaaatgctgggat

SEQ ID NO: 39600 - DNA, 201 bp, Homo sapiens
ctatcctagcagagatggattcactgctttgaggaatagaactgcctgtactctaaaccagacagaaatcaatgctttaacccaaatgaatgagtggaaamcttgttagccaaatttgcacaagtataaattttaatactagaatatactgtagaaatgacaaaacatattgctcagcataaataacaaaatcttgttatt

SEQ ID NO: 39601 - DNA, 201 bp, Homo sapiens
ccacaaagatatcaccgtctgacgttgatgtgtattcataatttccatccatgtttttatatggtattgttgtgtgttgttttttttgtttggtttcttgktttttttgcgacggagtctcactctgtcaccaggctggagtgcagtggcgcaatctcggctcactgtaatctctgcctcctgggttcaagtgattcttct

SEQ ID NO: 39602 - DNA, 201 bp, Homo sapiens
aaggaagagagatgcgggggaggtaccacacacttttaaataaccagatctcatgagaattcactcagtatcatgaccaaggaggatggggctaaaccattcataagaaacactgctcgcaaaatccaatcacctcccaccaggacccacttccaacattggggattacaactgaacatggggtttgggtggagacacaga

SEQ ID NO: 39603 - DNA, 201 bp, Homo sapiens
tgaactctccaggtaaggttacctctgactatctcaggatgcatggaaggaggtatgtggctctctccacatcagggccagcaggagccagtgggccaccratactggattctccgtccagggaccatccctgcatcccatttcagggcacttcccctttggagccaaaacatctagacacaggaaccaatcatagcttct

SEQ ID NO: 39604 - DNA, 201 bp, Homo sapiens
aatccctttatcttaaataaaaggtattgcatttgactttatttgaatttaacagaagaaatgtttttgaaatggaaagaattgcagaacttcacatgatrgtgtccttatcacaagaaatgttagctcttaaagagccctctaaaatgaataacaaatgactatgaaaaattatgaaaagttgtagctgagcatttagat

SEQ ID NO: 39605 - DNA, 201 bp, Homo sapiens
taagccccagggaacttaaagaatttagatacaaggagctgaactccttagtttaaacaattaaatcatttatgcattcaacaaattaaggttttttttttccaaaagagcatattctcatcttctaaatctagaaaatcttttccaatatgttatttttgaccacttcacagataattgagtgaggagggagaagagaga

SEQ ID NO: 39606 - DNA, 201 bp, Homo sapiens
acctggccaacatggtgaaaccctgtctctactaaaagtacaaaaattagtcggatgtggcacacctgggattataggcacatgtctataggaggtagacrtgtgcctctgaggtaggagaaacacttgaacccaggaggcagaggttgtagtgagccaagattgcactactgcactccagctggagcgacaaagagagac

SEQ ID NO: 39607 - DNA, 201 bp, Homo sapiens
atagtacatatatatagtgtatatatatagtacatatatagtatatttatatagtatatatagtatatatatacactatatcgatatagtatatatataahggaatattattcagccaccaaaataatgaaatcttgtcatttgcagcaatatggatggaactggagattattttgttaagtgaaataagccaggcacaga

SEQ ID NO: 39608 - DNA, 201 bp, Homo sapiens
ttcatttccagatgtgcctctgccttcttcctataggccttcaggctttcttctctcaactttgtttaatcagagtattgaattcctatattaaagtgcawgaatctggctgggcacagtggctcgcacctgaaatcccagcactttgggagagtgaggcgggcggatcaagtgaggtcagttcaagaccaacctggccaa

SEQ ID NO: 39609 - DNA, 201 bp, Homo sapiens
tatagtacatatatatagtgtatatatatagtacatatatagtatatttatatagtatatatagtatatatatacactatatcgatatagtatatatatamtggaatattattcagccaccaaaataatgaaatcttgtcatttgcagcaatatggatggaactggagattattttgttaagtgaaataagccaggcacag

SEQ ID NO: 39610 - DNA, 201 bp, Homo sapiens
tgagcccatccctgctagcacatcaaacttgaaaaagtgacattcagcaattttttgaaaggcttttaaagaagagatgggtaaaatgatttctgctgttrtactttgattagcccagttctctgtggtgagaaggaaataagagcatggagctgcttggaggtggttttggtctgcggctgtccatggtgagcatcacgg

SEQ ID NO: 39611 - DNA, 201 bp, Homo sapiens
ggagtgcagtggcacgatcttggctcactgcagcctctgcctcctgggttcaagcaattctcctgcctcagcctcccaagtagctgggattacaggtgccsaccatcacgcctggctaatttttgtatttttagtagagatggggtttcaccatgttgaccaggctggtctcgagctcctgacctcaggtgatctgcctcc

SEQ ID NO: 39612 - DNA, 201 bp, Homo sapiens
tgtatatagtactatatatatactatatatagtacatatatatagtgtatatatatagtacatatatagtatatttatatagtatatatagtatatatatwcactatatcgatatagtatatatataatggaatattattcagccaccaaaataatgaaatcttgtcatttgcagcaatatggatggaactggagattatt

SEQ ID NO: 39613 - DNA, 201 bp, Homo sapiens
ggagatagatactcctagaataagcctagaacactgaagtaggaagaaaaagctcccctttcgcatttcaatataatctgtaaatgacctctttttaaaasttaagagcatacggtttgatagcacctcaaacattgactgtaaactcgatccttaaatgtcacttgtactaataaaatgcaagttctctattcataagtg

SEQ ID NO: 39614 - DNA, 201 bp, Homo sapiens
tgggaggcagaggttgcagtgagccaagattgtgccgttgtactccagcctgggtgacacagtgagaccctgtctcaaaaaaaaaaaaaaataaaaaaaawtaaacaagctaaaacaaatctgttacacatggtccttggaccacactttgagaaacactcctaaacttttgtgcctgcatccctcgactagaccctaagc

SEQ ID NO: 39615 - DNA, 201 bp, Homo sapiens
acttgaacctgggaggcagaggttgcagtgagccaagattgtgccgttgtactccagcctgggtgacacagtgagaccctgtctcaaaaaaaaaaaaaaawaaaaaaaaataaacaagctaaaacaaatctgttacacatggtccttggaccacactttgagaaacactcctaaacttttgtgcctgcatccctcgactag

SEQ ID NO: 39616 - DNA, 201 bp, Homo sapiens
tttctgaagtataagtatgtcccatgtaaagtttggcattttatcaggtgatcctacctggccctggtgcattccacacaccctcccttacgcctcctccwgtgctctgggggactttccttctcagcaacaccagcaaaacaaactaccccactagggagatgggccaacgtgcccagatgccaagacttgtgaactgct

SEQ ID NO: 39617 - DNA, 201 bp, Homo sapiens
aggctgaggcaaaagaattgcttgaacccaggaggtggagattgcagtgagccaagatcgcgccattgcactccagcctgggcaacaaagtgaaactccayaaaaaaaaaaaaaaaaaaaaaaaagctagatgatcacttcctttggcataggacaaaggagagaagaatcttgacagtcaaatgtaggttaactggagac

SEQ ID NO: 39618 - DNA, 201 bp, Homo sapiens
gtataagtatgtcccatgtaaagtttggcattttatcaggtgatcctacctggccctggtgcattccacacaccctcccttacgcctcctccagtgctctkggggactttccttctcagcaacaccagcaaaacaaactaccccactagggagatgggccaacgtgcccagatgccaagacttgtgaactgctccccatgc

SEQ ID NO: 39619 - DNA, 201 bp, Homo sapiens
gatacaattgtgaaagcaagaatgcatccaataaaagctagatgggccgggcgcggtggctcatgcctgtaatcccagcactttgggaggctgaggcgggygaatcatctgaggtcaggagttcgagaccagcctgaccaacatggtgaaaccccgtctctactaaaaatacaaaattagctgggcgtggtggcacatgcc

SEQ ID NO: 39620 - DNA, 201 bp, Homo sapiens
aacaaattcaaattttaaataatattgcaagaaactcttattagctaagagatagatacaattgtgaaagcaagaatgcatccaataaaagctagatgggmcgggcgcggtggctcatgcctgtaatcccagcactttgggaggctgaggcgggcgaatcatctgaggtcaggagttcgagaccagcctgaccaacatggt

SEQ ID NO: 39621 - DNA, 201 bp, Homo sapiens
tcagacagactactttcagtgcctcaaagccctctgtgcttcacatattcaacctttcctcaccccttccaaactcctggtagccacaggtttttttttgkttttttttttgttgtttttttttttttgctgtttctatagtttttgccttttccagaatgccatatagttggaatcatacagtatgtagcttttcagact

SEQ ID NO: 39622 - DNA, 201 bp, Homo sapiens
tagcagagctaggatttctcagctttctcctccccttggcctgagcagcctgttgctttgaatttgaaggggattccctggagtctgggggagtgggaagsggcagagacggtaccacatatcctccagtgatttaattagcagcagggaagccatcttgaatgagttgttagcagctgtggcctagttgaggtccatttg

SEQ ID NO: 39623 - DNA, 201 bp, Homo sapiens
agcagagctaggatttctcagctttctcctccccttggcctgagcagcctgttgctttgaatttgaaggggattccctggagtctgggggagtgggaaggsgcagagacggtaccacatatcctccagtgatttaattagcagcagggaagccatcttgaatgagttgttagcagctgtggcctagttgaggtccatttgc

SEQ ID NO: 39624 - DNA, 201 bp, Homo sapiens
gcttgacaaatgtttactcaactcaacacaccacagaatgaaagactatcttcatggatcagtcagaaaaacaaaaaccacactagtattttaacgggagrattttatttaaggaattagctaaacaggtgttagaagatagaaaaagtgtaaagggaacagtgaggtaacatagtggtaagaagcacttcccatcactca

SEQ ID NO: 39625 - DNA, 201 bp, Homo sapiens
ttctttccgtgagcaaatgaaagcagctgagcaagtcagggcccgtggccagaggctgggaagtaggtctcctttcttgtctagtgcacctgtctccacawaatgtcttcaacacaatgctcgaaaacaaatggaatattacatatttatacatgtattcaatgttcattaatagttgcaaaagttacataagcccactat

SEQ ID NO: 39626 - DNA, 201 bp, Homo sapiens
aattcatagttctatcgccattttaatagtcagggaaaataaaaaagattctttccgtgagcaaatgaaagcagctgagcaagtcagggcccgtggccagrggctgggaagtaggtctcctttcttgtctagtgcacctgtctccacataatgtcttcaacacaatgctcgaaaacaaatggaatattacatatttataca

SEQ ID NO: 39627 - DNA, 201 bp, Homo sapiens
gcaaaagtaactgcatacaaatcttggtaaaatccaaatcagctctggatcgtacaatgtctgttttctggtttcgatattgtactatagttacacaagayggtagaaaatgtactgtagttgtctaaccatcattaccattgtgtgaaactgggtgaagggtacctgaaatctctctgtacatttcttttgtaatatcct

SEQ ID NO: 39628 - DNA, 201 bp, Homo sapiens
gccagataccctgccaggcagcttgggccctaggaatgcctaacagctctgcaaacagtttcagaacagcacggtggtctaaggggctcccctcaaccttscatccttccgtttctcctttgcaaagggtcgggactgcatctctgtctgatgtctctctcagcacccccagcctccctccccgccgctcttcaacggcat

SEQ ID NO: 39629 - DNA, 201 bp, Homo sapiens
gctacctcctacatcctgaatcctgctctcctggtggttttctcagcagcccttccctgcagcttattgcaactgttctcaggaaaatcaacaattctgaytgagtcttcagagcttctcctgctgttagactcggttgtatccttccttctccactgtgcagagacccactgcctggggaatctgcctccactcaccgcc

SEQ ID NO: 39630 - DNA, 201 bp, Homo sapiens
aattagcacaataatagaataatcatgcaatcaatcacactcttttgcattggtttctttcacgcaaaataataatttttagattactcatgttgtgtatrtccatgattcattcctttttttagagatggggtcttgctctgttgccaagactggagtgctgtggcactgttatagctgtctgcagcctcaacctcctgg

SEQ ID NO: 39631 - DNA, 201 bp, Homo sapiens
tagatccacgtctccattagcaagacttcatggttcttctattttggagaggcaccacctggagtacagtaagactctgttgcaggatgaggtacgtaaamctctctttaggacagctaaacacaaattctggatcaaagcactaacccacagaaaatgcttggaaaaagggtggccttgagttacagcagttgatagtgt

SEQ ID NO: 39632 - DNA, 201 bp, Homo sapiens
tctctagagtgcccaattccatgagttttgactattttatatacctgggaaaccagcaccacaatcaagatgcagaacacttctatcatccgagtaattgytcatatcatgacccttcacagcacatcccactgtccactcccagccctaggcggcaacctttgaaatgttttcagttgctatggattagtttacattttc

SEQ ID NO: 39633 - DNA, 201 bp, Homo sapiens
gggggaggagagaaatgttaccttatagtgcttttcatcttggttctatgcagataacctatgggcctccacatgtttgctatatgttttataagtcatartccaccgccataagccccagggaacttaaagaatttagatacaaggagctgaactccttagtttaaacaattaaatcatttatgcattcaacaaattaag

SEQ ID NO: 39634 - DNA, 201 bp, Homo sapiens
catccttcccacctccctacccttcctggcctctgataaccaccaaactactctctatcttcaaataaagaaaatgtggtgcgtgtatatatatatatatwgtatatatatagtatgtatatagtactatatatatactatatatagtacatatatatagtgtatatatatagtacatatatagtatatttatatagtata

SEQ ID NO: 39635 - DNA, 201 bp, Homo sapiens; identical to SEQ ID NO: 6065

SEQ ID NO: 39636 - DNA, 201 bp, Homo sapiens
taatcaacctgtcttcatccttcccacctccctacccttcctggcctctgataaccaccaaactactctctatcttcaaataaagaaaatgtggtgcgtgkatatatatatatatagtatatatatagtatgtatatagtactatatatatactatatatagtacatatatatagtgtatatatatagtacatatatagta

SEQ ID NO: 39637 - DNA, 201 bp, Homo sapiens
tccttgattttactagctgctgaagattcaggaggtggtgatgacaaaaagtccaaaacatgtttaatgttgtaatattatctaactggtctaaacttcaratatcattttacctttgaagaaaaccagaaaacattcaaaagaacttcaacaaatcatcacgtaacaggatcttcagaaaaactaccctgtgactatgaa

SEQ ID NO: 39638 - DNA, 201 bp, Homo sapiens
atatatatagtgtatatatatagtacatatatagtatatttatatagtatatatagtatatatatacactatatcgatatagtatatatataatggaataytattcagccaccaaaataatgaaatcttgtcatttgcagcaatatggatggaactggagattattttgttaagtgaaataagccaggcacagagagtcaa

SEQ ID NO: 39639 - DNA, 201 bp, Homo sapiens
tcattcaccagtattgctcatggccagcccagttccttgataatgggttttaagatggtctatctgccttagccacacttcattctcatttctgacacattgaactacccctctccagaagtagtgaagtgttgtagacagactgaatgggctttggagtcttgggtttgtggggaccaactacttcttggttgggggatc

SEQ ID NO: 39640 - DNA, 201 bp, Homo sapiens
acagtttcacaaagcgctctacacggttagatcatatctgaactgtgaacgatactccattggactgctggacatgaccaaggagaaggttcttattattytacacattttgtctcatctcacatcgcctatataacacacaccacaggaaatgtgatccttaaaaaacagatacactatgtaaataattagtcatgattg

SEQ ID NO: 39641 - DNA, 201 bp, Homo sapiens
gttaacagtcaaaaattcctaaccagtattgctgggaattgtagatctttcagcactaaaattccagaattacgtagattaacataaaatatacaaacacmtaaaattcatataagatatggtaggtcatggaacagtgtgtttaatgatacttaaatctgattgcctccaggaattctacgatgaatggccaatcaagct

SEQ ID NO: 39642 - DNA, 201 bp, Homo sapiens
ctgttgctctaaacaatgttctccagctgccttcaagggcttctctgaagaaccatcaagggacacacgcaggatttatgcaaagaaacttcgctaaggawtttttgagctagtgaaaataaaacacaaaaacccctcccccatccccatcctgtaacttaatggctggtttatctagggctttcagatgcaataataagc

SEQ ID NO: 39643 - DNA, 201 bp, Homo sapiens
tccttactaactgctataacctgttttccaccatctctttccgatctgtgatgtgagcattctttctaaactaagacacatcgactatctcaccttctccctttccatcttttgtgggctctgtcctcccacccagggcctttgctctgctaccataagactgttggtctttgacccttttttggggcttacttcccaccc

SEQ ID NO: 39644 - DNA, 201 bp, Homo sapiens
tagagcactggcctgggaagacctggagtagtagaaacagcactagacaaggagtttgaggttctagtcccagctatgccccaagctagagctgattggcycctgccttaactccttgttgaacctctccgtttccttttctataaagccagggcttggtagaccagtggttctcaactggaagggatgcatcagagccac

SEQ ID NO: 39645 - DNA, 201 bp, Homo sapiens
atgggggagcaagtggatatttgctaaccatgttctaatcaccacaaaatgaagggaaaatatcatgtgcccaccatctctatttcttttatttccctggygtgtgtgtgtgtgtgtgtgtgtgtgtgtgtgtgtgtgtgtgtgtgtagttttgctggagtgggttggttttggtgagcatgttggtttttggttttgccg

SEQ ID NO: 39646 - DNA, 201 bp, Homo sapiens
tataaaatcattgattacattttacatggaaaagaagagatcaaagtgattccgtgagtattggcaggaagttgctgccgcagttgccgttgtatttttgyacatattgcatttctctatattgcaatgattttttttcttctcttccccaaggacgcctcctgcagaccactggacactcattagtgggttgccaacata

SEQ ID NO: 39647 - DNA, 201 bp, Homo sapiens
cttacgcccagccccctgcctaatttttaggtcctgcttgactatactggtgttggtaacacctctctcttctattcatggtgcatggtacactttaaaaagcaataattcagccagttttattgtctgaagctgattattagtatgtttttcttaaattaaaagaaggaatggggtggttgatgatggaagggagatgga

SEQ ID NO: 39648 - DNA, 201 bp, Homo sapiens
tatcagacagactactttcagtgcctcaaagccctctgtgcttcacatattcaacctttcctcaccccttccaaactcctggtagccacaggttttttttkgtttttttttttgttgtttttttttttttgctgtttctatagtttttgccttttccagaatgccatatagttggaatcatacagtatgtagcttttcaga

SEQ ID NO: 39649 - DNA, 201 bp, Homo sapiens
agaaaatgtggtgcgtgtatatatatatatatagtatatatatagtatgtatatagtactatatatatactatatatagtacatatatatagtgtatatayatagtacatatatagtatatttatatagtatatatagtatatatatacactatatcgatatagtatatatataatggaatattattcagccaccaaaata

SEQ ID NO: 39650 - DNA, 201 bp, Homo sapiens
aatcacttgaacctgggaggcagaggttgcagtgagccaagattgtgccgttgtactccagcctgggtgacacagtgagaccctgtctcaaaaaaaaaaawaaataaaaaaaaataaacaagctaaaacaaatctgttacacatggtccttggaccacactttgagaaacactcctaaacttttgtgcctgcatccctcga

SEQ ID NO: 39651 - DNA, 201 bp, Homo sapiens
agctacttgggaggctgaggcaggagaattgtttgaacccaggaggtggaggttgcagagagctgagatcgcgccattgcactccagcctgggaaacagarcaaaaactccatctcataaaatataaaaaataaaatcaaataaaatgctatgattttaattatctcttggaaagacatggtcttttattaagatccattt

SEQ ID NO: 39652 - DNA, 201 bp, Homo sapiens
agtagagacagggtttcatcatgttggccaggctggtctcgaactcctaacctcaggtgatccgcctgccttggcctcccaaagtgctgggattacaggcrtgaaccaccccgcccagcctcagaatgtgaacctttcatcaaagtaatctatgtaaagaaaaactgtatgttcctgtggatccagcaaaagggatttcct

SEQ ID NO: 39653 - DNA, 201 bp, Homo sapiens
tttaacctacctgattcttggcttcttcatctgtaaaatgaggacatctctcttatcaattgtgagaattagagattttatatatttttttatatatataracactatatgtacatagtgtctagaatttacacagtaggtggataatcaatattatctttaccaactttaggtttttgtattctaaaaaaatttaattaa

SEQ ID NO: 39654 - DNA, 201 bp, Homo sapiens
acacagggtcagtggaagttagaatgtgaacctttctttttctttttcttttttttgagatagagttttgctcttgttgcccaggctggagtacaatggcrcgatcttggcttactgcaacctctgtctcccgggttcaagcgactcccctgcctcagcctcctgagtagcggagattacaggggcgtgccaccacgcttg

SEQ ID NO: 39655 - DNA, 201 bp, Homo sapiens
cctgtccctactaaaaatacaaaaattagccaggtgtggtggcaggtgtctgtaatcccagctacttaggaggctgaggcaggagaatcacttgaacctgraaggtgaagcctgcagtgatcagagatcacgccattgcactctagcctgggcaacgagagcaaaactctgtctcaaaaaaaagaaagaaagaagtcctgg

SEQ ID NO: 39656 - DNA, 201 bp, Homo sapiens
gagtgcgatggcgctatcttggctcactgcaacctctgcctcccgggttcaagcaattatcctgcctcagcatcctgagtagctgggactacagaggtgcrccactatgcctggctaatttttgtatttttagtagaaacggggtttcaccatgttggccaggctggtactgaactcctgacctcaggtgatccacctgtc

SEQ ID NO: 39657 - DNA, 201 bp, Homo sapiens
caagctatgaatttggtttgctctatgtgtctctcatccttcttggaccaggagctacctgatagatgtccttctcacaaagatgacagaagtgcaagagwgcaaacctaactgtgcaggcatacttcaggtttttgctcacatcacattcaccaaaatgctcattggccaaagaaagccacatcacgaagaccaacctta

SEQ ID NO: 39658 - DNA, 201 bp, Homo sapiens
agagcaaagggatgtcttatgtggtggcaggcaagagagagcgtgtgcaggggaactcccctttataaaaccatcagatcttgtgagacttacttaatatyactagaacagcacgggaaagatttgtccccatgatccaattacctcccactgggtcactcccatgaattgggaattatgggaactacaattcaagatgag

SEQ ID NO: 39659 - DNA, 201 bp, Homo sapiens
cagttaagttttcttttctgtcacactgtcaggtactgcctaggtcccatgtaaatgtccacctaaagatctcaggcaacctcagaattctgaaaaattamaaatattagtgagacagtaggcaatttgattaggccctagaataaagcaaatagaaggaactttggaaggagaattctttcttgaaagaattctttaaca

SEQ ID NO: 39660 - DNA, 201 bp, Homo sapiens
tcctgctgtacaacctgctggttcctaacaggccatgggccagtactggtttatagtccaggggttggggacccctgatctaagggctcaacagttcctgrcacagcattcatgctcaataaacgttctctgcatgcatgaatggctggctacctcctacatcctgaatcctgctctcctggtggttttctcagcagccct

SEQ ID NO: 39661 - DNA, 201 bp, Homo sapiens
tgactgtaaatacagatgaagtttcacccgagtacccactgctctcctcctgctgtacaacctgctggttcctaacaggccatgggccagtactggtttayagtccaggggttggggacccctgatctaagggctcaacagttcctgacacagcattcatgctcaataaacgttctctgcatgcatgaatggctggctacc

SEQ ID NO: 39662 - DNA, 201 bp, Homo sapiens
gaggtaaaagtgtgtgtcttggagcaaaaaagatgtaggcttgaatcttggtttttccacttcctagtaatatgggttttcagcaagtctgttttttttttacattaattaatagactatttttagagtagtattgacagaaaaattgattataaagtacggagtttcctcttccctcccaatctcctctcccagtttccc

SEQ ID NO: 39663 - DNA, 201 bp, Homo sapiens
ctattccaaagtctgaatggtgtcatcttcttttaggttcttaccagatggatgtacactgtgaggaaagggtaccgagctgtcacttaccacaattggcrgcatgggttcaacgtggggcagaccatgtttactttgctgatggtaggtacagagggctgtaaatccttgtaaacctgcagatttcccatttgagcatga

SEQ ID NO: 39664 - DNA, 201 bp, Homo sapiens
agaacatgacagagttagcgtggagcatggatctttctaggcactggcaccgcctgccatttctagcttctcttctggagtctgaaggctccattctttcstgttgttgccagtaggccatccctattatttttctttgaaattaactttcccacttcactaattctgtcttttgttgtgcccgatcaactgttaaactcg

SEQ ID NO: 39665 - DNA, 201 bp, Homo sapiens
ccatataggaggtactagtatcccccactttaactgatgagctcaaaagatgaagttaaaccttccctaggttataggaagtagcaggattgaagttgccrtcttgcctccaggtttgcaggaaagatgcatgcagccacaccctgccctctgcattggcctggttttctttcatcattcctcctctgtaaactcaactgt

SEQ ID NO: 39666 - DNA, 201 bp, Homo sapiens
tggtgagcatgttggtttttggttttgccgagtggtttgagtgtaattcagtttgatagtttgagatgttaaagatgagaagatctgggggtaataaaagsaactgtgataagctaatacaaaaataaatgtaagccactcattttttctttcctacatgcaaacaacccacacctctttaaaaaaaccagctactgtaat

SEQ ID NO: 39667 - DNA, 201 bp, Homo sapiens
acctactgcctcatttaaccttcacagcacagtgaagggaggtgccatataggaggtactagtatcccccactttaactgatgagctcaaaagatgaagtyaaaccttccctaggttataggaagtagcaggattgaagttgccgtcttgcctccaggtttgcaggaaagatgcatgcagccacaccctgccctctgcatt

SEQ ID NO: 39668 - DNA, 201 bp, Homo sapiens
gcgtttaggagctggatatggttggccaaaaaatggtcaatgattattgcctgttttaaaacaagttgaaggcaggaagacttttttttttttttttttttgagacggagtctcgctctgtcacaaggctggagtgcaatggcttgatctcggctcactgcaacctctgcctcccaagttagagccattctcctgcctcag

SEQ ID NO: 39669 - DNA, 201 bp, Homo sapiens
taatggcaaagcacaagaatatgaactggtagcaaatgaatatttcctgaaacactgagaagcagtcagcaaagcttattttggaagctttaacaaatacrcatgaagttctttcacacgcatgtgatatattctctattactgattttgtccttggttcgtatgatggtgtaagtacataaatatttcttattgttttcc

SEQ ID NO: 39670 - DNA, 201 bp, Homo sapiens
ttaaaaattcagggcacaaacccctctccgctgcagatgagtcccagtatccttgagcaccggtgggatgatcattcagacattcacacacttaccttctyaaaggaaggttcagtcttcacccacagtactacaatactcacaacaaataaagtgaacttgctccagaaacctagtgggcctattctctattgcaggctg

SEQ ID NO: 39671 - DNA, 201 bp, Homo sapiens
ctaatggcaaagcacaagaatatgaactggtagcaaatgaatatttcctgaaacactgagaagcagtcagcaaagcttattttggaagctttaacaaatasgcatgaagttctttcacacgcatgtgatatattctctattactgattttgtccttggttcgtatgatggtgtaagtacataaatatttcttattgttttc

SEQ ID NO: 39672 - DNA, 201 bp, Homo sapiens
aggggctctgagtgatattatccttctgcaaagagcattagagtttcttctggcaggtgagagaattgttttagatttcatttggaatgatcttttttggytttattcctactattagggtggagcccttgtttctagaaagtggctcctctggaatccatgaaatcctgggatatttacgaagaccccaagaccttgaat

SEQ ID NO: 39673 - DNA, 201 bp, Homo sapiens
aatttcttggatggtctcttttaaatactgacacctacgataagatgaataagctagaaaacagaaaggacattgctcaggaaatgctcatgaaccaaacsaaagccactcctgaagaaattaagtccattttggtaagtgggaaattcagtcctgtggacataagatgttacctaaccacatattctagaagtcatctaa

SEQ ID NO: 39674 - DNA, 201 bp, Homo sapiens
agtgatttaattagcagcagggaagccatcttgaatgagttgttagcagctgtggcctagttgaggtccatttgcccgcaagcagtcaagagccgtgtagraaatcctcactcccaatgcgttctttcttattctgctttgtggatcaagagggctccactacacaatatttcagaccatttgtctcctcttgccttccag

SEQ ID NO: 39675 - DNA, 201 bp, Homo sapiens
tttcagaccatttgtctcctcttgccttccagatctgtaacatgatgaatgcccctgcggatgaatacttcacatttcaggtaactgcactctgggtcagrcctcacctcttggggctggggtagaggagtggatgctctcgcctctcctccacccccagagtccgcctgatgctcaggtgtggccacaggcacacacggg

SEQ ID NO: 39676 - DNA, 201 bp, Homo sapiens
aaatgtactgtagttgtctaaccatcattaccattgtgtgaaactgggtgaagggtacctgaaatctctctgtacatttcttttgtaatatcctgtgaatytatgattatttcaaactaaaaaggcaaaaaaataacttgaggtcccttctcgtttgtagaaaggacctgtagacgaaactggttgggtcattaagaatgt

SEQ ID NO: 39677 - DNA, 201 bp, Homo sapiens
tatatatatatagtatatatatagtatgtatatagtactatatatatactatatatagtacatatatatagtgtatatatatagtacatatatagtatatytatatagtatatatagtatatatatacactatatcgatatagtatatatataatggaatattattcagccaccaaaataatgaaatcttgtcatttgcag

SEQ ID NO: 39678 - DNA, 201 bp, Homo sapiens
atatatatatagtatatatatagtatgtatatagtactatatatatactatatatagtacatatatatagtgtatatatatagtacatatatagtatattkatatagtatatatagtatatatatacactatatcgatatagtatatatataatggaatattattcagccaccaaaataatgaaatcttgtcatttgcagc

SEQ ID NO: 39679 - DNA, 201 bp, Homo sapiens
accaatggaatactatgcagccatacaaaaaacaaaatcatgtcctatgcagcaacatggatgcagctggaggccattatcctaagtgaattaatgcaggwacagaaaaccaaataccacatgttcttacttataagtgagagctaaacattgagtatacatggacacaatgatgggaacaataggcactggggcctccac

SEQ ID NO: 39680 - DNA, 201 bp, Homo sapiens
cctgatgctcaggtgtggccacaggcacacacgggtccatctcccactcaccctggctgggccagcaagtagcagattcttcagtgaaggaagaaaagaargttaagacagaaggccagggaggggacctgccactcctccatttgctcacactcctggtcatttacggcagtggtccccaacctttttggcaccagggac

SEQ ID NO: 39681 - DNA, 201 bp, Homo sapiens
ataaaaacgagttgaacttagacgtattaaaataatctaaaatgatatttcctctttattgttcaaaatcagagcactaagttggtcttacacttttagcmaaaaagtctattagagcatgttgcgagctttttgcaaacccatgattaggataaccccaacacgtagagctaacatttgggaattgcattatctggtggc

SEQ ID NO: 39682 - DNA, 201 bp, Homo sapiens
cttctctaaaacaaatgttcctggcacaaaataccatttccgtcttctctgttctaattgaaagggagatttcaatcagcagttgaactaacattggcatycattgacttatatagaaagaaagactccgttaatgtgtgtaaatgacctgtgtacacttttggcttctttattgtaagtaaccagggtgacatagcaaaa

SEQ ID NO: 39683 - DNA, 201 bp, Homo sapiens; identical to SEQ ID NO: 6075

SEQ ID NO: 39684 - DNA, 201 bp, Homo sapiens; identical to SEQ ID NO: 6077

SEQ ID NO: 39685 - DNA, 201 bp, Homo sapiens
ttaatggaatatattttaaaacttatttccaacctcaaaattaattttctgcaactaaggacctgcataatacctagtaagcctttggggttttgcagagkaggtcgattctaaaaatgggtgtttaaattacttaagagttctattttttttcttcccacacaggctgaggacaatgtgtgtgtcaagaaaataagaacc

SEQ ID NO: 39686 - DNA, 201 bp, Homo sapiens
gttaatggaatatattttaaaacttatttccaacctcaaaattaattttctgcaactaaggacctgcataatacctagtaagcctttggggttttgcagakgaggtcgattctaaaaatgggtgtttaaattacttaagagttctattttttttcttcccacacaggctgaggacaatgtgtgtgtcaagaaaataagaac

SEQ ID NO: 39687 - DNA, 201 bp, Homo sapiens
acattttttagtttgtgaaaatgtgtgcatcgatgaagaaattttattatgaattagcttaaaaatgcattaggaacttctgtatgaaaagatcacattayttaagtgtaaaaaaactgcataataaaagcagttcaagtcaagaaaaacaatgttaatggaatatattttaaaacttatttccaacctcaaaattaattt

SEQ ID NO: 39688 - DNA, 201 bp, Homo sapiens; identical to SEQ ID NO: 6081

SEQ ID NO: 39689 - DNA, 201 bp, Homo sapiens; identical to SEQ ID NO: 6082

SEQ ID NO: 39690 - DNA, 201 bp, Homo sapiens; identical to SEQ ID NO: 6083

SEQ ID NO: 39691 - DNA, 201 bp, Homo sapiens; identical to SEQ ID NO: 6085

SEQ ID NO: 39692 - DNA, 201 bp, Homo sapiens
ttattggaattttgtggatgtcttctcatttctttagggaatatccctgcgctccagacgccaaaataagactgaggcagaacagcaaataactgaggtcwttgtattagcagaaagaatagaaataaacagaaatgaaaagaagcccatgaagacctccccagagatggacattcagaatccagatgatggagcccggaa

SEQ ID NO: 39693 - DNA, 201 bp, Homo sapiens; identical to SEQ ID NO: 6089

SEQ ID NO: 39694 - DNA, 201 bp, Homo sapiens; identical to SEQ ID NO: 6090

SEQ ID NO: 39695 - DNA, 201 bp, Homo sapiens
tatcttcatgcaagattttataatttagaaataattcctaagtgtttggtcacatgacctgggtaggaagagagattcttagactccaaaggttcagatgragaacagacaggccattgcatagtttattcaaatttttaagatcacaggctagaacaggaacactgaagactccaagaacctactaacaaactcttctga

SEQ ID NO: 39696 - DNA, 201 bp, Homo sapiens
gcagaatcagaaagggaaaggagaagcaggaaattcagactccatgtgcctgagatcaagaaagacaaaaagccagcctgcagcaagcactttggagagcraatctgtgcagagagtaacgcggagtgtcaagagatgtgcagaaaatccaaagaaggtaagccatttactgtttccctgttttaaaagacacagaatgtt

SEQ ID NO: 39697 - DNA, 201 bp, Homo sapiens; identical to SEQ ID NO: 6092

SEQ ID NO: 39698 - DNA, 201 bp, Homo sapiens
attagttacatatttccccttcttttcacttgcaggcaatattacataatttcagttccacaaatccaacacaagtaaatgggtctgttattgatgagccwgtacggctaaaacatggagatgtaataactattattgatcgttccttcaggtaggtaaaagctgattggtctaacagtaaatgtcatcttctgattaacc

SEQ ID NO: 39699 - DNA, 201 bp, Homo sapiens
ctttttgtttgtttgtttgtttgtttttgagacagagtcttgctctgtcacccaggctggagtgcagtggtgtgatcttggctcactgcaacctccgcctyccgggttcaagtgattctcatgcctcagcctaccaagtagctgggattacaggcacgcgccacaacacccggctaatttttgcaatttttagtagagacg

SEQ ID NO: 39700 - DNA, 201 bp, Homo sapiens; identical to SEQ ID NO: 6094

SEQ ID NO: 39701 - DNA, 201 bp, Homo sapiens
ctcaaacagtctttaaaagtcatatacgagtggtttggtaaagaaaacaattttttattgtttttatttttattttttgagacagagtctcgctttattgyccaggctagagtgcagtggtgcaatctctgctcactgcaacctctgcctcccgggttccagcaattctcctgcctcggccacctgagtagctgggactac

SEQ ID NO: 39702 - DNA, 201 bp, Homo sapiens
gtcctgcaaaacagcccctgcttccagcagcaaatctcagacagaggttcctaagagaggagggagaaagagtggcaacctgccttcaaagagagtgtctmtcagccgaagtcaacatgatattttacagatgatatgttccaaaagaagaagtggtgcttcggaagcaaatctgattggttagtctgacattagaataca

SEQ ID NO: 39703 - DNA, 201 bp, Homo sapiens
aatgtaatttctttattgtatatgaagaaactgatgcacagaagtgctagcatcaaataagcacatttggggatgattaaacctctaaacatatttaacaytacaaacaaacgtttttgaaaaagcacagagtattaaaaatagtcattatccaaaattgatgtaagtattcctttgtgtcttttaagtatagcttttcat

SEQ ID NO: 39704 - DNA, 201 bp, Homo sapiens
tcaagaaagacaaaaagccagcctgcagcaagcactttggagagcgaatctgtgcagagagtaacgcggagtgtcaagagatgtgcagaaaatccaaagarggtaagccatttactgtttccctgttttaaaagacacagaatgttttgatgtattttttgcccaaggttgcaaaggcaaacaaaaagcattatcttcaac

SEQ ID NO: 39705 - DNA, 201 bp, Homo sapiens
gggtgggcatcctaccaggctcagggcagcccccacaatacagaagcatctggcccaagatgtcaacagtgccaaagctcagaaacacccatctatagtcrtcctcctgccaaacaaattctcagttgtaagggatagtctttcctttgctctgatgtcctgttaccttaaaatcaaattattttattggggttaaggaag

SEQ ID NO: 39706 - DNA, 201 bp, Homo sapiens; identical to SEQ ID NO: 6097

SEQ ID NO: 39707 - DNA, 201 bp, Homo sapiens
atataggacaggggcatgcgctgtcatcgcggaggagaggtcagggtgggcatcctaccaggctcagggcagcccccacaatacagaagcatctggcccawgatgtcaacagtgccaaagctcagaaacacccatctatagtcgtcctcctgccaaacaaattctcagttgtaagggatagtctttcctttgctctgatgt

SEQ ID NO: 39708 - DNA, 201 bp, Homo sapiens; identical to SEQ ID NO: 6098

SEQ ID NO: 39709 - DNA, 201 bp, Homo sapiens
ggcaggcgtctgaagacactgtgcgcccccgggtgcctccacagtgggcatccctggccactggggacacagagaatgaaggaaggaagccatacacttgyctcttggctccttgtggcaataggaaaatgggacagaaagtcttcctgcctggaattcgagaacgtttcctcttatattgctgtcctgtttggtggtggt

SEQ ID NO: 39710 - DNA, 201 bp, Homo sapiens; identical to SEQ ID NO: 6099

SEQ ID NO: 39711 - DNA, 201 bp, Homo sapiens; identical to SEQ ID NO: 6100

SEQ ID NO: 39712 - DNA, 201 bp, Homo sapiens
tcctctcccttagccaaggggtgagaactactgcaagagtaaaggccaaggcaggtcccctgcatgcaagttgggcatgcttctgtctacaggggttcctyggtttaggagacccaaaagacttaatcctggttggattcactttttctgagtgacattttttagtttgtgaaaatgtgtgcatcgatgaagaaattttat

SEQ ID NO: 39713 - DNA, 201 bp, Homo sapiens
gctcacgtgtggggtcttgttaggaggacccagaggtcagctaacttcatttgtttcctttccaagaaaagcaaagcgaagagcataacatatcttctctktgctctcttttttacaaaatgagtacattattaatggaatcactctttttatgaggcctatgtaccaggatttcaagggaggaatctactgttatttccc

SEQ ID NO: 39714 - DNA, 201 bp, Homo sapiens
ttttttccagtaagaagcttgtagccatgcttttcaccatggttcctctcccttagccaaggggtgagaactactgcaagagtaaaggccaaggcaggtcycctgcatgcaagttgggcatgcttctgtctacaggggttccttggtttaggagacccaaaagacttaatcctggttggattcactttttctgagtgacat

SEQ ID NO: 39715 - DNA, 201 bp, Homo sapiens; identical to SEQ ID NO: 6103

SEQ ID NO: 39716 - DNA, 201 bp, Homo sapiens
tcacacacaagcacccaggagacgcccaacacacacatgctcctctttgccgagctcttcggtgggtgtcggtagtcctagaaaatgcatatataagatasattttttccagtaagaagcttgtagccatgcttttcaccatggttcctctcccttagccaaggggtgagaactactgcaagagtaaaggccaaggcaggt

SEQ ID NO: 39717 - DNA, 201 bp, Homo sapiens; identical to SEQ ID NO: 6105

SEQ ID NO: 39718 - DNA, 201 bp, Homo sapiens
gaagagctgaacagcaacgacatgaaaaccaacaaagaggaacacaaattacaagactcggtccctgaaaataaggtgagaggaagtattacagcatcacycaatatcgtcttggatagttgtgaatttctgtgttatactttgcatgtaacctgacgttataagtggttatcctttccccagagggtttcctttaacact

SEQ ID NO: 39719 - DNA, 201 bp, Homo sapiens; identical to SEQ ID NO: 6106

SEQ ID NO: 39720 - DNA, 201 bp, Homo sapiens; identical to SEQ ID NO: 6107

SEQ ID NO: 39721 - DNA, 201 bp, Homo sapiens; identical to SEQ ID NO: 6108

SEQ ID NO: 39722 - DNA, 201 bp, Homo sapiens; identical to SEQ ID NO: 6110

SEQ ID NO: 39723 - DNA, 201 bp, Homo sapiens
tctgccttagcagtgatggttaaaggaataggaattcatttactccctgtaaatgaatgaataacggaccttctttctataatgtaaactgtaaaaattasatttgatatatatcttattaggcattgttattgaaatttatcctgaattccttatttataatttgtcagcagagacagtcatttctccataggagcaaag

SEQ ID NO: 39724 - DNA, 201 bp, Homo sapiens
aacaagatattatccaaattgagataaattcagatgattaaagacatccaacaaagatttgaaagtgaatcttagaaagagagacttgattccaaactctytaccatgagaaataatatcagatgtgtgactgcttcagatcttacttaggttgcctataaattcaaatcaggtcatttcactgaggccaaaagttttcat

SEQ ID NO: 39725 - DNA, 201 bp, Homo sapiens
tttccatgtcacaatataggacaggggcatgcgctgtcatcgcggaggagaggtcagggtgggcatcctaccaggctcagggcagcccccacaatacagawgcatctggcccaagatgtcaacagtgccaaagctcagaaacacccatctatagtcgtcctcctgccaaacaaattctcagttgtaagggatagtctttcc

SEQ ID NO: 39726 - DNA, 201 bp, Homo sapiens
gtgctccctgttgaattttgaagtttgttttactaattattggaattttgtggatgtcttctcatttctttagggaatatccctgcgctccagacgccaarataagactgaggcagaacagcaaataactgaggtctttgtattagcagaaagaatagaaataaacagaaatgaaaagaagcccatgaagacctccccaga

SEQ ID NO: 39727 - DNA, 201 bp, Homo sapiens; identical to SEQ ID NO: 6113

SEQ ID NO: 39728 - DNA, 201 bp, Homo sapiens; identical to SEQ ID NO: 6115

SEQ ID NO: 39729 - DNA, 201 bp, Homo sapiens
cagactccatgtgcctgagatcaagaaagacaaaaagccagcctgcagcaagcactttggagagcgaatctgtgcagagagtaacgcggagtgtcaagagrtgtgcagaaaatccaaagaaggtaagccatttactgtttccctgttttaaaagacacagaatgttttgatgtattttttgcccaaggttgcaaaggcaaa

SEQ ID NO: 39730 - DNA, 201 bp, Homo sapiens; identical to SEQ ID NO: 6297

SEQ ID NO: 39731 - DNA, 201 bp, Homo sapiens; identical to SEQ ID NO: 6117

SEQ ID NO: 39732 - DNA, 201 bp, Homo sapiens; identical to SEQ ID NO: 6118

SEQ ID NO: 39733 - DNA, 201 bp, Homo sapiens
aaagtgcggggattaccggcgtgagccaccgcgtcccgcctgtttttaatttttagcagttttaaatcttctggcaatgagtaatgttatagtgtcccagrtgtttggtcctttaagaaaaggatagcaggacgggttatctcggtgggagcgtgttccacctctgccctccgccagccgccctcgccggggatgcaccca

SEQ ID NO: 39734 - DNA, 201 bp, Homo sapiens; identical to SEQ ID NO: 6120

SEQ ID NO: 39735 - DNA, 201 bp, Homo sapiens
agaaacctaaaattgattaaggaagttagattctttgcctttgttaatattttttagatattttcttaataatccagatgataagcttttcttcctttggsgcatcagacttttataaaagttatatatatatgttattctttagttcttccacccttccggaaataattccatatgaaggaaagttagggcgctgtctct

SEQ ID NO: 39736 - DNA, 201 bp, Homo sapiens
ttcgacagcaattttgtggctattgaatgtaatcgtacaacaaaagtgagattatatactttacatattcataattttattagtggttcatttatattgtktagtcataagattcttgttccacttcagattggaaataaaaaaccatccctcacatagatagttttagaagcaaggtgttacgtatcaagaaacctaaaa

SEQ ID NO: 39737 - DNA, 201 bp, Homo sapiens; identical to SEQ ID NO: 6121

SEQ ID NO: 39738 - DNA, 201 bp, Homo sapiens
gaccaggctggtcttgaactcctaacctcgtgatccacccacctgggcctcccaaagtgctgggattacaggcttgagccaccatgcccagtccatttctrccatttaagtactgccttcttccctagaggagcagccttaatgttgaatctgatggtcatcagttcccgtgctggaagccagtttctgaggcatcccaca

SEQ ID NO: 39739 - DNA, 201 bp, Homo sapiens; identical to SEQ ID NO: 6122

SEQ ID NO: 39740 - DNA, 201 bp, Homo sapiens
tgtcgacacgtgcttcgcaatttagatagtttgagtatatcagtgtggaagaggtattttagttgtacagcttattaaaacacagttgtcggcatgtgctyggaaatttagtgggatttaggcttaggatgagccctgagaattcatatttttcctacattttagagtgctcctaaagctagtttcagatgagctccttgg

SEQ ID NO: 39741 - DNA, 201 bp, Homo sapiens; identical to SEQ ID NO: 6123

SEQ ID NO: 39742 - DNA, 201 bp, Homo sapiens
acattaagtggatatggagacttccgccccagggtataaatttttaatcaggatctttgtcgttctataaactgcaggtatgaaaatgaaagtcttcagartggaaggaagtcaactgaatttccaagaaaaatacgtgaacaggtgatagaaaatatccaagtttgggctgattcgtttcgatgatatgaaatcatttat

SEQ ID NO: 39743 - DNA, 201 bp, Homo sapiens; identical to SEQ ID NO: 6125

SEQ ID NO: 39744 - DNA, 201 bp, Homo sapiens
atgttagtacagtactccagttcccctctgcttgctgtttgcatggtatatcttttcccatgcttttattttaaaagattgtgtctttgaatcaaaattgygtctcttgtagacaacgtattagttgggtcatttaaaaatccattctgctaaatgaatctctgttattgtcttcatttgtattagctgttttttaatgca

SEQ ID NO: 39745 - DNA, 201 bp, Homo sapiens
gatttgggtgcaaataattatgcagagggaggttgaccttgtcctaaaggagtttgttattttcttccaagtgttttgaaactgcatgagatttttctatycttttttattttaaagcaaaatatacacagagaaaaaggtacaaaacaagatggacaggtcaatttatcatgtgaacacccttttgatcaccacctatta

SEQ ID NO: 39746 - DNA, 201 bp, Homo sapiens
ggatgtcaaagtatttcaggttttcattctcaacactaatcttaatttaaaaggatatggatctaggaagatgactaattgggacaaaatgtgatggaatwcaaggatttgggtgcaaataattatgcagagggaggttgaccttgtcctaaaggagtttgttattttcttccaagtgttttgaaactgcatgagattttt

SEQ ID NO: 39747 - DNA, 201 bp, Homo sapiens
tctatgttctggatactgtcaccaagaccaggactgggttaaaaatcctatctatgtcactattttaactatcagaacaatatcaataaggaatgtgtatycttgagaaggggaaactgtctggactgttagatagagaggctcccactgcatgcagagaagtttggggaaactccagaaatggcaatttcctgttctgcc

SEQ ID NO: 39748 - DNA, 201 bp, Homo sapiens; identical to SEQ ID NO: 6127

SEQ ID NO: 39749 - DNA, 201 bp, Homo sapiens
tgtttaaaaaattgatcagaggataggtgggtggttcagttctatgttctggatactgtcaccaagaccaggactgggttaaaaatcctatctatgtcacyattttaactatcagaacaatatcaataaggaatgtgtattcttgagaaggggaaactgtctggactgttagatagagaggctcccactgcatgcagagaa

SEQ ID NO: 39750 - DNA, 201 bp, Homo sapiens
aaaggtacaaaacaagatggacaggtcaatttatcatgtgaacacccttttgatcaccacctattatggactgatttgtgctctcccgaaattcatatttkgaattcctaacccctcgtaccttaggatgtaactgtatttggaaagagggcatttaaaaaggcaatgaaggctttttgagctattagtatgggccctaat

SEQ ID NO: 39751 - DNA, 201 bp, Homo sapiens
gctttttaaaaatgctgttgtctaatcactacttcattccctcagcaagtaaaccaccgttttggcttttaggatatcataaacgtctcgagtttcactayctaagcatggatctctgaacacgatagttttgtctgttcttataaaagtccttaacagtgatacaagaatgtatacatttgtgcctggcttgtgcttttc

SEQ ID NO: 39752 - DNA, 201 bp, Homo sapiens; identical to SEQ ID NO: 6129

SEQ ID NO: 39753 - DNA, 201 bp, Homo sapiens
tgtgtaattgaaaactgtattctacagtgtctcatatatatgtaatatataattatatattatatatatcacttatataatatataattataatatattayatataatcatatataattataatatattataatatataatattatatagtatatactatatgttatatagtaatatataatataataatatatattatat

SEQ ID NO: 39754 - DNA, 201 bp, Homo sapiens; identical to SEQ ID NO: 6132

SEQ ID NO: 39755 - DNA, 201 bp, Homo sapiens; identical to SEQ ID NO: 6131

SEQ ID NO: 39756 - DNA, 201 bp, Homo sapiens; identical to SEQ ID NO: 6134

SEQ ID NO: 39757 - DNA, 201 bp, Homo sapiens
tagtttgagtatatcagtgtggaagaggtattttagttgtacagcttattaaaacacagttgtcggcatgtgcttggaaatttagtgggatttaggcttargatgagccctgagaattcatatttttcctacattttagagtgctcctaaagctagtttcagatgagctccttggaatatcttggcttaggagagttatct

SEQ ID NO: 39758 - DNA, 201 bp, Homo sapiens
gtgaatctaggctctcagatccaccctaagtatccaccagccaagagggcgcacatgccaagtggagcctcagttcatcgacaggtcctatggcccatttrtgagaaaactgatgacgcagtcagtagttctgagctcgtggggggttacagatcttcagtataggtgatgtttaatattgactttggttcttccgcaata

SEQ ID NO: 39759 - DNA, 201 bp, Homo sapiens
caatgacacagggcatggcaacctttggaggaaccttctgaagcagtatttttaccttctatgatcatttcagcatctaactttgcttaatgatgaccccrctatagcaccaaataacattattcttaattgtgcatggctcttataagacagatttatagacacataagtagcctcatgtcgttcagtgaatacgaagct

SEQ ID NO: 39760 - DNA, 201 bp, Homo sapiens
agcttcaccaggattgcaagaatagaggcgtgctgtaggtactgtgtttcgatgacttttcacttggtttgtctttaatgctaacgtgaaataaatcactwgtcttggtatgttttttcattgctctttccacatttgtatccgttactttagatgagagtgacggaatacctttgaaaagaaggcgtgtgtcctttggtg

SEQ ID NO: 39761 - DNA, 201 bp, Homo sapiens; identical to SEQ ID NO: 6139

SEQ ID NO: 39762 - DNA, 201 bp, Homo sapiens; identical to SEQ ID NO: 6141

SEQ ID NO: 39763 - DNA, 201 bp, Homo sapiens; identical to SEQ ID NO: 6140

SEQ ID NO: 39764 - DNA, 201 bp, Homo sapiens; identical to SEQ ID NO: 6142

SEQ ID NO: 39765 - DNA, 201 bp, Homo sapiens; identical to SEQ ID NO: 6143

SEQ ID NO: 39766 - DNA, 201 bp, Homo sapiens; identical to SEQ ID NO: 6144

SEQ ID NO: 39767 - DNA, 201 bp, Homo sapiens; identical to SEQ ID NO: 6145

SEQ ID NO: 39768 - DNA, 201 bp, Homo sapiens
ttcggcacaaactaggaagcttcaactgccaagaaaaggaaagattcccaggtgtccccagtacctgctgcatagccaggcagccagtggagggggagggmttgtgtgtctggatggtgggcaggaagtcctagtggggagatgcccatagactgttccagagagggaagaggagaggctcaagaagggcactgatgccca

SEQ ID NO: 39769 - DNA, 201 bp, Homo sapiens; identical to SEQ ID NO: 6146

SEQ ID NO: 39770 - DNA, 201 bp, Homo sapiens; identical to SEQ ID NO: 6147

SEQ ID NO: 39771 - DNA, 201 bp, Homo sapiens; identical to SEQ ID NO: 6148

SEQ ID NO: 39772 - DNA, 201 bp, Homo sapiens; identical to SEQ ID NO: 6149

SEQ ID NO: 39773 - DNA, 201 bp, Homo sapiens
aggtcaatgaacaaaaggcaaagaagacctgctactccaaaggtaggggcctcactgaatggctgctttacacataccggtgtcatcgaagcttgcattcwgtgtggatttatgctttaatgtcctgtttacctccttcctgttttctacagaagcctgtgggcgaagttcacagtcaatttagtacaggccacgcaaact

SEQ ID NO: 39774 - DNA, 201 bp, Homo sapiens; identical to SEQ ID NO: 6150

SEQ ID NO: 39775 - DNA, 201 bp, Homo sapiens
ctgtgtttcgatgacttttcacttggtttgtctttaatgctaacgtgaaataaatcactagtcttggtatgttttttcattgctctttccacatttgtatycgttactttagatgagagtgacggaatacctttgaaaagaaggcgtgtgtcctttggtgggcacctaagacctgaactatttgatgaaaacttgcctcct

SEQ ID NO: 39776 - DNA, 201 bp, Homo sapiens; identical to SEQ ID NO: 6153

SEQ ID NO: 39777 - DNA, 201 bp, Homo sapiens
ttggtttgtctttaatgctaacgtgaaataaatcactagtcttggtatgttttttcattgctctttccacatttgtatccgttactttagatgagagtgasggaatacctttgaaaagaaggcgtgtgtcctttggtgggcacctaagacctgaactatttgatgaaaacttgcctcctaatacgcctctcaaaaggggag

SEQ ID NO: 39778 - DNA, 201 bp, Homo sapiens; identical to SEQ ID NO: 6155

SEQ ID NO: 39779 - DNA, 201 bp, Homo sapiens
cacccttctggggtcttagtgttcagggaagataaagctgttttggcttgcaaagacaagtctctgctaatttttgggatcacatgtcctgcatgaaatargtgtggaaatgtcaaatgcatgtctttaccctggagagcagcgtatacatagaaagctggaaggtgctttacagtgaagagagttaacttgttaatctgc

SEQ ID NO: 39780 - DNA, 201 bp, Homo sapiens
gatgggagatgagaatctgtctaatctctcatttggcactggtcactgtattcctgtcacagagggaacagcttgctaccctgaagatgtttgcggtaggyaaatatttcctgtgtaatatggaccctaaccacataaggataatccatgttattttattggcgatttaaggcaagaaacagctgtttgtttctaatgttt

SEQ ID NO: 39781 - DNA, 201 bp, Homo sapiens
tgtttgcggtaggtaaatatttcctgtgtaatatggaccctaaccacataaggataatccatgttattttattggcgatttaaggcaagaaacagctgttygtttctaatgtttgaaggaaaaaatgcctatatttacgtcaatgacacagggcatggcaacctttggaggaaccttctgaagcagtatttttaccttcta

SEQ ID NO: 39782 - DNA, 201 bp, Homo sapiens
tataagacagatttatagacacataagtagcctcatgtcgttcagtgaatacgaagctaaatatttagttttttaccatattttatgaggctgtaatactygattgacatgagacactaatagaatgtttttattgtgtatgtttttatttcaggaggaaatgtgttcttcagtgcacagaatgcagcaaaacagccatct

SEQ ID NO: 39783 - DNA, 201 bp, Homo sapiens; identical to SEQ ID NO: 6158

SEQ ID NO: 39784 - DNA, 201 bp, Homo sapiens; identical to SEQ ID NO: 6159

SEQ ID NO: 39785 - DNA, 201 bp, Homo sapiens; identical to SEQ ID NO: 6161

SEQ ID NO: 39786 - DNA, 201 bp, Homo sapiens
tgttaaggcttcttgtaaacaattttgtcttgtcaggaacagcctcaaccatcaggaaaacaagagtcaggttcagaaatccatgtggaagtgaaggcacmaagcttggttataagccctccagctcctagtcctaggaaaactccagttgccagtgatcaacgccgtaggtcctgcaaaacagcccctgcttccagcagc

SEQ ID NO: 39787 - DNA, 201 bp, Homo sapiens
tatcttactaatctgccttgtgtaattgaaaactgtattctacagtgtctcatatatatgtaatatataattatatattatatatatcacttatataatayataattataatatattatatataatcatatataattataatatattataatatataatattatatagtatatactatatgttatatagtaatatataata

SEQ ID NO: 39788 - DNA, 201 bp, Homo sapiens
catatatatgtaatatataattatatattatatatatcacttatataatatataattataatatattatatataatcatatataattataatatattatamtatataatattatatagtatatactatatgttatatagtaatatataatataataatatatattatatataccatatagtatatactgtatacagtatat

SEQ ID NO: 39789 - DNA, 201 bp, Homo sapiens
tgcagaatctgtgaatataccatgtgtgcctgtaccatgaatttacctagggtgaatctaggctctcagatccaccctaagtatccaccagccaagagggygcacatgccaagtggagcctcagttcatcgacaggtcctatggcccatttgtgagaaaactgatgacgcagtcagtagttctgagctcgtggggggttac

SEQ ID NO: 39790 - DNA, 201 bp, Homo sapiens
actgggctcctgtgaattgactcagaaccacctggaggagtttttacagctcatgcattctggtcactgggtggctcaggctgagacccaagtgcatgtctttagagagttctctggctgtcgtccccctactctaaggtgaaatctgctgctgcagactcctcctttctatgtccacacataatgtttcaatgttttaaa

SEQ ID NO: 39791 - DNA, 201 bp, Homo sapiens; identical to SEQ ID NO: 6074

SEQ ID NO: 39792 - DNA, 201 bp, Homo sapiens
ctgggctcctgtgaattgactcagaaccacctggaggagtttttacagctcatgcattctggtcactgggtggctcaggctgagacccaagtgcatgtctttagagagttctctggctgtcgtccccctactctaaggtgaaatctgctgctgcagactcctcctttctatgtccacacataatgtttcaatgttttaaag

SEQ ID NO: 39793 - DNA, 201 bp, Homo sapiens
tctatgtcactattttaactatcagaacaatatcaataaggaatgtgtattcttgagaaggggaaactgtctggactgttagatagagaggctcccactgyatgcagagaagtttggggaaactccagaaatggcaatttcctgttctgccttagcagtgatggttaaaggaataggaattcatttactccctgtaaatga

SEQ ID NO: 39794 - DNA, 201 bp, Homo sapiens
tttgaagtttgttttactaattattggaattttgtggatgtcttctcatttctttagggaatatccctgcgctccagacgccaaaataagactgaggcagracagcaaataactgaggtctttgtattagcagaaagaatagaaataaacagaaatgaaaagaagcccatgaagacctccccagagatggacattcagaat

SEQ ID NO: 39795 - DNA, 201 bp, Homo sapiens
aggcgtgctgtaggtactgtgtttcgatgacttttcacttggtttgtctttaatgctaacgtgaaataaatcactagtcttggtatgttttttcattgctstttccacatttgtatccgttactttagatgagagtgacggaatacctttgaaaagaaggcgtgtgtcctttggtgggcacctaagacctgaactatttga

SEQ ID NO: 39796 - DNA, 201 bp, Homo sapiens; identical to SEQ ID NO: 6258

SEQ ID NO: 39797 - DNA, 201 bp, Homo sapiens; identical to SEQ ID NO: 6078

SEQ ID NO: 39798 - DNA, 201 bp, Homo sapiens
tcagaagttaatctgggtccccagcctctgacagtggtatttcaaaacaaactcgatgcaactaatcctagtttttagtgtaaaagcacttttctaactcwaaatttatttctttgtataaggtgatgtcttgaactaaacccaaagtttgttcgttgatccttggacattaagtggatatggagacttccgccccagggt

SEQ ID NO: 39799 - DNA, 201 bp, Homo sapiens; identical to SEQ ID NO: 6079

SEQ ID NO: 39800 - DNA, 201 bp, Homo sapiens; identical to SEQ ID NO: 6080

SEQ ID NO: 39801 - DNA, 201 bp, Homo sapiens; identical to SEQ ID NO: 6084

SEQ ID NO: 39802 - DNA, 201 bp, Homo sapiens; identical to SEQ ID NO: 6086

SEQ ID NO: 39803 - DNA, 201 bp, Homo sapiens; identical to SEQ ID NO: 6087

SEQ ID NO: 39804 - DNA, 201 bp, Homo sapiens
ctaagctaatgaactttaagtgctactgaaatcacatcaagttgagccactcataattacaagcatgtggacaaatccataagaatgattagattccattrgtgttcttctggggaatacttggtttagctaaaataaaaataggttgaattgctccctttttgtgagcaattcacaaaaatataatataaatttaattct

SEQ ID NO: 39805 - DNA, 201 bp, Homo sapiens
tgcaactaatcctagtttttagtgtaaaagcacttttctaactctaaatttatttctttgtataaggtgatgtcttgaactaaacccaaagtttgttcgtygatccttggacattaagtggatatggagacttccgccccagggtataaatttttaatcaggatctttgtcgttctataaactgcaggtatgaaaatgaaa

SEQ ID NO: 39806 - DNA, 201 bp, Homo sapiens; identical to SEQ ID NO: 6101

SEQ ID NO: 39807 - DNA, 201 bp, Homo sapiens; identical to SEQ ID NO: 6102

SEQ ID NO: 39808 - DNA, 201 bp, Homo sapiens; identical to SEQ ID NO: 6104

SEQ ID NO: 39809 - DNA, 201 bp, Homo sapiens; identical to SEQ ID NO: 6109

SEQ ID NO: 39810 - DNA, 201 bp, Homo sapiens
agagaagtttgaggacttctgcaaaaagaattgaacctgcggaagagctgaacagcaacgacatgaaaaccaacaaagaggaacacaaattacaagactcrgtccctgaaaataaggtgagaggaagtattacagcatcactcaatatcgtcttggatagttgtgaatttctgtgttatactttgcatgtaacctgacgtt

SEQ ID NO: 39811 - DNA, 201 bp, Homo sapiens
tgtgttctgccgggggcgttccagcctcttctcacacacaagcacccaggagacgcccaacacacacatgctcctctttgccgagctcttcggtgggtgtyggtagtcctagaaaatgcatatataagatagattttttccagtaagaagcttgtagccatgcttttcaccatggttcctctcccttagccaaggggtgag

SEQ ID NO: 39812 - DNA, 201 bp, Homo sapiens
ggtttaggagacccaaaagacttaatcctggttggattcactttttctgagtgacattttttagtttgtgaaaatgtgtgcatcgatgaagaaattttatyatgaattagcttaaaaatgcattaggaacttctgtatgaaaagatcacattatttaagtgtaaaaaaactgcataataaaagcagttcaagtcaagaaaa

SEQ ID NO: 39813 - DNA, 201 bp, Homo sapiens
aacttatttccaacctcaaaattaattttctgcaactaaggacctgcataatacctagtaagcctttggggttttgcagaggaggtcgattctaaaaatgrgtgtttaaattacttaagagttctattttttttcttcccacacaggctgaggacaatgtgtgtgtcaagaaaataagaaccagaagtcatagggacagtg

SEQ ID NO: 39814 - DNA, 201 bp, Homo sapiens; identical to SEQ ID NO: 6114

SEQ ID NO: 39815 - DNA, 201 bp, Homo sapiens; identical to SEQ ID NO: 6119

SEQ ID NO: 39816 - DNA, 201 bp, Homo sapiens
tattgtgtatgtttttatttcaggaggaaatgtgttcttcagtgcacagaatgcagcaaaacagccatctgataaatgctctgcaagccctcccttaagayggcagtgtattagagaaaatggaaacgtagcaaaaacgcccaggaacacctacaaaatgacttctctggagacaaaaacttcagatactgagacagagcc

SEQ ID NO: 39817 - DNA, 201 bp, Homo sapiens
ttatagacacataagtagcctcatgtcgttcagtgaatacgaagctaaatatttagttttttaccatattttatgaggctgtaatactcgattgacatgaracactaatagaatgtttttattgtgtatgtttttatttcaggaggaaatgtgttcttcagtgcacagaatgcagcaaaacagccatctgataaatgctct

SEQ ID NO: 39818 - DNA, 201 bp, Homo sapiens; identical to SEQ ID NO: 6128

SEQ ID NO: 39819 - DNA, 201 bp, Homo sapiens; identical to SEQ ID NO: 6130

SEQ ID NO: 39820 - DNA, 201 bp, Homo sapiens; identical to SEQ ID NO: 6133

SEQ ID NO: 39821 - DNA, 201 bp, Homo sapiens; identical to SEQ ID NO: 6135

SEQ ID NO: 39822 - DNA, 201 bp, Homo sapiens
cctctttgtagcacgtagtgttgtggaaactaagccactaattgagtttctggctcccctcctggggttgtaagttttgttcattcatgagggccgactgyatttcctggttactgtatcccagtgaccagccacaggagatgtccaataaagtatgtgatgaaatggtcttaaaacccatggtatttttattatagggag

SEQ ID NO: 39823 - DNA, 201 bp, Homo sapiens
tagtgttgtggaaactaagccactaattgagtttctggctcccctcctggggttgtaagttttgttcattcatgagggccgactgtatttcctggttactstatcccagtgaccagccacaggagatgtccaataaagtatgtgatgaaatggtcttaaaacccatggtatttttattatagggagagtggggaaagaaac

SEQ ID NO: 39824 - DNA, 201 bp, Homo sapiens
agaggaggtcgattctaaaaatgggtgtttaaattacttaagagttctattttttttcttcccacacaggctgaggacaatgtgtgtgtcaagaaaataasaaccagaagtcatagggacagtgaagatatttgacagaaaaatcgaactgggaaaaatataataaagttagttttgtgataagttctagtgcagtttttg

SEQ ID NO: 39825 - DNA, 201 bp, Homo sapiens
tctggttacagctggagaaactgatttctgtgctgtccaggtgctcccagacccccaaggcatctccaggacacagtcaccaaacccccatcctggtattmctggcattgagtgccacgtaggcacacagcactccataatttggaaatgtggatttcattgctattgctcttcatgagggaacaaataatatccatgatg

SEQ ID NO: 39826 - DNA, 201 bp, Homo sapiens
cagctggagaaactgatttctgtgctgtccaggtgctcccagacccccaaggcatctccaggacacagtcaccaaacccccatcctggtattactggcatygagtgccacgtaggcacacagcactccataatttggaaatgtggatttcattgctattgctcttcatgagggaacaaataatatccatgatgtattggca

SEQ ID NO: 39827 - DNA, 201 bp, Homo sapiens; identical to SEQ ID NO: 6151

SEQ ID NO: 39828 - DNA, 201 bp, Homo sapiens; identical to SEQ ID NO: 6154

SEQ ID NO: 39829 - DNA, 201 bp, Homo sapiens; identical to SEQ ID NO: 6156

SEQ ID NO: 39830 - DNA, 201 bp, Homo sapiens; identical to SEQ ID NO: 6157

SEQ ID NO: 39831 - DNA, 201 bp, Homo sapiens; identical to SEQ ID NO: 6160

SEQ ID NO: 39832 - DNA, 201 bp, Homo sapiens
ttatccaaaattgatgtaagtattcctttgtgtcttttaagtatagcttttcatataaaaggtaattcgatttgtgttctagtgttttcccttgtttttayatactctctgttttaaagatctaatagttacatgtttaatacttccaaaagttctttgcaaaatgcaagatcgtttacattgcccattttgtttgttact

SEQ ID NO: 39833 - DNA, 201 bp, Homo sapiens; identical to SEQ ID NO: 6162

SEQ ID NO: 39834 - DNA, 201 bp, Homo sapiens
tacaagaatgtatacatttgtgcctggcttgtgcttttctgtgtgtgagattcatagcatgttggacatctctgtagtttgttccttctcatggcataagkatttcactgaaaaaaaaatgtttaatatatacaataatatacataactatacagaattcattcattcttgatggacatttgactaatgtctagtctttga

SEQ ID NO: 39835 - DNA, 201 bp, Homo sapiens
acatgtgacctattgaagatggagaactattgctctaaagaattgatactccctggtctttcagttacattttcttgaggtcattgaaaatacccagtaaycagcatccacccacacccgtggtcacaaggctttccttgcaggcacactgtttctcctctctggttttgacatgtgccactctgtctagccaagggcttt

SEQ ID NO: 39836 - DNA, 201 bp, Homo sapiens
cattgagcagcccctccctctagggctgaggcaagatcgagttcagaagtggctgcctctcgcgcacccccaaatctgaaattcagatctcagggcatggytccgtggcccattgaggcagcacagtctggggaggagctgcatgctagcccatgtgggataccgcctgctctggtgtttaaaaaactgctagaaaccacc

SEQ ID NO: 39837 - DNA, 201 bp, Homo sapiens
gtttgcagttggttgtcccacagtcgtggtacgtgtgaaatgtgtgtgtgtgtgcctgcatgtgtgtaaattcttatatgttgtgccgtctaccctgggayttctggagatccaccagggtcccggagatttccagaagtgaccctgagatgctcagtagctcgtctgtgtgttccgcaggtttggcgtcacctactgcca

SEQ ID NO: 39838 - DNA, 201 bp, Homo sapiens
tgcaccaccacacttggctaatttttgcatttttagtataaacggagtttcaccatgttggccaggctggtctggaacccctgacctcaggtgatctgccygccttggcctcccaaagtgctgggattacaggcgtgagtagtgtcgcctgtccagtcatggcgcatttgaaccatgtctctcctgctttttgttggtggc

SEQ ID NO: 39839 - DNA, 201 bp, Homo sapiens
gcaagataatcctaagcaaaaagaacaaagctggagtcatcacctacctgacttcaagctatattacaatgcaacagtaaccaaaacagcatggtactggyaccaaagcagacatataaaccaatggaacagaacagagacctcagaaataataccacacatctacaaccatctgatcttcgacaaaccaaacaacaaaaa

SEQ ID NO: 39840 - DNA, 201 bp, Homo sapiens
agaaatcccatatttttagatatctagtggcccaaacggagcatgtcacactttgtacatctctgattactctcaagactctgagcctggtgtccaggaaygcgatgttgctccagccgtgtgagaggctgggtctctggagccaggactcataaaccacggtccaggctcacccctggcaagttcacatctcattttgac

SEQ ID NO: 39841 - DNA, 201 bp, Homo sapiens
catttgtcctttaacaaatttatttttattttttattttttatttatttattttgagatggagtttcgttcttgtcacccaggcaggagtgcagtggcgcratctcggctcattgaaacctctgcttcctgggttcaagcgattctcttgcctcggcctctgcagtagctgggattacaggctcgcaccaccatgccgcta

SEQ ID NO: 39842 - DNA, 201 bp, Homo sapiens
actctgagcctggtgtccaggaacgcgatgttgctccagccgtgtgagaggctgggtctctggagccaggactcataaaccacggtccaggctcacccctrgcaagttcacatctcattttgaccacgaggccagcagttctctttgtgttgagctctgctacacacccattgctctgaagctacagcccgggagagaaaa

SEQ ID NO: 39843 - DNA, 201 bp, Homo sapiens
actgaacaaaatcattttggcagaagagtcattaaagtttgcacaaaatcctgaccttcacatccctggttttcctcacatacgcatccgcagggagtcayaatccatttgaaaatatttcttctctgggactgaaaatctcctaaaacgtgtattcttcagcaaacaaagtatctcatagaatgtaaacgtggatgactg

SEQ ID NO: 39844 - DNA, 201 bp, Homo sapiens
gttgttggttgaaaaatattaactgaaaataatatcccctttttgtctttaaaaagaaatttatgcacaaacaaaatgacttgcccatggtacagaaggcyacaagctcgattcatacaggtgtatcggtgtacatatcagtagactacagcatgtctctgtcttctcccatagaggtcaaaatcctaagctttttgggaa

SEQ ID NO: 39845 - DNA, 201 bp, Homo sapiens
actatcttcagtttgcagttcctgaggtcttgaggtttggccatataagaacatccaggtagatcaaggtctctcggcaactccagaccccctgttccagragtcttgattgacagagcttgctgcaagtcagtagccagcagctaaattgtctcacctcgttttcttttcttgcctggtctctgggtggaagttccaatt

SEQ ID NO: 39846 - DNA, 201 bp, Homo sapiens
attctcaactaaggcttgaagtatgattaggggtcggtctttctttctttctttctttctttctttctttctttctttctcactctctctctttctttctktttttgaggcagagtctcactctgttgtctaggctggagtgcagtggcacaatctcagctcactgcaacctctgcctcccaggttcaagcgcttctcagc

SEQ ID NO: 39847 - DNA, 201 bp, Homo sapiens
ggggtctcactatgttgcccaggctggtctcaaactccttgcttcggtccttccacctcgacctcccaaagtgctaggattacaggcatgagccactgcasccagccccctttaacaaatttaattttataagtttgccatatgggccaggatctgggacgatttgctagattaaaaaataaaaacataaaatataaaaaa

SEQ ID NO: 39848 - DNA, 201 bp, Homo sapiens
gatagtgtggcaaccctagggggcgtttgaaaatgcatgggggtgtttcaggttttctcaatgactcactggcatttgggaggatgtggttaagaattgtraatgcccaatttacatggtgtaggggacagtcccatacagcattaccctggccaaactgctggtggtatcccctgttgagtaaaactgcaggatataaat

SEQ ID NO: 39849 - DNA, 201 bp, Homo sapiens
ccagacttaatgccacactctttacctctacaatatatcacttaattatttttattttttgagacagtcttgcctggtcacccaggttggaatgcaatggyatgaccatggttcactgcagcctcgaactcctgggctcaagcattcctccttcctcagcctcccgagtagctgggactataggcaatcactactatgccc

SEQ ID NO: 39850 - DNA, 201 bp, Homo sapiens
tatattcagtgtgtaatttaaacacagaactgacctatgtctttcttttctgacaatcagctgaccattctctcttcctctgaggtacctgaatttttctytccaagagtcattagccatagatttggaatgaaccagaaactaaaacgattggagataatttcattacaaatgttaacattactcttttgaacattaact

SEQ ID NO: 39851 - DNA, 201 bp, Homo sapiens
ctcagcagctcctctggggattttgcagccacagagtttgtgtaccctgcccgagccccctctgtggtcagttccatgcccttcctgcaggaagatctgtwcagcgcgccccagccaggtaaggcctgcagggggcagctatgctgagcagtagaaggcacatcttccagaaagccttttgattttacgttggtatttatt

SEQ ID NO: 39852 - DNA, 201 bp, Homo sapiens
ccagggggtctagcactgtttgcagtgcacccagagccctcccacctggcacttgttccctgcaaaaatataaaaatattgctctttttgtgactttttcttttttttttttttttgtgttcacgacttaattcacatttctcctttctctaagttctgcaataagtgaaaagatgtttacccatgccgaaatagtctggt

SEQ ID NO: 39853 - DNA, 201 bp, Homo sapiens
tcagggactggtataggtgttggggaaagagcggtgggaaacaaaattcctgccctcgtagcgtttaagttccaatggaatggtactaaagtaccctgagygattctcttgatcttcagccctacatctgttgttcaagtgcttaggttaataacaaaatgtaaaatacctaccatggtttcacatagttatgtgtgtctg

SEQ ID NO: 39854 - DNA, 201 bp, Homo sapiens
gtgttggtgtgtgcctgtaatccccactactcgggaagctgaggcaggagaatcacatgaacccgggaggcggaggttgcagagagctgagatcgcgccakggcactccagcctgggtgatagtgcgagactctgtctcaaaaaaaaaagaaaacaaagaaaagagactcatgagtcggggagataccagttctagcctca

SEQ ID NO: 39855 - DNA, 201 bp, Homo sapiens
cagggggtctagcactgtttgcagtgcacccagagccctcccacctggcacttgttccctgcaaaaatataaaaatattgctctttttgtgactttttcttttttttttttttttgtgttcacgacttaattcacatttctcctttctctaagttctgcaataagtgaaaagatgtttacccatgccgaaatagtctggta

SEQ ID NO: 39856 - DNA, 201 bp, Homo sapiens
actgagtttccaggaaaaagaaaaatcatattatatgcttgagaagaaaattacatggttggaagatgttttggttgattatttgtataaacccaacatcwgtgtgtatgtgtgtgtgtgtgtgtgtgtgtgtgttttaaatcctcataaaaaaagaatgaaaagctttcattgcatggctcttttttttttctatacact

SEQ ID NO: 39857 - DNA, 201 bp, Homo sapiens
agtttccaggaaaaagaaaaatcatattatatgcttgagaagaaaattacatggttggaagatgttttggttgattatttgtataaacccaacatctgtgwgtatgtgtgtgtgtgtgtgtgtgtgtgtgttttaaatcctcataaaaaaagaatgaaaagctttcattgcatggctcttttttttttctatacacttgct

SEQ ID NO: 39858 - DNA, 201 bp, Homo sapiens
ttccaggaaaaagaaaaatcatattatatgcttgagaagaaaattacatggttggaagatgttttggttgattatttgtataaacccaacatctgtgtgtrtgtgtgtgtgtgtgtgtgtgtgtgtgttttaaatcctcataaaaaaagaatgaaaagctttcattgcatggctcttttttttttctatacacttgcttct

SEQ ID NO: 39859 - DNA, 201 bp, Homo sapiens
tccaggaaaaagaaaaatcatattatatgcttgagaagaaaattacatggttggaagatgttttggttgattatttgtataaacccaacatctgtgtgtakgtgtgtgtgtgtgtgtgtgtgtgtgttttaaatcctcataaaaaaagaatgaaaagctttcattgcatggctcttttttttttctatacacttgcttctc

SEQ ID NO: 39860 - DNA, 201 bp, Homo sapiens
tctttcctacgtttgtgtttcggtttaaggtcatggtgttgttctgggagacattagcttaaatagcgttttgtttgtttttgctttcgacgtgtttaaaygtatggatggaaactaaagttgtcctctgggaaccagggctgtgatgtgcatgattagatctttctgtgttgatggcttgtgtgagatcttgtgattacc

SEQ ID NO: 39861 - DNA, 201 bp, Homo sapiens
tcccagataaatcttttcagtagaaatttgggaaatttttgcattttaaaaactcgtacttgctgatgcagttttttttctttcttttctttctttctttytttttttttttttaagacagagtctcactctgtcacccaggctggagtgcagtcactgcaacctccacctcctgggttcaaacgattctctggcctcagc

SEQ ID NO: 39862 - DNA, 201 bp, Homo sapiens
gagacattagcttaaatagcgttttgtttgtttttgctttcgacgtgtttaaacgtatggatggaaactaaagttgtcctctgggaaccagggctgtgatrtgcatgattagatctttctgtgttgatggcttgtgtgagatcttgtgattacccagcgaactgtgccaaagtttcattatttattcattccttccaatga

SEQ ID NO: 39863 - DNA, 201 bp, Homo sapiens
ttagtgagcgcttgtggttttttccagctgaaagaggctggcccggcagccctgcgggagccagcttctccaatgaaccctgtcatgccctctgctgcgtscgtgcagtggggcactgcagtcatgcgcctttgagagccacctagtaaactacagagatgaaaagaagtaaggccgaattcctaacaacctagcattgcc

SEQ ID NO: 39864 - DNA, 201 bp, Homo sapiens
gtgactgtggctagtatgaaactaggagatggatttgaatctcatctcctcttcttgtcaaatacgagtctttgggcaaatcatgtaacaatttccggatstgtaaactgaggatggtactagttccagtgttgtgctgcggccagacatgtgtgcctctctcccaactttgagttcagtgagtcctgtgggagcctgaga

SEQ ID NO: 39865 - DNA, 201 bp, Homo sapiens
ggatccatagtcaaccgactgtccatgctcctcctattccctgggacccttgctcgaatgacctcaccacctggctggcacatgctaccctggggtggaarcacattctcttatgacttgcaatgggaaaaagggctgaggatcgattttttttttcctgagatagctgaggaggtgagtcctgccaacatctgagctacc

SEQ ID NO: 39866 - DNA, 201 bp, Homo sapiens
cgatctatgtgtacatattgaatgatgtgtaacaatatcataatttttatgttctgcattttttcacttatatatctttatttaaatggacttaactttaytaatggagtaatttttagctttcagaaggagttctcactcgaagataaagaacagctcgctaaccacgaaagaggaatcgatgctcagcttttagttgca

SEQ ID NO: 39867 - DNA, 201 bp, Homo sapiens
ccccacctcggtccctattctagacaggctagagctgtggccataccagcatccagtccttatgtttaaaacagatcaagcctctaaaatgagggactttyaagtgctttttttgaaagtgtgaaggagcagtatactgaagataatgaacaagcttccttctcactaaacaagagttaaccaagaattgcattcacaggg

SEQ ID NO: 39868 - DNA, 201 bp, Homo sapiens
gctgtggccataccagcatccagtccttatgtttaaaacagatcaagcctctaaaatgagggactttcaagtgctttttttgaaagtgtgaaggagcagtrtactgaagataatgaacaagcttccttctcactaaacaagagttaaccaagaattgcattcacagggatataggcaaggcaggaatagacggcgggactg

SEQ ID NO: 39869 - DNA, 201 bp, Homo sapiens
attatgctgtttccctgtttcttcccaggctttatatcatcggtggcttgtattcatggttttctaattctgtgggcgtatcctaatcacctgtggtgggrggactttcattttaaacaaataccgcaagtggtctgagggccacccaagtttgatatcctttgcttaatcagatgttacacccacgcataaacgtgtctt

SEQ ID NO: 39870 - DNA, 201 bp, Homo sapiens
tcctctcaggcacttagtgagttgggtataagtgttacttattggtatccaaaaaggcaactagaaatcaaggtgattcatgtggaaagagcagaagagtrtccatggtaattatgaagtagctgatggctctgggcacaaaagtgagctgaacacagttacggggccagtgtgctttgggtagcgaagagcctccttcag

SEQ ID NO: 39871 - DNA, 201 bp, Homo sapiens
ggtgggaggactttcattttaaacaaataccgcaagtggtctgagggccacccaagtttgatatcctttgcttaatcagatgttacacccacgcataaacrtgtcttgagtcatttcaacagacagtgtggaatgtgcctttgatttattttgtgtcatgacctccccaaggcacctgcactgtgagcacgggatctgctt

SEQ ID NO: 39872 - DNA, 201 bp, Homo sapiens
gggccagtgtgctttgggtagcgaagagcctccttcagcagctcagaaatgcatgagcgagagtgcacctaaagaatcacaagtgatgcactgcacaggarttacaggaaatgaggagccaggggctgagggagtctgggaaggtttcataggcccaaagggtgggtgggatttttgattcatgaaaagatggaggttggt

SEQ ID NO: 39873 - DNA, 201 bp, Homo sapiens
gaggtgggaggattgcttgagcccaggagtttgagacctgcctgggcaacatgttgagatcccatctctacaacaaatacaaaagttagctaggcgtggtsgtgggcccctgtagtcccagctactcaggaggcagaggtgggaggaattggcttgagcttaggaggtcgaggctgcagtgagctgtgattgtgccactgc

SEQ ID NO: 39874 - DNA, 201 bp, Homo sapiens
acacacacacacctccataaacacagaggcccagcatggctactgtacccactatcctttttcacccagcccagctcctttcagaagatgacttcaccttyataccatcaaactttttcctcctgcttaatgtcttgggatgctacaaaattcttgatggatgtcagatataggtgggcggtcaaagttagcctgtttcct

SEQ ID NO: 39875 - DNA, 201 bp, Homo sapiens
aaactttaaacaatcattgatttgtagcaggggattaactactaaaaggaaaagagagctgtaaagaatacaggaatggttggctgggcgtggtggctcaygcctataatcccgacactttgggaggaggccaaggtgggcagatcagttgagcccaggtgtttgagactagcctgggcaatatagtgaaaccctgtctct

SEQ ID NO: 39876 - DNA, 201 bp, Homo sapiens
gggccaatgggtggaagatataaagaaacagatttgaattcagtataaggaggattttttgaacatctgactgactaatgaatgggttgcctggcctggaygaagctctccattgatggagatatttctattgtaaaccaaagattaaattctaagccaagtgactgaatggaacatcctctcagccaagggacccaacaa

SEQ ID NO: 39877 - DNA, 201 bp, Homo sapiens
gtccccatctccactctcttcctgtccctcctgaatcaggaagttctctctcgtgggtcagtgaagggaagtggtttgccatagtgaggaggaaaggcatyggggaagagaatctctaggatggacttgactcggggctctccgagtccttccctgtgtcagcgcgaggccttaggatcacattgatccacggagacttct

SEQ ID NO: 39878 - DNA, 201 bp, Homo sapiens
attagtgcttctcagtggacacagcagcagggaactttgtgcgttcatgctgagctggtggctgtgtgatgctattgaaaagggaatacaccaccatcagygctcggttaaaacgtcttctccctgaaatttaagaaagtcacaggctgggcgcggtggctcacacctgtaatcccagcactttgggaggccaaggtgggc

SEQ ID NO: 39879 - DNA, 201 bp, Homo sapiens
tagccctagccccactctctcctataaaggatgtaccatggggatctagtctagacggttcctcagtgtctgtaattatgcattttctctgagtattcttyatattcaatgttttgccaactctgtttctaaagaggctttcttttccctctgctgagcgttgcggaaactggccatcagcctgactgagccccagagccc

SEQ ID NO: 39880 - DNA, 201 bp, Homo sapiens
ctgagtttccaggaaaaagaaaaatcatattatatgcttgagaagaaaattacatggttggaagatgttttggttgattatttgtataaacccaacatctrtgtgtatgtgtgtgtgtgtgtgtgtgtgtgtgttttaaatcctcataaaaaaagaatgaaaagctttcattgcatggctcttttttttttctatacactt

SEQ ID NO: 39881 - DNA, 201 bp, Homo sapiens
gggctcagccgatccttctgcctcagcctttcaaagtgttgagattataggcatgagccaccacgcctacatttataaatatttatggaggacttttatgyacagggcagtctgccgggattttcacttatctaatgtcatttaatcacaagtaccacgtgaagtaggtagtattactcccatttcacagatgagcaacat

SEQ ID NO: 39882 - DNA, 201 bp, Homo sapiens
caaaaaccccatctcttctaaaaatacaaaaattagtgggttgtggtggcacatgcctgtagtcccagctactcaggaggccgaggcatgagaatcacctraatccaggaggcagaggttgcagtgagacgagatcacaccactacactccagcctgggcacagagcaagactgtgtctcaaaaaacaaaccaacaaacta

SEQ ID NO: 39883 - DNA, 201 bp, Homo sapiens
cttagatcttaggtttctcaagtctttttcttccttccttccttctcttttttcttttctttttcttctttttttttttttttttttaatttcagacaagrtctttctttgttacccaggcaggagtgcagtggtgcagtctcaacctcctaggctcaagtgaccctcccacctcagcctcctgagtagctgggaccacag

SEQ ID NO: 39884 - DNA, 201 bp, Homo sapiens
tgtataactcctcactcagccgtttctgatgtatgtgctttgggttgcctctgtttgatagaccacgttcacatgcacacacacacacacacacacacacwcacagaggcatgtacaacttcttagttttatcagtacatgaattcctctcttgattaccactgcagtttttttttttcttttttcttttttgagatggac

SEQ ID NO: 39885 - DNA, 201 bp, Homo sapiens
gcaccaccacacttggctaatttttgcatttttagtataaacggagtttcaccatgttggccaggctggtctggaacccctgacctcaggtgatctgcccrccttggcctcccaaagtgctgggattacaggcgtgagtagtgtcgcctgtccagtcatggcgcatttgaaccatgtctctcctgctttttgttggtggca

SEQ ID NO: 39886 - DNA, 201 bp, Homo sapiens
gccttggcctcccaaagtgctgggattacaggcgtgagtagtgtcgcctgtccagtcatggcgcatttgaaccatgtctctcctgctttttgttggtggcatttgttttcccttgaggtttatttatttattgagacgtagtcttgctctgtcacccaggctggagtgcagtggcacgatctcaccacagtacaatttcca

SEQ ID NO: 39887 - DNA, 201 bp, Homo sapiens
ccaggctggagtgcagtggcacgatctcaccacagtacaatttccacctcccaggttcaagtggttctcctgcctcagtctccacagtagctgggaccacmggcgtgcgtcaccatgcccagctaatttttgtatttttagtagagacagggtttcatcatgttgtccaggcttgtctcgaactcctgacttcaggtgatc

SEQ ID NO: 39888 - DNA, 201 bp, Homo sapiens
caagtggttctcctgcctcagtctccacagtagctgggaccacaggcgtgcgtcaccatgcccagctaatttttgtatttttagtagagacagggtttcaycatgttgtccaggcttgtctcgaactcctgacttcaggtgatctgccctcctcagcctcccaaagtgctgggattacaggcatgagtcgccattctggcc

SEQ ID NO: 39889 - DNA, 201 bp, Homo sapiens
ggaaaagagagctgtaaagaatacaggaatggttggctgggcgtggtggctcatgcctataatcccgacactttgggaggaggccaaggtgggcagatcarttgagcccaggtgtttgagactagcctgggcaatatagtgaaaccctgtctctacgaaaaattaaaaagttagccgggcatggtggcacgcacctgtagt

SEQ ID NO: 39890 - DNA, 201 bp, Homo sapiens
attttgatggaacatttattcaaaatgtagcacctcctctgtcctttatgaagttatagtatgggacagttcattgtgacacacttttaaagctctttacttttttttttttttttttttttggagatggagtctcgctctattacccaggctggagtgcagtggtgtgacctcagctcactgcaatctccacctcccggg

SEQ ID NO: 39891 - DNA, 201 bp, Homo sapiens
ggagtgcagtggtgtgacctcagctcactgcaatctccacctcccgggttcaagtgattctcctgcctcagcctcccgagtacctgggattacaggcaccygccaccacgcccggctaatttttgtttattttagtagaaatggggtttcaccgttttggccaggctggtctcgaactcctgacctcaggtgatccatctg

SEQ ID NO: 39892 - DNA, 201 bp, Homo sapiens
ttagggtgtcgctttaccagctggaaacctctgttgctggtggcacctctgcctgagttttgctcatgcctgctggacttgttctgtccactcagcccagyaagatgtgctcagcttgtgctaccagcctggatcccatgcctgccaagggcaagccaggcatggagcagcaagtgggtatgtgagtgagtgaacacaggg

SEQ ID NO: 39893 - DNA, 201 bp, Homo sapiens
aaaatttcctctgagccaaactaaagtgcttaatacctatgcagatgatcaaaacaaagtataagaatgaacaaatccatattagcaatagctgagaaaartttattaggcaaagttctacatagcagaggttgtttccaccagtcagaagcatccctctttcccttcctctatcccagttcctttatttgatgcataata

SEQ ID NO: 39894 - DNA, 201 bp, Homo sapiens
atgtgagtgagtgaacacagggtctggccactgcacagccaggcacgctggctgctgtggcagggtgggaagctccatatgccagctccctttgaggctgyggctggaccagatgtgccacaagtggcttccactgtgggcaccagcgtctggatgaggggaatgtggtggtgcccgaaagctcagagacaccaggaactg

SEQ ID NO: 39895 - DNA, 201 bp, Homo sapiens
tgtggcagggtgggaagctccatatgccagctccctttgaggctgtggctggaccagatgtgccacaagtggcttccactgtgggcaccagcgtctggatraggggaatgtggtggtgcccgaaagctcagagacaccaggaactgcagagtccccaaataggtgttacagcatgtcacagccatggctcagggagcacca

SEQ ID NO: 39896 - DNA, 201 bp, Homo sapiens
tggcagggtgggaagctccatatgccagctccctttgaggctgtggctggaccagatgtgccacaagtggcttccactgtgggcaccagcgtctggatgargggaatgtggtggtgcccgaaagctcagagacaccaggaactgcagagtccccaaataggtgttacagcatgtcacagccatggctcagggagcaccaag

SEQ ID NO: 39897 - DNA, 201 bp, Homo sapiens
gagtccccaaataggtgttacagcatgtcacagccatggctcagggagcaccaaggtctgggcttccagaagggctgcagctcttctctacttcttgttayctacagtgtggtgagtggggggacatgtttcagcccatttgtgttacagctctttcagtcccaccaccttgctctggcccgtggctcatgggctggacca

SEQ ID NO: 39898 - DNA, 201 bp, Homo sapiens
gagtggggggacatgtttcagcccatttgtgttacagctctttcagtcccaccaccttgctctggcccgtggctcatgggctggaccagccccactgctgyttcccatcatgtggggtggccactcagcaccagcagagggtgggagggctatagtgttaacagcagctccagctctgaggtctgggcccccagaagggtt

SEQ ID NO: 39899 - DNA, 201 bp, Homo sapiens
gaagggttgccatcctttactcccatagcccaggagcatgtcaccacccacagctcagcgagctggtcaagaacatgttacagctcctttcacttccgccrttcagcaggtcctgagttcttgtcctgtgtctaggaagaatgaggttatgcagacaactgggtgaacaaggcaggcaggagctttattgagtgacagaac

SEQ ID NO: 39900 - DNA, 201 bp, Homo sapiens
agcccaggagcatgtcaccacccacagctcagcgagctggtcaagaacatgttacagctcctttcacttccgccattcagcaggtcctgagttcttgtccygtgtctaggaagaatgaggttatgcagacaactgggtgaacaaggcaggcaggagctttattgagtgacagaacagctgtcaggagacccaaagtgggta

SEQ ID NO: 39901 - DNA, 201 bp, Homo sapiens
agcaggcaagtagaaagacggacctctgaccctgaactgtgtgccataatgaggaaattccaccctgaaaatttagaaatttagaggtgagcatgcatgctttttttttttttttttttttttttgagaccgggtctcactctgtagcccaggctggagtgcagtgacatgatcttggctcaccgcaacctctgcctcctg

SEQ ID NO: 39902 - DNA, 201 bp, Homo sapiens
tatagtatttaaagtaaaatgtagttctaccaaagcaatgcattaatgtttaatggaacatgttttacattgcttcagtttttacatttaaataaaatcaygtgaaattaattaaaagttgacattcagttcctcagttgcactcaccaacttaagtagccatgtgtgcccattggttcttgtattggacagcacaggcca

SEQ ID NO: 39903 - DNA, 201 bp, Homo sapiens
attctacaggagtcatctaacatttcattacatgaagaccaggtgatcagaaaggccccttcgtctccagtcttaccagggtccaccagggcctgattcayttgttccagtgatatcactgtggggtgtcagcatcccaatggttcactcatagatccttcaggtctcctccagccaccgcccgtgtaccatgacatgaca

SEQ ID NO: 39904 - DNA, 201 bp, Homo sapiens
tgtaatccacctgccttgacctcccaaagtgctggaattacaggcatgtgccaccgtgcccagctgctctaatatcttttccaattgagttcattctgctmatttttaccagttgctctaaatcatggcactttttttttttttccttgagacagagtctcactttgtgtcacccaggctggagtgtaatggcgtgatctc

SEQ ID NO: 39905 - DNA, 201 bp, Homo sapiens
accatgacatgaccatgttacatgacatgctatgacagtgacctccctcagcctctcccaggcacacagttttaccccttctcctaaagcaggttcgcacrcccatctaaaggcaacttcagtatttgcttttacttctctttaaagattacagccttaaaaatattcagtaaaatattgtacttccataaagcattgccc

SEQ ID NO: 39906 - DNA, 201 bp, Homo sapiens
agctactcaggaggctggggttggaggatcacttgagcccaggagtttgaggctgaagtgagctgtgatcacaccagtgcaccccagcctgggcgactgawctagaccctgggctccttcccccaaaaaaacaagagcccacctgacagggactttggaggagagacttggcctttactattaactttccccaactgtttg

SEQ ID NO: 39907 - DNA, 201 bp, Homo sapiens
tactcaggaggctgaggcaggagaatggtgtgaacccgggaggcggagcttgcagtgagctgagatcgcactactgcactccaggctgggcgacagagcayatctccatctccaaaaaaaaaaaaaaaaaaaggaaatagtaagaatttcttctctgtgttataagctatgggaggggagtcaccgagcagtgtgcccaaa

SEQ ID NO: 39908 - DNA, 201 bp, Homo sapiens
gctgggcgacagagcacatctccatctccaaaaaaaaaaaaaaaaaaaggaaatagtaagaatttcttctctgtgttataagctatgggaggggagtcacygagcagtgtgcccaaaatttttcctgtgtgacattttcaggctgtagtgggtggaaagattttgtaaatgtatcttcttggtgagagggtgtcctctgaa

SEQ ID NO: 39909 - DNA, 201 bp, Homo sapiens
tcaccttcagtgcctcctaactcgtcagtaacactcagtaaagaattgagcagaacttactgaaaaagcaaaacgtctttgtgagtttttatggcttcagygtgtcctgagctatctttaaaaatagagcaacttgggctgggcatggcggctcacacctgtaatcccagcacttttggaggccaaggagggtggatcatc

SEQ ID NO: 39910 - DNA, 201 bp, Homo sapiens
cccaggagttggaggcttcagtgagctatgatcacacactgcactctagcctgggcaacagagcaagaccctgtctctaaaaaaaataaaaaataacatasagcaaccaaacagcagttcagttattaaaatctgttcatgtattcagctattagacaaagacaaggaccgagttagatccagcctgtggaccagttgttc

SEQ ID NO: 39911 - DNA, 201 bp, Homo sapiens
gtgatgactcttaaggagcctgctgccttcaagcatctgtttaacaaagcacatcttgcaccgcccttaatccatttaaccctgagtggacacagcacatrtttcagagagcacagggttgggggtaaggtcatagatcaacaagatcccaaggcagaagaatttttcttagtacagaacaaaatgaaaagtctcccatgt

SEQ ID NO: 39912 - DNA, 201 bp, Homo sapiens
gtctacttctttctacacagacacggcaaccatctgatttctcaatcttttccccaccttgcccccttttctattccagaaaaccgccatcgtcatcatgrcccattctcaatgagctgttgggtacacctcccagacggggtggtggccgggcagaggggctcctcacttcccagtaggggcggccgggcagaggcgccc

SEQ ID NO: 39913 - DNA, 201 bp, Homo sapiens
ccacatctcagacgatgggctgccgggcagagatgctcctcacttcctagatgggatggtggccgggacgaggcgctcctcacttcccaggtgggatggcrgccgggcagagacgctcctcactttccagactgggcagccaggcagaggggctcctcacatcccagacgatgggcagccaggcagagacgctcctcactt

SEQ ID NO: 39914 - DNA, 201 bp, Homo sapiens
ccaggcagaggggctcctcacatcccagacgatgggcagccaggcagagacgctcctcacttcccagacggggtggcggccgggcaggggctgcaatctcygcactttggggggccaaggcaggcggctgggaggtggaggccatagcgagccgagatcatgccactgcactccagcctgggcaccattgagcactaagtg

SEQ ID NO: 39915 - DNA, 201 bp, Homo sapiens
attgagtgacagaacagctgtcaggagacccaaagtgggtagctcctttctacaggtggtccagacaagtgtcttaggctggctgagtctggggtttttawgggctcagaagggaggaagtgcatgctgattggtccataggtggtcataggcaggcctggaaaaagcaccgtctgattggccaaaaggcatcagtgaagt

SEQ ID NO: 39916 - DNA, 201 bp, Homo sapiens
tctctgcactttggggggccaaggcaggcggctgggaggtggaggccatagcgagccgagatcatgccactgcactccagcctgggcaccattgagcactragtgaatgagactccgtctgcaatcctggcacctcgggaggccgaggctggcggaacactcgcggctaggagctggagaccagtctggccaacacagcga

SEQ ID NO: 39917 - DNA, 201 bp, Homo sapiens
tcaggagacccaaagtgggtagctcctttctacaggtggtccagacaagtgtcttaggctggctgagtctggggtttttatgggctcagaagggaggaagkgcatgctgattggtccataggtggtcataggcaggcctggaaaaagcaccgtctgattggccaaaaggcatcagtgaagttctcactccaggttgcggac

SEQ ID NO: 39918 - DNA, 201 bp, Homo sapiens
tcttaggctggctgagtctggggtttttatgggctcagaagggaggaagtgcatgctgattggtccataggtggtcataggcaggcctggaaaaagcaccrtctgattggccaaaaggcatcagtgaagttctcactccaggttgcggactccacctggaacggacagctgagcccccaggcttcaggccatccctggctt

SEQ ID NO: 39919 - DNA, 201 bp, Homo sapiens
gccatccctggcttaaaggtagggtttcactagagacccaccccttcctgcctaggaacctgtctgcctcccactgccatcaacatgccatccatggcacscaggctatctgcactgaggggcacccacatgcccacgctcagctgccctcaatgcccccagcctccctcccacactcatcactgcccgaagtccagaaag

SEQ ID NO: 39920 - DNA, 201 bp, Homo sapiens
ggtgctgggtctgccacaactttgcttcgcactggagcgggcacttggagagaggagaggccagagagtgggaacaggcacctctgcctgaaggaataggrggcttcccaggccctggagagtgcagggatgcccaggtccacggctgggcagctgcaactgcctgggagaacaggctcccatcctgccagcttggtaggg

SEQ ID NO: 39921 - DNA, 201 bp, Homo sapiens
cttggagagaggagaggccagagagtgggaacaggcacctctgcctgaaggaataggaggcttcccaggccctggagagtgcagggatgcccaggtccacrgctgggcagctgcaactgcctgggagaacaggctcccatcctgccagcttggtagggcgcagggctcctgctgggatcacctattcctggcccctgccag

SEQ ID NO: 39922 - DNA, 201 bp, Homo sapiens
ggcttcccaggccctggagagtgcagggatgcccaggtccacggctgggcagctgcaactgcctgggagaacaggctcccatcctgccagcttggtagggygcagggctcctgctgggatcacctattcctggcccctgccagctccacagagtgcacaatcccagccatggcttccccactgcagctggcgtcctcacag

SEQ ID NO: 39923 - DNA, 201 bp, Homo sapiens
cctggcccctgccagctccacagagtgcacaatcccagccatggcttccccactgcagctggcgtcctcacagcagccaccccagatgggccactgctgcygtcaacagttggcaggaaggcaggctaagcctggtgtctcaaccagaggactttgcagcagaggtaattgccaaccccacttccactgccttgacgtccc

SEQ ID NO: 39924 - DNA, 201 bp, Homo sapiens
tcctcacagcagccaccccagatgggccactgctgccgtcaacagttggcaggaaggcaggctaagcctggtgtctcaaccagaggactttgcagcagagrtaattgccaaccccacttccactgccttgacgtccctcttgcagcagagaagctaatcctgcccagcctggccatgagtgagggcacctgaaggggtgag

SEQ ID NO: 39925 - DNA, 201 bp, Homo sapiens
catagagtgactgctgacagcgtttgataagctttgctgtgagtccaaaagaatgatcggatagatgcctgtcttgcagcgcatctacattaatctcatarcaaattattcgtctcatattagagaaagtttagctttcttagaagcttgatgggaaagagcctcccagctcttagagtttgattttcgcaactcagttca

SEQ ID NO: 39926 - DNA, 201 bp, Homo sapiens
tccctcctgaatcaggaagttctctctcgtgggtcagtgaagggaagtggtttgccatagtgaggaggaaaggcatcggggaagagaatctctaggatggwcttgactcggggctctccgagtccttccctgtgtcagcgcgaggccttaggatcacattgatccacggagacttcttagccaaggaaaatgccttaggaa

SEQ ID NO: 39927 - DNA, 201 bp, Homo sapiens
gggattacaggcgtgagccaccgcgcatggcctgtacattttttttaaagttatttttaccatcattttagcaggccagactacatgagtttaaatcacarccctgatatttactagccatgtgactgttctaagccttcattttctcatttatgaaatggggatgataatagtgacctaggttataaatcataagagtat

SEQ ID NO: 39928 - DNA, 201 bp, Homo sapiens
tcaaagtgttgagattataggcatgagccaccacgcctacatttataaatatttatggaggacttttatgtacagggcagtctgccgggattttcacttayctaatgtcatttaatcacaagtaccacgtgaagtaggtagtattactcccatttcacagatgagcaacatcaaggcttgagaggaaaaatgattggccag

SEQ ID NO: 39929 - DNA, 201 bp, Homo sapiens
tgggcgttatacatctctctcttctcccaaactcaaactagcttaagcaaaacatggaatttgttgacatgaataataggaaaatccaatgatgaagctgsctgcagatggaactcaagagttttttgggtattggccttattctctcttggagtacaggggcctgagaggtggcccctggaagcttttccagcttcaacc

SEQ ID NO: 39930 - DNA, 201 bp, Homo sapiens
agtggggacctgggtcagaggatgggtctatgcctaagtgcgtttggaaagcattggattaaagttaaatgaccttcttcaaaactaatgagctttgtgartcttgatgggtgtgagtagtgggcagtgctcaccagagttccatggaactattttcttgtgaggcatcttaagaccagtgttccatttgttcattaaata

SEQ ID NO: 39931 - DNA, 201 bp, Homo sapiens
gtgaggggtgggtggggtatggttataaggagagaggaagaatttccagatgaatagaggggtataatgcaggcaaaagccatacatgtccactgtaacaygcaaatatgatccatacctgtgtgcacacttcagccctgcatcagctcaaacacaggcggcagggctggagcgtggagaggaaggtggccctaccagctg

SEQ ID NO: 39932 - DNA, 201 bp, Homo sapiens
cacaaacattgtaaaaacatagcaacctgacatataaattagaagttaataggttaacttctatatgtagaccaaatgaatatcacctcttagagatgatmccaataatcacaagccttgtcaacattatatcaatgcaattttagtaaaaagtaaattttccctcttgcagatcccatcaagtatgctagtcactcattg

SEQ ID NO: 39933 - DNA, 201 bp, Homo sapiens
acaggaccagagggtgatgacagccgtgtggactcagtaataaatgtttacctggaagctgcagattctaaaatcaatactttataaacacgtgcaattaygccagtttttcacacatgtatgcaaggtgagcaaaggtactaaagaatgatgtgttccaaattatgccctgtccaaagatgaaagaaggaaagaaaggaa

SEQ ID NO: 39934 - DNA, 201 bp, Homo sapiens
tgtattaagatgcattaaggagatacatgggggaaagtccacagtaagggctcacttcctttattattctcctctttcatttcctcttttattccaacackagtcttcatgaggctttccaaacttttgaccatgctttgatgccttggttgtttgaaggcatctgttactttaacataattttaacactggaagacagag

SEQ ID NO: 39935 - DNA, 201 bp, Homo sapiens
tttccaaacttttgaccatgctttgatgccttggttgtttgaaggcatctgttactttaacataattttaacactggaagacagagtgtagatcacctagrcaagttactgattttctgaagaagaaattgtagcacagagaggttgagtaattaatgcaagcttgcacagctattcttaggtcaagaagaggtggtcagt

SEQ ID NO: 39936 - DNA, 201 bp, Homo sapiens; identical to SEQ ID NO: 6451

SEQ ID NO: 39937 - DNA, 201 bp, Homo sapiens
ggaggctgaggcaggagaatcgcttgaacccgggaggcggaggttgccgtgagccaagatcatgccactgcactccagcctgggtgacagagcgagactcygtctaaaaaaaaaaaaaagtgccagtgccccatgtcccctgaatttcacctaaattctctacagtcttatttcacatatctttgctttttatgaaaaaaa

SEQ ID NO: 39938 - DNA, 201 bp, Homo sapiens
gcggaacactcgcggctaggagctggagaccagtctggccaacacagcgaaaccccgtccccaccaaaaaaacacgaaaaccagtcaggcgtggcggcgcrcgcctgcaatcgcaggcactcggcaggctgaggcaggagaatcaggcagggaggctgcagagagccgagatggcagcagtacagtccagctttggcccgg

SEQ ID NO: 39939 - DNA, 201 bp, Homo sapiens
tgtaaatgtatcttcttggtgagagggtgtcctctgaatctgctggtaggttggagtgtttgcagggaaatgttcatcaaagggcttgctctgtgaagaaygtgacttaggatgatctttattttacgtgcattccatcatatgtaaacaaagttagggtctcaacattcccactagcaccttcagccaactcccaagctt

SEQ ID NO: 39940 - DNA, 201 bp, Homo sapiens
ttaatagtacaaaaacatgttttatatgattaataatataaaataatataaaacatggtttatataataatataaaatatataatataaaccatattttttatatatatatatatatttcgaggcagaatcacactctgtcactcaggctggagtgtagtggcacagccttggctcactgcaacctctgtctcccgggttc

SEQ ID NO: 39941 - DNA, 201 bp, Homo sapiens
ccttgggaggctgaggcaggaggattccttgagcccaggagtttgaaaccaatctgggcaacatagggagaccttgcccttatattaaaaaaatatatttwtatatatatatcatatatacatataaataagcatttatatgtattgttatatatatataaggttcagagaaagtagaatgttattgtattccgtgtgtag

SEQ ID NO: 39942 - DNA, 201 bp, Homo sapiens
taatagtacaaaaacatgttttatatgattaataatataaaataatataaaacatggtttatataataatataaaatatataatataaaccatattttttwtatatatatatatatttcgaggcagaatcacactctgtcactcaggctggagtgtagtggcacagccttggctcactgcaacctctgtctcccgggttca

SEQ ID NO: 39943 - DNA, 201 bp, Homo sapiens
ctctttaagtctaataagaaacctttacaatcagttttctgaagcctgaagcctgctacctggaggcttcatttgcatactaacaccctggtctccacaaycccttatcttaaccagacatcccttcttattgattctaagtcttcagacagtaatttaactctttcagccaatttccaataagaaaatctttgactccat

SEQ ID NO: 39944 - DNA, 201 bp, Homo sapiens
cacacctcagcttcctaaagtgctgggattacaggcaggagccaccatgcctggctattattattaataataatataaaacagatatgtaatataatacayattaattatattacatgttagtacagacatggggaaaagaggcaaaactcaaaatgtctctctgttgcttctttttgtcttgtacatcatttcttataat

SEQ ID NO: 39945 - DNA, 201 bp, Homo sapiens
cttttgagacagtcaagaggatgttaatttaatgaaatcatgaacttatgcttcttatctcctcctcctcctcctcattcttctctctctctcaacacacrtacacacacacacacacacacacacacacacacacacaccattccatctttagaggtcatcatgcctttgcatgtcatgctttgtgctgtggtggctgga

SEQ ID NO: 39946 - DNA, 201 bp, Homo sapiens
cgcggtggctcacacctgcaatcccagcactttgggaggccaaggcaagcagatcccttgagcctaggagttcaagaccatcctggataacatagcgaaaccccgtctccacaaaagacaaccaaaagctagccaggcgtggtggcacatgcctgtaatctcacctactcgcgaggctgagttgggaggatcacttgagtc

SEQ ID NO: 39947 - DNA, 201 bp, Homo sapiens
catttggtgcaggctcccatcccacggccccctgcccatgcgccatgctgtagcatgtgtaattcctatcaactttctgaaaatagcaggctccaggcctcgtgttgcatactacctggaacaccttccctcttccttctcaactggctgcatctgactgatcactaaagatgccattcaggtgcctcctccaagaagcta

SEQ ID NO: 39948 - DNA, 201 bp, Homo sapiens
acacaaagggcaatataaaactttgtgtgtgtgtatgcgtgcatgtgtgtgtgtgtagttttgactcattactaaaaattaccacttagagaaaagaaaayggaaattgaagcagtcaaacatcaaattcctttgagtttctcctgtgactcagcctttcaaaacttttcattggccctggccccaggctgtccagccacc

SEQ ID NO: 39949 - DNA, 201 bp, Homo sapiens
catctgactgatcactaaagatgccattcaggtgcctcctccaagaagctagctgggtcatatgcacctccactggtgggacggggagagtggacagaacrcctatgagaacatgtgccagtctgtatgtttctggtgctgatctccttgactaaacagacttttattattactgagataggatcttattctgtcacccag

SEQ ID NO: 39950 - DNA, 201 bp, Homo sapiens
ctgctcttcccaccacagtccctggctctgaggagctgtgctgctgctttttattttttttatttaattgtattttatttttggagatggagttttgctcttgtcgcccaggctggagtgcgatggcaagatcttggctcactgcagcctccacctcccaggtttaagcgattctcctgcctcagcctctggagtagctgg

SEQ ID NO: 39951 - DNA, 201 bp, Homo sapiens
gtggcacaatctctgctcactgcagcctctgcctttcaggttcaagtgattctcctgcctcagccacccaagtagctgggattacaggcgtgcgccaccaygccaggctaattttgcatttttagtagagatggggtttcaccatattggccaggctggtctcgaactcctgacctctgttgatccacctacctcagcttc

SEQ ID NO: 39952 - DNA, 201 bp, Homo sapiens
gttttgttttagagacaattgcagtgcagtggcacaattgtagctcactgtaacctttaattcctgggctcaaatgatcctccagcctcagtctcctgagwagctaggaccacaggcatgcaccaccatgtccagctaattggttaactttttctttgcagaaatggggtcttactgtgttgcctaagctgatctcaaact

SEQ ID NO: 39953 - DNA, 201 bp, Homo sapiens
tcgtgatagtgagttctcgcgatagtgagttctcgcaagatctgatggtttaaaagtgtttggcagttcccccctagctctctctctctctctctctctcycccccctaatgccatgtaagacgtgccttgcttcccctttgccttccgccatgattttaagtttcctggggcctcccacactatgcagaactgtgagtca

SEQ ID NO: 39954 - DNA, 201 bp, Homo sapiens
ctttgggaggtcgaagtggatggatcacctgaggtcaggagtttgaggccagcctggccagcgtggtgaaacctcgtctctactaaaaatacaaaaattakccgggtgtggtggcacgtggctgtaatcccagctgcttgggaggctgaggcaggagaactgcttgaacacaggaggcagaggttgccatgagctgagatc

SEQ ID NO: 39955 - DNA, 201 bp, Homo sapiens
ttatgttttttcaatagtacagtaatttgaaaaaatctttctgctccactaaaggtttgccatttgacggtcaagatttatcttagatttggctgggcgcrgtgactcacacctgtaatcccaaccctcagggaggccaaggtgggtggatcacctgaggtcaggagttcaagaccagcctggccaacatggtgaaactcc

SEQ ID NO: 39956 - DNA, 201 bp, Homo sapiens
ggaaaggcatcggggaagagaatctctaggatggacttgactcggggctctccgagtccttccctgtgtcagcgcgaggccttaggatcacattgatccayggagacttcttagccaaggaaaatgccttaggaaggcagaaaaggtgggggacctgctagaataagttgagtagtgctcagaagtaatttgaaagcagat

SEQ ID NO: 39957 - DNA, 201 bp, Homo sapiens
tgcattattatttggaaaaaccaaccgtaaaaatacatttttgaggcaactggagaaaatcaattatagatcaagtattagatgataccaaataatattgktaattttgttacatataatagcattatagttatacaaggaaatattcataattttaaaatgcatattgaagtatatagaggtaaaatgagttgatatttt

SEQ ID NO: 39958 - DNA, 201 bp, Homo sapiens
ttctgattgcttttcttcctcagccaaaaaaaagaagttttggtcaagactgattagagaaacaagccctgattcacttgataacgtactaaattggggaytcccaataatacatttttttcttgaatctaagcccttgggatgccatccaattggaattgtgaactgagtgattttgcttataactctgaaagcagatta

SEQ ID NO: 39959 - DNA, 201 bp, Homo sapiens
aggcggaggttgcagtgagctgagatggcactactgcactccagcctgggcgacagagcaagactccatctcaaaataaataaaaataaaaactaataagyactagaagaaaacaggagaatttcttcatagctgtggatttggcaaacctttccaactgatttaaaattaagaaaccatgaaagaaaagattgataaaaa

SEQ ID NO: 39960 - DNA, 201 bp, Homo sapiens
ctagatgcatgcatatataatttatggatttcccaattaatgtgctgtttttgtcctgtcacagcagtaaatatttattaattacatacatttccagtatyattaagcatgctaagtgttgagaaagtggaagacacgcaggcccttaagtttaattgggtggaagagtattagaaggaatgtaatctggagcaaggttga

SEQ ID NO: 39961 - DNA, 201 bp, Homo sapiens
atcaacccctcctgtatgtatcaccatgatctgatccctgcccttaaggatcttggaattgtgtactggagagaagacaccattggaccatgagtgcctgsggtatatgaagtggcctctgtgtatatattaagtgaatgaatgagcacatgagagggggaggaataggggagagaggcaggaagtcgacaggaagatgta

SEQ ID NO: 39962 - DNA, 201 bp, Homo sapiens
tgtacctaaagaactcttgtgaatcgcaagttgtaagcaggttgagagttcagaggagggaacattatcctggccacttaggacactgggaggaggaatcrtgcccgcagggcagaggctggctcggtggggcagtgccagctgagatctcctggcctttttgtgtctgtgttggtcgccccgttaggatttctgtcttcc

SEQ ID NO: 39963 - DNA, 201 bp, Homo sapiens
atatatatatatatttgaatatatattttttaaagccacttttccactaaggggaaaaaacccactaaagagaaaaaaaaaactaggaaaactatttgccrctcacatcacaaacaaatggctaatatattaatatagacatttctggaaatccttttaaaaagttaaaactatcaaaatagacaaaagatctgaacagac

SEQ ID NO: 39964 - DNA, 201 bp, Homo sapiens
aagaagagaagtctaatggaaaatcaattaactattttagtaattttctacacgatacccaaattttaaaaacttaaaagcaaaggtgagttgaatcatgytgaggactatatatgtacataaaagctgcgaactcttcattctgtttgctaagaacctgttgcttggcattgcttgtctctcagtgtccatgtgacgcac

SEQ ID NO: 39965 - DNA, 201 bp, Homo sapiens
atttgccactcacatcacaaacaaatggctaatatattaatatagacatttctggaaatccttttaaaaagttaaaactatcaaaatagacaaaagatctraacagacagctcacaaaaaagggaaaaggaatttaaggagtctaaaacatatggaaagatgctcagcctcatttttagtaagaggaaagaaatgtaccat

SEQ ID NO: 39966 - DNA, 201 bp, Homo sapiens
acccaaattttaaaaacttaaaagcaaaggtgagttgaatcatgctgaggactatatatgtacataaaagctgcgaactcttcattctgtttgctaagaamctgttgcttggcattgcttgtctctcagtgtccatgtgacgcacaaccaaaccctcatgtttcagatgttaaccttgtgtagaggagacacaaacgaaat

SEQ ID NO: 39967 - DNA, 201 bp, Homo sapiens
acacggaagtttccaatcagatcaccctcgtggaagacgtcttagccaagctctgtaaaaccatttacccgctggccgacctcctggccaggccactcccrgagggggtcgatcctctgaagcttgagatctatctcaccgacgaagacttcgaggtaagcggttcttccggtggggtggggatgggagtaaaacaacaca

SEQ ID NO: 39968 - DNA, 201 bp, Homo sapiens
aataaatgaaaaaagttaccaatttactccccaatataaaacattttacctgcgatctatgtgtacatattgaatgatgtgtaacaatatcataatttttrtgttctgcattttttcacttatatatctttatttaaatggacttaactttattaatggagtaatttttagctttcagaaggagttctcactcgaagataa

SEQ ID NO: 39969 - DNA, 201 bp, Homo sapiens
gagtgcacaagggtaatcatgttgcctgaaggaaaggccctgattgtcattcttatgagtgtccataaaggtcttatttaccattggcatcgttcacagcrtacactttcatcataacgaaaatgaagccaaacgtattcgggagagaaaagtcaggtaccagattgctcatcaatttatccaatttcaagtttcatggga

SEQ ID NO: 39970 - DNA, 201 bp, Homo sapiens
agtgtcattctgtgtgtaaatacatgtctttacttgaaatctgcacctctcatccatgtgaccttcttgtaggccgatcaaatgaagaggaggaaacttcygattcttctctagaaaagcaaactcgatccaaatactgcacagaaacctccggtgtccacggtgactcaccctatggttcgggtaccatggacacccaca

SEQ ID NO: 39971 - DNA, 201 bp, Homo sapiens
taggatgatctttattttacgtgcattccatcatatgtaaacaaagttagggtctcaacattcccactagcaccttcagccaactcccaagcttctgtctyagcaaagcgtttgctgtagaagcctacactttgaacccatccttattttaggtgaaatcatttatttcgtctatgtttttactctctagtgtgtcatatc

SEQ ID NO: 39972 - DNA, 201 bp, Homo sapiens
cttaaagaatcagaatttatagtttacttagaagcacacagatagaagtgtgcaaaacaagtttcacagaaatatttcattgccagaatcctgaaataaartctccacagaaggaaactaagaaatccaaacttcttgtctcacaattgttacctaggctgggcctcagtgtaatcctactaagcttaatttttacgtcat

SEQ ID NO: 39973 - DNA, 201 bp, Homo sapiens; identical to SEQ ID NO: 6466

SEQ ID NO: 39974 - DNA, 201 bp, Homo sapiens
aggatgatctttattttacgtgcattccatcatatgtaaacaaagttagggtctcaacattcccactagcaccttcagccaactcccaagcttctgtctcrgcaaagcgtttgctgtagaagcctacactttgaacccatccttattttaggtgaaatcatttatttcgtctatgtttttactctctagtgtgtcatatct

SEQ ID NO: 39975 - DNA, 201 bp, Homo sapiens
gattataggcatcagccaccatgcctggttcatctctttatttccagaatcagttgcttttactatttcctctccttcctcttctcctcccaacactcccktttttctttttgttgctaattatctatgaccttaccatcaagtttctaatttagttatccaaggtactgacgttgttcctcgctgagttttttttaacta

SEQ ID NO: 39976 - DNA, 201 bp, Homo sapiens
taaaatttggatgaaatgaaagtgattttcagcagtctctaattagaaccaagaaaagtctatcttaactttttccagtggaagttacatgatactcggtwtattaacggttttgatacttatccagttgaaataatgtggggcaagaaaagggacatgttaggccaggcgcggtggctcacacctgcaatcccagcactt

SEQ ID NO: 39977 - DNA, 201 bp, Homo sapiens
tacatgtgtgagccaagcagatggtttttaaactggggtccaagaacaagctttagaatgttagaatatctccccaaaaccatatggaaaatgctaggggtttttttttttttttttgaaagctcatttaataaaggagagcatccattgttttcattactcttcttaaaggggctgtgactcccaaaaagtgaagaacaa

SEQ ID NO: 39978 - DNA, 201 bp, Homo sapiens
accgagccgtctgtgtgcagccatgttcagaagcccagggttttccagctatttgggagctttcaaattctctgagaaacaaggtaaggcaagataaataygaaatgcacttatgtatggattgtataacacgatgaatgcctggggtcctctattttgccctatgtattctcctgtgttcagttacttatacacatttct

SEQ ID NO: 39979 - DNA, 201 bp, Homo sapiens
ggtgatgattgataggtttttttttttgttttgttttttgagacaaggtcttgctctcttgctcaggttagagttcagtggcatgatcgatcatagcttactgcagccttgaactcctgggctgaagctatctgcccacctcagcctcctgagtagctggcaccatggacatgtgccatcatgcccagctaatttttaaaa

SEQ ID NO: 39980 - DNA, 201 bp, Homo sapiens
cctgctgtaattagttgcacaaaaaatcaaatatttacagaaatataaataaatgaaaaaagttaccaatttactccccaatataaaacattttacctgcratctatgtgtacatattgaatgatgtgtaacaatatcataatttttatgttctgcattttttcacttatatatctttatttaaatggacttaactttatt

SEQ ID NO: 39981 - DNA, 201 bp, Homo sapiens
tgctcttcccaccacagtccctggctctgaggagctgtgctgctgctttttattttttttatttaattgtattttatttttggagatggagttttgctcttgtcgcccaggctggagtgcgatggcaagatcttggctcactgcagcctccacctcccaggtttaagcgattctcctgcctcagcctctggagtagctggg

SEQ ID NO: 39982 - DNA, 201 bp, Homo sapiens
aatacaaatcactgttcagtagccaactgtgttaccagcccatcaatgccctgaggacactgcatagcagacattctcccgctggtgccttcaggtgcccsgaggcctgggcctgaactggccttccacactcttggctggagatgtggctccatctggcttcaccttcagtgcctcctaactcgtcagtaacactcagta

SEQ ID NO: 39983 - DNA, 201 bp, Homo sapiens
gggaggggaggggatgtgattatgctactcaggaccctattaatattttctatttctcagttagggtttgaggcatgggttcaagtcgtaccttttaggcrcccttggaatttggttttgatagcttcttgagtggtcttttgaaaaatagggctccactttcctctttggggtttaaataattaaaaccctttggttttt

SEQ ID NO: 39984 - DNA, 201 bp, Homo sapiens
attttatgatgttatcagtttgcttgtctctacagtttccaatttcctgtggccagaaagctagaaaactaagatattttaaaatcacatgcaattattgaaaaaaaaaaaaaaaaggctgggcttggtggctcaacaccagtaattccagcactttgggaggctgaggcaggagaatagctggagctcaggagtgcaaga

SEQ ID NO: 39985 - DNA, 201 bp, Homo sapiens
gtgatgattgataggtttttttttttgttttgttttttgagacaaggtcttgctctcttgctcaggttagagttcagtggcatgatcgatcatagcttactgcagccttgaactcctgggctgaagctatctgcccacctcagcctcctgagtagctggcaccatggacatgtgccatcatgcccagctaatttttaaaat

SEQ ID NO: 39986 - DNA, 201 bp, Homo sapiens
tgatgcatgccagtagttccagctacttgagaggctgaggcaagaggattgcttgaacccaggagttggaggcttcagtgagctatgatcacacactgcaytctagcctgggcaacagagcaagaccctgtctctaaaaaaaataaaaaataacatacagcaaccaaacagcagttcagttattaaaatctgttcatgtat

SEQ ID NO: 39987 - DNA, 201 bp, Homo sapiens
atgggggttgataggcagagagtatgaagagtgaactggagcccttagtgtatgtttgtcttaccaaacatagtttgcatagcagtagggttttttgtttgtttgtttgtttgtttgtttgtttttgagatggagtctcactctgttgtccaggctggagtgcagtggcgcaatcttggctcactgcaagctccgccccct

SEQ ID NO: 39988 - DNA, 201 bp, Homo sapiens
gatggtgagcattttttcatgtgttttttggctgcataaatgtcttcttttgagaagtgtctgttcatgtccttcacccactttttgatggggttgtttgtttgtttttttttttgtaaatttgtttgagttcattgtagattctggatattagccctttgtcagatgagtaggttgtgaaaattttctcccattttgtgg

SEQ ID NO: 39989 - DNA, 201 bp, Homo sapiens
ggttttccctttgtctttaagcaaaccagatttctaggactcaagtgtttcaggcacaggcttttttttttttttcttgtgagacggtgtcttgctctgtygccaagctagagtgcagtggcgcaatctcggctcactgcaacctccgactccctggttcaagcgattctcctgcctcagccttccgaatagctgggacta

SEQ ID NO: 39990 - DNA, 201 bp, Homo sapiens
ttattgtaattctttttgtaacttcagtgataaaagtaaatgatttgagcctatgatttccacaaaatctagggaaatgatttaatatcctttaatttttwaaaaaaaatggctttaaaaggttctgttgtggtatagttagtgataatagaaagctcctatttctggtgcctcagtggccattccagagccagtttcctg

SEQ ID NO: 39991 - DNA, 201 bp, Homo sapiens
atggtgagcattttttcatgtgttttttggctgcataaatgtcttcttttgagaagtgtctgttcatgtccttcacccactttttgatggggttgtttgtttgtttttttttttgtaaatttgtttgagttcattgtagattctggatattagccctttgtcagatgagtaggttgtgaaaattttctcccattttgtggg

SEQ ID NO: 39992 - DNA, 201 bp, Homo sapiens
tcactgtaacctgcaactcctgggcccaaacaatctttcttcctcagcctgttgggtagctgggaccataggcaggcccagctaatttttaatttttttgyagagacaaggtctcactgtattgcccagcttagtcttgaactcctggcctcaagccatcctcctgcctcagcctcccaaagtgctgggattacagacatg

SEQ ID NO: 39993 - DNA, 201 bp, Homo sapiens
ggtgagcattttttcatgtgttttttggctgcataaatgtcttcttttgagaagtgtctgttcatgtccttcacccactttttgatggggttgtttgtttgtttttttttttgtaaatttgtttgagttcattgtagattctggatattagccctttgtcagatgagtaggttgtgaaaattttctcccattttgtgggtt

SEQ ID NO: 39994 - DNA, 201 bp, Homo sapiens
ttttttcatgtgttttttggctgcataaatgtcttcttttgagaagtgtctgttcatgtccttcacccactttttgatggggttgtttgtttgtttttttytttgtaaatttgtttgagttcattgtagattctggatattagccctttgtcagatgagtaggttgtgaaaattttctcccattttgtgggttgcctgttc

SEQ ID NO: 39995 - DNA, 201 bp, Homo sapiens
aaaaacactcacactcggccaggcacggtggctcacacctgtaataccagcactttgggaggccgaggcaggcagatcatgaggtcaggagatcgagatcrtcctggccaacatggtgaaaccccatctctactaaaaatacaaaaattagctgggcgtggtgccacatacctgtagtcccagctactcgggaggctgagg

SEQ ID NO: 39996 - DNA, 201 bp, Homo sapiens
taactcagaaatcctgttagatgcccaggaattcagttggacacattgctctgaagaaaactaagaatacacatagtaacgaaataggtgaagtagaaaayaataagatacttccagccccacctctctaactgttacaaacctgtaaacttgaaatttcagaaatggtattatttgctggagaggtagtgttactgatta

SEQ ID NO: 39997 - DNA, 201 bp, Homo sapiens
ctggcaaagggaatgaaatgaaaggtagacctcattttctttctttcttttttctttttcttttttttttttttttttttttttttgagacagagtctcaytctgactccaagctggagtgcagtggtgcaatcttggctcactgcaacctccacctcctgggttcaagcgattctcctgcctcagcctcccaagtagctg

SEQ ID NO: 39998 - DNA, 201 bp, Homo sapiens
acgacagggggtgtatggtggcaaattacgagtgactgctatgggtctgtggtttcttccgggaatgatgaaagtgactagaattgagtttctaatggtcstacaattccgtgaatatattaaaaaccattgaatgatacattttacattagtgaattgtatggtatgtgaattttatatcagtaagcctggtgtgtgtgt

SEQ ID NO: 39999 - DNA, 201 bp, Homo sapiens
tttttttttgagacagagtctcactctgactccaagctggagtgcagtggtgcaatcttggctcactgcaacctccacctcctgggttcaagcgattctcytgcctcagcctcccaagtagctgggactacaggcatgcgccaccacacccaactaatttttgtatttttagtagagacggagtttcaccatgttggccag

SEQ ID NO: 40000 - DNA, 201 bp, Homo sapiens
gcttttatttatttatttagacagggcctcgctctgtcacccagcctggagtgcagtggtgtaatcacagctcactgcagccttgacctcttgggcttaarggatcctcctacctcagccacccaagtagctgggaccatgggtgtgagtcacaatgcctggctaatttttaatgtgttttttgttttttgttttttttgt

SEQ ID NO: 40001 - DNA, 201 bp, Homo sapiens
gaaactccatctcaaaaaaaaaaaaaaaagggccaggcgcagtggctcatgcctgtaatctcatcactttgggaggctgaggtgagcagatcacgaaatcragagatcgagaccatcctggccaacatggtgaaaccccgtcgtactaaaaatacaaaacttagctgagtgtgctagcgcacacctgtagtcccagctact

SEQ ID NO: 40002 - DNA, 201 bp, Homo sapiens
aatgaggctaatgcctgtgtgcctatatgggaagatctccaaagcacattgctaagagtactttgcacacttctgcttatatatgaaagggaaactaagtrtctatttgtatttgcttgcataaagaaactccataaggacaaacaagaaacaaataacagtattcccgcccttatcctgggggatgcatttgaagaccct

SEQ ID NO: 40003 - DNA, 201 bp, Homo sapiens
tggcacgatctcggctcactgcaacctccacctcccaggttcaagtgactctccttgcctcaacctcccaagtaactgggattacaggcacctggcaccayatccagctaatttttttttgtatttttagtagagacggggtttcactatgttggccaggctgatcttgaactcctgacctcgtgatccgcccaccttggg

SEQ ID NO: 40004 - DNA, 201 bp, Homo sapiens
acttctgcttatatatgaaagggaaactaagtgtctatttgtatttgcttgcataaagaaactccataaggacaaacaagaaacaaataacagtattccckcccttatcctgggggatgcatttgaagaccctcagtggattcctgaaatcgcagatagaacctaatcctgtatatactgttttttccccatactgtacac

SEQ ID NO: 40005 - DNA, 201 bp, Homo sapiens
ggaggatcacttgagagcaggagatcgaggctgcagtgacgtatgattgtgccactgcactccagcctgggcaacagagcaggaccctatcaatccatcartgagtaagtaagtaaataaataaataaaggcacaatgaaagatcaacaatatggccaggcgcaatggctcacgcctgtaatcccaacactttgggaaggc

SEQ ID NO: 40006 - DNA, 201 bp, Homo sapiens
agtaagatactgtgatcactttgagagggcagggtccctttgctcattcctatatcatttcatcaccttcctcatgatccagccagctgctctattaaatwtgaaaaccaagtatgctttcaacctacaggtgaagaaattagatgaactgtctggccataaattataattcttgggagccagagctgtttcactgtggtt

SEQ ID NO: 40007 - DNA, 201 bp, Homo sapiens
tgcccttaaaggtgaacccagtgcaccttcatgaaccgtggtacacctttaagaacttggtatgccttcatgaacacttaaagtaccagggggcacttcaygaaacatcattaagtttctcctaagtcattgcaaaatgatcagaactcttttgtcgtggacagcatttcttttgtaggtgtttagagttgccaatagctc

SEQ ID NO: 40008 - DNA, 201 bp, Homo sapiens
tagttcagtttaaacacatttctacttttaaagaaagaatgcattaatgcattattctccctaataacgatttagaagcatcttgttgatagatacagagkagcacattttaagctttataattttcagtttcagctctggaattgggtaaaactgatgtgtacattggttttaggttaaaatgtggcatgtagcattttg

SEQ ID NO: 40009 - DNA, 201 bp, Homo sapiens
ttgttgatagatacagaggagcacattttaagctttataattttcagtttcagctctggaattgggtaaaactgatgtgtacattggttttaggttaaaaygtggcatgtagcattttggaaagcaaagtgaataaataaaaatccagggggaaattttttttcaatgcttttgctctaggaacttatttatgctggtatc

SEQ ID NO: 40010 - DNA, 201 bp, Homo sapiens
aagtggtcccatagcacgggtcccttgaagagagatgccattgtggggttttagttagaacagtctttcggtccttctcctggttcacaggatttgtttgratgttgttctcatcacaattctaccccttcgtttttgcatagggtccttttgtgccccaatatttcatgttctgggactaagaaaatgttaattgcctat

SEQ ID NO: 40011 - DNA, 201 bp, Homo sapiens
tatgtaaatgatgctgctgtttataaaagaaaatggtgagttcttacagtcctgattttgccactgacagcaccttagccaacctgtgtgtttctccatcygatgtggaggtgcaacaggcctgggctgcacgctgattcacctggggaactttaaaaaaattcccatgcctgggtcccacccagagattctggtgccgta

SEQ ID NO: 40012 - DNA, 201 bp, Homo sapiens
ggtgccgtatgtctgggtgtggtgaggggcatgggaaggttaagactccttaggagggtctaacaatgctcagctccagttggcaatgactaaaccagagsacttctaaagacacctccaacctgcccctttgtgatttctagtctgtgtcatacataactaatggccaaaattcagagtaaaaatttttcagtgattcat

SEQ ID NO: 40013 - DNA, 201 bp, Homo sapiens
tcccagcactttgggaggccaaggcaagcagatcccttgagcctaggagttcaagaccatcctggataacatagcgaaaccccgtctccacaaaagacaaycaaaagctagccaggcgtggtggcacatgcctgtaatctcacctactcgcgaggctgagttgggaggatcacttgagtctgggaagttgaggctgcagtg

SEQ ID NO: 40014 - DNA, 201 bp, Homo sapiens
gcctgggtgacagaatgagaccctgtctcaaaaagaaagggaggggggagaaaagaaaagaaagggaaggggaaggcaggggaggggaggggatgtgattrtgctactcaggaccctattaatattttctatttctcagttagggtttgaggcatgggttcaagtcgtaccttttaggcacccttggaatttggttttgat

SEQ ID NO: 40015 - DNA, 201 bp, Homo sapiens
gaccatttaagcccacgccccggttaggcctcttcccagttccagctcccacactgtccgctcttcttcctggcacggaggtgagggcccatggcctcccygttcacctattgccatcatctcctccacaagtaagctctccagtctcgtcctccaggaagccttccttcgtcacactcaccccatctgattatgctgttt

SEQ ID NO: 40016 - DNA, 201 bp, Homo sapiens
gtgagcatgtcttagctttgccttgataactctgtcatttttatgggcatcaaatattcagcttgaccttagaagaggatgatgcgtcctagggtgtgtcyatgtgtgtgtgtgtgtgtgtgtgtgtgtgtgtctgcacactcttattcatttggcatctgcctcccctactaggaaacagtttccaagaaagcaggaact

SEQ ID NO: 40017 - DNA, 201 bp, Homo sapiens
tgttttctgagcacttactgtgtgtcagggactggtataggtgttggggaaagagcggtgggaaacaaaattcctgccctcgtagcgtttaagttccaatrgaatggtactaaagtaccctgagcgattctcttgatcttcagccctacatctgttgttcaagtgcttaggttaataacaaaatgtaaaatacctaccatg

SEQ ID NO: 40018 - DNA, 201 bp, Homo sapiens
ttttgcatgtcactgtgacataggaatcaagaactgaaatttgcagttcaataaacacgttgcatgagtgaataaaatgagcgcacgactactaaatactrtattttgttcttttttggttttcttccagttgcagaattaagacaaatctttgaaccaaagaagaaagaattcttagaaatgaaaaggtaagatctttat

SEQ ID NO: 40019 - DNA, 201 bp, Homo sapiens
aagcagtattccattttcctttagattcgatcgctgttgctcactctgcctcttgtggtgtatttcacagaaaagaaagaattgccaggcgcctggaaggrattgaaaatgacactcagcccatcctcttgcagagctgcacaggattggtgactcaccgcctgctggaggaagacacccctcgatacatgagagccagcg

SEQ ID NO: 40020 - DNA, 201 bp, Homo sapiens
ctctagaacagctatgatctatctggtaccaacagacattttatatatgtgcttgtctgctatctggacttttagactcacaggaaattctcctctgtgaygactcagtgtttccctgctttctgttcatgtgaaaaccatcaagtagtgagcactgaatgactggatttggcagagccttctccgctctccctggacgat

SEQ ID NO: 40021 - DNA, 201 bp, Homo sapiens
agaacatgatatggaggtttcatgcagagctgaggctgacattggacccctgggagagttgccattggtggatgatggtttgggcagggctccccatggaygccagagagccgccgatcggctcaggaaatagaccagggcaccctctggaatgcagcttctgtaacaacttgacacggtgcagcctcagccactaagaaa

SEQ ID NO: 40022 - DNA, 201 bp, Homo sapiens
ataatgaaaaaaatgggtttgccagagggtgggaagaggcatatctctcttctcaattcataccaaactccaaaattagttccagttactcacctgtttartttaaagaaaataatggaaaagatacatgaatatttaattcaggtggaatgaaaaaggccgtatgggaagggttaaggtaataatggaatgcctgttaga

SEQ ID NO: 40023 - DNA, 201 bp, Homo sapiens
aggtttcatgcagagctgaggctgacattggacccctgggagagttgccattggtggatgatggtttgggcagggctccccatggatgccagagagccgcygatcggctcaggaaatagaccagggcaccctctggaatgcagcttctgtaacaacttgacacggtgcagcctcagccactaagaaaggaaggggcttgtg

SEQ ID NO: 40024 - DNA, 201 bp, Homo sapiens
tcatgcagagctgaggctgacattggacccctgggagagttgccattggtggatgatggtttgggcagggctccccatggatgccagagagccgccgatcrgctcaggaaatagaccagggcaccctctggaatgcagcttctgtaacaacttgacacggtgcagcctcagccactaagaaaggaaggggcttgtgctggg

SEQ ID NO: 40025 - DNA, 201 bp, Homo sapiens
ttttttcttttttcttttttttttttttgagatggagtcttgctctgttgcccaggctggagtgcaatgacacaatctcagctcactgcaacctccacctyttgggctgaagtgattctcctgcctcagcctccctactagctgggattacaggcatatgccactgcgcccagctaatttttgtatttttagtagagacag

SEQ ID NO: 40026 - DNA, 201 bp, Homo sapiens
ccttttacttttagtcagctgcttacaagagaattgcctggtatttgtgggcagagtgtgactataatagactccgttcttttttttttttttttttttgkgacagagtcgtgctgttatcgcccgggctggagtgcagtggcatgatctcggctcactgcaacctccacctcccaggttccagcaactctcctgcctcag

SEQ ID NO: 40027 - DNA, 201 bp, Homo sapiens
ctgatggcttcataatcattctttgtctttgattcttattatttattttattttattttattttattttcattttatttttttgagatggagtctcgctcrgtctcccaggctggagctcagtggcgcaatctcggctcactgcaagctccgcctcccgggttcacaccattctcctgcctcagcctcctgactagctgga

SEQ ID NO: 40028 - DNA, 201 bp, Homo sapiens
gattgtctctgatcaggagcacgcattccacaggagaactggaaccgcgcttcagtctccttttgattaacaaacgttttaagtatgaaaacctccaacactggctcatctctgggaaaaataacaactaagaatgttttctttccctgagttgttcatagttaccacctctatgtgcgtctgtgtggattgtcctttaat

SEQ ID NO: 40029 - DNA, 201 bp, Homo sapiens
ccctagaattcatactgataaagcttatacgcatttcaaaatatatgtttgaggctgggcgtggtggctcatgcctgtagtcccagcactttgggaggccraggcgggtggatcacgagatcaggagatcgagaccatcctggataacatggtgaaacctcgtctctactaaaaatacaaaaaattatcgggcatggtggt

SEQ ID NO: 40030 - DNA, 201 bp, Homo sapiens
attgtctctgatcaggagcacgcattccacaggagaactggaaccgcgcttcagtctccttttgattaacaaacgttttaagtatgaaaacctccaacactggctcatctctgggaaaaataacaactaagaatgttttctttccctgagttgttcatagttaccacctctatgtgcgtctgtgtggattgtcctttaatg

SEQ ID NO: 40031 - DNA, 201 bp, Homo sapiens
tgtcacctcgtaaggatgcttccaatgaatctccaaaaagtagtttacatctgcatccttggtggagattttcttaagtagacagaatttctctttttttwtctttctttcttttttttttttagattagttttcctttttcgcccaggctggagtgcagtggcacgatctcggctcaccgcaacctctgccttccgggtt

SEQ ID NO: 40032 - DNA, 201 bp, Homo sapiens
tttgatccagtgctgtgttgcatttgctttgtgaattggtggggaaaatatggtaaataataatacaccattgtatgttaagaaacagctgggagaagtakgatcattttaaaaggctaagaaacaaggtggcaaacatctagaaaattctttaattaaagctaaagcaaatgagataagatcaatccttcgattgtgata

SEQ ID NO: 40033 - DNA, 201 bp, Homo sapiens
ttgctattgtgaacagtgctgcagtaatcatatgtgtgcatgtgtctttatagtagaatgatttataatcctttgtgtatatatccagtaatgggattgcygggtcaaatggtatttctggtcctagatcatgctgcaattatattttttttaactaaaatgttattgtaattctttttgtaacttcagtgataaaagtaa

SEQ ID NO: 40034 - DNA, 201 bp, Homo sapiens
actctaaataaataaataaataaaatacttgataaagatcttgaaaaatatggctttctggtccccacccagacctatttactcaaaaccagagggtaggkattatcaacctctccactgcaccagagcatcactcattcggcccgcatccctcctccttcttctttttttttttttttttttgagatggagtctctctgt

SEQ ID NO: 40035 - DNA, 201 bp, Homo sapiens
accacacccagctagttttttgtatttttagtagagaccaggtttcaccatgttggccgggatggtctcaatctcttgaccttgtgatccgcccacctcarcctcccaaagcgctgggattacaagcgtgaaccaccacgcccagcctcatccctccttctatagcatcttggcccagtgccatccagccatcagcttgag

SEQ ID NO: 40036 - DNA, 201 bp, Homo sapiens
acattctcttatgacttgcaatgggaaaaagggctgaggatcgattttttttttcctgagatagctgaggaggtgagtcctgccaacatctgagctacccsctagggcaggcagaatatttctggagaaaaacgagccagcatattgctaacagattccatggcattccaaaccccaccctcccactgggccatttggtat

SEQ ID NO: 40037 - DNA, 201 bp, Homo sapiens
aggggcatgggaaggttaagactccttaggagggtctaacaatgctcagctccagttggcaatgactaaaccagaggacttctaaagacacctccaacctkcccctttgtgatttctagtctgtgtcatacataactaatggccaaaattcagagtaaaaatttttcagtgattcatgtaacgagctcatccagccagaca

SEQ ID NO: 40038 - DNA, 201 bp, Homo sapiens
tgcctggagaactgcttaaacccaggaagtggaggttgcagtgagctgaggaccatgctactgcactccagcctgggtgacagagcgagaccctgtctcaaaaaaaaaaaaaaatgcagagtgaatggagcttgtttgggcaggggagagccttgattgacaaaacaagtggtgtgtgtttatggacaatggcaaaccttg

SEQ ID NO: 40039 - DNA, 201 bp, Homo sapiens
cttccatacccacagaggcaggactgctagagccccactcatgagaatcacagtcatttcccagcttcctggggcttccttccatgcccgcagaacagagkcgggactgctagagccccactcatgagaatcacagtttccacagagaagaccagtctagcttggactgtgggttcctggttttgcagatgtagagtggtg

SEQ ID NO: 40040 - DNA, 201 bp, Homo sapiens
cttaagtttattttacataacattttaaatagttttgtgtatgaaacagagtttgtgtccattgaacaatcagaaatcaaaagtgtcattgtctcatgtcraagctcaaaaaccttgtgattttggagctgaaccaattttggattttctgattagggatgctcaacctgtagtacactacggggtattttcaccgccttg

SEQ ID NO: 40041 - DNA, 201 bp, Homo sapiens
ttcattaaatattgattgcgcaccagccatggatggtgttagatgctagggatgcagcaaaaactgaggttgacagtgctcatgtttagataataaatacrttaacaattaaggaaaggtaatcattgagagacacaatagcaaatgtttaagagcctggtatctgcagctcagtggcttgggttttaatcctgggtttga

SEQ ID NO: 40042 - DNA, 201 bp, Homo sapiens
cttaataagttttggcacattgtccaaaatattacattgtaaatttgggaagttccatagttcttttacttagaaggtttgaattagaggtgaattgccckagatttgagaaggaggccgggaggcagagagtggaaggcatttgatgtatctgggttttgataaccaccctgttcatgttttagtgaagaccatctttgg

SEQ ID NO: 40043 - DNA, 201 bp, Homo sapiens
agccaatgcctgagacaacaagtgttgccaaggaagaaggctttaattgggtgctgcagccgaggagatgggagctcagtctcaaatccatctctctgacwgaccaaaactggctatatagcagggaagaaatgtaatcatgtgtgggaaaacaggaactcagaaggggcttggaagcaatcatgttgaatcagcgtccac

SEQ ID NO: 40044 - DNA, 201 bp, Homo sapiens
tttactgttaatttggatcaaatattgggtctggaaaatgctcctccccttcctacgtaactgtcagagtccatgcaacgatggacaccttgacattgaarcctccattacggaggtctcactgttaactggaagaatcgcagctgcaagaaactgaacagcacctggcgacttaggtagaatttgaaacagaaatgagaa

SEQ ID NO: 40045 - DNA, 201 bp, Homo sapiens
agactaagtgaggaagatccaccctccatgtgggtgatcactgtccaattgactccgggcctggatagaaaaaaagacaggggaaaggtctttgctggagytgcaacacttcttctactgcccttggacatcagagctccaggtcctctgtcctttggactctggcatgtgcaccagtggccccaggattctcagatcttg

SEQ ID NO: 40046 - DNA, 201 bp, Homo sapiens
ggtcccagctgaggtgggagggtcactggagctcaggagatcaaagttgcaatgtgccatgatcatgccattgcactccagcctggccaacagagggagamcctgtctcaaaaaaaaaaaaaaggaagaagaataaaaatattagctgagcatggtgatgtgcacctatagtcccagctacttgggaggctgaggtgggag

SEQ ID NO: 40047 - DNA, 201 bp, Homo sapiens
taagttcagcaagattgcaggacataagattaatatacaaaatcaattttgttatatatacttgtaatgaataatatgaaataaaatagaaacaataattygttttctaatagcatgaaaaagataaaaaacttaggaataagtttaacaaaagaagtgtaaaacatataccttaaaactataaaacatcattgaaagaaa

SEQ ID NO: 40048 - DNA, 201 bp, Homo sapiens
gagaataccatttatggctgttgctagcatacaaaatgctcctttactgggctatgaaaatatgttcttcactttggaatttcactccagccatcatcatyagtagcttatagtagatttcattaaaatcatttccatagcacttcttgattttggaaatgtattgataagtcatgtcagtatgtattcagacaactgcta

SEQ ID NO: 40049 - DNA, 201 bp, Homo sapiens
gtcctccaacattgggggttataattcaacatgagattggggcaagaacacaaatccaaaccatatcaggctgggcacagggactcatgcctgtaatcctrgcactttgggaggccaaagcggaggattgtttgagtccaggagtttgagaccagcttggtcaacatagcgagaacgactcagaaaaaaaaaaaaaaggaa

SEQ ID NO: 40050 - DNA, 201 bp, Homo sapiens
cttcgggaggccaaggtggaagaatcacttcaggccaggagtttgagaccagcctgggcacatggcaagatcccatgtctacaaatttcaaaaaatagccrggcgtggtcccagctactcgtgaggctgaggtagaaggatggcttaagcccaggaggttgaggctgcaatgagccgtgtttgtaccactgcactccagcc

SEQ ID NO: 40051 - DNA, 201 bp, Homo sapiens
taattcaacatgagattggggcaagaacacaaatccaaaccatatcaggctgggcacagggactcatgcctgtaatcctggcactttgggaggccaaagcrgaggattgtttgagtccaggagtttgagaccagcttggtcaacatagcgagaacgactcagaaaaaaaaaaaaaaggaaaaggaaaaaggcgattcacag

SEQ ID NO: 40052 - DNA, 201 bp, Homo sapiens
ccttgtgtggattaaataatgcagtccatttttggagtgcttctatacgtgttctctcattttatcctgacctcaccatcctatttccctctttgattttrttgtggctggccagggaatggctgttttgcctttattaaaacaatttttttagagacagggtttaatctgttgcccacactggatgagtgcagtggcgtg

SEQ ID NO: 40053 - DNA, 201 bp, Homo sapiens
agtggagacaatttggcacctgttttcagaagtgttgctgtcaccagattctgatgaaaaattgctcttggatctttacctgctctgctgaaatgcccaamaaggtgctggttgggtttggaggtcgtgtcttcctgggagccagcccttctgggtatgaatgttgcatctgtgtagggagttgctaacttgtaggcaggg

SEQ ID NO: 40054 - DNA, 201 bp, Homo sapiens
acgtgttctctcattttatcctgacctcaccatcctatttccctctttgattttgttgtggctggccagggaatggctgttttgcctttattaaaacaatwtttttagagacagggtttaatctgttgcccacactggatgagtgcagtggcgtgatcatagctcactgcagccttggcctccagggttcaaacgctcctc

SEQ ID NO: 40055 - DNA, 201 bp, Homo sapiens
agaccttatttaaaataaaatttaccacagaacaggaaatagaagctgtggaagactcgaaatacacctttgtacttctctgttcttcacctgctctctcrctgtctctacacacacacacacacaaacacacacacacctatatttgcattaaaaatgggtagtaaaagcagtgaagggcaaacagaaggtacaatacaa

SEQ ID NO: 40056 - DNA, 201 bp, Homo sapiens
cggatacgtttactaattttctttgctagctttaagacttttaaaacattctttggccctgggagggagttgtataaccataaaacttgagaatcctggcmctagaataaatgttccttttaaaaccccaaggacagaaaattgaatacagctgtgcaaaaaagaaaaaaaagaaaaagaaagcaagaaaagaaaaaaaag

SEQ ID NO: 40057 - DNA, 201 bp, Homo sapiens
attctttttggcatggttatctatcatcttgcttgtcctaagcatgtcctcttgttttcccctgcagaggattggggtttctaggtcattctctgtgatgmcgtgattctgcaaaccttatagttcctacctaaaagtaagcttcagagtttaagcagtttccaccagtcagaaggtggaacggatgagtttttaagacgc

SEQ ID NO: 40058 - DNA, 201 bp, Homo sapiens
taagactttgttgagcatcccaagtaaagacaggatacttcatatttcgtatgagttaaaatcttaatattaaaaaaatgtatataacttgtcttaagacytagaaaaaagcattgttgacatatttaggcctgtaataaaataaagccacttctttgtaggttattttgaagatgcatgttacctagaagttttcataag

SEQ ID NO: 40059 - DNA, 201 bp, Homo sapiens; identical to SEQ ID NO: 6467

SEQ ID NO: 40060 - DNA, 201 bp, Homo sapiens
aacaacttgacacggtgcagcctcagccactaagaaaggaaggggcttgtgctgggcacttggagtttatttctgattgcatttgctcatctcctgatgasagattttagtctaaaaaccgtctccagagcctcaagctctcttggctcagtggtctgtttccatgcactgagagaggtgtctgcaggagagcatcgtgct

SEQ ID NO: 40061 - DNA, 201 bp, Homo sapiens
acacggtgcagcctcagccactaagaaaggaaggggcttgtgctgggcacttggagtttatttctgattgcatttgctcatctcctgatgagagattttartctaaaaaccgtctccagagcctcaagctctcttggctcagtggtctgtttccatgcactgagagaggtgtctgcaggagagcatcgtgcttgaccttcc

SEQ ID NO: 40062 - DNA, 201 bp, Homo sapiens
aaggatgtcagttttgctctcagatatttgaataactttagaaacaactggagcaatctctctttatttttattttatttttgttttttagggacagagcytctctctgttgcctatgctggagtgtagctgtacaatcatagctcactgcagcctcaaactcctggattcaagtgggcctcctgcctcagcctcctaagt

SEQ ID NO: 40063 - DNA, 201 bp, Homo sapiens; identical to SEQ ID NO: 6436

SEQ ID NO: 40064 - DNA, 201 bp, Homo sapiens
ctctctctctctctctctctccctccccctccttctccctttctctctccccctctttctctttctttctcttccttgctgcccttattatctttcacctrttcttggtatagtctaggccaggctaacctgacttaaacatgtgtgagtctcgtagcatatatacttggtctaaagacggtaaagctgtctgttttgtgg

SEQ ID NO: 40065 - DNA, 201 bp, Homo sapiens
cagtgtcacaggatccttagggtgtcgctttaccagctggaaacctctgttgctggtggcacctctgcctgagttttgctcatgcctgctggacttgttcygtccactcagcccagtaagatgtgctcagcttgtgctaccagcctggatcccatgcctgccaagggcaagccaggcatggagcagcaagtgggtatgtga

SEQ ID NO: 40066 - DNA, 201 bp, Homo sapiens
ttgctctggcccgtggctcatgggctggaccagccccactgctgtttcccatcatgtggggtggccactcagcaccagcagagggtgggagggctatagtrttaacagcagctccagctctgaggtctgggcccccagaagggttgccatcctttactcccatagcccaggagcatgtcaccacccacagctcagcgagct

SEQ ID NO: 40067 - DNA, 201 bp, Homo sapiens
cacaccaggataaatttctaatggatcaaatatttaaatagttcaatgtgtaggccaggcatagtggctcatgcctgtaatttcagcactttgggaggtcraagtggatggatcacctgaggtcaggagtttgaggccagcctggccagcgtggtgaaacctcgtctctactaaaaatacaaaaattagccgggtgtggtg

SEQ ID NO: 40068 - DNA, 201 bp, Homo sapiens
tctactaaaaatacaaaaattagccgggtgtggtggcacgtggctgtaatcccagctgcttgggaggctgaggcaggagaactgcttgaacacaggaggcrgaggttgccatgagctgagatcctgccactgcactccagcctgggcgacagaacaagactctgactcaaataaacaaataaaaaaatagttaaatgtttt

SEQ ID NO: 40069 - DNA, 201 bp, Homo sapiens
cctttccaactgatttaaaattaagaaaccatgaaagaaaagattgataaaaatcaactatctctctctacacaaacacacacatatacatttatttatayaaaatatatattatgtaaataatatatatatatatttgaatatatattttttaaagccacttttccactaaggggaaaaaacccactaaagagaaaaaaa

SEQ ID NO: 40070 - DNA, 201 bp, Homo sapiens
aagaaaccatgaaagaaaagattgataaaaatcaactatctctctctacacaaacacacacatatacatttatttatataaaatatatattatgtaaataatatatatatatatttgaatatatattttttaaagccacttttccactaaggggaaaaaacccactaaagagaaaaaaaaaactaggaaaactatttgcca

SEQ ID NO: 40071 - DNA, 201 bp, Homo sapiens
agaaaccatgaaagaaaagattgataaaaatcaactatctctctctacacaaacacacacatatacatttatttatataaaatatatattatgtaaataatatatatatatatttgaatatatattttttaaagccacttttccactaaggggaaaaaacccactaaagagaaaaaaaaaactaggaaaactatttgccac

SEQ ID NO: 40072 - DNA, 201 bp, Homo sapiens
caaatggctaatatattaatatagacatttctggaaatccttttaaaaagttaaaactatcaaaatagacaaaagatctgaacagacagctcacaaaaaarggaaaaggaatttaaggagtctaaaacatatggaaagatgctcagcctcatttttagtaagaggaaagaaatgtaccatatctgggaaacctcagagcag

SEQ ID NO: 40073 - DNA, 201 bp, Homo sapiens
ctcgttttctcccccaggatgatggcccccaaaggagagttgcctcaaaggacagcgttgcaggggtgcttgtgtgtcatcagccagaacaagtgacagcrtctgactccccaaatagcctccctgtaagtctgagctgccgctgtgacctgcgctacacagtccctgaaggtttaataccgtgactgtcatctaacgcct

SEQ ID NO: 40074 - DNA, 201 bp, Homo sapiens
gccagacatggtggcacatgcctgtaatcccagctacttaggtgtctgaggcatgagaattgcttgaacccgggaggtggaggttgcagtgagccaagatkgcaccactgcactccagcctgggtgacagagcaaaactctgtctcaaaaaaaaaaaaaaagaggaacaataataaataataaaatacaattctagtaaga

SEQ ID NO: 40075 - DNA, 201 bp, Homo sapiens
gcctcaaaggacagcgttgcaggggtgcttgtgtgtcatcagccagaacaagtgacagcgtctgactccccaaatagcctccctgtaagtctgagctgcckctgtgacctgcgctacacagtccctgaaggtttaataccgtgactgtcatctaacgccttagcttttgaccttgtcaatttgggaggtgacacgtctcac

SEQ ID NO: 40076 - DNA, 201 bp, Homo sapiens
ctggctgatttttgtatttttagtagagacagggtttcaccatgttgaccaggctggtctcaaactcctgacctcaggtgatccaactgcctcggcccccygaagtgctgggattacaggcgtgagccacagcgcccggcctctccctttcttttttaaaaaaattatatttagtcttctttcaggcttgaccatttgcat

SEQ ID NO: 40077 - DNA, 201 bp, Homo sapiens
tagcatgttcttcctgattctccctacatgcaaatatttctgtttcacatcatggcttcagattttaggaaagacaagaagactttaagtaatagtctcargctgaggaaagagaagtaatacttttcctctctgcaaactattcaagaaatgtggttggctaagaatgggagaaatttaaggatagaagtgatttcagtg

SEQ ID NO: 40078 - DNA, 201 bp, Homo sapiens
taaagagacttacttgtttctgttatgtcaatgttattccagatatagtctgtcaggggaggcggtttaaaaggaaatgtcagaattaacatttttttttwatccaaataaatgttattttagggtaaccggcatgtatagtttttccatatgtaaaaccttaggctgcttttatatttcattgcctaacaaaggaatgga

SEQ ID NO: 40079 - DNA, 201 bp, Homo sapiens
tcctctctgcaaactattcaagaaatgtggttggctaagaatgggagaaatttaaggatagaagtgatttcagtgcttgcctgcccatttgattgattgayccattcaagcagtattgatagtttacttgttctgagccaggctctgtgctagaaatgcacccggaagtgtgcatcacgtgctgtctctccagtttttata

SEQ ID NO: 40080 - DNA, 201 bp, Homo sapiens
aagtgatttcagtgcttgcctgcccatttgattgattgatccattcaagcagtattgatagtttacttgttctgagccaggctctgtgctagaaatgcacmcggaagtgtgcatcacgtgctgtctctccagtttttataatcctttagctaggagacaataaaggcttttgagcaggaaaggtgtgattggtaataaaga

SEQ ID NO: 40081 - DNA, 201 bp, Homo sapiens
gcctgttatcaaggatcttggtgaccatctagaccaactcctcaatttacagccaagaaaatgcatctgctggaagaagtgagcaggctgattttgagccmtaggcgccattcattcatgccaggattttctcctggatttttagcctatgtctaagctttggggatttaagaggtcttattgccttcatcttcatttgta

SEQ ID NO: 40082 - DNA, 201 bp, Homo sapiens
ttatcaaggatcttggtgaccatctagaccaactcctcaatttacagccaagaaaatgcatctgctggaagaagtgagcaggctgattttgagccataggygccattcattcatgccaggattttctcctggatttttagcctatgtctaagctttggggatttaagaggtcttattgccttcatcttcatttgtatttaa

SEQ ID NO: 40083 - DNA, 201 bp, Homo sapiens
aaaggaaaagaagtcattatataaaaaagacacatgcacccgcatatttatagcagcacaattcacaattgcaaagacatggaaccaacctaagtgcccayagaccaacaagtggataaagaaaatgtggtatatatacactgtggaatacttctcagccgtaaaaaaagaatgagataatgtctgttgcaagaacctgga

SEQ ID NO: 40084 - DNA, 201 bp, Homo sapiens
ggaaggttgggagaggagtgagggataaaagactacatattaggtacactgtacactgctcaggtaagggtgcactaaaatctcagaaatcaccactgaaraacttatctgtttaatccaaaaccacctgtacccaaaaaactattaaaatttaaaaaatcatttgcagtcaggtgcggtggctcacacctgtaatcccag

SEQ ID NO: 40085 - DNA, 201 bp, Homo sapiens
cacaatgtcagaaacagtggcatctgagctttcttatttagggaaaaagactattgaaaagaaaaaaagagccatcctttcactttggcaaattggtggcrtgtaaggacttagtggaactccctgaactgttgcagaatccacctcacgcctctatggtgttctgccctagagggaccggctggaggctcctgtgtttcc

SEQ ID NO: 40086 - DNA, 201 bp, Homo sapiens
ttagcaggtgcctggcctgtgttcacattgtaggtgcaggaaatactcatcactgacattgtcagcaggaacagcgtaattactgtttttaacttgaagayaagataatgtggatctccccaaaacaataacaataacaattaataacaaagagtcactgtcgtggacttacgcttttgcttttgtgcagaggtggcatgt

SEQ ID NO: 40087 - DNA, 201 bp, Homo sapiens
gtgaatgtttgaagagaaaaaagggaataaaggaagaatcaattatgcagagtttttgggtaggtggaggaatgattgatctggtcttgtctttgttctayaccagggaagataagcttgtaattgacattatcagtgcggaatcgaatagactttagttttaagagctagacttagattgtaaacataaaattacaattg

SEQ ID NO: 40088 - DNA, 201 bp, Homo sapiens
tgaggcacaagaaccacttgaacccgggaagcagaggttgcagtgagctgagatcatgcctctgcactccagcctgggcgagagagcgagactctgtctcaaaaaaaaaagttttaaaacaaaaaggcaagactgaacaaaaaaaaatggagggcaaataaaagaaagaaaacaacattctcacgatgttgaatgtgttct

SEQ ID NO: 40089 - DNA, 201 bp, Homo sapiens
gaaggaatcctcgtgaaggagaaggggtgtgtggtgcttctgtgctctcatatgtgacacctgctcacatgcacacaggctggcctcatcatgcatgactstaaagacattttgggtcacactgcagaaaagaaagtgttgggactggtctctaagctcgccctgcagaaacagcgagctgtcctagctgtcctgggaatg

SEQ ID NO: 40090 - DNA, 201 bp, Homo sapiens
ttttttagagcagtttcaggttcaaaattgagcagaggctgggcgcagtggcttacgcctgtaatcccaatgctttggaaggctgaggcaggctgactgcytgagcccaggagttcaagactggcctaggcaatatggcgaaaccctgtctctactaaaaatacaaaaattatctgggtgtggtggcacacacctgtagtc

SEQ ID NO: 40091 - DNA, 201 bp, Homo sapiens
tcaggcacttaacagttaacatccaactgtccgctactgtcagagcctgcagaggactgtgggacaggctgtgtcttgtgtgtacttttataatagtgtamaatgttaatgaagtattgcgttataatatgattttactataaaatgacagaatatctctttttttttcaacaagtattctctaactctacaaatatcaat

SEQ ID NO: 40092 - DNA, 201 bp, Homo sapiens
atctcatgctccttgaccccttcctaattttgctgtggttcggcagctccagtccactgttgaaatgctggtagatttcaaaactccgttgggacatattraattctggtgagccagtgggtgggatgccttctgaatgacaaaggggccccgtggctaaaagctgaaggaaattcatgcaatgatgaatgtgctgcaatt

SEQ ID NO: 40093 - DNA, 201 bp, Homo sapiens
gaattaaaaataatgaatatttgtaatcaggcatcgcttgaccaacaactccgcctccttagctggaaatacagacgtccacttttcgctggtgtgtaatyattttctggaatgctaagaattgttcccctgacctatggcttctttttaagcatccgggatatgcagtcaatttgcaggttgctgttttgaagtcaggga

SEQ ID NO: 40094 - DNA, 201 bp, Homo sapiens
cttctttttaagcatccgggatatgcagtcaatttgcaggttgctgttttgaagtcagggagtctcggagattgaatatatgccacctaagttcctgcaaratggactttctgggagtcctctgatgaggttgggagaaggcaaagaggagacgtttccatgtaaaggctgagcaagctccaggccactgcagaagttcag

SEQ ID NO: 40095 - DNA, 201 bp, Homo sapiens
gtggctcacacctgtaatcccagcactttgggaaaccgaggcaggtggatcatgaggtcaggagatcgagaccctcctggtcaacatggtgaaaacccgtytctactaaaaatacaaaaattaactgggcatggtggagcgtgcctataatcccagctactcgggaggctgaggcaggggaatcgcttgaatccaggaggc

SEQ ID NO: 40096 - DNA, 201 bp, Homo sapiens
ggcaggtggatcatgaggtcaggagatcgagaccctcctggtcaacatggtgaaaacccgtctctactaaaaatacaaaaattaactgggcatggtggagygtgcctataatcccagctactcgggaggctgaggcaggggaatcgcttgaatccaggaggcagaggttgcagtgagcctagctcgcgccactgcattcca

SEQ ID NO: 40097 - DNA, 201 bp, Homo sapiens
tgtagaccaaatgaatatcacctcttagagatgataccaataatcacaagccttgtcaacattatatcaatgcaattttagtaaaaagtaaattttccctsttgcagatcccatcaagtatgctagtcactcattgagaagaagagtgcacaagggtaatcatgttgcctgaaggaaaggccctgattgtcattcttatga

SEQ ID NO: 40098 - DNA, 201 bp, Homo sapiens
tagacctcaatgactataatgcattgagcaaaattccaatgtgtcatatttctcaacccttaaaaaaatcaatcctaggtaaaaagtaaggattttctcaygaggattccatcacatgtgtctgtcagttattgagaaaaccgtgtcatgatattcttgttgtctgaatgaataattgtaattattatagagctcagtctt

SEQ ID NO: 40099 - DNA, 201 bp, Homo sapiens
gcaatatgaaagtcacacacgtcagtggacagagactcaaagagacacagctattctcaaatcatggacattatgtcatgcatacctattaaaatgacagyctgtgtgccatggtgctaagtgtgaaatgggctggaggtacaagagcctgcttccttagaagaaatctggtcaaccagacaccagctaaaagagacgaaa

SEQ ID NO: 40100 - DNA, 201 bp, Homo sapiens
gtggacagagactcaaagagacacagctattctcaaatcatggacattatgtcatgcatacctattaaaatgacagcctgtgtgccatggtgctaagtgtraaatgggctggaggtacaagagcctgcttccttagaagaaatctggtcaaccagacaccagctaaaagagacgaaaatatgagctcatggggcttcgtct

SEQ ID NO: 40101 - DNA, 201 bp, Homo sapiens
aatcatggacattatgtcatgcatacctattaaaatgacagcctgtgtgccatggtgctaagtgtgaaatgggctggaggtacaagagcctgcttccttaraagaaatctggtcaaccagacaccagctaaaagagacgaaaatatgagctcatggggcttcgtctcccatatcttgtaatttaaacttcagtaatggaat

SEQ ID NO: 40102 - DNA, 201 bp, Homo sapiens
acagcctgtgtgccatggtgctaagtgtgaaatgggctggaggtacaagagcctgcttccttagaagaaatctggtcaaccagacaccagctaaaagagaygaaaatatgagctcatggggcttcgtctcccatatcttgtaatttaaacttcagtaatggaatgaacagattgtggaggagacttacaccgcatgggtgc

SEQ ID NO: 40103 - DNA, 201 bp, Homo sapiens
aggactggagttaggaactggggacttggtggtgaataagcccaagtctctgtcctcatgaagttcatgttctagcaggagagaaagacaagaaatagtcratatgtattgttctgtataaaaatgtgtgtaattttcatgacacattagatgtgattaaacatccctccctaggagcaagtcaacttcccctcctccacc

SEQ ID NO: 40104 - DNA, 201 bp, Homo sapiens
gattcatatgtgggaaacacccctatttttttcccactgggacacaggggtgcacacctggtcatctctaagtggcagtaacacatatgaagcagaccctygtggtactgaaatgtattaacccaaagacctgtcaccacatactcgagcatccagactgaaatacttagagagatcagcttccaacagaattaaaaggta

SEQ ID NO: 40105 - DNA, 201 bp, Homo sapiens
attgaccgtatgctcttatagttattctcaatgtttgtaatgatgttacctctggccatcacatcaactttgcataaaaggtacacaaaaaatacttcagsgtgaattgtagtattcatttgaagtgttttgtagtaatcattcattcattcgacatattttaattttttaaaatatttttaattcaatcatttaattttt

SEQ ID NO: 40106 - DNA, 201 bp, Homo sapiens
ggcttcagttctcccctccctccagagatcttggggcaccagggctcataagctgctgcatgagaacagggacgctcttactgctggagtcagattcagaktgtgtgtgtgtgtgtatttttagcacagttgggagatgacatctgagatgctgctggctcagctctgctggtgtctcttttgagcatggagcggtgtcct

SEQ ID NO: 40107 - DNA, 201 bp, Homo sapiens
cactggagctcaggagatcaaagttgcaatgtgccatgatcatgccattgcactccagcctggccaacagagggagaacctgtctcaaaaaaaaaaaaaargaagaagaataaaaatattagctgagcatggtgatgtgcacctatagtcccagctacttgggaggctgaggtgggagaggactgctcaaacccgaagtcg

SEQ ID NO: 40108 - DNA, 201 bp, Homo sapiens
gtccacttggcacctccccgacaatctccacctggcagccttcacataccccaaaacaaacagtccagaccccctgtgcatgcagtggtggcagcagggcrgggaagctgctcagatgttcctcatagataaggaacgaatctccagttggcctctcctggattccttagcttggaaccctgaaccccatgcaggtgccgc

SEQ ID NO: 40109 - DNA, 201 bp, Homo sapiens
attagagacagggtctcactctgtcacccaggctggagtgtagtagcatgatcaaagctcaccacagcctcaaatttctgggcttaagtaatcctcacttstcagccttctgagtggctggaactacaccatcattcctggctaattttaaaatgtttttggtaaagatgggggtctcactatgttgcccaggctggtctc

SEQ ID NO: 40110 - DNA, 201 bp, Homo sapiens
aatattccatcatatgtatattcagtgtgtaatttaaacacagaactgacctatgtctttcttttctgacaatcagctgaccattctctcttcctctgagrtacctgaatttttctttccaagagtcattagccatagatttggaatgaaccagaaactaaaacgattggagataatttcattacaaatgttaacattact

SEQ ID NO: 40111 - DNA, 201 bp, Homo sapiens
aagacactaataagtcttttaggtgattgcaataagccttttctttaaaaaagaattctgaagtttagaaaggctggcatggttttctttcaacacatccrataaagaaaaaatagctgtgacttgcaacatttcttattgaacgtactttgccttttcatctccacctatgtggtctgtttcaaattaccttatgcagtg

SEQ ID NO: 40112 - DNA, 201 bp, Homo sapiens
attgtcaatagttggactgcaggaatcattgtccccgtttttgttttttgttttttgttttgtttgtttgttttgtttttttgagacggagtcttgctctrtcacccaggctggagtgcagtgacgcaatctctgctcactgcaacctccacctctggggttcatgccattctcctgtctcagcctcccgagtagctggga

SEQ ID NO: 40113 - DNA, 201 bp, Homo sapiens
cattctcctgtctcagcctcccgagtagctgggactacaggcgcccgccaccacacccagctaatttttttgtatttttagtagagagggggtttcaccgygttagccaggatagtctcgatctcctgacctcatgatccgcccgcctcggcctcccaaagtgctgggattacaggcgtgagccactgtgcctggcccatt

SEQ ID NO: 40114 - DNA, 201 bp, Homo sapiens
gcaggtggatcatgaggtcaggagatcgagaccctcctggtcaacatggtgaaaacccgtctctactaaaaatacaaaaattaactgggcatggtggagcrtgcctataatcccagctactcgggaggctgaggcaggggaatcgcttgaatccaggaggcagaggttgcagtgagcctagctcgcgccactgcattccag

SEQ ID NO: 40115 - DNA, 201 bp, Homo sapiens
tgaacagattgtggaggagacttacaccgcatgggtgctggacagtcattgtaatagtagcatattccacgttgtgaaaaacagagatgataacagcggarcatcctgctctccctttaataaaattcccccgtgctgctatgggcaggcatttaagtaggttaacgggacacgtttaaaagaaaaattgtcacagaagca

SEQ ID NO: 40116 - DNA, 201 bp, Homo sapiens
attttacaaattagtctaagtccacctggtttgaacacaggatactaactccacacacccattttagaaggagatctctagcttttagaagagattatctygtgatttcctatggtcattcagcaaacatttcctgcagccctactgtgcaccaggtacagtgtccagaactaaagatacaaagagtaactcagagtccct

SEQ ID NO: 40117 - DNA, 201 bp, Homo sapiens
ggaagttggggttgaggggtgactgaggaggaagggcaggatccagcatccgagagctccatgcttttggggtcactggtcatgtgcattagtaatgggcyctaccagtctcccgctggggggcctctgagtcagaagaagcagagaggagagaagagtctggaccctcacaggtgcttgtgtttcatcagcgtcagatga

SEQ ID NO: 40118 - DNA, 201 bp, Homo sapiens
ctcacaggtgcttgtgtttcatcagcgtcagatgagccaaaaaaggtgctcactgatgaaccgtcctgaattttacaagcatgtcttacctgtgttttcaytgatgatcggtgccctcgggtagagaaagttcagggaagaaacatgattttttttaaagaaagaaactcgatttcacatgttgatttgaggggtcttgca

SEQ ID NO: 40119 - DNA, 201 bp, Homo sapiens
cactctgtcactcaggctggagtgtagtggcacagccttggctcactgcaacctctgtctcccgggttcaagcaattctcctgcctcagcctcccgtgtasctgggattacagatacatgctaccaggcctggctaattttttgtatttttagttgagacggggtttcatcatgttagccacactagtctcaaactcctga

SEQ ID NO: 40120 - DNA, 201 bp, Homo sapiens
gggcctgggtgtctaaggcacaggctgtgtatttgaaattctagtactggggaatcagtgattctcaatggttctcaatttagggcagtccctaaggggckttagaaatatatgaggatatttttgtgtcacagcaaatgggggtgatttagcatcactataagaacctgggacattcaacatcctgcggcagagctcaca

SEQ ID NO: 40121 - DNA, 201 bp, Homo sapiens
aagcagttaccagcacattcaaacagtgtattgaacatcttttaaatatcaaagtgagaaacaagaaggcaacataataatgttatcagaaagatgttagraagtaaggacagctgtgtaaagcttgaggctgaaaagtagcttgccagcttcatttctttggtttcttgggtagtgggcgccggaacagcaagatgtgag

SEQ ID NO: 40122 - DNA, 201 bp, Homo sapiens
aagcgtaagccaccatgcccagccctgtttttgtaaataaagttttattgaaacatatccatgcccatttgtgaactattgtcaatagcttttgcattaaracagcagaactgagttgtcgcaacacaggccccatgtcacccctccccatgcaaagcctaaaatgtttactggctggccctttttggaaaaagtttgcca

SEQ ID NO: 40123 - DNA, 201 bp, Homo sapiens
gagtctttgggcaaatcatgtaacaatttccggatctgtaaactgaggatggtactagttccagtgttgtgctgcggccagacatgtgtgcctctctcccractttgagttcagtgagtcctgtgggagcctgagatccgccatggtgggagtgttgacaccaccagtcaatattacaaagcaggtgctttttgcagggcc

SEQ ID NO: 40124 - DNA, 201 bp, Homo sapiens
agttgtcgcaacacaggccccatgtcacccctccccatgcaaagcctaaaatgtttactggctggccctttttggaaaaagtttgccaacccttcacgtaraatgaggctgaggctggttcacctaccctcaacagaagcaagggcaggttcagaagcgttcagtgggcgcgtgtgtgcagtatggtcagcctccctctct

SEQ ID NO: 40125 - DNA, 201 bp, Homo sapiens
gcacctcgctgagtagttcgtacctcttagggtcttggagagataattaaggagatacctgggggatacatggggagataaggagatacatgggggaaagsagatacatgggggagatgtattaagatgtattaagatgcattaaggagatacatgggggaaagtccacagtaagggctcacttcctttattattctcctc

SEQ ID NO: 40126 - DNA, 201 bp, Homo sapiens
aaaaaaactggcacatccctgtagtttcggctacttgggaggctgaggcaggaggattactggagcccaggaggtagaggctgcagtgagccatgattgcrccactacactccagcctgggtgacggagcaagaccctatattaaaaatatataaacaaaaactgtttttgttctgcatcttaaattttttgttagcaata

SEQ ID NO: 40127 - DNA, 201 bp, Homo sapiens
aatcctcacctttctactccttcttgccctttaattttaggcatcctcaggttttcgccagaggctgggtgtggcgggtgagacagggaacataaaatcgmcctgccctcatctctttctccgtttaaccttctccaagggcagtgagttctgaccatacccccatttcttctctgtccacccactcctgctgcctctgga

SEQ ID NO: 40128 - DNA, 201 bp, Homo sapiens
cttgccctttaattttaggcatcctcaggttttcgccagaggctgggtgtggcgggtgagacagggaacataaaatcgccctgccctcatctctttctccstttaaccttctccaagggcagtgagttctgaccatacccccatttcttctctgtccacccactcctgctgcctctggaggctgccccaggccttacggct

SEQ ID NO: 40129 - DNA, 201 bp, Homo sapiens
aatgtcacaagtacatcattatgtgggatcatacagtatttttttgtgactggcttattatacttagcatgatctacgttgtagcaggtgtcagaatttcsttcctttgaaaggctgaataatattccactgggtttagatacaccacgttttgttgacccattcacccatcaagggacccaagttgcttccacattttag

SEQ ID NO: 40130 - DNA, 201 bp, Homo sapiens
ctcggtctgctcaccttccctagtctggttttccaccccaaagaattgtgagaatgtggggtggtcacagatggttgcgggcctattttatttcaatataktcttccaaaaagtggttatttttcagaggaggcagtgcgttaagtggaagctagtcatggagggtcagtaaggggaccgaaagctattgcatagggagaa

SEQ ID NO: 40131 - DNA, 201 bp, Homo sapiens
ttgtcataaatgattataaaaaataatttttacaaatcaaagatgacgattttatgtgttcaccagattggtgtttctaaattaacatggtccctaaatcyttaaaacatgctttaaaagtgccagtgccccggctgggcatggtggctcgcatctgtaatcccagcactttgggaggccaaggcaggtggattacgaggt

SEQ ID NO: 40132 - DNA, 201 bp, Homo sapiens
tggtggctcgcatctgtaatcccagcactttgggaggccaaggcaggtggattacgaggtcaggagatcgagaccatcctggctaacgtggtgaaaccccrtctctactaaaaatacaaaaaattagctgggcaagtcccagctactcgggaggctgaggcaggagaatcgcttgaacccgggaggcggaggttgccgtga

SEQ ID NO: 40133 - DNA, 201 bp, Homo sapiens
ggaaatatttagatgaatgatttgaattttgtttagactcagtgtaattttagtcacacagattttgcttgaaaatcagctaggcttcttttaccccaagrgaagatttttacctaacgaagttcaccttgcatgttttaacattgattttttatgcttactttactgttaatttggatcaaatattgggtctggaaaatg

SEQ ID NO: 40134 - DNA, 201 bp, Homo sapiens
cattttagaaggagatctctagcttttagaagagattatcttgtgatttcctatggtcattcagcaaacatttcctgcagccctactgtgcaccaggtacrgtgtccagaactaaagatacaaagagtaactcagagtccctgctcctaggtggggtgtggtgaatcacaattttgatcccgcctccccaagatcccatag

SEQ ID NO: 40135 - DNA, 201 bp, Homo sapiens
tagaagagattatcttgtgatttcctatggtcattcagcaaacatttcctgcagccctactgtgcaccaggtacagtgtccagaactaaagatacaaagastaactcagagtccctgctcctaggtggggtgtggtgaatcacaattttgatcccgcctccccaagatcccatagctccatcaccaaacagttgtctatcc

SEQ ID NO: 40136 - DNA, 201 bp, Homo sapiens
agaagagattatcttgtgatttcctatggtcattcagcaaacatttcctgcagccctactgtgcaccaggtacagtgtccagaactaaagatacaaagagwaactcagagtccctgctcctaggtggggtgtggtgaatcacaattttgatcccgcctccccaagatcccatagctccatcaccaaacagttgtctatcca

SEQ ID NO: 40137 - DNA, 201 bp, Homo sapiens
catcaccaaacagttgtctatccaggagcaagctactcgtctagccctatttccttagcttgcaaatgagaccatttctcctggttctcttgaatgttccrtttttctgtacaatcagtctgtaattattgcgaatttttcttggaattgcatgagcattgcttgagctcatcaactacatattgtggttaaaattaagcg

SEQ ID NO: 40138 - DNA, 201 bp, Homo sapiens
aaagatacaagtgcctggtcgctctagtcctgcactgtgaaaaatctcaacccagttttgcttagaccagacgaaggtggttgctggctgagaattagctrtagagcaggctgtgtgaccgagccgtctgtgtgcagccatgttcagaagcccagggttttccagctatttgggagctttcaaattctctgagaaacaagg

SEQ ID NO: 40139 - DNA, 201 bp, Homo sapiens
tgttcagaagcccagggttttccagctatttgggagctttcaaattctctgagaaacaaggtaaggcaagataaatatgaaatgcacttatgtatggattktataacacgatgaatgcctggggtcctctattttgccctatgtattctcctgtgttcagttacttatacacatttctccaaagacactttaaatatctaa

SEQ ID NO: 40140 - DNA, 201 bp, Homo sapiens
gagtatatagctgccttatttagcatttaattgctttgagttattcttgttgccataacaaatttaaatggtaacattgaactgtgttagaagtattattrttattattgttgttattattttcatttacccatggagtatgttggctactttccggaagagaaaagcaaaacttgcctatgtaaatttccatgtggaatt

SEQ ID NO: 40141 - DNA, 201 bp, Homo sapiens
ttgcatttcaacaacattaggatagacaggggtctaactcctgtcctcctcaggctgagcctgctctgcatttgaaaatggcagttgatcttgtaaacacmctggatgggacaaatccttggtgtatttcctccacatcttttaagtgtttatgctttaatttttacacacaatatcatcaagcggcacatctaagtacaa

SEQ ID NO: 40142 - DNA, 201 bp, Homo sapiens
accaggcccagctaatttttttgtatttttagtagagacggggtttcaccgtgttagccaggatggtctcgatctcctgaccttgtgatccacccacctcrgcctcccaaagtgctgggattacaggcgtgagtcactgcgcctggcctcggcttggtctctaatatgtccctagcaggttggtttaactgtcatggagct

SEQ ID NO: 40143 - DNA, 201 bp, Homo sapiens
ttttaaagaaagaaactcgatttcacatgttgatttgaggggtcttgcattaatcacagcttgtggcactgccttgagccagagccacactttccagcccwgtctgcctgctcctgctcctcctgtctgctcatctgatttctcagaagcccccagtcatttagcgggagcaggggagagaggcagcggagacaggaccag

SEQ ID NO: 40144 - DNA, 201 bp, Homo sapiens
ctgaggcaggagaatcgcttgaacccgggaggcggaggttgccgtgagccaagatcatgccactgcactccagcctgggtgacagagcgagactctgtctaaaaaaaaaaaaaagtgccagtgccccatgtcccctgaatttcacctaaattctctacagtcttatttcacatatctttgctttttatgaaaaaaataggc

SEQ ID NO: 40145 - DNA, 201 bp, Homo sapiens
aggtttgcagggggaggtgactgtccgaaggacagaatggtacgaggctttcttcactgcgtagcttgtgtgttcagttctgtatcagggcttattctacrgagtatggactttatcgggaaaatttgtttttaacttttaagttcaagagtacatgtgcagatttgttatataggtaaacatgtgttatgggggtttgtt

SEQ ID NO: 40146 - DNA, 201 bp, Homo sapiens
gatatgtaatataatacacattaattatattacatgttagtacagacatggggaaaagaggcaaaactcaaaatgtctctctgttgcttctttttgtcttstacatcatttcttataatcccgtttctgtaggaatgaggcatatcttggtaattaaaaatatatttgctagaaagaatagactgagaggtcatcatttgt

SEQ ID NO: 40147 - DNA, 201 bp, Homo sapiens
tcaccctggcgggtttagccagtaaagaaaacttcagcaacgtcagcctgcggagcgtcaacctgacggaacagaactctaacaacagcgccgtgccctayaagaggctgatgctgttgcagattaaaggtatttcagagcagcctggcacggtgactcagggcccgtggtttctgtctggtcccatacggagtcctgact

SEQ ID NO: 40148 - DNA, 201 bp, Homo sapiens
aagtgagaacaagtagtatttggtttttctgttcctacgttagttttccaaggatggtagcctcctgcttcatccatgtccctgcagaggacatagtttcrttcttttttatggctgcgtagtattccatattaggaaatgtggaatgttttccttttaatgcaagatgttttgtggactctcagaatcttgtttatgttt

SEQ ID NO: 40149 - DNA, 201 bp, Homo sapiens
tgtttgctggggagacttttttattttccttttaaaattcactatagattttcactaggaattaataagctcaccaatacatttaaaggacaatttaattyataagctcatttaattcctcagtgaaatgatcagagaggaccctaaggtgtcccttcaagtacccactatgttgatggattctagcttccaggagcaata

SEQ ID NO: 40150 - DNA, 201 bp, Homo sapiens
gcaagatgttttgtggactctcagaatcttgtttatgttttatagtaaacttttttgaatggtgaggtcatgtgtatagtagggaggaaatataactagayagtcaggtggtacaatggaaatggcagagttttaggagccaagggacctgcgttccacggctgccacaagtgagctaagtggaataagtcacttgcatta

SEQ ID NO: 40151 - DNA, 201 bp, Homo sapiens
tacatttctctcctcaaattgcattaaccagcctcccctctcctttttgttctcttcagtaaagctgtttaatgagtgtgtgtggttaatagccacagccragcatccacggggaccgttttcccaacggaacctgtaaggctgaatccatcttttctcgtttgagtttcttccaaacttgctgcagtagctgaaagttag

SEQ ID NO: 40152 - DNA, 201 bp, Homo sapiens
tcttccaaacttgctgcagtagctgaaagttagtgaagacggcactttcctgcactgaaatgctcgttcagatgcctcaggttctatgggttatggctcakggaccaaagctgcacatgaggcaaacgaacacctggaggagcctgcgttcaggatggggcagtgaccgcgctcagagcgctctggctcacatcccttgtc

SEQ ID NO: 40153 - DNA, 201 bp, Homo sapiens
ttgtctaagcggcttctcattcattgagctgaggcgtcggacacctgccgggaagacagacgcgaaccgcggctcactctgactcctgactgctccggacyccggcttcagttctcccctccctccagagatcttggggcaccagggctcataagctgctgcatgagaacagggacgctcttactgctggagtcagattca

SEQ ID NO: 40154 - DNA, 201 bp, Homo sapiens
cccggcagccctgcgggagccagcttctccaatgaaccctgtcatgccctctgctgcgtccgtgcagtggggcactgcagtcatgcgcctttgagagccasctagtaaactacagagatgaaaagaagtaaggccgaattcctaacaacctagcattgccgaggccgctggtgttcacctgtagaaattgaacttgcacat

SEQ ID NO: 40155 - DNA, 201 bp, Homo sapiens
ctgcgggagccagcttctccaatgaaccctgtcatgccctctgctgcgtccgtgcagtggggcactgcagtcatgcgcctttgagagccacctagtaaacyacagagatgaaaagaagtaaggccgaattcctaacaacctagcattgccgaggccgctggtgttcacctgtagaaattgaacttgcacatcaaggcttct

SEQ ID NO: 40156 - DNA, 201 bp, Homo sapiens
tgcctgctggggtgtctgccagacttaccgggaaccacctgcagggtgctgccgaaactcactggggtgacgcccctgggtattccacaggctgctagctrctgcaggcacaagctggtgagagcataccccataggagaaaagtcgcttcctcctgcacgacttctccagcactctcaaccagcaaagcttaacctgatg

SEQ ID NO: 40157 - DNA, 201 bp, Homo sapiens
cctgggtattccacaggctgctagctactgcaggcacaagctggtgagagcataccccataggagaaaagtcgcttcctcctgcacgacttctccagcacyctcaaccagcaaagcttaacctgatgtcagctggcaaaggagagacattgaccacgtccagctcccgtaattcaaaggaaggcaaagaagggtatctgca

SEQ ID NO: 40158 - DNA, 201 bp, Homo sapiens
aattctttcggcaggttttttgtttgatttttttgttgttgttgagtttgtttttgttctattggctgttttgttttctttgctttttcttgtgtttttckcagtagagcaaacctgtgaacagatctccagtgagctccagtgagctccacccacacccagcaggcttcccagcaaggcatgcacactgtatacttttta

SEQ ID NO: 40159 - DNA, 201 bp, Homo sapiens
agaggccgagtctcactctgtctcccaggctggagtgcagtggtgcaatcatagctcactgcagcctcaaactcctgggctcaaaggatcctactgcctcrgcctcctgagtagctaggtctacagacacatgccaccatgcttcactaactttttaattttttaaatacagacagagtcttgctatgttgctcaggctgg

SEQ ID NO: 40160 - DNA, 201 bp, Homo sapiens
tcataagctgctgcatgagaacagggacgctcttactgctggagtcagattcagagtgtgtgtgtgtgtgtatttttagcacagttgggagatgacatctkagatgctgctggctcagctctgctggtgtctcttttgagcatggagcggtgtcctcgttgtcttcttttcattgcttatatctgctgcttgctgttcagg

SEQ ID NO: 40161 - DNA, 201 bp, Homo sapiens
gagactctgtctcaaaaaaaaaagaaaacaaagaaaagagactcatgagtcggggagataccagttctagcctcagttctgccagtgggtagctgtatackcatggatgaatcacttccttttggcataaatttacttatctgtgaaaagaaaaagttgagctaaggtcccttctactcattctgtgattctaaattggat

SEQ ID NO: 40162 - DNA, 201 bp, Homo sapiens
attcagagtgtgtgtgtgtgtgtatttttagcacagttgggagatgacatctgagatgctgctggctcagctctgctggtgtctcttttgagcatggagcrgtgtcctcgttgtcttcttttcattgcttatatctgctgcttgctgttcagggaaagcacaaattcactttctcctcttgttaaaaaaatagtttggcgg

SEQ ID NO: 40163 - DNA, 201 bp, Homo sapiens
gccaggaattcaaggccagcctgggcaacatagtgaggccactgtctctataaggaataggctgggcatggtgacacactcctgtaatatctgcactttgyggggccaaggcaggtagatcacttgagcccaggaattcaagaccaacctgggcaacatggcaaaactctgtctctacaaaaattagccaggtgtggtggc

SEQ ID NO: 40164 - DNA, 201 bp, Homo sapiens
aacctgggcaacatggcaaaactctgtctctacaaaaattagccaggtgtggtggcacacacctgtggtcccagctgaggtgggagggtcactggagctcrggagatcaaagttgcaatgtgccatgatcatgccattgcactccagcctggccaacagagggagaacctgtctcaaaaaaaaaaaaaaggaagaagaata

SEQ ID NO: 40165 - DNA, 201 bp, Homo sapiens
agaggagacccagagccagtgaacgaggcacggggttctgttgtgggcttgcatacaggggagagagtccagtggcagcgggctgagtgggagaaccacarccgctttcaaaaggcatgcagtttatatagcaatagcatgtccacttggcacctccccgacaatctccacctggcagccttcacataccccaaaacaaac

SEQ ID NO: 40166 - DNA, 201 bp, Homo sapiens
ttgttgacatatttaggcctgtaataaaataaagccacttctttgtaggttattttgaagatgcatgttacctagaagttttcataagccaagccttagcytcacagcactttactttcatgaaaaagatttaaaagaattaagaaattgtaaggacttctagagaggtgcatgccttattttctaagccattaaaggtat

SEQ ID NO: 40167 - DNA, 201 bp, Homo sapiens
catgttacctagaagttttcataagccaagccttagcctcacagcactttactttcatgaaaaagatttaaaagaattaagaaattgtaaggacttctagagaggtgcatgccttattttctaagccattaaaggtatacaattctatgattcacaggcaaagaaacccaaagtagtttatatatttattaggaaaatacc

SEQ ID NO: 40168 - DNA, 201 bp, Homo sapiens
tcatgaaaaagatttaaaagaattaagaaattgtaaggacttctagagaggtgcatgccttattttctaagccattaaaggtatacaattctatgattcayaggcaaagaaacccaaagtagtttatatatttattaggaaaatacctgggacatatttacataaagagggatggaaaatgtgtgacaaatttgacattta

SEQ ID NO: 40169 - DNA, 201 bp, Homo sapiens
ggaatgccagtcagcaacgcatttattacacacatggagcagtgatctagcccgtgggtcagcaaacgatggccattgccaaatccagctgcccacttgctttttttttttcttgtttgttttttagagacagggtcttgctctgtcacccaggctaaagtgcagtggtgccatcatagctcactgtagccttgaactgga

SEQ ID NO: 40170 - DNA, 201 bp, Homo sapiens
cattttcgatccttatgcacccaagtgagttatttgggtctccgtctttcctccactgagaagggcttccttcgcctgcagagggcacatccatgaggctyttcccccagtgtggcctccttctccttctaactccatcacggcggcgttagtattctagagccagggcaaggtgttgcaggagccaggggcacggagcct

SEQ ID NO: 40171 - DNA, 201 bp, Homo sapiens
ggggtctcactttgttgcccaggctggtcttgaactcttggcctccagcaatcttccctccttagcctcccaaagtgctgggattacaggcgtgagccacygtgcccagctctttccttgaatttataagggttccacaatacttctaatcttaggagatggaaaaatcttttgatgaacaaaatgttccaaagcgacgct

SEQ ID NO: 40172 - DNA, 201 bp, Homo sapiens
tctccgtctttcctccactgagaagggcttccttcgcctgcagagggcacatccatgaggcttttcccccagtgtggcctccttctccttctaactccatmacggcggcgttagtattctagagccagggcaaggtgttgcaggagccaggggcacggagcctcgcagcagataaaacatgcagacggcagaccagatgtg

SEQ ID NO: 40173 - DNA, 201 bp, Homo sapiens
ccgtctttcctccactgagaagggcttccttcgcctgcagagggcacatccatgaggcttttcccccagtgtggcctccttctccttctaactccatcacsgcggcgttagtattctagagccagggcaaggtgttgcaggagccaggggcacggagcctcgcagcagataaaacatgcagacggcagaccagatgtgcat

SEQ ID NO: 40174 - DNA, 201 bp, Homo sapiens
tttaggtggtagtgttagcaatggcttttgtttgtacgtcttggtatttttcagattttctgcaagaggcatgtattgtttttaggactttgaaagccccrcgccccttacctatttacctctgtttaaatcggaaggtccaggttctccagggaaaggagcccccctgtttcctgcagtgtttccagggggggatggtgg

SEQ ID NO: 40175 - DNA, 201 bp, Homo sapiens
ttagggataaaacctttgctattgcttaaagagtatgttaggcctttagaaatcttatttccacaatgtcagaaacagtggcatctgagctttcttatttrgggaaaaagactattgaaaagaaaaaaagagccatcctttcactttggcaaattggtggcatgtaaggacttagtggaactccctgaactgttgcagaat

SEQ ID NO: 40176 - DNA, 201 bp, Homo sapiens
cgtcaatttcaagtgccaagaaaaagatcccaactcaaactgatttcagcaaaaagaaaagtgcggagggctttgtcggctcactggctgaacagtgcggmggggtttgccggctcagccactgaacagtgcggaggggtttactggctcacgcgctgaacagtgcagatgtggcctcgggttctagaggcccctcagaac

SEQ ID NO: 40177 - DNA, 201 bp, Homo sapiens
ggcccctcagaacacagtctgtcttggctgttttcctttgggctggcctcactctccgtcaggcagcggcctggcggcagatggacaccccagctctggartcacaaggctgcctccctggccagcccagcacgggtagcttttcttcccagtagtccaagcagaagttccaggtttgattttcttggcttcaacttgagc

SEQ ID NO: 40178 - DNA, 201 bp, Homo sapiens
cgaagaggattacgtcaaggagcccgtgcaaattcccgaagggcttgccggaaacagacaagtagacatgggtgtatgattccaaagcgagaattaggacktgtgcatgggcgtggtaggggggagggaagagctccctaaaccctagagctgtctagcagagccgtgagctgcccggaagtactccacaccctcccagga

SEQ ID NO: 40179 - DNA, 201 bp, Homo sapiens
gcttttcttcccagtagtccaagcagaagttccaggtttgattttcttggcttcaacttgagccccctgtccatccctaaaccagtcactgtggccaatgsgatagaagatgctgactgggtaaaggcggggctctgggtctcctttagagccacgatgggggtgcagtgaggtggtttccccaaaggaaaatccagatgc

SEQ ID NO: 40180 - DNA, 201 bp, Homo sapiens
aattctatgattcacaggcaaagaaacccaaagtagtttatatatttattaggaaaatacctgggacatatttacataaagagggatggaaaatgtgtgayaaatttgacatttaaaaaaattaagatttacattgtaatgacagcagtgattcaggttgtaaagattgatttacagtggattaaaattctgcttagatag

SEQ ID NO: 40181 - DNA, 201 bp, Homo sapiens
agctccctaaaccctagagctgtctagcagagccgtgagctgcccggaagtactccacaccctcccaggaggagaccaaggggcatgagtgagtgggggcrtccgggtgtggctgagatttgaactcagtgggcttgcatccctcttccatctccaagattctacgactccatgtcaggggagtggcggtgggaggaagag

SEQ ID NO: 40182 - DNA, 201 bp, Homo sapiens
agtagtccaagcagaagttccaggtttgattttcttggcttcaacttgagccccctgtccatccctaaaccagtcactgtggccaatgggatagaagatgmtgactgggtaaaggcggggctctgggtctcctttagagccacgatgggggtgcagtgaggtggtttccccaaaggaaaatccagatgctattaccagaag

SEQ ID NO: 40183 - DNA, 201 bp, Homo sapiens
tagagccacgatgggggtgcagtgaggtggtttccccaaaggaaaatccagatgctattaccagaagcagagggagacacgctagacaggctccacccacrgcaatccaccacatccatctgctcttaactgcaaaattgtcagtgacatataccattttctacaagctgctcctgataaattctttgcatattccagttt

SEQ ID NO: 40184 - DNA, 201 bp, Homo sapiens
gacatatttacataaagagggatggaaaatgtgtgacaaatttgacatttaaaaaaattaagatttacattgtaatgacagcagtgattcaggttgtaaarattgatttacagtggattaaaattctgcttagatagtctttatctagaaccaggaaattcaactttcagaaagtcattttctgattcctatttagggaga

SEQ ID NO: 40185 - DNA, 201 bp, Homo sapiens
tatttgcatacatagcggtttaaccatttctcaatcttccgcccacacaatgtcactgtttaagtagttgtatatcataatttaaacatattgatagacayatatgacaccatggtacgtaaagacgccttttgggcacagaggcccgcgcagctggaggtggagagtggcagcaggagtctgttgggagatcgcttctct

SEQ ID NO: 40186 - DNA, 201 bp, Homo sapiens
atcaatcgctatttacatccccaacataatggcccttaataggcaaccatttttcatgagtcttgtttcagacatcccagactccatttcccagagaagcrgagaatgaatgggtgctgtatgttcactgctgggtgtccaagaaactgcacaggaagtgtcttaacgtgaagagagtccgcactggacaccggcacaaag

SEQ ID NO: 40187 - DNA, 201 bp, Homo sapiens
gccttttgggcacagaggcccgcgcagctggaggtggagagtggcagcaggagtctgttgggagatcgcttctctcggtctgctcaccttccctagtctgrttttccaccccaaagaattgtgagaatgtggggtggtcacagatggttgcgggcctattttatttcaatatagtcttccaaaaagtggttatttttcaga

SEQ ID NO: 40188 - DNA, 201 bp, Homo sapiens
ctaagtccctggccctggacggaggtggctgccttggacgacacagcggacactaggaagggccgcgtttgctgccactcgctcacgtgctaactcctccrcgccgccggtgccccctgcaggtgagtggcggctgtactgcgtgcgtggagaggtgcccgtggaagggaatttgctggaagtggcctgtcactgtagcag

SEQ ID NO: 40189 - DNA, 201 bp, Homo sapiens
gtcacagaagcagggggcattctcttcttagaagcagaggaaggggggtggcggcacaaacaatcagtcctaaagaacgagcactgtttcaggggagacamagagagttggaaaaaaatccaaaaggtgtttctcactgttagaaagttaaaatcaaaatgcagaaaatgaagtggacagcactaactttagtatctatgg

SEQ ID NO: 40190 - DNA, 201 bp, Homo sapiens
tgaagccagggagtgtccggtgatgactcgtaaagctcactctgtaaattcagcggagtatttaactcagggacagtttcttgctttttattagtggctcyattgagctttctgagaaacagaaagaaagaggaaaataacggcatacagatgtttatttttgaaaataagatatagcatttgtaccgcaaggtaagtggc

SEQ ID NO: 40191 - DNA, 201 bp, Homo sapiens
agcacgcccacagctcctccctgcagcaggcagcctcccggagcccctcctttggtgacccacagctatcccctgaggcccgacccaggtaagcatccagyccacgctaagcaccctgaacgcaggacaataccttctttttgcctctctgtgtgatagggtttggctattctaagcattatgtggaagtcaaggcttatt

SEQ ID NO: 40192 - DNA, 201 bp, Homo sapiens; identical to SEQ ID NO: 6453

SEQ ID NO: 40193 - DNA, 201 bp, Homo sapiens
tccagttgcttattggctgatccaacttccagatgggtgctaatttcattccaggaaggggaccagagctgagcagctcatctgttttccttagcgtgctsctcagttatttgaaagggtgatttgagcttatttttcttcttgtttgtagacaacagtggtgagataattcgagtgtctacctataacagagtgttacag

SEQ ID NO: 40194 - DNA, 201 bp, Homo sapiens
attcttttgtgccatttctcccaggtactggtgtttgattttggtagtgaagtttacgtatggcatgggaaagaagtcacattagcacaacgaaaaatagmatttcagctggcaaagcacttatggaatggaacctttgactatgagaactgtgacatcaatcccctggatcctggagaatgcaatccgcttatccccagg

SEQ ID NO: 40195 - DNA, 201 bp, Homo sapiens
cagcctcgcaccttcctcagattccagcattttctgacaattgtgctttctgcacatacctcctccctccctcctttctgggctgcggttacagcattcargccttcactgagattagctcaaagggagactggaagaaattggttatctcacatgtttatcctgcttctgcccccagaaaatgctacattttcagtactc

SEQ ID NO: 40196 - DNA, 201 bp, Homo sapiens
acaaaaaagaatttgaaaaaaaaaatcatgttctaaattagggaagtttgaggttctaaatatatcaattcttcctaagttaatttattacattttacacwttctcaatttataaaataccaaccattaagaaaaaaaataaactaggcaaggagattccgaagttcacatggacaaataagcaagagctgccagttattg

SEQ ID NO: 40197 - DNA, 201 bp, Homo sapiens
tttttgtgtctgtgttggtcgccccgttaggatttctgtcttcctccgtttgactcactgtcaacaagagaccctgttgcacctgattcaactgttgcatrttcttgaagttaacaaattcttttgtgccatttctcccaggtactggtgtttgattttggtagtgaagtttacgtatggcatgggaaagaagtcacatta

SEQ ID NO: 40198 - DNA, 201 bp, Homo sapiens
gggagctctgcaccccggggactgagaggagcatcctctcctgggagccgatggcactcggcctggtccctcccaacatgattctgataatggaagaccaygtcacccaaagcacttcagtcctggtctggcttctgcaggtctcaggctgtgcctcccatttctttcctcctcccactttttgtaagatgatcctggaga

SEQ ID NO: 40199 - DNA, 201 bp, Homo sapiens
ccagaacttccatggtggtgcttaacgtcaacaaggccctcatctacctgtggcacggatgcaaagcccaggcccacacgaaggaggtcggaaggaccgcygcgaacaagatcaaggaacagtgagtgttgtgtctgcggcgagtccccccacacaccgggcttcccagagggacggggcaggctcaggggtaccaagact

SEQ ID NO: 40200 - DNA, 201 bp, Homo sapiens
tccttcactgcaactggaatatccaacaatttcaagtgacctagaaaatcatttttgaatgaatgttctgctattttctgtgtttgcttaaagtgtcaccmaactatagcagtgctgtttgaaatagccaatctgcaaactgtttatcagcacacaactatgagacactcgcacccaaatgcaaattgtgtttggtttcct

SEQ ID NO: 40201 - DNA, 201 bp, Homo sapiens
gcttcaacctcctgggctcaagtgatcagcctgcctcagcctctcaaagtgcaggcttgagccactgtgccccattcatgttttatcttaattcttcagtstgtcttaaatctagtgtgatgagtattatgtccagctgattgaacagtttttttcttcccaggggtgagtttaacttggacaccaggacttcaaattctc

SEQ ID NO: 40202 - DNA, 201 bp, Homo sapiens
gatacacatcctgatcactgggcaactgagcatctccatacttcagagatttttttatgtttttttgggccgtgttaccctagacatttttgtagatagayaattttttaaaaagagctcctcacacttgtagctcagttctgtgtgcatttcagtgctcaaatgacttttgccactgctgtaaacaggaagaaacaaact

SEQ ID NO: 40203 - DNA, 201 bp, Homo sapiens
gcttagatagtctttatctagaaccaggaaattcaactttcagaaagtcattttctgattcctatttagggagaagtaagatgaaccaaaaaaaatatgtkgtaacccaaaacagtaacaaaagaaacctccttggtgacctaaataactgtatatgaaaataataatgtcatctgatatggaaacatgtaaccgaaaact

SEQ ID NO: 40204 - DNA, 201 bp, Homo sapiens
cgcaggcccttaagtttaattgggtggaagagtattagaaggaatgtaatctggagcaaggttgactgtgtgacatgtatgggcatttacatgagggaaamgtcacagaaaaagaaaccttcaggaataattttacatagaaagtgaaattgagcctagtttagagttaagcaaaatttgaattgctggaagtgaagggag

SEQ ID NO: 40205 - DNA, 201 bp, Homo sapiens
ttcagcaaacacttagtaatcaacccctcctgtatgtatcaccatgatctgatccctgcccttaaggatcttggaattgtgtactggagagaagacaccaytggaccatgagtgcctggggtatatgaagtggcctctgtgtatatattaagtgaatgaatgagcacatgagagggggaggaataggggagagaggcagga

SEQ ID NO: 40206 - DNA, 201 bp, Homo sapiens
gacgctatttttctcctggtgaaagtagaaaaacttccgagagatttagaacccaacctataacttcagcagaacgaaaggaatcggataggtaggcatgygtatgcgcagtttcctcatccaggaacgtggcaatgacacaggagttttaccacactgacggtcttgacgctatttatataggatgttggcgattccata

SEQ ID NO: 40207 - DNA, 201 bp, Homo sapiens
acacacgcacgcccggctcctttcactgagccgcggggcgcttctcccaatgtttccagtttgcactagacatgacgagggatgaatacaacgccctgccygcctggaagcaggtgaacctgaagaaagcaaaaggcctgttctgagtggggagacgccagaggagcctcacggtcacgtccaacaacaccactgcaccag

SEQ ID NO: 40208 - DNA, 201 bp, Homo sapiens
gagggggtcgatcctctgaagcttgagatctatctcaccgacgaagacttcgaggtaagcggttcttccggtggggtggggatgggagtaaaacaacacaygcacgcccggctcctttcactgagccgcggggcgcttctcccaatgtttccagtttgcactagacatgacgagggatgaatacaacgccctgcccgcctg

SEQ ID NO: 40209 - DNA, 201 bp, Homo sapiens
gatcctctgaagcttgagatctatctcaccgacgaagacttcgaggtaagcggttcttccggtggggtggggatgggagtaaaacaacacacgcacgcccrgctcctttcactgagccgcggggcgcttctcccaatgtttccagtttgcactagacatgacgagggatgaatacaacgccctgcccgcctggaagcaggt

SEQ ID NO: 40210 - DNA, 201 bp, Homo sapiens
aggcacatcaaaaactccatggacacaaagctttgcaagacttcagactaaaataacaaaatgtcattatttggtaaaatgcaggaaaataaaccatttaytttatatgtactcacgtactttgaggttttttccagcagccgcatgtgttttagattcctttgtttaagcttggcttcatcttggttcttttcctgtctg

SEQ ID NO: 40211 - DNA, 201 bp, Homo sapiens
aaaaaaatttttaaattattaggtgcgcgtggtggcacatgccaatagtgccagctactcaggaggcttgaggtgggaggactgcttgagtccaggagttyaaggctgcagagagctatgattgagccactgccctccagcctgggttacagtgagacactgtctctaaaaaataacaaaatttggggtcaagtgtggtgg

SEQ ID NO: 40212 - DNA, 201 bp, Homo sapiens
cctacagaaaaggacaggggcggcccgactgggcgatatttgggagacttactgaacacaatgagacgattttgttcaaagagaagtttctggattggacrgaactgaagagatcgaatgagaagaaccccggggaacttgcccagcacaaggtattccggcgaccaagcctcaaaactcggggcttggttcgggtcccaa

SEQ ID NO: 40213 - DNA, 201 bp, Homo sapiens
gaaggctgaataacaaaggtacctactggaagccagaaggctttgctctcagaatctctaaatcctaattctgattgcttttcttcctcagccaaaaaaargaagttttggtcaagactgattagagaaacaagccctgattcacttgataacgtactaaattggggactcccaataatacatttttttcttgaatctaag

SEQ ID NO: 40214 - DNA, 201 bp, Homo sapiens
agatatgcagttagaatcggacctgaagttggacaggctggaaacctttctaagaaggctgaataacaaaggtacctactggaagccagaaggctttgctytcagaatctctaaatcctaattctgattgcttttcttcctcagccaaaaaaaagaagttttggtcaagactgattagagaaacaagccctgattcacttg

SEQ ID NO: 40215 - DNA, 201 bp, Homo sapiens
ctagatatcgaagccagaccagatatgcagttagaatcggacctgaagttggacaggctggaaacctttctaagaaggctgaataacaaaggtacctactrgaagccagaaggctttgctctcagaatctctaaatcctaattctgattgcttttcttcctcagccaaaaaaaagaagttttggtcaagactgattagaga

SEQ ID NO: 40216 - DNA, 201 bp, Homo sapiens
cctgatcagaagaggccttagtgatgctgtctcactgacggtttctgcttgcctagatatcgaagccagaccagatatgcagttagaatcggacctgaagytggacaggctggaaacctttctaagaaggctgaataacaaaggtacctactggaagccagaaggctttgctctcagaatctctaaatcctaattctgatt

SEQ ID NO: 40217 - DNA, 201 bp, Homo sapiens
tattgcagaaatatggatgtcgtagtcttctggaagaggtttgttatagttgatttcttgaagtgagcaagaaatgctgcaagttcctccctgcggcattmcaagtgctgctgtggcagatgaacagcaattgtttaaacaaattacatgcggatctgaaaggcttccccgggtctggaattcagccattgatctgaaagt

SEQ ID NO: 40218 - DNA, 201 bp, Homo sapiens
tgatttcttgaagtgagcaagaaatgctgcaagttcctccctgcggcattccaagtgctgctgtggcagatgaacagcaattgtttaaacaaattacatgyggatctgaaaggcttccccgggtctggaattcagccattgatctgaaagtgcaaaagcaacatgcctccctctaatttcataccttcccagcatcgccct

SEQ ID NO: 40219 - DNA, 201 bp, Homo sapiens
gaaatgctgcaagttcctccctgcggcattccaagtgctgctgtggcagatgaacagcaattgtttaaacaaattacatgcggatctgaaaggcttccccrggtctggaattcagccattgatctgaaagtgcaaaagcaacatgcctccctctaatttcataccttcccagcatcgccctcgaatttcaggatttatttg

SEQ ID NO: 40220 - DNA, 201 bp, Homo sapiens
agcagatgatgtttatgtctttatatcttttgggaagggaagagggggaggagatggtgttaaaataatgattgcaattgtaatattccctgcatgtactrgactctttaaagtcattttggcaattcaatagaatatgtgcaaagtcagaaattatgatgttggaaaaaataattcctacgtgcaaaggattgttgtttt

SEQ ID NO: 40221 - DNA, 201 bp, Homo sapiens
attataggcaaaataacagtctttaggacaatatttacctgaataatacatttattttacaattctttagtattcagtttatatgataaagaagatttttyaaaaaatagttaattgattagttgatattacaggatttttaactcagaaatcctgttagatgcccaggaattcagttggacacattgctctgaagaaaac

SEQ ID NO: 40222 - DNA, 201 bp, Homo sapiens
gtttatgtctttatatcttttgggaagggaagagggggaggagatggtgttaaaataatgattgcaattgtaatattccctgcatgtactggactctttawagtcattttggcaattcaatagaatatgtgcaaagtcagaaattatgatgttggaaaaaataattcctacgtgcaaaggattgttgttttttcaactatc

SEQ ID NO: 40223 - DNA, 201 bp, Homo sapiens
aataacagtctttaggacaatatttacctgaataatacatttattttacaattctttagtattcagtttatatgataaagaagattttttaaaaaatagtyaattgattagttgatattacaggatttttaactcagaaatcctgttagatgcccaggaattcagttggacacattgctctgaagaaaactaagaatacac

SEQ ID NO: 40224 - DNA, 201 bp, Homo sapiens
gaaattatgatgttggaaaaaataattcctacgtgcaaaggattgttgttttttcaactatcagaccaaaaaaaaactagtgctttttaactatgggtgcygttataatagattagaaaccagtgaaccaccaaacagcatagaatattgggcatctcccaatacattttaatgttttccattgaattggtctatgaattt

SEQ ID NO: 40225 - DNA, 201 bp, Homo sapiens
gctagaatgtggcccacacctgtagtcccagcactttgggagactgagaaggaaggatcacttaaggccaggagttcaagaccagcctgagcaacatagcragacccctgtctcatatttaaaaaaatacaaaaattagctacgcatggtggcacacacctgcagttccagctatctgcaaggctgaggcaggaggatcac

SEQ ID NO: 40226 - DNA, 201 bp, Homo sapiens
gaggcaggaggatcactgcagcccaggagttcaaggctgcagggagctatgattgtgcaactgcacttcagcctaggcaacagaacaagaccttatctctaaaaaaaaaaaaaaaaaaaaaaaagaaaagaaaagaacttgctagaatgtaagaaaagtctagtcctgacatggttcatgtcacattcaggcacatcaaaa

SEQ ID NO: 40227 - DNA, 201 bp, Homo sapiens
gtcacctactgccataaccccagtagcctcacccatttgcggtaaaacaagaggcaccacacccgtttccaaacccctggaaggtaagtcgccaaggcccyggccacgccaagcctgatcagaagaggccttagtgatgctgtctcactgacggtttctgcttgcctagatatcgaagccagaccagatatgcagttagaa

SEQ ID NO: 40228 - DNA, 201 bp, Homo sapiens
cgtcacctactgccataaccccagtagcctcacccatttgcggtaaaacaagaggcaccacacccgtttccaaacccctggaaggtaagtcgccaaggccycggccacgccaagcctgatcagaagaggccttagtgatgctgtctcactgacggtttctgcttgcctagatatcgaagccagaccagatatgcagttaga

SEQ ID NO: 40229 - DNA, 201 bp, Homo sapiens
ttcattcacattttacattgcagctactttgcaatgtaaaatgtgatgctctcctgttcttcttatccccaagctgctggagacccaaaagaagatgaackctatgaagcagccataatagaaactaactgcatttaccgtctcatggatgacaaacttgttcctgatgacgactactgggggaaaattccgaagtgctcc

SEQ ID NO: 40230 - DNA, 201 bp, Homo sapiens
actgcatttaccgtctcatggatgacaaacttgttcctgatgacgactactgggggaaaattccgaagtgctcccttctgcaacccaaagaggtacagtcygtgggctctgcccttcagtgagaaaccacattgaaagcactcagcacaggctgcccaatagattagagagtaagttcccaataaaggttagccagtgtcg

SEQ ID NO: 40231 - DNA, 201 bp, Homo sapiens
tcattatgggagttaatcctgtgctaggaaatgagacggatgactctacaggtgaattcaggaggaagaaaatgctccacccagaagctgcagacagagcmtctctctcccttccaggaatacacagcgttttgttaggttcaagaagtatagactcaggttgattataggtcactatggtagtcacaggcatgaaactaa

SEQ ID NO: 40232 - DNA, 201 bp, Homo sapiens
agctgaaagaggctggcccggcagccctgcgggagccagcttctccaatgaaccctgtcatgccctctgctgcgtccgtgcagtggggcactgcagtcatrcgcctttgagagccacctagtaaactacagagatgaaaagaagtaaggccgaattcctaacaacctagcattgccgaggccgctggtgttcacctgtaga

SEQ ID NO: 40233 - DNA, 201 bp, Homo sapiens
aaaccagagactccagttattctcattccttttaaacctgtgtgggtgttcccaccaactgctgcagcctcccgtgttgaccctcactccctgggacaccygggcctttgggtcaagtgcttggtctactggcctcactcagcctagaagcttctgcttccagattagcatcattcaggtctacactccccacctcctcag

SEQ ID NO: 40234 - DNA, 201 bp, Homo sapiens
ccggcagccctgcgggagccagcttctccaatgaaccctgtcatgccctctgctgcgtccgtgcagtggggcactgcagtcatgcgcctttgagagccacytagtaaactacagagatgaaaagaagtaaggccgaattcctaacaacctagcattgccgaggccgctggtgttcacctgtagaaattgaacttgcacatc

SEQ ID NO: 40235 - DNA, 201 bp, Homo sapiens
acctgtggcacggatgcaaagcccaggcccacacgaaggaggtcggaaggaccgctgcgaacaagatcaaggaacagtgagtgttgtgtctgcggcgagtccccccacacaccgggcttcccagagggacggggcaggctcaggggtaccaagactcccagcagatcccagggtgctgaaagtgactgcagcaaaggatgg

SEQ ID NO: 40236 - DNA, 201 bp, Homo sapiens
agagagggcagagaggagaacggggcaggtgacctctctacagggaggcagatgtgaaacaagatgtttcatctcaaaacaccacctgtgggctagggcayggggaggggtgagaaatcacatgccctgaggtggcccaaggcatttgaggcccatcagagggtttacttggaccactgaggaaaagaaaaacaatgaaga

SEQ ID NO: 40237 - DNA, 201 bp, Homo sapiens
cgaacttttgttaagcagttccagtaagccagacaccagccagcaccttacatatagtaactccgttagtacaacccaacactctgccatttttacagatraggaaactgaggcatacagaagttaatcaacttgcccaaggctgggcagcaatggagtatcctcataactgctccataatactctgcccctcaatgttta

SEQ ID NO: 40238 - DNA, 201 bp, Homo sapiens
caccctccaatgaagccaaggtcagctgcctctcagtttgtgtttgttgcttctcacattacaagagcctggagctgcagccagggacctcatcttgcacygggatctcagggcagcactgaaagtttgcccagtgcacatgtcatgcttggaaaatcagccaccagtaagagagggtgtgcccacgcccttcatcctggg

SEQ ID NO: 40239 - DNA, 201 bp, Homo sapiens
tagcttcctgagtagtggagactacatgcatgcagcaccatgcctcgctaattttttttttctttttgtagagatagggtctcatcatgtggcccaggctrgtcttcaacctccgggctcaagcagtccttcctcctcagcctcccaaagcactgggattacaggcatgagccaccactcccggtggcagttttgcttttt

SEQ ID NO: 40240 - DNA, 201 bp, Homo sapiens
atgaagaagaactagtttttctctctgatattatgaggctaacttgttaccctcaaggataaaggctgtattgtggaatgccccaggcagattaaaacccygctgtactcggggttgatcatgctgagagacaagttggcctctgccctgtacattatctgcaagcactaccacgctgttggagaatggaggtctccccca

SEQ ID NO: 40241 - DNA, 201 bp, Homo sapiens
tttaggacaatatttacctgaataatacatttattttacaattctttagtattcagtttatatgataaagaagattttttaaaaaatagttaattgattarttgatattacaggatttttaactcagaaatcctgttagatgcccaggaattcagttggacacattgctctgaagaaaactaagaatacacatagtaacga

SEQ ID NO: 40242 - DNA, 201 bp, Homo sapiens
acagggtcttgctctgttgcccaggctggagtgcagtggtgtaatcacagctcactgcagcctccagctccaggctcagacaatcctcccacatcagcctmccaggtagctgggactacaagcacacaccataatgcctggctaatttgttttgtattttcaatgaggttttgccatgtctctcagtctggtcttgaactc

SEQ ID NO: 40243 - DNA, 201 bp, Homo sapiens
ttacaggatttttaactcagaaatcctgttagatgcccaggaattcagttggacacattgctctgaagaaaactaagaatacacatagtaacgaaataggygaagtagaaaacaataagatacttccagccccacctctctaactgttacaaacctgtaaacttgaaatttcagaaatggtattatttgctggagaggtag

SEQ ID NO: 40244 - DNA, 201 bp, Homo sapiens
atgaataaataagacagatgtcctcattaatattcattaacaccagattttcccaaagtcctttaaaactgtgtctatccacttgtattaaacattggcarccaggtgcggtggctcatgcctgtaatcccagcactttgggaggccaaggcaggtggatcacttgaggtcaggagtttgagaccagcctgaccaacatgg

SEQ ID NO: 40245 - DNA, 201 bp, Homo sapiens
cagggctccagcaccttcgtgatgggccctgggcacctctccaagctccccctgctcctcccctccacccaggccactccagcctctccctgttccacggmcacctccttccactcacctcctgccctgtgacccattccactgtctggaaacttcccctgcctactccatactgcctctacgtatgtacccctgtgtaca

SEQ ID NO: 40246 - DNA, 201 bp, Homo sapiens
ttgttattcctttctttgtttacatcttctgactttgttcgttcattacaattctgggtaggggggctgtctatgggatgggagaggacactgggctcctkagcccatcataggatctagaagatggaattgcaattttatctatgtatctatctatgtatctatgtatgtatgtatgtatgtatatatgtatctatctat

SEQ ID NO: 40247 - DNA, 201 bp, Homo sapiens
taaagttcagaccatgaattatacagaaccccagataattgcagatgatggaactaatcacaatatgcaaatcagcaatgattaacaaccatatgcaggtkttctcatgggttgtgttcgaatgaaataggatattaaaactggaaacttaattatgtaattcaggatgataaatacattattatgctttcacctttttta

SEQ ID NO: 40248 - DNA, 201 bp, Homo sapiens
cttggcccccctctgtgtccccaccctctccgcccgatccttgcccagtccgagggtgctcccgcctggtggcccagcagagggcgccagctcccggccgmcgcgcgggtcgcaaggggtggggacgcgcgagcctccaggtaaggagcgaagtgaatcatcccgagcggggacccgctccccgcgcggtgggaacgaggc

SEQ ID NO: 40249 - DNA, 201 bp, Homo sapiens
tgggccatatcgttatggttactctcagatccccggaaaccagcatccatcacttgtccaatgacggcagctcacttgtctgctgtctttcccagaggacycaactcatcctatggcctcccacgtgaaatactgaactccacaaaaaagggtaaatcagtaaggggaaataagcactgaacaaagactgaggcgctctgg

SEQ ID NO: 40250 - DNA, 201 bp, Homo sapiens
gaatcatcccgagcggggacccgctccccgcgcggtgggaacgaggcggggcgtggccgcggcgctgctgagaagtcggggccgccgagccgctgtcggcrggaagcggcgatcctgccaccgggaggtgtggaagagccgggtaggtgagcaaagtccctccgcgcggtggccgaggggcgcgcggagccggggccggca

SEQ ID NO: 40251 - DNA, 201 bp, Homo sapiens
cgtggtacgtgtgaaatgtgtgtgtgtgtgcctgcatgtgtgtaaattcttatatgttgtgccgtctaccctgggatttctggagatccaccagggtcccrgagatttccagaagtgaccctgagatgctcagtagctcgtctgtgtgttccgcaggtttggcgtcacctactgccataaccccagtagcctcacccattt

SEQ ID NO: 40252 - DNA, 201 bp, Homo sapiens
cctcttctttttttagagaaaggatcttgctttgtcacccaggctgcagtgtggtgactcaatcatggctcacacaaaccttgaacccctgggctcaaacraccctaccacctcagccaccccaagtaggtaggactacaggtgcacacttccatgcctagcctatttttgtattctttatagagacagggtctcatcata

SEQ ID NO: 40253 - DNA, 201 bp, Homo sapiens
gtcctgggatgcagccacagaccccatacagtgaacacctaggtttactattattattattattattattattattattattattagagacagggtctcaytctgtcacccaggctggagtgtagtagcatgatcaaagctcaccacagcctcaaatttctgggcttaagtaatcctcacttctcagccttctgagtggct

SEQ ID NO: 40254 - DNA, 201 bp, Homo sapiens
ttcgactatagcaggctccccaaacaaagcatcgggcagttccatgagggggatgcctatgtggtcaagtggaagttcatggtgagcacggcaggttagtragcgcttgtggttttttccagctgaaagaggctggcccggcagccctgcgggagccagcttctccaatgaaccctgtcatgccctctgctgcgtccgtgc

SEQ ID NO: 40255 - DNA, 201 bp, Homo sapiens
gtttttttgggccgtgttaccctagacatttttgtagatagacaattttttaaaaagagctcctcacacttgtagctcagttctgtgtgcatttcagtgcwcaaatgacttttgccactgctgtaaacaggaagaaacaaactaaggcaaagagcccagctaagtgaaacagagaggaacaaaagaaaattagaacttggc

SEQ ID NO: 40256 - DNA, 201 bp, Homo sapiens
gacttttgccactgctgtaaacaggaagaaacaaactaaggcaaagagcccagctaagtgaaacagagaggaacaaaagaaaattagaacttggcttttgytgctgccaagctgggcaaatagcgatcccagggagcctggtgttaaataacaaagaaagcagggaacgaggcagaaatcccagtgggatctgaacggcat

SEQ ID NO: 40257 - DNA, 201 bp, Homo sapiens
tgcaatgcttgtttctcatggcttaccccagaactagggcggttattgggcaagaaagggaactatccattgctgaaactgggagtaacttgtgataaccaaattagtgactgaggcaaaagtctcagtcgatgagtttattaagccatcttaagggcataatccaggggaaaaacaaatgccatagacagacctgtggct

SEQ ID NO: 40258 - DNA, 201 bp, Homo sapiens
ggtaggtgagcaaagtccctccgcgcggtggccgaggggcgcgcggagccggggccggcagacgccaggacgcgccgctgcgctctgctccggggcgggargcgcgggtcagtctcgctctggctgcgggaggccctgccggggaccgaagcgggaacgggggcgcctcccgggggtggaggccggcgggtgcccgggccg

SEQ ID NO: 40259 - DNA, 201 bp, Homo sapiens
agacatgagaaagaacgagatcatgtcctttgcagcaacatggatagagctggaggccattatccttagcaaactaatgcaggaacagaaaaccaaatacygtatgtactcatgcataagtggaagctaaacaatgggaacacctggatactaggaggggaacaacagatactggggcctacttgagagtggaggcttggg

SEQ ID NO: 40260 - DNA, 201 bp, Homo sapiens
gaaagtctgggaagaatggctgggttcggttgctgccttcaccatttagaggtctgcagccttggacaatttgcctagcctctgagcttcactttcttctyttaaaacataaatcaaaggccaggtgccgtgcctcacacatgtagtaccaaggctttgggaggccgaggtgggaggatggcttggggccaggagtttgag

SEQ ID NO: 40261 - DNA, 201 bp, Homo sapiens
tggatactaggaggggaacaacagatactggggcctacttgagagtggaggcttgggggagagaaaagatcagaaaaaatactcattgggtactacgcttmctacctgggtgatgatctgtacaccaaacccctgtgacacacagttttacctacgtaataaacctgcacgtgtaatacccctgaacctaaaataaaagtt

SEQ ID NO: 40262 - DNA, 201 bp, Homo sapiens
aatcaaaggccaggtgccgtgcctcacacatgtagtaccaaggctttgggaggccgaggtgggaggatggcttggggccaggagtttgagaccagcctggrcaacatagtgagaccctgtttctacaaaatatttaaaaattacctgtggtcttagctacttgggatgctgaggtgggaggatcgcttgagcccaagagtt

SEQ ID NO: 40263 - DNA, 201 bp, Homo sapiens
agtgaggatgattttgtgcttccatggtgaagtgcagcacagaggggttctctggggcaagttgggggagcccagagtgcatggagagtgagggcctggcrcaggctgtgtttggatcctaaggaacctcttagtgcaggtgaatcagggtaaatgacaatgaaaatctgcccgagggagaagatgtgatcaaagtatgtg

SEQ ID NO: 40264 - DNA, 201 bp, Homo sapiens
ggaggccgaggtgggaggatggcttggggccaggagtttgagaccagcctggacaacatagtgagaccctgtttctacaaaatatttaaaaattacctgtrgtcttagctacttgggatgctgaggtgggaggatcgcttgagcccaagagttcgagcctgcagtgagctatgatcgcatcactgcactccagcctgggca

SEQ ID NO: 40265 - DNA, 201 bp, Homo sapiens
caatgaaaatctgcccgagggagaagatgtgatcaaagtatgtgcaaagcaagtgtgtgtgttttgctaggttgggagggagaagattgctgtaagttgaytataataagcctgtgtaaaccaaaaataaaattctaagcccctcagccatctgaatgaacccctcctcttggccaaggccattccaaaattaacctgaat

SEQ ID NO: 40266 - DNA, 201 bp, Homo sapiens
tgcctcagcctcctgagtagttgggattacagggtgcaccaccacacttggctaatttttgcatttttagtataaacggagtttcaccatgttggccaggstggtctggaacccctgacctcaggtgatctgcccgccttggcctcccaaagtgctgggattacaggcgtgagtagtgtcgcctgtccagtcatggcgcat

SEQ ID NO: 40267 - DNA, 201 bp, Homo sapiens
agcaagatccctgcttttgtgcatttcactccatttgtagccacttgttgcactccatctggaaagaaagaagccgctgcagggcatgcgccagacctgckctgggccgtcgcttccattgtacggaagatgaacaggcggcgttattttggatcacatagcagcttgttcaaaagcatcttgcattccccagctgttcca

SEQ ID NO: 40268 - DNA, 201 bp, Homo sapiens
tcattgggctgacgcagcagctgccttctcctctggctatgggactgtgggctgagatacctacacgtgggctactctctcaaaagggctgaggagggggygtggtattggagctgtgttggtgactagaggttaagatctgccaacctgctgcttaaggcgtagaagattctttccaagatgcatacaaatgagatttgg

SEQ ID NO: 40269 - DNA, 201 bp, Homo sapiens
agtcctgctggtgggagcatccagcccagctctgatgatctgaaaccatctttgagtaactggtgcccagagggaatgttttactttttggctgcttttcygacgtgatcattaggaaagagataggcacacttttgcacaacttctatgctaagcttctttgtctggaaaggaaattttagttgcaaggacttaaaattt

SEQ ID NO: 40270 - DNA, 201 bp, Homo sapiens
agaatcgaggagcagaatcttgggtacaggaagatagaagaggcgttatatggtttatcaaattttacgtacatgtccttaaaaaagatttcgtattgtgyctctacctaggcctgcttgtctcccagttcctggccagcaccccaaaacatcttgccttcctaattattgtgaattgtgaataaatggccctctagtagc

SEQ ID NO: 40271 - DNA, 201 bp, Homo sapiens
cacacacacacacacaccattccatctttagaggtcatcatgcctttgcatgtcatgctttgtgctgtggtggctggagactctctttccatcaccagctrttccctgggctgtcattctgtgtaaaatcctttctgctgacttctcatccttccttgcctgcacgtgccctaaatctcacttttctgcccatcctctttg

SEQ ID NO: 40272 - DNA, 201 bp, Homo sapiens
catcttgccttcctaattattgtgaattgtgaataaatggccctctagtagctccagcatcaatcacaatcctttttgggatattcagtgagtttcaatcscctttgttctataaaaggttgtaaaataagccataattgcttgggcatgtataaaaccctctgactccaaatctcctcgaaatcttaggggttccttgta

SEQ ID NO: 40273 - DNA, 201 bp, Homo sapiens
tgtactggaaactgctgttgcttcagatcccctgatgattcacggttgctgagttgcacccacaattctaagcccttaatccacttctggcctccatttayacattcatgtatctcttacttcatcccttttgtgcagtaataacagatgtttacagtctttcagttttcacttggtttactgacgttttcacttgagatg

SEQ ID NO: 40274 - DNA, 201 bp, Homo sapiens
tgtaggaagaccccaggactgatgtcaaggcatacgatgtgacacggatggtgtccatgccccagacgacagcaggcaccatcctggacggagtgaacgtyggccgtggctatggcctggtggaaggacacgacaggaggcagtttgagatcaccagcgtttccgtggatgtctggcacatcctggaattcgactatagca

SEQ ID NO: 40275 - DNA, 201 bp, Homo sapiens
tgagttgcacccacaattctaagcccttaatccacttctggcctccatttacacattcatgtatctcttacttcatcccttttgtgcagtaataacagatktttacagtctttcagttttcacttggtttactgacgttttcacttgagatgctcaagaaccccgttgggttcttagggctggtgacccagggtttccatc

SEQ ID NO: 40276 - DNA, 201 bp, Homo sapiens
ttttctcagggcaccaagagggcccctcagatcccttttctccctgtgggaagttctgggtcaggagctggaaggaaggtggtttttctcttctcctgggygtgaccagccttccctccaggtgccaacggtttctcccctgccctaggtccgaggctctttgccactggtccttgcaggccccgggaaagtgagccagac

SEQ ID NO: 40277 - DNA, 201 bp, Homo sapiens
ttactgattatgaaccattctttattaattccaccactgtgagttttagaataaaattaaaagggatttaggtcctatggattattcagatttttaaacayctgagcttgagcttctactactagaaattccgaatccaaagctcttgttgaatttgttactttatgcatctcacgtatctatataaagaaaatgtgctgt

SEQ ID NO: 40278 - DNA, 201 bp, Homo sapiens
ttttctcttctcctgggcgtgaccagccttccctccaggtgccaacggtttctcccctgccctaggtccgaggctctttgccactggtccttgcaggcccvgggaaagtgagccagacatttgcttctcctcgggtgtctcagctgctgacctgtccctctgccattctgtgtttgcagtgggaagtcgccagaagggaga

SEQ ID NO: 40279 - DNA, 201 bp, Homo sapiens
aattaaaagggatttaggtcctatggattattcagatttttaaacacctgagcttgagcttctactactagaaattccgaatccaaagctcttgttgaatktgttactttatgcatctcacgtatctatataaagaaaatgtgctgtattttttacttttatgagtggagaaactcactgtcttcagtcctgctgttgcct

SEQ ID NO: 40280 - DNA, 201 bp, Homo sapiens
ttctttggtgaggtatctattcagatgtttttcccatctgttaatctggttgttcattttcatattgttgagttttaacagttctttgtatatttggggtrgtagtcctttatcagatatgtcttttgcaaatattttctcccattctgtagattgtcttctcattcttttaacagtgtcttttacagaagtctttaattt

SEQ ID NO: 40281 - DNA, 201 bp, Homo sapiens
ctcgaactcctgggctcaagcaatcctcctgcctcagcctcccaaagtgctgggattacaggtgtgagccactgagcctgacctggacttttttttttttytaattttagattcagggggtacatgtacaggtttgtgacatggatattctgtgcaatggtgtagctcgggcttctgtaaacgaacttctgtaaaggtgga

SEQ ID NO: 40282 - DNA, 201 bp, Homo sapiens
gcatggagtccaggagtttgaagctgcagagagctatgattgtgccactgcactccagcctgggcaagagtgagaccctgtcattctgacccaggtgttaytccgagcagcactgacagcattcagggctaggtcatgcttggttctcttggcagaattttttctttggtttggggatatcgcctgtacatgacaagacaa

SEQ ID NO: 40283 - DNA, 201 bp, Homo sapiens
ttagaaatgtccgtaagtaagtgatctctagtctaggaggcagatgggttctgatgacctgggaagaactctgttgttaccaaggctaaatctccacaggwgtttccaagacccaagggtcacagctgtgtgccagtaggaaaagaggggtggaaaatcgactccaaacggccaaatgggcgttacatcctaggcaaatgc

SEQ ID NO: 40284 - DNA, 201 bp, Homo sapiens
gatagtggtgactatgttgtccccccaacatcatggtccttggggttagaaataagagccatttcccttaggaggaagaaggtgatgagcttagttggggmgggggacctcctttgctcaggacttctctagtattccttatgcagccatagtaccactccccacaaacatcctaacaccgcccctcacccccagactttg

SEQ ID NO: 40285 - DNA, 201 bp, Homo sapiens
cttggaagggagtttgtgctttgtggccagtccagggtgggtgtaagtcatgaatgattggccatattaagactgtgctagacccttttgatcaaaagccycgctagggatgctttctacttatgatcctctgtccatgagaatataccagagagtaggtattaggaaatccttgacagattgacttgattaaggaatctt

SEQ ID NO: 40286 - DNA, 201 bp, Homo sapiens
tagtctttgctctcaaagagtttatattgtgcgtgtgcgcacacacacacacacactcttttttttccacttaaaaacagaagaatgaatgagtgtgtatrtgtttaggtgacactgagaggtaatgttaccaaaacaccagtggttcggtcttgatcctgctgctgttcaccacacagaaagccaatcactgagataatc

SEQ ID NO: 40287 - DNA, 201 bp, Homo sapiens
agaggttttgagagattaaacttgcccaagttaggaagtggctgaatgcaatgggattcctgagctcacctgctcatacggggtggaatgttctgtctccrtccttctgctgagcagaaccagggagagttcatcggctttgtcatgaaaatcacatcgtctcatatggttgttagtgagtctagtaatgcatttccttta

SEQ ID NO: 40288 - DNA, 201 bp, Homo sapiens
gaagctgtgaatatgttcagttatatggcagttgggaattaaggttgcgagtcagctgtccttgagatggggagattatcctggactatccaggtgggacytttgtaatcgcaaaggtcctcggaagtgaagaaggaagtcaggagagtcagtgtcagagtgatgccgtgggacacagtcttcagggctgttgctgccttg

SEQ ID NO: 40289 - DNA, 201 bp, Homo sapiens
agtgcacccagagccctcccacctggcacttgttccctgcaaaaatataaaaatattgctctttttgtgactttttcttttttttttttttttgtgttcaygacttaattcacatttctcctttctctaagttctgcaataagtgaaaagatgtttacccatgccgaaatagtctggtactttaatttcccaattaaaagg

SEQ ID NO: 40290 - DNA, 201 bp, Homo sapiens
agcaccttttaacggtctgcataggaagcattgaccatctattgcgtttgggggcagccacctatgagactatgagacttcatctacataagaacttttgyctccacaacccccatattaacccaaacactcctctcctttctgtttattccaggtctttagacaataacttaactctttcaaccaatttccagacagaaa

SEQ ID NO: 40291 - DNA, 201 bp, Homo sapiens
gtgaaaagatgtttacccatgccgaaatagtctggtactttaatttcccaattaaaagggagcacaattttcttgccccagtagcagtgttacttatcccrggtggtttggctattgcatgtaattctgcaaagcttctgttgcgtgtttacagtttgaccggcctgaggaatctgtaaagatgaataatggttggactca

SEQ ID NO: 40292 - DNA, 201 bp, Homo sapiens
  misc_feature (1)...(201): n = A,T,C or G, or insertion/deletion polymorphism (see Tables 1-2)
tgatcactaaagatgccattcaggtgcctcctccaagaagctagctgggtcatatgcacctccactggtgggacggggagagtggacagaacgcctatganaacatgtgccagtctgtatgtttctggtgctgatctccttgactaaacagacttttattattactgagataggatcttattctgtcacccaggctggaat

SEQ ID NO: 40293 - DNA, 201 bp, Homo sapiens
agtgagactctgtctcaaaacaacaacaacaacaaaacaaaacaaaaactttgctaagatcctgctgtgtgccaggcactggagaaacaaagataaataamcaagatatggaattttttccagaggaagccacattctagatgcaaagaaagataagtgagtagctcaagagaacatggaatagcagtgctaaaataattt

SEQ ID NO: 40294 - DNA, 201 bp, Homo sapiens
tgccattcaggtgcctcctccaagaagctagctgggtcatatgcacctccactggtgggacggggagagtggacagaacgcctatgagaacatgtgccagwctgtatgtttctggtgctgatctccttgactaaacagacttttattattactgagataggatcttattctgtcacccaggctggaatgcagtagcacagt

SEQ ID NO: 40295 - DNA, 201 bp, Homo sapiens
aacaaagataaataaacaagatatggaattttttccagaggaagccacattctagatgcaaagaaagataagtgagtagctcaagagaacatggaatagcagtgctaaaataatttagggtgccaagaggaaggaacttcccactctgcaggaagagtgcagcagagaggaggagatatttgaacctagtactgaagcaca

SEQ ID NO: 40296 - DNA, 201 bp, Homo sapiens
agagtaatgccttcttaacagtgaataccgaaagtttcagttcaagtactagaaagtgacttgtcatgaataatcacagtttaaatttaagtgatgcttarttatacatttattttttatgtttttgagacaggatctcactccgtaacccaggctagagtgcaatagcacgatcccagctcactgcaacctctgcctcct

SEQ ID NO: 40297 - DNA, 201 bp, Homo sapiens
cactatattgctcaggctggtctcaaattcctgggctcagccgatccttctgcctcagcctttcaaagtgttgagattataggcatgagccaccacgcctrcatttataaatatttatggaggacttttatgtacagggcagtctgccgggattttcacttatctaatgtcatttaatcacaagtaccacgtgaagtaggt

SEQ ID NO: 40298 - DNA, 201 bp, Homo sapiens
ttcccacccaacactagtggcccttgagatatcattgattgggtgcttctccagtatatccatggaaattggagaaatgctgtgtgctgaattctattccrtatttggcttccaaaagctcataagcacattagagactgcaagaagccttgaagtaaagaaatctgcttaacatttttaaacctagcattttctaaactc

SEQ ID NO: 40299 - DNA, 201 bp, Homo sapiens
ctatgaaggtggctcctgcgccttttggattgtgggttaactttactttggggagagcatccaattgcactttcagagtgggaaaatatttttccttttgyaacatcttaacaaacctacatagaatttgcttaggaagaagagaagtctaatggaaaatcaattaactattttagtaattttctacacgatacccaaatt

SEQ ID NO: 40300 - DNA, 201 bp, Homo sapiens
atggcactcggcctggtccctcccaacatgattctgataatggaagaccacgtcacccaaagcacttcagtcctggtctggcttctgcaggtctcaggctrtgcctcccatttctttcctcctcccactttttgtaagatgatcctggagaaaatgttgtatctgcaaataggaaatccacatgacaagtgcagatggcca

SEQ ID NO: 40301 - DNA, 201 bp, Homo sapiens
gatcccccaggagcatgacagagaccctgagaccctggccttacaaccccatggccttatcatcccagggcctgcatcgtgcctgggagggactgctgccmagatccaaggccacctaaagctactggcctcacaaccccatggccttataaccccagggcctgcatcatgcttggcagggactgctgcccagatccaagg

SEQ ID NO: 40302 - DNA, 201 bp, Homo sapiens
cccaggagcatgacagagaccctgagaccctggccttacaaccccatggccttatcatcccagggcctgcatcgtgcctgggagggactgctgcccagatycaaggccacctaaagctactggcctcacaaccccatggccttataaccccagggcctgcatcatgcttggcagggactgctgcccagatccaaggcttgc

SEQ ID NO: 40303 - DNA, 201 bp, Homo sapiens
gtactcaatgcttttggttttaggtttttgtttttctaataacatatttgatgaagaagtcccatctgatgcagaggagacttgcatgtggaaaggagttstcactatttcttaaattgtggcttcactggcttcattacctgcaccttctcttctcacaaatatatgtcatttttatttaccatgacatttgagaattta

SEQ ID NO: 40304 - DNA, 201 bp, Homo sapiens
attaatatctaaactggtcctgagtcaactatttccattctaaaatgtttaaagtcttaaggtttaaaactattggggtcaaattaaccttttctttatcttttttttttttgagatggagtctcaccctgtctcccaggctggagtgcagtggtgcaatcatggctcactgcaaccttgaccttttgggctcaagtgatc

SEQ ID NO: 40305 - DNA, 201 bp, Homo sapiens
tattatatccaaagagaaatacccatagtaagttcatggttctttactatacacatgaaatttctagtcttttatataaaatgaaaatgccagtaattaawcttatttaatttttatggtttcattgacacaactagtttaatgtcactgagtatgtgcaatggattctcttcctgaaaaactctttagcaataaataaca

SEQ ID NO: 40306 - DNA, 201 bp, Homo sapiens
  misc_feature (1)...(201): n = A,T,C or G, or insertion/deletion polymorphism (see Tables 1-2)
ccttgtggatttttttgtacttacctttgacaagaggaaatctctgcaaacctctgtgtgcagttccagaaacatgttttactttatcatcatgctcaaanactgctttgtaagctctctgcattgggggtaagctggttagcatttacctagtatttgtgtttattaagttagtctttgctctcaaagagtttatattgt

SEQ ID NO: 40307 - DNA, 201 bp, Homo sapiens
  misc_feature (1)...(201): n = A,T,C or G, or insertion/deletion polymorphism (see Tables 1-2)
agatcatgtcactctcttgtttttatccaactggggcttctagaaactctcagaataaactccaaagtcctggcccagagcctgtgtggccagcactcagncatcactgaacagcacttcctgctggttatccgggctctcttcctttcactcactgcacgccagccaaactggccactttgcaagtttcgtgcacagacc

SEQ ID NO: 40308 - DNA, 201 bp, Homo sapiens
cctacattggatttagaggctagaattcaagcatctgcctgctttttgctaaaaatgtttattgtacaaataaatctgtacccaactcctgaaaacaccargtttttatttttaaatgtgcacaacttccaaaggccggtttggtgctgaattggaaaggattctagttcgcaaaacctggaaaatgaccattactcttgt

SEQ ID NO: 40309 - DNA, 201 bp, Homo sapiens
ttatgcaaatggagtcacacaggatgtcttttgagtctggcttctcttaagctgatccacattgttgtgtgtcaatagcagttcctttttgttgctgagtygtgttctattgtattgttgtagagtttgcttattcactcaccaaaggactttgagattgtttccatattttagtgattatgaataaaacaccagttccat

SEQ ID NO: 40310 - DNA, 201 bp, Homo sapiens
ttcgcaaaacctggaaaatgaccattactcttgttttctttctttcgttctttttctttaaacagttgtattgaggtataatattgccatgttttcttaasctagctttttggaagaaagtttgggtcaatgttaagccaaaatttcttaacttctagggctttttgatatggtcttgcataagtttctcaaactctcact

SEQ ID NO: 40311 - DNA, 201 bp, Homo sapiens
ccatacagtctttgctctaattattcaacattgccactggaacatgaaaacagccatagataatacagaaatgaataagcatggctgtgttcgaataaaaytttattggcaaaaattggcagtgatgtggcccacaggttacagtttgctgacccctggtctagaagagcaattacaggtaccattttgtttggagatatt

SEQ ID NO: 40312 - DNA, 201 bp, Homo sapiens
tgattatgaataaaacaccagttccatttatgagcagatttttatggaaacataagttttcactttttcttgagtaaatacatagggtgtggagttgctgkttcataaggtaagtttaacttgatgaaaaaaagaagaaacacctgctaggctgtttcccaaagtacctgtgccacttttttgcattccaaccagcaaaat

SEQ ID NO: 40313 - DNA, 201 bp, Homo sapiens
tctttcgttctttttctttaaacagttgtattgaggtataatattgccatgttttcttaacctagctttttggaagaaagtttgggtcaatgttaagccaraatttcttaacttctagggctttttgatatggtcttgcataagtttctcaaactctcacttttttattactcccagataaatcttttcagtagaaatttg

SEQ ID NO: 40314 - DNA, 201 bp, Homo sapiens
ctcctggaagaagcacatgttagccagccacagttactccaatcaaaacaatttaaactttcccttccattttgaatcctgggcacgattcctgtcttggmtgaaacagatgtgattttgggacatgtacaaaatcttataatatggaggctgagccttgctggctttcctgccactgcacttcactctaacttgcaggga

SEQ ID NO: 40315 - DNA, 201 bp, Homo sapiens
ataaaacaccagttccatttatgagcagatttttatggaaacataagttttcactttttcttgagtaaatacatagggtgtggagttgctggttcataagrtaagtttaacttgatgaaaaaaagaagaaacacctgctaggctgtttcccaaagtacctgtgccacttttttgcattccaaccagcaaaatgtgagcgct

SEQ ID NO: 40316 - DNA, 201 bp, Homo sapiens
gaggtataatattgccatgttttcttaacctagctttttggaagaaagtttgggtcaatgttaagccaaaatttcttaacttctagggctttttgatatgrtcttgcataagtttctcaaactctcacttttttattactcccagataaatcttttcagtagaaatttgggaaatttttgcattttaaaaactcgtacttg

SEQ ID NO: 40317 - DNA, 201 bp, Homo sapiens
actctatgggagctacaattcaagatgaggtttgggtggagacacagccaaaccatattatgcccagtgtgattttcctccttgaagagaaacctcggaayatgactttcccttttcttcccctcaattttgtgttccaatcccttctacttagaactttaaattacttttatttagaagtccttctagcttcactattgc

SEQ ID NO: 40318 - DNA, 201 bp, Homo sapiens
gatatggtcttgcataagtttctcaaactctcacttttttattactcccagataaatcttttcagtagaaatttgggaaatttttgcattttaaaaactcrtacttgctgatgcagttttttttctttcttttctttctttctttttttttttttttttaagacagagtctcactctgtcacccaggctggagtgcagtca

SEQ ID NO: 40319 - DNA, 201 bp, Homo sapiens
cctccttgaagagaaacctcggaatatgactttcccttttcttcccctcaattttgtgttccaatcccttctacttagaactttaaattacttttatttaraagtccttctagcttcactattgccggagtttcttttttccttctctgcacataacacagtgtgttgtactcaggagatgctaagtgcacatctgtttct

SEQ ID NO: 40320 - DNA, 201 bp, Homo sapiens
tgtactcaggagatgctaagtgcacatctgtttctcttgggtgtagtaaactaagtaaaactgagctcaagggtaatacccacccttagtgagaccttggygtaagtgtaccaggctcacgggtcgtctgtacgaggcagtggactcctatcccaagatctagggagagatccctatcacgtctttccaggcaaaaaggta

SEQ ID NO: 40321 - DNA, 201 bp, Homo sapiens
ctgaggcaggagaatcgcttgaacctgggaggcagaggttgcagtgagtcaagatcgtgccactgcactcccgcctggtgacagagcaagactctgtctcaaaaaaaaaaaaaaaaaagaaagagaaaaaaagaaagaaaaaaaaagaaaaatgagacattaacctgaatgttgaaatgctgataagacccagtctttttc

SEQ ID NO: 40322 - DNA, 201 bp, Homo sapiens
agccttgaagtaaagaaatctgcttaacatttttaaacctagcattttctaaactctttgaactggaaactctccctcttttggaggaaaagcttcaagtrtattggagtatcctgtagtacatagtttgggaaatgctggaatagatcagtggtcggcaaatagcagcctgcaggccaaatccctcttgccacctgttgt

SEQ ID NO: 40323 - DNA, 201 bp, Homo sapiens
aatcctagcactttgaaaggctgaggcaggaggatcacttgaggccaggagtttgagaccagcctgggccacatagtgaaaccctgtctttataaaaaatwaaaaaattagccaggcatgatggcatgtgcctacagggctagctactgttgagacgctaaggagggaggatcccttggtaacatgcatccagaaggcatc

SEQ ID NO: 40324 - DNA, 201 bp, Homo sapiens
tgcttctggaattattgctgtcagaatggcaagccttgggcactaatgtggtaggcagctatctgaggggtgatggatgcctggaactactccagacacartgatgtctgcaggtcactgtgcagttccaatcaatggggaccttctctaatggggagatggtcttgttgatttggcattttatttatttactttttacaa

SEQ ID NO: 40325 - DNA, 201 bp, Homo sapiens
cagtgatcttttcccccttaccttcacagtacttttatttgtactttgctgaaagtgactaaattacatatatttacaattcatccatgatagcttttccrtgagactttaatccctcccttttgtgaaaatgaaataatgaagcttaaactatttaaaataagaatgttattcctccatttatttgggctttacttttcc

SEQ ID NO: 40326 - DNA, 201 bp, Homo sapiens
atgcgcaccaccacgtctggctaatttttgtatttttagcagagacagggttctgctatgttggccaagctggtctcgaactcctgaccaaaggtcatccrcctgcctcggcctcccaaagtgctgagattataagcgtgagccaccagcacccggcctgatttatttttaaggttagctttcctgaaaatgccttcttct

SEQ ID NO: 40327 - DNA, 201 bp, Homo sapiens
agtttgggaaatgctggaatagatcagtggtcggcaaatagcagcctgcaggccaaatccctcttgccacctgttgtgtaaataaagttttattggaacamagctacactcattcatttatgaattgtctatttgccccagaatagccaagttgcagagttgtgacagagacctgtatggcccatactgccaaaaatatat

SEQ ID NO: 40328 - DNA, 201 bp, Homo sapiens
tcagagtttttgcacagggggttggtaacctggtgaaagtcagtaacagtttgttttgtccggaaagaaatgccttggaaaggtcaagagagccccggagwgaagagacaagccctcctggtctggctccagcttagctagcatctcctcctgctgcattaatcatgctcattctcctttctccggtgccctgttttcctc

SEQ ID NO: 40329 - DNA, 201 bp, Homo sapiens
ccaaaggagggattcggctccggtagcctccagggccacgtagtgaatagagctgacccaggggccacgtctccaactctcccctggtccatggtgagacygcggtgcgctcagattagtgttagagcagccaaccccgtgtgctctaaccaggagaatacggtgagaggacagaaatcccagctagacagcagtgttaga

SEQ ID NO: 40330 - DNA, 201 bp, Homo sapiens
gccacgtctccaactctcccctggtccatggtgagaccgcggtgcgctcagattagtgttagagcagccaaccccgtgtgctctaaccaggagaatacggkgagaggacagaaatcccagctagacagcagtgttagaaagacacaccttctttcttcatgaattttctcagttcacatgctcttaacagggcttatattt

SEQ ID NO: 40331 - DNA, 201 bp, Homo sapiens
atttcatgggctggtgggagcgtcatcttatcattctctcttttttttttttttctggtaatgattttttttgtttttttttttttgatattgacaaaagyttaatcatttcaattaaaaatgccactaatttgactttttaagtaaaaaatgtagggggttttaaaactactttcctactaccaaaaaatcagaaagtat

SEQ ID NO: 40332 - DNA, 201 bp, Homo sapiens
gatctctcatttaatttttgtctgtttgtttgttttttgagatggagtctcgctctgtcacccaggctggagtgcagaggcacgatcgcggctcactacarcctccgcctcccaggttcaagtgattctcctgcctcaccctcctgagtagctgggatcacaggagcccaccaccataaccagctaatttttgcattttta

SEQ ID NO: 40333 - DNA, 201 bp, Homo sapiens
ggcaggcacctgtcacggtggccctgggccaggcgttgggtgagcgggccagtgtcgtgcctctctctgggttcacacagcccaggcctagccactgcccrggctcccagcatcacagtcctgcaaacagcactttggcttggcagttgttagaagcgctgacagttgtttgaattgcaccggcaggaatttatgtcctgc

SEQ ID NO: 40334 - DNA, 201 bp, Homo sapiens
ggaaaccttgaccacagtggtctcatacattccataaggggaaaggaaaactttcttactgatgagttcgttgggcttttggaattcatatgtaaggtgaytatctggattttagtacccttaggtcaatcctttaaaaaatacgtaaaagaagagaatattcttccggttgcaatgtcaaattataggtgagtatctgca

SEQ ID NO: 40335 - DNA, 201 bp, Homo sapiens
atttgggaagatctccctccctcctcagcgtggtggacaccaatgaggaaatctaaagggacaggaagaacacactcaagttttagtgcgtgttattttcragttattcgtcatgtgctccgtaggctggagccgagggctggctccaagtgccaggtgggctccacggaagcacagtttcttccagattattctggttac

SEQ ID NO: 40336 - DNA, 201 bp, Homo sapiens
agaacacactcaagttttagtgcgtgttattttcaagttattcgtcatgtgctccgtaggctggagccgagggctggctccaagtgccaggtgggctccayggaagcacagtttcttccagattattctggttactctgtagtcttcggaagtccccaatggtaaccctgccagcacatgtagaagcaaaatttcagggtt

SEQ ID NO: 40337 - DNA, 201 bp, Homo sapiens
ccgaagtgaaacaagctacacacaggcaggcgagggctgcagtcacgtctctctgcccactaacatccagtgtgacctcagtcaatggaattcttgacccrgatgtacccacgttccttgtccgtcagaatgggaataacaattcccagtgtcttaggggtcgccgtgcagatcagcagagtataagatggacgaggaggt

SEQ ID NO: 40338 - DNA, 201 bp, Homo sapiens
tgatttcattttgtgagattattttattaggataaaactgactcattcaaaataattggagaaaagatgaatcatagtcattatatagtatgaaatggtgyggattagagctcttgaaggaatttcgacttcgtgtccaagcccatgaactagctcttgtagcatgcagggtgttgttaaacattcgagaattacaggagt

SEQ ID NO: 40339 - DNA, 201 bp, Homo sapiens
cacccgaacagggggaaggtcagcttcacagtgagtcttttccaagcccatcttttccccctctggaggtcacactgaccttgaggaactgcagttccctstttccacaggtttgttttcttccttcgaggcagcagcaccctctgccctgcccgctccgaccacatcaaagaccatggagttgggtacacagcagtcttg

SEQ ID NO: 40340 - DNA, 201 bp, Homo sapiens
caggagcatgacagagaccctgagaccctggccttacaaccccatggccttatcatcccagggcctgcatcgtgcctgggagggactgctgcccagatccraggccacctaaagctactggcctcacaaccccatggccttataaccccagggcctgcatcatgcttggcagggactgctgcccagatccaaggcttgcaa

SEQ ID NO: 40341 - DNA, 201 bp, Homo sapiens
aatctctttattctcctggatgaatgattaacgatagcaggagggaagacagcagagacattcttgccagaaatagatccacactcacccagccttccacrgttccaagaaccaatcacatttcctaaaacaatattttctactatggactatattttagaaatggtactggcaagagttgcattttaatttattcctaat

SEQ ID NO: 40342 - DNA, 201 bp, Homo sapiens
ctccagcttagctagcatctcctcctgctgcattaatcatgctcattctcctttctccggtgccctgttttcctctggaattcttttctgcttttattccrgtttgactcgtttctcgaacttcaacctgtccctaaatttggaccttttcctgtttgtattcttgcttttttatttttcctaaatgatcctgactgcatg

SEQ ID NO: 40343 - DNA, 201 bp, Homo sapiens
ataaaattgactcttctctaatgggtagatggttttgttgatttgacattttatttatttactttttacaaatgttcaaataacaacagttattattattrttattcctgtggctaaaccaaccctggatggctgagaattaattagctgtaattgttatttataatcaagatcaggcatttggcatgaattaaggagaca

SEQ ID NO: 40344 - DNA, 201 bp, Homo sapiens
gctgactcccctttgaccccgcacccatcacaagatgattttttcctagaagttgcctctggggctgggcttctggagatgaaccccattctctctatgcyggataaaccaggcttctgacatccttcctgtggaatatttataaaaatgagcgccaaggaattcagctgtggtttcttgcaatgcctggtgtggtgccag

SEQ ID NO: 40345 - DNA, 201 bp, Homo sapiens
tcaataagagggtctccttttcctaagcaggcaaaggattttttaaaccagtttggagccctaaggaggagtcccaggggaaaaagagaggcttacattgwtctagcccagttctcaaggcatcaaagctttttagtaataaagagatttgtggaggaaagggaaaatgattttttttattgttggaacaaaaaacggtct

SEQ ID NO: 40346 - DNA, 201 bp, Homo sapiens
atcacaagatgattttttcctagaagttgcctctggggctgggcttctggagatgaaccccattctctctatgctggataaaccaggcttctgacatcctkcctgtggaatatttataaaaatgagcgccaaggaattcagctgtggtttcttgcaatgcctggtgtggtgccagctgttgcccagttcagagccctctgt

SEQ ID NO: 40347 - DNA, 201 bp, Homo sapiens
acttccatcttggcctttgtattgttgtacagtttacttttacatatgtgattaactccatataagttattattgtttgagaagtcacttctcttttaaawgcttaaataataaggagaaagctcttatgtatttacccaggtagtaactatttccactgttctttattcctttgtgtatatccatatttctacctgatta

SEQ ID NO: 40348 - DNA, 201 bp, Homo sapiens
gtctcctaactctccacccagcatgtctttttctgtggaattgggtctttgttagttccatccaacttcgtgatgaatttcaacccatttcttattttctyagttgtccctttgtggcaaggctgctgttcccaagcctccatatttgttcttttgtttttaatttttttaaagacagggtcttccttgttgcccaggctg

SEQ ID NO: 40349 - DNA, 201 bp, Homo sapiens
tcttggcctttgtattgttgtacagtttacttttacatatgtgattaactccatataagttattattgtttgagaagtcacttctcttttaaaagcttaartaataaggagaaagctcttatgtatttacccaggtagtaactatttccactgttctttattcctttgtgtatatccatatttctacctgattattttttc

SEQ ID NO: 40350 - DNA, 201 bp, Homo sapiens
gggtggcatagaaaaagcttccagattgaaaagcaaaggcaaagaggatgtcttgtgcagagaaagcatttgacaaaatcgaatgcctcttcatgtttttwaaaaaaaaaaaaacactcacactcggccaggcacggtggctcacacctgtaataccagcactttgggaggccgaggcaggcagatcatgaggtcaggaga

SEQ ID NO: 40351 - DNA, 201 bp, Homo sapiens
taggacttctggtgatgaattcattccatttttatatgtctgataaatccttattttgcctttatttttataagtaccatgtgctaactagttgtataatyggagctacagttttatttttggaagctatttttgctgggtatagaattatagattgacaattttttcttcttagtttatgaaagattttgcttcactatt

SEQ ID NO: 40352 - DNA, 201 bp, Homo sapiens
taagtaccatgtgctaactagttgtataattggagctacagttttatttttggaagctatttttgctgggtatagaattatagattgacaattttttcttyttagtttatgaaagattttgcttcactattttacacttgccttgcttttgacataaaatctgctatcattcttaccttcttttgtttatgtgatatgtcc

SEQ ID NO: 40353 - DNA, 201 bp, Homo sapiens
gaatggaaacaacccaaatgtttgtcaactgaagaagagacaaataaaatgtggtatatccatacagtaaaacactattcagctttaaaaaggattgtagkgctgacatatgctaaaacatggatgaaccctgaaaacatgctaagtgaaagaagccagacaccaaagaacacaaactgtataattccttttatgtgaaat

SEQ ID NO: 40354 - DNA, 201 bp, Homo sapiens
attaggataaaactgactcattcaaaataattggagaaaagatgaatcatagtcattatatagtatgaaatggtgcggattagagctcttgaaggaatttmgacttcgtgtccaagcccatgaactagctcttgtagcatgcagggtgttgttaaacattcgagaattacaggagttaggactaaatgagaccttgaccca

SEQ ID NO: 40355 - DNA, 201 bp, Homo sapiens
tgcagtggtgcagtcatagcccactgtagcctcaaactcttgggctcagtcttcctgcctcagcctcccgagcaactgggactacaggcacatgccaccaygcccagctgcttttaagatgttttgtttgttcctggttttaagcaatttgcaatgtgctttgatatacgttagtttatatttcttgtgcttggaattaaa

SEQ ID NO: 40356 - DNA, 201 bp, Homo sapiens
agagagagagagaatgcatgtggcacaggatgaggtagaataggagaggggagttacaaagcaaactgagaaggaatggccagccagggaggaaggagaaktaagagagtgagcacaaggtcactgaactcaggcacaaagtaagtcctaccgagaggtagtcataggaggacagaaggatctattggaattgccaagatg

SEQ ID NO: 40357 - DNA, 201 bp, Homo sapiens
cattatatagtatgaaatggtgcggattagagctcttgaaggaatttcgacttcgtgtccaagcccatgaactagctcttgtagcatgcagggtgttgttmaacattcgagaattacaggagttaggactaaatgagaccttgacccaaagggatctgcatgagattgacaaggcagccttaccccagttctagagattga

SEQ ID NO: 40358 - DNA, 201 bp, Homo sapiens
ttgcaatgtgctttgatatacgttagtttatatttcttgtgcttggaattaaatgagctccttggatctttgggtttatatttttattaggtttggcatawtttttcagccattatttctttaaatatcattttctatccctctgtgccccccatgtggaatccaattacatgtgtttaggctgcttaaagttgtctccac

SEQ ID NO: 40359 - DNA, 201 bp, Homo sapiens
aaccttaggtaaagtcttcttgtagcaattttcttatgtgtgtggtttaaaaaacaaaactttgtggttgtaattgcttggttgtgttttattgtatatgwaagaggcatgccgtgggggttcagaagaaagaattgttcagtattactttcataaaacattgaaagaagcatcttcatttgttctagagtgcagattcac

SEQ ID NO: 40360 - DNA, 201 bp, Homo sapiens
agaggaaaacagaaatgaaggggggagaaggaagagattgaggaaggggacaggtccagagttcgaagctcctgcctcctttgggggattcctttcttcayggcttacttcccgttatttgactgagtgaatagacaaatacaaggtgtgattatgtacacatacgtagatgtcgccggattcttgtttaagtactacaaa

SEQ ID NO: 40361 - DNA, 201 bp, Homo sapiens
tgctcctcgttgtgggttgtattttcctgcctttttgcatgcctggtaatttttgacaggatgccagacattgcaatgttatcttctggggggatggaaayattgttgagctttgttttgggatgtagataaattacttggagacagttgattcttttgtcttactttcaagatttattaggtaggagcagtgctaattag

SEQ ID NO: 40362 - DNA, 201 bp, Homo sapiens
aatttgttttcttattagcataacaaaacttttatcatagaatatatctcatcccatctccaaaacaaatatttaatgggaatcgggaagcttggaagaargacccttagagatcatctgaccagttcctgatgtgacagatataggagggagaaccgagatacccaaagggagtagccaaattgggaccaaagctgatgt

SEQ ID NO: 40363 - DNA, 201 bp, Homo sapiens
cctggccacgaaacaggtgaaattaatttaattatatattttctttaactcagtctacccaaaatgttatttcaacatgtaatcaatgtaaaaatattaawgagacattttttcttaaattttatagtaagtcttaaaatttgatatgtatgttatagctatcagatactacatttttatctgaaatacttggtctatatt

SEQ ID NO: 40364 - DNA, 201 bp, Homo sapiens
aagcggccccactttaaagtcctttatcccaggtagctctgaagttctgccatagacctgttgaatgagactgtcatggggtaaagcccaaagaatagtgwtttttaaaagcatcacatgtgacctattgaagatggagaactattgctctaaagaattgatactccctggtctttcagttacattttcttgaggtcattg

SEQ ID NO: 40365 - DNA, 201 bp, Homo sapiens
atttaatgggaatcgggaagcttggaagaaggacccttagagatcatctgaccagttcctgatgtgacagatataggagggagaaccgagatacccaaagrgagtagccaaattgggaccaaagctgatgttctgcttaaaaatacactgttgtctaggcgcgctgtctcatgcctgtaatcccagcactttgggaggctg

SEQ ID NO: 40366 - DNA, 201 bp, Homo sapiens
agttcacctcacctcatgttgtttctaaataaaataataaaatctgaacccatagtcttcgccttttttgaggtttaagtattggttcatctatgtcgttmtgtaatttcaaagtgccttccggaaaatccctcgggatggagatgactcaggatagctttgcactggtttgttatggggccatctaaatgaaggaatggc

SEQ ID NO: 40367 - DNA, 201 bp, Homo sapiens
gtcaccttgaaggattcactctgagttctgactggttgagaccagaagttctcgtaagtagcagcttcgcttctgagatgctcctttgcctcacctgcacrattctgcagagctggggtcctgcctaccttttaaccacatctgacaataactatccttaccttttgctaccccttaaattcagacttctttacctttggc

SEQ ID NO: 40368 - DNA, 201 bp, Homo sapiens
ttgggaccaaagctgatgttctgcttaaaaatacactgttgtctaggcgcgctgtctcatgcctgtaatcccagcactttgggaggctgaggcaggggatygcttgaggccaggagttcaaaactgccctgggcaacatagcaagcacctgtctctaccaaataaaaattttaaaaattagcctagtgtagtggtgcacaa

SEQ ID NO: 40369 - DNA, 201 bp, Homo sapiens
gccaaccccacttccactgccttgacgtccctcttgcagcagagaagctaatcctgcccagcctggccatgagtgagggcacctgaaggggtgaggaggcrggggtaatgttgtgtaggtgggagggggcagtagagagtcccatactcaaagtgactgccaaatccagggctgtgcatagagtgactgctgacagcgttt

SEQ ID NO: 40370 - DNA, 201 bp, Homo sapiens
cagcactttgggaggctgaggcaggggatcgcttgaggccaggagttcaaaactgccctgggcaacatagcaagcacctgtctctaccaaataaaaatttwaaaaattagcctagtgtagtggtgcacaagtgtagtcctagctactctggaggctgacatggaagaattgcttgagcccgggagttcaaaaccagcctga

SEQ ID NO: 40371 - DNA, 201 bp, Homo sapiens
tgcagatgaagaaaaggtggatgaacgagccaagctgagcgtcgccgccaagaggttgcttttcagggtaagctgtgctgacgtgcttgaatagagatccytactgggtgcagtaatcccagctatttgagaggccaaggcaggagaatcacttgaggccaggagtttgagaccagcctgggcaacacagtgagaccccca

SEQ ID NO: 40372 - DNA, 201 bp, Homo sapiens
ccaaagtgctgggattacaggcgtgagctaacgcacgtggccaaaatcttttgttttctgatgactgattattttctcttcgctgatgtaaatttgtacattttttttttttttttttttttgagatggagtctcactctgtctcccaggctggagtgcagtggcacaatatcggctcactgcaagctccgcctcccaggt

SEQ ID NO: 40373 - DNA, 201 bp, Homo sapiens
tcaaaactgccctgggcaacatagcaagcacctgtctctaccaaataaaaattttaaaaattagcctagtgtagtggtgcacaagtgtagtcctagctacyctggaggctgacatggaagaattgcttgagcccgggagttcaaaaccagcctgagcagcatagcaagacctcgtctctacaaaataaaaattttaaaaat

SEQ ID NO: 40374 - DNA, 201 bp, Homo sapiens; identical to SEQ ID NO: 6449

SEQ ID NO: 40375 - DNA, 201 bp, Homo sapiens
cttcgggccatcttagaaaagggactttattatttttccagacatgctgtcttccgaataaatgaaattcaaaatgttaaaacgaggcggctgtggtcatrtcttggcccaagccgcctctcttacctagattatggttccatcacaaggaagagtttggtgctgaactctttgtggcgggcatgttttcctcctagattg

SEQ ID NO: 40376 - DNA, 201 bp, Homo sapiens
tagatatttagaaagtatatgcatgtgcatatttttcacacaccgtgtgaaattcagatttcaaaaatgtgatcctgaagtgaaaatccatctgtcaaatwatgtatccctgctacccgcaaactttatttaaaagaatcttgaaatcattgcttcaaaaatgactttaacacattcctcattagcaaacctgccaactac

SEQ ID NO: 40377 - DNA, 201 bp, Homo sapiens
atgaatgattaacgatagcaggagggaagacagcagagacattcttgccagaaatagatccacactcacccagccttccacagttccaagaaccaatcacrtttcctaaaacaatattttctactatggactatattttagaaatggtactggcaagagttgcattttaatttattcctaatagccatttcaactacccct

SEQ ID NO: 40378 - DNA, 201 bp, Homo sapiens
gttgtattttttactagaatagttttaacagcctgcattttttcctttgtgcttaaagctggccctgctattgtttttaacattttttctctaccagctawtcttttgccaaagagtggtgtaatatggaaaatgagtttgtgtctgtgtgagcccttagtcctgctctggcggtcaccaaatactttatttatttattta

SEQ ID NO: 40379 - DNA, 201 bp, Homo sapiens
ttactcggggattcacctttgcacgcaggaggctggaaggtggtctcccctcctctgtctgctgtttttaggaagaaagaaaaatcagtggctcttctatkataaattatgaaattttgtgttgaccagcaccccaccccccaaaaaaatcttagctctagagccttttaaaatatgcctgttatagaacttgttgtataa

SEQ ID NO: 40380 - DNA, 201 bp, Homo sapiens
ttgttgtataaatcttgggaaaatggcttttctacattgtggacttcagatcacctgcttctaactatgtaagaacccactttttaggctggcaggaaggyctgatgcctcagtgctccacagggctccctgtgcagtgcctcagcccctccagtcccctaagtccctggccctggacggaggtggctgccttggacgaca

SEQ ID NO: 40381 - DNA, 201 bp, Homo sapiens
cctggccctggacggaggtggctgccttggacgacacagcggacactaggaagggccgcgtttgctgccactcgctcacgtgctaactcctccgcgccgcyggtgccccctgcaggtgagtggcggctgtactgcgtgcgtggagaggtgcccgtggaagggaatttgctggaagtggcctgtcactgtagcagcctgagg

SEQ ID NO: 40382 - DNA, 201 bp, Homo sapiens
catagttgccgttcagcttttggatgagaagcctgggggcctttgatatttaaagggagcacatttcaaatttgtggagttttcgtttgccagaacagcasagtgttaaaaagctaaagaagagtgtgggaaaccgccatctgtgtcagacgataagatatcccccattctggagagcagcccccgatggagagggatcgg

SEQ ID NO: 40383 - DNA, 201 bp, Homo sapiens
gggggcctttgatatttaaagggagcacatttcaaatttgtggagttttcgtttgccagaacagcagagtgttaaaaagctaaagaagagtgtgggaaacygccatctgtgtcagacgataagatatcccccattctggagagcagcccccgatggagagggatcggactctccgggcacttcccgggtacagcacttccg

SEQ ID NO: 40384 - DNA, 201 bp, Homo sapiens
agcccagtgtcgcccaggcattcaggaggcaactgagacctgtgaggacctcagtgaggaaaagtgaagagcttcctagggtcacatgtccccagagtttkatttggtgaaccccattctctgggttctggaacagagcagtggccagggcccctgtgtccactctgaaaacacactacccagagagggcagagaggagaa

SEQ ID NO: 40385 - DNA, 201 bp, Homo sapiens
tatatatgtacatgtatatatatatgtatatatatatacacctactattagtatatacccacaaattttaaatttaaaaaaagcagacaataacaagtatyggcaaggatgtgaaaattggaacccttacacattacttggaaaacagtctagcaatttctcaaaagatttaacaatacagttaccatatgactagcaact

SEQ ID NO: 40386 - DNA, 201 bp, Homo sapiens
gaggtatttgagaaggaggtaaaccaattcaggcatgtggaacagcctgcacaaagccagcagaaattacgatcacagattgcagggcaggggggtgtctrtgagggataaagttgcctttggaaaagaactcattgccttgtcattttccctggagcatacgcattatttgccttattcgttcaagaaatatttatcgag

SEQ ID NO: 40387 - DNA, 201 bp, Homo sapiens
cctaggcactgaagatgaacagcagttcacaaaccagacaaaagtctctgtcctcacacaagtcacattttagggggcccatgtcactaggggtacaagcktaagctgaagggagctgtagcaaggagttaggagtacctggaagaactcctgaataactatagttgtttgaaaacgtatttgcttatttattttctctct

SEQ ID NO: 40388 - DNA, 201 bp, Homo sapiens
acgccccagttttcagatgggaccctcctcctcagtcttgtagcccctgccctcaatacagaagtcactggctaaaccttagggtaggaagttcccactcrtgctgtcaaggagacatggcccaggatccacagttggagccaaagatacattgtaagatacaacacatagtgtttctggtttctttctttccctctttct

SEQ ID NO: 40389 - DNA, 201 bp, Homo sapiens
tcgcttaggctggagtgcagtggtgccaccttggctcactgcaactgcctcccagattcaagcaattctcctacctcagcttcctgagtagctgggattayaggtgcccgccaccacacccagctaattcttttgtatttttagtagagacggggtttcaccatgttggccaggctggtctcgaactcctgatctcaagtg

SEQ ID NO: 40390 - DNA, 201 bp, Homo sapiens
cctgtagatacccttgggcatatttcttgggttgagaaggattggacttttttttttttttaaaggatttactttatggtagagaaaggtttaatactaamaatttgattaatataacttagtacattctgtctaaatgttagcacttaaagtcttggaattaaagtatattcacaatgcaacgtactttaataatcgtag

SEQ ID NO: 40391 - DNA, 201 bp, Homo sapiens
atatataaaaaatattgaacacgtcatgaatttgcatgtcatccttgcgcaggggccatgctgatcttccaattttagtatatcattccaattttagtacmtgtactgtaatccacctgccttgacctcccaaagtgctggaattacaggcatgtgccaccgtgcccagctgctctaatatcttttccaattgagttcatt

SEQ ID NO: 40392 - DNA, 201 bp, Homo sapiens
aacacgtcatgaatttgcatgtcatccttgcgcaggggccatgctgatcttccaattttagtatatcattccaattttagtacatgtactgtaatccaccygccttgacctcccaaagtgctggaattacaggcatgtgccaccgtgcccagctgctctaatatcttttccaattgagttcattctgctcatttttaccag

SEQ ID NO: 40393 - DNA, 201 bp, Homo sapiens
atgtgcttgtccccttctgaaagttgatcctttaatcccaaacaagtttataacctatgtctaactggtttttgtgtaaatatagtaaaagaaatagtttycatatttgctttgggatcattggtctgcccatgtcacagccctgggtacattcatttcagtccatatttttggggcactttccctgtgcagagctccggg

SEQ ID NO: 40394 - DNA, 201 bp, Homo sapiens
ctaaatcatggcactttttttttttttccttgagacagagtctcactttgtgtcacccaggctggagtgtaatggcgtgatctcggctcactgcaacctcyacctcccgagttcaagtgatttttgtgcctcagcctcctgagtagttgggattacagggtgcaccaccacacttggctaatttttgcatttttagtataa

SEQ ID NO: 40395 - DNA, 201 bp, Homo sapiens
ttccctgtgcagagctccgggtgggtcctgtgggatgcagaagcctatagcgtattccctctcattggcagcctctttcccagagtgtctcggacagggaygtaatggagctattttaccagtcagagtagaagggatgaacaataataacatgccatccattattactgtgtgccagacttaatgccacactctttacct

SEQ ID NO: 40396 - DNA, 201 bp, Homo sapiens
tgggaatgtaaattacttcaaccactgtggaagacagtatggtgattcctcaaggatctagaaccagaaataccatttgacccagcaatcccattactgartatataccccaaggaatataaatcattctactataaagacacatgcacacacatgtttattgcagcactatttacaatagcaaagacatggaaccaaccc

SEQ ID NO: 40397 - DNA, 201 bp, Homo sapiens
ttgtgtcacccaggctggagtgtaatggcgtgatctcggctcactgcaacctctacctcccgagttcaagtgatttttgtgcctcagcctcctgagtagtwgggattacagggtgcaccaccacacttggctaatttttgcatttttagtataaacggagtttcaccatgttggccaggctggtctggaacccctgacctc

SEQ ID NO: 40398 - DNA, 201 bp, Homo sapiens
ttgaagaaaagcggggaggaagattggagaaacagactcagcaggaggcaggagggcggcaaggcgccggccagcagcctgcacacccaggaagcagggcrgtccctcatcaagaaggtaacattccccatgttaggaaaagccttccgactaacatcactcttggaagtgcatcaaaaagacaagcgtgtgccacctaat

SEQ ID NO: 40399 - DNA, 201 bp, Homo sapiens
gagccggcgttatggtcagctcatcacgcccttcacggttcctacgttccttttgtgtgctgagaggctgctgccgtgagtgtgcagtctgtggaaatgtrgaagaggcaggaaagagaggggactctagaagttccttccattgctcctgtgaaaacacgtgcaacatagaagtcagcaccatcctgtaaaaatagaatg

SEQ ID NO: 40400 - DNA, 201 bp, Homo sapiens
gtgagaatttgtatcctctgtatctgctatcaatagaaaagaacaattcggttctgggcgaagacccaaagggctttttattaataatgcacctacgattygtgaactgtgtttaggttcatcagaggcctctcgtttctttctggactttcaattacgttctgagcatggaaagttggcaaataacttaggcttggatgg

SEQ ID NO: 40401 - DNA, 201 bp, Homo sapiens
atgaggattgatgatcaagagcttaagagcactaattgtttacctagctagttctgtcatttcctgtgaaaaactgtttgggtattctctctctctctctctctctctctctctctctctctctctctctctctctctctccctccccctccttctccctttctctctccccctctttctctttctttctcttccttgctg

SEQ ID NO: 40402 - DNA, 201 bp, Homo sapiens
gtttcaccatgttggccaggctggtctggaacccctgacctcaggtgatctgcccgccttggcctcccaaagtgctgggattacaggcgtgagtagtgtcrcctgtccagtcatggcgcatttgaaccatgtctctcctgctttttgttggtggcatttgttttcccttgaggtttatttatttattgagacgtagtcttg

SEQ ID NO: 40403 - DNA, 201 bp, Homo sapiens
attgatgatcaagagcttaagagcactaattgtttacctagctagttctgtcatttcctgtgaaaaactgtttgggtattctctctctctctctctctctctctctctctctctctctctctctctctctctctccctccccctccttctccctttctctctccccctctttctctttctttctcttccttgctgccctta

SEQ ID NO: 40404 - DNA, 201 bp, Homo sapiens
caggctggtctggaacccctgacctcaggtgatctgcccgccttggcctcccaaagtgctgggattacaggcgtgagtagtgtcgcctgtccagtcatggygcatttgaaccatgtctctcctgctttttgttggtggcatttgttttcccttgaggtttatttatttattgagacgtagtcttgctctgtcacccaggct

SEQ ID NO: 40405 - DNA, 201 bp, Homo sapiens
ctctctctgtaactgacaatcttctataaattaactcatttaattactgcacaaagctgactcaggtatatttaccgcgcttgtgtggatttactttagcrttagcattcaagggaggactctcttgaaaagagaactgaaattgcaatgagtaaattaacattctgttagaaaaatcattgttttgtctctccctccccc

SEQ ID NO: 40406 - DNA, 201 bp, Homo sapiens
gtttatttatttattgagacgtagtcttgctctgtcacccaggctggagtgcagtggcacgatctcaccacagtacaatttccacctcccaggttcaagtrgttctcctgcctcagtctccacagtagctgggaccacaggcgtgcgtcaccatgcccagctaatttttgtatttttagtagagacagggtttcatcatgt

SEQ ID NO: 40407 - DNA, 201 bp, Homo sapiens
cataaatacctgtcttttgtgtcgattaatcaggtgaggaaaagccactcatcttaagcctcactgcaatttctgagcaataggaaaagaacttctgtttyaattttgggaaataacttatttggtgcatttcactttgaaagagaggtgtgtgtgtgtgtgtgtgtgtgtggcagtacaattgtgtgtgtgtccatgaga

SEQ ID NO: 40408 - DNA, 201 bp, Homo sapiens
aattttgggaaataacttatttggtgcatttcactttgaaagagaggtgtgtgtgtgtgtgtgtgtgtgtggcagtacaattgtgtgtgtgtccatgagaktgtgtatctatgagtgtgtatctgtgagaatgtgagtgtgtgtgtctataagagtctgtgtgtgtgtctttaagtgtgtacgtatgtgtgtgtttaattg

SEQ ID NO: 40409 - DNA, 201 bp, Homo sapiens
tatctgtgagaatgtgagtgtgtgtgtctataagagtctgtgtgtgtgtctttaagtgtgtacgtatgtgtgtgtttaattggttcttcatatatttaggrtcagtcacacacacactgatccttggctcagattttcaggtggactggatggcattaattcacctcgtagtcatgaaactggtttaagaggagagtgtcc

SEQ ID NO: 40410 - DNA, 201 bp, Homo sapiens
ccccatgttaggaaaagccttccgactaacatcactcttggaagtgcatcaaaaagacaagcgtgtgccacctaattcctactctgtgaagcatttgtgcrtttttgcccttagggtacacactgagagtctgtcacagagcagctaaaattgggcagaaggctgtgcctggagatgttttaaaactgggatcagcaacac

SEQ ID NO: 40411 - DNA, 201 bp, Homo sapiens
cggtaagagtatgtttagttctgtgagaaacctccaaactgtcttccaaaatgactgtaccattttgcatttccatcagcactgaatgagagttcctgtcrctccatatccttgccagcatttggtgttgtcagtgtttgcatttttgccatcctaattgatgtgtaataatgtcaccttgttttaatttgcaagtctcta

SEQ ID NO: 40412 - DNA, 201 bp, Homo sapiens
tattttagtggttattactaatagttgtataactcctcactcagccgtttctgatgtatgtgctttgggttgcctctgtttgatagaccacgttcacatgmacacacacacacacacacacacacacacagaggcatgtacaacttcttagttttatcagtacatgaattcctctcttgattaccactgcagttttttttt

SEQ ID NO: 40413 - DNA, 201 bp, Homo sapiens
agatgtttttcccatctgttaatctggttgttcattttcatattgttgagttttaacagttctttgtatatttggggtagtagtcctttatcagatatgtyttttgcaaatattttctcccattctgtagattgtcttctcattcttttaacagtgtcttttacagaagtctttaatttcagtgaagttcagcttatcagt

SEQ ID NO: 40414 - DNA, 201 bp, Homo sapiens
cctgccctatgaaggtggctcctgcgccttttggattgtgggttaactttactttggggagagcatccaattgcactttcagagtgggaaaatatttttcsttttgcaacatcttaacaaacctacatagaatttgcttaggaagaagagaagtctaatggaaaatcaattaactattttagtaattttctacacgatacc

SEQ ID NO: 40415 - DNA, 201 bp, Homo sapiens
atctgtatgaaatgtccaaaacaggcaagtccataaatacaggagtagattagtggattctgaggactaaggatgggggaaatgcggagtgactgctaacrggtacagggcttcttcttccgggagatgaaaatgttctgaaattagtgatgacagttgcacaactctgtgaataaactgaaatctgtacacataaaaaga

SEQ ID NO: 40416 - DNA, 201 bp, Homo sapiens
aaagtgcaggcttgagccactgtgccccattcatgttttatcttaattcttcagtctgtcttaaatctagtgtgatgagtattatgtccagctgattgaayagtttttttcttcccaggggtgagtttaacttggacaccaggacttcaaattctcactggcaaatcagctcccaaggcctcccggggaccaagccacctt

SEQ ID NO: 40417 - DNA, 201 bp, Homo sapiens
atgaccctgatgaggtccatctgtgtgtctgctagatcctatcctgagaatttctcgttttatgcccagaagtggatggctatcagagggcagtgttcacyggaagggcagtaggaaagtctacctttcctgtggacaggaggcttgcacagtctcccaactagatctttctttctggaatatgggaaatagaaaatagca

SEQ ID NO: 40418 - DNA, 201 bp, Homo sapiens
aaacataatgcctagaaaacgtttgaaattatggagaagttaaaaaaagaaatgaagtcacttataaccacatttctcagaacagaattcacatttctctrtgctatatataatatctattttaaaaaataatatgtggatctactgttttgtaaccttttttcctttataatgaataatttcccaagttattaaaattta

SEQ ID NO: 40419 - DNA, 201 bp, Homo sapiens
tgggaaatagaaaatagcaggaagcaacatgttgctttgcttttccatgcactgttgtaatctttttttaaaatgcctttagttgcatttctatagaaaawttttaaaattaattaaaatttggatgaaatgaaagtgattttcagcagtctctaattagaaccaagaaaagtctatcttaactttttccagtggaagtta

SEQ ID NO: 40420 - DNA, 201 bp, Homo sapiens
tctcacctactcgcgaggctgagttgggaggatcacttgagtctgggaagttgaggctgcagtgagtcgagatcgtgcctctacactccagcctgggtgayagaatgagaccctgtctcaaaaagaaagggaggggggagaaaagaaaagaaagggaaggggaaggcaggggaggggaggggatgtgattatgctactcag

SEQ ID NO: 40421 - DNA, 201 bp, Homo sapiens
ttcttcatctggaatttactttgatgcacatgatatcttcagctttgttctcttttctttcaaagatcctggaagttttaacttcgcgccccgcctgttcrtcctcagcagctcctctggggattttgcagccacagagtttgtgtaccctgcccgagccccctctgtggtcagttccatgcccttcctgcaggaagatct

SEQ ID NO: 40422 - DNA, 201 bp, Homo sapiens
ttaggcactgctggaaacacaatcagatagttacagccattgacaaattccgtgacagggtggaggagaagcggctgtgagttcatgcttgtagcttgccratggccctgtggggttcacactcctagtctatacttctgtaaatgatttccataatagaagcttagaatactttgttaaatcaaacaaaagttagaaaca

SEQ ID NO: 40423 - DNA, 201 bp, Homo sapiens
tcttcagctttgttctcttttctttcaaagatcctggaagttttaacttcgcgccccgcctgttcatcctcagcagctcctctggggattttgcagccacrgagtttgtgtaccctgcccgagccccctctgtggtcagttccatgcccttcctgcaggaagatctgtacagcgcgccccagccaggtaaggcctgcaggg

SEQ ID NO: 40424 - DNA, 201 bp, Homo sapiens
tgagcatgtcttagctttgccttgataactctgtcatttttatgggcatcaaatattcagcttgaccttagaagaggatgatgcgtcctagggtgtgtccrtgtgtgtgtgtgtgtgtgtgtgtgtgtgtgtctgcacactcttattcatttggcatctgcctcccctactaggaaacagtttccaagaaagcaggaactt

SEQ ID NO: 40425 - DNA, 201 bp, Homo sapiens
agagtctcactctgtcacctaggctggagtgcagtggcctgataagctcactgaagcctcaacctcccaaggtcaagtgatcctcccacctcagcctcccragtacctgggactatgagcgcgtgccaccatgcctggctattaaatagatttgctaaaaacagcaacaacatgtatgtcatctctgccccgcctcacgga

SEQ ID NO: 40426 - DNA, 201 bp, Homo sapiens
tgtgctctaagataggggcctctcaaggttctaccccagtacagggagcggctgctctcagcagggagcgctagagtcaaagctgcaccttgaatgagtayggttcttactctggagatgcaagaaaactttctatctaagttatcttaatgtagataattttaaatacgttgcatatttatttcatattaaacagtatgt

SEQ ID NO: 40427 - DNA, 201 bp, Homo sapiens
ccataaagcctggcaggtggtgatgaaaccaattttttcccctttaactttttgagatgtattaagttttagattagcgcattctcagctgccagcatgamgaagaactagtttttctctctgatattatgaggctaacttgttaccctcaaggataaaggctgtattgtggaatgccccaggcagattaaaaccctgctg

SEQ ID NO: 40428 - DNA, 201 bp, Homo sapiens
ttactctggagatgcaagaaaactttctatctaagttatcttaatgtagataattttaaatacgttgcatatttatttcatattaaacagtatgttgagtkcacgtgactcagcttttccctaatcactcagtcattgttgtcatcaaatattcaacttgaccttaggagaggagaatgcacgcagggctgctcttcccac

SEQ ID NO: 40429 - DNA, 201 bp, Homo sapiens
atattaaacagtatgttgagtgcacgtgactcagcttttccctaatcactcagtcattgttgtcatcaaatattcaacttgaccttaggagaggagaatgmacgcagggctgctcttcccaccacagtccctggctctgaggagctgtgctgctgctttttattttttttatttaattgtattttatttttggagatggag

SEQ ID NO: 40430 - DNA, 201 bp, Homo sapiens
tgtgtgtctgatgtaggggccataaccgtgtgtgtgtgccttgagaaaacttaagatctacttcttggcaaattttaaatatataatacattgttagcaaytatagtcaccatgctataccttaggtttccagaacttactcgtaactacaagtttgcatcctttgaccaatgtctttccaatttctcctacctccagccc

SEQ ID NO: 40431 - DNA, 201 bp, Homo sapiens
aaaaaatagctgtgacttgcaacatttcttattgaacgtactttgccttttcatctccacctatgtggtctgtttcaaattaccttatgcagtgatgtaaygcaacattttatttgcacgcttgtccaaaatattaccactaaccaaaattcacagagcatctcacagtgcacgcaggaggagaattagactaaaatgagg

SEQ ID NO: 40432 - DNA, 201 bp, Homo sapiens
ttaaacagtatgttgagtgcacgtgactcagcttttccctaatcactcagtcattgttgtcatcaaatattcaacttgaccttaggagaggagaatgcacrcagggctgctcttcccaccacagtccctggctctgaggagctgtgctgctgctttttattttttttatttaattgtattttatttttggagatggagttt

SEQ ID NO: 40433 - DNA, 201 bp, Homo sapiens
acacacccagtgcaagcatgcacacacacacactcgcacacacactggatacagttttgtaggttctttgtgtcccgaaaacataaaatgttcatttctgyattttgaattatggatttgaagatccatgctgtgcaatctcagcatcactaataacgcttgagttgaatgctccaagctcacttcacaaggcagctctcg

SEQ ID NO: 40434 - DNA, 201 bp, Homo sapiens
tgcagggccagagggtgtattaggatcaagaagaggccagacccccaggtcgtggacctcctcctgccatgggcccacagcccatgtggttttgtgaggtmgcttgaaaacctggttaacctggaatgtaatttttaaacatgattgtactttgaggaaagaggctgttatttcttgttagagggatctggtcatcttttc

SEQ ID NO: 40435 - DNA, 201 bp, Homo sapiens
agacatgtatgcagccaacaaacatatgaaaaaaagcttgacattactgatctgacatgcaaattaaaaccacaatgagataccatctcacaccagtcagmatggtgattattaaaaagtcaagaaacaacagatgctggagaggatgtggagaaataggaatgcttttacactgttggtgggaatgtaaattacttcaac

SEQ ID NO: 40436 - DNA, 201 bp, Homo sapiens
ggaaatactttgtggagtccaagacccccaggtcatccaggggtggtggtgtcacagactgggaccgcggctctgcttccatccgcagattgacgtcttcygtggccgagcacaagcgggcagttaggcccaagcgccgggttcaggcctccaaaaaccccctgaaaatgctggcggcaagagaagatctccttcaggaat

SEQ ID NO: 40437 - DNA, 201 bp, Homo sapiens
tgcatggccacagccttgtcctgttctgcacttgcttttatttatttacctccaaagcaaaacacatccagcaaggggaaggagtgctcgagtttcagtcrtcaggatggtaagaagtccttcattatcatcttcctgggcatgaaacgattttaaaacaactgatatacctctccctttctttttttgagatggagtttc

SEQ ID NO: 40438 - DNA, 201 bp, Homo sapiens
tgagatcatgtcctttgcagggacatggatgaagccagaagccatcgtcctcagcaaacttatgcaggaacagaaaaccaaacaccacatgttctcactcrtaagtaggagttgaacaaggagaacacatggacatagggaggggaacatgacacactggggcctttcgggggttgcgggtcaaggggagggaaagcatta

SEQ ID NO: 40439 - DNA, 201 bp, Homo sapiens
taagagggaacgttaaataatgaacccagagaaactttaaaaacagcagagaaaaattatgaaaatggaggaataatcctgcatctgtttcaaggttagarttttgtttttgcttttacagaaactaagctctctcttttttctctattaaaaataaatgcctagatcctttcacattgcaccctcgcttacatggggccc

SEQ ID NO: 40440 - DNA, 201 bp, Homo sapiens
cctgattcctccactctaagcttggccgaaaagttggccttgtttaacaaattgtcccagccagtctcaaaagcgatttctacccggaacagaatagacaygagacagaggagaatgaacgctcgctatcaaactcagccagtcacactgggagaggtggagcaggtgggtgtgctatagtccgattgcagtttgtgtgtg

SEQ ID NO: 40441 - DNA, 201 bp, Homo sapiens
tattgcaaagccacttgaaagctgcagtttacaaatgtacatgattgataggtctatagattttcatagaaggcctgacttcataagaatttataatcatsaataaaaacatttgcattctctttcttcccccaaatcattctggcagtgaacacttcacctgcccaggccttttatggaagagtgtatgtaatacctctg

SEQ ID NO: 40442 - DNA, 201 bp, Homo sapiens
gaatcatttgaacccgggaggtggagtttgcagtgagctgagatcgtgccattgtactccagcctgggtgagactccgtctcaaaaaaataaaaataaaargcagggataatacctcacttcccctgcttaaccctagcatcaagagtagatgaatacacaagttgaattggattaggtgactatatatcaaaaacaattc

SEQ ID NO: 40443 - DNA, 201 bp, Homo sapiens
aacagcagagaaaaattatgaaaatggaggaataatcctgcatctgtttcaaggttagaattttgtttttgcttttacagaaactaagctctctctttttyctctattaaaaataaatgcctagatcctttcacattgcaccctcgcttacatggggccccttcacatttttgaactgtcttggacgagagcctaagatcc

SEQ ID NO: 40444 - DNA, 201 bp, Homo sapiens
tgatggggccacagactacatggccaagagcaggcagagcagctactgtttccctagggccacgtgtggaatgagtcacttcatcagctcaccacaactgstggcctggcacctgggtcctacggagagggcaatggcaggtaaagtgccatcacagaaccaccaggcaccgaagaccgcgttgcctgcttggacgatatg

SEQ ID NO: 40445 - DNA, 201 bp, Homo sapiens
tacgcatccgcagggagtcacaatccatttgaaaatatttcttctctgggactgaaaatctcctaaaacgtgtattcttcagcaaacaaagtatctcataraatgtaaacgtggatgactgggggaatacaattttttttgcgcataatgacttctgtcagtcctctaagaaattcaaagaattttcacggcttccagttt

SEQ ID NO: 40446 - DNA, 201 bp, Homo sapiens
aaaaataaatgcctagatcctttcacattgcaccctcgcttacatggggccccttcacatttttgaactgtcttggacgagagcctaagatccaagatgcrttctttttttttacagcaaagtgaaaggaaataagactcattcatttaacgaatatttgtgaggcagcctgtgaagttgccttagaatctgggccaggta

SEQ ID NO: 40447 - DNA, 201 bp, Homo sapiens
tgaagaaaagcggggaggaagattggagaaacagactcagcaggaggcaggagggcggcaaggcgccggccagcagcctgcacacccaggaagcagggcgrtccctcatcaagaaggtaacattccccatgttaggaaaagccttccgactaacatcactcttggaagtgcatcaaaaagacaagcgtgtgccacctaatt

SEQ ID NO: 40448 - DNA, 201 bp, Homo sapiens
agtagtttggaaacattgtgctcctctacctttcaatatttgactttatttcctaaagtcaaagatatttcctcgcataaccacaatatggtggccaagakgaggaagttaatgttgatacaatatttatctgatccacgtccatcttaaaattgtcagtttcctccaataatgccctttgtagcccccaccccatctagg

SEQ ID NO: 40449 - DNA, 201 bp, Homo sapiens
ttggcgctttctagagctttcactaaaatcaaatgcatttaaacaccctccctcctcaagaggacaggattagcccgcctccccaggagaacagtgctctsctgcctgcgtcagcaagctccttacacagtggtctcctgcctgtgtcagcgagctccttacaacagtctctgtgcacgtcccatcactttatcatggatt

SEQ ID NO: 40450 - DNA, 201 bp, Homo sapiens
tgtggatttttttttctttgaatatttttttcttattttgatggaacatttattcaaaatgtagcacctcctctgtcctttatgaagttatagtatgggasagttcattgtgacacacttttaaagctctttacttttttttttttttttttttttggagatggagtctcgctctattacccaggctggagtgcagtggtg

SEQ ID NO: 40451 - DNA, 201 bp, Homo sapiens
tcaaagatatttcctcgcataaccacaatatggtggccaagaggaggaagttaatgttgatacaatatttatctgatccacgtccatcttaaaattgtcartttcctccaataatgccctttgtagcccccaccccatctaggattcaagccaggatcatgcatcgcgtttggttgtcatatctctttaggaaaaggtttt

SEQ ID NO: 40452 - DNA, 201 bp, Homo sapiens
ccaccccatctaggattcaagccaggatcatgcatcgcgtttggttgtcatatctctttaggaaaaggtttttaacctaatttaagttggcagggacctcraaatcacttctggctatgaaggctttatagaagaatcctgtgaaagacagattcatcacttagatgatggagaagtccacgttcatagcttaaaccaaat

SEQ ID NO: 40453 - DNA, 201 bp, Homo sapiens
ctggaaaggaagggaaggcgcctttcctctgtcaactcccatcattccaggggttaagaaaatgaactgtccccatctccactctcttcctgtccctcctsaatcaggaagttctctctcgtgggtcagtgaagggaagtggtttgccatagtgaggaggaaaggcatcggggaagagaatctctaggatggacttgactc

SEQ ID NO: 40454 - DNA, 201 bp, Homo sapiens
tcctttatgaagttatagtatgggacagttcattgtgacacacttttaaagctctttacttttttttttttttttttttttggagatggagtctcgctctrttacccaggctggagtgcagtggtgtgacctcagctcactgcaatctccacctcccgggttcaagtgattctcctgcctcagcctcccgagtacctggga

SEQ ID NO: 40455 - DNA, 201 bp, Homo sapiens
actctgccggccagcgtttgaggacctcctgccctggtatcgcccgcgaccaccacctacactcttctccccaatacacatcactcagtggcatgagcccygtcctctgcttccatcgctgctcctgtccctccctcctcagccccatctccccatcccaggcctgtcctgagcccctcctcctttcctgatgccctttga

SEQ ID NO: 40456 - DNA, 201 bp, Homo sapiens
tccttgtgtgctcacatggataaagttttctagatcaatcatgttctttgtgagtatatagggataaaaatctcccagttaactgagtttaactagatggkttaagacagagaaactttaaaaccctgtagagtccagggcatgaaaacaatctatttttaattgtttgtgcttacaaaggattgttctggtgctccagtg

SEQ ID NO: 40457 - DNA, 201 bp, Homo sapiens
ggctttttttttctttttcaaatcatatttctggaaaatcttggaagggagtttgtgctttgtggccagtccagggtgggtgtaagtcatgaatgattggycatattaagactgtgctagacccttttgatcaaaagccccgctagggatgctttctacttatgatcctctgtccatgagaatataccagagagtaggtat

SEQ ID NO: 40458 - DNA, 201 bp, Homo sapiens
ctgtgcccagcccccataattacttttttccttttttttttttttttttttttttttttggtggaggggacagaatctcgctctgtctcccaggctggagwgcagtggcacaatctcaggtcactgcaacctctgcctcccaggttcaagcaattttcctgcctcagactcccgagtagctgggatcacaggcgcgcgcca

SEQ ID NO: 40459 - DNA, 201 bp, Homo sapiens
ttgcagttggttgtcccacagtcgtggtacgtgtgaaatgtgtgtgtgtgtgcctgcatgtgtgtaaattcttatatgttgtgccgtctaccctgggattyctggagatccaccagggtcccggagatttccagaagtgaccctgagatgctcagtagctcgtctgtgtgttccgcaggtttggcgtcacctactgccata

SEQ ID NO: 40460 - DNA, 201 bp, Homo sapiens
ttgtcccacagtcgtggtacgtgtgaaatgtgtgtgtgtgtgcctgcatgtgtgtaaattcttatatgttgtgccgtctaccctgggatttctggagatcsaccagggtcccggagatttccagaagtgaccctgagatgctcagtagctcgtctgtgtgttccgcaggtttggcgtcacctactgccataaccccagtag

SEQ ID NO: 40461 - DNA, 201 bp, Homo sapiens
tgtcccacagtcgtggtacgtgtgaaatgtgtgtgtgtgtgcctgcatgtgtgtaaattcttatatgttgtgccgtctaccctgggatttctggagatccrccagggtcccggagatttccagaagtgaccctgagatgctcagtagctcgtctgtgtgttccgcaggtttggcgtcacctactgccataaccccagtagc

SEQ ID NO: 40462 - DNA, 201 bp, Homo sapiens
ggtgagttgaatcatgctgaggactatatatgtacataaaagctgcgaactcttcattctgtttgctaagaacctgttgcttggcattgcttgtctctcartgtccatgtgacgcacaaccaaaccctcatgtttcagatgttaaccttgtgtagaggagacacaaacgaaatctgatgaattagtatgttcagaaaactg

SEQ ID NO: 40463 - DNA, 201 bp, Homo sapiens
gcgttttgttaggttcaagaagtatagactcaggttgattataggtcactatggtagtcacaggcatgaaactaacatcttatataaacattatccatgtrttgttatgaactactggtaacttgcattttaagcatgaagtcatgagttctggcaaagaagaaaagatttcaagggaaatcagagaaagacagggtctcc

SEQ ID NO: 40464 - DNA, 201 bp, Homo sapiens
gaaggggctgacttcagcttggtgtctgccgcagccggaacgagatgtttctgttcactgcaactgtggtttcgtgaaaccagaaggctctagggattacragctctatggctgctgcatgcagtctaagttcaggagttaccaaattgccaggggttcagtccagggcttattgctcactacacagaagaaagccaatca

SEQ ID NO: 40465 - DNA, 201 bp, Homo sapiens
taatcactcagtcattgttgtcatcaaatattcaacttgaccttaggagaggagaatgcacgcagggctgctcttcccaccacagtccctggctctgaggmgctgtgctgctgctttttattttttttatttaattgtattttatttttggagatggagttttgctcttgtcgcccaggctggagtgcgatggcaagatct

SEQ ID NO: 40466 - DNA, 201 bp, Homo sapiens
gagttttgctcttgtcgcccaggctggagtgcgatggcaagatcttggctcactgcagcctccacctcccaggtttaagcgattctcctgcctcagcctcyggagtagctgggattacaggtgcccgccaccataccgggctaatttttttgtatttttagtacagatgaggtttcaccatgttggcgaggctggtctcga

SEQ ID NO: 40467 - DNA, 201 bp, Homo sapiens
tttagtacagatgaggtttcaccatgttggcgaggctggtctcgaactcctgacctcaggtgatccgcctgcctcggccacccaaagtgctgtgattacargcgtgagccactgtgcccggccatgctgctgctttttatagccagtgttttctagtttctagctcagagacagctgttgatctcattttatgatgttatc

SEQ ID NO: 40468 - DNA, 201 bp, Homo sapiens
aaagttgtctccacagctcactcatgctttgttcattttttttaaactttcttttctgtttttcattttggatatttctattgctatgtcttcaagttcartagtcttttcttctgaaatgtctacctgctattaatcctatccagtctactgtgcatctcgcacattgtagatattatttctagaaatttgatttgtgtt

SEQ ID NO: 40469 - DNA, 201 bp, Homo sapiens
aatgcctagttctgtaagtatatcacacactaggacacaggtatgtgtgagaaccccgcattatgaagatcagccattagaaaaccactgtgtaaaaggayccactcaagataagagcagctgccatttggagaaattgaaaaaggtatgaaatcagaaagtcagatcacagaagagaatatatgtttacttccaaattta

SEQ ID NO: 40470 - DNA, 201 bp, Homo sapiens
tctgtttttcattttggatatttctattgctatgtcttcaagttcaatagtcttttcttctgaaatgtctacctgctattaatcctatccagtctactgtkcatctcgcacattgtagatattatttctagaaatttgatttgtgtttttatatattcatatctctgcctaaaatcttgaatatttgtccttgtctgctaa

SEQ ID NO: 40471 - DNA, 201 bp, Homo sapiens
agaaccccgcattatgaagatcagccattagaaaaccactgtgtaaaaggatccactcaagataagagcagctgccatttggagaaattgaaaaaggtatraaatcagaaagtcagatcacagaagagaatatatgtttacttccaaatttaaattttaaaagtgtgatggctatattaaaagtgcaatttacttaactgt

SEQ ID NO: 40472 - DNA, 201 bp, Homo sapiens
taaattttaaaagtgtgatggctatattaaaagtgcaatttacttaactgtcctgcttaaagctttggggtaattgtctaggtggatcttaagtgtatttytcagttcaaacaagcaatagtttcccaggtgaattgagaagggatcagaacctaaggtcagggagattcattctgaaaaaaaagattcatatgtgggaaa

SEQ ID NO: 40473 - DNA, 201 bp, Homo sapiens
attctgaaaaaaaagattcatatgtgggaaacacccctatttttttcccactgggacacaggggtgcacacctggtcatctctaagtggcagtaacacatmtgaagcagacccttgtggtactgaaatgtattaacccaaagacctgtcaccacatactcgagcatccagactgaaatacttagagagatcagcttccaac

SEQ ID NO: 40474 - DNA, 201 bp, Homo sapiens
aagtgtaatctctattgaaaacttggagtccaccagcaagtagactgtatattttggagtgtccaccaaaagctcatagtcactgtcacctcgtaaggatscttccaatgaatctccaaaaagtagtttacatctgcatccttggtggagattttcttaagtagacagaatttctctttttttttctttctttcttttttt

SEQ ID NO: 40475 - DNA, 201 bp, Homo sapiens
gactgtaagtgcttcatggctttatgtttttgtttgtttgtttgttttttgagacagagtctcactgtgtcacccaggctggagtgcagtggcacaatctsggctcactgcaacctctgcctcccaggttcaagcgattcttgtgcctcagcctcccgctggctaatttttgtatttttagtagagatggggtttcaccgt

SEQ ID NO: 40476 - DNA, 201 bp, Homo sapiens
tgccagagtggcatattttgaaatggtatattccagaccctgcttcatgctttacataaaaaatatcagtgcagtacaataaatcctaatatcagattacygtgttttcagtgtgacattttgtttattggaatctgtcttgtatgtcagtttattgtatattttacttgattttggactaacttgcatgtattatatatc

SEQ ID NO: 40477 - DNA, 201 bp, Homo sapiens
cagtgcagtacaataaatcctaatatcagattactgtgttttcagtgtgacattttgtttattggaatctgtcttgtatgtcagtttattgtatattttayttgattttggactaacttgcatgtattatatatcacaattgcccgaacctcagaacgagtttacacgcttttgtcttaaaaatggaaatacaggctgggt

SEQ ID NO: 40478 - DNA, 201 bp, Homo sapiens
tgtttaaatttgcttggctgaaataaatgtgaggaagtcagtgtgggagtttatggcaaactctgaattattctgaaaatagtatatttcaaagaggcagrtatctctaaacaaatctgaacaggatttggaaaacatttttgtacttaaatttgatattatgcctgatatttaggacttctaaccattactgcccaatgc

SEQ ID NO: 40479 - DNA, 201 bp, Homo sapiens
gtcccacagtcgtggtacgtgtgaaatgtgtgtgtgtgtgcctgcatgtgtgtaaattcttatatgttgtgccgtctaccctgggatttctggagatccaycagggtcccggagatttccagaagtgaccctgagatgctcagtagctcgtctgtgtgttccgcaggtttggcgtcacctactgccataaccccagtagcc

SEQ ID NO: 40480 - DNA, 201 bp, Homo sapiens
cacagtcgtggtacgtgtgaaatgtgtgtgtgtgtgcctgcatgtgtgtaaattcttatatgttgtgccgtctaccctgggatttctggagatccaccagsgtcccggagatttccagaagtgaccctgagatgctcagtagctcgtctgtgtgttccgcaggtttggcgtcacctactgccataaccccagtagcctcac

SEQ ID NO: 40481 - DNA, 201 bp, Homo sapiens
ggtcccggagatttccagaagtgaccctgagatgctcagtagctcgtctgtgtgttccgcaggtttggcgtcacctactgccataaccccagtagcctcasccatttgcggtaaaacaagaggcaccacacccgtttccaaacccctggaaggtaagtcgccaaggccccggccacgccaagcctgatcagaagaggcctt

SEQ ID NO: 40482 - DNA, 201 bp, Homo sapiens
ctgccttcacggagcttacagtggcggatacatttgtaaataaacaagcataggtgttgtgatggaagcacattctagatgtcatggagacatgaggggaygccatgatggcggtgctgccactggtagcatcatctgttgactgtccactgtttgccaggccctgtgctgagggctttgagggcttgacatgctgttctt

SEQ ID NO: 40483 - DNA, 201 bp, Homo sapiens
ctcatgatgtcctcttcttgtgttttctgggtgcagagctccagagctgtttctttgaaatacaagttatctgttgaacttaagcatatttggcagagcamcctgggaggacagcactgcccccaaactctgagtctcacaaggagggaggtcctttatcagcgtgcaagtgattcccctataattccacccaacccacca

SEQ ID NO: 40484 - DNA, 201 bp, Homo sapiens
ttggcttactttcaacataattaaacatttggattgcagtagctgagtatttcagtgagttagtggttttgtaggcctcatctgtgtagacagacagctastggatcctttctgccttctttccttggtgatgagcaggtgcatacttagcatgaggagaaaaagccccatattcctctgttttttctttttttgagacag

SEQ ID NO: 40485 - DNA, 201 bp, Homo sapiens
aacttattgtgtgttccttgctatgcaacctcctgtctctcaagcttccccaaatcccatgacataggaagtattctgcccaccagggcttccagaggcargaacgtgtctggagtcccagcagctactgggtggcagagctggatttgaacccaggtccccccactccagaatcccagcttttactcctggcgccccgtg

SEQ ID NO: 40486 - DNA, 201 bp, Homo sapiens
tatttaaaaagactagtgacaagctcaaataaccaatctctgtcctgagtcctaacccagagactacatgatctgtttaattgtggaaagctcaaaatcamtaaataggagaaggtgttgaaagccacagaaggtggtggctccgtccttcctgttgagaggcccctagggttcatagtggaaactccccaggggaagagc

SEQ ID NO: 40487 - DNA, 201 bp, Homo sapiens
ctcatggatgacaaacttgttcctgatgacgactactgggggaaaattccgaagtgctcccttctgcaacccaaagaggtacagtccgtgggctctgcccktcagtgagaaaccacattgaaagcactcagcacaggctgcccaatagattagagagtaagttcccaataaaggttagccagtgtcggtatccattgtaga

SEQ ID NO: 40488 - DNA, 201 bp, Homo sapiens
gcctttcaagaccgccgtgcattttccataggtgcttatgtttggttcctaaagtcccataagagcatgaggtagaagtgtctgtgctctatgatttatcyggcagctttctttgaatcaggcagcctttctgatgtgcctcagctgtgacatcagcagctgtggtcttgaccaagcaggaagtgactgaggcagtagcac

SEQ ID NO: 40489 - DNA, 201 bp, Homo sapiens
ggtgcttatgtttggttcctaaagtcccataagagcatgaggtagaagtgtctgtgctctatgatttatccggcagctttctttgaatcaggcagcctttytgatgtgcctcagctgtgacatcagcagctgtggtcttgaccaagcaggaagtgactgaggcagtagcacagcagggcacgagcagcaaggggggttgct

SEQ ID NO: 40490 - DNA, 201 bp, Homo sapiens
tgtgtgtgtgtgtatttttagcacagttgggagatgacatctgagatgctgctggctcagctctgctggtgtctcttttgagcatggagcggtgtcctcgktgtcttcttttcattgcttatatctgctgcttgctgttcagggaaagcacaaattcactttctcctcttgttaaaaaaatagtttggcgggcgtggtggc

SEQ ID NO: 40491 - DNA, 201 bp, Homo sapiens
tggtttaaaagaaatggggaatctaatttcagattgccacatgatgagagctgttgaagtcgttatcacggtatctgagttagtcacctagatcacatatratagattctcaaatagattttaaatcagttataatagtaattaagactttgttgagcatcccaagtaaagacaggatacttcatatttcgtatgagttaa

SEQ ID NO: 40492 - DNA, 201 bp, Homo sapiens
ggagtgcagtggcacaatctcggctcactgcaacctctgcctcccaggttcaagcgattcttgtgcctcagcctcccgctggctaatttttgtatttttartagagatggggtttcaccgtattggccaggctggtctcgaactcctgacctcgtgatccacctgcctcagcttcccaaagtgctaggattacaggcggaa

SEQ ID NO: 40493 - DNA, 201 bp, Homo sapiens
atacctgggacatatttacataaagagggatggaaaatgtgtgacaaatttgacatttaaaaaaattaagatttacattgtaatgacagcagtgattcagsttgtaaagattgatttacagtggattaaaattctgcttagatagtctttatctagaaccaggaaattcaactttcagaaagtcattttctgattcctatt

SEQ ID NO: 40494 - DNA, 201 bp, Homo sapiens
tgcctcagcctcccgctggctaatttttgtatttttagtagagatggggtttcaccgtattggccaggctggtctcgaactcctgacctcgtgatccaccygcctcagcttcccaaagtgctaggattacaggcggaagccaccgtgcctggccagctttatgtttttaagcccatgtctgcatcattttctgtaacacag

SEQ ID NO: 40495 - DNA, 201 bp, Homo sapiens
catcaaaagaccaccaatagtgtcctaaatattcaaatgtgagcaccatctccaatgctcagtttttgaatgtgctcacgtacattaacacctgtacacayctgtgtatatatacagaataatcattaattcttatacttcactatactgtactcattagcattataggcaaaataacagtctttaggacaatatttacct

SEQ ID NO: 40496 - DNA, 201 bp, Homo sapiens
agacatgctgtcttccgaataaatgaaattcaaaatgttaaaacgaggcggctgtggtcatgtcttggcccaagccgcctctcttacctagattatggttycatcacaaggaagagtttggtgctgaactctttgtggcgggcatgttttcctcctagattggcactgttgaagaaaagcggggaggaagattggagaaac

SEQ ID NO: 40497 - DNA, 201 bp, Homo sapiens
ctccaatgctcagtttttgaatgtgctcacgtacattaacacctgtacacatctgtgtatatatacagaataatcattaattcttatacttcactatactrtactcattagcattataggcaaaataacagtctttaggacaatatttacctgaataatacatttattttacaattctttagtattcagtttatatgataa

SEQ ID NO: 40498 - DNA, 201 bp, Homo sapiens
tcagtttttgaatgtgctcacgtacattaacacctgtacacatctgtgtatatatacagaataatcattaattcttatacttcactatactgtactcattagcattataggcaaaataacagtctttaggacaatatttacctgaataatacatttattttacaattctttagtattcagtttatatgataaagaagattt

SEQ ID NO: 40499 - DNA, 201 bp, Homo sapiens
gcctcagccactaagaaaggaaggggcttgtgctgggcacttggagtttatttctgattgcatttgctcatctcctgatgagagattttagtctaaaaacygtctccagagcctcaagctctcttggctcagtggtctgtttccatgcactgagagaggtgtctgcaggagagcatcgtgcttgaccttccacgctctcgt

SEQ ID NO: 40500 - DNA, 201 bp, Homo sapiens
ttcttattgtcaagtgacaattcttattctttttttttttttttttttttttttagaaaaggtctcactctgttgcccaggctggagtgcagcagtagcayaatctcactgcagccttgacttcctgggctcgagcgttcctcctgcctcagccttctgagtagttgggacttaacagatgcacgccactatgcctggcta

SEQ ID NO: 40501 - DNA, 201 bp, Homo sapiens
gtttgaaatagccaatctgcaaactgtttatcagcacacaactatgagacactcgcacccaaatgcaaattgtgtttggtttccttcattgagaaaatcawgctgtgaagaaaacgtcagctgaactacacagcaggcttagcgatgttgttaatttcccttctggtgacagccttttgtctaatcatgcagagggacacc

SEQ ID NO: 40502 - DNA, 201 bp, Homo sapiens
ccggaacagaatagacacgagacagaggagaatgaacgctcgctatcaaactcagccagtcacactgggagaggtggagcaggtgggtgtgctatagtccrattgcagtttgtgtgtgtgtgttcttaaattatagcactgcagtattcctctgaggtcaatgatgtaattaaggtgctctaccaggaaactgctacctgt

SEQ ID NO: 40503 - DNA, 201 bp, Homo sapiens
ggagggaggtcacagtgtcacaggatccttagggtgtcgctttaccagctggaaacctctgttgctggtggcacctctgcctgagttttgctcatgcctgytggacttgttctgtccactcagcccagtaagatgtgctcagcttgtgctaccagcctggatcccatgcctgccaagggcaagccaggcatggagcagcaa

SEQ ID NO: 40504 - DNA, 201 bp, Homo sapiens
atatgccagctccctttgaggctgtggctggaccagatgtgccacaagtggcttccactgtgggcaccagcgtctggatgaggggaatgtggtggtgcccraaagctcagagacaccaggaactgcagagtccccaaataggtgttacagcatgtcacagccatggctcagggagcaccaaggtctgggcttccagaaggg

SEQ ID NO: 40505 - DNA, 201 bp, Homo sapiens
agagagggctgtagcagaaggggcaggtggtagggatgatgttagtgagaccacagatcggggagggccttagaaccaccgcaagggctttggggtttgcsctacttgatatgttgagccctaggagggtttgaacaagaggaatgactcatctgccttacatttcaaagcattatgctggctgctaagcggaagatagac

SEQ ID NO: 40506 - DNA, 201 bp, Homo sapiens
acaagtggcttccactgtgggcaccagcgtctggatgaggggaatgtggtggtgcccgaaagctcagagacaccaggaactgcagagtccccaaataggtrttacagcatgtcacagccatggctcagggagcaccaaggtctgggcttccagaagggctgcagctcttctctacttcttgttacctacagtgtggtgagt

SEQ ID NO: 40507 - DNA, 201 bp, Homo sapiens
aacgctcgctatcaaactcagccagtcacactgggagaggtggagcaggtgggtgtgctatagtccgattgcagtttgtgtgtgtgtgttcttaaattatmgcactgcagtattcctctgaggtcaatgatgtaattaaggtgctctaccaggaaactgctacctgtaggtgatttggtaatagctttcttcctaaaaatg

SEQ ID NO: 40508 - DNA, 201 bp, Homo sapiens
tttagtcttctttcaggcttgaccatttgcatctttaaacattatattgcaaagccacttgaaagctgcagtttacaaatgtacatgattgataggtctayagattttcatagaaggcctgacttcataagaatttataatcatgaataaaaacatttgcattctctttcttcccccaaatcattctggcagtgaacactt

SEQ ID NO: 40509 - DNA, 201 bp, Homo sapiens
cattatattgcaaagccacttgaaagctgcagtttacaaatgtacatgattgataggtctatagattttcatagaaggcctgacttcataagaatttatamtcatgaataaaaacatttgcattctctttcttcccccaaatcattctggcagtgaacacttcacctgcccaggccttttatggaagagtgtatgtaatac

SEQ ID NO: 40510 - DNA, 201 bp, Homo sapiens
aaataggtgttacagcatgtcacagccatggctcagggagcaccaaggtctgggcttccagaagggctgcagctcttctctacttcttgttacctacagtrtggtgagtggggggacatgtttcagcccatttgtgttacagctctttcagtcccaccaccttgctctggcccgtggctcatgggctggaccagccccact

SEQ ID NO: 40511 - DNA, 201 bp, Homo sapiens
tcttccattaggatagcaaaccaaacagaagagggctgtcattaataacgttctacttaataggcacttgatgaacatcttccacatttggtgtaaattcyattcaccctgcgagccacccatatcctgtctatctgaccgttgggaaattgattttgttatttttgcttctccctggaggactgcacaaagttttaagac

SEQ ID NO: 40512 - DNA, 201 bp, Homo sapiens
ctcagcaccagcagagggtgggagggctatagtgttaacagcagctccagctctgaggtctgggcccccagaagggttgccatcctttactcccatagccyaggagcatgtcaccacccacagctcagcgagctggtcaagaacatgttacagctcctttcacttccgccattcagcaggtcctgagttcttgtcctgtgt

SEQ ID NO: 40513 - DNA, 201 bp, Homo sapiens
ggcgggggtaatgttgtgtaggtgggagggggcagtagagagtcccatactcaaagtgactgccaaatccagggctgtgcatagagtgactgctgacagcstttgataagctttgctgtgagtccaaaagaatgatcggatagatgcctgtcttgcagcgcatctacattaatctcataacaaattattcgtctcatatta

SEQ ID NO: 40514 - DNA, 201 bp, Homo sapiens
gacatcagcagctgtggtcttgaccaagcaggaagtgactgaggcagtagcacagcagggcacgagcagcaaggggggttgctctaaggggtggctgcatyccgggccggattcacaaccgaagatggatctggagggatgagagatcgtgcatgttattccagggctacgccctctgcagcacgtgtatcttctcagctc

SEQ ID NO: 40515 - DNA, 201 bp, Homo sapiens
ttctcctcttgttaaaaaaatagtttggcgggcgtggtggctcatgcctataatcccagcatgttaggagaatgaggtggaaggattcttgaggccaggarttcaaggccagcctgggcaacatagtgaggccactgtctctataaggaataggctgggcatggtgacacactcctgtaatatctgcactttgtggggcca

SEQ ID NO: 40516 - DNA, 201 bp, Homo sapiens
cgggccggattcacaaccgaagatggatctggagggatgagagatcgtgcatgttattccagggctacgccctctgcagcacgtgtatcttctcagctctrcctttatctaaaatacctgtgttcttggggacagtgtaaattttgaaatcctaaggccacacaagacctccgggtggagctatgccgttttctttcctat

SEQ ID NO: 40517 - DNA, 201 bp, Homo sapiens
cagctctgcctttatctaaaatacctgtgttcttggggacagtgtaaattttgaaatcctaaggccacacaagacctccgggtggagctatgccgttttckttcctatctctctgtgctctcctgtctgctgccctggccagtggcctagaaataagtgcacaaaaaggcacttcaagatctatgaaagtgtgttcatttt

SEQ ID NO: 40518 - DNA, 201 bp, Homo sapiens
ctaaaaaccgtctccagagcctcaagctctcttggctcagtggtctgtttccatgcactgagagaggtgtctgcaggagagcatcgtgcttgaccttccaygctctcgtgtccactagcaggcaggttttctgacacaggctgcggaattcaggacagtgcatcatggagaaacatacatcttgggggccattctaaagaa

SEQ ID NO: 40519 - DNA, 201 bp, Homo sapiens
ttttgaaatcctaaggccacacaagacctccgggtggagctatgccgttttctttcctatctctctgtgctctcctgtctgctgccctggccagtggcctagaaataagtgcacaaaaaggcacttcaagatctatgaaagtgtgttcattttagtgacgggagaatctccatactctggagagctttgttgtaacatgac

SEQ ID NO: 40520 - DNA, 201 bp, Homo sapiens
tttgaaatcctaaggccacacaagacctccgggtggagctatgccgttttctttcctatctctctgtgctctcctgtctgctgccctggccagtggcctagaaataagtgcacaaaaaggcacttcaagatctatgaaagtgtgttcattttagtgacgggagaatctccatactctggagagctttgttgtaacatgaca

SEQ ID NO: 40521 - DNA, 201 bp, Homo sapiens
gagacagtcaagaggatgttaatttaatgaaatcatgaacttatgcttcttatctcctcctcctcctcctcattcttctctctctctcaacacacgtacayacacacacacacacacacacacacacacacacaccattccatctttagaggtcatcatgcctttgcatgtcatgctttgtgctgtggtggctggagactc

SEQ ID NO: 40522 - DNA, 201 bp, Homo sapiens
ttgaaatcctaaggccacacaagacctccgggtggagctatgccgttttctttcctatctctctgtgctctcctgtctgctgccctggccagtggcctagaaataagtgcacaaaaaggcacttcaagatctatgaaagtgtgttcattttagtgacgggagaatctccatactctggagagctttgttgtaacatgacat

SEQ ID NO: 40523 - DNA, 201 bp, Homo sapiens
caagagatgggagttgatgcttgttctttcctccagcaaaactctccctgcagatgtgccccagccttcttccccaattcttctggggctctgctcaaatkgtagctcctcagagacacagaccactttatctaaaacagaatcccccatcctcttaatctacttccccttccctgctcttatcagctgacattcagtctc

SEQ ID NO: 40524 - DNA, 201 bp, Homo sapiens
  misc_feature (1)...(201): n = A,T,C or G, or insertion/deletion polymorphism (see Tables 1-2)
agatgggagttgatgcttgttctttcctccagcaaaactctccctgcagatgtgccccagccttcttccccaattcttctggggctctgctcaaatggtanctcctcagagacacagaccactttatctaaaacagaatcccccatcctcttaatctacttccccttccctgctcttatcagctgacattcagtctcttag

SEQ ID NO: 40525 - DNA, 201 bp, Homo sapiens
accctgtcatgccctctgctgcgtccgtgcagtggggcactgcagtcatgcgcctttgagagccacctagtaaactacagagatgaaaagaagtaaggccraattcctaacaacctagcattgccgaggccgctggtgttcacctgtagaaattgaacttgcacatcaaggcttctcagctccctctctccctcccctgcc

SEQ ID NO: 40526 - DNA, 201 bp, Homo sapiens
gggttgtggtggcacatgcctgtagtcccagctactcaggaggccgaggcatgagaatcacctgaatccaggaggcagaggttgcagtgagacgagatcayaccactacactccagcctgggcacagagcaagactgtgtctcaaaaaacaaaccaacaaactatttagagtatacatctttaagttatcatagtctacct

SEQ ID NO: 40527 - DNA, 201 bp, Homo sapiens
gaaattgaacttgcacatcaaggcttctcagctccctctctccctcccctgcccctgtccccagagcttttctgggaaagagatgattggcctctaaatgrtatttcccatgtggctgtgtgctgcttcaattaaagtcgttaagtacagcatatcttcgtgatttaaagctggaaccaaatggtgctgtaacattatagt

SEQ ID NO: 40528 - DNA, 201 bp, Homo sapiens
cttctcagctccctctctccctcccctgcccctgtccccagagcttttctgggaaagagatgattggcctctaaatgatatttcccatgtggctgtgtgctgcttcaattaaagtcgttaagtacagcatatcttcgtgatttaaagctggaaccaaatggtgctgtaacattatagtaaatacacgcacagaagattgat

SEQ ID NO: 40529 - DNA, 201 bp, Homo sapiens
agatgttcctcaacttagaatggggtcgcatcccaataaatccatcataagttgaaaatattgcaagtcagaaaaacaaaggaaacattaagtcaaaaatkcacttaatacacccaacctaccttagatatgctcagaacactcacattagcttggatttggacaaaaccatctggccatgcagcacactatggagatggg

SEQ ID NO: 40530 - DNA, 201 bp, Homo sapiens
tgttaagtttaaaggaaattaacatttgccaaaggcatttctgtttcatcacttcaaaattaaaatttcaaaaaattatatacttttacctctgaacaatktttcccagctaaatataaatagtttatatactgagtatgtagcactagctcatctgtgttttcagaggtcaagtcactccttttctttcttccagcaata

SEQ ID NO: 40531 - DNA, 201 bp, Homo sapiens
atatcagcagaatggacctgaattagtacttgtaactcttgtgttggtcacattattcagtgataattttaaaaggaaaatgtgtaatagcaactaaaaaygtgatcccattgacttattttattttatttttatttattttaattatcttctttatttgaaatgtgttgttttacatagatgctatttttatattaggct

SEQ ID NO: 40532 - DNA, 201 bp, Homo sapiens
ggacctgaattagtacttgtaactcttgtgttggtcacattattcagtgataattttaaaaggaaaatgtgtaatagcaactaaaaatgtgatcccattgrcttattttattttatttttatttattttaattatcttctttatttgaaatgtgttgttttacatagatgctatttttatattaggctatttaccaacgtg

SEQ ID NO: 40533 - DNA, 201 bp, Homo sapiens; identical to SEQ ID NO: 6455

SEQ ID NO: 40534 - DNA, 201 bp, Homo sapiens
ataaatagtatcttctttaaactttatatgattcttggaagtatttgaaggtcataaaacagtgatgcataattccatttgtcactatttcaaaacttacmcatttggaattgagtgcaagtgtaggtttcaaaagcagttcaaatctgctaacaaattttggtcttttcccataattacatttatttatttagacggagt

SEQ ID NO: 40535 - DNA, 201 bp, Homo sapiens
aggccttgaagtataaggacccagcttccaggagagagctggagctgcccagctccaagaccgaagggccttatggggagatcagcatgctggacacaaargtctctgtcgcccagctccgaagtgcgttcctggcatctgccaacgcctgcaggagacctgaactgtaggtgatgcttcacacgccctccagctgtgtca

SEQ ID NO: 40536 - DNA, 201 bp, Homo sapiens
aaggatccttagctaggtggggagcacgtttgcatagtgccactgcctgaaccgccagcagggggagccatggcagcggggtttgcccggcaccggccagracacggatggatttctccggttgctttggaaaccagccttcagagtcagtcctgttcattagctgcggagttaacggcctctgtgctaatgaactcctct

SEQ ID NO: 40537 - DNA, 201 bp, Homo sapiens
ggtgtctggaatgtctccttccttacgtgcatggtagaggcatgaagaggggtttggtggtgtctgtcccttgactcacggagatgcataatcctttgccrtcttctctttctctgtcttcgtttgccttccttatactctctgccctttgattctcaaagcaaatcacgggtggagaggtcggctgaaggacctggcttg

SEQ ID NO: 40538 - DNA, 201 bp, Homo sapiens
catcatcaatcaaatatatgtatataatgagacgtacttgtagaatattactaaaacttgagttttaaaccatttaatggttttttttattaaattttttaatgctataatacttctcccattcacaggaggaaggggcagaatcatttattcccttggttttccttgtgatagtgatttgcataacctctcgatgttgtt

SEQ ID NO: 40539 - DNA, 201 bp, Homo sapiens
actcacggagatgcataatcctttgccatcttctctttctctgtcttcgtttgccttccttatactctctgccctttgattctcaaagcaaatcacgggtrgagaggtcggctgaaggacctggcttgcccaccggtgtggaacgggagagagggtcccggaaaccaagacgctatttttctcctggtgaaagtagaaaaa

SEQ ID NO: 40540 - DNA, 201 bp, Homo sapiens
tcccaacactttgggaaggccgaggtgggcaggtcacttgagtccaggagtttgagaccagcctggccaacgtggcaaaaccctgtctcttactaaaaatmccaaaaaaaaaaaaaaaaaaaaaaaaaaaagccagacatggtggcacatgcctgtaatcccagctacttaggtgtctgaggcatgagaattgcttgaacc

SEQ ID NO: 40541 - DNA, 201 bp, Homo sapiens
tcttgacgctatttatataggatgttggcgattccataattgttccatctaacctataagcgttatttatttggcttatttaaaagtctttttaaagaatrttagcctttacagcggtattatgatacatacacaattttacattgcattcagatgataagaagtaagaaacattatttttctttatttaatggttttaat

SEQ ID NO: 40542 - DNA, 201 bp, Homo sapiens
ttcccttttttttcttctttattatctcatctagactggatttaataataaggtttttggctttttgagagagtaagatgatggagcataacagtgtctcyctttgctgcaggttttcgttctgtggatatgataaaatctagttgaaattttcagacaagctttcccttctttttgagagcagttagagaatcatacagt

SEQ ID NO: 40543 - DNA, 201 bp, Homo sapiens
gggtctcactttgttgcccaggctggtcttgaactcttggcctccagcaatcttccctccttagcctcccaaagtgctgggattacaggcgtgagccaccrtgcccagctctttccttgaatttataagggttccacaatacttctaatcttaggagatggaaaaatcttttgatgaacaaaatgttccaaagcgacgctc

SEQ ID NO: 40544 - DNA, 201 bp, Homo sapiens
gagtcacatggctaaaaagcactagagctgggctttgaactcatgtctgatgagcccaggctcttactctccaggctgttctttgcatttatggtaggccrtcagtcacctgtttctctctgcatcagagctgaaagccacaggttcaatcctgaaatgcgcctatggcaagaacctcattctatatagtagttgcaaatt

SEQ ID NO: 40545 - DNA, 201 bp, Homo sapiens
ttaaacctctcctagaactggggacaaaagtggctagatgctatggtgaaagaatatggatagttcagtttaaacacatttctacttttaaagaaagaatrcattaatgcattattctccctaataacgatttagaagcatcttgttgatagatacagaggagcacattttaagctttataattttcagtttcagctctgg

SEQ ID NO: 40546 - DNA, 201 bp, Homo sapiens
cctgcccctgtccccagagcttttctgggaaagagatgattggcctctaaatgatatttcccatgtggctgtgtgctgcttcaattaaagtcgttaagtasagcatatcttcgtgatttaaagctggaaccaaatggtgctgtaacattatagtaaatacacgcacagaagattgatttgaaaagtgaaagaggctgtttc

SEQ ID NO: 40547 - DNA, 201 bp, Homo sapiens
tgagacagggtttcactctgtcttccaagctggagtgcaatggcagaatctcggctcactgcagccttgacctcccaggctcaagccatcctcgtgcctcmgcctcccaagtagctgggactacaggcatatgccaccattatcaagctaattttttctttttttttttaagagatgaggtctcactatgttgcccaggct

SEQ ID NO: 40548 - DNA, 201 bp, Homo sapiens
taagatgatcctggagaaaatgttgtatctgcaaataggaaatccacatgacaagtgcagatggccaatgggtggctttgaaaggtttccacctaaccaakcaaggcactgtaagtaaaacaaagagatgccatcatccacttctcacagtggtagtgattttttaaagaatggatccagggccagctggcaaggcctcgg

SEQ ID NO: 40549 - DNA, 201 bp, Homo sapiens
gctatgttttgggtgagaagtgtaacttgaacagccatcctgaaattttgtcacgagaaccttaaaactttgatcacttgttccatgtacacgaatctacmtgaaggaagtatcaggtgaatgtaaggattgggaacgcccatcacctgtattcgtggcagcctgagtggttttctggaacaggtcagattgggtcactcc

SEQ ID NO: 40550 - DNA, 201 bp, Homo sapiens
gttaccaatccagtggatggaaaatcattttatttttatttgtatcatttttttgagacaggggtctcactctgtcacccaggctggagtgcagtggcacyatcaccactcactgcagccttgacctcccaggctcaatcagtcctccttcctcagcctcctgggtagctgggacttcaggcatgcaccactacaggcatg

SEQ ID NO: 40551 - DNA, 201 bp, Homo sapiens; identical to SEQ ID NO: 6437

SEQ ID NO: 40552 - DNA, 201 bp, Homo sapiens
gccaaattgatgaaaggagacagatagctaagcattgttttgttttacttagaagtacatatagatgtatatttatatacatgtataatgtatataaaatmcaatatatgtatatttatgttatataacatatatgcatatttatgttacatatgtgtatgtgatatacacatacatatatctgtgtatagatatgcatat

SEQ ID NO: 40553 - DNA, 201 bp, Homo sapiens
tagaggtcttaccatttcatccataaatatcccagtacgcccctctaaaagataaggtttgttttgttcttaattgccagaaatctcttttctttttttcytttttttttttttttttttttttttttgagagagagtcttgctctgtcacccagaacggagtgcagtggcatgatctcggctcactgcaacctccgcctc

SEQ ID NO: 40554 - DNA, 201 bp, Homo sapiens
tcagataaatcctacctgtgtttccacagtgctttgaattatttcatattttacattcattcttcatctggaatttactttgatgcacatgatatcttcarctttgttctcttttctttcaaagatcctggaagttttaacttcgcgccccgcctgttcatcctcagcagctcctctggggattttgcagccacagagttt

SEQ ID NO: 40555 - DNA, 201 bp, Homo sapiens
agaggtcttaccatttcatccataaatatcccagtacgcccctctaaaagataaggtttgttttgttcttaattgccagaaatctcttttctttttttcttttttttttttttttttttttttttttgagagagagtcttgctctgtcacccagaacggagtgcagtggcatgatctcggctcactgcaacctccgcctcc

SEQ ID NO: 40556 - DNA, 201 bp, Homo sapiens
gattttgtgcttccatggtgaagtgcagcacagaggggttctctggggcaagttgggggagcccagagtgcatggagagtgagggcctggcacaggctgtrtttggatcctaaggaacctcttagtgcaggtgaatcagggtaaatgacaatgaaaatctgcccgagggagaagatgtgatcaaagtatgtgcaaagcaag

SEQ ID NO: 40557 - DNA, 201 bp, Homo sapiens
taccatttcatccataaatatcccagtacgcccctctaaaagataaggtttgttttgttcttaattgccagaaatctcttttctttttttctttttttttyttttttttttttttttttgagagagagtcttgctctgtcacccagaacggagtgcagtggcatgatctcggctcactgcaacctccgcctcctgggttca

SEQ ID NO: 40558 - DNA, 201 bp, Homo sapiens
ttgaccctccaacctcagcctcccaagtagttgggactgtaggcccaaccaccacacctggctaatttttgtattttttgtggtgatggggttttgccatrttgcccagtctgatcttaaactcctgggctcaagcgatcctcccacctcagcctcccaaagtgctggagctacaggcgtgagccactgtacccagcctag

SEQ ID NO: 40559 - DNA, 201 bp, Homo sapiens
aggctacgccgtctgcaggacaggtccctcacccagcccatcaccactgaagaggtggtcatcgcagccacgtaagtgcccacaggacttctcagccttgkctatagtgtctttttttaaaaaaatacatttaaagagtgttcaatgaaaatgaggcattggggaggtgatttagctagaagccacagagaagttagtact

SEQ ID NO: 40560 - DNA, 201 bp, Homo sapiens
cttaactgcaaaattgtcagtgacatataccattttctacaagctgctcctgataaattctttgcatattccagtttgctcaatttgtttcagtttgcatrttttaatttcctaccttaaaaaatgagccctttgccattttctacttcaaaatagtattttgggtatttgcatacatagcggtttaaccatttctcaatc

SEQ ID NO: 40561 - DNA, 201 bp, Homo sapiens; identical to SEQ ID NO: 6443

SEQ ID NO: 40562 - DNA, 201 bp, Homo sapiens
tggcccaagccgcctctcttacctagattatggttccatcacaaggaagagtttggtgctgaactctttgtggcgggcatgttttcctcctagattggcaytgttgaagaaaagcggggaggaagattggagaaacagactcagcaggaggcaggagggcggcaaggcgccggccagcagcctgcacacccaggaagcagg

SEQ ID NO: 40563 - DNA, 201 bp, Homo sapiens
cgtgggctctgcccttcagtgagaaaccacattgaaagcactcagcacaggctgcccaatagattagagagtaagttcccaataaaggttagccagtgtcrgtatccattgtagaacatttacagctttttaaaggatatttgtgatttcaaaccattactggtatcttaaatgctaatatggaatccagaatatcattta

SEQ ID NO: 40564 - DNA, 201 bp, Homo sapiens
tccctgtgcagagctccgggtgggtcctgtgggatgcagaagcctatagcgtattccctctcattggcagcctctttcccagagtgtctcggacagggacrtaatggagctattttaccagtcagagtagaagggatgaacaataataacatgccatccattattactgtgtgccagacttaatgccacactctttacctc

SEQ ID NO: 40565 - DNA, 201 bp, Homo sapiens
gaaccattctggagtaaatagttaaagctgacttcctgtgtctcgcacacaggagagaaaccaattgccacgaagcattttgctgtgtgggtaaccctccrggaagtttggttttctcacagagtgtagcgtgctgcagatttgcataaatcccagtggattgggtcacccgccgtgtgcccacggattgaaccctgagag

SEQ ID NO: 40566 - DNA, 201 bp, Homo sapiens
gctcatgagcctggtttggtaatgagcctggtttggacagggctggttccagactcagatgagaaaacaaacagaaacagacttctgttttatttatttgyttccactgtcccaatatcttttataatattaaattcttggactatctaatgacaggagctgaaatcttggctcttccccttttagatacacagggttcat

SEQ ID NO: 40567 - DNA, 201 bp, Homo sapiens
gtccatctggacttaggacttttgatgaagaagtcctgtgtctatccactaagcaataattcctgatttacttacctgttttttggtaaattttagttgayctgtatttttctgaaagctttaatcctactgtaaaattctcatttttaaaagtgagatactggaaagacgtagcttcttagcttgggctttgtggacatg

SEQ ID NO: 40568 - DNA, 201 bp, Homo sapiens
gatggcactcggcctggtccctcccaacatgattctgataatggaagaccacgtcacccaaagcacttcagtcctggtctggcttctgcaggtctcaggcygtgcctcccatttctttcctcctcccactttttgtaagatgatcctggagaaaatgttgtatctgcaaataggaaatccacatgacaagtgcagatggcc

SEQ ID NO: 40569 - DNA, 201 bp, Homo sapiens
aaggctgaactgttatatcatctatttattttcaagaataaagagttcagctgggtgtggtggctcacgcctgtaatctcagcactttgggaggccaaggygggcagatcacgcgaggttagaagttcgagaccagcttggccaacatggtgaaaccctgtctactaaaaatacaaaaattagccagatgtggtggcatct

SEQ ID NO: 40570 - DNA, 201 bp, Homo sapiens
cctctctctcccttccaggaatacacagcgttttgttaggttcaagaagtatagactcaggttgattataggtcactatggtagtcacaggcatgaaactmacatcttatataaacattatccatgtattgttatgaactactggtaacttgcattttaagcatgaagtcatgagttctggcaaagaagaaaagatttcaa

SEQ ID NO: 40571 - DNA, 201 bp, Homo sapiens
tattaggtgcgcgtggtggcacatgccaatagtgccagctactcaggaggcttgaggtgggaggactgcttgagtccaggagtttaaggctgcagagagcyatgattgagccactgccctccagcctgggttacagtgagacactgtctctaaaaaataacaaaatttggggtcaagtgtggtggttcacacctgtaatcc

SEQ ID NO: 40572 - DNA, 201 bp, Homo sapiens
agggggtcgatcctctgaagcttgagatctatctcaccgacgaagacttcgaggtaagcggttcttccggtggggtggggatgggagtaaaacaacacacrcacgcccggctcctttcactgagccgcggggcgcttctcccaatgtttccagtttgcactagacatgacgagggatgaatacaacgccctgcccgcctgg

SEQ ID NO: 40573 - DNA, 201 bp, Homo sapiens
tctttcgtgattttttctccccaaaaataattagcaaaatattctgttaaaatttttgatttaacgtttctgaatttaaaactatgctgtccttaatgctkcttttcttctctctccttatgaatgtttcctctttggcaattgcttttaaagtgaacctatccccgcttcgtgttctgggggcacccaccctgtaatggc

SEQ ID NO: 40574 - DNA, 201 bp, Homo sapiens
ggggtcgatcctctgaagcttgagatctatctcaccgacgaagacttcgaggtaagcggttcttccggtggggtggggatgggagtaaaacaacacacgcacgcccggctcctttcactgagccgcggggcgcttctcccaatgtttccagtttgcactagacatgacgagggatgaatacaacgccctgcccgcctggaa

SEQ ID NO: 40575 - DNA, 201 bp, Homo sapiens; identical to SEQ ID NO: 6452

SEQ ID NO: 40576 - DNA, 201 bp, Homo sapiens
tataaaataccaaccattaagaaaaaaaataaactaggcaaggagattccgaagttcacatggacaaataagcaagagctgccagttattgaatgcattayacagcctcagtaattaaaataatgtggtactggcaagtgaataaacaagacagcagaacatattagaaagccagaagtagtcccagatatatatgagaat

SEQ ID NO: 40577 - DNA, 201 bp, Homo sapiens
aataattcctgatttacttacctgttttttggtaaattttagttgacctgtatttttctgaaagctttaatcctactgtaaaattctcatttttaaaagtragatactggaaagacgtagcttcttagcttgggctttgtggacatgtaaggcgttcaaggatggctgtaaagtttctgtgaacagcccggaagtgtattc

SEQ ID NO: 40578 - DNA, 201 bp, Homo sapiens
agacgtagcttcttagcttgggctttgtggacatgtaaggcgttcaaggatggctgtaaagtttctgtgaacagcccggaagtgtattcagaattgaatgsgtgagcacacacacctgctggctaacagaagccataacttatcatggtctccaagagatccctgagcccagtctgttcagaatcatgatagaaaggaatg

SEQ ID NO: 40579 - DNA, 201 bp, Homo sapiens
ttgtaaagagaatagctggctgggcacggtggctcatgcctgtaatcccagcacttcaggaggccaaggcaggcaaatcacgaggtcaggagttcgagacyatcctggccaacatggtgaaaccccctgtctctactaaaatacaaaaagttagctgggcatagtggcgggcacctataatcccagctactcgggaggctg

SEQ ID NO: 40580 - DNA, 201 bp, Homo sapiens
tgtctccaaagaagagcagcccagtgccaggcagatgtgtgctgtctcttctcaccaaaaccagtgatgtctttttttttttttttttttttgagatggartctcgtgctgtcacccaggctggagtgcagtggcacgatctcggctcactgcaacctccacctcccaggttcaagtgactctccttgcctcaacctccca

SEQ ID NO: 40581 - DNA, 201 bp, Homo sapiens
aagatcatgtcactgcactccagcccgggcaacagggtgagaccctgtctcaaaaaaaagaatagcccagaagttcttactactaaaaatttaatctttayattgccaaaattaaaaatgaatacacatacgaaaaattaagtttcatgtaggactaaatttgggtatgtgcagaaaaactgtaaagaaaactagtgaaat

SEQ ID NO: 40582 - DNA, 201 bp, Homo sapiens
aacagggtgagaccctgtctcaaaaaaaagaatagcccagaagttcttactactaaaaatttaatctttatattgccaaaattaaaaatgaatacacataygaaaaattaagtttcatgtaggactaaatttgggtatgtgcagaaaaactgtaaagaaaactagtgaaatgtttgcttcataaaatatctttaaagaaat

SEQ ID NO: 40583 - DNA, 201 bp, Homo sapiens
tattaataatgcacctacgatttgtgaactgtgtttaggttcatcagaggcctctcgtttctttctggactttcaattacgttctgagcatggaaagttgkcaaataacttaggcttggatggatagatacagtcattgaatagaaaaaccatattgatatttttaggtttttaagatctcacatactttaaatatttcaa

SEQ ID NO: 40584 - DNA, 201 bp, Homo sapiens
gtcataccactgcactccaacctgggcaacagagcaagaccctgtctctaaaataaaagtaatttaaaaaagagacacaattctattttgtgtatatacaytcaagtctgtttgcaatgttaggatgtgatgttggttatttaagtgtgaatatgtatttacacaatgtatttgagtgctaacagatttcaagatctttat

SEQ ID NO: 40585 - DNA, 201 bp, Homo sapiens
tgggattggagctgggaaaactgcagtgatataaaaccagagactccagttattctcattccttttaaacctgtgtgggtgttcccaccaactgctgcagyctcccgtgttgaccctcactccctgggacacctgggcctttgggtcaagtgcttggtctactggcctcactcagcctagaagcttctgcttccagattag

SEQ ID NO: 40586 - DNA, 201 bp, Homo sapiens
tcccgtgttgaccctcactccctgggacacctgggcctttgggtcaagtgcttggtctactggcctcactcagcctagaagcttctgcttccagattagcrtcattcaggtctacactccccacctcctcagaaaggccctccctcagcaggtgtcccacgagccctgaccctgcctggcgtcaccttcttgtctcttgtc

SEQ ID NO: 40587 - DNA, 201 bp, Homo sapiens
gattggagaaacagactcagcaggaggcaggagggcggcaaggcgccggccagcagcctgcacacccaggaagcagggcggtccctcatcaagaaggtaayattccccatgttaggaaaagccttccgactaacatcactcttggaagtgcatcaaaaagacaagcgtgtgccacctaattcctactctgtgaagcatttg

SEQ ID NO: 40588 - DNA, 201 bp, Homo sapiens
gaccctgcctggcgtcaccttcttgtctcttgtcctcatagcacttatcactatctgaaattgtcttgctcgtctctttgtttattagaacaaaagcaccmagcatcgagttcatcattgtcttgttcaccattgtagcccagaatcctgaagtccccgctcattgaatatttgttgaatgcatgaacgaatgaagggaat

SEQ ID NO: 40589 - DNA, 201 bp, Homo sapiens
gggaaaaagggctgaggatcgattttttttttcctgagatagctgaggaggtgagtcctgccaacatctgagctaccccctagggcaggcagaatatttcyggagaaaaacgagccagcatattgctaacagattccatggcattccaaaccccaccctcccactgggccatttggtatctcctggagcgtaaagtccatg

SEQ ID NO: 40590 - DNA, 201 bp, Homo sapiens
atgtctgtagtaacatctaaaatgcccatttggcctataattccagcacttttggaggctgaggtgggaggatcacttgaggccaggagttagagactagsctgggtaacatagtgagaccctatctctacaaaattttaaaaataaaaattagccagacatggtgacgcatgcctgtagtcccagctatttgggaggctg

SEQ ID NO: 40591 - DNA, 201 bp, Homo sapiens
ccagcctgggcaacacagtgagacccccatctcaaaaaaaataaaaattgtaagccttagggagggggaatcttgtggacccagcctacttcatgcacctytgggcatgctaaggccctcctgcctctggcccacctgttgttctcttcctaatctttggctggttgtggccacctcatggacacagcatgagtgtacact

SEQ ID NO: 40592 - DNA, 201 bp, Homo sapiens
gtagggggtctcagggaaccagttggctccagtcaccttgaaggattcactctgagttctgactggttgagaccagaagttctcgtaagtagcagcttcgyttctgagatgctcctttgcctcacctgcacgattctgcagagctggggtcctgcctaccttttaaccacatctgacaataactatccttaccttttgcta

SEQ ID NO: 40593 - DNA, 201 bp, Homo sapiens
tgacagagggagaccctgtaacctccctgtgactgctctccacaccaagcagtctcatctgcctcctgtgctgctcatgtttaccgagtgcctgtgcagtkccagccatggggaccatcagcacttaatcctggcagcagccctggtgacagacatgaaatccagattagtttatgctcaagtgatatgtcagcaacctat

SEQ ID NO: 40594 - DNA, 201 bp, Homo sapiens
aaccgtctccagagcctcaagctctcttggctcagtggtctgtttccatgcactgagagaggtgtctgcaggagagcatcgtgcttgaccttccacgctcycgtgtccactagcaggcaggttttctgacacaggctgcggaattcaggacagtgcatcatggagaaacatacatcttgggggccattctaaagaacagac

SEQ ID NO: 40595 - DNA, 201 bp, Homo sapiens
catttatgaaagaacaagggacactttatttagcagctatgcttgtaataaattacactaatgcaaaatatattgccagtgatcttttcccccttaccttmacagtacttttatttgtactttgctgaaagtgactaaattacatatatttacaattcatccatgatagcttttccatgagactttaatccctcccttttg

SEQ ID NO: 40596 - DNA, 201 bp, Homo sapiens
ccatattggccaggctggtgtcaaactcctgacctccagtgatccacccgtctaggcctcccaacgtgctgggattgcagacgtgatcaccacacccagcsttaaaaaaattttttttcatcttttctgacattgtgaatgtcaaatttgaaccataaccagcaaaaaacttaggatgcaatcgacttttcccaccggatt

SEQ ID NO: 40597 - DNA, 201 bp, Homo sapiens
tgctgctcagttatttgaaagggtgatttgagcttatttttcttcttgtttgtagacaacagtggtgagataattcgagtgtctacctataacagagtgtkacagggattccgtaatctttgctctccagcatctgttggccggggtagatggggggtttgttgtccttggaaacctggaaggaactattagtcatgtctt

SEQ ID NO: 40598 - DNA, 201 bp, Homo sapiens
acttggagagaggagaggccagagagtgggaacaggcacctctgcctgaaggaataggaggcttcccaggccctggagagtgcagggatgcccaggtccayggctgggcagctgcaactgcctgggagaacaggctcccatcctgccagcttggtagggcgcagggctcctgctgggatcacctattcctggcccctgcca

SEQ ID NO: 40599 - DNA, 201 bp, Homo sapiens
ttattagtggctctattgagctttctgagaaacagaaagaaagaggaaaataacggcatacagatgtttatttttgaaaataagatatagcatttgtaccrcaaggtaagtggcctgaaaagctgaatatttcaaggattgcattatttcacttcaatgtagaattttttttcctgaaaagattttagtttcctaaagaaa

SEQ ID NO: 40600 - DNA, 201 bp, Homo sapiens
gaatgcttttccatttttgctttaaaagcttcatatgagtacatacagcattttatttgcttcacagcatgccccacagaactctttcttggaaatacagrgattcctatttttagtctttcaggaaacaaaattactaacttctccccctgcttctctttttcttctttataaagaagaaagggttggaaatcttatttg

SEQ ID NO: 40601 - DNA, 201 bp, Homo sapiens
ctgaagtgggagaatcacttgaggccaggagttccagaccagcctgggcaatgtagtgagagcctatctctacagaaaaaaagagagagagagagaaagcrtgagaaagtcatttctgctagtgagagagacatggtataaacatttcaaaattatttgtaagacaacatattttgtggcacagtttggtgcatgctcagt

SEQ ID NO: 40602 - DNA, 201 bp, Homo sapiens
caggatggtggctgtgctttggactgtgtggaagttctttccctgtagtttttacagggggtagaggttatcaattgtcccacttacacagtatgcgcagyggcttcctcggtctcttccttggcctctatggaaatgcacccgaacagggggaaggtcagcttcacagtgagtcttttccaagcccatcttttccccctc

SEQ ID NO: 40603 - DNA, 201 bp, Homo sapiens
caccccagcctgggcgactgatctagaccctgggctccttcccccaaaaaaacaagagcccacctgacagggactttggaggagagacttggcctttactrttaactttccccaactgtttgtcagggccactgaggaatcccatttgggatgagaaacaccccacattgcagggcacggctacctgaaggcaatcctgag

SEQ ID NO: 40604 - DNA, 201 bp, Homo sapiens
ttctggcagtgaacacttcacctgcccaggccttttatggaagagtgtatgtaatacctctgagcctttggggcctgggatccaggttgtcccacagcagrgaagggagggtgagacaaggcaggttaagcaggtacggcatgttggaaggtgtaccatgtgcccttaaaggtgaacccagtgcaccttcatgaaccgtgg

SEQ ID NO: 40605 - DNA, 201 bp, Homo sapiens
ttcagatcagataagtggtcccatagcacgggtcccttgaagagagatgccattgtggggttttagttagaacagtctttcggtccttctcctggttcacrggatttgtttgaatgttgttctcatcacaattctaccccttcgtttttgcatagggtccttttgtgccccaatatttcatgttctgggactaagaaaatg

SEQ ID NO: 40606 - DNA, 201 bp, Homo sapiens
ggtgggaaagtggactggacaccacatcttcagtgccagacaattgggtggtatcagtatacaaatggtaaacacccttgagttcattcacagtaatttcrtgtgcatttttagaaatagaattaatgagtcattgcttcctacacacttcaaagtagccacatccatatcttattcctctccagtaaggtgggagaatta

SEQ ID NO: 40607 - DNA, 201 bp, Homo sapiens
gccacaaagcaaccaccagggaaatcgtccgatgacataggtgctggtgtccttgccccagacttttgggagcttctttttgagaaggtcttcaaagaccrgagctcatgacttttaatgaactcaactcaggaagatgaatttgatcttttaaaaattcatcatttgaatccaatctgattaacaaggtggatgttcagg

SEQ ID NO: 40608 - DNA, 201 bp, Homo sapiens
aaactgcacaggaagtgtcttaacgtgaagagagtccgcactggacaccggcacaaagggcagagtgaagggacgaagtgtcagatgcgtctctgccaccrgcacacgtttcagcggtgctagatttgactaggcacaggactctaaactggtggtttgctgactattaacctccacggtattgctatctcatgctccttg

SEQ ID NO: 40609 - DNA, 201 bp, Homo sapiens
aaagacactaataagtcttttaggtgattgcaataagccttttctttaaaaaagaattctgaagtttagaaaggctggcatggttttctttcaacacatcsgataaagaaaaaatagctgtgacttgcaacatttcttattgaacgtactttgccttttcatctccacctatgtggtctgtttcaaattaccttatgcagt

SEQ ID NO: 40610 - DNA, 201 bp, Homo sapiens
gccaggctggtgtcaaactcctgacctccagtgatccacccgtctaggcctcccaacgtgctgggattgcagacgtgatcaccacacccagccttaaaaawattttttttcatcttttctgacattgtgaatgtcaaatttgaaccataaccagcaaaaaacttaggatgcaatcgacttttcccaccggattagtaaaat

SEQ ID NO: 40611 - DNA, 201 bp, Homo sapiens
ccaggctggtgtcaaactcctgacctccagtgatccacccgtctaggcctcccaacgtgctgggattgcagacgtgatcaccacacccagccttaaaaaawttttttttcatcttttctgacattgtgaatgtcaaatttgaaccataaccagcaaaaaacttaggatgcaatcgacttttcccaccggattagtaaaatt

SEQ ID NO: 40612 - DNA, 201 bp, Homo sapiens
cccaagttaacgtgtcatggacatgttttcccacgtctccaccgttcattttggaatatcggcttgtcagccactacagtccttggaaataataaaatccwgtctacgtttgcagttggttgtcccacagtcgtggtacgtgtgaaatgtgtgtgtgtgtgcctgcatgtgtgtaaattcttatatgttgtgccgtctacc

SEQ ID NO: 40613 - DNA, 201 bp, Homo sapiens
aatgccttaggaaggcagaaaaggtgggggacctgctagaataagttgagtagtgctcagaagtaatttgaaagcagatgcgctagcagcaatctggggarcctcctagaagaaggtgtggagtgctcagatgtagtttgaaagcggatgcgctagcagcagcagccttcctcgggttcaagagacagtggaaagtgagag

SEQ ID NO: 40614 - DNA, 201 bp, Homo sapiens
ttgagtagtgctcagaagtaatttgaaagcagatgcgctagcagcaatctggggaacctcctagaagaaggtgtggagtgctcagatgtagtttgaaagcrgatgcgctagcagcagcagccttcctcgggttcaagagacagtggaaagtgagagggcaaacccaggaggccatcaccggcctccagagccccttccaga

SEQ ID NO: 40615 - DNA, 201 bp, Homo sapiens
ccccgctccccacccagcccagtgcctcgccataaacaggggtcttgcggtgcagggagggatggcttgaagacagaggaaaagcaaactctgccggccakcgtttgaggacctcctgccctggtatcgcccgcgaccaccacctacactcttctccccaatacacatcactcagtggcatgagccctgtcctctgcttcc

SEQ ID NO: 40616 - DNA, 201 bp, Homo sapiens
agcagatgcgctagcagcaatctggggaacctcctagaagaaggtgtggagtgctcagatgtagtttgaaagcggatgcgctagcagcagcagccttcctygggttcaagagacagtggaaagtgagagggcaaacccaggaggccatcaccggcctccagagccccttccagaaaccagcaggtgacagccagggacgtg

SEQ ID NO: 40617 - DNA, 201 bp, Homo sapiens
ctgaacacacaatcattcttcatttaatcttattagtcgtttgatctcttatagtaaaagagttatttgatctcttatagtaaaacacttcaaatcactgkagtatctaatcctagatttttatattattaattaacacaaacgccagtgcttttcagatcgttcttggtaggaccctgagcttctcggagttgggatgtg

SEQ ID NO: 40618 - DNA, 201 bp, Homo sapiens
ccaagatccctgaggtcccctacccttctaacatcttccttagatgacagccctcccaagcccccggttgcccccatcacttcaggtcaggatacaaagamcagcaggacttggtggtggttgacagcacccaccagtccagccactgcaataaggagaaggaagactcccacagcaatgactccgccgatgatgtggatg

SEQ ID NO: 40619 - DNA, 201 bp, Homo sapiens
ggctgcctgcaagtccctgcccagctccccaagccactcagctgcatccactccggtagctggccaggtgagttggggtttcagagtctgcagaggggccrgtaagatgcagaggggctggggatcctaggacaggtacagagtacccaaggaggttcagggagtggggaaacagatggaaatggcagtgaaactattggc

SEQ ID NO: 40620 - DNA, 201 bp, Homo sapiens
ggttgacagcacccaccagtccagccactgcaataaggagaaggaagactcccacagcaatgactccgccgatgatgtggatgctggacaccagacccagrcccttgccccaagcagccactccaatgagcaacaagctcaccagctacgaagaaagagcaggatacatctcaacaattctagcatgcggcacagcccaag

SEQ ID NO: 40621 - DNA, 201 bp, Homo sapiens
tcagccagcattaacgggctcgtcaaggacatgagcactgtccagatgggtgaaggcctgggtgagtaaggtttatgacataggagcagaagaggggccasggctggggaaaaagaggggtaagagggaagagggggctggcactgggcgagtaggaagctgggtgataaagagggaccacataaggaatggggccagaag

SEQ ID NO: 40622 - DNA, 201 bp, Homo sapiens
caaaagcttaggttgaaagctgagctttctgtggtcggagttaggagagggctaattcccagggagacggctctggaggaacttaggtgaaggggagacgscgggaggggcgggtagggggccgctctgagagctgggcaaaaagggctccgcccgtagaaggagggcccttccccacccccttccccctgttctgcagtg

SEQ ID NO: 40623 - DNA, 201 bp, Homo sapiens
tcacgcaactgctgctgtgggtacgtgagctggggggaggaaagggggtctttgaggcttcatctcggaaaacgcctggcgcgggaaagcccgaaattccmagagggaccccggaagtaggcttggccatgtgggggaggcggcgccgggtgtgggcgccctggggacgcgcggtcacgcggccgtttccgccctctagta

SEQ ID NO: 40624 - DNA, 201 bp, Homo sapiens
gtacgtgagctggggggaggaaagggggtctttgaggcttcatctcggaaaacgcctggcgcgggaaagcccgaaattcccagagggaccccggaagtagscttggccatgtgggggaggcggcgccgggtgtgggcgccctggggacgcgcggtcacgcggccgtttccgccctctagtacggcgcggacgtggcggccc

SEQ ID NO: 40625 - DNA, 201 bp, Homo sapiens
atccttctccctcctcctagagctggagcctttgacttaccctgtggcctgggctcctccagcactcagatctctcccttctctcctaccctgctaagttycatgtttgtccccatccctggggaacattttccaagttcactttgggacagtcgagctcaagtcttggccccgtcaaagtattaaatgtggtggtgtgag

SEQ ID NO: 40626 - DNA, 201 bp, Homo sapiens
tgagctggggggaggaaagggggtctttgaggcttcatctcggaaaacgcctggcgcgggaaagcccgaaattcccagagggaccccggaagtaggcttgsccatgtgggggaggcggcgccgggtgtgggcgccctggggacgcgcggtcacgcggccgtttccgccctctagtacggcgcggacgtggcggcccgtgac

SEQ ID NO: 40627 - DNA, 201 bp, Homo sapiens
gaaagggggtctttgaggcttcatctcggaaaacgcctggcgcgggaaagcccgaaattcccagagggaccccggaagtaggcttggccatgtgggggagscggcgccgggtgtgggcgccctggggacgcgcggtcacgcggccgtttccgccctctagtacggcgcggacgtggcggcccgtgacgcccagggccgcac

SEQ ID NO: 40628 - DNA, 201 bp, Homo sapiens; identical to SEQ ID NO: 6540

SEQ ID NO: 40629 - DNA, 201 bp, Homo sapiens
gaaaagaacactgagccttctccctgctggaacccccaccccacaaaaaaggttgatggattgatggtccagttgtttatttagaaacctgattgttcaaraacatggtgggtgcttcacacctttttcactgggattgtgctggaggtgataggcagcattctaccatttcctcagcaacagaggtgaaggctcctcaac

SEQ ID NO: 40630 - DNA, 201 bp, Homo sapiens; identical to SEQ ID NO: 6537

SEQ ID NO: 40631 - DNA, 201 bp, Homo sapiens
ccagactctgccagggccaggaaatgcttttccagcactcccctgtgtcgagctggtgggacttggtctggatgcctgttctgctggtgcctatctccacytgttgcttgcatcctggtttcttgctgcagagtgggcagtccagccatgacccatgggcacccaaccttttcctagttcacaagctggtgtcctcccacc

SEQ ID NO: 40632 - DNA, 201 bp, Homo sapiens
tctggcctgctcacacctccttccgtcaactcccctcagtggcccagaaggtggtgaccttgcgcaagcagcaacagcttctggctgcctgcaagtccctkcccagctccccaagccactcagctgcatccactccggtagctggccaggtgagttggggtttcagagtctgcagaggggccggtaagatgcagaggggct

SEQ ID NO: 40633 - DNA, 201 bp, Homo sapiens
atcttccctagtccctagactcctctgttgggcccttcttcatctatcttccctatcgtcacatcagtgtatccctctatccatcctcaaactgattccartaaccattccagaatcgtcggggtagtgactccgagaaacgaagcttggatagtcggggagagacaacagggagtgggcgagccatccccatcaaacagg

SEQ ID NO: 40634 - DNA, 201 bp, Homo sapiens
atcagagcatgatctgaaaagaacactgagccttctccctgctggaacccccaccccacaaaaaaggttgatggattgatggtccagttgtttatttagaracctgattgttcaagaacatggtgggtgcttcacacctttttcactgggattgtgctggaggtgataggcagcattctaccatttcctcagcaacagagg

SEQ ID NO: 40635 - DNA, 201 bp, Homo sapiens
ctgtctatgcctctgacaaagcactaacctcatttctaggaagtgctagtcctcttctcttaagtttagcaggcatgtgttaagagcccaccatgtgcccmtgccaggaatgtaaaggtaaatacattgccccaggaacttgcagtctagtgggagagcacccaggaagggaacgctttctggaggagacaattgctgggc

SEQ ID NO: 40636 - DNA, 201 bp, Homo sapiens
gataatagtttctacctcagagggttgctttgaggtttaaacaaactgagaatattgtctagtacatagtcagccatgtttgacatgtttgaaaaaaatatatatatatatagtatgcaaataacattgtaaacaaatgatccttacaacagttttgtcaggtcaagattattacccctatttcagagataaagaaactga

SEQ ID NO: 40637 - DNA, 201 bp, Homo sapiens
tttttttttttttttttgagatggagtctcactctgtcacccaggctggagtacagtggtgcgatctcggctcactgcaagctctgcctcccgggttcacrccattctcctgcctcagccttccaagtagctgggactacaggcacttgccaccatgcccggctaattttttgtattttttagtagagactgggtttcact

SEQ ID NO: 40638 - DNA, 201 bp, Homo sapiens
cagtggtgcgatctcggctcactgcaagctctgcctcccgggttcacaccattctcctgcctcagccttccaagtagctgggactacaggcacttgccacyatgcccggctaattttttgtattttttagtagagactgggtttcactgtgttagccaggatggtcttgatctcctgacctcgtgatctgcccgcctcggc

SEQ ID NO: 40639 - DNA, 201 bp, Homo sapiens
tcagctccactccttcctcgtggccaaagtttgctcccttcttcagaagtttgggagtgtgagagaatatgggaaggaaataaggaccctggagagaatgraattgccttcaaagagcaagtgggaagttcctttcatttccagccagtgaaaaatggtcaaggtgtcagcaaacctcacaacaaatcccaacaccaagta

SEQ ID NO: 40640 - DNA, 201 bp, Homo sapiens
agccctccaggttatgacaaaataggagcccagaaggggactccctgggtgggtgaaggagagctgctgcccctttgtgcccatgcccccttcacagctcrccctgggctgccttgcttggatgccctgccatgcaggatgccctattgccatccgccagccctccctgcagccctgctggctgccatctgccacaccctg

SEQ ID NO: 40641 - DNA, 201 bp, Homo sapiens
ggcagagagggtggacgaccccgaactccaggacagcatccaggcctcattggacagcattcgaggtaagagaaaggtcagccctcaacttgggtgtatcrgggactagcaggtgcatagaaggtttagctgtatcatatatcaattcccagtcagctacttcctagtccccaagatgggactctgggaaagaatacattt

SEQ ID NO: 40642 - DNA, 201 bp, Homo sapiens
gaactggtggaactggaggttgttccagctcgctgtcattccattcacctctgatgcagcaaagagctaacaaaagcagccttctttgctcatgaaaggtrtctggtggaaacacttcttccatcatatcctgatctcttccagccatttcagtcttctccattgttacctgcctacctgggtggttgtcaagagatcatt

SEQ ID NO: 40643 - DNA, 201 bp, Homo sapiens; identical to SEQ ID NO: 6529

SEQ ID NO: 40644 - DNA, 201 bp, Homo sapiens
atccagccctggattttgcaccgccctcgcagacatcggtgctggtggagaaaaggtgggggggagatagggtgggggggcctgggggccgcctcctcctmaatgtgaggggagcgcccggacacagcgcgcatccggaccaagccgagcccaggcgaggcccccggactcttcgcccggatctcacgcccctcccctccc

SEQ ID NO: 40645 - DNA, 201 bp, Homo sapiens
aaaatcctagctctttcccttgggctgtggggaggggtccagggctacagtgccgttgaccttgaagaaggggagggaaacccctcacctcagtttctctmctgtggaatggaggttggggaagacacactctcttctgtgtttcagcacctcctcccagggtctgccctgggaaccagtgggttagggaggagctcctct

SEQ ID NO: 40646 - DNA, 201 bp, Homo sapiens
tcagagtgactagaaaattgctcccagagaagcccaggaccccacttccagcctcagctgaactctgggagcatggaaacggggctttgccgtgtttagascgacgttgaaggtgaaggggatgaggaagcctcagtttcccctgagcacttggggcaggtggcatgacagtgaccttgcaggcagcttctcgccagggac

SEQ ID NO: 40647 - DNA, 201 bp, Homo sapiens
agttcccttcgcggggagggacgaggaggcctggccttggcactggtggggacacaaggtaaggaggggttaggaaagcactgctttcaagggaggccctraggaggctactgggatattgcccaacatgggtgagaacttggtaaggtgtggaaatggccacttggattatagtacccttctggagggagcctggtctcc

SEQ ID NO: 40648 - DNA, 201 bp, Homo sapiens
acctaacctcccaaggctatcaggaagattgtatgacacaatacttgtgaatcaacctttacaacatttaaagcattgtcacaatgttagtgaggattttwaaaattattaatgacaacataaataaatggtgaggtgatcaaggaatgtctcaaattccccataacgagatatgagtgtagcttggtggagtagggggca

SEQ ID NO: 40649 - DNA, 201 bp, Homo sapiens
gccatctccttgcctctcctgaaatgtcacctaccttgtgttctgacactgccatttcctagtgccaccatcctaggacacagaaaatctcaagtcctagkgtggataggaaaccttttccatcttcctttttgcgacagctgggtaaggctgacaccttttaaaggaacttatccaaaaacaaagtgaaaacacaaagga

SEQ ID NO: 40650 - DNA, 201 bp, Homo sapiens
caaattgtaggggacagggtgggcagggaaagggagaaggaaatcccaaggcaattcaatagaagagggtaaaacgactccaaacatcactaagggcaggkgggggcctgcttgctcagtgcctgctaagtgtcctgccctccttgctctctctacccacctccactcaaaagatcctactgaatctccaggtaggcagca

SEQ ID NO: 40651 - DNA, 201 bp, Homo sapiens
gtaaggctgacaccttttaaaggaacttatccaaaaacaaagtgaaaacacaaaggaaatgatgatgaaaagaagagagcagaaaaccttttagttctcaragaagtgactcagaggctcccagactctgccagggccaggaaatgcttttccagcactcccctgtgtcgagctggtgggacttggtctggatgcctgttc

SEQ ID NO: 40652 - DNA, 201 bp, Homo sapiens
caattgctgggccaagtctgatgggcccatcccctagatgttcatcacaacccatttggcccccaagacccctccccagtccctctctattctgtaccatrttgactgcttcccagcataccaaggaccccaaccttccctacactctcggccctgtacccctccaggattacatccacagtacccacggcaaggagatgg

SEQ ID NO: 40653 - DNA, 201 bp, Homo sapiens
cctgttctcaacgatgtccatgtctatagctcctgctccctctcctaatgacgttctagttcctcttccttccctcaactccacttaccaccccagccccygcacccggcagccccgctgatccccagtgattcagccccttatctcagcatctcccactgattccccagatcctggattctgtgaccacccagccccttc

SEQ ID NO: 40654 - DNA, 201 bp, Homo sapiens
cggccttctcccgataactttctattgccaagtgctccccaacagcccttgaccatagtgatccccattcttgtccctcagtgattccccgcacccccacygccaccagccccagggccctctcatctcagccctgcgccccagcttctgtccccttcccccgtgttcactcagatcctgaccctcccttcttctcccaga

SEQ ID NO: 40655 - DNA, 201 bp, Homo sapiens
ccttgaacaaagaatggaagaagaaatatgtaaccctgtccagtaatggctttctactctaccaccccagtattaacgtgagtggcagagactgggccacrttggccagctttggatttccctcaagttctacctgtctatgcctctgacaaagcactaacctcatttctaggaagtgctagtcctcttctcttaagttta

SEQ ID NO: 40656 - DNA, 201 bp, Homo sapiens
tccagccatgacccatgggcacccaaccttttcctagttcacaagctggtgtcctcccaccagttcagggttctatggatttgcagggcagggtgattgtsgctcgcgcctgggtctcagctatgtagaccttgtcaggaagcaccactcagcagctctggagtattccttgaggacacacacacacacacacacacacac

SEQ ID NO: 40657 - DNA, 201 bp, Homo sapiens
tgtgaccacccagcacagcggcgtgacccaggaaaggtggattcaacagtgcaggtgcagtgacaagtacagaggcaggtgtgtggtctgggcaaagcgasaagaggggggaggtagcaaagaagattggactagaggacctggccgttcccccttcacctccaagaccctggactctcttatttcagctccactccttcc

SEQ ID NO: 40658 - DNA, 201 bp, Homo sapiens
caaagcgagaagaggggggaggtagcaaagaagattggactagaggacctggccgttcccccttcacctccaagaccctggactctcttatttcagctccmctccttcctcgtggccaaagtttgctcccttcttcagaagtttgggagtgtgagagaatatgggaaggaaataaggaccctggagagaatgaaattgcct

SEQ ID NO: 40659 - DNA, 201 bp, Homo sapiens
gtcccgggcaagcggcccccgagggccatctctgcctttggcccctcagccagcattaacgggctcgtcaaggacatgagcactgtccagatgggtgaagscctgggtgagtaaggtttatgacataggagcagaagaggggccagggctggggaaaaagaggggtaagagggaagagggggctggcactgggcgagtagg

SEQ ID NO: 40660 - DNA, 201 bp, Homo sapiens
acaaccttgccctcagggtgtgctgggcgatgccaggagtgggaagtcatcgctcatccaccgattcctgactggctcataccaggtgctggagaagacasagagtgagttctgaagagccatagtaagctaaccattggggtcagggatccaggagtgagatcaatgattaggcaggtgtggagaccaggggggaaggat

SEQ ID NO: 40661 - DNA, 201 bp, Homo sapiens
gtcacgcggccgtttccgccctctagtacggcgcggacgtggcggcccgtgacgcccagggccgcacggcgctgttctacgcccgccaggctggaagccakctgtgcgccgacatccttctccagcacggctgcccgggtgagggcggcagcgcggccaccacgcccagcgcggccaccacgcccagcatcaccgccacgc

SEQ ID NO: 40662 - DNA, 201 bp, Homo sapiens
ggggaggcggcgccgggtgtgggcgccctggggacgcgcggtcacgcggccgtttccgccctctagtacggcgcggacgtggcggcccgtgacgcccaggkccgcacggcgctgttctacgcccgccaggctggaagccagctgtgcgccgacatccttctccagcacggctgcccgggtgagggcggcagcgcggccacc

SEQ ID NO: 40663 - DNA, 201 bp, Homo sapiens
aggcagcattctaccatttcctcagcaacagaggtgaaggctcctcaactcagaagcacaaattgtaggggacagggtgggcagggaaagggagaaggaawtcccaaggcaattcaatagaagagggtaaaacgactccaaacatcactaagggcaggtgggggcctgcttgctcagtgcctgctaagtgtcctgccctcc

SEQ ID NO: 40664 - DNA, 201 bp, Homo sapiens
tccacgggaccaggcggctgtggaagcaacaggaggaagagctgggcttgcctcctggatgatgttttccagttcccgctccatgccagccttcacctccraacggagccggtctcggtctgacggaagcaggatcccttccagttccttctcaaattctcccagtaactgccgttcatcctcatcttcatcctcatcctc

SEQ ID NO: 40665 - DNA, 201 bp, Homo sapiens
cctctgtttcttttagcccgtcagcctgtcctgctccacgggaccaggcggctgtggaagcaacaggaggaagagctgggcttgcctcctggatgatgttytccagttcccgctccatgccagccttcacctccgaacggagccggtctcggtctgacggaagcaggatcccttccagttccttctcaaattctcccagta

SEQ ID NO: 40666 - DNA, 201 bp, Homo sapiens
ggagtagggggcatctcagctctgctgactcttccatatgtgcccaggctagtaacgggggccacactagcgactactcttcttccctcccgtcctcaccraatgttggtcaccgggagctccgagccgaggcagctgcagtggctggattgagcaccccagggtccctgcaccgggcagccaagcgcaggaccagccttt

SEQ ID NO: 40667 - DNA, 201 bp, Homo sapiens
tgaagtacaccatgcagagaatctcaggctcccaagcgcatactaactctcacacactatgctctgcagagccaaagtgcagataggtccccagaactctycttggtcccctctcctccccttgctcctgttcctgtcttccccccacacaccttccgctctacctccttagtgccattagagcaagtgatgacaacacag

SEQ ID NO: 40668 - DNA, 201 bp, Homo sapiens
cagtgacaaggaagttgggtcctgtgttgtctactggggatttctcaaagctgggcatggaagggtggtcttgggtatctggcctgctcacacctccttcygtcaactcccctcagtggcccagaaggtggtgaccttgcgcaagcagcaacagcttctggctgcctgcaagtccctgcccagctccccaagccactcagc

SEQ ID NO: 40669 - DNA, 201 bp, Homo sapiens
ccaagcgcatactaactctcacacactatgctctgcagagccaaagtgcagataggtccccagaactcttcttggtcccctctcctccccttgctcctgtycctgtcttccccccacacaccttccgctctacctccttagtgccattagagcaagtgatgacaacacagggaggaaatgctgccatggcaacaccatccg

SEQ ID NO: 40670 - DNA, 201 bp, Homo sapiens
tgactagaaaattgctcccagagaagcccaggaccccacttccagcctcagctgaactctgggagcatggaaacggggctttgccgtgtttagagcgacgytgaaggtgaaggggatgaggaagcctcagtttcccctgagcacttggggcaggtggcatgacagtgaccttgcaggcagcttctcgccagggactagtcg

SEQ ID NO: 40671 - DNA, 201 bp, Homo sapiens
tgctgtgatcttcgtcttcagcctggaggatgagaacagtttccaggctgtgagccgtctccatgggcagctgagttcccttcgcggggagggacgaggargcctggccttggcactggtggggacacaaggtaaggaggggttaggaaagcactgctttcaagggaggccctgaggaggctactgggatattgcccaaca

SEQ ID NO: 40672 - DNA, 201 bp, Homo sapiens
atttggcccccaagacccctccccagtccctctctattctgtaccatattgactgcttcccagcataccaaggaccccaaccttccctacactctcggccytgtacccctccaggattacatccacagtacccacggcaaggagatggacttgctgcgaacaacagtcaaagtcccgggcaagcggcccccgagggccatc

SEQ ID NO: 40673 - DNA, 201 bp, Homo sapiens
ccgcagctgcggcgccccgggaacgtccggccggtgtcaggcgcgggggctggacctggctggcggaaggagcatcctttcccccgggcctgtggcttctytcggccaggcgatggagcccttccccacagttcttttggagggcgtttgtggggagggtgtgggagatggaggcataggaaaatcctagctctttccctt

SEQ ID NO: 40674 - DNA, 201 bp, Homo sapiens
gatctgagtgcaggactgactctaaacctctcatctccctgcatccccaggaatgatcaagggggaactcctggagagggacagttgaggaggggagcccyaaaatgccaaagctagttcagggaatgagacaggctatcaagaaatcaggaaatctgtggagggggctactgaggcagctgtgtcttcctccctaagact

SEQ ID NO: 40675 - DNA, 201 bp, Homo sapiens
gttgttccagctcgctgtcattccattcacctctgatgcagcaaagagctaacaaaagcagccttctttgctcatgaaaggtatctggtggaaacacttcytccatcatatcctgatctcttccagccatttcagtcttctccattgttacctgcctacctgggtggttgtcaagagatcattctttccctcaaggacacc

SEQ ID NO: 40676 - DNA, 201 bp, Homo sapiens
tccgccacatcctcctgcccaccccaggcttcagtcctgtggtggagccctggcaggaacagcttctctccatccacaaggccctaccactgaggaactgrtggaactggaggttgttccagctcgctgtcattccattcacctctgatgcagcaaagagctaacaaaagcagccttctttgctcatgaaaggtatctggt

SEQ ID NO: 40677 - DNA, 201 bp, Homo sapiens
tggtggaactggaggttgttccagctcgctgtcattccattcacctctgatgcagcaaagagctaacaaaagcagccttctttgctcatgaaaggtatctrgtggaaacacttcttccatcatatcctgatctcttccagccatttcagtcttctccattgttacctgcctacctgggtggttgtcaagagatcattcttt

SEQ ID NO: 40678 - DNA, 201 bp, Homo sapiens
ttttggcccatgcgcgacacgggccgctcgacaccagcgtagaggacccacagctgcgctccccactccacctggcggccgagctcgcccacgtcgtcatsacgcaactgctgctgtgggtacgtgagctggggggaggaaagggggtctttgaggcttcatctcggaaaacgcctggcgcgggaaagcccgaaattccca

SEQ ID NO: 40679 - DNA, 201 bp, Homo sapiens
aacgcctggcgcgggaaagcccgaaattcccagagggaccccggaagtaggcttggccatgtgggggaggcggcgccgggtgtgggcgccctggggacgckcggtcacgcggccgtttccgccctctagtacggcgcggacgtggcggcccgtgacgcccagggccgcacggcgctgttctacgcccgccaggctggaagc

SEQ ID NO: 40680 - DNA, 201 bp, Homo sapiens
cggattgggcggtacgcgagtccgcgggggctggaacgtgcagaatatttaaatgtgaagtgagagggggcggataggaagcctcacttcccccactgccyaccccctccccagagccgcattgaaacccacccggggctgaccctggagtgagtcaggtggggcggaactgctgcaaaggcaatccgtaccccgggagac

SEQ ID NO: 40681 - DNA, 201 bp, Homo sapiens
gggtcagcactggccaaaggagagggctctggtttcccaggtcttcatctggattgggtccagaggagtagacctgtctgactttccatttgctccctcaytccccgcaagttctcaggctgggcagatgctgtgatcttcgtcttcagcctggaggatgagaacagtttccaggctgtgagccgtctccatgggcagctg

SEQ ID NO: 40682 - DNA, 201 bp, Homo sapiens
gtgggagggaggagagatcagggaggccagagaaggtttgcttaatagtcgcaaggtctttctgggctggaggagctggcaaggccacaggtggcatggasgccacagtgacaaggaagttgggtcctgtgttgtctactggggatttctcaaagctgggcatggaagggtggtcttgggtatctggcctgctcacacctc

SEQ ID NO: 40683 - DNA, 201 bp, Homo sapiens
ttggtagtttaagaaatatttataaagcaggtaacaagtggggagccgggaggggcgctcagctggggtgcagaagggtgggggtgcccccgccttccccwgcatgtgctcgggcttcctgctgccccccaccctctgctttccctacccccactgccccactcccaggggctcgggatggacatcagggaggacggtctt

SEQ ID NO: 40684 - DNA, 201 bp, Homo sapiens
tcctgactggctcataccaggtgctggagaagacagagagtgagttctgaagagccatagtaagctaaccattggggtcagggatccaggagtgagatcartgattaggcaggtgtggagaccaggggggaaggatgaggccataatagcaaaagcactgggagcatggggaggtttggtgacctgtcacctctgacctgt

SEQ ID NO: 40685 - DNA, 201 bp, Homo sapiens
gtaacagaccaaatgtgcatgaattcctgtgagagtttgaaatccgcaggtcatcaagagtttaggattgcacctcggacctagcttgccatattctcccrgaaccaacacccatcttaattagccacctcccacaggaggccctgggacactgttaagatttctccatccacctggctgggaaatcatagcagggactgg

SEQ ID NO: 40686 - DNA, 201 bp, Homo sapiens
ctctttccctgctctgatccttctcccaggagatcaaaatacaggtccctgttgagctgaccttcttggcaatgaagaaatgtgtgagcatggggaagatrggctgtgacagactcatggtagacttgttccctgcctggggagtccagagcaggaagcagtctggggcagcaggttctgggactggataatgagttcatt

SEQ ID NO: 40687 - DNA, 201 bp, Homo sapiens
tgccgttcatcctcatcttcatcctcatcctcatcctcatcctcctcttcttccatctctctctgccgttctggatcacccctttccttctctggttcccwctgagggacttctgcagcatcatccacaggctgctcttggcctatatttggcttcccctgggtgggtagggagtggggagaaagacagttggggtttcaa

SEQ ID NO: 40688 - DNA, 201 bp, Homo sapiens; identical to SEQ ID NO: 6538

SEQ ID NO: 40689 - DNA, 201 bp, Homo sapiens; identical to SEQ ID NO: 6581

SEQ ID NO: 40690 - DNA, 201 bp, Homo sapiens; identical to SEQ ID NO: 6582

SEQ ID NO: 40691 - DNA, 201 bp, Homo sapiens; identical to SEQ ID NO: 6583

SEQ ID NO: 40692 - DNA, 201 bp, Homo sapiens
ccaaaactaccctagtacagtgaatgagagaaatctgcctggaaattgtttcagaaccatgtacctttatgctttgtgattgtgaaacattgacttttttktaaccccaaaatgaaaactgtttagtaaaggggatctattttgtgtgttttgaaacttaggtgcaatgtcccctggaaaaagctaaagaaatgtatatgt

SEQ ID NO: 40693 - DNA, 201 bp, Homo sapiens
atttgtttttcccttatctgttgagtgtttctggaggaaggccatatgatagttaaactcggccattttgcctcctagtgcgtgtgcccactcgcctatcycctgagaccttatcaggaggctgatcacctgcttcaggtgttgctttttttttttttttttttttttgagaaagagtctctctctgtcacccagattgga

SEQ ID NO: 40694 - DNA, 201 bp, Homo sapiens
gggagcctgcatatgcacagatcagatggcgtgagaggaagagagtaagtgagtgcaagtgcagaggaggcccccaggctcttttcaacaaccagttattrcaggaatgaagagaagtcactcactcccttgagaattccaccaatctatttgtgagggatctgctcccatggcccaaacacctcccaccatgccccacat

SEQ ID NO: 40695 - DNA, 201 bp, Homo sapiens
ccttatgcacttgtattatgtcactgttcacctatgtttgtgcaagcatggctgaaggactaacatcaaaattcagaaactggtttctgtaagaaatttamtctaaatgctgagctgacagagattatgttcagaagaccagtggcagcactgaaaagtcagccatgtgggtgattcttacaagaggcttccatccctgta

SEQ ID NO: 40696 - DNA, 201 bp, Homo sapiens
tgtcatctaccatcaccagtgtttcatgaaataaaggatttttaaaaccagaagcatagaggcatataacctcagcaaaacaacagtttttaaatcaaatstagttttatgaaaatattgtttctatttttctaaattttcatggactcataaaaccatgtatttaacctgccctagaggattgccaatgccctttggggt

SEQ ID NO: 40697 - DNA, 201 bp, Homo sapiens
tgtccatccatcagtccattcttgagttatctctaagcttgtttttcctttagtgcagtggccttaatttatgcttttaagttcttttccatagaaaaatwaaaaaataagtttgagtgactttgacatcctcagttgagaaaaacagcagcaattgggtccttgtgcatggaagggccacctcagacttcagttttataa

SEQ ID NO: 40698 - DNA, 201 bp, Homo sapiens
cagaggcagggagaccagtgtaggtgggttttgcattatgccaagcaagcgatggcagctggaactaaggcattgaccctgtttctggagaggagggattraatcagagaactattgaagagatggaatcaacttgatttgagctgaggtgaggagggaagaggaaacattgatgtcagggtttgtcagggttcaaccaga

SEQ ID NO: 40699 - DNA, 201 bp, Homo sapiens
gtaattcaaacatgggttcaaaagtgctcatcttgaagtagtctagaaatccaccagcagccactaaacccaacgtagatgagggaacacgggttgcatgyagctgtaaggcaagaagaaggaatggagagaccgagagtgacatcagctggagaactaagggaggtgggaagtataaagaggagatttgaattggctgca

SEQ ID NO: 40700 - DNA, 201 bp, Homo sapiens
agtaattcactaaatggatagtaaactgctaaagggagttagtgaattgaaagatatcgcagagaagttgaaatctgcaaggtaaaataagatctaataakagtttatggagaatatctacaaaatagaggagaggcaatatccaaaaagttgatggctgagaatttttcagaagttttcagtttgaaagagtaaaactaa

SEQ ID NO: 40701 - DNA, 201 bp, Homo sapiens
cgtgaacctgggaggcggagcttgcagtgagccgagatcccgccactgcactccagcctgggcgacagagcgagactccgtctcaaaaaaaaaaaaaaaargaaaaaaaaagaaattaaccaaaatgaagcattaaaaaaatgaaagcatccttaatgagctatgggacaacctctagggactactacaggtgtaattaga

SEQ ID NO: 40702 - DNA, 201 bp, Homo sapiens
gtaaactgctaaagggagttagtgaattgaaagatatcgcagagaagttgaaatctgcaaggtaaaataagatctaataagagtttatggagaatatctasaaaatagaggagaggcaatatccaaaaagttgatggctgagaatttttcagaagttttcagtttgaaagagtaaaactaatttcttaccatgataagtaa

SEQ ID NO: 40703 - DNA, 201 bp, Homo sapiens
ccttgctcaatagtaggttccttgtctgtgatgttttaagagaagtagtaagggtggcttctcccatcctggtgcttctgtgtttggtttatattacttaraatctaaattgtagtggttattacctcctgagaagaaaagtagtaactggagtccttgtcagtattttcctaccccagtgtgtatcagactgttttcaga

SEQ ID NO: 40704 - DNA, 201 bp, Homo sapiens
ccccgtctctactaaaaatacaaaaaattagccgggcgtagtggcgggcgcctgtagtcccagctacttgggaggctgaggcaggagaatggcgtgaaccygggaggcggagcttgcagtgagccgagatcccgccactgcactccagcctgggcgacagagcgagactccgtctcaaaaaaaaaaaaaaaaagaaaaaaa

SEQ ID NO: 40705 - DNA, 201 bp, Homo sapiens
ttggctatatatttgtgtgtgtgtgcatgtataatttttttctctttctctttcccacctcatgttataggtcattgttgtgtatctagagcagagggagwacttggtgggttctgccacatgggcaaagctttctactgaggctgaaaagctctatgcctattgtctccatgccatgtttacatagcacctgtttattac

SEQ ID NO: 40706 - DNA, 201 bp, Homo sapiens
gagtacccgctcagctgctctttttctggtgtggtcagaccagctgggtcctctgaaacatgaatccatagtgcttcctttgttatactatttctgactcmgttttctctaaacggctgtaaaatttaactgcctagctgtattttctttctgtggactttatgctctcatatttaggagaaagaataagagaacaccaac

SEQ ID NO: 40707 - DNA, 201 bp, Homo sapiens
cctttgtccgttttttaataaaaaacaaaaagatttttaaaaagtgagtttaatacattgcagtagaaattaaccaaaatgggccgggcgcggtggctcasgcctgtaatcccagcactttgggaggccgaggcgggcggatcacgaggtcaggagatcgagaccatcccagctaaaacggtgaaaccccgtctctactaa

SEQ ID NO: 40708 - DNA, 201 bp, Homo sapiens
acgatatggaatttatgtaatttgttcattatgattcacaaccaggaagcattctgcaaaatctgatggtgagaaacaagatgaggattgttttcctaccyctgtgtgttcctttaagtaattacacaatattgggacatcagagaaacttaatttgtttcagactgacaatttaggtcttagccaagaaacctttgctca

SEQ ID NO: 40709 - DNA, 201 bp, Homo sapiens
tttttttgataatagcgatcctaacaggtgtgaggtgctatctcattgtggttttgatttgcattttcctgatgattattgattttgagcatgttttcatrtacttgttagccacttgcttatctttatttgagaaatgtctattcagatcctttgtccgttttttaataaaaaacaaaaagatttttaaaaagtgagttt

SEQ ID NO: 40710 - DNA, 201 bp, Homo sapiens
tctcacttctctaaagaaatacctgaaactgggtaatttataaagaaaagaggtttaactggctcactggtccacaggctgtacaggaagcatggctgggraggccttagggaaacgttcagtcgtggtggaaggtgaaggggaagcaggcacatcttacatggccagagaaggaagagagtgaagggggaggtgctacac

SEQ ID NO: 40711 - DNA, 201 bp, Homo sapiens
tcgtttgattgttgggcttttgtttatgttgcctgtaggttccttttctttttgtttttcttttacctcctagtgacagccattctaaacaaattgccagyattgtcttcctctgttgacatccttcccagcaaggaatttaaaatagcatctccccctccagaatgtgctgtgagggaagaggtgattagcataaagatg

SEQ ID NO: 40712 - DNA, 201 bp, Homo sapiens
gctgctacctctctctccaccctcatcttgctcctcactctcccactcagccacatggccatggttgagtctatgctcgtgcatcatgcccccattctacygcagggcccttgcacctgctgttgctactgcttgggattctctcccctcccctccttatctcatgaacttccatgcatcctcagcctagtcctcatgtcc

SEQ ID NO: 40713 - DNA, 201 bp, Homo sapiens
atggagcctgccttttatatgcaaatatttggaagccattaattccccagttcctgccactactcaccctcttataagaccctgtctgtaccatccaaatkgcaaattgaagttcccacccaacaagaactattaagaactttaagatacggtgatagcctgcagcctgaaattgacttatttttgacactgttgtgctga

SEQ ID NO: 40714 - DNA, 201 bp, Homo sapiens
ctagagaagaaaaatgttctcaaaattcaaaacatgtctcctggggagactcttcattaggagtgggcatttcaaactcctccgcagttgtctaatgcagsctggcccagcattcagtgacggcactagggctgctccacacacagcttccagaagcatcgggctccggctgccacacagtcccagttggtgtgtaacaga

SEQ ID NO: 40715 - DNA, 201 bp, Homo sapiens
tctactaaaagtacaaaaattagcctggtgtggtggtgtatgccttagtcccagctacttgggaggctgaagtgggataatcacttgggcctgggaggcaraggctgcggtgagccaggatcgcaccactgcactacagactaggtgacagactctgtctcagaaaaataaaataaaggtacagcaaaacctatttgatca

SEQ ID NO: 40716 - DNA, 201 bp, Homo sapiens
gagtgctaggattacaagcgtaagccactgcacctggccaggtgttttctattgggagactgcatttccctggtgccagctgtgaccaattgttattttaragggtttaacaatggcctgactatcacctgatggtcgccagacattcctgggggagggccctcccctgccctgatcatgtctacctaactgcctactcta

SEQ ID NO: 40717 - DNA, 201 bp, Homo sapiens
catttgttgactcaggtgacagtagctgggtgtagagggaggcaagaagttaatttacctctgtttgagggatccatgggaggcgagggagtagatagacsctgaatgtagattattatcaatttctgaggcttaggttcttaggaaagaaaaaaggacatttcaaaggtggagttcggattaggagagtatcatctgttt

SEQ ID NO: 40718 - DNA, 201 bp, Homo sapiens
ggagcagccttttattcatctcattttattatgctaaaattttgttccttgttctgcacatgtgaagaaaataagaattttcttttcttcttagttttttktttgtttgtttgtttgtttttttttgagacagggtctctctctgttgtccagactggagtgcagtggcgctatcttggctcactgcaagctccgcctgcc

SEQ ID NO: 40719 - DNA, 201 bp, Homo sapiens
cctggtgccagctgtgaccaattgttattttagagggtttaacaatggcctgactatcacctgatggtcgccagacattcctgggggagggccctcccctrccctgatcatgtctacctaactgcctactctaacaatactactcctgtggtatggggatcctaagccaaaaagctgaaatgaacatgttctagcactaca

SEQ ID NO: 40720 - DNA, 201 bp, Homo sapiens
aacattaccatgatcacaaaaggtgctattcgataaccctgggctagagcaagactctgttgcatcactcattcattcatccatccgtccatttattcacygagcatttgttatgtgccaagaagtatggttggggctggagcattaaggcacacttccagctagcagaaaacataaacataagctaactagaatgcaatg

SEQ ID NO: 40721 - DNA, 201 bp, Homo sapiens
atacaaaaattagccgggcatgatggccgttgcctgtaatcccagctactcgggaggctgaggtgggagaattgtttgatcctgggagacagagattgcartgagccaagattgcgccactgtgctccagcctgagcaacagaccgagactgcgtctcaaaaaaaaaaaagtaaaagaagatgaaagagggggacagtgca

SEQ ID NO: 40722 - DNA, 201 bp, Homo sapiens
accttgtctctttaaaaaaaagaaaaaaaaaattaaaaacaatattcatattgacttctagatcattaccaaacagtcctttctcttctgccctccgcccwaacatttcacagcagggtatgaagcctttgccttccttgcctctattatatcctatcctcaccttccgttgtttttttgttttttgttttgagacagggt

SEQ ID NO: 40723 - DNA, 201 bp, Homo sapiens
aatgaatgaaagggaaaattgcaaggggaacacagtttatcagcaagaaatagactatcagtctgcagattagacaattatggttgtaaagacaggtgcartggcatgtgcctataatctgagcgactccataggctgaagcaggaagatggcttaagcttgagttcaagaccagcctggacaacacagcaagacttcctc

SEQ ID NO: 40724 - DNA, 201 bp, Homo sapiens
agtagagacagggtttctctatgttggttaggctggtgttgaactcctgacctcaagtgatccacccgtctcagcctccctaagtgctgagattataggcrtgagctaccacacccggcctgatcatagttatttatgtataccttatcccctcgttagactaattacctgaagagcttctgtcattcagctgatgtttag

SEQ ID NO: 40725 - DNA, 201 bp, Homo sapiens
agcactttgggaggccaatgcaggtggatcacttgagattaggagttcaagaccagcctgagcaacatagcaagacccagtctccacaaaaaaaaaaaaamaaacctcattcaggtgcacctgtggtaccagctacttgggaggctgaggtgggaggatcacctgaactaggcaggtcaaggctgcagtgagctgtgatca

SEQ ID NO: 40726 - DNA, 201 bp, Homo sapiens
gtaagtacatagtaggcacccaataaatgtttgggtaaatcagatcttcagcataacaggagatatttaagctgactgtgtaggcattggtgtaatagtgytacttccttacaccattcaaaaacagttcaggatgaggtctcagccctgaggcctctgtgtagctatgtcacagcactggtgacattttgttcctttcca

SEQ ID NO: 40727 - DNA, 201 bp, Homo sapiens
caagagccaccgcacgtggccccaagtttctttgtagtagggacgaggccttagacatttgtgtccccaacatatgatgtaagtacatagtaggcacccartaaatgtttgggtaaatcagatcttcagcataacaggagatatttaagctgactgtgtaggcattggtgtaatagtgttacttccttacaccattcaaaa

SEQ ID NO: 40728 - DNA, 201 bp, Homo sapiens
ttagagttgagcacttcttggctagaagggagccagtccagcctcccagcagggcagagggccccaggctttgctttgcatcactttttttttttttttttgagacatggcatcaggctggagtacggtggcacaatctcggctcacttcaggctcgacatcccaggatcaggtgatcctcccacttcagcctcctgagta

SEQ ID NO: 40729 - DNA, 201 bp, Homo sapiens
attttgcttttgttggtagataccacccctttctgaggactccatgagttcttggagctccttctagatcctggactgggattttctctttcttctccgcrtacccctacgcagaaatttcagagtacttctgtggccattacttctcattttctttcttcagatgcttttaaagactggtgtgggtaacacctggatact

SEQ ID NO: 40730 - DNA, 201 bp, Homo sapiens
catgagttcaggagttcaagacaagcctggccaagaaggtgaacccatctttactaaaaatacaaaaaattagccgggtgcagtggcaggcgcctgtaatsccagttactcgggaggctgaggcaggagaatcactttaacttggagggcagaggttgcagtgagctgagatcacgccactgcactccagcctggcgacag

SEQ ID NO: 40731 - DNA, 201 bp, Homo sapiens
tattttttagaacagatttaggttcacaacaaaattgagcagaaagcacagagatttcccatattcactcaacccacacacaaaattggcacgatcattgktcactgcagtcttgaccttccaggctcaagcgttcctcccacttcggcctcctgagtagttgagactacaggtgtgcacaaccacacctggcttattttt

SEQ ID NO: 40732 - DNA, 201 bp, Homo sapiens
ctctctgctcacaggtttggattttttatcacctgagttaccaacaaactatactcagatgagtgtcaagatcattttgtttgggtttcagaagtgtagcmccttcctcaggaacactattttaacgtccctgatgtcctctttcttgttgaaaaacagtcttttaatagttttattttcttgctttccaaagtgctacaa

SEQ ID NO: 40733 - DNA, 201 bp, Homo sapiens
cagcagtgatttcaatgcaaaaagacatctcaacagaaggaggaataccaaacacaaatatctgatccatgtaggaatcattttttaaacgaacataccccattcatgaaaatgaacacctttcagatcacagtctctggttaagaatcgtgtcagggctaataggcactgttctgatataaatatttgtgccttttggta

SEQ ID NO: 40734 - DNA, 201 bp, Homo sapiens
ctctctctgccaggctttggtatcaggatgatgctggcctcataaaattagttaggaagaattccctctttttctattgattggaatagtttcagaaggamtggtaccagctcctctttgtacctctggtagaatttggctgtgaatccgtctggttctggactttctttggttggtaggatgttaattattgcctcaatt

SEQ ID NO: 40735 - DNA, 201 bp, Homo sapiens
aaattgttttgggaagtgttagctatatactttaatgtactttaccaaagtagtgttttggtgagctggacatactgattaaaaagcattattgcttcacyttaatatttaggtttcaattgcccctattttggtaccatcatgcatttactgtatgcttcacatgtcttaagaggcaaaagatacagaggttttaacctt

SEQ ID NO: 40736 - DNA, 201 bp, Homo sapiens
tcctcttaaatgactttgaagtcttgctaagggaattaagacttagggaaacaagtggtatttctctctctctctctctctctctctctctctctctctctgtagctcaaggtcatgacttagaagagaagggagatcgtgggaagtgatttatgttgatgatgccaaagtgtgaactctaggttcctggcccatgggtta

SEQ ID NO: 40737 - DNA, 201 bp, Homo sapiens
ccttgtctctttaaaaaaaagaaaaaaaaaattaaaaacaatattcatattgacttctagatcattaccaaacagtcctttctcttctgccctccgcccawacatttcacagcagggtatgaagcctttgccttccttgcctctattatatcctatcctcaccttccgttgtttttttgttttttgttttgagacagggtt

SEQ ID NO: 40738 - DNA, 201 bp, Homo sapiens
ggataagctttttgatgagctgctggattcagtttgccagtattttattgaggatttttgcatcgatgttcatcaggaatattggtctaaaatgctctttytttgttgtgtctctctctgccaggctttggtatcaggatgatgctggcctcataaaattagttaggaagaattccctctttttctattgattggaatagt

SEQ ID NO: 40739 - DNA, 201 bp, Homo sapiens
tgagaacccatgcacagcatgacagaggagtagcatggtgctggggtggcaccatgatcaataacttgaaggggcagcttgaggtagtcttggctctttcyctagccagtctgtggcttcagcaagcagcctcactttttaaatcctcagtttgcatattcataaagttaggtcatcgacttagcccttcccagctgtaca

SEQ ID NO: 40740 - DNA, 201 bp, Homo sapiens
ttcctcttaaatgactttgaagtcttgctaagggaattaagacttagggaaacaagtggtatttctctctctctctctctctctctctctctctctctctctgtagctcaaggtcatgacttagaagagaagggagatcgtgggaagtgatttatgttgatgatgccaaagtgtgaactctaggttcctggcccatgggtt

SEQ ID NO: 40741 - DNA, 201 bp, Homo sapiens
aaaaacaatattcatattgacttctagatcattaccaaacagtcctttctcttctgccctccgcccaaacatttcacagcagggtatgaagcctttgcctyccttgcctctattatatcctatcctcaccttccgttgtttttttgttttttgttttgagacagggtttcactctgtcgtccagtctaaactgtagtagca

SEQ ID NO: 40742 - DNA, 201 bp, Homo sapiens
aagctgacttgatcatggtggataagctttttgatgagctgctggattcagtttgccagtattttattgaggatttttgcatcgatgttcatcaggaataytggtctaaaatgctctttttttgttgtgtctctctctgccaggctttggtatcaggatgatgctggcctcataaaattagttaggaagaattccctcttt

SEQ ID NO: 40743 - DNA, 201 bp, Homo sapiens
gttcctcttaaatgactttgaagtcttgctaagggaattaagacttagggaaacaagtggtatttctctctctctctctctctctctctctctctctctcyctgtagctcaaggtcatgacttagaagagaagggagatcgtgggaagtgatttatgttgatgatgccaaagtgtgaactctaggttcctggcccatgggt

SEQ ID NO: 40744 - DNA, 201 bp, Homo sapiens
tcactctgtcgtccagtctaaactgtagtagcacaaccatggctcactgtggcctcaacctcctaggcccaacaaatcctcctacctcagcctctgtttasctaggactacaggtgcaccaccgtgcctggctaattatttttttcttttgtagagatgggggggtctcactgtcttgccagggctggtcttaaactcctg

SEQ ID NO: 40745 - DNA, 201 bp, Homo sapiens
tatgcaaacacctacacttcaaattagagtagatctcaccctccaagtagtagcttagtgtatgatcatttgggctcccttgctaggtggggaggcagagrccgcttcatccttctggtgctagtaacaacaatggctcatttggggacccttccctgagtgttttttttgtttttgtttttgtttgttttattttgtttt

SEQ ID NO: 40746 - DNA, 201 bp, Homo sapiens
ccacaatggttgaactagtttacactcccaacagtgtaaaagcattcctatttctccacaacctctccagcatctgttgtttcctgactttttaatcgccwctctaactggtgtgagatggtatctcattgtggttctgatttgtatttctctgatgaccagtgatgatgaggatttttttcatgtgtgtgttggctgcat

SEQ ID NO: 40747 - DNA, 201 bp, Homo sapiens
atgacatttaaaatataatagtaagatctaaccaaacatcagactcttcttgtgttgccttaaaggacacacacacacacacacacacacacacacacacacgctttctctctctttcatgtagtgaggggggaagagctggctgcctgctgtaaggccgcttgaaggttcagaaagcagcctccatttactgagcactgt

SEQ ID NO: 40748 - DNA, 201 bp, Homo sapiens
aaaagtgctcatcttgaagtagtctagaaatccaccagcagccactaaacccaacgtagatgagggaacacgggttgcatgtagctgtaaggcaagaagarggaatggagagaccgagagtgacatcagctggagaactaagggaggtgggaagtataaagaggagatttgaattggctgcatcttgtgaggcctgggcta

SEQ ID NO: 40749 - DNA, 201 bp, Homo sapiens
tttgtctgctgtttccctggtgctgcttggctctctgggatttttcctgctcaagagttgtctgcagaaaagtattccttaagcctgaacctgctttgaaracaggaggctataagtggggaggttcaagcgtgctggtgggtcaaaatgacaggtgcaccaccttggcatcccacctaaccttgagagcaggtggctaaa

SEQ ID NO: 40750 - DNA, 201 bp, Homo sapiens
atagggtagataagccagctagtcagaagtagatgttatatccataccttacctctttgtccaccaattttctgaaaatagagatcccaaatatttatttktcttagtgttttatatcctacccctctagttacattttttcaaatgtaatgttttatttctcccagttttattgaggtatgattgacagaaatcatgtat

SEQ ID NO: 40751 - DNA, 201 bp, Homo sapiens
ctactaaaaatacaaaaaattagccgggcatggtggcgggtgcctgtagtcccagctactcaggaggctgaggcagaagaatggcgtgaacccaggaggcrgagcttgcagtgagctgagatcacgccactgcactccagcctgggtgacagagcgagactccgtctcaaaaaaattaaataaataaataaataaataaaa

SEQ ID NO: 40752 - DNA, 201 bp, Homo sapiens
ttttttttcaaatgaaagtaatctgtgtccaatggtcaaaatatccacaattatggatacattaaaaagaaaaccctcagataacttttttaaatattttkatgactgtacatgtgtaaacatgtgtgcatataagactatataaacttttatgattgcacaaaaagatagactaataaccgtaagtgttttcctctgaaa

SEQ ID NO: 40753 - DNA, 201 bp, Homo sapiens
tgttcttccaaataaatatctatttcaattggcccaaaactcttgcagcccatggggtggccttgcagactgaacactgttgaaaaaccacaaaatatttmtcctgtctccagtttctggggaataaagcagtcatatcctcagaaagctctgaagaagctctcagcaaaggacggggagtcattgacactctgtctgcca

SEQ ID NO: 40754 - DNA, 201 bp, Homo sapiens
tttttttcaaatgaaagtaatctgtgtccaatggtcaaaatatccacaattatggatacattaaaaagaaaaccctcagataacttttttaaatattttgwtgactgtacatgtgtaaacatgtgtgcatataagactatataaacttttatgattgcacaaaaagatagactaataaccgtaagtgttttcctctgaaaa

SEQ ID NO: 40755 - DNA, 201 bp, Homo sapiens
ttgtgtcagaaacccagaaggactaaaactaacataaatgactatagggtccttgagagtagaaaccatctccttgccatcttgactttttttttttttttggatttactcataaagtcacagagatctaattgcaaggttacagattcaaatgcccatgaggccaggctggtcacttcaatgacaaaagtggacagagta

SEQ ID NO: 40756 - DNA, 201 bp, Homo sapiens
caaatgaaagtaatctgtgtccaatggtcaaaatatccacaattatggatacattaaaaagaaaaccctcagataacttttttaaatattttgatgactgkacatgtgtaaacatgtgtgcatataagactatataaacttttatgattgcacaaaaagatagactaataaccgtaagtgttttcctctgaaaaccaacag

SEQ ID NO: 40757 - DNA, 201 bp, Homo sapiens
taaacttttatgattgcacaaaaagatagactaataaccgtaagtgttttcctctgaaaaccaacaggtttttacaaattgtgtgcagccatgtattttakcatctcatttttcattaagcaaccatatgtttgctctgtttgtaccaagttcttgagaagagttcctttaatgccattaactccatagggtttgacatat

SEQ ID NO: 40758 - DNA, 201 bp, Homo sapiens
ccaacaggtttttacaaattgtgtgcagccatgtattttagcatctcatttttcattaagcaaccatatgtttgctctgtttgtaccaagttcttgagaaragttcctttaatgccattaactccatagggtttgacatatgcaacagcagtaagtattgaatgtggtggcaaggaggtgggtggtgattttttaaaaaag

SEQ ID NO: 40759 - DNA, 201 bp, Homo sapiens
cctggcacaagggagatatagaaccagtatctgtttactgaacgaaagatttaaaaacaggctgggcacggtggctcatgcctgtaatcccagcactttgraaggctgaggtgggaggatcgcttgagcccaggagttcaagaccagtctgggcaacatggcaaaatgctgtctctacaaaacaaatccaaaaaaaaatta

SEQ ID NO: 40760 - DNA, 201 bp, Homo sapiens
gaaccaggtgttaagttgggcattgaagatacaaagcagaaaaaaacaatgccaaccctcatggtgtttacagtctagtgtcaggacagggccataaatckatgattacagtttcacacaaaactgacagacaaagatttacccacagtaaagcatataggtaaatcttatattagtgggtgtgaaaggattgtgcctgca

SEQ ID NO: 40761 - DNA, 201 bp, Homo sapiens
tgtcataagtgtcatattcaaagatccataggttgagctgttgggttggacacatgaaatagaggggacaagatttcatctctttatttcccaccaactaytggcagcctttaccttgggaaccaccttggctatttctgccaggaaacactattgagagctccagtcactgctgttttaaatgagactttgggaattgaa

SEQ ID NO: 40762 - DNA, 201 bp, Homo sapiens
actagaatgagaaattcccaaagctaagtcctgatatcacatttctttgtcatgttttccggaaaagtccaagtccggttttaaggccactccacctttttggtctgggaggagtaacttaacctctctgggctcagttctctcctctgtaagacaggacattataaggccattgagagattttagatactataagtcagc

SEQ ID NO: 40763 - DNA, 201 bp, Homo sapiens
gaatcgcttggacctgggaggcagaagttgcagtgagccgagatcgcaccattgtactccagcctggtcaacagagcgagactctgtctcaaaaaaaaaaagaacacagaccatcacttctgctgactttcctctcttcttctctgtagacccagtaccgtagtagccactagttttgtacaaacatgaccccttttgttc

SEQ ID NO: 40764 - DNA, 201 bp, Homo sapiens
gatgacatttaaaatataatagtaagatctaaccaaacatcagactcttcttgtgttgccttaaaggacacacacacacacacacacacacacacacacacacgctttctctctctttcatgtagtgaggggggaagagctggctgcctgctgtaaggccgcttgaaggttcagaaagcagcctccatttactgagcactg

SEQ ID NO: 40765 - DNA, 201 bp, Homo sapiens
ttgaactcctagcctcaagtgacctcctgtctctgcctcccaaagtattggaattacaggcgttagccaccgtgcctggcttccatttgctctttaaccartatgatatccctaagctcaagctcttctgtttccagtttcccattggtgatttaccctttttatgttaccatctctggcccctagagcaaagcagttgct

SEQ ID NO: 40766 - DNA, 201 bp, Homo sapiens
ctgaaatattattagttctgttttatacatacacatgattactttttttaaaaatactgatttttttccaagtgcatccttttctgctgctgaactcagcytacgaatcaaaaggtgactttcactttgtttactttattctactccgtatacccagcacctgtgccagtgcccggcacctactaggtgctcagtaaatac

SEQ ID NO: 40767 - DNA, 201 bp, Homo sapiens
gtgactgacactattagcaatgtgctcagagccgtgttttaactcagctagggggagctgccaggtcctattgaaactacccaacacttgctcctttctgstaccagatattgctttccttttgcaacctgaaattggtaggaaacaaagaatgaccttggagttgcatcatctatgagactttcaaaccaaattattacc

SEQ ID NO: 40768 - DNA, 201 bp, Homo sapiens
tagcccttcccagctgtacagtgctgtgggagtaagtgtcataagagaagttgggtacttcttaatttctactgacttttcagtgggatatttgtatacaytacaaattaacattttttcatctgccttgtctgctttatcttaaaatctctgaatatgcattttaacaaaaagtggaagtgaattgaaaatctagttaca

SEQ ID NO: 40769 - DNA, 201 bp, Homo sapiens
acaccatcactacagccaggaagcccgttgccagcccctctgtcccaggcactatttgataggatgttttttggtttggggacttttttttttttttttttaaagagacagtctcactccactctgttgcccaggctggagtgcagtggtgtgatctcagcccactgcaacctccgcctcccagattcaagcgattttgat

SEQ ID NO: 40770 - DNA, 201 bp, Homo sapiens
ctcattgcagttaaaaatcatccaagtaagagtccagaaggcactaactcttaacaacaacaacaaaaaacaaaaactgcatagaggcagggacagggctsaagaggtaggtttgcataagattgtgaacgcccttgtatgtcatcaaaaggaactttatttacatcataagcagtgagcagccacaaagaatttttttta

SEQ ID NO: 40771 - DNA, 201 bp, Homo sapiens
atgtaagtgttctgagcacatttaaggtaggccaggctaagctctgatcagtaggctagttgtatgagatgcattttgacttacaatattttcaggttacratgggtttactgggatgtaaccccactgtaagcagaggagcatctgtgtacgtatgtatgtcttctataaagatctgtgcatatatgacccagcactcac

SEQ ID NO: 40772 - DNA, 201 bp, Homo sapiens
tttgtgtcagaaacccagaaggactaaaactaacataaatgactatagggtccttgagagtagaaaccatctccttgccatcttgactttttttttttttttggatttactcataaagtcacagagatctaattgcaaggttacagattcaaatgcccatgaggccaggctggtcacttcaatgacaaaagtggacagagt

SEQ ID NO: 40773 - DNA, 201 bp, Homo sapiens
gaaagcctctggctgcttccactcatggttgaaggcaaaggacagccagcatgtgcagaggtcacatggcaagagaggaaaggaggtgccaagctccttawaacaaccagctctcaggaactaatagagtcagaactcactcattgccatgaagatgcaccaagccattcttgagagatttgactccgtgacccaaacacc

SEQ ID NO: 40774 - DNA, 201 bp, Homo sapiens
atcctttttttttaatcggagggtgggctggtacactttaaattgcattttaaggctgggcgtggtggctcatgcctgtaatcccagcactttgggaggcygaggggaatggatcacctgaggtctggaggtcaagaccagcctggccaacatggtgaaaccccgtctctactaaaaataccaaaattagccgggcatggt

SEQ ID NO: 40775 - DNA, 201 bp, Homo sapiens
tagctcactgcagcatccaacttctcctaggctcaagcagtcctttcacctcagcctctcaagtacctgggactataggcacgtgccaccacactgggtgttttttttttttttttgtagaaacaggatcacaccatgttgaccaggctggtctcaaactcctggcctcaaatgatcctcctgctttggcctcccaaagtg

SEQ ID NO: 40776 - DNA, 201 bp, Homo sapiens
tcacaggtacacaaggagtacttataatttctatggtaagcatgattatgacagaaaatgaatcatgccacctgtgctgtgtcagttagcaacagaggaakaaaaatcagaaggatggagaaatctaagagtgtggcatcagtatcagtgggggggtgactatgacagtatttcctcagaactaagacacgtctttgtttt

SEQ ID NO: 40777 - DNA, 201 bp, Homo sapiens
ctccccttcccaggttcaagcaattctcctgcctcagcctcccaagtagctgtgactacaggcgcctgccaccacacccagctaatttttgtatttttttrgtagagatggggtttcaccatgttggccaggcttgtctcaaactcctgatctcaagtgatccatcccccttggcctcccaaagtgctggaattacagaca

SEQ ID NO: 40778 - DNA, 201 bp, Homo sapiens
gctgatatcttgaacttggatttctcagccttcaaaactgtgagaaatttacaagccacccagtttatgttgtgtgtgtttttgttttttatttctctcgctctctctctctctctctctctctctctctctctgtctctctagagaggcacggtcttattctatcatccagactagagtatggtggcacaatcatagctc

SEQ ID NO: 40779 - DNA, 201 bp, Homo sapiens
ttagcaacagaggaagaaaaatcagaaggatggagaaatctaagagtgtggcatcagtatcagtgggggggtgactatgacagtatttcctcagaactaaracacgtctttgtttttttttaacatatctgaattttatatttgatttttgctgccagccaggggacaggcatgacatgtcatctcctggacatatgtgaa

SEQ ID NO: 40780 - DNA, 201 bp, Homo sapiens
ggcgtgcagtggtgcagtttcggctcactgcaacctccccttcccaggttcaagcaattctcctgcctcagcctcccaagtagctgtgactacaggcgccygccaccacacccagctaatttttgtatttttttagtagagatggggtttcaccatgttggccaggcttgtctcaaactcctgatctcaagtgatccatcc

SEQ ID NO: 40781 - DNA, 201 bp, Homo sapiens
tgctgatatcttgaacttggatttctcagccttcaaaactgtgagaaatttacaagccacccagtttatgttgtgtgtgtttttgttttttatttctctcgctctctctctctctctctctctctctctctctctgtctctctagagaggcacggtcttattctatcatccagactagagtatggtggcacaatcatagct

SEQ ID NO: 40782 - DNA, 201 bp, Homo sapiens
ttttgtttttgagacagggtctcaatctgttgcctaggctggcgtgcagtggtgcagtttcggctcactgcaacctccccttcccaggttcaagcaattcycctgcctcagcctcccaagtagctgtgactacaggcgcctgccaccacacccagctaatttttgtatttttttagtagagatggggtttcaccatgttgg

SEQ ID NO: 40783 - DNA, 201 bp, Homo sapiens
ttgctgatatcttgaacttggatttctcagccttcaaaactgtgagaaatttacaagccacccagtttatgttgtgtgtgtttttgttttttatttctctcgctctctctctctctctctctctctctctctctctgtctctctagagaggcacggtcttattctatcatccagactagagtatggtggcacaatcatagc

SEQ ID NO: 40784 - DNA, 201 bp, Homo sapiens
actaggagagaaagcagattcaggtactcagagaaaaactatcataacaacatttatgtgaggtctcgaggcctaaatagagggatagaagcagaaaacayggaacgaaaatgaataagaaactaaatgatttaggccaagggataaaggtaagaggttaagtcattgacagcaccagttgcctatttaaatatgtctctt

SEQ ID NO: 40785 - DNA, 201 bp, Homo sapiens
agtgggggggtgactatgacagtatttcctcagaactaagacacgtctttgtttttttttaacatatctgaattttatatttgatttttgctgccagccargggacaggcatgacatgtcatctcctggacatatgtgaacatcaaaagggcagacacctgcaggggcggaaaagatttcctcacccatcacaaggtcccc

SEQ ID NO: 40786 - DNA, 201 bp, Homo sapiens
attacctttatcctctcatgtagctaatatttggggcagggaccagggggagttttgtttttgtttttgagacagggtctcaatctgttgcctaggctggmgtgcagtggtgcagtttcggctcactgcaacctccccttcccaggttcaagcaattctcctgcctcagcctcccaagtagctgtgactacaggcgcctgc

SEQ ID NO: 40787 - DNA, 201 bp, Homo sapiens
acttgctgatatcttgaacttggatttctcagccttcaaaactgtgagaaatttacaagccacccagtttatgttgtgtgtgtttttgttttttatttctctcgctctctctctctctctctctctctctctctctctgtctctctagagaggcacggtcttattctatcatccagactagagtatggtggcacaatcata

SEQ ID NO: 40788 - DNA, 201 bp, Homo sapiens
attctaaatgtaaaagttttggaaaccttagccaacctacttcaattctatatcccttattaaatatatacaatagtgatagataataaaaatgtgtctargtctcagctcttatgaaaaggataaaattaaaatttgaagtgttaagaaagaattatacatattttaattggctgctttttttcttcctggaagtaataa

SEQ ID NO: 40789 - DNA, 201 bp, Homo sapiens
gagggggtgcgaggagaccagatgggggaagctgaggatattcagagggcccgtcaggaagacactgatatggtaagctaaaaagttaaaaaaaaaaaaawtttttttttttttgaggcggaatctcgctctgttgcccaggctggagtgcagtggcgcaatctcggctcactgcaacctccgcctcctgggttcaagaga

SEQ ID NO: 40790 - DNA, 201 bp, Homo sapiens
ggcatatatgtttgatgaaatatcataccctgttgttatcctggaagaaagcaagcagtttgtggaaatcatgaaaggctctgtgtgtgaaggcgcctcaragtgacacaatatttaaggccctttcaaacctgcacatcctcagagggagagggtaggtggcccctgcagttatcaaagctgttgaggagttcccaacta

SEQ ID NO: 40791 - DNA, 201 bp, Homo sapiens
tgagtcttaatttttaataagtatctgaactgtggttagtatatgtgcattgaaactcctcccattcttgatattttcttttattcctttttctataattktgaattttacatatgttttcacattttattttatgcatctgtaaaaactttcatttcctcataggattaaagcaagatgtagattcttctctcaaccttt

SEQ ID NO: 40792 - DNA, 201 bp, Homo sapiens
atatttaaggccctttcaaacctgcacatcctcagagggagagggtaggtggcccctgcagttatcaaagctgttgaggagttcccaactaacccacagayatctgcctcaacagatcttctgacgcagccacccaggcaaatggatatcagccaaaaagagcccaagggtccctggtttaaagcaccatcaaagggccca

SEQ ID NO: 40793 - DNA, 201 bp, Homo sapiens
acattcagaccataacatgttcatttgtaaacagatggttcccaacttactttttttttttaatcagggcagccttcattttacaaagcagaatgaaagcmccgctacttttttttttttaactttctgatattgtgaaagcaatatgcatttggtagaaatcatacttcaaattgattttgaattttgacctttttccag

SEQ ID NO: 40794 - DNA, 201 bp, Homo sapiens
ctctgtgtcattgcatattctctgtagtgtcattgtaagtgacaccatagaattcttttgtttgggtttatgctagtttatttaatgagttattcattcartgatttcttctagttatttaatgttataaataatgtcagagacatttttgtgcccatactgtgtgtggctctgtgtgtgtgagttcttttaacaaggttt

SEQ ID NO: 40795 - DNA, 201 bp, Homo sapiens
cttggattcacacccaaattcttctcacccaaagcaccactgttgacctgacctattaagtgttagttcccttcattccttcccaggagaacctctctgtraaacctcgtatttaagcttccttgatacccatcagcaccccaagccttactcccagcagaattttcagagcccctcaaagtgatccagaattcccaccag

SEQ ID NO: 40796 - DNA, 201 bp, Homo sapiens
catcaaaaggacagggtcggggagccctgctgagatcaagggacacaggaagaagagagtaaaaaaacagcttgacacaagtctcttggctttccctcttmgcagtttcttactccaatgacacccctcccacatctgacataactagactgcttggaagagaatgcttggagttcaccacagacgttggcttgtataaat

SEQ ID NO: 40797 - DNA, 201 bp, Homo sapiens
ggtggctgcacctgcacccaggaggacagggctcctgtcccaccaacttgggagctcccacctgttcccagctcccaccagctccatggagcacacaacastggctgtgccacccctgctacagccagcatctttgcagcagctggtccagacaggctgctactgccatcaataagctgttcttcactgtgctgcaggaac

SEQ ID NO: 40798 - DNA, 201 bp, Homo sapiens
gaactacccccttaccttctgtagagagatagacaatagaacttccttatcttctatagcaagacagacaatagaaaggagtaggctcccttccccttgcwtatattgtgggggtgatgatgaggatgttgttccctttatcaatgagtttttcccataggaaacccatgggaagaagcatttcctctgaaccagctctag

SEQ ID NO: 40799 - DNA, 201 bp, Homo sapiens
ggtgttctgtaagacttatctcactaatttgatttgatgtgtgactttagagaagttttatagccctgatgttactataagcaggtgaaatgatacctgakatttcatgaactggcaaattcaacatagcaacataagccagaagagaagatggcacagatatgcaaattattgtgttaattcacagcacatgagtattcc

SEQ ID NO: 40800 - DNA, 201 bp, Homo sapiens
tgcgaaactcgactgcatgatttgtggtagtgggggactgcattcatgctttcccctaaaaaagaaaaaagaaaaaaatataaatatatatatattttacmtatatgttactagaatatatattttatataatatatattttaaaatatatctttatatatccatatatacatagtttcaacatgtcaataccaatatttc

SEQ ID NO: 40801 - DNA, 201 bp, Homo sapiens
ttgctatgcagttaagtttttaattattgggtgtgctttcaaaaatttttatttaattttcaggagtcaaaattatttttaaaaaataatttgaaagtttraaactaaattatcagtaaatctttaactacaaaaacatatatattaagttttgaaatgtccatggaatttgaagctaacttaaaaaaattgttgcccagg

SEQ ID NO: 40802 - DNA, 201 bp, Homo sapiens
aaacttgtctgggtgccaagtacacaaagacaagacaaacctcttttcctgaagttgtctagcaggagtcccatccagccgaacaagccactgtaggaagscttccccaggacatgagtcaggagctgaaccataaagcagccagccagacagtggagagctggaaaggaaagcgagtgtgggtgcatggaagggcagagt

SEQ ID NO: 40803 - DNA, 201 bp, Homo sapiens
ttgtaccacccattactctgcagtttacttttctcacttactatatcatggataactccaggtcacaaaatagaatttcactcctttttttttttttttttgagacagagtctcactctgttgcccaggctggagtgcagtggtgcaacctcggctcactgcaacctgtgcctcctgggttcaagcaattctcctgcctca

SEQ ID NO: 40804 - DNA, 201 bp, Homo sapiens
aggcttccccaggacatgagtcaggagctgaaccataaagcagccagccagacagtggagagctggaaaggaaagcgagtgtgggtgcatggaagggcagrgtaggatgcgcctgggaaactgtggggtgctctccatgcattgcttccacttcagtgctacttaggaaaacgctcacctgtagtgaccttctaggtgcag

SEQ ID NO: 40805 - DNA, 201 bp, Homo sapiens
gaaaaattaactttctctcccacttccataacttccttgccactcattgaaacataattatatgttatcaagctgctaggtgtcgaggtggtcagttaggwcaatgaaccaaacagaaagtaacaaccaaacctttcttctcttactgcagtagtcctggcaagaggcaaagaggaaagtgctcttccatttttccccata

SEQ ID NO: 40806 - DNA, 201 bp, Homo sapiens
gagaattaaatctagcaaaggagataagcaacctaaggatcaggcgataaggggtgtcattggagtacacatgtgtgagggacaggatgagagggctaacyaaccagtgttctggtttgggggaagttttcttggggagatgacagtggttcatttcttcaaacaaaatttgttagacatctgtcctactttgtgacaggt

SEQ ID NO: 40807 - DNA, 201 bp, Homo sapiens
aggcattcgcgacgagcctaggcaacatagtgaggcctcgtctctataaagaaaataataataatttaaaaaattaaaaataataaaattttttaaaaagwaaaattaactttctctcccacttccataacttccttgccactcattgaaacataattatatgttatcaagctgctaggtgtcgaggtggtcagttaggac

SEQ ID NO: 40808 - DNA, 201 bp, Homo sapiens
aacatgtactcttctcacaaatatgtactcttctcctctttgtctctccctctcttccccttcttgccttctgctgcctttttctttctttcatttttcayagaagggccctaattggctcagctcagagatcaggtggccatccctaaaccagtcacctctggccatggaaaaaccatatgaatgggacggaggagggtg

SEQ ID NO: 40809 - DNA, 201 bp, Homo sapiens
tgtgagccgtcatgcctggtctagacttctttatatggctaagattaacaagatctaaccttcaatcaaagagctgatgaattctttagtcatgcatgcatttaatccctcacttggaacctcttcttatacttttattttgaatgtgattggcagttctaaacctatttttctgggtcctttccataaagcacaagtgat

SEQ ID NO: 40810 - DNA, 201 bp, Homo sapiens
tttttttttttttttgatatggagtttcattcttgttgcccaggctggagtgcagtggcatgatctcagctcaccacagcctctgcctctggggttcaagygattctcctacctcagcttcccaaatagctgggattacaggcacctgccactatgcctgactattttttttttttttcattttggtgcttttgtcaagac

SEQ ID NO: 40811 - DNA, 201 bp, Homo sapiens
tagccttgactttctgggctcaagtgatcctcccatctaagctttctgagtagctgggactatgggcatgtaccacaacgcctggctaattttttctattwttttgtagagacgagggtctcagtatgttgcctaggctggtcccaactcctgggttcaagtgatcttcctgccttgacttccccaagtgctgggattata

SEQ ID NO: 40812 - DNA, 201 bp, Homo sapiens
agttcaagtttggtcacattaatagtgtgtggtgtgattccctctgggacttttgtctgtttgttctcatctcttttgtctgtttgttctcatctctgtckaaggggcctctccaggtgacttgtcacgtgcatgcgaagctgtaacagaatactgagaatctaagaaatagacctcagactctgttgtcttttttcttct

SEQ ID NO: 40813 - DNA, 201 bp, Homo sapiens
cttgggtgcctagtgaaatatatgtatcagactgttacagaatgctcaggctgcaggggaagatcacacctgttcacactttgtttttgtttttgtttttkttttgagacaggatcttgctctgttgcccaggctggagtgcagtggcatgatcatagctcatcatagccttgactttctgggctcaagtgatcctcccat

SEQ ID NO: 40814 - DNA, 201 bp, Homo sapiens
cccccatctctacaaaaaaaaaaagtcagaaaaattagccaggtgtagtggcacgcacctgcggtcccagctatgctggaggctgaggtggaaggatcacytgggcccaggaggtggaggttgcagtgaattgagatcacgccactgcactccagcctgggtgatggagtgagcctctgtctaaaaacaaaaacaaacaaa

SEQ ID NO: 40815 - DNA, 201 bp, Homo sapiens
ccttaagagtcattcataatgttttatcctgaaatattattagttctgttttatacatacacatgattactttttttaaaaatactgatttttttccaagkgcatccttttctgctgctgaactcagcctacgaatcaaaaggtgactttcactttgtttactttattctactccgtatacccagcacctgtgccagtgcc

SEQ ID NO: 40816 - DNA, 201 bp, Homo sapiens
aggttaactgtcagaacctaacaacccagaaagggtagatgatggcaggcccttcctcacacgtgtgtgtgtgtgtgtgtgtgtgtgtgtgtgtgtgtgttctacactgaaacacatttaactacatgagtgggtggattccatgctacagggctggctgattgcttaggaattaaagatgggaatgaatttctgcactcc

SEQ ID NO: 40817 - DNA, 201 bp, Homo sapiens
tcaggttaactgtcagaacctaacaacccagaaagggtagatgatggcaggcccttcctcacacgtgtgtgtgtgtgtgtgtgtgtgtgtgtgtgtgtgtgttctacactgaaacacatttaactacatgagtgggtggattccatgctacagggctggctgattgcttaggaattaaagatgggaatgaatttctgcact

SEQ ID NO: 40818 - DNA, 201 bp, Homo sapiens
aacatttgctttctttgctggataaatgtactcataagtcaagaccatcctggctaacacggtgaaaccccgtttctactaaaaatacagaaaaaaaaaaatagccaggtgtggtggcaggcacctgtagtcccagctatttgggaggctgaggcaggagaatggcgtgaatccgggaggcggagcttgcagtgagccgag

SEQ ID NO: 40819 - DNA, 201 bp, Homo sapiens
tggcccctcagccagcatatttgtgccgtggacttctactcaaccttatgtgccattcttggttagttttctccacttgcataacattcagagtgcagatrgtaaataacttttggttagtaaaaatatgctttccttgggtaggattttaaaaataaaataaaaatgagcaaaactcaatttctttctttctttcttttt

SEQ ID NO: 40820 - DNA, 201 bp, Homo sapiens
atacatacacatgattactttttttaaaaatactgatttttttccaagtgcatccttttctgctgctgaactcagcctacgaatcaaaaggtgactttcastttgtttactttattctactccgtatacccagcacctgtgccagtgcccggcacctactaggtgctcagtaaatacttgcaaatgaatccaatagaaccc

SEQ ID NO: 40821 - DNA, 201 bp, Homo sapiens
agcctttcaggttaactgtcagaacctaacaacccagaaagggtagatgatggcaggcccttcctcacacgtgtgtgtgtgtgtgtgtgtgtgtgtgtgtgtgtgtgttctacactgaaacacatttaactacatgagtgggtggattccatgctacagggctggctgattgcttaggaattaaagatgggaatgaatttc

SEQ ID NO: 40822 - DNA, 201 bp, Homo sapiens
tttctccacttgcataacattcagagtgcagatagtaaataacttttggttagtaaaaatatgctttccttgggtaggattttaaaaataaaataaaaatragcaaaactcaatttctttctttctttcttttttttttttttttttgagacggagtctcgctcttgtcacccaggctggagtgcagtggcatgacctcag

SEQ ID NO: 40823 - DNA, 201 bp, Homo sapiens
tccatctccaaacattctaagccccaaaactcccagctggatagagggtgtttcgcagcctcttcagactcaccctggggactgatccttgctccacaacyctgacttgagcctgctgttgttaagcatgcctcagattcactctccttcacagtgcagctctgtctttccagcagacagtttccatccaaaggcaaagtg

SEQ ID NO: 40824 - DNA, 201 bp, Homo sapiens
tatacaaataagattaagaaaagaaagacatgatattctcaccatccaaagacgatcactggcttgagcctctcatcatccaggtcgctccttggcctgttcttgtgtgatttccctgttcacatgtggcatctctcagaactgaattgacctgcgtggtagagagctgaaggccacccatcttgtaaagataacatcctt

SEQ ID NO: 40825 - DNA, 201 bp, Homo sapiens
aatccaggaggtggaggttgcagtgagccaagatggcaccagtaccctccagcatggacaacagagtgagaccctatctcaaaaaaaaaaaaaaaaaaaaagtaccacagttcggtggttttcaatatattcacaaggttgtctaaccactaccactaattctagaactttttatcaccccaaaaagaaacactgtattta

SEQ ID NO: 40826 - DNA, 201 bp, Homo sapiens
ttaactggggtcatgccaagctcttaaaagccacaagtagcatttgggctccaggcttatgtctgttcctgtccagccaggcctgggtggtgtttcatccyaggcctcctgagatttaagctactgctgagattttgttataggaaggcaagaagggggaccgaagatgtttctgtgctccggcctcctcccaaacccaac

SEQ ID NO: 40827 - DNA, 201 bp, Homo sapiens
gaatccaggaggtggaggttgcagtgagccaagatggcaccagtaccctccagcatggacaacagagtgagaccctatctcaaaaaaaaaaaaaaaaaaaaagtaccacagttcggtggttttcaatatattcacaaggttgtctaaccactaccactaattctagaactttttatcaccccaaaaagaaacactgtattt

SEQ ID NO: 40828 - DNA, 201 bp, Homo sapiens
ttgggctccaggcttatgtctgttcctgtccagccaggcctgggtggtgtttcatcccaggcctcctgagatttaagctactgctgagattttgttatagraaggcaagaagggggaccgaagatgtttctgtgctccggcctcctcccaaacccaaccagcccctgtggaatgtgcctctgccgggctaggacttggttt

SEQ ID NO: 40829 - DNA, 201 bp, Homo sapiens
atttatatgccgtacagttcacccatttaagatatacaattttggccaggcatggtggctcacacctgtaatctcagcactttgggaggccaaggagggcrgattgcttgagcttatgagttcgacaccagcctgggcaacatggcaaaaccctgtctctaccaaaaatacaaaaaactagccagatgtggtgacacatgc

SEQ ID NO: 40830 - DNA, 201 bp, Homo sapiens
gtttttaattgagatatgatttatatgccgtacagttcacccatttaagatatacaattttggccaggcatggtggctcacacctgtaatctcagcacttygggaggccaaggagggcggattgcttgagcttatgagttcgacaccagcctgggcaacatggcaaaaccctgtctctaccaaaaatacaaaaaactagcc

SEQ ID NO: 40831 - DNA, 201 bp, Homo sapiens
ctgaaagttaatattctgtgacccactgtaagagttacagatgccacagacctgccctgtgccatccatgtgttcttttttgtttttgtttttaattgagrtatgatttatatgccgtacagttcacccatttaagatatacaattttggccaggcatggtggctcacacctgtaatctcagcactttgggaggccaagga

SEQ ID NO: 40832 - DNA, 201 bp, Homo sapiens
atgtaggcaagaaactatggtgctagggctctgacagcagggaaggtgttgaaatctgaggattctggatttgtttgaaaggtagagatgacagtatttgrcataatgttaatagacaaaatactcaatccttgttgtgttactggaaaattgagaaggtgacaagttctagcaaagaaaagtatcaaaaagctttgccac

SEQ ID NO: 40833 - DNA, 201 bp, Homo sapiens
tctcagaggtggggggtgttcttgctgcaggccacatgaccagggtgatgatggggaacagagaagaaggtcagcaggaagtgagctaggagttttaaagsgaggaatccaaaagcaccaccaaattctaagaaaatgctgagaatgacatcctgggaaagagtgaaaaagcaatctgaacctaggctgaagtcatcgggg

SEQ ID NO: 40834 - DNA, 201 bp, Homo sapiens
atgtgccttaggagcaagagggatttgaaggaatgtcgtccactggaggtggtatgatcaggagagccagcttaggttcaataaggcaggctcaattagtratctgttcttgttgggtaaggttcctagattgggtgaatactgtatgcatagatatattctgagtttgtaagaaatcggattgtttcttctctcagcctt

SEQ ID NO: 40835 - DNA, 201 bp, Homo sapiens
atcacctgattctgaccctttttgttatcagcaaggatgccagggcccagagttaaagacaattaacagcccactgtggagttggcacctataatcacagrttcccaggctggtgctggtgctgtttctgccacaacacacaggctcctaccaccaattactcacatatatgtgaatttcctccaaagccatgaaccttct

SEQ ID NO: 40836 - DNA, 201 bp, Homo sapiens
caactccctataaaggaagaggtagtcagtgtggtgagtggatggggtctcagggaaaatgaaatccctagcagtcggtgtcagggcagcaggtcactaaytgagtgcaaaccttttttaaaatgttgtttatcccctacagggcatacaaaaccattgaggatgaggacttgaagttcccccttatatatggagaaggca

SEQ ID NO: 40837 - DNA, 201 bp, Homo sapiens
ctcacagttttggattcgtgatgagaatactgttgctgggtcacttcattattacacagaccctaaggccagaaacccatctcccctttttgctaattatscatatgccaacttatttcctccctcttcaagcatataaagacagtattttctggtttggtaaaagacacacacacacaattctgtagggagaacaactcc

SEQ ID NO: 40838 - DNA, 201 bp, Homo sapiens
tgtctgtttgttctcatctctgtcgaaggggcctctccaggtgacttgtcacgtgcatgcgaagctgtaacagaatactgagaatctaagaaatagacctyagactctgttgtcttttttcttcttctaatgacacagaatccagctgtctgagaaggatgcaattatgtgaggaaatgcctcctgctggcactaattcct

SEQ ID NO: 40839 - DNA, 201 bp, Homo sapiens
tggtgaagacaccggtggattccatgatatactcagcaccagcattgccccatctgattttggagggatctcgctcctggaagatggtgataggattttcrttgatgacaagcttcccattctcagccttggcagtgccatggaatttgccacagacaaaatcatactggaacacacagaccatgtagttgaggtcaatga

SEQ ID NO: 40840 - DNA, 201 bp, Homo sapiens
tgcgaagctgtaacagaatactgagaatctaagaaatagacctcagactctgttgtcttttttcttcttctaatgacacagaatccagctgtctgagaagratgcaattatgtgaggaaatgcctcctgctggcactaattcctgagctttgaattgttggtttgggtcctggcaaggtatttttgaaaactcaaactgcc

SEQ ID NO: 40841 - DNA, 201 bp, Homo sapiens
acattcccaaatgtcaccagctcacctgagtcttagtattccctggcctggaccacctctttgtagatgatgactctcctccctcaggaatttattttgtrtatttataaatatacaaaatacgttcatgtacatgtttccttcatgaaacatttgtttaaaaaaactgtgattacatatgcagtatatgttacttatgta

SEQ ID NO: 40842 - DNA, 201 bp, Homo sapiens
cctggcaaggtatttttgaaaactcaaactgccatataatcaggatagttgactctatcctcagtgcattcattttacaagtgacaaagtggagactgttratggtgcacaggttttccacgatcagaatctaggctttcttgcttctagtatgttcttactacaagcaggttagtcttttcaaacatggtttgccgtatt

SEQ ID NO: 40843 - DNA, 201 bp, Homo sapiens
ccctgccttgcagaccttggggagctgtctaggctaggaattcaaaactgccccaaaaatgccatagaagggataaagactcaggccagctttggaactaratatggctatatggcttgaaggtttgtaccaataaatgagtattacatgttaatataagatgatgtagctcttcagccacaggggtataaacctggctag

SEQ ID NO: 40844 - DNA, 201 bp, Homo sapiens
tagaaattgggacacagaaacatgggtcttaaatgatagagctgcttccgagtgttttctggagtggtgttatggtaggaagtgcctttcaataattctaytgtaaagacaaccttacaacttgaaacttgccccaagaaagacacttgaaaatagtagatctatgatggtacatttctggtgaatttactagagtgtgtt

SEQ ID NO: 40845 - DNA, 201 bp, Homo sapiens
tagtcatagacccaactcttctacaccagatccaggctcctcctgtgcctggatctcaaggcccagcccctttctacatctggtctccactgctgcatccyctctgtgcgggcctgtctcctcactctccacatggggtcttcaatccctgttcacgctcatctcagggcctttctcaggccattttcctcctctcccttg

SEQ ID NO: 40846 - DNA, 201 bp, Homo sapiens
tagtctcgctctgtcacccaggttgaagtgcagtggcacaatcttggctcactacaacacctgcctccccagttccagcaattctcatgcctcagcctccygagtagctatgactacaggcacatgccaccacgcctggctaatttttgtatttttagtagggacgagtttcctcatgttgcccaggctggtcttgaactc

SEQ ID NO: 40847 - DNA, 201 bp, Homo sapiens
ggaattggcctaactattaggatgacatttaagtcgctccaggttaaattgtaggacagagttagatattggaattcctgtatatatttagtggggtctgrtgagaaagagcctaaacactggctgatttgggaaaggtctgatagagaaaaaggcacatgtaccctgactatgccttcagctccagccacctctctaagc

SEQ ID NO: 40848 - DNA, 201 bp, Homo sapiens
ctcttgcaacatgtgggttaccataccctccctctttcccctccagcccacttttcgcctttaaatgttgaagccctcaaattcatctttggagaaaggcaccgatcacagactgtttctgtgattccatgtttttttctcccaggcattccttaacttaagttggcaaaatgaacttttaaatcaattgagacatgtctt

SEQ ID NO: 40849 - DNA, 201 bp, Homo sapiens
tgaggcttctttgcaagtatgcctattttctaaatttggaaaaaatctgtgtatttgagccctgaaaaagacagtctcttagcaacacgtgacaacaaagwggaacaaattaagaagtgtgttgtgatttgtgtatgtttgcactgttttgaaaaccaccctaaaggtaagtatttttaaagctgtttataacatttggta

SEQ ID NO: 40850 - DNA, 201 bp, Homo sapiens
agctggcaggtcatcattgccaccagcatttcaaagacacatggtccttccaaatggactgcaccaatttctcaatgttaatagatcatctaaaaaaaaaagctgtattatatactttccagaccctttgtttaaatgagaccttacaacagaggcccagtatgtaaaacagataggaacacttgtgatgtagagcaggtt

SEQ ID NO: 40851 - DNA, 201 bp, Homo sapiens
ccctgggctctgcccactagatgcctgtagcacccttacctggctgctgcaaccaaactgtcttcagacattgtcaaatatcccctgcagtagaaccagtrctctaaacttaaagtgttggtgctagcagataaatgtgcaaaatgagattataacaatgatgtggatgaatggagctagaaaagatccttatgtctcatg

SEQ ID NO: 40852 - DNA, 201 bp, Homo sapiens
ttaccaggttagatgtggacaagatgctgaattcaagtcagcacactccaaaggcccgtgtgtgtgtgtgtgtgtgtgtgtgtgtgtgtgtgtgtgtgtgtcttcacaaagtttataatgataatttagttgctttgggacacactgggcagcctgtaatattctttccagctctcgaattttgtgattttttttttttac

SEQ ID NO: 40853 - DNA, 201 bp, Homo sapiens
actaattgttatattaccttatgtgtgaaagtgagtccattgaaaattcacttgtgggaaatggaatataggtgatcaacaatttagccatagtattagayacccttttgcattttgaatgagtatctctgaataggaatatgtggcctataaagtccacatttgtgaataatggggtgtggttaaagttataatcatttt

SEQ ID NO: 40854 - DNA, 201 bp, Homo sapiens
agccgggcgtggtggcgggcgcctgtagtctcagcaactcaggaggctgagacaggagaatggtgtgaaccctggaggcggagcttgcagtgagccgagaytgtgctactgcactccagcctggacgatagagcgagaccccgcctcaaaaaagaaaaaataaagagggcttctgccttacctctttcttctttatttaaa

SEQ ID NO: 40855 - DNA, 201 bp, Homo sapiens
aaactcaatttctaatgacctgtcatgcatgcacgattttgattgtaaacaagtcaataaggagattgtcctgtactcatcgtcaatactttttaatcttrtgtactacattttaaaataaagggaatgttaatttcttttctgccttgagcttttaaaaattatcttaattgatgttgccctgatagcttcagaggctgg

SEQ ID NO: 40856 - DNA, 201 bp, Homo sapiens
cttaccaggttagatgtggacaagatgctgaattcaagtcagcacactccaaaggcccgtgtgtgtgtgtgtgtgtgtgtgtgtgtgtgtgtgtgtgtgtgtcttcacaaagtttataatgataatttagttgctttgggacacactgggcagcctgtaatattctttccagctctcgaattttgtgatttttttttttta

SEQ ID NO: 40857 - DNA, 201 bp, Homo sapiens
accatgtcggccaggctggtctcgaactcttgacctcaggtgatctgtctgcctcagcctctcaagtgctgggattacaggtttgagtcaccgtgcccagyctatacttcatatttcgtgataagcaatcaactagtacaaattcagtatctgtaagagatttcatctcactgatttgccagggacgggggtcaccaggca

SEQ ID NO: 40858 - DNA, 201 bp, Homo sapiens
acaggtacacgtttaaattctccaggtcacacagagcactattgagattcaggctggaatgatacagccttctgtgtaacaagtacttactggataaacaraggagacttagactagaacatttttatgttgcttttttgggaactgagtttcagagttgaggtttttgacttggcaattcatttgagaaagaaccgctga

SEQ ID NO: 40859 - DNA, 201 bp, Homo sapiens
tcttaccaggttagatgtggacaagatgctgaattcaagtcagcacactccaaaggcccgtgtgtgtgtgtgtgtgtgtgtgtgtgtgtgtgtgtgtgtgtgtcttcacaaagtttataatgataatttagttgctttgggacacactgggcagcctgtaatattctttccagctctcgaattttgtgatttttttttttt

SEQ ID NO: 40860 - DNA, 201 bp, Homo sapiens
agcaaacttttaggaaacctgtagagttatttatgaaaaaaacaatgaacaacaacaacaaaaaaagcatttcctctttgcagttacacttggcagggctraaaaatgagcctaaattagcttattaaactggctagaaaccctagggaaaggcttagccaatctcaattggtgcctgtaatcaataatagcataatataa

SEQ ID NO: 40861 - DNA, 201 bp, Homo sapiens
cctctgcctctggggttcaagtgattctcctacctcagcttcccaaatagctgggattacaggcacctgccactatgcctgactattttttttttttttcwttttggtgcttttgtcaagacaggatttcaccatgtcggccaggctggtctcgaactcttgacctcaggtgatctgtctgcctcagcctctcaagtgctg

SEQ ID NO: 40862 - DNA, 201 bp, Homo sapiens
aacaaaggagacttagactagaacatttttatgttgcttttttgggaactgagtttcagagttgaggtttttgacttggcaattcatttgagaaagaacckctgacaggtagtcccagtaaaaagagtggggcagagaacccaaaggcagcatgggacagtggaagagcctgcagggtttggtggcaaacctgaacacagg

SEQ ID NO: 40863 - DNA, 201 bp, Homo sapiens
ttcttaccaggttagatgtggacaagatgctgaattcaagtcagcacactccaaaggcccgtgtgtgtgtgtgtgtgtgtgtgtgtgtgtgtgtgtgtgtgtgtcttcacaaagtttataatgataatttagttgctttgggacacactgggcagcctgtaatattctttccagctctcgaattttgtgattttttttttt

SEQ ID NO: 40864 - DNA, 201 bp, Homo sapiens
tgacagcaatgtgataacatgaatttgagcttcagcatgaagggcttaaataaaatttaaaaacttgacattcagtggacttgaacccagacccaaaacakctgaatctgttcctgaggcatcatcatgaagactaaaagagaactttcaatttggacttataaagagcatgtgaggctgttttataagcagatgttatgt

SEQ ID NO: 40865 - DNA, 201 bp, Homo sapiens
tcttttctctctttctttctttctttttttttttttttttgatatggagtttcattcttgttgcccaggctggagtgcagtggcatgatctcagctcaccrcagcctctgcctctggggttcaagtgattctcctacctcagcttcccaaatagctgggattacaggcacctgccactatgcctgactatttttttttttt

SEQ ID NO: 40866 - DNA, 201 bp, Homo sapiens
cctggggtccacgagaactgctgcctacggaggcagggttcacaaggatctctttggaacaaacaggatgggaaagaaaaaatgttttctgtatgcctttyggggaagatggcaaaccaaagcaatagaaagaatcctatatcagatggatgaatgaatgaaagggaaaattgcaaggggaacacagtttatcagcaagaa

SEQ ID NO: 40867 - DNA, 201 bp, Homo sapiens
taggtctcttatttttaataaatcaaggtgaaattacacctgatatttcttttttttcttttctctctttctttctttctttttttttttttttttgatayggagtttcattcttgttgcccaggctggagtgcagtggcatgatctcagctcaccacagcctctgcctctggggttcaagtgattctcctacctcagctt

SEQ ID NO: 40868 - DNA, 201 bp, Homo sapiens
aggaaactgagactgaaaaaggtgaagctacatgctcaaggtgataaacagctgtaactgggctaacagttgtttgttcgcttgtttgttttttaacttgkttataagcaaaattgcaagacatggtcttcatcagctctgtccctttcatcttacccgcctccgctgtgcaggctgtggcactggagaaccctatctgga

SEQ ID NO: 40869 - DNA, 201 bp, Homo sapiens
cctaataggtctcttatttttaataaatcaaggtgaaattacacctgatatttcttttttttcttttctctctttctttctttctttttttttttttttttgatatggagtttcattcttgttgcccaggctggagtgcagtggcatgatctcagctcaccacagcctctgcctctggggttcaagtgattctcctacctc

SEQ ID NO: 40870 - DNA, 201 bp, Homo sapiens
tagttgagactacaggtgtgcacaaccacacctggcttatttttttgtttgtaagatggggttgcaccaatgttgcccaggctggtctcaaatacctgggmtcaagcgatccttctacttcagcctcctaaagtgctgggattacaggcatgagccaccggcatgtccaacctggaacactttttaatatgtttatttgcc

SEQ ID NO: 40871 - DNA, 201 bp, Homo sapiens
ttacaggcatgagtcaccacgcctggccttcaaacagtcaagtcttaaaggagttaagtgttagacatgttttcttgctgtttcattcatatatatatatrtgtgtgtgtgtgtgtgtgtgtgtgtgtgtgtgtgtgtatacacacacacgaaatgatattatatatattcccaatcaataagtgttgactccattaatca

SEQ ID NO: 40872 - DNA, 201 bp, Homo sapiens
tgctttgccagtttttatcaagagcctcgataatggaaaaagcattgggaatgaaattaggatacctgaattctgctgacaaattgggcagtggtcttagwcatatttagtgactgtgtttcctgtgtctgtcaaatgagaaaatatccctgaacccttttccagctttaaaattaaacccacttttttcctgaaattcag

SEQ ID NO: 40873 - DNA, 201 bp, Homo sapiens
tatagtgcctatagtaagagtcagattaactcttacttaacaagcaaatttaaaaatttccaaacttaggcttatggagaatgacagtattgcctctacayatttgctttcttttggggaacactaattgttatattaccttatgtgtgaaagtgagtccattgaaaattcacttgtgggaaatggaatataggtgatcaa

SEQ ID NO: 40874 - DNA, 201 bp, Homo sapiens
ctacacatttgctttcttttggggaacactaattgttatattaccttatgtgtgaaagtgagtccattgaaaattcacttgtgggaaatggaatataggtratcaacaatttagccatagtattagacacccttttgcattttgaatgagtatctctgaataggaatatgtggcctataaagtccacatttgtgaataatg

SEQ ID NO: 40875 - DNA, 201 bp, Homo sapiens
tgggttatgtcatcaaaacaaagtctttgaaagaggcctaaggatcatatatcattcatgcatctgaaagccttgaagactcgatagatgctcagaagtaytcaagtcagtttgcctctcgcagacattcaagtttatttaggtcacagccttatatgtagtgaaaagcccttatatctgttttttcatgcaaaaacctct

SEQ ID NO: 40876 - DNA, 201 bp, Homo sapiens
aggcggctgtctgtcaaatgggaggagcagagagctacttatgtacaatttaaatatacaaataagattaagaaaagaaagacatgatattctcaccatccaaagacgatcactggcttgagcctctcatcatccaggtcgctccttggcctgttcttgtgtgatttccctgttcacatgtggcatctctcagaactgaat

SEQ ID NO: 40877 - DNA, 201 bp, Homo sapiens
gaaatgttggtgaccagatttgcgcataagcattatttgcacataagcattatttggtttgggccagatttgcacataagcattattttgtttggcccacrttgtattttcaaaaatctagaaatttttcataatacagattcttggctttccttgaaatgcctggagacttggtaacactgagccatattcccaggcagc

SEQ ID NO: 40878 - DNA, 201 bp, Homo sapiens
ccatgtgtctatatagcaagtctccaagggagactatccctggccacacagctcgctgtataatcaagtaccctacaatgcatatctgaaaaccactaggstgggcaggaaaagggaaggggaatcagaagtcagtttgttagggagaataatatgcttccaatttcttaagtggtagtattcttgttttttttcaggtaa

SEQ ID NO: 40879 - DNA, 201 bp, Homo sapiens
ccacgatcagaatctaggctttcttgcttctagtatgttcttactacaagcaggttagtcttttcaaacatggtttgccgtattgctcatgttagagatcratggtcaggtttgggtgctatgttgatgtaatttatccaagggtcatgaatatttatattgtgccctgccaatacttcatgccctgctttgaggttctgg

SEQ ID NO: 40880 - DNA, 201 bp, Homo sapiens
gtaatgggtgggggcagtactggttcagctgggagtcccgagttcctgcttcataagaccccactactccatggctggttacggtggcctgtcagcatccygtgttcagaggaagcagattagcaacttctccccatcccttgtatgtctgagaggtgagctgcaggtaggcagaagtgagcaggatggaggagggtggta

SEQ ID NO: 40881 - DNA, 201 bp, Homo sapiens
acctccaactccctggttcaagcgattctcctgcctcagcctcccgagtagctggaactacaagcgcgcgccaccatgcccagctaatttttgtatttttwgtagagacagggtttcaccatgttggccaggatggtcccgatctcttgacctcgtgatccacctgcctcagcctcccaaagtgctaggattacaggcatg

SEQ ID NO: 40882 - DNA, 201 bp, Homo sapiens
tagcaacttctccccatcccttgtatgtctgagaggtgagctgcaggtaggcagaagtgagcaggatggaggagggtggtatgagaagctcctttcttctrtaataccagattcagggctaggtgctgggctagtaaaaacagtttctgacctcaagaagtatacattttagtggaggttactcacagaaataaataaata

SEQ ID NO: 40883 - DNA, 201 bp, Homo sapiens
tcaccagcccagggtgcagtggcaccatctcggctcactaccacctccaactccctggttcaagcgattctcctgcctcagcctcccgagtagctggaacyacaagcgcgcgccaccatgcccagctaatttttgtatttttagtagagacagggtttcaccatgttggccaggatggtcccgatctcttgacctcgtgat

SEQ ID NO: 40884 - DNA, 201 bp, Homo sapiens
ttttgtttttttgagacggagtctcgctctgtcaccagcccagggtgcagtggcaccatctcggctcactaccacctccaactccctggttcaagcgattytcctgcctcagcctcccgagtagctggaactacaagcgcgcgccaccatgcccagctaatttttgtatttttagtagagacagggtttcaccatgttggc

SEQ ID NO: 40885 - DNA, 201 bp, Homo sapiens
gttttgtttttttgagacggagtctcgctctgtcaccagcccagggtgcagtggcaccatctcggctcactaccacctccaactccctggttcaagcgatyctcctgcctcagcctcccgagtagctggaactacaagcgcgcgccaccatgcccagctaatttttgtatttttagtagagacagggtttcaccatgttgg

SEQ ID NO: 40886 - DNA, 201 bp, Homo sapiens
caaagtgctggaattacaggcctaagccacggcacccaggcttcatgcctttgtgttttgttttgttttgttttgttttgtttttttgagacggagtctcrctctgtcaccagcccagggtgcagtggcaccatctcggctcactaccacctccaactccctggttcaagcgattctcctgcctcagcctcccgagtagct

SEQ ID NO: 40887 - DNA, 201 bp, Homo sapiens
caagcgattctcctgtctcagcatcccaagtagctgggattacaggcgcccaccaccacgcccggctaattttgatattttgagtagagatgggatttcamcatgttagtcaggctggtcctgaactcctgcctcaggtgagccgcctgccttggcctcccaaagtgctggggttacaggcatgagtcaccacgcctggcc

SEQ ID NO: 40888 - DNA, 201 bp, Homo sapiens
ccatgctgttctcatgatagagagtaagtctcgtgtggtctgatagtttcataaagggcagtttccttcacatgctctcttgcctgccatcaagtaagacrtgcctttgtacctccttcaccctctgccatgattgtgaggcctccccagccatgtggaactgtgagtcgattaaacctctttttctttataaattaccca

SEQ ID NO: 40889 - DNA, 201 bp, Homo sapiens
ggtgagctgcaggtaggcagaagtgagcaggatggaggagggtggtatgagaagctcctttcttctataataccagattcagggctaggtgctgggctagyaaaaacagtttctgacctcaagaagtatacattttagtggaggttactcacagaaataaataaatatactacagtgattctttctgaggagtgaaacatt

SEQ ID NO: 40890 - DNA, 201 bp, Homo sapiens
gatttgcatttctctgatggccagtgatgatgagcattttttcatatgtctgttggctgcataaatgtcttcttttgagaagtgtctgttcatgtccttcrcccactttttgatggggttgtttgattttttcttgtaaatttgtttaagttctttgtaggttctggatattagccctttgtcagatgggtagattgcaaa

SEQ ID NO: 40891 - DNA, 201 bp, Homo sapiens
gacttagactagaacatttttatgttgcttttttgggaactgagtttcagagttgaggtttttgacttggcaattcatttgagaaagaaccgctgacaggyagtcccagtaaaaagagtggggcagagaacccaaaggcagcatgggacagtggaagagcctgcagggtttggtggcaaacctgaacacaggtctgaacac

SEQ ID NO: 40892 - DNA, 201 bp, Homo sapiens
ctttcctttttcctttcctttcgagacagagtcttactctgtcacaaggctggagtgcagtagcatggtcatagctcactgcagcctcaaactccttggcycaagccatcttcccatgtcagcctcctgagtagctaggattacaggtgcgtgccaccatgccaagctaatttttattttttgtagagatggggtctcact

SEQ ID NO: 40893 - DNA, 201 bp, Homo sapiens
tggttttgatttgcatttctctgatggccagtgatgatgagcattttttcatatgtctgttggctgcataaatgtcttcttttgagaagtgtctgttcatrtccttcgcccactttttgatggggttgtttgattttttcttgtaaatttgtttaagttctttgtaggttctggatattagccctttgtcagatgggtaga

SEQ ID NO: 40894 - DNA, 201 bp, Homo sapiens
gggtgggaagaacagggagaaagaattgtagaaataataatatcagcctttcaaaaagaaaaacattaaatttgccaggagagtagttgtcaggtataaayccaaagatttggaggtgatcgatcttgtttgatttaatccctgtaggggaaatgggtcagtggaatcttgagagtatttctcagctccattttcacccct

SEQ ID NO: 40895 - DNA, 201 bp, Homo sapiens
ctaaagtttctcagccacatgaaaagataacttttgttgatgtaaaagatcaaatatttgtcagttatggggtaaggtggtaaggctagctgtccatgagmctgggatagaagtgatagccacaggcaggcaggatggtggttaagagcagggactctggactcagatggcctgagctgaatcctggctctgccactattg

SEQ ID NO: 40896 - DNA, 201 bp, Homo sapiens
cattcaggttccttaacctgaaagagtgattgcctcatgtgttttgactaaaatggattagtgtatttgatcacatctatcagacacctgtgggtgaacargtctcaaaacaacttctttagtaaatattttaatgggtgctaacataatgccattaaaaaattttcatttatttgggaacataaaataccaagaccataa

SEQ ID NO: 40897 - DNA, 201 bp, Homo sapiens
ctgggtcaaatggtatttctagttctagatccttgaggaatcgccacactgtcttccacaatggttgaactagtttacagtcccaccaacagtgtaaaagygttcctatttctccacatcctttccagcacctgttgtttcctgactttttaacgatctccattctaactggtgtgagatggtacctcactgtggttttga

SEQ ID NO: 40898 - DNA, 201 bp, Homo sapiens
tgattagaaggcaccaaacttgcaggactagaatctctgctgtgttctgagcaaactacatgatgcaaaaatgtatccggctacatggaaatagaggcggmtgactctccaagttctctatgttcccagagcttgtctgggtttaagtggtggtggcagtaagggggaaagaccagagagtttagagagggtgagatctca

SEQ ID NO: 40899 - DNA, 201 bp, Homo sapiens
gaaactacccaacacttgctcctttctgctaccagatattgctttccttttgcaacctgaaattggtaggaaacaaagaatgaccttggagttgcatcatytatgagactttcaaaccaaattattaccatcccgggcaatatttttctcttgcacttctttcctgctgaattagtctcattgcacacacatctctgtttg

SEQ ID NO: 40900 - DNA, 201 bp, Homo sapiens
agtcagattatctgtcttcattgtaattgccgaaacattcaggttccttaacctgaaagagtgattgcctcatgtgttttgactaaaatggattagtgtakttgatcacatctatcagacacctgtgggtgaacaggtctcaaaacaacttctttagtaaatattttaatgggtgctaacataatgccattaaaaaatttt

SEQ ID NO: 40901 - DNA, 201 bp, Homo sapiens
tataagcctttgggtatatacccggtaatgggatggctgggtcaaatggtatttctagttctagatccttgaggaatcgccacactgtcttccacaatggytgaactagtttacagtcccaccaacagtgtaaaagcgttcctatttctccacatcctttccagcacctgttgtttcctgactttttaacgatctccattc

SEQ ID NO: 40902 - DNA, 201 bp, Homo sapiens
tttgtgactgacactattagcaatgtgctcagagccgtgttttaactcagctagggggagctgccaggtcctattgaaactacccaacacttgctcctttytgctaccagatattgctttccttttgcaacctgaaattggtaggaaacaaagaatgaccttggagttgcatcatctatgagactttcaaaccaaattatt

SEQ ID NO: 40903 - DNA, 201 bp, Homo sapiens
caaacactacaggaagtgtaggcttagtaaccaaacatctttgatttaaactaaataactgtaaaacctgaaaatagtggtctcagcagttctgaattagwtatttacctccctactgagtttggtcagtgaaaaaaaaagttgggagaaatttctggagaactgtgaagtttccactattactgtcttaggtgaaaaaat

SEQ ID NO: 40904 - DNA, 201 bp, Homo sapiens
ccaagtctttgctattgtgaatagtgccgcaataaacatatgtgagcatgtgtctttatagcagcatgatttataagcctttgggtatatacccggtaatrggatggctgggtcaaatggtatttctagttctagatccttgaggaatcgccacactgtcttccacaatggttgaactagtttacagtcccaccaacagtg

SEQ ID NO: 40905 - DNA, 201 bp, Homo sapiens
catggaaagctctgagcttgagcagctctttgagctatactagcagcaaactgagactcccctcaatgtaatcaatcaaaaacatcaaaagaggactgagsaggtgaataatgtaagacattatctaatgtatttagtgccttatcccactaccatgtaaacaataatctcacattaggtgtcctacattttgggaaaaga

SEQ ID NO: 40906 - DNA, 201 bp, Homo sapiens
tgatagtttgctcaaaatgatggtttccagcttcatccatgtccctacaaaggacatgaactcatccttttttatgactgcatagtattccatagtgtatrtgtgccacattttcttaatccagtctatcattgatggacatttgggttggttccaagtctttgctattgtgaatagtgccgcaataaacatatgtgagca

SEQ ID NO: 40907 - DNA, 201 bp, Homo sapiens
ggtcaagaggagagggtgacgctgacaagtaagcagctcactcacaccaaggcttatcagtcatttacaaaaaaaaaaattaaataaattaaaaaaaaaaaccaaaaaacttcacattcttgctatatgcttatgccaggttgtattatttttaacatttttccttaactcacttttttaaaaaatttattttaaatgatt

SEQ ID NO: 40908 - DNA, 201 bp, Homo sapiens
ttctatctccactgactgtggatgagaagaacttcaaattatctttagatgtttactaacctgtcaaagtggaggaaggcattggttagtcaggaacttasaacataaactatccatatattctatcacctgtaattagcttcgattgataatttgtgtgcacctattagtacatatctattttccaactgcgataattct

SEQ ID NO: 40909 - DNA, 201 bp, Homo sapiens
aagagtaagctggggtgatatggtttggctctgtgtccccacccaaatcttatgtcgaattgtaatccctacatgtcaggagagggacctggtgggaggcrattagatcatggggaccgagttcccccatgctgttcttacgatagtgagtgagtgagttcttacgagatctgatggtttaaaagtgtggcatttcccccc

SEQ ID NO: 40910 - DNA, 201 bp, Homo sapiens
aatagtcatgtttacccatatctccttatttgcttaaagccttaagaagattttgatgaccagcatttcagttttcctgtcaactgagtattagacacagwgtaaaatttgactaaaaaagtttgaggacagttttgaaagcttaggcagacctgccgggacactataggaatggcagtttactcacaatttctgccctgt

SEQ ID NO: 40911 - DNA, 201 bp, Homo sapiens
ctttccttccttccttcctttatttgtttgttaaaatatttgagtgctgtctttgtgccagccctttgctgggtgctagggatgttgtggtaaataagttrcatccctcctttctccaccacacgcacacactgaaatctggtcttcactgaaggtgaagacagtagggaattatatgattccagaagatcctttcacacc

SEQ ID NO: 40912 - DNA, 201 bp, Homo sapiens
gtttccacgtagtcctttccttttttttttttttaactactggtaagcaaattcccatttcttcttcccttctttctttattattattattattattattwcattttaagttctagggtacatgtgcacaatgtgcaggtttgttacatatgtatacatgtgccatgtcggtgtgctgcacccattaactcatcatttaca

SEQ ID NO: 40913 - DNA, 201 bp, Homo sapiens
ttctgactctggtagtaccagccaccaccagtggattataaactaagggtatatcacgtacaattctctagctcagtggaatgaggctgaggttgcagggsaattccagtgcttggtgaaattaaaacgaccatgattcatccaggccagtgcaactcagtcatcatcagtaaacccaaagtgtcaccaccacttgggagc

SEQ ID NO: 40914 - DNA, 201 bp, Homo sapiens
atctatgtaagtttaacagctttttttttgaatccttaaaataaactttgatttactcaattgataataaatcaaagatattcagaagattaaatatgccygatcagtggctgtcagatgtttacctcactggcttgctctggtcataactggcaaaaatttgctacttcttgttgtcttttacctcttagcacaggatgt

SEQ ID NO: 40915 - DNA, 201 bp, Homo sapiens
tagattttgtattaactacagatggaggcaagaagaggatggaggtataggctcaacagttagaaaagaagccttaggaacttcccattccatgcagagaycctcagagtatccctgggaggtcataagccagcttttggacatttccagtgaagggaattctactttttgaggtaactcattgcatggctgggtagcttc

SEQ ID NO: 40916 - DNA, 201 bp, Homo sapiens
ttgcaagattatcatatgtgtgagcacaatacataatgtaaaacctcagttgctataagaagatatcagaatggctcacctaggacatttacctaaataartcatcatgcatatgacattgatttggccaataaaatgaggataataacaacacctttctcacgtttacagttgaaagcattaagttgttaagtataaaac

SEQ ID NO: 40917 - DNA, 201 bp, Homo sapiens
atcaaggaagaataactcctaatgttgacatgtataatttcaataaaatttgacactaaatattttctcatttccattatgatttctcttttgatatgggmgttagttagcagtgtcccctgtcaactcagaaactgtaatagctgttactaagatgaaaaacagagctaaaatgaaattatcatcttctctttatagtcc

SEQ ID NO: 40918 - DNA, 201 bp, Homo sapiens
accctccttactacataacagtccccttctgtataactttattcctcttgtgttactttaaggtttaaagaaaaataccagaggcctagatagtccaataytttctttatccagcaacaaggagaaagcctaggtggtgtctgggatttttgaggacctgtcaattaaaaatgtatatgttttatctgaagtctgttgaga

SEQ ID NO: 40919 - DNA, 201 bp, Homo sapiens
tggcagtggttttgggggcttgaagattggtgtttgttgaaggtctgttgctttcaaaagtatatatgtggtgacataaacgtatatatatacattttacracaaatattctaacgtgtattacatgaaatgtaattacatgttctaacatgaaagaggtggagaagtgtgtaatacatgttgtaaaaatgtatatattta

SEQ ID NO: 40920 - DNA, 201 bp, Homo sapiens
taaattattgcattttttaaaaatgtgtatacatttttaaaataaagaaaatgttaaaatttctgaaacacctccatagagttccagagtttggcagaagygtgctttgaaacacgctcgcttacatcttgcggcactcaaatctcaatttgctttccatttcctatttggttgtggcatgtgtgtgttggcttatggaaa

SEQ ID NO: 40921 - DNA, 201 bp, Homo sapiens
agcccactgttctttctgcagcagatacacaattacatgatgctaaagtattcattactgttttagtgcattgccagcaagcagtcttctggttgacccarcatttctgcaagaactctcaggattagcacattgggaatgtacttggaagagagatgttcctaacatatctgtgtataatgtgtgtagtataggtatctg

SEQ ID NO: 40922 - DNA, 201 bp, Homo sapiens
tatagttgcagccatagaagtggcttaggtgacacagaaggtataaaagtgtgtaacagaaacatgatgacagtggggttctagaagctccaagaagagakgggtactgtgaagagggaaggtatctatggcatgggccacacagtgataagaaagataaggatgggaaaagtggacatataatgttataagcaaaaaatg

SEQ ID NO: 40923 - DNA, 201 bp, Homo sapiens
tggtggaacctcttcacacctgccactgaaatgcaggctgccccagggtttgtcttcagccagcttctccacatcccaccctgagccatcttatgcacctwcagcatccactcacatcccgatgttgcccaagtatagaagcccaagccgcacttccctcccacactccaggccccatgacaaccttcctccagtcacctc

SEQ ID NO: 40924 - DNA, 201 bp, Homo sapiens
tcctaagctctccacattcatttccctattttaatctttgcaataatctcacgaatgagccccagattttgccctaattgattaatgaggatcctgagggmctgagagcacatctacttgtgcagggctataccaaaggcattgctgaactccagctcaggcacatctggtgccaaaacctcactgattctccaccccatg

SEQ ID NO: 40925 - DNA, 201 bp, Homo sapiens
tgtatagtagtggatctcaaccttggctgcacattggaatcacctggaaagctttaaaaaacccaaattcttctaataatagctttatttgttccccccccaaactcatataccacagtgtttaaaatagctcatgtgagtatgtaaaaacatcaaagtggttatttccactttgtgttagtttggtagatttgggggaag

SEQ ID NO: 40926 - DNA, 201 bp, Homo sapiens
ttcctcctctcccttgagccatgtagtctgttgtcttaagggtcaagctgataaggggctaattgctgaatcattttgaatggtagttaattgatgcttgrtgtatagtagtggatctcaaccttggctgcacattggaatcacctggaaagctttaaaaaacccaaattcttctaataatagctttatttgttccccccc

SEQ ID NO: 40927 - DNA, 201 bp, Homo sapiens
tcaacttgatttgagctgaggtgaggagggaagaggaaacattgatgtcagggtttgtcagggttcaaccagagaaacagaacaagtagctacaaagtgartatgtgggtatctagatatgtatgaattaaagggatgcattgcaaggaattggcttatgcaattgagaactggctaggcaatttggaatcccataggctg

SEQ ID NO: 40928 - DNA, 201 bp, Homo sapiens
agggactttaattacatctgcaaaatcccttcacagcagcacctagattcatgttggattgcatatttgagtgagtgtatgtgggtgctacagacggccayatctcccttccatctaccaactttcaggagaaggtcttccttgtagcccaccctaatcagaaacatactagaaagggaattatggggatattgtttagcc

SEQ ID NO: 40929 - DNA, 201 bp, Homo sapiens
tcctgtgcctggatctcaaggcccagcccctttctacatctggtctccactgctgcatcctctctgtgcgggcctgtctcctcactctccacatggggtcytcaatccctgttcacgctcatctcagggcctttctcaggccattttcctcctctcccttgagccatgtagtctgttgtcttaagggtcaagctgataagg

SEQ ID NO: 40930 - DNA, 201 bp, Homo sapiens
ttacaaggggacaccattcgagggtggaggggagtaactgatgagttctgtggcttgctgaagttctgaagtgcctgtggaccatcatgtatcctgctcasgaacgtgggtccaagagctcattaggagtctgggctgcagacacagaggatggttccccaacatatgcatggtagttagaaccaggtgactccactcggt

SEQ ID NO: 40931 - DNA, 201 bp, Homo sapiens
tttcagaagttttcagtttgaaagagtaaaactaatttcttaccatgataagtaaaaagctcctttttgttatgtcttagtggtacttcatatcagcaacraaaacacaaaaacttgaaaagctatcaatgacaaaagccatttacctataaaggaatgataaaagacagacttctcaaaaagagtagaagtcagaagtaa

SEQ ID NO: 40932 - DNA, 201 bp, Homo sapiens
gacagctttgaattttccagatcattcctaaactttttttttcaccgcagtagccacccactctctaattttcctgtttctagatgtcctttaggtattgygggttttgtgccattgattttctataataggaaattcaatattaagtaagagttgtcatataggcatttcagctttgtggctctcttgccttctcttcca

SEQ ID NO: 40933 - DNA, 201 bp, Homo sapiens
ccgtatcgcgtggtaccttggaacaaaatgcttttgaaggagctcgggcagtgatgctagaagcagatgttgagcgctcagccgagagcactgactgctcygtaggtgaggggcccccaatctctgcagaaagtgcttagtgcctcactgcaggagcatgccttcatactatctcatggtctgtgttcaatatcaggaagc

SEQ ID NO: 40934 - DNA, 201 bp, Homo sapiens
atgaatggttgaatatctccacaggtagctactctgtgttcaccttacctcacgcaaagtgttgatttattgatttccagagccccagactatcccctacytgctccttttctcttggaatatgtggatgaccataccctccctctttcccctccggcccacttttcccctttaaatactgaagccttcaaattcatcttt

SEQ ID NO: 40935 - DNA, 201 bp, Homo sapiens
agtttatccctaagagtgatcaacatcccctaaccactcatgagaaatcttgatgtacacgagcctttcagtggccttcccagtgtctgaacccagtggayggctgcttctctttcagtggaaggttgactttcctgttttccttcagtaaggagtagagggtacacaaactttaatgtatgtaaattaagaaagcagatt

SEQ ID NO: 40936 - DNA, 201 bp, Homo sapiens
caaataaacaaaaaaaaaaaacctggagattacaaagtgatgagaagctgttaaatgaagtcaaaacagctagaagcgtcttgccagaaccggataggcayatggtgcatgttccaggatctcacggcatcaggtagtgtgctaagaaggaaagtaaataatgactatacatatcgtcatctgatttgtttgtaaggcaaa

SEQ ID NO: 40937 - DNA, 201 bp, Homo sapiens
ggttttatacattggcatgatttgcgtttcttctcccctgattcttcccttggggtgggctgtctgcatgcacagtggcctgccaacagttgggaggggcygcatatgcagtgtgcttactgaagtacgcatgctcatttgtttttcccttatctgttgagtgtttctggaggaaggccatatgatagttaaactcggcca

SEQ ID NO: 40938 - DNA, 201 bp, Homo sapiens
caagctctgtgttctccttttagagtttttgccactgacacgcttccaccccttcaccagctgttttatcttaatcttaaaagcattaaagaagctttcakacttgatgtggatggaggcatgtctaaagaaatgaactgcaccagctacttcaaatgggaaaaacttggaatctggtaatgtctgaatgcagtggccata

SEQ ID NO: 40939 - DNA, 201 bp, Homo sapiens
aatattgaaagcttcagctagagaagaaaaatgttctcaaaattcaaaacatgtctcctggggagactcttcattaggagtgggcatttcaaactcctccrcagttgtctaatgcagcctggcccagcattcagtgacggcactagggctgctccacacacagcttccagaagcatcgggctccggctgccacacagtccc

SEQ ID NO: 40940 - DNA, 201 bp, Homo sapiens
ataaaaatgagcaaaactcaatttctttctttctttcttttttttttttttttttgagacggagtctcgctcttgtcacccaggctggagtgcagtggcaygacctcagctcactgcaacctccatctccagggttcaagcgattctcctgcctcagcctcctaagtagctgggattacaggcgcccaccatcacgcctag

SEQ ID NO: 40941 - DNA, 201 bp, Homo sapiens
gaatctgcaaggacaagaggacaatcgaggatttatggcctccttccgcctgactttaagagtcagtggttatgaaaagagctttggccttcccatcgctyttcagcccctcttcctttttgttttccatgcctcccctgctgtcctttctctgctccctcccgctcagagcctgagccctgtggagtttgccaagtctga

SEQ ID NO: 40942 - DNA, 201 bp, Homo sapiens
tagtaaataacttttggttagtaaaaatatgctttccttgggtaggattttaaaaataaaataaaaatgagcaaaactcaatttctttctttctttctttyttttttttttttttgagacggagtctcgctcttgtcacccaggctggagtgcagtggcatgacctcagctcactgcaacctccatctccagggttcaagc

SEQ ID NO: 40943 - DNA, 201 bp, Homo sapiens
gttcctgccactactcaccctcttataagaccctgtctgtaccatccaaatggcaaattgaagttcccacccaacaagaactattaagaactttaagatayggtgatagcctgcagcctgaaattgacttatttttgacactgttgtgctgattcagatgctaaagattcagaaaacagactataagacgtagatgactta

SEQ ID NO: 40944 - DNA, 201 bp, Homo sapiens
actatgttatctgaatttctaattagagtcctttcatataatcaccacttttttgcgttgtaggctcaagagtattgtgaaatggatgccatctttttctkttttaattgaaagggggaaacaggtgagttcctcaaagatttaataaggaatatcagcaaatgttgccaactgttgtgaagactctgggatttaacaaga

SEQ ID NO: 40945 - DNA, 201 bp, Homo sapiens
agcaatcctcctgcctctgccttggcctcccaaagtgctgggattgcaggtgtgagccatcatgcctggccccacctcattttttttttttttttttttgwaacctggatttaatgaccctctgtctccctgccatgacccttgaggggctttttatgcagtatttatgcagtattaaatctgtaagaaccagtataccat

SEQ ID NO: 40946 - DNA, 201 bp, Homo sapiens
tcagatttcaacctgagacttggtggggacaaaccaaactacagcactcctttatttccttccttatagaaatgtatattgggccaggcatggttgctcaygcctgtaatcccagcactttgggaggctgaggccagcgggtcacttgaggtcagaagttcgagaccagcctggccaacatggtaaaatcccatctctact

SEQ ID NO: 40947 - DNA, 201 bp, Homo sapiens
ttttcttctagtagtttcgtagtttcaggtcttatatttaagtctttaatttgtttttattatttgatttttgtatatggtgagagacagggctctggttycctttttctgcatgtggatatccaattttcccagcaccatttattgaagagactgtcctttccccaatgtatgttcttggcacctttgttgaacatgagt

SEQ ID NO: 40948 - DNA, 201 bp, Homo sapiens
ccgggaagtggaggttgcagtgaatcaggatcactctactccactccagcctgggcgacagagtgagactctgtctcaatacataaataaataaataaatwaattaattacataaaaatgctatagattattgagtttctatatttaagtggtctgctatggtgtactaatagtcattatatgcctttttgaaaaggtgaa

SEQ ID NO: 40949 - DNA, 201 bp, Homo sapiens
agcgactccataggctgaagcaggaagatggcttaagcttgagttcaagaccagcctggacaacacagcaagacttcctctctaaaaataaggaaaaaaaagtgttttaacagacagaactggcctaggtgcagtggcccacacctgtaatcccagcattttgggaagccaaggcaggcggatcccttgaggccaagagtt

SEQ ID NO: 40950 - DNA, 201 bp, Homo sapiens
tattaaaaaatggtgcatctttaccctgtgatcttttttgtataagtataggaaggaaaaaaatcttgtgataaattgattttttttaaaatgaaaatatkaacgggcgtggtggctcatgcctgtaatcctaggactttgggaggccgaggcgggcgggtggatcacctgagatcaggagtttgagaccagcctggccaa

SEQ ID NO: 40951 - DNA, 201 bp, Homo sapiens
caggagttcaagaccagcctagccaacatggcgaaactcccatctctactaaaaatacaaaaattagccaggcatggtgatgcatgtgtgtaattccagcyactcaagaggctgaggcatgagaattgtttgaacctgggaggcggaagttgcagtgagttgagatcacgccactgcactccagcctgggtgaaagagtga

SEQ ID NO: 40952 - DNA, 201 bp, Homo sapiens
ttaagttcttttccatagaaaaattaaaaaataagtttgagtgactttgacatcctcagttgagaaaaacagcagcaattgggtccttgtgcatggaagggccacctcagacttcagttttataacattggcccctgcaaatgctcactcagttgataagcttcccataacttagcatccacatagttgagcttcacatgg

SEQ ID NO: 40953 - DNA, 201 bp, Homo sapiens
ggtaaagaatttgagtgtttgtttaggcatttcagcggcatacctttctcacatttttacttcctctaagctatcctctaaagtagaaataatcccatttytgatcctgttgatgagagtgatggcaaatgcaccccagcactgatagtcatccattggagaattgtttcttttgagaaatacttggtaagaagagaaaga

SEQ ID NO: 40954 - DNA, 201 bp, Homo sapiens
gaagtaggaggtgctcgaggagtaaacgctgaaagaaaaaaaaaacaaaatgggagaggaagaaaggtcttggaagttctcatttgattggtaaaagtgtkgtgttcctggggttcctgttacactcaaggtcacatggatttaatttgagacctttttatagttaaaaatgtcaagatcctttggaagctgagccttcca

SEQ ID NO: 40955 - DNA, 201 bp, Homo sapiens
ccagacttggtggtacacacctgtaatcccagctactcgagaggctgaggcaggagaatcgcttgaacccgggaggcagaggttgcagtgagccgagatcsctccattgcactccagcctgggggccaagagggagactttgtcttgttaaagaaaaaacaaaaaaagaaaaaaaaattttcaaatgtgcagaaaagttga

SEQ ID NO: 40956 - DNA, 201 bp, Homo sapiens
taaaaatgtcaagatcctttggaagctgagccttccatatgcacagaatgtttttattcagaatagctgttactcaacatttgagacagatttgcttcagratggtggtttggctctgtctagcatttgcagccatgatctccactcactaatttagggcatacctagatttccagcacaaatatccccctcctggcaata

SEQ ID NO: 40957 - DNA, 201 bp, Homo sapiens
tttaaatgcaggtttattgagtgcatttcctttttttgagacagagtcgaatcttgctctgtcgctcaggctggagtgcagtggtgtgatccaggttcaaygcagcctctgcctcctgggttcaagcgattcctgtgcctctgcctccctagtagctgcgaccacaggcatgcgccaccacacctggctaattttttgtat

SEQ ID NO: 40958 - DNA, 201 bp, Homo sapiens
atgatcttgaggctgttgtcattacttctcatgcttcatgcccatcacagacatgggggtgtcagcagaaggggcagagatgatgacccttttggctcccygctgcaagtgagtcccagccttctccatggtggtgaagacaccggtggattccatgatatactcagcaccagcattgccccatctgattttggagggatc

SEQ ID NO: 40959 - DNA, 201 bp, Homo sapiens
cagatgtttcctggctggacatggtggctcatacccataatcccaccactttgggaggctgaagcaggagaataatttgagtccaggagtttgaaatcagyctgggcaacatgatgagatcccatctctaccaaaaatttaaaaattagccagatgtggtggcacacacctgtagtcccagctactgagggggctgaggtg

SEQ ID NO: 40960 - DNA, 201 bp, Homo sapiens
caagttcccacagatagccggcggcagaactcgtaccagaacctggatcgccacctgtttttggaggacctacctcctccgtttctgagattttgcttgtkatccgcttagcaacatcagttctttctaagatcagataatactctggacctactctttatccatgaacagtttgctgagcctctgctattttaggggatt

SEQ ID NO: 40961 - DNA, 201 bp, Homo sapiens
ttcctatttctccacaacctctccagcatctgttgtttcctgactttttaatcgccactctaactggtgtgagatggtatctcattgtggttctgatttgyatttctctgatgaccagtgatgatgaggatttttttcatgtgtgtgttggctgcataaatgtcttcttttaagaagtgtcagttcatatcctttgcccac

SEQ ID NO: 40962 - DNA, 201 bp, Homo sapiens
gatatttctagttctagatcactgaggaatcaccacactgtcttccacaatggttgaactagtttacactcccaacagtgtaaaagcattcctatttctcmacaacctctccagcatctgttgtttcctgactttttaatcgccactctaactggtgtgagatggtatctcattgtggttctgatttgtatttctctgatg

SEQ ID NO: 40963 - DNA, 201 bp, Homo sapiens
tgatatttctagttctagatcactgaggaatcaccacactgtcttccacaatggttgaactagtttacactcccaacagtgtaaaagcattcctatttctscacaacctctccagcatctgttgtttcctgactttttaatcgccactctaactggtgtgagatggtatctcattgtggttctgatttgtatttctctgat

SEQ ID NO: 40964 - DNA, 201 bp, Homo sapiens
agcctggtgtggtggtgtatgccttagtcccagctacttgggaggctgaagtgggataatcacttgggcctgggaggcagaggctgcggtgagccaggatygcaccactgcactacagactaggtgacagactctgtctcagaaaaataaaataaaggtacagcaaaacctatttgatcattccacctttgaaaatagatc

SEQ ID NO: 40965 - DNA, 201 bp, Homo sapiens
cttcacacatagtataaatacatgggataggtcaggagaccatgctgcccagggcatttaacttaatggtttctgattcctgctcatcttcagtaaatgcyacacaccccatctccaaggcctgatcctctgggtcacattggatcaccctatagaaaactgggcacctaggtatgaaaatttggagtctgagtttattgc

SEQ ID NO: 40966 - DNA, 201 bp, Homo sapiens
tcaaattaggcctcctctttttcctttttgtgcccataacctggatagtccaggcttcacacatagtataaatacatgggataggtcaggagaccatgctkcccagggcatttaacttaatggtttctgattcctgctcatcttcagtaaatgctacacaccccatctccaaggcctgatcctctgggtcacattggatca

SEQ ID NO: 40967 - DNA, 201 bp, Homo sapiens
attaaaatttgagctcatttcctgctgagaattagttgctacagaaacagtgaatgtttcagtagcggtcaataagatggtgttcagtggatgccgtcctwgtttttaaaatccagctgtgggtttatctatttgggggaggggcaagtgtgggatctgctgctctttaacccaggttcttcactgccagagcagagacaa

SEQ ID NO: 40968 - DNA, 201 bp, Homo sapiens
ggatctgctgctctttaacccaggttcttcactgccagagcagagacaattctgcctgagtcgccgaggcagggaaggctttgtggatggccctagcaggmagcgggctccagcttgcgacctacacgttgttcaggctcagatgttacatggtctttacagggaatctataacaaatccttaatttccagatgctattaa

SEQ ID NO: 40969 - DNA, 201 bp, Homo sapiens
gggtggatcacctgaggtcgggagttcgagaccagcctgaccagcatggagaatccctgtctctactaaaaatacaaaattagccgggcgtggtggcacaygcctgtaatcccagctactagggaggctgaagcaggagaatcgcttcaacctgggaggcagaggttgcagtgagctgagatcatgccattgcactccagc

SEQ ID NO: 40970 - DNA, 201 bp, Homo sapiens
aggtgctttactgagtgatagtacagtgctcaggagacctgaagtgggtagcttctttccacaggcaggtcatcctgatgagtgcagccctcagtggagakgagacccaaaatgggtagctcctatctgcaggcaggttgtcccattgtctctgtgagtctggctgagtctggggtttttacaggcttcagaagggaggaa

SEQ ID NO: 40971 - DNA, 201 bp, Homo sapiens
gggtttctccatgttggtcaggctggtctcaagctcccaacctcaggtgatccgcccacctcggcctcccaaagtgctgggattacaggagtgagccaccrcacctgacccatttagagatctttttacggttttcctgtttatattcatttttctgttgagataatgtttcatatttataagagctctttatattttaag

SEQ ID NO: 40972 - DNA, 201 bp, Homo sapiens
gagagagtaggtgggactgcagttatttaactgtgattttcattctgacttatctgcattacttctgtgaccctccataattgactgtgtttcctactgaycatgtaaggagagcagatgcccttaattatggtgcaaaagatgcaggattgaacctaattatacaacataatgttatggcaaagagttgaggagcctttc

SEQ ID NO: 40973 - DNA, 201 bp, Homo sapiens
aggcatggtggtgcatgcctgtaatcccagctgcttgggaggctaaggcacgagaatgtcttgaacccaggagatagaggctgcagtgagctgagatcacrccattgcactacagcctgagcaacagagtaagactctgtctcaaaaagaaaaaaaaaaagtatgcagaagctactttctttgaatctggtatattctcac

SEQ ID NO: 40974 - DNA, 201 bp, Homo sapiens
gtatacgggctgggtgtggtagctgctgcctgtaatcacagaactttgggaggctgaggcaggcagatcacttgaggccaggagttcaagaccagcctggscaacatggtgaaaccctgtctctactaaaaatacaaaaattaggcatggtggtgcatgcctgtaatcccagctgcttgggaggctaaggcacgagaatgt

SEQ ID NO: 40975 - DNA, 201 bp, Homo sapiens
cccagcactttgggaggctgaggcgggcagatcacgaggtcaagagatcaagaccatcctggccaacatggtgaaaccccatctttactaaaaatacaaamattagctgggcacggtggcatgtgcctgtagtcccagctactcgggaggctgaggcaggagaatcacttgaacccacaaggcagaggttgcagtgagccg

SEQ ID NO: 40976 - DNA, 201 bp, Homo sapiens
ctgtttggtgcataactgcgtaagtaacaccgaattctggcaaattaaataggtaaacatgaacaggatacacgttctattgcaaagtttcccctcccccyaaaaagccaatatttaagaaatgttagccttgatgaagtattcagtttttaagatgtgttttctaacatatgatcaccaaaaatgttttatcattataag

SEQ ID NO: 40977 - DNA, 201 bp, Homo sapiens
acacctgtaatctcagctactcaggagactgagaggccagagaatcacttgagcccaggagttcaaggctgccttgagctatgatcacaccactgctctcsagccttggtgacagagtgagaccttgtctcttagaattcctactttttttgggattcccccattttctcccatgaaaacatgaataatatttaacatgtt

SEQ ID NO: 40978 - DNA, 201 bp, Homo sapiens
ctgaattccaacccagcaccagtgttaccagaggactgcacaagcaatcacagcctgtcttttctcttccttaaggtggggtaaaaatccctatgttgacmagttgttaggaaaagcaaatgagaacatcagtgaaatgagagcatcagtgagaacaagatgtggtacgtggtcagagatagtaaatattagtcttccttc

SEQ ID NO: 40979 - DNA, 201 bp, Homo sapiens
tctctatgttggttaggctggtgttgaactcctgacctcaagtgatccacccgtctcagcctccctaagtgctgagattataggcgtgagctaccacaccyggcctgatcatagttatttatgtataccttatcccctcgttagactaattacctgaagagcttctgtcattcagctgatgtttagagaagttaatttaca

SEQ ID NO: 40980 - DNA, 201 bp, Homo sapiens
taaaaattgatctctaaggaaaaacagatttaactagagaagagtgataataccagcccaacattagttataacatatttacaactattatctcactgaamcttgcagctattctgtgagataaggataactattttttttctacaattcgcacatcagttacaaaacagtagtttcagtataggacaatgtggacagcgt

SEQ ID NO: 40981 - DNA, 201 bp, Homo sapiens
ataaccataataattatcattagtaatattatcccccaggtggaaaaaaaataaaaactagggaccccaatttattaagccaaaaaggaaaaaaaaaaaaagctgaaagttgagtcatgcaagaaactgcctttccttttgttcctaagcaaatagctgcagataaaaggttaaatatctccactggtagctactctgggt

SEQ ID NO: 40982 - DNA, 201 bp, Homo sapiens
tcagaaccatgtggatactctcctgtgtacagagcatgtggcttgagaagagggctcagaggaggtccctgttctgggaagtgtcatgccttgtccctgaaggctctggatgtctggccatgtgttcctgagggaggcagagggatgctgatggaaaggcgtagaaaggaggagatgctcctctaactcgcatggctggat

SEQ ID NO: 40983 - DNA, 201 bp, Homo sapiens
gaattttctacagttcattttcttcatctgaaagatgaaacagtttatataaatcattttcaaagtctgacttctgcttttcccataattatcagtttagrtgacatagagctttgtgcctgttttgtttcttgattttttaaatggatatatattaagatctttaggcttgaaaggtatactttcaaggttttgattgtt

SEQ ID NO: 40984 - DNA, 201 bp, Homo sapiens
agactagagtatggtggcacaatcatagctcactgcagcatccaacttctcctaggctcaagcagtcctttcacctcagcctctcaagtacctgggactayaggcacgtgccaccacactgggtgttttttttttttttttgtagaaacaggatcacaccatgttgaccaggctggtctcaaactcctggcctcaaatgat

SEQ ID NO: 40985 - DNA, 201 bp, Homo sapiens
ttgttttttatttctctcgctctctctctctctctctctctctctctctctctgtctctctagagaggcacggtcttattctatcatccagactagagtayggtggcacaatcatagctcactgcagcatccaacttctcctaggctcaagcagtcctttcacctcagcctctcaagtacctgggactataggcacgtgcc

SEQ ID NO: 40986 - DNA, 201 bp, Homo sapiens
gtgtttttgttttttatttctctcgctctctctctctctctctctctctctctctctctgtctctctagagaggcacggtcttattctatcatccagactrgagtatggtggcacaatcatagctcactgcagcatccaacttctcctaggctcaagcagtcctttcacctcagcctctcaagtacctgggactataggca

SEQ ID NO: 40987 - DNA, 201 bp, Homo sapiens
catatgagatcaagtggtatttgtctttctgtgtctggtttatttcacttagcataatgccctccaggttcattcatgttgttgcaaatggcagaatttcyttctttttgtggctgaataatatcttattgtatgtaaataatatacaccacattttctttaccattcatctgttgatggatgctaaggttgtttcagtgt

SEQ ID NO: 40988 - DNA, 201 bp, Homo sapiens
cacgtgacagccgctaacacctgtaccgcctccagctcacagcgcccccatcccctccgccaggtaccgactcagccggtctccccctcccccaggaggtyacgatcccggtgcgagtctcgcttgggccggcaggggaggggctgagcaacggccaccgcagcagcctgagcccttgcagcctgattatcacatgacccg

SEQ ID NO: 40989 - DNA, 201 bp, Homo sapiens
cttatttatacaactgtagtgatgcctcccccttcccagcctcacttgaccctggcttctgtctgatgctctactgactgtctcgttcctggttctcctgygtaggtacacactggcagctcaggacctggtgatgcgtgcccggggtgtgctgaaggacagaggatggcggatatctaatgaccgactgggctcaggaga

SEQ ID NO: 40990 - DNA, 201 bp, Homo sapiens
gaagttaactcaacttcccggctggaatacctttatgttagactgttcttcgagactcaactcctccccagtgcctttttctctcttttttttttttttttcctcatttttaaacgtagtttccttcaaagctccaggctccttaaaagagccacctacctagccagggcttctaagcctgcatcccagaagctccagtcc

SEQ ID NO: 40991 - DNA, 201 bp, Homo sapiens
tggtggtggtggtaatggtccatttggggatccattgcaaatgtagactaggacttatttttgaaagatgggtcaaaggggagccataaaaagtctgaagmctcatgacaaatagataagggtatatacattaagtaattatcatataaaaatatatgcaaggcgctgacctgggtgcatgactgccctcatgaaaccctc

SEQ ID NO: 40992 - DNA, 201 bp, Homo sapiens
aacaaaagatagtgatctctgaaagatgggaaggaaatggggtgagccctgtgattgtccccactttgagagattgccccctctttaacttatgctcattwgagaggcccccacccaggcagaaccaagcaaaccctctgagttgaagaggagttgagagtctgaggagaccaagaaagctagatttcacagaacagtgtc

SEQ ID NO: 40993 - DNA, 201 bp, Homo sapiens
atcacttactgtgcaacctccagccagttacttaaccattctgtgccccagttacctcgtctgtaaattaggaattctaacaatccctatccctttcagtyattgtgaggattaaatgaattaattcaactcagaaaatatttgcattcctactgtgttctgagaactgaaggcttagttaataatgaagacaaaaacccc

SEQ ID NO: 40994 - DNA, 201 bp, Homo sapiens
ctggtagctactctgggttcatcttatcttatggaaagtactaatttactgagccccagatgaatagataatcgactattccccaacctgttgcttttctyttgcaacatgtgggttaccataccctccctctttcccctccagcccacttttcgcctttaaatgttgaagccctcaaattcatctttggagaaaggcacc

SEQ ID NO: 40995 - DNA, 201 bp, Homo sapiens
acacgcaggccacctctgcatgtcacagccatcaggattctgccacttaaaagggtaaagcggtattctggttagggacaccaccttttctgaatgtggaytctgcagacaacttccttaccccaagtggtgcaggtttgtggatcagagcttcttagggctagtggtgccacagcaggaagagctagactagcccactgt

SEQ ID NO: 40996 - DNA, 201 bp, Homo sapiens
  misc_feature (1)...(201): n = A,T,C or G, or insertion/deletion polymorphism (see Tables 1-2)
agggtaaagcggtattctggttagggacaccaccttttctgaatgtggactctgcagacaacttccttaccccaagtggtgcaggtttgtggatcagagcntcttagggctagtggtgccacagcaggaagagctagactagcccactgttctttctgcagcagatacacaattacatgatgctaaagtattcattactgt

SEQ ID NO: 40997 - DNA, 201 bp, Homo sapiens
ttaccttatcaaaaacacccacttacagagaggttaaaggcagctaccataagtacgcaccaactcctcttgaaacaatctctctgctcagcctctaggawttcccttccccctccctccccttcactggtggaacctcttcacacctgccactgaaatgcaggctgccccagggtttgtcttcagccagcttctccacat

SEQ ID NO: 40998 - DNA, 201 bp, Homo sapiens
catccaaatgcattagagggaacagtacccagtgcttgcacagagccaagaatagtgcctcttccatcaaccaaatgggaaaacctcattcacagtgcatytggaagggtcttgccttaaatagtagtggataattagctgtacacttaacacagtctcatcccacataacacatcttaaagggaaaacctgaaaggatca

SEQ ID NO: 40999 - DNA, 201 bp, Homo sapiens
aacttgctgccttttggtatttctgaaagagtctgttgagagaaacagtatataggaaggatttctattcctcgcacccttctagaaattctcaaatctayccctggtaaagcctgaagctcacacttgtggccctgcacaatggtttcctgaatggcttgcttatgccatgtgcctccactggagaagattgcaagaaac

SEQ ID NO: 41000 - DNA, 201 bp, Homo sapiens
cataacacatcttaaagggaaaacctgaaaggatcaaactctttcaaagtaactatgtccctttgtttgagaacacagctcaagaatatttatggatatayaaaaatatccagtacccaataagctcaaaatcagtgtcaggaatctaattaaaaattgccagacatgcaaagaagcatgaaaattggactcagttgttga

SEQ ID NO: 41001 - DNA, 201 bp, Homo sapiens
gctgccttttggtatttctgaaagagtctgttgagagaaacagtatataggaaggatttctattcctcgcacccttctagaaattctcaaatctatccctrgtaaagcctgaagctcacacttgtggccctgcacaatggtttcctgaatggcttgcttatgccatgtgcctccactggagaagattgcaagaaacagctg

SEQ ID NO: 41002 - DNA, 201 bp, Homo sapiens
ggtaattttttttttgtttctgtggctttttttaattcattttgggccctgagttgtgtaaactgatcctggtttgtatctgtgttgcctgttaggaagcrtttgtgacccacttctaataagcgcaagggccttacagtacatgttttttgtattaacttaattcctaccttcctgtgatctttctagttttattttcca

SEQ ID NO: 41003 - DNA, 201 bp, Homo sapiens
atctgaacttttttgatgacctgcaaggtccttctgactggccccagcccatccctcgagcctcccctgagcctgtcctcttcctaactaagcggcacgcrtggctttgtccagctcctcacacaggccgagcatccgccaccatgcggccttcacacatgcagttgcttctacctgaacttctctccctccatccttctc

SEQ ID NO: 41004 - DNA, 201 bp, Homo sapiens
atccaccacagcctccagaggaggatagagaaggaaaatagcgaaagaaacacttcctgctaaacggtgactcattgggacctcctgctctcgcccccacctagagggtaagacgttagtacaaattgactagaccaagcctatatggtgaaaatggattctgttcaaaatcagcttccaacagagcagaatccacttgcc

SEQ ID NO: 41005 - DNA, 201 bp, Homo sapiens
atttcagaaatgctaaagctgacccaacttcccagagattccaatttaattagtgtgcagaggcgcctggccagcaataccagttttaagcactacagaayattctttttttatttttttaattttttattattattattatactttaagttctagggtacatgtgcacaacctgcaagtttgttacatagttatacatgt

SEQ ID NO: 41006 - DNA, 201 bp, Homo sapiens
gtagcatctagaaccatgggcacttcttactttcctcagaacaccactgttgtactctcacgatgctgtcaaccctgcagtacttctgtctcttgataggrattaaaatgctttccttagatatgtgagatttcaggctagaacagaaaatgattgaagttgtcttcttctaattaacatgtttatacctcatctcagaaa

SEQ ID NO: 41007 - DNA, 201 bp, Homo sapiens
gtgttgaagatgggattagaatccaaatcttctcacctgtaatcattgttctttcctctttcctatgagttagagctctttgtgtttttacctttgttttrtgacacttttcattgtttaaatgtgtttcttatggcctgaatgtgactgaatgttttttagggcaggatttacctcctaccttagcatcatgactttcac

SEQ ID NO: 41008 - DNA, 201 bp, Homo sapiens
agggacaaccagctaatggcctaacacctgtcctgccaccactcagctgatgattggtgttgaagatgggattagaatccaaatcttctcacctgtaatcmttgttctttcctctttcctatgagttagagctctttgtgtttttacctttgttttatgacacttttcattgtttaaatgtgtttcttatggcctgaatgt

SEQ ID NO: 41009 - DNA, 201 bp, Homo sapiens
ggtttgggtgctatgttgatgtaatttatccaagggtcatgaatatttatattgtgccctgccaatacttcatgccctgctttgaggttctgggaggctttctaacttgggactcagaatctacttcatgagaagcttcaaaagcatctagtactgcaccctaactcagattaaaggccactgagtccattgatccactca

SEQ ID NO: 41010 - DNA, 201 bp, Homo sapiens
tatgtcccttttttacatcctcctagcataggaggacattgaagattttaacatctcattataaacttgtttttatctagttcaagggattaaaaaacaamaaaccatggcatagaaatgttaagcaaaagggacaaccagctaatggcctaacacctgtcctgccaccactcagctgatgattggtgttgaagatgggat

SEQ ID NO: 41011 - DNA, 201 bp, Homo sapiens
gttgttaagtataaaacacttgtggttttttgtttgtttgtttgtttgtttttttgagacagattctccctctgttgcctaggctggagtgcagtggcgccatctcggctcactgcatcctccacctccggggttccaagcaattctcgtgcctcagcctcccaagtagctgggactatacgcacgcaccaccatgcctgg

SEQ ID NO: 41012 - DNA, 201 bp, Homo sapiens
gcttagaatagtgcatggggtaggtgctcaataaatattatctattgttgttgttgtttctaatagtggattggcaactgcacttcagtattatttcacartacttatgttttttccataaactaatttagggagaagttgttgatgtataaactaatagtttaagaatattctcgagttgattctagaataaatcacaat

SEQ ID NO: 41013 - DNA, 201 bp, Homo sapiens
  misc_feature (1)...(201): n = A,T,C or G, or insertion/deletion polymorphism (see Tables 1-2)
aatggacaccacctgcttgtttctgaaatgacttcagctccttgtttaatagttagatttctgtttggaacaatcttgtatttgttgaaaggcccaaggantcttttccagttagaactcattaagttctggcatactagattttttgaaaaatgggaaaaagaaaataaaattattaaaaagcagtttccttttgcgaga

SEQ ID NO: 41014 - DNA, 201 bp, Homo sapiens
atgcggccttcacacatgcagttgcttctacctgaacttctctccctccatccttctccatggccccccgtgccagtcctttcagcctcagcctcactgtmccctcctggacctccctgactgaggcatctcccaccttcacagatggatcacggctcctccctatattgtgagctctgtgcagcagaaactgccctctct

SEQ ID NO: 41015 - DNA, 201 bp, Homo sapiens
atctccactcactaatttagggcatacctagatttccagcacaaatatccccctcctggcaatataggacataagccaggggacattggtgtccctagacrgtgcctccacatcctgactccagagtctgtggtctctctgggtgcatctcttctgggtcactcccatttgttctcatttcactatttttgtccctggcaa

SEQ ID NO: 41016 - DNA, 201 bp, Homo sapiens
gtcatgctagatccctattgatttcagtagggatgacaccacgttcaagaacctgaagaagagacccaaagccaacaaacaaggcacaaggttttattatrgggaacttacacacagaaatggcccagtggtggcaggctggacagagctgcaactgcttgtaaaaaggatgcagattgtatagcatcttcacttagcatc

SEQ ID NO: 41017 - DNA, 201 bp, Homo sapiens
tattgatttcagtagggatgacaccacgttcaagaacctgaagaagagacccaaagccaacaaacaaggcacaaggttttattatggggaacttacacacrgaaatggcccagtggtggcaggctggacagagctgcaactgcttgtaaaaaggatgcagattgtatagcatcttcacttagcatcctccccctagcaccc

SEQ ID NO: 41018 - DNA, 201 bp, Homo sapiens
ggcaaaaaagaaaaattgcctataatctcctcccctccccaaccactgttaccaattaggggtatatctttccagccttttttcatacataatcccatttkccccccagggaaattacactctgcatacaggtttgaaacagcttttccccttcctcctcaaatacagagtaatggaaaataatctaaacatttcttaatg

SEQ ID NO: 41019 - DNA, 201 bp, Homo sapiens
agagaagaggcggctgtctgtcaaatgggaggagcagagagctacttatgtacaatttaaatatacaaataagattaagaaaagaaagacatgatattctyaccatccaaagacgatcactggcttgagcctctcatcatccaggtcgctccttggcctgttcttgtgtgatttccctgttcacatgtggcatctctcaga

SEQ ID NO: 41020 - DNA, 201 bp, Homo sapiens
ttttactgatttgatgtgatttcctcctgtctgtttcactctgagcatgaagaactggtcacccactgttctctgaataaacccattttaaatgcgtgaargcgagtgtgatgagattgttcctcattctttccctcaggctaaaataccacttttcctttagcctcttcaaagcttctattttccaccccttgaattgtg

SEQ ID NO: 41021 - DNA, 201 bp, Homo sapiens
ttaagagtgctcttcgcctgtctctattaagctctaggtaatacccagtcattggttctagagctgcagccttctgcctctatttaattctagccttctasctctatttaattcctgtgaatgtctagtcatagacccaactcttctacaccagatccaggctcctcctgtgcctggatctcaaggcccagcccctttcta

SEQ ID NO: 41022 - DNA, 201 bp, Homo sapiens
gcatggaagaaagaatgaggctccgaagaccttaatagccacaactgatggccaaatagcaccttatccttcacaaaggatgttcccagacatgtttgccyttaatccttgcaaccatcctatgaagtgtccagttgaagaggcagattcagtgaggtctgagggattttcccaggttcatacagccagttcacatgacga

SEQ ID NO: 41023 - DNA, 201 bp, Homo sapiens
gcctcttctggactcctaactgcttttcctgcatccattcataccacattcagctcccagaatgatcttgaaaaatgtcagatcatgtcgctcatgcttgmatgcccttctgtggcttctaggtccttgaccaccttgaggagcattgccacccagctccagtcaccctggcttcatttctgttctctaaccatgcaaact

SEQ ID NO: 41024 - DNA, 201 bp, Homo sapiens
ataggcatgaaccactgcgcctggccagtttttttttttttttttcttttttttagtttttttttttttcttttttttttttttttttttagtaatgcagkggtttctttcaaaactcttttagttctagggacatagaactcttgccagtgattaagatggatgattttaaaaccaggaattgaggaggctgatgtcagc

SEQ ID NO: 41025 - DNA, 201 bp, Homo sapiens
cctttgtaatatcctttataatgaactagcaaatgtaagtaaatttttcctgatttctgtgagccactctagcaaattaatcgaaccttaggagaggggggtcttgggaacccagatttatagctggtcagtcagaagcacaggtaaaccaacctggggcttgcgactggcatcagaagtgggagtcagttgggggactga

SEQ ID NO: 41026 - DNA, 201 bp, Homo sapiens
gcgccacggtgtgccaggcaacccgaggacagttcacacagctgtctatagcaggacagctttgaattttccagatcattcctaaactttttttttcacckcagtagccacccactctctaattttcctgtttctagatgtcctttaggtattgcgggttttgtgccattgattttctataataggaaattcaatattaag

SEQ ID NO: 41027 - DNA, 201 bp, Homo sapiens
gatgccttggaaccactgaatggagtttgagttcatgttacatatttaactggccaaaacagtagtaatctttccttccttccttcctttatttgtttgtkaaaatatttgagtgctgtctttgtgccagccctttgctgggtgctagggatgttgtggtaaataagttacatccctcctttctccaccacacgcacacac

SEQ ID NO: 41028 - DNA, 201 bp, Homo sapiens
ttagcttggctatatatttgtgtgtgtgtgcatgtataatttttttctctttctctttcccacctcatgttataggtcattgttgtgtatctagagcagasggagtacttggtgggttctgccacatgggcaaagctttctactgaggctgaaaagctctatgcctattgtctccatgccatgtttacatagcacctgttt

SEQ ID NO: 41029 - DNA, 201 bp, Homo sapiens
gttttaggcttaaccagttcttatttttctaagaagattcagtcactggcttcttagttagtggctcctgaaacagatgcaggatagttgtgctgctgtgmctgagctccaaataatggcctctgagatgtggttgggccacctagtagaagaacttcatggagaggtgcttgaggcacatggggtcatgaagggtggtaa

SEQ ID NO: 41030 - DNA, 201 bp, Homo sapiens
gtttcaccatgttggccaggcttgtctcaaactcctgatctcaagtgatccatcccccttggcctcccaaagtgctggaattacagacatgagccactgcrcccggcctgagttttttaaactattaatgtccttgctttacctccttttctcccattcttgcggttgactcataagaacaccctaaaccttactgttcat

SEQ ID NO: 41031 - DNA, 201 bp, Homo sapiens
ttgaggacaataccttattcccaatggcctcctgattcccacagaaggctttttaattaaccagctcaagatttgtgcacatgaatcaccattgctagctyttctttcctttgacttggaaggttataaagagtctttatttatcatactgattgccatactcaggtgaaaacacagcttttccaagagctttttcttctt

SEQ ID NO: 41032 - DNA, 201 bp, Homo sapiens
tgtttataacatttggtaaatttaacctaaaaagtatcaaaaccaggagtggtgtctgttctcttttcagtgcgttttttcctttgtcgccccacactgaatatttttggccacttggaggacatacgtgggcattcataattaagaattaattaaaagtgtctgcttggaggactttctgctccgtacttaattaactta

SEQ ID NO: 41033 - DNA, 201 bp, Homo sapiens
ctctaaacttctcctctcactttgtttcattaatttgatcttccatcactgataccctttcttccacttgatcgaattggctatcgaagcttgtgcatgcsttacgtagttctcttgccacggttttcagctccatcaggtcatttaaggtcttctctacactgtttattctagttagccattcatctgatcttttttcaa

SEQ ID NO: 41034 - DNA, 201 bp, Homo sapiens
ccaactcctttttctttcctccccctctcaatattaggtttttgagagtcattgtcttaccgtgtaaacctttggttttttgaaatgcccacaagcgccayggtgtgccaggcaacccgaggacagttcacacagctgtctatagcaggacagctttgaattttccagatcattcctaaactttttttttcaccgcagtag

SEQ ID NO: 41035 - DNA, 201 bp, Homo sapiens
ctgggaacaggaggcaccgctgggaatagacccaggaaaggttgctcatggttatcgatcctgcagcctctcctatagacatctgctttggggaacgccgytccctcaaaagtccttgactgggcaatagctcttagatacactttttggagtgtatgagtttcctgagccttgagatgagtggttttggttttttttttc

SEQ ID NO: 41036 - DNA, 201 bp, Homo sapiens
attgccaactcctttttctttcctccccctctcaatattaggtttttgagagtcattgtcttaccgtgtaaacctttggttttttgaaatgcccacaagcsccacggtgtgccaggcaacccgaggacagttcacacagctgtctatagcaggacagctttgaattttccagatcattcctaaactttttttttcaccgca

SEQ ID NO: 41037 - DNA, 201 bp, Homo sapiens
cacagcacagaaattataccagcttcaaaataatagctggaaggccattgccaactcctttttctttcctccccctctcaatattaggtttttgagagtcrttgtcttaccgtgtaaacctttggttttttgaaatgcccacaagcgccacggtgtgccaggcaacccgaggacagttcacacagctgtctatagcaggac

SEQ ID NO: 41038 - DNA, 201 bp, Homo sapiens
tctcccatttcactctcagatgtgaccttctttggaatgataagtcttctgtttaatcacagatgctcttgtttttctttgcgtcatcagagatttcagaraaactacactcctgtttcatagaaacaatgcctgtcttaaccttatcaaattgcttaaggtgagcttcagaatccacagcacagaaattataccagcttc

SEQ ID NO: 41039 - DNA, 201 bp, Homo sapiens
aagctgagtcgtggaagaaactgtttccttttgttcctaagcagatactacagatgaatggttgaatatctccacaggtagctactctgtgttcaccttayctcacgcaaagtgttgatttattgatttccagagccccagactatcccctacttgctccttttctcttggaatatgtggatgaccataccctccctcttt

SEQ ID NO: 41040 - DNA, 201 bp, Homo sapiens
gtggcatgatgagagcggtgctttaacatcacctttgtgaccctatgaagcacggggcagaggagggcagaacaggggctgaggaagcagtggagagctcytgagtcatgcaggtaagctctgatggaaaccagaaccaaggcactagcaggaatcaaggaaagagagggattcctgtgctgctgaggaggtgaaatctac

SEQ ID NO: 41041 - DNA, 201 bp, Homo sapiens
aggaagagaagaggaaaagatagctgaggagcagtgagtgtctagctgaaggcccctctttcctctgtaaaatctaccccgtgtgacttggttaagtgaayatctgctgccttttagttcttttctcttcgggcctcaaattcaaggaacagtttcttctaagttctttcatctgctcctttaatcagcaaacattcactg

SEQ ID NO: 41042 - DNA, 201 bp, Homo sapiens
cgatcctgcagcctctcctatagacatctgctttggggaacgccgttccctcaaaagtccttgactgggcaatagctcttagatacactttttggagtgtrtgagtttcctgagccttgagatgagtggttttggttttttttttccccctggacccaggatatcaccctagaaattcaacagtgtaggccacacattctc

SEQ ID NO: 41043 - DNA, 201 bp, Homo sapiens
aatcctgcattgctttttgcaggaaggtctcaggagagtgggtgtggggagaggggagtcaagggagagcctctgtggattccagaattgcttaactgggrtcatgccaagctcttaaaagccacaagtagcatttgggctccaggcttatgtctgttcctgtccagccaggcctgggtggtgtttcatcccaggcctcct

SEQ ID NO: 41044 - DNA, 201 bp, Homo sapiens
ctctgacttgattacattaagtcgtgccggtgtcatcatatcttcaaataacatacttctgtccttgcagaataatccaagtttgcagctgtttttcatcmagggcaatgtatagaagagatgaacgtgggtttcaagtacatatttgatgaacacaagtgcaacattatctgaggtgatttcttgcaatgtccttggaac

SEQ ID NO: 41045 - DNA, 201 bp, Homo sapiens
gattgaaggctgtgttatcttatagtttaaataatcactatgttgtgattgtgtagagcaggtcagaatgtcctgtattcattcttttagcaaatacttaytcagcacctttactatgttgggtgctatgctgggcactggagtggagttaaggttttaaaaatgatggacacatggccgggcatggtggctcatggctgt

SEQ ID NO: 41046 - DNA, 201 bp, Homo sapiens
accagctcaagatttgtgcacatgaatcaccattgctagctcttctttcctttgacttggaaggttataaagagtctttatttatcatactgattgccatmctcaggtgaaaacacagcttttccaagagctttttcttcttagttcccaaatatttagtcattccaggaatgagataagaggaggagggtaccaagtgac

SEQ ID NO: 41047 - DNA, 201 bp, Homo sapiens
agaatagtcttcgaatgacacgatcaaatgactgcagagcaaactggagggagtccaacagaaagttcctgtctgctgcatccagccccaaccagcactcragccattgtgtttacatggaagctcacacacaggtttcaaaggcaaggccgtgataaccaaggatgtaagtgagatgagtgtggaaaagaccacgtcagg

SEQ ID NO: 41048 - DNA, 201 bp, Homo sapiens
agacggggtttcaccgtgttagccaggatggtctggatctcctgaccttatgatctgcccgcctcagcctcccaaagtgctgggataataggcatgaaccmctgcgcctggccagtttttttttttttttttcttttttttagtttttttttttttcttttttttttttttttttttagtaatgcagtggtttctttcaaa

SEQ ID NO: 41049 - DNA, 201 bp, Homo sapiens
aaggcaacgttttaaaataacaacagctaacagtgatacagtgttaattgtatgccaggcattgatttaagtgtttttcacacagtaactcatttactgtyttgctaagagcaaagacttcctgctatcattagctaatatctcaaggcaaaattcatcattaacaatagcgagtataattccatatttcaactctcccct

SEQ ID NO: 41050 - DNA, 201 bp, Homo sapiens
aaattgttgagcaggtgggggagagctagttgcagaatgaaactgtaaaccagactgggtgtgaggggaggtaatagaagggttatagggtgggggagcaraggctgaagaagagttggagcctgattcaacctggcagggagcgaccggaggaggagcagcctggggaggaggtgagaggtcagatgggttagtagaaag

SEQ ID NO: 41051 - DNA, 201 bp, Homo sapiens
gcaggcaagagatgaccttggatggattcacagacctgaaaagaccatttgcttgatctgggaggtagcacatattgggagccaggtaaatctgcttctcrgtccctgcttggggacttcgggaccatcacttaaaaactcttcttgcctccttgggttgttgaagagaaattagacacagtacctgcttcttggcaggtg

SEQ ID NO: 41052 - DNA, 201 bp, Homo sapiens
aattgttaatactctcccatttcactctcagatgtgaccttctttggaatgataagtcttctgtttaatcacagatgctcttgtttttctttgcgtcatcrgagatttcagagaaactacactcctgtttcatagaaacaatgcctgtcttaaccttatcaaattgcttaaggtgagcttcagaatccacagcacagaaat

SEQ ID NO: 41053 - DNA, 201 bp, Homo sapiens
acccctctccacatctgaaacttcaccattgtatttcattgttctagacacatttatattcttcatcatttcagattcattttatttcaaagctataacagaaggaacgtgttgttacgctatacatgtctgattggatttatacaacaaactgaagccaggttctattgtagttcatttcccattatccccctgtcctac

SEQ ID NO: 41054 - DNA, 201 bp, Homo sapiens
ccatttgcttgatctgggaggtagcacatattgggagccaggtaaatctgcttctcggtccctgcttggggacttcgggaccatcacttaaaaactcttcytgcctccttgggttgttgaagagaaattagacacagtacctgcttcttggcaggtgctttggaaaaaaaaatagtttctttcctttcaataagaggaagg

SEQ ID NO: 41055 - DNA, 201 bp, Homo sapiens
cacctttctggttggccttattaagtgagaagctcaccattctttggttctcatggcacctggaagggtggccataccttgtgctttgctggggactgggycagtgggtgcctgctgtcttaattgttaatactctcccatttcactctcagatgtgaccttctttggaatgataagtcttctgtttaatcacagatgctc

SEQ ID NO: 41056 - DNA, 201 bp, Homo sapiens
tgcaccaccacctggcagttgtgattttcttttaaataactgatgcttcttcacttttggtgtggggaatttttaaattacagattttgcaacaaatattytaacatgtattacacacttctccaccgctttcataacgaaatatgctggcctgagagtggggccttttccaaagaactgactctttattccgaaagtagt

SEQ ID NO: 41057 - DNA, 201 bp, Homo sapiens
attctcttagctctcagatagttcctgtctaggtgacacctgtcttgggttagatgctccttttttttcctccacagttggaaggtttaaataaaatgtasccagtgtggagagtgagatgattgcaattatggaggcagaaggataagaagtttgaagtttaggcaaagcacatgtcccaccaccaagataaaacaaaca

SEQ ID NO: 41058 - DNA, 201 bp, Homo sapiens
ctcggaaccacacagtgtgtgtgaaggaagcatcaccaccataaacagccagttacacagtttggatcaggaagcacagccagagaccagggtttgtggtraaagacaagggggtacacctgcctctgctatgtttgcttaggaccaaatcacgagccttggtttgcctctctgcttcttcgaggccctccttggggatat

SEQ ID NO: 41059 - DNA, 201 bp, Homo sapiens
tcatcttccactaatcatcatggtaatggggctgacaattattggaagagctaagggccagacactatgatgagagctttacctaattcctcatacctaaygcttaaaacagtcctgtgaactaggtacattttacagatgaggaaactgaggcacagagctaagttgctcaaggttacataactcgtaagaggagaaagt

SEQ ID NO: 41060 - DNA, 201 bp, Homo sapiens
gttaccgagttgaaacagcagtttctcacagctcgctttgtggcaccaagtctctgctcctgtgaccactggctattccgctttctcaagtaggatcagcrtacttcgtgccatgtccagccacctggggtggcaagcaagccagggacccagagggacatgtgtgtgggagggggctgaaacttcacccctggcgccagg

SEQ ID NO: 41061 - DNA, 201 bp, Homo sapiens
ctcacagctcgctttgtggcaccaagtctctgctcctgtgaccactggctattccgctttctcaagtaggatcagcgtacttcgtgccatgtccagccacmtggggtggcaagcaagccagggacccagagggacatgtgtgtgggagggggctgaaacttcacccctggcgccaggccagattctccagcagctgttcct

SEQ ID NO: 41062 - DNA, 201 bp, Homo sapiens
tgctctgccaagcttctggggccttgggcagatcctggcctaggtctctcgtaaatacttcctctgaccattgctgcgaacctctaagtgtggtggcggcrgggggtaggctttgctctgcttttagagctgctggaaaagacagatcccattagaaagattccagagatggcagtgttttattttgtcccttagagcccc

SEQ ID NO: 41063 - DNA, 201 bp, Homo sapiens
ttaagatcaggccatgtctgatatctctttcagccagtcttttatctctactgcctactccagagcctgttgcatagaaagtgctcaaatcacatattggytgaattaaaaatcagctattttatttcttagcacctaacacagaatcgaatggaaatcaagttttaaagagcacagagtaatggttcatgtcaccatatc

SEQ ID NO: 41064 - DNA, 201 bp, Homo sapiens
ccaagcttctggggccttgggcagatcctggcctaggtctctcgtaaatacttcctctgaccattgctgcgaacctctaagtgtggtggcggcagggggtrggctttgctctgcttttagagctgctggaaaagacagatcccattagaaagattccagagatggcagtgttttattttgtcccttagagcccctaacttt

SEQ ID NO: 41065 - DNA, 201 bp, Homo sapiens
ggtctggctcaggcgtgctgatagggagaagtggggaggtaggcattttcctagggactgttggttaaacctaccaatcaggtgatttcctccagggcagytgcattgtcggggaccagagcttgggccccattatggagagttttcatggaggaaaaaaagccagcagcctttcttgtggctaaggagatgagcaggtgg

SEQ ID NO: 41066 - DNA, 201 bp, Homo sapiens
tgcctgtgctttgggtatcatatctaaataatcattgccaagaccaatatcaaggagtttttttcccccatgtttttttctaggagttttatgatttcacrtcttacatctaagtctttaggctattttgagttggattctgtatatgatataagaatagggcccaatttcattcttttgcatgtggatattcacttttcc

SEQ ID NO: 41067 - DNA, 201 bp, Homo sapiens
tgttctaaaaattcaggatgtagaccaagaaagatgggacaattatcccagcatttaagggctctaaaaggggaaaatgggtctacttatttcccgttggraaacctgagaaagggcgtttttccaaggccccagatcaaacctactctggggttgaaatagatgggaggttccaggcacggtggctcacgcctgtaatcc

SEQ ID NO: 41068 - DNA, 201 bp, Homo sapiens
ctaaggaaaaggaaactttgagatagttctctttaaacaattgaagagctctcaagcagaaaatagtctggatttatttcatgtttttccagatgggccarcgggtttgggtcagtttaagaaagaatttcccagagctgttctccaatggaatgggctgacattaagtaccgttaaactcctaggacagtgactttctgt

SEQ ID NO: 41069 - DNA, 201 bp, Homo sapiens
ctgggcaacaacagcgtgactccatctcaaaaaaacaaataaacaaaaaaaaaaaacctggagattacaaagtgatgagaagctgttaaatgaagtcaaarcagctagaagcgtcttgccagaaccggataggcacatggtgcatgttccaggatctcacggcatcaggtagtgtgctaagaaggaaagtaaataatgact

SEQ ID NO: 41070 - DNA, 201 bp, Homo sapiens
ctcaagactgtctgatagcctgcaaccctgcaatcccaatgaaaataccaggaggctggaaaagattatttaggaaaaagggaattaaggtaggaaaattkactcccactcagtcgtggtgtaaaatctcactctctgcctctgtagaggctctgatgtcaataaatgtttctagacactaatactcagaatgccaagtat

SEQ ID NO: 41071 - DNA, 201 bp, Homo sapiens
aaaaacccaggtaggccaaagccagtaagccaccattgctgtggtgggaagatagatcttaaatgtagcaatggcaggtgaatgaggaggaaggctggagygcccctgtggagacccaggcccagatgtgccatatcatgaacctttagctttaagctatgtctcttccctgtttgttcctttcaggtttacccccatgcc

SEQ ID NO: 41072 - DNA, 201 bp, Homo sapiens
ggatatgcttgttgtgtttgaggaccagcagggaggtgagggtggctggggagaagggaacaaaggagagggagataggaaatgagggtccagaggagatyagatggctgaggccagtggctgctgagatggaaggtcagtgggagattttgcgcagaggaacatgggaaattgttttagaacgatggctttggccaccat

SEQ ID NO: 41073 - DNA, 201 bp, Homo sapiens
tcagcacaatagttggtattataattatgtcattcttcaattccacaatggtattcattataatacacactactgacttgctttaataatactttgagacrcattcttttgttcactgccacgtgcgaaggtgatgttttaagtgctggggaaatggtgagcaaagcagtctctgcccacagacagcctctattctagtgg

SEQ ID NO: 41074 - DNA, 201 bp, Homo sapiens
aattcatctttggagaaaggtacagactacagactgtctctgtgatctgtgttttttttcttccaggcatgtccttacccttggcaaaataaactgaatggattgagacctgtctcagataccttttggtttacagcacctttctggttggccttattaagtgagaagctcaccattctttggttctcatggcacctggaa

SEQ ID NO: 41075 - DNA, 201 bp, Homo sapiens
taagcagatactacagatgaatggttgaatatctccacaggtagctactctgtgttcaccttacctcacgcaaagtgttgatttattgatttccagagccycagactatcccctacttgctccttttctcttggaatatgtggatgaccataccctccctctttcccctccggcccacttttcccctttaaatactgaagc

SEQ ID NO: 41076 - DNA, 201 bp, Homo sapiens
cttcccaggagaacctctctgtaaaacctcgtatttaagcttccttgatacccatcagcaccccaagccttactcccagcagaattttcagagcccctcaragtgatccagaattcccaccagacctagaaactgttgaggctacagcaaatgggaagcacagttctcctgctcaccctcagtcaccctgtctcatcccat

SEQ ID NO: 41077 - DNA, 201 bp, Homo sapiens
ggaggctaaggcaggagaatcgcttggacctgggaggcagaagttgcagtgagccgagatcgcaccattgtactccagcctggtcaacagagcgagactcygtctcaaaaaaaaaaagaacacagaccatcacttctgctgactttcctctcttcttctctgtagacccagtaccgtagtagccactagttttgtacaaac

SEQ ID NO: 41078 - DNA, 201 bp, Homo sapiens
ttatatagaggacaaacaggctcgaaagatttcttccctagccatcccaatacaaggctgttttggtataaacaacccctgaaggtgagaactggctctcraagcagtttcacactccattcatctctgagctctgctgtttctcacagttttggattcgtgatgagaatactgttgctgggtcacttcattattacacag

SEQ ID NO: 41079 - DNA, 201 bp, Homo sapiens
aactttttacagtgtttaaacatgaaccactttcacacacatcatctcatttatatctgacaacgagcaaggaggcaggtcaagctggctgtgttatatcmatctggcagacgaggcagctgggactgtgaggttaaaacagctcaggcagatcacgcagccaagcgaggggcagctgcggatgtggtgccttggctttct

SEQ ID NO: 41080 - DNA, 201 bp, Homo sapiens
gtgggaagatagatcttaaatgtagcaatggcaggtgaatgaggaggaaggctggagtgcccctgtggagacccaggcccagatgtgccatatcatgaacytttagctttaagctatgtctcttccctgtttgttcctttcaggtttacccccatgccctagcttcctcttcacactttttccccccagattgtctgtcta

SEQ ID NO: 41081 - DNA, 201 bp, Homo sapiens
gtgtttaaacatgaaccactttcacacacatcatctcatttatatctgacaacgagcaaggaggcaggtcaagctggctgtgttatatccatctggcagasgaggcagctgggactgtgaggttaaaacagctcaggcagatcacgcagccaagcgaggggcagctgcggatgtggtgccttggctttctgtctgcttcgc

SEQ ID NO: 41082 - DNA, 201 bp, Homo sapiens
tgtgttgttttcactaagaactgctcttctcagtcactagtatttattgagcttacatcttaaaatcagtattcttttagacaccactgaggaagtaaaasataagatcttatggtcaggcactttggtccacacctataatcccagcactttgggaggcccaggtgggcagatcacttgaggccaggagttcgagaccag

SEQ ID NO: 41083 - DNA, 201 bp, Homo sapiens
ttcaggactattgattaagcagataaatcaattatcttgttaattgaatcttaagagtcatttaatcgatccttttagaccatacttgaatgatagtataygcatgtgttttgctaatcagtttattctagacacagggctcggggttcattgacagcaaaaatagggagatattctaaatcagtccttgcttagcacaaa

SEQ ID NO: 41084 - DNA, 201 bp, Homo sapiens
ctatttgcttgagataattcttcccacctgacacccgtgcccctcctcctcatcctccagccttctaccagtcttgtgtaggttctgataaccattcttgkcagtcaagcattttaattgaagcatgggtttctgcttaattattatctcagcgagcgttggcattgtaagcttttcatttgtgaattgtggaatccattt

SEQ ID NO: 41085 - DNA, 201 bp, Homo sapiens
gcttagatgcttttttatggagagttccctgatttcttccttgcccaaccagaagtaatgtctctccctacttgggatatacatagagcaccttccacgtrcagtgttttcactgtctgccttcggtcacagttgttttgttttgttttgtattttgagacaaagtctcgctctgtcgcccaggctggagtgtagtggcat

SEQ ID NO: 41086 - DNA, 201 bp, Homo sapiens
taattttacttccatttacaaagcagacttaggctgaggcagccttcgttcctcctagtaaagcgtcctttccaagggaagatcccagagaacaaggagcraaccgacctggcagtggttttgggggcttgaagattggtgtttgttgaaggtctgttgctttcaaaagtatatatgtggtgacataaacgtatatatata

SEQ ID NO: 41087 - DNA, 201 bp, Homo sapiens
aaaaaaatcaaaaaagcagtatctctaaaacctaataagcttaatgataaaatactacctctaaaacctcataagcttaattatgcttacagtattctagycccagtatccagatataaatttggggttttgtagttgattatttgggttttctgttcacatatgggtcatacttcaggaaacctgagaacaatgtgagtt

SEQ ID NO: 41088 - DNA, 201 bp, Homo sapiens
agtgtagttgtagttccccattccaaccaagctgtgccttgaaacacgtcccgtgtctcttacacactgaaaggctaagctgggaagtctcatgaagttcrtagaagtagaatatttgcacttagaaatgctggcgtgagattattgtgatcgagatagtcaccttttctatgcctggctgctgagctagggtagaacagt

SEQ ID NO: 41089 - DNA, 201 bp, Homo sapiens
catcctcttgcctcgcctcccaaagtgttaggattataggcatgaaccatcacacccagcaaagcattatgtttctgtgactttgaggatcttaagtaacrtgactattttcatttttgtctctttcctttaagagtttaatgaagcagtgcctttgtccctttcaggcactcgaggacctaggccgaaggaggctctgtc

SEQ ID NO: 41090 - DNA, 201 bp, Homo sapiens
ccccaccactctacctggttaactcctgcttagcctcaggtttcaacttcaatagcccttcctcgaggccatttctgaaccccaggataaattaccacctstctgcaattaatgttattaaaacctccgtaatcttcagcacaatagttggtattataattatgtcattcttcaattccacaatggtattcattataatac

SEQ ID NO: 41091 - DNA, 201 bp, Homo sapiens
tgcctcccctatgcactaaccactaatctacttgctgtctctatggatttgcctattctgaacatttcatataaatagactcatataacatcgttttttttgtctagcttctttcacttagcatagtattttcaagattcatccatgttgtagcatggatctgtacttcctttttatggctgaataatattccattgtatg

SEQ ID NO: 41092 - DNA, 201 bp, Homo sapiens
gtgtgcggttgatggccatggtttatagaggggagggagccgaggcttggaggggctcaacagccagtccagggttacaggggacaagtggaaaggccagyactcaaccccggtccgcctgattccacccaaacagcccagtgtgggcaggcaagagatgaccttggatggattcacagacctgaaaagaccatttgcttg

SEQ ID NO: 41093 - DNA, 201 bp, Homo sapiens
ggatttggtgctcagccctgactgatgatcttcatagcatggtgtgcggttgatggccatggtttatagaggggagggagccgaggcttggaggggctcarcagccagtccagggttacaggggacaagtggaaaggccagcactcaaccccggtccgcctgattccacccaaacagcccagtgtgggcaggcaagagatg

SEQ ID NO: 41094 - DNA, 201 bp, Homo sapiens
ctcctgatgcccgctcccactcgtgcacatttaccctatctggatttggtgctcagccctgactgatgatcttcatagcatggtgtgcggttgatggccayggtttatagaggggagggagccgaggcttggaggggctcaacagccagtccagggttacaggggacaagtggaaaggccagcactcaaccccggtccgcc

SEQ ID NO: 41095 - DNA, 201 bp, Homo sapiens
aggcagaggttgcagtgagctgagatcatgccactgcactccagcctgggcaacaacagcgtgactccatctcaaaaaaacaaataaacaaaaaaaaaaaacctggagattacaaagtgatgagaagctgttaaatgaagtcaaaacagctagaagcgtcttgccagaaccggataggcacatggtgcatgttccaggatc

SEQ ID NO: 41096 - DNA, 201 bp, Homo sapiens
caagttgtgaacaattagtctcacaaatgaaaagcaactgctgcatgcaaagcaggtgatctgaaatcaggaccactgctcctgatgcccgctcccactcrtgcacatttaccctatctggatttggtgctcagccctgactgatgatcttcatagcatggtgtgcggttgatggccatggtttatagaggggagggagcc

SEQ ID NO: 41097 - DNA, 201 bp, Homo sapiens
ttgtgttgtactttgacctgctttgtcaagttgtgaacaattagtctcacaaatgaaaagcaactgctgcatgcaaagcaggtgatctgaaatcaggaccwctgctcctgatgcccgctcccactcgtgcacatttaccctatctggatttggtgctcagccctgactgatgatcttcatagcatggtgtgcggttgatgg

SEQ ID NO: 41098 - DNA, 201 bp, Homo sapiens
agaagagcaataaatgtcggacctccaactctctttttgaatgccattgagcacagggcttgtaactggactcgtggacttttctattctcccccttacargagaggcatttgtcagataacttaaatgttgccttcacctttctactttccaaaaagcatccgtaaaggtcttgattttgctccttaaagcaaagtaaaa

SEQ ID NO: 41099 - DNA, 201 bp, Homo sapiens
ggaaaaatctcgagtttgccaaacccaaagagcagccgccaggtttgctgagcttctctcaaaccttccccagtctaaggcagggatttctggccaagaamtgaattccaagagaggccctcaccaccagtcgagcacaggcctgttgtctggaggtgtgggttgagtgtaggggatgttttgactcccctctagcctaca

SEQ ID NO: 41100 - DNA, 201 bp, Homo sapiens
aaagggaattcatattaggttcaattagtaatagtgtcttcattcagtttttgatacattttcccttttgttctgatgaagttacaacttggatatcactrtcatttttaaagtccaaagaccaattacctcttttgttacctgaattttgtcactgttagttttaggagagatgcagtaagttcagctttagctgtcaaa

SEQ ID NO: 41101 - DNA, 201 bp, Homo sapiens
gttgagtgtaggggatgttttgactcccctctagcctacagtgcctggttttttctgcctaacagcatagagtgcagcctctcccccagcataaggaaaakgttcccagccaggtcccccatcctcttgcttagtgaagtttgccattaaacttttttatactgtcctgaaagagttcagtggagaaggataggatttgtt

SEQ ID NO: 41102 - DNA, 201 bp, Homo sapiens
atctgctgggcactgtgctggggaagctaccgtgaagtaggcagatgaggtctctgtcctcttctacttgtagtcagcccaggtaggcaggcagtcaggcmtccatttacaatgcagtgtaacaggcaaggcaggtgtttcaggagacacatgaagctctgggctttactgagtgaaggctgccttgggttaaaggcacac

SEQ ID NO: 41103 - DNA, 201 bp, Homo sapiens
cctcttgcttagtgaagtttgccattaaacttttttatactgtcctgaaagagttcagtggagaaggataggatttgttaactcaaacgcactggagcccrggctctcctcacattcttctttctcagcaattctcccagtcccagtccagcacacatctcctgttctgtaactcagacagcccagcacaggctggcagcc

SEQ ID NO: 41104 - DNA, 201 bp, Homo sapiens
tctgctgggcactgtgctggggaagctaccgtgaagtaggcagatgaggtctctgtcctcttctacttgtagtcagcccaggtaggcaggcagtcaggcakccatttacaatgcagtgtaacaggcaaggcaggtgtttcaggagacacatgaagctctgggctttactgagtgaaggctgccttgggttaaaggcacaca

SEQ ID NO: 41105 - DNA, 201 bp, Homo sapiens
ttcctctcctctagcccccacatcaaacccatggaatagctgtgggctctcatctcccaatcccagagcgggagggtcttcctagtatttacctgctggargacaggagcagagggaacaagcaccacttacagacaaatagggaccagagaaataactccagggagttcagtgtcccatgtttcatctttccagtcttat

SEQ ID NO: 41106 - DNA, 201 bp, Homo sapiens
acttgtagtcagcccaggtaggcaggcagtcaggcatccatttacaatgcagtgtaacaggcaaggcaggtgtttcaggagacacatgaagctctgggctktactgagtgaaggctgccttgggttaaaggcacacatttgtaatcatgttctttggccgcagaaatagcaatgctggtacactgcatcaacagaattgcc

SEQ ID NO: 41107 - DNA, 201 bp, Homo sapiens
accactgtttgagaaacagataatgtcacaggatccttaccgtgttgcttcaccagccggaaaccactgtggctggtggcatctttgcccaagttttgctygggcccgctgggcctgttctgcccactcagcctggcaggctgcgctcagcttttgctactggcccagaccccatgcctgccaagagtgagccaggcacag

SEQ ID NO: 41108 - DNA, 201 bp, Homo sapiens
ggggtttgggagagaagcattgggaatgaggtgacttactctcttaaggaacccaggtagaccaccagtgactgctgctttctttcactagccctcataargcttcctttcatgatctactctagtatctgtttttggacagtgtctgtctctcacctgggctagagtacagtggtggcttgatcttggctcactgcaacc

SEQ ID NO: 41109 - DNA, 201 bp, Homo sapiens
agcggcttccactgtgggcactggggaacatggtggtgcctgaaagcttggaggtaccaggaactgtagagccccaaagagggcatcacaaccctggctcrgggagctcctaagtctgggttccccaaagggccatggctctttcctcctctcttctctcctcctcattgcctgcagtgtggcaagagggaggcgtgtttc

SEQ ID NO: 41110 - DNA, 201 bp, Homo sapiens
ataaacagttggatctatgtaaggccttaaaaaccatcttgtaaagtggtttgtatacattaagcagtgggtccattgttggtacgctttctggtagaatyttacacaaattctcctgtgtataaacaaacaaggtagagctgcccagactaaactctagaacaaggctgaggttcacaccagctcccttttcccaaggtg

SEQ ID NO: 41111 - DNA, 201 bp, Homo sapiens
ggtggagtccacggcctggagtgagagcttatggtgcttttctggcccactcatggccacccatgaaccaatcagcatgcacttcctcccttctgaagccygtaaaaaccccagacccacaatgcatgtggctcatgccaggctggtgggttaaggatatgatatacctcattctgcacttgaacagctatgttctgggct

SEQ ID NO: 41112 - DNA, 201 bp, Homo sapiens
tagagctgcccagactaaactctagaacaaggctgaggttcacaccagctcccttttcccaaggtggcacctggggctgctctgagggactgtgaagcccmctgaactcggtctgaggctgacttctggtccagaggctgccggacttgcctgtacatcagaatcacctgggggactttgccaacatatataataattgag

SEQ ID NO: 41113 - DNA, 201 bp, Homo sapiens
acaggtaagatgctccaaacctagagcataaagaaaattttcagttgccagctccagtgggacttggttccccctgagagctgtgcttcagcagtttcccraaatctaagcttcccaggaagcccccaccctgctcctgatgttcctctctgtagcttcagaagaactgtacggcactgacctttgagttccttctggctc

SEQ ID NO: 41114 - DNA, 201 bp, Homo sapiens
agagctgaggaagaaatgagccgaggactggcaagaggttgtagcaatttgtgttgtactttgacctgctttgtcaagttgtgaacaattagtctcacaamtgaaaagcaactgctgcatgcaaagcaggtgatctgaaatcaggaccactgctcctgatgcccgctcccactcgtgcacatttaccctatctggatttgg

SEQ ID NO: 41115 - DNA, 201 bp, Homo sapiens
aagagctgaggaagaaatgagccgaggactggcaagaggttgtagcaatttgtgttgtactttgacctgctttgtcaagttgtgaacaattagtctcacaratgaaaagcaactgctgcatgcaaagcaggtgatctgaaatcaggaccactgctcctgatgcccgctcccactcgtgcacatttaccctatctggatttg

SEQ ID NO: 41116 - DNA, 201 bp, Homo sapiens
gctcaccccacatgttcaaaagcaaccaggagtggaggtgagaattaatagtccaccatgagtggtagcaagctcagcaaatggaataatgaacccctcargtttaggtctggccaaaccactagcctctcaagattttggttgcttcacccctaaaatgaaacgattgaagatttctaagctcaacaatttctgtgaaga

SEQ ID NO: 41117 - DNA, 201 bp, Homo sapiens
aaggctttgccattttgtggaccgagggttgtagggccagggagagaaggggaaggactataagaagactgagtcagagcagagaagtgtctcagtggagwctcctaggctagtggggtatgagtcctgggctgcagctgtcctggcggctgcagtgcagggactgtgcaccacatccggtgtggagagggcagcttcccc

SEQ ID NO: 41118 - DNA, 201 bp, Homo sapiens
ctatcttaggacgtcggctctctcaaagctcaccccacatgttcaaaagcaaccaggagtggaggtgagaattaatagtccaccatgagtggtagcaagcwcagcaaatggaataatgaacccctcaggtttaggtctggccaaaccactagcctctcaagattttggttgcttcacccctaaaatgaaacgattgaagat

SEQ ID NO: 41119 - DNA, 201 bp, Homo sapiens
cggcatgattttaagtttcctaagactttcccagccatacggaactgtgagacaattaaacctcttttgcttataaattacccagtctcaggtagttcttyatagcagtgtgagaatgaggtgagcagctgagaggcttttctgactatagtgtatgagctgcaatatgtcgattttcagatatttacttagctcttcagc

SEQ ID NO: 41120 - DNA, 201 bp, Homo sapiens
gttcatgagatggtataataggcagggattgattctgccaaattaggagggaagagcagtgaaaccccaaatccctctccacacctccctatccctccccwcccacattgaagtaggatggacatagaattgtggcctagcccaagagaggcttgatttttattcttactagttttgcctaggctgcctcattctctttcc

SEQ ID NO: 41121 - DNA, 201 bp, Homo sapiens
ttaggaaaagcaaatgagaacatcagtgaaatgagagcatcagtgagaacaagatgtggtacgtggtcagagatagtaaatattagtcttccttccccacyggcttctggaggtcttcacacttaaagattccttgtattcactttcatattaatagagaatgggccaggcacagtggatcacacctgtaatcccagcact

SEQ ID NO: 41122 - DNA, 201 bp, Homo sapiens
atgccctctgacagtgcattcaagcaggctgacaaggaagtggatgagcagattgagaaacgccacagaatgcttatgaagccaactccagagctgcgccygcatttaatataaattgatttattgaatcaagcacagaagccctgttacagaaaccccaggctttatcctcttgaggaccacctaataaagcagccccaa

SEQ ID NO: 41123 - DNA, 201 bp, Homo sapiens
aacacaccagccctttctcacatccccaggctttagcccctgcagcttcctcttcgtgtaaggcatacgatgtccagctcgtccatccaaggaatcagtaycccatttacctttggtgttcccagcagatggtctgtaagctttgaaactgaatgaataaagtgattttgcctaatgcagaggtgggtttcaaacccaagt

SEQ ID NO: 41124 - DNA, 201 bp, Homo sapiens
gttggatcaccgtgaaatgagggggtcttctgaaagtatcttgtatgtttaatttgtttcttccactctccttcccctgtttatgctttgcctcagcaagkatgtcctgaagacctactgtggtttacactatagaagatgctgctagacccacagaggaaatacaaattgggatttctgggccttcagaagttgaatttt

SEQ ID NO: 41125 - DNA, 201 bp, Homo sapiens
tccaaaagaaggttggggaggtgcaagaagggacccatgggaaattgactcgctcagatggtaccttcccagagaggtccaccatgacctcatcttctaaratgactctattgttctccttaccatgctggatttttcttcagagcatctttcatcttctgacattgtaatttatttgggtgtctatctcatctactagtt

SEQ ID NO: 41126 - DNA, 201 bp, Homo sapiens
ggtatggttcgattgagtaaggccaacaacagcttcagggagggaaggtcaggactccggagcccagtggaatcctttgaagcctttgctgctggggaggrtaagcacacagtgggatgacttgcgcggcagtccaattcttctgaaaacatttttgcaaaatgttctgcatcacaggttaatgtataggacacgagttgt

SEQ ID NO: 41127 - DNA, 201 bp, Homo sapiens
acgccactgtactccagcctgggcaacacagtgagagactccgtctcaattagaaagacagaaaatagagtaataagggaggctgaaggggattgattaawttgacttgcttttcttctcagttcatgagatggtataataggcagggattgattctgccaaattaggagggaagagcagtgaaaccccaaatccctctcc

SEQ ID NO: 41128 - DNA, 201 bp, Homo sapiens
atctttcttagtactactcataattattacagtcatgagagcctcaacctattattgagtccttcagtatatgccaggcattgggccaagggttatacatrtattattttaattaatccttgaagtaattcaaagtcaggattgtcaccatgtagaagaagaatggacccttagagattaaatgacttgtccaaggcctca

SEQ ID NO: 41129 - DNA, 201 bp, Homo sapiens
tgggaagaagagaagaattggcaactctgactacagcagctggtgtttatttatgtatttttttttaatcttggtgttcagctgggaatcacatgggccccatacttgaagccctgcctgtcctcttctccccattcccctgtcatcagtttagtgctgacagagactacctggccacgctgcccttttgccccttgcaca

SEQ ID NO: 41130 - DNA, 201 bp, Homo sapiens
cactgtagctggcattgtgttgccttgagagcagtgtatcccgacccgcagccctctgagatgtctcaggccataatttactggcaagtgtctatgttacygagttgaaacagcagtttctcacagctcgctttgtggcaccaagtctctgctcctgtgaccactggctattccgctttctcaagtaggatcagcgtactt

SEQ ID NO: 41131 - DNA, 201 bp, Homo sapiens
aggactacaggtgcaccaccgtgcctggctaattatttttttcttttgtagagatgggggggtctcactgtcttgccagggctggtcttaaactcctgggytcaagcaatcctctcacctcagcctcccaaattgctgggggttacaagcgtgagccactatgcacagcccacctcctgctctttattgaaacccatttcc

SEQ ID NO: 41132 - DNA, 201 bp, Homo sapiens
caacaaatcctcctacctcagcctctgtttagctaggactacaggtgcaccaccgtgcctggctaattatttttttcttttgtagagatgggggggtctcmctgtcttgccagggctggtcttaaactcctgggctcaagcaatcctctcacctcagcctcccaaattgctgggggttacaagcgtgagccactatgcaca

SEQ ID NO: 41133 - DNA, 201 bp, Homo sapiens
tcctaggcccaacaaatcctcctacctcagcctctgtttagctaggactacaggtgcaccaccgtgcctggctaattatttttttcttttgtagagatggkggggtctcactgtcttgccagggctggtcttaaactcctgggctcaagcaatcctctcacctcagcctcccaaattgctgggggttacaagcgtgagcca

SEQ ID NO: 41134 - DNA, 201 bp, Homo sapiens
gtagtagcacaaccatggctcactgtggcctcaacctcctaggcccaacaaatcctcctacctcagcctctgtttagctaggactacaggtgcaccaccgkgcctggctaattatttttttcttttgtagagatgggggggtctcactgtcttgccagggctggtcttaaactcctgggctcaagcaatcctctcacctca

SEQ ID NO: 41135 - DNA, 201 bp, Homo sapiens
cctacagcatccactcacatcccgatgttgcccaagtatagaagcccaagccgcacttccctcccacactccaggccccatgacaaccttcctccagtcayctctcccctcttgtcagcctcccacctctctgcagagcgtcaggagcttaccatgaggcatgtggcagggttcgacttgaacttccctcacacttgatca

SEQ ID NO: 41136 - DNA, 201 bp, Homo sapiens
aagttactttagaatcgcaggctgtcccatgaccctggtgaccatcactgaattattaaacctgaccattcattgtgtgaaattattaaaaaaaaaaaaaagacatcctatccccataaacaaaatgccacataagggaattaaatgcattttattaactcaaaggaaactaattttcaagaggctttacatggaataaag

SEQ ID NO: 41137 - DNA, 201 bp, Homo sapiens
aaggcaagaagggggaccgaagatgtttctgtgctccggcctcctcccaaacccaaccagcccctgtggaatgtgcctctgccgggctaggacttggtttytaatgagaagaaaacaaggctgcctgtggctttctcctccctcctggaggggcactgagctcccagctaaggaaaaaaaaaaaaaaaaagggctcctttt

SEQ ID NO: 41138 - DNA, 201 bp, Homo sapiens
gcgtgtttctgatgaccctctgcttatactcctaggcccgggtaatggcaactattggagtgaccaggggacttggggaccatgacctgaaggtgcatgaytccaacatctacattaaaccattcctgtcttcagctccagaggtaccgcatgaggtttttgtttatattttgtgcaataaaacattttcggcgttattcc

SEQ ID NO: 41139 - DNA, 201 bp, Homo sapiens
tgtggtgaaacctcgtcactacttaaaatacaaaaattagccagacttggtggtacacacctgtaatcccagctactcgagaggctgaggcaggagaatcrcttgaacccgggaggcagaggttgcagtgagccgagatcgctccattgcactccagcctgggggccaagagggagactttgtcttgttaaagaaaaaaca

SEQ ID NO: 41140 - DNA, 201 bp, Homo sapiens
ggactgttctggataaagttgcacgggtatgctccttcatgcttacagtagaaaaagtatgaattaggtggcttgattgctcagcaggaagtggtttttcytacggggatgtgctgtgtcttcctgcttacggttgcctgttagctctacatctgcatggaagaaagaatgaggctccgaagaccttaatagccacaactg

SEQ ID NO: 41141 - DNA, 201 bp, Homo sapiens
attctgtgccggccatttggctatgagaaaagcttagaaaaaataagaccagtggatgatagtctcgaatgtagtaaattcgcatctccttatgcacttgkattatgtcactgttcacctatgtttgtgcaagcatggctgaaggactaacatcaaaattcagaaactggtttctgtaagaaatttactctaaatgctgag

SEQ ID NO: 41142 - DNA, 201 bp, Homo sapiens
aggaagaaaatgggaagtaataaattgagaaagcaagagtggattttccctcaggaagttaagcacctaagggaaaacagagtggatggtgaagagagaascaatctcaaaggaagttatcttggaataggaaataaccatattgaagaatgaaaccttaattacctacagccctcagggaaatgagtttcctgggtagcc

SEQ ID NO: 41143 - DNA, 201 bp, Homo sapiens
acatctctgtttgccttttttttttttttttttttttgaaacggagtttctctcttgttgcccaggctggagtgcaatgacgcgatcttggcttggcgcgrtctgggctcaccgcaacctccacctcccgggttcaagcaattctcctgcctcaacctcccgagtagctggggttacaagcatgcgccatcacacccggct

SEQ ID NO: 41144 - DNA, 201 bp, Homo sapiens
ttggttattttatatttcttagaatttgttttggaaatgttaatgtaactgaagttcttgtatttctaagtgttcataaaagtatgatgttttggccgggmgtggtggttcacgcctataatcccagcactttgggaggccaaggcgggcggatcatgaggtcaggagatcgagaccatcctggacaatatggtgaaaccc

SEQ ID NO: 41145 - DNA, 201 bp, Homo sapiens
aggatcttaagtaacatgactattttcatttttgtctctttcctttaagagtttaatgaagcagtgcctttgtccctttcaggcactcgaggacctaggcygaaggaggctctgtcatttttaactcttggcttccaagagctcttgaggcatctccatccagtgagacagaaggggacaagagtgtggaggagcactcaa

SEQ ID NO: 41146 - DNA, 201 bp, Homo sapiens
tggcatcggagctgttctggaggaacacgttgctactgacatgggagcaggctcaccgcattcaaatgacatatggtattaactcccccacacacaccttytggatcacacatcctggctccgtgtgtgacgacacactccacctccgtgaatttattattgcggctgattttctcccatctgtgaccaattgaagacatg

SEQ ID NO: 41147 - DNA, 201 bp, Homo sapiens
agtgctgcattggaaagtagggggtcatgcctcaaaatgtaagtaagtgcccaccttctaggaagcctgaggtttatttcagggattgccgtctgcccccmgccccccttctctttttttcttctctgtttctattcttttatggcagtggtggagtgaggcagggatttttttttttttttttcgtgtttttgacattcc

SEQ ID NO: 41148 - DNA, 201 bp, Homo sapiens
catgtttcttcacttgtgaattagagattacacaattcctttcatacctactcgacaggattgttttgaggattgttattatgggaaagggcttggaaagygtgaagtgttcatgatcattgaataggggcgccagtgacttagtgttgctctttccactgatattttccccctgcccctgggatataaagtgatctctgt

SEQ ID NO: 41149 - DNA, 201 bp, Homo sapiens
aataattttttttcttatttggaccacatcttaagtgttttcagttccgggtaccattttttgaggacactggccaaccagaaagaccctagagggccacyaccacagtattcagtgctcagttactgtttgttggatgcatggggactagagtggttaggatcctccaggtcctgtgaagaacagttgaaagaactaagg

SEQ ID NO: 41150 - DNA, 201 bp, Homo sapiens
gcacggttccagccctcttctctccctgcttctcggcctcagggctctcactagctgccggcgtccaggcctcggcggggagctctttacttacactggcyatttccctcttctccccactccctcttcccccagcccaaggacgcggcgtctccagccccggtatgggtggtggaggggtgggtggcagcgctggagcgt

SEQ ID NO: 41151 - DNA, 201 bp, Homo sapiens
ctctataaattgagcttactcagttttggccttatttttttacccaggccccatgtcacccagtcctaaaacagtaaccgtgtctacataacgggttggcscctggtgcatccctggaaaagtcaaaggacgcacacttcgaaattctgcagaacgtatttatacatggttcagaaatcttgcgtatctgacttatagcca

SEQ ID NO: 41152 - DNA, 201 bp, Homo sapiens
  misc_feature (1)...(201): n = A,T,C or G, or insertion/deletion polymorphism (see Tables 1-2)
atttcctccctcttcaagcatataaagacagtattttctggtttggtaaaagacacacacacacaattctgtagggagaacaactccctataaaggaagangtagtcagtgtggtgagtggatggggtctcagggaaaatgaaatccctagcagtcggtgtcagggcagcaggtcactaattgagtgcaaaccttttttaa

SEQ ID NO: 41153 - DNA, 201 bp, Homo sapiens
atgctccctgaagagtactctttcaatagacttcagaatgtgttacctgaaaagtgctcatgatgaatcaagacatcactgtgttttccatacttctgaaktagagattgtccactaacagcttagggaaagcagagtacccgctcagctgctctttttctggtgtggtcagaccagctgggtcctctgaaacatgaatcc

SEQ ID NO: 41154 - DNA, 201 bp, Homo sapiens
gacagagtgagaccttgtctcttagaattcctactttttttgggattcccccattttctcccatgaaaacatgaataatatttaacatgtttacatcttarcatttataatcttctgattctgggtgactttttgttcccaagccaaaatcccatttggagaaagaacatattttgttgtattttgtgctttctacagtct

SEQ ID NO: 41155 - DNA, 201 bp, Homo sapiens
aaaaaaaaagacatcctatccccataaacaaaatgccacataagggaattaaatgcattttattaactcaaaggaaactaattttcaagaggctttacatkgaataaaggcatgttggcacatcaagttttgtataaaaggatacatttaacagtactttaaaatagttctattgagtatagtagtctcttaaaattatac

SEQ ID NO: 41156 - DNA, 201 bp, Homo sapiens
cacaggatggaattaacatacagcacggagaatgagcaagtcgcagttacacacaacatggatgaatttcgcagacttaatacccagcaaagagggcatcmtgtaggatttcagatgaagcacagaaacaggcaaggccagtcttgaagttggaatagtgcccctttggggcagtgacagtgattggatggggtgctgatg

SEQ ID NO: 41157 - DNA, 201 bp, Homo sapiens
cttttttctaaagttaataaatacagcatgtgttttaacatcagtagctacttagaagtaaggaaatgtacttaggaattctgaataatggggcttaaatygtaagtgaggttttatgtgagtcccctgtaaaatttaatttgggagatttttttacctaagttttacttaagcagagtcaagttttttgtttgcttgttt

SEQ ID NO: 41158 - DNA, 201 bp, Homo sapiens
ttgcactccagcctgggggccaagagggagactttgtcttgttaaagaaaaaacaaaaaaagaaaaaaaaattttcaaatgtgcagaaaagttgaaaccaktgtagacttaatacccatatgactgccatctagattctgtaattcacattttgttagatttgctttatcatttatctgtgtgtgtacccatttctgtgtc

SEQ ID NO: 41159 - DNA, 201 bp, Homo sapiens
ctgggggccaagagggagactttgtcttgttaaagaaaaaacaaaaaaagaaaaaaaaattttcaaatgtgcagaaaagttgaaaccattgtagacttaayacccatatgactgccatctagattctgtaattcacattttgttagatttgctttatcatttatctgtgtgtgtacccatttctgtgtccatccatcagtc

SEQ ID NO: 41160 - DNA, 201 bp, Homo sapiens
atcacaggatggaattaacatacagcacggagaatgagcaagtcgcagttacacacaacatggatgaatttcgcagacttaatacccagcaaagagggcawcctgtaggatttcagatgaagcacagaaacaggcaaggccagtcttgaagttggaatagtgcccctttggggcagtgacagtgattggatggggtgctga

SEQ ID NO: 41161 - DNA, 201 bp, Homo sapiens
ataatactttgagacgcattcttttgttcactgccacgtgcgaaggtgatgttttaagtgctggggaaatggtgagcaaagcagtctctgcccacagacarcctctattctagtgggtgaagcagataatttgcaaataaatatgtagtgtgatgacagctacctgtaagtgcagggaagagtccaaagaatgagacagac

SEQ ID NO: 41162 - DNA, 201 bp, Homo sapiens
ttctcaacatcatgagcccttttattatttcattttcttggatgaattccttgtgaaaaattttgtccagcaagctgtattaaataagcattaaattactyctattaaaaaaaattaaccagatacatcatatctcctaatcatgaaggtgtagtgaaaatcatattgaactgataacatttcagccaaaagcaaaggatt

SEQ ID NO: 41163 - DNA, 201 bp, Homo sapiens
aggaggagcaccaaggcatgctgagcctttcaacactgagttgtaggagatgcgtcagggattcagtacgtcataatcagggttatcaccatatgaccttrgacaacttggagaattttctacagttcattttcttcatctgaaagatgaaacagtttatataaatcattttcaaagtctgacttctgcttttcccataat

SEQ ID NO: 41164 - DNA, 201 bp, Homo sapiens
attcacttggtgttcaaggcttattataatttggtctggacttctctgatctttgttctcctgcaccagccagaatgaacttgctgtttcccttacatgaycttaggtttcccatatttgcttaaactattccttttgccaagaatgccctttctccccaactccaaacatccaaattctttttttctctggagtttagct

SEQ ID NO: 41165 - DNA, 201 bp, Homo sapiens
tgataacatttcagccaaaagcaaaggattaacctttgttaaccttgagtacttcttgcccacaatgttagtcattagcttctcccccagcccccaccccscaacatttaaaacaggttagatctcctatttctacctttccaggtcttcaaggagcctggaccacaggctaggactctctgctcacaggtttggattttt

SEQ ID NO: 41166 - DNA, 201 bp, Homo sapiens
caggtttggattttttatcacctgagttaccaacaaactatactcagatgagtgtcaagatcattttgtttgggtttcagaagtgtagcaccttcctcagraacactattttaacgtccctgatgtcctctttcttgttgaaaaacagtcttttaatagttttattttcttgctttccaaagtgctacaagttgcccgaga

SEQ ID NO: 41167 - DNA, 201 bp, Homo sapiens
taaattcatttttatgtgctcgtcttctattagtgtttaaactctgaaatctatttacttaaaatatgaggcaattttcttgtttttaaaatatggcctgyctcaatttgcaaaacatccttgattcttattttgtttctctaaatacgtgtatgtgtgtgttttttctttttctttttgctattaggcattcatgcagcc

SEQ ID NO: 41168 - DNA, 201 bp, Homo sapiens
gtttcagaagtgtagcaccttcctcaggaacactattttaacgtccctgatgtcctctttcttgttgaaaaacagtcttttaatagttttattttcttgcyttccaaagtgctacaagttgcccgagaggcacaatgcatgtcagctgcaagtttaattaaactcatgctgagactattatttttctagcagagtttgacc

SEQ ID NO: 41169 - DNA, 201 bp, Homo sapiens
ctcagcctcccgagtagctgggactacaggcacacaccaccatacccagctaatttttgtatttttagtagagacagggtttctctatgttggttaggctkgtgttgaactcctgacctcaagtgatccacccgtctcagcctccctaagtgctgagattataggcgtgagctaccacacccggcctgatcatagttattt

SEQ ID NO: 41170 - DNA, 201 bp, Homo sapiens
ccggtgccagaatccccaagctggggcccatcctccccatccctttgtgttgagctgctgttgcaggatgcacactgtagctggcattgtgttgccttgaragcagtgtatcccgacccgcagccctctgagatgtctcaggccataatttactggcaagtgtctatgttaccgagttgaaacagcagtttctcacagctc

SEQ ID NO: 41171 - DNA, 201 bp, Homo sapiens
  misc_feature (1)...(201): n = A,T,C or G, or insertion/deletion polymorphism (see Tables 1-2)
aaggtatgtagatatctaattagggtcgactaaaagttgaaaaaatgtaaaattgaaagctcttactgacccttccaggaaaaaaagaaatgaagatcacnactagatctgatttcagccttttcatttagccccaagttgtctgtaggtgggtgacctgaggacatctacatggctgtcagaattgtgctgccacttggc

SEQ ID NO: 41172 - DNA, 201 bp, Homo sapiens
tgtataccttatcccctcgttagactaattacctgaagagcttctgtcattcagctgatgtttagagaagttaatttacaaacaagttggtcatatatttkgtttaaaaaaaatcatgtgtcttaccatataggaaacagtatcgatttctatgttgactttctggatatatcatttagaaatttttttgcttccaaattt

SEQ ID NO: 41173 - DNA, 201 bp, Homo sapiens
atgttagcgacatctagcgcatacccttctttctccgtgtgggcacatgggaggcttacacttctctgctccctttgtaggtagatgagtccatgtgactmgttctggccagtatatttgagcataaatgaagtgtcacttctaggctgatgcatataattgtcattggaagaccttccagtattgtcttcctcttgaatg

SEQ ID NO: 41174 - DNA, 201 bp, Homo sapiens
tacacaaagacaagacaaacctcttttcctgaagttgtctagcaggagtcccatccagccgaacaagccactgtaggaaggcttccccaggacatgagtcrggagctgaaccataaagcagccagccagacagtggagagctggaaaggaaagcgagtgtgggtgcatggaagggcagagtaggatgcgcctgggaaactg

SEQ ID NO: 41175 - DNA, 201 bp, Homo sapiens
gaacatttcctccctttcttccccatcttcattaacaattttatccatatcactttctttggaacttgaagaatttacctatagccttgcttctcccttargctctccatggggtcccttctgctgtgatctttccttcactctgcctgcccataccatatgctttgcatgagcctgcatttatatttgttcaaaatgtga

SEQ ID NO: 41176 - DNA, 201 bp, Homo sapiens
ttctgctgtgatctttccttcactctgcctgcccataccatatgctttgcatgagcctgcatttatatttgttcaaaatgtgagtataaattatagtagcygtaaaggacatggtggatactccgtgcctgtggaatcatctacaaactaatggtttttgacagtgccaggtggaagcagttggataatgctgaggcttca

SEQ ID NO: 41177 - DNA, 201 bp, Homo sapiens
attgccctgtagtgagttaatacctgcgtttgtcttattagctttgaaaaacaaaaaacagattgagtctgtatattgattcagacttaccttctgggatrtcatagtagaaggttaactactcttgtacattctgtacatttctgccaaatctcgtgtgatggccattaagatgctgctcaccaattctcaacttcaagt

SEQ ID NO: 41178 - DNA, 201 bp, Homo sapiens
gaaggttaactactcttgtacattctgtacatttctgccaaatctcgtgtgatggccattaagatgctgctcaccaattctcaacttcaagtctcctcctsctgggcacactgctcttcccctcctattccttctgcctcagcaaggggtgaccctccagattgtggaagccctgtccttcctgagagaagagacacggag

SEQ ID NO: 41179 - DNA, 201 bp, Homo sapiens
cagcttccagggttccagtaatatgttgtaatttttttctcattaataaacattcacattagtatctaaatttgtattcataattacttttgcattcttgrgagcccccaaaatttcataaacctcagacctcacaaaacatgtatccccctgcaaaaagggaaaatggggagttctaaggatactttgttaggctaaagc

SEQ ID NO: 41180 - DNA, 201 bp, Homo sapiens
gcaaggggtgaccctccagattgtggaagccctgtccttcctgagagaagagacacggagccaacctgaaatggacgcgtagagtgaatgaaaaataaacmtctgttactgccaccataatgtagcccgcaagttttatcagtacttagaaaagtaaagttaatggttgtttggggaatgaaggtggttctagattttact

SEQ ID NO: 41181 - DNA, 201 bp, Homo sapiens
aaagttaatggttgtttggggaatgaaggtggttctagattttactgtcctaggcagtaagttgggactgtgaagaaataattttttctgctaaatgaatrttgttagcttcataagtagtttttcactatgttatctgaatttctaattagagtcctttcatataatcaccacttttttgcgttgtaggctcaagagtat

SEQ ID NO: 41182 - DNA, 201 bp, Homo sapiens
caactgttgtgaagactctgggatttaacaagaaccaagacaagacctgaggctttgagaattaaatctagcaaaggagataagcaacctaaggatcaggmgataaggggtgtcattggagtacacatgtgtgagggacaggatgagagggctaaccaaccagtgttctggtttgggggaagttttcttggggagatgaca

SEQ ID NO: 41183 - DNA, 201 bp, Homo sapiens
ttgagaattaaatctagcaaaggagataagcaacctaaggatcaggcgataaggggtgtcattggagtacacatgtgtgagggacaggatgagagggctamccaaccagtgttctggtttgggggaagttttcttggggagatgacagtggttcatttcttcaaacaaaatttgttagacatctgtcctactttgtgacag

SEQ ID NO: 41184 - DNA, 201 bp, Homo sapiens
caggatgagagggctaaccaaccagtgttctggtttgggggaagttttcttggggagatgacagtggttcatttcttcaaacaaaatttgttagacatctrtcctactttgtgacaggtgatggagtagatgatgggcatgcagtagagggaaagcgtggtgcctgcccttgcagagtgcacaggcaaagctaggacctga

SEQ ID NO: 41185 - DNA, 201 bp, Homo sapiens
tgcccttgcagagtgcacaggcaaagctaggacctgaaggatgagtgattagcaggaatcagccaacccattctctgaaagtagaaactgatgtgcaaagrctcagaaataagtaaatgctggggttgaaagatgaggctcaagaggagctggggactggaggatgggtgccctcacacactgtaagatctccaaacggac

SEQ ID NO: 41186 - DNA, 201 bp, Homo sapiens
gagaaaaagaaaaagaaatagtgtttcattgcgtctatgctcagggattgataagtattgatttattttgttagtcctagtttaatttaaagttgacttayggggatttatcaattgtacatattttctaggttgaaggaaggccttttccaaacaaccagagctgaggacccagatgggcagtatagaatggtgatggtt

SEQ ID NO: 41187 - DNA, 201 bp, Homo sapiens
tgtcttcctgcttacggttgcctgttagctctacatctgcatggaagaaagaatgaggctccgaagaccttaatagccacaactgatggccaaatagcacyttatccttcacaaaggatgttcccagacatgtttgcccttaatccttgcaaccatcctatgaagtgtccagttgaagaggcagattcagtgaggtctgag

SEQ ID NO: 41188 - DNA, 201 bp, Homo sapiens
aagaatcagaacaagaaagcccaagctccaaggcagaactagtggaaatgaggttagtgggagcccgccctgatcccccttatctggaaaactatttaagrgaataaccagaatggagaaagccagagagagggggagagaacctggcattctcccaggcaagcccccaccagtctcagcctctttatctctgcctgtgca

SEQ ID NO: 41189 - DNA, 201 bp, Homo sapiens
aggctcggacctgcccctgcgtttcccctacgggcggccagagttcctggggctgtctcaggacgaggtggagtgcagcgccgaccacatcgcccgccccrtcctcatcctcaaggagactcggcggctgccctgggccactggctacgcagagtgagtgcagcgacaccggcggcgcccctgctctcctcgcggcccttc

SEQ ID NO: 41190 - DNA, 201 bp, Homo sapiens
aggtaattaaggtcagtaaatgaattgtacaagataacaaacatatttcttggaaatctgatatgcaagaaaaactaacagttttgagctctacctttaayttaaaaatgtgttaaagtaaaaattgccttttgggacattaaggagaacttttacatcgtagggtttaaaaatttgacaaactcgtataatttcagatct

SEQ ID NO: 41191 - DNA, 201 bp, Homo sapiens
aatttcagatcttgtcatattgttgggggaaatatctttctgatgatcacagtgccactctgctcaatttttgctagccccactcagactttggagtgccktgtagggaccacatatctgatacagatatcattagaccccctgaagaataccagtaatttacattacttctagcttttcaggtttttagctgatttgctt
